(19) United States
(12) Patent Application Publication
(10) Pub. No.: US 2023/0392137 A1
(43) Pub. Date: Dec. 7, 2023

(54) OLIGONUCLEOTIDE COMPOSITIONS AND METHODS THEREOF

(71) Applicant: WAVE LIFE SCIENCES LTD., Singapore (SG)

(72) Inventors: Prashant Monian, Arlington, MA (US); Chikdu Shakti Shivalila, Woburn, MA (US); Subramanian Marappan, Acton, MA (US); Chandra Vargeese, Schwenksville, PA (US); Pachamuthu Kandasamy, Lexington, MA (US); Genliang Lu, Winchester, MA (US); Hui Yu, Arlington, MA (US); David Charles Donnell Butler, Medford, MA (US); Luciano Henrique Apponi, Lynn, MA (US); Mamoru Shimizu, Arlington, MA (US); Stephany Michelle Standley, Wakefield, MA (US); David John Boulay, Cambridge, MA (US); Andrew Guzior Hoss, Cambridge, MA (US); Jigar Desai, Cambridge, MA (US); Jack David Godfrey, Arlington, MA (US); Hailin Yang, West Roxbury, MA (US); Naoki Iwamoto, Boston, MA (US); Jayakanthan Kumarasamy, Arlington, MA (US); Anthony Lamattina, Amherst, NH (US); Tom Liantang Pu, Boston, MA (US)

(21) Appl. No.: 17/953,292

(22) Filed: Sep. 26, 2022

Related U.S. Application Data
(60) Provisional application No. 63/248,520, filed on Sep. 26, 2021.

(30) Foreign Application Priority Data
Nov. 8, 2021 (WO) PCT/US2021/058495

(51) Int. Cl. C12N 15/10; C12N 15/113

(52) U.S. Cl. CPC C12N 15/102; C12N 15/1135

(57) ABSTRACT

Among other things, the present disclosure provides oligonucleotides and compositions thereof. In some embodiments, provided oligonucleotides and compositions are useful for adenosine modification. In some embodiments, the present disclosure provides methods for treating various conditions, disorders or diseases that can benefit from adenosine modification.

### CROSS-REFERENCE TO RELATED APPLICATIONS

[0001] This application incorporates herein by reference the entirety of each of U.S. Provisional Application Nos. 63/111,079, filed Nov. 8, 2020, 63/175,036, filed Apr. 14, 2021, 63/188,415, filed May 13, 2021, and 63/196,178, filed Jun. 2, 2021. This application claims priority to U.S. Provisional Application No. 63/248,520, filed Sep. 26, 2021, and PCT Application No. PCT/US2021/058495, filed Nov. 8, 2021 and published as WO 2022/099159 on May 12, 2022. The entirety of each of the priority applications is incorporated herein by reference.

### SEQUENCE LISTING

[0002] The instant application contains a Sequence Listing which has been submitted electronically in XML format and is hereby incorporated by reference in its entirety. Said XML copy, created on Aug. 18, 2023, is named 2010581-1153.XML and is 24,724,860 bytes in size.

### BACKGROUND

[0003] Oligonucleotides are useful in various applications, e.g., therapeutic, diagnostic, and/or research applications. For example, oligonucleotides targeting various genes can be useful for treatment of conditions, disorders or diseases related to such target genes.

### SUMMARY

[0004] Among other things, the present disclosure provides designed oligonucleotides and compositions thereof which oligonucleotides comprise modifications (e.g., modifications to nucleobases sugars, and/or internucleotidic linkages, and patterns thereof) as described herein. In some embodiments, technologies (compounds (e.g., oligonucleotides), compositions, methods, etc.) of the present disclosure (e.g., oligonucleotides, oligonucleotide compositions, methods, etc.) are particularly useful for editing nucleic acids, e.g., site-directed editing in nucleic acids (e.g., editing of target adenosine). In some embodiments, as demonstrated herein, provided technologies can significantly improve efficiency of nucleic acid editing, e.g., modification of one or more A residues, such as conversion of A to I. In some embodiments, the present disclosure provides technologies for editing (e.g., for modifying an A residue, e.g., converting an A to I) in an RNA. In some embodiments, the present disclosure provides technologies for editing (e.g., for modifying an A residue, e.g., converting an A to an I) in a transcript, e.g., mRNA. Among other things, provided technologies provide the benefits of utilization of endogenous proteins such as ADAR (Adenosine Deaminases Acting on RNA) proteins (e.g., ADAR1 and/or ADAR2), for editing nucleic acids, e.g., for modifying an A (e.g., as a result of G to A mutation). Those skilled in the art will appreciates that such utilization of endogenous proteins can avoid a number of challenges and/or provide various benefits compared to those technologies that require the delivery of exogenous components (e.g., proteins (e.g., those engineered to bind to oligonucleotides (and/or duplexes thereof with target nucleic acids) to provide desired activities), nucleic acids encoding proteins, viruses, etc.).

[0005] Particularly, in some embodiments, oligonucleotides of provided technologies comprise useful sugar modifications and/or patterns thereof (e.g., presence and/or absence of certain modifications), nucleobase modifications and/or patterns thereof (e.g., presence and/or absence of certain modifications), internucleotidic linkages modifications and/or stereochemistry and/or patterns thereof [e.g., types, modifications, and/or configuration (Rp or Sp) of chiral linkage phosphorus, etc.], etc., which, when combined with one or more other structural elements described herein (e.g., additional chemical moieties) can provide high activities and/or various desired properties, e.g., high efficiency of nucleic acid editing, high selectivity, high stability, high cellular uptake, low immune stimulation, low toxicity, improved distribution, improved affinity, etc. In some embodiments, provided oligonucleotides provide high stability, e.g., when compared to oligonucleotides having a high percentage of natural RNA sugars utilized for adenosine editing. In some embodiments, provided oligonucleotides provide high activities, e.g., adenosine editing activity. In some embodiments, provided oligonucleotides provide high selectivity, for example, in some embodiments, provided oligonucleotides provide selective modification of a target adenosine in a target nucleic acid over other adenosine in the same target nucleic acid (e.g., 2, 3, 4, 5, 6, 7, 8, 9, 10, 11, 12, 13, 14, 15, 16, 17, 18, 19, 20 fold or more modification at the target adenosine than another adenosine, or all other adenosine, in a target nucleic acid).

[0006] Among other things, the present disclosure provides designed oligonucleotides and compositions of improved properties and/or activities compared to reference oligonucleotides and compositions (e.g., those described herein or reported in the art). For example, in some embodiments, as demonstrated herein provided oligonucleotide and compositions can provide improved stability, pharmacokinetic properties, pharmacodynamic properties and/or improved activities (e.g., for A-to-I editing). Various designed oligonucleotides and compositions are described herein. For example, in some embodiments, the present disclosure provides oligonucleotides and compositions thereof, including chirally controlled oligonucleotide compositions thereof, wherein the oligonucleotides comprise several (e.g., 1, 2, 3, 4, or 5 or more; in some embodiments, 3 or more) nucleosides independently comprising sugar modifications (e.g., 2′-OR modifications wherein R is optionally substituted C₁₋₆ alkyl (e.g., 2′-OMe, 2′-MOE, etc.), bicyclic sugars (e.g., LNA sugars, cEt sugars, etc.)) at their 5′- and 3′-ends. In some embodiments, the first several (e.g., 1, 2, 3, 4, or 5 or more; in some embodiments, 3 or more) nucleosides and/or the last several (e.g., 1, 2, 3, 4, or 5 or more; in some embodiments, 3 or more) nucleosides independently comprise sugar modifications. In some embodiments, the first 3 or more and the last 3 or more nucleosides independently comprise sugar modifications. In some embodiments, one or more internucleotidic linkages bonded to such nucleosides are non-negatively charged internucleotidic linkage such as phosphoryl guanidine internucleotidic linkages like n001. In some embodiments, both the first and the last internucleotidic linkages are independently non-negatively charged internucleotidic linkages. In some embodiments, both the first and the last internucleotidic linkages are independently phosphoryl guanidine internucleotidic linkages. In some embodiments, both the first and the last internucleotidic linkages are independently n001. In some embodiments, they are both chirally controlled and are Rp. In some embodiments, an oligonucleotide comprises a nucleoside N₀ which comprises a natural DNA sugar (two 2′-H), a natural RNA sugar or a 2′-F modified sugar. In some embodiments, N₀ is a nucleoside opposite to a target adenosine when an oligonucleotide is utilized for adenosine editing. In some embodiments, sugar of N₀ is a natural DNA sugar. In some embodiments, sugar of N₁ (“+” or nothing before a number indicates counting toward the 5′-direction (5′ . . . N₁N₀N₋₁ . . . 3′)) is a 2′-F modified sugar, a natural DNA sugar, or a natural RNA sugar. In some embodiments, sugar of N₁ is a DNA sugar. In some embodiments, sugar of N₋₁ (“−” indicates counting toward the 3′-direction (5′ . . . N₁N₀N₋₁ . . . 3′)) is a 2′-F modified sugar, a natural DNA sugar, or a natural RNA sugar. In some embodiments, sugar of N₋₁ is a DNA sugar. In some embodiments, sugar of N₋₃ is a 2′-F modified sugar. In some embodiments, between N₂ and their 5′-ends oligonucleotides comprise multiple 2′-F modified sugars and multiple 2′-modified sugars (e.g., 2′-OR modified sugars wherein R is optionally substituted C₁₋₆ alkyl, bicyclic sugars such as LNA sugars, cEt sugars, etc.). In some embodiments, oligonucleotides comprise one or more (e.g., 1-20, 1-15, 1-10, 2-15, 2-10, or 1, 2, 3, 4, 5, 6, 7, 8, 9, 10, 11, 12, 13, 14, 15, 16, 17, 18, 19, 20 or more) 2′-F blocks and one or more (e.g., 1-20, 1-15, 1-10, 2-15, 2-10, or 1, 2, 3, 4, 5, 6, 7, 8, 9, 10, 11, 12, 13, 14, 15, 16, 17, 18, 19, 20 or more) separating blocks from N₂ to their 5′-ends (e.g., first domains and first subdomains of second domains combined when first subdomains end with and include N₂), wherein each nucleoside in a 2′-F block independently comprises a 2′-F modification, each nucleoside in a separating block independently comprises no 2′-F modification, and each block independently comprises one or more (e.g., 1-20, 1-15, 1-10, 2-15, 2-10, or 1, 2, 3, 4, 5, 6, 7, 8, 9, 10, 11, 12, 13, 14, 15, 16, 17, 18, 19, 20 or more) nucleosides. In some embodiments, there are two or more such 2′-F blocks and two or more such separating blocks. In some embodiments, one or more or all such separating blocks are independently bonded to two 2′-F blocks. In some embodiments, each nucleoside in one or more or all separating blocks independently comprise a 2′-OR modification wherein R is optionally substituted C₁₋₆ alkyl or is a bicyclic sugar such as a LNA sugar, a cEt sugar, etc. In some embodiments, each nucleoside in one or more or all separating blocks independently comprise a 2′-OR modification wherein R is optionally substituted C₁₋₆ alkyl. In some embodiments, each nucleoside in one or more or all separating blocks independently comprise a 2′-OMe or 2′-MOE modification. In some embodiments, each of such 2′-F and separating blocks independently comprises 1, 2, 3, 4 or 5 nucleosides. In some embodiments, nucleosides close to N₀, e.g., N₂, N₁, N₀, N₋₁, N₋₂, etc., do not contain large 2′-modifications such as 2′-MOE. In some embodiments, sugars of N₂, N₁, N₀, N₋₁, and N₋₂ are independently natural DNA sugar, 2′-F modified sugar, or 2′-OMe modified sugar. In some embodiments, sugars of N₁, N₀, N₋₁ are each a natural DNA sugar. In some embodiments, each chiral internucleotidic linkage is independently chirally controlled.

[0007] In some embodiments, the present disclosure provides an oligonucleotide comprising a first domain and a second domain, wherein the first domain comprises one or more 2′-F modifications, and the second domain comprises one or more sugars that do not have a 2′-F modification. In some embodiments, a provided oligonucleotide comprises one or more chiral modified internucleotidic linkages. In some embodiments, the present disclosure provides an oligonucleotide comprising:
[0008] (a) a first domain; and
[0009] (b) a second domain,
[0010] wherein the first domain comprises at least 1, 2, 3, 4, 5, 6, 7, 8, 9, 10, 11, 12, 13, 14, 15, 16, 17, 18, 19, or 20 or more sugars comprising a 2′-F modification and 1, 2, 3, 4, 5, 6, 7, 8, 9, 10, 11, 12, 13, 14, 15, 16, 17, 18, 19, or 20 or more sugars each independently comprising a 2′-OR modification wherein R is not —H (e.g., 2′-OMe, 2,-MOE, 2′-O-L^{B}-4′ wherein L^{B} is optionally substituted —CH₂—, etc.); and
[0011] the second domain comprises at least 1, 2, 3, 4, 5, 6, 7, 8, 9, 10, 11, 12, 13, 14, 15, 16, 17, 18, 19, or 20 or more sugars each independently comprising a 2′-OR modification wherein R is not —H (e.g., 2′-OMe, 2,-MOE, 2′-O-L^{B}-4′ wherein L^{B} is optionally substituted —CH₂—, etc.).

[0012] In some embodiments, the present disclosure provides an oligonucleotide comprising:
[0013] (a) a first domain; and
[0014] (b) a second domain,
[0015] wherein about 20%-80% (e.g., about 25%-80%, 30%-80%, 35%-80%, 40%-80%, 40%-70%, 40%-60%, 50%-80%, 50%-75%, 50%-60%, 55%-80%, 60-80%, or about 50%, 55%, 60%, 65%, 70%, 75%, or 80%) of all sugars of the first domain comprises a 2′-F modification, and about 20%-70% (e.g., about 20%-60%, 20%-50%, 30%-60%, 30%-50%, 40%-50%, or about 20%, 25%, 30%, 35%, 40%, 45%, 50%, 55%, or 60%) of all sugars of the first domain independently comprises a 2′-OR modifications wherein R is not —H (e.g., 2′-OMe, 2,-MOE, 2′-O-L^{B}-4′ wherein L^{B} is optionally substituted —CH₂—, etc.); and
[0016] the second domain comprises at least 1, 2, 3, 4, 5, 6, 7, 8, 9, 10, 11, 12, 13, 14, 15, 16, 17, 18, 19, or 20 or more modified sugars comprising no 2′-F modification, or at least 50%, 60%, 70%, 75%, 80%, 85%, 90%, 95%, or 99% of all sugars of the second domain comprise no 2′-F modification.

[0017] In some embodiments, a second domain comprises or consists of a first subdomain, a second subdomain and a third subdomain as described herein. In some embodiments, a first subdomain comprises one or more (e.g., 1-10, 1-5, 1-3, 1, 2, 3, 4, 5, 6, 7, 8, 9, or 10) sugars each independently comprising a 2′-OR modification wherein R is not —H (e.g., 2′-OMe, 2,-MOE, 2′-O-L^{B}-4′ wherein L^{B} is optionally substituted —CH₂—, etc.). In some embodiments, there are more such sugars in a first subdomain than 2′-F modified sugars. In some embodiments, none of sugars in a second subdomain contain any 2′-OR modifications wherein R is optionally substituted C₁₋₆ aliphatic or 2′-O-L^{B}-4′). In some embodiments, each sugar of a second subdomain is independently a natural DNA sugar, a natural RNA sugar or a 2′-F modified sugar. In some embodiments, each sugar of a second subdomain is independently a natural DNA sugar or a natural RNA sugar. In some embodiments, each sugar of a second subdomain is independently a natural DNA sugar or a 2′-F modified sugar. In some embodiments, each sugar of a second subdomain is independently a natural DNA sugar. In some embodiments, there are three nucleosides in a second subdomain. In some embodiments, when binding to a target the second nucleoside the three is opposite to a target adenosine. In some embodiments, the sugar of a second nucleoside does not contain any 2′-OR modifications as described herein (e.g., 2′-OMe, 2′-MOE etc.). In some embodiments, such a sugar is a natural DNA sugar. In some embodiments, it is a natural RNA sugar. In some embodiments, it is a 2′-F modified sugar. In some embodiments, a third subdomain comprises one or more (e.g., 1-10, 1-5, 1-3, 1, 2, 3, 4, 5, 6, 7, 8, 9, or 10) sugars each independently comprising a 2′-OR modification wherein R is not —H (e.g., 2′-OMe, 2,-MOE, 2′-O-L^{B}-4′ wherein L^{B} is optionally substituted —CH₂—, etc.). In some embodiments, there are more such sugars in a third subdomain than 2′-F modified sugars.

[0018] In some embodiments, a second domain comprises at least 1, 2, 3, 4, 5, 6, 7, 8, 9, 10, 11, 12, 13, 14, 15, 16, 17, 18, 19, or 20 or more modified sugars independently comprising a 2′-OR modification, or at least 50%, 60%, 70%, 75%, 80%, 85%, 90%, 95%, or 99% of all sugars of a second domain comprise a 2′-OR modification, wherein R is optionally substituted C₁₋₆ aliphatic. In some embodiments, R is methyl. In some embodiments, R is —CH₂CH₂OCH₃. As described herein, other sugar modifications may also be utilized in accordance with the present disclosure, optionally with base modifications and/or internucleotidic linkage modifications described herein.

[0019] In some embodiments, an oligonucleotide comprises or is of a 5′-first domain-second domain-3′ structure. In some embodiments, a second domain comprises or is of a 5′-first subdomain-second subdomain-third subdomain-3′ structure. In some embodiments, an oligonucleotide comprises or is of a 5′-first domain-first subdomain-second subdomain-third subdomain-3′ structure. In some embodiments, oligonucleotide is conjugated to an additional moiety, e.g., various additional chemical moieties as described herein. In some embodiments, an oligonucleotide comprises an additional moiety, e.g., an additional moiety as described herein. In some embodiments, an additional chemical moiety is or comprises a small molecule moiety, a carbohydrate moiety (e.g., GalNAc moiety), a nucleic acid moiety (e.g., an oligonucleotide moiety, a nucleic acid moiety which can provide and/or modulate one or more properties and/or activities, etc. (e.g., a moiety of RNase H-dependent oligonucleotide, RNAi oligonucleotide, aptamer, gRNA, etc.), and/or a peptide moiety.

[0020] In some embodiments, base sequence of a provided oligonucleotide is substantially complementary to the base sequence of a target nucleic acid comprising a target adenosine. In some embodiments, a provided oligonucleotide when aligned to a target nucleic acid comprises one or more mismatches (non-Watson-Crick base pairs). In some embodiments, a provided oligonucleotide when aligned to a target nucleic acid comprises one or more wobbles (e.g., G-U, I-A, G-A, I-U, I-C, etc.). In some embodiments, mismatches and/or wobbles may help one or more proteins, e.g., ADAR1, ADAR2, etc., to recognize a duplex formed by a provided oligonucleotide and a target nucleic acid. In some embodiments, provided oligonucleotides form duplexes with target nucleic acids. In some embodiments, ADAR proteins recognize and bind to such duplexes. In some embodiments, nucleosides opposite to target adenosines are located in the middle of provided oligonucleotides, e.g., with 5-50 nucleosides to 5′ side, and 1-50 nucleosides on its 3′ side. In some embodiments, a 5′ side has more nucleosides than a 3′ side. In some embodiments, a 5′ side has fewer nucleosides than a 3′ side. In some embodiments, a 5′ side has the same number of nucleosides as a 3′ side. In some embodiments, provided oligonucleotides comprise 15-40, e.g., 15, 20, 25, 30, etc. contiguous bases of oligonucleotides described in the Tables. In some embodiments, base sequences of provided oligonucleotides are or comprises base sequences of oligonucleotides described in the Tables.

[0021] In some embodiments, with utilization of various structural elements (e.g., various modifications, stereochemistry, and patterns thereof), the present disclosure can achieve desired properties and high activities with short oligonucleotides, e.g., those of about 20-40, 25-40, 25-35, 26-32, 25, 26, 27, 28, 29, 30, 31, 32 33, 34 or 35 nucleobases in length.

[0022] In some embodiments, provided oligonucleotides comprise modified nucleobases. In some embodiments, a modified nucleobase promotes modification of a target adenosine. In some embodiments, a nucleobase which is opposite to a target adenine maintains interactions with an enzyme, e.g., ADAR, compared to when a U is present, while interacts with a target adenine less strongly than U (e.g., forming fewer hydrogen bonds). In some embodiments, an opposite nucleobase and/or its associated sugar provide certain flexibility (e.g., when compared to U) to facility modification of a target adenosine by enzymes, e.g., ADAR1, ADAR2, etc. In some embodiments, a nucleobase immediately 5′ or 3′ to the opposite nucleobase (to a target adenine), e.g., I and derivatives thereof, enhances modification of a target adenine. Among other things, the present disclosure recognizes that such a nucleobase may causes less steric hindrance than G when a duplex of a provided oligonucleotide and its target nucleic acid interact with a modifying enzyme, e.g., ADAR1 or ADAR2. In some embodiments, base sequences of oligonucleotides are selected (e.g., when several adenosine residues are suitable targets) and/or designed (e.g., through utilization of various nucleobases described herein) so that steric hindrance may be reduced or removed (e.g., no G next to the opposite nucleoside of a target A).

[0023] In some embodiments, oligonucleotides of the present disclosure provides modified internucleotidic linkages (i.e., internucleotidic linkages that are not natural phosphate linkages). In some embodiments, linkage phosphorus of modified internucleotidic linkages (e.g., chiral internucleotidic linkages) are chiral and can exist in different configurations (Rp and Sp). Among other things, the present disclosure demonstrates that incorporation of modified internucleotidic linkage, particularly with control of stereochemistry of linkage phosphorus centers (so that at such a controlled center one configuration is enriched compared to stereorandom oligonucleotide preparation), can significantly improve properties (e.g., stability) and/or activities (e.g., adenosine modifying activities (e.g., converting an adenosine to inosine). In some embodiments, provided oligonucleotides have stereochemical purity significantly higher than stereorandom preparations. In some embodiments, provided oligonucleotides are chirally controlled.

[0024] In some embodiments, oligonucleotides of the present disclosure comprise one or more chiral internucleotidic linkages whose linkage phosphorus is chiral (e.g., a phosphorothioate internucleotidic linkage). In some embodiments, at least 1, 2, 3, 4, 5, 6, 7, 8, 9, 10, 11, 12, 13, 14, 15, 16, 17, 18, 19, or 20, or at least 50%, 60%, 70%, 75%, 80%, 85%, 90%, 95%, or 99% (e.g., 50%-100%, 60%-100%, 70-100%, 75%-100%, 80%-100%, 90%-100%, 95%-100%, 60%-95%, 70%-95%, 75-95%, 80-95%, 85-95%, 90-95%, 50%, 60%, 70%, 75%, 80%, 85%, 90%, 95%, or 99%, etc.) of all, or all internucleotidic linkages in an oligonucleotide, are chiral internucleotidic linkages. In some embodiments, at least one internucleotidic linkage is a chiral internucleotidic linkage. In some embodiments, at least one internucleotidic linkage is a natural phosphate linkage. In some embodiments, each internucleotidic linkage is independently a chiral internucleotidic linkage. In some embodiments, at least one chiral internucleotidic linkage is a phosphorothioate internucleotidic linkage. In some embodiments, each is a phosphorothioate internucleotidic linkage. In some embodiments, one or more chiral internucleotidic linkages are independently a non-negatively charged internucleotidic linkage or a neutral internucleotidic linkage. In some embodiments, one or more chiral internucleotidic linkages are independently a phosphoryl guanidine internucleotidic linkage. In some embodiments, one or more chiral internucleotidic linkages are independently chirally controlled. In some embodiments, each chiral internucleotidic linkage is independently chirally controlled. In some embodiments, one or more chiral internucleotidic linkages are not chirally controlled. In some embodiments, each phosphorothioate internucleotidic linkage is independently chirally controlled. In some embodiments, each modified internucleotidic linkage is independently a phosphorothioate or a non-negatively charged internucleotidic linkage. In some embodiments, each modified internucleotidic linkage is independently a phosphorothioate or a neutral internucleotidic linkage. In some embodiments, each modified internucleotidic linkage is independently a phosphorothioate or a neutral internucleotidic linkage. In some embodiments, each modified internucleotidic linkage is independently a phosphorothioate or a phosphoryl guanidine internucleotidic linkage. In some embodiments, a phosphoryl guanidine internucleotidic linkage is n001. In some embodiments, each phosphoryl guanidine internucleotidic linkage is n001. In some embodiments, each non-negatively charged internucleotidic linkage is n001. In some embodiments, each neutral internucleotidic linkage is n001. In some embodiments, a modified internucleotidic linkage n002. In some embodiments, it is n006. In some embodiments, it is n020. In some embodiments, it is n004. In some embodiments, it is n008. In some embodiments, it is n025. In some embodiments, it is n026. Various modified internucleotidic linkages are described herein. A linkage phosphorus can be either Rp or Sp. In some embodiments, at least one linkage phosphorus is Rp. In some embodiments, at least one linkage phosphorus is Sp. In some embodiments, at least 1, 2, 3, 4, 5, 6, 7, 8, 9, 10, 11, 12, 13, 14, 15, 16, 17, 18, 19, or 20, or at least 50%, 60%, 70%, 75%, 80%, 85%, 90%, 95%, or 99% (e.g., 50%-100%, 60%-100%, 70-100%, 75%-100%, 80%-100%, 90%-100%, 95%-100%, 60%-95%, 70%-95%, 75-95%, 80-95%, 85-95%, 90-95%, 50%, 60%, 70%, 75%, 80%, 85%, 90%, 95%, or 99%, etc.) of all, or all chiral internucleotidic linkages in an oligonucleotide, are Sp. In some embodiments, at least 1, 2, 3, 4, 5, 6, 7, 8, 9, 10, 11, 12, 13, 14, 15, 16, 17, 18, 19, or 20, or at least 50%, 60%, 70%, 75%, 80%, 85%, 90%, 95%, or 99% (e.g., 50%-100%, 60%-100%, 70-100%, 75%-100%, 80%-100%, 90%-100%, 95%-100%, 60%-95%, 70%-95%, 75-95%, 80-95%, 85-95%, 90-95%, 50%, 60%, 70%, 75%, 80%, 85%, 90%, 95%, or 99%, etc.) of all, or all phosphorothioate internucleotidic linkages in an oligonucleotide, are Sp. In some embodiments, at least 50% of all phosphorothioate internucleotidic linkage are Sp. In some embodiments, at least 60% of all phosphorothioate internucleotidic linkage are Sp. In some embodiments, at least 70% of all phosphorothioate internucleotidic linkage are Sp. In some embodiments, at least 75% of all phosphorothioate internucleotidic linkage are Sp. In some embodiments, at least 80% of all phosphorothioate internucleotidic linkage are Sp. In some embodiments, at least 85% of all phosphorothioate internucleotidic linkage are Sp. In some embodiments, at least 90% of all phosphorothioate internucleotidic linkage are Sp. In some embodiments, at least 95% of all phosphorothioate internucleotidic linkage are Sp. In some embodiments, at least 96% of all phosphorothioate internucleotidic linkage are Sp. In some embodiments, at least 97% of all phosphorothioate internucleotidic linkage are Sp. In some embodiments, at least 98% of all phosphorothioate internucleotidic linkage are Sp. In some embodiments, all phosphorothioate internucleotidic linkage are Sp. In some embodiments, no more than 3, 4, 5, 6, 7, 8, 9, or 10 consecutive phosphorothioate internucleotidic linkages are Rp. In some embodiments, no more than 3 consecutive phosphorothioate internucleotidic linkages are Rp. In some embodiments, no more than 4 consecutive phosphorothioate internucleotidic linkages are Rp. In some embodiments, no more than 5 consecutive phosphorothioate internucleotidic linkages are Rp. In some embodiments, no more than 6 consecutive phosphorothioate internucleotidic linkages are Rp. In some embodiments, no more than 7 consecutive phosphorothioate internucleotidic linkages are Rp. In some embodiments, no more than 8 consecutive phosphorothioate internucleotidic linkages are Rp. In some embodiments, no more than 9 consecutive phosphorothioate internucleotidic linkages are Rp. In some embodiments, no more than 10 consecutive phosphorothioate internucleotidic linkages are Rp. In some embodiments, consecutive Rp phosphorothioate internucleotidic linkages are not utilized in portions wherein the majority (e.g., greater than 50%, 60%, 70%, 75%, 80%, 85%, 90%, 95% or more) or all of sugars are natural DNA and/or RNA and/or 2′-F modified sugars. In some embodiments, when consecutive Rp phosphorothioate internucleotidic linkages are utilized, one or more or the majority (e.g., greater than 50%, 60%, 70%, 75%, 80%, 85%, 90%, 95% or more) or all of such internucleotidic linkages are independently bonded to sugars which can improve stability. In some embodiments, when consecutive Rp phosphorothioate internucleotidic linkages are utilized, one or more or the majority (e.g., greater than 50%, 60%, 70%, 75%, 80%, 85%, 90%, 95% or more) or all of such internucleotidic linkages are independently bonded to bicyclic sugars or 2′-OR modified sugars wherein R is optionally substituted C₁₋₆ aliphatic. In some embodiments, when consecutive Rp phosphorothioate internucleotidic linkages are utilized, one or more or the majority (e.g., greater than 50%, 60%, 70%, 75%, 80%, 85%, 90%, 95% or more) or all of such internucleotidic linkages are independently bonded to 2′-OR modified sugars wherein R is optionally substituted C₁₋₆ aliphatic. In some embodiments, each 2′-OR modified sugar is independently a 2′-OMe modified sugar or a 2′-MOE modified sugar. In some embodiments, each 2′-OR modified sugar is independently a 2′-OMe modified sugar. In some embodiments, each 2′-OR modified sugar is independently a 2′-MOE modified sugar.

[0025] In some embodiments, stereochemistry of one or more chiral linkage phosphorus of provided oligonucleotides are controlled in a composition. In some embodiments, the present disclosure provides a composition comprising a plurality of oligonucleotides, wherein oligonucleotides of a plurality share a common base sequence, and the same configuration of linkage phosphorus (e.g., all are Rp or all are Sp for the chiral linkage phosphorus) independently at one or more (e.g., about 1-50, 1-40, 1-30, 1-25, 1-20, 1-15, 1-10, 5-50, 5-40, 5-30, 5-25, 5-20, 5-15, 5-10, 1, 2, 3, 4, 5, 6, 7, 8, 9, 10, 11, 12, 13, 14, 15, 16, 17, 18, 19, 20, 21, 22, 23, 24, or 25 or more, or at least 50%, 60%, 70%, 75%, 80%, 85%, 90%, 95%, or 99% of all chiral internucleotidic linkages) chiral internucleotidic linkages (“chirally controlled internucleotidic linkages”). In some embodiments, they share the same stereochemistry at each chiral linkage phosphorus. In some embodiments, oligonucleotides of a plurality share the same constitution. In some embodiments, oligonucleotides of a plurality are structurally identical except the internucleotidic linkages. In some embodiments, oligonucleotides of a plurality are structurally identical. In some embodiments, at least at least about 50%, 60%, 65%, 70%, 75%, 80%, 85%, 90%, or 95% of all oligonucleotides in a composition, or of all oligonucleotides sharing the common base sequence, share the pattern of backbone chiral centers of oligonucleotides of the plurality. In some embodiments, at least about 50%, 60%, 65%, 70%, 75%, 80%, 85%, 90%, or 95% of all oligonucleotides in a composition, or of all oligonucleotides sharing the common base sequence, are oligonucleotides of the plurality.

[0026] In some embodiments, the present disclosure provides a chirally controlled oligonucleotide composition of an oligonucleotide, wherein at least about 50%, 60%, 65%, 70%, 75%, 80%, 85%, 90%, or 95% of all oligonucleotides in a composition, or of all oligonucleotides having the same base sequence of the oligonucleotide, or of all oligonucleotide having the same base sequence and sugar and base modifications, or of all oligonucleotides of the same constitution, share the same configuration of linkage phosphorus (e.g., all are Rp or all are Sp for the chiral linkage phosphorus) independently at one or more (e.g., about 1-50, 1-40, 1-30, 1-25, 1-20, 1-15, 1-10, 5-50, 5-40, 5-30, 5-25, 5-20, 5-15, 5-10, 1, 2, 3, 4, 5, 6, 7, 8, 9, 10, 11, 12, 13, 14, 15, 16, 17, 18, 19, 20, 21, 22, 23, 24, or 25 or more, or at least 50%, 60%, 70%, 75%, 80%, 85%, 90%, 95%, or 99% of all chiral internucleotidic linkages) chiral internucleotidic linkages with the oligonucleotide. In some embodiments, the present disclosure provides a chirally controlled oligonucleotide composition of an oligonucleotide, wherein at least about 50%, 60%, 65%, 70%, 75%, 80%, 85%, 90%, or 95% of all oligonucleotides in a composition, or of all oligonucleotides having the same base sequence of the oligonucleotide, or of all oligonucleotide having the same base sequence and sugar and base modifications, or of all oligonucleotides of the same constitution, are one or more forms of the oligonucleotide (e.g., acid forms, salt forms (e.g. pharmaceutically acceptable salt forms; as appreciated by those skilled in the art, in case the oligonucleotide is a salt, other salt forms of the corresponding acid or base form of the oligonucleotide), etc.).

[0027] In some embodiments, as demonstrated herein chirally controlled oligonucleotide compositions provide a number of advantages, e.g., higher stability, activities, etc., compared to corresponding stereorandom oligonucleotide compositions. In some embodiments, it was observed that chirally controlled oligonucleotide compositions provide high levels of adenosine modifying (e.g., converting A to I) activities with various isoforms of an ADAR protein (e.g., p150 and p110 forms of ADAR1) while corresponding stereorandom compositions provide high levels of adenosine modifying (e.g., converting A to I) activities with only certain isoforms of an ADAR protein (e.g., p150 isoform of ADAR1).

[0028] In some embodiments, provided oligonucleotides comprise an additional moiety, e.g., a targeting moiety, a carbohydrate moiety, etc. In some embodiments, an additional moiety is or comprises a ligand for an asialoglycoprotein receptor. In some embodiments, an additional moiety is or comprises GalNAc or derivatives thereof. Among other things, additional moieties may facilitate delivery to certain target locations, e.g., cells, tissues, organs, etc. (e.g., locations comprising receptors that interact with additional moieties). In some embodiments, additional moieties facilitate delivery to liver.

[0029] In some embodiments, the present disclosure provides technologies for preparing oligonucleotides and compositions thereof, particularly chirally controlled oligonucleotide compositions. In some embodiments, provided oligonucleotides and compositions thereof are of high purity. In some embodiments, oligonucleotides of the present disclosure are at least 50%, 60%, 70%, 75%, 80%, 85%, 90%, 95%, or 99% stereochemically pure at linkage phosphorus of chiral internucleotidic linkages. In some embodiments, oligonucleotides of the present disclosure are prepared stereoselectively and are substantially free of stereoisomers. In some embodiments, in provided compositions comprising a plurality of oligonucleotides which share the same base sequence of the same pattern of chiral linkage phosphorus stereochemistry (e.g., comprising one or more of Rp and/or Sp, wherein each chiral linkage phosphorus is independently Rp or Sp), at least 50%, 60%, 70%, 75%, 80%, 85%, 90%, 95%, or 99% of all oligonucleotides in the composition that share the same base sequence as oligonucleotides of the plurality share the same pattern of chiral linkage phosphorus stereochemistry or are oligonucleotides of the plurality. In some embodiments, in provided compositions comprising a plurality of oligonucleotides which share the same base sequence of the same pattern of chiral linkage phosphorus stereochemistry, at least 50%, 60%, 70%, 75%, 80%, 85%, 90%, 95%, or 99% of all oligonucleotides in the composition that share the same constitution as oligonucleotides of the plurality share the same pattern of chiral linkage phosphorus stereochemistry or are oligonucleotides of the plurality.

[0030] In some embodiments, the present disclosure describes useful technologies for assessing oligonucleotide and compositions thereof. For example, various technologies of the present disclosure are useful for assessing adenosine modification. As appreciated by those skilled in the art, in some embodiments, modification/editing of adenosine can be assessed through sequencing, mass spectrometry, assessment (e.g., levels, activities, etc.) of products (e.g., RNA, protein, etc.) of modified nucleic acids (e.g., wherein adenosines of target nucleic acids are converted to inosines), etc., optionally in view of other components (e.g., ADAR proteins) presence in modification systems (e.g., an in vitro system, an ex vivo system, cells, tissues, organs, organisms, subjects, etc.). Those skilled in the art will appreciate that oligonucleotides which provide adenosine modification of a target nucleic acid can also provide modified nucleic acid (e.g., wherein a target adenosine is converted into I) and one or more products thereof (e.g., mRNA, proteins, etc.). Certain useful technologies are described in the Examples.

[0031] As described herein, oligonucleotides and compositions of the present disclosure may be provided/utilized in various forms. In some embodiments, the present disclosure provides compositions comprising one or more forms of oligonucleotides, e.g., acid forms (e.g., in which natural phosphate linkages exist as —O(P(O)(OH)—O—, phosphorothioate internucleotidic linkages exist as —O(P(O)(SH)—O—), base forms, salt forms (e.g., in which natural phosphate linkages exist as salt forms (e.g., sodium salt (—O(P(O)(O⁻Na⁺)—O—), phosphorothioate internucleotidic linkages exist as salt forms (e.g., sodium salt (—O(P(O)(S⁻Na⁺)—O—) etc. As appreciated by those skilled in the art, oligonucleotides can exist in various salt forms, including pharmaceutically acceptable salts, and in solutions (e.g., various aqueous buffering system), cations may dissociate from anions. In some embodiments, the present disclosure provides a pharmaceutical composition comprising a provided oligonucleotide and/or one or more pharmaceutically acceptable salts thereof, and a pharmaceutically acceptable carrier. In some embodiments, pharmaceutical compositions are chirally controlled oligonucleotide compositions.

[0032] Provided technologies can be utilized for various purposes. For example, those skilled in the art will appreciate that provided technologies are useful for many purposes involving modification of adenosine, e.g., correction of G to A mutations, modulate levels of certain nucleic acids and/or products encoded thereby (e.g., reducing levels of proteins by introducing A to G/I modifications), modulation of splicing, modulation of translation (e.g., modulating translation start and/or stop site by introducing A to G/I modifications), etc.

[0033] In some embodiments, the present disclosure provides technologies for preventing or treating a condition, disorder or disease that is amenable to an adenosine modification, e.g. conversion of A to I or G. As appreciated by those skilled in the art, I may perform one or more functions of G, e.g., in base pairing, translation, etc. In some embodiments, a G to A mutation may be corrected through conversion of A to I so that one or more products, e.g., proteins, of the G-version nucleic acid can be produced. In some embodiments, the present disclosure provides technologies for preventing or treating a condition, disorder or disease associated with a mutation, comprising administering to a subject susceptible thereto or suffering therefrom a provided oligonucleotide or composition thereof, which oligonucleotide or composition can edit a mutation. In some embodiments, the present disclosure provides technologies for preventing or treating a condition, disorder or disease associated with a G to A mutation, comprising administering to a subject susceptible thereto or suffering therefrom a provided oligonucleotide or composition thereof, which oligonucleotide or composition can modify an A. In some embodiments, provided technologies modify an A in a transcript, e.g., RNA transcript. In some embodiments, an A is converted into an I. In some embodiments, during translation protein synthesis machineries read I as G. In some embodiments, an A form encodes one or more proteins that have one or more higher desired activities and/or one or more better desired properties compared those encoded by its corresponding G form. In some embodiments, an A form provides higher levels, compared to its corresponding G form, of one or more proteins that have one or more higher desired activities and/or one or more better desired properties. In some embodiments, products encoded by an A form are structurally different (e.g., longer, in some embodiments, full length proteins) from those encoded by its corresponding G form. In some embodiments, an A form provides structurally identical products (e.g., proteins) compared to its corresponding G form.

[0034] As those skilled in the art will appreciate, many conditions, disorders or diseases are associated with mutations that can be modified by provided technologies and can be prevented and/or treated using provided technologies. For example, it is reported that there are over 20,000 conditions, disorders or diseases are associated with G to A mutation and can benefit from A to I editing.

### BRIEF DESCRIPTION OF THE DRAWINGS

[0035] FIG. 1. Provided technologies provide editing of mutations associated with conditions, disorders or diseases and provide products with improved properties and/or functions. Oligonucleotide compositions target a PiZ mutation of SERPINA1 (SA1). Primary mouse hepatocytes expressing the human SA1-PiZ allele were transfected with indicated oligonucleotide compositions (25 nM oligonucleotides) (WV-38621, WV-38622, WV-38630, and non-targeting (NT) control WV-37317). Media and RNA were collected 5 days post-transfection. RNA editing was quantified by RT-PCR and Sanger sequencing. A1AT protein in media was quantified by an ELISA assay (“SerpinA1 ng/ml”). All samples were assessed at N=6 replicates. As confirmed by data shown in the Figure, provided technologies can provide editing of target human SERPINA1-PIZ mRNA. Furthermore, data in the Figure confirm that provided technologies increase levels of A1AT protein secretion which indicates that provided technologies can correct mutations on protein levels and can provide proteins with improved correct folding of the A1AT protein (P-value: *<0.05, **<0.01, ***<0.005, and ****<0.0005).

[0036] FIG. 2. Provided technologies can provide editing. (a) Certain oligonucleotides targeting a SERPINA1-Z allele. Indicated cell lines were stably infected with a lentivirus expressing a SERPINA1-Z allele transcript and transfected with the indicated oligonucleotide. HEK293T cells were also pre-transfected with a plasmid expressing ADAR1-p110 or ADAR1-p150. RNA was collected 48 hours later, and RNA editing was quantified by Sanger sequencing (n=2 biological replicates). (b) Oligonucleotides target a SERPINA1-Z allele. Indicated cell lines were stably infected with a lentivirus expressing the SERPINA1-Z allele transcript and transfected with the indicated oligonucleotide. HEK 293T cells were also pre-transfected with a plasmid expressing ADAR1-p110 or ADAR1-p150. RNA was collected 48 hours later, and RNA editing was quantified by Sanger sequencing (n=2 biological replicates).

[0037] FIG. 3. Provided technologies comprising various modifications, including modified bases, can provide editing. Oligonucleotides target a SERPINA1-Z allele. HEK293T or SF8628 cells stably expressing the SERPINA1-Z allele transcript were transfected indicated oligonucleotide. HEK293T cells were also pre-transfected with human ADAR1-p110 or p150. RNA editing was quantified by Sanger sequencing (n=2 biological replicates).

[0038] FIG. 4. Provided technologies comprising various modifications, including modified bases, and various types of sugars can provide editing. Oligonucleotides target the SERPINA1-Z allele. HEK293T cells stably expressing the SERPINA1-Z allele transcript were transfected with human ADAR1-p110 or p150 and indicated oligonucleotide. RNA editing was quantified by Sanger sequencing (n=2 biological replicates).

[0039] FIG. 5. Provided technologies comprising various modifications can provide editing. Primary mouse hepatocytes transgenic for human ADAR1-p110 and SERPINA1-Z allele were treated with indicated GalNAc-conjugated oligonucleotides targeting SERPINA1-Z allele for 48 hrs. RNA editing was quantified by Sanger sequencing (n=2 biological replicates).

[0040] FIG. 6. Provided technologies can provide editing. Primary mouse hepatocytes were treated with indicated oligonucleotides targeting SERPINA1-Z allele through gymnotic uptake for 48 hrs. RNA editing was quantified by Sanger sequencing (n=2 biological replicates).

[0041] FIG. 7. Provided technologies can provide editing. Primary mouse hepatocytes transgenic for human ADAR1-p110 and SERPINA1-Z allele were treated with indicated oligonucleotides through gymnotic uptake for 48 hrs. RNA editing was quantified by Sanger sequencing (n=2 biological replicates).

[0042] FIG. 8. Provided technologies comprising various modifications, including base modifications, can provide editing. Primary mouse hepatocytes transgenic for human ADAR1-p110 and SERPINA1-Z allele, were treated with indicated oligonucleotides targeting SERPINA1-Z allele through gymnotic uptake for 48 hrs. RNA editing was quantified by Sanger sequencing (n=2 biological replicates).

[0043] FIG. 9. Provided technologies can provide editing. Primary mouse hepatocytes transgenic for human ADAR1-p110 and SERPINA1-Z allele were treated with indicated oligonucleotides targeting SERPINA1-Z allele through gymnotic uptake for 48 hrs. RNA editing was quantified by Sanger sequencing (n=2 biological replicates).

[0044] FIG. 10. Provided technologies comprising various modifications, including modified internucleotide linkages, can provide editing. Primary mouse hepatocytes transgenic for human ADAR1-p110 and SERPINA1-Z allele were treated with indicated oligonucleotides targeting SERPINA1-Z allele through gymnotic uptake for 48 hrs. RNA editing was quantified by Sanger sequencing (n=2 biological replicates).

[0045] FIG. 11. Provided technologies comprising various modifications, including modified internucleotide linkages, can provide editing. Primary mouse hepatocytes transgenic for human ADAR1-p110 and SERPINA1-Z allele were treated with indicated oligonucleotides targeting a SERPINA1-Z allele through gymnotic uptake for 48 hrs. RNA editing was quantified by Sanger sequencing (n=2 biological replicates).

[0046] FIG. 12. Provided technologies comprising various modifications, including sugar modifications, can provide editing. Primary mouse hepatocytes transgenic for human ADAR1-p110 and SERPINA1-Z allele were treated with indicated oligonucleotides targeting SERPINA1-Z allele through gymnotic uptake for 48 hrs. RNA editing was quantified by Sanger sequencing (n=2 biological replicates).

[0047] FIG. 13. Provided technologies comprising various modifications, including sugar modifications, can provide editing. Primary mouse hepatocytes transgenic for human ADAR1-p110 and SERPINA1-Z allele were treated with indicated oligonucleotides targeting SERPINA1-Z allele through gymnotic uptake for 48 hrs. RNA editing was quantified by Sanger sequencing (n=2 biological replicates).

[0048] FIG. 14. Provided technologies comprising oligonucleotides of various lengths can provide editing. Primary mouse hepatocytes transgenic for human ADAR1-p110 and SERPINA1-Z allele were treated with indicated oligonucleotides targeting SERPINA1-Z allele through gymnotic uptake for 48 hrs. RNA editing was quantified by Sanger sequencing (n=2 biological replicates).

[0049] FIG. 15. Provided technologies comprising various modifications, including various types of internucleotide linkages, can provide editing. Primary mouse hepatocytes transgenic for human ADAR1-p110 and SERPINA1-Z allele were treated with indicated oligonucleotides targeting SERPINA1-Z allele through gymnotic uptake for 48 hrs. RNA editing was quantified by Sanger sequencing (n=2 biological replicates)

[0050] FIG. 16. Provided technologies can provide editing. Primary mouse hepatocytes transgenic for human ADAR1-p110 were treated with indicated GalNAc-conjugated oligonucleotides targeting SERPINA1-Z allele for 48 hrs. RNA editing was quantified by Sanger sequencing (n=2 biological replicates).

[0051] FIG. 17. Provided technologies comprising various types of sugars, nucleobases, internucleotidic linkages and/or additional chemical moieties can provide editing. Primary mouse hepatocytes transgenic for human ADAR1-p110 were treated with indicated GalNAc-conjugated oligonucleotides targeting SERPINA1-Z allele for 48 hrs. RNA editing was quantified by Sanger sequencing (n=2 biological replicates).

[0052] FIG. 18. Provided technologies comprising various editing region base sequences can provide editing. (a) Oligonucleotides of various editing region sequences, including nearest neighbors adjacent to a nucleoside opposite to a target adenosine, were assessed. Primary mouse hepatocytes transgenic for human ADAR1-p110 were gymnotically treated with indicated oligonucleotide targeting SERPINA1-Z allele for 48 hrs. RNA editing was quantified by Sanger sequencing (n=2 biological replicates). (b) Oligonucleotides of various editing region sequences, including nearest neighbors adjacent to a nucleoside opposite to a target adenosine, were assessed. Primary mouse hepatocytes transgenic for human ADAR1-p110 were gymnotically treated with indicated oligonucleotides targeting SERPINA1-Z allele for 48 hrs. RNA editing was quantified by Sanger sequencing (n=2 biological replicates). (c) Oligonucleotides of various editing region sequences, including nearest neighbors adjacent to a nucleoside opposite to a target adenosine, were assessed. Primary mouse hepatocytes transgenic for human ADAR1-p110 were gymnotically treated with indicated oligonucleotides targeting SERPINA1-Z allele for 48 hrs. RNA editing was quantified by Sanger sequencing (n=2 biological replicates).

[0053] FIG. 19. Provided technologies comprising various types of nucleosides and internucleotidic linkages can provide editing. Primary mouse hepatocytes transgenic for human ADAR1-p110 were gymnotically treated with indicated oligonucleotides targeting SERPINA1-Z allele for 48 hrs. RNA editing was quantified by Sanger sequencing (n=2 biological replicates).

[0054] FIG. 20. Provided technologies can provide editing. Primary mouse hepatocytes transgenic for human ADAR1-p110 were gymnotically treated with indicated oligonucleotides targeting SERPINA1-Z allele for 48 hrs. RNA editing was quantified by Sanger sequencing (n=2 biological replicates).

[0055] FIG. 21. Provided technologies comprising various types of sugars, nucleosides, and internucleotidic linkages can provide editing. Primary mouse hepatocytes transgenic for human ADAR1-p110 were gymnotically treated with indicated oligonucleotides targeting SERPINA1-Z allele for 48 hrs. RNA editing was quantified by Sanger sequencing (n=2 biological replicates).

[0056] FIG. 22. Provided technologies comprising various types of sugars, nucleosides, and internucleotidic linkages can provide editing. Primary mouse hepatocytes transgenic for human ADAR1-p110 were gymnotically treated with indicated oligonucleotides targeting SERPINA1-Z allele for 48 hrs. RNA editing was quantified by Sanger sequencing (n=2 biological replicates).

[0057] FIG. 23. Provided technologies comprising various types of sugars, nucleosides, and internucleotidic linkages can provide editing. Primary mouse hepatocytes transgenic for human ADAR1-p110 were gymnotically treated with indicated oligonucleotides targeting SERPINA1-Z allele for 48 hrs. RNA editing was quantified by Sanger sequencing (n=2 biological replicates).

[0058] FIG. 24. Provided technologies comprising various types of sugars, nucleosides, and internucleotidic linkages can provide editing. Primary mouse hepatocytes transgenic for human ADAR1-p110 were gymnotically treated with indicated oligonucleotides targeting SERPINA1-Z allele for 48 hrs. RNA editing was quantified by Sanger sequencing (n=2 biological replicates).

[0059] FIG. 25. Provided technologies comprising various types of sugars, nucleosides, and internucleotidic linkages can provide editing. Primary mouse hepatocytes transgenic for human ADAR1-p110 were gymnotically treated with indicated oligonucleotides targeting SERPINA1-Z allele for 48 hrs. RNA editing was quantified by Sanger sequencing (n=2 biological replicates).

[0060] FIG. 26. Provided technologies can provide editing. Oligonucleotides comprising wobble base pairs, e.g., G-U wobble base pairs, at various positions can provide editing. Primary mouse hepatocytes transgenic for human ADAR1-p110 were gymnotically treated with indicated oligonucleotides targeting SERPINA-Z.

[0061] FIG. 27. Provided technologies comprising various modifications, including nucleoside modifications, can provide editing. Oligonucleotides target an adenosine in the 3′UTR of beta-actin mRNA. Primary human hepatocytes were gymnotically treated with indicated oligonucleotides at indicated concentrations. Editing of target was measured by Sanger sequencing (n=2 biological replicates).

[0062] FIG. 28. Provided technologies comprising various modifications, including sugar modifications and modified internucleotidic linkages, can provide editing. Oligonucleotides target an adenosine in the 3′UTR of beta-actin mRNA. Primary human hepatocytes were gymnotically treated with indicated oligonucleotide at indicated concentrations. Editing of target was measured by Sanger sequencing (n=2 biological replicates).

[0063] FIG. 29. Provided technologies can provide editing. Oligonucleotides target an adenosine in the 3′UTR of beta-actin mRNA. Primary human hepatocytes were gymnotically treated with indicated oligonucleotides at indicated concentrations. Editing of target was measured by Sanger sequencing (n=2 biological replicates).

[0064] FIG. 30. Provided technologies can provide editing. Primary mouse hepatocytes transgenic for human ADAR1-p110 were treated with indicated oligonucleotides targeting UGP2 through gymnotic uptake for 48 hrs. RNA editing was quantified by Sanger sequencing (n=2 biological replicates)

[0065] FIG. 31. Provided technologies can provide editing in NHPs. (a) Non-human primates (NHPs) were dosed subcutaneously with indicated oligonucleotides (50 mg/kg, n=3 animals) or PBS (n=1 animal). 7 days later, animals were necropsied and indicated tissues were collected. RNA editing was quantified by Sanger sequencing (n=2 biological replicates). (b): Corresponding concentration of oligonucleotides in indicated tissue, as measured by hybridization ELISA.

[0066] FIG. 32. Provided technologies comprising various modifications can provide editing. (a) Non-human primates (NHPs) were dosed intrathecally with indicated oligonucleotides (5 mg or 10 mg, n=2 animals each) or artificial cerebrospinal fluid (aCSF) control (n=1 animal). Animals were necropsied on day 8 (aCSF, 5 mg, 10 mg groups) or day 29 (10 mg group) and indicated tissues were collected. RNA editing was quantified by Sanger sequencing (n=2 biological replicates). (b): Corresponding concentration of oligonucleotides in indicated tissue, as measured by hybridization ELISA.

[0067] FIG. 33. Provided technologies comprising duplexing designs can provide editing. Illustrated oligonucleotide compositions comprise two oligonucleotides that share a 16 or 18-bp complementary sequence, allowing them to associate and create double-stranded RNA structures that can recruit ADAR. One oligonucleotide (36 or 32-bp) also contains a targeting portion that is specifically complementary to a target of interest. As shown, combined oligonucleotide designs target a premature UAG stop codon within a cLuc coding sequence as an example. HEK293T cells were transfected with plasmids encoding human ADAR1-p150, luciferase reporter construct and indicated combination of oligonucleotides. cLuc activity was normalized to Glue expression in mock treated samples. For each oligonucleotide comprising a duplex region and a target region (WV-42707 to WV-42710 and WV-42715 to WV-42718), duplexing oligonucleotides from the first to last are WV-42719 to WV-42730 (i.e., WV-42719, WV-42720, WV-42721, WV-42722, WV-42723, WV-42724, WV-42725, WV-42726, WV-42727, WV-42728, WV-42729, and WV-42730).

[0068] FIG. 34. Provided technologies comprising duplexing designs can provide editing. In some embodiments, a first oligonucleotide (e.g., a duplexing oligonucleotide) comprises a stem loop and can form duplex and a 2^{nd} oligonucleotide (e.g., an oligonucleotide comprising a duplexing region and a targeting region) that can be used to target a specific transcript. In some embodiments, a first and a second oligonucleotides complementary sequence (e.g., of 15 nt) allowing them to associate. In some embodiments, formed duplexes recruit ADAR polypeptides such as ADAR1, ADAR2, etc. In FIG. 34, combined oligonucleotide designs target a premature UAG stop codon within a cLuc coding sequence. HEK293T cells were transfected with plasmids encoding human ADAR1-p110 or p150, luciferase reporter construct and indicated combination of oligonucleotides. cLuc activity was normalized to Glue expression in mock treated samples. As shown, various combinations provide editing activities.

[0069] FIG. 35. Certain oligonucleotide designs as examples. (a) A duplexing oligonucleotide and an oligonucleotide comprising a duplexing region and a targeting region. (b) A duplexing oligonucleotide comprising a stem loop and an oligonucleotide comprising a duplexing region and a targeting region.

[0070] FIG. 36. Various oligonucleotide compositions can provide editing. Primary mouse hepatocytes from transgenic model (expressing human ADARp110 and human SERPINA1-Z allele) were treated with indicated GalNAc-conjugated oligonucleotides targeting the SERPINA1-Z allele for 48 hrs. RNA editing was measured by Sanger sequencing.

[0071] FIG. 37. Various oligonucleotide compositions can provide in vivo editing. A huADAR/SA1 transgenic mouse model was dosed 3×10 mg/kg subcutaneously with the indicated oligonucleotides targeting the SERPINA1-Z allele. Mice were dosed every other day for 3 days (Days 0, 2, 4) and liver biopsies were collected on Day 7. Percent editing was measured by Sanger sequencing. One-way ANOVA with correction for multiple comparisons (Dunnett's) was used to test for differences SERPINA1-Z allele editing in treated vs. PBS groups. ****: P-value is less than 0.0001; ***: P-value is less than 0.001; **: P-value is less than 0.005. P-values were calculated from comparison of pre-dose and Day 7 values for each sample.

[0072] FIG. 38. Various oligonucleotide compositions can increase serum AAT following in vivo editing. Serum was collected from mice prior to dosing and on Day 7 following treatment as described for FIG. 37. Concentration of total human AAT in serum was determined by a commercially available ELISA kit (AbCam). Matched 2-way ANOVA with correction for multiple comparisons (Bonferroni) was used to test for differences in AAT abundance in treated samples compared to PBS. ****: P-value is less than 0.0001; ***: P-value is less than 0.001; **: P-value is less than 0.005. P-values were calculated from comparison of pre-dose and Day 7 values for each sample.

[0073] FIG. 39. Provided oligonucleotide composition can decrease mutant Z-AAT protein level and increase wild-type AAT protein level in serum. Serum was collected from mice prior to dosing and on Day 7 following treatment as described for FIG. 37. Relative abundance of Z (mutant) vs. M (wild-type) AAT isoforms was determined by mass spectrometry. Absolute amounts of each isoform were then calculated by applying relative abundances to absolute concentrations obtained from ELISA (see FIG. 38).

[0074] FIG. 40. Editing by various oligonucleotide compositions can result in functional wild-type AAT protein. Serum was collected from mice prior to dosing and on Day 7 following treatment as described for FIG. 37. Relative elastase inhibition activity in serum was determined using a commercially available kit (EnzChek® Elastase Assay Kit (E-12056)). Matched 2-way ANOVA with correction for multiple comparisons (Bonferroni) was used to test for differences in elastase inhibition activity in serum collected at day 7 vs pre-dose for each treatment group. ****: P-value is less than 0.0001; ***: P-value is less than 0.001; **: P-value is less than 0.005. P-values were calculated from comparison of pre-dose and Day 7 values for each sample.

[0075] FIG. 41. Provided technologies can modulate protein-protein interactions. (a) Provided oligonucleotide compositions edit adenosines in Keap1 and NRF2 transcripts. HEK293T cells were transfected with oligonucleotide compositions targeting Keap1 or NRF2 and a plasmid expressing either ADAR-p110 (upper bars) or ADAR1-p150 (lower bars). RNA was collected 48 hours after treatment and RNA editing of Keap1 and NRF2 transcripts was measured by Sanger sequencing. “*”: data not available. (b) Provided oligonucleotide technologies can modulate gene expression. HEK293T cells were transfected with indicated oligonucleotides targeting NRF2 or Keap1 and a plasmid expressing either ADAR-p110 or ADAR1-p150. RNA was collected 48 hours after treatment. Fold change in various genes regulated by NRF2 was measured by qPCR.

[0076] FIG. 42. Provided technologies can provide robust and durable editing in vivo. hADAR mice were treated with a single 100 ug ICV injection of oligonucleotide composition comprising WV-40590 oligonucleotides targeting UGP2. UGP2 editing was measured between 1-16 weeks post-dosage.

[0077] FIG. 43. Provided technologies can provide editing. Primary human hepatocytes were treated with oligonucleotide compositions targeting UGP2 at 1 uM (left bar) and 0.3 uM (right bar) via gymnotic uptake. RNA was collected 48 hours post-treatment and RNA editing was measured by Sanger sequencing (n=2 biological replicates).

[0078] FIG. 44. Provided technologies can provide editing. Human IPSC derived neurons (iCells) were treated with oligonucleotide compositions comprising indicated oligonucleotides targeting UGP2 at 3 uM (left bar) and 1 uM (right bar) via gymnotic uptake. RNA was collected 6 days post-treatment and RNA editing was measured by Sanger sequencing (n=2 biological replicates).

[0079] FIG. 45. Provided technologies can provide editing in vivo. Wild-type (Wt) and hADAR mice were treated with PBS (left bar) or oligonucleotide compositions (middle bar=WV-38702, right bar=WV-48161) targeting UGP2 via three sub-cutaneous doses of 10 mg/kg (days 0, 2, and 4, respectively). Mouse livers were isolated 1 week post-treatment and RNA was collected. RNA editing was measured by Sanger sequencing (n=2 biological replicates).

[0080] FIG. 46. Provided technologies can provide editing in various cell populations including immune cells. Human PBMCs were treated with oligonucleotide compositions targeting ACTB at 10 uM concentration under activating (addition of PHA) or non-activating (no addition of PHA) conditions (left bar=mock, middle bar=WV-37317 with PHA, right bar=WV=37317 without PHA). Cells were treated via gymnotic uptake. Cells were isolated 4 days post-treatment using benchtop antibody/bead protocols. RNA was collected and RNA editing was measured by Sanger sequencing (n=2 biological replicates).

[0081] FIG. 47. Provided technologies can provide editing in vivo including in eyes. hADAR mice were treated with oligonucleotide compositions targeting UGP2 at indicated dosages via intracerebroventricular (ICV) injection in posterior compartment of eyes. Mouse eyes were isolated at 1 and 4 week(s) post-treatment and RNA was isolated. RNA editing was measured by PCR and Sanger sequencing.

[0082] FIG. 48. Provided technologies can provide durable editing in vivo. Mice transgenic for hADAR and SERPINA1-Z allele were treated with oligonucleotide compositions targeting SERPINA1-Z allele at 10 mg/kg doses on days 0, 2, and 4 via subcutaneous administration. Mouse serum was collected through weekly blood draws on indicated days post-treatment. (a) Levels of human AAT protein were measured by ELISA. Data are presented as mean±sem. Stats: Matched 2-way ANOVA; ns: non-significant, **: P<0.01, ***: P<0.001. (b) Mass spectrometry and ELISA were used to determine relative proportions of wild-type (WT/M-AAT) and mutant (Z-AAT/Mutant) AAT protein.

[0083] FIG. 49. Provided technologies can provide editing. Primary mouse hepatocytes transgenic for hADARp110 and SERPINA1-Z allele were treated with oligonucleotide compositions comprising indicated GalNAc-conjugated oligonucleotides targeting SERPINA1-Z allele at indicated concentrations. RNA was isolated 48 hours post-treatment and RNA editing was measured by Sanger sequencing (n=2 biological replicates).

[0084] FIG. 50. Provided technologies can provide editing in vivo. Mice transgenic for hADAR and SERPINA1-Z allele were treated with oligonucleotide compositions targeting SERPINA1-Z allele at 5 mg/kg doses on days 0, 2, and 4 via subcutaneous administration. Mouse liver biopsies were collected on day 7 post-treatment. RNA editing was measured by Sanger sequencing in male (left bar) and female (right bar) mice (n=3 animals per gender).

[0085] FIG. 51. Provided technologies can provide editing. Primary mouse hepatocytes transgenic for hADARp110 and SERPINA1-Z allele were treated with oligonucleotide compositions targeting SERPINA-Z allele at indicated concentrations. RNA was isolated 48 hours post-treatment and RNA editing was measured by Sanger sequencing (n=3 biological replicates).

[0086] FIG. 52. Provided technologies can provide functional edited polypeptides in vivo. Mice transgenic for hADAR and SERPINA1-Z allele were treated with oligonucleotide compositions targeting SERPINA1-Z allele at 10 mg/kg doses on days 0, 2, and 4 via subcutaneous administration. Mouse serum was collected through weekly blood draws on indicated days. Levels of human AAT protein was quantified by ELISA and mass spectrometry to assess relative proportions of wild-type (PiM/WT, left bar) and mutant (PiZ/Mutant, right bar) AAT protein.

[0087] FIG. 53. Provided technologies can provide editing. Compositions of oligonucleotides comprising various modifications were prepared and assessed. Editing of target adenosines in SERPINA1-Z allele in primary mouse hepatocytes transgenic for humanADARp110 and SERPINA1-Z allele was confirmed (N=2 biological replicates).

[0088] FIG. 54. Provided technologies can provide editing. Compositions of oligonucleotides comprising various modifications, such as linkage modifications (e.g., PS (phosphorothioate), PN (e.g., phosphoryl guanidine linkages such as n001), etc.), sugar modifications (e.g., 2′-F, 2′-OMe, etc.), etc., were prepared and assessed. Editing of SERPINA1-Z allele in primary mouse hepatocytes transgenic for humanADARp110 and SERPINA1-Z allele was confirmed (N=2 biological replicates).

[0089] FIG. 55. Provided technologies can provide editing. Compositions of oligonucleotides comprising various modifications, such as linkage modifications (e.g., PS (phosphorothioate), PN (e.g., phosphoryl guanidine linkages such as n001), etc.), sugar modifications (e.g., 2′-F, 2′-OMe, etc.), etc., were prepared and assessed. Editing of SERPINA1-Z allele in primary mouse hepatocytes transgenic for humanADARp110 and SERPINA1-Z allele was confirmed (N=2 biological replicates)

[0090] FIG. 56. Provided technologies can provide editing. Compositions of oligonucleotides comprising various modifications, such as base modifications (e.g., b001A, b008U, b010U, b001C, b008C, b011U, b002G, b012U, etc.), linkage modifications (e.g., PS (phosphorothioate), PN (e.g., phosphoryl guanidine linkages such as n001), etc.), sugar modifications (e.g., 2′-F, 2′-OMe, etc.), etc., were prepared and assessed. Editing of target adenosines in SERPINA1-Z allele in primary mouse hepatocytes transgenic for humanADARp110 and SERPINA1-Z allele was confirmed (N=2 biological replicates) for various oligonucleotide compositions.

[0091] FIG. 57. Provided technologies can provide editing. Compositions of oligonucleotides comprising various modifications, such as base modifications (e.g., b008U, b010U, b001C, b008C, b011U, b012U, etc.), linkage modifications (e.g., PS (phosphorothioate), PN (e.g., phosphoryl guanidine linkages such as n001), etc.), sugar modifications (e.g., 2′-F, 2′-OMe, etc.), etc., were prepared and assessed. Editing of target adenosines in SERPINA1-Z allele in primary mouse hepatocytes transgenic for humanADARp110 and SERPINA1-Z allele was confirmed (N=2 biological replicates) for various oligonucleotide compositions.

[0092] FIG. 58. Provided technologies can provide editing. Compositions of oligonucleotides comprising various modifications, such as nucleobase modifications, linkage modifications, sugar modifications, etc., were prepared and assessed. Editing of target adenosines in SERPINA1-Z allele in primary mouse hepatocytes transgenic for humanADARp110 and SERPINA1-Z allele was confirmed (N=2 biological replicates) for various oligonucleotide compositions.

[0093] FIG. 59. Provided technologies can provide editing. Compositions of oligonucleotides comprising various modifications, e.g., Csm11, Csm12, b009Csm11, b009Csm12, Gsm11, Gsm12, Tsm11, Tsm12, L010, etc., were prepared and assessed. Editing of target adenosines in SERPINA1-Z allele in primary mouse hepatocytes transgenic for humanADARp110 and SERPINA1-Z allele was confirmed (N=2 biological replicates) for various oligonucleotide compositions.

[0094] FIG. 60. Provided technologies can provide editing. Compositions of oligonucleotides comprising various modifications, such as base modifications (e.g., b008U), linkage modifications (e.g., PS (phosphorothioate), PN (e.g., phosphoryl guanidine linkages such as n001), etc.), sugar modifications (e.g., 2′-F, 2′-OMe, sm15, etc.), etc., were prepared and assessed. Editing of target adenosines in SERPINA1-Z allele in primary mouse hepatocytes transgenic for humanADARp110 and SERPINA1-Z allele was confirmed (N=2 biological replicates).

[0095] FIG. 61. Provided technologies can provide editing. Compositions of oligonucleotides comprising various modifications, such as base modifications (e.g., b008U, b001A, etc.), linkage modifications (e.g., PS (phosphorothioate), PN (e.g., phosphoryl guanidine linkages such as n001), etc.), sugar modifications (e.g., 2′-F, 2′-OMe, etc.), etc., were prepared and assessed. Editing of target adenosines in SERPINA1-Z allele in primary mouse hepatocytes transgenic for humanADARp110 and SERPINA1-Z allele was confirmed (N=2 biological replicates).

[0096] FIG. 62. Provided technologies can provide editing. Among other things, it is shown that 2′-OR modifications wherein R is not —H can be utilized at various positions. Editing of target adenosines in SERPINA1-Z allele in primary mouse hepatocytes transgenic for humanADARp110 and SERPINA1-Z allele was confirmed (N=2 biological replicates).

[0097] FIG. 63. Provided technologies can provide editing. Compositions of oligonucleotides comprising various modifications, such as base modifications (e.g., b008U, etc.), linkage modifications (e.g., PS (phosphorothioate), PN (e.g., phosphoryl guanidine linkages such as n001), etc.), sugar modifications (e.g., 2′-F, 2′-OMe, etc.), etc., were prepared and assessed. Editing of target adenosines in SERPINA1-Z allele in primary mouse hepatocytes transgenic for humanADARp110 and SERPINA1-Z allele was confirmed (N=2 biological replicates).

[0098] FIG. 64. Provided technologies can provide editing. Compositions of oligonucleotides comprising various modifications, such as base modifications (e.g., b008U, etc.), linkage modifications (e.g., PS (phosphorothioate), PN (e.g., phosphoryl guanidine linkages such as n001), etc.), sugar modifications (e.g., 2′-F, 2′-OMe, etc.), etc., were prepared and assessed. Editing of target adenosines in SERPINA1-Z allele in primary mouse hepatocytes transgenic for humanADARp110 and SERPINA1-Z allele was confirmed (N=2 biological replicates).

[0099] FIG. 65. Provided technologies can provide editing. Compositions of oligonucleotides comprising various modifications, such as base modifications (e.g., b008U, etc.), linkage modifications (e.g., PS (phosphorothioate), PN (e.g., phosphoryl guanidine linkages such as n001), etc.), sugar modifications (e.g., 2′-F, 2′-OMe, etc.), etc., were prepared and assessed. Editing of target adenosines in SERPINA1-Z allele in primary mouse hepatocytes transgenic for humanADARp110 and SERPINA1-Z allele was confirmed (N=2 biological replicates).

[0100] FIG. 66. Provided technologies can provide editing. Compositions of oligonucleotides comprising various modifications, such as base modifications (e.g., b008U, etc.), linkage modifications (e.g., PS (phosphorothioate), PN (e.g., phosphoryl guanidine linkages such as n001), etc.), sugar modifications (e.g., 2′-F, 2′-OMe, etc.), etc., were prepared and assessed. Editing of target adenosines in SERPINA1-Z allele in primary mouse hepatocytes transgenic for humanADARp110 and SERPINA1-Z allele was confirmed (N=2 biological replicates).

[0101] FIG. 67. Provided technologies can provide editing. Compositions of oligonucleotides comprising various modifications, such as base modifications (e.g., b008U, etc.), linkage modifications (e.g., PS (phosphorothioate), PN (e.g., phosphoryl guanidine linkages such as n001), etc.), sugar modifications (e.g., 2′-F, 2′-OMe, 2′-MOE, etc.), etc., were prepared and assessed. Editing of target adenosines in SERPINA1-Z allele in primary mouse hepatocytes transgenic for humanADARp110 and SERPINA1-Z allele was confirmed (N=2 biological replicates).

[0102] FIG. 68. Provided technologies can provide editing. Compositions of oligonucleotides comprising various modifications, such as base modifications (e.g., b008U, etc.), linkage modifications (e.g., PS (phosphorothioate), PN (e.g., phosphoryl guanidine linkages such as n001), etc.), sugar modifications (e.g., 2′-F, 2′-OMe, 2′-MOE, etc.), etc., were prepared and assessed. Editing of target adenosines in SERPINA1-Z allele in primary mouse hepatocytes transgenic for humanADARp110 and SERPINA1-Z allele was confirmed (N=2 biological replicates).

[0103] FIG. 69. Provided technologies can provide editing. Compositions of oligonucleotides comprising various modifications, such as base modifications (e.g., b008U, etc.), linkage modifications (e.g., PS (phosphorothioate), PN (e.g., phosphoryl guanidine linkages such as n001), etc.), sugar modifications (e.g., 2′-F, 2′-OMe, 2′-MOE, etc.), etc., were prepared and assessed. Editing of target adenosines in SERPINA1-Z allele in primary mouse hepatocytes transgenic for humanADARp110 and SERPINA1-Z allele was confirmed (N=2 biological replicates).

[0104] FIG. 70. Provided technologies can provide editing. Compositions of oligonucleotides comprising various modifications, such as base modifications (e.g., b008U, etc.), linkage modifications (e.g., PS (phosphorothioate), PN (e.g., phosphoryl guanidine linkages such as n001), etc.), sugar modifications (e.g., 2′-F, 2′-OMe, 2′-MOE, etc.), etc., were prepared and assessed. Editing of target adenosines in SERPINA1-Z allele in primary mouse hepatocytes transgenic for humanADARp110 and SERPINA1-Z allele was confirmed (N=2 biological replicates).

[0105] FIG. 71. Provided technologies can provide editing. Compositions of oligonucleotides comprising various modifications, such as base modifications (e.g., b008U, etc.), linkage modifications (e.g., PS (phosphorothioate), PN (e.g., phosphoryl guanidine linkages such as n001), etc.), sugar modifications (e.g., 2′-F, 2′-OMe, sm15, etc.), etc., were prepared and assessed. Editing of target adenosines in SERPINA1-Z allele in primary mouse hepatocytes transgenic for humanADARp110 and SERPINA1-Z allele was confirmed (N=2 biological replicates).

[0106] FIG. 72. Provided technologies can provide editing. Compositions of oligonucleotides comprising various modifications, e.g., linkages such as n001, n002, n006, n020, etc., were prepared and assessed. Editing of target adenosines in SERPINA1-Z allele in primary mouse hepatocytes transgenic for humanADARp110 and SERPINA1-Z allele was confirmed (N=2 biological replicates).

[0107] FIG. 73. Provided technologies can provide editing. Compositions of oligonucleotides comprising various modifications, such as base modifications (e.g., b001A, etc.), linkage modifications (e.g., PS (phosphorothioate), PN (e.g., phosphoryl guanidine linkages such as n001), etc.), sugar modifications (e.g., 2′-F, 2′-OMe, morpholine sugars, etc.), etc., were prepared and assessed. Editing of target adenosines in SERPINA1-Z allele in primary mouse hepatocytes transgenic for humanADARp110 and SERPINA1-Z allele was confirmed (N=2 biological replicates) for various oligonucleotide compositions.

[0108] FIG. 74. Provided technologies can provide editing. Compositions of oligonucleotides comprising various modifications, such as base modifications (e.g., b001A, etc.), linkage modifications (e.g., PS (phosphorothioate), PN (e.g., phosphoryl guanidine linkages such as n001), etc.), sugar modifications (e.g., 2′-F, 2′-OMe, morpholine sugars, etc.), etc., were prepared and assessed. Editing of target adenosines in SERPINA1-Z allele in primary mouse hepatocytes transgenic for humanADARp110 and SERPINA1-Z allele was confirmed (N=2 biological replicates) for various oligonucleotide compositions.

[0109] FIG. 75. Various nearest neighbors can provide editing activity. Editing of target adenosines in SERPINA1-Z allele in primary mouse hepatocytes transgenic for humanADARp110 and SERPINA1-Z allele was confirmed (N=2 biological replicates).

[0110] FIG. 76. Provided technologies can provide editing. Compositions of oligonucleotides comprising various modifications (e.g., b008U, b012U, b013U, b001A, b002A, b003A, b004I, b002G, b009U, etc.), linkage modifications (e.g., PS (phosphorothioate), PN (e.g., phosphoryl guanidine linkages such as n001), etc.), sugar modifications (e.g., 2′-F, 2′-OMe, etc.), etc., were prepared and assessed. Editing of target adenosines in SERPINA1-Z allele in primary mouse hepatocytes transgenic for humanADARp110 and SERPINA1-Z allele was confirmed (N=2 biological replicates).

[0111] FIG. 77. Provided technologies can provide editing. Compositions of oligonucleotides comprising various sugar and nucleobase modifications (e.g., in b002A, b003A, b008U, b001C, Tsm11, Tsm12, b004C, b007C, 2′-F, 2′-OMe, etc.), linkage modifications (e.g., PS (phosphorothioate), PN (e.g., phosphoryl guanidine linkages such as n001), etc.), etc., were prepared and assessed. Editing of target adenosines in SERPINA1-Z allele in primary mouse hepatocytes transgenic for humanADARp110 and SERPINA1-Z allele was confirmed (N=2 biological replicates).

[0112] FIG. 78. Provided technologies can provide editing. Compositions of oligonucleotides comprising various sugar and nucleobase modifications (e.g., in b003A, b008U, b001C, b008C, Tsm11, Tsm12, b004C, Csm17, etc.), linkage modifications (e.g., PS (phosphorothioate), PN (e.g., phosphoryl guanidine linkages such as n001), etc.), etc., were prepared and assessed. Editing of target adenosines in SERPINA1-Z allele in primary mouse hepatocytes transgenic for humanADARp110 and SERPINA1-Z allele was confirmed (N=2 biological replicates).

[0113] FIG. 79. Provided technologies can provide editing. Compositions of oligonucleotides comprising various sugars and nucleobases (e.g., in dI, b001A, b003A, b008U, b001C, b008C, Tsm11, Tsm12, b004C, Csm17, etc. at N₋₁), linkage modifications (e.g., PS (phosphorothioate), PN (e.g., phosphoryl guanidine linkages such as n001), etc.), etc., were prepared and assessed. Editing of target adenosines in SERPINA1-Z allele in primary mouse hepatocytes transgenic for humanADARp110 and SERPINA1-Z allele was confirmed (N=2 biological replicates) for various oligonucleotide compositions.

[0114] FIG. 80. Provided technologies can provide editing. Compositions of oligonucleotides comprising various sugars and nucleobases (e.g., in dI, b001A, b002A, b003A, b008U, b008C, Tsm11, Tsm12, b004C, Csm17, etc. at N₋₁), linkage modifications (e.g., PS (phosphorothioate), PN (e.g., phosphoryl guanidine linkages such as n001), etc.), etc., were prepared and assessed. Editing of target adenosines in SERPINA1-Z allele in primary mouse hepatocytes transgenic for humanADARp110 and SERPINA1-Z allele was confirmed (N=2 biological replicates) for various oligonucleotide compositions.

[0115] FIG. 81. Provided technologies can provide editing. Compositions of oligonucleotides comprising various sugars and nucleobases (e.g., in Csm11, Csm12, b009Csm11, b009Csm12, etc. at N₋₁), linkage modifications (e.g., PS (phosphorothioate), PN (e.g., phosphoryl guanidine linkages such as n001), etc.), etc., were prepared and assessed. Editing of target adenosines in SERPINA1-Z allele in primary mouse hepatocytes transgenic for humanADARp110 and SERPINA1-Z allele was confirmed (N=2 biological replicates) for various oligonucleotide compositions.

[0116] FIG. 82. Oligonucleotides comprising various types of internucleotidic linkages can provide editing. Compositions of oligonucleotides comprising various modifications, such as base modifications (e.g., b008U, b014I, etc.), linkage modifications (e.g., PS (phosphorothioate), PN (e.g., phosphoryl guanidine linkages such as n001, n004, n008, n025, n026, etc.), sugar modifications (e.g., 2′-F, 2′-OMe, 2′-MOE, etc.), etc., were prepared and assessed. Editing of target adenosines in SERPINA1-Z allele in primary mouse hepatocytes transgenic for humanADARp110 and SERPINA1-Z allele was confirmed (N=2 biological replicates). For each oligonucleotide composition, from left to right, 1.0, 0.33, 0.11, 0.037 uM, respectively.

[0117] FIG. 83. Provided technologies can provide editing. Compositions of oligonucleotides comprising various modifications and patterns thereof were prepared and assessed. Editing of target adenosines in UGP2 in primary human hepatocytes was confirmed (N=2 biological replicates) for various oligonucleotide compositions. Concentrations tested were 1 uM, 0.1 uM, and 0.01 uM, from left to right.

[0118] FIG. 84. Provided technologies can provide editing. Compositions of oligonucleotides comprising various modifications and patterns thereof were prepared and assessed, and editing of target adenosines in UGP2 in primary human hepatocytes was confirmed at various concentrations.

[0119] FIG. 85. Provided technologies can provide editing in vivo. In vivo editing of target adenosines in SERPINA1-Z allele in mice transgenic for human ADAR and SERPINA1-Z allele was confirmed. Serum levels of AAT in treated mice were also increased.

[0120] FIG. 86. Provided technologies can provide editing in vivo. Oligonucleotides comprising various nucleobases (e.g., b008U, hypoxanthine, etc.), linkages (e.g., PO, PS, PN (e.g., phosphoryl guanidine linkages such as n001), etc.), sugar modifications (e.g., 2′-F, 2′-OMe, 2′-MOE, etc.), etc., and patterns thereof were prepared. Editing of target adenosines and increase of serum AAT was confirmed (N=4 animals per group). Top: SERPINA1 editing at day 10. Bottom: serum AAT fold change.

### DETAILED DESCRIPTION OF CERTAIN EMBODIMENTS

[0121] Technologies of the present disclosure may be understood more readily by reference to the following detailed description of certain embodiments.

### Definitions

[0122] As used herein, the following definitions shall apply unless otherwise indicated. For purposes of this disclosure, the chemical elements are identified in accordance with the Periodic Table of the Elements, CAS version, Handbook of Chemistry and Physics, 75th Ed. Additionally, general principles of organic chemistry are described in “Organic Chemistry”, Thomas Sorrell, University Science Books, Sausalito: 1999, and “March's Advanced Organic Chemistry”, 5th Ed., Ed.: Smith, M. B. and March, J., John Wiley & Sons, New York: 2001.

[0123] As used herein in the present disclosure, unless otherwise clear from context, (i) the term “a” or “an” may be understood to mean “at least one”; (ii) the term “or” may be understood to mean “and/or”; (iii) the terms “comprising”, “comprise”, “including” (whether used with “not limited to” or not), and “include” (whether used with “not limited to” or not) may be understood to encompass itemized components or steps whether presented by themselves or together with one or more additional components or steps; (iv) the term “another” may be understood to mean at least an additional/second one or more; (v) the terms “about” and “approximately” may be understood to permit standard variation as would be understood by those of ordinary skill in the art; and (vi) where ranges are provided, endpoints are included.

[0124] Unless otherwise specified, description of oligonucleotides and elements thereof (e.g., base sequence, sugar modifications, internucleotidic linkages, linkage phosphorus stereochemistry, patterns thereof, etc.) is from 5′ to 3′. As those skilled in the art will appreciate, in some embodiments, oligonucleotides may be provided and/or utilized as salt forms, particularly pharmaceutically acceptable salt forms, e.g., sodium salts. As those skilled in the art will also appreciate, in some embodiments, individual oligonucleotides within a composition may be considered to be of the same constitution and/or structure even though, within such composition (e.g., a liquid composition), particular such oligonucleotides might be in different salt form(s) (and may be dissolved and the oligonucleotide chain may exist as an anion form when, e.g., in a liquid composition) at a particular moment in time. For example, those skilled in the art will appreciate that, at a given pH, individual internucleotidic linkages along an oligonucleotide chain may be in an acid (H) form, or in one of a plurality of possible salt forms (e.g., a sodium salt, or a salt of a different cation, depending on which ions might be present in the preparation or composition), and will understand that, so long as their acid forms (e.g., replacing all cations, if any, with H⁺) are of the same constitution and/or structure, such individual oligonucleotides may properly be considered to be of the same constitution and/or structure.

[0125] Aliphatic: As used herein, “aliphatic” means a straight-chain (i.e., unbranched) or branched, substituted or unsubstituted hydrocarbon chain that is completely saturated or that contains one or more units of unsaturation (but not aromatic), or a substituted or unsubstituted monocyclic, bicyclic, or polycyclic hydrocarbon ring that is completely saturated or that contains one or more units of unsaturation (but not aromatic), or combinations thereof. In some embodiments, aliphatic groups contain 1-50 aliphatic carbon atoms. In some embodiments, aliphatic groups contain 1-20 aliphatic carbon atoms. In other embodiments, aliphatic groups contain 1-10 aliphatic carbon atoms. In other embodiments, aliphatic groups contain 1-9 aliphatic carbon atoms. In other embodiments, aliphatic groups contain 1-8 aliphatic carbon atoms. In other embodiments, aliphatic groups contain 1-7 aliphatic carbon atoms. In other embodiments, aliphatic groups contain 1-6 aliphatic carbon atoms. In still other embodiments, aliphatic groups contain 1-5 aliphatic carbon atoms, and in yet other embodiments, aliphatic groups contain 1, 2, 3, or 4 aliphatic carbon atoms. Suitable aliphatic groups include, but are not limited to, linear or branched, substituted or unsubstituted alkyl, alkenyl, alkynyl groups and hybrids thereof such as (cycloalkyl)alkyl, (cycloalkenyl)alkyl or (cycloalkyl)alkenyl.

[0126] Alkenyl: As used herein, the term “alkenyl” refers to an aliphatic group, as defined herein, having one or more double bonds.

[0127] Alkyl: As used herein, the term “alkyl” is given its ordinary meaning in the art and may include saturated aliphatic groups, including straight-chain alkyl groups, branched-chain alkyl groups, cycloalkyl (alicyclic) groups, alkyl substituted cycloalkyl groups, and cycloalkyl substituted alkyl groups. In some embodiments, alkyl has 1-100 carbon atoms. In certain embodiments, a straight chain or branched chain alkyl has about 1-20 carbon atoms in its backbone (e.g., C₁-C₂₀ for straight chain, C₂-C₂₀ for branched chain), and alternatively, about 1-10. In some embodiments, cycloalkyl rings have from about 3-10 carbon atoms in their ring structure where such rings are monocyclic, bicyclic, or polycyclic, and alternatively about 5, 6 or 7 carbons in the ring structure. In some embodiments, an alkyl group may be a lower alkyl group, wherein a lower alkyl group comprises 1-4 carbon atoms (e.g., C₁-C₄ for straight chain lower alkyls).

[0128] Alkynyl: As used herein, the term “alkynyl” refers to an aliphatic group, as defined herein, having one or more triple bonds.

[0129] Analog: The term “analog” includes any chemical moiety which differs structurally from a reference chemical moiety or class of moieties, but which is capable of performing at least one function of such a reference chemical moiety or class of moieties. As non-limiting examples, a nucleotide analog differs structurally from a nucleotide but performs at least one function of a nucleotide; a nucleobase analog differs structurally from a nucleobase but performs at least one function of a nucleobase; etc.

[0130] Animal: As used herein, the term “animal” refers to any member of the animal kingdom. In some embodiments, “animal” refers to humans, at any stage of development. In some embodiments, “animal” refers to non-human animals, at any stage of development. In certain embodiments, the non-human animal is a mammal (e.g., a rodent, a mouse, a rat, a rabbit, a monkey, a dog, a cat, a sheep, cattle, a primate and/or a pig). In some embodiments, animals include, but are not limited to, mammals, birds, reptiles, amphibians, fish and/or worms. In some embodiments, an animal may be a transgenic animal, a genetically-engineered animal and/or a clone.

[0131] Aryl: The term “aryl”, as used herein, used alone or as part of a larger moiety as in “aralkyl,” “aralkoxy,” or “aryloxyalkyl,” refers to monocyclic, bicyclic or polycyclic ring systems having a total of five to thirty ring members, wherein at least one ring in the system is aromatic. In some embodiments, an aryl group is a monocyclic, bicyclic or polycyclic ring system having a total of five to fourteen ring members, wherein at least one ring in the system is aromatic, and wherein each ring in the system contains 3 to 7 ring members. In some embodiments, each monocyclic ring unit is aromatic. In some embodiments, an aryl group is a biaryl group. The term “aryl” may be used interchangeably with the term “aryl ring.” In certain embodiments of the present disclosure, “aryl” refers to an aromatic ring system which includes, but is not limited to, phenyl, biphenyl, naphthyl, binaphthyl, anthracyl and the like, which may bear one or more substituents. Also included within the scope of the term “aryl,” as it is used herein, is a group in which an aromatic ring is fused to one or more non-aromatic rings, such as indanyl, phthalimidyl, naphthimidyl, phenanthridinyl, or tetrahydronaphthyl, and the like.

[0132] Characteristic portion: As used herein, the term “characteristic portion”, in the broadest sense, refers to a portion of a substance whose presence (or absence) correlates with presence (or absence) of a particular feature, attribute, or activity of the substance. In some embodiments, a characteristic portion of a substance is a portion that is found in the substance and in related substances that share the particular feature, attribute or activity, but not in those that do not share the particular feature, attribute or activity. In certain embodiments, a characteristic portion shares at least one functional characteristic with the intact substance. For example, in some embodiments, a “characteristic portion” of a protein or polypeptide is one that contains a continuous stretch of amino acids, or a collection of continuous stretches of amino acids, that together are characteristic of a protein or polypeptide. In some embodiments, each such continuous stretch generally contains at least 2, 5, 10, 15, 20, 50, or more amino acids. In general, a characteristic portion of a substance (e.g., of a protein, antibody, etc.) is one that, in addition to the sequence and/or structural identity specified above, shares at least one functional characteristic with the relevant intact substance. In some embodiments, a characteristic portion may be biologically active.

[0133] Chiral control: As used herein, “chiral control” refers to control of the stereochemical designation of the chiral linkage phosphorus in a chiral internucleotidic linkage within an oligonucleotide. As used herein, a chiral internucleotidic linkage is an internucleotidic linkage whose linkage phosphorus is chiral. In some embodiments, a control is achieved through a chiral element that is absent from the sugar and base moieties of an oligonucleotide, for example, in some embodiments, a control is achieved through use of one or more chiral auxiliaries during oligonucleotide preparation, which chiral auxiliaries often are part of chiral phosphoramidites used during oligonucleotide preparation. In contrast to chiral control, a person having ordinary skill in the art will appreciate that conventional oligonucleotide synthesis which does not use chiral auxiliaries cannot control stereochemistry at a chiral internucleotidic linkage if such conventional oligonucleotide synthesis is used to form the chiral internucleotidic linkage. In some embodiments, the stereochemical designation of each chiral linkage phosphorus in each chiral internucleotidic linkage within an oligonucleotide is controlled.

[0134] Chirally controlled oligonucleotide composition: The terms “chirally controlled oligonucleotide composition”, “chirally controlled nucleic acid composition”, and the like, as used herein, refers to a composition that comprises a plurality of oligonucleotides (or nucleic acids) which share a common base sequence, wherein the plurality of oligonucleotides (or nucleic acids) share the same linkage phosphorus stereochemistry at one or more chiral internucleotidic linkages (chirally controlled or stereodefined internucleotidic linkages, whose chiral linkage phosphorus is Rp or Sp in the composition (“stereodefined”), not a random Rp and Sp mixture as non-chirally controlled internucleotidic linkages). In some embodiments, a chirally controlled oligonucleotide composition comprises a plurality of oligonucleotides (or nucleic acids) that share: 1) a common base sequence, 2) a common pattern of backbone linkages, and 3) a common pattern of backbone phosphorus modifications, wherein the plurality of oligonucleotides (or nucleic acids) share the same linkage phosphorus stereochemistry at one or more chiral internucleotidic linkages (chirally controlled or stereodefined internucleotidic linkages, whose chiral linkage phosphorus is Rp or Sp in the composition (“stereodefined”), not a random Rp and Sp mixture as non-chirally controlled internucleotidic linkages). Level of the plurality of oligonucleotides (or nucleic acids) in a chirally controlled oligonucleotide composition is pre-determined/controlled or enriched (e.g., through chirally controlled oligonucleotide preparation to stereoselectively form one or more chiral internucleotidic linkages) compared to a random level in a non-chirally controlled oligonucleotide composition. In some embodiments, about 1%-100%, (e.g., about 5%-100%, 10%-100%, 20%-100%, 30%-100%, 40%-100%, 50%-100%, 60%-100%, 70%-100%, 80-100%, 90-100%, 95-100%, 50%-90%, or about 5%, 10%, 20%, 30%, 40%, 50%, 60%, 70%, 80%, 85%, 90%, 91%, 92%, 93%, 94%, 95%, 96%, 97%, 98%, 99%, or 100%, or at least 5%, 10%, 20%, 30%, 40%, 50%, 60%, 70%, 80%, 85%, 90%, 91%, 92%, 93%, 94%, 95%, 96%, 97%, 98%, or 99%) of all oligonucleotides in a chirally controlled oligonucleotide composition are oligonucleotides of the plurality. In some embodiments, about 1%-100%, (e.g., about 5%-100%, 10%-100%, 20%-100%, 30%-100%, 40%-100%, 50%-100%, 60%-100%, 70%-100%, 80-100%, 90-100%, 95-100%, 50%-90%, or about 5%, 10%, 20%, 30%, 40%, 50%, 60%, 70%, 80%, 85%, 90%, 91%, 92%, 93%, 94%, 95%, 96%, 97%, 98%, 99%, or 100%, or at least 5%, 10%, 20%, 30%, 40%, 50%, 60%, 70%, 80%, 85%, 90%, 91%, 92%, 93%, 94%, 95%, 96%, 97%, 98%, or 99%) of all oligonucleotides in a chirally controlled oligonucleotide composition that share the common base sequence, the common pattern of backbone linkages, and the common pattern of backbone phosphorus modifications are oligonucleotides of the plurality. In some embodiments, a level is about 1%-100%, (e.g., about 5%-100%, 10%-100%, 20%-100%, 30%-100%, 40%-100%, 50%-100%, 60%-100%, 70%-100%, 80-100%, 90-100%, 95-100%, 50%-90%, or about 5%, 10%, 20%, 30%, 40%, 50%, 60%, 70%, 80%, 85%, 90%, 91%, 92%, 93%, 94%, 95%, 96%, 97%, 98%, 99%, or 100%, or at least 5%, 10%, 20%, 30%, 40%, 50%, 60%, 70%, 80%, 85%, 90%, 91%, 92%, 93%, 94%, 95%, 96%, 97%, 98%, or 99%) of all oligonucleotides in a composition, or of all oligonucleotides in a composition that share a common base sequence (e.g., of a plurality of oligonucleotide or an oligonucleotide type), or of all oligonucleotides in a composition that share a common base sequence, a common pattern of backbone linkages, and a common pattern of backbone phosphorus modifications, or of all oligonucleotides in a composition that share a common base sequence, a common patter of base modifications, a common pattern of sugar modifications, a common pattern of internucleotidic linkage types, and/or a common pattern of internucleotidic linkage modifications. In some embodiments, the plurality of oligonucleotides share the same stereochemistry at about 1-50 (e.g., about 1-10, 1-20, 5-10, 5-20, 10-15, 10-20, 10-25, 10-30, or about 1, 2, 3, 4, 5, 6, 7, 8, 9, 10, 11, 12, 13, 14, 15, 16, 17, 18, 19, or 20, or at least 1, 2, 3, 4, 5, 6, 7, 8, 9, 10, 11, 12, 13, 14, 15, 16, 17, 18, 19, or 20) chiral internucleotidic linkages. In some embodiments, the plurality of oligonucleotides share the same stereochemistry at about 1%-100% (e.g., about 5%-100%, 10%-100%, 20%-100%, 30%-100%, 40%-100%, 50%-100%, 60%-100%, 70%-100%, 80-100%, 90-100%, 95-100%, 50%-90%, about 5%, 10%, 15%, 20%, 25%, 30%, 35%, 40%, 45%, 50%, 55%, 60%, 65%, 70%, 75%, 80%, 85%, 90%, 95%, or 100%, or at least 5%, 10%, 15%, 20%, 25%, 30%, 35%, 40%, 45%, 50%, 55%, 60%, 65%, 70%, 75%, 80%, 85%, 90%, 95%, or 99%) of chiral internucleotidic linkages. In some embodiments, oligonucleotides (or nucleic acids) of a plurality share the same pattern of sugar and/or nucleobase modifications, in any. In some embodiments, oligonucleotides (or nucleic acids) of a plurality are various forms of the same oligonucleotide (e.g., acid and/or various salts of the same oligonucleotide). In some embodiments, oligonucleotides (or nucleic acids) of a plurality are of the same constitution. In some embodiments, level of the oligonucleotides (or nucleic acids) of the plurality is about 1%-100%, (e.g., about 5%-100%, 10%-100%, 20%-100%, 30%-100%, 40%-100%, 50%-100%, 60%-100%, 70%-100%, 80-100%, 90-100%, 95-100%, 50%-90%, or about 5%, 10%, 20%, 30%, 40%, 50%, 60%, 70%, 80%, 85%, 90%, 91%, 92%, 93%, 94%, 95%, 96%, 97%, 98%, 99%, or 100%, or at least 5%, 10%, 20%, 30%, 40%, 50%, 60%, 70%, 80%, 85%, 90%, 91%, 92%, 93%, 94%, 95%, 96%, 97%, 98%, or 99%) of all oligonucleotides (or nucleic acids) in a composition that share the same constitution as the oligonucleotides (or nucleic acids) of the plurality. In some embodiments, each chiral internucleotidic linkage is a chiral controlled internucleotidic linkage, and the composition is a completely chirally controlled oligonucleotide composition. In some embodiments, oligonucleotides (or nucleic acids) of a plurality are structurally identical. In some embodiments, a chirally controlled internucleotidic linkage has a diastereopurity of at least 80%, 85%, 90%, 91%, 92%, 93%, 94%, 95%, 96%, 97%, 98%, 99% or 99.5%, typically at least 90%, 91%, 92%, 93%, 94%, 95%, 96%, 97%, 98%, 99% or 99.5%. In some embodiments, a chirally controlled internucleotidic linkage has a diastereopurity of at least 95%. In some embodiments, a chirally controlled internucleotidic linkage has a diastereopurity of at least 96%. In some embodiments, a chirally controlled internucleotidic linkage has a diastereopurity of at least 97%. In some embodiments, a chirally controlled internucleotidic linkage has a diastereopurity of at least 98%. In some embodiments, a chirally controlled internucleotidic linkage has a diastereopurity of at least 99%. In some embodiments, a percentage of a level is or is at least (DS)^{nc}, wherein DS is a diastereopurity as described in the present disclosure (e.g., 90%, 91%, 92%, 93%, 94%, 95%, 96%, 97%, 98%, 99% or 99.5% or more) and nc is the number of chirally controlled internucleotidic linkages as described in the present disclosure (e.g., 1-50, 1-40, 1-30, 1-25, 1-20, 5-50, 5-40, 5-30, 5-25, 5-20, 1, 2, 3, 4, 5, 6, 7, 8, 9, 10, 11, 12, 13, 14, 15, 16, 17, 18, 19, 20, 21, 22, 23, 24, 25 or more). In some embodiments, a percentage of a level is or is at least (DS)^{nc}, wherein DS is 95%-100%. For example, when DS is 99% and nc is 10, the percentage is or is at least 90% ((99%)¹⁰≈0.90=90%). In some embodiments, level of a plurality of oligonucleotides in a composition is represented as the product of the diastereopurity of each chirally controlled internucleotidic linkage in the oligonucleotides. In some embodiments, diastereopurity of an internucleotidic linkage connecting two nucleosides in an oligonucleotide (or nucleic acid) is represented by the diastereopurity of an internucleotidic linkage of a dimer connecting the same two nucleosides, wherein the dimer is prepared using comparable conditions, in some instances, identical synthetic cycle conditions (e.g., for the linkage between Nx and Ny in an oligonucleotide . . . NxNy . . . , the dimer is NxNy). In some embodiments, not all chiral internucleotidic linkages are chiral controlled internucleotidic linkages, and the composition is a partially chirally controlled oligonucleotide composition. In some embodiments, a non-chirally controlled internucleotidic linkage has a diastereopurity of less than about 80%, 75%, 70%, 65%, 60%, 55%, or of about 50%, as typically observed in stereorandom oligonucleotide compositions (e.g., as appreciated by those skilled in the art, from traditional oligonucleotide synthesis, e.g., the phosphoramidite method). In some embodiments, oligonucleotides (or nucleic acids) of a plurality are of the same type. In some embodiments, a chirally controlled oligonucleotide composition comprises non-random or controlled levels of individual oligonucleotide or nucleic acids types. For instance, in some embodiments a chirally controlled oligonucleotide composition comprises one and no more than one oligonucleotide type. In some embodiments, a chirally controlled oligonucleotide composition comprises more than one oligonucleotide type. In some embodiments, a chirally controlled oligonucleotide composition comprises multiple oligonucleotide types. In some embodiments, a chirally controlled oligonucleotide composition is a composition of oligonucleotides of an oligonucleotide type, which composition comprises a non-random or controlled level of a plurality of oligonucleotides of the oligonucleotide type.

[0135] Comparable: The term “comparable” is used herein to describe two (or more) sets of conditions or circumstances that are sufficiently similar to one another to permit comparison of results obtained or phenomena observed. In some embodiments, comparable sets of conditions or circumstances are characterized by a plurality of substantially identical features and one or a small number of varied features. Those of ordinary skill in the art will appreciate that sets of conditions are comparable to one another when characterized by a sufficient number and type of substantially identical features to warrant a reasonable conclusion that differences in results obtained or phenomena observed under the different sets of conditions or circumstances are caused by or indicative of the variation in those features that are varied.

[0136] Cycloaliphatic: The term “cycloaliphatic,” “carbocycle,” “carbocyclyl,” “carbocyclic radical,” and “carbocyclic ring,” are used interchangeably, and as used herein, refer to saturated or partially unsaturated, but non-aromatic, cyclic aliphatic monocyclic, bicyclic, or polycyclic ring systems, as described herein, having, unless otherwise specified, from 3 to 30 ring members. Cycloaliphatic groups include, without limitation, cyclopropyl, cyclobutyl, cyclopentyl, cyclopentenyl, cyclohexyl, cyclohexenyl, cycloheptyl, cycloheptenyl, cyclooctyl, cyclooctenyl, norbornyl, adamantyl, and cyclooctadienyl. In some embodiments, a cycloaliphatic group has 3-6 carbons. In some embodiments, a cycloaliphatic group is saturated and is cycloalkyl. The term “cycloaliphatic” may also include aliphatic rings that are fused to one or more aromatic or nonaromatic rings, such as decahydronaphthyl or tetrahydronaphthyl. In some embodiments, a cycloaliphatic group is bicyclic. In some embodiments, a cycloaliphatic group is tricyclic. In some embodiments, a cycloaliphatic group is polycyclic. In some embodiments, “cycloaliphatic” refers to C₃-C₆ monocyclic hydrocarbon, or C₈-C₁₀ bicyclic or polycyclic hydrocarbon, that is completely saturated or that contains one or more units of unsaturation, but which is not aromatic, that has a single point of attachment to the rest of the molecule, or a C₉-C₁₆ polycyclic hydrocarbon that is completely saturated or that contains one or more units of unsaturation, but which is not aromatic, that has a single point of attachment to the rest of the molecule.

[0137] Heteroaliphatic: The term “heteroaliphatic”, as used herein, is given its ordinary meaning in the art and refers to aliphatic groups as described herein in which one or more carbon atoms are independently replaced with one or more heteroatoms (e.g., oxygen, nitrogen, sulfur, silicon, phosphorus, and the like). In some embodiments, one or more units selected from C, CH, CH₂, and CH₃ are independently replaced by one or more heteroatoms (including oxidized and/or substituted forms thereof). In some embodiments, a heteroaliphatic group is heteroalkyl. In some embodiments, a heteroaliphatic group is heteroalkenyl.

[0138] Heteroalkyl: The term “heteroalkyl”, as used herein, is given its ordinary meaning in the art and refers to alkyl groups as described herein in which one or more carbon atoms are independently replaced with one or more heteroatoms (e.g., oxygen, nitrogen, sulfur, silicon, phosphorus, and the like). Examples of heteroalkyl groups include, but are not limited to, alkoxy, poly(ethylene glycol)-, alkyl-substituted amino, tetrahydrofuranyl, piperidinyl, morpholinyl, etc.

[0139] Heteroaryl: The terms “heteroaryl” and “heteroar-”, as used herein, used alone or as part of a larger moiety, e.g., “heteroaralkyl,” or “heteroaralkoxy,” refer to monocyclic, bicyclic or polycyclic ring systems having a total of five to thirty ring members, wherein at least one ring in the system is aromatic and at least one aromatic ring atom is a heteroatom. In some embodiments, a heteroaryl group is a group having 5 to 10 ring atoms (i.e., monocyclic, bicyclic or polycyclic), in some embodiments 5, 6, 9, or 10 ring atoms. In some embodiments, each monocyclic ring unit is aromatic. In some embodiments, a heteroaryl group has 6, 10, or 14π electrons shared in a cyclic array; and having, in addition to carbon atoms, from one to five heteroatoms. Heteroaryl groups include, without limitation, thienyl, furanyl, pyrrolyl, imidazolyl, pyrazolyl, triazolyl, tetrazolyl, oxazolyl, isoxazolyl, oxadiazolyl, thiazolyl, isothiazolyl, thiadiazolyl, pyridyl, pyridazinyl, pyrimidinyl, pyrazinyl, indolizinyl, purinyl, naphthyridinyl, and pteridinyl. In some embodiments, a heteroaryl is a heterobiaryl group, such as bipyridyl and the like. The terms “heteroaryl” and “heteroar-”, as used herein, also include groups in which a heteroaromatic ring is fused to one or more aryl, cycloaliphatic, or heterocyclyl rings, where the radical or point of attachment is on the heteroaromatic ring. Non-limiting examples include indolyl, isoindolyl, benzothienyl, benzofuranyl, dibenzofuranyl, indazolyl, benzimidazolyl, benzthiazolyl, quinolyl, isoquinolyl, cinnolinyl, phthalazinyl, quinazolinyl, quinoxalinyl, 4H-quinolizinyl, carbazolyl, acridinyl, phenazinyl, phenothiazinyl, phenoxazinyl, tetrahydroquinolinyl, tetrahydroisoquinolinyl, and pyrido[2,3-b]-1,4-oxazin-3(4H)-one. A heteroaryl group may be monocyclic, bicyclic or polycyclic. The term “heteroaryl” may be used interchangeably with the terms “heteroaryl ring,” “heteroaryl group,” or “heteroaromatic,” any of which terms include rings that are optionally substituted. The term “heteroaralkyl” refers to an alkyl group substituted by a heteroaryl group, wherein the alkyl and heteroaryl portions independently are optionally substituted.

[0140] Heteroatom: The term “heteroatom”, as used herein, means an atom that is not carbon or hydrogen. In some embodiments, a heteroatom is boron, oxygen, sulfur, nitrogen, phosphorus, or silicon (including oxidized forms of nitrogen, sulfur, phosphorus, or silicon; charged forms of nitrogen (e.g., quaternized forms, forms as in iminium groups, etc.), phosphorus, sulfur, oxygen; etc.). In some embodiments, a heteroatom is silicon, phosphorus, oxygen, sulfur or nitrogen. In some embodiments, a heteroatom is silicon, oxygen, sulfur or nitrogen. In some embodiments, a heteroatom is oxygen, sulfur or nitrogen.

[0141] Heterocycle: As used herein, the terms “heterocycle,” “heterocyclyl,” “heterocyclic radical,” and “heterocyclic ring”, as used herein, are used interchangeably and refer to a monocyclic, bicyclic or polycyclic ring moiety (e.g., 3-30 membered) that is saturated or partially unsaturated and has one or more heteroatom ring atoms. In some embodiments, a heterocyclyl group is a stable 5- to 7-membered monocyclic or 7- to 10-membered bicyclic heterocyclic moiety that is either saturated or partially unsaturated, and having, in addition to carbon atoms, one or more, preferably one to four, heteroatoms, as defined above. When used in reference to a ring atom of a heterocycle, the term “nitrogen” includes substituted nitrogen. As an example, in a saturated or partially unsaturated ring having 0-3 heteroatoms selected from oxygen, sulfur and nitrogen, the nitrogen may be N (as in 3,4-dihydro-2H-pyrrolyl), NH (as in pyrrolidinyl), or ⁺NR (as in N-substituted pyrrolidinyl). A heterocyclic ring can be attached to its pendant group at any heteroatom or carbon atom that results in a stable structure and any of the ring atoms can be optionally substituted. Examples of such saturated or partially unsaturated heterocyclic radicals include, without limitation, tetrahydrofuranyl, tetrahydrothienyl, pyrrolidinyl, piperidinyl, pyrrolinyl, tetrahydroquinolinyl, tetrahydroisoquinolinyl, decahydroquinolinyl, oxazolidinyl, piperazinyl, dioxanyl, dioxolanyl, diazepinyl, oxazepinyl, thiazepinyl, morpholinyl, and quinuclidinyl. The terms “heterocycle,” “heterocyclyl,” “heterocyclyl ring,” “heterocyclic group,” “heterocyclic moiety,” and “heterocyclic radical,” are used interchangeably herein, and also include groups in which a heterocyclyl ring is fused to one or more aryl, heteroaryl, or cycloaliphatic rings, such as indolinyl, 3H-indolyl, chromanyl, phenanthridinyl, or tetrahydroquinolinyl. A heterocyclyl group may be monocyclic, bicyclic or polycyclic. The term “heterocyclylalkyl” refers to an alkyl group substituted by a heterocyclyl, wherein the alkyl and heterocyclyl portions independently are optionally substituted.

[0142] Identity: As used herein, the term “identity” refers to the overall relatedness between polymeric molecules, e.g., between nucleic acid molecules (e.g., oligonucleotides, DNA, RNA, etc.) and/or between polypeptide molecules. In some embodiments, polymeric molecules are considered to be “substantially identical” to one another if their sequences are at least 25%, 30%, 35%, 40%, 45%, 50%, 55%, 60%, 65%, 70%, 75%, 80%, 85%, 90%, 95%, or 99% identical. Calculation of the percent identity of two nucleic acid or polypeptide sequences, for example, can be performed by aligning the two sequences for optimal comparison purposes (e.g., gaps can be introduced in one or both of a first and a second sequences for optimal alignment and non-identical sequences can be disregarded for comparison purposes). In certain embodiments, the length of a sequence aligned for comparison purposes is at least 30%, at least 40%, at least 50%, at least 60%, at least 70%, at least 80%, at least 90%, at least 95%, or substantially 100% of the length of a reference sequence. The nucleotides at corresponding positions are then compared. When a position in the first sequence is occupied by the same residue (e.g., nucleotide or amino acid) as the corresponding position in the second sequence, then the molecules are identical at that position. The percent identity between the two sequences is a function of the number of identical positions shared by the sequences, taking into account the number of gaps, and the length of each gap, which needs to be introduced for optimal alignment of the two sequences. The comparison of sequences and determination of percent identity between two sequences can be accomplished using a mathematical algorithm. For example, the percent identity between two nucleotide sequences can be determined using the algorithm of Meyers and Miller (CABIOS, 1989, 4: 11-17), which has been incorporated into the ALIGN program (version 2.0). In some exemplary embodiments, nucleic acid sequence comparisons made with the ALIGN program use a PAM120 weight residue table, a gap length penalty of 12 and a gap penalty of 4. The percent identity between two nucleotide sequences can, alternatively, be determined using the GAP program in the GCG software package using an NWSgapdna.CMP matrix.

[0143] Internucleotidic linkage: As used herein, the phrase “internucleotidic linkage” refers generally to a linkage linking nucleoside units of an oligonucleotide or a nucleic acid. In some embodiments, an internucleotidic linkage is a phosphodiester linkage, as extensively found in naturally occurring DNA and RNA molecules (natural phosphate linkage (—OP(═O)(OH)O—), which as appreciated by those skilled in the art may exist as a salt form). In some embodiments, an internucleotidic linkage is a modified internucleotidic linkage (not a natural phosphate linkage). In some embodiments, an internucleotidic linkage is a “modified internucleotidic linkage” wherein at least one oxygen atom or —OH of a phosphodiester linkage is replaced by a different organic or inorganic moiety. In some embodiments, such an organic or inorganic moiety is selected from ═S, ═Se, ═NR′, —SR′, —SeR′, —N(R′)₂, B(R′)₃, —S—, —Se—, and —N(R′)—, wherein each R′ is independently as defined and described in the present disclosure. In some embodiments, an internucleotidic linkage is a phosphotriester linkage, phosphorothioate linkage (or phosphorothioate diester linkage, —OP(═O)(SH)O—, which as appreciated by those skilled in the art may exist as a salt form), or phosphorothioate triester linkage. In some embodiments, a modified internucleotidic linkage is a phosphorothioate linkage. In some embodiments, an internucleotidic linkage is one of, e.g., PNA (peptide nucleic acid) or PMO (phosphorodiamidate Morpholino oligomer) linkage. In some embodiments, a modified internucleotidic linkage is a non-negatively charged internucleotidic linkage. In some embodiments, a modified internucleotidic linkage is a neutral internucleotidic linkage (e.g., n001 in certain provided oligonucleotides). It is understood by a person of ordinary skill in the art that an internucleotidic linkage may exist as an anion or cation at a given pH due to the existence of acid or base moieties in the linkage. In some embodiments, a modified internucleotidic linkages is a modified internucleotidic linkages designated as s, s1, s2, s3, s4, s5, s6, s7, s8, s9, s10, s11, s12, s13, s14, s15, s16, s17 and s18 as described in WO 2017/210647.

[0144] In vitro: As used herein, the term “in vitro” refers to events that occur in an artificial environment, e.g., in a test tube or reaction vessel, in cell culture, etc., rather than within an organism (e.g., animal, plant and/or microbe).

[0145] In vivo: As used herein, the term “in vivo” refers to events that occur within an organism (e.g., animal, plant and/or microbe).

[0146] Linkage phosphorus: as defined herein, the phrase “linkage phosphorus” is used to indicate that the particular phosphorus atom being referred to is the phosphorus atom present in the internucleotidic linkage, which phosphorus atom corresponds to the phosphorus atom of a phosphodiester internucleotidic linkage as occurs in naturally occurring DNA and RNA. In some embodiments, a linkage phosphorus atom is in a modified internucleotidic linkage, wherein each oxygen atom of a phosphodiester linkage is optionally and independently replaced by an organic or inorganic moiety. In some embodiments, a linkage phosphorus atom is chiral (e.g., as in phosphorothioate internucleotidic linkages). In some embodiments, a linkage phosphorus atom is achiral (e.g., as in natural phosphate linkages).

[0147] Modified nucleobase: The terms “modified nucleobase”, “modified base” and the like refer to a chemical moiety which is chemically distinct from a nucleobase, but which is capable of performing at least one function of a nucleobase. In some embodiments, a modified nucleobase is a nucleobase which comprises a modification. In some embodiments, a modified nucleobase is capable of at least one function of a nucleobase, e.g., forming a moiety in a polymer capable of base-pairing to a nucleic acid comprising an at least complementary sequence of bases. In some embodiments, a modified nucleobase is substituted A, T, C, G, or U, or a substituted tautomer of A, T, C, G, or U. In some embodiments, a modified nucleobase in the context of oligonucleotides refer to a nucleobase that is not A, T, C, G or U.

[0148] Modified nucleoside: The term “modified nucleoside” refers to a moiety derived from or chemically similar to a natural nucleoside, but which comprises a chemical modification which differentiates it from a natural nucleoside. Non-limiting examples of modified nucleosides include those which comprise a modification at the base and/or the sugar. Non-limiting examples of modified nucleosides include those with a 2′ modification at a sugar. Non-limiting examples of modified nucleosides also include abasic nucleosides (which lack a nucleobase). In some embodiments, a modified nucleoside is capable of at least one function of a nucleoside, e.g., forming a moiety in a polymer capable of base-pairing to a nucleic acid comprising an at least complementary sequence of bases.

[0149] Modified nucleotide: The term “modified nucleotide” includes any chemical moiety which differs structurally from a natural nucleotide but is capable of performing at least one function of a natural nucleotide. In some embodiments, a modified nucleotide comprises a modification at a sugar, base and/or internucleotidic linkage. In some embodiments, a modified nucleotide comprises a modified sugar, modified nucleobase and/or modified internucleotidic linkage. In some embodiments, a modified nucleotide is capable of at least one function of a nucleotide, e.g., forming a subunit in a polymer capable of base-pairing to a nucleic acid comprising an at least complementary sequence of bases.

[0150] Modified sugar: The term “modified sugar” refers to a moiety that can replace a sugar. A modified sugar mimics the spatial arrangement, electronic properties, or some other physicochemical property of a sugar. In some embodiments, as described in the present disclosure, a modified sugar is substituted ribose or deoxyribose. In some embodiments, a modified sugar comprises a 2′-modification. Examples of useful 2′-modification are widely utilized in the art and described herein. In some embodiments, a 2′-modification is 2′-F. In some embodiments, a 2′-modification is 2′-OR, wherein R is optionally substituted C₁₋₁₀ aliphatic. In some embodiments, a 2′-modification is 2′-OMe. In some embodiments, a 2′-modification is 2′-MOE. In some embodiments, a modified sugar is a bicyclic sugar (e.g., a sugar used in LNA, BNA, etc.). In some embodiments, in the context of oligonucleotides, a modified sugar is a sugar that is not ribose or deoxyribose as typically found in natural RNA or DNA.

[0151] Nucleic acid: The term “nucleic acid”, as used herein, includes any nucleotides and polymers thereof. The term “polynucleotide”, as used herein, refers to a polymeric form of nucleotides of any length, either ribonucleotides (RNA) or deoxyribonucleotides (DNA) or a combination thereof. These terms refer to the primary structure of the molecules and, thus, include double- and single-stranded DNA, and double- and single-stranded RNA. These terms include, as equivalents, analogs of either RNA or DNA comprising modified nucleotides and/or modified polynucleotides, such as, though not limited to, methylated, protected and/or capped nucleotides or polynucleotides. The terms encompass poly- or oligo-ribonucleotides (RNA) and poly- or oligo-deoxyribonucleotides (DNA); RNA or DNA derived from N-glycosides or C-glycosides of nucleobases and/or modified nucleobases; nucleic acids derived from sugars and/or modified sugars; and nucleic acids derived from phosphate bridges and/or modified internucleotidic linkages. The term encompasses nucleic acids containing any combinations of nucleobases, modified nucleobases, sugars, modified sugars, phosphate bridges or modified internucleotidic linkages. Examples include, and are not limited to, nucleic acids containing ribose moieties, nucleic acids containing deoxy-ribose moieties, nucleic acids containing both ribose and deoxyribose moieties, nucleic acids containing ribose and modified ribose moieties. Unless otherwise specified, the prefix poly- refers to a nucleic acid containing 2 to about 10,000 nucleotide monomer units and wherein the prefix oligo- refers to a nucleic acid containing 2 to about 200 nucleotide monomer units.

[0152] Nucleobase: The term “nucleobase” refers to the parts of nucleic acids that are involved in the hydrogen-bonding that binds one nucleic acid strand to another complementary strand in a sequence specific manner. The most common naturally-occurring nucleobases are adenine (A), guanine (G), uracil (U), cytosine (C), and thymine (T). In some embodiments, a naturally-occurring nucleobases are modified adenine, guanine, uracil, cytosine, or thymine. In some embodiments, a naturally-occurring nucleobases are methylated adenine, guanine, uracil, cytosine, or thymine. In some embodiments, a nucleobase comprises a heteroaryl ring wherein a ring atom is nitrogen, and when in a nucleoside, the nitrogen is bonded to a sugar moiety. In some embodiments, a nucleobase comprises a heterocyclic ring wherein a ring atom is nitrogen, and when in a nucleoside, the nitrogen is bonded to a sugar moiety. In some embodiments, a nucleobase is a “modified nucleobase,” a nucleobase other than adenine (A), guanine (G), uracil (U), cytosine (C), and thymine (T). In some embodiments, a modified nucleobase is substituted A, T, C, G or U. In some embodiments, a modified nucleobase is a substituted tautomer of A, T, C, G, or U. In some embodiments, a modified nucleobases is methylated adenine, guanine, uracil, cytosine, or thymine. In some embodiments, a modified nucleobase mimics the spatial arrangement, electronic properties, or some other physicochemical property of the nucleobase and retains the property of hydrogen-bonding that binds one nucleic acid strand to another in a sequence specific manner. In some embodiments, a modified nucleobase can pair with all of the five naturally occurring bases (uracil, thymine, adenine, cytosine, or guanine) without substantially affecting the melting behavior, recognition by intracellular enzymes or activity of the oligonucleotide duplex. As used herein, the term “nucleobase” also encompasses structural analogs used in lieu of natural or naturally-occurring nucleotides, such as modified nucleobases and nucleobase analogs. In some embodiments, a nucleobase is optionally substituted A, T, C, G, or U, or an optionally substituted tautomer of A, T, C, G, or U. In some embodiments, a “nucleobase” refers to a nucleobase unit in an oligonucleotide or a nucleic acid (e.g., A, T, C, G or U as in an oligonucleotide or a nucleic acid).

[0153] Nucleoside: The term “nucleoside” refers to a moiety wherein a nucleobase or a modified nucleobase is covalently bound to a sugar or a modified sugar. In some embodiments, a nucleoside is a natural nucleoside, e.g., adenosine, deoxyadenosine, guanosine, deoxyguanosine, thymidine, uridine, cytidine, or deoxycytidine. In some embodiments, a nucleoside is a modified nucleoside, e.g., a substituted natural nucleoside selected from adenosine, deoxyadenosine, guanosine, deoxyguanosine, thymidine, uridine, cytidine, and deoxycytidine. In some embodiments, a nucleoside is a modified nucleoside, e.g., a substituted tautomer of a natural nucleoside selected from adenosine, deoxyadenosine, guanosine, deoxyguanosine, thymidine, uridine, cytidine, and deoxycytidine. In some embodiments, a “nucleoside” refers to a nucleoside unit in an oligonucleotide or a nucleic acid.

[0154] Nucleotide: The term “nucleotide” as used herein refers to a monomeric unit of a polynucleotide that consists of a nucleobase, a sugar, and one or more internucleotidic linkages (e.g., phosphate linkages in natural DNA and RNA). The naturally occurring bases [guanine, (G), adenine, (A), cytosine, (C), thymine, (T), and uracil (U)] are derivatives of purine or pyrimidine, though it should be understood that naturally and non-naturally occurring base analogs are also included. The naturally occurring sugar is the pentose (five-carbon sugar) deoxyribose (which forms DNA) or ribose (which forms RNA), though it should be understood that naturally and non-naturally occurring sugar analogs are also included. Nucleotides are linked via internucleotidic linkages to form nucleic acids, or polynucleotides. Many internucleotidic linkages are known in the art (such as, though not limited to, phosphate, phosphorothioates, boranophosphates and the like). Artificial nucleic acids include PNAs (peptide nucleic acids), phosphotriesters, phosphorothionates, H-phosphonates, phosphoramidates, boranophosphates, methylphosphonates, phosphonoacetates, thiophosphonoacetates and other variants of the phosphate backbone of native nucleic acids, such as those described herein. In some embodiments, a natural nucleotide comprises a naturally occurring base, sugar and internucleotidic linkage. As used herein, the term “nucleotide” also encompasses structural analogs used in lieu of natural or naturally-occurring nucleotides, such as modified nucleotides and nucleotide analogs. In some embodiments, a “nucleotide” refers to a nucleotide unit in an oligonucleotide or a nucleic acid.

[0155] Oligonucleotide: The term “oligonucleotide” refers to a polymer or oligomer of nucleotides, and may contain any combination of natural and non-natural nucleobases, sugars, and internucleotidic linkages.

[0156] Oligonucleotides can be single-stranded or double-stranded. A single-stranded oligonucleotide can have double-stranded regions (formed by two portions of the single-stranded oligonucleotide) and a double-stranded oligonucleotide, which comprises two oligonucleotide chains, can have single-stranded regions for example, at regions where the two oligonucleotide chains are not complementary to each other. Example oligonucleotides include, but are not limited to structural genes, genes including control and termination regions, self-replicating systems such as viral or plasmid DNA, single-stranded and double-stranded RNAi agents and other RNA interference reagents (RNAi agents or iRNA agents), shRNA, antisense oligonucleotides, ribozymes, microRNAs, microRNA mimics, supermirs, aptamers, antimirs, antagomirs, Ul adaptors, triplex-forming oligonucleotides, G-quadruplex oligonucleotides, RNA activators, immuno-stimulatory oligonucleotides, and decoy oligonucleotides.

[0157] Oligonucleotides of the present disclosure can be of various lengths. In particular embodiments, oligonucleotides can range from about 2 to about 200 nucleosides in length. In various related embodiments, oligonucleotides, single-stranded, double-stranded, or triple-stranded, can range in length from about 4 to about 10 nucleosides, from about 10 to about 50 nucleosides, from about 20 to about 50 nucleosides, from about 15 to about 30 nucleosides, from about 20 to about 30 nucleosides in length. In some embodiments, an oligonucleotide is from about 9 to about 39 nucleosides in length. In some embodiments, an oligonucleotide is from about 25 to about 70 nucleosides in length. In some embodiments, an oligonucleotide is from about 26 to about 70 nucleosides in length. In some embodiments, an oligonucleotide is from about 27 to about 70 nucleosides in length. In some embodiments, an oligonucleotide is from about 28 to about 70 nucleosides in length. In some embodiments, an oligonucleotide is from about 29 to about 70 nucleosides in length. In some embodiments, an oligonucleotide is from about 30 to about 70 nucleosides in length. In some embodiments, an oligonucleotide is from about 31 to about 70 nucleosides in length. In some embodiments, an oligonucleotide is from about 32 to about 70 nucleosides in length. In some embodiments, an oligonucleotide is from about 25 to about 60 nucleosides in length. In some embodiments, an oligonucleotide is from about 25 to about 50 nucleosides in length. In some embodiments, an oligonucleotide is from about 25 to about 40 nucleosides in length. In some embodiments, an oligonucleotide is from about 30 to about 40 nucleosides in length. In some embodiments, the oligonucleotide is at least 4, 5, 6, 7, 8, 9, 10, 11, 12, 13, 14, 15, 16, 17, 18, 19, 20, 21, 22, 23, 24, or 25 nucleosides in length. In some embodiments, an oligonucleotide is at least 4 nucleosides in length. In some embodiments, an oligonucleotide is at least 5 nucleosides in length. In some embodiments, an oligonucleotide is at least 6 nucleosides in length. In some embodiments, an oligonucleotide is at least 7 nucleosides in length. In some embodiments, an oligonucleotide is at least 8 nucleosides in length. In some embodiments, an oligonucleotide is at least 9 nucleosides in length. In some embodiments, an oligonucleotide is at least 10 nucleosides in length. In some embodiments, an oligonucleotide is at least 11 nucleosides in length. In some embodiments, an oligonucleotide is at least 12 nucleosides in length. In some embodiments, an oligonucleotide is at least 15 nucleosides in length. In some embodiments, an oligonucleotide is at least 15 nucleosides in length. In some embodiments, an oligonucleotide is at least 16 nucleosides in length. In some embodiments, an oligonucleotide is at least 17 nucleosides in length. In some embodiments, an oligonucleotide is at least 18 nucleosides in length. In some embodiments, an oligonucleotide is at least 19 nucleosides in length. In some embodiments, an oligonucleotide is at least 20 nucleosides in length. In some embodiments, an oligonucleotide is at least 25 nucleosides in length. In some embodiments, an oligonucleotide is at least 26 nucleosides in length. In some embodiments, an oligonucleotide is at least 27 nucleosides in length. In some embodiments, an oligonucleotide is at least 28 nucleosides in length. In some embodiments, an oligonucleotide is at least 29 nucleosides in length. In some embodiments, an oligonucleotide is at least 30 nucleosides in length. In some embodiments, an oligonucleotide is at least 31 nucleosides in length. In some embodiments, an oligonucleotide is at least 32 nucleosides in length. In some embodiments, an oligonucleotide is at least 33 nucleosides in length. In some embodiments, an oligonucleotide is at least 34 nucleosides in length. In some embodiments, an oligonucleotide is at least 35 nucleosides in length. In some embodiments, an oligonucleotide is at least 36 nucleosides in length. In some embodiments, an oligonucleotide is at least 37 nucleosides in length. In some embodiments, an oligonucleotide is at least 38 nucleosides in length. In some embodiments, an oligonucleotide is at least 39 nucleosides in length. In some embodiments, an oligonucleotide is at least 40 nucleosides in length. In some embodiments, an oligonucleotide is 25 nucleosides in length. In some embodiments, an oligonucleotide is 26 nucleosides in length. In some embodiments, an oligonucleotide is 27 nucleosides in length. In some embodiments, an oligonucleotide is 28 nucleosides in length. In some embodiments, an oligonucleotide is 29 nucleosides in length. In some embodiments, an oligonucleotide is 30 nucleosides in length. In some embodiments, an oligonucleotide is 31 nucleosides in length. In some embodiments, an oligonucleotide is 32 nucleosides in length. In some embodiments, an oligonucleotide is 33 nucleosides in length. In some embodiments, an oligonucleotide is 34 nucleosides in length. In some embodiments, an oligonucleotide is 35 nucleosides in length. In some embodiments, an oligonucleotide is 36 nucleosides in length. In some embodiments, an oligonucleotide is 37 nucleosides in length. In some embodiments, an oligonucleotide is 38 nucleosides in length. In some embodiments, an oligonucleotide is 39 nucleosides in length. In some embodiments, an oligonucleotide is 40 nucleosides in length. In some embodiments, each nucleoside counted in an oligonucleotide length independently comprises a nucleobase comprising a ring having at least one nitrogen ring atom. In some embodiments, each nucleoside counted in an oligonucleotide length independently comprises A, T, C, G, or U, or optionally substituted A, T, C, G, or U, or an optionally substituted tautomer of A, T, C, G or U.

[0158] Oligonucleotide type: As used herein, the phrase “oligonucleotide type” is used to define an oligonucleotide that has a particular base sequence, pattern of backbone linkages (i.e., pattern of internucleotidic linkage types, for example, phosphate, phosphorothioate, phosphorothioate triester, etc.), pattern of backbone chiral centers [i.e., pattern of linkage phosphorus stereochemistry (Rp/Sp)], and pattern of backbone phosphorus modifications. In some embodiments, oligonucleotides of a common designated “type” are structurally identical to one another.

[0159] One of skill in the art will appreciate that synthetic methods of the present disclosure provide for a degree of control during the synthesis of an oligonucleotide strand such that each nucleotide unit of the oligonucleotide strand can be designed and/or selected in advance to have a particular stereochemistry at the linkage phosphorus and/or a particular modification at the linkage phosphorus, and/or a particular base, and/or a particular sugar. In some embodiments, an oligonucleotide strand is designed and/or selected in advance to have a particular combination of stereocenters at the linkage phosphorus. In some embodiments, an oligonucleotide strand is designed and/or determined to have a particular combination of modifications at the linkage phosphorus. In some embodiments, an oligonucleotide strand is designed and/or selected to have a particular combination of bases. In some embodiments, an oligonucleotide strand is designed and/or selected to have a particular combination of one or more of the above structural characteristics. In some embodiments, the present disclosure provides compositions comprising or consisting of a plurality of oligonucleotide molecules (e.g., chirally controlled oligonucleotide compositions). In some embodiments, all such molecules are of the same type (i.e., are structurally identical to one another). In some embodiments, however, provided compositions comprise a plurality of oligonucleotides of different types, typically in pre-determined relative amounts.

[0160] Optionally Substituted: As described herein, compounds, e.g., oligonucleotides, of the disclosure may contain optionally substituted and/or substituted moieties. In general, the term “substituted,” whether preceded by the term “optionally” or not, means that one or more hydrogens of the designated moiety are replaced with a suitable substituent. Unless otherwise indicated, an “optionally substituted” group may have a suitable substituent at each substitutable position of the group, and when more than one position in any given structure may be substituted with more than one substituent selected from a specified group, the substituent may be either the same or different at every position. In some embodiments, an optionally substituted group is unsubstituted. Combinations of substituents envisioned by this disclosure are preferably those that result in the formation of stable or chemically feasible compounds. The term “stable,” as used herein, refers to compounds that are not substantially altered when subjected to conditions to allow for their production, detection, and, in certain embodiments, their recovery, purification, and use for one or more of the purposes disclosed herein. Certain substituents are described below.

[0161] Suitable monovalent substituents on a substitutable atom, e.g., a suitable carbon atom, are independently halogen; —(CH₂)₀₋₄R^{∘}; —(CH₂)₀₋₄OR^{∘}; —O(CH₂)₀₋₄R^{∘}, —O—(CH₂)₀₋₄C(O)OR^{∘}; —(CH₂)₀₋₄CH(OR^{∘})₂; —(CH₂)₀₋₄Ph, which may be substituted with R^{∘}; —(CH₂)₀₋₄O(CH₂)₀₋₁Ph which may be substituted with R^{∘}; —CH═CHPh, which may be substituted with R^{∘}; —(CH₂)₀₋₄O(CH₂)₀₋₁-pyridyl which may be substituted with R^{∘}; —NO₂; —CN; —N₃; —(CH₂)₀₋₄N(R^{∘})₂; —(CH₂)₀₋₄N(R^{∘})C(O)R^{∘}; —N(R^{∘})C(S)R^{∘}; —(CH₂)₀₋₄N(R^{∘})C(O)NR^{∘}₂; —N(R^{∘})C(S)NR^{∘}₂; —(CH₂)₀₋₄N(R^{∘})C(O)OR^{∘}; —N(R^{∘})N(R^{∘})C(O)R^{∘}; —N(R^{∘})N(R^{∘})C(O)NR^{∘}₂; —N(R^{∘})N(R^{∘})C(O)OR^{∘}; —(CH₂)₀₋₄C(O)R^{∘}; —C(S)R^{∘}; —(CH₂)₀₋₄C(O)OR^{∘}; —(CH₂)₀₋₄C(O)SR^{∘}; —(CH₂)₀₋₄C(O)OSiR^{∘}₃; —(CH₂)₀₋₄OC(O)R^{∘}; —OC(O)(CH₂)₀₋₄SR^{∘}, —SC(S)SR^{∘}; —(CH₂)₀₋₄SC(O)R^{∘}; —(CH₂)₀₋₄C(O)NR^{∘}₂; —C(S)NR^{∘}₂; —C(S)SR^{∘}; —(CH₂)₀₋₄OC(O)NR^{∘}₂; —C(O)N(OR^{∘})R^{∘}; —C(O)C(O)R^{∘}; —C(O)CH₂C(O)R^{∘}; —C(NOR^{∘})R^{∘}; —(CH₂)₀₋₄SSR^{∘}; —(CH₂)₀₋₄S(O)₂R^{∘}; —(CH₂)₀₋₄S(O)₂OR^{∘}; —(CH₂)₀₋₄OS(O)₂R^{∘}; —S(O)₂NR^{∘}₂; —(CH₂)₀₋₄S(O)R^{∘}; —N(R^{∘})S(O)₂NR^{∘}₂; —N(R^{∘})S(O)₂R^{∘}; —N(OR^{∘})R^{∘}; —C(NH)NR^{∘}₂; —Si(R^{∘})₃; —OSi(R^{∘})₃; —B(R^{∘})₂; —OB(R^{∘})₂; —OB(OR^{∘})₂; —P(R^{∘})₂; —P(OR^{∘})₂; —P(R^{∘})(OR^{∘}); —OP(R^{∘})₂; —OP(OR^{∘})₂; —OP(R^{∘})(OR^{∘}); —P(O)(R^{∘})₂; —P(O)(OR^{∘})₂; —OP(O)(R^{∘})₂; —OP(O)(OR^{∘})₂; —OP(O)(OR^{∘})(SR^{∘}); —SP(O)(R^{∘})₂; —SP(O)(OR^{∘})₂; —N(R^{∘})P(O)(R^{∘})₂; —N(R^{∘})P(O)(OR^{∘})₂; —P(R^{∘})₂[B(R^{∘})₃]; —P(OR^{∘})₂[B(R^{∘})₃]; —OP(R^{∘})₂[B(R^{∘})₃]; —OP(OR^{∘})₂[B(R^{∘})₃]; —(C₁₋₄ straight or branched alkylene)O—N(R^{∘})₂; or —(C₁₋₄ straight or branched alkylene)C(O)O—N(R^{∘})₂, wherein each R^{∘} may be substituted as defined herein and is independently hydrogen, C₁₋₂₀ aliphatic, C₁₋₂₀ heteroaliphatic having 1-5 heteroatoms independently selected from nitrogen, oxygen, sulfur, silicon and phosphorus, —CH₂—(C₆₋₁₄ aryl), —O(CH₂)₀₋₁(C₆₋₁₄ aryl), —CH₂-(5-14 membered heteroaryl ring), a 5-20 membered, monocyclic, bicyclic, or polycyclic, saturated, partially unsaturated or aryl ring having 0-5 heteroatoms independently selected from nitrogen, oxygen, sulfur, silicon and phosphorus, or, notwithstanding the definition above, two independent occurrences of R^{∘}, taken together with their intervening atom(s), form a 5-20 membered, monocyclic, bicyclic, or polycyclic, saturated, partially unsaturated or aryl ring having 0-5 heteroatoms independently selected from nitrogen, oxygen, sulfur, silicon and phosphorus, which may be substituted as defined below.

[0162] Suitable monovalent substituents on R^{∘} (or the ring formed by taking two independent occurrences of R^{∘} together with their intervening atoms), are independently halogen, —(CH₂)₀₋₂R^{•}, -(haloR^{•}), —(CH₂)₀₋₂OH, —(CH₂)₀₋₂OR^{•}, —(CH₂)₀₋₂CH(OR^{•})₂; —O(haloR^{•}), —CN, —N₃, —(CH₂)₀₋₂C(O)R^{•}, —(CH₂)₀₋₂C(O)OH, —(CH₂)₀₋₂C(O)OR^{•}, —(CH₂)₀₋₂SR^{•}, —(CH₂)₀₋₂SH, —(CH₂)₀₋₂NH₂, —(CH₂)₀₋₂NHR^{•}, —(CH₂)₀₋₂NR^{•}₂, —NO₂, —SiR^{•}₃, —OSiR^{•}₃, —C(O)SR^{•}, —(C₁₋₄ straight or branched alkylene)C(O)OR^{•}, or —SSR^{•} wherein each R^{•} is unsubstituted or where preceded by “halo” is substituted only with one or more halogens, and is independently selected from C₁₋₄ aliphatic, —CH₂Ph, —O(CH₂)₀₋₁Ph, and a 5-6-membered saturated, partially unsaturated, or aryl ring having 0-4 heteroatoms independently selected from nitrogen, oxygen, and sulfur. Suitable divalent substituents on a saturated carbon atom of R^{∘} include ═O and ═S.

[0163] Suitable divalent substituents, e.g., on a suitable carbon atom, are independently the following: ═O, ═S, ═NNR*₂, ═NNHC(O)R*, ═NNHC(O)OR*, ═NNHS(O)₂R*, ═NR*, ═NOR*, —O(C(R*₂))₂₋₃O—, or —S(C(R*₂))₂₋₃S—, wherein each independent occurrence of R* is selected from hydrogen, C₁₋₆ aliphatic which may be substituted as defined below, and an unsubstituted 5-6-membered saturated, partially unsaturated, or aryl ring having 0-4 heteroatoms independently selected from nitrogen, oxygen, and sulfur. Suitable divalent substituents that are bound to vicinal substitutable carbons of an “optionally substituted” group include: —O(CR*₂)₂₋₃O—, wherein each independent occurrence of R* is selected from hydrogen, C₁₋₆ aliphatic which may be substituted as defined below, and an unsubstituted 5-6-membered saturated, partially unsaturated, and aryl ring having 0-4 heteroatoms independently selected from nitrogen, oxygen, and sulfur.

[0164] Suitable substituents on the aliphatic group of R* are independently halogen, —R^{•}, -(haloR^{•}), —OH, —OR^{•}, —O(haloR^{•}), —CN, —C(O)OH, —C(O)OR^{•}, —NH₂, —NHR^{•}, —NR^{•}₂, or —NO₂, wherein each R^{•} is unsubstituted or where preceded by “halo” is substituted only with one or more halogens, and is independently C₁₋₄ aliphatic, —CH₂Ph, —O(CH₂)₀₋₁Ph, or a 5-6-membered saturated, partially unsaturated, or aryl ring having 0-4 heteroatoms independently selected from nitrogen, oxygen, and sulfur.

[0165] In some embodiments, suitable substituents on a substitutable nitrogen are independently —R^{†}, —NR^{†}₂, —C(O)R^{†}, —C(O)OR^{†}, —C(O)C(O)R^{†}, —C(O)CH₂C(O)R^{†}, —S(O)₂R^{†}, —S(O)₂NR^{†}₂, —C(S)NR^{†}₂, —C(NH)NR^{†}₂, or —N(R^{†})S(O)₂R^{†}; wherein each R^{†} is independently hydrogen, C₁₋₆ aliphatic which may be substituted as defined below, unsubstituted —OPh, or an unsubstituted 5-6-membered saturated, partially unsaturated, or aryl ring having 0-4 heteroatoms independently selected from nitrogen, oxygen, and sulfur, or, notwithstanding the definition above, two independent occurrences of R^{†}, taken together with their intervening atom(s) form an unsubstituted 3-12-membered saturated, partially unsaturated, or aryl mono- or bicyclic ring having 0-4 heteroatoms independently selected from nitrogen, oxygen, and sulfur.

[0166] Suitable substituents on the aliphatic group of R^{†} are independently halogen, —R^{•}, -(haloR^{•}), —OH, —OR^{•}, —O(haloR^{•}), —CN, —C(O)OH, —C(O)OR^{•}, —NH₂, —NHR^{•}, —NR^{•}₂, or —NO₂, wherein each R^{•} is unsubstituted or where preceded by “halo” is substituted only with one or more halogens, and is independently C₁₋₄ aliphatic, —CH₂Ph, —O(CH₂)₀₋₁Ph, or a 5-6-membered saturated, partially unsaturated, or aryl ring having 0-4 heteroatoms independently selected from nitrogen, oxygen, and sulfur.

[0167] P-modification: as used herein, the term “P-modification” refers to any modification at the linkage phosphorus other than a stereochemical modification. In some embodiments, a P-modification comprises addition, substitution, or removal of a pendant moiety covalently attached to a linkage phosphorus.

[0168] Partially unsaturated: As used herein, the term “partially unsaturated” refers to a ring moiety that includes at least one double or triple bond. The term “partially unsaturated” is intended to encompass rings having multiple sites of unsaturation, but is not intended to include aryl or heteroaryl moieties, as herein defined.

[0169] Pharmaceutical composition: As used herein, the term “pharmaceutical composition” refers to an active agent, formulated together with one or more pharmaceutically acceptable carriers. In some embodiments, an active agent is present in unit dose amount appropriate for administration in a therapeutic regimen that shows a statistically significant probability of achieving a predetermined therapeutic effect when administered to a relevant population. In some embodiments, pharmaceutical compositions may be specially formulated for administration in solid or liquid form, including those adapted for the following: oral administration, for example, drenches (aqueous or non-aqueous solutions or suspensions), tablets, e.g., those targeted for buccal, sublingual, and systemic absorption, boluses, powders, granules, pastes for application to the tongue; parenteral administration, for example, by subcutaneous, intramuscular, intravenous or epidural injection as, for example, a sterile solution or suspension, or sustained-release formulation; topical application, for example, as a cream, ointment, or a controlled-release patch or spray applied to the skin, lungs, or oral cavity; intravaginally or intrarectally, for example, as a pessary, cream, or foam; sublingually; ocularly; transdermally; or nasally, pulmonary, and to other mucosal surfaces.

[0170] Pharmaceutically acceptable: As used herein, the phrase “pharmaceutically acceptable” refers to those compounds, materials, compositions and/or dosage forms which are, within the scope of sound medical judgment, suitable for use in contact with the tissues of human beings and animals without excessive toxicity, irritation, allergic response, or other problem or complication, commensurate with a reasonable benefit/risk ratio.

[0171] Pharmaceutically acceptable carrier: As used herein, the term “pharmaceutically acceptable carrier” means a pharmaceutically-acceptable material, composition or vehicle, such as a liquid or solid filler, diluent, excipient, or solvent encapsulating material, involved in carrying or transporting the subject compound from one organ, or portion of the body, to another organ, or portion of the body. Each carrier must be “acceptable” in the sense of being compatible with the other ingredients of the formulation and not injurious to the patient. Some examples of materials which can serve as pharmaceutically-acceptable carriers include: sugars, such as lactose, glucose and sucrose; starches, such as corn starch and potato starch; cellulose, and its derivatives, such as sodium carboxymethyl cellulose, ethyl cellulose and cellulose acetate; powdered tragacanth; malt; gelatin; talc; excipients, such as cocoa butter and suppository waxes; oils, such as peanut oil, cottonseed oil, safflower oil, sesame oil, olive oil, corn oil and soybean oil; glycols, such as propylene glycol; polyols, such as glycerin, sorbitol, mannitol and polyethylene glycol; esters, such as ethyl oleate and ethyl laurate; agar; buffering agents, such as magnesium hydroxide and aluminum hydroxide; alginic acid; pyrogen-free water; isotonic saline; Ringer's solution; ethyl alcohol; pH buffered solutions; polyesters, polycarbonates and/or polyanhydrides; and other non-toxic compatible substances employed in pharmaceutical formulations.

[0172] Pharmaceutically acceptable salt: The term “pharmaceutically acceptable salt”, as used herein, refers to salts of such compounds that are appropriate for use in pharmaceutical contexts, i.e., salts which are, within the scope of sound medical judgment, suitable for use in contact with the tissues of humans and lower animals without undue toxicity, irritation, allergic response and the like, and are commensurate with a reasonable benefit/risk ratio. Pharmaceutically acceptable salts are well known in the art. For example, S. M. Berge, et al. describes pharmaceutically acceptable salts in detail in J. Pharmaceutical Sciences, 66: 1-19 (1977). In some embodiments, pharmaceutically acceptable salt include, but are not limited to, nontoxic acid addition salts, which are salts of an amino group formed with inorganic acids such as hydrochloric acid, hydrobromic acid, phosphoric acid, sulfuric acid and perchloric acid or with organic acids such as acetic acid, maleic acid, tartaric acid, citric acid, succinic acid or malonic acid or by using other methods used in the art such as ion exchange. In some embodiments, pharmaceutically acceptable salts include, but are not limited to, adipate, alginate, ascorbate, aspartate, benzenesulfonate, benzoate, bisulfate, borate, butyrate, camphorate, camphorsulfonate, citrate, cyclopentanepropionate, digluconate, dodecylsulfate, ethanesulfonate, formate, fumarate, glucoheptonate, glycerophosphate, gluconate, hemisulfate, heptanoate, hexanoate, hydroiodide, 2-hydroxy-ethanesulfonate, lactobionate, lactate, laurate, lauryl sulfate, malate, maleate, malonate, methanesulfonate, 2-naphthalenesulfonate, nicotinate, nitrate, oleate, oxalate, palmitate, pamoate, pectinate, persulfate, 3-phenylpropionate, phosphate, picrate, pivalate, propionate, stearate, succinate, sulfate, tartrate, thiocyanate, p-toluenesulfonate, undecanoate, valerate salts, and the like. In some embodiments, a provided compound comprises one or more acidic groups, e.g., an oligonucleotide, and a pharmaceutically acceptable salt is an alkali, alkaline earth metal, or ammonium (e.g., an ammonium salt of N(R)₃, wherein each R is independently defined and described in the present disclosure) salt. Representative alkali or alkaline earth metal salts include sodium, lithium, potassium, calcium, magnesium, and the like. In some embodiments, a pharmaceutically acceptable salt is a sodium salt. In some embodiments, a pharmaceutically acceptable salt is a potassium salt. In some embodiments, a pharmaceutically acceptable salt is a calcium salt. In some embodiments, pharmaceutically acceptable salts include, when appropriate, nontoxic ammonium, quaternary ammonium, and amine cations formed using counterions such as halide, hydroxide, carboxylate, sulfate, phosphate, nitrate, alkyl having from 1 to 6 carbon atoms, sulfonate and aryl sulfonate. In some embodiments, a provided compound comprises more than one acid groups, for example, an oligonucleotide may comprise two or more acidic groups (e.g., in natural phosphate linkages and/or modified internucleotidic linkages). In some embodiments, a pharmaceutically acceptable salt, or generally a salt, of such a compound comprises two or more cations, which can be the same or different. In some embodiments, in a pharmaceutically acceptable salt (or generally, a salt), all ionizable hydrogen (e.g., in an aqueous solution with a pKa no more than about 11, 10, 9, 8, 7, 6, 5, 4, 3, or 2; in some embodiments, no more than about 7; in some embodiments, no more than about 6; in some embodiments, no more than about 5; in some embodiments, no more than about 4; in some embodiments, no more than about 3) in the acidic groups are replaced with cations. In some embodiments, each phosphorothioate and phosphate group independently exists in its salt form (e.g., if sodium salt, —O—P(O)(SNa)—O— and —O—P(O)(ONa)—O—, respectively). In some embodiments, each phosphorothioate and phosphate internucleotidic linkage independently exists in its salt form (e.g., if sodium salt, —O—P(O)(SNa)—O— and —O—P(O)(ONa)—O—, respectively). In some embodiments, a pharmaceutically acceptable salt is a sodium salt of an oligonucleotide. In some embodiments, a pharmaceutically acceptable salt is a sodium salt of an oligonucleotide, wherein each acidic phosphate and modified phosphate group (e.g., phosphorothioate, phosphate, etc.), if any, exists as a salt form (all sodium salt).

[0173] Predetermined: By predetermined (or pre-determined) is meant deliberately selected or non-random or controlled, for example as opposed to randomly occurring, random, or achieved without control. Those of ordinary skill in the art, reading the present specification, will appreciate that the present disclosure provides technologies that permit selection of particular chemistry and/or stereochemistry features to be incorporated into oligonucleotide compositions, and further permits controlled preparation of oligonucleotide compositions having such chemistry and/or stereochemistry features. Such provided compositions are “predetermined” as described herein. Compositions that may contain certain oligonucleotides because they happen to have been generated through a process that are not controlled to intentionally generate the particular chemistry and/or stereochemistry features are not “predetermined” compositions. In some embodiments, a predetermined composition is one that can be intentionally reproduced (e.g., through repetition of a controlled process). In some embodiments, a predetermined level of a plurality of oligonucleotides in a composition means that the absolute amount, and/or the relative amount (ratio, percentage, etc.) of the plurality of oligonucleotides in the composition is controlled. In some embodiments, a predetermined level of a plurality of oligonucleotides in a composition is achieved through chirally controlled oligonucleotide preparation.

[0174] Protecting group: The term “protecting group,” as used herein, is well known in the art and includes those described in detail in Protecting Groups in Organic Synthesis, T. W. Greene and P. G. M. Wuts, 3^{rd} edition, John Wiley & Sons, 1999, the entirety of which is incorporated herein by reference. Also included are those protecting groups specially adapted for nucleoside and nucleotide chemistry described in Current Protocols in Nucleic Acid Chemistry, edited by Serge L. Beaucage et al. July 2012, the entirety of Chapter 2 is incorporated herein by reference. Suitable amino-protecting groups include methyl carbamate, ethyl carbamate, 9-fluorenylmethyl carbamate (Fmoc), 9-(2-sulfo)fluorenylmethyl carbamate, 9-(2,7-dibromo)fluorenylmethyl carbamate, 2,7-di-t-butyl-[9-(10,10-dioxo-10,10,10,10-tetrahydrothioxanthyl)]methyl carbamate (DBD-Tmoc), 4-methoxyphenacyl carbamate (Phenoc), 2,2,2-trichloroethyl carbamate (Troc), 2-trimethylsilylethyl carbamate (Teoc), 2-phenylethyl carbamate (hZ), 1-(1-adamantyl)-1-methylethyl carbamate (Adpoc), 1,1-dimethyl-2-haloethyl carbamate, 1,1-dimethyl-2,2-dibromoethyl carbamate (DB-t-BOC), 1,1-dimethyl-2,2,2-trichloroethyl carbamate (TCBOC), 1-methyl-1-(4-biphenylyl)ethyl carbamate (Bpoc), 1-(3,5-di-t-butylphenyl)-1-methylethyl carbamate (t-Bumeoc), 2-(2′- and 4′-pyridyl)ethyl carbamate (Pyoc), 2-(N,N-dicyclohexylcarboxamido)ethyl carbamate, t-butyl carbamate (BOC), 1-adamantyl carbamate (Adoc), vinyl carbamate (Voc), allyl carbamate (Alloc), 1-isopropylallyl carbamate (Ipaoc), cinnamyl carbamate (Coc), 4-nitrocinnamyl carbamate (Noc), 8-quinolyl carbamate, N-hydroxypiperidinyl carbamate, alkyldithio carbamate, benzyl carbamate (Cbz), p-methoxybenzyl carbamate (Moz), p-nitrobenzyl carbamate, p-bromobenzyl carbamate, p-chlorobenzyl carbamate, 2,4-dichlorobenzyl carbamate, 4-methylsulfinylbenzyl carbamate (Msz), 9-anthrylmethyl carbamate, diphenylmethyl carbamate, 2-methylthioethyl carbamate, 2-methylsulfonylethyl carbamate, 2-(p-toluenesulfonyl)ethyl carbamate, [2-(1,3-dithianyl)]methyl carbamate (Dmoc), 4-methylthiophenyl carbamate (Mtpc), 2,4-dimethylthiophenyl carbamate (Bmpc), 2-phosphonoethyl carbamate (Peoc), 2-triphenylphosphonioisopropyl carbamate (Ppoc), 1,1-dimethyl-2-cyanoethyl carbamate, m-chloro-p-acyloxybenzyl carbamate, p-(dihydroxyboryl)benzyl carbamate, 5-benzisoxazolylmethyl carbamate, 2-(trifluoromethyl)-6-chromonylmethyl carbamate (Tcroc), m-nitrophenyl carbamate, 3,5-dimethoxybenzyl carbamate, o-nitrobenzyl carbamate, 3,4-dimethoxy-6-nitrobenzyl carbamate, phenyl(o-nitrophenyl)methyl carbamate, phenothiazinyl-(10)-carbonyl derivative, N′-p-toluenesulfonylaminocarbonyl derivative, N′-phenylaminothiocarbonyl derivative, t-amyl carbamate, S-benzyl thiocarbamate, p-cyanobenzyl carbamate, cyclobutyl carbamate, cyclohexyl carbamate, cyclopentyl carbamate, cyclopropylmethyl carbamate, p-decyloxybenzyl carbamate, 2,2-dimethoxycarbonylvinyl carbamate, o-(N,N-dimethylcarboxamido)benzyl carbamate, 1,1-dimethyl-3-(N,N-dimethylcarboxamido)propyl carbamate, 1,1-dimethylpropynyl carbamate, di(2-pyridyl)methyl carbamate, 2-furanylmethyl carbamate, 2-iodoethyl carbamate, isobornyl carbamate, isobutyl carbamate, isonicotinyl carbamate, p-(p′-methoxyphenylazo)benzyl carbamate, 1-methylcyclobutyl carbamate, 1-methylcyclohexyl carbamate, 1-methyl-1-cyclopropylmethyl carbamate, 1-methyl-1-(3,5-dimethoxyphenyl)ethyl carbamate, 1-methyl-1-(p-phenylazophenyl)ethyl carbamate, 1-methyl-1-phenylethyl carbamate, 1-methyl-1-(4-pyridyl)ethyl carbamate, phenyl carbamate, p-(phenylazo)benzyl carbamate, 2,4,6-tri-t-butylphenyl carbamate, 4-(trimethylammonium)benzyl carbamate, 2,4,6-trimethylbenzyl carbamate, formamide, acetamide, chloroacetamide, trichloroacetamide, trifluoroacetamide, phenylacetamide, 3-phenylpropanamide, picolinamide, 3-pyridylcarboxamide, N-benzoylphenylalanyl derivative, benzamide, p-phenylbenzamide, o-nitrophenylacetamide, o-nitrophenoxyacetamide, acetoacetamide, (N′-dithiobenzyloxycarbonylamino)acetamide, 3-(p-hydroxyphenyl)propanamide, 3-(o-nitrophenyl)propanamide, 2-methyl-2-(o-nitrophenoxy)propanamide, 2-methyl-2-(o-phenylazophenoxy)propanamide, 4-chlorobutanamide, 3-methyl-3-nitrobutanamide, o-nitrocinnamide, N-acetylmethionine derivative, o-nitrobenzamide, o-(benzoyloxymethyl)benzamide, 4,5-diphenyl-3-oxazolin-2-one, N-phthalimide, N-dithiasuccinimide (Dts), N-2,3-diphenylmaleimide, N-2,5-dimethylpyrrole, N-1,1,4,4-tetramethyldisilylazacyclopentane adduct (STABASE), 5-substituted 1,3-dimethyl-1,3,5-triazacyclohexan-2-one, 5-substituted 1,3-dibenzyl-1,3,5-triazacyclohexan-2-one, 1-substituted 3,5-dinitro-4-pyridone, N-methylamine, N-allylamine, N-[2-(trimethylsilyl)ethoxy]methylamine (SEM), N-3-acetoxypropylamine, N-(1-isopropyl-4-nitro-2-oxo-3-pyroolin-3-yl)amine, quaternary ammonium salts, N-benzylamine, N-di(4-methoxyphenyl)methylamine, N-5-dibenzosuberylamine, N-triphenylmethylamine (Tr), N-[(4-methoxyphenyl)diphenylmethyl]amine (MMTr), N-9-phenylfluorenylamine (PhF), N-2,7-dichloro-9-fluorenylmethyleneamine, N-ferrocenylmethylamino (Fcm), N-2-picolylamino N′-oxide, N-1,1-dimethylthiomethyleneamine, N-benzylideneamine, N-p-methoxybenzylideneamine, N-diphenylmethyleneamine, N-[(2-pyridyl)mesityl]methyleneamine, N—(N′,N′-dimethylaminomethylene)amine, N,N′-isopropylidenediamine, N-p-nitrobenzylideneamine, N-salicylideneamine, N-5-chlorosalicylideneamine, N-(5-chloro-2-hydroxyphenyl)phenylmethyleneamine, N-cyclohexylideneamine, N-(5,5-dimethyl-3-oxo-1-cyclohexenyl)amine, N-borane derivative, N-diphenylborinic acid derivative, N-[phenyl(pentacarbonylchromium- or tungsten)carbonyl]amine, N-copper chelate, N-zinc chelate, N-nitroamine, N-nitrosoamine, amine N-oxide, diphenylphosphinamide (Dpp), dimethylthiophosphinamide (Mpt), diphenylthiophosphinamide (Ppt), dialkyl phosphoramidates, dibenzyl phosphoramidate, diphenyl phosphoramidate, benzenesulfenamide, o-nitrobenzenesulfenamide (Nps), 2,4-dinitrobenzenesulfenamide, pentachlorobenzenesulfenamide, 2-nitro-4-methoxybenzenesulfenamide, triphenylmethylsulfenamide, 3-nitropyridinesulfenamide (Npys), p-toluenesulfonamide (Ts), benzenesulfonamide, 2,3,6-trimethyl-4-methoxybenzenesulfonamide (Mtr), 2,4,6-trimethoxybenzenesulfonamide (Mtb), 2,6-dimethyl-4-methoxybenzenesulfonamide (Pme), 2,3,5,6-tetramethyl-4-methoxybenzenesulfonamide (Mte), 4-methoxybenzenesulfonamide (Mbs), 2,4,6-trimethylbenzenesulfonamide (Mts), 2,6-dimethoxy-4-methylbenzenesulfonamide (iMds), 2,2,5,7,8-pentamethylchroman-6-sulfonamide (Pmc), methanesulfonamide (Ms), β-trimethylsilylethanesulfonamide (SES), 9-anthracenesulfonamide, 4-(4′,8′-dimethoxynaphthylmethyl)benzenesulfonamide (DNMBS), benzylsulfonamide, trifluoromethylsulfonamide, and phenacylsulfonamide.

[0175] Suitably protected carboxylic acids further include, but are not limited to, silyl-, alkyl-, alkenyl-, aryl-, and arylalkyl-protected carboxylic acids. Examples of suitable silyl groups include trimethylsilyl, triethylsilyl, t-butyldimethylsilyl, t-butyldiphenylsilyl, triisopropylsilyl, and the like. Examples of suitable alkyl groups include methyl, benzyl, p-methoxybenzyl, 3,4-dimethoxybenzyl, trityl, t-butyl, tetrahydropyran-2-yl. Examples of suitable alkenyl groups include allyl. Examples of suitable aryl groups include optionally substituted phenyl, biphenyl, or naphthyl. Examples of suitable arylalkyl groups include optionally substituted benzyl (e.g., p-methoxybenzyl (MPM), 3,4-dimethoxybenzyl, O-nitrobenzyl, p-nitrobenzyl, p-halobenzyl, 2,6-dichlorobenzyl, p-cyanobenzyl), and 2- and 4-picolyl.

[0176] Suitable hydroxyl protecting groups include methyl, methoxylmethyl (MOM), methylthiomethyl (MTM), t-butylthiomethyl, (phenyldimethylsilyl)methoxymethyl (SMOM), benzyloxymethyl (BOM), p-methoxybenzyloxymethyl (PMBM), (4-methoxyphenoxy)methyl (p-AOM), guaiacolmethyl (GUM), t-butoxymethyl, 4-pentenyloxymethyl (POM), siloxymethyl, 2-methoxyethoxymethyl (MEM), 2,2,2-trichloroethoxymethyl, bis(2-chloroethoxy)methyl, 2-(trimethylsilyl)ethoxymethyl (SEMOR), tetrahydropyranyl (THP), 3-bromotetrahydropyranyl, tetrahydrothiopyranyl, 1-methoxycyclohexyl, 4-methoxytetrahydropyranyl (MTHP), 4-methoxytetrahydrothiopyranyl, 4-methoxytetrahydrothiopyranyl S,S-dioxide, 1-[(2-chloro-4-methyl)phenyl]-4-methoxypiperidin-4-yl (CTMP), 1,4-dioxan-2-yl, tetrahydrofuranyl, tetrahydrothiofuranyl, 2,3,3a,4,5,6,7,7a-octahydro-7,8,8-trimethyl-4,7-methanobenzofuran-2-yl, 1-ethoxyethyl, 1-(2-chloroethoxy)ethyl, 1-methyl-1-methoxyethyl, 1-methyl-1-benzyloxyethyl, 1-methyl-1-benzyloxy-2-fluoroethyl, 2,2,2-trichloroethyl, 2-trimethylsilylethyl, 2-(phenylselenyl)ethyl, t-butyl, allyl, p-chlorophenyl, p-methoxyphenyl, 2,4-dinitrophenyl, benzyl, p-methoxybenzyl, 3,4-dimethoxybenzyl, o-nitrobenzyl, p-nitrobenzyl, p-halobenzyl, 2,6-dichlorobenzyl, p-cyanobenzyl, p-phenylbenzyl, 2-picolyl, 4-picolyl, 3-methyl-2-picolyl N-oxido, diphenylmethyl, p,p′-dinitrobenzhydryl, 5-dibenzosuberyl, triphenylmethyl, α-naphthyldiphenylmethyl, p-methoxyphenyldiphenylmethyl, di(p-methoxyphenyl)phenylmethyl, tri(p-methoxyphenyl)methyl, 4-(4′-bromophenacyloxyphenyl)diphenylmethyl, 4,4′,4″-tris(4,5-dichlorophthalimidophenyl)methyl, 4,4′,4″-tris(levulinoyloxyphenyl)methyl, 4,4′,4″-tris(benzoyloxyphenyl)methyl, 3-(imidazol-1-yl)bis(4′,4″-dimethoxyphenyl)methyl, 1,1-bis(4-methoxyphenyl)-1′-pyrenylmethyl, 9-anthryl, 9-(9-phenyl)xanthenyl, 9-(9-phenyl-10-oxo)anthryl, 1,3-benzodithiolan-2-yl, benzisothiazolyl S,S-dioxido, trimethylsilyl (TMS), triethylsilyl (TES), triisopropylsilyl (TIPS), dimethylisopropylsilyl (IPDMS), diethylisopropylsilyl (DEIPS), dimethylthexylsilyl, t-butyldimethylsilyl (TBDMS), t-butyldiphenylsilyl (TBDPS), tribenzylsilyl, tri-p-xylylsilyl, triphenylsilyl, diphenylmethylsilyl (DPMS), t-butylmethoxyphenylsilyl (TBMPS), formate, benzoylformate, acetate, chloroacetate, dichloroacetate, trichloroacetate, trifluoroacetate, methoxyacetate, triphenylmethoxyacetate, phenoxyacetate, p-chlorophenoxyacetate, 3-phenylpropionate, 4-oxopentanoate (levulinate), 4,4-(ethylenedithio)pentanoate (levulinoyldithioacetal), pivaloate, adamantoate, crotonate, 4-methoxycrotonate, benzoate, p-phenylbenzoate, 2,4,6-trimethylbenzoate (mesitoate), alkyl methyl carbonate, 9-fluorenylmethyl carbonate (Fmoc), alkyl ethyl carbonate, alkyl 2,2,2-trichloroethyl carbonate (Troc), 2-(trimethylsilyl)ethyl carbonate (TMSEC), 2-(phenylsulfonyl) ethyl carbonate (Psec), 2-(triphenylphosphonio) ethyl carbonate (Peoc), alkyl isobutyl carbonate, alkyl vinyl carbonate alkyl allyl carbonate, alkyl p-nitrophenyl carbonate, alkyl benzyl carbonate, alkyl p-methoxybenzyl carbonate, alkyl 3,4-dimethoxybenzyl carbonate, alkyl o-nitrobenzyl carbonate, alkyl p-nitrobenzyl carbonate, alkyl S-benzyl thiocarbonate, 4-ethoxy-1-naphthyl carbonate, methyl dithiocarbonate, 2-iodobenzoate, 4-azidobutyrate, 4-nitro-4-methylpentanoate, o-(dibromomethyl)benzoate, 2-formylbenzenesulfonate, 2-(methylthiomethoxy)ethyl, 4-(methylthiomethoxy)butyrate, 2-(methylthiomethoxymethyl)benzoate, 2,6-dichloro-4-methylphenoxyacetate, 2,6-dichloro-4-(1,1,3,3-tetramethylbutyl)phenoxyacetate, 2,4-bis(1,1-dimethylpropyl)phenoxyacetate, chlorodiphenylacetate, isobutyrate, monosuccinate, (E)-2-methyl-2-butenoate, o-(methoxycarbonyl)benzoate, α-naphthoate, nitrate, alkyl N,N,N′,N′-tetramethylphosphorodiamidate, alkyl N-phenylcarbamate, borate, dimethylphosphinothioyl, alkyl 2,4-dinitrophenylsulfenate, sulfate, methanesulfonate (mesylate), benzylsulfonate, and tosylate (Ts). For protecting 1,2- or 1,3-diols, the protecting groups include methylene acetal, ethylidene acetal, 1-t-butylethylidene ketal, 1-phenylethylidene ketal, (4-methoxyphenyl)ethylidene acetal, 2,2,2-trichloroethylidene acetal, acetonide, cyclopentylidene ketal, cyclohexylidene ketal, cycloheptylidene ketal, benzylidene acetal, p-methoxybenzylidene acetal, 2,4-dimethoxybenzylidene ketal, 3,4-dimethoxybenzylidene acetal, 2-nitrobenzylidene acetal, methoxymethylene acetal, ethoxymethylene acetal, dimethoxymethylene ortho ester, 1-methoxyethylidene ortho ester, 1-ethoxyethylidine ortho ester, 1,2-dimethoxyethylidene ortho ester, α-methoxybenzylidene ortho ester, 1-(N,N-dimethylamino)ethylidene derivative, α-(N,N′-dimethylamino)benzylidene derivative, 2-oxacyclopentylidene ortho ester, di-t-butylsilylene group (DTBS), 1,3-(1,1,3,3-tetraisopropyldisiloxanylidene) derivative (TIPDS), tetra-t-butoxydisiloxane-1,3-diylidene derivative (TBDS), cyclic carbonates, cyclic boronates, ethyl boronate, and phenyl boronate.

[0177] In some embodiments, a hydroxyl protecting group is acetyl, t-butyl, tbutoxymethyl, methoxymethyl, tetrahydropyranyl, 1-ethoxyethyl, 1-(2-chloroethoxy)ethyl, 2-trimethylsilylethyl, p-chlorophenyl, 2,4-dinitrophenyl, benzyl, benzoyl, p-phenylbenzoyl, 2,6-dichlorobenzyl, diphenylmethyl, p-nitrobenzyl, triphenylmethyl (trityl), 4,4′-dimethoxytrityl, trimethylsilyl, triethylsilyl, t-butyldimethylsilyl, t-butyldiphenylsilyl, triphenylsilyl, triisopropylsilyl, benzoylformate, chloroacetyl, trichloroacetyl, trifluoroacetyl, pivaloyl, 9-fluorenylmethyl carbonate, mesylate, tosylate, triflate, trityl, monomethoxytrityl (MMTr), 4,4′-dimethoxytrityl, (DMTr) and 4,4′,4″-trimethoxytrityl (TMTr), 2-cyanoethyl (CE or Cne), 2-(trimethylsilyl)ethyl (TSE), 2-(2-nitrophenyl)ethyl, 2-(4-cyanophenyl)ethyl 2-(4-nitrophenyl)ethyl (NPE), 2-(4-nitrophenylsulfonyl)ethyl, 3,5-dichlorophenyl, 2,4-dimethylphenyl, 2-nitrophenyl, 4-nitrophenyl, 2,4,6-trimethylphenyl, 2-(2-nitrophenyl)ethyl, butylthiocarbonyl, 4,4′,4″-tris(benzoyloxy)trityl, diphenylcarbamoyl, levulinyl, 2-(dibromomethyl)benzoyl (Dbmb), 2-(isopropylthiomethoxymethyl)benzoyl (Ptmt), 9-phenylxanthen-9-yl (pixyl) or 9-(p-methoxyphenyl)xanthine-9-yl (MOX). In some embodiments, each of the hydroxyl protecting groups is, independently selected from acetyl, benzyl, t-butyldimethylsilyl, t-butyldiphenylsilyl and 4,4′-dimethoxytrityl. In some embodiments, the hydroxyl protecting group is selected from the group consisting of trityl, monomethoxytrityl and 4,4′-dimethoxytrityl group. In some embodiments, a phosphorous linkage protecting group is a group attached to the phosphorous linkage (e.g., an internucleotidic linkage) throughout oligonucleotide synthesis. In some embodiments, a protecting group is attached to a sulfur atom of an phosphorothioate group. In some embodiments, a protecting group is attached to an oxygen atom of an internucleotide phosphorothioate linkage. In some embodiments, a protecting group is attached to an oxygen atom of the internucleotide phosphate linkage. In some embodiments a protecting group is 2-cyanoethyl (CE or Cne), 2-trimethylsilylethyl, 2-nitroethyl, 2-sulfonylethyl, methyl, benzyl, o-nitrobenzyl, 2-(p-nitrophenyl)ethyl (NPE or Npe), 2-phenylethyl, 3-(N-tert-butylcarboxamido)-1-propyl, 4-oxopentyl, 4-methylthio-1-butyl, 2-cyano-1,1-dimethylethyl, 4-N-methylaminobutyl, 3-(2-pyridyl)-1-propyl, 2-[N-methyl-N-(2-pyridyl)]aminoethyl, 2-(N-formyl, N-methyl)aminoethyl, or 4-[N-methyl-N-(2,2,2-trifluoroacetyl)amino]butyl.

[0178] Subject: As used herein, the term “subject” or “test subject” refers to any organism to which a compound (e.g., an oligonucleotide) or composition is administered in accordance with the present disclosure e.g., for experimental, diagnostic, prophylactic and/or therapeutic purposes. Typical subjects include animals (e.g., mammals such as mice, rats, rabbits, non-human primates, and humans; insects; worms; etc.) and plants. In some embodiments, a subject is a human. In some embodiments, a subject may be suffering from and/or susceptible to a disease, disorder and/or condition.

[0179] Substantially: As used herein, the term “substantially” refers to the qualitative condition of exhibiting total or near-total extent or degree of a characteristic or property of interest. A base sequence which is substantially identical or complementary to a second sequence is not fully identical or complementary to the second sequence, but is mostly or nearly identical or complementary to the second sequence. In some embodiments, an oligonucleotide with a substantially complementary sequence to another oligonucleotide or nucleic acid forms duplex with the oligonucleotide or nucleic acid in a similar fashion as an oligonucleotide with a fully complementary sequence. In addition, one of ordinary skill in the biological and/or chemical arts will understand that biological and chemical phenomena rarely, if ever, go to completion and/or proceed to completeness or achieve or avoid an absolute result. The term “substantially” is therefore used herein to capture the potential lack of completeness inherent in many biological and/or chemical phenomena.

[0180] Sugar: The term “sugar” refers to a monosaccharide or polysaccharide in closed and/or open form. In some embodiments, sugars are monosaccharides. In some embodiments, sugars are polysaccharides. Sugars include, but are not limited to, ribose, deoxyribose, pentofuranose, pentopyranose, and hexopyranose moieties. As used herein, the term “sugar” also encompasses structural analogs used in lieu of conventional sugar molecules, such as glycol, polymer of which forms the backbone of the nucleic acid analog, glycol nucleic acid (“GNA”), etc. As used herein, the term “sugar” also encompasses structural analogs used in lieu of natural or naturally-occurring nucleotides, such as modified sugars and nucleotide sugars. In some embodiments, a sugar is a RNA or DNA sugar (ribose or deoxyribose). In some embodiments, a sugar is a modified ribose or deoxyribose sugar, e.g., 2′-modified, 5′-modified, etc. As described herein, in some embodiments, when used in oligonucleotides and/or nucleic acids, modified sugars may provide one or more desired properties, activities, etc. In some embodiments, a sugar is optionally substituted ribose or deoxyribose. In some embodiments, a “sugar” refers to a sugar unit in an oligonucleotide or a nucleic acid.

[0181] Susceptible to: An individual who is “susceptible to” a disease, disorder and/or condition is one who has a higher risk of developing the disease, disorder and/or condition than does a member of the general public. In some embodiments, an individual who is susceptible to a disease, disorder and/or condition is predisposed to have that disease, disorder and/or condition. In some embodiments, an individual who is susceptible to a disease, disorder and/or condition may not have been diagnosed with the disease, disorder and/or condition. In some embodiments, an individual who is susceptible to a disease, disorder and/or condition may exhibit symptoms of the disease, disorder and/or condition. In some embodiments, an individual who is susceptible to a disease, disorder and/or condition may not exhibit symptoms of the disease, disorder and/or condition. In some embodiments, an individual who is susceptible to a disease, disorder, and/or condition will develop the disease, disorder, and/or condition. In some embodiments, an individual who is susceptible to a disease, disorder, and/or condition will not develop the disease, disorder, and/or condition.

[0182] Therapeutic agent: As used herein, the term “therapeutic agent” in general refers to any agent that elicits a desired effect (e.g., a desired biological, clinical, or pharmacological effect) when administered to a subject. In some embodiments, an agent is considered to be a therapeutic agent if it demonstrates a statistically significant effect across an appropriate population. In some embodiments, an appropriate population is a population of subjects suffering from and/or susceptible to a disease, disorder or condition. In some embodiments, an appropriate population is a population of model organisms. In some embodiments, an appropriate population may be defined by one or more criterion such as age group, gender, genetic background, preexisting clinical conditions, prior exposure to therapy. In some embodiments, a therapeutic agent is a substance that alleviates, ameliorates, relieves, inhibits, prevents, delays onset of, reduces severity of, and/or reduces incidence of one or more symptoms or features of a disease, disorder, and/or condition in a subject when administered to the subject in an effective amount. In some embodiments, a “therapeutic agent” is an agent that has been or is required to be approved by a government agency before it can be marketed for administration to humans. In some embodiments, a “therapeutic agent” is an agent for which a medical prescription is required for administration to humans. In some embodiments, a therapeutic agent is a provided compound, e.g., a provided oligonucleotide.

[0183] Therapeutically effective amount: As used herein, the term “therapeutically effective amount” means an amount of a substance (e.g., a therapeutic agent, composition, and/or formulation) that elicits a desired biological response when administered as part of a therapeutic regimen. In some embodiments, a therapeutically effective amount of a substance is an amount that is sufficient, when administered to a subject suffering from or susceptible to a disease, disorder, and/or condition, to treat, diagnose, prevent, and/or delay the onset of the disease, disorder, and/or condition. As will be appreciated by those of ordinary skill in this art, the effective amount of a substance may vary depending on such factors as the desired biological endpoint, the substance to be delivered, the target cell or tissue, etc. For example, the effective amount of compound in a formulation to treat a disease, disorder, and/or condition is the amount that alleviates, ameliorates, relieves, inhibits, prevents, delays onset of, reduces severity of and/or reduces incidence of one or more symptoms or features of the disease, disorder, and/or condition. In some embodiments, a therapeutically effective amount is administered in a single dose; in some embodiments, multiple unit doses are required to deliver a therapeutically effective amount.

[0184] Treat: As used herein, the term “treat,” “treatment,” or “treating” refers to any method used to partially or completely alleviate, ameliorate, relieve, inhibit, prevent, delay onset of, reduce severity of, and/or reduce incidence of one or more symptoms or features of a disease, disorder, and/or condition. Treatment may be administered to a subject who does not exhibit signs of a disease, disorder, and/or condition. In some embodiments, treatment may be administered to a subject who exhibits only early signs of the disease, disorder, and/or condition, for example for the purpose of decreasing the risk of developing pathology associated with the disease, disorder, and/or condition.

[0185] Unsaturated: The term “unsaturated,” as used herein, means that a moiety has one or more units of unsaturation.

[0186] Wild-type: As used herein, the term “wild-type” has its art-understood meaning that refers to an entity having a structure and/or activity as found in nature in a “normal” (as contrasted with mutant, diseased, altered, etc.) state or context. Those of ordinary skill in the art will appreciate that wild type genes and polypeptides often exist in multiple different forms (e.g., alleles).

[0187] As those skilled in the art will appreciate, methods and compositions described herein relating to provided compounds (e.g., oligonucleotides) generally also apply to pharmaceutically acceptable salts of such compounds.

### Description of Certain Embodiments

[0188] Oligonucleotides are useful in various therapeutic, diagnostic, and research applications. Use of naturally occurring nucleic acids is limited, for example, by their susceptibility to endo- and exo-nucleases. As such, various synthetic counterparts have been developed to circumvent these shortcomings and/or to further improve various properties and activities. These include synthetic oligonucleotides that contain chemical modifications, e.g., base modifications, sugar modifications, backbone modifications, etc., which, among other things, render these molecules less susceptible to degradation and improve other properties and/or activities.

[0189] From a structural point of view, modifications to internucleotidic linkages can introduce chirality, and certain properties and activities may be affected by configurations of linkage phosphorus atoms of oligonucleotides. For example, binding affinity, sequence specific binding to complementary RNA, stability to nucleases, activities, delivery, pharmacokinetics, etc. can be affected by, inter alia, chirality of backbone linkage phosphorus atoms.

[0190] Among other things, the present disclosure utilizes technologies for controlling various structural elements, e.g., sugar modifications and patterns thereof, nucleobase modifications and patterns thereof, modified internucleotidic linkages and patterns thereof, linkage phosphorus stereochemistry and patterns thereof, additional chemical moieties (moieties that are not typically in an oligonucleotide chain) and patterns thereof, etc. With the capability to fully control structural elements of oligonucleotides, the present disclosure provides oligonucleotides with improved and/or new properties and/or activities for various applications, e.g., as therapeutic agents, probes, etc. For example, as demonstrated herein, provided oligonucleotides and compositions thereof are particularly powerful for editing target adenosine in target nucleic acids to, in some embodiments, correct a G to A mutation by converting A to I.

[0191] In some embodiments, an oligonucleotide comprises a sequence that is identical to or is completely or substantially complementary to 4, 5, 6, 7, 8, 9, 10, 11, 12, 13, 14, 15, 16, 17, 18, 19, 20, 21, 22, 23, 24, 25, 26, 27, 28, 29, 30, 31, 32, 33, 34, 35, 36, 37, 38, 39, 40, 41, 42, 43, 44, 45, 46, 47, 48, 49, 50, 51, 52, 53, 54, 55, 56, 57, 58, 59, 60, typically 15, 16, 17, 18, 19, 20, 21, 22, 23, 24, 25, 26, 27, 28, 29, 30, 31, 32, 33, 34, 35, 36, 37, 38, 39, 40, 41, 42, 43, 44, 45, 46, 47, 48, 49, 50, 51, 52, 53, 54, 55, 56, 57, 58, 59, 60 or more, contiguous bases of a nucleic acid (e.g., DNA, pre-mRNA, mRNA, etc.). In some embodiments, a nucleic acid is a target nucleic acid comprising one or more target adenosine. In some embodiments, a target nucleic acid comprises one and no more than one target adenosine. In some embodiments, an oligonucleotide can hybridize with a target nucleic acid. In some embodiments, such hybridization facilitates modification of A (e.g., conversion of A to I) by, e.g., ADAR1, ADAR2, etc., in a nucleic acid or a product thereof.

[0192] In some embodiments, the present disclosure provides an oligonucleotide, wherein the oligonucleotide has a base sequence which is, or comprises about 10-40, about 15-40, about 20-40, or at least 27, at least 28, at least 29, at least 30, at least 31, at least 32, at least 33, at least 34 contiguous bases of, an oligonucleotide or nucleic acid disclosed herein (e.g., in the Tables), or a sequence that is complementary to a target RNA sequence gene, transcript, etc. disclosed herein, and wherein each T can be optionally and independently replaced with U and vice versa. In some embodiments, the present disclosure provides an oligonucleotide or oligonucleotide composition as disclosed herein, e.g., in a Table.

[0193] In some embodiments, an oligonucleotide is a single-stranded oligonucleotide for site-directed editing of a nucleoside (e.g., a target adenosine) in a target nucleic acid, e.g., RNA.

[0194] As described herein, oligonucleotides may contain one or more modified internucleotidic linkages (non-natural phosphate linkages). In some embodiments, a modified internucleotidic linkage is a chiral internucleotidic linkage whose linkage phosphorus is chiral. In some embodiments, a modified internucleotidic linkage is a phosphorothioate internucleotidic linkage. In some embodiments, oligonucleotides comprise one or more negatively charged internucleotidic linkages (e.g., phosphorothioate internucleotidic linkages, natural phosphate linkages, etc.). In some embodiments, oligonucleotides comprise one or more non-negatively charged internucleotidic linkage. In some embodiments, oligonucleotides comprise one or more neutral internucleotidic linkage.

[0195] In some embodiments, oligonucleotides are chirally controlled. In some embodiments, oligonucleotides are chirally pure (or “stereopure”, “stereochemically pure”), wherein the oligonucleotide exists as a single stereoisomeric form (in many cases a single diastereoisomeric (or “diastereomeric”) form as multiple chiral centers may exist in an oligonucleotide, e.g., at linkage phosphorus, sugar carbon, etc.). As appreciated by those skilled in the art, a chirally pure oligonucleotide is separated from its other stereoisomeric forms (to the extent that some impurities may exist as chemical and biological processes, selectivities and/or purifications etc. rarely, if ever, go to absolute completeness). In a chirally pure oligonucleotide, each chiral center is independently defined with respect to its configuration (for a chirally pure oligonucleotide, each internucleotidic linkage is independently stereodefined or chirally controlled). In contrast to chirally controlled and chirally pure oligonucleotides which comprise stereodefined linkage phosphorus, racemic (or “stereorandom”, “non-chirally controlled”) oligonucleotides comprising chiral linkage phosphorus, e.g., from traditional phosphoramidite oligonucleotide synthesis without stereochemical control during coupling steps in combination with traditional sulfurization (creating stereorandom phosphorothioate internucleotidic linkages), refer to a random mixture of various stereoisomers (typically diastereoisomers (or “diastereomers”) as there are multiple chiral centers in an oligonucleotide; e.g., from traditional oligonucleotide preparation using reagents containing no chiral elements other than those in nucleosides and linkage phosphorus). For example, for A*A*A wherein * is a phosphorothioate internucleotidic linkage (which comprises a chiral linkage phosphorus), a racemic oligonucleotide preparation includes four diastereomers [2²=4, considering the two chiral linkage phosphorus, each of which can exist in either of two configurations (Sp or Rp)]: A *S A *S A, A *S A *R A, A *R A *S A, and A *R A *R A, wherein *S represents a Sp phosphorothioate internucleotidic linkage and *R represents a Rp phosphorothioate internucleotidic linkage. For a chirally pure oligonucleotide, e.g., A *S A *S A, it exists in a single stereoisomeric form and it is separated from the other stereoisomers (e.g., the diastereomers A *S A *R A, A *R A *S A, and A *R A *R A).

[0196] In some embodiments, oligonucleotides comprise 1, 2, 3, 4, 5, 6, 7, 8, 9, 10 or more stereorandom internucleotidic linkages (mixture of Rp and Sp linkage phosphorus at the internucleotidic linkage, e.g., from traditional non-chirally controlled oligonucleotide synthesis). In some embodiments, oligonucleotides comprise one or more (e.g., 1-60, 1-50, 1-40, 1-30, 1-25, 1-20, 1, 2, 3, 4, 5, 6, 7, 8, 9, 10, 11, 12, 13, 14, 15, 16, 17, 18, 19, 20, 21, 22, 23, 24, 25, 26, 27, 28, 29, 30, 31, 32, 33, 34, 35, 36, 37, 38, 39, 40, 41, 42, 43, 44, 45, 46, 47, 48, 49, 50, 51, 52, 53, 54, 55, 56, 57, 58, 59, 60 or more) chirally controlled internucleotidic linkages (Rp or Sp linkage phosphorus at the internucleotidic linkage, e.g., from chirally controlled oligonucleotide synthesis). In some embodiments, an internucleotidic linkage is a phosphorothioate internucleotidic linkage. In some embodiments, an internucleotidic linkage is a stereorandom phosphorothioate internucleotidic linkage. In some embodiments, an internucleotidic linkage is a chirally controlled phosphorothioate internucleotidic linkage.

[0197] Among other things, the present disclosure provides technologies for preparing chirally controlled (in some embodiments, stereochemically pure) oligonucleotides. In some embodiments, oligonucleotides are stereochemically pure. In some embodiments, oligonucleotides of the present disclosure are about 5%-100% 10%-100%, 20%-100%, 30%-100%, 40%-100%, 50%-100%, 60%-100%, 70%-100%, 80-100%, 90-100%, 95-100%, 50%-90%, or about 5%, 10%, 15%, 20%, 25%, 30%, 35%, 40%, 45%, 50%, 55%, 60%, 65%, 70%, 75%, 80%, 85%, 90%, 95%, or 100%, or at least about 5%, 10%, 15%, 20%, 25%, 30%, 35%, 40%, 45%, 50%, 55%, 60%, 65%, 70%, 75%, 80%, 85%, 90%, 95%, or 99% stereochemically pure.

[0198] In some embodiments, the present disclosure provides various oligonucleotide compositions. In some embodiments, oligonucleotide compositions are stereorandom or not chirally controlled. In some embodiments, there are no chirally controlled internucleotidic linkages in oligonucleotides of provided compositions. In some embodiments, internucleotidic linkages of oligonucleotides in compositions comprise one or more chirally controlled internucleotidic linkages (e.g., chirally controlled oligonucleotide compositions).

[0199] In some embodiments, an oligonucleotide composition comprises a plurality of oligonucleotides sharing a common base sequence, wherein one or more internucleotidic linkages in the oligonucleotides are chirally controlled and one or more internucleotidic linkages are stereorandom (not chirally controlled). In some embodiments, an oligonucleotide composition comprises a plurality of oligonucleotides sharing a common base sequence, wherein each internucleotidic linkage comprising chiral linkage phosphorus in the oligonucleotides is independently a chirally controlled internucleotidic linkage. In some embodiments, a plurality of oligonucleotides share the same base sequence, and the same base and sugar modification. In some embodiments, a plurality of oligonucleotides share the same base sequence, and the same base, sugar and internucleotidic linkage modification. In some embodiments, an oligonucleotide composition comprises oligonucleotides of the same constitution, wherein one or more internucleotidic linkages are chirally controlled and one or more internucleotidic linkages are stereorandom (not chirally controlled). In some embodiments, an oligonucleotide composition comprises oligonucleotides of the same constitution, wherein each internucleotidic linkage comprising chiral linkage phosphorus is independently a chirally controlled internucleotidic linkage. In some embodiments, at least 10%, 20%, 30%, 40%, 50%, 60%, 70%, 75%, 80%, 85%, 90% or 95% of all oligonucleotides, or all oligonucleotides of the common base sequence, are oligonucleotides of the plurality.

[0200] In some embodiments, the present disclosure provides technologies for preparing, assessing and/or utilizing provided oligonucleotides and compositions thereof.

[0201] As used in the present disclosure, in some embodiments, “one or more” is 1-200, 1-150, 1-100, 1-90, 1-80, 1-70, 1-60, 1-50, 1-40, 1-30, or 1, 2, 3, 4, 5, 6, 7, 8, 9, 10, 11, 12, 13, 14, 15, 16, 17, 18, 19, 20, 21, 22, 23, 24, 25, 26, 27, 28, 29, 30, 31, 32, 33, 34, 35, 36, 37, 38, 39, 40, 41, 42, 43, 44, 45, 46, 47, 48, 49, 50, 51, 52, 53, 54, 55, 56, 57, 58, 59, or 60. In some embodiments, “one or more” is one. In some embodiments, “one or more” is two. In some embodiments, “one or more” is three. In some embodiments, “one or more” is four. In some embodiments, “one or more” is five. In some embodiments, “one or more” is six. In some embodiments, “one or more” is seven. In some embodiments, “one or more” is eight. In some embodiments, “one or more” is nine. In some embodiments, “one or more” is ten. In some embodiments, “one or more” is at least one. In some embodiments, “one or more” is at least two. In some embodiments, “one or more” is at least three. In some embodiments, “one or more” is at least four. In some embodiments, “one or more” is at least five. In some embodiments, “one or more” is at least six. In some embodiments, “one or more” is at least seven. In some embodiments, “one or more” is at least eight. In some embodiments, “one or more” is at least nine. In some embodiments, “one or more” is at least ten.

[0202] As used in the present disclosure, in some embodiments, “at least one” is one or more.

[0203] Various embodiments are described for variables, e.g., R, R^{L}, L, etc., as examples. Embodiments described for a variable, e.g., R, are generally applicable to all variables that can be such a variable (e.g., R′, R″, R^{L}, R^{L1}, etc.).

### Oligonucleotides

[0204] Among other things, the present disclosure provides oligonucleotides of various designs, which may comprise various nucleobases and patterns thereof, sugars and patterns thereof, internucleotidic linkages and patterns thereof, and/or additional chemical moieties and patterns thereof as described in the present disclosure. In some embodiments, provided oligonucleotides can direct A to I editing in target nucleic acids. In some embodiments, oligonucleotides of the present disclosure are single-stranded oligonucleotides capable of site-directed editing of an adenosine (conversion of A into I) in a target RNA sequence.

[0205] In some embodiments, oligonucleotides are of suitable lengths and sequence complementarity to specifically hybridize with target nucleic acids. In some embodiments, oligonucleotide is sufficiently long and is sufficiently complementary to target nucleic acids to distinguish target nucleic acid from other nucleic acids to reduce off-target effects. In some embodiments, oligonucleotide is sufficiently short to facilitate delivery, reduce manufacture complexity and/or cost which maintaining desired properties and activities (e.g., editing of adenosine).

[0206] In some embodiments, an oligonucleotide has a length of about 10-200 (e.g., about 10-20, 10-30, 10-40, 10-50, 10-60, 10-70, 10-80, 10-90, 10-100, 10-120, 10-150, 20-30, 20-40, 20-50, 20-60, 20-70, 20-80, 20-90, 20-100, 20-120, 20-150, 20-200, 25-30, 25-40, 25-50, 25-60, 25-70, 25-80, 25-90, 25-100, 25-120, 25-150, 25-200, 30-40, 30-50, 30-60, 30-70, 30-80, 30-90, 30-100, 30-120, 30-150, 30-200, 10, 20, 25, 26, 27, 28, 29, 30, 31, 32, 33, 34, 35, 36, 37, 38, 39, 40, 45, 50, 60, etc.) nucleobases. In some embodiments, the base sequence of an oligonucleotide is about 10-60 nucleobases in length. In some embodiments, a base sequence is about 15-50 nucleobases in length. In some embodiments, a base sequence is from about 15 to about 35 nucleobases in length. In some embodiments, a base sequence is from about 25 to about 34 nucleobases in length. In some embodiments, a base sequence is from about 26 to about 35 nucleobases in length. In some embodiments, a base sequence is from about 27 to about 32 nucleobases in length. In some embodiments, a base sequence is from about 29 to about 35 nucleobases in length. In some embodiments, a base sequence is about 10, 11, 12, 13, 14, 15, 16, 17, 18, 19, 20, 21, 22, 23, 24, 25, 26, 27, 28, 29, 30, 31, 32, 33, 34, 35, 36, 37, 38, 39, 40, 41, 42, 43, 44, 45, 46, 47, 48, 49, 50, 51, 52, 53, 54, 55, 56, 57, 58, 59, or 60 nucleobases in length. In some other embodiments, a base sequence is or is at least 35 nucleobases in length. In some other embodiments, a base sequence is or is at least 34 nucleobases in length. In some other embodiments, a base sequence is or is at least 33 nucleobases in length. In some other embodiments, a base sequence is or is at least 32 nucleobases in length. In some other embodiments, a base sequence is or is at least 31 nucleobases in length. In some other embodiments, a base sequence is or is at least 30 nucleobases in length. In some other embodiments, a base sequence is or is at least 29 nucleobases in length. In some other embodiments, a base sequence is or is at least 28 nucleobases in length. In some other embodiments, a base sequence is or is at least 27 nucleobases in length. In some other embodiments, a base sequence is or is at least 26 nucleobases in length. In some other embodiments, the base sequence of the complementary portion in a duplex is at least 15, 16, 17, 18, 19, 20, 21, 22, 23, 24, 25, 16, 27, 28, 29, 30, 31, 32, 33, 34, 35 or more nucleobases in length. In some other embodiments, it is at least 18 nucleobases in length. In some other embodiments, it is at least 19 nucleobases in length. In some other embodiments, it is at least 20 nucleobases in length. In some other embodiments, it is at least 21 nucleobases in length. In some other embodiments, it is at least 22 nucleobases in length. In some other embodiments, it is at least 23 nucleobases in length. In some other embodiments, it is at least 24 nucleobases in length. In some other embodiments, it is at least 25 nucleobases in length. Among other things, the present disclosure provides oligonucleotides of comparable or better properties and/or comparable or higher activities but of shorter lengths compared to prior reported adenosine editing oligonucleotides.

[0207] In some embodiments, a base sequence of the oligonucleotide is complementary to a base sequence of a target nucleic acid (e.g., complementarity to a portion of the target nucleic acid comprising the target adenosine) with 0-10 (e.g., 0-1, 0-2, 0-3, 0-4, 0-5, 0-6, 0-7, 0-8, 0-9, 0-10, 1-2, 1-3, 1-4, 1-5, 1-6, 1-7, 1-8, 1-9, 1-10, 2-3, 2-4, 2-5, 2-6, 2-7, 2-8, 2-9, 2-10, 3-4, 3-5, 3-6, 3-7, 3-8, 3-9, 3-10, 0, 1, 2, 3, 4, 5, 6, 7, 8, 9, or 10, etc.) mismatches which are not Watson-Crick base pairs (AT, AU and CG). In some embodiments, there are no mismatches. In some embodiments, there is 1 mismatch. In some embodiments, there are 2 mismatches. In some embodiments, there are 3 mismatches. In some embodiments, there are 4 mismatches. In some embodiments, there are 5 mismatches. In some embodiments, there are 6 mismatches. In some embodiments, there are 7 mismatches. In some embodiments, there are 8 mismatches. In some embodiments, there are 9 mismatches. In some embodiments, there are 10 mismatches. In some embodiments, oligonucleotides may contain portions that are not designed for complementarity (e.g., loops, protein binding sequences, etc., for recruiting of proteins, e.g., ADAR). As those skilled in the art will appreciate, when calculating mismatches and/or complementarity, such portions may be properly excluded. In some embodiments, complementarity, e.g., between oligonucleotides and target nucleic acids, is about 50%-100% (e.g., about 50%-80%, 50%-85%, 50%-90%, 50%-95%, 60%-80%, 60%-85%, 60%-90%, 60%-95%, 60%-100%, 65%-80%, 65%-85%, 65%-90%, 65%-95%, 65%-100%, 70%-80%, 70%-85%, 70%-90%, 70%-95%, 70%-100%, 75%-80%, 75%-85%, 75%-90%, 75%-95%, 75%-100%, 80%-85%, 80%-90%, 80%-95%, 80%-100%, 85%-90%, 85%-95%, 85%-100%, 90%-95%, 90%-100%, 50%, 60%, 65%, 70%, 75%, 80%, 85%, 90%, 95%, or 100%, etc.). In some embodiments, complementarity is at least about 60%. In some embodiments, complementarity is at least about 65%. In some embodiments, complementarity is at least about 70%. In some embodiments, complementarity is at least about 75%. In some embodiments, complementarity is at least about 80%. In some embodiments, complementarity is at least about 85%. In some embodiments, complementarity is at least about 90%. In some embodiments, complementarity is at least about 95%. In some embodiments, complementarity is 100% across the length of an oligonucleotide. In some embodiments, complementarity is 100% except at a nucleoside opposite to a target nucleoside (e.g., adenosine) across the length of an oligonucleotide. Typically, complementarity is based on Watson-Crick base pairs AT, AU and CG. Those skilled in the art will appreciate that when assessing complementarity of two sequences of different lengths (e.g., a provided oligonucleotide and a target nucleic acid) complementarity may be properly based on the length of the shorter sequence and/or maximum complementarity between the two sequences. In many embodiments, oligonucleotides and target nucleic acids are of sufficient complementarity such that modifications are selectively directed to target adenosine sites.

[0208] In some embodiments, one or more mismatches are independently wobbles. In some embodiments, each mismatch is a wobble. In some embodiments, there are 0-10 (e.g., 0-1, 0-2, 0-3, 0-4, 0-5, 0-6, 0-7, 0-8, 0-9, 0-10, 1-2, 1-3, 1-4, 1-5, 1-6, 1-7, 1-8, 1-9, 1-10, 2-3, 2-4, 2-5, 2-6, 2-7, 2-8, 2-9, 2-10, 3-4, 3-5, 3-6, 3-7, 3-8, 3-9, 3-10, 0, 1, 2, 3, 4, 5, 6, 7, 8, 9, or 10, etc.) wobbles. In some embodiments, the number is 0. In some embodiments, the number is 1. In some embodiments, the number is 2. In some embodiments, the number is 3. In some embodiments, the number is 4. In some embodiments, the number is 5. In some embodiments, a wobble is G-U, I-A, G-A, I-U, I-C, I-T, A-A, or reverse A-T. In some embodiments, a wobble is G-U, I-A, G-A, I-U, or I-C. In some embodiments, I-C may be considered a match when I is a 3′ immediate nucleoside next to a nucleoside opposite to a target nucleoside. In some embodiments, a base that forms a wobble pair (e.g., U which can form a G-U wobble) may replace a base that forms a match pair (e.g., C which matches G) and can provide oligonucleotide with editing activity.

[0209] In some embodiments, duplexes of oligonucleotides and target nucleic acids comprise one or more bulges each of which independently comprise one or more mismatches that are not wobbles. In some embodiments, there are 0-10 (e.g., 0-1, 0-2, 0-3, 0-4, 0-5, 0-6, 0-7, 0-8, 0-9, 0-10, 1-2, 1-3, 1-4, 1-5, 1-6, 1-7, 1-8, 1-9, 1-10, 2-3, 2-4, 2-5, 2-6, 2-7, 2-8, 2-9, 2-10, 3-4, 3-5, 3-6, 3-7, 3-8, 3-9, 3-10, 0, 1, 2, 3, 4, 5, 6, 7, 8, 9, or 10, etc.) bulges. In some embodiments, the number is 0. In some embodiments, the number is 1. In some embodiments, the number is 2. In some embodiments, the number is 3. In some embodiments, the number is 4. In some embodiments, the number is 5.

[0210] In some embodiments, distances between two mismatches, mismatches and one or both ends of oligonucleotides (or a portion thereof, e.g., first domain, second domain, first subdomain, second subdomain, third subdomain), and/or mismatches and nucleosides opposite to target adenosine can independently be 0-50, 0-40, 0-30, 0-25, 0-20, 0-15, 0-10 (e.g., 0-1, 0-2, 0-3, 0-4, 0-5, 0-6, 0-7, 0-8, 0-9, 0-10, 1-2, 1-3, 1-4, 1-5, 1-6, 1-7, 1-8, 1-9, 1-10, 2-3, 2-4, 2-5, 2-6, 2-7, 2-8, 2-9, 2-10, 3-4, 3-5, 3-6, 3-7, 3-8, 3-9, 3-10, 1, 2, 3, 4, 5, 6, 7, 8, 9, 10, 11, 12, 13, 14, 15, 16, 17, 18, 19, 20, 21, 22, 23, 24, 25, 26, 27, 28, 29, 30, 31, 32, 33, 34, or 35 nucleobases (not including mismatches, end nucleosides and nucleosides opposite to target adenosine). In some embodiments, a number is 0-30. In some embodiments, a number is 0-20. In some embodiments, a number is 1, 2, 3, 4, 5, 6, 7, 8, 9, 10, 11, 12, 13, 14, 15, 16, 17, 18, 19, or 20. In some embodiments, a distance between two mismatches is 0-20. In some embodiments, a distance between two mismatches is 1-10. In some embodiments, a distance between a mismatch and a 5′-end nucleoside of an oligonucleotide is 0-20. In some embodiments, a distance between a mismatch and a 5′-end nucleoside of an oligonucleotide is 5-20. In some embodiments, a distance between a mismatch and a 3′-end nucleoside of an oligonucleotide is 0-40. In some embodiments, a distance between a mismatch and a 3′-end nucleoside of an oligonucleotide is 5-20. In some embodiments, a distance between a mismatch and a nucleoside opposite to a target adenosine is 0-20. In some embodiments, a distance between a mismatch and a nucleoside opposite to a target adenosine is 1-10. In some embodiments, the number of nucleobases for a distance is 0. In some embodiments, it is 1. In some embodiments, it is 2. In some embodiments, it is 3. In some embodiments, it is 4. In some embodiments, it is 5. In some embodiments, it is 6. In some embodiments, it is 7. In some embodiments, it is 8. In some embodiments, it is 9. In some embodiments, it is 10. In some embodiments, it is 11. In some embodiments, it is 12. In some embodiments, it is 13. In some embodiments, it is 14. In some embodiments, it is 15. In some embodiments, it is 16. In some embodiments, it is 17. In some embodiments, it is 18. In some embodiments, it is 19. In some embodiments, it is 20. In some embodiments, a mismatch is at an end, e.g., a 5′-end or 3′-end of a first domain, second domain, first subdomain, second subdomain, or third subdomain. In some embodiments, a mismatch is at a nucleoside opposite to a target adenosine.

[0211] In some embodiments, provided oligonucleotides can direct adenosine editing (e.g., converting A to I) in a target nucleic acid and has a base sequence which consists of, comprises, or comprises a portion (e.g., a span of 10, 11, 12, 13, 14, 15, 16, 17, 18, 19 or more contiguous bases) of the base sequence of an oligonucleotide disclosed herein, wherein each T can be independently replaced with U and vice versa, and the oligonucleotide comprises at least one non-naturally-occurring modification of a base, sugar and/or internucleotidic linkage.

[0212] In some embodiments, a provided oligonucleotide comprises one or more carbohydrate moieties. In some embodiments, a provided oligonucleotide comprises one or more GalNAc moieties. In some embodiments, a provided oligonucleotide comprises one or more targeting moieties. Non-limiting examples of such additional chemical moieties which can be conjugated to oligonucleotide chain are described herein.

[0213] In some embodiments, provided oligonucleotides can direct a correction of a G to A mutation in a target sequence, or a product thereof. In some embodiments, a correction of a G to A mutation is or comprises conversion of A to I, which can be read as G during translation or other biological processes. In some embodiments, provided oligonucleotides can direct a correction of a G to A mutation in a target sequence or a product thereof via ADAR-mediated deamination. In some embodiments, provided oligonucleotides can direct a correction of a G to A mutation in a target sequence or a product thereof via ADAR-mediated deamination by recruiting an endogenous ADAR (e.g., in a target cell) and facilitating the ADAR-mediated deamination. Regardless, however, the present disclosure is not limited to any particular mechanism. In some embodiments, the present disclosure provides oligonucleotides, compositions, methods, etc., capable of operating via double-stranded RNA interference, single-stranded RNA interference, RNase H-mediated knock-down, steric hindrance of translation, ADAR-mediated deamination or a combination of two or more such mechanisms.

[0214] In some embodiments, an oligonucleotide comprises a structural element or a portion thereof described herein, e.g., in a Table. In some embodiments, an oligonucleotide has a base sequence which comprises the base sequence (or a portion thereof) wherein each T can be independently substituted with U, pattern of chemical modifications (or a portion thereof), and/or a format of an oligonucleotide disclosed herein, e.g., in a Table or in the Figures, or otherwise disclosed herein. In some embodiments, such oligonucleotide can direct a correction of a G to A mutation in a target sequence, or a product thereof.

[0215] Among other things, provided oligonucleotides may hybridize to their target nucleic acids (e.g., pre-mRNA, mature mRNA, etc.). In some embodiments, oligonucleotide can hybridize to a target RNA sequence nucleic acid in any stage of RNA processing, including but not limited to a pre-mRNA or a mature mRNA. In some embodiments, oligonucleotide can hybridize to any element of oligonucleotide nucleic acid or its complement, including but not limited to: a promoter region, an enhancer region, a transcriptional stop region, a translational start signal, a translation stop signal, a coding region, a non-coding region, an exon, an intron, an intron/exon or exon/intron junction, the 5′ UTR, or the 3′ UTR.

[0216] In some embodiments, oligonucleotide hybridizes to two or more variants of transcripts derived from a sense strand of a target site (e.g., a target sequence).

[0217] In some embodiments, provided oligonucleotides contain increased levels of one or more isotopes. In some embodiments, provided oligonucleotides are labeled, e.g., by one or more isotopes of one or more elements, e.g., hydrogen, carbon, nitrogen, etc. In some embodiments, provided oligonucleotides in provided compositions, e.g., oligonucleotides of a plurality of a composition, comprise base modifications, sugar modifications, and/or internucleotidic linkage modifications, wherein the oligonucleotides contain an enriched level of deuterium. In some embodiments, provided oligonucleotides are labeled with deuterium (replacing —¹H with —²H) at one or more positions. In some embodiments, one or more ¹H of an oligonucleotide chain or any moiety conjugated to the oligonucleotide chain (e.g., a targeting moiety, etc.) is substituted with ²H. Such oligonucleotides can be used in compositions and methods described herein.

[0218] In some embodiments, oligonucleotides comprise one or more modified nucleobases, one or more modified sugars, and/or one or more modified internucleotidic linkages as described herein. In some embodiments, oligonucleotides comprise a certain level of modified nucleobases, modified sugars, and/or modified internucleotidic linkages, e.g., about 5%-100%, about 10%-100%, 20-100%, 30%-100%, 40%-100%, 50%-80%, 50%-85%, 50%-90%, 50%-95%, 60%-80%, 60%-85%, 60%-90%, 60%-95%, 60%-100%, 65%-80%, 65%-85%, 65%-90%, 65%-95%, 65%-100%, 70%-80%, 70%-85%, 70%-90%, 70%-95%, 70%-100%, 75%-80%, 75%-85%, 75%-90%, 75%-95%, 75%-100%, 80%-85%, 80%-90%, 80%-95%, 80%-100%, 85%-90%, 85%-95%, 85%-100%, 90%-95%, 90%-100%, 10%, 20%, 30%, 40%, 50%, 60%, 65%, 70%, 75%, 80%, 85%, 90%, 95%, or 100%, etc. of all nucleobases, sugars, and internucleotidic linkages, respectively, within an oligonucleotide.

[0219] In some embodiments, oligonucleotides comprise one or more modified sugars. In some embodiments, an oligonucleotide comprises about 1-50 (e.g., about 5, 6, 7, 8, 9, or 10-about 10, 11, 12, 13, 14, 15, 16, 17, 18, 19, 20, 21, 22, 23, 24, 25, 30, 40 or 50, or about 5, 6, 7, 8, 9, 10, 11, 12, 13, 14, 15, 16, 17, 18, 19, 20, 21, 22, 23, 24, 25, 30, 40 or 50, etc., about 1, 2, 3, 4, 5, 6, 7, 8, 9, 10, 11, 12, 13, 14, 15, 16, 17, 18, 19, or 20, etc.) modified sugars. In some embodiments, an oligonucleotide comprises about 1-50 (e.g., about 5, 6, 7, 8, 9, or 10-about 10, 11, 12, 13, 14, 15, 16, 17, 18, 19, 20, 21, 22, 23, 24, 25, 30, 40 or 50, or about 5, 6, 7, 8, 9, 10, 11, 12, 13, 14, 15, 16, 17, 18, 19, 20, 21, 22, 23, 24, 25, 30, 40 or 50, etc., about 1, 2, 3, 4, 5, 6, 7, 8, 9, 10, 11, 12, 13, 14, 15, 16, 17, 18, 19, or 20, etc.) modified sugars with 2′-F modification. In some embodiments, an oligonucleotide comprises about 2-50 (e.g., about 2, 3, 4, 5, 6, 7, 8, 9, or 10-about 10, 11, 12, 13, 14, 15, 16, 17, 18, 19, 20, 21, 22, 23, 24, 25, 30, 40 or 50, or about 5, 6, 7, 8, 9, 10, 11, 12, 13, 14, 15, 16, 17, 18, 19, 20, 21, 22, 23, 24, 25, 30, 40 or 50, etc., 2-40, 2-30, 2-25, 2-20, 2-15, 2-10, 3-40, 3-30, 3-25, 3-20, 3-15, 3-10, 4-40, 4-30, 4-25, 4-20, 4-15, 4-10, 5-40, 5-30, 5-25, 5-20, 5-15, 5-10, 6-40, 6-30, 6-25, 6-20, 6-15, 6-10, 7-40, 7-30, 7-25, 7-20, 7-15, 7-10, 8-40, 8-30, 8-25, 8-20, 8-15, 8-10, 9-40, 9-30, 9-25, 9-20, 9-15, 9-10, 10-40, 10-30, 10-25, 10-20, 10-15, about 2, 3, 4, 5, 6, 7, 8, 9, 10, 11, 12, 13, 14, 15, 16, 17, 18, 19, or 20, etc.) consecutive modified sugars with 2′-F modification. In some embodiments, an oligonucleotide comprises 2 consecutive 2′-F modified sugars. In some embodiments, an oligonucleotide comprises 3 consecutive 2′-F modified sugars. In some embodiments, an oligonucleotide comprises 4 consecutive 2′-F modified sugars. In some embodiments, an oligonucleotide comprises 5 consecutive 2′-F modified sugars. In some embodiments, an oligonucleotide comprises 6 consecutive 2′-F modified sugars. In some embodiments, an oligonucleotide comprises 7 consecutive 2′-F modified sugars. In some embodiments, an oligonucleotide comprises 8 consecutive 2′-F modified sugars. In some embodiments, an oligonucleotide comprises 9 consecutive 2′-F modified sugars. In some embodiments, an oligonucleotide comprises 10 consecutive 2′-F modified sugars. In some embodiments, an oligonucleotide comprises two or more 2′-F modified sugar blocks, wherein each sugar in a 2′-F modified sugar block is independently a 2′-F modified sugar. In some embodiments, each 2′-F modified sugar block independently comprises or consists of 2, 3, 4, 5, 6, 7, 8, 9, or 10 consecutive 2′-F modified sugars as described herein. In some embodiments, two consecutive 2′-F modified sugar blocks are independently separated by a separating block which separating block comprises one or more sugars that are independently not 2′-F modified sugars. In some embodiments, an oligonucleotide comprises one or more (e.g., 1-20, 1-15, 1-14, 1-13, 1-12, 1-11, 1-10, 2-20, 3-15, 4-15, 5-15, 1, 2, 3, 4, 5, 6, 7, 8, 9, 10, 11, 12, 13, 14, 15, 16, 17, 18, 19, 20, etc.) 2′-F blocks and one or more (e.g., 1-20, 1-15, 1-14, 1-13, 1-12, 1-11, 1-10, 2-20, 3-15, 4-15, 5-15, 1, 2, 3, 4, 5, 6, 7, 8, 9, 10, 11, 12, 13, 14, 15, 16, 17, 18, 19, 20, etc.) separating blocks. In some embodiments, a first domain comprises one or more (e.g., 1-20, 1-15, 1-14, 1-13, 1-12, 1-11, 1-10, 2-20, 3-15, 4-15, 5-15, 1, 2, 3, 4, 5, 6, 7, 8, 9, 10, 11, 12, 13, 14, 15, 16, 17, 18, 19, 20, etc.) 2′-F blocks and one or more (e.g., 1-20, 1-15, 1-14, 1-13, 1-12, 1-11, 1-10, 2-20, 3-15, 4-15, 5-15, 1, 2, 3, 4, 5, 6, 7, 8, 9, 10, 11, 12, 13, 14, 15, 16, 17, 18, 19, 20, etc.) separating blocks. In some embodiments, each first domain block bonded to a first domain 2′-F block is a separating block. In some embodiments, each first domain block bonded to a first domain separating block is a first domain 2′-F block. In some embodiments, each sugar in a separating block is independently not 2′-F modified. In some embodiments, two or more (e.g., 2, 3, 4, 5, 6, 7, 8, 9, or 10 or more) or all sugars in a separating block are independently not 2′-F modified. In some embodiments, a separating block comprises one or more bicyclic sugars (e.g., LNA sugar, cEt sugar, etc.) and/or one or more 2′-OR modified sugars, wherein R is optionally substituted C₁₋₆ aliphatic (e.g., 2′-OMe, 2′-MOE, etc.). In some embodiments, a separating block comprises one or more 2′-OR modified sugars, wherein R is optionally substituted C₁₋₆ aliphatic (e.g., 2′-OMe, 2′-MOE, etc.). In some embodiments, two or more non-2′-F modified sugars are consecutive. In some embodiments, two or more 2′-OR modified sugars wherein R is optionally substituted C₁₋₆ aliphatic (e.g., 2′-OMe, 2′-MOE, etc.) are consecutive. In some embodiments, a separating block comprises two or more (e.g., 2, 3, 4, 5, 6, 7, 8, 9, or 10 or more) 2′-OR modified sugars wherein R is optionally substituted C₁₋₆ aliphatic (e.g., 2′-OMe, 2′-MOE, etc.). In some embodiments, a separating block comprises two or more (e.g., 2, 3, 4, 5, 6, 7, 8, 9, or 10 or more) consecutive 2′-OR modified sugars wherein R is optionally substituted C₁₋₆ aliphatic (e.g., 2′-OMe, 2′-MOE, etc.). In some embodiments, each 2′-OR modified sugar is independently a 2′-OMe or 2′-MOE sugar. In some embodiments, each 2′-OR modified sugar is independently a 2′-OMe sugar. In some embodiments, each 2′-OR modified sugar is independently a 2′-MOE sugar. In some embodiments, a separating block comprises one or more 2′-F modified sugars. In some embodiments, none of 2′-F modified sugars in a separating block are next to each other. In some embodiments, a separating block contain no 2′-F modified sugars. In some embodiments, each sugar in a separating block is independently a 2′-OR modified sugar wherein R is optionally substituted C₁₋₆ aliphatic or a bicyclic sugar. In some embodiments, each sugar in each separating block is independently a 2′-OR modified sugar wherein R is optionally substituted C₁₋₆ aliphatic or a bicyclic sugar. In some embodiments, each sugar in a separating block is independently a 2′-OR modified sugar wherein R is optionally substituted C₁₋₆ aliphatic. In some embodiments, each sugar in each separating block is independently a 2′-OR modified sugar wherein R is optionally substituted C₁₋₆ aliphatic. In some embodiments, each sugar in a separating block is independently a 2′-OMe or 2′-MOE modified sugar. In some embodiments, each sugar in each separating block is independently a 2′-OMe or 2′-MOE modified sugar. In some embodiments, each sugar in a separating block is independently a 2′-OMe modified sugar. In some embodiments, each sugar in a separating block is independently a 2′-MOE modified sugar. In some embodiments, a separating block comprises a 2′-OMe sugar and 2′-MOE modified sugar. In some embodiments, each 2′-F block and each separating block independently contains 1, 2, 3, 4, or 5 nucleosides. In some embodiments, each 2′-F block and each separating block independently contains 1, 2, or 3 nucleosides.

[0220] In some embodiments, about 10%-100%, 20-100%, 30%-100%, 40%-100%, 50%-80%, 50%-85%, 50%-90%, 50%-95%, 60%-80%, 60%-85%, 60%-90%, 60%-95%, 60%-100%, 65%-80%, 65%-85%, 65%-90%, 65%-95%, 65%-100%, 70%-80%, 70%-85%, 70%-90%, 70%-95%, 70%-100%, 75%-80%, 75%-85%, 75%-90%, 75%-95%, 75%-100%, 80%-85%, 80%-90%, 80%-95%, 80%-100%, 85%-90%, 85%-95%, 85%-100%, 90%-95%, 90%-100%, 10%, 20%, 30%, 40%, 50%, 60%, 65%, 70%, 75%, 80%, 85%, 90%, 95%, or 100%, etc. of all sugars are modified sugars. In some embodiments, about 10%-100%, 20-100%, 30%-100%, 40%-100%, 50%-80%, 50%-85%, 50%-90%, 50%-95%, 60%-80%, 60%-85%, 60%-90%, 60%-95%, 60%-100%, 65%-80%, 65%-85%, 65%-90%, 65%-95%, 65%-100%, 70%-80%, 70%-85%, 70%-90%, 70%-95%, 70%-100%, 75%-80%, 75%-85%, 75%-90%, 75%-95%, 75%-100%, 80%-85%, 80%-90%, 80%-95%, 80%-100%, 85%-90%, 85%-95%, 85%-100%, 90%-95%, 90%-100%, 10%, 20%, 30%, 40%, 50%, 60%, 65%, 70%, 75%, 80%, 85%, 90%, 95%, or 100%, etc. of all sugars are modified sugars independently selected from 2′-F modified sugars, 2′-OR modified sugars wherein R is optionally substituted C₁₋₆ aliphatic, and bicyclic sugars (e.g., LNA sugars, cEt sugars, etc.). In some embodiments, a percentage is about or at least about 30%. In some embodiments, a percentage is about or at least about 40%. In some embodiments, a percentage is about or at least about 50%. In some embodiments, a percentage is about or at least about 60%. In some embodiments, a percentage is about or at least about 70%. In some embodiments, a percentage is about or at least about 80%. In some embodiments, a percentage is about or at least about 90%. In some embodiments, a percentage is about or at least about 95%.

[0221] In some embodiments, about 10%-100%, 20-100%, 30%-100%, 40%-100%, 50%-80%, 50%-85%, 50%-90%, 50%-95%, 60%-80%, 60%-85%, 60%-90%, 60%-95%, 60%-100%, 65%-80%, 65%-85%, 65%-90%, 65%-95%, 65%-100%, 70%-80%, 70%-85%, 70%-90%, 70%-95%, 70%-100%, 75%-80%, 75%-85%, 75%-90%, 75%-95%, 75%-100%, 80%-85%, 80%-90%, 80%-95%, 80%-100%, 85%-90%, 85%-95%, 85%-100%, 90%-95%, 90%-100%, 10%, 20%, 30%, 40%, 50%, 60%, 65%, 70%, 75%, 80%, 85%, 90%, 95%, or 100%, etc. of all sugars are modified sugars independently selected from 2′-F modified sugars and 2′-OR modified sugars wherein R is optionally substituted C₁₋₆ aliphatic. In some embodiments, about 10%-100%, 20-100%, 30%-100%, 40%-100%, 50%-80%, 50%-85%, 50%-90%, 50%-95%, 60%-80%, 60%-85%, 60%-90%, 60%-95%, 60%-100%, 65%-80%, 65%-85%, 65%-90%, 65%-95%, 65%-100%, 70%-80%, 70%-85%, 70%-90%, 70%-95%, 70%-100%, 75%-80%, 75%-85%, 75%-90%, 75%-95%, 75%-100%, 80%-85%, 80%-90%, 80%-95%, 80%-100%, 85%-90%, 85%-95%, 85%-100%, 90%-95%, 90%-100%, 10%, 20%, 30%, 40%, 50%, 60%, 65%, 70%, 75%, 80%, 85%, 90%, 95%, or 100%, etc. of all sugars are modified sugars independently selected from 2′-F modified sugars, 2′-OMe modified sugars and 2′-MOE modified sugars. In some embodiments, a percentage is about or at least about 30%. In some embodiments, a percentage is about or at least about 40%. In some embodiments, a percentage is about or at least about 50%. In some embodiments, a percentage is about or at least about 60%. In some embodiments, a percentage is about or at least about 70%. In some embodiments, a percentage is about or at least about 80%. In some embodiments, a percentage is about or at least about 90%. In some embodiments, a percentage is about or at least about 95%.

[0222] In some embodiments, about 10%-100%, 20-100%, 30%-100%, 40%-100%, 50%-80%, 50%-85%, 50%-90%, 50%-95%, 60%-80%, 60%-85%, 60%-90%, 60%-95%, 60%-100%, 65%-80%, 65%-85%, 65%-90%, 65%-95%, 65%-100%, 70%-80%, 70%-85%, 70%-90%, 70%-95%, 70%-100%, 75%-80%, 75%-85%, 75%-90%, 75%-95%, 75%-100%, 80%-85%, 80%-90%, 80%-95%, 80%-100%, 85%-90%, 85%-95%, 85%-100%, 90%-95%, 90%-100%, 10%, 20%, 30%, 40%, 50%, 60%, 65%, 70%, 75%, 80%, 85%, 90%, 95%, or 100%, etc. of all sugars are modified sugars independently selected from 2′-F modified sugars and 2′-OMe modified sugars. In some embodiments, a percentage is about or at least about 30%. In some embodiments, a percentage is about or at least about 40%. In some embodiments, a percentage is about or at least about 50%. In some embodiments, a percentage is about or at least about 60%. In some embodiments, a percentage is about or at least about 70%. In some embodiments, a percentage is about or at least about 80%. In some embodiments, a percentage is about or at least about 90%. In some embodiments, a percentage is about or at least about 95%.

[0223] In some embodiments, about 10%-100%, 20-100%, 30%-100%, 40%-100%, 50%-80%, 50%-85%, 50%-90%, 50%-95%, 60%-80%, 60%-85%, 60%-90%, 60%-95%, 60%-100%, 65%-80%, 65%-85%, 65%-90%, 65%-95%, 65%-100%, 70%-80%, 70%-85%, 70%-90%, 70%-95%, 70%-100%, 75%-80%, 75%-85%, 75%-90%, 75%-95%, 75%-100%, 80%-85%, 80%-90%, 80%-95%, 80%-100%, 85%-90%, 85%-95%, 85%-100%, 90%-95%, 90%-100%, 10%, 20%, 30%, 40%, 50%, 60%, 65%, 70%, 75%, 80%, 85%, 90%, 95%, or 100%, etc. of all sugars are 2′-F modified sugars. In some embodiments, a percentage is about or at least about 30%. In some embodiments, a percentage is about or at least about 40%. In some embodiments, a percentage is about or at least about 50%. In some embodiments, a percentage is about or at least about 60%. In some embodiments, a percentage is about or at least about 70%. In some embodiments, a percentage is about or at least about 80%. In some embodiments, a percentage is about or at least about 90%. In some embodiments, a percentage is about or at least about 95%. In some embodiments, 10 or more (e.g., about or at least about 10, 11, 12, 13, 14, 15, 16, 17, 18, 19, 20, 21, 22, 23, 24, 25, 26, 27, 28, 29 or 30 or more, 10-50, 10-40, 10-30, 10-25, 15-50, 15-40, 15-30, 15-25, 20-50, 20-40, 20-30, 20-25, etc.) sugars are 2′-F modified sugars. In some embodiments, an oligonucleotide comprises two or more (e.g., 2-30, 2-25, 2-20, 2-15, 3-10, 3-30, 3-25, 3-20, 3-15, 3-10, 4-30, 4-25, 4-20, 4-15, 4-10, 5-30, 5-25, 5-20, 5-15, 5-10, 2, 3, 4, 5, 6, 7, 8, 9, 10, 11, 12, 13, 14, 15, 16, 17, 18, 19, or 20) consecutive 2′-F modified sugars. In some embodiments, an oligonucleotide comprises one or more 2′-F blocks each independently comprising two or more (e.g., 2-30, 2-25, 2-20, 2-15, 3-10, 3-30, 3-25, 3-20, 3-15, 3-10, 4-30, 4-25, 4-20, 4-15, 4-10, 5-30, 5-25, 5-20, 5-15, 5-10, 2, 3, 4, 5, 6, 7, 8, 9, 10, 11, 12, 13, 14, 15, 16, 17, 18, 19, or 20) consecutive 2′-F modified sugars. In some embodiments, an oligonucleotide comprises two or more 2′-F blocks as described herein separated by one or more separating blocks as described herein. In some embodiments, a 2′-F block has 2, 3, 4, 5, 6, 7, 8, 9, or 10 2′-F modified sugars. In some embodiments, a 2′-F block has no more than 2, 3, 4, 5, 6, 7, 8, 9, or 10 2′-F modified sugars. In some embodiments, each sugar in each 2′-F blocks is a 2′-F modified sugar, and each 2′-F block independently has 2, 3, 4, 5, 6, 7, 8, 9, or 10 2′-F modified sugars. In some embodiments, each sugar in each 2′-F blocks is a 2′-F modified sugar, and each 2′-F block independently has no more than 2, 3, 4, 5, 6, 7, 8, 9, or 10 2′-F modified sugars. In some embodiments, each sugar in each 2′-F blocks is a 2′-F modified sugar, and each 2′-F block independently has no more than 10 2′-F modified sugars. In some embodiments, each sugar in each 2′-F blocks is a 2′-F modified sugar, and each 2′-F block independently has no more than 9 2′-F modified sugars. In some embodiments, each sugar in each 2′-F blocks is a 2′-F modified sugar, and each 2′-F block independently has no more than 8 2′-F modified sugars. In some embodiments, each sugar in each 2′-F blocks is a 2′-F modified sugar, and each 2′-F block independently has no more than 7 2′-F modified sugars. In some embodiments, each sugar in each 2′-F blocks is a 2′-F modified sugar, and each 2′-F block independently has no more than 6 2′-F modified sugars. In some embodiments, each sugar in each 2′-F blocks is a 2′-F modified sugar, and each 2′-F block independently has no more than 5 2′-F modified sugars. In some embodiments, each sugar in each 2′-F blocks is a 2′-F modified sugar, and each 2′-F block independently has no more than 4 2′-F modified sugars. In some embodiments, each block bonded to a 2′-F block is independently a block that comprises no 2′-F modified sugar. In some embodiments, each block bonded to a 2′-F block is independently a block that comprises a natural DNA or RNA sugar, a 2′-OR modified sugar wherein R is optionally substituted C₁₋₆ aliphatic or a bicyclic sugar. In some embodiments, each block bonded to a 2′-F block is independently a block that comprises a natural DNA or RNA sugar, a 2′-OMe modified sugar, 2′-MOE modified sugar or a bicyclic sugar. In some embodiments, each block bonded to a 2′-F block is independently a block that comprises a natural DNA or RNA sugar, a 2′-OMe modified sugar or 2′-MOE modified sugar. In some embodiments, each nucleoside in a first domain bonded to a 2′-F block in a first domain is independently a 2′-OR modified sugar wherein R is optionally substituted C₁₋₆ aliphatic or a bicyclic sugar. In some embodiments, each nucleoside in a first domain bonded to a 2′-F block in a first domain is independently a 2′-OR modified sugar wherein R is optionally substituted C₁₋₆ aliphatic. In some embodiments, each nucleoside in a first domain bonded to a 2′-F block in a first domain is independently a 2′-OMe or 2′-MOE modified sugar. In some embodiments, each nucleoside in a second domain bonded to a 2′-F block in a second domain is independently a 2′-OR modified sugar wherein R is optionally substituted C₁₋₆ aliphatic or a bicyclic sugar. In some embodiments, each nucleoside in a second domain bonded to a 2′-F block in a second domain is independently a 2′-OR modified sugar wherein R is optionally substituted C₁₋₆ aliphatic. In some embodiments, each nucleoside in a second domain bonded to a 2′-F block in a second domain is independently a 2′-OMe or 2′-MOE modified sugar.

[0224] In some embodiments, about 10%-100%, 20-100%, 30%-100%, 40%-100%, 50%-80%, 50%-85%, 50%-90%, 50%-95%, 60%-80%, 60%-85%, 60%-90%, 60%-95%, 60%-100%, 65%-80%, 65%-85%, 65%-90%, 65%-95%, 65%-100%, 70%-80%, 70%-85%, 70%-90%, 70%-95%, 70%-100%, 75%-80%, 75%-85%, 75%-90%, 75%-95%, 75%-100%, 80%-85%, 80%-90%, 80%-95%, 80%-100%, 85%-90%, 85%-95%, 85%-100%, 90%-95%, 90%-100%, 10%, 20%, 30%, 40%, 50%, 60%, 65%, 70%, 75%, 80%, 85%, 90%, 95%, or 100%, etc. of all sugars are 2′-OR modified sugars, wherein R is optionally substituted C₁₋₆ aliphatic. In some embodiments, about 10%-100%, 20-100%, 30%-100%, 40%-100%, 50%-80%, 50%-85%, 50%-90%, 50%-95%, 60%-80%, 60%-85%, 60%-90%, 60%-95%, 60%-100%, 65%-80%, 65%-85%, 65%-90%, 65%-95%, 65%-100%, 70%-80%, 70%-85%, 70%-90%, 70%-95%, 70%-100%, 75%-80%, 75%-85%, 75%-90%, 75%-95%, 75%-100%, 80%-85%, 80%-90%, 80%-95%, 80%-100%, 85%-90%, 85%-95%, 85%-100%, 90%-95%, 90%-100%, 10%, 20%, 30%, 40%, 50%, 60%, 65%, 70%, 75%, 80%, 85%, 90%, 95%, or 100%, etc. of all sugars are 2′-OMe or 2′-MOE modified sugars. In some embodiments, a percentage is about or at least about 30%. In some embodiments, a percentage is about or at least about 40%. In some embodiments, a percentage is about or at least about 50%. In some embodiments, a percentage is about or at least about 60%. In some embodiments, a percentage is about or at least about 70%. In some embodiments, a percentage is about or at least about 80%. In some embodiments, a percentage is about or at least about 90%. In some embodiments, a percentage is about or at least about 95%.

[0225] In some embodiments, about 10%-100%, 20-100%, 30%-100%, 40%-100%, 50%-80%, 50%-85%, 50%-90%, 50%-95%, 60%-80%, 60%-85%, 60%-90%, 60%-95%, 60%-100%, 65%-80%, 65%-85%, 65%-90%, 65%-95%, 65%-100%, 70%-80%, 70%-85%, 70%-90%, 70%-95%, 70%-100%, 75%-80%, 75%-85%, 75%-90%, 75%-95%, 75%-100%, 80%-85%, 80%-90%, 80%-95%, 80%-100%, 85%-90%, 85%-95%, 85%-100%, 90%-95%, 90%-100%, 10%, 20%, 30%, 40%, 50%, 60%, 65%, 70%, 75%, 80%, 85%, 90%, 95%, or 100%, etc. of all sugars are 2′-OMe modified sugars. In some embodiments, a percentage is about or at least about 30%. In some embodiments, a percentage is about or at least about 40%. In some embodiments, a percentage is about or at least about 50%. In some embodiments, a percentage is about or at least about 60%. In some embodiments, a percentage is about or at least about 70%. In some embodiments, a percentage is about or at least about 80%. In some embodiments, a percentage is about or at least about 90%. In some embodiments, a percentage is about or at least about 95%.

[0226] In some embodiments, about 10%-100%, 20-100%, 30%-100%, 40%-100%, 50%-80%, 50%-85%, 50%-90%, 50%-95%, 60%-80%, 60%-85%, 60%-90%, 60%-95%, 60%-100%, 65%-80%, 65%-85%, 65%-90%, 65%-95%, 65%-100%, 70%-80%, 70%-85%, 70%-90%, 70%-95%, 70%-100%, 75%-80%, 75%-85%, 75%-90%, 75%-95%, 75%-100%, 80%-85%, 80%-90%, 80%-95%, 80%-100%, 85%-90%, 85%-95%, 85%-100%, 90%-95%, 90%-100%, 10%, 20%, 30%, 40%, 50%, 60%, 65%, 70%, 75%, 80%, 85%, 90%, 95%, or 100%, etc. of all sugars are 2′-OR modified sugars, wherein R is optionally substituted C₁₋₆ aliphatic. In some embodiments, about 10%-100%, 20-100%, 30%-100%, 40%-100%, 50%-80%, 50%-85%, 50%-90%, 50%-95%, 60%-80%, 60%-85%, 60%-90%, 60%-95%, 60%-100%, 65%-80%, 65%-85%, 65%-90%, 65%-95%, 65%-100%, 70%-80%, 70%-85%, 70%-90%, 70%-95%, 70%-100%, 75%-80%, 75%-85%, 75%-90%, 75%-95%, 75%-100%, 80%-85%, 80%-90%, 80%-95%, 80%-100%, 85%-90%, 85%-95%, 85%-100%, 90%-95%, 90%-100%, 10%, 20%, 30%, 40%, 50%, 60%, 65%, 70%, 75%, 80%, 85%, 90%, 95%, or 100%, etc. of all sugars are 2′-MOE modified sugars.

[0227] In some embodiments, sugars of the first (5′-end) one or several (e.g., 1, 2, 3, 4, 5, 6, 7, 8, 9, 10, or 1-10, 1-9, 1-8, 1-7, 1-6, 1-5, 1-4, 1-3, 2-10, 2-9, 2-8, 2-7, 2-6, 2-5, 2-4, 2-3, 3-10, 3-9, 3-8, 3-7, 3-6, 3-5, 3-4, etc.) and/or the last (3′-end) one or several (e.g., 1, 2, 3, 4, 5, 6, 7, 8, 9, 10, or 1-10, 1-9, 1-8, 1-7, 1-6, 1-5, 1-4, 1-3, 2-10, 2-9, 2-8, 2-7, 2-6, 2-5, 2-4, 2-3, 3-10, 3-9, 3-8, 3-7, 3-6, 3-5, 3-4, etc.) nucleosides are independently modified sugars. In some embodiments, the first one or several sugars are independently modified sugars. In some embodiments, the last one or several sugars are independently modified sugars. In some embodiments, both the first and last one or several sugars are independently modified sugars. In some embodiments, modified sugars are independently non-2′-F modified sugars, e.g., bicyclic sugars, 2′-OR modified sugars wherein R is as described herein and is not —H (e.g., optionally substituted C₁₋₆ aliphatic). In some embodiments, they are independently selected from bicyclic sugars and 2′-OR modified sugars wherein R is optionally substituted C₁₋₆ aliphatic. In some embodiments, they are independently 2′-OR modified sugars wherein R is optionally substituted C₁₋₆ aliphatic. In some embodiments, they are independently 2′-OMe modified sugars and 2′-MOE modified sugars. In some embodiments, the first several sugars comprises one or more 2′-OR modified sugars wherein R is optionally substituted C₁₋₆ aliphatic or bicyclic sugars (e.g., LNA, cEt, etc.) as described herein. In some embodiments, the first several sugars comprises one or more 2′-OR modified sugars wherein R is optionally substituted C₁₋₆ aliphatic. In some embodiments, the first several sugars comprises one or more 2′-OMe modified sugars. In some embodiments, the first several sugars comprises one or more 2′-MOE modified sugars. In some embodiments, the first several sugars comprises one or more 2′-OMe modified sugars and one or more 2′-MOE modified sugars. In some embodiments, the last several sugars comprises one or more 2′-OR modified sugars wherein R is optionally substituted C₁₋₆ aliphatic or bicyclic sugars (e.g., LNA, cEt, etc.) as described herein. In some embodiments, the last several sugars comprises one or more 2′-OR modified sugars wherein R is optionally substituted C₁₋₆ aliphatic. In some embodiments, the last several sugars comprises one or more 2′-OMe modified sugars. In some embodiments, the last several sugars comprises one or more 2′-MOE modified sugars. In some embodiments, the last several sugars comprises one or more 2′-OMe modified sugars and one or more 2′-MOE modified sugars. In some embodiments, the last several sugars are independently 2′-OMe modified sugars. In some embodiments, the first several sugars comprise two or more (e.g., 2, 3, 4, 5, 6, 7, 8, 9, or 10, etc.) consecutive bicyclic sugars or 2′-OR modified sugars wherein R is optionally substituted C₁₋₆ aliphatic. In some embodiments, the first several sugars comprise two or more (e.g., 2, 3, 4, 5, 6, 7, 8, 9, or 10, etc.) consecutive 2′-OR modified sugars wherein R is optionally substituted C₁₋₆ aliphatic. In some embodiments, the first several sugars comprise two or more (e.g., 2, 3, 4, 5, 6, 7, 8, 9, or 10, etc.) consecutive modified sugars wherein each modified sugar is independently a 2′-OMe modified sugar or a 2′-MOE modified sugar. In some embodiments, the first several sugars comprise two or more (e.g., 2, 3, 4, 5, 6, 7, 8, 9, or 10, etc.) consecutive 2′-OMe modified sugars. In some embodiments, the first several sugars comprise two or more (e.g., 2, 3, 4, 5, 6, 7, 8, 9, or 10, etc.) consecutive 2′-MOE modified sugars. In some embodiments, the last several sugars comprise two or more (e.g., 2, 3, 4, 5, 6, 7, 8, 9, or 10, etc.) consecutive 2′-OR modified sugars wherein R is optionally substituted C₁₋₆ aliphatic. In some embodiments, the last several sugars comprise two or more (e.g., 2, 3, 4, 5, 6, 7, 8, 9, or 10, etc.) consecutive modified sugars wherein each modified sugar is independently a 2′-OMe modified sugar or a 2′-MOE modified sugar. In some embodiments, the last several sugars comprise two or more (e.g., 2, 3, 4, 5, 6, 7, 8, 9, or 10, etc.) consecutive 2′-OMe modified sugars. In some embodiments, the last several sugars comprise three or more consecutive 2′-OMe modified sugars. In some embodiments, the last several sugars comprise four or more consecutive 2′-OMe modified sugars. In some embodiments, the last several sugars comprise five or more consecutive 2′-OMe modified sugars. In some embodiments, the last several sugars comprise six or more consecutive 2′-OMe modified sugars. In some embodiments, the last several sugars comprise two or more (e.g., 2, 3, 4, 5, 6, 7, 8, 9, or 10, etc.) consecutive 2′-MOE modified sugars.

[0228] In some embodiments, one or more (1, 2, 3, 4, 5, 6, 7, 8, 9, or 10) of the first several (1, 2, 3, 4, 5, 6, 7, 8, 9, or 10) sugars are modified sugars. In some embodiments, one or more (1, 2, 3, 4, 5, 6, 7, 8, 9, or 10) of the first several (1, 2, 3, 4, 5, 6, 7, 8, 9, or 10) sugars are modified sugars each independently selected from a 2′-OR modified sugar wherein R is optionally substituted C₁₋₆ aliphatic and a bicyclic sugar (e.g., a sugar comprising 2′-O—CH₂-4′, wherein the —CH₂— is optionally substituted (e.g., a LNA sugar, a cET sugar (e.g., (S)-cEt))). In some embodiments, two or more of the first several sugars are modified sugars each independently selected from a 2′-OR modified sugar wherein R is optionally substituted C₁₋₆ aliphatic and a bicyclic sugar. In some embodiments, three or more of the first several sugars are modified sugars each independently selected from a 2′-OR modified sugar wherein R is optionally substituted C₁₋₆ aliphatic and a bicyclic sugar. In some embodiments, four or more of the first several sugars are modified sugars each independently selected from a 2′-OR modified sugar wherein R is optionally substituted C₁₋₆ aliphatic and a bicyclic sugar. In some embodiments, the one or more sugars are consecutive. In some embodiments, the first one, two, three or four sugars are modified sugars. In some embodiments, the first two sugars are modified sugars each independently selected from a 2′-OR modified sugar wherein R is optionally substituted C₁₋₆ aliphatic and a bicyclic sugar. In some embodiments, the first three sugars are modified sugars each independently selected from a 2′-OR modified sugar wherein R is optionally substituted C₁₋₆ aliphatic and a bicyclic sugar. In some embodiments, the first four sugars are modified sugars each independently selected from a 2′-OR modified sugar wherein R is optionally substituted C₁₋₆ aliphatic and a bicyclic sugar. In some embodiments, each 2′-OR modified sugar is independently a 2′-OMe or 2′-MOE modified sugar. In some embodiments, each bicyclic sugar is independently a LNA sugar or a cEt sugar. In some embodiments, each of the one or more (e.g., 1, 2, 3, 4, or 5) sugars of the first several sugars, or the first several (e.g., 1, 2, 3, 4, or 5) sugar(s), is independently a 2′-OR modified sugar wherein R is optionally substituted C₁₋₆ aliphatic. In some embodiments, each of the one or more (e.g., 1, 2, 3, 4, or 5) sugars of the first several sugars, or the first several (e.g., 1, 2, 3, 4, or 5) sugar(s), is independently a 2′-OMe or 2′-MOE modified sugar. In some embodiments, each of the one or more (e.g., 1, 2, 3, 4, or 5) sugars of the first several sugars, or the first several (e.g., 1, 2, 3, 4, or 5) sugar(s), is independently a 2′-OMe modified sugar. In some embodiments, each of the one or more (e.g., 1, 2, 3, 4, or 5) sugars of the first several sugars, or the first several (e.g., 1, 2, 3, 4, or 5) sugar(s), is independently a 2′-MOE modified sugar. In some embodiments, the first one, two, three, four or more sugars are independently 2′-OMe modified sugars. In some embodiments, the first sugar is a 2′-OMe modified sugar. In some embodiments, the first two sugars are independently 2′-OMe modified sugars. In some embodiments, the first three sugars are independently 2′-OMe modified sugars. In some embodiments, the first four sugars are independently 2′-OMe modified sugars. In some embodiments, the first one, two, three, four or more sugars are independently 2′-MOE modified sugars. In some embodiments, the first sugar is a 2′-MOE modified sugar. In some embodiments, the first two sugars are independently 2′-MOE modified sugars. In some embodiments, the first three sugars are independently 2′-MOE modified sugars. In some embodiments, the first four sugars are independently 2′-MOE modified sugars. In some embodiments, each of such modified sugars is independently the sugar of a nucleoside whose nucleobase is optionally substituted or protected A, T, C, G, or U, or an optionally substituted or protected tautomer of A, T, C, G, or U. In some embodiments, one or more such sugars are independently bonded to a non-negatively charged internucleotidic linkage. In some embodiments, one or more such sugars are independently bonded to a neutral internucleotidic linkage such as n001. In some embodiments, a non-negatively charged internucleotidic linkage or neutral internucleotidic linkage, e.g., n001, is chirally controlled. In some embodiments, it is Rp. In some embodiments, one or more such sugars are independently bonded to a phosphorothioate internucleotidic linkage. In some embodiments, a phosphorothioate internucleotidic linkage is chirally controlled. In some embodiments, it is Sp. In some embodiments, as described herein, the internucleotidic linkage between the first and second nucleosides is a non-negatively charged internucleotidic linkage. In some embodiments, it is a neutral internucleotidic linkage. In some embodiments, it is a phosphoryl guanidine internucleotidic linkage. In some embodiments, it is n001. In some embodiments, it is chirally controlled. In some embodiments, it is Rp. In some embodiments, except the internucleotidic linkage between the first and second nucleosides, each internucleotidic linkages bonded to nucleosides comprising the one or more of the first several, or the first several modified sugars are independently phosphorothioate internucleotidic linkages. In some embodiments, each is chirally controlled. In some embodiments, each is Sp. In some embodiments, a first nucleoside is connected to an additional moiety, e.g., Mod001, optionally through a linker, e.g., L001, through its 5′-end carbon (in some embodiments, via a phosphate group).

[0229] In some embodiments, one or more (1, 2, 3, 4, 5, 6, 7, 8, 9, or 10) of the last several (1, 2, 3, 4, 5, 6, 7, 8, 9, or 10) sugars are modified sugars. In some embodiments, one or more (1, 2, 3, 4, 5, 6, 7, 8, 9, or 10) of the last several (1, 2, 3, 4, 5, 6, 7, 8, 9, or 10) sugars are modified sugars each independently selected from a 2′-OR modified sugar wherein R is optionally substituted C₁₋₆ aliphatic and a bicyclic sugar (e.g., a sugar comprising 2′-O—CH₂-4′, wherein the —CH₂— is optionally substituted (e.g., a LNA sugar, a cET sugar (e.g., (S)-cEt))). In some embodiments, two or more of the last several sugars are modified sugars each independently selected from a 2′-OR modified sugar wherein R is optionally substituted C₁₋₆ aliphatic and a bicyclic sugar. In some embodiments, three or more of the last several sugars are modified sugars each independently selected from a 2′-OR modified sugar wherein R is optionally substituted C₁₋₆ aliphatic and a bicyclic sugar. In some embodiments, four or more of the last several sugars are modified sugars each independently selected from a 2′-OR modified sugar wherein R is optionally substituted C₁₋₆ aliphatic and a bicyclic sugar. In some embodiments, the one or more sugars are consecutive. In some embodiments, the last one, two, three or four sugars are modified sugars. In some embodiments, the last two sugars are modified sugars each independently selected from a 2′-OR modified sugar wherein R is optionally substituted C₁₋₆ aliphatic and a bicyclic sugar. In some embodiments, the last three sugars are modified sugars each independently selected from a 2′-OR modified sugar wherein R is optionally substituted C₁₋₆ aliphatic and a bicyclic sugar. In some embodiments, the last four sugars are modified sugars each independently selected from a 2′-OR modified sugar wherein R is optionally substituted C₁₋₆ aliphatic and a bicyclic sugar. In some embodiments, each 2′-OR modified sugar is independently a 2′-OMe or 2′-MOE modified sugar. In some embodiments, each bicyclic sugar is independently a LNA sugar or a cEt sugar. In some embodiments, each of the one or more (e.g., 1, 2, 3, 4, or 5) sugars of the last several sugars, or the last several (e.g., 1, 2, 3, 4, or 5) sugar(s), is independently a 2′-OR modified sugar wherein R is optionally substituted C₁₋₆ aliphatic. In some embodiments, each of the one or more (e.g., 1, 2, 3, 4, or 5) sugars of the last several sugars, or the last several (e.g., 1, 2, 3, 4, or 5) sugar(s), is independently a 2′-OMe or 2′-MOE modified sugar. In some embodiments, each of the one or more (e.g., 1, 2, 3, 4, or 5) sugars of the last several sugars, or the last several (e.g., 1, 2, 3, 4, or 5) sugar(s), is independently a 2′-OMe modified sugar. In some embodiments, each of the one or more (e.g., 1, 2, 3, 4, or 5) sugars of the last several sugars, or the last several (e.g., 1, 2, 3, 4, or 5) sugar(s), is independently a 2′-MOE modified sugar. In some embodiments, the last one, two, three, four or more sugars are independently 2′-OMe modified sugars. In some embodiments, the last sugar is a 2′-OMe modified sugar. In some embodiments, the last two sugars are independently 2′-OMe modified sugars. In some embodiments, the last three sugars are independently 2′-OMe modified sugars. In some embodiments, the last four sugars are independently 2′-OMe modified sugars. In some embodiments, the last one, two, three, four or more sugars are independently 2′-MOE modified sugars. In some embodiments, the last sugar is a 2′-MOE modified sugar. In some embodiments, the last two sugars are independently 2′-MOE modified sugars. In some embodiments, the last three sugars are independently 2′-MOE modified sugars. In some embodiments, the last four sugars are independently 2′-MOE modified sugars. In some embodiments, each of such modified sugars is independently the sugar of a nucleoside whose nucleobase is optionally substituted or protected A, T, C, G, or U, or an optionally substituted or protected tautomer of A, T, C, G, or U. In some embodiments, one or more such sugars are independently bonded to a non-negatively charged internucleotidic linkage. In some embodiments, one or more such sugars are independently bonded to a neutral internucleotidic linkage such as n001. In some embodiments, a non-negatively charged internucleotidic linkage or neutral internucleotidic linkage, e.g., n001, is chirally controlled. In some embodiments, it is Rp. In some embodiments, one or more such sugars are independently bonded to a phosphorothioate internucleotidic linkage. In some embodiments, a phosphorothioate internucleotidic linkage is chirally controlled. In some embodiments, it is Sp. In some embodiments, as described herein, the internucleotidic linkage between the last and second last nucleosides is a non-negatively charged internucleotidic linkage. In some embodiments, it is a neutral internucleotidic linkage. In some embodiments, it is a phosphoryl guanidine internucleotidic linkage. In some embodiments, it is n001. In some embodiments, it is chirally controlled. In some embodiments, it is Rp. In some embodiments, except the internucleotidic linkage between the last and second last nucleosides, each internucleotidic linkages bonded to nucleosides comprising the one or more of the last several, or the last several modified sugars are independently phosphorothioate internucleotidic linkages. In some embodiments, each is chirally controlled. In some embodiments, each is Sp.

[0230] In some embodiments, a sugar at position +1 is a 2′-F modified sugar. In some embodiments, a sugar at position +1 is a natural DNA sugar. In some embodiments, a sugar at position 0 is a natural DNA sugar (nucleoside at position 0 is opposite to a target adenosine when aligned). In some embodiments, a sugar at position −1 is a DNA sugar. In some embodiments, a sugar at position −2 is a 2′-OR modified sugar wherein R is optionally substituted C₁₋₆ aliphatic or a bicyclic sugar (e.g., a sugar comprising 2′-O—CH₂-4′, wherein the —CH₂— is optionally substituted (e.g., a LNA sugar, a cET sugar (e.g., (S)-cEt))). In some embodiments, it is a 2′-OR modified sugar wherein R is optionally substituted C₁₋₆ aliphatic. In some embodiments, it is a 2′-OMe modified sugar. In some embodiments, it is a 2′-MOE modified sugar. In some embodiments, it is a bicyclic sugar. In some embodiments, it is a LNA sugar. In some embodiments, it is a cEt sugar. In some embodiments, a sugar at position −3 is a 2′-F modified sugar. In some embodiments, each sugar after position −3 (e.g., position −4, −5, −6, etc.) is independently a 2′-OR modified sugar wherein R is optionally substituted C₁₋₆ aliphatic or a bicyclic sugar (e.g., a sugar comprising 2′-O—CH₂-4′, wherein the —CH₂— is optionally substituted (e.g., a LNA sugar, a cET sugar (e.g., (S)-cEt))). In some embodiments, each is independently a 2′-OR modified sugar wherein R is optionally substituted C₁₋₆ aliphatic or a bicyclic sugar. In some embodiments, each is independently a 2′-OMe or 2′-MOE modified sugar. In some embodiments, each is a 2′-OMe modified sugar. In some embodiments, each is a 2′-MOE modified sugar. In some embodiments, one or more are independently 2′-OMe modified sugars, and one or more are independently 2′-MOE modified sugars. In some embodiments, as described herein, the internucleotidic linkage between nucleosides at positions −1 and −2 is a non-negatively charged internucleotidic linkage. In some embodiments, it is a neutral internucleotidic linkage. In some embodiments, it is a phosphoryl guanidine internucleotidic linkage. In some embodiments, it is n001. In some embodiments, it is chirally controlled. In some embodiments, it is Sp. In some embodiments, it is Rp. In some embodiments, the internucleotidic linkage between nucleosides at positions −2 and −3 is a natural phosphate linkage. In some embodiments, as described herein, the internucleotidic linkage between the last and second last nucleosides is a non-negatively charged internucleotidic linkage. In some embodiments, it is a neutral internucleotidic linkage. In some embodiments, it is a phosphoryl guanidine internucleotidic linkage. In some embodiments, it is n001. In some embodiments, it is chirally controlled. In some embodiments, it is Rp. In some embodiments, each internucleotidic linkages between nucleosides to the 3′-side of a nucleoside opposite to a target adenosine, except those between nucleosides at positions −1 and −2, and between nucleosides at positions −2 and −3, and between the last and the second last nucleosides, is independently a phosphorothioate internucleotidic linkages. In some embodiments, each phosphorothioate internucleotidic linkage is chirally controlled. In some embodiments, each is Sp.

[0231] In some embodiments, the first and/or last one or several sugars are modified sugars, e.g., bicyclic sugars and/or 2′-OR modified sugars wherein R is optionally substituted C₁₋₆ aliphatic (e.g., 2′-OMe modified sugars, 2′-MOE modified sugars, etc.). In some embodiments, such sugars may increase stability, affinity and/or activity of an oligonucleotide. In some embodiments, when conjugated to one or more additional chemical moieties, sugars at 5′- and/or 3′-ends of oligonucleotides are not bicyclic sugars or 2′-OR modified sugars wherein R is optionally substituted C₁₋₆ aliphatic. In some embodiments, a 5′-end sugar is a bicyclic sugar or a 2′-OR modified sugar wherein R is optionally substituted C₁₋₆ aliphatic. In some embodiments, such a 5′-end sugar is not connected to an additional chemical moiety. In some embodiments, a 5′-end sugar is a 2′-F modified sugar. In some embodiments, a 5′-end sugar is a 2′-F modified sugar conjugated to an additional chemical moiety. In some embodiments, a 3′-end sugar is a bicyclic sugar or a 2′-OR modified sugar wherein R is optionally substituted C₁₋₆ aliphatic. In some embodiments, such a 3′-end sugar is not connected to an additional chemical moiety. In some embodiments, a 3′-end sugar is a 2′-F modified sugar. In some embodiments, a 3′-end sugar is a 2′-F modified sugar conjugated to an additional chemical moiety. In some embodiments, the last several sugars are 3′-side sugars relative to a nucleoside opposite to a target adenosine (e.g., sugars of 3′-side nucleosides such as N₋₁, N₋₂, etc.). In some embodiments, the last several sugars or the 3′-side sugars comprises one or more (e.g., 1, 2, 3, 4, 5, 6, 7, 8, 9, or 10 or more) 2′-F modified sugars. In some embodiments, the last several sugars or the 3′-side sugars comprises two or more (e.g., 2, 3, 4, 5, 6, 7, 8, 9, or 10 or more) consecutive 2′-F modified sugars. In some embodiments, the last several sugars or the 3′-side sugars comprises one or more, or two or more consecutive, 2′-F modified sugars, and sugar of the last nucleoside of an oligonucleotide is a bicyclic sugar or a 2′-OR modified sugar wherein R is optionally substituted C₁₋₆ aliphatic. In some embodiments, as described herein a 2′-OR modified sugar is a 2′-OMe modified sugar or a 2′-MOE modified sugar; in some embodiments, it is a 2′-OMe modified sugar; in some embodiments, it is a 2′-MOE modified sugar. In some embodiments, the last several sugars or the 3′-side sugars comprises one or more, or two or more consecutive, 2′-F modified sugars, and sugar of the last nucleoside of an oligonucleotide is a 2′-OR modified sugar wherein R is optionally substituted C₁₋₆ aliphatic. In some embodiments, the last several sugars or the 3′-side sugars comprises one or more, or two or more consecutive, 2′-F modified sugars, and sugar of the last nucleoside of an oligonucleotide is a 2′-OMe modified sugar or a 2′-MOE modified sugar. In some embodiments, the last several sugars or the 3′-side sugars comprises one or more, or two or more consecutive, 2′-F modified sugars, and sugar of the last nucleoside of an oligonucleotide is a 2′-OMe modified sugar. In some embodiments, the last several sugars or the 3′-side sugars comprises one or more, or two or more consecutive, 2′-F modified sugars, and sugar of the last nucleoside of an oligonucleotide is a 2′-MOE modified sugar. In some embodiments, two and no more than two nucleosides at the 3′-side of a nucleoside opposite to an adenosine independently have a 2′-F modified sugar. In some embodiments, they are at positions −4 and −5. In some embodiments, they are the second and third last nucleosides of an oligonucleotide. In some embodiments, one and no more than one nucleoside at the 3′-side of a nucleoside opposite to an adenosine has a 2′-F modified sugar. In some embodiments, it is at position −3. In some embodiments, it is 4^{th} last nucleoside of an oligonucleotide.

[0232] In some embodiments, a bicyclic sugar or a 2′-OR modified sugar wherein R is optionally substituted C₁₋₆ aliphatic is present in a region which comprises one or more (e.g., 1-30, 1-25, 1-20, 1-15, 1-10, 2-30, 2-25, 2-20, 2-25, 2-10, or 1, 2, 3, 4, 5, 6, 7, 8, 9, 10, 11, 12, 13, 14, 15, 16, 17, 18, 19, 20 or more) sugars are 2′-F modified. In some embodiments, a majority of sugars as described herein in such a region are 2′-F modified sugars. In some embodiments, two or more 2′-F modified sugars are consecutive. In some embodiments, a region is a first domain. In some embodiments, a bicyclic sugar is present in such a region. In some embodiments, a 2′-OR modified sugar wherein R is optionally substituted C₁₋₆ aliphatic is present in such a region. In some embodiments, a 2′-OMe modified sugar is present in such a region. In some embodiments, a 2′-MOE modified sugar is present in such a region.

[0233] In some embodiments, one or more sugars at positions −5, −4, −3, +1, +2, +4, +5, +6, +7, and +8 (position 0 being the position of a nucleoside opposite to a target adenosine; “+” is going from a nucleoside opposite to a target adenosine toward 5′-end of an oligonucleotide, and “−” is going from a nucleoside opposite to a target adenosine toward 3′-end of an oligonucleotide; for example, in 5′-N₁N₀N₋₁-3′, if N₀ is a nucleoside opposite to a target adenosine, it is at position 0, and N₁ is at position +1 and N₋₁ is at position −1) are independently 2′-F modified sugars. In some embodiments, a sugar at position +1, and one or more sugars at positions −5, −4, −3, +2, +4, +5, +6, +7, and +8, are independently 2′-F modified sugars. In some embodiments, a sugar at position +1, and one sugar at position −5, −4, −3, +2, +4, +5, +6, +7, and +8, are independently 2′-F modified sugars.

[0234] In some embodiments, an oligonucleotide comprises one or more (e.g., 1, 2, 3, 4, 5, 6, 7, 8, 9, 10 or more, 2-10, 3-10, 2-5, 2-4, 2-3, 3-5, 3-4, etc.) natural DNA sugars. In some embodiments, one or more natural DNA sugars are at an editing region, e.g., positions +1, 0, and/or −1. In some embodiments, a natural DNA sugar is within the first several nucleosides of an oligonucleotides (e.g., the first 1, 2, 3, 4, 5, 6, 7, 8, 9, or 10 nucleosides). In some embodiments, the first, second, and/or third nucleosides of an oligonucleotides independently have a natural DNA sugar. In some embodiments, a natural DNA sugar is bonded to a modified internucleotidic linkage such as a non-negatively charged internucleotidic linkage, a neutral internucleotidic linkage, a phosphoryl guanidine internucleotidic linkage, n001, or a phosphorothioate internucleotidic linkage (in various embodiments, Sp).

[0235] Oligonucleotides may contain various types of internucleotidic linkages. In some embodiments, oligonucleotides comprises one or more modified internucleotidic linkages. In some embodiments, a modified internucleotidic linkage is a chiral internucleotidic linkages. In some embodiments, a modified internucleotidic linkage is a phosphorothioate internucleotidic linkage. In some embodiments, a modified internucleotidic linkage is a non-negatively charged internucleotidic linkage. In some embodiments, a modified internucleotidic linkage is a neutral internucleotidic linkage. In some embodiments, a modified internucleotidic linkage is a phosphoryl guanidine internucleotidic linkage. In some embodiments, a modified internucleotidic linkage is n001. In some embodiments, oligonucleotides comprises one or more natural phosphate linkages. In some embodiments, a natural phosphate linkage bonds to a nucleoside comprising a modified sugar that can improve stability (e.g., resistance toward nuclease). In some embodiments, a natural phosphate linkage bonds to a bicyclic sugar. In some embodiments, a natural phosphate linkage bonds to a 2′-modified sugar. In some embodiments, a natural phosphate linkage bonds to a 2′-OR modified sugar, wherein R is optionally substituted C₁₋₆ aliphatic. In some embodiments, a natural phosphate linkage bonds to a 2′-OMe modified sugar. In some embodiments, a natural phosphate linkage bonds to a 2′-MOE modified sugar. In some embodiments, an oligonucleotide comprises a phosphorothioate internucleotidic linkage, a non-negatively charged internucleotidic linkage, and a natural phosphate linkage. In some embodiments, an oligonucleotide comprises a phosphorothioate internucleotidic linkage, a neutral internucleotidic linkage, and a natural phosphate linkage. In some embodiments, an oligonucleotide comprises a phosphorothioate internucleotidic linkage, a phosphoryl guanidine internucleotidic linkage, and a natural phosphate linkage. In some embodiments, an oligonucleotide comprises a phosphorothioate internucleotidic linkage, n001, and a natural phosphate linkage. In some embodiments, each chiral internucleotidic linkage is independently chirally controlled. In some embodiments, one or more chiral internucleotidic linkage is not chirally controlled. In some embodiments, each phosphorothioate internucleotidic linkage is independently chirally controlled. In some embodiments, each chiral internucleotidic linkage is independently chirally controlled. In some embodiments, a majority or each phosphorothioate internucleotidic linkage is Sp as described herein. In some embodiments, a majority or each non-negatively charged internucleotidic linkage, e.g., n001, is Rp. In some embodiments, a majority or each non-negatively charged internucleotidic linkage, e.g., n001, is Sp.

[0236] In some embodiments, an oligonucleotide comprises a phosphorothioate internucleotidic linkage and a non-negatively charged internucleotidic linkage. In some embodiments, an oligonucleotide comprises a phosphorothioate internucleotidic linkage and a neutral internucleotidic linkage. In some embodiments, an oligonucleotide comprises a phosphorothioate internucleotidic linkage and a phosphoryl guanidine internucleotidic linkage. In some embodiments, an oligonucleotide comprises a phosphorothioate internucleotidic linkage and n001. In some embodiments, each chiral internucleotidic linkage is independently chirally controlled. In some embodiments, one or more chiral internucleotidic linkage is not chirally controlled. In some embodiments, each phosphorothioate internucleotidic linkage is independently chirally controlled. In some embodiments, each chiral internucleotidic linkage is independently chirally controlled. In some embodiments, a majority or each phosphorothioate internucleotidic linkage is Sp as described herein. In some embodiments, one or more (e.g., 1, 2, 3, 4, or 5) phosphorothioate internucleotidic linkages are Rp. In some embodiments, a majority or each non-negatively charged internucleotidic linkage, e.g., n001, is Rp. In some embodiments, a majority or each non-negatively charged internucleotidic linkage, e.g., n001, is Sp. In some embodiments, an oligonucleotide comprises no natural phosphate linkages. In some embodiments, each internucleotidic linkage is independently a phosphorothioate or a non-negatively charged internucleotidic linkage. In some embodiments, each internucleotidic linkage is independently a phosphorothioate or a neutral charged internucleotidic linkage. In some embodiments, each internucleotidic linkage is independently a phosphorothioate or phosphoryl guanidine internucleotidic linkages. In some embodiments, each internucleotidic linkage is independently a phosphorothioate or n001 internucleotidic linkage. In some embodiments, the last internucleotidic linkage of an oligonucleotide is a non-negatively charged internucleotidic linkage, or is a neutral internucleotidic linkage, or is a phosphoryl guanidine internucleotidic linkage, or is n001.

[0237] In some embodiments, oligonucleotides of the present disclosure comprise one or more modified nucleobases. Various modifications can be introduced to a sugar and/or nucleobase in accordance with the present disclosure. For example, in some embodiments, a modification is a modification described in U.S. Pat. No. 9,006,198. In some embodiments, a modification is a modification described in U.S. Pat. Nos. 9,394,333, 9,744,183, 9,605,019, 9,982,257, US 20170037399, US 20180216108, US 20180216107, U.S. Pat. No. 9,598,458, WO 2017/062862, WO 2018/067973, WO 2017/160741, WO 2017/192679, WO 2017/210647, WO 2018/098264, WO 2018/022473, WO 2018/223056, WO 2018/223073, WO 2018/223081, WO 2018/237194, WO 2019/032607, WO 2019/032612, WO 2019/055951, WO 2019/075357, WO 2019/200185, WO 2019/217784, WO 2019/032612, WO 2020/191252, and/or WO 2021/071858, the sugars, bases, and internucleotidic linkages of each of which are independently incorporated herein by reference.

[0238] In some embodiments, a nucleobase in a nucleoside is or comprises Ring BA which has the structure of BA-I, BA-I-a, BA-I-b, BA-II, BA-II-a, BA-II-b, BA-III, BA-III-a, BA-III-b, BA-IV, BA-IV-a, BA-IV-b, BA-V, BA-V-a, BA-V-b, or BA-VI, or a tautomer of Ring BA, wherein the nucleobase is optionally substituted or protected.

[0239] In some embodiments, a sugar is a modified sugar comprising a 2′-modification, e.g., 2′-F, 2′-OR wherein R is optionally substituted aliphatic, or a bicyclic sugar (e.g., a LNA sugar), or a acyclic sugar (e.g., a UNA sugar).

[0240] In some embodiments, as described herein, provided oligonucleotides comprise one or more domains, each of which independently has certain lengths, modifications, linkage phosphorus stereochemistry, etc., as described herein. In some embodiments, the present disclosure provides an oligonucleotide comprising one or more modified sugars and/or one or more modified internucleotidic linkages, wherein the oligonucleotide comprises a first domain and a second domain each independently comprising one or more nucleobases. In some embodiments, the present disclosure provides oligonucleotide comprising one or more domains and/or subdomains as described herein. In some embodiments, the present disclosure provides oligonucleotides comprising a first domain as described herein. In some embodiments, the present disclosure provides oligonucleotides comprising a second domain as described herein. In some embodiments, the present disclosure provides oligonucleotides comprising a first subdomain as described herein. In some embodiments, the present disclosure provides oligonucleotides comprising a second subdomain as described herein. In some embodiments, the present disclosure provides oligonucleotides comprising a third subdomain as described herein. In some embodiments, the present disclosure provides oligonucleotides comprising one or more regions each independently selected from a first domain, a second domain, a first subdomain, a second subdomain and a third subdomain, each of which is independently as described herein. In some embodiments, the present disclosure provides an oligonucleotide comprising:
[0241] a first domain; and
[0242] a second domain,
   wherein:
[0243] the first domain comprises one or more 2′-F modifications;
[0244] the second domain comprises one or more sugars that do not have a 2′-F modification.

[0245] In some embodiments, an oligonucleotide or a portion thereof (e.g., a first domain, a second domain, a first subdomain, a second subdomain, a third subdomain, etc.) comprises a certain level of modified sugars. In some embodiments, a modified sugar comprises a 2′-modification. In some embodiments, a modified sugar is a bicyclic sugar. In some embodiments, a modified sugar is an acyclic sugar (e.g., by breaking a C2-C3 bond of a corresponding cyclic sugar). In some embodiments, a modified sugar comprises a 5′-modification. Typically, oligonucleotides of the present disclosure have a free 5′-OH at its 5′-end and a free 3′-OH at its 3′-end unless indicated otherwise, e.g., by context. In some embodiments, a 5′-end sugar of an oligonucleotide may comprise a modified 5′-OH.

[0246] In some embodiments, a level is about e.g., about 5%-100%, about 10%-100%, 20-100%, 30%-100%, 40%-100%, 50%-80%, 50%-85%, 50%-90%, 50%-95%, 60%-80%, 60%-85%, 60%-90%, 60%-95%, 60%-100%, 65%-80%, 65%-85%, 65%-90%, 65%-95%, 65%-100%, 70%-80%, 70%-85%, 70%-90%, 70%-95%, 70%-100%, 75%-80%, 75%-85%, 75%-90%, 75%-95%, 75%-100%, 80%-85%, 80%-90%, 80%-95%, 80%-100%, 85%-90%, 85%-95%, 85%-100%, 90%-95%, 90%-100%, 10%, 20%, 30%, 40%, 50%, 60%, 65%, 70%, 75%, 80%, 85%, 90%, 95%, or 100%, etc. of all sugars in an oligonucleotide or a portion thereof, respectively. In some embodiments, a percentage is at least about 50%. In some embodiments, a percentage is at least about 55%. In some embodiments, a percentage is at least about 60%. In some embodiments, a percentage is at least about 65%. In some embodiments, a percentage is at least about 70%. In some embodiments, a percentage is at least about 75%. In some embodiments, a percentage is at least about 80%. In some embodiments, a percentage is at least about 85%. In some embodiments, a percentage is at least about 90%. In some embodiments, a percentage is at least about 95%. In some embodiments, a percentage is about 100%.

[0247] In some embodiments, a majority is at least 50%, 60%, 65%, 70%, 75%, 80%, 85%, 90%, 95%, or more. In some embodiments, a majority is about 50%-100%, 50%-80%, 50%-85%, 50%-90%, 50%-95%, 60%-80%, 60%-85%, 60%-90%, 60%-95%, 60%-100%, 65%-80%, 65%-85%, 65%-90%, 65%-95%, 65%-100%, 70%-80%, 70%-85%, 70%-90%, 70%-95%, 70%-100%, 75%-80%, 75%-85%, 75%-90%, 75%-95%, 75%-100%, 80%-85%, 80%-90%, 80%-95%, 80%-100%, 85%-90%, 85%-95%, 85%-100%, 90%-95%, 90%-100%, 10%, 20%, 30%, 40%, 50%, 60%, 65%, 70%, 75%, 80%, 85%, 90%, 95%, or 100%. In some embodiments, a majority is about or at least about 50%. In some embodiments, a majority is about or at least about 55%. In some embodiments, a majority is about or at least about 60%. In some embodiments, a majority is about or at least about 65%. In some embodiments, a majority is about or at least about 70%. In some embodiments, a majority is about or at least about 75%. In some embodiments, a majority is about or at least about 80%. In some embodiments, a majority is about or at least about 85%. In some embodiments, a majority is about or at least about 90%. In some embodiments, a majority is about or at least about 95%.

[0248] In some embodiments, an oligonucleotide or a portion thereof (e.g., a first domain, a second domain, a first subdomain, a second subdomain, a third subdomain, etc.) comprises a certain level of modified internucleotidic linkages. In some embodiments, an oligonucleotide or a portion thereof (e.g., a first domain, a second domain, a first subdomain, a second subdomain, a third subdomain, etc.) comprises a certain level of chiral internucleotidic linkages. In some embodiments, a level is about e.g., about 5%-100%, about 10%-100%, 20-100%, 30%-100%, 40%-100%, 50%-80%, 50%-85%, 50%-90%, 50%-95%, 60%-80%, 60%-85%, 60%-90%, 60%-95%, 60%-100%, 65%-80%, 65%-85%, 65%-90%, 65%-95%, 65%-100%, 70%-80%, 70%-85%, 70%-90%, 70%-95%, 70%-100%, 75%-80%, 75%-85%, 75%-90%, 75%-95%, 75%-100%, 80%-85%, 80%-90%, 80%-95%, 80%-100%, 85%-90%, 85%-95%, 85%-100%, 90%-95%, 90%-100%, 10%, 20%, 30%, 40%, 50%, 60%, 65%, 70%, 75%, 80%, 85%, 90%, 95%, or 100%, etc. of all internucleotidic linkages in an oligonucleotide or a portion thereof, respectively. In some embodiments, a percentage is at least about 50%. In some embodiments, a percentage is at least about 55%. In some embodiments, a percentage is at least about 60%. In some embodiments, a percentage is at least about 65%. In some embodiments, a percentage is at least about 70%. In some embodiments, a percentage is at least about 75%. In some embodiments, a percentage is at least about 80%. In some embodiments, a percentage is at least about 85%. In some embodiments, a percentage is at least about 90%. In some embodiments, a percentage is at least about 95%. In some embodiments, a percentage is about 100%.

[0249] In some embodiments, an oligonucleotide or a portion thereof (e.g., a first domain, a second domain, a first subdomain, a second subdomain, a third subdomain, etc.) comprises a certain level of chirally controlled internucleotidic linkages. In some embodiments, an oligonucleotide or a portion thereof (e.g., a first domain, a second domain, a first subdomain, a second subdomain, a third subdomain, etc.) comprises a certain level of Sp internucleotidic linkages. In some embodiments, a level is about e.g., about 5%-100%, about 10%-100%, 20-100%, 30%-100%, 40%-100%, 50%-80%, 50%-85%, 50%-90%, 50%-95%, 60%-80%, 60%-85%, 60%-90%, 60%-95%, 60%-100%, 65%-80%, 65%-85%, 65%-90%, 65%-95%, 65%-100%, 70%-80%, 70%-85%, 70%-90%, 70%-95%, 70%-100%, 75%-80%, 75%-85%, 75%-90%, 75%-95%, 75%-100%, 80%-85%, 80%-90%, 80%-95%, 80%-100%, 85%-90%, 85%-95%, 85%-100%, 90%-95%, 90%-100%, 10%, 20%, 30%, 40%, 50%, 60%, 65%, 70%, 75%, 80%, 85%, 90%, 95%, or 100%, etc. of all internucleotidic linkages in an oligonucleotide or a portion thereof, respectively. In some embodiments, a level is about e.g., about 5%-100%, about 10%-100%, 20-100%, 30%-100%, 40%-100%, 50%-80%, 50%-85%, 50%-90%, 50%-95%, 60%-80%, 60%-85%, 60%-90%, 60%-95%, 60%-100%, 65%-80%, 65%-85%, 65%-90%, 65%-95%, 65%-100%, 70%-80%, 70%-85%, 70%-90%, 70%-95%, 70%-100%, 75%-80%, 75%-85%, 75%-90%, 75%-95%, 75%-100%, 80%-85%, 80%-90%, 80%-95%, 80%-100%, 85%-90%, 85%-95%, 85%-100%, 90%-95%, 90%-100%, 10%, 20%, 30%, 40%, 50%, 60%, 65%, 70%, 75%, 80%, 85%, 90%, 95%, or 100%, etc. of all chiral internucleotidic linkages in an oligonucleotide or a portion thereof, respectively. In some embodiments, a percentage is at least about 50%. In some embodiments, a percentage is at least about 55%. In some embodiments, a percentage is at least about 60%. In some embodiments, a percentage is at least about 65%. In some embodiments, a percentage is at least about 70%. In some embodiments, a percentage is at least about 75%. In some embodiments, a percentage is at least about 80%. In some embodiments, a percentage is at least about 85%. In some embodiments, a percentage is at least about 90%. In some embodiments, a percentage is at least about 95%. In some embodiments, a percentage is about 100%.

[0250] In some embodiments, an oligonucleotide or a portion thereof (e.g., a first domain, a second domain, a first subdomain, a second subdomain, a third subdomain, etc.) comprises a certain level of Sp internucleotidic linkages. In some embodiments, a level is about e.g., about 5%-100%, about 10%-100%, 20-100%, 30%-100%, 40%-100%, 50%-80%, 50%-85%, 50%-90%, 50%-95%, 60%-80%, 60%-85%, 60%-90%, 60%-95%, 60%-100%, 65%-80%, 65%-85%, 65%-90%, 65%-95%, 65%-100%, 70%-80%, 70%-85%, 70%-90%, 70%-95%, 70%-100%, 75%-80%, 75%-85%, 75%-90%, 75%-95%, 75%-100%, 80%-85%, 80%-90%, 80%-95%, 80%-100%, 85%-90%, 85%-95%, 85%-100%, 90%-95%, 90%-100%, 10%, 20%, 30%, 40%, 50%, 60%, 65%, 70%, 75%, 80%, 85%, 90%, 95%, or 100%, etc. of all internucleotidic linkages in an oligonucleotide or a portion thereof, respectively. In some embodiments, a level is about e.g., about 5%-100%, about 10%-100%, 20-100%, 30%-100%, 40%-100%, 50%-80%, 50%-85%, 50%-90%, 50%-95%, 60%-80%, 60%-85%, 60%-90%, 60%-95%, 60%-100%, 65%-80%, 65%-85%, 65%-90%, 65%-95%, 65%-100%, 70%-80%, 70%-85%, 70%-90%, 70%-95%, 70%-100%, 75%-80%, 75%-85%, 75%-90%, 75%-95%, 75%-100%, 80%-85%, 80%-90%, 80%-95%, 80%-100%, 85%-90%, 85%-95%, 85%-100%, 90%-95%, 90%-100%, 10%, 20%, 30%, 40%, 50%, 60%, 65%, 70%, 75%, 80%, 85%, 90%, 95%, or 100%, etc. of all chiral internucleotidic linkages in an oligonucleotide or a portion thereof, respectively. In some embodiments, a level is about e.g., about 5%-100%, about 10%-100%, 20-100%, 30%-100%, 40%-100%, 50%-80%, 50%-85%, 50%-90%, 50%-95%, 60%-80%, 60%-85%, 60%-90%, 60%-95%, 60%-100%, 65%-80%, 65%-85%, 65%-90%, 65%-95%, 65%-100%, 70%-80%, 70%-85%, 70%-90%, 70%-95%, 70%-100%, 75%-80%, 75%-85%, 75%-90%, 75%-95%, 75%-100%, 80%-85%, 80%-90%, 80%-95%, 80%-100%, 85%-90%, 85%-95%, 85%-100%, 90%-95%, 90%-100%, 10%, 20%, 30%, 40%, 50%, 60%, 65%, 70%, 75%, 80%, 85%, 90%, 95%, or 100%, etc. of all chirally controlled internucleotidic linkages in an oligonucleotide or a portion thereof, respectively. In some embodiments, a percentage is at least about 50%. In some embodiments, a percentage is at least about 55%. In some embodiments, a percentage is at least about 60%. In some embodiments, a percentage is at least about 65%. In some embodiments, a percentage is at least about 70%. In some embodiments, a percentage is at least about 75%. In some embodiments, a percentage is at least about 80%. In some embodiments, a percentage is at least about 85%. In some embodiments, a percentage is at least about 90%. In some embodiments, a percentage is at least about 95%. In some embodiments, a percentage is about 100%. In some embodiments, about 1-50, 1-40, 1-30, e.g., about 1, 2, 3, 4, 5, 6, 7, 8, 9, 10, 11, 12, 13, 14, 15, 16, 17, 18, 19, or 20 internucleotidic linkages are independently Sp chiral internucleotidic linkages. In many embodiments, it was observed that a high percentage (e.g., relative to Rp internucleotidic linkages and/or natural phosphate linkages) of Sp internucleotidic linkages in an oligonucleotide or certain portions thereof can provide improved properties and/or activities, e.g., high stability and/or high adenosine editing activity.

[0251] In some embodiments, an oligonucleotide or a portion thereof (e.g., a first domain, a second domain, a first subdomain, a second subdomain, a third subdomain, etc.) comprises a certain level of Rp internucleotidic linkages. In some embodiments, a level is about e.g., about 5%-100%, about 10%-100%, 20-100%, 30%-100%, 40%-100%, 50%-80%, 50%-85%, 50%-90%, 50%-95%, 60%-80%, 60%-85%, 60%-90%, 60%-95%, 60%-100%, 65%-80%, 65%-85%, 65%-90%, 65%-95%, 65%-100%, 70%-80%, 70%-85%, 70%-90%, 70%-95%, 70%-100%, 75%-80%, 75%-85%, 75%-90%, 75%-95%, 75%-100%, 80%-85%, 80%-90%, 80%-95%, 80%-100%, 85%-90%, 85%-95%, 85%-100%, 90%-95%, 90%-100%, 10%, 20%, 30%, 40%, 50%, 60%, 65%, 70%, 75%, 80%, 85%, 90%, 95%, or 100%, etc. of all internucleotidic linkages in an oligonucleotide or a portion thereof, respectively. In some embodiments, a level is about e.g., about 5%-100%, about 10%-100%, 20-100%, 30%-100%, 40%-100%, 50%-80%, 50%-85%, 50%-90%, 50%-95%, 60%-80%, 60%-85%, 60%-90%, 60%-95%, 60%-100%, 65%-80%, 65%-85%, 65%-90%, 65%-95%, 65%-100%, 70%-80%, 70%-85%, 70%-90%, 70%-95%, 70%-100%, 75%-80%, 75%-85%, 75%-90%, 75%-95%, 75%-100%, 80%-85%, 80%-90%, 80%-95%, 80%-100%, 85%-90%, 85%-95%, 85%-100%, 90%-95%, 90%-100%, 10%, 20%, 30%, 40%, 50%, 60%, 65%, 70%, 75%, 80%, 85%, 90%, 95%, or 100%, etc. of all chiral internucleotidic linkages in an oligonucleotide or a portion thereof, respectively. In some embodiments, a level is about e.g., about 5%-100%, about 10%-100%, 20-100%, 30%-100%, 40%-100%, 50%-80%, 50%-85%, 50%-90%, 50%-95%, 60%-80%, 60%-85%, 60%-90%, 60%-95%, 60%-100%, 65%-80%, 65%-85%, 65%-90%, 65%-95%, 65%-100%, 70%-80%, 70%-85%, 70%-90%, 70%-95%, 70%-100%, 75%-80%, 75%-85%, 75%-90%, 75%-95%, 75%-100%, 80%-85%, 80%-90%, 80%-95%, 80%-100%, 85%-90%, 85%-95%, 85%-100%, 90%-95%, 90%-100%, 10%, 20%, 30%, 40%, 50%, 60%, 65%, 70%, 75%, 80%, 85%, 90%, 95%, or 100%, etc. of all chirally controlled internucleotidic linkages in an oligonucleotide or a portion thereof, respectively. In some embodiments, a percentage is at least about 50%. In some embodiments, a percentage is at least about 55%. In some embodiments, a percentage is at least about 60%. In some embodiments, a percentage is at least about 65%. In some embodiments, a percentage is at least about 70%. In some embodiments, a percentage is at least about 75%. In some embodiments, a percentage is at least about 80%. In some embodiments, a percentage is at least about 85%. In some embodiments, a percentage is at least about 90%. In some embodiments, a percentage is at least about 95%. In some embodiments, a percentage is about 100%. In some embodiments, a percentage is about or no more than about 5%. In some embodiments, a percentage is about or no more than about 10%. In some embodiments, a percentage is about or no more than about 15%. In some embodiments, a percentage is about or no more than about 20%. In some embodiments, a percentage is about or no more than about 25%. In some embodiments, a percentage is about or no more than about 30%. In some embodiments, a percentage is about or no more than about 35%. In some embodiments, a percentage is about or no more than about 40%. In some embodiments, a percentage is about or no more than about 45%. In some embodiments, a percentage is about or no more than about 50%. In some embodiments, about 1-50, 1-40, 1-30, e.g., about 1, 2, 3, 4, 5, 6, 7, 8, 9, 10, 11, 12, 13, 14, 15, 16, 17, 18, 19, or 20 internucleotidic linkages are independently Rp chiral internucleotidic linkages. In some embodiments, the number is about or no more than about 1. In some embodiments, the number is about or no more than about 2. In some embodiments, the number is about or no more than about 3. In some embodiments, the number is about or no more than about 4. In some embodiments, the number is about or no more than about 5. In some embodiments, the number is about or no more than about 6. In some embodiments, the number is about or no more than about 7. In some embodiments, the number is about or no more than about 8. In some embodiments, the number is about or no more than about 9. In some embodiments, the number is about or no more than about 10.

[0252] While not wishing to be bound by theory, it is noted that in some instances Rp and Sp configurations of internucleotidic linkages may affect structural changes in helical conformations of double stranded complexes formed by oligonucleotides and target nucleic acids such as RNA, and ADAR proteins may recognize and interact various targets (e.g., double stranded complexes formed by oligonucleotides and target nucleic acids such as RNA) through multiple domains. In some embodiments, provided oligonucleotides and compositions thereof promote and/or enhance interaction profiles of oligonucleotide, target nucleic acids, and/or ADAR proteins to provide efficient adenosine modification by ADAR proteins through incorporation of various modifications and/or control of stereochemistry.

[0253] In some embodiments, an oligonucleotide can have or comprise abase sequence; internucleotidic linkage, base modification, sugar modification, additional chemical moiety, or pattern thereof; and/or any other structural element described herein, e.g., in Tables.

[0254] In some embodiments, a provided oligonucleotide or composition is characterized in that, when it is contacted with a target nucleic acid comprising a target adenosine in a system (e.g., an ADAR-mediated deamination system), modification of the target adenosine (e.g., deamination of the target A) is improved relative to that observed under reference conditions (e.g., selected from the group consisting of absence of the composition, presence of a reference oligonucleotide or composition, and combinations thereof). In some embodiments, modification, e.g., ADAR-mediated deamination (e.g., endogenous ADAR-mediated deamination) is increased 10%, 20%, 30%, 40%, 50%, 60%, 70%, 80%, 90%, 100%, or 2, 3, 4, 5, 6, 7, 8, 9, 10, 11, 12, 13, 14, 15, 16, 17, 18, 19, 20, 21, 22, 23, 24, 25, 26, 27, 28, 29, 30, 40, 50, 60, 70, 80, 90, 100, 200, 300, 400, 500, 600, 700, 800, 900, 1000 fold or more.

[0255] In some embodiments, oligonucleotides are provided as salt forms. In some embodiments, oligonucleotides are provided as salts comprising negatively-charged internucleotidic linkages (e.g., phosphorothioate internucleotidic linkages, natural phosphate linkages, etc.) existing as their salt forms. In some embodiments, oligonucleotides are provided as pharmaceutically acceptable salts. In some embodiments, oligonucleotides are provided as metal salts. In some embodiments, oligonucleotides are provided as sodium salts. In some embodiments, oligonucleotides are provided as ammonium salts. In some embodiments, oligonucleotides are provided as metal salts, e.g., sodium salts, wherein each negatively-charged internucleotidic linkage is independently in a salt form (e.g., for sodium salts, —O—P(O)(SNa)—O— for a phosphorothioate internucleotidic linkage, —O—P(O)(ONa)—O— for a natural phosphate linkage, etc.).

[0256] In some embodiments, oligonucleotides are chiral controlled, comprising one or more chirally controlled internucleotidic linkages. In some embodiments, provided oligonucleotides are stereochemically pure. In some embodiments, provided oligonucleotides or compositions thereof are substantially pure of other stereoisomers. In some embodiments, the present disclosure provides chirally controlled oligonucleotide compositions.

[0257] As described herein, oligonucleotides of the present disclosure can be provided in high purity (e.g., 50%-100%). In some embodiments, oligonucleotides of the present disclosure are of high stereochemical purity (e.g., 50%-100%). In some embodiments, oligonucleotides in provided compositions are of high stereochemical purity (e.g., high percentage (e.g., 50%-100%) of a stereoisomer compared to the other stereoisomers of the same oligonucleotide). In some embodiments, a percentage is at least or about 50%. In some embodiments, a percentage is at least or about 60%. In some embodiments, a percentage is at least or about 70%. In some embodiments, a percentage is at least or about 75%. In some embodiments, a percentage is at least or about 80%. In some embodiments, a percentage is at least or about 85%. In some embodiments, a percentage is at least or about 90%. In some embodiments, a percentage is at least or about 95%.

### First Domains

[0258] As described herein, in some embodiment, an oligonucleotide comprises a first domain and a second domain. In some embodiments, an oligonucleotide consists of a first domain and a second domain. Certain embodiments are described below as examples.

[0259] In some embodiments, a first domain has a length of about 2-50 (e.g., about 5, 6, 7, 8, 9, or 10-about 10, 11, 12, 13, 14, 15, 16, 17, 18, 19, 20, 21, 22, 23, 24, 25, 30, 40 or 50, or about 5, 6, 7, 8, 9, 10, 11, 12, 13, 14, 15, 16, 17, 18, 19, 20, 21, 22, 23, 24, 25, 30, 40 or 50, etc.) nucleobases. In some embodiments, a first domain has a length of about 5-30 nucleobases. In some embodiments, a first domain has a length of about 10-30 nucleobases. In some embodiments, a first domain has a length of about 10-20 nucleobases. In some embodiments, a first domain has a length of about 13-16 nucleobases. In some embodiments, a first domain has a length of 10 nucleobases. In some embodiments, a first domain has a length of 11 nucleobases. In some embodiments, a first domain has a length of 12 nucleobases. In some embodiments, a first domain has a length of 13 nucleobases. In some embodiments, a first domain has a length of 14 nucleobases. In some embodiments, a first domain has a length of 15 nucleobases. In some embodiments, a first domain has a length of 16 nucleobases. In some embodiments, a first domain has a length of 17 nucleobases. In some embodiments, a first domain has a length of 18 nucleobases. In some embodiments, a first domain has a length of 19 nucleobases. In some embodiments, a first domain has a length of 20 nucleobases.

[0260] In some embodiments, a first domain is about, or at least about, 5-95%, 10%-90%, 20%-80%, 30%-70%, 40%-70%, 40%-60%, 5%, 10%, 15%, 20%, 25%, 30%, 35%, 40%, 45%, 50%, 55%, 60%, 65%, 70%, 75%, 80%, 85%, 90%, 95% of an oligonucleotide. In some embodiments, a percentage is about 30%-80%. In some embodiments, a percentage is about 30%-70%. In some embodiments, a percentage is about 40%-60%. In some embodiments, a percentage is about 20%. In some embodiments, a percentage is about 25%. In some embodiments, a percentage is about 30%. In some embodiments, a percentage is about 35%. In some embodiments, a percentage is about 40%. In some embodiments, a percentage is about 45%. In some embodiments, a percentage is about 50%. In some embodiments, a percentage is about 55%. In some embodiments, a percentage is about 60%. In some embodiments, a percentage is about 65%. In some embodiments, a percentage is about 70%. In some embodiments, a percentage is about 75%. In some embodiments, a percentage is about 80%. In some embodiments, a percentage is about 85%. In some embodiments, a percentage is about 90%.

[0261] In some embodiments, one or more (e.g., 1-20, 1, 2, 3, 4, 5, 6, 7, 8, 9, or 10, etc.) mismatches exist in a first domain when an oligonucleotide is aligned with a target nucleic acid for complementarity. In some embodiments, there is 1 mismatch. In some embodiments, there are 2 mismatches. In some embodiments, there are 3 mismatches. In some embodiments, there are 4 mismatches. In some embodiments, there are 5 mismatches. In some embodiments, there are 6 mismatches. In some embodiments, there are 7 mismatches. In some embodiments, there are 8 mismatches. In some embodiments, there are 9 mismatches. In some embodiments, there are 10 mismatches.

[0262] In some embodiments, one or more (e.g., 1-20, 1, 2, 3, 4, 5, 6, 7, 8, 9, or 10, etc.) wobbles exist in a first domain when an oligonucleotide is aligned with a target nucleic acid for complementarity. In some embodiments, there is 1 wobble. In some embodiments, there are 2 wobbles. In some embodiments, there are 3 wobbles. In some embodiments, there are 4 wobbles. In some embodiments, there are 5 wobbles. In some embodiments, there are 6 wobbles. In some embodiments, there are 7 wobbles. In some embodiments, there are 8 wobbles. In some embodiments, there are 9 wobbles. In some embodiments, there are 10 wobbles.

[0263] In some embodiments, duplexes of oligonucleotides and target nucleic acids in a first domain region comprise one or more bulges each of which independently comprise one or more mismatches that are not wobbles. In some embodiments, there are 0-10 (e.g., 0-1, 0-2, 0-3, 0-4, 0-5, 0-6, 0-7, 0-8, 0-9, 0-10, 1-2, 1-3, 1-4, 1-5, 1-6, 1-7, 1-8, 1-9, 1-10, 2-3, 2-4, 2-5, 2-6, 2-7, 2-8, 2-9, 2-10, 3-4, 3-5, 3-6, 3-7, 3-8, 3-9, 3-10, 0, 1, 2, 3, 4, 5, 6, 7, 8, 9, or 10, etc.) bulges. In some embodiments, the number is 0. In some embodiments, the number is 1. In some embodiments, the number is 2. In some embodiments, the number is 3. In some embodiments, the number is 4. In some embodiments, the number is 5.

[0264] In some embodiments, a first domain is fully complementary to a target nucleic acid.

[0265] In some embodiments, a first domain comprises one or more modified nucleobases.

[0266] In some embodiments, a second domain comprises one or more sugars comprising two 2′-H (e.g., natural DNA sugars). In some embodiments, a second domain comprises one or more sugars comprising 2′-OH (e.g., natural RNA sugars). In some embodiments, a first domain comprises one or more modified sugars. In some embodiments, a modified sugar comprises a 2′-modification. In some embodiments, a modified sugar is a bicyclic sugar, e.g., a LNA sugar. In some embodiments, a modified sugar is an acyclic sugar (e.g., by breaking a C2-C3 bond of a corresponding cyclic sugar).

[0267] In some embodiments, a first domain comprises about 1-50 (e.g., about 5, 6, 7, 8, 9, or 10-about 10, 11, 12, 13, 14, 15, 16, 17, 18, 19, 20, 21, 22, 23, 24, 25, 30, 40 or 50, or about 5, 6, 7, 8, 9, 10, 11, 12, 13, 14, 15, 16, 17, 18, 19, 20, 21, 22, 23, 24, 25, 30, 40 or 50, etc., about 1, 2, 3, 4, 5, 6, 7, 8, 9, 10, 11, 12, 13, 14, 15, 16, 17, 18, 19, or 20, etc.) modified sugars. In some embodiments, a first domain comprises about 1-50 (e.g., about 5, 6, 7, 8, 9, or 10-about 10, 11, 12, 13, 14, 15, 16, 17, 18, 19, 20, 21, 22, 23, 24, 25, 30, 40 or 50, or about 5, 6, 7, 8, 9, 10, 11, 12, 13, 14, 15, 16, 17, 18, 19, 20, 21, 22, 23, 24, 25, 30, 40 or 50, etc., about 1, 2, 3, 4, 5, 6, 7, 8, 9, 10, 11, 12, 13, 14, 15, 16, 17, 18, 19, or 20, etc.) modified sugars with 2′-F modification. In some embodiments, a first domain comprises about 2-50 (e.g., about 2, 3, 4, 5, 6, 7, 8, 9, or 10-about 10, 11, 12, 13, 14, 15, 16, 17, 18, 19, 20, 21, 22, 23, 24, 25, 30, 40 or 50, or about 5, 6, 7, 8, 9, 10, 11, 12, 13, 14, 15, 16, 17, 18, 19, 20, 21, 22, 23, 24, 25, 30, 40 or 50, etc., 2-40, 2-30, 2-25, 2-20, 2-15, 2-10, 3-40, 3-30, 3-25, 3-20, 3-15, 3-10, 4-40, 4-30, 4-25, 4-20, 4-15, 4-10, 5-40, 5-30, 5-25, 5-20, 5-15, 5-10, 6-40, 6-30, 6-25, 6-20, 6-15, 6-10, 7-40, 7-30, 7-25, 7-20, 7-15, 7-10, 8-40, 8-30, 8-25, 8-20, 8-15, 8-10, 9-40, 9-30, 9-25, 9-20, 9-15, 9-10, 10-40, 10-30, 10-25, 10-20, 10-15, about 2, 3, 4, 5, 6, 7, 8, 9, 10, 11, 12, 13, 14, 15, 16, 17, 18, 19, or 20, etc.) consecutive modified sugars with 2′-F modification. In some embodiments, a first domain comprises 2 consecutive 2′-F modified sugars. In some embodiments, a first domain comprises 3 consecutive 2′-F modified sugars. In some embodiments, a first domain comprises 4 consecutive 2′-F modified sugars. In some embodiments, a first domain comprises 5 consecutive 2′-F modified sugars. In some embodiments, a first domain comprises 6 consecutive 2′-F modified sugars. In some embodiments, a first domain comprises 7 consecutive 2′-F modified sugars. In some embodiments, a first domain comprises 8 consecutive 2′-F modified sugars. In some embodiments, a first domain comprises 9 consecutive 2′-F modified sugars. In some embodiments, a first domain comprises 10 consecutive 2′-F modified sugars. In some embodiments, a first domain comprises two or more 2′-F modified sugar blocks, wherein each sugar in a 2′-F modified sugar block is independently a 2′-F modified sugar. In some embodiments, each 2′-F modified sugar block independently comprises or consists of 2, 3, 4, 5, 6, 7, 8, 9, or 10 consecutive 2′-F modified sugars as described herein. In some embodiments, two consecutive 2′-F modified sugar blocks are independently separated by a separating block which separating block comprises one or more sugars that are independently not 2′-F modified sugars. In some embodiments, each sugar in a separating block is independently not 2′-F modified. In some embodiments, two or more (e.g., 2, 3, 4, 5, 6, 7, 8, 9, or 10 or more) or all sugars in a separating block are independently not 2′-F modified. In some embodiments, a separating block comprises one or more bicyclic sugars (e.g., LNA sugar, cEt sugar, etc.) and/or one or more 2′-OR modified sugars, wherein R is optionally substituted C₁₋₆ aliphatic (e.g., 2′-OMe, 2′-MOE, etc.). In some embodiments, a separating block comprises one or more 2′-OR modified sugars, wherein R is optionally substituted C₁₋₆ aliphatic (e.g., 2′-OMe, 2′-MOE, etc.). In some embodiments, two or more non-2′-F modified sugars are consecutive. In some embodiments, two or more 2′-OR modified sugars wherein R is optionally substituted C₁₋₆ aliphatic (e.g., 2′-OMe, 2′-MOE, etc.) are consecutive. In some embodiments, a separating block comprises two or more (e.g., 2, 3, 4, 5, 6, 7, 8, 9, or 10 or more) 2′-OR modified sugars wherein R is optionally substituted C₁₋₆ aliphatic (e.g., 2′-OMe, 2′-MOE, etc.). In some embodiments, a separating block comprises two or more (e.g., 2, 3, 4, 5, 6, 7, 8, 9, or 10 or more) consecutive 2′-OR modified sugars wherein R is optionally substituted C₁₋₆ aliphatic (e.g., 2′-OMe, 2′-MOE, etc.). In some embodiments, each 2′-OR modified sugar is independently a 2′-OMe or 2′-MOE sugar. In some embodiments, each 2′-OR modified sugar is independently a 2′-OMe sugar. In some embodiments, each 2′-OR modified sugar is independently a 2′-MOE sugar. In some embodiments, a separating block comprises one or more 2′-F modified sugars. In some embodiments, none of 2′-F modified sugars in a separating block are next to each other. In some embodiments, a separating block contain no 2′-F modified sugars. In some embodiments, each sugar in a separating block is independently a 2′-OR modified sugar wherein R is optionally substituted C₁₋₆ aliphatic or a bicyclic sugar. In some embodiments, each sugar in each separating block is independently a 2′-OR modified sugar wherein R is optionally substituted C₁₋₆ aliphatic or a bicyclic sugar. In some embodiments, each sugar in a separating block is independently a 2′-OR modified sugar wherein R is optionally substituted C₁₋₆ aliphatic. In some embodiments, each sugar in each separating block is independently a 2′-OR modified sugar wherein R is optionally substituted C₁₋₆ aliphatic. In some embodiments, each sugar in a separating block is independently a 2′-OMe or 2′-MOE modified sugar. In some embodiments, each sugar in each separating block is independently a 2′-OMe or 2′-MOE modified sugar. In some embodiments, each sugar in a separating block is independently a 2′-OMe modified sugar. In some embodiments, each sugar in a separating block is independently a 2′-MOE modified sugar. In some embodiments, a separating block comprises a 2′-OMe sugar and 2′-MOE modified sugar. In some embodiments, each 2′-F block and each separating block independently contains 1, 2, 3, 4, or 5 nucleosides. In some embodiments, each 2′-F block and each separating block independently contains 1, 2, or 3 nucleosides.

[0268] In some embodiments, about 5%-100%, (e.g., about 10%-100%, 20-100%, 30%-100%, 40%-100%, 50%-80%, 50%-85%, 50%-90%, 50%-95%, 60%-80%, 60%-85%, 60%-90%, 60%-95%, 60%-100%, 65%-80%, 65%-85%, 65%-90%, 65%-95%, 65%-100%, 70%-80%, 70%-85%, 70%-90%, 70%-95%, 70%-100%, 75%-80%, 75%-85%, 75%-90%, 75%-95%, 75%-100%, 80%-85%, 80%-90%, 80%-95%, 80%-100%, 85%-90%, 85%-95%, 85%-100%, 90%-95%, 90%-100%, 10%, 20%, 30%, 40%, 50%, 60%, 65%, 70%, 75%, 80%, 85%, 90%, 95%, or 100%, etc.) of all sugars in a first domain are independently a modified sugar. In some embodiments, about 5%-100% (e.g., about 10%-100%, 20-100%, 30%-100%, 40%-100%, 50%-80%, 50%-85%, 50%-90%, 50%-95%, 60%-80%, 60%-85%, 60%-90%, 60%-95%, 60%-100%, 65%-80%, 65%-85%, 65%-90%, 65%-95%, 65%-100%, 70%-80%, 70%-85%, 70%-90%, 70%-95%, 70%-100%, 75%-80%, 75%-85%, 75%-90%, 75%-95%, 75%-100%, 80%-85%, 80%-90%, 80%-95%, 80%-100%, 85%-90%, 85%-95%, 85%-100%, 90%-95%, 90%-100%, 10%, 20%, 30%, 40%, 50%, 60%, 65%, 70%, 75%, 80%, 85%, 90%, 95%, or 100%, etc.) of all sugars in a first domain are independently a 2′-F modified sugar. In some embodiments, a percentage is at least about 40%. In some embodiments, a percentage is at least about 50%. In some embodiments, a percentage is at least about 55%. In some embodiments, a percentage is at least about 60%. In some embodiments, a percentage is at least about 65%. In some embodiments, a percentage is at least about 70%. In some embodiments, a percentage is at least about 75%. In some embodiments, a percentage is at least about 80%. In some embodiments, a percentage is at least about 85%. In some embodiments, a percentage is at least about 90%. In some embodiments, a percentage is at least about 95%. In some embodiments, a percentage is about 100%. In some embodiments, a percentage is about or no more than about 60%. In some embodiments, a percentage is about or no more than about 70%. In some embodiments, a percentage is about or no more than about 80%. In some embodiments, a percentage is about or no more than about 90%.

[0269] In some embodiments, a first domain comprises no bicyclic sugars or 2′-OR modified sugars wherein R is not —H. In some embodiments, a first domain comprises one or more (e.g., 1, 2, 3, 4, 5, 6, 7, 8, 9, or 10) bicyclic sugars and/or 2′-OR modified sugars wherein R is not —H. In some embodiments, a first domain comprises one or more (e.g., 1, 2, 3, 4, 5, 6, 7, 8, 9, or 10) 2′-OR modified sugars wherein R is not —H. In some embodiments, a first domain comprises one or more (e.g., 1, 2, 3, 4, 5, 6, 7, 8, 9, or 10) 2′-OR modified sugars wherein R is optionally substituted C₁₋₁₀ aliphatic. In some embodiments, levels of bicyclic sugars and/or 2′-OR modified sugars wherein R is not —H, individually or combined, are relatively low compared to level of 2′-F modified sugars. In some embodiments, levels of bicyclic sugars and/or 2′-OR modified sugars wherein R is not —H, individually or combined, are about 10%-80% (e.g., about 10%-75%, 10-70%, 10%-65%, 10%-60%, 10%-50%, about 20%-60%, about 30%-60%, about 20%-50%, about 30%-50%, about 5%, 10%, 15%, 20%, 25%, 30%, 35%, 40%, 45%, 50%, 55%, or 60%, etc.). In some embodiments, levels of 2′-OR modified sugars wherein R is not —H combined (e.g., 2′-OMe and 2′-MOE modified sugars combined, if any) are about 10-70% (e.g., about 10%-60%, 10%-50%, about 20%-60%, about 30%-60%, about 20%-50%, about 30-50%, about 5%, 10%, 15%, 20%, 25%, 30%, 35%, 40%, 45%, 50%, 55%, or 60%, etc.). In some embodiments, no more than about 1%-95% (e.g., no more than about 1%, 5%, 10%, 15%, 20%, 25%, 30%, 35%, 40%, 45%, 50%, 55%, 60%, 65%, 70%, 75%, 80%, 85%, 90%, 95%, etc.) of sugars in a first domain comprises 2′-OMe. In some embodiments, no more than about 50% of sugars in a first domain comprises 2′-OMe. In some embodiments, no more than about 1%-95% (e.g., no more than about 1%, 5%, 10%, 15%, 20%, 25%, 30%, 35%, 40%, 45%, 50%, 55%, 60%, 65%, 70%, 75%, 80%, 85%, 90%, 95%, etc.) of sugars in a first domain comprises 2′-OR, wherein R is optionally substituted C₁₋₆ aliphatic. In some embodiments, no more than about 50% of sugars in a first domain comprises 2′-OR, wherein R is optionally substituted C₁₋₆ aliphatic. In some embodiments, no more than about 40% of sugars in a first domain comprises 2′-OR, wherein R is optionally substituted C₁₋₆ aliphatic. In some embodiments, no more than about 30% of sugars in a first domain comprises 2′-OR, wherein R is optionally substituted C₁₋₆ aliphatic. In some embodiments, no more than about 25% of sugars in a first domain comprises 2′-OR, wherein R is optionally substituted C₁₋₆ aliphatic. In some embodiments, no more than about 20% of sugars in a first domain comprises 2′-OR, wherein R is optionally substituted C₁₋₆ aliphatic. In some embodiments, no more than about 10% of sugars in a first domain comprises 2′-OR, wherein R is optionally substituted C₁₋₆ aliphatic. In some embodiments, as described herein, 2′-OR is 2′-MOE. In some embodiments, as described herein, 2′-OR is 2′-MOE or 2′-OMe. In some embodiments, a first domain comprises one or more (e.g., about 1-20, 1, 2, 3, 4, 5, 6, 7, 8, 9, 10, 11, 12, 13, 14, 15, 16, 17, 18, 19, 20, etc.) modified sugars comprising a 2′-N(R)₂ modification. In some embodiments, a first domain comprises one or more (e.g., about 1-20, 1, 2, 3, 4, 5, 6, 7, 8, 9, 10, 11, 12, 13, 14, 15, 16, 17, 18, 19, 20, etc.) modified sugars comprising a 2′-NH₂ modification. In some embodiments, a first domain comprises one or more (e.g., about 1-20, 1, 2, 3, 4, 5, 6, 7, 8, 9, 10, 11, 12, 13, 14, 15, 16, 17, 18, 19, 20, etc.) bicyclic sugars, e.g., LNA sugars. In some embodiments, a first domain comprises one or more (e.g., about 1-20, 1, 2, 3, 4, 5, 6, 7, 8, 9, 10, 11, 12, 13, 14, 15, 16, 17, 18, 19, 20, etc.) acyclic sugars (e.g., UNA sugars). In some embodiments, a number of 5′-end sugars in a first domain are independently 2′-OR modified sugars, wherein R is not —H. In some embodiments, a number of (e.g., 1, 2, 3, 4, 5, 6, 7, 8, 9, 10 or more) 5′-end sugars in a first domain are independently 2′-OR modified sugars, wherein R is independently optionally substituted C₁₋₆ aliphatic. In some embodiments, the first about 1-10, e.g., 1, 2, 3, 4, 5, 6, 7, 8, 9, or 10, sugars from the 5′-end of a first domain are independently 2′-OR modified sugars, wherein R is independently optionally substituted C₁₋₆ aliphatic. In some embodiments, the first one is 2′-OR modified. In some embodiments, the first two are independently 2′-OR modified. In some embodiments, the first three are independently 2′-OR modified. In some embodiments, the first four are independently 2′-OR modified. In some embodiments, the first five are independently 2′-OR modified. In some embodiments, all 2′-OR modification in a domain (e.g., a first domain), a subdomain (e.g., a first subdomain), or an oligonucleotide are the same. In some embodiments, 2′-OR is 2′-MOE. In some embodiments, 2′-OR is 2′-OMe.

[0270] In some embodiments, no sugar in a first domain comprises 2′-OR. In some embodiments, no sugar in a first domain comprises 2′-OMe. In some embodiments, no sugar in a first domain comprises 2′-MOE. In some embodiments, no sugar in a first domain comprises 2′-MOE or 2′-OMe. In some embodiments, no sugar in a first domain comprises 2′-OR, wherein R is optionally substituted C₁₋₆ aliphatic. In some embodiments, each sugar in a first domain comprises 2′-F.

[0271] In some embodiments, about 40-70% (e.g., about 40%-70%, 40%-60%, 50%-70%, 50%-60%, etc., or about 40%, 45%, 50%, 55%, 60%, 65%, 70%, etc.) of sugars in a first domain are 2′-F modified, and about 10%-60% (e.g., about 10%-50%, 20%-60%, 30%-60%, 30%-50%, 40%-50%, etc., or about 10%, 15%, 20%, 25%, 30%, 35%, 40%, 45%, 50%, 55%, or 60%) of sugars in a first domain are independently 2′-OR modified wherein R is not —H or bicyclic sugars (e.g., LNA sugars, cEt sugars, etc.). In some embodiments, about 20%-60% of sugars in a first domain are 2′-F modified. In some embodiments, about 25%-60% of sugars in a first domain are 2′-F modified. In some embodiments, about 30%-60% of sugars in a first domain are 2′-F modified. In some embodiments, about 35%-60% of sugars in a first domain are 2′-F modified. In some embodiments, about 40%-60% of sugars in a first domain are 2′-F modified. In some embodiments, about 50%-60% of sugars in a first domain are 2′-F modified. In some embodiments, about 50%-70% of sugars in a first domain are 2′-F modified. In some embodiments, about 20%-60% of sugars in a first domain are independently 2′-OR modified wherein R is not —H or bicyclic sugars. In some embodiments, about 30%-60% of sugars in a first domain are independently 2′-OR modified wherein R is not —H or bicyclic sugars. In some embodiments, about 40%-60% of sugars in a first domain are independently 2′-OR modified wherein R is not —H or bicyclic sugars. In some embodiments, about 30%-50% of sugars in a first domain are independently 2′-OR modified wherein R is not —H or bicyclic sugars. In some embodiments, about 40%-50% of sugars in a first domain are independently 2′-OR modified wherein R is not —H or bicyclic sugars. In some embodiments, each of the sugars in a first domain that are independently 2′-OR modified wherein R is not —H or bicyclic sugars is independently a 2′-OR modified sugar wherein R is not —H. In some embodiments, each of them is independently a 2′-OR modified sugar wherein R is C₁₋₆ aliphatic. In some embodiments, each of them is independently a 2′-OR modified sugar wherein R is C₁₋₆ alky. In some embodiments, each of them is independently a 2′-OMe or 2′-MOE modified sugar.

[0272] In some embodiments, a first domain comprise about 1-50 (e.g., about 5, 6, 7, 8, 9, or 10-about 10, 11, 12, 13, 14, 15, 16, 17, 18, 19, 20, 21, 22, 23, 24, 25, 30, 40 or 50, or about 5, 6, 7, 8, 9, 10, 11, 12, 13, 14, 15, 16, 17, 18, 19, 20, 21, 22, 23, 24, 25, 30, 40 or 50, etc., about 1, 2, 3, 4, 5, 6, 7, 8, 9, 10, 11, 12, 13, 14, 15, 16, 17, 18, 19, or 20, etc.) modified internucleotidic linkages. In some embodiments, about 5%-100% (e.g., about 10%-100%, 20-100%, 30%-100%, 40%-100%, 50%-80%, 50%-85%, 50%-90%, 50%-95%, 60%-80%, 60%-85%, 60%-90%, 60%-95%, 60%-100%, 65%-80%, 65%-85%, 65%-90%, 65%-95%, 65%-100%, 70%-80%, 70%-85%, 70%-90%, 70%-95%, 70%-100%, 75%-80%, 75%-85%, 75%-90%, 75%-95%, 75%-100%, 80%-85%, 80%-90%, 80%-95%, 80%-100%, 85%-90%, 85%-95%, 85%-100%, 90%-95%, 90%-100%, 10%, 20%, 30%, 40%, 50%, 60%, 65%, 70%, 75%, 80%, 85%, 90%, 95%, or 100%, etc.) of internucleotidic linkages in a first domain are modified internucleotidic linkages. In some embodiments, each internucleotidic linkage in a first domain is independently a modified internucleotidic linkage. In some embodiments, each modified internucleotidic linkages is independently a chiral internucleotidic linkage. In some embodiments, a modified or chiral internucleotidic linkage is a phosphorothioate internucleotidic linkage. In some embodiments, a modified or chiral internucleotidic linkage is a non-negatively charged internucleotidic linkage. In some embodiments, a modified or chiral internucleotidic linkage is a neutral internucleotidic linkage, e.g., n001. In some embodiments, each modified internucleotidic linkages is independently a phosphorothioate internucleotidic linkage or a non-negatively charged internucleotidic linkage. In some embodiments, each modified internucleotidic linkages is independently a phosphorothioate internucleotidic linkage or a neutral internucleotidic linkage. In some embodiments, each modified internucleotidic linkages is independently a phosphorothioate internucleotidic linkage. In some embodiments, at least about 1-50 (e.g., about 5, 6, 7, 8, 9, or 10-about 10, 11, 12, 13, 14, 15, 16, 17, 18, 19, 20, 21, 22, 23, 24, 25, 30, 40 or 50, or about 5, 6, 7, 8, 9, 10, 11, 12, 13, 14, 15, 16, 17, 18, 19, 20, 21, 22, 23, 24, 25, 30, 40 or 50, etc., about 1, 2, 3, 4, 5, 6, 7, 8, 9, 10, 11, 12, 13, 14, 15, 16, 17, 18, 19, or 20, etc.) chiral internucleotidic linkages in a first domain is chirally controlled. In some embodiments, at least 5%-100% (e.g., about 10%-100%, 20-100%, 30%-100%, 40%-100%, 50%-80%, 50%-85%, 50%-90%, 50%-95%, 60%-80%, 60%-85%, 60%-90%, 60%-95%, 60%-100%, 65%-80%, 65%-85%, 65%-90%, 65%-95%, 65%-100%, 70%-80%, 70%-85%, 70%-90%, 70%-95%, 70%-100%, 75%-80%, 75%-85%, 75%-90%, 75%-95%, 75%-100%, 80%-85%, 80%-90%, 80%-95%, 80%-100%, 85%-90%, 85%-95%, 85%-100%, 90%-95%, 90%-100%, 10%, 20%, 30%, 40%, 50%, 60%, 65%, 70%, 75%, 80%, 85%, 90%, 95%, or 100%, etc.) of chiral internucleotidic linkages in a first domain is chirally controlled. In some embodiments, at least 5%-100% (e.g., about 10%-100%, 20-100%, 30%-100%, 40%-100%, 50%-80%, 50%-85%, 50%-90%, 50%-95%, 60%-80%, 60%-85%, 60%-90%, 60%-95%, 60%-100%, 65%-80%, 65%-85%, 65%-90%, 65%-95%, 65%-100%, 70%-80%, 70%-85%, 70%-90%, 70%-95%, 70%-100%, 75%-80%, 75%-85%, 75%-90%, 75%-95%, 75%-100%, 80%-85%, 80%-90%, 80%-95%, 80%-100%, 85%-90%, 85%-95%, 85%-100%, 90%-95%, 90%-100%, 10%, 20%, 30%, 40%, 50%, 60%, 65%, 70%, 75%, 80%, 85%, 90%, 95%, or 100%, etc.) of phosphorothioate internucleotidic linkages in a first domain is chirally controlled. In some embodiments, each is independently chirally controlled. In some embodiments, at least about 1-50 (e.g., about 5, 6, 7, 8, 9, or 10-about 10, 11, 12, 13, 14, 15, 16, 17, 18, 19, 20, 21, 22, 23, 24, 25, 30, 40 or 50, or about 5, 6, 7, 8, 9, 10, 11, 12, 13, 14, 15, 16, 17, 18, 19, 20, 21, 22, 23, 24, 25, 30, 40 or 50, etc., about 1, 2, 3, 4, 5, 6, 7, 8, 9, 10, 11, 12, 13, 14, 15, 16, 17, 18, 19, or 20, etc.) chiral internucleotidic linkages in a first domain is Sp. In some embodiments, at least about 1-50 (e.g., about 5, 6, 7, 8, 9, or 10-about 10, 11, 12, 13, 14, 15, 16, 17, 18, 19, 20, 21, 22, 23, 24, 25, 30, 40 or 50, or about 5, 6, 7, 8, 9, 10, 11, 12, 13, 14, 15, 16, 17, 18, 19, 20, 21, 22, 23, 24, 25, 30, 40 or 50, etc., about 1, 2, 3, 4, 5, 6, 7, 8, 9, 10, 11, 12, 13, 14, 15, 16, 17, 18, 19, or 20, etc.) phosphorothioate internucleotidic linkages in a first domain is Sp. In some embodiments, at least 5%-100% (e.g., about 10%-100%, 20-100%, 30%-100%, 40%-100%, 50%-80%, 50%-85%, 50%-90%, 50%-95%, 60%-80%, 60%-85%, 60%-90%, 60%-95%, 60%-100%, 65%-80%, 65%-85%, 65%-90%, 65%-95%, 65%-100%, 70%-80%, 70%-85%, 70%-90%, 70%-95%, 70%-100%, 75%-80%, 75%-85%, 75%-90%, 75%-95%, 75%-100%, 80%-85%, 80%-90%, 80%-95%, 80%-100%, 85%-90%, 85%-95%, 85%-100%, 90%-95%, 90%-100%, 10%, 20%, 30%, 40%, 50%, 60%, 65%, 70%, 75%, 80%, 85%, 90%, 95%, or 100%, etc.) of chiral internucleotidic linkages in a first domain is Sp. In some embodiments, at least 5%-100% (e.g., about 10%-100%, 20-100%, 30%-100%, 40%-100%, 50%-80%, 50%-85%, 50%-90%, 50%-95%, 60%-80%, 60%-85%, 60%-90%, 60%-95%, 60%-100%, 65%-80%, 65%-85%, 65%-90%, 65%-95%, 65%-100%, 70%-80%, 70%-85%, 70%-90%, 70%-95%, 70%-100%, 75%-80%, 75%-85%, 75%-90%, 75%-95%, 75%-100%, 80%-85%, 80%-90%, 80%-95%, 80%-100%, 85%-90%, 85%-95%, 85%-100%, 90%-95%, 90%-100%, 10%, 20%, 30%, 40%, 50%, 60%, 65%, 70%, 75%, 80%, 85%, 90%, 95%, or 100%, etc.) of phosphorothioate internucleotidic linkages in a first domain is Sp. In some embodiments, the number is one or more. In some embodiments, the number is 2 or more. In some embodiments, the number is 3 or more. In some embodiments, the number is 4 or more. In some embodiments, the number is 5 or more. In some embodiments, the number is 6 or more. In some embodiments, the number is 7 or more. In some embodiments, the number is 8 or more. In some embodiments, the number is 9 or more. In some embodiments, the number is 10 or more. In some embodiments, the number is 11 or more. In some embodiments, the number is 12 or more. In some embodiments, the number is 13 or more. In some embodiments, the number is 14 or more. In some embodiments, the number is 15 or more. In some embodiments, a percentage is at least about 50%. In some embodiments, a percentage is at least about 55%. In some embodiments, a percentage is at least about 60%. In some embodiments, a percentage is at least about 65%. In some embodiments, a percentage is at least about 70%. In some embodiments, a percentage is at least about 75%. In some embodiments, a percentage is at least about 80%. In some embodiments, a percentage is at least about 85%. In some embodiments, a percentage is at least about 90%. In some embodiments, a percentage is at least about 95%. In some embodiments, a percentage is about 100%. In some embodiments, each internucleotidic linkages linking two first domain nucleosides is independently a modified internucleotidic linkage. In some embodiments, each modified internucleotidic linkages is independently a chiral internucleotidic linkage. In some embodiments, each modified internucleotidic linkages is independently a phosphorothioate internucleotidic linkage. In some embodiments, each chiral internucleotidic linkage is independently a phosphorothioate internucleotidic linkage. In some embodiments, each modified internucleotidic linkages is independently a Sp chiral internucleotidic linkage. In some embodiments, each modified internucleotidic linkages is independently a Sp phosphorothioate internucleotidic linkage. In some embodiments, each chiral internucleotidic linkages is independently a Sp phosphorothioate internucleotidic linkage. In some embodiments, an internucleotidic linkage of a first domain is bonded to two nucleosides of the first domain. In some embodiments, an internucleotidic linkage bonded to a nucleoside in a first domain and a nucleoside in a second domain may be properly considered an internucleotidic linkage of a first domain. In some embodiments, an internucleotidic linkage bonded to a nucleoside in a first domain and a nucleoside in a second domain is a modified internucleotidic linkage; in some embodiments, it is a chiral internucleotidic linkage; in some embodiments, it is chirally controlled; in some embodiments, it is Rp; in some embodiments, it is Sp. In many embodiments, it was observed that a high percentage (e.g., relative to Rp internucleotidic linkages and/or natural phosphate linkages) of Sp internucleotidic linkages provide improved properties and/or activities, e.g., high stability and/or high adenosine editing activity.

[0273] In some embodiments, a first domain comprises a certain level of Rp internucleotidic linkages. In some embodiments, a level is about e.g., about 5%-100%, about 10%-100%, 20-100%, 30%-100%, 40%-100%, 50%-80%, 50%-85%, 50%-90%, 50%-95%, 60%-80%, 60%-85%, 60%-90%, 60%-95%, 60%-100%, 65%-80%, 65%-85%, 65%-90%, 65%-95%, 65%-100%, 70%-80%, 70%-85%, 70%-90%, 70%-95%, 70%-100%, 75%-80%, 75%-85%, 75%-90%, 75%-95%, 75%-100%, 80%-85%, 80%-90%, 80%-95%, 80%-100%, 85%-90%, 85%-95%, 85%-100%, 90%-95%, 90%-100%, 10%, 20%, 30%, 40%, 50%, 60%, 65%, 70%, 75%, 80%, 85%, 90%, 95%, or 100%, etc. of all internucleotidic linkages in a first domain. In some embodiments, a level is about e.g., about 5%-100%, about 10%-100%, 20-100%, 30%-100%, 40%-100%, 50%-80%, 50%-85%, 50%-90%, 50%-95%, 60%-80%, 60%-85%, 60%-90%, 60%-95%, 60%-100%, 65%-80%, 65%-85%, 65%-90%, 65%-95%, 65%-100%, 70%-80%, 70%-85%, 70%-90%, 70%-95%, 70%-100%, 75%-80%, 75%-85%, 75%-90%, 75%-95%, 75%-100%, 80%-85%, 80%-90%, 80%-95%, 80%-100%, 85%-90%, 85%-95%, 85%-100%, 90%-95%, 90%-100%, 10%, 20%, 30%, 40%, 50%, 60%, 65%, 70%, 75%, 80%, 85%, 90%, 95%, or 100%, etc. of all chiral internucleotidic linkages in a first domain. In some embodiments, a level is about e.g., about 5%-100%, about 10%-100%, 20-100%, 30%-100%, 40%-100%, 50%-80%, 50%-85%, 50%-90%, 50%-95%, 60%-80%, 60%-85%, 60%-90%, 60%-95%, 60%-100%, 65%-80%, 65%-85%, 65%-90%, 65%-95%, 65%-100%, 70%-80%, 70%-85%, 70%-90%, 70%-95%, 70%-100%, 75%-80%, 75%-85%, 75%-90%, 75%-95%, 75%-100%, 80%-85%, 80%-90%, 80%-95%, 80%-100%, 85%-90%, 85%-95%, 85%-100%, 90%-95%, 90%-100%, 10%, 20%, 30%, 40%, 50%, 60%, 65%, 70%, 75%, 80%, 85%, 90%, 95%, or 100%, etc. of all chirally controlled internucleotidic linkages in a first domain. In some embodiments, a percentage is about or no more than about 50%. In some embodiments, a percentage is at least about 55%. In some embodiments, a percentage is at least about 60%. In some embodiments, a percentage is at least about 65%. In some embodiments, a percentage is at least about 70%. In some embodiments, a percentage is at least about 75%. In some embodiments, a percentage is at least about 80%. In some embodiments, a percentage is at least about 85%. In some embodiments, a percentage is at least about 90%. In some embodiments, a percentage is at least about 95%. In some embodiments, a percentage is about 100%. In some embodiments, a percentage is about or no more than about 5%. In some embodiments, a percentage is about or no more than about 10%. In some embodiments, a percentage is about or no more than about 15%. In some embodiments, a percentage is about or no more than about 20%. In some embodiments, a percentage is about or no more than about 25%. In some embodiments, a percentage is about or no more than about 30%. In some embodiments, a percentage is about or no more than about 35%. In some embodiments, a percentage is about or no more than about 40%. In some embodiments, a percentage is about or no more than about 45%. In some embodiments, a percentage is about or no more than about 50%. In some embodiments, about 1-50, 1-40, 1-30, 1-25, 1-20, 1-15, 1-10, 1-5, e.g., about 1, 2, 3, 4, 5, 6, 7, 8, 9, 10, 11, 12, 13, 14, 15, 16, 17, 18, 19, or 20 internucleotidic linkages are independently Rp chiral internucleotidic linkages. In some embodiments, the number is about or no more than about 1. In some embodiments, the number is about or no more than about 2. In some embodiments, the number is about or no more than about 3. In some embodiments, the number is about or no more than about 4. In some embodiments, the number is about or no more than about 5. In some embodiments, the number is about or no more than about 6. In some embodiments, the number is about or no more than about 7. In some embodiments, the number is about or no more than about 8. In some embodiments, the number is about or no more than about 9. In some embodiments, the number is about or no more than about 10.

[0274] In some embodiments, each phosphorothioate internucleotidic linkage in a first domain is independently chirally controlled. In some embodiments, each is independently Sp or Rp. In some embodiments, a high level is Sp as described herein. In some embodiments, each phosphorothioate internucleotidic linkage in a first domain is chirally controlled and is Sp.

[0275] In some embodiments, as illustrated in certain examples, a first domain comprises one or more non-negatively charged internucleotidic linkages, each of which is optionally and independently chirally controlled. In some embodiments, each non-negatively charged internucleotidic linkage is independently n001. In some embodiments, a chiral non-negatively charged internucleotidic linkage is not chirally controlled. In some embodiments, each chiral non-negatively charged internucleotidic linkage is not chirally controlled. In some embodiments, a chiral non-negatively charged internucleotidic linkage is chirally controlled. In some embodiments, a chiral non-negatively charged internucleotidic linkage is chirally controlled and is Rp. In some embodiments, a chiral non-negatively charged internucleotidic linkage is chirally controlled and is Sp. In some embodiments, each chiral non-negatively charged internucleotidic linkage is chirally controlled. In some embodiments, the number of non-negatively charged internucleotidic linkages in a first domain is about 1-10, or about 1, 2, 3, 4, 5, 6, 7, 8, 9, or 10. In some embodiments, it is about 1. In some embodiments, it is about 2. In some embodiments, it is about 3. In some embodiments, it is about 4. In some embodiments, it is about 5. In some embodiments, two or more non-negatively charged internucleotidic linkages are consecutive. In some embodiments, no two non-negatively charged internucleotidic linkages are consecutive. In some embodiments, all non-negatively charged internucleotidic linkages in a first domain are consecutive (e.g., 3 consecutive non-negatively charged internucleotidic linkages). In some embodiments, a non-negatively charged internucleotidic linkage, or two or more consecutive non-negatively charged internucleotidic linkages, are at the 5′-end of a first domain. In some embodiments, the internucleotidic linkage linking the last two nucleosides of a first domain is a non-negatively charged internucleotidic linkage. In some embodiments, the internucleotidic linkage linking the last two nucleosides of a first domain is a Sp non-negatively charged internucleotidic linkage. In some embodiments, the internucleotidic linkage linking the last two nucleosides of a first domain is a Rp non-negatively charged internucleotidic linkage. In some embodiments, the internucleotidic linkage linking the last two nucleosides of a first domain is a phosphorothioate internucleotidic linkage. In some embodiments, the internucleotidic linkage linking the last two nucleosides of a first domain is a Sp phosphorothioate internucleotidic linkage. In some embodiments, the internucleotidic linkage linking the first two nucleosides of a first domain is a non-negatively charged internucleotidic linkage. In some embodiments, the internucleotidic linkage linking the first two nucleosides of a first domain is a Sp non-negatively charged internucleotidic linkage. In some embodiments, the internucleotidic linkage linking the first two nucleosides of a first domain is a Rp non-negatively charged internucleotidic linkage. In some embodiments, the internucleotidic linkage linking the first two nucleosides of a first domain is a phosphorothioate internucleotidic linkage. In some embodiments, the internucleotidic linkage linking the first two nucleosides of a first domain is a Sp phosphorothioate internucleotidic linkage. In some embodiments, a non-negatively charged internucleotidic linkage is a neutral internucleotidic linkage such as n001. In some embodiments, the first two nucleosides of a first domain are the first two nucleosides of an oligonucleotide.

[0276] In some embodiments, a first domain comprises one or more natural phosphate linkages. In some embodiments, a first domain contains no natural phosphate linkages. In some embodiments, one or more 2′-OR modified sugars wherein R is not —H are independently bonded to a natural phosphate linkage. In some embodiments, one or more 2′-OR modified sugars wherein R is optionally substituted C₁₋₆ aliphatic are independently bonded to a natural phosphate linkage. In some embodiments, one or more 2′-OMe modified sugars are independently bonded to a natural phosphate linkage. In some embodiments, one or more 2′-MOE modified sugars are independently bonded to a natural phosphate linkage. In some embodiments, each 2′-MOE modified sugar is independently bonded to a natural phosphate linkage. In some embodiments, 50% or more (e.g., 50%-100%, 50%-90%, 50-80%, or about 50%, 60%, 66%, 70%, 75%, 80%, 90% or more) 2′-OR modified sugars wherein R is not —H are independently bonded to a natural phosphate linkage. In some embodiments, 50% or more (e.g., 50%-100%, 50%-90%, 50-80%, or about 50%, 60%, 66%, 70%, 75%, 80%, 90% or more) 2′-OMe modified sugars are independently bonded to a natural phosphate linkage. In some embodiments, 50% or more (e.g., 50%-100%, 50%-90%, 50-80%, or about 50%, 60%, 66%, 70%, 75%, 80%, 90% or more) 2′-MOE modified sugars are independently bonded to a natural phosphate linkage. In some embodiments, 50% or more (e.g., 50%-100%, 50%-90%, 50-80%, or about 50%, 60%, 66%, 70%, 75%, 80%, 90% or more) internucleotidic linkages bonded to two 2′-OR modified sugars are independently natural phosphate linkages. In some embodiments, 50% or more (e.g., 50%-100%, 50%-90%, 50-80%, or about 50%, 60%, 66%, 70%, 75%, 80%, 90% or more) internucleotidic linkages bonded to two 2′-OMe or 2′-MOE modified sugars are independently natural phosphate linkages.

[0277] In some embodiments, in an oligonucleotide of the present disclosure or a portion thereof, e.g., a first domain, a second domain, a first subdomain, a second subdomain, a third subdomain, etc., each internucleotidic linkage bonded to two 2′-F modified sugars is independently a modified internucleotidic linkage. In some embodiments, it is independently a phosphorothioate internucleotidic linkage or a non-negatively charged internucleotidic linkage such as a phosphoryl guanidine internucleotidic linkage like n001. In some embodiments, it is independently a Sp phosphorothioate internucleotidic linkage or a non-negatively charged internucleotidic linkage such as a phosphoryl guanidine internucleotidic linkage like n001. In some embodiments, it is independently a Sp phosphorothioate internucleotidic linkage or a Rp phosphoryl guanidine internucleotidic linkage like Rp n001. In some embodiments, each phosphorothioate internucleotidic linkage bonded to two 2′-F modified sugars is independently Sp.

[0278] In some embodiments, a first domain recruits, promotes or contribute to recruitment of, a protein such as an ADAR protein (e.g., ADAR1, ADAR2, etc.). In some embodiments, a first domain recruits, or promotes or contribute to interactions with, a protein such as an ADAR protein. In some embodiments, a first domain contacts with a RNA binding domain (RBD) of ADAR. In some embodiments, a first domain does not substantially contact with a second RBD domain of ADAR. In some embodiments, a first domain does not substantially contact with a catalytic domain of ADAR which has a deaminase activity. In some embodiments, various nucleobases, sugars and/or internucleotidic linkages may interact with one or more residues of proteins, e.g., ADAR proteins.

### Second Domains

[0279] As described herein, in some embodiment, an oligonucleotide comprises a first domain and a second domain from 5′ to 3′. In some embodiments, an oligonucleotide consists of a first domain and a second domain. Certain embodiments of a second domain are described below as examples. In some embodiments, a second domain comprise a nucleoside opposite to a target adenosine to be modified (e.g., conversion to I).

[0280] In some embodiments, a second domain has a length of about 2-50 (e.g., about 5, 6, 7, 8, 9, or 10-about 10, 11, 12, 13, 14, 15, 16, 17, 18, 19, 20, 21, 22, 23, 24, 25, 30, 40 or 50, or about 5, 6, 7, 8, 9, 10, 11, 12, 13, 14, 15, 16, 17, 18, 19, 20, 21, 22, 23, 24, 25, 30, 40 or 50, etc.) nucleobases. In some embodiments, a second domain has a length of about 5-30 nucleobases. In some embodiments, a second domain has a length of about 10-30 nucleobases. In some embodiments, a second domain has a length of about 10-20 nucleobases. In some embodiments, a second domain has a length of about 5-15 nucleobases. In some embodiments, a second domain has a length of about 13-16 nucleobases. In some embodiments, a second domain has a length of about 1-7 nucleobases. In some embodiments, a second domain has a length of 10 nucleobases. In some embodiments, a second domain has a length of 11 nucleobases. In some embodiments, a second domain has a length of 12 nucleobases. In some embodiments, a second domain has a length of 13 nucleobases. In some embodiments, a second domain has a length of 14 nucleobases. In some embodiments, a second domain has a length of 15 nucleobases. In some embodiments, a second domain has a length of 16 nucleobases. In some embodiments, a second domain has a length of 17 nucleobases. In some embodiments, a second domain has a length of 18 nucleobases. In some embodiments, a second domain has a length of 19 nucleobases. In some embodiments, a second domain has a length of 20 nucleobases.

[0281] In some embodiments, a second domain is about, or at least about, 5-95%, 10%-90%, 20%-80%, 30%-70%, 40%-70%, 40%-60%, 5%, 10%, 15%, 20%, 25%, 30%, 35%, 40%, 45%, 50%, 55%, 60%, 65%, 70%, 75%, 80%, 85%, 90%, 95% of an oligonucleotide. In some embodiments, a percentage is about 30%-80%. In some embodiments, a percentage is about 30%-70%. In some embodiments, a percentage is about 40%-60%. In some embodiments, a percentage is about 20%. In some embodiments, a percentage is about 25%. In some embodiments, a percentage is about 30%. In some embodiments, a percentage is about 35%. In some embodiments, a percentage is about 40%. In some embodiments, a percentage is about 45%. In some embodiments, a percentage is about 50%. In some embodiments, a percentage is about 55%. In some embodiments, a percentage is about 60%. In some embodiments, a percentage is about 65%. In some embodiments, a percentage is about 70%. In some embodiments, a percentage is about 75%. In some embodiments, a percentage is about 80%. In some embodiments, a percentage is about 85%. In some embodiments, a percentage is about 90%.

[0282] In some embodiments, one or more (e.g., 1-20, 1, 2, 3, 4, 5, 6, 7, 8, 9, or 10, etc.) mismatches exist in a second domain when an oligonucleotide is aligned with a target nucleic acid for complementarity. In some embodiments, there is 1 mismatch. In some embodiments, there are 2 mismatches. In some embodiments, there are 3 mismatches. In some embodiments, there are 4 mismatches. In some embodiments, there are 5 mismatches. In some embodiments, there are 6 mismatches. In some embodiments, there are 7 mismatches. In some embodiments, there are 8 mismatches. In some embodiments, there are 9 mismatches. In some embodiments, there are 10 mismatches.

[0283] In some embodiments, one or more (e.g., 1-20, 1, 2, 3, 4, 5, 6, 7, 8, 9, or 10, etc.) wobbles exist in a second domain when an oligonucleotide is aligned with a target nucleic acid for complementarity. In some embodiments, there is 1 wobble. In some embodiments, there are 2 wobbles. In some embodiments, there are 3 wobbles. In some embodiments, there are 4 wobbles. In some embodiments, there are 5 wobbles. In some embodiments, there are 6 wobbles. In some embodiments, there are 7 wobbles. In some embodiments, there are 8 wobbles. In some embodiments, there are 9 wobbles. In some embodiments, there are 10 wobbles.

[0284] In some embodiments, duplexes of oligonucleotides and target nucleic acids in a second domain region comprise one or more bulges each of which independently comprise one or more mismatches that are not wobbles. In some embodiments, there are 0-10 (e.g., 0-1, 0-2, 0-3, 0-4, 0-5, 0-6, 0-7, 0-8, 0-9, 0-10, 1-2, 1-3, 1-4, 1-5, 1-6, 1-7, 1-8, 1-9, 1-10, 2-3, 2-4, 2-5, 2-6, 2-7, 2-8, 2-9, 2-10, 3-4, 3-5, 3-6, 3-7, 3-8, 3-9, 3-10, 0, 1, 2, 3, 4, 5, 6, 7, 8, 9, or 10, etc.) bulges. In some embodiments, the number is 0. In some embodiments, the number is 1. In some embodiments, the number is 2. In some embodiments, the number is 3. In some embodiments, the number is 4. In some embodiments, the number is 5.

[0285] In some embodiments, a second domain is fully complementary to a target nucleic acid.

[0286] In some embodiments, a second domain comprises one or more modified nucleobases.

[0287] In some embodiments, a second domain comprise a nucleoside opposite to a target adenosine, e.g., when the oligonucleotide forms a duplex with a target nucleic acid. In some embodiments, an opposite nucleobase is optionally substituted or protected U, or is an optionally substituted or protected tautomer of U. In some embodiments, an opposite nucleobase is U.

[0288] In some embodiments, an opposite nucleobase has weaker hydrogen bonding with a target adenine of a target adenosine compared to U. In some embodiments, an opposite nucleobase forms fewer hydrogen bonds with a target adenine of a target adenosine compared to U. In some embodiments, an opposite nucleobase forms one or more hydrogen bonds with one or more amino acid residues of a protein, e.g., ADAR, which residues form one or more hydrogen bonds with U opposite to a target adenosine. In some embodiments, an opposite nucleobase forms one or more hydrogen bonds with each amino acid residue of ADAR that forms one or more hydrogen bonds with U opposite to a target adenosine. In some embodiments, by weakening hydrogen boding with a target A and/or maintaining or enhancing interactions with proteins such as ADAR1, ADAR2, etc., certain opposite nucleobase facilitate and/or promote adenosine modification, e.g., by ADAR proteins such as ADAR1 and ADAR2.

[0289] In some embodiments, an opposite nucleobase is optionally substituted or protected C, or is an optionally substituted or protected tautomer of C. In some embodiments, an opposite nucleobase is C. In some embodiments, an opposite nucleobase is optionally substituted or protected A, or is an optionally substituted or protected tautomer of A. In some embodiments, an opposite nucleobase is A. In some embodiments, an opposite nucleobase is optionally substituted or protected nucleobase of pseudoisocytosine, or is an optionally substituted or protected tautomer of the nucleobase of pseudoisocytosine. In some embodiments, an opposite nucleobase is the nucleobase of pseudoisocytosine.

[0290] In some embodiments, a nucleoside, e.g., a nucleoside opposite to a target adenosine (may also be referred to as “an opposite nucleoside”) is abasic as described herein (e.g., having the structure of L010, L012, L028, etc.).

[0291] Many useful embodiments of modified nucleobases, e.g., for opposite nucleobases, are also described below. In some embodiments, as described herein (e.g., in various oligonucleotides), the present disclosure provides oligonucleotides comprising a nucleobase, e.g., of a nucleoside opposite to a target nucleoside such as A, which is or comprises A, T, C, G, U, hypoxanthine, b001U, b002U, b003U, b004U, b005U, b006U, b007U, b008U, b009U, b011U, b012U, b013U, b001A, b002A, b003A, b001G, b002G, b001C, b002C, b003C, b004C, b005C, b006C, b007C, b008C, b009C, b002I, b003I, b004I, and zdnp. In some embodiments, as described herein (e.g., in various oligonucleotides), the present disclosure provides oligonucleotides comprising a nucleobase, e.g., of a nucleoside opposite to a target nucleoside such as A, which is or comprises b001U, b002U, b003U, b004U, b005U, b006U, b007U, b008U, b009U, b011U, b012U, b013U, b001A, b002A, b003A, b001G, b002G, b001C, b002C, b003C, b004C, b005C, b006C, b007C, b008C, b009C, b002I, b003I, b004I, and zdnp. In some embodiments, as described herein (e.g., in various oligonucleotides), the present disclosure provides oligonucleotides comprising a nucleobase, e.g., of a nucleoside opposite to a target nucleoside such as A, which is or comprises C, A, b007U, b001U, b001A, b002U, b001C, b003U, b002C, b004U, b003C, b005U, b002I, b006U, b003I, b008U, b009U, b002A, b003A, b001G, or zdnp. In some embodiments, a nucleobase is C. In some embodiments, a nucleobase is A. In some embodiments, a nucleobase is hypoxanthine. In some embodiments, a nucleobase is b002I. In some embodiments, a nucleobase is b003I. In some embodiments, a nucleobase is b004I. In some embodiments, a nucleobase is b014I. In some embodiments, a nucleobase is b001C. In some embodiments, a nucleobase is b002C. In some embodiments, a nucleobase is b003C. In some embodiments, a nucleobase is b004C. In some embodiments, a nucleobase is b005C. In some embodiments, a nucleobase is b006C. In some embodiments, a nucleobase is b007C. In some embodiments, a nucleobase is b008C. In some embodiments, a nucleobase is b009C. In some embodiments, a nucleobase is b001U. In some embodiments, a nucleobase is b002U. In some embodiments, a nucleobase is b003U. In some embodiments, a nucleobase is b004U. In some embodiments, a nucleobase is b005U. In some embodiments, a nucleobase is b006U. In some embodiments, a nucleobase is b007U. In some embodiments, a nucleobase is b008U. In some embodiments, a nucleobase is b009U. In some embodiments, a nucleobase is b011U. In some embodiments, a nucleobase is b012U. In some embodiments, a nucleobase is b013U. In some embodiments, a nucleobase is b001A. In some embodiments, a nucleobase is b002A. In some embodiments, a nucleobase is b003A. In some embodiments, a nucleobase is b001G. In some embodiments, a nucleobase is b002G. In some embodiments, a nucleobase is or zdnp. In some embodiments, as those skilled in the art appreciate, a nucleobase is protected, e.g., for oligonucleotide synthesis. For example, in some embodiments, a nucleobase is protected b001A having the structure of

[chemical structure]

wherein R′ is as described herein. In some embodiments, R′ is —C(O)R. In some embodiments, R′ is —C(O)Ph.

[0292] In some embodiments, it was observed that various modified nucleobases, e.g., b001A, b008U, etc., can provide improved adenosine editing efficiency when compared to a reference nucleobase (e.g., under comparable conditions including, e.g., in otherwise identical oligonucleotides, assessed in identical or comparable assays, etc.). In some embodiments, a reference nucleobase is U. In some embodiments, a reference nucleobase is T. In some embodiments, a reference nucleobase is C.

[0293] Certain Modified Nucleobases

[0294] In some embodiments, BA is or comprises Ring BA or a tautomer thereof, wherein Ring BA is an optionally substituted, 5-20 membered, monocyclic, bicyclic or polycyclic ring having 0-10 heteroatoms. In some embodiments, Ring BA is or comprises an optionally substituted, 5-20 membered, monocyclic, bicyclic or polycyclic having 1-10 heteroatoms, wherein at least one heteroatom is nitrogen. In some embodiments, Ring BA is saturated. In some embodiments, Ring BA comprises one or more unsaturation. In some embodiments, Ring BA is partially unsaturated. In some embodiments, Ring BA is aromatic.

[0295] In some embodiments, BA is or comprises Ring BA, wherein Ring BA is an optionally substituted, 5-20 membered, monocyclic, bicyclic or polycyclic ring having 0-10 heteroatoms. In some embodiments, Ring BA is or comprises an optionally substituted, 5-20 membered, monocyclic, bicyclic or polycyclic having 1-10 heteroatoms, wherein at least one heteroatom is nitrogen. In some embodiments, Ring BA is saturated. In some embodiments, Ring BA comprises one or more unsaturation. In some embodiments, Ring BA is partially unsaturated. In some embodiments, Ring BA is aromatic.

[0296] In some embodiments, BA is or comprises Ring BA. In some embodiments, BA is Ring BA. In some embodiments, BA is or comprises a tautomer of Ring BA. In some embodiments, BA is a tautomer of Ring BA.

[0297] In some embodiments, structures of the present disclosure contain one or more optionally substituted rings (e.g., Ring BA, -Cy-, Ring BA^{A}, R, formed by R groups taken together, etc.). In some embodiments, a ring is an optionally substituted C₃₋₃₀, C₃₋₂₀, C₃₋₁₅, C₃₋₁₀, C₃₋₉, C₃₋₈, C₃₋₇, C₃₋₆, C₅₋₅₀, C₅₋₂₀, C₅₋₁₅, C₅₋₁₀, C₅₋₉, C₅₋₈, C₅₋₇, C₅₋₆, or 3-30 (e.g., 3-30, 3-20, 3-15, 3-10, 3-9, 3-8, 3-7, 3-6, 5-50, 5-20, 5-15, 5- 10, 5-9, 5-8, 5-7, 5-6, or 1, 2, 3, 4, 5, 6, 7, 8, 9, 10, 11, 12, 13, 14, 15, 16, 17, 18, 19, 20, 25, 30, etc.) membered monocyclic, bicyclic or polycyclic ring having 0-10 (e.g., 1-10, 1-5, 0, 1, 2, 3, 4, 5, 6, 7, 8, 9, 10, etc.) heteroatoms. In some embodiments, a ring is an optionally substituted 3-10 membered monocyclic or bicyclic, saturated, partially saturated or aromatic ring having 0-3 heteroatoms. In some embodiments, a ring is substituted. In some embodiments, a ring is not substituted. In some embodiments, a ring is 3, 4, 5, 6, 7, 8, 9, or 10 membered. In some embodiments, a ring is 5, 6, or 7-membered. In some embodiments, a ring is 5-membered. In some embodiments, a ring is 6-membered. In some embodiments, a ring is 7-membered. In some embodiments, a ring is monocyclic. In some embodiments, a ring is bicyclic. In some embodiments, a ring is polycyclic. In some embodiments, a ring is saturated. In some embodiments, a ring contains at least one unsaturation. In some embodiments, a ring is partially unsaturated. In some embodiments, a ring is aromatic. In some embodiments, a ring has 0-5 heteroatoms. In some embodiments, a ring has 1-5 heteroatoms. In some embodiments, a ring has one or more heteroatoms. In some embodiments, a ring has 1 heteroatom. In some embodiments, a ring has 2 heteroatoms. In some embodiments, a ring has 3 heteroatoms. In some embodiments, a ring has 4 heteroatoms. In some embodiments, a ring has 5 heteroatoms. In some embodiments, a heteroatom is nitrogen. In some embodiments, a heteroatom is oxygen. In some embodiments, a ring is substituted, e.g., substituted with one or more alkyl groups and optionally one or more other substituents as described herein. In some embodiments, a substituent is methyl.

[0298] In some embodiments, each monocyclic ring unit of a monocyclic, bicyclic, or polycyclic ring of the present disclosure (e.g., Ring BA, -Cy-, Ring BA^{A}, R, formed by R groups taken together, etc.) is independently an optionally substituted 5-7 membered, saturated, partially unsaturated or aromatic ring having 0-5 heteroatoms. In some embodiments, one or more monocyclic units independently comprise one or more unsaturation. In some embodiments, one or more monocyclic units are saturated. In some embodiments, one or more monocyclic units are partially saturated. In some embodiments, one or more monocyclic units are aromatic. In some embodiments, one or more monocyclic units independently have 1-5 heteroatoms. In some embodiments, one or more monocyclic units independently have at least one nitrogen atom. In some embodiments, each monocyclic unit is independently 5- or 6-membered. In some embodiments, a monocyclic unit is 5-membered. In some embodiments, a monocyclic unit is 5-membered and has 1-2 nitrogen atom. In some embodiments, a monocyclic unit is 6-membered. In some embodiments, a monocyclic unit is 6-membered and has 1-2 nitrogen atom. Rings and monocyclic units thereof are optionally substituted unless otherwise specified.

[0299] Without the intention to be limited by any particular theory, the present disclosure recognizes that in some embodiment, structures of nucleobases (e.g. BA) can impact interactions with proteins (e.g., ADAR proteins such as ADAR1, ADAR2, etc.). In some embodiments, provided oligonucleotides comprise nucleobases that can facility interaction of an oligonucleotide with an enzyme, e.g., ADAR1. In some embodiments, provided oligonucleotides comprise nucleobases that may reduce strength of base pairing (e.g., compared to A-T/U or C-G). In some embodiments, the present disclosure recognizes that by maintaining and/or enhancing interactions (e.g., hydrogen bonding) of a first nucleobase with a protein (e.g., an enzyme like ADAR1) and/or reducing interactions (e.g., hydrogen bonding) of a first nucleobase with its corresponding nucleobase (e.g., A) on the other strand in a duplex, modification of the corresponding nucleobase by a protein (e.g., an enzyme like ADAR1) can be significantly improved. In some embodiments, the present disclosure provides oligonucleotides comprises such a first nucleobase (e.g., various embodiments of BA described herein). Exemplary embodiments of such as a first nucleobase are as described herein. In some embodiments, when an oligonucleotide comprising such a first nucleobase is aligned with another nucleic acid for maximum complementarity, the first nucleobase is opposite to A. In some embodiments, such an A opposite to the first nucleobase, as exemplified in many embodiments of the present disclosure, can be efficiently modified using technologies of the present disclosure.

[0300] In some embodiments, Ring BA comprises a moiety [symbol] X² [symbol] X³ [symbol] , wherein each variable is independently as described herein. In some embodiments, Ring BA comprises a moiety [symbol] X² [symbol] X³ [symbol] X⁴ [symbol] , wherein each variable is independently as described herein. In some embodiments, Ring BA comprises a moiety —X¹( [symbol] ) [symbol] X² [symbol] X³ [symbol] , wherein each variable is independently as described herein. In some embodiments, Ring BA comprises a moiety —X¹( [symbol] ) [symbol] X² [symbol] X³ [symbol] X⁴ [symbol] , wherein each variable is independently as described herein. In some embodiments, X¹ is bonded to a sugar. In some embodiments, X¹ is —N(−)—. In some embodiments, X¹ is —C(═)—. In some embodiments, X² is —C(O)—. In some embodiments, X³ is —NH—. In some embodiments, X⁴ is not —C(O)—. In some embodiments, X⁴ is —C(O)—, and forms an intramolecular hydrogen bond, e.g., with a moiety of the same nucleotidic unit (e.g., within the same BA unit (e.g., with a hydrogen bond donor (e.g., —OH, SH, etc.) of X⁵). In some embodiments, X⁴ is —C(═NH)—. In some embodiments, Ring BA comprises a moiety [symbol] X^{4′} [symbol] X^{5′} [symbol] , wherein each variable is independently as described herein. In some embodiments, X^{4′} is —C(O)—. In some embodiments, X^{5′} is —NH—.

[0301] In some embodiments, BA is optionally substituted or protected C or a tautomer thereof. In some embodiments, BA is optionally substituted or optionally protected C. In some embodiments, BA is an optionally substituted or optionally protected tautomer of C. In some embodiments, BA is C. In some embodiments, BA is substituted C. In some embodiments, BA is protected C. In some embodiments, BA is an substituted tautomer of C. In some embodiments, BA is an protected tautomer of C.

[0302] In some embodiments, Ring BA has the structure of formula BA-I:

[chemical structure]

wherein:
[0303] Ring BA is an optionally substituted, 5-20 membered, monocyclic, bicyclic or polycyclic, saturated, partially saturated or aromatic ring having 1-10 heteroatoms;
[0304] each [symbol] is independent a single or double bond;
[0305] X¹ is —N(−)— or —C(−)═;
[0306] X² is —C(O)—, —C(R^{B2}), or —C(OR^{B2})═, wherein R^{B2} is -L^{B2}-R′;
[0307] X³ is —N(R^{B3})— or —N═, wherein R^{B3} is -L^{B3}-R′;
[0308] X⁴ is —C(R^{B4})═, —C(—N(R^{B4})₂)═, —C(R^{B4})₂—, —C(O)—, or —C(═NR^{B4})—, wherein each R^{B4} is independently -L^{B4}-R^{B41}, or two R^{B4} on the same atom are taken together to form ═O, ═C(-L^{B4}-R^{B41})₂, ═N-L^{B4}-R^{B41}, or optionally substituted ═CH₂ or ═NH, wherein each R^{B41} is independently R′;
[0309] each of L^{B2}, L^{B3}, and L^{B4} is independently L^{B};
[0310] each L^{B} is independently a covalent bond, or an optionally substituted bivalent C₁₋₁₀ saturated or partially unsaturated chain having 0-6 heteroatoms, wherein one or more methylene unit is optionally and independently replaced with -Cy-, —O—, —S—, —N(R′)—, —C(O)—, —C(S)—, —C(NR′)—, —C(O)N(R′)—, —N(R′)C(O)N(R′)—, —N(R′)C(O)O—, —S(O)—, —S(O)₂—, —S(O)₂N(R′)—, —C(O)S—, or —C(O)O—;
[0311] each -Cy- is independently an optionally substituted, 3-20 membered, monocyclic, bicyclic or polycyclic ring having 0-10 heteroatoms;
[0312] each R′ is independently —R, —C(O)R, —C(O)OR, —C(O)N(R)₂, or —SO₂R; and
[0313] each R is independently —H, or an optionally substituted group selected from C₁₋₂₀ aliphatic, C₁₋₂₀ heteroaliphatic having 1-10 heteroatoms, C₆₋₂₀ aryl, C₆₋₂₀ arylaliphatic, C₆₋₂₀ arylheteroaliphatic having 1-10 heteroatoms, 5-20 membered heteroaryl having 1-10 heteroatoms, and 3-20 membered heterocyclyl having 1-10 heteroatoms, or:
[0314] two R groups are optionally and independently taken together to form a covalent bond, or:
[0315] two or more R groups on the same atom are optionally and independently taken together with the atom to form an optionally substituted, 3-20 membered, monocyclic, bicyclic or polycyclic ring having, in addition to the atom, 0-10 heteroatoms; or:
[0316] two or more R groups on two or more atoms are optionally and independently taken together with their intervening atoms to form an optionally substituted, 3-30 membered, monocyclic, bicyclic or polycyclic ring having, in addition to the intervening atoms, 0-10 heteroatoms.

[0317] In some embodiments, Ring BA (e.g., one of formula BA-I) has the structure of formula BA-I-a:

[chemical structure]

[0318] In some embodiments, Ring BA (e.g., one of formula BA-I, BA-I-a, etc.) has the structure of formula BA-I-b:

[chemical structure]

[0319] In some embodiments, Ring BA (e.g., one of formula BA-I) has the structure of formula BA-II:

[chemical structure]

wherein:
[0320] X⁵ is —C(R^{B5})₂—, —N(R^{B5})—, —C(R^{B5})═, —C(O)—, or —N═, wherein each R^{B5} is independently halogen, or -L^{B5}-R^{B51}, wherein R^{B51} is —R′, —N(R′)₂, —OR′, or —SR′;
[0321] L^{B5} is L^{B}; and
[0322] each other variable is independently as described herein.

[0323] In some embodiments, Ring BA (e.g., one of formula BA-I, BA-I-a, BA-II, etc.) has the structure of formula BA-II-a:

[chemical structure]

[0324] In some embodiments, Ring BA (e.g., one of formula BA-I, BA-I-a, BA-I-b, BA-II, BA-II-a, etc.) has the structure of formula BA-II-b:

[chemical structure]

[0325] In some embodiments, Ring BA (e.g., one of formula BA-I, BA-II, etc.) has the structure of formula BA-III:

[chemical structure]

wherein:
[0326] X⁶ is —C(R^{B6})═, —C(OR^{B6})═, —C(R^{B6})₂—, —C(O)— or —N═, wherein each R^{B6} is independently -L^{B6}-R^{B61}, or two R^{B6} on the same atom are taken together to form ═O, ═C(-L^{B6}-R^{B61})₂, ═N-L^{B6}-R^{B61}, or optionally substituted ═CH₂ or ═NH, wherein each R^{B61} is independently R′;
[0327] L^{B6} is L^{B}; and
[0328] each other variable is independently as described herein.

[0329] In some embodiments, Ring BA (e.g., one of formula BA-I, BA-I-a, BA-II, BA-II-a, BA-III, etc.) has the structure of formula BA-III-a:

[chemical structure]

[0330] In some embodiments, Ring BA (e.g., one of formula BA-I, BA-I-a, BA-I-b, BA-II, BA-II-a, BA-II-b, BA-III, BA-III-a, etc.) has the structure of formula BA-III-b:

[chemical structure]

[0331] In some embodiments, Ring BA (e.g., one of formula BA-I, BA-II, etc.) has the structure of formula BA-IV:

[chemical structure]

wherein:
[0332] Ring BA^{A} is an optionally substituted 5-14 membered, monocyclic, bicyclic or polycyclic ring having 0-5 heteroatoms, and
[0333] each other variable is independently as described herein.

[0334] In some embodiments, Ring BA (e.g., one of formula BA-I, BA-I-a, BA-II, BA-II-a, etc.) has the structure of formula BA-IV-a:

[chemical structure]

[0335] In some embodiments, Ring BA (e.g., one of formula BA-I, BA-I-a, BA-II, BA-II-a, etc.) has the structure of formula BA-IV-b:

[chemical structure]

[0336] In some embodiments, Ring BA (e.g., one of formula BA-I, BA-II, BA-III, BA-IV, etc.) has the structure of formula BA-V:

[chemical structure]

[0337] In some embodiments, Ring BA (e.g., one of formula BA-I, BA-I-a, BA-II, BA-II-a, BA-III, BA-III-a, BA-IV, BA-IV-a, BA-V, etc.) has the structure of formula BA-V-a:

[chemical structure]

[0338] In some embodiments, Ring BA (e.g., one of formula BA-I, BA-I-a, BA-I-b, BA-II, BA-II-a, BA-II-b, BA-III, BA-III-a, BA-III-b, BA-IV, BA-IV-a, BA-IV-b, BA-V, BA-V-a, etc.) has the structure of formula BA-V-a:

[chemical structure]

[0339] In some embodiments, Ring BA has the structure of formula BA-VI:

[chemical structure]

wherein:
[0340] X^{1′} is —N(−)— or —C(−)═;
[0341] X^{2′} is —C(O)— or —C(R^{B2′})═, wherein R^{B2′} is -L^{B2′}-R′;
[0342] each [symbol] is independent a single or double bond;
[0343] X^{3′} is —N(R^{B3′})— or —N═, wherein R^{B3′} is -L^{B3′}-R′;
[0344] X^{4′} is —C(R^{B4′})═, —C(OR^{B4′})═, —C(—N(R^{B4′})₂)═, —C(R^{B4′})₂—, —C(O)—, or —C(═NR^{B4′})—, wherein each R^{B4′} is independently -L^{B4′}-R^{B41′}, or two R^{B4′} on the same atom are taken together to form ═O, ═C(-L^{B4′}-R^{B41′})₂, ═N-L^{B4′}-R^{B41′}, or optionally substituted ═CH₂ or ═NH, wherein each R^{B41′} is independently —R′;
[0345] X^{5′} is —N(R^{B5′}) or —N═, wherein R^{B5′} is -L^{B5′}-R′;
[0346] X^{6′} is —C(R^{B6′})═, —C(OR^{B6′})═, —C(R^{B6′})₂—, —C(O)— or —N═, wherein each R^{B6′} is independently -L^{B6′}-R^{B61′}, or two R^{B6′} on the same atom are taken together to form ═O, ═C(-L^{B6′}-R^{B61′})₂, ═N-L^{B6′}-R^{B61′}, or optionally substituted ═CH₂ or ═NH, wherein each R^{B61′} is independently R′;
[0347] X^{7′} is —C(R^{B7′})═, —C(OR^{B6′})═, —C(R^{B7′})₂—, —C(O)—, —N(R^{B7′})—, or —N═, wherein each R^{B7′} is independently -L^{7′}-R^{B71′}, or two R^{B7′} on the same atom are taken together to form ═O, ═C(-L^{7′}-R^{B71′})₂, ═N-L^{7′}-R^{B71′}, or optionally substituted ═CH₂ or ═NH, wherein each R^{B71′} is independently R′;
[0348] each of L^{B2′}, L^{B3′}, L^{B4′}, L^{B5′} and L^{B6′} is independently L^{B}; and
[0349] each other variable is independently as described herein.

[0350] In some embodiments, [symbol] is a single bond. In some embodiments, [symbol] is a double bond.

[0351] In some embodiments, X¹ is —(N−)—. In some embodiments, X¹ is —C(−)═.

[0352] In some embodiments' X² is —C(O)—. In some embodiments, X² is —C(R^{B2})═. In some embodiments, X² is —C(OR^{B2})═. In some embodiments, X² is —CH═.

[0353] In some embodiments, L^{B2} is a covalent bond.

[0354] In some embodiments, R^{B2} is a protecting group, e.g., a hydroxyl protecting group suitable for oligonucleotide synthesis. In some embodiments, R^{B2} is R′. In some embodiments, R^{B2} is —H.

[0355] In some embodiments, X³ is —N(R^{B3})—. In some embodiments, X³ is —NH—. In some embodiments, X³ is —N═.

[0356] In some embodiments, L^{B3} is a covalent bond.

[0357] In some embodiments, R^{B3} is a protecting group, e.g., an amino protecting group suitable for oligonucleotide synthesis (e.g., Bz). In some embodiments, R^{B3} is R′. In some embodiments, R^{B3} is —C(O)R. In some embodiments, R^{B3} is R. In some embodiments, R^{B3} is —H.

[0358] In some embodiments, X⁴ is —C(R^{B4})═. In some embodiments, X⁴ is —C(R)═. In some embodiments, X⁴ is —CH═. In some embodiments, X⁴ is —C(OR^{B4})═. In some embodiments, X⁴ is —C(—N(R^{B4})₂)═. In some embodiments, X⁴ is —C(—NHR^{B4})═. In some embodiments, X⁴ is —C(—NHR′)═. In some embodiments, X⁴ is —C(—NHR′)═. In some embodiments, X⁴ is —C(—NH₂)═. In some embodiments, X⁴ is —C(—NHC(O)R)═. In some embodiments, X⁴ is —C(R^{B4})₂—. In some embodiments, X⁴ is —CH₂—. In some embodiments, X⁴ is —C(O)—. In some embodiments, X⁴ is —C(O)—, wherein O forms a intramolecular hydrogen bond. In some embodiments, O forms a hydrogen bond with a hydrogen bond donor of X⁵ of the same BA. In some embodiments, X⁴ is —C(═NR^{B4})—. In some embodiments, X⁴ is —C((═NR^{B4})—, wherein N forms a intramolecular hydrogen bond. In some embodiments, N forms a hydrogen bond with a hydrogen bond donor of X⁵ of the same BA.

[0359] In some embodiments, R^{B4}-L^{B4}-R^{B41}. In some embodiments, two R^{B4} on the same atom are taken together to form ═O, ═C(-L^{B4}-R^{B41})₂, ═N-L^{B4}-R^{B41}, or optionally substituted ═CH₂ or ═NH.

[0360] In some embodiments, two R^{B4} on the same atom are taken together to form ═O. In some embodiments, two R^{B4} on the same atom are taken together to form ═C(-L^{B4}-R^{B41})₂. In some embodiments, ═C(-L^{B4}-R^{B41})₂ is ═CH-L^{B4}-R^{B41}. In some embodiments, ═C(-L^{B4}-R^{B41})₂ is ═CHR′. In some embodiments, ═C(-L^{B4}-R^{B41})₂ is ═CHR. In some embodiments, two R^{B4} on the same atom are taken together to form ═N-L^{B4}-R^{B41}. In some embodiments, ═N-L^{B4}-R^{B41} is ═N—R. In some embodiments, two R^{B4} on the same atom are taken together to form ═CH₂. In some embodiments, two R^{B4} on the same atom are taken together to form ═NH. In some embodiments, a formed group is a suitable protecting group, e.g., amino protecting group, for oligonucleotide synthesis.

[0361] In some embodiments, X⁴ is —C(—N═C(-L^{B4}-R^{B41})₂)═. In some embodiments, X⁴ is —C(—N═CH-L^{B4}-R^{B41})═. In some embodiments, X⁴ is —C(—N═CH—N(CH₃)₂)═.

[0362] In some embodiments, R of X⁴ (e.g., of —C(═N—R)—, ═C(R)—, etc.) are optionally taken together with another R, e.g., of X⁵, to form a ring as described herein.

[0363] In some embodiments, R^{B4} is R′. In some embodiments, R^{B4} is R. In some embodiments, R^{B4} is —H.

In some embodiments, R^{B4} is a protecting group, e.g., an amino or hydroxyl protecting group suitable for oligonucleotide synthesis. In some embodiments, R^{B4} is R′. In some embodiments, R^{B4} is —CH₂CH₂-(4-nitrophenyl).

[0364] In some embodiments, L^{B4} is a covalent bond. In some embodiments, L^{B4} is not a covalent bond. In some embodiments, at least one methylene unit is replaced with —C(O)—. In some embodiments, at least one methylene unit is replaced with —C(O)N(R′)—. In some embodiments, at least one methylene unit is replaced with —N(R′)—. In some embodiments, at least one methylene unit is replaced with —NH—. In some embodiments, L^{B4} is or comprises optionally substituted —N═CH—.

[0365] In some embodiments, R^{B41} is R′. In some embodiments, R^{B41} is —H. In some embodiments, R^{B41} is R. In some embodiments, R is optionally substituted phenyl. In some embodiments, R is phenyl.

[0366] In some embodiments, X⁵ is —C(R^{B5})₂—. In some embodiments, X⁵ is —ChR^{B5}—. In some embodiments, X⁵ is —CH₂—. In some embodiments, X⁵ is —N(R^{B5}). In some embodiments, X⁵ is —NH—. In some embodiments, X⁵ is —C(R^{B5})═. In some embodiments, X⁵ is —C(R)═. In some embodiments, X⁵ is —CH═. In some embodiments, X⁵ is —N═. In some embodiments, X⁵ is —C(O)—.

[0367] In some embodiments, R^{B5} is halogen. In some embodiments, R^{B5} is -L^{B5}-R^{B51}. In some embodiments, R^{B5} is -L^{B5}-R^{B51} wherein R^{B51} is R′, —NHR′, —OH, or —SH. In some embodiments, R^{B5} is -L^{B5}-R^{B51}, wherein R^{B51} is —NHR, —OH, or —SH. In some embodiments, R^{B5} is -L^{B5}-R^{B51}, wherein R^{B51} is —NH₂, —OH, or —SH. In some embodiments, R^{B5} is —C(O)—R^{B51}. In some embodiments, R^{B5} is R′. In some embodiments, R^{B5} is R. In some embodiments, R^{B5} is —H. In some embodiments, R^{B5} is —OH. In some embodiments, R^{B5} is —CH₂OH.

[0368] In some embodiments, when X⁴ is —C(O)—, X⁵ is —C(R^{B5})₂—, —C(R^{B5})═, or —N(R^{B5})—, wherein R^{B5} is -L^{B5}-R^{B51}, wherein R^{B51} is —NHR′, —OH, or —SH. In some embodiments, X⁴ is —C(O)—, and R^{B51} is or comprises a hydrogen bond donor, which forms a hydrogen bond with the O of X⁴.

[0369] In some embodiments, L^{B5} is a covalent bond. In some embodiments, L^{B5} is or comprises —C(O)—. In some embodiments, L^{B5} is or comprises —O—. In some embodiments, L^{B5} is or comprises —OC(O)—. In some embodiments, L^{B5} is or comprises —CH₂OC(O)—.

[0370] In some embodiments, R⁵¹ is —R′. In some embodiments, R⁵¹ is —R. In some embodiments, R⁵¹ is —H. In some embodiments, R⁵¹ is —N(R′)₂. In some embodiments, R⁵¹ is —NHR′. In some embodiments, R⁵¹ is —NHR. In some embodiments, R⁵¹ is —NH₂. In some embodiments, R⁵¹ is —OR′. In some embodiments, R⁵¹ is —OR. In some embodiments, R⁵¹ is —OH. In some embodiments, R⁵¹ is —SR′. In some embodiments, R⁵¹ is —SR. In some embodiments, R⁵¹ is —SH. In some embodiments, R is benzyl. In some embodiments, R is optionally substituted phenyl. In some embodiments, R is phenyl. In some embodiments, R is methyl.

[0371] In some embodiments, R^{B5} is —C(O)—R^{B51}. In some embodiments, R^{B5} is —C(O)NHCH₂Ph. In some embodiments, R^{B5} is —C(O)NHPh. In some embodiments, R^{B5} is —C(O)NHCH₃. In some embodiments, R^{B5} is —OC(O)—R^{B51}. In some embodiments, R^{B5} is —OC(O)—R. In some embodiments, R^{B5} is —OC(O)CH₃.

[0372] In some embodiments, X⁵ is directly bonded to X¹, and Ring BA is 5-membered.

[0373] In some embodiments, X⁶ is —C(R^{B6})═. In some embodiments, X⁶ is —CH═. In some embodiments, X⁶ is —C(OR^{B6})═. In some embodiments, X⁶ is —C(R^{B6})₂—. In some embodiments, X⁶ is —CH₂—. In some embodiments, X⁶ is —C(O)—. In some embodiments, X⁶ is —N═.

[0374] In some embodiments, R^{B6} is -L^{B6}-R^{B61}. In some embodiments, two R^{B6} on the same atom are taken together to form ═O, ═C(-L^{B6}-R^{B61})₂, ═N-L^{B6}-R^{B61}, or optionally substituted ═CH₂ or ═NH. In some embodiments, two R^{B6} on the same atom are taken together to form ═O. In some embodiments, L^{B6} is a covalent bond. In some embodiments, R^{B6} is R. In some embodiments, R^{B6} is —H.

[0375] In some embodiments, R^{B6} is a protecting group, e.g., an amino or hydroxyl protecting group suitable for oligonucleotide synthesis. In some embodiments, R^{B6} is R. In some embodiments,

[0376] In some embodiments, L^{B6} is a covalent bond. In some embodiments, L^{B6} is optionally substituted C₁₋₁₀ alkylene. In some embodiments, L^{B6} is —CH₂CH₂—. In some embodiments, R^{B6} is —CH₂CH₂-(4-nitrophenyl).

[0377] In some embodiments, R^{B61} is R′. In some embodiments, R^{B61} is R. In some embodiments, R^{B61} is —H.

[0378] In some embodiments, Ring BA^{A} is 5-membered. In some embodiments, Ring BA^{A} is 5-membered. In some embodiments, Ring BA^{A} has one heteroatom. In some embodiments, Ring BA^{A} has 2 heteroatoms. In some embodiments, a heteroatom is nitrogen. In some embodiments, a heteroatom is oxygen.

[0379] In some embodiments, X^{1′} is —(N—)—. In some embodiments, X^{1′} is —C(−)═.

[0380] In some embodiments, X^{2′} is —C(O)—. In some embodiments, X^{2′} is —C(R^{B2′})═. In some embodiments, X^{2′} is —CH═.

[0381] In some embodiments, L^{B2′} is a covalent bond.

[0382] In some embodiments, R^{B2′} is R′. In some embodiments, R^{B2′} is R. In some embodiments, R^{B2′} is —H. In some embodiments, X^{2′} is —CH═.

[0383] In some embodiments, X^{3′} is —N(R^{B3′})—. In some embodiments, X^{3′} is —N(R′)—. In some embodiments, X^{3′} is —NH—. In some embodiments, X^{3′} is —N═.

[0384] In some embodiments, L^{B3′} is a covalent bond.

[0385] In some embodiments, R^{B3′} is R′. In some embodiments, R^{B3′} is R. In some embodiments, R^{B3′} is —H.

[0386] In some embodiments, X⁴ is —C(R^{B4′})═. In some embodiments, X^{4′} is —C(OR^{B4′})═. In some embodiments, X^{4′} is —C(—N(R^{B4′})₂)═. In some embodiments, X⁴ is —C(—NHR^{B4′})═. In some embodiments, X^{4′} is —C(—NH₂)═. In some embodiments, X^{4′} is —C(—NHR′)═. In some embodiments, X^{4′} is —C(—NHC(O)R)═. In some embodiments, X^{4′} is —C(R^{B4′})₂—. In some embodiments, X^{4′} is —C(O)—. In some embodiments, X^{4′} is —C(═NR^{B4′})—.

[0387] In some embodiments, R^{B4′} is -L^{B4′}-R^{B41′}. In some embodiments, two R^{B4′} on the same atom are taken together to form ═O, ═C(-L^{B4′}-R^{B41′})₂, ═N-L^{B4′} R^{B41}, or optionally substituted ═CH₂ or ═NH. In some embodiments, two R^{B4′} on the same atom are taken together to form ═O. In some embodiments, two R^{B4′} on the same atom are taken together to form ═C(-L^{B4′}-R^{B41′})₂. In some embodiments, two R^{B4′} on the same atom are taken together to form ═N-L^{B4′}-R^{B41′}. In some embodiments, two R^{B4′} on the same atom are taken together to form ═CH₂. In some embodiments, two R^{B4′} on the same atom are taken together to form ═NH. In some embodiments, a formed group is a suitable protecting group, e.g., amino protecting group, for oligonucleotide synthesis.

[0388] In some embodiments, X^{4′} is —C(—N═C(-L^{B4′}-R^{B41′})₂)═. In some embodiments, X^{4′} is —C(—N═CH-L^{B4′}-R^{B41′})═. In some embodiments, X^{4′} is —C(—N═CH—N(CH₃)₂)═.

[0389] In some embodiments, R^{B4′} is R′. In some embodiments, R^{B4′} is R. In some embodiments, R^{B4′} is —H.

[0390] In some embodiments, R^{B4′} is a protecting group, e.g., an amino or hydroxyl protecting group suitable for oligonucleotide synthesis. In some embodiments, R^{B4′} is R′. In some embodiments, R^{B4′} is —CH₂CH₂-(4-nitrophenyl).

[0391] In some embodiments, L^{B4′} is a covalent bond. In some embodiments, L^{B4′} is optionally substituted C₁₋₁₀ alkylene. In some embodiments, L^{B4′} is —CH₂CH₂—. In some embodiments, at least one methylene unit is replaced with —N(R′)—. In some embodiments, R′ is R. In some embodiments, R is optionally substituted phenyl. In some embodiments, R is phenyl. In some embodiments, R is methyl. In some embodiments, R is —H.

[0392] In some embodiments, R^{B41′} is R′. In some embodiments, R^{B41′} is R. In some embodiments, R^{B41′} is —H.

[0393] In some embodiments, X⁵′ is —N(R^{B5′}). In some embodiments, X⁵′ is —NH—. In some embodiments, X⁵′ is —N═.

[0394] In some embodiments, L^{B5′} is a covalent bond.

[0395] In some embodiments, R^{B5′} is R′. In some embodiments, R^{B5′} is R. In some embodiments, R^{B5′} is —H.

[0396] In some embodiments, X^{6′} is —C(R^{B6′})═. In some embodiments, X^{6′} is —CH═. In some embodiments, X^{6′} is —C(OR^{B6′})═. In some embodiments, X^{6′} is —C(R^{B6′})₂—. In some embodiments, X^{6′} is —C(O)—. In some embodiments, X^{6′} is —N═.

[0397] In some embodiments, R^{B6}′ is L^{B6′}-R^{B61′}. In some embodiments, two R^{B6′} on the same atom are taken together to form ═O, ═C(-L^{B6′}-R^{B61′})₂, ═N-L^{B6′}-R^{B61′}, or optionally substituted ═CH₂ or ═NH. In some embodiments, two R^{B6′} on the same atom are taken together to form ═O.

[0398] In some embodiments, L^{B6′} is a covalent bond. In some embodiments, L^{B6′} is optionally substituted C₁₋₁₀ alkylene. In some embodiments, L^{B6}′ is —CH₂CH₂—.

[0399] In some embodiments, R^{B6′} is R′. In some embodiments, R^{B6′} is R. In some embodiments, R^{B6′} is —H. In some embodiments, R^{B6}′ is a protecting group, e.g., an amino or hydroxyl protecting group suitable for oligonucleotide synthesis. In some embodiments, R^{B6′} is R′. In some embodiments, R^{B6′} is —CH₂CH₂-(4-nitrophenyl).

[0400] In some embodiments, R^{B61′} is R′. In some embodiments, R^{B61′} is R. In some embodiments, R^{B61′} is —H.

[0401] In some embodiments, X^{7′} is —C(R^{B7′})═. In some embodiments, X^{7′} is —CH═. In some embodiments, X^{7′} is —C(OR^{B7′})═. In some embodiments, X^{7′} is —C(R^{B7′})₂—. In some embodiments, X^{7′} is —C(O)—. In some embodiments, X^{7′} is —N(R^{B7′})—. In some embodiments, X^{7′} is —NH—. In some embodiments, X^{7′} is —N═.

[0402] In some embodiments, R^{B7′} is -L^{7′}-R^{B71′}. In some embodiments, two R^{B7′} on the same atom are taken together to form ═O, ═C(-L^{7′}-R^{B71′})₂, ═N-L^{7′}-R^{B71′}, or optionally substituted ═CH₂ or ═NH. In some embodiments, two R^{B7′} on the same atom are taken together to form ═O. In some embodiments, L^{7′} is a covalent bond. In some embodiments, R^{B7′} is R. In some embodiments, R^{B7′} is —H.

[0403] In some embodiments, R^{B71′} is R′. In some embodiments, R^{B71′} is R. In some embodiments, R^{B71′} is —H.

[0404] In some embodiments, L^{B} is a covalent bond. In some embodiments, L^{B} is an optionally substituted bivalent C₁₋₁₀ saturated or partially unsaturated aliphatic chain, wherein one or more methylene unit is optionally and independently replaced with -Cy-, —O—, —S—, —N(R′)—, —C(O)—, —C(S)—, —C(NR′)—, —C(O)N(R′)—, —N(R′)C(O)N(R′)—, —N(R′)C(O)O—, —S(O)—, —S(O)₂—, —S(O)₂N(R′)—, —C(O)S—, or —C(O)O—. In some embodiments, L^{B} is an optionally substituted bivalent C₁₋₁₀ saturated or partially unsaturated heteroaliphatic chain having 1-6 heteroatoms, wherein one or more methylene unit is optionally and independently replaced with -Cy-, —O—, —S—, —N(R′)—, —C(O)—, —C(S)—, —C(NR′)—, —C(O)N(R′)—, —N(R′)C(O)N(R′)—, —N(R′)C(O)O—, —S(O)—, —S(O)₂—, —S(O)₂N(R′)—, —C(O)S—, or —C(O)O—. In some embodiments, at least methylene unit is replaced. In some embodiments, L^{B} is optionally substituted C₁₋₁₀ alkylene. In some embodiments, L^{B} is —CH₂CH₂—. In some embodiments, at least one methylene unit is replaced with —C(O)—. In some embodiments, at least one methylene unit is replaced with —C(O)N(R′)—. In some embodiments, at least one methylene unit is replaced with —N(R′)—. In some embodiments, at least one methylene unit is replaced with —NH—. In some embodiments, at least one methylene unit is replaced with -Cy-. In some embodiments, L^{B} is or comprises optionally substituted —N═CH—. In some embodiments, L^{B} is or comprises —C(O)—. In some embodiments, L^{B} is or comprises —O—. In some embodiments, L^{B} is or comprises —OC(O)—. In some embodiments, L^{B} is or comprises —CH₂OC(O)—.

[0405] In some embodiments, each -Cy- is independently an optionally substituted, 3-20 membered, monocyclic, bicyclic or polycyclic, saturated, partially saturated or aromatic ring having 0-10 heteroatoms. Suitable monocyclic unit(s) of -Cy- are described herein. In some embodiments, -Cy- is monocyclic. In some embodiments, -Cy- is bicyclic. In some embodiments, -Cy- is polycyclic. In some embodiments, -Cy- is an optionally substituted bivalent 3-10 membered monocyclic, saturated or partially unsaturated ring having 0-5 heteroatoms. In some embodiments, -Cy- is an optionally substituted bivalent 5-10 membered aromatic ring having 0-5 heteroatoms. In some embodiments, -Cy- is optionally substituted phenylene. In some embodiments, -Cy- is phenylene.

[0406] In some embodiments, R′ is R. In some embodiments, R′ is —C(O)R. In some embodiments, R′ is —C(O)OR. In some embodiments, R′ is —C(O)N(R)₂. In some embodiments, R′ is —SO₂R.

[0407] In some embodiments, R′ in various structures is a protecting group (e.g., for amino, hydroxyl, etc.), e.g., one suitable for oligonucleotide synthesis. In some embodiments, R is optionally substituted phenyl. In some embodiments, R is phenyl. In some embodiments, R is 4-nitrophenyl. In some embodiments, R is —CH₂CH₂-(4-nitrophenyl). In some embodiments, R′ is —C(O)NPh₂.

[0408] In some embodiments, each R is independently —H, or an optionally substituted group selected from C₁₋₂₀ aliphatic, C₁₋₂₀ heteroaliphatic having 1-10 heteroatoms, C₆₋₃₀ aryl, C₆₋₃₀ arylaliphatic, C₆₋₃₀ arylheteroaliphatic having 1-10 heteroatoms, 5-20 membered heteroaryl having 1-10 heteroatoms, and 3-30 membered heterocyclyl having 1-10 heteroatoms. In some embodiments, two R groups are optionally and independently taken together to form a covalent bond. In some embodiments, two or more R groups on the same atom are optionally and independently taken together with the atom to form an optionally substituted, 3-20 membered, monocyclic, bicyclic or polycyclic ring having, in addition to the atom, 0-10 heteroatoms. In some embodiments, two groups on the same atom are optionally and independently taken together with the atom to form an optionally substituted, 3-20 membered, monocyclic, bicyclic or polycyclic ring having, in addition to the atom, 0-10 heteroatoms. In some embodiments, two or more R groups on two or more atoms are optionally and independently taken together with their intervening atoms to form an optionally substituted, 3-30 membered, monocyclic, bicyclic or polycyclic ring having, in addition to the intervening atoms, 0-10 heteroatoms. In some embodiments, two groups on two or more atoms are optionally and independently taken together with their intervening atoms to form an optionally substituted, 3-30 membered, monocyclic, bicyclic or polycyclic ring having, in addition to the intervening atoms, 0-10 heteroatoms. In some embodiments, a formed ring is monocyclic. In some embodiments, a formed ring is bicyclic. In some embodiments, a formed ring is polycyclic. In some embodiments, each monocyclic ring unit is independently 3-10 (e.g., 3-8, 3-7, 3-6, 5-10, 5-8, 5-7, 5-6, 3, 4, 5, 6, 7, 8, 9, or 10, etc.) membered, and is independently saturated, partially saturated, or aromatic, and independently has 0-5 heteroatom. In some embodiments, a ring is saturated. In some embodiments, a ring is partially saturated. In some embodiments, a ring is aromatic. In some embodiments, a formed ring has 1-5 heteroatom. In some embodiments, a formed ring has 1 heteroatom. In some embodiments, a formed ring has 2 heteroatoms. In some embodiments, a heteroatom is nitrogen. In some embodiments, a heteroatom is oxygen.

[0409] In some embodiments, R is —H.

[0410] In some embodiments, R is optionally substituted C₁₋₂₀, C₁₋₁₅, C₁₋₁₀, C₁₋₈, C₁₋₆, C₁₋₅, C₁₋₄, C₁₋₃, or C₁₋₂ aliphatic. In some embodiments, R is optionally substituted alkyl. In some embodiments, R is optionally substituted C₁₋₆ alkyl. In some embodiments, R is optionally substituted methyl. In some embodiments, R is optionally substituted cycloaliphatic. In some embodiments, R is optionally substituted cycloalkyl.

[0411] In some embodiments, R is optionally substituted C₁₋₂₀ heteroaliphatic having 1-10 heteroatoms.

[0412] In some embodiments, R is optionally substituted C₆₋₂₀ aryl. In some embodiments, R is optionally substituted phenyl. In some embodiments, R is phenyl.

[0413] In some embodiments, R is optionally substituted C₆₋₂₀ arylaliphatic. In some embodiments, R is optionally substituted C₆₋₂₀ arylalkyl. In some embodiments, R is benzyl. In some embodiments, R is optionally substituted C₆₋₂₀ arylheteroaliphatic having 1-10 heteroatoms.

[0414] In some embodiments, R is optionally substituted 5-20 membered heteroaryl having 1-10 heteroatoms. In some embodiments, R is optionally substituted 5-membered heteroaryl having 1-4 heteroatoms. In some embodiments, R is optionally substituted 6-membered heteroaryl having 1-4 heteroatoms. In some embodiments, R is optionally substituted 3-20 membered heterocyclyl having 1-10 heteroatoms. In some embodiments, R is optionally substituted 3-10 membered heterocyclyl having 1-5 heteroatoms. In some embodiments, R is optionally substituted 5-6 membered heterocyclyl having 1-5 heteroatoms. In some embodiments, a heterocyclyl is saturated. In some embodiments, a heterocyclyl is partially saturated.

[0415] In some embodiments, a heteroatom is selected from boron, nitrogen, oxygen, sulfur, silicon and phosphorus. In some embodiments, a heteroatom is selected from nitrogen, oxygen, sulfur, and silicon. In some embodiments, a heteroatom is selected from nitrogen, oxygen, and sulfur. In some embodiments, a heteroatom is nitrogen. In some embodiments, a heteroatom is oxygen. In some embodiments, a heteroatom is sulfur.

[0416] As appreciated by those skilled in the art, embodiments described for variables can be readily combined to provide various structures. Those skilled in the art also appreciates that embodiments described for a variable can be readily utilized for other variables that can be that variable, e.g., embodiments of R for R′ R^{B2}, R^{B3}, R^{B4}, R^{B5}, R^{B6}, R^{B2′}, R^{B3′}, R^{B4′}, R^{B5′}, R^{B6′}, etc.; embodiments of embodiments of L^{B} for L^{B2}, L^{B3}, L^{B4}, L^{B5}, L^{B6}, L^{B2′}, L^{B3′}, L^{B4′}, L^{B5′}, L^{B6′}, etc. Exemplary embodiments and combinations thereof include but are not limited to structures exemplified herein. Certain examples are described below.

[0417] For example, in some embodiments, Ring BA is optionally substituted or protected

[chemical structure]

In some embodiments, Ring BA is

[chemical structure]

In some embodiments, Ring BA is

[chemical structure]

[0418] In some embodiments, X⁴ is —C(O)—, and O in —C(O)— of X⁴ may form a hydrogen bond with a —H of R⁵, e.g., a —H in —NHR′, —OH, or —SH of R⁵′. In some embodiments, X⁴ is —C(O)—, and X⁵ is —C(R⁵)═. In some embodiments, R⁵′ is —NHR′. In some embodiments, R⁵ is -L^{B5}-NHR′. In some embodiments, L^{B5} is optionally substituted —CH₂—. In some embodiments, a methylene unit is replaced with —C(O)—. In some embodiments, L^{B5} is —C(O)—. In some embodiments, R′ is optionally substituted methyl. In some embodiments, R′ is —CH₂Ph. In some embodiments, R′ is optionally substituted phenyl. In some embodiments, R′ is phenyl. In some embodiments, R′ is optionally substituted C₁₋₆ aliphatic. In some embodiments, R′ is optionally substituted C₁₋₆ alkyl. In some embodiments, R′ is optionally substituted methyl. In some embodiments, R′ is methyl. In some embodiments, Ring BA is optionally protected

[chemical structure]

In some embodiments, Ring BA is

[chemical structure]

In some embodiments, Ring BA is optionally protected

[chemical structure]

In some embodiments, Ring BA is

[chemical structure]

In some embodiments, Ring BA is optionally protected

[chemical structure]

In some embodiments, Ring BA is

[chemical structure]

In some embodiments, Ring BA is optionally protected

[chemical structure]

In some embodiments, Ring BA is

[chemical structure]

In some embodiments, Ring BA is optionally protected

[chemical structure]

In some embodiments, Ring BA is

[chemical structure]

In some embodiments, Ring BA is optionally protected

[chemical structure]

In some embodiments, Ring BA is

[chemical structure]

In some embodiments, Ring BA is optionally protected

[chemical structure]

In some embodiments, Ring BA is

[chemical structure]

[0419] In some embodiments, X¹ is —C(−)═, and X⁴ is ═C(—N(R^{B4})₂)—. In some embodiments, two R groups on the same atom, e.g., a nitrogen atom, are taken together to form optionally substituted ═CH₂ or ═NH. In some embodiments, two R groups on the same atom, e.g., a nitrogen atom, are taken together to form optionally substituted ═C(-L^{B4}-R)₂, ═N-L^{B4}-R. In some embodiments, a formed group is ═CHN(R)₂. In some embodiments, a formed group is ═CHN(CH₃)₂. In some embodiments, X⁴ is ═C(—N═CHN(CH₃)₂)—. In some embodiments, —N(R^{B4})₂ is —NR^{B4}. In some embodiments, R^{B4} is —NHC(O)R. In some embodiments, Ring BA is optionally substituted or protected

[chemical structure]

In some embodiments, Ring BA is

[chemical structure]

In some embodiments, Ring BA is

[chemical structure]

[0420] In some embodiments, X¹ is —N(−)—, X² is —C(O)—, and X³ is —N(R^{B3})—. In some embodiments, X¹ is —N(−)—, X² is —C(O)—, X³ is —N(R^{B3})—, and X⁴ is —C(R^{B4})═. In some embodiments, X¹ is —N(−)—, X² is —C(O)—, X³ is —N(R^{B3})—, X⁴ is —C(R^{B4})═, and X⁵ is —C(R^{B5})═. In some embodiments, Ring BA is optionally substituted or protected

[chemical structure]

In some embodiments, Ring BA is

[chemical structure]

[0421] In some embodiments, X³ is —N(R′)—. In some embodiments, R′ is —C(O)R. In some embodiments, X⁴ is —C(R^{B4})₂—. In some embodiments, R^{B4} is —R. In some embodiments, R^{B4} is —H. In some embodiments, X⁴ is —CH₂—. In some embodiments, X⁵ is —C(R^{B5})₂—. In some embodiments, R^{B5} is —R. In some embodiments, R^{B5} is —H. In some embodiments, X⁵ is —CH₂—. In some embodiments, Ring BA is optionally substituted or protected

[chemical structure]

In some embodiments, Ring BA is

[chemical structure]

In some embodiments, Ring BA is

[chemical structure]

[0422] In some embodiments, X⁴ is —C(R^{B4})═. In some embodiments, X⁴ is —CH═. In some embodiments, X⁵ is —C(R^{B5})═. In some embodiments, X⁵ is —CH═. In some embodiments, Ring BA is optionally substituted or protected

[chemical structure]

In some embodiments, Ring BA is

[chemical structure]

In some embodiments, Ring BA is optionally substituted or protected

[chemical structure]

In some embodiments, Ring BA is

[chemical structure]

[0423] In some embodiments, X⁴ is —C(R^{B4})₂—. In some embodiments, X⁴ is —CH₂—. In some embodiments, X⁵ is —C(R^{B5})═. In some embodiments, X⁵ is —CH═. In some embodiments, Ring BA is optionally substituted or protected

[chemical structure]

In some embodiments, Ring BA is

[chemical structure]

In some embodiments, Ring BA is

[chemical structure]

[0424] In some embodiments, X¹ is —N(−)—, X² is —C(O)—, X³ is —N(R^{B3})—, X⁴ is —C(R^{B4})═, X⁵ is —C(R^{B5})═, X⁶ is —C(O)—. In some embodiments, each of R^{B3}, R^{B4} and R^{B5} is independently R. In some embodiments, R^{B3} is —H. In some embodiments, R^{B4} is —H. In some embodiments, R^{B5} is —H. In some embodiments, BA is or comprises optionally substituted or protected

[chemical structure]

In some embodiments, BA is

[chemical structure]

[0425] In some embodiments, X¹ is —N(−)—, X² is —C(O)—, X³ is —N(R^{B3})—. In some embodiments, X⁴ is —C(R^{B4})₂—, wherein the two R^{B4} are taken together to form ═O, or ═C(-L^{B4}-R^{B41})₂, ═N-L^{B4}-R^{B41}. In some embodiments, X⁴ is —C(═NR^{B4})—. In some embodiments, X⁵ is —C(R^{B5})═. In some embodiments, R^{B41} or R^{B4} and R^{B5} are R, and are taken together with their intervening atoms to form an optionally substituted ring as described herein. In some embodiment, Ring BA is optionally substituted or protected

[chemical structure]

In some embodiment, Ring BA is

[chemical structure]

In some embodiment, Ring BA is optionally substituted or protected

[chemical structure]

In some embodiment, Ring BA is

[chemical structure]

In some embodiments, X¹ is —N(−)—, X² is —C(O)—, X³ is —N═. In some embodiments, X⁴ is —C(—N(R^{B4})₂)═. In some embodiments, X⁴ is —C(—NHR^{B4})═. In some embodiments, X⁵ is —C(R^{B5})═. In some embodiments, one R^{B4} and R^{B5} are taken together to form an optionally substituted ring as described herein. In some embodiments, a formed ring is an optionally substituted 5-membered ring having a nitrogen atom. In some embodiment, Ring BA is optionally substituted or protected

[chemical structure]

In some embodiment, Ring BA is

[chemical structure]

In some embodiment, Ring BA is optionally substituted or protected

[chemical structure]

In some embodiment, Ring BA is

[chemical structure]

In some embodiment, Ring BA is optionally substituted or protected

[chemical structure]

In some embodiment, Ring BA is

[chemical structure]

In some embodiment, Ring BA is optionally substituted or protected

[chemical structure]

In some embodiment, Ring BA is

[chemical structure]

[0426] In some embodiments, Ring BA has the structure of formula BA-IV or BA-V. In some embodiments, X¹ is —N(−)—, X² is —C(O)—, and X³ is —N═. In some embodiments, X¹ is —N(−)—, X² is —C(O)—, X³ is —N═, and X⁶ is —C(R^{B6})═. In some embodiments, Ring BA^{A} is 5-6 membered. In some embodiments, Ring BA^{A} is monocyclic. In some embodiments, Ring BA^{A} is partially unsaturated. In some embodiments, Ring BA^{A} is aromatic. In some embodiments, Ring BA^{A} has 0-2 heteroatoms. In some embodiments, Ring BA^{A} has 1-2 heteroatoms. In some embodiments, Ring BA^{A} has one heteroatom. In some embodiments, Ring BA^{A} has 2 heteroatoms. In some embodiments, a heteroatom is nitrogen. In some embodiments, heteroatom is oxygen. In some embodiments, Ring BA is optionally substituted or protected

[chemical structure]

In some embodiments, Ring BA is

[chemical structure]

[0427] In some embodiments, Ring BA is an optionally substituted 5-membered ring. In some embodiments, X¹ is bonded to X⁵. In some embodiments, each of X⁴ and X⁵ is independently —CH═. In some embodiments, X¹ is —N(−)—, X² is —C(O)—, X³ is —NH—, X⁴ is —CH═, and X⁵ is —CH═. In some embodiments, Ring BA is optionally substituted or protected

[chemical structure]

In some embodiments, Ring BA is

[chemical structure]

[0428] In some embodiments, Ring BA has the structure of formula BA-VI. In some embodiments, X^{1′} is —N(−)—, X^{2′} is —C(O)— and X^{3′} is —N(R^{B3})—. In some embodiments, X^{1′} is —N(−)—, X^{2′} is —C(O)—, X^{3′} is —N(R^{B3})—, X^{4′} is —C(R^{B4′})═, X^{5′} is —N═, X^{6′} is —C(R^{B6′})═, and X^{7′} is —N═. In some embodiments, X^{1′} is —N(−)—, X^{2′} is —C(O)—, X^{3′} is —N(R^{B3})—, X^{4′} is —C(R^{B4′})═, X^{5′} is —C(R^{B5′})═, X^{6′} is —C(R^{B6′})═, and X^{7′} is —C(R^{B7′})═. In some embodiments, Ring BA is optionally substituted or protected

[chemical structure]

In some embodiments, Ring BA is

[chemical structure]

In some embodiments, Ring BA is optionally substituted or protected

[chemical structure]

In some embodiments, Ring BA is

[chemical structure]

In some embodiments, Ring BA is

[chemical structure]

In some embodiments, Ring BA is optionally substituted or protected

[chemical structure]

In some embodiments, Ring BA is

[chemical structure]

In some embodiments, Ring BA is

[chemical structure]

In some embodiments, Ring BA is optionally substituted or protected

[chemical structure]

In some embodiments, Ring BA is

[chemical structure]

In some embodiments, Ring BA is

[chemical structure]

In some embodiments, Ring BA is optionally substituted or protected

[chemical structure]

In some embodiments, Ring BA is

[chemical structure]

In some embodiments, Ring BA is optionally substituted or protected

[chemical structure]

In some embodiments, Ring BA is

[chemical structure]

In some embodiments, X^{1′} is —N(−)—, X^{2′} is —C(R^{B2′})═, and X^{3′} is —N═. In some embodiments, X^{1′} is —N(−)—, X^{2′} is —C(R^{B2′})═, X^{3′} is —N═, X^{4′} is —C(—N(R^{B4′})₂)═, X^{5′} is —N═, X^{6′} is —C(O)—, and X^{7′} is —N(R^{B7′})—. In some embodiments, Ring BA is optionally substituted or protected

[chemical structure]

In some embodiments, Ring BA is

[chemical structure]

[0429] In some embodiments, X¹ is —C(−)═, X² is —C(O)—, and X³ is —N(R^{B3})—. In some embodiments, X¹ is —C(−)═, X² is —C(O)—, X³ is —N(R^{B3})—, —C(—N(R^{B4})₂)═, and X⁴ is —C(R^{B4})═. In some embodiments, X¹ is —C(−)═, X² is —C(O)—, X³ is —N(R^{B3})—, —C(—N(R^{B4})₂)═, X⁴ is —C(R^{B4})═, and X⁶ is —C(R^{B6})═. In some embodiments, each of R^{B3}, R^{B4}, and R^{B6} is independently —H. In some embodiments, Ring BA is optionally substituted or protected

[chemical structure]

In some embodiments, Ring BA is

[chemical structure]

In some embodiments, Ring BA is optionally substituted or protected

[chemical structure]

In some embodiments, Ring BA is

[chemical structure]

[0430] In some embodiments, Ring BA has the structure of

[chemical structure]

In some embodiments, R^{B4} is optionally substituted aryl. In some embodiments, R^{B4} is optionally substituted

[chemical structure]

In some embodiments, R^{B4} is N

[chemical structure]

In some embodiments, R^{B5} is —H. In some embodiments, R^{B5} is —N(R′)₂. In some embodiments, R^{B5} is —NH₂. In some embodiments, Ring BA is

[chemical structure]

In some embodiments, Ring BA is

[chemical structure]

[0431] As described herein, Ring BA may be optionally substituted. In some embodiments, each of X², X³, X⁴, X⁵, X⁶, X^{2′}, X^{3′}, X^{4′}, X^{5′}, X^{6′}, and X^{7′} is independently and optionally substituted when it is —CH═, —C(OH)═, —C(—NH₂)═, —CH₂—, —C(═NH)—, or —NH—. In some embodiments, each of X², X³, X⁴, X⁵, X⁶, X^{2′}, X^{3′}, X^{4′}, X^{5′}, X^{6′}, and X^{7′} is independently and optionally substituted when it is —CH═, —CH₂—, or —NH—. In some embodiments, each of X², X³, X⁴, X⁵, X⁶, X^{2′}, X^{3′} X^{4′}, X^{5′}, X^{6′}, and X^{7′} is independently and optionally substituted when it is —CH═. In some embodiments, each of X², X³, X⁴, X⁵, X⁶, X^{2′}, X^{3′}, X^{4′}, X^{5′}, X^{6′}, and X^{7′} is independently and optionally substituted when it is —CH₂—. In some embodiments, each of X², X³, X⁴, X⁵, X⁶, X^{2′}, X^{3′}, X^{4′}, X^{5′}, X^{6′}, and X^{7′} is independently and optionally substituted when it is —NH—. In some embodiments, X² is optionally substituted —CH═, —C(OH)═, —C(—NH₂)═, —CH₂—, —C(═NH)—, or —NH—. In some embodiments, X³ is optionally substituted —CH═, —C(OH)═, —C(—NH₂)═, —CH₂—, —C(═NH)—, or —NH—. In some embodiments, X⁴ is optionally substituted —CH═, —C(OH)═, —C(—NH₂)═, —CH₂—, —C(═NH)—, or —NH—. In some embodiments, X⁵ is optionally substituted —CH═, —C(OH)═, —C(—NH₂)═, —CH₂—, —C(═NH)—, or —NH—. In some embodiments, X⁶ is optionally substituted —CH═, —C(OH)═, —C(—NH₂)═, —CH₂—, —C(═NH)—, or —NH—. In some embodiments, X^{2′} is optionally substituted —CH═, —C(OH)═, —C(—NH₂)═, —CH₂—, —C(═NH)—, or —NH—. In some embodiments, X^{3′} is optionally substituted —CH═, —C(OH)═, —C(—NH₂)═, —CH₂—, —C(═NH)—, or —NH—. In some embodiments, X^{4′} is optionally substituted —CH═, —C(OH)═, —C(—NH₂)═, —CH₂—, —C(═NH)—, or —NH—. In some embodiments, X^{5′} is optionally substituted —CH═, —C(OH)═, —C(—NH₂)═, —CH₂—, —C(═NH)—, or —NH—. In some embodiments, X^{6′} is optionally substituted —CH═, —C(OH)═, —C(—NH₂)═, —CH₂—, —C(═NH)—, or —NH—. In some embodiments, X^{7′} is optionally substituted —CH═, —C(OH)═, —C(—NH₂)═, —CH₂—, —C(═NH)—, or —NH—.

[0432] As demonstrated herein, in some embodiments provided oligonucleotides comprising certain nucleobases (e.g., b001A, b002A, b008U, C, A, etc.) opposite to target adenosines can among other things provide improved editing efficiency (e.g., compared to a reference nucleobase such as U). In some embodiments, an opposite nucleoside is linked to an I to its 3′ side.

[0433] In some embodiments, a nucleobase is Ring BA as described herein. In some embodiments, an oligonucleotide comprises one or more Ring BA as described herein.

[0434] In some embodiments, an opposite nucleoside is abasic, e.g., having the structure of L010

[chemical structure]

As appreciated by those skilled in the art and demonstrated in various oligonucleotides, abasic nucleosides may also be utilized in other portions of oligonucleotides, and oligonucleotides may comprise one or more (e.g., 1, 2, 3, 4, 5, or more), optionally consecutive, abasic nucleosides. In some embodiments, a first domain comprises one or more optionally consecutive, abasic nucleosides. In some embodiments, an oligonucleotide comprises one and no more than one abasic nucleoside. In some embodiments, each abasic nucleoside is independently in a first domain or a first subdomain of a second domain. In some embodiments, each abasic nucleoside is independently in a first domain. In some embodiments, each abasic nucleoside is independently in a first subdomain of a second domain. In some embodiments, an abasic nucleoside is opposite to a target adenosine. As demonstrated herein, a single abasic nucleoside may replace one or more nucleosides each of which independently comprises a nucleobase in a reference oligonucleotide, for example, L010 may be utilized to replace 1 nucleoside which comprises a nucleobase, L012 may be utilized to replace 1, 2 or 3 nucleosides each of which independently comprises a nucleobase, and L028 may be utilized to replace 1, 2 or 3 nucleosides each of which independently comprises a nucleobase. In some embodiments, a basic nucleoside is linked to its 3′ immediate nucleoside (which is optionally abasic) through a stereorandom linkage (e.g., a stereorandom phosphorothioate internucleotidic linkage). In some embodiments, each basic nucleoside is independently linked to its 3′ immediate nucleoside (which is optionally abasic) through a stereorandom linkage (e.g., a stereorandom phosphorothioate internucleotidic linkage).

[0435] In some embodiments, a modified nucleobase opposite to a target adenine can greatly improve properties and/or activities of an oligonucleotide. In some embodiments, a modified nucleobase at the opposite position can provide high activities even when there is a G next to it (e.g., at the 3′ side), and/or other nucleobases, e.g. C, provide much lower activities or virtually no detect activates.

[0436] In some embodiments, a second domain comprises one or more sugars comprising two 2′-H (e.g., natural DNA sugars). In some embodiments, a second domain comprises one or more sugars comprising 2′-OH (e.g., natural RNA sugars). In some embodiments, a second domain comprises one or more modified sugars. In some embodiments, a modified sugar comprises a 2′-modification. In some embodiments, a modified sugar is a bicyclic sugar, e.g., a LNA sugar. In some embodiments, a modified sugar is an acyclic sugar (e.g., by breaking a C2-C3 bond of a corresponding cyclic sugar).

[0437] In some embodiments, a second domain comprises about 1-50 (e.g., about 5, 6, 7, 8, 9, or 10-about 10, 11, 12, 13, 14, 15, 16, 17, 18, 19, 20, 21, 22, 23, 24, 25, 30, 40 or 50, or about 5, 6, 7, 8, 9, 10, 11, 12, 13, 14, 15, 16, 17, 18, 19, 20, 21, 22, 23, 24, 25, 30, 40 or 50, etc., about 1, 2, 3, 4, 5, 6, 7, 8, 9, 10, 11, 12, 13, 14, 15, 16, 17, 18, 19, or 20, etc.) modified sugars. In some embodiments, a second domain comprises about 1-50 (e.g., about 5, 6, 7, 8, 9, or 10-about 10, 11, 12, 13, 14, 15, 16, 17, 18, 19, 20, 21, 22, 23, 24, 25, 30, 40 or 50, or about 5, 6, 7, 8, 9, 10, 11, 12, 13, 14, 15, 16, 17, 18, 19, 20, 21, 22, 23, 24, 25, 30, 40 or 50, etc., about 1, 2, 3, 4, 5, 6, 7, 8, 9, 10, 11, 12, 13, 14, 15, 16, 17, 18, 19, or 20, etc.) modified sugars which are independently bicyclic sugars (e.g., a LNA sugar) or a 2′-OR modified sugars, wherein R is independently optionally substituted C₁₋₆ aliphatic. In some embodiments, a second domain comprises about 1-50 (e.g., about 5, 6, 7, 8, 9, or 10-about 10, 11, 12, 13, 14, 15, 16, 17, 18, 19, 20, 21, 22, 23, 24, 25, 30, 40 or 50, or about 5, 6, 7, 8, 9, 10, 11, 12, 13, 14, 15, 16, 17, 18, 19, 20, 21, 22, 23, 24, 25, 30, 40 or 50, etc., about 1, 2, 3, 4, 5, 6, 7, 8, 9, 10, 11, 12, 13, 14, 15, 16, 17, 18, 19, or 20, etc.) modified sugars which are independently 2′-OR modified sugars, wherein R is independently optionally substituted C₁₋₆ aliphatic. In some embodiments, the number is 1. In some embodiments, the number is 2. In some embodiments, the number is 3. In some embodiments, the number is 4. In some embodiments, the number is 5. In some embodiments, the number is 6. In some embodiments, the number is 7. In some embodiments, the number is 8. In some embodiments, the number is 9. In some embodiments, the number is 10. In some embodiments, the number is 11. In some embodiments, the number is 12. In some embodiments, the number is 13. In some embodiments, the number is 14. In some embodiments, the number is 15. In some embodiments, the number is 16. In some embodiments, the number is 17. In some embodiments, the number is 18. In some embodiments, the number is 19. In some embodiments, the number is 20. In some embodiments, R is methyl.

[0438] In some embodiments, about 5%-100%, (e.g., about 10%-100%, 20-100%, 30%-100%, 40%-100%, 50%-80%, 50%-85%, 50%-90%, 50%-95%, 60%-80%, 60%-85%, 60%-90%, 60%-95%, 60%-100%, 65%-80%, 65%-85%, 65%-90%, 65%-95%, 65%-100%, 70%-80%, 70%-85%, 70%-90%, 70%-95%, 70%-100%, 75%-80%, 75%-85%, 75%-90%, 75%-95%, 75%-100%, 80%-85%, 80%-90%, 80%-95%, 80%-100%, 85%-90%, 85%-95%, 85%-100%, 90%-95%, 90%-100%, 10%, 20%, 30%, 40%, 50%, 60%, 65%, 70%, 75%, 80%, 85%, 90%, 95%, or 100%, etc.) of all sugars in a second domain are independently a modified sugar. In some embodiments, about 5%-100% (e.g., about 10%-100%, 20-100%, 30%-100%, 40%-100%, 50%-80%, 50%-85%, 50%-90%, 50%-95%, 60%-80%, 60%-85%, 60%-90%, 60%-95%, 60%-100%, 65%-80%, 65%-85%, 65%-90%, 65%-95%, 65%-100%, 70%-80%, 70%-85%, 70%-90%, 70%-95%, 70%-100%, 75%-80%, 75%-85%, 75%-90%, 75%-95%, 75%-100%, 80%-85%, 80%-90%, 80%-95%, 80%-100%, 85%-90%, 85%-95%, 85%-100%, 90%-95%, 90%-100%, 10%, 20%, 30%, 40%, 50%, 60%, 65%, 70%, 75%, 80%, 85%, 90%, 95%, or 100%, etc.) of all sugars in a second domain are independently a bicyclic sugar (e.g., a LNA sugar) or a 2′-OR modified sugar, wherein R is independently optionally substituted C₁₋₆ aliphatic. In some embodiments, about 5%-100% (e.g., about 10%-100%, 20-100%, 30%-100%, 40%-100%, 50%-80%, 50%-85%, 50%-90%, 50%-95%, 60%-80%, 60%-85%, 60%-90%, 60%-95%, 60%-100%, 65%-80%, 65%-85%, 65%-90%, 65%-95%, 65%-100%, 70%-80%, 70%-85%, 70%-90%, 70%-95%, 70%-100%, 75%-80%, 75%-85%, 75%-90%, 75%-95%, 75%-100%, 80%-85%, 80%-90%, 80%-95%, 80%-100%, 85%-90%, 85%-95%, 85%-100%, 90%-95%, 90%-100%, 10%, 20%, 30%, 40%, 50%, 60%, 65%, 70%, 75%, 80%, 85%, 90%, 95%, or 100%, etc.) of all sugars in a second domain are independently a 2′-OR modified sugar, wherein R is independently optionally substituted C₁₋₆ aliphatic. In some embodiments, a percentage is at least about 50%. In some embodiments, a percentage is at least about 55%. In some embodiments, a percentage is at least about 60%. In some embodiments, a percentage is at least about 65%. In some embodiments, a percentage is at least about 70%. In some embodiments, a percentage is at least about 75%. In some embodiments, a percentage is at least about 80%. In some embodiments, a percentage is at least about 85%. In some embodiments, a percentage is at least about 90%. In some embodiments, a percentage is at least about 95%. In some embodiments, a percentage is about 100%. In some embodiments, R is methyl.

[0439] In some embodiments, a second domain comprises about 1-50 (e.g., about 5, 6, 7, 8, 9, or 10-about 10, 11, 12, 13, 14, 15, 16, 17, 18, 19, 20, 21, 22, 23, 24, 25, 30, 40 or 50, or about 5, 6, 7, 8, 9, 10, 11, 12, 13, 14, 15, 16, 17, 18, 19, 20, 21, 22, 23, 24, 25, 30, 40 or 50, etc., about 1, 2, 3, 4, 5, 6, 7, 8, 9, 10, 11, 12, 13, 14, 15, 16, 17, 18, 19, or 20, etc.) modified sugars independently with a modification that is not 2′-F. In some embodiments, about 5%-100% (e.g., about 10%-100%, 20-100%, 30%-100%, 40%-100%, 50%-80%, 50%-85%, 50%-90%, 50%-95%, 60%-80%, 60%-85%, 60%-90%, 60%-95%, 60%-100%, 65%-80%, 65%-85%, 65%-90%, 65%-95%, 65%-100%, 70%-80%, 70%-85%, 70%-90%, 70%-95%, 70%-100%, 75%-80%, 75%-85%, 75%-90%, 75%-95%, 75%-100%, 80%-85%, 80%-90%, 80%-95%, 80%-100%, 85%-90%, 85%-95%, 85%-100%, 90%-95%, 90%-100%, 10%, 20%, 30%, 40%, 50%, 60%, 65%, 70%, 75%, 80%, 85%, 90%, 95%, or 100%, etc.) of sugars in a second domain are independently modified sugars with a modification that is not 2′-F. In some embodiments, about 50%-100% (e.g., about 50%-80%, 50%-85%, 50%-90%, 50%-95%, 60%-80%, 60%-85%, 60%-90%, 60%-95%, 60%-100%, 65%-80%, 65%-85%, 65%-90%, 65%-95%, 65%-100%, 70%-80%, 70%-85%, 70%-90%, 70%-95%, 70%-100%, 75%-80%, 75%-85%, 75%-90%, 75%-95%, 75%-100%, 80%-85%, 80%-90%, 80%-95%, 80%-100%, 85%-90%, 85%-95%, 85%-100%, 90%-95%, 90%-100%, 50%, 60%, 65%, 70%, 75%, 80%, 85%, 90%, 95%, or 100%, etc.) of sugars in a second domain are independently modified sugars with a modification that is not 2′-F. In some embodiments, modified sugars of a second domain are each independently selected from a bicyclic sugar (e.g., a LNA sugar), an acyclic sugar (e.g., a UNA sugar), a sugar with a 2′-OR modification, or a sugar with a 2′-N(R)₂ modification, wherein each R is independently optionally substituted C₁₋₆ aliphatic.

[0440] In some embodiments, a second domain comprises one or more 2′-F modified sugars. In some embodiments, a second domain comprises no 2′-F modified sugars. In some embodiments, a second domain comprises one or more bicyclic sugars and/or 2′-OR modified sugars wherein R is not —H. In some embodiments, levels of bicyclic sugars and/or 2′-OR modified sugars wherein R is not —H, individually or combined, are relatively high compared to level of 2′-F modified sugars. In some embodiments, no more than about 1%-95% (e.g., no more than about 1%, 5%, 10%, 15%, 20%, 25%, 30%, 35%, 40%, 45%, 50%, 55%, 60%, 65%, 70%, 75%, 80%, 85%, 90%, 95%, etc.) of sugars in a second domain comprises 2′-F. In some embodiments, no more than about 50% of sugars in a second domain comprises 2′-F. In some embodiments, a second domain comprises one or more (e.g., about 1-20, 1, 2, 3, 4, 5, 6, 7, 8, 9, 10, 11, 12, 13, 14, 15, 16, 17, 18, 19, 20, etc.) modified sugars comprising a 2′-N(R)₂ modification. In some embodiments, a second domain comprises one or more (e.g., about 1-20, 1, 2, 3, 4, 5, 6, 7, 8, 9, 10, 11, 12, 13, 14, 15, 16, 17, 18, 19, 20, etc.) modified sugars comprising a 2′-NH₂ modification. In some embodiments, a second domain comprises one or more (e.g., about 1-20, 1, 2, 3, 4, 5, 6, 7, 8, 9, 10, 11, 12, 13, 14, 15, 16, 17, 18, 19, 20, etc.) bicyclic sugars, e.g., LNA sugars. In some embodiments, a second domain comprises one or more (e.g., about 1-20, 1, 2, 3, 4, 5, 6, 7, 8, 9, 10, 11, 12, 13, 14, 15, 16, 17, 18, 19, 20, etc.) acyclic sugars (e.g., UNA sugars).

[0441] In some embodiments, no more than about 1%-95% (e.g., no more than about 1%, 5%, 10%, 15%, 20%, 25%, 30%, 35%, 40%, 45%, 50%, 55%, 60%, 65%, 70%, 75%, 80%, 85%, 90%, 95%, etc.) of sugars in a second domain comprises 2′-MOE. In some embodiments, no more than about 50% of sugars in a second domain comprises 2′-MOE. In some embodiments, no sugars in a second domain comprises 2′-MOE.

[0442] In some embodiments, a second domain comprise about 1-50 (e.g., about 5, 6, 7, 8, 9, or 10-about 10, 11, 12, 13, 14, 15, 16, 17, 18, 19, 20, 21, 22, 23, 24, 25, 30, 40 or 50, or about 5, 6, 7, 8, 9, 10, 11, 12, 13, 14, 15, 16, 17, 18, 19, 20, 21, 22, 23, 24, 25, 30, 40 or 50, etc., about 1, 2, 3, 4, 5, 6, 7, 8, 9, 10, 11, 12, 13, 14, 15, 16, 17, 18, 19, or 20, etc.) modified internucleotidic linkages. In some embodiments, about 5%-100% (e.g., about 10%-100%, 20-100%, 30%-100%, 40%-100%, 50%-80%, 50%-85%, 50%-90%, 50%-95%, 60%-80%, 60%-85%, 60%-90%, 60%-95%, 60%-100%, 65%-80%, 65%-85%, 65%-90%, 65%-95%, 65%-100%, 70%-80%, 70%-85%, 70%-90%, 70%-95%, 70%-100%, 75%-80%, 75%-85%, 75%-90%, 75%-95%, 75%-100%, 80%-85%, 80%-90%, 80%-95%, 80%-100%, 85%-90%, 85%-95%, 85%-100%, 90%-95%, 90%-100%, 10%, 20%, 30%, 40%, 50%, 60%, 65%, 70%, 75%, 80%, 85%, 90%, 95%, or 100%, etc.) of internucleotidic linkages in a second domain are modified internucleotidic linkages. In some embodiments, each internucleotidic linkage in a second domain is independently a modified internucleotidic linkage. In some embodiments, each modified internucleotidic linkages is independently a chiral internucleotidic linkage. In some embodiments, a modified or chiral internucleotidic linkage is a phosphorothioate internucleotidic linkage. In some embodiments, a modified or chiral internucleotidic linkage is a non-negatively charged internucleotidic linkage. In some embodiments, a modified or chiral internucleotidic linkage is a neutral internucleotidic linkage, e.g., n001. In some embodiments, each modified internucleotidic linkages is independently a phosphorothioate internucleotidic linkage or a non-negatively charged internucleotidic linkage. In some embodiments, each modified internucleotidic linkages is independently a phosphorothioate internucleotidic linkage or a neutral internucleotidic linkage. In some embodiments, each modified internucleotidic linkages is independently a phosphorothioate internucleotidic linkage. In some embodiments, at least about 1-50 (e.g., about 5, 6, 7, 8, 9, or 10-about 10, 11, 12, 13, 14, 15, 16, 17, 18, 19, 20, 21, 22, 23, 24, 25, 30, 40 or 50, or about 5, 6, 7, 8, 9, 10, 11, 12, 13, 14, 15, 16, 17, 18, 19, 20, 21, 22, 23, 24, 25, 30, 40 or 50, etc., about 1, 2, 3, 4, 5, 6, 7, 8, 9, 10, 11, 12, 13, 14, 15, 16, 17, 18, 19, or 20, etc.) chiral internucleotidic linkages in a second domain is chirally controlled. In some embodiments, at least 5%-100% (e.g., about 10%-100%, 20-100%, 30%-100%, 40%-100%, 50%-80%, 50%-85%, 50%-90%, 50%-95%, 60%-80%, 60%-85%, 60%-90%, 60%-95%, 60%-100%, 65%-80%, 65%-85%, 65%-90%, 65%-95%, 65%-100%, 70%-80%, 70%-85%, 70%-90%, 70%-95%, 70%-100%, 75%-80%, 75%-85%, 75%-90%, 75%-95%, 75%-100%, 80%-85%, 80%-90%, 80%-95%, 80%-100%, 85%-90%, 85%-95%, 85%-100%, 90%-95%, 90%-100%, 10%, 20%, 30%, 40%, 50%, 60%, 65%, 70%, 75%, 80%, 85%, 90%, 95%, or 100%, etc.) of chiral internucleotidic linkages in a second domain is chirally controlled. In some embodiments, at least 5%-100% (e.g., about 10%-100%, 20-100%, 30%-100%, 40%-100%, 50%-80%, 50%-85%, 50%-90%, 50%-95%, 60%-80%, 60%-85%, 60%-90%, 60%-95%, 60%-100%, 65%-80%, 65%-85%, 65%-90%, 65%-95%, 65%-100%, 70%-80%, 70%-85%, 70%-90%, 70%-95%, 70%-100%, 75%-80%, 75%-85%, 75%-90%, 75%-95%, 75%-100%, 80%-85%, 80%-90%, 80%-95%, 80%-100%, 85%-90%, 85%-95%, 85%-100%, 90%-95%, 90%-100%, 10%, 20%, 30%, 40%, 50%, 60%, 65%, 70%, 75%, 80%, 85%, 90%, 95%, or 100%, etc.) of phosphorothioate internucleotidic linkages in a second domain is chirally controlled. In some embodiments, each is independently chirally controlled. In some embodiments, at least about 1-50 (e.g., about 5, 6, 7, 8, 9, or 10-about 10, 11, 12, 13, 14, 15, 16, 17, 18, 19, 20, 21, 22, 23, 24, 25, 30, 40 or 50, or about 5, 6, 7, 8, 9, 10, 11, 12, 13, 14, 15, 16, 17, 18, 19, 20, 21, 22, 23, 24, 25, 30, 40 or 50, etc., about 1, 2, 3, 4, 5, 6, 7, 8, 9, 10, 11, 12, 13, 14, 15, 16, 17, 18, 19, or 20, etc.) chiral internucleotidic linkages in a second domain is Sp. In some embodiments, each is independently chirally controlled. In some embodiments, at least about 1-50 (e.g., about 5, 6, 7, 8, 9, or 10-about 10, 11, 12, 13, 14, 15, 16, 17, 18, 19, 20, 21, 22, 23, 24, 25, 30, 40 or 50, or about 5, 6, 7, 8, 9, 10, 11, 12, 13, 14, 15, 16, 17, 18, 19, 20, 21, 22, 23, 24, 25, 30, 40 or 50, etc., about 1, 2, 3, 4, 5, 6, 7, 8, 9, 10, 11, 12, 13, 14, 15, 16, 17, 18, 19, or 20, etc.) phosphorothioate internucleotidic linkages in a second domain is Sp. In some embodiments, at least 5%-100% (e.g., about 10%-100%, 20-100%, 30%-100%, 40%-100%, 50%-80%, 50%-85%, 50%-90%, 50%-95%, 60%-80%, 60%-85%, 60%-90%, 60%-95%, 60%-100%, 65%-80%, 65%-85%, 65%-90%, 65%-95%, 65%-100%, 70%-80%, 70%-85%, 70%-90%, 70%-95%, 70%-100%, 75%-80%, 75%-85%, 75%-90%, 75%-95%, 75%-100%, 80%-85%, 80%-90%, 80%-95%, 80%-100%, 85%-90%, 85%-95%, 85%-100%, 90%-95%, 90%-100%, 10%, 20%, 30%, 40%, 50%, 60%, 65%, 70%, 75%, 80%, 85%, 90%, 95%, or 100%, etc.) of chiral internucleotidic linkages in a second domain is Sp. In some embodiments, at least 5%-100% (e.g., about 10%-100%, 20-100%, 30%-100%, 40%-100%, 50%-80%, 50%-85%, 50%-90%, 50%-95%, 60%-80%, 60%-85%, 60%-90%, 60%-95%, 60%-100%, 65%-80%, 65%-85%, 65%-90%, 65%-95%, 65%-100%, 70%-80%, 70%-85%, 70%-90%, 70%-95%, 70%-100%, 75%-80%, 75%-85%, 75%-90%, 75%-95%, 75%-100%, 80%-85%, 80%-90%, 80%-95%, 80%-100%, 85%-90%, 85%-95%, 85%-100%, 90%-95%, 90%-100%, 10%, 20%, 30%, 40%, 50%, 60%, 65%, 70%, 75%, 80%, 85%, 90%, 95%, or 100%, etc.) of phosphorothioate internucleotidic linkages in a second domain is Sp. In some embodiments, the number is one or more. In some embodiments, the number is 2 or more. In some embodiments, the number is 3 or more. In some embodiments, the number is 4 or more. In some embodiments, the number is 5 or more. In some embodiments, the number is 6 or more. In some embodiments, the number is 7 or more. In some embodiments, the number is 8 or more. In some embodiments, the number is 9 or more. In some embodiments, the number is 10 or more. In some embodiments, the number is 11 or more. In some embodiments, the number is 12 or more. In some embodiments, the number is 13 or more. In some embodiments, the number is 14 or more. In some embodiments, the number is 15 or more. In some embodiments, a percentage is at least about 50%. In some embodiments, a percentage is at least about 55%. In some embodiments, a percentage is at least about 60%. In some embodiments, a percentage is at least about 65%. In some embodiments, a percentage is at least about 70%. In some embodiments, a percentage is at least about 75%. In some embodiments, a percentage is at least about 80%. In some embodiments, a percentage is at least about 85%. In some embodiments, a percentage is at least about 90%. In some embodiments, a percentage is at least about 95%. In some embodiments, a percentage is about 100%. In some embodiments, each internucleotidic linkage linking two second domain nucleosides is independently a modified internucleotidic linkage. In some embodiments, each modified internucleotidic linkages is independently a chiral internucleotidic linkage. In some embodiments, each modified internucleotidic linkages is independently a phosphorothioate internucleotidic linkage. In some embodiments, each chiral internucleotidic linkage is independently a phosphorothioate internucleotidic linkage. In some embodiments, each modified internucleotidic linkages is independently a Sp chiral internucleotidic linkage. In some embodiments, each modified internucleotidic linkages is independently a Sp phosphorothioate internucleotidic linkage. In some embodiments, each chiral internucleotidic linkages is independently a Sp phosphorothioate internucleotidic linkage. In some embodiments, an internucleotidic linkage of a second domain is bonded to two nucleosides of the second domain. In some embodiments, an internucleotidic linkage bonded to a nucleoside in a first domain and a nucleoside in a second domain may be properly considered an internucleotidic linkage of a second domain. In some embodiments, it was observed that a high percentage (e.g., relative to Rp internucleotidic linkages and/or natural phosphate linkages) of Sp internucleotidic linkages provide improved properties and/or activities, e.g., high stability and/or high adenosine editing activity.

[0443] In some embodiments, a second domain comprises a certain level of Rp internucleotidic linkages. In some embodiments, a level is about e.g., about 5%-100%, about 10%-100%, 20-100%, 30%-100%, 40%-100%, 50%-80%, 50%-85%, 50%-90%, 50%-95%, 60%-80%, 60%-85%, 60%-90%, 60%-95%, 60%-100%, 65%-80%, 65%-85%, 65%-90%, 65%-95%, 65%-100%, 70%-80%, 70%-85%, 70%-90%, 70%-95%, 70%-100%, 75%-80%, 75%-85%, 75%-90%, 75%-95%, 75%-100%, 80%-85%, 80%-90%, 80%-95%, 80%-100%, 85%-90%, 85%-95%, 85%-100%, 90%-95%, 90%-100%, 10%, 20%, 30%, 40%, 50%, 60%, 65%, 70%, 75%, 80%, 85%, 90%, 95%, or 100%, etc. of all internucleotidic linkages in a second domain. In some embodiments, a level is about e.g., about 5%-100%, about 10%-100%, 20-100%, 30%-100%, 40%-100%, 50%-80%, 50%-85%, 50%-90%, 50%-95%, 60%-80%, 60%-85%, 60%-90%, 60%-95%, 60%-100%, 65%-80%, 65%-85%, 65%-90%, 65%-95%, 65%-100%, 70%-80%, 70%-85%, 70%-90%, 70%-95%, 70%-100%, 75%-80%, 75%-85%, 75%-90%, 75%-95%, 75%-100%, 80%-85%, 80%-90%, 80%-95%, 80%-100%, 85%-90%, 85%-95%, 85%-100%, 90%-95%, 90%-100%, 10%, 20%, 30%, 40%, 50%, 60%, 65%, 70%, 75%, 80%, 85%, 90%, 95%, or 100%, etc. of all chiral internucleotidic linkages in a second domain. In some embodiments, a level is about e.g., about 5%-100%, about 10%-100%, 20-100%, 30%-100%, 40%-100%, 50%-80%, 50%-85%, 50%-90%, 50%-95%, 60%-80%, 60%-85%, 60%-90%, 60%-95%, 60%-100%, 65%-80%, 65%-85%, 65%-90%, 65%-95%, 65%-100%, 70%-80%, 70%-85%, 70%-90%, 70%-95%, 70%-100%, 75%-80%, 75%-85%, 75%-90%, 75%-95%, 75%-100%, 80%-85%, 80%-90%, 80%-95%, 80%-100%, 85%-90%, 85%-95%, 85%-100%, 90%-95%, 90%-100%, 10%, 20%, 30%, 40%, 50%, 60%, 65%, 70%, 75%, 80%, 85%, 90%, 95%, or 100%, etc. of all chirally controlled internucleotidic linkages in a second domain. In some embodiments, a percentage is about or no more than about 50%. In some embodiments, a percentage is at least about 55%. In some embodiments, a percentage is at least about 60%. In some embodiments, a percentage is at least about 65%. In some embodiments, a percentage is at least about 70%. In some embodiments, a percentage is at least about 75%. In some embodiments, a percentage is at least about 80%. In some embodiments, a percentage is at least about 85%. In some embodiments, a percentage is at least about 90%. In some embodiments, a percentage is at least about 95%. In some embodiments, a percentage is about 100%. In some embodiments, a percentage is about or no more than about 5%. In some embodiments, a percentage is about or no more than about 10%. In some embodiments, a percentage is about or no more than about 15%. In some embodiments, a percentage is about or no more than about 20%. In some embodiments, a percentage is about or no more than about 25%. In some embodiments, a percentage is about or no more than about 30%. In some embodiments, a percentage is about or no more than about 35%. In some embodiments, a percentage is about or no more than about 40%. In some embodiments, a percentage is about or no more than about 45%. In some embodiments, a percentage is about or no more than about 50%. In some embodiments, about 1-50, 1-40, 1-30, 1-25, 1-20, 1-15, 1-10, 1-5, e.g., about 1, 2, 3, 4, 5, 6, 7, 8, 9, 10, 11, 12, 13, 14, 15, 16, 17, 18, 19, or 20 internucleotidic linkages are independently Rp chiral internucleotidic linkages. In some embodiments, the number is about or no more than about 1. In some embodiments, the number is about or no more than about 2. In some embodiments, the number is about or no more than about 3. In some embodiments, the number is about or no more than about 4. In some embodiments, the number is about or no more than about 5. In some embodiments, the number is about or no more than about 6. In some embodiments, the number is about or no more than about 7. In some embodiments, the number is about or no more than about 8. In some embodiments, the number is about or no more than about 9. In some embodiments, the number is about or no more than about 10.

[0444] In some embodiments, each phosphorothioate internucleotidic linkage in a second domain is independently chirally controlled. In some embodiments, each is independently Sp or Rp. In some embodiments, a high level is Sp as described herein. In some embodiments, each phosphorothioate internucleotidic linkage in a second domain is chirally controlled and is Sp. In some embodiments, one or more, e.g., about 1-5 (e.g., about 1, 2, 3, 4, or 5) is Rp.

[0445] In some embodiments, each phosphorothioate internucleotidic linkage in a second domain is independently chirally controlled. In some embodiments, each is independently Sp or Rp. In some embodiments, a high level is Sp as described herein. In some embodiments, each phosphorothioate internucleotidic linkage in a second domain is chirally controlled and is Sp. In some embodiments, one or more, e.g., about 1-5 (e.g., about 1, 2, 3, 4, or 5) is Rp.

[0446] In some embodiments, as illustrated in certain examples, a second domain comprises one or more non-negatively charged internucleotidic linkages, each of which is optionally and independently chirally controlled. In some embodiments, each non-negatively charged internucleotidic linkage is independently n001. In some embodiments, a chiral non-negatively charged internucleotidic linkage is not chirally controlled. In some embodiments, each chiral non-negatively charged internucleotidic linkage is not chirally controlled. In some embodiments, a chiral non-negatively charged internucleotidic linkage is chirally controlled. In some embodiments, a chiral non-negatively charged internucleotidic linkage is chirally controlled and is Rp. In some embodiments, a chiral non-negatively charged internucleotidic linkage is chirally controlled and is Sp. In some embodiments, each chiral non-negatively charged internucleotidic linkage is chirally controlled. In some embodiments, the number of non-negatively charged internucleotidic linkages in a second domain is about 1-10, or about 1, 2, 3, 4, 5, 6, 7, 8, 9, or 10. In some embodiments, it is about 1. In some embodiments, it is about 2. In some embodiments, it is about 3. In some embodiments, it is about 4. In some embodiments, it is about 5. In some embodiments, two or more non-negatively charged internucleotidic linkages are consecutive. In some embodiments, no two non-negatively charged internucleotidic linkages are consecutive. In some embodiments, all non-negatively charged internucleotidic linkages in a second domain are consecutive (e.g., 3 consecutive non-negatively charged internucleotidic linkages). In some embodiments, a non-negatively charged internucleotidic linkage, or two or more (e.g., about 2, about 3, about 4 etc.) consecutive non-negatively charged internucleotidic linkages, are at the 3′-end of a second domain. In some embodiments, the last two or three or four internucleotidic linkages of a second domain comprise at least one internucleotidic linkage that is not a non-negatively charged internucleotidic linkage. In some embodiments, the last two or three or four internucleotidic linkages of a second domain comprise at least one internucleotidic linkage that is not n001.

[0447] In some embodiments, the internucleotidic linkage linking the last two nucleosides of a second domain is a non-negatively charged internucleotidic linkage. In some embodiments, the internucleotidic linkage linking the last two nucleosides of a second domain is a Sp non-negatively charged internucleotidic linkage. In some embodiments, the internucleotidic linkage linking the last two nucleosides of a second domain is a Rp non-negatively charged internucleotidic linkage. In some embodiments, the internucleotidic linkage linking the last two nucleosides of a second domain is a phosphorothioate internucleotidic linkage. In some embodiments, the internucleotidic linkage linking the last two nucleosides of a second domain is a Sp phosphorothioate internucleotidic linkage. In some embodiments, the last two nucleosides of a second domain are the last two nucleosides of an oligonucleotide. In some embodiments, the internucleotidic linkage linking the first two nucleosides of a second domain is a non-negatively charged internucleotidic linkage. In some embodiments, the internucleotidic linkage linking the first two nucleosides of a second domain is a Sp non-negatively charged internucleotidic linkage. In some embodiments, the internucleotidic linkage linking the first two nucleosides of a second domain is a Rp non-negatively charged internucleotidic linkage. In some embodiments, the internucleotidic linkage linking the first two nucleosides of a second domain is a phosphorothioate internucleotidic linkage. In some embodiments, the internucleotidic linkage linking the first two nucleosides of a second domain is a Sp phosphorothioate internucleotidic linkage. In some embodiments, a non-negatively charged internucleotidic linkage is a neutral internucleotidic linkage such as n001.

[0448] In some embodiments, a second domain comprises one or more natural phosphate linkages. In some embodiments, a second domain contains no natural phosphate linkages.

[0449] In some embodiments, a second domain recruits, promotes or contribute to recruitment of, a protein such as an ADAR protein. In some embodiments, a second domain recruits, or promotes or contribute to interactions with, a protein such as an ADAR protein. In some embodiments, a second domain contacts with a RNA binding domain (RBD) of ADAR. In some embodiments, a second domain contacts with a catalytic domain of ADAR which has a deaminase activity. In some embodiments, various nucleobases, sugars and/or internucleotidic linkages may interact with one or more residues of proteins, e.g., ADAR proteins.

[0450] In some embodiments, a second domain comprises or consists of a first subdomain as described herein. In some embodiments, a second domain comprises or consists of a second subdomain as described herein. In some embodiments, a second domain comprises or consists of a third subdomain as described herein. In some embodiments, a second domain comprises or consists of a first subdomain, a second subdomain and a third subdomain from 5′ to 3′. Certain embodiments of such subdomains are described below.

[0451] First Subdomains

[0452] As described herein, in some embodiment, an oligonucleotide comprises a first domain and a second domain from 5′ to 3′. In some embodiments, a second domain comprises or consists of a first subdomain, a second subdomain, and a third subdomain from 5′ to 3′. Certain embodiments of a first subdomain are described below as examples. In some embodiments, a first subdomain comprise a nucleoside opposite to target adenosine to be modified (e.g., conversion to I).

[0453] In some embodiments, a first subdomain has a length of about 1-50, 1-40, 1-30, 1-20 (e.g., about 1, 2, 3, 4, 5, 6, 7, 8, 9, or 10-about 10, 11, 12, 13, 14, 15, 16, 17, 18, 19, 20, 21, 22, 23, 24, 25, 30, 40 or 50, or about 1, 2, 3, 4, 5, 6, 7, 8, 9, 10, 11, 12, 13, 14, 15, 16, 17, 18, 19, 20, 21, 22, 23, 24, 25, 30, 40 or 50, etc.) nucleobases. In some embodiments, a first subdomain has a length of about 5-30 nucleobases. In some embodiments, a first subdomain has a length of about 10-30 nucleobases. In some embodiments, a first subdomain has a length of about 10-20 nucleobases. In some embodiments, a first subdomain has a length of about 5-15 nucleobases. In some embodiments, a first subdomain has a length of about 13-16 nucleobases. In some embodiments, a first subdomain has a length of about 6-12 nucleobases. In some embodiments, a first subdomain has a length of about 6-9 nucleobases. In some embodiments, a first subdomain has a length of about 1-10 nucleobases. In some embodiments, a first subdomain has a length of about 1-7 nucleobases. In some embodiments, a first subdomain has a length of about 1-5 nucleobases. In some embodiments, a first subdomain has a length of about 1-3 nucleobases. In some embodiments, a first subdomain has a length of 1 nucleobase. In some embodiments, a first subdomain has a length of 2 nucleobases. In some embodiments, a first subdomain has a length of 3 nucleobases. In some embodiments, a first subdomain has a length of 4 nucleobases. In some embodiments, a first subdomain has a length of 5 nucleobases. In some embodiments, a first subdomain has a length of 6 nucleobases. In some embodiments, a first subdomain has a length of 7 nucleobases. In some embodiments, a first subdomain has a length of 8 nucleobases. In some embodiments, a first subdomain has a length of 9 nucleobases. In some embodiments, a first subdomain has a length of 10 nucleobases. In some embodiments, a first subdomain has a length of 11 nucleobases. In some embodiments, a first subdomain has a length of 12 nucleobases. In some embodiments, a first subdomain has a length of 13 nucleobases. In some embodiments, a first subdomain has a length of 14 nucleobases. In some embodiments, a first subdomain has a length of 15 nucleobases.

[0454] In some embodiments, a first subdomain is about, or at least about, 5-95%, 10%-90%, 20%-80%, 30%-70%, 40%-70%, 40%-60%, 5%, 10%, 15%, 20%, 25%, 30%, 35%, 40%, 45%, 50%, 55%, 60%, 65%, 70%, 75%, 80%, 85%, 90%, 95% of a second domain. In some embodiments, a percentage is about 30%-80%. In some embodiments, a percentage is about 30%-70%. In some embodiments, a percentage is about 40%-60%. In some embodiments, a percentage is about 20%. In some embodiments, a percentage is about 25%. In some embodiments, a percentage is about 30%. In some embodiments, a percentage is about 35%. In some embodiments, a percentage is about 40%. In some embodiments, a percentage is about 45%. In some embodiments, a percentage is about 50%. In some embodiments, a percentage is about 55%. In some embodiments, a percentage is about 60%. In some embodiments, a percentage is about 65%. In some embodiments, a percentage is about 70%. In some embodiments, a percentage is about 75%. In some embodiments, a percentage is about 80%. In some embodiments, a percentage is about 85%. In some embodiments, a percentage is about 90%.

[0455] In some embodiments, one or more (e.g., 1-20, 1, 2, 3, 4, 5, 6, 7, 8, 9, or 10, etc.) mismatches exist in a first subdomain when an oligonucleotide is aligned with a target nucleic acid for complementarity. In some embodiments, there is 1 mismatch. In some embodiments, there are 2 mismatches. In some embodiments, there are 3 mismatches. In some embodiments, there are 4 mismatches. In some embodiments, there are 5 mismatches. In some embodiments, there are 6 mismatches. In some embodiments, there are 7 mismatches. In some embodiments, there are 8 mismatches. In some embodiments, there are 9 mismatches. In some embodiments, there are 10 mismatches.

[0456] In some embodiments, one or more (e.g., 1-20, 1, 2, 3, 4, 5, 6, 7, 8, 9, or 10, etc.) wobbles exist in a first subdomain when an oligonucleotide is aligned with a target nucleic acid for complementarity. In some embodiments, there is 1 wobble. In some embodiments, there are 2 wobbles. In some embodiments, there are 3 wobbles. In some embodiments, there are 4 wobbles. In some embodiments, there are 5 wobbles. In some embodiments, there are 6 wobbles. In some embodiments, there are 7 wobbles. In some embodiments, there are 8 wobbles. In some embodiments, there are 9 wobbles. In some embodiments, there are 10 wobbles.

[0457] In some embodiments, duplexes of oligonucleotides and target nucleic acids in a first subdomain region comprise one or more bulges each of which independently comprise one or more mismatches that are not wobbles. In some embodiments, there are 0-10 (e.g., 0-1, 0-2, 0-3, 0-4, 0-5, 0-6, 0-7, 0-8, 0-9, 0-10, 1-2, 1-3, 1-4, 1-5, 1-6, 1-7, 1-8, 1-9, 1-10, 2-3, 2-4, 2-5, 2-6, 2-7, 2-8, 2-9, 2-10, 3-4, 3-5, 3-6, 3-7, 3-8, 3-9, 3-10, 0, 1, 2, 3, 4, 5, 6, 7, 8, 9, or 10, etc.) bulges. In some embodiments, the number is 0. In some embodiments, the number is 1. In some embodiments, the number is 2. In some embodiments, the number is 3. In some embodiments, the number is 4. In some embodiments, the number is 5.

[0458] In some embodiments, a first subdomain is fully complementary to a target nucleic acid.

[0459] In some embodiments, a first subdomain comprises one or more modified nucleobases.

[0460] In some embodiments, a first subdomain comprise a nucleoside opposite to a target adenosine, e.g., when the oligonucleotide forms a duplex with a target nucleic acid. Suitable nucleobases including modified nucleobases in opposite nucleosides are described herein. For example, in some embodiment, an opposite nucleobase is optionally substituted or protected nucleobase selected from C, a tautomer of C, U, a tautomer of U, A, a tautomer of A, and a nucleobase which is or comprises Ring BA having the structure of BA-I, BA-I-a, BA-I-b, BA-II, BA-II-a, BA-II-b, BA-III, BA-III-a, BA-III-b, BA-IV, BA-IV-a, BA-IV-b, BA-V, BA-V-a, BA-V-b, or BA-VI, or a tautomer of Ring BA.

[0461] In some embodiments, a first subdomain comprises one or more sugars comprising two 2′-H (e.g., natural DNA sugars). In some embodiments, a first subdomain comprises one or more sugars comprising 2′-OH (e.g., natural RNA sugars). In some embodiments, a first subdomain comprises one or more modified sugars. In some embodiments, a modified sugar comprises a 2′-modification. In some embodiments, a modified sugar is a bicyclic sugar, e.g., a LNA sugar. In some embodiments, a modified sugar is an acyclic sugar (e.g., by breaking a C2-C3 bond of a corresponding cyclic sugar).

[0462] In some embodiments, a first subdomain comprises about 1-50, 1-40, 1-30, 1-25, 1-20, 1-15, 1-10 (e.g., about 1, 2, 3, 4, 5, 6, 7, 8, 9, or 10-about 10, 11, 12, 13, 14, 15, 16, 17, 18, 19, 20, 21, 22, 23, 24, 25, 30, 40 or 50, or about 5, 6, 7, 8, 9, 10, 11, 12, 13, 14, 15, 16, 17, 18, 19, 20, 21, 22, 23, 24, 25, 30, 40 or 50, etc., about 1, 2, 3, 4, 5, 6, 7, 8, 9, 10, 11, 12, 13, 14, 15, 16, 17, 18, 19, or 20, etc.) modified sugars. In some embodiments, a first subdomain comprises about 1-50, 1-40, 1-30, 1-25, 1-20, 1-15, 1-10 (e.g., about 1, 2, 3, 4, 5, 6, 7, 8, 9, or 10-about 10, 11, 12, 13, 14, 15, 16, 17, 18, 19, 20, 21, 22, 23, 24, 25, 30, 40 or 50, or about 5, 6, 7, 8, 9, 10, 11, 12, 13, 14, 15, 16, 17, 18, 19, 20, 21, 22, 23, 24, 25, 30, 40 or 50, etc., about 1, 2, 3, 4, 5, 6, 7, 8, 9, 10, 11, 12, 13, 14, 15, 16, 17, 18, 19, or 20, etc.) modified sugars which are independently bicyclic sugars (e.g., a LNA sugar) or a 2′-OR modified sugars, wherein R is independently optionally substituted C₁₋₆ aliphatic. In some embodiments, a first subdomain comprises about 1-50, 1-40, 1-30, 1-25, 1-20, 1-15, 1-10 (e.g., about 1, 2, 3, 4, 5, 6, 7, 8, 9, or 10-about 10, 11, 12, 13, 14, 15, 16, 17, 18, 19, 20, 21, 22, 23, 24, 25, 30, 40 or 50, or about 5, 6, 7, 8, 9, 10, 11, 12, 13, 14, 15, 16, 17, 18, 19, 20, 21, 22, 23, 24, 25, 30, 40 or 50, etc., about 1, 2, 3, 4, 5, 6, 7, 8, 9, 10, 11, 12, 13, 14, 15, 16, 17, 18, 19, or 20, etc.) modified sugars which are independently 2′-OR modified sugars, wherein R is independently optionally substituted C₁₋₆ aliphatic. In some embodiments, the number is 1. In some embodiments, the number is 2. In some embodiments, the number is 3. In some embodiments, the number is 4. In some embodiments, the number is 5. In some embodiments, the number is 6. In some embodiments, the number is 7. In some embodiments, the number is 8. In some embodiments, the number is 9. In some embodiments, the number is 10. In some embodiments, the number is 11. In some embodiments, the number is 12. In some embodiments, the number is 13. In some embodiments, the number is 14. In some embodiments, the number is 15. In some embodiments, the number is 16. In some embodiments, the number is 17. In some embodiments, the number is 18. In some embodiments, the number is 19. In some embodiments, the number is 20. In some embodiments, R is methyl.

[0463] In some embodiments, about 5%-100%, (e.g., about 10%-100%, 20-100%, 30%-100%, 40%-100%, 50%-80%, 50%-85%, 50%-90%, 50%-95%, 60%-80%, 60%-85%, 60%-90%, 60%-95%, 60%-100%, 65%-80%, 65%-85%, 65%-90%, 65%-95%, 65%-100%, 70%-80%, 70%-85%, 70%-90%, 70%-95%, 70%-100%, 75%-80%, 75%-85%, 75%-90%, 75%-95%, 75%-100%, 80%-85%, 80%-90%, 80%-95%, 80%-100%, 85%-90%, 85%-95%, 85%-100%, 90%-95%, 90%-100%, 10%, 20%, 30%, 40%, 50%, 60%, 65%, 70%, 75%, 80%, 85%, 90%, 95%, or 100%, etc.) of all sugars in a first subdomain are independently a modified sugar. In some embodiments, about 5%-100% (e.g., about 10%-100%, 20-100%, 30%-100%, 40%-100%, 50%-80%, 50%-85%, 50%-90%, 50%-95%, 60%-80%, 60%-85%, 60%-90%, 60%-95%, 60%-100%, 65%-80%, 65%-85%, 65%-90%, 65%-95%, 65%-100%, 70%-80%, 70%-85%, 70%-90%, 70%-95%, 70%-100%, 75%-80%, 75%-85%, 75%-90%, 75%-95%, 75%-100%, 80%-85%, 80%-90%, 80%-95%, 80%-100%, 85%-90%, 85%-95%, 85%-100%, 90%-95%, 90%-100%, 10%, 20%, 30%, 40%, 50%, 60%, 65%, 70%, 75%, 80%, 85%, 90%, 95%, or 100%, etc.) of all sugars in a first subdomain are independently a bicyclic sugar (e.g., a LNA sugar) or a 2′-OR modified sugar, wherein R is independently optionally substituted C₁₋₆ aliphatic. In some embodiments, about 5%-100% (e.g., about 10%-100%, 20-100%, 30%-100%, 40%-100%, 50%-80%, 50%-85%, 50%-90%, 50%-95%, 60%-80%, 60%-85%, 60%-90%, 60%-95%, 60%-100%, 65%-80%, 65%-85%, 65%-90%, 65%-95%, 65%-100%, 70%-80%, 70%-85%, 70%-90%, 70%-95%, 70%-100%, 75%-80%, 75%-85%, 75%-90%, 75%-95%, 75%-100%, 80%-85%, 80%-90%, 80%-95%, 80%-100%, 85%-90%, 85%-95%, 85%-100%, 90%-95%, 90%-100%, 10%, 20%, 30%, 40%, 50%, 60%, 65%, 70%, 75%, 80%, 85%, 90%, 95%, or 100%, etc.) of all sugars in a first subdomain are independently a 2′-OR modified sugar, wherein R is independently optionally substituted C₁₋₆ aliphatic. In some embodiments, a percentage is at least about 50%. In some embodiments, a percentage is at least about 55%. In some embodiments, a percentage is at least about 60%. In some embodiments, a percentage is at least about 65%. In some embodiments, a percentage is at least about 70%. In some embodiments, a percentage is at least about 75%. In some embodiments, a percentage is at least about 80%. In some embodiments, a percentage is at least about 85%. In some embodiments, a percentage is at least about 90%. In some embodiments, a percentage is at least about 95%. In some embodiments, a percentage is about 100%. In some embodiments, R is methyl.

[0464] In some embodiments, a first subdomain comprises about 1-50 (e.g., about 5, 6, 7, 8, 9, or 10-about 10, 11, 12, 13, 14, 15, 16, 17, 18, 19, 20, 21, 22, 23, 24, 25, 30, 40 or 50, or about 5, 6, 7, 8, 9, 10, 11, 12, 13, 14, 15, 16, 17, 18, 19, 20, 21, 22, 23, 24, 25, 30, 40 or 50, etc., about 1, 2, 3, 4, 5, 6, 7, 8, 9, 10, 11, 12, 13, 14, 15, 16, 17, 18, 19, or 20, etc.) modified sugars independently with a modification that is not 2′-F. In some embodiments, about 5%-100% (e.g., about 10%-100%, 20-100%, 30%-100%, 40%-100%, 50%-80%, 50%-85%, 50%-90%, 50%-95%, 60%-80%, 60%-85%, 60%-90%, 60%-95%, 60%-100%, 65%-80%, 65%-85%, 65%-90%, 65%-95%, 65%-100%, 70%-80%, 70%-85%, 70%-90%, 70%-95%, 70%-100%, 75%-80%, 75%-85%, 75%-90%, 75%-95%, 75%-100%, 80%-85%, 80%-90%, 80%-95%, 80%-100%, 85%-90%, 85%-95%, 85%-100%, 90%-95%, 90%-100%, 10%, 20%, 30%, 40%, 50%, 60%, 65%, 70%, 75%, 80%, 85%, 90%, 95%, or 100%, etc.) of sugars in a first subdomain are independently modified sugars with a modification that is not 2′-F. In some embodiments, about 50%-100% (e.g., about 50%-80%, 50%-85%, 50%-90%, 50%-95%, 60%-80%, 60%-85%, 60%-90%, 60%-95%, 60%-100%, 65%-80%, 65%-85%, 65%-90%, 65%-95%, 65%-100%, 70%-80%, 70%-85%, 70%-90%, 70%-95%, 70%-100%, 75%-80%, 75%-85%, 75%-90%, 75%-95%, 75%-100%, 80%-85%, 80%-90%, 80%-95%, 80%-100%, 85%-90%, 85%-95%, 85%-100%, 90%-95%, 90%-100%, 50%, 60%, 65%, 70%, 75%, 80%, 85%, 90%, 95%, or 100%, etc.) of sugars in a first subdomain are independently modified sugars with a modification that is not 2′-F. In some embodiments, modified sugars of a first subdomain are each independently selected from a bicyclic sugar (e.g., a LNA sugar), an acyclic sugar (e.g., a UNA sugar), a sugar with a 2′-OR modification, or a sugar with a 2′-N(R)₂ modification, wherein each R is independently optionally substituted C₁₋₆ aliphatic. In some embodiments, each sugar in a first domain is a 2′-F modified sugar.

[0465] In some embodiments, a first subdomain comprises about 1-50 (e.g., about 5, 6, 7, 8, 9, or 10-about 10, 11, 12, 13, 14, 15, 16, 17, 18, 19, 20, 21, 22, 23, 24, 25, 30, 40 or 50, or about 5, 6, 7, 8, 9, 10, 11, 12, 13, 14, 15, 16, 17, 18, 19, 20, 21, 22, 23, 24, 25, 30, 40 or 50, etc., about 1, 2, 3, 4, 5, 6, 7, 8, 9, 10, 11, 12, 13, 14, 15, 16, 17, 18, 19, or 20, etc.) modified sugars independently selected from a bicyclic sugar (e.g., a LNA sugar), an acyclic sugar (e.g., a UNA sugar), a sugar with a 2′-OR modification, or a sugar with a 2′-N(R)₂ modification, wherein each R is independently optionally substituted C₁₋₆ aliphatic. In some embodiments, about 5%-100% (e.g., about 10%-100%, 20-100%, 30%-100%, 40%-100%, 50%-80%, 50%-85%, 50%-90%, 50%-95%, 60%-80%, 60%-85%, 60%-90%, 60%-95%, 60%-100%, 65%-80%, 65%-85%, 65%-90%, 65%-95%, 65%-100%, 70%-80%, 70%-85%, 70%-90%, 70%-95%, 70%-100%, 75%-80%, 75%-85%, 75%-90%, 75%-95%, 75%-100%, 80%-85%, 80%-90%, 80%-95%, 80%-100%, 85%-90%, 85%-95%, 85%-100%, 90%-95%, 90%-100%, 10%, 20%, 30%, 40%, 50%, 60%, 65%, 70%, 75%, 80%, 85%, 90%, 95%, or 100%, etc.) of sugars in a first subdomain are independently modified sugars selected from a bicyclic sugar (e.g., a LNA sugar), an acyclic sugar (e.g., a UNA sugar), a sugar with a 2′-OR modification, or a sugar with a 2′-N(R)₂ modification, wherein each R is independently optionally substituted C₁₋₆ aliphatic. In some embodiments, about 50%-100% (e.g., about 50%-80%, 50%-85%, 50%-90%, 50%-95%, 60%-80%, 60%-85%, 60%-90%, 60%-95%, 60%-100%, 65%-80%, 65%-85%, 65%-90%, 65%-95%, 65%-100%, 70%-80%, 70%-85%, 70%-90%, 70%-95%, 70%-100%, 75%-80%, 75%-85%, 75%-90%, 75%-95%, 75%-100%, 80%-85%, 80%-90%, 80%-95%, 80%-100%, 85%-90%, 85%-95%, 85%-100%, 90%-95%, 90%-100%, 50%, 60%, 65%, 70%, 75%, 80%, 85%, 90%, 95%, or 100%, etc.) of sugars in a first subdomain are independently modified sugars selected from a bicyclic sugar (e.g., a LNA sugar), an acyclic sugar (e.g., a UNA sugar), a sugar with a 2′-OR modification, or a sugar with a 2′-N(R)₂ modification, wherein each R is independently optionally substituted C₁₋₆ aliphatic.

[0466] In some embodiments, each sugar in a first subdomain independently comprises a 2′-OR modification, wherein R is optionally substituted C₁₋₆ aliphatic, or a 2′-O-L^{B}-4′ modification. In some embodiments, each sugar in a first subdomain independently comprises a 2′-OR modification, wherein R is optionally substituted C₁₋₆ aliphatic, or a 2′-O-L^{B}-4′ modification, wherein L^{B} is optionally substituted —CH₂—. In some embodiments, each sugar in a first subdomain independently comprises 2′-OMe.

[0467] In some embodiments, a first subdomain comprises one or more 2′-F modified sugars. In some embodiments, a first subdomain comprises no 2′-F modified sugars. In some embodiments, a first subdomain comprises one or more bicyclic sugars and/or 2′-OR modified sugars wherein R is not —H. In some embodiments, a first subdomain comprises one or more (e.g., about 1-20, 1, 2, 3, 4, 5, 6, 7, 8, 9, 10, 11, 12, 13, 14, 15, 16, 17, 18, 19, 20, etc.) 2′-OMe modified sugars. In some embodiments, a first subdomain comprises one or more (e.g., about 1-20, 1, 2, 3, 4, 5, 6, 7, 8, 9, 10, 11, 12, 13, 14, 15, 16, 17, 18, 19, 20, etc.) consecutive 2′-OMe modified sugars. In some embodiments, levels of bicyclic sugars and/or 2′-OR modified sugars wherein R is not —H, individually or combined, are relatively high compared to level of 2′-F modified sugars. In some embodiments, no more than about 1%-95% (e.g., no more than about 1%, 5%, 10%, 15%, 20%, 25%, 30%, 35%, 40%, 45%, 50%, 55%, 60%, 65%, 70%, 75%, 80%, 85%, 90%, 95%, etc.) of sugars in a first subdomain comprises 2′-F. In some embodiments, no more than about 50% of sugars in a first subdomain comprises 2′-F. In some embodiments, a first subdomain comprises one or more (e.g., about 1-20, 1, 2, 3, 4, 5, 6, 7, 8, 9, 10, 11, 12, 13, 14, 15, 16, 17, 18, 19, 20, etc.) modified sugars comprising a 2′-N(R)₂ modification. In some embodiments, a first subdomain comprises one or more (e.g., about 1-20, 1, 2, 3, 4, 5, 6, 7, 8, 9, 10, 11, 12, 13, 14, 15, 16, 17, 18, 19, 20, etc.) modified sugars comprising a 2′-NH₂ modification. In some embodiments, a first subdomain comprises one or more (e.g., about 1-20, 1, 2, 3, 4, 5, 6, 7, 8, 9, 10, 11, 12, 13, 14, 15, 16, 17, 18, 19, 20, etc.) bicyclic sugars, e.g., LNA sugars. In some embodiments, a first subdomain comprises one or more (e.g., about 1-20, 1, 2, 3, 4, 5, 6, 7, 8, 9, 10, 11, 12, 13, 14, 15, 16, 17, 18, 19, 20, etc.) acyclic sugars (e.g., UNA sugars).

[0468] In some embodiments, no more than about 1%-95% (e.g., no more than about 1%, 5%, 10%, 15%, 20%, 25%, 30%, 35%, 40%, 45%, 50%, 55%, 60%, 65%, 70%, 75%, 80%, 85%, 90%, 95%, etc.) of sugars in a first subdomain comprises 2′-MOE. In some embodiments, no more than about 50% of sugars in a first subdomain comprises 2′-MOE. In some embodiments, no sugars in a first subdomain comprises 2′-MOE.

[0469] In some embodiments, a first subdomain contains more 2′-OR modified sugars than 2′-F modified sugars. In some embodiments, each sugar in a first subdomain is independently a 2′-OR modified sugar or a 2′-F modified sugar. In some embodiments, a first subdomain contains only 3 nucleosides, two of which are independently 2′-OR modified sugars and one is a 2′-F modified sugar. In some embodiments, the 2′-F modified nucleoside is at the 3′-end of the first subdomain and connects to a second subdomain. In some embodiments, each 2′-OR modified sugar is independently a 2′-OR modified sugar wherein R is optionally substituted C₁₋₆ aliphatic, or a 2′-O-L^{B}-4′ modification. In some embodiments, each 2′-OR modified sugar is independently 2′-OR modified sugar wherein R is optionally substituted C₁₋₆ aliphatic. In some embodiments, each 2′-OR modified sugar is independently a 2′-OMe or 2′-MOE modified sugar. In some embodiments, each 2′-OR modified sugar is independently a 2′-OMe modified sugar. In some embodiments, each 2′-OR modified sugar is independently a 2′-MOE modified sugar. In some embodiments, a sugar is 2′-OMe modified and a sugar is 2′-MOE. In some embodiments, a first subdomain contains only 3 nucleosides which are N₂, N₃ and N₄.

[0470] In some embodiments, a first subdomain comprise about 1-50, 1-40, 1-30, 1-25, 1-20, 1-15, 1-10 (e.g., about 5, 6, 7, 8, 9, or 10-about 10, 11, 12, 13, 14, 15, 16, 17, 18, 19, 20, 21, 22, 23, 24, 25, 30, 40 or 50, or about 5, 6, 7, 8, 9, 10, 11, 12, 13, 14, 15, 16, 17, 18, 19, 20, 21, 22, 23, 24, 25, 30, 40 or 50, etc., about 1, 2, 3, 4, 5, 6, 7, 8, 9, 10, 11, 12, 13, 14, 15, 16, 17, 18, 19, or 20, etc.) modified internucleotidic linkages. In some embodiments, about 5%-100% (e.g., about 10%-100%, 20-100%, 30%-100%, 40%-100%, 50%-80%, 50%-85%, 50%-90%, 50%-95%, 60%-80%, 60%-85%, 60%-90%, 60%-95%, 60%-100%, 65%-80%, 65%-85%, 65%-90%, 65%-95%, 65%-100%, 70%-80%, 70%-85%, 70%-90%, 70%-95%, 70%-100%, 75%-80%, 75%-85%, 75%-90%, 75%-95%, 75%-100%, 80%-85%, 80%-90%, 80%-95%, 80%-100%, 85%-90%, 85%-95%, 85%-100%, 90%-95%, 90%-100%, 10%, 20%, 30%, 40%, 50%, 60%, 65%, 70%, 75%, 80%, 85%, 90%, 95%, or 100%, etc.) of internucleotidic linkages in a first subdomain are modified internucleotidic linkages. In some embodiments, each internucleotidic linkage in a first subdomain is independently a modified internucleotidic linkage. In some embodiments, each modified internucleotidic linkages is independently a chiral internucleotidic linkage. In some embodiments, a modified or chiral internucleotidic linkage is a phosphorothioate internucleotidic linkage. In some embodiments, a modified or chiral internucleotidic linkage is a non-negatively charged internucleotidic linkage. In some embodiments, a modified or chiral internucleotidic linkage is a neutral internucleotidic linkage, e.g., n001. In some embodiments, each modified internucleotidic linkages is independently a phosphorothioate internucleotidic linkage or a non-negatively charged internucleotidic linkage. In some embodiments, each modified internucleotidic linkages is independently a phosphorothioate internucleotidic linkage or a neutral internucleotidic linkage. In some embodiments, each modified internucleotidic linkages is independently a phosphorothioate internucleotidic linkage. In some embodiments, at least about 1-50, 1-40, 1-30, 1-25, 1-20, 1-15, 1-10 (e.g., about 5, 6, 7, 8, 9, or 10-about 10, 11, 12, 13, 14, 15, 16, 17, 18, 19, 20, 21, 22, 23, 24, 25, 30, 40 or 50, or about 5, 6, 7, 8, 9, 10, 11, 12, 13, 14, 15, 16, 17, 18, 19, 20, 21, 22, 23, 24, 25, 30, 40 or 50, etc., about 1, 2, 3, 4, 5, 6, 7, 8, 9, 10, 11, 12, 13, 14, 15, 16, 17, 18, 19, or 20, etc.) chiral internucleotidic linkages in a first subdomain is chirally controlled. In some embodiments, at least 5%-100% (e.g., about 10%-100%, 20-100%, 30%-100%, 40%-100%, 50%-80%, 50%-85%, 50%-90%, 50%-95%, 60%-80%, 60%-85%, 60%-90%, 60%-95%, 60%-100%, 65%-80%, 65%-85%, 65%-90%, 65%-95%, 65%-100%, 70%-80%, 70%-85%, 70%-90%, 70%-95%, 70%-100%, 75%-80%, 75%-85%, 75%-90%, 75%-95%, 75%-100%, 80%-85%, 80%-90%, 80%-95%, 80%-100%, 85%-90%, 85%-95%, 85%-100%, 90%-95%, 90%-100%, 10%, 20%, 30%, 40%, 50%, 60%, 65%, 70%, 75%, 80%, 85%, 90%, 95%, or 100%, etc.) of chiral internucleotidic linkages in a first subdomain is chirally controlled. In some embodiments, at least 5%-100% (e.g., about 10%-100%, 20-100%, 30%-100%, 40%-100%, 50%-80%, 50%-85%, 50%-90%, 50%-95%, 60%-80%, 60%-85%, 60%-90%, 60%-95%, 60%-100%, 65%-80%, 65%-85%, 65%-90%, 65%-95%, 65%-100%, 70%-80%, 70%-85%, 70%-90%, 70%-95%, 70%-100%, 75%-80%, 75%-85%, 75%-90%, 75%-95%, 75%-100%, 80%-85%, 80%-90%, 80%-95%, 80%-100%, 85%-90%, 85%-95%, 85%-100%, 90%-95%, 90%-100%, 10%, 20%, 30%, 40%, 50%, 60%, 65%, 70%, 75%, 80%, 85%, 90%, 95%, or 100%, etc.) of phosphorothioate internucleotidic linkages in a first subdomain is chirally controlled. In some embodiments, each is independently chirally controlled. In some embodiments, at least about 1-50, 1-40, 1-30, 1-25, 1-20, 1-15, 1-10 (e.g., about 5, 6, 7, 8, 9, or 10-about 10, 11, 12, 13, 14, 15, 16, 17, 18, 19, 20, 21, 22, 23, 24, 25, 30, 40 or 50, or about 5, 6, 7, 8, 9, 10, 11, 12, 13, 14, 15, 16, 17, 18, 19, 20, 21, 22, 23, 24, 25, 30, 40 or 50, etc., about 1, 2, 3, 4, 5, 6, 7, 8, 9, 10, 11, 12, 13, 14, 15, 16, 17, 18, 19, or 20, etc.) chiral internucleotidic linkages in a first subdomain is Sp. In some embodiments, at least about 1-50, 1-40, 1-30, 1-25, 1-20, 1-15, 1-10 (e.g., about 5, 6, 7, 8, 9, or 10-about 10, 11, 12, 13, 14, 15, 16, 17, 18, 19, 20, 21, 22, 23, 24, 25, 30, 40 or 50, or about 5, 6, 7, 8, 9, 10, 11, 12, 13, 14, 15, 16, 17, 18, 19, 20, 21, 22, 23, 24, 25, 30, 40 or 50, etc., about 1, 2, 3, 4, 5, 6, 7, 8, 9, 10, 11, 12, 13, 14, 15, 16, 17, 18, 19, or 20, etc.) phosphorothioate internucleotidic linkages in a first subdomain is Sp. In some embodiments, at least 5%-100% (e.g., about 10%-100%, 20-100%, 30%-100%, 40%-100%, 50%-80%, 50%-85%, 50%-90%, 50%-95%, 60%-80%, 60%-85%, 60%-90%, 60%-95%, 60%-100%, 65%-80%, 65%-85%, 65%-90%, 65%-95%, 65%-100%, 70%-80%, 70%-85%, 70%-90%, 70%-95%, 70%-100%, 75%-80%, 75%-85%, 75%-90%, 75%-95%, 75%-100%, 80%-85%, 80%-90%, 80%-95%, 80%-100%, 85%-90%, 85%-95%, 85%-100%, 90%-95%, 90%-100%, 10%, 20%, 30%, 40%, 50%, 60%, 65%, 70%, 75%, 80%, 85%, 90%, 95%, or 100%, etc.) of chiral internucleotidic linkages in a first subdomain is Sp. In some embodiments, at least 5%-100% (e.g., about 10%-100%, 20-100%, 30%-100%, 40%-100%, 50%-80%, 50%-85%, 50%-90%, 50%-95%, 60%-80%, 60%-85%, 60%-90%, 60%-95%, 60%-100%, 65%-80%, 65%-85%, 65%-90%, 65%-95%, 65%-100%, 70%-80%, 70%-85%, 70%-90%, 70%-95%, 70%-100%, 75%-80%, 75%-85%, 75%-90%, 75%-95%, 75%-100%, 80%-85%, 80%-90%, 80%-95%, 80%-100%, 85%-90%, 85%-95%, 85%-100%, 90%-95%, 90%-100%, 10%, 20%, 30%, 40%, 50%, 60%, 65%, 70%, 75%, 80%, 85%, 90%, 95%, or 100%, etc.) of phosphorothioate internucleotidic linkages in a first subdomain is Sp. In some embodiments, the number is one or more. In some embodiments, the number is 2 or more. In some embodiments, the number is 3 or more. In some embodiments, the number is 4 or more. In some embodiments, the number is 5 or more. In some embodiments, the number is 6 or more. In some embodiments, the number is 7 or more. In some embodiments, the number is 8 or more. In some embodiments, the number is 9 or more. In some embodiments, the number is 10 or more. In some embodiments, the number is 11 or more. In some embodiments, the number is 12 or more. In some embodiments, the number is 13 or more. In some embodiments, the number is 14 or more. In some embodiments, the number is 15 or more. In some embodiments, a percentage is at least about 50%. In some embodiments, a percentage is at least about 55%. In some embodiments, a percentage is at least about 60%. In some embodiments, a percentage is at least about 65%. In some embodiments, a percentage is at least about 70%. In some embodiments, a percentage is at least about 75%. In some embodiments, a percentage is at least about 80%. In some embodiments, a percentage is at least about 85%. In some embodiments, a percentage is at least about 90%. In some embodiments, a percentage is at least about 95%. In some embodiments, a percentage is about 100%. In some embodiments, each internucleotidic linkage linking two first subdomain nucleosides is independently a modified internucleotidic linkage. In some embodiments, each modified internucleotidic linkages is independently a chiral internucleotidic linkage. In some embodiments, each modified internucleotidic linkages is independently a phosphorothioate internucleotidic linkage. In some embodiments, each chiral internucleotidic linkage is independently a phosphorothioate internucleotidic linkage. In some embodiments, each modified internucleotidic linkages is independently a Sp chiral internucleotidic linkage. In some embodiments, each modified internucleotidic linkages is independently a Sp phosphorothioate internucleotidic linkage. In some embodiments, each chiral internucleotidic linkages is independently a Sp phosphorothioate internucleotidic linkage. In some embodiments, an internucleotidic linkage of a first subdomain is bonded to two nucleosides of the first subdomain. In some embodiments, an internucleotidic linkage bonded to a nucleoside in a first subdomain and a nucleoside in a second subdomain may be properly considered an internucleotidic linkage of a first subdomain. In some embodiments, an internucleotidic linkage bonded to a nucleoside in a first subdomain and a nucleoside in a second subdomain is a modified internucleotidic linkage; in some embodiments, it is a chiral internucleotidic linkage; in some embodiments, it is chirally controlled; in some embodiments, it is Rp; in some embodiments, it is Sp.

[0471] In some embodiments, a first subdomain comprises a certain level of Rp internucleotidic linkages. In some embodiments, a level is about e.g., about 5%-100%, about 10%-100%, 20-100%, 30%-100%, 40%-100%, 50%-80%, 50%-85%, 50%-90%, 50%-95%, 60%-80%, 60%-85%, 60%-90%, 60%-95%, 60%-100%, 65%-80%, 65%-85%, 65%-90%, 65%-95%, 65%-100%, 70%-80%, 70%-85%, 70%-90%, 70%-95%, 70%-100%, 75%-80%, 75%-85%, 75%-90%, 75%-95%, 75%-100%, 80%-85%, 80%-90%, 80%-95%, 80%-100%, 85%-90%, 85%-95%, 85%-100%, 90%-95%, 90%-100%, 10%, 20%, 30%, 40%, 50%, 60%, 65%, 70%, 75%, 80%, 85%, 90%, 95%, or 100%, etc. of all internucleotidic linkages in a first subdomain. In some embodiments, a level is about e.g., about 5%-100%, about 10%-100%, 20-100%, 30%-100%, 40%-100%, 50%-80%, 50%-85%, 50%-90%, 50%-95%, 60%-80%, 60%-85%, 60%-90%, 60%-95%, 60%-100%, 65%-80%, 65%-85%, 65%-90%, 65%-95%, 65%-100%, 70%-80%, 70%-85%, 70%-90%, 70%-95%, 70%-100%, 75%-80%, 75%-85%, 75%-90%, 75%-95%, 75%-100%, 80%-85%, 80%-90%, 80%-95%, 80%-100%, 85%-90%, 85%-95%, 85%-100%, 90%-95%, 90%-100%, 10%, 20%, 30%, 40%, 50%, 60%, 65%, 70%, 75%, 80%, 85%, 90%, 95%, or 100%, etc. of all chiral internucleotidic linkages in a first subdomain. In some embodiments, a level is about e.g., about 5%-100%, about 10%-100%, 20-100%, 30%-100%, 40%-100%, 50%-80%, 50%-85%, 50%-90%, 50%-95%, 60%-80%, 60%-85%, 60%-90%, 60%-95%, 60%-100%, 65%-80%, 65%-85%, 65%-90%, 65%-95%, 65%-100%, 70%-80%, 70%-85%, 70%-90%, 70%-95%, 70%-100%, 75%-80%, 75%-85%, 75%-90%, 75%-95%, 75%-100%, 80%-85%, 80%-90%, 80%-95%, 80%-100%, 85%-90%, 85%-95%, 85%-100%, 90%-95%, 90%-100%, 10%, 20%, 30%, 40%, 50%, 60%, 65%, 70%, 75%, 80%, 85%, 90%, 95%, or 100%, etc. of all chirally controlled internucleotidic linkages in a first subdomain. In some embodiments, a percentage is about or no more than about 50%. In some embodiments, a percentage is at least about 55%. In some embodiments, a percentage is at least about 60%. In some embodiments, a percentage is at least about 65%. In some embodiments, a percentage is at least about 70%. In some embodiments, a percentage is at least about 75%. In some embodiments, a percentage is at least about 80%. In some embodiments, a percentage is at least about 85%. In some embodiments, a percentage is at least about 90%. In some embodiments, a percentage is at least about 95%. In some embodiments, a percentage is about 100%. In some embodiments, a percentage is about or no more than about 5%. In some embodiments, a percentage is about or no more than about 10%. In some embodiments, a percentage is about or no more than about 15%. In some embodiments, a percentage is about or no more than about 20%. In some embodiments, a percentage is about or no more than about 25%. In some embodiments, a percentage is about or no more than about 30%. In some embodiments, a percentage is about or no more than about 35%. In some embodiments, a percentage is about or no more than about 40%. In some embodiments, a percentage is about or no more than about 45%. In some embodiments, a percentage is about or no more than about 50%. In some embodiments, about 1-50, 1-40, 1-30, 1-25, 1-20, 1-15, 1-10, 1-5, e.g., about 1, 2, 3, 4, 5, 6, 7, 8, 9, 10, 11, 12, 13, 14, 15, 16, 17, 18, 19, or 20 internucleotidic linkages are independently Rp chiral internucleotidic linkages. In some embodiments, the number is about or no more than about 1. In some embodiments, the number is about or no more than about 2. In some embodiments, the number is about or no more than about 3. In some embodiments, the number is about or no more than about 4. In some embodiments, the number is about or no more than about 5. In some embodiments, the number is about or no more than about 6. In some embodiments, the number is about or no more than about 7. In some embodiments, the number is about or no more than about 8. In some embodiments, the number is about or no more than about 9. In some embodiments, the number is about or no more than about 10.

[0472] In some embodiments, each phosphorothioate internucleotidic linkage in a first subdomain is independently chirally controlled. In some embodiments, each is independently Sp or Rp. In some embodiments, a high level is Sp as described herein. In some embodiments, each phosphorothioate internucleotidic linkage in a first subdomain is chirally controlled and is Sp. In some embodiments, one or more, e.g., about 1-5 (e.g., about 1, 2, 3, 4, or 5) is Rp.

[0473] In some embodiments, as illustrated in certain examples, a first subdomain comprises one or more non-negatively charged internucleotidic linkages, each of which is optionally and independently chirally controlled. In some embodiments, each non-negatively charged internucleotidic linkage is independently n001. In some embodiments, a chiral non-negatively charged internucleotidic linkage is not chirally controlled. In some embodiments, each chiral non-negatively charged internucleotidic linkage is not chirally controlled. In some embodiments, a chiral non-negatively charged internucleotidic linkage is chirally controlled. In some embodiments, a chiral non-negatively charged internucleotidic linkage is chirally controlled and is Rp. In some embodiments, a chiral non-negatively charged internucleotidic linkage is chirally controlled and is Sp. In some embodiments, each chiral non-negatively charged internucleotidic linkage is chirally controlled. In some embodiments, the number of non-negatively charged internucleotidic linkages in a first subdomain is about 1-10, or about 1, 2, 3, 4, 5, 6, 7, 8, 9, or 10. In some embodiments, it is about 1. In some embodiments, it is about 2. In some embodiments, it is about 3. In some embodiments, it is about 4. In some embodiments, it is about 5. In some embodiments, two or more non-negatively charged internucleotidic linkages are consecutive. In some embodiments, no two non-negatively charged internucleotidic linkages are consecutive. In some embodiments, all non-negatively charged internucleotidic linkages in a first subdomain are consecutive (e.g., 3 consecutive non-negatively charged internucleotidic linkages). In some embodiments, a non-negatively charged internucleotidic linkage, or two or more (e.g., about 2, about 3, about 4 etc.) consecutive non-negatively charged internucleotidic linkages, are at the 3′-end of a first subdomain. In some embodiments, the last two or three or four internucleotidic linkages of a first subdomain comprise at least one internucleotidic linkage that is not a non-negatively charged internucleotidic linkage. In some embodiments, the last two or three or four internucleotidic linkages of a first subdomain comprise at least one internucleotidic linkage that is not n001. In some embodiments, the internucleotidic linkage linking the last two nucleosides of a first subdomain is a non-negatively charged internucleotidic linkage. In some embodiments, the internucleotidic linkage linking the last two nucleosides of a first subdomain is a Sp non-negatively charged internucleotidic linkage. In some embodiments, the internucleotidic linkage linking the last two nucleosides of a first subdomain is a Rp non-negatively charged internucleotidic linkage. In some embodiments, the internucleotidic linkage linking the last two nucleosides of a first subdomain is a phosphorothioate internucleotidic linkage. In some embodiments, the internucleotidic linkage linking the last two nucleosides of a first subdomain is a Sp phosphorothioate internucleotidic linkage. In some embodiments, the internucleotidic linkage linking the first two nucleosides of a first subdomain is a non-negatively charged internucleotidic linkage. In some embodiments, the internucleotidic linkage linking the first two nucleosides of a first subdomain is a Sp non-negatively charged internucleotidic linkage. In some embodiments, the internucleotidic linkage linking the first two nucleosides of a first subdomain is a Rp non-negatively charged internucleotidic linkage. In some embodiments, the internucleotidic linkage linking the first two nucleosides of a first subdomain is a phosphorothioate internucleotidic linkage. In some embodiments, the internucleotidic linkage linking the first two nucleosides of a first subdomain is a Sp phosphorothioate internucleotidic linkage. In some embodiments, a non-negatively charged internucleotidic linkage is a neutral internucleotidic linkage such as n001.

[0474] In some embodiments, a first subdomain comprises one or more natural phosphate linkages. In some embodiments, a first subdomain contains no natural phosphate linkages. In some embodiments, one or more 2′-OR modified sugars wherein R is not —H are independently bonded to a natural phosphate linkage. In some embodiments, one or more 2′-OR modified sugars wherein R is optionally substituted C₁₋₆ aliphatic are independently bonded to a natural phosphate linkage. In some embodiments, one or more 2′-OMe modified sugars are independently bonded to a natural phosphate linkage. In some embodiments, one or more 2′-MOE modified sugars are independently bonded to a natural phosphate linkage. In some embodiments, each 2′-MOE modified sugar is independently bonded to a natural phosphate linkage. In some embodiments, 50% or more (e.g., 50%-100%, 50%-90%, 50-80%, or about 50%, 60%, 66%, 70%, 75%, 80%, 90% or more) 2′-OR modified sugars wherein R is not —H are independently bonded to a natural phosphate linkage. In some embodiments, 50% or more (e.g., 50%-100%, 50%-90%, 50-80%, or about 50%, 60%, 66%, 70%, 75%, 80%, 90% or more) 2′-OMe modified sugars are independently bonded to a natural phosphate linkage. In some embodiments, 50% or more (e.g., 50%-100%, 50%-90%, 50-80%, or about 50%, 60%, 66%, 70%, 75%, 80%, 90% or more) 2′-MOE modified sugars are independently bonded to a natural phosphate linkage. In some embodiments, 50% or more (e.g., 50%-100%, 50%-90%, 50-80%, or about 50%, 60%, 66%, 70%, 75%, 80%, 90% or more) internucleotidic linkages bonded to two 2′-OR modified sugars are independently natural phosphate linkages. In some embodiments, 50% or more (e.g., 50%-100%, 50%-90%, 50-80%, or about 50%, 60%, 66%, 70%, 75%, 80%, 90% or more) internucleotidic linkages bonded to two 2′-OMe or 2′-MOE modified sugars are independently natural phosphate linkages.

[0475] In some embodiments, a first subdomain comprises a 5′-end portion, e.g., one having a length of about 1-20, 1-15, 1-10, 3-8, or about 1, 2, 3, 4, 5, 6, 7, 8, 9, or 10 nucleobases. In some embodiments, a 5′-end portion has a length of about 3-6 nucleobases. In some embodiments, a length is one nucleobase. In some embodiments, a length is 2 nucleobases. In some embodiments, a length is 3 nucleobases. In some embodiments, a length is 4 nucleobases. In some embodiments, a length is 5 nucleobases. In some embodiments, a length is 6 nucleobases. In some embodiments, a length is 7 nucleobases. In some embodiments, a length is 8 nucleobases. In some embodiments, a length is 9 nucleobases. In some embodiments, a length is 10 nucleobases. In some embodiments, a 5′-end portion comprises the 5′-end nucleobase of a first subdomain.

[0476] In some embodiments, a 5′-end portion comprises one or more sugars having two 2′-H (e.g., natural DNA sugars). In some embodiments, a 5′-end portion comprises one or more sugars having 2′-OH (e.g., natural RNA sugars). In some embodiments, one or more (e.g., about 1-20, 1-15, 1-10, 3-8, or about 1, 2, 3, 4, 5, 6, 7, 8, 9, or 10) of sugars in a 5′-end portion are independently modified sugars. In some embodiments, about 5%-100% (e.g., about 10%-100%, 20-100%, 30%-100%, 40%-100%, 50%-80%, 50%-85%, 50%-90%, 50%-95%, 60%-80%, 60%-85%, 60%-90%, 60%-95%, 60%-100%, 65%-80%, 65%-85%, 65%-90%, 65%-95%, 65%-100%, 70%-80%, 70%-85%, 70%-90%, 70%-95%, 70%-100%, 75%-80%, 75%-85%, 75%-90%, 75%-95%, 75%-100%, 80%-85%, 80%-90%, 80%-95%, 80%-100%, 85%-90%, 85%-95%, 85%-100%, 90%-95%, 90%-100%, 10%, 20%, 30%, 40%, 50%, 60%, 65%, 70%, 75%, 80%, 85%, 90%, 95%, or 100%, etc.) of sugars in a 5′-end portion are independently modified sugars. In some embodiments, each sugar is independently a modified sugar. In some embodiments, modified sugars are independently selected from a bicyclic sugar (e.g., a LNA sugar), an acyclic sugar (e.g., a UNA sugar), a sugar with a 2′-OR modification, or a sugar with a 2′-N(R)₂ modification, wherein each R is independently optionally substituted C₁₋₆ aliphatic.

[0477] In some embodiments, one or more of the modified sugars independently comprises 2′-F or 2′-OR, wherein R is independently optionally substituted C₁₋₆ aliphatic. In some embodiments, one or more of the modified sugars are independently 2′-F or 2′-OMe. In some embodiments, each modified sugar in a 5′-end portion is independently a bicyclic sugar (e.g., a LNA sugar) or a sugar with a 2′-OR modification wherein R is optionally substituted C₁₋₆ aliphatic. In some embodiments, each modified sugar in a 5′-end portion is independently a bicyclic sugar (e.g., a LNA sugar) or a sugar with a 2′-OR modification wherein R is optionally substituted C₁₋₆ aliphatic. In some embodiments, each modified sugar in a 5′-end portion is independently a sugar with a 2′-OR modification wherein R is optionally substituted C₁₋₆ aliphatic. In some embodiments, R is methyl.

[0478] In some embodiments, one or more (e.g., about 1-10, or about 1, 2, 3, 4, 5, 6, 7, 8, 9, or 10) internucleotidic linkages of a 5′-end portion are independently a modified internucleotidic linkage. In some embodiments, one or more (e.g., about 1-10, or about 1, 2, 3, 4, 5, 6, 7, 8, 9, or 10) internucleotidic linkages of a 5′-end portion are independently a chiral internucleotidic linkage. In some embodiments, one or more (e.g., about 1-10, or about 1, 2, 3, 4, 5, 6, 7, 8, 9, or 10) internucleotidic linkages of a 5′-end portion are independently a chirally controlled internucleotidic linkage. In some embodiments, one or more (e.g., about 1-10, or about 1, 2, 3, 4, 5, 6, 7, 8, 9, or 10) internucleotidic linkages of a 5′-end portion are Rp. In some embodiments, one or more (e.g., about 1-10, or about 1, 2, 3, 4, 5, 6, 7, 8, 9, or 10) internucleotidic linkages of a 5′-end portion are Sp. In some embodiments, each internucleotidic linkage of a 5′-end portion is Sp.

[0479] In some embodiments, a 5′-end portion comprises one or more (e.g., about 1-10, or about 1, 2, 3, 4, 5, 6, 7, 8, 9, or 10) mismatches as described herein. In some embodiments, a 5′-end portion comprises one or more (e.g., about 1-10, or about 1, 2, 3, 4, 5, 6, 7, 8, 9, or 10) wobbles as described herein. In some embodiments, a 5′-end portion is about 60-100% (e.g., 66%, 70%, 75%, 80%, 85%, 90%, 95%, or more) complementary to a target nucleic acid. In some embodiments, a complementarity is 60% or more. In some embodiments, a complementarity is 70% or more. In some embodiments, a complementarity is 75% or more. In some embodiments, a complementarity is 80% or more. In some embodiments, a complementarity is 90% or more.

[0480] In some embodiments, a first subdomain comprises a 3′-end portion, e.g., one having a length of about 1-20, 1-15, 1-10, 1-5, 1-3, 3-8, or about 1, 2, 3, 4, 5, 6, 7, 8, 9, or 10 nucleobases. In some embodiments, a 3′-end portion has a length of about 1-3 nucleobases. In some embodiments, a length is one nucleobase. In some embodiments, a length is 2 nucleobases. In some embodiments, a length is 3 nucleobases. In some embodiments, a length is 4 nucleobases. In some embodiments, a length is 5 nucleobases. In some embodiments, a length is 6 nucleobases. In some embodiments, a length is 7 nucleobases. In some embodiments, a length is 8 nucleobases. In some embodiments, a length is 9 nucleobases. In some embodiments, a length is 10 nucleobases. In some embodiments, a 3′-end portion comprises the 3′-end nucleobase of a first subdomain. In some embodiments, a first subdomain comprises or consists of a 5′-end portion and a 3′-end portion.

[0481] In some embodiments, a 5′-end portion comprises one or more sugars having two 2′-H (e.g., natural DNA sugars). In some embodiments, a 5′-end portion comprises one or more sugars having 2′-OH (e.g., natural RNA sugars). In some embodiments, one or more (e.g., about 1-20, 1-15, 1-10, 3-8, or about 1, 2, 3, 4, 5, 6, 7, 8, 9, or 10) of sugars in a 3′-end portion are independently modified sugars. In some embodiments, about 5%-100% (e.g., about 10%-100%, 20-100%, 30%-100%, 40%-100%, 50%-80%, 50%-85%, 50%-90%, 50%-95%, 60%-80%, 60%-85%, 60%-90%, 60%-95%, 60%-100%, 65%-80%, 65%-85%, 65%-90%, 65%-95%, 65%-100%, 70%-80%, 70%-85%, 70%-90%, 70%-95%, 70%-100%, 75%-80%, 75%-85%, 75%-90%, 75%-95%, 75%-100%, 80%-85%, 80%-90%, 80%-95%, 80%-100%, 85%-90%, 85%-95%, 85%-100%, 90%-95%, 90%-100%, 10%, 20%, 30%, 40%, 50%, 60%, 65%, 70%, 75%, 80%, 85%, 90%, 95%, or 100%, etc.) of sugars in a 3′-end portion are independently modified sugars. In some embodiments, each sugar is independently a modified sugar. In some embodiments, modified sugars are independently selected from a bicyclic sugar (e.g., a LNA sugar), an acyclic sugar (e.g., a UNA sugar), a sugar with a 2′-OR modification, or a sugar with a 2′-N(R)₂ modification, wherein each R is independently optionally substituted C₁₋₆ aliphatic.

[0482] In some embodiments, one or more of the modified sugars independently comprises 2′-F or 2′-OR, wherein R is independently optionally substituted C₁₋₆ aliphatic. In some embodiments, one or more of the modified sugars are independently 2′-F or 2′-OMe. In some embodiments, each modified sugar in a 5′-end portion is independently a bicyclic sugar (e.g., a LNA sugar) or a sugar with a 2′-OR modification wherein R is optionally substituted C₁₋₆ aliphatic. In some embodiments, each modified sugar in a 5′-end portion is independently a bicyclic sugar (e.g., a LNA sugar) or a sugar with a 2′-OR modification wherein R is optionally substituted C₁₋₆ aliphatic. In some embodiments, each modified sugar in a 5′-end portion is independently a sugar with a 2′-OR modification wherein R is optionally substituted C₁₋₆ aliphatic. In some embodiments, R is methyl.

[0483] In some embodiments, compared to a 5′-end portion, a 3′-end portion contains a higher level (in numbers and/or percentage) of 2′-F modified sugars and/or sugars comprising two 2′-H (e.g., natural DNA sugars), and/or a lower level (in numbers and/or percentage) of other types of modified sugars, e.g., bicyclic sugars and/or sugars with 2′-OR modifications wherein R is independently optionally substituted C₁₋₆ aliphatic. In some embodiments, compared to a 5′-end portion, a 3′-end portion contains a higher level of 2′-F modified sugars and/or a lower level of 2′-OR modified sugars wherein R is optionally substituted C₁₋₆ aliphatic. In some embodiments, compared to a 5′-end portion, a 3′-end portion contains a higher level of 2′-F modified sugars and/or a lower level of 2′-OMe modified sugars. In some embodiments, compared to a 5′-end portion, a 3′-end portion contains a lower level of 2′-F modified sugars and/or a higher level of 2′-OR modified sugars wherein R is optionally substituted C₁₋₆ aliphatic. In some embodiments, compared to a 5′-end portion, a 3′-end portion contains a lower level of 2′-F modified sugars and/or a higher level of 2′-OMe modified sugars. In some embodiments, compared to a 5′-end portion, a 3′-end portion contains a higher level of natural DNA sugars and/or a lower level of 2′-OR modified sugars wherein R is optionally substituted C₁₋₆ aliphatic. In some embodiments, compared to a 5′-end portion, a 3′-end portion contains a higher level of natural DNA sugars and/or a lower level of 2′-OMe modified sugars. In some embodiments, a 3′-end portion contains low levels (e.g., no more than 50%, 40%, 30%, 25%, 20%, or 10%, or no more than 1, 2, 3, 4, 5, 6, 7, 8, 9, or 10) of modified sugars which are bicyclic sugars or sugars comprising 2′-OR wherein R is optionally substituted C₁₋₆ aliphatic (e.g., methyl). In some embodiments, a 3′-end portion contains no modified sugars which are bicyclic sugars or sugars comprising 2′-OR wherein R is optionally substituted C₁₋₆ aliphatic (e.g., methyl).

[0484] In some embodiments, one or more modified sugars independently comprise 2′-F. In some embodiments, no modified sugars comprises 2′-OMe or other 2′-OR modifications wherein R is optionally substituted C₁₋₆ aliphatic. In some embodiments, each sugar of a 3′-end portion independently comprises two 2′-H or a 2′-F modification. In some embodiments, a 3′-end portion comprises 1, 2, 3, 4, or 5 2′-F modified sugars. In some embodiments, a 3′-end portion comprises 1-3 2′-F modified sugars. In some embodiments, a 3′-end portion comprises 1, 2, 3, 4, or 5 natural DNA sugars. In some embodiments, a 3′-end portion comprises 1-3 natural DNA sugars.

[0485] In some embodiments, one or more (e.g., about 1-10, or about 1, 2, 3, 4, 5, 6, 7, 8, 9, or 10) internucleotidic linkages of a 3′-end portion are independently a modified internucleotidic linkage. In some embodiments, one or more (e.g., about 1-10, or about 1, 2, 3, 4, 5, 6, 7, 8, 9, or 10) internucleotidic linkages of a 3′-end portion are independently a chiral internucleotidic linkage. In some embodiments, one or more (e.g., about 1-10, or about 1, 2, 3, 4, 5, 6, 7, 8, 9, or 10) internucleotidic linkages of a 3′-end portion are independently a chirally controlled internucleotidic linkage. In some embodiments, one or more (e.g., about 1-10, or about 1, 2, 3, 4, 5, 6, 7, 8, 9, or 10) internucleotidic linkages of a 3′-end portion are Rp. In some embodiments, one or more (e.g., about 1-10, or about 1, 2, 3, 4, 5, 6, 7, 8, 9, or 10) internucleotidic linkages of a 3′-end portion are Sp. In some embodiments, each internucleotidic linkage of a 3′-end portion is Sp. In some embodiments, a 3′-end portion contains a higher level (in number and/or percentage) of Rp internucleotidic linkage and/or natural phosphate linkage compared to a 5′-end portion.

[0486] In some embodiments, a 3′-end portion comprises one or more (e.g., about 1-10, or about 1, 2, 3, 4, 5, 6, 7, 8, 9, or 10) mismatches as described herein. In some embodiments, a 3′-end portion comprises one or more (e.g., about 1-10, or about 1, 2, 3, 4, 5, 6, 7, 8, 9, or 10) wobbles as described herein. In some embodiments, a 3′-end portion is about 60-100% (e.g., 66%, 70%, 75%, 80%, 85%, 90%, 95%, or more) complementary to a target nucleic acid. In some embodiments, a complementarity is 60% or more. In some embodiments, a complementarity is 70% or more. In some embodiments, a complementarity is 75% or more. In some embodiments, a complementarity is 80% or more. In some embodiments, a complementarity is 90% or more.

[0487] In some embodiments, a first subdomain recruits, promotes or contribute to recruitment of, a protein such as an ADAR protein, e.g., ADAR1, ADAR2, etc. In some embodiments, a first subdomain recruits, or promotes or contribute to interactions with, a protein such as an ADAR protein. In some embodiments, a first subdomain contacts with a RNA binding domain (RBD) of ADAR. In some embodiments, a first subdomain contacts with a catalytic domain of ADAR which has a deaminase activity. In some embodiments, a first subdomain contact with a domain that has a deaminase activity of ADAR1. In some embodiments, a first subdomain contact with a domain that has a deaminase activity of ADAR2. In some embodiments, various nucleobases, sugars and/or internucleotidic linkages of a first subdomain may interact with one or more residues of proteins, e.g., ADAR proteins.

[0488] Second Subdomains

[0489] As described herein, in some embodiment, an oligonucleotide comprises a first domain and a second domain from 5′ to 3′. In some embodiments, a second domain comprises or consists of a first subdomain, a second subdomain, and a third subdomain from 5′ to 3′. Certain embodiments of a second subdomain are described below as examples. In some embodiments, a second subdomain comprise a nucleoside opposite to a target adenosine to be modified (e.g., conversion to I). In some embodiments, a second subdomain comprises one and no more than one nucleoside opposite to a target adenosine. In some embodiments, each nucleoside opposite to a target adenosine of an oligonucleotide is in a second subdomain.

[0490] In some embodiments, a second subdomain has a length of about 1-10, 1-5, 1-3, or about 1, 2, 3, 4, 5, 6, 7, 8, 9, or 10 nucleobases. In some embodiments, a second subdomain has a length of about 1-10 nucleobases. In some embodiments, a second subdomain has a length of about 1-5 nucleobases. In some embodiments, a second subdomain has a length of about 1-3 nucleobases. In some embodiments, a second subdomain has a length of 1 nucleobase. In some embodiments, a second subdomain has a length of 2 nucleobases. In some embodiments, a second subdomain has a length of 3 nucleobases. In some embodiments, all the nucleosides in a second subdomain are 5′-N₁N₀N₋₁-3′.

[0491] In some embodiments, one or more (e.g., 1-20, 1, 2, 3, 4, 5, 6, 7, 8, 9, or 10, etc.) mismatches exist in a second subdomain when an oligonucleotide is aligned with a target nucleic acid for complementarity. In some embodiments, there is 1 mismatch. In some embodiments, there are 2 mismatches. In some embodiments, there are 3 mismatches. In some embodiments, there are 4 mismatches. In some embodiments, there are 5 mismatches. In some embodiments, there are 6 mismatches. In some embodiments, there are 7 mismatches. In some embodiments, there are 8 mismatches. In some embodiments, there are 9 mismatches. In some embodiments, there are 10 mismatches.

[0492] In some embodiments, a second subdomain comprises one and no more than one mismatch. In some embodiments, a second subdomain comprises two and no more than two mismatches. In some embodiments, a second subdomain comprises two and no more than two mismatches, wherein one mismatch is between a target adenosine and its opposite nucleoside, and/or one mismatch is between a nucleoside next to a target adenosine and its corresponding nucleoside in an oligonucleotide. In some embodiments, a mismatch between a nucleoside next to a target adenosine and its corresponding nucleoside in an oligonucleotide is a wobble. In some embodiments, a wobble is I-C. In some embodiments, C is next to a target adenosine, e.g., immediately to its 3′ side.

[0493] In some embodiments, one or more (e.g., 1-20, 1, 2, 3, 4, 5, 6, 7, 8, 9, or 10, etc.) wobbles exist in a second subdomain when an oligonucleotide is aligned with a target nucleic acid for complementarity. In some embodiments, there is 1 wobble. In some embodiments, there are 2 wobbles. In some embodiments, there are 3 wobbles. In some embodiments, there are 4 wobbles. In some embodiments, there are 5 wobbles. In some embodiments, there are 6 wobbles. In some embodiments, there are 7 wobbles. In some embodiments, there are 8 wobbles. In some embodiments, there are 9 wobbles. In some embodiments, there are 10 wobbles.

[0494] In some embodiments, duplexes of oligonucleotides and target nucleic acids in a second subdomain region comprise one or more bulges each of which independently comprise one or more mismatches that are not wobbles. In some embodiments, there are 0-10 (e.g., 0-1, 0-2, 0-3, 0-4, 0-5, 0-6, 0-7, 0-8, 0-9, 0-10, 1-2, 1-3, 1-4, 1-5, 1-6, 1-7, 1-8, 1-9, 1-10, 2-3, 2-4, 2-5, 2-6, 2-7, 2-8, 2-9, 2-10, 3- 4, 3-5, 3-6, 3-7, 3-8, 3-9, 3-10, 0, 1, 2, 3, 4, 5, 6, 7, 8, 9, or 10, etc.) bulges. In some embodiments, the number is 0. In some embodiments, the number is 1. In some embodiments, the number is 2. In some embodiments, the number is 3. In some embodiments, the number is 4. In some embodiments, the number is 5.

[0495] In some embodiments, a second subdomain is fully complementary to a target nucleic acid.

[0496] In some embodiments, a second subdomain comprises one or more modified nucleobases.

[0497] In some embodiments, a second subdomain comprise a nucleoside opposite to a target adenosine, e.g., when the oligonucleotide forms a duplex with a target nucleic acid. Suitable nucleobases including modified nucleobases in opposite nucleosides are described herein. For example, in some embodiment, an opposite nucleobase is optionally substituted or protected nucleobase selected from C, a tautomer of C, U, a tautomer of U, A, a tautomer of A, and a nucleobase which is or comprises Ring BA having the structure of BA-I, BA-I-a, BA-I-b, BA-II, BA-II-a, BA-II-b, BA-III, BA-III-a, BA-III-b, BA-IV, BA-IV-a, BA-IV-b, BA-V, BA-V-a, BA-V-b, or BA-VI, or a tautomer of Ring BA. For example, in some embodiments, an opposite nucleobase is selected from

[chemical structure]

In some embodiments, an opposite nucleobase is

[chemical structure]

In some embodiments, an opposite nucleobase is

[chemical structure]

In some embodiments, an opposite nucleobase is

[chemical structure]

In some embodiments, an opposite nucleobase is

[chemical structure]

In some embodiments, an opposite nucleobase is

[chemical structure]

In some embodiments, an opposite nucleobase is

[chemical structure]

In some embodiments, an opposite nucleobase is

[chemical structure]

In some embodiments, an opposite nucleobase is

[chemical structure]

In some embodiments, an opposite nucleobase is

[chemical structure]

In some embodiments, an opposite nucleobase is

[chemical structure]

In some embodiments, an opposite nucleobase is

[chemical structure]

In some embodiments, an opposite nucleobase is or

[chemical structure]

[0498] In some embodiments, a second subdomain comprises a modified nucleobase next to an opposite nucleobase. In some embodiments, it is to the 5′ side. In some embodiments, it is to the 3′ side. In some embodiments, on each side there is independently a modified nucleobase. Among other things, the present disclosure recognizes that nucleobases adjacent to (e.g., next to) opposite nucleobases may cause disruption (e.g., steric hindrance) to recognition, binding, interaction, and/or modification of target nucleic acids, oligonucleotides and/or duplexes thereof. In some embodiments, disruption is associated with an adjacent G. In some embodiments, the present disclosure provides nucleobases that can replace G and provide improved stability and/or activities compared to G. For example, in some embodiments, an adjacent nucleobase (e.g., 3′-immediate nucleoside of an opposite nucleoside) is hypoxanthine (replacing G to reduce disruption (e.g., steric hindrance) and/or forming wobble base pairing with C). In some embodiments, an adjacent nucleobase is a derivative of hypoxanthine. In some embodiments, 3′-immediate nucleoside comprises a nucleobase which is or comprise Ring BA having the structure of formula BA-VI. In some embodiments, an adjacent nucleobase is

[chemical structure]

In some embodiments, an adjacent nucleobase is

[chemical structure]

[0499] In some embodiments, a second subdomain comprises one or more sugars comprising two 2′-H (e.g., natural DNA sugars). In some embodiments, a second subdomain comprises one or more sugars comprising 2′-OH (e.g., natural RNA sugars). In some embodiments, a second subdomain comprises one or more modified sugars. In some embodiments, a modified sugar comprises a 2′-modification. In some embodiments, a modified sugar is a bicyclic sugar, e.g., a LNA sugar. In some embodiments, a modified sugar is an acyclic sugar (e.g., by breaking a C2-C3 bond of a corresponding cyclic sugar). In some embodiments, an opposite nucleoside comprises an acyclic sugar such as an UNA sugar. In some embodiments, such an acyclic sugar provides flexibility for proteins to perform modifications on a target adenosine.

[0500] In some embodiments, a second subdomain comprises about 1-10 (e.g., about 1, 2, 3, 4, 5, 6, 7, 8, 9, or 10) modified sugars independently selected from a bicyclic sugar (e.g., a LNA sugar), an acyclic sugar (e.g., a UNA sugar), a sugar with a 2′-OR modification, or a sugar with a 2′-N(R)₂ modification, wherein each R is independently optionally substituted C₁₋₆ aliphatic. In some embodiments, about 5%-100% (e.g., about 10%-100%, 20-100%, 30%-100%, 40%-100%, 50%-80%, 50%-85%, 50%-90%, 50%-95%, 60%-80%, 60%-85%, 60%-90%, 60%-95%, 60%-100%, 65%-80%, 65%-85%, 65%-90%, 65%-95%, 65%-100%, 70%-80%, 70%-85%, 70%-90%, 70%-95%, 70%-100%, 75%-80%, 75%-85%, 75%-90%, 75%-95%, 75%-100%, 80%-85%, 80%-90%, 80%-95%, 80%-100%, 85%-90%, 85%-95%, 85%-100%, 90%-95%, 90%-100%, 10%, 20%, 30%, 40%, 50%, 60%, 65%, 70%, 75%, 80%, 85%, 90%, 95%, or 100%, etc.) of sugars in a second subdomain are independently modified sugars selected from a bicyclic sugar (e.g., a LNA sugar), an acyclic sugar (e.g., a UNA sugar), a sugar with a 2′-OR modification, or a sugar with a 2′-N(R)₂ modification, wherein each R is independently optionally substituted C₁₋₆ aliphatic.

[0501] In some embodiments, low levels (e.g., no more than 50%, 40%, 30%, 25%, 20%, or 10%, or no more than 1, 2, 3, 4, 5, 6, 7, 8, 9, or 10) of sugars in a second subdomain independently comprise a 2′-OR modification, wherein R is optionally substituted C₁₋₆ aliphatic, or a 2′-O-L^{B}-4′ modification. In some embodiments, each sugar in a second subdomain independently contains no 2′-OR modification, wherein R is optionally substituted C₁₋₆ aliphatic, or a 2′-O-L^{B}-4′ modification, wherein L^{B} is optionally substituted —CH₂—. In some embodiments, each sugar in a second subdomain independently contains no 2′-OMe.

[0502] In some embodiments, high levels (e.g., more than 50%, 60%, 70%, 80%, 90%, or 95%, 99%, or more than 10, 11, 12, 13, 14, 15, 16, 17, 18, 19, 20) of sugars in a second subdomain independently comprise a 2′-OR modification, wherein R is optionally substituted C₁₋₆ aliphatic, or a 2′-O-L^{B}-4 modification. In some embodiments, each sugar in a second subdomain independently contains a 2′-OR modification, wherein R is optionally substituted C₁₋₆ aliphatic, or a 2′-O-L^{B}-4′ modification, wherein L^{B} is optionally substituted —CH₂—. In some embodiments, each sugar in a second subdomain independently comprises 2′-OMe.

[0503] In some embodiments, a second subdomain comprises one or more 2′-F modified sugars.

[0504] In some embodiments, a high level (e.g., about 60-100%, or about 60%, 65%, 70%, 75%, 80%, 85%, 90%, 95% or more, or 100%) or all sugars in a second subdomain are independently 2′-F modified sugars, sugars comprising two 2′-H (e.g., natural DNA sugars), or sugars comprising 2′-OH (e.g., natural RNA sugars). In some embodiments, a high level (e.g., about 60-100%, or about 60%, 65%, 70%, 75%, 80%, 85%, 90%, 95% or more, or 100%) or all sugars in a second subdomain are independently 2′-F modified sugars, natural DNA sugars, or natural RNA sugars. In some embodiments, a high level (e.g., about 60-100%, or about 60%, 65%, 70%, 75%, 80%, 85%, 90%, 95% or more, or 100%) or all sugars in a second subdomain are independently 2′-F modified sugars and natural DNA sugars. In some embodiments, a level is 100%. In some embodiments, a second subdomain comprise 1, 2, 3, 4 or 5 2′-F modified sugars. In some embodiments, a second subdomain comprise 1, 2, 3, 4 or 5 sugars comprising two 2′-H. In some embodiments, a second subdomain comprise 1, 2, 3, 4 or 5 natural DNA sugars. In some embodiments, a second subdomain comprise 1, 2, 3, 4 or 5 sugars comprising 2′-OH. In some embodiments, a second subdomain comprise 1, 2, 3, 4 or 5 natural RNA sugars. In some embodiments, a number is 1. In some embodiments, a number is 2. In some embodiments, a number is 3. In some embodiments, a number is 4. In some embodiments, a number is 5.

[0505] In some embodiments, low levels (e.g., no more than 50%, 40%, 30%, 25%, 20%, or 10%, or no more than 1, 2, 3, 4, 5, 6, 7, 8, 9, or 10) of sugars in a second subdomain independently comprise a 2′-F modification. In some embodiments, each sugar in a second subdomain independently contains no 2′-F modification. In some embodiments, each sugar in a second subdomain independently contains no 2′-F.

[0506] In some embodiments, sugars of opposite nucleosides to target adenosines (“opposite sugars”), sugars of nucleosides 5′-next to opposite nucleosides (“5′-next sugars”), and/or sugars of nucleosides 3′-next to opposite nucleosides (“3-next sugars”) are independently and optionally 2′-F modified sugars, sugars comprising two 2′-H (e.g., natural DNA sugars), or sugars comprising 2′-OH (e.g., natural RNA sugars). In some embodiments, an opposite sugar is a 2′-F modified sugar. In some embodiments, an opposite sugar is a sugar comprising two 2′-H. In some embodiments, an opposite sugar is a natural DNA sugar. In some embodiments, an opposite sugar is a sugar comprising 2′-OH. In some embodiments, an opposite sugar is a natural RNA sugar. For example, in some embodiments, each of a 5′-next sugar, an opposite sugar and a 3′-next sugar in an oligonucleotide is independently a natural DNA sugar. In some embodiments, a 5′-next sugar is a 2′-F modified sugar, and each of an opposite sugar and a 3′-next sugar is independently a natural DNA sugar.

[0507] In some embodiments, a 5′-next sugar is a 2′-F modified sugar. In some embodiments, a 5′-next sugar is a sugar comprising two 2′-H. In some embodiments, a 5′-next sugar is a natural DNA sugar. In some embodiments, a 5′-next sugar is a sugar comprising 2′-OH. In some embodiments, a 5′-next sugar is a natural RNA sugar.

[0508] In some embodiments, a 3′-next sugar is a 2′-F modified sugar. In some embodiments, a 3′-next sugar is a sugar comprising two 2′-H. In some embodiments, a 3′-next sugar is a natural DNA sugar. In some embodiments, a 3′-next sugar is a sugar comprising 2′-OH. In some embodiments, a 3′-next sugar is a natural RNA sugar.

[0509] In some embodiments, no more than about 1%-95% (e.g., no more than about 1%, 5%, 10%, 15%, 20%, 25%, 30%, 35%, 40%, 45%, 50%, 55%, 60%, 65%, 70%, 75%, 80%, 85%, 90%, 95%, etc.) of sugars in a second subdomain comprises 2′-MOE. In some embodiments, no more than about 50% of sugars in a second subdomain comprises 2′-MOE. In some embodiments, no sugars in a second subdomain comprises 2′-MOE.

[0510] In some embodiments, a second subdomain comprise about 1-10 (e.g., about 1-5, 1-4, 1-3, about 1, 2, 3, 4, 5, 6, 7, 8, 9, or 10) modified internucleotidic linkages. In some embodiments, about 5%-100% (e.g., about 10%-100%, 20-100%, 30%-100%, 40%-100%, 50%-80%, 50%-85%, 50%-90%, 50%-95%, 60%-80%, 60%-85%, 60%-90%, 60%-95%, 60%-100%, 65%-80%, 65%-85%, 65%-90%, 65%-95%, 65%-100%, 70%-80%, 70%-85%, 70%-90%, 70%-95%, 70%-100%, 75%-80%, 75%-85%, 75%-90%, 75%-95%, 75%-100%, 80%-85%, 80%-90%, 80%-95%, 80%-100%, 85%-90%, 85%-95%, 85%-100%, 90%-95%, 90%-100%, 10%, 20%, 30%, 40%, 50%, 60%, 65%, 70%, 75%, 80%, 85%, 90%, 95%, or 100%, etc.) of internucleotidic linkages in a second subdomain are modified internucleotidic linkages. In some embodiments, each internucleotidic linkage in a second subdomain is independently a modified internucleotidic linkage. In some embodiments, each modified internucleotidic linkages is independently a chiral internucleotidic linkage. In some embodiments, a modified or chiral internucleotidic linkage is a phosphorothioate internucleotidic linkage. In some embodiments, a modified or chiral internucleotidic linkage is a non-negatively charged internucleotidic linkage. In some embodiments, a modified or chiral internucleotidic linkage is a neutral internucleotidic linkage, e.g., n001. In some embodiments, each modified internucleotidic linkages is independently a phosphorothioate internucleotidic linkage or a non-negatively charged internucleotidic linkage. In some embodiments, each modified internucleotidic linkages is independently a phosphorothioate internucleotidic linkage or a neutral internucleotidic linkage. In some embodiments, each modified internucleotidic linkages is independently a phosphorothioate internucleotidic linkage. In some embodiments, at least about 1-10 (e.g., about 1-5, 1-4, 1-3, about 1, 2, 3, 4, 5, 6, 7, 8, 9, or 10) chiral internucleotidic linkages in a second subdomain is chirally controlled. In some embodiments, at least 5%-100% (e.g., about 10%-100%, 20-100%, 30%-100%, 40%-100%, 50%-80%, 50%-85%, 50%-90%, 50%-95%, 60%-80%, 60%-85%, 60%-90%, 60%-95%, 60%-100%, 65%-80%, 65%-85%, 65%-90%, 65%-95%, 65%-100%, 70%-80%, 70%-85%, 70%-90%, 70%-95%, 70%-100%, 75%-80%, 75%-85%, 75%-90%, 75%-95%, 75%-100%, 80%-85%, 80%-90%, 80%-95%, 80%-100%, 85%-90%, 85%-95%, 85%-100%, 90%-95%, 90%-100%, 10%, 20%, 30%, 40%, 50%, 60%, 65%, 70%, 75%, 80%, 85%, 90%, 95%, or 100%, etc.) of chiral internucleotidic linkages in a second subdomain is chirally controlled. In some embodiments, at least 5%-100% (e.g., about 10%-100%, 20-100%, 30%-100%, 40%-100%, 50%-80%, 50%-85%, 50%-90%, 50%-95%, 60%-80%, 60%-85%, 60%-90%, 60%-95%, 60%-100%, 65%-80%, 65%-85%, 65%-90%, 65%-95%, 65%-100%, 70%-80%, 70%-85%, 70%-90%, 70%-95%, 70%-100%, 75%-80%, 75%-85%, 75%-90%, 75%-95%, 75%-100%, 80%-85%, 80%-90%, 80%-95%, 80%-100%, 85%-90%, 85%-95%, 85%-100%, 90%-95%, 90%-100%, 10%, 20%, 30%, 40%, 50%, 60%, 65%, 70%, 75%, 80%, 85%, 90%, 95%, or 100%, etc.) of phosphorothioate internucleotidic linkages in a second subdomain is chirally controlled. In some embodiments, each is independently chirally controlled. In some embodiments, at least about 1-10 (e.g., about 1-5, 1-4, 1-3, about 1, 2, 3, 4, 5, 6, 7, 8, 9, or 10) chiral internucleotidic linkages in a second subdomain is Sp. In some embodiments, at least about 1-10 (e.g., about 1-5, 1-4, 1-3, about 1, 2, 3, 4, 5, 6, 7, 8, 9, or 10) phosphorothioate internucleotidic linkages in a second subdomain is Sp. In some embodiments, at least 5%-100% (e.g., about 10%-100%, 20-100%, 30%-100%, 40%-100%, 50%-80%, 50%-85%, 50%-90%, 50%-95%, 60%-80%, 60%-85%, 60%-90%, 60%-95%, 60%-100%, 65%-80%, 65%-85%, 65%-90%, 65%-95%, 65%-100%, 70%-80%, 70%-85%, 70%-90%, 70%-95%, 70%-100%, 75%-80%, 75%-85%, 75%-90%, 75%-95%, 75%-100%, 80%-85%, 80%-90%, 80%-95%, 80%-100%, 85%-90%, 85%-95%, 85%-100%, 90%-95%, 90%-100%, 10%, 20%, 30%, 40%, 50%, 60%, 65%, 70%, 75%, 80%, 85%, 90%, 95%, or 100%, etc.) of chiral internucleotidic linkages in a second subdomain is Sp. In some embodiments, at least 5%-100% (e.g., about 10%-100%, 20-100%, 30%-100%, 40%-100%, 50%-80%, 50%-85%, 50%-90%, 50%-95%, 60%-80%, 60%-85%, 60%-90%, 60%-95%, 60%-100%, 65%-80%, 65%-85%, 65%-90%, 65%-95%, 65%-100%, 70%-80%, 70%-85%, 70%-90%, 70%-95%, 70%-100%, 75%-80%, 75%-85%, 75%-90%, 75%-95%, 75%-100%, 80%-85%, 80%-90%, 80%-95%, 80%-100%, 85%-90%, 85%-95%, 85%-100%, 90%-95%, 90%-100%, 10%, 20%, 30%, 40%, 50%, 60%, 65%, 70%, 75%, 80%, 85%, 90%, 95%, or 100%, etc.) of phosphorothioate internucleotidic linkages in a second subdomain is Sp. In some embodiments, the number is one or more. In some embodiments, the number is 2 or more. In some embodiments, the number is 3 or more. In some embodiments, the number is 4 or more. In some embodiments, a percentage is at least about 50%. In some embodiments, a percentage is at least about 55%. In some embodiments, a percentage is at least about 60%. In some embodiments, a percentage is at least about 65%. In some embodiments, a percentage is at least about 70%. In some embodiments, a percentage is at least about 75%. In some embodiments, a percentage is at least about 80%. In some embodiments, a percentage is at least about 85%. In some embodiments, a percentage is at least about 90%. In some embodiments, a percentage is at least about 95%. In some embodiments, a percentage is about 100%. In some embodiments, each internucleotidic linkage linking two second subdomain nucleosides is independently a modified internucleotidic linkage. In some embodiments, each modified internucleotidic linkages is independently a chiral internucleotidic linkage. In some embodiments, each modified internucleotidic linkages is independently a phosphorothioate internucleotidic linkage. In some embodiments, each chiral internucleotidic linkage is independently a phosphorothioate internucleotidic linkage. In some embodiments, each modified internucleotidic linkages is independently a Sp chiral internucleotidic linkage. In some embodiments, each modified internucleotidic linkages is independently a Sp phosphorothioate internucleotidic linkage. In some embodiments, each chiral internucleotidic linkages is independently a Sp phosphorothioate internucleotidic linkage. In some embodiments, an internucleotidic linkage of a second subdomain is bonded to two nucleosides of the second subdomain. In some embodiments, an internucleotidic linkage bonded to a nucleoside in a second subdomain and a nucleoside in a first or third subdomain may be properly considered an internucleotidic linkage of a second subdomain. In some embodiments, an internucleotidic linkage bonded to a nucleoside in a second subdomain and a nucleoside in a first or third subdomain is a modified internucleotidic linkage; in some embodiments, it is a chiral internucleotidic linkage; in some embodiments, it is chirally controlled; in some embodiments, it is Rp; in some embodiments, it is Sp.

[0511] In some embodiments, a second subdomain comprises a certain level of Rp internucleotidic linkages. In some embodiments, a level is about e.g., about 5%-100%, about 10%-100%, 20-100%, 30%-100%, 40%-100%, 50%-80%, 50%-85%, 50%-90%, 50%-95%, 60%-80%, 60%-85%, 60%-90%, 60%-95%, 60%-100%, 65%-80%, 65%-85%, 65%-90%, 65%-95%, 65%-100%, 70%-80%, 70%-85%, 70%-90%, 70%-95%, 70%-100%, 75%-80%, 75%-85%, 75%-90%, 75%-95%, 75%-100%, 80%-85%, 80%-90%, 80%-95%, 80%-100%, 85%-90%, 85%-95%, 85%-100%, 90%-95%, 90%-100%, 10%, 20%, 30%, 40%, 50%, 60%, 65%, 70%, 75%, 80%, 85%, 90%, 95%, or 100%, etc. of all internucleotidic linkages in a second subdomain. In some embodiments, a level is about e.g., about 5%-100%, about 10%-100%, 20-100%, 30%-100%, 40%-100%, 50%-80%, 50%-85%, 50%-90%, 50%-95%, 60%-80%, 60%-85%, 60%-90%, 60%-95%, 60%-100%, 65%-80%, 65%-85%, 65%-90%, 65%-95%, 65%-100%, 70%-80%, 70%-85%, 70%-90%, 70%-95%, 70%-100%, 75%-80%, 75%-85%, 75%-90%, 75%-95%, 75%-100%, 80%-85%, 80%-90%, 80%-95%, 80%-100%, 85%-90%, 85%-95%, 85%-100%, 90%-95%, 90%-100%, 10%, 20%, 30%, 40%, 50%, 60%, 65%, 70%, 75%, 80%, 85%, 90%, 95%, or 100%, etc. of all chiral internucleotidic linkages in a second subdomain. In some embodiments, a level is about e.g., about 5%-100%, about 10%-100%, 20-100%, 30%-100%, 40%-100%, 50%-80%, 50%-85%, 50%-90%, 50%-95%, 60%-80%, 60%-85%, 60%-90%, 60%-95%, 60%-100%, 65%-80%, 65%-85%, 65%-90%, 65%-95%, 65%-100%, 70%-80%, 70%-85%, 70%-90%, 70%-95%, 70%-100%, 75%-80%, 75%-85%, 75%-90%, 75%-95%, 75%-100%, 80%-85%, 80%-90%, 80%-95%, 80%-100%, 85%-90%, 85%-95%, 85%-100%, 90%-95%, 90%-100%, 10%, 20%, 30%, 40%, 50%, 60%, 65%, 70%, 75%, 80%, 85%, 90%, 95%, or 100%, etc. of all chirally controlled internucleotidic linkages in a second subdomain. In some embodiments, a percentage is about or no more than about 50%. In some embodiments, a percentage is at least about 55%. In some embodiments, a percentage is at least about 60%. In some embodiments, a percentage is at least about 65%. In some embodiments, a percentage is at least about 70%. In some embodiments, a percentage is at least about 75%. In some embodiments, a percentage is at least about 80%. In some embodiments, a percentage is at least about 85%. In some embodiments, a percentage is at least about 90%. In some embodiments, a percentage is at least about 95%. In some embodiments, a percentage is about 100%. In some embodiments, a percentage is about or no more than about 5%. In some embodiments, a percentage is about or no more than about 10%. In some embodiments, a percentage is about or no more than about 15%. In some embodiments, a percentage is about or no more than about 20%. In some embodiments, a percentage is about or no more than about 25%. In some embodiments, a percentage is about or no more than about 30%. In some embodiments, a percentage is about or no more than about 35%. In some embodiments, a percentage is about or no more than about 40%. In some embodiments, a percentage is about or no more than about 45%. In some embodiments, a percentage is about or no more than about 50%. In some embodiments, 1-10 (e.g., about 1-5, 1-4, 1-3, about 1, 2, 3, 4, 5, 6, 7, 8, 9, or 10) internucleotidic linkages are independently Rp chiral internucleotidic linkages. In some embodiments, the number is about or no more than about 1. In some embodiments, the number is about or no more than about 2. In some embodiments, the number is about or no more than about 3. In some embodiments, the number is about or no more than about 4. In some embodiments, the number is about or no more than about 5. In some embodiments, the number is about or no more than about 6. In some embodiments, the number is about or no more than about 7. In some embodiments, the number is about or no more than about 8. In some embodiments, the number is about or no more than about 9. In some embodiments, the number is about or no more than about 10. In some embodiments, a second subdomain comprise a higher level (in number and/or percentage) of Rp internucleotidic linkage compared to other portions (e.g., a first domain, a second domain overall, a first subdomain, a third subdomain, or portions thereof). In some embodiments, a second subdomain comprise a higher level (in number and/or percentage) of Rp internucleotidic linkage than Sp internucleotidic linkage.

[0512] In some embodiments, each phosphorothioate internucleotidic linkage in a second subdomain is independently chirally controlled. In some embodiments, each is independently Sp or Rp. In some embodiments, a high level is Sp as described herein. In some embodiments, each phosphorothioate internucleotidic linkage in a second subdomain is chirally controlled and is Sp. In some embodiments, one or more, e.g., about 1-5 (e.g., about 1, 2, 3, 4, or 5) is Rp.

[0513] In some embodiments, each internucleotidic linkage bonded to a natural DNA or RNA or 2′-F modified sugar in a second subdomain is independently a modified internucleotidic linkage as described herein. In some embodiments, each such modified internucleotidic linkage is independently a phosphorothioate or non-negatively charged internucleotidic linkage such as a phosphoryl guanidine internucleotidic linkage like n001. In some embodiments, each such modified internucleotidic linkage is independently a phosphorothioate or n001 internucleotidic linkage. In some embodiments, each internucleotidic linkage bonded to two second subdomain nucleosides is independently a phosphorothioate internucleotidic linkage. In some embodiments, each phosphorothioate internucleotidic linkage bonded to two second subdomain nucleosides is independently chirally controlled and is Sp. In some embodiments, one or more internucleotidic linkages bonded to a second subdomain nucleoside are independently non-negatively charged internucleotidic linkages such as phosphoryl guanidine internucleotidic linkages like n001. In some embodiments, an internucleotidic linkage bonded to N₋₁ and N₋₂ is an non-negatively charged internucleotidic linkage. In some embodiments, it is a phosphoryl guanidine internucleotidic linkage. In some embodiments, it is n001. In some embodiments, it is chirally controlled and is Rp. In some embodiments, it is chirally controlled and is Sp. In some embodiments, N₋₁ comprises hypoxanthine and in some embodiments, is deoxyinosine. In some embodiments, a phosphoryl guanidine internucleotidic linkage such as n001 bonded to 3′ position of a nucleoside comprising hypoxanthine is chirally controlled and is Sp. In some embodiments, oligonucleotides comprising such Sp phosphoryl guanidine internucleotidic linkages such as Sp n001 bonded to 3′ position of nucleosides comprising hypoxanthine (e.g., deoxyinosine) provide various benefits, e.g., higher activities, better properties, lower manufacturing cost, and/or more readily available manufacturing materials, etc.

[0514] In some embodiments, as illustrated in certain examples, a second subdomain comprises one or more non-negatively charged internucleotidic linkages, each of which is optionally and independently chirally controlled. In some embodiments, each non-negatively charged internucleotidic linkage is independently n001. In some embodiments, a chiral non-negatively charged internucleotidic linkage is not chirally controlled. In some embodiments, each chiral non-negatively charged internucleotidic linkage is not chirally controlled. In some embodiments, a chiral non-negatively charged internucleotidic linkage is chirally controlled. In some embodiments, a chiral non-negatively charged internucleotidic linkage is chirally controlled and is Rp. In some embodiments, a chiral non-negatively charged internucleotidic linkage is chirally controlled and is Sp. In some embodiments, each chiral non-negatively charged internucleotidic linkage is chirally controlled. In some embodiments, the number of non-negatively charged internucleotidic linkages in a second subdomain is about 1-5, or about 1, 2, 3, 4, or 5. In some embodiments, it is about 1. In some embodiments, it is about 2. In some embodiments, it is about 3. In some embodiments, it is about 4. In some embodiments, it is about 5. In some embodiments, two or more non-negatively charged internucleotidic linkages are consecutive. In some embodiments, no two non-negatively charged internucleotidic linkages are consecutive. In some embodiments, all non-negatively charged internucleotidic linkages in a second subdomain are consecutive (e.g., 3 consecutive non-negatively charged internucleotidic linkages). In some embodiments, a non-negatively charged internucleotidic linkage, or two or more (e.g., about 2, about 3, about 4 etc.) consecutive non-negatively charged internucleotidic linkages, are at the 3′-end of a second subdomain. In some embodiments, the last two or three or four internucleotidic linkages of a second subdomain comprise at least one internucleotidic linkage that is not a non-negatively charged internucleotidic linkage. In some embodiments, the last two or three or four internucleotidic linkages of a second subdomain comprise at least one internucleotidic linkage that is not n001. In some embodiments, the internucleotidic linkage linking the last two nucleosides of a second subdomain is a non-negatively charged internucleotidic linkage. In some embodiments, the internucleotidic linkage linking the last two nucleosides of a second subdomain is a Sp non-negatively charged internucleotidic linkage. In some embodiments, the internucleotidic linkage linking the last two nucleosides of a second subdomain is a Rp non-negatively charged internucleotidic linkage. In some embodiments, the internucleotidic linkage linking the last two nucleosides of a second subdomain is a phosphorothioate internucleotidic linkage. In some embodiments, the internucleotidic linkage linking the last two nucleosides of a second subdomain is a Sp phosphorothioate internucleotidic linkage. In some embodiments, the internucleotidic linkage linking the first two nucleosides of a second subdomain is a non-negatively charged internucleotidic linkage. In some embodiments, the internucleotidic linkage linking the first two nucleosides of a second subdomain is a Sp non-negatively charged internucleotidic linkage. In some embodiments, the internucleotidic linkage linking the first two nucleosides of a second subdomain is a Rp non-negatively charged internucleotidic linkage. In some embodiments, the internucleotidic linkage linking the first two nucleosides of a second subdomain is a phosphorothioate internucleotidic linkage. In some embodiments, the internucleotidic linkage linking the first two nucleosides of a second subdomain is a Sp phosphorothioate internucleotidic linkage. In some embodiments, the internucleotidic linkage linking the last nucleoside of a second subdomain and the first nucleoside of a third subdomain is a non-negatively charged internucleotidic linkage. In some embodiments, the internucleotidic linkage linking the last nucleoside of a second subdomain and the first nucleoside of a third subdomain is a Sp non-negatively charged internucleotidic linkage. In some embodiments, the internucleotidic linkage linking the last nucleoside of a second subdomain and the first nucleoside of a third subdomain is a Rp non-negatively charged internucleotidic linkage. In some embodiments, the internucleotidic linkage linking the last nucleoside of a second subdomain and the first nucleoside of a third subdomain is a phosphorothioate internucleotidic linkage. In some embodiments, the internucleotidic linkage linking the last nucleoside of a second subdomain and the first nucleoside of a third subdomain is a Sp phosphorothioate internucleotidic linkage. In some embodiments, a non-negatively charged internucleotidic linkage is a neutral internucleotidic linkage such as n001.

[0515] In some embodiments, a second subdomain comprises one or more natural phosphate linkages. In some embodiments, a second subdomain contains no natural phosphate linkages. In some embodiments, a second subdomain comprises at least 1 natural phosphate linkage. In some embodiments, a second subdomain comprises at least 2 natural phosphate linkages. In some embodiments, a second subdomain comprises at least 3 natural phosphate linkages. In some embodiments, a second subdomain comprises at least 4 natural phosphate linkages. In some embodiments, a second subdomain comprises at least 5 natural phosphate linkages.

[0516] In some embodiments, an opposite nucleoside is connected to its 5′ immediate nucleoside through a natural phosphate linkage. In some embodiments, an opposite nucleoside is connected to its 5′ immediate nucleoside through a natural phosphate linkage. In some embodiments, an opposite nucleoside is connected to its 5′ immediate nucleoside through a modified internucleotidic linkage. In some embodiments, a modified internucleotidic linkage is a chiral internucleotidic linkage. In some embodiments, a modified internucleotidic linkage is a phosphorothioate internucleotidic linkage. In some embodiments, a modified internucleotidic linkage is a non-negatively charged internucleotidic linkage. In some embodiments, a modified internucleotidic linkage is a neutral charged internucleotidic linkage. In some embodiments, a chiral internucleotidic linkage is chirally controlled. In some embodiments, a chiral internucleotidic linkage is Rp. In some embodiments, a chiral internucleotidic linkage is Sp.

[0517] In some embodiments, an opposite nucleoside is connected to its 3′ immediate nucleoside (−1 position relative to the opposite nucleoside) through a natural phosphate linkage. In some embodiments, an opposite nucleoside is connected to its 3′ immediate nucleoside through a modified internucleotidic linkage. In some embodiments, a modified internucleotidic linkage is a chiral internucleotidic linkage. In some embodiments, a modified internucleotidic linkage is a phosphorothioate internucleotidic linkage. In some embodiments, a modified internucleotidic linkage is a non-negatively charged internucleotidic linkage. In some embodiments, a modified internucleotidic linkage is a neutral charged internucleotidic linkage. In some embodiments, a chiral internucleotidic linkage is chirally controlled. In some embodiments, a chiral internucleotidic linkage is Rp. In some embodiments, a chiral internucleotidic linkage is Sp. In some embodiments, a chiral internucleotidic linkage is a phosphorothioate internucleotidic linkage and is chirally controlled. In some embodiments, a chiral internucleotidic linkage is a phosphorothioate internucleotidic linkage and is Sp. In some embodiments, a chiral internucleotidic linkage is a phosphorothioate internucleotidic linkage and is Rp. In some embodiments, a chiral internucleotidic linkage is a non-negatively charged internucleotidic linkage (e.g., n001) and is chirally controlled. In some embodiments, a chiral internucleotidic linkage is a non-negatively charged internucleotidic linkage (e.g., n001) and is chirally controlled and is Rp. In some embodiments, a chiral internucleotidic linkage is a non-negatively charged internucleotidic linkage (e.g., n001) and is chirally controlled and is Sp. In some embodiments, a chiral internucleotidic linkage is a non-negatively charged internucleotidic linkage (e.g., n001) and is not chirally controlled.

[0518] In some embodiments, a nucleoside at −1 position relative to an opposite nucleoside and a nucleoside at −2 position relative to an opposite nucleoside (e.g., in 5′- . . . N₀N₋₁N₋₂ . . . 3′, if N₀ is an opposite nucleoside, N₋₁ is at −1 position and N₋₂ is at −2 position) is linked through a natural phosphate linkage. In some embodiments, they are connected through a modified internucleotidic linkage. In some embodiments, a modified internucleotidic linkage is a chiral internucleotidic linkage. In some embodiments, a modified internucleotidic linkage is a phosphorothioate internucleotidic linkage. In some embodiments, a modified internucleotidic linkage is a non-negatively charged internucleotidic linkage. In some embodiments, a modified internucleotidic linkage is a neutral charged internucleotidic linkage. In some embodiments, a chiral internucleotidic linkage is chirally controlled. In some embodiments, a chiral internucleotidic linkage is Rp. In some embodiments, a chiral internucleotidic linkage is Sp. In some embodiments, a chiral internucleotidic linkage is a phosphorothioate internucleotidic linkage and is chirally controlled. In some embodiments, a chiral internucleotidic linkage is a phosphorothioate internucleotidic linkage and is Sp. In some embodiments, a chiral internucleotidic linkage is a phosphorothioate internucleotidic linkage and is Rp. In some embodiments, a chiral internucleotidic linkage is a non-negatively charged internucleotidic linkage (e.g., n001) and is chirally controlled. In some embodiments, a chiral internucleotidic linkage is a non-negatively charged internucleotidic linkage (e.g., n001) and is chirally controlled and is Rp. In some embodiments, a chiral internucleotidic linkage is a non-negatively charged internucleotidic linkage (e.g., n001) and is chirally controlled and is Sp. In some embodiments, a chiral internucleotidic linkage is a non-negatively charged internucleotidic linkage (e.g., n001) and is not chirally controlled.

[0519] In some embodiments, a nucleoside of a second subdomain and a nucleoside of a third subdomain is linked through a natural phosphate linkage. In some embodiments, they are connected through a modified internucleotidic linkage. In some embodiments, a modified internucleotidic linkage is a chiral internucleotidic linkage. In some embodiments, a modified internucleotidic linkage is a phosphorothioate internucleotidic linkage. In some embodiments, a modified internucleotidic linkage is a non-negatively charged internucleotidic linkage. In some embodiments, a modified internucleotidic linkage is a neutral charged internucleotidic linkage. In some embodiments, a chiral internucleotidic linkage is chirally controlled. In some embodiments, a chiral internucleotidic linkage is Rp. In some embodiments, a chiral internucleotidic linkage is Sp. In some embodiments, a chiral internucleotidic linkage is a phosphorothioate internucleotidic linkage and is chirally controlled. In some embodiments, a chiral internucleotidic linkage is a phosphorothioate internucleotidic linkage and is Sp. In some embodiments, a chiral internucleotidic linkage is a phosphorothioate internucleotidic linkage and is Rp. In some embodiments, a chiral internucleotidic linkage is a non-negatively charged internucleotidic linkage (e.g., n001) and is chirally controlled. In some embodiments, a chiral internucleotidic linkage is a non-negatively charged internucleotidic linkage (e.g., n001) and is chirally controlled and is Rp. In some embodiments, a chiral internucleotidic linkage is a non-negatively charged internucleotidic linkage (e.g., n001) and is chirally controlled and is Sp. In some embodiments, a chiral internucleotidic linkage is a non-negatively charged internucleotidic linkage (e.g., n001) and is not chirally controlled.

[0520] In some embodiments, an oligonucleotide comprises 5′-N₁N₀N₋₁-3′, wherein each of N₁, N₀, and N₋₁ is independently a nucleoside, N₁ and N₀ bond to an internucleotidic linkage as described herein, and N₋₁ and N₀ bond to an internucleotidic linkage as described herein, and N₀ is opposite to a target adenosine. In some embodiments, the sugar of each of N₁, N₀, and N₋₁ is independently a natural DNA sugar or a 2′-F modified sugar. In some embodiments, the sugar of each of N₁, N₀, and N₋₁ is independently a natural DNA sugar. In some embodiments, the sugar of N₁ is a 2′-modified sugar, and the sugar of each of N₀ and N₋₁ is independently a natural DNA sugar. In some embodiments, such oligonucleotides provide high editing levels. In some embodiments, each of the two internucleotidic linkages bonded to N₋₁ is independently Rp. In some embodiments, each of the two internucleotidic linkages bonded to N₋₁ is independently an Rp phosphorothioate internucleotidic linkage. In some embodiments, each of the two internucleotidic linkages bonded to N₋₁ is independently an Rp phosphorothioate internucleotidic linkage, and each other phosphorothioate internucleotidic linkage in an oligonucleotide, if any, is independently Sp. In some embodiments, a 5′ internucleotidic linkage bonded to N₁ is Rp. In some embodiments, an internucleotidic linkage bonded to N₁ and N₀ (i.e., a 3′ internucleotidic linkage bonded to N₁) is Rp. In some embodiments, an internucleotidic linkage bonded to N₋₁ and N₀ is Rp. In some embodiments, a 3′ internucleotidic linkage bonded to N₋₁ is Rp. In some embodiments, each internucleotidic linkage bonded to N₀ is independently Rp. In some embodiments, each internucleotidic linkage bonded to N₀ or N₁ is independently Rp. In some embodiments, each internucleotidic linkage bonded to N₀ or N₋₁ is independently Rp. In some embodiments, each internucleotidic linkage bonded to N₁ is independently Rp. In some embodiments, each Rp internucleotidic linkage is independently an Rp phosphorothioate internucleotidic linkage. In some embodiments, each other chirally controlled phosphorothioate internucleotidic linkage in an oligonucleotide is independently Sp.

[0521] In some embodiments, sugar of a 5′ immediate nucleoside (e.g., N₁) is independently selected from a natural DNA sugar, a natural RNA sugar, and a 2′-F modified sugar (e.g., R^{2s} is —F). In some embodiments, sugar of an opposite nucleoside (e.g., N₀) is independently selected from a natural DNA sugar, a natural RNA sugar, and a 2′-F modified sugar. In some embodiments, sugar of a 3′ immediate nucleoside (e.g., N₋₁) is independently selected from a natural DNA sugar, a natural RNA sugar, and a 2′-F modified sugar. In some embodiments, sugars of a 5′ immediate nucleoside, an opposite nucleoside, and a 3′ immediate nucleoside are each independently a natural DNA sugar. In some embodiments, sugars of a 5′ immediate nucleoside, an opposite nucleoside, and a 3′ immediate nucleoside are a natural DNA sugar, a natural RNA sugar, and natural DNA sugar, respectively. In some embodiments, sugars of a 5′ immediate nucleoside, an opposite nucleoside, and a 3′ immediate nucleoside are a 2′-F modified sugar, a natural RNA sugar, and natural DNA sugar, respectively.

[0522] In some embodiments, sugar of an opposite nucleoside is a natural RNA sugar. In some embodiments, such an opposite nucleoside is utilized with a 3′ immediate I nucleoside (which is optionally complementary to a C in a target nucleic acid when aligned). In some embodiments, an internucleotidic linkage between the 3′ immediate nucleoside (e.g., N₋₁) and its 3′ immediate nucleoside (e.g., N₋₂) is a non-negatively charged internucleotidic linkage, e.g., n001. In some embodiments, it is stereorandom. In some embodiments, it is chirally controlled and is Rp. In some embodiments, it is chirally controlled and is Sp.

[0523] In some embodiments, an internucleotidic linkage that is bonded to a 3′ immediate nucleoside (e.g., N₋₁) and its 3′ neighboring nucleoside (e.g., N₋₂ in 5′-N₁N₀N₋₁N₋₂-3′) is a modified internucleotidic linkage. In some embodiments, it is a chiral internucleotidic linkage. In some embodiments, it is stereorandom. In some embodiments, it is a stereorandom phosphorothioate internucleotidic linkage. In some embodiments, it is a stereorandom non-negatively charged internucleotidic linkage. In some embodiments, it is stereorandom n001. In some embodiments, it is chirally controlled. In some embodiments, it is a Rp phosphorothioate internucleotidic linkage. In some embodiments, it is a Sp phosphorothioate internucleotidic linkage. In some embodiments, it is chirally controlled. In some embodiments, it is a Rp non-negatively charged internucleotidic linkage. In some embodiments, it is a Sp non-negatively charged internucleotidic linkage. In some embodiments, a non-negatively charged internucleotidic linkage is a neutral internucleotidic linkage. In some embodiments, a non-negatively charged internucleotidic linkage is n001.

[0524] In some embodiments, N₋₁ is I. In some embodiments, I is utilized replacing G, e.g., when a target nucleic acid comprises 5′-CA-3′ wherein A is a target adenosine. In some embodiments, 5′-N₁N₀N₋₁-3′ is 5′-N₁N₀I-3′. In some embodiments, N₀ is b001A, b002A, b003A, b008U, b001C, C, A, or U. In some embodiments, N₀ is b001A, b002A, b008U, b001C, C, or A. In some embodiments, N₀ is b001A, b002A, b008U, or b001C. In some embodiments, N₀ is b001A. In some embodiments, N₀ is b002A. In some embodiments, N₀ is b003A. In some embodiments, N₀ is b008U. In some embodiments, N₀ is b001C. In some embodiments, N₀ is A. In some embodiments, N₀ is U.

[0525] As demonstrated herein, in some embodiments provided oligonucleotides comprising certain nucleobases (e.g., b001A, b002A, b008U, C, A, etc.) opposite to target adenosines can among other things provide improved editing efficiency (e.g., compared to a reference nucleobase such as U). In some embodiments, an opposite nucleoside is linked to an I to its 3′ side.

[0526] In some embodiments, a second subdomain comprises an editing region as described herein.

[0527] In some embodiments, a second subdomain comprises a 5′-end portion, e.g., one having a length of about 1-5, 1-3, or 1, 2, 3, 4, or 5 nucleobases. In some embodiments, a length is one nucleobase. In some embodiments, a length is 2 nucleobases. In some embodiments, a length is 3 nucleobases. In some embodiments, a length is 4 nucleobases. In some embodiments, a length is 5 nucleobases.

[0528] In some embodiments, a 5′-end portion comprises one or more sugars having two 2′-H (e.g., natural DNA sugars). In some embodiments, a 5′-end portion comprises one or more sugars having 2′-OH (e.g., natural RNA sugars). In some embodiments, one or more (e.g., about 1-5, 1-3, or 1, 2, 3, 4, or 5) of sugars in a 5′-end portion are independently modified sugars. In some embodiments, about 5%-100% (e.g., about 10%-100%, 20-100%, 30%-100%, 40%-100%, 50%-80%, 50%-85%, 50%-90%, 50%-95%, 60%-80%, 60%-85%, 60%-90%, 60%-95%, 60%-100%, 65%-80%, 65%-85%, 65%-90%, 65%-95%, 65%-100%, 70%-80%, 70%-85%, 70%-90%, 70%-95%, 70%-100%, 75%-80%, 75%-85%, 75%-90%, 75%-95%, 75%-100%, 80%-85%, 80%-90%, 80%-95%, 80%-100%, 85%-90%, 85%-95%, 85%-100%, 90%-95%, 90%-100%, 10%, 20%, 30%, 40%, 50%, 60%, 65%, 70%, 75%, 80%, 85%, 90%, 95%, or 100%, etc.) of sugars in a 5′-end portion are independently modified sugars. In some embodiments, each sugar is independently a modified sugar. In some embodiments, modified sugars are independently selected from a bicyclic sugar (e.g., a LNA sugar), an acyclic sugar (e.g., a UNA sugar), a sugar with a 2′-OR modification, or a sugar with a 2′-N(R)₂ modification, wherein each R is independently optionally substituted C₁₋₆ aliphatic.

[0529] In some embodiments, low levels (e.g., no more than 50%, 40%, 30%, 25%, 20%, or 10%, or no more than 1, 2, 3, 4, 5, 6, 7, 8, 9, or 10) of sugars in a 5′-end portion independently comprise a 2′-OR modification, wherein R is optionally substituted C₁₋₆ aliphatic, or a 2′-O-L^{B}-4′ modification. In some embodiments, each sugar in a 5′-end portion independently contains no 2′-OR modification, wherein R is optionally substituted C₁₋₆ aliphatic, or a 2′-O-L^{B}-4′ modification, wherein L^{B} is optionally substituted —CH₂—. In some embodiments, each sugar in a 5′-end portion independently contains no 2′-OMe.

[0530] In some embodiments, a 5′-end portion comprises one or more 2′-F modified sugars.

[0531] In some embodiments, a high level (e.g., about 60-100%, or about 60%, 65%, 70%, 75%, 80%, 85%, 90%, 95% or more, or 100%) or all sugars in a 5′-end are independently 2′-F modified sugars, sugars comprising two 2′-H (e.g., natural DNA sugars), or sugars comprising 2′-OH (e.g., natural RNA sugars). In some embodiments, a high level (e.g., about 60-100%, or about 60%, 65%, 70%, 75%, 80%, 85%, 90%, 95% or more, or 100%) or all sugars in a 5′-end portion are independently 2′-F modified sugars, natural DNA sugars, or natural RNA sugars. In some embodiments, a high level (e.g., about 60-100%, or about 60%, 65%, 70%, 75%, 80%, 85%, 90%, 95% or more, or 100%) or all sugars in a 5′-end portion are independently 2′-F modified sugars and natural DNA sugars. In some embodiments, a level is 100%. In some embodiments, sugars of a 5′-end portion are selected from sugars having two 2′-H (e.g., natural DNA sugar) and 2′-F modified sugars. In some embodiments, a 5′-end portion comprise 1, 2, 3, 4 or 5 2′-F modified sugars. In some embodiments, a 5′-end portion comprise 1, 2, 3, 4 or 5 sugars comprising two 2′-H. In some embodiments, a 5′-end portion comprise 1, 2, 3, 4 or 5 natural DNA sugars. In some embodiments, a 5′-end portion comprise 1, 2, 3, 4 or 5 sugars comprising 2′-OH. In some embodiments, a 5′-end portion comprise 1, 2, 3, 4 or 5 natural RNA sugars. In some embodiments, a number is 1. In some embodiments, a number is 2. In some embodiments, a number is 3. In some embodiments, a number is 4. In some embodiments, a number is 5.

[0532] In some embodiments, one or more (e.g., about 1, 2, 3, 4, or 5) internucleotidic linkages of a 5′-end portion are independently a modified internucleotidic linkage. In some embodiments, one or more (e.g., about 1, 2, 3, 4, or 5) internucleotidic linkages of a 5′-end portion are independently a chiral internucleotidic linkage. In some embodiments, one or more (e.g., about 1, 2, 3, 4, or 5) internucleotidic linkages of a 5′-end portion are independently a chirally controlled internucleotidic linkage. In some embodiments, one or more (e.g., about 1, 2, 3, 4, or 5) internucleotidic linkages of a 5′-end portion are Rp. In some embodiments, one or more (e.g., about 1, 2, 3, 4, or 5) internucleotidic linkages of a 5′-end portion are Sp. In some embodiments, each internucleotidic linkage of a 5′-end portion is Sp.

[0533] In some embodiments, one or more (e.g., about 1, 2, 3, 4, or 5) internucleotidic linkages of a 5′-end portion are independently a modified internucleotidic linkage. In some embodiments, one or more (e.g., about 1, 2, 3, 4, or 5) internucleotidic linkages of a 5′-end portion are independently a chiral internucleotidic linkage. In some embodiments, one or more (e.g., about 1, 2, 3, 4, or 5) internucleotidic linkages of a 5′-end portion are independently a chirally controlled internucleotidic linkage. In some embodiments, one or more (e.g., about 1, 2, 3, 4, or 5) internucleotidic linkages of a 5′-end portion are Rp. In some embodiments, one or more (e.g., about 1, 2, 3, 4, or 5) internucleotidic linkages of a 5′-end portion are Rp. In some embodiments, each internucleotidic linkage of a 5′-end portion is Rp.

[0534] In some embodiments, a 5′-end portion comprises one or more (e.g., about 1, 2, 3, 4, or 5) mismatches as described herein. In some embodiments, a 5′-end portion comprises one or more (e.g., about 1, 2, 3, 4, or 5) wobbles as described herein. In some embodiments, a 5′-end portion is about 60-100% (e.g., 66%, 70%, 75%, 80%, 85%, 90%, 95%, or more) complementary to a target nucleic acid. In some embodiments, a complementarity is 60% or more. In some embodiments, a complementarity is 70% or more. In some embodiments, a complementarity is 75% or more. In some embodiments, a complementarity is 80% or more. In some embodiments, a complementarity is 90% or more.

[0535] In some embodiments, a 5′-end portion comprises a nucleoside 5′ next to an opposite nucleoside. In some embodiments, a nucleoside 5′ next to an opposite nucleoside comprise a nucleobase as described herein.

[0536] In some embodiments, a second subdomain comprises a 3′-end portion, e.g., one having a length of about 1-5, 1-3, or 1, 2, 3, 4, or 5 nucleobases. In some embodiments, a length is one nucleobase. In some embodiments, a length is 2 nucleobases. In some embodiments, a length is 3 nucleobases. In some embodiments, a length is 4 nucleobases. In some embodiments, a length is 5 nucleobases. In some embodiments, a second subdomain consists a 5′-end portion and a 3′-end portion.

[0537] In some embodiments, a 3′-end portion comprises one or more sugars having two 2′-H (e.g., natural DNA sugars). In some embodiments, a 3′-end portion comprises one or more sugars having 2′-OH (e.g., natural RNA sugars). In some embodiments, one or more (e.g., about 1-5, 1-3, or 1, 2, 3, 4, or 5) of sugars in a 3′-end portion are independently modified sugars. In some embodiments, about 5%-100% (e.g., about 10%-100%, 20-100%, 30%-100%, 40%-100%, 50%-80%, 50%-85%, 50%-90%, 50%-95%, 60%-80%, 60%-85%, 60%-90%, 60%-95%, 60%-100%, 65%-80%, 65%-85%, 65%-90%, 65%-95%, 65%-100%, 70%-80%, 70%-85%, 70%-90%, 70%-95%, 70%-100%, 75%-80%, 75%-85%, 75%-90%, 75%-95%, 75%-100%, 80%-85%, 80%-90%, 80%-95%, 80%-100%, 85%-90%, 85%-95%, 85%-100%, 90%-95%, 90%-100%, 10%, 20%, 30%, 40%, 50%, 60%, 65%, 70%, 75%, 80%, 85%, 90%, 95%, or 100%, etc.) of sugars in a 3′-end portion are independently modified sugars. In some embodiments, each sugar is independently a modified sugar. In some embodiments, modified sugars are independently selected from a bicyclic sugar (e.g., a LNA sugar), an acyclic sugar (e.g., a UNA sugar), a sugar with a 2′-OR modification, or a sugar with a 2′-N(R)₂ modification, wherein each R is independently optionally substituted C₁₋₆ aliphatic.

[0538] In some embodiments, low levels (e.g., no more than 50%, 40%, 30%, 25%, 20%, or 10%, or no more than 1, 2, 3, 4, 5, 6, 7, 8, 9, or 10) of sugars in a 3′-end portion independently comprise a 2′-OR modification, wherein R is optionally substituted C₁₋₆ aliphatic, or a 2′-O-L^{B}-4′ modification. In some embodiments, each sugar in a 3′-end portion independently contains no 2′-OR modification, wherein R is optionally substituted C₁₋₆ aliphatic, or a 2′-O-L^{B}-4′ modification, wherein L^{B} is optionally substituted —CH₂—. In some embodiments, each sugar in a 3′-end portion independently contains no 2′-OMe.

[0539] In some embodiments, a 3′-end portion comprises one or more 2′-F modified sugars.

[0540] In some embodiments, a high level (e.g., about 60-100%, or about 60%, 65%, 70%, 75%, 80%, 85%, 90%, 95% or more, or 100%) or all sugars in a 3′-end are independently 2′-F modified sugars, sugars comprising two 2′-H (e.g., natural DNA sugars), or sugars comprising 2′-OH (e.g., natural RNA sugars). In some embodiments, a high level (e.g., about 60-100%, or about 60%, 65%, 70%, 75%, 80%, 85%, 90%, 95% or more, or 100%) or all sugars in a 3′-end portion are independently 2′-F modified sugars, natural DNA sugars, or natural RNA sugars. In some embodiments, a high level (e.g., about 60-100%, or about 60%, 65%, 70%, 75%, 80%, 85%, 90%, 95% or more, or 100%) or all sugars in a 3′-end portion are independently 2′-F modified sugars and natural DNA sugars. In some embodiments, a level is 100%. In some embodiments, sugars of a 3′-end portion are selected from sugars having two 2′-H (e.g., natural DNA sugar) and 2′-F modified sugars. In some embodiments, a 3′-end portion comprise 1, 2, 3, 4 or 5 2′-F modified sugars. In some embodiments, a 3′-end portion comprise 1, 2, 3, 4 or 5 sugars comprising two 2′-H. In some embodiments, a 3′-end portion comprise 1, 2, 3, 4 or 5 natural DNA sugars. In some embodiments, a 3′-end portion comprise 1, 2, 3, 4 or 5 sugars comprising 2′-OH. In some embodiments, a 3′-end portion comprise 1, 2, 3, 4 or 5 natural RNA sugars. In some embodiments, a number is 1. In some embodiments, a number is 2. In some embodiments, a number is 3. In some embodiments, a number is 4. In some embodiments, a number is 5.

[0541] In some embodiments, one or more (e.g., about 1, 2, 3, 4, or 5) internucleotidic linkages of a 3′-end portion are independently a modified internucleotidic linkage. In some embodiments, one or more (e.g., about 1, 2, 3, 4, or 5) internucleotidic linkages of a 3′-end portion are independently a chiral internucleotidic linkage. In some embodiments, one or more (e.g., about 1, 2, 3, 4, or 5) internucleotidic linkages of a 3′-end portion are independently a chirally controlled internucleotidic linkage. In some embodiments, one or more (e.g., about 1, 2, 3, 4, or 5) internucleotidic linkages of a 3′-end portion are Rp. In some embodiments, one or more (e.g., about 1, 2, 3, 4, or 5) internucleotidic linkages of a 3′-end portion are Sp. In some embodiments, each internucleotidic linkage of a 3′-end portion is Sp.

[0542] In some embodiments, one or more (e.g., about 1, 2, 3, 4, or 5) internucleotidic linkages of a 3′-end portion are independently a modified internucleotidic linkage. In some embodiments, one or more (e.g., about 1, 2, 3, 4, or 5) internucleotidic linkages of a 3′-end portion are independently a chiral internucleotidic linkage. In some embodiments, one or more (e.g., about 1, 2, 3, 4, or 5) internucleotidic linkages of a 3′-end portion are independently a chirally controlled internucleotidic linkage. In some embodiments, one or more (e.g., about 1, 2, 3, 4, or 5) internucleotidic linkages of a 3′-end portion are Rp. In some embodiments, one or more (e.g., about 1, 2, 3, 4, or 5) internucleotidic linkages of a 3′-end portion are Rp. In some embodiments, each internucleotidic linkage of a 3′-end portion is Rp.

[0543] In some embodiments, a 3′-end portion comprises one or more (e.g., about 1, 2, 3, 4, or 5) mismatches as described herein. In some embodiments, a 3′-end portion comprises one or more (e.g., about 1, 2, 3, 4, or 5) wobbles as described herein. In some embodiments, a 3′-end portion is about 60-100% (e.g., 66%, 70%, 75%, 80%, 85%, 90%, 95%, or more) complementary to a target nucleic acid. In some embodiments, a complementarity is 60% or more. In some embodiments, a complementarity is 70% or more. In some embodiments, a complementarity is 75% or more. In some embodiments, a complementarity is 80% or more. In some embodiments, a complementarity is 90% or more.

[0544] In some embodiments, a 3′-end portion comprises a nucleoside 3′ next to an opposite nucleoside. In some embodiments, a nucleoside 3′ next to an opposite nucleoside comprise a nucleobase as described herein. In some embodiments, a nucleoside 3′ next to an opposite nucleoside forms a wobble pair with a corresponding nucleoside in a target nucleic acid. In some embodiments, the nucleobase of a nucleoside 3′ next to an opposite nucleoside is hypoxanthine; in some embodiments, it is a derivative of hypoxanthine.

[0545] In some embodiments, a second subdomain recruits, promotes or contribute to recruitment of, a protein such as an ADAR protein, e.g., ADAR1, ADAR2, etc. In some embodiments, a second subdomain recruits, or promotes or contribute to interactions with, a protein such as an ADAR protein. In some embodiments, a second subdomain contacts with a RNA binding domain (RBD) of ADAR. In some embodiments, a second subdomain contacts with a catalytic domain of ADAR which has a deaminase activity. In some embodiments, a second subdomain contact with a domain that has a deaminase activity of ADAR1. In some embodiments, a second subdomain contact with a domain that has a deaminase activity of ADAR2. In some embodiments, various nucleobases, sugars and/or internucleotidic linkages of a second subdomain may interact with one or more residues of proteins, e.g., ADAR proteins.

[0546] Third Subdomains

[0547] As described herein, in some embodiment, an oligonucleotide comprises a first domain and a second domain from 5′ to 3′. In some embodiments, a second domain comprises or consists of a first subdomain, a second subdomain, and a third subdomain from 5′ to 3′. Certain embodiments of a third subdomain are described below as examples.

[0548] In some embodiments, a third subdomain has a length of about 1-50, 1-40, 1-30, 1-20 (e.g., about 1, 2, 3, 4, 5, 6, 7, 8, 9, or 10-about 10, 11, 12, 13, 14, 15, 16, 17, 18, 19, 20, 21, 22, 23, 24, 25, 30, 40 or 50, or about 1, 2, 3, 4, 5, 6, 7, 8, 9, 10, 11, 12, 13, 14, 15, 16, 17, 18, 19, 20, 21, 22, 23, 24, 25, 30, 40 or 50, etc.) nucleobases. In some embodiments, a third subdomain has a length of about 5-30 nucleobases. In some embodiments, a third subdomain has a length of about 10-30 nucleobases. In some embodiments, a third subdomain has a length of about 10-20 nucleobases. In some embodiments, a third subdomain has a length of about 5-15 nucleobases. In some embodiments, a third subdomain has a length of about 13-16 nucleobases. In some embodiments, a third subdomain has a length of about 6-12 nucleobases. In some embodiments, a third subdomain has a length of about 6-9 nucleobases. In some embodiments, a third subdomain has a length of about 1-10 nucleobases. In some embodiments, a third subdomain has a length of about 1-7 nucleobases. In some embodiments, a third subdomain has a length of 1 nucleobase. In some embodiments, a third subdomain has a length of 2 nucleobases. In some embodiments, a third subdomain has a length of 3 nucleobases. In some embodiments, a third subdomain has a length of 4 nucleobases. In some embodiments, a third subdomain has a length of 5 nucleobases. In some embodiments, a third subdomain has a length of 6 nucleobases. In some embodiments, a third subdomain has a length of 7 nucleobases. In some embodiments, a third subdomain has a length of 8 nucleobases. In some embodiments, a third subdomain has a length of 9 nucleobases. In some embodiments, a third subdomain has a length of 10 nucleobases. In some embodiments, a third subdomain has a length of 11 nucleobases. In some embodiments, a third subdomain has a length of 12 nucleobases. In some embodiments, a third subdomain has a length of 13 nucleobases. In some embodiments, a third subdomain has a length of 14 nucleobases. In some embodiments, a third subdomain has a length of 15 nucleobases. In some embodiments, a third subdomain is shorter than a first subdomain. In some embodiments, a third subdomain is shorter than a first domain. In some embodiments, a third subdomain comprises a 3′-end nucleobase of a second domain.

[0549] In some embodiments, a third subdomain is about, or at least about, 5-95%, 10%-90%, 20%-80%, 30%-70%, 40%-70%, 40%-60%, 5%, 10%, 15%, 20%, 25%, 30%, 35%, 40%, 45%, 50%, 55%, 60%, 65%, 70%, 75%, 80%, 85%, 90%, 95% of a second domain. In some embodiments, a percentage is about 30%-80%. In some embodiments, a percentage is about 30%-70%. In some embodiments, a percentage is about 40%-60%. In some embodiments, a percentage is about 20%. In some embodiments, a percentage is about 25%. In some embodiments, a percentage is about 30%. In some embodiments, a percentage is about 35%. In some embodiments, a percentage is about 40%. In some embodiments, a percentage is about 45%. In some embodiments, a percentage is about 50%. In some embodiments, a percentage is about 55%. In some embodiments, a percentage is about 60%. In some embodiments, a percentage is about 65%. In some embodiments, a percentage is about 70%. In some embodiments, a percentage is about 75%. In some embodiments, a percentage is about 80%. In some embodiments, a percentage is about 85%. In some embodiments, a percentage is about 90%. In some embodiments, the 5′-end nucleoside of a third subdomain is N₋₂. In some embodiments, all nucleosides from N₋₂ to the 3′-end are in a third subdomain.

[0550] In some embodiments, one or more (e.g., 1-20, 1, 2, 3, 4, 5, 6, 7, 8, 9, or 10, etc.) mismatches exist in a third subdomain when an oligonucleotide is aligned with a target nucleic acid for complementarity. In some embodiments, there is 1 mismatch. In some embodiments, there are 2 mismatches. In some embodiments, there are 3 mismatches. In some embodiments, there are 4 mismatches. In some embodiments, there are 5 mismatches. In some embodiments, there are 6 mismatches. In some embodiments, there are 7 mismatches. In some embodiments, there are 8 mismatches. In some embodiments, there are 9 mismatches. In some embodiments, there are 10 mismatches.

[0551] In some embodiments, one or more (e.g., 1-20, 1, 2, 3, 4, 5, 6, 7, 8, 9, or 10, etc.) wobbles exist in a third subdomain when an oligonucleotide is aligned with a target nucleic acid for complementarity. In some embodiments, there is 1 wobble. In some embodiments, there are 2 wobbles. In some embodiments, there are 3 wobbles. In some embodiments, there are 4 wobbles. In some embodiments, there are 5 wobbles. In some embodiments, there are 6 wobbles. In some embodiments, there are 7 wobbles. In some embodiments, there are 8 wobbles. In some embodiments, there are 9 wobbles. In some embodiments, there are 10 wobbles.

[0552] In some embodiments, duplexes of oligonucleotides and target nucleic acids in a third subdomain region comprise one or more bulges each of which independently comprise one or more mismatches that are not wobbles. In some embodiments, there are 0-10 (e.g., 0-1, 0-2, 0-3, 0-4, 0-5, 0-6, 0-7, 0-8, 0-9, 0-10, 1-2, 1-3, 1-4, 1-5, 1-6, 1-7, 1-8, 1-9, 1-10, 2-3, 2-4, 2-5, 2-6, 2-7, 2-8, 2-9, 2-10, 3-4, 3-5, 3-6, 3-7, 3-8, 3-9, 3-10, 0, 1, 2, 3, 4, 5, 6, 7, 8, 9, or 10, etc.) bulges. In some embodiments, the number is 0. In some embodiments, the number is 1. In some embodiments, the number is 2. In some embodiments, the number is 3. In some embodiments, the number is 4. In some embodiments, the number is 5.

[0553] In some embodiments, a third subdomain is fully complementary to a target nucleic acid.

[0554] In some embodiments, a third subdomain comprises one or more modified nucleobases.

[0555] In some embodiments, a third subdomain comprises a nucleoside opposite to a target adenosine (an opposite nucleoside). In some embodiments, a third subdomain comprises a nucleoside 3′ next to an opposite nucleoside. In some embodiments, a third subdomain comprises a nucleoside 5′ next to an opposite nucleoside. Various suitable opposite nucleosides, including sugars and nucleobases thereof, have been described herein.

[0556] In some embodiments, a third subdomain comprise a nucleoside opposite to a target adenosine, e.g., when the oligonucleotide forms a duplex with a target nucleic acid. Suitable nucleobases including modified nucleobases in opposite nucleosides are described herein. For example, in some embodiment, an opposite nucleobase is optionally substituted or protected nucleobase selected from C, a tautomer of C, U, a tautomer of U, A, a tautomer of A, and a nucleobase which is or comprises Ring BA having the structure of BA-I, BA-I-a, BA-I-b, BA-II, BA-II-a, BA-II-b, BA-III, BA-III-a, BA-III-b, BA-IV, BA-IV-a, BA-IV-b, BA-V, BA-V-a, BA-V-b, or BA-VI, or a tautomer of Ring BA.

[0557] In some embodiments, a third subdomain comprises one or more sugars comprising two 2′-H (e.g., natural DNA sugars). In some embodiments, a third subdomain comprises one or more sugars comprising 2′-OH (e.g., natural RNA sugars). In some embodiments, a third subdomain comprises one or more modified sugars. In some embodiments, a modified sugar comprises a 2′-modification. In some embodiments, a modified sugar is a bicyclic sugar, e.g., a LNA sugar. In some embodiments, a modified sugar is an acyclic sugar (e.g., by breaking a C₂-C₃ bond of a corresponding cyclic sugar).

[0558] In some embodiments, a third subdomain comprises about 1-50, 1-40, 1-30, 1-25, 1-20, 1-15, 1-10 (e.g., about 1, 2, 3, 4, 5, 6, 7, 8, 9, or 10-about 10, 11, 12, 13, 14, 15, 16, 17, 18, 19, 20, 21, 22, 23, 24, 25, 30, 40 or 50, or about 5, 6, 7, 8, 9, 10, 11, 12, 13, 14, 15, 16, 17, 18, 19, 20, 21, 22, 23, 24, 25, 30, 40 or 50, etc., about 1, 2, 3, 4, 5, 6, 7, 8, 9, 10, 11, 12, 13, 14, 15, 16, 17, 18, 19, or 20, etc.) modified sugars. In some embodiments, a third subdomain comprises about 1-50, 1-40, 1-30, 1-25, 1-20, 1-15, 1-10 (e.g., about 1, 2, 3, 4, 5, 6, 7, 8, 9, or 10-about 10, 11, 12, 13, 14, 15, 16, 17, 18, 19, 20, 21, 22, 23, 24, 25, 30, 40 or 50, or about 5, 6, 7, 8, 9, 10, 11, 12, 13, 14, 15, 16, 17, 18, 19, 20, 21, 22, 23, 24, 25, 30, 40 or 50, etc., about 1, 2, 3, 4, 5, 6, 7, 8, 9, 10, 11, 12, 13, 14, 15, 16, 17, 18, 19, or 20, etc.) modified sugars which are independently bicyclic sugars (e.g., a LNA sugar) or a 2′-OR modified sugars, wherein R is independently optionally substituted C₁₋₆ aliphatic. In some embodiments, a third subdomain comprises about 1-50, 1-40, 1-30, 1-25, 1-20, 1-15, 1-10 (e.g., about 1, 2, 3, 4, 5, 6, 7, 8, 9, or 10-about 10, 11, 12, 13, 14, 15, 16, 17, 18, 19, 20, 21, 22, 23, 24, 25, 30, 40 or 50, or about 5, 6, 7, 8, 9, 10, 11, 12, 13, 14, 15, 16, 17, 18, 19, 20, 21, 22, 23, 24, 25, 30, 40 or 50, etc., about 1, 2, 3, 4, 5, 6, 7, 8, 9, 10, 11, 12, 13, 14, 15, 16, 17, 18, 19, or 20, etc.) modified sugars which are independently 2′-OR modified sugars, wherein R is independently optionally substituted C₁₋₆ aliphatic. In some embodiments, the number is 1. In some embodiments, the number is 2. In some embodiments, the number is 3. In some embodiments, the number is 4. In some embodiments, the number is 5. In some embodiments, the number is 6. In some embodiments, the number is 7. In some embodiments, the number is 8. In some embodiments, the number is 9. In some embodiments, the number is 10. In some embodiments, the number is 11. In some embodiments, the number is 12. In some embodiments, the number is 13. In some embodiments, the number is 14. In some embodiments, the number is 15. In some embodiments, the number is 16. In some embodiments, the number is 17. In some embodiments, the number is 18. In some embodiments, the number is 19. In some embodiments, the number is 20. In some embodiments, R is methyl.

[0559] In some embodiments, a third subdomain comprises one or more (e.g., about 1-20, 1, 2, 3, 4, 5, 6, 7, 8, 9, 10, 11, 12, 13, 14, 15, 16, 17, 18, 19, 20, etc.) sugars comprising 2′-OH. In some embodiments, a third subdomain comprises one or more (e.g., about 1-20, 1, 2, 3, 4, 5, 6, 7, 8, 9, 10, 11, 12, 13, 14, 15, 16, 17, 18, 19, 20, etc.) sugars comprising two 2′-H. In some embodiments, a third subdomain comprises one or more (e.g., about 1-20, 1, 2, 3, 4, 5, 6, 7, 8, 9, 10, 11, 12, 13, 14, 15, 16, 17, 18, 19, 20, etc.) RNA sugars. In some embodiments, a third subdomain comprises one or more (e.g., about 1-20, 1, 2, 3, 4, 5, 6, 7, 8, 9, 10, 11, 12, 13, 14, 15, 16, 17, 18, 19, 20, etc.) DNA sugars.

[0560] In some embodiments, about 5%-100%, (e.g., about 10%-100%, 20-100%, 30%-100%, 40%-100%, 50%-80%, 50%-85%, 50%-90%, 50%-95%, 60%-80%, 60%-85%, 60%-90%, 60%-95%, 60%-100%, 65%-80%, 65%-85%, 65%-90%, 65%-95%, 65%-100%, 70%-80%, 70%-85%, 70%-90%, 70%-95%, 70%-100%, 75%-80%, 75%-85%, 75%-90%, 75%-95%, 75%-100%, 80%-85%, 80%-90%, 80%-95%, 80%-100%, 85%-90%, 85%-95%, 85%-100%, 90%-95%, 90%-100%, 10%, 20%, 30%, 40%, 50%, 60%, 65%, 70%, 75%, 80%, 85%, 90%, 95%, or 100%, etc.) of all sugars in a third subdomain are independently a modified sugar. In some embodiments, about 5%-100% (e.g., about 10%-100%, 20-100%, 30%-100%, 40%-100%, 50%-80%, 50%-85%, 50%-90%, 50%-95%, 60%-80%, 60%-85%, 60%-90%, 60%-95%, 60%-100%, 65%-80%, 65%-85%, 65%-90%, 65%-95%, 65%-100%, 70%-80%, 70%-85%, 70%-90%, 70%-95%, 70%-100%, 75%-80%, 75%-85%, 75%-90%, 75%-95%, 75%-100%, 80%-85%, 80%-90%, 80%-95%, 80%-100%, 85%-90%, 85%-95%, 85%-100%, 90%-95%, 90%-100%, 10%, 20%, 30%, 40%, 50%, 60%, 65%, 70%, 75%, 80%, 85%, 90%, 95%, or 100%, etc.) of all sugars in a third subdomain are independently a bicyclic sugar (e.g., a LNA sugar) or a 2′-OR modified sugar, wherein R is independently optionally substituted C₁₋₆ aliphatic. In some embodiments, about 5%-100% (e.g., about 10%-100%, 20-100%, 30%-100%, 40%-100%, 50%-80%, 50%-85%, 50%-90%, 50%-95%, 60%-80%, 60%-85%, 60%-90%, 60%-95%, 60%-100%, 65%-80%, 65%-85%, 65%-90%, 65%-95%, 65%-100%, 70%-80%, 70%-85%, 70%-90%, 70%-95%, 70%-100%, 75%-80%, 75%-85%, 75%-90%, 75%-95%, 75%-100%, 80%-85%, 80%-90%, 80%-95%, 80%-100%, 85%-90%, 85%-95%, 85%-100%, 90%-95%, 90%-100%, 10%, 20%, 30%, 40%, 50%, 60%, 65%, 70%, 75%, 80%, 85%, 90%, 95%, or 100%, etc.) of all sugars in a third subdomain are independently a 2′-OR modified sugar, wherein R is independently optionally substituted C₁₋₆ aliphatic. In some embodiments, a percentage is at least about 50%. In some embodiments, a percentage is at least about 55%. In some embodiments, a percentage is at least about 60%. In some embodiments, a percentage is at least about 65%. In some embodiments, a percentage is at least about 70%. In some embodiments, a percentage is at least about 75%. In some embodiments, a percentage is at least about 80%. In some embodiments, a percentage is at least about 85%. In some embodiments, a percentage is at least about 90%. In some embodiments, a percentage is at least about 95%. In some embodiments, a percentage is about 100%. In some embodiments, R is methyl. In some embodiments, N₋₂ comprises a 2′-OR modified sugar wherein R is not —H. In some embodiments, N₋₃ comprises a 2′-F modified sugar. In some embodiments, each nucleoside after N₋₃ independently comprises a 2′-OR modified sugar wherein R is not —H. In some embodiments, N₋₃ comprises a 2′-F modified sugar and each other nucleosides in a third subdomain independently comprises a 2′-OR modified sugar wherein R is not —H. In some embodiments, a 2′-OR modified sugar is independently a 2′-OMe or 2′-MOE modified sugar. In some embodiments, 2′-OR modified sugar is independently a 2′-OMe modified sugar. In some embodiments, each 2′-OR modified sugar is independently a 2′-OR modified sugar wherein R is optionally substituted C₁₋₆ aliphatic or a bicyclic sugar. In some embodiments, each 2′-OR modified sugar is independently a 2′-OR modified sugar wherein R is optionally substituted C₁₋₆ aliphatic. In some embodiments, each 2′-OR modified sugar is independently a 2′-OMe or 2′-MOE modified sugar. In some embodiments, each 2′-OR modified sugar is independently a 2′-OMe modified sugar.

[0561] In some embodiments, a third subdomain comprises about 1-50 (e.g., about 5, 6, 7, 8, 9, or 10-about 10, 11, 12, 13, 14, 15, 16, 17, 18, 19, 20, 21, 22, 23, 24, 25, 30, 40 or 50, or about 5, 6, 7, 8, 9, 10, 11, 12, 13, 14, 15, 16, 17, 18, 19, 20, 21, 22, 23, 24, 25, 30, 40 or 50, etc., about 1, 2, 3, 4, 5, 6, 7, 8, 9, 10, 11, 12, 13, 14, 15, 16, 17, 18, 19, or 20, etc.) modified sugars independently with a modification that is not 2′-F. In some embodiments, about 5%-100% (e.g., about 10%-100%, 20-100%, 30%-100%, 40%-100%, 50%-80%, 50%-85%, 50%-90%, 50%-95%, 60%-80%, 60%-85%, 60%-90%, 60%-95%, 60%-100%, 65%-80%, 65%-85%, 65%-90%, 65%-95%, 65%-100%, 70%-80%, 70%-85%, 70%-90%, 70%-95%, 70%-100%, 75%-80%, 75%-85%, 75%-90%, 75%-95%, 75%-100%, 80%-85%, 80%-90%, 80%-95%, 80%-100%, 85%-90%, 85%-95%, 85%-100%, 90%-95%, 90%-100%, 10%, 20%, 30%, 40%, 50%, 60%, 65%, 70%, 75%, 80%, 85%, 90%, 95%, or 100%, etc.) of sugars in a third subdomain are independently modified sugars with a modification that is not 2′-F. In some embodiments, about 50%-100% (e.g., about 50%-80%, 50%-85%, 50%-90%, 50%-95%, 60%-80%, 60%-85%, 60%-90%, 60%-95%, 60%-100%, 65%-80%, 65%-85%, 65%-90%, 65%-95%, 65%-100%, 70%-80%, 70%-85%, 70%-90%, 70%-95%, 70%-100%, 75%-80%, 75%-85%, 75%-90%, 75%-95%, 75%-100%, 80%-85%, 80%-90%, 80%-95%, 80%-100%, 85%-90%, 85%-95%, 85%-100%, 90%-95%, 90%-100%, 50%, 60%, 65%, 70%, 75%, 80%, 85%, 90%, 95%, or 100%, etc.) of sugars in a third subdomain are independently modified sugars with a modification that is not 2′-F. In some embodiments, modified sugars of a third subdomain are each independently selected from a bicyclic sugar (e.g., a LNA sugar), an acyclic sugar (e.g., a UNA sugar), a sugar with a 2′-OR modification, or a sugar with a 2′-N(R)₂ modification, wherein each R is independently optionally substituted C₁₋₆ aliphatic.

[0562] In some embodiments, a third subdomain comprises about 1-50 (e.g., about 5, 6, 7, 8, 9, or 10-about 10, 11, 12, 13, 14, 15, 16, 17, 18, 19, 20, 21, 22, 23, 24, 25, 30, 40 or 50, or about 5, 6, 7, 8, 9, 10, 11, 12, 13, 14, 15, 16, 17, 18, 19, 20, 21, 22, 23, 24, 25, 30, 40 or 50, etc., about 1, 2, 3, 4, 5, 6, 7, 8, 9, 10, 11, 12, 13, 14, 15, 16, 17, 18, 19, or 20, etc.) modified sugars independently selected from a bicyclic sugar (e.g., a LNA sugar), an acyclic sugar (e.g., a UNA sugar), a sugar with a 2′-OR modification, or a sugar with a 2′-N(R)₂ modification, wherein each R is independently optionally substituted C₁₋₆ aliphatic. In some embodiments, about 5%-100% (e.g., about 10%-100%, 20-100%, 30%-100%, 40%-100%, 50%-80%, 50%-85%, 50%-90%, 50%-95%, 60%-80%, 60%-85%, 60%-90%, 60%-95%, 60%-100%, 65%-80%, 65%-85%, 65%-90%, 65%-95%, 65%-100%, 70%-80%, 70%-85%, 70%-90%, 70%-95%, 70%-100%, 75%-80%, 75%-85%, 75%-90%, 75%-95%, 75%-100%, 80%-85%, 80%-90%, 80%-95%, 80%-100%, 85%-90%, 85%-95%, 85%-100%, 90%-95%, 90%-100%, 10%, 20%, 30%, 40%, 50%, 60%, 65%, 70%, 75%, 80%, 85%, 90%, 95%, or 100%, etc.) of sugars in a third subdomain are independently modified sugars selected from a bicyclic sugar (e.g., a LNA sugar), an acyclic sugar (e.g., a UNA sugar), a sugar with a 2′-OR modification, or a sugar with a 2′-N(R)₂ modification, wherein each R is independently optionally substituted C₁₋₆ aliphatic. In some embodiments, about 50%-100% (e.g., about 50%-80%, 50%-85%, 50%-90%, 50%-95%, 60%-80%, 60%-85%, 60%-90%, 60%-95%, 60%-100%, 65%-80%, 65%-85%, 65%-90%, 65%-95%, 65%-100%, 70%-80%, 70%-85%, 70%-90%, 70%-95%, 70%-100%, 75%-80%, 75%-85%, 75%-90%, 75%-95%, 75%-100%, 80%-85%, 80%-90%, 80%-95%, 80%-100%, 85%-90%, 85%-95%, 85%-100%, 90%-95%, 90%-100%, 50%, 60%, 65%, 70%, 75%, 80%, 85%, 90%, 95%, or 100%, etc.) of sugars in a third subdomain are independently modified sugars selected from a bicyclic sugar (e.g., a LNA sugar), an acyclic sugar (e.g., a UNA sugar), a sugar with a 2′-OR modification, or a sugar with a 2′-N(R)₂ modification, wherein each R is independently optionally substituted C₁₋₆ aliphatic.

[0563] In some embodiments, each sugar in a third subdomain independently comprises a 2′-OR modification, wherein R is optionally substituted C₁₋₆ aliphatic, or a 2′-O-L^{B}-4′ modification. In some embodiments, each sugar in a third subdomain independently comprises a 2′-OR modification, wherein R is optionally substituted C₁₋₆ aliphatic, or a 2′-O-L^{B}-4′ modification, wherein L^{B} is optionally substituted —CH₂—. In some embodiments, each sugar in a third subdomain independently comprises 2′-OMe.

[0564] In some embodiments, a third subdomain comprises one or more (e.g., about 1-20, 1, 2, 3, 4, 5, 6, 7, 8, 9, 10, 11, 12, 13, 14, 15, 16, 17, 18, 19, 20, etc.) 2′-F modified sugars. In some embodiments, a third subdomain comprises no 2′-F modified sugars. In some embodiments, a third subdomain comprises one or more bicyclic sugars and/or 2′-OR modified sugars wherein R is not —H. In some embodiments, levels of bicyclic sugars and/or 2′-OR modified sugars wherein R is not —H, individually or combined, are relatively high compared to level of 2′-F modified sugars. In some embodiments, no more than about 1%-95% (e.g., no more than about 1%, 5%, 10%, 15%, 20%, 25%, 30%, 35%, 40%, 45%, 50%, 55%, 60%, 65%, 70%, 75%, 80%, 85%, 90%, 95%, etc.) of sugars in a third subdomain comprises 2′-F. In some embodiments, no more than about 50% of sugars in a third subdomain comprises 2′-F. In some embodiments, a third subdomain comprises one or more (e.g., about 1-20, 1, 2, 3, 4, 5, 6, 7, 8, 9, 10, 11, 12, 13, 14, 15, 16, 17, 18, 19, 20, etc.) modified sugars comprising a 2′-N(R)₂ modification. In some embodiments, a third subdomain comprises one or more (e.g., about 1-20, 1, 2, 3, 4, 5, 6, 7, 8, 9, 10, 11, 12, 13, 14, 15, 16, 17, 18, 19, 20, etc.) modified sugars comprising a 2′-NH₂ modification. In some embodiments, a third subdomain comprises one or more (e.g., about 1-20, 1, 2, 3, 4, 5, 6, 7, 8, 9, 10, 11, 12, 13, 14, 15, 16, 17, 18, 19, 20, etc.) bicyclic sugars, e.g., LNA sugars. In some embodiments, a third subdomain comprises one or more (e.g., about 1-20, 1, 2, 3, 4, 5, 6, 7, 8, 9, 10, 11, 12, 13, 14, 15, 16, 17, 18, 19, 20, etc.) acyclic sugars (e.g., UNA sugars).

[0565] In some embodiments, no more than about 1%-95% (e.g., no more than about 1%, 5%, 10%, 15%, 20%, 25%, 30%, 35%, 40%, 45%, 50%, 55%, 60%, 65%, 70%, 75%, 80%, 85%, 90%, 95%, etc.) of sugars in a third subdomain comprises 2′-MOE. In some embodiments, no more than about 50% of sugars in a third subdomain comprises 2′-MOE. In some embodiments, no sugars in a third subdomain comprises 2′-MOE.

[0566] In some embodiments, a third subdomain comprise about 1-50, 1-40, 1-30, 1-25, 1-20, 1-15, 1-10 (e.g., about 5, 6, 7, 8, 9, or 10-about 10, 11, 12, 13, 14, 15, 16, 17, 18, 19, 20, 21, 22, 23, 24, 25, 30, 40 or 50, or about 5, 6, 7, 8, 9, 10, 11, 12, 13, 14, 15, 16, 17, 18, 19, 20, 21, 22, 23, 24, 25, 30, 40 or 50, etc., about 1, 2, 3, 4, 5, 6, 7, 8, 9, 10, 11, 12, 13, 14, 15, 16, 17, 18, 19, or 20, etc.) modified internucleotidic linkages. In some embodiments, about 5%-100% (e.g., about 10%-100%, 20-100%, 30%-100%, 40%-100%, 50%-80%, 50%-85%, 50%-90%, 50%-95%, 60%-80%, 60%-85%, 60%-90%, 60%-95%, 60%-100%, 65%-80%, 65%-85%, 65%-90%, 65%-95%, 65%-100%, 70%-80%, 70%-85%, 70%-90%, 70%-95%, 70%-100%, 75%-80%, 75%-85%, 75%-90%, 75%-95%, 75%-100%, 80%-85%, 80%-90%, 80%-95%, 80%-100%, 85%-90%, 85%-95%, 85%-100%, 90%-95%, 90%-100%, 10%, 20%, 30%, 40%, 50%, 60%, 65%, 70%, 75%, 80%, 85%, 90%, 95%, or 100%, etc.) of internucleotidic linkages in a third subdomain are modified internucleotidic linkages. In some embodiments, each internucleotidic linkage in a third subdomain is independently a modified internucleotidic linkage. In some embodiments, each modified internucleotidic linkages is independently a chiral internucleotidic linkage. In some embodiments, a modified or chiral internucleotidic linkage is a phosphorothioate internucleotidic linkage. In some embodiments, a modified or chiral internucleotidic linkage is a non-negatively charged internucleotidic linkage. In some embodiments, a modified or chiral internucleotidic linkage is a neutral internucleotidic linkage, e.g., n001. In some embodiments, each modified internucleotidic linkages is independently a phosphorothioate internucleotidic linkage or a non-negatively charged internucleotidic linkage. In some embodiments, each modified internucleotidic linkages is independently a phosphorothioate internucleotidic linkage or a neutral internucleotidic linkage. In some embodiments, each modified internucleotidic linkages is independently a phosphorothioate internucleotidic linkage. In some embodiments, at least about 1-50, 1-40, 1-30, 1-25, 1-20, 1-15, 1-10 (e.g., about 5, 6, 7, 8, 9, or 10-about 10, 11, 12, 13, 14, 15, 16, 17, 18, 19, 20, 21, 22, 23, 24, 25, 30, 40 or 50, or about 5, 6, 7, 8, 9, 10, 11, 12, 13, 14, 15, 16, 17, 18, 19, 20, 21, 22, 23, 24, 25, 30, 40 or 50, etc., about 1, 2, 3, 4, 5, 6, 7, 8, 9, 10, 11, 12, 13, 14, 15, 16, 17, 18, 19, or 20, etc.) chiral internucleotidic linkages in a third subdomain is chirally controlled. In some embodiments, at least 5%-100% (e.g., about 10%-100%, 20-100%, 30%-100%, 40%-100%, 50%-80%, 50%-85%, 50%-90%, 50%-95%, 60%-80%, 60%-85%, 60%-90%, 60%-95%, 60%-100%, 65%-80%, 65%-85%, 65%-90%, 65%-95%, 65%-100%, 70%-80%, 70%-85%, 70%-90%, 70%-95%, 70%-100%, 75%-80%, 75%-85%, 75%-90%, 75%-95%, 75%-100%, 80%-85%, 80%-90%, 80%-95%, 80%-100%, 85%-90%, 85%-95%, 85%-100%, 90%-95%, 90%-100%, 10%, 20%, 30%, 40%, 50%, 60%, 65%, 70%, 75%, 80%, 85%, 90%, 95%, or 100%, etc.) of chiral internucleotidic linkages in a third subdomain is chirally controlled. In some embodiments, at least 5%-100% (e.g., about 10%-100%, 20-100%, 30%-100%, 40%-100%, 50%-80%, 50%-85%, 50%-90%, 50%-95%, 60%-80%, 60%-85%, 60%-90%, 60%-95%, 60%-100%, 65%-80%, 65%-85%, 65%-90%, 65%-95%, 65%-100%, 70%-80%, 70%-85%, 70%-90%, 70%-95%, 70%-100%, 75%-80%, 75%-85%, 75%-90%, 75%-95%, 75%-100%, 80%-85%, 80%-90%, 80%-95%, 80%-100%, 85%-90%, 85%-95%, 85%-100%, 90%-95%, 90%-100%, 10%, 20%, 30%, 40%, 50%, 60%, 65%, 70%, 75%, 80%, 85%, 90%, 95%, or 100%, etc.) of phosphorothioate internucleotidic linkages in a third subdomain is chirally controlled. In some embodiments, each is independently chirally controlled. In some embodiments, at least about 1-50, 1-40, 1-30, 1-25, 1-20, 1-15, 1-10 (e.g., about 5, 6, 7, 8, 9, or 10-about 10, 11, 12, 13, 14, 15, 16, 17, 18, 19, 20, 21, 22, 23, 24, 25, 30, 40 or 50, or about 5, 6, 7, 8, 9, 10, 11, 12, 13, 14, 15, 16, 17, 18, 19, 20, 21, 22, 23, 24, 25, 30, 40 or 50, etc., about 1, 2, 3, 4, 5, 6, 7, 8, 9, 10, 11, 12, 13, 14, 15, 16, 17, 18, 19, or 20, etc.) chiral internucleotidic linkages in a third subdomain is Sp. In some embodiments, each is independently chirally controlled. In some embodiments, at least about 1-50, 1-40, 1-30, 1-25, 1-20, 1-15, 1-10 (e.g., about 5, 6, 7, 8, 9, or 10-about 10, 11, 12, 13, 14, 15, 16, 17, 18, 19, 20, 21, 22, 23, 24, 25, 30, 40 or 50, or about 5, 6, 7, 8, 9, 10, 11, 12, 13, 14, 15, 16, 17, 18, 19, 20, 21, 22, 23, 24, 25, 30, 40 or 50, etc., about 1, 2, 3, 4, 5, 6, 7, 8, 9, 10, 11, 12, 13, 14, 15, 16, 17, 18, 19, or 20, etc.) phosphorothioate internucleotidic linkages in a third subdomain is Sp. In some embodiments, at least 5%-100% (e.g., about 10%-100%, 20-100%, 30%-100%, 40%-100%, 50%-80%, 50%-85%, 50%-90%, 50%-95%, 60%-80%, 60%-85%, 60%-90%, 60%-95%, 60%-100%, 65%-80%, 65%-85%, 65%-90%, 65%-95%, 65%-100%, 70%-80%, 70%-85%, 70%-90%, 70%-95%, 70%-100%, 75%-80%, 75%-85%, 75%-90%, 75%-95%, 75%-100%, 80%-85%, 80%-90%, 80%-95%, 80%-100%, 85%-90%, 85%-95%, 85%-100%, 90%-95%, 90%-100%, 10%, 20%, 30%, 40%, 50%, 60%, 65%, 70%, 75%, 80%, 85%, 90%, 95%, or 100%, etc.) of chiral internucleotidic linkages in a third subdomain is Sp. In some embodiments, at least 5%-100% (e.g., about 10%-100%, 20-100%, 30%-100%, 40%-100%, 50%-80%, 50%-85%, 50%-90%, 50%-95%, 60%-80%, 60%-85%, 60%-90%, 60%-95%, 60%-100%, 65%-80%, 65%-85%, 65%-90%, 65%-95%, 65%-100%, 70%-80%, 70%-85%, 70%-90%, 70%-95%, 70%-100%, 75%-80%, 75%-85%, 75%-90%, 75%-95%, 75%-100%, 80%-85%, 80%-90%, 80%-95%, 80%-100%, 85%-90%, 85%-95%, 85%-100%, 90%-95%, 90%-100%, 10%, 20%, 30%, 40%, 50%, 60%, 65%, 70%, 75%, 80%, 85%, 90%, 95%, or 100%, etc.) of phosphorothioate internucleotidic linkages in a third subdomain is Sp. In some embodiments, the number is one or more. In some embodiments, the number is 2 or more. In some embodiments, the number is 3 or more. In some embodiments, the number is 4 or more. In some embodiments, the number is 5 or more. In some embodiments, the number is 6 or more. In some embodiments, the number is 7 or more. In some embodiments, the number is 8 or more. In some embodiments, the number is 9 or more. In some embodiments, the number is 10 or more. In some embodiments, the number is 11 or more. In some embodiments, the number is 12 or more. In some embodiments, the number is 13 or more. In some embodiments, the number is 14 or more. In some embodiments, the number is 15 or more. In some embodiments, a percentage is at least about 50%. In some embodiments, a percentage is at least about 55%. In some embodiments, a percentage is at least about 60%. In some embodiments, a percentage is at least about 65%. In some embodiments, a percentage is at least about 70%. In some embodiments, a percentage is at least about 75%. In some embodiments, a percentage is at least about 80%. In some embodiments, a percentage is at least about 85%. In some embodiments, a percentage is at least about 90%. In some embodiments, a percentage is at least about 95%. In some embodiments, a percentage is about 100%. In some embodiments, each internucleotidic linkage linking two third subdomain nucleosides is independently a modified internucleotidic linkage. In some embodiments, each modified internucleotidic linkages is independently a chiral internucleotidic linkage. In some embodiments, each modified internucleotidic linkages is independently a phosphorothioate internucleotidic linkage. In some embodiments, each chiral internucleotidic linkage is independently a phosphorothioate internucleotidic linkage. In some embodiments, each modified internucleotidic linkages is independently a Sp chiral internucleotidic linkage. In some embodiments, each modified internucleotidic linkages is independently a Sp phosphorothioate internucleotidic linkage. In some embodiments, each chiral internucleotidic linkages is independently a Sp phosphorothioate internucleotidic linkage. In some embodiments, an internucleotidic linkage of a third subdomain is bonded to two nucleosides of the third subdomain. In some embodiments, an internucleotidic linkage bonded to a nucleoside in a third subdomain and a nucleoside in a second subdomain may be properly considered an internucleotidic linkage of a third subdomain. In some embodiments, an internucleotidic linkage bonded to a nucleoside in a third subdomain and a nucleoside in a second subdomain is a modified internucleotidic linkage; in some embodiments, it is a chiral internucleotidic linkage; in some embodiments, it is chirally controlled; in some embodiments, it is Rp; in some embodiments, it is Sp.

[0567] In some embodiments, a third subdomain comprises a certain level of Rp internucleotidic linkages. In some embodiments, a level is about e.g., about 5%-100%, about 10%-100%, 20-100%, 30%-100%, 40%-100%, 50%-80%, 50%-85%, 50%-90%, 50%-95%, 60%-80%, 60%-85%, 60%-90%, 60%-95%, 60%-100%, 65%-80%, 65%-85%, 65%-90%, 65%-95%, 65%-100%, 70%-80%, 70%-85%, 70%-90%, 70%-95%, 70%-100%, 75%-80%, 75%-85%, 75%-90%, 75%-95%, 75%-100%, 80%-85%, 80%-90%, 80%-95%, 80%-100%, 85%-90%, 85%-95%, 85%-100%, 90%-95%, 90%-100%, 10%, 20%, 30%, 40%, 50%, 60%, 65%, 70%, 75%, 80%, 85%, 90%, 95%, or 100%, etc. of all internucleotidic linkages in a third subdomain. In some embodiments, a level is about e.g., about 5%-100%, about 10%-100%, 20-100%, 30%-100%, 40%-100%, 50%-80%, 50%-85%, 50%-90%, 50%-95%, 60%-80%, 60%-85%, 60%-90%, 60%-95%, 60%-100%, 65%-80%, 65%-85%, 65%-90%, 65%-95%, 65%-100%, 70%-80%, 70%-85%, 70%-90%, 70%-95%, 70%-100%, 75%-80%, 75%-85%, 75%-90%, 75%-95%, 75%-100%, 80%-85%, 80%-90%, 80%-95%, 80%-100%, 85%-90%, 85%-95%, 85%-100%, 90%-95%, 90%-100%, 10%, 20%, 30%, 40%, 50%, 60%, 65%, 70%, 75%, 80%, 85%, 90%, 95%, or 100%, etc. of all chiral internucleotidic linkages in a third subdomain. In some embodiments, a level is about e.g., about 5%-100%, about 10%-100%, 20-100%, 30%-100%, 40%-100%, 50%-80%, 50%-85%, 50%-90%, 50%-95%, 60%-80%, 60%-85%, 60%-90%, 60%-95%, 60%-100%, 65%-80%, 65%-85%, 65%-90%, 65%-95%, 65%-100%, 70%-80%, 70%-85%, 70%-90%, 70%-95%, 70%-100%, 75%-80%, 75%-85%, 75%-90%, 75%-95%, 75%-100%, 80%-85%, 80%-90%, 80%-95%, 80%-100%, 85%-90%, 85%-95%, 85%-100%, 90%-95%, 90%-100%, 10%, 20%, 30%, 40%, 50%, 60%, 65%, 70%, 75%, 80%, 85%, 90%, 95%, or 100%, etc. of all chirally controlled internucleotidic linkages in a third subdomain. In some embodiments, a percentage is about or no more than about 50%. In some embodiments, a percentage is at least about 55%. In some embodiments, a percentage is at least about 60%. In some embodiments, a percentage is at least about 65%. In some embodiments, a percentage is at least about 70%. In some embodiments, a percentage is at least about 75%. In some embodiments, a percentage is at least about 80%. In some embodiments, a percentage is at least about 85%. In some embodiments, a percentage is at least about 90%. In some embodiments, a percentage is at least about 95%. In some embodiments, a percentage is about 100%. In some embodiments, a percentage is about or no more than about 5%. In some embodiments, a percentage is about or no more than about 10%. In some embodiments, a percentage is about or no more than about 15%. In some embodiments, a percentage is about or no more than about 20%. In some embodiments, a percentage is about or no more than about 25%. In some embodiments, a percentage is about or no more than about 30%. In some embodiments, a percentage is about or no more than about 35%. In some embodiments, a percentage is about or no more than about 40%. In some embodiments, a percentage is about or no more than about 45%. In some embodiments, a percentage is about or no more than about 50%. In some embodiments, about 1-50, 1-40, 1-30, 1-25, 1-20, 1-15, 1-10, 1-5, e.g., about 1, 2, 3, 4, 5, 6, 7, 8, 9, 10, 11, 12, 13, 14, 15, 16, 17, 18, 19, or 20 internucleotidic linkages are independently Rp chiral internucleotidic linkages. In some embodiments, the number is about or no more than about 1. In some embodiments, the number is about or no more than about 2. In some embodiments, the number is about or no more than about 3. In some embodiments, the number is about or no more than about 4. In some embodiments, the number is about or no more than about 5. In some embodiments, the number is about or no more than about 6. In some embodiments, the number is about or no more than about 7. In some embodiments, the number is about or no more than about 8. In some embodiments, the number is about or no more than about 9. In some embodiments, the number is about or no more than about 10.

[0568] In some embodiments, each phosphorothioate internucleotidic linkage in a third subdomain is independently chirally controlled. In some embodiments, each is independently Sp or Rp. In some embodiments, a high level is Sp as described herein. In some embodiments, each phosphorothioate internucleotidic linkage in a third subdomain is chirally controlled and is Sp. In some embodiments, one or more, e.g., about 1-5 (e.g., about 1, 2, 3, 4, or 5) is Rp.

[0569] In some embodiments, as illustrated in certain examples, a third subdomain comprises one or more non-negatively charged internucleotidic linkages, each of which is optionally and independently chirally controlled. In some embodiments, each non-negatively charged internucleotidic linkage is independently n001. In some embodiments, a chiral non-negatively charged internucleotidic linkage is not chirally controlled. In some embodiments, each chiral non-negatively charged internucleotidic linkage is not chirally controlled. In some embodiments, a chiral non-negatively charged internucleotidic linkage is chirally controlled. In some embodiments, a chiral non-negatively charged internucleotidic linkage is chirally controlled and is Rp. In some embodiments, a chiral non-negatively charged internucleotidic linkage is chirally controlled and is Sp. In some embodiments, each chiral non-negatively charged internucleotidic linkage is chirally controlled. In some embodiments, the number of non-negatively charged internucleotidic linkages in a third subdomain is about 1-10, or about 1, 2, 3, 4, 5, 6, 7, 8, 9, or 10. In some embodiments, it is about 1. In some embodiments, it is about 2. In some embodiments, it is about 3. In some embodiments, it is about 4. In some embodiments, it is about 5. In some embodiments, two or more non-negatively charged internucleotidic linkages are consecutive. In some embodiments, no two non-negatively charged internucleotidic linkages are consecutive. In some embodiments, all non-negatively charged internucleotidic linkages in a third subdomain are consecutive (e.g., 3 consecutive non-negatively charged internucleotidic linkages). In some embodiments, a non-negatively charged internucleotidic linkage, or two or more (e.g., about 2, about 3, about 4 etc.) consecutive non-negatively charged internucleotidic linkages, are at the 3′-end of a third subdomain. In some embodiments, the last two or three or four internucleotidic linkages of a third subdomain comprise at least one internucleotidic linkage that is not a non-negatively charged internucleotidic linkage. In some embodiments, the last two or three or four internucleotidic linkages of a third subdomain comprise at least one internucleotidic linkage that is not n001. In some embodiments, the internucleotidic linkage linking the last two nucleosides of a third subdomain is a non-negatively charged internucleotidic linkage. In some embodiments, the internucleotidic linkage linking the last two nucleosides of a third subdomain is a Sp non-negatively charged internucleotidic linkage. In some embodiments, the internucleotidic linkage linking the last two nucleosides of a third subdomain is a Rp non-negatively charged internucleotidic linkage. In some embodiments, the internucleotidic linkage linking the last two nucleosides of a third subdomain is a phosphorothioate internucleotidic linkage. In some embodiments, the internucleotidic linkage linking the last two nucleosides of a third subdomain is a Sp phosphorothioate internucleotidic linkage. In some embodiments, the last two nucleosides of a third subdomain are the last two nucleosides of a second domain. In some embodiments, the last two nucleosides of a third subdomain are the last two nucleosides of an oligonucleotide. In some embodiments, the internucleotidic linkage linking the first two nucleosides of a third subdomain is a non-negatively charged internucleotidic linkage. In some embodiments, the internucleotidic linkage linking the first two nucleosides of a third subdomain is a Sp non-negatively charged internucleotidic linkage. In some embodiments, the internucleotidic linkage linking the first two nucleosides of a third subdomain is a Rp non-negatively charged internucleotidic linkage. In some embodiments, the internucleotidic linkage linking the first two nucleosides of a third subdomain is a phosphorothioate internucleotidic linkage. In some embodiments, the internucleotidic linkage linking the first two nucleosides of a third subdomain is a Sp phosphorothioate internucleotidic linkage. In some embodiments, a non-negatively charged internucleotidic linkage is a neutral internucleotidic linkage such as n001. In some embodiments, it is chirally controlled and is Rp. In some embodiments, the last and/or the second last internucleotidic linkage of an oligonucleotide is a non-negatively charged internucleotidic linkage such as a phosphoryl guanidine internucleotidic linkage like n001. In some embodiments, it is chirally controlled and is Rp.

[0570] In some embodiments, a third subdomain comprises one or more (e.g., about 1, 2, 3, 4, 5, 6, 7, 8, 9, 10) natural phosphate linkages. In some embodiments, a third subdomain contains no natural phosphate linkages. In some embodiments, the internucleotidic linkage bonded to N₋₂ and N₋₃ is a natural phosphate linkage. In some embodiments, sugar of N₋₃ is a 2′-F modified sugar and sugar of N₋₂ is a 2′-OR modified sugar wherein R is not —H (e.g., a 2′-OMe modified sugar). In some embodiments, among all internucleotidic linkages bonded to two nucleosides of a third subdomain, one is a natural phosphate linkage (e.g., between N₋₂ and N₋₃ as described herein), one is a Rp non-negatively charged internucleotidic linkage such as a phosphoryl guanidine internucleotidic linkage n001 (e.g., the last or the second last internucleotidic linkage of an oligonucleotide), and all the others are Sp phosphorothioate internucleotidic linkages.

[0571] In some embodiments, a third subdomain comprises a 5′-end portion, e.g., one having a length of about 1-20, 1-15, 1-10, 1-8, 1-5, 1-3, 3-8, or about 1, 2, 3, 4, 5, 6, 7, 8, 9, or 10 nucleobases. In some embodiments, a 5′-end portion has a length of about 1-3 nucleobases. In some embodiments, a length is one nucleobase. In some embodiments, a length is 2 nucleobases. In some embodiments, a length is 3 nucleobases. In some embodiments, a length is 4 nucleobases. In some embodiments, a length is 5 nucleobases. In some embodiments, a length is 6 nucleobases. In some embodiments, a length is 7 nucleobases. In some embodiments, a length is 8 nucleobases. In some embodiments, a length is 9 nucleobases. In some embodiments, a length is 10 nucleobases. In some embodiments, a 5′-end portion comprises the 5′-end nucleobase of a third subdomain. In some embodiments, a third subdomain comprises or consists of a 3′-end portion and a 5′-end portion. In some embodiments, a 5′-end portion comprises the 5′-end nucleobase of a third subdomain. In some embodiments, a 5′-end portion of a third subdomain is bonded to a second subdomain.

[0572] In some embodiments, a 5′-end portion comprises one or more sugars having two 2′-H (e.g., natural DNA sugars). In some embodiments, a 5′-end portion comprises one or more sugars having 2′-OH (e.g., natural RNA sugars). In some embodiments, one or more (e.g., about 1-20, 1-15, 1-10, 3-8, or about 1, 2, 3, 4, 5, 6, 7, 8, 9, or 10) of sugars in a 5′-end portion are independently modified sugars. In some embodiments, about 5%-100% (e.g., about 10%-100%, 20-100%, 30%-100%, 40%-100%, 50%-80%, 50%-85%, 50%-90%, 50%-95%, 60%-80%, 60%-85%, 60%-90%, 60%-95%, 60%-100%, 65%-80%, 65%-85%, 65%-90%, 65%-95%, 65%-100%, 70%-80%, 70%-85%, 70%-90%, 70%-95%, 70%-100%, 75%-80%, 75%-85%, 75%-90%, 75%-95%, 75%-100%, 80%-85%, 80%-90%, 80%-95%, 80%-100%, 85%-90%, 85%-95%, 85%-100%, 90%-95%, 90%-100%, 10%, 20%, 30%, 40%, 50%, 60%, 65%, 70%, 75%, 80%, 85%, 90%, 95%, or 100%, etc.) of sugars in a 5′-end portion are independently modified sugars. In some embodiments, each sugar is independently a modified sugar. In some embodiments, modified sugars are independently selected from a bicyclic sugar (e.g., a LNA sugar), an acyclic sugar (e.g., a UNA sugar), a sugar with a 2′-OR modification, or a sugar with a 2′-N(R)₂ modification, wherein each R is independently optionally substituted C₁₋₆ aliphatic.

[0573] In some embodiments, one or more of the modified sugars independently comprises 2′-F or 2′-OR, wherein R is independently optionally substituted C₁₋₆ aliphatic. In some embodiments, one or more of the modified sugars are independently 2′-F or 2′-OMe. In some embodiments, each modified sugar in a 5′-end portion is independently a bicyclic sugar (e.g., a LNA sugar) or a sugar with a 2′-OR modification wherein R is optionally substituted C₁₋₆ aliphatic. In some embodiments, each modified sugar in a 5′-end portion is independently a bicyclic sugar (e.g., a LNA sugar) or a sugar with a 2′-OR modification wherein R is optionally substituted C₁₋₆ aliphatic. In some embodiments, each modified sugar in a 5′-end portion is independently a sugar with a 2′-OR modification wherein R is optionally substituted C₁₋₆ aliphatic. In some embodiments, R is methyl.

[0574] In some embodiments, compared to a 3′-end portion, 5′ end portion contains a higher level (in numbers and/or percentage) of 2′-F modified sugars and/or sugars comprising two 2′-H (e.g., natural DNA sugars), and/or a lower level (in numbers and/or percentage) of other types of modified sugars, e.g., bicyclic sugars and/or sugars with 2′-OR modifications wherein R is independently optionally substituted C₁₋₆ aliphatic. In some embodiments, compared to a 3′-end portion, a 5′-end portion contains a higher level of 2′-F modified sugars and/or a lower level of 2′-OR modified sugars wherein R is optionally substituted C₁₋₆ aliphatic. In some embodiments, compared to a 3′-end portion, a 5′-end portion contains a higher level of 2′-F modified sugars and/or a lower level of 2′-OMe modified sugars. In some embodiments, compared to a 3′-end portion, a 5′-end portion contains a higher level of natural DNA sugars and/or a lower level of 2′-OR modified sugars wherein R is optionally substituted C₁₋₆ aliphatic. In some embodiments, compared to a 3′-end portion, a 5′-end portion contains a higher level of natural DNA sugars and/or a lower level of 2′-OMe modified sugars. In some embodiments, a 5′-end portion contains low levels (e.g., no more than 50%, 40%, 30%, 25%, 20%, or 10%, or no more than 1, 2, 3, 4, 5, 6, 7, 8, 9, or 10) of modified sugars which are bicyclic sugars or sugars comprising 2′-OR wherein R is optionally substituted C₁₋₆ aliphatic (e.g., methyl). In some embodiments, a 5′-end portion contains no modified sugars which are bicyclic sugars or sugars comprising 2′-OR wherein R is optionally substituted C₁₋₆ aliphatic (e.g., methyl).

[0575] In some embodiments, one or more modified sugars independently comprise 2′-F. In some embodiments, no modified sugars comprises 2′-OMe or other 2′-OR modifications wherein R is optionally substituted C₁₋₆ aliphatic. In some embodiments, each sugar of a 5′-end portion independently comprises two 2′-H or a 2′-F modification. In some embodiments, a 5′-end portion comprises 1, 2, 3, 4, or 5 2′-F modified sugars. In some embodiments, a 5′-end portion comprises 1-3 2′-F modified sugars. In some embodiments, a 5′-end portion comprises 1, 2, 3, 4, or 5 natural DNA sugars. In some embodiments, a 5′-end portion comprises 1-3 natural DNA sugars.

[0576] In some embodiments, one or more (e.g., about 1-10, or about 1, 2, 3, 4, 5, 6, 7, 8, 9, or 10) internucleotidic linkages of a 5′-end portion are independently a modified internucleotidic linkage. In some embodiments, one or more (e.g., about 1-10, or about 1, 2, 3, 4, 5, 6, 7, 8, 9, or 10) internucleotidic linkages of a 5′-end portion are independently a chiral internucleotidic linkage. In some embodiments, one or more (e.g., about 1-10, or about 1, 2, 3, 4, 5, 6, 7, 8, 9, or 10) internucleotidic linkages of a 5′-end portion are independently a chirally controlled internucleotidic linkage. In some embodiments, one or more (e.g., about 1-10, or about 1, 2, 3, 4, 5, 6, 7, 8, 9, or 10) internucleotidic linkages of a 5′-end portion are Rp. In some embodiments, one or more (e.g., about 1-10, or about 1, 2, 3, 4, 5, 6, 7, 8, 9, or 10) internucleotidic linkages of a 5′-end portion are Sp. In some embodiments, each internucleotidic linkage of a 5′-end portion is Sp. In some embodiments, a 5′-end portion contains a higher level (in number and/or percentage) of Rp internucleotidic linkage and/or natural phosphate linkage compared to a 3′-end portion.

[0577] In some embodiments, a 5′-end portion comprises one or more (e.g., about 1-10, or about 1, 2, 3, 4, 5, 6, 7, 8, 9, or 10) mismatches as described herein. In some embodiments, a 5′-end portion comprises one or more (e.g., about 1-10, or about 1, 2, 3, 4, 5, 6, 7, 8, 9, or 10) wobbles as described herein. In some embodiments, a 5′-end portion is about 60-100% (e.g., 66%, 70%, 75%, 80%, 85%, 90%, 95%, or more) complementary to a target nucleic acid. In some embodiments, a complementarity is 60% or more. In some embodiments, a complementarity is 70% or more. In some embodiments, a complementarity is 75% or more. In some embodiments, a complementarity is 80% or more. In some embodiments, a complementarity is 90% or more.

[0578] In some embodiments, a third subdomain comprises a 3′-end portion, e.g., one having a length of about 1-20, 1-15, 1-10, 1-8, 1-4, 3-8, or about 1, 2, 3, 4, 5, 6, 7, 8, 9, or 10 nucleobases. In some embodiments, a 3′-end portion has a length of about 3-6 nucleobases. In some embodiments, a length is one nucleobase. In some embodiments, a length is 2 nucleobases. In some embodiments, a length is 3 nucleobases. In some embodiments, a length is 4 nucleobases. In some embodiments, a length is 5 nucleobases. In some embodiments, a length is 6 nucleobases. In some embodiments, a length is 7 nucleobases. In some embodiments, a length is 8 nucleobases. In some embodiments, a length is 9 nucleobases. In some embodiments, a length is 10 nucleobases. In some embodiments, a 3′-end portion comprises the 3′-end nucleobase of a third subdomain.

[0579] In some embodiments, a 3′-end portion comprises one or more sugars having two 2′-H (e.g., natural DNA sugars). In some embodiments, a 3′-end portion comprises one or more sugars having 2′-OH (e.g., natural RNA sugars). In some embodiments, one or more (e.g., about 1-20, 1-15, 1-10, 3-8, or about 1, 2, 3, 4, 5, 6, 7, 8, 9, or 10) of sugars in a 3′-end portion are independently modified sugars. In some embodiments, about 5%-100% (e.g., about 10%-100%, 20-100%, 30%-100%, 40%-100%, 50%-80%, 50%-85%, 50%-90%, 50%-95%, 60%-80%, 60%-85%, 60%-90%, 60%-95%, 60%-100%, 65%-80%, 65%-85%, 65%-90%, 65%-95%, 65%-100%, 70%-80%, 70%-85%, 70%-90%, 70%-95%, 70%-100%, 75%-80%, 75%-85%, 75%-90%, 75%-95%, 75%-100%, 80%-85%, 80%-90%, 80%-95%, 80%-100%, 85%-90%, 85%-95%, 85%-100%, 90%-95%, 90%-100%, 10%, 20%, 30%, 40%, 50%, 60%, 65%, 70%, 75%, 80%, 85%, 90%, 95%, or 100%, etc.) of sugars in a 3′-end portion are independently modified sugars. In some embodiments, each sugar is independently a modified sugar. In some embodiments, modified sugars are independently selected from a bicyclic sugar (e.g., a LNA sugar), an acyclic sugar (e.g., a UNA sugar), a sugar with a 2′-OR modification, or a sugar with a 2′-N(R)₂ modification, wherein each R is independently optionally substituted C₁₋₆ aliphatic.

[0580] In some embodiments, one or more of the modified sugars independently comprises 2′-F or 2′-OR, wherein R is independently optionally substituted C₁₋₆ aliphatic. In some embodiments, one or more of the modified sugars are independently 2′-F or 2′-OMe. In some embodiments, each modified sugar in a 3′-end portion is independently a bicyclic sugar (e.g., a LNA sugar) or a sugar with a 2′-OR modification wherein R is optionally substituted C₁₋₆ aliphatic. In some embodiments, each modified sugar in a 3′-end portion is independently a bicyclic sugar (e.g., a LNA sugar) or a sugar with a 2′-OR modification wherein R is optionally substituted C₁₋₆ aliphatic. In some embodiments, each modified sugar in a 3′-end portion is independently a sugar with a 2′-OR modification wherein R is optionally substituted C₁₋₆ aliphatic. In some embodiments, R is methyl.

[0581] In some embodiments, one or more sugars in a 3′-end portion independently comprise a 2′-OR modification, wherein R is optionally substituted C₁₋₆ aliphatic, or a 2′-O-L^{B}-4′ modification. In some embodiments, each sugar in a 3′-end portion independently comprises a 2′-OR modification, wherein R is optionally substituted C₁₋₆ aliphatic, or a 2′-O-L^{B}-4′ modification. In some embodiments, L^{B} is optionally substituted —CH₂—. In some embodiments, L^{B} is —CH₂—. In some embodiments, each sugar in a 3′-end portion independently comprises 2′-OMe.

[0582] In some embodiments, one or more (e.g., about 1-10, or about 1, 2, 3, 4, 5, 6, 7, 8, 9, or 10) internucleotidic linkages of a 3′-end portion are independently a modified internucleotidic linkage. In some embodiments, one or more (e.g., about 1-10, or about 1, 2, 3, 4, 5, 6, 7, 8, 9, or 10) internucleotidic linkages of a 3′-end portion are independently a chiral internucleotidic linkage. In some embodiments, one or more (e.g., about 1-10, or about 1, 2, 3, 4, 5, 6, 7, 8, 9, or 10) internucleotidic linkages of a 3′-end portion are independently a chirally controlled internucleotidic linkage. In some embodiments, one or more (e.g., about 1-10, or about 1, 2, 3, 4, 5, 6, 7, 8, 9, or 10) internucleotidic linkages of a 3′-end portion are Rp. In some embodiments, one or more (e.g., about 1-10, or about 1, 2, 3, 4, 5, 6, 7, 8, 9, or 10) internucleotidic linkages of a 3′-end portion are Sp. In some embodiments, each internucleotidic linkage of a 3′-end portion is Sp.

[0583] In some embodiments, a 3′-end portion comprises one or more (e.g., about 1-10, or about 1, 2, 3, 4, 5, 6, 7, 8, 9, or 10) mismatches as described herein. In some embodiments, a 3′-end portion comprises one or more (e.g., about 1-10, or about 1, 2, 3, 4, 5, 6, 7, 8, 9, or 10) wobbles as described herein. In some embodiments, a 3′-end portion is about 60-100% (e.g., 66%, 70%, 75%, 80%, 85%, 90%, 95%, or more) complementary to a target nucleic acid. In some embodiments, a complementarity is 60% or more. In some embodiments, a complementarity is 70% or more. In some embodiments, a complementarity is 75% or more. In some embodiments, a complementarity is 80% or more. In some embodiments, a complementarity is 90% or more.

[0584] In some embodiments, a third subdomain recruits, promotes or contribute to recruitment of, a protein such as an ADAR protein, e.g., ADAR1, ADAR2, etc. In some embodiments, a third subdomain recruits, or promotes or contribute to interactions with, a protein such as an ADAR protein. In some embodiments, a third subdomain contacts with a RNA binding domain (RBD) of ADAR. In some embodiments, a third subdomain contacts with a catalytic domain of ADAR which has a deaminase activity. In some embodiments, a third subdomain contact with a domain that has a deaminase activity of ADAR1. In some embodiments, a third subdomain contact with a domain that has a deaminase activity of ADAR2. In some embodiments, various nucleobases, sugars and/or internucleotidic linkages of a third subdomain may interact with one or more residues of proteins, e.g., ADAR proteins.

[0585] As demonstrated herein, chiral control of linkage phosphorus of chiral internucleotidic linkages can be utilized in oligonucleotides to provide various properties and/or activities. In some embodiments, a Rp internucleotidic linkage (e.g., a Rp phosphorothioate internucleotidic linkage), a Sp internucleotidic linkage (e.g., a Rp phosphorothioate internucleotidic linkage), or a non-chirally controlled internucleotidic linkage (e.g., a non-chirally controlled phosphorothioate internucleotidic linkage) is at one or more of positions −8, −7, −6, −5, −4, −3, −2, −1, +1, +2, +3, +4, +5, +6, +7, and +8 of a nucleoside opposite to a target adenosine (“+” is counting from the nucleoside toward the 5′-end of an oligonucleotide with the internucleotidic linkage at the +1 position being the internucleotidic linkage between a nucleoside opposite to a target adenosine and its 5′ side neighboring nucleoside (e.g., being the internucleotidic linkage bonded to the 5′-carbon of a nucleoside opposite to a target adenosine, or being between N₁ and N₀ of 5′-N₁N₀N₋₁-3′, wherein as described herein N₀ is the nucleoside opposite to a target adenosine), and “−” is counting from the nucleoside toward the 3′-end of an oligonucleotide with the internucleotidic linkage at the −1 position being the internucleotidic linkage between a nucleoside opposite to a target adenosine and its 3′ side neighboring nucleoside (e.g., being the internucleotidic linkage bonded to the 3′-carbon of a nucleoside opposite to a target adenosine, or being between N₋₁ and N₀ of 5′-N₁N₀N₋₁-3′, wherein as described herein N₀ is the nucleoside opposite to a target adenosine)). In some embodiments, a Rp internucleotidic linkage (e.g., a Rp phosphorothioate internucleotidic linkage) is at one or more of positions −8, −7, −6, −5, −4, −3, −2, −1, +1, +2, +3, +4, +5, +6, +7, and +8 of a nucleoside opposite to a target adenosine. In some embodiments, a Rp internucleotidic linkage (e.g., a Rp phosphorothioate internucleotidic linkage) is at one or more of positions −2, −1, +3, +4, +5, +6, +7, and +8 of a nucleoside opposite to a target adenosine. In some embodiments, a Sp internucleotidic linkage (e.g., a Sp phosphorothioate internucleotidic linkage) is at one or more of positions −8, −7, −6, −5, −4, −3, −2, −1, +1, +2, +3, +4, +5, +6, +7, and +8 of a nucleoside opposite to a target adenosine. In some embodiments, a Sp internucleotidic linkage (e.g., a Sp phosphorothioate internucleotidic linkage) is at one or more of positions −2, −1, +3, +4, +5, +6, +7, and +8 of a nucleoside opposite to a target adenosine. In some embodiments, a non-chirally controlled internucleotidic linkage (e.g., a non-chirally controlled phosphorothioate internucleotidic linkage) is at one or more of positions −8, −7, −6, −5, −4, −3, −2, −1, +1, +2, +3, +4, +5, +6, +7, and +8 of a nucleoside opposite to a target adenosine. In some embodiments, a non-chirally controlled internucleotidic linkage (e.g., a non-chirally controlled phosphorothioate internucleotidic linkage) is at one or more of positions −2, −1, +3, +4, +5, +6, +7, and +8 of a nucleoside opposite to a target adenosine.

[0586] In some embodiments, Rp is at position +8. In some embodiments, Rp is at position +7. In some embodiments, Rp is at position −6. In some embodiments, Rp is at position +5. In some embodiments, Rp is at position +4. In some embodiments, Rp is at position +3. In some embodiments, Rp is at position +2. In some embodiments, Rp is at position +1. In some embodiments, Rp is at position −1. In some embodiments, Rp is at position −2. In some embodiments, Rp is at position −3. In some embodiments, Rp is at position −4. In some embodiments, Rp is at position −5. In some embodiments, Rp is at position −6. In some embodiments, Rp is at position −7. In some embodiments, Rp is at position −8. In some embodiments, Rp is the configuration of a chirally controlled phosphorothioate internucleotidic linkage. In some embodiments, Sp is at position +8. In some embodiments, Sp is at position +7. In some embodiments, Sp is at position −6. In some embodiments, Sp is at position +5. In some embodiments, Sp is at position +4. In some embodiments, Sp is at position +3. In some embodiments, Sp is at position +2. In some embodiments, Sp is at position +1. In some embodiments, Sp is at position −1. In some embodiments, Sp is at position −2. In some embodiments, Sp is at position −3. In some embodiments, Sp is at position −4. In some embodiments, Sp is at position −5. In some embodiments, Sp is at position −6. In some embodiments, Sp is at position −7. In some embodiments, Sp is at position −8. In some embodiments, Sp is the configuration of a chirally controlled phosphorothioate internucleotidic linkage. In some embodiments, a non-chirally controlled internucleotidic linkage is at position +8. In some embodiments, a non-chirally controlled internucleotidic linkage is at position +7. In some embodiments, a non-chirally controlled internucleotidic linkage is at position −6. In some embodiments, a non-chirally controlled internucleotidic linkage is at position +5. In some embodiments, a non-chirally controlled internucleotidic linkage is at position +4. In some embodiments, a non-chirally controlled internucleotidic linkage is at position +3. In some embodiments, a non-chirally controlled internucleotidic linkage is at position +2. In some embodiments, a non-chirally controlled internucleotidic linkage is at position +1. In some embodiments, a non-chirally controlled internucleotidic linkage is at position −1. In some embodiments, a non-chirally controlled internucleotidic linkage is at position −2. In some embodiments, a non-chirally controlled internucleotidic linkage is at position −3. In some embodiments, a non-chirally controlled internucleotidic linkage is at position −4. In some embodiments, a non-chirally controlled internucleotidic linkage is at position −5. In some embodiments, a non-chirally controlled internucleotidic linkage is at position −6. In some embodiments, a non-chirally controlled internucleotidic linkage is at position −7. In some embodiments, a non-chirally controlled internucleotidic linkage is at position −8. In some embodiments, a non-chirally controlled internucleotidic linkage is a non-chirally controlled phosphorothioate internucleotidic linkage.

[0587] In some embodiments, a first domain comprises one or more (e.g., 1, 2, 3, 4, 5, 6, 7, 8, 9, or 10) Rp internucleotidic linkages (e.g., Rp phosphorothioate internucleotidic linkages). In some embodiments, a first domain comprises one or more (e.g., 1, 2, 3, 4, 5, 6, 7, 8, 9, or 10) Sp internucleotidic linkages (e.g., Sp phosphorothioate internucleotidic linkages). In some embodiments, a first domain comprises one or more (e.g., 1, 2, 3, 4, 5, 6, 7, 8, 9, or 10) non-chirally controlled internucleotidic linkages (e.g., non-chirally controlled phosphorothioate internucleotidic linkages). In some embodiments, such internucleotidic linkages are consecutive. In some embodiments, at least about 50%, 55%, 60%, 65%, 70%, 75%, 80%, 85%, 90%, or 95%, or all of internucleotidic linkages in a first domain are chirally controlled and are Sp. In some embodiments, at least about 50%, 55%, 60%, 65%, 70%, 75%, 80%, 85%, 90%, or 95%, or all of phosphorothioate internucleotidic linkages in a first domain are chirally controlled and are Sp. In some embodiments, a second domain comprises one or more (e.g., 1, 2, 3, 4, 5, 6, 7, 8, 9, or 10) Rp internucleotidic linkages (e.g., Rp phosphorothioate internucleotidic linkages). In some embodiments, a second domain comprises one or more (e.g., 1, 2, 3, 4, 5, 6, 7, 8, 9, or 10) Sp internucleotidic linkages (e.g., Sp phosphorothioate internucleotidic linkages). In some embodiments, a second domain comprises one or more (e.g., 1, 2, 3, 4, 5, 6, 7, 8, 9, or 10) non-chirally controlled internucleotidic linkages (e.g., non-chirally controlled phosphorothioate internucleotidic linkages). In some embodiments, such internucleotidic linkages are consecutive. In some embodiments, at least about 50%, 55%, 60%, 65%, 70%, 75%, 80%, 85%, 90%, or 95%, or all of internucleotidic linkages in a second domain are chirally controlled and are Sp. In some embodiments, at least about 50%, 55%, 60%, 65%, 70%, 75%, 80%, 85%, 90%, or 95%, or all of phosphorothioate internucleotidic linkages in a second domain are chirally controlled and are Sp. In some embodiments, a first subdomain comprises one or more (e.g., 1, 2, 3, 4, 5, 6, 7, 8, 9, or 10) Rp internucleotidic linkages (e.g., Rp phosphorothioate internucleotidic linkages). In some embodiments, a first subdomain comprises one or more (e.g., 1, 2, 3, 4, 5, 6, 7, 8, 9, or 10) Sp internucleotidic linkages (e.g., Sp phosphorothioate internucleotidic linkages). In some embodiments, a first subdomain comprises one or more (e.g., 1, 2, 3, 4, 5, 6, 7, 8, 9, or 10) non-chirally controlled internucleotidic linkages (e.g., non-chirally controlled phosphorothioate internucleotidic linkages). In some embodiments, such internucleotidic linkages are consecutive. In some embodiments, such internucleotidic linkages are at 3′-end portion of a first subdomain.

[0588] In some embodiments, one or more natural phosphate linkages are utilized in provided oligonucleotides and compositions thereof. In some embodiments, provided oligonucleotides or portions thereof (e.g., first domains, second domains, first subdomains, second subdomains, third subdomains, etc.) comprise one or more (e.g., about, or at least about, 1, 2, 3, 4, 5, 6, 7, 8, 9, 10, 11, 12, 13, 14, 15, 16, 17, 18, 19, 20, 21, 22, 23, 24, 25, 26, 27, 28, 29, 30, 35, 40, 45, or 50, or more) natural phosphate linkages. In some embodiments, provided oligonucleotides or portions thereof (e.g., first domains, second domains, first subdomains, second subdomains, third subdomains, etc.) comprise two or more (e.g., about, or at least about, 2, 3, 4, 5, 6, 7, 8, 9, 10, 11, 12, 13, 14, 15, 16, 17, 18, 19, 20, 21, 22, 23, 24, 25, 26, 27, 28, 29, 30, 35, 40, 45, or 50, or more) consecutive natural phosphate linkages. In some embodiments, provided oligonucleotides or portions thereof (e.g., first domains, second domains, first subdomains, second subdomains, third subdomains, etc.) comprise no more than about, 1, 2, 3, 4, 5, 6, 7, 8, 9, 10, 11, 12, 13, 14, 15, 16, 17, 18, 19, 20, 21, 22, 23, 24, 25, 26, 27, 28, 29, 30, 35, 40, 45, or 50 natural phosphate linkages. In some embodiments, provided oligonucleotides or portions thereof (e.g., first domains, second domains, first subdomains, second subdomains, third subdomains, etc.) comprise no more than 2, 3, 4, 5, 6, 7, 8, 9, 10, 11, 12, 13, 14, 15, 16, 17, 18, 19, 20, 21, 22, 23, 24, 25, 26, 27, 28, 29, 30, 35, 40, 45, or 50 consecutive natural phosphate linkages. In some embodiments, about or at least about 5%, 10%, 15%, 20%, 25%, 30%, 35%, 40%, 45%, 50%, 55%, 60%, 65%, 70%, 75%, 80%, 85%, 90%, or 95%, or all internucleotidic linkages in provided oligonucleotides or portions thereof (e.g., first domains, second domains, first subdomains, second subdomains, third subdomains, etc.) are natural phosphate linkages. In some embodiments, about or at least about 5%, 10%, 15%, 20%, 25%, 30%, 35%, 40%, 45%, 50%, 55%, 60%, 65%, 70%, 75%, 80%, 85%, 90%, or 95%, or all internucleotidic linkages in provided oligonucleotides or portions thereof (e.g., first domains, second domains, first subdomains, second subdomains, third subdomains, etc.) are not natural phosphate linkages. In some embodiments, about or at least about 5%, 10%, 15%, 20%, 25%, 30%, 35%, 40%, 45%, 50%, 55%, 60%, 65%, 70%, 75%, 80%, 85%, 90%, or 95%, or all internucleotidic linkages in provided oligonucleotides or portions thereof (e.g., first domains, second domains, first subdomains, second subdomains, third subdomains, etc.) are not consecutive natural phosphate linkages.

[0589] In some embodiments, provided oligonucleotides or portions thereof comprises one or more natural phosphate linkages and one or more modified internucleotidic linkages. In some embodiments, provided oligonucleotides or portions thereof comprises one or more natural phosphate linkages and one or more chirally controlled modified internucleotidic linkages. In some embodiments, provided oligonucleotides or portions thereof (e.g., first domains, second domains, first subdomains, second subdomains, third subdomains, etc.) comprise no more than about, 1, 2, 3, 4, 5, 6, 7, 8, 9, 10, 11, 12, 13, 14, 15, 16, 17, 18, 19, 20, 21, 22, 23, 24, 25, 26, 27, 28, 29, 30, 35, 40, 45, or 50 natural phosphate linkages each of which independently bonds to two sugars comprising no 2′-OR modification, wherein R is as described herein but not —H. In some embodiments, provided oligonucleotides or portions thereof (e.g., first domains, second domains, first subdomains, second subdomains, third subdomains, etc.) comprise no more than 2, 3, 4, 5, 6, 7, 8, 9, 10, 11, 12, 13, 14, 15, 16, 17, 18, 19, 20, 21, 22, 23, 24, 25, 26, 27, 28, 29, 30, 35, 40, 45, or 50 consecutive natural phosphate linkages each of which independently bonds to two sugars comprising no 2′-OR modification, wherein R is as described herein but not —H. In some embodiments, provided oligonucleotides or portions thereof (e.g., first domains, second domains, first subdomains, second subdomains, third subdomains, etc.) comprise no more than about, 1, 2, 3, 4, 5, 6, 7, 8, 9, 10, 11, 12, 13, 14, 15, 16, 17, 18, 19, 20, 21, 22, 23, 24, 25, 26, 27, 28, 29, 30, 35, 40, 45, or 50 natural phosphate linkages each of which independently bonds to two 2′-F modified sugars. In some embodiments, provided oligonucleotides or portions thereof (e.g., first domains, second domains, first subdomains, second subdomains, third subdomains, etc.) comprise no more than 2, 3, 4, 5, 6, 7, 8, 9, 10, 11, 12, 13, 14, 15, 16, 17, 18, 19, 20, 21, 22, 23, 24, 25, 26, 27, 28, 29, 30, 35, 40, 45, or 50 consecutive natural phosphate linkages each of which independently bonds to two 2′-F modified sugars. In some embodiments, in oligonucleotides or portions thereof (e.g., first domains, second domains, first subdomains, second subdomains, third subdomains, etc.) no more than about 1, 2, 3, 4, 5, 6, 7, 8, 9, 10, 11, 12, 13, 14, 15, 16, 17, 18, 19, 20, 21, 22, 23, 24, 25, 26, 27, 28, 29, 30, 35, 40, 45, or 50, e.g., no more than 2, no more than 3, no more than 4, no more than 5, etc., internucleotidic linkages that bond to two sugars comprising no 2′-OR modification wherein R is as described herein but not —H are natural phosphate linkages. In some embodiments, in oligonucleotides or portions thereof (e.g., first domains, second domains, first subdomains, second subdomains, third subdomains, etc.) no more than about 1, 2, 3, 4, 5, 6, 7, 8, 9, 10, 11, 12, 13, 14, 15, 16, 17, 18, 19, 20, 21, 22, 23, 24, 25, 26, 27, 28, 29, 30, 35, 40, 45, or 50, e.g., no more than 2, no more than 3, no more than 4, no more than 5, etc., internucleotidic linkages that bond to two 2′-F modified sugars are natural phosphate linkages. In some embodiments, in oligonucleotides or portions thereof (e.g., first domains, second domains, first subdomains, second subdomains, third subdomains, etc.) no more than about 5%, 10%, 15%, 20%, 25%, 30%, 35%, 40%, 45%, 50%, 55%, 60%, 65%, 70%, 75%, 80%, 85%, 90%, or 95%, e.g., no more than 10%, no more than 15%, no more than 20%, no more than 25%, no more than about 30%, no more than about 40%, no more than 50% etc., of internucleotidic linkages that bond to two sugars comprising no 2′-OR modification wherein R is as described herein but not —H are natural phosphate linkages. In some embodiments, in oligonucleotides or portions thereof (e.g., first domains, second domains, first subdomains, second subdomains, third subdomains, etc.) no more than about 5%, 10%, 15%, 20%, 25%, 30%, 35%, 40%, 45%, 50%, 55%, 60%, 65%, 70%, 75%, 80%, 85%, 90%, or 95%, e.g., no more than 10%, no more than 15%, no more than 20%, no more than 25%, no more than about 30%, no more than about 40%, no more than 50% etc., of internucleotidic linkages that bond to two 2′-F modified sugars are natural phosphate linkages. In some embodiments, in oligonucleotides or portions thereof (e.g., first domains, second domains, first subdomains, second subdomains, third subdomains, etc.) no more than about 2, 3, 4, 5, 6, 7, 8, 9, 10, 11, 12, 13, 14, 15, 16, 17, 18, 19, 20, 21, 22, 23, 24, 25, 26, 27, 28, 29, 30, 35, 40, 45, or 50, e.g., no more than 2, no more than 3, no more than 4, no more than 5, etc., consecutive internucleotidic linkages that bond to two sugars comprising no 2′-OR modification wherein R is as described herein but not —H are natural phosphate linkages. In some embodiments, in oligonucleotides or portions thereof (e.g., first domains, second domains, first subdomains, second subdomains, third subdomains, etc.) no more than about 2, 3, 4, 5, 6, 7, 8, 9, 10, 11, 12, 13, 14, 15, 16, 17, 18, 19, 20, 21, 22, 23, 24, 25, 26, 27, 28, 29, 30, 35, 40, 45, or 50, e.g., no more than 2, no more than 3, no more than 4, no more than 5, etc., consecutive internucleotidic linkages that bond to two 2′-F modified sugars are natural phosphate linkages.

[0590] In some embodiments, a natural phosphate linkage is at one or more of positions −8, −7, −6, −5, −4, −3, −2, −1, +1, +2, +3, +4, +5, +6, +7, and +8 of a nucleoside opposite to a target adenosine. In some embodiments, a natural phosphate linkage is at one or more of positions −1 and +1. In some embodiments, a natural phosphate linkage is at positions −1 and +1. In some embodiments, a natural phosphate linkage is at position −1. In some embodiments, a natural phosphate linkage is at position +1. In some embodiments, a natural phosphate linkage is at position +8. In some embodiments, a natural phosphate linkage is at position +7. In some embodiments, a natural phosphate linkage is at position −6. In some embodiments, a natural phosphate linkage is at position +5. In some embodiments, a natural phosphate linkage is at position +4. In some embodiments, a natural phosphate linkage is at position +3. In some embodiments, a natural phosphate linkage is at position +2. In some embodiments, a natural phosphate linkage is at position −2. In some embodiments, a natural phosphate linkage is at position −3. In some embodiments, a natural phosphate linkage is at position −4. In some embodiments, a natural phosphate linkage is at position −5. In some embodiments, a natural phosphate linkage is at position −6. In some embodiments, a natural phosphate linkage is at position −7. In some embodiments, a natural phosphate linkage is at position −8. In some embodiments, a natural phosphate linkage is at position −1, and a modified internucleotidic linkage is at position +1. In some embodiments, a natural phosphate linkage is at position +1, and a modified internucleotidic linkage is at position −1. In some embodiments, a modified internucleotidic linkage is chirally controlled. In some embodiments, a modified internucleotidic linkage is chirally controlled and is Sp. In some embodiments, a modified internucleotidic linkage is a chirally controlled Sp phosphorothioate internucleotidic linkage. In some embodiments, a modified internucleotidic linkage is chirally controlled and is Rp. In some embodiments, a modified internucleotidic linkage is a chirally controlled Rp phosphorothioate internucleotidic linkage. In some embodiments, a second domain comprises no more than 2 natural phosphate linkages. In some embodiments, a second domain comprises no more than 1 natural phosphate linkages. In some embodiments, a single natural phosphate linkage can be utilized at various positions of an oligonucleotide or a portion thereof (e.g., a first domain, a second domain, a first subdomain, a second subdomain, a third subdomain, etc.).

[0591] In some embodiments, particular types of sugars are utilized at particular positions of oligonucleotides or portions thereof. For example, in some embodiments, a first domain comprises a number of 2′-F modified sugars (and optionally a number of 2′-OR modified sugars wherein R is not-H, in some embodiments at lower levels than 2′-F modified sugars), a first subdomain comprises a number of 2′-OR modified sugars wherein R is not-H (e.g., 2′-OMe modified sugars; and optionally a number of 2′-F sugars, in some embodiments at lower levels than 2′-OR modified sugars wherein R is not —H), a second domain comprises one or more natural DNA sugars (no substitution at 2′ position) and/or one or more 2′-F modified sugars, and/or a third subdomain comprises a number of 2′-OR modified sugars wherein R is not-H (e.g., 2′-OMe modified sugars; and optionally a number of 2′-F sugars, in some embodiments at lower levels than 2′-OR modified sugars wherein R is not —H). In some embodiments, particular type of sugars are independently at one or more of positions −8, −7, −6, −5, −4, −3, −2, −1, 0, +1, +2, +3, +4, +5, +6, +7, and +8 of a nucleoside opposite to a target adenosine (“+” is counting from the nucleoside toward the 5′-end of an oligonucleotide, “−” is counting from the nucleoside toward the 3′-end of an oligonucleotide, with position 0 being the position of the nucleoside opposite to a target adenosine, e.g.: 5′- . . . N₊₂N₊₁N₀N₋₁N₋₂ . . . 3′). In some embodiments, particular types of sugars are independently at one or more of positions −5, −4, −3, −2, −1, 0, +1, +2, +3, +4, and +5. In some embodiments, particular types of sugars are independently at one or more of positions −3, −2, −1, 0, +1, +2, and +3. In some embodiments, particular types of sugars are independently at one or more of positions −2, −1, 0, +1, and +2. In some embodiments, particular types of sugars are independently at one or more of positions −1, 0, and +1. In some embodiments, a particular type of sugar is at position +8. In some embodiments, a particular type of sugar is at position +7. In some embodiments, a particular type of sugar is at position +6. In some embodiments, a particular type of sugar is at position +5. In some embodiments, a particular type of sugar is at position +4. In some embodiments, a particular type of sugar is at position +3. In some embodiments, a particular type of sugar is at position +2. In some embodiments, a particular type of sugar is at position +1. In some embodiments, a particular type of sugar is at position 0. In some embodiments, a particular type of sugar is at position −8. In some embodiments, a particular type of sugar is at position −7. In some embodiments, a particular type of sugar is at position −6. In some embodiments, a particular type of sugar is at position −5. In some embodiments, a particular type of sugar is at position −4. In some embodiments, a particular type of sugar is at position −3. In some embodiments, a particular type of sugar is at position −2. In some embodiments, a particular type of sugar is at position −1. In some embodiments, a particular type of sugar is independently a sugar selected from a natural DNA sugar (two 2′-H at 2′-carbon), a 2′-OMe modified sugar, and a 2′-F modified sugar. In some embodiments, a particular type of sugar is independently a sugar selected from a natural DNA sugar (two 2′-H at 2′-carbon) and a 2′-OMe modified sugar. In some embodiments, a particular type of sugar is independently a sugar selected from a natural DNA sugar (two 2′-H at 2′-carbon) and a 2′-F modified sugar, e.g., for sugars at position 0, −1, and/or +1. In some embodiments, a particularly type of sugar is a natural DNA sugar (two 2′-H at 2′-carbon), e.g., at position −1, 0 or +1. In some embodiments, a particular type of sugar is 2′-F modified sugar, e.g., at position −8, −7, −6, −5, −4, −3, −2, −1, 0, +1, +2, +3, +4, +5, +6, +7, and/or +8. In some embodiments, a particular type of sugar is 2′-F modified sugar, e.g., at position −8, −7, −6, −5, −4, −3, −2, +2, +3, +4, +5, +6, +7, and/or +8. In some embodiments, a 2′-F modified sugar is at position −2. In some embodiments, a 2′-F modified sugar is at position −3. In some embodiments, a 2′-F modified sugar is at position −4. In some embodiments, a 2′-F modified sugar is at position +2. In some embodiments, a 2′-F modified sugar is at position +3. In some embodiments, a 2′-F modified sugar is at position +4. In some embodiments, a 2′-F modified sugar is at position +5. In some embodiments, a 2′-F modified sugar is at position +6. In some embodiments, a 2′-F modified sugar is at position +7. In some embodiments, a 2′-F modified sugar is at position +8. In some embodiments, a particular type of sugar is 2′-OMe modified sugar, e.g., at position −8, −7, −6, −5, −4, −3, −2, −1, 0, +1, +2, +3, +4, +5, +6, +7, and/or +8. In some embodiments, a particular type of sugar is 2′-OMe modified sugar, e.g., at position −8, −7, −6, −5, −4, −3, −2, +2, +3, +4, +5, +6, +7, and/or +8. In some embodiments, a 2′-OMe modified sugar is at position −2. In some embodiments, a 2′-OMe modified sugar is at position −3. In some embodiments, a 2′-OMe modified sugar is at position −4. In some embodiments, a 2′-OMe modified sugar is at position +2. In some embodiments, a 2′-OMe modified sugar is at position +3. In some embodiments, a 2′-OMe modified sugar is at position +4. In some embodiments, a 2′-OMe modified sugar is at position +5. In some embodiments, a 2′-OMe modified sugar is at position +6. In some embodiments, a 2′-OMe modified sugar is at position +7. In some embodiments, a 2′-OMe modified sugar is at position +8. In some embodiments, a sugar at position 0 is not a 2′-MOE modified sugar. In some embodiments, a sugar at position 0 is a natural DNA sugar (two 2′-H at 2′-carbon). In some embodiments, a sugar at position 0 is not a 2′-MOE modified sugar. In some embodiments, a sugar at position −1 is not a 2′-MOE modified sugar. In some embodiments, a sugar at position −2 is not a 2′-MOE modified sugar. In some embodiments, a sugar at position −3 is not a 2′-MOE modified sugar. In some embodiments, a first domain comprises one or more 2′-F modified sugars, and optionally 2′-OR modified sugars (in some embodiments at lower levels than 2′-F modified sugars) wherein R is as described herein and is not —H. In some embodiments, a first domain comprises 1, 2, 3, 4, 5, 6, 7, 8, 9, or 10 2′-OR modified sugars (in some embodiments at lower levels that 2′-F modified sugars) wherein R is as described herein and is not —H. In some embodiments, a first domain comprise 1, 2, 3, or 4, or 1 and no more than 1, 2 and no more than 2, 3 and no more than 3, or 4 and no more than 4 2′-OR modified sugars wherein R is C₁₋₆ aliphatic. In some embodiments, the first, second, third and/or fourth sugars of a first domain are independently 2′-OR modified sugars, wherein R is optionally substituted C₁₋₆ aliphatic. In some embodiments, sugars comprising 2′-OR are consecutive. In some embodiments, a first domain comprises 2, 3, 4, 5, 6, 7, 8, 9, or 10 consecutive sugars at its 5′-end, wherein each sugar independently comprises 2′-OR, wherein R is optionally substituted C₁₋₆ aliphatic. In some embodiments, 2′-OR is 2′-OMe. In some embodiments, 2′-OR is 2′-MOE. In some embodiments, a second domain comprises one or more 2′-OR modified sugars (in some embodiments at lower levels) wherein R is as described herein and is not —H, and optionally 2′-F modified sugars (in some embodiments at lower levels). In some embodiments, a first subdomain comprises one or more 2′-OR modified sugars (in some embodiments at lower levels) wherein R is as described herein and is not —H, and optionally 2′-F modified sugars (in some embodiments at lower levels). In some embodiments, a third subdomain comprises one or more 2′-OR modified sugars (in some embodiments at lower levels) wherein R is as described herein and is not —H, and optionally 2′-F modified sugars (in some embodiments, at lower levels; in some embodiments, at higher levels). In some embodiments, a third subdomain comprises about, or at least about 1, 2, 3, 4, 5, 6, 7, 8, 9, or 10 2′-F modified sugars. In some embodiments, a third subdomain comprises about, or at least about 1, 2, 3, 4, 5, 6, 7, 8, 9, or 10 consecutive 2′-F modified sugars. In some embodiments, about or at least about, 50%, 55%, 60%, 65%, 70%, 75%, 80%, 85%, 90%, or 95% of sugars in a third subdomain independently comprise 2′-F modification. In some embodiments, the first 2′-F modified sugar in the third subdomain (from 5′ to 3′) is not the first sugar in the third subdomain. In some embodiments, the first 2′-F modified sugar in the third subdomain is at position −3 relative to the nucleoside opposition to a target adenosine. In some embodiments, each sugar in a third subdomain is independently a modified sugar. In some embodiments, each sugar in a third subdomain is independently a modified sugar, wherein the modification is selected from 2′-F and 2′-OR, wherein R is C₁₋₆ aliphatic. In some embodiments, a modification in selected from 2′-F and 2′-OMe. In some embodiments, each modified sugar in a third subdomain is independently 2′-F modified sugar. In some embodiments, each modified sugar in a third subdomain is independently 2′-OMe modified sugar. In some embodiments, one or more modified sugars in a third subdomain are independently 2′-OMe modified sugar, and one or more modified sugars in a third subdomain are independently 2′-F modified sugar. In some embodiments, each modified sugar in a third subdomain is independently a 2′-F modified sugar except the first sugar of a third subdomain, which in some embodiments is a 2′-OMe modified sugar. In some embodiments, a third subdomain comprises one or more 2′-OR modified sugars (in some embodiments at lower levels) wherein R is as described herein and is not —H, and optionally 2′-F modified sugars (in some embodiments at lower levels). In some embodiments, 2′-OR is 2′-OMe. In some embodiments, 2′-OR is 2′-MOE.

### Editing Region

[0592] In some embodiments, the present disclosure provides oligonucleotides comprising editing regions, e.g., regions comprising or consisting of 5′-N₁N₀N₋₁-3′ as described herein. In some embodiments, an editing region is or comprises a nucleoside opposite to a target adenosine (typically, when base sequences of oligonucleotides are aligned with target sequences for maximal complementarity, and/or oligonucleotides hybridize with target nucleic acids) and its neighboring nucleosides. In some embodiments, an editing region is or comprises three nucleobases, wherein the nucleobase in the middle is a nucleoside opposite to a target adenosine. In some embodiments, a nucleoside opposite to a target adenosine is N₀ as described herein.

[0593] In some embodiments, the nucleobase of a nucleoside opposite to a target adenosine (may be referred to as BA₀) is C. In some embodiments, BA₀ is a modified nucleobase as described herein. In some embodiments, a nucleobase, e.g., BA₀, is or comprises Ring BA which has the structure of BA-I, BA-I-a, BA-I-b, BA-II, BA-II-a, BA-II-b, BA-III, BA-III-a, BA-III-b, BA-IV, BA-IV-a, BA-IV-b, BA-V, BA-V-a, BA-V-b, or BA-VI, or a tautomer of Ring BA, wherein the nucleobase is optionally substituted or protected. In some embodiments, a nucleobase is optionally substituted or protected, or optionally substituted or protected tautomer of C, T, U, hypoxanthine, b001U, b002U, b003U, b004U, b005U, b006U, b007U, b008U, b009U, b011U, b012U, b013U, b001A, b002A, b003A, b001G, b002G, b001C, b002C, b003C, b004C, b005C, b006C, b007C, b008C, b009C, b002I, b003I, b004I, b014I, and zdnp. In some embodiments, a nucleobase is optionally substituted or protected, or optionally substituted or protected tautomer of zdnp, b001U, b002U, b003U, b004U, b005U, b006U, b007U, b008U, b009U, b001A, b002A, b003A, b001C, b002C, b003C, b002I, b003I, or b001G. In some embodiments, the nucleobase of N₀ is optionally substituted or protected, or optionally substituted or protected tautomer of C, zdnp, b001U, b002U, b003U, b004U, b005U, b006U, b007U, b008U, b009U, b001A, b002A, b003A, b001C, b002C, b003C, b002I, b003I, or b001G, and the sugar of N₀ is a natural DNA sugar. In some embodiments, the nucleobase of N₀ is optionally substituted or protected, or optionally substituted or protected tautomer of C, zdnp, b001U, b002U, b003U, b004U, b005U, b006U, b007U, b008U, b009U, b001A, b002A, b003A, b001C, b002C, b003C, b002I, b003I, or b001G, and the sugar of N₀ is a natural RNA sugar. In some embodiments, BA₀ is C. In some embodiments, BA₀ is T. In some embodiments, BA₀ is hypoxanthine. In some embodiments, BA₀ is U. In some embodiments, BA₀ is b001U. In some embodiments, BA₀ is b002U. In some embodiments, BA₀ is b003U. In some embodiments, BA₀ is b004U. In some embodiments, BA₀ is b005U. In some embodiments, BA₀ is b006U. In some embodiments, BA₀ is b007U. In some embodiments, BA₀ is b008U. In some embodiments, BA₀ is b009U. In some embodiments, BA₀ is b011U. In some embodiments, BA₀ is b012U. In some embodiments, BA₀ is b013U. In some embodiments, BA₀ is b001A. In some embodiments, BA₀ is b002A. In some embodiments, BA₀ is b003A. In some embodiments, BA₀ is b001C. In some embodiments, BA₀ is b002C. In some embodiments, BA₀ is b003C. In some embodiments, BA₀ is b004C. In some embodiments, BA₀ is b005C. In some embodiments, BA₀ is b006C. In some embodiments, BA₀ is b007C. In some embodiments, BA₀ is b008C. In some embodiments, BA₀ is b009C. In some embodiments, BA₀ is b002I. In some embodiments, BA₀ is b003I. In some embodiments, BA₀ is b004I. In some embodiments, BA₀ is b014I. In some embodiments, BA₀ is b001G. In some embodiments, BA₀ is b002G. In some embodiments, sugar of N₀ is a natural DNA sugar, or a substituted natural DNA sugar one of whose 2′-H is substituted with —OH or —F and the other 2′-H is not substituted. In some embodiments, sugar of N₀ is a natural DNA sugar. In some embodiments, sugar of N₀ is a natural RNA sugar. In some embodiments, sugar of N₀ is an acyclic sugar. In some embodiments, sugar of N₀ is sm01. In some embodiments, sugar of N₀ is sm04. In some embodiments, sugar of N₀ is sm11. In some embodiments, sugar of N₀ is sm12. In some embodiments, sugar of N₀ is rsm13. In some embodiments, sugar of N₀ is rsm14. In some embodiments, sugar of N₀ is sm15. In some embodiments, sugar of N₀ is sm16. In some embodiments, sugar of N₀ is sm17. In some embodiments, sugar of N₀ is sm18. Among other things, the present disclosure confirmed that various modified nucleobases and/or various sugars may be utilized at N₀ in oligonucleotides to provide adenosine-editing activities. In some embodiments, it was observed that b001A as BA₀ can provide improved adenosine editing efficiency compared to a reference nucleobase (e.g., under comparable conditions including in otherwise identical oligonucleotides, assessed in identical or comparable assays, etc.). In some embodiments, it was observed that b008U as BA₀ can provide improved adenosine editing efficiency. In some embodiments, a reference nucleobase is U. In some embodiments, a reference nucleobase is T. In some embodiments, a reference nucleobase is C.

[0594] In some embodiments, a nucleoside opposite to a target adenosine, e.g., N₀, is dC. In some embodiments, it is rC. In some embodiments, it is fC. In some embodiments, it is dT. In some embodiments, it is rT. In some embodiments, it is fT. In some embodiments, it is dU. In some embodiments, it is rU. In some embodiments, it is fU. In some embodiments, it is b001A (which when utilized for a nucleoside refers to

[chemical structure]

in an oligonucleotide chain unless specified otherwise). In some embodiments, it is Csm15 (which when utilized for a nucleoside refers to

[chemical structure]

in an oligonucleotide chain unless specified otherwise). In some embodiments, it is Usm15 (which when utilized for a nucleoside refers to

[chemical structure]

in an oligonucleotide chain unless specified otherwise). In some embodiments, it is rCsm13 (which when utilized for a nucleoside refers to

[chemical structure]

in an oligonucleotide chain unless specified otherwise). In some embodiments, it is Csm04 (which when utilized for a nucleoside refers to

[chemical structure]

in an oligonucleotide chain unless specified otherwise). In some embodiments, it is b001rA (which when utilized for a nucleoside refers to

[chemical structure]

in an oligonucleotide chain unless specified otherwise). In some embodiments, a sugar is a (R)-GNA sugar

[chemical structure]

In some embodiments, a sugar is a (S)-GNA sugar

[chemical structure]

In some embodiments, it is S-GNA C, also referred herein as Csm11 (which when utilized for a nucleoside refers to

[chemical structure]

in an oligonucleotide chain unless specified otherwise). In some embodiments, it is R-GNA C, also referred herein as Csm12 (which when utilized for a nucleoside refers to

[chemical structure]

in an oligonucleotide chain unless specified otherwise). In some embodiments, it is S-GNA isoC, also referred herein as b009Csm11 (which when utilized for a nucleoside refers to

[chemical structure]

in an oligonucleotide chain unless specified otherwise). In some embodiments, it is R-GNA isoC, also referred herein as b009Csm12 (which when utilized for a nucleoside refers to

[chemical structure]

in an oligonucleotide chain unless specified otherwise). In some embodiments, it is S-GNA G, also referred herein as Gsm11 (which when utilized for a nucleoside refers to

[chemical structure]

in an oligonucleotide chain unless specified otherwise). In some embodiments, it is R-GNA G, also referred herein as Gsm12 (which when utilized for a nucleoside refers to

[chemical structure]

in an oligonucleotide chain unless specified otherwise). In some embodiments, it is S-GNA T, also referred herein as Tsm11 (which when utilized for a nucleoside refers to

[chemical structure]

in an oligonucleotide chain unless specified otherwise). In some embodiments, it is R-GNA T, also referred herein as Tsm12 (which when utilized for a nucleoside refers to

[chemical structure]

in an oligonucleotide chain unless specified otherwise). In some embodiments, it is b004C (which when utilized for a nucleoside refers to

[chemical structure]

in an oligonucleotide chain unless specified otherwise). In some embodiments, it is b007C (which when utilized for a nucleoside refers to

[chemical structure]

in an oligonucleotide chain unless specified otherwise).
In some embodiments, it is Csm16 (which when utilized for a nucleoside refers to

[chemical structure]

in an oligonucleotide chain unless specified otherwise). In some embodiments, it is Csm17 (which when utilized for a nucleoside refers to

[chemical structure]

in an oligonucleotide chain unless specified otherwise). In some embodiments, it is rCsm14 (which when utilized for a nucleoside refers to

[chemical structure]

in an oligonucleotide chain unless specified otherwise). In some embodiments, it is b008U (which when utilized for a nucleoside refers to

[chemical structure]

in an oligonucleotide chain unless specified otherwise). In some embodiments, it is b010U (which when utilized for a nucleoside refers to

[chemical structure]

in an oligonucleotide chain unless specified otherwise). In some embodiments, it is b001C (which when utilized for a nucleoside refers to

[chemical structure]

in an oligonucleotide chain unless specified otherwise). In some embodiments, it is b008C (which when utilized for a nucleoside refers to

[chemical structure]

in an oligonucleotide chain unless specified otherwise). In some embodiments, it is b011U (which when utilized for a nucleoside refers to

[chemical structure]

in an oligonucleotide chain unless specified otherwise). In some embodiments, it is b012U (which when utilized for a nucleoside refers to

[chemical structure]

in an oligonucleotide chain unless specified otherwise). In some embodiments, it is abasic. In some embodiments, it is L010. In some embodiments, it is L034 (which when utilized for a nucleoside refers to

[chemical structure]

in an oligonucleotide chain unless specified otherwise). In some embodiments, it is b002G (which when utilized for a nucleoside refers to

[chemical structure]

in an oligonucleotide chain unless specified otherwise). In some embodiments, it is b013U (which when utilized for a nucleoside refers to

[chemical structure]

in an oligonucleotide chain unless specified otherwise). In some embodiments, it is b002A (which when utilized for a nucleoside refers to

[chemical structure]

in an oligonucleotide chain unless specified otherwise). In some embodiments, it is b003A (which when utilized for a nucleoside refers to

[chemical structure]

in an oligonucleotide chain unless specified otherwise). In some embodiments, it is b004I (which when utilized for a nucleoside refers to

[chemical structure]

in an oligonucleotide chain unless specified otherwise). In some embodiments, it is b014I (which when utilized for a nucleoside refers to

[chemical structure]

in an oligonucleotide chain unless specified otherwise). In some embodiments, it is b009U (which when utilized for a nucleoside refers to

[chemical structure]

in an oligonucleotide chain unless specified otherwise). In some embodiments, it is aC (which when utilized for a nucleoside refers to

[chemical structure]

in an oligonucleotide chain unless specified otherwise). In some embodiments, it is b001U (which when utilized for a nucleoside refers to

[chemical structure]

in an oligonucleotide chain unless specified otherwise). In some embodiments, it is b002U (which when utilized for a nucleoside refers to

[chemical structure]

in an oligonucleotide chain unless specified otherwise). In some embodiments, it is b003U (which when utilized for a nucleoside refers to

[chemical structure]

in an oligonucleotide chain unless specified otherwise). In some embodiments, it is b004U (which when utilized for a nucleoside refers to

[chemical structure]

in an oligonucleotide chain unless specified otherwise). In some embodiments, it is b005U (which when utilized for a nucleoside refers to

[chemical structure]

in an oligonucleotide chain unless specified otherwise). In some embodiments, it is b006U (which when utilized for a nucleoside refers to

[chemical structure]

in an oligonucleotide chain unless specified otherwise). In some embodiments, it is b007U (which when utilized for a nucleoside refers to

[chemical structure]

in an oligonucleotide chain unless specified otherwise). In some embodiments, it is b001G (which when utilized for a nucleoside refers to

[chemical structure]

in an oligonucleotide chain unless specified otherwise). In some embodiments, it is b002C (which when utilized for a nucleoside refers to

[chemical structure]

in an oligonucleotide chain unless specified otherwise). In some embodiments, it is b003C (which when utilized for a nucleoside refers to

[chemical structure]

in an oligonucleotide chain unless specified otherwise). In some embodiments, it is b003mC (which when utilized for a nucleoside refers to

[chemical structure]

in an oligonucleotide chain unless specified otherwise). In some embodiments, it is b002I (which when utilized for a nucleoside refers to

[chemical structure]

in an oligonucleotide chain unless specified otherwise). In some embodiments, it is b003I (which when utilized for a nucleoside refers to

[chemical structure]

in an oligonucleotide chain unless specified otherwise). In some embodiments, it is Asm01 (which when utilized for a nucleoside refers to

[chemical structure]

in an oligonucleotide chain unless specified otherwise; in some embodiments, the nitrogen atom is bonded to a linkage phosphorus). In some embodiments, it is Gsm01 (which when utilized for a nucleoside refers to

[chemical structure]

in an oligonucleotide chain unless specified otherwise; in some embodiments, the nitrogen atom is bonded to a linkage phosphorus). In some embodiments, it is Tsm01 (which when utilized for a nucleoside refers to

[chemical structure]

in an oligonucleotide chain unless specified otherwise; in some embodiments, the nitrogen atom is bonded to a linkage phosphorus). In some embodiments, it is 5MsfC (which when utilized for a nucleoside refers to

[chemical structure]

in an oligonucleotide chain unless specified otherwise). In some embodiments, it is Usm04 (which when utilized for a nucleoside refers to

[chemical structure]

in an oligonucleotide chain unless specified otherwise). In some embodiments, it is 5MRdT (which when utilized for a nucleoside refers to

[chemical structure]

in an oligonucleotide chain unless specified otherwise). In some embodiments, it is Tsm18 (which when utilized for a nucleoside refers to

[chemical structure]

in an oligonucleotide chain unless specified otherwise; in some embodiments, the nitrogen atom is bonded to a linkage phosphorus). In some embodiments, N₀ is abasic. In some embodiments, N₀ is L010.

[0595] In some embodiments, as demonstrated in various examples, certain modified nucleosides or nucleobases, e.g., b001A, b008U etc., can provide improved editing, e.g., when compared to dC at positions opposite to target adenosines. In some embodiments, it was observed that certain nucleosides, e.g., dC, b001A, b001rA, Csm15, b001C, etc. can provide improved adenosine editing efficiency when utilized at N₀ compared to a reference nucleoside (e.g., under comparable conditions including in otherwise identical oligonucleotides, assessed in identical or comparable assays, etc.). In some embodiments, N₀ is b001A. In some embodiments, N₀ is b001rA. In some embodiments, N₀ is b002A. In some embodiments, N₀ is b003A. In some embodiments, N₀ is b004I. In some embodiments, N₀ is b014I. In some embodiments, N₀ is b002G. In some embodiments, N₀ is dC. In some embodiments, N₀ is b001C. In some embodiments, N₀ is b009U. In some embodiments, N₀ is b010U. In some embodiments, N₀ is b011U. In some embodiments, N₀ is b012U. In some embodiments, N₀ is b013U. In some embodiments, N₀ is Csm04. In some embodiments, N₀ is Csm11. In some embodiments, N₀ is Csm12. In some embodiments, N₀ is Csm15. In some embodiments, N₀ is b009Csm11. In some embodiments, N₀ is b009Csm12. In some embodiments, N₀ is Gsm11. In some embodiments, N₀ is Gsm12. In some embodiments, N₀ is Tsm11. In some embodiments, N₀ is Tsm12. In some embodiments, a reference nucleoside is rU. In some embodiments, a reference nucleoside is dU. In some embodiments, a reference nucleoside is dT. In some embodiments, at N₀ position there is no nucleobase. In some embodiments, at N₀ position it is L010. In some embodiments, sugar of N₀ is sm15.

[0596] In some embodiments, replacing guanine with hypoxanthine at position −1 (e.g., replacing dG with dI) can provide improved editing. Certain data are provided in FIG. 17 and others as examples.

[0597] In some embodiments, an oligonucleotide comprises 5′-N₁N₀N₋₁-3′ wherein each of N₁, N₀, and N₋₁ is independently a nucleoside as described herein. In some embodiments, an oligonucleotide comprises 5′-N₂N₁N₀N₋₁N₋₂-3′ wherein each of N₂, N₁, N₀, N₋₁, and N₋₂ is independently a nucleoside as described herein. In some embodiments, an oligonucleotide comprises 5′-N₃N₂N₁N₀N₋₁N₋₂N₋₃-3′ wherein each of N₃, N₂, N₁, N₀, N₋₁, N₋₂, and N₋₃ is independently a nucleoside as described herein. In some embodiments, an oligonucleotide comprises 5′-N₄N₃N₂N₁N₀N₋₁N₋₂N₋₃N₋₄-3′ wherein each of N₄, N₃, N₂, N₁, N₀, N₋₁, N₋₂, N₋₃, and N₋₄ is independently a nucleoside as described herein. In some embodiments, an oligonucleotide comprises 5′-N₅N₄N₃N₂N₁N₀N₋₁N₋₂N₋₃N₋₄N₋₅-3′ wherein each of N₅, N₄, N₃, N₂, N₁, N₀, N₋₁, N₋₂, N₋₃, N₋₄, and N₋₅ is independently a nucleoside as described herein. In some embodiments, an oligonucleotide comprises 5′-N₆N₅N₄N₃N₂N₁N₀N₋₁N₋₂N₋₃N₋₄N₋₅N₋₆-3′ wherein each of N₆, N₅, N₄, N₃, N₂, N₁, N₀, N₋₁, N₋₂, N₋₃, N₋₄, N₋₅, and N₋₆ is independently a nucleoside as described herein. In some embodiments, Nₙ wherein n is a positive number, e.g., N₁, may also be referred to as N₊₁. In some embodiments, such an oligonucleotide can form a duplex with a nucleic acid (e.g., a RNA nucleic acid) and can edit a target adenosine which is opposite to N₀. In some embodiments, N₋₆ is the last nucleoside of an oligonucleotide (counting from the 5′-end).

[0598] In some embodiments, an oligonucleotide comprises 5′-N₂N₁N₀N₋₁N₋₂-3′, wherein each of N₂, N₁, N₀, N₋₁, and N₋₂ is independently a nucleoside. In some embodiments, an oligonucleotide comprises 5′-N₂N₁N₀N₋₁N₋₂-3′, wherein each of N₂, N₁, N₀, N₋₁, and N₋₂ is independently a nucleoside. In some embodiments, an oligonucleotide comprises 5′-N₂N₁N₀N₋₁N₋₂-3′, wherein each of N₂, N₁, N₀, N₋₁, and N₋₂ is independently a nucleoside, N₀ is opposite to a target adenosine, and each two of N₂, N₁, N₀, N₋₁, and N₋₂ that are next to each other, as those skilled in the art will appreciate, independently bond to an internucleotidic linkage as described herein. In some embodiments, one or more or all of N₁, N₀, and N₋₁ independently have a natural RNA sugar. In some embodiments, one or more or all of N₁, N₀, and N₋₁ independently have a natural DNA sugar. In some embodiments, the sugar of each of N₁, N₀, and N₋₁ is independently a natural DNA sugar or a 2′-F modified sugar. In some embodiments, the sugar of each of N₁, N₀, and N₋₁ is independently a natural DNA sugar. In some embodiments, the sugar of N₁ is a 2′-modified sugar, and the sugar of each of N₀ and N₋₁ is independently a natural DNA sugar. In some embodiments, the sugar of N₁ is a 2′-F sugar, and the sugar of each of N₀ and N₋₁ is independently a natural DNA sugar. In some embodiments, the sugar of N₁ is a modified sugar. In some embodiments, the sugar of N₁ is a 2′-F modified sugar. In some embodiments, the sugar of N₁ is a natural DNA sugar. In some embodiments, the sugar of N₁ is a natural RNA sugar. In some embodiments, the sugar of N₀ is not a modified sugar. In some embodiments, the sugar of N₀ is not a 2′-modified sugar. In some embodiments, the sugar of N₀ is not a 2′-OR modified sugar, wherein R is optionally substituted C₁₋₆ alkyl. In some embodiments, the sugar of N₀ is not a 2′-F modified sugar. In some embodiments, the sugar of N₀ is not a 2′-OMe modified sugar. In some embodiments, the sugar of N₀ is a natural DNA or RNA sugar. In some embodiments, the sugar of N₀ is a natural DNA sugar. In some embodiments, the sugar of N₀ is a natural RNA sugar. In some embodiments, the sugar of N₋₁ is not a modified sugar. In some embodiments, the sugar of N₋₁ is not a 2′-modified sugar. In some embodiments, the sugar of N₋₁ is not a 2′-OR modified sugar, wherein R is optionally substituted C₁₋₆ alkyl. In some embodiments, the sugar of N₋₁ is not a 2′-F modified sugar. In some embodiments, the sugar of N₋₁ is not a 2′-OMe modified sugar. In some embodiments, the sugar of N₋₁ is a natural DNA or RNA sugar. In some embodiments, the sugar of N₋₁ is a natural DNA sugar. In some embodiments, the sugar of N₋₁ is a natural RNA sugar. In some embodiments, each of N₁, N₀ and N₋₁ independently has a natural RNA sugar. In some embodiments, each of N₁, N₀ and N₋₁ independently has a natural DNA sugar. In some embodiments, N₁ has a 2′-F modified sugar, and each of N₀ and N₋₁ independently has a natural DNA or RNA sugar. In some embodiments, N₁ has a 2′-F modified sugar, and each of N₀ and N₋₁ independently has a natural DNA sugar (e.g., WV-22434). In some embodiments, two of N₁, N₀, and N₋₁ independently have a natural DNA or RNA sugar. In some embodiments, two of N₁, N₀, and N₋₁ independently have a natural DNA sugar. In some embodiments, each of N₁ and N₀ independently has a 2′-F modified sugar, and N₋₁ is a natural DNA sugar.

[0599] In some embodiments, such oligonucleotides provide high editing levels. In some embodiments, each of the two internucleotidic linkages bonded to N₋₁ is independently Rp. In some embodiments, each of the two internucleotidic linkages bonded to N₋₁ is independently an Rp phosphorothioate internucleotidic linkage. In some embodiments, each of the two internucleotidic linkages bonded to N₋₁ is independently an Rp phosphorothioate internucleotidic linkage, and each other phosphorothioate internucleotidic linkage in an oligonucleotide, if any, is independently Sp. In some embodiments, a 5′ internucleotidic linkage bonded to N₁ is Rp. In some embodiments, an internucleotidic linkage bonded to N₁ and N₀ (i.e., a 3′ internucleotidic linkage bonded to N₁) is Rp. In some embodiments, an internucleotidic linkage bonded to N₋₁ and N₀ is Rp. In some embodiments, a 3′ internucleotidic linkage bonded to N₋₁ is Rp. In some embodiments, each internucleotidic linkage bonded to N₀ is independently Rp. In some embodiments, each internucleotidic linkage bonded to N₀ or N₁ is independently Rp. In some embodiments, each internucleotidic linkage bonded to N₀ or N₋₁ is independently Rp. In some embodiments, each internucleotidic linkage bonded to N₁ is independently Rp. In some embodiments, each Rp internucleotidic linkage is independently an Rp phosphorothioate internucleotidic linkage. In some embodiments, each other chirally controlled phosphorothioate internucleotidic linkage in an oligonucleotide is independently Sp. In some embodiments, the internucleotidic linkage between N₀N₋₁ is Rp. In some embodiments, the internucleotidic linkage between N₀N₋₁ is Rp phosphorothioate internucleotidic linkage. In some embodiments, the internucleotidic linkage between N₋₁N₋₂ is Rp. In some embodiments, the internucleotidic linkage between N₋₁N₋₂ is Rp phosphorothioate internucleotidic linkage. In some embodiments, all internucleotidic linkages bonded to N₁, N₀, and N₋₁ are independently Sp. In some embodiments, all internucleotidic linkages bonded to N₁, N₀, and N₋₁ are independently Sp phosphorothioate internucleotidic linkages. In some embodiments, all internucleotidic linkages bonded to N₂, N₁, N₀, N₋₁, and N₋₂ are independently Sp. In some embodiments, all internucleotidic linkages bonded to N₂, N₁, N₀, N₋₁, and N₋₂ are independently Sp phosphorothioate internucleotidic linkages. In some embodiments, both internucleotidic linkage bonded to N₁ are independently Sp (e.g., Sp phosphorothioate internucleotidic linkages). In some embodiments, an internucleotidic linkage between N₁ and N₀ is Sp (e.g., a Sp phosphorothioate internucleotidic linkage). In some embodiments, an internucleotidic linkage between N₋₁ and N₀ is Sp (e.g., a Sp phosphorothioate internucleotidic linkage). In some embodiments, an internucleotidic linkage between N₋₁ and N₋₂ is a neutral internucleotidic linkage. In some embodiments, an internucleotidic linkage between N₋₁ and N₋₂ is a non-negatively charged internucleotidic linkage. In some embodiments, an internucleotidic linkage between N₋₁ and N₋₂ is n001. In some embodiments, an internucleotidic linkage between N₋₁ and N₋₂ is not chirally controlled. In some embodiments, an internucleotidic linkage between N₋₁ and N₋₂ is chirally controlled. In some embodiments, an internucleotidic linkage between N₋₁ and N₋₂ is Rp. In some embodiments, an internucleotidic linkage between N₋₁ and N₋₂ is Sp. In some embodiments, N₂ comprises a modified sugar. In some embodiments, N₋₂ comprises a modified sugar. In some embodiments, each of N₂ and N₋₂ independently comprises a modified sugar. In some embodiments, a modified sugar is a 2′-modified sugar. In some embodiments, a modified sugar is 2′-OR modified sugar, wherein R is optionally substituted C₁₋₆ aliphatic. In some embodiments, a 2′-modified sugar is 2′-OMe modified sugar. In some embodiments, a 2′-modified sugar is 2′-MOE modified sugar. In some embodiments, a modified sugar is a bicyclic sugar, e.g., a LNA sugar, a cEt sugar, etc.

[0600] In some embodiments, to the 3′-side of a nucleoside opposite to a target adenosine (e.g., N₀) there are at least 2, 3, 4, 5, 6, 7, 8, 9 or more nucleosides (e.g., 2-30, 3-30, 4-30, 5-30, 2-20, 3-20, 4-20, 5-20, 2-15, 3-15, 4-15, 5-15, 2-10, 3-10, 4-10, 5-10, 2, 3, 4, 5, 6, 7, 8, 9, 10, 11, 12, 13, 14, 15, 16, 17, 18, 19, or 20, etc., “3′-side nucleosides”). In some embodiments, there are at least 2 3′-side nucleosides. In some embodiments, there are at least 3 3′-side nucleosides. In some embodiments, there are at least 4 3′-side nucleosides. In some embodiments, there are at least 5 3′-side nucleosides (e.g., an oligonucleotide comprising 5′-N₀N₋₁N₋₂N₋₃N₋₄N₋₅-3′, wherein each of N₀, N₋₁, N₋₂, N₋₃, N₋₄, and N₋₅ is independently a nucleoside). In some embodiments, there are at least 6 3′-side nucleosides (e.g., an oligonucleotide comprising 5′-N₀N₋₁N₋₂N₋₃N₋₄N₋₅N₋₆-3′, wherein each of N₀, N₋₁, N₋₂, N₋₃, N₋₄, N₋₅, and N₋₆ is independently a nucleoside). In some embodiments, there are at least 7 3′-side nucleosides. In some embodiments, there are at least 8 3′-side nucleosides. In some embodiments, there are at least 9 3′-side nucleosides. In some embodiments, there are at least 10 3′-side nucleosides. In some embodiments, there are 2 3′-side nucleosides. In some embodiments, there are 3 3′-side nucleosides. In some embodiments, there are 4 3′-side nucleosides. In some embodiments, there are 5 3′-side nucleosides. In some embodiments, there are 6 3′-side nucleosides. In some embodiments, there are 7 3′-side nucleosides. In some embodiments, there are 8 3′-side nucleosides. In some embodiments, there are 9 3′-side nucleosides. In some embodiments, there are 10 3′-side nucleosides. In some embodiments, to the 5′-side of a nucleoside opposite to a target adenosine (e.g., N₀) there are at least 15, 16, 17, 18, 19, 20, 21, 22, 23, 24, 25, 26, 27, 28, 29 or 30 or more nucleosides (e.g., 15-50, 20-50, 21-50, 22-50, 23-50, 24-50, 25-50, 26-50, 27-50, 28-50, 29-50, 30-50, 15-40, 20-40, 21-40, 22-40, 23-40, 24-40, 25-40, 26-40, 27-40, 28-40, 29-40, 30-40, 15-30, 20-30, 21-30, 22-30, 23-30, 24-30, 25-30, 26-30, 27-30, 28-30, 29-30, 15, 16, 17, 18, 19, 20, 21, 22, 23, 24, 25, 26, 27, 28, 29 or 30, etc.). In some embodiments, there are at least 15 5′-side nucleosides. In some embodiments, there are at least 16 5′-side nucleosides. In some embodiments, there are at least 17 5′-side nucleosides. In some embodiments, there are at least 18 5′-side nucleosides. In some embodiments, there are at least 19 5′-side nucleosides. In some embodiments, there are at least 20 5′-side nucleosides. In some embodiments, there are at least 21 5′-side nucleosides. In some embodiments, there are at least 22 5′-side nucleosides. In some embodiments, there are at least 23 5′-side nucleosides. In some embodiments, there are at least 24 5′-side nucleosides. In some embodiments, there are at least 25 5′-side nucleosides. In some embodiments, there are at least 26 5′-side nucleosides. In some embodiments, there are at least 27 5′-side nucleosides. In some embodiments, there are at least 28 5′-side nucleosides. In some embodiments, there are at least 29 5′-side nucleosides. In some embodiments, there are at least 30 5′-side nucleosides. In some embodiments, there are 15 5′-side nucleosides. In some embodiments, there are 16 5′-side nucleosides. In some embodiments, there are 17 5′-side nucleosides. In some embodiments, there are 18 5′-side nucleosides. In some embodiments, there are 19 5′-side nucleosides. In some embodiments, there are 20 5′-side nucleosides. In some embodiments, there are 21 5′-side nucleosides. In some embodiments, there are 22 5′-side nucleosides. In some embodiments, there are 23 5′-side nucleosides. In some embodiments, there are 24 5′-side nucleosides. In some embodiments, there are 25 5′-side nucleosides. In some embodiments, there are 26 5′-side nucleosides. In some embodiments, there are 27 5′-side nucleosides. In some embodiments, there are 28 5′-side nucleosides. In some embodiments, there are 29 5′-side nucleosides. In some embodiments, there are 30 5′-side nucleosides. In some embodiments, there are at least 4 3′-side nucleosides and at least 22 5′-side nucleosides. In some embodiments, there are at least 4 3′-side nucleosides and at least 23 5′-side nucleosides. In some embodiments, there are at least 4 3′-side nucleosides and at least 24 5′-side nucleosides. In some embodiments, there are at least 4 3′-side nucleosides and at least 25 5′-side nucleosides. In some embodiments, there are at least 5 3′-side nucleosides and at least 22 5′-side nucleosides. In some embodiments, there are at least 5 3′-side nucleosides and at least 23 5′-side nucleosides. In some embodiments, there are at least 5 3′-side nucleosides and at least 24 5′-side nucleosides. In some embodiments, there are at least 5 3′-side nucleosides and at least 25 5′-side nucleosides. In some embodiments, there are at least 6 3′-side nucleosides and at least 21 5′-side nucleosides. In some embodiments, there are at least 6 3′-side nucleosides and at least 22 5′-side nucleosides. In some embodiments, there are at least 6 3′-side nucleosides and at least 23 5′-side nucleosides. In some embodiments, there are at least 6 3′-side nucleosides and at least 24 5′-side nucleosides. In some embodiments, there are at least 7 3′-side nucleosides and at least 20 5′-side nucleosides. In some embodiments, there are at least 7 3′-side nucleosides and at least 21 5′-side nucleosides. In some embodiments, there are at least 7 3′-side nucleosides and at least 22 5′-side nucleosides. In some embodiments, there are at least 7 3′-side nucleosides and at least 23 5′-side nucleosides. In some embodiments, there are at least 8 3′-side nucleosides and at least 19 5′-side nucleosides. In some embodiments, there are at least 8 3′-side nucleosides and at least 20 5′-side nucleosides. In some embodiments, there are at least 8 3′-side nucleosides and at least 21 5′-side nucleosides. In some embodiments, there are at least 8 3′-side nucleosides and at least 22 5′-side nucleosides. In some embodiments, there are at least 9 3′-side nucleosides and at least 18 5′-side nucleosides. In some embodiments, there are at least 9 3′-side nucleosides and at least 19 5′-side nucleosides. In some embodiments, there are at least 9 3′-side nucleosides and at least 20 5′-side nucleosides. In some embodiments, there are at least 9 3′-side nucleosides and at least 21 5′-side nucleosides. In some embodiments, there are at least 10 3′-side nucleosides and at least 17 5′-side nucleosides. In some embodiments, there are at least 10 3′-side nucleosides and at least 18 5′-side nucleosides. In some embodiments, there are at least 10 3′-side nucleosides and at least 19 5′-side nucleosides. In some embodiments, there are at least 10 3′-side nucleosides and at least 20 5′-side nucleosides. In some embodiments, there are at least 11 3′-side nucleosides and at least 16 5′-side nucleosides. In some embodiments, there are at least 11 3′-side nucleosides and at least 17 5′-side nucleosides. In some embodiments, there are at least 11 3′-side nucleosides and at least 18 5′-side nucleosides. In some embodiments, there are at least 11 3′-side nucleosides and at least 19 5′-side nucleosides. In some embodiments, there are at least 12 3′-side nucleosides and at least 15 5′-side nucleosides. In some embodiments, there are at least 12 3′-side nucleosides and at least 16 5′-side nucleosides. In some embodiments, there are at least 12 3′-side nucleosides and at least 17 5′-side nucleosides. In some embodiments, there are at least 12 3′-side nucleosides and at least 18 5′-side nucleosides. In some embodiments, there are at least 13 3′-side nucleosides and at least 14 5′-side nucleosides. In some embodiments, there are at least 13 3′-side nucleosides and at least 15 5′-side nucleosides. In some embodiments, there are at least 13 3′-side nucleosides and at least 16 5′-side nucleosides. In some embodiments, there are at least 13 3′-side nucleosides and at least 17 5′-side nucleosides. In some embodiments, certain useful lengths of 5′-sides and/or 3′-sides and/or positioning of nucleosides opposite to target adenosines (e.g., C of UCI in oligonucleotides described in (a), FIG. 2) are described in FIG. 2 and FIG. 3.

[0601] As described herein, wherein modifications may be utilized for N₁, including sugar modifications, nucleobase modifications, etc. In some embodiments, N₁ contains a natural DNA sugar. In some embodiments, N₁ contains a natural RNA sugar. In some embodiments, N₁ contains a modified sugar as described herein. In some embodiments, a modified sugar is a 2′-modified sugar. In some embodiments, a modified sugar is a 2′-F modified sugar. In some embodiments, a modified sugar is a 2′-OR modified sugar wherein R is optionally substituted C₁₋₆ alkyl. In some embodiments, a modified sugar is a 2′-OMe modified sugar. In some embodiments, a modified sugar is a 2′-MOE modified sugar. In some embodiments, a sugar is a UNA sugar. In some embodiments, a sugar is a GNA sugar. In some embodiments, sugar of N₁ is sm01. In some embodiments, it is sm11. In some embodiments, it is sm12. In some embodiments, it is sm18. In some embodiments, a modified sugar, e.g., a 2′-F modified sugar, or a DNA sugar provides higher editing efficiency when administered to a system (e.g., a cell, a tissue, an organism, etc.) compared to a reference sugar (e.g., a natural RNA sugar, a different modified sugar, etc.). In some embodiments, N₁ contains a natural nucleobase, e.g., U. In some embodiments, N₁ contains a modified nucleobase as described herein. In some embodiments, nucleobase of N₁ is A, T, C, G, U, hypoxanthine, b001U, b002U, b003U, b004U, b005U, b006U, b007U, b008U, b009U, b011U, b012U, b013U, b001A, b002A, b003A, b001G, b002G, b001C, b002C, b003C, b004C, b005C, b006C, b007C, b008C, b009C, b002I, b003I, b004I, b014I, or zdnp. In some embodiments, nucleobase of N₁ is T. In some embodiments, it is U. In some embodiments, it is b002A. In some embodiments, it is b003A. In some embodiments, it is b008U. In some embodiments, it is b010U. In some embodiments, it is b011U. In some embodiments, it is b012U. In some embodiments, it is b001C. In some embodiments, it is b004C. In some embodiments, it is b007C. In some embodiments, it is b008C. In some embodiments, N₁ is a natural nucleoside. In some embodiments, N₁ is a modified nucleoside. In some embodiments, N₁ is fU, dU, fA, dA, fT, dT, fC, dC, fG, dG, dI, fI, aC, b001U, b002U, b003U, b004U, b005U, b006U, b007U, b008U, b009U, b010U, b011U, b012U, b013U, b001A, b001rA, b002A, b003A, b001G, b002G, b001C, b002C, b003C, b003mC, b004C, b005C, b006C, b007C, b008C, b002I, b003I, b004I, b014I, Asm01, Gsm01, 5MSfC, Usm04, 5MRdT, Csm04, Csm11, Gsm11, Tsm11, b009Csm11, b009Csm12, Gsm12, Tsm12, Csm12, rCsm13, rCsm14, Csm15, Csm16, Csm17, L034, zdnp, and Tsm18. In some embodiments, N₁ is fU, dU, fA, dA, fT, dT, fC, dC, fG, dG, dI, or fI. In some embodiments, N₁ is fU, dU, fA, dA, fT, dT, fC, dC, fG, or dG. In some embodiments, N₁ is dT. In some embodiments, N₁ is b001A. In some embodiments, N₁ is b002A. In some embodiments, N₁ is b003A. In some embodiments, N₁ is fU. In some embodiments, N₁ is b008U. In some embodiments, N₁ is b001C. In some embodiments, N₁ is b004C. In some embodiments, N₁ is b007C. In some embodiments, N₁ is b008C. In some embodiments, N₁ is b001U. In some embodiments, N₁ is b008U. In some embodiments, N₁ is b010U. In some embodiments, N₁ is b011U. In some embodiments, N₁ is b012U. In some embodiments, N₁ is Csm11. In some embodiments, N₁ is Gsm11. In some embodiments, N₁ is Tsm11. In some embodiments, N₁ is b009Csm11. In some embodiments, N₁ is Csm12. In some embodiments, N₁ is Gsm12. In some embodiments, N₁ is Tsm12. In some embodiments, N₁ is b009Csm12. In some embodiments, N₁ is Gsm01. In some embodiments, N₁ is Tsm01. In some embodiments, N₁ is Csm17. In some embodiments, N₁ is Tsm18. In some embodiments, N₁ is b014I. In some embodiments, N₁ is abasic. In some embodiments, N₁ is L010. As described herein, at position N₁ in some embodiments, it is a match when an oligonucleotide forms a duplex with a nucleic acid (e.g., its target transcript for adenosine editing). In some embodiments, it is a mismatch. In some embodiments, it is a wobble. In some embodiments, N₁ is bonded to a natural phosphate linkage. In some embodiments, N₁ is bonded to a modified internucleotidic linkage as described herein, in various embodiments, with defined stereochemistry. In some embodiments, N₁ is bonded to a natural phosphate linkage and a modified internucleotidic linkage. In some embodiments, N₁ is bonded to two natural phosphate linkages. In some embodiments, N₁ is bonded to two modified internucleotidic linkages, each of which may be independently and optionally stereocontrolled and may be Rp or Sp.

[0602] As described herein, wherein modifications may be utilized for N₋₁, including sugar modifications, nucleobase modifications, etc. In some embodiments, N₋₁ contains a natural DNA sugar. In some embodiments, N₋₁ contains a natural RNA sugar. In some embodiments, N₋₁ contains a modified sugar as described herein. In some embodiments, a modified sugar is a 2′-modified sugar. In some embodiments, a modified sugar is a 2′-F modified sugar. In some embodiments, a modified sugar is a 2′-OR modified sugar wherein R is optionally substituted C₋₁₋₆ alkyl. In some embodiments, a modified sugar is a 2′-OMe modified sugar. In some embodiments, a modified sugar is a 2′-MOE modified sugar. In some embodiments, a sugar is a UNA sugar. In some embodiments, a sugar is a GNA sugar. In some embodiments, sugar of N₋₁ is sm01. In some embodiments, it is sm11. In some embodiments, it is sm12. In some embodiments, it is sm18. In some embodiments, a modified sugar, e.g., a 2′-F modified sugar, or a DNA sugar provides higher editing efficiency when administered to a system (e.g., a cell, a tissue, an organism, etc.) compared to a reference sugar (e.g., a natural RNA sugar, a different modified sugar, etc.). In some embodiments, N₋₁ contains a natural nucleobase, e.g., U. In some embodiments, N₋₁ contains a modified nucleobase as described herein. In some embodiments, nucleobase of N₋₁ is A, T, C, G, U, hypoxanthine, b001U, b002U, b003U, b004U, b005U, b006U, b007U, b008U, b009U, b011U, b012U, b013U, b001A, b002A, b003A, b001G, b002G, b001C, b002C, b003C, b004C, b005C, b006C, b007C, b008C, b009C, b002I, b003I, b004I, b014I, or zdnp. In some embodiments, nucleobase of N₋₁ is T. In some embodiments, it is U. In some embodiments, it is b001A. In some embodiments, it is b002A. In some embodiments, it is b003A. In some embodiments, it is b008U. In some embodiments, it is b011U. In some embodiments, it is b012U. In some embodiments, it is b001C. In some embodiments, it is b004C. In some embodiments, it is b007C. In some embodiments, it is b008C. In some embodiments, it is b009C. In some embodiments, it is b002G. In some embodiments, it is b014I. In some embodiments, N₋₁ is a natural nucleoside. In some embodiments, N₋₁ is a modified nucleoside. In some embodiments, N₋₁ is fU, dU, fA, dA, fT, dT, fC, dC, fG, dG, dI, fI, aC, b001U, b002U, b003U, b004U, b005U, b006U, b007U, b008U, b009U, b010U, b011U, b012U, b013U, b001A, b001rA, b002A, b003A, b001G, b002G, b001C, b002C, b003C, b003mC, b004C, b005C, b006C, b007C, b008C, b002I, b003I, b004I, b014I, Asm01, Gsm01, 5MSfC, Usm04, 5MRdT, Csm04, Csm11, Gsm11, Tsm11, b009Csm11, b009Csm12, Gsm12, Tsm12, Csm12, rCsm13, rCsm14, Csm15, Csm16, Csm17, L034, zdnp, and Tsm18. In some embodiments, N₋₁ is fU, dU, fA, dA, fT, dT, fC, dC, fG, dG, dI, or fI. In some embodiments, N₋₁ is fU, dU, fA, dA, fT, dT, fC, dC, fG, or dG. In some embodiments, N₋₁ is dI. In some embodiments, N₋₁ is rI. In some embodiments, N₋₁ is dT. In some embodiments, N₋₁ is b001A. In some embodiments, N₋₁ is b002A. In some embodiments, N₋₁ is b003A. In some embodiments, N₋₁ is fU. In some embodiments, N₋₁ is b001C. In some embodiments, N₋₁ is b004C. In some embodiments, N₋₁ is b007C. In some embodiments, N₋₁ is b008C. In some embodiments, N₋₁ is b009Csm12. In some embodiments, N₋₁ is b001U. In some embodiments, N₋₁ is b008U. In some embodiments, N₋₁ is b010U. In some embodiments, N₋₁ is b011U. In some embodiments, N₋₁ is b012U. In some embodiments, N₋₁ is Csm11. In some embodiments, N₋₁ is b009Csm11. In some embodiments, N₋₁ is Gsm11. In some embodiments, N₋₁ is Tsm11. In some embodiments, N₋₁ is Csm12. In some embodiments, N₋₁ is b009Csm12. In some embodiments, N₋₁ is Gsm12. In some embodiments, N₋₁ is Tsm12. In some embodiments, N₋₁ is Gsm01. In some embodiments, N₋₁ is Tsm01. In some embodiments, N₋₁ is Tsm18. In some embodiments, N₋₁ is abasic. In some embodiments, N₋₁ is L010. In some embodiments, N₋₁ is Csm17. In some embodiments, N₋₁ is b002G. In some embodiments, N₋₁ is b014I. As described herein, at position N₋₁ in some embodiments, it is a match when an oligonucleotide forms a duplex with a nucleic acid (e.g., its target transcript for adenosine editing). In some embodiments, it is a mismatch. In some embodiments, it is a wobble. In some embodiments, N₋₁ is bonded to a natural phosphate linkage. In some embodiments, N₋₁ is bonded to a modified internucleotidic linkage as described herein, in various embodiments, with defined stereochemistry. In some embodiments, N₋₁ is bonded to a natural phosphate linkage and a modified internucleotidic linkage. In some embodiments, N₋₁ is bonded to two natural phosphate linkages. In some embodiments, N₋₁ is bonded to two modified internucleotidic linkages, each of which may be independently and optionally stereocontrolled and may be Rp or Sp.

[0603] In some embodiments, N₂ contains a natural sugar. In some embodiments, sugar of N₂ is a natural DNA sugar. In some embodiments, it is a natural RNA sugar. In some embodiments, it is a modified sugar. In some embodiments, it is a 2′-F modified sugar. In some embodiments, it is a 2′-OR modified sugar, wherein R is C₁₋₆ aliphatic as described herein. In some embodiments, R is optionally substituted C₁₋₆ alkyl. In some embodiments, it is a 2′-OMe modified. In some embodiments, it is a 2′-MOE modified sugar.

[0604] In some embodiments, an internucleotidic linkage between N₁ and N₂ is a natural phosphate linkage. In some embodiments, it is a modified internucleotidic linkage. In some embodiments, it is a phosphorothioate internucleotidic linkage. In some embodiments, it is a non-negatively charged internucleotidic linkage. In some embodiments, it is a neutral internucleotidic linkage. In some embodiments, it is phosphoryl guanidine internucleotidic linkage. In some embodiments, it is n001. In some embodiments, it is Sp. In some embodiments, it is Rp. In some embodiments, it is a Sp phosphorothioate internucleotidic linkage. In some embodiments, it is Sp n001. In some embodiments, it is Rp n001.

[0605] In some embodiments, N₃ contains a natural sugar. In some embodiments, sugar of N₃ is a natural DNA sugar. In some embodiments, it is a natural RNA sugar. In some embodiments, it is a modified sugar. In some embodiments, it is a 2′-F modified sugar. In some embodiments, it is a 2′-OR modified sugar, wherein R is C₁₋₆ aliphatic as described herein. In some embodiments, R is optionally substituted C₁₋₆ alkyl. In some embodiments, it is a 2′-OMe modified. In some embodiments, it is a 2′-MOE modified sugar.

[0606] In some embodiments, an internucleotidic linkage between N₂ and N₃ is a natural phosphate linkage. In some embodiments, it is a modified internucleotidic linkage. In some embodiments, it is a phosphorothioate internucleotidic linkage. In some embodiments, it is a non-negatively charged internucleotidic linkage. In some embodiments, it is a neutral internucleotidic linkage. In some embodiments, it is phosphoryl guanidine internucleotidic linkage. In some embodiments, it is n001. In some embodiments, it is Sp. In some embodiments, it is Rp. In some embodiments, it is a Sp phosphorothioate internucleotidic linkage. In some embodiments, it is Sp n001. In some embodiments, it is Rp n001. In some embodiments, N₄ contains a natural sugar. In some embodiments, sugar of N₄ is a natural DNA sugar. In some embodiments, it is a natural RNA sugar. In some embodiments, it is a modified sugar. In some embodiments, it is a 2′-F modified sugar. In some embodiments, it is a 2′-OR modified sugar, wherein R is C₁₋₆ aliphatic as described herein. In some embodiments, R is optionally substituted C₁₋₆ alkyl. In some embodiments, it is a 2′-OMe modified. In some embodiments, it is a 2′-MOE modified sugar.

[0607] In some embodiments, an internucleotidic linkage between N₃ and N₄ is a natural phosphate linkage. In some embodiments, it is a modified internucleotidic linkage. In some embodiments, it is a phosphorothioate internucleotidic linkage. In some embodiments, it is a non-negatively charged internucleotidic linkage. In some embodiments, it is a neutral internucleotidic linkage. In some embodiments, it is phosphoryl guanidine internucleotidic linkage. In some embodiments, it is n001. In some embodiments, it is Sp. In some embodiments, it is Rp. In some embodiments, it is a Sp phosphorothioate internucleotidic linkage. In some embodiments, it is Sp n001. In some embodiments, it is Rp n001.

[0608] In some embodiments, N₅ contains a natural sugar. In some embodiments, sugar of N₅ is a natural DNA sugar. In some embodiments, it is a natural RNA sugar. In some embodiments, it is a modified sugar. In some embodiments, it is a 2′-F modified sugar. In some embodiments, it is a 2′-OR modified sugar, wherein R is C₁₋₆ aliphatic as described herein. In some embodiments, R is optionally substituted C₁₋₆ alkyl. In some embodiments, it is a 2′-OMe modified. In some embodiments, it is a 2′-MOE modified sugar.

[0609] In some embodiments, an internucleotidic linkage between N₄ and N₅ is a natural phosphate linkage. In some embodiments, it is a modified internucleotidic linkage. In some embodiments, it is a phosphorothioate internucleotidic linkage. In some embodiments, it is a non-negatively charged internucleotidic linkage. In some embodiments, it is a neutral internucleotidic linkage. In some embodiments, it is phosphoryl guanidine internucleotidic linkage. In some embodiments, it is n001. In some embodiments, it is Sp. In some embodiments, it is Rp. In some embodiments, it is a Sp phosphorothioate internucleotidic linkage. In some embodiments, it is Sp n001. In some embodiments, it is Rp n001.

[0610] In some embodiments, N₆ contains a natural sugar. In some embodiments, sugar of N₆ is a natural DNA sugar. In some embodiments, it is a natural RNA sugar. In some embodiments, it is a modified sugar. In some embodiments, it is a 2′-F modified sugar. In some embodiments, it is a 2′-OR modified sugar, wherein R is C₁₋₆ aliphatic as described herein. In some embodiments, R is optionally substituted C₁₋₆ alkyl. In some embodiments, it is a 2′-OMe modified. In some embodiments, it is a 2′-MOE modified sugar.

[0611] In some embodiments, an internucleotidic linkage between N₅ and N₆ is a natural phosphate linkage. In some embodiments, it is a modified internucleotidic linkage. In some embodiments, it is a phosphorothioate internucleotidic linkage. In some embodiments, it is a non-negatively charged internucleotidic linkage. In some embodiments, it is a neutral internucleotidic linkage. In some embodiments, it is phosphoryl guanidine internucleotidic linkage. In some embodiments, it is n001. In some embodiments, it is Sp. In some embodiments, it is Rp. In some embodiments, it is a Sp phosphorothioate internucleotidic linkage. In some embodiments, it is Sp n001. In some embodiments, it is Rp n001.

[0612] As described herein, an oligonucleotide, or a portion thereof, e.g., a first domain, a second domain, etc., may comprise or consist of one or more, e.g., 1-20, 1-15, 1-14, 1-13, 1-12, 1-11, 1-10, 2-20, 3-15, 4-15, 5-15, 1, 2, 3, 4, 5, 6, 7, 8, 9, 10, 11, 12, 13, 14, 15, 16, 17, 18, 19, 20, etc. blocks, each of which independently comprises one or more (e.g., 1-50, 1-40, 1-30, 1-25, 1-24, 1-23, 1-22, 1-21, 1-20, 1-10, 1-5, 1, 2, 3, 4, 5, 6, 7, 8, 9, 10, 11, 12, 13, 14, 15, 16, 17, 18, 19, 20, 21, 22, 23, 24, 25, 26, 27, 28, 29, 30, etc.) sugars, wherein each sugar in a block share the same structure. In some embodiments, an oligonucleotide, or a portion thereof, e.g., a first domain, a second domain, etc., may comprise or consist of one or more, e.g., 1-20, 1-15, 1-14, 1-13, 1-12, 1-11, 1-10, 2-20, 3-15, 4-15, 5-15, 1, 2, 3, 4, 5, 6, 7, 8, 9, 10, 11, 12, 13, 14, 15, 16, 17, 18, 19, 20, etc. blocks, each of which independently comprises one or more (e.g., 1-50, 1-40, 1-30, 1-25, 1-24, 1-23, 1-22, 1-21, 1-20, 1-10, 1-5, 1, 2, 3, 4, 5, 6, 7, 8, 9, 10, 11, 12, 13, 14, 15, 16, 17, 18, 19, 20, 21, 22, 23, 24, 25, 26, 27, 28, 29, 30, etc.) sugars, wherein each sugar in a block is the same modified sugar. In some embodiments, each block independently contains 1-10, e.g., 1, 2, 3, 4, 5, 6, 7, 8, 9, or 10, sugars. In some embodiments, each block independently contains 1-5 sugars. In some embodiments, each block independently contains 1, 2, or 3 sugars. In some embodiments, one or more blocks, e.g., 1-15, 1-10, 1, 2, 3, 4, 5, 6, 7, 8, 9, 10, 11, 12, 13, 14, 15, 16, 17, 18, 19, 20 or more, independently contain two or three or more sugars. In some embodiments, one or more blocks, e.g., 1-15, 1-10, 1, 2, 3, 4, 5, 6, 7, 8, 9, 10, 11, 12, 13, 14, 15, 16, 17, 18, 19, 20 or more, independently contain two or three sugars. In some embodiments, about or at least about 30%, 40% or 50% blocks in an oligonucleotide or a portion thereof independently contains two or more (e.g., two or three) sugars. In some embodiments, about 50% blocks in an oligonucleotide of a first domain independently contains two or more (e.g., two or three) sugars. In some embodiments, a block is a 2′-F block wherein each sugar in the block is a 2′-F modified block. In some embodiments, a block is a 2′-OR block wherein R is optionally substituted C₁₋₆ aliphatic wherein each sugar in the block is the same 2′-OR modified sugar. In some embodiments, a block is a 2′-OMe block. In some embodiments, a block is a 2′-MOE block. In some embodiments, a block is a bicyclic sugar block wherein each sugar in the block is the same bicyclic sugar (e.g., a LNA sugar, cEt, etc.). In some embodiments, two or more blocks are 2′-F blocks. In some embodiments, every other block is a 2′-F block. In some embodiments, each 2′-F block independently contains no more than 2, 3, 4, 5, 6, 7, 8, 9, or 10 sugars. In some embodiments, a 2′-F block contains no more than 5 sugars. In some embodiments, a 2′-F block contains no more than 4 sugars. In some embodiments, a 2′-F block contains no more than 3 sugars. In some embodiments, between every two 2′-F blocks in an oligonucleotide or a portion thereof there is at least one 2′-OR block wherein R is optionally substituted C₁₋₆ aliphatic or one bicyclic sugar block. In some embodiments, between every two 2′-F blocks in a portion there is at least one 2′-OR block wherein R is optionally substituted C₁₋₆ aliphatic or one bicyclic sugar block. In some embodiments, between every two 2′-F blocks in an oligonucleotide there is at least one 2′-OR block wherein R is optionally substituted C₁₋₆ aliphatic. In some embodiments, between every two 2′-F blocks in a first domain there is at least one 2′-OR block wherein R is optionally substituted C₁₋₆ aliphatic. In some embodiments, between every two 2′-F blocks in a first domain there is at least one 2′-OMe block. In some embodiments, between two 2′-F blocks in a first domain there is a 2′-OMe block. In some embodiments, between two 2′-F blocks in a first domain there is a 2′-MOE block. In some embodiments, between two 2′-F blocks in a first domain there is a 2′-MOE block and 2′-OMe block. In some embodiments, between two 2′-F blocks in a first domain there is a 2′-MOE block and 2′-OMe block and no 2′-F block. In some embodiments, each 2′-F block is independently bonded to a 2′-OR block wherein R is C₁₋₆ aliphatic or a bicyclic sugar block. In some embodiments, each 2′-F block is independently bonded to a 2′-OR block wherein R is C₁₋₆ aliphatic. In some embodiments, each block a 2′-F block bonds to is independently a 2′-OR block wherein R is optionally substituted C₁₋₆ aliphatic or a bicyclic sugar block. In some embodiments, each block a 2′-F block bonds to is independently a 2′-OR block wherein R is optionally substituted C₁₋₆ aliphatic. In some embodiments, each block in a first domain that a 2′-F block in a first domain bonds to is independently a 2′-OR block wherein R is optionally substituted C₁₋₆ aliphatic or a bicyclic sugar block. In some embodiments, each block in a first domain that a 2′-F block in a first domain bonds to is independently a 2′-OR block wherein R is optionally substituted C₁₋₆ aliphatic. In some embodiments, each block in a first domain that a 2′-OR block wherein R is C₁₋₆ aliphatic or a bicyclic sugar block bonds is independently a 2′-F block of a different 2′-OR block wherein R is C₁₋₆ aliphatic or a bicyclic sugar block. In some embodiments, each block in a first domain that a 2′-OR block wherein R is C₁₋₆ aliphatic bonds is independently a 2′-F block of a different 2′-OR block wherein R is C₁₋₆ aliphatic. In some embodiments, a 2′-OR block is a 2′-OMe block. In some embodiments, a 2′-OR block is a 2′-MOE block. In some embodiments, at least one block is a 2′-OMe block. In some embodiments, about or about at least 2, 3, 4, or 5 blocks are independently 2′-OMe block. In some embodiments, at least one block is a 2′-MOE block. In some embodiments, about or about at least 2, 3, 4, or 5 blocks are independently 2′-MOE block. In some embodiments, in an oligonucleotide or a portion thereof, e.g., a first domain, a second domain, etc., there are one or more (e.g., 1, 2, 3, 4, 5, 6, 7, 8, 9, or 10 or more) 2′-OMe block and one or more (e.g., 1, 2, 3, 4, 5, 6, 7, 8, 9, or 10 or more) 2′-MOE block. In some embodiments, in an oligonucleotide or a portion thereof, e.g., a first domain, a second domain, etc., there are one or more (e.g., 1, 2, 3, 4, 5, 6, 7, 8, 9, or 10 or more) 2′-OMe block and one or more (e.g., 1, 2, 3, 4, 5, 6, 7, 8, 9, or 10 or more) 2′-MOE block and one or more (e.g., 1, 2, 3, 4, 5, 6, 7, 8, 9, or 10) 2′-F block. In some embodiments, in a first domain there are one or more (e.g., 1, 2, 3, 4, 5, 6, 7, 8, 9, or 10 or more) 2′-OMe block and one or more (e.g., 1, 2, 3, 4, 5, 6, 7, 8, 9, or 10 or more) 2′-MOE block. In some embodiments, in a first domain there are one or more (e.g., 1, 2, 3, 4, 5, 6, 7, 8, 9, or 10 or more) 2′-OMe block and one or more (e.g., 1, 2, 3, 4, 5, 6, 7, 8, 9, or 10 or more) 2′-F block. In some embodiments, in a first domain there are one or more (e.g., 1, 2, 3, 4, 5, 6, 7, 8, 9, or 10 or more) 2′-F block and one or more (e.g., 1, 2, 3, 4, 5, 6, 7, 8, 9, or 10 or more) 2′-MOE block. In some embodiments, in a first domain there are one or more (e.g., 1, 2, 3, 4, 5, 6, 7, 8, 9, or 10 or more) 2′-OMe block and one or more (e.g., 1, 2, 3, 4, 5, 6, 7, 8, 9, or 10 or more) 2′-MOE block and one or more (e.g., 1, 2, 3, 4, 5, 6, 7, 8, 9, or 10) 2′-F block. In some embodiments, in an oligonucleotide or a portion thereof, e.g., a first domain, a second domain, etc., percentage of 2′-F modified sugars is about 20%-80%, 30-70%, 30%-60%, 30%-50%, 40%-60%, 20%, 30%, 40%, 50%, 60%, 70% or 80%, and percentage of 2′-OR modified sugars each of which is independently a 2′-OR modified sugar wherein R is optionally substituted C₁₋₆ aliphatic is about 20%-80%, 30-70%, 30%-60%, 30%-50%, 40%-60%, 20%, 30%, 40%, 50%, 60%, 70% or 80%. In some embodiments, in a first domain percentage of 2′-F modified sugars is about 20%-80%, 30-70%, 30%-60%, 30%-50%, 40%-60%, 20%, 30%, 40%, 50%, 60%, 70% or 80%, and percentage of 2′-OR modified sugars each of which is independently a 2′-OR modified sugar wherein R is optionally substituted C₁₋₆ aliphatic is about 20%-80%, 30-70%, 30%-60%, 30%-50%, 40%-60%, 20%, 30%, 40%, 50%, 60%, 70% or 80%. In some embodiments, the difference between the percentage of 2′-F modified sugars and the percentage of 2′-OR modified sugars each of which is independently a 2′-OR modified sugar wherein R is optionally substituted C₁₋₆ aliphatic is less than about 50%, 40%, 30%, 20%, or 10% (calculated by subtracting the smaller of the two percentages from the larger of the two percentages). In some embodiments, each 2′-OR modified sugar is independently a 2′-OMe or 2′-MOE modified sugar.

[0613] For example, in some embodiments, sugar of each of N₂, N₅, and N₆ is independently a 2′-F modified sugar, and sugar of each of N₃ and N₄ is independently a 2′-OR modified sugar wherein R is C₁₋₆ aliphatic or a bicyclic sugar. In some embodiments, sugar of each of N₂, N₅, and N₆ is independently a 2′-F modified sugar, and sugar of each of N₃ and N₄ is independently a 2′-OR modified sugar. In some embodiments, sugar of each of N₂, N₅, and N₆ is independently a 2′-F modified sugar, and sugar of each of N₃ and N₄ is independently a 2′-OMe or 2′-MOE modified sugar. In some embodiments, sugar of each of N₂, N₅, and N₆ is independently a 2′-F modified sugar, and sugar of each of N₃ and N₄ is independently a 2′-OMe modified sugar. In some embodiments, at least one sugar is a 2′-MOE modified sugar. In some embodiments, sugar of N₃ is a 2′-MOE modified sugar. In some embodiments, sugar of N₃ is a 2′-OMe modified sugar. In some embodiments, sugar of N₄ is a 2′-MOE modified sugar. In some embodiments, sugars of both N₃ and N₄ are 2′-MOE modified sugar. In some embodiments, N₂ forms a 2′-F block. In some embodiments, N₃ and N₄ forms a 2′-OMe block. In some embodiments, N₃ and N₄ forms a 2′-MOE block. In some embodiments, N₅, N₆ and/or N₇ form a 2′-F block. As demonstrated herein, oligonucleotides comprising modified sugars, e.g., 2′-F modified sugars, 2′-OMe modified sugars, 2′-MOE modified sugars, etc., at various positions can provide, among other things, high levels of adenosine editing. For example, 2′-MOE modified sugars can be incorporated at various positions to provide oligonucleotides capable of adenosine editing; in some embodiments, sugar of N₁ is a 2′-MOE modified sugar; in some embodiments, sugar of N₂ is a 2′-MOE modified sugar; in some embodiments, sugar of N₃ is a 2′-MOE modified sugar; in some embodiments, sugar of N₄ is a 2′-MOE modified sugar; in some embodiments, sugar of N₅ is a 2′-MOE modified sugar; in some embodiments, sugar of N₆ is a 2′-MOE modified sugar; in some embodiments, sugar of N₇ is a 2′-MOE modified sugar; in some embodiments, sugar of N₈ is a 2′-MOE modified sugar; in some embodiments, sugar of N₋₁ is a 2′-MOE modified sugar; in some embodiments, sugar of N₋₂ is a 2′-MOE modified sugar; in some embodiments, sugar of N₋₃ is a 2′-MOE modified sugar; in some embodiments, sugar of N₋₄ is a 2′-MOE modified sugar; in some embodiments, sugar of N₋₅ is a 2′-MOE modified sugar; in some embodiments, sugar of N₋₆ is a 2′-MOE modified sugar.

[0614] As described herein, various internucleotidic linkages may be utilized in oligonucleotides or portions thereof, e.g., first domains, second domains, etc. For example, various linkages may be utilized in first domains. In some embodiments, a first domain comprises one or more, e.g., 1, 2, 3, 4, 5, 6, 7, 8, 9, 10, 11, 12, 13, 14, 15, 16, 17, 18, 19, 20 or more natural phosphate linkages. In some embodiments, a first domain comprises one or more, e.g., 1, 2, 3, 4, 5, 6, 7, 8, 9, 10, 11, 12, 13, 14, 15, 16, 17, 18, 19, 20 or more, modified internucleotidic linkages. In some embodiments, a first domain comprises one or more natural phosphate linkages and one or more modified internucleotidic linkages. In some embodiments, one or more modified internucleotidic linkages are phosphorothioate internucleotidic linkages. In some embodiments, each phosphorothioate internucleotidic linkage is chirally controlled. In some embodiments, each phosphorothioate internucleotidic linkage in an oligonucleotide or a portion thereof, e.g., a first domain, a second domain, etc. is Sp. In some embodiments, each phosphorothioate internucleotidic linkage in an oligonucleotide is Sp. In some embodiments, one or more modified internucleotidic linkages are independently non-negatively charged internucleotidic linkage. In some embodiments, one or more modified internucleotidic linkages are independently non-negatively charged internucleotidic linkage. In some embodiments, one or more modified internucleotidic linkages are independently phosphoryl guanidine internucleotidic linkages. In some embodiments, each phosphoryl guanidine internucleotidic linkage is independently n001. In some embodiments, a first domain contains about 1-5, e.g., 1, 2, 3, 4, or 5 non-negatively charged internucleotidic linkages. In some embodiments, each of such non-negatively charged internucleotidic linkages are independently a phosphoryl guanidine internucleotidic linkage. In some embodiments, each of them is independently n001. In some embodiments, one or more of them are independently chirally controlled. In some embodiments, each of them is chirally controlled. In some embodiments, each of them is Rp n001. In some embodiments, one or more sugars that are 2′-OR modified sugars wherein R is optionally substituted C₁₋₆ aliphatic are boned to natural phosphate linkages. In some embodiments, one or more 2′-OMe sugars are bonded to natural phosphate linkages. In some embodiments, one or more 2′-MOE sugars are bonded to natural phosphate linkages. In some embodiments, one or more 2′-F modified sugars are bonded to natural phosphate linkages. In some embodiments, about or at least about 20%, 30%, 40%, 50%, 60%, 70%, 80% or 90% 2′-OR modified sugars wherein R is optionally substituted C₁₋₆ aliphatic in an oligonucleotide or a portion thereof, e.g., a first domain, a second domain, etc., are independently bonded to a natural phosphate linkage. In some embodiments, about or at least about 20%, 30%, 40%, 50%, 60%, 70%, 80% or 90% 2′-OMe modified sugars in an oligonucleotide or a portion thereof, e.g., a first domain, a second domain, etc., are independently bonded to a natural phosphate linkage. In some embodiments, about or at least about 20%, 30%, 40%, 50%, 60%, 70%, 80% or 90% 2′-MOE modified sugars in an oligonucleotide or a portion thereof, e.g., a first domain, a second domain, etc., are independently bonded to a natural phosphate linkage. In some embodiments, about or at least about 20%, 30%, 40%, 50%, 60%, 70%, 80% or 90% 2′-OR modified sugars wherein R is optionally substituted C₁₋₆ aliphatic in a first domain, a second domain are independently bonded to a natural phosphate linkage. In some embodiments, about or at least about 20%, 30%, 40%, 50%, 60%, 70%, 80% or 90% 2′-OMe modified sugars in a first domain are independently bonded to a natural phosphate linkage. In some embodiments, about or at least about 20%, 30%, 40%, 50%, 60%, 70%, 80% or 90% 2′-MOE modified sugars in a first domain are independently bonded to a natural phosphate linkage. In some embodiments, about or at least about 1-10, e.g., 1, 2, 3, 4, 5, 6, 7, 8, 9, or 10, 2′-OR modified sugars wherein R is optionally substituted C₁₋₆ aliphatic in a first domain, a second domain are independently bonded to a natural phosphate linkage. In some embodiments, about or at least about 1-10, e.g., 1, 2, 3, 4, 5, 6, 7, 8, 9, or 10, 2′-OMe modified sugars in a first domain are independently bonded to a natural phosphate linkage. In some embodiments, about or at least about 1-10, e.g., 1, 2, 3, 4, 5, 6, 7, 8, 9, or 10, 2′-MOE modified sugars in a first domain are independently bonded to a natural phosphate linkage. In some embodiments, one or more, e.g., 1, 2, 3, 4, 5, 6, 7, 8, 9, or 10 or more, natural phosphate linkage bonded to a 2′-F modified sugar are independently bonded to a 2′-OR modified sugar wherein R is optionally substituted C₁₋₆ aliphatic or a bicyclic sugar. In some embodiments, each natural phosphate linkage bonded to a 2′-F modified sugar is independently bonded to a 2′-OR modified sugar wherein R is optionally substituted C₁₋₆ aliphatic or a bicyclic sugar. In some embodiments, one or more, e.g., 1, 2, 3, 4, 5, 6, 7, 8, 9, or 10 or more, natural phosphate linkages bonded to a 2′-F modified sugar is independently bonded to a 2′-MOE modified sugar. In some embodiments, each natural phosphate linkage bonded to a 2′-F modified sugar is independently bonded to a 2′-MOE modified sugar.

[0615] Among other things, the present disclosure demonstrates that oligonucleotides comprising various blocks and patterns as described herein, e.g., 2′-F blocks, 2′-OMe blocks, 2′-MOE blocks, etc., and/or various internucleotidic linkages and patterns thereof as described herein, can provide improved pharmacodynamics, pharmacokinetics, and/or adenosine editing levels, etc., compared to comparable reference oligonucleotides, e.g., those previously reported in WO 2016/097212, WO 2017/220751, WO 2018/041973, WO 2018/134301A1, WO 2019/158475, WO 2019/219581, WO 2020/157008, WO 2020/165077, WO 2020/201406 or WO 2020/252376. In some embodiments, a reference oligonucleotide is an oligonucleotide reported in WO 2021071858.

[0616] In some embodiments, N₋₂ contains a natural sugar. In some embodiments, sugar of N₋₂ is a natural DNA sugar. In some embodiments, it is a natural RNA sugar. In some embodiments, it is a modified sugar. In some embodiments, it is a 2′-F modified sugar. In some embodiments, it is a 2′-OR modified sugar, wherein R is C₁₋₆ aliphatic as described herein. In some embodiments, R is optionally substituted C₁₋₆ alkyl. In some embodiments, it is a 2′-OMe modified. In some embodiments, it is a 2′-MOE modified sugar.

[0617] In some embodiments, an internucleotidic linkage between N₋₁ and N₋₂ is a modified internucleotidic linkage. In some embodiments, it is a phosphorothioate internucleotidic linkage. In some embodiments, it is a non-negatively charged internucleotidic linkage. In some embodiments, it is a neutral internucleotidic linkage. In some embodiments, it is phosphoryl guanidine internucleotidic linkage. In some embodiments, it is n001. In some embodiments, it is Sp. In some embodiments, it is Rp. In some embodiments, it is a Sp phosphorothioate internucleotidic linkage. In some embodiments, it is Sp n001. In some embodiments, it is Rp n001. In some embodiments, N₋₁ is dI, and a linkage between N₋₁ and N₋₂ is a Sp phosphoryl guanidine internucleotidic linkage. In some embodiments, N₋₁ is dI, and a linkage between N₋₁ and N₋₂ is Sp n001.

[0618] In some embodiments, N₋₃ contains a natural sugar. In some embodiments, sugar of N₋₃ is a natural DNA sugar. In some embodiments, it is a natural RNA sugar. In some embodiments, it is a modified sugar. In some embodiments, it is a 2′-F modified sugar. In some embodiments, it is a 2′-OR modified sugar, wherein R is C₁₋₆ aliphatic as described herein. In some embodiments, R is optionally substituted C₁₋₆ alkyl. In some embodiments, it is a 2′-OMe modified. In some embodiments, it is a 2′-MOE modified sugar.

[0619] In some embodiments, an internucleotidic linkage between N₋₂ and N₋₃ is a natural phosphate linkage. In some embodiments, it is a modified internucleotidic linkage. In some embodiments, it is a phosphorothioate internucleotidic linkage. In some embodiments, it is a non-negatively charged internucleotidic linkage. In some embodiments, it is a neutral internucleotidic linkage. In some embodiments, it is phosphoryl guanidine internucleotidic linkage. In some embodiments, it is n001. In some embodiments, it is Sp. In some embodiments, it is Rp. In some embodiments, it is a Sp phosphorothioate internucleotidic linkage. In some embodiments, it is Sp n001. In some embodiments, it is Rp n001.

[0620] In some embodiments, N₋₄ contains a natural sugar. In some embodiments, sugar of N₋₄ is a natural DNA sugar. In some embodiments, it is a natural RNA sugar. In some embodiments, it is a modified sugar. In some embodiments, it is a 2′-F modified sugar. In some embodiments, it is a 2′-OR modified sugar, wherein R is C₁₋₆ aliphatic as described herein. In some embodiments, R is optionally substituted C₁₋₆ alkyl. In some embodiments, it is a 2′-OMe modified. In some embodiments, it is a 2′-MOE modified sugar.

[0621] In some embodiments, an internucleotidic linkage between N₋₃ and N₋₄ is a natural phosphate linkage. In some embodiments, it is a modified internucleotidic linkage. In some embodiments, it is a phosphorothioate internucleotidic linkage. In some embodiments, it is a non-negatively charged internucleotidic linkage. In some embodiments, it is a neutral internucleotidic linkage. In some embodiments, it is phosphoryl guanidine internucleotidic linkage. In some embodiments, it is n001. In some embodiments, it is Sp. In some embodiments, it is Rp. In some embodiments, it is a Sp phosphorothioate internucleotidic linkage. In some embodiments, it is Sp n001. In some embodiments, it is Rp n001.

[0622] In some embodiments, N₋₅ contains a natural sugar. In some embodiments, sugar of N₋₅ is a natural DNA sugar. In some embodiments, it is a natural RNA sugar. In some embodiments, it is a modified sugar. In some embodiments, it is a 2′-F modified sugar. In some embodiments, it is a 2′-OR modified sugar, wherein R is C₁₋₆ aliphatic as described herein. In some embodiments, R is optionally substituted C₁₋₆ alkyl. In some embodiments, it is a 2′-OMe modified. In some embodiments, it is a 2′-MOE modified sugar.

[0623] In some embodiments, an internucleotidic linkage between N₋₄ and N₋₅ is a natural phosphate linkage. In some embodiments, it is a modified internucleotidic linkage. In some embodiments, it is a phosphorothioate internucleotidic linkage. In some embodiments, it is a non-negatively charged internucleotidic linkage. In some embodiments, it is a neutral internucleotidic linkage. In some embodiments, it is phosphoryl guanidine internucleotidic linkage. In some embodiments, it is n001. In some embodiments, it is Sp. In some embodiments, it is Rp. In some embodiments, it is a Sp phosphorothioate internucleotidic linkage. In some embodiments, it is Sp n001. In some embodiments, it is Rp n001.

[0624] In some embodiments, N₋₆ contains a natural sugar. In some embodiments, sugar of N₋₆ is a natural DNA sugar. In some embodiments, it is a natural RNA sugar. In some embodiments, it is a modified sugar. In some embodiments, it is a 2′-F modified sugar. In some embodiments, it is a 2′-OR modified sugar, wherein R is C₁₋₆ aliphatic as described herein. In some embodiments, R is optionally substituted C₁₋₆ alkyl. In some embodiments, it is a 2′-OMe modified. In some embodiments, it is a 2′-MOE modified sugar.

[0625] In some embodiments, an internucleotidic linkage between N₋₅ and N₋₆ is a natural phosphate linkage. In some embodiments, it is a modified internucleotidic linkage. In some embodiments, it is a phosphorothioate internucleotidic linkage. In some embodiments, it is a non-negatively charged internucleotidic linkage. In some embodiments, it is a neutral internucleotidic linkage. In some embodiments, it is phosphoryl guanidine internucleotidic linkage. In some embodiments, it is n001. In some embodiments, it is Sp. In some embodiments, it is Rp. In some embodiments, it is a Sp phosphorothioate internucleotidic linkage. In some embodiments, it is Sp n001. In some embodiments, it is Rp n001.

[0626] In some embodiments, at least one sugar of N₋₁, N₋₂, N₋₃, N₋₄, N₋₅, and N₋₆ is a natural DNA sugar. In some embodiments, at least one sugar of N₋₂, N₋₃, N₋₄, N₋₅, and N₋₆ is a 2′-F modified sugar. In some embodiments, at least one sugar of N₋₂, N₋₃, N₋₄, N₋₅, and N₋₆ is a 2′-OR modified sugar wherein R is optionally substituted C₁₋₆ aliphatic. In some embodiments, at least one sugar of N₋₂, N₋₃, N₋₄, N₋₅, and N₋₆ is a 2′-OMe modified sugar. In some embodiments, at least one sugar of N₋₂, N₋₃, N₋₄, N₋₅, and N₋₆ is a 2′-MOE modified sugar. In some embodiments, at least one sugar of N₋₂, N₋₃, N₋₄, N₋₅, and N₋₆ is a bicyclic sugar, e.g., a LNA sugar, a cEt sugar, etc. In some embodiments, one sugar of N₋₂, N₋₃, N₋₄, N₋₅, and N₋₆ is a 2′-F modified sugar, and each of the other sugars are independently a 2′-OR modified sugar wherein R is C₁₋₆ aliphatic (e.g., a 2′-OMe modified sugar, a 2′-MOE modified sugar, etc.) or a bicyclic sugar as described herein. In some embodiments, one sugar of N₋₂, N₋₃, N₋₄, N₋₅, and N₋₆ is a 2′-F modified sugar, and each of the other sugars are independently a 2′-OR modified sugar wherein R is C₁₋₆ aliphatic. In some embodiments, one sugar of N₋₂, N₋₃, N₋₄, N₋₅, and N₋₆ is a 2′-F modified sugar, and each of the other sugars are independently a 2′-OMe or 2′-MOE modified sugar. In some embodiments, one sugar of N₋₂, N₋₃, N₋₄, N₋₅, and N₋₆ is a 2′-F modified sugar, and each of the other sugars are independently a 2′-OMe modified sugar. In some embodiments, sugar of N₋₃ a 2′-F modified sugar. In some embodiments, sugar of N₋₁ is a DNA sugar, sugar of N₋₃ is a 2′-F modified sugar, and sugar of each of N₋₂, N₋₄, N₋₅, and N₋₆ is independently a 2′-OR modified sugar wherein R is optionally substituted C₁₋₆ aliphatic or a bicyclic sugar (e.g., a LNA sugar, an ENA sugar, etc.) as described herein. In some embodiments, sugar of N₋₁ is a DNA sugar, sugar of N₋₃ is a 2′-F modified sugar, and sugar of each of N₋₂, N₋₄, N₋₅, and N₋₆ is independently a 2′-OR modified sugar wherein R is optionally substituted C₁₋₆ aliphatic. In some embodiments, sugar of N₋₁ is a DNA sugar, sugar of N₋₃ is a 2′-F modified sugar, and sugar of each of N₋₂, N₋₄, N₋₅, and N₋₆ is independently a 2′-OMe or 2′-MOE modified sugar. In some embodiments, sugar of N₋₁ is a DNA sugar, sugar of N₋₃ is a 2′-F modified sugar, and sugar of each of N₋₂, N₋₄, N₋₅, and N₋₆ is independently a 2′-OMe modified sugar. In some embodiments, N₋₂ forms a 2′-OMe block. In some embodiments, N₋₃ forms a 2′-F block. In some embodiments, N₋₄, N₋₅, and N₋₆ forms a 2′-OMe block.

[0627] In some embodiments, at least one of N₋₂, N₋₃, N₋₄, N₋₅, and N₋₆ is bonded to a natural phosphate linkage. In some embodiments, a linkage between N₋₂ and N₋₃ is a natural phosphate linkage. In some embodiments, N₋₂ is bonded to a non-negatively charged internucleotidic linkage. In some embodiments, at least one of N₋₃, N₋₄, N₋₅, and N₋₆ is bonded to a non-negatively charged internucleotidic linkage. In some embodiments, a linkage between N₋₅ and N₋₆ is a non-negatively charged internucleotidic linkage. In some embodiments, at least one of N₋₃, N₋₄, N₋₅, and N₋₆ is bonded to a phosphorothioate internucleotidic linkage. In some embodiments, each of N₋₃, N₋₄ and N₋₅ is independently bonded to a phosphorothioate internucleotidic linkage. In some embodiments, a non-negatively charged internucleotidic linkage is a neutral internucleotidic linkage. In some embodiments, a non-negatively charged internucleotidic linkage is a phosphoryl guanidine internucleotidic linkage. In some embodiments, a non-negatively charged internucleotidic linkage is n001. In some embodiments, it is Rp. In some embodiments, it is Sp. In some embodiments, a phosphorothioate internucleotidic linkage is Rp. In some embodiments, a phosphorothioate internucleotidic linkage is Sp. In some embodiments, each phosphorothioate internucleotidic linkage is Sp. In some embodiments, a linkage between N₋₂ and v-3 is a natural phosphate linkage, a linkage between N₋₃ and N₋₄ is a Sp phosphorothioate internucleotidic linkage, a linkage between N₋₄ and N₋₅ is a Sp phosphorothioate internucleotidic linkage, and a linkage between N₋₅ and N₋₆ is a Rp non-negatively charged internucleotidic linkage (e.g., a Rp phosphoryl guanidine internucleotidic linkage such as Rp n001). In some embodiments, a natural phosphate linkage is bonded to at least one modified sugar. In some embodiments, a natural phosphate linkage is bonded to at least one 2′-OR modified sugar wherein R is C₁₋₆ aliphatic or a bicyclic sugar. In some embodiments, a natural phosphate linkage is bonded to a 2′-OMe modified sugar. In some embodiments, a natural phosphate linkage is bonded to a 2′-MOE modified sugar. In some embodiments, both sugars bonded to a natural phosphate linkage is independently a modified sugar as described herein.

[0628] In some embodiments, an oligonucleotide comprises a first domain as described herein (e.g., a first domain in which multiple or a majority of or all of sugars are 2′-F modified sugars) and a second domain as described herein (e.g., a second domain in which multiple or a majority of or all of sugars are non-2′-F modified sugars (e.g., 2′-OMe modified sugars)). In some embodiments, a first domain is at the 5′ side of a second domain (e.g., various oligonucleotides in (a), FIG. 2). In some embodiments, a first domain is at the 3′ side of a second domain (e.g., various oligonucleotides in (b), FIG. 2). In some embodiments, when a first domain is at the 3′ side of a second domain (e.g., various oligonucleotides in (b), FIG. 2), there is at least 1, 2, 3, 4, 5, 6, 7, 8, 9, or 10 or more (e.g., 1-20, 2-20, 3-20, 4-20, 5-20, 6-20, 7-20, 7-11, etc.) 5′-side nucleosides of a nucleoside opposite to a target adenosine. In some embodiments, there are at least 3. In some embodiments, there are at least 4. In some embodiments, there are at least 5. In some embodiments, there are at least 6. In some embodiments, there are at least 7. In some embodiments, there are at least 8. In some embodiments, there are at least 9. In some embodiments, there are at least 10. In some embodiments, there are 3. In some embodiments, there are 4. In some embodiments, there are 5. In some embodiments, there are 6. In some embodiments, there are 7. In some embodiments, there are 8. In some embodiments, there are 9. In some embodiments, there are 10. In some embodiments, there are 11. In some embodiments, there are 7-11. In some embodiments, there are 9-11. In some embodiments, there are 10 or 11. In some embodiments, additionally or alternatively, there are at least 15, 16, 17, 18, 19, 20 or more (e.g., 15-30, 16-30, 17-30, 18-30, 18-25, 18-22, etc.) 5′-side nucleosides of a nucleoside opposite to a target adenosine. In some embodiments, there are at least 15. In some embodiments, there are at least 16. In some embodiments, there are at least 17. In some embodiments, there are at least 18. In some embodiments, as described above, there are at least about 5 (e.g., 5-50, 5-40, 5-30, 5-20, 5-10, 5-9, 5, 6, 7, 8, 9, or 10, etc.) 3′-side nucleosides and at least about 15 (e.g., 15-50, 15-40, 15-30, 15-20, 20-30, 20-25, 15, 16, 17, 18, 19, 20, 21, 22, 23, 24, 25, 26, 27, 28, 29 or 30, etc.) 5′-side nucleosides. In some embodiments, independently about 1-10 (e.g., 2-10, 3-10, 3-5, 1, 2, 3, 4, 5, 6, 7, 8, 9, or 10) bicyclic or 2′-OR modified sugars are independently on the 5′-, or 3′-, or both sides of an editing region (e.g., N₁N₀N₋₁), wherein R is optionally substituted C₁₋₆ aliphatic. In some embodiments, independently about 1-10 (e.g., 2-10, 3-10, 3-5, 1, 2, 3, 4, 5, 6, 7, 8, 9, or 10) 2′-OR modified sugars are independently on the 5′-, or 3′-, or both sides of an editing region, wherein R is optionally substituted C₁₋₆ aliphatic. In some embodiments, independently about 1-10 (e.g., 2-10, 3-10, 3-5, 1, 2, 3, 4, 5, 6, 7, 8, 9, or 10) 2′-OMe modified sugars are independently on the 5′-, or 3′-, or both sides of an editing region. In some embodiments, they are on the 5′ side. In some embodiments, they are on the 3′ sides. In some embodiments, they are on both sides. In some embodiments, it is beneficial that surrounding an editing region, e.g., N₁N₀N₋₁, there are bicyclic or 2′-OR modified sugars, e.g., independently about 1-10 (e.g., 2-10, 3-10, 3-5, 1, 2, 3, 4, 5, 6, 7, 8, 9, or 10), on both sides, wherein R is optionally substituted C₁₋₆ aliphatic. In some embodiments, it is beneficial that surrounding an editing region, e.g., N₁N₀N₋₁, there are 2′-OR modified sugars, e.g., independently about 1-10 (e.g., 2-10, 3-10, 3-5, 1, 2, 3, 4, 5, 6, 7, 8, 9, or 10), on both sides, wherein R is optionally substituted C₁₋₆ aliphatic. In some embodiments, on each side there are at least 2. In some embodiments, each 2′-OR modified sugar is a 2′-OMe modified sugar. In some embodiments, each 2′-OR modified sugar is a 2′-MOE modified sugar. Certain examples are described in FIG. 2 ((a) and/or (b)) and FIG. 3.

[0629] One of the many advantages of provided technologies is that much shorter oligonucleotides compared to traditional technologies of others can provide comparable or higher levels of adenosine editing. Those skilled in the art reading the present disclosure will appreciate that longer oligonucleotides (e.g., extending 5′ side, 3′ side or both sides of a target adenosine) incorporating one or more structural elements (e.g., sugar modifications, nucleobase modifications, internucleotidic linkage modifications, stereochemistry, and/or patterns thereof) of oligonucleotides of the present disclosure (e.g., those described in FIG. 2) may also be useful, e.g., for various uses described herein including adenine editing and prevention and/or treatment of conditions, disorders or diseases which can benefit editing of target adenosines.

[0630] In some embodiments, ADAR1 p150 may tolerate variations of lengths of 5′-sides and/or 3′-sides and/or positioning of nucleosides opposite to target adenosines more than ADAR1 p110. In some embodiments, the present disclosure provides particularly useful lengths of 5′-sides and/or 3′-sides and/or positioning of nucleosides opposite to target adenosines for editing (e.g., by ADAR1 p110 and/or ADAR1 p150). In some embodiments, certain useful lengths of 5′-sides and/or 3′-sides and/or positioning of nucleosides (e.g., of those oligonucleotides that provide editing, such as WV-12027, WV-42028, WV-42029, WV-42030, WV-42032, and WV-420333; in some embodiments, of WV-42027; in some embodiments, of WV-42028; in some embodiments, of WV-42029; in some embodiments, of WV-42030; in some embodiments, of WV-42031) are useful for editing in cells expressing ADAR1, e.g., ADAR1 p110 and/or p150.

[0631] In some embodiments, each phosphorothioate bonded to a nucleoside opposite to a target adenosine is independently a phosphorothioate internucleotidic linkage. In some embodiments, the internucleotidic linkage between N₀ and N₋₁ is a Rp phosphorothioate internucleotidic linkage. In some embodiments, the internucleotidic linkage between N₋₁ and N₋₂ is a Rp phosphorothioate internucleotidic linkage.

[0632] In some embodiments, the present disclosure provides oligonucleotides comprising editing regions that can provide high editing efficiency. In some embodiments, a provided editing region is or comprises 5′-N₁N₀N₋₁-3′ as described herein.

[0633] In some embodiments, the present disclosure provides oligonucleotides comprising 5′-N₁N₀N₋₁-3′ as described herein.

[0634] In some embodiments, N₀ is as described herein. In some embodiments, N₀ comprises a sugar and a nucleobase as described herein. In some embodiments, N₀ has a natural DNA sugar. In some embodiments, N₀ has a natural RNA sugar. In some embodiments, N₀ has a modified sugar, e.g., a 2′-F modified sugar. In some embodiments, sugar of a nucleobase opposite to a target adenosine, or N₀, is arabinofuranose. In some embodiments, sugar of a nucleobase opposite to a target adenosine, or N₀, is

[chemical structure]

wherein C1′ bonds to a nucleobase as described herein. In some embodiments, N₀ has a natural nucleobase. In some embodiments, nucleobase of N₀ is C. In some embodiments, nucleobase of N₀ is b001A. In some embodiments, N₀ is deoxycytidine. In some embodiments, N₀ is cytidine. In some embodiments, N₀ is 2′-F C (wherein 2′-OH of cytidine is replaced with —F). In some embodiments, N₀ is b001A. In some embodiments, N₀ is Csm15. In some embodiments, N₀ is b001rA. In some embodiments, N₀ is b008U. In some embodiments, nucleobase of N₀ is not T or U. In some embodiments, nucleobase of N₀ is not T. In some embodiments, nucleobase of N₀ is not U. In some embodiments, N₀ is not a match to A.

[0635] In some embodiments, nucleobase of N₁ is U, and nucleobase of N₋₁ is hypoxanthine. In some embodiments, N₁ is 2′-F U, and N₋₁ is deoxyinosine. In some embodiments, nucleobase of N₀ is as described herein such as cytosine, b001A, b008U, etc. In some embodiments, N₀ is as described herein such as deoxycytidine, b001A, Csm15, b001rA, b008U, etc. In some embodiments, N₀ is deoxycytidine. In some embodiments, N₀ is b001A. In some embodiments, N₀ is Csm15. In some embodiments, N₀ is b001rA. In some embodiments, N₀ is b008U. In some embodiments, such 5′-N₁N₀N₋₁-3′ are particularly useful for targeting RNA comprising 5′-CAA-3′ for editing a target adenosine A.

[0636] In some embodiments, nucleobase of N₁ is T, and nucleobase of N₋₁ is hypoxanthine. In some embodiments, N₁ is thymidine, and N₋₁ is deoxyinosine. In some embodiments, nucleobase of N₀ is as described herein such as cytosine, b001A, b008U, etc. In some embodiments, N₀ is as described herein such as deoxycytidine, b001A, Csm15, b001rA, b008U, etc. In some embodiments, N₀ is deoxycytidine. In some embodiments, N₀ is b001A. In some embodiments, N₀ is Csm15. In some embodiments, N₀ is b001rA. In some embodiments, N₀ is b008U. In some embodiments, such 5′-N₁N₀N₋₁-3′ are particularly useful for targeting RNA comprising 5′-CAA-3′ for editing a target adenosine A.

[0637] In some embodiments, nucleobase of N₁ is C, and nucleobase of N₋₁ is hypoxanthine. In some embodiments, N₁ is 2′-F C, and N₋₁ is deoxyinosine. In some embodiments, nucleobase of N₀ is as described herein such as cytosine, b001A, b008U, etc. In some embodiments, N₀ is as described herein such as deoxycytidine, b001A, Csm15, b001rA, b008U, etc. In some embodiments, N₀ is deoxycytidine. In some embodiments, N₀ is b001A. In some embodiments, N₀ is Csm15. In some embodiments, N₀ is b001rA. In some embodiments, N₀ is b008U. In some embodiments, such 5′-N₁N₀N₋₁-3′ are particularly useful for targeting RNA comprising 5′-CAA-3′ for editing a target adenosine A.

[0638] In some embodiments, nucleobase of N₁ is U, and nucleobase of N₋₁ is guanine. In some embodiments, N₁ is 2′-F U, and N₋₁ is deoxyguanosine. In some embodiments, nucleobase of N₀ is as described herein such as cytosine, b001A, b008U, etc. In some embodiments, N₀ is as described herein such as deoxycytidine, b001A, Csm15, b001rA, b008U, etc. In some embodiments, N₀ is deoxycytidine. In some embodiments, N₀ is b001A. In some embodiments, N₀ is Csm15. In some embodiments, N₀ is b001rA. In some embodiments, N₀ is b008U. In some embodiments, such 5′-N₁N₀N₋₁-3′ are particularly useful for targeting RNA comprising 5′-CAA-3′ for editing a target adenosine A. In some embodiments, there are 6 or at least 6 nucleosides to the 3′ side of N₀ (e.g., when there are 6, N₋₁ to N₋₆).

[0639] In some embodiments, nucleobase of N₁ is C, and nucleobase of N₋₁ is guanine. In some embodiments, N₁ is 2′-F C, and N₋₁ is deoxyguanosine. In some embodiments, nucleobase of N₀ is as described herein such as cytosine, b001A, b008U, etc. In some embodiments, N₀ is as described herein such as deoxycytidine, b001A, Csm15, b001rA, b008U, etc. In some embodiments, N₀ is deoxycytidine. In some embodiments, N₀ is b001A. In some embodiments, N₀ is Csm15. In some embodiments, N₀ is b001rA. In some embodiments, N₀ is b008U. In some embodiments, such 5′-N₁N₀N₋₁-3′ are particularly useful for targeting RNA comprising 5′-CAA-3′ for editing a target adenosine A. In some embodiments, there are 6 or at least 6 nucleosides to the 3′ side of N₀ (e.g., when there are 6, N₋₁ to N₋₆).

[0640] In some embodiments, nucleobase of N₁ is U, and nucleobase of N₋₁ is hypoxanthine. In some embodiments, N₁ is 2′-F U, and N₋₁ is deoxyinosine. In some embodiments, nucleobase of N₁ is C, and nucleobase of N₋₁ is hypoxanthine. In some embodiments, N₁ is 2′-F C, and N₋₁ is deoxyinosine. In some embodiments, nucleobase of N₁ is U, and nucleobase of N₋₁ is G. In some embodiments, N₁ is 2′-F U, and N₋₁ is dG. In some embodiments, nucleobase of N₁ is C, and nucleobase of N₋₁ is G. In some embodiments, N₁ is 2′-F C, and N₋₁ is dG. In some embodiments, nucleobase of N₁ is G, and nucleobase of N₋₁ is hypoxanthine. In some embodiments, N₁ is 2′-F G, and N₋₁ is deoxyinosine. In some embodiments, nucleobase of N₀ is as described herein such as cytosine, b001A, b008U, etc. In some embodiments, N₀ is as described herein such as deoxycytidine, b001A, Csm15, b001rA, b008U, etc. In some embodiments, N₀ is deoxycytidine. In some embodiments, N₀ is b001A. In some embodiments, N₀ is Csm15. In some embodiments, N₀ is b001rA. In some embodiments, N₀ is b008U. In some embodiments, such 5′-N₁N₀N₋₁-3′ are particularly useful for targeting RNA comprising 5′-CAA-3′ for editing a target adenosine A.

[0641] In some embodiments, nucleobase of N₁ is U, and nucleobase of N₋₁ is T. In some embodiments, N₁ is 2′-F U, and N₋₁ is dT. In some embodiments, nucleobase of N₁ is C, and nucleobase of N₋₁ is thymine. In some embodiments, N₁ is 2′-F C, and N⁻¹ is dT. In some embodiments, nucleobase of N₁ is U, and nucleobase of N₋₁ is hypoxanthine. In some embodiments, N₁ is 2′-F U, and N₋₁ is deoxyinosine. In some embodiments, nucleobase of N₁ is U, and nucleobase of N₋₁ is G. In some embodiments, N₁ is 2′-F U, and N₋₁ is dG. In some embodiments, nucleobase of N₁ is C, and nucleobase of N₋₁ is hypoxanthine. In some embodiments, N₁ is 2′-F U, and N₋₁ is deoxyinosine. In some embodiments, N₀ is as described herein such as deoxycytidine, b001A, Csm15, b001rA, b008U, etc. In some embodiments, N₀ is deoxycytidine. In some embodiments, N₀ is b001A. In some embodiments, N₀ is Csm15. In some embodiments, N₀ is b001rA. In some embodiments, N₀ is b008U. In some embodiments, such 5′-N₁N₀N₋₁-3′ are particularly useful for targeting RNA comprising 5′-AAA-3′ for editing a target adenosine A.

[0642] In some embodiments, nucleobase of N₁ is A, and nucleobase of N₋₁ is T. In some embodiments, N₁ is 2′-F A, and N₋₁ is dT. In some embodiments, nucleobase of N₁ is G, and nucleobase of N₋₁ is T. In some embodiments, N₁ is 2′-F G, and N₋₁ is dT. In some embodiments, nucleobase of N₁ is A, and nucleobase of N₋₁ is hypoxanthine. In some embodiments, N₁ is 2′-F A, and N₋₁ is deoxyinosine. In some embodiments, nucleobase of N₁ is A, and nucleobase of N₋₁ is G. In some embodiments, N₁ is 2′-F A, and N₋₁ is dG. In some embodiments, nucleobase of N₁ is A, and nucleobase of N₋₁ is C. In some embodiments, N₁ is 2′-F A, and N₋₁ is dC. In some embodiments, N₀ is as described herein such as deoxycytidine, b001A, Csm15, b001rA, b008U, etc. In some embodiments, N₀ is deoxycytidine. In some embodiments, N₀ is b001A. In some embodiments, N₀ is Csm15. In some embodiments, N₀ is b001rA. In some embodiments, N₀ is b008U. In some embodiments, such 5′-N₁N₀N₋₁-3′ are particularly useful for targeting RNA comprising 5′-AAU-3′ for editing a target adenosine A.

[0643] In some embodiments, nucleobase of N₁ is U, and nucleobase of N₋₁ is T. In some embodiments, N₁ is 2′-F U, and N₋₁ is dT. In some embodiments, nucleobase of N₁ is C, and nucleobase of N₋₁ is T. In some embodiments, N₁ is 2′-F C, and N₋₁ is dT. In some embodiments, nucleobase of N₁ is C, and nucleobase of N₋₁ is A. In some embodiments, N₁ is 2′-F C, and N₋₁ is dA. In some embodiments, nucleobase of N₁ is C, and nucleobase of N₋₁ is C. In some embodiments, N₁ is 2′-F C, and N₋₁ is dC. In some embodiments, nucleobase of N₁ is U, and nucleobase of N₋₁ is hypoxanthine. In some embodiments, N₁ is 2′-F U, and N₋₁ is deoxyinosine. In some embodiments, nucleobase of N₁ is C, and nucleobase of N₋₁ is hypoxanthine. In some embodiments, N₁ is 2′-F C, and N₋₁ is deoxyinosine. In some embodiments, nucleobase of N₁ is C, and nucleobase of N₋₁ is G. In some embodiments, N₁ is 2′-F C, and N₋₁ is dG. In some embodiments, nucleobase of N₁ is U, and nucleobase of N₋₁ is G. In some embodiments, N₁ is 2′-F U, and N₋₁ is dG. In some embodiments, N₀ is as described herein such as deoxycytidine, b001A, Csm15, b001rA, b008U, etc. In some embodiments, N₀ is deoxycytidine. In some embodiments, N₀ is b001A. In some embodiments, N₀ is Csm15. In some embodiments, N₀ is b001rA. In some embodiments, N₀ is b008U. In some embodiments, such 5′-N₁N₀N₋₁-3′ are particularly useful for targeting RNA comprising 5′-AAG-3′ for editing a target adenosine A.

[0644] In some embodiments, nucleobase of N₁ is G, and nucleobase of N₋₁ is T. In some embodiments, N₁ is 2′-F G, and N₋₁ is dT. In some embodiments, nucleobase of N₁ is G, and nucleobase of N₋₁ is A. In some embodiments, N₁ is 2′-F G, and N₋₁ is dA. In some embodiments, nucleobase of N₁ is G, and nucleobase of N₋₁ is C. In some embodiments, N₁ is 2′-F G, and N₋₁ is dC. In some embodiments, nucleobase of N₁ is G, and nucleobase of N₋₁ is hypoxanthine. In some embodiments, N₁ is 2′-F G, and N₋₁ is deoxyinosine. In some embodiments, nucleobase of N₁ is G, and nucleobase of N₋₁ is G. In some embodiments, N₁ is 2′-F G, and N₋₁ is dG. In some embodiments, N₀ is as described herein such as deoxycytidine, b001A, Csm15, b001rA, b008U, etc. In some embodiments, N₀ is deoxycytidine. In some embodiments, N₀ is b001A. In some embodiments, N₀ is Csm15. In some embodiments, N₀ is b001rA. In some embodiments, N₀ is b008U. In some embodiments, such 5′-N₁N₀N₋₁-3′ are particularly useful for targeting RNA comprising 5′-AAC-3′ for editing a target adenosine A.

[0645] In some embodiments, nucleobase of N₁ is U, and nucleobase of N₋₁ is A. In some embodiments, N₁ is 2′-F U, and N₋₁ is dA. In some embodiments, nucleobase of N₁ is C, and nucleobase of N₋₁ is A. In some embodiments, N₁ is 2′-F C, and N₋₁ is dA. In some embodiments, nucleobase of N₁ is A, and nucleobase of N₋₁ is A. In some embodiments, N₁ is 2′-F A, and N₋₁ is dA. In some embodiments, nucleobase of N₁ is G, and nucleobase of N₋₁ is A. In some embodiments, N₁ is 2′-F G, and N₋₁ is dA. In some embodiments, nucleobase of N₁ is U, and nucleobase of N₋₁ is hypoxanthine. In some embodiments, N₁ is 2′-F U, and N₋₁ is deoxyinosine. In some embodiments, nucleobase of N₁ is C, and nucleobase of N₋₁ is hypoxanthine. In some embodiments, N₁ is 2′-F C, and N₋₁ is deoxyinosine. In some embodiments, N₀ is as described herein such as deoxycytidine, b001A, Csm15, b001rA, b008U, etc. In some embodiments, N₀ is deoxycytidine. In some embodiments, N₀ is b001A. In some embodiments, N₀ is Csm15. In some embodiments, N₀ is b001rA. In some embodiments, N₀ is b008U. In some embodiments, such 5′-N₁N₀N₋₁-3′ are particularly useful for targeting RNA comprising 5′-UAA-3′ for editing a target adenosine A.

[0646] In some embodiments, nucleobase of N₁ is A, and nucleobase of N₋₁ is A. In some embodiments, N₁ is 2′-F A, and N₋₁ is dA. In some embodiments, nucleobase of N₁ is G, and nucleobase of N₋₁ is A. In some embodiments, N₁ is 2′-F G, and N₋₁ is dA. In some embodiments, nucleobase of N₁ is C, and nucleobase of N₋₁ is A. In some embodiments, N₁ is 2′-F C, and N₋₁ is dA. In some embodiments, nucleobase of N₁ is U, and nucleobase of N₋₁ is A. In some embodiments, N₁ is 2′-F U, and N₋₁ is dA. In some embodiments, nucleobase of N₁ is A, and nucleobase of N₋₁ is hypoxanthine. In some embodiments, N₁ is 2′-F A, and N₋₁ is deoxyinosine. In some embodiments, nucleobase of N₁ is G, and nucleobase of N₋₁ is hypoxanthine. In some embodiments, N₁ is 2′-F G, and N₋₁ is deoxyinosine. In some embodiments, N₀ is as described herein such as deoxycytidine, b001A, Csm15, b001rA, b008U, etc. In some embodiments, N₀ is deoxycytidine. In some embodiments, N₀ is b001A. In some embodiments, N₀ is Csm15. In some embodiments, N₀ is b001rA. In some embodiments, N₀ is b008U. In some embodiments, such 5′-N₁N₀N₋₁-3′ are particularly useful for targeting RNA comprising 5′-UAU-3′ for editing a target adenosine A.

[0647] In some embodiments, nucleobase of N₁ is C, and nucleobase of N₋₁ is A. In some embodiments, N₁ is 2′-F C, and N₋₁ is dA. In some embodiments, nucleobase of N₁ is U, and nucleobase of N₋₁ is A. In some embodiments, N₁ is 2′-F U, and N₋₁ is dA. In some embodiments, nucleobase of N₁ is C, and nucleobase of N₋₁ is T. In some embodiments, N₁ is 2′-F C, and N₋₁ is dT. In some embodiments, nucleobase of N₁ is A, and nucleobase of N₋₁ is A. In some embodiments, N₁ is 2′-F A, and N₋₁ is dA. In some embodiments, nucleobase of N₁ is G, and nucleobase of N₋₁ is A. In some embodiments, N₁ is 2′-F G, and N₋₁ is dA. In some embodiments, nucleobase of N₁ is C, and nucleobase of N₋₁ is C. In some embodiments, N₁ is 2′-F C, and N₋₁ is dC. In some embodiments, nucleobase of N₁ is U, and nucleobase of N₋₁ is hypoxanthine. In some embodiments, N₁ is 2′-F U, and N₋₁ is deoxyinosine. In some embodiments, nucleobase of N₁ is C, and nucleobase of N₋₁ is hypoxanthine. In some embodiments, N₁ is 2′-F C, and N₋₁ is deoxyinosine. In some embodiments, nucleobase of N₁ is C, and nucleobase of N₋₁ is G. In some embodiments, N₁ is 2′-F C, and N₋₁ is dG. In some embodiments, N₀ is as described herein such as deoxycytidine, b001A, Csm15, b001rA, b008U, etc. In some embodiments, N₀ is deoxycytidine. In some embodiments, N₀ is b001A. In some embodiments, N₀ is Csm15. In some embodiments, N₀ is b001rA. In some embodiments, N₀ is b008U. In some embodiments, such 5′-N₁N₀N₋₁-3′ are particularly useful for targeting RNA comprising 5′-UAG-3′ for editing a target adenosine A.

[0648] In some embodiments, nucleobase of N₁ is G, and nucleobase of N₋₁ is T. In some embodiments, N₁ is 2′-F G, and N₋₁ is dT. In some embodiments, nucleobase of N₁ is U, and nucleobase of N₋₁ is A. In some embodiments, N₁ is 2′-F U, and N₋₁ is dA. In some embodiments, nucleobase of N₁ is A, and nucleobase of N₋₁ is A. In some embodiments, N₁ is 2′-F A, and N₋₁ is dA. In some embodiments, nucleobase of N₁ is C, and nucleobase of N₋₁ is A. In some embodiments, N₁ is 2′-F C, and N₋₁ is dA. In some embodiments, nucleobase of N₁ is G, and nucleobase of N₋₁ is A. In some embodiments, N₁ is 2′-F G, and N₋₁ is dA. In some embodiments, nucleobase of N₁ is G, and nucleobase of N₋₁ is C. In some embodiments, N₁ is 2′-F G, and N₋₁ is dC. In some embodiments, nucleobase of N₁ is G, and nucleobase of N₋₁ is hypoxanthine. In some embodiments, N₁ is 2′-F G, and N₋₁ is deoxyinosine. In some embodiments, nucleobase of N₁ is G, and nucleobase of N₋₁ is G. In some embodiments, N₁ is 2′-F G, and N₋₁ is dG. In some embodiments, N₀ is as described herein such as deoxycytidine, b001A, Csm15, b001rA, b008U, etc. In some embodiments, N₀ is deoxycytidine. In some embodiments, N₀ is b001A. In some embodiments, N₀ is Csm15. In some embodiments, N₀ is b001rA. In some embodiments, N₀ is b008U. In some embodiments, such 5′-N₁N₀N₋₁-3′ are particularly useful for targeting RNA comprising 5′-UAC-3′ for editing a target adenosine A.

[0649] In some embodiments, nucleobase of N₁ is C, and nucleobase of N₋₁ is C. In some embodiments, N₁ is 2′-F C, and N₋₁ is dC. In some embodiments, nucleobase of N₁ is U, and nucleobase of N₋₁ is hypoxanthine. In some embodiments, N₁ is 2′-F U, and N₋₁ is deoxyinosine. In some embodiments, nucleobase of N₁ is C, and nucleobase of N₋₁ is hypoxanthine. In some embodiments, N₁ is 2′-F C, and N₋₁ is deoxyinosine. In some embodiments, nucleobase of N₁ is U, and nucleobase of N₋₁ is G. In some embodiments, N₁ is 2′-F U, and N₋₁ is dG. In some embodiments, nucleobase of N₁ is C, and nucleobase of N₋₁ is G. In some embodiments, N₁ is 2′-F C, and N₋₁ is dG. In some embodiments, N₀ is as described herein such as deoxycytidine, b001A, Csm15, b001rA, b008U, etc. In some embodiments, N₀ is deoxycytidine. In some embodiments, N₀ is b001A. In some embodiments, N₀ is Csm15. In some embodiments, N₀ is b001rA. In some embodiments, N₀ is b008U. In some embodiments, such 5′-N₁N₀N₋₁-3′ are particularly useful for targeting RNA comprising 5′-GAA-3′ for editing a target adenosine A.

[0650] In some embodiments, nucleobase of N₁ is A, and nucleobase of N₋₁ is hypoxanthine. In some embodiments, N₁ is 2′-F A, and N₋₁ is deoxyinosine. In some embodiments, nucleobase of N₁ is G, and nucleobase of N₋₁ is hypoxanthine. In some embodiments, N₁ is 2′-F G, and N₋₁ is deoxyinosine. In some embodiments, nucleobase of N₁ is A, and nucleobase of N₋₁ is G. In some embodiments, N₁ is 2′-F A, and N₋₁ is dG. In some embodiments, nucleobase of N₁ is G, and nucleobase of N₋₁ is G. In some embodiments, N₁ is 2′-F G, and N₋₁ is dG. In some embodiments, nucleobase of N₁ is A, and nucleobase of N₋₁ is A. In some embodiments, N₁ is 2′-F A, and N₋₁ is dA. In some embodiments, N₀ is as described herein such as deoxycytidine, b001A, Csm15, b001rA, b008U, etc. In some embodiments, N₀ is deoxycytidine. In some embodiments, N₀ is b001A. In some embodiments, N₀ is Csm15. In some embodiments, N₀ is b001rA. In some embodiments, N₀ is b008U. In some embodiments, such 5′-N₁N₀N₋₁-3′ are particularly useful for targeting RNA comprising 5′-GAU-3′ for editing a target adenosine A.

[0651] In some embodiments, nucleobase of N₁ is C, and nucleobase of N₋₁ is T. In some embodiments, N₁ is 2′-F C, and N₋₁ is dT. In some embodiments, nucleobase of N₁ is C, and nucleobase of N₋₁ is A. In some embodiments, N₁ is 2′-F C, and N₋₁ is dA. In some embodiments, nucleobase of N₁ is C, and nucleobase of N₋₁ is C. In some embodiments, N₁ is 2′-F C, and N₋₁ is dC. In some embodiments, nucleobase of N₁ is C, and nucleobase of N₋₁ is hypoxanthine. In some embodiments, N₁ is 2′-F C, and N₋₁ is deoxyinosine. In some embodiments, nucleobase of N₁ is U, and nucleobase of N₋₁ is G. In some embodiments, N₁ is 2′-F U, and N₋₁ is dG. In some embodiments, nucleobase of N₁ is C, and nucleobase of N₋₁ is G. In some embodiments, N₁ is 2′-F C, and N₋₁ is dG. In some embodiments, N₀ is as described herein such as deoxycytidine, b001A, Csm15, b001rA, b008U, etc. In some embodiments, N₀ is deoxycytidine. In some embodiments, N₀ is b001A. In some embodiments, N₀ is Csm15. In some embodiments, N₀ is b001rA. In some embodiments, N₀ is b008U. In some embodiments, such 5′-N₁N₀N₋₁-3′ are particularly useful for targeting RNA comprising 5′-GAG-3′ for editing a target adenosine A.

[0652] In some embodiments, nucleobase of N₁ is G, and nucleobase of N₋₁ is A. In some embodiments, N₁ is 2′-F G, and N₋₁ is dA. In some embodiments, nucleobase of N₁ is G, and nucleobase of N₋₁ is hypoxanthine. In some embodiments, N₁ is 2′-F G, and N₋₁ is deoxyinosine. In some embodiments, nucleobase of N₁ is G, and nucleobase of N₋₁ is G. In some embodiments, N₁ is 2′-F G, and N₋₁ is dG. In some embodiments, nucleobase of N₁ is G, and nucleobase of N₋₁ is T. In some embodiments, N₁ is 2′-F G, and N₋₁ is dT. In some embodiments, nucleobase of N₁ is G, and nucleobase of N₋₁ is C. In some embodiments, N₁ is 2′-F G, and N₋₁ is dC. In some embodiments, N₀ is as described herein such as deoxycytidine, b001A, Csm15, b001rA, b008U, etc. In some embodiments, N₀ is deoxycytidine. In some embodiments, N₀ is b001A. In some embodiments, N₀ is Csm15. In some embodiments, N₀ is b001rA. In some embodiments, N₀ is b008U. In some embodiments, such 5′-N₁N₀N₋₁-3′ are particularly useful for targeting RNA comprising 5′-GAC-3′ for editing a target adenosine A.

[0653] In some embodiments, nucleobase of N₁ is U, and nucleobase of N₋₁ is hypoxanthine. In some embodiments, N₁ is 2′-F U, and N₋₁ is deoxyinosine. In some embodiments, nucleobase of N₁ is A, and nucleobase of N₋₁ is hypoxanthine. In some embodiments, N₁ is 2′-F A, and N₋₁ is deoxyinosine. In some embodiments, nucleobase of N₁ is A, and nucleobase of N₋₁ is G. In some embodiments, N₁ is 2′-F A, and N₋₁ is dG. In some embodiments, nucleobase of N₁ is G, and nucleobase of N₋₁ is hypoxanthine. In some embodiments, N₁ is 2′-F G, and N₋₁ is deoxyinosine. In some embodiments, nucleobase of N₁ is C, and nucleobase of N₋₁ is hypoxanthine. In some embodiments, N₁ is 2′-F C, and N₋₁ is deoxyinosine. In some embodiments, N₀ is as described herein such as deoxycytidine, b001A, Csm15, b001rA, b008U, etc. In some embodiments, N₀ is deoxycytidine. In some embodiments, N₀ is b001A. In some embodiments, N₀ is Csm15. In some embodiments, N₀ is b001rA. In some embodiments, N₀ is b008U. In some embodiments, such 5′-N₁N₀N₋₁-3′ are particularly useful for targeting RNA comprising 5′-CAU-3′ for editing a target adenosine A.

[0654] In some embodiments, nucleobase of N₁ is U, and nucleobase of N₋₁ is hypoxanthine. In some embodiments, N₁ is 2′-F U, and N₋₁ is deoxyinosine. In some embodiments, nucleobase of N₁ is C, and nucleobase of N₋₁ is hypoxanthine. In some embodiments, N₁ is 2′-F C, and N₋₁ is deoxyinosine. In some embodiments, nucleobase of N₁ is G, and nucleobase of N₋₁ is hypoxanthine. In some embodiments, N₁ is 2′-F G, and N₋₁ is deoxyinosine. In some embodiments, nucleobase of N₁ is A, and nucleobase of N₋₁ is hypoxanthine. In some embodiments, N₁ is 2′-F A, and N₋₁ is deoxyinosine. In some embodiments, nucleobase of N₁ is U, and nucleobase of N₋₁ is G. In some embodiments, N₁ is 2′-F U, and N₋₁ is dG. In some embodiments, nucleobase of N₁ is C, and nucleobase of N₋₁ is G. In some embodiments, N₁ is 2′-F C, and N₋₁ is dG. In some embodiments, nucleobase of N₁ is G, and nucleobase of N₋₁ is G. In some embodiments, N₁ is 2′-F G, and N₋₁ is dG. In some embodiments, N₀ is as described herein such as deoxycytidine, b001A, Csm15, b001rA, b008U, etc. In some embodiments, N₀ is deoxycytidine. In some embodiments, N₀ is b001A. In some embodiments, N₀ is Csm15. In some embodiments, N₀ is b001rA. In some embodiments, N₀ is b008U. In some embodiments, such 5′-N₁N₀N₋₁-3′ are particularly useful for targeting RNA comprising 5′-CAG-3′ for editing a target adenosine A.

[0655] In some embodiments, nucleobase of N₁ is A, and nucleobase of N₋₁ is hypoxanthine. In some embodiments, N₁ is 2′-F A, and N₋₁ is deoxyinosine. In some embodiments, nucleobase of N₁ is G, and nucleobase of N₋₁ is hypoxanthine. In some embodiments, N₁ is 2′-F G, and N₋₁ is deoxyinosine. In some embodiments, nucleobase of N₁ is G, and nucleobase of N₋₁ is G. In some embodiments, N₁ is 2′-F G, and N₋₁ is dG. In some embodiments, nucleobase of N₁ is U, and nucleobase of N₋₁ is hypoxanthine. In some embodiments, N₁ is 2′-F U, and N₋₁ is deoxyinosine. In some embodiments, N₀ is as described herein such as deoxycytidine, b001A, Csm15, b001rA, b008U, etc. In some embodiments, N₀ is deoxycytidine. In some embodiments, N₀ is b001A. In some embodiments, N₀ is Csm15. In some embodiments, N₀ is b001rA. In some embodiments, N₀ is b008U. In some embodiments, such 5′-N₁N₀N₋₁-3′ are particularly useful for targeting RNA comprising 5′-CAC-3′ for editing a target adenosine A.

[0656] In some embodiments, nucleobase of N₁ is U, and nucleobase of N₋₁ is A. In some embodiments, N₁ is 2′-F U, and N₋₁ is dA. In some embodiments, nucleobase of N₁ is C, and nucleobase of N₋₁ is A. In some embodiments, N₁ is 2′-F C, and N₋₁ is dA. In some embodiments, nucleobase of N₁ is G, and nucleobase of N₋₁ is A. In some embodiments, N₁ is 2′-F G, and N₋₁ is dA. In some embodiments, nucleobase of N₁ is C, and nucleobase of N₋₁ is hypoxanthine. In some embodiments, N₁ is 2′-F C, and N₋₁ is deoxyinosine. In some embodiments, nucleobase of N₁ is U, and nucleobase of N₋₁ is hypoxanthine. In some embodiments, N₁ is 2′-F U, and N₋₁ is deoxyinosine. In some embodiments, nucleobase of N₁ is A, and nucleobase of N₋₁ is A. In some embodiments, N₁ is 2′-F A, and N₋₁ is dA. In some embodiments, N₀ is b001rA. In some embodiments, N₀ is b008U. In some embodiments, such 5′-N₁N₀N₋₁-3′ are particularly useful for targeting RNA comprising 5′-UAG-3′ for editing a target adenosine A.

[0657] In some embodiments, nucleobase U may be replaced with T without lowering editing levels. In some embodiments, nucleobase U may be replaced with T to increase editing levels. In some embodiments, 2′-F U may be replaced with thymidine. See, for example, FIG. 19. In some embodiments, N₁ is thymidine. In some embodiments, N₁ is thymidine, N₀ is as described herein, e.g., b001A, b008U, etc. In some embodiments, N₁ is thymidine, N₀ is as described herein, e.g., b001A, b008U, etc., and N₋₁ is I.

[0658] In some embodiments, when being aligned to a target sequence and/or hybridized to a target nucleic acid, N₀ is a wobble or mismatch to A. In some embodiments, N₁ is not a match to its opposite nucleobase. In some embodiments, N₋₁ is not a match to its opposite nucleobase. In some embodiments, two of N₋₁, N₀ and N₁ are independently not a match to its opposite nucleobase. In some embodiments, N₀ and N₁ are independently not a match to its opposite nucleobase. In some embodiments, N₀ and N₋₁ are independently not a match to its opposite nucleobase. In some embodiments, when it is not a match, it is a wobble. In some embodiments, when it is not a match, it is a mismatch. In some embodiments, nucleobase of N₁ is C and its opposite nucleobase is A. In some embodiments, more nucleosides to the 3′ side of N₀ (e.g., 6 or more) may tolerate more mismatches/wobbles of 5′-N₁N₀N₋₁-3′.

[0659] In some embodiments, each internucleotidic linkage bonded to N₀ is independently Sp phosphorothioate internucleotidic linkages. In some embodiments, each internucleotidic linkage bonded to N₁ is independently Sp phosphorothioate internucleotidic linkages. In some embodiments, an internucleotidic linkage bonded to N₋₁ is a non-negatively charged internucleotidic linkage. In some embodiments, an internucleotidic linkage bonded to N₋₁ is a neutral internucleotidic linkage. In some embodiments, an internucleotidic linkage bonded to N₋₁ is a phosphoryl guanidine internucleotidic linkage. In some embodiments, an internucleotidic linkage bonded to N₋₁ is n001. In some embodiments, a phosphoryl guanidine internucleotidic linkage, e.g., n001, bonded to N₋₁ (e.g., to its position 3′) is chirally controlled and is Rp. In some embodiments, a phosphoryl guanidine internucleotidic linkage, e.g., n001, bonded to N₋₁ (e.g., to its position 3′) is chirally controlled and is Sp (e.g., in some embodiments, when N₋₁ is dI).

### Base Sequences

[0660] As appreciated by those skilled in the art, structural features of the present disclosure, such as nucleobase modification, sugar modifications, internucleotidic linkage modifications, linkage phosphorus stereochemistry, etc., and combinations thereof may be utilized with various suitable base sequences to provide oligonucleotides and compositions with desired properties and/or activities. For example, oligonucleotides for adenosine modification (e.g., conversion to I in the presence of ADAR proteins) typically have sequences that are sufficiently complementary to sequences of target nucleic acids that comprise target adenosines. Nucleosides opposite to target adenosines can be present at various positions of oligonucleotides. In some embodiments, one or more opposite nucleosides are in first domains. In some embodiments, one or more opposite nucleosides are in second domains. In some embodiments, one or more opposite nucleosides are in first subdomains. In some embodiments, one or more opposite nucleosides are in second subdomains. In some embodiments, one or more opposite nucleosides are in third subdomains. Oligonucleotide of the present disclosure may target one or more target adenosines. In some embodiments, one or more opposite nucleosides are each independently in a portion which has the structure features of a second subdomain, and each independently have one or more or all structural features of opposite nucleosides as described herein. In many embodiments, e.g., for targeting G to A mutations, oligonucleotides may selectively target one and only one target adenosine for modification, e.g., by ADAR to convert into I. In some embodiments, an opposite nucleoside is closer to the 3′-end than to the 5′-end of an oligonucleotide.

[0661] In some embodiments, an oligonucleotide has a base sequence described herein (e.g., in Tables) or a portion thereof (e.g., a span of 10-50, 10-40, 10-30, 10-20, or 10, 11, 12, 13, 14, 15, 16, 17, 18, 19, 20, or at least 10, at least 15, at least 20, at least 25 contiguous nucleobases) with 0-5 (e.g., 0, 1, 2, 3, 4 or 5) mismatches, wherein each T can be independently substituted with U and vice versa. In some embodiments, an oligonucleotide comprises a base sequence described herein, or a portion thereof, wherein a portion is a span of at least 10 contiguous nucleobases, or a span of at least 15 contiguous nucleobases with 0-5 mismatches. In some embodiments, provided oligonucleotides have a base sequence described herein, or a portion thereof, wherein a portion is a span of at least 10 contiguous nucleobases, or a span of at least 10 contiguous nucleobases with 1-5 mismatches, wherein each T can be independently substituted with U and vice versa.

[0662] In some embodiments, base sequences of oligonucleotides comprise or consist of 10-60 (e.g., about or at least 10, 11, 12, 13, 14, 15, 16, 17, 18, 19, 20, 21, 22, 23, 24, 25, 26, 27, 28, 29, 30, 31, 32, 33, 34, 35, 36, 37, 38, 39, 40, 45, 50, 55, 60; in some embodiments, at least 15; in some embodiments, at least 16; in some embodiments, at least 17; in some embodiments, at least 18; in some embodiments, at least 19; in some embodiments, at least 20; in some embodiments, at least 21; in some embodiments, at least 22; in some embodiments, at least 23; in some embodiments, at least 24; in some embodiments, at least 25; in some embodiments, at least 26; in some embodiments, at least 27; in some embodiments, at least 28; in some embodiments, at least 29; in some embodiments, at least 30; in some embodiments, at least 31; in some embodiments, at least 32; in some embodiments, at least 33; in some embodiments, at least 34; in some embodiments, at least 35) bases, optionally contiguous, of a base sequence that is identical or complementary to a base sequence of nucleic acid, e.g., a gene or a transcript (e.g., mRNA) thereof. In some embodiments, the base sequence of an oligonucleotide is or comprises a sequence that is complementary to a target sequence in a gene or a transcript thereof. In some embodiments, the sequence is 10, 11, 12, 13, 14, 15, 16, 17, 18, 19, 20, 21, 22, 23, 24, 25, 26, 27, 28, 29, 30, 31, 32, 33, 34, 35, 36, 37, 38, 39, 40, 45, 50, 55, 60 or more nucleobases in length.

[0663] In some embodiments, a target sequence is or comprises a characteristic sequence of a nucleic acid sequence (e.g., of an gene or a transcript thereof) in that it defines the nucleic acid sequence over others in a relevant organism; for example, a characteristic sequence is not in or has at least various mismatches from other genomic nucleic acid sequences (e.g., genes) or transcripts thereof in a relevant organism. In some embodiments, a characteristic sequence of a transcript defines that transcript over other transcripts in a relevant organism; for example, in some embodiments, a characteristic sequence is not in transcripts that are transcribed from a different nucleic acid sequence (e.g., a different gene). In some embodiments, transcript variants from a nucleic acid sequence (e.g., mRNA variants of a gene) may share a common characteristic sequence that defines them from, e.g., transcripts of other genes. In some embodiments, a characteristic sequence comprises a target adenosine. In some embodiments, an oligonucleotide selectively forms a duplex with a nucleic acid comprising a target adenosine, wherein the target adenosine is within the duplex region and can be modified by a protein such as ADAR1 or ADAR2.

[0664] Base sequences of provided oligonucleotides, as appreciated by those skilled in the art, typically have sufficient lengths and complementarity to their target nucleic acids, e.g., RNA transcripts (e.g., pre-mRNA, mature mRNA, etc.) for, e.g., site-directed editing of target adenosines. In some embodiments, an oligonucleotide is complementary to a portion of a target RNA sequence comprising a target adenosine (as appreciated by those skilled in the art, in many instances target nucleic acids are longer than oligonucleotides of the present disclosure, and complementarity may be properly assessed based on the shorter of the two, oligonucleotides). In some embodiments, the base sequence of an oligonucleotide has 90% or more identity with the base sequence of an oligonucleotide disclosed in a Table, wherein each T can be independently substituted with U and vice versa. In some embodiments, the base sequence of an oligonucleotide has 95% or more identity with the base sequence of an oligonucleotide disclosed in a Table, wherein each T can be independently substituted with U and vice versa. In some embodiments, the base sequence of an oligonucleotide comprises a continuous span of 15, 16, 17, 18, 19, 20, 21, 22, 23, 24, 25, 26, 27, 28, 29, 30, 31, 32, 33, 34, 35, 36, 37, 38, 39, 40 or more bases of an oligonucleotide disclosed in a Table, wherein each T can be independently substituted with U and vice versa, except that one or more bases within the span are abasic (e.g., a nucleobase is absent from a nucleotide).

[0665] In some embodiments, the present disclosure pertains to an oligonucleotide having a base sequence which comprises the base sequence of any oligonucleotide disclosed herein, wherein each T may be independently replaced with U and vice versa.

[0666] In some embodiments, the present disclosure pertains to an oligonucleotide having a base sequence which is the base sequence of any oligonucleotide disclosed herein, wherein each T may be independently replaced with U and vice versa.

[0667] In some embodiments, the present disclosure pertains to an oligonucleotide having a base sequence which comprises at least 15 contiguous bases of the base sequence of any oligonucleotide disclosed herein, wherein each T may be independently replaced with U and vice versa.

[0668] In some embodiments, the present disclosure pertains to an oligonucleotide having a base sequence which is at least 90% identical to the base sequence of any oligonucleotide disclosed herein, wherein each T may be independently replaced with U and vice versa.

[0669] In some embodiments, the present disclosure pertains to an oligonucleotide having a base sequence which is at least 95% identical to the base sequence of any oligonucleotide disclosed herein, wherein each T may be independently replaced with U and vice versa.

[0670] In some embodiments, a base sequence of an oligonucleotide is, comprises, or comprises 10-40, e.g., 15, 16, 17, 18, 19, 20, 21, 22, 23, 24, 25, 26, 27, 28, 29, 30, 31, 32, 33, 34, 35, 36, 37, 38, 39, 40 contiguous bases of the base sequence of any oligonucleotide describer herein, wherein each T may be independently replaced with U and vice versa.

[0671] In some embodiments, an oligonucleotide is an oligonucleotide presented in a Table herein.

[0672] In some embodiments, the base sequence of an oligonucleotide is complementary to that of a target nucleic acid, e.g., a portion comprising a target adenosine.

[0673] In some embodiments, an oligonucleotide has a base sequence which comprises at least 15 contiguous bases (e.g., 15, 16, 17, 18, 19, or 20) of an oligonucleotide in a Table, wherein each T can be independently substituted with U and vice versa.

[0674] In some embodiments, an oligonucleotide comprises a base sequence or portion thereof (e.g., a portion comprising 10-40, e.g., 15, 16, 17, 18, 19, 20, 21, 22, 23, 24, 25, 26, 27, 28, 29, 30, 31, 32, 33, 34, 35, 36, 37, 38, 39, 40 nucleobases) described in any of the Tables, wherein each T may be independently replaced with U and vice versa, and/or a sugar, nucleobase, and/or internucleotidic linkage modification and/or stereochemistry, and/or a pattern thereof described in any of the Tables, and/or an additional chemical moiety (in addition to an oligonucleotide chain, e.g., a target moiety, a lipid moiety, a carbohydrate moiety, etc.) described in any of the Tables.

[0675] In some embodiments, the terms “complementary,” “fully complementary” and “substantially complementary” may be used with respect to the base matching between an oligonucleotide and a target sequence, as will be understood by those skilled in the art from the context of their uses. It is noted that substitution of T for U, or vice versa, generally does not alter the amount of complementarity. As used herein, an oligonucleotide that is “substantially complementary” to a target sequence is largely or mostly complementary but not necessarily 100% complementary. In some embodiments, a sequence (e.g., an oligonucleotide) which is substantially complementary has one or more, e.g., 1, 2, 3, 4 or 5 mismatches when maximally aligned to its target sequence. In some embodiments, an oligonucleotide has a base sequence which is substantially complementary to a target sequence of a target nucleic acid. In some embodiments, an oligonucleotide has a base sequence which is substantially complementary to the complement of the sequence of an oligonucleotide disclosed herein. As appreciated by those skilled in the art, in some embodiments, sequences of oligonucleotides need not be 100% complementary to their targets for oligonucleotides to perform their functions (e.g., converting A to I in a nucleic acid. In some embodiments, a mismatch is well tolerated at the 5′ and/or 3′ end or the middle of an oligonucleotide. In some embodiments, one or more mismatches are preferred for adenosine modification as demonstrated herein. In some embodiments, oligonucleotides comprise portions for complementarity to target nucleic acids, and optionally portions that are not primarily for complementarity to target nucleic acids; for example, in some embodiments, oligonucleotides may comprise portions for protein binding. In some embodiments, base sequences of provided oligonucleotides are fully complementary to their target sequences (A-T/U and C-G base pairing). In some embodiments, base sequences of provided oligonucleotides are fully complementary to their target sequences (A-T/U and C-G base pairing) except at a nucleoside opposite to a target nucleoside (e.g., adenosine).

[0676] In some embodiments, the present disclosure provides an oligonucleotide comprising a sequence found in an oligonucleotide described in a Table, wherein one or more U is independently and optionally replaced with T or vice versa. In some embodiments, an oligonucleotide can comprise at least one T and/or at least one U. In some embodiments, the present disclosure provides an oligonucleotide comprising a sequence found in an oligonucleotide described in a Table herein, wherein the said sequence has over 50% identity with the sequence of the oligonucleotide described in a Table. In some embodiments, the present disclosure provides an oligonucleotide whose base sequence is the sequence of an oligonucleotide disclosed in a Table, wherein each T may be independently replaced with U and vice versa. In some embodiments, the present disclosure provides an oligonucleotide comprising a sequence found in an oligonucleotide in a Table, wherein the oligonucleotides have a pattern of backbone linkages, pattern of backbone chiral centers, and/or pattern of backbone phosphorus modifications of the same oligonucleotide or another oligonucleotide in a Table herein.

[0677] In some embodiments, the disclosure provides an oligonucleotide having a base sequence which is, comprises, or comprises a portion of the base sequence of an oligonucleotide disclosed herein, e.g., in a Table, wherein each T may be independently replaced with U and vice versa, wherein the oligonucleotide optionally further comprises a chemical modification, stereochemistry, format, an additional chemical moiety described herein (e.g., a targeting moiety, lipid moiety, carbohydrate moiety, etc.), and/or another structural feature.

[0678] In some embodiments, a “portion” (e.g., of a base sequence or a pattern of modifications or other structural element) is at least 5, 6, 7, 8, 9, 10, 11, 12, 13, 14, 15, 16, 17, 18, 19, or 20 monomeric units long.

[0679] Those skilled in the art reading the present disclosure will appreciate that technologies herein may be utilized to target various target nucleic acids comprising target adenosine for editing. In some embodiments, a target nucleic acid is a transcript of a PiZZ allele. In some embodiments, a target adenosine is . . . atcgacAagaaagggactgaagc . . . . In some embodiments, oligonucleotides of the present disclosure have suitable base sequences so that they have sufficient complementarity to selectively form duplexes with a portion of a transcript that comprise the target adenosine for editing.

[0680] As described herein, nucleosides opposite to target nucleosides (e.g., A) can be positioned at various locations. In some embodiments, an opposite nucleoside is at position 2, 3, 4, 5, 6, 7, 8, 9, 10, 11, 12, 13, 14, 15, 16, 17, 18, 19, 20, 21, 22, 23, 24, 25, 26, 27, 28, 29 or 30 or more from the 5′-end of an oligonucleotide. In some embodiments, it is at position 3 or more from the 5′-end of an oligonucleotide. In some embodiments, it is at position 4 or more from the 5′-end of an oligonucleotide. In some embodiments, it is at position 5 or more from the 5′-end of an oligonucleotide. In some embodiments, it is at position 6 or more from the 5′-end of an oligonucleotide. In some embodiments, it is at position 7 or more from the 5′-end of an oligonucleotide. In some embodiments, it is at position 8 or more from the 5′-end of an oligonucleotide. In some embodiments, it is at position 9 or more from the 5′-end of an oligonucleotide. In some embodiments, it is at position 10 or more from the 5′-end of an oligonucleotide. In some embodiments, an opposite nucleoside is at position 2, 3, 4, 5, 6, 7, 8, 9, 10, 11, 12, 13, 14, 15, 16, 17, 18, 19, 20, 21, 22, 23, 24, 25, 26, 27, 28, 29 or 30 or more from the 3′-end of an oligonucleotide. In some embodiments, it is at position 3 or more from the 3′-end of an oligonucleotide. In some embodiments, it is at position 4 or more from the 3′-end of an oligonucleotide. In some embodiments, it is at position 5 or more from the 3′-end of an oligonucleotide. In some embodiments, it is at position 6 or more from the 3′-end of an oligonucleotide. In some embodiments, it is at position 7 or more from the 3′-end of an oligonucleotide. In some embodiments, it is at position 8 or more from the 3′-end of an oligonucleotide. In some embodiments, it is at position 9 or more from the 3′-end of an oligonucleotide. In some embodiments, it is at position 10 or more from the 3′-end of an oligonucleotide. In some embodiments, nucleobases at position 1 from the 5′-end and/or the 3′-end are complementary to corresponding nucleobases in target sequences when aligned for maximum complementarity. In some embodiments, certain positions, e.g., position 6, 7, or 8, may provide higher editing efficiency.

[0681] As examples, certain oligonucleotides comprising certain example base sequences, nucleobase modifications and patterns thereof, sugar modifications and patterns thereof, internucleotidic linkages and patterns thereof, linkage phosphorus stereochemistry and patterns thereof, linkers, and/or additional chemical moieties, etc., are presented in Table 1, below. Among other things, these oligonucleotides may be utilized to correct a G to A mutation in a gene or gene product (e.g., by converting A to I). In some embodiments, listed in Tables are stereorandom oligonucleotide compositions. In some embodiments, the present disclosure provides chirally controlled oligonucleotide compositions.

[0682] In some embodiments, a base sequence is or comprises a particular sequence. In some embodiments, a base sequence is complementary to a base sequence that is or comprises a base sequence that is complementary to a particular sequence. In some embodiments, a base sequence is or comprise a sequence that differs from a particular sequence at no more than 1, 2, 3, 4, or 5 positions. In some embodiments, a base sequence is or comprise a sequence that differs from about 15-30 (e.g., 15-25, 15-20, 20-30, 15, 16, 17, 18, 19, 20, 21, 22, 23, 24, 25, 26, 27, 28, 29 or 30) consecutive nucleobases of a particular sequence at no more than 1, 2, 3, 4, or 5 positions. In some embodiments, a base sequence is or comprise a sequence that differs from a particular sequence at no more than 1 position. In some embodiments, a base sequence is or comprise a sequence that differs from a particular sequence at no more than 2 positions. In some embodiments, a base sequence is or comprise a sequence that differs from a particular sequence at no more than 3 positions. In some embodiments, a base sequence is or comprise a sequence that differs from a particular sequence at no more than 4 positions. In some embodiments, a base sequence is or comprise a sequence that differs from a particular sequence at no more than 5 positions. In some embodiments, a particular sequence is or comprises a base sequence selected from Table 1 (e.g., any of Table 1A to Table 1I, 1J to 1O, etc.). In some embodiments, a particular sequence is or comprises 5-30, 10-30, 15-30, 20-30, or 25-30 (e.g., 5, 6, 7, 8, 9, 10, 11, 12, 13, 14, 15, 16, 17, 18, 19, 20, 21, 22, 23, 24, 25, 26, 27, 28, 29 or 30) consecutive bases in a base sequence selected from Table 1. In some embodiments, a particular sequence is or comprises 10 consecutive bases in a base sequence selected from Table 1. In some embodiments, a particular sequence is or comprises 11 consecutive bases in a base sequence selected from Table 1. In some embodiments, a particular sequence is or comprises 12 consecutive bases in a base sequence selected from Table 1. In some embodiments, a particular sequence is or comprises 13 consecutive bases in a base sequence selected from Table 1. In some embodiments, a particular sequence is or comprises 14 consecutive bases in a base sequence selected from Table 1. In some embodiments, a particular sequence is or comprises 15 consecutive bases in a base sequence selected from Table 1. In some embodiments, a particular sequence is or comprises 16 consecutive bases in a base sequence selected from Table 1. In some embodiments, a particular sequence is or comprises 17 consecutive bases in a base sequence selected from Table 1. In some embodiments, a particular sequence is or comprises 18 consecutive bases in a base sequence selected from Table 1. In some embodiments, a particular sequence is or comprises 19 consecutive bases in a base sequence selected from Table 1. In some embodiments, a particular sequence is or comprises 20 consecutive bases in a base sequence selected from Table 1. In some embodiments, a particular sequence is or comprises 21 consecutive bases in a base sequence selected from Table 1. In some embodiments, a particular sequence is or comprises 22 consecutive bases in a base sequence selected from Table 1. In some embodiments, a particular sequence is or comprises 23 consecutive bases in a base sequence selected from Table 1. In some embodiments, a particular sequence is or comprises 24 consecutive bases in a base sequence selected from Table 1. In some embodiments, a particular sequence is or comprises 25 consecutive bases in a base sequence selected from Table 1. In some embodiments, a particular sequence is or comprises 26 consecutive bases in a base sequence selected from Table 1. In some embodiments, a particular sequence is or comprises 27 consecutive bases in a base sequence selected from Table 1. In some embodiments, a particular sequence is or comprises 28 consecutive bases in a base sequence selected from Table 1. In some embodiments, a particular sequence is or comprises 29 consecutive bases in a base sequence selected from Table 1. In some embodiments, a particular sequence is or comprises 30 consecutive bases in a base sequence selected from Table 1. In some embodiments, a base sequence selected from Table 1 is a base sequence selected from Table 1A. In some embodiments, a base sequence selected from Table 1 is a base sequence selected from Table 1B. In some embodiments, a base sequence selected from Table 1 is a base sequence selected from Table 1C. In some embodiments, a base sequence selected from Table 1 is a base sequence selected from Table 1D. In some embodiments, a base sequence selected from Table 1 is a base sequence selected from Table 1E. In some embodiments, a base sequence selected from Table 1 is a base sequence selected from Table 1F. In some embodiments, a base sequence selected from Table 1 is a base sequence selected from Table 1G. In some embodiments, a base sequence selected from Table 1 is a base sequence selected from Table 1H. In some embodiments, a base sequence selected from Table 1 is a base sequence selected from Table 1I. In some embodiments, a base sequence selected from Table 1 is a base sequence selected from Table 1J. In some embodiments, a base sequence selected from Table 1 is a base sequence selected from Table 1K. In some embodiments, a base sequence selected from Table 1 is a base sequence selected from Table 1L. In some embodiments, a base sequence selected from Table 1 is abase sequence selected from Table 1M. In some embodiments, a base sequence selected from Table 1 is a base sequence selected from Table 1N. In some embodiments, a base sequence selected from Table 1 is a base sequence selected from Table 10. In some embodiments, a base sequence is selected from Table 1 (e.g., 1A, 1B, 1C, 1D, 1E, 1F, 1G, 1H, and/or 1I) of WO 2021/071858, the entirety of which is incorporated herein by reference. In some embodiments, a particular sequence is or comprises UCCCUUUCTCIUCGA (SEQ ID NO.: 1022), wherein each U can be independently replaced with T and vice versa. In some embodiments, a particular sequence is or comprises UCCCUUUCTCIUCGA (SEQ ID NO.: 1022). In some embodiments, a particular sequence is or comprises UCCCUUUCTCGUCGA (SEQ ID NO.: 1023), wherein each U can be independently replaced with T and vice versa. In some embodiments, a particular sequence is or comprises UCCCUUUCTCGUCGA (SEQ ID NO.: 1023). In some embodiments, a particular sequence is or comprises UUCAGUCCCUUUCTCIUCGA (SEQ ID NO.: 1024), wherein each U can be independently replaced with T and vice versa. In some embodiments, a particular sequence is or comprises UUCAGUCCCUUUCTCIUCGA (SEQ ID NO.: 1024). In some embodiments, a particular sequence is or comprises UUCAGUCCCUUUCTCGUCGA (SEQ ID NO.: 1025), wherein each U can be independently replaced with T and vice versa. In some embodiments, a particular sequence is or comprises UUCAGUCCCUUUCTCGUCGA (SEQ ID NO.: 1025). In some embodiments, a particular sequence is or comprises CCCCAGCAGCUUCAGUCCCUUUCTCIUCGA (SEQ ID NO.: 213), wherein each U can be independently replaced with T and vice versa. In some embodiments, a particular sequence is or comprises CCCCAGCAGCUUCAGUCCCUUUCTCIUCGA (SEQ ID NO.: 213). In some embodiments, a particular sequence is or comprises CCCCAGCAGCUUCAGUCCCUUUCTCGUCGA (SEQ ID NO.: 1026), wherein each U can be independently replaced with T and vice versa. In some embodiments, a particular sequence is or comprises CCCCAGCAGCUUCAGUCCCUUUCTCGUCGA (SEQ ID NO.: 1026). In some embodiments, a particular sequence is or comprises CCCAGCAGCUUCAGUCCCUUUCUAIUCGAU (SEQ ID NO.: 199), wherein each U can be independently replaced with T and vice versa. In some embodiments, a particular sequence is or comprises CCCAGCAGCUUCAGUCCCUUUCUAIUCGAU (SEQ ID NO.: 199). In some embodiments, a particular sequence is or comprises ACAUAAUUUACACGAAAGCAAUGCCAUCAC (SEQ ID NO.: 7), wherein each U can be independently replaced with T and vice versa. In some embodiments, a particular sequence is or comprises ACAUAAUUUACACGAAAGCAAUGCCAUCAC (SEQ ID NO.: 7). In some embodiments, a particular sequence is or comprises AUCCACUGUGGCACCCAGAUUAUCCAUGUU (SEQ ID NO.: 2), wherein each U can be independently replaced with T and vice versa. In some embodiments, a particular sequence is or comprises AUCCACUGUGGCACCCAGAUUAUCCAUGUU (SEQ ID NO.: 2). In some embodiments, a particular sequence is or comprises CCCAGCAGCUUCAGUCCCUUUCTUIUCGAU (SEQ ID NO.: 530). In some embodiments, a particular sequence is or comprises CCCAGCAGCUUCAGUCCCUUTCTUIUCGAU (SEQ ID NO.: 675).

[0683] Certain oligonucleotides and/or compositions are described in Table 1 below which contains multiple sections, e.g., 1A, 1B, 1C, etc., which may be individually referred to as Table 1A, 1B, 1C, etc. Certain oligonucleotides and/or compositions referred to in the present disclosure are described in WO 2021/071858, e.g., in Table 1 of WO 2021/071858. All oligonucleotides and/or compositions of WO 2021/071858 are incorporated herein by reference.

Table 1. Example Oligonucleotides and/or Compositions.

TABLE 1A
Example oligonucleotides and/or compositions that target UGP2.

| | | SEQ | | SEQ | |
|---|---|---|---|---|---|
| | | ID | | ID | Stereochemistry/ |
| ID | Description | NO | Base Sequence | NO | Linkage |
| WV- | fAn001RfU*SfC*SfC*SfA*SfC*SfU*SfG*SfU*SfG* | 1 | AUCCACUGUGGCACCC | 2 | nRSSSSSSSSSSSSnRSnRS |
| 40590 | SfG*SfC*SfA*SfCn001RfC*SmCn001RmA*SmG*SmA* | | AGAUUAUCCAUGUU | | SSSSSSSSnRSSnR |
| | SmU*SmU*SmA*SmU*SfC*SC*SAn001RmU*SmG* | | | | |
| | SmUn001RmU | | | | |
| WV- | L022*RfAn001RfU*SfC*SfC*SfA*SfC*SfU*SfG*SfU* | 3 | AUCCACUGUGGCACCC | 2 | RnRSSSSSSSSSSSSnRSn |
| 42488 | SfG*SfG*SfC*SfA*SfCn001RfC*SmCn001RmA*SmG* | | AGAUUAUCCAUGUU | | RSSSSSSSSSnRSSnR |
| | SmA*SmU*SmU*SmA*SmU*SfC*SC*SAn001RmU* | | | | |
| | SmG*SmUn001RmU | | | | |
| WV- | L022*RfA*SfU*SfC*SfC*SfA*SfC*SfU*SfG*SfU*SfG* | 4 | AUCCACUGUGGCACCC | 2 | RSSSSSSSSSSSSSnRSnR |
| 42489 | SfG*SfC*SfA*SfCn001RfC*SmCn001RmA*SmG*SmA* | | AGAUUAUCCAUGUU | | SSSSSSSSSnRSSnR |
| | SmU*SmU*SmA*SmU*SfC*SC*SAn001RmU*SmG* | | | | |
| | SmUn001RmU | | | | |
| WV- | fA*SfU*SfC*SfC*SfA*SfC*SfU*SfG*SfU*SfG*SfG* | 5 | AUCCACUGUGGCACCC | 2 | SSSSSSSSSSSSSnRSnRSS |
| 42490 | SfC*SfA*SfCn001RfC*SmCn001RmA*SmG*SmA*SmU* | | AGAUUAUCCAUGUU | | SSSSSSSnRSSnR |
| | SmU*SmA*SmU*SfC*SC*SAn001RmU*SmG* | | | | |
| | SmUn001RmU | | | | |

TABLE 1B
Example oligonucleotides and/or compositions that target ACTB.

| | | SEQ | | SEQ | |
|---|---|---|---|---|---|
| | | ID | | ID | Stereochemistry/ |
| ID | Description | NO | Base Sequence | NO | Linkage |
| WV- | Mod001L001fAn001RfC*SfA*SfU*SfA*SfA*SfU*SfU* | 6 | ACAUAAUUUACACGAA | 7 | OnRSSSSSSSSSSSSnRSn |
| 39306 | SfU*SfA*SfC*SfA*SfC*SfGn001RfA*SmAn001RmA* | | AGCAAUGCCAUCAC | | RSSSSSSSSSnRSSnR |
| | SmG*SmC*SmA*SmA*SmU*SmG*S5MSfC*Sm5C* | | | | |
| | SAn001RmU*SmC*SmAn001RmC | | | | |
| WV- | Mod001L001fAn001RfC*SfA*SfU*SfA*SfA*SfU*SfU* | 8 | ACAUAAUUUACACGAA | 7 | OnRSSSSSSSSSSSSnRSn |
| 39305 | SfU*SfA*SfC*SfA*SfC*SfGn001RfA*SmAn001RmA* | | AGCAAUGCCAUCAC | | RSSSSSSSSSnRSSnR |
| | SmG*SmC*SmA*SmA*SmU*SmG*SfC*Sm5C* | | | | |
| | SAn001RmU*SmC*SmAn001RmC | | | | |
| WV- | Mod001L001fAn001RfC*SfA*SfU*SfA*SfA*SfU*SfU* | 9 | ACAUAAUUUACACGAA | 10 | OnRSSSSSSSSSSSSnRSn |
| 39294 | SfU*SfA*SfC*SfA*SfC*SfGn001RfA*SmAn001RmA* | | AGCAAUGCCATCAC | | RSSSSSSSSSnRSSnR |
| | SmG*SmC*SmA*SmA*SmU*SmG*SfC*SC* | | | | |
| | SAn001R5MRdT*SfC*SmAn001RmC | | | | |
| WV- | Mod001L001fAn001RfC*SfA*SfU*SfA*SfA*SfU*SfU* | 11 | ACAUAAUUUACACGAA | 10 | OnRSSSSSSSSSSSSnRSn |
| 39293 | SfU*SfA*SfC*SfA*SfC*SfGn001RfA*SmAn001RmA* | | AGCAAUGCCATCAC | | RSSSSSSSSSnRSSnR |
| | SmG*SmC*SmA*SmA*SmU*SmG*SfC*SC* | | | | |
| | SAn001R5MSdT*SfC*SmAn001RmC | | | | |
| WV- | Mod001L001fAn001RfC*SfA*SfU*SfA*SfA*SfU*SfU* | 12 | ACAUAAUUUACACGAA | 10 | OnRSSSSSSSSSSSSnRSn |
| 39289 | SfU*SfA*SfC*SfA*SfC*SfGn001RfA*SmAn001RmA* | | AGCAAUGCCATCAC | | RSSSSSSSSSnRSSnR |
| | SmG*SmC*SmA*SmA*SmU*SmG*SfC*SC* | | | | |
| | SAn001RT*SfC*SmAn001RmC | | | | |
| WV- | Mod001L001fAn001RfC*SfA*SfU*SfA*SfA*SfU*SfU* | 13 | ACAUAAUUUACACGAA | 7 | OnRSSSSSSSSSSSSnRSn |
| 39267 | SfU*SfA*SfC*SfA*SfC*SfGn001RfA*SmAn001RmA* | | AGCAAUGCCAUCAC | | RSSSSSSSSSnRSSnR |
| | SmG*SmC*SmA*SmA*SmU*SmG*S5MSfC*SC* | | | | |
| | SAn001RmU*SmC*SmAn001RmC | | | | |
| WV- | Mod001L001fAn001RfC*SfA*SfU*SfA*SfA*SfU*SfU* | 14 | ACAUAAUUUACACGAA | 7 | OnRSSSSSSSSSSSSnRSn |
| 39266 | SfU*SfA*SfC*SfA*SfC*SfGn001RfA*SmAn001RmA* | | AGCAAUGCCAUCAC | | RSSSSSSSSSnRSSnR |
| | SmG*SmC*SmA*SmA*SmU*SmG*SfC*S5MRm5dC* | | | | |
| | SAn001RmU*SmC*SmAn001RmC | | | | |
| WV- | Mod001L001fAn001RfC*SfA*SfU*SfA*SfA*SfU*SfU* | 15 | ACAUAAUUUACACGAA | 7 | OnRSSSSSSSSSSSSnRSn |
| 39265 | SfU*SfA*SfC*SfA*SfC*SfGn001RfA*SmAn001RmA* | | AGCAAUGCCAUCAC | | RSSSSSSSSSnRSSnR |
| | SmG*SmC*SmA*SmA*SmU*SmG*SfC*S5MSm5dC* | | | | |
| | SAn001RmU*SmC*SmAn001RmC | | | | |
| WV- | L023L010n001RL010n001RL010n001RfAn001RfC*SfA* | 16 | ACAUAAUUUACACGAA | 7 | OnRnRnRnRSSSSSSSSS |
| 39202 | A*SfU*SfA*SfA*SfU*SfU*SfU*SfA*SfC*SfA*SfC* | | AGCAAUGCCAUCAC | | SSSSSSSSSnRSSSSSnRS |
| | SfG*SfA*SmA*SmA*SmG*SmC*SmAn001RmA*SmU* | | | | SnR |
| | SmG*SfC*SC*SAn001RmU*SmC*SmAn001RmC | | | | |
| WV- | L023L010n001RL010n001RL010n001RfA*SfC*SfA* | 17 | ACAUAAUUUACACGAA | 7 | OnRnRnRSSSSSSSSSSS |
| 39203 | SfU*SfA*SfA*SfU*SfU*SfU*SfA*SfC*SfA*SfC*SfG* | | AGCAAUGCCAUCAC | | SSSSSSSSSSSSSSnRSSn |
| | SfA*SmA*SmA*SmG*SmC*SmA*SmA*SmU*SmG*SfC* | | | | R |
| | SC*SAn001RmU*SmC*SmAn001RmC | | | | |
| WV- | Mod001L001fAn001RfC*SfA*SfU*SfA*SfA*SfU*SfU* | 18 | ACAUAAUUUACACGAA | 7 | OnRSSSSSSSSSSSSnRSn |
| 40805 | SfU*SfA*SfC*SfA*SfC*SfGn001RfA*SmAn001RmA* | | AGCAAUGCCAUCAC | | RSSSSSSSSSnXSSnX |
| | SmG*SmC*SmA*SmA*SmU*SmG*SfC*SC* | | | | |
| | SAsm01n001mU*SmC*SAsm01n001mC | | | | |
| WV- | Mod001L001Asm01n001fC*SfA*SfU*SfA*SfA*SfU* | 19 | ACAUAAUUUACACGAA | 7 | OnXSSSSSSSSSSSSnXS |
| 40804 | SfU*SfU*SfA*SfC*SfA*SfC*SGsm01n001fA* | | AGCAAUGCCAUCAC | | nXSSSSSSSSSnXSSnX |
| | SAsm01n001mA*SmG*SmC*SmA*SmA*SmU*SmG*SfC*SC* | | | | |
| | SAsm01n001mU*SmC*SAsm01n001mC | | | | |
| WV- | Mod001L001fAn001RfC*SfA*SfU*SfA*SfA*SfU*SfU* | 20 | ACAUAAUUUACACGAA | 7 | OnRSSSSSSSSSSSSnRSn |
| 40803 | SfU*SfA*SfC*SfA*SfC*SfGn001RfA*SmAn001RmA* | | AGCAAUGCCAUCAC | | RSSSSSSSSSnXSSnR |
| | SmG*SmC*SmA*SmA*SmU*SmG*SfC*SC* | | | | |
| | SAsm01n001mU*SmC*SmAn001RmC | | | | |
| WV- | Mod001L001fAn001RfC*SfA*SfU*SfA*SfA*SfU*SfU* | 21 | ACAUAAUUUACACGAA | 7 | OnRSSSSSSSSSSSSnRSn |
| 40802 | SfU*SfA*SfC*SfA*SfC*SfGn001RfA*SmAn001RmA* | | AGCAAUGCCAUCAC | | RSSSSSSSSSn*XSSn*X |
| | SmG*SmC*SmA*SmA*SmU*SmG*SfC*SC*SAsm01* | | | | |
| | n001mU*SmC*SAsm01*n001mC | | | | |
| WV- | Mod001L001Asm01*n001fC*SfA*SfU*SfA*SfA*SfU* | 22 | ACAUAAUUUACACGAA | 7 | On*XSSSSSSSSSSSSn*X |
| 40801 | SfU*SfU*SfA*SfC*SfA*SfC*SGsm01*n001fA*SAsm01* | | AGCAAUGCCAUCAC | | Sn*XSSSSSSSSSn*XSSn |
| | n001mA*SmG*SmC*SmA*SmA*SmU*SmG*SfC*SC* | | | | *X |
| | SAsm01*n001mU*SmC*SAsm01*n001mC | | | | |
| WV- | Mod001L001fAn001RfC*SfA*SfU*SfA*SfA*SfU*SfU* | 23 | ACAUAAUUUACACGAA | 7 | OnRSSSSSSSSSSSSnRSn |
| 40800 | SfU*SfA*SfC*SfA*SfC*SfGn001RfA*SmAn001RmA* | | AGCAAUGCCAUCAC | | RSSSSSSSSSn*XSSnR |
| | SmG*SmC*SmA*SmA*SmU*SmG*SfC*SC*SAsm01* | | | | |
| | n001mU*SmC*SmAn001RmC | | | | |
| WV- | Mod001L001fAn001RfC*SfA*SfU*SfA*SfA*SfU*SfU* | 24 | ACAUAAUUUACACGAA | 7 | OnRSSSSSSSSSSSSnRSn |
| 40583 | SfU*SfA*SfC*SfA*SfC*SfGn001RfA*SmAn001RmA* | | AGCAAUGCCAUCAC | | RSSSSSSSSSn*XSSn*X |
| | SmG*SmC*SmA*SmA*SmU*SmG*SfC*SC*SA*n001mU* | | | | |
| | SmC*SmA*n001mC | | | | |
| WV- | Mod001L001fA*n001fC*SfA*SfU*SfA*SfA*SfU*SfU* | 25 | ACAUAAUUUACACGAA | 7 | On*XSSSSSSSSSSSSn*X |
| 40582 | SfU*SfA*SfC*SfA*SfC*SfG*n001fA*SmA*n001mA* | | AGCAAUGCCAUCAC | | Sn*XSSSSSSSSSn*XSSn |
| | SmG*SmC*SmA*SmA*SmU*SmG*SfC*SC*SA*n001mU* | | | | *X |
| | SmC*SmA*n001mC | | | | |
| WV- | Mod001L001fAn001RfC*SfA*SfU*SfA*SfA*SfU*SfU* | 26 | ACAUAAUUUACACGAA | 7 | OnRSSSSSSSSSSSSnRSn |
| 40581 | SfU*SfA*SfC*SfA*SfC*SfGn001RfA*SmAn001RmA* | | AGCAAUGCCAUCAC | | RSSSSSSSSSn*XSSnR |
| | SmG*SmC*SmA*SmA*SmU*SmG*SfC*SC*SA*n001mU* | | | | |
| | SmC*SmAn001RmC | | | | |
| WV- | fAn001RfC*SfA*SfU*SfA*SfA*SfU*SfU*SfU*SfA* | 27 | ACAUAAUUUACACGAA | 28 | nRSSSSSSSSSSSSnRSnR |
| 42331 | SfC*SfA*SfC*SfGn001RfA*SmAn001RmA*SmG*SmC* | | AGCAAUGUCTUCAC | | SSSSSSSSSnRSSnR |
| | SmA*SmA*SmU*SmG*SfU*SC*STn001RmU*SmC* | | | | |
| | SmAn001RmC | | | | |
| WV- | fAn001RfC*SfA*SfU*SfA*SfA*SfU*SfU*SfU*SfA* | 29 | ACAUAAUUUACACGAA | 30 | nRSSSSSSSSSSSSnRSnR |
| 42332 | SfC*SfA*SfC*SfGn001RfA*SmAn001RmA*SmG*SmC* | | AGCAAUGACTUCAC | | SSSSSSSSSnRSSnR |
| | SmA*SmA*SmU*SmG*SfA*SC*STn001RmU*SmC* | | | | |
| | SmAn001RmC | | | | |
| WV- | fAn001RfC*SfA*SfU*SfA*SfA*SfU*SfU*SfU*SfA* | 31 | ACAUAAUUUACACGAA | 32 | nRSSSSSSSSSSSSnRSnR |
| 42333 | SfC*SfA*SfC*SfGn001RfA*SmAn001RmA*SmG*SmC* | | AGCAAUGCCTUCAC | | SSSSSSSSSnRSSnR |
| | SmA*SmA*SmU*SmG*SfC*SC*STn001RmU*SmC* | | | | |
| | SmAn001RmC | | | | |
| WV- | fAn001RfC*SfA*SfU*SfA*SfA*SfU*SfU*SfU*SfA* | 33 | ACAUAAUUUACACGAA | 34 | nRSSSSSSSSSSSSnRSnR |
| 42334 | SfC*SfA*SfC*SfGn001RfA*SmAn001RmA*SmG*SmC* | | AGCAAUGGCTUCAC | | SSSSSSSSSnRSSnR |
| | SmA*SmA*SmU*SmG*SfG*SC*STn001RmU*SmC* | | | | |
| | SmAn001RmC | | | | |
| WV- | fAn001RfC*SfA*SfU*SfA*SfA*SfU*SfU*SfU*SfA* | 35 | ACAUAAUUUACACGAA | 36 | nRSSSSSSSSSSSSnRSnR |
| 42335 | SfC*SfA*SfC*SfGn001RfA*SmAn001RmA*SmG*SmC* | | AGCAAUGUCAUCAC | | SSSSSSSSSnRSSnR |
| | SmA*SmA*SmU*SmG*SfU*SC*SAn001RmU*SmC* | | | | |
| | SmAn001RmC | | | | |
| WV- | fAn001RfC*SfA*SfU*SfA*SfA*SfU*SfU*SfU*SfA* | 37 | ACAUAAUUUACACGAA | 38 | nRSSSSSSSSSSSSnRSnR |
| 42336 | SfC*SfA*SfC*SfGn001RfA*SmAn001RmA*SmG*SmC* | | AGCAAUGACAUCAC | | SSSSSSSSSnRSSnR |
| | SmA*SmA*SmU*SmG*SfA*SC*SAn001RmU*SmC* | | | | |
| | SmAn001RmC | | | | |
| WV- | fAn001RfC*SfA*SfU*SfA*SfA*SfU*SfU*SfU*SfA* | 39 | ACAUAAUUUACACGAA | 40 | nRSSSSSSSSSSSSnRSnR |
| 42337 | SfC*SfA*SfC*SfGn001RfA*SmAn001RmA*SmG*SmC* | | AGCAAUGGCAUCAC | | SSSSSSSSSnRSSnR |
| | SmA*SmA*SmU*SmG*SfG*SC*SAn001RmU*SmC* | | | | |
| | SmAn001RmC | | | | |
| WV- | fAn001RfC*SfA*SfU*SfA*SfA*SfU*SfU*SfU*SfA* | 41 | ACAUAAUUUACACGAA | 42 | nRSSSSSSSSSSSSnRSnR |
| 42338 | SfC*SfA*SfC*SfGn001RfA*SmAn001RmA*SmG*SmC* | | AGCAAUGUCCUCAC | | SSSSSSSSSnRSSnR |
| | SmA*SmA*SmU*SmG*SfU*SC*SCn001RmU*SmC* | | | | |
| | SmAn001RmC | | | | |
| WV- | fAn001RfC*SfA*SfU*SfA*SfA*SfU*SfU*SfU*SfA* | 43 | ACAUAAUUUACACGAA | 44 | nRSSSSSSSSSSSSnRSnR |
| 42339 | SfC*SfA*SfC*SfGn001RfA*SmAn001RmA*SmG*SmC* | | AGCAAUGACCUCAC | | SSSSSSSSSnRSSnR |
| | SmA*SmA*SmU*SmG*SfA*SC*SCn001RmU*SmC* | | | | |
| | SmAn001RmC | | | | |
| WV- | fAn001RfC*SfA*SfU*SfA*SfA*SfU*SfU*SfU*SfA* | 45 | ACAUAAUUUACACGAA | 46 | nRSSSSSSSSSSSSnRSnR |
| 42340 | SfC*SfA*SfC*SfGn001RfA*SmAn001RmA*SmG*SmC* | | AGCAAUGCCCUCAC | | SSSSSSSSSnRSSnR |
| | SmA*SmA*SmU*SmG*SfC*SC*SCn001RmU*SmC* | | | | |
| | SmAn001RmC | | | | |
| WV- | fAn001RfC*SfA*SfU*SfA*SfA*SfU*SfU*SfU*SfA* | 47 | ACAUAAUUUACACGAA | 48 | nRSSSSSSSSSSSSnRSnR |
| 42341 | SfC*SfA*SfC*SfGn001RfA*SmAn001RmA*SmG*SmC* | | AGCAAUGGCCUCAC | | SSSSSSSSSnRSSnR |
| | SmA*SmA*SmU*SmG*SfG*SC*SCn001RmU*SmC* | | | | |
| | SmAn001RmC | | | | |
| WV- | fAn001RfC*SfA*SfU*SfA*SfA*SfU*SfU*SfU*SfA* | 49 | ACAUAAUUUACACGAA | 50 | nRSSSSSSSSSSSSnRSnR |
| 42342 | SfC*SfA*SfC*SfGn001RfA*SmAn001RmA*SmG*SmC* | | AGCAAUGUCIUCAC | | SSSSSSSSSnSSSnR |
| | SmA*SmA*SmU*SmG*SfU*SC*SIn001SmU*SmC* | | | | |
| | SmAn001RmC | | | | |
| WV- | fAn001RfC*SfA*SfU*SfA*SfA*SfU*SfU*SfU*SfA* | 51 | ACAUAAUUUACACGAA | 52 | nRSSSSSSSSSSSSnRSnR |
| 42343 | SfC*SfA*SfC*SfGn001RfA*SmAn001RmA*SmG*SmC* | | AGCAAUGACIUCAC | | SSSSSSSSSnSSSnR |
| | SmA*SmA*SmU*SmG*SfA*SC*SIn001SmU*SmC* | | | | |
| | SmAn001RmC | | | | |
| WV- | fAn001RfC*SfA*SfU*SfA*SfA*SfU*SfU*SfU*SfA* | 53 | ACAUAAUUUACACGAA | 54 | nRSSSSSSSSSSSSnRSnR |
| 42344 | SfC*SfA*SfC*SfGn001RfA*SmAn001RmA*SmG*SmC* | | AGCAAUGCCIUCAC | | SSSSSSSSSnSSSnR |
| | SmA*SmA*SmU*SmG*SfC*SC*SIn001SmU*SmC* | | | | |
| | SmAn001RmC | | | | |
| WV- | fAn001RfC*SfA*SfU*SfA*SfA*SfU*SfU*SfU*SfA* | 55 | ACAUAAUUUACACGAA | 56 | nRSSSSSSSSSSSSnRSnR |
| 42345 | SfC*SfA*SfC*SfGn001RfA*SmAn001RmA*SmG*SmC* | | AGCAAUGGCIUCAC | | SSSSSSSSSnSSSnR |
| | SmA*SmA*SmU*SmG*SfG*SC*SIn001SmU*SmC* | | | | |
| | SmAn001RmC | | | | |
| WV- | fAn001RfC*SfA*SfU*SfA*SfA*SfU*SfU*SfU*SfA* | 57 | ACAUAAUUUACACGAA | 58 | nRSSSSSSSSSSSSnRSnR |
| 42346 | SfC*SfA*SfC*SfGn001RfA*SmAn001RmA*SmG*SmC* | | AGCAAUGUCGUCAC | | SSSSSSSSSnRSSnR |
| | SmA*SmA*SmU*SmG*SfU*SC*SGn001RmU*SmC* | | | | |
| | SmAn001RmC | | | | |
| WV- | fAn001RfC*SfA*SfU*SfA*SfA*SfU*SfU*SfU*SfA* | 59 | ACAUAAUUUACACGAA | 60 | nRSSSSSSSSSSSSnRSnR |
| 42347 | SfC*SfA*SfC*SfGn001RfA*SmAn001RmA*SmG*SmC* | | AGCAAUGACGUCAC | | SSSSSSSSSnRSSnR |
| | SmA*SmA*SmU*SmG*SfA*SC*SGn001RmU*SmC* | | | | |
| | SmAn001RmC | | | | |
| WV- | fAn001RfC*SfA*SfU*SfA*SfA*SfU*SfU*SfU*SfA* | 61 | ACAUAAUUUACACGAA | 62 | nRSSSSSSSSSSSSnRSnR |
| 42348 | SfC*SfA*SfC*SfGn001RfA*SmAn001RmA*SmG*SmC* | | AGCAAUGCCGUCAC | | SSSSSSSSSnRSSnR |
| | SmA*SmA*SmU*SmG*SfC*SC*SGn001RmU*SmC* | | | | |
| | SmAn001RmC | | | | |
| WV- | fAn001RfC*SfA*SfU*SfA*SfA*SfU*SfU*SfU*SfA* | 63 | ACAUAAUUUACACGAA | 64 | nRSSSSSSSSSSSSnRSnR |
| 42349 | SfC*SfA*SfC*SfGn001RfA*SmAn001RmA*SmG*SmC* | | AGCAAUGGCGUCAC | | SSSSSSSSSnRSSnR |
| | SmA*SmA*SmU*SmG*SfG*SC*SGn001RmU*SmC* | | | | |
| | SmAn001RmC | | | | |
| WV- | fAn001RfC*SfA*SfU*SfA*SfA*SfU*SfU*SfU*SfA* | 65 | ACAUAAUUUACACGAA | 7 | nRSSSSSSSSSSSSnRSnR |
| 37317 | SfC*SfA*SfC*SfGn001RfA*SmAn001RmA*SmG*SmC* | | AGCAAUGCCAUCAC | | SSSSSSSSSnRSSnR |
| | SmA*SmA*SmU*SmG*SfC*SC*SAn001RmU*SmC* | | | | |
| | SmAn001RmC | | | | |
| WV- | mA*mC*fA*fUfAfAfUfUfUfAfCfAfCfGfAfAmGmGm | 66 | ACAUAAUUUACACGAA | 67 | XXXOOOOOOOOOOOO |
| 42715 | UmUmCmUmAmAmACCAmU*mC*mC*mU | | GGUUCUAAACCAUCCU | | OOOOOOOOOOOOOXX |
| | | | | | X |
| WV- | mA*mC*fA*fU*fA*fA*fU*fU*fU*fA*fC*fA*fC*fG* | 68 | ACAUAAUUUACACGAA | 67 | XXXXXXXXXXXXXXX |
| 42716 | fA*fA*mG*mG*mU*mU*mC*mU*mA*mA*mA*C*C* | | GGUUCUAAACCAUCCU | | XXXXXXXXXXXXXXX |
| | A*mU*mC*mC*mU | | | | X |
| WV- | mA*SmC*SfA*SfU*SfA*SfA*SfU*SfU*SfU*SfA*SfC* | 69 | ACAUAAUUUACACGAA | 67 | SSSSSSSSSSSSSSSSSSS |
| 42717 | SfA*SfC*SfG*SfA*SfA*SmG*SmG*SmU*SmU*SmC* | | GGUUCUAAACCAUCCU | | SSSSSSSSSSSS |
| | SmU*SmA*SmA*SmA*SC*SC*SA*SmU*SmC*SmC* | | | | |
| | SmU | | | | |
| WV- | mA*SmC*SfA*SfU*SfA*SfA*SfU*SfU*SfU*SfA*SfC* | 70 | ACAUAAUUUACACGAA | 67 | SSSSSSSSSSSSSSSSSSS |
| 42718 | SfA*SfC*SfG*SfA*SfA*SmG*SmG*SmU*SmU*SmC* | | GGUUCUAAACCAUCCU | | SSSSSSSSnRSSnR |
| | SmU*SmA*SmA*SmA*SC*SC*SAn001RmU*SmC* | | | | |
| | SmCn001RmU | | | | |
| WV- | mC*mU*mUmUmCmGmUmGmUmAmAmAmUmU*mA* | 71 | CUUUCGUGUAAAUUAU | 72 | XXOOOOOOOOOOOXX |
| 42719 | mU*mG*mU | | GU | | XX |
| WV- | fC*fU*fUfUfCfGfUfGfUfAfAfAfUfUfA*fU*fG*fU | 73 | CUUUCGUGUAAAUUAU | 72 | XXOOOOOOOOOOOOX |
| 42720 | | | GU | | XX |
| WV- | mC*mU*mU*mU*mC*mG*mU*mG*mU*mA*mA*mA* | 74 | CUUUCGUGUAAAUUAU | 72 | XXXXXXXXXXXXXXX |
| 42721 | mU*mU*mA*mU*mG*mU | | GU | | |
| WV- | fC*fU*fU*fU*fC*fG*fU*fG*fU*fA*fA*fA*fU*fU*fA* | 75 | CUUUCGUGUAAAUUAU | 72 | XXXXXXXXXXXXXXX |
| 42722 | fU*fG*fU | | GU | | XX |
| WV- | mC*SmU*SmU*SmU*SmC*SmG*SmU*SmG*SmU*SmA* | 76 | CUUUCGUGUAAAUUAU | 72 | SSSSSSSSSSSSSSSSS |
| 42723 | SmA*SmA*SmU*SmU*SmA*SmU*SmG*SmU | | GU | | |
| WV- | fC*SfU*SfU*SfU*SfC*SfG*SfU*SfG*SfU*SfA*SfA* | 77 | CUUUCGUGUAAAUUAU | 72 | SSSSSSSSSSSSSSSSS |
| 42724 | SfA*SfU*SfU*SfA*SfU*SfG*SfU | | GU | | |
| WV- | mU*mU*mCmGmUmGmUmAmAmAmUmUmA*mU* | 78 | UUCGUGUAAAUUAUGU | 79 | XXOOOOOOOOOOXXX |
| 42725 | mG*mU | | | | |
| WV- | fU*fU*fCfGfUfGfUfAfAfAfUfUfA*fU*fG*fU | 80 | UUCGUGUAAAUUAUGU | 79 | XXOOOOOOOOOOXXX |
| 42726 | | | | | |
| WV- | mU*mU*mC*mG*mU*mG*mU*mA*mA*mA*mU*m | 81 | UUCGUGUAAAUUAUGU | 79 | XXXXXXXXXXXXXXX |
| 42727 | U*mA*mU*mG*mU | | | | |
| WV- | fU*fU*fC*fG*fU*fG*fU*fA*fA*fA*fU*fU*fA*fU*fG* | 82 | UUCGUGUAAAUUAUGU | 79 | XXXXXXXXXXXXXXX |
| 42728 | fU | | | | |
| WV- | mU*SmU*SmC*SmG*SmU*SmG*SmU*SmA*SmA*SmA* | 83 | UUCGUGUAAAUUAUGU | 79 | SSSSSSSSSSSSSSS |
| 42729 | SmU*SmU*SmA*SmU*SmG*SmU | | | | |
| WV- | fU*SfU*SfC*SfG*SfU*SfG*SfU*SfA*SfA*SfA*SfU* | 84 | UUCGUGUAAAUUAUGU | 79 | SSSSSSSSSSSSSSS |
| 42730 | SfU*SfA*SfU*SfG*SfU | | | | |
| WV- | fC*fU*fCfCfUfCfUfUfCfUfCfGfAfCfAmAmAmGmG | 85 | CUCCUCUUCUCGACAA | 86 | XXOOOOOOOOOOOOO |
| 42738 | mUmUmCmUmAmAmACCAmU*mC*mC*mU | | AGGUUCUAAACCAUCC | | OOOOOOOOOOOOOOX |
| | | | U | | XX |
| WV- | fC*fU*fC*fC*fU*fC*fU*fU*fC*fU*fC*fG*fA*fC*fA* | 87 | CUCCUCUUCUCGACAA | 86 | XXXXXXXXXXXXXXX |
| 42739 | mA*mA*mG*mG*mU*mU*mC*mU*mA*mA*mA*C* | | AGGUUCUAAACCAUCC | | XXXXXXXXXXXXXXX |
| | C*A*mU*mC*mC*mU | | U | | XX |
| WV- | fC*SfU*SfC*SfC*SfU*SfC*SfU*SfU*SfC*SfU*SfC* | 88 | CUCCUCUUCUCGACAA | 86 | SSSSSSSSSSSSSSSSSSS |
| 42740 | SfG*SfA*SfC*SfA*SmA*SmA*SmG*SmG*SmU*SmU* | | AGGUUCUAAACCAUCC | | SSSSSSSSSSSSS |
| | SmC*SmU*SmA*SmA*SmA*SC*SC*SA*SmU*SmC* | | U | | |
| | SmC*SmU | | | | |
| WV- | fC*SfU*SfC*SfC*SfU*SfC*SfU*SfU*SfC*SfU*SfC* | 89 | CUCCUCUUCUCGACAA | 86 | SSSSSSSSSSSSSSSSSSS |
| 42741 | SfG*SfA*SfC*SfA*SmA*SmA*SmG*SmG*SmU*SmU* | | AGGUUCUAAACCAUCC | | SSSSSSSSSnRSSnR |
| | SmC*SmU*SmA*SmA*SmA*SC*SC*SAn001RmU* | | U | | |
| | SmC*SmCn001RmU | | | | |
| WV- | fC*fU*fCfCfUfCfUfUfCfUfCfGfAfCfAmGmGmUmU | 90 | CUCCUCUUCUCGACAG | 91 | XXOOOOOOOOOOOOO |
| 42746 | mCmUmAmAmACCAmU*mC*mC*mU | | GUUCUAAACCAUCCU | | OOOOOOOOOOOOXXX |
| WV- | fC*fU*fC*fC*fU*fC*fU*fU*fC*fU*fC*fG*fA*fC*fA* | 92 | CUCCUCUUCUCGACAG | 91 | XXXXXXXXXXXXXXX |
| 42747 | mG*mG*mU*mU*mC*mU*mA*mA*mA*C*C*A*mU* | | GUUCUAAACCAUCCU | | XXXXXXXXXXXXXXX |
| | mC*mC*mU | | | | |
| WV- | fC*SfU*SfC*SfC*SfU*SfC*SfU*SfU*SfC*SfU*SfC* | 93 | CUCCUCUUCUCGACAG | 91 | SSSSSSSSSSSSSSSSSSS |
| 42748 | SfG*SfA*SfC*SfA*SmG*SmG*SmU*SmU*SmC*SmU* | | GUUCUAAACCAUCCU | | SSSSSSSSSSS |
| | SmA*SmA*SmA*SC*SC*SA*SmU*SmC*SmC*SmU | | | | |
| WV- | fC*SfU*SfC*SfC*SfU*SfC*SfU*SfU*SfC*SfU*SfC* | 94 | CUCCUCUUCUCGACAG | 91 | SSSSSSSSSSSSSSSSSSS |
| 42749 | SfG*SfA*SfC*SfA*SmG*SmG*SmU*SmU*SmC*SmU* | | GUUCUAAACCAUCCU | | SSSSSSSnRSSnR |
| | SmA*SmA*SmA*SC*SC*SAn001RmU*SmC* | | | | |
| | SmCn001RmU | | | | |
| WV- | fU*fG*fUfCfGfAfGfAfAfGfAfGfGfAfGfAmAmCmAm | 95 | UGUCGAGAAGAGGAGA | 96 | XXOOOOOOOOOOOOO |
| 42731 | AmUmAmUmGmCmUmAmAfAfUfGfUfU*fG*fU*fU | | ACAAUAUGCUAAAUGU | | OOOOOOOOOOOOOOO |
| | | | UGUU | | OOXXX |
| WV- | fU*fG*fU*fC*fG*A*fG*fA*fA*fG*fA*fG*fG*fA*fG* | 97 | UGUCGAGAAGAGGAGA | 96 | XXXXXXXXXXXXXXX |
| 42732 | fA*mA*mC*mA*mA*mU*mA*mU*mG*mC*mU*mA* | | ACAAUAUGCUAAAUGU | | XXXXXXXXXXXXXXX |
| | mA*fA*fU*fG*fU*fU*fG*fU*fU | | UGUU | | XXXXX |
| WV- | fU*SfG*SfU*SfC*SfG*SfA*SfG*SfA*SfA*SfG*SfA* | 98 | UGUCGAGAAGAGGAGA | 96 | SSSSSSSSSSSSSSSSSSS |
| 42733 | SfG*SfG*SfA*SfG*SfA*SmA*SmC*SmA*SmA*SmU* | | ACAAUAUGCUAAAUGU | | SSSSSSSSSSSSSSSS |
| | SmA*SmU*SmG*SmC*SmU*SmA*SmA*SfA*SfU*SfG* | | UGUU | | |
| | SfU*SfU*SfG*SfU*SfU | | | | |

TABLE 1C
Example oligonucleotides and/or compositions that target LUC.

| | | SEQ | | SEQ | |
|---|---|---|---|---|---|
| | | ID | | ID | Stereochemistry/ |
| ID | Description | NO | Base Sequence | NO | Linkage |
| WV- | mA*mC*mA*fUfAfAfUfUfUfAfCfAfCfGfAfAfAfGmA | 99 | ACAUAAUUUACACGAA | 100 | XXXOOOOOOOOOOO |
| 42707 | mAmGmGmUmUmCmUmAmAmACCAmU*mC*mC* | | AGAAGGUUCUAAACCA | | OOOOOOOOOOOOOO |
| | mU | | UCCU | | OOOOXXX |
| WV- | mA*mC*mA*fU*fA*fA*fU*fU*fU*fA*fC*fA*fC*fG* | 101 | ACAUAAUUUACACGAA | 100 | XXXXXXXXXXXXXX |
| 42708 | fA*fA*fA*fG*mA*mA*mG*mG*mU*mU*mC*mU*mA* | | AGAAGGUUCUAAACCA | | XXXXXXXXXXXXXX |
| | mA*mA*C*C*A*mU*mC*mC*mU | | UCCU | | XXXXXXX |
| WV- | mA*SmC*SmA*SfU*SfA*SfA*SfU*SfU*SfU*SfA*SfC* | 102 | ACAUAAUUUACACGAA | 100 | SSSSSSSSSSSSSSSSSSS |
| 42709 | SfA*SfC*SfG*SfA*SfA*SfA*SfG*SmA*SmA*SmG* | | AGAAGGUUCUAAACCA | | SSSSSSSSSSSSSSSS |
| | SmG*SmU*SmU*SmC*SmU*SmA*SmA*SmA*SC*SC* | | UCCU | | |
| | SA*SmU*SmC*SmC*SmU | | | | |
| WV- | mA*SmC*SmA*SfU*SfA*SfA*SfU*SfU*SfU*SfA*SfC* | 103 | ACAUAAUUUACACGAA | 100 | SSSSSSSSSSSSSSSSSSS |
| 42710 | SfA*SfC*SfG*SfA*SfA*SfA*SfG*SmA*SmA*SmG* | | AGAAGGUUCUAAACCA | | SSSSSSSSSSSSnRSSnR |
| | SmG*SmU*SmU*SmC*SmU*SmA*SmA*SmA*SC*SC* | | UCCU | | |
| | SAn001RmU*SmC*SmCn001RmU | | | | |

TABLE 1D
Example oligonucleotides and/or compositions that target SERPINA1.

| | | SEQ | | SEQ | |
|---|---|---|---|---|---|
| | | ID | | ID | Stereochemistry/ |
| ID | Description | NO | Base Sequence | NO | Linkage |
| WV- | mCn001RmA*SmG*SmC*SmU*SmU*SmC*SmA*SmG* | 104 | CAGCUUCAGUCCCUUU | 105 | nRSSSSSSSSSSSSSSSSS |
| 42060 | SmU*SmC*SmC*SmC*SmU*SmU*SfU*SfC*SfU* | | CUCIUCGAUGGUCA | | SnSSSSSSSSSnR |
| | SC*SIn001SfU*SfC*SfG*SfA*SfU*SfG*SfG*SfU* | | | | |
| | SfCn001RfA | | | | |
| WV- | mGn001RmC*SmA*SmG*SmC*SmU*SmU*SmC*SmA* | 106 | GCAGCUUCAGUCCCUU | 107 | nRSSSSSSSSSSSSSSSSS |
| 42059 | SmG*SmU*SmC*SmC*SmC*SmU*SfU*SfU*SfC* | | UCUCIUCGAUGGUC | | SSnSSSSSSSSnR |
| | SfU*SC*SIn001SfU*SfC*SfG*SfA*SfU*SfG*SfG* | | | | |
| | SfUn001RfC | | | | |
| WV- | mAn001RmG*SmC*SmA*SmG*SmC*SmU*SmU*SmC* | 108 | AGCAGCUUCAGUCCCU | 109 | nRSSSSSSSSSSSSSSSSS |
| 42058 | SmA*SmG*SmU*SmC*SmC*SmC*SfU*SfU*SfU* | | UUCUCIUCGAUGGU | | SSSnSSSSSSSnR |
| | SfC*SfU*SC*SIn001SfU*SfC*SfG*SfA*SfU*SfG* | | | | |
| | SfGn001RfU | | | | |
| WV- | mCn001RmA*SmG*SmC*SmA*SmG*SmC*SmU*SmU* | 110 | CAGCAGCUUCAGUCCC | 111 | nRSSSSSSSSSSSSSSSSS |
| 42057 | SmC*SmA*SmG*SmU*SmC*SmC*SfC*SfU*SfU* | | UUUCUCIUCGAUGG | | SSSSnSSSSSSnR |
| | SfU*SfC*SfU*SC*SIn001SfU*SfC*SfG*SfA*SfU* | | | | |
| | SfGn001RfG | | | | |
| WV- | mCn001RmC*SmA*SmG*SmC*SmA*SmG*SmC*SmU* | 112 | CCAGCAGCUUCAGUCC | 113 | nRSSSSSSSSSSSSSSSSS |
| 42056 | SmU*SmC*SmA*SmG*SmU*SmC*SfC*SfC*SfU* | | CUUUCUCIUCGAUG | | SSSSSnSSSSSnR |
| | SfU*SfU*SfC*SfU*SC*SIn001SfU*SfC*SfG*SfA* | | | | |
| | SfUn001RfG | | | | |
| WV- | mCn001RmC*SmC*SmA*SmG*SmC*SmA*SmG*SmC* | 114 | CCCAGCAGCUUCAGUC | 115 | nRSSSSSSSSSSSSSSSSS |
| 42055 | SmU*SmU*SmC*SmA*SmG*SmU*SfC*SfC*SfC* | | CCUUUCUCIUCGAU | | SSSSSSnSSSSnR |
| | SfU*SfU*SfU*SfC*SfU*SC*SIn001SfU*SfC*SfG* | | | | |
| | SfAn001RfU | | | | |
| WV- | mCn001RmC*SmC*SmC*SmA*SmG*SmC*SmA*SmG* | 116 | CCCCAGCAGCUUCAGU | 117 | nRSSSSSSSSSSSSSSSSS |
| 42054 | SmC*SmU*SmU*SmC*SmA*SmG*SfU*SfC*SfC* | | CCCUUUCUCIUCGA | | SSSSSSSnSSSnR |
| | SfC*SfU*SfU*SfU*SfC*SfU*SC*SIn001SfU*SfC* | | | | |
| | SfGn001RfA | | | | |
| WV- | mGn001RmC*SmC*SmC*SmC*SmA*SmG*SmC*SmA* | 118 | GCCCCAGCAGCUUCAG | 119 | nRSSSSSSSSSSSSSSSSS |
| 42053 | SmG*SmC*SmU*SmU*SmC*SmA*SfG*SfU*SfC* | | UCCCUUUCUCIUCG | | SSSSSSSSnSSnR |
| | SfC*SfC*SfU*SfU*SfU*SfC*SfU*SC*SIn001SfU* | | | | |
| | SfCn001RfG | | | | |
| WV- | mGn001RmG*SmC*SmC*SmC*SmC*SmA*SmG*SmC* | 120 | GGCCCCAGCAGCUUCA | 121 | nRSSSSSSSSSSSSSSSSS |
| 42052 | SmA*SmG*SmC*SmU*SmU*SmC*SfA*SfG*SfU* | | GUCCCUUUCUCIUC | | SSSSSSSSSnSnR |
| | SfC*SfC*SfC*SfU*SfU*SfU*SfC*SfU*SC* | | | | |
| | SIn001SfUn001RfC | | | | |
| WV- | mUn001RmG*SmG*SmC*SmC*SmC*SmC*SmA*SmG* | 122 | UGGCCCCAGCAGCUUC | 123 | nRSSSSSSSSSSSSSSSSS |
| 42051 | SmC*SmA*SmG*SmC*SmU*SmU*SfC*SfA*SfG* | | AGUCCCUUUCUCIU | | SSSSSSSSSSnS |
| | SfU*SfC*SfC*SfC*SfU*SfU*SfU*SfC*SfU*SC* | | | | |
| | SIn001SfU | | | | |
| WV- | fUn001RC*SIn001SfU*SfC*SfG*SfA*SfU*SfG*SfG* | 124 | UCIUCGAUGGUCAGCAC | 125 | nRSnSSSSSSSSSSSSSSS |
| 42050 | SfU*SfC*SfA*SfG*SfC*SmA*SmC*SmA*SmG*SmC* | | AGCCUUAUGCACG | | SSSSSSSSSSSnR |
| | SmC*SmU*SmU*SmA*SmU*SmG*SmC*SmA* | | | | |
| | SmCn001RmG | | | | |
| WV- | fCn001RfU*SC*SIn001SfU*SfC*SfG*SfA*SfU*SfG* | 126 | CUCIUCGAUGGUCAGCA | 127 | nRSSnSSSSSSSSSSSSSS |
| 42049 | SfG*SfU*SfC*SfA*SfG*SmC*SmA*SmC*SmA*SmG* | | CAGCCUUAUGCAC | | SSSSSSSSSSSnR |
| | SmC*SmC*SmU*SmU*SmA*SmU*SmG*SmC* | | | | |
| | SmAn001RmC | | | | |
| WV- | fUn001RfC*SfU*SC*SIn001SfU*SfC*SfG*SfA*SfU* | 128 | UCUCIUCGAUGGUCAGC | 129 | nRSSSnSSSSSSSSSSSSS |
| 42048 | SfG*SfG*SfU*SfC*SfA*SmG*SmC*SmA*SmC*SmA* | | ACAGCCUUAUGCA | | SSSSSSSSSSSnR |
| | SmG*SmC*SmC*SmU*SmU*SmA*SmU*SmG* | | | | |
| | SmCn001RmA | | | | |
| WV- | fUn001RfU*SfC*SfU*SC*SIn001SfU*SfC*SfG*SfA* | 130 | UUCUCIUCGAUGGUCAG | 131 | nRSSSSnSSSSSSSSSSSS |
| 42047 | SfU*SfG*SfG*SfU*SfC*SmA*SmG*SmC*SmA*SmC* | | CACAGCCUUAUGC | | SSSSSSSSSSSnR |
| | SmA*SmG*SmC*SmC*SmU*SmU*SmA*SmU* | | | | |
| | SmGn001RmC | | | | |
| WV- | fUn001RfU*SfU*SfC*SfU*SC*SIn001SfU*SfC*SfG* | 132 | UUUCUCIUCGAUGGUCA | 133 | nRSSSSSnSSSSSSSSSSS |
| 42046 | SfA*SfU*SfG*SfG*SfU*SmC*SmA*SmG*SmC*SmA* | | GCACAGCCUUAUG | | SSSSSSSSSSSnR |
| | SmC*SmA*SmG*SmC*SmC*SmU*SmU*SmA* | | | | |
| | SmUn001RmG | | | | |
| WV- | fCn001RfU*SfU*SfU*SfC*SfU*SC*SIn001SfU*SfC* | 134 | CUUUCUCIUCGAUGGUC | 135 | nRSSSSSSnSSSSSSSSSS |
| 42045 | SfG*SfA*SfU*SfG*SfG*SmU*SmC*SmA*SmG*SmC* | | AGCACAGCCUUAU | | SSSSSSSSSSSnR |
| | SmA*SmC*SmA*SmG*SmC*SmC*SmU*SmU* | | | | |
| | SmAn001RmU | | | | |
| WV- | fCn001RfC*SfU*SfU*SfU*SfC*SfU*SC*SIn001SfU* | 136 | CCUUUCUCIUCGAUGGU | 137 | nRSSSSSSSnSSSSSSSSS |
| 42044 | SfC*SfG*SfA*SfU*SfG*SmG*SmU*SmC*SmA*SmG* | | CAGCACAGCCUUA | | SSSSSSSSSSSnR |
| | SmC*SmA*SmC*SmA*SmG*SmC*SmC*SmU* | | | | |
| | SmUn001RmA | | | | |
| WV- | fCn001RfC*SfC*SfU*SfU*SfU*SfC*SfU*SC* | 138 | CCCUUUCUCIUCGAUGG | 139 | nRSSSSSSSSnSSSSSSSS |
| 42043 | SIn001SfU*SfC*SfG*SfA*SfU*SmG*SmG*SmU*SmC* | | UCAGCACAGCCUU | | SSSSSSSSSSSnR |
| | SmA*SmG*SmC*SmA*SmC*SmA*SmG*SmC*SmC* | | | | |
| | SmUn001RmU | | | | |
| WV- | fUn001RfC*SfC*SfC*SfU*SfU*SfU*SfC*SfU*SC* | 140 | UCCCUUUCUCIUCGAUG | 141 | nRSSSSSSSSSnSSSSSSS |
| 42042 | SIn001SfU*SfC*SfG*SfA*SmU*SmG*SmG*SmU*SmC* | | GUCAGCACAGCCU | | SSSSSSSSSSSnR |
| | SmA*SmG*SmC*SmA*SmC*SmA*SmG*SmC* | | | | |
| | SmCn001RmU | | | | |
| WV- | fGn001RfU*SfC*SfC*SfC*SfU*SfU*SfU*SfC*SfU* | 142 | GUCCCUUUCUCIUCGAU | 143 | nRSSSSSSSSSSnSSSSSS |
| 42041 | SC*SIn001SfU*SfC*SfG*SmA*SmU*SmG*SmG*SmU* | | GGUCAGCACAGCC | | SSSSSSSSSSSnR |
| | SmC*SmA*SmG*SmC*SmA*SmC*SmA*SmG* | | | | |
| | SmCn001RmC | | | | |
| WV- | fAn001RfG*SfU*SfC*SfC*SfC*SfU*SfU*SfU*SfC* | 144 | AGUCCCUUUCUCIUCGA | 145 | nRSSSSSSSSSSSnSSSSS |
| 42040 | SfU*SC*SIn001SfU*SfC*SmG*SmA*SmU*SmG*SmG* | | UGGUCAGCACAGC | | SSSSSSSSSSSnR |
| | SmU*SmC*SmA*SmG*SmC*SmA*SmC*SmA* | | | | |
| | SmGn001RmC | | | | |
| WV- | fCn001RfA*SfG*SfU*SfC*SfC*SfC*SfU*SfU*SfU* | 146 | CAGUCCCUUUCUCIUCG | 147 | nRSSSSSSSSSSSSnSSSS |
| 42039 | SfC*SfU*SC*SIn001SfU*SmC*SmG*SmA*SmU*SmG* | | AUGGUCAGCACAG | | SSSSSSSSSSSnR |
| | SmG*SmU*SmC*SmA*SmG*SmC*SmA*SmC* | | | | |
| | SmAn001RmG | | | | |
| WV- | fUn001RfC*SfA*SfG*SfU*SfC*SfC*SfC*SfU*SfU* | 148 | UCAGUCCCUUUCUCIUC | 149 | nRSSSSSSSSSSSSSSSS |
| 42038 | SfU*SfC*SfU*SC*SIn001SmU*SmC*SmG*SmA*SmU* | | GAUGGUCAGCACA | | SSSSSSSSSSSnR |
| | SmG*SmG*SmU*SmC*SmA*SmG*SmC*SmA* | | | | |
| | SmCn001RmA | | | | |
| WV- | fUn001RfU*SfC*SfA*SfG*SfU*SfC*SfC*SfC*SfU* | 150 | UUCAGUCCCUUUCUCIU | 151 | nRSSSSSSSSSSSSSSnSS |
| 42037 | SfU*SfU*SfC*SfU*SC*SIn001SmU*SmC*SmG*SmA* | | CGAUGGUCAGCAC | | SSSSSSSSSSSnR |
| | SmU*SmG*SmG*SmU*SmC*SmA*SmG*SmC* | | | | |
| | SmAn001RmC | | | | |
| WV- | fCn001RfU*SfU*SfC*SfA*SfG*SfU*SfC*SfC*SfC* | 152 | CUUCAGUCCCUUUCUCI | 153 | nRSSSSSSSSSSSSSSSnS |
| 42036 | SfU*SfU*SfU*SfC*SfU*SC*SIn001SmU*SmC*SmG* | | UCGAUGGUCAGCA | | SSSSSSSSSSSnR |
| | SmA*SmU*SmG*SmG*SmU*SmC*SmA*SmG* | | | | |
| | SmCn001RmA | | | | |
| WV- | fGn001RfC*SfU*SfU*SfC*SfA*SfG*SfU*SfC*SfC* | 154 | GCUUCAGUCCCUUUCU | 155 | nRSSSSSSSSSSSSSSSSn |
| 42035 | SfC*SfU*SfU*SfU*SfC*SfU*SC*SIn001SmU*SmC* | | CIUCGAUGGUCAGC | | SSSSSSSSSSSnR |
| | SmG*SmA*SmU*SmG*SmG*SmU*SmC*SmA* | | | | |
| | SmGn001RmC | | | | |
| WV- | fAn001RfG*SfC*SfU*SfU*SfC*SfA*SfG*SfU*SfC* | 156 | AGCUUCAGUCCCUUUC | 157 | nRSSSSSSSSSSSSSSSSS |
| 42034 | SfC*SfC*SfU*SfU*SfU*SmC*SfU*SC*SIn001SmU* | | UCIUCGAUGGUCAG | | nSSSSSSSSSSnR |
| | SmC*SmG*SmA*SmU*SmG*SmG*SmU*SmC* | | | | |
| | SmAn001RmG | | | | |
| WV- | fCn001RfA*SfG*SfC*SfU*SfU*SfC*SfA*SfG*SfU* | 158 | CAGCUUCAGUCCCUUU | 105 | nRSSSSSSSSSSSSSSSSS |
| 42033 | SfC*SfC*SfC*SfU*SfU*SmU*SmC*SfU*SC* | | CUCIUCGAUGGUCA | | SnSSSSSSSSSnR |
| | SIn001SmU*SmC*SmG*SmA*SmU*SmG*SmG*SmU* | | | | |
| | SmCn001RmA | | | | |
| WV- | fGn001RfC*SfA*SfG*SfC*SfU*SfU*SfC*SfA*SfG* | 159 | GCAGCUUCAGUCCCUU | 107 | nRSSSSSSSSSSSSSSSSS |
| 42032 | SfU*SfC*SfC*SfC*SfU*SmU*SmU*SmC*SfU*SC* | | UCUCIUCGAUGGUC | | SSnSSSSSSSSnR |
| | SIn001SmU*SmC*SmG*SmA*SmU*SmG*SmG* | | | | |
| | SmUn001RmC | | | | |
| WV- | fAn001RfG*SfC*SfA*SfG*SfC*SfU*SfU*SfC*SfA* | 160 | AGCAGCUUCAGUCCCU | 109 | nRSSSSSSSSSSSSSSSSS |
| 42031 | SfG*SfU*SfC*SfC*SfC*SmU*SmU*SmU*SmC*SfU*SC* | | UUCUCIUCGAUGGU | | SSSnSSSSSSSnR |
| | SIn001SmU*SmC*SmG*SmA*SmU*SmG* | | | | |
| | SmGn001RmU | | | | |
| WV- | fCn001RfA*SfG*SfC*SfA*SfG*SfC*SfU*SfU*SfC* | 161 | CAGCAGCUUCAGUCCC | 111 | nRSSSSSSSSSSSSSSSSS |
| 42030 | SfA*SfG*SfU*SfC*SfC*SmC*SmU*SmU*SmU*SmC* | | UUUCUCIUCGAUGG | | SSSSSSSSSSnR |
| | SfU*SC*SIn001SmU*SmC*SmG*SmA*SmU* | | | | |
| | SmGn001RmG | | | | |
| WV- | fCn001RfC*SfA*SfG*SfC*SfA*SfG*SfC*SfU*SfU* | 162 | CCAGCAGCUUCAGUCC | 113 | nRSSSSSSSSSSSSSSSSS |
| 42029 | SfC*SfA*SfG*SfU*SfC*SmC*SmC*SmU*SmU*SmU* | | CUUUCUCIUCGAUG | | SSSSSnSSSSSnR |
| | SmC*SfU*SC*SIn001SmU*SmC*SmG*SmA* | | | | |
| | SmUn001RmG | | | | |
| WV- | fCn001RfC*SfC*SfA*SfG*SfC*SfA*SfG*SfC*SfU* | 163 | CCCAGCAGCUUCAGUC | 115 | nRSSSSSSSSSSSSSSSSS |
| 42028 | SfU*SfC*SfA*SfG*SfU*SmC*SmC*SmC*SmU*SmU* | | CCUUUCUCIUCGAU | | SSSSSSSSSSnR |
| | SmU*SmC*SfU*SC*SIn001SmU*SmC*SmG* | | | | |
| | SmAn001RmU | | | | |
| WV- | fCn001RfC*SfC*SfC*SfA*SfG*SfC*SfA*SfG*SfC* | 164 | CCCCAGCAGCUUCAGU | 117 | nRSSSSSSSSSSSSSSSSS |
| 42027 | SfU*SfU*SfC*SfA*SfG*SmU*SmC*SmC*SmC*SmU* | | CCCUUUCUCIUCGA | | SSSSSSSnSSSnR |
| | SmU*SmU*SmC*SfU*SC*SIn001SmU*SmC* | | | | |
| | SmGn001RmA | | | | |
| WV- | fGn001RfC*SfC*SfC*SfC*SfA*SfG*SfC*SfA*SfG* | 165 | GCCCCAGCAGCUUCAG | 119 | nRSSSSSSSSSSSSSSSSS |
| 42026 | SfC*SfU*SfU*SfC*SfA*SmG*SmU*SmC*SmC*SmC* | | UCCCUUUCUCIUCG | | SSSSSSSSnSSnR |
| | SmU*SmU*SmU*SmC*SfU*SC*SIn001SmU* | | | | |
| | SmCn001RmG | | | | |
| WV- | fGn001RfG*SfC*SfC*SfC*SfC*SfA*SfG*SfC*SfA* | 166 | GGCCCCAGCAGCUUCA | 121 | nRSSSSSSSSSSSSSSSSS |
| 42025 | SfG*SfC*SfU*SfU*SfC*SmA*SmG*SmU*SmC*SmC* | | GUCCCUUUCUCIUC | | SSSSSSSSSnSnR |
| | SmC*SmU*SmU*SmU*SmC*SfU*SC* | | | | |
| | SIn001SmUn001RmC | | | | |
| WV- | fUn001RfG*SfG*SfC*SfC*SfC*SfC*SfA*SfG*SfC* | 167 | UGGCCCCAGCAGCUUC | 123 | nRSSSSSSSSSSSSSSSSS |
| 42024 | SfA*SfG*SfC*SfU*SfU*SmC*SmA*SmG*SmU*SmC* | | AGUCCCUUUCUCIU | | SSSSSSSSSSnS |
| | SmC*SmC*SmU*SmU*SmU*SmC*SfU*SC* | | | | |
| | SIn001SmU | | | | |
| WV- | mCn001RfU*SC*SIn001SmU*SmC*SmG*SmA*SmU* | 168 | CUCIUCGAUGGUCAGCA | 127 | nRSSnSSSSSSSSSSSSSS |
| 42076 | SmG*SmG*SmU*SmC*SmA*SmG*SfC*SfA*SfC*SfA* | | CAGCCUUAUGCAC | | SSSSSSSSSSSnR |
| | SfG*SfC*SfC*SfU*SfU*SfA*SfU*SfG*SfC* | | | | |
| | SfAn001RfC | | | | |
| WV- | mUn001RmC*SfU*SC*SIn001SmU*SmC*SmG*SmA* | 169 | UCUCIUCGAUGGUCAGC | 129 | nRSSSnSSSSSSSSSSSSS |
| 42075 | SmU*SmG*SmG*SmU*SmC*SmA*SfG*SfC*SfA*SfC* | | ACAGCCUUAUGCA | | SSSSSSSSSSSnR |
| | SfA*SfG*SfC*SfC*SfU*SfU*SfA*SfU*SfG* | | | | |
| | SfCn001RfA | | | | |
| WV- | mUn001RmU*SmC*SfU*SC*SIn001SmU*SmC*SmG* | 170 | UUCUCIUCGAUGGUCAG | 131 | nRSSSSnSSSSSSSSSSSS |
| 42074 | SmA*SmU*SmG*SmG*SmU*SmC*SfA*SfG*SfC*SfA* | | CACAGCCUUAUGC | | SSSSSSSSSSSnR |
| | SfC*SfA*SfG*SfC*SfC*SfU*SfU*SfA*SfU* | | | | |
| | SfGn001RfC | | | | |
| WV- | mUn001RmU*SmU*SmC*SfU*SC*SIn001SmU*SmC* | 171 | UUUCUCIUCGAUGGUCA | 133 | nRSSSSSnSSSSSSSSSSS |
| 42073 | SmG*SmA*SmU*SmG*SmG*SmU*SfC*SfA*SfG*SfC* | | GCACAGCCUUAUG | | SSSSSSSSSSSnR |
| | SfA*SfC*SfA*SfG*SfC*SfC*SfU*SfU*SfA* | | | | |
| | SfUn001RfG | | | | |
| WV- | mCn001RmU*SmU*SmU*SmC*SfU*SC*SIn001SmU* | 172 | CUUUCUCIUCGAUGGUC | 135 | nRSSSSSSnSSSSSSSSSS |
| 42072 | SmC*SmG*SmA*SmU*SmG*SmG*SfU*SfC*SfA*SfG* | | AGCACAGCCUUAU | | SSSSSSSSSSSnR |
| | SfC*SfA*SfC*SfA*SfG*SfC*SfC*SfU*SfU* | | | | |
| | SfAn001RfU | | | | |
| WV- | mCn001RmC*SmU*SmU*SmU*SmC*SfU*SC*SIn001SmU* | 173 | CCUUUCUCIUCGAUGGU | 137 | nRSSSSSSSnSSSSSSSSS |
| 42071 | SmC*SmG*SmA*SmU*SmG*SfG*SfU*SfC*SfA* | | CAGCACAGCCUUA | | SSSSSSSSSSSnR |
| | SfG*SfC*SfA*SfC*SfA*SfG*SfC*SfC*SfU* | | | | |
| | SfUn001RfA | | | | |
| WV- | mCn001RmC*SmC*SmU*SmU*SmU*SmC*SfU*SC* | 174 | CCCUUUCUCIUCGAUGG | 139 | nRSSSSSSSSnSSSSSSSS |
| 42070 | SIn001SmU*SmC*SmG*SmA*SmU*SfG*SfG*SfU*SfC* | | UCAGCACAGCCUU | | SSSSSSSSSSSnR |
| | SfA*SfG*SfC*SfA*SfC*SfA*SfG*SfC*SfC* | | | | |
| | SfUn001RfU | | | | |
| WV- | mUn001RmC*SmC*SmC*SmU*SmU*SmU*SmC*SfU* | 175 | UCCCUUUCUCIUCGAUG | 141 | nRSSSSSSSSSnSSSSSSS |
| 42069 | SC*SIn001SmU*SmC*SmG*SmA*SfU*SfG*SfG*SfU* | | GUCAGCACAGCCU | | SSSSSSSSSSSnR |
| | SfC*SfA*SfG*SfC*SfA*SfC*SfA*SfG*SfC* | | | | |
| | SfCn001RfU | | | | |
| WV- | mGn001RmU*SmC*SmC*SmC*SmU*SmU*SmU*SmC* | 176 | GUCCCUUUCUCIUCGAU | 143 | nRSSSSSSSSSSnSSSSSS |
| 42068 | SfU*SC*SIn001SmU*SmC*SmG*SfA*SfU*SfG*SfG* | | GGUCAGCACAGCC | | SSSSSSSSSSSnR |
| | SfU*SfC*SfA*SfG*SfC*SfA*SfC*SfA*SfG* | | | | |
| | SfCn001RfC | | | | |
| WV- | mAn001RmG*SmU*SmC*SmC*SmC*SmU*SmU*SmU* | 177 | AGUCCCUUUCUCIUCGA | 145 | nRSSSSSSSSSSSnSSSSS |
| 42067 | SmC*SfU*SC*SIn001SmU*SmC*SfG*SfA*SfU*SfG* | | UGGUCAGCACAGC | | SSSSSSSSSSSnR |
| | SfG*SfU*SfC*SfA*SfG*SfC*SfA*SfC*SfA* | | | | |
| | SfGn001RfC | | | | |
| WV- | mUn001RmC*SmA*SmG*SmU*SmC*SmC*SmC*SmU* | 178 | UCAGUCCCUUUCUCIUC | 149 | nRSSSSSSSSSSSSSnSSS |
| 42065 | SmU*SmU*SmC*SfU*SC*SIn001SfU*SfC*SfG*SfA* | | GAUGGUCAGCACA | | SSSSSSSSSSSnR |
| | SfU*SfG*SfG*SfU*SfC*SfA*SfG*SfC*SfA* | | | | |
| | SfCn001RfA | | | | |
| WV- | mUn001RmU*SmC*SmA*SmG*SmU*SmC*SmC*SmC* | 179 | UUCAGUCCCUUUCUCIU | 151 | nRSSSSSSSSSSSSSSnSS |
| 42064 | SmU*SmU*SmU*SmC*SfU*SC*SIn001SfU*SfC*SfG* | | CGAUGGUCAGCAC | | SSSSSSSSSSSnR |
| | SfA*SfU*SfG*SfG*SfU*SfC*SfA*SfG*SfC* | | | | |
| | SfAn001RfC | | | | |
| WV- | mCn001RmU*SmU*SmC*SmA*SmG*SmU*SmC*SmC* | 180 | CUUCAGUCCCUUUCUCI | 153 | nRSSSSSSSSSSSSSSSnS |
| 42063 | SmC*SmU*SmU*SmU*SmC*SfU*SC*SIn001SfU* | | UCGAUGGUCAGCA | | SSSSSSSSSSSnR |
| | SfC*SfG*SfA*SfU*SfG*SfG*SfU*SfC*SfA*SfG* | | | | |
| | SfCn001RfA | | | | |
| WV- | mGn001RmC*SmU*SmU*SmC*SmA*SmG*SmU*SmC* | 181 | GCUUCAGUCCCUUUCU | 155 | nRSSSSSSSSSSSSSSSSn |
| 42062 | SmC*SmC*SmU*SmU*SmU*SmC*SfU*SC*SIn001SfU* | | CIUCGAUGGUCAGC | | SSSSSSSSSSSnR |
| | SfC*SfG*SfA*SfU*SfG*SfG*SfU*SfC*SfA* | | | | |
| | SfGn001RfC | | | | |
| WV- | fCn001RfU*SfU*SfC*SfA*SfG*SfU*SfC*SfC*SfC* | 182 | CUUCAGUCCCUUUCUAI | 183 | nRSSSSSSSSSSSSSSSnS |
| 42688 | SfU*SfU*SfU*SfC*SfU*Sb001A*SIn001SmU*SmC* | | UCGAUGGUCAGCA | | SSSSSSSSSSSnR |
| | SmG*SmA*SmU*SmG*SmG*SmU*SmC*SmA*SmG* | | | | |
| | SmCn001RmA | | | | |
| WV- | fGn001RfC*SfU*SfU*SfC*SfA*SfG*SfU*SfC*SfC* | 184 | GCUUCAGUCCCUUUCU | 185 | nRSSSSSSSSSSSSSSSSn |
| 42687 | SfC*SfU*SfU*SfU*SfC*SfU*Sb001A*SIn001SmU* | | AIUCGAUGGUCAGC | | SSSSSSSSSSSnR |
| | SmC*SmG*SmA*SmU*SmG*SmG*SmU*SmC*SmA* | | | | |
| | SmGn001RmC | | | | |
| WV- | fAn001RfG*SfC*SfU*SfU*SfC*SfA*SfG*SfU*SfC* | 186 | AGCUUCAGUCCCUUUC | 187 | nRSSSSSSSSSSSSSSSSS |
| 42686 | SfC*SfC*SfU*SfU*SfU*SmC*SfU*Sb001A* | | UAIUCGAUGGUCAG | | nSSSSSSSSSSnR |
| | SIn001SmU*SmC*SmG*SmA*SmU*SmG*SmG*SmU*SmC* | | | | |
| | SmAn001RmG | | | | |
| WV- | fCn001RfA*SfG*SfC*SfU*SfU*SfC*SfA*SfG*SfU* | 188 | CAGCUUCAGUCCCUUU | 189 | nRSSSSSSSSSSSSSSSSS |
| 42685 | SfC*SfC*SfC*SfU*SfU*SmU*SmC*SfU*Sb001A* | | CUAIUCGAUGGUCA | | SnSSSSSSSSSnR |
| | SIn001SmU*SmC*SmG*SmA*SmU*SmG*SmG*SmU* | | | | |
| | SmCn001RmA | | | | |
| WV- | fGn001RfC*SfA*SfG*SfC*SfU*SfU*SfC*SfA*SfG* | 190 | GCAGCUUCAGUCCCUU | 191 | nRSSSSSSSSSSSSSSSSS |
| 42684 | SfU*SfC*SfC*SfC*SfU*SmU*SmU*SmC*SfU*Sb001A* | | UCUAIUCGAUGGUC | | SSnSSSSSSSSnR |
| | SIn001SmU*SmC*SmG*SmA*SmU*SmG*SmG* | | | | |
| | SmUn001RmC | | | | |
| WV- | fAn001RfG*SfC*SfA*SfG*SfC*SfU*SfU*SfC*SfA* | 192 | AGCAGCUUCAGUCCCU | 193 | nRSSSSSSSSSSSSSSSSS |
| 42683 | SfG*SfU*SfC*SfC*SfC*SmU*SmU*SmU*SmC*SfU* | | UUCUAIUCGAUGGU | | SSSnSSSSSSSnR |
| | Sb001A*SIn001SmU*SmC*SmG*SmA*SmU*SmG* | | | | |
| | SmGn001RmU | | | | |
| WV- | fCn001RfA*SfG*SfC*SfA*SfG*SfC*SfU*SfU*SfC* | 194 | CAGCAGCUUCAGUCCC | 195 | nRSSSSSSSSSSSSSSSSS |
| 42682 | SfA*SfG*SfU*SfC*SfC*SmC*SmU*SmU*SmU*SmC* | | UUUCUAIUCGAUGG | | SSSSnSSSSSSnR |
| | SfU*Sb001A*SIn001SmU*SmC*SmG*SmA*SmU* | | | | |
| | SmGn001RmG | | | | |
| WV- | fCn001RfC*SfA*SfG*SfC*SfA*SfG*SfC*SfU*SfU* | 196 | CCAGCAGCUUCAGUCC | 197 | nRSSSSSSSSSSSSSSSSS |
| 42681 | SfC*SfA*SfG*SfU*SfC*SmC*SmC*SmU*SmU*SmU* | | CUUUCUAIUCGAUG | | SSSSSnSSSSSnR |
| | SmC*SfU*Sb001A*SIn001SmU*SmC*SmG*SmA* | | | | |
| | SmUn001RmG | | | | |
| WV- | fCn001RfC*SfC*SfA*SfG*SfC*SfA*SfG*SfC*SfU* | 198 | CCCAGCAGCUUCAGUC | 199 | nRSSSSSSSSSSSSSSSSS |
| 42680 | SfU*SfC*SfA*SfG*SfU*SmC*SmC*SmC*SmU*SmU* | | CCUUUCUAIUCGAU | | SSSSSSnSSSSnR |
| | SmU*SmC*SfU*Sb001A*SIn001SmU*SmC*SmG* | | | | |
| | SmAn001RmU | | | | |
| WV- | fCn001RfC*SfC*SfC*SfA*SfG*SfC*SfA*SfG*SfC* | 200 | CCCCAGCAGCUUCAGU | 201 | nRSSSSSSSSSSSSSSSSS |
| 42679 | SfU*SfU*SfC*SfA*SfG*SmU*SmC*SmC*SmC*SmU* | | CCCUUUCUAIUCGA | | SSSSSSSnSSSnR |
| | SmU*SmU*SmC*SfU*Sb001A*SIn001SmU*SmC* | | | | |
| | SmGn001RmA | | | | |
| WV- | fGn001RfC*SfC*SfC*SfC*SfA*SfG*SfC*SfA*SfG* | 202 | GCCCCAGCAGCUUCAG | 203 | nRSSSSSSSSSSSSSSSSS |
| 42678 | SfC*SfU*SfU*SfC*SfA*SmG*SmU*SmC*SmC*SmC* | | UCCCUUUCUAIUCG | | SSSSSSSSnSSnR |
| | SmU*SmU*SmU*SmC*SfU*Sb001A*SIn001SmU* | | | | |
| | SmCn001RmG | | | | |
| WV- | fGn001RfG*SfC*SfC*SfC*SfC*SfA*SfG*SfC*SfA* | 204 | GGCCCCAGCAGCUUCA | 205 | nRSSSSSSSSSSSSSSSSS |
| 42677 | SfG*SfC*SfU*SfU*SfC*SmA*SmG*SmU*SmC*SmC* | | GUCCCUUUCUAIUC | | SSSSSSSSSnSnR |
| | SmC*SmU*SmU*SmU*SmC*SfU*Sb001A* | | | | |
| | SIn001SmUn001RmC | | | | |
| WV- | fUn001RfG*SfG*SfC*SfC*SfC*SfC*SfA*SfG*SfC* | 206 | UGGCCCCAGCAGCUUC | 207 | nRSSSSSSSSSSSSSSSSS |
| 42676 | SfA*SfG*SfC*SfU*SfU*SmC*SmA*SmG*SmU*SmC* | | AGUCCCUUUCUAIU | | SSSSSSSSSSnS |
| | SmC*SmC*SmU*SmU*SmU*SmC*SfU*Sb001A* | | | | |
| | SIn001SmU | | | | |
| WV- | fCn001RfC*SfC*SfC*SfA*SfG*SfC*SfA*SfG*SfC* | 208 | CCCCAGCAGCUUCAGU | 209 | nRSSSSSSSSSSSSSSSSS |
| 42327 | SfU*SfU*SfC*SfA*SfG*SmU*SmC*SmC*SmC*SmU* | | CCCUUUCTUIUCGA | | SSSSSSSnXSSnR |
| | SmU*SmU*SmC*ST*Sb008U*SIn001mU*SmC* | | | | |
| | SmGn001RmA | | | | |
| WV- | fCn001RfC*SfC*SfC*SfA*SfG*SfC*SfA*SfG*SfC* | 210 | CCCCAGCAGCUUCAGU | 211 | nRSSSSSSSSSSSSSSSSS |
| 38630 | SfU*SfU*SfC*SfA*SfG*SmU*SmC*SmC*SmC*SmU* | | CCCUUUCTAIUCGA | | SSSSSSSnXSSnR |
| | SmU*SmU*SmC*ST*Sb001A*SIn001mU*SmC* | | | | |
| | SmGn001RmA | | | | |
| WV- | fCn001RfC*SfC*SfC*SfA*SfG*SfC*SfA*SfG*SfC* | 212 | CCCCAGCAGCUUCAGU | 213 | nRSSSSSSSSSSSSSSSSS |
| 38629 | SfU*SfU*SfC*SfA*SfG*SmU*SmC*SmC*SmC*SmU* | | CCCUUUCTCIUCGA | | SSSSSSSnXSSnR |
| | SmU*SmU*SmC*ST*SrC*SIn001mU*SmC* | | | | |
| | SmGn001RmA | | | | |
| WV- | fCn001RfC*SfC*SfC*SfA*SfG*SfC*SfA*SfG*SfC* | 214 | CCCCAGCAGCUUCAGU | 209 | nRSSSSSSSSSSSSnRSnR |
| 42328 | SfU*SfU*SfC*SfAn001RfG*SmUn001RmC*SmC*SmC* | | CCCUUUCTUIUCGA | | SSSSSSSSSnXSSnR |
| | SmU*SmU*SmU*SmC*ST*Sb008U*SIn001mU*SmC* | | | | |
| | SmGn001RmA | | | | |
| WV- | fCn001RfC*SfC*SfC*SfA*SfG*SfC*SfA*SfG*SfC* | 215 | CCCCAGCAGCUUCAGU | 216 | nRSSSSSSSSSSSSnRSnR |
| 38923 | SfU*SfU*SfC*SfAn001RfG*SmUn001RmC*SmC*SmC* | | CCCUUUCTUGUCGA | | SSSSSSSSXnXSSnR |
| | SmU*SmU*SmU*SmC*ST*Sb008U*Gn001mU*SmC* | | | | |
| | SmGn001RmA | | | | |
| WV- | fCn001RfC*SfC*SfC*SfA*SfG*SfC*SfA*SfG*SfC* | 217 | CCCCAGCAGCUUCAGU | 211 | nRSSSSSSSSSSSSnRSnR |
| 38622 | SfU*SfU*SfC*SfAn001RfG*SmUn001RmC*SmC*SmC* | | CCCUUUCTAIUCGA | | SSSSSSSSSnXSSnR |
| | SmU*SmU*SmU*SmC*ST*Sb001A*SIn001mU*SmC* | | | | |
| | SmGn001RmA | | | | |
| WV- | fCn001RfC*SfC*SfC*SfA*SfG*SfC*SfA*SfG*SfC* | 218 | CCCCAGCAGCUUCAGU | 213 | nRSSSSSSSSSSSSnRSnR |
| 38621 | SfU*SfU*SfC*SfAn001RfG*SmUn001RmC*SmC*SmC* | | CCCUUUCTCIUCGA | | SSSSSSSSSnXSSnR |
| | SmU*SmU*SmU*SmC*ST*SrC*SIn001mU*SmC* | | | | |
| | SmGn001RmA | | | | |
| WV- | fCn001RfC*SfC*SfC*SfA*SfG*SfC*SfA*SfG*SfC* | 219 | CCCCAGCAGCUUCAGU | 213 | nRSSSSSSSSSSSSnRSnR |
| 38620 | SfU*SfU*SfC*SfAn001RfG*SmUn001RmC*SmC*SmC* | | CCCUUUCTCIUCGA | | SSSSSSSSSnXSSnR |
| | SmU*SmU*SmU*SmC*ST*SC*SIn001mU*SmC* | | | | |
| | SmGn001RmA | | | | |
| WV- | Mod001L001fCn001RfC*SfC*SfC*SfA*SfG*SfC*SfA* | 220 | CCCCAGCAGCUUCAGU | 211 | OnRSSSSSSSSSSSSnRSn |
| 42600 | SfG*SfC*SfU*SfU*SfC*SfAn001RfG*SmUn001RmC* | | CCCUUUCTAIUCGA | | RSSSSSSSSSnSSSnR |
| | SmC*SmC*SmU*SmU*SmU*SmC*ST*Sb001A* | | | | |
| | SIn001SmU*SmC*SmGn001RmA | | | | |
| WV- | Mod001L001fCn001RfC*SfC*SfA*SfG*SfC*SfA*SfG* | 221 | CCCAGCAGCUUCAGUC | 199 | OnRSSSSSSSSSSSSnRSn |
| 42960 | SfC*SfU*SfU*SfC*SfA*SfGn001RfU*SmCn001RmC* | | CCUUUCUAIUCGAU | | RSSSSSSSSnSSSSnR |
| | SmC*SmU*SmU*SmU*SmC*SfU*Sb001A* | | | | |
| | SIn001SmU*SmC*SmG*SmAn001RmU | | | | |
| WV- | Mod001L001fCn001RfC*SfC*SfA*SfG*SfC*SfA*SfG* | 222 | CCCAGCAGCUUCAGUC | 199 | OnRSSSSSSSSSSSSnRSn |
| 42962 | SfC*SfU*SfU*SfC*SfA*SfGn001RfU*SfCn001RfC* | | CCUUUCUAIUCGAU | | RSSSSSSSSnSSSSnR |
| | SfC*SfU*SfU*SfU*SmC*SfU*Sb001A*SIn001SmU* | | | | |
| | SmC*SfG*SfAn001RmU | | | | |
| WV- | fCn001RfC*SfC*SfA*SfG*SfC*SfA*SfG*SfC*SfU* | 223 | CCCAGCAGCUUCAGUC | 199 | nRSSSSSSSSSSSSnRSnR |
| 42958 | SfU*SfC*SfA*SfGn001RfU*SmCn001RmC*SmC*SmU* | | CCUUUCUAIUCGAU | | SSSSSSSSnSSSSnR |
| | SmU*SmU*SmC*SfU*Sb001A*SIn001SmU*SmC* | | | | |
| | SmG*SmAn001RmU | | | | |
| WV- | fCn001RfC*SfC*SfA*SfG*SfC*SfA*SfG*SfC*SfU* | 198 | CCCAGCAGCUUCAGUC | 199 | nRSSSSSSSSSSSSSSSSS |
| 42680 | SfU*SfC*SfA*SfG*SfU*SmC*SmC*SmC*SmU*SmU* | | CCUUUCUAIUCGAU | | SSSSSSnSSSSnR |
| | SmU*SmC*SfU*Sb001A*SIn001SmU*SmC*SmG* | | | | |
| | SmAn001RmU | | | | |
| WV- | fCn001RfC*SfC*SfA*SfG*SfC*SfA*SfG*SfC*SfU* | 163 | CCCAGCAGCUUCAGUC | 115 | nRSSSSSSSSSSSSSSSSS |
| 42028 | SfU*SfC*SfA*SfG*SfU*SmC*SmC*SmC*SmU*SmU* | | CCUUUCUCIUCGAU | | SSSSSSnSSSSnR |
| | SmU*SmC*SfU*SC*SIn001SmU*SmC*SmG* | | | | |
| | SmAn001RmU | | | | |
| WV- | fCn001RfC*SfC*SfC*SfA*SfG*SfC*SfA*SfG*SfC* | 214 | CCCCAGCAGCUUCAGU | 209 | nRSSSSSSSSSSSSnRSnR |
| 42328 | SfU*SfU*SfC*SfAn001RfG*SmUn001RmC*SmC*SmC* | | CCCUUUCTUIUCGA | | SSSSSSSSSnXSSnR |
| | SmU*SmU*SmU*SmC*ST*Sb008U*SIn001mU*SmC* | | | | |
| | SmGn001RmA | | | | |
| WV- | fCn001RfC*SfC*SfC*SfA*SfG*SfC*SfA*SfG*SfC* | 208 | CCCCAGCAGCUUCAGU | 209 | nRSSSSSSSSSSSSSSSSS |
| 42327 | SfU*SfU*SfC*SfA*SfG*SmU*SmC*SmC*SmC*SmU* | | CCCUUUCTUIUCGA | | SSSSSSSnXSSnR |
| | SmU*SmU*SmC*ST*Sb008U*SIn001mU*SmC* | | | | |
| | SmGn001RmA | | | | |
| WV- | fCn001RfC*SfC*SfA*SfG*SfC*SfA*SfG*SfC*SfU* | 224 | CCCAGCAGCUUCAGUC | 115 | nRSSSSSSSSSSSSSSSSS |
| 42939 | SfU*SfC*SfA*SfG*SfU*SmC*SmC*SmC*SmU*SmU* | | CCUUUCUCIUCGAU | | SSSSSSnSSSSnR |
| | SmU*SmC*SfU*SrCsm14*SIn001SmU*SmC*SmG* | | | | |
| | SmAn001RmU | | | | |
| WV- | fCn001RfC*SfC*SfA*SfG*SfC*SfA*SfG*SfC*SfU* | 225 | CCCAGCAGCUUCAGUC | 199 | nRSSSSSSSSSSSSSSSSS |
| 42938 | SfU*SfC*SfA*SfG*SfU*SmC*SmC*SmC*SmU*SmU* | | CCUUUCUAIUCGAU | | SSSSSSnSSSSnR |
| | SmU*SmC*SfU*Sb001rA*SIn001SmU*SmC*SmG* | | | | |
| | SmAn001RmU | | | | |
| WV- | fCn001RfC*SfC*SfA*SfG*SfC*SfA*SfG*SfC*SfU* | 226 | CCCAGCAGCUUCAGUC | 115 | nRSSSSSSSSSSSSSSSSS |
| 42937 | SfU*SfC*SfA*SfG*SfU*SmC*SmC*SmC*SmU*SmU* | | CCUUUCUCIUCGAU | | SSSSSSnSSSSnR |
| | SmU*SmC*SfU*SCsm17*SIn001SmU*SmC*SmG* | | | | |
| | SmAn001RmU | | | | |
| WV- | fCn001RfC*SfC*SfA*SfG*SfC*SfA*SfG*SfC*SfU* | 227 | CCCAGCAGCUUCAGUC | 115 | nRSSSSSSSSSSSSSSSSS |
| 42936 | SfU*SfC*SfA*SfG*SfU*SmC*SmC*SmC*SmU*SmU* | | CCUUUCUCIUCGAU | | SSSSSXnSSSSnR |
| | SmU*SmC*SfU*SCsm16*In001SmU*SmC*SmG* | | | | |
| | SmAn001RmU | | | | |
| WV- | fCn001RfC*SfC*SfA*SfG*SfC*SfA*SfG*SfC*SfU* | 228 | CCCAGCAGCUUCAGUC | 115 | nRSSSSSSSSSSSSSSSSS |
| 42935 | SfU*SfC*SfA*SfG*SfU*SmC*SmC*SmC*SmU*SmU* | | CCUUUCUCIUCGAU | | SSSSSXnSSSSnR |
| | SmU*SmC*SfU*SCsm15*In001SmU*SmC*SmG* | | | | |
| | SmAn001RmU | | | | |
| WV- | fCn001RfC*SfC*SfA*SfG*SfC*SfA*SfG*SfC*SfU* | 229 | CCCAGCAGCUUCAGUC | 115 | nRSSSSSSSSSSSSSSSSS |
| 42933 | SfU*SfC*SfA*SfG*SfU*SmC*SmC*SmC*SmU*SmU* | | CCUUUCUCIUCGAU | | SSSSSSnSSSSnR |
| | SmU*SmC*SfU*Sb007C*SIn001SmU*SmC*SmG* | | | | |
| | SmAn001RmU | | | | |
| WV- | fCn001RfC*SfC*SfA*SfG*SfC*SfA*SfG*SfC*SfU* | 230 | CCCAGCAGCUUCAGUC | 115 | nRSSSSSSSSSSSSSSSSS |
| 42932 | SfU*SfC*SfA*SfG*SfU*SmC*SmC*SmC*SmU*SmU* | | CCUUUCUCIUCGAU | | SSSSSSnSSSSnR |
| | SmU*SmC*SfU*Sb004C*SIn001SmU*SmC*SmG* | | | | |
| | SmAn001RmU | | | | |
| WV- | fCn001RfC*SfC*SfA*SfG*SfC*SfA*SfG*SfC*SfU* | 198 | CCCAGCAGCUUCAGUC | 199 | nRSSSSSSSSSSSSSSSSS |
| 42680 | SfU*SfC*SfA*SfG*SfU*SmC*SmC*SmC*SmU*SmU* | | CCUUUCUAIUCGAU | | SSSSSSnSSSSnR |
| | SmU*SmC*SfU*Sb001A*SIn001SmU*SmC*SmG* | | | | |
| | SmAn001RmU | | | | |
| WV- | fCn001RfC*SfC*SfA*SfG*SfC*SfA*SfG*SfC*SfU* | 163 | CCCAGCAGCUUCAGUC | 115 | nRSSSSSSSSSSSSSSSSS |
| 42028 | SfU*SfC*SfA*SfG*SfU*SmC*SmC*SmC*SmU*SmU* | | CCUUUCUCIUCGAU | | SSSSSSnSSSSnR |
| | SmU*SmC*SfU*SC*SIn001SmU*SmC*SmG* | | | | |
| | SmAn001RmU | | | | |
| WV- | fCn001RfA*SfG*SfC*SfA*SfG*SfC*SfU*SfU*SfC* | 161 | CAGCAGCUUCAGUCCC | 111 | nRSSSSSSSSSSSSSSSSS |
| 42030 | SfA*SfG*SfU*SfC*SfC*SmC*SmU*SmU*SmU*SmC* | | UUUCUCIUCGAUGG | | SSSSnSSSSSSnR |
| | SfU*SC*SIn001SmU*SmC*SmG*SmA*SmU* | | | | |
| | SmGn001RmG | | | | |
| WV- | fCn001RfC*SfA*SfG*SfC*SfA*SfG*SfC*SfU*SfU* | 162 | CCAGCAGCUUCAGUCC | 113 | nRSSSSSSSSSSSSSSSSS |
| 42029 | SfC*SfA*SfG*SfU*SfC*SmC*SmC*SmU*SmU*SmU* | | CUUUCUCIUCGAUG | | SSSSSnSSSSSnR |
| | SmC*SfU*SC*SIn001SmU*SmC*SmG*SmA* | | | | |
| | SmUn001RmG | | | | |
| WV- | fCn001RfC*SfC*SfA*SfG*SfC*SfA*SfG*SfC*SfU* | 163 | CCCAGCAGCUUCAGUC | 115 | nRSSSSSSSSSSSSSSSSS |
| 42028 | USf*SfC*SfA*SfG*SfU*SmC*SmC*SmC*SmU*SmU* | | CCUUUCUCIUCGAU | | SSSSSSnSSSSnR |
| | SmU*SmC*SfU*SC*SIn001SmU*SmC*SmG* | | | | |
| | SmAn001RmU | | | | |
| WV- | fCn001RfC*SfC*SfC*SfA*SfG*SfC*SfA*SfG*SfC* | 164 | CCCCAGCAGCUUCAGU | 117 | nRSSSSSSSSSSSSSSSSS |
| 42027 | SfU*SfU*SfC*SfA*SfG*SmU*SmC*SmC*SmC*SmU* | | CCCUUUCUCIUCGA | | SSSSSSSnSSSnR |
| | SmU*SmU*SmC*SfU*SC*SIn001SmU*SmC* | | | | |
| | SmGn001RmA | | | | |
| WV- | fCn001RfA*SfG*SfC*SfA*SfG*SfC*SfU*SfU*SfC* | 194 | CAGCAGCUUCAGUCCC | 195 | nRSSSSSSSSSSSSSSSSS |
| 42682 | SfA*SfG*SfU*SfC*SfC*SmC*SmU*SmU*SmU*SmC* | | UUUCUAIUCGAUGG | | SSSSnSSSSSSnR |
| | SfU*Sb001A*SIn001SmU*SmC*SmG*SmA*SmU* | | | | |
| | SmGn001RmG | | | | |
| WV- | fCn001RfC*SfA*SfG*SfC*SfA*SfG*SfC*SfU*SfU* | 196 | CCAGCAGCUUCAGUCC | 197 | nRSSSSSSSSSSSSSSSSS |
| 42681 | SfC*SfA*SfG*SfU*SfC*SmC*SmC*SmU*SmU*SmU* | | CUUUCUAIUCGAUG | | SSSSSnSSSSSnR |
| | SmC*SfU*Sb001A*SIn001SmU*SmC*SmG*SmA* | | | | |
| | SmUn001RmG | | | | |
| WV- | fCn001RfC*SfC*SfA*SfG*SfC*SfA*SfG*SfC*SfU* | 198 | CCCAGCAGCUUCAGUC | 199 | nRSSSSSSSSSSSSSSSSS |
| 42680 | SfU*SfC*SfA*SfG*SfU*SmC*SmC*SmC*SmU*SmU* | | CCUUUCUAIUCGAU | | SSSSSSnSSSSnR |
| | SmU*SmC*SfU*Sb001A*SIn001SmU*SmC*SmG* | | | | |
| | SmAn001RmU | | | | |
| WV- | fCn001RfC*SfC*SfC*SfA*SfG*SfC*SfA*SfG*SfC* | 200 | CCCCAGCAGCUUCAGU | 201 | nRSSSSSSSSSSSSSSSSS |
| 42679 | SfU*SfU*SfC*SfA*SfG*SmU*SmC*SmC*SmC*SmU* | | CCCUUUCUAIUCGA | | SSSSSSSnSSSnR |
| | SmU*SmU*SmC*SfU*Sb001A*SIn001SmU*SmC* | | | | |
| | SmGn001RmA | | | | |
| WV- | mCn001RmC*SmCn001RfA*SfG*SfCn001RfA*SfG* | 231 | CCCAGCAGCUUCAGUC | 199 | nRSnRSSnRSSSSSSSnRS |
| 43117 | SfC*SfU*SfU*SfC*SfA*SfGn001RfU*SfCn001RfC* | | CCUUUCUAIUCGAU | | nRSSSnRSSSSnSSSSnR |
| | SfC*SfU*SfUn001RfU*SfC*SfU*Sb001A*SIn001SmU* | | | | |
| | SfC*SmG*SmAn001RmU | | | | |
| WV- | fCn001RfC*SfCn001RfA*SfG*SfCn001RfA*SfG*SfC* | 232 | CCCAGCAGCUUCAGUC | 199 | nRSnRSSnRSSSSSSSnRS |
| 43116 | SfU*SfU*SfC*SfA*SfGn001RfU*SfCn001RfC*SfC*SfU* | | CCUUUCUAIUCGAU | | nRSSSnRSSSSnSSSSnR |
| | SfUn001RfU*SfC*SfU*Sb001A*SIn001SmU*SfC* | | | | |
| | SmG*SmAn001RmU | | | | |
| WV- | fCn001RfC*SfCn001RfA*SfG*SfCn001RfA*SfG*SfC* | 233 | CCCAGCAGCUUCAGUC | 199 | nRSnRSSnRSSSSSSSnRS |
| 43115 | SfU*SfU*SfC*SfA*SfGn001RfU*SfCn001RfC*SfC*SfU* | | CCUUUCUAIUCGAU | | nRSSSnRSSSSnSSSSnR |
| | SfUn001RfU*SmC*SfU*Sb001A*SIn001SmU*SmC* | | | | |
| | SfG*SfAn001RmU | | | | |
| WV- | mCn001RmC*SmC*SfA*SfG*SfC*SfA*SfG*SfC*SfU* | 234 | CCCAGCAGCUUCAGUC | 199 | nRSSSSSSSSSSSSSSSSS |
| 43114 | SfU*SfC*SfA*SfG*SfU*SfC*SfC*SfC*SfU*SfU*SfU* | | CCUUUCUAIUCGAU | | SSSSSSnSSSSnR |
| | SfC*SfU*Sb001A*SIn001SmU*SfC*SmG* | | | | |
| | SmAn001RmU | | | | |
| WV- | fCn001RfC*SfC*SfA*SfG*SfC*SfA*SfG*SfC*SfU*SfU* | 235 | CCCAGCAGCUUCAGUC | 199 | nRSSSSSSSSSSSSSSSSS |
| 43113 | SfC*SfA*SfG*SfU*SfC*SfC*SfC*SfU*SfU*SfU*SfC* | | CCUUUCUAIUCGAU | | SSSSSSnSSSSnR |
| | SfU*Sb001A*SIn001SmU*SfC*SmG* | | | | |
| | SmAn001RmU | | | | |
| WV- | fCn001RfC*SfC*SfA*SfG*SfC*SfA*SfG*SfC*SfU*SfU* | 236 | CCCAGCAGCUUCAGUC | 199 | nRSSSSSSSSSSSSSSSSS |
| 43112 | SfC*SfA*SfG*SfU*SfC*SfC*SfC*SfU*SfU*SfU* | | CCUUUCUAIUCGAU | | SSSSSSnSSSSnR |
| | SmC*SfU*Sb001A*SIn001SmU*SmC*SfG* | | | | |
| | SfAn001RmU | | | | |
| WV- | fCn001RfC*SfC*SfA*SfG*SfC*SfA*SfG*SfC*SfU*SfU* | 198 | CCCAGCAGCUUCAGUC | 199 | nRSSSSSSSSSSSSSSSSS |
| 42680 | SfC*SfA*SfG*SfU*SmC*SmC*SmC*SmU*SmU*SmU* | | CCUUUCUAIUCGAU | | SSSSSSnSSSSnR |
| | SmC*SfU*Sb001A*SIn001SmU*SmC*SmG* | | | | |
| | SmAn001RmU | | | | |
| WV- | fCn001RfC*SfC*SfA*SfG*SfC*SfA*SfG*SfC*SfU*SfU* | 237 | CCCAGCAGCUUCAGUC | 199 | nRSSSSSSSSSSSSSSSSS |
| 42986 | SfC*SfA*SfG*SfU*SmC*SmC*SmC*SmU*SmU*SmU* | | CCUUUCUAIUCGAU | | SSSSSSnSSnRSnR |
| | SmC*SfU*Sb001A*SIn001SmU*SmCn001RmG* | | | | |
| | SmAn001RmU | | | | |
| WV- | fCn001RfC*SfC*SfA*SfG*SfC*SfA*SfG*SfC*SfU*SfU* | 238 | CCCAGCAGCUUCAGUC | 199 | nRSSSSSSSSSSSSSSSSS |
| 42985 | SfC*SfA*SfG*SfU*SmC*SmC*SmC*SmU*SmU*SmU* | | CCUUUCUAIUCGAU | | SSSSSSnSnRSSnR |
| | SmC*SfU*Sb001A*SIn001SmUn001RmC*SmG* | | | | |
| | SmAn001RmU | | | | |
| WV- | fCn001RfC*SfC*SfA*SfG*SfC*SfA*SfG*SfC*SfU*SfU* | 239 | CCCAGCAGCUUCAGUC | 199 | nRSSSSSSSSSSSSSSSSS |
| 42984 | SfC*SfA*SfG*SfU*SmC*SmC*SmC*SmU*SmU*SmU* | | CCUUUCUAIUCGAU | | SSSSSnRnSSSSnR |
| | SmC*SfU*Sb001An001RIn001SmU*SmC*SmG* | | | | |
| | SmAn001RmU | | | | |
| WV- | fCn001RfC*SfC*SfA*SfG*SfC*SfA*SfG*SfC*SfU*SfU* | 240 | CCCAGCAGCUUCAGUC | 199 | nRSSSSSSSSSSSSSSSSS |
| 42983 | SfC*SfA*SfG*SfU*SmC*SmC*SmC*SmU*SmU* | | CCUUUCUAIUCGAU | | SSSSnRSnSSSSnR |
| | SmU*SmC*SfUn001Rb001A*SIn001SmU*SmC*SmG* | | | | |
| | SmAn001RmU | | | | |
| WV- | fCn001RfC*SfC*SfA*SfG*SfC*SfA*SfG*SfC*SfU*SfU* | 241 | CCCAGCAGCUUCAGUC | 199 | nRSSSSSSSSSSSSSSSSS |
| 42982 | SfC*SfA*SfG*SfU*SmC*SmC*SmC*SmU*SmU*SmU* | | CCUUUCUAIUCGAU | | SSSnRSSnSSSSnR |
| | SmCn001RfU*Sb001A*SIn001SmU*SmC*SmG* | | | | |
| | SmAn001RmU | | | | |
| WV- | fCn001RfC*SfC*SfA*SfG*SfC*SfA*SfG*SfC*SfU*SfU* | 242 | CCCAGCAGCUUCAGUC | 199 | nRSSSSSSSSSSSSSSSSS |
| 42981 | SfC*SfA*SfG*SfU*SmC*SmC*SmC*SmU*SmU* | | CCUUUCUAIUCGAU | | SSnRSSSnSSSSnR |
| | SmUn001RmC*SfU*Sb001A*SIn001SmU*SmC*SmG* | | | | |
| | SmAn001RmU | | | | |
| WV- | fCn001RfC*SfC*SfA*SfG*SfC*SfA*SfG*SfC*SfU*SfU* | 243 | CCCAGCAGCUUCAGUC | 199 | nRSSSSSSSSSSSSSSSSS |
| 42980 | SfC*SfA*SfG*SfU*SmC*SmC*SmC*SmU* | | CCUUUCUAIUCGAU | | SnRSSSSnSSSSnR |
| | SmUn001RmU*SmC*SfU*Sb001A*SIn001SmU*SmC*SmG* | | | | |
| | SmAn001RmU | | | | |
| WV- | fCn001RfC*SfC*SfA*SfG*SfC*SfA*SfG*SfC*SfU* | 244 | CCCAGCAGCUUCAGUC | 199 | nRSSSSSSSSSSSSSSSSS |
| 42979 | SfU*SfC*SfA*SfG*SfU*SmC*SmC*SmC*SmUn001RmU* | | CCUUUCUAIUCGAU | | nRSSSSSnSSSSnR |
| | SmU*SmC*SfU*Sb001A*SIn001SmU*SmC*SmG* | | | | |
| | SmAn001RmU | | | | |
| WV- | fCn001RfC*SfC*SfA*SfG*SfC*SfA*SfG*SfC*SfU* | 245 | CCCAGCAGCUUCAGUC | 199 | nRSSSSSSSSSSSSSSSSn |
| 42978 | SfU*SfC*SfA*SfG*SfU*SmC*SmC*SmCn001RmU*SmU* | | CCUUUCUAIUCGAU | | RSSSSSSnSSSSnR |
| | SmU*SmC*SfU*Sb001A*SIn001SmU*SmC*SmG* | | | | |
| | SmAn001RmU | | | | |
| WV- | fCn001RfC*SfC*SfA*SfG*SfC*SfA*SfG*SfC*SfU* | 246 | CCCAGCAGCUUCAGUC | 199 | nRSSSSSSSSSSSSSSSnR |
| 42977 | SfU*SfC*SfA*SfG*SfU*SmC*SmCn001RmC*SmU*SmU* | | CCUUUCUAIUCGAU | | SSSSSSSnSSSSnR |
| | SmU*SmC*SfU*Sb001A*SIn001SmU*SmC*SmG* | | | | |
| | SmAn001RmU | | | | |
| WV- | fCn001RfC*SfC*SfA*SfG*SfC*SfA*SfG*SfC*SfU* | 247 | CCCAGCAGCUUCAGUC | 199 | nRSSSSSSSSSSSSSSnRS |
| 42976 | SfU*SfC*SfA*SfG*SfU*SmCn001RmC*SmC*SmU*SmU* | | CCUUUCUAIUCGAU | | SSSSSSSSSSSnR |
| | SmU*SmC*SfU*Sb001A*SIn001SmU*SmC*SmG* | | | | |
| | SmAn001RmU | | | | |
| WV- | fCn001RfC*SfC*SfA*SfG*SfC*SfA*SfG*SfC*SfU*SfU* | 248 | CCCAGCAGCUUCAGUC | 199 | nRSSSSSSSSSSSSSnRSS |
| 42975 | SfC*SfA*SfG*SfUn001RmC*SmC*SmC*SmU*SmU* | | CCUUUCUAIUCGAU | | SSSSSSSnSSSSnR |
| | SmU*SmC*SfU*Sb001A*SIn001SmU*SmC*SmG* | | | | |
| | SmAn001RmU | | | | |
| WV- | fCn001RfC*SfC*SfA*SfG*SfC*SfA*SfG*SfC*SfU*SfU* | 249 | CCCAGCAGCUUCAGUC | 199 | nRSSSSSSSSSSSSnRSSS |
| 42974 | SfC*SfA*SfGn001RfU*SmC*SmC*SmC*SmU*SmU* | | CCUUUCUAIUCGAU | | SSSSSSSnSSSSnR |
| | SmU*SmC*SfU*Sb001A*SIn001SmU*SmC*SmG* | | | | |
| | SmAn001RmU | | | | |
| WV- | fCn001RfC*SfC*SfA*SfG*SfC*SfA*SfG*SfC*SfU*SfU* | 250 | CCCAGCAGCUUCAGUC | 199 | nRSSSSSSSSSSSnRSSSS |
| 42973 | SfC*SfAn001RfG*SfU*SmC*SmC*SmC*SmU*SmU* | | CCUUUCUAIUCGAU | | SSSSSSSnSSSSnR |
| | SmU*SmC*SfU*Sb001A*SIn001SmU*SmC*SmG* | | | | |
| | SmAn001RmU | | | | |
| WV- | fCn001RfC*SfC*SfA*SfG*SfC*SfA*SfG*SfC*SfU*SfU* | 251 | CCCAGCAGCUUCAGUC | 199 | nRSSSSSSSSSSnRSSSSS |
| 42972 | SfCn001RfA*SfG*SfU*SmC*SmC*SmC*SmU*SmU* | | CCUUUCUAIUCGAU | | SSSSSSSnSSSSnR |
| | SmU*SmC*SfU*Sb001A*SIn001SmU*SmC*SmG* | | | | |
| | SmAn001RmU | | | | |
| WV- | fCn001RfC*SfC*SfA*SfG*SfC*SfA*SfG*SfC*SfU* | 252 | CCCAGCAGCUUCAGUC | 199 | nRSSSSSSSSSnRSSSSSS |
| 42971 | SfUn001RfC*SfA*SfG*SfU*SmC*SmC*SmC*SmU* | | CCUUUCUAIUCGAU | | SSSSSSSnSSSSnR |
| | SmU*SmU*SmC*SfU*Sb001A*SIn001SmU*SmC*SmG* | | | | |
| | SmAn001RmU | | | | |
| WV- | fCn001RfC*SfC*SfA*SfG*SfC*SfA*SfG*SfC* | 253 | CCCAGCAGCUUCAGUC | 199 | nRSSSSSSSSnRSSSSSSS |
| 42970 | SfUn001RfU*SfC*SfA*SfG*SfU*SmC*SmC*SmC*SmU* | | CCUUUCUAIUCGAU | | SSSSSSSnSSSSnR |
| | SmU*SmU*SmC*SfU*Sb001A*SIn001SmU*SmC*SmG* | | | | |
| | SmAn001RmU | | | | |
| WV- | fCn001RfC*SfC*SfA*SfG*SfC*SfA*SfG*SfCn001RfU* | 254 | CCCAGCAGCUUCAGUC | 199 | nRSSSSSSSnRSSSSSSSS |
| 42969 | SfU*SfC*SfA*SfG*SfU*SmC*SmC*SmC*SmU*SmU* | | CCUUUCUAIUCGAU | | SSSSSSSnSSSSnR |
| | SmU*SmC*SfU*Sb001A*SIn001SmU*SmC*SmG* | | | | |
| | SmAn001RmU | | | | |
| WV- | fCn001RfC*SfC*SfA*SfG*SfC*SfA*SfGn001RfC*SfU* | 255 | CCCAGCAGCUUCAGUC | 199 | nRSSSSSSnRSSSSSSSSS |
| 42968 | SfU*SfC*SfA*SfG*SfU*SmC*SmC*SmC*SmU*SmU* | | CCUUUCUAIUCGAU | | SSSSSSSnSSSSnR |
| | SmU*SmC*SfU*Sb001A*SIn001SmU*SmC*SmG* | | | | |
| | SmAn001RmU | | | | |
| WV- | fCn001RfC*SfC*SfA*SfG*SfC*SfAn001RfG*SfC*SfU* | 256 | CCCAGCAGCUUCAGUC | 199 | nRSSSSSnRSSSSSSSSSS |
| 42967 | SfU*SfC*SfA*SfG*SfU*SmC*SmC*SmC*SmU*SmU* | | CCUUUCUAIUCGAU | | SSSSSSSnSSSSnR |
| | SmU*SmC*SfU*Sb001A*SIn001SmU*SmC*SmG* | | | | |
| | SmAn001RmU | | | | |
| WV- | fCn001RfC*SfC*SfA*SfG*SfCn001RfA*SfG*SfC*SfU* | 257 | CCCAGCAGCUUCAGUC | 199 | nRSSSSnRSSSSSSSSSSS |
| 42966 | SfU*SfC*SfA*SfG*SfU*SmC*SmC*SmC*SmU*SmU* | | CCUUUCUAIUCGAU | | SSSSSSSnSSSSnR |
| | SmU*SmC*SfU*Sb001A*SIn001SmU*SmC*SmG* | | | | |
| | SmAn001RmU | | | | |
| WV- | fCn001RfC*SfC*SfA*SfGn001RfC*SfA*SfG*SfC*SfU* | 258 | CCCAGCAGCUUCAGUC | 199 | nRSSSnRSSSSSSSSSSSS |
| 42965 | SfU*SfC*SfA*SfG*SfU*SmC*SmC*SmC*SmU*SmU* | | CCUUUCUAIUCGAU | | SSSSSSSSSSSnR |
| | SmU*SmC*SfU*Sb001A*SIn001SmU*SmC*SmG* | | | | |
| | SmAn001RmU | | | | |
| WV- | fCn001RfC*SfC*SfAn001RfG*SfC*SfA*SfG*SfC*SfU* | 259 | CCCAGCAGCUUCAGUC | 199 | nRSSnRSSSSSSSSSSSSS |
| 42964 | SfU*SfC*SfA*SfG*SfU*SmC*SmC*SmC*SmU*SmU* | | CCUUUCUAIUCGAU | | SSSSSSSnSSSSnR |
| | SmU*SmC*SfU*Sb001A*SIn001SmU*SmC*SmG* | | | | |
| | SmAn001RmU | | | | |
| WV- | fCn001RfC*SfCn001RfA*SfG*SfC*SfA*SfG*SfC*SfU* | 260 | CCCAGCAGCUUCAGUC | 199 | nRSnRSSSSSSSSSSSSSS |
| 42963 | SfU*SfC*SfA*SfG*SfU*SmC*SmC*SmC*SmU*SmU* | | CCUUUCUAIUCGAU | | SSSSSSSSSSSnR |
| | SmU*SmC*SfU*Sb001A*SIn001SmU*SmC*SmG* | | | | |
| | SmAn001RmU | | | | |
| WV- | fCn001RfC*SfC*SfA*SfG*SfC*SfA*SfG*SfC*SfU*SfU* | 198 | CCCAGCAGCUUCAGUC | 199 | nRSSSSSSSSSSSSSSSSS |
| 42680 | SfC*SfA*SfG*SfU*SmC*SmC*SmC*SmU*SmU* | | CCUUUCUAIUCGAU | | SSSSSSnSSSSnR |
| | SmU*SmC*SfU*Sb001A*SIn001SmU*SmC*SmG* | | | | |
| | SmAn001RmU | | | | |
| WV- | fCn001RfC*SfC*SfA*SfG*SfC*SfA*SfG*SfC*SfU*SfU* | 261 | CCCAGCAGCUUCAGUC | 199 | nRSSSSSSSSSSSSSSSSS |
| 43081 | SfC*SfA*SfG*SfU*SmC*SmC*SmC*SmU*SmU* | | CCUUUCUAIUCGAU | | SSSSSSnSSRSnR |
| | SmU*SmC*SfU*Sb001A*SIn001SmU*SmC*RmG* | | | | |
| | SmAn001RmU | | | | |
| WV- | fCn001RfC*SfC*SfA*SfG*SfC*SfA*SfG*SfC*SfU* | 262 | CCCAGCAGCUUCAGUC | 199 | nRSSSSSSSSSSSSSSSSS |
| 43080 | SfU*SfC*SfA*SfG*SfU*SmC*SmC*SmC*SmU*SmU* | | CCUUUCUAIUCGAU | | SSSSSSnSRSSnR |
| | SmU*SmC*SfU*Sb001A*SIn001SmU*RmC*SmG* | | | | |
| | SmAn001RmU | | | | |
| WV- | fCn001RfC*SfC*SfA*SfG*SfC*SfA*SfG*SfC*SfU*SfU* | 263 | CCCAGCAGCUUCAGUC | 199 | nRSSSSSSSSSSSSSSSSS |
| 43078 | SfC*SfA*SfG*SfU*SmC*SmC*SmC*SmU*SmU* | | CCUUUCUAIUCGAU | | SSSSRSnSSSSnR |
| | SmU*SmC*SfU*Rb001A*SIn001SmU*SmC*SmG* | | | | |
| | SmAn001RmU | | | | |
| WV- | fCn001RfC*SfC*SfA*SfG*SfC*SfA*SfG*SfC*SfU* | 264 | CCCAGCAGCUUCAGUC | 199 | nRSSSSSSSSSSSSSSSSS |
| 43077 | SfU*SfC*SfA*SfG*SfU*SmC*SmC*SmC*SmU*SmU* | | CCUUUCUAIUCGAU | | SSSRSSnSSSSnR |
| | SmU*SmC*RfU*Sb001A*SIn001SmU*SmC*SmG* | | | | |
| | SmAn001RmU | | | | |
| WV- | fCn001RfC*SfC*SfA*SfG*SfC*SfA*SfG*SfC*SfU* | 265 | CCCAGCAGCUUCAGUC | 199 | nRSSSSSSSSSSSSSSSSS |
| 43076 | SfU*SfC*SfA*SfG*SfU*SmC*SmC*SmC*SmU*SmU* | | CCUUUCUAIUCGAU | | SSRSSSnSSSSnR |
| | SmU*RmC*SfU*Sb001A*SIn001SmU*SmC*SmG* | | | | |
| | SmAn001RmU | | | | |
| WV- | fCn001RfC*SfC*SfA*SfG*SfC*SfA*SfG*SfC*SfU* | 266 | CCCAGCAGCUUCAGUC | 199 | nRSSSSSSSSSSSSSSSSS |
| 43075 | SfU*SfC*SfA*SfG*SfU*SmC*SmC*SmC*SmU*SmU* | | CCUUUCUAIUCGAU | | SRSSSSnSSSSnR |
| | RmU*SmC*SfU*Sb001A*SIn001SmU*SmC*SmG* | | | | |
| | SmAn001RmU | | | | |
| WV- | fCn001RfC*SfC*SfA*SfG*SfC*SfA*SfG*SfC*SfU*SfU* | 267 | CCCAGCAGCUUCAGUC | 199 | nRSSSSSSSSSSSSSSSSS |
| 43074 | SfC*SfA*SfG*SfU*SmC*SmC*SmC*SmU*RmU* | | CCUUUCUAIUCGAU | | RSSSSSnSSSSnR |
| | SmU*SmC*SfU*Sb001A*SIn001SmU*SmC*SmG* | | | | |
| | SmAn001RmU | | | | |
| WV- | fCn001RfC*SfC*SfA*SfG*SfC*SfA*SfG*SfC*SfU*SfU* | 268 | CCCAGCAGCUUCAGUC | 199 | nRSSSSSSSSSSSSSSSSR |
| 43073 | SfC*SfA*SfG*SfU*SmC*SmC*SmC*RmU*SmU* | | CCUUUCUAIUCGAU | | SSSSSSnSSSSnR |
| | SmU*SmC*SfU*Sb001A*SIn001SmU*SmC*SmG* | | | | |
| | SmAn001RmU | | | | |
| WV- | fCn001RfC*SfC*SfA*SfG*SfC*SfA*SfG*SfC*SfU*SfU* | 269 | CCCAGCAGCUUCAGUC | 199 | nRSSSSSSSSSSSSSSSRS |
| 43072 | SfC*SfA*SfG*SfU*SmC*SmC*RmC*SmU*SmU* | | CCUUUCUAIUCGAU | | SSSSSSnSSSSnR |
| | SmU*SmC*SfU*Sb001A*SIn001SmU*SmC*SmG* | | | | |
| | SmAn001RmU | | | | |
| WV- | fCn001RfC*SfC*SfA*SfG*SfC*SfA*SfG*SfC*SfU*SfU* | 270 | CCCAGCAGCUUCAGUC | 199 | nRSSSSSSSSSSSSSSRSS |
| 43071 | SfC*SfA*SfG*SfU*SmC*RmC*SmC*SmU*SmU* | | CCUUUCUAIUCGAU | | SSSSSSnSSSSnR |
| | SmU*SmC*SfU*Sb001A*SIn001SmU*SmC*SmG* | | | | |
| | SmAn001RmU | | | | |
| WV- | fCn001RfC*SfC*SfA*SfG*SfC*SfA*SfG*SfC*SfU*SfU* | 271 | CCCAGCAGCUUCAGUC | 199 | nRSSSSSSSSSSSSSRSSS |
| 43070 | SfC*SfA*SfG*SfU*RmC*SmC*SmC*SmU*SmU* | | CCUUUCUAIUCGAU | | SSSSSSnSSSSnR |
| | SmU*SmC*SfU*Sb001A*SIn001SmU*SmC*SmG* | | | | |
| | SmAn001RmU | | | | |
| WV- | fCn001RfC*SfC*SfA*SfG*SfC*SfA*SfG*SfC*SfU*SfU* | 272 | CCCAGCAGCUUCAGUC | 199 | nRSSSSSSSSSSSSRSSSS |
| 43069 | SfC*SfA*SfG*RfU*SmC*SmC*SmC*SmU*SmU* | | CCUUUCUAIUCGAU | | SSSSSSnSSSSnR |
| | SmU*SmC*SfU*Sb001A*SIn001SmU*SmC*SmG* | | | | |
| | SmAn001RmU | | | | |
| WV- | fCn001RfC*SfC*SfA*SfG*SfC*SfA*SfG*SfC*SfU*SfU* | 273 | CCCAGCAGCUUCAGUC | 199 | nRSSSSSSSSSSSRSSSSS |
| 43068 | SfC*SfA*RfG*SfU*SmC*SmC*SmC*SmU*SmU* | | CCUUUCUAIUCGAU | | SSSSSSnSSSSnR |
| | SmU*SmC*SfU*Sb001A*SIn001SmU*SmC*SmG* | | | | |
| | SmAn001RmU | | | | |
| WV- | fCn001RfC*SfC*SfA*SfG*SfC*SfA*SfG*SfC*SfU*SfU* | 274 | CCCAGCAGCUUCAGUC | 199 | nRSSSSSSSSSSRSSSSSS |
| 43067 | SfC*RfA*SfG*SfU*SmC*SmC*SmC*SmU*SmU* | | CCUUUCUAIUCGAU | | SSSSSSnSSSSnR |
| | SmU*SmC*SfU*Sb001A*SIn001SmU*SmC*SmG* | | | | |
| | SmAn001RmU | | | | |
| WV- | fCn001RfC*SfC*SfA*SfG*SfC*SfA*SfG*SfC*SfU*SfU* | 275 | CCCAGCAGCUUCAGUC | 199 | nRSSSSSSSSSRSSSSSSS |
| 43066 | RfC*SfA*SfG*SfU*SmC*SmC*SmC*SmU*SmU* | | CCUUUCUAIUCGAU | | SSSSSSnSSSSnR |
| | SmU*SmC*SfU*Sb001A*SIn001SmU*SmC*SmG* | | | | |
| | SmAn001RmU | | | | |
| WV- | fCn001RfC*SfC*SfA*SfG*SfC*SfA*SfG*SfC*SfU*RfU* | 276 | CCCAGCAGCUUCAGUC | 199 | nRSSSSSSSSRSSSSSSSS |
| 43065 | SfC*SfA*SfG*SfU*SmC*SmC*SmC*SmU*SmU* | | CCUUUCUAIUCGAU | | SSSSSSnSSSSnR |
| | SmU*SmC*SfU*Sb001A*SIn001SmU*SmC*SmG* | | | | |
| | SmAn001RmU | | | | |
| WV- | fCn001RfC*SfC*SfA*SfG*SfC*SfA*SfG*SfC*RfU*SfU* | 277 | CCCAGCAGCUUCAGUC | 199 | nRSSSSSSSRSSSSSSSSS |
| 43064 | SfC*SfA*SfG*SfU*SmC*SmC*SmC*SmU*SmU* | | CCUUUCUAIUCGAU | | SSSSSSnSSSSnR |
| | SmU*SmC*SfU*Sb001A*SIn001SmU*SmC*SmG* | | | | |
| | SmAn001RmU | | | | |
| WV- | fCn001RfC*SfC*SfA*SfG*SfC*SfA*SfG*RfC*SfU*SfU* | 278 | CCCAGCAGCUUCAGUC | 199 | nRSSSSSSRSSSSSSSSSS |
| 43063 | SfC*SfA*SfG*SfU*SmC*SmC*SmC*SmU*SmU* | | CCUUUCUAIUCGAU | | SSSSSSnSSSSnR |
| | SmU*SmC*SfU*Sb001A*SIn001SmU*SmC*SmG* | | | | |
| | SmAn001RmU | | | | |
| WV- | fCn001RfC*SfC*SfA*SfG*SfC*SfA*RfG*SfC*SfU*SfU* | 279 | CCCAGCAGCUUCAGUC | 199 | nRSSSSSRSSSSSSSSSSS |
| 43062 | SfC*SfA*SfG*SfU*SmC*SmC*SmC*SmU*SmU* | | CCUUUCUAIUCGAU | | SSSSSSnSSSSnR |
| | SmU*SmC*SfU*Sb001A*SIn001SmU*SmC*SmG* | | | | |
| | SmAn001RmU | | | | |
| WV- | fCn001RfC*SfC*SfA*SfG*SfC*RfA*SfG*SfC*SfU*SfU* | 280 | CCCAGCAGCUUCAGUC | 199 | nRSSSSRSSSSSSSSSSSS |
| 43061 | SfC*SfA*SfG*SfU*SmC*SmC*SmC*SmU*SmU* | | CCUUUCUAIUCGAU | | SSSSSSnSSSSnR |
| | SmU*SmC*SfU*Sb001A*SIn001SmU*SmC*SmG* | | | | |
| | SmAn001RmU | | | | |
| WV- | fCn001RfC*SfC*SfA*SfG*RfC*SfA*SfG*SfC*SfU*SfU* | 281 | CCCAGCAGCUUCAGUC | 199 | nRSSSRSSSSSSSSSSSSS |
| 43060 | SfC*SfA*SfG*SfU*SmC*SmC*SmC*SmU*SmU* | | CCUUUCUAIUCGAU | | SSSSSSnSSSSnR |
| | SmU*SmC*SfU*Sb001A*SIn001SmU*SmC*SmG* | | | | |
| | SmAn001RmU | | | | |
| WV- | fCn001RfC*SfC*SfA*RfG*SfC*SfA*SfG*SfC*SfU*SfU* | 282 | CCCAGCAGCUUCAGUC | 199 | nRSSRSSSSSSSSSSSSSS |
| 43059 | SfC*SfA*SfG*SfU*SmC*SmC*SmC*SmU*SmU* | | CCUUUCUAIUCGAU | | SSSSSSSSSSnR |
| | SmU*SmC*SfU*Sb001A*SIn001SmU*SmC*SmG* | | | | |
| | SmAn001RmU | | | | |
| WV- | fCn001RfC*SfC*RfA*SfG*SfC*SfA*SfG*SfC*SfU*SfU* | 283 | CCCAGCAGCUUCAGUC | 199 | nRSRSSSSSSSSSSSSSSS |
| 43058 | SfC*SfA*SfG*SfU*SmC*SmC*SmC*SmU*SmU* | | CCUUUCUAIUCGAU | | SSSSSSnSSSSnR |
| | SmU*SmC*SfU*Sb001A*SIn001SmU*SmC*SmG* | | | | |
| | SmAn001RmU | | | | |
| WV- | fCn001RfC*SfC*SfA*SfG*SfC*SfA*SfG*SfC*SfU*SfU* | 198 | CCCAGCAGCUUCAGUC | 199 | nRSSSSSSSSSSSSSSSSS |
| 42680 | SfC*SfA*SfG*SfU*SmC*SmC*SmC*SmU*SmU* | | CCUUUCUAIUCGAU | | SSSSSSnSSSSnR |
| | SmU*SmC*SfU*Sb001A*SIn001SmU*SmC*SmG* | | | | |
| | SmAn001RmU | | | | |
| WV- | fCn001RfC*SfC*SfA*SfG*SfC*SfA*SfG*SfC*SfU*SfU* | 284 | CCCAGCAGCUUCAGUC | 199 | nRSSSSSSSSSSSSSSSSS |
| 43022 | SfC*SfA*SfG*SfU*SmC*SmC*SmC*SmU*SmU* | | CCUUUCUAIUCGAU | | SSSSSSnSSSSnR |
| | SmU*SmC*SfU*Sb001A*SIn001SmU*SmC*SmG* | | | | |
| | SmAn001RfU | | | | |
| WV- | fCn001RfC*SfC*SfA*SfG*SfC*SfA*SfG*SfC*SfU*SfU* | 285 | CCCAGCAGCUUCAGUC | 199 | nRSSSSSSSSSSSSSSSSS |
| 43021 | SfC*SfA*SfG*SfU*SmC*SmC*SmC*SmU*SmU* | | CCUUUCUAIUCGAU | | SSSSSSSSSSnR |
| | SmU*SmC*SfU*Sb001A*SIn001SmU*SmC*SmG* | | | | |
| | SfAn001RmU | | | | |
| WV- | fCn001RfC*SfC*SfA*SfG*SfC*SfA*SfG*SfC*SfU*SfU* | 286 | CCCAGCAGCUUCAGUC | 199 | nRSSSSSSSSSSSSSSSSS |
| 43020 | SfC*SfA*SfG*SfU*SmC*SmC*SmC*SmU*SmU* | | CCUUUCUAIUCGAU | | SSSSSSnSSSSnR |
| | SmU*SmC*SfU*Sb001A*SIn001SmU*SmC*SfG* | | | | |
| | SmAn001RmU | | | | |
| WV- | fCn001RfC*SfC*SfA*SfG*SfC*SfA*SfG*SfC*SfU*SfU* | 287 | CCCAGCAGCUUCAGUC | 199 | nRSSSSSSSSSSSSSSSSS |
| 43019 | SfC*SfA*SfG*SfU*SmC*SmC*SmC*SmU*SmU* | | CCUUUCUAIUCGAU | | SSSSSSSSSSnR |
| | SmU*SmC*SfU*Sb001A*SIn001SmU*SfC*SmG* | | | | |
| | SmAn001RmU | | | | |
| WV- | fCn001RfC*SfC*SfA*SfG*SfC*SfA*SfG*SfC*SfU*SfU* | 288 | CCCAGCAGCUUCAGUC | 199 | nRSSSSSSSSSSSSSSSSS |
| 43018 | SfC*SfA*SfG*SfU*SmC*SmC*SmC*SmU*SmU* | | CCUUUCUAIUCGAU | | SSSSSSSSSSnR |
| | SmU*SmC*SfU*Sb001A*SIn001SfU*SmC*SmG* | | | | |
| | SmAn001RmU | | | | |
| WV- | fCn001RfC*SfC*SfA*SfG*SfC*SfA*SfG*SfC*SfU*SfU* | 289 | CCCAGCAGCUUCAGUC | 199 | nRSSSSSSSSSSSSSSSSS |
| 43017 | SfC*SfA*SfG*SfU*SmC*SmC*SmC*SmU*SmU* | | CCUUUCUAIUCGAU | | SSSSSSnSSSSnR |
| | SmU*SfC*SfU*Sb001A*SIn001SmU*SmC*SmG* | | | | |
| | SmAn001RmU | | | | |
| WV- | fCn001RfC*SfC*SfA*SfG*SfC*SfA*SfG*SfC*SfU*SfU* | 290 | CCCAGCAGCUUCAGUC | 199 | nRSSSSSSSSSSSSSSSSS |
| 43016 | SfC*SfA*SfG*SfU*SmC*SmC*SmC*SmU*SmU*SfU* | | CCUUUCUAIUCGAU | | SSSSSSSSSSnR |
| | SmC*SfU*Sb001A*SIn001SmU*SmC*SmG* | | | | |
| | SmAn001RmU | | | | |
| WV- | fCn001RfC*SfC*SfA*SfG*SfC*SfA*SfG*SfC*SfU*SfU* | 291 | CCCAGCAGCUUCAGUC | 199 | nRSSSSSSSSSSSSSSSSS |
| 43015 | SfC*SfA*SfG*SfU*SmC*SmC*SmC*SmU*SfU*SmU* | | CCUUUCUAIUCGAU | | SSSSSSnSSSSnR |
| | SmC*SfU*Sb001A*SIn001SmU*SmC*SmG* | | | | |
| | SmAn001RmU | | | | |
| WV- | fCn001RfC*SfC*SfA*SfG*SfC*SfA*SfG*SfC*SfU*SfU* | 292 | CCCAGCAGCUUCAGUC | 199 | nRSSSSSSSSSSSSSSSSS |
| 43014 | SfC*SfA*SfG*SfU*SmC*SmC*SmC*SfU*SmU*SmU* | | CCUUUCUAIUCGAU | | SSSSSSnSSSSnR |
| | SmC*SfU*Sb001A*SIn001SmU*SmC*SmG* | | | | |
| | SmAn001RmU | | | | |
| WV- | fCn001RfC*SfC*SfA*SfG*SfC*SfA*SfG*SfC*SfU*SfU* | 293 | CCCAGCAGCUUCAGUC | 199 | nRSSSSSSSSSSSSSSSSS |
| 43013 | SfC*SfA*SfG*SfU*SmC*SmC*SfC*SmU*SmU*SmU* | | CCUUUCUAIUCGAU | | SSSSSSnSSSSnR |
| | SmC*SfU*Sb001A*SIn001SmU*SmC*SmG* | | | | |
| | SmAn001RmU | | | | |
| WV- | fCn001RfC*SfC*SfA*SfG*SfC*SfA*SfG*SfC*SfU*SfU* | 294 | CCCAGCAGCUUCAGUC | 199 | nRSSSSSSSSSSSSSSSSS |
| 43012 | SfC*SfA*SfG*SfU*SmC*SfC*SmC*SmU*SmU*SmU* | | CCUUUCUAIUCGAU | | SSSSSSnSSSSnR |
| | SmC*SfU*Sb001A*SIn001SmU*SmC*SmG* | | | | |
| | SmAn001RmU | | | | |
| WV- | fCn001RfC*SfC*SfA*SfG*SfC*SfA*SfG*SfC*SfU*SfU* | 295 | CCCAGCAGCUUCAGUC | 199 | nRSSSSSSSSSSSSSSSSS |
| 43011 | SfC*SfA*SfG*SfU*SfC*SmC*SmC*SmU*SmU*SmU* | | CCUUUCUAIUCGAU | | SSSSSSnSSSSnR |
| | SmC*SfU*Sb001A*SIn001SmU*SmC*SmG* | | | | |
| | SmAn001RmU | | | | |
| WV- | fCn001RfC*SfC*SfA*SfG*SfC*SfA*SfG*SfC*SfU*SfU* | 198 | CCCAGCAGCUUCAGUC | 199 | nRSSSSSSSSSSSSSSSSS |
| 42680 | SfC*SfA*SfG*SfU*SmC*SmC*SmC*SmU*SmU* | | CCUUUCUAIUCGAU | | SSSSSSSSSSnR |
| | SmU*SmC*SfU*Sb001A*SIn001SmU*SmC*SmG* | | | | |
| | SmAn001RmU | | | | |
| WV- | fCn001RfC*SfC*SfA*SfG*SfC*SfA*SfG*SfC*SfU*SfU* | 296 | CCCAGCAGCUUCAGUC | 199 | nRSSSSSSSSSSSSSSSSS |
| 43037 | SfC*SfA*SfG*SmU*SmC*SmC*SmC*SmU*SmU* | | CCUUUCUAIUCGAU | | SSSSSSnSSSSnR |
| | SmU*SmC*SfU*Sb001A*SIn001SmU*SmC*SmG* | | | | |
| | SmAn001RmU | | | | |
| WV- | fCn001RfC*SfC*SfA*SfG*SfC*SfA*SfG*SfC*SfU*SfU* | 297 | CCCAGCAGCUUCAGUC | 199 | nRSSSSSSSSSSSSSSSSS |
| 43036 | SfC*SfA*SmG*SfU*SmC*SmC*SmC*SmU*SmU* | | CCUUUCUAIUCGAU | | SSSSSSnSSSSnR |
| | SmU*SmC*SfU*Sb001A*SIn001SmU*SmC*SmG* | | | | |
| | SmAn001RmU | | | | |
| WV- | fCn001RfC*SfC*SfA*SfG*SfC*SfA*SfG*SfC*SfU*SfU* | 298 | CCCAGCAGCUUCAGUC | 199 | nRSSSSSSSSSSSSSSSSS |
| 43035 | SfC*SmA*SfG*SfU*SmC*SmC*SmC*SmU*SmU* | | CCUUUCUAIUCGAU | | SSSSSSnSSSSnR |
| | SmU*SmC*SfU*Sb001A*SIn001SmU*SmC*SmG* | | | | |
| | SmAn001RmU | | | | |
| WV- | fCn001RfC*SfC*SfA*SfG*SfC*SfA*SfG*SfC*SfU*SfU* | 299 | CCCAGCAGCUUCAGUC | 199 | nRSSSSSSSSSSSSSSSSS |
| 43034 | SmC*SfA*SfG*SfU*SmC*SmC*SmC*SmU*SmU* | | CCUUUCUAIUCGAU | | SSSSSSnSSSSnR |
| | SmU*SmC*SfU*Sb001A*SIn001SmU*SmC*SmG* | | | | |
| | SmAn001RmU | | | | |
| WV- | fCn001RfC*SfC*SfA*SfG*SfC*SfA*SfG*SfC*SfU* | 300 | CCCAGCAGCUUCAGUC | 199 | nRSSSSSSSSSSSSSSSSS |
| 43033 | SmU*SfC*SfA*SfG*SfU*SmC*SmC*SmC*SmU*SmU* | | CCUUUCUAIUCGAU | | SSSSSSnSSSSnR |
| | SmU*SmC*SfU*Sb001A*SIn001SmU*SmC*SmG* | | | | |
| | SmAn001RmU | | | | |
| WV- | fCn001RfC*SfC*SfA*SfG*SfC*SfA*SfG*SfC*SmU* | 301 | CCCAGCAGCUUCAGUC | 199 | nRSSSSSSSSSSSSSSSSS |
| 43032 | SfU*SfC*SfA*SfG*SfU*SmC*SmC*SmC*SmU*SmU* | | CCUUUCUAIUCGAU | | SSSSSSSSSSnR |
| | SmU*SmC*SfU*Sb001A*SIn001SmU*SmC*SmG* | | | | |
| | SmAn001RmU | | | | |
| WV- | fCn001RfC*SfC*SfA*SfG*SfC*SfA*SfG*SmC*SfU* | 302 | CCCAGCAGCUUCAGUC | 199 | nRSSSSSSSSSSSSSSSSS |
| 43031 | SfU*SfC*SfA*SfG*SfU*SmC*SmC*SmC*SmU*SmU* | | CCUUUCUAIUCGAU | | SSSSSSnSSSSnR |
| | SmU*SmC*SfU*Sb001A*SIn001SmU*SmC*SmG* | | | | |
| | SmAn001RmU | | | | |
| WV- | fCn001RfC*SfC*SfA*SfG*SfC*SfA*SmG*SfC*SfU* | 303 | CCCAGCAGCUUCAGUC | 199 | nRSSSSSSSSSSSSSSSSS |
| 43030 | SfU*SfC*SfA*SfG*SfU*SmC*SmC*SmC*SmU*SmU* | | CCUUUCUAIUCGAU | | SSSSSSnSSSSnR |
| | SmU*SmC*SfU*Sb001A*SIn001SmU*SmC*SmG* | | | | |
| | SmAn001RmU | | | | |
| WV- | fCn001RfC*SfC*SfA*SfG*SfC*SmA*SfG*SfC*SfU* | 304 | CCCAGCAGCUUCAGUC | 199 | nRSSSSSSSSSSSSSSSSS |
| 43029 | SfU*SfC*SfA*SfG*SfU*SmC*SmC*SmC*SmU*SmU* | | CCUUUCUAIUCGAU | | SSSSSSnSSSSnR |
| | SmU*SmC*SfU*Sb001A*SIn001SmU*SmC*SmG* | | | | |
| | SmAn001RmU | | | | |
| WV- | fCn001RfC*SfC*SfA*SfG*SmC*SfA*SfG*SfC*SfU* | 305 | CCCAGCAGCUUCAGUC | 199 | nRSSSSSSSSSSSSSSSSS |
| 43028 | SfU*SfC*SfA*SfG*SfU*SmC*SmC*SmC*SmU*SmU* | | CCUUUCUAIUCGAU | | SSSSSSSSSSnR |
| | SmU*SmC*SfU*Sb001A*SIn001SmU*SmC*SmG* | | | | |
| | SmAn001RmU | | | | |
| WV- | fCn001RfC*SfC*SfA*SmG*SfC*SfA*SfG*SfC*SfU* | 306 | CCCAGCAGCUUCAGUC | 199 | nRSSSSSSSSSSSSSSSSS |
| 43027 | SfU*SfC*SfA*SfG*SfU*SmC*SmC*SmC*SmU*SmU* | | CCUUUCUAIUCGAU | | SSSSSSnSSSSnR |
| | SmU*SmC*SfU*Sb001A*SIn001SmU*SmC*SmG* | | | | |
| | SmAn001RmU | | | | |
| WV- | fCn001RfC*SfC*SmA*SfG*SfC*SfA*SfG*SfC*SfU* | 307 | CCCAGCAGCUUCAGUC | 199 | nRSSSSSSSSSSSSSSSSS |
| 43026 | SfU*SfC*SfA*SfG*SfU*SmC*SmC*SmC*SmU*SmU* | | CCUUUCUAIUCGAU | | SSSSSSSSSSnR |
| | SmU*SmC*SfU*Sb001A*SIn001SmU*SmC*SmG* | | | | |
| | SmAn001RmU | | | | |
| WV- | fCn001RfC*SmC*SfA*SfG*SfC*SfA*SfG*SfC*SfU* | 308 | CCCAGCAGCUUCAGUC | 199 | nRSSSSSSSSSSSSSSSSS |
| 43025 | SfU*SfC*SfA*SfG*SfU*SmC*SmC*SmC*SmU*SmU* | | CCUUUCUAIUCGAU | | SSSSSSnSSSSnR |
| | SmU*SmC*SfU*Sb001A*SIn001SmU*SmC*SmG* | | | | |
| | SmAn001RmU | | | | |
| WV- | fCn001RmC*SfC*SfA*SfG*SfC*SfA*SfG*SfC*SfU* | 309 | CCCAGCAGCUUCAGUC | 199 | nRSSSSSSSSSSSSSSSSS |
| 43024 | SfU*SfC*SfA*SfG*SfU*SmC*SmC*SmC*SmU*SmU* | | CCUUUCUAIUCGAU | | SSSSSSnSSSSnR |
| | SmU*SmC*SfU*Sb001A*SIn001SmU*SmC*SmG* | | | | |
| | SmAn001RmU | | | | |
| WV- | mCn001RfC*SfC*SfA*SfG*SfC*SfA*SfG*SfC*SfU* | 310 | CCCAGCAGCUUCAGUC | 199 | nRSSSSSSSSSSSSSSSSS |
| 43023 | SfU*SfC*SfA*SfG*SfU*SmC*SmC*SmC*SmU*SmU* | | CCUUUCUAIUCGAU | | SSSSSSnSSSSnR |
| | SmU*SmC*SfU*Sb001A*SIn001SmU*SmC*SmG* | | | | |
| | SmAn001RmU | | | | |
| WV- | fCn001RfC*SfC*SfA*SfG*SfC*SfA*SfG*SfC*SfU*SfU* | 198 | CCCAGCAGCUUCAGUC | 199 | nRSSSSSSSSSSSSSSSSS |
| 42680 | SfC*SfA*SfG*SfU*SmC*SmC*SmC*SmU*SmU* | | CCUUUCUAIUCGAU | | SSSSSSnSSSSnR |
| | SmU*SmC*SfU*Sb001A*SIn001SmU*SmC*SmG* | | | | |
| | SmAn001RmU | | | | |
| WV- | fCn001RfA*SfG*SfC*SfA*SfG*SfC*SfU*SfU*SfC*SfA* | 311 | CAGCAGCUUCAGUCCC | 312 | nRSSSSSSSSSSSSSSSSS |
| 43057 | SfG*SfU*SfC*SfC*SmC*SmU*SmU*SmU*SmC*SfU* | | UUUCUAIUCGAU | | SSSSnSSSSnR |
| | Sb001A*SIn001SmU*SmC*SmG*SmAn001RmU | | | | |
| WV- | fCn001RfC*SfA*SfG*SfC*SfA*SfG*SfC*SfU*SfU*SfC* | 313 | CCAGCAGCUUCAGUCC | 314 | nRSSSSSSSSSSSSSSSSS |
| 43056 | SfA*SfG*SfU*SfC*SmC*SmC*SmU*SmU*SmU* | | CUUUCUAIUCGA | | SSSSSnSSSnR |
| | SmC*SfU*Sb001A*SIn001SmU*SmC*SmGn001RmA | | | | |
| WV- | fCn001RfC*SfC*SfA*SfG*SfC*SfA*SfG*SfC*SfU*SfU* | 315 | CCCAGCAGCUUCAGUC | 316 | nRSSSSSSSSSSSSSSSSS |
| 43055 | SfC*SfA*SfG*SfU*SmC*SmC*SmC*SmU*SmU* | | CCUUUCUAIUCG | | SSSSSSnSSnR |
| | SmU*SmC*SfU*Sb001A*SIn001SmU*SmCn001RmG | | | | |
| WV- | fCn001RfC*SfA*SfG*SfC*SfA*SfG*SfC*SfU*SfU*SfC* | 317 | CCAGCAGCUUCAGUCC | 318 | nRSSSSSSSSSSSSSSSSS |
| 43054 | SfA*SfG*SfU*SfC*SmC*SmC*SmU*SmU*SmU* | | CUUUCUAIUCGAU | | SSSSSnSSSSnR |
| | SmC*SfU*Sb001A*SIn001SmU*SmC*SmG* | | | | |
| | SmAn001RmU | | | | |
| WV- | fCn001RfC*SfC*SfA*SfG*SfC*SfA*SfG*SfC*SfU*SfU* | 319 | CCCAGCAGCUUCAGUC | 320 | nRSSSSSSSSSSSSSSSSS |
| 43053 | SfC*SfA*SfG*SfU*SmC*SmC*SmC*SmU*SmU* | | CCUUUCUAIUCGA | | SSSSSSnSSSnR |
| | SmU*SmC*SfU*Sb001A*SIn001SmU*SmC* | | | | |
| | SmGn001RmA | | | | |
| WV- | fCn001RfC*SfC*SfC*SfA*SfG*SfC*SfA*SfG*SfC*SfU* | 321 | CCCCAGCAGCUUCAGU | 322 | nRSSSSSSSSSSSSSSSSS |
| 43052 | SfU*SfC*SfA*SfG*SmU*SmC*SmC*SmC*SmU* | | CCCUUUCUAIUCGAU | | SSSSSSSnSSSSnR |
| | SmU*SmU*SmC*SfU*Sb001A*SIn001SmU*SmC*SmG* | | | | |
| | SmAn001RmU | | | | |
| WV- | fCn001RfC*SfC*SfA*SfG*SfC*SfA*SfG*SfC*SfU*SfU* | 323 | CCCAGCAGCUUCAGUC | 324 | nRSSSSSSSSSSSSSSSSS |
| 43051 | SfC*SfA*SfG*SfU*SmC*SmC*SmC*SmU*SmU* | | CCUUUCUAIUCGAUG | | SSSSSSnSSSSSnR |
| | SmU*SmC*SfU*Sb001A*SIn001SmU*SmC*SmG*SmA* | | | | |
| | SmUn001RmG | | | | |
| WV- | fGn001RfC*SfC*SfC*SfC*SfA*SfG*SfC*SfA*SfG*SfC* | 325 | GCCCCAGCAGCUUCAG | 326 | nRSSSSSSSSSSSSSSSSS |
| 43050 | SfU*SfU*SfC*SfA*SmG*SmU*SmC*SmC*SmC* | | UCCCUUUCUAIUCGAU | | SSSSSSSSnSSSSnR |
| | SmU*SmU*SmU*SmC*SfU*Sb001A*SIn001SmU*SmC* | | | | |
| | SmG*SmAn001RmU | | | | |
| WV- | fCn001RfC*SfC*SfC*SfA*SfG*SfC*SfA*SfG*SfC*SfU* | 327 | CCCCAGCAGCUUCAGU | 328 | nRSSSSSSSSSSSSSSSSS |
| 43049 | SfU*SfC*SfA*SfG*SmU*SmC*SmC*SmC*SmU* | | CCCUUUCUAIUCGAUG | | SSSSSSSnSSSSSnR |
| | SmU*SmU*SmC*SfU*Sb001A*SIn001SmU*SmC*SmG* | | | | |
| | SmA*SmUn001RmG | | | | |
| WV- | fCn001RfC*SfC*SfA*SfG*SfC*SfA*SfG*SfC*SfU*SfU* | 329 | CCCAGCAGCUUCAGUC | 330 | nRSSSSSSSSSSSSSSSSS |
| 43048 | SfC*SfA*SfG*SfU*SmC*SmC*SmC*SmU*SmU* | | CCUUUCUAIUCGAUGG | | SSSSSSnSSSSSSnR |
| | SmU*SmC*SfU*Sb001A*SIn001SmU*SmC*SmG*SmA* | | | | |
| | SmU*SmGn001RmG | | | | |
| WV- | fCn001RfC*SfC*SfA*SfG*SfC*SfA*SfG*SfC*SfU*SfU* | 198 | CCCAGCAGCUUCAGUC | 199 | nRSSSSSSSSSSSSSSSSS |
| 42680 | SfC*SfA*SfG*SfU*SmC*SmC*SmC*SmU*SmU* | | CCUUUCUAIUCGAU | | SSSSSSnSSSSnR |
| | SmU*SmC*SfU*Sb001A*SIn001SmU*SmC*SmG* | | | | |
| | SmAn001RmU | | | | |
| WV- | fCn001RfC*SfC*SfA*SfG*SfC*SfA*SfG*SfC*SfU*SfU* | 331 | CCCAGCAGCUUCAGUC | 199 | nRSSSSSSSSSSSSSSOn |
| 43047 | SfC*SfA*SfG*SfU*SmCmCn001RmCmUn001RmUmUn001RmC* | | CCUUUCUAIUCGAU | | ROnROnRSSSnSSSSnR |
| | SfU*Sb001A*SIn001SmU*SmC*SmG* | | | | |
| | SmAn001RmU | | | | |
| WV- | fCn001RfC*SfC*SfA*SfG*SfC*SfA*SfG*SfC*SfU*SfU* | 332 | CCCAGCAGCUUCAGUC | 199 | nRSSSSSSSSSSSSSSSSS |
| 43046 | SfC*SfA*SfG*SfU*SmC*SmC*SmC*SmUmUn001RmUmC* | | CCUUUCUAIUCGAU | | OnROSSSnSSSSnR |
| | SfU*Sb001A*SIn001SmU*SmC*SmG* | | | | |
| | SmAn001RmU | | | | |
| WV- | fCn001RfC*SfC*SfA*SfG*SfC*SfA*SfG*SfC*SfU*SfU* | 333 | CCCAGCAGCUUCAGUC | 199 | nRSSSSSSSSSSSSSSSOn |
| 43045 | SfC*SfA*SfG*SfU*SmC*SmCmCn001RmUmUn001RmU* | | CCUUUCUAIUCGAU | | ROnRSSSSnSSSSnR |
| | SmC*SfU*Sb001A*SIn001SmU*SmC*SmG* | | | | |
| | SmAn001RmU | | | | |
| WV- | fCn001RfC*SfC*SfA*SfG*SfC*SfA*SfG*SfC*SfU*SfU* | 334 | CCCAGCAGCUUCAGUC | 199 | nRSSSSSSSSSSSSSSSSO |
| 43044 | SfC*SfA*SfG*SfU*SmC*SmC*SmCmUn001RmUmUn001RmC* | | CCUUUCUAIUCGAU | | nROnRSSSnSSSSnR |
| | SfU*Sb001A*SIn001SmU*SmC*SmG* | | | | |
| | SmAn001RmU | | | | |
| WV- | fCn001RfC*SfC*SfA*SfG*SfC*SfA*SfG*SfC*SfU* | 335 | CCCAGCAGCUUCAGUC | 199 | nRSSSSSSSSSSSSSSSSS |
| 43043 | SfU*SfC*SfA*SfG*SfU*SmC*SmC*SmC*SmU*SmU* | | CCUUUCUAIUCGAU | | SSOSSSnSSSSnR |
| | SmUmC*SfU*Sb001A*SIn001SmU*SmC*SmG* | | | | |
| | SmAn001RmU | | | | |
| WV- | fCn001RfC*SfC*SfA*SfG*SfC*SfA*SfG*SfC*SfU* | 336 | CCCAGCAGCUUCAGUC | 199 | nRSSSSSSSSSSSSSSSSS |
| 43042 | SfU*SfC*SfA*SfG*SfU*SmC*SmC*SmC*SmU*SmUmU* | | CCUUUCUAIUCGAU | | SOSSSSnSSSSnR |
| | SmC*SfU*Sb001A*SIn001SmU*SmC*SmG* | | | | |
| | SmAn001RmU | | | | |
| WV- | fCn001RfC*SfC*SfA*SfG*SfC*SfA*SfG*SfC*SfU* | 337 | CCCAGCAGCUUCAGUC | 199 | nRSSSSSSSSSSSSSSSSS |
| 43041 | SfU*SfC*SfA*SfG*SfU*SmC*SmC*SmC*SmUmU*SmU* | | CCUUUCUAIUCGAU | | OSSSSSnSSSSnR |
| | SmC*SfU*Sb001A*SIn001SmU*SmC*SmG* | | | | |
| | SmAn001RmU | | | | |
| WV- | fCn001RfC*SfC*SfA*SfG*SfC*SfA*SfG*SfC*SfU* | 338 | CCCAGCAGCUUCAGUC | 199 | nRSSSSSSSSSSSSSSSSO |
| 43040 | SfU*SfC*SfA*SfG*SfU*SmC*SmC*SmCmU*SmU* | | CCUUUCUAIUCGAU | | SSSSSSnSSSSnR |
| | SmU*SmC*SfU*Sb001A*SIn001SmU*SmC*SmG* | | | | |
| | SmAn001RmU | | | | |
| WV- | fCn001RfC*SfC*SfA*SfG*SfC*SfA*SfG*SfC*SfU* | 339 | CCCAGCAGCUUCAGUC | 199 | nRSSSSSSSSSSSSSSSOS |
| 43039 | SfU*SfC*SfA*SfG*SfU*SmC*SmCmC*SmU*SmU* | | CCUUUCUAIUCGAU | | SSSSSSnSSSSnR |
| | SmU*SmC*SfU*Sb001A*SIn001SmU*SmC*SmG* | | | | |
| | SmAn001RmU | | | | |
| WV- | fCn001RfC*SfC*SfA*SfG*SfC*SfA*SfG*SfC*SfU* | 340 | CCCAGCAGCUUCAGUC | 199 | nRSSSSSSSSSSSSSSOSS |
| 43038 | SfU*SfC*SfA*SfG*SfU*SmCmC*SmC*SmU*SmU* | | CCUUUCUAIUCGAU | | SSSSSSnSSSSnR |
| | SmU*SmC*SfU*Sb001A*SIn001SmU*SmC*SmG* | | | | |
| | SmAn001RmU | | | | |
| WV- | fCn001RfC*SfC*SfA*SfG*SfC*SfA*SfG*SfC*SfU* | 198 | CCCAGCAGCUUCAGUC | 199 | nRSSSSSSSSSSSSSSSSS |
| 42680 | SfU*SfC*SfA*SfG*SfU*SmC*SmC*SmC*SmU*SmU* | | CCUUUCUAIUCGAU | | SSSSSSnSSSSnR |
| | SmU*SmC*SfU*Sb001A*SIn001SmU*SmC*SmG* | | | | |
| | SmAn001RmU | | | | |
| WV- | Mod001L001fCn001RfC*SfC*SfA*SfG*SfC*SfA*SfG* | 341 | CCCAGCAGCUUCAGUC | 199 | OnRSSSSSSSSSSSSSSSS |
| 43118 | SfC*SfU*SfU*SfC*SfA*SfG*SfU*SfC*SfC*SfC*SfU* | | CCUUUCUAIUCGAU | | SSSSSSSnSSSSnR |
| | SfU*SfU*SmC*SfU*Sb001A*SIn001SmU*SmC*SfG* | | | | |
| | SfAn001RmU | | | | |
| WV- | Mod001L001fCn001RfC*SfC*SfA*SfG*SfC*SfA*SfG* | 342 | CCCAGCAGCUUCAGUC | 199 | OnRSSSSSSSSSSSSSSSS |
| 43119 | SfC*SfU*SfU*SfC*SfA*SfG*SfU*SfC*SfC*SfC*SfU* | | CCUUUCUAIUCGAU | | SSSSSSSnSSSSnR |
| | SfU*SfU*SfC*SfU*Sb001A*SIn001SmU*SfC*SmG* | | | | |
| | SmAn001RmU | | | | |
| WV- | Mod001L001mCn001RmC*SmC*SfA*SfG*SfC*SfA* | 343 | CCCAGCAGCUUCAGUC | 199 | OnRSSSSSSSSSSSSSSSS |
| 43120 | SfG*SfC*SfU*SfU*SfC*SfA*SfG*SfU*SfC*SfC*SfC* | | CCUUUCUAIUCGAU | | SSSSSSSnSSSSnR |
| | SfU*SfU*SfU*SfC*SfU*Sb001A*SIn001SmU*SfC* | | | | |
| | SmG*SmAn001RmU | | | | |
| WV- | Mod001L001fCn001RfC*SfCn001RfA*SfG*SfCn001RfA* | 344 | CCCAGCAGCUUCAGUC | 199 | OnRSnRSSnRSSSSSSSn |
| 43121 | SfG*SfC*SfU*SfU*SfC*SfA*SfGn001RfU*SfCn001RfC* | | CCUUUCUAIUCGAU | | RSnRSSSnRSSSSnSSSSn |
| | SfC*SfU*SfUn001RfU*SmC*SfU*Sb001A*SIn001SmU* | | | | R |
| | SmC*SfG*SfAn001RmU | | | | |
| WV- | Mod001L001fCn001RfC*SfCn001RfA*SfG*SfCn001RfA* | 345 | CCCAGCAGCUUCAGUC | 199 | OnRSnRSSnRSSSSSSSn |
| 43122 | SfG*SfC*SfU*SfU*SfC*SfA*SfGn001RfU*SfCn001RfC* | | CCUUUCUAIUCGAU | | RSnRSSSnRSSSSnSSSSn |
| | SfC*SfU*SfUn001RfU*SfC*SfU*Sb001A*SIn001SmU* | | | | R |
| | SfC*SmG*SmAn001RmU | | | | |
| WV- | Mod001L001mCn001RmC*SmCn001RfA*SfG*SfCn001RfA* | 346 | CCCAGCAGCUUCAGUC | 199 | OnRSnRSSnRSSSSSSSn |
| 43123 | SfG*SfC*SfU*SfU*SfC*SfA*SfGn001RfU*SfCn001RfC* | | CCUUUCUAIUCGAU | | RSnRSSSnRSSSSnSSSSn |
| | SfC*SfU*SfUn001RfU*SfC*SfU*Sb001A*SIn001SmU* | | | | R |
| | SfC*SmG*SmAn001RmU | | | | |
| WV- | Mod001L001fCn001RfC*SfC*SfC*SfA*SfG*SfC*SfA* | 347 | CCCCAGCAGCUUCAGU | 117 | OnRSSSSSSSSSSSSSSSS |
| 43745 | SfG*SfC*SfU*SfU*SfC*SfA*SfG*SmU*SmC*SmC* | | CCCUUUCUCIUCGA | | SSSSSSSSnSSSnR |
| | SmC*SmU*SmU*SmU*SmC*SfU*SC*SIn001SmU* | | | | |
| | SmC*SmGn001RmA | | | | |
| WV- | Mod001L001fCn001RfC*SfC*SfC*SfA*SfG*SfC*SfA* | 348 | CCCCAGCAGCUUCAGU | 201 | OnRSSSSSSSSSSSSSSSS |
| 43746 | SfG*SfC*SfU*SfU*SfC*SfA*SfG*SmU*SmC*SmC* | | CCCUUUCUAIUCGA | | SSSSSSSSnSSSnR |
| | SmC*SmU*SmU*SmU*SmC*SfU*Sb001A*SIn001SmU* | | | | |
| | SmC*SmGn001RmA | | | | |
| WV- | Mod001L001fCn001RfC*SfC*SfC*SfA*SfG*SfC*SfA* | 349 | CCCCAGCAGCUUCAGU | 350 | OnRSSSSSSSSSSSSSSSS |
| 43747 | SfG*SfC*SfU*SfU*SfC*SfA*SfG*SmU*SmC*SmC* | | CCCUUUCUUIUCGA | | SSSSSSSSnSSSnR |
| | SmC*SmU*SmU*SmU*SmC*SfU*Sb008U*SIn001SmU* | | | | |
| | SmC*SmGn001RmA | | | | |
| WV- | Mod001L001fCn001RfC*SfC*SfC*SfA*SfG*SfC*SfA* | 351 | CCCCAGCAGCUUCAGU | 352 | OnRSSSSSSSSSSSSSSSS |
| 43748 | SfG*SfC*SfU*SfU*SfC*SfA*SfG*SmU*SmC*SmC* | | CCCUUUCCCGUCGA | | SSSSSSSSnRSSnR |
| | SmC*SmU*SmU*SmU*SmC*SfC*SC*SGn001RmU*SmC* | | | | |
| | SmGn001RmA | | | | |
| WV- | Mod001L001fCn001RfC*SfC*SfC*SfA*SfG*SfC*SfA* | 353 | CCCCAGCAGCUUCAGU | 117 | OnRSSSSSSSSSSSSSSSS |
| 43749 | SfG*SfC*SfU*SfU*SfC*SfA*SfG*SfU*SfC*SfC*SfC* | | CCCUUUCUCIUCGA | | SSSSSSSSnSSSnR |
| | SfU*SfU*SfU*SmC*SfU*SC*SIn001SmU*SfC* | | | | |
| | SfGn001RmA | | | | |
| WV- | Mod001L001fCn001RfC*SfC*SfC*SfA*SfG*SfC*SfA* | 354 | CCCCAGCAGCUUCAGU | 201 | OnRSSSSSSSSSSSSSSSS |
| 43750 | SfG*SfC*SfU*SfU*SfC*SfA*SfG*SfU*SfC*SfC*SfC* | | CCCUUUCUAIUCGA | | SSSSSSSSSSSnR |
| | SfU*SfU*SfU*SmC*SfU*Sb001A*SIn001SmU*SfC* | | | | |
| | SfGn001RmA | | | | |
| WV- | Mod001L001fCn001RfC*SfC*SfC*SfA*SfG*SfC*SfA* | 355 | CCCCAGCAGCUUCAGU | 350 | OnRSSSSSSSSSSSSSSSS |
| 43751 | SfG*SfC*SfU*SfU*SfC*SfA*SfG*SfU*SfC*SfC*SfC* | | CCCUUUCUUIUCGA | | SSSSSSSSSSSnR |
| | SfU*SfU*SfU*SmC*SfU*Sb008U*SIn001SmU*SfC* | | | | |
| | GSfn001RmA | | | | |
| WV- | Mod001L001fCn001RfC*SfC*SfC*SfA*SfG*SfC*SfA* | 356 | CCCCAGCAGCUUCAGU | 352 | OnRSSSSSSSSSSSSSSSS |
| 43752 | SfG*SfC*SfU*SfU*SfC*SfA*SfG*SfU*SfC*SfC*SfC* | | CCCUUUCCCGUCGA | | SSSSSSSSnRSSnR |
| | SfU*SfU*SfU*SmC*SfC*SC*SGn001RmU*SfC* | | | | |
| | SfGn001RmA | | | | |
| WV- | Mod001L001fCn001RfC*SfC*SfA*SfG*SfC*SfA*SfG* | 357 | CCCAGCAGCUUCAGUC | 115 | OnRSSSSSSSSSSSSSSSS |
| 43753 | SfC*SfU*SfU*SfC*SfA*SfG*SfU*SfC*SfC*SfC*SfU* | | CCUUUCUCIUCGAU | | SSSSSSSnSSSSnR |
| | SfU*SfU*SmC*SfU*SC*SIn001SmU*SmC*SfG* | | | | |
| | SfAn001RmU | | | | |
| WV- | Mod001L001fCn001RfC*SfC*SfA*SfG*SfC*SfA*SfG* | 34 | CCCAGCAGCUUCAGUC | 199 | OnRSSSSSSSSSSSSSSSS |
| 43118 | SfC*SfU*SfU*SfC*SfA*SfG*SfU*SfC*SfC*SfC*SfU* | | CCUUUCUAIUCGAU | | SSSSSSSSSSSnR |
| | SfU*SfU*SmC*SfU*Sb001A*SIn001SmU*SmC*SfG* | | | | |
| | SfAn001RmU | | | | |
| WV- | Mod001L001fCn001RfC*SfC*SfA*SfG*SfC*SfA*SfG* | 358 | CCCAGCAGCUUCAGUC | 359 | OnRSSSSSSSSSSSSSSSS |
| 43754 | SfC*SfU*SfU*SfC*SfA*SfG*SfU*SfC*SfC*SfC*SfU* | | CCUUUCUUIUCGAU | | SSSSSSSnSSSSnR |
| | SfU*SfU*SmC*SfU*Sb008U*SIn001SmU*SmC*SfG* | | | | |
| | SfAn001RmU | | | | |
| WV- | Mod001L001fCn001RfC*SfC*SfA*SfG*SfC*SfA*SfG* | 360 | CCCAGCAGCUUCAGUC | 361 | OnRSSSSSSSSSSSSSSSS |
| 43755 | SfC*SfU*SfU*SfC*SfA*SfG*SfU*SfC*SfC*SfC*SfU* | | CCUUUCCCGUCGAU | | SSSSSSSnRSSSnR |
| | SfU*SfU*SmC*SfC*SC*SGn001RmU*SmC*SfG* | | | | |
| | SfAn001RmU | | | | |
| WV- | fCn001RfC*SfC*SfC*SfA*SfG*SfC*SfA*SfG*SfC* | 362 | CCCCAGCAGCUUCAGU | 363 | nRSSSSSSSSSSSSSSSSS |
| 43698 | SfU*SfU*SfC*SfA*SfG*SmU*SmC*SmC*SmC*SmU* | | CCCUUUCGCGUCGA | | SSSSSSSnRSSnR |
| | SmU*SmU*SmC*SfG*SC*SGn001RmU*SmC* | | | | |
| | SmGn001RmA | | | | |
| WV- | fCn001RfC*SfC*SfC*SfA*SfG*SfC*SfA*SfG*SfC* | 364 | CCCCAGCAGCUUCAGU | 352 | nRSSSSSSSSSSSSSSSSS |
| 43697 | SfU*SfU*SfC*SfA*SfG*SmU*SmC*SmC*SmC*SmU* | | CCCUUUCCCGUCGA | | SSSSSSSnRSSnR |
| | SmU*SmU*SmC*SfC*SC*SGn001RmU*SmC* | | | | |
| | SmGn001RmA | | | | |
| WV- | fCn001RfC*SfC*SfC*SfA*SfG*SfC*SfA*SfG*SfC* | 365 | CCCCAGCAGCUUCAGU | 366 | nRSSSSSSSSSSSSSSSSS |
| 43696 | SfU*SfU*SfC*SfA*SfG*SmU*SmC*SmC*SmC*SmU* | | CCCUUUCACGUCGA | | SSSSSSSnRSSnR |
| | SmU*SmU*SmC*SfA*SC*SGn001RmU*SmC* | | | | |
| | SmGn001RmA | | | | |
| WV- | fCn001RfC*SfC*SfC*SfA*SfG*SfC*SfA*SfG*SfC* | 367 | CCCCAGCAGCUUCAGU | 368 | nRSSSSSSSSSSSSSSSSS |
| 43695 | SfU*SfU*SfC*SfA*SfG*SmU*SmC*SmC*SmC*SmU* | | CCCUUUCUCGUCGA | | SSSSSSSnRSSnR |
| | SmU*SmU*SmC*SfU*SC*SGn001RmU*SmC* | | | | |
| | SmGn001RmA | | | | |
| WV- | fCn001RfC*SfC*SfC*SfA*SfG*SfC*SfA*SfG*SfC* | 369 | CCCCAGCAGCUUCAGU | 370 | nRSSSSSSSSSSSSSSSSS |
| 43694 | SfU*SfU*SfC*SfA*SfG*SmU*SmC*SmC*SmC*SmU* | | CCCUUUCGCIUCGA | | SSSSSSSnSSSnR |
| | SmU*SmU*SmC*SfG*SC*SIn001SmU*SmC* | | | | |
| | SmGn001RmA | | | | |
| WV- | fCn001RfC*SfC*SfC*SfA*SfG*SfC*SfA*SfG*SfC* | 371 | CCCCAGCAGCUUCAGU | 372 | nRSSSSSSSSSSSSSSSSS |
| 43693 | SfU*SfU*SfC*SfA*SfG*SmU*SmC*SmC*SmC*SmU* | | CCCUUUCCCIUCGA | | SSSSSSSnSSSnR |
| | SmU*SmU*SmC*SfC*SC*SIn001SmU*SmC* | | | | |
| | SmGn001RmA | | | | |
| WV- | fCn001RfC*SfC*SfC*SfA*SfG*SfC*SfA*SfG*SfC* | 373 | CCCCAGCAGCUUCAGU | 374 | nRSSSSSSSSSSSSSSSSS |
| 43692 | SfU*SfU*SfC*SfA*SfG*SmU*SmC*SmC*SmC*SmU* | | CCCUUUCACIUCGA | | SSSSSSSSSSnR |
| | SmU*SmU*SmC*SfA*SC*SIn001SmU*SmC* | | | | |
| | SmGn001RmA | | | | |
| WV- | fCn001RfC*SfC*SfC*SfA*SfG*SfC*SfA*SfG*SfC* | 164 | CCCCAGCAGCUUCAGU | 117 | nRSSSSSSSSSSSSSSSSS |
| 42027 | SfU*SfU*SfC*SfA*SfG*SmU*SmC*SmC*SmC*SmU* | | CCCUUUCUCIUCGA | | SSSSSSSnSSSnR |
| | SmU*SmU*SmC*SfU*SC*SIn001SmU*SmC* | | | | |
| | SmGn001RmA | | | | |
| WV- | fCn001RfC*SfC*SfC*SfA*SfG*SfC*SfA*SfG*SfC* | 375 | CCCCAGCAGCUUCAGU | 376 | nRSSSSSSSSSSSSSSSSS |
| 43691 | SfU*SfU*SfC*SfA*SfG*SmU*SmC*SmC*SmC*SmU* | | CCCUUUCGCCUCGA | | SSSSSSSnRSSnR |
| | SmU*SmU*SmC*SfG*SC*SCn001RmU*SmC* | | | | |
| | SmGn001RmA | | | | |
| WV- | fCn001RfC*SfC*SfC*SfA*SfG*SfC*SfA*SfG*SfC* | 377 | CCCCAGCAGCUUCAGU | 378 | nRSSSSSSSSSSSSSSSSS |
| 43690 | SfU*SfU*SfC*SfA*SfG*SmU*SmC*SmC*SmC*SmU* | | CCCUUUCCCCUCGA | | SSSSSSSnRSSnR |
| | SmU*SmU*SmC*SfC*SC*SCn001RmU*SmC* | | | | |
| | SmGn001RmA | | | | |
| WV- | fCn001RfC*SfC*SfC*SfA*SfG*SfC*SfA*SfG*SfC* | 379 | CCCCAGCAGCUUCAGU | 380 | nRSSSSSSSSSSSSSSSSS |
| 43689 | SfU*SfU*SfC*SfA*SfG*SmU*SmC*SmC*SmC*SmU* | | CCCUUUCACCUCGA | | SSSSSSSnRSSnR |
| | SmU*SmU*SmC*SfA*SC*SCn001RmU*SmC* | | | | |
| | SmGn001RmA | | | | |
| WV- | fCn001RfC*SfC*SfC*SfA*SfG*SfC*SfA*SfG*SfC* | 381 | CCCCAGCAGCUUCAGU | 382 | nRSSSSSSSSSSSSSSSSS |
| 43688 | SfU*SfU*SfC*SfA*SfG*SmU*SmC*SmC*SmC*SmU* | | CCCUUUCUCCUCGA | | SSSSSSSnRSSnR |
| | SmU*SmU*SmC*SfU*SC*SCn001RmU*SmC* | | | | |
| | SmGn001RmA | | | | |
| WV- | fCn001RfC*SfC*SfC*SfA*SfG*SfC*SfA*SfG*SfC* | 383 | CCCCAGCAGCUUCAGU | 384 | nRSSSSSSSSSSSSSSSSS |
| 43687 | SfU*SfU*SfC*SfA*SfG*SmU*SmC*SmC*SmC*SmU* | | CCCUUUCGCAUCGA | | SSSSSSSnRSSnR |
| | SmU*SmU*SmC*SfG*SC*SAn001RmU*SmC* | | | | |
| | SmGn001RmA | | | | |
| WV- | fCn001RfC*SfC*SfC*SfA*SfG*SfC*SfA*SfG*SfC* | 385 | CCCCAGCAGCUUCAGU | 386 | nRSSSSSSSSSSSSSSSSS |
| 43686 | SfU*SfU*SfC*SfA*SfG*SmU*SmC*SmC*SmC*SmU* | | CCCUUUCCCAUCGA | | SSSSSSSnRSSnR |
| | SmU*SmU*SmC*SfC*SC*SAn001RmU*SmC* | | | | |
| | SmGn001RmA | | | | |
| WV- | fCn001RfC*SfC*SfC*SfA*SfG*SfC*SfA*SfG*SfC* | 387 | CCCCAGCAGCUUCAGU | 388 | nRSSSSSSSSSSSSSSSSS |
| 43685 | SfU*SfU*SfC*SfA*SfG*SmU*SmC*SmC*SmC*SmU* | | CCCUUUCACAUCGA | | SSSSSSSnRSSnR |
| | SmU*SmU*SmC*SfA*SC*SAn001RmU*SmC* | | | | |
| | SmGn001RmA | | | | |
| WV- | fCn001RfC*SfC*SfC*SfA*SfG*SfC*SfA*SfG*SfC* | 389 | CCCCAGCAGCUUCAGU | 390 | nRSSSSSSSSSSSSSSSSS |
| 43683 | SfU*SfU*SfC*SfA*SfG*SmU*SmC*SmC*SmC*SmU* | | CCCUUUCGCTUCGA | | SSSSSSSnRSSnR |
| | SmU*SmU*SmC*SfG*SC*STn001RmU*SmC* | | | | |
| | SmGn001RmA | | | | |
| WV- | fCn001RfC*SfC*SfC*SfA*SfG*SfC*SfA*SfG*SfC* | 391 | CCCCAGCAGCUUCAGU | 392 | nRSSSSSSSSSSSSSSSSS |
| 43682 | SfU*SfU*SfC*SfA*SfG*SmU*SmC*SmC*SmC*SmU* | | CCCUUUCCCTUCGA | | SSSSSSSnRSSnR |
| | SmU*SmU*SmC*SfC*SC*STn001RmU*SmC* | | | | |
| | SmGn001RmA | | | | |
| WV- | fCn001RfC*SfC*SfC*SfA*SfG*SfC*SfA*SfG*SfC* | 393 | CCCCAGCAGCUUCAGU | 394 | nRSSSSSSSSSSSSSSSSS |
| 43681 | SfU*SfU*SfC*SfA*SfG*SmU*SmC*SmC*SmC*SmU* | | CCCUUUCACTUCGA | | SSSSSSSnRSSnR |
| | SmU*SmU*SmC*SfA*SC*STn001RmU*SmC* | | | | |
| | SmGn001RmA | | | | |
| WV- | fCn001RfC*SfC*SfC*SfA*SfG*SfC*SfA*SfG*SfC* | 395 | CCCCAGCAGCUUCAGU | 396 | nRSSSSSSSSSSSSSSSSS |
| 43680 | SfU*SfU*SfC*SfA*SfG*SmU*SmC*SmC*SmC*SmU* | | CCCUUUCUCTUCGA | | SSSSSSSnRSSnR |
| | SmU*SmU*SmC*SfU*SC*STn001RmU*SmC* | | | | |
| | SmGn001RmA | | | | |
| WV- | fCn001RfC*SfC*SfA*SfG*SfC*SfA*SfG*SfC*SfU* | 397 | CCCAGCAGCUUCAGUC | 398 | nRSSSSSSSSSSSSSSSSS |
| 43725 | SfU*SfC*SfA*SfG*SfU*SmC*SmC*SmC*SmU*SmU* | | CCUUUCGAGUCGAU | | SSSSSSnRSSSnR |
| | SmU*SmC*SfG*Sb001A*SGn001RmU*SmC*SmG* | | | | |
| | SmAn001RmU | | | | |
| WV- | fCn001RfC*SfC*SfA*SfG*SfC*SfA*SfG*SfC*SfU* | 399 | CCCAGCAGCUUCAGUC | 400 | nRSSSSSSSSSSSSSSSSS |
| 43724 | SfU*SfC*SfA*SfG*SfU*SmC*SmC*SmC*SmU*SmU* | | CCUUUCCAGUCGAU | | SSSSSSnRSSSnR |
| | SmU*SmC*SfC*Sb001A*SGn001RmU*SmC*SmG* | | | | |
| | SmAn001RmU | | | | |
| WV- | fCn001RfC*SfC*SfA*SfG*SfC*SfA*SfG*SfC*SfU* | 401 | CCCAGCAGCUUCAGUC | 402 | nRSSSSSSSSSSSSSSSSS |
| 43722 | SfU*SfC*SfA*SfG*SfU*SmC*SmC*SmC*SmU*SmU* | | CCUUUCUAGUCGAU | | SSSSSSnRSSSnR |
| | SmU*SmC*SfU*Sb001A*SGn001RmU*SmC*SmG* | | | | |
| | SmAn001RmU | | | | |
| WV- | fCn001RfC*SfC*SfA*SfG*SfC*SfA*SfG*SfC*SfU* | 403 | CCCAGCAGCUUCAGUC | 404 | nRSSSSSSSSSSSSSSSSS |
| 43721 | SfU*SfC*SfA*SfG*SfU*SmC*SmC*SmC*SmU*SmU* | | CCUUUCGAIUCGAU | | SSSSSSSSSSnR |
| | SmU*SmC*SfG*Sb001A*SIn001SmU*SmC*SmG* | | | | |
| | SmAn001RmU | | | | |
| WV- | fCn001RfC*SfC*SfA*SfG*SfC*SfA*SfG*SfC*SfU* | 405 | CCCAGCAGCUUCAGUC | 406 | nRSSSSSSSSSSSSSSSSS |
| 43720 | SfU*SfC*SfA*SfG*SfU*SmC*SmC*SmC*SmU*SmU* | | CCUUUCCAIUCGAU | | SSSSSSnSSSSnR |
| | SmU*SmC*SfC*Sb001A*SIn001SmU*SmC*SmG* | | | | |
| | SmAn001RmU | | | | |
| WV- | fCn001RfC*SfC*SfA*SfG*SfC*SfA*SfG*SfC*SfU* | 407 | CCCAGCAGCUUCAGUC | 408 | nRSSSSSSSSSSSSSSSSS |
| 43719 | SfU*SfC*SfA*SfG*SfU*SmC*SmC*SmC*SmU*SmU* | | CCUUUCAAIUCGAU | | SSSSSSnSSSSnR |
| | SmU*SmC*SfA*Sb001A*SIn001SmU*SmC*SmG* | | | | |
| | SmAn001RmU | | | | |
| WV- | fCn001RfC*SfC*SfA*SfG*SfC*SfA*SfG*SfC*SfU* | 198 | CCCAGCAGCUUCAGUC | 199 | nRSSSSSSSSSSSSSSSSS |
| 42680 | SfU*SfC*SfA*SfG*SfU*SmC*SmC*SmC*SmU*SmU* | | CCUUUCUAIUCGAU | | SSSSSSnSSSSnR |
| | SmU*SmC*SfU*Sb001A*SIn001SmU*SmC*SmG* | | | | |
| | SmAn001RmU | | | | |
| WV- | fCn001RfC*SfC*SfC*SfA*SfG*SfC*SfA*SfG*SfC* | 409 | CCCCAGCAGCUUCAGU | 410 | nRSSSSSSSSSSSSSSSSS |
| 43705 | SfU*SfU*SfC*SfA*SfG*SmU*SmC*SmC*SmC*SmU* | | CCCUUUCGAGUCGA | | SSSSSSSnRSSnR |
| | SmU*SmU*SmC*SfG*Sb001A*SGn001RmU*SmC* | | | | |
| | SmGn001RmA | | | | |
| WV- | fCn001RfC*SfC*SfC*SfA*SfG*SfC*SfA*SfG*SfC* | 411 | CCCCAGCAGCUUCAGU | 412 | nRSSSSSSSSSSSSSSSSS |
| 43704 | SfU*SfU*SfC*SfA*SfG*SmU*SmC*SmC*SmC*SmU* | | CCCUUUCCAGUCGA | | SSSSSSSnRSSnR |
| | SmU*SmU*SmC*SfC*Sb001A*SGn001RmU*SmC* | | | | |
| | SmGn001RmA | | | | |
| WV- | fCn001RfC*SfC*SfC*SfA*SfG*SfC*SfA*SfG*SfC* | 413 | CCCCAGCAGCUUCAGU | 414 | nRSSSSSSSSSSSSSSSSS |
| 43703 | SfU*SfU*SfC*SfA*SfG*SmU*SmC*SmC*SmC*SmU* | | CCCUUUCAAGUCGA | | SSSSSSSnRSSnR |
| | SmU*SmU*SmC*SfA*Sb001A*SGn001RmU*SmC* | | | | |
| | SmGn001RmA | | | | |
| WV- | fCn001RfC*SfC*SfC*SfA*SfG*SfC*SfA*SfG*SfC* | 415 | CCCCAGCAGCUUCAGU | 416 | nRSSSSSSSSSSSSSSSSS |
| 43702 | SfU*SfU*SfC*SfA*SfG*SmU*SmC*SmC*SmC*SmU* | | CCCUUUCUAGUCGA | | SSSSSSSnRSSnR |
| | SmU*SmU*SmC*SfU*Sb001A*SGn001RmU*SmC* | | | | |
| | SmGn001RmA | | | | |
| WV- | fCn001RfC*SfC*SfC*SfA*SfG*SfC*SfA*SfG*SfC* | 417 | CCCCAGCAGCUUCAGU | 418 | nRSSSSSSSSSSSSSSSSS |
| 43699 | USf*SfU*SfC*SfA*SfG*SmU*SmC*SmC*SmC*SmU* | | CCCUUUCAAIUCGA | | SSSSSSSnSSSnR |
| | SmU*SmU*SmC*SfA*Sb001A*SIn001SmU*SmC* | | | | |
| | SmGn001RmA | | | | |
| WV- | fCn001RfC*SfC*SfC*SfA*SfG*SfC*SfA*SfG*SfC* | 200 | CCCCAGCAGCUUCAGU | 201 | nRSSSSSSSSSSSSSSSSS |
| 42679 | SfU*SfU*SfC*SfA*SfG*SmU*SmC*SmC*SmC*SmU* | | CCCUUUCUAIUCGA | | SSSSSSSnSSSnR |
| | SmU*SmU*SmC*SfU*Sb001A*SIn001SmU*SmC* | | | | |
| | SmGn001RmA | | | | |
| WV- | fCn001RfC*SfC*SfA*SfG*SfC*SfA*SfG*SfC*SfU* | 419 | CCCAGCAGCUUCAGUC | 420 | nRSSSSSSSSSSSSSSSSS |
| 43733 | SfU*SfC*SfA*SfG*SfU*SmC*SmC*SmC*SmU*SmU* | | CCUUUCGUGUCGAU | | SSSSSSnRSSSnR |
| | SmU*SmC*SfG*Sb008U*SGn001RmU*SmC*SmG* | | | | |
| | SmAn001RmU | | | | |
| WV- | fCn001RfC*SfC*SfA*SfG*SfC*SfA*SfG*SfC*SfU* | 421 | CCCAGCAGCUUCAGUC | 422 | nRSSSSSSSSSSSSSSSSS |
| 43732 | SfU*SfC*SfA*SfG*SfU*SmC*SmC*SmC*SmU*SmU* | | CCUUUCCUGUCGAU | | SSSSSSnRSSSnR |
| | SmU*SmC*SfC*Sb008U*SGn001RmU*SmC*SmG* | | | | |
| | SmAn001RmU | | | | |
| WV- | fCn001RfC*SfC*SfA*SfG*SfC*SfA*SfG*SfC*SfU* | 423 | CCCAGCAGCUUCAGUC | 424 | nRSSSSSSSSSSSSSSSSS |
| 43731 | SfU*SfC*SfA*SfG*SfU*SmC*SmC*SmC*SmU*SmU* | | CCUUUCAUGUCGAU | | SSSSSSnRSSSnR |
| | SmU*SmC*SfA*Sb008U*SGn001RmU*SmC*SmG* | | | | |
| | SmAn001RmU | | | | |
| WV- | fCn001RfC*SfC*SfA*SfG*SfC*SfA*SfG*SfC*SfU* | 425 | CCCAGCAGCUUCAGUC | 426 | nRSSSSSSSSSSSSSSSSS |
| 43730 | SfU*SfC*SfA*SfG*SfU*SmC*SmC*SmC*SmU*SmU* | | CCUUUCUUGUCGAU | | SSSSSSnRSSSnR |
| | SmU*SmC*SfU*Sb008U*SGn001RmU*SmC*SmG* | | | | |
| | SmAn001RmU | | | | |
| WV- | fCn001RfC*SfC*SfA*SfG*SfC*SfA*SfG*SfC*SfU* | 427 | CCCAGCAGCUUCAGUC | 428 | nRSSSSSSSSSSSSSSSSS |
| 43729 | SfU*SfC*SfA*SfG*SfU*SmC*SmC*SmC*SmU*SmU* | | CCUUUCGUIUCGAU | | SSSSSSnSSSSnR |
| | SmU*SmC*SfG*Sb008U*SIn001SmU*SmC*SmG* | | | | |
| | SmAn001RmU | | | | |
| WV- | fCn001RfC*SfC*SfA*SfG*SfC*SfA*SfG*SfC*SfU* | 429 | CCCAGCAGCUUCAGUC | 430 | nRSSSSSSSSSSSSSSSSS |
| 43728 | SfU*SfC*SfA*SfG*SfU*SmC*SmC*SmC*SmU*SmU* | | CCUUUCCUIUCGAU | | SSSSSSnSSSSnR |
| | SmU*SmC*SfC*Sb008U*SIn001SmU*SmC*SmG* | | | | |
| | SmAn001RmU | | | | |
| WV- | fCn001RfC*SfC*SfA*SfG*SfC*SfA*SfG*SfC*SfU* | 431 | CCCAGCAGCUUCAGUC | 432 | nRSSSSSSSSSSSSSSSSS |
| 43727 | SfU*SfC*SfA*SfG*SfU*SmC*SmC*SmC*SmU*SmU* | | CCUUUCAUIUCGAU | | SSSSSSnSSSSnR |
| | SmU*SmC*SfA*Sb008U*SIn001SmU*SmC*SmG* | | | | |
| | SmAn001RmU | | | | |
| WV- | fCn001RfC*SfC*SfA*SfG*SfC*SfA*SfG*SfC*SfU* | 433 | CCCAGCAGCUUCAGUC | 359 | nRSSSSSSSSSSSSSSSSS |
| 43726 | SfU*SfC*SfA*SfG*SfU*SmC*SmC*SmC*SmU*SmU* | | CCUUUCUUIUCGAU | | SSSSSSnSSSSnR |
| | SmU*SmC*SfU*Sb008U*SIn001SmU*SmC*SmG* | | | | |
| | SmAn001RmU | | | | |
| WV- | fCn001RfC*SfC*SfC*SfA*SfG*SfC*SfA*SfG*SfC* | 434 | CCCCAGCAGCUUCAGU | 435 | nRSSSSSSSSSSSSSSSSS |
| 43713 | SfU*SfU*SfC*SfA*SfG*SmU*SmC*SmC*SmC*SmU* | | CCCUUUCGUGUCGA | | SSSSSSSnRSSnR |
| | SmU*SmU*SmC*SfG*Sb008U*SGn001RmU*SmC* | | | | |
| | SmGn001RmA | | | | |
| WV- | fCn001RfC*SfC*SfC*SfA*SfG*SfC*SfA*SfG*SfC* | 436 | CCCCAGCAGCUUCAGU | 437 | nRSSSSSSSSSSSSSSSSS |
| 43712 | SfU*SfU*SfC*SfA*SfG*SmU*SmC*SmC*SmC*SmU* | | CCCUUUCCUGUCGA | | SSSSSSSnRSSnR |
| | SmU*SmU*SmC*SfC*Sb008U*SGn001RmU*SmC* | | | | |
| | SmGn001RmA | | | | |
| WV- | fCn001RfC*SfC*SfC*SfA*SfG*SfC*SfA*SfG*SfC* | 438 | CCCCAGCAGCUUCAGU | 439 | nRSSSSSSSSSSSSSSSSS |
| 43711 | SfU*SfU*SfC*SfA*SfG*SmU*SmC*SmC*SmC*SmU* | | CCCUUUCAUGUCGA | | SSSSSSSnRSSnR |
| | SmU*SmU*SmC*SfA*Sb008U*SGn001RmU*SmC* | | | | |
| | SmGn001RmA | | | | |
| WV- | fCn001RfC*SfC*SfC*SfA*SfG*SfC*SfA*SfG*SfC* | 440 | CCCCAGCAGCUUCAGU | 441 | nRSSSSSSSSSSSSSSSSS |
| 43710 | SfU*SfU*SfC*SfA*SfG*SmU*SmC*SmC*SmC*SmU* | | CCCUUUCUUGUCGA | | SSSSSSSnRSSnR |
| | SmU*SmU*SmC*SfU*Sb008U*SGn001RmU*SmC* | | | | |
| | SmGn001RmA | | | | |
| WV- | fCn001RfC*SfC*SfC*SfA*SfG*SfC*SfA*SfG*SfC* | 442 | CCCCAGCAGCUUCAGU | 443 | nRSSSSSSSSSSSSSSSSS |
| 43709 | SfU*SfU*SfC*SfA*SfG*SmU*SmC*SmC*SmC*SmU* | | CCCUUUCGUIUCGA | | SSSSSSSnSSSnR |
| | SmU*SmU*SmC*SfG*Sb008U*SIn001SmU*SmC* | | | | |
| | SmGn001RmA | | | | |
| WV- | fCn001RfC*SfC*SfC*SfA*SfG*SfC*SfA*SfG*SfC* | 444 | CCCCAGCAGCUUCAGU | 445 | nRSSSSSSSSSSSSSSSSS |
| 43708 | SfU*SfU*SfC*SfA*SfG*SmU*SmC*SmC*SmC*SmU* | | CCCUUUCCUIUCGA | | SSSSSSSnSSSnR |
| | SmU*SmU*SmC*SfC*Sb008U*SIn001SmU*SmC* | | | | |
| | SmGn001RmA | | | | |
| WV- | fCn001RfC*SfC*SfC*SfA*SfG*SfC*SfA*SfG*SfC* | 446 | CCCCAGCAGCUUCAGU | 447 | nRSSSSSSSSSSSSSSSSS |
| 43707 | SfU*SfU*SfC*SfA*SfG*SmU*SmC*SmC*SmC*SmU* | | CCCUUUCAUIUCGA | | SSSSSSSnSSSnR |
| | SmU*SmU*SmC*SfA*Sb008U*SIn001SmU*SmC* | | | | |
| | SmGn001RmA | | | | |
| WV- | fCn001RfC*SfC*SfC*SfA*SfG*SfC*SfA*SfG*SfC* | 448 | CCCCAGCAGCUUCAGU | 350 | nRSSSSSSSSSSSSSSSSS |
| 43706 | SfU*SfU*SfC*SfA*SfG*SmU*SmC*SmC*SmC*SmU* | | CCCUUUCUUIUCGA | | SSSSSSSnSSSnR |
| | SmU*SmU*SmC*SfU*Sb008U*SIn001SmU*SmC* | | | | |
| | SmGn001RmA | | | | |
| WV- | fCn001RfC*SfC*SfC*SfA*SfG*SfC*SfA*SfG*SfC* | 200 | CCCCAGCAGCUUCAGU | 201 | nRSSSSSSSSSSSSSSSSS |
| 42679 | SfU*SfU*SfC*SfA*SfG*SmU*SmC*SmC*SmC*SmU* | | CCCUUUCUAIUCGA | | SSSSSSSnSSSnR |
| | SmU*SmU*SmC*SfU*Sb001A*SIn001SmU*SmC* | | | | |
| | SmGn001RmA | | | | |
| WV- | fCn001RfC*SfC*SfC*SfA*SfG*SfC*SfA*SfG*SfC* | 449 | CCCCAGCAGCUUCAGU | 211 | nRSSSSSSSSSSSSSSSSS |
| 43714 | SfU*SfU*SfC*SfA*SfG*SmU*SmC*SmC*SmC*SmU* | | CCCUUUCTAIUCGA | | SSSSSSSSSSnR |
| | SmU*SmU*SmC*ST*Sb001A*SIn001SmU*SmC* | | | | |
| | SmGn001RmA | | | | |
| WV- | fCn001RfC*SfC*SfC*SfA*SfG*SfC*SfA*SfG*SfC* | 448 | CCCCAGCAGCUUCAGU | 350 | nRSSSSSSSSSSSSSSSSS |
| 43706 | SfU*SfU*SfC*SfA*SfG*SmU*SmC*SmC*SmC*SmU* | | CCCUUUCUUIUCGA | | SSSSSSSnSSSnR |
| | SmU*SmU*SmC*SfU*Sb008U*SIn001SmU*SmC* | | | | |
| | SmGn001RmA | | | | |
| WV- | fCn001RfC*SfC*SfC*SfA*SfG*SfC*SfA*SfG*SfC* | 450 | CCCCAGCAGCUUCAGU | 209 | nRSSSSSSSSSSSSSSSSS |
| 43715 | SfU*SfU*SfC*SfA*SfG*SmU*SmC*SmC*SmC*SmU* | | CCCUUUCTUIUCGA | | SSSSSSSSSSnR |
| | SmU*SmU*SmC*ST*Sb008U*SIn001SmU*SmC* | | | | |
| | SmGn001RmA | | | | |
| WV- | fCn001RfC*SfC*SfC*SfA*SfG*SfC*SfA*SfG*SfC* | 200 | CCCCAGCAGCUUCAGU | 201 | nRSSSSSSSSSSSSSSSSS |
| 42679 | SfU*SfU*SfC*SfA*SfG*SmU*SmC*SmC*SmC*SmU* | | CCCUUUCUAIUCGA | | SSSSSSSnSSSnR |
| | SmU*SmU*SmC*SfU*Sb001A*SIn001SmU*SmC* | | | | |
| | SmGn001RmA | | | | |
| WV- | fCn001RfC*SfC*SfC*SfA*SfG*SfC*SfA*SfG*SfC*SfU* | 451 | CCCCAGCAGCUUCAGU | 201 | nRSSSSSSSSSSSSSSSSS |
| 43718 | SfU*SfC*SfA*SfG*SfU*SfC*SfC*SfC*SfU*SfU*SfU* | | CCCUUUCUAIUCGA | | SSSSSSSnSSSnR |
| | SmC*SfU*Sb001A*SIn001SmU*SfC*SfGn001RmA | | | | |
| WV- | mCn001RmC*SmC*SfA*SfG*SfCmA*SfG*SfCmU* | 452 | CCCAGCAGCUUCAGUC | 199 | nRSSSSOSSOSnROSnR |
| 44275 | SfUn001RmCfA*SfGn001RfUmC*SfC*SfC*SfUn001RfU* | | CCUUUCUAIUCGAU | | OSSSnRSOSSSnSOSSnR |
| | SmUfC*SfU*Sb001A*SIn001SmUfC*SmG* | | | | |
| | SmAn001RmU | | | | |
| WV- | mCn001RmC*SmC*SfA*SfG*SfC*SmA*SfG*SfC* | 453 | CCCAGCAGCUUCAGUC | 199 | nRSSSSSSSSSnRSSnRSS |
| 44274 | SmU*SfUn001RmC*SfA*SfGn001RfU*SmC*SfC*SfC* | | CCUUUCUAIUCGAU | | SSnRSSSSSnSSSSnR |
| | SfUn001RfU*SmU*SfC*SfU*Sb001A*SIn001SmU*SfC* | | | | |
| | SmG*SmAn001RmU | | | | |
| WV- | mCn001RmC*SmC*SfA*SfG*SfCmA*SfG*SfCmU* | 454 | CCCAGCAGCUUCAGUC | 199 | nRSSSSOSSOSnROSnR |
| 44273 | SfUn001RmCfA*SfGn001RfUmC*SfC*SfC*SfU*SfU* | | CCUUUCUAIUCGAU | | OSSSSSOSSSnSOSSnR |
| | SmUfC*SfU*Sb001A*SIn001SmUfC*SmG* | | | | |
| | SmAn001RmU | | | | |
| WV- | mCn001RmC*SmC*SfA*SfG*SfC*SmA*SfG*SfC*SmU* | 455 | CCCAGCAGCUUCAGUC | 199 | nRSSSSSSSSSnRSSnRSS |
| 44272 | SfUn001RmC*SfA*SfGn001RfU*SmC*SfC*SfC*SfU* | | CCUUUCUAIUCGAU | | SSSSSSSSnSSSSnR |
| | SfU*SmU*SfC*SfU*Sb001A*SIn001SmU*SfC*SmG* | | | | |
| | SmAn001RmU | | | | |
| WV- | mCn001RmC*SmC*SfA*SfG*SfCmA*SfG*SfCmU*SfU* | 456 | CCCAGCAGCUUCAGUC | 199 | nRSSSSOSSOSSOSSOSS |
| 44271 | SmCfA*SfG*SfUmC*SfC*SfC*SfU*SfU*SmUfC* | | CCUUUCUAIUCGAU | | SSSOSSSnSOSSnR |
| | SfU*Sb001A*SIn001SmUfC*SmG*SmAn001RmU | | | | |
| WV- | mCn001RmC*SmC*SfA*SfG*SfCmA*SfG*SfCmU*SfU* | 457 | CCCAGCAGCUUCAGUC | 199 | nRSSSSOSSOSSOSSSOS |
| 44270 | SmCfA*SfG*SfU*SmCfC*SfC*SfU*SfU*SmUfC* | | CCUUUCUAIUCGAU | | SSSOSSSnSOSSnR |
| | SfU*Sb001A*SIn001SmUfC*SmG*SmAn001RmU | | | | |
| WV- | mCn001RmC*SmC*SfA*SfG*SfC*SmA*SfG*SfC*SmU* | 458 | CCCAGCAGCUUCAGUC | 199 | nRSSSSSSSSSSSSSSSSS |
| 44269 | SfU*SmC*SfA*SfG*SfU*SmC*SfC*SfC*SfU*SfU* | | CCUUUCUAIUCGAU | | SSSSSSSSSSnR |
| | SmU*SfC*SfU*Sb001A*SIn001SmU*SfC*SmG* | | | | |
| | SmAn001RmU | | | | |
| WV- | mCn001RmC*SmC*SfA*SfG*SfC*SfA*SfG*SfC*SfU* | 459 | CCCAGCAGCUUCAGUC | 199 | nRSSSSSSSSSSSSSSSSS |
| 44226 | SfU*SfC*SfA*SfG*SfU*SfC*SfC*SfC*SfU*SfU*SmU* | | CCUUUCUAIUCGAU | | SSSSSSnSSSSnR |
| | SfC*SfU*Sb001A*SIn001SmU*SfC*SmG* | | | | |
| | SmAn001RmU | | | | |
| WV- | mCn001RmC*SmC*SfA*SfG*SfC*SfA*SfG*SfC*SfU* | 460 | CCCAGCAGCUUCAGUC | 199 | nRSSSSSSSSSSSSSSSOn |
| 44227 | SfU*SfC*SfA*SfG*SfU*SfC*SfCfCn001RfUfUn001RfU* | | CCUUUCUAIUCGAU | | ROnRSSSSnSSSSnR |
| | SfC*SfU*Sb001A*SIn001SmU*SfC*SmG* | | | | |
| | SmAn001RmU | | | | |
| WV- | mCn001RmC*SmC*SfA*SfG*SmCfA*SfG*SfC*SfU* | 461 | CCCAGCAGCUUCAGUC | 199 | nRSSSSOSSSSnRSOnRS |
| 44191 | SfUn001RfC*SfAfGn001RfU*SfCmC*SfC*SfU*SmUfU* | | CCUUUCUAIUCGAU | | OSSSOSSSSnSOSSnR |
| | SfC*SfU*Sb001A*SIn001SmUfC*SmG* | | | | |
| | SmAn001RmU | | | | |
| WV- | mCn001RmC*SmC*SfA*SfG*SmCfA*SfG*SfC*SfU* | 462 | CCCAGCAGCUUCAGUC | 199 | nRSSSSOSSSSnRSOnRS |
| 44190 | SfUn001RfC*SfAfGn001RfU*SfC*SfC*SfC*SfU*SmUfU* | | CCUUUCUAIUCGAU | | SSSSOSSSSnSOSSnR |
| | SfC*SfU*Sb001A*SIn001SmUfC*SmG* | | | | |
| | SmAn001RmU | | | | |
| WV- | mCn001RmC*SmC*SfA*SfG*SmCfA*SfG*SfC*SfU* | 463 | CCCAGCAGCUUCAGUC | 199 | nRSSSSOSSSSnRSOnRS |
| 44189 | SfUn001RfC*SfAfGn001RfU*SfCmC*SfC*SfU*SfU* | | CCUUUCUAIUCGAU | | OSSSSSSSSnSOSSnR |
| | SfU*SfC*SfU*Sb001A*SIn001SmUfC*SmG* | | | | |
| | SmAn001RmU | | | | |
| WV- | mCn001RmC*SmC*SfA*SfG*SfCfA*SfG*SfC*SfU* | 464 | CCCAGCAGCUUCAGUC | 199 | nRSSSSOSSSSnRSSnRS |
| 44187 | SfUn001RfC*SfA*SfGn001RfU*SfC*SfC*SfC*SfU*SfU* | | CCUUUCUAIUCGAU | | SSSSSSSSSnSOSSnR |
| | SfU*SfC*SfU*Sb001A*SIn001SmUfC*SmG* | | | | |
| | SmAn001RmU | | | | |
| WV- | mCn001RmC*SmC*SfA*SfG*SfCfA*SfG*SfC*SfU* | 465 | CCCAGCAGCUUCAGUC | 199 | nRSSSSOSSSSnRSSnRS |
| 44186 | SfUn001RfC*SfA*SfGn001RfU*SfC*SfC*SfC*SfU* | | CCUUUCUAIUCGAU | | SSSSSSSSSnSSSSnR |
| | SfU*SfU*SfC*SfU*Sb001A*SIn001SmU*SfC*SmG* | | | | |
| | SmAn001RmU | | | | |
| WV- | mCn001RmC*SmC*SfA*SfG*SfCfA*SfG*SfC*SfU* | 466 | CCCAGCAGCUUCAGUC | 199 | nRSSSSOSSSSnRSnROS |
| 44184 | SfUn001RfC*SfAn001RfGfU*SfC*SfC*SfC*SfU*SfU* | | CCUUUCUAIUCGAU | | SSSSSSSSSnSOSSnR |
| | SfU*SfC*SfU*Sb001A*SIn001SmUfC*SmG* | | | | |
| | SmAn001RmU | | | | |
| WV- | mCn001RmC*SmC*SfA*SfG*SfCfA*SfG*SfC*SfU* | 467 | CCCAGCAGCUUCAGUC | 199 | nRSSSSOSSSSnRSnRSS |
| 44183 | SfUn001RfC*SfAn001RfG*SfU*SfC*SfC*SfC*SfU* | | CCUUUCUAIUCGAU | | SSSSSSSSSnSOSSnR |
| | SfU*SfU*SfC*SfU*Sb001A*SIn001SmUfC*SmG* | | | | |
| | SmAn001RmU | | | | |
| WV- | mCn001RmC*SmC*SfA*SfG*SfCfA*SfG*SfC*SfU* | 468 | CCCAGCAGCUUCAGUC | 199 | nRSSSSOSSSSnRSnRSS |
| 44182 | SfUn001RfC*SfAn001RfG*SfU*SfC*SfC*SfC*SfU* | | CCUUUCUAIUCGAU | | SSSSSSSSSnSSSSnR |
| | SfU*SfU*SfC*SfU*Sb001A*SIn001SmU*SfC*SmG* | | | | |
| | SmAn001RmU | | | | |
| WV- | mCn001RmC*SmC*SfA*SfG*SfC*SfA*SfG*SfC*SfU* | 234 | CCCAGCAGCUUCAGUC | 199 | nRSSSSSSSSSSSSSSSSS |
| 43114 | SfU*SfC*SfA*SfG*SfU*SfC*SfC*SfC*SfU*SfU*SfU* | | CCUUUCUAIUCGAU | | SSSSSSnSSSSnR |
| | SfC*SfU*Sb001A*SIn001SmU*SfC*SmG* | | | | |
| | SmAn001RmU | | | | |
| WV- | mCn001RmC*SmC*SfA*SfG*SfC*RfA*SfG*SfC*SfU* | 469 | CCCAGCAGCUUCAGUC | 199 | nRSSSSRSSSSnRSSnRS |
| 44224 | SfUn001RfC*SfA*SfGn001RfU*SfC*SfC*RfC*SfU* | | CCUUUCUAIUCGAU | | SRSSSSSSSnSSSSnR |
| | SfU*SfU*SfC*SfU*Sb001A*SIn001SmU*SfC*SmG* | | | | |
| | SmAn001RmU | | | | |
| WV- | mCn001RmC*SmC*SfA*SfG*SfC*RfA*SfG*SfC*SfU* | 470 | CCCAGCAGCUUCAGUC | 199 | nRSSSSRSSSSnRSSnRS |
| 44223 | SfUn001RfC*SfA*SfGn001RfU*SfC*SfC*SfC*SfU* | | CCUUUCUAIUCGAU | | SSSSSSSSSnSRSSnR |
| | SfU*SfU*SfC*SfU*Sb001A*SIn001SmU*RfC*SmG* | | | | |
| | SmAn001RmU | | | | |
| WV- | mCn001RmC*SmC*SfA*SfG*SfC*SfA*SfG*SfC*SfU* | 471 | CCCAGCAGCUUCAGUC | 199 | nRSSSSSSSSSnRSSnRSS |
| 44222 | SfUn001RfC*SfA*SfGn001RfU*SfC*SfC*SfC*SfU* | | CCUUUCUAIUCGAU | | SSSSSSSSnSRSSnR |
| | SfU*SfU*SfC*SfU*Sb001A*SIn001SmU*RfC*SmG* | | | | |
| | SmAn001RmU | | | | |
| WV- | mCn001RmC*SmC*SfA*SfG*SfC*RfA*SfG*SfC*SfU* | 472 | CCCAGCAGCUUCAGUC | 199 | nRSSSSRSSSSnRSnRSS |
| 44219 | SfUn001RfC*SfAn001RfG*SfU*SfC*SfC*SfC*SfU* | | CCUUUCUAIUCGAU | | SSSSSSSSSnSRSSnR |
| | SfU*SfU*SfC*SfU*Sb001A*SIn001SmU*RfC*SmG* | | | | |
| | SmAn001RmU | | | | |
| WV- | mCn001RmC*SmC*SfA*SfG*SfC*SfA*SfG*SfC*SfU* | 473 | CCCAGCAGCUUCAGUC | 199 | nRSSSSSSSSSnRSnRSSS |
| 44218 | SfUn001RfC*SfAn001RfG*SfU*SfC*SfC*SfC*SfU* | | CCUUUCUAIUCGAU | | SSSSSSSSnSRSSnR |
| | SfU*SfU*SfC*SfU*Sb001A*SIn001SmU*RfC*SmG* | | | | |
| | SmAn001RmU | | | | |
| WV- | mCn001RmC*SmC*SfA*SfG*SfC*RfA*SfG*SfC*SfU* | 474 | CCCAGCAGCUUCAGUC | 199 | nRSSSSRSSSSnRSnRSS |
| 44217 | SfUn001RfC*SfAn001RfG*SfU*SfC*SfC*SfC*SfU* | | CCUUUCUAIUCGAU | | SSSSSSSSSnSSSSnR |
| | SfU*SfU*SfC*SfU*Sb001A*SIn001SmU*SfC*SmG* | | | | |
| | SmAn001RmU | | | | |
| WV- | mCn001RmC*SmC*SfA*SfG*SfC*RfA*SfG*SfC*SfU* | 475 | CCCAGCAGCUUCAGUC | 199 | nRSSSSRSSSSSSSSSSR |
| 44216 | SfU*SfC*SfA*SfG*SfU*SfC*SfC*RfC*SfU*SfU*SfU* | | CCUUUCUAIUCGAU | | SSSSSSSnSSSSnR |
| | SfC*SfU*Sb001A*SIn001SmU*SfC*SmG* | | | | |
| | SmAn001RmU | | | | |
| WV- | mCn001RmC*SmC*SfA*SfG*SfC*RfA*SfG*SfC*SfU* | 476 | CCCAGCAGCUUCAGUC | 199 | nRSSSSRSSSSSSSSSSSS |
| 44215 | SfU*SfC*SfA*SfG*SfU*SfC*SfC*SfC*SfU*SfU*SfU* | | CCUUUCUAIUCGAU | | SSSSSSnSRSSnR |
| | SfC*SfU*Sb001A*SIn001SmU*RfC*SmG* | | | | |
| | SmAn001RmU | | | | |
| WV- | mCn001RmC*SmC*SfA*SfG*SfC*SfA*SfG*SfC*SfU* | 477 | CCCAGCAGCUUCAGUC | 199 | nRSSSSSSSSSSSSSSSSS |
| 44214 | SfU*SfC*SfA*SfG*SfU*SfC*SfC*SfC*SfU*SfU*SfU* | | CCUUUCUAIUCGAU | | SSSSSSnSRSSnR |
| | SfC*SfU*Sb001A*SIn001SmU*RfC*SmG* | | | | |
| | SmAn001RmU | | | | |
| WV- | mCn001RmC*SmC*SfA*SfG*SfC*RfA*SfG*SfC*SfU* | 478 | CCCAGCAGCUUCAGUC | 199 | nRSSSSRSSSSSSSSSSSS |
| 44213 | SfU*SfC*SfA*SfG*SfU*SfC*SfC*SfC*SfU*SfU*SfU* | | CCUUUCUAIUCGAU | | SSSSSSnSSSSnR |
| | SfC*SfU*Sb001A*SIn001SmU*SfC*SmG* | | | | |
| | SmAn001RmU | | | | |
| WV- | mCn001RmC*SmC*SfA*SfG*SfC*SfA*SfG*SfC*SfU* | 479 | CCCAGCAGCUUCAGUC | 199 | nRSSSSSSSSSSSSSSSSS |
| 44199 | SfU*SfC*SfA*SfG*SfU*SfC*SfC*SfC*SfU*SfU*SfU* | | CCUUUCUAIUCGAU | | SSSSSSRSSSnR |
| | SfC*SfU*Sb001A*SI*RmU*SfC*SmG* | | | | |
| | SmAn001RmU | | | | |
| WV- | mCn001RmC*SmC*SfA*SfG*SfC*SfA*SfG*SfC*SfU* | 234 | CCCAGCAGCUUCAGUC | 199 | nRSSSSSSSSSSSSSSSSS |
| 43114 | SfU*SfC*SfA*SfG*SfU*SfC*SfC*SfC*SfU*SfU*SfU* | | CCUUUCUAIUCGAU | | SSSSSSnSSSSnR |
| | SfC*SfU*Sb001A*SIn001SmU*SfC*SmG* | | | | |
| | SmAn001RmU | | | | |
| WV- | mCn001RmC*SmC*SfA*SfG*SfC*SfA*SfG*SfC*SfU* | 480 | CCCAGCAGCUUCAGUC | 199 | nRSSSSSSSSSSSSSSSSS |
| 44200 | SfU*SfC*SfA*SfG*SfU*SfC*SfC*SfC*SfU*SfU*SfU* | | CCUUUCUAIUCGAU | | SSSSSSnSSSSS |
| | SfC*SfU*Sb001A*SIn001SmU*SfC*SmG*SmA*SmU | | | | |
| WV- | mC*SmC*SmC*SfA*SfG*SfC*SfA*SfG*SfC*SfU*SfU* | 481 | CCCAGCAGCUUCAGUC | 199 | SSSSSSSSSSSSSSSSSSS |
| 44198 | SfC*SfA*SfG*SfU*SfC*SfC*SfC*SfU*SfU*SfU*SfC* | | CCUUUCUAIUCGAU | | SSSSSnSSSSnR |
| | SfU*Sb001A*SIn001SmU*SfC*SmG* | | | | |
| | SmAn001RmU | | | | |
| WV- | mCn001RmC*SmC*SmA*SmG*SfC*SfA*SfG*SfC* | 482 | CCCAGCAGCUUCAGUC | 199 | nRSSSSSSSSSSSSSSSSS |
| 44203 | SfU*SfU*SfC*SfA*SfG*SfU*SfC*SfC*SfC*SfU*SfU* | | CCUUUCUAIUCGAU | | SSSSSSnSSSSnR |
| | SfU*SfC*SfU*Sb001A*SIn001SmU*SfC*SmG* | | | | |
| | SmAn001RmU | | | | |
| WV- | mCn001RmC*SmC*SmA*SfG*SfC*SfA*SfG*SfC*SfU* | 483 | CCCAGCAGCUUCAGUC | 199 | nRSSSSSSSSSSSSSSSSS |
| 44202 | SfU*SfC*SfA*SfG*SfU*SfC*SfC*SfC*SfU*SfU*SfU* | | CCUUUCUAIUCGAU | | SSSSSSnSSSSnR |
| | SfC*SfU*Sb001A*SIn001SmU*SfC*SmG* | | | | |
| | SmAn001RmU | | | | |
| WV- | mCn001RmC*SfC*SfA*SfG*SfC*SfA*SfG*SfC*SfU* | 484 | CCCAGCAGCUUCAGUC | 199 | nRSSSSSSSSSSSSSSSSS |
| 44201 | SfU*SfC*SfA*SfG*SfU*SfC*SfC*SfC*SfU*SfU*SfU* | | CCUUUCUAIUCGAU | | SSSSSSnSSSSnR |
| | SfC*SfU*Sb001A*SIn001SmU*SfC*SmG* | | | | |
| | SmAn001RmU | | | | |
| WV- | mCn001RfC*SfC*SfA*SfG*SfC*SfA*SfG*SfC*SfU* | 485 | CCCAGCAGCUUCAGUC | 199 | nRSSSSSSSSSSSSSSSSS |
| 44225 | SfU*SfC*SfA*SfG*SfU*SfC*SfC*SfC*SfU*SfU*SfU* | | CCUUUCUAIUCGAU | | SSSSSSnSSSSnR |
| | SfC*SfU*Sb001A*SIn001SmU*SfC*SmG* | | | | |
| | SmAn001RmU | | | | |
| WV- | mCn001RmC*SmC*SfA*SfG*SfC*SfA*SfG*SfC*SfU* | 234 | CCCAGCAGCUUCAGUC | 199 | nRSSSSSSSSSSSSSSSSS |
| 43114 | SfU*SfC*SfA*SfG*SfU*SfC*SfC*SfC*SfU*SfU*SfU* | | CCUUUCUAIUCGAU | | SSSSSSnSSSSnR |
| | SfC*SfU*Sb001A*SIn001SmU*SfC*SmG* | | | | |
| | SmAn001RmU | | | | |
| WV- | Cn001RC*SC*SfA*SfG*SfC*SfA*SfG*SfC*SfU*SfU* | 486 | CCCAGCAGCUUCAGUC | 199 | nRSSSSSSSSSSSSSSSSS |
| 44268 | SfC*SfA*SfG*SfU*SfC*SfC*SfC*SfU*SfU*SfU*SfC* | | CCUUUCUAIUCGAU | | SSSSSSnSSSSnR |
| | SfU*Sb001A*SIn001SmU*SfC*SmG*SmAn001RmU | | | | |
| WV- | mCn001RmC*SC*SfA*SfG*SfC*SfA*SfG*SfC*SfU* | 487 | CCCAGCAGCUUCAGUC | 199 | nRSSSSSSSSSSSSSSSSS |
| 44267 | SfU*SfC*SfA*SfG*SfU*SfC*SfC*SfC*SfU*SfU*SfU* | | CCUUUCUAIUCGAU | | SSSSSSnSSSSnR |
| | SfC*SfU*Sb001A*SIn001SmU*SfC*SmG* | | | | |
| | SmAn001RmU | | | | |
| WV- | mCn001RC*SmC*SfA*SfG*SfC*SfA*SfG*SfC*SfU* | 488 | CCCAGCAGCUUCAGUC | 199 | nRSSSSSSSSSSSSSSSSS |
| 44266 | SfU*SfC*SfA*SfG*SfU*SfC*SfC*SfC*SfU*SfU*SfU* | | CCUUUCUAIUCGAU | | SSSSSSnSSSSnR |
| | SfC*SfU*Sb001A*SIn001SmU*SfC*SmG* | | | | |
| | SmAn001RmU | | | | |
| WV- | Cn001RmC*SmC*SfA*SfG*SfC*SfA*SfG*SfC*SfU* | 489 | CCCAGCAGCUUCAGUC | 199 | nRSSSSSSSSSSSSSSSSS |
| 44265 | SfU*SfC*SfA*SfG*SfU*SfC*SfC*SfC*SfU*SfU*SfU* | | CCUUUCUAIUCGAU | | SSSSSSnSSSSnR |
| | SfC*SfU*Sb001A*SIn001SmU*SfC*SmG* | | | | |
| | SmAn001RmU | | | | |
| WV- | m5Ceon001Rm5Ceo*Sm5Ceo*SfA*SfG*SfC*SfA*SfG* | 490 | CCCAGCAGCUUCAGUC | 199 | nRSSSSSSSSSSSSSSSSS |
| 44264 | SfC*SfU*SfU*SfC*SfA*SfG*SfU*SfC*SfC*SfC*SfU* | | CCUUUCUAIUCGAU | | SSSSSSnSSSSnR |
| | SfU*SfU*SfC*SfU*Sb001A*SIn001SmU*SfC*SmG* | | | | |
| | SmAn001RmU | | | | |
| WV- | mCn001RmC*SmC*SfA*SfG*SfC*SfA*SfG*SfC*SfU* | 234 | CCCAGCAGCUUCAGUC | 199 | nRSSSSSSSSSSSSSSSSS |
| 43114 | SfU*SfC*SfA*SfG*SfU*SfC*SfC*SfC*SfU*SfU*SfU* | | CCUUUCUAIUCGAU | | SSSSSSnSSSSnR |
| | SfC*SfU*Sb001A*SIn001SmU*SfC*SmG* | | | | |
| | SmAn001RmU | | | | |
| WV- | mCn001RmC*SmC*SfA*SfG*SfCfA*SfG*SfC*SfU* | 491 | CCCAGCAGCUUCAGUC | 115 | nRSSSSOSSSSnRSOnRS |
| 44179 | SfUn001RfC*SfAfGn001RfU*SfC*SfC*SfC*SfU*SfU* | | CCUUUCUCIUCGAU | | SSSSSSSSXnSOSSnR |
| | SfU*SfC*SfU*SCsm15*In001SmUfC*SmG* | | | | |
| | SmAn001RmU | | | | |
| WV- | mCn001RmC*SmC*SfA*SfG*SfCfA*SfG*SfC*SfU* | 492 | CCCAGCAGCUUCAGUC | 199 | nRSSSSOSSSSnRSOnRS |
| 44178 | SfUn001RfC*SfAfGn001RfU*SfC*SfC*SfC*SfU*SfU* | | CCUUUCUAIUCGAU | | SSSSSSSSSnSOSSnR |
| | SfU*SfC*SfU*Sb001rA*SIn001SmUfC*SmG* | | | | |
| | SmAn001RmU | | | | |
| WV- | mCn001RmC*SmC*SfA*SfG*SfCfA*SfG*SfC*SfU* | 493 | CCCAGCAGCUUCAGUC | 199 | nRSSSSOSSSSnRSOnRS |
| 44188 | SfUn001RfC*SfAfGn001RfU*SfC*SfC*SfC*SfU*SfU* | | CCUUUCUAIUCGAU | | SSSSSSSSSnSOSSnR |
| | SfU*SfC*SfU*Sb001A*SIn001SmUfC*SmG* | | | | |
| | SmAn001RmU | | | | |
| WV- | mCn001RmC*SmC*SfA*SfG*SfC*SfA*SfG*SfC*SfU* | 494 | CCCAGCAGCUUCAGUC | 199 | nRSSSSSSSSSnRSSnRSS |
| 44210 | SfUn001RfC*SfA*SfGn001RfU*SfC*SfC*SfC*SfU* | | CCUUUCUAIUCGAU | | SSSSSSSSnSSSSnR |
| | SfU*SfU*SfC*SfU*Sb001rA*SIn001SmU*SfC*SmG* | | | | |
| | SmAn001RmU | | | | |
| WV- | mCn001RmC*SmC*SfA*SfG*SfC*SfA*SfG*SfC*SfU* | 495 | CCCAGCAGCUUCAGUC | 199 | nRSSSSSSSSSnRSSnRSS |
| 44185 | SfUn001RfC*SfA*SfGn001RfU*SfC*SfC*SfC*SfU* | | CCUUUCUAIUCGAU | | SSSSSSSSnSSSSnR |
| | SfU*SfU*SfC*SfU*Sb001A*SIn001SmU*SfC*SmG* | | | | |
| | SmAn001RmU | | | | |
| WV- | mCn001RmC*SmC*SfA*SfG*SfC*SfA*SfG*SfC*SfU* | 496 | CCCAGCAGCUUCAGUC | 199 | nRSSSSSSSSSSSSSSSSS |
| 44175 | SfU*SfC*SfA*SfG*SfU*SfC*SfC*SfC*SfU*SfU*SfU* | | CCUUUCUAIUCGAU | | SSSSSSnSSSSnR |
| | SfC*SfU*Sb001rA*SIn001SmU*SfC*SmG* | | | | |
| | SmAn001RmU | | | | |
| WV- | mCn001RmC*SmC*SfA*SfG*SfC*SfA*SfG*SfC*SfU* | 234 | CCCAGCAGCUUCAGUC | 199 | nRSSSSSSSSSSSSSSSSS |
| 43114 | SfU*SfC*SfA*SfG*SfU*SfC*SfC*SfC*SfU*SfU*SfU* | | CCUUUCUAIUCGAU | | SSSSSSnSSSSnR |
| | SfC*SfU*Sb001A*SIn001SmU*SfC*SmG* | | | | |
| | SmAn001RmU | | | | |
| WV- | mCn001RmC*SmC*SfA*SfG*SfC*SfA*SfG*SfC*SfU* | 497 | CCCAGCAGCUUUAGUC | 498 | nRSSSSSSSSSSSSSSSSS |
| 44209 | SfU*SfU*SfA*SfG*SfU*SfC*SfC*SfC*SfU*SfU*SfU* | | CCUUUCUAIUCGAU | | SSSSSSnSSSSnR |
| | SfC*SfU*Sb001A*SIn001SmU*SfC*SmG* | | | | |
| | SmAn001RmU | | | | |
| WV- | mCn001RmC*SmC*SfA*SfG*SfC*SfA*SfG*SfU*SfU* | 499 | CCCAGCAGUUUCAGUC | 500 | nRSSSSSSSSSSSSSSSSS |
| 44208 | SfU*SfC*SfA*SfG*SfU*SfC*SfC*SfC*SfU*SfU*SfU* | | CCUUUCUAIUCGAU | | SSSSSSnSSSSnR |
| | SfC*SfU*Sb001A*SIn001SmU*SfC*SmG* | | | | |
| | SmAn001RmU | | | | |
| WV- | mCn001RmC*SmC*SfA*SfG*SfU*SfA*SfG*SfC*SfU* | 501 | CCCAGUAGCUUCAGUC | 502 | nRSSSSSSSSSSSSSSSSS |
| 44207 | SfU*SfC*SfA*SfG*SfU*SfC*SfC*SfC*SfU*SfU*SfU* | | CCUUUCUAIUCGAU | | SSSSSSSSSSnR |
| | SfC*SfU*Sb001A*SIn001SmU*SfC*SmG* | | | | |
| | SmAn001RmU | | | | |
| WV- | mCn001RmC*SmU*SfA*SfG*SfC*SfA*SfG*SfC*SfU* | 503 | CCUAGCAGCUUCAGUC | 504 | nRSSSSSSSSSSSSSSSSS |
| 44206 | SfU*SfC*SfA*SfG*SfU*SfC*SfC*SfC*SfU*SfU*SfU* | | CCUUUCUAIUCGAU | | SSSSSSnSSSSnR |
| | SfC*SfU*Sb001A*SIn001SmU*SfC*SmG* | | | | |
| | SmAn001RmU | | | | |
| WV- | mCn001RmU*SmC*SfA*SfG*SfC*SfA*SfG*SfC*SfU* | 505 | CUCAGCAGCUUCAGUC | 506 | nRSSSSSSSSSSSSSSSSS |
| 44205 | SfU*SfC*SfA*SfG*SfU*SfC*SfC*SfC*SfU*SfU*SfU* | | CCUUUCUAIUCGAU | | SSSSSSnSSSSnR |
| | SfC*SfU*Sb001A*SIn001SmU*SfC*SmG* | | | | |
| | SmAn001RmU | | | | |
| WV- | mUn001RmC*SmC*SfA*SfG*SfC*SfA*SfG*SfC*SfU* | 507 | UCCAGCAGCUUCAGUC | 508 | nRSSSSSSSSSSSSSSSSS |
| 44204 | SfU*SfC*SfA*SfG*SfU*SfC*SfC*SfC*SfU*SfU*SfU* | | CCUUUCUAIUCGAU | | SSSSSSnSSSSnR |
| | SfC*SfU*Sb001A*SIn001SmU*SfC*SmG*SteoRmU | | | | |
| WV- | mCn001RmC*SmC*SfA*SfG*SfC*SfA*SfG*SfC*SfU* | 234 | CCCAGCAGCUUCAGUC | 199 | nRSSSSSSSSSSSSSSSSS |
| 43114 | SfU*SfC*SfA*SfG*SfU*SfC*SfC*SfC*SfU*SfU*SfU* | | CCUUUCUAIUCGAU | | SSSSSSSSSSnR |
| | SfC*SfU*Sb001A*SIn001SmU*SfC*SmG* | | | | |
| | SmAn001RmU | | | | |
| WV- | Mod001L001mCn001RmC*SmC*SfA*SfG*SmCfA*SfG* | 509 | CCCAGCAGCUUCAGUC | 199 | OnRSSSSOSSSSnRSOnR |
| 44464 | SfC*SfU*SfUn001RfC*SfAfGn001RfU*SfC*SfC*SfC* | | CCUUUCUAIUCGAU | | SSSSSOSSSSnSOSSnR |
| | SfU*SmUfU*SfC*SfU*Sb001A*SIn001SmUfC*SmG* | | | | |
| | SmAn001RmU | | | | |
| WV- | Mod001L001mCn001RmC*SmC*SfA*SfG*SfCmA*SfG* | 510 | CCCAGCAGCUUCAGUC | 199 | OnRSSSSOSSOSnROSn |
| 44465 | SfCmU*SfUn001RmCfA*SfGn001RfUmC*SfC*SfC* | | CCUUUCUAIUCGAU | | ROSSSnRSOSSSnSOSSn |
| | SfUn001RfU*SmUfC*SfU*Sb001A*SIn001SmUfC* | | | | R |
| | SmG*SmAn001RmU | | | | |

TABLE 1E
Example oligonucleotides and/or compositions that target SERPINA1.

| | | SEQ | | SEQ | |
|---|---|---|---|---|---|
| | | ID | | ID | |
| ID | Description | NO | Base Sequence | NO | Stereochemistry/ Linkage |
| WV- | fCn001RfC*SfC*SfA*SfG*SfC*SfA*SfG*SfC*SfU* | 198 | CCCAGCAGCUUCAGUC | 199 | nRSSSSSSSSSSSSSSSSS |
| 42680 | SfU*SfC*SfA*SfG*SfU*SmC*SmC*SmC*SmU*SmU* | | CCUUUCUAIUCGAU | | SSSSSSnSSSSnR |
| | SmU*SmC*SfU*Sb001A*SIn001SmU*SmC*SmG* | | | | |
| | SmAn001RmU | | | | |
| WV- | fCn001RfC*SfC*SfA*SfG*SfC*SfA*SfG*SfC*SfU* | 511 | CCCAGCAGCUUCAGUC | 512 | nRSSSSSSSSSSSSSSSSS |
| 44285 | SfU*SfC*SfA*SfG*SfU*SmC*SmC*SmC*SmU*SmU* | | CCUUUCTAIUCGAU | | SSSSnXSnSSSSnR |
| | SmU*SmC*STsm01n001b001A*SIn001SmU*SmC*SmG* | | | | |
| | SmAn001RmU | | | | |
| WV- | fCn001RfC*SfC*SfA*SfG*SfC*SfA*SfG*SfC*SfU* | 513 | CCCAGCAGCUUCAGUC | 402 | nRSSSSSSSSSSSSSSSSS |
| 44286 | SfU*SfC*SfA*SfG*SfU*SmC*SmC*SmC*SmU*SmU* | | CCUUUCUAGUCGAU | | SSSSSSnXSSSnR |
| | SmU*SmC*SfU*Sb001A*SGsm01n001mU*SmC*SmG* | | | | |
| | SmAn001RmU | | | | |
| WV- | fCn001RfC*SfC*SfA*SfG*SfC*SfA*SfG*SfC*SfU* | 514 | CCCAGCAGCUUCAGUC | 512 | nRSSSSSSSSSSSSSSSSS |
| 44287 | SfU*SfC*SfA*SfG*SfU*SmC*SmC*SmC*SmU*SmU* | | CCUUUCTAIUCGAU | | SSSSOSnSSSSnR |
| | SmU*SmC*STsm01n013b001A*SIn001SmU*SmC*SmG* | | | | |
| | SmAn001RmU | | | | |
| WV- | fCn001RfC*SfC*SfA*SfG*SfC*SfA*SfG*SfC*SfU* | 515 | CCCAGCAGCUUCAGUC | 402 | nRSSSSSSSSSSSSSSSSS |
| 44288 | SfU*SfC*SfA*SfG*SfU*SmC*SmC*SmC*SmU*SmU* | | CCUUUCUAGUCGAU | | SSSSSSOSSSnR |
| | SmU*SmC*SfU*Sb001A*SGsm01n013mU*SmC*SmG* | | | | |
| | SmAn001RmU | | | | |
| WV- | fCn001RfC*SfC*SfA*SfG*SfC*SfA*SfG*SfC*SfU* | 516 | CCCAGCAGCUUCAGUC | 512 | nRSSSSSSSSSSSSSSSSS |
| 44327 | SfU*SfC*SfA*SfG*SfU*SmC*SmC*SmC*SmU*SmU* | | CCUUUCTAIUCGAU | | SSSSnXSnSSSSnR |
| | SmU*SmC*STsm18n001b001A*SIn001SmU*SmC*SmG* | | | | |
| | SmAn001RmU | | | | |
| WV- | fCn001RfC*SfC*SfA*SfG*SfC*SfA*SfG*SfC*SfU* | 163 | CCCAGCAGCUUCAGUC | 115 | nRSSSSSSSSSSSSSSSSS |
| 42028 | SfU*SfC*SfA*SfG*SfU*SmC*SmC*SmC*SmU*SmU* | | CCUUUCUCIUCGAU | | SSSSSSnSSSSnR |
| | SmU*SmC*SfU*SC*SIn001SmU*SmC*SmG* | | | | |
| | SmAn001RmU | | | | |
| WV- | fCn001RfC*SfC*SfA*SfG*SfC*SfA*SfG*SfC*SfU* | 517 | CCCAGCAGCUUCAGUC | 518 | nRSSSSSSSSSSSSSSSSS |
| 44278 | SfU*SfC*SfA*SfG*SfU*SmC*SmC*SmC*SmU*SmU* | | CCUUUCTCIUCGAU | | SSSSnXSnSSSSnR |
| | SmU*SmC*STsm01n001C*SIn001SmU*SmC*SmG* | | | | |
| | SmAn001RmU | | | | |
| WV- | fCn001RfC*SfC*SfA*SfG*SfC*SfA*SfG*SfC*SfU* | 519 | CCCAGCAGCUUCAGUC | 115 | nRSSSSSSSSSSSSSSSSS |
| 44279 | SfU*SfC*SfA*SfG*SfU*SmC*SmC*SmC*SmU*SmU* | | CCUUUCUCIUCGAU | | SSSSSnXnSSSSnR |
| | SmU*SmC*SfU*SCsm01n001In001SmU*SmC*SmG*S | | | | |
| | mAn001RmU | | | | |
| WV- | fCn001RfC*SfC*SfA*SfG*SfC*SfA*SfG*SfC*SfU* | 520 | CCCAGCAGCUUCAGUC | 52 | nRSSSSSSSSSSSSSSSSS |
| 44280 | SfU*SfC*SfA*SfG*SfU*SmC*SmC*SmC*SmU*SmU* | | CCUUUCUTIUCGAU | | SSSSSnXnSSSSnR |
| | SmU*SmC*SfU*STsm01n001In001SmU*SmC*SmG* | | | | |
| | SmAn001RmU | | | | |
| WV- | fCn001RfC*SfC*SfA*SfG*SfC*SfA*SfG*SfC*SfU* | 522 | CCCAGCAGCUUCAGUC | 523 | nRSSSSSSSSSSSSSSSSS |
| 44281 | SfU*SfC*SfA*SfG*SfU*SmC*SmC*SmC*SmU*SmU* | | CCUUUCUCGUCGAU | | SSSSSSnXSSSnR |
| | SmU*SmC*SfU*SC*SGsm01n001mU*SmC*SmG* | | | | |
| | SmAn001RmU | | | | |
| WV- | fCn001RfC*SfC*SfA*SfG*SfC*SfA*SfG*SfC*SfU* | 524 | CCCAGCAGCUUCAGUC | 518 | nRSSSSSSSSSSSSSSSSS |
| 44282 | SfU*SfC*SfA*SfG*SfU*SmC*SmC*SmC*SmU*SmU* | | CCUUUCTCIUCGAU | | SSSSOSnSSSSnR |
| | SmU*SmC*STsm01n013C*SIn001SmU*SmC*SmG* | | | | |
| | SmAn001RmU | | | | |
| WV- | fCn001RfC*SfC*SfA*SfG*SfC*SfA*SfG*SfC*SfU* | 525 | CCCAGCAGCUUCAGUC | 115 | nRSSSSSSSSSSSSSSSSS |
| 44283 | SfU*SfC*SfA*SfG*SfU*SmC*SmC*SmC*SmU*SmU* | | CCUUUCUCIUCGAU | | SSSSSOnSSSSnR |
| | SmU*SmC*SfU*SCsm01n013In001SmU*SmC*SmG* | | | | |
| | SmAn001RmU | | | | |
| WV- | fCn001RfC*SfC*SfA*SfG*SfC*SfA*SfG*SfC*SfU* | 526 | CCCAGCAGCUUCAGUC | 523 | nRSSSSSSSSSSSSSSSSS |
| 44284 | SfU*SfC*SfA*SfG*SfU*SmC*SmC*SmC*SmU*SmU* | | CCUUUCUCGUCGAU | | SSSSSSOSSSnR |
| | SmU*SmC*SfU*SC*SGsm01n013mU*SmC*SmG* | | | | |
| | SmAn001RmU | | | | |
| WV- | fCn001RfC*SfC*SfA*SfG*SfC*SfA*SfG*SfC*SfU* | 527 | CCCAGCAGCUUCAGUC | 518 | nRSSSSSSSSSSSSSSSSS |
| 44328 | SfU*SfC*SfA*SfG*SfU*SmC*SmC*SmC*SmU*SmU* | | CCUUUCTCIUCGAU | | SSSSnXSnSSSSnR |
| | SmU*SmC*STsm18n001C*SIn001SmU*SmC*SmG* | | | | |
| | SmAn001RmU | | | | |

TABLE 1F
Example oligonucleotides and/or compositions that target SERPINA1.

| | | SEQ | | SEQ | |
|---|---|---|---|---|---|
| | | ID | | ID | |
| ID | Description | NO | Base Sequence | NO | Stereochemistry/ Linkage |
| WV- | mCn001RmC*SmC*SfA*SfG*SfCmA*SfG*SfCmU* | 452 | CCCAGCAGCUUCAGUC | 199 | nRSSSSOSSOSnROSnR |
| 44275 | SfUn001RmCfA*SfGn001RfUmC*SfC*SfC* | | CCUUUCUAIUCGAU | | OSSSnRSOSSSnSOSSnR |
| | SfUn001RfU*SmUfC*SfU*Sb001A*SIn001SmUfC*SmG* | | | | |
| | SmAn001RmU | | | | |
| WV- | Mod001L001mCn001RmC*SmC*SfA*SfG*SmCfA* | 509 | CCCAGCAGCUUCAGUC | 199 | OnRSSSSOSSSSnRSOnR |
| 44464 | SfG*SfC*SfU*SfUn001RfC*SfAfGn001RfU*SfC*SfC* | | CCUUUCUAIUCGAU | | SSSSSOSSSSnSOSSnR |
| | SfC*SfU*SmUfU*SfC*SfU*Sb001A*SIn001SmUfC* | | | | |
| | SmG*SmAn001RmU | | | | |
| WV- | L001mCn001RmC*SmC*SfA*SfG*SmCfA*SfG*SfC* | 528 | CCCAGCAGCUUCAGUC | 199 | OnRSSSSOSSSSnRSOnR |
| 44466 | SfU*SfUn001RfC*SfAfGn001RfU*SfC*SfC*SfC*SfU* | | CCUUUCUAIUCGAU | | SSSSSOSSSSnSOSSnR |
| | SmUfU*SfC*SfU*Sb001A*SIn001SmUfC*SmG* | | | | |
| | SmAn001RmU | | | | |
| WV- | mCn001RmC*SmC*SfA*SfG*SmCmA*SfG*SfCmU* | 529 | CCCAGCAGCUUCAGUC | 530 | nRSSSSOSSOSnROSnR |
| 44515 | SfUn001RmCfA*SfGn001RfUmC*SfC*SfC*SfU*SmUmUfC* | | CCUUUCTUIUCGAU | | OSSSSOOSSSnSOSSnR |
| | ST*Sb008U*SIn001SmUfC*SmG*SmAn001RmU | | | | |
| WV- | Mod001L001mCn001RmC*SmC*SfA*SfG*SmCmAfG* | 531 | CCCAGCAGCUUCAGUC | 530 | OnRSSSSOOSSOnROSn |
| 46313 | SfC*SmUfUn001RmCfA*SfGn001RfUmC*SfC*SfC* | | CCUUUCTUIUCGAU | | ROSSSnROOSSSnSOSSn |
| | SfUn001RmUmUfC*ST*Sb008U*SIn001SmUfC*SmG* | | | | R |
| | SmAn001RmU | | | | |
| WV- | Mod001L001mCn001RmC*SmC*SfA*SfG*SmCmA*SfG* | 532 | CCCAGCAGCUUCAGUC | 530 | OnRSSSSOSSOSnROSn |
| 46314 | SfCmU*SfUn001RmCfA*SfGn001RfUmC*SfC*SfC* | | CCUUUCTUIUCGAU | | ROSSSnRSOSSSnSOSSn |
| | SfUn001RmU*SmUfC*ST*Sb008U*SIn001SmUfC* | | | | R |
| | SmG*SmAn001RmU | | | | |
| WV- | Mod001L001mCn001RmC*SmC*SfA*SfG*SmCmAfG* | 533 | CCCAGCAGCUUCAGUC | 530 | OnRSSSSOOSSSnRSOn |
| 46315 | SfC*SfU*SfUn001RfC*SfAfGn001RfUmCmC*SfC*SfU* | | CCUUUCTUIUCGAU | | ROOSSSOSSSSnSOSSnR |
| | SmUmU*SfC*ST*Sb008U*SIn001SmUfC*SmG* | | | | |
| | SmAn001RmU | | | | |
| WV- | Mod001L001mCn001RmC*SmC*SfA*SfG*SmCmAfG* | | CCCAGCAGCUUCAGUC | 530 | OnRSSSSOOSSSnRSOn |
| 46316 | SfC*SfU*SfUn001RfC*SfAfGn001RfU*SfC*SfC*SfC* | | CCUUUCTUIUCGAU | | RSSSSSOSSSSnSOSSnR |
| | SfU*SmUmU*SfC*ST*Sb008U*SIn001SmUfC*SmG* | | | | |
| | SmAn001RmU | | | | |
| WV- | Mod001L001mCn001RmC*SmC*SfA*SfG*SmCmAfG* | 535 | CCCAGCAGCUUCAGUC | 530 | OnRSSSSOOSSSnROSn |
| 46317 | SfC*SmU*SfUn001RmCfA*SfGn001RfUmC*SfC*SfC* | | CCUUUCTUIUCGAU | | ROSSSnROOSSSnSOSSn |
| | SfUn001RmUmUfC*ST*Sb008U*SIn001SmUfC*SmG* | | | | R |
| | SmAn001RmU | | | | |
| WV- | Mod001L001mCn001RmC*SmC*SfA*SfG*SmCfA*SfG* | 509 | CCCAGCAGCUUCAGUC | 199 | OnRSSSSOSSSSnRSOnR |
| 44464 | SfC*SfU*SfUn001RfC*SfAfGn001RfU*SfC*SfC*SfC* | | CCUUUCUAIUCGAU | | SSSSSOSSSSnSOSSnR |
| | SfU*SmUfU*SfC*SfU*Sb001A*SIn001SmUfC*SmG* | | | | |
| | SmAn001RmU | | | | |
| WV- | mCn001RmC*SmC*SfA*SfG*SmCmAfG*SfCmU* | 536 | CCCAGCAGCUUCAGUC | 530 | nRSSSSOOSOSnROSnR |
| 46406 | SfUn001RmCfA*SfGn001RfUmC*SfC*SfC*SfU*SmUmUfC* | | CCUUUCTUIUCGAU | | OSSSSOOSSSnSOSSnR |
| | ST*Sb008U*SIn001SmUfC*SmG*SmAn001RmU | | | | |
| WV- | mCn001RmC*SmC*SfA*SfG*SmCmA*SfG*SfCmU* | 537 | CCCAGCAGCUUCAGUC | 530 | nRSSSSOSSOSnROSnR |
| 46407 | SfUn001RmCfA*SfGn001RfUmCmC*SfC*SfU*SmUmUfC* | | CCUUUCTUIUCGAU | | OOSSSOOSSSnSOSSnR |
| | ST*Sb008U*SIn001SmUfC*SmG*SmAn001RmU | | | | |
| WV- | mCn001RmC*SmC*SfA*SfG*SmCmAfG*SfCmU* | 538 | CCCAGCAGCUUCAGUC | 530 | nRSSSSOOSOSnROSnR |
| 46408 | SfUn001RmCfA*SfGn001RfUmCmC*SfC*SfU*SmUmUfC* | | CCUUUCTUIUCGAU | | OOSSSOOSSSnSOSSnR |
| | ST*Sb008U*SIn001SmUfC*SmG*SmAn001RmU | | | | |
| WV- | mCn001RmC*SmC*SfA*SfG*SmCmAfG*SmCmU* | 539 | CCCAGCAGCUUCAGUC | 530 | nRSSSSOOSOSnROSnR |
| 46409 | SfUn001RmCfA*SfGn001RfUmCmC*SfC*SfU*SmUmUfC* | | CCUUUCTUIUCGAU | | OOSSSOOSSSnSOSSnR |
| | ST*Sb008U*SIn001SmUfC*SmG*SmAn001RmU | | | | |
| WV- | mCn001RmC*SmC*SfA*SfG*SmCmAfG*SfCmU* | 540 | CCCAGCAGCUUCAGUC | 530 | nRSSSSOOSOSnROSnR |
| 46410 | SmUn001RmCfA*SfGn001RfUmCmC*SfC*SfU*SmUmUfC* | | CCUUUCTUIUCGAU | | OOSSSOOSSSnSOSSnR |
| | ST*Sb008U*SIn001SmUfC*SmG*SmAn001RmU | | | | |
| WV- | mCn001RmC*SmC*SfA*SfG*SmCmAfG*SfCmU* | 541 | CCCAGCAGCUUCAGUC | 530 | nRSSSSOOSOSnROSnR |
| 46411 | SfUn001RmCfA*SfGn001RmUmCmC*SfC*SfU*SmUmUfC* | | CCUUUCTUIUCGAU | | OOSSSOOSSSnSOSSnR |
| | ST*Sb008U*SIn001SmUfC*SmG*SmAn001RmU | | | | |
| WV- | mCn001RmC*SmC*SfA*SfG*SmCmAfG*SmCmU* | 542 | CCCAGCAGCUUCAGUC | 530 | nRSSSSOOSOSnROSnR |
| 46412 | SmUn001RmCfA*SfGn001RfUmCmC*SfC*SfU*SmUmUfC* | | CCUUUCTUIUCGAU | | OOSSSOOSSSnSOSSnR |
| | ST*Sb008U*SIn001SmUfC*SmG*SmAn001RmU | | | | |
| WV- | mCn001RmC*SmC*SfA*SfG*SmCmAfG*SmCmU* | 543 | CCCAGCAGCUUCAGUC | 530 | nRSSSSOOSOSnROSnR |
| 46413 | SfUn001RmCfA*SfGn001RmUmCmC*SfC*SfU*SmUmUfC* | | CCUUUCTUIUCGAU | | OOSSSOOSSSnSOSSnR |
| | ST*Sb008U*SIn001SmUfC*SmG*SmAn001RmU | | | | |
| WV- | mCn001RmC*SmC*SfA*SfG*SmCmAfG*SfCmU* | 544 | CCCAGCAGCUUCAGUC | 530 | nRSSSSOOSOSnROSnR |
| 46414 | SmUn001RmCfA*SfGn001RmUmCmC*SfC*SfU*SmUmUfC* | | CCUUUCTUIUCGAU | | OOSSSOOSSSnSOSSnR |
| | ST*Sb008U*SIn001SmUfC*SmG*SmAn001RmU | | | | |
| WV- | mCn001RmC*SmC*SfA*SfG*SmCmAfG*SmCmU* | 545 | CCCAGCAGCUUCAGUC | 530 | nRSSSSOOSOSnROSnR |
| 46415 | SmUn001RmCfA*SfGn001RmUmCmC*SfC*SfU*SmUmUfC* | | CCUUUCTUIUCGAU | | OOSSSOOSSSnSOSSnR |
| | ST*Sb008U*SIn001SmUfC*SmG*SmAn001RmU | | | | |
| WV- | mCn001RmC*SmC*SfA*SfG*SmCmA*SfG*SfCmU* | 546 | CCCAGCAGCUUCAGUC | 359 | nRSSSSOSSOSnROSnR |
| 46468 | SfUn001RmCfA*SfGn001RfUmC*SfC*SfC*SfU*SmUmUfC* | | CCUUUCUUIUCGAU | | OSSSSOOSSSnSOSSnR |
| | SfU*Sb008U*SIn001SrUfC*SmG*SmAn001RmU | | | | |
| WV- | mCn001RmC*SmC*SfA*SfG*SmCmAfG*SfC* | 547 | CCCAGCAGCUUCAGUC | 359 | nRSSSSOOSSOnROSnR |
| 46469 | SmUfUn001RmCfA*SfGn001RfUmC*SfC*SfC* | | CCUUUCUUIUCGAU | | OSSSnROOSSSnSOSSnR |
| | SfUn001RmUmUfC*SfU*Sb008U*SIn001SUsm15fC*SmG* | | | | |
| | 1SmAn00RmU | | | | |
| WV- | mCn001RmC*SmC*SfA*SfG*SmCmAfG*SfC* | 548 | CCCAGCAGCUUCAGUC | 359 | nRSSSSOOSSOnROSnR |
| 46470 | SmUfUn001RmCfA*SfGn001RfUmC*SfC*SfC* | | CCUUUCUUIUCGAU | | OSSSnROOSSSnSOSSnR |
| | SfUn001RmUmUfC*SfU*Sb008U*SIn001SrUfC*SmG* | | | | |
| | SmAn001RmU | | | | |
| WV- | Mod001L001mCn001RmC*SmC*SfA*SfG*SmCfA*SfG* | 509 | CCCAGCAGCUUCAGUC | 199 | OnRSSSSOSSSSnRSOnR |
| 44464 | SfC*SfU*SfUn001RfC*SfAfGn001RfU*SfC*SfC*SfC* | | CCUUUCUAIUCGAU | | SSSSSOSSSSnSOSSnR |
| | SfU*SmUfU*SfC*SfU*Sb001A*SIn001SmUfC*SmG* | | | | |
| | SmAn001RmU | | | | |
| WV- | mCn001RmC*SmC*SfA*SfG*SmCmAfG*SfC* | 549 | CCCAGCAGCUUCAGUC | 530 | nRSSSSOOSSOnROSnR |
| 44487 | SmUfUn001RmCfA*SfGn001RfUmC*SfC*SfC* | | CCUUUCTUIUCGAU | | OSSSnROOSSSnSOSSnR |
| | SfUn001RmUmUfC*ST*Sb008U*SIn001SmUfC*SmG* | | | | |
| | SmAn001RmU | | | | |
| WV- | mCn001RmC*SmC*SfA*SfG*SmCmA*SfG*SfCmU* | 550 | CCCAGCAGCUUCAGUC | 530 | nRSSSSOSSOSnROSnR |
| 44482 | SfUn001RmCfA*SfGn001RfUmC*SfC*SfC*SfUn001RmU* | | CCUUUCTUIUCGAU | | OSSSnRSOSSSnSOSSnR |
| | SmUfC*ST*Sb008U*SIn001SmUfC*SmG* | | | | |
| | SmAn001RmU | | | | |
| WV- | mCn001RmC*SmC*SfA*SfG*SmCmA*SfG*SfCmU* | 551 | CCCAGCAGCUUCAGUC | 530 | nRSSSSOSSOSnROSnR |
| 47029 | SmUn001RfCfA*SfGn001RfUmC*SfC*SfC*SfU*SmUmUfC* | | CCUUUCTUIUCGAU | | OSSSSOOSSSnSOSSnR |
| | ST*Sb008U*SIn001SmUfC*SmG*SmAn001RmU | | | | |
| WV- | mCn001RmC*SmC*SfA*SfG*SmCmAfG*SfC* | 552 | CCCAGCAGCUUCAGUC | 530 | nRSSSSOOSSOnROSnR |
| 47030 | SmUmUn001RfCfA*SfGn001RfUmC*SfC*SfC* | | CCUUUCTUIUCGAU | | OSSSnROOSSSnSOSSnR |
| | SfUn001RmUmUfC*ST*Sb008U*SIn001SmUfC*SmG* | | | | |
| | SmAn001RmU | | | | |
| WV- | mCn001RmC*SmC*SfA*SfG*SmCmA*SfG*SfCmU* | 553 | CCCAGCAGCUUCAGUC | 530 | nRSSSSOSSOSnROSnR |
| 47031 | SmUn001RfCfA*SfGn001RfUmC*SfC*SfC*SfUn001RmU* | | CCUUUCTUIUCGAU | | OSSSnRSOSSSnSOSSnR |
| | SmUfC*ST*Sb008U*SIn001SmUfC*SmG* | | | | |
| | SmAn001RmU | | | | |
| WV- | mCn001RmC*SmC*SfA*SfG*SmCmAfG*SfC* | 554 | CCCAGCAGCUUCAGUC | 530 | nRSSSSOOSSOnROSnR |
| 47032 | SmUfUn001RmCfA*SfGn001RfUmC*SfC*SfC* | | CCUUUCTUIUCGAU | | OSSSnROOSSSnSOSSnR |
| | SmUn001RfUmUfC*ST*Sb008U*SIn001SmUfC*SmG* | | | | |
| | SmAn001RmU | | | | |
| WV- | mCn001RmC*SmC*SfA*SfG*SmCmA*SfG*SfCmU* | 555 | CCCAGCAGCUUCAGUC | 530 | nRSSSSOSSOSnROSnR |
| 47033 | SfUn001RmCfA*SfGn001RfUmC*SfC*SfC*SmUn001RfU* | | CCUUUCTUIUCGAU | | OSSSnRSOSSSnSOSSnR |
| | SmUfC*ST*Sb008U*SIn001SmUfC*SmG* | | | | |
| | SmAn001RmU | | | | |
| WV- | mCn001RmC*SmC*SfA*SfG*SmCmAfG*SfC* | 556 | CCCAGCAGCUUCAGUC | 530 | nRSSSSOOSSOnROSnR |
| 47034 | USmUmn001RfCfA*SfGn001RfUmC*SfC*SfC* | | CCUUUCTUIUCGAU | | OSSSnROOSSSnSOSSnR |
| | SmUn001RfUmUfC*ST*Sb008U*SIn001SmUfC*SmG* | | | | |
| | SmAn001RmU | | | | |
| WV- | mCn001RmC*SmC*SfA*SfG*SmCmA*SfG*SfCmU* | 557 | CCCAGCAGCUUCAGUC | 530 | nRSSSSOSSOSnROSnR |
| 47035 | SmUn001RfCfA*SfGn001RfUmC*SfC*SfC*SmUn001RfU* | | CCUUUCTUIUCGAU | | OSSSnRSOSSSnSOSSnR |
| | SmUfC*ST*Sb008U*SIn001SmUfC*SmG* | | | | |
| | SmAn001RmU | | | | |
| WV- | mCn001RmC*SmC*SfA*SfG*SmCmA*SfG*SfCmU* | 558 | CCCAGCAGCUUCAGUC | 530 | nRSSSSOSSOSnROSnR |
| 47036 | SfUn001RmCfA*SmGn001RfUmC*SfC*SfC*SfU*SmUmUfC* | | CCUUUCTUIUCGAU | | OSSSSOOSSSnSOSSnR |
| | ST*Sb008U*SIn001SmUfC*SmG* | | | | |
| | SmAn001RmU | | | | |
| WV- | mCn001RmC*SmC*SfA*SfG*SmCmAfG*SfC* | 559 | CCCAGCAGCUUCAGUC | 530 | nRSSSSOOSSOnROSnR |
| 47037 | SmUfUn001RmCfA*SmGn001RfUmC*SfC*SfC* | | CCUUUCTUIUCGAU | | OSSSnROOSSSnSOSSnR |
| | SfUn001RmUmUfC*ST*Sb008U*SIn001SmUfC*SmG* | | | | |
| | SmAn001RmU | | | | |
| WV- | mCn001RmC*SmC*SfA*SfG*SmCmA*SfG*SfCmU* | 560 | CCCAGCAGCUUCAGUC | 530 | nRSSSSOSSOSnROSnR |
| 47038 | SfUn001RmCfA*SmGn001RfUmC*SfC*SfC*SfUn001RmU* | | CCUUUCTUIUCGAU | | OSSSnRSOSSSnSOSSnR |
| | SmUfC*ST*Sb008U*SIn001SmUfC*SmG* | | | | |
| | SmAn001RmU | | | | |
| WV- | mCn001RmC*SmC*SfA*SfG*SmCmA*SfG*SfCmU* | 561 | CCCAGCAGCUUCAGUC | 530 | nRSSSSOSSOSnROSnR |
| 47039 | SmUn001RfCfA*SmGn001RfUmC*SfC*SfC*SfU* | | CCUUUCTUIUCGAU | | OSSSSOOSSSnSOSSnR |
| | SmUmUfC*ST*Sb008U*SIn001SmUfC*SmG* | | | | |
| | SmAn001RmU | | | | |
| WV- | mCn001RmC*SmC*SfA*SfG*SmCmAfG*SfC* | 562 | CCCAGCAGCUUCAGUC | 530 | nRSSSSOOSSOnROSnR |
| 47040 | SmUmUn001RfCfA*SmGn001RfUmC*SfC*SfC* | | CCUUUCTUIUCGAU | | OSSSnROOSSSnSOSSnR |
| | SmUn001RfUmUfC*ST*Sb008U*SIn001SmUfC*SmG* | | | | |
| | mSmAn001RU | | | | |
| WV- | mCn001RmC*SmC*SfA*SfG*SmCmA*SfG*SfCmU* | 563 | CCCAGCAGCUUCAGUC | 530 | nRSSSSOSSOSnROSnR |
| 47041 | SmUn001RfCfA*SmGn001RfUmC*SfC*SfC*SmUn001RfU* | | CCUUUCTUIUCGAU | | OSSSnRSOSSSnSOSSnR |
| | SmUfC*ST*Sb008U*SIn001SmUfC*SmG* | | | | |
| | SmAn001RmU | | | | |
| WV- | mCn001RmC*SmC*SfA*SfG*Sm5CeomA*SfG*SfCTeo* | 564 | CCCAGCAGCTUCAGUC | 565 | nRSSSSOSSOSnROSnR |
| 47042 | SfUn001RmCfA*SfGn001RfUmC*SfC*SfC* | | CCUUTCTUIUCGAU | | OSSSnRSOSSSnSOSSnR |
| | SfUn001RmU*STeofC*ST*Sb008U*SIn001SmUfC*SmG* | | | | |
| | SmAn001RmU | | | | |
| WV- | mU*fG*mUmUmAfAmAmCmAmUmGmCmCfUmAfA | 566 | UGUUAAACAUGCCUAA | 567 | XXOOOOOOOOOOOO |
| 47141 | mAmCmGmCmU*mU*mU | | ACGCUUU | | OOOOOOXX |
| WV- | Mod001L001mA*mGmCmGmUmUfUmAfGfGfCmAm | 568 | AGCGUUUAGGCAUGUU | 569 | 0XOOOOOOOOOOOO |
| 47142 | UmGmUmUmUmAmAmC*mA | | UAACA | | OOOOOOX |
| WV- | L001mA*mGmCmGmUmUfUmAfGfGfCmAmUmGm | 570 | AGCGUUUAGGCAUGUU | 569 | OXOOOOOOOOOOOO |
| 47143 | UmUmUmAmAmC*mA | | UAACA | | OOOOOOX |
| WV- | mCn051RmC*SmC*SfA*SfG*SmCmA*SfG*SfCmU* | 571 | CCCAGCAGCUUCAGUC | 530 | nRSSSSOSSOSnROSnR |
| 47339 | SfUn001RmCfA*SfGn001RfUmC*SfC*SfC*SfU*SmUmUfC* | | CCUUUCTUIUCGAU | | OSSSSOOSSSnSOSSnR |
| | ST*Sb008U*SIn001SmUfC*SmG*SmAn001RmU | | | | |
| WV- | mCn057RmC*SmC*SfA*SfG*SmCmA*SfG*SfCmU* | 572 | CCCAGCAGCUUCAGUC | 530 | nRSSSSOSSOSnROSnR |
| 47340 | SfUn001RmCfA*SfGn001RfUmC*SfC*SfC*SfU*SmUmUfC* | | CCUUUCTUIUCGAU | | OSSSSOOSSSnSOSSnR |
| | ST*Sb008U*SIn001SmUfC*SmG*SmAn001RmU | | | | |
| WV- | mCn001RmC*SmC*SfA*SfG*SmCmA*SfG*SfCmU* | 573 | CCCAGCAGCUUCAGUC | 530 | nRSSSSOSSOSnROSnR |
| 47341 | SfUn001RmCfA*SfGn001RfUmC*SfC*SfC*SfU*SmUmUfC* | | CCUUUCTUIUCGAU | | OSSSSOOSSSnSOSSnR |
| | ST*Sb008U*SIn001SmUfC*SmG*SmAn051RmU | | | | |
| WV- | mCn001RmC*SmC*SfA*SfG*SmCmA*SfG*SfCmU* | 574 | CCCAGCAGCUUCAGUC | 530 | nRSSSSOSSOSnROSnR |
| 47342 | SfUn001RmCfA*SfGn001RfUmC*SfC*SfC*SfU*SmUmUfC* | | CCUUUCTUIUCGAU | | OSSSSOOSSSnSOSSnR |
| | ST*Sb008U*SIn001SmUfC*SmG*SmAn057RmU | | | | |
| WV- | mCn001RmC*SmC*SfA*SfG*SmCmA*SfG*SfCmU* | 575 | CCCAGCAGCUUCAGUC | 430 | nRSSSSOSSOSnROSnR |
| 47343 | SfUn001RmCfA*SfGn001RfUmC*SfC*SfC*SfU*SmUmUfC* | | CCUUUCCUIUCGAU | | OSSSSOOSSSnSOSSnR |
| | SC*Sb008U*SIn001SmUfC*SmG*SmAn001RmU | | | | |
| WV- | mCn001RmC*SmC*SfA*SfG*SmCmA*SfG*SfCmU* | 576 | CCCAGCAGCUUCAGUC | 422 | nRSSSSOSSOSnROSnR |
| 47344 | SfUn001RmCfA*SfGn001RfUmC*SfC*SfC*SfU* | | CCUUUCCUGUCGAU | | OSSSSOOSSSnROSSnR |
| | SmUmUfC*SC*Sb008U*SGn001RmUfC*SmG* | | | | |
| | SmAn001RmU | | | | |
| WV- | mCn001RmC*SmC*SfA*SfG*SmCmA*SfG*SfCmU* | 577 | CCCAGCAGCUUCAGUC | 530 | nRSSSSOSSOSnROSnR |
| 47345 | SfUn001RmCfA*SfGn001RfUmC*SfC*SfC*SfU*SmUmUfC* | | CCUUUCTUIUCGAU | | OSSSSOOSSSnSOSSnR |
| | ST*Sb012U*SIn001SmUfC*SmG*SmAn001RmU | | | | |
| WV- | mCn001RmC*SmC*SfA*SfG*SmCmA*SfG*SfCmU* | 578 | CCCAGCAGCUUCAGUC | 530 | nRSSSSOSSOSnROSnR |
| 47346 | SfUn001RmCfA*SfGn001RfUmC*SfC*SfC*SfU*SmUmUfC* | | CCUUUCTUIUCGAU | | OSSSSOOSSSnSOSSnR |
| | ST*Sb013U*SIn001SmUfC*SmG*SmAn001RmU | | | | |
| WV- | mCn001RmC*SmC*SfA*SfG*SmCmA*SfG*SfCmU* | 579 | CCCAGCAGCUUCAGUC | 512 | nRSSSSOSSOSnROSnR |
| 47347 | SfUn001RmCfA*SfGn001RfUmC*SfC*SfC*SfU*SmUmUfC* | | CCUUUCTAIUCGAU | | OSSSSOOSSSnSOSSnR |
| | ST*Sb001A*SIn001SmUfC*SmG*SmAn001RmU | | | | |
| WV- | mCn001RmC*SmC*SfA*SfG*SmCmA*SfG*SfCmU* | 580 | CCCAGCAGCUUCAGUC | 512 | nRSSSSOSSOSnROSnR |
| 47348 | SfUn001RmCfA*SfGn001RfUmC*SfC*SfC*SfU*SmUmUfC* | | CCUUUCTAIUCGAU | | OSSSSOOSSSnSOSSnR |
| | ST*Sb002A*SIn001SmUfC*SmG*SmAn001RmU | | | | |
| WV- | mCn001RmC*SmC*SfA*SfG*SmCmA*SfG*SfCmU* | 581 | CCCAGCAGCUUCAGUC | 512 | nRSSSSOSSOSnROSnR |
| 47349 | SfUn001RmCfA*SfGn001RfUmC*SfC*SfC*SfU*SmUmUfC* | | CCUUUCTAIUCGAU | | OSSSSOOSSSnSOSSnR |
| | ST*Sb003A*SIn001SmUfC*SmG*SmAn001RmU | | | | |
| WV- | mCn001RmC*SmC*SfA*SfG*SmCmA*SfG*SfCmU* | 582 | CCCAGCAGCUUCAGUC | 583 | nRSSSSOSSOSnROSnR |
| 47350 | SfUn001RmCfA*SfGn001RfUmC*SfC*SfC*SfU*SmUmUfC* | | CCUUUCTIIUCGAU | | OSSSSOOSSSnSOSSnR |
| | ST*Sb004I*SIn001SmUfC*SmG*SmAn001RmU | | | | |
| WV- | mCn001RmC*SmC*SfA*SfG*SmCmA*SfG*SfCmU* | 584 | CCCAGCAGCUUCAGUC | 585 | nRSSSSOSSOSnROSnR |
| 47351 | SfUn001RmCfA*SfGn001RfUmC*SfC*SfC*SfU*SmUmUfC* | | CCUUUCTGIUCGAU | | OSSSSOOSSSnSOSSnR |
| | ST*Sb002G*SIn001SmUfC*SmG*SmAn001RmU | | | | |
| WV- | mCn001RmC*SmC*SfA*SfG*SmCmA*SfG*SfCmU* | 586 | CCCAGCAGCUUCAGUC | 530 | nRSSSSOSSOSnROSnR |
| 47352 | SfUn001RmCfA*SfGn001RfUmC*SfC*SfC*SfU*SmUmUfC* | | CCUUUCTUIUCGAU | | OSSSSOOSSSnSOSSnR |
| | ST*Sb009U*SIn001SmUfC*SmG*SmAn001RmU | | | | |
| WV- | mCn001RmC*SmC*SfA*SfG*SmCmA*SfG*SfCmU* | 587 | CCCAGCAGCUUCAGUC | 432 | nRSSSSOSSOSnROSnR |
| 47353 | SfUn001RmCfA*SfGn001RfUmC*SfC*SfC*SfU*SmUmUfC* | | CCUUUCAUIUCGAU | | OSSSSOOSSSnSOSSnR |
| | Sb001A*Sb008U*SIn001SmUfC*SmG* | | | | |
| | SmAn001RmU | | | | |
| WV- | mCn001RmC*SmC*SfA*SfG*SmCmA*SfG*SfCmU* | 588 | CCCAGCAGCUUCAGUC | 432 | nRSSSSOSSOSnROSnR |
| 47354 | SfUn001RmCfA*SfGn001RfUmC*SfC*SfC*SfU*SmUmUfC* | | CCUUUCAUIUCGAU | | OSSSSOOSSSnSOSSnR |
| | Sb002A*Sb008U*SIn001SmUfC*SmG* | | | | |
| | SmAn001RmU | | | | |
| WV- | mCn001RmC*SmC*SfA*SfG*SmCmA*SfG*SfCmU* | 589 | CCCAGCAGCUUCAGUC | 432 | nRSSSSOSSOSnROSnR |
| 47355 | SfUn001RmCfA*SfGn001RfUmC*SfC*SfC*SfU*SmUmUfC* | | CCUUUCAUIUCGAU | | OSSSSOOSSSnSOSSnR |
| | Sb003A*Sb008U*SIn001SmUfC*SmG* | | | | |
| | SmAn001RmU | | | | |
| WV- | mCn001RmC*SmC*SfA*SfG*SmCmA*SfG*SfCmU* | 590 | CCCAGCAGCUUCAGUC | 359 | nRSSSSOSSOSnROSnR |
| 47356 | SfUn001RmCfA*SfGn001RfUmC*SfC*SfC*SfU*SmUmUfC* | | CCUUUCUUIUCGAU | | OSSSSOOSSSnSOSSnR |
| | Sb008U*Sb008U*SIn001SmUfC*SmG* | | | | |
| | SmAn001RmU | | | | |
| WV- | mCn001RmC*SmC*SfA*SfG*SmCmA*SfG*SfCmU* | 591 | CCCAGCAGCUUCAGUC | 430 | nRSSSSOSSOSnROSnR |
| 47357 | SfUn001RmCfA*SfGn001RfUmC*SfC*SfC*SfU*SmUmUfC* | | CCUUUCCUIUCGAU | | OSSSSOOSSSnSOSSnR |
| | Sb001C*Sb008U*SIn001SmUfC*SmG* | | | | |
| | SmAn001RmU | | | | |
| WV- | mCn001RmC*SmC*SfA*SfG*SmCmA*SfG*SfCmU* | 592 | CCCAGCAGCUUCAGUC | 430 | nRSSSSOSSOSnROSnR |
| 47358 | SfUn001RmCfA*SfGn001RfUmC*SfC*SfC*SfU*SmUmUfC* | | CCUUUCCUIUCGAU | | OSSSSOOSXSnSOSSnR |
| | Sb008C*b008U*SIn001SmUfC*SmG* | | | | |
| | mSmAn001RU | | | | |
| WV- | mCn001RmC*SmC*SfA*SfG*SmCmA*SfG*SfCmU* | 593 | CCCAGCAGCUUCAGUC | 530 | nRSSSSOSSOSnROSnR |
| 47359 | SfUn001RmCfA*SfGn001RfUmC*SfC*SfC*SfU*SmUmUfC* | | CCUUUCTUIUCGAU | | OSSSSOOSSSnSOSSnR |
| | STsm11*Sb008U*SIn001SmUfC*SmG* | | | | |
| | SmAn001RmU | | | | |
| WV- | mCn001RmC*SmC*SfA*SfG*SmCmA*SfG*SfCmU* | 594 | CCCAGCAGCUUCAGUC | 530 | nRSSSSOSSOSnROSnR |
| 47360 | SfUn001RmCfA*SfGn001RfUmC*SfC*SfC*SfU*SmUmUfC* | | CCUUUCTUIUCGAU | | OSSSSOOSSSnSOSSnR |
| | STsm12*Sb008U*SIn001SmUfC*SmG* | | | | |
| | SmAn001RmU | | | | |
| WV- | mCn001RmC*SmC*SfA*SfG*SmCmA*SfG*SfCmU* | 595 | CCCAGCAGCUUCAGUC | 430 | nRSSSSOSSOSnROSnR |
| 47361 | SfUn001RmCfA*SfGn001RfUmC*SfC*SfC*SfU*SmUmUfC* | | CCUUUCCUIUCGAU | | OSSSSOOSSSnSOSSnR |
| | Sb004C*Sb008U*SIn001SmUfC*SmG* | | | | |
| | SmAn001RmU | | | | |
| WV- | mCn001RmC*SmC*SfA*SfG*SmCmA*SfG*SfCmU* | 596 | CCCAGCAGCUUCAGUC | 430 | nRSSSSOSSOSnROSnR |
| 47362 | SfUn001RmCfA*SfGn001RfUmC*SfC*SfC*SfU*SmUmUfC* | | CCUUUCCUIUCGAU | | OSSSSOOSSSnSOSSnR |
| | Sb007C*Sb008U*SIn001SmUfC*SmG* | | | | |
| | RSmAn001mU | | | | |
| WV- | mCn001RmC*SmC*SfA*SfG*SmCmA*SfG*SfCmU* | 597 | CCCAGCAGCUUCAGUC | 430 | nRSSSSOSSOSnROSnR |
| 47363 | SfUn001RmCfA*SfGn001RfUmC*SfC*SfC*SfU*SmUmUfC* | | CCUUUCCUIUCGAU | | OSSSSOOSSSnSOSSnR |
| | SCsm17*Sb008U*SIn001SmUfC*SmG* | | | | |
| | SmAn001RmU | | | | |
| WV- | mCn001RmC*SmC*SfA*SfG*SmCmA*SfG*SfCmU* | 598 | CCCAGCAGCUUCAGUC | 518 | nRSSSSOSSOSnROSnR |
| 47364 | SfUn001RmCfA*SfGn001RfUmC*SfC*SfC*SfU*SmUmUfC* | | CCUUUCTCIUCGAU | | OSSSSOOSSSnSOSSnR |
| | ST*SC*SIn001SmUfC*SmG*SmAn001RmU | | | | |
| WV- | mCn001RmC*SmC*SfA*SfG*SmCmA*SfG*SfCmU* | 599 | CCCAGCAGCUUCAGUC | 600 | nRSSSSOSSOSnROSnR |
| 47365 | SfUn001RmCfA*SfGn001RfUmC*SfC*SfC*SfU*SmUmUfC* | | CCUUUCACIUCGAU | | OSSSSOOSSSnSOSSnR |
| | Sb001A*SC*SIn001SmUfC*SmG*SmAn001RmU | | | | |
| WV- | mCn001RmC*SmC*SfA*SfG*SmCmA*SfG*SfCmU* | 601 | CCCAGCAGCUUCAGUC | 600 | nRSSSSOSSOSnROSnR |
| 47366 | SfUn001RmCfA*SfGn001RfUmC*SfC*SfC*SfU*SmUmUfC* | | CCUUUCACIUCGAU | | OSSSSOOSSSnSOSSnR |
| | Sb002A*SC*SIn001SmUfC*SmG*SmAn001RmU | | | | |
| WV- | mCn001RmC*SmC*SfA*SfG*SmCmA*SfG*SfCmU* | 602 | CCCAGCAGCUUCAGUC | 600 | nRSSSSOSSOSnROSnR |
| 47367 | SfUn001RmCfA*SfGn001RfUmC*SfC*SfC*SfU*SmUmUfC* | | CCUUUCACIUCGAU | | OSSSSOOSSSnSOSSnR |
| | Sb003A*SC*SIn001SmUfC*SmG*SmAn001RmU | | | | |
| WV- | mCn001RmC*SmC*SfA*SfG*SmCmA*SfG*SfCmU* | 603 | CCCAGCAGCUUCAGUC | 115 | nRSSSSOSSOSnROSnR |
| 47368 | SfUn001RmCfA*SfGn001RfUmC*SfC*SfC*SfU*SmUmUfC* | | CCUUUCUCIUCGAU | | OSSSSOOSSSnSOSSnR |
| | Sb008U*SC*SIn001SmUfC*SmG*SmAn001RmU | | | | |
| WV- | mCn001RmC*SmC*SfA*SfG*SmCmA*SfG*SfCmU* | 604 | CCCAGCAGCUUCAGUC | 605 | nRSSSSOSSOSnROSnR |
| 47369 | SfUn001RmCfA*SfGn001RfUmC*SfC*SfC*SfU*SmUmUfC* | | CCUUUCCCIUCGAU | | OSSSSOOSSSnSOSSnR |
| | Sb001C*SC*SIn001SmUfC*SmG*SmAn001RmU | | | | |
| WV- | mCn001RmC*SmC*SfA*SfG*SmCmA*SfG*SfCmU* | 606 | CCCAGCAGCUUCAGUC | 605 | nRSSSSOSSOSnROSnR |
| 47370 | SfUn001RmCfA*SfGn001RfUmC*SfC*SfC*SfU*SmUmUfC* | | CCUUUCCCIUCGAU | | OSSSSOOSXSnSOSSnR |
| | Sb008C*C*SIn001SmUfC*SmG*SmAn001RmU | | | | |
| WV- | mCn001RmC*SmC*SfA*SfG*SmCmA*SfG*SfCmU* | 607 | CCCAGCAGCUUCAGUC | 518 | nRSSSSOSSOSnROSnR |
| 47371 | SfUn001RmCfA*SfGn001RfUmC*SfC*SfC*SfU*SmUmUfC* | | CCUUUCTCIUCGAU | | OSSSSOOSSSnSOSSnR |
| | STsm11*SC*SIn001SmUfC*SmG*SmAn001RmU | | | | |
| WV- | mCn001RmC*SmC*SfA*SfG*SmCmA*SfG*SfCmU* | 608 | CCCAGCAGCUUCAGUC | 518 | nRSSSSOSSOSnROSnR |
| 47372 | SfUn001RmCfA*SfGn001RfUmC*SfC*SfC*SfU*SmUmUfC* | | CCUUUCTCIUCGAU | | OSSSSOOSSSnSOSSnR |
| | STsm12*SC*SIn001SmUfC*SmG*SmAn001RmU | | | | |
| WV- | mCn001RmC*SmC*SfA*SfG*SmCmA*SfG*SfCmU* | 609 | CCCAGCAGCUUCAGUC | 605 | nRSSSSOSSOSnROSnR |
| 47373 | SfUn001RmCfA*SfGn001RfUmC*SfC*SfC*SfU*SmUmUfC* | | CCUUUCCCIUCGAU | | OSSSSOOSSSnSOSSnR |
| | Sb004C*SC*SIn001SmUfC*SmG*SmAn001RmU | | | | |
| WV- | mCn001RmC*SmC*SfA*SfG*SmCmA*SfG*SfCmU* | 610 | CCCAGCAGCUUCAGUC | 605 | nRSSSSOSSOSnROSnR |
| 47374 | SfUn001RmCfA*SfGn001RfUmC*SfC*SfC*SfU*SmUmUfC* | | CCUUUCCCIUCGAU | | OSSSSOOSSSnSOSSnR |
| | Sb007C*SC*SIn001SmUfC*SmG*SmAn001RmU | | | | |
| WV- | mCn001RmC*SmC*SfA*SfG*SmCmA*SfG*SfCmU* | 611 | CCCAGCAGCUUCAGUC | 605 | nRSSSSOSSOSnROSnR |
| 47375 | SfUn001RmCfA*SfGn001RfUmC*SfC*SfC*SfU*SmUmUfC* | | CCUUUCCCIUCGAU | | OSSSSOOSSSnSOSSnR |
| | SCsm17*SC*SIn001SmUfC*SmG*SmAn001RmU | | | | |
| WV- | mCn001RmC*SmC*SfA*SfG*SmCmA*SfG*SfCmU* | 612 | CCCAGCAGCUUCAGUC | 530 | nRSSSSOSSOSnROSnR |
| 46461 | SfUn001RmCfA*SfGn001RfUmC*SfC*SfC*SfU*SmUmUfC* | | CCUUUCTUIUCGAU | | OSSSSOOSSSnROSSnR |
| | ST*Sb008U*SIn001RmUfC*SmG*SmAn001RmU | | | | |
| WV- | mCn001RmC*SmC*SfA*SfG*SmCmA*SfG*SfCmU* | 613 | CCCAGCAGCUUCAGUC | 530 | nRSSSSOSSOSnROSnR |
| 47376 | SfUn001RmCfA*SfGn001RfUmC*SfC*SfC*SfU*SmUmUfC* | | CCUUUCTUIUCGAU | | OSSSSOOSSSSOSSnR |
| | ST*Sb008U*SI*SmUfC*SmG*SmAn001RmU | | | | |
| WV- | mCn001RmC*SmC*SfA*SfG*SmCmA*SfG*SfCmU* | 614 | CCCAGCAGCUUCAGUC | 615 | nRSSSSOSSOSnROSnR |
| 47377 | SfUn001RmCfA*SfGn001RfUmC*SfC*SfC*SfU*SmUmUfC* | | CCUUUCTUAUCGAU | | OSSSSOOSSSnROSSnR |
| | ST*Sb008U*Sb001An001RmUfC*SmG* | | | | |
| | SmAn001RmU | | | | |
| WV- | mCn001RmC*SmC*SfA*SfG*SmCmA*SfG*SfCmU* | 616 | CCCAGCAGCUUCAGUC | 615 | nRSSSSOSSOSnROSnR |
| 47378 | SfUn001RmCfA*SfGn001RfUmC*SfC*SfC*SfU*SmUmUfC* | | CCUUUCTUAUCGAU | | OSSSSOOSSSnROSSnR |
| | ST*Sb008U*Sb002An001RmUfC*SmG* | | | | |
| | SmAn001RmU | | | | |
| WV- | mCn001RmC*SmC*SfA*SfG*SmCmA*SfG*SfCmU* | 617 | CCCAGCAGCUUCAGUC | 615 | nRSSSSOSSOSnROSnR |
| 47379 | SfUn001RmCfA*SfGn001RfUmC*SfC*SfC*SfU*SmUmUfC* | | CCUUUCTUAUCGAU | | OSSSSOOSSSSOSSnR |
| | ST*Sb008U*Sb003A*SmUfC*SmG* | | | | |
| | SmAn001RmU | | | | |
| WV- | mCn001RmC*SmC*SfA*SfG*SmCmA*SfG*SfCmU* | 618 | CCCAGCAGCUUCAGUC | 619 | nRSSSSOSSOSnROSnR |
| 47380 | SfUn001RmCfA*SfGn001RfUmC*SfC*SfC*SfU*SmUmUfC* | | CCUUUCTUUUCGAU | | OSSSSOOSSSnROSSnR |
| | ST*Sb008U*Sb008Un001RmUfC*SmG* | | | | |
| | SmAn001RmU | | | | |
| WV- | mCn001RmC*SmC*SfA*SfG*SmCmA*SfG*SfCmU* | 620 | CCCAGCAGCUUCAGUC | 621 | nRSSSSOSSOSnROSnR |
| 47381 | SfUn001RmCfA*SfGn001RfUmC*SfC*SfC*SfU*SmUmUfC* | | CCUUUCTUCUCGAU | | OSSSSOOSSSnROSSnR |
| | ST*Sb008U*Sb001Cn001RmUfC*SmG* | | | | |
| | SmAn001RmU | | | | |
| WV- | mCn001RmC*SmC*SfA*SfG*SmCmA*SfG*SfCmU* | 622 | CCCAGCAGCUUCAGUC | 621 | nRSSSSOSSOSnROSnR |
| 47382 | SfUn001RmCfA*SfGn001RfUmC*SfC*SfC*SfU*SmUmUfC* | | CCUUUCTUCUCGAU | | OSSSSOOSSSnXOSSnR |
| | ST*Sb008U*Sb008Cn001mUfC*SmG* | | | | |
| | SmAn001RmU | | | | |
| WV- | mCn001RmC*SmC*SfA*SfG*SmCmA*SfG*SfCmU* | 623 | CCCAGCAGCUUCAGUC | 624 | nRSSSSOSSOSnROSnR |
| 47383 | SfUn001RmCfA*SfGn001RfUmC*SfC*SfC*SfU*SmUmUfC* | | CCUUUCTUTUCGAU | | OSSSSOOSSSSOSSnR |
| | ST*Sb008U*STsm11*SmUfC*SmG* | | | | |
| | SmAn001RmU | | | | |
| WV- | mCn001RmC*SmC*SfA*SfG*SmCmA*SfG*SfCmU* | 625 | CCCAGCAGCUUCAGUC | 624 | nRSSSSOSSOSnROSnR |
| 47384 | SfUn001RmCfA*SfGn001RfUmC*SfC*SfC*SfU*SmUmUfC* | | CCUUUCTUTUCGAU | | OSSSSOOSSSSOSSnR |
| | ST*Sb008U*STsm12*SmUfC*SmG* | | | | |
| | SmAn001RmU | | | | |
| WV- | mCn001RmC*SmC*SfA*SfG*SmCmA*SfG*SfCmU* | 626 | CCCAGCAGCUUCAGUC | 621 | nRSSSSOSSOSnROSnR |
| 47385 | SfUn001RmCfA*SfGn001RfUmC*SfC*SfC*SfU*SmUmUfC* | | CCUUUCTUCUCGAU | | OSSSSOOSSSSOSSnR |
| | ST*Sb008U*Sb004C*SmUfC*SmG* | | | | |
| | SmAn001RmU | | | | |
| WV- | mCn001RmC*SmC*SfA*SfG*SmCmA*SfG*SfCmU* | 627 | CCCAGCAGCUUCAGUC | 621 | nRSSSSOSSOSnROSnR |
| 47386 | SfUn001RmCfA*SfGn001RfUmC*SfC*SfC*SfU*SmUmUfC* | | CCUUUCTUCUCGAU | | OSSSSOOSSSSOSSnR |
| | ST*Sb008U*Sb007C*SmUfC*SmG* | | | | |
| | SmAn001RmU | | | | |
| WV- | mCn001RmC*SmC*SfA*SfG*SmCmA*SfG*SfCmU* | 628 | CCCAGCAGCUUCAGUC | 621 | nRSSSSOSSOSnROSnR |
| 47387 | SfUn001RmCfA*SfGn001RfUmC*SfC*SfC*SfU*SmUmUfC* | | CCUUUCTUCUCGAU | | OSSSSOOSSSSOSSnR |
| | ST*Sb008U*SCsm17*SmUfC*SmG* | | | | |
| | SmAn001RmU | | | | |
| WV- | mCn001RmC*SmC*SfA*SfG*SmCmA*SfG*SfCmU* | 629 | CCCAGCAGCUUCAGUC | 518 | nRSSSSOSSOSnROSnR |
| 47388 | SfUn001RmCfA*SfGn001RfUmC*SfC*SfC*SfU*SmUmUfC* | | CCUUUCTCIUCGAU | | OSSSSOOSSSnROSSnR |
| | ST*SC*SIn001RmUfC*SmG*SmAn001RmU | | | | |
| WV- | mCn001RmC*SmC*SfA*SfG*SmCmA*SfG*SfCmU* | 630 | CCCAGCAGCUUCAGUC | 518 | nRSSSSOSSOSnROSnR |
| 47389 | SfUn001RmCfA*SfGn001RfUmC*SfC*SfC*SfU*SmUmUfC* | | CCUUUCTCIUCGAU | | OSSSSOOSSSSOSSnR |
| | ST*SC*SI*SmUfC*SmG*SmAn001RmU | | | | |
| WV- | mCn001RmC*SmC*SfA*SfG*SmCmA*SfG*SfCmU* | 631 | CCCAGCAGCUUCAGUC | 632 | nRSSSSOSSOSnROSnR |
| 47390 | SfUn001RmCfA*SfGn001RfUmC*SfC*SfC*SfU*SmUmUfC* | | CCUUUCTCAUCGAU | | OSSSSOOSSSnROSSnR |
| | ST*SC*Sb001An001RmUfC*SmG* | | | | |
| | SmAn001RmU | | | | |
| WV- | mCn001RmC*SmC*SfA*SfG*SmCmA*SfG*SfCmU* | 633 | CCCAGCAGCUUCAGUC | 632 | nRSSSSOSSOSnROSnR |
| 47391 | SfUn001RmCfA*SfGn001RfUmC*SfC*SfC*SfU*SmUmUfC* | | CCUUUCTCAUCGAU | | OSSSSOOSSSnROSSnR |
| | ST*SC*Sb002An001RmUfC*SmG* | | | | |
| | SmAn001RmU | | | | |
| WV- | mCn001RmC*SmC*SfA*SfG*SmCmA*SfG*SfCmU* | 634 | CCCAGCAGCUUCAGUC | 632 | nRSSSSOSSOSnROSnR |
| 47392 | SfUn001RmCfA*SfGn001RfUmC*SfC*SfC*SfU*SmUmUfC* | | CCUUUCTCAUCGAU | | OSSSSOOSSSSOSSnR |
| | ST*SC*Sb003A*SmUfC*SmG*SmAn001RmU | | | | |
| WV- | mCn001RmC*SmC*SfA*SfG*SmCmA*SfG*SfCmU* | 635 | CCCAGCAGCUUCAGUC | 636 | nRSSSSOSSOSnROSnR |
| 47393 | SfUn001RmCfA*SfGn001RfUmC*SfC*SfC*SfU*SmUmUfC* | | CCUUUCTCUUCGAU | | OSSSSOOSSSnROSSnR |
| | ST*SC*Sb008Un001RmUfC*SmG* | | | | |
| | SmAn001RmU | | | | |
| WV- | mCn001RmC*SmC*SfA*SfG*SmCmA*SfG*SfCmU* | 637 | CCCAGCAGCUUCAGUC | 638 | nRSSSSOSSOSnROSnR |
| 47394 | SfUn001RmCfA*SfGn001RfUmC*SfC*SfC*SfU*SmUmUfC* | | CCUUUCTCCUCGAU | | OSSSSOOSSSnROSSnR |
| | ST*SC*Sb001Cn001RmUfC*SmG* | | | | |
| | SmAn001RmU | | | | |
| WV- | mCn001RmC*SmC*SfA*SfG*SmCmA*SfG*SfCmU* | 639 | CCCAGCAGCUUCAGUC | 638 | nRSSSSOSSOSnROSnR |
| 47395 | SfUn001RmCfA*SfGn001RfUmC*SfC*SfC*SfU*SmUmUfC* | | CCUUUCTCCUCGAU | | OSSSSOOSSSnXOSSnR |
| | ST*SC*Sb008Cn001mUfC*SmG*SmAn001RmU | | | | |
| WV- | mCn001RmC*SmC*SfA*SfG*SmCmA*SfG*SfCmU* | 640 | CCCAGCAGCUUCAGUC | 641 | nRSSSSOSSOSnROSnR |
| 47396 | SfUn001RmCfA*SfGn001RfUmC*SfC*SfC*SfU*SmUmUfC* | | CCUUUCTCTUCGAU | | OSSSSOOSSSSOSSnR |
| | ST*SC*STsm11*SmUfC*SmG*SmAn001RmU | | | | |
| WV- | mCn001RmC*SmC*SfA*SfG*SmCmA*SfG*SfCmU* | 642 | CCCAGCAGCUUCAGUC | 641 | nRSSSSOSSOSnROSnR |
| 47397 | SfUn001RmCfA*SfGn001RfUmC*SfC*SfC*SfU*SmUmUfC* | | CCUUUCTCTUCGAU | | OSSSSOOSSSSOSSnR |
| | ST*SC*STsm12*SmUfC*SmG*SmAn001RmU | | | | |
| WV- | mCn001RmC*SmC*SfA*SfG*SmCmA*SfG*SfCmU* | 643 | CCCAGCAGCUUCAGUC | 638 | nRSSSSOSSOSnROSnR |
| 47398 | SfUn001RmCfA*SfGn001RfUmC*SfC*SfC*SfU*SmUmUfC* | | CCUUUCTCCUCGAU | | OSSSSOOSSSSOSSnR |
| | ST*SC*Sb004C*SmUfC*SmG*SmAn001RmU | | | | |
| WV- | mCn001RmC*SmC*SfA*SfG*SmCmA*SfG*SfCmU* | 644 | CCCAGCAGCUUCAGUC | 638 | nRSSSSOSSOSnROSnR |
| 47399 | SfUn001RmCfA*SfGn001RfUmC*SfC*SfC*SfU*SmUmUfC* | | CCUUUCTCCUCGAU | | OSSSSOOSSSSOSSnR |
| | ST*SC*Sb007C*SmUfC*SmG*SmAn001RmU | | | | |
| WV- | mCn001RmC*SmC*SfA*SfG*SmCmA*SfG*SfCmU* | 645 | CCCAGCAGCUUCAGUC | 638 | nRSSSSOSSOSnROSnR |
| 47400 | SfUn001RmCfA*SfGn001RfUmC*SfC*SfC*SfU*SmUmUfC* | | CCUUUCTCCUCGAU | | OSSSSOOSSSSOSSnR |
| | ST*SC*SCsm17*SmUfC*SmG*SmAn001RmU | | | | |
| WV- | mCn001RmC*SmC*SfA*SfG*SmCmA*SfG*SfCmU* | 646 | CCCAGCAGCUUCAGUC | 621 | nRSSSSOSSOSnROSnR |
| 47401 | SfUn001RmCfA*SfGn001RfUmC*SfC*SfC*SfU*SmUmUfC* | | CCUUUCTUCUCGAU | | OSSSSOOSSSSOSSnR |
| | ST*Sb008U*SCsm11*SmUfC*SmG* | | | | |
| | SmAn001RmU | | | | |
| WV- | mCn001RmC*SmC*SfA*SfG*SmCmA*SfG*SfCmU* | 647 | CCCAGCAGCUUCAGUC | 621 | nRSSSSOSSOSnROSnR |
| 47402 | fSUn001RmCfA*SfGn001RfUmC*SfC*SfC*SfU*SmUmUfC* | | CCUUUCTUCUCGAU | | OSSSSOOSSSSOSSnR |
| | ST*Sb008U*SCsm12*SmUfC*SmG* | | | | |
| | SmAn001RmU | | | | |
| WV- | mCn001RmC*SmC*SfA*SfG*SmCmA*SfG*SfCmU* | 648 | CCCAGCAGCUUCAGUC | 621 | nRSSSSOSSOSnROSnR |
| 47403 | SfUn001RmCfA*SfGn001RfUmC*SfC*SfC*SfU*SmUmUfC* | | CCUUUCTUCUCGAU | | OSSSSOOSSSSOSSnR |
| | ST*Sb008U*Sb009Csm11*SmUfC*SmG* | | | | |
| | SmAn001RmU | | | | |
| WV- | mCn001RmC*SmC*SfA*SfG*SmCmA*SfG*SfCmU* | 649 | CCCAGCAGCUUCAGUC | 621 | nRSSSSOSSOSnROSnR |
| 47404 | SfUn001RmCfA*SfGn001RfUmC*SfC*SfC*SfU*SmUmUfC* | | CCUUUCTUCUCGAU | | OSSSSOOSSSSOSSnR |
| | ST*Sb008U*Sb009Csm12*SmUfC*SmG* | | | | |
| | SmAn001RmU | | | | |
| WV- | mCn001RmC*SmC*SfA*SfG*SmCmA*SfG*SfCmU* | 650 | CCCAGCAGCUUCAGUC | 638 | nRSSSSOSSOSnROSnR |
| 47405 | SfUn001RmCfA*SfGn001RfUmC*SfC*SfC*SfU*SmUmUfC* | | CCUUUCTCCUCGAU | | OSSSSOOSSSSOSSnR |
| | ST*SC*SCsm11*SmUfC*SmG*SmAn001RmU | | | | |
| WV- | mCn001RmC*SmC*SfA*SfG*SmCmA*SfG*SfCmU* | 651 | CCCAGCAGCUUCAGUC | 638 | nRSSSSOSSOSnROSnR |
| 47406 | SfUn001RmCfA*SfGn001RfUmC*SfC*SfC*SfU*SmUmUfC* | | CCUUUCTCCUCGAU | | OSSSSOOSSSSOSSnR |
| | ST*SC*SCsm12*SmUfC*SmG*SmAn001RmU | | | | |
| WV- | mCn001RmC*SmC*SfA*SfG*SmCmA*SfG*SfCmU* | 652 | CCCAGCAGCUUCAGUC | 638 | nRSSSSOSSOSnROSnR |
| 47407 | SfUn001RmCfA*SfGn001RfUmC*SfC*SfC*SfU*SmUmUfC* | | CCUUUCTCCUCGAU | | OSSSSOOSSSSOSSnR |
| | ST*SC*Sb009Csm11*SmUfC*SmG* | | | | |
| | SmAn001RmU | | | | |
| WV- | mCn001RmC*SmC*SfA*SfG*SmCmA*SfG*SfCmU* | 653 | CCCAGCAGCUUCAGUC | 638 | nRSSSSOSSOSnROSnR |
| 47408 | SfUn001RmCfA*SfGn001RfUmC*SfC*SfC*SfU*SmUmUfC* | | CCUUUCTCCUCGAU | | OSSSSOOSSSSOSSnR |
| | ST*SC*Sb009Csm12*SmUfC*SmG* | | | | |
| | SmAn001RmU | | | | |
| WV- | mCn001RmC*SmC*SfA*SfG*SmCmA*SfG*SfCmU* | 654 | CCCAGCAGCUUCAGUC | 585 | nRSSSSOSSOSnROSnR |
| 47483 | SfUn001RmCfA*SfGn001RfUmC*SfC*SfC*SfU*SmUmUfC* | | CCUUUCTGIUCGAU | | OSSSSOOSSXnSOSSnR |
| | ST*Sb002G*In001SmUfC*SmG*SmAn001RmU | | | | |
| WV- | Mod001L001mCn001RmC*SmC*SfA*SfG*SmCmAfG* | 531 | CCCAGCAGCUUCAGUC | 530 | OnRSSSSOOSSOnROSn |
| 46313 | SfC*SmUfUn001RmCfA*SfGn001RfUmC*SfC*SfC* | | CCUUUCTUIUCGAU | | ROSSSnROOSSSnSOSSn |
| | SfUn001RmUmUfC*ST*Sb008U*SIn001SmUfC*SmG* | | | | R |
| | SmAn001RmU | | | | |
| WV- | L001mCn001RmC*SmC*SfA*SfG*SmCmA*SfG*SfCmU* | 655 | CCCAGCAGCUUCAGUC | 530 | OnRSSSSOSSOSnROSn |
| 47595 | SfUn001RmCfA*SfGn001RfUmC*SfC*SfC*SfU* | | CCUUUCTUIUCGAU | | ROSSSSOOSSSnSOSSnR |
| | SmUmUfC*ST*Sb008U*SIn001SmUfC*SmG* | | | | |
| | SmAn001RmU | | | | |
| WV- | L001mCn001RmC*SmC*SfA*SfG*SmCmAfG*SfC* | 656 | CCCAGCAGCUUCAGUC | 530 | OnRSSSSOOSSOnROSn |
| 47596 | SmUfUn001RmCfA*SfGn001RfUmC*SfC*SfC* | | CCUUUCTUIUCGAU | | ROSSSnROOSSSnSOSSn |
| | SfUn001RmUmUfC*ST*Sb008U*SIn001SmUfC*SmG* | | | | R |
| | 0SmAn01RmU | | | | |
| WV- | Mod001L001mCn001RmC*SmC*SfA*SfG*SmCmA*SfG* | 657 | CCCAGCAGCUUCAGUC | 530 | OnRSSSSOSSOSnROSn |
| 47597 | SfCmU*SfUn001RmCfA*SfGn001RfUmCmC*SfC* | | CCUUUCTUIUCGAU | | ROOSSSOOSSSnSOSSn |
| | SfU*SmUmUfC*ST*Sb008U*SIn001SmUfC*SmG* | | | | R |
| | SmAn001RmU | | | | |
| WV- | Mod001L001mCn001RmC*SmC*SfA*SfG*SmCmAfG* | 658 | CCCAGCAGCUUCAGUC | 530 | OnRSSSSOOSOSnROSn |
| 47598 | SmCmU*SfUn001RmCfA*SfGn001RmUmCmC*SfC* | | CCUUUCTUIUCGAU | | ROOSSSOOSSSnSOSSn |
| | SfU*SmUmUfC*ST*Sb008U*SIn001SmUfC*SmG* | | | | R |
| | SmAn001RmU | | | | |
| WV- | Mod001L001mCn001RmC*SmC*SfA*SfG*SmCmAfG* | 659 | CCCAGCAGCUUCAGUC | 530 | OnRSSSSOOSOSnROSn |
| 47599 | SmCmU*SmUn001RmCfA*SfGn001RmUmCmC*SfC* | | CCUUUCTUIUCGAU | | ROOSSSOOSSSnSOSSn |
| | SfU*SmUmUfC*ST*Sb008U*SIn001SmUfC*SmG* | | | | R |
| | SmAn001RmU | | | | |
| WV- | Mod001L001mCn001RmC*SmC*SfA*SfG*SfCmA*SfG* | 660 | CCCAGCAGCUUCAGUC | 530 | OnRSSSSOSSOSnROSn |
| 47600 | SmCmU*SmUn001RmCfA*SfGn001RmUmC*SfC* | | CCUUUCTUIUCGAU | | ROSSSnROOSSSnSOSSn |
| | SfC*SfUn001RmUmUfC*ST*Sb008U*SIn001SmUfC* | | | | R |
| | SmG*SmAn001RmU | | | | |
| WV- | Mod001L001mCn001RmC*SmC*SfA*SfG*SmCmAfG* | 661 | CCCAGCAGCUUCAGUC | 530 | OnRSSSSOOSSOnROSn |
| 47601 | SfC*SmUmUn001RmCfA*SfGn001RfUmC*SfC* | | CCUUUCTUIUCGAU | | ROSSOnROOSSSnSOSS |
| | SmCmUn001RmUmUfC*ST*Sb008U*SIn001SmUfC*SmG* | | | | nR |
| | SmAn001RmU | | | | |
| WV- | Mod001L001m5Ceon001Rm5Ceo*Sm5Ceo*SfA*SfG* | 662 | CCCAGCAGCUUCAGUC | 663 | OnRSSSSOSSOSnROSn |
| 47602 | SmCmA*SfG*SfCmU*SfUn001RmCfA*SfGn001RfUmC* | | CCUUUCTUIUCGAT | | ROSSSSOOSSSnSOSSnR |
| | SfC*SfC*SfU*SmUmUfC*ST*Sb008U*SIn001SmUfC* | | | | |
| | SmG*SAeon001RTeo | | | | |
| WV- | Mod001L001mCn001RmC*SmC*SfA*SfG*Sm5CeomA* | 664 | CCCAGCAGCTUCAGUC | 565 | OnRSSSSOSSOSnROSn |
| 47603 | SfG*SfCTeo*SfUn001RmCfA*SfGn001RfUmC*SfC* | | CCUUTCTUIUCGAU | | ROSSSSOOSSSnSOSSnR |
| | SfC*SfU*SmUTeofC*ST*Sb008U*SIn001SmUfC*SmG* | | | | |
| | SmAn001RmU | | | | |
| WV- | Mod001L001mCn001RmC*SmC*SfA*SfG*Sm5CeomA* | 665 | CCCAGCAGCTUCAGUC | 666 | OnRSSSSOSSOSnROSn |
| 47604 | SfG*SfCTeo*SfUn001RmCfA*SfGn001RfUmC*SfC* | | CCUTTCTUIUCGAU | | ROSSSSOOSSSnSOSSnR |
| | SfC*SfU*STeoTeofC*ST*Sb008U*SIn001SmUfC*SmG* | | | | |
| | SmAn001RmU | | | | |
| WV- | Mod001L001mCn001RmC*SmC*SfA*SfG*Sm5CeomAfG* | 667 | CCCAGCAGCTUCAGUC | 565 | OnRSSSSOOSSOnROSn |
| 47605 | *SfC*STeofUn001RmCfA*SfGn001RfUmC*SfC*SfC* | | CCUUTCTUIUCGAU | | ROSSSnROOSSSnSOSSn |
| | SfUn001RmUTeofC*ST*Sb008U*SIn001SmUfC* | | | | R |
| | SmG*SmAn001RmU | | | | |
| WV- | Mod001L001mCn001RmC*SmC*SfA*SfG*Sm5CeoAeofG* | 668 | CCCAGCAGCTUCAGUC | 666 | OnRSSSSOOSSOnROSn |
| 47606 | SfC*STeofUn001RmCfA*SfGn001RfUmC*SfC*SfC* | | CCUTTCTUIUCGAU | | ROSSSnROOSSSnSOSSn |
| | SfUn001RTeoTeofC*ST*Sb008U*SIn001SmUfC* | | | | R |
| | SmG*SmAn001RmU | | | | |
| WV- | Mod001L001mCn001RmC*SmC*SfA*SfG*SmCmA*SfG* | 669 | CCCAGCAGCUUCAGUC | 530 | OnRSSSSOSSOSnROSn |
| 47607 | SfCmU*SfUn001RmCfA*SmGn001RfUmC*SfC*SfC* | | CCUUUCTUIUCGAU | | ROSSSSOOSSSnSOSSnR |
| | SfU*SmUmUfC*ST*Sb008U*SIn001SmUfC*SmG* | | | | |
| | SmAn001RmU | | | | |
| WV- | Mod001L001mCn001RmC*SmC*SfA*SfG*SmCmAfG* | 670 | CCCAGCAGCUUCAGUC | 530 | OnRSSSSOOSSOnROSn |
| 47608 | SfC*SmUfUn001RmCfA*SmGn001RfUmC*SfC*SfC* | | CCUUUCTUIUCGAU | | ROSSSnROOSSSnSOSSn |
| | SfUn001RmUmUfC*ST*Sb008U*SIn001SmUfC*SmG* | | | | R |
| | SmAn001RmU | | | | |
| WV- | Mod001L001mCn001RmC*SmC*SfA*SfG*Sm5CeomA* | 671 | CCCAGCAGCTUCAGUC | 565 | OnRSSSSOSSOSnROSn |
| 47609 | SfG*SfCTeo*SfUn001RmCfA*SfGn001RfUmC*SfC* | | CCUUTCTUIUCGAU | | ROSSSnRSOSSSnSOSSn |
| | SfC*SfUn001RmU*STeofC*ST*Sb008U*SIn001SmUfC* | | | | R |
| | SmG*SmAn001RmU | | | | |
| WV- | mCn001RmC*SmC*SfA*SfG*SmCmA*SfG*SfCmU* | 537 | CCCAGCAGCUUCAGUC | 530 | nRSSSSOSSOSnROSnR |
| 46407 | SfUn001RmCfA*SfGn001RfUmCmC*SfC*SfU*SmUmUfC* | | CCUUUCTUIUCGAU | | OOSSSOOSSSnSOSSnR |
| | ST*Sb008U*SIn001SmUfC*SmG*SmAn001RmU | | | | |
| WV- | mCn001RmC*SmC*SfA*SfG*SmCmA*SfG*SfCmU* | 672 | CCCAGCAGCUUCAGUC | 530 | nRSSSSOSSOSnROSnR |
| 47610 | SfUn001RmCfA*SmGn001RfUmCmC*SfC*SfU*SmUm | | CCUUUCTUIUCGAU | | OOSSSOOSSSnSOSSnR |
| | ST*Sb008U*SIn001SmUfC*SmG*SmAn001RmUUfC* | | | | |
| WV- | mCn001RmC*SmC*SfA*SfG*SmCmA*SfG*SfCmU* | 673 | CCCAGCAGCUUCAGUC | 530 | nRSSSSOSSOSnROSnR |
| 47611 | SmUn001RfCfA*SmGn001RfUmCmC*SfC*SfU*SmUm | | CCUUUCTUIUCGAU | | OOSSSOOSSSnSOSSnR |
| | ST*Sb008U*SIn001SmUfC*SmG*SmAn001RmUUfC* | | | | |
| WV- | mCn001RmC*SmC*SfA*SfG*Sm5CeomA*SfG*SfCm | 674 | CCCAGCAGCUUCAGUC | 675 | nRSSSSOSSOSnROSnR |
| 47612 | U*SfUn001RmCfA*SfGn001RfUm5CeomC*SfC*SfU* | | CCUUTCTUIUCGAU | | OOSSSOOSSSnSOSSnR |
| | SmUTeofC*ST*Sb008U*SIn001SmUfC*SmG* | | | | |
| | SmAn001RmU | | | | |
| WV- | mCn001RmC*SmC*SfA*SfG*Sm5CeomA*SfG*SfCmU* | 676 | CCCAGCAGCUUCAGUC | 677 | nRSSSSOSSOSnROSnR |
| 47613 | SfUn001RmCfA*SfGn001RfUm5CeomC*SfC*SfU* | | CCUTTCTUIUCGAU | | OOSSSOOSSSnSOSSnR |
| | STeoTeofC*ST*Sb008U*SIn001SmUfC*SmG* | | | | |
| | SmAn001RmU | | | | |
| WV- | m5Ceon001Rm5Ceo*Sm5Ceo*SfA*SfG*Sm5CeomA* | 678 | CCCAGCAGCUUCAGUC | 679 | nRSSSSOSSOSnROSnR |
| 47614 | SfG*SfCmU*SfUn001RmCfA*SfGn001RfUm5CeomC* | | CCUUTCTUIUCGAT | | OOSSSOOSSSnSOSSnR |
| | SfC*SfU*SmUTeofC*ST*Sb008U*SIn001SmUfC*SmG* | | | | |
| | SAeon001RTeo | | | | |
| WV- | m5Ceon001Rm5Ceo*Sm5Ceo*SfA*SfG*Sm5CeomA* | 680 | CCCAGCAGCUUCAGUC | 681 | nRSSSSOSSOSnROSnR |
| 47615 | SfG*SfCmU*SfUn001RmCfA*SfGn001RfUm5CeomC* | | CCUTTCTUIUCGAT | | OOSSSOOSSSnSOSSnR |
| | SfC*SfU*STeoTeofC*ST*Sb008U*SIn001SmUfC*SmG* | | | | |
| | SAeon001RTeo | | | | |
| WV- | mCn001RmC*SmC*SfA*SfG*Sm5CeomA*SfG*SfCmU* | 682 | CCCAGCAGCUUCAGUC | 675 | nRSSSSOSSOSnROSnR |
| 47616 | SfUn001RmCfA*SmGn001RfUm5CeomC*SfC*SfU* | | CCUUTCTUIUCGAU | | OOSSSOOSSSnSOSSnR |
| | SmUTeofC*ST*Sb008U*SIn001SmUfC*SmG* | | | | |
| | SmAn001RmU | | | | |
| WV- | mCn001RmC*SmC*SfA*SfG*Sm5CeomA*SfG*SfCmU* | 683 | CCCAGCAGCUUCAGUC | 677 | nRSSSSOSSOSnROSnR |
| 47617 | SfUn001RmCfA*SmGn001RfUm5CeomC*SfC*SfU* | | CCUTTCTUIUCGAU | | OOSSSOOSSSnSOSSnR |
| | STeoTeofC*ST*Sb008U*SIn001SmUfC*SmG* | | | | |
| | SmAn001RmU | | | | |
| WV- | m5Ceon001Rm5Ceo*Sm5Ceo*SfA*SfG*Sm5CeomA* | 684 | CCCAGCAGCUUCAGUC | 679 | nRSSSSOSSOSnROSnR |
| 47618 | SfG*SfCmU*SfUn001RmCfA*SmGn001RfUm5CeomC* | | CCUUTCTUIUCGAT | | OOSSSOOSSSnSOSSnR |
| | SfC*SfU*SmUTeofC*ST*Sb008U*SIn001SmUfC* | | | | |
| | SmG*SAeon001RTeo | | | | |
| WV- | m5Ceon001Rm5Ceo*Sm5Ceo*SfA*SfG*Sm5CeomA* | 685 | CCCAGCAGCUUCAGUC | 681 | nRSSSSOSSOSnROSnR |
| 47619 | SfG*SfCmU*SfUn001RmCfA*SmGn001RfUm5CeomC* | | CCUTTCTUIUCGAT | | OOSSSOOSSSnSOSSnR |
| | SfC*SfU*STeoTeofC*ST*Sb008U*SIn001SmUfC* | | | | |
| | SmG*SAeon001RTeo | | | | |
| WV- | mCn001RmC*SmC*SfA*SfG*Sm5CeomA*SfG*SfCTeo* | 686 | CCCAGCAGCTUCAGUC | 565 | nRSSSSOSSOSnROSnR |
| 46452 | SfUn001RmCfA*SfGn001RfUmC*SfC*SfC*SfU* | | CCUUTCTUIUCGAU | | OSSSSOOSSSnSOSSnR |
| | SmUTeofC*ST*Sb008U*SIn001SmUfC*SmG* | | | | |
| | SmAn001RmU | | | | |
| WV- | m5Ceon001Rm5Ceo*Sm5Ceo*SfA*SfG*Sm5CeomA* | 687 | CCCAGCAGCTUCAGUC | 688 | nRSSSSOSSOSnROSnR |
| 47620 | SfG*SfCTeo*SfUn001RmCfA*SfGn001RfUmC*SfC* | | CCUUTCTUIUCGAT | | OSSSSOOSSSnSOSSnR |
| | SfC*SfU*SmUTeofC*ST*Sb008U*SIn001SmUfC*SmG* | | | | |
| | SAeon001RTeo | | | | |
| WV- | mCn001RmC*SmC*SfA*SfG*Sm5CeomA*SfG*SfCTeo* | 689 | CCCAGCAGCTUCAGUC | 565 | nRSSSSOSSOSnROSnR |
| 47621 | SfUn001RmCfA*SmGn001RfUmC*SfC*SfC*SfU* | | CCUUTCTUIUCGAU | | OSSSSOOSSSnSOSSnR |
| | SmUTeofC*ST*Sb008U*SIn001SmUfC*SmG* | | | | |
| | SmAn001RmU | | | | |
| WV- | m5Ceon001Rm5Ceo*Sm5Ceo*SfA*SfG*Sm5CeomA* | 690 | CCCAGCAGCTUCAGUC | 688 | nRSSSSOSSOSnROSnR |
| 47622 | SfG*SfCTeo*SfUn001RmCfA*SmGn001RfUmC*SfC*SfC* | | CCUUTCTUIUCGAT | | OSSSSOOSSSnSOSSnR |
| | SfU*SmUTeofC*ST*Sb008U*SIn001SmUfC*SmG* | | | | |
| | SAeon001RTeo | | | | |
| WV- | mCn001RmC*SmC*SfA*SfG*Sm5CeomA*SfG*SfCTeo* | 691 | CCCAGCAGCTUCAGUC | 666 | nRSSSSOSSOSnROSnR |
| 46453 | SfUn001RmCfA*SfGn001RfUmC*SfC*SfC*SfU* | | CCUTTCTUIUCGAU | | OSSSSOOSSSnSOSSnR |
| | STeoTeofC*ST*Sb008U*SIn001SmUfC*SmG* | | | | |
| | SmAn001RmU | | | | |
| WV- | m5Ceon001Rm5Ceo*Sm5Ceo*SfA*SfG*Sm5CeomA* | 692 | CCCAGCAGCTUCAGUC | 693 | nRSSSSOSSOSnROSnR |
| 47623 | SfG*SfCTeo*SfUn001RmCfA*SfGn001RfUmC*SfC*SfC* | | CCUTTCTUIUCGAT | | OSSSSOOSSSnSOSSnR |
| | SfU*STeoTeofC*ST*Sb008U*SIn001SmUfC*SmG* | | | | |
| | SAeon001RTeo | | | | |
| WV- | mCn001RmC*SmC*SfA*SfG*Sm5CeomA*SfG*SfCTeo* | 694 | CCCAGCAGCTUCAGUC | 666 | nRSSSSOSSOSnROSnR |
| 47624 | SfUn001RmCfA*SmGn001RfUmC*SfC*SfC*SfU* | | CCUTTCTUIUCGAU | | OSSSSOOSSSnSOSSnR |
| | STeoTeofC*ST*Sb008U*SIn001SmUfC*SmG* | | | | |
| | SmAn001RmU | | | | |
| WV- | m5Ceon001Rm5Ceo*Sm5Ceo*SfA*SfG*Sm5CeomA* | 695 | CCCAGCAGCTUCAGUC | 693 | nRSSSSOSSOSnROSnR |
| 47625 | SfG*SfCTeo*SfUn001RmCfA*SmGn001RfUmC*SfC*SfC* | | CCUTTCTUIUCGAT | | OSSSSOOSSSnSOSSnR |
| | SfU*STeoTeofC*ST*Sb008U*SIn001SmUfC*SmG* | | | | |
| | SAeon001RTeo | | | | |
| WV- | mCn001RmC*SmC*SfA*SfG*Sm5CeomAfG*SfC* | 696 | CCCAGCAGCTUCAGUC | 565 | nRSSSSOOSSOnROSnR |
| 46457 | STeofUn001RmCfA*SfGn001RfUmC*SfC*SfC* | | CCUUTCTUIUCGAU | | OSSSnROOSSSnSOSSnR |
| | SfUn001RmUTeofC*ST*Sb008U*SIn001SmUfC*SmG* | | | | |
| | SmAn001RmU | | | | |
| WV- | m5Ceon001Rm5Ceo*Sm5Ceo*SfA*SfG*Sm5CeomAfG* | 697 | CCCAGCAGCTUCAGUC | 688 | nRSSSSOOSSOnROSnR |
| 47626 | SfC*STeofUn001RmCfA*SfGn001RfUmC*SfC*SfC* | | CCUUTCTUIUCGAT | | OSSSnROOSSSnSOSSnR |
| | SfUn001RmUTeofC*ST*Sb008U*SIn001SmUfC*SmG* | | | | |
| | SAeon001RTeo | | | | |
| WV- | mCn001RmC*SmC*SfA*SfG*Sm5CeomAfG*SfC* | 698 | CCCAGCAGCTUCAGUC | 565 | nRSSSSOOSSOnROSnR |
| 47627 | STeofUn001RmCfA*SmGn001RfUmC*SfC*SfC* | | CCUUTCTUIUCGAU | | OSSSnROOSSSnSOSSnR |
| | SfUn001RmUTeofC*ST*Sb008U*SIn001SmUfC*SmG* | | | | |
| | SmAn001RmU | | | | |
| WV- | m5Ceon001Rm5Ceo*Sm5Ceo*SfA*SfG*Sm5CeomAfG* | 699 | CCCAGCAGCTUCAGUC | 688 | nRSSSSOOSSOnROSnR |
| 47628 | SfC*STeofUn001RmCfA*SmGn001RfUmC*SfC*SfC* | | CCUUTCTUIUCGAT | | OSSSnROOSSSnSOSSnR |
| | SfUn001RmUTeofC*ST*Sb008U*SIn001SmUfC*SmG* | | | | |
| | SAeon001RTeo | | | | |
| WV- | m5Ceon001Rm5Ceo*Sm5Ceo*SfA*SfG*Sm5CeomA* | 700 | CCCAGCAGCTUCAGUC | 688 | nRSSSSOSSOSnROSnR |
| 47629 | SfG*SfCTeo*SfUn001RmCfA*SfGn001RfUmC*SfC*SfC* | | CCUUTCTUIUCGAT | | OSSSnRSOSSSnSOSSnR |
| | SfUn001RmU*STeofC*ST*Sb008U*SIn001SmUfC* | | | | |
| | SmG*SAeon001RTeo | | | | |
| WV- | mCn001RmC*SmC*SfA*SfG*Sm5CeomA*SfG*SfCTeo* | 701 | CCCAGCAGCTUCAGUC | 565 | nRSSSSOSSOSnROSnR |
| 47630 | SfUn001RmCfA*SmGn001RfUmC*SfC*SfC*SfUn001RmU* | | CCUUTCTUIUCGAU | | OSSSnRSOSSSnSOSSnR |
| | STeofC*ST*Sb008U*SIn001SmUfC*SmG* | | | | |
| | SmAn001RmU | | | | |
| WV- | m5Ceon001Rm5Ceo*Sm5Ceo*SfA*SfG*Sm5CeomA* | 702 | CCCAGCAGCTUCAGUC | 688 | nRSSSSOSSOSnROSnR |
| 47631 | SfG*SfCTeo*SfUn001RmCfA*SmGn001RfUmC*SfC*SfC* | | CCUUTCTUIUCGAT | | OSSSnRSOSSSnSOSSnR |
| | SfUn001RmU*STeofC*ST*Sb008U*SIn001SmUfC* | | | | |
| | SmG*SAeon001RTeo | | | | |
| WV- | Mod012L030*mCmCmCfAfGmCfAfGfCfUfUfCfAfGf | 703 | CCCAGCAGCUUCAGUC | 199 | XOOOOOOOOOOOOO |
| 47641 | UfCfCfCfUmUfUfCfUb001AImUfCmGmAmU | | CCUUUCUAIUCGAU | | OOOOOOOOOOOOOO |
| | | | | | OO |
| WV- | Mod012L030*mC*mC*mC*fA*fG*mC*fA*fG*fC*fU* | 704 | CCCAGCAGCUUCAGUC | 199 | XXXXXXXXXXXXXX |
| 47642 | fU*fC*fA*fG*fU*fC*fC*fC*fU*mU*fU*fC*fU*b001A | | CCUUUCUAIUCGAU | | XXXXXXXXXXXXXX |
| | *I*mU*fC*mG*mA*mU | | | | XX |
| WV- | Mod012L030*mCn001RmC*SmC*SfA*SfG*SmCfA* | 705 | CCCAGCAGCUUCAGUC | 199 | XnRSSSSOSSSSnRSOnR |
| 47643 | SfG*SfC*SfU*SfUn001RfC*SfAfGn001RfU*SfC*SfC* | | CCUUUCUAIUCGAU | | SSSSSOSSSSnSOSSnR |
| | SfC*SfU*SmUfU*SfC*SfU*Sb001A*SIn001SmUfC* | | | | |
| | SmG*SmAn001RmU | | | | |
| WV- | Mod012L030*mCn001RmC*SmC*SfA*SfG*SmCmA* | 706 | CCCAGCAGCUUCAGUC | 530 | XnRSSSSOSSOSnROSn |
| 47644 | SfG*SfCmU*SfUn001RmCfA*SfGn001RfUmC*SfC*SfC* | | CCUUUCTUIUCGAU | | ROSSSSOOSSSnSOSSnR |
| | SfU*SmUmUfC*ST*Sb008U*SIn001SmUfC*SmG* | | | | |
| | SmAn001RmU | | | | |
| WV- | Mod012L030*mCn001RmC*SmC*SfA*SfG*SmCmAfG* | 707 | CCCAGCAGCUUCAGUC | 530 | XnRSSSSOOSSOnROSn |
| 47645 | SfC*SmUfUn001RmCfA*SfGn001RfUmC*SfC*SfC* | | CCUUUCTUIUCGAU | | ROSSSnROOSSSnSOSSn |
| | SfUn001RmUmUfC*ST*Sb008U*SIn001SmUfC*SmG* | | | | R |
| | SmAn001RmU | | | | |
| WV- | Mod012L030*mCn001RmC*SmC*SfA*SfG*SmCmA* | 708 | CCCAGCAGCUUCAGUC | 530 | XnRSSSSOSSOSnROSn |
| 47646 | SfG*SfCmU*SfUn001RmCfA*SfGn001RfUmCmC*SfC* | | CCUUUCTUIUCGAU | | ROOSSSOOSSSnSOSSn |
| | SfU*SmUmUfC*ST*Sb008U*SIn001SmUfC*SmG* | | | | R |
| | SmAn001RmU | | | | |
| WV- | Mod012L030*mCn001RmC*SmC*SfA*SfG*SmCmAfG* | 709 | CCCAGCAGCUUCAGUC | 530 | XnRSSSSOOSOSnROSn |
| 47647 | SmCmU*SmUn001RmCfA*SfGn001RmUmCmC*SfC* | | CCUUUCTUIUCGAU | | ROOSSSOOSSSnSOSSn |
| | SfU*SmUmUfC*ST*Sb008U*SIn001SmUfC*SmG* | | | | R |
| | SmAn001RmU | | | | |
| WV- | Mod012L030*mCn001RmC*SmC*SfA*SfG*Sm5CeomA* | 710 | CCCAGCAGCTUCAGUC | 565 | XnRSSSSOSSOSnROSn |
| 47648 | SfG*SfCTeo*SfUn001RmCfA*SfGn001RfUmC*SfC* | | CCUUTCTUIUCGAU | | ROSSSSOOSSSnSOSSnR |
| | SfC*SfU*SmUTeofC*ST*Sb008U*SIn001SmUfC*SmG* | | | | |
| | SmAn001RmU | | | | |
| WV- | Mod001L001mCn001RmC*SmC*SfA*SfG*Sm5CeomA* | 711 | CCCAGCAGCUUCAGUC | 675 | OnRSSSSOSSOSnROSn |
| 48453 | SfG*SfCmU*SfUn001RmCfA*SfGn001RfUm5CeomC* | | CCUUTCTUIUCGAU | | ROOSSSOOSSSnSOSSn |
| | SfC*SfU*SmUTeofC*ST*Sb008U*SIn001SmUfC* | | | | R |
| | SmG*SmAn001RmU | | | | |
| WV- | Mod001L001mCn001RmC*SmC*SfA*SfG*Sm5CeomA* | 712 | CCCAGCAGCUUCAGUC | 675 | OnRSSSSOSSOSnROSn |
| 48454 | SfG*SfCmU*SfUn001RmCfA*SmGn001RfUm5CeomC* | | CCUUTCTUIUCGAU | | ROOSSSOOSSSnSOSSn |
| | SfC*SfU*SmUTeofC*ST*Sb008U*SIn001SmUfC* | | | | R |
| | SmG*SmAn001RmU | | | | |
| WV- | mCn001RmC*SmC*SfA*SfG*SmCmA*SfG*SfCmU* | 713 | CCCAGCAGCUUCAGUC | 530 | nRSSSSOSSOSnROSnR |
| 48455 | SfUn001RmCfA*SfGn001RfUmC*SfC*SfC*SfU*SmUmUfC* | | CCUUUCTUIUCGAU | | OSSSSOOSSSnSOSSnR |
| | ST*Sb008U*SIn003SmUfC*SmG*SmAn001RmU | | | | |
| WV- | mCn001RmC*SmC*SfA*SfG*SmCmA*SfG*SfCmU* | 714 | CCCAGCAGCUUCAGUC | 530 | nRSSSSOSSOSnROSnR |
| 48456 | SfUn001RmCfA*SfGn001RfUmC*SfC*SfC*SfU*SmUmUfC* | | CCUUUCTUIUCGAU | | OSSSSOOSSSnSOSSnR |
| | ST*Sb008U*SIn004SmUfC*SmG*SmAn001RmU | | | | |
| WV- | mCn001RmC*SmC*SfA*SfG*SmCmA*SfG*SfCmU* | 715 | CCCAGCAGCUUCAGUC | 530 | nRSSSSOSSOSnROSnR |
| 48457 | SfUn001RmCfA*SfGn001RfUmC*SfC*SfC*SfU*SmUmUfC* | | CCUUUCTUIUCGAU | | OSSSSOOSSSnSOSSnR |
| | ST*Sb008U*SIn008SmUfC*SmG*SmAn001RmU | | | | |
| WV- | mCn001RmC*SmC*SfA*SfG*SmCmA*SfG*SfCmU* | 716 | CCCAGCAGCUUCAGUC | 530 | nRSSSSOSSOSnROSnR |
| 48458 | SfUn001RmCfA*SfGn001RfUmC*SfC*SfC*SfU*SmUmUfC* | | CCUUUCTUIUCGAU | | OSSSSOOSSSnSOSSnR |
| | ST*Sb008U*SIn025SmUfC*SmG*SmAn001RmU | | | | |
| WV- | mCn001RmC*SmC*SfA*SfG*SmCmA*SfG*SfCmU* | 717 | CCCAGCAGCUUCAGUC | 530 | nRSSSSOSSOSnROSnR |
| 48459 | SfUn001RmCfA*SfGn001RfUmC*SfC*SfC*SfU*SmUmUfC* | | CCUUUCTUIUCGAU | | OSSSSOOSSSnSOSSnR |
| | ST*Sb008U*SIn026SmUfC*SmG*SmAn001RmU | | | | |
| WV- | Mod001L001mCn001RmC*SmC*SfA*SfG*Sm5CeoAeofG* | 718 | CCCAGCAGCTUCAGUC | 666 | OnRSSSSOOSSOnROSn |
| 49085 | SfC*STeofUn001RmCfA*SmGn001RfUmC*SfC* | | CCUTTCTUIUCGAU | | ROSSSnROOSSSnSOSSn |
| | SfC*SfUn001RTeoTeofC*ST*Sb008U*SIn001SmUfC* | | | | R |
| | SmG*SmAn001RmU | | | | |
| WV- | Mod001L001mCn001RmC*SmC*SfA*SfG*Sm5CeoAeofG* | 719 | CCCAGCAGCTUCAGUC | 666 | OnRSSSSOOSSOnROSn |
| 49086 | SfC*STeofUn001RmCfA*SmGn001RfUm5Ceo*SfC* | | CCUTTCTUIUCGAU | | ROSSSnROOSSSnSOSSn |
| | SfC*SfUn001RTeoTeofC*ST*Sb008U*SIn001SmUfC* | | | | R |
| | SmG*SmAn001RmU | | | | |
| WV- | Mod001L001mCn001RmC*SmC*SfA*SfG*Sm5CeoAeofG* | 720 | CCCAGCAGCTUCAGUC | 666 | OnRSSSSOOSOSnROSn |
| 49087 | SmCTeo*SmUn001RmCfA*SfGn001RmUmCmC* | | CCUTTCTUIUCGAU | | ROOSSSOOSSSnSOSSn |
| | SfC*SfU*STeoTeofC*ST*Sb008U*SIn001SmUfC* | | | | R |
| | SmG*SmAn001RmU | | | | |
| WV- | Mod001L001mCn001RmC*SmC*SfA*SfG*Sm5CeoAeofG* | 721 | CCCAGCAGCTUCAGUC | 666 | OnRSSSSOOSOSnROSn |
| 49088 | SmCTeo*SmUn001RmCfA*SfGn001RmUm5CeomC* | | CCUTTCTUIUCGAU | | ROOSSSOOSSSnSOSSn |
| | SfC*SfU*STeoTeofC*ST*Sb008U*SIn001SmUfC* | | | | R |
| | SmG*SmAn001RmU | | | | |
| WV- | Mod001L001mCn001RmC*SmC*SfA*SfG*Sm5CeoAeofG* | 722 | CCCAGCAGCTUCAGUC | 666 | OnRSSSSOOSOSnROSn |
| 49089 | Sm5CeoTeo*SmUn001Rm5CeofA* | | CCUTTCTUIUCGAU | | ROOSSSOOSSSnSOSSn |
| | SfGn001RmUm5Ceom5Ceo*SfC*SfU*STeoTeofC*ST* | | | | R |
| | Sb008U*SIn001SmUfC*SmG*SmAn001RmU | | | | |
| WV- | Mod001L001mCn001RmC*SmC*SfA*SfG*Sm5CeoAeofG* | 723 | CCCAGCAGCUUCAGUC | 675 | OnRSSSSOOSSOnROSn |
| 49090 | SfC*SmUmUn001RmCfA*SfGn001RfUm5Ceo*SfC* | | CCUUTCTUIUCGAU | | ROSSOnROOSSSnSOSS |
| | SmCmUn001RmUTeofC*ST*Sb008U*SIn001SmUfC* | | | | nR |
| | SmG*SmAn001RmU | | | | |
| WV- | Mod001L001mCn001RmC*SmC*SfA*SfG*Sm5CeoAeofG* | 724 | CCCAGCAGCTUCAGUC | 666 | OnRSSSSOOSSOnROSn |
| 49092 | SfC*STeofUn001RmCfA*SfGn001RfUm5Ceo*SfC* | | CCUTTCTUIUCGAU | | ROSSSnROOSSSnSOSSn |
| | SfC*SfUn001RTeoTeofC*ST*Sb008U*SIn001SmUfC* | | | | R |
| | SmG*SmAn001RmU | | | | |
| WV- | Mod001L001mCn001RmC*SmC*SfA*SfG*Sm5CeomA* | 725 | CCCAGCAGCTUCAGUC | 666 | OnRSSSSOSSOSnROSn |
| 49093 | SfG*SfCTeo*SfUn001RmCfA*SfGn001RfUm5Ceo* | | CCUTTCTUIUCGAU | | ROSSSSOOSSSnSOSSnR |
| | SfC*SfC*SfU*STeoTeofC*ST*Sb008U*SIn001SmUfC* | | | | |
| | SmG*SmAn001RmU | | | | |
| WV- | Mod001L001mCn001RmC*SmC*SfA*SfG*Sm5CeoAeofG* | 668 | CCCAGCAGCTUCAGUC | 666 | OnRSSSSOOSSOnROSn |
| 47606 | SfC*STeofUn001RmCfA*SfGn001RfUmC*SfC*SfC* | | CCUTTCTUIUCGAU | | ROSSSnROOSSSnSOSSn |
| | SfUn001RTeoTeofC*ST*Sb008U*SIn001SmUfC* | | | | R |
| | SmG*SmAn001RmU | | | | |
| WV- | mCn001RmC*SmC*SfA*SfG*Sm5CeoAeofG*SfC* | 726 | CCCAGCAGCTUCAGUC | 666 | nRSSSSOOSSOnROSnR |
| 46460 | STeofUn001RmCfA*SfGn001RfUmC*SfC*SfC* | | CCUTTCTUIUCGAU | | OSSSnROOSSSnSOSSnR |
| | SfUn001RTeoTeofC*ST*Sb008U*SIn001SmUfC*SmG* | | | | |
| | SmAn001RmU | | | | |
| WV- | L001mCn001RmC*SmC*SfA*SfG*Sm5CeoAeofG*SfC* | 727 | CCCAGCAGCTUCAGUC | 666 | OnRSSSSOOSSOnROSn |
| 49094 | STeofUn001RmCfA*SfGn001RfUmC*SfC*SfC* | | CCUTTCTUIUCGAU | | ROSSSnROOSSSnSOSSn |
| | SfUn001RTeoTeofC*ST*Sb008U*SIn001SmUfC*SmG* | | | | R |
| | SmAn001RmU | | | | |
| WV- | mCn001RmC*SmC*SfA*SfG*SmCmA*SfG*SfCmU* | 728 | CCCAGCAGCUUCAGUC | 530 | nRSSSSOSSOSnROSnR |
| 49095 | SfUn001RmCfA*SfGn001RfUmC*SfC*SfC*SfU*SmUmUfC* | | CCUUUCTUIUCGAU | | OSSSSOOSSSnSOSSnR |
| | ST*Sb008U*Sb014In001SmUfC*SmG* | | | | |
| | SmAn001RmU | | | | |
| WV- | mCn001RmC*SmC*SfA*SfG*SmCmA*SfG*SfCmU* | 729 | CCCAGCAGCUUCAGUC | 583 | nRSSSSOSSOSnROSnR |
| 49096 | SfUn001RmCfA*SfGn001RfUmC*SfC*SfC*SfU*SmUmUfC* | | CCUUUCTIIUCGAU | | OSSSSOOSSSnSOSSnR |
| | ST*Sb014I*SIn001SmUfC*SmG*SmAn001RmU | | | | |
| WV- | fCn001RfC*SfC*SfA*SfG*SfC*SfA*SfG*SfC*SfU* | 730 | CCCAGCAGCUUCAGUC | 359 | nRSSSSSSSSSSSSSSSSS |
| 44230 | SfU*SfC*SfA*SfG*SfU*SmC*SmC*SmC*SmU*SmU* | | CCUUUCUUIUCGAU | | SSSSSSnSSSSnR |
| | SmU*SmC*SfU*Sb010U*SIn001SmU*SmC*SmG* | | | | |
| | SmAn001RmU | | | | |
| WV- | fCn001RfC*SfC*SfA*SfG*SfC*SfA*SfG*SfC*SfU* | 731 | CCCAGCAGCUUCAGUC | 115 | nRSSSSSSSSSSSSSSSSS |
| 44231 | SfU*SfC*SfA*SfG*SfU*SmC*SmC*SmC*SmU*SmU* | | CCUUUCUCIUCGAU | | SSSSSSnSSSSnR |
| | SmU*SmC*SfU*Sb001C*SIn001SmU*SmC*SmG* | | | | |
| | SmAn001RmU | | | | |
| WV- | fCn001RfC*SfC*SfA*SfG*SfC*SfA*SfG*SfC*SfU* | 732 | CCCAGCAGCUUCAGUC | 733 | nRSSSSSSSSSSSSSSSSS |
| 44232 | SfU*SfC*SfA*SfG*SfU*SmC*SmC*SmC*SmU*SmU* | | CCUUUCUIUCGAU | | SSSSSSnSSSSnR |
| | SmU*SmC*SfU*SL034*SIn001SmU*SmC*SmG* | | | | |
| | SmAn001RmU | | | | |
| WV- | fCn001RfC*SfC*SfA*SfG*SfC*SfA*SfG*SfC*SfU* | 734 | CCCAGCAGCUUCAGUC | 115 | nRSSSSSSSSSSSSSSSSS |
| 44233 | USf*SfC*SfA*SfG*SfU*SmC*SmC*SmC*SmU*SmU* | | CCUUUCUCIUCGAU | | SSSSSXnSSSSnR |
| | SmU*SmC*SfU*Sb008C*In001SmU*SmC*SmG* | | | | |
| | SmAn001RmU | | | | |
| WV- | fCn001RfC*SfC*SfA*SfG*SfC*SfA*SfG*SfC*SfU* | 735 | CCCAGCAGCUUCAGUC | 359 | nRSSSSSSSSSSSSSSSSS |
| 44234 | SfU*SfC*SfA*SfG*SfU*SmC*SmC*SmC*SmU*SmU* | | CCUUUCUUIUCGAU | | SSSSSSnSSSSnR |
| | SmU*SmC*SfU*Sb011U*SIn001SmU*SmC*SmG* | | | | |
| | SmAn001RmU | | | | |
| WV- | fCn001RfC*SfC*SfA*SfG*SfC*SfA*SfG*SfC*SfU* | 736 | CCCAGCAGCUUCAGUC | 737 | nRSSSSSSSSSSSSSSSSS |
| 44235 | SfU*SfC*SfA*SfG*SfU*SmC*SmC*SmC*SmU*SmU* | | CCUUUCUGIUCGAU | | SSSSSXnSSSSnR |
| | SmU*SmC*SfU*Sb002G*In001SmU*SmC*SmG* | | | | |
| | SmAn001RmU | | | | |
| WV- | fCn001RfC*SfC*SfA*SfG*SfC*SfA*SfG*SfC*SfU* | 738 | CCCAGCAGCUUCAGUC | 359 | nRSSSSSSSSSSSSSSSSS |
| 44236 | SfU*SfC*SfA*SfG*SfU*SmC*SmC*SmC*SmU*SmU* | | CCUUUCUUIUCGAU | | SSSSSSnSSSSnR |
| | SmU*SmC*SfU*Sb012U*SIn001SmU*SmC*SmG* | | | | |
| | SmAn001RmU | | | | |
| WV- | fCn001RfC*SfC*SfA*SfG*SfC*SfA*SfG*SfC*SfU* | 739 | CCCAGCAGCUUCAGUC | 115 | nRSSSSSSSSSSSSSSSSS |
| 44237 | SfU*SfC*SfA*SfG*SfU*SmC*SmC*SmC*SmU*SmU* | | CCUUUCUCIUCGAU | | SSSSXSnSSSSnR |
| | SmU*SmC*SUsm04*C*SIn001SmU*SmC*SmG* | | | | |
| | SmAn001RmU | | | | |
| WV- | fCn001RfC*SfC*SfA*SfG*SfC*SfA*SfG*SfC*SfU* | 740 | CCCAGCAGCUUCAGUC | 115 | nRSSSSSSSSSSSSSSSSS |
| 44238 | SfU*SfC*SfA*SfG*SfU*SmC*SmC*SmC*SmU*SmU* | | CCUUUCUCIUCGAU | | SSSSSXnSSSSnR |
| | SmU*SmC*SfU*SCsm04*In001SmU*SmC*SmG* | | | | |
| | SmAn001RmU | | | | |
| WV- | fCn001RfC*SfC*SfA*SfG*SfC*SfA*SfG*SfC*SfU* | 741 | CCCAGCAGCUUCAGUC | 359 | nRSSSSSSSSSSSSSSSSS |
| 44239 | SfU*SfC*SfA*SfG*SfU*SmC*SmC*SmC*SmU*SmU* | | CCUUUCUUIUCGAU | | SSSSSXnSSSSnR |
| | SmU*SmC*SfU*SUsm04*In001SmU*SmC*SmG* | | | | |
| | SmAn001RmU | | | | |
| WV- | fCn001RfC*SfC*SfA*SfG*SfC*SfA*SfG*SfC*SfU* | 742 | CCCAGCAGCUUCAGUC | 115 | nRSSSSSSSSSSSSSSSSS |
| 44240 | SfU*SfC*SfA*SfG*SfU*SmC*SmC*SmC*SmU*SmU* | | CCUUUCUCIUCGAU | | SSSSXXnSSSSnR |
| | SmU*SmC*SUsm04*Csm04*In001SmU*SmC*SmG* | | | | |
| | SmAn001RmU | | | | |
| WV- | fCn001RfC*SfC*SfA*SfG*SfC*SfA*SfG*SfC*SfU* | 743 | CCCAGCAGCUUCAGUC | 359 | nRSSSSSSSSSSSSSSSSS |
| 44241 | SfU*SfC*SfA*SfG*SfU*SmC*SmC*SmC*SmU*SmU* | | CCUUUCUUIUCGAU | | SSSSXXnSSSSnR |
| | SmU*SmC*SUsm04*Usm04*In001SmU*SmC*SmG* | | | | |
| | SmAn001RmU | | | | |
| WV- | fCn001RfC*SfC*SfA*SfG*SfC*SfA*SfG*SfC*SfU* | 744 | CCCAGCAGCUUCAGUC | 115 | nRSSSSSSSSSSSSSSSSS |
| 42934 | SfU*SfC*SfA*SfG*SfU*SmC*SmC*SmC*SmU*SmU* | | CCUUUCUCIUCGAU | | SSSSSSnSSSSnR |
| | SmU*SmC*SfU*SrCsm13*SIn001SmU*SmC*SmG* | | | | |
| | SmAn001RmU | | | | |
| WV- | fCn001RfC*SfC*SfA*SfG*SfC*SfA*SfG*SfC*SfU* | 745 | CCCAGCAGCUUCAGUC | 199 | nRSSSSSSSSSSSSSSSSS |
| 44242 | SfU*SfC*SfA*SfG*SfU*SmC*SmC*SmC*SmU*SmU* | | CCUUUCUAIUCGAU | | SSSSSSnSSSSnR |
| | SmU*SmC*Sb008U*Sb001A*SIn001SmU*SmC*SmG* | | | | |
| | SmAn001RmU | | | | |
| WV- | fCn001RfC*SfC*SfA*SfG*SfC*SfA*SfG*SfC*SfU* | 746 | CCCAGCAGCUUCAGUC | 199 | nRSSSSSSSSSSSSSSSSS |
| 44243 | SfU*SfC*SfA*SfG*SfU*SmC*SmC*SmC*SmU*SmU* | | CCUUUCUAIUCGAU | | SSSSSSnSSSSnR |
| | SmU*SmC*Sb010U*Sb001A*SIn001SmU*SmC*SmG* | | | | |
| | SmAn001RmU | | | | |
| WV- | fCn001RfC*SfC*SfA*SfG*SfC*SfA*SfG*SfC*SfU* | 747 | CCCAGCAGCUUCAGUC | 406 | nRSSSSSSSSSSSSSSSSS |
| 44244 | SfU*SfC*SfA*SfG*SfU*SmC*SmC*SmC*SmU*SmU* | | CCUUUCCAIUCGAU | | SSSSSSnSSSSnR |
| | SmU*SmC*Sb001C*Sb001A*SIn001SmU*SmC*SmG* | | | | |
| | SmAn001RmU | | | | |
| WV- | fCn001RfC*SfC*SfA*SfG*SfC*SfA*SfG*SfC*SfU* | 748 | CCCAGCAGCUUCAGUC | 406 | nRSSSSSSSSSSSSSSSSS |
| 44362 | SfU*SfC*SfA*SfG*SfU*SmC*SmC*SmC*SmU*SmU* | | CCUUUCCAIUCGAU | | SSSSXSnSSSSnR |
| | SmU*SmC*Sb008C*b001A*SIn001SmU*SmC*SmG* | | | | |
| | SmAn001RmU | | | | |
| WV- | fCn001RfC*SfC*SfA*SfG*SfC*SfA*SfG*SfC*SfU* | 749 | CCCAGCAGCUUCAGUC | 199 | nRSSSSSSSSSSSSSSSSS |
| 44246 | SfU*SfC*SfA*SfG*SfU*SmC*SmC*SmC*SmU*SmU* | | CCUUUCUAIUCGAU | | SSSSSSnSSSSnR |
| | SmU*SmC*Sb011U*Sb001A*SIn001SmU*SmC*SmG* | | | | |
| | SmAn001RmU | | | | |
| WV- | fCn001RfC*SfC*SfA*SfG*SfC*SfA*SfG*SfC*SfU* | 750 | CCCAGCAGCUUCAGUC | 199 | nRSSSSSSSSSSSSSSSSS |
| 44247 | SfU*SfC*SfA*SfG*SfU*SmC*SmC*SmC*SmU*SmU* | | CCUUUCUAIUCGAU | | SSSSSSSSSSnR |
| | SmU*SmC*Sb012U*Sb001A*SIn001SmU*SmC*SmG* | | | | |
| | SmAn001RmU | | | | |
| WV- | mCn001RmC*SmC*SfA*SfG*SfC*SfA*SfG*SfC*SfU* | 751 | CCCAGCAGCUUCAGUC | 199 | nRSSSSSSSSSSSSSSSSS |
| 44248 | SfU*SfC*SfA*SfG*SfU*SfC*SfC*SfC*SfU*SfU*SfU* | | CCUUUCUAIUCGAU | | SSSSSSnSSSSnR |
| | SfC*Sb008U*Sb001A*SIn001SmU*SfC*SmG* | | | | |
| | SmAn001RmU | | | | |
| WV- | mCn001RmC*SmC*SfA*SfG*SfC*SfA*SfG*SfC*SfU* | 752 | CCCAGCAGCUUCAGUC | 199 | nRSSSSSSSSSSSSSSSSS |
| 44249 | SfU*SfC*SfA*SfG*SfU*SfC*SfC*SfC*SfU*SfU*SfU* | | CCUUUCUAIUCGAU | | SSSSSSnSSSSnR |
| | SfC*Sb010U*Sb001A*SIn001SmU*SfC*SmG* | | | | |
| | SmAn001RmU | | | | |
| WV- | mCn001RmC*SmC*SfA*SfG*SfC*SfA*SfG*SfC*SfU* | 753 | CCCAGCAGCUUCAGUC | 406 | nRSSSSSSSSSSSSSSSSS |
| 44250 | SfU*SfC*SfA*SfG*SfU*SfC*SfC*SfC*SfU*SfU*SfU* | | CCUUUCCAIUCGAU | | SSSSSSnSSSSnR |
| | SfC*Sb001C*Sb001A*SIn001SmU*SfC*SmG* | | | | |
| | SmAn001RmU | | | | |
| WV- | mCn001RmC*SmC*SfA*SfG*SfC*SfA*SfG*SfC*SfU* | 754 | CCCAGCAGCUUCAGUC | 406 | nRSSSSSSSSSSSSSSSSS |
| 44363 | SfU*SfC*SfA*SfG*SfU*SfC*SfC*SfC*SfU*SfU*SfU* | | CCUUUCCAIUCGAU | | SSSSXSnSSSSnR |
| | SfC*Sb008C*b001A*SIn001SmU*SfC*SmG* | | | | |
| | SmAn001RmU | | | | |
| WV- | mCn001RmC*SmC*SfA*SfG*SfC*SfA*SfG*SfC*SfU* | 755 | CCCAGCAGCUUCAGUC | 406 | nRSSSSSSSSSSSSSSSSS |
| 44251 | SfU*SfC*SfA*SfG*SfU*SfC*SfC*SfC*SfU*SfU*SfU* | | CCUUUCCAIUCGAU | | SSSSSSnSSSSnR |
| | SfC*Sb008C*Sb001A*SIn001SmU*SfC*SmG* | | | | |
| | SmAn001RmU | | | | |
| WV- | mCn001RmC*SmC*SfA*SfG*SfC*SfA*SfG*SfC*SfU* | 756 | CCCAGCAGCUUCAGUC | 199 | nRSSSSSSSSSSSSSSSSS |
| 44252 | SfU*SfC*SfA*SfG*SfU*SfC*SfC*SfC*SfU*SfU*SfU* | | CCUUUCUAIUCGAU | | SSSSSSnSSSSnR |
| | SfC*Sb011U*Sb001A*SIn001SmU*SfC*SmG* | | | | |
| | SmAn001RmU | | | | |
| WV- | mCn001RmC*SmC*SfA*SfG*SfC*SfA*SfG*SfC*SfU* | 757 | CCCAGCAGCUUCAGUC | 199 | nRSSSSSSSSSSSSSSSSS |
| 44253 | SfU*SfC*SfA*SfG*SfU*SfC*SfC*SfC*SfU*SfU*SfU* | | CCUUUCUAIUCGAU | | SSSSSSnSSSSnR |
| | SfC*Sb012U*Sb001A*SIn001SmU*SfC*SmG* | | | | |
| | SmAn001RmU | | | | |
| WV- | mCn001RmC*SmC*SfA*SfG*SfC*SfA*SfG*SfC*SfU* | 758 | CCCAGCAGCUUCAGUC | 512 | nRSSSSSSSSSSSSSSSSS |
| 44377 | SfU*SfC*SfA*SfG*SfU*SfC*SfC*SfC*SfU*SfU*SfU* | | CCUUUCTAIUCGAU | | SSSSSSnSSSSnR |
| | SfC*STsm11*Sb001A*SIn001SmU*SfC*SmG* | | | | |
| | SmAn001RmU | | | | |
| WV- | mCn001RmC*SmC*SfA*SfG*SfC*SfA*SfG*SfC*SfU* | 759 | CCCAGCAGCUUCAGUC | 115 | nRSSSSSSSSSSSSSSSSS |
| 44378 | SfU*SfC*SfA*SfG*SfU*SfC*SfC*SfC*SfU*SfU*SfU* | | CCUUUCUCIUCGAU | | SSSSSSnSSSSnR |
| | SfC*SfU*SCsm11*SIn001SmU*SfC*SmG* | | | | |
| | SmAn001RmU | | | | |
| WV- | mCn001RmC*SmC*SfA*SfG*SfC*SfA*SfG*SfC*SfU* | 760 | CCCAGCAGCUUCAGUC | 402 | nRSSSSSSSSSSSSSSSSS |
| 44379 | SfU*SfC*SfA*SfG*SfU*SfC*SfC*SfC*SfU*SfU*SfU* | | CCUUUCUAGUCGAU | | SSSSSSSSSSnR |
| | SfC*SfU*Sb001A*SGsm11*SmU*SfC*SmG* | | | | |
| | SmAn001RmU | | | | |
| WV- | mCn001RmC*SmC*SfA*SfG*SfC*SfA*SfG*SfC*SfU* | 761 | CCCAGCAGCUUCAGUC | 518 | nRSSSSSSSSSSSSSSSSS |
| 44380 | SfU*SfC*SfA*SfG*SfU*SfC*SfC*SfC*SfU*SfU*SfU* | | CCUUUCTCIUCGAU | | SSSSSSnSSSSnR |
| | SfC*STsm11*SCsm11*SIn001SmU*SfC*SmG* | | | | |
| | SmAn001RmU | | | | |
| WV- | mCn001RmC*SmC*SfA*SfG*SfC*SfA*SfG*SfC*SfU* | 762 | CCCAGCAGCUUCAGUC | 512 | nRSSSSSSSSSSSSSSSSS |
| 44381 | SfU*SfC*SfA*SfG*SfU*SfC*SfC*SfC*SfU*SfU*SfU* | | CCUUUCTAIUCGAU | | SSSSSSnSSSSnR |
| | SfC*STsm12*Sb001A*SIn001SmU*SfC*SmG* | | | | |
| | SmAn001RmU | | | | |
| WV- | mCn001RmC*SmC*SfA*SfG*SfC*SfA*SfG*SfC*SfU* | 763 | CCCAGCAGCUUCAGUC | 115 | nRSSSSSSSSSSSSSSSSS |
| 44382 | SfU*SfC*SfA*SfG*SfU*SfC*SfC*SfC*SfU*SfU*SfU* | | CCUUUCUCIUCGAU | | SSSSSSnSSSSnR |
| | SfC*SfU*SCsm12*SIn001SmU*SfC*SmG* | | | | |
| | SmAn001RmU | | | | |
| WV- | mCn001RmC*SmC*SfA*SfG*SfC*SfA*SfG*SfC*SfU* | 764 | CCCAGCAGCUUCAGUC | 402 | nRSSSSSSSSSSSSSSSSS |
| 44383 | SfU*SfC*SfA*SfG*SfU*SfC*SfC*SfC*SfU*SfU*SfU* | | CCUUUCUAGUCGAU | | SSSSSSSSSSnR |
| | SfC*SfU*Sb001A*SGsm12*SmU*SfC*SmG* | | | | |
| | SmAn001RmU | | | | |
| WV- | mCn001RmC*SmC*SfA*SfG*SfC*SfA*SfG*SfC*SfU* | 765 | CCCAGCAGCUUCAGUC | 518 | nRSSSSSSSSSSSSSSSSS |
| 44384 | SfU*SfC*SfA*SfG*SfU*SfC*SfC*SfC*SfU*SfU*SfU* | | CCUUUCTCIUCGAU | | SSSSSSnSSSSnR |
| | SfC*STsm12*SCsm12*SIn001SmU*SfC*SmG* | | | | |
| | SmAn001RmU | | | | |
| WV- | mCn001RmC*SmC*SfA*SfG*SfC*SfA*SfG*SfC*SfU* | 766 | CCCAGCAGCUUCAGUC | 115 | nRSSSSSSSSSSSSSSSSS |
| 44385 | SfU*SfC*SfA*SfG*SfU*SfC*SfC*SfC*SfU*SfU*SfU* | | CCUUUCUCIUCGAU | | SSSSSSnSSSSnR |
| | SfC*SfU*Sb009Csm11*SIn001SmU*SfC*SmG* | | | | |
| | SmAn001RmU | | | | |
| WV- | mCn001RmC*SmC*SfA*SfG*SfC*SfA*SfG*SfC*SfU* | 767 | CCCAGCAGCUUCAGUC | 115 | nRSSSSSSSSSSSSSSSSS |
| 44386 | SfU*SfC*SfA*SfG*SfU*SfC*SfC*SfC*SfU*SfU*SfU* | | CCUUUCUCIUCGAU | | SSSSSSnSSSSnR |
| | SfC*SfU*Sb009Csm12*SIn001SmU*SfC*SmG* | | | | |
| | SmAn001RmU | | | | |
| WV- | mCn001RmC*SmC*SfA*SfG*SfC*SfA*SfG*SfC*SfU* | 768 | CCCAGCAGCUUCAGUC | 769 | nRSSSSSSSSSSSSSSSSS |
| 44387 | SfU*SfC*SfA*SfG*SfU*SfC*SfC*SfC*SfU*SfU*SfU* | | CCUUUCAIUCGAU | | SSSSSSnSSSSnR |
| | SfC*SL010*Sb001A*SIn001SmU*SfC*SmG* | | | | |
| | SmAn001RmU | | | | |
| WV- | mCn001RmC*SmC*SfA*SfG*SfC*SfA*SfG*SfC*SfU* | 770 | CCCAGCAGCUUCAGUC | 733 | nRSSSSSSSSSSSSSSSSS |
| 44388 | SfU*SfC*SfA*SfG*SfU*SfC*SfC*SfC*SfU*SfU*SfU* | | CCUUUCUIUCGAU | | SSSSSSnSSSSnR |
| | SfC*SfU*SL010*SIn001SmU*SfC*SmG* | | | | |
| | SmAn001RmU | | | | |
| WV- | mCn001RmC*SmC*SfA*SfG*SfC*SfA*SfG*SfC*SfU* | 771 | CCCAGCAGCUUCAGUC | 772 | nRSSSSSSSSSSSSSSSSS |
| 44389 | SfU*SfC*SfA*SfG*SfU*SfC*SfC*SfC*SfU*SfU*SfU* | | CCUUUCUAUCGAU | | SSSSSSnRSSSnR |
| | SfC*SfU*Sb001A*SL010n001RmU*SfC*SmG* | | | | |
| | SmAn001RmU | | | | |
| WV- | mCn001RmC*SmC*SfA*SfG*SfC*SfA*SfG*SfC*SfU* | 773 | CCCAGCAGCUUCAGUC | 115 | nRSSSSSSSSSSSSSSSSS |
| 44390 | SfU*SfC*SfA*SfG*SfU*SfC*SfC*SfC*SfU*SfU*SfU* | | CCUUUCUCIUCGAU | | SSSSSSnSSSSnR |
| | SfC*SfU*SC*SIn001SmU*SfC*SmG*SmAn001RmU | | | | |
| WV- | mCn001RmC*SmC*SfA*SfG*SfCmA*SfG*SfCmU* | 774 | CCCAGCAGCUUCAGUC | 199 | nRSSSSOSSOSnROOnR |
| 44276 | SfUn001RmCfAfGn001RfUmC*SfC*SfC* | | CCUUUCUAIUCGAU | | OSSSnROOSSSnSOSSnR |
| | SfUn001RfUmUfC*SfU*Sb001A*SIn001SmUfC*SmG* | | | | |
| | SmAn001RmU | | | | |
| WV- | mCn001RmC*SmC*SfA*SfG*SfCmA*SfG* | 775 | CCCAGCAGCUUCAGUC | 199 | nRSSSSOSSOOnROOnR |
| 44277 | SfCmUfUn001RmCfAfGn001RfUmCfC*SfC* | | CCUUUCUAIUCGAU | | 0OSSnROOSSSnSOSSn |
| | SfUn001RfUmUfC*SfU*Sb001A*SIn001SmUfC*SmG* | | | | R |
| | SmAn001RmU | | | | |
| WV- | fCn001RfC*SfC*SfA*SfG*SfC*SfA*SfG*SfC*SfU* | 163 | CCCAGCAGCUUCAGUC | 115 | nRSSSSSSSSSSSSSSSSS |
| 42028 | SfU*SfC*SfA*SfG*SfU*SmC*SmC*SmC*SmU*SmU* | | CCUUUCUCIUCGAU | | SSSSSSnSSSSnR |
| | SmU*SmC*SfU*SC*SIn001SmU*SmC*SmG*SmAn001 | | | | |
| | RmU | | | | |
| WV- | fCn002RfC*SfC*SfA*SfG*SfC*SfA*SfG*SfC*SfU* | 776 | CCCAGCAGCUUCAGUC | 115 | nRSSSSSSSSSSSSSSSSS |
| 44349 | SfU*SfC*SfA*SfG*SfU*SmC*SmC*SmC*SmU*SmU* | | CCUUUCUCIUCGAU | | SSSSSSSSSSnR |
| | SmU*SmC*SfU*SC*SIn001SmU*SmC*SmG* | | | | |
| | SmAn001RmU | | | | |
| WV- | fCn006RfC*SfC*SfA*SfG*SfC*SfA*SfG*SfC*SfU* | 777 | CCCAGCAGCUUCAGUC | 115 | nRSSSSSSSSSSSSSSSSS |
| 44350 | SfU*SfC*SfA*SfG*SfU*SmC*SmC*SmC*SmU*SmU* | | CCUUUCUCIUCGAU | | SSSSSSnSSSSnR |
| | SmU*SmC*SfU*SC*SIn001SmU*SmC*SmG* | | | | |
| | SmAn001RmU | | | | |
| WV- | fCn020RfC*SfC*SfA*SfG*SfC*SfA*SfG*SfC*SfU* | 778 | CCCAGCAGCUUCAGUC | 115 | nRSSSSSSSSSSSSSSSSS |
| 44351 | SfU*SfC*SfA*SfG*SfU*SmC*SmC*SmC*SmU*SmU* | | CCUUUCUCIUCGAU | | SSSSSSnSSSSnR |
| | SmU*SmC*SfU*SC*SIn001SmU*SmC*SmG* | | | | |
| | SmAn001RmU | | | | |
| WV- | fCn001RfC*SfC*SfA*SfG*SfC*SfA*SfG*SfC*SfU* | 779 | CCCAGCAGCUUCAGUC | 115 | nRSSSSSSSSSSSSSSSSS |
| 44352 | SfU*SfC*SfA*SfG*SfU*SmC*SmC*SmC*SmU*SmU* | | CCUUUCUCIUCGAU | | SSSSSSnSSSSnR |
| | SmU*SmC*SfU*SC*SIn006SmU*SmC*SmG* | | | | |
| | SmAn001RmU | | | | |
| WV- | Mod001L001mCn001RmC*SmC*SfA*SfG*SmCmA*SfG* | 780 | CCCAGCAGCUUCAGUC | 530 | OnRSSSSOSSOSnROSn |
| 46312 | SfCmU*SfUn001RmCfA*SfGn001RfUmC*SfC*SfC* | | CCUUUCTUIUCGAU | | ROSSSSOOSSSnSOSSnR |
| | SfU*SmUmUfC*ST*Sb008U*SIn001SmUfC*SmG* | | | | |
| | SmAn001RmU | | | | |
| WV- | Mod001L001mCn001RmC*SmC*SfA*SfG*SmCmA*SfG* | 781 | CCCAGCAGCUUCAGUC | 530 | OnRSSSSOSSOSnROSn |
| 46318 | SfCmU*SfUn001RmCfA*SfGn001RfUmC*SfC*SfC* | | CCUUUCTUIUCGAU | | ROSSSnROOSSSnSOSSn |
| | SfUn001RmUmUfC*ST*Sb008U*SIn001SmUfC*SmG* | | | | R |
| | SmAn001RmU | | | | |
| WV- | Mod001L001mCn001RmC*SmC*SfA*SfG*SmCmAfG* | 782 | CCCAGCAGCUUCAGUC | 530 | OnRSSSSOOSOSnROSn |
| 46319 | SfCmU*SfUn001RmCfA*SfGn001RfUmC*SfC* | | CCUUUCTUIUCGAU | | ROSSOnROOSSSnSOSS |
| | SmCfUn001RmUmUfC*ST*Sb008U*SIn001SmUfC*SmG* | | | | nR |
| | SmAn001RmU | | | | |
| WV- | Mod001L001mCn001RmC*SmC*SfA*SfG*SfCmA*SfG* | 783 | CCCAGCAGCUUCAGUC | 530 | OnRSSSSOSSOSnROSn |
| 46320 | SmCmU*SfUn001RmCfA*SfGn001RfUmC*SfC*SfC* | | CCUUUCTUIUCGAU | | ROSSSnRSOSSSnSOSSn |
| | SfUn001RfU*SmUfC*ST*Sb008U*SIn001SmUfC* | | | | R |
| | SmG*SmAn001RmU | | | | |
| WV- | Mod001L001mCn001RmC*SmC*SfA*SfG*SfCmA*SfG* | 784 | CCCAGCAGCUUCAGUC | 530 | OnRSSSSOSSOSnROSn |
| 46321 | SfCmU*SfUn001RmCfA*SfGn001RfUmC*SmCfC* | | CCUUUCTUIUCGAU | | ROSOSnRSOSSSnSOSSn |
| | SfUn001RfU*SmUfC*ST*Sb008U*SIn001SmUfC*SmG* | | | | R |
| | SmAn001RmU | | | | |
| WV- | Mod001L001mCn001RmC*SmC*SfA*SfG*SmCmAfG* | 785 | CCCAGCAGCUUCAGUC | 530 | OnRSSSSOOSSSnRSOn |
| 46322 | SfC*SfU*SfUn001RfC*SfAfGn001RfUmCmCfC*SfU* | | CCUUUCTUIUCGAU | | ROOOSSOSSSSnSOSSn |
| | SmUmU*SfC*ST*Sb008U*SIn001SmUfC*SmG* | | | | |
| | SmAn001RmU | | | | |
| WV- | Mod001L001mCn001RmC*SmC*SfA*SfG*SfCmA*SfG* | 786 | CCCAGCAGCUUCAGUC | 530 | OnRSSSSOSSOSnROSn |
| 46323 | SfCmU*SfUn001RmCfA*SfGn001RfUmC*SfC*SfC* | | CCUUUCTUIUCGAU | | ROSSSSSOSSSnSOSSnR |
| | SfU*SfU*SmUfC*ST*Sb008U*SIn001SmUfC*SmG* | | | | |
| | SmAn001RmU | | | | |

TABLE 1G
Example oligonucleotides and/or compositions that target KEAP1.

| | | SEQ | | SEQ | |
|---|---|---|---|---|---|
| | | ID | | ID | |
| ID | Description | NO | Base Sequence | NO | Stereochemistry/ Linkage |
| WV- | fGn001RfG*SfU*SfG*SfA*SfC*SfA*SfG*SfC*SfC* | 787 | GGUGACAGCCACGCCC | 788 | nRSSSSSSSSSSSSSSSSS |
| 47580 | SfA*SfC*SfG*SfC*SfC*SmC*SmA*SmC*SmC*SmC* | | ACCCCACUCCGGCC | | SSSSSSnRSSSnR |
| | SmC*SmA*SC*Sb008U*SCn001RmC*SfG*SmG* | | | | |
| | SmCn001RmC | | | | |
| WV- | fCn001RfU*SfG*SfU*SfC*SfC*SfA*SfG*SfG*SfA* | 789 | CUGUCCAGGAACGUGU | 790 | nRSSSSSSSSSSSSSSSSS |
| 47567 | SfA*SfC*SfG*SfU*SfG*SmU*SmG*SmA*SmC*SmC* | | GACCAUCAUAGCCU | | SSSSSSSnRSSnR |
| | SmA*SmU*SmC*SA*Sb008U*SAn001RmG*SfC* | | | | |
| | SmCn001RmU | | | | |
| WV- | fUn001RfG*SfU*SfC*SfC*SfA*SfG*SfG*SfA*SfA* | 791 | UGUCCAGGAACGUGUG | 792 | nRSSSSSSSSSSSSSSSSS |
| 47579 | SfC*SfG*SfU*SfG*SfU*SmG*SmA*SmC*SmC*SmA* | | ACCAUCAUAGCCUC | | SSSSSSnRSSSnR |
| | SmU*SmC*SA*Sb008U*SAn001RmG*SfC*SmC* | | | | |
| | SmUn001RmC | | | | |
| WV- | fCn001RfU*SfG*SfU*SfU*SfC*SfA*SfG*SfC*SfU* | 793 | CUGUUCAGCUGGUCCU | 794 | nRSSSSSSSSSSSSSSSSS |
| 47565 | SfG*SfG*SfU*SfC*SfC*SmU*SmG*SmA*SmC*SmC* | | GACCAUCAUAGCCC | | SSSSSSSnRSSnR |
| | SmA*SmU*SmC*SA*Sb008U*SAn001RmG*SfC* | | | | |
| | SmCn001RmC | | | | |
| WV- | fUn001RfG*SfU*SfU*SfC*SfA*SfG*SfC*SfU*SfG* | 795 | UGUUCAGCUGGUCCUG | 796 | nRSSSSSSSSSSSSSSSSS |
| 47577 | SfG*SfU*SfC*SfC*SfU*SmG*SmA*SmC*SmC*SmA* | | ACCAUCAUAGCCCC | | SSSSSSnRSSSnR |
| | SmU*SmC*SA*Sb008U*SAn001RmG*SfC*SmC* | | | | |
| | SmCn001RmC | | | | |
| WV- | fCn001RfA*SfG*SfG*SfA*SfC*SfG*SfC*SfA*SfG* | 797 | CAGGACGCAGACGCCU | 798 | nRSSSSSSSSSSSSSSSSS |
| 47576 | SfA*SfC*SfG*SfC*SfC*SmU*SmG*SmC*SmC*SmC* | | GCCCCGCUTCGGAU | | SSSSSSnRSSSnR |
| | SmC*SmG*SC*Sb008U*STn001RmC*SfG*SmG* | | | | |
| | SmAn001RmU | | | | |
| WV- | fCn001RfA*SfU*SfA*SfC*SfC*SfU*SfC*SfU*SfC* | 799 | CAUACCUCUCCACACU | 800 | nRSSSSSSSSSSSSSSSSS |
| 47575 | SfC*SfA*SfC*SfA*SfC*SmU*SmG*SmU*SmU*SmG* | | GUUGUGGUIGAUGC | | SSSSSSnSSSSnR |
| | SmU*SmG*SG*Sb008U*SIn001SmG*SfA*SmU* | | | | |
| | SmGn001RmC | | | | |
| WV- | fAn001RfC*SfU*SfC*SfA*SfC*SfC*SfU*SfC*SfU* | 801 | ACUCACCUCUCCACAC | 802 | nRSSSSSSSSSSSSSSSSS |
| 47570 | SfC*SfC*SfA*SfC*SfA*SmC*SmU*SmG*SmU*SmU* | | UGUUGUGGUIGAUG | | SSSSSSSnSSSnR |
| | SmG*SmU*SmG*SG*Sb008U*SIn001SmG*SfA* | | | | |
| | SmUn001RmG | | | | |
| WV- | fGn001RfA*SfG*SfU*SfC*SfG*SfG*SfU*SfG*SfU* | 803 | GAGUCGGUGUUGCCGU | 804 | nRSSSSSSSSSSSSSSSSS |
| 47562 | SfU*SfG*SfC*SfC*SfG*SmU*SmC*SmG*SmG*SmG* | | CGGGCGAGUTGUUC | | SSSSSSSnRSSnR |
| | SmC*SmG*SmA*SG*Sb008U*STn001RmG*SfU* | | | | |
| | SmUn001RmC | | | | |
| WV- | fAn001RfG*SfU*SfC*SfG*SfG*SfU*SfG*SfU*SfU* | 805 | AGUCGGUGUUGCCGUC | 806 | nRSSSSSSSSSSSSSSSSS |
| 47561 | SfG*SfC*SfC*SfG*SfU*SmC*SmG*SmG*SmG*SmC* | | GGGCGAGTUIUUCC | | SSSSSSSnSSSnR |
| | SmG*SmA*SmG*ST*Sb008U*SIn001SmU*SfU* | | | | |
| | SmCn001RmC | | | | |
| WV- | fAn001RfG*SfU*SfC*SfG*SfG*SfU*SfG*SfU*SfU* | 807 | AGUCGGUGUUGCCGUC | 808 | nRSSSSSSSSSSSSSSSSS |
| 47574 | SfG*SfC*SfC*SfG*SfU*SmC*SmG*SmG*SmG*SmC* | | GGGCGAGUTGUUCC | | SSSSSSnRSSSnR |
| | SmG*SmA*SG*Sb008U*STn001RmG*SfU*SmU* | | | | |
| | SmCn001RmC | | | | |
| WV- | fGn001RfU*SfC*SfG*SfG*SfU*SfG*SfU*SfU*SfG* | 809 | GUCGGUGUUGCCGUCG | 810 | nRSSSSSSSSSSSSSSSSS |
| 47573 | SfC*SfC*SfG*SfU*SfC*SmG*SmG*SmG*SmC*SmG* | | GGCGAGTUIUUCCU | | SSSSSSnSSSSnR |
| | SmA*SmG*ST*Sb008U*SIn001SmU*SfU*SmC* | | | | |
| | SmCn001RmU | | | | |
| WV- | fUn001RfG*SfU*SfU*SfG*SfC*SfC*SfG*SfU*SfC* | 811 | UGUUGCCGUCGGGCGA | 812 | nRSSSSSSSSSSSSSSSSS |
| 47560 | SfG*SfG*SfG*SfC*SfG*SmA*SmG*SmU*SmU*SmG* | | GUUGUUCCUICCGC | | SSSSSSSnSSSnR |
| | SmU*SmU*SmC*SC*Sb008U*SIn001SmC*SfC* | | | | |
| | SmGn001RmC | | | | |
| WV- | fAn001RfG*SfG*SfU*SfA*SfG*SfC*SfU*SfG*SfA* | 813 | AGGUAGCUGAGCGACU | 814 | nRSSSSSSSSSSSSSSSSS |
| 47559 | SfG*SfC*SfG*SfA*SfC*SmU*SmG*SmU*SmC*SmG* | | GUCGGAAGUAGCCG | | SSSSSSSnRSSnR |
| | SmG*SmA*SmA*SG*Sb008U*SAn001RmG*SfC* | | | | |
| | SmCn001RmG | | | | |

TABLE 1H
Example oligonucleotides and/or compositions that target NRF2.

| | | SEQ | | SEQ | |
|---|---|---|---|---|---|
| | | ID | | ID | |
| ID | Description | NO | Base Sequence | NO | Stereochemistry/ Linkage |
| WV- | fGn001RfG*SfG*SfC*SfU*SfG*SfG*SfC*SfU*SfG* | 815 | GGGCUGGCUGAAUUGG | 816 | nRSSSSSSSSSSSSSSSSS |
| 47558 | SfA*SfA*SfU*SfU*SfG*SmG*SmG*SmA*SmG*SmA* | | GAGAAATUCACCUG | | SSSSSSnRSSSnR |
| | SmA*SmA*ST*Sb008U*SCn001RmA*SfC*SmC* | | | | |
| | SmUn001RmG | | | | |
| WV- | fGn001RfC*SfU*SfG*SfA*SfA*SfU*SfU*SfG*SfG* | 817 | GCUGAAUUGGGAGAAA | 818 | nRSSSSSSSSSSSSSSSSS |
| 47548 | SfG*SfA*SfG*SfA*SfA*SmA*SmU*SmU*SmC*SmA* | | UUCACCUGUCUCUU | | SSSSSSSnRSSnR |
| | SmC*SmC*SmU*SG*Sb008U*SCn001RmU*SfC* | | | | |
| | SmUn001RmU | | | | |
| WV- | fUn001RfG*SfA*SfA*SfU*SfU*SfG*SfG*SfG*SfA* | 819 | UGAAUUGGGAGAAAUU | 820 | nRSSSSSSSSSSSSSSSSS |
| 47547 | SfG*SfA*SfA*SfA*SfU*SmU*SmC*SmA*SmC*SmC* | | CACCUGUCUCUUCA | | SSSSSSSnRSSnR |
| | SmU*SmG*SmU*SC*Sb008U*SCn001RmU*SfU* | | | | |
| | SmCn001RmA | | | | |
| WV- | fGn001RfA*SfA*SfU*SfU*SfG*SfG*SfG*SfA*SfG* | 821 | GAAUUGGGAGAAAUUC | 822 | nRSSSSSSSSSSSSSSSSS |
| 47556 | SfA*SfA*SfA*SfU*SfU*SmC*SmA*SmC*SmC*SmU* | | ACCUGUCUCUUCAU | | SSSSSSnRSSSnR |
| | SmG*SmU*SC*Sb008U*SCn001RmU*SfU*SmC* | | | | |
| | SmAn001RmU | | | | |
| WV- | fAn001RfU*SfU*SfG*SfG*SfG*SfA*SfG*SfA*SfA* | 823 | AUUGGGAGAAAUUCAC | 824 | nRSSSSSSSSSSSSSSSSS |
| 47546 | SfA*SfU*SfU*SfC*SfA*SmC*SmC*SmU*SmG*SmU* | | CUGUCUCTUCAUCU | | SSSSSSSnRSSnR |
| | SmC*SmU*SmC*ST*Sb008U*SCn001RmA*SfU* | | | | |
| | SmCn001RmU | | | | |
| WV- | fGn001RfG*SfA*SfG*SfA*SfA*SfA*SfU*SfU*SfC* | 825 | GGAGAAAUUCACCUGU | 826 | nRSSSSSSSSSSSSSSSSS |
| 47554 | SfA*SfC*SfC*SfU*SfG*SmU*SmC*SmU*SmC*SmU* | | CUCUUCAUCUAGUU | | SSSSSSnRSSSnR |
| | SmU*SmC*SA*Sb008U*SCn001RmU*SfA*SmG* | | | | |
| | SmUn001RmU | | | | |
| WV- | fGn001RfG*SfG*SfA*SfG*SfA*SfA*SfA*SfU*SfU* | 827 | GGGAGAAAUUCACCUG | 828 | nRSSSSSSSSSSSSSSSSS |
| 47545 | SfC*SfA*SfC*SfC*SfU*SmG*SmU*SmC*SmU*SmC* | | UCUCUUCAUCUAGU | | SSSSSSSnRSSnR |
| | SmU*SmU*SmC*SA*Sb008U*SCn001RmU*SfA* | | | | |
| | SmGn001RmU | | | | |
| WV- | fAn001RfU*SfA*SfC*SfU*SfU*SfC*SfU*SfC*SfG* | 829 | AUACUUCUCGACUUAC | 830 | nRSSSSSSSSSSSSSSSSS |
| 47553 | SfA*SfC*SfU*SfU*SfA*SmC*SmU*SmC*SmC*SmA* | | UCCAAGAUCUAUAU | | SSSSSSnRSSSnR |
| | SmA*SmG*SA*Sb008U*SCn001RmU*SfA*SmU* | | | | |
| | SmAn001RmU | | | | |
| WV- | fCn001RfU*SfU*SfC*SfU*SfC*SfG*SfA*SfC*SfU* | 831 | CUUCUCGACUUACUCC | 832 | nRSSSSSSSSSSSSSSSSS |
| 47543 | SfU*SfA*SfC*SfU*SfC*SmC*SmA*SmA*SmG*SmA* | | AAGAUCUAUAUCUU | | SSSSSSSnRSSnR |
| | SmU*SmC*SmU*SA*Sb008U*SAn001RmU*SfC* | | | | |
| | SmUn001RmU | | | | |
| WV- | fCn001RfU*SfC*SfG*SfA*SfC*SfU*SfU*SfA*SfC* | 833 | CUCGACUUACUCCAAG | 834 | nRSSSSSSSSSSSSSSSSS |
| 47551 | SfU*SfC*SfC*SfA*SfA*SmG*SmA*SmU*SmC*SmU* | | AUCUAUAUCUUGCC | | SSSSSSnRSSSnR |
| | SmA*SmU*SA*Sb008U*SCn001RmU*SfU*SmG* | | | | |
| | SmCn001RmC | | | | |
| WV- | fUn001RfC*SfU*SfC*SfG*SfA*SfC*SfU*SfU*SfA* | 835 | UCUCGACUUACUCCAA | 836 | nRSSSSSSSSSSSSSSSSS |
| 47542 | SfC*SfU*SfC*SfC*SfA*SmA*SmG*SmA*SmU*SmC* | | GAUCUAUAUCUUGC | | SSSSSSSnRSSnR |
| | SmU*SmA*SmU*SA*Sb008U*SCn001RmU*SfU* | | | | |
| | SmGn001RmC | | | | |
| WV- | fGn001RfA*SfC*SfU*SfU*SfA*SfC*SfU*SfC*SfC* | 837 | GACUUACUCCAAGAUC | 838 | nRSSSSSSSSSSSSSSSSS |
| 47550 | SfA*SfA*SfG*SfA*SfU*SmC*SmU*SmA*SmU*SmA* | | UAUAUCTUGCCUCC | | SSSSSSnRSSSnR |
| | SmU*SmC*ST*Sb008U*SGn001RmC*SfC*SmU* | | | | |
| | SmCn001RmC | | | | |
| WV- | fCn001RfG*SfA*SfC*SfU*SfU*SfA*SfC*SfU*SfC* | 839 | CGACUUACUCCAAGAU | 840 | nRSSSSSSSSSSSSSSSSS |
| 47541 | SfC*SfA*SfA*SfG*SfA*SmU*SmC*SmU*SmA*SmU* | | CUAUAUCTUGCCUC | | SSSSSSSnRSSnR |
| | SmA*SmU*SmC*ST*Sb008U*SGn001RmC*SfC* | | | | |
| | SmUn001RmC | | | | |

TABLE 1I
Example oligonucleotides and/or compositions that target UGP2.

| | | SEQ | | SEQ | |
|---|---|---|---|---|---|
| | | ID | | ID | |
| ID | Description | NO | Base Sequence | NO | Stereochemistry/ Linkage |
| WV- | Mod001L001mAn001RmU*SmC*SfC*SfA*SfC*SmUfG* | 841 | AUCCACUGUGGCACCC | 2 | OnRSSSSSOSSSSnRSOn |
| 48161 | SfU*SfG*SfG*SfCn001RfA*SfCfCn001RfC*SfA*SfG* | | AGAUUAUCCAUGUU | | RSSSSSOSSSSnROSnR |
| | SfA*SfU*SmUfA*SfU*SfC*SC*SAn001RmUfG* | | | | |
| | SmUn001RmU | | | | |
| WV- | Mod001L001mAn001RmU*SmC*SfC*SfA*SfC*SfUmG* | 842 | AUCCACUGUGGCACCC | 2 | OnRSSSSSOSSOSnROSn |
| 48162 | SfU*SfGmG*SfCn001RmAfC*SfCn001RfCmA*SfG* | | AGAUUAUCCAUGUU | | ROSSSnRSOSSSnROSnR |
| | SfA*SfUn001RfU*SmAfU*SfC*SC*SAn001RmUfG* | | | | |
| | SmUn001RmU | | | | |
| WV- | Mod001L001mAn001RmU*SmC*SfC*SfA*SmCmU* | 843 | AUCCACUGUGGCACCC | 2 | OnRSSSSOSSOSnROSn |
| 48164 | SfG*SfUmG*SfGn001RmCfA*SfCn001RfCmC*SfA*SfG* | | AGAUUAUCCAUGUU | | ROSSSSOOSSSSnROSn |
| | SfA*SmUmUfA*SfU*SC*SC*SAn001RmUfG* | | | | R |
| | SmUn001RmU | | | | |
| WV- | mAn001RmU*SmC*SfC*SfA*SfC*SmUfG*SfU*SfG* | 844 | AUCCACUGUGGCACCC | 2 | nRSSSSSOSSSSnRSOnR |
| 47046 | SfG*SfCn001RfA*SfCfCn001RfC*SfA*SfG*SfA*SfU* | | AGAUUAUCCAUGUU | | SSSSSOSSSSnROSnR |
| | SmUfA*SfU*SfC*SC*SAn001RmUfG*SmUn001RmU | | | | |
| WV- | mAn001RmU*SmC*SfC*SfA*SmCmUfG*SfU* | 845 | AUCCACUGUGGCACCC | 2 | nRSSSSOOSSOnROSnR |
| 47053 | SmGfGn001RmCfA*SfCn001RfCmC*SfA*SfG* | | AGAUUAUCCAUGUU | | OSSSnROOSSSSnROSn |
| | SfAn001RmUmUfA*SfU*SC*SC*SAn001RmUfG* | | | | R |
| | SmUn001RmU | | | | |
| WV- | mAn001RmU*SmC*SfC*SfA*SfCmU*SfG*SfUmG* | 846 | AUCCACUGUGGCACCC | 2 | nRSSSSOSSOSnROSnR |
| 47049 | SfGn001RmCfA*SfCn001RfCmC*SfA*SfG* | | AGAUUAUCCAUGUU | | OSSSnRSOSSSSnROSnR |
| | SfAn001RfU*SmUfA*SfU*SfC*SC*SAn001RmUfG* | | | | |
| | SmUn001RmU | | | | |
| WV- | mAn001RmU*SmC*SfC*SfA*SfC*SfU*SfG*SfU*SfG* | 847 | AUCCACUGUGGCACCC | 2 | nRSSSSSSSSSSSSSSSSS |
| 47044 | SfG*SfC*SfA*SfC*SfC*SfC*SfA*SfG*SfA*SfU*SfU* | | AGAUUAUCCAUGUU | | SSSSSSSnRSSnR |
| | SfA*SfU*SfC*SC*SAn001RmU*SfG*SmUn001RmU | | | | |
| WV- | fAn001RfU*SfC*SfC*SfA*SfC*SfU*SfG*SfU*SfG* | 848 | AUCCACUGUGGCACCC | 2 | nRSSSSSSSSSSSSSSSSS |
| 47043 | SfG*SfC*SfA*SfC*SfC*SmC*SmA*SmG*SmA*SmU* | | AGAUUAUCCAUGUU | | SSSSSSSnRSSnR |
| | SmU*SmA*SmU*SfC*SC*SAn001RmU*SmG* | | | | |
| | SmUn001RmU | | | | |
| WV- | mAn001RmU*SmC*SfC*SfA*SfC*SfU*SfG*SfU*SfG* | 847 | AUCCACUGUGGCACCC | 2 | nRSSSSSSSSSSSSSSSSS |
| 47044 | SfG*SfC*SfA*SfC*SfC*SfC*SfA*SfG*SfA*SfU*SfU* | | AGAUUAUCCAUGUU | | SSSSSSSnRSSnR |
| | SfA*SfU*SfC*SC*SAn001RmU*SfG*SmUn001RmU | | | | |
| WV- | mAn001RmU*SmC*SfC*SfA*SfC*SfU*SfG*SfU*SfG* | 849 | AUCCACUGUGGCACCC | 2 | nRSSSSSSSSSSSSSSSSS |
| 47045 | SfG*SfC*SfA*SfC*SfC*SfC*SfA*SfG*SfA*SfU*SfU* | | AGAUUAUCCAUGUU | | SSSSSSSnRSSnR |
| | SfA*SfU*SfC*SC*SAn001RmU*SmG*SmUn001RmU | | | | |
| WV- | mAn001RmU*SmC*SfC*SfA*SfC*SmUfG*SfU*SfG* | 844 | AUCCACUGUGGCACCC | 2 | nRSSSSSOSSSSnRSOnR |
| 47046 | SfG*SfCn001RfA*SfCfCn001RfC*SfA*SfG*SfA*SfU* | | AGAUUAUCCAUGUU | | SSSSSOSSSSnROSnR |
| | SmUfA*SfU*SfC*SC*SAn001RmUfG*SmUn001RmU | | | | |
| WV- | mAn001RmU*SmC*SfC*SfA*SfC*SfUmG*SfU*SfGmG* | 850 | AUCCACUGUGGCACCC | 2 | nRSSSSSOSSOSnROSnR |
| 47047 | SfCn001RmAfC*SfCn001RfCmA*SfG*SfA* | | AGAUUAUCCAUGUU | | OSSSnRSOSSSnROSnR |
| | SfUn001RfU*SmAfU*SfC*SC*SAn001RmUfG* | | | | |
| | SmUn001RmU | | | | |
| WV- | mAn001RmU*SmC*SfC*SfA*SmCfU*SfG*SfU*SfG* | 851 | AUCCACUGUGGCACCC | 2 | nRSSSSOSSSSnRSOnRS |
| 47048 | SfGn001RfC*SfAfCn001RfC*SfC*SfA*SfG*SfA* | | AGAUUAUCCAUGUU | | SSSSOSSSSSnROSnR |
| | SmUfU*SfA*SfU*SfC*SC*SAn001RmUfG*SmUn001RmU | | | | |
| WV- | mAn001RmU*SmC*SfC*SfA*SfCmU*SfG*SfUmG* | 846 | AUCCACUGUGGCACCC | 2 | nRSSSSOSSOSnROSnR |
| 47049 | SfGn001RmCfA*SfCn001RfCmC*SfA*SfG* | | AGAUUAUCCAUGUU | | OSSSnRSOSSSSnROSnR |
| | SfAn001RfU*SmUfA*SfU*SfC*SC*SAn001RmUfG* | | | | |
| | SmUn001RmU | | | | |
| WV- | mAn001RmU*SmC*SfC*SfA*SfC*SmUmG*SfU*SfGmG* | 852 | AUCCACUGUGGCACCC | 2 | nRSSSSSOSSOSnROSnR |
| 47050 | SfCn001RmAfC*SfCn001RfCmA*SfG*SfA*SfU* | | AGAUUAUCCAUGUU | | OSSSSOOSSSnROSnR |
| | SmUmAfU*SC*SC*SAn001RmUfG*SmUn001RmU | | | | |
| WV- | mAn001RmU*SmC*SfC*SfA*SfC*SmUmGfU*SfG* | 853 | AUCCACUGUGGCACCC | 2 | nRSSSSSOOSSOnROSn |
| 47051 | SmGfCn001RmAfC*SfCn001RfCmA*SfG*SfA* | | AGAUUAUCCAUGUU | | ROSSSnROOSSSnROSn |
| | SfUn001RmUmAfU*SC*SC*SAn001RmUfG*SmUn001RmU | | | | R |
| WV- | mAn001RmU*SmC*SfC*SfA*SmCmU*SfG*SfUmG* | 854 | AUCCACUGUGGCACCC | 2 | nRSSSSOSSOSnROSnR |
| 47052 | SfGn001RmCfA*SfCn001RfCmC*SfA*SfG*SfA* | | AGAUUAUCCAUGUU | | OSSSSOOSSSSnROSnR |
| | SmUmUfA*SfU*SC*SC*SAn001RmUfG*SmUn001RmU | | | | |
| WV- | mAn001RmU*SmC*SfC*SfA*SmCmUfG*SfU* | 845 | AUCCACUGUGGCACCC | 2 | nRSSSSOOSSOnROSnR |
| 47053 | SmGfGn001RmCfA*SfCn001RfCmC*SfA*SfG* | | AGAUUAUCCAUGUU | | OSSSnROOSSSSnROSn |
| | SfAn001RmUmUfA*SfU*SC*SC*SAn001RmUfG* | | | | R |
| | SmUn001RmU | | | | |
| WV- | fUn001RfC*SfC*SfA*SfC*SfU*SfG*SfU*SfG*SfG* | 855 | UCCACUGUGGCACCCA | 856 | nRSSSSSSSSSSSSSSSSS |
| 44560 | SfC*SfA*SfC*SfC*SfC*SmA*SmG*SmA*SmU*SmU* | | GAUUAUCCAUGUUA | | SSSSSSnRSSSnR |
| | SmA*SmU*SfC*SC*SAn001RmU*SmG*SmU* | | | | |
| | SmUn001RmA | | | | |
| WV- | mUn001RmC*SmC*SfA*SfC*SfU*SfG*SfU*SfG*SfG* | 857 | UCCACUGUGGCACCCA | 856 | nRSSSSSSSSSSSSSSSSS |
| 44561 | SfC*SfA*SfC*SfC*SfC*SfA*SfG*SfA*SfU*SfU*SfA* | | GAUUAUCCAUGUUA | | SSSSSSnRSSSnR |
| | SfU*SfC*SC*SAn001RmU*SfG*SmU*SmUn001RmA | | | | |
| WV- | mUn001RmC*SmC*SfA*SfC*SfU*SfG*SfU*SfG*SfG* | 858 | UCCACUGUGGCACCCA | 859 | nRSSSSSSSSSSSSSSSSS |
| 44562 | SfC*SfA*SfC*SfC*SfC*SfA*SfG*SfA*SfU*SfU*SfA* | | GAUUAUCUAUGUUA | | SSSSSSnRSSSnR |
| | SfU*SfC*Sb008U*SAn001RmU*SfG*SmU* | | | | |
| | SmUn001RmA | | | | |
| WV- | mUn001RmC*SmC*SfA*SfC*SfU*SfG*SfU*SfG*SfG* | 858 | UCCACUGUGGCACCCA | 859 | nRSSSSSSSSSSSSSSSSS |
| 44562 | SfC*SfA*SfC*SfC*SfC*SfA*SfG*SfA*SfU*SfU*SfA* | | GAUUAUCUAUGUUA | | SSSSSSnRSSSnR |
| | SfU*SfC*Sb008U*SAn001RmU*SfG*SmU* | | | | |
| | SmUn001RmA | | | | |
| WV- | mUn001RmC*SmC*SfA*SfC*SmUfG*SfU*SfG*SfG* | 860 | UCCACUGUGGCACCCA | 856 | nRSSSSOSSSSnRSOnRS |
| 44563 | SfCn001RfA*SfCfCn001RfC*SfA*SfG*SfA*SfU* | | GAUUAUCCAUGUUA | | SSSSOSSSSnROSSnR |
| | SmUfA*SfU*SfC*SC*SAn001RmUfG*SmU* | | | | |
| | SmUn001RmA | | | | |
| WV- | mUn001RmC*SmC*SfA*SfC*SfUmG*SfU*SfGmG* | 861 | UCCACUGUGGCACCCA | 859 | nRSSSSOSSOSnROSnR |
| 44564 | SfCn001RmAfC*SfCn001RfCmA*SfG*SfA* | | GAUUAUCUAUGUUA | | OSSSnRSOSSSnROSSnR |
| | SfUn001RfU*SmAfU*SfC*Sb008U*SAn001RmUfG*SmU* | | | | |
| | SmUn001RmA | | | | |
| WV- | mUn001RmC*SmC*SfA*SfC*SfUmG*SfU*SfGmG* | 862 | UCCACUGUGGCACCCA | 859 | nRSSSSOSSOSSOSSSOS |
| 44565 | SfC*SmAfC*SfC*SfC*SmAfG*SfA*SfU*SfU*SmAfU* | | GAUUAUCUAUGUUA | | SSSOSSSnROSSnR |
| | SfC*Sb008U*SAn001RmUfG*SmU*SmUn001RmA | | | | |

TABLE 1J
Example oligonucleotides and/or compositions that target ACTB.

| | | SEQ | | SEQ | |
|---|---|---|---|---|---|
| | | ID | | ID | |
| ID | Description | NO | Base Sequence | NO | Stereochemistry/ Linkage |
| WV- | fAn001RfC*SfA*SfU*SfA*SfA*SfU*SfU*SfU*SfA* | 863 | ACAUAAUUUACACGAA | 7 | nRSSSSSSSSSSSSSSSSS |
| 47054 | SfC*SfA*SfC*SfG*SfA*SmA*SmA*SmG*SmC*SmA* | | AGCAAUGCCAUCAC | | SSSSSSSnRSSnR |
| | SmA*SmU*SmG*SfC*SC*SAn001RmU*SmC* | | | | |
| | SmAn001RmC | | | | |
| WV- | mAn001RmC*SmA*SfU*SfA*SfA*SfU*SfU*SfU*SfA | 864 | ACAUAAUUUACACGAA | 7 | nRSSSSSSSSSSSSSSSSS |
| 47055 | *SfC*SfA*SfC*SfG*SfA*SfA*SfA*SfG*SfC*SfA*SfA | | AGCAAUGCCAUCAC | | SSSSSSSnRSSnR |
| | *SfU*SfG*SfC*SC*SAn001RmU*SfC*SmAn001RmC | | | | |
| WV- | mAn001RmC*SmA*SfU*SfA*SfA*SfU*SfU*SfU*SfA | 865 | ACAUAAUUUACACGAA | 7 | nRSSSSSSSSSSSSSSSSS |
| 47056 | *SfC*SfA*SfC*SfG*SfA*SfA*SfA*SfG*SfC*SfA* | | AGCAAUGCCAUCAC | | SSSSSSSnRSSnR |
| | SfA*SfU*SfG*SfC*SC*SAn001RmU*SmC*SmAn001RmC | | | | |
| WV- | mAn001RmC*SmA*SfU*SfA*SfA*SmUfU*SfU*SfA* | 866 | ACAUAAUUUACACGAA | 7 | nRSSSSSOSSSSnRSOnR |
| 47057 | SfC*SfAn001RfC*SfGfAn001RfA*SfA*SfG*SfC*SfA* | | AGCAAUGCCAUCAC | | SSSSSOSSSSnROSnR |
| | SmAfU*SfG*SfC*SC*SAn001RmUfC*SmAn001RmC | | | | |
| WV- | mAn001RmC*SmA*SfU*SfA*SfA*SfUmU*SfU*SfAmC* | 867 | ACAUAAUUUACACGAA | 7 | nRSSSSSOSSOSnROSnR |
| 47058 | SfAn001RmCfG*SfAn001RfAmA*SfG*SfC* | | AGCAAUGCCAUCAC | | OSSSnRSOSSSnROSnR |
| | SfAn001RfA*SmUfG*SfC*SC*SAn001RmUfC* | | | | |
| | SmAn001RmC | | | | |
| WV- | fCn001RfA*SfU*SfA*SfA*SfU*SfU*SfU*SfA*SfC* | 868 | CAUAAUUUACACGAAA | 869 | nRSSSSSSSSSSSSSSSSS |
| 44554 | SfA*SfC*SfG*SfA*SfA*SmA*SmG*SmC*SmA*SmA* | | GCAAUGCCAUCACC | | SSSSSSnRSSSnR |
| | SmU*SmG*SfC*SC*SAn001RmU*SmC*SmA*SmCn001RmC | | | | |
| WV- | mCn001RmA*SmU*SfA*SfA*SfU*SfU*SfU*SfA*SfC* | 870 | CAUAAUUUACACGAAA | 869 | nRSSSSSSSSSSSSSSSSS |
| 44555 | SfA*SfC*SfG*SfA*SfA*SfA*SfG*SfC*SfA*SfA*SfU* | | GCAAUGCCAUCACC | | SSSSSSnRSSSnR |
| | SfG*SfC*SC*SAn001RmU*SfC*SmA*SmCn001RmC | | | | |
| WV- | mCn001RmA*SmU*SfA*SfA*SfU*SfU*SfU*SfA*SfC* | 871 | CAUAAUUUACACGAAA | 872 | nRSSSSSSSSSSSSSSSSS |
| 44556 | SfA*SfC*SfG*SfA*SfA*SfA*SfG*SfC*SfA*SfA*SfU* | | GCAAUGCUAUCACC | | SSSSSSnRSSSnR |
| | SfG*SfC*Sb008U*SAn001RmU*SfC*SmA*SmCn001RmC | | | | |
| WV- | mCn001RmA*SmU*SfA*SfA*SmUfU*SfU*SfA*SfC* | 873 | CAUAAUUUACACGAAA | 869 | nRSSSSOSSSSnRSOnRS |
| 44557 | SfAn001RfC*SfGfAn001RfA*SfA*SfG*SfC*SfA* | | GCAAUGCCAUCACC | | SSSSOSSSSnROSSnR |
| | SmAfU*SfG*SfC*SC*SAn001RmUfC*SmA*SmCn001RmC | | | | |
| WV- | mCn001RmA*SmU*SfA*SfA*SfUmU*SfU*SfAmC* | 874 | CAUAAUUUACACGAAA | 869 | nRSSSSOSSOSnROSnR |
| 44558 | SfAn001RmCfG*SfAn001RfAmA*SfG*SfC* | | GCAAUGCCAUCACC | | OSSSnRSOSSSnROSSnR |
| | SfAn001RfA*SmUfG*SfC*SC*SAn001RmUfC*SmA* | | | | |
| | SmCn001RmC | | | | |
| WV- | mCn001RmA*SmU*SfA*SfA*SfUmU*SfU*SfAmC*SfA* | 875 | CAUAAUUUACACGAAA | 869 | nRSSSSOSSOSSOSSSOS |
| 44559 | SmCfG*SfA*SfA*SmAfG*SfC*SfA*SfA*SmUfG* | | GCAAUGCCAUCACC | | SSSOSSSnROSSnR |
| | SfC*SC*SAn001RmUfC*SmA*SmCn001RmC | | | | |

TABLE 1K
Example oligonucleotides and/or compositions that target EEEF.

| | | SEQ | | SEQ | |
|---|---|---|---|---|---|
| | | ID | | ID | |
| ID | Description | NO | Base Sequence | NO | Stereochemistry/ Linkage |
| WV- | fCn001RfC*SfA*SfA*SfC*SfC*SfA*SfG*SfA*SfA* | 876 | CCAACCAGAAAUUGGC | 877 | nRSSSSSSSSSSSSSSSSS |
| 47059 | SfA*SfU*SfU*SfG*SfG*SmC*SmA*SmC*SmA*SmA* | | ACAAAUGCCACUGU | | SSSSSSSnRSSnR |
| | SmA*SmU*SmG*SfC*SC*SAn001RmC*SmU*SmGn001RmU | | | | |
| WV- | mCn001RmC*SmA*SfA*SfC*SfC*SfA*SfG*SfA*SfA* | 878 | CCAACCAGAAAUUGGC | 877 | nRSSSSSSSSSSSSSSSSS |
| 47060 | SfA*SfU*SfU*SfG*SfG*SfC*SfA*SfC*SfA*SfA*SfA* | | ACAAAUGCCACUGU | | SSSSSSSnRSSnR |
| | SfU*SfG*SfC*SC*SAn001RmC*SfU*SmGn001RmU | | | | |
| WV- | mCn001RmC*SmA*SfA*SfC*SfC*SfA*SfG*SfA*SfA* | | CCAACCAGAAAUUGGC | | nRSSSSSSSSSSSSSSSSS |
| 47061 | SfA*SfU*SfU*SfG*SfG*SfC*SfA*SfC*SfA*SfA*SfA* | | ACAAAUGCCACUGU | 877 | SSSSSSSnRSSnR |
| | SfU*SfG*SfC*SC*SAn001RmC*SmU*SmGn001RmU | 879 | | | |

TABLE 1L
Example oligonucleotides and/or compositions that target SRSF.

| | | SEQ | | SEQ | |
|---|---|---|---|---|---|
| | | ID | | ID | |
| ID | Description | NO | Base Sequence | NO | Stereochemistry/ Linkage |
| WV- | fUn001RfA*SfA*SfU*SfC*SfC*SfA*SfU*SfC*SfU* | 880 | UAAUCCAUCUCUUCAG | 881 | nRSSSSSSSSSSSSSSSSS |
| 44551 | SfC*SfU*SfU*SfC*SfA*SmG*SmA*SmU*SmA*SmU* | | AUAUGUCCACAGAA | | SSSSSSnRSSSnR |
| | SmG*SmU*SfC*SC*SAn001RmC*SmA*SmG* | | | | |
| | SmAn001RmA | | | | |
| WV- | mUn001RmA*SmA*SfU*SfC*SfC*SfA*SfU*SfC*SfU* | 882 | UAAUCCAUCUCUUCAG | 881 | nRSSSSSSSSSSSSSSSSS |
| 44552 | SfC*SfU*SfU*SfC*SfA*SfG*SfA*SfU*SfA*SfU*SfG* | | AUAUGUCCACAGAA | | SSSSSSnRSSSnR |
| | SfU*SfC*SC*SAn001RmC*SfA*SmG*SmAn001RmA | | | | |
| WV- | mUn001RmA*SmA*SfU*SfC*SfC*SfA*SfU*SfC*SfU* | 883 | UAAUCCAUCUCUUCAG | 884 | nRSSSSSSSSSSSSSSSSS |
| 44553 | SfC*SfU*SfU*SfC*SfA*SfG*SfA*SfU*SfA*SfU*SfG* | | AUAUGUCUACAGAA | | SSSSSSnRSSSnR |
| | SfU*SfC*Sb008U*SAn001RmC*SfA*SmG* | | | | |
| | SmAn001RmA | | | | |
| WV- | fUn001RfU*SfA*SfA*SfU*SfC*SfC*SfA*SfU*SfC* | 885 | UUAAUCCAUCUCUUCA | 886 | nRSSSSSSSSSSSSSSSSS |
| 47062 | SfU*SfC*SfU*SfU*SfC*SmA*SmG*SmA*SmU*SmA* | | GAUAUGUCCACAGA | | SSSSSSSnRSSnR |
| | SmU*SmG*SmU*SfC*SC*SAn001RmC*SmA* | | | | |
| | SmGn001RmA | | | | |
| WV- | mUn001RmU*SmA*SfA*SfU*SfC*SfC*SfA*SfU*SfC* | 887 | UUAAUCCAUCUCUUCA | 886 | nRSSSSSSSSSSSSSSSSS |
| 47063 | SfU*SfC*SfU*SfU*SfC*SfA*SfG*SfA*SfU*SfA*SfU* | | GAUAUGUCCACAGA | | SSSSSSSnRSSnR |
| | SfG*SfU*SfC*SC*SAn001RmC*SfA*SmGn001RmA | | | | |
| WV- | mUn001RmU*SmA*SfA*SfU*SfC*SfC*SfA*SfU*SfC* | 888 | UUAAUCCAUCUCUUCA | 886 | nRSSSSSSSSSSSSSSSSS |
| 47064 | SfU*SfC*SfU*SfU*SfC*SfA*SfG*SfA*SfU*SfA*SfU* | | GAUAUGUCCACAGA | | SSSSSSSnRSSnR |
| | SfG*SfU*SfC*SC*SAn001RmC*SmA*SmGn001RmA | | | | |
| WV- | mUn001RmU*SmA*SfA*SfU*SfC*SfC*SfA*SfU*SfC* | 889 | UUAAUCCAUCUCUUCA | 890 | nRSSSSSSSSSSSSSSSSS |
| 48183 | SfU*SfC*SfU*SfU*SfC*SfA*SfG*SfA*SfU*SfA*SfU* | | GAUAUGUCAACAGA | | SSSSSSSnRSSnR |
| | SfG*SfU*SfC*Sb001A*SAn001RmC*SfA* | | | | |
| | SmGn001RmA | | | | |
| WV- | mUn001RmU*SmA*SfA*SfU*SfC*SfC*SfA*SfU*SfC* | 891 | UUAAUCCAUCUCUUCA | 892 | nRSSSSSSSSSSSSSSSSS |
| 48184 | SfU*SfC*SfU*SfU*SfC*SfA*SfG*SfA*SfU*SfA*SfU* | | GAUAUGUCUACAGA | | SSSSSSSnRSSnR |
| | SfG*SfU*SfC*Sb008U*SAn001RmC*SfA* | | | | |
| | SmGn001RmA | | | | |
| WV- | mUn001RmU*SmA*SfA*SfU*SfC*SfC*SfA*SfU*SfC* | 893 | UUAAUCCAUCUCUUCA | 886 | nRSSSSSSSSSSSSSSSSS |
| 48185 | SfU*SfC*SfU*SfU*SfC*SfA*SfG*SfA*SfU*SfA*SfU* | | GAUAUGUCCACAGA | | SSSSSSSnRSSnR |
| | SfG*SfU*SC*SC*SAn001RmC*SfA*SmGn001RmA | | | | |

TABLE 1M
Example oligonucleotides and/or compositions that target EEF1A1.

| | | SEQ | | SEQ | |
|---|---|---|---|---|---|
| | | ID | | ID | |
| ID | Description | NO | Base Sequence | NO | Stereochemistry/ Linkage |
| WV- | fCn001RfA*SfA*SfC*SfC*SfA*SfG*SfA*SfA*SfA* | 894 | CAACCAGAAAUUGGCA | 895 | nRSSSSSSSSSSSSSSSSS |
| 44548 | SfU*SfU*SfG*SfG*SfC*SmA*SmC*SmA*SmA*SmA* | | CAAAUGCCACUGUG | | SSSSSSnRSSSnR |
| | SmU*SmG*SfC*SC*SAn001RmC*SmU*SmG* | | | | |
| | SmUn001RmG | | | | |
| WV- | mCn001RmA*SmA*SfC*SfC*SfA*SfG*SfA*SfA*SfA* | 896 | CAACCAGAAAUUGGCA | 895 | nRSSSSSSSSSSSSSSSSS |
| 44549 | SfU*SfU*SfG*SfG*SfC*SfA*SfC*SfA*SfA*SfA*SfU* | | CAAAUGCCACUGUG | | SSSSSSnRSSSnR |
| | SfG*SfC*SC*SAn001RmC*SfU*SmG*SmUn001RmG | | | | |
| WV- | mCn001RmA*SmA*SfC*SfC*SfA*SfG*SfA*SfA*SfA* | 897 | CAACCAGAAAUUGGCA | 898 | nRSSSSSSSSSSSSSSSSS |
| 44550 | SfU*SfU*SfG*SfG*SfC*SfA*SfC*SfA*SfA*SfA*SfU* | | CAAAUGCUACUGUG | | SSSSSSnRSSSnR |
| | SfG*SfC*Sb008U*SAn001RmC*SfU*SmG* | | | | |
| | SmUn001RmG | | | | |

TABLE 1N
Example oligonucleotides and/or compositions that target UGP2.

| | | SEQ | | SEQ | |
|---|---|---|---|---|---|
| | | ID | | ID | Stereochemistry/ |
| ID | Description | NO | Base Sequence | NO | Linkage |
| WV- | Mod001L001fA*SfU*SfCn001RfC*SfA*SfCn001RfU* | 899 | AUCCACUGUGGCACCC | 2 | OSSnRSSnRSSSSSSSnR |
| 44002 | SfG*SfU*SfG*SfG*SfC*SfA*SfCn001RfCmC*SmAmG* | | AGAUUAUCCAUGUU | | OSOSSSSSSSSnRSSnR |
| | SmA*SmU*SmU*SmA*SmU*SfC*SC*SAn001RmU* | | | | |
| | SmG*SmUn001RmU | | | | |
| WV- | Mod001L001fA*SfU*SfCn001RfC*SfA*SfCn001RfU* | 900 | AUCCACUGUGGCACCC | 2 | OSSnRSSnRSSSSSSSnR |
| 44003 | SfG*SfU*SfG*SfG*SfC*SfA*SfCn001RfCmC*SmAmG* | | AGAUUAUCCAUGUU | | OSOSOSSSSSSnRSSnR |
| | SmAmU*SmU*SmA*SmU*SfC*SC*SAn001RmU* | | | | |
| | SmG*SmUn001RmU | | | | |
| WV- | Mod001L001fA*SfU*SfCn001RfC*SfA*SfCn001RfU* | 901 | AUCCACUGUGGCACCC | 2 | OSSnRSSnRSSSSSSSnR |
| 44004 | SfG*SfU*SfG*SfG*SfC*SfA*SfCn001RfCmC*SmAmG* | | AGAUUAUCCAUGUU | | OSOSOSOSSSSnRSSnR |
| | SmAmU*SmUmA*SmU*SfC*SC*SAn001RmU*SmG* | | | | |
| | SmUn001RmU | | | | |
| WV- | Mod001L001fA*SfU*SfCn001RfC*SfA*SfCn001RfU* | 902 | AUCCACUGUGGCACCC | 2 | OSSnRSSnRSSSSSSSnR |
| 44005 | SfG*SfU*SfG*SfG*SfC*SfA*SfCn001RfCmC*SmAmG* | | AGAUUAUCCAUGUU | | OSOSOSOSOSSnRSSnR |
| | SmAmU*SmUmA*SmUfC*SC*SAn001RmU*SmG* | | | | |
| | SmUn001RmU | | | | |
| WV- | Mod001L001fA*SfU*SfCn001RfC*SfA*SfCn001RfU* | 903 | AUCCACUGUGGCACCC | 2 | OSSnRSSnRSSSSSSSnR |
| 44006 | SfG*SfU*SfG*SfG*SfC*SfA*SfCn001RfC*SmC*SmA* | | AGAUUAUCCAUGUU | | SSSOSOSSSSSnRSSnR |
| | SmGmA*SmUmU*SmA*SmU*SfC*SC*SAn001RmU* | | | | |
| | SmG*SmUn001RmU | | | | |
| WV- | Mod001L001fA*SfU*SfCn001RfC*SfA*SfCn001RfU* | 904 | AUCCACUGUGGCACCC | 2 | OSSnRSSnRSSSSSSSnR |
| 44007 | SfG*SfU*SfG*SfG*SfC*SfA*SfCn001RfC*SmC*SmA* | | AGAUUAUCCAUGUU | | SSSOSOSOSSSnRSSnR |
| | SmGmA*SmUmU*SmAmU*SfC*SC*SAn001RmU* | | | | |
| | SmG*SmUn001RmU | | | | |
| WV- | Mod001L001fA*SfU*SfCn001RfC*SfA*SfCn001RfU* | 905 | AUCCACUGUGGCACCC | 2 | OSSnRSSnRSSSSSSSnR |
| 44008 | SfG*SfU*SfG*SfG*SfC*SfA*SfCn001RfCmC*SmA* | | AGAUUAUCCAUGUU | | OSSOSOSSOSSnRSSnR |
| | SmGmA*SmUmU*SmA*SmUfC*SC*SAn001RmU*SmG* | | | | |
| | SmUn001RmU | | | | |
| WV- | Mod001L001fA*SfU*SfCn001RfC*SfA*SfCn001RfU* | 906 | AUCCACUGUGGCACCC | 2 | OSSnRSSnRSSSSSSSnR |
| 44009 | SfG*SfU*SfG*SfG*SfC*SfA*SfCn001RfCmC*SmA* | | AGAUUAUCCAUGUU | | OSSOSOSOOSSnRSSnR |
| | SmGmA*SmUmU*SmAmUfC*SC*SAn001RmU*SmG* | | | | |
| | SmUn001RmU | | | | |
| WV- | Mod001L001fA*SfU*SfCn001RfC*SfA*SfCn001RfU* | 907 | AUCCACUGUGGCACCC | 2 | OSSnRSSnRSSSSSSSnR |
| 44012 | SfG*SfU*SfG*SfG*SfC*SfA* | | AGAUUAUCCAUGUU | | OOOOOOOOSSSnRSSn |
| | SfCn001RfCmCmAmGmAmUmUmAmU*SfC*SC*SAn001RmU* | | | | R |
| | SmG*SmUn001RmU | | | | |
| WV- | Mod001L001fA*SfU*SfCn001RfC*SfA* | 908 | AUCCACUGUGGCACCC | 2 | OSSnRSSnROOOOOOO |
| 44060 | SfCn001RfUfGfUfGfGfCfAfCn001RfCmCmAmGmAmUmUmAmU* | | AGAUUAUCCAUGUU | | nROOOOOOOOSSSnRS |
| | SfC*SC*SAn001RmU*SmG*SmUn001RmU | | | | SnR |
| WV- | Mod001L001fAn001RfU*SfC*SfC*SfA*SfC*SfU*SfG* | 909 | AUCCACUGUGGCACCC | 2 | OnRSSSSSSSSSSSSnRS |
| 43980 | SfU*SfG*SfG*SfC*SfA*SfCn001RfC* | | AGAUUAUCCAUGUU | | OOOOOOSSSSnRSSnR |
| | ASmCmAmGmmUmUmA*SmU*SfC*SC*SAn001RmU*SmG* | | | | |
| | SmUn001RmU | | | | |
| WV- | Mod001L001fAn001RfU*SfC*SfC*SfAfC*SfU*SfG*SfU* | 910 | AUCCACUGUGGCACCC | 2 | OnRSSSOSSSSOSSSnRS |
| 43983 | SfGfG*SfC*SfA*SfCn001RfC*SmCn001RmA*SmGmA* | | AGAUUAUCCAUGUU | | nRSOSSSOSSSnRSSnR |
| | SmU*SmU*SmAmU*SfC*SC*SAn001RmU*SmG* | | | | |
| | SmUn001RmU | | | | |
| WV- | Mod001L001fAn001RfU*SfC*SfC*SfA*SfC*SmU*SfG* | 911 | AUCCACUGUGGCACCC | 2 | OnRSSSSSSSSSSSSnRSn |
| 43984 | SfU*SmG*SfG*SmC*SmA*SfCn001RfC*SmCn001RmA* | | AGAUUAUCCAUGUU | | RSSSSSSSSSnRSSnR |
| | SmG*SmA*SmU*SmU*SmA*SmU*SfC*SC* | | | | |
| | SAn001RmU*SmG*SmUn001RmU | | | | |
| WV- | Mod001L001fAn001RfU*SfC*SfC*SfA*SfCn001RmU* | 912 | AUCCACUGUGGCACCC | 2 | OnRSSSSnRSSSOSOSnR |
| 43985 | SfG*SfU*SmGfG*SmCmA*SfCn001RfC*SmCn001RmA* | | AGAUUAUCCAUGUU | | SnRSSSSSSSSSnRSSnR |
| | SmG*SmA*SmU*SmU*SmA*SmU*SfC*SC*SAn001RmU* | | | | |
| | SmG*SmUn001RmU | | | | |
| WV- | Mod001L001fAn001RfU*SfC*SfC*SfA*SfCn001RmU* | 913 | AUCCACUGUGGCACCC | 2 | OnRSSSSnRSSSOSOSnR |
| 43986 | SfG*SfU*SmGfG*SmCmA*SfCn001RfC*SmCn001RmA* | | AGAUUAUCCAUGUU | | SnRSSOSSOSSSnRSSnR |
| | SmG*SmAmU*SmU*SmAmU*SfC*SC*SAn001RmU* | | | | |
| | SmG*SmUn001RmU | | | | |

TABLE 1O
Example oligonucleotides and/or compositions that target SERPINA1.

| | | SEQ | | SEQ | |
|---|---|---|---|---|---|
| | | ID | | ID | Stereochemistry/ |
| ID | Description | NO | Base Sequence | NO | Linkage |
| WV- | L001mCn001RmC*SmC*SfA*SfG*SmCmA*SfG*SfCmU* | 655 | CCCAGCAGCUUCAGUC | 530 | OnRSSSSOSSOSnROSn |
| 47595 | SfUn001RmCfA*SfGn001RfUmC*SfC*SfC*SfU* | | CCUUUCTUIUCGAU | | ROSSSSOOSSSnSOSSnR |
| | SmUmUfC*ST*Sb008U*SIn001SmUfC*SmG* | | | | |
| | SmAn001RmU | | | | |
| WV- | mCn001RmC*SmC*SfA*SfG*SfC*SfA*SfG*SfC*SfU* | 914 | CCCAGCAGCUUCAGUC | 115 | nRSSSSSSSSSSSSSSSSS |
| 44176 | SfU*SfC*SfA*SfG*SfU*SfC*SfC*SfC*SfU*SfU*SfU* | | CCUUUCUCIUCGAU | | SSSSSXnSSSSnR |
| | SfC*SfU*SCsm15*In001SmU*SfC*SmG* | | | | |
| | SmAn001RmU | | | | |
| WV- | mCn001RmC*SmC*SfA*SfG*SfC*SfA*SfG*SfC*SfU* | 915 | CCCAGCAGCUUCAGUC | 359 | nRSSSSSSSSSSSSSSSSS |
| 44177 | SfU*SfC*SfA*SfG*SfU*SfC*SfC*SfC*SfU*SfU*SfU* | | CCUUUCUUIUCGAU | | SSSSSSnSSSSnR |
| | *SfC*SfU*Sb008U*SIn001SmU*SfC*SmG* | | | | |
| | SmAn001RmU | | | | |
| WV- | mCn001RmC*SmC*SfA*SfG*SfCfA*SfG*SfC*SfU* | 916 | CCCAGCAGCUUCAGUC | 359 | nRSSSSOSSSSnRSOnRS |
| 44180 | SfUn001RfC*SfAfGn001RfU*SfC*SfC*SfC*SfU*SfU* | | CCUUUCUUIUCGAU | | SSSSSSSSSnSOSSnR |
| | SfU*SfC*SfU*Sb008U*SIn001SmUfC*SmG* | | | | |
| | SmAn001RmU | | | | |
| WV- | mCn001RmC*SmC*SfA*SfG*SfC*SfA*SfG*SfC*SfU* | 917 | CCCAGCAGCUUCAGUC | 115 | nRSSSSSSSSSnRSSnRSS |
| 44211 | SfUn001RfC*SfA*SfGn001RfU*SfC*SfC*SfC*SfU* | | CCUUUCUCIUCGAU | | SSSSSSSXnSSSSnR |
| | SfU*SfU*SfC*SfU*SCsm15*In001SmU*SfC*SmG* | | | | |
| | SmAn001RmU | | | | |
| WV- | mCn001RmC*SmC*SfA*SfG*SfC*SfA*SfG*SfC*SfU* | 918 | CCCAGCAGCUUCAGUC | 359 | nRSSSSSSSSSnRSSnRSS |
| 44212 | SfUn001RfC*SfA*SfGn001RfU*SfC*SfC*SfC*SfU* | | CCUUUCUUIUCGAU | | SSSSSSSSnSSSSnR |
| | SfU*SfU*SfC*SfU*Sb008U*SIn001SmU*SfC*SmG* | | | | |
| | SmAn001RmU | | | | |
| WV- | mU*fA*mAmGmGfGmAmGmGmAmAmAmUfAmUf | 919 | UAAGGGAGGAAAUAUA | 920 | XXOOOOOOOOOOOO |
| 43144 | AmGmAmGmGmG*mU*mU | | GAGGGUU | | OOOOOOXX |
| WV- | mCn001RmC*SmC*SfA*SfG*SmCfA*SfG*SfC*SfU* | 921 | CCCAGCAGCUUCAGUC | 359 | nRSSSSOSSSSnRSOnRS |
| 44192 | SfUn001RfC*SfAfGn001RfU*SfCmC*SfC*SfU*SfU* | | CCUUUCUUIUCGAU | | OSSSSSSSSnSOSSnR |
| | SfU*SfC*SfU*Sb008U*SIn001SmUfC*SmG* | | | | |
| | SmAn001RmU | | | | |
| WV- | mCn001RmC*SmC*SfA*SfG*SmCfA*SfG*SfC*SfU* | 922 | CCCAGCAGCUUCAGUC | 359 | nRSSSSOSSSSnRSOnRS |
| 44193 | SfUn001RfC*SfAfGn001RfU*SfC*SfC*SfC*SfU* | | CCUUUCUUIUCGAU | | SSSSOSSSSnSOSSnR |
| | SmUfU*SfC*SfU*Sb008U*SIn001SmUfC*SmG* | | | | |
| | SmAn001RmU | | | | |
| WV- | mCn001RmC*SmC*SfA*SfG*SmCfA*SfG*SfC*SfU* | 923 | CCCAGCAGCUUCAGUC | 359 | nRSSSSOSSSSnRSOnRS |
| 44194 | SfUn001RfC*SfAfGn001RfU*SfCmC*SfC*SfU*SmUfU* | | CCUUUCUUIUCGAU | | OSSSOSSSSnSOSSnR |
| | *SfC*SfU*Sb008U*SIn001SmUfC*SmG* | | | | |
| | SmAn001RmU | | | | |
| WV- | mCn001RmC*SmC*SfA*SfG*SmCfA*SfG*SfC*SfU* | 924 | CCCAGCAGCUUCAGUC | 359 | nRSSSSOSSSSnRSOnRS |
| 44195 | SfUn001RfC*SfAfGn001RfU*SfCmC*SfC* | | CCUUUCUUIUCGAU | | OSSnROSSSSnSOSSnR |
| | SfUn001RmUfU*SfC*SfU*Sb008U*SIn001SmUfC*SmG* | | | | |
| | SmAn001RmU | | | | |
| WV- | mCn001RmC*SmC*SfA*SfG*SfCfA*SfG*SfC*SfU* | 925 | CCCAGCAGCUUCAGUC | 359 | nRSSSSOSSSSnRSOnRS |
| 44196 | SfUn001RfC*SfAfGn001RfU*SfCfC*SfC* | | CCUUUCUUIUCGAU | | OSSnROSSSSnSOSSnR |
| | USfUn001RfUf*SfC*SfU*Sb008U*SIn001SmUfC*SmG* | | | | |
| | SmAn001RmU | | | | |
| WV- | mCn001RmC*SmC*SfA*SfG*SfCfA*SfG*SfC*SfU* | 926 | CCCAGCAGCUUCAGUC | 359 | nRSSSSOSSSSnRSOSSO |
| 44197 | SfUn001RfC*SfAfG*SfU*SfCfC*SfC*SfUn001RfUfU* | | CCUUUCUUIUCGAU | | SSnROSSSSnSOSSnR |
| | SfC*SfU*Sb008U*SIn001SmUfC*SmG*SmAn001RmU | | | | |
| WV- | mCn001RmC*SmC*SfA*SfG*SfC*SfA*SfG*SfC*SfU* | 927 | CCCAGCAGCUUCAGUC | 199 | nRSSSSSSSSSnRSnRSSS |
| 44228 | SfUn001RfC*SfAn001RfG*SfU*SfC* | | CCUUUCUAIUCGAU | | OnROnRSSSSnSSSSnR |
| | SfCfCn001RfUfUn001RfU*SfC*SfU*Sb001A*SIn001SmU* | | | | |
| | SfC*SmG*SmAn001RmU | | | | |
| WV- | mCn001RmC*SmC*SfA*SfG*SfC*SfA*SfG*SfC*SfU* | 928 | CCCAGCAGCUUCAGUC | 199 | nRSSSSSSSSSnRSSnRSS |
| 44229 | SfUn001RfC*SfA*SfGn001RfU*SfC* | | CCUUUCUAIUCGAU | | OnROnRSSSSnSSSSnR |
| | SfCfCn001RfUfUn001RfU*SfC*SfU*Sb001A*SIn001SmU* | | | | |
| | SfC*SmG*SmAn001RmU | | | | |
| WV- | mCn001RmC*SmC*SfA*SfG*SfC*RfA*SfG*SfC*SfU* | 929 | CCCAGCAGCUUCAGUC | 199 | nRSSSSRSSSSnRSnRSS |
| 44220 | SfUn001RfC*SfAn001RfG*SfU*SfC*SfC*RfC*SfU* | | CCUUUCUAIUCGAU | | SRSSSSSSSnSSSSnR |
| | SfU*SfU*SfC*SfU*Sb001A*SIn001SmU*SfC*SmG* | | | | |
| | SmAn001RmU | | | | |
| WV- | mCn001RmC*SmC*SfA*SfG*SfC*RfA*SfG*SfC*SfU* | 930 | CCCAGCAGCUUCAGUC | 199 | nRSSSSRSSSSnRSSnRS |
| 44221 | SfUn001RfC*SfA*SfGn001RfU*SfC*SfC*SfC*SfU* | | CCUUUCUAIUCGAU | | SSSSSSSSSnSSSSnR |
| | SfU*SfU*SfC*SfU*Sb001A*SIn001SmU*SfC*SmG* | | | | |
| | SmAn001RmU | | | | |
| WV- | mCn001RmC*SmC*SfA*SfG*SfCmA*SfG*SfCmU* | 931 | CCCAGCAGCUUCAGUC | 512 | nRSSSSOSSOSnROSnR |
| 44478 | SfUn001RmCfA*SfGn001RfUmC*SfC*SfC* | | CCUUUCTAIUCGAU | | OSSSnRSOSSSnSOSSnR |
| | SfUn001RfU*SmUfC*ST*Sb001A*SIn001SmUfC*SmG* | | | | |
| | SmAn001RmU | | | | |
| WV- | mCn001RmC*SmC*SfA*SfG*SfCmA*SfG*SfCmU* | 932 | CCCAGCAGCUUCAGUC | 359 | nRSSSSOSSOSnROSnR |
| 44476 | SfUn001RmCfA*SfGn001RfUmC*SfC*SfC* | | CCUUUCUUIUCGAU | | OSSSnRSOSSSnSOSSnR |
| | SfUn001RfU*SmUfC*SfU*Sb008U*SIn001SmUfC*SmG* | | | | |
| | SmAn001RmU | | | | |
| WV- | mCn001RmC*SmC*SfA*SfG*SfCmA*SfG*SfCmU* | 933 | CCCAGCAGCUUCAGUC | 530 | nRSSSSOSSOSnROSnR |
| 44479 | SfUn001RmCfA*SfGn001RfUmC*SfC*SfC* | | CCUUUCTUIUCGAU | | OSSSnRSOSSSnSOSSnR |
| | SfUn001RfU*SmUfC*ST*Sb008U*SIn001SmUfC*SmG* | | | | |
| | SmAn001RmU | | | | |
| WV- | mCn001RmC*SmC*SfA*SfG*SfCmA*SfG*SfCmU* | 934 | CCCAGCAGCUUCAGUC | 115 | nRSSSSOSSOSnROSnR |
| 44477 | SfUn001RmCfA*SfGn001RfUmC*SfC*SfC*SfUn001RfU* | | CCUUUCUCIUCGAU | | OSSSnRSOSSSnSOSSnR |
| | SmUfC*SfU*SCsm15*SIn001SmUfC*SmG* | | | | |
| | SmAn001RmU | | | | |
| WV- | mCn001RmC*SmC*SfA*SfG*SfCmA*SfG*SfCmU* | 935 | CCCAGCAGCUUCAGUC | 518 | nRSSSSOSSOSnROSnR |
| 44480 | SfUn001RmCfA*SfGn001RfUmC*SfC*SfC*SfUn001RfU* | | CCUUUCTCIUCGAU | | OSSSnRSOSSSnSOSSnR |
| | SmUfC*ST*SCsm15*SIn001SmUfC*SmG* | | | | |
| | SmAn001RmU | | | | |
| WV- | mCn001RmC*SmC*SfA*SfG*SmCmA*SfG*SfCmU* | 936 | CCCAGCAGCUUCAGUC | 530 | nRSSSSOSSOSnROSnR |
| 44481 | SfUn001RmCfA*SfGn001RfUmC*SfC*SfC*SfUn001RfU* | | CCUUUCTUIUCGAU | | OSSSnRSOSSSnSOSSnR |
| | SmUfC*ST*Sb008U*SIn001SmUfC*SmG* | | | | |
| | SmAn001RmU | | | | |
| WV- | mCn001RmC*SmC*SfA*SfG*SmCmA*SfG*SfCmU* | 937 | CCCAGCAGCUUCAGUC | 530 | nRSSSSOSSOSnROSnR |
| 44483 | SfUn001RmCfA*SfGn001RfUmC*SfC*SfC* | | CCUUUCTUIUCGAU | | OSSSnROOSSSnSOSSnR |
| | SfUn001RmUmUfC*ST*Sb008U*SIn001SmUfC*SmG* | | | | |
| | SmAn001RmU | | | | |
| WV- | mCn001RmC*SmC*SfA*SfG*SmCmAfG*SfC*SmU* | 938 | CCCAGCAGCUUCAGUC | 530 | nRSSSSOOSSSnROSnR |
| 44486 | SfUn001RmCfA*SfGn001RfUmC*SfC*SfC* | | CCUUUCTUIUCGAU | | OSSSnROOSSSnSOSSnR |
| | SfUn001RmUmUfC*ST*Sb008U*SIn001SmUfC*SmG* | | | | |
| | SmAn001RmU | | | | |
| WV- | mCn001RmC*SmC*SfA*SfG*SmCmAfG*SfCmUfUn001RmCfA* | 939 | CCCAGCAGCUUCAGUC | 530 | nRSSSSOOSOOnROSnR |
| 44488 | SfGn001RfUmC*SfC*SfC*SfUn001RmUmUfC* | | CCUUUCTUIUCGAU | | OSSSnROOSSSnSOSSnR |
| | ST*Sb008U*SIn001SmUfC*SmG*SmAn001RmU | | | | |
| WV- | mCn001RmC*SmC*SfA*SfG*SmCmAfG*SfCmU*SfUn001RmCfA* | 940 | CCCAGCAGCUUCAGUC | 530 | nRSSSSOOSOSnROSnR |
| 44489 | SfGn001RfUmC*SfC*SmC*SfUn001RmUmUfC* | | CCUUUCTUIUCGAU | | OSSSnROOSSSnSOSSnR |
| | ST*Sb008U*SIn001SmUfC*SmG* | | | | |
| | SmAn001RmU | | | | |
| WV- | mCn001RmC*SmC*SfA*SfG*SmCmAfG*SfCmU*SfUn001RmCfA* | 941 | CCCAGCAGCUUCAGUC | 530 | nRSSSSOOSOSnROSnR |
| 44490 | SfGn001RfUmC*SfC*SmCfUn001RmUmUfC* | | CCUUUCTUIUCGAU | | OSSOnROOSSSnSOSSn |
| | ST*Sb008U*SIn001SmUfC*SmG*SmAn001RmU | | | | R |
| WV- | mCn001RmC*SmC*SfA*SfG*SmCmAfG*SfCmU*SfUn001RmCfA* | 942 | CCCAGCAGCUUCAGUC | 530 | nRSSSSOOSOSnROSnR |
| 44491 | SfGn001RfUmCfC*SmCfUn001RmUmUfC* | | CCUUUCTUIUCGAU | | OOSOnROOSSSnSOSSn |
| | ST*Sb008U*SIn001SmUfC*SmG*SmAn001RmU | | | | R |
| WV- | mCn001RmC*SmC*SfA*SfG*SmCmAfG*SfCmUfUn001RmCfA* | 943 | CCCAGCAGCUUCAGUC | 530 | nRSSSSOOSOOnROSnR |
| 44492 | SfGn001RfUmCfC*SmCfUn001RmUmUfC* | | CCUUUCTUIUCGAU | | OOSOnROOSSSnSOSSn |
| | ST*Sb008U*SIn001SmUfC*SmG*SmAn001RmU | | | | R |
| WV- | mCn001RmC*SmC*SfA*SfG*SmCmAfG* | 944 | CCCAGCAGCUUCAGUC | 530 | nRSSSSOOSOOnROOnR |
| 44493 | SfCmUfUn001RmCfAfGn001RfUmCfC*SmCfUn001RmUmUfC* | | CCUUUCTUIUCGAU | | OOSOnROOSSSnSOSSn |
| | ST*Sb008U*SIn001SmUfC*SmG*SmAn001RmU | | | | R |
| WV- | mCn001RmC*SmC*SfA*SfG* | 945 | CCCAGCAGCUUCAGUC | 530 | nRSSSSOOOOOnROOnR |
| 44494 | SmCmAmGfCmUfUn001RmCfAmGn001RfUmCfC* | | CCUUUCTUIUCGAU | | OOSOnROOSSSnSOSSn |
| | SmCfUn001RmUmUfC* | | | | R |
| | ST*Sb008U*SIn001SmUfC*SmG*SmAn001RmU | | | | |
| WV- | mCn001RmC*SmC*SfA*SfG*SfCmA*SfG*SmCmU* | 946 | CCCAGCAGCUUCAGUC | 530 | nRSSSSOSSOSnROSnR |
| 44495 | SfUn001RmCfA*SfGn001RfUmC*SfC*SfC*SfUn001RfU* | | CCUUUCTUIUCGAU | | OSSSnRSOSSSnSOSSnR |
| | SmUfC*ST*Sb008U*SIn001SmUfC*SmG* | | | | |
| | SmAn001RmU | | | | |
| WV- | mCn001RmC*SmC*SfA*SfG*SfCmA*SfG*SfCmU* | 947 | CCCAGCAGCUUCAGUC | 530 | nRSSSSOSSOSnROSnR |
| 44496 | SmUn001RmCfA*SfGn001RfUmC*SfC*SfC*SfUn001RfU* | | CCUUUCTUIUCGAU | | OSSSnRSOSSSnSOSSnR |
| | SmUfC*ST*Sb008U*SIn001SmUfC*SmG* | | | | |
| | SmAn001RmU | | | | |
| WV- | mCn001RmC*SmC*SfA*SfG*SfCmA*SfG*SfCmU* | 948 | CCCAGCAGCUUCAGUC | 530 | nRSSSSOSSOSnROOnR |
| 44497 | SfUn001RmCmAfGn001RfUmC*SfC*SfC*SfUn001RfU* | | CCUUUCTUIUCGAU | | OSSSnRSOSSSnSOSSnR |
| | SmUfC*ST*Sb008U*SIn001SmUfC*SmG* | | | | |
| | SmAn001RmU | | | | |
| WV- | mCn001RmC*SmC*SfA*SfG*SfCmA*SfG*SfCmU* | 949 | CCCAGCAGCUUCAGUC | 530 | nRSSSSOSSOSnROSnR |
| 44498 | SfUn001RmCfA*SmGn001RfUmC*SfC*SfC*SfUn001RfU* | | CCUUUCTUIUCGAU | | OSSSnRSOSSSnSOSSnR |
| | SmUfC*ST*Sb008U*SIn001SmUfC*SmG* | | | | |
| | SmAn001RmU | | | | |
| WV- | mCn001RmC*SmC*SfA*SfG*SfCmA*SfG*SfCmU* | 950 | CCCAGCAGCUUCAGUC | 530 | nRSSSSOSSOSnROSnR |
| 44499 | SfUn001RmCfA*SfGn001RmUmC*SfC*SfC*SfUn001RfU* | | CCUUUCTUIUCGAU | | OSSSnRSOSSSnSOSSnR |
| | SmUfC*ST*Sb008U*SIn001SmUfC*SmG* | | | | |
| | SmAn001RmU | | | | |
| WV- | mCn001RmC*SmC*SfA*SfG*SfCmA*SfG*SfCmU* | 951 | CCCAGCAGCUUCAGUC | 530 | nRSSSSOSSOSnROSnR |
| 44500 | SfUn001RmCfA*SfGn001RfUmC*SmCfC*SfUn001RfU* | | CCUUUCTUIUCGAU | | OSOSnRSOSSSnSOSSnR |
| | SmUfC*ST*Sb008U*SIn001SmUfC*SmG* | | | | |
| | SmAn001RmU | | | | |
| WV- | mCn001RmC*SmC*SfA*SfG*SfCmA*SfG*SfCmU* | 952 | CCCAGCAGCUUCAGUC | 530 | nRSSSSOSSOSnROSnR |
| 44501 | SfUn001RmCfA*SfGn001RfUmC*SfC*SmCfUn001RfU* | | CCUUUCTUIUCGAU | | OSSOnRSOSSSnSOSSnR |
| | SmUfC*ST*Sb008U*SIn001SmUfC*SmG* | | | | |
| | SmAn001RmU | | | | |
| WV- | mCn001RmC*SmC*SfA*SfG*SfCmA*SfG*SfCmU* | 953 | CCCAGCAGCUUCAGUC | 530 | nRSSSSOSSOSnROSnR |
| 44502 | SfUn001RmCfA*SfGn001RfUmC*SfC*SfC*SmUn001RfU* | | CCUUUCTUIUCGAU | | OSSSnRSOSSSnSOSSnR |
| | SmUfC*ST*Sb008U*SIn001SmUfC*SmG* | | | | |
| | SmAn001RmU | | | | |
| WV- | mCn001RmC*SmC*SfA*SfG*SfCmA*SfG*SfCmU* | 954 | CCCAGCAGCUUCAGUC | 530 | nRSSSSOSSOSnROSnR |
| 44503 | SfUn001RmCfA*SfGn001RfUmC*SfC*SfC* | | CCUUUCTUIUCGAU | | OSSSnROOSSSnSOSSnR |
| | SfUn001RmUmUfC*ST*Sb008U*SIn001SmUfC*SmG* | | | | |
| | SmAn001RmU | | | | |
| WV- | mCn001RmC*SmC*SfA*SfG*SmCfA*SfG*SfC*SfU* | 955 | CCCAGCAGCUUCAGUC | 530 | nRSSSSOSSSSnRSOnRS |
| 44505 | SfUn001RfC*SfAfGn001RfU*SfC*SfC*SfC*SfU*SmUfU* | | CCUUUCTUIUCGAU | | SSSSOSSSSnSOSSnR |
| | SfC*ST*Sb008U*SIn001SmUfC*SmG* | | | | |
| | SmAn001RmU | | | | |
| WV- | mCn001RmC*SmC*SfA*SfG*SmCmAfG*SfC*SfU* | 956 | CCCAGCAGCUUCAGUC | 530 | nRSSSSOOSSSnRSOnRS |
| 44506 | SfUn001RfC*SfAfGn001RfU*SfC*SfC*SfC*SfU* | | CCUUUCTUIUCGAU | | SSSSOSSSSnSOSSnR |
| | SmUmU*SfC*ST*Sb008U*SIn001SmUfC*SmG* | | | | |
| | SmAn001RmU | | | | |
| WV- | mCn001RmC*SmC*SfA*SfG*SmCmAfG*SfC*SfU* | 957 | CCCAGCAGCUUCAGUC | 530 | nRSSSSOOSSSnRSOnR |
| 44507 | SfUn001RfC*SfAfGn001RfUmCmC*SfC*SfU*SmUmU* | | CCUUUCTUIUCGAU | | OOSSSOSSSSnSOSSnR |
| | SfC*ST*Sb008U*SIn001SmUfC*SmG*SmAn001RmU | | | | |
| WV- | mCn001RmC*SmC*SfA*SfG*SmCmAfG*SfC*SfU* | 958 | CCCAGCAGCUUCAGUC | 530 | nRSSSSOOSSSnRSOnR |
| 44508 | SfUn001RfC*SfAfGn001RfUmCmCfC*SfU*SmUmU* | | CCUUUCTUIUCGAU | | OOOSSOSSSSnSOSSnR |
| | SfC*ST*Sb008U*SIn001SmUfC*SmG*SmAn001RmU | | | | |
| WV- | mCn001RmC*SmC*SfA*SfG*SmCmAfG*SfC*SmUmUn001RfC* | 959 | CCCAGCAGCUUCAGUC | 530 | nRSSSSOOSSOnRSOnR |
| 44509 | SfAfGn001RfU*SmCmCfC*SfU*SmUmU* | | CCUUUCTUIUCGAU | | SOOSSOSSSSnSOSSnR |
| | SfC*ST*Sb008U*SIn001SmUfC*SmG*SmAn001RmU | | | | |
| WV- | mCn001RmC*SmC*SfA*SfG*SmCfA*SfG* | 960 | CCCAGCAGCUUCAGUC | 530 | nRSSSSOSSOOnROOnR |
| 44510 | SmCmUfUn001RmCfAfGn001RmUmCfC*SfC*SmUmUfU*SfC* | | CCUUUCTUIUCGAU | | OOSSOOSSSSnSOSSnR |
| | ST*Sb008U*SIn001SmUfC*SmG*SmAn001RmU | | | | |
| WV- | mCn001RmC*SmC*SfA*SfG*SmCmAfG*SfC*SmU* | 961 | CCCAGCAGCUUCAGUC | 530 | nRSSSSOOSSSnRSOnR |
| 44511 | SmUn001RfC*SfAmGn001RmUfC*SfC*SmCmUmUfU* | | CCUUUCTUIUCGAU | | OSSOOOSSSSnSOSSnR |
| | SfC*ST*Sb008U*SIn001SmUfC*SmG*SmAn001RmU | | | | |
| WV- | mCn001RmC*SmC*SfA*SfG*SmCmAmGfC*SfU*SfUn001RfC* | 962 | CCCAGCAGCUUCAGUC | 530 | nRSSSSOOOSSnRSOnR |
| 44512 | SfAfGn001RfUmCmCfC*SfU*SmUmU*SfC* | | CCUUUCTUIUCGAU | | OOOSSOSSSSnSOSSnR |
| | ST*Sb008U*SIn001SmUfC*SmG*SmAn001RmU | | | | |
| WV- | mCn001RmC*SmC*SfA*SfG*SmCmAfG*SfC*SfU*SfUn001RfC* | 963 | CCCAGCAGCUUCAGUC | 530 | nRSSSSOOSSSnRSOnRS |
| 44513 | SfAfGn001RfU*SfCmCmCmUmUfU*SfC* | | CCUUUCTUIUCGAU | | OOOOOSSSSnSOSSnR |
| | ST*Sb008U*SIn001SmUfC*SmG*SmAn001RmU | | | | |
| WV- | mCn001RmC*SmC*SfA*SfG*SfCmA*SfG*SfCmU* | 964 | CCCAGCAGCUUCAGUC | 530 | nRSSSSOSSOSnROSnR |
| 44514 | SfUn001RmCfA*SfGn001RfUmC*SfC*SfC*SfU*SfU* | | CCUUUCTUIUCGAU | | OSSSSSOSSSnSOSSnR |
| | SmUfC*ST*Sb008U*SIn001SmUfC*SmG* | | | | |
| | SmAn001RmU | | | | |
| WV- | mCn001RmC*SmC*SfA*SfG*SmCmA*SfG*SfCmU* | 529 | CCCAGCAGCUUCAGUC | 530 | nRSSSSOSSOSnROSnR |
| 44515 | SfUn001RmCfA*SfGn001RfUmC*SfC*SfC*SfU*SmUmUfC* | | CCUUUCTUIUCGAU | | OSSSSOOSSSnSOSSnR |
| | ST*Sb008U*SIn001SmUfC*SmG*SmAn001RmU | | | | |
| WV- | mCn001RmC*SmC*SfA*SfG*SmCmAfG*SmCmU* | 965 | CCCAGCAGCUUCAGUC | 530 | nRSSSSOOSOSnROSnR |
| 46416 | SmUn001RmCmA*SmGn001RmUmCmC*SmC*SmU*SmUmUmC* | | CCUUUCTUIUCGAU | | OOSSSOOSSSnSOSSnR |
| | ST*Sb008U*SIn001SmUfC*SmG* | | | | |
| | SmAn001RmU | | | | |
| WV- | mCn001RmC*SmC*SfA*SfG*SfCmA*SfG*SmCmU* | 966 | CCCAGCAGCUUCAGUC | 530 | nRSSSSOSSOSnROSnR |
| 46417 | SmUn001RmCfA*SfGn001RmUmC*SfC*SfC*SfUn001RfU* | | CCUUUCTUIUCGAU | | OSSSnRSOSSSnSOSSnR |
| | SmUfC*ST*Sb008U*SIn001SmUfC*SmG* | | | | |
| | SmAn001RmU | | | | |
| WV- | mCn001RmC*SmC*SfA*SfG*SfCmA*SfG*SmCmU* | 967 | CCCAGCAGCUUCAGUC | 530 | nRSSSSOSSOSnROSnR |
| 46418 | SmUn001RmCfA*SfGn001RfUmC*SfC*SfC* | | CCUUUCTUIUCGAU | | OSSSnROOSSSnSOSSnR |
| | SfUn001RmUmUfC*ST*Sb008U*SIn001SmUfC*SmG* | | | | |
| | SmAn001RmU | | | | |
| WV- | mCn001RmC*SmC*SfA*SfG*SfCmA*SfG*SmCmU* | 968 | CCCAGCAGCUUCAGUC | 530 | nRSSSSOSSOSnROSnR |
| 46419 | SmUn001RmCfA*SfGn001RfUmC*SmCfC*SfUn001RfU* | | CCUUUCTUIUCGAU | | OSOSnRSOSSSnSOSSnR |
| | SmUfC*ST*Sb008U*SIn001SmUfC*SmG* | | | | |
| | SmAn001RmU | | | | |
| WV- | mCn001RmC*SmC*SfA*SfG*SfCmA*SfG*SmCmU* | 969 | CCCAGCAGCUUCAGUC | 530 | nRSSSSOSSOSnROSnR |
| 46420 | SmUn001RmCfA*SfGn001RmUmC*SmCfC*SfUn001RfU* | | CCUUUCTUIUCGAU | | OSOSnRSOSSSnSOSSnR |
| | SmUfC*ST*Sb008U*SIn001SmUfC*SmG* | | | | |
| | SmAn001RmU | | | | |
| WV- | mCn001RmC*SmC*SfA*SfG*SfCmA*SfG*SmCmU* | 970 | CCCAGCAGCUUCAGUC | 530 | nRSSSSOSSOSnROSnR |
| 46421 | SmUn001RmCfA*SfGn001RmUmC*SfC*SfC* | | CCUUUCTUIUCGAU | | OSSSnROOSSSnSOSSnR |
| | SfUn001RmUmUfC*ST*Sb008U*SIn001SmUfC*SmG* | | | | |
| | SmAn001RmU | | | | |
| WV- | mCn001RmC*SmC*SfA*SfG*SfCmA*SfG*SmCmU* | 971 | CCCAGCAGCUUCAGUC | 530 | nRSSSSOSSOSnROSnR |
| 46422 | SmUn001RmCfA*SfGn001RmUmC*SmCmCfUn001RfU* | | CCUUUCTUIUCGAU | | OSOOnRSOSSSnSOSSn |
| | SmUfC*ST*Sb008U*SIn001SmUfC*SmG* | | | | R |
| | SmAn001RmU | | | | |
| WV- | mCn001RmC*SmC*SfA*SfG*SfCmA*SfG*SmCmU* | 972 | CCCAGCAGCUUCAGUC | 530 | nRSSSSOSSOSnROSnR |
| 46423 | SmUn001RmCfA*SfGn001RmUmC*SmCmCfUn001RmUmUfC* | | CCUUUCTUIUCGAU | | OSOOnROOSSSnSOSSn |
| | ST*Sb008U*SIn001SmUfC*SmG* | | | | R |
| | SmAn001RmU | | | | |
| WV- | mCn001RmC*SmC*SfA*SfG*SfCmA*SfG*SmCmU* | 973 | CCCAGCAGCUUCAGUC | 530 | nRSSSSOSSOSnROSnR |
| 46424 | SmUn001RmCfA*SfGn001RmUmC*SmCmCmUn001RmUmUfC* | | CCUUUCTUIUCGAU | | OSOOnROOSSSnSOSSn |
| | ST*Sb008U*SIn001SmUfC*SmG* | | | | R |
| | SmAn001RmU | | | | |
| WV- | mCn001RmC*SmC*SfA*SfG*SmCmA*SfG*SmCmU* | 974 | CCCAGCAGCUUCAGUC | 530 | nRSSSSOSSOSnROSnR |
| 46425 | SmUn001RmCfA*SfGn001RmUmC*SmCmCmUn001RmUmUfC* | | CCUUUCTUIUCGAU | | OSOOnROOSSSnSOSSn |
| | ST*Sb008U*SIn001SmUfC*SmG* | | | | R |
| | SmAn001RmU | | | | |
| WV- | mCn001RmC*SmC*SfA*SfG*SmCmAfG*SfC* | 975 | CCCAGCAGCUUCAGUC | 530 | nRSSSSOOSSOnROSnR |
| 46426 | SmUfUn001RmCfA*SfGn001RfUmC*SfC* | | CCUUUCTUIUCGAU | | OSSOnROOSSSnSOSSn |
| | SmCmUn001RmUmUfC*ST*Sb008U*SIn001SmUfC*SmG* | | | | R |
| | SmAn001RmU | | | | |
| WV- | mCn001RmC*SmC*SfA*SfG*SmCmAfG*SfC* | 976 | CCCAGCAGCUUCAGUC | 530 | nRSSSSOOSSOnROSnR |
| 46427 | SmUfUn001RmCfA*SfGn001RfUmC*SmCmCmUn001RmUmUfC* | | CCUUUCTUIUCGAU | | OSOOnROOSSSnSOSSn |
| | ST*Sb008U*SIn001SmUfC*SmG*SmAn001RmU | | | | R |
| WV- | mCn001RmC*SmC*SfA*SfG*SmCmAfG*SfC* | 977 | CCCAGCAGCUUCAGUC | 530 | nRSSSSOOSSOnROSnR |
| 46428 | SmUfUn001RmCfA*SfGn001RmUmC*SfC*SmCmUn001RmUmUfC* | | CCUUUCTUIUCGAU | | OSSOnROOSSSnSOSSn |
| | ST*Sb008U*SIn001SmUfC*SmG* | | | | R |
| | SmAn001RmU | | | | |
| WV- | mCn001RmC*SmC*SfA*SfG*SmCmAfG*SfC* | 978 | CCCAGCAGCUUCAGUC | 530 | nRSSSSOOSSOnROSnR |
| 46429 | SmUmUn001RmCfA*SfGn001RfUmC*SfC*SmCmUn001RmUmUfC* | | CCUUUCTUIUCGAU | | OSSOnROOSSSnSOSSn |
| | ST*Sb008U*SIn001SmUfC*SmG* | | | | R |
| | SmAn001RmU | | | | |
| WV- | mCn001RmC*SmC*SfA*SfG*SmCmAfG*SmCmUfUn001RmCfA* | 979 | CCCAGCAGCUUCAGUC | 530 | nRSSSSOOSOOnROSnR |
| 46430 | SfGn001RfUmC*SmCmCmUn001RmUmUfC* | | CCUUUCTUIUCGAU | | OSOOnROOSSSnSOSSn |
| | ST*Sb008U*SIn001SmUfC*SmG*SmAn001RmU | | | | R |
| WV- | mCn001RmC*SmC*SfA*SfG*SmCmAfG*SfC*SmUfUn001RmCfA* | 980 | CCCAGCAGCUUCAGUC | 530 | nRSSSSOOSSOnROSnR |
| 46431 | SfGn001RmUmC*SmCmCmUn001RmUmUfC* | | CCUUUCTUIUCGAU | | OSOOnROOSSSnSOSSn |
| | ST*Sb008U*SIn001SmUfC*SmG* | | | | R |
| | SmAn001RmU | | | | |
| WV- | mCn001RmC*SmC*SfA*SfG*SmCmAfG*SfC*SmUmUn001RmCfA* | 981 | CCCAGCAGCUUCAGUC | 530 | nRSSSSOOSSOnROSnR |
| 46432 | SfGn001RmUmC*SfC*SmCmUn001RmUmUfC* | | CCUUUCTUIUCGAU | | OSSOnROOSSSnSOSSn |
| | ST*Sb008U*SIn001SmUfC*SmG* | | | | R |
| | SmAn001RmU | | | | |
| WV- | mCn001RmC*SmC*SfA*SfG*SmCmAfG*SmCmUfUn001RmCfA* | 982 | CCCAGCAGCUUCAGUC | 530 | nRSSSSOOSOOnROSnR |
| 46433 | SfGn001RmUmC*SfC*SmCmUn001RmUmUfC* | | CCUUUCTUIUCGAU | | OSSOnROOSSSnSOSSn |
| | ST*Sb008U*SIn001SmUfC*SmG* | | | | R |
| | SmAn001RmU | | | | |
| WV- | mCn001RmC*SmC*SfA*SfG*SmCmAfG*SfC*SmUmUn001RmCfA* | 983 | CCCAGCAGCUUCAGUC | 530 | nRSSSSOOSSOnROSnR |
| 46434 | SfGn001RmUmC*SmCmCmUn001RmUmUfC* | | CCUUUCTUIUCGAU | | OSOOnROOSSSnSOSSn |
| | ST*Sb008U*SIn001SmUfC*SmG* | | | | R |
| | SmAn001RmU | | | | |
| WV- | mCn001RmC*SmC*SfA*SfG*SmCmAfG*SmCmUfUn001RmCfA* | 984 | CCCAGCAGCUUCAGUC | 530 | nRSSSSOOSOOnROSnR |
| 46435 | SfGn001RmUmC*SmCmCmUn001RmUmUfC* | | CCUUUCTUIUCGAU | | OSOOnROOSSSnSOSSn |
| | ST*Sb008U*SIn001SmUfC*SmG*SmAn001RmU | | | | R |
| WV- | mCn001RmC*SmC*SfA*SfG*SmCmAfG*SmCmUmUn001RmCfA* | 985 | CCCAGCAGCUUCAGUC | 530 | nRSSSSOOSOOnROSnR |
| 46436 | SfGn001RmUmC*SmCmCmUn001RmUmUfC* | | CCUUUCTUIUCGAU | | OSOOnROOSSSnSOSSn |
| | ST*Sb008U*SIn001SmUfC*SmG* | | | | R |
| | SmAn001RmU | | | | |
| WV- | mCn001RmC*SmC*SfA*SfG*SmCmA*SfG*SfCmU* | 986 | CCCAGCAGCUUCAGUC | 663 | nRSSSSOSSOSnROSnR |
| 46437 | SfUn001RmCfA*SfGn001RfUmC*SfC*SfC*SfU*SmUmUfC* | | CCUUUCTUIUCGAT | | OSSSSOOSSSnSOSSnR |
| | ST*Sb008U*SIn001SmUfC*SmG*SmAn001RTeo | | | | |
| WV- | mCn001RmC*SmC*SfA*SfG*SmCmA*SfG*SfCmU* | 987 | CCCAGCAGCUUCAGUC | 663 | nRSSSSOSSOSnROSnR |
| 46438 | SfUn001RmCfA*SfGn001RfUmC*SfC*SfC*SfU*SmUmUfC* | | CCUUUCTUIUCGAT | | OSSSSOOSSSnSOSSnR |
| | ST*Sb008U*SIn001SmUfC*SmG*SAeon001RTeo | | | | |
| WV- | mCn001RmC*SmC*SfA*SfG*SmCmA*SfG*SfCmU* | 988 | CCCAGCAGCUUCAGUC | 663 | nRSSSSOSSOSnROSnR |
| 46439 | SfUn001RmCfA*SfGn001RfUmC*SfC*SfC*SfU*SmUmUfC* | | CCUUUCTUIUCGAT | | OSSSSOOSSSnSOSSnR |
| | ST*Sb008U*SIn001SmUfC*SGeo* | | | | |
| | SAeon001RTeo | | | | |
| WV- | m5Ceon001Rm5Ceo*Sm5Ceo*SfA*SfG*SmCmA*SfG* | 989 | CCCAGCAGCUUCAGUC | 663 | nRSSSSOSSOSnROSnR |
| 46440 | SfCmU*SfUn001RmCfA*SfGn001RfUmC*SfC*SfC* | | CCUUUCTUIUCGAT | | OSSSSOOSSSnSOSSnR |
| | SfU*SmUmUfC*ST*Sb008U*SIn001SmUfC*SmG* | | | | |
| | SmAn001RTeo | | | | |
| WV- | m5Ceon001Rm5Ceo*Sm5Ceo*SfA*SfG*SmCmA*SfG* | 990 | CCCAGCAGCUUCAGUC | 663 | nRSSSSOSSOSnROSnR |
| 46441 | SfCmU*SfUn001RmCfA*SfGn001RfUmC*SfC*SfC* | | CCUUUCTUIUCGAT | | OSSSSOOSSSnSOSSnR |
| | SfU*SmUmUfC*ST*Sb008U*SIn001SmUfC*SmG* | | | | |
| | SAeon001RTeo | | | | |
| WV- | m5Ceon001Rm5Ceo*Sm5Ceo*SfA*SfG*SmCmA*SfG* | 991 | CCCAGCAGCUUCAGUC | 663 | nRSSSSOSSOSnROSnR |
| 46442 | SfCmU*SfUn001RmCfA*SfGn001RfUmC*SfC*SfC* | | CCUUUCTUIUCGAT | | OSSSSOOSSSnSOSSnR |
| | SfU*SmUmUfC*ST*Sb008U*SIn001SmUfC*SGeo* | | | | |
| | SAeon001RTeo | | | | |
| WV- | mCn001RmC*SmC*SfA*SfG*Sm5CeomA*SfG*SfCmU* | 992 | CCCAGCAGCUUCAGUC | 530 | nRSSSSOSSOSnROSnR |
| 46443 | SfUn001RmCfA*SfGn001RfUmC*SfC*SfC*SfU* | | CCUUUCTUIUCGAU | | OSSSSOOSSSnSOSSnR |
| | SmUmUfC*ST*Sb008U*SIn001SmUfC*SmG* | | | | |
| | SmAn001RmU | | | | |
| WV- | mCn001RmC*SmC*SfA*SfG*SmCAeo*SfG*SfCmU* | 993 | CCCAGCAGCUUCAGUC | 530 | nRSSSSOSSOSnROSnR |
| 46444 | SfUn001RmCfA*SfGn001RfUmC*SfC*SfC*SfU*SmUmUfC* | | CCUUUCTUIUCGAU | | OSSSSOOSSSnSOSSnR |
| | ST*Sb008U*SIn001SmUfC*SmG*SmAn001RmU | | | | |
| WV- | mCn001RmC*SmC*SfA*SfG*SmCmA*SfG*SfCTeo* | 994 | CCCAGCAGCTUCAGUC | 995 | nRSSSSOSSOSnROSnR |
| 46445 | SfUn001RmCfA*SfGn001RfUmC*SfC*SfC*SfU*SmUmUfC* | | CCUUUCTUIUCGAU | | OSSSSOOSSSnSOSSnR |
| | ST*Sb008U*SIn001SmUfC*SmG*SmAn001RmU | | | | |
| WV- | mCn001RmC*SmC*SfA*SfG*SmCmA*SfG*SfCmU* | 996 | CCCAGCAGCUUCAGUC | 530 | nRSSSSOSSOSnROSnR |
| 46446 | SfUn001Rm5CeofA*SfGn001RfUmC*SfC*SfC*SfU* | | CCUUUCTUIUCGAU | | OSSSSOOSSSnSOSSnR |
| | SmUmUfC*ST*Sb008U*SIn001SmUfC*SmG* | | | | |
| | SmAn001RmU | | | | |
| WV- | mCn001RmC*SmC*SfA*SfG*SmCmA*SfG*SfCmU* | 997 | CCCAGCAGCUUCAGUC | 530 | nRSSSSOSSOSnROSnR |
| 46447 | SfUn001RmCfA*SfGn001RfUm5Ceo*SfC*SfC*SfU* | | CCUUUCTUIUCGAU | | OSSSSOOSSSnSOSSnR |
| | SmUmUfC*ST*Sb008U*SIn001SmUfC*SmG* | | | | |
| | SmAn001RmU | | | | |
| WV- | mCn001RmC*SmC*SfA*SfG*SmCmA*SfG*SfCmU* | 998 | CCCAGCAGCUUCAGUC | 999 | nRSSSSOSSOSnROSnR |
| 46448 | SfUn001RmCfA*SfGn001RfUmC*SfC*SfC*SfU*STeomUfC* | | CCUTUCTUIUCGAU | | OSSSSOOSSSnSOSSnR |
| | ST*Sb008U*SIn001SmUfC*SmG*SmAn001RmU | | | | |
| WV- | mCn001RmC*SmC*SfA*SfG*SmCmA*SfG*SfCmU* | 1000 | CCCAGCAGCUUCAGUC | 675 | nRSSSSOSSOSnROSnR |
| 46449 | SfUn001RmCfA*SfGn001RfUmC*SfC*SfC*SfU*SmUTeofC* | | CCUUTCTUIUCGAU | | OSSSSOOSSSnSOSSnR |
| | ST*Sb008U*SIn001SmUfC*SmG*SmAn001RmU | | | | |
| WV- | mCn001RmC*SmC*SfA*SfG*SmCmA*SfG*SfCmU* | 1001 | CCCAGCAGCUUCAGUC | 1002 | nRSSSSOSSOSnROSnR |
| 46450 | SfUn001RmCfA*SfGn001RfUmC*SfC*SfC*SfU*SmUmUfC* | | CCUUUCTUITCGAU | | OSSSSOOSSSnSOSSnR |
| | ST*Sb008U*SIn001STeofC*SmG*SmAn001RmU | | | | |
| WV- | mCn001RmC*SmC*SfA*SfG*SmCmA*SfG*SfCmU* | 1003 | CCCAGCAGCUUCAGUC | 530 | nRSSSSOSSOSnROSnR |
| 46451 | SfUn001RmCfA*SfGn001RfUmC*SfC*SfC*SfU*SmUmUfC* | | CCUUUCTUIUCGAU | | OSSSSOOSSSnSOSSnR |
| | ST*Sb008U*SIn001SmUm5Ceo*SmG* | | | | |
| | SmAn001RmU | | | | |
| WV- | mCn001RmC*SmC*SfA*SfG*Sm5CeomA*SfG*SfCTeo* | 686 | CCCAGCAGCTUCAGUC | 565 | nRSSSSOSSOSnROSnR |
| 46452 | SfUn001RmCfA*SfGn001RfUmC*SfC*SfC*SfU* | | CCUUTCTUIUCGAU | | OSSSSOOSSSnSOSSnR |
| | USmTeofC*ST*Sb008U*SIn001SmUfC*SmG* | | | | |
| | SmAn001RmU | | | | |
| WV- | mCn001RmC*SmC*SfA*SfG*Sm5CeomA*SfG*SfCTeo* | 691 | CCCAGCAGCTUCAGUC | 666 | nRSSSSOSSOSnROSnR |
| 46453 | SfUn001RmCfA*SfGn001RfUmC*SfC*SfC*SfU* | | CCUTTCTUIUCGAU | | OSSSSOOSSSnSOSSnR |
| | STeoTeofC*ST*Sb008U*SIn001SmUfC*SmG* | | | | |
| | SmAn001RmU | | | | |
| WV- | mCn001RmC*SmC*SfA*SfG*SmCAeofG*SfC* | 1004 | CCCAGCAGCTUCAGUC | 565 | nRSSSSOOSSOnROSnR |
| 46458 | STeofUn001RmCfA*SfGn001RfUmC*SfC*SfC* | | CCUUTCTUIUCGAU | | OSSSnROOSSSnSOSSnR |
| | SfUn001RmUTeofC*ST*Sb008U*SIn001SmUfC*SmG* | | | | |
| | SmAn001RmU | | | | |
| WV- | mCn001RmC*SmC*SfA*SfG*Sm5CeomAfG*SfC* | 1005 | CCCAGCAGCTUCAGUC | 666 | nRSSSSOOSSOnROSnR |
| 46459 | STeofUn001RmCfA*SfGn001RfUmC*SfC*SfC* | | CCUTTCTUIUCGAU | | OSSSnROOSSSnSOSSnR |
| | SfUn001RTeoTeofC*ST*Sb008U*SIn001SmUfC*SmG* | | | | |
| | SmAn001RmU | | | | |
| WV- | mCn001RmC*SmC*SfA*SfG*SmCmA*SfG*SfCmU* | 1006 | CCCAGCAGCUUCAGUC | 530 | nRSSSSOSSOSnROSnR |
| 46463 | SfUn001RmCfA*SfGn001RfUmC*SfC*SfC*SfU*SmUmUfC* | | CCUUUCTUIUCGAU | | OSSSSOOSSSnSOSSnR |
| | ST*Sb008U*SIn001SUsm15fC*SmG* | | | | |
| | SmAn001RmU | | | | |
| WV- | mCn001RmC*SmC*SfA*SfG*SmCmA*SfG*SfCmU* | 1007 | CCCAGCAGCUUCAGUC | 530 | nRSSSSOSSOSnROSnR |
| 46464 | SfUn001RmCfA*SfGn001RfUmC*SfC*SfC*SfU*SmUmUfC* | | CCUUUCTUIUCGAU | | OSSSSOOSSSnSOSSnR |
| | ST*Sb008U*SIn001SrUfC*SmG*SmAn001RmU | | | | |
| WV- | mCn001RmC*SmC*SfA*SfG*SmCmAfG*SfC* | 1008 | CCCAGCAGCUUCAGUC | 530 | nRSSSSOOSSOnROSnR |
| 46465 | SmUfUn001RmCfA*SfGn001RfUmC*SfC*SfC* | | CCUUUCTUIUCGAU | | OSSSnROOSSSnSOSSnR |
| | SfUn001RmUmUfC*ST*Sb008U*SIn001SUsm15fC*SmG* | | | | |
| | SmAn001RmU | | | | |
| WV- | mCn001RmC*SmC*SfA*SfG*SmCmAfG*SfC* | 1009 | CCCAGCAGCUUCAGUC | 530 | nRSSSSOOSSOnROSnR |
| 46466 | SmUfUn001RmCfA*SfGn001RfUmC*SfC*SfC* | | CCUUUCTUIUCGAU | | OSSSnROOSSSnSOSSnR |
| | SfUn001RmUmUfC*ST*Sb008U*SIn001SrUfC*SmG* | | | | |
| | SmAn001RmU | | | | |
| WV- | mG*mAfAfGfCfUfGfCfUfGmG*mG | 1010 | GAAGCUGCUGGG | 1011 | XOOOOOOOOOX |
| 48444 | | | | | |
| WV- | mG*mAmAmGmCmUmGmCmUmGmG*mG | 1012 | GAAGCUGCUGGG | 1011 | XOOOOOOOOOX |
| 48445 | | | | | |
| WV- | mG*mArArGrCrUrGrCrUrGmG*mG | 1013 | GAAGCUGCUGGG | 1011 | XOOOOOOOOOX |
| 48446 | | | | | |
| WV- | mC*mUfGfAfAfGfCfUfGfCfUfGmG*mG | 1014 | CUGAAGCUGCUGGG | 1015 | XOOOOOOOOOOOX |
| 48447 | | | | | |
| WV- | mC*mUmGmAmAmGmCmUmGmCmUmGmG*mG | 1016 | CUGAAGCUGCUGGG | 1015 | XOOOOOOOOOOOX |
| 48448 | | | | | |
| WV- | mC*mUrGrArArGrCrUrGrCrUrGmG*mG | 1017 | CUGAAGCUGCUGGG | 1015 | XOOOOOOOOOOOX |
| 48449 | | | | | |
| WV- | mG*mAfCfUfGfAfAfGfCfUfGfCfUfGmG*mG | 1018 | GACUGAAGCUGCUGGG | 1019 | XOOOOOOOOOOOOO |
| 48450 | | | | | X |
| WV- | mG*mAmCmUmGmAmAmGmCmUmGmCmUmGmG | 1020 | GACUGAAGCUGCUGGG | 1019 | XOOOOOOOOOOOOO |
| 48451 | *mG | | | | X |
| WV- | mG*mArCrUrGrArArGrCrUrGrCrUrGmG*mG | 1021 | GACUGAAGCUGCUGGG | 1019 | XOOOOOOOOOOOOO |
| 48452 | | | | | X |

### Notes:

[0684] Description, Base Sequence and Stereochemistry/Linkage, due to their length, may be divided into multiple lines in Table 1 (e.g., Table 1A, Table 1B, Table 1C, etc.). Unless otherwise specified, all oligonucleotides in Table 1 are single-stranded. As appreciated by those skilled in the art, nucleoside units are unmodified and contain unmodified nucleobases and 2′-deoxy sugars unless otherwise indicated (e.g., with r, m, in5, eo, etc.); linkages, unless otherwise indicated, are natural phosphate linkages; and acidic/basic groups may independently exist in their salt forms. If a sugar is not specified, the sugar is a natural DNA sugar; and if an internucleotidic linkage is not specified, the internucleotidic linkage is a natural phosphate linkage. Moieties and modifications:
[0685] a: 2′-NH₂ (e.g., aC:

[chemical structure]

[0686] m: 2′-OMe;
[0687] m5: methyl at 5-position of C (nucleobase is 5-methylcytosine);
[0688] m5lC: methyl at 5-position of C (nucleobase is 5-methylcytosine) and sugar is a LNA sugar;
[0689] l: LNA sugar;
[0690] I: nucleobase is hypoxanthine;
[0691] f: 2′-F;
[0692] r: 2′-OH;
[0693] eo: 2′-MOE (2′-OCH₂CH₂OCH₃);
[0694] m5Ceo: 5-methyl 2′-O-methoxyethyl C;
[0695] O, PO: phosphodiester (phosphate). It can a linkage or be an end group (or a component thereof), e.g., a linkage between a linker and an oligonucleotide chain, an internucleotidic linkage (a natural phosphate linkage), etc. Phosphodiesters are typically indicated with “O” in the Stereochemistry/Linkage column and are typically not marked in the Description column (if it is an end group, e.g., a 5′-end group, it is indicated in the Description and typically not in Stereochemistry/Linkage); if no linkage is indicated in the Description column, it is typically a phosphodiester unless otherwise indicated. Note that a phosphate linkage between a linker (e.g., L001) and an oligonucleotide chain may not be marked in the Description column, but may be indicated with “O” in the Stereochemistry/Linkage column;
[0696] *, PS: Phosphorothioate. It can be an end group (if it is an end group, e.g., a 5′-end group, it is indicated in the Description and typically not in Stereochemistry/Linkage), or a linkage, e.g., a linkage between linker (e.g., L001) and an oligonucleotide chain, an internucleotidic linkage (a phosphorothioate internucleotidic linkage), etc.;
[0697] R, Rp: Phosphorothioate in the Rp configuration. Note that *R in Description indicates a single phosphorothioate linkage in the Rp configuration;
[0698] S, Sp: Phosphorothioate in the Sp configuration. Note that *S in Description indicates a single phosphorothioate linkage in the Sp configuration;
[0699] X: stereorandom phosphorothioate;
[0700] n001:

[chemical structure]

[0701] nX (when utilized or n001): stereorandom n001;
[0702] nR (when utilized or n001) or n001R: n001 in Rp configuration;
[0703] nS (when utilized or n001) or n001S: n001 in Sp configuration;
[0704] *n001:

[chemical structure]

[0705] n*X: stereorandom *n001;
[0706] n002:

[chemical structure]

[0707] nX (when utilized for n002): stereorandom n002;
[0708] nR (when utilized for n002) or n002R: n002 in Rp configuration;
[0709] nS (when utilized for n002) or n002S: n002 in Sp configuration;
[0710] n003:

[chemical structure]

[0711] nX (when utilized for n003): stereorandom n003;
[0712] nR (when utilized for n003) or n003R: n003 in Rp configuration;
[0713] nS (when utilized for n003) or n003S: n003 in Sp configuration;
[0714] n004:

[chemical structure]

[0715] nX (when utilized for n004): stereorandom n004;
[0716] nR (when utilized for n004) or n004R: n004 in Rp configuration;
[0717] nS (when utilized for n004) or n004S: n004 in Sp configuration;
[0718] n006:

[chemical structure]

[0719] nX (when utilized for n006): stereorandom n006;
[0720] nR (when utilized for n006) or n006R: n006 in Rp configuration;
[0721] nS (when utilized for n006) or n006S: n006 in Sp configuration;
[0722] n008:

[chemical structure]

[0723] nX (when utilized for n008): stereorandom n008;
[0724] nR (when utilized for n008) or n008R: n008 in Rp configuration;
[0725] nS (when utilized for n008) or n008S: n008 in Sp configuration;
[0726] n020:

[chemical structure]

[0727] nX (when utilized for n020): stereorandom n020;
[0728] nR (when utilized for n020) or n020R: n020 in Rp configuration;
[0729] nS (when utilized for n020) or n020S: n020 in Sp configuration;
[0730] n025:

[chemical structure]

[0731] nX (when utilized or n025): stereorandom n025;
[0732] nR (when utilized or n025) or n025R: n025 in Rp configuration;
[0733] nS (when utilized or n025) or n025S: n025 in Sp configuration;
[0734] n026

[chemical structure]

[0735] nX (when utilized or n026): stereorandom n026;
[0736] nR (when utilized or n026) or n026R: n026 in Rp configuration;
[0737] nS (when utilized or n026) or n026S: n026 in Sp configuration;
[0738] n051:

[chemical structure]

[0739] nX (when utilized for n051): stereorandom n051;
[0740] nR (when utilized for n051) or n051R: n051 in Rp configuration;
[0741] nS (when utilized for n051) or n051S: n051 in Sp configuration;
[0742] n057:

[chemical structure]

[0743] nX (when utilized for n057): stereorandom n057;
[0744] nR (when utilized for n057) or n057R: n057 in Rp configuration;
[0745] nS (when utilized for n057) or n057S: n057 in Sp configuration;

[chemical structure]

[chemical structure]

[chemical structure]

wherein —C(O)— is bonded to nitrogen; as utilized in the Table, n013 may be indicated as O in Stereochemistry/Linkage;

[chemical structure]

[0746] L001: —NH—(CH₂)₆— linker (C6 linker, C6 amine linker or C6 amino linker), connected to Mod (e.g., Mod001) through —NH—, and, in the case of, for example, WV-27457, the 5′-end of the oligonucleotide chain through a phosphate linkage (O or PO). For example, in WV-27457, L001 is connected to Mod001 through —NH— (forming an amide group —C(O)—NH—), and is connected to the oligonucleotide chain through a phosphate linkage (O);
[0747] L010:

[chemical structure]

In some embodiments, when L010 is present in the middle of an oligonucleotide, it is bonded to internucleotidic linkages as other sugars (e.g., DNA sugars), e.g., its 5′-carbon is connected to another unit (e.g., 3′ of a sugar) and its 3′-carbon is connected to another unit (e.g., a 5′-carbon of a carbon) independently, e.g., via a linkage (e.g., a phosphate linkage (O or PO) or a phosphorothioate linkage (can be either not chirally controlled or chirally controlled (Sp or Rp)));
[0748] L012: —CH₂CH₂OCH₂CH₂OCH₂CH₂—. When L012 is present in the middle of an oligonucleotide, each of its two ends is independently bonded to an internucleotidic linkage (e.g., a phosphate linkage (O or PO) or a phosphorothioate linkage (can be either not chirally controlled or chirally controlled (Sp or Rp)));
[0749] L022:

[chemical structure]

wherein L022 is connected to the rest of a molecule through a phosphate unless indicated otherwise, for example, in WV-42488 through a Rp phosphorothioate;
[0750] L023: HO—(CH₂)₆—, wherein CH₂ is connected to the rest of a molecule through a phosphate unless indicated otherwise. For example, in WV-39202 (wherein the O in OnRnRnRnRSSSSSSSSSSSSSSSSSSnRSSSSSnRSSnR indicates a phosphate linkage connecting L023 to the rest of the molecule);
[0751] L025:

[chemical structure]

wherein the —CH₂— connection site is utilized as a C5 connection site of a sugar (e.g., a DNA sugar) and is connected to another unit (e.g., 3′ of a sugar), and the connection site on the ring is utilized as a C3 connection site and is connected to another unit (e.g., a 5′-carbon of a carbon), each of which is independently, e.g., via a linkage (e.g., a phosphate linkage (O or PO) or a phosphorothioate linkage (can be either not chirally controlled or chirally controlled (Sp or Rp))). When L025 is at a5′-end without any modifications, its —CH₂— connection site is bonded to —OH. For example, L025L025L025—in various oligonucleotides has the structure of

[chemical structure]

(may exist as various salt forms) and is connected to 5′-carbon of an oligonucleotide chain via a linkage as indicated (e.g., a phosphate linkage (O or PO) or a phosphorothioate linkage (can be either not chirally controlled or chirally controlled (Sp or Rp)));
[0752] L028: —CH₂CH₂OCH₂CH₂OCH₂CH₂OCH₂CH₂—. When L028 is present in the middle of an oligonucleotide, each of its two ends is independently bonded to an internucleotidic linkage (e.g., a phosphate linkage (O or PO) or a phosphorothioate linkage (can be either not chirally controlled or chirally controlled (Sp or Rp)));
[0753] sm04:

[chemical structure]

sm04 follows a nucleobase to which it is bonded; for example, in WV-28787, “Usm04” indicates that U is bonded to sm04

[chemical structure]

in WV-44238, “Csm04” indicates that C is bonded to sm04

[chemical structure]

[chemical structure]

sm11 follows a nucleobase to which it is bonded; for example, in WV-47403, “Csm11” indicates that C is bonded to sm11

[chemical structure]

[0754] sm12:

[chemical structure]

sm12 follows a nucleobase to which it is bonded; for example, in WV-47402, “Csm12” indicates that C is bonded to sm12

[chemical structure]

[0755] a: 2′-NH₂;
[0756] b001U: a nucleoside whose base is

[chemical structure]

[0757] b001rU: a nucleoside whose base is

[chemical structure]

and whose sugar is a natural RNA sugar (r);
[0758] b002U: a nucleoside whose base is

[chemical structure]

[0759] b003U: a nucleoside whose base is

[chemical structure]

[0760] b004U: a nucleoside whose base is

[chemical structure]

[0761] b005U: a nucleoside whose base is

[chemical structure]

[0762] b006U: a nucleoside whose base is

[chemical structure]

[0763] b007U: a nucleoside whose base is

[chemical structure]

[0764] b008U: a nucleoside whose base is

[chemical structure]

[0765] b009U: a nucleoside whose base is

[chemical structure]

[0766] b010U: a nucleoside having the structure of

[chemical structure]

[0767] b011U: a nucleoside whose base is

[chemical structure]

[0768] b012U: a nucleoside whose base is

[chemical structure]

[0769] b003I: a nucleoside whose base is

[chemical structure]

[0770] b004I: a nucleoside whose base is

[chemical structure]

[0771] b014I: a nucleoside whose base is

[chemical structure]

[0772] b001G: a nucleoside whose base is

[chemical structure]

[0773] b002G: a nucleoside whose base is

[chemical structure]

[0774] b001A: a nucleoside whose base is

[chemical structure]

[0775] b002A: a nucleoside whose base is

[chemical structure]

[0776] b003A: a nucleoside whose base is

[chemical structure]

[0777] zdnp: a nucleoside whose base is

[chemical structure]

[0778] b001C: a nucleoside whose base is

[chemical structure]

[0779] b002C: a nucleoside whose base is

[chemical structure]

[0780] b003C: a nucleoside whose base is

[chemical structure]

[0781] b004C: a nucleoside whose base is

[chemical structure]

[0782] b007C: a nucleoside whose base is

[chemical structure]

[0783] b008C: a nucleoside whose base is

[chemical structure]

[0784] b009C: a nucleoside whose base is

[chemical structure]

[0785] 5MR: 5′-Me modification to a sugar, and configuration of the 5′-carbon the sugar is R (e.g., 5MRdT

[chemical structure]

### 5MRm5dC:

[0786] [chemical structure] [0787] 5MS: 5′-Me modification to a sugar, and configuration of the 5′-carbon the sugar is S (e.g., 5MSdT:

[chemical structure]

### 5MSm5dC:

[0788] [chemical structure] [0789] rNxsm13:

[chemical structure]

wherein Nx is a nucleobase (e.g., rCsm13:

[chemical structure]

[0790] rNxsm14:

[chemical structure]

wherein Nx is a nucleobase (e.g., rCsm14:

[chemical structure]

[0791] sm15:

[chemical structure]

sm15 follows a nucleobase to which it is bonded (e.g., Csm15:

[chemical structure]

[0792] sm16:

[chemical structure]

sm16 follows a nucleobase to which it is bonded (e.g., Csm16:

[chemical structure]

and
[0793] sm17:

[chemical structure]

sm17 follows a nucleobase to which it is bonded (e.g., Csm17:

[chemical structure]

In some embodiments, a sugar is bonded to an internucleotidic linkage through an oxygen atom, e.g., an oxygen atom in a natural phosphate linkage such as in typical natural DNA molecules. In some embodiments, a sugar is boned to an internucleotidic linkage through an atom that is not oxygen. In some embodiments, a sugar is boned to an internucleotidic linkage through a nitrogen atom of a sugar. In some embodiments, a sugar is boned to an internucleotidic linkage through a ring nitrogen atom of a sugar (e.g., in sm01); in such cases, a ring nitrogen atom of a sugar may directly form a bond with a linkage phosphorus atom (e.g., see sm01n001), and those skilled in the art will appreciate an oxygen atom may be removed from a linkage (e.g., see sm01n001). For examples, see also sm18, which as shown in oligonucleotides in the Tables, can directly bond to linkage phosphorus through a nitrogen atom (e.g., sm18n001). Certain reagents (e.g., phosphoramidites, nucleosides, etc.) and methods for utilizing various modifications, e.g., those exemplified in the Tables herein, such as modified sugars, modified nucleobases, etc., are described in the Examples or WO 2021/071858 which is incorporated herein by reference.

### Oligonucleotide Compositions

[0794] Among other things, the present disclosure provides various oligonucleotide compositions. In some embodiments, the present disclosure provides oligonucleotide compositions of oligonucleotides described herein. In some embodiments, an oligonucleotide composition comprises a plurality of oligonucleotides described in the present disclosure. In some embodiments, an oligonucleotide composition is chirally controlled. In some embodiments, an oligonucleotide composition is not chirally controlled (stereorandom).

[0795] Linkage phosphorus of natural phosphate linkages is achiral. Linkage phosphorus of many modified internucleotidic linkages, e.g., phosphorothioate internucleotidic linkages, are chiral. In some embodiments, during preparation of oligonucleotide compositions (e.g., in traditional phosphoramidite oligonucleotide synthesis), configurations of chiral linkage phosphorus are not purposefully designed or controlled, creating non-chirally controlled (stereorandom) oligonucleotide compositions (substantially racemic preparations) which are complex, random mixtures of various stereoisomers (diastereoisomers)—for oligonucleotides with n chiral internucleotidic linkages (linkage phosphorus being chiral), typically 2n stereoisomers (e.g., when n is 10,210=1,032; when n is 20,220=1,048,576). These stereoisomers have the same constitution, but differ with respect to the pattern of stereochemistry of their linkage phosphorus.

[0796] In some embodiments, stereorandom oligonucleotide compositions have sufficient properties and/or activities for certain purposes and/or applications. In some embodiments, stereorandom oligonucleotide compositions can be cheaper, easier and/or simpler to produce than chirally controlled oligonucleotide compositions. However, stereoisomers within stereorandom compositions may have different properties, activities, and/or toxicities, resulting in inconsistent therapeutic effects and/or unintended side effects by stereorandom compositions, particularly compared to certain chirally controlled oligonucleotide compositions of oligonucleotides of the same constitution.

[0797] In some embodiments, the present disclosure encompasses technologies for designing and preparing chirally controlled oligonucleotide compositions. In some embodiments, the present disclosure provides chirally controlled oligonucleotide compositions, e.g., of many oligonucleotides in Table 1 which contain S and/or R in their stereochemistry/linkage. In some embodiments, a chirally controlled oligonucleotide composition comprises a controlled/pre-determined (not random as in stereorandom compositions) level of a plurality of oligonucleotides, wherein the oligonucleotides share the same linkage phosphorus stereochemistry at one or more chiral internucleotidic linkages (chirally controlled internucleotidic linkages). In some embodiments, the oligonucleotides share the same pattern of backbone chiral centers (stereochemistry of linkage phosphorus). In some embodiments, a pattern of backbone chiral centers is as described in the present disclosure. In some embodiments, oligonucleotides of a plurality are structural identical.

[0798] In some embodiments, the present disclosure provides an oligonucleotide composition comprising a plurality of oligonucleotides, wherein oligonucleotides of the plurality share:
[0799] 1) a common base sequence, and
[0800] 2) the same linkage phosphorus stereochemistry independently at one or more (e.g., about 1-50, 1-40, 1-30, 1-25, 1-20, 1-15, 1-10, 5-50, 5-40, 5-30, 5-25, 5-20, 5-15, 5-10, 1, 2, 3, 4, 5, 6, 7, 8, 9, 10, 11, 12, 13, 14, 15, 16, 17, 18, 19, 20, 21, 22, 23, 24, or 25 or more) chiral internucleotidic linkages (“chirally controlled internucleotidic linkages”).

[0801] In some embodiments, the present disclosure provides an oligonucleotide composition comprising a plurality of oligonucleotides, wherein oligonucleotides of the plurality share:
[0802] 1) a common base sequence, and
[0803] 2) the same linkage phosphorus stereochemistry independently at one or more (e.g., about 1-50, 1-40, 1-30, 1-25, 1-20, 1-15, 1-10, 5-50, 5-40, 5-30, 5-25, 5-20, 5-15, 5-10, 1, 2, 3, 4, 5, 6, 7, 8, 9, 10, 11, 12, 13, 14, 15, 16, 17, 18, 19, 20, 21, 22, 23, 24, or 25 or more) chiral internucleotidic linkages (“chirally controlled internucleotidic linkages”);
[0804] wherein the composition is enriched, relative to a substantially racemic preparation of oligonucleotides sharing the common base sequence, for oligonucleotides of the plurality.

[0805] In some embodiments, an oligonucleotide composition is a chirally controlled oligonucleotide composition comprising a plurality of oligonucleotides, wherein the oligonucleotides share:
[0806] a common base sequence,
[0807] a common pattern of backbone linkages, and
[0808] the same linkage phosphorus stereochemistry at one or more (e.g., 1-50, 1-40, 1-30, 1-25, 1-20, 1-15, 1-10, 5-50, 5-40, 5-30, 5-25, 5-20, 5-15, 5-10, 1, 2, 3, 4, 5, 6, 7, 8, 9, 10, 11, 12, 13, 14, 15, 16, 17, 18, 19, 20, or more) chiral internucleotidic linkages (chirally controlled internucleotidic linkages),
[0809] wherein the composition is enriched, relative to a substantially racemic preparation of oligonucleotides sharing the common base sequence and pattern of backbone linkages, for oligonucleotides of the plurality.

[0810] In some embodiments, an oligonucleotide composition is a chirally controlled oligonucleotide composition comprising a plurality of oligonucleotides, wherein the oligonucleotides share:
[0811] a common base sequence,
[0812] a common patter of backbone linkages, and
[0813] a common pattern of backbone chiral centers, which pattern comprises at least one Sp,
[0814] wherein the composition is enriched, relative to a substantially racemic preparation of oligonucleotides sharing the common base sequence and pattern of backbone linkages, for oligonucleotides of the plurality.

[0815] In some embodiments, an oligonucleotide composition is a chirally controlled oligonucleotide composition comprising a plurality of oligonucleotides, wherein the oligonucleotides share:
[0816] a common base sequence,
[0817] a common patter of backbone linkages, and
[0818] a common pattern of backbone chiral centers, which pattern comprises at least one Rp,
[0819] wherein the composition is enriched, relative to a substantially racemic preparation of oligonucleotides sharing the common base sequence and pattern of backbone linkages, for oligonucleotides of the plurality.

[0820] In some embodiments, the present disclosure provides a chirally controlled oligonucleotide composition comprising a plurality of oligonucleotides, wherein the oligonucleotides share:
[0821] 1) a common constitution, and
[0822] 2) share the same linkage phosphorus stereochemistry at one or more (e.g., 1-50, 1-40, 1-30, 1-25, 1-20, 1, 2, 3, 4, 5, 6, 7, 8, 9, 10, 11, 12, 13, 14, 15, 16, 17, 18, 19, 20, 21, 22, 23, 24, 25 or more) chiral internucleotidic linkages (chirally controlled internucleotidic linkages),
[0823] wherein the composition is enriched, relative to a substantially racemic preparation of oligonucleotides of the common constitution, for oligonucleotides of the plurality.

[0824] In some embodiments, the present disclosure provides an oligonucleotide composition comprising a plurality of oligonucleotides, wherein oligonucleotides of the plurality share:
[0825] 1) a common base sequence, and
[0826] 2) the same linkage phosphorus stereochemistry independently at one or more (e.g., about 1-50, 1-40, 1-30, 1-25, 1-20, 1-15, 1-10, 5-50, 5-40, 5-30, 5-25, 5-20, 5-15, 5-10, 1, 2, 3, 4, 5, 6, 7, 8, 9, 10, 11, 12, 13, 14, 15, 16, 17, 18, 19, 20, 21, 22, 23, 24, or 25 or more) chiral internucleotidic linkages (“chirally controlled internucleotidic linkages”);
[0827] wherein stereochemical purity of the linkage phosphorus of each chirally controlled internucleotidic linkage is independently 80%-100% (e.g., 85-100%, 90-100%, about or at least about 90%, 91%, 92%, 93%, 94%, 95%, 96%, 97%, 98%, 99% or 99.5%).

[0828] In some embodiments, an oligonucleotide composition is a chirally controlled oligonucleotide composition comprising a plurality of oligonucleotides, wherein the oligonucleotides share:
[0829] a common base sequence,
[0830] a common pattern of backbone linkages, and
[0831] the same linkage phosphorus stereochemistry at one or more (e.g., 1-50, 1-40, 1-30, 1-25, 1-20, 1-15, 1-10, 5-50, 5-40, 5-30, 5-25, 5-20, 5-15, 5-10, 1, 2, 3, 4, 5, 6, 7, 8, 9, 10, 11, 12, 13, 14, 15, 16, 17, 18, 19, 20, or more) chiral internucleotidic linkages (chirally controlled internucleotidic linkages),
[0832] wherein stereochemical purity of the linkage phosphorus of each chirally controlled internucleotidic linkage is independently 80%-100% (e.g., 85-100%, 90-100%, about or at least about 90%, 91%, 92%, 93%, 94%, 95%, 96%, 97%, 98%, 99% or 99.5%).

[0833] In some embodiments, the present disclosure provides a chirally controlled oligonucleotide composition comprising a plurality of oligonucleotides, wherein the oligonucleotides share:
[0834] 1) a common constitution, and
[0835] 2) share the same linkage phosphorus stereochemistry at one or more (e.g., 1-50, 1-40, 1-30, 1-25, 1-20, 1, 2, 3, 4, 5, 6, 7, 8, 9, 10, 11, 12, 13, 14, 15, 16, 17, 18, 19, 20, 21, 22, 23, 24, 25 or more) chiral internucleotidic linkages (chirally controlled internucleotidic linkages),
[0836] wherein stereochemical purity of the linkage phosphorus of each chirally controlled internucleotidic linkage is independently 80%-100% (e.g., 85-100%, 90-100%, about or at least about 90%, 91%, 92%, 93%, 94%, 95%, 96%, 97%, 98%, 99% or 99.5%).

[0837] In some embodiments, the present disclosure provides an oligonucleotide composition comprising a plurality of oligonucleotides, wherein oligonucleotides of the plurality share:
[0838] 1) a common base sequence, and
[0839] 2) the same linkage phosphorus stereochemistry independently at one or more (e.g., about 1-50, 1-40, 1-30, 1-25, 1-20, 1-15, 1-10, 5-50, 5-40, 5-30, 5-25, 5-20, 5-15, 5-10, 1, 2, 3, 4, 5, 6, 7, 8, 9, 10, 11, 12, 13, 14, 15, 16, 17, 18, 19, 20, 21, 22, 23, 24, or 25 or more) chiral internucleotidic linkages (“chirally controlled internucleotidic linkages”);
[0840] wherein the common base sequence is complementary to a base sequence of a portion of a nucleic acid which portion comprises a target adenosine.

[0841] In some embodiments, the present disclosure provides an oligonucleotide composition comprising one or more pluralities of oligonucleotides, wherein oligonucleotides of each plurality independently share:
[0842] 1) a common base sequence, and
[0843] 2) the same linkage phosphorus stereochemistry independently at one or more (e.g., about 1-50, 1-40, 1-30, 1-25, 1-20, 1-15, 1-10, 5-50, 5-40, 5-30, 5-25, 5-20, 5-15, 5-10, 1, 2, 3, 4, 5, 6, 7, 8, 9, 10, 11, 12, 13, 14, 15, 16, 17, 18, 19, 20, 21, 22, 23, 24, or 25 or more) chiral internucleotidic linkages (“chirally controlled internucleotidic linkages”);
[0844] wherein the common base sequence of each plurality is independently complementary to a base sequence of a portion of a nucleic acid which portion comprises a target adenosine.

[0845] In some embodiments, the present disclosure provides an composition comprising a plurality of oligonucleotides which are of a particular oligonucleotide type characterized by:
[0846] a) a common base sequence;
[0847] b) a common pattern of backbone linkages;
[0848] c) a common pattern of backbone chiral centers;
[0849] d) a common pattern of backbone phosphorus modifications;
[0850] which composition is chirally controlled in that it is enriched, relative to a substantially racemic preparation of oligonucleotides having the same common base sequence, pattern of backbone linkages and pattern of backbone phosphorus modifications, for oligonucleotides of the particular oligonucleotide type, or a non-random level of all oligonucleotides in the composition that share the common base sequence are oligonucleotides of the plurality; and
[0851] wherein the common base sequence is complementary to a base sequence of a portion of a nucleic acid which portion comprises a target adenosine.

[0852] In some embodiments, as described herein a portion can be about or at least about 10-40, 15-40, 20-40, e.g., 10, 11, 12, 13, 14, 15, 16, 17, 18, 19, 20, 21, 22, 23, 24, 25, 26, 27, 28, 29 or 30 or more, nucleobases long. In some embodiments, a portion is about or at least about or no more than about 1%-50% of a nucleic acid. In some embodiments, a portion is the whole length of a nucleic acid. In some embodiments, a common base sequence is complementary to a base sequence of a portion of a nucleic acid as described herein. In some embodiments, it is fully complementary across its length except at a nucleobase opposite to a target adenosine. In some embodiments, it is fully complementary across its length. In some embodiments, a target adenosine is associated with a condition, disorder or disease. In some embodiments, a target adenosine is a G to A mutation associated with a condition, disorder or disease. In some embodiments, a target adenosine is edited to I by a provided oligonucleotide or composition. In some embodiments, as described herein editing increases expression, level and/or activity of a transcript or a product thereof (e.g., a mRNA, a protein, etc.). In some embodiments, as described herein editing reduces expression, level and/or activity of a transcript or a product thereof (e.g., a mRNA, a protein, etc.).

[0853] In some embodiments, oligonucleotide of a plurality share the same nucleobase modifications and/or sugar modifications. In some embodiments, oligonucleotide of a plurality share the same internucleotidic linkage modifications (wherein the internucleotidic linkages may be in various acid, base, and/or salt forms). In some embodiments, oligonucleotides of a plurality share the same nucleobase modifications, sugar modifications, and internucleotidic linkage modifications, if any. In some embodiments, oligonucleotides of a plurality are of the same form, e.g., an acid form, a base form, or a particularly salt form (e.g., a pharmaceutically acceptable salt form, e.g., salt form). In some embodiments, oligonucleotides in a composition may exist as one or more forms, e.g., acid forms, base forms, and/or one or more salt forms. In some embodiments, in an aqueous solution (e.g., when dissolved in a buffer like PBS), anions and cations may dissociate. In some embodiments, oligonucleotides of a plurality are of the same constitution. In some embodiments, oligonucleotides of a plurality are structurally identical. In some embodiments, the present disclosure provides a chirally controlled oligonucleotide composition comprising a plurality of oligonucleotides, wherein the oligonucleotides are of a common constitution, and share the same linkage phosphorus stereochemistry at one or more (e.g., 1-60, 1-50, 1-40, 1-30, 1-25, 1-20, 1, 2, 3, 4, 5, 6, 7, 8, 9, 10, 11, 12, 13, 14, 15, 16, 17, 18, 19, 20, 21, 22, 23, 24, 25, 26, 27, 28, 29, 30, 31, 32, 33, 34, 35, 36, 37, 38, 39, 40, 41, 42, 43, 44, 45, 46, 47, 48, 49, 50, 51, 52, 53, 54, 55, 56, 57, 58, 59, 60 or more) chiral internucleotidic linkages (chirally controlled internucleotidic linkages), wherein the composition is enriched, relative to a substantially racemic preparation of oligonucleotides of the common constitution, for oligonucleotides of the plurality.

[0854] In some embodiments, at least one chiral internucleotidic linkage is chirally controlled. In some embodiments, at least 2 internucleotidic linkages are independently chirally controlled. In some embodiments, the number of chirally controlled internucleotidic linkages is at least 3. In some embodiments, it is at least 4. In some embodiments, it is at least 5. In some embodiments, it is at least 6. In some embodiments, it is at least 7. In some embodiments, it is at least 8. In some embodiments, it is at least 9. In some embodiments, it is at least 10. In some embodiments, it is at least 11. In some embodiments, it is at least 12. In some embodiments, it is at least 13. In some embodiments, it is at least 14. In some embodiments, it is at least 15. In some embodiments, it is at least 20. In some embodiments, it is at least 25. In some embodiments, it is at least 30.

[0855] In some embodiments, at least 5%-100% (e.g., about 10%-100%, 20-100%, 30%-100%, 40%-100%, 50%-80%, 50%-85%, 50%-90%, 50%-95%, 60%-80%, 60%-85%, 60%-90%, 60%-95%, 60%-100%, 65%-80%, 65%-85%, 65%-90%, 65%-95%, 65%-100%, 70%-80%, 70%-85%, 70%-90%, 70%-95%, 70%-100%, 75%-80%, 75%-85%, 75%-90%, 75%-95%, 75%-100%, 80%-85%, 80%-90%, 80%-95%, 80%-100%, 85%-90%, 85%-95%, 85%-100%, 90%-95%, 90%-100%, 10%, 20%, 30%, 40%, 50%, 60%, 65%, 70%, 75%, 80%, 85%, 90%, 95%, or 100%, etc.) of all internucleotidic linkages are chirally controlled. In some embodiments, at least 5%-100% (e.g., about 10%-100%, 20-100%, 30%-100%, 40%-100%, 50%-80%, 50%-85%, 50%-90%, 50%-95%, 60%-80%, 60%-85%, 60%-90%, 60%-95%, 60%-100%, 65%-80%, 65%-85%, 65%-90%, 65%-95%, 65%-100%, 70%-80%, 70%-85%, 70%-90%, 70%-95%, 70%-100%, 75%-80%, 75%-85%, 75%-90%, 75%-95%, 75%-100%, 80%-85%, 80%-90%, 80%-95%, 80%-100%, 85%-90%, 85%-95%, 85%-100%, 90%-95%, 90%-100%, 10%, 20%, 30%, 40%, 50%, 60%, 65%, 70%, 75%, 80%, 85%, 90%, 95%, or 100%, etc.) of all chiral internucleotidic linkages are chirally controlled. In some embodiments, at least 5%-100% (e.g., about 10%-100%, 20-100%, 30%-100%, 40%-100%, 50%-80%, 50%-85%, 50%-90%, 50%-95%, 60%-80%, 60%-85%, 60%-90%, 60%-95%, 60%-100%, 65%-80%, 65%-85%, 65%-90%, 65%-95%, 65%-100%, 70%-80%, 70%-85%, 70%-90%, 70%-95%, 70%-100%, 75%-80%, 75%-85%, 75%-90%, 75%-95%, 75%-100%, 80%-85%, 80%-90%, 80%-95%, 80%-100%, 85%-90%, 85%-95%, 85%-100%, 90%-95%, 90%-100%, 10%, 20%, 30%, 40%, 50%, 60%, 65%, 70%, 75%, 80%, 85%, 90%, 95%, or 100%, etc.) of all phosphorothioate internucleotidic linkages are chirally controlled. In some embodiments, a percentage is at least 50%. In some embodiments, a percentage is at least 60%. In some embodiments, a percentage is at least 70%. In some embodiments, a percentage is at least 80%. In some embodiments, a percentage is at least 90%. In some embodiments, a percentage is at least 90%. In some embodiments, each chiral internucleotidic linkage is chirally controlled. In some embodiments, each phosphorothioate internucleotidic linkage is chirally controlled.

[0856] In some embodiments, no more than 1-10, e.g., no more than 1, 2, 3, 4, 5, 6, 7, 8, 9, or 10, chiral internucleotidic linkages are not chirally controlled. In some embodiments, no more than 1 chiral internucleotidic linkages is not chirally controlled. In some embodiments, no more than 2 chiral internucleotidic linkages are not chirally controlled. In some embodiments, no more than 3 chiral internucleotidic linkages are not chirally controlled. In some embodiments, no more than 4 chiral internucleotidic linkages are not chirally controlled. In some embodiments, no more than 5 chiral internucleotidic linkages are not chirally controlled. In some embodiments, the number of non-chirally controlled internucleotidic linkages is 1. In some embodiments, it is 2. In some embodiments, it is 3. In some embodiments, it is 4. In some embodiments, it is 5.

[0857] In some embodiments, the present disclosure provides a composition comprising a plurality of oligonucleotides, wherein each oligonucleotide of the plurality is independently a particular oligonucleotide or a salt thereof. In some embodiments, the present disclosure provides a composition comprising a plurality of oligonucleotides, wherein each oligonucleotide of the plurality is independently a particular oligonucleotide or a pharmaceutically acceptable salt thereof. In some embodiments, such a composition is enriched relative to a substantially racemic preparation of a particular oligonucleotide. As appreciated by those skilled in the art, oligonucleotides of the plurality share a common sequence which is the base sequence of the particular oligonucleotide. In some embodiments, at least about 5%-100%, 10%-100%, 20-100%, 30%-100%, 40%-100%, 50%-100%, 5%-90%, 10%-90%, 20-90%, 30%-90%, 40%-90%, 50%-90%, 5%-85%, 10%-85%, 20-85%, 30%-85%, 40%-85%, 50%-85%, 5%-80%, 10%-80%, 20-80%, 30%-80%, 40%-80%, 50%-80%, 5%-75%, 10%-75%, 20-75%, 30%-75%, 40%-75%, 50%-75%, 5%-70%, 10%-70%, 20-70%, 30%-70%, 40%-70%, 50%-70%, 5%-65%, 10%-65%, 20-65%, 30%-65%, 40%-65%, 50%-65%, 5%-60%, 10%-60%, 20-60%, 30%-60%, 40%-60%, 50%-60%, 5%, 10%, 20%, 30%, 40%, 50%, 60%, 70%, 80%, 85%, 90%, 91%, 92%, 93%, 94%, 95%, 96%, 97%, 98%, or 99% of all oligonucleotides in the composition that share the base sequence of a the particular oligonucleotide are oligonucleotide of the plurality. In some embodiments, at least about 5%-100%, 10%-100%, 20-100%, 30%-100%, 40%-100%, 50%-100%, 5%-90%, 10%-90%, 20-90%, 30%-90%, 40%-90%, 50%-90%, 5%-85%, 10%-85%, 20-85%, 30%-85%, 40%-85%, 50%-85%, 5%-80%, 10%-80%, 20-80%, 30%-80%, 40%-80%, 50%-80%, 5%-75%, 10%-75%, 20-75%, 30%-75%, 40%-75%, 50%-75%, 5%-70%, 10%-70%, 20-70%, 30%-70%, 40%-70%, 50%-70%, 5%-65%, 10%-65%, 20-65%, 30%-65%, 40%-65%, 50%-65%, 5%-60%, 10%-60%, 20-60%, 30%-60%, 40%-60%, 50%-60%, 5%, 10%, 20%, 30%, 40%, 50%, 60%, 70%, 80%, 85%, 90%, 91%, 92%, 93%, 94%, 95%, 96%, 97%, 98%, or 99% of all oligonucleotides in the composition that share the constitution of the particular oligonucleotide or a salt thereof are oligonucleotide of the plurality. In some embodiments, a percentage is at least 10%. In some embodiments, a percentage is at least 20%. In some embodiments, a percentage is at least 30%. In some embodiments, a percentage is at least 40%. In some embodiments, a percentage is at least 50%. In some embodiments, it is at least 60%. In some embodiments, it is at least 70%. In some embodiments, it is at least 80%. In some embodiments, it is at least 90%. In some embodiments, it is at least 95%. In some embodiments, it is about 5-100%. In some embodiments, it is about 10-100%. In some embodiments, it is about 20-100%. In some embodiments, it is about 30-90%. In some embodiments, it is about 30-80%. In some embodiments, it is about 30-70%. In some embodiments, it is about 40-90%. In some embodiments, it is about 40-80%. In some embodiments, it is about 40-70%. In some embodiments, a particular oligonucleotide is an oligonucleotide exemplified herein, e.g., an oligonucleotide of Table 1 or another table.

[0858] In some embodiments, an enrichment relative to a substantially racemic preparation is that at least about 5%-100%, 10%-100%, 20-100%, 30%-100%, 40%-100%, 50%-100%, 5%-90%, 10%-90%, 20-90%, 30%-90%, 40%-90%, 50%-90%, 5%-85%, 10%-85%, 20-85%, 30%-85%, 40%-85%, 50%-85%, 5%-80%, 10%-80%, 20-80%, 30%-80%, 40%-80%, 50%-80%, 5%-75%, 10%-75%, 20-75%, 30%-75%, 40%-75%, 50%-75%, 5%-70%, 10%-70%, 20-70%, 30%-70%, 40%-70%, 50%-70%, 5%-65%, 10%-65%, 20-65%, 30%-65%, 40%-65%, 50%-65%, 5%-60%, 10%-60%, 20-60%, 30%-60%, 40%-60%, 50%-60%, 5%, 10%, 20%, 30%, 40%, 50%, 60%, 70%, 80%, 85%, 90%, 91%, 92%, 93%, 94%, 95%, 96%, 97%, 98%, or 99% of all oligonucleotides in the composition, or all oligonucleotides in the composition that share the common base sequence of a plurality, or all oligonucleotides in the composition that share the common constitution of a plurality, are oligonucleotide of the plurality. In some embodiments, a percentage is at least 10%. In some embodiments, a percentage is at least 20%. In some embodiments, a percentage is at least 30%. In some embodiments, a percentage is at least 40%. In some embodiments, a percentage is at least 50%. In some embodiments, it is at least 60%. In some embodiments, it is at least 70%. In some embodiments, it is at least 80%. In some embodiments, it is at least 90%. In some embodiments, it is at least 95%. In some embodiments, it is about 5-100%. In some embodiments, it is about 10-100%. In some embodiments, it is about 20-100%. In some embodiments, it is about 30-90%. In some embodiments, it is about 30-80%. In some embodiments, it is about 30-70%. In some embodiments, it is about 40-90%. In some embodiments, it is about 40-80%. In some embodiments, it is about 40-70%.

[0859] In some embodiments, at least about 5%-100%, 10%-100%, 20-100%, 30%-100%, 40%-100%, 50%-100%, 5%-90%, 10%-90%, 20-90%, 30%-90%, 40%-90%, 50%-90%, 5%-85%, 10%-85%, 20-85%, 30%-85%, 40%-85%, 50%-85%, 5%-80%, 10%-80%, 20-80%, 30%-80%, 40%-80%, 50%-80%, 5%-75%, 10%-75%, 20-75%, 30%-75%, 40%-75%, 50%-75%, 5%-70%, 10%-70%, 20-70%, 30%-70%, 40%-70%, 50%-70%, 5%-65%, 10%-65%, 20-65%, 30%-65%, 40%-65%, 50%-65%, 5%-60%, 10%-60%, 20-60%, 30%-60%, 40%-60%, 50%-60%, 5%, 10%, 20%, 30%, 40%, 50%, 60%, 70%, 80%, 85%, 90%, 91%, 92%, 93%, 94%, 95%, 96%, 97%, 98%, or 99% of all oligonucleotides in the composition that share the common base sequence of a plurality are oligonucleotide of the plurality. In some embodiments, a percentage is at least 10%. In some embodiments, a percentage is at least 20%. In some embodiments, a percentage is at least 30%. In some embodiments, a percentage is at least 40%. In some embodiments, a percentage is at least 50%. In some embodiments, it is at least 60%. In some embodiments, it is at least 70%. In some embodiments, it is at least 80%. In some embodiments, it is at least 90%. In some embodiments, it is at least 95%. In some embodiments, it is about 5-100%. In some embodiments, it is about 10-100%. In some embodiments, it is about 20-100%. In some embodiments, it is about 30-90%. In some embodiments, it is about 30-80%. In some embodiments, it is about 30-70%. In some embodiments, it is about 40-90%. In some embodiments, it is about 40-80%. In some embodiments, it is about 40-70%.

[0860] Levels of oligonucleotides of a plurality in chirally controlled oligonucleotide compositions are controlled. In contrast, in non-chirally controlled (or stereorandom, racemic) oligonucleotide compositions (or preparations), levels of oligonucleotides are random and not controlled. In some embodiments, an enrichment relative to a substantially racemic preparation is a level described herein.

[0861] In some embodiments, a level as a percentage (e.g., a controlled level, a pre-determined level, an enrichment) is or is at least (DS)^{nc}, wherein DS (diastereopurity of an individual internucleotidic linkage) is 90%-100%, and nc is the number of chirally controlled internucleotidic linkages as described in the present disclosure (e.g., 5, 6, 7, 8, 9, 10, 11, 12, 13, 14, 15, 16, 17, 18, 19, 20 or more). In some embodiments, each chiral internucleotidic linkage is chirally controlled, and nc is the number of chiral internucleotidic linkage. In some embodiments, DS is 90%, 91%, 92%, 93%, 94%, 95%, 96%, 97%, 98%, 99% or 99.5% or more. In some embodiments, DS is or is at least 90%. In some embodiments, DS is or is at least 91%. In some embodiments, DS is or is at least 92%. In some embodiments, DS is or is at least 93%. In some embodiments, DS is or is at least 94%. In some embodiments, DS is or is at least 95%. In some embodiments, DS is or is at least 96%. In some embodiments, DS is or is at least 97%. In some embodiments, DS is or is at least 98%. In some embodiments, DS is or is at least 99%. In some embodiments, a level (e.g., a controlled level, a pre-determined level, an enrichment) is a percentage of all oligonucleotides in a composition that share the same constitution, wherein the percentage is or is at least (DS)^{nc}. For example, when DS is 99% and nc is 10, the percentage is or is at least 90% ((99%)¹⁰≈0.90=90%). As appreciated by those skilled in the art, in a stereorandom preparation the percentage is typically about ½^{nc}—when nc is 10, the percentage is about ½¹⁰≈0.001=0.1%. In some embodiments, an enrichment (e.g., relative to a substantially racemic preparation), a level, etc., is that at least about (DS)^{nc} of all oligonucleotides in the composition, or all oligonucleotides in the composition that share the common base sequence of a plurality, or all oligonucleotides in the composition that share the common constitution of a plurality, are oligonucleotide of the plurality. In some embodiments, it is of all oligonucleotides in the composition. In some embodiments, it is of all oligonucleotides in the composition that share the common base sequence of a plurality. In some embodiments, it is of all oligonucleotides in the composition that share the common constitution of a plurality. In some embodiments, various forms (e.g., various salt forms) of an oligonucleotide may be properly considered to have the same constitution.

[0862] In some embodiments, oligonucleotides comprise one or more (e.g., 5, 6, 7, 8, 9, 10, 11, 12, 13, 14, 15, 16, 17, 18, 19, 20 or more) chirally controlled chiral internucleotidic linkages the diastereomeric excess (d.e.) of whose linkage phosphorus is independently about or at least about 80%, 85%, 90%, 91%, 92%, 93%, 94%, 95%, 96%, 97%, 98% or 99%. In some embodiments, about or at least about 50%, 60%, 70%, 75%, 80%, 85%, 90%, or 95% of all chiral internucleotidic linkages comprising a chiral linkage phosphorus are independently such a chirally controlled internucleotidic linkage. In some embodiments, about or at least about 50%, 60%, 70%, 75%, 80%, 85%, 90%, or 95% of phosphorothioate internucleotidic linkages are independently such a chirally controlled internucleotidic linkage. In some embodiments, each phosphorothioate internucleotidic linkage is independently such a chirally controlled internucleotidic linkage. In some embodiments, each chiral internucleotidic linkage comprising a chiral linkage phosphorus is independently such a chirally controlled internucleotidic linkage. In some embodiments, d.e. is about or at least about 80%. In some embodiments, d.e. is about or at least about 85%. In some embodiments, d.e. is about or at least about 90%. In some embodiments, d.e. is about or at least about 95%. In some embodiments, d.e. is about or at least about 96%. In some embodiments, d.e. is about or at least about 97%. In some embodiments, d.e. is about or at least about 98%.

[0863] In some embodiments, an oligonucleotide composition (also referred to as an oligonucleotide composition) is a chirally controlled oligonucleotide composition comprising a plurality of oligonucleotides, wherein the oligonucleotides share:
[0864] a common base sequence,
[0865] a common pattern of backbone linkages, and
[0866] the same linkage phosphorus stereochemistry at one or more chiral internucleotidic linkages (chirally controlled internucleotidic linkages),
[0867] wherein the percentage of the oligonucleotides of the plurality within all oligonucleotides in the composition that share the common base sequence and pattern of backbone linkages is at least (DS)^{nc}, wherein DS is 90%-100%, and nc is the number of chirally controlled internucleotidic linkages.

[0868] In some embodiments, an oligonucleotide composition (also referred to as an oligonucleotide composition) is a chirally controlled oligonucleotide composition comprising a plurality of oligonucleotides, wherein the oligonucleotides share:
[0869] a common base sequence,
[0870] a common patter of backbone linkages, and
[0871] a common pattern of backbone chiral centers, which pattern comprises at least one Sp,
[0872] wherein the percentage of the oligonucleotides of the plurality within all oligonucleotides in the composition that share the common base sequence and pattern of backbone linkages is at least (DS)^{nc}, wherein DS is 90%-100%, and nc is the number of chirally controlled internucleotidic linkages.

[0873] In some embodiments, level of a diastereopurity of a plurality of oligonucleotides in a composition can be determined as the product of the diastereopurity of each chirally controlled internucleotidic linkage in the oligonucleotides. In some embodiments, diastereopurity of an internucleotidic linkage connecting two nucleosides in an oligonucleotide (or nucleic acid) is represented by the diastereopurity of an internucleotidic linkage of a dimer connecting the same two nucleosides, wherein the dimer is prepared using comparable conditions, in some instances, identical synthetic cycle conditions (e.g., for the linkage between Nx and Ny in an oligonucleotide . . . NxNy . . . , the dimer is NxNy).

[0874] In some embodiments, a chirally controlled oligonucleotide composition comprises two or more pluralities of oligonucleotides, wherein each plurality is independently a plurality of oligonucleotides as described herein (e.g., in various chirally controlled oligonucleotide compositions). For example, in some embodiments, each plurality independently shares a common base sequence, and the same linkage phosphorus stereochemistry at one or more chiral internucleotidic linkages, and each plurality is independently enriched compared to stereorandom preparation of that plurality or each plurality is independently of a level as described herein. In some embodiments, at least two pluralities or each plurality independently targets a different adenosine. In some embodiments, at least two pluralities or each plurality independently targets a different transcript of the same or different nucleic acids. In some embodiments, at least two pluralities or each plurality independently targets transcripts of a different gene. Among other things, such compositions may be utilized to target two or more targets, in some embodiments, simultaneously and in the same system.

[0875] In some embodiments, all chiral internucleotidic linkages are chiral controlled, and the composition is a completely chirally controlled oligonucleotide composition. In some embodiments, not all chiral internucleotidic linkages are chiral controlled internucleotidic linkages, and the composition is a partially chirally controlled oligonucleotide composition.

[0876] Oligonucleotides may comprise or consist of various patterns of backbone chiral centers (patterns of stereochemistry of chiral linkage phosphorus). Certain useful patterns of backbone chiral centers are described in the present disclosure. In some embodiments, a plurality of oligonucleotides share a common pattern of backbone chiral centers, which is or comprises a pattern described in the present disclosure (e.g., as in “Linkage Phosphorus Stereochemistry and Patterns Thereof”, a pattern of backbone chiral centers of a chirally controlled oligonucleotide in Table 1, etc.).

[0877] In some embodiments, a chirally controlled oligonucleotide composition is a chirally pure (or stereopure, stereochemically pure) oligonucleotide composition, wherein the oligonucleotide composition comprises a plurality of oligonucleotides, wherein the oligonucleotides are identical [including that each chiral element of the oligonucleotides, including each chiral linkage phosphorus, is independently defined (stereodefined)], and the composition does not contain other stereoisomers. A chirally pure (or stereopure, stereochemically pure) oligonucleotide composition of an oligonucleotide stereoisomer does not contain other stereoisomers (as appreciated by those skilled in the art, one or more unintended stereoisomers may exist as impurities).

[0878] Chirally controlled oligonucleotide compositions can demonstrate a number of advantages over stereorandom oligonucleotide compositions. Among other things, chirally controlled oligonucleotide compositions are more uniform than corresponding stereorandom oligonucleotide compositions with respect to oligonucleotide structures. By controlling stereochemistry, compositions of individual stereoisomers can be prepared and assessed, so that chirally controlled oligonucleotide composition of stereoisomers with desired properties and/or activities can be developed. In some embodiments, chirally controlled oligonucleotide compositions provides better delivery, stability, clearance, activity, selectivity, and/or toxicity profiles compared to, e.g., corresponding stereorandom oligonucleotide compositions. In some embodiments, chirally controlled oligonucleotide compositions provide better efficacy, fewer side effects, and/or more convenient and effective dosage regimens. Among other things, patterns of backbone chiral centers as described herein optionally combined with other structural features described herein, e.g., modifications of nucleobases, sugars, internucleotidic linkages, etc. can be utilized to provide to provide directed adenosine editing with high efficiency.

[0879] In some embodiments, an oligonucleotide composition comprises one or more internucleotidic linkages which are stereocontrolled (chirally controlled; in some embodiments, stereopure) and one or more internucleotidic linkages which are stereorandom. In some embodiments, an oligonucleotide composition comprises one or more internucleotidic linkages which are stereocontrolled (chirally controlled; in some embodiments, stereopure) and one or more internucleotidic linkages which are stereorandom.

[0880] In some embodiments, an oligonucleotide composition comprises one or more internucleotidic linkages which are stereocontrolled (e.g., chirally controlled or stereopure) and one or more internucleotidic linkages which are stereorandom. Such oligonucleotides may target various nucleic acids and may have various base sequences, and may provide efficient adenosine editing (e.g., conversion of A to I).

[0881] In some embodiments, the present disclosure provides a chirally controlled oligonucleotide composition. In some embodiments, provided chirally controlled oligonucleotide compositions comprise a plurality of oligonucleotides of the same constitution, and have one or more internucleotidic linkages. In some embodiments, a plurality of oligonucleotides, e.g., in a chirally controlled oligonucleotide composition, is a plurality of an oligonucleotide selected from Table 1 (and/or one or more of various salts forms thereof), wherein the oligonucleotide comprises at least one Rp or Sp linkage phosphorus in a chirally controlled internucleotidic linkage. In some embodiments, a plurality of oligonucleotides, e.g., in a chirally controlled oligonucleotide composition, is a plurality of an oligonucleotide selected from Table 1 (and/or one or more of various salts forms thereof), wherein each phosphorothioate internucleotidic linkage in the oligonucleotide is independently chirally controlled (each phosphorothioate internucleotidic linkage is independently Rp or Sp). In some embodiments, an oligonucleotide composition, e.g., an oligonucleotide composition is a substantially pure preparation of a single oligonucleotide in that oligonucleotides in the composition that are not the single oligonucleotide are impurities from the preparation process of the single oligonucleotide, in some case, after certain purification procedures. In some embodiments, a single oligonucleotide is an oligonucleotide of Table 1, wherein each chiral internucleotidic linkage of the oligonucleotide is chirally controlled (e.g., indicated as S or R but not X in “Stereochemistry/Linkage”).

[0882] In some embodiments, a chirally controlled oligonucleotide composition can have, relative to a corresponding stereorandom oligonucleotide composition, increased activity and/or stability, increased delivery, and/or decreased ability to elicit adverse effects such as complement, TLR9 activation, etc. In some embodiments, a stereorandom (non-chirally controlled) oligonucleotide composition differs from a chirally controlled oligonucleotide composition in that its corresponding plurality of oligonucleotides do not contain any chirally controlled internucleotidic linkages but the stereorandom oligonucleotide composition is otherwise identical to the chirally controlled oligonucleotide composition.

[0883] In some embodiments, the present disclosure pertains to a chirally controlled oligonucleotide composition which is capable of modulating level, activity or expression of a gene or a gene product thereof. In some embodiments, level, activity or expression of a gene or a gene product thereof is increased (e.g., through conversion of A to I to restore correct G to A mutations, to increase protein translation levels, to increase production of particular protein isoforms, to modulate splicing to increase levels of a particular splicing products and proteins encoded thereby, etc.), and in some embodiments, level, activity or expression of a gene or a gene product thereof is decreased (e.g., through conversion of A to I to create stop codon and/or alter codons, to decrease protein translation levels, to decrease production of particular protein isoforms, to modulate splicing to decrease levels of a particular splicing products and proteins encoded thereby, etc.), as compared to a reference condition (e.g., absence of oligonucleotides and/or compositions of the present disclosure, and/or presence of a reference oligonucleotide and/or oligonucleotide composition (e.g., oligonucleotides of the same base sequence but different modifications, stereorandom compositions of oligonucleotides of comparable structures (e.g., base sequence, modifications, etc.) but lack of stereochemical control, etc.).

[0884] In some embodiments, the present disclosure provides a chirally controlled oligonucleotide composition which is capable of increasing the level, activity or expression of a gene or a gene product thereof, and comprises a plurality of oligonucleotides which share a common base sequence that is, comprises, or comprises a span (e.g., at least 10 or 15 contiguous bases) of a base sequence disclosed herein (e.g., in Table 1, wherein each T may be independently replaced with U and vice versa). In some embodiments, the present disclosure provides a chirally controlled oligonucleotide composition which is capable of increasing the level, activity or expression of a gene or a gene product thereof, and comprises a plurality of oligonucleotides which share a common base sequence that is or comprises a base sequence disclosed herein (e.g., in Table 1, wherein each T may be independently replaced with U and vice versa). In some embodiments, the present disclosure provides a chirally controlled oligonucleotide composition which is capable of increasing the level, activity or expression of a gene or a gene product thereof, and comprises a plurality of oligonucleotides which share a common base sequence that is a base sequence disclosed herein (e.g., in Table 1, wherein each T may be independently replaced with U and vice versa).

[0885] In some embodiments, the present disclosure provides a chirally controlled oligonucleotide composition which is capable of decreasing the level, activity or expression of a gene or a gene product thereof, and comprises a plurality of oligonucleotides which share a common base sequence that is, comprises, or comprises a span (e.g., at least 10 or 15 contiguous bases) of a base sequence disclosed herein (e.g., in Table 1, wherein each T may be independently replaced with U and vice versa). In some embodiments, the present disclosure provides a chirally controlled oligonucleotide composition which is capable of decreasing the level, activity or expression of a gene or a gene product thereof, and comprises a plurality of oligonucleotides which share a common base sequence that is or comprises a base sequence disclosed herein (e.g., in Table 1, wherein each T may be independently replaced with U and vice versa). In some embodiments, the present disclosure provides a chirally controlled oligonucleotide composition which is capable of decreasing the level, activity or expression of a gene or a gene product thereof, and comprises a plurality of oligonucleotides which share a common base sequence that is a base sequence disclosed herein (e.g., in Table 1, wherein each T may be independently replaced with U and vice versa).

[0886] In some embodiments, a provided chirally controlled oligonucleotide composition is a chirally controlled oligonucleotide composition comprising a plurality of oligonucleotide. In some embodiments, a chirally controlled oligonucleotide composition is a chirally pure (or “stereochemically pure”) oligonucleotide composition. In some embodiments, the present disclosure provides a chirally pure oligonucleotide composition of an oligonucleotide in Table 1, wherein each chiral internucleotidic linkage of the oligonucleotide is independently chirally controlled (Rp or Sp, e.g., can be determined from R or S but not X in “Stereochemistry/Linkage”). As one of ordinary skill in the art will understand, chemical selectivity rarely, if ever, achieves completeness (absolute 100%). In some embodiments, a chirally pure oligonucleotide composition comprises a plurality of oligonucleotides, wherein oligonucleotides of the plurality are structurally identical and all have the same structure (the same stereoisomeric form; in the context of oligonucleotide, typically the same diastereomeric form as typically multiple chiral centers exist in an oligonucleotide), and the chirally pure oligonucleotide composition does not contain any other stereoisomers (in the context of oligonucleotide, typically diastereomers as typically multiple chiral centers exist in an oligonucleotide; to the extent, e.g., achievable by stereoselective preparation). As appreciated by those skilled in the art, stereorandom (or “racemic”, “non-chirally controlled”) oligonucleotide compositions are random mixtures of many stereoisomers (e.g., 2ⁿ diastereoisomers wherein n is the number of chiral linkage phosphorus for oligonucleotides in which other chiral centers (e.g., carbon chiral centers in sugars) are chirally controlled each independently existing in one configuration and only chiral linkage phosphorus centers are not chirally controlled).

[0887] Certain data showing properties and/or activities of chirally controlled oligonucleotide composition, e.g., chirally controlled oligonucleotide composition in modulating level, activity and/or expression of target genes and/or products thereof, are shown in, for example, the Examples of this disclosure.

[0888] In some embodiments, the present disclosure provides an oligonucleotide composition comprising oligonucleotides that comprise at least one chiral linkage phosphorus. In some embodiments, the present disclosure provides an oligonucleotide composition comprising oligonucleotides that comprise at least one chiral linkage phosphorus. In some embodiments, the present disclosure provides an oligonucleotide composition in which the oligonucleotides comprise a chirally controlled phosphorothioate internucleotidic linkage, wherein the linkage phosphorus has a Rp configuration. In some embodiments, the present disclosure provides an oligonucleotide composition in which the oligonucleotides comprise a chirally controlled phosphorothioate internucleotidic linkage, wherein the linkage phosphorus has a Sp configuration. In some embodiments, the present disclosure provides an oligonucleotide composition in which the oligonucleotides comprise a chirally controlled phosphorothioate internucleotidic linkage, wherein the linkage phosphorus has a Rp configuration and the linkage phosphorus has a Sp configuration. In some embodiments, such oligonucleotide compositions are chirally controlled, and the Rp and/or Sp internucleotidic linkages are independently chirally controlled internucleotidic linkages.

[0889] In some embodiments, compared to reference oligonucleotides or oligonucleotide compositions, provided oligonucleotides or oligonucleotide compositions (e.g., chirally controlled oligonucleotide compositions) are surprisingly effective. In some embodiments, desired biological effects (e.g., as measured by increased (if increase is desired) and/or decreased (if decrease is desired) levels of mRNA, proteins, etc. whose levels are targeted for increase) can be enhanced by more than 1.5, 2, 3, 4, 5, 6, 7, 8, 9, 10, 15, 20, 25, 30, 40, 50, or 100 fold (e.g., as measured by levels of desired mRNA, proteins, etc.). In some embodiments, a change is measured by increase of desired mRNA and/or protein levels, or decrease of undesired mRNA and/or protein levels, compared to a reference condition. In some embodiments, a change is measured by increase of a desired mRNA and/or protein level compared to a reference condition. In some embodiments, a change is measured by decrease of an undesired mRNA and/or level compared to a reference condition. In some embodiments, a reference condition is absence of provided oligonucleotides or oligonucleotide compositions, and or presence of reference oligonucleotides or oligonucleotide compositions, respectively. In some embodiments, a reference oligonucleotide shares the same base sequence, but different nucleobase modifications, sugar modifications, internucleotidic linkages modifications, and/or linkage phosphorus stereochemistry. In some embodiments, a reference oligonucleotide composition is a composition of oligonucleotides of the same base sequence, but different nucleobase modifications, sugar modifications, internucleotidic linkages modifications, and/or linkage phosphorus stereochemistry. In some embodiments, a reference composition for a chirally controlled oligonucleotide composition is a corresponding stereorandom composition of oligonucleotides having the same base sequence, nucleobase modifications, sugar modifications, and/or internucleotidic linkages modifications (but lack of and/or low levels of linkage phosphorus stereochemistry control), or having the same constitution.

[0890] In some embodiments, the present disclosure provides a chirally controlled oligonucleotide composition, wherein the linkage phosphorus of at least one chirally controlled internucleotidic linkage is Sp. In some embodiments, the present disclosure provides a chirally controlled oligonucleotide composition, wherein the majority of linkage phosphorus of chirally controlled internucleotidic linkages are Sp. In some embodiments, about 50%-100%, 55%-100%, 60%-100%, 65%-100%, 70%-100%, 75%-100%, 80%-100%, 85%-100%, 90%-100%, 55%-95%, 60%-95%, 65%-95%, or about 55%, 60%, 65%, 70%, 75%, 80%, 85%, 90%, 95%, 97%, 99% or more, of all chirally controlled internucleotidic linkages (or of all chiral internucleotidic linkages, or of all internucleotidic linkages) are Sp. In some embodiments, about 50%-100%, 55%-100%, 60%-100%, 65%-100%, 70%-100%, 75%-100%, 80%-100%, 85%-100%, 90%-100%, 55%-95%, 60%-95%, 65%-95%, or about 55%, 60%, 65%, 70%, 75%, 80%, 85%, 90%, 95%, 97%, 99% or more, of all chirally controlled phosphorothioate internucleotidic linkages are Sp. In some embodiments, no more than 1, 2, 3, 4, 5, 6, 7, 8, 9, or 10 of phosphorothioate internucleotidic linkages are non-chirally controlled or are chirally controlled and Rp. In some embodiments, no more than 1, 2, 3, 4, 5, 6, 7, 8, 9, or 10 of phosphorothioate internucleotidic linkages are are chirally controlled and Rp. In some embodiments, it is no more than 1. In some embodiments, it is no more than 2. In some embodiments, it is no more than 3. In some embodiments, it is no more than 4. In some embodiments, it is no more than 5. In some embodiments, each phosphorothioate internucleotidic linkage is independently chirally controlled. In some embodiments, the present disclosure provides a chirally controlled oligonucleotide composition, wherein the majority of chiral internucleotidic linkages are chirally controlled and are Sp at their linkage phosphorus. In some embodiments, the present disclosure provides a chirally controlled oligonucleotide composition, wherein each chiral internucleotidic linkage is chirally controlled and each chiral linkage phosphorus is Sp. In some embodiments, the present disclosure provides a chirally controlled oligonucleotide composition, e.g., chirally controlled oligonucleotide composition, wherein at least one chirally controlled internucleotidic linkage has a Rp linkage phosphorus. In some embodiments, the present disclosure provides a chirally controlled oligonucleotide composition, wherein at least one chirally controlled internucleotidic linkage comprises a Rp linkage phosphorus and at least one chirally controlled internucleotidic linkage comprises a Sp linkage phosphorus.

[0891] In some embodiments, the present disclosure provides a chirally controlled oligonucleotide composition, wherein at least two chirally controlled internucleotidic linkages have different linkage phosphorus stereochemistry and/or different P-modifications relative to one another, wherein a P-modification is a modification at a linkage phosphorus. In some embodiments, the present disclosure provides a chirally controlled oligonucleotide composition, wherein at least two chirally controlled internucleotidic linkages have different stereochemistry relative to one another, and the pattern of the backbone chiral centers of the oligonucleotides is characterized by a repeating pattern of alternating stereochemistry.

[0892] In certain embodiments, the present disclosure provides a chirally controlled oligonucleotide composition comprising a plurality of oligonucleotides, wherein with in each of the oligonucleotides at least two individual internucleotidic linkages have different P-modifications relative to one another. In certain embodiments, the present disclosure provides a chirally controlled oligonucleotide composition comprising a plurality of oligonucleotides, wherein with in each of the oligonucleotides at least two individual internucleotidic linkages have different P-modifications relative to one another, and each of the oligonucleotide comprises a natural phosphate linkage. In certain embodiments, the present disclosure provides a chirally controlled oligonucleotide composition comprising a plurality of oligonucleotides, wherein with in each of the oligonucleotides at least two individual internucleotidic linkages have different P-modifications relative to one another, and each of the oligonucleotide comprises a phosphorothioate internucleotidic linkage. In certain embodiments, the present disclosure provides a chirally controlled oligonucleotide composition comprising a plurality of oligonucleotides, wherein with in each of the oligonucleotides at least two individual internucleotidic linkages have different P-modifications relative to one another, and each of the oligonucleotide comprises a natural phosphate linkage and a phosphorothioate internucleotidic linkage. In certain embodiments, the present disclosure provides a chirally controlled oligonucleotide composition comprising a plurality of oligonucleotides, wherein with in each of the oligonucleotides at least two individual internucleotidic linkages have different P-modifications relative to one another, and each of the oligonucleotide comprises a phosphorothioate triester internucleotidic linkage. In certain embodiments, the present disclosure provides a chirally controlled oligonucleotide composition comprising a plurality of oligonucleotides, wherein with in each of the oligonucleotides at least two individual internucleotidic linkages have different P-modifications relative to one another, and each of the oligonucleotide comprises a natural phosphate linkage and a phosphorothioate triester internucleotidic linkage. In certain embodiments, the present disclosure provides a chirally controlled oligonucleotide composition comprising a plurality of oligonucleotides, wherein with in each of the oligonucleotides at least two individual internucleotidic linkages have different P-modifications relative to one another, and each of the oligonucleotide comprises a phosphorothioate internucleotidic linkage and a phosphorothioate triester internucleotidic linkage.

[0893] In some embodiments, the present disclosure provides a chirally controlled oligonucleotide composition, comprising a plurality of oligonucleotides which share a common base sequence that is the base sequence of an oligonucleotide disclosed herein, wherein at least one internucleotidic linkage is chirally controlled.

### Linkage Phosphorus Stereochemistry and Pattern of Backbone Chiral Centers

[0894] Among other things, the present disclosure provides various oligonucleotide compositions. In some embodiments, the present disclosure provides oligonucleotide compositions of oligonucleotides described herein. In some embodiments, an oligonucleotide composition comprises a plurality of oligonucleotides described in the present disclosure. In some embodiments, an oligonucleotide composition is chirally controlled. In some embodiments, an oligonucleotide composition is not chirally controlled (stereorandom).

[0895] In contrast to natural phosphate linkages, linkage phosphorus of chiral modified internucleotidic linkages, e.g., phosphorothioate internucleotidic linkages, are chiral. Among other things, the present disclosure provides technologies (e.g., oligonucleotides, compositions, methods, etc.) comprising control of stereochemistry of chiral linkage phosphorus in chiral internucleotidic linkages. In some embodiments, as demonstrated herein, control of stereochemistry can provide improved properties and/or activities, including desired stability, reduced toxicity, improved modification of target nucleic acids, improved modulation of levels of transcripts and/or products (e.g., mRNA, proteins, etc.) encoded thereof, etc. In some embodiments, the present disclosure provides useful patterns of backbone chiral centers for oligonucleotides and/or regions thereof, which pattern includes a combination of stereochemistry of each chiral linkage phosphorus (Rp or Sp) of chiral linkage phosphorus, indication of each achiral linkage phosphorus (Op, if any), etc. from 5′ to 3′. Certain patterns are provided in various Tables (e.g., Stereochemistry/Linkage as examples; such patterns can be applied to various oligonucleotides with various base sequences and modifications (e.g., those described herein including patterns thereof).

[0896] Useful patterns of backbone chiral centers, e.g., those for oligonucleotides, first domains, second domains, first subdomains, second subdomains, third subdomains, etc., are extensively described herein. For example, in some embodiments, high levels of Sp internucleotidic linkages of oligonucleotides or of one or more portions thereof (e.g., first domains, second domains, first subdomains, second subdomains, and/or third subdomains, and/or 5′-end portions and/or 3′-end portions therein) provide high stability and/or activities. In some embodiments, first domains contain high levels of Sp internucleotidic linkages. In some embodiments, second domains contain high levels of Sp internucleotidic linkages (in numbers and/or percentages, relative to natural phosphate linkages and/or Rp internucleotidic linkages). In some embodiments, first subdomains contain high levels of Sp internucleotidic linkages. In some embodiments, second subdomains contain high levels of Sp internucleotidic linkages. In some embodiments, third subdomains contain high levels of Sp internucleotidic linkages. In some embodiments, as demonstrated herein Rp internucleotidic linkages can be utilized in various locations and/or portions. For example, in some embodiments, first domains contain one or more or high levels of Rp internucleotidic linkages, and in some embodiments, second subdomains contain one or more or high levels of Rp internucleotidic linkages.

[0897] In some embodiments, a number of linkage phosphorus in chirally controlled internucleotidic linkages are Sp. In some embodiments, at least 10%, 20%, 25%, 30%, 35%, 40%, 45%, 50%, 55%, 60%, 65%, 70%, 75%, 80%, 85%, 90% or 95% of chirally controlled internucleotidic linkages have Sp linkage phosphorus. In some embodiments, at least 10%, 20%, 25%, 30%, 35%, 40%, 45%, 50%, 55%, 60%, 65%, 70%, 75%, 80%, 85%, 90% or 95% of all chiral internucleotidic linkages are chirally controlled internucleotidic linkages having Sp linkage phosphorus. In some embodiments, at least 10%, 20%, 25%, 30%, 35%, 40%, 45%, 50%, 55%, 60%, 65%, 70%, 75%, 80%, 85%, 90% or 95% of all internucleotidic linkages are chirally controlled internucleotidic linkages having Sp linkage phosphorus. In some embodiments, at least 10%, 20%, 25%, 30%, 35%, 40%, 45%, 50%, 55%, 60%, 65%, 70%, 75%, 80%, 85%, 90% or 95% of all phosphorothioate internucleotidic linkages have Sp linkage phosphorus. In some embodiments, the percentage is at least 20%. In some embodiments, the percentage is at least 30%. In some embodiments, the percentage is at least 40%. In some embodiments, the percentage is at least 50%. In some embodiments, the percentage is at least 60%. In some embodiments, the percentage is at least 65%. In some embodiments, the percentage is at least 70%. In some embodiments, the percentage is at least 75%. In some embodiments, the percentage is at least 80%. In some embodiments, the percentage is at least 90%. In some embodiments, the percentage is at least 95%. In some embodiments, all chirally controlled internucleotidic linkages have Sp linkage phosphorus. In some embodiments, all chirally controlled phosphorothioate internucleotidic linkages have Sp linkage phosphorus. In some embodiments, at least 1, 2, 3, 4, 5, 6, 7, 8, 9, 10, 11, 12, 13, 14, 15, 16, 17, 18, 19, 20, 21, 22, 23, 24, or 25 internucleotidic linkages are chirally controlled internucleotidic linkages having Sp linkage phosphorus. In some embodiments, at least 5 internucleotidic linkages are chirally controlled internucleotidic linkages having Sp linkage phosphorus. In some embodiments, at least 6 internucleotidic linkages are chirally controlled internucleotidic linkages having Sp linkage phosphorus. In some embodiments, at least 7 internucleotidic linkages are chirally controlled internucleotidic linkages having Sp linkage phosphorus. In some embodiments, at least 8 internucleotidic linkages are chirally controlled internucleotidic linkages having Sp linkage phosphorus. In some embodiments, at least 9 internucleotidic linkages are chirally controlled internucleotidic linkages having Sp linkage phosphorus. In some embodiments, at least 10 internucleotidic linkages are chirally controlled internucleotidic linkages having Sp linkage phosphorus. In some embodiments, at least 11 internucleotidic linkages are chirally controlled internucleotidic linkages having Sp linkage phosphorus. In some embodiments, at least 12 internucleotidic linkages are chirally controlled internucleotidic linkages having Sp linkage phosphorus. In some embodiments, at least 13 internucleotidic linkages are chirally controlled internucleotidic linkages having Sp linkage phosphorus. In some embodiments, at least 14 internucleotidic linkages are chirally controlled internucleotidic linkages having Sp linkage phosphorus. In some embodiments, at least 15 internucleotidic linkages are chirally controlled internucleotidic linkages having Sp linkage phosphorus. In some embodiments, at least 1, 2, 3, 4, 5, 6, 7, 8, 9, 10, 11, 12, 13, 14, 15, 16, 17, 18, 19, 20, 21, 22, 23, 24, or 25 internucleotidic linkages are chirally controlled internucleotidic linkages having Rp linkage phosphorus. In some embodiments, no more than 1, 2, 3, 4, 5, 6, 7, 8, 9, 10, 11, 12, 13, 14, 15, 16, 17, 18, 19, 20, 21, 22, 23, 24, 25, 26, 27, 28, 29, 30, 31, 32, 33, 34, 35, 36, 37, 38, 39, 40, 41, 42, 43, 44, 45, 46, 47, 48, 49, 50, 51, 52, 53, 54, 55, 56, 57, 58, 59, or 60 internucleotidic linkages are chirally controlled internucleotidic linkages having Rp linkage phosphorus. In some embodiments, one and no more than one internucleotidic linkage in an oligonucleotide is a chirally controlled internucleotidic linkage having Rp linkage phosphorus. In some embodiments, 2 and no more than 2 internucleotidic linkages in an oligonucleotide are chirally controlled internucleotidic linkages having Rp linkage phosphorus. In some embodiments, 3 and no more than 3 internucleotidic linkages in an oligonucleotide are chirally controlled internucleotidic linkages having Rp linkage phosphorus. In some embodiments, 4 and no more than 4 internucleotidic linkages in an oligonucleotide are chirally controlled internucleotidic linkages having Rp linkage phosphorus. In some embodiments, 5 and no more than 5 internucleotidic linkages in an oligonucleotide are chirally controlled internucleotidic linkages having Rp linkage phosphorus.

[0898] In some embodiments, all, essentially all or most of the internucleotidic linkages in an oligonucleotide or a portion thereof are in the Sp configuration (e.g., about 50%-100%, 55%-100%, 60%-100%, 65%-100%, 70%-100%, 75%-100%, 80%-100%, 85%-100%, 90%-100%, 55%-95%, 60%-95%, 65%-95%, or about 55%, 60%, 65%, 70%, 75%, 80%, 85%, 90%, 95%, 97%, 99% or more of all chirally controlled internucleotidic linkages, or of all chiral internucleotidic linkages, or of all internucleotidic linkages in an oligonucleotide) except for one or a minority of internucleotidic linkages (e.g., 1, 2, 3, 4, or 5, and/or less than 50%, 45%, 40%, 35%, 30%, 25%, 20%, 15%, 10%, or 5% of all chirally controlled internucleotidic linkages, or of all chiral internucleotidic linkages, or of all internucleotidic linkages in an oligonucleotide) being in the Rp configuration. In some embodiments, all, essentially all or most of the internucleotidic linkages in a first domain are in the Sp configuration (e.g., about 50%-100%, 55%-100%, 60%-100%, 65%-100%, 70%-100%, 75%-100%, 80%-100%, 85%-100%, 90%-100%, 55%-95%, 60%-95%, 65%-95%, or about 55%, 60%, 65%, 70%, 75%, 80%, 85%, 90%, 95%, 97%, 99% or more of all chirally controlled internucleotidic linkages, or of all chiral internucleotidic linkages, or of all internucleotidic linkages, in a first domain). In some embodiments, each internucleotidic linkage in a first domain is a phosphorothioate in the Sp configuration. In some embodiments, each internucleotidic linkage in the a domain is a phosphorothioate in the Sp configuration. In some embodiments, all, essentially all or most of the internucleotidic linkages in a second domain are in the Sp configuration (e.g., about 50%-100%, 55%-100%, 60%-100%, 65%-100%, 70%-100%, 75%-100%, 80%-100%, 85%-100%, 90%-100%, 55%-95%, 60%-95%, 65%-95%, or about 55%, 60%, 65%, 70%, 75%, 80%, 85%, 90%, 95%, 97%, 99% or more of all chirally controlled internucleotidic linkages, or of all chiral internucleotidic linkages, or of all internucleotidic linkages, in a second domain). In some embodiments, each internucleotidic linkage in a second domain is a phosphorothioate in the Sp configuration. In some embodiments, each internucleotidic linkage in a second domain is a phosphorothioate in the Sp configuration except for one phosphorothioate in the Rp configuration. In some embodiments, all, essentially all or most of the internucleotidic linkages in a subdomain of a second domain are in the Sp configuration (e.g., about 50%-100%, 55%-100%, 60%-100%, 65%-100%, 70%-100%, 75%-100%, 80%-100%, 85%-100%, 90%-100%, 55%-95%, 60%-95%, 65%-95%, or about 55%, 60%, 65%, 70%, 75%, 80%, 85%, 90%, 95%, 97%, 99% or more of all chirally controlled internucleotidic linkages, or of all chiral internucleotidic linkages, or of all internucleotidic linkages, in a first subdomain of a second domain). In some embodiments, each internucleotidic linkage in a first subdomain of a second domain is a phosphorothioate in the Sp configuration. In some embodiments, each internucleotidic linkage in a first subdomain of second domain is a phosphorothioate in the Sp configuration except for one phosphorothioate in the Rp configuration. In some embodiments, all, essentially all or most of the internucleotidic linkages in a the second subdomain of a second domain are in the Sp configuration (e.g., about 50%-100%, 55%-100%, 60%-100%, 65%-100%, 70%-100%, 75%-100%, 80%-100%, 85%-100%, 90%-100%, 55%-95%, 60%-95%, 65%-95%, or about 55%, 60%, 65%, 70%, 75%, 80%, 85%, 90%, 95%, 97%, 99% or more of all chirally controlled internucleotidic linkages, or of all chiral internucleotidic linkages, or of all internucleotidic linkages, in a second subdomain of a second domain) except for one or a minority of internucleotidic linkages being in the Rp configuration. In some embodiments, each internucleotidic linkage in a second subdomain of a second domain is a phosphorothioate in the Sp configuration except for one phosphorothioate in the Rp configuration. In some embodiments, each internucleotidic linkage in a second subdomain of a second domain is a phosphorothioate in the Sp configuration except for one phosphorothioate in the Rp configuration. In some embodiments, all, essentially all or most of the internucleotidic linkages in a the third subdomain of the second domain are in the Sp configuration (e.g., about 50%-100%, 55%-100%, 60%-100%, 65%-100%, 70%-100%, 75%-100%, 80%-100%, 85%-100%, 90%-100%, 55%-95%, 60%-95%, 65%-95%, or about 55%, 60%, 65%, 70%, 75%, 80%, 85%, 90%, 95%, 97%, 99% or more of all chirally controlled internucleotidic linkages, or of all chiral internucleotidic linkages, or of all internucleotidic linkages, in a third subdomain of a second domain. In some embodiments, each internucleotidic linkage in a third subdomain of a second domain is a phosphorothioate in the Sp configuration except for one phosphorothioate in the Rp configuration. In some embodiments, each internucleotidic linkage in a third subdomain of a second domain is a phosphorothioate in the Sp configuration except for one phosphorothioate in the Rp configuration.

[0899] In some embodiments, an oligonucleotide comprises one or more Rp internucleotidic linkages. In some embodiments, an oligonucleotide comprises one and no more than one Rp internucleotidic linkages. In some embodiments, an oligonucleotide comprises five or more Rp internucleotidic linkages. In some embodiments, about 5%-50% of all chirally controlled internucleotidic linkages in an oligonucleotide are Rp. In some embodiments, about 5%-40% of all chirally controlled internucleotidic linkages in an oligonucleotide are Rp. In some embodiments, certain portions (e.g., domains, subdomains, etc.) may contain relatively more (in numbers and/or percentages) Rp internucleotidic linkages, e.g., second subdomains.

[0900] In some embodiments, an oligonucleotide comprises one or more Rp phosphorothioate internucleotidic linkages at one or more positions, e.g., −1, −2, +1, +2, +7, +8, etc. In some embodiments, an internucleotidic linkage at position −1 is aRp phosphorothioate internucleotidic linkage. In some embodiments, an internucleotidic linkage at position −2 is a Rp phosphorothioate internucleotidic linkage. In some embodiments, an internucleotidic linkage at position +1 is a Rp phosphorothioate internucleotidic linkage. In some embodiments, an internucleotidic linkage at position +2 is a Rp phosphorothioate internucleotidic linkage. In some embodiments, two or three internucleotidic linkages at positions −1, −2, +1, and +2 Rp phosphorothioate internucleotidic linkages. In some embodiments, the positions are −1 and −2. In some embodiments, the positions are +1 and +2. In some embodiments, the positions are −1 and +1. In some embodiments, the positions are −1, +1 and +2. In some embodiments, the positions are −1, −2 and +1. In some embodiments, one and only one internucleotidic linkage is Rp phosphorothioate internucleotidic linkage. In some embodiments, one and only one internucleotidic linkage is Rp phosphorothioate internucleotidic linkage and is at position +2, +1, 1 or 2. In some embodiments, a position is +1. In some embodiments, a position is +2. In some embodiments, a position is −1. In some embodiments, a position is −2. In some embodiments, it is observed that utilization of Rp internucleotidic linkages may improve editing efficiency by ADAR1 (p110 and/or p150) and/or ADAR2. In some embodiments, improvements of editing by ADAR1 (p110 and/or p150) are more than those by ADAR2 (no or less improvements or less editing compared to absence of Rp).

[0901] In some embodiments, the present disclosure provides a chirally controlled oligonucleotide composition wherein the composition comprises a non-random or controlled level of a plurality of oligonucleotides, wherein oligonucleotides of the plurality share a common base sequence, and share the same configuration of linkage phosphorus independently at 1-60, 1-50, 1-40, 1-30, 1-25, 1-20, 1-15, 1-10, 5-50, 5-40, 5-30, 5-25, 5-20, 5-15, 5-10, 1, 2, 3, 4, 5, 6, 7, 8, 9, 10, 11, 12, 13, 14, 15, 16, 17, 18, 19, 20, 21, 22, 23, 24, or 25 or more chiral internucleotidic linkages.

[0902] In some embodiments, provided oligonucleotides comprise 2-30 chirally controlled internucleotidic linkages. In some embodiments, provided oligonucleotide compositions comprise 5-30 chirally controlled internucleotidic linkages. In some embodiments, provided oligonucleotide compositions comprise 10-30 chirally controlled internucleotidic linkages. In some embodiments, provided oligonucleotide compositions comprise 1, 2, 3, 4, 5, 6, 7, 8, 9, 10, 11, 12, 13, 14, 15, 16, 17, 18, 19, 20, 21, 22, 23, 24, or 25 or more chirally controlled internucleotidic linkages.

[0903] In some embodiments, about 1-100% of all internucleotidic linkages are chirally controlled internucleotidic linkages. In some embodiments, about 1-100% of all chiral internucleotidic linkages are chirally controlled internucleotidic linkages. In some embodiments, a percentage is about 5%-100%. In some embodiments, a percentage is at least 5%, 10%, 15%, 20%, 25%, 30%, 35%, 40%, 45%, 50%, 55%, 60%, 65%, 70%, 75%, 80%, 85%, 90%, 95%, 965, 96%, 98%, or 99%. In some embodiments, a percentage is about 5%, 10%, 15%, 20%, 25%, 30%, 35%, 40%, 45%, 50%, 55%, 60%, 65%, 70%, 75%, 80%, 85%, 90%, 95%, 965, 96%, 98%, or 99%.

[0904] In some embodiments, an internucleotidic linkage in the Sp configuration (having a Sp linkage phosphorus) is a phosphorothioate internucleotidic linkage. In some embodiments, an achiral internucleotidic linkage is a natural phosphate linkage. In some embodiments, an internucleotidic linkage in the Rp configuration (having a Rp linkage phosphorus) is a phosphorothioate internucleotidic linkage. In some embodiments, each internucleotidic linkage in the Sp configuration is a phosphorothioate internucleotidic linkage. In some embodiments, each achiral internucleotidic linkage is a natural phosphate linkage. In some embodiments, each internucleotidic linkage in the Rp configuration is a phosphorothioate internucleotidic linkage. In some embodiments, each internucleotidic linkage in the Sp configuration is a phosphorothioate internucleotidic linkage, each achiral internucleotidic linkage is a natural phosphate linkage, and each internucleotidic linkage in the Rp configuration is a phosphorothioate internucleotidic linkage.

[0905] In some embodiments, provided oligonucleotides in chirally controlled oligonucleotide compositions each comprise different types of internucleotidic linkages. In some embodiments, provided oligonucleotides comprise at least one natural phosphate linkage and at least one modified internucleotidic linkage. In some embodiments, provided oligonucleotides comprise at least one natural phosphate linkage and 1, 2, 3, 4, 5, 6, 7, 8, 9, 10, 11, 12, 13, 14, 15, 16, 17, 18, 19, 20, 21, 22, 23, 24, 25, 26, 27, 28, 29, 30, 31, 32, 33, 34, 35, 36, 37, 38, 39 or 40 modified internucleotidic linkages. In some embodiments, a modified internucleotidic linkage is a phosphorothioate internucleotidic linkage. In some embodiments, each modified internucleotidic linkage is a phosphorothioate internucleotidic linkage. In some embodiments, each modified internucleotidic linkage is independently a chiral internucleotidic linkage and is independently chirally controlled.

[0906] In some embodiments, oligonucleotides in a chirally controlled oligonucleotide composition each comprise at least two internucleotidic linkages that have different stereochemistry and/or different P-modifications relative to one another. In some embodiments, at least two internucleotidic linkages have different stereochemistry relative to one another. In some embodiments, oligonucleotides each comprise a pattern of backbone chiral centers comprising alternating linkage phosphorus stereochemistry.

[0907] In some embodiments, a phosphorothioate triester linkage comprises a chiral auxiliary, which, for example, is used to control the stereoselectivity of a reaction, e.g., a coupling reaction in an oligonucleotide synthesis cycle. In some embodiments, a phosphorothioate triester linkage does not comprise a chiral auxiliary. In some embodiments, a phosphorothioate triester linkage is intentionally maintained until and/or during the administration of the oligonucleotide composition to a subject.

[0908] In some embodiments, oligonucleotides are linked to a solid support. In some embodiments, a solid support is a support for oligonucleotide synthesis. In some embodiments, a solid support comprises glass. In some embodiments, a solid support is CPG (controlled pore glass). In some embodiments, a solid support is polymer. In some embodiments, a solid support is polystyrene. In some embodiments, the solid support is Highly Crosslinked Polystyrene (HCP). In some embodiments, the solid support is hybrid support of Controlled Pore Glass (CPG) and Highly Cross-linked Polystyrene (HCP). In some embodiments, a solid support is a metal foam. In some embodiments, a solid support is a resin. In some embodiments, oligonucleotides are cleaved from a solid support.

[0909] In some embodiments, purity, particularly stereochemical purity, and particularly diastereomeric purity of many oligonucleotides and compositions thereof wherein all other chiral centers in the oligonucleotides but the chiral linkage phosphorus centers have been stereodefined (e.g., carbon chiral centers in the sugars, which are defined in, e.g., phosphoramidites for oligonucleotide synthesis), can be controlled by stereoselectivity (as appreciated by those skilled in this art, diastereoselectivity in many cases of oligonucleotide synthesis wherein the oligonucleotide comprise more than one chiral centers) at chiral linkage phosphorus in coupling steps when forming chiral internucleotidic linkages. In some embodiments, a coupling step has a stereoselectivity (diastereoselectivity when there are other chiral centers) of 60% at the linkage phosphorus. After such a coupling step, the new internucleotidic linkage formed may be referred to have a 60% stereochemical purity (for oligonucleotides, typically diastereomeric purity in view of the existence of other chiral centers). In some embodiments, each coupling step independently has a stereoselectivity of at least 60%, 70%, 80%, 85%, 90%, 91%, 92%, 93%, 94%, 95%, 96%, 97%, 98%, 99%, or 99.5%. In some embodiments, a chirally controlled internucleotidic linkage is typically formed with a stereoselectivity of at least 85%, 87%, 90%, 91%, 92%, 93%, 94%, 95%, 96%, 97%, 98%, 99.5% or virtually 100% (in some embodiments, at least 85%; in some embodiments, at least 87%; in some embodiments, at least 90%; in some embodiments, at least 95%; in some embodiments, at least 96%; in some embodiments, at least 97%; in some embodiments, at least 98%; in some embodiments, at least 99%). In some embodiments, a stereoselectivity is at least 85%. In some embodiments, a stereoselectivity is at least 87%. In some embodiments, a stereoselectivity is at least 90%. In some embodiments, each coupling step independently has a stereoselectivity of virtually 100%.

[0910] In some embodiments, stereopurity of a chiral center, e.g., a chiral linkage phosphorus, in a composition is at least 60%, 70%, 80%, 85%, 87%, 90%, 91%, 92%, 93%, 94%, 95%, 96%, 97%, 98%, 99%, or 99.5%. In some embodiments, a stereopurity is at least 80%. In some embodiments, a stereopurity is at least 85%. In some embodiments, a stereopurity is at least 87%. In some embodiments, a stereopurity is at least 90%. In some embodiments, a stereopurity is virtually 100%. In some embodiments, each chirally controlled internucleotidic linkage independently has a stereochemical purity (typically diastereomeric purity for oligonucleotides with multiple chiral centers) of at least 85%, 87%, 90%, 91%, 92%, 93%, 94%, 95%, 96%, 97%, 98%, 99.5% or virtually 100% (in some embodiments, at least 85%; in some embodiments, at least 87%; in some embodiments, at least 90%; in some embodiments, at least 95%; in some embodiments, at least 96%; in some embodiments, at least 97%; in some embodiments, at least 98%; in some embodiments, at least 99%) at its chiral linkage phosphorus. In some embodiments, a chirally controlled internucleotidic linkage has a stereochemical purity of at least 90%. In some embodiments, a majority of chirally controlled internucleotidic linkages independently have a stereochemical purity of at least 90%. In some embodiments, each chirally controlled internucleotidic linkage independently has a stereochemical purity of at least 90%. In some embodiments, each phosphorothioate internucleotidic linkage is independently chirally controlled. In some embodiments, at least 60%, 65%, 70%, 75%, 80%, 85%, 90%, or 95%, or all chirally controlled internucleotidic linkages are Sp. In some embodiments, at least 60%, 65%, 70%, 75%, 80%, 85%, 90%, or 95%, or all chirally controlled phosphorothioate internucleotidic linkages are Sp. In some embodiments, at least 60%, 65%, 70%, 75%, 80%, 85%, 90%, or 95%, or all phosphorothioate internucleotidic linkages are chirally controlled and are Sp.

[0911] Stereoselectivity and stereopurity may be assessed by various technologies. In some embodiments, stereoselectivity and/or stereopurity is virtually 100% in that when a composition is analyzed by an analytical method (e.g., NMR, HPLC, etc.), virtually all detectable stereoisomers has the intended stereochemistry.

[0912] In some embodiments, at least 1, 2, 3, 4, 5, 6, 7, 8, 9, or 10 couplings of a monomer (as appreciated by those skilled in the art in many embodiments a phosphoramidite for oligonucleotide synthesis) independently have a stereoselectivity less than about 60%, 70%, 80%, 85%, or 90% [for oligonucleotide synthesis, typically diastereoselectivity with respect to formed linkage phosphorus chiral center(s)].

[0913] In some embodiments, in stereorandom (or racemic) preparations (or stereorandom/non-chirally controlled oligonucleotide compositions), at least 1, 2, 3, 4, 5, 6, 7, 8, 9, 10, 11, 12, 13, 14, 15, 16, 17, 18, 19, 20, 21, 22, 23, 24, or 25 chiral internucleotidic linkages of the oligonucleotides independently have a stereochemical purity (typically diastereomeric purity for oligonucleotides comprising multiple chiral centers) less than about 60%, 65%, 70%, 75%, 80%, or 85% with respect to chiral linkage phosphorus of the internucleotidic linkage(s). In some embodiments, a stereochemistry purity (stereopurity) is less than about 60%. In some embodiments, a stereochemistry purity (stereopurity) is less than about 65%. In some embodiments, a stereochemistry purity (stereopurity) is less than about 70%. In some embodiments, a stereochemistry purity (stereopurity) is less than about 75%. In some embodiments, a stereochemistry purity (stereopurity) is less than about 80%.

[0914] In some embodiments, compounds of the present disclosure (e.g., oligonucleotides, chiral auxiliaries, etc.) comprise multiple chiral elements (e.g., multiple carbon and/or phosphorus (e.g., linkage phosphorus of chiral internucleotidic linkages) chiral centers). In some embodiments, at least 1, 2, 3, 4, 5, 6, 7, 8, 9 or more chiral elements of a provided compound (e.g., an oligonucleotide) each independently have a diastereomeric purity as described herein. In some embodiments, a diastereomeric purity is at least 85%. In some embodiments, a diastereomeric purity is at least 86%. In some embodiments, a diastereomeric purity is at least 87%. In some embodiments, a diastereomeric purity is at least 88%. In some embodiments, a diastereomeric purity is at least 89%. In some embodiments, a diastereomeric purity is at least 90%. In some embodiments, a diastereomeric purity is at least 91%. In some embodiments, a diastereomeric purity is at least 92%. In some embodiments, a diastereomeric purity is at least 93%. In some embodiments, a diastereomeric purity is at least 94%. In some embodiments, a diastereomeric purity is at least 95%. In some embodiments, a diastereomeric purity is at least 96%. In some embodiments, a diastereomeric purity is at least 97%. In some embodiments, a diastereomeric purity is at least 98%. In some embodiments, a diastereomeric purity is at least 99%.

[0915] As understood by a person having ordinary skill in the art, in some embodiments, diastereoselectivity of a coupling or diastereomeric purity of a chiral linkage phosphorus center can be assessed through the diastereoselectivity of a dimer formation or diastereomeric purity of a dimer prepared under the same or comparable conditions, wherein the dimer has the same 5′- and 3′-nucleosides and internucleotidic linkage.

[0916] Various technologies can be utilized for identifying or confirming stereochemistry of chiral elements (e.g., configuration of chiral linkage phosphorus) and/or patterns of backbone chiral centers, and/or for assessing stereoselectivity (e.g., diastereoselectivity of couple steps in oligonucleotide synthesis) and/or stereochemical purity (e.g., diastereomeric purity of internucleotidic linkages, compounds (e.g., oligonucleotides), etc.). Example technologies include NMR [e.g., 1D (one-dimensional) and/or 2D (two-dimensional) ¹H-³¹P HETCOR (heteronuclear correlation spectroscopy)], HPLC, RP-HPLC, mass spectrometry, LC-MS, and cleavage of internucleotidic linkages by stereospecific nucleases, etc., which may be utilized individually or in combination. Example useful nucleases include benzonase, micrococcal nuclease, and svPDE (snake venom phosphodiesterase), which are specific for certain internucleotidic linkages with Rp linkage phosphorus (e.g., a Rp phosphorothioate linkage); and nuclease P1, mung bean nuclease, and nuclease S1, which are specific for internucleotidic linkages with Sp linkage phosphorus (e.g., a Sp phosphorothioate linkage). Without wishing to be bound by any particular theory, the present disclosure notes that, in at least some cases, cleavage of oligonucleotides by a particular nuclease may be impacted by structural elements, e.g., chemical modifications (e.g., 2′-modifications of a sugars), base sequences, or stereochemical contexts. For example, it is observed that in some cases, benzonase and micrococcal nuclease, which are specific for internucleotidic linkages with Rp linkage phosphorus, were unable to cleave an isolated Rp phosphorothioate internucleotidic linkage flanked by Sp phosphorothioate internucleotidic linkages.

[0917] In some embodiments, oligonucleotides sharing a common base sequence, a common pattern of backbone linkages, and a common pattern of backbone chiral centers share a common pattern of backbone phosphorus modifications and a common pattern of base modifications. In some embodiments, oligonucleotide compositions sharing a common base sequence, a common pattern of backbone linkages, and a common pattern of backbone chiral centers share a common pattern of backbone phosphorus modifications and a common pattern of nucleoside modifications. In some embodiments, oligonucleotides share a common base sequence, a common pattern of backbone linkages, and a common pattern of backbone chiral centers have identical structures.

[0918] In some embodiments, the present disclosure provides an oligonucleotide composition comprising a plurality of oligonucleotides capable of directing deamination of a target adenosine in a target nucleic acid, wherein oligonucleotides of the plurality are of a particular oligonucleotide type, which composition is chirally controlled in that it is enriched, relative to a substantially racemic preparation of oligonucleotides having the same base sequence, for oligonucleotides of the particular oligonucleotide type.

[0919] In some embodiments, a plurality of oligonucleotides or oligonucleotides of a particular oligonucleotide type in a provided oligonucleotide composition are oligonucleotides. In some embodiments, the present disclosure provides a chirally controlled oligonucleotide composition comprising a plurality of oligonucleotides, wherein the oligonucleotides share:
[0920] a common base sequence;
[0921] a common pattern of backbone linkages; and
[0922] the same linkage phosphorus stereochemistry at one or more chiral internucleotidic linkages (chirally controlled internucleotidic linkages),
[0923] wherein the composition is enriched, relative to a substantially racemic preparation of oligonucleotides sharing the common base sequence and pattern of backbone linkages, for oligonucleotides of the plurality.

[0924] In some embodiments, the present disclosure provides a chirally controlled oligonucleotide composition comprising a plurality of oligonucleotides, wherein the oligonucleotides share:
[0925] a common base sequence;
[0926] a common pattern of backbone linkages; and
[0927] a common pattern of backbone chiral centers, which composition is a substantially pure preparation of a single oligonucleotide in that at least about 10%, 15%, 20%, 25%, 30%, 35%, 40%, 45%, 50%, 55%, 60%, 65%, 70%, 75%, 80%, 85%, 90%, 91%, 92%, 93%, 93%, 95%, 96%, 97%, 98%, or 99% of the oligonucleotides in the composition have the common base sequence, the common pattern of backbone linkages, and the common pattern of backbone chiral centers.

[0928] In some embodiments, an oligonucleotide composition type is further defined by: 4) additional chemical moiety, if any.

[0929] In some embodiments, the percentage is at least about 10%. In some embodiments, the percentage is at least about 20%. In some embodiments, the percentage is at least about 30%. In some embodiments, the percentage is at least about 40%. In some embodiments, the percentage is at least about 50%. In some embodiments, the percentage is at least about 60%. In some embodiments, the percentage is at least about 70%. In some embodiments, the percentage is at least about 75%. In some embodiments, the percentage is at least about 80%. In some embodiments, the percentage is at least about 85%. In some embodiments, the percentage is at least about 90%. In some embodiments, the percentage is at least about 91%. In some embodiments, the percentage is at least about 92%. In some embodiments, the percentage is at least about 93%. In some embodiments, the percentage is at least about 94%. In some embodiments, the percentage is at least about 95%. In some embodiments, the percentage is at least about 96%. In some embodiments, the percentage is at least about 97%. In some embodiments, the percentage is at least about 98%. In some embodiments, the percentage is at least about 99%. In some embodiments, the percentage is or is greater than (DS)^{nc}, wherein DS and nc are each independently as described in the present disclosure.

[0930] In some embodiments, a plurality of oligonucleotides share the same constitution. In some embodiments, a plurality of oligonucleotides are identical (the same stereoisomer). In some embodiments, a chirally controlled oligonucleotide composition is a stereopure oligonucleotide composition wherein oligonucleotides of the plurality are identical (the same stereoisomer), and the composition does not contain any other stereoisomers. Those skilled in the art will appreciate that one or more other stereoisomers may exist as impurities as processes, selectivities, purifications, etc. may not achieve completeness.

[0931] In some embodiments, a provided composition is characterized in that when it is contacted with a target nucleic acid [e.g., a transcript (e.g., pre-mRNA, mature mRNA, other types of RNA, etc. that hybridizes with oligonucleotides of the composition)], levels of the target nucleic acid and/or a product encoded thereby is reduced compared to that observed under a reference condition. In some embodiments, levels of a nucleic acid and/or a product thereof, which nucleic acid is a product of an A to I edition of a target nucleic acid, is increased. In some embodiments, a reference condition is selected from the group consisting of absence of the composition, presence of a reference composition, and combinations thereof. In some embodiments, a reference condition is absence of the composition. In some embodiments, a reference condition is presence of a reference composition. In some embodiments, a reference composition is a composition whose oligonucleotides do not hybridize with the target nucleic acid. In some embodiments, a reference composition is a composition whose oligonucleotides do not comprise a sequence that is sufficiently complementary to the target nucleic acid. In some embodiments, a reference composition is a composition whose oligonucleotides share the same base sequence but do not share the same nucleobase, sugar and/or internucleotidic linkage modifications. In some embodiments, a provided composition is a chirally controlled oligonucleotide composition and a reference composition is a non-chirally controlled oligonucleotide composition which is otherwise identical but is not chirally controlled (e.g., a racemic preparation of oligonucleotides of the same constitution as oligonucleotides of a plurality in the chirally controlled oligonucleotide composition).

[0932] In some embodiments, the present disclosure provides a chirally controlled oligonucleotide composition comprising a plurality of oligonucleotides capable of directing deamination of a target adenosine in a target nucleic acid, wherein the oligonucleotides share:
[0933] a common base sequence,
[0934] a common pattern of backbone linkages, and
[0935] the same linkage phosphorus stereochemistry at one or more chiral internucleotidic linkages (chirally controlled internucleotidic linkages),
[0936] wherein the composition is enriched, relative to a substantially racemic preparation of oligonucleotides sharing the common base sequence and pattern of backbone linkages, for oligonucleotides of the plurality,
[0937] the oligonucleotide composition being characterized in that, when it is contacted with a target sequence, deamination of the target adenosine in the target nucleic acid is improved relative to that observed under a reference condition selected from the group consisting of absence of the composition, presence of a reference composition, and combinations thereof.

[0938] As appreciated by those skilled in the art, deamination of a target adenosine can be assessed using various technologies. In some embodiments, a technology is sequencing, wherein a deaminated adenosine is detected as G or I. In some embodiments, deamination is assessed by levels of a product (e.g., RNA, protein (e.g., encoded by a sequence wherein a target A is replaced with I but is otherwise identical to a target nucleic acid), etc.).

[0939] As demonstrated herein, oligonucleotide structural elements (e.g., sugar modifications, backbone linkages, backbone chiral centers, backbone phosphorus modifications, patterns thereof, etc.) and combinations thereof can provide surprisingly improved properties and/or bioactivities.

[0940] In some embodiments, an oligonucleotide composition is a substantially pure preparation of a single oligonucleotide stereoisomer in that oligonucleotides in the composition that are of the same constitution but are not of the stereoisomer are impurities from the preparation process of said oligonucleotide stereoisomer, in some case, after certain purification procedures.

[0941] In some embodiments, the present disclosure provides oligonucleotides and oligonucleotide compositions that are chirally controlled, and in some embodiments, stereopure. For instance, in some embodiments, a provided composition contains non-random or controlled levels of one or more individual oligonucleotide types. In some embodiments, oligonucleotides of the same oligonucleotide type are identical.

### Nucleobases

[0942] Various nucleobases may be utilized in provided oligonucleotides in accordance with the present disclosure. In some embodiments, a nucleobase is a natural nucleobase, the most commonly occurring ones being A, T, C, G and U. In some embodiments, a nucleobase is a modified nucleobase in that it is not A, T, C, G or U. In some embodiments, a nucleobase is optionally substituted A, T, C, G or U, or a substituted tautomer of A T, C, G or U. In some embodiments, a nucleobase is optionally substituted A, T, C, G or U, e.g., 5mC, 5-hydroxymethyl C, etc. In some embodiments, a nucleobase is alkyl-substituted A, T, C, G or U. In some embodiments, a nucleobase is A. In some embodiments, a nucleobase is T. In some embodiments, a nucleobase is C. In some embodiments, a nucleobase is G. In some embodiments, a nucleobase is U. In some embodiments, a nucleobase is 5mC. In some embodiments, a nucleobase is substituted A, T, C, G or U. In some embodiments, a nucleobase is a substituted tautomer of A, T, C, G or U. In some embodiments, substitution protects certain functional groups in nucleobases to minimize undesired reactions during oligonucleotide synthesis. Suitable technologies for nucleobase protection in oligonucleotide synthesis are widely known in the art and may be utilized in accordance with the present disclosure. In some embodiments, modified nucleobases improves properties and/or activities of oligonucleotides. For example, in many cases, 5mC may be utilized in place of C to modulate certain undesired biological effects, e.g., immune responses. In some embodiments, when determining sequence identity, a substituted nucleobase having the same hydrogen-bonding pattern is treated as the same as the unsubstituted nucleobase, e.g., 5mC may be treated the same as C [e.g., an oligonucleotide having 5mC in place of C (e.g., AT5mCG) is considered to have the same base sequence as an oligonucleotide having C at the corresponding location(s) (e.g., ATCG)]. In some embodiments, a nucleobase is or comprise an optionally substituted ring having at least one nitrogen atom. In some embodiments, a nucleobase comprise Ring BA as described herein, wherein at least one monocyclic ring of Ring BA comprise a nitrogen ring atom.

[0943] In some embodiments, an oligonucleotide comprises one or more A, T, C, G or U. In some embodiments, an oligonucleotide comprises one or more optionally substituted A, T, C, G or U. In some embodiments, an oligonucleotide comprises one or more 5-methylcytidine, 5-hydroxymethylcytidine, 5-formylcytosine, or 5-carboxylcytosine. In some embodiments, an oligonucleotide comprises one or more 5-methylcytidine. In some embodiments, each nucleobase in an oligonucleotide is selected from the group consisting of optionally substituted A, T, C, G and U, and optionally substituted tautomers of A, T, C, G and U. In some embodiments, each nucleobase in an oligonucleotide is optionally protected A, T, C, G and U. In some embodiments, each nucleobase in an oligonucleotide is optionally substituted A, T, C, G or U. In some embodiments, each nucleobase in an oligonucleotide is selected from the group consisting of A, T, C, G, U, and 5mC.

[0944] As demonstrated herein, utilization of certain nucleobases at certain locations (e.g., in a nucleoside opposite to a target adenosine and/or its adjacent nucleoside(s)) can provide oligonucleotides with improved properties and/or activities (e.g., adenosine editing to I). In some embodiments, a useful nucleobase is or comprises Ring BA as described herein. In some embodiments, a nucleobase in a nucleoside is or comprises Ring BA which has the structure of BA-I, BA-I-a, BA-I-b, BA-II, BA-II-a, BA-II-b, BA-III, BA-III-a, BA-III-b, BA-IV, BA-IV-a, BA-IV-b, BA-V, BA-V-a, BA-V-b, or BA-VI, or a tautomer of Ring BA, wherein the nucleobase is optionally substituted or protected. In some embodiments, a nucleobase is optionally substituted or protected, or optionally substituted or protected tautomer of:

[chemical structure]

[chemical structure]

[chemical structure]

In some embodiments, a modified nucleobase is b001U, b002U, b003U, b004U, b005U, b006U, b007U, b008U, b009U, b011U, b012U, b013U, b001A, b002A, b003A, b001G, b002G, b001C, b002C, b003C, b004C, b005C, b006C, b007C, b008C, b009C, b002I, b003I, b004I, b014I, or zdnp. In some embodiments, a modified nucleobase is zdnp, b001U, b002U, b003U, b004U, b005U, b006U, b008U, b002A, b001G, b004C, b007U, b001A, b001C, b002C, b003C, b002I, b003I, b009U, b003A, or b007C. In some embodiments, the present disclosure provides oligonucleotides comprising one or more such nucleobases. In some embodiments, the present disclosure provides compounds comprising such nucleobases. In some embodiments, the present disclosure provides monomers (e.g., those useful for oligonucleotide synthesis) comprising such nucleobases. In some embodiments, the present disclosure provides phosphoramidites comprising such nucleobases. In some embodiments, phosphoramidites are CED phosphoramidites. In some embodiments, monomers comprise auxiliary moieties as described herein (e.g., with P forming bonds to O and N, to O and S, to S and S, etc.). In some embodiments, phosphoramidites comprise chiral auxiliary moieties as described herein (e.g., with P forming bonds to O and N). In some embodiments, R^{NS} comprises such a nucleobase. In some embodiments, nucleobases are protected for oligonucleotide synthesis.

[0945] In some embodiments, the present disclosure provides various nucleosides. In some embodiments, b001U, b002U, b003U, b004U, b005U, b006U, b008U, b002A, b001G, b004C, b007U, b001A, b001C, b002C, b003C, b002I, b003I, b009U, b003A, or b007C may also refer to a nucleoside whose nucleobase is b001U, b002U, b003U, b004U, b005U, b006U, b008U, b002A, b001G, b004C, b007U, b001A, b001C, b002C, b003C, b002I, b003I, b009U, b003A, or b007C, respectively. For example, b001A may refer to a nucleoside whose nucleobase is

[chemical structure]

and whose sugar is a natural DNA sugar; sugar modification may also be indicated, for example, “r” in b001rA indicates there is a 2′-OH on the sugar (a natural RNA sugar). In some embodiments, the present disclosure provides a compound having the structure of

[chemical structure]

or a salt thereof, wherein BA^{s} is as described herein. In some embodiments, a provided compound, e.g., a nucleoside has the structure of

[chemical structure]

or a salt thereof, wherein “*” indicates connection to internucleotidic linkages when in various oligonucleotides, and BA^{s} is as described herein. In some embodiments, BA^{s} is a nucleobase, e.g., BA as described herein. In some embodiments, BA is protected for oligonucleotide synthesis. In some embodiments, a provided nucleoside is selected from Asm01

[chemical structure]

[chemical structure]

[chemical structure]

[chemical structure]

[chemical structure]

[chemical structure]

[chemical structure]

[chemical structure]

[chemical structure]

or a salt thereof, wherein “*” indicates connection to internucleotidic linkages when in various oligonucleotides. In some embodiments, an oligonucleotide comprises a nucleoside described herein. In some embodiments, a nucleoside is connected to a internucleotidic linkage through a nitrogen atom (e.g., sm01, sm18, etc.), wherein the nitrogen atom is directly connected to a linkage phosphorus atom. In some embodiments, the present disclosure provides monomers of nucleosides (e.g., Asm01, Gsm01, Tsm18, etc.) as described herein. In some embodiments, the present disclosure provides phosphoramidites of nucleosides as described herein. In some embodiments, such monomers or phosphoramidites comprise protected hydroxyl (e.g., DMTrO—) and/or protected nucleobases (e.g., for oligonucleotide synthesis). In some embodiments, such monomers or phosphoramidites comprise protected hydroxyl (e.g., DMTrO—), optionally protected nucleobases (e.g., as useful for oligonucleotide synthesis), and/or chiral auxiliary groups. Certain reagents, such as various phosphoramidites, that are useful for incorporating various nucleosides and/or compounds into oligonucleotides, and certain technologies for utilizing such reagents for oligonucleotide preparation, e.g., cycles, conditions, etc., are described in the Examples or WO 2021/071858. Certain oligonucleotides comprising modified nucleosides and compositions thereof are prepared utilizing such reagents and technologies and are presented herein as examples, e.g., those in various Tables including those in Table 1.

[0946] In some embodiments, the present disclosure provides oligonucleotides comprising one or more modified nucleobases as described herein. In some embodiments, the present disclosure provides compounds comprising modified nucleobases as described herein. In some embodiments, the present disclosure provides monomers (e.g., those useful for oligonucleotide synthesis) comprising modified nucleobases as described herein. In some embodiments, the present disclosure provides phosphoramidites comprising modified nucleobases as described herein. In some embodiments, phosphoramidites are CED phosphoramidites. In some embodiments, monomers comprise auxiliary moieties as described herein (e.g., with P forming bonds to O and N, to O and S, to S and S, etc.). In some embodiments, phosphoramidites comprise chiral auxiliary moieties as described herein (e.g., with P forming bonds to O and N). In some embodiments, R^{NS} comprises a nucleobase as described herein. In some embodiments, R^{NS} comprises a modified nucleobase as described herein. In some embodiments, nucleobases are protected for oligonucleotide synthesis.

[0947] In some embodiments, an oligonucleotide comprises one or more structures independently selected from pseudoisocytidine, Benner's base Z, 5-hydroxyC, 5-aminoC and 8-oxoA.

[0948] In some embodiments, a nucleobase is optionally substituted 2AP (2-amino purine,

[chemical structure]

or DAP (2,6-diamino purine,

[chemical structure]

In some embodiments, a nucleobase is optionally substituted 2AP. In some embodiments, a nucleobase is optionally substituted DAP. In some embodiments, a nucleobase is 2AP. In some embodiments, a nucleobase is DAP.

[0949] As appreciated by those skilled in the art, various nucleobases are known in the art and can be utilized in accordance with the present disclosure, e.g., those described in U.S. Pat. Nos. 9,394,333, 9,744,183, 9,605,019, 9,982,257, US 20170037399, US 20180216108, US 20180216107, U.S. Pat. No. 9,598,458, WO 2017/062862, WO 2018/067973, WO 2017/160741, WO 2017/192679, WO 2017/210647, WO 2018/098264, WO 2018/022473, WO 2018/223056, WO 2018/223073, WO 2018/223081, WO 2018/237194, WO 2019/032607, WO 2019/032612, WO 2019/055951, WO 2019/075357, WO 2019/200185, WO 2019/217784, WO 2019/032612, WO 2020/191252, and/or WO 2021/071858, the sugar, base, and internucleotidic linkage modifications of each of which are independently incorporated herein by reference. In some embodiments, nucleobases are protected and useful for oligonucleotide synthesis.

[0950] In some embodiments, a nucleobase is a natural nucleobase or a modified nucleobase derived from a natural nucleobase. Examples include uracil, thymine, adenine, cytosine, and guanine optionally having their respective amino groups protected by acyl protecting groups, 2-fluorouracil, 2-fluorocytosine, 5-bromouracil, 5-iodouracil, 2,6-diaminopurine, azacytosine, pyrimidine analogs such as pseudoisocytosine and pseudouracil and other modified nucleobases such as 8-substituted purines, xanthine, or hypoxanthine (the latter two being the natural degradation products). Certain examples of modified nucleobases are disclosed in Chiu and Rana, RNA, 2003, 9, 1034-1048, Limbach et al. Nucleic Acids Research, 1994, 22, 2183-2196 and Revankar and Rao, Comprehensive Natural Products Chemistry, vol. 7, 313. In some embodiments, a modified nucleobase is substituted uracil, thymine, adenine, cytosine, or guanine. In some embodiments, a modified nucleobase is a functional replacement, e.g., in terms of hydrogen bonding and/or base pairing, of uracil, thymine, adenine, cytosine, or guanine. In some embodiments, a nucleobase is optionally substituted uracil, thymine, adenine, cytosine, 5-methylcytosine, or guanine. In some embodiments, a nucleobase is uracil, thymine, adenine, cytosine, 5-methylcytosine, or guanine.

[0951] In some embodiments, a provided oligonucleotide comprises one or more 5-methylcytosine. In some embodiments, the present disclosure provides an oligonucleotide whose base sequence is disclosed herein, e.g., in Table 1, wherein each T may be independently replaced with U and vice versa, and each cytosine is optionally and independently replaced with 5-methylcytosine or vice versa. As appreciated by those skilled in the art, in some embodiments, 5mC may be treated as C with respect to base sequence of an oligonucleotide—such oligonucleotide comprises a nucleobase modification at the C position (e.g., see various oligonucleotides in Table 1). In description of oligonucleotides, typically unless otherwise noted, nucleobases, sugars and internucleotidic linkages are non-modified.

[0952] In some embodiments, a modified base is optionally substituted adenine, cytosine, guanine, thymine, or uracil, or a tautomer thereof. In some embodiments, a modified nucleobase is a modified adenine, cytosine, guanine, thymine or uracil, modified by one or more modifications by which:
[0953] a nucleobase is modified by one or more optionally substituted groups independently selected from acyl, halogen, amino, azide, alkyl, alkenyl, alkynyl, aryl, heteroalkyl, heteroalkenyl, heteroalkynyl, heterocyclyl, heteroaryl, carboxyl, hydroxyl, biotin, avidin, streptavidin, substituted silyl, and combinations thereof;
[0954] one or more atoms of a nucleobase are independently replaced with a different atom selected from carbon, nitrogen and sulfur;
[0955] one or more double bonds in a nucleobase are independently hydrogenated; or
[0956] one or more aryl or heteroaryl rings are independently inserted into a nucleobase.

[0957] In some embodiments, a base is optionally substituted A, T, C, G or U, wherein one or more —NH₂ are independently and optionally replaced with —C(-L-R¹)₃, one or more —NH— are independently and optionally replaced with —C(-L-R¹)₂—, one or more ═N— are independently and optionally replaced with —C(-L-R¹)—, one or more ═CH— are independently and optionally replaced with ═N—, and one or more ═O are independently and optionally replaced with ═S, ═N(-L-R¹), or ═C(-L-R¹)₂, wherein two or more -L-R¹ are optionally taken together with their intervening atoms to form a 3-30 membered bicyclic or polycyclic ring having 0-10 heteroatom ring atoms. In some embodiments, a modified base is optionally substituted A, T, C, G or U, wherein one or more —NH₂ are independently and optionally replaced with —C(-L-R¹)₃, one or more —NH— are independently and optionally replaced with —C(-L-R¹)₂—, one or more ═N— are independently and optionally replaced with —C(-L-R¹)—, one or more ═CH— are independently and optionally replaced with ═N—, and one or more ═O are independently and optionally replaced with ═S, ═N(-L-R¹), or ═C(-L-R¹)₂, wherein two or more -L-R¹ are optionally taken together with their intervening atoms to form a 3-30 membered bicyclic or polycyclic ring having 0-10 heteroatom ring atoms, wherein the modified base is different than the natural A, T, C, G and U. In some embodiments, a base is optionally substituted A, T, C, G or U. In some embodiments, a modified base is substituted A, T, C, G or U, wherein the modified base is different than the natural A, T, C, G and U.

[0958] In some embodiments, a modified nucleobase is a modified nucleobase known in the art, e.g., WO2017/210647. In some embodiments, modified nucleobases are expanded-size nucleobases in which one or more aryl and/or heteroaryl rings, such as phenyl rings, have been added. Certain examples of modified nucleobases, including nucleobase replacements, are described in the Glen Research catalog (Glen Research, Sterling, Virginia); Krueger A T et al., Acc. Chem. Res., 2007, 40, 141-150; Kool, E T, Acc. Chem. Res., 2002, 35, 936-943; Benner S. A., et al., Nat. Rev. Genet., 2005, 6, 553-543; Romesberg, F. E., et al., Curr. Opin. Chem. Biol., 2003, 7, 723-733; or Hirao, I., Curr. Opin. Chem. Biol., 2006, 10, 622-627. In some embodiments, an expanded-size nucleobase is an expanded-size nucleobase described in, e.g., WO2017/210647. In some embodiments, modified nucleobases are moieties such as corrin- or porphyrin-derived rings. Certain porphyrin-derived base replacements have been described in, e.g., Morales-Rojas, H and Kool, E T, Org. Lett., 2002, 4, 4377-4380. In some embodiments, a porphyrin-derived ring is a porphyrin-derived ring described in, e.g., WO2017/219647. In some embodiments, a modified nucleobase is a modified nucleobase described in, e.g., WO2017/219647. In some embodiments, a modified nucleobase is fluorescent. Examples of such fluorescent modified nucleobases include phenanthrene, pyrene, stillbene, isoxanthine, isozanthopterin, terphenyl, terthiophene, benzoterthiophene, coumarin, lumazine, tethered stillbene, benzo-uracil, naphtho-uracil, etc., and those described in e.g., WO2017/210647. In some embodiments, a nucleobase or modified nucleobase is selected from: C5-propyne T, C5-propyne C, C5-Thiazole, phenoxazine, 2-thiothymine, 5-triazolylphenyl-thymine, diaminopurine, and N2-aminopropylguanine.

[0959] In some embodiments, a modified nucleobase is selected from 5-substituted pyrimidines, 6-azapyrimidines, alkyl or alkynyl substituted pyrimidines, alkyl substituted purines, and N-2, N-6 and O-6 substituted purines. In certain embodiments, modified nucleobases are selected from 2-aminopropyladenine, 5-hydroxymethyl cytosine, xanthine, hypoxanthine, 2-aminoadenine, 6-N-methylguanine, 6-N-methyladenine, 2-propyladenine, 2-thiouracil, 2-thiothymine and 2-thiocytosine, 5-propynyl (—C≡C—CH₃) uracil, 5-propynylcytosine, 6-azouracil, 6-azocytosine, 6-azothymine, 5-ribosyluracil (pseudouracil), 4-thiouracil, 8-halo, 8-amino, 8-thiol, 8-thioalkyl, 8-hydroxyl, 8-aza and other 8-substituted purines, 5-halo, particularly 5-bromo, 5-trifluoromethyl, 5-halouracil, and 5-halocytosine, 7-methylguanine, 7-methyladenine, 2-F-adenine, 2-aminoadenine, 7-deazaguanine, 7-deazaadenine, 3-deazaguanine, 3-deazaadenine, 6-N-benzoyladenine, 2-N-isobutyrylguanine, 4-N-benzoylcytosine, 4-N-benzoyluracil, 5-methyl 4-N-benzoylcytosine, 5-methyl 4-N-benzoyluracil, universal bases, hydrophobic bases, promiscuous bases, size-expanded bases, and fluorinated bases. In some embodiments, modified nucleobases are tricyclic pyrimidines, such as 1,3-diazaphenoxazine-2-one, 1,3-diazaphenothiazine-2-one or 9-(2-aminoethoxy)-1,3-diazaphenoxazine-2-one (G-clamp). In some embodiments, modified nucleobases are those in which the purine or pyrimidine base is replaced with other heterocycles, for example, 7-deaza-adenine, 7-deazaguanosine, 2-aminopyridine or 2-pyridone. In some embodiments, modified nucleobases are those disclosed in U.S. Pat. No. 3,687,808, The Concise Encyclopedia Of Polymer Science And Engineering, Kroschwitz, J. I., Ed., John Wiley & Sons, 1990, 858-859; Englisch et al., Angewandte Chemie, International Edition, 1991, 30, 613; Sanghvi, Y. S., Chapter 15, Antisense Research and Applications, Crooke, S. T. and Lebleu, B., Eds., CRC Press, 1993, 273-288; or in Chapters 6 and 15, Antisense Drug Technology, Crooke S. T., Ed., CRC Press, 2008, 163-166 and 442-443.

[0960] In some embodiments, modified nucleobases and methods thereof are those described in US 20030158403, U.S. Pat. No. 3,687,808, 4,845,205, 5,130,302, 5,134,066, 5,175,273, 5,367,066, 5,432,272, 5,434,257, 5,457,187, 5,459,255, 5,484,908, 5,502,177, 5,525,711, 5,552,540, 5,587,469, 5,594,121, 5,596,091, 5,614,617, 5,645,985, 5,681,941, 5,750,692, 5,763,588, 5,830,653, or 6,005,096.

[0961] In some embodiments, a modified nucleobase is substituted. In some embodiments, a modified nucleobase is substituted such that it contains, e.g., heteroatoms, alkyl groups, or linking moieties connected to fluorescent moieties, biotin or avidin moieties, or other protein or peptides. In some embodiments, a modified nucleobase is a “universal base” that is not a nucleobase in the most classical sense, but that functions similarly to a nucleobase. One example of a universal base is 3-nitropyrrole.

[0962] In some embodiments, nucleosides that can be utilized in provided technologies comprise modified nucleobases and/or modified sugars, e.g., 4-acetylcytidine; 5-(carboxyhydroxylmethyl)uridine; 2′-O-methylcytidine; 5-carboxymethylaminomethyl-2-thiouridine; 5-carboxymethylaminomethyluridine; dihydrouridine; 2′-O-methylpseudouridine; beta,D-galactosylqueosine; 2′-O-methylguanosine; N⁶-isopentenyladenosine; 1-methyladenosine; 1-methylpseudouridine; 1-methylguanosine; 1-methylinosine; 2,2-dimethylguanosine; 2-methyladenosine; 2-methylguanosine; N⁷-methylguanosine; 3-methyl-cytidine; 5-methylcytidine; 5-hydroxymethylcytidine; 5-formylcytosine; 5-carboxylcytosine; N⁶-methyladenosine; 7-methylguanosine; 5-methylaminoethyluridine; 5-methoxyaminomethyl-2-thiouridine; beta,D-mannosylqueosine; 5-methoxycarbonylmethyluridine; 5-methoxyuridine; 2-methylthio-N⁶-isopentenyladenosine; N-((9-beta,D-ribofuranosyl-2-methylthiopurine-6-yl)carbamoyl)threonine; N-((9-beta,D-ribofuranosylpurine-6-yl)-N-methylcarbamoyl)threonine; uridine-5-oxyacetic acid methylester; uridine-5-oxyacetic acid (v); pseudouridine; queosine; 2-thiocytidine; 5-methyl-2-thiouridine; 2-thiouridine; 4-thiouridine; 5-methyluridine; 2′-O-methyl-5-methyluridine; and 2′-O-methyluridine.

[0963] In some embodiments, a nucleobase, e.g., a modified nucleobase comprises one or more biomolecule binding moieties such as e.g., antibodies, antibody fragments, biotin, avidin, streptavidin, receptor ligands, or chelating moieties. In other embodiments, a nucleobase is 5-bromouracil, 5-iodouracil, or 2,6-diaminopurine. In some embodiments, a nucleobase comprises substitution with a fluorescent or biomolecule binding moiety. In some embodiments, a substituent is a fluorescent moiety. In some embodiments, a substituent is biotin or avidin.

[0964] Certain examples of nucleobases and related methods are described in U.S. Pat. Nos. 3,687,808, 4,845,205, 513,030, 5,134,066, 5,175,273, 5,367,066, 5,432,272, 5,457,187, 5,457,191, 5,459,255, 5,484,908, 5,502,177, 5,525,711, 5,552,540, 5,587,469, 5,594,121, 5,596,091, 5,614,617, 5,681,941, 5,750,692, 6,015,886, 6,147,200, 6,166,197, 6,222,025, 6,235,887, 6,380,368, 6,528,640, 6,639,062, 6,617,438, 7,045,610, 7,427,672, US or U.S. Pat. No. 7,495,088.

[0965] In some embodiments, an oligonucleotide comprises a nucleobase, sugar, nucleoside, and/or internucleotidic linkage which is described in any of: Gryaznov, S; Chen, J.-K. J. Am. Chem. Soc. 1994, 116, 3143; Hendrix et al. 1997 Chem. Eur. J. 3: 110; Hyrup et al. 1996 Bioorg. Med. Chem. 4: 5; Jepsen et al. 2004 Oligo. 14: 130-146; Jones et al. J. Org. Chem. 1993, 58, 2983; Koizumi et al. 2003 Nuc. Acids Res. 12: 3267-3273; Koshkin et al. 1998 Tetrahedron 54: 3607-3630; Kumar et al. 1998 Bioo. Med. Chem. Let. 8: 2219-2222; Lauritsen et al. 2002 Chem. Comm. 5: 530-531; Lauritsen et al. 2003 Bioo. Med. Chem. Lett. 13: 253-256; Mesmaeker et al. Angew. Chem., Int. Ed. Engl. 1994, 33, 226; Morita et al. 2001 Nucl. Acids Res. Supp. 1: 241-242; Morita et al. 2002 Bioo. Med. Chem. Lett. 12: 73-76; Morita et al. 2003 Bioo. Med. Chem. Lett. 2211-2226; Nielsen et al. 1997 Chem. Soc. Rev. 73; Nielsen et al. 1997 J. Chem. Soc. Perkins Transl. 1: 3423-3433; Obika et al. 1997 Tetrahedron Lett. 38 (50): 8735-8; Obika et al. 1998 Tetrahedron Lett. 39: 5401-5404; Pallan et al. 2012 Chem. Comm. 48: 8195-8197; Petersen et al. 2003 TRENDS Biotech. 21: 74-81; Rajwanshi et al. 1999 Chem. Commun. 1395-1396; Schultz et al. 1996 Nucleic Acids Res. 24: 2966; Seth et al. 2009 J. Med. Chem. 52: 10-13; Seth et al. 2010 J. Med. Chem. 53: 8309-8318; Seth et al. 2010 J. Org. Chem. 75: 1569-1581; Seth et al. 2012 Bioo. Med. Chem. Lett. 22: 296-299; Seth et al. 2012 Mol. Ther-Nuc. Acids. 1, e47; Seth, Punit P; Siwkowski, Andrew; Allerson, Charles R; Vasquez, Guillermo; Lee, Sam; Prakash, Thazha P; Kinberger, Garth; Migawa, Michael T; Gaus, Hans; Bhat, Balkrishen; et al. From Nucleic Acids Symposium Series (2008), 52(1), 553-554; Singh et al. 1998 Chem. Comm. 1247-1248; Singh et al. 1998 J. Org. Chem. 63: 10035-39; Singh et al. 1998 J. Org. Chem. 63: 6078-6079; Sorensen 2003 Chem. Comm. 2130-2131; Ts'o et al. Ann. N. Y. Acad. Sci. 1988, 507, 220; Van Aerschot et al. 1995 Angew. Chem. Int. Ed. Engl. 34: 1338; Vasseur et al. J. Am. Chem. Soc. 1992, 114, 4006; WO 2007090071; or WO 2016/079181.

[0966] In some embodiments, an oligonucleotide comprises a modified nucleobase, nucleoside or nucleotide which is described in any of: Feldman et al. 2017 J. Am. Chem. Soc. 139: 11427-11433, Feldman et al. 2017 Proc. Natl. Acad. Sci. USA 114: E6478-E6479, Hwang et al. 2009 Nucl. Acids Res. 37: 4757-4763, Hwang et al. 2008 J. Am. Chem. Soc. 130: 14872-14882, Lavergne et al. 2012 Chem. Eur. J. 18: 1231-1239, Lavergne et al. 2013 J. Am. Chem. Soc. 135: 5408-5419, Ledbetter et al. 2018 J. Am. Chem. Soc. 140: 758-765, Malyshev et al. 2009 J. Am. Chem. Soc. 131: 14620-14621, Seo et al. 2009 Chem. Bio. Chem. 10: 2394-2400, e.g., d3FB, d2Py analogs, d2Py, d3MPy, d4MPy, d5MPy, d34DMPy, d35DMPy, d45DMPy, d5FM, d5PrM, d5SICS, dFEMO, dMMO2, dNaM, dNM01, dTPT3, nucleotides with 2′-azido, 2′-chloro, 2′-amino or arabinose sugars, isocarbostiryl-, napthyl- and azaindole-nucleotides, and modifications and derivatives and functionalized versions thereof, e.g., those in which the sugar comprises a 2′-modification and/or other modification, and dMMO2 derivatives with meta-chlorine, -bromine, -iodine, -methyl, or -propinyl substituents.

[0967] In some embodiments, a nucleobase comprises at least one optionally substituted ring which comprises a heteroatom ring atom. In some embodiments, a nucleobase comprises at least one optionally substituted ring which comprises a nitrogen ring atom. In some embodiments, such a ring is aromatic. In some embodiments, a nucleobase is bonded to a sugar through a heteroatom. In some embodiments, a nucleobase is bonded to a sugar through a nitrogen atom. In some embodiments, a nucleobase is bonded to a sugar through a ring nitrogen atom.

[0968] In some embodiments, an oligonucleotide comprises a nucleobase or modified nucleobase as described in: WO 2018/022473, WO 2018/098264, WO 2018/223056, WO 2018/223073, WO 2018/223081, WO 2018/237194, WO 2019/032607, WO 2019/055951, WO 2019/075357, WO 2019/200185, WO 2019/217784, WO 2019/032612, WO 2020/191252, and/or WO 2021/071858, the bases and modified nucleobases of each of which are independently incorporated herein by reference.

[0969] In some embodiments, a nucleobase is an optionally substituted purine base residue. In some embodiments, a nucleobase is a protected purine base residue. In some embodiments, a nucleobase is an optionally substituted adenine residue. In some embodiments, a nucleobase is a protected adenine residue. In some embodiments, a nucleobase is an optionally substituted guanine residue. In some embodiments, a nucleobase is a protected guanine residue. In some embodiments, a nucleobase is an optionally substituted cytosine residue. In some embodiments, a nucleobase is a protected cytosine residue. In some embodiments, a nucleobase is an optionally substituted thymine residue. In some embodiments, a nucleobase is a protected thymine residue. In some embodiments, a nucleobase is an optionally substituted uracil residue. In some embodiments, a nucleobase is a protected uracil residue. In some embodiments, a nucleobase is an optionally substituted 5-methylcytosine residue. In some embodiments, a nucleobase is a protected 5-methylcytosine residue.

[0970] In some embodiments, a provided oligonucleotide comprises a modified nucleobase described in, e.g., U.S. Pat. No. 5,552,540, 6,222,025, 6,528,640, 4,845,205, 5,681,941, 5,750,692, 6,015,886, 5,614,617, 6,147,200, 5,457,187, 6,639,062, 7,427,672, 5,459,255, 5,484,908, 7,045,610, 3,687,808, 5,502,177, 5,525,711 6,235,887, 5,175,273, 6,617,438, 5,594,121, 6,380,368, 5,367,066, 5,587,469, 6,166,197, 5,432,272, 7,495,088, 5,134,066, or 5,596,091. In some embodiments, a nucleobase is described in WO 2020/154344, WO 2020/154343, WO 2020/154342, WO 2020/165077, WO 2020/201406, WO 2020/216637, or WO 2020/252376, and can be utilized in accordance with the present disclosure.

[0971] In some embodiments, a nucleobase is a protected base residue as used in oligonucleotide preparation. In some embodiments, a nucleobase is a base residue illustrated in US 2011/0294124, US 2015/0211006, US 2015/0197540, WO 2015/107425, WO 2017/192679, WO 2018/022473, WO 2018/098264, WO 2018/223056, WO 2018/223073, WO 2018/223081, WO 2018/237194, WO 2019/032607, WO 2019/055951, WO 2019/075357, WO 2019/200185, WO 2019/217784, WO 2019/032612, WO 2020/191252, and/or WO 2021/071858, the base residues of each of which are independently incorporated herein by reference.

### Sugars

[0972] Various sugars, including modified sugars, can be utilized in accordance with the present disclosure. In some embodiments, the present disclosure provides sugar modifications and patterns thereof optionally in combination with other structural elements (e.g., internucleotidic linkage modifications and patterns thereof, pattern of backbone chiral centers thereof, etc.) that when incorporated into oligonucleotides can provide improved properties and/or activities.

[0973] The most common naturally occurring nucleosides comprise ribose sugars (e.g., in RNA) or deoxyribose sugars (e.g., in DNA) linked to the nucleobases adenosine (A), cytosine (C), guanine (G), thymine (T) or uracil (U). In some embodiments, a sugar, e.g., various sugars in many oligonucleotides in Table 1 (unless otherwise notes), is a natural DNA sugar (in DNA nucleic acids or oligonucleotides, having the structure of

[chemical structure]

wherein a nucleobase is attached to the 1′ position, and the 3′ and 5′ positions are connected to internucleotidic linkages (as appreciated by those skilled in the art, if at the 5′-end of oligonucleotide, the 5′ position may be connected to a 5′-end group (e.g., —OH), and if at the 3′-end of an oligonucleotide, the 3′ position may be connected to a 3′-end group (e.g., —OH). In some embodiments, a sugar is a natural RNA sugar (in RNA nucleic acids or oligonucleotides, having the structure of

[chemical structure]

wherein a nucleobase is attached to the 1′ position, and the 3′ and 5′ positions are connected to internucleotidic linkages (as appreciated by those skilled in the art, if at the 5′-end of an oligonucleotide, the 5′ position may be connected to a 5′-end group (e.g., —OH), and if at the 3′-end of an oligonucleotide, the 3′ position may be connected to a 3′-end group (e.g., —OH). In some embodiments, a sugar is a modified sugar in that it is not a natural DNA sugar or a natural RNA sugar. Among other things, modified sugars may provide improved stability. In some embodiments, modified sugars can be utilized to alter and/or optimize one or more hybridization characteristics. In some embodiments, modified sugars can be utilized to alter and/or optimize target nucleic acid recognition. In some embodiments, modified sugars can be utilized to optimize Tm. In some embodiments, modified sugars can be utilized to improve oligonucleotide activities.

[0974] Among other things, the present disclosure demonstrates that various non-natural RNA sugars, such as natural DNA sugar, various modified sugars, etc., may be utilized in accordance with the present disclosure. For example, one or more natural DNA sugars can be tolerated at various positions. In some embodiments, incorporation of one or more natural DNA sugars provides increased levels of editing, or increased levels of editing by ADAR1 (p110, p150 or both), ADAR2, or both. In some embodiments, editing by ADAR1 is improved. In some embodiments, one or more sugars of N₋₃, N₋₁, N₁, N₄, N₅, N₇, N₈, N₁₀, N₁₂, N₁₃, N₁₄, N₁₅, N₁₆, N₁₇, N₁₈, N₂₀, and N₂₁ is independently a natural DNA sugar (-(e.g., N₋₁): counting from N₀ to the 3′-end of an oligonucleotide; + or just a number (e.g., N₁): counting from N₀ to the 5′-end of an oligonucleotide; each N_{NZ} is independently a nucleoside, wherein NZ is an integer from, e.g., about −100, −90, −80, −70, −60, −50, −40, −30, −20, −10, −9, −8, −7, −6, −5, −4, etc. to). In some embodiments, one or more sugars of N₋₃, N₋₁, N₀, N₁, N₄, N₅, N₇, N₈, N₁₀, N₁₂, N₁₃, N₁₄, N₁₅, N₁₆, N₁₇, N₁₈, N₂₀, and N₂₁ is independently a natural DNA sugar. In some embodiments, one or more sugars of N₋₁, N₅, N₁₁, N₁₂ and N₂₀ are independently a natural DNA sugar. In some embodiments, a sugar of N₋₁ is a natural DNA sugar. In some embodiments, a sugar of N₀ is a natural DNA sugar. In some embodiments, a sugar of N₁ is a natural DNA sugar. In some embodiments, a sugar of N₅ is a natural DNA sugar. In some embodiments, a sugar of N₁₁ is a natural DNA sugar. In some embodiments, a sugar of N₁₂ is a natural DNA sugar. In some embodiments, modified sugars are tolerated at one or more positions. In some embodiments, 2′-modified sugars, e.g., 2′-F and/or 2′-OR modified sugars are utilized at one or more or a majority of positions, wherein R is optionally substituted C₁₋₆ aliphatic (e.g., methyl). In some embodiments, modified sugars are utilized at one or more or a majority of or all positions out of 5′-N₁N₀N₋₁-3′. In some embodiments, 2′-OR modified sugars are utilized at one or more or a majority of or all positions out of 5′-N₁N₀N₋₁-3′ wherein R is optionally substituted C₁₋₆ aliphatic (e.g., methyl). In some embodiments, modified sugars are utilized at one or more or a majority of or all positions out of 5′-N₁N₀N₋₁-3′ and one or more 2′-F modified sugars, natural DNA sugars and/or natural RNA sugars are utilized in 5′-N₁N₀N₋₁-3′. In some embodiments, modified sugars are utilized at one or more or a majority of or all positions out of 5′-N₁N₀N₋₁-3′ and each sugar of 5′-N₁N₀N₋₁-3′ is independently a 2′-F modified sugar, a natural DNA sugar or a natural RNA sugar. In some embodiments, modified sugars are utilized at one or more or a majority of or all positions out of 5′-N₁N₀N₋₁-3′ and each sugar of 5′-N₁N₀N₋₁-3′ is independently a 2′-F modified sugar or a natural DNA sugar. In some embodiments, modified sugars are utilized at one or more or a majority of or all positions out of 5′-N₁N₀N₋₁-3′ and each sugar of 5′-N₁N₀N₋₁-3′ is independently a natural DNA sugar. In some embodiments, modified sugars, e.g., 2′-OR modified sugars (wherein R is optionally substituted C₁₋₆ alkyl) provide increased levels of editing, or increased levels of editing by ADAR1 (p110, p150 or both), ADAR2, or both. In some embodiments, editing by ADAR2 is improved. In some embodiments, a modified sugar is a bicyclic sugar (e.g., a LNA sugar, a cEt sugar, etc.). In some embodiments, a bicyclic sugar may be utilized at one or more or all positions where a 2′-OR sugar is utilized, wherein R is optionally substituted C₁₋₆ alkyl. In some embodiments, 2′-OR is 2′-OMe. In some embodiments, 2′-OR is 2′-MOE. In some embodiments, a majority is at least 50%, 60%, 70%, 75%, 80%, 85%, 90%, 95%, or 99% (e.g., 55%-100%, 60%-100%, 70-100%, 75%-100%, 80%-100%, 90%-100%, 95%-100%, 60%-95%, 70%-95%, 75-95%, 80-95%, 85-95%, 90-95%, 51%, 60%, 70%, 75%, 80%, 85%, 90%, 95%, or 99%, etc.

[0975] In some embodiments, one or more (e.g., 1-10, 1, 2, 3, 4, or 5, etc.) of the first several (e.g., 1-10, 1, 2, 3, 4, or 5, etc.) sugars (unless otherwise specified, from the 5′-end) of a provided oligonucleotide or of a first domain are independently modified sugars. In some embodiments, each of the first several sugars is independently a modified sugar. In some embodiments, the first one, two or three sugars of a provided oligonucleotide or of a first domain are independently modified sugars. In some embodiments, the first sugar is a modified sugar. In some embodiments, the first two sugars are independently modified sugars. In some embodiments, the first three sugars are independently modified sugars (e.g., WV-27458). In some embodiments, a modified sugar is a bicyclic sugar. In some embodiments, a modified sugar is a 2′-modified sugar. In some embodiments, each modified sugar is independently a 2′-modified sugar. In some embodiments, a modified sugar is a 2′-OMe modified sugar. In some embodiments, each modified sugar is a 2′-OMe modified sugar. In some embodiments, a modified sugar is a 2′-MOE modified sugar. In some embodiments, each modified sugar is a 2′-MOE modified sugar. In some embodiments, each modified sugar is independently a 2′-OMe or 2′-MOE modified sugar.

[0976] In some embodiments, one or more (e.g., 1-10, 1, 2, 3, 4, or 5, etc.) of the last several (e.g., 1-10, 1, 2, 3, 4, or 5, etc.) sugars (unless otherwise specified, from the 5′-end) of a provided oligonucleotide or of a second domain or a third subdomain are independently modified sugars. In some embodiments, each of the last several sugars is independently a modified sugar. In some embodiments, the last one, two or three sugars of a provided oligonucleotide or of a second domain or a third subdomain are independently modified sugars. In some embodiments, the last sugar is a modified sugar. In some embodiments, the last two sugars are independently modified sugars. In some embodiments, the last three sugars are independently modified sugars. In some embodiments, the last four sugars are independently modified sugars (e.g., WV-27458). In some embodiments, a modified sugar is a bicyclic sugar. In some embodiments, a modified sugar is a 2′-modified sugar. In some embodiments, each modified sugar is independently a 2′-modified sugar. In some embodiments, a modified sugar is a 2′-OMe modified sugar. In some embodiments, each modified sugar is a 2′-OMe modified sugar. In some embodiments, a modified sugar is a 2′-MOE modified sugar. In some embodiments, each modified sugar is a 2′-MOE modified sugar. In some embodiments, each modified sugar is independently a 2′-OMe or 2′-MOE modified sugar.

[0977] Sugars can be bonded to internucleotidic linkages at various positions. As non-limiting examples, internucleotidic linkages can be bonded to the 2′, 3′, 4′ or 5′ positions of sugars. In some embodiments, as most commonly in natural nucleic acids, an internucleotidic linkage connects with one sugar at the 5′ position and another sugar at the 3′ position unless otherwise indicated.

[0978] In some embodiments, a sugar is an optionally substituted natural DNA or RNA sugar. In some embodiments, a sugar is optionally substituted

[chemical structure]

In some embodiments, the 2′ position is optionally substituted. In some embodiments, a sugar is

[chemical structure]

In some embodiments, a sugar has the structure of

[chemical structure]

wherein each of R^{1s}, R^{2s}, R^{3s}, R^{4s}, and R^{5s} is independently —H, a suitable substituent or suitable sugar modification (e.g., those described in U.S. Pat. Nos. 9,394,333, 9,744,183, 9,605,019, 9,982,257, US 20170037399, US 20180216108, US 20180216107, U.S. Pat. No. 9,598,458, WO 2017/062862, WO 2018/067973, WO 2017/160741, WO 2017/192679, WO 2017/210647, WO 2018/098264, WO 2018/022473, WO 2018/223056, WO 2018/223073, WO 2018/223081, WO 2018/237194, WO 2019/032607, WO 2019/032612, WO 2019/055951, WO 2019/075357, WO 2019/200185, WO 2019/217784, WO 2019/032612, WO 2020/191252, and/or WO 2021/071858, the substituents, sugar modifications, descriptions of R^{1s}, R^{2s}, R^{3s}, R^{4s}, and R^{5s}, and modified sugars of each of which are independently incorporated herein by reference). In some embodiments, each of R^{1s}, R^{2s}, R^{3s}, R^{4s}, and R^{5s} is independently R^{s}, wherein each R^{s} is independently —F, —Cl, —Br, —I, —CN, —N₃, —NO, —NO₂, -L^{s}-R′, -L^{s}-OR′, -L^{s}-SR′, -L^{s}-N(R′)₂, —O-L^{s}-OR′, —O-L^{s}-SR′, or —O-L^{s}-N(R′)₂, wherein each R′ is independently as described herein, and each L^{s} is independently a covalent bond or optionally substituted bivalent C₁₋₆ aliphatic or heteroaliphatic having 1-4 heteroatoms; or two R^{s} are taken together to form a bridge -L^{s}-. In some embodiments, R′ is optionally substituted C₁₋₁₀ aliphatic. In some embodiments, a sugar has the structure of

[chemical structure]

In some embodiments, a sugar has the structure of

[chemical structure]

In some embodiments, a sugar has the structure of

[chemical structure]

In some embodiments, a sugar has the structure of

[chemical structure]

In some embodiments, a sugar has the structure of

[chemical structure]

In some embodiments, a sugar has the structure of

[chemical structure]

In some embodiments, a sugar has the structure of

[chemical structure]

In some embodiments, a sugar has the structure of

[chemical structure]

In some embodiments, a sugar has the structure of

[chemical structure]

In some embodiments, R^{5s} is optionally substituted C₁₋₆ aliphatic. In some embodiments, R^{5s} is optionally substituted C₁₋₆ alkyl. In some embodiments, R^{5s} is optionally substituted methyl. In some embodiments, R^{5s} is methyl. In some embodiments, a sugar has the structure of

[chemical structure]

In some embodiments, a sugar has the structure of

[chemical structure]

In some embodiments, a sugar has the structure of

[chemical structure]

Various such sugars are utilized in Table 1. In some embodiments, a sugar has the structure of

[chemical structure]

In some embodiments, a 2′-modified sugar has the structure of

[chemical structure]

wherein R^{2s} is a 2′-modification. In some embodiments, a sugar has the structure of

[chemical structure]

wherein R^{2s} is —H, halogen, or —OR, wherein R is optionally substituted C₁₋₆ aliphatic. In some embodiments, R^{2s} is —H. In some embodiments, R^{2s} is —F. In some embodiments, R^{2s} is —OMe. In some embodiments, a modified nucleoside is mA, mT, mC, m5mC, mG, mU, etc., in which R^{2s} is —OMe. In some embodiments, R^{2s} is —OCH₂CH₂OMe. In some embodiments, a modified nucleoside is Aeo, Teo, Ceo, m5Ceo, Geo, Ueo, etc., in which R^{2s} is —OCH₂CH₂OMe. In some embodiments, R^{2s} is —OCH₂CH₂OH. In some embodiments, an oligonucleotide comprises a 2′-F modified sugar having the structure of

[chemical structure]

(e.g., as in fA, fT, fC, f5mC, fG, fU, etc.). In some embodiments, an oligonucleotide comprises a 2′-OMe modified sugar having the structure of

[chemical structure]

(e.g., as in mA, mT, mC, m5mC, mG, mU, etc.). In some embodiments, an oligonucleotide comprises a 2′-MOE modified sugar having the structure of

[chemical structure]

(e.g., as in Aeo, Teo, Ceo, m5Ceo, Geo, Ueo, etc.).

[0979] In some embodiments, a sugar has the structure of

[chemical structure]

wherein R^{2s} and R^{4s} are taken together to form -L^{s}-, wherein L^{s} is a covalent bond or optionally substituted bivalent C₁₋₆ aliphatic or heteroaliphatic having 1-4 heteroatoms. In some embodiments, each heteroatom is independently selected from nitrogen, oxygen or sulfur). In some embodiments, L^{s} is optionally substituted C2-O—CH₂—C4. In some embodiments, L^{s} is C2-O—CH₂—C4. In some embodiments, L^{s} is C2-O—(R)—CH(CH₂CH₃)—C4. In some embodiments, L^{s} is C2-O—(S)—CH(CH₂CH₃)—C4.

[0980] In some embodiments, a sugar has the structure of

[chemical structure]

wherein each variable is independently as described herein. In some embodiments, a sugar has the structure of

[chemical structure]

wherein each variable is independently as described herein. In some embodiments, R^{5s} is —H. In some embodiments, a sugar has the structure of

[chemical structure]

wherein each variable is independently as described herein. In some embodiments, R^{3s} is —OH. In some embodiments, R^{3s} is —H. In some embodiments, a sugar is

[chemical structure]

In some embodiments, a sugar is

[chemical structure]

[0981] In some embodiments, a sugar is

[0982] In some embodiments, a nucleoside comprising a modified sugar has the structure of

[chemical structure]

or a salt form thereof, wherein BA^{s} is —H or an optionally substituted or protected nucleobase (e.g., BA), and R^{2s} is as described herein. In some embodiments, R^{2s} is —OH, halogen, or optionally substituted C₁-C₆ alkoxy. In some embodiments, BA^{s} is —H. In some embodiments, BA^{s} is an optionally substituted or protected nucleobase. In some embodiments, BA^{s} is BA. In some embodiments, R^{2s} is —F. In some embodiments, a nucleoside comprising a modified sugar has the structure of

[chemical structure]

or a salt form thereof, wherein each variable is independently as described herein. In some embodiments, R^{2s} is —H, —OH, halogen, or optionally substituted C₁-C₆ alkoxy. In some embodiments, R^{2s} is —H. In some embodiments, R^{2s} is —F. In some embodiments, a nucleoside comprising a modified sugar has the structure of

[chemical structure]

wherein each variable is as described herein. In some embodiments, a nucleoside comprising a modified sugar has the structure of

[chemical structure]

or a salt form thereof, wherein each variable is independently as described herein. In some embodiments, R^{2s} is —H, —OH, halogen, or optionally substituted C₁-C₆ alkoxy. In some embodiments, R^{2s} is —H. In some embodiments, R^{2s} is —F. In some embodiments, a nucleoside comprising a modified sugar has the structure of

[chemical structure]

or a salt form thereof, wherein R^{2s′} is R^{s}, and each of R^{s}, R^{2s} and BA^{s} is independently as described herein. In some embodiments, each of R^{2s} and R^{2s′} is independently —H, —OH, halogen, or optionally substituted C₁-C₆ alkoxy. In some embodiments, R^{2s} is —H. In some embodiments, R^{2s} is —OH. In some embodiments, R^{2s} is halogen. In some embodiments, R^{2s} is —F. In some embodiments, R^{2s} is optionally substituted C₁-C₆ alkoxy. In some embodiments, R^{2s} is —H. In some embodiments, R^{2s′} is —OH. In some embodiments, R^{2s′} is halogen. In some embodiments, R^{2s′} is —F. In some embodiments, R^{2s′} is optionally substituted C₁-C₆ alkoxy. In some embodiments, BA^{s} is —H. In some embodiments, BA^{s} is an optionally substituted or protected nucleobase. In some embodiments, BA^{s} is BA. In some embodiments, nucleobases such as BA are optionally substituted or protected for oligonucleotide synthesis. Certain such nucleosides including sugars and nucleobases and uses thereof are described in WO 2020/154342. In some embodiments, an oligonucleotide comprises arabinoside, 2′-deoxy-2′-fluoro-arabinoside, 2′-OR arabinoside, adeoxycytidine, DNA-abasic, RNA-abasic, or 2′-OR abasic, wherein R is not hydrogen (e.g., optionally substituted C₁₋₆ aliphatic). In some embodiments, 2′-OR is 2′-OMe. In some embodiments, 2′-OR is 2′-MOE. In some embodiments, an oligonucleotide comprises 2′-O-methyl-arabinocytidine (amC). In some embodiments, oligonucleotides comprise such nucleosides. In some embodiments, monomers comprise such nucleosides. In some embodiments, phosphoramidites comprise such nucleosides (in some embodiments, one connecting site (e.g., a —CH₂— connecting site) is bonded to an optionally substituted —OH, e.g., (—ODMTr), and one connecting site (e.g., a ring connecting site) is bonded to O which is also bonded to P of a phosphoramidite). In some embodiments, one or more or each of a 5′ immediate nucleoside (e.g., N₁), an opposite nucleoside (N₀) and a 3′ immediate nucleoside (e.g., N₋₁) is independently such a nucleoside. In some embodiments, 5′-N₁N₀N₋₁-3′ is amCCA. In some embodiments, a sugar has the structure of

[chemical structure]

wherein each variable is as described herein and C1′ is bonded to a nucleobase. In some embodiments, a sugar is an arabinose. In some embodiments, a sugar has the structure of

[chemical structure]

wherein C1′ is bonded to a nucleobase.

[0983] In some embodiments, a sugar is

[chemical structure]

wherein a nucleobase is bonded at position 1′.

[0984] In some embodiments, a nucleoside comprising a modified sugar has the structure of

[chemical structure]

or a salt form thereof, wherein each of R^{6s} and R^{7s} is independently R^{s}, BA^{s} is —H or an optionally substituted or protected nucleobase (e.g., BA), and R^{s} is independently as described herein. In some embodiments, R^{6s} is —H, —OH or halogen, and R^{7s} is —H, —OH, halogen or optionally substituted C₁-C₆ alkoxy. In some embodiments, BA^{s} is —H. In some embodiments, BA^{s} is an optionally substituted or protected nucleobase. In some embodiments, BA^{s} is BA. In some embodiments, a nucleoside comprising a modified sugar has the structure of

[chemical structure]

or a salt form thereof, wherein each of R^{8s} and R^{9s} is independently R^{s}, and each of R^{s} and BA^{s} is independently as described herein. In some embodiments, R^{8s} is —H or halogen, and R^{9s} is —H, —OH, halogen, or optionally substituted C₁-C₆ alkoxy. In some embodiments, a nucleoside comprising a modified sugar has the structure of

[chemical structure]

or a slat form thereof, wherein each of R^{10s} and R^{11s} is independently R^{s}, and each of R^{s} and BA^{s} is independently as described herein. In some embodiments, R^{10s} is —H or halogen, and R^{11s} is —H, —OH, halogen, or optionally substituted C₁-C₆ alkoxy. In some embodiments, a nucleoside comprising a modified sugar has the structure of

[chemical structure]

or a salt form thereof, wherein BA^{s} is as described herein. In some embodiments, a nucleoside comprising a modified sugar has the structure of

[chemical structure]

or a salt form thereof, wherein BA^{s} is as described herein. Those skilled in the art appreciate that in some embodiments, the nitrogen may be directly bonded to linkage phosphorus. In some embodiments, a halogen is —F. In some embodiments, BAS is —H. In some embodiments, BA^{s} is an optionally substituted or protected nucleobase. In some embodiments, BA^{s} is BA. In some embodiments, nucleobases such as BA are optionally substituted or protected for oligonucleotide synthesis. In some embodiments, an oligonucleotide comprises alpha-homo-DNA, beta-homo-DNA moieties. Certain such nucleosides including sugars and nucleobases and uses thereof are described in WO 2020/154343. In some embodiments, oligonucleotides comprise such nucleosides. In some embodiments, monomers comprise such nucleosides. In some embodiments, phosphoramidites comprise such nucleosides (in some embodiments, one connecting site (e.g., a —CH₂— connecting site) is bonded to an optionally substituted —OH, e.g., —ODMTr, and one connecting site (e.g., a ring connecting site) is bonded to P of a phosphoramidite (e.g., when the connecting ring atom is N) or to O which is also bonded to P of a phosphoramidite (e.g., when the connecting ring atom is C)). In some embodiments, one or more or each of a 5′ immediate nucleoside (e.g., N₁), an opposite nucleoside (N₀) and a 3′ immediate nucleoside (e.g., N₋₁) is independently such a nucleoside.

[0985] In some embodiments, a nucleoside comprising a modified sugar has the structure of

[chemical structure]

or a salt form thereof, wherein each variable is as described herein. In some embodiments, a nucleoside comprising a modified sugar has the structure of

[chemical structure]

or a salt form thereof, wherein each variable is as described herein. In some embodiments, a nucleoside comprising a modified sugar has the structure of

[chemical structure]

or a salt form thereof, wherein each variable is as described herein. In some embodiments, a nucleoside comprising a modified sugar has the structure of

[chemical structure]

or a salt form thereof, wherein R^{12s} is R^{s}, and each of R^{s} and BA^{s} is independently as described herein. In some embodiments, R^{12s} is —H, —OH, halogen, optionally substituted C₁₋₆ alkyl, optionally substituted C₁₋₆ heteroalkyl, or optionally substituted C₁₋₆ alkoxy. In some embodiments, a halogen is —F. In some embodiments, a nucleoside comprising a modified sugar has the structure of

[chemical structure]

or a salt form thereof, wherein each variable is as described herein. In some embodiments, a nucleotide comprising a modified sugar has the structure of

[chemical structure]

or a salt form thereof, wherein R^{13s} is R^{s}, and each of R^{s} and BA^{s} is independently as described herein. In some embodiments, R^{13s} is —H or optionally substituted C₁-C₆ alkyl. In some embodiments, a nucleoside comprising a modified sugar has the structure of

[chemical structure]

or a salt form thereof, wherein each variable is as described herein. In some embodiments, a nucleotide comprising a modified sugar has the structure of

[chemical structure]

or a salt form thereof, wherein each variable is as described herein. In some embodiments, a linkage is an amide linkage. In some embodiments, BA^{s} is —H. In some embodiments, BA^{s} is an optionally substituted or protected nucleobase. In some embodiments, BA^{s} is BA. In some embodiments, nucleobases such as BA are optionally substituted or protected for oligonucleotide synthesis. Certain such nucleosides and nucleotides including sugars and nucleobases and uses thereof are described in WO 2020/154344. In some embodiments, oligonucleotides comprise such nucleosides. In some embodiments, oligonucleotides comprise such nucleosides (in some embodiments, one connecting site (e.g., a —CH₂— connecting site) is bonded to an optionally substituted —OH, e.g., (—ODMTr), and one connecting site (e.g., a ring connecting site) is bonded to O which is also bonded to P of a phosphoramidite. In some embodiments, one or more or each of a 5′ immediate nucleoside (e.g., N₁), an opposite nucleoside (N₀) and a 3′ immediate nucleoside (e.g., N₋₁) is independently such a nucleoside.

[0986] In some embodiments, a sugar is an acyclic sugar, e.g. a UNA sugar. In some embodiments, a sugar is optionally substituted

[chemical structure]

In some embodiments, the 2′ position is optionally substituted. In some embodiments, a sugar is

[chemical structure]

In some embodiments, a sugar has the structure of

[chemical structure]

In some embodiments, R^{2s} is —OH. In some embodiments, a sugar is

[chemical structure]

wherein “*” indicates the carbon atom bonded to a nucleobase. In some embodiments, a sugar is

[chemical structure]

wherein “*” indicates the carbon atom bonded to a nucleobase. In some embodiments, the carbon atom bonded to a nitrogen atom of a nucleobase and is of R configuration (e.g., sm18). In some embodiments, an oligonucleotide comprises a sugar described herein.

[0987] In some embodiments, a sugar is connected not through 5′ and 3′ positions. Those skilled in the art appreciate that for such sugars, 5′ can refer to the side/direction toward 5′-end of an oligonucleotide, and 3′ can refer to the side/direction toward to 3′-end of an oligonucleotide.

[0988] In some embodiments, each of R^{1s}, R^{2s}, R^{3s}, R^{4s}, and R^{5s} is independently R^{s}, wherein R^{s} is independently —H, halogen, —CN, —N₃, —NO, —NO₂, -L^{s}-R′, -L^{s}-Si(R′)₃, -L^{s}-OR′, -L^{s}-SR′, -L^{s}-N(R′)₂, —O-L^{s}-R′, —O-L^{s}-Si(R)₃, —O-L^{s}-OR′, —O-L^{s}-SR′, or —O-L^{s}-N(R′)₂; wherein L^{s} is L^{B} as described herein, and each other variable is independently as described herein. In some embodiments, each of R^{1s} and R^{2s} is independently R^{s}. In some embodiments, R^{s} is —H. In some embodiments, R^{s} is not —H. In some embodiments, L^{s} is a covalent bond. In some embodiments, each of R^{2s} and R^{4s} are independently —H, —F, —OR, —N(R)₂. In some embodiments, R^{2s} is —H, —F, —OR, —N(R)₂. In some embodiments, R^{4s} is —H. In some embodiments, R^{2s} and R^{4s} form 2′-O-L^{s}-, wherein L^{s} is optionally substituted C₁₋₆ alkylene. In some embodiments, L^{s} is optionally substituted —CH₂—. In some embodiments, L^{s} is optionally substituted —CH₂—.

[0989] In some embodiments, R is hydrogen. In some embodiments, R is not hydrogen. In some embodiments, R is an optionally substituted group selected from C₁₋₁₀ aliphatic, C₁₋₁₀ heteroaliphatic having 1-10 heteroatoms independently selected from oxygen, nitrogen, sulfur, phosphorus and silicon, C₆₋₂₀ aryl, a 5-20 membered heteroaryl ring having 1-10 heteroatoms independently selected from oxygen, nitrogen, sulfur, phosphorus and silicon, and a 3-20 membered heterocyclic ring having 1-10 heteroatoms independently selected from oxygen, nitrogen, sulfur, phosphorus and silicon.

[0990] In some embodiments, R is optionally substituted C₁₋₃₀ aliphatic. In some embodiments, R is optionally substituted C₁₋₂₀ aliphatic. In some embodiments, R is optionally substituted C₁₋₁₅ aliphatic. In some embodiments, R is optionally substituted C₁₋₁₀ aliphatic. In some embodiments, R is optionally substituted C₁₋₆ aliphatic. In some embodiments, R is optionally substituted C₁₋₆ alkyl. In some embodiments, R is optionally substituted hexyl, pentyl, butyl, propyl, ethyl or methyl. In some embodiments, R is optionally substituted hexyl. In some embodiments, R is optionally substituted pentyl. In some embodiments, R is optionally substituted butyl. In some embodiments, R is optionally substituted propyl. In some embodiments, R is optionally substituted ethyl. In some embodiments, R is optionally substituted methyl. In some embodiments, R is hexyl. In some embodiments, R is pentyl. In some embodiments, R is butyl. In some embodiments, R is propyl. In some embodiments, R is ethyl. In some embodiments, R is methyl. In some embodiments, R is isopropyl. In some embodiments, R is n-propyl. In some embodiments, R is tert-butyl. In some embodiments, R is sec-butyl. In some embodiments, R is n-butyl. In some embodiments, R is —(CH₂)₂OCH₃.

[0991] In some embodiments, R is optionally substituted phenyl. In some embodiments, R is phenyl.

[0992] In some embodiments, R^{2s} is a 2′-modification as described in the present disclosure, and R^{4s} is —H. In some embodiments, R^{2s} is —OR, wherein R is not hydrogen. In some embodiments, R^{2s} is —F. In some embodiments, R^{2s} is —OMe. In some embodiments, R^{2s} is —OCH₂CH₂CH₃, e.g., in various Xₑₒ utilized in Table 1 (X being m5C, T, G, A, etc.). In some embodiments, R^{2s} is selected from —H, —F, and —OR, wherein R is optionally substituted C₁₋₆ alkyl. In some embodiments, R^{2s} is selected from —H, —F, and —OMe.

[0993] In some embodiments, a sugar is a bicyclic sugar, e.g., sugars wherein R^{2s} and R^{4s} are taken to form an optionally substituted ring as described in the present disclosure. In some embodiments, a sugar is selected from LNA sugars, BNA sugars, cEt sugars, etc. In some embodiments, a bridge is between the 2′ and 4′-carbon atoms (corresponding to R^{2s} and R^{4s} taken together with their intervening atoms to form an optionally substituted ring as described herein). In some embodiments, a bridge is 2′-L^{a}-L^{b}-4′, wherein L^{a} is —O—, —S— or N(R), and L^{b} is an optionally substituted C₁₋₄ bivalent aliphatic chain, e.g., methylene.

[0994] In some embodiments, a sugar is a 2′-OMe, 2′-MOE, 2′-F, a LNA (locked nucleic acid) sugar, an ENA (ethylene bridged nucleic acid) sugar, a BNA(NMe) (Methylamino bridged nucleic acid) sugar, 2′-F ANA (2′-F arabinose), alpha-DNA (alpha-D-ribose), 2′/5′ ODN (e.g., 2′/5′ linked oligonucleotide), Inv (inverted sugar, e.g., inverted desoxyribose), AmR (Amino-Ribose), ThioR (Thio-ribose), HNA (hexose nucleic acid), CeNA (cyclohexene nucleic acid), or MOR (Morpholino) sugar.

[0995] Those skilled in the art after reading the present disclosure will appreciate that various types of sugar modifications are known and can be utilized in accordance with the present disclosure. In some embodiments, a sugar modification is a 2′-modification (e.g., R^{2s}). In some embodiments, a 2′-modification is 2′-F. In some embodiments, a 2′-modification is 2′-OR, wherein R is not hydrogen. In some embodiments, a 2′-modification is 2′-OR, wherein R is optionally substituted C₁₋₆ aliphatic. In some embodiments, a 2′-modification is 2′-OR, wherein R is optionally substituted C₁₋₆ alkyl. In some embodiments, a 2′-modification is 2′-OMe. In some embodiments, a 2′-modification is 2′-MOE. In some embodiments, a 2′-modification is —O-L^{b}- or -L^{b}-L^{b}- which connects the 2′-carbon of a sugar moiety to another carbon of a sugar moiety. In some embodiments, a 2′-modification is 2′-O-L^{b}-4′ or 2′-L^{b}-4′ which connects the 2′-carbon of a sugar moiety to the 4′-carbon of a sugar moiety. In some embodiments, a 2′-modification is S-cEt. In some embodiments, a modified sugar is an LNA sugar. In some embodiments, -L^{b}- is —C(R)₂—. In some embodiments, a 2′-modification is (C2-O—C(R)₂—C4), wherein each R is independently as described in the present disclosure. In some embodiments, a 2′-modification is a LNA sugar modification (C2-O—CH₂—C4). In some embodiments, a 2′-modification is (C2-O—CHR—C4), wherein R is as described in the present disclosure. In some embodiments, a 2′-modification is (C2-O—(R)—CHR—C4), wherein R is as described in the present disclosure and is not hydrogen. In some embodiments, a 2′-modification is (C2-O—(S)—CHR—C4), wherein R is as described in the present disclosure and is not hydrogen. In some embodiments, R is optionally substituted C₁₋₆ aliphatic. In some embodiments, R is optionally substituted C₁₋₆ alkyl. In some embodiments, R is unsubstituted C₁₋₆ alkyl. In some embodiments, R is methyl. In some embodiments, R is ethyl. In some embodiments, a 2′-modification is (C2-O—CHR—C4), wherein R is optionally substituted C₁₋₆ aliphatic. In some embodiments, a 2′-modification is (C2-O—CHR—C4), wherein R is optionally substituted C₁₋₆ alkyl. In some embodiments, a 2′-modification is (C2-O—CHR—C4), wherein R is methyl. In some embodiments, a 2′-modification is (C2-O—CHR—C4), wherein R is ethyl. In some embodiments, a 2′-modification is (C2-O—(R)—CHR—C4), wherein R is optionally substituted C₁₋₆ aliphatic. In some embodiments, a 2′-modification is (C2-O—(R)—CHR—C4), wherein R is optionally substituted C₁₋₆ alkyl. In some embodiments, a 2′-modification is (C2-O—(R)—CHR—C4), wherein R is methyl. In some embodiments, a 2′-modification is (C2-O—(R)—CHR—C4), wherein R is ethyl. In some embodiments, a 2′-modification is (C2-O—(S)—CHR—C4), wherein R is optionally substituted C₁₋₆ aliphatic. In some embodiments, a 2′-modification is (C2-O—(S)—CHR—C4), wherein R is optionally substituted C₁₋₆ alkyl. In some embodiments, a 2′-modification is (C2-O—(S)—CHR—C4), wherein R is methyl. In some embodiments, a 2′-modification is (C2-O—(S)—CHR—C4), wherein R is ethyl. In some embodiments, a 2′-modification is C2-O—(R)—CH(CH₂CH₃)—C4. In some embodiments, a 2′-modification is C2-O—(S)—CH(CH₂CH₃)—C4. In some embodiments, a sugar is a natural DNA sugar. In some embodiments, a sugar is a natural RNA sugar. In some embodiments, a sugar is an optionally substituted natural DNA sugar. In some embodiments, a sugar is a natural DNA sugar optionally substituted at 2′. In some embodiments, a sugar is a natural DNA sugar substituted at 2′ (2′-modification). In some embodiments, a sugar is a natural DNA sugar modified at 2′ (2′-modification).

[0996] In some embodiments, a sugar is an optionally substituted ribose or deoxyribose. In some embodiments, a sugar is an optionally modified ribose or deoxyribose, wherein one or more hydroxyl groups of the ribose or deoxyribose moiety is optionally and independently replaced by halogen, R′, —N(R′)₂, —OR′, or —SR′, wherein each R′ is as described herein. In some embodiments, a sugar is an optionally substituted deoxyribose, wherein the 2′ position of the deoxyribose is optionally substituted. In some embodiments, a sugar is an optionally substituted deoxyribose, wherein the 2′ position of the deoxyribose is optionally substituted with halogen, R′, —N(R′)₂, —OR′, or —SR′, wherein each R′ is independently described in the present disclosure. In some embodiments, a sugar is an optionally substituted deoxyribose, wherein the 2′ position of the deoxyribose is optionally substituted with halogen. In some embodiments, a sugar is an optionally substituted deoxyribose, wherein the 2′ position of the deoxyribose is optionally substituted with one or more —F. In some embodiments, a sugar is an optionally substituted deoxyribose, wherein the 2′ position of the deoxyribose is optionally substituted with —OR′, wherein each R′ is independently described in the present disclosure. In some embodiments, a sugar is an optionally substituted deoxyribose, wherein the 2′ position of the deoxyribose is optionally substituted with —OR′, wherein each R′ is independently optionally substituted C₁-C₆ aliphatic. In some embodiments, a sugar is an optionally substituted deoxyribose, wherein the 2′ position of the deoxyribose is optionally substituted with —OR′, wherein each R′ is independently an optionally substituted C₁-C₆ alkyl. In some embodiments, a sugar is an optionally substituted deoxyribose, wherein the 2′ position of the deoxyribose is optionally substituted with —OMe. In some embodiments, a sugar is an optionally substituted deoxyribose, wherein the 2′ position of the deoxyribose is optionally substituted with —O-methoxyethyl.

[0997] In some embodiments, provided oligonucleotides comprise one or more modified sugars. In some embodiments, provided oligonucleotides comprise one or more modified sugars and one or more natural sugars.

[0998] Examples of bicyclic sugars include sugars of alpha-L-methyleneoxy (4′-CH₂—O-2′) LNA, beta-D-methyleneoxy (4′-CH₂—O-2′) LNA, ethyleneoxy (4′-(CH₂)₂—O-2′) LNA, aminooxy (4′-CH₂—O—N(R)-2′) LNA, and oxyamino (4′-CH₂—N(R)—O-2′) LNA. In some embodiments, a bicyclic sugar, e.g., a LNA or BNA sugar, is sugar having at least one bridge between two sugar carbons. In some embodiments, a bicyclic sugar in a nucleoside may have the stereochemical configurations of alpha-L-ribofuranose or beta-D-ribofuranose.

[0999] In some embodiments, a bicyclic sugar may be further defined by isomeric configuration. For example, a sugar comprising a 4′-(CH₂)—O-2′ bridge may be in the alpha-L configuration or in the beta-D configuration. In some embodiments, a 4′ to 2′ bridge is a -L-4′-(CH₂)—O-2′, b-D-4′-CH₂—O-2′, 4′-(CH₂)₂—O-2′, 4′-CH₂—O—N(R′)-2′, 4′-CH₂—N(R′)—O-2′, 4′-CH(R′)—O-2′, 4′-CH(CH₃)—O-2′, 4′-CH₂—S-2′, 4′-CH₂—N(R′)-2′, 4′-CH₂—CH(R′)-2′, 4′-CH₂—CH(CH₃)-2′, and 4′-(CH₂)₃-2′, wherein each R′ is as described in the present disclosure. In some embodiments, R′ is —H, a protecting group or optionally substituted C₁-C₁₂ alkyl. In some embodiments, R′ is —H or optionally substituted C₁-C₁₂ alkyl.

[1000] In some embodiments, a bicyclic sugar is a sugar of alpha-L-methyleneoxy (4′-CH₂—O-2′) BNA, beta-D-methyleneoxy (4′-CH₂—O-2′) BNA, ethyleneoxy (4′-(CH₂)₂—O-2′) BNA, aminooxy (4′-CH₂—O—N(R)-2′) BNA, oxyamino (4′-CH₂—N(R)—O-2′) BNA, methyl(methyleneoxy) (4′-CH(CH₃)—O-2′) BNA (also referred to as constrained ethyl or cEt), methylene-thio (4′-CH₂—S-2′) BNA, methylene-amino (4′-CH₂—N(R)-2′) BNA, methyl carbocyclic (4′-CH₂—CH(CH₃)-2′) BNA, propylene carbocyclic (4′-(CH₂)₃-2′) BNA, or vinyl BNA.

[1001] In some embodiments, a sugar modification is a modification described in U.S. Pat. No. 9,006,198. In some embodiments, a modified sugar is described in U.S. Pat. No. 9,006,198. In some embodiments, a sugar modification is a modification described in U.S. Pat. Nos. 9,394,333, 9,744,183, 9,605,019, 9,982,257, US 20170037399, US 20180216108, US 20180216107, U.S. Pat. No. 9,598,458, WO 2017/062862, WO 2018/067973, WO 2017/160741, WO 2017/192679, WO 2017/210647, WO 2018/098264, WO 2018/022473, WO 2018/223056, WO 2018/223073, WO 2018/223081, WO 2018/237194, WO 2019/032607, WO 2019/032612, WO 2019/055951, WO 2019/075357, WO 2019/200185, WO 2019/217784, WO 2019/032612, WO 2020/191252, and/or WO 2021/071858, the sugar modifications and modified sugars of each of which are independently incorporated herein by reference.

[1002] In some embodiments a modified sugar is one described in U.S. Pat. Nos. 5,658,873, 5,118,800, 5,393,878, 5,514,785, 5,627,053, 7,034,133; 7,084,125, 7,399,845, 5,319,080, 5,591,722, 5,597,909, 5,466,786, 6,268,490, 6,525,191, 5,519,134, 5,576,427, 6,794,499, 6,998,484, 7,053,207, 4,981,957, 5,359,044, 6,770,748, 7,427,672, 5,446,137, 6,670,461, 7,569,686, 7,741,457, 8,022,193, 8,030,467, 8,278,425, 5,610,300, 5,646,265, 8,278,426, 5,567,811, 5,700,920, 8,278,283, 5,639,873, 5,670,633, 8,314,227, US 2008/0039618, US 2009/0012281, WO 2021/030778, WO 2020/154344, WO 2020/154343, WO 2020/154342, WO 2020/165077, WO 2020/201406, WO 2020/216637, or WO 2020/252376.

[1003] In some embodiments, a sugar modification is 2′-OMe, 2′-MOE, 2′-LNA, 2′-F, 5′-vinyl, or S-cEt. In some embodiments, a modified sugar is a sugar of FRNA, FANA, or morpholino. In some embodiments, an oligonucleotide comprises a nucleic acid analog, e.g., GNA, LNA, PNA, TNA, F-HNA (F-THP or 3′-fluoro tetrahydropyran), MNA (mannitol nucleic acid, e.g., Leumann 2002 Bioorg. Med. Chem. 10: 841-854), ANA (anitol nucleic acid), or morpholino, or a portion thereof. In some embodiments, a sugar is as in flexible nucleic acids or serinol nucleic acids. In some embodiments, a sugar modification replaces a natural sugar with another cyclic or acyclic moiety. Examples of such moieties are widely known in the art, e.g., those used in morpholino, glycol nucleic acids, etc. and may be utilized in accordance with the present disclosure. As appreciated by those skilled in the art, when utilized with modified sugars, in some embodiments internucleotidic linkages may be modified, e.g., as in morpholino, PNA, etc. In some embodiments, a sugar is a (R)-GNA sugar. In some embodiments, a sugar is a (S)-GNA sugar. In some embodiments, a nucleoside having a GNA sugar is utilized as N₋₁, N₀ and/or N₁. In some embodiments, N₀ is a nucleoside having a GNA sugar. In some embodiments, a sugar is bicyclic sugar. In some embodiments, a sugar is a LNA sugar. In some embodiments, a sugar is an acyclic sugar. In some embodiments, a sugar is a UNA sugar. In some embodiments, a nucleoside having a UNA sugar is utilized as N₋₁, N₀ and/or N₁. In some embodiments, N₀ is a nucleoside having a UNA sugar. In some embodiments, a nucleoside is abasic. In some embodiments, an abasic sugar is utilized as N₋₁, N₀ and/or N₁. In some embodiments, N₀ is a nucleoside having an abasic sugar.

[1004] In some embodiments, a sugar is a 6′-modified bicyclic sugar that have either (R) or (S)-chirality at the 6-position, e.g., those described in U.S. Pat. No. 7,399,845. In some embodiments, a sugar is a 5′-modified bicyclic sugar that has either (R) or (S)-chirality at the 5-position, e.g., those described in US 20070287831.

[1005] In some embodiments, a modified sugar contains one or more substituents at the 2′ position (typically one substituent, and often at the axial position) independently selected from —F; —CF₃, —CN, —N₃, —NO, —NO₂, —OR′, —SR′, or —N(R′)₂, wherein each R′ is independently described in the present disclosure; —O—(C₁-C₁₀ alkyl), —S—(C₁-C₁₀ alkyl), —NH—(C₁-C₁₀ alkyl), or —N(C₁-C₁₀ alkyl)₂; —O—(C₂-C₁₀ alkenyl), —S—(C₂-C₁₀ alkenyl), —NH—(C₂-C₁₀ alkenyl), or —N(C₂-C₁₀ alkenyl)₂; —O—(C₂-C₁₀ alkynyl), —S—(C₂-C₁₀ alkynyl), —NH—(C₂-C₁₀ alkynyl), or —N(C₂-C₁₀ alkynyl)₂; or —O—(C₁-C₁₀ alkylene)-O—(C₁-C₁₀ alkyl), —O—(C₁-C₁₀ alkylene)-NH—(C₁-C₁₀ alkyl) or —O—(C₁-C₁₀ alkylene)-NH(C₁-C₁₀ alkyl)₂, —NH—(C₁-C₁₀ alkylene)-O—(C₁-C₁₀ alkyl), or —N(C₁-C₁₀ alkyl)-(C₁-C₁₀ alkylene)-O—(C₁-C₁₀ alkyl), wherein each of the alkyl, alkylene, alkenyl and alkynyl is independently and optionally substituted. In some embodiments, a substituent is —O(CH₂)ₙOCH₃, —O(CH₂)ₙNH₂, MOE, DMAOE, or DMAEOE, wherein wherein n is from 1 to about 10. In some embodiments, a modified sugar is one described in WO 2001/088198; and Martin et al., Helv. Chim. Acta, 1995, 78, 486-504. In some embodiments, a modified sugar comprises one or more groups selected from a substituted silyl group, an RNA cleaving group, a reporter group, a fluorescent label, an intercalator, a group for improving the pharmacokinetic properties of a nucleic acid, a group for improving the pharmacodynamic properties of a nucleic acid, or other substituents having similar properties. In some embodiments, modifications are made at one or more of the 2′, 3′, 4′, or 5′ positions, including the 3′ position of the sugar on the 3′-terminal nucleoside or in the 5′ position of the 5′-terminal nucleoside.

[1006] In some embodiments, the 2′-OH of a ribose is replaced with a group selected from —H, —F; —CF₃, —CN, —N₃, —NO, —NO₂, —OR′, —SR′, or —N(R′)₂, wherein each R′ is independently described in the present disclosure; —O—(C₁-C₁₀ alkyl), —S—(C₁-C₁₀ alkyl), —NH—(C₁-C₁₀ alkyl), or —N(C₁-C₁₀ alkyl)₂; —O—(C₂-C₁₀ alkenyl), —S—(C₂-C₁₀ alkenyl), —NH—(C₂-C₁₀ alkenyl), or —N(C₂-C₁₀ alkenyl)₂; —O—(C₂-C₁₀ alkynyl), —S—(C₂-C₁₀ alkynyl), —NH—(C₂-C₁₀ alkynyl), or —N(C₂-C₁₀ alkynyl)₂; or —O—(C₁-C₁₀ alkylene)-O—(C₁-C₁₀ alkyl), —O—(C₁-C₁₀ alkylene)-NH—(C₁-C₁₀ alkyl) or —O—(C₁-C₁₀ alkylene)-NH(C₁-C₁₀ alkyl)₂, —NH—(C₁-C₁₀ alkylene)-O—(C₁-C₁₀ alkyl), or —N(C₁-C₁₀ alkyl)-(C₁-C₁₀ alkylene)-O—(C₁-C₁₀ alkyl), wherein each of the alkyl, alkylene, alkenyl and alkynyl is independently and optionally substituted. In some embodiments, the 2′-OH is replaced with —H (deoxyribose). In some embodiments, the 2′-OH is replaced with —F. In some embodiments, the 2′-OH is replaced with —OR′. In some embodiments, the 2′-OH is replaced with —OMe. In some embodiments, the 2′-OH is replaced with —OCH₂CH₂OMe.

[1007] In some embodiments, a sugar modification is a 2′-modification. Commonly used 2′-modifications include but are not limited to 2′-OR, wherein R is not hydrogen and is as described in the present disclosure. In some embodiments, a modification is 2′-OR, wherein R is optionally substituted C₁₋₆ aliphatic. In some embodiments, a modification is 2′-OR, wherein R is optionally substituted C₁₋₆ alkyl. In some embodiments, a modification is 2′-OMe. In some embodiments, a modification is 2′-MOE. In some embodiments, a 2′-modification is S-cEt. In some embodiments, a modified sugar is an LNA sugar. In some embodiments, a 2′-modification is —F. In some embodiments, a 2′-modification is FANA. In some embodiments, a 2′-modification is FRNA. In some embodiments, a sugar modification is a 5′-modification, e.g., 5′-Me. In some embodiments, a sugar modification changes the size of the sugar ring. In some embodiments, a sugar modification is the sugar moiety in FHNA.

[1008] In some embodiments, a sugar modification replaces a sugar moiety with another cyclic or acyclic moiety. Examples of such moieties are widely known in the art, including but not limited to those used in morpholino (optionally with its phosphorodiamidate linkage), glycol nucleic acids, etc.

[1009] In some embodiments, one or more of the sugars of an oligonucleotide are modified. In some embodiments, a modified sugar comprises a 2′-modification. In some embodiments, each modified sugar independently comprises a 2′-modification. In some embodiments, a 2′-modification is 2′-OR. In some embodiments, a 2′-modification is a 2′-OMe. In some embodiments, a 2′-modification is a 2′-MOE. In some embodiments, a 2′-modification is an LNA sugar modification. In some embodiments, a 2′-modification is 2′-F. In some embodiments, each sugar modification is independently a 2′-modification. In some embodiments, each sugar modification is independently 2′-OR or 2′-F. In some embodiments, each sugar modification is independently 2′-OR or 2′-F, wherein R is optionally substituted C₁₋₆ alkyl. In some embodiments, each sugar modification is independently 2′-OR or 2′-F, wherein at least one is 2′-F. In some embodiments, each sugar modification is independently 2′-OR or 2′-F, wherein R is optionally substituted C₁₋₆ alkyl, and wherein at least one is 2′-OR. In some embodiments, each sugar modification is independently 2′-OR or 2′-F, wherein at least one is 2′-F, and at least one is 2′-OR. In some embodiments, each sugar modification is independently 2′-OR or 2′-F, wherein R is optionally substituted C₁₋₆ alkyl, and wherein at least one is 2′-F, and at least one is 2′-OR. In some embodiments, each sugar modification is independently 2′-OR. In some embodiments, each sugar modification is independently 2′-OR, wherein R is optionally substituted C₁₋₆ alkyl. In some embodiments, each sugar modification is 2′-OMe. In some embodiments, each sugar modification is 2′-MOE. In some embodiments, each sugar modification is independently 2′-OMe or 2′-MOE. In some embodiments, each sugar modification is independently 2′-OMe, 2′-MOE, or a LNA sugar.

[1010] Modified sugars include cyclobutyl or cyclopentyl moieties in place of a pentofuranosyl sugar. Representative examples of such modified sugars include those described in U.S. Pat. No. 4,981,957, 5,118,800, 5,319,080, or 5,359,044. In some embodiments, the oxygen atom within the ribose ring is replaced by nitrogen, sulfur, selenium, or carbon. In some embodiments, —O— is replaced with —N(R′)—, —S—, —Se— or —C(R′)₂—. In some embodiments, a modified sugar is a modified ribose wherein the oxygen atom within the ribose ring is replaced with nitrogen, and wherein the nitrogen is optionally substituted with an alkyl group (e.g., methyl, ethyl, isopropyl, etc.).

[1011] A non-limiting example of modified sugars is glycerol, which is part of glycerol nucleic acids (GNAs), e.g., as described in Zhang, R et al., J. Am. Chem. Soc., 2008, 130, 5846-5847; Zhang L, et al., J. Am. Chem. Soc., 2005, 127, 4174-4175 and Tsai C H et al., PNAS, 2007, 14598-14603.

[1012] A flexible nucleic acid (FNA) is based on a mixed acetal aminal of formyl glycerol, e.g., as described in Joyce G F et al., PNAS, 1987, 84, 4398-4402 and Heuberger B D and Switzer C, J. Am. Chem. Soc., 2008, 130, 412-413.

[1013] In some embodiments, an oligonucleotide, and/or a modified nucleoside thereof, comprises a sugar or modified sugar described in: WO 2018/022473, WO 2018/098264, WO 2018/223056, WO 2018/223073, WO 2018/223081, WO 2018/237194, WO 2019/032607, WO 2019/055951, WO 2019/075357, WO 2019/200185, WO 2019/217784, WO 2019/032612, WO 2020/191252, and/or WO 2021/071858, the sugars and modified sugars of each of which are independently incorporated herein by reference.

[1014] In some embodiments, one or more hydroxyl group in a sugar is optionally and independently replaced with halogen, R′—N(R′)₂, —OR′, or —SR′, wherein each R′ is independently described in the present disclosure.

[1015] In some embodiments, a modified nucleoside is any modified nucleoside described in: WO 2018/022473, WO 2018/098264, WO 2018/223056, WO 2018/223073, WO 2018/223081, WO 2018/237194, WO 2019/032607, WO 2019/055951, WO 2019/075357, WO 2019/200185, WO 2019/217784, WO 2019/032612, WO 2020/191252, and/or WO 2021/071858, the modified nucleosides of each of which are independently incorporated herein by reference.

[1016] In some embodiments, a sugar modification is 5′-vinyl (R or S), 5′-methyl (R or S), 2′-SH, 2′-F, 2′-OCH₃, 2′-OCH₂CH₃, 2′-OCH₂CH₂F or 2′-O(CH₂)₂₀CH₃. In some embodiments, a substituent at the 2′ position, e.g., a 2′-modification, is allyl, amino, azido, thio, O-allyl, O—C₁-C₁₀ alkyl, OCF₃, OCH₂F, O(CH₂)₂SCH₃, O(CH₂)₂—O—N(Rₘ)(Rₙ), O—CH₂—C(═O)—N(Rₘ)(Rₙ), and O—CH₂—C(═O)—N(R₁)—(CH₂)₂—N(Rₘ)(Rₙ), wherein each allyl, amino and alkyl is optionally substituted, and each of R₁, Rₘ and Rₙ is independently R′ as described in the present disclosure. In some embodiments, each of R₁, Rₘ and Rₙ is independently —H or optionally substituted C₁-C₁₀ alkyl.

[1017] In some embodiments, bicyclic sugars comprise a bridge, e.g., -L^{b}-L^{b}-, -L-, etc. between two sugar carbons, e.g., between the 4′ and the 2′ ribosyl ring carbon atoms. In some embodiments, a bridge is 4′-(CH₂)—O-2′ (e.g., LNA sugars), 4′-(CH₂)—S-2′, 4′-(CH₂)₂—O-2′ (e.g., ENA sugars), 4′-CH(R′)—O-2′ (e.g., 4′-CH(CH₃)—O-2′, 4′-CH(CH₂OCH₃)—O-2′, and examples in U.S. Pat. No. 7,399,845, etc.), 4′-CH(R′)₂—O-2′ (e.g., 4′-C(CH₃)(CH₃)—O-2′ and examples in WO 2009006478, etc.), 4′-CH₂—N(OR′)-2′ (e.g., 4′-CH₂—N(OCH₃)-2′, examples in WO 2008150729, etc.), 4′-CH₂—O—N(R′)-2′ (e.g., 4′-CH₂—O—N(CH₃)-2′, examples in US 20040171570, etc.), 4′-CH₂—N(R′)—O-2′ [e.g., wherein R is —H, C₁-C₁₂ alkyl, or a protecting group (e.g., see U.S. Pat. No. 7,427,672)], 4′-C(R′)₂—C(H)(R′)-2′ (e.g., 4′-CH₂—C(H)(CH₃)-2′, examples in Chattopadhyaya et al., J. Org. Chem., 2009, 74, 118-134, etc.), or 4′-C(R′)₂—C(═C(R′)₂)-2′ (e.g., 4′-CH₂—C(═CH₂)-2′, examples in WO 2008154401, etc.).

[1018] In some embodiments, a sugar is a tetrahydropyran or THP sugar. In some embodiments, a modified nucleoside is tetrahydropyran nucleoside or THP nucleoside which is a nucleoside having a six-membered tetrahydropyran sugar substituted for a pentofuranosyl residue in typical natural nucleosides. THP sugars and/or nucleosides include those used in hexitol nucleic acid (HNA), anitol nucleic acid (ANA), mannitol nucleic acid (MNA) (e.g., Leumann, Bioorg. Med. Chem., 2002, 10, 841-854) or fluoro HNA (F-HNA).

[1019] In some embodiments, sugars comprise rings having more than 5 atoms and/or more than one heteroatom, e.g., morpholino sugars which are described in e.g., Braasch et al., Biochemistry, 2002, 41, 4503-4510; U.S. Pat. Nos. 5,698,685; 5,166,315; 5,185,444; 5,034,506; etc.).

[1020] As those skilled in the art will appreciate, modifications of sugars, nucleobases, internucleotidic linkages, etc. can and are often utilized in combination in oligonucleotides, e.g., see various oligonucleotides in Table 1.

[1021] In some embodiments, a nucleoside has a six-membered cyclohexenyl in place of the pentofuranosyl residue in naturally occurring nucleosides. Example cyclohexenyl nucleosides and preparation and uses thereof are described in, e.g., WO 2010036696; Robeyns et al., J. Am. Chem. Soc., 2008, 130(6), 1979-1984; Horvath et al., Tetrahedron Letters, 2007, 48, 3621-3623; Nauwelaerts et al., J. Am. Chem. Soc., 2007, 129(30), 9340-9348; Gu et al., Nucleosides, Nucleotides & Nucleic Acids, 2005, 24(5-7), 993-998; Nauwelaerts et al., Nucleic Acids Research, 2005, 33(8), 2452-2463; Robeyns et al., Acta Crystallographica, Section F: Structural Biology and Crystallization Communications, 2005, F61(6), 585-586; Gu et al., Tetrahedron, 2004, 60(9), 2111-2123; Gu et al., Oligonucleotides, 2003, 13(6), 479-489; Wang et al., J. Org. Chem., 2003, 68, 4499-4505; Verbeure et al., Nucleic Acids Research, 2001, 29(24), 4941-4947; Wang et al., J. Org. Chem., 2001, 66, 8478-82; Wang et al., Nucleosides, Nucleotides & Nucleic Acids, 2001, 20(4-7), 785-788; Wang et al., J. Am. Chem., 2000, 122, 8595-8602; WO 2006047842; WO 2001049687; etc.

[1022] Many monocyclic, bicyclic and tricyclic ring systems are suitable as sugar surrogates (modified sugars) and may be utilized in accordance with the present disclosure. See, e.g., Leumann, Christian J. Bioorg. & Med. Chem., 2002, 10, 841-854. Such ring systems can undergo various additional substitutions to further enhance their properties and/or activities.

[1023] In some embodiments, a 2′-modified sugar is a furanosyl sugar modified at the 2′ position. In some embodiments, a 2′-modification is halogen, —R′ (wherein R′ is not —H), —OR′ (wherein R′ is not —H), —SR′, —N(R′)₂, optionally substituted —CH₂—CH═CH₂, optionally substituted alkenyl, or optionally substituted alkynyl. In some embodiments, a 2′-modifications is selected from —O[(CH₂)ₙO]ₘCH₃, —O(CH₂)ₙNH₂, —O(CH₂)ₙCH₃, —O(CH₂)ₙF, —O(CH₂)ₙONH₂, —OCH₂C(═O)N(H)CH₃, and —O(CH₂)ₙON[(CH₂)ₙCH₃]₂, wherein each n and m is independently from 1 to about 10. In some embodiments, a 2′-modification is optionally substituted C₁-C₁₂ alkyl, optionally substituted alkenyl, optionally substituted alkynyl, optionally substituted alkaryl, optionally substituted aralkyl, optionally substituted —O-alkaryl, optionally substituted —O-aralkyl, —SH, —SCH₃, —OCN, —Cl, —Br, —CN, —F, —CF₃, —OCF₃, —SOCH₃, —SO₂CH₃, —ONO₂, —NO₂, —N₃, —NH₂, optionally substituted heterocycloalkyl, optionally substituted heterocycloalkaryl, optionally substituted aminoalkylamino, optionally substituted polyalkylamino, substituted silyl, a reporter group, an intercalator, a group for improving pharmacokinetic properties, a group for improving the pharmacodynamic properties, and other substituents. In some embodiments, a 2′-modification is a 2′-MOE modification (e.g., see Baker et al., J. Biol. Chem., 1997, 272, 11944-12000). In some cases, a 2′-MOE modification has been reported as having improved binding affinity compared to unmodified sugars and to some other modified nucleosides, such as 2′-O-methyl, 2′-O-propyl, and 2′-O-aminopropyl. Oligonucleotides having the 2′-MOE modification have also been reported to be capable of inhibiting gene expression with promising features for in vivo use (see, e.g., Martin, Helv. Chim. Acta, 1995, 78, 486-504; Altmann et al., Chimia, 1996, 50, 168-176; Altmann et al., Biochem. Soc. Trans., 1996, 24, 630-637; and Altmann et al., Nucleosides Nucleotides, 1997, 16, 917-926; etc.).

[1024] In some embodiments, a 2′-modified or 2′-substituted sugar or nucleoside is a sugar or nucleoside comprising a substituent at the 2′ position of the sugar which is other than —H (typically not considered a substituent) or —OH. In some embodiments, a 2′-modified sugar is a bicyclic sugar comprising a bridge connecting two carbon atoms of the sugar ring one of which is the 2′ carbon. In some embodiments, a 2′-modification is non-bridging, e.g., allyl, amino, azido, thio, optionally substituted —O-allyl, optionally substituted —O—C₁-C₁₀ alkyl, —OCF₃, —O(CH₂)₂OCH₃, 2′-O(CH₂)₂SCH₃, —O(CH₂)₂ON(Rₘ)(Rₙ), or —OCH₂C(═O)N(Rₘ)(Rₙ), where each Rₘ and Rₙ is independently —H or optionally substituted C₁-C₁₀ alkyl.

[1025] Certain modified sugars, their preparation and uses are described in U.S. Pat. Nos. 4,981,957, 5,118,800, 5,319,080, 5,359,044, 5,393,878, 5,446,137, 5,466,786, 5,514,785, 5,519,134, 5,567,811, 5,576,427, 5,591,722, 5,597,909, 5,610,300, 5,627,053, 5,639,873, 5,646,265, 5,670,633, 5,700,920, 5,792,847, 6,600,032 and WO 2005121371.

[1026] In some embodiments, a sugar is the sugar of N-methanocarba, LNA, cMOE BNA, cEt BNA, α-L-LNA or related analogs, HNA, Me-ANA, MOE-ANA, Ara-FHNA, FHNA, R-6′-Me-FHNA, S-6′-Me-FHNA, ENA, or c-ANA. In some embodiments, a modified internucleotidic linkage is C3-amide (e.g., sugar that has the amide modification attached to the C3′, Mutisya et al. 2014 Nucleic Acids Res. 2014 Jun. 1; 42(10): 6542-6551), formacetal, thioformacetal, MMI [e.g., methylene(methylimino), Peoc'h et al. 2006 Nucleosides and Nucleotides 16 (7-9)], a PMO (phosphorodiamidate linked morpholino) linkage (which connects two sugars), or a PNA (peptide nucleic acid) linkage. In some embodiments, examples of internucleotidic linkages and/or sugars are described in Allerson et al. 2005 J. Med. Chem. 48: 901-4; BMCL 2011 21: 1122; BMCL 2011 21: 588; BMCL 2012 22: 296; Chattopadhyaya et al. 2007 J. Am. Chem. Soc. 129: 8362; Chem. Bio. Chem. 2013 14: 58; Curr. Prot. Nucl. Acids Chem. 2011 1.24.1; Egli et al. 2011 J. Am. Chem. Soc. 133: 16642; Hendrix et al. 1997 Chem. Eur. J. 3: 110; Hyrup et al. 1996 Bioorg. Med. Chem. 4: 5; Imanishi 1997 Tet. Lett. 38: 8735; J. Am. Chem. Soc. 1994, 116, 3143; J. Med. Chem. 2009 52: 10; J. Org. Chem. 2010 75: 1589; Jepsen et al. 2004 Oligo. 14: 130-146; Jones et al. J. Org. Chem. 1993, 58, 2983; Jung et al. 2014 ACIEE 53: 9893; Kodama et al. 2014 AGDS; Koizumi 2003 BMC 11: 2211; Koizumi et al. 2003 Nuc. Acids Res. 12: 3267-3273; Koshkin et al. 1998 Tetrahedron 54: 3607-3630; Kumar et al. 1998 Bioo. Med. Chem. Let. 8: 2219-2222; Lauritsen et al. 2002 Chem. Comm. 5: 530-531; Lauritsen et al. 2003 Bioo. Med. Chem. Lett. 13: 253-256; Lima et al. 2012 Cell 150: 883-894; Mesmaeker et al. Angew. Chem., Int. Ed. Engl. 1994, 33, 226; Migawa et al. 2013 Org. Lett. 15: 4316; Mol. Ther. Nucl. Acids 2012 1: e47; Morita et al. 2001 Nucl. Acids Res. Supp. 1: 241-242; Morita et al. 2002 Bioo. Med. Chem. Lett. 12: 73-76; Morita et al. 2003 Bioo. Med. Chem. Lett. 2211-2226; Murray et al. 2012 Nucl. Acids Res. 40: 6135; Nielsen et al. 1997 Chem. Soc. Rev. 73; Nielsen et al. 1997 J. Chem. Soc. Perkins Transl. 1: 3423-3433; Obika et al. 1997 Tetrahedron Lett. 38 (50): 8735-8; Obika et al. 1998 Tetrahedron Lett. 39: 5401-5404; Obika et al. 2008 J. Am. Chem. Soc. 130: 4886; Obika et al. 2011 Org. Lett. 13: 6050; Oestergaard et al. 2014 JOC 79: 8877; Pallan et al. 2012 Biochem. 51: 7; Pallan et al. 2012 Chem. Comm. 48: 8195-8197; Petersen et al. 2003 TRENDS Biotech. 21: 74-81; Prakash et al. 2010 J. Med. Chem. 53: 1636; Prakash et al. 2015 Nucl. Acids Res. 43: 2993-3011; Prakash et al. 2016 Bioorg. Med. Chem. Lett. 26: 2817-2820; Rajwanshi et al. 1999 Chem. Commun. 1395-1396; Schultz et al. 1996 Nucleic Acids Res. 24: 2966; Seth et al. 2008 Nucl. Acid Sym. Ser. 52: 553; Seth et al. 2009 J. Med. Chem. 52: 10-13; Seth et al. 2010 J. Am. Chem. Soc. 132: 14942; Seth et al. 2010 J. Med. Chem. 53: 8309-8318; Seth et al. 2010 J. Org. Chem. 75: 1569-1581; Seth et al. 2011 BMCL 21: 4690; Seth et al. 2012 Bioo. Med. Chem. Lett. 22: 296-299; Seth et al. 2012 Mol. Ther-Nuc. Acids. 1, e47; Seth et al., Nucleic Acids Symposium Series (2008), 52(1), 553-554; Singh et al. 1998 Chem. Comm. 1247-1248; Singh et al. 1998 J. Org. Chem. 63: 10035-39; Singh et al. 1998 J. Org. Chem. 63: 6078-6079; Sorensen 2003 Chem. Comm. 2130-2131; Starrup et al. 2010 Nucl. Acids Res. 38: 7100; Swayze et al. 2007 Nucl. Acids Res. 35: 687; Ts'o et al. Ann. N. Y. Acad. Sci. 1988, 507, 220; Van Aerschot et al. 1995 Angew. Chem. Int. Ed. Engl. 34: 1338; Vasseur et al. J. Am. Chem. Soc. 1992, 114, 4006; WO 2007090071; WO 2016079181; U.S. Pat. No. 6,326,199; 6,066,500; or 6,440,739.

[1027] In some embodiments, an oligonucleotide or a portion thereof (e.g., a domain, a subdomain, etc.) comprise a high level of 2′-F modified sugars, e.g., about 10%-100% (e.g., about 20%, 25%, 30%, 35%, 40%, 45%, 50%, 55%, 60%, 65%, 70%, 75%, 80%, 85%, 90%, 95%, or more, or about 100%) of sugars in an oligonucleotide or a portion thereof (e.g., a domain, a subdomain, etc.) comprises 2′-F. In some embodiments, about 50% or more of sugars in an oligonucleotide or a portion thereof comprises 2′-F. In some embodiments, about 60% or more of sugars in an oligonucleotide or a portion thereof comprises 2′-F. In some embodiments, about 70% or more of sugars in an oligonucleotide or a portion thereof comprises 2′-F. In some embodiments, about 80% or more of sugars in an oligonucleotide or a portion thereof comprises 2′-F. In some embodiments, about 90% or more of sugars in an oligonucleotide or a portion thereof comprises 2′-F. In some embodiments, an oligonucleotide or a portion thereof also comprises one or more sugars comprising no 2′-F (e.g., sugars comprising no modifications and/or sugars comprising other modifications).

[1028] In some embodiments, no more than about 1%-95% (e.g., no more than about 1%, 5%, 10%, 15%, 20%, 25%, 30%, 35%, 40%, 45%, 50%, 55%, 60%, 65%, 70%, 75%, 80%, 85%, 90%, 95%, etc.) of sugars in an oligonucleotide or a portion thereof (e.g., a domain, a subdomain, etc.) comprises 2′-MOE. In some embodiments, no more than about 50% of sugars in an oligonucleotide or a portion thereof comprises 2′-MOE. In some embodiments, no sugars in an oligonucleotide or a portion thereof comprises 2′-MOE. In some embodiments, no more than 1, 2, 3, 4, or 5 sugars in an oligonucleotide or a portion thereof comprises 2′-MOE.

[1029] Various additional sugars useful for preparing oligonucleotides or analogs thereof are known in the art and may be utilized in accordance with the present disclosure.

### Internucleotidic Linkages

[1030] Among other things, the present disclosure provides various internucleotidic linkages, including various modified internucleotidic linkages, that may be utilized together with other structural elements, e.g., various sugars as described herein, to provide oligonucleotides and compositions thereof.

[1031] In some embodiments, oligonucleotides comprise base modifications, sugar modifications, and/or internucleotidic linkage modifications. Various internucleotidic linkages can be utilized in accordance with the present disclosure to link units comprising nucleobases, e.g., nucleosides. In some embodiments, provided oligonucleotides comprise both one or more modified internucleotidic linkages and one or more natural phosphate linkages. As widely known by those skilled in the art, natural phosphate linkages are widely found in natural DNA and RNA molecules; they have the structure of —OP(O)(OH)O—, connect sugars in the nucleosides in DNA and RNA, and may be in various salt forms, for example, at physiological pH (about 7.4), natural phosphate linkages are predominantly exist in salt forms with the anion being —OP(O)(O⁻)O—. A modified internucleotidic linkage, or a non-natural phosphate linkage, is an internucleotidic linkage that is not natural phosphate linkage or a salt form thereof. Modified internucleotidic linkages, depending on their structures, may also be in their salt forms. For example, as appreciated by those skilled in the art, phosphorothioate internucleotidic linkages which have the structure of —OP(O)(SH)O— may be in various salt forms, e.g., at physiological pH (about 7.4) with the anion being —OP(O)(S⁻)O—.

[1032] In some embodiments, an oligonucleotide comprises an internucleotidic linkage which is a modified internucleotidic linkage, e.g., phosphorothioate, phosphorodithioate, methylphosphonate, phosphoroamidate, thiophosphate, 3′-thiophosphate, or 5′-thiophosphate.

[1033] In some embodiments, a modified internucleotidic linkage is a chiral internucleotidic linkage which comprises a chiral linkage phosphorus. In some embodiments, a chiral internucleotidic linkage is a phosphorothioate linkage. In some embodiments, a chiral internucleotidic linkage is a non-negatively charged internucleotidic linkage. In some embodiments, a chiral internucleotidic linkage is a neutral internucleotidic linkage. In some embodiments, a chiral internucleotidic linkage is chirally controlled with respect to its chiral linkage phosphorus. In some embodiments, a chiral internucleotidic linkage is stereochemically pure with respect to its chiral linkage phosphorus. In some embodiments, a chiral internucleotidic linkage is not chirally controlled. In some embodiments, a pattern of backbone chiral centers comprises or consists of positions and linkage phosphorus configurations of chirally controlled internucleotidic linkages (Rp or Sp) and positions of achiral internucleotidic linkages (e.g., natural phosphate linkages).

[1034] In some embodiments, an internucleotidic linkage comprises a P-modification, wherein a P-modification is a modification at a linkage phosphorus. In some embodiments, a modified internucleotidic linkage is a moiety which does not comprise a phosphorus but serves to link two sugars or two moieties that each independently comprises a nucleobase, e.g., as in peptide nucleic acid (PNA).

[1035] In some embodiments, an oligonucleotide comprises a modified internucleotidic linkage, e.g., those having the structure of Formula I, I-a, I-b, or I-c and described herein and/or in: WO 2018/022473, WO 2018/098264, WO 2018/223056, WO 2018/223073, WO 2018/223081, WO 2018/237194, WO 2019/032607, WO 2019/055951, WO 2019/075357, WO 2019/200185, WO 2019/217784, WO 2019/032612, WO 2020/191252, and/or WO 2021/071858, the internucleotidic linkages (e.g., those of Formula I, I-a, I-b, I-c, etc.) of each of which are independently incorporated herein by reference. In some embodiments, a modified internucleotidic linkage is a chiral internucleotidic linkage. In some embodiments, a modified internucleotidic linkage is a phosphorothioate internucleotidic linkage.

[1036] In some embodiments, a modified internucleotidic linkage is a non-negatively charged internucleotidic linkage. In some embodiments, provided oligonucleotides comprise one or more non-negatively charged internucleotidic linkages. In some embodiments, a non-negatively charged internucleotidic linkage is a positively charged internucleotidic linkage. In some embodiments, a non-negatively charged internucleotidic linkage is a neutral internucleotidic linkage. In some embodiments, the present disclosure provides oligonucleotides comprising one or more neutral internucleotidic linkages. In some embodiments, a non-negatively charged internucleotidic linkage has the structure of Formula I-n-1, I-n-2, I-n-3, I-n-4, II, II-a-1, II-a-2, II-b-1, II-b-2, II-c-1, II-c-2, II-d-1, II-d-2, etc., or a salt form thereof, as described herein and/or in U.S. Pat. Nos. 9,394,333, 9,744,183, 9,605,019, 9,982,257, US 20170037399, US 20180216108, US 20180216107, U.S. Pat. No. 9,598,458, WO 2017/062862, WO 2018/067973, WO 2017/160741, WO 2017/192679, WO 2017/210647, WO 2018/098264, WO 2018/022473, WO 2018/223056, WO 2018/223073, WO 2018/223081, WO 2018/237194, WO 2019/032607, WO 2019/032612, WO 2019/055951, WO 2019/075357, WO 2019/200185, WO 2019/217784, WO 2019/032612, WO 2020/191252, and/or WO 2021/071858, the non-negatively charged internucleotidic linkages (e.g., those of Formula I-n-1, I-n-2, I-n-3, I-n-4, II, II-a-1, II-a-2, II-b-1, II-b-2, II-c-1, II-c-2, II-d-1, II-d-2, etc., or a suitable salt form thereof) of each of which are independently incorporated herein by reference.

[1037] In some embodiments, a non-negatively charged internucleotidic linkage can improve the delivery and/or activities (e.g., adenosine editing activity).

[1038] In some embodiments, a modified internucleotidic linkage (e.g., a non-negatively charged internucleotidic linkage) comprises optionally substituted triazolyl. In some embodiments, a modified internucleotidic linkage (e.g., a non-negatively charged internucleotidic linkage) comprises optionally substituted alkynyl. In some embodiments, a modified internucleotidic linkage comprises a triazole or alkyne moiety. In some embodiments, a triazole moiety, e.g., a triazolyl group, is optionally substituted. In some embodiments, a triazole moiety, e.g., a triazolyl group) is substituted. In some embodiments, a triazole moiety is unsubstituted. In some embodiments, a modified internucleotidic linkage comprises an optionally substituted cyclic guanidine moiety. In some embodiments, a modified internucleotidic linkage has the structure of

[chemical structure]

and is optionally chirally controlled, wherein R¹ is -L-R′, wherein L is L^{B} as described herein, and R′ is as described herein. In some embodiments, each R¹ is independently R′. In some embodiments, each R′ is independently R. In some embodiments, two R¹ are R and are taken together to form a ring as described herein. In some embodiments, two R¹ on two different nitrogen atoms are R and are taken together to form a ring as described herein. In some embodiments, R¹ is independently optionally substituted C₁₋₆ aliphatic as described herein. In some embodiments, R¹ is methyl. In some embodiments, two R′ on the same nitrogen atom are R and are taken together to form a ring as described herein. In some embodiments, a modified internucleotidic linkage has the structure of

[chemical structure]

and is optionally chirally controlled. In some embodiments,

[chemical structure]

In some embodiments, a modified internucleotidic linkage comprises an optionally substituted cyclic guanidine moiety and has the structure of:

[chemical structure]

wherein W is O or S. In some embodiments, W is O. In some embodiments, W is S. In some embodiments, a non-negatively charged internucleotidic linkage is stereochemically controlled.

[1039] In some embodiments, a non-negatively charged internucleotidic linkage or a neutral internucleotidic linkage is an internucleotidic linkage comprising a triazole moiety. In some embodiments, a non-negatively charged internucleotidic linkage or a non-negatively charged internucleotidic linkage comprises an optionally substituted triazolyl group. In some embodiments, an internucleotidic linkage comprising a triazole moiety (e.g., an optionally substituted triazolyl group) has the structure of

[chemical structure]

In some embodiments, an internucleotidic linkage comprising a triazole moiety has the structure of

[chemical structure]

In some embodiments, an internucleotidic linkage comprising a triazole moiety has the formula of

[chemical structure]

where W is O or S. In some embodiments, an internucleotidic linkage comprising an alkyne moiety (e.g., an optionally substituted alkynyl group) has the formula of

[chemical structure]

wherein W is O or S. In some embodiments, an internucleotidic linkage, e.g., a non-negatively charged internucleotidic linkage, a neutral internucleotidic linkage, comprises a cyclic guanidine moiety. In some embodiments, an internucleotidic linkage comprising a cyclic guanidine moiety has the structure of

[chemical structure]

In some embodiments, a non-negatively charged internucleotidic linkage, or a neutral internucleotidic linkage, is or comprising a structure selected from

[chemical structure]

wherein W is O or S.

[1040] In some embodiments, an internucleotidic linkage comprises a Tmg group

[chemical structure]

In some embodiments, an internucleotidic linkage comprises a Tmg group and has the structure of

[chemical structure]

(the “Tmg internucleotidic linkage”). In some embodiments, neutral internucleotidic linkages include internucleotidic linkages of PNA and PMO, and an Tmg internucleotidic linkage.

[1041] In some embodiments, a non-negatively charged internucleotidic linkage has the structure of Formula I, I-a, I-b, I-c, I-n-1, I-n-2, I-n-3, I-n-4, II, II-a-1, II-a-2, II-b-1, II-b-2, II-c-1, II-c-2, II-d-1, II-d-2, etc., or a salt form thereof. In some embodiments, a non-negatively charged internucleotidic linkage comprises an optionally substituted 3-20 membered heterocyclyl or heteroaryl group having 1-10 heteroatoms. In some embodiments, a non-negatively charged internucleotidic linkage comprises an optionally substituted 3-20 membered heterocyclyl or heteroaryl group having 1-10 heteroatoms, wherein at least one heteroatom is nitrogen. In some embodiments, such a heterocyclyl or heteroaryl group is of a 5-membered ring. In some embodiments, such a heterocyclyl or heteroaryl group is of a 6-membered ring.

[1042] In some embodiments, a non-negatively charged internucleotidic linkage comprises an optionally substituted 5-20 membered heteroaryl group having 1-10 heteroatoms. In some embodiments, a non-negatively charged internucleotidic linkage comprises an optionally substituted 5-20 membered heteroaryl group having 1-10 heteroatoms, wherein at least one heteroatom is nitrogen. In some embodiments, a non-negatively charged internucleotidic linkage comprises an optionally substituted 5-6 membered heteroaryl group having 1-4 heteroatoms, wherein at least one heteroatom is nitrogen. In some embodiments, a non-negatively charged internucleotidic linkage comprises an optionally substituted 5-membered heteroaryl group having 1-4 heteroatoms, wherein at least one heteroatom is nitrogen. In some embodiments, a heteroaryl group is directly bonded to a linkage phosphorus. In some embodiments, a non-negatively charged internucleotidic linkage comprises an optionally substituted triazolyl group. In some embodiments, a non-negatively charged internucleotidic linkage comprises an unsubstituted triazolyl group, e.g.,

[chemical structure]

In some embodiments, a non-negatively charged internucleotidic linkage comprises a substituted triazolyl group, e.g.,

[chemical structure]

[1043] In some embodiments, a non-negatively charged internucleotidic linkage comprises an optionally substituted 5-20 membered heterocyclyl group having 1-10 heteroatoms. In some embodiments, a non-negatively charged internucleotidic linkage comprises an optionally substituted 5-20 membered heterocyclyl group having 1-10 heteroatoms, wherein at least one heteroatom is nitrogen. In some embodiments, a non-negatively charged internucleotidic linkage comprises an optionally substituted 5-6 membered heterocyclyl group having 1-4 heteroatoms, wherein at least one heteroatom is nitrogen. In some embodiments, a non-negatively charged internucleotidic linkage comprises an optionally substituted 5-membered heterocyclyl group having 1-4 heteroatoms, wherein at least one heteroatom is nitrogen. In some embodiments, at least two heteroatoms are nitrogen. In some embodiments, a heterocyclyl group is directly bonded to a linkage phosphorus. In some embodiments, a heterocyclyl group is bonded to a linkage phosphorus through a linker, e.g., ═N— when the heterocyclyl group is part of a guanidine moiety who directed bonded to a linkage phosphorus through its ═N—. In some embodiments, a non-negatively charged internucleotidic linkage comprises an optionally substituted

[chemical structure]

group. In some embodiments, a non-negatively charged internucleotidic linkage comprises an substituted

[chemical structure]

group. In some embodiments, a non-negatively charged internucleotidic linkage comprises a

[chemical structure]

group, wherein each R¹ is independently -L-R. In some embodiments, each R¹ is independently optionally substituted C₁₋₆ alkyl. In some embodiments, each R¹ is independently methyl.

[1044] In some embodiments, a modified internucleotidic linkage, e.g., a non-negatively charged internucleotidic linkage, comprises a triazole or alkyne moiety, each of which is optionally substituted. In some embodiments, a modified internucleotidic linkage comprises a triazole moiety. In some embodiments, a modified internucleotidic linkage comprises a unsubstituted triazole moiety. In some embodiments, a modified internucleotidic linkage comprises a substituted triazole moiety. In some embodiments, a modified internucleotidic linkage comprises an alkyl moiety. In some embodiments, a modified internucleotidic linkage comprises an optionally substituted alkynyl group. In some embodiments, a modified internucleotidic linkage comprises an unsubstituted alkynyl group. In some embodiments, a modified internucleotidic linkage comprises a substituted alkynyl group. In some embodiments, an alkynyl group is directly bonded to a linkage phosphorus.

[1045] In some embodiments, an oligonucleotide comprises different types of internucleotidic phosphorus linkages. In some embodiments, a chirally controlled oligonucleotide comprises at least one natural phosphate linkage and at least one modified (non-natural) internucleotidic linkage. In some embodiments, an oligonucleotide comprises at least one natural phosphate linkage and at least one phosphorothioate. In some embodiments, an oligonucleotide comprises at least one non-negatively charged internucleotidic linkage. In some embodiments, an oligonucleotide comprises at least one natural phosphate linkage and at least one non-negatively charged internucleotidic linkage. In some embodiments, an oligonucleotide comprises at least one phosphorothioate internucleotidic linkage and at least one non-negatively charged internucleotidic linkage. In some embodiments, an oligonucleotide comprises at least one phosphorothioate internucleotidic linkage, at least one natural phosphate linkage, and at least one non-negatively charged internucleotidic linkage. In some embodiments, oligonucleotides comprise one or more, e.g., 1-50, 1-40, 1-30, 1-20, 1-15, 1-10, 1, 2, 3, 4, 5, 6, 7, 8, 9, 10, 11, 12, 13, 14, 15, 16, 17, 18, 19, 20 or more non-negatively charged internucleotidic linkages. In some embodiments, oligonucleotides comprise no more than a certain number of non-negatively charged internucleotidic linkages, e.g., no more than 1, no more than 2, no more than 3, no more than 4, no more than 5, no more than 6, no more than 7, no more than 8, no more than 9, no more than 10, no more than 11, no more than 12, no more than 13, no more than 14, no more than 15, no more than 16, no more than 17, no more than 18, no more than 19, no more than 20, no more than 21, no more than 22, no more than 23, no more than 24, no more than 25, no more than 26, no more than 27, no more than 28, no more than 29, or no more than 30 non-negatively charged internucleotidic linkages. In some embodiments, oligonucleotides comprise no non-negatively charged internucleotidic linkages. In some embodiments, a non-negatively charged internucleotidic linkage is not negatively charged in that at a given pH in an aqueous solution less than 50%, 40%, 40%, 30%, 20%, 10%, 5%, or 1% of the internucleotidic linkage exists in a negatively charged salt form. In some embodiments, a pH is about pH 7.4. In some embodiments, a pH is about 4-9. In some embodiments, the percentage is less than 10%. In some embodiments, the percentage is less than 5%. In some embodiments, the percentage is less than 1%. In some embodiments, an internucleotidic linkage is a non-negatively charged internucleotidic linkage in that the neutral form of the internucleotidic linkage has no pKa that is no more than about 1, 2, 3, 4, 5, 6, or 7 in water. In some embodiments, no pKa is 7 or less. In some embodiments, no pKa is 6 or less. In some embodiments, no pKa is 5 or less. In some embodiments, no pKa is 4 or less. In some embodiments, no pKa is 3 or less. In some embodiments, no pKa is 2 or less. In some embodiments, no pKa is 1 or less. In some embodiments, pKa of the neutral form of an internucleotidic linkage can be represented by pKa of the neutral form of a compound having the structure of CH₃-the internucleotidic linkage-CH₃. For example, pKa of the neutral form of an internucleotidic linkage having the structure of Formula I may be represented by the pKa of the neutral form of a compound having the structure of

[chemical structure]

(wherein each of X, Y, Z is independently —O—, —S—, —N(R′)—; L is L^{B}, and R¹ is -L-R′), pKa of

[chemical structure]

can be represented by pKa

[chemical structure]

In some embodiments, a non-negatively charged internucleotidic linkage is a neutral internucleotidic linkage. In some embodiments, a non-negatively charged internucleotidic linkage is a positively-charged internucleotidic linkage. In some embodiments, a non-negatively charged internucleotidic linkage comprises a guanidine moiety. In some embodiments, a non-negatively charged internucleotidic linkage comprises a heteroaryl base moiety. In some embodiments, anon-negatively charged internucleotidic linkage comprises a triazole moiety. In some embodiments, a non-negatively charged internucleotidic linkage comprises an alkynyl moiety.

[1046] In some embodiments, a neutral or non-negatively charged internucleotidic linkage has the structure of any neutral or non-negatively charged internucleotidic linkage described in any of: U.S. Pat. Nos. 9,394,333, 9,744,183, 9,605,019, 9,982,257, US 20170037399, US 20180216108, US 20180216107, U.S. Pat. No. 9,598,458, WO 2017/062862, WO 2018/067973, WO 2017/160741, WO 2017/192679, WO 2017/210647, WO 2018/098264, WO 2018/022473, WO 2018/223056, WO 2018/223073, WO 2018/223081, WO 2018/237194, WO 2019/032607, WO 2019/032612, WO 2019/055951, WO 2019/075357, WO 2019/200185, WO 2019/217784, WO 2019/032612, WO 2020/191252, and/or WO 2021/071858, each neutral or non-negatively charged internucleotidic linkage of each of which is hereby incorporated by reference.

[1047] In some embodiments, each R′ is independently optionally substituted C₁₋₆ aliphatic. In some embodiments, each R′ is independently optionally substituted C₁₋₆ alkyl. In some embodiments, each R′ is independently —CH₃. In some embodiments, each R^{s} is —H.

[1048] In some embodiments, a non-negatively charged internucleotidic linkage has the structure of

[chemical structure]

In some embodiments, a non-negatively charged internucleotidic linkage has the structure of

[chemical structure]

In some embodiments, a non-negatively charged internucleotidic linkage has the structure of

[chemical structure]

In some embodiments, a non-negatively charged internucleotidic linkage has the structure of

[chemical structure]

In some embodiments, a non-negatively charged internucleotidic linkage has the structure of

[chemical structure]

In some embodiments, a non-negatively charged internucleotidic linkage has the structure of

[chemical structure]

In some embodiments, a non-negatively charged internucleotidic linkage has the structure of

[chemical structure]

In some embodiments, a non-negatively charged internucleotidic linkage has the structure of

[chemical structure]

In some embodiments, a non-negatively charged internucleotidic linkage has the structure of

[chemical structure]

In some embodiments, a non-negatively charged internucleotidic linkage has the structure of

[chemical structure]

In some embodiments, a non-negatively charged internucleotidic linkage has the structure of

[chemical structure]

In some embodiments, a non-negatively charged internucleotidic linkage has the structure of

[chemical structure]

In some embodiments, W is O. In some embodiments, W is S. In some embodiments, a neutral internucleotidic linkage is a non-negatively charged internucleotidic linkage described above.

[1049] In some embodiments, provided oligonucleotides comprise 1 or more internucleotidic linkages of Formula I, I-a, I-b, I-c, I-n-1, I-n-2, I-n-3, I-n-4, II, II-a-1, II-a-2, II-b-1, II-b-2, II-c-1, II-c-2, II-d-1, or II-d-2, which are described in U.S. Pat. Nos. 9,394,333, 9,744,183, 9,605,019, 9,982,257, US 20170037399, US 20180216108, US 20180216107, U.S. Pat. No. 9,598,458, WO 2017/062862, WO 2018/067973, WO 2017/160741, WO 2017/192679, WO 2017/210647, WO 2018/098264, WO 2018/022473, WO 2018/223056, WO 2018/223073, WO 2018/223081, WO 2018/237194, WO 2019/032607, WO 2019/032612, WO 2019/055951, WO 2019/075357, WO 2019/200185, WO 2019/217784, WO 2019/032607, WO 2019/032612, WO 2019/055951, WO 2019/075357, WO 2019/200185, WO 2019/217784, WO 2019/032612, WO 2020/191252, and/or WO 2021/071858, the Formula I, I-a, I-b, I-c, I-n-1, I-n-2, I-n-3, I-n-4, II, II-a-1, II-a-2, II-b-1, II-b-2, II-c-1, II-c-2, II-d-1, or II-d-2, or salt forms thereof, each of which are independently incorporated herein by reference.

[1050] In some embodiments, an oligonucleotide comprises a neutral internucleotidic linkage and a chirally controlled internucleotidic linkage. In some embodiments, an oligonucleotide comprises a neutral internucleotidic linkage and a chirally controlled internucleotidic linkage which is not the neutral internucleotidic linkage. In some embodiments, an oligonucleotide comprises a neutral internucleotidic linkage and a chirally controlled phosphorothioate internucleotidic linkage. In some embodiments, the present disclosure provides an oligonucleotide comprising one or more non-negatively charged internucleotidic linkages and one or more phosphorothioate internucleotidic linkages, wherein each phosphorothioate internucleotidic linkage in the oligonucleotide is independently a chirally controlled internucleotidic linkage. In some embodiments, the present disclosure provides an oligonucleotide comprising one or more neutral internucleotidic linkages and one or more phosphorothioate internucleotidic linkage, wherein each phosphorothioate internucleotidic linkage in the oligonucleotide is independently a chirally controlled internucleotidic linkage. In some embodiments, an oligonucleotide comprises at least 5, 6, 7, 8, 9, 10, 11, 12, 13, 14, 15, 16, 17, 18, 19, 20 or more chirally controlled phosphorothioate internucleotidic linkages. In some embodiments, non-negatively charged internucleotidic linkage is chirally controlled. In some embodiments, non-negatively charged internucleotidic linkage is not chirally controlled. In some embodiments, a neutral internucleotidic linkage is chirally controlled. In some embodiments, a neutral internucleotidic linkage is not chirally controlled. In some embodiments, an oligonucleotide comprises one or more (e.g., 1, 2, 3, 4, 5, 6, 7, 8, 9, or 10) chirally controlled and one or more (e.g., 1, 2, 3, 4, 5, 6, 7, 8, 9, or 10) non-chirally controlled chiral internucleotidic linkages. In some embodiments, an oligonucleotide comprises one or more (e.g., 1, 2, 3, 4, 5, 6, 7, 8, 9, or 10) chirally controlled and one or more (e.g., 1, 2, 3, 4, 5, 6, 7, 8, 9, or 10) non-chirally controlled non-negatively charged internucleotidic linkages (in some embodiments, each of which is independently n001). In some embodiments, a neutral internucleotidic linkage is chirally controlled. In some embodiments, a neutral internucleotidic linkage is not chirally controlled. In some embodiments, an oligonucleotide comprises one or more (e.g., 1, 2, 3, 4, 5, 6, 7, 8, 9, or 10) chirally controlled and one or more (e.g., 1, 2, 3, 4, 5, 6, 7, 8, 9, or 10) non-chirally controlled neutral internucleotidic linkages (in some embodiments, each of which is independently n001).

[1051] Without wishing to be bound by any particular theory, the present disclosure notes that a neutral internucleotidic linkage can be more hydrophobic than a phosphorothioate internucleotidic linkage (PS), which can be more hydrophobic than a natural phosphate linkage (PO). Typically, unlike a PS or PO, a neutral internucleotidic linkage bears less charge. Without wishing to be bound by any particular theory, the present disclosure notes that incorporation of one or more neutral internucleotidic linkages into an oligonucleotide may increase oligonucleotides' ability to be taken up by a cell and/or to escape from endosomes. Without wishing to be bound by any particular theory, the present disclosure notes that incorporation of one or more neutral internucleotidic linkages can be utilized to modulate melting temperature of duplexes formed between an oligonucleotide and its target nucleic acid.

[1052] Without wishing to be bound by any particular theory, the present disclosure notes that incorporation of one or more non-negatively charged internucleotidic linkages, e.g., neutral internucleotidic linkages, into an oligonucleotide may be able to increase the oligonucleotide's ability to mediate a function such as target adenosine editing.

[1053] As appreciated by those skilled in the art, internucleotidic linkages such as natural phosphate linkages and those of Formula I, I-a, I-b, I-c, I-n-1, I-n-2, I-n-3, I-n-4, II, II-a-1, II-a-2, II-b-1, II-b-2, II-c-1, II-c-2, II-d-1, II-d-2, or salt forms thereof typically connect two nucleosides (which can either be natural or modified) as described in U.S. Pat. Nos. 9,394,333, 9,744,183, 9,605,019, 9,982,257, US 20170037399, US 20180216108, US 20180216107, U.S. Pat. No. 9,598,458, WO 2017/062862, WO 2018/067973, WO 2017/160741, WO 2017/192679, WO 2017/210647, WO 2018/098264, WO 2018/022473, WO 2018/223056, WO 2018/223073, WO 2018/223081, WO 2018/237194, WO 2019/032607, WO 2019/032612, WO 2019/055951, WO 2019/075357, WO 2019/200185, WO 2019/217784, WO 2019/032612, WO 2020/191252, and/or WO 2021/071858, the Formula I, I-a, I-b, I-c, I-n-1, I-n-2, I-n-3, I-n-4, II, II-a-1, II-a-2, II-b-1, II-b-2, II-c-1, II-c-2, II-d-1, II-d-2, or salt forms thereof, each of which are independently incorporated herein by reference. A typical connection, as in natural DNA and RNA, is that an internucleotidic linkage forms bonds with two sugars (which can be either unmodified or modified as described herein). In many embodiments, as exemplified herein an internucleotidic linkage forms bonds through its oxygen atoms or heteroatoms (e.g., Y and Z in various formulae) with one optionally modified ribose or deoxyribose at its 5′ carbon, and the other optionally modified ribose or deoxyribose at its 3′ carbon. In some embodiments, each nucleoside units connected by an internucleotidic linkage independently comprises a nucleobase which is independently an optionally substituted A, T, C, G, or U, or a substituted tautomer of A, T, C, G or U, or a nucleobase comprising an optionally substituted heterocyclyl and/or a heteroaryl ring having at least one nitrogen atom.

[1054] In some embodiments, a linkage has the structure of or comprises —Y—P^{L}(—X—R^{L})—Z—, or a salt form thereof, wherein:
[1055] P^{L} is P, P(═W), P->B(-L^{L}-R^{L})₃, or P^{N};
[1056] W is O, N(-L^{L}-R^{L}), S or Se;
[1057] P^{N} is P═N—C(-L^{L}-R′)(=L^{N}-R′) or P═N-L^{L}-R^{L};
[1058] L^{N} is ═N-L^{L1}-, ═CH-L^{L1}- wherein CH is optionally substituted, or ═N⁺(R′)(Q⁻)-L^{L1}-;
[1059] Q⁻ is an anion;
[1060] each of X, Y and Z is independently —O—, —S—, -L^{L}-N(-L^{L}-R^{L})-L^{L}-, -L^{L}-N═C(-L^{L}-R^{L})-L^{L}-, or L^{L};
[1061] each R^{L} is independently -L^{L}-N(R′)₂, -L^{L}-R′, —N═C(-L^{L}-R′)₂, -L^{L}-N(R′)C(NR′)N(R′)₂, -L^{L}-N(R′)C(O)N(R′)₂, a carbohydrate, or one or more additional chemical moieties optionally connected through a linker;
[1062] each of L^{L1} and L^{L} is independently L;
[1063] -Cy^{IL}- is -Cy-;
[1064] each L is independently a covalent bond, or a bivalent, optionally substituted, linear or branched group selected from a C₁₋₃₀ aliphatic group and a C₁₋₃₀ heteroaliphatic group having 1-10 heteroatoms, wherein one or more methylene units are optionally and independently replaced by an optionally substituted group selected from C₁₋₆ alkylene, C₁₋₆ alkenylene, —C≡C—, a bivalent C₁-C₆ heteroaliphatic group having 1-5 heteroatoms, —C(R′)₂—, -Cy-, —O—, —S—, —S—S—, —N(R′)—, —C(O)—, —C(S)—, —C(NR′)—, —C(NR′)N(R′)—, —N(R′)C(NR′)N(R′)—, —C(O)N(R′)—, —N(R′)C(O)N(R′)—, —N(R′)C(O)O—, —S(O)—, —S(O)₂—, —S(O)₂N(R′)—, —C(O)S—, —C(O)O—, —P(O)(OR′)—, —P(O)(SR′)—, —P(O)(R′)—, —P(O)(NR′)—, —P(S)(OR′)—, —P(S)(SR′)—, —P(S)(R′)—, —P(S)(NR′)—, —P(R′)—, —P(OR′)—, —P(SR′)—, —P(NR′)—, —P(OR′)[B(R′)₃]—, —OP(O)(OR′)O—, —OP(O)(SR′)O—, —OP(O)(R′)O—, —OP(O)(NR′)O—, —OP(OR′)O—, —OP(SR′)O—, —OP(NR′)O—, —OP(R′)O—, —OP(OR′)[B(R′)₃]O—, and —[C(R′)₂C(R′)₂O]n-, wherein n is 1-50, and one or more nitrogen or carbon atoms are optionally and independently replaced with Cy^{L};
[1065] each -Cy- is independently an optionally substituted bivalent 3-30 membered, monocyclic, bicyclic or polycyclic ring having 0-10 heteroatoms;
[1066] each Cy^{L} is independently an optionally substituted trivalent or tetravalent, 3-30 membered, monocyclic, bicyclic or polycyclic ring having 0-10 heteroatoms;
[1067] each R′ is independently —R, —C(O)R, —C(O)N(R)₂, —C(O)OR, or —S(O)₂R;
[1068] each R is independently —H, or an optionally substituted group selected from C₁₋₃₀ aliphatic, C₁₋₃₀ heteroaliphatic having 1-10 heteroatoms, C₆₋₃₀ aryl, C₆₋₃₀ arylaliphatic, C₆₋₃₀ arylheteroaliphatic having 1-10 heteroatoms, 5-30 membered heteroaryl having 1-10 heteroatoms, and 3-30 membered heterocyclyl having 1-10 heteroatoms, or
[1069] two R groups are optionally and independently taken together to form a covalent bond, or:
[1070] two or more R groups on the same atom are optionally and independently taken together with the atom to form an optionally substituted, 3-30 membered, monocyclic, bicyclic or polycyclic ring having, in addition to the atom, 0-10 heteroatoms; or
[1071] two or more R groups on two or more atoms are optionally and independently taken together with their intervening atoms to form an optionally substituted, 3-30 membered, monocyclic, bicyclic or polycyclic ring having, in addition to the intervening atoms, 0-10 heteroatoms.

[1072] In some embodiments, an internucleotidic linkage has the structure of —O—P^{L}(—X—R^{L})—O—, wherein each variable is independently as described herein. In some embodiments, an internucleotidic linkage has the structure of —O—P(═W)(—X—R^{L})—O—, wherein each variable is independently as described herein. In some embodiments, an internucleotidic linkage has the structure of —O—P(═W)[—N(-L^{L}-R^{L})—R^{L}]—O—, wherein each variable is independently as described herein. In some embodiments, an internucleotidic linkage has the structure of —O—P(═W)(—NH-L^{L}-R^{L})—O—, wherein each variable is independently as described herein. In some embodiments, an internucleotidic linkage has the structure of —O—P(═W)[—N(R′)₂]—O—, wherein each variable is independently as described herein. In some embodiments, an internucleotidic linkage has the structure of —O—P(═W)(—NHR′)—O—, wherein each variable is independently as described herein. In some embodiments, an internucleotidic linkage has the structure of —O—P(═W)(—NHSO₂R)—O—, wherein each variable is independently as described herein. In some embodiments, R is methyl. In some embodiments, an internucleotidic linkage is —O—P(═O)(—NHSO₂CH₃)—O—. In some embodiments, an internucleotidic linkage has the structure of —O—P(═W)[—N═C(-L^{L}-R′)₂]—O—, wherein each variable is independently as described herein. In some embodiments, an internucleotidic linkage has the structure of —O—P(═W)[—N═C[N(R′)₂]₂]—O—, wherein each variable is independently as described herein. In some embodiments, an internucleotidic linkage has the structure of —OP(═W)(—N═C(R″)₂)—O—, wherein each variable is independently as described herein. In some embodiments, an internucleotidic linkage has the structure of —OP(═W)(—N(R″)₂)—O—, wherein each variable is independently as described herein. In some embodiments, W is O. In some embodiments, W is S. In some embodiments, such an internucleotidic linkage is a non-negatively charged internucleotidic linkage. In some embodiments, such an internucleotidic linkage is a neutral internucleotidic linkage.

[1073] In some embodiments, an internucleotidic linkage has the structure of —P^{L}(—X—R^{L})—Z—, wherein each variable is independently as described herein. In some embodiments, an internucleotidic linkage has the structure of —P^{L}(—X—R^{L})—O—, wherein each variable is independently as described herein. In some embodiments, an internucleotidic linkage has the structure of —P(═W)(—X—R^{L})—O—, wherein each variable is independently as described herein. In some embodiments, an internucleotidic linkage has the structure of —P(═W)[—N(-L^{L}-R^{L})—R^{L}]—O—, wherein each variable is independently as described herein. In some embodiments, an internucleotidic linkage has the structure of —P(═W)(—NH-L^{L}-R^{L})—O—, wherein each variable is independently as described herein. In some embodiments, an internucleotidic linkage has the structure of —P(═W)[—N(R′)₂]—O—, wherein each variable is independently as described herein. In some embodiments, an internucleotidic linkage has the structure of —P(═W)(—NHR′)—O—, wherein each variable is independently as described herein. In some embodiments, an internucleotidic linkage has the structure of —P(═W)(—NHSO₂R)—O—, wherein each variable is independently as described herein. In some embodiments, R is methyl. In some embodiments, an internucleotidic linkage is —P(═O)(—NHSO₂CH₃)—O—. In some embodiments, an internucleotidic linkage has the structure of —P(═W)[—N═C(-L^{L}-R′)₂]—O—, wherein each variable is independently as described herein. In some embodiments, an internucleotidic linkage has the structure of —P(═W)[—N═C[N(R′)₂]₂]—O—, wherein each variable is independently as described herein. In some embodiments, an internucleotidic linkage has the structure of —P(═W)(—N═C(R″)₂)—O—, wherein each variable is independently as described herein. In some embodiments, an internucleotidic linkage has the structure of —P(═W)(—N(R″)₂)—O—, wherein each variable is independently as described herein. In some embodiments, W is O. In some embodiments, W is S. In some embodiments, such an internucleotidic linkage is a non-negatively charged internucleotidic linkage. In some embodiments, such an internucleotidic linkage is a neutral internucleotidic linkage. In some embodiments, P of such an internucleotidic linkage is bonded to N of a sugar.

[1074] In some embodiments, a linkage is a phosphoryl guanidine internucleotidic linkage. In some embodiments, a linkage is a thio-phosphoryl guanidine internucleotidic linkage.

[1075] In some embodiments, one or more methylene units are optionally and independently replaced with a moiety as described herein. In some embodiments, L or L^{L} is or comprises —SO₂—. In some embodiments, L or L^{L} is or comprises —SO₂N(R′)—. In some embodiments, L or L^{L} is or comprises —C(O)—. In some embodiments, L or L^{L} is or comprises —C(O)O—. In some embodiments, L or L^{L} is or comprises —C(O)N(R′)—. In some embodiments, L or L^{L} is or comprises —P(═W)(R′)—. In some embodiments, L or L^{L} is or comprises —P(═O)(R′)—. In some embodiments, L or L^{L} is or comprises —P(═S)(R′)—. In some embodiments, L or L^{L} is or comprises —P(R′)—. In some embodiments, L or L^{L} is or comprises —P(═W)(OR′)—. In some embodiments, L or L^{L} is or comprises —P(═O)(OR′)—. In some embodiments, L or L^{L} is or comprises —P(═S)(OR′)—. In some embodiments, L or L^{L} is or comprises —P(OR′)—.

[1076] In some embodiments, —X—R^{L} is —N(R′)SO₂R^{L}. In some embodiments, —X—R^{L} is —N(R′)C(O)R^{L}. In some embodiments, —X—R^{L} is —N(R′)P(═O)(R′)R^{L}.

[1077] In some embodiments, a linkage, e.g., a non-negatively charged internucleotidic linkage or neutral internucleotidic linkage, has the structure of or comprises —P(═W)(—N═C(R″)₂)—, —P(═W)(—N(R′)SO₂R″)—, —P(═W)(—N(R′)C(O)R″)—, —P(═W)(—N(R″)₂)—, —P(═W)(—N(R′)P(O)(R″)₂)—, —OP(═W)(—N═C(R″)₂)O—, —OP(═W)(—N(R′)SO₂R″)O—, —OP(═W)(—N(R′)C(O)R″)O—, —OP(═W)(—N(R″)₂)O—, —OP(═W)(—N(R′)P(O)(R″)₂)O—, —P(═W)(—N═C(R″)₂)O—, —P(═W)(—N(R′)SO₂R″)O—, —P(═W)(—N(R′)C(O)R″)O—, —P(═W)(—N(R″)₂)O—, or —P(═W)(—N(R′)P(O)(R″)₂)O—, or a salt form thereof, wherein:
[1078] W is O or S;
[1079] each R″ is independently R′, —OR′, —P(═W)(R′)₂, or —N(R′)₂;
[1080] each R′ is independently —R, —C(O)R, —C(O)N(R)₂, —C(O)OR, or —S(O)₂R;
[1081] each R is independently —H, or an optionally substituted group selected from C₁₋₃₀ aliphatic, C₁₋₃₀ heteroaliphatic having 1-10 heteroatoms, C₆₋₃₀ aryl, C₆₋₃₀ arylaliphatic, C₆₋₃₀ arylheteroaliphatic having 1-10 heteroatoms, 5-30 membered heteroaryl having 1-10 heteroatoms, and 3-30 membered heterocyclyl having 1-10 heteroatoms, or
[1082] two R groups are optionally and independently taken together to form a covalent bond, or:
[1083] two or more R groups on the same atom are optionally and independently taken together with the atom to form an optionally substituted, 3-30 membered, monocyclic, bicyclic or polycyclic ring having, in addition to the atom, 0-10 heteroatoms; or
[1084] two or more R groups on two or more atoms are optionally and independently taken together with their intervening atoms to form an optionally substituted, 3-30 membered, monocyclic, bicyclic or polycyclic ring having, in addition to the intervening atoms, 0-10 heteroatoms.

[1085] In some embodiments, W is O. In some embodiments, an internucleotidic linkage has the structure of —P(═O)(—N═C(R″)₂)—, —P(═O)(—N(R′)SO₂R″)—, —P(═O)(—N(R′)C(O)R″)—, —P(═O)(—N(R″)₂)—, —P(═O)(—N(R′)P(O)(R″)₂)—, —OP(═O)(—N═C(R″)₂)O—, —OP(═O)(—N(R′)SO₂R″)O—, —OP(═O)(—N(R′)C(O)R″)O—, —OP(═O)(—N(R″)₂)O—, —OP(═O)(—N(R′)P(O)(R″)₂)O—, —P(═O)(—N═C(R″)₂)O—, —P(═O)(—N(R′)SO₂R″)O—, —P(═O)(—N(R′)C(O)R″)O—, —P(═O)(—N(R″)₂)O—, or —P(═O)(—N(R′)P(O)(R″)₂)O—, or a salt form thereof. In some embodiments, an internucleotidic linkage has the structure of —P(═O)(—N═C(R″)₂)— —P(═O)(—N(R″)₂)—, —OP(═O)(—N═C(R″)₂)—O—, —OP(═O)(—N(R″)₂)—O—, —P(═O)(—N═C(R″)₂)—O— or —P(═O)(—N(R″)₂)—O— or a salt form thereof. In some embodiments, an internucleotidic linkage has the structure of —OP(═O)(—N═C(R″)₂)—O— or —OP(═O)(—N(R″)₂)—O—, or a salt form thereof. In some embodiments, an internucleotidic linkage has the structure of —OP(═O)(—N═C(R″)₂)—O—, or a salt form thereof. In some embodiments, an internucleotidic linkage has the structure of —OP(═O)(—N(R″)₂)—O—, or a salt form thereof. In some embodiments, an internucleotidic linkage has the structure of —OP(═O)(—N(R′)SO₂R″)O—, or a salt form thereof. In some embodiments, an internucleotidic linkage has the structure of —OP(═O)(—N(R′)C(O)R″)O—, or a salt form thereof. In some embodiments, an internucleotidic linkage has the structure of —OP(═O)(—N(R′)P(O)(R″)₂)O—, or a salt form thereof. In some embodiments, a internucleotidic linkage is n001.

[1086] In some embodiments, W is S. In some embodiments, an internucleotidic linkage has the structure of —P(═S)(—N═C(R″)₂)—, —P(═S)(—N(R′)SO₂R″)—, —P(═S)(—N(R′)C(O)R″)—, —P(═S)(—N(R″)₂)—, —P(═S)(—N(R′)P(O)(R″)₂)—, —OP(═S)(—N═C(R″)₂)O—, —OP(═S)(—N(R′)SO₂R″)O—, —OP(═S)(—N(R′)C(O)R″)O—, —OP(═S)(—N(R″)₂)O—, —OP(═S)(—N(R′)P(O)(R″)₂)O—, —P(═S)(—N═C(R″)₂)O—, —P(═S)(—N(R′)SO₂R″)O—, —P(═S)(—N(R′)C(O)R″)O—, —P(═S)(—N(R″)₂)O—, or —P(═S)(—N(R′)P(O)(R″)₂)O—, or a salt form thereof. In some embodiments, an internucleotidic linkage has the structure of —P(═S)(—N═C(R″)₂)— —P(═S)(—N(R″)₂)—, —OP(═S)(—N═C(R″)₂)—O—, —OP(═S)(—N(R″)₂)—O—, —P(═S)(—N═C(R″)₂)—O— or —P(═S)(—N(R″)₂)—O— or a salt form thereof. In some embodiments, an internucleotidic linkage has the structure of —OP(═S)(—N═C(R″)₂)—O— or —OP(═S)(—N(R″)₂)—O—, or a salt form thereof. In some embodiments, an internucleotidic linkage has the structure of —OP(═S)(—N═C(R″)₂)—O—, or a salt form thereof. In some embodiments, an internucleotidic linkage has the structure of —OP(═S)(—N(R″)₂)—O—, or a salt form thereof. In some embodiments, an internucleotidic linkage has the structure of —OP(═S)(—N(R′)SO₂R″)O—, or a salt form thereof. In some embodiments, an internucleotidic linkage has the structure of —OP(═S)(—N(R′)C(O)R″)O—, or a salt form thereof. In some embodiments, an internucleotidic linkage has the structure of —OP(═S)(—N(R′)P(O)(R″)₂)O—, or a salt form thereof. In some embodiments, a internucleotidic linkage is *n001.

[1087] In some embodiments, an internucleotidic linkage has the structure of —P(═O)(—N(R′)SO₂R″)—, wherein R″ is as described herein. In some embodiments, an internucleotidic linkage has the structure of —P(═S)(—N(R′)SO₂R″)—, wherein R″ is as described herein. In some embodiments, an internucleotidic linkage has the structure of —P(═O)(—N(R′)SO₂R″)O—, wherein R″ is as described herein. In some embodiments, an internucleotidic linkage has the structure of —P(═S)(—N(R′)SO₂R″)O—, wherein R″ is as described herein. In some embodiments, an internucleotidic linkage has the structure of —OP(═O)(—N(R′)SO₂R″)O—, wherein R″ is as described herein. In some embodiments, an internucleotidic linkage has the structure of —OP(═S)(—N(R′)SO₂R″)O—, wherein R″ is as described herein. In some embodiments, R′, e.g., of —N(R′)—, is hydrogen or optionally substituted C₁₋₆ aliphatic. In some embodiments, R′ is C₁₋₆ alkyl. In some embodiments, R′ is hydrogen. In some embodiments, R″, e.g., in —SO₂R″, is R′ as described herein. In some embodiments, an internucleotidic linkage has the structure of —P(═O)(—NHSO₂R″)—, wherein R″ is as described herein. In some embodiments, an internucleotidic linkage has the structure of —P(═S)(—NHSO₂R″)—, wherein R″ is as described herein. In some embodiments, an internucleotidic linkage has the structure of —P(═O)(—NHSO₂R″)O—, wherein R″ is as described herein. In some embodiments, an internucleotidic linkage has the structure of —P(═S)(—NHSO₂R″)O—, wherein R″ is as described herein. In some embodiments, an internucleotidic linkage has the structure of —OP(═O)(—NHSO₂R″)O—, wherein R″ is as described herein. In some embodiments, an internucleotidic linkage has the structure of —OP(═S)(—NHSO₂R″)O—, wherein R″ is as described herein. In some embodiments, —X—R^{L} is —N(R′)SO₂R^{L}, wherein each of R′ and R^{L} is independently as described herein. In some embodiments, R^{L} is R″. In some embodiments, R^{L} is R′. In some embodiments, —X—R^{L} is —N(R′)SO₂R″, wherein R′ is as described herein. In some embodiments, —X—R^{L} is —N(R′)SO₂R′, wherein R′ is as described herein. In some embodiments, —X—R^{L} is —NHSO₂R′, wherein R′ is as described herein. In some embodiments, R′ is R as described herein. In some embodiments, R′ is optionally substituted C₁₋₆ aliphatic. In some embodiments, R′ is optionally substituted C₁₋₆ alkyl. In some embodiments, R′ is optionally substituted phenyl. In some embodiments, R′ is optionally substituted heteroaryl. In some embodiments, R″, e.g., in —SO₂R″, is R. In some embodiments, R is an optionally substituted group selected from C₁₋₆ aliphatic, aryl, heterocyclyl, and heteroaryl. In some embodiments, R is optionally substituted C₁₋₆ aliphatic. In some embodiments, R is optionally substituted C₁₋₆ alkyl. In some embodiments, R is optionally substituted C₁₋₆ alkenyl. In some embodiments, R is optionally substituted C₁₋₆ alkynyl. In some embodiments, R is optionally substituted methyl. In some embodiments, —X—R^{L} is —NHSO₂CH₃. In some embodiments, R is —CF₃. In some embodiments, R is methyl. In some embodiments, R is optionally substituted ethyl. In some embodiments, R is ethyl. In some embodiments, R is —CH₂CHF₂. In some embodiments, R is —CH₂CH₂OCH₃. In some embodiments, R is optionally substituted propyl. In some embodiments, R is optionally substituted butyl. In some embodiments, R is n-butyl. In some embodiments, R is —(CH₂)₆NH₂. In some embodiments, R is an optionally substituted linear C₂₋₂₀ aliphatic. In some embodiments, R is optionally substituted linear C₂₋₂₀ alkyl. In some embodiments, R is linear C₂₋₂₀ alkyl. In some embodiments, R is optionally substituted C₁, C₂, C₃, C₄, C₅, C₆, C₇, C₈, C₉, C₁₀, C₁₁, C₁₂, C₁₃, C₁₄, C₁₅, C₁₆, C₁₇, C₁₈, C₁₉, or C₂₀ aliphatic. In some embodiments, R is optionally substituted C₁, C₂, C₃, C₄, C₅, C₆, C₇, C₈, C₉, C₁₀, C₁₁, C₁₂, C₁₃, C₁₄, C₁₅, C₁₆, C₁₇, C₁₈, C₁₉, or C₂₀ alkyl. In some embodiments, R is optionally substituted linear C₁, C₂, C₃, C₄, C₅, C₆, C₇, C₈, C₉, C₁₀, C₁₁, C₁₂, C₁₃, C₁₄, C₁₅, C₁₆, C₁₇, C₁₈, C₁₉, or C₂₀ alkyl. In some embodiments, R is linear C₁, C₂, C₃, C₄, C₅, C₆, C₇, C₈, C₉, C₁₀, C₁₁, C₁₂, C₁₃, C₁₄, C₁₅, C₁₆, C₁₇, C₁₈, C₁₉, or C₂₀ alkyl. In some embodiments, R is optionally substituted phenyl. In some embodiments, R is phenyl. In some embodiments, R is p-methylphenyl. In some embodiments, R is 4-dimethylaminophenyl. In some embodiments, R is 3-pyridinyl. In some embodiments, R is

[chemical structure]

In some embodiments, R is

[chemical structure]

In some embodiments, R is benzyl. In some embodiments, R is optionally substituted heteroaryl. In some embodiments, R is optionally substituted 1,3-diazolyl. In some embodiments, R is optionally substituted 2-(1,3)-diazolyl. In some embodiments, R is optionally substituted 1-methyl-2-(1,3)-diazolyl. In some embodiments, R is isopropyl. In some embodiments, R″ is —N(R′)₂. In some embodiments, R″ is —N(CH₃)₂. In some embodiments, R″, e.g., in —SO₂R″, is —OR′, wherein R′ is as described herein. In some embodiments, R′ is R as described herein. In some embodiments, R″ is —OCH₃. In some embodiments, a linkage is —OP(═O)(—NHSO₂R)O—, wherein R is as described herein. In some embodiments, R is optionally substituted linear alkyl as described herein. In some embodiments, R is linear alkyl as described herein. In some embodiments, a linkage is —OP(═O)(—NHSO₂CH₃)O—. In some embodiments, a linkage is —OP(═O)(—NHSO₂CH₂CH₃)O—. In some embodiments, a linkage is —OP(═O)(—NHSO₂CH₂CH₂OCH₃)O—. In some embodiments, a linkage is —OP(═O)(—NHSO₂CH₂Ph)O—. In some embodiments, a linkage is —OP(═O)(—NHSO₂CH₂CHF₂)O—. In some embodiments, a linkage is —OP(═O)(—NHSO₂(4-methylphenyl))O—. In some embodiments, —X—R^{L} is

[chemical structure]

In some embodiments, a linkage is —OP(═O)(—X—R^{L})O—, wherein —X—R^{L} is

[chemical structure]

In some embodiments, a linkage is —OP(═O)(—NHSO₂CH(CH₃)₂)O—. In some embodiments, a linkage is —OP(═O)(—NHSO₂N(CH₃)₂)O—. In some embodiments, a linkage is n002. In some embodiments, a linkage is n006. In some embodiments, a linkage is n020. In some embodiments, such internucleotidic linkages may be utilized in place of linkages like n001.

[1088] In some embodiments, an internucleotidic linkage has the structure of —P(═O)(—N(R′)C(O)R″)—, wherein R″ is as described herein. In some embodiments, an internucleotidic linkage has the structure of —P(═S)(—N(R′)C(O)R″)—, wherein R″ is as described herein. In some embodiments, an internucleotidic linkage has the structure of —P(═O)(—N(R′)C(O)R″)O—, wherein R″ is as described herein. In some embodiments, an internucleotidic linkage has the structure of —P(═S)(—N(R′)C(O)R″)O—, wherein R″ is as described herein. In some embodiments, an internucleotidic linkage has the structure of —OP(═O)(—N(R′)C(O)R″)O—, wherein R″ is as described herein. In some embodiments, an internucleotidic linkage has the structure of —OP(═S)(—N(R′)C(O)R″)O—, wherein R″ is as described herein. In some embodiments, R′, e.g., of —N(R′)—, is hydrogen or optionally substituted C₁₋₆ aliphatic. In some embodiments, R′ is C₁₋₆ alkyl. In some embodiments, R′ is hydrogen. In some embodiments, R″, e.g., in —C(O)R″, is R′ as described herein. In some embodiments, an internucleotidic linkage has the structure of —P(═O)(—NHC(O)R″)—, wherein R″ is as described herein. In some embodiments, an internucleotidic linkage has the structure of —P(═S)(—NHC(O)R″)—, wherein R″ is as described herein. In some embodiments, an internucleotidic linkage has the structure of —P(═O)(—NHC(O)R″)O—, wherein R″ is as described herein. In some embodiments, an internucleotidic linkage has the structure of —P(═S)(—NHC(O)R″)O—, wherein R″ is as described herein. In some embodiments, an internucleotidic linkage has the structure of —OP(═O)(—NHC(O)R″)O—, wherein R″ is as described herein. In some embodiments, an internucleotidic linkage has the structure of —OP(═S)(—NHC(O)R″)O—, wherein R″ is as described herein. In some embodiments, —X—R^{L} is —N(R′)COR^{L}, wherein R^{L} is as described herein. In some embodiments, —X—R^{L} is —N(R′)COR″, wherein R″ is as described herein. In some embodiments, —X—R^{L} is —N(R′)COR′, wherein R′ is as described herein. In some embodiments, —X—R^{L} is —NHCOR′, wherein R′ is as described herein. In some embodiments, R′ is R as described herein. In some embodiments, R′ is optionally substituted C₁₋₆ aliphatic. In some embodiments, R′ is optionally substituted C₁₋₆ alkyl. In some embodiments, R′ is optionally substituted phenyl. In some embodiments, R′ is optionally substituted heteroaryl. In some embodiments, R″, e.g., in —C(O)R″, is R. In some embodiments, R is an optionally substituted group selected from C₁₋₆ aliphatic, aryl, heterocyclyl, and heteroaryl. In some embodiments, R is optionally substituted C₁₋₆ aliphatic. In some embodiments, R is optionally substituted C₁₋₆ alkyl. In some embodiments, R is optionally substituted C₁₋₆ alkenyl. In some embodiments, R is optionally substituted C₁₋₆ alkynyl. In some embodiments, R is methyl. In some embodiments, —X—R^{L} is —NHC(O)CH₃. In some embodiments, R is optionally substituted methyl. In some embodiments, R is —CF₃. In some embodiments, R is optionally substituted ethyl. In some embodiments, R is ethyl. In some embodiments, R is —CH₂CHF₂. In some embodiments, R is —CH₂CH₂OCH₃. In some embodiments, R is optionally substituted C₁₋₂₀ (e.g., C₁₋₆, C₂₋₆, C₃₋₆, C₁₋₁₀, C₂₋₁₀, C₃₋₁₀, C₂₋₂₀, C₃₋₂₀, C₁₀₋₂₀, 1, 2, 3, 4, 5, 6, 7, 8, 9, 10, 11, 12, 13, 14, 15, 16, 17, 18, 19, or 20, etc.) aliphatic. In some embodiments, R is optionally substituted C₁₋₂₀ (e.g., C₁₋₆, C₂₋₆, C₃₋₆, C₁₋₁₀, C₂₋₁₀, C₃₋₁₀, C₂₋₂₀, C₃₋₂₀, C₁₀₋₂₀, 1, 2, 3, 4, 5, 6, 7, 8, 9, 10, 11, 12, 13, 14, 15, 16, 17, 18, 19, or 20, etc.) alkyl. In some embodiments, R is an optionally substituted linear C₂₋₂₀ aliphatic. In some embodiments, R is optionally substituted linear C₂₋₂₀ alkyl. In some embodiments, R is linear C₂₋₂₀ alkyl. In some embodiments, R is optionally substituted C₁, C₂, C₃, C₄, C₅, C₆, C₇, C₈, C₉, C₁₀, C₁₁, C₁₂, C₁₃, C₁₄, C₁₅, C₁₆, C₁₇, C₁₈, C₁₉, or C₂₀ aliphatic. In some embodiments, R is optionally substituted C₁, C₂, C₃, C₄, C₅, C₆, C₇, C₈, C₉, C₁₀, C₁₁, C₁₂, C₁₃, C₁₄, C₁₅, C₁₆, C₁₇, C₁₈, C₁₉, or C₂₀ alkyl. In some embodiments, R is optionally substituted linear C₁, C₂, C₃, C₄, C₅, C₆, C₇, C₈, C₉, C₁₀, C₁₁, C₁₂, C₁₃, C₁₄, C₁₅, C₁₆, C₁₇, C₁₈, C₁₉, or C₂₀ alkyl. In some embodiments, R is linear C₁, C₂, C₃, C₄, C₅, C₆, C₇, C₈, C₉, C₁₀, C₁₁, C₁₂, C₁₃, C₁₄, C₁₅, C₁₆, C₁₇, C₁₈, C₁₉, or C₂₀ alkyl. In some embodiments, R is optionally substituted aryl. In some embodiments, R is optionally substituted phenyl. In some embodiments, R is p-methylphenyl. In some embodiments, R is benzyl. In some embodiments, R is optionally substituted heteroaryl. In some embodiments, R is optionally substituted 1,3-diazolyl. In some embodiments, R is optionally substituted 2-(1,3)-diazolyl. In some embodiments, R is optionally substituted 1-methyl-2-(1,3)-diazolyl. In some embodiments, R^{L} is —(CH₂)₅NH₂. In some embodiments, R^{L} is

[chemical structure]

In some embodiments, R^{L} is

[chemical structure]

In some embodiments, R″ is —N(R′)₂. In some embodiments, R″ is —N(CH₃)₂. In some embodiments, —X—R^{L} is —N(R′)CON(R^{L})₂, wherein each of R′ and R^{L} is independently as described herein. In some embodiments, —X—R^{L} is —NHCON(R^{L})₂, wherein R^{L} is as described herein. In some embodiments, two R′ or two R^{L} are taken together with the nitrogen atom to which they are attached to form a ring as described herein, e.g., optionally substituted

[chemical structure]

In some embodiments, R″, e.g., in —C(O)R″, is —OR′, wherein R′ is as described herein. In some embodiments, R′ is R as described herein. In some embodiments, is optionally substituted C₁₋₆ aliphatic. In some embodiments, is optionally substituted C₁₋₆ alkyl. In some embodiments, R″ is —OCH₃. In some embodiments, —X—R^{L} is —N(R′)C(O)OR^{L}, wherein each of R′ and R^{L} is independently as described herein. In some embodiments, R is

[chemical structure]

In some embodiments, —X—R^{L} is —NHC(O)OCH₃. In some embodiments, —X—R^{L} is —NHC(O)N(CH₃)₂. In some embodiments, a linkage is —OP(O)(NHC(O)CH₃)O—. In some embodiments, a linkage is —OP(O)(NHC(O)OCH₃)O—. In some embodiments, a linkage is —OP(O)(NHC(O)(p-methylphenyl))O—. In some embodiments, a linkage is —OP(O)(NHC(O)N(CH₃)₂)O—. In some embodiments, —X—R^{L} is —N(R′)R^{L}, wherein each of R′ and R^{L} is independently as described herein. In some embodiments, —X—R^{L} is —N(R′)R^{L}, wherein each of R′ and R^{L} is independently not hydrogen. In some embodiments, —X—R^{L} is —NHR^{L}, wherein R^{L} is as described herein. In some embodiments, R^{L} is not hydrogen. In some embodiments, R^{L} is optionally substituted aryl or heteroaryl. In some embodiments, R^{L} is optionally substituted aryl. In some embodiments, R^{L} is optionally substituted phenyl. In some embodiments, —X—R^{L} is —N(R′)₂, wherein each R′ is independently as described herein. In some embodiments, —X—R^{L} is —NHR′, wherein R′ is as described herein. In some embodiments, —X—R^{L} is —NHR, wherein R is as described herein. In some embodiments, —X—R^{L} is R^{L}, wherein R^{L} is as described herein. In some embodiments, R^{L} is —N(R′)₂, wherein each R′ is independently as described herein. In some embodiments, R^{L} is —NHR′, wherein R′ is as described herein. In some embodiments, R^{L} is —NHR, wherein R is as described herein. In some embodiments, R^{L} is —N(R′)₂, wherein each R′ is independently as described herein. In some embodiments, none of R′ in —N(R′)₂ is hydrogen. In some embodiments, R^{L} is —N(R′)₂, wherein each R′ is independently C₁₋₆ aliphatic. In some embodiments, R^{L} is -L-R′, wherein each of L and R′ is independently as described herein. In some embodiments, R^{L} is -L-R, wherein each of L and R is independently as described herein. In some embodiments, R^{L} is —N(R′)-Cy-N(R′)—R′. In some embodiments, R^{L} is —N(R′)-Cy-C(O)—R′. In some embodiments, R^{L} is —N(R′)-Cy-O—R′. In some embodiments, R^{L} is —N(R′)-Cy-SO₂—R′. In some embodiments, R^{L} is —N(R′)-Cy-SO₂—N(R′)₂. In some embodiments, R^{L} is —N(R′)-Cy-C(O)—N(R′)₂. In some embodiments, R^{L} is —N(R′)-Cy-OP(O)(R″)₂. In some embodiments, -Cy- is an optionally substituted bivalent aryl group. In some embodiments, -Cy- is optionally substituted phenylene. In some embodiments, -Cy- is optionally substituted 1,4-phenylene. In some embodiments, -Cy- is 1,4-phenylene. In some embodiments, R^{L} is —N(CH₃)₂. In some embodiments, R^{L} is —N(i-Pr)₂. In some embodiments, R^{L} is

[chemical structure]

In some embodiments, R^{L} is

[chemical structure]

In some embodiments, R^{L} is

[chemical structure]

In some embodiments, R^{L} is

[chemical structure]

In some embodiments, R^{L} is

[chemical structure]

In some embodiments, R^{L} is

[chemical structure]

In some embodiments, R^{L} is

[chemical structure]

In some embodiments, R^{L} is

[chemical structure]

In some embodiments, R^{L} is

[chemical structure]

In some embodiments, R^{L} is

[chemical structure]

In some embodiments, R^{L} is

[chemical structure]

In some embodiments, R^{L} is

[chemical structure]

In some embodiments, R^{L} is

[chemical structure]

In some embodiments, R^{L} is

[chemical structure]

In some embodiments, R^{L} is

[chemical structure]

In some embodiments, R^{L} is

[chemical structure]

In some embodiments, R^{L} is

[chemical structure]

In some embodiments, R^{L} is

[chemical structure]

In some embodiments, R^{L} is

[chemical structure]

[chemical structure]

[chemical structure]

In some embodiments, —X—R^{L} is N(R′)—C(O)-Cy-R^{L}. In some embodiments, —X—R^{L} is R^{L}. In some embodiments, R^{L} is —N(R′)—C(O)-Cy-O—R′. In some embodiments, R^{L} is —N(R′)—C(O)-Cy-R′. In some embodiments, R^{L} is —N(R′)—C(O)-Cy-C(O)—R′. In some embodiments, R^{L} is N(R′)—C(O)-Cy-N(R′)₂. In some embodiments, R^{L} is —N(R′)—C(O)-Cy-SO₂—N(R′)₂. In some embodiments, R^{L} is —N(R′)—C(O)-Cy-C(O)—N(R′)₂. In some embodiments, R^{L} is —N(R′)—C(O)-Cy-C(O)—N(R′)—SO₂—R′. In some embodiments, R′ is R as described herein. In some embodiments, R^{L} is

[chemical structure]

[chemical structure]

[chemical structure]

[chemical structure]

[chemical structure]

[1089] As described herein, in some embodiments, one or more methylene units of L, or a variable which comprises or is L, are independently replaced with —O—, —N(R′)—, —C(O)—, —C(O)N(R′)—, —SO₂—, —SO₂N(R′)—, or -Cy-. In some embodiments, a methylene unit is replaced with -Cy-. In some embodiments, -Cy- is an optionally substituted bivalent aryl group. In some embodiments, -Cy- is optionally substituted phenylene. In some embodiments, -Cy- is optionally substituted 1,4-phenylene. In some embodiments, -Cy- is an optionally substituted bivalent 5-20 (e.g. 5, 6, 7, 8, 9, 10, 11, 12, 13, 14, 15, 16, 17, 18, 19, or 20) membered heteroaryl group having 1-10 (e.g., 1, 2, 3, 4, 5, 6, 7, 8, 9, or 10) heteroatoms. In some embodiments, -Cy- is monocyclic. In some embodiments, -Cy- is bicyclic. In some embodiments, -Cy- is polycyclic. In some embodiments, each monocyclic unit in -Cy- is independently 3-10 (e.g., 3, 4, 5, 6, 7, 8, 9, or 10) membered, and is independently saturated, partially saturated, or aromatic. In some embodiments, -Cy- is an optionally substituted 3-20 (e.g., 3, 4, 5, 6, 7, 8, 9, 10, 11, 12, 13, 14, 15, 16, 17, 18, 19, or 20) membered monocyclic, bicyclic or polycyclic aliphatic group. In some embodiments, -Cy- is an optionally substituted 3-20 (e.g., 3, 4, 5, 6, 7, 8, 9, 10, 11, 12, 13, 14, 15, 16, 17, 18, 19, or 20) membered monocyclic, bicyclic or polycyclic heteroaliphatic group having 1-10 (e.g., 1, 2, 3, 4, 5, 6, 7, 8, 9, or 10) heteroatoms.

[1090] In some embodiments, an internucleotidic linkage has the structure of —P(═O)(—N(R′)P(O)(R″)₂)—, wherein each R″ is independently as described herein. In some embodiments, an internucleotidic linkage has the structure of —P(═S)(—N(R′)P(O)(R″)₂)—, wherein each R″ is independently as described herein. In some embodiments, an internucleotidic linkage has the structure of —P(═O)(—N(R′)P(O)(R″)₂)O—, wherein each R″ is independently as described herein. In some embodiments, an internucleotidic linkage has the structure of —P(═S)(—N(R′)P(O)(R″)₂)O—, wherein each R″ is independently as described herein. In some embodiments, an internucleotidic linkage has the structure of —OP(═O)(—N(R′)P(O)(R″)₂)O—, wherein each R″ is independently as described herein. In some embodiments, an internucleotidic linkage has the structure of —OP(═S)(—N(R′)P(O)(R″)₂)O—, wherein each R″ is independently as described herein. In some embodiments, R′, e.g., of —N(R′)—, is hydrogen or optionally substituted C₁₋₆ aliphatic. In some embodiments, R′ is C₁₋₆ alkyl. In some embodiments, R′ is hydrogen. In some embodiments, R″, e.g., in —P(O)(R″)₂, is R′ as described herein. In some embodiments, an internucleotidic linkage has the structure of —P(═O)(—NHP(O)(R″)₂)—, wherein each R″ is independently as described herein. In some embodiments, an internucleotidic linkage has the structure of —P(═S)(—NHP(O)(R″)₂)—, wherein each R″ is independently as described herein. In some embodiments, an internucleotidic linkage has the structure of —P(═O)(—NHP(O)(R″)₂)O—, wherein each R″ is independently as described herein. In some embodiments, an internucleotidic linkage has the structure of —P(═S)(—NHP(O)(R″)₂)O—, wherein each R″ is independently as described herein. In some embodiments, an internucleotidic linkage has the structure of —OP(═O)(—NHP(O)(R″)₂)O—, wherein each R″ is independently as described herein. In some embodiments, an internucleotidic linkage has the structure of —OP(═S)(—NHP(O)(R″)₂)O—, wherein each R″ is independently as described herein. In some embodiments, an occurrence of R″, e.g., in —P(O)(R″)₂, is R. In some embodiments, R is an optionally substituted group selected from C₁₋₆ aliphatic, aryl, heterocyclyl, and heteroaryl. In some embodiments, R is optionally substituted C₁₋₆ aliphatic. In some embodiments, R is optionally substituted C₁₋₆ alkyl. In some embodiments, R is optionally substituted C₁₋₆ alkenyl. In some embodiments, R is optionally substituted C₁₋₆ alkynyl. In some embodiments, R is methyl. In some embodiments, R is optionally substituted methyl. In some embodiments, R is —CF₃. In some embodiments, R is optionally substituted ethyl. In some embodiments, R is ethyl. In some embodiments, R is —CH₂CHF₂. In some embodiments, R is —CH₂CH₂OCH₃. In some embodiments, R is optionally substituted C₁₋₂₀ (e.g., C₁₋₆, C₂₋₆, C₃₋₆, C₁₋₁₀, C₂₋₁₀, C₃₋₁₀, C₂₋₂₀, C₃₋₂₀, C₁₀₋₂₀, 1, 2, 3, 4, 5, 6, 7, 8, 9, 10, 11, 12, 13, 14, 15, 16, 17, 18, 19, or 20, etc.) aliphatic. In some embodiments, R is optionally substituted C₁₋₂₀ (e.g., C₁₋₆, C₂₋₆, C₃₋₆, C₁₋₁₀, C₂₋₁₀, C₃₋₁₀, C₂₋₂₀, C₃₋₂₀, C₁₀₋₂₀, 1, 2, 3, 4, 5, 6, 7, 8, 9, 10, 11, 12, 13, 14, 15, 16, 17, 18, 19, or 20, etc.) alkyl. In some embodiments, R is an optionally substituted linear C₂₋₂₀ aliphatic. In some embodiments, R is optionally substituted linear C₂₋₂₀ alkyl. In some embodiments, R is linear C₂₋₂₀ alkyl. In some embodiments, R is isopropyl. In some embodiments, R is optionally substituted C₁, C₂, C₃, C₄, C₅, C₆, C₇, C₈, C₉, C₁₀, C₁₁, C₁₂, C₁₃, C₁₄, C₁₅, C₁₆, C₁₇, C₁₈, C₁₉, or C₂₀ aliphatic. In some embodiments, R is optionally substituted C₁, C₂, C₃, C₄, C₅, C₆, C₇, C₈, C₉, C₁₀, C₁₁, C₁₂, C₁₃, C₁₄, C₁₅, C₁₆, C₁₇, C₁₈, C₁₉, or C₂₀ alkyl. In some embodiments, R is optionally substituted linear C₁, C₂, C₃, C₄, C₅, C₆, C₇, C₈, C₉, C₁₀, C₁₁, C₁₂, C₁₃, C₁₄, C₁₅, C₁₆, C₁₇, C₁₈, C₁₉, or C₂₀ alkyl. In some embodiments, R is linear C₁, C₂, C₃, C₄, C₅, C₆, C₇, C₈, C₉, C₁₀, C₁₁, C₁₂, C₁₃, C₁₄, C₁₅, C₁₆, C₁₇, C₁₈, C₁₉, or C₂₀ alkyl. In some embodiments, each R″ is independently R as described herein, for example, in some embodiments, each R″ is methyl. In some embodiments, R″ is optionally substituted aryl. In some embodiments, R is optionally substituted phenyl. In some embodiments, R is p-methylphenyl. In some embodiments, R is benzyl. In some embodiments, R is optionally substituted heteroaryl. In some embodiments, R is optionally substituted 1,3-diazolyl. In some embodiments, R is optionally substituted 2-(1,3)-diazolyl. In some embodiments, R is optionally substituted 1-methyl-2-(1,3)-diazolyl. In some embodiments, an occurrence of R″ is —N(R′)₂. In some embodiments, R″ is —N(CH₃)₂. In some embodiments, an occurrence of R″, e.g., in —P(O)(R″)₂, is —OR′, wherein R′ is as described herein. In some embodiments, R′ is R as described herein. In some embodiments, is optionally substituted C₁₋₆ aliphatic. In some embodiments, is optionally substituted C₁₋₆ alkyl. In some embodiments, R″ is —OCH₃. In some embodiments, each R″ is —OR′ as described herein. In some embodiments, each R″ is —OCH₃. In some embodiments, each R″ is —OH. In some embodiments, a linkage is —OP(O)(NHP(O)(OH)₂)O—. In some embodiments, a linkage is —OP(O)(NHP(O)(OCH₃)₂)O—. In some embodiments, a linkage is —OP(O)(NHP(O)(CH₃)₂)O—.

[1091] In some embodiments, —N(R″)₂ is —N(R′)₂. In some embodiments, —N(R″)₂ is —NHR. In some embodiments, —N(R″)₂ is —NHC(O)R. In some embodiments, —N(R″)₂ is —NHC(O)OR. In some embodiments, —N(R″)₂ is —NHS(O)₂R.

[1092] In some embodiments, an internucleotidic linkage is a phosphoryl guanidine internucleotidic linkage. In some embodiments, an internucleotidic linkage comprises —X—R^{L} as described herein. In some embodiments, —X—R^{L} is —N═C(-L^{L}-R^{L})₂. In some embodiments, —X—R^{L} is —N═C[N(R^{L})₂]₂. In some embodiments, —X—R^{L} is —N═C[NR′R^{L}]₂. In some embodiments, —X—R^{L} is —N═C[N(R′)₂]₂. In some embodiments, —X—R^{L} is —N═C[N(R^{L})₂](CHR^{L1}R^{L2}), wherein each of R^{L1} and R^{L2} is independently as described herein. In some embodiments, —X—R^{L} is —N═C(NR′R^{L})(CHR^{L1}R^{L2}), wherein each of R^{L1} and R^{L2} is independently as described herein. In some embodiments, —X—R^{L} is N═C(NR′R^{L})(CR′R^{L1}R^{L2}), wherein each of R^{L1} and R^{L2} is independently as described herein. In some embodiments, —X—R^{L} is —N═C[N(R′)₂](CHR′R^{L2}). In some embodiments, —X—R^{L} is —N═C[N(R^{L})₂](R^{L}). In some embodiments, —X—R^{L} is —N═C(NR′R^{L})(R^{L}). In some embodiments, —X—R^{L} is —N═C(NR′R^{L})(R′). In some embodiments, —X—R^{L} is —N═C[N(R′)₂](R′). In some embodiments, —X—R^{L} is —N═C(NR′R^{L})(NR′R^{L2}), wherein each R^{L1} and R^{L2} is independently R^{L}, and each R′ and R^{L} is independently as described herein. In some embodiments, —X—R^{L} is —N═C(NR′R^{L1})(NR′R^{L2}), wherein variable is independently as described herein. In some embodiments, —X—R^{L} is —N═C(NR′R^{L1})(CHR′R^{L2}), wherein variable is independently as described herein. In some embodiments, —X—R^{L} is —N═C(NR′R^{L1})(R′), wherein variable is independently as described herein. In some embodiments, each R′ is independently R. In some embodiments, R is optionally substituted C₁₋₆ aliphatic. In some embodiments, R is methyl. In some embodiments, —X—R^{L} is

[chemical structure]

In some embodiments, two groups selected from R′, R^{L}, R^{L1}, R^{L2}, etc. (in some embodiments, on the same atom (e.g., —N(R′)₂, or —NR′R^{L}, or —N(R^{L})², wherein R′ and R^{L} can independently be R as described herein), etc.), or on different atoms (e.g., the two R′ in —N═C(NR′R^{L})(CR′R^{L1}R^{L2}) or —N═C(NR′R^{L1})(NR′R^{L2}); can also be two other variables that can be R, e.g., R^{L}, R^{L1}, R^{L2}, etc.)) are independently R and are taken together with their intervening atoms to form a ring as described herein. In some embodiments, two of R, R′, R^{L}, R^{L1}, or R^{L2} on the same atom, e.g., of —N(R′)₂, —N(R^{L})₂, —NR′R^{L}, —NR′R^{L1}, —NR′R^{L2}, —CR′R^{L1}R^{L2}, etc., are taken together to form a ring as described herein. In some embodiments, two R′, R^{L}, R^{L1}, or R^{L2} on two different atoms, e.g., the two R′ in —N═C(NR′R^{L})(CR′R^{L1}R^{L2}), —N═C(NR′R^{L1})(NR′R^{L2}), etc. are taken together to form a ring as described herein. In some embodiments, a formed ring is an optionally substituted 3-20 (e.g., 3-15, 3-12, 3-10, 3-9, 3-8, 3-7, 3-6, 4-15, 4-12, 4-10, 4-9, 4-8, 4-7, 4-6, 5-15, 5-12, 5-10, 5-9, 5-8, 5-7, 5-6, 1, 2, 3, 4, 5, 6, 7, 8, 9, 10, 11, 12, 13, 14, 15, 16, 17, 18, 19, 20, etc.) monocyclic, bicyclic or tricyclic ring having 0-5 additional heteroatoms. In some embodiments, a formed ring is monocyclic as described herein. In some embodiments, a formed ring is an optionally substituted 5-10 membered monocyclic ring. In some embodiments, a formed ring is bicyclic. In some embodiments, a formed ring is polycyclic. In some embodiments, two groups that are or can be R (e.g., the two R′ in —N═C(NR′R^{L})(CR′R^{L1}R^{L2}) or —N═C(NR′R^{L1})(NR′R^{L2}), the two R′ in —N═C(NR′R^{L})(CR′R^{L1}R^{L2}), —N═C(NR′R^{L1})(NR′R^{L2}), etc.) are taken together to form an optionally substituted bivalent hydrocarbon chain, e.g., an optionally substituted C₁₋₂₀ aliphatic chain, optionally substituted —(CH₂)n- wherein n is 1-20 (e.g., 1, 2, 3, 4, 5, 6, 7, 8, 9, 10, 11, 12, 13, 14, 15, 16, 17, 18, 19, or 20). In some embodiments, a hydrocarbon chain is saturated. In some embodiments, a hydrocarbon chain is partially unsaturated. In some embodiments, a hydrocarbon chain is unsaturated. In some embodiments, two groups that are or can be R (e.g., the two R′ in —N═C(NR′R^{L})(CR′R^{L1}R^{L2}) or —N═C(NR′R^{L1})(NR′R^{L2}), the two R′ in —N═C(NR′R^{L})(CR′R^{L1}R^{L2}), —N═C(NR′R^{L1})(NR′R^{L2}), etc.) are taken together to form an optionally substituted bivalent heteroaliphatic chain, e.g., an optionally substituted C₁₋₂₀ heteroaliphatic chain having 1-10 heteroatoms. In some embodiments, a heteroaliphatic chain is saturated. In some embodiments, a heteroaliphatic chain is partially unsaturated. In some embodiments, a heteroaliphatic chain is unsaturated. In some embodiments, a chain is optionally substituted —(CH₂)—. In some embodiments, a chain is optionally substituted —(CH₂)₂—. In some embodiments, a chain is optionally substituted —(CH₂)—. In some embodiments, a chain is optionally substituted —(CH₂)₂—. In some embodiments, a chain is optionally substituted —(CH₂)₃—. In some embodiments, a chain is optionally substituted —(CH₂)₄—. In some embodiments, a chain is optionally substituted —(CH₂)₅—. In some embodiments, a chain is optionally substituted —(CH₂)₆—. In some embodiments, a chain is optionally substituted —CH═CH—. In some embodiments, a chain is optionally substituted

[chemical structure]

In some embodiments, a chain is optionally substituted

[chemical structure]

In some embodiments, a chain is optionally substituted

[chemical structure]

In some embodiments, a chain is optionally substituted

[chemical structure]

In some embodiments, a chain is optionally substituted

[chemical structure]

In some embodiments, a chain is optionally substituted

[chemical structure]

In some embodiments, a chain is optionally substituted

[chemical structure]

In some embodiments, a chain is optionally substituted

[chemical structure]

In some embodiments, a chain is optionally substituted

[chemical structure]

In some embodiments, two of R, R′, R^{L}, R^{L1}, R^{L2}, etc. on different atoms are taken together to form a ring as described herein. For examples, in some embodiments, —X—R^{L} is

[chemical structure]

In some embodiments, —X—R^{L} is

[chemical structure]

In some embodiments, —X—R^{L} is

[chemical structure]

In some embodiments, —X—R^{L} is

[chemical structure]

In some embodiments, —X—R^{L} is

[chemical structure]

In some embodiments, —X—R^{L} is

[chemical structure]

In some embodiments, —X—R^{L} is

[chemical structure]

In some embodiments, —X—R^{L} is

[chemical structure]

In some embodiments, —X—R^{L} is

[chemical structure]

In some embodiments, —X—R^{L} is

[chemical structure]

In some embodiments, —N(R′)₂, —N(R)₂, —N(R^{L})₂, —NR′R^{L}, —NR′R^{L1}, —NR′R^{L2}, —NR^{L1}R^{L2}, etc. is a formed ring. In some embodiments, a ring is optionally substituted

[chemical structure]

In some embodiments, a ring is optionally substituted

[chemical structure]

In some embodiments, a ring is optionally substituted

[chemical structure]

In some embodiments, a ring is optionally substituted

[chemical structure]

In some embodiments, a ring is optionally substituted

[chemical structure]

In some embodiments, a rig is optionally substituted

[chemical structure]

In some embodiments, a ring is optionally substituted

[chemical structure]

In some embodiments, a ring is optionally substituted

[chemical structure]

In some embodiments, a ring is optionally substituted

[chemical structure]

In some embodiments, a ring is optionally substituted

[chemical structure]

In some embodiments, a ring is optionally substituted

[chemical structure]

In some embodiments, a ring is optionally substituted

[chemical structure]

In some embodiments, a ring is optionally substituted

[chemical structure]

In some embodiments, a ring is optionally substituted

[chemical structure]

In some embodiments, a ring is optionally substituted

[chemical structure]

[1093] In some embodiments, R^{L1} and R^{L2} are the same. In some embodiments, R^{L1} and R^{L2} are different. In some embodiments, each of R^{L1} and R^{L2} is independently R^{L} as described herein, e.g., below.

[1094] In some embodiments, R^{L} is optionally substituted C₁₋₃₀ aliphatic. In some embodiments, R^{L} is optionally substituted C₁₋₃₀ alkyl. In some embodiments, R^{L} is linear. In some embodiments, R^{L} is optionally substituted linear C₁₋₃₀ alkyl. In some embodiments, R^{L} is optionally substituted C₁₋₆ alkyl. In some embodiments, R^{L} is methyl. In some embodiments, R^{L} is ethyl. In some embodiments, R^{L} is n-propyl. In some embodiments, R^{L} is isopropyl. In some embodiments, R^{L} is n-butyl. In some embodiments, R^{L} is tert-butyl. In some embodiments, R^{L} is (E)-CH₂—CH═CH—CH₂—CH₃. In some embodiments, R^{L} is (Z)—CH₂—CH═CH—CH₂—CH₃. In some embodiments, R^{L} is

[chemical structure]

In some embodiments, R^{L} is

[chemical structure]

In some embodiments, R^{L} is CH₃(CH₂)₂C≡CC≡C(CH₂)₃—. In some embodiments, R^{L} is CH₃(CH₂)₅C≡C—. In some embodiments, R^{L} optionally substituted aryl. In some embodiments, R^{L} is optionally substituted phenyl. In some embodiments, R^{L} is phenyl substituted with one or more halogen. In some embodiments, R^{L} is phenyl optionally substituted with halogen, —N(R′), or —N(R′)C(O)R′. In some embodiments, R^{L} is phenyl optionally substituted with —Cl, —Br, —F, —N(Me)₂, or —NHCOCH₃. In some embodiments, R^{L} is -L^{L}-R′, wherein L^{L} is an optionally substituted C₁₋₂₀ saturated, partially unsaturated or unsaturated hydrocarbon chain. In some embodiments, such a hydrocarbon chain is linear. In some embodiments, such a hydrocarbon chain is unsubstituted. In some embodiments, L^{L} is (E)-CH₂—CH═CH—. In some embodiments, L^{L} is —CH₂—C≡C—CH₂—. In some embodiments, L^{L} is —(CH₂)₃—. In some embodiments, L^{L} is —(CH₂)₄—. In some embodiments, L^{L} is —(CH₂)ₙ—, wherein n is 1-30 (e.g., 1-20, 5-30, 6-30, 1, 2, 3, 4, 5, 6, 7, 8, 9, 10, 11, 12, 13, 14, 15, 16, 17, 18, 19, 20, 21, 22, 23, 24, 25, 26, 27, 28, 29 or 30, etc.). In some embodiments, R′ is optionally substituted aryl as described herein. In some embodiments, R′ is optionally substituted phenyl. In some embodiments, R′ is phenyl. In some embodiments, R′ is optionally substituted heteroaryl as described herein. In some embodiments, R′ is 2′-pyridinyl. In some embodiments, R′ is 3′-pyridinyl. In some embodiments, R^{L} is

[chemical structure]

In some embodiments, R^{L} is

[chemical structure]

In some embodiments, R^{L} is

[chemical structure]

In some embodiments, R^{L} is -L^{L}-N(R′)₂, wherein each variable is independently as described herein. In some embodiments, each R′ is independently C₁₋₆ aliphatic as described herein. In some embodiments, —N(R′)₂ is —N(CH₃)₂. In some embodiments, —N(R′)₂ is —NH₂. In some embodiments, R^{L} is —(CH₂)ₙ—N(R′)₂, wherein n is 1-30 (e.g., 1-20, 5-30, 6-30, 1, 2, 3, 4, 5, 6, 7, 8, 9, 10, 11, 12, 13, 14, 15, 16, 17, 18, 19, 20, 21, 22, 23, 24, 25, 26, 27, 28, 29 or 30, etc.). In some embodiments, R^{L} is —(CH₂CH₂O)ₙ—CH₂CH₂—N(R′)₂, wherein n is 1-30 (e.g., 1-20, 5-30, 6-30, 1, 2, 3, 4, 5, 6, 7, 8, 9, 10, 11, 12, 13, 14, 15, 16, 17, 18, 19, 20, 21, 22, 23, 24, 25, 26, 27, 28, 29 or 30, etc.). In some embodiments, R^{L} is

[chemical structure]

In some embodiments, R^{L} is

[chemical structure]

In some embodiments, R^{L} is

[chemical structure]

In some embodiments, R^{L} is —(CH₂)ₙ—NH₂. In some embodiments, R^{L} is —(CH₂CH₂O)ₙ—CH₂CH₂—NH₂. In some embodiments, R^{L} is —(CH₂CH₂O)ₙ—CH₂CH₂—R′, wherein n is 1-30 (e.g., 1-20, 5-30, 6-30, 1, 2, 3, 4, 5, 6, 7, 8, 9, 10, 11, 12, 13, 14, 15, 16, 17, 18, 19, 20, 21, 22, 23, 24, 25, 26, 27, 28, 29 or 30, etc.). In some embodiments, R^{L} is —(CH₂CH₂O)ₙ—CH₂CH₂CH₃, wherein n is 1-30 (e.g., 1-20, 5-30, 6-30, 1, 2, 3, 4, 5, 6, 7, 8, 9, 10, 11, 12, 13, 14, 15, 16, 17, 18, 19, 20, 21, 22, 23, 24, 25, 26, 27, 28, 29 or 30, etc.). In some embodiments, R^{L} is —(CH₂CH₂O)ₙ—CH₂CH₂OH, wherein n is 1-30 (e.g., 1-20, 5-30, 6-30, 1, 2, 3, 4, 5, 6, 7, 8, 9, 10, 11, 12, 13, 14, 15, 16, 17, 18, 19, 20, 21, 22, 23, 24, 25, 26, 27, 28, 29 or 30, etc.). In some embodiments, R^{L} is or comprises a carbohydrate moiety, e.g., GalNAc. In some embodiments, R^{L} is -L^{L}-GalNAc. In some embodiments, R^{L} is

[chemical structure]

In some embodiments, one or more methylene units of L^{L} are independently replaced with -Cy- (e.g., optionally substituted 1,4-phenylene, a 3-30 membered bivalent optionally substituted monocyclic, bicyclic, or polycyclic cycloaliphatic ring, etc.), —O—, —N(R′)— (e.g., —NH), —C(O)—, —C(O)N(R′)— (e.g., —C(O)NH—), —C(NR′)— (e.g., —C(NH)—), —N(R′)C(O)(N(R′)— (e.g., —NHC(O)NH—), —N(R′)C(NR′)(N(R′)— (e.g., —NHC(NH)NH—), —(CH₂CH₂O)ₙ—, etc. For example, in some embodiments, R^{L} is

[chemical structure]

In some embodiments, R^{L} is

[chemical structure]

In some embodiments, R^{L} is

[chemical structure]

In some embodiments, R^{L} is

[chemical structure]

In some embodiments, R^{L} is

[chemical structure]

wherein n is 0-20. In some embodiments, R^{L} is or comprises one or more additional chemical moieties (e.g., carbohydrate moieties, GalNAc moieties, etc.) optionally substituted connected through a linker (which can be bivalent or polyvalent). For example, in some embodiments, R^{L} is

[chemical structure]

wherein n is 0-20. In some embodiments, R^{L} is

[chemical structure]

wherein n is 0-20. In some embodiments, R^{L} is R′ as described herein. As described herein, many variable can independently be R′. In some embodiments, R′ is R as described herein. As described herein, various variables can independently be R. In some embodiments, R is optionally substituted C₁₋₆ aliphatic. In some embodiments, R is optionally substituted C₁₋₆ alkyl. In some embodiments, R is methyl. In some embodiments, R is optionally substituted cycloaliphatic. In some embodiments, R is optionally substituted cycloalkyl. In some embodiments, R is optionally substituted aryl. In some embodiments, R is optionally substituted phenyl. In some embodiments, R is optionally substituted heteroaryl. In some embodiments, R is optionally substituted heterocyclyl. In some embodiments, R is optionally substituted C₁₋₂₀ heterocyclyl having 1-5 heteroatoms, e.g., one of which is nitrogen. In some embodiments, R is optionally substituted

[chemical structure]

In some embodiments, R is optionally substituted

[chemical structure]

In some embodiments, R is optionally substituted

[chemical structure]

In some embodiments, R is optionally substituted

[chemical structure]

In some embodiments, R is optionally substituted

[chemical structure]

In some embodiments, R is optionally substituted

[chemical structure]

In some embodiments, R is optionally substituted

[chemical structure]

In some embodiments, R is optionally substituted

[chemical structure]

In some embodiments, R is optionally substituted

[chemical structure]

In some embodiments, R is optionally substituted

[chemical structure]

In some embodiments, R is optionally substituted

[chemical structure]

In some embodiments, R is optionally substituted

[chemical structure]

In some embodiments, R is optionally substituted

[chemical structure]

In some embodiments, R is optionally substituted

[chemical structure]

In some embodiments, R is optionally substituted

[chemical structure]

[1095] In some embodiments, —X—R^{L} is

[chemical structure]

In some embodiments, —X—R^{L} is

[chemical structure]

In some embodiments, —X—R^{L} is

[chemical structure]

In some embodiments, —X—R^{L} is

[chemical structure]

In some embodiments, —X—R^{L} is

[chemical structure]

In some embodiments, —X—R^{L} is

[chemical structure]

In some embodiments, —X—R^{L} is

[chemical structure]

In some embodiments, —X—R^{L} is

[chemical structure]

In some embodiments, —X—R^{L} is

[chemical structure]

In some embodiments, —X—R^{L} is

[chemical structure]

In some embodiments, —X—R^{L} is

[chemical structure]

In some embodiments, —X—R^{L} is

[chemical structure]

In some embodiments, —X—R^{L} is

[chemical structure]

wherein n is 1-20. In some embodiments, —X—R^{L} is

[chemical structure]

wherein n is 1-20. In some embodiments, —X—R^{L} is selected from:

[chemical structure]

In some embodiments, —X—R^{L} is

[chemical structure]

In some embodiments, —X—R^{L} is

[chemical structure]

In some embodiments, —X—R^{L} is

[chemical structure]

[1096] In some embodiments, R^{L} is R″ as described herein. In some embodiments, R^{L} is R as described herein.

[1097] In some embodiments, R″ or R^{L} is or comprises an additional chemical moiety. In some embodiments, R″ or R^{L} is or comprises an additional chemical moiety, wherein the additional chemical moiety is or comprises a carbohydrate moiety. In some embodiments, R″ or R^{L} is or comprises a GalNAc. In some embodiments, R^{L} or R″ is replaced with, or is utilized to connect to, an additional chemical moiety.

[1098] In some embodiments, X is —O—. In some embodiments, X is —S—. In some embodiments, X is -L^{L}-N(-L^{L}-R^{L})-L^{L}-. In some embodiments, X is —N(-L^{L}-R^{L})-L^{L}-. In some embodiments, X is -L^{L}-N(-L^{L}-R^{L})—. In some embodiments, X is —N(-L^{L}-R^{L})—. In some embodiments, X is -L^{L}-N═C(-L^{L}-R^{L})-L^{L}-. In some embodiments, X is —N═C(-L^{L}-R^{L})-L^{L}-. In some embodiments, X is -L^{L}-N═C(-L^{L}-R^{L})—. In some embodiments, X is —N═C(-L^{L}-R^{L})—. In some embodiments, X is L^{L}. In some embodiments, X is a covalent bond.

[1099] In some embodiments, Y is a covalent bond. In some embodiments, Y is —O—. In some embodiments, Y is —N(R′)—. In some embodiments, Z is a covalent bond. In some embodiments, Z is —O—. In some embodiments, Z is —N(R′)—. In some embodiments, R′ is R. In some embodiments, R is —H. In some embodiments, R is optionally substituted C₁₋₆ aliphatic. In some embodiments, R is methyl. In some embodiments, R is ethyl. In some embodiments, R is propyl. In some embodiments, R is optionally substituted phenyl. In some embodiments, R is phenyl.

[1100] As described herein, various variables in structures in the present disclosure can be or comprise R. Suitable embodiments for R are described extensively in the present disclosure. As appreciated by those skilled in the art, R embodiments described for a variable that can be R may also be applicable to another variable that can be R. Similarly, embodiments described for a component/moiety (e.g., L) for a variable may also be applicable to other variables that can be or comprise the component/moiety.

[1101] In some embodiments, R″ is R′. In some embodiments, R″ is —N(R′)₂.

[1102] In some embodiments, —X—R^{L} is —SH. In some embodiments, —X—R^{L} is —OH.

[1103] In some embodiments, —X—R^{L} is —N(R′)₂. In some embodiments, each R′ is independently optionally substituted C₁₋₆ aliphatic. In some embodiments, each R′ is independently methyl.

[1104] In some embodiments, a non-negatively charged internucleotidic linkage has the structure of —OP(═O)(—N═C((N(R′)₂)₂—O—. In some embodiments, a R′ group of one N(R′)₂ is R, a R′ group of the other N(R′)₂ is R, and the two R groups are taken together with their intervening atoms to form an optionally substituted ring, e.g., a 5-membered ring as in n001. In some embodiments, each R′ is independently R, wherein each R is independently optionally substituted C₁₋₆ aliphatic.

[1105] In some embodiments, —X—R^{L} is —N═C(-L^{L}-R′)₂. In some embodiments, —X—R^{L} is —N═C(-L^{L1}-L^{L2}-L^{L3}-R′)₂, wherein each L^{L1}, L^{L2} and L^{L3} is independently L″, wherein each L″ is independently a covalent bond, or a bivalent, optionally substituted, linear or branched group selected from a C₁₋₁₀ aliphatic group and a C₁₋₁₀ heteroaliphatic group having 1-5 heteroatoms, wherein one or more methylene units are optionally and independently replaced by an optionally substituted group selected from C₁₋₆ alkylene, C₁₋₆ alkenylene, —C≡C—, a bivalent C₁-C₆ heteroaliphatic group having 1-5 heteroatoms, —C(R′)₂—, -Cy-, —O—, —S—, —S—S—, —N(R′)—, —C(O)—, —C(S)—, —C(NR′)—, —C(O)N(R′)—, —N(R′)C(O)N(R′)—, —N(R′)C(O)O—, —S(O)—, —S(O)₂—, —S(O)₂N(R′)—, —C(O)S—, —C(O)O—, —P(O)(OR′)—, —P(O)(SR′)—, —P(O)(R′)—, —P(O)(NR′)—, —P(S)(OR′)—, —P(S)(SR′)—, —P(S)(R′)—, —P(S)(NR′)—, —P(R′)—, —P(OR′)—, —P(SR′)—, —P(NR′)—, —P(OR′)[B(R′)₃]—, —OP(O)(OR′)O—, —OP(O)(SR′)O—, —OP(O)(R′)O—, —OP(O)(NR′)O—, —OP(OR′)O—, —OP(SR′)O—, —OP(NR′)O—, —OP(R′)O—, or —OP(OR′)[B(R′)₃]O—, and one or more nitrogen or carbon atoms are optionally and independently replaced with Cy^{L}. In some embodiments, L^{L2} is -Cy-. In some embodiments, L^{L1} is a covalent bond. In some embodiments, L^{L3} is a covalent bond. In some embodiments, —X—R^{L} is N═C(-L^{L1}-Cy-L^{L3}-R′)₂. In some embodiments, —X—R^{L} is

[chemical structure]

In some embodiments, —X—R^{L} is

[chemical structure]

In some embodiments, —X—R^{L} is

[chemical structure]

In some embodiments, —X—R^{L} is

[chemical structure]

In some embodiments, —X—R^{L} is

[chemical structure]

In some embodiments, —X—R^{L} is

[chemical structure]

[1106] In some embodiments, as utilized in the present disclosure, L is covalent bond. In some embodiments, L is a bivalent, optionally substituted, linear or branched group selected from a C₁₋₃₀ aliphatic group and a C₁₋₃₀ heteroaliphatic group having 1-10 heteroatoms, wherein one or more methylene units are optionally and independently replaced by an optionally substituted group selected from C₁₋₆ alkylene, C₁₋₆ alkenylene, —C≡C—, a bivalent C₁-C₆ heteroaliphatic group having 1-5 heteroatoms, —C(R′)₂—, -Cy-, —O—, —S—, —S—S—, —N(R′)—, —C(O)—, —C(S)—, —C(NR′)—, —C(O)N(R′)—, —N(R′)C(O)N(R′)—, —N(R′)C(O)O—, —S(O)—, —S(O)₂—, —S(O)₂N(R′)—, —C(O)S—, —C(O)O—, —P(O)(OR′)—, —P(O)(SR′)—, —P(O)(R′)—, —P(O)(NR′)—, —P(S)(OR′)—, —P(S)(SR′)—, —P(S)(R′)—, —P(S)(NR′)—, —P(R′)—, —P(OR′)—, —P(SR′)—, —P(NR′)—, —P(OR′)[B(R′)₃]—, —OP(O)(OR′)O—, —OP(O)(SR′)O—, —OP(O)(R′)O—, —OP(O)(NR′)O—, —OP(OR′)O—, —OP(SR′)O—, —OP(NR′)O—, —OP(R′)O—, or —OP(OR′)[B(R′)₃]O—, and one or more nitrogen or carbon atoms are optionally and independently replaced with Cy^{L}. In some embodiments, L is a bivalent, optionally substituted, linear or branched group selected from a C₁₋₃₀ aliphatic group and a C₁₋₃₀ heteroaliphatic group having 1-10 heteroatoms, wherein one or more methylene units are optionally and independently replaced by an optionally substituted group selected from —C≡C—, —C(R′)₂—, -Cy-, —O—, —S—, —S—S—, —N(R′)—, —C(O)—, —C(S)—, —C(NR′)—, —C(O)N(R′)—, —N(R′)C(O)N(R′)—, —N(R′)C(O)O—, —S(O)—, —S(O)₂—, —S(O)₂N(R′)—, —C(O)S—, —C(O)O—, —P(O)(OR′)—, —P(O)(SR′)—, —P(O)(R′)—, —P(O)(NR′)—, —P(S)(OR′)—, —P(S)(SR′)—, —P(S)(R′)—, —P(S)(NR′)—, —P(R′)—, —P(OR′)—, —P(SR′)—, —P(NR′)—, —P(OR′)[B(R′)₃]—, —OP(O)(OR′)O—, —OP(O)(SR′)O—, —OP(O)(R′)O—, —OP(O)(NR′)O—, —OP(OR′)O—, —OP(SR′)O—, —OP(NR′)O—, —OP(R′)O—, or —OP(OR′)[B(R′)₃]O—, and one or more nitrogen or carbon atoms are optionally and independently replaced with Cy^{L}. In some embodiments, L is a bivalent, optionally substituted, linear or branched group selected from a C₁₋₁₀ aliphatic group and a C₁₋₁₀ heteroaliphatic group having 1-10 heteroatoms, wherein one or more methylene units are optionally and independently replaced by an optionally substituted group selected from —C═C—, —C(R′)₂—, -Cy-, —O—, —S—, —S—S—, —N(R′)—, —C(O)—, —C(S)—, —C(NR′)—, —C(O)N(R′)—, —N(R′)C(O)N(R′)—, —N(R′)C(O)O—, —S(O)—, —S(O)₂—, —S(O)₂N(R′)—, —C(O)S—, —C(O)O—, —P(O)(OR′)—, —P(O)(SR′)—, —P(O)(R′)—, —P(O)(NR′)—, —P(S)(OR′)—, —P(S)(SR′)—, —P(S)(R′)—, —P(S)(NR′)—, —P(R′)—, —P(OR′)—, —P(SR′)—, —P(NR′)—, —P(OR′)[B(R′)₃]—, —OP(O)(OR′)O—, —OP(O)(SR′)O—, —OP(O)(R′)O—, —OP(O)(NR′)O—, —OP(OR′)O—, —OP(SR′)O—, —OP(NR′)O—, —OP(R′)O—, or —OP(OR′)[B(R′)₃]O—, and one or more nitrogen or carbon atoms are optionally and independently replaced with Cy^{L}. In some embodiments, one or more methylene units are optionally and independently replaced by an optionally substituted group selected from —C≡C—, —C(R′)₂—, -Cy-, —O—, —S—, —S—S—, —N(R′)—, —C(O)—, —C(S)—, —C(NR′)—, —C(O)N(R′)—, —N(R′)C(O)N(R′)—, —N(R′)C(O)O—, —S(O)—, —S(O)₂—, —S(O)₂N(R′)—, —C(O)S—, or —C(O)O—.

[1107] In some embodiments, an internucleotidic linkage is a phosphoryl guanidine internucleotidic linkage. In some embodiments, —X—R^{L} is —N═C[N(R′)₂]₂. In some embodiments, each R′ is independently R. In some embodiments, R is optionally substituted C₁₋₆ aliphatic. In some embodiments, R is methyl. In some embodiments, —X—R^{L} is

[chemical structure]

In some embodiments, one R′ on a nitrogen atom is taken with a R′ on the other nitrogen to form a ring as described herein.

[1108] In some embodiments, —X—R^{L} is

[chemical structure]

wherein R¹ and R² are independently R′. In some embodiments, —X—R^{L} is

[chemical structure]

In some embodiments, —X—R^{L} is

[chemical structure]

In some embodiments, two R′ on the same nitrogen are taken together to form a ring as described herein. In some embodiments, —X—R^{L} is

[chemical structure]

In some embodiments, —X—R^{L} is

[chemical structure]

In some embodiments, —X—R^{L} is

[chemical structure]

In some embodiments, —X—R^{L} is

[chemical structure]

In some embodiments, —X—R^{L} is

[chemical structure]

In some embodiments, —X—R^{L} is

[chemical structure]

In some embodiments, —X—R^{L} is

[chemical structure]

In some embodiments, —X—R^{L} is

[chemical structure]

In some embodiments, —X—R^{L} is

[chemical structure]

[1109] In some embodiments, —X—R^{L} is R as described herein. In some embodiments, R is not hydrogen. In some embodiments, R is optionally substituted C₁₋₆ aliphatic. In some embodiments, R is optionally substituted C₁₋₆ alkyl. In some embodiments, R is methyl.

[1110] In some embodiments, —X—R^{L} is selected from Tables below. In some embodiments, X is as described herein. In some embodiments, R^{L} is as described herein. In some embodiments, a linkage has the structure of —Y—P^{L}(—X—R^{L})—Z—, wherein —X—R^{L} is selected from Tables below, and each other variable is independently as described herein. In some embodiments, a linkage has the structure of or comprises —P(O)(—X—R^{L})—, wherein —X—R^{L} is selected from Tables below. In some embodiments, a linkage has the structure of or comprises —P(S)(—X—R^{L})—, wherein —X—R^{L} is selected from Tables below. In some embodiments, a linkage has the structure of or comprises —P(—X—R^{L})—, wherein —X—R^{L} is selected from Tables below. In some embodiments, a linkage has the structure of or comprises —P(O)(—X—R^{L})—O—, wherein —X—R^{L} is selected from Tables below. In some embodiments, a linkage has the structure of or comprises —P(S)(—X—R^{L})—O—, wherein —X—R^{L} is selected from Tables below. In some embodiments, a linkage has the structure of or comprises —P(—X—R^{L})—O—, wherein —X—R^{L} is selected from Tables below. In some embodiments, a linkage has the structure of —P(O)(—X—R^{L})—O—, wherein —X—R^{L} is selected from Tables below. In some embodiments, a linkage has the structure of —P(S)(—X—R^{L})—O—, wherein —X—R^{L} is selected from Tables below. In some embodiments, a linkage has the structure of —P(—X—R^{L})—O—, wherein —X—R^{L} is selected from Tables below. In some embodiments, P is bonded to a nitrogen atom (e.g., a nitrogen atom in sm01, sm18, etc.). In some embodiments, a linkage has the structure of or comprises —O—P(O)(—X—R^{L})—O—, wherein —X—R^{L} is selected from Tables below. In some embodiments, a linkage has the structure of or comprises —O—P(S)(—X—R^{L})—O—, wherein —X—R^{L} is selected from Tables below. In some embodiments, a linkage has the structure of or comprises —O—P(—X—R^{L})—O—, wherein —X—R^{L} is selected from Tables below. In some embodiments, a linkage has the structure of —O—P(O)(—X—R^{L})—O—, wherein —X—R^{L} is selected from Tables below. In some embodiments, a linkage has the structure of —O—P(S)(—X—R^{L})—O—, wherein —X—R^{L} is selected from Tables below. In some embodiments, a linkage has the structure of —O—P(—X—R^{L})—O—, wherein —X—R^{L} is selected from Tables below. In some embodiments, the Tables below, n is 0-20 or as described herein. As those skilled in the art appreciate, a linkage may exist in a salt form.

TABLE L-1
Certain useful moieties bonded to linkage phosphorus (e.g., —X—R^{L}).

[chemical structure]

[chemical structure]

[chemical structure]

[chemical structure]

[chemical structure]

[chemical structure]

[chemical structure]

[chemical structure]

[chemical structure]

[chemical structure]

[chemical structure]

[chemical structure]

[chemical structure]

[chemical structure]

[chemical structure]

[chemical structure]

[chemical structure]

[chemical structure]

[chemical structure]

[chemical structure]

[chemical structure]

[chemical structure]

[chemical structure]

[chemical structure]

[chemical structure]

[chemical structure]

[chemical structure]

[chemical structure]

[chemical structure]

[chemical structure]

[chemical structure]

[chemical structure]

[chemical structure]

[chemical structure]

[chemical structure]

[chemical structure]

[chemical structure]

[chemical structure]

[chemical structure]

[chemical structure]

[chemical structure]

[chemical structure]

[chemical structure]

[chemical structure]

[chemical structure]

[chemical structure]

[chemical structure]

[chemical structure]

[chemical structure]

[chemical structure]

[chemical structure]

[chemical structure]

[chemical structure]

[chemical structure]

[chemical structure]

[chemical structure]

[chemical structure]

[chemical structure]

[chemical structure]

wherein each R^{LS} is independently R^{s}. In some embodiments, each R^{LS} is independently —Cl, —Br, —F, —N(Me)₂, or —NHCOCH₃.

TABLE L-2
Certain useful moieties bonded to linkage phosphorus (e.g., —X—R^{L}).

[chemical structure]

[chemical structure]

[chemical structure]

[chemical structure]

[chemical structure]

[chemical structure]

[chemical structure]

[chemical structure]

[chemical structure]

[chemical structure]

[chemical structure]

[chemical structure]

[chemical structure]

[chemical structure]

[chemical structure]

[chemical structure]

TABLE L-3
Certain useful moieties bonded to linkage phosphorus (e.g., —X—R^{L}).

[chemical structure]

[chemical structure]

[chemical structure]

TABLE L-4
Certain useful moieties bonded to linkage phosphorus (e.g., —X—R^{L}).

[chemical structure]

[chemical structure]

[chemical structure]

[chemical structure]

[chemical structure]

[chemical structure]

[chemical structure]

[chemical structure]

[chemical structure]

[chemical structure]

[chemical structure]

[chemical structure]

[chemical structure]

[chemical structure]

[chemical structure]

[chemical structure]

[chemical structure]

[chemical structure]

[chemical structure]

[chemical structure]

[chemical structure]

[chemical structure]

[chemical structure]

[chemical structure]

[chemical structure]

[chemical structure]

[chemical structure]

[chemical structure]

[chemical structure]

[chemical structure]

[chemical structure]

[chemical structure]

[chemical structure]

[chemical structure]

[chemical structure]

[chemical structure]

[chemical structure]

[chemical structure]

[chemical structure]

[chemical structure]

[chemical structure]

TABLE L-5
Certain useful moieties bonded to linkage phosphorus (e.g., —X—R^{L}).

[chemical structure]

[chemical structure]

[chemical structure]

[chemical structure]

[chemical structure]

[chemical structure]

[chemical structure]

[chemical structure]

[chemical structure]

[chemical structure]

[chemical structure]

[chemical structure]

[chemical structure]

[chemical structure]

[chemical structure]

[chemical structure]

[chemical structure]

[chemical structure]

[chemical structure]

[chemical structure]

[chemical structure]

[chemical structure]

[chemical structure]

[chemical structure]

[chemical structure]

[chemical structure]

[chemical structure]

[chemical structure]

[chemical structure]

[chemical structure]

[chemical structure]

[chemical structure]

[chemical structure]

[chemical structure]

[chemical structure]

[chemical structure]

[chemical structure]

[chemical structure]

[chemical structure]

[chemical structure]

[chemical structure]

[chemical structure]

[chemical structure]

[chemical structure]

[chemical structure]

[chemical structure]

[chemical structure]

[chemical structure]

[chemical structure]

[chemical structure]

[chemical structure]

[chemical structure]

[chemical structure]

[chemical structure]

[chemical structure]

[chemical structure]

TABLE L-6
Certain useful moieties bonded to linkage phosphorus (e.g., —X—R^{L}).

[chemical structure]

[chemical structure]

[chemical structure]

[chemical structure]

[chemical structure]

[chemical structure]

[chemical structure]

[chemical structure]

[chemical structure]

[chemical structure]

[chemical structure]

[chemical structure]

[chemical structure]

[chemical structure]

[chemical structure]

[1111] In some embodiments, an internucleotidic linkage, e.g., an non-negatively charged internucleotidic linkage or a neutral internucleotidic linkage, has the structure of -L^{L1}-Cy^{IL}-L^{L2}-. In some embodiments, L^{L1} is bonded to a 3′-carbon of a sugar. In some embodiments, L^{L2} is bonded to a 5′-carbon of a sugar. In some embodiments, L^{L1} is —O—CH₂—. In some embodiments, L^{L2} is a covalent bond. In some embodiments, L^{L2} is a —N(R′)—. In some embodiments, L^{L2} is a —NH—. In some embodiments, L^{L2} is bonded to a 5′-carbon of a sugar, which 5′-carbon is substituted with ═O. In some embodiments, Cy^{IL} is optionally substituted 3-10 membered saturated, partially unsaturated, or aromatic ring having 0-5 heteroatoms. In some embodiments, Cy^{IL} is an optionally substituted triazole ring. In some embodiments, Cy^{IL} is

[chemical structure]

In some embodiments, a linkage is

[chemical structure]

[1112] In some embodiments, a non-negatively charged internucleotidic linkage has the structure of —OP(═W)(—N(R′)₂)—O—.

[1113] In some embodiments, R′ is R. In some embodiments, R′ is H. In some embodiments, R′ is —C(O)R. In some embodiments, R′ is —C(O)OR. In some embodiments, R′ is —S(O)₂R.

[1114] In some embodiments, R″ is —NHR′. In some embodiments, —N(R′)₂ is —NHR′.

[1115] As described herein, some embodiments, R is H. In some embodiments, R is optionally substituted C₁₋₆ aliphatic. In some embodiments, R is optionally substituted C₁₋₆ alkyl. In some embodiments, R is methyl. In some embodiments, R is substituted methyl. In some embodiments, R is ethyl. In some embodiments, R is substituted ethyl.

[1116] In some embodiments, as described herein, a non-negatively charged internucleotidic linkage is a neutral internucleotidic linkage.

[1117] In some embodiments, a modified internucleotidic linkage (e.g., a non-negatively charged internucleotidic linkage) comprises optionally substituted triazolyl. In some embodiments, R′ is or comprises optionally substituted triazolyl. In some embodiments, a modified internucleotidic linkage (e.g., a non-negatively charged internucleotidic linkage) comprises optionally substituted alkynyl. In some embodiments, R′ is optionally substituted alkynyl. In some embodiments, R′ comprises an optionally substituted triple bond. In some embodiments, a modified internucleotidic linkage comprises a triazole or alkyne moiety. In some embodiments, R′ is or comprises an optionally substituted triazole or alkyne moiety. In some embodiments, a triazole moiety, e.g., a triazolyl group, is optionally substituted. In some embodiments, a triazole moiety, e.g., a triazolyl group) is substituted. In some embodiments, a triazole moiety is unsubstituted. In some embodiments, a modified internucleotidic linkage comprises an optionally substituted guanidine moiety. In some embodiments, a modified internucleotidic linkage comprises an optionally substituted cyclic guanidine moiety. In some embodiments, R′, R^{L}, or —X—R^{L}, is or comprises an optionally substituted guanidine moiety. In some embodiments, R′, R^{L}, or —X—R^{L}, is or comprises an optionally substituted cyclic guanidine moiety. In some embodiments, R′, R^{L}, or —X—R^{L} comprises an optionally substituted cyclic guanidine moiety and an internucleotidic linkage has the structure of:

[chemical structure]

wherein W is O or S. In some embodiments, W is O. In some embodiments, W is S. In some embodiments, a non-negatively charged internucleotidic linkage is stereochemically controlled.

[1118] In some embodiments, a non-negatively charged internucleotidic linkage or a neutral internucleotidic linkage is an internucleotidic linkage comprising a triazole moiety. In some embodiments, a non-negatively charged internucleotidic linkage or a non-negatively charged internucleotidic linkage comprises an optionally substituted triazolyl group. In some embodiments, an internucleotidic linkage comprising a triazole moiety (e.g., an optionally substituted triazolyl group) has the structure of

[chemical structure]

In some embodiments, an internucleotidic linkage comprising a triazole moiety has the structure of

[chemical structure]

In some embodiments, an internucleotidic linkage, e.g., a non-negatively charged internucleotidic linkage, a neutral internucleotidic linkage, comprises a cyclic guanidine moiety. In some embodiments, an internucleotidic linkage comprising a cyclic guanidine moiety has the structure of

[chemical structure]

In some embodiments, a non-negatively charged internucleotidic linkage, or a neutral internucleotidic linkage, is or comprising a structure selected from

[chemical structure]

wherein W is O or S.

[1119] In some embodiments, an internucleotidic linkage comprises a Tmg group

[chemical structure]

In some embodiments, an internucleotidic linkage comprises a Tmg group and has the structure of

[chemical structure]

(the “Tmg internucleotidic linkage”). In some embodiments, neutral internucleotidic linkages include internucleotidic linkages of PNA and PMO, and an Tmg internucleotidic linkage.

[1120] In some embodiments, a non-negatively charged internucleotidic linkage comprises an optionally substituted 3-20 membered heterocyclyl or heteroaryl group having 1-10 heteroatoms. In some embodiments, a non-negatively charged internucleotidic linkage comprises an optionally substituted 3-20 membered heterocyclyl or heteroaryl group having 1-10 heteroatoms, wherein at least one heteroatom is nitrogen. In some embodiments, such a heterocyclyl or heteroaryl group is of a 5-membered ring. In some embodiments, such a heterocyclyl or heteroaryl group is of a 6-membered ring.

[1121] In some embodiments, a non-negatively charged internucleotidic linkage comprises an optionally substituted 5-20 membered heteroaryl group having 1-10 heteroatoms. In some embodiments, a non-negatively charged internucleotidic linkage comprises an optionally substituted 5-20 membered heteroaryl group having 1-10 heteroatoms, wherein at least one heteroatom is nitrogen. In some embodiments, a non-negatively charged internucleotidic linkage comprises an optionally substituted 5-6 membered heteroaryl group having 1-4 heteroatoms, wherein at least one heteroatom is nitrogen. In some embodiments, a non-negatively charged internucleotidic linkage comprises an optionally substituted 5-membered heteroaryl group having 1-4 heteroatoms, wherein at least one heteroatom is nitrogen. In some embodiments, a heteroaryl group is directly bonded to a linkage phosphorus. In some embodiments, a non-negatively charged internucleotidic linkage comprises an optionally substituted 5-20 membered heterocyclyl group having 1-10 heteroatoms. In some embodiments, a non-negatively charged internucleotidic linkage comprises an optionally substituted 5-20 membered heterocyclyl group having 1-10 heteroatoms, wherein at least one heteroatom is nitrogen. In some embodiments, a non-negatively charged internucleotidic linkage comprises an optionally substituted 5-6 membered heterocyclyl group having 1-4 heteroatoms, wherein at least one heteroatom is nitrogen. In some embodiments, a non-negatively charged internucleotidic linkage comprises an optionally substituted 5-membered heterocyclyl group having 1-4 heteroatoms, wherein at least one heteroatom is nitrogen. In some embodiments, at least two heteroatoms are nitrogen. In some embodiments, a heterocyclyl group is directly bonded to a linkage phosphorus. In some embodiments, a heterocyclyl group is bonded to a linkage phosphorus through a linker, e.g., ═N— when the heterocyclyl group is part of a guanidine moiety who directed bonded to a linkage phosphorus through its ═N—. In some embodiments, a non-negatively charged internucleotidic linkage comprises an optionally substituted

[chemical structure]

group. In some embodiments, a non-negatively charged internucleotidic linkage comprises an substituted

[chemical structure]

group. In some embodiments, a non-negatively charged internucleotidic linkage comprises a

[chemical structure]

group. In some embodiments, each R¹ is independently optionally substituted C₁₋₆ alkyl. In some embodiments, each R¹ is independently methyl.

[1122] In some embodiments, a non-negatively charged internucleotidic linkage, e.g., a neutral internucleotidic linkage is not chirally controlled. In some embodiments, a non-negatively charged internucleotidic linkage is chirally controlled. In some embodiments, a non-negatively charged internucleotidic linkage is chirally controlled and its linkage phosphorus is Rp. In some embodiments, a non-negatively charged internucleotidic linkage is chirally controlled and its linkage phosphorus is Sp.

[1123] In some embodiments, an internucleotidic linkage comprises no linkage phosphorus. In some embodiments, an internucleotidic linkage has the structure of —C(O)—(O)— or —C(O)—N(R′)—, wherein R′ is as described herein. In some embodiments, an internucleotidic linkage has the structure of —C(O)—(O)—. In some embodiments, an internucleotidic linkage has the structure of —C(O)—N(R′)—, wherein R′ is as described herein. In various embodiments, —C(O)— is bonded to nitrogen. In some embodiments, an internucleotidic linkage is or comprises —C(O)—O— which is part of a carbamate moiety. In some embodiments, an internucleotidic linkage is or comprises —C(O)—O— which is part of a urea moiety.

[1124] In some embodiments, an oligonucleotide comprises 1-20, 1-15, 1-10, 1-5, or 1, 2, 3, 4, 5, 6, 7, 8, 9, 10, or more non-negatively charged internucleotidic linkages. In some embodiments, an oligonucleotide comprises 1-20, 1-15, 1-10, 1-5, or 1, 2, 3, 4, 5, 6, 7, 8, 9, 10, or more neutral internucleotidic linkages. In some embodiments, each of non-negatively charged internucleotidic linkage and/or neutral internucleotidic linkages is optionally and independently chirally controlled. In some embodiments, each non-negatively charged internucleotidic linkage in an oligonucleotide is independently a chirally controlled internucleotidic linkage. In some embodiments, each neutral internucleotidic linkage in an oligonucleotide is independently a chirally controlled internucleotidic linkage. In some embodiments, at least one non-negatively charged internucleotidic linkage/neutral internucleotidic linkage has the structure of

[chemical structure]

In some embodiments, an oligonucleotide comprises at least one non-negatively charged internucleotidic linkage wherein its linkage phosphorus is in Rp configuration, and at least one non-negatively charged internucleotidic linkage wherein its linkage phosphorus is in Sp configuration.

[1125] In many embodiments, as demonstrated extensively, oligonucleotides of the present disclosure comprise two or more different internucleotidic linkages. In some embodiments, an oligonucleotide comprises a phosphorothioate internucleotidic linkage and a non-negatively charged internucleotidic linkage. In some embodiments, an oligonucleotide comprises a phosphorothioate internucleotidic linkage, a non-negatively charged internucleotidic linkage, and a natural phosphate linkage. In some embodiments, a non-negatively charged internucleotidic linkage is a neutral internucleotidic linkage. In some embodiments, a non-negatively charged internucleotidic linkage is n001,

[chemical structure]

[chemical structure]

In some embodiments, anon-negatively charged internucleotidic linkage is

[chemical structure]

In some embodiments, a non-negatively charged internucleotidic linkage is n001. In some embodiments, each phosphorothioate internucleotidic linkage is independently chirally controlled. In some embodiments, each chiral modified internucleotidic linkage is independently chirally controlled. In some embodiments, one or more non-negatively charged internucleotidic linkage are not chirally controlled.

[1126] A typical connection, as in natural DNA and RNA, is that an internucleotidic linkage forms bonds with two sugars (which can be either unmodified or modified as described herein). In many embodiments, as exemplified herein an internucleotidic linkage forms bonds through its oxygen atoms or heteroatoms with one optionally modified ribose or deoxyribose at its 5′ carbon, and the other optionally modified ribose or deoxyribose at its 3′ carbon. In some embodiments, internucleotidic linkages connect sugars that are not ribose sugars, e.g., sugars comprising N ring atoms and acyclic sugars as described herein.

[1127] In some embodiments, each nucleoside units connected by an internucleotidic linkage independently comprises a nucleobase which is independently an optionally substituted A, T, C, G, or U, or an optionally substituted tautomer of A, T, C, G or U.

[1128] In some embodiments, an oligonucleotide comprises a modified internucleotidic linkage (e.g., a modified internucleotidic linkage having the structure of Formula I, I-a, I-b, or I-c, I-n-1, I-n-2, I-n-3, I-n-4, II, II-a-1, II-a-2, II-b-1, II-b-2, II-c-1, II-c-2, II-d-1, II-d-2, etc., or a salt form thereof) as described in U.S. Pat. Nos. 9,394,333, 9,744,183, 9,605,019, 9,598,458, 9,982,257, 10,160,969, 10,479,995, US 2020/0056173, US 2018/0216107, US 2019/0127733, U.S. Pat. No. 10,450,568, US 2019/0077817, US 2019/0249173, US 2019/0375774, WO 2018/223056, WO 2018/223073, WO 2018/223081, WO 2018/237194, WO 2019/032607, WO 2019/055951, WO 2019/075357, WO 2019/200185, WO 2019/217784, and/or WO 2019/032612 the internucleotidic linkages (e.g., those of Formula I, I-a, I-b, or I-c, I-n-1, I-n-2, I-n-3, I-n-4, II, II-a-1, II-a-2, II-b-1, II-b-2, II-c-1, II-c-2, II-d-1, II-d-2, etc.) of each of which are independently incorporated herein by reference. In some embodiments, a modified internucleotidic linkage is a non-negatively charged internucleotidic linkage. In some embodiments, provided oligonucleotides comprise one or more non-negatively charged internucleotidic linkages. In some embodiments, a non-negatively charged internucleotidic linkage is a positively charged internucleotidic linkage. In some embodiments, a non-negatively charged internucleotidic linkage is a neutral internucleotidic linkage. In some embodiments, the present disclosure provides oligonucleotides comprising one or more neutral internucleotidic linkages. In some embodiments, a non-negatively charged internucleotidic linkage or a neutral internucleotidic linkage (e.g., one of Formula I-n-1, I-n-2, I-n-3, I-n-4, II, II-a-1, II-a-2, II-b-1, II-b-2, II-c-1, II-c-2, II-d-1, II-d-2, etc.) is as described in U.S. Pat. Nos. 9,394,333, 9,744,183, 9,605,019, 9,598,458, 9,982,257, 10,160,969, 10,479,995, US 2020/0056173, US 2018/0216107, US 2019/0127733, U.S. Pat. No. 10,450,568, US 2019/0077817, US 2019/0249173, US 2019/0375774, WO 2018/223056, WO 2018/223073, WO 2018/223081, WO 2018/237194, WO 2019/032607, WO 2019/055951, WO 2019/075357, WO 2019/200185, WO 2019/217784, and/or WO 2019/032612. In some embodiments, a non-negatively charged internucleotidic linkage or neutral internucleotidic linkage is one of Formula I-n-1, I-n-2, I-n-3, I-n-4, II, II-a-1, II-a-2, II-b-1, II-b-2, II-c-1, II-c-2, II-d-1, II-d-2, etc. as described in WO 2018/223056, WO 2019/032607, WO 2019/075357, WO 2019/032607, WO 2019/075357, WO 2019/200185, WO 2019/217784, and/or WO 2019/032612, such internucleotidic linkages of each of which are independently incorporated herein by reference.

[1129] As described herein, various variables can be R, e.g., R′, R^{L}, etc. Various embodiments for R are described in the present disclosure (e.g., when describing variables that can be R). Such embodiments are generally useful for all variables that can be R. In some embodiments, R is hydrogen. In some embodiments, R is optionally substituted C₁₋₃₀ (e.g., 1, 2, 3, 4, 5, 6, 7, 8, 9, 10, 11, 12, 13, 14, 15, 16, 17, 18, 19, 20, 21, 22, 23, 24, 25, 26, 27, 28, 29 or 30) aliphatic. In some embodiments, R is optionally substituted C₁₋₂₀ aliphatic. In some embodiments, R is optionally substituted C₁₋₁₀ aliphatic. In some embodiments, R is optionally substituted C₁₋₆ aliphatic. In some embodiments, R is optionally substituted alkyl. In some embodiments, R is optionally substituted C₁₋₆ alkyl. In some embodiments, R is optionally substituted methyl. In some embodiments, R is methyl. In some embodiments, R is optionally substituted ethyl. In some embodiments, R is optionally substituted propyl. In some embodiments, R is isopropyl. In some embodiments, R is optionally substituted butyl. In some embodiments, R is optionally substituted pentyl. In some embodiments, R is optionally substituted hexyl.

[1130] In some embodiments, R is optionally substituted 3-30 membered (e.g., 3, 4, 5, 6, 7, 8, 9, 10, 11, 12, 13, 14, 15, 16, 17, 18, 19, 20, 21, 22, 23, 24, 25, 26, 27, 28, 29 or 30) cycloaliphatic. In some embodiments, R is optionally substituted cycloalkyl. In some embodiments, cycloaliphatic is monocyclic, bicyclic, or polycyclic, wherein each monocyclic unit is independently saturated or partially saturated. In some embodiments, R is optionally substituted cyclopropyl. In some embodiments, R is optionally substituted cyclobutyl. In some embodiments, R is optionally substituted cyclopentyl. In some embodiments, R is optionally substituted cyclohexyl. In some embodiments, R is optionally substituted adamantyl.

[1131] In some embodiments, R is optionally substituted C₁₋₃₀ (e.g., 1, 2, 3, 4, 5, 6, 7, 8, 9, 10, 11, 12, 13, 14, 15, 16, 17, 18, 19, 20, 21, 22, 23, 24, 25, 26, 27, 28, 29 or 30) heteroaliphatic having 1-10 heteroatoms. In some embodiments, R is optionally substituted C₁₋₂₀ aliphatic having 1-10 heteroatoms. In some embodiments, R is optionally substituted C₁₋₁₀ aliphatic having 1-10 heteroatoms. In some embodiments, R is optionally substituted C₁₋₆ aliphatic having 1-3 heteroatoms. In some embodiments, R is optionally substituted heteroalkyl. In some embodiments, R is optionally substituted C₁₋₆ heteroalkyl. In some embodiments, R is optionally substituted 3-30 membered (e.g., 3, 4, 5, 6, 7, 8, 9, 10, 11, 12, 13, 14, 15, 16, 17, 18, 19, 20, 21, 22, 23, 24, 25, 26, 27, 28, 29 or 30) heterocycloaliphatic having 1-10 heteroatoms. In some embodiments, R is optionally substituted heterocycloalkyl. In some embodiments, heterocycloaliphatic is monocyclic, bicyclic, or polycyclic, wherein each monocyclic unit is independently saturated or partially saturated.

[1132] In some embodiments, R is optionally substituted C₆₋₃₀ aryl. In some embodiments, R is optionally substituted phenyl. In some embodiments, R is optionally substituted phenyl. In some embodiments, R is C₆₋₁₄ aryl. In some embodiments, R is optionally substituted bicyclic aryl. In some embodiments, R is optionally substituted polycyclic aryl. In some embodiments, R is optionally substituted C₆₋₃₀ arylaliphatic. In some embodiments, R is C₆₋₃₀ arylheteroaliphatic having 1-10 heteroatoms.

[1133] In some embodiments, R is optionally substituted 5-30 (5, 6, 7, 8, 9, 10, 11, 12, 13, 14, 15, 16, 17, 18, 19, 20, 21, 22, 23, 24, 25, 26, 27, 28, 29 or 30) membered heteroaryl having 1-10 heteroatoms. In some embodiments, R is optionally substituted 5-20 membered heteroaryl having 1-10 heteroatoms. In some embodiments, R is optionally substituted 5-10 membered heteroaryl having 1-10 heteroatoms. In some embodiments, R is optionally substituted 5-membered heteroaryl having 1-5 heteroatoms. In some embodiments, R is optionally substituted 5-membered heteroaryl having 1-4 heteroatoms. In some embodiments, R is optionally substituted 5-membered heteroaryl having 1-3 heteroatoms. In some embodiments, R is optionally substituted 5-membered heteroaryl having 1-2 heteroatoms. In some embodiments, R is optionally substituted 5-membered heteroaryl having one heteroatom. In some embodiments, R is optionally substituted 6-membered heteroaryl having 1-5 heteroatoms. In some embodiments, R is optionally substituted 6-membered heteroaryl having 1-4 heteroatoms. In some embodiments, R is optionally substituted 6-membered heteroaryl having 1-3 heteroatoms. In some embodiments, R is optionally substituted 6-membered heteroaryl having 1-2 heteroatoms. In some embodiments, R is optionally substituted 6-membered heteroaryl having one heteroatom. In some embodiments, R is optionally substituted monocyclic heteroaryl. In some embodiments, R is optionally substituted bicyclic heteroaryl. In some embodiments, R is optionally substituted polycyclic heteroaryl. In some embodiments, a heteroatom is nitrogen.

[1134] In some embodiments, R is optionally substituted 2-pyridinyl. In some embodiments, R is optionally substituted 3-pyridinyl. In some embodiments, R is optionally substituted 4-pyridinyl. In some embodiments, R is optionally substituted

[chemical structure]

[1135] In some embodiments, R is optionally substituted 3-30 (3, 4, 5, 6, 7, 8, 9, 10, 11, 12, 13, 14, 15, 16, 17, 18, 19, 20, 21, 22, 23, 24, 25, 26, 27, 28, 29 or 30) membered heterocyclyl having 1-10 heteroatoms. In some embodiments, R is optionally substituted 3-membered heterocyclyl having 1-2 heteroatoms. In some embodiments, R is optionally substituted 4-membered heterocyclyl having 1-2 heteroatoms. In some embodiments, R is optionally substituted 5-20 membered heterocyclyl having 1-10 heteroatoms. In some embodiments, R is optionally substituted 5-10 membered heterocyclyl having 1-10 heteroatoms. In some embodiments, R is optionally substituted 5-membered heterocyclyl having 1-5 heteroatoms. In some embodiments, R is optionally substituted 5-membered heterocyclyl having 1-4 heteroatoms. In some embodiments, R is optionally substituted 5-membered heterocyclyl having 1-3 heteroatoms. In some embodiments, R is optionally substituted 5-membered heterocyclyl having 1-2 heteroatoms. In some embodiments, R is optionally substituted 5-membered heterocyclyl having one heteroatom. In some embodiments, R is optionally substituted 6-membered heterocyclyl having 1-5 heteroatoms. In some embodiments, R is optionally substituted 6-membered heterocyclyl having 1-4 heteroatoms. In some embodiments, R is optionally substituted 6-membered heterocyclyl having 1-3 heteroatoms. In some embodiments, R is optionally substituted 6-membered heterocyclyl having 1-2 heteroatoms. In some embodiments, R is optionally substituted 6-membered heterocyclyl having one heteroatom. In some embodiments, R is optionally substituted monocyclic heterocyclyl. In some embodiments, R is optionally substituted bicyclic heterocyclyl. In some embodiments, R is optionally substituted polycyclic heterocyclyl. In some embodiments, R is optionally substituted saturated heterocyclyl. In some embodiments, R is optionally substituted partially unsaturated heterocyclyl. In some embodiments, a heteroatom is nitrogen. In some embodiments, R is optionally substituted

[chemical structure]

In some embodiments, R is optionally substituted

[chemical structure]

In some embodiments, R is optionally substituted

[chemical structure]

[1136] In some embodiments, two R groups are optionally and independently taken together to form a covalent bond. In some embodiments, two or more R groups on the same atom are optionally and independently taken together with the atom to form an optionally substituted, 3-30 membered, monocyclic, bicyclic or polycyclic ring having, in addition to the atom, 0-10 heteroatoms. In some embodiments, two or more R groups on two or more atoms are optionally and independently taken together with their intervening atoms to form an optionally substituted, 3-30 membered, monocyclic, bicyclic or polycyclic ring having, in addition to the intervening atoms, 0-10 heteroatoms.

[1137] Various variables may comprises an optionally substituted ring, or can be taken together with their intervening atom(s) to form a ring. In some embodiments, a ring is 3-30 (e.g., 3, 4, 5, 6, 7, 8, 9, 10, 11, 12, 13, 14, 15, 16, 17, 18, 19, 20, 21, 22, 23, 24, 25, 26, 27, 28, 29 or 30) membered. In some embodiments, a ring is 3-20 membered. In some embodiments, a ring is 3-15 membered. In some embodiments, a ring is 3-10 membered. In some embodiments, a ring is 3-8 membered. In some embodiments, a ring is 3-7 membered. In some embodiments, a ring is 3-6 membered. In some embodiments, a ring is 4-20 membered. In some embodiments, a ring is 5-20 membered. In some embodiments, a ring is monocyclic. In some embodiments, a ring is bicyclic. In some embodiments, a ring is polycyclic. In some embodiments, each monocyclic ring or each monocyclic ring unit in bicyclic or polycyclic rings is independently saturated, partially saturated or aromatic. In some embodiments, each monocyclic ring or each monocyclic ring unit in bicyclic or polycyclic rings is independently 3-10 membered and has 0-5 heteroatoms.

[1138] In some embodiments, each heteroatom is independently selected oxygen, nitrogen, sulfur, silicon, and phosphorus. In some embodiments, each heteroatom is independently selected oxygen, nitrogen, sulfur, and phosphorus. In some embodiments, each heteroatom is independently selected oxygen, nitrogen, and sulfur. In some embodiments, a heteroatom is in an oxidized form.

[1139] As appreciated by those skilled in the art, many other types of internucleotidic linkages may be utilized in accordance with the present disclosure, for example, those described in U.S. Pat. Nos. 3,687,808; 4,469,863; 4,476,301; 5,177,195; 5,023,243; 5,034,506; 5,166,315; 5,185,444; 5,188,897; 5,214,134; 5,216,141; 5,235,033; 5,264,423; 5,264,564; 5,276,019; 5,278,302; 5,286,717; 5,321,131; 5,399,676; 5,405,938; 5,405,939; 5,434,257; 5,453,496; 5,455,233; 5,466,677; 5,466,677; 5,470,967; 5,476,925; 5,489,677; 5,519,126; 5,536,821; 5,541,307; 5,541,316; 5,550,111; 5,561,225; 5,563,253; 5,571,799; 5,587,361; 5,596,086; 5,602,240; 5,608,046; 5,610,289; 5,618,704; 5,623,070; 5,625,050; 5,633,360; 5,64,562; 5,663,312; 5,677,437; 5,677,439; 6,160,109; 6,239,265; 6,028,188; 6,124,445; 6,169,170; 6,172,209; 6,277,603; 6,326,199; 6,346,614; 6,444,423; 6,531,590; 6,534,639; 6,608,035; 6,683,167; 6,858,715; 6,867,294; 6,878,805; 7,015,315; 7,041,816; 7,273,933; 7,321,029; or RE39464. In some embodiments, a modified internucleotidic linkage is one described in U.S. Pat. Nos. 9,394,333, 9,744,183, 9,605,019, 9,598,458, 9,982,257, 10,160,969, 10,479,995, US 2020/0056173, US 2018/0216107, US 2019/0127733, U.S. Pat. No. 10,450,568, US 2019/0077817, US 2019/0249173, US 2019/0375774, WO 2018/223056, WO 2018/223073, WO 2018/223081, WO 2018/237194, WO 2019/032607, WO 2019/055951, WO 2019/075357, WO 2019/200185, WO 2019/217784, and/or WO 2019/032612, the nucleobases, sugars, internucleotidic linkages, chiral auxiliaries/reagents, and technologies for oligonucleotide synthesis (reagents, conditions, cycles, etc.) of each of which is independently incorporated herein by reference.

[1140] In some embodiments, each internucleotidic linkage in an oligonucleotide is independently selected from a natural phosphate linkage, a phosphorothioate linkage, and a non-negatively charged internucleotidic linkage (e.g., n001, n002, n003, n004, n005, n006, n007, n008, n009, n010, n013, etc.). In some embodiments, each internucleotidic linkage in an oligonucleotide is independently selected from a natural phosphate linkage, a phosphorothioate linkage, and a neutral internucleotidic linkage (e.g., n001, n002, n003, n004, n005, n006, n007, n008, n009, n010, n013, etc.).

[1141] Oligonucleotides can comprise various numbers of natural phosphate linkages, e.g., 1-50, 1-40, 1-30, 1-25, 1-20, 1-10, 1-5, or 1, 2, 3, 4, 5, 6, 7, 8, 9, 10, 11, 12, 13, 14, 15, 16, 17, 18, 19, 20 or more. In some embodiments, one or more (e.g., 1-50, 1-40, 1-30, 1-25, 1-20, 1-10, 1-5, or 1, 2, 3, 4, 5, 6, 7, 8, 9, 10, 11, 12, 13, 14, 15, 16, 17, 18, 19, 20 or more) of the natural phosphate linkages in an oligonucleotide are consecutive. In some embodiments, provided oligonucleotides comprise no natural phosphate linkages. In some embodiments, provided oligonucleotides comprise one natural phosphate linkage. In some embodiments, provided oligonucleotides comprise 1 to 30 or more natural phosphate linkages.

[1142] In some embodiments, a modified internucleotidic linkage is a chiral internucleotidic linkage which comprises a chiral linkage phosphorus. In some embodiments, a chiral internucleotidic linkage is a phosphorothioate linkage. In some embodiments, a chiral internucleotidic linkage is a non-negatively charged internucleotidic linkage. In some embodiments, a chiral internucleotidic linkage is a neutral internucleotidic linkage. In some embodiments, a chiral internucleotidic linkage is chirally controlled with respect to its chiral linkage phosphorus. In some embodiments, a chiral internucleotidic linkage is stereochemically pure with respect to its chiral linkage phosphorus. In some embodiments, a chiral internucleotidic linkage is not chirally controlled. In some embodiments, a pattern of backbone chiral centers comprises or consists of positions and linkage phosphorus configurations of chirally controlled internucleotidic linkages (Rp or Sp) and positions of achiral internucleotidic linkages (e.g., natural phosphate linkages).

[1143] In some embodiments, provided oligonucleotides comprise one or more non-negatively charged internucleotidic linkages. In some embodiments, provided oligonucleotides comprise one or more neutral internucleotidic linkages. In some embodiments, provided oligonucleotides comprise one or more phosphoryl guanidine internucleotidic linkages. In some embodiments, a neutral internucleotidic linkage or non-negatively charged internucleotidic linkage is a phosphoryl guanidine internucleotidic linkage. In some embodiments, each neutral internucleotidic linkage or non-negatively charged internucleotidic linkage is independently a phosphoryl guanidine internucleotidic linkage. In some embodiments, each neutral internucleotidic linkage and non-negatively charged internucleotidic linkage is independently n001.

[1144] In some embodiments, each internucleotidic linkage in a provided oligonucleotide is independently selected from a phosphorothioate internucleotidic linkage, a phosphoryl guanidine internucleotidic linkage, and a natural phosphate linkage. In some embodiments, each internucleotidic linkage in a provided oligonucleotide is independently selected from a phosphorothioate internucleotidic linkage, n001, and a natural phosphate linkage.

[1145] Various types of internucleotidic linkages may be utilized in combination of other structural elements, e.g., sugars, to achieve desired oligonucleotide properties and/or activities. For example, the present disclosure routinely utilizes modified internucleotidic linkages and modified sugars, optionally with natural phosphate linkages and natural sugars, in designed oligonucleotides. In some embodiments, the present disclosure provides an oligonucleotide comprising one or more modified sugars. In some embodiments, the present disclosure provides an oligonucleotide comprising one or more modified sugars and one or more modified internucleotidic linkages, one or more of which are natural phosphate linkages.

[1146] In some embodiments, an internucleotidic linkage is a phosphoryl guanidine, phosphoryl amidine, phosphoryl isourea, phosphoryl isothiourea, phosphoryl imidate, or phosphoryl imidothioate internucleotidic linkage, e.g., those as described in US 20170362270.

[1147] As appreciated by those skilled in the art, many other types of internucleotidic linkages may be utilized in accordance with the present disclosure, for example, those described in U.S. Pat. Nos. 3,687,808; 4,469,863; 4,476,301; 5,177,195; 5,023,243; 5,034,506; 5,166,315; 5,185,444; 5,188,897; 5,214,134; 5,216,141; 5,235,033; 5,264,423; 5,264,564; 5,276,019; 5,278,302; 5,286,717; 5,321,131; 5,399,676; 5,405,938; 5,405,939; 5,434,257; 5,453,496; 5,455,233; 5,466,677; 5,466,677; 5,470,967; 5,476,925; 5,489,677; 5,519,126; 5,536,821; 5,541,307; 5,541,316; 5,550,111; 5,561,225; 5,563,253; 5,571,799; 5,587,361; 5,596,086; 5,602,240; 5,608,046; 5,610,289; 5,618,704; 5,623,070; 5,625,050; 5,633,360; 5,64,562; 5,663,312; 5,677,437; 5,677,439; 6,160,109; 6,239,265; 6,028,188; 6,124,445; 6,169,170; 6,172,209; 6,277,603; 6,326,199; 6,346,614; 6,444,423; 6,531,590; 6,534,639; 6,608,035; 6,683,167; 6,858,715; 6,867,294; 6,878,805; 7,015,315; 7,041,816; 7,273,933; 7,321,029; or RE39464. In some embodiments, a modified internucleotidic linkage is one described in U.S. Pat. No. 9,982,257, US 20170037399, US 20180216108, WO 2017192664, WO 2017015575, WO 2017062862, WO 2018067973, WO 2017160741, WO 2017192679, WO 2017210647, WO 2018098264, WO 2018223056, WO 2018237194, or WO 2019055951, the nucleobases, sugars, internucleotidic linkages, chiral auxiliaries/reagents, and technologies for oligonucleotide synthesis (reagents, conditions, cycles, etc.) of each of which is independently incorporated herein by reference. In some embodiments, an internucleotidic linkage is described in WO 2012/030683, WO 2021/030778, WO 2019112485, US 20170362270, WO 2018156056, WO 2018056871, WO 2020/154344, WO 2020/154343, WO 2020/154342, WO 2020/165077, WO 2020/201406, WO 2020/216637, or WO 2020/252376, and can be utilized in accordance with the present disclosure.

[1148] In some embodiments, each internucleotidic linkage in an oligonucleotide is independently selected from a natural phosphate linkage, a phosphorothioate linkage, and a non-negatively charged internucleotidic linkage (e.g., n001). In some embodiments, each internucleotidic linkage in an oligonucleotide is independently selected from a natural phosphate linkage, a phosphorothioate linkage, and a neutral internucleotidic linkage (e.g., n001).

[1149] In some embodiments, an oligonucleotide comprises one or more nucleotides that independently comprise a phosphorus modification prone to “autorelease” under certain conditions. That is, under certain conditions, a particular phosphorus modification is designed such that it self-cleaves from the oligonucleotide to provide, e.g., a natural phosphate linkage. In some embodiments, such a phosphorus modification has a structure of —O-L-R¹, wherein L is L^{B} as described herein, and R¹ is R′ as described herein. In some embodiments, a phosphorus modification has a structure of —S-L-R¹, wherein each L and R¹ is independently as described in the present disclosure. Certain examples of such phosphorus modification groups can be found in U.S. Pat. No. 9,982,257. In some embodiments, an autorelease group comprises a morpholino group. In some embodiments, an autorelease group is characterized by the ability to deliver an agent to the internucleotidic phosphorus linker, which agent facilitates further modification of the phosphorus atom such as, e.g., desulfurization. In some embodiments, the agent is water and the further modification is hydrolysis to form a natural phosphate linkage.

[1150] In some embodiments, an oligonucleotide comprises one or more internucleotidic linkages that improve one or more pharmaceutical properties and/or activities of the oligonucleotide. It is well documented in the art that certain oligonucleotides are rapidly degraded by nucleases and exhibit poor cellular uptake through the cytoplasmic cell membrane (Poijarvi-Virta et al., Curr. Med. Chem. (2006), 13(28); 3441-65; Wagner et al., Med. Res. Rev. (2000), 20(6):417-51; Peyrottes et al., Mini Rev. Med. Chem. (2004), 4(4):395-408; Gosselin et al., (1996), 43(1):196-208; Bologna et al., (2002), Antisense & Nucleic Acid Drug Development 12:33-41). Vives et al. (Nucleic Acids Research (1999), 27(20):4071-76) reported that tert-butyl SATE pro-oligonucleotides displayed markedly increased cellular penetration compared to the parent oligonucleotide under certain conditions.

[1151] Oligonucleotides can comprise various number of natural phosphate linkages. In some embodiments, 5% or more of the internucleotidic linkages of provided oligonucleotides are natural phosphate linkages. In some embodiments, 10% or more of the internucleotidic linkages of provided oligonucleotides are natural phosphate linkages. In some embodiments, 15% or more of the internucleotidic linkages of provided oligonucleotides are natural phosphate linkages. In some embodiments, 20% or more of the internucleotidic linkages of provided oligonucleotides are natural phosphate linkages. In some embodiments, 25% or more of the internucleotidic linkages of provided oligonucleotides are natural phosphate linkages. In some embodiments, 30% or more of the internucleotidic linkages of provided oligonucleotides are natural phosphate linkages. In some embodiments, 35% or more of the internucleotidic linkages of provided oligonucleotides are natural phosphate linkages. In some embodiments, 40% or more of the internucleotidic linkages of provided oligonucleotides are natural phosphate linkages. In some embodiments, provided oligonucleotides comprises 1, 2, 3, 4, 5, 6, 7, 8, 9, 10 or more natural phosphate linkages. In some embodiments, provided oligonucleotides comprises 4, 5, 6, 7, 8, 9, 10 or more natural phosphate linkages. In some embodiments, the number of natural phosphate linkages is 2. In some embodiments, the number of natural phosphate linkages is 3. In some embodiments, the number of natural phosphate linkages is 4. In some embodiments, the number of natural phosphate linkages is 5. In some embodiments, the number of natural phosphate linkages is 6. In some embodiments, the number of natural phosphate linkages is 7. In some embodiments, the number of natural phosphate linkages is 8. In some embodiments, some or all of the natural phosphate linkages are consecutive. In some embodiments, no more than a certain number of internucleotidic linkages of the provided oligonucleotides are natural phosphate linkages, e.g., no more than 1, no more than 2, no more than 3, no more than 4, no more than 5, no more than 6, no more than 7, no more than 8, no more than 9, no more than 10, no more than 11, no more than 12, no more than 13, no more than 14, no more than 15, no more than 16, no more than 17, no more than 18, no more than 19, no more than 20, no more than 21, no more than 22, no more than 23, no more than 24, no more than 25, no more than 26, no more than 27, no more than 28, no more than 29, or no more than 30 natural phosphate linkages. In some embodiments, provided oligonucleotides comprise no natural phosphate linkages.

[1152] In some embodiments, the present disclosure demonstrates that, in at least some cases, Sp internucleotidic linkages, among other things, at the 5′- and/or 3′-end can improve oligonucleotide stability. In some embodiments, the present disclosure demonstrates that, among other things, natural phosphate linkages and/or Rp internucleotidic linkages may improve removal of oligonucleotides from a system. As appreciated by a person having ordinary skill in the art, various assays known in the art can be utilized to assess such properties in accordance with the present disclosure.

[1153] In some embodiments, each phosphorothioate internucleotidic linkage in an oligonucleotide or a portion thereof (e.g., a domain, a subdomain, etc.) is independently chirally controlled. In some embodiments, each is independently Sp or Rp. In some embodiments, a high level is Sp as described herein. In some embodiments, each phosphorothioate internucleotidic linkage in an oligonucleotide or a portion thereof is chirally controlled and is Sp. In some embodiments, one or more, e.g., about 1-5 (e.g., about 1, 2, 3, 4, or 5) is Rp.

[1154] In some embodiments, as illustrated in certain examples, an oligonucleotide or a portion thereof comprises one or more non-negatively charged internucleotidic linkages, each of which is optionally and independently chirally controlled. In some embodiments, each non-negatively charged internucleotidic linkage is independently n001. In some embodiments, a chiral non-negatively charged internucleotidic linkage is not chirally controlled. In some embodiments, each chiral non-negatively charged internucleotidic linkage is not chirally controlled. In some embodiments, a chiral non-negatively charged internucleotidic linkage is chirally controlled. In some embodiments, a chiral non-negatively charged internucleotidic linkage is chirally controlled and is Rp. In some embodiments, a chiral non-negatively charged internucleotidic linkage is chirally controlled and is Sp. In some embodiments, each chiral non-negatively charged internucleotidic linkage is chirally controlled. In some embodiments, the number of non-negatively charged internucleotidic linkages in an oligonucleotide or a portion thereof is about 1-10, or about 1, 2, 3, 4, 5, 6, 7, 8, 9, or 10. In some embodiments, it is about 1. In some embodiments, it is about 2. In some embodiments, it is about 3. In some embodiments, it is about 4. In some embodiments, it is about 5. In some embodiments, it is about 6. In some embodiments, it is about 7. In some embodiments, it is about 8. In some embodiments, it is about 9. In some embodiments, it is about 10. In some embodiments, two or more non-negatively charged internucleotidic linkages are consecutive. In some embodiments, no two non-negatively charged internucleotidic linkages are consecutive. In some embodiments, all non-negatively charged internucleotidic linkages in an oligonucleotide or a portion thereof are consecutive (e.g., 3 consecutive non-negatively charged internucleotidic linkages). In some embodiments, a non-negatively charged internucleotidic linkage, or two or more (e.g., about 2, about 3, about 4 etc.) consecutive non-negatively charged internucleotidic linkages, are at the 3′-end of an oligonucleotide or a portion thereof. In some embodiments, the last two or three or four internucleotidic linkages of an oligonucleotide or a portion thereof comprise at least one internucleotidic linkage that is not a non-negatively charged internucleotidic linkage. In some embodiments, the last two or three or four internucleotidic linkages of an oligonucleotide or a portion thereof comprise at least one internucleotidic linkage that is not n001. In some embodiments, the internucleotidic linkage linking the first two nucleosides of an oligonucleotide or a portion thereof is a non-negatively charged internucleotidic linkage. In some embodiments, the internucleotidic linkage linking the last two nucleosides of an oligonucleotide or a portion thereof is a non-negatively charged internucleotidic linkage. In some embodiments, the internucleotidic linkage linking the first two nucleosides of an oligonucleotide or a portion thereof is a phosphorothioate internucleotidic linkage. In some embodiments, it is Sp. In some embodiments, the internucleotidic linkage linking the last two nucleosides of an oligonucleotide or a portion thereof is a phosphorothioate internucleotidic linkage. In some embodiments, it is Sp.

[1155] In some embodiments, one or more chiral internucleotidic linkages are chirally controlled and one or more chiral internucleotidic linkages are not chirally controlled. In some embodiments, each phosphorothioate internucleotidic linkage is independently chirally controlled, and one or more non-negatively charged internucleotidic linkage are not chirally controlled. In some embodiments, each phosphorothioate internucleotidic linkage is independently chirally controlled, and each non-negatively charged internucleotidic linkage is not chirally controlled. In some embodiments, the internucleotidic linkage between the first two nucleosides of an oligonucleotide is a non-negatively charged internucleotidic linkage. In some embodiments, the internucleotidic linkage between the last two nucleosides are each independently a non-negatively charged internucleotidic linkage. In some embodiments, both are independently non-negatively charged internucleotidic linkages. In some embodiments, an oligonucleotide comprises one or more additional internucleotidic linkages, e.g., one of which is between the nucleosides at positions −1 and −2 relative to a nucleoside opposite to a target nucleoside (e.g., a target adenosine) (the two nucleosides immediately 3′ to a nucleoside opposite to a target nucleoside (e.g., in . . . N₀N₋₁N₋₂ . . . , N₀ is a nucleoside opposite to a target nucleoside, N₋₁ and N₋₂ are at positions −1 and −2, respectively). In some embodiments, each non-negatively charged internucleotidic linkage is independently neutral internucleotidic linkage. In some embodiments, each non-negatively charged internucleotidic linkage is independently n001.

[1156] As demonstrated herein, in some embodiments, non-negatively charged internucleotidic linkages such as n001 may provide improved properties and/or activities. In some embodiments, in an oligonucleotide a 5′-end internucleotidic linkage and/or a 3′-end internucleotidic linkage, each of which is independently bonded to two nucleosides comprising a nucleobase as described herein, is a non-negatively charged internucleotidic linkage as described herein. In some embodiments, the first one or more (e.g., the first 1, 2, and/or 3), and/or the last one or more (e.g., the last 1, 2, 3, 4, 5, 6 or 7) internucleotidic linkages, each of which is independently bonded to two nucleosides in a first domain, is independently a non-negatively charged internucleotidic linkage. In some embodiments, the first internucleotidic linkage of a first domain is a non-negatively charged internucleotidic linkage. In some embodiments, the last internucleotidic linkage that bonds to two nucleosides of a first domain is a non-negatively charged internucleotidic linkage. In some embodiments, the last internucleotidic linkage of a second domain is a non-negatively charged internucleotidic linkage. In some embodiments, one or more of internucleotidic linkages in the middle of a second domain, e.g., one or more of the 4^{th}, 5^{th} and 6^{th} internucleotidic linkages, each of which independently bonds to two nucleosides of a second domain, is independently a non-negatively charged internucleotidic linkage. In some embodiments, the 11^{th} internucleotidic linkage that bonds to two nucleosides of a second domain is a non-negatively charged internucleotidic linkage. In some embodiments, an internucleotidic linkage that is not bonded to a nucleoside opposite to a target nucleoside but is bonded to its 3′ immediate nucleoside is a non-negatively charged internucleotidic linkage. In some embodiments, a non-negatively charged internucleotidic linkage is a neutral internucleotidic linkage. In some embodiments, a non-negatively charged internucleotidic linkage is n001. In some embodiments, each non-negatively charged internucleotidic linkage is n001. In some embodiments, a non-negatively charged internucleotidic linkage is stereorandom. In some embodiments, a non-negatively charged internucleotidic linkage is chirally controlled and is Rp. In some embodiments, a non-negatively charged internucleotidic linkage is chirally controlled and is Sp. In some embodiments, each non-negatively charged internucleotidic linkage is independently chirally controlled. In some embodiments, one or more internucleotidic linkages of a first domain, e.g., one or more of the 4^{th}, 5^{th}, 6^{th}, 7^{th} and 8^{th} internucleotidic linkages each of which is independently bonded to two nucleosides of a first domain, is independently not a non-negatively charged internucleotidic linkage. In some embodiments, one or more internucleotidic linkages of a second domain, e.g., one or more of the 1^{st}, 2^{nd}, 3^{rd}, 7^{th}, 8^{th}, 9^{th}, 12^{th} and 13^{th} internucleotidic linkages each of which is independently bonded to two nucleosides of a first domain, is independently not a non-negatively charged internucleotidic linkage. In some embodiments, one or both of the 2^{nd} and the 3^{rd} internucleotidic linkages of a second domain is not a non-negatively charged internucleotidic linkage. In some embodiments, an internucleotidic linkage that is not a non-negatively charged internucleotidic linkage is a phosphorothioate internucleotidic linkage. In some embodiments, it is a stereorandom phosphorothioate internucleotidic linkage. In some embodiments, it is a Rp chirally controlled phosphorothioate internucleotidic linkage. In some embodiments, it is a Sp chirally controlled phosphorothioate internucleotidic linkage.

[1157] In some embodiments, one or more or all internucleotidic linkages at positions +11, +9, +5, −2, and −5 of a nucleoside opposite to a target adenosine are independently non-negatively charged internucleotidic linkages (“+” is counting from a nucleoside opposite to a target adenosine toward the 5′-end of an oligonucleotide with the internucleotidic linkage at the +1 position being the internucleotidic linkage between a nucleoside opposite to a target adenosine and its 5′ side neighboring nucleoside (e.g., being between N₁ and N₀ of 5′-N₁N₀N₋₁-3′, wherein as described herein N₀ is a nucleoside opposite to a target adenosine), and “−” is counting from the nucleoside toward the 3′-end of an oligonucleotide with the internucleotidic linkage at the −1 position being the internucleotidic linkage between a nucleoside opposite to a target adenosine and its 3′ side neighboring nucleoside (e.g., being between N₋₁ and N₀ of 5′-N₁N₀N₋₁-3′, wherein as described herein N₀ is the nucleoside opposite to a target adenosine)). In some embodiments, the first internucleotidic linkage of an oligonucleotide is a non-negatively charged internucleotidic linkage. In some embodiments, the last internucleotidic linkage of an oligonucleotide is a non-negatively charged internucleotidic linkage. In some embodiments, the first and last internucleotidic linkages of an oligonucleotide are each independently a non-negatively charged internucleotidic linkage. In some embodiments, one or more or all internucleotidic linkages at positions +21, +20, +18, +17, +16, +15, +14, +13, +12, +11, +10, +6, +5, +4, and −2 are independently non-negatively charged internucleotidic linkage (e.g., a phosphoryl guanidine internucleotidic linkage such as n001). In some embodiments, one or more or all internucleotidic linkages at positions +24, +23, +22, +19, +16, +15, +14, +13, +12, +11, +10, +6, +5, +4, −2, and −5 are independently non-negatively charged internucleotidic linkage (e.g., a phosphoryl guanidine internucleotidic linkage such as n001). In some embodiments, one or more or all internucleotidic linkages at positions +23, +22, +19, +16, +15, +14, +13, +12, +11, +10, +6, +5, +4, and −2 are independently non-negatively charged internucleotidic linkage (e.g., a phosphoryl guanidine internucleotidic linkage such as n001). In some embodiments, the first and last internucleotidic linkages of an oligonucleotide are independently non-negatively charged internucleotidic linkage (e.g., a phosphoryl guanidine internucleotidic linkage such as n001). In some embodiments, the first and the last internucleotidic linkages and one or more or all internucleotidic linkages at positions +23, +22, +19, +16, +15, +14, +13, +12, +11, +10, +6, +5, +4, and −2 are independently non-negatively charged internucleotidic linkage (e.g., a phosphoryl guanidine internucleotidic linkage such as n001). In some embodiments, the first and the last internucleotidic linkages are both Rp. In some embodiments, each phosphorothioate internucleotidic linkages are Sp. In some embodiments, an internucleotidic linkage at position −2 is a non-negatively charged internucleotidic linkage. In some embodiments, an internucleotidic linkage at position −5 is a non-negatively charged internucleotidic linkage. In some embodiments, an internucleotidic linkage at position +5 is a non-negatively charged internucleotidic linkage. In some embodiments, an internucleotidic linkage at position +9 is a non-negatively charged internucleotidic linkage. In some embodiments, an internucleotidic linkage at position +11 is a non-negatively charged internucleotidic linkage. In some embodiments, each of the internucleotidic linkages at positions −2, and −5 is independently a non-negatively charged internucleotidic linkage. In some embodiments, each of the internucleotidic linkages at positions +5, −2, and −5 is independently a non-negatively charged internucleotidic linkage. In some embodiments, each of the internucleotidic linkages at positions +11, +9, −2, and −5 is independently a non-negatively charged internucleotidic linkage. In some embodiments, each of the internucleotidic linkages at positions +11, +9, +5, −2, and −5 is independently a non-negatively charged internucleotidic linkage. In some embodiments, one or more or each of the 1^{st}, 14^{th}, 16^{th}, 20^{th}, 26^{th} and 29^{th} internucleotidic linkages (unless otherwise specified, from the 5′-end) is independently a non-negatively charged internucleotidic linkage. In some embodiments, an oligonucleotide comprises no non-negatively charged internucleotidic linkages to the 5′ side of a nucleoside opposite to a target adenosine except that the first internucleotidic linkage of an oligonucleotide may be optionally a non-negatively charged internucleotidic linkage. In some embodiments, an oligonucleotide comprises no internal non-negatively charged internucleotidic linkages except at position −2. In some embodiments, one or both of the first and last internucleotidic linkages of a first domain is independently a non-negatively charged internucleotidic linkage. In some embodiments, one or both of the first and last internucleotidic linkages of a second domain is independently a non-negatively charged internucleotidic linkage. In some embodiments, one or both of the first and last internucleotidic linkages of an oligonucleotide is independently a non-negatively charged internucleotidic linkage. In some embodiments, both of the first and last internucleotidic linkages of a first domain are independently non-negatively charged internucleotidic linkages. In some embodiments, both of the first and last internucleotidic linkages of a second domain are independently non-negatively charged internucleotidic linkages. In some embodiments, both of the first and last internucleotidic linkages of an oligonucleotide are independently non-negatively charged internucleotidic linkages. In some embodiments, each non-negatively charged internucleotidic linkage is independently a neutral internucleotidic linkage. In some embodiments, a non-negatively charged internucleotidic linkage is a phosphoryl guanidine internucleotidic linkage. In some embodiments, each non-negatively charged internucleotidic linkage is independently a phosphoryl guanidine internucleotidic linkage. In some embodiments, a non-negatively charged internucleotidic linkage is n001. In some embodiments, each non-negatively charged internucleotidic linkage is independently n001. In some embodiments, each non-negatively charged internucleotidic linkage is independently Rp, Sp, or non-chirally controlled. In some embodiments, one or more non-negatively charged internucleotidic linkages are independently not chirally controlled. In some embodiments, each non-negatively charged internucleotidic linkage is independently not chirally controlled. In some embodiments, one or more non-negatively charged internucleotidic linkages are independently chirally controlled. In some embodiments, each non-negatively charged internucleotidic linkage is independently chirally controlled. In some embodiments, each non-negatively charged internucleotidic linkage is Rp. In some embodiments, each non-negatively charged internucleotidic linkage is Sp. In some embodiments, an internucleotidic linkage, e.g., n001, bonded to an inosine or deoxyinosine or 2′-modified inosine (e.g., 2′-OH replaced with a non-H moiety such as —F, —OMe, -MOE, etc.) at its 3′ position is non-chirally controlled or is chirally controlled and Sp. In some embodiments, it is chirally controlled and Sp. In some embodiments, oligonucleotides and compositions thereof comprising chirally controlled Sp non-negatively charged internucleotidic linkages (e.g., phosphoryl guanidine internucleotidic linkages such as n001) bonded to 3′-positions of nucleosides comprising hypoxanthine provide various advantages over corresponding stereorandom or Rp internucleotidic linkages, e.g., the same or better properties and/or activities, improved manufacturing efficiency, and/or lowered manufacturing cost, etc. In some embodiments, it was observed that processes for constructing chirally controlled Sp non-negatively charged internucleotidic linkages (e.g., phosphoryl guanidine internucleotidic linkages such as n001) bonded to 3′-positions of nucleosides comprising hypoxanthine can be performed more readily (e.g., higher reagent concentrations, smaller solution volumes, shorter reaction times, etc.) and/or with lower cost (e.g., more easily accessible materials). In some embodiments, oligonucleotides and compositions thereof comprising chirally controlled Rp phosphorothioate internucleotidic linkages bonded to 3′-positions of nucleosides comprising hypoxanthine provide various advantages over corresponding stereorandom or Sp internucleotidic linkages, e.g., the same or better properties and/or activities, improved manufacturing efficiency, and/or lowered manufacturing cost, etc. In some embodiments, processes for constructing chirally controlled Rp phosphorothioate internucleotidic linkages bonded to 3′-positions of nucleosides comprising hypoxanthine can be performed more readily (e.g., higher reagent concentrations, smaller solution volumes, shorter reaction times, etc.) and/or with lower cost (e.g., more easily accessible materials).

[1158] In some embodiments, an oligonucleotide comprises one or more (e.g., 1-10, 1, 2, 3, 4, 5, 6, 7, 8, 9, 10 or more, etc.) natural phosphate linkages. In some embodiments, both nucleosides bonded to a natural phosphate linkage are independently a 2′-modified sugar. In some embodiments, both nucleosides bonded to a majority (e.g., at least 50%, 60%, 70%, 75%, 80%, 85%, 90%, 95% or more) of natural phosphate linkages are independently a 2′-modified sugar. In some embodiments, both nucleosides bonded to each natural phosphate linkage are independently a 2′-modified sugar. In some embodiments, a 2′-modified sugar is a bicyclic sugar or 2′-OR modified sugar wherein R is optionally substituted C₁₋₆ aliphatic. In some embodiments, each 2′-modified sugar is independently a bicyclic sugar or 2′-OR modified sugar wherein R is optionally substituted C₁₋₆ aliphatic. In some embodiments, each 2′-modified sugar is independently a 2′-OR modified sugar wherein R is optionally substituted C₁₋₆ aliphatic. In some embodiments, each 2′-modified sugar is independently a 2′-OMe modified sugar or a 2′-MOE modified sugar. In some embodiments, each 2′-modified sugar is independently a 2′-OMe modified sugar. In some embodiments, each 2′-modified sugar is independently a 2′-MOE modified sugar. In some embodiments, a natural phosphate linkage is utilized with a non-negatively charged internucleotidic linkage (e.g., a phosphoryl guanidine internucleotidic linkage such as n001). In some embodiments, an oligonucleotide comprises alternating natural phosphate linkages and non-negatively charged internucleotidic linkages (e.g., a phosphoryl guanidine internucleotidic linkage such as n001) (e.g., see WV-43047).

[1159] In some embodiments, one or more internucleotidic linkages at positions −1 and −2 are independently Rp phosphorothioate internucleotidic linkages. In some embodiments, one or more internucleotidic linkages at positions −3, −2, −1, +1, +3, +4, +5, +7, +8, +9, +10, +11, +12, +13, +16, +17 and +18 are independently Rp phosphorothioate internucleotidic linkages. In some embodiments, an internucleotidic linkage at position −3 is a Rp phosphorothioate internucleotidic linkage. In some embodiments, an internucleotidic linkage at position −2 is a Rp phosphorothioate internucleotidic linkage. In some embodiments, an internucleotidic linkage at position −1 is a Rp phosphorothioate internucleotidic linkage. In some embodiments, an internucleotidic linkage at position +1 is a Rp phosphorothioate internucleotidic linkage. In some embodiments, an internucleotidic linkage at position +3 is a Rp phosphorothioate internucleotidic linkage. In some embodiments, an internucleotidic linkage at position +4 is a Rp phosphorothioate internucleotidic linkage. In some embodiments, an internucleotidic linkage at position +5 is a Rp phosphorothioate internucleotidic linkage. In some embodiments, an internucleotidic linkage at position +7 is a Rp phosphorothioate internucleotidic linkage. In some embodiments, an internucleotidic linkage at position +8 is a Rp phosphorothioate internucleotidic linkage. In some embodiments, an internucleotidic linkage at position +9 is a Rp phosphorothioate internucleotidic linkage. In some embodiments, an internucleotidic linkage at position +10 is a Rp phosphorothioate internucleotidic linkage. In some embodiments, an internucleotidic linkage at position +11 is a Rp phosphorothioate internucleotidic linkage. In some embodiments, an internucleotidic linkage at position +12 is a Rp phosphorothioate internucleotidic linkage. In some embodiments, an internucleotidic linkage at position +13 is a Rp phosphorothioate internucleotidic linkage. In some embodiments, an internucleotidic linkage at position +16 is a Rp phosphorothioate internucleotidic linkage. In some embodiments, an internucleotidic linkage at position +17 is a Rp phosphorothioate internucleotidic linkage. In some embodiments, an internucleotidic linkage at position +18 is a Rp phosphorothioate internucleotidic linkage. In some embodiments, an oligonucleotide contains one and only one Rp phosphorothioate internucleotidic linkage. In some embodiments, it contains two and no more than two. In some embodiments, it contains three and no more than three. In some embodiments, it contains four and no more than four. In some embodiments, it contains five and no more than five.

[1160] In some embodiments, a non-negatively charged internucleotidic linkage bonded to 3′-carbon of dI is Sp. In some embodiments, a non-negatively charged internucleotidic linkage bonded to 3′-carbon of dI is Sp. In some embodiments, a phosphoryl guanidine internucleotidic linkage bonded to 3′-carbon of dI is Sp. In some embodiments, a n001 internucleotidic linkage bonded to 3′-carbon of dI is Sp. In some embodiments, each non-negatively charged internucleotidic linkage bonded to 3′-carbon of dI is independently Sp. In some embodiments, each neutral internucleotidic linkage bonded to 3′-carbon of dI is independently Sp. In some embodiments, each phosphoryl guanidine internucleotidic linkage bonded to 3′-carbon of dI is independently Sp. In some embodiments, each n001 bonded to 3′-carbon of dI is independently Sp.

[1161] In some embodiments, a controlled level of oligonucleotides in a composition are desired oligonucleotides. In some embodiments, of all oligonucleotides in a composition that share a common base sequence (e.g., a desired sequence for a purpose), or of all oligonucleotides in a composition, level of desired oligonucleotides (which may exist in various forms (e.g., salt forms) and typically differ only at non-chirally controlled internucleotidic linkages (various forms of the same stereoisomer can be considered the same for this purpose)) is about 5%-100%, 10%-100%, 20%-100%, 30%-100%, 40%-100%, 50%-100%, 60%-100%, 70%-100%, 80-100%, 90-100%, 95-100%, 50%-90%, about 5%, 10%, 15%, 20%, 25%, 30%, 35%, 40%, 45%, 50%, 55%, 60%, 65%, 70%, 75%, 80%, 85%, 90%, 95%, or 100%, or at least 5%, 10%, 15%, 20%, 25%, 30%, 35%, 40%, 45%, 50%, 55%, 60%, 65%, 70%, 75%, 80%, 85%, 90%, 95%, or 99%. In some embodiments, a level is at least about 50%. In some embodiments, a level is at least about 60%. In some embodiments, a level is at least about 70%. In some embodiments, a level is at least about 75%. In some embodiments, a level is at least about 80%. In some embodiments, a level is at least about 85%. In some embodiments, a level is at least about 90%. In some embodiments, a level is or is at least (DS)^{nc}, wherein DS is about 90%, 91%, 92%, 93%, 94%, 95%, 96%, 97%, 98%, 99% or 99.5% and nc is the number of chirally controlled internucleotidic linkages as described in the present disclosure (e.g., 1-50, 1-40, 1-30, 1-25, 1-20, 5-50, 5-40, 5-30, 5-25, 5-20, 1, 2, 3, 4, 5, 6, 7, 8, 9, 10, 11, 12, 13, 14, 15, 16, 17, 18, 19, 20, 21, 22, 23, 24, 25 or more). In some embodiments, a level is or is at least (DS)^{nc}, wherein DS is 95%-100%.

[1162] Various types of internucleotidic linkages may be utilized in combination of other structural elements, e.g., sugars, to achieve desired oligonucleotide properties and/or activities. For example, the present disclosure routinely utilizes modified internucleotidic linkages and modified sugars, optionally with natural phosphate linkages and natural sugars, in designing oligonucleotides. In some embodiments, the present disclosure provides an oligonucleotide comprising one or more modified sugars. In some embodiments, the present disclosure provides an oligonucleotide comprising one or more modified sugars and one or more modified internucleotidic linkages, one or more of which are natural phosphate linkages.

[1163] In some embodiments, provided oligonucleotides comprise a number of natural RNA sugars (e.g., 1, 2, 3, 4, 5, 6, 7, 8, 9, 10, 11, 12, 13, 14, 15, 16, 17, 18, 19, 20, 21, 22, 23, 24, 25, 26, 27, 28, 29 or 30 or more, two or more or all of them are optionally consecutive). In some embodiments, such oligonucleotides comprise modified sugars, e.g., 2′ modified sugars (e.g., 2′-F, etc.) and/or 2′-OR modified sugars wherein R is not —H (e.g., 2-OMe, 2-MOE, etc.) at one or both ends, and/or various modified internucleotidic linkages (e.g., phosphorothioate internucleotidic linkages, non-negatively charged internucleotidic linkages, etc.). In some embodiments, at the 5′-end there are one or more, e.g., 1, 2, 3, 4, 5, 6, 7, 8, 9, or 10 more such 2′-OR modified sugars, wherein R is not —H. In some embodiments, at the 3′-end there are one or more, e.g., 1, 2, 3, 4, 5, 6, 7, 8, 9, or 10 more such 2′-OR modified sugars, wherein R is not —H. In some embodiments, each 2′-modified sugar is independently a 2′-OR modified sugar wherein R is not —H. In some embodiments, as described herein, 2′-OR is 2′-OMe. In some embodiments, 2′-OR is 2′-MOE. In some embodiments, each of 2′-OR is independently 2′-OMe or 2′-MOE. In some embodiments, each 2′-OR is 2′-OMe.

[1164] In some embodiments, stability of various internucleotidic linkages is assessed. In some embodiments, internucleotidic linkages are exposed to various conditions utilized for oligonucleotide manufacturing, e.g., solid phase oligonucleotide synthesis, including reagents, solvents, temperatures (in some cases, temperatures higher than room temperature), cleavage conditions, deprotection conditions, purification conditions, etc., and stability is assessed. In some embodiments, stable internucleotidic linkages (e.g., those having no more than than 10%, 9%, 8%, 7%, 6%, 5%, 4%, 3%, 2%, 1%, 0.9%, 0.8%, 0.7%, 0.6%, 0.5%, 0.4%, 0.3%, 0.2%, or 0.1% degradation when exposed to one or more conditions and/or processes, or after a complete oligonucleotide manufacturing process) are selected for utilization in various oligonucleotide compositions and applications.

### Additional Chemical Moieties

[1165] In some embodiments, an oligonucleotide comprises one or more additional chemical moieties. Various additional chemical moieties, e.g., targeting moieties, carbohydrate moieties, lipid moieties, etc. are known in the art and can be utilized in accordance with the present disclosure to modulate properties and/or activities of provided oligonucleotides, e.g., stability, half life, activities, delivery, pharmacodynamics properties, pharmacokinetic properties, etc. In some embodiments, certain additional chemical moieties facilitate delivery of oligonucleotides to desired cells, tissues and/or organs, including but not limited the cells of the central nervous system. In some embodiments, certain additional chemical moieties facilitate internalization of oligonucleotides. In some embodiments, certain additional chemical moieties increase oligonucleotide stability. In some embodiments, the present disclosure provides technologies for incorporating various additional chemical moieties into oligonucleotides.

[1166] In some embodiments, an additional chemical moiety is or comprises a small molecule moiety. In some embodiments, a small molecule is a ligand of a protein (e.g., receptor). In some embodiments, a small molecule binds to a polypeptide. In some embodiments, a small molecule is an inhibitor of a polypeptide. In some embodiments, an additional chemical moiety is or comprises a peptide moiety (e.g., an antibody). In some embodiments, an additional chemical moiety is or comprises a nucleic acid moiety. In some embodiments, a nucleic acid provides a new property and/or activity. In some embodiments, a nucleic acid moiety forms a duplex or other secondary structure with the original oligonucleotide chain (before conjugation) or a portion thereof. In some embodiments, a nucleic acid is or comprises an oligonucleotide targeting the same or a different target, and may perform its activity through the same or a different mechanism. In some embodiments, a nucleic acid is or comprises a RNAi agent. In some embodiments, a nucleic acid is or comprises a miRNA agent. In some embodiments, a nucleic acid is or comprises RNase H dependent. In some embodiments, a nucleic acid is or comprises a gRNA. In some embodiments, a nucleic acid is or comprises an aptamer. In some embodiments, an additional chemical moiety is or comprises a carbohydrate moiety as described herein. Many useful agents, e.g., small molecules, peptides, carbohydrates, nucleic acid agents, etc., may be conjugated with oligonucleotides herein in accordance with the present disclosure.

[1167] In some embodiments, an oligonucleotide comprises an additional chemical moiety demonstrates increased delivery to and/or activity in an tissue compared to a reference oligonucleotide, e.g., a reference oligonucleotide which does not have the additional chemical moiety but is otherwise identical.

[1168] In some embodiments, non-limiting examples of additional chemical moieties include carbohydrate moieties, targeting moieties, etc., which, when incorporated into oligonucleotides, can improve one or more properties. In some embodiments, an additional chemical moiety is selected from: glucose, GluNAc (N-acetyl amine glucosamine) and anisamide moieties. In some embodiments, a provided oligonucleotide can comprise two or more additional chemical moieties, wherein the additional chemical moieties are identical or non-identical, or are of the same category (e.g., carbohydrate moiety, sugar moiety, targeting moiety, etc.) or not of the same category.

[1169] In some embodiments, an additional chemical moiety is a targeting moiety. In some embodiments, an additional chemical moiety is or comprises a carbohydrate moiety. In some embodiments, an additional chemical moiety is or comprises a lipid moiety. In some embodiments, an additional chemical moiety is or comprises a ligand moiety for, e.g., cell receptors such as a sigma receptor, an asialoglycoprotein receptor, etc. In some embodiments, a ligand moiety is or comprises an anisamide moiety, which may be a ligand moiety for a sigma receptor. In some embodiments, a ligand moiety is or comprises a GalNAc moiety, which may be a ligand moiety for an asialoglycoprotein receptor. In some embodiments, an additional chemical moiety facilitates delivery to liver.

[1170] In some embodiments, a provided oligonucleotide can comprise one or more linkers and additional chemical moieties (e.g., targeting moieties), and/or can be chirally controlled or not chirally controlled, and/or have a bases sequence and/or one or more modifications and/or formats as described herein.

[1171] Various linkers, carbohydrate moieties and targeting moieties, including many known in the art, can be utilized in accordance with the present disclosure. In some embodiments, a carbohydrate moiety is a targeting moiety. In some embodiments, a targeting moiety is a carbohydrate moiety.

[1172] In some embodiments, a provided oligonucleotide comprises an additional chemical moiety suitable for delivery, e.g., glucose, GluNAc (N-acetyl amine glucosamine), anisamide, or a structure selected from:

[chemical structure]

[chemical structure]

[chemical structure]

In some embodiments, n is 1. In some embodiments, n is 2. In some embodiments, n is 3. In some embodiments, n is 4. In some embodiments, n is 5. In some embodiments, n is 6. In some embodiments, n is 7. In some embodiments, n is 8.

[1173] In some embodiments, additional chemical moieties are any of ones described in the Examples, including examples of various additional chemical moieties incorporated into various oligonucleotides.

[1174] In some embodiments, an additional chemical moiety conjugated to an oligonucleotide is capable of targeting the oligonucleotide to a cell in the central nervous system.

[1175] In some embodiments, an additional chemical moiety comprises or is a cell receptor ligand. In some embodiments, an additional chemical moiety comprises or is a protein binder, e.g., one binds to a cell surface protein. Such moieties among other things can be useful for targeted delivery of oligonucleotides to cells expressing the corresponding receptors or proteins. In some embodiments, an additional chemical moiety of a provided oligonucleotide comprises anisamide or a derivative or an analog thereof and is capable of targeting the oligonucleotide to a cell expressing a particular receptor, such as the sigma 1 receptor.

[1176] In some embodiments, a provided oligonucleotide is formulated for administration to a body cell and/or tissue expressing its target. In some embodiments, an additional chemical moiety conjugated to an oligonucleotide is capable of targeting the oligonucleotide to a cell.

[1177] In some embodiments, an additional chemical moiety is selected from optionally substituted phenyl,

[chemical structure]

wherein n′ is 1, 2, 3, 4, 5, 6, 7, 8, 9, or 10, and each other variable is as described in the present disclosure. In some embodiments, R^{s} is F. In some embodiments, R^{s} is OMe. In some embodiments, R^{s} is OH. In some embodiments, R^{s} is NHAc. In some embodiments, R^{s} is NHCOCF₃. In some embodiments, R′ is H. In some embodiments, R is H. In some embodiments, R^{2s} is NHAc, and R^{5s} is OH. In some embodiments, R^{2s} is p-anisoyl, and R^{5s} is OH. In some embodiments, R^{2s} is NHAc and R^{5s} is p-anisoyl. In some embodiments, R^{2s} is OH, and R^{5s} is p-anisoyl. In some embodiments, an additional chemical moiety is selected from

[chemical structure]

[chemical structure]

[chemical structure]

In some embodiments, n′ is 1. In some embodiments, n′ is 0. In some embodiments, n″ is 1. In some embodiments, n″ is 2.

[1178] In some embodiments, an additional chemical moiety is or comprises an asialoglycoprotein receptor (ASGPR) ligand.

[1179] Without wishing to be bound by any particular theory, the present disclosure notes that ASGPR1 has also been reported to be expressed in the hippocampus region and/or cerebellum Purkinje cell layer of the mouse. http://mouse.brain-map.org/experiment/show/2048

[1180] Various other ASGPR ligands are known in the art and can be utilized in accordance with the present disclosure. In some embodiments, an ASGPR ligand is a carbohydrate. In some embodiments, an ASGPR ligand is GalNac or a derivative or an analog thereof. In some embodiments, an ASGPR ligand is one described in Sanhueza et al. J. Am. Chem. Soc., 2017, 139 (9), pp 3528-3536. In some embodiments, an ASGPR ligand is one described in Mamidyala et al. J. Am. Chem. Soc., 2012, 134, pp 1978-1981. In some embodiments, an ASGPR ligand is one described in US 20160207953. In some embodiments, an ASGPR ligand is a substituted-6,8-dioxabicyclo[3.2.1]octane-2,3-diol derivative disclosed in, e.g., US 20160207953. In some embodiments, an ASGPR ligand is one described in, e.g., US 20150329555. In some embodiments, an ASGPR ligand is a substituted-6,8-dioxabicyclo[3.2.1]octane-2,3-diol derivative disclosed e.g., in US 20150329555. In some embodiments, an ASGPR ligand is one described in U.S. Pat. No. 8,877,917, US 20160376585, U.S. Pat. No. 10,086,081, or 8,106,022. ASGPR ligands described in these documents are incorporated herein by reference. Those skilled in the art will appreciate that various technologies are known in the art, including those described in these documents, for assessing binding of a chemical moiety to ASGPR and can be utilized in accordance with the present disclosure. In some embodiments, a provided oligonucleotide is conjugated to an ASGPR ligand. In some embodiments, a provided oligonucleotide comprises an ASGPR ligand. In some embodiments, an additional chemical moiety comprises an ASGPR ligand is

[chemical structure]

wherein each variable is independently as described in the present disclosure. In some embodiments, R is —H. In some embodiments, R′ is —C(O)R.

[1181] In some embodiments, an additional chemical moiety is or comprises

[chemical structure]

In some embodiments, an additional chemical moiety is or comprises

[chemical structure]

In some embodiments, an additional chemical moiety is or comprises

[chemical structure]

In some embodiments, an additional chemical moiety is or comprises

[chemical structure]

In some embodiments, an additional chemical moiety is or comprises optionally substituted

[chemical structure]

In some embodiments, an additional chemical moiety is or comprises

[chemical structure]

In some embodiments, an additional chemical moiety is or comprises

[chemical structure]

In some embodiments, an additional chemical moiety is or comprises

[chemical structure]

In some embodiments, an additional chemical moiety is or comprises

[chemical structure]

[1182] In some embodiments, an additional chemical moiety comprises one or more moieties that can bind to, e.g., oligonucleotide target cells. For example, in some embodiments, an additional chemistry moiety comprises one or more protein ligand moieties, e.g., in some embodiments, an additional chemical moiety comprises multiple moieties, each of which independently is an ASGPR ligand. In some embodiments, as in Mod001 and Mod083, an additional chemical moiety comprises three such ligands.

[chemical structure]

[1183] In some embodiments, an oligonucleotide comprises

[chemical structure]

wherein each variable is independently as described herein. In some embodiments, each —OR′ is —OAc, and —N(R′)₂ is —NHAc. In some embodiments, an oligonucleotide comprises

[chemical structure]

In some embodiments, each R′ is —H. In some embodiments, each —OR′ is —OH, and each —N(R′)₂ is —NHC(O)R. In some embodiments, each —OR′ is —OH, and each —N(R′)₂ is —NHAc. In some embodiments, an oligonucleotide comprises

[chemical structure]

In some embodiments, the —CH₂— connection site is utilized as a C5 connection site in a sugar. In some embodiments, the connection site on the ring is utilized as a C3 connection site in a sugar. Such moieties may be introduced utilizing, e.g., phosphoramidites such as

[chemical structure]

e.g.,

[chemical structure]

(those skilled in the art appreciate that one or more other groups, such as protection groups for —OH, —NH₂—, —N(i-Pr)₂, —OCH₂CH₂CN, etc., may be alternatively utilized, and protection groups can be removed under various suitable conditions, sometimes during oligonucleotide de-protection and/or cleavage steps). In some embodiments, an oligonucleotide comprises 2, 3 or more (e.g., 3 and no more than 3)

[chemical structure]

In some embodiments, an oligonucleotide comprises 2, 3 or more (e.g., 3 and no more than 3)

[chemical structure]

In some embodiments, copies of such moieties are linked by internucleotidic linkages, e.g., natural phosphate linkages, as described herein. In some embodiments, when at a 5′-end, a —CH₂— connection site is bonded to —OH. In some embodiments, an oligonucleotide comprises

[chemical structure]

In some embodiments, an oligonucleotide comprises

[chemical structure]

In some embodiments, each —OR′ is —OAc, and —N(R′)₂ is —NHAc. In some embodiments, an oligonucleotide comprises

[chemical structure]

Among other things,

[chemical structure]

may be utilized to introduce

[chemical structure]

with comparable and/or better activities and/or properties. In some embodiments, it provides improved preparation efficiency and/or lower cost for the same number of

[chemical structure]

(e.g., when compared to Mod001).

[1184] In some embodiments, an additional chemical moiety is a Mod group described herein, e.g., in Table 1.

[1185] In some embodiments, an additional chemical moiety is Mod001. In some embodiments, an additional chemical moiety is Mod083. In some embodiments, an additional chemical moiety, e.g., a Mod group, is directly conjugated (e.g., without a linker) to the remainder of the oligonucleotide. In some embodiments, an additional chemical moiety is conjugated via a linker to the remainder of the oligonucleotide. In some embodiments, additional chemical moieties, e.g., Mod groups, may be directly connected, and/or via a linker, to nucleobases, sugars and/or internucleotidic linkages of oligonucleotides. In some embodiments, Mod groups are connected, either directly or via a linker, to sugars. In some embodiments, Mod groups are connected, either directly or via a linker, to 5′-end sugars. In some embodiments, Mod groups are connected, either directly or via a linker, to 5′-end sugars via 5′ carbon. For examples, see various oligonucleotides in Table 1. In some embodiments, Mod groups are connected, either directly or via a linker, to 3′-end sugars. In some embodiments, Mod groups are connected, either directly or via a linker, to 3′-end sugars via 3′ carbon. In some embodiments, Mod groups are connected, either directly or via a linker, to nucleobases. In some embodiments, Mod groups are connected, either directly or via a linker, to internucleotidic linkages. In some embodiments, provided oligonucleotides comprise Mod001 connected to 5′-end of oligonucleotide chains through L001.

[1186] As appreciated by those skilled in the art, an additional chemical moiety may be connected to an oligonucleotide chain at various locations, e.g., 5′-end, 3′-end, or a location in the middle (e.g., on a sugar, a base, an internucleotidic linkage, etc.). In some embodiments, it is connected at a 5′-end. In some embodiments, it is connected at a 3′-end. In some embodiments, it is connected at a nucleotide in the middle.

[1187] Certain additional chemical moieties (e.g., lipid moieties, targeting moieties, carbohydrate moieties), including but not limited to Mod012, Mod039, Mod062, Mod085, Mod086, and Mod094, and various linkers for connecting additional chemical moieties to oligonucleotide chains, including but not limited to L001, L003, L004, L008, L009, and L010, are described in WO 2017/062862, WO 2018/067973, WO 2017/160741, WO 2017/192679, WO 2017/210647, WO 2018/098264, WO 2018/022473, WO 2018/223056, WO 2018/223073, WO 2018/223081, WO 2018/237194, WO 2019/032607, WO 2019/032612, WO 2019/055951, WO 2019/075357, WO 2019/200185, WO 2019/217784, WO 2019/032612, WO 2020/191252, and/or WO 2021/071858, the additional chemical moieties and linkers of each of which are independently incorporated herein by reference, and can be utilized in accordance with the present disclosure. In some embodiments, an additional chemical moiety is digoxigenin or biotin or a derivative thereof.

[1188] In some embodiments, an oligonucleotide comprises a linker, e.g., L001 L004, L008, and/or an additional chemical moiety, e.g., Mod012, Mod039, Mod062, Mod085, Mod086, or Mod094. In some embodiments, a linker, e.g., L001, L003, L004, L008, L009, L110, etc. is linked to a Mod, e.g., Mod012, Mod039, Mod062, Mod085, Mod086, Mod094, etc.

L001: —NH—(CH₂)₆— linker (also known as a C6 linker, C6 amine linker or C6 amino linker), connected to Mod, if any, through —NH—, and the 5′-end or 3′-end of the oligonucleotide chain through either a phosphate linkage (—O—P(O)(OH)—O—, which may exist as a salt form, and may be indicated as O or PO) or a phosphorothioate linkage (—O—P(O)(SH)—O—, which may exist as a salt form, and may be indicated as * if the phosphorothioate is not chirally controlled; or *S, S, or Sp, if the phosphorothioate is chirally controlled and has an Sp configuration, or *R, R, or Rp, if the phosphorothioate is chirally controlled and has an Rp configuration) as indicated at the —CH₂— connecting site. If no Mod is present, L001 is connected to —H through —NH—;

### L003:

[chemical structure]

linker. In some embodiments, it is connected to Mod, if any (if no Mod, —H), through its amino group, and the 5′-end or 3′-end of an oligonucleotide chain e.g., via a linkage (e.g., a phosphate linkage (O or PO) or a phosphorothioate linkage (can be either not chirally controlled or chirally controlled (Sp or Rp)));
L004: linker having the structure of —NH(CH₂)₄CH(CH₂OH)CH₂—, wherein —NH— is connected to Mod (through —C(O)—) or —H, and the —CH₂— connecting site is connected to an oligonucleotide chain (e.g., at the 3′-end) through a linkage, e.g., phosphodiester (—O—P(O)(OH)—O—, which may exist as a salt form, and may be indicated as O or PO), phosphorothioate (—O—P(O)(SH)—O—, which may exist as a salt form, and may be indicated as * if the phosphorothioate is not chirally controlled; or *S, S, or Sp, if the phosphorothioate is chirally controlled and has an Sp configuration, or *R, R, or Rp, if the phosphorothioate is chirally controlled and has an Rp configuration), or phosphorodithioate (—O—P(S)(SH)—O—, which may exist as a salt form, and may be indicated as PS2 or: or D) linkage. For example, an asterisk immediately preceding a L004 (e.g., *L004) indicates that the linkage is a phosphorothioate linkage, and the absence of an asterisk immediately preceding L004 indicates that the linkage is a phosphodiester linkage. For example, in an oligonucleotide which terminates in . . . mAL004, the linker L004 is connected (via the —CH₂— site) through a phosphodiester linkage to the 3′ position of the 3′-terminal sugar (which is 2′-OMe modified and connected to the nucleobase A), and the L004 linker is connected via —NH— to —H. Similarly, in one or more oligonucleotides, the L004 linker is connected (via the —CH₂— site) through the phosphodiester linkage to the 3′ position of the 3′-terminal sugar, and the L004 is connected via —NH— to, e.g., Mod012, Mod085, Mod086, etc.;
L008: linker having the structure of —C(O)—(CH₂)₉—, wherein —C(O)— is connected to Mod (through —NH—) or —OH (if no Mod indicated), and the —CH₂— connecting site is connected to an oligonucleotide chain (e.g., at the 5′-end) through a linkage, e.g., phosphodiester (—O—P(O)(OH)—O—, which may exist as a salt form, and may be indicated as O or PO), phosphorothioate (—O—P(O)(SH)—O—, which may exist as a salt form, and may be indicated as * if the phosphorothioate is not chirally controlled; or *S, S, or Sp, if the phosphorothioate is chirally controlled and has an Sp configuration, or *R, R, or Rp, if the phosphorothioate is chirally controlled and has an Rp configuration), or phosphorodithioate (—O—P(S)(SH)—O—, which may exist as a salt form, and may be indicated as PS2 or: or D) linkage. For example, in an example oligonucleotide which has the sequence of 5′-L008 mN*mN*mN*mN*N*N*N*N*N*N*N*N*N*N*mN*mN*mN*mN-3′, and which has a Stereochemistry/Linkage of OXXXXXXXXX XXXXXXXX, wherein N is a base, wherein O is a natural phosphate internucleotidic linkage, and wherein X is a stereorandom phosphorothioate, L008 is connected to —OH through —C(O)—, and the 5′-end of an oligonucleotide chain through a phosphate linkage (indicated as “O” in “Stereochemistry/Linkage”); in another example oligonucleotide, which has the sequence of 5′-Mod062L008 mN*mN*mN*mN*N*N*N*N*N*N*N*N*N*N*mN*mN*mN*mN-3′, and which has a Stereochemistry/Linkage of OXXXXXXXXX XXXXXXXX, wherein N is a base, L008 is connected to Mod062 through —C(O)—, and the 5′-end of an oligonucleotide chain through a phosphate linkage (indicated as “O” in “Stereochemistry/Linkage”);
L009: —CH₂CH₂CH₂—. In some embodiments, when L009 is present at the 5′-end of an oligonucleotide without a Mod, one end of L009 is connected to —OH and the other end connected to a 5′-carbon of the oligonucleotide chain e.g., via a linkage (e.g., a phosphate linkage (O or PO) or a phosphorothioate linkage (can be either not chirally controlled or chirally controlled (Sp or Rp)));

### L010:

[chemical structure]

L010 connects to other moieties, e.g., L023, L010, oligonucleotide chains, etc., through various linkages (e.g., n001; if not indicated, typically phosphates). When no other moieties are present, L010 is bonded to —OH. For example in WV-39202, L010 is utilized with n001R to form L010n001R, which has the structure of

[chemical structure]

and wherein the configuration of linkage phosphorus is Rp. In some embodiments, multiple L010n001R may be utilized. For example, WV-39202 comprises L023L010n001RL010n001RL010n001R, which has the following structure (which is bonded to the 5′-carbon at the 5′-end of the oligonucleotide chain, and each linkage phosphorus is independently Rp):

[chemical structure]

Mod012 (in some embodiments, —C(O)— connects to —NH— of a linker such as L001, L004, L008, etc.):

[chemical structure]

Mod039 (in some embodiments, —C(O)— connects to —NH— of a linker such as L001, L003, L004, L008, L009, L110, etc.):

[chemical structure]

Mod062 (in some embodiments, —C(O)— connects to —NH— of a linker such as L001, L003, L004, L008, L009, L110, etc.):

[chemical structure]

Mod085 (in some embodiments, —C(O)— connects to —NH— of a linker such as L001, L003, L004, L008, L009, L110, etc.):

[chemical structure]

Mod086 (in some embodiments, —C(O)— connects to —NH— of a linker such as L001, L003, L004, L008, L009, L110, etc.):

[chemical structure]

Mod094 (in some embodiments, connects to an internucleotidic linkage, or to the 5′-end or 3′-end of an oligonucleotide via a linkage, e.g., a phosphate linkage, a phosphorothioate linkage (which is optionally chirally controlled), etc. For example, in an example oligonucleotide which has the sequence of 5′-mN*mN*mN*mN*N*N*N*N*N*N*N*N*N*N*mN*mN*mN*mNMod 094-3′, and which has a Stereochemistry/Linkage of XXXXX XXXXX XXXXX XXO, wherein N is a base, Mod094 is connected to the 3′-end of the oligonucleotide chain (3′-carbon of the 3′-end sugar) through a phosphate group (which is not shown below and which may exist as a salt form; and which is indicated as “O” in “Stereochemistry/Linkage” ( . . . XXXXO))):

[chemical structure]

[1191] In some embodiments, an additional chemical moiety (e.g., a linker, lipid, solubilizing group, conjugate group, targeting group, and/or targeting ligand) is one described in WO 2012/030683 or WO 2021/030778. In some embodiments, a provided oligonucleotide comprise a chemical structure (e.g., a linker, lipid, solubilizing group, and/or targeting ligand) described in WO 2012/030683, WO 2021/030778, WO 2019112485, US 20170362270, WO 2018156056, or WO 2018056871, WO 2021/030778, WO 2020/154344, WO 2020/154343, WO 2020/154342, WO 2020/165077, WO 2020/201406, WO 2020/216637, or WO 2020/252376.

[1192] In some embodiments, a provide oligonucleotide comprises an additional chemical moiety (e.g., a targeting group, a conjugate group, etc.) and/or a modification (e.g., of nucleobase, sugar, internucleotidic linkage, etc.) described in: U.S. Pat. No. 5,688,941; 6,294,664; 6,320,017; 6,576,752; 5,258,506; 5,591,584; 4,958,013; 5,082,830; 5,118,802; 5,138,045; 6,783,931; 5,254,469; 5,414,077; 5,486,603; 5,112,963; 5,599,928; 6,900,297; 5,214,136; 5,109,124; 5,512,439; 4,667,025; 5,525,465; 5,514,785; 5,565,552; 5,541,313; 5,545,730; 4,835,263; 4,876,335; 5,578,717; 5,580,731; 5,451,463; 5,510,475; 4,904,582; 5,082,830; 4,762,779; 4,789,737; 4,824,941; 4,828,979; 5,595,726; 5,214,136; 5,245,022; 5,317,098; 5,371,241; 5,391,723; 4,948,882; 5,218,105; 5,112,963; 5,567,810; 5,574,142; 5,578,718; 5,608,046; 4,587,044; 4,605,735; 5,585,481; 5,292,873; 5,552,538; 5,512,667; 5,597,696; 5,599,923; 7,037,646; 5,587,371; 5,416,203; 5,262,536; 5,272,250; or 8,106,022.

[1193] In some embodiments, an additional chemical moiety, e.g., a Mod, is connected via a linker. Various linkers are available in the art and may be utilized in accordance with the present disclosure, for example, those utilized for conjugation of various moieties with proteins (e.g., with antibodies to form antibody-drug conjugates), nucleic acids, etc. Certain useful linkers are described in U.S. Pat. No. 9,982,257, US 20170037399, US 20180216108, US 20180216107, U.S. Pat. No. 9,598,458, WO 2017/062862, WO 2018/067973, WO 2017/160741, WO 2017/192679, WO 2017/210647, WO 2018/098264, WO 2018/223056, WO 2018/237194, WO 2019/032607, WO 2019/055951, WO 2019/075357, WO 2019/200185, WO 2019/217784, WO 2019/032612, WO 2020/191252, and/or WO 2021/071858, the linker moieties of each which are independently incorporated herein by reference. In some embodiments, a linker is, as non-limiting examples, L001, L004, L009 or L010. In some embodiments, an oligonucleotide comprises a linker, but not an additional chemical moiety other than the linker. In some embodiments, an oligonucleotide comprises a linker, but not an additional chemical moiety other than the linker, wherein the linker is L001, L004, L009, or L010. In some embodiments, a linker is or comprises a moiety having the structure of an internucleotidic linkage as described herein. In some embodiments, such a moiety in a linker does not connect two nucleosides. In some embodiments, a linker has the structure of L. In some embodiments, a linker is bivalent. In some embodiments, a linker is polyvalent. In some embodiments, a linker can connect two or more additional chemical moieties to an oligonucleotide chain as described herein. For example, some embodiments, one or two or three or more additional chemical moieties, e.g., GalNAc moieties, are connected to an oligonucleotide chain (e.g., at 5′-end) through a multivalent linker moiety.

[1194] In some embodiments, an additional chemical moiety is cleaved from the remainder of an oligonucleotide, e.g., an oligonucleotide chain, e.g., after administration to a system, cell, tissue, organ, subject, etc. In some embodiments, additional chemical moieties promote, increase, and/or accelerate delivery to certain cells, and after delivery of oligonucleotides into such cells, additional chemical moieties are cleaved from oligonucleotides. In some embodiments, linker moieties comprise one or more cleavable moieties that can be cleaved at desirable locations (e.g., within certain type of cells, subcellular compartments such as lysosomes, etc.) and/or timing. In some embodiments, a cleavable moiety is selectively cleaved by a polypeptide, e.g., an enzyme such as a nuclease. Many useful cleavable moieties and cleavable linkers are reported and can be utilized in accordance with the present disclosure. In some embodiments, a cleavable moiety is or comprises one or more functional groups selected from amide, ester, ether, phosphodiester, disulfide, carbamate, etc. In some embodiments, a linker is as described in WO 2012/030683, WO 2021/030778, WO 2020/154344, WO 2020/154343, WO 2020/154342, WO 2020/165077, WO 2020/201406, WO 2020/216637, or WO 2020/252376.

[1195] As demonstrated herein, provided technologies can provide high levels of activities and/or desired properties, in some embodiments, without utilizing particular structural elements (e.g., modifications, linkage configurations and/or patterns, etc.) reported to be desired and/or necessary (e.g., those reported in WO 2019/219581), though certain such structural elements may be incorporated into oligonucleotides in combination with various other structural elements in accordance with the present disclosure. For example, in some embodiments, oligonucleotides of the present disclosure have fewer nucleosides 3′ to a nucleoside opposite to a target nucleoside (e.g., a target adenosine), contain one or more phosphorothioate internucleotidic linkages at one or more positions where a phosphorothioate internucleotidic linkage was reportedly not favored or not allowed, contain one or more Sp phosphorothioate internucleotidic linkages at one or more positions where a Sp phosphorothioate internucleotidic linkage was reportedly not favored or not allowed, contain one or more Rp phosphorothioate internucleotidic linkages at one or more positions where a Rp phosphorothioate internucleotidic linkage was reportedly not favored or not allowed, and/or contain different modifications (e.g., internucleotidic linkage modifications, sugar modifications, etc.) and/or stereochemistry at one or more locations compared to those reportedly favorable or required for certain oligonucleotide properties and/or activities (e.g., presence of 2′-MOE, absence of phosphorothioate linkages at certain positions, absence of Sp phosphorothioate linkages at certain positions, and/or absence of Rp phosphorothioate linkages at certain positions were reportedly favorable or required for certain oligonucleotide properties and/or activities; as demonstrated herein, provided technologies can provide desired properties and/or high activities without utilizing 2′-MOE, without avoiding phosphorothioate linkages at one or more such certain positions, without avoiding Sp phosphorothioate linkages at one or more such certain positions, and/or without avoiding Rp phosphorothioate linkages at one or more such certain positions). Additionally or alternatively, provided oligonucleotides incorporates structural elements that were not previously recognized such as utilization of certain modifications (e.g., base modifications, sugar modifications (e.g., 2′-F), linkage modifications (e.g., non-negatively charged internucleotidic linkages), additional moieties, etc.) and levels, patterns, and combinations thereof.

[1196] For example, in some embodiments, as described herein, provided oligonucleotides contain no more than 5, 6, 7, 8, 9, 10, 11 or 12 nucleosides 3′ to a nucleoside opposite to a target nucleoside (e.g., a target adenosine).

[1197] Alternatively or additionally, as described herein (e.g., illustrated in certain Examples), for structural elements 3′ to a nucleoside opposite to a target nucleoside (e.g., a target adenosine), in some embodiments, about 50%-100% (e.g., about or at least about 50%, 55%, 60%, 65%, 70%, 75%, 80%, 85%, 90%, 95%) of internucleotidic linkages 3′ to a nucleoside opposite to a target nucleoside (e.g., a target adenosine) are each independently a modified internucleotidic linkage, which is optionally chirally controlled. In some embodiments, no more than 1, 2, or 3 internucleotidic linkages 3′ to a nucleoside opposite to a target nucleoside are natural phosphate linkages. In some embodiments, no such internucleotidic linkage is natural phosphate linkages. In some embodiments, no more than 1 such internucleotidic linkage is natural phosphate linkages. In some embodiments, no more than 2 such internucleotidic linkages are natural phosphate linkages. In some embodiments, no more than 3 such internucleotidic linkages are natural phosphate linkages. In some embodiments, each modified internucleotidic linkage is independently a phosphorothioate or a non-negatively charged internucleotidic linkage (e.g., n001). In some embodiments, each phosphorothioate internucleotidic linkage is chirally controlled. In some embodiments, no more than 1, 2, or 3 internucleotidic linkages 3′ to a nucleoside opposite to a target nucleoside are Rp phosphorothioate internucleotidic linkage. In some embodiments, an internucleotidic linkage bonded to a nucleoside opposite to a target nucleoside at the 3′-position of its sugar (considered a −1 position) is a Rp phosphorothioate internucleotidic linkage. In some embodiments, it is the only Rp phosphorothioate internucleotidic linkage 3′ to a nucleoside opposite to a target nucleoside. In some embodiments, an internucleotidic linkage at position −3 relative to a nucleoside opposite to a target nucleoside (e.g., for . . . N₀N₋₁N₋₂N₋₃ . . . , the internucleotidic linkage linking N₋₂ and N₋₃ wherein N₀ is a nucleoside opposite to a target nucleoside) is not a Rp phosphorothioate internucleotidic linkage. In some embodiments, an internucleotidic linkage at position −6 relative to a nucleoside opposite to a target nucleoside is not a Rp phosphorothioate internucleotidic linkage. In some embodiments, an internucleotidic linkage at position −4 and/or −5 relative to a nucleoside opposite to a target nucleoside is independently a modified internucleotidic linkage, e.g., a phosphorothioate internucleotidic linkage, or is independently a Rp phosphorothioate internucleotidic linkage. In some embodiments, one or more or all internucleotidic linkages at positions −1, −3, −4, −5, and −6 are each independently a Sp internucleotidic linkage. In some embodiments, one or more or all internucleotidic linkages at positions −1, −3, −4, −5, and −6 are each independently a Sp phosphorothioate internucleotidic linkage. In some embodiments, internucleotidic linkage(s) at position(s) −4 and/or −5 are each independently a Rp internucleotidic linkage. In some embodiments, internucleotidic linkage(s) at position(s) −4 and/or −5 are each independently a Rp phosphorothioate internucleotidic linkage. In many embodiments, no more than 1, 2, 3, 4, or 5 internucleotidic linkages are Rp phosphorothioate internucleotidic linkage.

[1198] Alternatively or additionally, as described herein (e.g., illustrated in certain Examples), in some embodiments, about 50%-100% (e.g., about or at least about 50%, 55%, 60%, 65%, 70%, 75%, 80%, 85%, 90%, or 95%) of internucleotidic linkages 5′ to a nucleoside opposite to a target nucleoside (e.g., a target adenosine) are each independently a modified internucleotidic linkage, which is optionally chirally controlled. In some embodiments, no or no more than 1, 2, or 3 internucleotidic linkages 5′ to a nucleoside opposite to a target nucleoside (e.g., a target adenosine) are not modified internucleotidic linkages. In some embodiments, no or no more than 1, 2, or 3 internucleotidic linkages 5′ to a nucleoside opposite to a target nucleoside (e.g., a target adenosine) are not phosphorothioate internucleotidic linkages. In some embodiments, no or no more than 1, 2, or 3 internucleotidic linkages 5′ to a nucleoside opposite to a target nucleoside (e.g., a target adenosine) are not Sp phosphorothioate internucleotidic linkages. In some embodiments, no more than 1, 2, or 3 internucleotidic linkages 5′ to a nucleoside opposite to a target nucleoside (e.g., a target adenosine) are natural phosphate linkages. In some embodiments, no such internucleotidic linkage is natural phosphate linkages. In some embodiments, no more than 1 such internucleotidic linkage is natural phosphate linkages. In some embodiments, no more than 2 such internucleotidic linkages are natural phosphate linkages. In some embodiments, no more than 3 such internucleotidic linkages are natural phosphate linkages. In some embodiments, each modified internucleotidic linkage is independently a phosphorothioate or a non-negatively charged internucleotidic linkage (e.g., n001). In some embodiments, there are no 2, 3, or 4 consecutive internucleotidic linkages 5′ to a nucleoside opposite to a target nucleoside, each of which is not a phosphorothioate internucleotidic linkage. In some embodiments, there are no 2, 3, or 4 consecutive internucleotidic linkages 5′ to a nucleoside opposite to a target nucleoside, each of which is chirally controlled and is not a Sp phosphorothioate internucleotidic linkage. In some embodiments, no or no more than 1, 2, 3, 4, or 5 internucleotidic linkages 5′ to a nucleoside opposite to a target nucleoside (e.g., a target adenosine) are Rp phosphorothioate internucleotidic linkage. In some embodiments, an internucleotidic linkage bonded to a nucleoside opposite to a target nucleoside at the 5′-position of its sugar (considered a +1 position) is a Rp phosphorothioate internucleotidic linkage. In some embodiments, it is the only Rp phosphorothioate internucleotidic linkage 3′ to a nucleoside opposite to a target nucleoside. In some embodiments, an internucleotidic linkage at position +5 relative to a nucleoside opposite to a target nucleoside (e.g., for . . . N₊₅N₊₄N₊₃N₊₂N₊₁N₀ . . . , the internucleotidic linkage linking N₊₄ and N₊₅ wherein N₀ is a nucleoside opposite to a target nucleoside) is not a Rp phosphorothioate internucleotidic linkage. In some embodiments, an internucleotidic linkage at positions +11 is not a Sp phosphorothioate internucleotidic linkage. In some embodiments, one or more or all internucleotidic linkages at positions +6 to +8 relative to a nucleoside opposite to a target nucleoside are each independently a modified internucleotidic linkage, optionally chirally controlled. In some embodiments, each of them is independently a phosphorothioate internucleotidic linkage. In some embodiments, each of them is independently a Sp phosphorothioate internucleotidic linkage. In some embodiments, one or more or all internucleotidic linkages at positions +6 to +8 relative to a nucleoside opposite to a target nucleoside are each independently a phosphorothioate internucleotidic linkage, optionally chirally controlled. In some embodiments, one or more or all internucleotidic linkages at positions +6, +7, +8, +9, and +11 are each independently Rp internucleotidic linkages. In some embodiments, one or more or all internucleotidic linkages at positions +6, +7, +8, +9, and +11 are each independently Rp phosphorothioate internucleotidic linkages. In some embodiments, one or more or all internucleotidic linkages at positions +5, +6, +7, +8, and +9 relative to a nucleoside opposite to a target adenosine are each independently Sp internucleotidic linkages. In some embodiments, one or more or all internucleotidic linkages at positions +5, +6, +7, +8, and +9 relative to a nucleoside opposite to a target adenosine are each independently Sp phosphorothioate internucleotidic linkages. In some embodiments, an internucleotidic linkage at position +5 is a Sp internucleotidic linkage. In some embodiments, an internucleotidic linkage at position +5 is a Sp phosphorothioate internucleotidic linkage. In some embodiments, an internucleotidic linkage at position +6 is a Sp internucleotidic linkage. In some embodiments, an internucleotidic linkage at position +6 is a Sp phosphorothioate internucleotidic linkage. In some embodiments, an internucleotidic linkage at position +7 is a Sp internucleotidic linkage. In some embodiments, an internucleotidic linkage at position +7 is a Sp phosphorothioate internucleotidic linkage. In some embodiments, an internucleotidic linkage at position +8 is a Sp internucleotidic linkage. In some embodiments, an internucleotidic linkage at position +8 is a Sp phosphorothioate internucleotidic linkage. In some embodiments, an internucleotidic linkage at position +9 is a Sp internucleotidic linkage. In some embodiments, an internucleotidic linkage at position +9 is a Sp phosphorothioate internucleotidic linkage. In some embodiments, at least about 1, 2, 3, 4, 5, 6, 7, 8, 9, or 10, or about 1, 2, 3, 4, 5, 6, 7, 8, 9, 10, 11, 12, 13, 14, 15, 16, 18, 19, 20, 21, 22, 23, 24, 25, 26, 27, 28, 29, 30, 31, or 32, or about 50%-100% (e.g., about or at least about 50%, 55%, 60%, 65%, 70%, 75%, 80%, 85%, 90%, or 95%) of internucleotidic linkages 5′ to a nucleoside opposite to a target nucleoside (e.g., a target adenosine) are each independently chirally controlled and a Sp internucleotidic linkage. In some embodiments, at least about 1, 2, 3, 4, 5, 6, 7, 8, 9, or 10, or about 1, 2, 3, 4, 5, 6, 7, 8, 9, 10, 11, 12, 13, 14, 15, 16, 18, 19, 20, 21, 22, 23, 24, 25, 26, 27, 28, 29, 30, 31, or 32, or about 50%-100% (e.g., about or at least about 50%, 55%, 60%, 65%, 70%, 75%, 80%, 85%, 90%, or 95%) of phosphorothioate internucleotidic linkages 5′ to a nucleoside opposite to a target nucleoside (e.g., a target adenosine) are each independently chirally controlled and are Sp. In some embodiments, each phosphorothioate internucleotidic linkages 5′ to a nucleoside opposite to a target nucleoside (e.g., a target adenosine) is chirally controlled. In some embodiments, each phosphorothioate internucleotidic linkages 5′ to a nucleoside opposite to a target nucleoside (e.g., a target adenosine) is Sp.

[1199] Alternatively or additionally, as described herein (e.g., illustrated in certain Examples), in some embodiments, about 5%-90%, about 10-80%, about 10-75%, about 10-70%, 10%-60%, 10-50%, 10-40%, 10-30%, 15-40%, 20-30%, 25-30%, or about or at least about 5%, 10%, 15%, 20%, 25%, 30%, 35%, 40%, 45%, or 50%, of all internucleotidic linkages in an oligonucleotide are independently a natural phosphate linkage. In some embodiments, about 5%-90%, about 10-80%, about 10-75%, about 10-70%, 10%-60%, 10-50%, 10-40%, 10-30%, 15-40%, 20-30%, 25-30%, or about or at least about 5%, 10%, 15%, 20%, 25%, 30%, 35%, 40%, 45%, or 50%, of all internucleotidic linkages 5′ to a nucleoside opposite to a target nucleoside (e.g., a target adenosine) are independently a natural phosphate linkage. In some embodiments, one or more, e.g., about 1-15, 1-10, 1-9, 1-8, 1-7, 1-6, 1-5, 5-6, 5-7, 5-8, 5-9, 5-10, or about or at least about 1, 2, 3, 4, 5, 6, 7, 8, 9, or 10, internucleotidic linkages in an oligonucleotide are independently a natural phosphate linkage. In some embodiments, one or more, e.g., about 1-15, 1-10, 1-9, 1-8, 1-7, 1-6, 1-5, 5-6, 5-7, 5-8, 5-9, 5-10, or about or at least about 1, 2, 3, 4, 5, 6, 7, 8, 9, or 10, internucleotidic linkages 5′ to a nucleoside opposite to a target nucleoside (e.g., a target adenosine) are independently a natural phosphate linkage. In some embodiments, one or more internucleotidic linkages at one or more of positions +3 (between N₊₄N₊₃), +4, +6, +8, +9, +12, +14, +15, +17, and +18 are independently a natural phosphate linkage. In some embodiments, there are 4 natural phosphate linkages 5′ to a nucleoside opposite to a target nucleoside. In some embodiments, there are 5 natural phosphate linkages 5′ to a nucleoside opposite to a target nucleoside. In some embodiments, there are 6 natural phosphate linkages 5′ to a nucleoside opposite to a target nucleoside. In some embodiments, there are 7 natural phosphate linkages 5′ to a nucleoside opposite to a target nucleoside. In some embodiments, there are 8 natural phosphate linkages 5′ to a nucleoside opposite to a target nucleoside. In some embodiments, there are 9 natural phosphate linkages 5′ to a nucleoside opposite to a target nucleoside. In some embodiments, there are 10 natural phosphate linkages 5′ to a nucleoside opposite to a target nucleoside. In some embodiments, one or more internucleotidic linkages 3′ to a nucleoside opposite to a target nucleoside (e.g., a target adenosine) are each independently a natural phosphate linkage. In some embodiments, there is one natural phosphate linkage 3′ to a nucleoside opposite to a target nucleoside. In some embodiments, an internucleotidic linkage at position −3 is a natural phosphate linkage.

[1200] Alternatively or additionally, as described herein (e.g., illustrated in certain Examples), in some embodiments, about 5%-90%, about 10-80%, about 10-75%, about 10-70%, 10%-60%, 10-50%, 10-40%, 10-30%, 15-40%, 20-30%, 25-30%, 30%-70%, 40-70%, 40%-65%, 40%-60%, or about or at least about 5%, 10%, 15%, 20%, 25%, 30%, 35%, 40%, 45%, 50%, 55%, 60%, or 65% of all internucleotidic linkages in an oligonucleotide are independently a phosphorothioate internucleotidic linkage. In some embodiments, about 5%-90%, about 10-80%, about 10-75%, about 10-70%, 10%-60%, 10-50%, 10-40%, 10-30%, 15-40%, 20-30%, 25-30%, 30%-70%, 40-70%, 40%-65%, 40%-60%, or about or at least about 5%, 10%, 15%, 20%, 25%, 30%, 35%, 40%, 45%, 50%, 55%, 60%, or 65% of all internucleotidic linkages 5′ to a nucleoside opposite to a target nucleoside (e.g., a target adenosine) are independently a natural phosphate linkage. In some embodiments, one or more, e.g., about 1-30, 1-25, 1-20, 1-15, 5-30, 5-25, 5-20, 5-15, 10-30, 10-25, 10-20, 10-15, or about or at least about 1, 2, 3, 4, 5, 6, 7, 8, 9, 10, 11, 12, 13, 14, 15, 16, 17, 18, 19, 20, 21, 22, 23, 24, 25, 26, 27, 28, 29 or 30, internucleotidic linkages in an oligonucleotide are independently a phosphorothioate internucleotidic linkage. In some embodiments, one or more, e.g., about 1-30, 1-25, 1-20, 1-15, 5-30, 5-25, 5-20, 5-15, 10-30, 10-25, 10-20, 10-15, or about or at least about 1, 2, 3, 4, 5, 6, 7, 8, 9, 10, 11, 12, 13, 14, 15, 16, 17, 18, 19, 20, 21, 22, 23, 24, 25, 26, 27, 28, 29 or 30, internucleotidic linkages 5′ to a nucleoside opposite to a target nucleoside (e.g., a target adenosine) are independently a phosphorothioate internucleotidic linkage. In some embodiments, one or more internucleotidic linkages at one or more of positions +1 (between N₊₁N₀), +2, +5, +6, +7, +8, +11, +14, +15, +16, +17, +19, +20, +21, and +22 are independently a phosphorothioate internucleotidic linkage. In some embodiments, there are 5 or more phosphorothioate internucleotidic linkages 5′ to a nucleoside opposite to a target nucleoside. In some embodiments, there are 10 or more phosphorothioate internucleotidic linkages 5′ to a nucleoside opposite to a target nucleoside. In some embodiments, there are 11 or more phosphorothioate internucleotidic linkages 5′ to a nucleoside opposite to a target nucleoside. In some embodiments, there are 12 or more phosphorothioate internucleotidic linkages 5′ to a nucleoside opposite to a target nucleoside. In some embodiments, there are 13 or more phosphorothioate internucleotidic linkages 5′ to a nucleoside opposite to a target nucleoside. In some embodiments, there are 14 or more phosphorothioate internucleotidic linkages 5′ to a nucleoside opposite to a target nucleoside. In some embodiments, there are 15 or more phosphorothioate internucleotidic linkages 5′ to a nucleoside opposite to a target nucleoside. In some embodiments, one or more internucleotidic linkages 3′ to a nucleoside opposite to a target nucleoside (e.g., a target adenosine) are each independently a phosphorothioate internucleotidic linkage. In some embodiments, there is one phosphorothioate internucleotidic linkage 3′ to a nucleoside opposite to a target nucleoside. In some embodiments, there are two phosphorothioate internucleotidic linkages 3′ to a nucleoside opposite to a target nucleoside. In some embodiments, there are three phosphorothioate internucleotidic linkages 3′ to a nucleoside opposite to a target nucleoside. In some embodiments, one or more or all internucleotidic linkages at positions −1, −4 and −5 are independently a phosphorothioate internucleotidic linkage. In some embodiments, each phosphorothioate internucleotidic linkage is independently chirally controlled. In some embodiments, about or at least about 80%, 85%, 90% or 95% of all phosphorothioate internucleotidic linkages are independently Sp. In some embodiments, each phosphorothioate internucleotidic linkage is independently Sp.

[1201] Alternatively or additionally, as described herein (e.g., illustrated in certain Examples), in some embodiments, about 5%-90%, about 10-80%, about 10-75%, about 10-70%, 10%-60%, 10-50%, 10-40%, 10-30%, 10%-20%, 10-15%, 15-40%, 15%-35%, 15%-30%, 15-25%, 15-20%, or about or at least about 5%, 10%, 15%, 20%, 25%, 30%, 35%, 40%, 45%, or 50%, of all internucleotidic linkages in an oligonucleotide are independently a non-negatively charged internucleotidic linkage. In some embodiments, about 5%-90%, about 10-80%, about 10-75%, about 10-70%, 10%-60%, 10-50%, 10-40%, 10-30%, 10%-20%, 10-15%, 15-40%, 15%-35%, 15%-30%, 15-25%, 15-20%, or about or at least about 5%, 10%, 15%, 20%, 25%, 30%, 35%, 40%, 45%, or 50%, of all internucleotidic linkages 5′ to a nucleoside opposite to a target nucleoside (e.g., a target adenosine) are each independently a non-negatively charged internucleotidic linkage. In some embodiments, one or more, e.g., about 1-15, 1-10, 1-9, 1-8, 1-7, 1-6, 1-5, 5-6, 5-7, 5-8, 5-9, 5-10, or about or at least about 1, 2, 3, 4, 5, 6, 7, 8, 9, or 10, internucleotidic linkages in an oligonucleotide is independently a non-negatively charged internucleotidic linkage. In some embodiments, one or more, e.g., about 1-15, 1-10, 1-9, 1-8, 1-7, 1-6, 1-5, 5-6, 5-7, 5-8, 5-9, 5-10, or about or at least about 1, 2, 3, 4, 5, 6, 7, 8, 9, or 10, internucleotidic linkages 5′ to a nucleoside opposite to a target nucleoside (e.g., a target adenosine) is independently a non-negatively charged internucleotidic linkage. In some embodiments, one or more internucleotidic linkages at one or more or all of positions +5 (between N₊₅N₊₄), +10, +13 or +23 are independently a non-negatively charged internucleotidic linkage. In some embodiments, there are 2 or more non-negatively charged internucleotidic linkages 5′ to a nucleoside opposite to a target nucleoside. In some embodiments, there are 3 or more non-negatively charged internucleotidic linkages 5′ to a nucleoside opposite to a target nucleoside. In some embodiments, there are 4 or more non-negatively charged internucleotidic linkages 5′ to a nucleoside opposite to a target nucleoside. In some embodiments, there are 5 or more non-negatively charged internucleotidic linkages 5′ to a nucleoside opposite to a target nucleoside. In some embodiments, one or more internucleotidic linkages 3′ to a nucleoside opposite to a target nucleoside (e.g., a target adenosine) are each independently a non-negatively charged internucleotidic linkage. In some embodiments, there is one non-negatively charged internucleotidic linkage 3′ to a nucleoside opposite to a target nucleoside. In some embodiments, there are two or more non-negatively charged internucleotidic linkages 3′ to a nucleoside opposite to a target nucleoside. In some embodiments, there are two non-negatively charged internucleotidic linkages 3′ to a nucleoside opposite to a target nucleoside. In some embodiments, one or both internucleotidic linkages at positions −2 and −6 are independently a non-negatively charged internucleotidic linkage. In some embodiments, a non-negatively charged internucleotidic linkage is a neutral internucleotidic linkage. In some embodiments, a non-negatively charged internucleotidic linkage is independently a neutral internucleotidic linkage. In some embodiments, a non-negatively charged internucleotidic linkage is a phosphoryl guanidine internucleotidic linkage. In some embodiments, each non-negatively charged internucleotidic linkage is independently a phosphoryl guanidine internucleotidic linkage. In some embodiments, a non-negatively charged internucleotidic linkage is n001. In some embodiments, each non-negatively charged internucleotidic linkage is independently n001. In some embodiments, a non-negatively charged internucleotidic linkage is chirally controlled. In some embodiments, each non-negatively charged internucleotidic linkage is independently chirally controlled. In some embodiments, a non-negatively charged internucleotidic linkage is Rp. In some embodiments, a non-negatively charged internucleotidic linkage is Sp. In some embodiments, each non-negatively charged internucleotidic linkage is independently Sp. In some embodiments, each n001 is independently Sp except that each n001 bonded to 3′-carbon of dI is independently Rp.

### ADAR

[1202] Among other things, provided technologies can provide modification/editing of target adenosine by converting A to I. In some embodiments, oligonucleotides and/or duplexes formed by oligonucleotides with target nucleic acids interact with proteins, e.g., ADAR proteins. In some embodiments, such proteins comprise adenosine modifying activities and can modify target adenosine in target nucleic acids, e.g., converting them to inosine.

[1203] ADAR proteins are naturally expressed proteins in various cells, tissues, organs and/or organism. It has been reported that some ADAR proteins, e.g., ADAR1 and ADAR2, can edit adenosine through deamination, converting adenosine to inosine which can provide a number of functions including being read as or similar to G during translation. Mechanism of ADAR-mediated mRNA editing (e.g., deamination) has been reported. For example, ADAR proteins are reported to catalyze conversion of adenosine to inosine on double-stranded RNA substrates with mismatches. As appreciated by those skilled in the art, inosine can be recognized as guanosine by cellular translation and/or splicing machinery. ADAR can thus be used for functional adenosine to guanosine editing of nucleic acids, e.g., pre-mRNA and mRNA substrates.

[1204] In some embodiments, the present disclosure provides oligonucleotides and compositions thereof for ADAR-mediated editing of target adenosine in target nucleic acids, e.g. RNA. ADAR-mediated RNA-editing can offer several advantages over DNA-editing, e.g., delivery is simplified as expression of recombinant proteins like Cas9 is not required. Both ADAR1 and ADAR2 are endogenous enzymes, so cellular delivery of oligonucleotides alone can be sufficient for editing. Off-target effects, if any, are transient and changes are not made to genomic DNA. Additionally, ADAR-mediated editing can be used in post-mitotic cells and it does not require an HDR-template for repair. Three vertebrate ADAR genes have been reported with common functional domains (Nishikura Nat Rev Mol Cell Biol. 2016 February; 17(2): 83-96; Nishikura Annu Rev Biochem. 2010; 79: 321-349; Thomas and Beal Bioessays. 2017 April; 39(4)). All 3 ADARs contain a dsRNA-binding domains (dsRBD), which can contact dsRNA substrates. Some ADAR1 also contains Z-DNA-binding domains. ADAR1 has been reported to expressed significantly in brain, lung, kidney, liver, and heart, etc., and may occur in two isoforms. In some embodiments, isoform p150 can be induced by interferon while isoform p110 can be constitutively expressed. In some embodiments, it can be beneficial to utilize p110 as it is reported to be ubiquitously and constitutively expressed. ADAR2 can be highly expressed, e.g. in the brain and lungs, and is reported to be exclusively localized to the nucleus. ADAR3 is reported to be catalytically inactive and expressed only in the brain. Potential differences in tissue expression can be taken into consideration when choosing a therapeutic target.

[1205] Use of oligonucleotides for RNA editing by ADAR has been reported. Among other things, the present disclosure recognizes that previously reported technologies generally suffer one or more disadvantages, such as low stability (e.g., oligonucleotides with natural RNA sugars), low editing efficiency, low editing specificity (e.g., a number of As are edited in a portion of a target nucleic acid substantially complementary to an oligonucleotide), specific structures in oligonucleotides for ADAR recognition/recruitment, exogenous proteins (e.g., those engineered to recognize oligonucleotides with specific structures and/or duplexes thereof (e.g., with target nucleic acids) for editing), etc. Additionally, previously reported technologies typically utilize stereorandom oligonucleotide compositions when oligonucleotides comprise one or more chiral linkage phosphorus of modified internucleotidic linkages.

[1206] For example, various reported oligonucleotides contain ADAR-recruiting domains. Merkle et al., Nat Biotechnol. 2019 February; 37(2):133-138 disclosed oligonucleotides comprising an imperfect 20-bp hairpin ADAR-recruiting domain that is an intramolecular stem loop to recruit endogenous human ADAR2 to edit endogenous transcript. Oligonucleotides reported in Mali et al., Nat Methods. 2019 March; 16(3):239-242 contain ADAR substrate GluR2 pre-messenger RNA sequences or MS2 hairpins in addition to specificity domains that hybridize to the target mRNA.

[1207] Certain reported editing approach utilizes exogenous or engineered proteins, e.g., those utilizing CRISPR/Cas9 system. For example, Komor et al. Nature 2016 volume 533, pages 420-424 disclosed deaminase coupled with CRISPR-Cas9 to create programmable DNA base editors. Since it engages in exogenous editing proteins, it requires the delivery of both the CRISPR/Cas9 system and the guide RNA.

[1208] Among other things, the present disclosure provides technologies comprising one or more features such as sugar modifications, base modifications, internucleotidic linkage modifications, control of stereochemistry, various patterns thereof, etc. to solve one or more or all disadvantaged suffered from prior adenosine editing technologies, for example, through providing chirally controlled oligonucleotide compositions of designed oligonucleotides described herein. For example, as demonstrated herein, ADAR-recruiting loops are optional and not required for provided technology.

[1209] As appreciated by those skilled in the art, one or more of such useful features may be utilized to improve oligonucleotides in prior technologies (e.g., those described in WO 2016097212, WO 2017220751, WO 2018041973, WO 2018134301, oligonucleotides and oligonucleotide compositions of each of which are independently incorporated by reference). In some embodiments, the present disclosure provides improvements of prior technologies by apply one or more useful features described herein to prior reported oligonucleotide base sequences. In some embodiments, the present disclosure provides chirally controlled oligonucleotide compositions of previously reported oligonucleotides that may be useful for adenosine editing. In some embodiments, the present disclosure provides improvements of previously reported adenosine editing using stereorandom oligonucleotide compositions by performing such editing using chirally controlled oligonucleotide compositions.

[1210] As reported, ADAR proteins may have various isoforms. For example, ADAR1 has, among others, a reported p110 isoform and a reported p150 isoform. In some embodiments, it was observed that certain chirally controlled oligonucleotide compositions can provide high levels of adenosine modification (e.g., conversion of A to I) with multiple isoforms, in some embodiments, both p110 and p150 isoforms, while stereorandom compositions provide low levels of adenosine modification for one or more isoforms (e.g., p110). In some embodiments, chirally controlled oligonucleotide composition are particularly useful for adenosine modification in systems (e.g., cells, tissues, organs, organisms, subjects, etc.) expressing or comprising the p110 isoform of ADAR1, particularly those expressing or comprising high levels of the p110 isoform of ADAR1 relative to the p150 isoform, or those expressing no or low levels of ADAR1 p150.

[1211] In some embodiments, the present disclosure provides Cis-acting (CisA) oligonucleotide that do not require stem loop in the structure. In some embodiments, a provided oligonucleotide can form a dsRNA structure with a target mRNA through base pairing. In some embodiments, formed dsRNA structures (optionally with secondary mismatches) contain bulges that promote ADAR binding and therefore, can facilitate ADAR-mediated editing (e.g., deamination of a target adenosine). In some embodiments, oligonucleotides of the present disclosure are shorter than LSL oligonucleotides or CSL oligonucleotides, e.g., no more than or about 32 nt, no more than or about 31 nt, no more than or about 30 nt, no more than or about 29 nt, no more than or about 28 nt, no more than or about 27 nt, or no more than or about 26 nt in length, and can provide high editing efficiency.

### Duplexing and Targeting Regions

[1212] In some embodiments, the present disclosure provides an oligonucleotide comprising:
[1213] a duplexing region; and
[1214] a targeting region;
   wherein:
[1215] a duplexing region is capable of forming a duplex with a nucleic acid; and
[1216] a targeting region is capable of forming a duplex with a target nucleic acid comprising a target adenosine.

[1217] In some embodiments, a duplexing region is or comprises a first domain as described herein. In some embodiments, a targeting region is or comprises a second domain as described herein.

[1218] In some embodiments, a duplexing region is capable of forming a duplex with a nucleic acid, wherein the nucleic acid is not a target nucleic acid. In some embodiments, a duplexing region forms a duplex with a target nucleic acid. In some embodiments, a duplexing region forms a duplex with a nucleic acid expressed in a system, e.g., a cell. In some embodiments, a duplexing region forms a duplex with an exogenous nucleic acid, e.g., an oligonucleotide. In some embodiments, a duplexing region forms a duplex with a nucleic acid which is or comprises a RNA portion. In some embodiments, a duplex formed can be recognized by a polypeptide such as an ADAR polypeptide, e.g., ADAR1 (p110 or p150 or both), ADAR2, etc. In some embodiments, a duplex formed can recruit a polypeptide such as an ADAR polypeptide, e.g., ADAR1 (p110 or p150 or both), ADAR2, etc. In some embodiments, a duplex formed recruit ADAR1. In some embodiments, a duplex formed recruit ADAR1 p110. In some embodiments, a duplex formed recruit ADAR1 p150. In some embodiments, a duplex formed recruit ADAR2. In some embodiments, a duplex formed recruit ADAR1 p110 and p150. In some embodiments, a duplex formed recruit ADAR1 and ADAR2. In some embodiments, a duplex formed recruit ADAR1p110, ADAR p150 and/or ADAR2. In some embodiments, a duplex formed recruit ADAR1 p110 and p150 and ADAR2.

[1219] In some embodiments, a duplexing region forms a duplex with an oligonucleotide (which oligonucleotide may be referred to as “a duplexing oligonucleotide”). In some embodiments, a duplexing oligonucleotide comprises one or more modified nucleobases, modified sugars and/or modified internucleotidic linkages. In some embodiments, an duplexing oligonucleotide comprises a duplex-forming region that is complementary to a duplexing region. As those skilled in the art appreciate, in many instances, perfect complementary is not required and one or more wobbles, bulges, mismatches, etc. may be well tolerated. For example, ADAR proteins have been reported to bind to and/or utilize as substrates both perfectly and imperfectly complementary duplexes.

[1220] Duplexing regions and/or duplexing-forming regions can be of various lengths. In some embodiments, they are at least 10 (e.g., about or at least about 10, 11, 12, 13, 14, 15, 16, 17, 18, 19, 20, 21, 22, 23, 24, 25, 26, 27, 28, 29 or 30 or more, about 10-20, 10-25, 10-30, 10-40, 10-50, 10-100, 14-20, 14-25, 14-30, 14-40, 14-50, 14-100, 15-20, 15-25, 15-30, 15-40, 15-50, 15-100, 16-20, 16-25, 16-30, 16-40, 16-50, 16-100, 17-20, 17-25, 17-30, 17-40, 17-50, 17-100, 18-20, 18-25, 18-30, 18-40, 18-50, 18-100, 19-20, 19-25, 19-30, 19-40, 19-50, 19-100, 20-25, 20-30, 20-40, 20-50, 20-100, etc.) nucleosides in length. In some embodiments, a length is about or at least about 10 nucleosides in length. In some embodiments, a length is about or at least about 11 nucleosides in length. In some embodiments, a length is about or at least about 12 nucleosides in length. In some embodiments, a length is about or at least about 13 nucleosides in length. In some embodiments, a length is about or at least about 14 nucleosides in length. In some embodiments, a length is about or at least about 15 nucleosides in length. In some embodiments, a length is about or at least about 16 nucleosides in length. In some embodiments, a length is about or at least about 17 nucleosides in length. In some embodiments, a length is about or at least about 18 nucleosides in length. In some embodiments, a length is about or at least about 19 nucleosides in length. In some embodiments, a length is about or at least about 20 nucleosides in length.

[1221] In some embodiments, a duplexing oligonucleotide consists of or consists essentially of a duplex-forming region. In some embodiments, a duplexing oligonucleotide further comprises one or more additional regions in addition to a duplex-forming region. In some embodiments, a duplexing oligonucleotide comprises a stem-loop region (e.g., as described in FIG. 35). In some embodiments, a duplexing oligonucleotide comprises or consists of a duplex-forming region and a stem-loop region. In some embodiments, a stem region is about or at least about 2, 3, 4, 5, 6, 7, 8, 9, or 10 (e.g., about or at least about 2, 3, 4, 5, 6, 7, 8, 9, 10, 11, 12, 13, 14, 15, 16, 17, 18, 19, 20, 21, 22, 23, 24, 25, 26, 27, 28, 29 or 30 or more, about 4-10, 4-15, 4-20, 4-25, 4-30, 4-40, 4-50, 5-10, 5-15, 5-20, 5-25, 5-30, 5-40, 5-50, 6-10, 6-15, 6-20, 6-25, 6-30, 6-40, 6-50, 7-10, 7-15, 7-20, 7-25, 7-30, 7-40, 7-50, 8-10, 8-15, 8-20, 8-25, 8-30, 8-40, 8-50, 9-10, 9-15, 9-20, 9-25, 9-30, 9-40, 9-50, 10-15, 10-25, 10-30, 10-40, 10-50, 10-100, etc.) nucleobase in length. In some embodiments, it is about or at least about 5 nucleobases in length. In some embodiments, it is about or at least about 6 nucleobases in length. In some embodiments, it is about or at least about 7 nucleobases in length. In some embodiments, it is about or at least about 8 nucleobases in length. In some embodiments, it is about or at least about 9 nucleobases in length. In some embodiments, it is about or at least about 10 nucleobases in length.

[1222] In some embodiments, one or more additional regions may promote, encourage, facilitate and/or contribute recruitment of and/or recognition by and/or interaction with a polypeptide, e.g., ADAR1 (p110 and/or p150) and/or ADAR2. In some embodiments, for duplexing oligonucleotides comprising one or more additional regions, shorter duplex-forming regions may be utilized compared to absence of such additional regions.

[1223] In some embodiments, a duplex structure formed by a duplex region and a duplexing oligonucleotide can recruit a polypeptide, e.g., ADAR1 (p110 and/or p150) and/or ADAR2. In some embodiments, a duplex structure is or comprises a recruiting portion as described in WO 2016/097212.

[1224] In some embodiments, a duplexing oligonucleotide comprises one or more sugar, nucleobase, and/or internucleotidic linkage modifications as described herein. In some embodiments, a duplexing oligonucleotide comprises one or more sugar modification. In some embodiments, a majority, as described herein, of, or all of, the sugars in a duplexing oligonucleotide is a modified sugar. In some embodiments, a modified sugar is a 2′-modified sugar. In some embodiments, each modified sugar is independently a 2′-modified sugar. In some embodiments, each modified sugar is independently selected from a 2′-F modified sugar, a bicyclic sugar, or a 2′-OR modified sugar wherein R is not hydrogen. In some embodiments, each modified sugar is independently selected from a 2′-F modified sugar, a bicyclic sugar, or a 2′-OR modified sugar wherein R is optionally substituted C₁₋₆ aliphatic. In some embodiments, each modified sugar is independently selected from a 2′-F modified sugar or a 2′-OR modified sugar wherein R is optionally substituted C₁₋₆ aliphatic. In some embodiments, each 2′-OR modified sugar is independently a 2′-OMe or a 2′-MOE modified sugar. In some embodiments, each 2′-OR modified sugar is independently a 2′-OMe modified sugar. In some embodiments, each 2′-OR modified sugar is independently a 2′-MOE modified sugar. In some embodiments, each 2′-OR modified sugar is independently a 2′-F modified sugar. In some embodiments, a duplexing oligonucleotide comprises one or more modified internucleotidic linkages, e.g., phosphorothioate internucleotidic linkages. In some embodiments, a majority, as described herein, of or all of internucleotidic linkages of a duplexing oligonucleotide are independently modified internucleotidic linkages. In some embodiments, each internucleotidic linkage of a duplexing oligonucleotide is independently a modified internucleotidic linkage. In some embodiments, a modified internucleotidic linkage is a phosphorothioate internucleotidic linkage. In some embodiments, a modified internucleotidic linkage is a non-negatively charged internucleotidic linkage. In some embodiments, a modified internucleotidic linkage is a neutral internucleotidic linkage. In some embodiments, a modified internucleotidic linkage is a phosphoryl guanidine internucleotidic linkage. In some embodiments, a modified internucleotidic linkage is n001. In some embodiments, each modified internucleotidic linkage is a phosphorothioate internucleotidic linkage. In some embodiments, each internucleotidic linkage is a phosphorothioate internucleotidic linkage. In some embodiments, a phosphorothioate internucleotidic linkage is chirally controlled. In some embodiments, a phosphorothioate internucleotidic linkage is not chirally controlled. In some embodiments, a majority, as described herein, of, or all of, chirally controlled phosphorothioate internucleotidic linkages are independently Sp. In some embodiments, all phosphorothioate internucleotidic linkages are Sp. In some embodiments, a duplexing oligonucleotide comprises one or more (e.g., 1, 2, 3, 4, 5, 6, 7, 8, 9, 10, 11, 12, 13, 14, 15, 16, 17, 18, 19 or 20 or more) natural phosphate linkages. In some embodiments, when an oligonucleotide comprises one or more natural phosphate linkages, one or several internucleotidic linkages at the 5′ and/or 3′ end are independently modified internucleotidic linkages as described herein. In some embodiments, several internucleotidic linkages at both the 5′ and 3′ ends are independently modified internucleotidic linkages. In some embodiments, one or more (e.g., 1, 2, 3, 4, 5, 6, 7, 8, 9, 10, 2-20, 2-10, 2-5, 3-5, etc.) internucleotidic linkages at the 5′ end are modified internucleotidic linkages as described herein, e.g., phosphorothioate internucleotidic linkages. In some embodiments, one or more (e.g., 1, 2, 3, 4, 5, 6, 7, 8, 9, 10, 2-20, 2-10, 2-5, 3-5, etc.) internucleotidic linkages at the 3′ end are modified internucleotidic linkages as described herein, e.g., phosphorothioate internucleotidic linkages. In some embodiments, increasing the number of modified internucleotidic linkages, e.g., phosphorothioate internucleotidic linkages, etc., can increase editing efficiency, e.g., when more natural DNA/RNA sugars, 2′-F modified sugars, etc., are bonded to modified internucleotidic linkages such as phosphorothioate internucleotidic linkages.

[1225] In some embodiments, a duplexing region comprises one or more sugar, nucleobase and/or internucleotidic linkage modifications as described herein. In some embodiments, a duplexing region comprises one or more (e.g., 1-30, 1-20, 1-10, 1, 2, 3, 4, 5, 6, 7, 8, 9, 10, 11, 12, 13, 14, 15, 16, 17, 18, 19, 20 or more, etc.) modified sugars as described herein. In some embodiments, a majority, as described herein, of or all of sugars in a duplexing region are each independently a modified sugar as described herein. In some embodiments, a modified sugar is a 2′-modified sugar. In some embodiments, each modified sugar is independently a 2′-modified sugar. In some embodiments, each modified sugar is independently selected from a 2′-F modified sugar, a bicyclic sugar, or a 2′-OR modified sugar wherein R is not hydrogen. In some embodiments, each modified sugar is independently selected from a 2′-F modified sugar, a bicyclic sugar, or a 2′-OR modified sugar wherein R is optionally substituted C₁₋₆ aliphatic. In some embodiments, each modified sugar is independently selected from a 2′-F modified sugar or a 2′-OR modified sugar wherein R is optionally substituted C₁₋₆ aliphatic. In some embodiments, each 2′-OR modified sugar is independently a 2′-OMe or a 2′-MOE modified sugar. In some embodiments, each 2′-OR modified sugar is independently a 2′-OMe modified sugar. In some embodiments, each 2′-OR modified sugar is independently a 2′-MOE modified sugar. In some embodiments, each 2′-OR modified sugar is independently a 2′-F modified sugar. In some embodiments, about 50%-100%, 60%-100%, 70%-100%, 50%-90%, 50%-80%, 60%-90%, 60%-80%, 70%-90%, 70%-80%, or about or at least about 60%, 70%, 75%, 80%, 85%, 90%, 95% or more of sugars in a duplexing region are each independently a 2′-F modified sugar. In some embodiments, as described herein, one or more sugars at an end of an oligonucleotide is independently a modified sugar. In some embodiments, as described herein, one or more sugars at an end of an oligonucleotide is independently a bicyclic sugar or a 2′-OR modified sugar wherein R is C₁₋₆ aliphatic. In some embodiments, as described herein, one or more (e.g., 1, 2, 3, 4, 5, 6, 7, 8, 9, 10, 2-20, 2-10, 2-5, 3-5, etc.) sugars at an end of an oligonucleotide are each independently a 2′-OR modified sugar wherein R is C₁₋₆ aliphatic. In some embodiments, one or more (e.g., 1, 2, 3, 4, 5, 6, 7, 8, 9, 10, 2-20, 2-10, 2-5, 3-5, etc.) sugars at both ends of an oligonucleotide are each independently a modified sugar; for example, in some oligonucleotides, 3 or more sugars at the 5′ end are 2′-OMe modified sugars, and 4 or more sugars at the 3′ end are 2′-OMe modified sugars. In some embodiments, a duplexing region comprises one or more (e.g., 1-30, 1-20, 1-10, 1, 2, 3, 4, 5, 6, 7, 8, 9, 10, 11, 12, 13, 14, 15, 16, 17, 18, 19, 20 or more, etc.) modified internucleotidic linkages as described herein. In some embodiments, one or more (e.g., 1, 2, 3, 4, 5, 6, 7, 8, 9, 10, 2-20, 2-10, 2-5, 3-5, etc.) internucleotidic linkages at the 5′ and/or 3′ ends of an oligonucleotide are each independently a modified internucleotidic linkage, e.g., in some embodiments, each independently selected from a non-negatively charged internucleotidic linkage, a neutral internucleotidic linkage, a phosphoryl guanidine internucleotidic linkage, n001 and a phosphorothioate internucleotidic linkage. In some embodiments, one or more (e.g., 1, 2, 3, 4, 5, 6, 7, 8, 9, 10, 2-20, 2-10, 2-5, 3-5, etc.) internucleotidic linkages at the 5′ end of an oligonucleotide are each independently a modified internucleotidic linkage, and one or more (e.g., 1, 2, 3, 4, 5, 6, 7, 8, 9, 10, 2-20, 2-10, 2-5, 3-5, etc.) internucleotidic linkages at the 3′ end of an oligonucleotide are each independently a modified internucleotidic linkage. In some embodiments, a modified internucleotidic linkage is a phosphorothioate internucleotidic linkage. In some embodiments, a modified internucleotidic linkage is a non-negatively charged internucleotidic linkage. In some embodiments, a modified internucleotidic linkage is a neutral internucleotidic linkage. In some embodiments, a modified internucleotidic linkage is a phosphoryl guanidine internucleotidic linkage. In some embodiments, a modified internucleotidic linkage is n001. In some embodiments, each modified internucleotidic linkage is a phosphorothioate internucleotidic linkage. In some embodiments, each internucleotidic linkage is a phosphorothioate internucleotidic linkage. In some embodiments, a phosphorothioate internucleotidic linkage is chirally controlled. In some embodiments, a phosphorothioate internucleotidic linkage is not chirally controlled. In some embodiments, a majority, as described herein, of, or all of, chirally controlled phosphorothioate internucleotidic linkages are independently Sp. In some embodiments, all phosphorothioate internucleotidic linkages are Sp. In some embodiments, chiral modified internucleotidic linkages, e.g., phosphorothioate internucleotidic linkages, are not chirally controlled. In some embodiments, a duplexing region comprises one or more (e.g., 1, 2, 3, 4, 5, 6, 7, 8, 9, 10, 11, 12, 13, 14, 15, 16, 17, 18, 19 or 20 or more) natural phosphate linkages. In some embodiments, when an oligonucleotide comprises one or more natural phosphate linkages, one or several internucleotidic linkages at the 5′ and/or 3′ end are independently modified internucleotidic linkages as described herein. In some embodiments, several internucleotidic linkages at both the 5′ and 3′ ends are independently modified internucleotidic linkages. In some embodiments, one or more (e.g., 1, 2, 3, 4, 5, 6, 7, 8, 9, 10, 2-20, 2-10, 2-5, 3-5, etc.) internucleotidic linkages at the 5′ end are modified internucleotidic linkages as described herein, e.g., phosphorothioate internucleotidic linkages. In some embodiments, one or more (e.g., 1, 2, 3, 4, 5, 6, 7, 8, 9, 10, 2-20, 2-10, 2-5, 3-5, etc.) internucleotidic linkages at the 3′ end are modified internucleotidic linkages as described herein, e.g., phosphorothioate internucleotidic linkages. In some embodiments, incorporation of one or more (e.g., 1, 2, 3, 4, 5, 6, 7, 8, 9, 10, 2-20, 2-10, 2-5, 3-5, etc.) natural phosphate linkages at duplexing regions increase editing efficiency. In some embodiments, a majority of internucleotidic linkages (e.g., 50%-100%, 60%-100%, 70%-100%, 50%-90%, 50%-80%, 60%-90%, 60%-80%, 70%-90%, 70%-80%, or about or at least about 60%, 70%, 75%, 80%, 85%, 90%, 95% or more) in a duplexing region are independently natural phosphate linkages. In some embodiments, except the one or more natural phosphate linkages at an end of an oligonucleotide (if any), each other internucleotidic linkage in a duplexing region is independently a natural phosphate linkage.

[1226] In some embodiments, a targeting region is or comprises an editing region as described herein. In some embodiments, a targeting region comprises 5′-N₁N₀N₋₁-3′ as described herein.

[1227] In some embodiments, a targeting region comprises one or more sugar, nucleobase and/or internucleotidic linkage modifications as described herein. In some embodiments, a targeting region comprises one or more (e.g., 1-30, 1-20, 1-10, 1, 2, 3, 4, 5, 6, 7, 8, 9, 10, 11, 12, 13, 14, 15, 16, 17, 18, 19, 20 or more, etc.) modified sugars as described herein. In some embodiments, a majority, as described herein, of or all of sugars in a targeting region are each independently a modified sugar as described herein. In some embodiments, a modified sugar is a 2′-modified sugar. In some embodiments, each modified sugar is independently a 2′-modified sugar. In some embodiments, each modified sugar is independently selected from a 2′-F modified sugar, a bicyclic sugar, or a 2′-OR modified sugar wherein R is not hydrogen. In some embodiments, each modified sugar is independently selected from a 2′-F modified sugar, a bicyclic sugar, or a 2′-OR modified sugar wherein R is optionally substituted C₁₋₆ aliphatic. In some embodiments, each modified sugar is independently selected from a 2′-F modified sugar or a 2′-OR modified sugar wherein R is optionally substituted C₁₋₆ aliphatic. In some embodiments, each 2′-OR modified sugar is independently a 2′-OMe or a 2′-MOE modified sugar. In some embodiments, each 2′-OR modified sugar is independently a 2′-OMe modified sugar. In some embodiments, each 2′-OR modified sugar is independently a 2′-MOE modified sugar. In some embodiments, each 2′-OR modified sugar is independently a 2′-F modified sugar. In some embodiments, about 50%-100%, 60%-100%, 70%-100%, 50%-90%, 50%-80%, 60%-90%, 60%-80%, 70%-90%, 70%-80%, or about or at least about 60%, 70%, 75%, 80%, 85%, 90%, 95% or more of sugars in a targeting region are each independently a bicyclic sugar or a 2′-OR modified sugar wherein R is not hydrogen. In some embodiments, about 50%-100%, 60%-100%, 70%-100%, 50%-90%, 50%-80%, 60%-90%, 60%-80%, 70%-90%, 70%-80%, or about or at least about 60%, 70%, 75%, 80%, 85%, 90%, 95% or more of sugars in a targeting region are each independently a bicyclic sugar or a 2′-OR modified sugar wherein R is optionally substituted C₁₋₆ aliphatic. In some embodiments, about 50%-100%, 60%-100%, 70%-100%, 50%-90%, 50%-80%, 60%-90%, 60%-80%, 70%-90%, 70%-80%, or about or at least about 60%, 70%, 75%, 80%, 85%, 90%, 95% or more of sugars in a targeting region are each independently a 2′-OMe or 2′-MOE modified sugar. In some embodiments, each sugar in a targeting region except the sugars in an editing region is independently a modified sugar as described herein. In some embodiments, each sugar in a targeting region except the sugars in an editing region is independently a bicyclic sugar or a 2′-OR modified sugar wherein R is optionally substituted C₁₋₆ aliphatic. In some embodiments, each sugar in a targeting region except the sugars in an editing region is independently a 2′-OR modified sugar wherein R is optionally substituted C₁₋₆ aliphatic. In some embodiments, each sugar in a targeting region except the sugars in an editing region is independently a 2′-OMe or 2′-MOE modified sugar. In some embodiments, each sugar in a targeting region except the sugars in an editing region is independently a 2′-OMe modified sugar. In some embodiments, an editing region comprises or consists of three nucleosides wherein a nucleoside opposite to a target adenosine is in the middle of the three. In some embodiments, an editing region consists of three nucleosides wherein a nucleoside opposite to a target adenosine is in the middle of the three. In some embodiments, an editing region comprising or consisting of 5′-N₁N₀N₋₁-3′. In some embodiments, as described herein, one or more (e.g., 1, 2, 3, 4, 5, 6, 7, 8, 9, 10, 2-20, 2-10, 2-5, 3-5, etc.) sugars at an end of an oligonucleotide is independently a modified sugar. In some embodiments, as described herein, one or more (e.g., 1, 2, 3, 4, 5, 6, 7, 8, 9, 10, 2-20, 2-10, 2-5, 3-5, etc.) sugars at an end of an oligonucleotide is independently a bicyclic sugar or a 2′-OR modified sugar wherein R is C₁₋₆ aliphatic. In some embodiments, as described herein, one or more (e.g., 1, 2, 3, 4, 5, 6, 7, 8, 9, 10, 2-20, 2-10, 2-5, 3-5, etc.) sugars at an end of an oligonucleotide are each independently a 2′-OR modified sugar wherein R is C₁₋₆ aliphatic. In some embodiments, one or more (e.g., 1, 2, 3, 4, 5, 6, 7, 8, 9, 10, 2-20, 2-10, 2-5, 3-5, etc.) sugars at both ends of an oligonucleotide are each independently a modified sugar; for example, in some oligonucleotides, 3 or more sugars at the 5′ end are 2′-OMe modified sugars, and 4 or more sugars at the 3′ end are 2′-OMe modified sugars. In some embodiments, a targeting region comprises one or more (e.g., 1-30, 1-20, 1-10, 1, 2, 3, 4, 5, 6, 7, 8, 9, 10, 11, 12, 13, 14, 15, 16, 17, 18, 19, 20 or more, etc.) modified internucleotidic linkages as described herein. In some embodiments, one or more (e.g., 1, 2, 3, 4, 5, 6, 7, 8, 9, 10, 2-20, 2-10, 2-5, 3-5, etc.) internucleotidic linkages at the 5′ and/or 3′ ends of an oligonucleotide are each independently a modified internucleotidic linkage, e.g., in some embodiments, each independently selected from a non-negatively charged internucleotidic linkage, a neutral internucleotidic linkage, a phosphoryl guanidine internucleotidic linkage, n001 and a phosphorothioate internucleotidic linkage. In some embodiments, one or more (e.g., 1, 2, 3, 4, 5, 6, 7, 8, 9, 10, 2-20, 2-10, 2-5, 3-5, etc.) internucleotidic linkages at the 5′ end of an oligonucleotide are each independently a modified internucleotidic linkage, and one or more (e.g., 1, 2, 3, 4, 5, 6, 7, 8, 9, 10, 2-20, 2-10, 2-5, 3-5, etc.) internucleotidic linkages at the 3′ end of an oligonucleotide are each independently a modified internucleotidic linkage. In some embodiments, a modified internucleotidic linkage is a phosphorothioate internucleotidic linkage. In some embodiments, a modified internucleotidic linkage is a non-negatively charged internucleotidic linkage. In some embodiments, a modified internucleotidic linkage is a neutral internucleotidic linkage. In some embodiments, a modified internucleotidic linkage is a phosphoryl guanidine internucleotidic linkage. In some embodiments, a modified internucleotidic linkage is n001. In some embodiments, each modified internucleotidic linkage is a phosphorothioate internucleotidic linkage. In some embodiments, each internucleotidic linkage is a phosphorothioate internucleotidic linkage. In some embodiments, a phosphorothioate internucleotidic linkage is chirally controlled. In some embodiments, a phosphorothioate internucleotidic linkage is not chirally controlled. In some embodiments, a majority, as described herein, of, or all of, chirally controlled phosphorothioate internucleotidic linkages are independently Sp. In some embodiments, all phosphorothioate internucleotidic linkages are Sp. In some embodiments, chiral modified internucleotidic linkages, e.g., phosphorothioate internucleotidic linkages, are not chirally controlled. In some embodiments, a targeting region comprises one or more (e.g., 1, 2, 3, 4, 5, 6, 7, 8, 9, 10, 11, 12, 13, 14, 15, 16, 17, 18, 19 or 20 or more) natural phosphate linkages. In some embodiments, when an oligonucleotide comprises one or more natural phosphate linkages, one or several internucleotidic linkages at the 5′ and/or 3′ end are independently modified internucleotidic linkages as described herein. In some embodiments, several internucleotidic linkages at both the 5′ and 3′ ends are independently modified internucleotidic linkages. In some embodiments, one or more (e.g., 1, 2, 3, 4, 5, 6, 7, 8, 9, 10, 2-20, 2-10, 2-5, 3-5, etc.) internucleotidic linkages at the 5′ end are modified internucleotidic linkages as described herein, e.g., phosphorothioate internucleotidic linkages. In some embodiments, one or more (e.g., 1, 2, 3, 4, 5, 6, 7, 8, 9, 10, 2-20, 2-10, 2-5, 3-5, etc.) internucleotidic linkages at the 3′ end are modified internucleotidic linkages as described herein, e.g., phosphorothioate internucleotidic linkages. In some embodiments, incorporation of one or more (e.g., 1, 2, 3, 4, 5, 6, 7, 8, 9, 10, 2-20, 2-10, 2-5, 3-5, etc.) natural phosphate linkages at targeting regions increase editing efficiency. In some embodiments, a majority of internucleotidic linkages (e.g., 50%-100%, 60%-100%, 70%-100%, 50%-90%, 50%-80%, 60%-90%, 60%-80%, 70%-90%, 70%-80%, or about or at least about 60%, 70%, 75%, 80%, 85%, 90%, 95% or more) in a targeting region are independently natural phosphate linkages. In some embodiments, except the one or more natural phosphate linkages at an end of an oligonucleotide (if any), each other internucleotidic linkage in a targeting region is independently a natural phosphate linkage.

[1228] In some embodiments, a targeting region is complementary to a sequence in a target nucleic acid. In some embodiments, a nucleic acid is or comprise RNA. In some embodiments, a nucleic acid is RNA. In some embodiments, a sequence in a target nucleic acid to which a target region is complementary to comprises a target adenosine. As those skilled in the art appreciate, full complementarity in many instances are not required, and one or more wobbles, bulges, mismatches, etc. may be present.

[1229] Targeting regions can be of various lengths. In some embodiments, a targeting region is at least 10 (e.g., about or at least about 10, 11, 12, 13, 14, 15, 16, 17, 18, 19, 20, 21, 22, 23, 24, 25, 26, 27, 28, 29 or 30 or more, about 10-20, 10-25, 10-30, 10-40, 10-50, 10-100, 14-20, 14-25, 14-30, 14-40, 14-50, 14-100, 15-20, 15-25, 15-30, 15-40, 15-50, 15-100, 16-20, 16-25, 16-30, 16-40, 16-50, 16-100, 17-20, 17-25, 17-30, 17-40, 17-50, 17-100, 18-20, 18-25, 18-30, 18-40, 18-50, 18-100, 19-20, 19-25, 19-30, 19-40, 19-50, 19-100, 20-25, 20-30, 20-40, 20-50, 20-100, etc.) nucleosides in length. In some embodiments, a length is about or at least about 10 nucleosides in length. In some embodiments, a length is about or at least about 11 nucleosides in length. In some embodiments, a length is about or at least about 12 nucleosides in length. In some embodiments, a length is about or at least about 13 nucleosides in length. In some embodiments, a length is about or at least about 14 nucleosides in length. In some embodiments, a length is about or at least about 15 nucleosides in length. In some embodiments, a length is about or at least about 16 nucleosides in length. In some embodiments, a length is about or at least about 17 nucleosides in length. In some embodiments, a length is about or at least about 18 nucleosides in length. In some embodiments, a length is about or at least about 19 nucleosides in length. In some embodiments, a length is about or at least about 20 nucleosides in length. In some embodiments, a length is about or at least about 21 nucleosides in length. In some embodiments, a length is about or at least about 22 nucleosides in length. In some embodiments, a length is about or at least about 23 nucleosides in length. In some embodiments, a length is about or at least about 24 nucleosides in length. In some embodiments, a length is about or at least about 25 nucleosides in length.

[1230] In some embodiments, an oligonucleotide comprises a targeting region and a duplexing region, wherein the targeting region is at the 3′ side of the duplexing region. In some embodiments, an oligonucleotide comprises a targeting region and a duplexing region, wherein the targeting region is at the 5′ side of the duplexing region. In some embodiments, an oligonucleotide consists of a targeting region and a duplexing region, wherein the targeting region is at the 3′ side of the duplexing region. In some embodiments, an oligonucleotide consists of a targeting region and a duplexing region, wherein the targeting region is at the 5′ side of the duplexing region. In some embodiments, an oligonucleotide comprise a targeting region, a duplexing region and a linker region between the target and duplexing regions. In some embodiments, a linker region comprises or is an oligonucleotide moiety.

[1231] In some embodiments, oligonucleotides comprising duplexing and targeting regions form complexes including duplexes with other nucleic acids e.g., duplexing oligonucleotides. In some embodiments, the present disclosure provides duplexes comprising oligonucleotides comprising duplexing and targeting regions and nucleic acids that form duplexes with duplexing regions. In some embodiments, the present disclosure provides duplexes comprising oligonucleotides comprising duplexing and targeting regions and duplexing oligonucleotides. In some embodiments, chirally controlled oligonucleotide compositions of oligonucleotides comprising duplexing and targeting regions are utilized (e.g., WV-42707). In some embodiments, non-chirally controlled oligonucleotide compositions of oligonucleotides comprising duplexing and targeting regions are utilized. In some embodiments, chirally controlled oligonucleotide compositions of duplexing oligonucleotides are utilized (e.g., WV-42724). In some embodiments, non-chirally controlled oligonucleotide compositions of duplexing oligonucleotides are utilized (e.g., WV-42721).

[1232] In some embodiments, duplexes are formed before administration. In some embodiments, oligonucleotides comprising duplexing and targeting regions and nucleic acids forming duplexes therewith (which may be referred to as “duplexing nucleic acids”) are administered separately. In some embodiments, oligonucleotides comprising duplexing and targeting regions are administered prior to, concurrently with (either in a single or multiple compositions) or subsequently to duplexing nucleic acids (e.g., various duplexing oligonucleotides described herein). In some embodiments, duplexing nucleic acids are present in and/or can be expressed in cells and thus may not need to be administered directly.

[1233] Certain oligonucleotides comprising duplexing and targeting regions and/or duplexing nucleic acids (e.g., duplexing oligonucleotides) and/or uses are described in FIG. 33, FIG. 34 and FIG. 35, etc. as examples.

[1234] In some embodiments, a target nucleic acid is or comprises RNA. In some embodiments, a target nucleic acid is or comprises mRNA. In some embodiments, a target adenosine in a target nucleic acid is edited to I.

### Production of Oligonucleotides and Compositions

[1235] Various methods can be utilized for production of oligonucleotides and compositions and can be utilized in accordance with the present disclosure. For example, traditional phosphoramidite chemistry (e.g., phosphoramidites comprising —CH₂CH₂CN and —N(i-Pr)₂) can be utilized to prepare stereorandom oligonucleotides and compositions, and certain reagents and chirally controlled technologies can be utilized to prepare chirally controlled oligonucleotide compositions, e.g., as described in U.S. Pat. No. 9,982,257, US 20170037399, US 20180216108, US 20180216107, U.S. Pat. No. 9,598,458, WO 2017/062862, WO 2018/067973, WO 2017/160741, WO 2017/192679, WO 2017/210647, WO 2018/098264, WO 2018/223056, WO 2018/237194, WO 2019/032607, WO 2019/055951, WO 2019/075357, WO 2019/200185, WO 2019/217784, WO 2019/032612, WO 2020/191252, and/or WO 2021/071858, the reagents and methods of each of which is incorporated herein by reference.

[1236] In some embodiments, chirally controlled/stereoselective preparation of oligonucleotides and compositions thereof comprise utilization of a chiral auxiliary, e.g., as part of monomers, dimers (e.g., chirally pure dimers from separation), monomeric phosphoramidites, dimeric phosphoramidites (e.g., chirally pure dimers from separation), etc. Examples of such chiral auxiliary reagents, monomers, dimers, and phosphoramidites are described in U.S. Pat. No. 9,982,257, US 20170037399, US 20180216108, US 20180216107, U.S. Pat. No. 9,598,458, WO 2017/062862, WO 2018/067973, WO 2017/160741, WO 2017/192679, WO 2017/210647, WO 2018/098264, WO 2018/223056, WO 2018/237194, WO 2019/032607, WO 2019/055951, WO 2019/075357, WO 2019/200185, WO 2019/217784, WO 2019/032612, WO 2020/191252, and/or WO 2021/071858, the chiral auxiliary reagents, monomers, dimers, and phosphoramidites of each of which are independently incorporated herein by reference. In some embodiments, a chiral auxiliary is a chiral auxiliary described in any of: WO 2018/022473, WO 2018/098264, WO 2018/223056, WO 2018/223073, WO 2018/223081, WO 2018/237194, WO 2019/032607, WO 2019/055951, WO 2019/075357, WO 2019/200185, WO 2019/217784, WO 2019/032612, WO 2020/191252, and/or WO 2021/071858, the chiral auxiliaries of each of which are independently incorporated herein by reference.

[1237] In some embodiments, chirally controlled preparation technologies, including oligonucleotide synthesis cycles, reagents and conditions are described in U.S. Pat. No. 9,982,257, US 20170037399, US 20180216108, US 20180216107, U.S. Pat. No. 9,598,458, WO 2017/062862, WO 2018/067973, WO 2017/160741, WO 2017/192679, WO 2017/210647, and/WO 2018/098264, WO 2018/022473, WO 2018/223056, WO 2018/223073, WO 2018/223081, WO 2018/237194, WO 2019/032607, WO 2019/032612, WO 2019/055951, WO 2019/075357, WO 2019/200185, WO 2019/217784, WO 2019/032612, WO 2018/223056, WO 2018/223073, WO 2018/223081, WO 2018/237194, WO 2019/032607, WO 2019/055951, WO 2019/075357, WO 2019/200185, WO 2019/217784, WO 2019/032612, WO 2020/191252, and/or WO 2021/071858, the oligonucleotide synthesis methods, cycles, reagents and conditions of each of which are independently incorporated herein by reference.

[1238] Once synthesized, provided oligonucleotides and compositions are typically further purified. Suitable purification technologies are widely known and practiced by those skilled in the art, including but not limited to those described in U.S. Pat. No. 9,982,257, US 20170037399, US 20180216108, US 20180216107, U.S. Pat. No. 9,598,458, WO 2017/062862, WO 2018/067973, WO 2017/160741, WO 2017/192679, WO 2017/210647, WO 2018/098264, WO 2018/223056, WO 2018/237194, WO 2019/032607, WO 2019/055951, WO 2019/075357, WO 2019/200185, WO 2019/217784, WO 2019/032612, WO 2020/191252, and/or WO 2021/071858, the purification technologies of each of which are independently incorporated herein by reference.

[1239] In some embodiments, a cycle comprises or consists of coupling, capping, modification and deblocking. In some embodiments, a cycle comprises or consists of coupling, capping, modification, capping and deblocking. These steps are typically performed in the order they are listed, but in some embodiments, as appreciated by those skilled in the art, the order of certain steps, e.g., capping and modification, may be altered. If desired, one or more steps may be repeated to improve conversion, yield and/or purity as those skilled in the art often perform in syntheses. For example, in some embodiments, coupling may be repeated; in some embodiments, modification (e.g., oxidation to install ═O, sulfurization to install ═S, etc.) may be repeated; in some embodiments, coupling is repeated after modification which can convert a P(III) linkage to a P(V) linkage which can be more stable under certain circumstances, and coupling is routinely followed by modification to convert newly formed P(III) linkages to P(V) linkages. In some embodiments, when steps are repeated, different conditions may be employed (e.g., concentration, temperature, reagent, time, etc.).

[1240] Technologies for formulating provided oligonucleotides and/or preparing pharmaceutical compositions, e.g., for administration to subjects via various routes, are readily available in the art and can be utilized in accordance with the present disclosure, e.g., those described in U.S. Pat. No. 9,982,257, US 20170037399, US 20180216108, US 20180216107, U.S. Pat. No. 9,598,458, WO 2017/062862, WO 2018/067973, WO 2017/160741, WO 2017/192679, WO 2017/210647, WO 2018/098264, WO 2018/223056, or WO 2018/237194 and references cited therein.

[1241] Technologies for formulating provided oligonucleotides and/or preparing pharmaceutical compositions, e.g., for administration to subjects via various routes, are readily available in the art and can be utilized in accordance with the present disclosure, e.g., those described in U.S. Pat. No. 9,982,257, US 20170037399, US 20180216108, US 20180216107, U.S. Pat. No. 9,598,458, WO 2017/062862, WO 2018/067973, WO 2017/160741, WO 2017/192679, WO 2017/210647, WO 2018/098264, WO 2018/223056, or WO 2018/237194 and references cited therein.

[1242] In some embodiments, a useful chiral auxiliary has the structure of

[chemical structure]

or a salt thereof, wherein R^{C11} is -L^{C1}-R^{C1}, L^{C1} is optionally substituted —CH₂—, R^{C1} is R, —Si(R)₃, —SO₂R or an electron-withdrawing group, and R^{C2} and R^{C3} are taken together with their intervening atoms to form an optionally substituted 3-10 membered saturated ring having, in addition to the nitrogen atom, 0-2 heteroatoms. In some embodiments, a useful chiral auxiliary has the structure of

[chemical structure]

wherein R^{C1} is R, —Si(R)₃ or —SO₂R, and R^{C2} and R^{C3} are taken together with their intervening atoms to form an optionally substituted 3-7 membered saturated ring having, in addition to the nitrogen atom, 0-2 heteroatoms. is a formed ring is an optionally substituted 5-membered ring. In some embodiments, a useful chiral auxiliary has the structure of

[chemical structure]

or a salt thereof. In some embodiments, a useful chiral auxiliary has the structure of

[chemical structure]

In some embodiments, a useful chiral auxiliary is a DPSE chiral auxiliary. In some embodiments, purity or stereochemical purity of a chiral auxiliary is at least 85%, 90%, 95%, 96%, 97%, 98%, or 99%. In some embodiments, it is at least 85%. In some embodiments, it is at least 90%. In some embodiments, it is at least 95%. In some embodiments, it is at least 96%. In some embodiments, it is at least 97%. In some embodiments, it is at least 98%. In some embodiments, it is at least 99%.

[1243] In some embodiments, L^{C1} is —CH₂—. In some embodiments, L^{C1} is substituted —CH₂—. In some embodiments, L^{C1} is mono-substituted —CH₂—.

[1244] In some embodiments, R^{C1} is R. In some embodiments, R^{C1} is optionally substituted phenyl. In some embodiments, R^{C1} is —SiR₃. In some embodiments, R^{C1} is —SiPh₂Me. In some embodiments, R^{C1} is —SO₂R. In some embodiments, R is not hydrogen. In some embodiments, R is optionally substituted phenyl. In some embodiments, R is phenyl. In some embodiments, R is optionally substituted C₁₋₆ aliphatic. In some embodiments, R is C₁₋₆ alkyl. In some embodiments, R is methyl. In some embodiments, R is t-butyl.

[1245] In some embodiments, R^{C1} is an electron-withdrawing group, such as —C(O)R, —OP(O)(OR)₂, —OP(O)(R)₂, —P(O)(R)₂, —S(O)R, —S(O)₂R, etc. In some embodiments, chiral auxiliaries comprising electron-withdrawing group Rci groups are particularly useful for preparing chirally controlled non-negatively charged internucleotidic linkages and/or chirally controlled internucleotidic linkages bonded to natural RNA sugar.

[1246] In some embodiments, R^{C2} and R^{C3} are taken together with their intervening atoms to form an optionally substituted 3-10 (e.g., 3, 4, 5, 6, 7, 8, 9, or 10) membered saturated ring having no heteroatoms in addition to the nitrogen atom. In some embodiments, R^{C2} and R^{C3} are taken together with their intervening atoms to form an optionally substituted 5-membered saturated ring having no heteroatoms in addition to the nitrogen atom.

[1247] In some embodiments, a compound has the structure of H—X^{C}—C(R^{C5})₂—C(R^{C6})₂—SH or a salt thereof, wherein X^{C} is O or S, and each of R^{C5} and R^{C6} is independently R as described herein. In some embodiments, such a compound is useful for preparing a monomer. In some embodiments, such a compound is useful as a chiral auxiliary. In some embodiments, such a compound is particularly useful for preparing monomer which when utilized in oligonucleotide synthesis form bonds between their nitrogen atoms with linkage phosphorus (e.g., monomers comprising sm01, sm18, etc.). In some embodiments, X^{C} is O. In some embodiments, X^{C} is S. In some embodiments, one R^{C5} is —H. In some embodiments, one R^{C6} is —H. In some embodiments, a compound has the structure of H—X^{C}—CHR^{C5}—CHR^{C6}—SH or a salt thereof. In some embodiments, R^{C5} is optionally substituted C₁₋₆ aliphatic. In some embodiments, R^{C5} is optionally substituted C₁₋₆ alkyl. In some embodiments, R^{C5} is methyl. In some embodiments, R^{C6} is optionally substituted C₁₋₆ aliphatic. In some embodiments, R^{C6} is optionally substituted C₁₋₆ alkyl. In some embodiments, R^{C6} is methyl. In some embodiments, a compound is HOCH(CH₃)CH(CH₃)SH. In some embodiments, a compound is HSCH(CH₃)CH(CH₃)SH. In some embodiments, one R^{C5} is not hydrogen. In some embodiments, one R^{C6} is not hydrogen. In some embodiments, one R^{C5} and one R^{C6} are taken together with their intervening atoms to form an optionally substituted 3-20 (e.g., 3-15, 3-10, 5-10, 3, 4, 5, 6, 7, 8, 9, 10, 11, 12, 13, 14, 15, 16, 17, 18, 19, 20) membered monocyclic, bicyclic or polycyclic ring having 0-5 heteroatoms. In some embodiments, a formed ring is monocyclic. In some embodiments, one R^{C5} and one R^{C6} are taken together with their intervening atoms to form an optionally substituted 4-8, 4-7, 5-8, 5-7, 4, 5, 6, 7, or 8-membered monocyclic ring. In some embodiments, a formed ring is a saturated cycloalkyl ring. In some embodiments, a formed ring is a cyclohexyl ring. In some embodiments, a formed ring is bicyclic. In some embodiments, a formed ring contain no heteroatom ring atoms. In some embodiments, each monocyclic ring unit is independently 3-10 membered, and/or is independently saturated, partially unsaturated or aromatic and has 0-5 heteroatoms. In some embodiments, a compound is

[chemical structure]

or a salt thereof, wherein the cyclohexyl ring is optionally substituted. In some embodiments, a compound is

[chemical structure]

or a salt thereof, wherein the cyclohexyl ring is optionally substituted. In some embodiments, a substituent is C₁₋₆ aliphatic, e.g., —C(CH₃)═CH₂. For example, in some embodiments, a compound is

[chemical structure]

In some embodiments, a compound is

[chemical structure]

or a salt thereof, wherein the cyclohexyl ring is optionally substituted.

[1248] In some embodiments, methods for preparing oligonucleotides and/or compositions comprise using a chiral auxiliary described herein, e.g., for constructing one or more chirally controlled internucleotidic linkages. In some embodiments, one or more chirally controlled internucleotidic linkages are independently constructed using a DPSE chiral auxiliary. In some embodiments, each chirally controlled phosphorothioate internucleotidic linkage is independently constructed using a DPSE chiral auxiliary. In some embodiments, one or more chirally controlled internucleotidic linkages are independently constructed using

[chemical structure]

or a salt thereof, wherein R^{AU} is as described herein. In some embodiments, each chirally controlled non-negatively charged internucleotidic linkage (e.g., n001) is independently constructed using

[chemical structure]

or a salt thereof. In some embodiments, each chirally controlled internucleotidic linkage is independently constructed using

[chemical structure]

or a salt thereof. In some embodiments, R^{AU} is optionally substituted C₁₋₂₀, C₁₋₁₀, C₁₋₆, C₁₋₅, or C₁₋₄ aliphatic. In some embodiments, R^{AU} is optionally substituted C₁₋₂₀, C₁₋₁₀, C₁₋₆, C₁₋₅, or C₁₋₄ alkyl. In some embodiments, R^{AU} is optionally substituted aryl. In some embodiments, R^{AU} is phenyl. In some embodiments, one or more chirally controlled internucleotidic linkages are constructed using a PSM chiral auxiliary. In some embodiments, each chirally controlled non-negatively charged internucleotidic linkage (e.g., n001) is independently constructed using a PSM chiral auxiliary. In some embodiments, each chirally controlled internucleotidic linkages is independently constructed using a PSM chiral auxiliary. As appreciated by those skilled in the art, a chiral auxiliary is often utilized in a phosphoramidite

[chemical structure]

(wherein R^{AU} is independently as described herein; when R^{AU} is -Ph, PSM phosphoramidites), wherein R^{NS} is an optionally substituted/protected nucleoside (e.g., optionally protected for oligonucleotide synthesis), or a salt thereof, etc.) for oligonucleotide preparation. In some embodiments, a phosphoramidite is a compound having the structure of

[chemical structure]

or salt thereof, wherein each variable is independently as described herein. In some embodiments, R^{AU} is optionally substituted phenyl. In some embodiments, R^{AU} is phenyl. In some embodiments, R^{NS} is an optionally substituted or protected nucleoside comprising hypoxanthine. In some embodiments, R^{NS} comprises optionally substituted or protected hypoxanthine. In some embodiments, R^{N}S is optionally substituted or protected inosine. In some embodiments, R^{NS} is optionally substituted or protected deoxyinosine. In some embodiments, R^{NS} is optionally substituted or protected 2′-F inosine (2′-OH replaced with 2′-F). In some embodiments, R^{NS} is optionally substituted or protected 2′-OR modified inosine (2′-OH replaced with a 2′-OR modification as described herein (e.g., 2′-OMe, 2′-MOE, etc.)). In some embodiments, hypoxanthine is O⁶ protected. In some embodiments, hypoxanthine is O⁶ protected with -L-Si(R)₃, wherein L is optionally substituted —CH₂—CH₂—, and each R is independently as described herein and not —H. In some embodiments, each R is independently an optionally substituted group selected from C₁₋₆ aliphatic and phenyl. In some embodiments, each R is independently optionally substituted C₁₋₆ alkyl. In some embodiments, -L-Si(R)₃ is —CH₂CH₂Si(Me)₃. In some embodiments, compounds comprising O⁶ protected hypoxanthine (e.g., with —CH₂CH₂Si(Me)₃) have higher solubility than corresponding O⁶ unprotected compounds and may provide various benefits and advantages when utilized for oligonucleotide synthesis in accordance with the present disclosure. In some embodiments, in a compound having the structure of

[chemical structure]

or salt thereof, R^{NS} comprises an O⁶ protected hypoxanthine (e.g., with —CH₂CH₂Si(Me)₃). In some embodiments, R^{NS} is O⁶-protected inosine. In some embodiments, R^{NS} is O⁶-protected deoxyinosine. In some embodiments, R^{NS} is O⁶-protected 2′-F inosine. In some embodiments, R^{NS} is O⁶-protected 2′-OR modified inosine whose 2′-OR modification is as described herein (e.g., 2′-OMe, 2′-MOE, etc.). Among other things, the present disclosure encompasses the recognition that such a compound has sufficient solubility for oligonucleotide synthesis and can be utilized in oligonucleotide synthesis while a corresponding compound without O⁶ protection may not have sufficient solubility for efficient oligonucleotide synthesis. In some embodiments, a phosphoramidite is (1S,3S,3aS)-1-(((2R,3S,5R)-2-((bis(4-methoxyphenyl)(phenyl)methoxy)methyl)-5-(6-(2-(trimethylsilyl)ethoxy)-9H-purin-9-yl)tetrahydrofuran-3-yl)oxy)-3-((methyldiphenylsilyl)methyl)tetrahydro-1H,3H-pyrrolo[1,2-c][1,3,2]oxazaphosphole. In some embodiments, a phosphoramidite is (1S,3S,3aS)-1-(((2R,3S,5R)-2-((bis(4-methoxyphenyl)(phenyl)methoxy)methyl)-5-(6-(2-(trimethylsilyl)ethoxy)-9H-purin-9-yl)tetrahydrofuran-3-yl)oxy)-3-((phenylsulfonyl)methyl)tetrahydro-1H,3H-pyrrolo[1,2-c][1,3,2]oxazaphosphole. In some embodiments, in a compound having the structure of

[chemical structure]

or salt thereof, R^{NS} comprises an O⁶ unprotected hypoxanthine. In some embodiments, R^{NS} is optionally substituted or protected inosine wherein the hypoxanthine is unprotected. In some embodiments, R^{NS} is optionally substituted or protected deoxyinosine wherein the hypoxanthine is unprotected. In some embodiments, R^{NS} is optionally substituted or protected 2′-F inosine wherein the hypoxanthine is unprotected. In some embodiments, R^{NS} is optionally substituted or protected 2′-OR modified inosine wherein the hypoxanthine is unprotected and whose 2′-OR modification is as described herein (e.g., 2′-OMe, 2′-MOE, etc.). Among other things, the present disclosure encompasses the recognition that such a compound has sufficient solubility for oligonucleotide synthesis and can be utilized in oligonucleotide synthesis without O⁶ protection.

[1249] In some embodiments, a method comprises providing a DPSE and/or a PSM phosphoramidite or a salt thereof. In some embodiments, a provided method comprises contacting a DPSE and/or a PSM phosphoramidite or a salt thereof with —OH (e.g., 5′-OH of a nucleoside or an oligonucleotide chain). As those skilled in the art appreciate, contacting can be performed under various suitable conditions so that a phosphorus linkage is formed. In some embodiments, preparation of each chirally controlled internucleotidic linkage independently comprises contacting a DPSE or PSM phosphoramidite or a salt thereof with —OH (e.g., 5′-OH of a nucleoside or an oligonucleotide chain). In some embodiments, preparation of each chirally controlled phosphorothioate internucleotidic linkage independently comprises contacting a DPSE phosphoramidite or a salt thereof with —OH (e.g., 5′-OH of a nucleoside or an oligonucleotide chain). In some embodiments, preparation of each chirally controlled non-negatively charged internucleotidic linkage (e.g., n001) independently comprises contacting a PSM phosphoramidite or a salt thereof with —OH (e.g., 5′-OH of a nucleoside or an oligonucleotide chain). In some embodiments, preparation of each chirally controlled internucleotidic linkage independently comprises contacting a PSM phosphoramidite or a salt thereof with —OH (e.g., 5′-OH of a nucleoside or an oligonucleotide chain). In some embodiments, contacting forms a P(III) linkage comprising a phosphorus atom bonded to two sugars and a chiral auxiliary moiety (e.g.,

[chemical structure]

or a salt form thereof (e.g., from DPSE phosphoramidites or salts thereof),

[chemical structure]

or a salt form thereof (wherein R^{AU} is independently as described herein; when R^{AU} is -Ph, e.g., from PSM phosphoramidites or salts thereof), etc.). In some embodiments, an oligonucleotide comprises a P(III) linkage comprising a chiral auxiliary moiety, e.g., from a DPSE or PSM phosphoramidite. In some embodiments, a P(III) linkage comprising a chiral auxiliary moiety is chirally controlled. In some embodiments, a chiral auxiliary moiety may be protected, e.g., before converting a P(III) linkage to a P(V) linkage (e.g., before sulfurization, reacting with azide, etc.). In some embodiments, a protected chiral auxiliary has the structure of

[chemical structure]

or a salt form thereof (e.g., wherein R′ is independently as described herein; e.g., from DPSE phosphoramidites or salts thereof), or

[chemical structure]

or a salt form thereof (wherein each R′ and R^{AU} is independently as described herein; when R^{AU} is -Ph, e.g., from PSM phosphoramidites or salts thereof), wherein each R′ is independently as described herein. In some embodiments, R′ is —C(O)R, wherein R is as described herein. In some embodiments, R is —CH₃. In some embodiments, an oligonucleotide comprises a protected chiral auxiliary. In some embodiments, each chirally controlled internucleotidic linkage in an oligonucleotide independently comprises

[chemical structure]

or a salt form thereof, or

[chemical structure]

or a salt form thereof. In some embodiments, each chirally controlled internucleotidic linkage in an oligonucleotide independently comprises

[chemical structure]

or a salt form thereof. In some embodiments, R′ is —C(O)R. In some embodiments, R′ is —C(O)CH₃. In some embodiments, R^{AU} is Ph. In some embodiments, an oligonucleotide comprises one or more

[chemical structure]

or a salt form thereof (PIII-1), wherein each variable independently as described herein. In some embodiments, an oligonucleotide comprises one or more

[chemical structure]

or a salt form thereof (PIII-2), wherein each variable independently as described herein. In some embodiments, an oligonucleotide comprises one or more

[chemical structure]

or a salt form thereof (PIII-5), wherein each variable independently as described herein. In some embodiments, an oligonucleotide comprises one or more

[chemical structure]

or a salt form thereof (PIII-6), wherein each variable independently as described herein. In some embodiments, a 5′-end internucleotidic linkage is PIII-1, PIII-2, PIII-5, or PIII-6. In some embodiments, a 5′-end internucleotidic linkage is PIII-1 or PIII-2. In some embodiments, R′ is —H. In some embodiments, R′ is —C(O)R. In some embodiments, R′ is —C(O)CH₃. In some embodiments, R^{AU} is -Ph. In some embodiments, a P(III) linkage is converted into a P(V) linkage. In some embodiments, a P(V) linkage comprises a phosphorus atom bonded to two sugars, a chiral auxiliary moiety (e.g.,

[chemical structure]

or a salt form thereof (wherein R′ is as described herein; e.g., from DPSE phosphoramidites or salts thereof),

[chemical structure]

or a salt form thereof (wherein each of R′ and R^{AU} is independently as described herein; when R^{AU} is -Ph, e.g., from PSM phosphoramidites or salts thereof), etc.), and S or

[chemical structure]

In some embodiments, a P(V) linkage comprises a phosphorus atom bonded to two sugars,

[chemical structure]

or a salt form thereof (wherein each R′ and R^{AU} is independently as described herein; when R^{AU} is -Ph, e.g., from PSM phosphoramidites or salts thereof), etc.), and S or

[chemical structure]

In some embodiments, a P(V) linkage comprises a phosphorus atom bonded to two sugars,

[chemical structure]

or a salt form thereof (wherein each R′ and R^{AU} is independently as described herein; when R^{AU} is -Ph, e.g., from PSM phosphoramidites or salts thereof), etc.), and S. In some embodiments, a P(V) linkage comprises a phosphorus atom bonded to two sugars,

[chemical structure]

or a salt form thereof (wherein each R′ and R^{AU} is independently as described herein; when R^{AU} is -Ph, e.g., from PSM phosphoramidites or salts thereof), etc.), and

[chemical structure]

Those skilled in the art will appreciate that

[chemical structure]

can exist with a counterion, e.g., in some embodiments, PF₆⁻. In some embodiments, an oligonucleotide comprises one or more

[chemical structure]

or a salt form thereof (PV-1), wherein each variable independently as described herein. In some embodiments, an oligonucleotide comprises one or more

[chemical structure]

or a salt form thereof (PV-2), wherein each variable independently as described herein. In some embodiments, an oligonucleotide comprises one or more

[chemical structure]

or a salt form thereof (PV-3), wherein each variable independently as described herein. In some embodiments, an oligonucleotide comprises one or more

[chemical structure]

or a salt form thereof (PV-4), wherein each variable independently as described herein. In some embodiments, an oligonucleotide comprises one or more

[chemical structure]

or a salt form thereof (PV-5), wherein each variable independently as described herein. In some embodiments, an oligonucleotide comprises one or more

[chemical structure]

or a salt form thereof (PV-6), wherein each variable independently as described herein. In some embodiments, each chiral internucleotidic linkage, or each chirally controlled internucleotidic linkage, of an oligonucleotide is independently selected from PIII-1, PIII-2, PIII-5, PIII-6, PV-1, PV-2, PV-3, PV-4, PV-5, and PV-6. In some embodiments, each chiral internucleotidic linkage, or each chirally controlled internucleotidic linkage, of an oligonucleotide is independently selected from PIII-1, PIII-2, PV-1, PV-2, PV-3, and PV-4. In some embodiments, a linkage of PIII-1, PIII-2, PIII-5, or PIII-6 is typically the 5′-end internucleotidic linkage. In some embodiments, each chiral internucleotidic linkage, or each chirally controlled internucleotidic linkage, of an oligonucleotide is independently selected from PV-1, PV-2, PV-3, PV-4, PV-5, and PV-6. In some embodiments, each chiral internucleotidic linkage, or each chirally controlled internucleotidic linkage, of an oligonucleotide is independently selected from PV-1, PV-2, PV-3, or PV-4. In some embodiments, a provided oligonucleotide is an oligonucleotide as described herein, e.g., of Table 1, wherein each *S is independently replaced with PV-3 or PV-5, each *R is independently replaced with PV-4 or PV-6, each n001R is independently replaced with PV-1, and each n001S is independently replaced with PV-2. In some embodiments, a provided oligonucleotide is an oligonucleotide as described herein, e.g., of Table 1, wherein each *S is independently replaced with PV-3, each *R is independently replaced with PV-4, each n001R is independently replaced with PV-1, and each n001S is independently replaced with PV-2. In some embodiments, each natural phosphate linkage is independently replaced with a precursor, e.g.,

[chemical structure]

In some embodiments, R′ is —H. In some embodiments, R′ is —C(O)R. In some embodiments, R′ is —C(O)CH₃. In some embodiments, R^{AU} is -Ph. In some embodiments, a method comprises removal of one or more chiral auxiliary moieties so that phosphorothioate and/or non-negatively charged internucleotidic linkages (e.g., n001) are formed (e.g., from V-1, PV-2, PV-3, PV-4, PV-5, PV-6, etc.). In some embodiments, removal of a chiral auxiliary (e.g., PSM) comprises contacting an oligonucleotide with a base (e.g., N(R)₃ such as DEA) under anhydrous conditions.

[1250] In some embodiments, as appreciated by those skilled in the art, for preparation of a chirally controlled internucleotidic linkage, a monomer or a phosphoramidite (e.g., a DPSE or PSM phosphoramidite) is typically utilized in a chirally enriched or pure form (e.g., of a purity as described herein (e.g., about or at least about 90%, 91%, 92%, 93%, 94%, 95%, 96%, 97%, 98%, or 99%, or about 100%)).

[1251] In some embodiments, the present disclosure provides useful reagents for preparation of oligonucleotides and compositions thereof. In some embodiments, monomers and phosphoramidites comprise nucleosides, nucleobases and sugars as described herein. In some embodiments, nucleobases and sugars are properly protected for oligonucleotide synthesis as those skilled in the art will appreciate. In some embodiments, a phosphoramidite has the structure of R^{NS}—P(OR)N(R)₂, wherein R^{NS} is a optionally protected nucleoside moiety. In some embodiments, a phosphoramidite has the structure of R^{NS}—P(OCH₂CH₂CN)N(i-Pr)₂. In some embodiments, a monomer comprises a nucleobase which is or comprises Ring BA, wherein Ring BA has the structure of BA-I, BA-I-a, BA-I-b, BA-II, BA-II-a, BA-II-b, BA-III, BA-III-a, BA-III-b, BA-IV, BA-IV-a, BA-IV-b, BA-V, BA-V-a, BA-V-b, or BA-VI, or a tautomer of Ring BA, wherein the nucleobase is optionally substituted or protected. In some embodiments, a phosphoramidite comprises a nucleobase which is or comprises Ring BA, wherein Ring BA has the structure of BA-I, BA-I-a, BA-I-b, BA-II, BA-II-a, BA-II-b, BA-III, BA-III-a, BA-III-b, BA-IV, BA-IV-a, BA-IV-b, BA-V, BA-V-a, BA-V-b, or BA-VI, or a tautomer of Ring BA, wherein the nucleobase is optionally substituted or protected. In some embodiments, a phosphoramidite comprises a chiral auxiliary moiety, wherein the phosphorus is bonded to an oxygen and a nitrogen atom of the chiral auxiliary moiety. In some embodiments, a phosphoramidite has the structure of

[chemical structure]

or a salt thereof, wherein R^{NS} is a protected nucleoside moiety (e.g., 5′-OH and/or nucleobases suitably protected for oligonucleotide synthesis), and each other variable is independently as described herein. In some embodiments, a phosphoramidite has the structure of

[chemical structure]

wherein R^{NS} is a protected nucleoside moiety (e.g., 5′-OH and/or nucleobases suitably protected for oligonucleotide synthesis), R is R, —Si(R)₃ or —SO₂R, and R^{C2} and R^{C3} are taken together with their intervening atoms to form an optionally substituted 3-7 membered saturated ring having, in addition to the nitrogen atom, 0-2 heteroatoms, wherein the coupling forms an internucleotidic linkage. In some embodiments, 5′-OH of R^{NS} is protected. In some embodiments, 5′-OH of R^{NS} is protected as —ODMTr. In some embodiments, R^{NS} is bonded to phosphorus through its 3′-O—. In some embodiments, a formed ring by R^{C2} and R^{C3} is an optionally substituted 5-membered ring. In some embodiments, a phosphoramidite has the structure of

[chemical structure]

or a salt thereof. In some embodiments, a phosphoramidite has the structure of

[chemical structure]

In some embodiments, as described herein R^{NS} comprises a modified nucleobase (e.g., b001A, b002A, b003A, b008U, b001C, etc.) which is optionally protected for oligonucleotide synthesis. In some embodiments, a monomer has the structure of

[chemical structure]

or a salt thereof, wherein R^{NS} is an optionally substituted/protected nucleoside (e.g., optionally protected for oligonucleotide synthesis) as described herein, and each other variable is independently as described herein. In some embodiments, —X^{C}—C(R^{C5})₂—C(R^{C6})₂—S— is of such a structure that H—X^{C}—C(R^{C5})₂—C(R^{C6})₂—SH is a compound as described herein, e.g., HOCH(CH₃)CH(CH₃)SH, HSCH(CH₃)CH(CH₃)SH,

[chemical structure]

etc. In some embodiments, 5′-OH of R^{NS} is protected. In some embodiments, 5′-OH of R^{NS} is protected as —ODMTr.

[1252] In some embodiments, R^{NS} is an optionally substituted or protected nucleoside selected from

[chemical structure]

or a salt thereof, wherein BA^{s} is as described herein. In some embodiments, R^{NS} is

[chemical structure]

or a salt thereof, wherein BA^{s} is as described herein. In some embodiments, each —OH is optionally and independently substituted or protected. In some embodiments, BA^{s} is optionally substituted or protected nucleobase, and each —OH of the nucleoside is independently protected, wherein at least one —OH is protected as DMTrO—. In some embodiments, —OH for coupling, e.g., with another monomer or phosphoramidite, is protected as DMTrO—. In some embodiments, an —OH group for coupling, e.g., with another monomer or phosphoramidite, is protected different from an —OH group that is not for coupling. In some embodiments, a non-coupling —OH is protected such that the protection remains when DMTrO— is deprotected. In some embodiments, a non-coupling —OH is protected such that the protection remains during oligonucleotide synthesis cycles. In some embodiments, BA^{s} is an optionally protected nucleobase selected from A, T, C, G, U, and tautomers thereof.

[1253] In some embodiments, purity or stereochemical purity of a monomer or a phosphoramidite is at least 85%, 90%, 95%, 96%, 97%, 98%, or 99%. In some embodiments, it is at least 85%. In some embodiments, it is at least 90%. In some embodiments, it is at least 95%.

[1254] In some embodiments, the present disclosure provides a method for preparing an oligonucleotide or composition, comprising coupling a free —OH, e.g., a free 5′-OH, of an oligonucleotide or a nucleoside with a monomer as described herein. In some embodiments, the present disclosure provides a method for preparing an oligonucleotide or composition, comprising coupling a free —OH, e.g., a free 5′-OH, of an oligonucleotide or a nucleoside with a phosphoramidite as described herein.

[1255] In some embodiments, the present disclosure provides an oligonucleotide, wherein the oligonucleotide comprises one or more modified internucleotidic linkages each independently having the structure of —⁵—P^{L}(W)(R^{CA})—O³—, wherein:
[1256] P^{L} is P, or P(═W);
[1257] W is O, S, or W^{N};
[1258] W^{N} is ═N—C(—N(R¹)₂═N⁺(R¹)₂Q⁻;
[1259] Q⁻ is an anion;
[1260] R^{CA} is or comprises an optionally capped chiral auxiliary moiety,
[1261] O⁵ is an oxygen bonded to a 5′-carbon of a sugar, and
[1262] O³ is an oxygen bonded to a 3′-carbon of a sugar.

[1263] In some embodiments, a modified internucleotidic linkage is optionally chirally controlled. In some embodiments, a modified internucleotidic linkage is optionally chirally controlled.

[1264] In some embodiments, a provided methods comprising removing R^{CA} from such a modified internucleotidic linkages. In some embodiments, after removal, bonding to R^{CA} is replaced with —OH. In some embodiments, after removal, bonding to R^{CA} is replaced with ═O, and bonding to W^{N} is replaced with —N═C(N(R¹)₂)₂.

[1265] In some embodiments, P^{L} is P═S, and when R^{CA} is removed, such an internucleotidic linkage is converted into a phosphorothioate internucleotidic linkage.

[1266] In some embodiments, P^{L} is P═W^{N}, and when R^{CA} is removed, such an internucleotidic linkage is converted into an internucleotidic linkage having the structure of

[chemical structure]

In some embodiments, an internucleotidic linkage having the structure of

[chemical structure]

has the structure of

[chemical structure]

In some embodiments, an internucleotidic linkage having the structure of

[chemical structure]

has the structure of

[chemical structure]

[1267] In some embodiments, P^{L} is P (e.g., in newly formed internucleotidic linkage from coupling of a phosphoramidite with a 5′-OH). In some embodiments, W is O or S. In some embodiments, W is S (e.g., after sulfurization). In some embodiments, W is O (e.g., after oxidation). In some embodiments, certain non-negatively charged internucleotidic linkages or neutral internucleotidic linkages may be prepared by reacting a P(III) phosphite triester internucleotidic linkage with azido imidazolinium salts (e.g., compounds comprising

[chemical structure]

under suitable conditions. In some embodiments, an azido imidazolinium salt is a salt of PF₆⁻. In some embodiments, an azido imidazolinium salt is a slat of

[chemical structure]

In some embodiments, an azido imidazolinium salt is 2-azido-1,3-dimethylimidazolinium hexafluorophosphate.

[1268] As appreciated by those skilled in the art, Q⁻ can be various suitable anion present in a system (e.g., in oligonucleotide synthesis), and may vary during oligonucleotide preparation processes depending on cycles, process stages, reagents, solvents, etc. In some embodiments, Q⁻ is PF₆⁻.

[1269] In some embodiments, R^{CA} is

[chemical structure]

wherein R^{C4} is —H or —C(O)R′, and each other variable is independently as described herein. In some embodiments, R^{CA} is

[chemical structure]

wherein R^{C1} is R, —Si(R)₃ or —SO₂R, R^{C2} and R^{C3} are taken together with their intervening atoms to form an optionally substituted 3-7 membered saturated ring having, in addition to the nitrogen atom, 0-2 heteroatoms, R^{C4} is —H or —C(O)R′. In some embodiments, R^{C4} is —H. In some embodiments, R^{C4} is —C(O)CH₃. In some embodiments, R^{C2} and R^{C3} are taken together to form an optionally substituted 5-membered ring.

[1270] In some embodiments, R^{C4} is —H (e.g., in n newly formed internucleotidic linkage from coupling of a phosphoramidite with a 5′-OH). In some embodiments, R^{C4} is —C(O)R (e.g., after capping of the amine). In some embodiments, R is methyl.

[1271] In some embodiments, each chirally controlled phosphorothioate internucleotidic linkage is independently converted from —O⁵—P^{L}(W)(R^{CA})—O³—.

### Assessment Characterization of Providing Technologies

[1272] As appreciated by those skilled in the art, various technologies may be utilized to assess/characterize provided technologies in accordance with the present disclosure. Certain useful technologies are described in the Examples; as demonstrated, among other things, the present disclosure describes various in vivo and in vitro technologies suitable for assessing and characterizing provided technologies. In some embodiments, provided technologies are assessed/characterized, e.g., in cells, with or without exogenous ADAR polypeptides; additionally or alternatively, in some embodiments, provided technologies are assessed/characterized, e.g., in animals, e.g., non-human primates and mice.

[1273] Among other things, the present disclosure encompasses the insights that various agents (e.g., oligonucleotides) and compositions thereof that can provide editing in various human systems, e.g., cells, may show no or much lower levels of editing in certain cells (e.g., mouse cells) and certain animals such as rodents (e.g., mice) that do not contain or express human ADAR, e.g., human ADAR1. Particularly, mice, a commonly used animal model, may be of limited uses for assessing various agents (e.g., oligonucleotides) for editing in humans, as various agents active in human cells provide no or very low levels of activity in mouse cells and animals not engineered to comprise or express a proper ADAR1 (e.g., human ADAR1) polypeptide or a characteristic portion thereof. In some embodiments, the present disclosure provides engineered cells and non-human animals expressing human ADAR1 polypeptide or a characteristic portion thereof. In some embodiments, such cells and human are useful for assessing and characterizing provided technologies. In some embodiments, a human ADAR1 polypeptide or a characteristic portion thereof is or comprises human ADAR1 polypeptide or a characteristic portion thereof. In some embodiments, a human ADAR1 polypeptide or a characteristic portion thereof is or comprises human ADAR1 p110 polypeptide or a characteristic portion thereof. In some embodiments, a human ADAR1 polypeptide or a characteristic portion thereof is or comprises human ADAR1 p150 polypeptide or a characteristic portion thereof. In some embodiments, a human ADAR1 polypeptide or a characteristic portion thereof is or comprises human ADAR1. In some embodiments, a human ADAR1 polypeptide or a characteristic portion thereof is or comprises a human ADAR1 p110 peptide. In some embodiments, a human ADAR1 polypeptide or a characteristic portion thereof is or comprises a human ADAR1 p150 peptide. In some embodiments, a human ADAR1 polypeptide or a characteristic portion thereof is or comprises one or more or all of the following domains of human ADAR1: Z-DNA binding domains, dsRNA binding domains, and deaminase domain. In some embodiments, a human ADAR1 polypeptide or a characteristic portion thereof is or comprises one or both of human ADAR1 Z-DNA binding domains; alternatively or additionally, in some embodiments, a human ADAR1 polypeptide or a characteristic portion thereof is or comprises one, two or all of human ADAR1 dsRNA binding domains; alternatively or additionally, a human ADAR1 polypeptide or a characteristic portion thereof is or comprises a human deaminase domain. In some embodiments, a human ADAR1 polypeptide or a characteristic portion thereof may be expressed together with a mouse ADAR1 polypeptide or a characteristic portion thereof, e.g., one or more human dsRNA binding domains may be engineered to be expressed together with a mouse deaminase domain to form a human-mouse hybrid ADAR1 polypeptide. In some embodiments, cells and/or non-human animals are engineered to comprise and/or express a polynucleotide encoding a human ADAR1 polypeptide or a characteristic portion thereof as described herein. In some embodiments, genomes of cells and/or non-human animals are engineered to comprise a polynucleotide encoding a human ADAR1 polypeptide or a characteristic portion thereof as described herein. In some embodiments, germline genomes of cells and/or non-human animals are engineered to comprise a polynucleotide encoding a human ADAR1 polypeptide or a characteristic portion thereof as described herein. In some embodiments, cells and non-human animals are engineered to comprise, e.g., in their genomes (in some embodiments, germline genomes), one or more G to A mutations each independently associated with a condition, disorder or disease (e.g., a mutation (e.g., c. 1024G>A) in SERPINA1 gene that leads to a glutamate to lysine substitution at amino acid position 342 (E342K) of an A1AT protein). As demonstrated herein, among other things such cells and animals are useful for assessing/characterizing provided technologies, e.g., various oligonucleotides and compositions thereof, e.g., for their editing properties and/or activities, including for their uses against one or more conditions, disorders or diseases. In some embodiments, cells are rodent cells. In some embodiments, cells are mouse cells. In some embodiments, an animal is a rodent. In some embodiments, an animal is a mice.

[1274] Among other things, the present disclosure provides oligonucleotide designs comprising sugar modifications, base modifications, internucleotidic linkage modifications, linkage phosphorus stereochemistry, and/or patterns thereof, that can greatly improve one or more properties and/or activities of oligonucleotides compared to comparable oligonucleotides of similar or identical base sequences but of reference designs. For example, it was observed that oligonucleotides of various provided designs and compositions thereof can provide high levels of editing in mice that do not express a human ADAR protein (e.g., mice only expressing mouse ADAR proteins), in some embodiments comparable to or no lower than in mice that are engineered to express a human ADAR protein, while comparable oligonucleotides of reference designs and compositions thereof provide low levels of editing in mice that do not express a human ADAR protein (e.g., mice only expressing mouse ADAR proteins), in some embodiments significantly lower than in mice that are engineered to express a human ADAR protein. In some embodiments, a reference design is a design reported in WO 2016/097212, WO 2017/220751, WO 2018/041973, WO 2018/134301A1, WO 2019/158475, WO 2019/219581, WO 2020/157008, WO 2020/165077, WO 2020/201406 or WO 2020/252376. In some embodiments, a reference design is a design in WO 2021/071858.

[1275] In some embodiments, the present disclosure provides technologies for assessing/characterizing for assessing cells and/or non-human animals, including those engineered to comprise or express an ADAR1 polypeptide or a characteristic portion thereof, or a polynucleotide encoding an ADAR1 polypeptide or a characteristic portion thereof, which ADAR1 polypeptide or a characteristic portion thereof and/or polynucleotide is not in and/or is not expressed in the cells and/or non-human animals prior to engineering. In some embodiments, a provided method comprises administering to a cell or a population thereof one or more oligonucleotides or compositions which one or more oligonucleotides or compositions can each independently edit an adenosine in a comparable human cell or a population thereof. In some embodiments, a provided method comprises administering to an animal or a population thereof one or more oligonucleotides or compositions which one or more oligonucleotides or compositions can each independently edit an adenosine in a human cell or a population thereof. In some embodiments, editing levels in cells to be assessed/characterized, or in cells from animals, are compared to those observed in comparable human cells. In some embodiments, comparable human cells are of the same type as cells to be assessed/characterized or cells from animals. In some embodiments, cells are rodent cells. In some embodiments, cells are mouse cells. In some embodiments, an animal is a rodent. In some embodiments, an animal is a mice. In some embodiments, one or more oligonucleotides or compositions are administered separately to separate cells and/or animals. In some embodiments, one or more oligonucleotides or compositions may be administered to the same collection of cells and/or animals, optionally simultaneously. Various oligonucleotides and compositions that can edit various target adenosines are as described herein and can be utilized accordingly.

[1276] As appreciated by those skilled in the art, in some embodiments, provided technologies, e.g., oligonucleotides, compositions, etc., may be assessed in one or more models, e.g., cells, tissues, organs, animals, etc. In some embodiments, as appreciated by those skilled in the art, cells, tissues, organs, animals, etc. are or comprise cells of, associated with or comprising one or more characteristics (e.g., nucleotide sequences such as mutations) of conditions, disorders or diseases. For example, in some embodiments, cells, tissues, organs, animals, etc. comprise G to A mutations associated with conditions, disorders or diseases, e.g., 1024G>A (E342K) in human SERPINA1. In some embodiments, an animal is a NOD.Cg-Prkdcscid Il2rgtm1Wjl Tg(SERPINA1*E342K) #Slcw/SzJ mouse (e.g., see The Jackson Laboratory Stock No: 028842; NSG-PiZ, and also Borel F; Tang Q; Gernoux G; Greer C; Wang Z; Barzel A; Kay M A; Shultz L D; Greiner D L; Flotte T R; Brehm M A; Mueller C. 2017. Survival Advantage of Both Human Hepatocyte Xenografts and Genome-Edited Hepatocytes for Treatment of alpha-1 Antitrypsin Deficiency. Mol Ther 25(11):2477-2489PubMed: 29032169MGI: J:243726, and Li S; Ling C; Zhong L; Li M; Su Q; He R; Tang Q; Greiner D L; Shultz L D; Brehm M A; Flotte T R; Mueller C; Srivastava A; Gao G. 2015). Efficient and Targeted Transduction of Nonhuman Primate Liver With Systemically Delivered Optimized AAV3B Vectors. Mol Ther 23(12):1867-76PubMed: 26403887MGI: J:230567). In some embodiments, cells, tissues, organs, animals, etc. comprise one or more cancer cells. In some embodiments, non-human cells, tissues, organs, animals, etc. are engineered to comprise or express ADAR1 or a characteristic portion thereof, e.g., through incorporation of (optionally into its genome or germline genome) a polynucleotide whose sequence encodes an ADAR1 polypeptide or a characteristic portion thereof. In some embodiments, an ADAR1 is a primate ADAR1. In some embodiments, an ADAR1 is a human ADAR1. In some embodiments, a human ADAR1 is human ADAR1 p110. In some embodiments, a human ADAR1 is human ADAR1 p150. As appreciated by those skilled in the art, various technologies are available in the art and can be utilized in accordance with the present disclosure to generated useful cells, tissues, organs, animals, etc. For example, for condition, disorder or disease animal models expressing human ADAR1 or a characteristic portion thereof, an animal model can be crossed with huADAR1 mice described herein to provide engineered animal models expressing human ADAR1 or a characteristic portion thereof. In some embodiments, mice comprising G to A mutations, e.g., a NOD.Cg-Prkdcscid Il2rgtm1Wjl Tg(SERPINA1*E342K) #Slcw/SzJ mouse (e.g., see The Jackson Laboratory Stock No: 028842; NSG-PiZ, and also Borel F; Tang Q; Gernoux G; Greer C; Wang Z; Barzel A; Kay M A; Shultz L D; Greiner D L; Flotte T R; Brehm M A; Mueller C. 2017. Survival Advantage of Both Human Hepatocyte Xenografts and Genome-Edited Hepatocytes for Treatment of alpha-1 Antitrypsin Deficiency. Mol Ther 25(11):2477-2489PubMed: 29032169MGI: J:243726, and Li S; Ling C; Zhong L; Li M; Su Q; He R; Tang Q; Greiner D L; Shultz L D; Brehm M A; Flotte T R; Mueller C; Srivastava A; Gao G. 2015) are crossed with huADAR1 mice described herein to provide mice comprising G to A mutations (e.g., 024G>A (E342K) in human SERPINA1) and expressing human ADAR1 or a characteristic portion thereof.

[1277] As appreciated by those skilled in the art, in some embodiments, animals can be heterozygous with respect to one or more or all sequences. In some embodiments, animals are homozygous with respect to one or more or all sequences. In some embodiments, animals are hemizygous with respect to one or more or all engineered sequences. In some embodiments, animals are homozygous with respect to one or more sequences, and heterozygous with respect to one or more sequences. In some embodiments, animals are heterozygous with respect to a polynucleotide whose sequence encodes an ADAR1 polypeptide or a characteristic portion thereof. In some embodiments, animals are homozygous with respect to a polynucleotide whose sequence encodes an ADAR1 polypeptide or a characteristic portion thereof. In some embodiments, certain animals are heterozygous with respect to one or more polynucleotide sequences associated with various condition, disorder or diseases, and are heterozygous with respect to a polynucleotide whose sequence encodes an ADAR1 polypeptide or a characteristic portion thereof. In some embodiments, certain animals are homozygous with respect to one or more polynucleotide sequences associated with various condition, disorder or diseases, and are heterozygous with respect to a polynucleotide whose sequence encodes an ADAR1 polypeptide or a characteristic portion thereof. In some embodiments, certain animals are heterozygous with respect to one or more polynucleotide sequences associated with various condition, disorder or diseases, and are homozygous with respect to a polynucleotide whose sequence encodes an ADAR1 polypeptide or a characteristic portion thereof. In some embodiments, certain animals are homozygous with respect to one or more polynucleotide sequences associated with various condition, disorder or diseases, and are homozygous with respect to a polynucleotide whose sequence encodes an ADAR1 polypeptide or a characteristic portion thereof. Cells or tissues may be similarly heterozygous, hemizygous and/or homozygous with respect to various sequences.

[1278] In some embodiments, the present disclosure provides methods for assessing an agent, e.g., an oligonucleotide, or a composition thereof, comprising administering to an animal, cell or tissue described herein the agent or composition. In some embodiments, an agent or composition is assessed for preventing or treating a condition, disorder or disease. In some embodiments, animals, cells, tissues, e.g., as described in various embodiments herein, are animal models, or cells or tissues, for various conditions, disorders or diseases (e.g., comprising mutations associated with various conditions, disorders or diseases, and/or cells, tissues, organs, etc., associated with or of various conditions, disorders or diseases) that are engineered to comprise and/or express a polynucleotide whose sequence encodes an ADAR1 polypeptide or a characteristic portion thereof. In some embodiments, animals may be provided by breeding (e.g., IVF, natural breeding, etc.) an animal that are model animals for various conditions, disorders or diseases but are not engineered to comprise and/or express a polynucleotide whose sequence encodes an ADAR1 polypeptide or a characteristic portion thereof with animals that are engineered to comprise and/or express a polynucleotide whose sequence encodes an ADAR1 polypeptide or a characteristic portion thereof. In some embodiments, cells or tissues may be provided by introducing into cells or tissues a polynucleotide whose sequence encodes an ADAR1 polypeptide or a characteristic portion thereof. In some embodiments, the present disclosure provides a method for preventing or treating a condition, disorder or disease, comprising administering to a subject an effective amount of an agent or a compositions thereof, wherein the agent or composition is assessed in an animal provided herein (e.g., an animal engineered to comprise an ADAR1 polypeptide or a characteristic portion thereof, an animal engineered to comprise and/or express a polynucleotide whose sequence encodes an ADAR1 polypeptide or a characteristic portion thereof, a model animal for a condition, disorder or disease which is engineered to comprise an ADAR1 polypeptide or a characteristic portion thereof, a model animal for a condition, disorder or disease engineered to comprise and/or express a polynucleotide whose sequence encodes an ADAR1 polypeptide or a characteristic portion thereof). In some embodiments, the present disclosure provides a method for preventing or treating a condition, disorder or disease, comprising administering to a subject an effective amount of an agent or a compositions thereof, wherein the agent or composition is assessed in a cell or tissue provided herein. In some embodiments, an animal, cell or tissue comprises a SERPINA1 mutation (e.g., 1024 G>A (E342K)) and is engineered to comprise and/or express a polynucleotide whose sequence encodes an ADAR1 polypeptide or a characteristic portion thereof. In some embodiments, an animal is a non-human animal. In some embodiments, cells are non-human animal cells. In some embodiments, tissues are non-human animal tissues. In some embodiments, a non-human animal is a rodent. In some embodiments, a non-human animal is a mouse. In some embodiments, a non-human animal is a rat. In some embodiments, a non-human animal is a non-human primate.

[1279] In some embodiments, the present disclosure provides methods comprising: 1) assessing an agent or a composition thereof, comprising contacting the agent or a composition thereof with a provided cell or tissue associated with or of a condition, disorder or disease, and 2) administering to a subject suffering from or susceptible to a condition, disorder or disease an effective amount of an agent or composition thereof. In some embodiments, the present disclosure provides methods comprising: 1) assessing an agent or a composition thereof, comprising administering the agent or a composition thereof to a provided animal which is an animal model of a condition, disorder or disease, and 2) administering to a subject suffering from or susceptible to a condition, disorder or disease an effective amount of an agent or composition thereof. In some embodiments, as described herein, a cell, tissue or animal is engineered to comprise an ADAR1 polypeptide or a characteristic portion thereof. In some embodiments, a cell, tissue or animal is engineered to comprise and/or express a polynucleotide whose sequence encodes an ADAR1 polypeptide or a characteristic portion thereof. In some embodiments, a cell, tissue or animal further comprises a nucleotide sequence (e.g., a mutation) associated with a condition, disorder or disease. In some embodiments, an animal is a rodent, e.g., a mouse, a rat, etc. In some embodiments, a cell or tissue is of a rodent, e.g., a mouse, a rat, etc. In some embodiments, a cell is a germline cell. In some embodiments, a fraction of and not all cells, e.g., cells of particular cell types or tissues or location, of a population of cells, a tissue or an animal comprise a nucleotide sequence (e.g., a mutation) associated with a condition, disorder or disease, and such fraction of cells are engineered to comprise an ADAR1 polypeptide or a characteristic portion thereof or engineered to comprise and/or express a polynucleotide whose sequence encodes an ADAR1 polypeptide or a characteristic portion thereof. In some embodiments, a collection of liver cells comprise a SERPINA1 mutation, e.g., 1024 G>A (E342K) and a polynucleotide whose sequence encodes an ADAR1 polypeptide or a characteristic portion thereof. Those skilled in the art appreciate that various technologies are available for optionally controlled introduction and/or expression of a nucleotide sequence in various cells, tissues, or organs and can be utilized in accordance with the present disclosure. In some embodiments, as described herein, a cell, tissue or animal comprises a polynucleotide whose sequence encodes an ADAR1 polypeptide or a characteristic portion thereof in a genome, in some embodiments, in a germline genome. In some embodiments, as described herein, a cell, tissue or animal comprises a nucleotide sequence (e.g., a mutation) associated with a condition, disorder or disease in a genome, in some embodiments, in a germline genome.

[1280] As described herein, in some embodiments, a polynucleotide encodes human ADAR1 p110 or a characteristic portion thereof. In some embodiments, a polynucleotide encodes human ADAR1 p110. In some embodiments, a polynucleotide encodes human ADAR1 p150 or a characteristic portion thereof. In some embodiments, a polynucleotide encodes human ADAR1 p150. In some embodiments, a cell, tissue or animal (e.g., a huADAR mouse or a cell or tissue therefrom) is engineered to comprise and/or express a polynucleotide whose sequence encodes a human ADAR1 p110 polypeptide or a characteristic portion thereof. In some embodiments, a cell, tissue or animal (e.g., a huADAR mouse or a cell or tissue therefrom) is engineered to comprise and/or express a polynucleotide whose sequence encodes a human ADAR1 p110 polypeptide. In some embodiments, a cell, tissue or animal (e.g., a huADAR mouse or a cell or tissue therefrom) is engineered to comprise and/or express a polynucleotide whose sequence encodes a human ADAR1 p150 polypeptide or a characteristic portion thereof. In some embodiments, a cell, tissue or animal (e.g., a huADAR mouse or a cell or tissue therefrom) is engineered to comprise and/or express a polynucleotide whose sequence encodes a human ADAR1 p150 polypeptide. As described herein, in some embodiments, an animal is a rodent, e.g., a mouse or a rat.

[1281] In some embodiments, ADAR (e.g., human ADAR1) transgene is established on a zygote, e.g., SERPINA1 mouse zygote comprising a mutation (e.g., 1024 G>A (E342K) in human SERPINA1) or vice versa. In some embodiments, a zygote is homozygous. In some embodiments, a zygote is heterozygous.

### Uses and Applications

[1282] As appreciated by those skilled in the art, oligonucleotides are useful for multiple purposes. In some embodiments, provided technologies (e.g., oligonucleotides, compositions, methods, etc.) can be useful for modulating levels and/or activities of various nucleic acids (e.g., RNA) and/or products encoded thereby (e.g., proteins). In some embodiments, provided technologies can reduce levels and/or activities of undesired target nucleic acids (e.g., comprising undesired adenosine) and/or products thereof. In some embodiments, provided technologies can increase levels and/or activities of desired target nucleic acids (e.g., comprising I instead of undesired adenosine at one or more locations) and/or products thereof.

[1283] For example, in some embodiments, provided technologies can be utilized as single-stranded oligonucleotides for site-directed editing of target adenosine in target RNA sequences. In some embodiments, provided technologies are capable of modulating levels of expressions and activities. Among other things, the present disclosure provides improvement by provided technologies which can be improvement of various desired biological functions, including but not limited to treatment and/or prevention of various conditions, disorders or diseases (e.g., those associated with G to A mutation).

[1284] In some embodiments, provided technologies can modulate activities and/or functions of a target gene. In some embodiments, a target gene is a gene with respect to which expression and/or activity of one or more gene products (e.g., RNA and/or protein products) are intended to be altered. In many embodiments, target genes have target adenosine residues to be altered and can benefit from conversion of such residues to inosine residues. In some embodiments, when an oligonucleotide as described herein acts on a particular target gene, level and/or activity of one or more gene products of that gene can be altered when the oligonucleotide is present as compared with when it is absent.

[1285] In some embodiments, provided oligonucleotides and compositions are useful for treating various conditions, disorders, or diseases, by reducing levels and/or activities of target transcripts and/or products encoded thereby that are associated with the conditions, disorders, or diseases, and optionally providing transcripts and/or products encoded thereby that are less associated or not associated with the conditions, disorders or diseases (e.g., by conversion of target adenosine to inosine to correct G to A mutations, to alter splicing, etc.). In some embodiments, the present disclosure provides methods for preventing or treating a condition, disorder, or disease, comprising administering to a subject susceptible thereto or suffering therefrom an effective amount of a provided oligonucleotide or composition. In some embodiments, the present disclosure provides methods for preventing or treating a condition, disorder, or disease, comprising administering to a subject susceptible to or suffering from a condition, disorder or disease a provided single-stranded oligonucleotide for site-directed editing of a nucleotide (e.g. target adenosine) in a target RNA sequence, or a composition thereof. In some embodiments, a provided single-stranded oligonucleotide for site-directed editing of a nucleotide in a target RNA sequence is of a base sequence that partially or fully complementary to a portion of a transcript, which transcript is associated with a condition, disorder, or disease. In some embodiments, a base sequence is such that it preferentially binds to a transcript associated with a condition, disorder or disease over other transcripts that are not associated with said condition, disorder, or disease. In some embodiments, a condition, disorder, or disease is associated with a G to A mutation. In some embodiments, a condition, disorder, or disease is associated with a G to A mutation in SERPINA1. In some embodiments, a condition, disorder, or disease is associated with 1024 G>A (E342K) mutation in human SERPINA1. In some embodiments, a condition, disorder or disease is alpha-1 antitrypsin deficiency. In some embodiments, provided technologies increase levels, properties, and/or activities of desired products (e.g., properly folded wild-type A1AT protein in serum) and/or decreases levels, properties, and/or activities of undesired products (e.g., mutant (e.g., E342K) A1AT protein in serum), in absolute amounts (e.g., ng/mL in serum) and/or relatively (e.g., as % of total proteins or total A1AT proteins). In some embodiments, the present disclosure provides a method for increasing levels and/or activities of an alpha-1 antitrypsin (A1AT) polypeptide in the serum or blood of a subject, comprising administering to the subject an effective amount of an oligonucleotide or composition. In some embodiments, an A1AT polypeptide provides one or more higher activities compared to a reference A1AT polypeptide. In some embodiments, an A1AT polypeptide is a wild-type A1AT polypeptide. In some embodiments, method increase the amount of the A1AT polypeptide in serum. In some embodiments, a method decrease the amount of a reference A1AT polypeptide in serum. In some embodiments, a method increase the ratio of the A1AT polypeptide over a reference A1AT polypeptide in serum or blood. In some embodiments, a reference A1AT polypeptide is mutated. In some embodiments, a reference A1AT polypeptide is not properly folded. In some embodiments, a reference A1AT polypeptide is an E342K A1AT polypeptide. In some embodiments, the present disclosure provides a method for decreasing levels and/or activities of a mutant alpha-1 antitrypsin (A1AT) polypeptide in the serum or blood of a subject, comprising administering to the subject an effective amount of an oligonucleotide or composition. In some embodiments, a subject is susceptible to or suffering from a condition, disorder or disease. In some embodiments, a condition, disorder or disease is alpha-1 antitrypsin deficiency. In some embodiments, a subject is a human. In some embodiments, a subject comprises a mutation in human SERPINA1. In some embodiments, a subject comprises 1024 G>A (E342K) mutation in human SERPINA1. In some embodiments, a subject is homozygous with respect to the mutation. In some embodiments, a subject is heterozygous with respect to a mutation.

[1286] In some embodiments, a condition, disorder or disease is not associated with a G to A mutation. In some embodiments, a condition, disorder or disease is associated with increased level and/or activity of a transcript and/or an encoded product thereby, and a provided technology can reduce level and/or activity of a transcript and/or an encoded product thereby, e.g., through introducing one or more A to I to a transcript. In some embodiments, a condition, disorder or disease is associated with decreased level and/or activity of a transcript and/or an encoded product thereby, and a provided technology can increase level and/or activity of a transcript and/or an encoded product thereby, e.g., through introducing one or more A to I to a transcript. In some embodiments, a condition, disorder or disease is associated with splicing, and a provided technology provides splicing modulation through introducing one or more A to I to a transcript (e.g., pre-mRNA).

[1287] In some embodiments, oligonucleotide compositions in provided methods are chirally controlled oligonucleotide compositions. In some embodiments, a method of treating a condition, disorder or disease can include administering a composition comprising a plurality of oligonucleotides sharing a common base sequence, which base sequence is complementary to a target sequence in a target transcript. Among other things, the present disclosure provides an improvement that comprises administering as the oligonucleotide composition a chirally controlled oligonucleotide composition as described in the present disclosure, characterized in that, when it is contacted with the target transcript in a system, adenosine editing of the transcript is improved relative to that observed under a reference condition selected from the group consisting of absence of the composition, presence of a reference composition, and any combinations thereof. In some embodiments, a reference composition is a racemic preparation of oligonucleotides of the same sequence or constitution. In some embodiments, a target transcript is an oligonucleotide transcript.

[1288] As appreciated by those skilled in the art, among other things, provided technologies can be utilized for various applications which involve and/or can benefit from an adenosine to inosine conversion. Certain applications are described in below.

| | | Treatment | | |
|---|---|---|---|---|
| | | Modality | | |
| | | | oligo- | |
| | | oligo- | nucleo- | |
| | | nucleo- | tide/ | |
| | | tide- | siRNA- | |
| | | mediated | mediated | RNA |
| Application | Application | splicing | silencing | editing |
| Alter mRNA splicing | Exon | ✓ | | ✓ |
| | skipping/ | | | |
| | inclusion/ | | | |
| | restore frame | | | |
| Silence protein | Reduce levels | | ✓ | ✓ |
| expression | of toxic | | | |
| | mRNA/protein | | | |
| Fix nonsense mutations | Restore protein | | | ✓ |
| (e.g. those that cannot | expression | | | |
| be splice-corrected) | | | | |
| Fix missense mutations | Restore protein | | | ✓ |
| (e.g., those that cannot | function | | | |
| be splice-corrected) | | | | |
| Modify amino acid | Alter protein | | | ✓ |
| codons | level/function | | | |
| Remove upstream | Increase protein | | | ✓ |
| ORF | expression | | | |

[1289] Those skilled in the art reading the present disclosure will appreciate that various G to A mutations, e.g., those in transcripts from C to T mutations, a type of the most common mutations occurring in human genes, may be corrected and thus benefit from provided technologies. In some embodiments, provided technologies may be utilized to target mutations associated with various polar or charged amino acids (e.g., Ser, Tyr, Asp, Glu, His, Asn, Gln, Lys, etc.), stop codons (opal, ochre and amber), transcriptional start sites, splicing signals, microRNA recognition sites, repetitive elements, microRNAs (miRNAs), protein encoding transcripts, etc. Among other things, provided technologies can elicit diverse functional outcomes, e.g., altered splicing, restored/improved protein expression and/or functions, etc.

[1290] In some embodiments, through editing provided technology can restore protein functions (e.g., fix nonsense and missense mutations that cannot be splice-corrected, remove stop mutations, prevent protein misfolding and aggregation, etc., and can be utilized for preventing and/or treating various conditions, disorders or diseases such as recessive or dominant genetically defined diseases), modify protein functions (e.g., alter protein processing (e.g., protease cleavage sites), protein-protein interactions, modulate signaling pathways, etc., and can be utilized for preventing and/or treating various conditions, disorders or diseases such as those related to ion channel permeability), protein upregulation (e.g., miRNA target site modification, modifying upstream ORFs, modification of ubiquitination sites, etc., and can be utilized for preventing and/or treating various conditions, disorders or diseases such as Haploinsufficient diseases)). In some embodiments, a provided technology restores or improves expression, level, function and/or activity of a protein. In some embodiments, a provided technology is useful for preventing or treating a recessive or dominant genetically defined condition, disorder or disease, e.g., one associated with a G to A mutation. In some embodiments, a condition, disorder or disease is a liver condition, disorder or disease. In some embodiments, a condition, disorder or disease is a metabolic liver condition, disorder or disease. In some embodiments, a condition, disorder or disease is a neurodevelopmental condition, disorder or disease. In some embodiments, a provided technology modify express, level, function and/or activity of a protein. In some embodiments, a provided technology reduces express, level, function and/or activity of a protein. In some embodiments, a provided technology increases express, level, function and/or activity of a protein. In some embodiments, a provided technology modulate ion channel permeability. In some embodiments, a provided technology is useful for preventing or treating a condition, disorder or disease associated with ion channel permeability. In some embodiments, a condition, disorder or disease is familial epilepsies. In some embodiments, a condition, disorder or disease is neuropathic pain. In some embodiments, a condition, disorder or disease is AATD. In some embodiments, a condition, disorder or disease is Rett syndrome. In some embodiments, a condition, disorder or disease is recessive or dominant genetically defined diseases. In some embodiments, a provided technology modifies a nucleic acid (e.g., miRNA) target site. In some embodiments, a provided technology modifies, reduces function or activity of, removes, or suppresses an upstream ORF (e.g., in some embodiments, modifies an A (e.g., of an ATG start codon of an uORF)). In some embodiments, a provided technology modifies a modification site of a protein, e.g., a ubiquitination site. In some embodiments, a provided technology is useful for preventing or treating a condition, disorder or disease associated with haploinsufficiency. In some embodiments, a provided technology is useful for preventing or treating a neuronal condition, disorder or disease. In some embodiments, a provided technology is useful for preventing or treating a neuromuscular condition, disorder or disease. In some embodiments, a provided technology is useful for preventing or treating dementias. In some embodiments, a provided technology is useful for preventing or treating dementias. In some embodiments, a provided technology is useful for preventing or treating a haploinsufficient condition, disorder or disease. In some embodiments, the provided technology provides a method for prevent or treating a condition, disorder or disease, comprising administering to a subject susceptible thereto or suffering therefrom an effective amount of an oligonucleotide or a composition thereof as described herein. Those skilled in the art appreciate that through, e.g., editing a nucleobase such as A in a RNA, a protein encoded thereby can be edited. In some embodiments, an amino acid residue is replaced with another amino acid residue. In some embodiments, a protein is elongated. In some embodiments, a protein is shortened. In some embodiments, expression, level, function, stability, property and/or activity are modulated. In some embodiments, some properties and/or activities are enhanced while others are reduced or maintained the same. In some embodiments, some properties and/or activities are reduced while others are enhanced or maintained the same.

[1291] In some embodiments, provided technology edits a nucleic acid or a codon comprising a mutation. In some embodiments, a mutation is a nonsense mutation. In some embodiments, a mutation is a missense mutation. In some embodiments, a mutation is a silent mutation. In some embodiments, a provided technology fixes a nonsense mutation. In some embodiments, a provided technology fixes a missense mutation. In some embodiments, a provided technology removes a stop mutation. In some embodiments, a provided technology prevents or reduces misfolding and/or aggregation. In some embodiments, a provided technology edits a codon comprising a mutation. In some embodiments, an edited nucleobase is a mutation. In some embodiments, an edited nucleobase is not a mutation but another nucleobase in a codon. In some embodiments, after editing a codon becomes its corresponding wild type codon. In some embodiments, after editing a codon encodes the same amino acid as a wild type codon. In some embodiments, after editing a codon encodes a different amino acid from a wild type codon. In some embodiments, a protein comprising such a different amino acid residue shares one or more properties and/or performs one or more functions of its corresponding wild type protein. In some embodiments, a protein comprising such a different amino acid residue shares more similarities to a wild type protein, and/or provides higher levels of desired activities compared to a corresponding mutated, unedited protein. In some embodiments, a nonsense or missense mutation cannot be splice-corrected. In some embodiments, a provided technology creates a silent mutation. In some embodiments, a silent mutation modulates levels of an encoded protein. In some embodiments, a protein level is increased. In some embodiments, a protein level is decreased.

[1292] In some embodiments, a provided technology modifies protein function. In some embodiments, a provided technology changes one or more properties and/or functions of a nucleic acid (e.g., a transcript) and/or a protein. In some embodiments, a provided technology increases, promotes, or enhances one or more properties and/or functions of a nucleic acid (e.g., a transcript) and/or a protein. In some embodiments, a provided technology provide one or more new properties and/or activities, e.g., of a nucleic acid (e.g., a transcript) and/or a protein. In some embodiments, a provided technology decreases, inhibits, or removes one or more properties and/or functions of a nucleic acid (e.g., a transcript) and/or a protein. In some embodiments, a provided technology alter protein processing. For example, in some embodiments, protease cleavage sites are edited. In some embodiments, provided technologies edit one or more residues involved in protein-protein interactions. In some embodiments, provided technologies edit amino acid residues at protein-protein interactions domains. In some embodiments, through editing mRNAs that encode proteins, residues at various regions of polypeptides, e.g., protease cleavage sites, various domains (e.g., protein-protein interactions domains), modification sites, miRNA targeting sites, ubiquitination sites, etc. can be edited. In some embodiments, provided technologies modulate signaling pathways.

[1293] In some embodiments, provided technologies restore, increase or enhance levels of functional proteins. In some embodiments, provided technologies reduce levels and/or activities of mutant or undesired nucleic acids (e.g., RNA transcripts) and proteins. In some embodiments, provided technologies restore or correct expression of one or more polypeptides. In some embodiments, provided technologies can upregulate expression. In some embodiments, provided technologies can upregulate translation. In some embodiments, provided technologies can upregulate activity levels of polypeptides. In some embodiments, provided technologies modify functions of target nucleic acids (e.g., RNA transcripts) and/or products encoded thereby (e.g., polypeptides). In some embodiments, provided technologies modulate post-translation modifications of target nucleic acids (e.g., RNA transcripts) and/or products encoded thereby (e.g., polypeptides). In some embodiments, provided technologies can upregulate levels of polypeptides. In some embodiments, provided technologies edit codons encoding amino acid residues involved in protein-protein interactions or protein interactions with other agents, including in some embodiments, changing the amino acid residues to different amino acid residues to enhance or reduce interactions. In some embodiments, provided technologies modify one or more functions of nucleic acids and/or proteins. In some embodiments, provided technologies can modulate protein-protein interactions. In some embodiments, provided technologies edit encoding transcripts to remove, change, or incorporate amino acid residues for post-translation modification. In some embodiments, provided technologies modulate post-translational modifications. In some embodiments, provided technologies modulate nucleic acid folding. In some embodiments, provided technologies modulate protein folding. In some embodiments, provided technologies modulate stability of transcripts and/or products thereof. In some embodiments, provided technologies modulate protein stability. In some embodiments, provided technologies modulate processing of transcripts and/or products thereof. In some embodiments, provided technologies modulate nucleic acids (e.g., transcripts) processing. In some embodiments, provided technologies alter protein processing. In some embodiments, provided technologies modulate post translational processes. For example, in some embodiments, provided technologies modulate PCSK9 post translational processes. Among other things, provided technologies are applicable to a wide range of therapeutic applications with large patient populations.

[1294] For example, as demonstrated herein, in some embodiments, one or more amino acid residues of one or more proteins may be changed through editing of encoding mRNAs to modulate protein-protein interactions. Suitable amino acid residues for editing include various reported amino acid residues involved in protein-protein interactions, or can be identified through technologies available in the art, e.g., mutation technologies, structural biology technologies, etc. In some embodiments, the present disclosure provides technologies for modulating levels, properties and/or activities of nucleic acids (e.g., transcripts) and/or proteins through editing of nucleic acids (e.g., transcripts) and/or proteins that interact them. In some embodiments, the present disclosure provides technologies for modulating levels and/or activities of a protein (e.g., a transcription factor) and/or transcription and/or expression regulated thereby. In some embodiments, a provided technology comprises editing an amino acid residue of a protein (e.g., a transcription factor) or a partner protein that it interacts with, wherein interaction between the protein and a partner protein is reduced or enhanced. In some embodiments, a provided technology comprises editing an amino acid residue of a protein (e.g., a transcription factor) or a partner protein that it interacts with, wherein interaction between the protein and a partner protein is reduced. In some embodiments, such editing stabilizes a protein so that its levels and/or activities (e.g., transcription activation of certain nucleic acids) are increased. In some embodiments, the present disclosure provides technologies for modulating (e.g., activating, increasing, reducing, suppressing, etc.) expression of a nucleic acid, comprising editing an adenosine in a transcript encoding a protein that regulates expression of the nucleic acid, or a protein that interacts with a protein that regulates expression of the nucleic acid, or a protein that is a member of a pathway comprising a protein that regulates expression of the nucleic acid, wherein editing modulates levels and/or activities of a protein that regulates expression of the nucleic acid. In some embodiments, transcripts levels and/or activities of a nucleic acids are modulated. In some embodiments, levels and/or activities of proteins encoded by such transcripts are modulated. Among other things, the present disclosure confirms that many functions, activities, pathways, etc., that involve protein-protein interactions may be modulated through editing of interacting amino acid residues of one or more interacting proteins. For example, editing of one or more amino acid residues in NRF2 (e.g., Glu82 (e.g., to Gly), Glu79 (e.g., to Gly), Glu78 (e.g., to Gly), Asp76 (e.g., to Gly), Ile28 (to Val), Asp27 (e.g., to Gly), Gln26 (e.g., to Arg), etc.) or Keap1 (e.g., Ser603 (e.g., to Gly), Tyr572 (e.g., to Cys), Tyr525 (e.g., to Cys), Ser508 (e.g., to Gly), His436 (e.g., to Arg), Asn382 (e.g., to Asp), Arg380 (e.g., to Gly), Tyr334 (e.g., to Cys), etc.) can increase levels and/or activities of NRF2, and/or expression of various nucleic acids (e.g., various genes) regulated by NRF2. In some embodiments, the present disclosure provides a method for modulating, e.g., reducing, NRF2-Keap1 interaction in a system, comprising administering to a system comprising a NRF2 or Keap1 mRNA an oligonucleotide or a composition thereof, wherein the oligonucleotide edits an adenosine in the mRNA so that an amino acid residue in a protein encoded by the mRNA is edited to be a different residue. In some embodiments, the present disclosure provides a method for increasing a level and/or activity of NRF2 in a system, comprising administering to a system comprising a NRF2 or Keap1 mRNA an oligonucleotide or a composition thereof, wherein the oligonucleotide edits an adenosine in the mRNA so that an amino acid residue in a protein encoded by the mRNA is edited to be a different residue. In some embodiments, the present disclosure provides a method for increasing transcription or expression of a NRF2-regulated nucleic acid (e.g., a gene), comprising administering to a system comprising a NRF2 or Keap1 mRNA an oligonucleotide or a composition thereof, wherein the oligonucleotide edits an adenosine in the mRNA so that an amino acid residue in a protein encoded by the mRNA is edited to be a different residue. In some embodiments, levels and/or activities of transcripts from NRF2-regulated nucleic acids, e.g., genes such as SRGN, HMOX1, SLC7a11, NQO1, etc., and/or products (e.g., proteins) encoded thereby are increased. In some embodiments, a system comprising a NRF2 and a Keap1 mRNA, and NRF2 and Keap1 proteins are translated from such mRNA. In some embodiments, a target adenosine of a NRF2 and/or a Keap1 mRNA is edited so that an amino acid residue is replaced with a different amino acid residue after translation. In some embodiments, an administered oligonucleotide or composition thereof targets NRF2 mRNA. In some embodiments, an administered oligonucleotide or composition thereof targets Keap1 mRNA. In some embodiments, an amino acid residue in NRF2 (e.g., Glu82 (e.g., to Gly), Glu79 (e.g., to Gly), Glu78 (e.g., to Gly), Asp76 (e.g., to Gly), Ile28 (to Val), Asp27 (e.g., to Gly), Gln26 (e.g., to Arg), etc.) is edited. In some embodiments, an amino acid residue in Keap1 (e.g., Ser603 (e.g., to Gly), Tyr572 (e.g., to Cys), Tyr525 (e.g., to Cys), Ser508 (e.g., to Gly), His436 (e.g., to Arg), Asn382 (e.g., to Asp), Arg380 (e.g., to Gly), Tyr334 (e.g., to Cys), etc.) is edited. In some embodiments, two or more amino acid residues are edited. In some embodiments, each edited amino acid residue is independently a NRF2 residue. In some embodiments, each edited amino acid residue is independently a Keap1 residue. In some embodiments, an edited amino acid residue is a Keap1 residue, and an edited amino acid residue is a NRF2 residue. In some embodiments, a system is or comprises a cell. In some embodiments, a system is or comprises a tissue. In some embodiments, a system is or comprises an organ. In some embodiments, a system is an orgasm. In some embodiments, a system is an in vitro system. Certain NRF2-targeting and Keap1-targeting oligonucleotides and/or oligonucleotide compositions are presented in the Table(s) as examples. In some embodiments, provided technologies are useful for treating a condition, disorder or disease related to NRF2. In some embodiments, provided technologies are useful for treating a condition, disorder or disease related to Keap1. In some embodiments, provided technologies are useful for treating a condition, disorder or disease related to NRF2-Keap1 interaction.

[1295] In some embodiments, provided technologies modulate enzymatic activities. In some embodiments, provided technologies increase an enzymatic activity, e.g., through editing a codon to a codon encoding a amino acid residue that can increase an enzymatic activity. In some embodiments, provided technologies decrease an enzymatic activity, e.g., those associated with a condition, disorder or disease, through editing a codon to a codon encoding a amino acid residue that can decrease an enzymatic activity. Various enzymatic activities, in many cases with amino acid residues involved for such activities, are reported or can be identified and characterized, and can be modulated in accordance with the present disclosure. In some embodiments, an activity is a kinase activity.

[1296] In some embodiments, editing of a protein (e.g., through editing of its encoding mRNA to change one or more amino acid residues) decreases degradation of the protein or a protein which it interacts with. In some embodiments, editing of a protein upregulate its levels. In some embodiments, editing of a protein modulate protein processing. In some embodiments, editing of a protein modulate its folding. In some embodiments, editing of a protein modulate its stability. In some embodiments, editing of a protein modulate protein modification (e.g., increasing, decreasing, removing or introducing a modification site, etc.). In some embodiments, editing of a protein modulate post-translational modification (e.g., increasing, decreasing, removing or introducing a modification site, etc.). In some embodiments, provided technologies are useful for treating associated conditions, disorders or diseases, such as dementias, familial epilepsies, neuropathic pain, neuromuscular disorders, dementias, haploinsufficient diseases, loss of function conditions, disorders or diseases, etc.

[1297] Technologies of present disclosure can provide efficient editing in various types of cells, tissues, organs and/or organisms. In some embodiments, provided technologies can provide efficient editing in various immune cells. As demonstrated herein, provided technologies can provide high levels of editing in human peripheral blood mononuclear cells (PBMCs). Among other things, provided technologies can provide high levels of editing in various cell populations such as CD4+ T cells, CD8+ T cells, CD14 monocytes, CD19 B cells, NK cells, Tregs T cells, etc. In some embodiments, immune cells are activated (e.g., by PHA) before contact with oligonucleotides. In some embodiments, cells are non-activated. In some embodiments, similar levels of editing are observed in activated and non-activated cells. In some embodiments, higher levels of editing are observed in activated cells. In some embodiments, after editing cells, e.g., PBMCs, may be sorted into various cell types. In some embodiments, cells can be first sorted before contact with oligonucleotides. As appreciated by those skilled in the art, immune cells have a number of functions and may be utilized for a number of purposes including for treating various conditions, disorders or diseases. In some embodiments, immune cells are utilized in immunotherapy, e.g., for various types of cancer. Among other things, the present disclosure provides technologies for editing one or more transcripts expressed in immune cells to improve its properties and/or activities for immunotherapy. In some embodiments, provided technologies can reduce expression and/or activity of one or more genes in immune cells, e.g., FAS, BID, CTLA4, PDCD1, CBLB, PTPN6, TRAC, TRBC, etc. In some embodiments, transcripts from such genes are edited. In some embodiments, a target cell is a T cell, e.g., a CD8+ T cell (e.g., a CD8+ naïve T cell, central memory T cell, or effector memory T cell), a CD4+ T cell, a natural killer T cell (NK T cell), a regulatory T cell (Treg), a stem cell memory T cell, a lymphoid progenitor cell, a hematopoietic stem cell, a natural killer cell (NK cell) or a dendritic cell. In some embodiments, cells are CD4+ cells, e.g., CD4+ T cells. In some embodiments, cells are CD8+ cells, e.g., CD8+ T cells. In some embodiments, cells are CD14+ cells, e.g., CD14+ monocytes. In some embodiments, cells are CD19+ cells, e.g., CD19+ B cells. In some embodiments, cells are NC cells. In some embodiments, cells are T-regulatory cells. In some embodiments, a target cell is an induced pluripotent stem (iPS) cell or a cell derived from an iPS cell, e.g., an iPS cell generated from a subject, manipulated to alter (e.g., induce a mutation in) expression of one or more genes, e.g., FAS, BID, CTLA4, PDCD1, CBLB, PTPN6, TRAC or TRBC gene, and differentiated into, e.g., a T cell, e.g., a CD8+ T cell (e.g., a CD8+ naïve T cell, central memory T cell, or effector memory T cell), a CD4+ T cell, a stem cell memory T cell, a lymphoid progenitor cell or a hematopoietic stem cell.

[1298] Among other things, provided technologies are useful for increasing, enhancing, improving or upregulating levels, properties, activities, etc., of various polypeptides including various proteins. In some embodiments, provided technologies modify binding or target sites, e.g., miRNA target sites. In some embodiments, provided technologies modify regulatory elements in transcripts. In some embodiments, provided technologies modify upstream ORFs (e.g., A in ATG). In some embodiments, provided technologies modify amino acid residues that can be modified, e.g., ubiquitination sites. Those skilled in the art appreciate provided technologies can also be useful for decreasing or downregulating levels, properties, activities, etc., of various polypeptides including various proteins through modifying RNAs.

[1299] In some embodiments, an editing site, e.g., a target adenosine, is in a coding region. In some embodiments, it is in a non-coding region. In some embodiments, a target nucleic acid is a non-coding RNA.

[1300] Certain applications are described, e.g., in WO 2016/097212, WO 2017/220751, WO 2018/041973, WO 2018/134301A1, WO 2020/154344, WO 2020/154343, WO 2020/154342, WO 2020/165077, WO 2020/201406, WO 2020/216637, or WO 2020/252376.

[1301] Many adenosines associated with various conditions, disorders or diseases are reported or can be identified, and can be targeted using provided technologies, e.g., for preventing or treating associated conditions, disorders or diseases. For example, it has been reported that various adenosines associated with various conditions, disorders or diseases have been identified in SNCA (e.g., Parkinson's disease), APP (e.g., Alzheimer's Disease), Tau (e.g., Alzheimer's Disease), Nav1.7 (e.g., Chronic Pain), C9orf72 (e.g., Amyotrophic Lateral Sclerosis), SOD1 (e.g., Amyotrophic Lateral Sclerosis), DYRK1A (e.g., Down Syndrome), IT15 (e.g., Huntington's Disease), HEXA (e.g., Tay-Sachs Disease), RAI1 (e.g., Protocki-Lupski Syndrome), ABCA4 (e.g., Stargardt Disease), USH2A (e.g., Usher Syndrome), NRP1 (e.g., Wet AMD, Dry AMD, etc.), PCSK9 (e.g., cardiovascular conditions, disorders or diseases), LIPA (e.g., Cholesteryl Ester Storage Disease), HFE (e.g., Hemochromatosis), ALAS1 (e.g., Porphyria/Acute Hepatic Porphyria), ATP7B (Wilson Disease), COL4A5 (e.g., Alport Syndrome), LDHA (e.g., Primary Hyperoxaluria), HAO1 (e.g., Primary Hyperoxaluria Type 2), DUX4 (e.g., Facioscapulohumeral Dystrophy), DMPK (e.g., Myotonic Dystrophy), BCL11A (e.g., Sickle Cell Disease), Mex3B (e.g., Asthma), CIDEC (e.g., obesity), SCD1 (e.g., obesity), GNB3 (e.g., obesity), FGFR3 (e.g., Achondroplasia), CLCN7 (e.g., Osteopetrosis), PMP22 (e.g., Charcot-Marie-Tooth Disease), ENAC (e.g., Cystic Fibrosis), GHR (e.g., Acromegaly), TTR (e.g., Transthyretin Amyloidosis (familial)), etc. In some embodiments, the present disclosure provides oligonucleotides and compositions targeting such adenosines, and methods for preventing or treating such conditions, disorders or diseases.

[1302] In some embodiments, conditions, disorders or diseases that may be treated include, for example, alpha-1 antitrypsin deficiency, Alzheimer's disease, amyloid diseases, Becker muscular dystrophy, breast cancer predisposition mutations, Canavan disease, Charcot-Marie-Tooth disease, cystic fibrosis, Factor V Leiden deficiency, Type 1 diabetes, Type 2 diabetes, Duchenne muscular dystrophy, Fabry disease, hereditary tyrosinemia type I (HTI), familial adenomatous polyposis, familial amyloid cardiomyopathy, familial amyloid polyneuropathy, familial dysautonomia, familial hypercholesterolemia, Friedreich's ataxia, Gaucher disease type I, Gaucher disease II, glycogen storage disease type II, GM2 gangliosidosis, hemochromatosis, hemophilia A, hemophilia B, hemophilia C, hexosaminidase A deficiency, ovarian cancer predisposition mutations, obesity, phenylketonuria, polycystic kidney disease, prion disease, senile systemic amyloidosis, sickle-cell disease, Smith-Lemli-Opitz syndrome, spinal muscular atrophy, Wilson's disease, Parkinson's disease, and hereditary blindness. In some embodiments, diseases/targets include: cystic fibrosis transmembrane conductance regulator gene (CFTR); albinism, Amyotrophic lateral sclerosis, Asthma, β-thalassemia, Cadasil syndrome, Chronic Obstructive Pulmonary Disease (COPD), Distal Spinal Muscular Atrophy (DSMA), Duchenne/Becker muscular dystrophy, Dystrophic Epidermolysis bullosa, Epidermylosis bullosa, dystrophin gene (DMD); amyloid beta (A4) precursor protein gene (APP); Factor V Leiden associated disorders, Glucose-6-phosphate dehydrogenase, Haemophilia, Hereditary Hematochromatosis, Hunter Syndrome, Huntington's disease, Hurler Syndrome, Inflammatory Bowel Disease (IBD), Inherited polyagglutination syndrome, Leber congenital amaurosis, Lesch-Nyhan syndrome, Lynch syndrome, Marfan syndrome, Mucopolysaccharidosis, Myotonic dystrophy types I and II, neurofibromatosis, Niemann-Pick disease type A, B and C, NY-esol related cancer, Rett syndrome, NY-ESO-1 related cancer, 11-thalassemia, Galactosemia, Gaucher's Disease, Factor XII gene; Factor IX gene; Factor XI gene; HgbS; insulin receptor gene; adenosine deaminase gene; alpha-1 antitrypsin gene; breast cancer 1 gene (BRCA1); breast cancer 2 gene (BRCA2); aspartocyclase gene (ASPA); galactosidase alpha gene (GLA); adenomatous polyposis coli gene (APC); inhibitor of kappa light polypeptide gene enhancer in B-cells, kinase complex-associated protein (IKBKAP); glucosidase beta acid gene (GBA); glucosidase alpha acid gene (GAA); hemochromatosis gene (HFE); apolipoprotein B gene (APOB); low density lipoprotein receptor gene (LDLR), low density lipoprotein receptor adaptor protein 1 gene (LDLRAP1); proprotein convertase subtilisin/kexin type 9 gene (PCSK9); polycystic kidney disease 1 (autosomal dominant) gene (PKD-1); Prion protein gene (PRNP); PTP-1B; 7-dehydrocholesterol reductase gene (DHCR7); survival of motor neuron 1, telomeric gene (SMN1); biquitin-like modifier activating enzyme 1 gene (UBA1); dynein, cytoplasmic 1, heavy chain 1 gene (DYNC1H1), survival of motor neuron 2, centromeric gene (SMN2); (vesicle-associated membrane protein)-associated protein B and C (VAPB); hexosaminidase A (alpha polypeptide) gene (HEXA); transthyretin gene (TTR); ATPase, Cu++ transporting, beta polypeptide gene (ATP7B); phenylalanine hydroxylase gene (PAH); rhodopsin gene; retinitis pigmentosa 1 (autosomal dominant) gene (RP1); retinitis pigmentosa 2 (X-linked recessive) gene (RP2), Sturge-Weber Syndrome, Parkinson's disease, Peutz-Jeghers Syndrome, Pompe's disease, Primary Ciliary Disease, Prothrombin mutation related disorders, such as the Prothrombin G20210A mutation, Pulmonary Hypertension, Sandhoff Disease, Severe Combined Immune Deficiency Syndrome (SCID), Stargardt's Disease, Tay-Sachs Disease, Usher syndrome, X-linked immunodeficiency, various forms of cancer (e.g. BRCA1 and 2 linked breast cancer and ovarian cancer), and the like and other known gene targets. Other diseases include those point mutations or small deletions or insertions or diseases that can be corrected by point changes or small deletions or insertions listed in http://www.omim.org/ Online Mendelian Inheritance in Man® An Online Catalog of Human Genes and Genetic Disorders Updated, e.g., on 24 Sep. 2021.

[1303] In some embodiments, the present disclosure provides technologies targeting IDUA. In some embodiments, the present disclosure provides methods for preventing or treating a condition, disorder or disease associated with IDUA, comprising administering to a subject susceptible thereto or suffering therefrom an effective amount of an oligonucleotide or composition. In some embodiments, a subject benefits from a G to A editing in IDUA. In some embodiments, a condition, disorder or disease is Hurler syndrome. In some embodiments, the present disclosure provides technologies targeting PINK1. In some embodiments, the present disclosure provides methods for preventing or treating a PINK1-associated condition, disorder or disease, comprising administering to a subject susceptible thereto or suffering therefrom an effective amount of an oligonucleotide or composition. In some embodiments, a subject benefits from a G to A editing in PINK1. In some embodiments, a condition, disorder or disease is Parkinson's disease. In some embodiments, the present disclosure provides technologies targeting Factor V Leiden. In some embodiments, the present disclosure provides methods for preventing or treating a Factor V Leiden-associated condition, disorder or disease, comprising administering to a subject susceptible thereto or suffering therefrom an effective amount of an oligonucleotide or composition. In some embodiments, a subject benefits from a G to A editing in Factor V Leiden. In some embodiments, a condition, disorder or disease is Factor V Leiden deficiency. In some embodiments, the present disclosure provides technologies targeting CFTR. In some embodiments, the present disclosure provides methods for preventing or treating a CFTR-associated condition, disorder or disease, comprising administering to a subject susceptible thereto or suffering therefrom an effective amount of an oligonucleotide or composition. In some embodiments, a subject benefits from a G to A editing in CFTR. In some embodiments, a condition, disorder or disease is cystic fibrosis.

[1304] It is reported that there are over 32,000 pathogenic human SNPs nearly half of which are G to A mutations that can be corrected by provided technologies. Indeed, tens of thousands of disease are reported to be associated with G to A mutation and can be prevented or treated by provided technologies. Among other things, provided technologies can be utilized to prevent or treat many conditions, disorders or diseases associated with premature stop codons; it is reported that ˜12% of all reported disease-causing mutations are single point mutations that result in a premature stop codon. In some embodiments, the provided technologies correct a premature stop codon. See, e.g., ClinVar database; Gaudelli N M et al., Nature. 2017 Nov. 23; 551(7681): 464-471; Keeling K M et al., Madame Curie Bioscience Database 2000-2013; etc.

[1305] In some embodiments, when an oligonucleotide or oligonucleotide composition is contacted with a target nucleic acid comprising a target adenosine in a system, a target adenosine in a target nucleic acid is modified. In some embodiments, when an oligonucleotide or oligonucleotide composition is contacted with a target nucleic acid comprising a target adenosine in a system, level of a target nucleic acid is reduced compared to absence of the product or presence of a reference oligonucleotide. In some embodiments, when an oligonucleotide or oligonucleotide composition is contacted with a target nucleic acid comprising a target adenosine in a system, splicing of a target nucleic acid or a product thereof is altered compared to absence of the oligonucleotide or presence of a reference oligonucleotide. In some embodiments, when an oligonucleotide or oligonucleotide composition is contacted with a target nucleic acid comprising a target adenosine in a system, level of a product of a target nucleic acid is altered compared to absence of the product or presence of a reference oligonucleotide. In some embodiments, level of a product is increased, wherein the product is or is encoded by a nucleic acid which is otherwise identical to a target nucleic acid but a target adenosine is modified. In some embodiments, level of a product is increased, wherein the product is or is encoded by a nucleic acid which is otherwise identical to a target nucleic acid but a target adenosine is replaced with inosine. In some embodiments, level of a product is increased, wherein the product is or is encoded by a nucleic acid which is otherwise identical to a target nucleic acid but the adenine of a target adenosine is replaced with guanine. In some embodiments, a product is a protein. In some embodiments, a target adenosine is a mutation from guanine. In some embodiments, a target adenosine is more associated with a condition, disorder or disease than a guanine at the same position. In some embodiments, an oligonucleotide is capable of forming a double-stranded complex with a target nucleic acid. In some embodiments, a target nucleic acid or a portion thereof is or comprises RNA. In some embodiments, a target adenosine is of an RNA. In some embodiments, a target adenosine is modified, and the modification is or comprises deamination of a target adenosine. In some embodiments, a target adenosine is modified and the modification is or comprises conversion of a target adenosine to an inosine. In some embodiments, a modification is promoted by an ADAR protein. In some embodiments, a system is an in vitro or ex vivo system comprising an ADAR protein. In some embodiments, a system is or comprises a cell that comprises or expresses an ADAR protein. In some embodiments, a system is a subject comprising a cell that comprises or expresses an ADAR protein. In some embodiments, a ADAR protein is ADAR1. In some embodiments, an ADAR1 protein is or comprises p110 isoform. In some embodiments, an ADAR1 protein is or comprises p150 isoform. In some embodiments, an ADAR1 protein is or comprises p110 and p150 isoform. In some embodiments, a ADAR protein is ADAR2. As demonstrated herein, the present disclosure among other things provides technologies for recruiting enzymes to target sites (e.g., those comprising target As), comprising contacting such target sites with, or administering to systems comprising or expressing polynucleotide (e.g., RNA) comprising such target sites, provided oligonucleotides or compositions thereof. In some embodiments, an enzyme is an RNA-editing enzyme such as ADAR1, ADAR2, etc. as described herein.

[1306] In some embodiments, an oligonucleotide composition comprising a plurality of oligonucleotides provide a greater level, e.g., a target adenosine is modified at a greater level, than that is observed with a comparable reference oligonucleotide composition. In some embodiments, a reference oligonucleotide composition comprises no or a lower level of oligonucleotides of the plurality. In some embodiments, a reference composition does not contain oligonucleotides that have the same constitution as an oligonucleotide of the plurality. In some embodiments, a reference composition does not contain oligonucleotides that have the same structure as an oligonucleotide of the plurality. In some embodiments, a reference oligonucleotide composition is a composition whose oligonucleotides having the same base sequence as oligonucleotides of the plurality contain a lower level of 2′-F modifications compared to oligonucleotides of the plurality. In some embodiments, a reference oligonucleotide composition is a composition whose oligonucleotides having the same base sequence as oligonucleotides of the plurality contain a lower level of 2′-OMe modifications compared to oligonucleotides of the plurality. In some embodiments, a reference oligonucleotide composition is a composition whose oligonucleotides having the same base sequence as oligonucleotides of the plurality have a different sugar modification pattern compared to oligonucleotides of the plurality. In some embodiments, a reference oligonucleotide composition is a composition whose oligonucleotides having the same base sequence as oligonucleotides of the plurality contain a lower level of modified internucleotidic linkages compared to oligonucleotides of the plurality. In some embodiments, a reference oligonucleotide composition is a composition whose oligonucleotides having the same base sequence as oligonucleotides of the plurality contain a lower level of phosphorothioate internucleotidic linkages compared to oligonucleotides of the plurality. In some embodiments, a composition is a stereorandom oligonucleotide composition. In some embodiments, a reference composition is a stereorandom oligonucleotide composition of oligonucleotides of the same constitution as oligonucleotides of the plurality.

[1307] In some embodiments, the present disclosure provides technologies for modifying a target adenosine in a target nucleic acid, comprising contacting a target nucleic acid with an provided oligonucleotide or oligonucleotide composition as described herein. In some embodiments, the present disclosure provides a method for deaminating a target adenosine in a target nucleic acid, comprising contacting a target nucleic acid with an oligonucleotide or composition as described herein. In some embodiments, the present disclosure provides a method for producing, or restoring or increasing level of a product of a particular nucleic acid, comprising contacting a target nucleic acid with a provided oligonucleotide or composition wherein a target nucleic acid comprises a target adenosine, and the particular nucleic acid differs from a target nucleic acid in that the particular nucleic acid has an I or G instead of a target adenosine. In some embodiments, the present disclosure provides a method for reducing level of a product of a target nucleic acid, comprising contacting a target nucleic acid with an oligonucleotide or composition of the present disclosure, wherein a target nucleic acid comprises a target adenosine. In some embodiments, a product is a protein. In some embodiments, a product is a mRNA.

[1308] In some embodiments, the present disclosure provides a method, comprising:
[1309] contacting an oligonucleotide or composition with a sample comprising a target nucleic acid and an adenosine deaminase, wherein:
[1310] the base sequence of the oligonucleotide or oligonucleotides in the oligonucleotide composition is substantially complementary to that of a target nucleic acid; and
[1311] a target nucleic acid comprises a target adenosine;
[1312] wherein a target adenosine is modified.

[1313] In some embodiments, the present disclosure provides a method comprising:
[1314] 1) obtaining a first level of modification of a target adenosine in a target nucleic acid, which level is observed when a first oligonucleotide composition is contacted with a sample comprising a target nucleic acid and an adenosine deaminase, wherein the first oligonucleotide composition comprises a first plurality of oligonucleotides sharing the same base sequence which is substantially complementary to that of a target nucleic acid; and
[1315] 2) obtaining a reference level of modification of a target adenosine in a target nucleic acid, which level is observed when a reference oligonucleotide composition is contacted with a sample comprising a target nucleic acid and an adenosine deaminase, wherein the reference oligonucleotide composition comprises a reference plurality of oligonucleotides sharing the same base sequence which is substantially complementary to that of a target nucleic acid;
[1316] wherein:
[1317] oligonucleotides of the first plurality comprise more sugars with 2′-F modification, more sugars with 2′-OR modification wherein R is not —H, and/or more chiral internucleotidic linkages than oligonucleotides of the reference plurality; and
[1318] the first oligonucleotide composition provides a higher level of modification compared to oligonucleotides of the reference oligonucleotide composition.

[1319] In some embodiments, the present disclosure provides a method comprising:
[1320] obtaining a first level of modification of a target adenosine in a target nucleic acid, which level is observed when a first oligonucleotide composition is contacted with a sample comprising a target nucleic acid and an adenosine deaminase, wherein the first oligonucleotide composition comprises a first plurality of oligonucleotides sharing the same base sequence which is substantially complementary to that of a target nucleic acid; and
[1321] wherein the first level of modification of a target adenosine is higher than a reference level of modification of a target adenosine, wherein the reference level is observed when a reference oligonucleotide composition is contacted with a sample comprising a target nucleic acid and an adenosine deaminase, wherein the reference oligonucleotide composition comprises a reference plurality of oligonucleotides sharing the same base sequence which is substantially complementary to that of a target nucleic acid;
[1322] wherein:
[1323] oligonucleotides of the first plurality comprise more sugars with 2′-F modification, more sugars with 2′-OR modification wherein R is not —H, and/or more chiral internucleotidic linkages than oligonucleotides of the reference plurality.

[1324] In some embodiments, the present disclosure provides a method comprising:
[1325] 1) obtaining a first level of modification of a target adenosine in a target nucleic acid, which level is observed when a first oligonucleotide composition is contacted with a sample comprising a target nucleic acid and an adenosine deaminase, wherein the first oligonucleotide composition comprises a first plurality of oligonucleotides sharing the same base sequence which is substantially complementary to that of a target nucleic acid; and
[1326] 2) obtaining a reference level of modification of a target adenosine in a target nucleic acid, which level is observed when a reference oligonucleotide composition is contacted with a sample comprising a target nucleic acid and an adenosine deaminase, wherein the reference oligonucleotide composition comprises a reference plurality of oligonucleotides sharing the same base sequence which is substantially complementary to that of a target nucleic acid;
[1327] wherein:
[1328] oligonucleotides of the first plurality comprise more sugars with 2′-F modification, more sugars with 2′-OR modification wherein R is not —H, and/or more chirally controlled chiral internucleotidic linkages than oligonucleotides of the reference plurality; and
[1329] the first oligonucleotide composition provides a higher level of modification compared to oligonucleotides of the reference oligonucleotide composition.

[1330] In some embodiments, the present disclosure provides a method comprising:
[1331] obtaining a first level of modification of a target adenosine in a target nucleic acid, which level is observed when a first oligonucleotide composition is contacted with a sample comprising a target nucleic acid and an adenosine deaminase, wherein the first oligonucleotide composition comprises a first plurality of oligonucleotides sharing the same base sequence which is substantially complementary to that of a target nucleic acid; and
[1332] wherein the first level of modification of a target adenosine is higher than a reference level of modification of a target adenosine, wherein the reference level is observed when a reference oligonucleotide composition is contacted with a sample comprising a target nucleic acid and an adenosine deaminase, wherein the reference oligonucleotide composition comprises a reference plurality of oligonucleotides sharing the same base sequence which is substantially complementary to that of a target nucleic acid;
[1333] wherein:
[1334] oligonucleotides of the first plurality comprise more sugars with 2′-F modification, more sugars with 2′-OR modification wherein R is not —H, and/or more chirally controlled chiral internucleotidic linkages than oligonucleotides of the reference plurality.

[1335] In some embodiments, the present disclosure provides a method comprising:
[1336] 1) obtaining a first level of modification of a target adenosine in a target nucleic acid, which level is observed when a first oligonucleotide composition is contacted with a sample comprising a target nucleic acid and an adenosine deaminase, wherein the first oligonucleotide composition comprises a first plurality of oligonucleotides sharing the same base sequence which is substantially complementary to that of a target nucleic acid; and
[1337] 2) obtaining a reference level of modification of a target adenosine in a target nucleic acid, which level is observed when a reference oligonucleotide composition is contacted with a sample comprising a target nucleic acid and an adenosine deaminase, wherein the reference oligonucleotide composition comprises a reference plurality of oligonucleotides sharing the same base sequence which is substantially complementary to that of a target nucleic acid;
[1338] wherein:
[1339] oligonucleotides of the first plurality comprise one or more chirally controlled chiral internucleotidic linkages; and
[1340] oligonucleotides of the reference plurality comprise no chirally controlled chiral internucleotidic linkages (a reference oligonucleotide composition is a “stereorandom composition); and
[1341] the first oligonucleotide composition provides a higher level of modification compared to oligonucleotides of the reference oligonucleotide composition.

[1342] In some embodiments, the present disclosure provides a method comprising:
[1343] obtaining a first level of modification of a target adenosine in a target nucleic acid, which level is observed when a first oligonucleotide composition is contacted with a sample comprising a target nucleic acid and an adenosine deaminase, wherein the first oligonucleotide composition comprises a first plurality of oligonucleotides sharing the same base sequence which is substantially complementary to that of a target nucleic acid; and
[1344] wherein the first level of modification of a target adenosine is higher than a reference level of modification of a target adenosine, wherein the reference level is observed when a reference oligonucleotide composition is contacted with a sample comprising a target nucleic acid and an adenosine deaminase, wherein the reference oligonucleotide composition comprises a reference plurality of oligonucleotides sharing the same base sequence which is substantially complementary to that of a target nucleic acid;
[1345] wherein:
[1346] oligonucleotides of the first plurality comprise one or more chirally controlled chiral internucleotidic linkages; and
[1347] oligonucleotides of the reference plurality comprise no chirally controlled chiral internucleotidic linkages (a reference oligonucleotide composition is a “stereorandom composition).

[1348] In some embodiments, a first oligonucleotide composition is an oligonucleotide composition as described herein. In some embodiments, a first oligonucleotide composition is a chirally controlled oligonucleotide composition. In some embodiments, a deaminase is an ADAR enzyme. In some embodiments, a deaminase is ADAR1. In some embodiments, a deaminase is ADAR2. In some embodiments, a sample is or comprise a cell. In some embodiments, a target nucleic acid is more associated with a condition, disorder or disease, or decrease of a desired property or function, or increase of an undesired property or function, compared to a nucleic acid which differs from a target nucleic acid in that it has an I or G at the position of a target adenosine instead of a target adenosine. In some embodiments, a target adenosine is a G to A mutation.

[1349] Among other things, oligonucleotide designs of the present disclosure, e.g., nucleobase, sugar, internucleotidic linkage modifications, control of linkage phosphorus stereochemistry, and/or patterns thereof, can be applied to improve prior technologies. In some embodiments, the present disclosure provides improvement over prior technologies by introducing one or more structural features of the present disclosure, e.g., nucleobase, sugar, internucleotidic linkage modifications, control of linkage phosphorus stereochemistry, and/or patterns thereof to oligonucleotides in prior technologies. In some embodiments, an improvement is or comprises improvement from control of linkage phosphorus stereochemistry.

[1350] In some embodiments, the present disclosure provides technologies for improving adenosine editing by a polypeptide, e.g., ADAR1, ADAR2, etc., comprising incorporating into an oligonucleotide a design (e.g., one or more modifications and/or patterns thereof) as described herein. In some embodiments, a design is or comprises a modified base as described herein, e.g., at the position opposite to a target adenosine and/or one or both of its neighboring positions. In some embodiments, a design is or comprises one or more sugar modifications and/or patterns thereof, one or more base modifications and/or patterns thereof, one or more modified internucleotidic linkages and/or patterns thereof, and/or controlled stereochemistry at one or more positions and/or patterns thereof. In some embodiments, a provided technology improves editing by ADAR1 more than ADAR2. In some embodiments, a provided technology improves editing by ADAR2 more than ADAR1. In some embodiments, a provided technology improves editing by ADAR1 p110 more than p150 (e.g., in some embodiments, Rp (e.g., of phosphorothioate internucleotidic linkages) at one or more positions). In some embodiments, a provided technology improves editing by ADAR1 p150 more than p110.

[1351] In some embodiments, a provided technology comprises increasing levels of an adenosine editing polypeptide, e.g., ADAR1 (p110 or p150) or ADAR2, or a portion thereof. In some embodiments, an increase is through expression of an exogenous of a polypeptide.

[1352] In some embodiments, a provided oligonucleotide or oligonucleotide composition does not cause significant degradation of a nucleic acid (e.g., no more than about 5%-100% (e.g., no more than about 10%-100%, 20-100%, 30%-100%, 40%-100%, 50%-80%, 50%-85%, 50%-90%, 50%-95%, 60%-80%, 60%-85%, 60%-90%, 60%-95%, 60%-100%, 65%-80%, 65%-85%, 65%-90%, 65%-95%, 65%-100%, 70%-80%, 70%-85%, 70%-90%, 70%-95%, 70%-100%, 75%-80%, 75%-85%, 75%-90%, 75%-95%, 75%-100%, 80%-85%, 80%-90%, 80%-95%, 80%-100%, 85%-90%, 85%-95%, 85%-100%, 90%-95%, 90%-100%, 10%, 20%, 30%, 40%, 50%, 60%, 65%, 70%, 75%, 80%, 85%, 90%, 95%, or 100%, etc.)). In some embodiments, a composition does not cause significant undesired exon skipping or altered exon inclusion in a target nucleic acid (e.g., no more than about 5%-100% (e.g., no more than about 10%-100%, 20-100%, 30%-100%, 40%-100%, 50%-80%, 50%-85%, 50%-90%, 50%-95%, 60%-80%, 60%-85%, 60%-90%, 60%-95%, 60%-100%, 65%-80%, 65%-85%, 65%-90%, 65%-95%, 65%-100%, 70%-80%, 70%-85%, 70%-90%, 70%-95%, 70%-100%, 75%-80%, 75%-85%, 75%-90%, 75%-95%, 75%-100%, 80%-85%, 80%-90%, 80%-95%, 80%-100%, 85%-90%, 85%-95%, 85%-100%, 90%-95%, 90%-100%, 10%, 20%, 30%, 40%, 50%, 60%, 65%, 70%, 75%, 80%, 85%, 90%, 95%, or 100%, etc.)).

[1353] In some embodiments, provided technologies can provide high levels of adenosine editing (e.g., conversion to inosine). In some embodiments, percentage of target adenosine editing is about 10%-100%, e.g., at least about 10%, 15%, 20%, 25%, 30%, 35%, 40%, 45%, 50%, 60%, 70%, 75%, 80%, 85%, 90%, or 95%. In some embodiments, it is at least 10%. In some embodiments, it is at least 15%. In some embodiments, it is at least 20%. In some embodiments, it is at least 25%. In some embodiments, it is at least 30%. In some embodiments, it is at least 35%. In some embodiments, it is at least 40%. In some embodiments, it is at least 45%. In some embodiments, it is at least 50%. In some embodiments, it is at least 60%. In some embodiments, it is at least 70%. In some embodiments, it is at least 75%. In some embodiments, it is at least 80%. In some embodiments, it is at least 85%. In some embodiments, it is at least 90%. In some embodiments, it is at least 95%. In some embodiments, it is at least about 100%.

[1354] In some embodiments, an oligonucleotide or a composition thereof is capable of mediating a decrease in the expression or level of a target nucleic acid or a product thereof (e.g., by modifying a target adenosine into inosine). In some embodiments, an oligonucleotide or a composition thereof is capable of mediating a decrease in the expression or level of a target gene or a gene product thereof (e.g., by modifying a target adenosine into inosine) in a cell in vitro. In some embodiments, expression or level can be decreased by at least about 10%, 15%, 20%, 25%, 30%, 35%, 40%, 45%, 50%, 60%, 70%, 75%, 80%, 85%, 90%, or 95%. In some embodiments, expression or level of a target gene or a gene product thereof can be decreased by at least about 10%, 15%, 20%, 25%, 30%, 35%, 40%, 45%, 50%, 60%, 70%, 75%, 80%, 85%, 90%, or 95% by ADAR-mediated deamination directed by an oligonucleotide or a composition thereof, e.g., at a concentration of 10 uM or less in a cell(s) in vitro. In some embodiments, an oligonucleotide or a composition thereof is capable of provide suitable levels of activities at a concentration of 1 nM, 5 nM, 10 nM or less (e.g., when assayed in cells in vitro or in vivo).

[1355] In some embodiments, activity of provided oligonucleotides and compositions may be assessed by IC50, which is the inhibitory concentration to decrease level of a target nucleic acid or a product thereof by 50% in a suitable condition, e.g., cell-based in vitro assays. In some embodiments, provided oligonucleotides or compositions have an IC50 no more than 0.001, 0.01, 0.1, 0.5, 1, 2, 5, 10, 50, 100, 200, 500 or 1000 nM, e.g., when assessed in cell-based assays. In some embodiments, an IC50 is no more than about 500 nM. In some embodiments, an IC50 is no more than about 200 nM. In some embodiments, an IC50 is no more than about 100 nM. In some embodiments, an IC50 is no more than about 50 nM. In some embodiments, an IC50 is no more than about 25 nM. In some embodiments, an IC50 is no more than about 10 nM. In some embodiments, an IC50 is no more than about 5 nM. In some embodiments, an IC50 is no more than about 2 nM. In some embodiments, an IC50 is no more than about 1 nM. In some embodiments, an IC50 is no more than about 0.5 nM.

[1356] In some embodiments, provided technologies can provide selective editing of target adenosine over other adenosine residues in a target adenosine. In some embodiments, selectivity of a target adenosine over a non-target adenosine is at least 1.5, 2, 3, 4, 5, 6, 7, 8, 9, 10, 15, 20, 25, 30, 40, 50, 60, 70, 80, 90, 100 fold or more (e.g., as measured by level of editing of a target adenosine over a non-target adenosine at a suitable condition, or by oligonucleotide concentrations for a certain level of editing (e.g., 0.5%, 1%, 2%, 5%, 10%, 15%, 20%, 25%, 30%, 40%, 50%, etc.). In some embodiments, a selectivity is at least 2 fold. In some embodiments, a selectivity is at least 3 fold. In some embodiments, a selectivity is at least 4 fold. In some embodiments, a selectivity is at least 5 fold. In some embodiments, a selectivity is at least 10 fold. In some embodiments, a selectivity is at least 25 fold. In some embodiments, a selectivity is at least 50 fold. In some embodiments, a selectivity is at least 100 fold.

[1357] In some embodiments, the present disclosure provides a method for suppression of a transcript from a target nucleic acid sequence for which one or more similar nucleic acid sequences exist within a population, each of the target and similar sequences contains a specific characteristic sequence element that defines the target sequence relative to the similar sequences, the method comprising contacting a sample comprising transcripts of target nucleic acid sequence with an oligonucleotide, or a composition comprising a plurality of oligonucleotides sharing a common base sequence, wherein the base sequence of the oligonucleotide, or the common base sequence of the plurality of oligonucleotide, is or comprises a sequence that is complementary to the characteristic sequence element that defines the target nucleic acid sequence. In some embodiments, wherein when the oligonucleotide, or the oligonucleotide composition, is contacted with a system comprising transcripts of both the target nucleic acid sequence and a similar nucleic acid sequences, transcripts of the target nucleic acid sequence are suppressed at a greater level than a level of suppression observed for a similar nucleic acid sequence. In some embodiments, suppression of the transcripts of the target nucleic acid sequence can be 1.1-100, 2-100, 1.5, 2, 2.5, 3, 4, 5, 6, 7, 8, 9, or 10-fold greater than suppression observed for a similar nucleic acid sequence. In some embodiments, a target nucleic acid sequence is associated with (or more associated with compared to a similar nucleic acid sequence) a condition, disorder or disease. As those skilled in the art will appreciate, selective reduction of a transcript (and/or products thereof) associated with conditions, disorders or diseases, while maintaining transcripts that are not, or are less, associated with conditions, disorders or diseases can provide a number of advantages, for example, providing disease treatment and/or prevention while maintaining one or more desired biological functions (which may provide, among other things, fewer or less severe side effects).

[1358] In some embodiments, as demonstrated herein, selectivity is at least 10 fold, or 20, 30, 40, or 50 fold or more in a system, e.g. a reporter assay described herein. In some embodiments, an oligonucleotide or composition can effectively reduce levels of mutant protein (e.g., at least 50%, 60%, 70% or more reduction of a mutant protein) while maintaining levels of wild-type protein (e.g. at least 70%, 75%, 80%, 85%, 90%, 95%, or more wild-type protein remaining) in a system. In some embodiments, provided oligonucleotides are stable in various biological systems, e.g. in mouse brain homogenates (e.g., at least 70%, 75%, 80%, 85%, 90%, 95%, or more remaining after 1, 2, 3, 4, 5, 6, 7, or 8 days). In some embodiments, provided oligonucleotides are of low toxicity. In some embodiments, provided oligonucleotides and compositions thereof, e.g., chirally controlled oligonucleotides and compositions thereof, do not significant activate TLR9 (e.g., when compared to reference oligonucleotides and compositions thereof (e.g., corresponding stereorandom oligonucleotides and compositions thereof)). In some embodiments, provided oligonucleotides and compositions thereof, e.g., chirally controlled oligonucleotides and compositions thereof, do not significantly induce complement activation (e.g., when compared to reference oligonucleotides and compositions thereof (e.g., corresponding stereorandom oligonucleotides and compositions thereof)).

[1359] For various applications, provided oligonucleotides and/or compositions may be provided as pharmaceutical compositions. In some embodiments, the present disclosure provides a pharmaceutical composition which comprises or delivers an effective amount of an oligonucleotide or a pharmaceutically acceptable salt thereof. In some embodiments, a pharmaceutical composition may comprise various forms of an oligonucleotide, e.g., acid, base and various pharmaceutically acceptable salt forms. In some embodiments, a pharmaceutically acceptable salt is sodium salt. In some embodiments, a pharmaceutically acceptable salt is a potassium salt. In some embodiments, a pharmaceutically acceptable salt is a amine salt (e.g., of an amine having the structure of N(R)₃). In some embodiments, a pharmaceutical composition further comprises a pharmaceutically acceptable carrier. In some embodiments, a pharmaceutical composition is or comprises a liquid solution. In some embodiments, a liquid composition has a controlled pH range, e.g., around or being physiological pH. In some embodiments, a pharmaceutical composition comprises or is formulated as a solution in a physiologically compatible buffers such as Hanks's solution, Ringer's solution, cerebral spinal fluid, artificial cerebral spinal fluid (aCSF) or physiological saline buffer. In some embodiments, a pharmaceutical composition comprises or is formulated as a solution in artificial cerebral spinal fluid (aCSF). In some embodiments, a pharmaceutical composition is an injectable suspension or solution. In certain embodiments, injectable suspensions or solutions are prepared using appropriate liquid carriers, suspending agents and the like. Pharmaceutical compositions can be administered in various suitable routes. In some embodiments, pharmaceutical compositions are formulated for oral administration, for example, drenches (aqueous or non-aqueous solutions or suspensions), tablets, e.g., those targeted for buccal, sublingual, and systemic absorption, boluses, powders, granules, pastes for application to the tongue; parenteral administration, for example, by subcutaneous, intramuscular, intravenous, intrathecal, intracerebroventricular or epidural injection as, for example, a sterile solution or suspension, e.g., in physiologically compatible buffers such as Hanks's solution, Ringer's solution, artificial cerebral spinal fluid (aCSF) or physiological saline buffer or sustained-release formulation; topical application, for example, as a cream, ointment, or a controlled-release patch or spray applied to the skin, lungs, or oral cavity; intravaginally or intrarectally, for example, as a pessary, cream, or foam; sublingually; ocularly; transdermally; or nasally, pulmonary, and to other mucosal surfaces.

[1360] Among other things, the present disclosure provides technologies for preventing or treating conditions, disorders or diseases. In some embodiments, the present disclosure provides a method for preventing or treating a condition, disorder or disease, comprising administering or delivering to a subject susceptible thereto or suffering therefrom an effective amount of an oligonucleotide or composition as described herein. In some embodiments, a condition, disorder or disease is amenable to (e.g., can benefit from) A to I conversion. In some embodiments, the present disclosure provides a method for preventing or treating a condition, disorder or disease associated with a G to A mutation, comprising administering to a subject susceptible thereto or suffering therefrom an effective amount of an oligonucleotide or composition as described herein. In some embodiments, the present disclosure provides a method for preventing or treating a condition, disorder or disease amenable to a G to A mutation, comprising administering to a subject susceptible thereto or suffering therefrom an effective amount of an oligonucleotide or composition as described herein. In some embodiments, the present disclosure provides a method for preventing or treating a condition, disorder or disease associated with a G to A mutation, comprising administering to a subject susceptible thereto or suffering therefrom an effective amount of an oligonucleotide or composition as described herein. In some embodiments, the base sequence of the oligonucleotide or oligonucleotides in the oligonucleotide composition is substantially complementary to that of the target nucleic acid comprising a target adenosine. In some embodiments, cells, tissues or organs associated with the condition, disorder or disease comprise or express an ADAR protein. In some embodiments, cells, tissues or organs associated with the condition, disorder or disease comprise or express ADAR1 (e.g., a p110 and/or a p150 forms). In some embodiments, cells, tissues or organs associated with the condition, disorder or disease comprise or express ADAR2. In some embodiments, a condition, disorder or disease is as described herein. In some embodiments, a condition, disorder or disease is alpha-1 antitrypsin deficiency. In some embodiments, a method comprises converting a target adenosine to I.

[1361] In some embodiments, the present disclosure provides an oligonucleotide comprising a sequence complementary to a target sequence. In some embodiments, the present disclosure provides an oligonucleotide which directs site-specific (can also be referred as site directed) editing (e.g., deamination). In some embodiments, the present disclosure provides an oligonucleotide which directs site-specific adenosine editing mediated by ADAR (e.g., an endogenous ADAR). Various provided oligonucleotides can be utilized as single-stranded oligonucleotides for site-directed editing of a nucleotide in a target RNA sequence. In some embodiments, the present disclosure provides methods for preventing and/or treating conditions, disorders, or diseases associated with a G to A mutation in a target sequence using provided single-stranded oligonucleotides for site-directed editing of a nucleotide in a target RNA sequence and compositions thereof. In some embodiments, the present disclosure provides oligonucleotides and compositions thereof for use as medicaments, e.g., for conditions, disorders, or diseases associated with a G to A mutation in a target sequence. In some embodiments, the present disclosure provides oligonucleotides and compositions thereof for use in the treatment of conditions, disorders or diseases associated with a G to A mutation in a target sequence. In some embodiments, the present disclosure provides oligonucleotides and compositions thereof for the manufacture of medicaments for the treatment of a related conditions, disorders or diseases associated with a G to A mutation in a target sequence.

[1362] In some embodiments, the present disclosure provides a method for preventing, treating or ameliorating a condition, disorder or disease associated with a G to A mutation in a target sequence in a subject susceptible thereto or suffering therefrom, comprising administering to the subject a therapeutically effective amount of an oligonucleotide or a pharmaceutical composition thereof.

[1363] In some embodiments, the present disclosure provides a method for deaminating a target adenosine in a target sequence in a cell, comprising: contacting the cell with an oligonucleotide or a composition thereof. In some embodiments, the present disclosure provides a method deaminating a target adenosine in a target sequence (e.g., a transcript) in a cell, comprising: contacting the cell with an oligonucleotide or a composition thereof. In some embodiments, the present disclosure provides a method for reducing the level of a protein associated with a G to A mutation in a cell, comprising: contacting the cell with an oligonucleotide or a composition thereof. In some embodiments, provided methods can selectively reduce levels of a transcripts and/or products encoded thereby that are related to conditions, disorders or diseases associated with a G to A mutation. In some embodiments, provided methods can selectively edit target nucleic acids, e.g., transcripts comprising an undesired A (e.g., a G to A mutation) over otherwise identical nucleic acids which have G at positions of target A.

[1364] In some embodiments, the present disclosure provides a method for decreasing a mutated gene (e.g., a G to A mutation) expression in a mammal in need thereof, comprising administering to the mammal a nucleic acid-lipid particle comprising a provided single-stranded oligonucleotide for site-directed editing of a nucleotide in a target RNA sequence or a composition thereof.

[1365] In some embodiments, the present disclosure provides a method for in vivo delivery of an oligonucleotide, comprising administering to a mammal an oligonucleotide or a composition thereof.

[1366] In some embodiments, a subject or patient suitable for treatment of a condition, disorder, or disease associated with a G to A mutation, can be identified or diagnosed by a health care professional.

[1367] In some embodiments, a symptom of a condition, disorder or disease associated with a G to A mutation can be any condition, disorder or disease that can benefit from an A to I conversion.

[1368] In some embodiments, a provided single-stranded oligonucleotide for site-directed editing of a nucleotide in a target RNA sequence or a composition thereof can prevent, treat, ameliorate, or slow progression of a condition, disorder or disease associated with a G to A mutation, or at least one symptom of a condition, disorder or disease associated with a G to A mutation.

[1369] In some embodiments, a method of the present disclosure can be for the treatment of a condition, disorder or disease associated with a G to A mutation in a subject wherein the method comprises administering to a subject a therapeutically effective amount of an oligonucleotide or a pharmaceutical composition thereof.

[1370] In some embodiments, a provided method can reduce at least one symptom of a condition, disorder or disease associated with a G to A mutation wherein the method comprises administering to a subject a therapeutically effective amount of an oligonucleotide or a pharmaceutical composition thereof.

[1371] In some embodiments, administration of an oligonucleotide to a patient or subject can be capable of mediating any one or more of: slowing the progression of a condition, disorder or disease associated with a G to A mutation; delaying the onset of a condition, disorder or disease associated with a G to A mutation or at least one symptom thereof; improving one or more indicators of a condition, disorder or disease associated with a G to A mutation; and/or increasing the survival time or lifespan of the patient or subject.

[1372] In some embodiments, slowing disease progression can relate to the prevention of, or delay in, a clinically undesirable change in one or more clinical parameters in an individual susceptible to or suffering from a condition, disorder, or disease associated with a G to A mutation, such as those described herein. It is well within the abilities of a physician to identify a slowing of disease progression in an individual susceptible to or suffering a condition, disorder, or disease associated with a G to A mutation, using one or more of the disease assessment tests described herein. Additionally, it is understood that a physician may administer to the individual diagnostic tests other than those described herein to assess the rate of disease progression in an individual susceptible to or suffering from a condition, disorder, or disease associated with a G to A mutation.

[1373] A physician may use family history of a condition, disorder, or disease associated with a G to A mutation or comparisons to other patients with similar genetic profile.

[1374] In some embodiments, indicators of a condition, disorder, or disease associated with a G to A mutation include parameters employed by a medical professional, such as a physician, to diagnose or measure the progression of the condition, disorder, or disease.

[1375] In some embodiments, a subject is administered an oligonucleotide or a composition thereof and an additional agent and/or method, e.g., an additional therapeutic agent and/or method. In some embodiments, an oligonucleotide or composition thereof can be administered alone or in combination with one or more additional therapeutic agents and/or treatment. When administered in combination each component may be administered at the same time or sequentially in any order at different points in time. In some embodiments, each component may be administered separately but sufficiently closely in time so as to provide the desired therapeutic effect. In some embodiments, provided oligonucleotides and additional therapeutic components are administered concurrently. In some embodiments, provided oligonucleotides and additional therapeutic components can be administered as one composition. In some embodiments, at a time point a subject being administered can be exposed to both provided oligonucleotides and additional components at the same time.

[1376] In some embodiments, an additional therapeutic agent can be physically conjugated to an oligonucleotide. In some embodiments, an additional agent is GalNAc. In some embodiments, a provided single-stranded oligonucleotide for site-directed editing of a nucleotide in a target RNA sequence can be physically conjugated with an additional agent. In some embodiments, additional agent oligonucleotides can have base sequences, sugars, nucleobases, internucleotidic linkages, patterns of sugar, nucleobase, and/or internucleotidic linkage modifications, patterns of backbone chiral centers, etc., or any combinations thereof, as described in the present disclosure, wherein each T may be independently replaced with U and vice versa. In some embodiments, an oligonucleotide can be physically conjugated to a second oligonucleotide which can decrease (directly or indirectly) the expression, activity, and/or level of a target sequence, or which is useful for treating a condition, disorder, or disease associated with a G to A mutation.

[1377] In some embodiments, a provided single-stranded oligonucleotide for site-directed editing of a nucleotide in a target RNA sequence may be administered with one or more additional (or second) therapeutic agent for a condition, disorder or disease associated with a G to A mutation.

[1378] In some embodiments, a subject can be administered an oligonucleotide and an additional therapeutic agent, wherein the additional therapeutic agent is an agent described herein or known in the art which is useful for treatment of a condition, disorder or disease to be treated.

[1379] In some embodiments, provided single-stranded oligonucleotide for site-directed editing of a nucleotide in a target RNA sequence can be co-administered or be used as part of a treatment regimen along with one or more treatment for a condition, disorder or disease or a symptom thereof, including but not limited to: aptamers, lncRNAs, lncRNA inhibitors, antibodies, peptides, small molecules, other oligonucleotides to a target other targets.

[1380] In some embodiments, an additional therapeutic treatment is, as a non-limiting example, a method of editing a gene

[1381] In some embodiments, an additional therapeutic agent is, as a non-limiting example, an oligonucleotide.

[1382] In some embodiments, a second or additional therapeutic agent can be administered to a subject prior, simultaneously with, or after an oligonucleotide. In some embodiments, a second or additional therapeutic agent can be administered multiple times to a subject, and an oligonucleotide is also administered multiple times to a subject, and the administrations are in any order.

[1383] In some embodiments, an improvement may include decreasing the expression, activity and/or level of a gene or gene product which is too high in a disease state; increasing the expression, activity and/or level of a gene or gene product which is too low in the disease state; and/or decreasing the expression, activity and/or level of a mutant and/or disease-associated variant of a gene or gene product.

[1384] In some embodiments, an oligonucleotide or composition useful for treating, ameliorating and/or preventing a condition, disorder or disease associated with a G to A mutation can be administered (e.g., to a subject) via various suitable available technologies.

[1385] In some embodiments, provided oligonucleotides, e.g., single-stranded oligonucleotide for site-directed editing of a nucleotide in a target RNA sequences, can be administered as a pharmaceutical composition, e.g., for treating, ameliorating and/or preventing conditions, disorders or diseases. In some embodiments, provided oligonucleotides comprise at least one chirally controlled internucleotidic linkage. In some embodiments, provided oligonucleotide compositions are chirally controlled.

[1386] Among other things, technologies, e.g., oligonucleotides and compositions thereof, of the present disclosure can provide various improvements and advantages compared to reference technologies (e.g., absence or low levels of chiral control (e.g., stereorandom oligonucleotide compositions (e.g., of oligonucleotides of the same base sequence, or the same constitution, etc.)), and/or absence or low levels of certain modifications and patterns thereof (e.g., 2′-F, non-negatively charged internucleotidic linkages, etc.), such as improved stability, delivery, editing efficiency, pharmacokinetics, and/or pharmacodynamics. In some embodiments, a reference oligonucleotide composition is a stereorandom oligonucleotide composition of oligonucleotides with the same base sequence. In some embodiments, a reference oligonucleotide composition is a stereorandom oligonucleotide composition of oligonucleotides with the same constitution (as appreciated by those skilled in the art, in some embodiments, various salt forms may be properly considered to be of the same constitution). In some embodiments, a reference oligonucleotide is an oligonucleotide comprising no non-negatively charged internucleotidic linkages. In some embodiments, a reference oligonucleotide comprises no n001. In some embodiments, a reference oligonucleotide composition is a composition of oligonucleotides comprising no non-negatively charged internucleotidic linkages. In some embodiments, a reference oligonucleotide composition is a composition of oligonucleotides comprising no n001. In some embodiments, provided technologies may be utilized at lower unit or total doses, and/or may be administered with fewer doses and/or longer dose intervals (e.g., to achieve comparable or better effects) compared to reference technologies. In some embodiments, provided technologies can provide long durability of editing. In some embodiments, provided technologies once administered can provide activities, e.g., target editing, at or above certain levels (e.g., levels useful and/or sufficient to provide certain biological and/or therapeutic effects) for a period of time, e.g., about or at least about 2, 3, 4, 5, 6, 7, 8, 9, 10, 15, 20, 25, 30, 35, 40, 45, 50, 60 or more days, or 1, 2, 3, 4, 5, 6, 7, 8, 9, or 10 months, after a last dose. In some embodiments, provided technologies provide low toxicity. In some embodiments, provided technologies may be utilized at higher unit or total doses, and/or may be administered with more doses and/or shorter dose intervals (e.g., to achieve better effects) compared to reference technologies. In some embodiments, a total dose may be administered as a single dose. In some embodiments, a total dose may be administered as two or more single doses. In some embodiments, a total dose administered as a single dose may provide higher maximum editing levels compared to when administered as two or more single doses.

[1387] In some cases, patients who have been administered an oligonucleotide as a medicament may experience certain side effects or adverse effects, including: thrombocytopenia, renal toxicity, glomerulonephritis, and/or coagulation abnormalities; genotoxicity, repeat-dose toxicity of target organs and pathologic effects; dose response and exposure relationships; chronic toxicity; juvenile toxicity; reproductive and developmental toxicity; cardiovascular safety; injection site reactions; cytokine response complement effects; immunogenicity; and/or carcinogenicity. In some embodiments, an additional therapeutic agent is administered to counter-act a side effect or adverse effect of administration of an oligonucleotide. In some embodiments, a particular single-stranded oligonucleotide for site-directed editing of a nucleotide in a target RNA sequence can have a reduced capability of eliciting a side effect or adverse effect, compared to a different single-stranded oligonucleotide for site-directed editing of a nucleotide in a target RNA sequence.

[1388] In some embodiments, an additional therapeutic agent can be administered to the patient in order to control or alleviate one or more side effects or adverse effects associated with administration of an oligonucleotide.

[1389] In some embodiments, an oligonucleotide and one or more additional therapeutic agent can be administered to a patient (in any order), wherein the additional therapeutic agent can be administered to the patient in order to control or alleviate one or more side effects or adverse effects associated with administration of the oligonucleotide.

[1390] In some embodiments, an oligonucleotide and one or more additional therapeutic agent can be administered to a patient (in any order), wherein the additional therapeutic agent can be administered to the patient in order to control or alleviate one or more side effects or adverse effects associated with administration of the oligonucleotide.

[1391] In some embodiments, an oligonucleotide and one or more additional therapeutic agent can be administered to a patient (in any order), wherein the additional therapeutic agent can be administered to the patient in order to control or alleviate one or more side effects or adverse effects associated with administration of the oligonucleotide, and wherein the oligonucleotide operates via any biochemical mechanism, including but not limited to: decreasing the level, expression and/or activity of a target gene or a gene product thereof, increasing or decreasing skipping of one or more exons in a target gene mRNA, an ADAR-mediated deamination, a RNaseH-mediated mechanism, a steric hindrance-mediated mechanism, and/or a RNA interference-mediated mechanism, wherein the oligonucleotide is single- or double-stranded.

[1392] In some embodiments, an oligonucleotide composition and one or more additional therapeutic agent can be administered to a patient (in any order), wherein the additional therapeutic agent can be administered to the patient in order to control or alleviate one or more side effects or adverse effects associated with administration of the oligonucleotide composition, and wherein the oligonucleotide composition can be chirally controlled or comprises at least one chirally controlled internucleotidic linkage (including but not limited to a chirally controlled phosphorothioate).

[1393] Various conditions, disorders, or diseases can benefit from adenosine editing, including those are associated with a G to A mutation, e.g., Cystic fibrosis, Hurler Syndrome, alpha-1-antitrypsin (A1AT) deficiency, Parkinson's disease, Alzheimer's disease, albinism, Amyotrophic lateral sclerosis, Asthma, β-thalassemia, Cadasil syndrome, Charcot-Marie-Tooth disease, Chronic Obstructive Pulmonary Disease (COPD), Distal Spinal Muscular Atrophy (DSMA), Duchenne/Becker muscular dystrophy, Dystrophic Epidermolysis bullosa, Epidermylosis bullosa, Fabry disease, Factor V Leiden associated disorders, Familial Adenomatous, Polyposis, Galactosemia, Gaucher's Disease, Glucose-6-phosphate dehydrogenase, Haemophilia, Hereditary Hematochromatosis, Hunter Syndrome, Huntington's disease, Inflammatory Bowel Disease (IBD), Inherited polyagglutination syndrome, Leber congenital amaurosis, Lesch-Nyhan syndrome, Lynch syndrome, Marfan syndrome, Mucopolysaccharidosis, Muscular Dystrophy, Myotonic dystrophy types I and II, neurofibromatosis, Niemann-Pick disease type A, B and C, NY-eso1 related cancer, Peutz-Jeghers Syndrome, Phenylketonuria, Pompe's disease, Primary Ciliary Disease, Prothrombin mutation related disorders, such as the Prothrombin G20210A mutation, Pulmonary Hypertension, Retinitis Pigmentosa, Sandhoff Disease, Severe Combined Immune Deficiency Syndrome (SCID), Sickle Cell Anemia, Spinal Muscular Atrophy, Stargardt's Disease, Tay-Sachs Disease, Usher syndrome, X-linked immunodeficiency, Sturge-Weber Syndrome, and various cancers. Certain conditions, disorders or diseases are described in WO 2020/154344, WO 2020/154343, WO 2020/154342, WO 2020/165077, WO 2020/201406, WO 2020/216637, or WO 2020/252376.

[1394] In some embodiments, a condition, disorder or disease is Alpha-1 antitrypsin (A1AT) deficiency (AATD).

[1395] Alpha-1 antitrypsin (A1AT) deficiency (AATD) is a genetic disease reportedly caused by defects in the SERPINA1 gene (also known as PI; AIA; AAT; PIl; A1AT; PR02275; and alpha1AT). Severe A1AT deficiency is associated with various phenotypes including lung and liver phenotypes.

[1396] A1AT deficiency is reportedly one of the most common genetic diseases in subjects of Northern European descent. Prevalence of severe A1AT deficiency in the U.S. alone is 80,000-100,000. Similar numbers are estimated to be found in the EU. The worldwide estimate for severe A1AT deficiency has been pegged at 3 million people. A1AT deficiency causes emphysema, with subjects developing emphysema in their third or fourth decade. A1AT deficiency can also cause liver failure and hepatocellular carcinoma, with up to 30% of subjects with severe A1AT deficiency developing significant liver disease, including cirrhosis, fulminant liver failure, and hepatocellular carcinoma.

[1397] A mutation (i.e., c. 1024G>A) in SERPINA1 gene leads to a glutamate to lysine substitution at amino acid position 342 (E342K, “Z mutation”) of the mature A1AT protein. This missense mutation affect protein conformation and secretion leading to reduced circulating levels of A1AT. Alleles carrying the Z mutation are identified as PiZ alleles. Subjects homozygous for the PiZ allele are termed PiZZ carriers, and express 10-15% of normal levels of serum A1AT. Approximately 95% of subjects who are symptomatic for A1AT deficiency have the PiZZ genotype. Subjects heterozygous for the Z mutation are termed PiMZ mutants, and express 60% of normal levels of serum A1AT. Of those diagnosed, 90% of patients with severe A1AT deficiency have the ZZ mutation. About between 30,000 and 50,000 individuals in the United States have the PiZZ genotype.

[1398] The pathophysiology of A1AT deficiency can vary by the organ affected. Liver disease is reported to be due to a gain-of-function mechanism. Abnormally folded A1AT, especially Z-type A1AT (Z-AT), aggregates and polymerizes within hepatocytes. A1AT inclusions are found in PiZZ subjects and are thought to cause cirrhosis and, in some cases, hepatocellular carcinoma. Evidence for the gain-of-function mechanism in liver disease is supported by null homozygotes. These subjects produce no A1AT and do not develop hepatocyte inclusions or liver disease.

[1399] It is reported that A1AT deficiency leads to liver disease in up to about 50% of A1AT subjects and leads to severe liver disease in up to about 30% of subjects. Liver disease may manifest as: (a) cirrhosis during childhood that is self-limiting, (b) severe cirrhosis during childhood or adulthood that requires liver transplantation or leads to death and (c) hepatocellular carcinoma that is often deadly. The onset of liver disease is reported to be bi-modal, predominantly affecting children or adults. Childhood disease is self-limiting in many cases but may be led to end-stage, deadly cirrhosis. It is reported that up to about 18% of subjects with the PiZZ genotype may develop clinically significant liver abnormalities during childhood. Approximately 2% of PiZZ subjects are reported to develop severe liver cirrhosis leading to death during childhood (Sveger 1988; Volpert 2000). Adult-onset liver disease may affect subjects with all genotypes, but presents earlier in subjects with the PiZZ genotype. Approximately 2-10% of A1AT deficient subjects are reported to develop adult-onset liver disease.

[1400] Lung disease associated with A1AT deficiency is currently treated with intravenous administration of human-derived replacement A1AT protein, but in addition to being costly and requiring frequent injections over a subject's entire lifetime, this approach is only partially effective. A1AT-deficient subjects with hepatocellular carcinoma are currently treated with chemotherapy and surgery, but there is no satisfactory approach for preventing the potentially deadly liver manifestations of A1AT deficiency.

[1401] Among other things, the present disclosure recognizes a need for improved treatment of A1AT deficiency, e.g., including liver and lung manifestations thereof. In some embodiments, the present disclosure provides technologies for preventing or treating conditions, disorders or diseases associated Alpha-1 antitrypsin (A1AT) deficiency, e.g., by providing oligonucleotides and/or compositions that can convert the A mutation to I which can be read as G during protein translation and thus correcting the G to A mutation for protein translation. Among other things, alteration of SERPINA1 in one or more of hepatocytes can prevent the progression of liver disease in subjects with A1AT deficiency by reducing or eliminating production of the toxic Z protein (Z-AAT). In certain embodiments, Z protein production is eliminated or reduced by utilizing provided technologies. In certain embodiments, the disease is cured, does not progress, or has delayed progression compared to a subject who has not received the therapy.

[1402] In some embodiments, AATD dual pathologies have been reported in liver and lung. In some embodiments, inability to secrete polymerized Z-ATT has been reported to lead to, e.g., liver damage/cirrhosis. In some embodiments, one or both lungs are open to unchecked proteases, which in some embodiments lead to inflammation and lung damage. Many patients (e.g., reportedly ˜200,000 in the US and EU) are with homozygous ZZ genotype which is reported to be associated with the most common form of sever AATD. It has been reported that approved therapies modestly increase circulating levels of wide-type AAT in those with lung pathology, and no therapies address liver pathology. In some embodiments, provided technologies increase or restore expression, levels, properties and/or activities of wild-type AAT in liver. In some embodiments, provided technologies target liver, e.g., through incorporating moieties targeting liver (e.g., ligands such as GalNAc targeting receptors expressed in liver) into oligonucleotides. In some embodiments, provided technologies restore, increase or enhance wild-type AAT physiological regulation in liver. In some embodiments, provided technologies reduce Z-AAT protein aggregation. In some embodiments, provided technologies restore, increase or enhance wild-type AAT physiological regulation in liver and reduce Z-AAT protein aggregation. In some embodiments, provided technologies increase secretion into bloodstream. In some embodiments, provided technologies increase circulating wild-type AAT. In some embodiments, provided technologies increase circulating, lung-bond wild-type AAT. In some embodiments, provided technologies increase or restore expression, levels, properties and/or activities of wild-type AAT in lung. In some embodiments, provided technologies protect lungs from undesired proteases. In some embodiments, provided technologies reduce or prevent inflammation and/or lung damage. In some embodiments, provided technologies provide benefits at both livers and lungs. In some embodiments, provided technology reduces or prevents liver damage or cirrhosis, and reduces or prevents inflammation and/or lung damage. In some embodiments, provided oligonucleotides, e.g., those comprising certain moieties such ligands (e.g., GalNAc) targeting receptors expressed in livers, provide benefits at livers and lungs. In some embodiments, provided technologies simultaneously provide benefits at livers and lungs. In some embodiments, provided technologies address lung and/or liver manifestation of AATD. In some embodiments, provided technologies simultaneously address lung and liver manifestation of AATD. In some embodiments, provided technologies comprise using GalNAc conjugated oligonucleotides and compositions thereof to correct RNA base mutation in mRNA coded by SERPINA1 Z allele that triggers AATD. In some embodiments, provided technologies simultaneously reduce aggregation of mutated, misfolded alpha-1 protein and increase circulating levels of wild-type alpha-1 antitrypsin protein, and in some embodiments address both liver and lung manifestations of AATD. In some embodiments, provided technologies avoid risk of permanent off-target changes to DNA.

[1403] In certain embodiments, technologies as described herein can provide a selective advantage to survival of one or more of treated hepatocytes. In certain embodiments, a target cell is modified. In some embodiments, cells treated with technologies herein may not produce toxic Z protein. In some embodiments, diseased cells that are not modified produce toxic Z proteins and may undergo apoptosis secondary to endoplasmic reticulum (ER) stress induced by Z protein misfolding. In certain embodiments, after treatment using the provided technologies, treated cells will survive and untreated cells will die. This selective advantage can drive eventual colonization of hepatocytes with the majority being SERPINA1 corrected cells.

[1404] In some embodiments, an oligonucleotide, when administered to a patient suffering from or susceptible to a condition, disorder or disease that is associated with a G to A mutation is capable of reducing at least one symptom of the condition, disorder or disease and/or capable of delaying or preventing the onset, worsening, and/or reducing the rate and/or degree of worsening of at least one symptom of the condition, disorder or disease that's due to a G to A mutation in a gene or gene product.

[1405] In some embodiments, provided technologies can provide editing of two or more sites in a system (e.g., a cell, tissue, organ, animal, etc.) (“multiplex editing”). In some embodiments, provided technologies can target and provide editing of two or more sites of the same transcripts. In some embodiments, provided technologies can target and provide editing of two or more different transcripts, either from the same nucleic acid or different nucleic acids. In some embodiments, provided technologies can target and provide editing of transcripts from two or more different nucleic acids. In some embodiments, provided technologies can target and provide editing of transcripts from two or more different genes. In some embodiments, of the targets simultaneously edited, each is independently at a biologically and/or therapeutically relevant level. In some embodiments, in multiplex editing one or more or all targets are independently edited at a comparable level as editing conducted individually under comparable conditions. In some embodiments, multiplex editing are performed utilizing two or more separate compositions, each of which independently target one or more targets. In some embodiments, compositions are administered concurrently. In some embodiments, compositions are administered with suitable intervals. In some embodiments, one or more compositions are administered prior or subsequently to one or more other compositions. In some embodiments, multiplex editing are performed utilizing a single composition, e.g., a composition comprising two or more pluralities of oligonucleotides, wherein the pluralities target different targets. In some embodiments, each plurality independently targets a different adenosine. In some embodiments, each plurality independently targets a different transcript. In some embodiments, each plurality independently targets a different gene. In some embodiments, two or more pluralities may target the same target, but the pluralities together target the desired targets.

[1406] As described herein, provided technologies can provide a number of advantages. For example, in some embodiments, provided technologies are safer than technologies that act on DNA, as provided technologies can provide RNA edits that are both reversible and tunable (e.g., through adjusting of doses). Additionally and alternatively, as demonstrated herein, provided technologies can provide high levels of editing in systems expressing endogenous ADAR proteins thus avoiding the requirement of introduction of exogenous proteins in various instances. Still further, provided technologies do not require complex oligonucleotides that depend on ancillary delivery vehicles, such as viral vectors or lipid nanoparticles, as utilized in many other technologies, particularly for application beyond cell culture. In some embodiments, provided technologies can provide sequence-specific A-to-I RNA editing with high efficiency using endogenous ADAR enzymes and can be delivered to various systems, e.g., cells, in the absence of artificial delivery agents.

[1407] Those skilled in the art reading the present disclosure will understand that provided oligonucleotides and compositions thereof may be delivered using a number of technologies in accordance with the present disclosure. In some embodiments, provided oligonucleotides and compositions may be delivered via transfection or lipofection. In some embodiments, provided oligonucleotides and compositions thereof may be delivered in the absence of delivery aids, such as those utilized in transfection or lipofection. In some embodiments, provided oligonucleotides and compositions may be delivered via transfection or lipofection. In some embodiments, provided oligonucleotides and compositions thereof are delivered with gymnotic delivery. In some embodiments, provided oligonucleotides comprise additional chemical moieties that can facilitate delivery. For example, in some embodiments, additional chemical moieties are or comprise ligand moieties (e.g., N-acetylgalactosamine (GalNAc)) for receptors (e.g., asialoglycoprotein receptors). In some embodiments, provided oligonucleotides and compositions thereof can be delivered through GalNAc-mediated delivery.

[1408] Among other things, the present disclosure provides the following Example Embodiments:
[1409] 1. An oligonucleotide comprising:
   [1410] a first domain; and
   [1411] a second domain,
[1412] wherein:
   [1413] the first domain comprises one or more 2′-F modifications;
   [1414] the second domain comprises one or more sugars that do not have a 2′-F modification.
[1415] 2. An oligonucleotide comprising a modified nucleobase, nucleoside, sugar or internucleotidic linkage as described in the present disclosure.
[1416] 3. An oligonucleotide, wherein about or at least about 60%, 65%, 70%, 75%, 80%, 85%, 90%, or 95% of all sugars are 2′-F modified sugars.
[1417] 4. An oligonucleotide comprising a second subdomain as described in the present disclosure.
[1418] 5. An oligonucleotide comprising one or more modified sugars and/or one or more modified internucleotidic linkages, wherein the oligonucleotide comprises a first domain and a second domain each independently comprising one or more nucleobases.
[1419] 6. The oligonucleotide of any one of Embodiments 1-5, wherein when the oligonucleotide is contacted with a target nucleic acid comprising a target adenosine in a system, a target adenosine in the target nucleic acid is modified.
[1420] 7. The oligonucleotide of any one of Embodiments 1-5, wherein when the oligonucleotide is contacted with a target nucleic acid comprising a target adenosine in a system, level of the target nucleic acid is reduced compared to absence of the product or presence of a reference oligonucleotide.
[1421] 8. The oligonucleotide of any one of Embodiments 1-5, wherein when the oligonucleotide is contacted with a target nucleic acid comprising a target adenosine in a system, splicing of the target nucleic acid or a product thereof is altered compared to absence of the oligonucleotide or presence of a reference oligonucleotide.
[1422] 9. The oligonucleotide of any one of Embodiments 1-5, wherein when the oligonucleotide is contacted with a target nucleic acid comprising a target adenosine in a system, level of a product of the target nucleic acid is altered compared to absence of the product or presence of a reference oligonucleotide.
[1423] 10. The oligonucleotide of any one of Embodiments 7-9, wherein the target nucleic acid is modified.
[1424] 11. The oligonucleotide of any one of Embodiments 6-10, wherein level of a product is increased, wherein the product is or is encoded by a nucleic acid which is otherwise identical to the target nucleic acid but the target adenosine is modified.
[1425] 12. The oligonucleotide of any one of Embodiments 6-10, wherein level of a product is increased, wherein the product is or is encoded by a nucleic acid which is otherwise identical to the target nucleic acid but the target adenosine is replaced with inosine.
[1426] 13. The oligonucleotide of any one of Embodiments 6-10, wherein level of a product is increased, wherein the product is or is encoded by a nucleic acid which is otherwise identical to the target nucleic acid but the adenine of the target adenosine is replaced with guanine.
[1427] 14. The oligonucleotide of any one of Embodiments 11-13, wherein the product is a protein.
[1428] 15. The oligonucleotide of any one of the preceding Embodiments, wherein the target adenosine is a mutation from guanine.
[1429] 16. The oligonucleotide of any one of the preceding Embodiments, wherein the target adenosine is more associated with a condition, disorder or disease than a guanine at the same position.
[1430] 17. The oligonucleotide of any one of the preceding Embodiments, wherein the target adenosine is associated with alpha-1 antitrypsin (A1AT) deficiency.
[1431] 18. The oligonucleotide of any one of the preceding Embodiments, wherein the target adenosine is in human SERPINA1 gene.
[1432] 19. The oligonucleotide of any one of the preceding Embodiments, wherein the target adenosine is 1024 G>A (E342K) mutation in human SERPINA1 gene.
[1433] 20. The oligonucleotide of any one of the preceding Embodiments, wherein the oligonucleotide is capable of forming a double-stranded complex with the target nucleic acid.
[1434] 21. The oligonucleotide of Embodiment 6-20, wherein a target nucleic acid or a portion thereof is or comprises RNA.
[1435] 22. The oligonucleotide of any one of Embodiments 6-21, wherein the target adenosine is of an RNA.
[1436] 23. The oligonucleotide of any one of Embodiments 6-22, wherein the target adenosine is modified, and the modification is or comprises deamination of the target adenosine.
[1437] 24. The oligonucleotide of any one of Embodiments 6-23, wherein the target adenosine is modified and the modification is or comprises conversion of the target adenosine to an inosine.
[1438] 25. The oligonucleotide of any one of Embodiments 6-24, wherein the modification is promoted by an ADAR protein.
[1439] 26. The oligonucleotide of any one of Embodiments 6-25, wherein the system is an in vitro or ex vivo system comprising an ADAR protein.
[1440] 27. The oligonucleotide of any one of Embodiments 6-25, wherein the system is or comprises a cell that comprises or expresses an ADAR protein.
[1441] 28. The oligonucleotide of any one of Embodiments 6-25, wherein the system is a subject comprising a cell that comprises or expresses an ADAR protein.
[1442] 29. The oligonucleotide of any one of Embodiments 25-28, wherein the ADAR protein is ADAR1.
[1443] 30. The oligonucleotide of any one of Embodiments 25-28, wherein the ADAR protein is ADAR2.
[1444] 31. The oligonucleotide of any one of the preceding Embodiments, wherein the oligonucleotide has a length of about 10-200 (e.g., about 10-20, 10-30, 10-40, 10-50, 10-60, 10-70, 10-80, 10-90, 10-100, 10-120, 10-150, 20-30, 20-40, 20-50, 20-60, 20-70, 20-80, 20-90, 20-100, 20-120, 20-150, 20-200, 25-30, 25-40, 25-50, 25-60, 25-70, 25-80, 25-90, 25-100, 25-120, 25-150, 25-200, 30-40, 30-50, 30-60, 30-70, 30-80, 30-90, 30-100, 30-120, 30-150, 30-200, 10, 20, 25, 26, 27, 28, 29, 30, 31, 32, 33, 34, 35, 36, 37, 38, 39, 40, 45, 50, 60, etc.) nucleobases.
[1445] 32. The oligonucleotide of any one of the preceding Embodiments, wherein the oligonucleotide has a length of about 26-35 nucleobases.
[1446] 33. The oligonucleotide of any one of the preceding Embodiments, wherein the oligonucleotide has a length of about 26 nucleobases.
[1447] 34. The oligonucleotide of any one of the preceding Embodiments, wherein the oligonucleotide has a length of about 27 nucleobases.
[1448] 35. The oligonucleotide of any one of the preceding Embodiments, wherein the oligonucleotide has a length of about 28 nucleobases.
[1449] 36. The oligonucleotide of any one of the preceding Embodiments, wherein the oligonucleotide has a length of about 29 nucleobases.
[1450] 37. The oligonucleotide of any one of the preceding Embodiments, wherein the oligonucleotide has a length of about 30 nucleobases.
[1451] 38. The oligonucleotide of any one of the preceding Embodiments, wherein the oligonucleotide has a length of about 31 nucleobases.
[1452] 39. The oligonucleotide of any one of the preceding Embodiments, wherein the oligonucleotide has a length of about 32 nucleobases.
[1453] 40. The oligonucleotide of any one of the preceding Embodiments, wherein the oligonucleotide has a length of about 33 nucleobases.
[1454] 41. The oligonucleotide of any one of the preceding Embodiments, wherein the oligonucleotide has a length of about 34 nucleobases.
[1455] 42. The oligonucleotide of any one of the preceding Embodiments, wherein the oligonucleotide has a length of about 35 nucleobases.
[1456] 43. The oligonucleotide of any one of the preceding Embodiments, wherein the base sequence of the oligonucleotide is complementary to a base sequence of a portion of the target nucleic acid comprising the target adenosine with 0-10 (e.g., 0-1, 0-2, 0-3, 0-4, 0-5, 0-6, 0-7, 0-8, 0-9, 0-10, 1-2, 1-3, 1-4, 1-5, 1-6, 1-7, 1-8, 1-9, 1-10, 2-3, 2-4, 2-5, 2-6, 2-7, 2-8, 2-9, 2-10, 3-4, 3-5, 3-6, 3-7, 3-8, 3-9, 3-10, 0, 1, 2, 3, 4, 5, 6, 7, 8, 9, or 10, etc.) mismatches which are not Watson-Crick base pairs.
[1457] 44. The oligonucleotide of Embodiment 43, wherein one or more mismatches are independently a wobble base paring.
[1458] 45. The oligonucleotide of any one of Embodiments 43-44, wherein the complementarity is about 50%-100% (e.g., about 50%-80%, 50%-85%, 50%-90%, 50%-95%, 60%-80%, 60%-85%, 60%-90%, 60%-95%, 60%-100%, 65%-80%, 65%-85%, 65%-90%, 65%-95%, 65%-100%, 70%-80%, 70%-85%, 70%-90%, 70%-95%, 70%-100%, 75%-80%, 75%-85%, 75%-90%, 75%-95%, 75%-100%, 80%-85%, 80%-90%, 80%-95%, 80%-100%, 85%-90%, 85%-95%, 85%-100%, 90%-95%, 90%-100%, 50%, 60%, 65%, 70%, 75%, 80%, 85%, 90%, 95%, or 100%, etc.).
[1459] 46. The oligonucleotide of any one of Embodiments 43-44, wherein the complementarity is about 90%-100% or about 95-100%.
[1460] 47. The oligonucleotide of any one of Embodiments 43-44, wherein the complementarity is 100%.
[1461] 48. The oligonucleotide of any one of Embodiments 43-44, wherein the complementarity is 100% except at a nucleoside opposite to a target nucleoside (e.g., adenosine).
[1462] 49. The oligonucleotide of any one of the preceding Embodiments, wherein the oligonucleotide consists of a first domain and a second domain.
[1463] 50. The oligonucleotide of any one of the preceding Embodiments, wherein the first domain has a length of about 2-50 (e.g., about 5, 6, 7, 8, 9, or 10-about 10, 11, 12, 13, 14, 15, 16, 17, 18, 19, 20, 21, 22, 23, 24, 25, 30, 40 or 50, or about 5, 6, 7, 8, 9, 10, 11, 12, 13, 14, 15, 16, 17, 18, 19, 20, 21, 22, 23, 24, 25, 30, 40 or 50, etc.) nucleobases.
[1464] 51. The oligonucleotide of any one of the preceding Embodiments, wherein the first domain has a length of about 10-25 nucleobases.
[1465] 52. The oligonucleotide of any one of the preceding Embodiments, wherein the first domain has a length of about 15 nucleobases.
[1466] 53. The oligonucleotide of any one of the preceding Embodiments, wherein the first domain comprises one or more (e.g., 1-10, 1, 2, 3, 4, 5, 6, 7, 8, 9, or 10, etc.) mismatches when the oligonucleotide is aligned with a target nucleic acid for complementarity.
[1467] 54. The oligonucleotide of any one of the preceding Embodiments, wherein the first domain comprises two or more mismatches when the oligonucleotide is aligned with a target nucleic acid for complementarity.
[1468] 55. The oligonucleotide of any one of Embodiments 1-50, wherein the first domain comprises one and no more than one mismatch when the oligonucleotide is aligned with a target nucleic acid for complementarity.
[1469] 56. The oligonucleotide of any one of Embodiments 1-50, wherein the first domain comprises two and no more than two mismatches when the oligonucleotide is aligned with a target nucleic acid for complementarity.
[1470] 57. The oligonucleotide of any one of the preceding Embodiments, wherein the first domain comprises one or more (e.g., 1-10, 1, 2, 3, 4, 5, 6, 7, 8, 9, or 10, etc.) bulges when the oligonucleotide is aligned with a target nucleic acid for complementarity.
[1471] 58. The oligonucleotide of Embodiment 57, wherein each bulge independently comprises one or more base pairs that are not Watson-Crick or wobble pairs.
[1472] 59. The oligonucleotide of any one of the preceding Embodiments, wherein the first domain comprises one or more (e.g., 1-10, 1, 2, 3, 4, 5, 6, 7, 8, 9, or 10, etc.) wobble pairs when the oligonucleotide is aligned with a target nucleic acid for complementarity.
[1473] 60. The oligonucleotide of any one of the preceding Embodiments, wherein the first domain comprises two or more wobble pairs when the oligonucleotide is aligned with a target nucleic acid for complementarity.
[1474] 61. The oligonucleotide of any one of the preceding Embodiments, wherein the first domain comprises two and no more than two wobble pairs when the oligonucleotide is aligned with a target nucleic acid for complementarity.
[1475] 62. The oligonucleotide of any one of Embodiments 1-50, wherein the first domain is fully complementary to a target nucleic acid.
[1476] 63. The oligonucleotide of any one of the preceding Embodiments, wherein the first domain comprises about 1-50 (e.g., about 5, 6, 7, 8, 9, or 10-about 10, 11, 12, 13, 14, 15, 16, 17, 18, 19, 20, 21, 22, 23, 24, 25, 30, 40 or 50, or about 5, 6, 7, 8, 9, 10, 11, 12, 13, 14, 15, 16, 17, 18, 19, 20, 21, 22, 23, 24, 25, 30, 40 or 50, etc., about 1, 2, 3, 4, 5, 6, 7, 8, 9, 10, 11, 12, 13, 14, 15, 16, 17, 18, 19, or 20, etc.) sugars with 2′-F modification.
[1477] 64. The oligonucleotide of any one of the preceding Embodiments, wherein about 5%-100% (e.g., about 10%-100%, 20-100%, 30%-100%, 40%-100%, 50%-80%, 50%-85%, 50%-90%, 50%-95%, 60%-80%, 60%-85%, 60%-90%, 60%-95%, 60%-100%, 65%-80%, 65%-85%, 65%-90%, 65%-95%, 65%-100%, 70%-80%, 70%-85%, 70%-90%, 70%-95%, 70%-100%, 75%-80%, 75%-85%, 75%-90%, 75%-95%, 75%-100%, 80%-85%, 80%-90%, 80%-95%, 80%-100%, 85%-90%, 85%-95%, 85%-100%, 90%-95%, 90%-100%, 10%, 20%, 30%, 40%, 50%, 60%, 65%, 70%, 75%, 80%, 85%, 90%, 95%, or 100%, etc.) of sugars in the first domain independently comprise a 2′-F modification.
[1478] 65. The oligonucleotide of any one of the preceding Embodiments, wherein about 50%-100% (e.g., about 50%-80%, 50%-85%, 50%-90%, 50%-95%, 60%-80%, 60%-85%, 60%-90%, 60%-95%, 60%-100%, 65%-80%, 65%-85%, 65%-90%, 65%-95%, 65%-100%, 70%-80%, 70%-85%, 70%-90%, 70%-95%, 70%-100%, 75%-80%, 75%-85%, 75%-90%, 75%-95%, 75%-100%, 80%-85%, 80%-90%, 80%-95%, 80%-100%, 85%-90%, 85%-95%, 85%-100%, 90%-95%, 90%-100%, 50%, 60%, 65%, 70%, 75%, 80%, 85%, 90%, 95%, or 100%, etc.) of sugars in the first domain independently comprise a 2′-F modification.
[1479] 66. The oligonucleotide of any one of the preceding Embodiments, wherein about 30%-70% (e.g., about 30%-60%, 30%-50%, or about 30%, 40%, 50%, 60% or 70%) of sugars in the first domain independently comprise a 2′-F modification.
[1480] 67. The oligonucleotide of any one of the preceding Embodiments, wherein no more than about 1%-95% (e.g., no more than about 1%, 5%, 10%, 15%, 20%, 25%, 30%, 35%, 40%, 45%, 50%, 55%, 60%, 65%, 70%, 75%, 80%, 85%, 90%, 95%, etc.) of sugars in the first domain comprises 2′-OMe.
[1481] 68. The oligonucleotide of any one of the preceding Embodiments, wherein about 30%-70% (e.g., about 30%-60%, 30%-50%, or about 30%, 40%, 50%, 60% or 70%) of sugars in the first domain comprises 2′-OMe.
[1482] 69. The oligonucleotide of any one of the preceding Embodiments, wherein no more than about 50% of sugars in the first domain comprises 2′-OMe.
[1483] 70. The oligonucleotide of any one of the preceding Embodiments, wherein no more than about 1%-95% (e.g., no more than about 1%, 5%, 10%, 15%, 20%, 25%, 30%, 35%, 40%, 45%, 50%, 55%, 60%, 65%, 70%, 75%, 80%, 85%, 90%, 95%, etc.) of sugars in the first domain comprises 2′-OR, wherein R is optionally substituted C₁₋₆ aliphatic.
[1484] 71. The oligonucleotide of any one of the preceding Embodiments, wherein about 30%-70% (e.g., about 30%-60%, 30%-50%, or about 30%, 40%, 50%, 60% or 70%) of sugars in the first domain comprises 2′-OR, wherein R is optionally substituted C₁₋₆ aliphatic.
[1485] 72. The oligonucleotide of any one of the preceding Embodiments, wherein no more than about 50% of sugars in the first domain comprises 2′-OR, wherein R is optionally substituted C₁₋₆ aliphatic.
[1486] 73. The oligonucleotide of any one of the preceding Embodiments, wherein no more than about 1%-95% (e.g., no more than about 1%, 5%, 10%, 15%, 20%, 25%, 30%, 35%, 40%, 45%, 50%, 55%, 60%, 65%, 70%, 75%, 80%, 85%, 90%, 95%, etc.) of sugars in the first domain comprises 2′-OR.
[1487] 74. The oligonucleotide of any one of the preceding Embodiments, wherein about 30%-70% (e.g., about 30%-60%, 30%-50%, or about 30%, 40%, 50%, 60% or 70%) of sugars in the first domain comprises 2′-OR, wherein R is not —H.
[1488] 75. The oligonucleotide of any one of the preceding Embodiments, wherein no more than about 50% of sugars in the first domain comprises 2′-OR.
[1489] 76. The oligonucleotide of any one of the preceding Embodiments, wherein the first domain comprises one or more (e.g., about 1-20, 1, 2, 3, 4, 5, 6, 7, 8, 9, 10, 11, 12, 13, 14, 15, 16, 17, 18, 19, 20, etc.) modified sugars comprising a 2′-OR modification, wherein R is optionally substituted C₁₋₆ aliphatic.
[1490] 77. The oligonucleotide of any one of the preceding Embodiments, wherein the first domain comprises one or more (e.g., about 1-20, 1, 2, 3, 4, 5, 6, 7, 8, 9, 10, 11, 12, 13, 14, 15, 16, 17, 18, 19, 20, etc.) modified sugars comprising a 2′-MOE modification.
[1491] 78. The oligonucleotide of any one of the preceding Embodiments, wherein the first domain comprises one or more (e.g., about 1-20, 1, 2, 3, 4, 5, 6, 7, 8, 9, 10, 11, 12, 13, 14, 15, 16, 17, 18, 19, 20, etc.) modified sugars comprising a 2′-OMe modification.
[1492] 79. The oligonucleotide of any one of the preceding Embodiments, wherein the first about 1-5, e.g., 1, 2, 3, 4, or 5 sugars from the 5′-end of a first domain is independently a 2′-OR modified sugar, wherein R is independently optionally substituted C₁₋₆ aliphatic.
[1493] 80. The oligonucleotide of any one of the preceding Embodiments, wherein the first about 1-5, e.g., 1, 2, 3, 4, or 5 sugars from the 5′-end of a first domain is independently a 2′-MOE modified sugar.
[1494] 81. The oligonucleotide of any one of the preceding Embodiments, wherein the first domain comprises one or more (e.g., about 1-20, 1, 2, 3, 4, 5, 6, 7, 8, 9, 10, 11, 12, 13, 14, 15, 16, 17, 18, 19, 20, etc.) modified sugars comprising a 2′-N(R)₂ modification, wherein each R is optionally substituted C₁₋₆ aliphatic.
[1495] 82. The oligonucleotide of any one of the preceding Embodiments, wherein the first domain comprises one or more (e.g., about 1-20, 1, 2, 3, 4, 5, 6, 7, 8, 9, 10, 11, 12, 13, 14, 15, 16, 17, 18, 19, 20, etc.) modified sugars comprising a 2′-NH₂ modification.
[1496] 83. The oligonucleotide of any one of the preceding Embodiments, wherein the first domain comprises one or more (e.g., about 1-20, 1, 2, 3, 4, 5, 6, 7, 8, 9, 10, 11, 12, 13, 14, 15, 16, 17, 18, 19, 20, etc.) LNA sugars.
[1497] 84. The oligonucleotide of any one of the preceding Embodiments, wherein the first domain comprises one or more (e.g., about 1-20, 1, 2, 3, 4, 5, 6, 7, 8, 9, 10, 11, 12, 13, 14, 15, 16, 17, 18, 19, 20, etc.) acyclic sugars (e.g., UNA sugars).
[1498] 85. The oligonucleotide of any one of the preceding Embodiments, wherein the first domain comprises one or more (e.g., about 1-20, 1, 2, 3, 4, 5, 6, 7, 8, 9, 10, 11, 12, 13, 14, 15, 16, 17, 18, 19, 20, etc.) modified sugars comprising a 2′-F modification.
[1499] 86. The oligonucleotide of any one of the preceding Embodiments, wherein the first domain comprises one or more (e.g., about 1-20, 1, 2, 3, 4, 5, 6, 7, 8, 9, 10, 11, 12, 13, 14, 15, 16, 17, 18, 19, 20, etc.) sugars comprising 2′-OH.
[1500] 87. The oligonucleotide of any one of the preceding Embodiments, wherein the first domain comprises one or more (e.g., about 1-20, 1, 2, 3, 4, 5, 6, 7, 8, 9, 10, 11, 12, 13, 14, 15, 16, 17, 18, 19, 20, etc.) sugars comprising two 2′-H.
[1501] 88. The oligonucleotide of any one of Embodiments 1-75, wherein no sugar in the first domain comprises 2′-OR.
[1502] 89. The oligonucleotide of any one of Embodiments 1-75, wherein no sugar in the first domain comprises 2′-OMe.
[1503] 90. The oligonucleotide of any one of Embodiments 1-75, wherein no sugar in the first domain comprises 2′-OR, wherein R is optionally substituted C₁₋₆ aliphatic.
[1504] 91. The oligonucleotide of any one of Embodiments 1-75, wherein each sugar in the first domain comprises 2′-F.
[1505] 92. The oligonucleotide of any one of the preceding Embodiments, wherein the first domain comprise about 1-50 (e.g., about 5, 6, 7, 8, 9, or 10-about 10, 11, 12, 13, 14, 15, 16, 17, 18, 19, 20, 21, 22, 23, 24, 25, 30, 40 or 50, or about 5, 6, 7, 8, 9, 10, 11, 12, 13, 14, 15, 16, 17, 18, 19, 20, 21, 22, 23, 24, 25, 30, 40 or 50, etc., about 1, 2, 3, 4, 5, 6, 7, 8, 9, 10, 11, 12, 13, 14, 15, 16, 17, 18, 19, or 20, etc.) modified internucleotidic linkages.
[1506] 93. The oligonucleotide of any one of the preceding Embodiments, wherein about 5%-100% (e.g., about 10%-100%, 20-100%, 30%-100%, 40%-100%, 50%-80%, 50%-85%, 50%-90%, 50%-95%, 60%-80%, 60%-85%, 60%-90%, 60%-95%, 60%-100%, 65%-80%, 65%-85%, 65%-90%, 65%-95%, 65%-100%, 70%-80%, 70%-85%, 70%-90%, 70%-95%, 70%-100%, 75%-80%, 75%-85%, 75%-90%, 75%-95%, 75%-100%, 80%-85%, 80%-90%, 80%-95%, 80%-100%, 85%-90%, 85%-95%, 85%-100%, 90%-95%, 90%-100%, 10%, 20%, 30%, 40%, 50%, 60%, 65%, 70%, 75%, 80%, 85%, 90%, 95%, or 100%, etc.) of internucleotidic linkages in the first domain are modified internucleotidic linkages.
[1507] 94. The oligonucleotide of any one of the preceding Embodiments, wherein about 50%-100% (e.g., about 50%-80%, 50%-85%, 50%-90%, 50%-95%, 60%-80%, 60%-85%, 60%-90%, 60%-95%, 60%-100%, 65%-80%, 65%-85%, 65%-90%, 65%-95%, 65%-100%, 70%-80%, 70%-85%, 70%-90%, 70%-95%, 70%-100%, 75%-80%, 75%-85%, 75%-90%, 75%-95%, 75%-100%, 80%-85%, 80%-90%, 80%-95%, 80%-100%, 85%-90%, 85%-95%, 85%-100%, 90%-95%, 90%-100%, 50%, 60%, 65%, 70%, 75%, 80%, 85%, 90%, 95%, or 100%, etc.) of internucleotidic linkages in the first domain are modified internucleotidic linkages.
[1508] 95. The oligonucleotide of any one of the preceding Embodiments, wherein each modified internucleotidic linkages is independently a chiral internucleotidic linkage.
[1509] 96. The oligonucleotide of any one of the preceding Embodiments, wherein each modified internucleotidic linkages is independently a phosphorothioate internucleotidic linkage or a non-negatively charged internucleotidic linkage.
[1510] 97. The oligonucleotide of any one of the preceding Embodiments, wherein each modified internucleotidic linkages is independently a phosphorothioate internucleotidic linkage or a neutral internucleotidic linkage.
[1511] 98. The oligonucleotide of any one of the preceding Embodiments, wherein the first domain comprises one or more phosphorothioate internucleotidic linkages.
[1512] 99. The oligonucleotide of any one of the preceding Embodiments, wherein the first domain comprises 1, 2, 3, 4, or 5 non-negatively charged internucleotidic linkages.
[1513] 100. The oligonucleotide of any one of the preceding Embodiments, wherein the internucleotidic linkage between the first and the second nucleosides of the first domain is a non-negatively charged internucleotidic linkage.
[1514] 101. The oligonucleotide of any one of the preceding Embodiments, wherein the internucleotidic linkage between the last and the second last nucleosides of the first domain is a non-negatively charged internucleotidic linkage.
[1515] 102. The oligonucleotide of any one of the preceding Embodiments, wherein at least about 1-50 (e.g., about 5, 6, 7, 8, 9, or 10-about 10, 11, 12, 13, 14, 15, 16, 17, 18, 19, 20, 21, 22, 23, 24, 25, 30, 40 or 50, or about 5, 6, 7, 8, 9, 10, 11, 12, 13, 14, 15, 16, 17, 18, 19, 20, 21, 22, 23, 24, 25, 30, 40 or 50, etc., about 1, 2, 3, 4, 5, 6, 7, 8, 9, 10, 11, 12, 13, 14, 15, 16, 17, 18, 19, or 20, etc.) chiral internucleotidic linkages in the first domain is chirally controlled.
[1516] 103. The oligonucleotide of any one of the preceding Embodiments, wherein about 5%-100% (e.g., about 10%-100%, 20-100%, 30%-100%, 40%-100%, 50%-80%, 50%-85%, 50%-90%, 50%-95%, 60%-80%, 60%-85%, 60%-90%, 60%-95%, 60%-100%, 65%-80%, 65%-85%, 65%-90%, 65%-95%, 65%-100%, 70%-80%, 70%-85%, 70%-90%, 70%-95%, 70%-100%, 75%-80%, 75%-85%, 75%-90%, 75%-95%, 75%-100%, 80%-85%, 80%-90%, 80%-95%, 80%-100%, 85%-90%, 85%-95%, 85%-100%, 90%-95%, 90%-100%, 10%, 20%, 30%, 40%, 50%, 60%, 65%, 70%, 75%, 80%, 85%, 90%, 95%, or 100%, etc.) of chiral internucleotidic linkages in the first domain is chirally controlled.
[1517] 104. The oligonucleotide of any one of the preceding Embodiments, wherein the internucleotidic linkage between the first and the second nucleosides of the first domain is chirally controlled.
[1518] 105. The oligonucleotide of any one of the preceding Embodiments, wherein the internucleotidic linkage between the last and the second last nucleosides of the first domain is chirally controlled.
[1519] 106. The oligonucleotide of any one of the preceding Embodiments, wherein each chiral internucleotidic linkage is independently a chirally controlled internucleotidic linkage.
[1520] 107. The oligonucleotide of any one of the preceding Embodiments, wherein at least about 1-50 (e.g., about 5, 6, 7, 8, 9, or 10-about 10, 11, 12, 13, 14, 15, 16, 17, 18, 19, 20, 21, 22, 23, 24, 25, 30, 40 or 50, or about 5, 6, 7, 8, 9, 10, 11, 12, 13, 14, 15, 16, 17, 18, 19, 20, 21, 22, 23, 24, 25, 30, 40 or 50, etc., about 1, 2, 3, 4, 5, 6, 7, 8, 9, 10, 11, 12, 13, 14, 15, 16, 17, 18, 19, or 20, etc.) chiral internucleotidic linkages in the first domain is Sp.
[1521] 108. The oligonucleotide of any one of the preceding Embodiments, wherein at least 5%-100% (e.g., about 10%-100%, 20-100%, 30%-100%, 40%-100%, 50%-80%, 50%-85%, 50%-90%, 50%-95%, 60%-80%, 60%-85%, 60%-90%, 60%-95%, 60%-100%, 65%-80%, 65%-85%, 65%-90%, 65%-95%, 65%-100%, 70%-80%, 70%-85%, 70%-90%, 70%-95%, 70%-100%, 75%-80%, 75%-85%, 75%-90%, 75%-95%, 75%-100%, 80%-85%, 80%-90%, 80%-95%, 80%-100%, 85%-90%, 85%-95%, 85%-100%, 90%-95%, 90%-100%, 10%, 20%, 30%, 40%, 50%, 60%, 65%, 70%, 75%, 80%, 85%, 90%, 95%, or 100%, etc.) of chiral internucleotidic linkages in the first domain is Sp.
[1522] 109. The oligonucleotide of any one of the preceding Embodiments, wherein each chiral internucleotidic linkages in the first domain is Sp.
[1523] 110. The oligonucleotide of any one of Embodiments 1-108, wherein the internucleotidic linkage between the first and the second nucleosides of the first domain is Rp.
[1524] 111. The oligonucleotide of any one of Embodiments 1-108 and 110, wherein the internucleotidic linkage between the last and the second last nucleosides of the first domain is Rp.
[1525] 112. The oligonucleotide of any one of the preceding Embodiments, wherein each internucleotidic linkage in the first domain is independently a modified internucleotidic linkage.
[1526] 113. The oligonucleotide of any one of Embodiments 1-111, wherein the first domain comprises one or more natural phosphate linkages.
[1527] 114. The oligonucleotide of any one of the preceding Embodiments, wherein the first domain can recruit, or promotes or contributes to recruitment of, an ADAR protein to a target nucleic acid.
[1528] 115. The oligonucleotide of any one of the preceding Embodiments, wherein the first domain can interact, or promotes or contributes to interaction of, an ADAR protein with a target nucleic acid.
[1529] 116. The oligonucleotide of any one of the preceding Embodiments, wherein the first domain contacts with a RNA binding domain (RBD) of ADAR.
[1530] 117. The oligonucleotide of any one of the preceding Embodiments, wherein the first domain does not substantially contact with a second RBD domain of ADAR.
[1531] 118. The oligonucleotide of any one of the preceding Embodiments, wherein the first domain does not substantially contact with a catalytic domain which has a deaminase activity, of ADAR.
[1532] 119. The oligonucleotide of any one of the preceding Embodiments, wherein the second domain has a length of about 2-50 (e.g., about 5, 6, 7, 8, 9, or 10-about 10, 11, 12, 13, 14, 15, 16, 17, 18, 19, 20, 21, 22, 23, 24, 25, 30, 40 or 50, or about 5, 6, 7, 8, 9, 10, 11, 12, 13, 14, 15, 16, 17, 18, 19, 20, 21, 22, 23, 24, 25, 30, 40 or 50, etc.) nucleobases.
[1533] 120. The oligonucleotide of any one of the preceding Embodiments, wherein the second domain has a length of about 1-7 nucleobases.
[1534] 121. The oligonucleotide of any one of the preceding Embodiments, wherein the second domain has a length of about 5-15 nucleobases.
[1535] 122. The oligonucleotide of any one of the preceding Embodiments, wherein the second domain has a length of about 10-25 nucleobases.
[1536] 123. The oligonucleotide of any one of the preceding Embodiments, wherein the second domain has a length of about 15 nucleobases.
[1537] 124. The oligonucleotide of any one of the preceding Embodiments, wherein the second domain comprises one or more (e.g., 1-10, 1, 2, 3, 4, 5, 6, 7, 8, 9, or 10, etc.) mismatches when the oligonucleotide is aligned with a target nucleic acid for complementarity.
[1538] 125. The oligonucleotide of any one of the preceding Embodiments, wherein the second domain comprises two or more mismatches when the oligonucleotide is aligned with a target nucleic acid for complementarity.
[1539] 126. The oligonucleotide of any one of Embodiments 1-119, wherein the second domain comprises one and no more than one mismatch when the oligonucleotide is aligned with a target nucleic acid for complementarity.
[1540] 127. The oligonucleotide of any one of Embodiments 1-119, wherein the second domain comprises two and no more than two mismatches when the oligonucleotide is aligned with a target nucleic acid for complementarity.
[1541] 128. The oligonucleotide of any one of the preceding Embodiments, wherein the second domain comprises one or more (e.g., 1-10, 1, 2, 3, 4, 5, 6, 7, 8, 9, or 10, etc.) bulges when the oligonucleotide is aligned with a target nucleic acid for complementarity.
[1542] 129. The oligonucleotide of Embodiment 128, wherein each bulge independently comprises one or more base pairs that are not Watson-Crick or wobble pairs.
[1543] 130. The oligonucleotide of any one of the preceding Embodiments, wherein the second domain comprises one or more (e.g., 1-10, 1, 2, 3, 4, 5, 6, 7, 8, 9, or 10, etc.) wobble pairs when the oligonucleotide is aligned with a target nucleic acid for complementarity.
[1544] 131. The oligonucleotide of any one of the preceding Embodiments, wherein the second domain comprises two or more wobble pairs when the oligonucleotide is aligned with a target nucleic acid for complementarity.
[1545] 132. The oligonucleotide of any one of the preceding Embodiments, wherein the second domain comprises two and no more than two wobble pairs when the oligonucleotide is aligned with a target nucleic acid for complementarity.
[1546] 133. The oligonucleotide of any one of Embodiments 1-119, wherein the second domain is fully complementary to a target nucleic acid.
[1547] 134. The oligonucleotide of any one of the preceding Embodiments, wherein the second domain comprise a nucleoside opposite to a target adenosine when the oligonucleotide is aligned with a target nucleic acid for complementarity.
[1548] 135. The oligonucleotide of Embodiment 134, wherein the opposite nucleobase is optionally substituted or protected U, or is an optionally substituted or protected tautomer of U.
[1549] 136. The oligonucleotide of Embodiment 134, wherein the opposite nucleobase is U.
[1550] 137. The oligonucleotide of Embodiment 134, wherein the opposite nucleobase is optionally substituted or protected C, or is an optionally substituted or protected tautomer of C.
[1551] 138. The oligonucleotide of Embodiment 134, wherein the opposite nucleobase is C.
[1552] 139. The oligonucleotide of Embodiment 134, wherein the opposite nucleobase is optionally substituted or protected A, or is an optionally substituted or protected tautomer of A.
[1553] 140. The oligonucleotide of Embodiment 134, wherein the opposite nucleobase is A.
[1554] 141. The oligonucleotide of Embodiment 134, wherein the opposite nucleobase is optionally substituted or protected nucleobase of pseudoisocytosine, or is an optionally substituted or protected tautomer of the nucleobase of pseudoisocytosine.
[1555] 142. The oligonucleotide of Embodiment 134, wherein the opposite nucleobase is the nucleobase of pseudoisocytosine.
[1556] 143. The oligonucleotide of any one of the preceding Embodiments, wherein the oligonucleotide comprises a nucleobase BA, wherein BA is or comprises Ring BA or a tautomer thereof, wherein Ring BA is an optionally substituted, 5-20 membered, monocyclic, bicyclic or polycyclic ring having 0-10 heteroatoms.
[1557] 144. An oligonucleotide, wherein the oligonucleotide comprises a nucleobase BA, wherein BA is or comprises Ring BA or a tautomer thereof, wherein Ring BA is an optionally substituted, 5-20 membered, monocyclic, bicyclic or polycyclic ring having 0-10 heteroatoms.
[1558] 145. The oligonucleotide of Embodiment 134, wherein the nucleobase is BA, wherein BA is or comprises Ring BA or a tautomer thereof, wherein Ring BA is an optionally substituted, 5-20 membered, monocyclic, bicyclic or polycyclic ring having 0-10 heteroatoms.
[1559] 146. The oligonucleotide of any one of Embodiments 143-145, wherein BA has weaker hydrogen bonding with the target adenine of the adenosine compared to U.
[1560] 147. The oligonucleotide of any one of Embodiments 143-146, wherein BA forms fewer hydrogen bonds with the target adenine of the adenosine compared to U.
[1561] 148. The oligonucleotide of any one of Embodiments 143-147, wherein BA forms one or more hydrogen bonds with one or more amino acid residues of ADAR which residues form one or more hydrogen bonds with U opposite to a target adenosine.
[1562] 149. The oligonucleotide of any one of Embodiments 143-148, wherein BA forms one or more hydrogen bonds with each amino acid residue of ADAR that forms one or more hydrogen bonds with U opposite to a target adenosine.
[1563] 150. The oligonucleotide of any one of Embodiments 143-149, wherein Ring BA comprises [symbol] X² [symbol] X³ [symbol] .
[1564] 151. The oligonucleotide of any one of Embodiments 143-149, wherein Ring BA comprises [symbol] X² [symbol] X³ [symbol] X⁴ [symbol] .
[1565] 152. The oligonucleotide of any one of Embodiments 143-149, wherein Ring BA comprises [symbol] X¹( [symbol] ) [symbol] X² [symbol] X³ [symbol] .
[1566] 153. The oligonucleotide of any one of Embodiments 143-149, wherein Ring BA comprises [symbol] X¹( [symbol] ) [symbol] X² [symbol] X³ [symbol] X⁴ [symbol] .
[1567] 154. The oligonucleotide of any one of Embodiments 143-153, wherein Ring BA has the structure of formula BA-I.
[1568] 155. The oligonucleotide of any one of Embodiments 143-153, wherein Ring BA has the structure of formula BA-I-a.
[1569] 156. The oligonucleotide of any one of Embodiments 143-153, wherein Ring BA has the structure of formula BA-I-b.
[1570] 157. The oligonucleotide of any one of Embodiments 143-153, wherein Ring BA has the structure of formula BA-II.
[1571] 158. The oligonucleotide of any one of Embodiments 143-153, wherein Ring BA has the structure of formula BA-II-a.
[1572] 159. The oligonucleotide of any one of Embodiments 143-153, wherein Ring BA has the structure of formula BA-II-b.
[1573] 160. The oligonucleotide of any one of Embodiments 143-153, wherein Ring BA has the structure of formula BA-III.
[1574] 161. The oligonucleotide of any one of Embodiments 143-153, wherein Ring BA has the structure of formula BA-III-a.
[1575] 162. The oligonucleotide of any one of Embodiments 143-153, wherein Ring BA has the structure of formula BA-III-b.
[1576] 163. The oligonucleotide of any one of Embodiments 143-162, wherein each of X¹, X², X³, X⁴, X⁵, X⁶, X^{1′}, X^{2′}, X^{3′}, X^{4′}, X^{5′}, X^{6′}, and X^{7′} is independently and optionally substituted when it is —CH═, —C(OH)═, —C(—NH₂)═, —CH₂—, —C(═NH)—, or —NH—.
[1577] 164. The oligonucleotide of any one of Embodiments 150-163, wherein X¹ is —N(−)—.
[1578] 165. The oligonucleotide of any one of Embodiments 150-163, wherein X¹ is —C(−)═.
[1579] 166. The oligonucleotide of any one of Embodiments 150-165, wherein X² is —C(O)—.
[1580] 167. The oligonucleotide of any one of Embodiments 150-166, wherein X³ is —NR′—.
[1581] 168. The oligonucleotide of any one of Embodiments 150-167, wherein X³ is optionally substituted —NH—.
[1582] 169. The oligonucleotide of any one of Embodiments 150-167, wherein X³ is —NH—.
[1583] 170. The oligonucleotide of any one of Embodiments 150-169, wherein X⁴ is —C(R^{B4})═, —C(—N(R^{B4})₂)═, —C(R^{B4})₂—, or —C(═NR^{B4})—.
[1584] 171. The oligonucleotide of any one of Embodiments 150-169, wherein X⁴ is —C(R^{B4})═.
[1585] 172. The oligonucleotide of any one of Embodiments 150-169, wherein X⁴ is optionally substituted —CH═.
[1586] 173. The oligonucleotide of any one of Embodiments 150-169, wherein X⁴ is —CH═.
[1587] 174. The oligonucleotide of any one of Embodiments 150-169, wherein X⁴ is —C(—N(R^{B4})₂)═.
[1588] 175. The oligonucleotide of any one of Embodiments 150-169, wherein X⁴ is optionally substituted —C(—NH₂)═.
[1589] 176. The oligonucleotide of any one of Embodiments 150-169, wherein X⁴ is —C(—NH₂)═.
[1590] 177. The oligonucleotide of any one of Embodiments 150-169, wherein X⁴ is —C(—N═CHNR₂)═.
[1591] 178. The oligonucleotide of any one of Embodiments 150-169, wherein X⁴ is —C(—N═CHN(CH₃)₂)═.
[1592] 179. The oligonucleotide of any one of Embodiments 150-169, wherein X⁴ is —C(—NHR′)═.
[1593] 180. The oligonucleotide of any one of Embodiments 150-169, wherein X⁴ is —C(R^{B4})₂—.
[1594] 181. The oligonucleotide of any one of Embodiments 150-169, wherein X⁴ is optionally substituted —CH₂—.
[1595] 182. The oligonucleotide of any one of Embodiments 150-169, wherein X⁴ is —CH₂—.
[1596] 183. The oligonucleotide of any one of Embodiments 150-169, wherein X⁴ is optionally substituted —C(═NH)—.
[1597] 184. The oligonucleotide of any one of Embodiments 150-169, wherein X⁴ is —C(═NR^{B4})—.
[1598] 185. The oligonucleotide of any one of Embodiments 150-169, wherein X⁴ is —C(O)═, wherein the oxygen atom has a weaker hydrogen bond acceptor than the corresponding —C(O)— in U.
[1599] 186. The oligonucleotide of any one of Embodiments 150-169, wherein X⁴ is —C(O)═, wherein the oxygen atom forms an intramolecular hydrogen bond.
[1600] 187. The oligonucleotide of any one of Embodiments 150-169, wherein X⁴ is —C(O)═, wherein the oxygen atom forms an hydrogen bond with a hydrogen within the same nucleobase.
[1601] 188. The oligonucleotide of any one of Embodiments 157-187, wherein X⁵ is —C(R^{B5})₂—.
[1602] 189. The oligonucleotide of any one of Embodiments 157-187, wherein X⁵ is optionally substituted —CH₂—.
[1603] 190. The oligonucleotide of any one of Embodiments 157-187, wherein X⁵ is —CH₂—.
[1604] 191. The oligonucleotide of any one of Embodiments 157-187, wherein X⁵ is —C(R^{B5})═.
[1605] 192. The oligonucleotide of any one of Embodiments 157-187, wherein X⁵ is optionally substituted —C(—NO₂)═.
[1606] 193. The oligonucleotide of any one of Embodiments 157-187, wherein X⁵ is optionally substituted —CH═.
[1607] 194. The oligonucleotide of any one of Embodiments 157-187, wherein X⁵ is —CH═.
[1608] 195. The oligonucleotide of any one of Embodiments 157-187, wherein X⁵ is —C(-L^{B5}-R^{B51})═, wherein R^{B51} is —R′, —N(R′)₂, —OR′, or —SR′.
[1609] 196. The oligonucleotide of any one of Embodiments 157-187, wherein X⁵ is —C(-L^{B5}-R^{B51})═, wherein R^{B51} is —N(R′)₂, —OR′, or —SR′.
[1610] 197. The oligonucleotide of any one of Embodiments 157-187, wherein X⁵ is —C(-L^{B5}-R^{B51})═, wherein R^{B51} is —NHR′.
[1611] 198. The oligonucleotide of any one of Embodiments 195-197, wherein L^{B5} is or comprises —C(O).
[1612] 199. The oligonucleotide of any one of Embodiments 157-187, wherein X⁵ is —N═.
[1613] 200. The oligonucleotide of any one of Embodiments 197-198, wherein X⁴ is —C(O)═, wherein the oxygen atom forms a hydrogen bond with a hydrogen of —NHR′, —OH or —SH in R^{B51}.
[1614] 201. The oligonucleotide of any one of Embodiments 143-153, wherein Ring BA has the structure of formula BA-IV.
[1615] 202. The oligonucleotide of any one of Embodiments 143-153, wherein Ring BA has the structure of formula BA-IV-a.
[1616] 203. The oligonucleotide of any one of Embodiments 143-153, wherein Ring BA has the structure of formula BA-IV-b.
[1617] 204. The oligonucleotide of any one of Embodiments 143-153, wherein Ring BA has the structure of formula BA-V.
[1618] 205. The oligonucleotide of any one of Embodiments 143-153, wherein Ring BA has the structure of formula BA-V-a.
[1619] 206. The oligonucleotide of any one of Embodiments 143-153, wherein Ring BA has the structure of formula BA-V-b.
[1620] 207. The oligonucleotide of any one of Embodiments 143-153, wherein Ring BA has the structure of formula BA-VI.
[1621] 208. The oligonucleotide of any one of Embodiments 201-207, wherein each of X¹, X², X³, X⁴, X⁵, X⁶, X^{1′}, X^{2′}, X^{3′}, X^{4′}, X^{5′}, X^{6′}, and X^{7′} is independently and optionally substituted when it is —CH═, —C(OH)═, —C(—NH₂)═, —CH₂—, —C(═NH)—, or —NH—.
[1622] 209. The oligonucleotide of any one of Embodiments 201-208, wherein X¹ is —N(−)—.
[1623] 210. The oligonucleotide of any one of Embodiments 201-208, wherein X¹ is —C(−)═.
[1624] 211. The oligonucleotide of any one of Embodiments 201-210, wherein X² is optionally substituted —CH═.
[1625] 212. The oligonucleotide of any one of Embodiments 201-210, wherein X² is —CH═.
[1626] 213. The oligonucleotide of any one of Embodiments 201-210, wherein X² is —C(O)—.
[1627] 214. The oligonucleotide of any one of Embodiments 201-213, wherein X³ is —NR′—.
[1628] 215. The oligonucleotide of any one of Embodiments 201-213, wherein X³ is optionally substituted —NH—.
[1629] 216. The oligonucleotide of any one of Embodiments 201-213, wherein X³ is —NH—.
[1630] 217. The oligonucleotide of any one of Embodiments 201-216, wherein Ring BA^{A} is 5-membered.
[1631] 218. The oligonucleotide of any one of Embodiments 201-216, wherein Ring BA^{A} is 6-membered.
[1632] 219. The oligonucleotide of any one of Embodiments 201-218, wherein Ring BA^{A} is an optionally substituted ring having 1-3 heteroatoms.
[1633] 220. The oligonucleotide of Embodiment 219, wherein a heteroatom is a nitrogen.
[1634] 221. The oligonucleotide of any one of Embodiments 219-220, wherein Ring BA^{A} contains two nitrogen.
[1635] 222. The oligonucleotide of any one of Embodiments 219-220, wherein a heteroatom is oxygen.
[1636] 223. The oligonucleotide of any one of Embodiments 160-222, wherein X⁶ is —C(R^{B6})═, —C(OR^{B6})═, —C(R^{B6})₂—, or —C(O)—.
[1637] 224. The oligonucleotide of any one of Embodiments 160-222, wherein X⁶ is —C(R)═, —C(R)₂—, or —C(O)—.
[1638] 225. The oligonucleotide of any one of Embodiments 160-222, wherein X⁶ is optionally substituted —CH═.
[1639] 226. The oligonucleotide of any one of Embodiments 160-222, wherein X⁶ is —CH═.
[1640] 227. The oligonucleotide of any one of Embodiments 160-222, wherein X⁶ is optionally substituted —CH₂—.
[1641] 228. The oligonucleotide of any one of Embodiments 160-222, wherein X⁶ is —CH₂—.
[1642] 229. The oligonucleotide of any one of Embodiments 160-222, wherein X⁶ is —C(O)—.
[1643] 230. The oligonucleotide of any one of Embodiments 134-149, wherein Ring BA comprises [symbol] X^{4′} [symbol] X^{5′} [symbol] .
[1644] 231. The oligonucleotide of any one of Embodiments 143-149 or 230, wherein Ring BA has the structure of formula BA-VI.
[1645] 232. The oligonucleotide of Embodiment 230, wherein X^{1′} is —N(−)—.
[1646] 233. The oligonucleotide of Embodiment 230, wherein X^{1′} is —C(−)═.
[1647] 234. The oligonucleotide of any one of Embodiments 230-233, wherein X^{2′} is —C(O)—.
[1648] 235. The oligonucleotide of any one of Embodiments 230-233, wherein X^{2′} is optionally substituted —CH═.
[1649] 236. The oligonucleotide of any one of Embodiments 230-233, wherein X^{2′} is —CH═.
[1650] 237. The oligonucleotide of any one of Embodiments 230-233, wherein X^{2′} is —C(−)═.
[1651] 238. The oligonucleotide of any one of Embodiments 230-236, wherein X^{3′} is —NR′—.
[1652] 239. The oligonucleotide of any one of Embodiments 230-236, wherein X^{3′} is optionally substituted —NH—.
[1653] 240. The oligonucleotide of any one of Embodiments 230-236, wherein X^{3′} is —NH—.
[1654] 241. The oligonucleotide of any one of Embodiments 230-236, wherein X^{3′} is —N═.
[1655] 242. The oligonucleotide of any one of Embodiments 230-241, wherein X^{4′} is —C(O)═.
[1656] 243. The oligonucleotide of any one of Embodiments 230-241, wherein X^{4′} is —C(OR^{B4′})═.
[1657] 244. The oligonucleotide of any one of Embodiments 230-241, wherein X^{4′} is —C(R^{B4′})═.
[1658] 245. The oligonucleotide of any one of Embodiments 230-241, wherein X⁴ is optionally substituted —CH═.
[1659] 246. The oligonucleotide of any one of Embodiments 230-241, wherein X^{4′} is —CH═.
[1660] 247. The oligonucleotide of any one of Embodiments 230-241, wherein X^{4′} is —C(—N(R^{B4′})₂)═.
[1661] 248. The oligonucleotide of any one of Embodiments 230-241, wherein X^{4′} is optionally substituted —C(—NH₂)═.
[1662] 249. The oligonucleotide of any one of Embodiments 230-241, wherein X^{4′} is —C(—NH₂)═.
[1663] 250. The oligonucleotide of any one of Embodiments 230-241, wherein X^{4′} is —C(—N═CHN(CH₃)₂)═.
[1664] 251. The oligonucleotide of any one of Embodiments 230-241, wherein X^{4′} is —C(—NC(O)R′)═.
[1665] 252. The oligonucleotide of any one of Embodiments 230-251, wherein X^{5′} is optionally substituted —NH—.
[1666] 253. The oligonucleotide of any one of Embodiments 230-251, wherein X^{5′} is —NH—.
[1667] 254. The oligonucleotide of any one of Embodiments 230-251, wherein X^{5′} is —N═.
[1668] 255. The oligonucleotide of any one of Embodiments 230-251, wherein X^{5′} is —C(R^{B5′})═.
[1669] 256. The oligonucleotide of any one of Embodiments 230-251, wherein X^{5′} is optionally substituted —CH═.
[1670] 257. The oligonucleotide of any one of Embodiments 230-251, wherein X^{5′} is —CH═.
[1671] 258. The oligonucleotide of any one of Embodiments 230-257, wherein X^{6′} is —C(R^{B6′})═.
[1672] 259. The oligonucleotide of any one of Embodiments 230-257, wherein X^{6′} is optionally substituted —CH═.
[1673] 260. The oligonucleotide of any one of Embodiments 230-257, wherein X^{6′} is —CH═.
[1674] 261. The oligonucleotide of any one of Embodiments 230-257, wherein X^{6′} is —C(O)═.
[1675] 262. The oligonucleotide of any one of Embodiments 230-257, wherein X^{6′} is —C(OR^{B6′})═.
[1676] 263. The oligonucleotide of any one of Embodiments 230-257, wherein X^{6′} is —C(OR′)═.
[1677] 264. The oligonucleotide of any one of Embodiments 230-263, wherein X^{7′} is —C(R^{B7′})═.
[1678] 265. The oligonucleotide of any one of Embodiments 230-263, wherein X^{7′} is optionally substituted —CH═.
[1679] 266. The oligonucleotide of any one of Embodiments 230-263, wherein X^{7′} is —CH═.
[1680] 267. The oligonucleotide of any one of Embodiments 230-263, wherein X^{7′} is optionally substituted —NH—.
[1681] 268. The oligonucleotide of any one of Embodiments 230-263, wherein X^{7′} is —NH—.
[1682] 269. The oligonucleotide of any one of Embodiments 230-263, wherein X^{7′} is —N═.
[1683] 270. The oligonucleotide of any one of Embodiments 143-149, wherein Ring BA is

[chemical structure]

[1684] 271. The oligonucleotide of any one of Embodiments 143-149, wherein Ring BA is

[chemical structure]

[1685] 272. The oligonucleotide of any one of Embodiments 143-149, wherein Ring BA is

[chemical structure]

[1686] 273. The oligonucleotide of any one of Embodiments 143-149, wherein Ring BA is

[chemical structure]

wherein R′ is —C(O)R.
[1687] 274. The oligonucleotide of any one of Embodiments 143-149, wherein Ring BA is

[chemical structure]

wherein R′ is —C(O)Ph.
[1688] 275. The oligonucleotide of any one of Embodiments 143-149, wherein Ring BA is

[chemical structure]

[1689] 276. The oligonucleotide of any one of Embodiments 143-149, wherein Ring BA is

[chemical structure]

[1690] 277. The oligonucleotide of any one of Embodiments 143-149, wherein Ring BA is

[chemical structure]

[1691] 278. The oligonucleotide of any one of Embodiments 143-149, wherein Ring BA is

[chemical structure]

[1692] 279. The oligonucleotide of any one of Embodiments 143-149, wherein Ring BA is

[chemical structure]

[1693] 280. The oligonucleotide of any one of Embodiments 143-149, wherein Ring BA is

[chemical structure]

[1694] 281. The oligonucleotide of any one of Embodiments 143-149, wherein Ring BA is

[chemical structure]

[1695] 282. The oligonucleotide of any one of Embodiments 143-149, wherein Ring BA is

[chemical structure]

[1696] 283. The oligonucleotide of any one of Embodiments 143-149, wherein Ring BA is

[chemical structure]

[1697] 284. The oligonucleotide of any one of Embodiments 143-149, wherein Ring BA is

[chemical structure]

[1698] 285. The oligonucleotide of any one of Embodiments 143-149, wherein Ring BA is

[chemical structure]

[1699] 286. The oligonucleotide of any one of Embodiments 143-149, wherein Ring BA is

[chemical structure]

[1700] 287. The oligonucleotide of any one of Embodiments 143-149, wherein Ring BA is

[chemical structure]

[1701] 288. The oligonucleotide of any one of Embodiments 143-149, wherein Ring BA is

[chemical structure]

[1702] 289. The oligonucleotide of any one of Embodiments 143-149, wherein Ring BA is

[chemical structure]

[1703] 290. The oligonucleotide of any one of Embodiments 143-149, wherein Ring BA is

[chemical structure]

[1704] 291. The oligonucleotide of any one of Embodiments 143-149, wherein Ring BA is

[chemical structure]

[1705] 292. The oligonucleotide of any one of Embodiments 143-149, wherein Ring BA is

[chemical structure]

[1706] 293. The oligonucleotide of any one of Embodiments 143-149, wherein Ring BA is

[chemical structure]

[1707] 294. The oligonucleotide of any one of Embodiments 143-293, wherein a nucleobase is Ring BA or a tautomer thereof.
[1708] 295. The oligonucleotide of any one of Embodiments 143-293, wherein a nucleobase is substituted Ring BA or a tautomer thereof.
[1709] 296. The oligonucleotide of any one of Embodiments 143-293, wherein a nucleobase is optionally substituted Ring BA or a tautomer thereof, wherein each ring —CH═, —CH₂— and —NH— is optionally and independently substituted.
[1710] 297. The oligonucleotide of any one of Embodiments 143-293, wherein a nucleobase is optionally substituted Ring BA or a tautomer thereof, wherein each ring —CH═ and —CH₂— is optionally and independently substituted.
[1711] 298. The oligonucleotide of any one of Embodiments 143-293, wherein a nucleobase is optionally substituted Ring BA or a tautomer thereof, wherein each ring —CH═ is optionally and independently substituted.
[1712] 299. The oligonucleotide of any one of the preceding Embodiments, wherein the second domain comprises about 1-50 (e.g., about 5, 6, 7, 8, 9, or 10-about 10, 11, 12, 13, 14, 15, 16, 17, 18, 19, 20, 21, 22, 23, 24, 25, 30, 40 or 50, or about 5, 6, 7, 8, 9, 10, 11, 12, 13, 14, 15, 16, 17, 18, 19, 20, 21, 22, 23, 24, 25, 30, 40 or 50, etc., about 1, 2, 3, 4, 5, 6, 7, 8, 9, 10, 11, 12, 13, 14, 15, 16, 17, 18, 19, or 20, etc.) modified sugars independently with a modification that is not 2′-F.
[1713] 300. The oligonucleotide of any one of the preceding Embodiments, wherein about 5%-100% (e.g., about 10%-100%, 20-100%, 30%-100%, 40%-100%, 50%-80%, 50%-85%, 50%-90%, 50%-95%, 60%-80%, 60%-85%, 60%-90%, 60%-95%, 60%-100%, 65%-80%, 65%-85%, 65%-90%, 65%-95%, 65%-100%, 70%-80%, 70%-85%, 70%-90%, 70%-95%, 70%-100%, 75%-80%, 75%-85%, 75%-90%, 75%-95%, 75%-100%, 80%-85%, 80%-90%, 80%-95%, 80%-100%, 85%-90%, 85%-95%, 85%-100%, 90%-95%, 90%-100%, 10%, 20%, 30%, 40%, 50%, 60%, 65%, 70%, 75%, 80%, 85%, 90%, 95%, or 100%, etc.) of sugars in the second domain are independently modified sugars with a modification that is not 2′-F.
[1714] 301. The oligonucleotide of any one of the preceding Embodiments, wherein about 50%-100% (e.g., about 50%-80%, 50%-85%, 50%-90%, 50%-95%, 60%-80%, 60%-85%, 60%-90%, 60%-95%, 60%-100%, 65%-80%, 65%-85%, 65%-90%, 65%-95%, 65%-100%, 70%-80%, 70%-85%, 70%-90%, 70%-95%, 70%-100%, 75%-80%, 75%-85%, 75%-90%, 75%-95%, 75%-100%, 80%-85%, 80%-90%, 80%-95%, 80%-100%, 85%-90%, 85%-95%, 85%-100%, 90%-95%, 90%-100%, 50%, 60%, 65%, 70%, 75%, 80%, 85%, 90%, 95%, or 100%, etc.) of sugars in the second domain are independently modified sugars with a modification that is not 2′-F.
[1715] 302. The oligonucleotide of any one of Embodiments 139-301, wherein the modified sugars are independently selected from a bicyclic sugar (e.g., a LNA sugar), an acyclic sugar (e.g., a UNA sugar), a sugar with a 2′-OR modification, or a sugar with a 2′-N(R)₂ modification, wherein each R is independently optionally substituted C₁₋₆ aliphatic.
[1716] 303. The oligonucleotide of any one of the preceding Embodiments, wherein the second domain comprises one or more (e.g., about 1-20, 1, 2, 3, 4, 5, 6, 7, 8, 9, 10, 11, 12, 13, 14, 15, 16, 17, 18, 19, 20, etc.) modified sugars comprising a 2′-F modification.
[1717] 304. The oligonucleotide of any one of the preceding Embodiments, wherein the second domain comprises one or more (e.g., about 1-20, 1, 2, 3, 4, 5, 6, 7, 8, 9, 10, 11, 12, 13, 14, 15, 16, 17, 18, 19, 20, etc.) modified sugars comprising a 2′-OR modification, wherein R is optionally substituted C₁₋₆ aliphatic.
[1718] 305. The oligonucleotide of any one of the preceding Embodiments, wherein the second domain comprises one or more (e.g., about 1-20, 1, 2, 3, 4, 5, 6, 7, 8, 9, 10, 11, 12, 13, 14, 15, 16, 17, 18, 19, 20, etc.) modified sugars comprising a 2′-OMe modification.
[1719] 306. The oligonucleotide of any one of the preceding Embodiments, wherein the second domain comprises one or more (e.g., about 1-20, 1, 2, 3, 4, 5, 6, 7, 8, 9, 10, 11, 12, 13, 14, 15, 16, 17, 18, 19, 20, etc.) modified sugars comprising a 2′-N(R)₂ modification, wherein each R is optionally substituted C₁₋₆ aliphatic.
[1720] 307. The oligonucleotide of any one of the preceding Embodiments, wherein the second domain comprises one or more (e.g., about 1-20, 1, 2, 3, 4, 5, 6, 7, 8, 9, 10, 11, 12, 13, 14, 15, 16, 17, 18, 19, 20, etc.) modified sugars comprising a 2′-NH₂ modification.
[1721] 308. The oligonucleotide of any one of the preceding Embodiments, wherein the second domain comprises one or more (e.g., about 1-20, 1, 2, 3, 4, 5, 6, 7, 8, 9, 10, 11, 12, 13, 14, 15, 16, 17, 18, 19, 20, etc.) LNA sugars.
[1722] 309. The oligonucleotide of any one of the preceding Embodiments, wherein the second domain comprises one or more (e.g., about 1-20, 1, 2, 3, 4, 5, 6, 7, 8, 9, 10, 11, 12, 13, 14, 15, 16, 17, 18, 19, 20, etc.) acyclic sugars (e.g., UNA sugars).
[1723] 310. The oligonucleotide of any one of the preceding Embodiments, wherein the second domain comprises one or more (e.g., about 1-20, 1, 2, 3, 4, 5, 6, 7, 8, 9, 10, 11, 12, 13, 14, 15, 16, 17, 18, 19, 20, etc.) modified sugars comprising a 2′-F modification.
[1724] 311. The oligonucleotide of any one of the preceding Embodiments, wherein the second domain comprises one or more (e.g., about 1-20, 1, 2, 3, 4, 5, 6, 7, 8, 9, 10, 11, 12, 13, 14, 15, 16, 17, 18, 19, 20, etc.) sugars comprising 2′-OH.
[1725] 312. The oligonucleotide of any one of the preceding Embodiments, wherein the second domain comprises one or more (e.g., about 1-20, 1, 2, 3, 4, 5, 6, 7, 8, 9, 10, 11, 12, 13, 14, 15, 16, 17, 18, 19, 20, etc.) sugars comprising two 2′-H.
[1726] 313. The oligonucleotide of any one of the preceding Embodiments, wherein the second domain comprise about 1-50 (e.g., about 5, 6, 7, 8, 9, or 10-about 10, 11, 12, 13, 14, 15, 16, 17, 18, 19, 20, 21, 22, 23, 24, 25, 30, 40 or 50, or about 5, 6, 7, 8, 9, 10, 11, 12, 13, 14, 15, 16, 17, 18, 19, 20, 21, 22, 23, 24, 25, 30, 40 or 50, etc., about 1, 2, 3, 4, 5, 6, 7, 8, 9, 10, 11, 12, 13, 14, 15, 16, 17, 18, 19, or 20, etc.) modified internucleotidic linkages.
[1727] 314. The oligonucleotide of any one of the preceding Embodiments, wherein about 5%-100% (e.g., about 10%-100%, 20-100%, 30%-100%, 40%-100%, 50%-80%, 50%-85%, 50%-90%, 50%-95%, 60%-80%, 60%-85%, 60%-90%, 60%-95%, 60%-100%, 65%-80%, 65%-85%, 65%-90%, 65%-95%, 65%-100%, 70%-80%, 70%-85%, 70%-90%, 70%-95%, 70%-100%, 75%-80%, 75%-85%, 75%-90%, 75%-95%, 75%-100%, 80%-85%, 80%-90%, 80%-95%, 80%-100%, 85%-90%, 85%-95%, 85%-100%, 90%-95%, 90%-100%, 10%, 20%, 30%, 40%, 50%, 60%, 65%, 70%, 75%, 80%, 85%, 90%, 95%, or 100%, etc.) of internucleotidic linkages in the second domain are modified internucleotidic linkages.
[1728] 315. The oligonucleotide of any one of the preceding Embodiments, wherein about 50%-100% (e.g., about 50%-80%, 50%-85%, 50%-90%, 50%-95%, 60%-80%, 60%-85%, 60%-90%, 60%-95%, 60%-100%, 65%-80%, 65%-85%, 65%-90%, 65%-95%, 65%-100%, 70%-80%, 70%-85%, 70%-90%, 70%-95%, 70%-100%, 75%-80%, 75%-85%, 75%-90%, 75%-95%, 75%-100%, 80%-85%, 80%-90%, 80%-95%, 80%-100%, 85%-90%, 85%-95%, 85%-100%, 90%-95%, 90%-100%, 50%, 60%, 65%, 70%, 75%, 80%, 85%, 90%, 95%, or 100%, etc.) of internucleotidic linkages in the second domain are modified internucleotidic linkages.
[1729] 316. The oligonucleotide of any one of the preceding Embodiments, wherein each modified internucleotidic linkages is independently a chiral internucleotidic linkage.
[1730] 317. The oligonucleotide of any one of the preceding Embodiments, wherein each modified internucleotidic linkages is independently a phosphorothioate internucleotidic linkage or a non-negatively charged internucleotidic linkage.
[1731] 318. The oligonucleotide of any one of the preceding Embodiments, wherein each modified internucleotidic linkages is independently a phosphorothioate internucleotidic linkage or a neutral internucleotidic linkage.
[1732] 319. The oligonucleotide of any one of the preceding Embodiments, wherein the second domain comprises one or more phosphorothioate internucleotidic linkages.
[1733] 320. The oligonucleotide of any one of the preceding Embodiments, wherein the second domain comprises 1, 2, 3, 4, or 5 non-negatively charged internucleotidic linkages.
[1734] 321. The oligonucleotide of any one of the preceding Embodiments, wherein the internucleotidic linkage between the last and the second last nucleosides of the second domain is a non-negatively charged internucleotidic linkage.
[1735] 322. The oligonucleotide of any one of the preceding Embodiments, wherein the internucleotidic linkage between the first and the second nucleosides of the second domain is a non-negatively charged internucleotidic linkage.
[1736] 323. The oligonucleotide of any one of the preceding Embodiments, wherein at least about 1-50 (e.g., about 5, 6, 7, 8, 9, or 10-about 10, 11, 12, 13, 14, 15, 16, 17, 18, 19, 20, 21, 22, 23, 24, 25, 30, 40 or 50, or about 5, 6, 7, 8, 9, 10, 11, 12, 13, 14, 15, 16, 17, 18, 19, 20, 21, 22, 23, 24, 25, 30, 40 or 50, etc., about 1, 2, 3, 4, 5, 6, 7, 8, 9, 10, 11, 12, 13, 14, 15, 16, 17, 18, 19, or 20, etc.) chiral internucleotidic linkages in the second domain is chirally controlled.
[1737] 324. The oligonucleotide of any one of the preceding Embodiments, wherein at least 5%-100% (e.g., about 10%-100%, 20-100%, 30%-100%, 40%-100%, 50%-80%, 50%-85%, 50%-90%, 50%-95%, 60%-80%, 60%-85%, 60%-90%, 60%-95%, 60%-100%, 65%-80%, 65%-85%, 65%-90%, 65%-95%, 65%-100%, 70%-80%, 70%-85%, 70%-90%, 70%-95%, 70%-100%, 75%-80%, 75%-85%, 75%-90%, 75%-95%, 75%-100%, 80%-85%, 80%-90%, 80%-95%, 80%-100%, 85%-90%, 85%-95%, 85%-100%, 90%-95%, 90%-100%, 10%, 20%, 30%, 40%, 50%, 60%, 65%, 70%, 75%, 80%, 85%, 90%, 95%, or 100%, etc.) of chiral internucleotidic linkages in the second domain is chirally controlled.
[1738] 325. The oligonucleotide of any one of the preceding Embodiments, wherein the internucleotidic linkage between the last and the second last nucleosides of the second domain is chirally controlled.
[1739] 326. The oligonucleotide of any one of the preceding Embodiments, wherein the internucleotidic linkage between the first and the second nucleosides of the second domain is a chirally controlled.
[1740] 327. The oligonucleotide of any one of the preceding Embodiments, wherein each chiral internucleotidic linkage is independently a chirally controlled internucleotidic linkage.
[1741] 328. The oligonucleotide of any one of the preceding Embodiments, wherein at least about 1-50 (e.g., about 5, 6, 7, 8, 9, or 10-about 10, 11, 12, 13, 14, 15, 16, 17, 18, 19, 20, 21, 22, 23, 24, 25, 30, 40 or 50, or about 5, 6, 7, 8, 9, 10, 11, 12, 13, 14, 15, 16, 17, 18, 19, 20, 21, 22, 23, 24, 25, 30, 40 or 50, etc., about 1, 2, 3, 4, 5, 6, 7, 8, 9, 10, 11, 12, 13, 14, 15, 16, 17, 18, 19, or 20, etc.) chiral internucleotidic linkages in the second domain is Sp.
[1742] 329. The oligonucleotide of any one of the preceding Embodiments, wherein at least 5%-100% (e.g., about 10%-100%, 20-100%, 30%-100%, 40%-100%, 50%-80%, 50%-85%, 50%-90%, 50%-95%, 60%-80%, 60%-85%, 60%-90%, 60%-95%, 60%-100%, 65%-80%, 65%-85%, 65%-90%, 65%-95%, 65%-100%, 70%-80%, 70%-85%, 70%-90%, 70%-95%, 70%-100%, 75%-80%, 75%-85%, 75%-90%, 75%-95%, 75%-100%, 80%-85%, 80%-90%, 80%-95%, 80%-100%, 85%-90%, 85%-95%, 85%-100%, 90%-95%, 90%-100%, 10%, 20%, 30%, 40%, 50%, 60%, 65%, 70%, 75%, 80%, 85%, 90%, 95%, or 100%, etc.) of chiral internucleotidic linkages in the second domain is Sp, or wherein each chiral internucleotidic linkages in the second domain is Sp.
[1743] 330. The oligonucleotide of any one of the preceding Embodiments, wherein the internucleotidic linkage between the first and the second nucleosides of the second domain is Rp.
[1744] 331. The oligonucleotide of any one of the preceding Embodiments, wherein the internucleotidic linkage between the last and the second last nucleosides of the second domain is Rp.
[1745] 332. The oligonucleotide of any one of the preceding Embodiments, wherein each internucleotidic linkage in the second domain is independently a modified internucleotidic linkage.
[1746] 333. The oligonucleotide of any one of Embodiments 1-331, wherein the second domain comprises one or more natural phosphate linkages.
[1747] 334. The oligonucleotide of any one of the preceding Embodiments, wherein the second domain can recruit, or promotes or contributes to recruitment of, an ADAR protein to a target nucleic acid.
[1748] 335. The oligonucleotide of any one of the preceding Embodiments, wherein the second domain can interact, or promotes or contributes to interaction of, an ADAR protein with a target nucleic acid.
[1749] 336. The oligonucleotide of any one of the preceding Embodiments, wherein the second domain contacts with a domain that have an enzymatic activity.
[1750] 337. The oligonucleotide of any one of the preceding Embodiments, wherein the second domain contact with a domain that has a deaminase activity of ADAR1.
[1751] 338. The oligonucleotide of any one of the preceding Embodiments, wherein the second domain contact with a domain that has a deaminase activity of ADAR2.
[1752] 339. The oligonucleotide of any one of the preceding Embodiments, wherein the second domain comprises or consists of from the 5′ to 3′ a first subdomain, a second subdomain, and a third subdomain.
[1753] 340. The oligonucleotide of any one of the preceding Embodiments, wherein the second domain consists of from the 5′ to 3′ a first subdomain, a second subdomain, and a third subdomain.
[1754] 341. The oligonucleotide of any one of the preceding Embodiments, wherein the first subdomain has a length of about 1-50 (e.g., about 5, 6, 7, 8, 9, or 10-about 10, 11, 12, 13, 14, 15, 16, 17, 18, 19, 20, 21, 22, 23, 24, 25, 30, 40 or 50, or about 5, 6, 7, 8, 9, 10, 11, 12, 13, 14, 15, 16, 17, 18, 19, 20, 21, 22, 23, 24, 25, 30, 40 or 50, etc.) nucleobases.
[1755] 342. The oligonucleotide of any one of the preceding Embodiments, wherein the first subdomain has a length of about 10-20 (e.g., about 10, 11, 12, 13, 14, 15, 16, 17, 18, 19, or 20) nucleobases.
[1756] 343. The oligonucleotide of any one of the preceding Embodiments, wherein the first subdomain comprises one or more (e.g., 1-10, 1, 2, 3, 4, 5, 6, 7, 8, 9, or 10, etc.) mismatches when the oligonucleotide is aligned with a target nucleic acid for complementarity.
[1757] 344. The oligonucleotide of any one of the preceding Embodiments, wherein the first subdomain comprises two or more mismatches when the oligonucleotide is aligned with a target nucleic acid for complementarity.
[1758] 345. The oligonucleotide of any one of Embodiments 1-343, wherein the first subdomain comprises one and no more than one mismatch when the oligonucleotide is aligned with a target nucleic acid for complementarity.
[1759] 346. The oligonucleotide of any one of Embodiments 1-343, wherein the first subdomain comprises two and no more than two mismatches when the oligonucleotide is aligned with a target nucleic acid for complementarity.
[1760] 347. The oligonucleotide of any one of the preceding Embodiments, wherein the first subdomain comprises one or more (e.g., 1-10, 1, 2, 3, 4, 5, 6, 7, 8, 9, or 10, etc.) bulges when the oligonucleotide is aligned with a target nucleic acid for complementarity.
[1761] 348. The oligonucleotide of Embodiment 347, wherein each bulge independently comprises one or more base pairs that are not Watson-Crick or wobble pairs.
[1762] 349. The oligonucleotide of any one of the preceding Embodiments, wherein the first subdomain comprises one or more (e.g., 1-10, 1, 2, 3, 4, 5, 6, 7, 8, 9, or 10, etc.) wobble pairs when the oligonucleotide is aligned with a target nucleic acid for complementarity.
[1763] 350. The oligonucleotide of any one of the preceding Embodiments, wherein the first subdomain comprises two or more wobble pairs when the oligonucleotide is aligned with a target nucleic acid for complementarity.
[1764] 351. The oligonucleotide of any one of the preceding Embodiments, wherein the first subdomain comprises two and no more than two wobble pairs when the oligonucleotide is aligned with a target nucleic acid for complementarity.
[1765] 352. The oligonucleotide of any one of Embodiments 1-341, wherein the first subdomain is fully complementary to a target nucleic acid.
[1766] 353. The oligonucleotide of any one of the preceding Embodiments, wherein the first subdomain comprises about 1-50 (e.g., about 5, 6, 7, 8, 9, or 10-about 10, 11, 12, 13, 14, 15, 16, 17, 18, 19, 20, 21, 22, 23, 24, 25, 30, 40 or 50, or about 5, 6, 7, 8, 9, 10, 11, 12, 13, 14, 15, 16, 17, 18, 19, 20, 21, 22, 23, 24, 25, 30, 40 or 50, etc., about 1, 2, 3, 4, 5, 6, 7, 8, 9, 10, 11, 12, 13, 14, 15, 16, 17, 18, 19, or 20, etc.) modified sugars independently with a modification that is not 2′-F.
[1767] 354. The oligonucleotide of any one of the preceding Embodiments, wherein about 5%-100% (e.g., about 10%-100%, 20-100%, 30%-100%, 40%-100%, 50%-80%, 50%-85%, 50%-90%, 50%-95%, 60%-80%, 60%-85%, 60%-90%, 60%-95%, 60%-100%, 65%-80%, 65%-85%, 65%-90%, 65%-95%, 65%-100%, 70%-80%, 70%-85%, 70%-90%, 70%-95%, 70%-100%, 75%-80%, 75%-85%, 75%-90%, 75%-95%, 75%-100%, 80%-85%, 80%-90%, 80%-95%, 80%-100%, 85%-90%, 85%-95%, 85%-100%, 90%-95%, 90%-100%, 10%, 20%, 30%, 40%, 50%, 60%, 65%, 70%, 75%, 80%, 85%, 90%, 95%, or 100%, etc.) of sugars in the first subdomain are independently modified sugars with a modification that is not 2′-F.
[1768] 355. The oligonucleotide of any one of the preceding Embodiments, wherein about 50%-100% (e.g., about 50%-80%, 50%-85%, 50%-90%, 50%-95%, 60%-80%, 60%-85%, 60%-90%, 60%-95%, 60%-100%, 65%-80%, 65%-85%, 65%-90%, 65%-95%, 65%-100%, 70%-80%, 70%-85%, 70%-90%, 70%-95%, 70%-100%, 75%-80%, 75%-85%, 75%-90%, 75%-95%, 75%-100%, 80%-85%, 80%-90%, 80%-95%, 80%-100%, 85%-90%, 85%-95%, 85%-100%, 90%-95%, 90%-100%, 50%, 60%, 65%, 70%, 75%, 80%, 85%, 90%, 95%, or 100%, etc.) of sugars in the first subdomain are independently modified sugars with a modification that is not 2′-F.
[1769] 356. The oligonucleotide of any one of Embodiments 353-355, wherein the first subdomain comprises about 1-50 (e.g., about 5, 6, 7, 8, 9, or 10-about 10, 11, 12, 13, 14, 15, 16, 17, 18, 19, 20, 21, 22, 23, 24, 25, 30, 40 or 50, or about 5, 6, 7, 8, 9, 10, 11, 12, 13, 14, 15, 16, 17, 18, 19, 20, 21, 22, 23, 24, 25, 30, 40 or 50, etc., about 1, 2, 3, 4, 5, 6, 7, 8, 9, 10, 11, 12, 13, 14, 15, 16, 17, 18, 19, or 20, etc.) modified sugars independently selected from a bicyclic sugar (e.g., a LNA sugar), an acyclic sugar (e.g., a UNA sugar), a sugar with a 2′-OR modification, or a sugar with a 2′-N(R)₂ modification, wherein each R is independently optionally substituted C₁₋₆ aliphatic.
[1770] 357. The oligonucleotide of any one of Embodiments 353-355, wherein about 5%-100% (e.g., about 10%-100%, 20-100%, 30%-100%, 40%-100%, 50%-80%, 50%-85%, 50%-90%, 50%-95%, 60%-80%, 60%-85%, 60%-90%, 60%-95%, 60%-100%, 65%-80%, 65%-85%, 65%-90%, 65%-95%, 65%-100%, 70%-80%, 70%-85%, 70%-90%, 70%-95%, 70%-100%, 75%-80%, 75%-85%, 75%-90%, 75%-95%, 75%-100%, 80%-85%, 80%-90%, 80%-95%, 80%-100%, 85%-90%, 85%-95%, 85%-100%, 90%-95%, 90%-100%, 10%, 20%, 30%, 40%, 50%, 60%, 65%, 70%, 75%, 80%, 85%, 90%, 95%, or 100%, etc.) of sugars in the first subdomain are independently modified sugars selected from a bicyclic sugar (e.g., a LNA sugar), an acyclic sugar (e.g., a UNA sugar), a sugar with a 2′-OR modification, or a sugar with a 2′-N(R)₂ modification, wherein each R is independently optionally substituted C₁₋₆ aliphatic.
[1771] 358. The oligonucleotide of any one of Embodiments 353-355, wherein about 50%-100% (e.g., about 50%-80%, 50%-85%, 50%-90%, 50%-95%, 60%-80%, 60%-85%, 60%-90%, 60%-95%, 60%-100%, 65%-80%, 65%-85%, 65%-90%, 65%-95%, 65%-100%, 70%-80%, 70%-85%, 70%-90%, 70%-95%, 70%-100%, 75%-80%, 75%-85%, 75%-90%, 75%-95%, 75%-100%, 80%-85%, 80%-90%, 80%-95%, 80%-100%, 85%-90%, 85%-95%, 85%-100%, 90%-95%, 90%-100%, 50%, 60%, 65%, 70%, 75%, 80%, 85%, 90%, 95%, or 100%, etc.) of sugars in the first subdomain are independently modified sugars selected from a bicyclic sugar (e.g., a LNA sugar), an acyclic sugar (e.g., a UNA sugar), a sugar with a 2′-OR modification, or a sugar with a 2′-N(R)₂ modification, wherein each R is independently optionally substituted C₁₋₆ aliphatic.
[1772] 359. The oligonucleotide of any one of the preceding Embodiments, wherein the first subdomain comprises one or more (e.g., about 1-20, 1, 2, 3, 4, 5, 6, 7, 8, 9, 10, 11, 12, 13, 14, 15, 16, 17, 18, 19, 20, etc.) modified sugars comprising a 2′-N(R)₂ modification, wherein each R is optionally substituted C₁₋₆ aliphatic.
[1773] 360. The oligonucleotide of any one of the preceding Embodiments, wherein the first subdomain comprises one or more (e.g., about 1-20, 1, 2, 3, 4, 5, 6, 7, 8, 9, 10, 11, 12, 13, 14, 15, 16, 17, 18, 19, 20, etc.) modified sugars comprising a 2′-NH₂ modification.
[1774] 361. The oligonucleotide of any one of the preceding Embodiments, wherein the first subdomain comprises one or more (e.g., about 1-20, 1, 2, 3, 4, 5, 6, 7, 8, 9, 10, 11, 12, 13, 14, 15, 16, 17, 18, 19, 20, etc.) LNA sugars.
[1775] 362. The oligonucleotide of any one of the preceding Embodiments, wherein the first subdomain comprises one or more (e.g., about 1-20, 1, 2, 3, 4, 5, 6, 7, 8, 9, 10, 11, 12, 13, 14, 15, 16, 17, 18, 19, 20, etc.) acyclic sugars (e.g., UNA sugars).
[1776] 363. The oligonucleotide of any one of the preceding Embodiments, wherein the first subdomain comprises one or more (e.g., about 1-20, 1, 2, 3, 4, 5, 6, 7, 8, 9, 10, 11, 12, 13, 14, 15, 16, 17, 18, 19, 20, etc.) modified sugars comprising a 2′-F modification.
[1777] 364. The oligonucleotide of any one of the preceding Embodiments, wherein the first subdomain comprises one or more (e.g., about 1-20, 1, 2, 3, 4, 5, 6, 7, 8, 9, 10, 11, 12, 13, 14, 15, 16, 17, 18, 19, 20, etc.) sugars comprising 2′-OH.
[1778] 365. The oligonucleotide of any one of the preceding Embodiments, wherein the first subdomain comprises one or more (e.g., about 1-20, 1, 2, 3, 4, 5, 6, 7, 8, 9, 10, 11, 12, 13, 14, 15, 16, 17, 18, 19, 20, etc.) sugars comprising two 2′-H.
[1779] 366. The oligonucleotide of any one of the preceding Embodiments, wherein the first subdomain comprises one or more (e.g., about 1-20, 1, 2, 3, 4, 5, 6, 7, 8, 9, 10, 11, 12, 13, 14, 15, 16, 17, 18, 19, 20, etc.) modified sugars comprising a 2′-OR modification, wherein R is optionally substituted C₁₋₆ aliphatic.
[1780] 367. The oligonucleotide of any one of the preceding Embodiments, wherein the first subdomain comprises one or more (e.g., about 1-20, 1, 2, 3, 4, 5, 6, 7, 8, 9, 10, 11, 12, 13, 14, 15, 16, 17, 18, 19, 20, etc.) modified sugars comprising a 2′-OMe modification.
[1781] 368. The oligonucleotide of any one of Embodiments 339-358, wherein each sugar in the first subdomain independently comprises a 2′-OR modification, wherein R is optionally substituted C₁₋₆ aliphatic, or a 2′-O-L^{B}-4′ modification.
[1782] 369. The oligonucleotide of Embodiment 368, wherein each sugar in the first subdomain independently comprises a 2′-OR modification, wherein R is optionally substituted C₁₋₆ aliphatic, or a 2′-O-L^{B}-4′ modification, wherein L^{B} is optionally substituted —CH₂—.
[1783] 370. The oligonucleotide of Embodiment 368, wherein each sugar in the first subdomain independently comprises 2′-OMe.
[1784] 371. The oligonucleotide of any one of the preceding Embodiments, wherein the first subdomain comprises a 5′-end portion having a length of about 3-8 nucleobases.
[1785] 372. The oligonucleotide of Embodiment 371, wherein the 5′-end portion has a length of about 3-6 nucleobases.
[1786] 373. The oligonucleotide of Embodiment 371 or 372, wherein the 5′-end portion comprises the 5′-end nucleobase of the first subdomain.
[1787] 374. The oligonucleotide of any one of Embodiments 371-373, wherein one or more of the sugars in the 5′-end portion are independently modified sugars.
[1788] 375. The oligonucleotide of Embodiment 374, wherein the modified sugars are independently selected from a bicyclic sugar (e.g., a LNA sugar), an acyclic sugar (e.g., a UNA sugar), a sugar with a 2′-OR modification, or a sugar with a 2′-N(R)₂ modification, wherein each R is independently optionally substituted C₁₋₆ aliphatic.
[1789] 376. The oligonucleotide of Embodiment 374, wherein one or more of the modified sugars independently comprises 2′-F or 2′-OR, wherein R is independently optionally substituted C₁₋₆ aliphatic.
[1790] 377. The oligonucleotide of Embodiment 374, wherein one or more of the modified sugars are independently 2′-F or 2′-OMe.
[1791] 378. The oligonucleotide of any one of Embodiments 371-377, wherein the 5′-end portion comprises one or more mismatches.
[1792] 379. The oligonucleotide of any one of Embodiments 371-378, wherein the 5′-end portion comprises one or more wobbles.
[1793] 380. The oligonucleotide of any one of Embodiments 371-379, wherein the 5′-end portion is about 60-100% (e.g., 66%, 70%, 75%, 80%, 85%, 90%, 95%, or more) complementary to a target nucleic acid.
[1794] 381. The oligonucleotide of any one of the preceding Embodiments, wherein the first subdomain comprises a 3′-end portion having a length of about 3-8 nucleobases.
[1795] 382. The oligonucleotide of Embodiment 381, wherein the 3′-end portion has a length of about 1-3 nucleobases.
[1796] 383. The oligonucleotide of Embodiment 381 or 382, wherein the 3′-end portion comprises the 3′-end nucleobase of the first subdomain.
[1797] 384. The oligonucleotide of any one of Embodiments 381-383, wherein one or more of the sugars in the 3′-end portion are independently modified sugars.
[1798] 385. The oligonucleotide of Embodiment 384, wherein the modified sugars are independently selected from a bicyclic sugar (e.g., a LNA sugar), an acyclic sugar (e.g., a UNA sugar), a sugar with a 2′-OR modification, or a sugar with a 2′-N(R)₂ modification, wherein each R is independently optionally substituted C₁₋₆ aliphatic.
[1799] 386. The oligonucleotide of Embodiment 384, wherein one or more of the modified sugars independently comprise 2′-F.
[1800] 387. The oligonucleotide of any one of Embodiments 384-386, wherein no modified sugars comprise 2′-OMe.
[1801] 388. The oligonucleotide of any one of Embodiments 381-387, wherein each sugar of the 3′-end portion independently comprises two 2′-H or a 2′-F modification.
[1802] 389. The oligonucleotide of any one of Embodiments 371-377, wherein the 3′-end portion comprises one or more mismatches.
[1803] 390. The oligonucleotide of any one of Embodiments 371-378, wherein the 3′-end portion comprises one or more wobbles.
[1804] 391. The oligonucleotide of any one of Embodiments 371-379, wherein the 3′-end portion is about 60-100% (e.g., 66%, 70%, 75%, 80%, 85%, 90%, 95%, or more) complementary to a target nucleic acid.
[1805] 392. The oligonucleotide of any one of the preceding Embodiments, wherein the first subdomain comprise about 1-50 (e.g., about 5, 6, 7, 8, 9, or 10-about 10, 11, 12, 13, 14, 15, 16, 17, 18, 19, 20, 21, 22, 23, 24, 25, 30, 40 or 50, or about 5, 6, 7, 8, 9, 10, 11, 12, 13, 14, 15, 16, 17, 18, 19, 20, 21, 22, 23, 24, 25, 30, 40 or 50, etc., about 1, 2, 3, 4, 5, 6, 7, 8, 9, 10, 11, 12, 13, 14, 15, 16, 17, 18, 19, or 20, etc.) modified internucleotidic linkages.
[1806] 393. The oligonucleotide of any one of the preceding Embodiments, wherein about 5%-100% (e.g., about 10%-100%, 20-100%, 30%-100%, 40%-100%, 50%-80%, 50%-85%, 50%-90%, 50%-95%, 60%-80%, 60%-85%, 60%-90%, 60%-95%, 60%-100%, 65%-80%, 65%-85%, 65%-90%, 65%-95%, 65%-100%, 70%-80%, 70%-85%, 70%-90%, 70%-95%, 70%-100%, 75%-80%, 75%-85%, 75%-90%, 75%-95%, 75%-100%, 80%-85%, 80%-90%, 80%-95%, 80%-100%, 85%-90%, 85%-95%, 85%-100%, 90%-95%, 90%-100%, 10%, 20%, 30%, 40%, 50%, 60%, 65%, 70%, 75%, 80%, 85%, 90%, 95%, or 100%, etc.) of internucleotidic linkages in the first subdomain are modified internucleotidic linkages.
[1807] 394. The oligonucleotide of any one of the preceding Embodiments, wherein about 50%-100% (e.g., about 50%-80%, 50%-85%, 50%-90%, 50%-95%, 60%-80%, 60%-85%, 60%-90%, 60%-95%, 60%-100%, 65%-80%, 65%-85%, 65%-90%, 65%-95%, 65%-100%, 70%-80%, 70%-85%, 70%-90%, 70%-95%, 70%-100%, 75%-80%, 75%-85%, 75%-90%, 75%-95%, 75%-100%, 80%-85%, 80%-90%, 80%-95%, 80%-100%, 85%-90%, 85%-95%, 85%-100%, 90%-95%, 90%-100%, 50%, 60%, 65%, 70%, 75%, 80%, 85%, 90%, 95%, or 100%, etc.) of internucleotidic linkages in the first subdomain are modified internucleotidic linkages.
[1808] 395. The oligonucleotide of any one of the preceding Embodiments, wherein each modified internucleotidic linkages is independently a chiral internucleotidic linkage.
[1809] 396. The oligonucleotide of any one of the preceding Embodiments, wherein the internucleotidic linkage between the first and the second nucleosides of the first subdomain is a non-negatively charged internucleotidic linkage.
[1810] 397. The oligonucleotide of any one of the preceding Embodiments, wherein each modified internucleotidic linkages is independently a phosphorothioate internucleotidic linkage or a non-negatively charged internucleotidic linkage.
[1811] 398. The oligonucleotide of any one of the preceding Embodiments, wherein each modified internucleotidic linkages is independently a phosphorothioate internucleotidic linkage or a neutral internucleotidic linkage.
[1812] 399. The oligonucleotide of any one of the preceding Embodiments, wherein at least about 1-50 (e.g., about 5, 6, 7, 8, 9, or 10-about 10, 11, 12, 13, 14, 15, 16, 17, 18, 19, 20, 21, 22, 23, 24, 25, 30, 40 or 50, or about 5, 6, 7, 8, 9, 10, 11, 12, 13, 14, 15, 16, 17, 18, 19, 20, 21, 22, 23, 24, 25, 30, 40 or 50, etc., about 1, 2, 3, 4, 5, 6, 7, 8, 9, 10, 11, 12, 13, 14, 15, 16, 17, 18, 19, or 20, etc.) chiral internucleotidic linkages in the first subdomain is chirally controlled.
[1813] 400. The oligonucleotide of any one of the preceding Embodiments, wherein at least 5%-100% (e.g., about 10%-100%, 20-100%, 30%-100%, 40%-100%, 50%-80%, 50%-85%, 50%-90%, 50%-95%, 60%-80%, 60%-85%, 60%-90%, 60%-95%, 60%-100%, 65%-80%, 65%-85%, 65%-90%, 65%-95%, 65%-100%, 70%-80%, 70%-85%, 70%-90%, 70%-95%, 70%-100%, 75%-80%, 75%-85%, 75%-90%, 75%-95%, 75%-100%, 80%-85%, 80%-90%, 80%-95%, 80%-100%, 85%-90%, 85%-95%, 85%-100%, 90%-95%, 90%-100%, 10%, 20%, 30%, 40%, 50%, 60%, 65%, 70%, 75%, 80%, 85%, 90%, 95%, or 100%, etc.) of chiral internucleotidic linkages in the first subdomain is chirally controlled.
[1814] 401. The oligonucleotide of any one of the preceding Embodiments, wherein the internucleotidic linkage between the first and the second nucleosides of the first subdomain is chirally controlled.
[1815] 402. The oligonucleotide of any one of the preceding Embodiments, wherein each chiral internucleotidic linkage is independently a chirally controlled internucleotidic linkage.
[1816] 403. The oligonucleotide of any one of the preceding Embodiments, wherein at least about 1-50 (e.g., about 5, 6, 7, 8, 9, or 10-about 10, 11, 12, 13, 14, 15, 16, 17, 18, 19, 20, 21, 22, 23, 24, 25, 30, 40 or 50, or about 5, 6, 7, 8, 9, 10, 11, 12, 13, 14, 15, 16, 17, 18, 19, 20, 21, 22, 23, 24, 25, 30, 40 or 50, etc., about 1, 2, 3, 4, 5, 6, 7, 8, 9, 10, 11, 12, 13, 14, 15, 16, 17, 18, 19, or 20, etc.) chiral internucleotidic linkages in the first subdomain is Sp.
[1817] 404. The oligonucleotide of any one of the preceding Embodiments, wherein at least 5%-100% (e.g., about 10%-100%, 20-100%, 30%-100%, 40%-100%, 50%-80%, 50%-85%, 50%-90%, 50%-95%, 60%-80%, 60%-85%, 60%-90%, 60%-95%, 60%-100%, 65%-80%, 65%-85%, 65%-90%, 65%-95%, 65%-100%, 70%-80%, 70%-85%, 70%-90%, 70%-95%, 70%-100%, 75%-80%, 75%-85%, 75%-90%, 75%-95%, 75%-100%, 80%-85%, 80%-90%, 80%-95%, 80%-100%, 85%-90%, 85%-95%, 85%-100%, 90%-95%, 90%-100%, 10%, 20%, 30%, 40%, 50%, 60%, 65%, 70%, 75%, 80%, 85%, 90%, 95%, or 100%, etc.) of chiral internucleotidic linkages in the first subdomain is Sp.
[1818] 405. The oligonucleotide of any one of the preceding Embodiments, wherein each chiral internucleotidic linkages in the first subdomain is Sp.
[1819] 406. The oligonucleotide of any one of Embodiments 1-405, wherein the internucleotidic linkage between the first and the second nucleosides of the first subdomain is Rp.
[1820] 407. The oligonucleotide of any one of the preceding Embodiments, wherein each internucleotidic linkage in the first subdomain is independently a modified internucleotidic linkage.
[1821] 408. The oligonucleotide of any one of Embodiments 1-406, wherein the first subdomain comprises one or more natural phosphate linkages.
[1822] 409. The oligonucleotide of any one of the preceding Embodiments, wherein the first subdomain can recruit, or promotes or contributes to recruitment of, an ADAR protein to a target nucleic acid.
[1823] 410. The oligonucleotide of any one of the preceding Embodiments, wherein the first subdomain can interact, or promotes or contributes to interaction of, an ADAR protein with a target nucleic acid.
[1824] 411. The oligonucleotide of any one of the preceding Embodiments, wherein the first subdomain contacts with a domain that have an enzymatic activity.
[1825] 412. The oligonucleotide of any one of the preceding Embodiments, wherein the first subdomain contact with a domain that has a deaminase activity of ADAR1.
[1826] 413. The oligonucleotide of any one of the preceding Embodiments, wherein the first subdomain contact with a domain that has a deaminase activity of ADAR2.
[1827] 414. The oligonucleotide of any one of the preceding Embodiments, wherein the second subdomain has a length of about 1-10 (e.g., about 1, 2, 3, 4, 5, 6, 7, 8, 9, or 10) nucleobases.
[1828] 415. The oligonucleotide of any one of the preceding Embodiments, wherein the second subdomain has a length of about 1-5 (e.g., about 1, 2, 3, 4, or 5) nucleobases.
[1829] 416. The oligonucleotide of any one of the preceding Embodiments, wherein the second subdomain has a length of about 1, 2, or 3 nucleobases.
[1830] 417. The oligonucleotide of any one of the preceding Embodiments, wherein the second subdomain has a length of 3 nucleobases.
[1831] 418. The oligonucleotide of any one of the preceding Embodiments, wherein the second subdomain comprises a nucleoside opposite to a target adenosine.
[1832] 419. The oligonucleotide of any one of the preceding Embodiments, wherein the second domain comprises one and no more than one nucleoside opposite to a target adenosine.
[1833] 420. The oligonucleotide of any one of the preceding Embodiments, wherein the second subdomain comprises one or more (e.g., 1-10, 1, 2, 3, 4, 5, 6, 7, 8, 9, or 10, etc.) mismatches when the oligonucleotide is aligned with a target nucleic acid for complementarity.
[1834] 421. The oligonucleotide of any one of the preceding Embodiments, wherein the second subdomain comprises two or more mismatches when the oligonucleotide is aligned with a target nucleic acid for complementarity.
[1835] 422. The oligonucleotide of any one of Embodiments 1-420, wherein the second subdomain comprises one and no more than one mismatch when the oligonucleotide is aligned with a target nucleic acid for complementarity.
[1836] 423. The oligonucleotide of any one of Embodiments 1-420, wherein the second subdomain comprises two and no more than two mismatches when the oligonucleotide is aligned with a target nucleic acid for complementarity.
[1837] 424. The oligonucleotide of any one of the preceding Embodiments, wherein the second subdomain comprises one or more (e.g., 1-10, 1, 2, 3, 4, 5, 6, 7, 8, 9, or 10, etc.) bulges when the oligonucleotide is aligned with a target nucleic acid for complementarity.
[1838] 425. The oligonucleotide of Embodiment 424, wherein each bulge independently comprises one or more base pairs that are not Watson-Crick or wobble pairs.
[1839] 426. The oligonucleotide of any one of the preceding Embodiments, wherein the second subdomain comprises one or more (e.g., 1-10, 1, 2, 3, 4, 5, 6, 7, 8, 9, or 10, etc.) wobble pairs when the oligonucleotide is aligned with a target nucleic acid for complementarity.
[1840] 427. The oligonucleotide of any one of the preceding Embodiments, wherein the second subdomain comprises two or more wobble pairs when the oligonucleotide is aligned with a target nucleic acid for complementarity.
[1841] 428. The oligonucleotide of any one of the preceding Embodiments, wherein the second subdomain comprises two and no more than two wobble pairs when the oligonucleotide is aligned with a target nucleic acid for complementarity.
[1842] 429. The oligonucleotide of any one of Embodiments 1-419, wherein the second subdomain is fully complementary to a target nucleic acid.
[1843] 430. The oligonucleotide of any one of the preceding Embodiments, wherein the second subdomain comprises one or more sugars comprising two 2′-H (e.g., natural DNA sugars).
[1844] 431. The oligonucleotide of any one of the preceding Embodiments, wherein the second subdomain comprises one or more sugars comprising 2′-OH (e.g., natural RNA sugars).
[1845] 432. The oligonucleotide of any one of the preceding Embodiments, wherein the second subdomain comprises about 1-10 (e.g., 1, 2, 3, 4, 5, 6, 7, 8, 9, or 10) modified sugars.
[1846] 433. The oligonucleotide of Embodiment 432, wherein each modified sugar is independently selected from a bicyclic sugar (e.g., a LNA sugar), an acyclic sugar (e.g., a UNA sugar), a sugar with a 2′-OR modification, or a sugar with a 2′-N(R)₂ modification, wherein each R is independently optionally substituted C₁₋₆ aliphatic.
[1847] 434. The oligonucleotide of any one of the preceding Embodiments, wherein the second subdomain comprises no modified sugars comprising a 2′-OMe modification.
[1848] 435. The oligonucleotide of any one of the preceding Embodiments, wherein the second subdomain comprises no modified sugars comprising a 2′-OR modification, wherein R is optionally substituted C₁₋₆ aliphatic.
[1849] 436. The oligonucleotide of Embodiment 432, wherein each 2′-modified sugar is sugar comprising a 2′-F modification.
[1850] 437. The oligonucleotide of any one of Embodiments 1-435, wherein the sugar of the opposite nucleoside is an acyclic sugar (e.g., a UNA sugar).
[1851] 438. The oligonucleotide of any one of Embodiments 1-435, wherein the sugar of the opposite nucleoside comprises two 2′-H.
[1852] 439. The oligonucleotide of any one of Embodiments 1-435, wherein the sugar of the opposite nucleoside comprises a 2′-OH.
[1853] 440. The oligonucleotide of any one of Embodiments 1-435, wherein the sugar of the opposite nucleoside is a natural DNA sugar.
[1854] 441. The oligonucleotide of any one of Embodiments 1-435, wherein the sugar of the opposite nucleoside comprises is modified.
[1855] 442. The oligonucleotide of any one of Embodiments 1-435, wherein the sugar of the opposite nucleoside comprises 2′-F.
[1856] 443. The oligonucleotide of any one of the preceding Embodiments, wherein the sugar of a nucleoside 5′-next to the opposite nucleoside (sugar of N₁ in 5′- . . . N₁N₀ . . . 3′, wherein when aligned with a target, N₀ is opposite to a target adenosine) comprises two 2′-H.
[1857] 444. The oligonucleotide of any one of the preceding Embodiments, wherein the sugar of a nucleoside 5′-next to the opposite nucleoside (sugar of N₁ in 5′- . . . N₁N₀ . . . 3′, wherein when aligned with a target, N₀ is opposite to a target adenosine) comprises 2′-OH.
[1858] 445. The oligonucleotide of any one of the preceding Embodiments, wherein the sugar of a nucleoside 5′-next to the opposite nucleoside (sugar of N₁ in 5′- . . . N₁N₀ . . . 3′, wherein when aligned with a target, N₀ is opposite to a target adenosine) is a natural DNA sugar.
[1859] 446. The oligonucleotide of any one of the preceding Embodiments, wherein the sugar of a nucleoside 5′-next to the opposite nucleoside (sugar of N₁ in 5′- . . . N₁N₀ . . . 3′, wherein when aligned with a target, N₀ is opposite to a target adenosine) comprises 2′-F.
[1860] 447. The oligonucleotide of any one of the preceding Embodiments, wherein the sugar of a nucleoside 3′-next to the opposite nucleoside (sugar of N₋₁ in 5′- . . . N₀N₋₁ . . . 3′, wherein when aligned with a target, N₀ is opposite to a target adenosine) comprises two 2′-H.
[1861] 448. The oligonucleotide of any one of the preceding Embodiments, wherein the sugar of a nucleoside 3′-next to the opposite nucleoside (sugar of N₋₁ in 5′- . . . N₀N₋₁ . . . 3′, wherein when aligned with a target, N₀ is opposite to a target adenosine) comprises 2′-OH.
[1862] 449. The oligonucleotide of any one of the preceding Embodiments, wherein the sugar of a nucleoside 3′-next to the opposite nucleoside (sugar of N₋₁ in 5′- . . . N₀N₋₁ . . . 3′, wherein when aligned with a target, N₀ is opposite to a target adenosine) is a natural DNA sugar.
[1863] 450. The oligonucleotide of any one of the preceding Embodiments, wherein the sugar of a nucleoside 3′-next to the opposite nucleoside (sugar of N₋₁ in 5′- . . . N₀N₋₁ . . . 3′, wherein when aligned with a target, N₀ is opposite to a target adenosine) comprises 2′-F.
[1864] 451. The oligonucleotide of any one of Embodiments 1-435, wherein each of the sugar of the opposite nucleoside, the sugar of a nucleoside 5′-next to the opposite nucleoside (sugar of N₁ in 5′- . . . N₁N₀ . . . 3′, wherein when aligned with a target, N₀ is opposite to a target adenosine), and the sugar of a nucleoside 3′-next to the opposite nucleoside (sugar of N₋₁ in 5′- . . . N₀N₋₁ . . . 3′, wherein when aligned with a target, N₀ is opposite to a target adenosine) is independently a natural DNA sugar.
[1865] 452. The oligonucleotide of any one of Embodiments 1-435, wherein the sugar of the opposite nucleoside is a natural DNA sugar, the sugar of a nucleoside 5′-next to the opposite nucleoside (sugar of N₁ in 5′- . . . N₁N₀ . . . 3′, wherein when aligned with a target, N₀ is opposite to a target adenosine) is a 2′-F modified sugar, and the sugar of a nucleoside 3′-next to the opposite nucleoside (sugar of N₋₁ in 5′- . . . N₀N₋₁ . . . 3′, wherein when aligned with a target, N₀ is opposite to a target adenosine) is a natural DNA sugar.
[1866] 453. The oligonucleotide of any one of the preceding Embodiments, wherein the second subdomain comprise a 5′-end portion connected to 5′-side the opposite nucleoside.
[1867] 454. The oligonucleotide of Embodiment 450, wherein the 5′-end portion comprises one or more mismatches or wobbles when aligned with a target nucleic acid for complementarity.
[1868] 455. The oligonucleotide of Embodiment 450 or 454, wherein the 5′-end portion has a length of 1, 2 or 3 nucleobases.
[1869] 456. The oligonucleotide of and one of Embodiments 450-455, wherein sugars of the 5′-end portion are selected from sugars having two 2′-H (e.g., natural DNA sugar) and 2′-F modified sugars.
[1870] 457. The oligonucleotide of any one of the preceding Embodiments, wherein the second subdomain comprise a 3′-end portion connected to the 3′-side of the opposite nucleoside.
[1871] 458. The oligonucleotide of Embodiment 457, wherein the 3′-end portion comprises one or more mismatches or wobbles when aligned with a target nucleic acid for complementarity.
[1872] 459. The oligonucleotide of Embodiment 457, wherein the 3′-end portion comprises one or more mismatches and/or wobbles when aligned with a target nucleic acid for complementarity.
[1873] 460. The oligonucleotide of Embodiment 457, wherein the 3′-end portion comprises one or more wobbles when aligned with a target nucleic acid for complementarity.
[1874] 461. The oligonucleotide of Embodiment 457, wherein the 3′-end portion comprises an I or a derivative thereof.
[1875] 462. The oligonucleotide of Embodiment 457, wherein the 3′-end portion comprises an I and an I-C wobble when aligned with a target nucleic acid for complementarity.
[1876] 463. The oligonucleotide of any one of Embodiments 457-462, wherein the 3′-end portion has a length of 1, 2 or 3 nucleobases.
[1877] 464. The oligonucleotide of and one of Embodiments 457-463, wherein sugars of the 3′-end portion are selected from sugars having two 2′-H (e.g., natural DNA sugar) and 2′-F modified sugars.
[1878] 465. The oligonucleotide of and one of Embodiments 457-463, wherein sugars of the 3′-end portion are sugars having two 2′-H (e.g., natural DNA sugar).
[1879] 466. The oligonucleotide of any one of the preceding Embodiments, wherein the second subdomain comprise about 1-10 (e.g., about 1, 2, 3, 4, 5, 6, 7, 8, 9, 10, 11, 12, 13, 14, 15, 16, 17, 18, 19, or 20, etc.) modified internucleotidic linkages.
[1880] 467. The oligonucleotide of any one of the preceding Embodiments, wherein about 5%-100% (e.g., about 10%-100%, 20-100%, 30%-100%, 40%-100%, 50%-80%, 50%-85%, 50%-90%, 50%-95%, 60%-80%, 60%-85%, 60%-90%, 60%-95%, 60%-100%, 65%-80%, 65%-85%, 65%-90%, 65%-95%, 65%-100%, 70%-80%, 70%-85%, 70%-90%, 70%-95%, 70%-100%, 75%-80%, 75%-85%, 75%-90%, 75%-95%, 75%-100%, 80%-85%, 80%-90%, 80%-95%, 80%-100%, 85%-90%, 85%-95%, 85%-100%, 90%-95%, 90%-100%, 10%, 20%, 30%, 40%, 50%, 60%, 65%, 70%, 75%, 80%, 85%, 90%, 95%, or 100%, etc.) of internucleotidic linkages in the second subdomain are modified internucleotidic linkages.
[1881] 468. The oligonucleotide of any one of the preceding Embodiments, wherein about 50%-100% (e.g., about 50%-80%, 50%-85%, 50%-90%, 50%-95%, 60%-80%, 60%-85%, 60%-90%, 60%-95%, 60%-100%, 65%-80%, 65%-85%, 65%-90%, 65%-95%, 65%-100%, 70%-80%, 70%-85%, 70%-90%, 70%-95%, 70%-100%, 75%-80%, 75%-85%, 75%-90%, 75%-95%, 75%-100%, 80%-85%, 80%-90%, 80%-95%, 80%-100%, 85%-90%, 85%-95%, 85%-100%, 90%-95%, 90%-100%, 50%, 60%, 65%, 70%, 75%, 80%, 85%, 90%, 95%, or 100%, etc.) of internucleotidic linkages in the second subdomain are modified internucleotidic linkages.
[1882] 469. The oligonucleotide of any one of the preceding Embodiments, wherein each modified internucleotidic linkages in the second subdomain is independently a chiral internucleotidic linkage.
[1883] 470. The oligonucleotide of any one of the preceding Embodiments, wherein each modified internucleotidic linkages in the second subdomain is independently a phosphorothioate internucleotidic linkage or a non-negatively charged internucleotidic linkage.
[1884] 471. The oligonucleotide of any one of the preceding Embodiments, wherein each modified internucleotidic linkages in the second subdomain is independently a phosphorothioate internucleotidic linkage or a neutral internucleotidic linkage.
[1885] 472. The oligonucleotide of any one of the preceding Embodiments, wherein at least about 1-50 (e.g., about 5, 6, 7, 8, 9, or 10-about 10, 11, 12, 13, 14, 15, 16, 17, 18, 19, 20, 21, 22, 23, 24, 25, 30, 40 or 50, or about 5, 6, 7, 8, 9, 10, 11, 12, 13, 14, 15, 16, 17, 18, 19, 20, 21, 22, 23, 24, 25, 30, 40 or 50, etc., about 1, 2, 3, 4, 5, 6, 7, 8, 9, 10, 11, 12, 13, 14, 15, 16, 17, 18, 19, or 20, etc.) chiral internucleotidic linkages in the second subdomain is chirally controlled.
[1886] 473. The oligonucleotide of any one of the preceding Embodiments, wherein at least 5%-100% (e.g., about 10%-100%, 20-100%, 30%-100%, 40%-100%, 50%-80%, 50%-85%, 50%-90%, 50%-95%, 60%-80%, 60%-85%, 60%-90%, 60%-95%, 60%-100%, 65%-80%, 65%-85%, 65%-90%, 65%-95%, 65%-100%, 70%-80%, 70%-85%, 70%-90%, 70%-95%, 70%-100%, 75%-80%, 75%-85%, 75%-90%, 75%-95%, 75%-100%, 80%-85%, 80%-90%, 80%-95%, 80%-100%, 85%-90%, 85%-95%, 85%-100%, 90%-95%, 90%-100%, 10%, 20%, 30%, 40%, 50%, 60%, 65%, 70%, 75%, 80%, 85%, 90%, 95%, or 100%, etc.) of chiral internucleotidic linkages in the second subdomain is chirally controlled.
[1887] 474. The oligonucleotide of any one of the preceding Embodiments, wherein each chiral internucleotidic linkage in the second subdomain is independently a chirally controlled internucleotidic linkage.
[1888] 475. The oligonucleotide of any one of the preceding Embodiments, wherein at least about 1-50 (e.g., about 5, 6, 7, 8, 9, or 10-about 10, 11, 12, 13, 14, 15, 16, 17, 18, 19, 20, 21, 22, 23, 24, 25, 30, 40 or 50, or about 5, 6, 7, 8, 9, 10, 11, 12, 13, 14, 15, 16, 17, 18, 19, 20, 21, 22, 23, 24, 25, 30, 40 or 50, etc., about 1, 2, 3, 4, 5, 6, 7, 8, 9, 10, 11, 12, 13, 14, 15, 16, 17, 18, 19, or 20, etc.) chiral internucleotidic linkages in the second subdomain is Sp.
[1889] 476. The oligonucleotide of any one of the preceding Embodiments, wherein at least about 1-50 (e.g., about 5, 6, 7, 8, 9, or 10-about 10, 11, 12, 13, 14, 15, 16, 17, 18, 19, 20, 21, 22, 23, 24, 25, 30, 40 or 50, or about 5, 6, 7, 8, 9, 10, 11, 12, 13, 14, 15, 16, 17, 18, 19, 20, 21, 22, 23, 24, 25, 30, 40 or 50, etc., about 1, 2, 3, 4, 5, 6, 7, 8, 9, 10, 11, 12, 13, 14, 15, 16, 17, 18, 19, or 20, etc.) chiral internucleotidic linkages in the second subdomain is Rp.
[1890] 477. The oligonucleotide of any one of the preceding Embodiments, wherein at least 5%-100% (e.g., about 10%-100%, 20-100%, 30%-100%, 40%-100%, 50%-80%, 50%-85%, 50%-90%, 50%-95%, 60%-80%, 60%-85%, 60%-90%, 60%-95%, 60%-100%, 65%-80%, 65%-85%, 65%-90%, 65%-95%, 65%-100%, 70%-80%, 70%-85%, 70%-90%, 70%-95%, 70%-100%, 75%-80%, 75%-85%, 75%-90%, 75%-95%, 75%-100%, 80%-85%, 80%-90%, 80%-95%, 80%-100%, 85%-90%, 85%-95%, 85%-100%, 90%-95%, 90%-100%, 10%, 20%, 30%, 40%, 50%, 60%, 65%, 70%, 75%, 80%, 85%, 90%, 95%, or 100%, etc.) of chiral internucleotidic linkages in the second subdomain is Sp.
[1891] 478. The oligonucleotide of any one of the preceding Embodiments, wherein each chiral internucleotidic linkages in the second subdomain is Sp.
[1892] 479. The oligonucleotide of any one of the preceding Embodiments, wherein each internucleotidic linkage in the second subdomain is independently a modified internucleotidic linkage.
[1893] 480. The oligonucleotide of any one of Embodiments 1-478, wherein the second subdomain comprises one or more natural phosphate linkages.
[1894] 481. The oligonucleotide of any one of Embodiments 1-478, wherein the opposite nucleoside is connected to its 5′ immediate nucleoside through a natural phosphate linkage.
[1895] 482. The oligonucleotide of any one of Embodiments 1-480, wherein the opposite nucleoside is connected to its 5′ immediate nucleoside through a modified internucleotidic linkage.
[1896] 483. The oligonucleotide of any one of Embodiments 1-482, wherein the opposite nucleoside is connected to its 3′ immediate nucleoside through a modified internucleotidic linkage.
[1897] 484. The oligonucleotide of any one of Embodiments 1-483, wherein the nucleoside (position −1) that is 3′ immediate to an opposite nucleoside (position 0) is connected to its 3′ immediate nucleoside (position −2) through a modified internucleotidic linkage.
[1898] 485. The oligonucleotide of any one of Embodiments 482-484, wherein the modified internucleotidic linkage is a chiral internucleotidic linkage.
[1899] 486. The oligonucleotide of any one of Embodiments 482-485, wherein the modified internucleotidic linkage is a phosphorothioate internucleotidic linkage.
[1900] 487. The oligonucleotide of any one of Embodiments 482-485, wherein the modified internucleotidic linkage is a non-negatively charged internucleotidic linkage.
[1901] 488. The oligonucleotide of any one of Embodiments 482-485, wherein the modified internucleotidic linkage is a neutral charged internucleotidic linkage.
[1902] 489. The oligonucleotide of any one of Embodiments 485-488, wherein the chiral internucleotidic linkage is chirally controlled.
[1903] 490. The oligonucleotide of any one of Embodiments 485-489, wherein the chiral internucleotidic linkage is Rp.
[1904] 491. The oligonucleotide of any one of Embodiments 485-489, wherein the chiral internucleotidic linkage is Sp.
[1905] 492. The oligonucleotide of any one of Embodiments 481-491, wherein the 5′ immediate nucleoside comprises a modified sugar.
[1906] 493. The oligonucleotide of any one of Embodiments 481-491, wherein the 5′ immediate nucleoside comprises a modified sugar comprising a 2′-F modification.
[1907] 494. The oligonucleotide of any one of Embodiments 481-491, wherein the 5′ immediate nucleoside comprises a sugar comprising two 2′-H (e.g., a natural DNA sugar).
[1908] 495. The oligonucleotide of any one of Embodiments 1-478 and 480-494, wherein the opposite nucleoside is connected to its 3′ immediate nucleoside through a natural phosphate linkage.
[1909] 496. The oligonucleotide of any one of Embodiments 1-478 and 480-494, wherein the opposite nucleoside is connected to its 3′ immediate nucleoside through a modified internucleotidic linkage.
[1910] 497. The oligonucleotide of Embodiment 496, wherein the modified internucleotidic linkage is a chiral internucleotidic linkage.
[1911] 498. The oligonucleotide of Embodiment 496 or 497, wherein the modified internucleotidic linkage is a phosphorothioate internucleotidic linkage.
[1912] 499. The oligonucleotide of Embodiment 496 or 497, wherein the modified internucleotidic linkage is a non-negatively charged internucleotidic linkage.
[1913] 500. The oligonucleotide of Embodiment 496 or 497, wherein the modified internucleotidic linkage is a neutral charged internucleotidic linkage.
[1914] 501. The oligonucleotide of any one of Embodiments 497-500, wherein the chiral internucleotidic linkage is chirally controlled.
[1915] 502. The oligonucleotide of any one of Embodiments 497-501, wherein the chiral internucleotidic linkage is Rp.
[1916] 503. The oligonucleotide of any one of Embodiments 497-501, wherein the chiral internucleotidic linkage is Sp.
[1917] 504. The oligonucleotide of any one of the preceding Embodiments, wherein the 3′ immediate nucleoside comprises a modified sugar.
[1918] 505. The oligonucleotide of Embodiment 503, wherein the 3′ immediate nucleoside comprises a modified sugar comprising a 2′-F modification.
[1919] 506. The oligonucleotide of Embodiment 503, wherein the 3′ immediate nucleoside comprises a sugar comprising two 2′-H (e.g., a natural DNA sugar).
[1920] 507. The oligonucleotide of any one of the preceding Embodiments, wherein the 3′-immediate nucleoside comprises a base that is not G.
[1921] 508. The oligonucleotide of any one of the preceding Embodiments, wherein the 3′-immediate nucleoside comprises a base that are less steric than G.
[1922] 509. The oligonucleotide of any one of the preceding Embodiments, wherein the 3′-immediate nucleoside comprises a nucleobase which is or comprise Ring BA having the structure of formula BA-VI.
[1923] 510. The oligonucleotide of any one of Embodiment 507-509, wherein Ring BA is the Ring BA of any one of Embodiments 232-298.
[1924] 511. The oligonucleotide of any one of Embodiment 507-510, wherein the nucleobase is

[chemical structure]

[1925] 512. The oligonucleotide of any one of Embodiment 507-510, wherein the nucleobase is

[chemical structure]

[1926] 513. The oligonucleotide of any one of Embodiment 507-510, wherein the nucleobase is hypoxanthine.
[1927] 514. The oligonucleotide of any one of the preceding Embodiments, wherein a target nucleic acid comprises 5′-CA-3′, wherein A is a target adenosine.
[1928] 515. The oligonucleotide of any one of the preceding Embodiments, wherein the sugar in a 5′ immediate nucleoside is or comprises

[chemical structure]

[1929] 516. The oligonucleotide of any one of Embodiments 1-514, wherein the sugar in a 5′ immediate nucleoside is or comprises

[chemical structure]

[1930] 517. The oligonucleotide of any one of Embodiments 1-514, wherein the sugar in a 5′ immediate nucleoside is or comprises

[chemical structure]

[1931] 518. The oligonucleotide of any one of the preceding Embodiments, wherein the sugar in a nucleoside opposition to a target nucleoside is or comprises

[chemical structure]

[1932] 519. The oligonucleotide of any one of Embodiments 1-517, wherein the sugar in a nucleoside opposition to a target nucleoside is or comprises

[chemical structure]

[1933] 520. The oligonucleotide of any one of Embodiments 1-517, wherein the sugar in a nucleoside opposition to a target nucleoside is or comprises

[chemical structure]

[1934] 521. The oligonucleotide of any one of the preceding Embodiments, wherein the sugar in a 3′ immediate nucleoside is or comprises

[chemical structure]

[1935] 522. The oligonucleotide of any one of Embodiments 1-520, wherein the sugar in a 3′ immediate nucleoside is or comprises

[chemical structure]

[1936] 523. The oligonucleotide of any one of Embodiments 1-520, wherein the sugar in a 3′-immediate nucleoside is or comprises

[chemical structure]

[1937] 524. The oligonucleotide of any one of the preceding Embodiments, wherein the second subdomain can recruit, or promotes or contributes to recruitment of, an ADAR protein to a target nucleic acid.
[1938] 525. The oligonucleotide of any one of the preceding Embodiments, wherein the second subdomain can interact, or promotes or contributes to interaction of, an ADAR protein with a target nucleic acid.
[1939] 526. The oligonucleotide of any one of the preceding Embodiments, wherein the second subdomain contacts with a domain that have an enzymatic activity.
[1940] 527. The oligonucleotide of any one of the preceding Embodiments, wherein the second subdomain contact with a domain that has a deaminase activity of ADAR1.
[1941] 528. The oligonucleotide of any one of the preceding Embodiments, wherein the second subdomain contact with a domain that has a deaminase activity of ADAR2.
[1942] 529. The oligonucleotide of any one of the preceding Embodiments, wherein the third subdomain has a length of about 1-50 (e.g., about 5, 6, 7, 8, 9, or 10-about 10, 11, 12, 13, 14, 15, 16, 17, 18, 19, 20, 21, 22, 23, 24, 25, 30, 40 or 50, or about 5, 6, 7, 8, 9, 10, 11, 12, 13, 14, 15, 16, 17, 18, 19, 20, 21, 22, 23, 24, 25, 30, 40 or 50, etc.) nucleobases.
[1943] 530. The oligonucleotide of any one of the preceding Embodiments, wherein the third subdomain has a length of about 1-10 (e.g., 1, 2, 3, 4, 5, 6, 7, 8, 9, or 10) nucleobases.
[1944] 531. The oligonucleotide of any one of the preceding Embodiments, wherein the third subdomain comprises one or more (e.g., 1-10, 1, 2, 3, 4, 5, 6, 7, 8, 9, or 10, etc.) mismatches when the oligonucleotide is aligned with a target nucleic acid for complementarity.
[1945] 532. The oligonucleotide of any one of the preceding Embodiments, wherein the third subdomain comprises two or more mismatches when the oligonucleotide is aligned with a target nucleic acid for complementarity.
[1946] 533. The oligonucleotide of any one of Embodiments 1-531, wherein the third subdomain comprises one and no more than one mismatch when the oligonucleotide is aligned with a target nucleic acid for complementarity.
[1947] 534. The oligonucleotide of any one of Embodiments 1-531, wherein the third subdomain comprises two and no more than two mismatches when the oligonucleotide is aligned with a target nucleic acid for complementarity.
[1948] 535. The oligonucleotide of any one of the preceding Embodiments, wherein the third subdomain comprises one or more (e.g., 1-10, 1, 2, 3, 4, 5, 6, 7, 8, 9, or 10, etc.) bulges when the oligonucleotide is aligned with a target nucleic acid for complementarity.
[1949] 536. The oligonucleotide of Embodiment 535, wherein each bulge independently comprises one or more base pairs that are not Watson-Crick or wobble pairs.
[1950] 537. The oligonucleotide of any one of the preceding Embodiments, wherein the third subdomain comprises one or more (e.g., 1-10, 1, 2, 3, 4, 5, 6, 7, 8, 9, or 10, etc.) wobble pairs when the oligonucleotide is aligned with a target nucleic acid for complementarity.
[1951] 538. The oligonucleotide of any one of the preceding Embodiments, wherein the third subdomain comprises two or more wobble pairs when the oligonucleotide is aligned with a target nucleic acid for complementarity.
[1952] 539. The oligonucleotide of any one of the preceding Embodiments, wherein the third subdomain comprises two and no more than two wobble pairs when the oligonucleotide is aligned with a target nucleic acid for complementarity.
[1953] 540. The oligonucleotide of any one of Embodiments 1-530, wherein the third subdomain is fully complementary to a target nucleic acid.
[1954] 541. The oligonucleotide of any one of the preceding Embodiments, wherein the third subdomain comprises about 1-50 (e.g., about 5, 6, 7, 8, 9, or 10-about 10, 11, 12, 13, 14, 15, 16, 17, 18, 19, 20, 21, 22, 23, 24, 25, 30, 40 or 50, or about 5, 6, 7, 8, 9, 10, 11, 12, 13, 14, 15, 16, 17, 18, 19, 20, 21, 22, 23, 24, 25, 30, 40 or 50, etc., about 1, 2, 3, 4, 5, 6, 7, 8, 9, 10, 11, 12, 13, 14, 15, 16, 17, 18, 19, or 20, etc.) modified sugars independently with a modification that is not 2′-F.
[1955] 542. The oligonucleotide of any one of the preceding Embodiments, wherein about 5%-100% (e.g., about 10%-100%, 20-100%, 30%-100%, 40%-100%, 50%-80%, 50%-85%, 50%-90%, 50%-95%, 60%-80%, 60%-85%, 60%-90%, 60%-95%, 60%-100%, 65%-80%, 65%-85%, 65%-90%, 65%-95%, 65%-100%, 70%-80%, 70%-85%, 70%-90%, 70%-95%, 70%-100%, 75%-80%, 75%-85%, 75%-90%, 75%-95%, 75%-100%, 80%-85%, 80%-90%, 80%-95%, 80%-100%, 85%-90%, 85%-95%, 85%-100%, 90%-95%, 90%-100%, 10%, 20%, 30%, 40%, 50%, 60%, 65%, 70%, 75%, 80%, 85%, 90%, 95%, or 100%, etc.) of sugars in the third subdomain are independently modified sugars with a modification that is not 2′-F.
[1956] 543. The oligonucleotide of any one of the preceding Embodiments, wherein about 50%-100% (e.g., about 50%-80%, 50%-85%, 50%-90%, 50%-95%, 60%-80%, 60%-85%, 60%-90%, 60%-95%, 60%-100%, 65%-80%, 65%-85%, 65%-90%, 65%-95%, 65%-100%, 70%-80%, 70%-85%, 70%-90%, 70%-95%, 70%-100%, 75%-80%, 75%-85%, 75%-90%, 75%-95%, 75%-100%, 80%-85%, 80%-90%, 80%-95%, 80%-100%, 85%-90%, 85%-95%, 85%-100%, 90%-95%, 90%-100%, 50%, 60%, 65%, 70%, 75%, 80%, 85%, 90%, 95%, or 100%, etc.) of sugars in the third subdomain are independently modified sugars with a modification that is not 2′-F.
[1957] 544. The oligonucleotide of any one of the preceding Embodiments, wherein the third subdomain comprises about 1-50 (e.g., about 5, 6, 7, 8, 9, or 10-about 10, 11, 12, 13, 14, 15, 16, 17, 18, 19, 20, 21, 22, 23, 24, 25, 30, 40 or 50, or about 5, 6, 7, 8, 9, 10, 11, 12, 13, 14, 15, 16, 17, 18, 19, 20, 21, 22, 23, 24, 25, 30, 40 or 50, etc., about 1, 2, 3, 4, 5, 6, 7, 8, 9, 10, 11, 12, 13, 14, 15, 16, 17, 18, 19, or 20, etc.) modified sugars independently selected from a bicyclic sugar (e.g., a LNA sugar), an acyclic sugar (e.g., a UNA sugar), a sugar with a 2′-OR modification, or a sugar with a 2′-N(R)₂ modification, wherein each R is independently optionally substituted C₁₋₆ aliphatic.
[1958] 545. The oligonucleotide of any one of the preceding Embodiments, wherein about 5%-100% (e.g., about 10%-100%, 20-100%, 30%-100%, 40%-100%, 50%-80%, 50%-85%, 50%-90%, 50%-95%, 60%-80%, 60%-85%, 60%-90%, 60%-95%, 60%-100%, 65%-80%, 65%-85%, 65%-90%, 65%-95%, 65%-100%, 70%-80%, 70%-85%, 70%-90%, 70%-95%, 70%-100%, 75%-80%, 75%-85%, 75%-90%, 75%-95%, 75%-100%, 80%-85%, 80%-90%, 80%-95%, 80%-100%, 85%-90%, 85%-95%, 85%-100%, 90%-95%, 90%-100%, 10%, 20%, 30%, 40%, 50%, 60%, 65%, 70%, 75%, 80%, 85%, 90%, 95%, or 100%, etc.) of sugars in the third subdomain are independently modified sugars selected from a bicyclic sugar (e.g., a LNA sugar), an acyclic sugar (e.g., a UNA sugar), a sugar with a 2′-OR modification, or a sugar with a 2′-N(R)₂ modification, wherein each R is independently optionally substituted C₁₋₆ aliphatic.
[1959] 546. The oligonucleotide of any one of the preceding Embodiments, wherein about 50%-100% (e.g., about 50%-80%, 50%-85%, 50%-90%, 50%-95%, 60%-80%, 60%-85%, 60%-90%, 60%-95%, 60%-100%, 65%-80%, 65%-85%, 65%-90%, 65%-95%, 65%-100%, 70%-80%, 70%-85%, 70%-90%, 70%-95%, 70%-100%, 75%-80%, 75%-85%, 75%-90%, 75%-95%, 75%-100%, 80%-85%, 80%-90%, 80%-95%, 80%-100%, 85%-90%, 85%-95%, 85%-100%, 90%-95%, 90%-100%, 50%, 60%, 65%, 70%, 75%, 80%, 85%, 90%, 95%, or 100%, etc.) of sugars in the third subdomain are independently modified sugars selected from a bicyclic sugar (e.g., a LNA sugar), an acyclic sugar (e.g., a UNA sugar), a sugar with a 2′-OR modification, or a sugar with a 2′-N(R)₂ modification, wherein each R is independently optionally substituted C₁₋₆ aliphatic.
[1960] 547. The oligonucleotide of any one of the preceding Embodiments, wherein the third subdomain comprises one or more (e.g., about 1-20, 1, 2, 3, 4, 5, 6, 7, 8, 9, 10, 11, 12, 13, 14, 15, 16, 17, 18, 19, 20, etc.) modified sugars comprising a 2′-N(R)₂ modification, wherein each R is optionally substituted C₁₋₆ aliphatic.
[1961] 548. The oligonucleotide of any one of the preceding Embodiments, wherein the third subdomain comprises one or more (e.g., about 1-20, 1, 2, 3, 4, 5, 6, 7, 8, 9, 10, 11, 12, 13, 14, 15, 16, 17, 18, 19, 20, etc.) modified sugars comprising a 2′-NH₂ modification.
[1962] 549. The oligonucleotide of any one of the preceding Embodiments, wherein the third subdomain comprises one or more (e.g., about 1-20, 1, 2, 3, 4, 5, 6, 7, 8, 9, 10, 11, 12, 13, 14, 15, 16, 17, 18, 19, 20, etc.) LNA sugars.
[1963] 550. The oligonucleotide of any one of the preceding Embodiments, wherein the third subdomain comprises one or more (e.g., about 1-20, 1, 2, 3, 4, 5, 6, 7, 8, 9, 10, 11, 12, 13, 14, 15, 16, 17, 18, 19, 20, etc.) acyclic sugars (e.g., UNA sugars).
[1964] 551. The oligonucleotide of any one of the preceding Embodiments, wherein the third subdomain comprises one or more (e.g., about 1-20, 1, 2, 3, 4, 5, 6, 7, 8, 9, 10, 11, 12, 13, 14, 15, 16, 17, 18, 19, 20, etc.) modified sugars comprising a 2′-F modification.
[1965] 552. The oligonucleotide of any one of the preceding Embodiments, wherein the third subdomain comprises one or more (e.g., about 1-20, 1, 2, 3, 4, 5, 6, 7, 8, 9, 10, 11, 12, 13, 14, 15, 16, 17, 18, 19, 20, etc.) sugars comprising 2′-OH.
[1966] 553. The oligonucleotide of any one of the preceding Embodiments, wherein the third subdomain comprises one or more (e.g., about 1-20, 1, 2, 3, 4, 5, 6, 7, 8, 9, 10, 11, 12, 13, 14, 15, 16, 17, 18, 19, 20, etc.) sugars comprising two 2′-H.
[1967] 554. The oligonucleotide of any one of the preceding Embodiments, wherein the third subdomain comprises one or more (e.g., about 1-20, 1, 2, 3, 4, 5, 6, 7, 8, 9, 10, 11, 12, 13, 14, 15, 16, 17, 18, 19, 20, etc.) modified sugars comprising a 2′-OR modification, wherein R is optionally substituted C₁₋₆ aliphatic.
[1968] 555. The oligonucleotide of any one of the preceding Embodiments, wherein the third subdomain comprises one or more (e.g., about 1-20, 1, 2, 3, 4, 5, 6, 7, 8, 9, 10, 11, 12, 13, 14, 15, 16, 17, 18, 19, 20, etc.) modified sugars comprising a 2′-OMe modification.
[1969] 556. The oligonucleotide of any one of Embodiments 1-546, wherein each sugar in the third subdomain independently comprises a 2′-OR modification, wherein R is optionally substituted C₁₋₆ aliphatic, or a 2′-O-L^{B}-4′ modification.
[1970] 557. The oligonucleotide of Embodiment 556, wherein each sugar in the third subdomain independently comprises a 2′-OR modification, wherein R is optionally substituted C₁₋₆ aliphatic, or a 2′-O-L^{B}-4′ modification, wherein L^{B} is optionally substituted —CH₂—.
[1971] 558. The oligonucleotide of Embodiment 556, wherein each sugar in the third subdomain independently comprises 2′-OMe.
[1972] 559. The oligonucleotide of any one of the preceding Embodiments, wherein the third subdomain comprises a 5′-end portion having a length of about 1-8 nucleobases.
[1973] 560. The oligonucleotide of Embodiment 559, wherein the 5′-end portion has a length of about 1, 2, or 3 nucleobases
[1974] 561. The oligonucleotide of Embodiment 559 or 560, wherein the 5′-end portion is bonded to the second subdomain.
[1975] 562. The oligonucleotide of any one of Embodiments 559-561, wherein one or more of the sugars in the 5′-end portion are independently modified sugars.
[1976] 563. The oligonucleotide of Embodiment 562, wherein the modified sugars are independently selected from a bicyclic sugar (e.g., a LNA sugar), an acyclic sugar (e.g., a UNA sugar), a sugar with a 2′-OR modification, or a sugar with a 2′-N(R)₂ modification, wherein each R is independently optionally substituted C₁₋₆ aliphatic.
[1977] 564. The oligonucleotide of Embodiment 562, wherein one or more of the modified sugars independently comprises 2′-F.
[1978] 565. The oligonucleotide of any one of Embodiments 559-561, wherein one or more sugars of the 5′-end portion independently comprise two 2′-H (e.g., natural DNA sugar).
[1979] 566. The oligonucleotide of any one of Embodiments 559-565, wherein one or more sugars of the 5′-end portion independently comprise 2′-OH (e.g., natural RNA sugar).
[1980] 567. The oligonucleotide of any one of Embodiments 559-561, wherein the sugars of the 5′-end portion independently comprise two 2′-H (e.g., natural DNA sugar) or a 2′-OH (e.g., natural RNA sugar).
[1981] 568. The oligonucleotide of any one of Embodiments 559-561, wherein the sugars of the 5′-end portion are independently natural DNA or RNA sugars.
[1982] 569. The oligonucleotide of any one of Embodiments 559-568, wherein the 5′-end portion comprises one or more mismatches.
[1983] 570. The oligonucleotide of any one of Embodiments 559-569, wherein the 5′-end portion comprises one or more wobbles.
[1984] 571. The oligonucleotide of any one of Embodiments 559-570, wherein the 5′-end portion is about 60-100% (e.g., 66%, 70%, 75%, 80%, 85%, 90%, 95%, or more) complementary to a target nucleic acid.
[1985] 572. The oligonucleotide of any one of the preceding Embodiments, wherein the third subdomain comprises a 3′-end portion having a length of about 1-8 nucleobases.
[1986] 573. The oligonucleotide of Embodiment 572, wherein the 3′-end portion has a length of about 1, 2, 3, or 4 nucleobases.
[1987] 574. The oligonucleotide of Embodiment 572 or 573, wherein the 3′-end portion comprises the 3′-end nucleobase of the third subdomain.
[1988] 575. The oligonucleotide of any one of Embodiments 572-574, wherein one or more of the sugars in the 3′-end portion are independently modified sugars.
[1989] 576. The oligonucleotide of Embodiment 575, wherein the modified sugars are independently selected from a bicyclic sugar (e.g., a LNA sugar), an acyclic sugar (e.g., a UNA sugar), a sugar with a 2′-OR modification, or a sugar with a 2′-N(R)₂ modification, wherein each R is independently optionally substituted C₁₋₆ aliphatic.
[1990] 577. The oligonucleotide of any one of Embodiments 575-576, wherein one or more modified sugars independently comprises 2′-F.
[1991] 578. The oligonucleotide of any one of Embodiments 575-576, wherein at least 20%, 25%, 30%, 35%, 40%, 50%, 60%, 70%, 75%, 80%, 90%, or 95% sugars in the third subdomain independently comprise 2′-F.
[1992] 579. The oligonucleotide of any one of Embodiments 575-578, wherein one or more sugars in the 3′-end portion independently comprise a 2′-OR modification, wherein R is optionally substituted C₁₋₆ aliphatic, or a 2′-O-L^{B}-4′ modification.
[1993] 580. The oligonucleotide of Embodiment 579, wherein each sugar in the 3′-end portion independently comprises a 2′-OR modification, wherein R is optionally substituted C₁₋₆ aliphatic, or a 2′-O-L^{B}-4′ modification.
[1994] 581. The oligonucleotide of any one of Embodiments 579-580, wherein L^{B} is optionally substituted —CH₂—.
[1995] 582. The oligonucleotide of any one of Embodiments 579-580, wherein L^{B} is —CH₂—.
[1996] 583. The oligonucleotide of Embodiment 579, wherein each sugar in the 3′-end portion independently comprises 2′-OMe.
[1997] 584. The oligonucleotide of any one of Embodiments 572-583, wherein the 3′-end portion comprises one or more mismatches.
[1998] 585. The oligonucleotide of any one of Embodiments 572-584, wherein the 3′-end portion comprises one or more wobbles.
[1999] 586. The oligonucleotide of any one of Embodiments 572-585, wherein the 3′-end portion is about 60-100% (e.g., 66%, 70%, 75%, 80%, 85%, 90%, 95%, or more) complementary to a target nucleic acid.
[2000] 587. The oligonucleotide of any one of the preceding Embodiments, wherein the third subdomain comprise about 1-50 (e.g., about 5, 6, 7, 8, 9, or 10-about 10, 11, 12, 13, 14, 15, 16, 17, 18, 19, 20, 21, 22, 23, 24, 25, 30, 40 or 50, or about 5, 6, 7, 8, 9, 10, 11, 12, 13, 14, 15, 16, 17, 18, 19, 20, 21, 22, 23, 24, 25, 30, 40 or 50, etc., about 1, 2, 3, 4, 5, 6, 7, 8, 9, 10, 11, 12, 13, 14, 15, 16, 17, 18, 19, or 20, etc.) modified internucleotidic linkages.
[2001] 588. The oligonucleotide of any one of the preceding Embodiments, wherein about 5%-100% (e.g., about 10%-100%, 20-100%, 30%-100%, 40%-100%, 50%-80%, 50%-85%, 50%-90%, 50%-95%, 60%-80%, 60%-85%, 60%-90%, 60%-95%, 60%-100%, 65%-80%, 65%-85%, 65%-90%, 65%-95%, 65%-100%, 70%-80%, 70%-85%, 70%-90%, 70%-95%, 70%-100%, 75%-80%, 75%-85%, 75%-90%, 75%-95%, 75%-100%, 80%-85%, 80%-90%, 80%-95%, 80%-100%, 85%-90%, 85%-95%, 85%-100%, 90%-95%, 90%-100%, 10%, 20%, 30%, 40%, 50%, 60%, 65%, 70%, 75%, 80%, 85%, 90%, 95%, or 100%, etc.) of internucleotidic linkages in the third subdomain are modified internucleotidic linkages.
[2002] 589. The oligonucleotide of any one of the preceding Embodiments, wherein about 50%-100% (e.g., about 50%-80%, 50%-85%, 50%-90%, 50%-95%, 60%-80%, 60%-85%, 60%-90%, 60%-95%, 60%-100%, 65%-80%, 65%-85%, 65%-90%, 65%-95%, 65%-100%, 70%-80%, 70%-85%, 70%-90%, 70%-95%, 70%-100%, 75%-80%, 75%-85%, 75%-90%, 75%-95%, 75%-100%, 80%-85%, 80%-90%, 80%-95%, 80%-100%, 85%-90%, 85%-95%, 85%-100%, 90%-95%, 90%-100%, 50%, 60%, 65%, 70%, 75%, 80%, 85%, 90%, 95%, or 100%, etc.) of internucleotidic linkages in the third subdomain are modified internucleotidic linkages.
[2003] 590. The oligonucleotide of any one of the preceding Embodiments, wherein each modified internucleotidic linkages is independently a chiral internucleotidic linkage.
[2004] 591. The oligonucleotide of any one of the preceding Embodiments, wherein the internucleotidic linkage between the last and the second last nucleosides of the third subdomain is a non-negatively charged internucleotidic linkage.
[2005] 592. The oligonucleotide of any one of the preceding Embodiments, wherein each modified internucleotidic linkages is independently a phosphorothioate internucleotidic linkage or a non-negatively charged internucleotidic linkage.
[2006] 593. The oligonucleotide of any one of the preceding Embodiments, wherein each modified internucleotidic linkages is independently a phosphorothioate internucleotidic linkage or a neutral internucleotidic linkage.
[2007] 594. The oligonucleotide of any one of the preceding Embodiments, wherein at least about 1-50 (e.g., about 5, 6, 7, 8, 9, or 10-about 10, 11, 12, 13, 14, 15, 16, 17, 18, 19, 20, 21, 22, 23, 24, 25, 30, 40 or 50, or about 5, 6, 7, 8, 9, 10, 11, 12, 13, 14, 15, 16, 17, 18, 19, 20, 21, 22, 23, 24, 25, 30, 40 or 50, etc., about 1, 2, 3, 4, 5, 6, 7, 8, 9, 10, 11, 12, 13, 14, 15, 16, 17, 18, 19, or 20, etc.) chiral internucleotidic linkages in the third subdomain is chirally controlled.
[2008] 595. The oligonucleotide of any one of the preceding Embodiments, wherein at least 5%-100% (e.g., about 10%-100%, 20-100%, 30%-100%, 40%-100%, 50%-80%, 50%-85%, 50%-90%, 50%-95%, 60%-80%, 60%-85%, 60%-90%, 60%-95%, 60%-100%, 65%-80%, 65%-85%, 65%-90%, 65%-95%, 65%-100%, 70%-80%, 70%-85%, 70%-90%, 70%-95%, 70%-100%, 75%-80%, 75%-85%, 75%-90%, 75%-95%, 75%-100%, 80%-85%, 80%-90%, 80%-95%, 80%-100%, 85%-90%, 85%-95%, 85%-100%, 90%-95%, 90%-100%, 10%, 20%, 30%, 40%, 50%, 60%, 65%, 70%, 75%, 80%, 85%, 90%, 95%, or 100%, etc.) of chiral internucleotidic linkages in the third subdomain is chirally controlled.
[2009] 596. The oligonucleotide of any one of the preceding Embodiments, wherein the internucleotidic linkage between the last and the second last nucleosides of the third subdomain is chirally controlled.
[2010] 597. The oligonucleotide of any one of the preceding Embodiments, wherein each chiral internucleotidic linkage is independently a chirally controlled internucleotidic linkage.
[2011] 598. The oligonucleotide of any one of the preceding Embodiments, wherein at least about 1-50 (e.g., about 5, 6, 7, 8, 9, or 10-about 10, 11, 12, 13, 14, 15, 16, 17, 18, 19, 20, 21, 22, 23, 24, 25, 30, 40 or 50, or about 5, 6, 7, 8, 9, 10, 11, 12, 13, 14, 15, 16, 17, 18, 19, 20, 21, 22, 23, 24, 25, 30, 40 or 50, etc., about 1, 2, 3, 4, 5, 6, 7, 8, 9, 10, 11, 12, 13, 14, 15, 16, 17, 18, 19, or 20, etc.) chiral internucleotidic linkages in the third subdomain is Sp.
[2012] 599. The oligonucleotide of any one of the preceding Embodiments, wherein at least 5%-100% (e.g., about 10%-100%, 20-100%, 30%-100%, 40%-100%, 50%-80%, 50%-85%, 50%-90%, 50%-95%, 60%-80%, 60%-85%, 60%-90%, 60%-95%, 60%-100%, 65%-80%, 65%-85%, 65%-90%, 65%-95%, 65%-100%, 70%-80%, 70%-85%, 70%-90%, 70%-95%, 70%-100%, 75%-80%, 75%-85%, 75%-90%, 75%-95%, 75%-100%, 80%-85%, 80%-90%, 80%-95%, 80%-100%, 85%-90%, 85%-95%, 85%-100%, 90%-95%, 90%-100%, 10%, 20%, 30%, 40%, 50%, 60%, 65%, 70%, 75%, 80%, 85%, 90%, 95%, or 100%, etc.) of chiral internucleotidic linkages in the third subdomain is Sp.
[2013] 600. The oligonucleotide of any one of the preceding Embodiments, wherein each chiral internucleotidic linkages in the third subdomain is Sp.
[2014] 601. The oligonucleotide of any one of Embodiments 1-599, wherein the internucleotidic linkage between the last and the second lase nucleosides of the third subdomain is Rp.
[2015] 602. The oligonucleotide of any one of the preceding Embodiments, wherein the internucleotidic linkage linking the last nucleoside of the second subdomain and the first nucleoside of the third subdomain is a non-negatively charged internucleotidic linkage.
[2016] 603. The oligonucleotide of any one of the preceding Embodiments, wherein the internucleotidic linkage at position −2 is a non-negatively charged internucleotidic linkage.
[2017] 604. The oligonucleotide of any one of Embodiments 602-603, wherein the non-negatively charged internucleotidic linkage is chirally controlled.
[2018] 605. The oligonucleotide of Embodiment 604, wherein the non-negatively charged internucleotidic linkage is Rp.
[2019] 606. The oligonucleotide of Embodiment 604, wherein the non-negatively charged internucleotidic linkage is Sp.
[2020] 607. The oligonucleotide of any one of the preceding Embodiments, wherein each internucleotidic linkage in the third subdomain is independently a modified internucleotidic linkage.
[2021] 608. The oligonucleotide of any one of Embodiments 1-606, wherein the third subdomain comprises one or more natural phosphate linkages.
[2022] 609. The oligonucleotide of any one of the preceding Embodiments, wherein the third subdomain can recruit, or promotes or contributes to recruitment of, an ADAR protein to a target nucleic acid.
[2023] 610. The oligonucleotide of any one of the preceding Embodiments, wherein the third subdomain can interact, or promotes or contributes to interaction of, an ADAR protein with a target nucleic acid.
[2024] 611. The oligonucleotide of any one of the preceding Embodiments, wherein the third subdomain contacts with a domain that have an enzymatic activity.
[2025] 612. The oligonucleotide of any one of the preceding Embodiments, wherein the third subdomain contact with a domain that has a deaminase activity of ADAR1.
[2026] 613. The oligonucleotide of any one of the preceding Embodiments, wherein the third subdomain contact with a domain that has a deaminase activity of ADAR2.
[2027] 614. The oligonucleotide of any one of the preceding Embodiments, wherein each wobble base pair is independently G-U, I-A, G-A, I-U, I-C, I-T, A-A, or reverse A-T.
[2028] 615. The oligonucleotide of any one of the preceding Embodiments, wherein each wobble base pair is independently G-U, I-A, G-A, I-U, or I-C.
[2029] 616. The oligonucleotide of any one of the preceding Embodiments, wherein each cyclic sugar or each sugar is independently optionally substituted

[chemical structure]

[2030] 617. The oligonucleotide of any one of the preceding Embodiments, wherein each cyclic sugar or each sugar independently has the structure of

[chemical structure]

[2031] 618. The oligonucleotide of Embodiment 617, wherein the oligonucleotide comprises one or more sugars wherein R^{2s} and R^{4s} are H.
[2032] 619. The oligonucleotide of any one of Embodiments 617-618, wherein the oligonucleotide comprises one or more sugars wherein R^{2s} is —OR, and R^{4s} is H.
[2033] 620. The oligonucleotide of any one of Embodiments 617-619, wherein the oligonucleotide comprises one or more sugars wherein R^{2s} is —OR, wherein R is optionally substituted C₁₋₄ alkyl and R^{4s} is H.
[2034] 621. The oligonucleotide of any one of Embodiments 617-620, wherein the oligonucleotide comprises one or more sugars wherein R^{2s} is —OMe and R^{4s} is H.
[2035] 622. The oligonucleotide of any one of Embodiments 617-621, wherein the oligonucleotide comprises one or more sugars wherein R^{2s} is —F and R^{4s} is H.
[2036] 623. The oligonucleotide of any one of Embodiments 617-622, wherein the oligonucleotide comprises one or more sugars wherein R^{4s} and R^{2s} are forming a bridge having the structure of optionally substituted 2′-O—CH₂-4′.
[2037] 624. The oligonucleotide of any one of Embodiments 617-622, wherein the oligonucleotide comprises one or more sugars wherein R^{4s} and R^{2s} are forming a bridge having the structure of 2′-O—CH₂-4′.
[2038] 625. The oligonucleotide of any one of the preceding Embodiments, wherein the oligonucleotide comprises an additional chemical moiety.
[2039] 626. The oligonucleotide of any one of the preceding Embodiments, wherein the oligonucleotide comprises a targeting moiety.
[2040] 627. The oligonucleotide of any one of the preceding Embodiments, wherein the oligonucleotide comprises a carbohydrate moiety.
[2041] 628. The oligonucleotide of any one of Embodiments 623-627, wherein the moiety is or comprises a ligand for an asialoglycoprotein receptor.
[2042] 629. The oligonucleotide of any one of Embodiments 623-628, wherein the moiety is or comprises GalNAc or a derivative thereof.
[2043] 630. The oligonucleotide of any one of Embodiments 623-629, wherein the moiety is or comprises optionally substituted

[chemical structure]

[2044] 631. The oligonucleotide of any one of Embodiments 623-629, wherein the moiety is or comprises optionally substituted

[chemical structure]

[2045] 632. The oligonucleotide of any one of Embodiments 623-631, wherein the moiety is connected to an oligonucleotide chain through a linker.
[2046] 633. The oligonucleotide of Embodiment 632, wherein the linker is or comprises L001.
[2047] 634. The oligonucleotide of Embodiment 633, wherein L001 is connected to 5′-end 5′-carbon of an oligonucleotide chain through a phosphate group
[2048] 635. The oligonucleotide of any one of the preceding Embodiments, wherein an additional chemical moiety is or comprises a nucleic acid moiety.
[2049] 636. The oligonucleotide of Embodiment 635, wherein the nucleic acid is or comprises an aptamer.
[2050] 637. The oligonucleotide of any one of the preceding Embodiments, wherein the oligonucleotide is in a salt form.
[2051] 638. The oligonucleotide of any one of the preceding Embodiments, wherein the oligonucleotide is in a pharmaceutically acceptable salt form.
[2052] 639. The oligonucleotide of any one of the preceding Embodiments, wherein the oligonucleotide is in a sodium salt form.
[2053] 640. The oligonucleotide of any one of the preceding Embodiments, wherein the oligonucleotide is in an ammonium salt form.
[2054] 641. The oligonucleotide of any one of the preceding Embodiments, wherein if any, at least one or each neutral internucleotidic linkage is independently n001.
[2055] 642. The oligonucleotide of any one of the preceding Embodiments, wherein if any, each non-negatively charged internucleotidic linkage is independently n001.
[2056] 643. The oligonucleotide of any one of the preceding Embodiments, wherein no more than 5, 6, 7, 8, 9, 10, 11 or 12 nucleosides 3′ to a nucleoside opposite to a target adenosine.
[2057] 644. The oligonucleotide of any one of the preceding Embodiments, wherein no more than 5, 6, 7, 8, 9, 10, 11 or 12 nucleosides 3′ to a nucleoside opposite to a target nucleoside, wherein each of the nucleosides is independently optionally substituted A, T, C, G, U, or a tautomer thereof.
[2058] 645. The oligonucleotide of any one of the preceding Embodiments, wherein about 50%-100% (e.g., about or at least about 50%, 55%, 60%, 65%, 70%, 75%, 80%, 85%, 90%, 95%) of internucleotidic linkages 3′ to a nucleoside opposite to a target adenosine are each independently a modified internucleotidic linkage.
[2059] 646. The oligonucleotide of any one of the preceding Embodiments, wherein about 50%-100% (e.g., about or at least about 50%, 55%, 60%, 65%, 70%, 75%, 80%, 85%, 90%, 95%) of internucleotidic linkages 3′ to a nucleoside opposite to a target adenosine are each independently a phosphorothioate internucleotidic linkage or a non-negatively charged internucleotidic linkage.
[2060] 647. The oligonucleotide of any one of the preceding Embodiments, wherein no more than 1, 2, or 3 internucleotidic linkages 3′ to a nucleoside opposite to a target adenosine are natural phosphate linkages.
[2061] 648. The oligonucleotide of any one of the preceding Embodiments, wherein no more than 1, 2, or 3 internucleotidic linkages 3′ to a nucleoside opposite to a target adenosine are Rp internucleotidic linkages.
[2062] 649. The oligonucleotide of any one of the preceding Embodiments, wherein no more than 1, 2, or 3 internucleotidic linkages 3′ to a nucleoside opposite to a target adenosine are Rp phosphorothioate internucleotidic linkages.
[2063] 650. The oligonucleotide of any one of the preceding Embodiments, wherein the internucleotidic linkage between a nucleoside opposite to a target nucleoside and its 3′ immediate nucleoside (considered a −1 position) is a stereorandom phosphorothioate internucleotidic linkage.
[2064] 651. The oligonucleotide of any one of Embodiments 1-649, wherein the internucleotidic linkage between a nucleoside opposite to a target nucleoside and its 3′ immediate nucleoside (considered a −1 position) is a chirally controlled Rp phosphorothioate internucleotidic linkage.
[2065] 652. The oligonucleotide of any one of Embodiments 1-649, wherein the internucleotidic linkage between a nucleoside opposite to a target nucleoside and its 3′ immediate nucleoside (considered a −1 position) is a chirally controlled Sp phosphorothioate internucleotidic linkage
[2066] 653. The oligonucleotide of any one of Embodiments 1-649, wherein an internucleotidic linkage bonded to a nucleoside opposite to a target nucleoside at the 3′-position of its sugar (considered a −1 position) is a Rp phosphorothioate internucleotidic linkage, and optionally the only Rp phosphorothioate internucleotidic linkage 3′ to a nucleoside opposite to a target adenosine.
[2067] 654. The oligonucleotide of any one of Embodiments 1-649, wherein an internucleotidic linkage bonded to a nucleoside opposite to a target nucleoside at the 3′-position of its sugar (considered a −1 position) is a Sp phosphorothioate internucleotidic linkage.
[2068] 655. The oligonucleotide of any one of Embodiments 1-649, wherein an internucleotidic linkage bonded to a nucleoside opposite to a target nucleoside at the 3′-position of its sugar (considered a −1 position) is a stereorandom phosphorothioate internucleotidic linkage.
[2069] 656. The oligonucleotide of any one of Embodiments 1-649, wherein the internucleotidic linkage between a 3′ immediate nucleoside of a nucleoside opposite to a target nucleoside and the next 3′ immediate nucleoside (e.g., position −2 between N₋₁ and N₋₂ of 5′- . . . N₀N₋₁N₋₂ . . . -3′ wherein N₀ represents a nucleoside opposite to a target nucleoside) is a non-negatively charged internucleotidic linkage.
[2070] 657. The oligonucleotide of Embodiment 656, wherein the non-negatively charged internucleotidic linkage is stereorandom.
[2071] 658. The oligonucleotide of Embodiment 656, wherein the non-negatively charged internucleotidic linkage is chirally controlled.
[2072] 659. The oligonucleotide of Embodiment 656, wherein the non-negatively charged internucleotidic linkage is chirally controlled and is Sp.
[2073] 660. The oligonucleotide of Embodiment 656, wherein the non-negatively charged internucleotidic linkage is chirally controlled and is Rp.
[2074] 661. The oligonucleotide of any one of Embodiments 656-660, wherein a non-negatively charged internucleotidic linkage is phosphoryl guanidine internucleotidic linkage.
[2075] 662. The oligonucleotide of any one of Embodiments 656-660, wherein a non-negatively charged internucleotidic linkage is n001.
[2076] 663. The oligonucleotide of any one of Embodiments 656-660, wherein a non-negatively charged internucleotidic linkage is n004, n008, n025 or n026.
[2077] 664. The oligonucleotide of any one of the preceding Embodiments, wherein the first internucleotidic linkage is a non-negatively charged internucleotidic linkage.
[2078] 665. The oligonucleotide of Embodiment 664, wherein the non-negatively charged internucleotidic linkage is stereorandom.
[2079] 666. The oligonucleotide of Embodiment 664, wherein the non-negatively charged internucleotidic linkage is chirally controlled.
[2080] 667. The oligonucleotide of Embodiment 664, wherein the non-negatively charged internucleotidic linkage is chirally controlled and is Sp.
[2081] 668. The oligonucleotide of Embodiment 664, wherein the non-negatively charged internucleotidic linkage is chirally controlled and is Rp.
[2082] 669. The oligonucleotide of any one of Embodiments 664-668, wherein a non-negatively charged internucleotidic linkage is phosphoryl guanidine internucleotidic linkage.
[2083] 670. The oligonucleotide of any one of Embodiments 664-668, wherein a non-negatively charged internucleotidic linkage is n001.
[2084] 671. The oligonucleotide of any one of Embodiments 664-668, wherein a non-negatively charged internucleotidic linkage is n004, n008, n025, n026.
[2085] 672. The oligonucleotide of any one of the preceding Embodiments, wherein the last internucleotidic linkage is a non-negatively charged internucleotidic linkage.
[2086] 673. The oligonucleotide of Embodiment 672, wherein the non-negatively charged internucleotidic linkage is stereorandom.
[2087] 674. The oligonucleotide of Embodiment 672, wherein the non-negatively charged internucleotidic linkage is chirally controlled.
[2088] 675. The oligonucleotide of Embodiment 672, wherein the non-negatively charged internucleotidic linkage is chirally controlled and is Sp.
[2089] 676. The oligonucleotide of Embodiment 672, wherein the non-negatively charged internucleotidic linkage is chirally controlled and is Rp.
[2090] 677. The oligonucleotide of any one of Embodiments 672-676, wherein a non-negatively charged internucleotidic linkage is a phosphoryl guanidine internucleotidic linkage.
[2091] 678. The oligonucleotide of any one of Embodiments 672-676, wherein a non-negatively charged internucleotidic linkage is n004, n008, n025, n026.
[2092] 679. The oligonucleotide of any one of Embodiments 672-676, wherein a non-negatively charged internucleotidic linkage is n001.
[2093] 680. The oligonucleotide of any one of the preceding Embodiments, wherein an internucleotidic linkage at position −3 relative to a nucleoside opposite to a target adenosine is not a Rp phosphorothioate internucleotidic linkage.
[2094] 681. The oligonucleotide of any one of the preceding Embodiments, wherein an internucleotidic linkage at position −6 relative to a nucleoside opposite to a target adenosine is not a Rp phosphorothioate internucleotidic linkage.
[2095] 682. The oligonucleotide of any one of the preceding Embodiments, wherein an internucleotidic linkage at position −4 and/or −5 relative to a nucleoside opposite to a target nucleoside is a modified internucleotidic linkage, e.g., a phosphorothioate internucleotidic linkage.
[2096] 683. The oligonucleotide of any one of the preceding Embodiments, wherein a nucleoside opposite to a target nucleoside is at position 2, 3, 4, 5, 6, 7, 8, 9, 10, 11, 12, 13, 14, 15, 16, 17, 18, 19, 20, 21, 22, 23, 24, 25, 26, 27, 28, 29 or 30 or more from the 5′-end.
[2097] 684. The oligonucleotide of any one of the preceding Embodiments, wherein a nucleoside opposite to a target nucleoside is at position 2, 3, 4, 5, 6, 7, 8, 9, 10, 11, 12, 13, 14, 15, 16, 17, 18, 19, 20, 21, 22, 23, 24, 25, 26, 27, 28, 29 or 30 or more from the 3′-end.
[2098] 685. The oligonucleotide of Embodiment 683 or 684, wherein the position is position 4.
[2099] 686. The oligonucleotide of Embodiment 683 or 684, wherein the position is position 5.
[2100] 687. The oligonucleotide of Embodiment 683 or 684, wherein the position is position 6.
[2101] 688. The oligonucleotide of Embodiment 683 or 684, wherein the position is position 7.
[2102] 689. The oligonucleotide of Embodiment 683 or 684, wherein the position is position 8.
[2103] 690. The oligonucleotide of Embodiment 683 or 684, wherein the position is position 9.
[2104] 691. The oligonucleotide of Embodiment 683 or 684, wherein the position is position 10.
[2105] 692. The oligonucleotide of any one of the preceding Embodiments, about 50%-100% (e.g., about or at least about 50%, 55%, 60%, 65%, 70%, 75%, 80%, 85%, 90%, or 95%) of internucleotidic linkages 5′ to a nucleoside opposite to a target adenosine are each independently a modified internucleotidic linkage, which is optionally chirally controlled.
[2106] 693. The oligonucleotide of any one of the preceding Embodiments, about 50%-100% (e.g., about or at least about 50%, 55%, 60%, 65%, 70%, 75%, 80%, 85%, 90%, or 95%) of phosphorothioate internucleotidic linkages 5′ to a nucleoside opposite to a target nucleoside (e.g., a target adenosine) are each chirally controlled and are Sp.
[2107] 694. The oligonucleotide of any one of the preceding Embodiments, wherein no or no more than 1, 2, or 3 internucleotidic linkages 5′ to a nucleoside opposite to a target adenosine are natural phosphate linkages
[2108] 695. The oligonucleotide of any one of the preceding Embodiments, an internucleotidic linkage at position +5 relative to a nucleoside opposite to a target nucleoside (e.g., for . . . N₊₅N₊₄N₊₃N₊₂N₊₁N₀ . . . , the internucleotidic linkage linking N₊₄ and N₊₅ wherein N₀ is a nucleoside opposite to a target nucleoside) is not a Rp phosphorothioate internucleotidic linkage.
[2109] 696. The oligonucleotide of any one of the preceding Embodiments, wherein one or more or all internucleotidic linkages at positions +6 to +8 relative to a nucleoside opposite to a target adenosine are each independently a modified internucleotidic linkage, optionally chirally controlled.
[2110] 697. The oligonucleotide of any one of the preceding Embodiments, wherein one or more or all internucleotidic linkages at positions +6 to +8 relative to a nucleoside opposite to a target adenosine are each independently a phosphorothioate internucleotidic linkage, optionally chirally controlled.
[2111] 698. The oligonucleotide of any one of the preceding Embodiments, wherein one or more or all internucleotidic linkages at positions +6, +7, +8, +9, and +11 relative to a nucleoside opposite to a target adenosine are each independently Rp phosphorothioate internucleotidic linkages.
[2112] 699. The oligonucleotide of any one of the preceding Embodiments, wherein one or more or all internucleotidic linkages at positions +5, +6, +7, +8, and +9 relative to a nucleoside opposite to a target adenosine are each independently Sp phosphorothioate internucleotidic linkages.
[2113] 700. The oligonucleotide of any one of the preceding Embodiments, wherein the oligonucleotide has a complementarity of about 50%-100% (e.g., about 50%-80%, 50%-85%, 50%-90%, 50%-95%, 60%-80%, 60%-85%, 60%-90%, 60%-95%, 60%-100%, 65%-80%, 65%-85%, 65%-90%, 65%-95%, 65%-100%, 70%-80%, 70%-85%, 70%-90%, 70%-95%, 70%-100%, 75%-80%, 75%-85%, 75%-90%, 75%-95%, 75%-100%, 80%-85%, 80%-90%, 80%-95%, 80%-100%, 85%-90%, 85%-95%, 85%-100%, 90%-95%, 90%-100%, or at least about 50%, 60%, 65%, 70%, 75%, 80%, 85%, 90%, 95%, or 100%, etc.) to a PiZZ allele (e.g., atcgacAagaaagggactgaagc).
[2114] 701. The oligonucleotide of any one of the preceding Embodiments, wherein the base sequence of the oligonucleotide is or comprises a sequence that differs at no more than 1, 2, 3, 4, or 5 positions from UCCCUUUCTCIUCGA (SEQ ID NO.: 1022), wherein each U can be independently replaced with T and vice versa.
[2115] 702. The oligonucleotide of any one of the preceding Embodiments, wherein the base sequence of the oligonucleotide is or comprises a sequence that differs at no more than 1, 2, 3, 4, or 5 positions from UCCCUUUCTCGUCGA (SEQ ID NO.: 1023), wherein each U can be independently replaced with T and vice versa.
[2116] 703. The oligonucleotide of any one of the preceding Embodiments, wherein the base sequence of the oligonucleotide is or comprises a sequence that differs at no more than 1, 2, 3, 4, or 5 positions from UCCCUUUCTCIUCGA (SEQ ID NO.: 1022).
[2117] 704. The oligonucleotide of any one of the preceding Embodiments, wherein the base sequence of the oligonucleotide is or comprises a sequence that differs at no more than 1, 2, 3, 4, or 5 positions from UCCCUUUCTCGUCGA (SEQ ID NO.: 1023).
[2118] 705. The oligonucleotide of any one of the preceding Embodiments, wherein the base sequence of the oligonucleotide is or comprises UCCCUUUCTCIUCGA (SEQ ID NO.: 1022), wherein each U can be independently replaced with T and vice versa.
[2119] 706. The oligonucleotide of any one of the preceding Embodiments, wherein the base sequence of the oligonucleotide is or comprises UCCCUUUCTCGUCGA (SEQ ID NO.: 1023), wherein each U can be independently replaced with T and vice versa.
[2120] 707. The oligonucleotide of any one of the preceding Embodiments, wherein the base sequence of the oligonucleotide is or comprises UCCCUUUCTCIUCGA (SEQ ID NO.: 1022).
[2121] 708. The oligonucleotide of any one of the preceding Embodiments, wherein the base sequence of the oligonucleotide is or comprises UCCCUUUCTCGUCGA (SEQ ID NO.: 1023).
[2122] 709. The oligonucleotide of any one of the preceding Embodiments, wherein the base sequence of the oligonucleotide is or comprises a sequence that differs at no more than 1, 2, 3, 4, or 5 positions from UUCAGUCCCUUUCTCIUCGA (SEQ ID NO.: 1024), wherein each U can be independently replaced with T and vice versa.
[2123] 710. The oligonucleotide of any one of the preceding Embodiments, wherein the base sequence of the oligonucleotide is or comprises a sequence that differs at no more than 1, 2, 3, 4, or 5 positions from UUCAGUCCCUUUCTCGUCGA (SEQ ID NO.: 1025), wherein each U can be independently replaced with T and vice versa.
[2124] 711. The oligonucleotide of any one of the preceding Embodiments, wherein the base sequence of the oligonucleotide is or comprises a sequence that differs at no more than 1, 2, 3, 4, or 5 positions from UUCAGUCCCUUUCTCIUCGA (SEQ ID NO.: 1024).
[2125] 712. The oligonucleotide of any one of the preceding Embodiments, wherein the base sequence of the oligonucleotide is or comprises a sequence that differs at no more than 1, 2, 3, 4, or 5 positions from UUCAGUCCCUUUCTCGUCGA (SEQ ID NO.: 1025).
[2126] 713. The oligonucleotide of any one of the preceding Embodiments, wherein the base sequence of the oligonucleotide is or comprises UUCAGUCCCUUUCTCIUCGA (SEQ ID NO.: 1024), wherein each U can be independently replaced with T and vice versa.
[2127] 714. The oligonucleotide of any one of the preceding Embodiments, wherein the base sequence of the oligonucleotide is or comprises UUCAGUCCCUUUCTCGUCGA (SEQ ID NO.: 1025), wherein each U can be independently replaced with T and vice versa.
[2128] 715. The oligonucleotide of any one of the preceding Embodiments, wherein the base sequence of the oligonucleotide is or comprises UUCAGUCCCUUUCTCIUCGA (SEQ ID NO.: 1024).
[2129] 716. The oligonucleotide of any one of the preceding Embodiments, wherein the base sequence of the oligonucleotide is or comprises UUCAGUCCCUUUCTCGUCGA (SEQ ID NO.: 1025).
[2130] 717. The oligonucleotide of any one of the preceding Embodiments, wherein the base sequence of the oligonucleotide is or comprises a sequence that differs at no more than 1, 2, 3, 4, or 5 positions from CCCCAGCAGCUUCAGUCCCUUUCTCGUCGA (SEQ ID NO.: 1026), wherein each U can be independently replaced with T and vice versa.
[2131] 718. The oligonucleotide of any one of the preceding Embodiments, wherein the base sequence of the oligonucleotide is or comprises a sequence that differs at no more than 1, 2, 3, 4, or 5 positions from CCCCAGCAGCUUCAGUCCCUUUCTCGUCGA (SEQ ID NO.: 1026), wherein each U can be independently replaced with T and vice versa.
[2132] 719. The oligonucleotide of any one of the preceding Embodiments, wherein the base sequence of the oligonucleotide is or comprises a sequence that differs at no more than 1, 2, 3, 4, or 5 positions from CCCCAGCAGCUUCAGUCCCUUUCTCGUCGA (SEQ ID NO.: 1026).
[2133] 720. The oligonucleotide of any one of the preceding Embodiments, wherein the base sequence of the oligonucleotide is or comprises a sequence that differs at no more than 1, 2, 3, 4, or 5 positions from CCCCAGCAGCUUCAGUCCCUUUCTCGUCGA (SEQ ID NO.: 1026).
[2134] 721. The oligonucleotide of any one of the preceding Embodiments, wherein the base sequence of the oligonucleotide is or comprises CCCCAGCAGCUUCAGUCCCUUUCTCGUCGA (SEQ ID NO.: 1026), wherein each U can be independently replaced with T and vice versa.
[2135] 722. The oligonucleotide of any one of the preceding Embodiments, wherein the base sequence of the oligonucleotide is or comprises CCCCAGCAGCUUCAGUCCCUUUCTCGUCGA (SEQ ID NO.: 1026), wherein each U can be independently replaced with T and vice versa.
[2136] 723. The oligonucleotide of any one of the preceding Embodiments, wherein the base sequence of the oligonucleotide is or comprises CCCCAGCAGCUUCAGUCCCUUUCTCGUCGA (SEQ ID NO.: 1026), wherein each U can be independently replaced with T and vice versa.
[2137] 724. The oligonucleotide of any one of the preceding Embodiments, wherein the base sequence of the oligonucleotide is or comprises CCCCAGCAGCUUCAGUCCCUUUCTCGUCGA (SEQ ID NO.: 1026).
[2138] 725. The oligonucleotide of any one of the preceding Embodiments, wherein the base sequence of the oligonucleotide is CCCCAGCAGCUUCAGUCCCUUUCTCGUCGA (SEQ ID NO.: 1026).
[2139] 726. The oligonucleotide of any one of the preceding Embodiments, wherein the base sequence of the oligonucleotide is or comprises a sequence that differs at no more than 1, 2, 3, 4, or 5 positions from CCCAGCAGCUUCAGUCCCUUUCTUIUCGAU (SEQ ID NO.: 530), wherein each U can be independently replaced with T and vice versa.
[2140] 727. The oligonucleotide of any one of the preceding Embodiments, wherein the base sequence of the oligonucleotide is or comprises a sequence that differs at no more than 1, 2, 3, 4, or 5 positions from CCCAGCAGCUUCAGUCCCUUUCTUIUCGAU (SEQ ID NO.: 530), wherein each U can be independently replaced with T and vice versa.
[2141] 728. The oligonucleotide of any one of the preceding Embodiments, wherein the base sequence of the oligonucleotide is or comprises a sequence that differs at no more than 1, 2, 3, 4, or 5 positions from CCCAGCAGCUUCAGUCCCUUUCTUIUCGAU (SEQ ID NO.: 530).
[2142] 729. The oligonucleotide of any one of the preceding Embodiments, wherein the base sequence of the oligonucleotide is or comprises a sequence that differs at no more than 1, 2, 3, 4, or 5 positions from CCCAGCAGCUUCAGUCCCUUUCTUIUCGAU (SEQ ID NO.: 530).
[2143] 730. The oligonucleotide of any one of the preceding Embodiments, wherein the base sequence of the oligonucleotide is or comprises CCCAGCAGCUUCAGUCCCUUUCTUIUCGAU (SEQ ID NO.: 530), wherein each U can be independently replaced with T and vice versa.
[2144] 731. The oligonucleotide of any one of the preceding Embodiments, wherein the base sequence of the oligonucleotide is or comprises CCCAGCAGCUUCAGUCCCUUUCTUIUCGAU (SEQ ID NO.: 530), wherein each U can be independently replaced with T and vice versa.
[2145] 732. The oligonucleotide of any one of the preceding Embodiments, wherein the base sequence of the oligonucleotide is or comprises CCCAGCAGCUUCAGUCCCUUUCTUIUCGAU (SEQ ID NO.: 530), wherein each U can be independently replaced with T and vice versa.
[2146] 733. The oligonucleotide of any one of the preceding Embodiments, wherein the base sequence of the oligonucleotide is or comprises CCCAGCAGCUUCAGUCCCUUUCTUIUCGAU (SEQ ID NO.: 530).
[2147] 734. The oligonucleotide of any one of the preceding Embodiments, wherein the base sequence of the oligonucleotide is CCCAGCAGCUUCAGUCCCUUUCTUIUCGAU (SEQ ID NO.: 530).
[2148] 735. The oligonucleotide of any one of Embodiments 1-724, wherein the base sequence of the oligonucleotide is or comprises CCCAGCAGCUUCAGUCCCUUUCTUIUCGAU (SEQ ID NO.: 530).
[2149] 736. The oligonucleotide of any one of Embodiments 1-724, wherein the base sequence of the oligonucleotide is CCCAGCAGCUUCAGUCCCUUUCTUIUCGAU (SEQ ID NO.: 530).
[2150] 737. The oligonucleotide of any one of Embodiments 1-724, wherein the base sequence of the oligonucleotide is or comprises CCCAGCAGCUUCAGUCCCUUUCUAIUCGAU (SEQ ID NO.: 199).
[2151] 738. The oligonucleotide of any one of Embodiments 1-724, wherein the base sequence of the oligonucleotide is CCCAGCAGCUUCAGUCCCUUUCUAIUCGAU (SEQ ID NO.: 199).
[2152] 739. The oligonucleotide of any one of the preceding Embodiments, comprising an optionally protected nucleobase of a nucleoside selected from b001U, b002U, b003U, b004U, b005U, b006U, b007U, b008U, b009U, b011U, b012U, b013U, b001A, b002A, b003A, b001G, b002G, b001C, b002C, b003C, b004C, b005C, b006C, b007C, b008C, b009C, b002I, b003I, b004I, b014I, and zdnp.
[2153] 740. The oligonucleotide of any one of the preceding Embodiments, comprising an optionally protected nucleobase of a nucleoside selected from b001U, b002U, b003U, b004U, b005U, b006U, b008U, b002A, b001G, b004C, b007U, b001A, b001C, b002C, b003C, b002I, b003I, b009U, b003A, and b007C.
[2154] 741. An oligonucleotide, comprising an optionally protected nucleobase of a nucleoside selected from b001U, b002U, b003U, b004U, b005U, b006U, b007U, b008U, b009U, b011U, b012U, b013U, b001A, b002A, b003A, b001G, b002G, b001C, b002C, b003C, b004C, b005C, b006C, b007C, b008C, b009C, b002I, b003I, b004I, b014I, and zdnp.
[2155] 742. An oligonucleotide, comprising an optionally protected nucleobase of a nucleoside selected from b001U, b002U, b003U, b004U, b005U, b006U, b008U, b002A, b001G, b004C, b007U, b001A, b001C, b002C, b003C, b002I, b003I, b009U, b003A, and b007C.
[2156] 743. The oligonucleotide of any one of the preceding Embodiments, comprising optionally protected nucleobase b001U.
[2157] 744. The oligonucleotide of any one of the preceding Embodiments, comprising optionally protected nucleobase b002U.
[2158] 745. The oligonucleotide of any one of the preceding Embodiments, comprising optionally protected nucleobase b003U.
[2159] 746. The oligonucleotide of any one of the preceding Embodiments, comprising optionally protected nucleobase b004U.
[2160] 747. The oligonucleotide of any one of the preceding Embodiments, comprising optionally protected nucleobase b005U.
[2161] 748. The oligonucleotide of any one of the preceding Embodiments, comprising optionally protected nucleobase b006U.
[2162] 749. The oligonucleotide of any one of the preceding Embodiments, comprising optionally protected nucleobase b007U.
[2163] 750. The oligonucleotide of any one of the preceding Embodiments, comprising optionally protected nucleobase b008U.
[2164] 751. The oligonucleotide of any one of the preceding Embodiments, comprising optionally protected nucleobase b009U.
[2165] 752. The oligonucleotide of any one of the preceding Embodiments, comprising optionally protected nucleobase b011U.
[2166] 753. The oligonucleotide of any one of the preceding Embodiments, comprising optionally protected nucleobase b012U.
[2167] 754. The oligonucleotide of any one of the preceding Embodiments, comprising optionally protected nucleobase b013U.
[2168] 755. The oligonucleotide of any one of the preceding Embodiments, comprising optionally protected nucleobase b001A.
[2169] 756. The oligonucleotide of any one of the preceding Embodiments, comprising optionally protected nucleobase b002A.
[2170] 757. The oligonucleotide of any one of the preceding Embodiments, comprising optionally protected nucleobase b003A.
[2171] 758. The oligonucleotide of any one of the preceding Embodiments, comprising optionally protected nucleobase b001G.
[2172] 759. The oligonucleotide of any one of the preceding Embodiments, comprising optionally protected nucleobase b002G.
[2173] 760. The oligonucleotide of any one of the preceding Embodiments, comprising optionally protected nucleobase b001C.
[2174] 761. The oligonucleotide of any one of the preceding Embodiments, comprising optionally protected nucleobase b002C.
[2175] 762. The oligonucleotide of any one of the preceding Embodiments, comprising optionally protected nucleobase b003C.
[2176] 763. The oligonucleotide of any one of the preceding Embodiments, comprising optionally protected nucleobase b004C.
[2177] 764. The oligonucleotide of any one of the preceding Embodiments, comprising optionally protected nucleobase b005C.
[2178] 765. The oligonucleotide of any one of the preceding Embodiments, comprising optionally protected nucleobase b006C.
[2179] 766. The oligonucleotide of any one of the preceding Embodiments, comprising optionally protected nucleobase b007C.
[2180] 767. The oligonucleotide of any one of the preceding Embodiments, comprising optionally protected nucleobase b008C.
[2181] 768. The oligonucleotide of any one of the preceding Embodiments, comprising optionally protected nucleobase b009C.
[2182] 769. The oligonucleotide of any one of the preceding Embodiments, comprising optionally protected nucleobase b002I.
[2183] 770. The oligonucleotide of any one of the preceding Embodiments, comprising optionally protected nucleobase b003I.
[2184] 771. The oligonucleotide of any one of the preceding Embodiments, comprising optionally protected nucleobase b004I.
[2185] 772. The oligonucleotide of any one of the preceding Embodiments, comprising optionally protected nucleobase b014I.
[2186] 773. The oligonucleotide of any one of the preceding Embodiments, comprising optionally protected nucleobase and zdnp.
[2187] 774. The oligonucleotide of any one of the preceding Embodiments, comprising an optionally protected nucleoside selected from aC, b001U, b002U, b003U, b004U, b005U, b006U, b007U, b008U, b009U, b010U, b011U, b012U, b013U, b001A, b001rA, b002A, b003A, b001G, b002G, b001C, b002C, b003C, b003mC, b004C, b005C, b006C, b007C, b008C, b002I, b003I, b004I, b014I, Asm01, Gsm01, 5MSfC, Usm04, 5MRdT, Csm04, Csm11, Gsm11, Tsm11, b009Csm11, b009Csm12, Gsm12, Tsm12, Csm12, rCsm13, rCsm14, Csm15, Csm16, Csm17, L034, zdnp, and Tsm18.
[2188] 775. The oligonucleotide of any one of the preceding Embodiments, comprising an optionally protected nucleoside selected from b001U, b002U, b003U, b004U, b005U, b006U, b008U, b002A, b001G, b004C, b007U, b001A, b001C, b002C, b003C, b002I, b003I, b009U, b003A, b007C, Asm01, Gsm01, 5MSfC, Usm04, 5MRdT, Csm15, Csm16, rCsm14, Csm17 and Tsm18.
[2189] 776. An oligonucleotide, comprising an optionally protected nucleoside selected from aC, b001U, b002U, b003U, b004U, b005U, b006U, b007U, b008U, b009U, b010U, b011U, b012U, b013U, b001A, b001rA, b002A, b003A, b001G, b002G, b001C, b002C, b003C, b003mC, b004C, b005C, b006C, b007C, b008C, b002I, b003I, b004I, b014I, Asm01, Gsm01, 5MSfC, Usm04, 5MRdT, Csm04, Csm11, Gsm11, Tsm11, b009Csm11, b009Csm12, Gsm12, Tsm12, Csm12, rCsm13, rCsm14, Csm15, Csm16, Csm17, L034, zdnp, and Tsm18.
[2190] 777. An oligonucleotide, comprising an optionally protected nucleoside selected from b001U, b002U, b003U, b004U, b005U, b006U, b008U, b002A, b001G, b004C, b007U, b001A, b001C, b002C, b003C, b002I, b003I, b009U, b003A, b007C, Asm01, Gsm01, 5MSfC, Usm04, 5MRdT, Csm15, Csm16, rCsm14, Csm17 and Tsm18.
[2191] 778. The oligonucleotide of any one of the preceding Embodiments, comprising an optionally protected sugar of a nucleoside selected from Asm01, Gsm01, 5MSfC, Usm04, 5MRdT, Csm15, Csm16, rCsm14, Csm17 and Tsm18.
[2192] 779. The oligonucleotide of any one of the preceding Embodiments, comprising optionally protected nucleoside aC.
[2193] 780. The oligonucleotide of any one of the preceding Embodiments, comprising optionally protected nucleoside b001U.
[2194] 781. The oligonucleotide of any one of the preceding Embodiments, comprising optionally protected nucleoside b002U.
[2195] 782. The oligonucleotide of any one of the preceding Embodiments, comprising optionally protected nucleoside b003U.
[2196] 783. The oligonucleotide of any one of the preceding Embodiments, comprising optionally protected nucleoside b004U.
[2197] 784. The oligonucleotide of any one of the preceding Embodiments, comprising optionally protected nucleoside b005U.
[2198] 785. The oligonucleotide of any one of the preceding Embodiments, comprising optionally protected nucleoside b006U.
[2199] 786. The oligonucleotide of any one of the preceding Embodiments, comprising optionally protected nucleoside b007U.
[2200] 787. The oligonucleotide of any one of the preceding Embodiments, comprising optionally protected nucleoside b008U.
[2201] 788. The oligonucleotide of any one of the preceding Embodiments, comprising optionally protected nucleoside b009U.
[2202] 789. The oligonucleotide of any one of the preceding Embodiments, comprising optionally protected nucleoside b010U.
[2203] 790. The oligonucleotide of any one of the preceding Embodiments, comprising optionally protected nucleoside b011U.
[2204] 791. The oligonucleotide of any one of the preceding Embodiments, comprising optionally protected nucleoside b012U.
[2205] 792. The oligonucleotide of any one of the preceding Embodiments, comprising optionally protected nucleoside b013U.
[2206] 793. The oligonucleotide of any one of the preceding Embodiments, comprising optionally protected nucleoside b001A.
[2207] 794. The oligonucleotide of any one of the preceding Embodiments, comprising optionally protected nucleoside b001rA.
[2208] 795. The oligonucleotide of any one of the preceding Embodiments, comprising optionally protected nucleoside b002A.
[2209] 796. The oligonucleotide of any one of the preceding Embodiments, comprising optionally protected nucleoside b003A.
[2210] 797. The oligonucleotide of any one of the preceding Embodiments, comprising optionally protected nucleoside b001G.
[2211] 798. The oligonucleotide of any one of the preceding Embodiments, comprising optionally protected nucleoside b002G.
[2212] 799. The oligonucleotide of any one of the preceding Embodiments, comprising optionally protected nucleoside b001C.
[2213] 800. The oligonucleotide of any one of the preceding Embodiments, comprising optionally protected nucleoside b002C.
[2214] 801. The oligonucleotide of any one of the preceding Embodiments, comprising optionally protected nucleoside b003C.
[2215] 802. The oligonucleotide of any one of the preceding Embodiments, comprising optionally protected nucleoside b003mC.
[2216] 803. The oligonucleotide of any one of the preceding Embodiments, comprising optionally protected nucleoside b004C.
[2217] 804. The oligonucleotide of any one of the preceding Embodiments, comprising optionally protected nucleoside b005C.
[2218] 805. The oligonucleotide of any one of the preceding Embodiments, comprising optionally protected nucleoside b006C.
[2219] 806. The oligonucleotide of any one of the preceding Embodiments, comprising optionally protected nucleoside b007C.
[2220] 807. The oligonucleotide of any one of the preceding Embodiments, comprising optionally protected nucleoside b008C.
[2221] 808. The oligonucleotide of any one of the preceding Embodiments, comprising optionally protected nucleoside b002I.
[2222] 809. The oligonucleotide of any one of the preceding Embodiments, comprising optionally protected nucleoside b003I.
[2223] 810. The oligonucleotide of any one of the preceding Embodiments, comprising optionally protected nucleoside b004I.
[2224] 811. The oligonucleotide of any one of the preceding Embodiments, comprising optionally protected nucleoside b014I.
[2225] 812. The oligonucleotide of any one of the preceding Embodiments, comprising optionally protected nucleoside Asm01.
[2226] 813. The oligonucleotide of any one of the preceding Embodiments, comprising optionally protected nucleoside Gsm01.
[2227] 814. The oligonucleotide of any one of the preceding Embodiments, comprising optionally protected nucleoside 5MSfC.
[2228] 815. The oligonucleotide of any one of the preceding Embodiments, comprising optionally protected nucleoside Usm04.
[2229] 816. The oligonucleotide of any one of the preceding Embodiments, comprising optionally protected nucleoside 5MRdT.
[2230] 817. The oligonucleotide of any one of the preceding Embodiments, comprising optionally protected nucleoside Csm04.
[2231] 818. The oligonucleotide of any one of the preceding Embodiments, comprising optionally protected nucleoside Csm11.
[2232] 819. The oligonucleotide of any one of the preceding Embodiments, comprising optionally protected nucleoside Gsm11.
[2233] 820. The oligonucleotide of any one of the preceding Embodiments, comprising optionally protected nucleoside Tsm11.
[2234] 821. The oligonucleotide of any one of the preceding Embodiments, comprising optionally protected nucleoside b009Csm11.
[2235] 822. The oligonucleotide of any one of the preceding Embodiments, comprising optionally protected nucleoside b009Csm12.
[2236] 823. The oligonucleotide of any one of the preceding Embodiments, comprising optionally protected nucleoside Gsm12.
[2237] 824. The oligonucleotide of any one of the preceding Embodiments, comprising optionally protected nucleoside Tsm12.
[2238] 825. The oligonucleotide of any one of the preceding Embodiments, comprising optionally protected nucleoside Csm12.
[2239] 826. The oligonucleotide of any one of the preceding Embodiments, comprising optionally protected nucleoside rCsm13.
[2240] 827. The oligonucleotide of any one of the preceding Embodiments, comprising optionally protected nucleoside rCsm14.
[2241] 828. The oligonucleotide of any one of the preceding Embodiments, comprising optionally protected nucleoside Csm15.
[2242] 829. The oligonucleotide of any one of the preceding Embodiments, comprising optionally protected nucleoside Csm16.
[2243] 830. The oligonucleotide of any one of the preceding Embodiments, comprising optionally protected nucleoside Csm17.
[2244] 831. The oligonucleotide of any one of the preceding Embodiments, comprising optionally protected abasic nucleoside.
[2245] 832. The oligonucleotide of any one of the preceding Embodiments, comprising optionally protected L010.
[2246] 833. The oligonucleotide of any one of the preceding Embodiments, comprising optionally protected nucleoside L034.
[2247] 834. The oligonucleotide of any one of the preceding Embodiments, comprising optionally protected nucleoside zdnp.
[2248] 835. The oligonucleotide of any one of the preceding Embodiments, comprising optionally protected nucleoside Tsm18.
[2249] 836. The oligonucleotide of any one of the preceding Embodiments, wherein each optionally protected nucleobase or nucleoside is independently an optionally substituted nucleobase or nucleoside, respectively.
[2250] 837. The oligonucleotide of any one of the preceding Embodiments, wherein each optionally protected or substituted nucleobase or nucleoside is not protected or substituted, respectively.
[2251] 838. The oligonucleotide of any one of the preceding Embodiments, comprising an internucleotidic linkage having the structure of —Y—P(═W)(—X—R^{L})—Z—.
[2252] 839. An oligonucleotide, comprising an internucleotidic linkage having the structure of —Y—P(═W)(—X—R^{L})—Z—.
[2253] 840. The oligonucleotide of Embodiment 838 or 839, wherein W is S.
[2254] 841. The oligonucleotide of Embodiment 838 or 839, wherein W is S.
[2255] 842. The oligonucleotide of any one of Embodiments 838-841, wherein Y is —O—.
[2256] 843. The oligonucleotide of any one of Embodiments 838-842, wherein Z is a covalent bond.
[2257] 844. The oligonucleotide of any one of Embodiments 838-842, wherein Z is —O—.
[2258] 845. An oligonucleotide, comprising an internucleotidic linkage comprising —X—R^{L}.
[2259] 846. The oligonucleotide of any one of the preceding Embodiments, comprising an internucleotidic linkage comprising —X—R^{L}.
[2260] 847. The oligonucleotide of any one of Embodiments 838-846, wherein —X—R^{L} is —N(R′)SO₂R″, wherein R″ is R′, —OR′, or —N(R′)₂.
[2261] 848. The oligonucleotide of any one of Embodiments 838-846, wherein —X—R^{L} is —NHSO₂R″, wherein R″ is optionally substituted C₁₋₆ aliphatic.
[2262] 849. The oligonucleotide of any one of Embodiments 838-846, wherein —X—R^{L} is —NHSO₂R″, wherein R″ is methyl.
[2263] 850. The oligonucleotide of any one of Embodiments 838-846, wherein —X—R^{L} is —NHSO₂R″, wherein R″ is optionally substituted phenyl.
[2264] 851. The oligonucleotide of any one of the preceding Embodiments, comprising n002.
[2265] 852. The oligonucleotide of any one of the preceding Embodiments, comprising n006.
[2266] 853. The oligonucleotide of any one of the preceding Embodiments, comprising n020.
[2267] 854. The oligonucleotide of any one of the preceding Embodiments, comprising —OP(═O)(NHSO₂CH₃)O—.
[2268] 855. The oligonucleotide of any one of the preceding Embodiments, wherein the first one, two, or three internucleotidic linkages are each independently an internucleotidic linkage of any one of Embodiments 847-854.
[2269] 856. The oligonucleotide of any one of the preceding Embodiments, wherein the last one, two, or three internucleotidic linkages are each independently an internucleotidic linkage of any one of Embodiments 847-854.
[2270] 857. The oligonucleotide of any one of the preceding Embodiments, wherein one or more internal internucleotidic linkages are each independently an internucleotidic linkage of any one of Embodiments 847-854.
[2271] 858. The oligonucleotide of any one of Embodiments 838-846, wherein —X—R^{L} is —N(R′)C(O)R″, wherein R″ is R′, —OR′, or —N(R′)₂.
[2272] 859. The oligonucleotide of any one of Embodiments 838-846, wherein —X—R^{L} is —NHC(O)R″, wherein R″ is optionally substituted C₁₋₆ aliphatic.
[2273] 860. The oligonucleotide of any one of Embodiments 838-846, wherein —X—R^{L} is —NHC(O)R″, wherein R″ is methyl.
[2274] 861. The oligonucleotide of any one of Embodiments 838-846, wherein —X—R^{L} is —NHC(O)R″, wherein R″ is optionally substituted phenyl.
[2275] 862. The oligonucleotide of any one of Embodiments 838-846, wherein —X—R^{L} is —NHC(O)R″, wherein R″ is —OR′.
[2276] 863. The oligonucleotide of any one of Embodiments 838-846, wherein —X—R^{L} is —NHC(O)R″, wherein R″ is —N(R′)₂.
[2277] 864. The oligonucleotide of any one of Embodiments 838-846, wherein —X—R^{L} is —N(R′)P(O)(R″)₂, wherein each R″ is independently R′, —OR′, or —N(R′)₂.
[2278] 865. The oligonucleotide of any one of Embodiments 838-846, wherein —X—R^{L} is —N(R′)P(S)(R″)₂, wherein each R″ is independently R′, —OR′, or —N(R′)₂.
[2279] 866. The oligonucleotide of any one of Embodiments 838-846, wherein —X—R^{L} is selected from Table L-1, L-2, L-3, L-4, L-5 or L-6.
[2280] 867. The oligonucleotide of any one of the preceding Embodiments, wherein about 20%-90% (e.g., about 20%-80%, 20%-70%, 30%-90%, 30%-80%, 30%-70%, 30%-60%, 30%-50%, about 30%, 40%, 50%, 60% or 70%) of all sugars of the oligonucleotide are 2′-F modified sugars.
[2281] 868. The oligonucleotide of any one of the preceding Embodiments, wherein about 30%-70% (e.g., about 30%-60%, 30%-50%, about 30%, 40%, 50%, 60% or 70%) of all sugars of the oligonucleotide are 2′-F modified sugars.
[2282] 869. The oligonucleotide of any one of the preceding Embodiments, wherein about 30%-60% (e.g., about 40%-60%, 30%-50%, about 30%, 40%, 50%, 60% or 70%) of all sugars of the oligonucleotide are 2′-F modified sugars.
[2283] 870. The oligonucleotide of any one of the preceding Embodiments, wherein at least about 65% of all sugars of the oligonucleotide are 2′-F modified sugars.
[2284] 871. The oligonucleotide of any one of the preceding Embodiments, wherein at least about 70% of all sugars of the oligonucleotide are 2′-F modified sugars.
[2285] 872. The oligonucleotide of any one of the preceding Embodiments, wherein at least about 75% of all sugars of the oligonucleotide are 2′-F modified sugars.
[2286] 873. The oligonucleotide of any one of the preceding Embodiments, wherein at least about 80% of all sugars of the oligonucleotide are 2′-F modified sugars.
[2287] 874. The oligonucleotide of any one of the preceding Embodiments, wherein at least about 85% of all sugars of the oligonucleotide are 2′-F modified sugars.
[2288] 875. The oligonucleotide of any one of the preceding Embodiments, wherein at least about 90% of all sugars of the oligonucleotide are 2′-F modified sugars.
[2289] 876. The oligonucleotide of any one of the preceding Embodiments, wherein about 20%-90% (e.g., about 20%-80%, 20%-70%, 30%-90%, 30%-80%, 30%-70%, 30%-60%, 30%-50%, about 30%, 40%, 50%, 60% or 70%) of all sugars of the oligonucleotide are each independently 2′-OR modified sugars wherein R is not —H.
[2290] 877. The oligonucleotide of any one of the preceding Embodiments, wherein about 30%-70% (e.g., about 30%-60%, 30%-50%, about 30%, 40%, 50%, 60% or 70%) of all sugars of the oligonucleotide are each independently 2′-OR modified sugars wherein R is not —H.
[2291] 878. The oligonucleotide of any one of the preceding Embodiments, wherein about 30%-60% (e.g., about 40%-60%, 30%-50%, about 30%, 40%, 50%, 60% or 70%) of all sugars of the oligonucleotide are each independently 2′-OR modified sugars wherein R is not —H.
[2292] 879. The oligonucleotide of any one of Embodiments 876-878, wherein a 2′-OR modified sugar is a 2′-OR modified sugar wherein R is optionally substituted C₁₋₆ aliphatic.
[2293] 880. The oligonucleotide of any one of the preceding Embodiments, wherein a 2′-OR modified sugar is a 2′-OMe modified sugar.
[2294] 881. The oligonucleotide of any one of the preceding Embodiments, wherein a 2′-OR modified sugar is a 2′-MOE modified sugar.
[2295] 882. The oligonucleotide of any one of the preceding Embodiments, wherein a 2′-OR modified sugar is a bicyclic sugar.
[2296] 883. The oligonucleotide of any one of the preceding Embodiments, wherein a 2′-OR modified sugar is a LNA sugar.
[2297] 884. The oligonucleotide of any one of the preceding Embodiments, wherein a 2′-OR modified sugar is a cEt sugar.
[2298] 885. The oligonucleotide of any one of Embodiments 876-878, wherein each 2′-OR modified sugar is independently a 2′-OR modified sugar wherein R is optionally substituted C₁₋₆ aliphatic.
[2299] 886. The oligonucleotide of any one of Embodiments 876-878, wherein each 2′-OR modified sugar is independently a 2′-OMe or 2′-MOE modified sugar.
[2300] 887. The oligonucleotide of any one of Embodiments 876-878, wherein each 2′-OR modified sugar is independently a 2′-OMe or 2′-MOE modified sugar, wherein at least one is a 2′-OMe modified sugar and at least one is a 2′-MOE modified sugar.
[2301] 888. The oligonucleotide of any one of Embodiments 876-878, wherein each 2′-OR modified sugar is a 2′-OMe modified sugar.
[2302] 889. The oligonucleotide of any one of the preceding Embodiments, wherein the first domain comprises one or more (e.g., 1-20, 1-15, 1-14, 1-13, 1-12, 1-11, 1-10, 2-20, 3-15, 4-15, 5-15, 1, 2, 3, 4, 5, 6, 7, 8, 9, 10, 11, 12, 13, 14, 15, 16, 17, 18, 19, 20, etc.) 2′-F blocks and one or more (e.g., 1-20, 1-15, 1-14, 1-13, 1-12, 1-11, 1-10, 2-20, 3-15, 4-15, 5-15, 1, 2, 3, 4, 5, 6, 7, 8, 9, 10, 11, 12, 13, 14, 15, 16, 17, 18, 19, 20, etc.) separating blocks, wherein each sugar in each 2′-F block is independently a 2′-F modified sugar, and wherein each sugar in each separating block is independently a sugar other than a 2′-F modified sugar.
[2303] 890. The oligonucleotide of any one of the preceding Embodiments, wherein there are 2 or more 2′-F blocks in the first domain.
[2304] 891. The oligonucleotide of any one of the preceding Embodiments, wherein there are 3 or more 2′-F blocks in the first domain.
[2305] 892. The oligonucleotide of any one of the preceding Embodiments, wherein there are 4 or more 2′-F blocks in the first domain.
[2306] 893. The oligonucleotide of any one of the preceding Embodiments, wherein there are 5 or more 2′-F blocks in the first domain.
[2307] 894. The oligonucleotide of any one of the preceding Embodiments, wherein there are 2 or more separating blocks in the first domain.
[2308] 895. The oligonucleotide of any one of the preceding Embodiments, wherein there are 3 or more separating blocks in the first domain.
[2309] 896. The oligonucleotide of any one of the preceding Embodiments, wherein there are 4 or more separating blocks in the first domain.
[2310] 897. The oligonucleotide of any one of the preceding Embodiments, wherein there are 5 or more separating blocks in the first domain.
[2311] 898. The oligonucleotide of any one of the preceding Embodiments, wherein each sugar in each separating block is independently a 2′-modified sugar.
[2312] 899. The oligonucleotide of any one of the preceding Embodiments, wherein a sugar in a separating block is independently a 2′-OR sugar wherein R is not —H.
[2313] 900. The oligonucleotide of any one of the preceding Embodiments, wherein each separating block independently comprises a 2′-OR modified sugar wherein R is not —H.
[2314] 901. The oligonucleotide of any one of the preceding Embodiments, wherein a sugar in a separating block is independently a 2′-OR sugar wherein R is optionally substituted C₁₋₆ aliphatic.
[2315] 902. The oligonucleotide of any one of the preceding Embodiments, wherein each separating block independently comprises a 2′-OR modified sugar wherein R optionally substituted C₁₋₆ aliphatic.
[2316] 903. The oligonucleotide of any one of the preceding Embodiments, wherein each sugar in each separating block is independently a 2′-OR modified sugar or a bicyclic sugar, wherein R is optionally substituted C₁₋₆ aliphatic.
[2317] 904. The oligonucleotide of any one of the preceding Embodiments, wherein each sugar in a separating block is independently a 2′-OR modified sugar wherein R is optionally substituted C₁₋₆ aliphatic.
[2318] 905. The oligonucleotide of any one of the preceding Embodiments, wherein each sugar in each separating block is independently a 2′-OR modified sugar wherein R is optionally substituted C₁₋₆ aliphatic.
[2319] 906. The oligonucleotide of any one of the preceding Embodiments, wherein each sugar in a separating block is independently a 2′-OMe or 2′-MOE modified sugar.
[2320] 907. The oligonucleotide of any one of the preceding Embodiments, wherein each sugar in each separating block is independently a 2′-OMe or 2′-MOE modified sugar.
[2321] 908. The oligonucleotide of any one of the preceding Embodiments, wherein a sugar in a separating block is a 2′-OME modified sugar.
[2322] 909. The oligonucleotide of any one of the preceding Embodiments, wherein each sugar in a separating block is independently a 2′-OMe modified sugar.
[2323] 910. The oligonucleotide of any one of the preceding Embodiments, wherein each sugar in a separating block is independently a 2′-MOE modified sugar.
[2324] 911. The oligonucleotide of any one of Embodiments 1-897, wherein each sugar in each separating block is independently a 2′-OMe modified sugar.
[2325] 912. The oligonucleotide of any one of Embodiments 1-897, wherein each sugar in each separating block is independently a 2′-MOE modified sugar.
[2326] 913. The oligonucleotide of any one of Embodiments 889-912, wherein in each 2′-F block there are independently about 1-20 (e.g., 1-20, 1-15, 1-14, 1-13, 1-12, 1-11, 1-10, 2-20, 3-15, 4-15, 5-15, 1, 2, 3, 4, 5, 6, 7, 8, 9, 10, 11, 12, 13, 14, 15, 16, 17, 18, 19, 20, etc.) 2′-F modified sugars.
[2327] 914. The oligonucleotide of any one of Embodiments 889-912, wherein in each 2′-F block there are about 1-10, e.g., 1, 2, 3, 4, 5, 6, 7, 8, 9, or 10, 2′-F modified sugars.
[2328] 915. The oligonucleotide of any one of Embodiments 889-912, wherein in each 2′-F block there are about 1, 2, 3, 4 or 5 2′-F modified sugars.
[2329] 916. The oligonucleotide of any one of Embodiments 889-912, wherein in each 2′-F block there are about 1, 2, or 3 2′-F modified sugars.
[2330] 917. The oligonucleotide of any one of Embodiments 889-916, wherein in each separating block there are independently about 1-20 (e.g., 1-20, 1-15, 1-14, 1-13, 1-12, 1-11, 1-10, 2-20, 3-15, 4-15, 5-15, 1, 2, 3, 4, 5, 6, 7, 8, 9, 10, 11, 12, 13, 14, 15, 16, 17, 18, 19, 20, etc.) sugars.
[2331] 918. The oligonucleotide of any one of Embodiments 889-916, wherein in each separating block there are about 1-10, e.g., 1, 2, 3, 4, 5, 6, 7, 8, 9, or 10 sugars.
[2332] 919. The oligonucleotide of any one of Embodiments 889-916, wherein in each separating block there are about 1, 2, 3, 4 or 5 sugars.
[2333] 920. The oligonucleotide of any one of Embodiments 889-916, wherein in each separating there are about 1, 2, or 3 sugars.
[2334] 921. The oligonucleotide of any one of Embodiments 889-920, wherein each block in a first domain that is bonded to a 2′-F block in a first domain is a separating block.
[2335] 922. The oligonucleotide of any one of Embodiments 889-921, wherein each block in a first domain that is bonded to a separating block in a first domain is a 2′-F block.
[2336] 923. The oligonucleotide of any one of the preceding Embodiments, wherein the oligonucleotide comprises two or more 2′-F modified sugar blocks, wherein each 2′-F modified sugar block independently comprises or consists of 2, 3, 4, 5, 6, 7, 8, 9, or 10 consecutive 2′-F modified sugars, wherein each two consecutive 2′-F modified sugar blocks are independently separated by a separating block which separating block comprises one or more sugars that are independently not 2′-F modified sugars and no consecutive 2′-F modified sugars.
[2337] 924. The oligonucleotide of any one of the preceding Embodiments, wherein at least 50%, 60%, 70%, 75%, 80%, 85%, 90%, 95%, or 99% (e.g., 50%-100%, 60%-100%, 70-100%, 75%-100%, 80%-100%, 90%-100%, 95%-100%, 60%-95%, 70%-95%, 75-95%, 80-95%, 85-95%, 90-95%, 50%, 60%, 70%, 75%, 80%, 85%, 90%, 95%, or 99%, etc.) of all, or all phosphorothioate internucleotidic linkages, are Sp.
[2338] 925. The oligonucleotide of any one of the preceding Embodiments, wherein the first domain is at the 5′ side of a second domain.
[2339] 926. The oligonucleotide of any one of the preceding Embodiments, wherein the first domain is at the 3′ side of a second domain.
[2340] 927. The oligonucleotide of any one of the preceding Embodiments, wherein in the second domain the first subdomain is at the 5′ side of the second subdomain, and the third subdomain is at the 3′ side of the second subdomain.
[2341] 928. The oligonucleotide of any one of the preceding Embodiments, wherein the oligonucleotide comprises a 5′-N₁N₀N₋₁-3′, wherein each of N₋₁, N₀, and N₁ is independently a nucleoside.
[2342] 929. The oligonucleotide of any one of the preceding Embodiments, wherein the oligonucleotide comprises 5′-N₂N₁N₀N₋₁N₋₂-3′ wherein each of N₂, N₁, N₀, N₋₁, and N₋₂ is independently a nucleoside.
[2343] 930. The oligonucleotide of any one of the preceding Embodiments, wherein the oligonucleotide comprises 5′-N₃N₂N₁N₀N₋₁N₋₂N₋₃-3′ wherein each of N₃, N₂, N₁, N₀, N₋₁, N₋₂, and N₋₃ is independently a nucleoside.
[2344] 931. The oligonucleotide of any one of the preceding Embodiments, wherein the oligonucleotide comprises 5′-N₄N₃N₂N₁N₀N₋₁N₋₂N₋₃N₋₄-3′ wherein each of N₄, N₃, N₂, N₁, N₀, N₋₁, N₋₂, N₋₃, and N₋₄ is independently a nucleoside.
[2345] 932. The oligonucleotide of any one of the preceding Embodiments, wherein the oligonucleotide comprises 5′-N₅N₄N₃N₂N₁N₀N₋₁N₋₂N₋₃N₋₄N₋₅-3′ wherein each of N₅, N₄, N₃, N₂, N₁, N₀, N₋₁, N₋₂, N₋₃, N₋₄, and N₋₅ is independently a nucleoside.
[2346] 933. The oligonucleotide of any one of the preceding Embodiments, wherein the oligonucleotide comprises 5′-N₆N₅N₄N₃N₂N₁N₀N₋₁N₋₂N₋₃N₋₄N₋₅N₋₆-3′ wherein each of N₆, N₅, N₄, N₃, N₂, N₁, N₀, N₋₁, N₋₂, N₋₃, N₋₄, N₋₅, and N₋₆ is independently a nucleoside.
[2347] 934. The oligonucleotide of any one of the preceding Embodiments, wherein the second subdomain comprises a 5′-N₁N₀N₋₁-3′, wherein each of N₋₁, N₀, and N₁ is independently a nucleoside.
[2348] 935. An oligonucleotide comprising a 5′-N₁N₀N₋₁-3′ as described in the present disclosure.
[2349] 936. The oligonucleotide of any one of the preceding Embodiments, wherein when the oligonucleotide is aligned with a target nucleic acid, N₀ is opposite to a target adenosine.
[2350] 937. The oligonucleotide of any one of the preceding Embodiments, wherein each of N₋₁, N₀, and N₁ independently has a 2′-F modified sugar, a natural RNA sugar, or a sugar having no 2′-substituent replacing 2′-OH of a natural RNA sugar.
[2351] 938. The oligonucleotide of any one of the preceding Embodiments, wherein each of N₋₁, N₀, and N₁ independently has a 2′-F modified sugar, a natural RNA sugar, or a sugar having no 2′-substituents.
[2352] 939. The oligonucleotide of any one of the preceding Embodiments, wherein each of N₋₁, N₀, and N₁ independently has a 2′-F modified sugar, a natural RNA sugar, or a natural DNA sugar.
[2353] 940. The oligonucleotide of any one of the preceding Embodiments, wherein no more than one of N₋₁, N₀, and N₁ has a 2′-F modified sugar.
[2354] 941. The oligonucleotide of any one of the preceding Embodiments, wherein no more than one of N₋₁, N₀, and N₁ has a natural RNA sugar.
[2355] 942. The oligonucleotide of any one of the preceding Embodiments, wherein the sugar of N₁ is a 2′-F modified sugar.
[2356] 943. The oligonucleotide of any one of Embodiments 1-941, wherein the sugar of N₀ is a sugar comprising no substituent at a position corresponding to 2′-OH of a natural RNA sugar.
[2357] 944. The oligonucleotide of any one of Embodiments 1-941, wherein the sugar of N₀ is a sugar comprising no 2′-substituent.
[2358] 945. The oligonucleotide of any one of Embodiments 1-941, wherein the sugar of N₁ is a natural DNA sugar.
[2359] 946. The oligonucleotide of any one of Embodiments 1-941, wherein the sugar of N₁ is a natural RNA sugar.
[2360] 947. The oligonucleotide of any one of the preceding Embodiments, wherein the sugar of N₀ is a modified sugar.
[2361] 948. The oligonucleotide of any one of the preceding Embodiments, wherein the sugar of N₀ is a 2′-F modified sugar.
[2362] 949. The oligonucleotide of any one of Embodiments 1-946, wherein the sugar of N₀ is a sugar comprising no substituent at a position corresponding to 2′-OH of a natural RNA sugar.
[2363] 950. The oligonucleotide of any one of Embodiments 1-946, wherein the sugar of N₀ is a sugar comprising no 2′-substituent.
[2364] 951. The oligonucleotide of any one of Embodiments 1-946, wherein the sugar of N₀ is a sugar is a 5′-modified sugar.
[2365] 952. The oligonucleotide of any one of Embodiments 1-946, wherein the sugar of N₀ is a sugar is a 5′-Me modified sugar.
[2366] 953. The oligonucleotide of any one of Embodiments 1-946, wherein the sugar of N₀ is a sugar is a non-cyclic sugar.
[2367] 954. The oligonucleotide of any one of Embodiments 1-946, wherein the sugar of N₀ is a sugar is sm01.
[2368] 955. The oligonucleotide of any one of Embodiments 1-946, wherein the sugar of N₀ is a sugar is sm15.
[2369] 956. The oligonucleotide of any one of Embodiments 1-946, wherein the sugar of N₀ is a sugar is a substituted natural DNA sugar one of whose 2′-H is substituted with —OH or —F and the other 2′-H is not substituted.
[2370] 957. The oligonucleotide of any one of Embodiments 1-946, wherein the sugar of N₀ is a natural DNA sugar.
[2371] 958. The oligonucleotide of any one of Embodiments 1-946, wherein the sugar of N₀ is a natural RNA sugar.
[2372] 959. The oligonucleotide of any one of Embodiments 1-958, wherein the nucleobase of N₀ is C.
[2373] 960. The oligonucleotide of any one of Embodiments 1-958, wherein the nucleobase of N₀ is hypoxanthine.
[2374] 961. The oligonucleotide of any one of Embodiments 1-958, wherein the nucleobase of N₀ is T.
[2375] 962. The oligonucleotide of any one of Embodiments 1-958, wherein the nucleobase of N₀ is A.
[2376] 963. The oligonucleotide of any one of Embodiments 1-958, wherein the nucleobase of N₀ is G.
[2377] 964. The oligonucleotide of any one of Embodiments 1-958, wherein the nucleobase of N₀ is U.
[2378] 965. The oligonucleotide of any one of Embodiments 1-958, wherein the nucleobase of N₀ is b001U.
[2379] 966. The oligonucleotide of any one of Embodiments 1-958, wherein the nucleobase of N₀ is b002U.
[2380] 967. The oligonucleotide of any one of Embodiments 1-958, wherein the nucleobase of N₀ is b003U.
[2381] 968. The oligonucleotide of any one of Embodiments 1-958, wherein the nucleobase of N₀ is b004U.
[2382] 969. The oligonucleotide of any one of Embodiments 1-958, wherein the nucleobase of N₀ is b005U.
[2383] 970. The oligonucleotide of any one of Embodiments 1-958, wherein the nucleobase of N₀ is b006U.
[2384] 971. The oligonucleotide of any one of Embodiments 1-958, wherein the nucleobase of N₀ is b007U.
[2385] 972. The oligonucleotide of any one of Embodiments 1-958, wherein the nucleobase of N₀ is b008U.
[2386] 973. The oligonucleotide of any one of Embodiments 1-958, wherein the nucleobase of N₀ is b009U.
[2387] 974. The oligonucleotide of any one of Embodiments 1-958, wherein the nucleobase of N₀ is b011U.
[2388] 975. The oligonucleotide of any one of Embodiments 1-958, wherein the nucleobase of N₀ is b012U.
[2389] 976. The oligonucleotide of any one of Embodiments 1-958, wherein the nucleobase of N₀ is b013U.
[2390] 977. The oligonucleotide of any one of Embodiments 1-958, wherein the nucleobase of N₀ is b001A.
[2391] 978. The oligonucleotide of any one of Embodiments 1-958, wherein the nucleobase of N₀ is b002A.
[2392] 979. The oligonucleotide of any one of Embodiments 1-958, wherein the nucleobase of N₀ is b003A.
[2393] 980. The oligonucleotide of any one of Embodiments 1-958, wherein the nucleobase of N₀ is b001G.
[2394] 981. The oligonucleotide of any one of Embodiments 1-958, wherein the nucleobase of N₀ is b002G.
[2395] 982. The oligonucleotide of any one of Embodiments 1-958, wherein the nucleobase of N₀ is b001C.
[2396] 983. The oligonucleotide of any one of Embodiments 1-958, wherein the nucleobase of N₀ is b002C.
[2397] 984. The oligonucleotide of any one of Embodiments 1-958, wherein the nucleobase of N₀ is b003C.
[2398] 985. The oligonucleotide of any one of Embodiments 1-958, wherein the nucleobase of N₀ is b004C.
[2399] 986. The oligonucleotide of any one of Embodiments 1-958, wherein the nucleobase of N₀ is b005C.
[2400] 987. The oligonucleotide of any one of Embodiments 1-958, wherein the nucleobase of N₀ is b006C.
[2401] 988. The oligonucleotide of any one of Embodiments 1-958, wherein the nucleobase of N₀ is b007C.
[2402] 989. The oligonucleotide of any one of Embodiments 1-958, wherein the nucleobase of N₀ is b008C.
[2403] 990. The oligonucleotide of any one of Embodiments 1-958, wherein the nucleobase of N₀ is b009C.
[2404] 991. The oligonucleotide of any one of Embodiments 1-958, wherein the nucleobase of N₀ is b002I.
[2405] 992. The oligonucleotide of any one of Embodiments 1-958, wherein the nucleobase of N₀ is b003I.
[2406] 993. The oligonucleotide of any one of Embodiments 1-958, wherein the nucleobase of N₀ is b004I.
[2407] 994. The oligonucleotide of any one of Embodiments 1-958, wherein the nucleobase of N₀ is b014I.
[2408] 995. The oligonucleotide of any one of Embodiments 1-958, wherein the nucleobase of N₀ is zndp.
[2409] 996. The oligonucleotide of any one of Embodiments 1-946, wherein N₀ is dC.
[2410] 997. The oligonucleotide of any one of Embodiments 1-946, wherein N₀ is fU.
[2411] 998. The oligonucleotide of any one of Embodiments 1-946, wherein N₀ is dU.
[2412] 999. The oligonucleotide of any one of Embodiments 1-946, wherein N₀ is fA.
[2413] 1000. The oligonucleotide of any one of Embodiments 1-946, wherein N₀ is dA.
[2414] 1001. The oligonucleotide of any one of Embodiments 1-946, wherein N₀ is fT.
[2415] 1002. The oligonucleotide of any one of Embodiments 1-946, wherein N₀ is dT.
[2416] 1003. The oligonucleotide of any one of Embodiments 1-946, wherein N₀ is fC.
[2417] 1004. The oligonucleotide of any one of Embodiments 1-946, wherein N₀ is fG.
[2418] 1005. The oligonucleotide of any one of Embodiments 1-946, wherein N₀ is dG.
[2419] 1006. The oligonucleotide of any one of Embodiments 1-946, wherein N₀ is dI.
[2420] 1007. The oligonucleotide of any one of Embodiments 1-946, wherein N₀ is fI.
[2421] 1008. The oligonucleotide of any one of Embodiments 1-946, wherein N₀ is aC.
[2422] 1009. The oligonucleotide of any one of Embodiments 1-946, wherein N₀ is m5dC.
[2423] 1010. The oligonucleotide of any one of Embodiments 1-946, wherein N₀ is 5MRm5dC.
[2424] 1011. The oligonucleotide of any one of Embodiments 1-946, wherein N₀ is 5MSm5dC.
[2425] 1012. The oligonucleotide of any one of Embodiments 1-946, wherein N₀ is b001G.
[2426] 1013. The oligonucleotide of any one of Embodiments 1-946, wherein N₀ is b002G.
[2427] 1014. The oligonucleotide of any one of Embodiments 1-946, wherein N₀ is b001C.
[2428] 1015. The oligonucleotide of any one of Embodiments 1-946, wherein N₀ is b002C.
[2429] 1016. The oligonucleotide of any one of Embodiments 1-946, wherein N₀ is b003C.
[2430] 1017. The oligonucleotide of any one of Embodiments 1-946, wherein N₀ is b003mC.
[2431] 1018. The oligonucleotide of any one of Embodiments 1-946, wherein N₀ is b004C.
[2432] 1019. The oligonucleotide of any one of Embodiments 1-946, wherein N₀ is b005C.
[2433] 1020. The oligonucleotide of any one of Embodiments 1-946, wherein N₀ is b006C.
[2434] 1021. The oligonucleotide of any one of Embodiments 1-946, wherein N₀ is b007C.
[2435] 1022. The oligonucleotide of any one of Embodiments 1-946, wherein N₀ is b008C.
[2436] 1023. The oligonucleotide of any one of Embodiments 1-946, wherein N₀ is b009C.
[2437] 1024. The oligonucleotide of any one of Embodiments 1-946, wherein N₀ is b001A.
[2438] 1025. The oligonucleotide of any one of Embodiments 1-946, wherein N₀ is b002A.
[2439] 1026. The oligonucleotide of any one of Embodiments 1-946, wherein N₀ is b003A.
[2440] 1027. The oligonucleotide of any one of Embodiments 1-946, wherein N₀ is b001U.
[2441] 1028. The oligonucleotide of any one of Embodiments 1-946, wherein N₀ is b002U.
[2442] 1029. The oligonucleotide of any one of Embodiments 1-946, wherein N₀ is b003U.
[2443] 1030. The oligonucleotide of any one of Embodiments 1-946, wherein N₀ is b004U.
[2444] 1031. The oligonucleotide of any one of Embodiments 1-946, wherein N₀ is b005U.
[2445] 1032. The oligonucleotide of any one of Embodiments 1-946, wherein N₀ is b006U.
[2446] 1033. The oligonucleotide of any one of Embodiments 1-946, wherein N₀ is b007U.
[2447] 1034. The oligonucleotide of any one of Embodiments 1-946, wherein N₀ is b008U.
[2448] 1035. The oligonucleotide of any one of Embodiments 1-946, wherein N₀ is b009U.
[2449] 1036. The oligonucleotide of any one of Embodiments 1-946, wherein N₀ is b010U.
[2450] 1037. The oligonucleotide of any one of Embodiments 1-946, wherein N₀ is b011U.
[2451] 1038. The oligonucleotide of any one of Embodiments 1-946, wherein N₀ is b012U.
[2452] 1039. The oligonucleotide of any one of Embodiments 1-946, wherein N₀ is b013U.
[2453] 1040. The oligonucleotide of any one of Embodiments 1-946, wherein N₀ is b002I.
[2454] 1041. The oligonucleotide of any one of Embodiments 1-946, wherein N₀ is b003I.
[2455] 1042. The oligonucleotide of any one of Embodiments 1-946, wherein N₀ is b004I.
[2456] 1043. The oligonucleotide of any one of Embodiments 1-946, wherein N₀ is b014I.
[2457] 1044. The oligonucleotide of any one of Embodiments 1-946, wherein N₀ is Asm01.
[2458] 1045. The oligonucleotide of any one of Embodiments 1-946, wherein N₀ is Gsm01.
[2459] 1046. The oligonucleotide of any one of Embodiments 1-946, wherein N₀ is Tsm01.
[2460] 1047. The oligonucleotide of any one of Embodiments 1-946, wherein N₀ is 5MSfC.
[2461] 1048. The oligonucleotide of any one of Embodiments 1-946, wherein N₀ is Usm04.
[2462] 1049. The oligonucleotide of any one of Embodiments 1-946, wherein N₀ is 5MRdT.
[2463] 1050. The oligonucleotide of any one of Embodiments 1-946, wherein N₀ is Csm04.
[2464] 1051. The oligonucleotide of any one of Embodiments 1-946, wherein N₀ is Csm11.
[2465] 1052. The oligonucleotide of any one of Embodiments 1-946, wherein N₀ is Gsm11.
[2466] 1053. The oligonucleotide of any one of Embodiments 1-946, wherein N₀ is Tsm11.
[2467] 1054. The oligonucleotide of any one of Embodiments 1-946, wherein N₀ is b009Csm11.
[2468] 1055. The oligonucleotide of any one of Embodiments 1-946, wherein N₀ is b009Csm12.
[2469] 1056. The oligonucleotide of any one of Embodiments 1-946, wherein N₀ is Gsm12.
[2470] 1057. The oligonucleotide of any one of Embodiments 1-946, wherein N₀ is Tsm12.
[2471] 1058. The oligonucleotide of any one of Embodiments 1-946, wherein N₀ is Csm12.
[2472] 1059. The oligonucleotide of any one of Embodiments 1-946, wherein N₀ is rCsm13.
[2473] 1060. The oligonucleotide of any one of Embodiments 1-946, wherein N₀ is rCsm14.
[2474] 1061. The oligonucleotide of any one of Embodiments 1-946, wherein N₀ is Csm15.
[2475] 1062. The oligonucleotide of any one of Embodiments 1-946, wherein N₀ is Csm16.
[2476] 1063. The oligonucleotide of any one of Embodiments 1-946, wherein N₀ is Csm17.
[2477] 1064. The oligonucleotide of any one of Embodiments 1-946, wherein N₀ is abasic.
[2478] 1065. The oligonucleotide of any one of Embodiments 1-946, wherein N₀ is L010.
[2479] 1066. The oligonucleotide of any one of Embodiments 1-946, wherein N₀ is L034.
[2480] 1067. The oligonucleotide of any one of Embodiments 1-946, wherein N₀ is Csm15.
[2481] 1068. The oligonucleotide of any one of Embodiments 1-946, wherein N₀ is Tsm18.
[2482] 1069. The oligonucleotide of any one of Embodiments 1-946, wherein N₀ is b001rA.
[2483] 1070. The oligonucleotide of any one of the preceding Embodiments, wherein nucleobase of N₁ is A, T, C, G, U, hypoxanthine, b001U, b002U, b003U, b004U, b005U, b006U, b007U, b008U, b009U, b011U, b012U, b013U, b001A, b002A, b003A, b001G, b002G, b001C, b002C, b003C, b004C, b005C, b006C, b007C, b008C, b009C, b002I, b003I, b004I, b014I, or zdnp.
[2484] 1071. The oligonucleotide of any one of the preceding Embodiments, wherein nucleobase of N₁ is a modified nucleobase.
[2485] 1072. The oligonucleotide of any one of the preceding Embodiments, wherein the sugar of N₁ is a 2′-F modified sugar.
[2486] 1073. The oligonucleotide of any one of Embodiments 1-1070, wherein the sugar of N₁ is a sugar comprising no substituent at a position corresponding to 2′-OH of a natural RNA sugar.
[2487] 1074. The oligonucleotide of any one of Embodiments 1-1070, wherein the sugar of N₁ is a sugar comprising no 2′-substituent.
[2488] 1075. The oligonucleotide of any one of Embodiments 1-1070, wherein the sugar of N₁ is a natural DNA sugar.
[2489] 1076. The oligonucleotide of any one of Embodiments 1-1070, wherein the sugar of N₁ is a natural RNA sugar.
[2490] 1077. The oligonucleotide of any one of Embodiments 1-1070, where N₁ is dA, dT, dC, dG, dU, fA, fT, fC, fG or fU.
[2491] 1078. The oligonucleotide of any one of Embodiments 1-1076, where the nucleobase of N₁ is A, T, C, G, U, hypoxanthine, b001U, b002U, b003U, b004U, b005U, b006U, b007U, b008U, b009U, b011U, b012U, b013U, b001A, b002A, b003A, b001G, b002G, b001C, b002C, b003C, b004C, b005C, b006C, b007C, b008C, b009C, b002I, b003I, b004I, b014I, or zdnp.
[2492] 1079. The oligonucleotide of any one of Embodiments 1-1070, wherein N₁ is b001A.
[2493] 1080. The oligonucleotide of any one of Embodiments 1-1070, wherein N₁ is b002A.
[2494] 1081. The oligonucleotide of any one of Embodiments 1-1070, wherein N₁ is b003A.
[2495] 1082. The oligonucleotide of any one of Embodiments 1-1070, wherein N₁ is b001C.
[2496] 1083. The oligonucleotide of any one of Embodiments 1-1070, wherein N₁ is b004C.
[2497] 1084. The oligonucleotide of any one of Embodiments 1-1070, wherein N₁ is b007C.
[2498] 1085. The oligonucleotide of any one of Embodiments 1-1070, wherein N₁ is b008C.
[2499] 1086. The oligonucleotide of any one of Embodiments 1-1070, wherein N₁ is b008U.
[2500] 1087. The oligonucleotide of any one of Embodiments 1-1070, wherein N₁ is b010U.
[2501] 1088. The oligonucleotide of any one of Embodiments 1-1070, wherein N₁ is b011U.
[2502] 1089. The oligonucleotide of any one of Embodiments 1-1070, wherein N₁ is b012U.
[2503] 1090. The oligonucleotide of any one of Embodiments 1-1070, wherein N₁ is Csm11.
[2504] 1091. The oligonucleotide of any one of Embodiments 1-1070, wherein N₁ is Csm12.
[2505] 1092. The oligonucleotide of any one of Embodiments 1-1070, wherein N₁ is Csm17.
[2506] 1093. The oligonucleotide of any one of Embodiments 1-1070, wherein N₁ is b009Csm11.
[2507] 1094. The oligonucleotide of any one of Embodiments 1-1070, wherein N₁ is b009Csm12.
[2508] 1095. The oligonucleotide of any one of Embodiments 1-1070, wherein N₁ is Gsm01.
[2509] 1096. The oligonucleotide of any one of Embodiments 1-1070, wherein N₁ is Gsm11.
[2510] 1097. The oligonucleotide of any one of Embodiments 1-1070, wherein N₁ is Gsm12.
[2511] 1098. The oligonucleotide of any one of Embodiments 1-1070, wherein N₁ is Tsm01.
[2512] 1099. The oligonucleotide of any one of Embodiments 1-1070, wherein N₁ is Tsm11.
[2513] 1100. The oligonucleotide of any one of Embodiments 1-1070, wherein N₁ is Tsm12.
[2514] 1101. The oligonucleotide of any one of Embodiments 1-1070, wherein N₁ is Tsm18.
[2515] 1102. The oligonucleotide of any one of Embodiments 1-1070, wherein N₁ is L010.
[2516] 1103. The oligonucleotide of any one of the preceding Embodiments, wherein the sugar of N₋₁ is a modified sugar.
[2517] 1104. The oligonucleotide of any one of the preceding Embodiments, wherein the sugar of N₋₁ is a 2′-F modified sugar.
[2518] 1105. The oligonucleotide of any one of Embodiments 1-1102, wherein the sugar of N₋₁ is a sugar comprising no substituent at a position corresponding to 2′-OH of a natural RNA sugar.
[2519] 1106. The oligonucleotide of any one of Embodiments 1-1102, wherein the sugar of N₋₁ is a sugar comprising no 2′-substituent.
[2520] 1107. The oligonucleotide of any one of Embodiments 1-1102, wherein the sugar of N₋₁ is a natural DNA sugar.
[2521] 1108. The oligonucleotide of any one of Embodiments 1-1102, wherein the sugar of N₋₁ is a natural RNA sugar.
[2522] 1109. The oligonucleotide of any one of the preceding Embodiments, wherein N₁ and N₋₁ are both complementary to their corresponding nucleosides when the oligonucleotide is aligned with a target nucleic acid.
[2523] 1110. The oligonucleotide of any one of the preceding Embodiments, wherein at least one of N₁ and N₋₁ is independently produces a mismatch or a wobble base pairing when the oligonucleotide is aligned with a target nucleic acid.
[2524] 1111. The oligonucleotide of Embodiment 1110, wherein the oligonucleotide provides comparable or higher editing levels of a target adenosine compared to a reference oligonucleotide, wherein the reference oligonucleotide is otherwise identical but has N₁ and N₋₁ that are complementary to their corresponding nucleosides when the reference oligonucleotide is aligned with the target nucleic acid, wherein the target adenosine is opposite to N₀ when the oligonucleotide is aligned with the target nucleic acid.
[2525] 1112. The oligonucleotide of any one of the preceding Embodiments, wherein the nucleobase of N₋₁ is A, T, C, G, U, hypoxanthine, b001U, b002U, b003U, b004U, b005U, b006U, b007U, b008U, b009U, b011U, b012U, b013U, b001A, b002A, b003A, b001G, b002G, b001C, b002C, b003C, b004C, b005C, b006C, b007C, b008C, b009C, b002I, b003I, b004I, b014I, or zdnp.
[2526] 1113. The oligonucleotide of any one of the preceding Embodiments, wherein the nucleobase of N₋₁ is a modified nucleobase.
[2527] 1114. The oligonucleotide of any one of Embodiments 1-1111, wherein the nucleobase of N₋₁ is hypoxanthine.
[2528] 1115. The oligonucleotide of any one of Embodiments 1-1111, wherein the nucleobase of N₋₁ is C.
[2529] 1116. The oligonucleotide of any one of Embodiments 1-1111, wherein the nucleobase of N₋₁ is T.
[2530] 1117. The oligonucleotide of any one of Embodiments 1-1111, wherein the nucleobase of N₋₁ is A.
[2531] 1118. The oligonucleotide of any one of Embodiments 1-1111, wherein the nucleobase of N₋₁ is G.
[2532] 1119. The oligonucleotide of any one of Embodiments 1-1111, wherein the nucleobase of N₋₁ is U.
[2533] 1120. The oligonucleotide of any one of Embodiments 1-1111, wherein the nucleobase of N₋₁ is b001U.
[2534] 1121. The oligonucleotide of any one of Embodiments 1-1111, wherein the nucleobase of N₋₁ is b002U.
[2535] 1122. The oligonucleotide of any one of Embodiments 1-1111, wherein the nucleobase of N₋₁ is b003U.
[2536] 1123. The oligonucleotide of any one of Embodiments 1-1111, wherein the nucleobase of N₋₁ is b004U.
[2537] 1124. The oligonucleotide of any one of Embodiments 1-1111, wherein the nucleobase of N₋₁ is b005U.
[2538] 1125. The oligonucleotide of any one of Embodiments 1-1111, wherein the nucleobase of N₋₁ is b006U.
[2539] 1126. The oligonucleotide of any one of Embodiments 1-1111, wherein the nucleobase of N₋₁ is b007U.
[2540] 1127. The oligonucleotide of any one of Embodiments 1-1111, wherein the nucleobase of N₋₁ is b008U.
[2541] 1128. The oligonucleotide of any one of Embodiments 1-1111, wherein the nucleobase of N₋₁ is b009U.
[2542] 1129. The oligonucleotide of any one of Embodiments 1-1111, wherein the nucleobase of N₋₁ is b011U.
[2543] 1130. The oligonucleotide of any one of Embodiments 1-1111, wherein the nucleobase of N₋₁ is b012U.
[2544] 1131. The oligonucleotide of any one of Embodiments 1-1111, wherein the nucleobase of N₋₁ is b013U.
[2545] 1132. The oligonucleotide of any one of Embodiments 1-1111, wherein the nucleobase of N₋₁ is b001A.
[2546] 1133. The oligonucleotide of any one of Embodiments 1-1111, wherein the nucleobase of N₋₁ is b002A.
[2547] 1134. The oligonucleotide of any one of Embodiments 1-1111, wherein the nucleobase of N₋₁ is b003A.
[2548] 1135. The oligonucleotide of any one of Embodiments 1-1111, wherein the nucleobase of N₋₁ is b001G.
[2549] 1136. The oligonucleotide of any one of Embodiments 1-1111, wherein the nucleobase of N₋₁ is b002G.
[2550] 1137. The oligonucleotide of any one of Embodiments 1-1111, wherein the nucleobase of N₋₁ is b001C.
[2551] 1138. The oligonucleotide of any one of Embodiments 1-1111, wherein the nucleobase of N₋₁ is b002C.
[2552] 1139. The oligonucleotide of any one of Embodiments 1-1111, wherein the nucleobase of N₋₁ is b003C.
[2553] 1140. The oligonucleotide of any one of Embodiments 1-1111, wherein the nucleobase of N₋₁ is b004C.
[2554] 1141. The oligonucleotide of any one of Embodiments 1-1111, wherein the nucleobase of N₋₁ is b005C.
[2555] 1142. The oligonucleotide of any one of Embodiments 1-1111, wherein the nucleobase of N₋₁ is b006C.
[2556] 1143. The oligonucleotide of any one of Embodiments 1-1111, wherein the nucleobase of N₋₁ is b007C.
[2557] 1144. The oligonucleotide of any one of Embodiments 1-1111, wherein the nucleobase of N₋₁ is b008C.
[2558] 1145. The oligonucleotide of any one of Embodiments 1-1111, wherein the nucleobase of N₋₁ is b009C.
[2559] 1146. The oligonucleotide of any one of Embodiments 1-1111, wherein the nucleobase of N₋₁ is b002I.
[2560] 1147. The oligonucleotide of any one of Embodiments 1-1111, wherein the nucleobase of N₋₁ is b003I.
[2561] 1148. The oligonucleotide of any one of Embodiments 1-1111, wherein the nucleobase of N₋₁ is b004I.
[2562] 1149. The oligonucleotide of any one of Embodiments 1-1111, wherein the nucleobase of N₋₁ is b014I.
[2563] 1150. The oligonucleotide of any one of Embodiments 1-1111, wherein the nucleobase of N₋₁ is zndp.
[2564] 1151. The oligonucleotide of any one of Embodiments 1-1111, wherein N₋₁ is dC.
[2565] 1152. The oligonucleotide of any one of Embodiments 1-1111, wherein N₋₁ is fU.
[2566] 1153. The oligonucleotide of any one of Embodiments 1-1111, wherein N₋₁ is dU.
[2567] 1154. The oligonucleotide of any one of Embodiments 1-1111, wherein N₋₁ is fA.
[2568] 1155. The oligonucleotide of any one of Embodiments 1-1111, wherein N₋₁ is dA.
[2569] 1156. The oligonucleotide of any one of Embodiments 1-1111, wherein N₋₁ is fT.
[2570] 1157. The oligonucleotide of any one of Embodiments 1-1111, wherein N₋₁ is dT.
[2571] 1158. The oligonucleotide of any one of Embodiments 1-1111, wherein N₋₁ is fC.
[2572] 1159. The oligonucleotide of any one of Embodiments 1-1111, wherein N₋₁ is fG.
[2573] 1160. The oligonucleotide of any one of Embodiments 1-1111, wherein N₋₁ is dG.
[2574] 1161. The oligonucleotide of any one of Embodiments 1-1111, wherein N₋₁ is dI.
[2575] 1162. The oligonucleotide of any one of Embodiments 1-1111, wherein N₋₁ is fI.
[2576] 1163. The oligonucleotide of any one of Embodiments 1-1111, wherein N₋₁ is aC.
[2577] 1164. The oligonucleotide of any one of Embodiments 1-1111, wherein N₋₁ is m5dC.
[2578] 1165. The oligonucleotide of any one of Embodiments 1-1111, wherein N₋₁ is 5MRm5dC.
[2579] 1166. The oligonucleotide of any one of Embodiments 1-1111, wherein N₋₁ is 5MSm5dC.
[2580] 1167. The oligonucleotide of any one of Embodiments 1-1111, wherein N₋₁ is b001G.
[2581] 1168. The oligonucleotide of any one of Embodiments 1-1111, wherein N₋₁ is b002G.
[2582] 1169. The oligonucleotide of any one of Embodiments 1-1111, wherein N₋₁ is b001C.
[2583] 1170. The oligonucleotide of any one of Embodiments 1-1111, wherein N₋₁ is b002C.
[2584] 1171. The oligonucleotide of any one of Embodiments 1-1111, wherein N₋₁ is b003C.
[2585] 1172. The oligonucleotide of any one of Embodiments 1-1111, wherein N₋₁ is b003mC.
[2586] 1173. The oligonucleotide of any one of Embodiments 1-1111, wherein N₋₁ is b004C.
[2587] 1174. The oligonucleotide of any one of Embodiments 1-1111, wherein N₋₁ is b005C.
[2588] 1175. The oligonucleotide of any one of Embodiments 1-1111, wherein N₋₁ is b006C.
[2589] 1176. The oligonucleotide of any one of Embodiments 1-1111, wherein N₋₁ is b007C.
[2590] 1177. The oligonucleotide of any one of Embodiments 1-1111, wherein N₋₁ is b008C.
[2591] 1178. The oligonucleotide of any one of Embodiments 1-1111, wherein N₋₁ is b009C.
[2592] 1179. The oligonucleotide of any one of Embodiments 1-1111, wherein N₋₁ is b001A.
[2593] 1180. The oligonucleotide of any one of Embodiments 1-1111, wherein N₋₁ is b002A.
[2594] 1181. The oligonucleotide of any one of Embodiments 1-1111, wherein N₋₁ is b003A.
[2595] 1182. The oligonucleotide of any one of Embodiments 1-1111, wherein N₋₁ is b001U.
[2596] 1183. The oligonucleotide of any one of Embodiments 1-1111, wherein N₋₁ is b002U.
[2597] 1184. The oligonucleotide of any one of Embodiments 1-1111, wherein N₋₁ is b003U.
[2598] 1185. The oligonucleotide of any one of Embodiments 1-1111, wherein N₋₁ is b004U.
[2599] 1186. The oligonucleotide of any one of Embodiments 1-1111, wherein N₋₁ is b005U.
[2600] 1187. The oligonucleotide of any one of Embodiments 1-1111, wherein N₋₁ is b006U.
[2601] 1188. The oligonucleotide of any one of Embodiments 1-1111, wherein N₋₁ is b007U.
[2602] 1189. The oligonucleotide of any one of Embodiments 1-1111, wherein N₋₁ is b008U.
[2603] 1190. The oligonucleotide of any one of Embodiments 1-1111, wherein N₋₁ is b009U.
[2604] 1191. The oligonucleotide of any one of Embodiments 1-1111, wherein N₋₁ is b010U.
[2605] 1192. The oligonucleotide of any one of Embodiments 1-1111, wherein N₋₁ is b011U.
[2606] 1193. The oligonucleotide of any one of Embodiments 1-1111, wherein N₋₁ is b012U.
[2607] 1194. The oligonucleotide of any one of Embodiments 1-1111, wherein N₋₁ is b013U.
[2608] 1195. The oligonucleotide of any one of Embodiments 1-1111, wherein N₋₁ is b002I.
[2609] 1196. The oligonucleotide of any one of Embodiments 1-1111, wherein N₋₁ is b003I.
[2610] 1197. The oligonucleotide of any one of Embodiments 1-1111, wherein N₋₁ is b004I.
[2611] 1198. The oligonucleotide of any one of Embodiments 1-1111, wherein N₋₁ is b014I.
[2612] 1199. The oligonucleotide of any one of Embodiments 1-1111, wherein N₋₁ is Asm01.
[2613] 1200. The oligonucleotide of any one of Embodiments 1-1111, wherein N₋₁ is Gsm01.
[2614] 1201. The oligonucleotide of any one of Embodiments 1-1111, wherein N₋₁ is 5MSfC.
[2615] 1202. The oligonucleotide of any one of Embodiments 1-1111, wherein N₋₁ is Usm04.
[2616] 1203. The oligonucleotide of any one of Embodiments 1-1111, wherein N₋₁ is 5MRdT.
[2617] 1204. The oligonucleotide of any one of Embodiments 1-1111, wherein N₋₁ is Csm04.
[2618] 1205. The oligonucleotide of any one of Embodiments 1-1111, wherein N₋₁ is Csm11.
[2619] 1206. The oligonucleotide of any one of Embodiments 1-1111, wherein N₋₁ is Gsm11.
[2620] 1207. The oligonucleotide of any one of Embodiments 1-1111, wherein N₋₁ is Tsm11.
[2621] 1208. The oligonucleotide of any one of Embodiments 1-1111, wherein N₋₁ is b009Csm11.
[2622] 1209. The oligonucleotide of any one of Embodiments 1-1111, wherein N₋₁ is b009Csm12.
[2623] 1210. The oligonucleotide of any one of Embodiments 1-1111, wherein N₋₁ is Gsm12.
[2624] 1211. The oligonucleotide of any one of Embodiments 1-1111, wherein N₋₁ is Tsm12.
[2625] 1212. The oligonucleotide of any one of Embodiments 1-1111, wherein N₋₁ is Csm12.
[2626] 1213. The oligonucleotide of any one of Embodiments 1-1111, wherein N₋₁ is rCsm13.
[2627] 1214. The oligonucleotide of any one of Embodiments 1-1111, wherein N₋₁ is rCsm14.
[2628] 1215. The oligonucleotide of any one of Embodiments 1-1111, wherein N₋₁ is Csm15.
[2629] 1216. The oligonucleotide of any one of Embodiments 1-1111, wherein N₋₁ is Csm16.
[2630] 1217. The oligonucleotide of any one of Embodiments 1-1111, wherein N₋₁ is Csm17.
[2631] 1218. The oligonucleotide of any one of Embodiments 1-1111, wherein N₋₁ is abasic.
[2632] 1219. The oligonucleotide of any one of Embodiments 1-1111, wherein N₋₁ is L010.
[2633] 1220. The oligonucleotide of any one of Embodiments 1-1111, wherein N₋₁ is L034.
[2634] 1221. The oligonucleotide of any one of Embodiments 1-1111, wherein N₋₁ is Csm15.
[2635] 1222. The oligonucleotide of any one of Embodiments 1-1111, wherein N₋₁ is Tsm18.
[2636] 1223. The oligonucleotide of any one of Embodiments 1-1111, wherein N₋₁ is b001rA.
[2637] 1224. The oligonucleotide of any one of the preceding Embodiments, wherein the internucleotidic linkage between N₀ and N₁ is a phosphorothioate internucleotidic linkage.
[2638] 1225. The oligonucleotide of any one of the preceding Embodiments, wherein the internucleotidic linkage between N₀ and N₁ is a Sp phosphorothioate internucleotidic linkage.
[2639] 1226. The oligonucleotide of any one of the preceding Embodiments, wherein the internucleotidic linkage between N₀ and N₋₁ is a phosphorothioate internucleotidic linkage.
[2640] 1227. The oligonucleotide of any one of the preceding Embodiments, wherein the internucleotidic linkage between N₀ and N₋₁ is a Sp phosphorothioate internucleotidic linkage.
[2641] 1228. The oligonucleotide of any one of the preceding Embodiments, wherein sugar of N₂ is a modified sugar.
[2642] 1229. The oligonucleotide of any one of the preceding Embodiments, wherein sugar of N₂ is a 2′-F modified sugar.
[2643] 1230. The oligonucleotide of any one of the preceding Embodiments, wherein the internucleotidic linkage between N₁ and N₂ is a phosphorothioate internucleotidic linkage.
[2644] 1231. The oligonucleotide of any one of the preceding Embodiments, wherein the internucleotidic linkage between N₁ and N₂ is a Sp phosphorothioate internucleotidic linkage.
[2645] 1232. The oligonucleotide of any one of the preceding Embodiments, wherein sugar of N₃ is a modified sugar.
[2646] 1233. The oligonucleotide of any one of the preceding Embodiments, wherein sugar of N₃ is a 2′-OR modified sugar wherein R is optionally substituted C₁₋₆ aliphatic or a bicyclic sugar.
[2647] 1234. The oligonucleotide of any one of the preceding Embodiments, wherein sugar of N₃ is a 2′-OR modified sugar wherein R is optionally substituted C₁₋₆ aliphatic.
[2648] 1235. The oligonucleotide of any one of the preceding Embodiments, wherein sugar of N₃ is a 2′-OMe modified sugar.
[2649] 1236. The oligonucleotide of Embodiment 1233, wherein sugar of N₃ is a 2′-MOE modified sugar.
[2650] 1237. The oligonucleotide of any one of the preceding Embodiments, wherein the internucleotidic linkage between N₂ and N₃ is natural phosphate linkage.
[2651] 1238. The oligonucleotide of any one of the preceding Embodiments, wherein sugar of N₄ is a modified sugar.
[2652] 1239. The oligonucleotide of any one of the preceding Embodiments, wherein sugar of N₄ is a 2′-OR modified sugar wherein R is optionally substituted C₁₋₆ aliphatic or a bicyclic sugar.
[2653] 1240. The oligonucleotide of any one of the preceding Embodiments, wherein sugar of N₄ is a 2′-OR modified sugar wherein R is optionally substituted C₁₋₆ aliphatic.
[2654] 1241. The oligonucleotide of any one of the preceding Embodiments, wherein sugar of N₄ is a 2′-OMe modified sugar.
[2655] 1242. The oligonucleotide of Embodiment 1239, wherein sugar of N₄ is a 2′-MOE modified sugar.
[2656] 1243. The oligonucleotide of any one of the preceding Embodiments, wherein the internucleotidic linkage between N₃ and N₄ is a natural phosphate linkage.
[2657] 1244. The oligonucleotide of any one of the preceding Embodiments, wherein sugar of N₅ is a modified sugar.
[2658] 1245. The oligonucleotide of any one of the preceding Embodiments, wherein sugar of N₅ is a 2′-F modified sugar.
[2659] 1246. The oligonucleotide of any one of the preceding Embodiments, wherein the internucleotidic linkage between N₄ and N₅ is a non-negatively charged internucleotidic linkage.
[2660] 1247. The oligonucleotide of any one of the preceding Embodiments, wherein the internucleotidic linkage between N₄ and N₅ is a phosphoryl guanidine internucleotidic linkage.
[2661] 1248. The oligonucleotide of any one of the preceding Embodiments, wherein the internucleotidic linkage between N₄ and N₅ is n001.
[2662] 1249. The oligonucleotide of any one of the preceding Embodiments, wherein the internucleotidic linkage between N₄ and N₅ is Rp n001.
[2663] 1250. The oligonucleotide of any one of the preceding Embodiments, wherein sugar of N₆ is a modified sugar.
[2664] 1251. The oligonucleotide of any one of the preceding Embodiments, wherein sugar of N₆ is a 2′-F modified sugar.
[2665] 1252. The oligonucleotide of any one of the preceding Embodiments, wherein the internucleotidic linkage between N₅ and N₆ is a phosphorothioate internucleotidic linkage internucleotidic linkage.
[2666] 1253. The oligonucleotide of any one of the preceding Embodiments, wherein the internucleotidic linkage between N₅ and N₆ is a Sp phosphorothioate internucleotidic linkage internucleotidic linkage.
[2667] 1254. The oligonucleotide of any one of the preceding Embodiments, wherein sugar of N₋₂ is a modified sugar.
[2668] 1255. The oligonucleotide of any one of the preceding Embodiments, wherein sugar of N₋₂ is a 2′-OR modified sugar wherein R is optionally substituted C₁₋₆ aliphatic or a bicyclic sugar.
[2669] 1256. The oligonucleotide of any one of the preceding Embodiments, wherein sugar of N₋₂ is a 2′-OR modified sugar wherein R is optionally substituted C₁₋₆ aliphatic.
[2670] 1257. The oligonucleotide of any one of the preceding Embodiments, wherein sugar of N₋₂ is a 2′-OMe modified sugar.
[2671] 1258. The oligonucleotide of Embodiment 1255, wherein sugar of N₋₂ is a 2′-MOE modified sugar.
[2672] 1259. The oligonucleotide of any one of the preceding Embodiments, wherein the internucleotidic linkage between N₋₁ and N₋₂ is a non-negatively charged internucleotidic linkage.
[2673] 1260. The oligonucleotide of any one of the preceding Embodiments, wherein the internucleotidic linkage between N₋₁ and N₋₂ is a phosphoryl guanidine internucleotidic linkage.
[2674] 1261. The oligonucleotide of any one of the preceding Embodiments, wherein the internucleotidic linkage between N₋₁ and N₋₂ is n004, n008, n025, n026.
[2675] 1262. The oligonucleotide of any one of the preceding Embodiments, wherein the internucleotidic linkage between N₋₁ and N₋₂ is Rp n004, n008, n025, n026.
[2676] 1263. The oligonucleotide of any one of the preceding Embodiments, wherein the internucleotidic linkage between N₋₁ and N₋₂ is Sp n004, n008, n025, n026.
[2677] 1264. The oligonucleotide of any one of the preceding Embodiments, wherein the internucleotidic linkage between N₋₁ and N₋₂ is n001.
[2678] 1265. The oligonucleotide of any one of the preceding Embodiments, wherein the internucleotidic linkage between N₋₁ and N₋₂ is Rp n001.
[2679] 1266. The oligonucleotide of Embodiment 1264, wherein the internucleotidic linkage between N₋₁ and N₋₂ is Sp n001.
[2680] 1267. The oligonucleotide of any one of the preceding Embodiments, wherein sugar of N₋₃ is a modified sugar.
[2681] 1268. The oligonucleotide of any one of the preceding Embodiments, wherein sugar of N₋₃ is a 2′-F modified sugar.
[2682] 1269. The oligonucleotide of any one of the preceding Embodiments, wherein the internucleotidic linkage between N₋₂ and N₋₃ is a natural phosphate linkage.
[2683] 1270. The oligonucleotide of any one of the preceding Embodiments, wherein sugar of N₋₄ is a modified sugar.
[2684] 1271. The oligonucleotide of any one of the preceding Embodiments, wherein sugar of N₋₄ is a 2′-OR modified sugar wherein R is optionally substituted C₁₋₆ aliphatic or a bicyclic sugar.
[2685] 1272. The oligonucleotide of any one of the preceding Embodiments, wherein sugar of N₋₄ is a 2′-OR modified sugar wherein R is optionally substituted C₁₋₆ aliphatic.
[2686] 1273. The oligonucleotide of any one of the preceding Embodiments, wherein sugar of N₋₄ is a 2′-OMe modified sugar.
[2687] 1274. The oligonucleotide of Embodiment 1271, wherein sugar of N₋₄ is a 2′-MOE modified sugar.
[2688] 1275. The oligonucleotide of any one of the preceding Embodiments, wherein the linkage between N₋₃ and N₋₄ is a phosphorothioate internucleotidic linkage.
[2689] 1276. The oligonucleotide of any one of the preceding Embodiments, wherein the linkage between N₋₃ and N₋₄ is a Sp phosphorothioate internucleotidic linkage.
[2690] 1277. The oligonucleotide of any one of the preceding Embodiments, wherein sugar of N₋₅ is a modified sugar.
[2691] 1278. The oligonucleotide of any one of the preceding Embodiments, wherein sugar of N₋₅ is a 2′-OR modified sugar wherein R is optionally substituted C₁₋₆ aliphatic or a bicyclic sugar.
[2692] 1279. The oligonucleotide of any one of the preceding Embodiments, wherein sugar of N₋₅ is a 2′-OR modified sugar wherein R is optionally substituted C₁₋₆ aliphatic.
[2693] 1280. The oligonucleotide of any one of the preceding Embodiments, wherein sugar of N₋₅ is a 2′-OMe modified sugar.
[2694] 1281. The oligonucleotide of Embodiment 1278, wherein sugar of N₋₅ is a 2′-MOE modified sugar.
[2695] 1282. The oligonucleotide of any one of the preceding Embodiments, wherein the linkage between N₋₄ and N₋₅ is a phosphorothioate internucleotidic linkage.
[2696] 1283. The oligonucleotide of any one of the preceding Embodiments, wherein the linkage between N₋₄ and N₋₅ is a Sp phosphorothioate internucleotidic linkage.
[2697] 1284. The oligonucleotide of any one of the preceding Embodiments, wherein sugar of N₋₆ is a modified sugar.
[2698] 1285. The oligonucleotide of any one of the preceding Embodiments, wherein sugar of N₋₆ is a 2′-OR modified sugar wherein R is optionally substituted C₁₋₆ aliphatic or a bicyclic sugar.
[2699] 1286. The oligonucleotide of any one of the preceding Embodiments, wherein sugar of N₋₆ is a 2′-OR modified sugar wherein R is optionally substituted C₁₋₆ aliphatic.
[2700] 1287. The oligonucleotide of any one of the preceding Embodiments, wherein sugar of N₋₆ is a 2′-OMe modified sugar.
[2701] 1288. The oligonucleotide of Embodiment 1278, wherein sugar of N₋₆ is a 2′-MOE modified sugar.
[2702] 1289. The oligonucleotide of any one of the preceding Embodiments, wherein the internucleotidic linkage between N₋₅ and N₋₆ is a non-negatively charged internucleotidic linkage.
[2703] 1290. The oligonucleotide of any one of the preceding Embodiments, wherein the internucleotidic linkage between N₋₅ and N₋₆ is a phosphoryl guanidine internucleotidic linkage.
[2704] 1291. The oligonucleotide of any one of the preceding Embodiments, wherein the internucleotidic linkage between N₋₅ and N₋₆ is n001.
[2705] 1292. The oligonucleotide of any one of the preceding Embodiments, wherein the internucleotidic linkage between N₋₅ and N₋₆ is Rp n001.
[2706] 1293. The oligonucleotide of any one of the preceding Embodiments, wherein about 20%-80%, 30-70%, 30%-60%, 30%-50%, 40%-60%, 20%, 30%, 40%, 50%, 60%, 70% or 80% of its sugars are each independently a 2′-F modified sugar.
[2707] 1294. The oligonucleotide of any one of the preceding Embodiments, wherein about 30%-60% of its sugars are each independently a 2′-F modified sugar.
[2708] 1295. The oligonucleotide of any one of the preceding Embodiments, wherein about 20%-80%, 30-70%, 30%-60%, 30%-50%, 40%-60%, 20%, 30%, 40%, 50%, 60%, 70% or 80% of its sugars are each independently a 2′-OR modified sugar wherein R is optionally substituted C₁₋₆ aliphatic.
[2709] 1296. The oligonucleotide of any one of the preceding Embodiments, wherein about 30%-60% of its sugars are each independently a 2′-OR modified sugar wherein R is optionally substituted C₁₋₆ aliphatic.
[2710] 1297. The oligonucleotide of any one of the preceding Embodiments, wherein about 30%-60% of its sugars are each independently a 2′-OMe or 2′-MOE modified sugar.
[2711] 1298. The oligonucleotide of any one of the preceding Embodiments, wherein about 20%-80%, 30-70%, 30%-60%, 30%-50%, 40%-60%, 20%, 30%, 40%, 50%, 60%, 70% or 80% of its sugars in a first domain are each independently a 2′-OR modified sugar wherein R is optionally substituted C₁₋₆ aliphatic.
[2712] 1299. The oligonucleotide of any one of the preceding Embodiments, wherein about 30%-60% of its sugars in a first domain are each independently a 2′-OR modified sugar wherein R is optionally substituted C₁₋₆ aliphatic.
[2713] 1300. The oligonucleotide of any one of the preceding Embodiments, wherein about 30%-60% of its sugars in a first domain are each independently a 2′-OMe or 2′-MOE modified sugar.
[2714] 1301. The oligonucleotide of any one of the preceding Embodiments, wherein the 3′-end nucleoside of a first domain is N₂.
[2715] 1302. The oligonucleotide of any one of the preceding Embodiments, wherein the 5′-end nucleoside of a first domain is the 5′-end nucleoside of the oligonucleotide.
[2716] 1303. The oligonucleotide of any one of the preceding Embodiments, wherein about or at least about 20%, 30%, 40%, 50%, 60%, 70%, 80% or 90% 2′-OR modified sugars wherein R is optionally substituted C₁₋₆ aliphatic in an oligonucleotide or a portion thereof, e.g., a first domain, a second domain, etc., are independently bonded to a natural phosphate linkage.
[2717] 1304. The oligonucleotide of any one of the preceding Embodiments, wherein each of one or more sugars of N₋₂, N₋₃, N₋₄, N₋₅, and N₋₆ is independently a 2′-OR modified sugar wherein R is optionally substituted C₁₋₆ aliphatic or a bicyclic sugar.
[2718] 1305. The oligonucleotide of any one of the preceding Embodiments, wherein each of one or more sugars of N₋₂, N₋₃, N₋₄, N₋₅, and N₋₆ is independently a 2′-OR modified sugar wherein R is optionally substituted C₁₋₆ aliphatic.
[2719] 1306. The oligonucleotide of any one of the preceding Embodiments, wherein each of one or more sugars of N₋₂, N₋₃, N₋₄, N₋₅, and N₋₆ is independently a 2′-OMe modified sugar.
[2720] 1307. The oligonucleotide of any one of the preceding Embodiments, wherein each of one or more sugars of N₋₂, N₋₃, N₋₄, N₋₅, and N₋₆ is independently a 2′-MOE modified sugar.
[2721] 1308. The oligonucleotide of any one of the preceding Embodiments, wherein each of one or more sugars of N₂, N₃, N₄, N₅, N₆, N₇, and N₈ is independently a 2′-OR modified sugar wherein R is optionally substituted C₁₋₆ aliphatic or a bicyclic sugar.
[2722] 1309. The oligonucleotide of any one of the preceding Embodiments, wherein each of one or more sugars of N₂, N₃, N₄, N₅, N₆, N₇, and N₈ is independently a 2′-OR modified sugar wherein R is optionally substituted C₁₋₆ aliphatic.
[2723] 1310. The oligonucleotide of any one of the preceding Embodiments, wherein each of one or more sugars of N₂, N₃, N₄, N₅, N₆, N₇, and N₈ is independently a 2′-OMe modified sugar.
[2724] 1311. The oligonucleotide of any one of the preceding Embodiments, wherein each of one or more sugars of N₂, N₃, N₄, N₅, N₆, N₇, and N₈ is independently a 2′-MOE modified sugar.
[2725] 1312. The oligonucleotide of any one of the preceding Embodiments, wherein about or at least about 50% 2′-OR modified sugars wherein R is optionally substituted C₁₋₆ aliphatic in an oligonucleotide or a portion thereof, e.g., a first domain, a second domain, etc., are independently bonded to a natural phosphate linkage.
[2726] 1313. The oligonucleotide of any one of the preceding Embodiments, wherein at least 60%, 70%, 80% or 90% or all natural phosphate linkages each independently bond to at least one modified sugar which is 2′-OR modified sugar wherein R is optionally substituted C₁₋₆ aliphatic or a bicyclic sugar.
[2727] 1314. The oligonucleotide of any one of the preceding Embodiments, wherein about 5%-90%, about 10-80%, about 10-75%, about 10-70%, 10%-60%, 10-50%, 10-40%, 10-30%, 15-40%, 20-30%, 25-30%, or about or at least about 5%, 10%, 15%, 20%, 25%, 30%, 35%, 40%, 45%, or 50%, of all internucleotidic linkages in an oligonucleotide are independently a natural phosphate linkage.
[2728] 1315. The oligonucleotide of any one of the preceding Embodiments, wherein about 5%-90%, about 10-80%, about 10-75%, about 10-70%, 10%-60%, 10-50%, 10-40%, 10-30%, 15-40%, 20-30%, 25-30%, or about or at least about 5%, 10%, 15%, 20%, 25%, 30%, 35%, 40%, 45%, or 50%, of all internucleotidic linkages in a first domain are independently a natural phosphate linkage.
[2729] 1316. The oligonucleotide of any one of the preceding Embodiments, wherein one or more internucleotidic linkages at one or more of positions +3 (between N₊₄N₊₃), +4, +6, +8, +9, +12, +14, +15, +17, and +18 are independently a natural phosphate linkage.
[2730] 1317. The oligonucleotide of any one of the preceding Embodiments, wherein about 5%-90%, about 10-80%, about 10-75%, about 10-70%, 10%-60%, 10-50%, 10-40%, 10-30%, 15-40%, 20-30%, 25-30%, 30%-70%, 40-70%, 40%-65%, 40%-60%, or about or at least about 5%, 10%, 15%, 20%, 25%, 30%, 35%, 40%, 45%, 50%, 55%, 60%, or 65% of all internucleotidic linkages in an oligonucleotide are independently a phosphorothioate internucleotidic linkage.
[2731] 1318. The oligonucleotide of any one of the preceding Embodiments, wherein about 5%-90%, about 10-80%, about 10-75%, about 10-70%, 10%-60%, 10-50%, 10-40%, 10-30%, 15-40%, 20-30%, 25-30%, 30%-70%, 40-70%, 40%-65%, 40%-60%, or about or at least about 5%, 10%, 15%, 20%, 25%, 30%, 35%, 40%, 45%, 50%, 55%, 60%, or 65% of all internucleotidic linkages in a first domain are independently a phosphorothioate internucleotidic linkage.
[2732] 1319. The oligonucleotide of any one of the preceding Embodiments, wherein one or more internucleotidic linkages at one or more of positions +1 (between N₊₁N₀), +2, +5, +6, +7, +8, +11, +14, +15, +16, +17, +19, +20, +21, and +22 are independently a phosphorothioate internucleotidic linkage.
[2733] 1320. The oligonucleotide of any one of the preceding Embodiments, wherein about 5%-90%, about 10-80%, about 10-75%, about 10-70%, 10%-60%, 10-50%, 10-40%, 10-30%, 10%-20%, 10-15%, 15-40%, 15%-35%, 15%-30%, 15-25%, 15-20%, or about or at least about 5%, 10%, 15%, 20%, 25%, 30%, 35%, 40%, 45%, or 50%, of all internucleotidic linkages in an oligonucleotide are independently a non-negatively charged internucleotidic linkage.
[2734] 1321. The oligonucleotide of any one of the preceding Embodiments, wherein about 5%-90%, about 10-80%, about 10-75%, about 10-70%, 10%-60%, 10-50%, 10-40%, 10-30%, 10%-20%, 10-15%, 15-40%, 15%-35%, 15%-30%, 15-25%, 15-20%, or about or at least about 5%, 10%, 15%, 20%, 25%, 30%, 35%, 40%, 45%, or 50%, of all internucleotidic linkages in a first domain are independently a non-negatively charged internucleotidic linkage.
[2735] 1322. The oligonucleotide of any one of the preceding Embodiments, wherein about 5%-90%, about 10-80%, about 10-75%, about 10-70%, 10%-60%, 10-50%, 10-40%, 10-30%, 10%-20%, 10-15%, 15-40%, 15%-35%, 15%-30%, 15-25%, 15-20%, or about or at least about 5%, 10%, 15%, 20%, 25%, 30%, 35%, 40%, 45%, or 50%, of all internucleotidic linkages in an oligonucleotide are independently a phosphoryl guanidine internucleotidic linkage.
[2736] 1323. The oligonucleotide of any one of the preceding Embodiments, wherein about 5%-90%, about 10-80%, about 10-75%, about 10-70%, 10%-60%, 10-50%, 10-40%, 10-30%, 10%-20%, 10-15%, 15-40%, 15%-35%, 15%-30%, 15-25%, 15-20%, or about or at least about 5%, 10%, 15%, 20%, 25%, 30%, 35%, 40%, 45%, or 50%, of all internucleotidic linkages in a first domain are independently a phosphoryl guanidine internucleotidic linkage.
[2737] 1324. The oligonucleotide of any one of the preceding Embodiments, wherein about 5%-90%, about 10-80%, about 10-75%, about 10-70%, 10%-60%, 10-50%, 10-40%, 10-30%, 10%-20%, 10-15%, 15-40%, 15%-35%, 15%-30%, 15-25%, 15-20%, or about or at least about 5%, 10%, 15%, 20%, 25%, 30%, 35%, 40%, 45%, or 50%, of all internucleotidic linkages in an oligonucleotide are independently n001.
[2738] 1325. The oligonucleotide of any one of the preceding Embodiments, wherein about 5%-90%, about 10-80%, about 10-75%, about 10-70%, 10%-60%, 10-50%, 10-40%, 10-30%, 10%-20%, 10-15%, 15-40%, 15%-35%, 15%-30%, 15-25%, 15-20%, or about or at least about 5%, 10%, 15%, 20%, 25%, 30%, 35%, 40%, 45%, or 50%, of all internucleotidic linkages in a first domain are independently n001.
[2739] 1326. The oligonucleotide of any one of the preceding Embodiments, wherein one or more or all of positions +5 (between N₊₅N₊₄), +10, +13 or +23 are independently a non-negatively charged internucleotidic linkage.
[2740] 1327. The oligonucleotide of any one of the preceding Embodiments, wherein one or more or all of positions +5 (between N₊₅N₊₄), +10, +13 or +23 are independently a phosphoryl guanidine internucleotidic linkage.
[2741] 1328. The oligonucleotide of any one of the preceding Embodiments, wherein one or more or all of positions +5 (between N₊₅N₊₄), +10, +13 or +23 are independently n001.
[2742] 1329. The oligonucleotide of any one of the preceding Embodiments, wherein sugar of N₄ is a 2′-OR modified sugar wherein R is optionally substituted C₁₋₆ aliphatic.
[2743] 1330. The oligonucleotide of any one of the preceding Embodiments, wherein the internucleotidic linkage between N₃ and N₄ is natural phosphate linkage.
[2744] 1331. The oligonucleotide of any one of the preceding Embodiments, wherein there are 5 or more nucleosides at the 3′ side of N₀.
[2745] 1332. The oligonucleotide of any one of the preceding Embodiments, wherein there are 6 or more nucleosides at the 3′ side of N₀.
[2746] 1333. The oligonucleotide of any one of the preceding Embodiments, wherein there are 7 or more nucleosides at the 3′ side of N₀.
[2747] 1334. The oligonucleotide of any one of the preceding Embodiments, wherein there are 8 or more nucleosides at the 3′ side of N₀.
[2748] 1335. The oligonucleotide of any one of Embodiments 1-1330, wherein there are 3 nucleosides at the 3′ side of N₀.
[2749] 1336. The oligonucleotide of any one of Embodiments 1-1330, wherein there are 4 nucleosides at the 3′ side of N₀.
[2750] 1337. The oligonucleotide of any one of Embodiments 1-1330, wherein there are 5 nucleosides at the 3′ side of N₀.
[2751] 1338. The oligonucleotide of any one of Embodiments 1-1330, wherein there are 6 nucleosides at the 3′ side of N₀.
[2752] 1339. The oligonucleotide of any one of Embodiments 1-1330, wherein there are 7 nucleosides at the 3′ side of N₀.
[2753] 1340. The oligonucleotide of any one of Embodiments 1-1330, wherein there are 8 nucleosides at the 3′ side of N₀.
[2754] 1341. The oligonucleotide of any one of Embodiments 1-1330, wherein there are 9 nucleosides at the 3′ side of N₀.
[2755] 1342. The oligonucleotide of any one of Embodiments 1-1330, wherein there are 10 nucleosides at the 3′ side of N₀.
[2756] 1343. The oligonucleotide of any one of the preceding Embodiments, wherein there are 5 or more (e.g., 5, 6, 7, 8, 9, 10, 11, 12, 13, 14, 15, 16, 17, 18, 19, 20, 21, 22, 23, 24, 25, 26, 27, 28, 29 or 30 or more) nucleosides at the 5′ side of N₀.
[2757] 1344. The oligonucleotide of any one of the preceding Embodiments, wherein there are 8 or more nucleosides at the 5′ side of N₀.
[2758] 1345. The oligonucleotide of any one of the preceding Embodiments, wherein there are 10 or more nucleosides at the 5′ side of N₀.
[2759] 1346. The oligonucleotide of any one of the preceding Embodiments, wherein there are 15 or more nucleosides at the 5′ side of N₀.
[2760] 1347. The oligonucleotide of any one of the preceding Embodiments, wherein there are 16 or more nucleosides at the 5′ side of N₀.
[2761] 1348. The oligonucleotide of any one of the preceding Embodiments, wherein there are 17 or more nucleosides at the 5′ side of N₀.
[2762] 1349. The oligonucleotide of any one of the preceding Embodiments, wherein there are 18 or more nucleosides at the 5′ side of N₀.
[2763] 1350. The oligonucleotide of any one of the preceding Embodiments, wherein there are 19 or more nucleosides at the 5′ side of N₀.
[2764] 1351. The oligonucleotide of any one of the preceding Embodiments, wherein there are 20 or more nucleosides at the 5′ side of N₀.
[2765] 1352. The oligonucleotide of any one of the preceding Embodiments, wherein there are 21 or more nucleosides at the 5′ side of N₀.
[2766] 1353. The oligonucleotide of any one of the preceding Embodiments, wherein there are 22 or more nucleosides at the 5′ side of N₀.
[2767] 1354. The oligonucleotide of any one of the preceding Embodiments, wherein there are 23 or more nucleosides at the 5′ side of N₀.
[2768] 1355. The oligonucleotide of any one of the preceding Embodiments, wherein there are 24 or more nucleosides at the 5′ side of N₀.
[2769] 1356. The oligonucleotide of any one of the preceding Embodiments, wherein there are 25 or more nucleosides at the 5′ side of N₀.
[2770] 1357. The oligonucleotide of any one of the preceding Embodiments, wherein there are 26 or more nucleosides at the 5′ side of N₀.
[2771] 1358. The oligonucleotide of any one of Embodiments 1-1343, wherein there are 20 nucleosides at the 5′ side of N₀.
[2772] 1359. The oligonucleotide of any one of Embodiments 1-1343, wherein there are 21 nucleosides at the 5′ side of N₀.
[2773] 1360. The oligonucleotide of any one of Embodiments 1-1343, wherein there are 22 nucleosides at the 5′ side of N₀.
[2774] 1361. The oligonucleotide of any one of Embodiments 1-1343, wherein there are 23 nucleosides at the 5′ side of N₀.
[2775] 1362. The oligonucleotide of any one of Embodiments 1-1343, wherein there are 24 nucleosides at the 5′ side of N₀.
[2776] 1363. The oligonucleotide of any one of Embodiments 1-1343, wherein there are 25 nucleosides at the 5′ side of N₀.
[2777] 1364. The oligonucleotide of any one of Embodiments 1-1343, wherein there are 26 nucleosides at the 5′ side of N₀.
[2778] 1365. The oligonucleotide of any one of Embodiments 1-1343, wherein there are 27 nucleosides at the 5′ side of N₀.
[2779] 1366. The oligonucleotide of any one of Embodiments 1-1343, wherein there are 28 nucleosides at the 5′ side of N₀.
[2780] 1367. The oligonucleotide of any one of Embodiments 1-1343, wherein there are 29 nucleosides at the 5′ side of N₀.
[2781] 1368. The oligonucleotide of any one of Embodiments 1-1343, wherein there are 30 nucleosides at the 5′ side of N₀.
[2782] 1369. The oligonucleotide of any one of the preceding Embodiments, wherein the first 1, 2, 3, 4, or 5 sugars at the 5′-end of the oligonucleotide are each independently sugars that can increase stability.
[2783] 1370. The oligonucleotide of any one of the preceding Embodiments, wherein the first 3 sugars at the 5′-end of the oligonucleotide are each independently sugars that can increase stability.
[2784] 1371. The oligonucleotide of any one of the preceding Embodiments, wherein the first 4 sugars at the 5′-end of the oligonucleotide are each independently sugars that can increase stability.
[2785] 1372. The oligonucleotide of any one of the preceding Embodiments, wherein the first 5 sugars at the 5′-end of the oligonucleotide are each independently sugars that can increase stability.
[2786] 1373. The oligonucleotide of any one of the preceding Embodiments, wherein the first 1, 2, 3, 4, or 5 sugars at the 5′-end of the oligonucleotide are each independently selected from a bicyclic sugar and a 2′-OR modified sugar, wherein R is optionally substituted C₁₋₆ aliphatic.
[2787] 1374. The oligonucleotide of any one of the preceding Embodiments, wherein the first 3 sugars at the 5′-end of the oligonucleotide are each independently selected from a bicyclic sugar and a 2′-OR modified sugar, wherein R is optionally substituted C₁₋₆ aliphatic.
[2788] 1375. The oligonucleotide of any one of the preceding Embodiments, wherein the first 4 sugars at the 5′-end of the oligonucleotide are each independently selected from a bicyclic sugar and a 2′-OR modified sugar, wherein R is optionally substituted C₁₋₆ aliphatic.
[2789] 1376. The oligonucleotide of any one of the preceding Embodiments, wherein the first 5 sugars at the 5′-end of the oligonucleotide are each independently selected from a bicyclic sugar and a 2′-OR modified sugar, wherein R is optionally substituted C₁₋₆ aliphatic.
[2790] 1377. The oligonucleotide of any one of the preceding Embodiments, wherein the first 3 sugars at the 5′-end of the oligonucleotide are each independently a 2′-OR modified sugar, wherein R is optionally substituted C₁₋₆ aliphatic.
[2791] 1378. The oligonucleotide of any one of the preceding Embodiments, wherein the first 4 sugars at the 5′-end of the oligonucleotide are each independently a 2′-OR modified sugar, wherein R is optionally substituted C₁₋₆ aliphatic.
[2792] 1379. The oligonucleotide of any one of the preceding Embodiments, wherein the first 5 sugars at the 5′-end of the oligonucleotide are each independently a 2′-OR modified sugar, wherein R is optionally substituted C₁₋₆ aliphatic.
[2793] 1380. The oligonucleotide of any one of the preceding Embodiments, wherein the first 1, 2, 3, 4, or 5 sugars at the 5′-end of the oligonucleotide are each independently a 2′-OMe or 2′-MOE modified sugar.
[2794] 1381. The oligonucleotide of any one of the preceding Embodiments, wherein the first 1, 2, 3, 4, or 5 sugars at the 5′-end of the oligonucleotide are each independently a 2′-OMe modified sugar.
[2795] 1382. The oligonucleotide of any one of the preceding Embodiments, wherein the first 3 sugars at the 5′-end of the oligonucleotide are each independently a 2′-OMe modified sugar.
[2796] 1383. The oligonucleotide of any one of the preceding Embodiments, wherein the first 4 sugars at the 5′-end of the oligonucleotide are each independently a 2′-OMe modified sugar.
[2797] 1384. The oligonucleotide of any one of the preceding Embodiments, wherein the first 5 sugars at the 5′-end of the oligonucleotide are each independently a 2′-OMe modified sugar.
[2798] 1385. The oligonucleotide of any one of Embodiments 1-1380, wherein the first 1, 2, 3, 4, or 5 sugars at the 5′-end of the oligonucleotide are each independently a 2′-MOE modified sugar.
[2799] 1386. The oligonucleotide of any one of Embodiments 1-1380, wherein the first 3 sugars at the 5′-end of the oligonucleotide are each independently a 2′-MOE modified sugar.
[2800] 1387. The oligonucleotide of any one of Embodiments 1-1380, wherein the first 4 sugars at the 5′-end of the oligonucleotide are each independently a 2′-MOE modified sugar.
[2801] 1388. The oligonucleotide of any one of Embodiments 1-1380, wherein the first 5 sugars at the 5′-end of the oligonucleotide are each independently a 2′-MOE modified sugar.
[2802] 1389. The oligonucleotide of any one of the preceding Embodiments, wherein the last 1, 2, 3, 4, or 5 sugars at the 3′-end of the oligonucleotide are each independently sugars that can increase stability.
[2803] 1390. The oligonucleotide of any one of the preceding Embodiments, wherein the last 3 sugars at the 3′-end of the oligonucleotide are each independently sugars that can increase stability.
[2804] 1391. The oligonucleotide of any one of the preceding Embodiments, wherein the last 4 sugars at the 3′-end of the oligonucleotide are each independently sugars that can increase stability.
[2805] 1392. The oligonucleotide of any one of the preceding Embodiments, wherein the last 5 sugars at the 3′-end of the oligonucleotide are each independently sugars that can increase stability.
[2806] 1393. The oligonucleotide of any one of the preceding Embodiments, wherein the last 1, 2, 3, 4, or 5 sugars at the 3′-end of the oligonucleotide are each independently selected from a bicyclic sugar and a 2′-OR modified sugar, wherein R is optionally substituted C₁₋₆ aliphatic.
[2807] 1394. The oligonucleotide of any one of the preceding Embodiments, wherein the last 3 sugars at the 3′-end of the oligonucleotide are each independently selected from a bicyclic sugar and a 2′-OR modified sugar, wherein R is optionally substituted C₁₋₆ aliphatic.
[2808] 1395. The oligonucleotide of any one of the preceding Embodiments, wherein the last 4 sugars at the 3′-end of the oligonucleotide are each independently selected from a bicyclic sugar and a 2′-OR modified sugar, wherein R is optionally substituted C₁₋₆ aliphatic.
[2809] 1396. The oligonucleotide of any one of the preceding Embodiments, wherein the last 5 sugars at the 3′-end of the oligonucleotide are each independently selected from a bicyclic sugar and a 2′-OR modified sugar, wherein R is optionally substituted C₁₋₆ aliphatic.
[2810] 1397. The oligonucleotide of any one of the preceding Embodiments, wherein the last 3 sugars at the 3′-end of the oligonucleotide are each independently a 2′-OR modified sugar, wherein R is optionally substituted C₁₋₆ aliphatic.
[2811] 1398. The oligonucleotide of any one of the preceding Embodiments, wherein the last 4 sugars at the 3′-end of the oligonucleotide are each independently a 2′-OR modified sugar, wherein R is optionally substituted C₁₋₆ aliphatic.
[2812] 1399. The oligonucleotide of any one of the preceding Embodiments, wherein the last 5 sugars at the 3′-end of the oligonucleotide are each independently a 2′-OR modified sugar, wherein R is optionally substituted C₁₋₆ aliphatic.
[2813] 1400. The oligonucleotide of any one of the preceding Embodiments, wherein the last 1, 2, 3, 4, or 5 sugars at the 3′-end of the oligonucleotide are each independently a 2′-OMe or 2′-MOE modified sugar.
[2814] 1401. The oligonucleotide of any one of the preceding Embodiments, wherein the last 1, 2, 3, 4, or 5 sugars at the 3′-end of the oligonucleotide are each independently a 2′-OMe modified sugar.
[2815] 1402. The oligonucleotide of any one of the preceding Embodiments, wherein the last 3 sugars at the 3′-end of the oligonucleotide are each independently a 2′-OMe modified sugar.
[2816] 1403. The oligonucleotide of any one of the preceding Embodiments, wherein the last 4 sugars at the 3′-end of the oligonucleotide are each independently a 2′-OMe modified sugar.
[2817] 1404. The oligonucleotide of any one of the preceding Embodiments, wherein the last 5 sugars at the 3′-end of the oligonucleotide are each independently a 2′-OMe modified sugar.
[2818] 1405. The oligonucleotide of any one of Embodiments 1-1400, wherein the last 1, 2, 3, 4, or 5 sugars at the 3′-end of the oligonucleotide are each independently a 2′-MOE modified sugar.
[2819] 1406. The oligonucleotide of any one of Embodiments 1-1400, wherein the last 3 sugars at the 3′-end of the oligonucleotide are each independently a 2′-MOE modified sugar.
[2820] 1407. The oligonucleotide of any one of Embodiments 1-1400, wherein the last 4 sugars at the 3′-end of the oligonucleotide are each independently a 2′-MOE modified sugar.
[2821] 1408. The oligonucleotide of any one of Embodiments 1-1400, wherein the last 5 sugars at the 3′-end of the oligonucleotide are each independently a 2′-MOE modified sugar.
[2822] 1409. The oligonucleotide of any one of the preceding Embodiments, wherein the first internucleotidic linkage from the 5′-end of an oligonucleotide is a non-negatively charged internucleotidic linkage.
[2823] 1410. The oligonucleotide of any one of the preceding Embodiments, wherein the first internucleotidic linkage from the 5′-end of an oligonucleotide is a neutral internucleotidic linkage.
[2824] 1411. The oligonucleotide of any one of the preceding Embodiments, wherein the first internucleotidic linkage from the 5′-end of an oligonucleotide is phosphoryl guanidine internucleotidic linkage.
[2825] 1412. The oligonucleotide of any one of the preceding Embodiments, wherein the first internucleotidic linkage from the 5′-end of an oligonucleotide is n004, n008, n025, n026.
[2826] 1413. The oligonucleotide of any one of the preceding Embodiments, wherein the first internucleotidic linkage from the 5′-end of an oligonucleotide is n001.
[2827] 1414. The oligonucleotide of any one of the preceding Embodiments, wherein the first internucleotidic linkage from the 5′-end is chirally controlled and is Rp.
[2828] 1415. The oligonucleotide of any one of Embodiments 1-1413, wherein the first internucleotidic linkage from the 5′-end is chirally controlled and is Sp.
[2829] 1416. The oligonucleotide of any one of the preceding Embodiments, wherein both internucleotidic linkages bonded to the 3^{rd} nucleosides from the 5′-end are each independently a phosphorothioate internucleotidic linkages.
[2830] 1417. The oligonucleotide of any one of the preceding Embodiments, wherein both internucleotidic linkages bonded to the 4^{th} nucleosides from the 5′-end are each independently a phosphorothioate internucleotidic linkages.
[2831] 1418. The oligonucleotide of any one of the preceding Embodiments, wherein both internucleotidic linkages bonded to the 5^{th} nucleosides from the 5′-end are each independently a phosphorothioate internucleotidic linkages.
[2832] 1419. The oligonucleotide of any one of Embodiments 1416-1418, wherein each phosphorothioate internucleotidic linkage is chirally controlled.
[2833] 1420. The oligonucleotide of Embodiment 1419, wherein each phosphorothioate internucleotidic linkage is Sp.
[2834] 1421. The oligonucleotide of any one of the preceding Embodiments, wherein the first internucleotidic linkage from the 3′-end of an oligonucleotide is a non-negatively charged internucleotidic linkage.
[2835] 1422. The oligonucleotide of any one of the preceding Embodiments, wherein the first internucleotidic linkage from the 3′-end of an oligonucleotide is a neutral internucleotidic linkage.
[2836] 1423. The oligonucleotide of any one of the preceding Embodiments, wherein the first internucleotidic linkage from the 3′-end of an oligonucleotide is phosphoryl guanidine internucleotidic linkage.
[2837] 1424. The oligonucleotide of any one of the preceding Embodiments, wherein the first internucleotidic linkage from the 3′-end of an oligonucleotide is n004, n008, n025, n026.
[2838] 1425. The oligonucleotide of any one of the preceding Embodiments, wherein the first internucleotidic linkage from the 3′-end of an oligonucleotide is n001.
[2839] 1426. The oligonucleotide of any one of the preceding Embodiments, wherein the first internucleotidic linkage from the 3′-end is chirally controlled and is Rp.
[2840] 1427. The oligonucleotide of any one of Embodiments 1-1426, wherein the first internucleotidic linkage from the 3′-end is chirally controlled and is Sp.
[2841] 1428. The oligonucleotide of any one of the preceding Embodiments, wherein the sugar of the nucleoside opposite to a target adenosine (position 0, such a nucleoside: N₀) is a natural DNA sugar.
[2842] 1429. The oligonucleotide of any one of the preceding Embodiments, wherein the sugar of the nucleoside at position +1 (the nucleoside to the immediate 5′-side of N₀; i.e., N₊₁ of 5′- . . . N₊₁N₀ . . . -3′) is a natural DNA sugar.
[2843] 1430. The oligonucleotide of any one of Embodiments 1-1428, wherein the sugar of the nucleoside at position +1 (the nucleoside to the immediate 5′-side of N₀; i.e., N₊₁ of 5′- . . . N₊₁N₀ . . . -3′) is a 2′-F modified sugar.
[2844] 1431. The oligonucleotide of any one of the preceding Embodiments, wherein the sugar of the nucleoside at position +2 (N₊₂ of 5′- . . . N₊₂N₊₁N₀ . . . -3′) is a 2′-F modified sugar.
[2845] 1432. The oligonucleotide of any one of the preceding Embodiments, wherein the sugar of the nucleoside at position −1 (N₋₁ of 5′- . . . N₊₂N₊₁N₀N₋₁ . . . -3′) is a natural DNA sugar.
[2846] 1433. The oligonucleotide of any one of the preceding Embodiments, wherein the sugar of the nucleoside at position −2 (N₋₂ of 5′- . . . N₊₂N₊₁N₀N₋₁N₋₂ . . . -3′) is a sugar that can increase stability.
[2847] 1434. The oligonucleotide of any one of the preceding Embodiments, wherein the sugar of the nucleoside at position −2 (N₋₂ of 5′- . . . N₊₂N₊₁N₀N₋₁N₋₂ . . . -3′) is a bicyclic sugar or a 2′-OR modified sugar, wherein R is optionally substituted C₁₋₆ aliphatic.
[2848] 1435. The oligonucleotide of any one of the preceding Embodiments, wherein the sugar of the nucleoside at position −2 (N₋₂ of 5′- . . . N₊₂N₊₁N₀N₋₁N₋₂ . . . -3′) is a bicyclic sugar.
[2849] 1436. The oligonucleotide of any one of Embodiments 1-1434, wherein the sugar of the nucleoside at position −2 (N₋₂ of 5′- . . . N₊₂N₊₁N₀N₋₁N₋₂ . . . -3′) is a 2′-OR modified sugar, wherein R is optionally substituted C₁₋₆ aliphatic.
[2850] 1437. The oligonucleotide of any one of Embodiments 1-1434, wherein the sugar of the nucleoside at position −2 (N₋₂ of 5′- . . . N₊₂N₊₁N₀N₋₁N₋₂ . . . -3′) is a 2′-OMe modified sugar.
[2851] 1438. The oligonucleotide of any one of Embodiments 1-1434, wherein the sugar of the nucleoside at position −2 (N₋₂ of 5′- . . . N₊₂N₊₁N₀N₋₁N₋₂ . . . -3′) is a 2′-MOE modified sugar.
[2852] 1439. The oligonucleotide of any one of Embodiments 1-1434, wherein the sugar of the nucleoside at position −2 (N₋₂ of 5′- . . . N₊₂N₊₁N₀N₋₁N₋₂ . . . -3′) is a 2′-MOE modified sugar.
[2853] 1440. The oligonucleotide of any one of the preceding Embodiments, wherein the sugar of the nucleoside at position −3 (N₋₃ of 5′- . . . N₊₂N₊₁N₀N₋₁N₋₂N₋₃ . . . -3′) is a 2′-F modified sugar.
[2854] 1441. The oligonucleotide of any one of the preceding Embodiments, wherein each sugar of a nucleoside after N₋₃ (e.g., N₋₄, N₋₅, N₋₆, etc.) is independently a sugar that can increase stability.
[2855] 1442. The oligonucleotide of any one of the preceding Embodiments, wherein each sugar of a nucleoside after N₋₃ (e.g., N₋₄, N₋₅, N₋₆, etc.) is independently a bicyclic sugar or a 2′-OR modified sugar, wherein R is optionally substituted C₁₋₆ aliphatic.
[2856] 1443. The oligonucleotide of any one of the preceding Embodiments, wherein a sugar of a nucleoside after N₋₃ (e.g., N₋₄, N₋₅, N₋₆, etc.) is a bicyclic sugar.
[2857] 1444. The oligonucleotide of any one of the preceding Embodiments, wherein a sugar of a nucleoside after N₋₃ (e.g., N₋₄, N₋₅, N₋₆, etc.) is a 2′-OR modified sugar, wherein R is optionally substituted C₁₋₆ aliphatic.
[2858] 1445. The oligonucleotide of any one of the preceding Embodiments, wherein a sugar of a nucleoside after N₋₃ (e.g., N₋₄, N₋₅, N₋₆, etc.) is a 2′-OMe modified sugar.
[2859] 1446. The oligonucleotide of any one of the preceding Embodiments, wherein a sugar of a nucleoside after N₋₃ (e.g., N₋₄, N₋₅, N₋₆, etc.) is a 2′-MOE modified sugar.
[2860] 1447. The oligonucleotide of any one of Embodiments 1-1442, wherein each sugar of a nucleoside after N₋₃ (e.g., N₋₄, N₋₅, N₋₆, etc.) is independently a 2′-OR modified sugar, wherein R is optionally substituted C₁₋₆ aliphatic.
[2861] 1448. The oligonucleotide of any one of Embodiments 1-1442, wherein each sugar of a nucleoside after N₋₃ (e.g., N₋₄, N₋₅, N₋₆, etc.) is independently a 2′-OMe modified sugar.
[2862] 1449. The oligonucleotide of any one of Embodiments 1-1442, wherein each sugar of a nucleoside after N₋₃ (e.g., N₋₄, N₋₅, N₋₆, etc.) is independently a 2′-MOE modified sugar.
[2863] 1450. The oligonucleotide of any one of the preceding Embodiments, wherein each internucleotidic linkage bonded to N₊₁ or N₀ is independently a phosphorothioate internucleotidic linkage.
[2864] 1451. The oligonucleotide of any one of the preceding Embodiments, wherein each internucleotidic linkage bonded to N₊₁ or N₀ is independently a Sp phosphorothioate internucleotidic linkage.
[2865] 1452. The oligonucleotide of any one of the preceding Embodiments, wherein the internucleotidic linkage between N₋₁ and N₋₂ is a non-negatively charged internucleotidic linkage.
[2866] 1453. The oligonucleotide of any one of the preceding Embodiments, wherein the internucleotidic linkage between N₋₁ and N₋₂ is a neutral internucleotidic linkage.
[2867] 1454. The oligonucleotide of any one of the preceding Embodiments, wherein the internucleotidic linkage between N₋₁ and N₋₂ is phosphoryl guanidine internucleotidic linkage.
[2868] 1455. The oligonucleotide of any one of the preceding Embodiments, wherein the internucleotidic linkage between N₋₁ and N₋₂ is n004, n008, n025, n026.
[2869] 1456. The oligonucleotide of any one of the preceding Embodiments, wherein the internucleotidic linkage between N₋₁ and N₋₂ is n001.
[2870] 1457. The oligonucleotide of any one of the preceding Embodiments, wherein the internucleotidic linkage between N₋₁ and N₋₂ is chirally controlled and is Rp.
[2871] 1458. The oligonucleotide of any one of Embodiments 1-1456, wherein the internucleotidic linkage between N₋₁ and N₋₂ is chirally controlled and is Sp.
[2872] 1459. The oligonucleotide of any one of the preceding Embodiments, wherein the internucleotidic linkage between N₋₂ and N₋₃ is a natural phosphate linkage.
[2873] 1460. The oligonucleotide of any one of the preceding Embodiments, wherein each internucleotidic linkage bonded to a nucleoside after N₋₃ (e.g., N₄, N₋₅, N₋₆, etc.) is independently a phosphorothioate internucleotidic linkage except the first internucleotidic linkage from the 3′-end.
[2874] 1461. The oligonucleotide of Embodiment 1460, wherein the phosphorothioate internucleotidic linkage is chirally controlled and is Sp.
[2875] 1462. The oligonucleotide of any one of the preceding Embodiments, wherein a bicyclic sugar is a LNA sugar or a cEt sugar.
[2876] 1463. The oligonucleotide of any one of the preceding Embodiments, wherein the oligonucleotide comprises 1-10 (e.g., 1, 2, 3, 4, 5, 6, 7, 8, 9, or 10) natural phosphate linkages.
[2877] 1464. The oligonucleotide of any one of the preceding Embodiments, wherein the oligonucleotide comprises no more than 5 (e.g., 1, 2, 3, 4, or 5) natural phosphate linkages.
[2878] 1465. The oligonucleotide of any one of the preceding Embodiments, wherein the oligonucleotide comprises no more than 10 (e.g., 1, 2, 3, 4, 5, 6, 7, 8, 9, 10) n001.
[2879] 1466. The oligonucleotide of any one of the preceding Embodiments, wherein the oligonucleotide comprises no more than 10 (e.g., 1, 2, 3, 4, 5, 6, 7, 8, 9, 10) phosphoryl guanidine internucleotidic linkages.
[2880] 1467. An oligonucleotide comprising a duplexing region and a targeting region, wherein a targeting region is or comprises a second region of any one of the preceding Embodiments.
[2881] 1468. An oligonucleotide comprising a duplexing region and a targeting region, wherein a targeting region is or comprises 5′-N₁N₀N₋₁-3′ of any one of the preceding Embodiments.
[2882] 1469. The oligonucleotide of any one of Embodiments 1467-1468, wherein a duplexing region is capable of forming a duplex with a nucleic acid (a duplexing nucleic acid).
[2883] 1470. The oligonucleotide of any one of Embodiments 1467-1469, wherein a targeting region is capable of forming a duplex with a target nucleic acid comprising a target adenosine.
[2884] 1471. The oligonucleotide of any one of Embodiments 1467-1470, wherein a duplexing nucleic acid is not a target nucleic acid.
[2885] 1472. The oligonucleotide of any one of Embodiments 1467-1470, wherein the oligonucleotide is an oligonucleotide of any one of Embodiments 1-1466.
[2886] 1473. The oligonucleotide of any one of Embodiments 1467-1472, wherein the length of a targeting region is about or at least about 10, 11, 12, 13, 14, 15, 16, 17, 18, 19, 20, 21, 22, 23, 24, 25, 26, 27, 28, 29 or 30 nucleosides.
[2887] 1474. The oligonucleotide of any one of Embodiments 1467-1473, wherein the length of a duplexing region is about or at least about 10, 11, 12, 13, 14, 15, 16, 17, 18, 19, 20, 21, 22, 23, 24, 25, 26, 27, 28, 29 or 30 nucleosides.
[2888] 1475. The oligonucleotide of any one of Embodiments 1467-1474, wherein the length of a duplexing oligonucleotide is about or at least about 10, 11, 12, 13, 14, 15, 16, 17, 18, 19, 20, 21, 22, 23, 24, 25, 26, 27, 28, 29 or 30 nucleosides.
[2889] 1476. The oligonucleotide of any one of Embodiments 1467-1475, wherein a duplexing oligonucleotide comprises a step loop.
[2890] 1477. The oligonucleotide of any one of Embodiments 1467-1476, wherein the oligonucleotide comprises one or more modified sugars, one or more modified internucleotidic linkages, and one or more natural phosphate linkages.
[2891] 1478. The oligonucleotide of any one of Embodiments 1467-1477, wherein the oligonucleotide is not chirally controlled.
[2892] 1479. The oligonucleotide of any one of Embodiments 1467-1478, wherein the duplexing oligonucleotide comprises one or more modified sugars and one or more modified internucleotidic linkages.
[2893] 1480. The oligonucleotide of any one of Embodiments 1467-1479, wherein the majority of or all sugars in the duplexing oligonucleotide are modified sugars.
[2894] 1481. The oligonucleotide of any one of Embodiments 1467-1479, wherein the majority of or all sugars in the duplexing oligonucleotide are 2′-F modified sugars.
[2895] 1482. The oligonucleotide of any one of Embodiments 1467-1479, wherein the majority of or all sugars in the duplexing oligonucleotide are 2′-OR modified sugars, wherein R is optionally substituted C₁₋₆ aliphatic.
[2896] 1483. The oligonucleotide of any one of Embodiments 1467-1479, wherein the majority of or all sugars in the duplexing oligonucleotide are 2′-OMe modified sugars
[2897] 1484. The oligonucleotide of any one of Embodiments 1467-1483, wherein the majority of or all internucleotidic linkages in the duplexing oligonucleotide are modified.
[2898] 1485. The oligonucleotide of any one of Embodiments 1467-1484, wherein the majority of or all internucleotidic linkages in the duplexing oligonucleotide are phosphorothioate internucleotidic linkages.
[2899] 1486. The oligonucleotide of any one of Embodiments 1467-1485, wherein the duplexing oligonucleotide is chirally controlled.
[2900] 1487. The oligonucleotide of any one of Embodiments 1467-1486, wherein the majority of or all internucleotidic linkages in the duplexing oligonucleotide are Sp phosphorothioate internucleotidic linkages.
[2901] 1488. The oligonucleotide of any one of Embodiments 1467-1487, wherein the oligonucleotide and its duplexing oligonucleotide are administered as a duplex.
[2902] 1489. The oligonucleotide of any one of Embodiments 1467-1487, wherein the oligonucleotide and its duplexing oligonucleotide are administered separately.
[2903] 1490. The oligonucleotide of any one of the preceding Embodiments, wherein each sugar is independently selected from a natural DNA sugar, a natural RNA sugar, a 2′-F modified sugar, and a 2′-OR modified sugar wherein R is optionally substituted C₁₋₆ aliphatic.
[2904] 1491. The oligonucleotide of any one of the preceding Embodiments, wherein each sugar is independently selected from a natural DNA sugar, a natural RNA sugar, a 2′-F modified sugar, and a 2′-OMe or a 2′-MOE modified sugar.
[2905] 1492. The oligonucleotide of any one of the preceding Embodiments, wherein each internucleotidic linkage is independently selected from a natural phosphate linkage, a non-negatively charged internucleotidic linkage, and a phosphorothioate internucleotidic linkage.
[2906] 1493. The oligonucleotide of any one of the preceding Embodiments, wherein each internucleotidic linkage is independently selected from a natural phosphate linkage, a neutral internucleotidic linkage, and a phosphorothioate internucleotidic linkage.
[2907] 1494. The oligonucleotide of any one of the preceding Embodiments, wherein each internucleotidic linkage is independently selected from a natural phosphate linkage, a phosphoryl guanidine internucleotidic linkage, and a phosphorothioate internucleotidic linkage.
[2908] 1495. The oligonucleotide of any one of the preceding Embodiments, wherein each internucleotidic linkage is independently selected from a natural phosphate linkage, n001, and a phosphorothioate internucleotidic linkage.
[2909] 1496. An oligonucleotide having the structure of Mod001L001mCn001RmC*SmC*SfA*SfG*SmCmA*SfG*SfCmU*SfUn001RmCfA*SfGn001RfUmC*SfC*SfC*SfU*SmUmUfC*ST*Sb008U*SIn001SmUfC*SmG*SmAn001RmU (SEQ ID NO.: 780).
[2910] 1497. An oligonucleotide having the structure of Mod001L001mCn001RmC*SmC*SfA*SfG*SmCmA*SfG*SfCmU*SfUn001RmCfA*SfGn001RfUmC*SfC*SfC*SfUn001RmUmUfC*ST*Sb008U*SIn001SmUfC*SmG*SmAn001RmU (SEQ ID NO.: 781).
[2911] 1498. An oligonucleotide having the structure of Mod001L001mCn001RmC*SmC*SfA*SfG*SmCmAfG*SfCmU*SfUn001RmCfA*SfGn001RfUmC*SfC*SmCfUn001RmUmUfC*ST*Sb008U*SIn001SmUfC*SmG*SmAn001RmU (SEQ ID NO.: 782).
[2912] 1499. An oligonucleotide having the structure of Mod001L001mCn001RmC*SmC*SfA*SfG*SfCmA*SfG*SmCmU*SfUn001RmCfA*SfGn001RfUmC*SfC*SfC*SfUn001RfU*SmUfC*ST*Sb008U*SIn001SmUfC*SmG*SmAn001RmU (SEQ ID NO.: 783).
[2913] 1500. An oligonucleotide having the structure of Mod001L001mCn001RmC*SmC*SfA*SfG*SfCmA*SfG*SfCmU*SfUn001RmCfA*SfGn001RfUmC*SmCfC*SfUn001RfU*SmUfC*ST*Sb008U*SIn001SmUfC*SmG*SmAn001RmU (SEQ ID NO.: 784).
[2914] 1501. An oligonucleotide having the structure of Mod001L001mCn001RmC*SmC*SfA*SfG*SmCmAfG*SfC*SfU*SfUn001RfC*SfAfGn001RfUmCmCfC*SfU*SmUmU*SfC*ST*Sb008U*SIn001SmUfC*SmG*SmAn001RmU (SEQ ID NO.: 785).
[2915] 1502. An oligonucleotide having the structure of Mod001L001mCn001RmC*SmC*SfA*SfG*SfCmA*SfG*SfCmU*SfUn001RmCfA*SfGn001RfUmC*SfC*SfC*SfU*SfU*SmUfC*ST*Sb008U*SIn001SmUfC*SmG*SmAn001RmU (SEQ ID NO.: 786).
[2916] 1503. An oligonucleotide having the structure of Mod001L001mCn001RmC*SmC*SfA*SfG*SfCmA*SfG*Sm5CeoAeofG*SfC*SteofUn001RmCfa*SfGn001RfUmC*SfC*SfC*SfLUn001RTeoTeofC*ST*Sb008U*SIn001SmUfC*SmG*SmAn001RmU (SEQ ID NO.: 668).
[2917] 1504. An oligonucleotide having the structure of Mod001L001mCn001RmC*SmC*SfA*SfG*SmCmAfG*SfC*SmUfUn001RmCfA*SmGn001RfUmC*SfC*SfC*SfUn001RmUmUfC*ST*Sb008U*SIn001SmUfC*SmG*SmAn001RmU (SEQ ID NO.: 670).
[2918] 1505. An oligonucleotide having the structure of Mod001L001mCn001RmC*SmC*SfA*SfG*Sm5CeoAeofG*SfC*STeofUn001RmCfA*SmGn001RfUmC*SfC*SfC*SfUn001RTeoTeofC*ST*Sb008U*SIn001SmUfC*SmG*SmAn001RmU (SEQ ID NO.: 718).
[2919] 1506. An oligonucleotide having the structure of Mod001L001mCn001RmC*SmC*SfA*SfG*Sm5CeoAeofG*SfC*STeofUn001RmCfA*SmGn001RfUm5Ceo*SfC*SfC*SfUn001RTeoTeofC*ST*Sb008U*SIn001SmUfC*SmG*SmAn001RmU (SEQ ID NO.: 719).
[2920] 1507. An oligonucleotide having the structure of Mod001L001mCn001RmC*SmC*SfA*SfG*Sm5CeoAeofG*SmCTeo*SmUn001RmCfA*SfGn001RmUmCmC*SfC*SfU*STeoTeofC*ST*Sb008U*SIn001SmUfC*SmG*SmAn001RmU (SEQ ID NO.: 720).
[2921] 1508. An oligonucleotide having the structure of Mod001L001mCn001RmC*SmC*SfA*SfG*Sm5CeoAeofG*SmCTeo*SmUn001RmCfA*SfGn001RmUm5CeomC*SfC*SfU*STeoTeofC*ST*Sb008U*SIn001SmUfC*SmG*SmAn001RmU (SEQ ID NO: 721).
[2922] 1509. An oligonucleotide having the structure of Mod001L001mCn001RmC*SmC*SfA*SfG*Sm5CeoAeofG*Sm5CeoTeo*SmUn001Rm5CeofA*SfGn001RmUm5Ceom5Ceo*SfC*SfU*STeoTeofC*ST*Sb008U*SIn001SmUfC*SmG*SmAn001RmU (SEQ ID NO: 722).
[2923] 1510. An oligonucleotide having the structure of Mod001L001mCn001RmC*SmC*SfA*SfG*Sm5CeoAeofG*SfC*SmUmUn001RmCfA*SfGn001RfUm5Ceo*SfC*SmCmUn001RmUTeofC*ST*Sb008U*SIn001SmUfC*SmG*SmAn001RmU (SEQ ID NO.: 723).
[2924] 1511. An oligonucleotide having the structure of Mod001L001mCn001RmC*SmC*SfA*SfG*Sm5CeoAeofG*SfC*STeofUn001RmCfA*SfGn001RfUm5Ceo*SfC*SfC*SfUn001RTeoTeofC*ST*Sb008U*SIn001SmUfC*SmG*SmAn001RmU (SEQ ID NO.: 724).
[2925] 1512. The oligonucleotide of any one of the preceding Embodiments, wherein the oligonucleotide is in a salt form.
[2926] 1513. The oligonucleotide of any one of the preceding Embodiments, wherein the oligonucleotide is in a pharmaceutically acceptable salt form.
[2927] 1514. The oligonucleotide of any one of the preceding Embodiments, wherein diastereomeric excess of one or more (e.g., 5, 6, 7, 8, 9, 10, 11, 12, 13, 14, 15, 16, 17, 18, 19, 20 or more) chiral linkage phosphorus centers is independently about or at least about 80%, 85%, 90%, 91%, 92%, 93%, 94%, 95%, 96%, 97%, 98% or 99%.
[2928] 1515. The oligonucleotide of any one of the preceding Embodiments, wherein diastereomeric excess of one or more (e.g., 5, 6, 7, 8, 9, 10, 11, 12, 13, 14, 15, 16, 17, 18, 19, 20 or more) chiral linkage phosphorus centers is independently about or at least about 90%, 91%, 92%, 93%, 94%, 95%, 96%, 97%, 98% or 99%.
[2929] 1516. The oligonucleotide of any one of the preceding Embodiments, wherein diastereomeric excess of each phosphorothioate linkage phosphorus is independently about or at least about 80%, 85%, 90%, 91%, 92%, 93%, 94%, 95%, 96%, 97%, 98% or 99%.
[2930] 1517. The oligonucleotide of any one of the preceding Embodiments, wherein diastereomeric excess of each phosphorothioate linkage phosphorus is independently about or at least about 90%, 91%, 92%, 93%, 94%, 95%, 96%, 97%, 98% or 99%.
[2931] 1518. The oligonucleotide of any one of the preceding Embodiments, wherein diastereomeric excess of each chiral linkage phosphorus centers is independently about or at least about 80%, 85%, 90%, 91%, 92%, 93%, 94%, 95%, 96%, 97%, 98% or 99%.
[2932] 1519. The oligonucleotide of any one of the preceding Embodiments, wherein diastereomeric excess of each chiral linkage phosphorus centers is independently about or at least about 90%, 91%, 92%, 93%, 94%, 95%, 96%, 97%, 98% or 99%.
[2933] 1520. The oligonucleotide of any one of the preceding Embodiments, wherein the oligonucleotide has a purity of about 10%-100% (e.g., about 10%-95%, 50%-80%, 50%-85%, 50%-90%, 50%-95%, 60%-80%, 60%-85%, 60%-90%, 60%-95%, 60%-100%, 65%-80%, 65%-85%, 65%-90%, 65%-95%, 65%-100%, 70%-80%, 70%-85%, 70%-90%, 70%-95%, 70%-100%, 75%-80%, 75%-85%, 75%-90%, 75%-95%, 75%-100%, 80%-85%, 80%-90%, 80%-95%, 80%-100%, 85%-90%, 85%-95%, 85%-100%, 90%-95%, 90%-100%, or about or at least about 10%, 20%, 30%, 40%, 50%, 60%, 65%, 70%, 75%, 80%, 85%, 90%, 95%, or 100%, etc.).
[2934] 1521. The oligonucleotide of any one of the preceding Embodiments, wherein the oligonucleotide has a purity of about 50%-100% (e.g., about 50%-80%, 50%-85%, 50%-90%, 50%-95%, 60%-80%, 60%-85%, 60%-90%, 60%-95%, 60%-100%, 65%-80%, 65%-85%, 65%-90%, 65%-95%, 65%-100%, 70%-80%, 70%-85%, 70%-90%, 70%-95%, 70%-100%, 75%-80%, 75%-85%, 75%-90%, 75%-95%, 75%-100%, 80%-85%, 80%-90%, 80%-95%, 80%-100%, 85%-90%, 85%-95%, 85%-100%, 90%-95%, 90%-100%, or at least about 50%, 60%, 65%, 70%, 75%, 80%, 85%, 90%, 95%, or 100%, etc.).
[2935] 1522. A pharmaceutical composition which comprises or delivers an effective amount of an oligonucleotide of any one of the preceding Embodiments or a pharmaceutically acceptable salt thereof and a pharmaceutically acceptable carrier.
[2936] 1523. An oligonucleotide composition comprising a plurality of oligonucleotides, wherein oligonucleotides of the plurality share:
   [2937] 1) a common base sequence, and
   [2938] 2) the same linkage phosphorus stereochemistry independently at one or more (e.g., about 1-50, 1-40, 1-30, 1-25, 1-20, 1-15, 1-10, 5-50, 5-40, 5-30, 5-25, 5-20, 5-15, 5-10, 1, 2, 3, 4, 5, 6, 7, 8, 9, 10, 11, 12, 13, 14, 15, 16, 17, 18, 19, 20, 21, 22, 23, 24, or 25 or more) chiral internucleotidic linkages (“chirally controlled internucleotidic linkages”);
   [2939] wherein each oligonucleotide of the plurality is independently an oligonucleotide of any one of the preceding Embodiments or an acid, base, or salt form thereof.
[2940] 1524. An oligonucleotide composition comprising a plurality of oligonucleotides, wherein oligonucleotides of the plurality share:
   [2941] 1) a common base sequence, and
   [2942] 2) the same linkage phosphorus stereochemistry independently at one or more (e.g., about 1-50, 1-40, 1-30, 1-25, 1-20, 1-15, 1-10, 5-50, 5-40, 5-30, 5-25, 5-20, 5-15, 5-10, 1, 2, 3, 4, 5, 6, 7, 8, 9, 10, 11, 12, 13, 14, 15, 16, 17, 18, 19, 20, 21, 22, 23, 24, or 25 or more) chiral internucleotidic linkages (“chirally controlled internucleotidic linkages”);
   [2943] wherein each oligonucleotide of the plurality is independently an oligonucleotide of any one of Embodiments 1637-1662, or an acid, base, or salt form thereof.
[2944] 1525. An oligonucleotide composition comprising a plurality of oligonucleotides, wherein oligonucleotides of the plurality share:
   [2945] 1) a common base sequence, and
   [2946] 2) the same linkage phosphorus stereochemistry independently at one or more (e.g., about 1-50, 1-40, 1-30, 1-25, 1-20, 1-15, 1-10, 5-50, 5-40, 5-30, 5-25, 5-20, 5-15, 5-10, 1, 2, 3, 4, 5, 6, 7, 8, 9, 10, 11, 12, 13, 14, 15, 16, 17, 18, 19, 20, 21, 22, 23, 24, or 25 or more) chiral internucleotidic linkages (“chirally controlled internucleotidic linkages”);
   [2947] wherein the common base sequence is complementary to a base sequence of a portion of a nucleic acid which portion comprises a target adenosine.
[2948] 1526. The composition of Embodiment 1525, wherein the common base sequence is complementary to a base sequence of a portion of a nucleic acid with 0-10 (e.g., 0-1, 0-2, 0-3, 0-4, 0-5, 0-6, 0-7, 0-8, 0-9, 0-10, 1-2, 1-3, 1-4, 1-5, 1-6, 1-7, 1-8, 1-9, 1-10, 2-3, 2-4, 2-5, 2-6, 2-7, 2-8, 2-9, 2-10, 3-4, 3-5, 3-6, 3-7, 3-8, 3-9, 3-10, 0, 1, 2, 3, 4, 5, 6, 7, 8, 9, or 10, etc.) mismatches which are not Watson-Crick base pairs.
[2949] 1527. The composition of Embodiment 1525, wherein the common base sequence is complementary to a base sequence of a portion of a nucleic acid with 0-5 mismatches which are not Watson-Crick base pairs.
[2950] 1528. The composition of Embodiment 1525, wherein the common base sequence is 100% complementary to a base sequence of a portion of a nucleic acid across the length of the common base sequence except the nucleoside opposite to a target adenosine.
[2951] 1529. The composition of Embodiment 1525, wherein the common base sequence is 100% complementary to a base sequence of a portion of a nucleic acid across the length of the common base sequence.
[2952] 1530. The composition of any one of Embodiments 1523-1529, wherein the composition can edit a target A to I when contacted with a nucleic acid in a system expressing ADAR.
[2953] 1531. The composition of any one of Embodiments 1523-1530, wherein the target adenosine is a G to A mutation associated with a condition, disorder or disease.
[2954] 1532. The composition of any one of Embodiments 1523-1531, wherein oligonucleotides of the plurality share the same base and sugar modifications.
[2955] 1533. The composition of any one of Embodiments 1523-1532, wherein oligonucleotides of the plurality share the same pattern of backbone chiral centers.
[2956] 1534. The composition of any one of Embodiments 1523-1533, wherein the composition is enriched for oligonucleotides of the plurality compared to a stereorandom preparation of the oligonucleotides wherein no internucleotidic linkages are chirally controlled.
[2957] 1535. The composition of any one of Embodiments 1523-1533, wherein a non-random level of all oligonucleotides in the composition that share the common base sequence and the same base and sugar modifications are oligonucleotides of the plurality.
[2958] 1536. The composition of any one of Embodiments 1523-1533, wherein a non-random level of all oligonucleotides in the composition that share the common base sequence are oligonucleotides of the plurality.
[2959] 1537. The composition of any one of Embodiments 1523-1536, wherein oligonucleotides of the plurality are of the same oligonucleotide or one or more pharmaceutically acceptable salts thereof.
[2960] 1538. The composition of any one of Embodiments 1523-1536, wherein oligonucleotides of the plurality are one or more pharmaceutically acceptable salts of the same acid-form oligonucleotide.
[2961] 1539. The composition of any one of Embodiments 1523-1536, wherein oligonucleotides of the plurality are of the same constitution.
[2962] 1540. The composition of Embodiment 1539, wherein a non-random level of all oligonucleotides in the composition that share the same base sequence as oligonucleotides of the plurality are oligonucleotides of the plurality.
[2963] 1541. The composition of Embodiment 1539, wherein a non-random level of all oligonucleotides in the composition that share the same constitution are oligonucleotides of the plurality.
[2964] 1542. The composition of any one of Embodiments 1523-1536, wherein oligonucleotides of the plurality are of the same structure.
[2965] 1543. The composition of any one of Embodiments 1523-1542, wherein oligonucleotides of the plurality are sodium salts.
[2966] 1544. The composition of any one of Embodiments 1523-1543, wherein oligonucleotides of the plurality share the same linkage phosphorus stereochemistry at 10 or more chiral internucleotidic linkages.
[2967] 1545. The composition of any one of Embodiments 1523-1544, wherein oligonucleotides of the plurality share the same linkage phosphorus stereochemistry at each phosphorothioate internucleotidic linkages.
[2968] 1546. The composition of any one of Embodiments 1523-1545, wherein oligonucleotides of the plurality do not share the same linkage phosphorus stereochemistry at one or more or any non-negatively charged internucleotidic linkages.
[2969] 1547. An oligonucleotide composition comprising one or more pluralities of oligonucleotides, wherein oligonucleotides of each plurality independently share:
   [2970] 1) a common base sequence, and
   [2971] 2) the same linkage phosphorus stereochemistry independently at one or more (e.g., about 1-50, 1-40, 1-30, 1-25, 1-20, 1-15, 1-10, 5-50, 5-40, 5-30, 5-25, 5-20, 5-15, 5-10, 1, 2, 3, 4, 5, 6, 7, 8, 9, 10, 11, 12, 13, 14, 15, 16, 17, 18, 19, 20, 21, 22, 23, 24, or 25 or more) chiral internucleotidic linkages (“chirally controlled internucleotidic linkages”);
   [2972] wherein each oligonucleotide of the plurality is independently an oligonucleotide of any one of the preceding Embodiments or an acid, base, or salt form thereof.
[2973] 1548. An oligonucleotide composition comprising one or more pluralities of oligonucleotides, wherein oligonucleotides of each plurality independently share:
   [2974] 1) a common base sequence, and
   [2975] 2) the same linkage phosphorus stereochemistry independently at one or more (e.g., about 1-50, 1-40, 1-30, 1-25, 1-20, 1-15, 1-10, 5-50, 5-40, 5-30, 5-25, 5-20, 5-15, 5-10, 1, 2, 3, 4, 5, 6, 7, 8, 9, 10, 11, 12, 13, 14, 15, 16, 17, 18, 19, 20, 21, 22, 23, 24, or 25 or more) chiral internucleotidic linkages (“chirally controlled internucleotidic linkages”);
   [2976] wherein each oligonucleotide of the plurality is independently an oligonucleotide of any one of the preceding Embodiments and Embodiments 1637-1662, or an acid, base, or salt form thereof.
[2977] 1549. An oligonucleotide composition comprising one or more pluralities of oligonucleotides, wherein oligonucleotides of each plurality independently share:
   [2978] 1) a common base sequence, and
   [2979] 2) the same linkage phosphorus stereochemistry independently at one or more (e.g., about 1-50, 1-40, 1-30, 1-25, 1-20, 1-15, 1-10, 5-50, 5-40, 5-30, 5-25, 5-20, 5-15, 5-10, 1, 2, 3, 4, 5, 6, 7, 8, 9, 10, 11, 12, 13, 14, 15, 16, 17, 18, 19, 20, 21, 22, 23, 24, or 25 or more) chiral internucleotidic linkages (“chirally controlled internucleotidic linkages”);
   [2980] wherein each oligonucleotide of the plurality is independently an oligonucleotide of any one of Embodiments 1637-1662, or an acid, base, or salt form thereof.
[2981] 1550. An oligonucleotide composition comprising one or more pluralities of oligonucleotides, wherein oligonucleotides of each plurality independently share:
   [2982] 1) a common base sequence, and
   [2983] 2) the same linkage phosphorus stereochemistry independently at one or more (e.g., about 1-50, 1-40, 1-30, 1-25, 1-20, 1-15, 1-10, 5-50, 5-40, 5-30, 5-25, 5-20, 5-15, 5-10, 1, 2, 3, 4, 5, 6, 7, 8, 9, 10, 11, 12, 13, 14, 15, 16, 17, 18, 19, 20, 21, 22, 23, 24, or 25 or more) chiral internucleotidic linkages (“chirally controlled internucleotidic linkages”);
   [2984] wherein the common base sequence of each plurality is independently complementary to a base sequence of a portion of a nucleic acid which portion comprises a target adenosine.
[2985] 1551. The composition of Embodiment, wherein the common base sequence is complementary to abase sequence of a portion of a nucleic acid with 0-10 (e.g., 0-1, 0-2, 0-3, 0-4, 0-5, 0-6, 0-7, 0-8, 0-9, 0-10, 1-2, 1-3, 1-4, 1-5, 1-6, 1-7, 1-8, 1-9, 1-10, 2-3, 2-4, 2-5, 2-6, 2-7, 2-8, 2-9, 2-10, 3-4, 3-5, 3-6, 3-7, 3-8, 3-9, 3-10, 0, 1, 2, 3, 4, 5, 6, 7, 8, 9, or 10, etc.) mismatches which are not Watson-Crick base pairs.
[2986] 1552. The composition of Embodiment 1551, wherein the common base sequence of each plurality is independently complementary to a base sequence of a portion of a nucleic acid with 0-5 mismatches which are not Watson-Crick base pairs.
[2987] 1553. The composition of Embodiment 1551, wherein the common base sequence of each plurality is independently 100% complementary to a base sequence of a portion of a nucleic acid across the length of the common base sequence except the nucleoside opposite to a target adenosine.
[2988] 1554. The composition of Embodiment 1551, wherein the common base sequence of each plurality is independently 100% complementary to a base sequence of a portion of a nucleic acid across the length of the common base sequence.
[2989] 1555. The composition of any one of Embodiments 1547-1554, wherein each plurality of oligonucleotides can independently edit a target A to I when contacted with a nucleic acid in a system expressing ADAR.
[2990] 1556. The composition of any one of Embodiments 1547-1555, wherein a target adenosine is a G to A mutation associated with a condition, disorder or disease.
[2991] 1557. The composition of any one of Embodiments 1547-1556, wherein the composition comprises two or more (e.g., 2, 3, 4, 5, 6, 7, 8, 9, 10, or more) pluralities of oligonucleotides.
[2992] 1558. The composition of any one of Embodiments 1547-1557, wherein common base sequences of at least two pluralities are different.
[2993] 1559. The composition of any one of Embodiments 1547-1558, wherein no two pluralities of oligonucleotides share the same common base sequence.
[2994] 1560. The composition of any one of Embodiments 1547-1559, wherein at least two pluralities of oligonucleotides target different adenosine.
[2995] 1561. The composition of any one of Embodiments 1547-1560, wherein no two pluralities of oligonucleotides target the same adenosine.
[2996] 1562. The composition of any one of Embodiments 1547-1561, wherein at least two pluralities of oligonucleotides target different transcripts.
[2997] 1563. The composition of any one of Embodiments 1547-1562, wherein no two pluralities of oligonucleotides target the same transcript.
[2998] 1564. The composition of any one of Embodiments 1547-1563, wherein at least two plurality of oligonucleotides target adenosine residues in transcripts from different polynucleotides.
[2999] 1565. The composition of any one of Embodiments 1547-1566, wherein no two pluralities of oligonucleotides target transcripts from the same polynucleotide.
[3000] 1566. The composition of any one of Embodiments 1547-1565, wherein at least two plurality of oligonucleotides target adenosine residues in transcripts from different genes.
[3001] 1567. The composition of any one of Embodiments 1547-1566, wherein no two pluralities of oligonucleotides target transcripts from the same gene.
[3002] 1568. The composition of any one of Embodiments 1547-1567, wherein oligonucleotides of each plurality independently share the same base and sugar modifications within the plurality.
[3003] 1569. The composition of any one of Embodiments 1547-1568, wherein oligonucleotides of each plurality independently share the same pattern of backbone chiral centers within the plurality.
[3004] 1570. The composition of any one of Embodiments 1547-1569, wherein for each plurality independently, the composition is enriched for oligonucleotides of that plurality compared to a stereorandom preparation of oligonucleotides of that plurality wherein no internucleotidic linkages are chirally controlled.
[3005] 1571. The composition of any one of Embodiments 1547-1570, wherein for each plurality independently, a non-random level of all oligonucleotides in the composition that share the common base sequence and the same base and sugar modifications are oligonucleotides of the plurality.
[3006] 1572. The composition of any one of Embodiments 1547-1570, wherein for each plurality independently, a non-random level of all oligonucleotides in the composition that share the common base sequence are oligonucleotides of the plurality.
[3007] 1573. The composition of any one of Embodiments 1547-1572, wherein for each plurality independently, oligonucleotides of the plurality are of the same oligonucleotide or one or more pharmaceutically acceptable salts thereof.
[3008] 1574. The composition of any one of Embodiments 1547-1573, wherein for each plurality independently, oligonucleotides of the plurality are one or more pharmaceutically acceptable salts of the same acid-form oligonucleotide.
[3009] 1575. The composition of any one of Embodiments 1547-1572, wherein for each plurality independently, oligonucleotides of the plurality are of the same constitution.
[3010] 1576. The composition of Embodiment 1575, wherein for each plurality independently, a non-random level of all oligonucleotides in the composition that share the same base sequence as oligonucleotides of the plurality are oligonucleotides of the plurality.
[3011] 1577. The composition of Embodiment 1575, wherein for each plurality independently, a non-random level of all oligonucleotides in the composition that share the same constitution are oligonucleotides of the plurality.
[3012] 1578. The composition of any one of Embodiments 1547-1577, wherein for one or two or all pluralities independently, oligonucleotides of the plurality are of the same structure.
[3013] 1579. The composition of any one of Embodiments 1547-1578, wherein for one or two or all pluralities independently, oligonucleotides of the plurality are each independently a pharmaceutically acceptable salt form.
[3014] 1580. The composition of any one of Embodiments 1547-1578, wherein for one or two or all pluralities independently, oligonucleotides of the plurality are sodium salts.
[3015] 1581. The composition of any one of Embodiments 1547-1580, wherein for one or two or all pluralities independently, oligonucleotides of the plurality share the same linkage phosphorus stereochemistry at 10 or more chiral internucleotidic linkages.
[3016] 1582. The composition of any one of Embodiments 1547-1581, wherein for each plurality independently, oligonucleotides of the plurality share the same linkage phosphorus stereochemistry at 10 or more chiral internucleotidic linkages.
[3017] 1583. The composition of any one of Embodiments 1547-1582, wherein for one or two or all pluralities independently, oligonucleotides of the plurality share the same linkage phosphorus stereochemistry at each phosphorothioate internucleotidic linkages.
[3018] 1584. The composition of any one of Embodiments 1547-1583, wherein for each plurality independently, oligonucleotides of the plurality share the same linkage phosphorus stereochemistry at each phosphorothioate internucleotidic linkages.
[3019] 1585. The composition of any one of Embodiments 1547-1584, wherein for one or two or all pluralities independently, oligonucleotides of the plurality do not share the same linkage phosphorus stereochemistry at one or more or any non-negatively charged internucleotidic linkages.
[3020] 1586. The composition of any one of Embodiments 1547-1585, wherein for each plurality independently, oligonucleotides of the plurality do not share the same linkage phosphorus stereochemistry at one or more or any non-negatively charged internucleotidic linkages.
[3021] 1587. A composition comprising a plurality of oligonucleotides which are of a particular oligonucleotide type characterized by:
   [3022] a) a common base sequence;
   [3023] b) a common pattern of backbone linkages;
   [3024] c) a common pattern of backbone chiral centers;
   [3025] d) a common pattern of backbone phosphorus modifications;
   [3026] which composition is chirally controlled in that it is enriched, relative to a substantially racemic preparation of oligonucleotides having the same common base sequence, pattern of backbone linkages and pattern of backbone phosphorus modifications, for oligonucleotides of the particular oligonucleotide type, or a non-random level of all oligonucleotides in the composition that share the common base sequence are oligonucleotides of the plurality; and
   [3027] wherein each oligonucleotide of the plurality is independently an oligonucleotide of any one of the preceding Embodiments or an acid, base, or salt form thereof.
[3028] 1588. A composition comprising a plurality of oligonucleotides which are of a particular oligonucleotide type characterized by:
   [3029] a) a common base sequence;
   [3030] b) a common pattern of backbone linkages;
   [3031] c) a common pattern of backbone chiral centers;
   [3032] d) a common pattern of backbone phosphorus modifications;
   [3033] which composition is chirally controlled in that it is enriched, relative to a substantially racemic preparation of oligonucleotides having the same common base sequence, pattern of backbone linkages and pattern of backbone phosphorus modifications, for oligonucleotides of the particular oligonucleotide type, or a non-random level of all oligonucleotides in the composition that share the common base sequence are oligonucleotides of the plurality; and
   [3034] wherein each oligonucleotide of the plurality is independently an oligonucleotide of any one of Embodiments 1637-1662, or an acid, base, or salt form thereof.
[3035] 1589. A composition comprising a plurality of oligonucleotides which are of a particular oligonucleotide type characterized by:
   [3036] a) a common base sequence;
   [3037] b) a common pattern of backbone linkages;
   [3038] c) a common pattern of backbone chiral centers;
   [3039] d) a common pattern of backbone phosphorus modifications;
   [3040] which composition is chirally controlled in that it is enriched, relative to a substantially racemic preparation of oligonucleotides having the same common base sequence, pattern of backbone linkages and pattern of backbone phosphorus modifications, for oligonucleotides of the particular oligonucleotide type, or a non-random level of all oligonucleotides in the composition that share the common base sequence are oligonucleotides of the plurality; and
   [3041] wherein the common base sequence is complementary to a base sequence of a portion of a nucleic acid which portion comprises a target adenosine.
[3042] 1590. The composition of Embodiment 1589, wherein the common base sequence is complementary to a base sequence of a portion of a nucleic acid with 0-10 (e.g., 0-1, 0-2, 0-3, 0-4, 0-5, 0-6, 0-7, 0-8, 0-9, 0-10, 1-2, 1-3, 1-4, 1-5, 1-6, 1-7, 1-8, 1-9, 1-10, 2-3, 2-4, 2-5, 2-6, 2-7, 2-8, 2-9, 2-10, 3-4, 3-5, 3-6, 3-7, 3-8, 3-9, 3-10, 0, 1, 2, 3, 4, 5, 6, 7, 8, 9, or 10, etc.) mismatches which are not Watson-Crick base pairs.
[3043] 1591. The composition of Embodiment 1589, wherein the common base sequence is complementary to a base sequence of a portion of a nucleic acid with 0-5 mismatches which are not Watson-Crick base pairs.
[3044] 1592. The composition of Embodiment 1589, wherein the common base sequence is 100% complementary to a base sequence of a portion of a nucleic acid across the length of the common base sequence except the nucleoside opposite to a target adenosine.
[3045] 1593. The composition of Embodiment 1589, wherein the common base sequence is 100% complementary to a base sequence of a portion of a nucleic acid across the length of the common base sequence.
[3046] 1594. The composition of any one of Embodiments 1587-1593, wherein the composition can edit a target A to I when contacted with a nucleic acid in a system expressing ADAR.
[3047] 1595. The composition of any one of Embodiments 1587-1594, wherein the target adenosine is a G to A mutation associated with a condition, disorder or disease.
[3048] 1596. The composition of any one of Embodiments 1587-1595, wherein the composition is enriched, relative to a substantially racemic preparation of oligonucleotides having the same common base sequence, pattern of backbone linkages and pattern of backbone phosphorus modifications, for oligonucleotides of the particular oligonucleotide type.
[3049] 1597. A composition comprising a plurality of oligonucleotides, wherein each oligonucleotides of the plurality is independently a particular oligonucleotide or a salt thereof, wherein the particular oligonucleotide is an oligonucleotide of any one of Embodiments 1-1513.
[3050] 1598. A composition comprising a plurality of oligonucleotides, wherein each oligonucleotides of the plurality is independently a particular oligonucleotide or a salt thereof, wherein the particular oligonucleotide is an oligonucleotide of any one of Embodiments 1-1513, wherein at least about 5%-100%, 10%-100%, 20-100%, 30%-100%, 40%-100%, 50%-100%, 5%-90%, 10%-90%, 20-90%, 30%-90%, 40%-90%, 50%-90%, 5%-85%, 10%-85%, 20-85%, 30%-85%, 40%-85%, 50%-85%, 5%-80%, 10%-80%, 20-80%, 30%-80%, 40%-80%, 50%-80%, 5%-75%, 10%-75%, 20-75%, 30%-75%, 40%-75%, 50%-75%, 5%-70%, 10%-70%, 20-70%, 30%-70%, 40%-70%, 50%-70%, 5%-65%, 10%-65%, 20-65%, 30%-65%, 40%-65%, 50%-65%, 5%-60%, 10%-60%, 20-60%, 30%-60%, 40%-60%, 50%-60%, 5%, 10%, 20%, 30%, 40%, 50%, 60%, 70%, 80%, 85%, 90%, 91%, 92%, 93%, 94%, 95%, 96%, 97%, 98%, or 99% of all oligonucleotides in the composition that share the base sequence of a the particular oligonucleotide are oligonucleotide of the plurality.
[3051] 1599. A composition comprising a plurality of oligonucleotides, wherein each oligonucleotides of the plurality is independently a particular oligonucleotide or a salt thereof, wherein the particular oligonucleotide is an oligonucleotide of any one of Embodiments 1-1513, wherein at least about 5%-100%, 10%-100%, 20-100%, 30%-100%, 40%-100%, 50%-100%, 5%-90%, 10%-90%, 20-90%, 30%-90%, 40%-90%, 50%-90%, 5%-85%, 10%-85%, 20-85%, 30%-85%, 40%-85%, 50%-85%, 5%-80%, 10%-80%, 20-80%, 30%-80%, 40%-80%, 50%-80%, 5%-75%, 10%-75%, 20-75%, 30%-75%, 40%-75%, 50%-75%, 5%-70%, 10%-70%, 20-70%, 30%-70%, 40%-70%, 50%-70%, 5%-65%, 10%-65%, 20-65%, 30%-65%, 40%-65%, 50%-65%, 5%-60%, 10%-60%, 20-60%, 30%-60%, 40%-60%, 50%-60%, 5%, 10%, 20%, 30%, 40%, 50%, 60%, 70%, 80%, 85%, 90%, 91%, 92%, 93%, 94%, 95%, 96%, 97%, 98%, or 99% of all oligonucleotides in the composition that share the constitution of the particular oligonucleotide or a salt thereof are oligonucleotide of the plurality.
[3052] 1600. A composition comprising a plurality of oligonucleotides, wherein each oligonucleotides of the plurality is independently a particular oligonucleotide or a salt thereof, wherein the particular oligonucleotide is an oligonucleotide of Table 1.
[3053] 1601. The composition of any one of Embodiments 1587-1600, wherein a non-random level of all oligonucleotides in the composition that share the common base sequence are oligonucleotides of the plurality.
[3054] 1602. The composition of any one of Embodiments 1523-1601, wherein the level of oligonucleotides of a plurality in oligonucleotides in the composition that share the common base sequence of the plurality is about or at least about (DS)^{nc}, wherein DS is about 85%-100% (e.g., about 85%, 86%, 87%, 88%, 89%, 90%, 91%, 92%, 93%, 94%, 95%, 96%, 97%, 98%, 99% or 99.5% or more) and nc is the number of chirally controlled internucleotidic linkages.
[3055] 1603. The composition of any one of Embodiments 1523-1601, wherein for each plurality of oligonucleotides, the level of oligonucleotides of the plurality in oligonucleotides in the composition that share the common base sequence of the plurality is independently about or at least about (DS)^{nc}, wherein DS is about 85%-100% (e.g., about 85%, 86%, 87%, 88%, 89%, 90%, 91%, 92%, 93%, 94%, 95%, 96%, 97%, 98%, 99% or 99.5% or more) and nc is the number of chirally controlled internucleotidic linkages.
[3056] 1604. The composition of any one of Embodiments 1523-1601, wherein the level of oligonucleotides of a plurality in oligonucleotides in the composition that share the common constitution of the plurality is about or at least about (DS)^{nc}, wherein DS is about 85%-100% (e.g., about 85%, 86%, 87%, 88%, 89%, 90%, 91%, 92%, 93%, 94%, 95%, 96%, 97%, 98%, 99% or 99.5% or more) and nc is the number of chirally controlled internucleotidic linkages.
[3057] 1605. The composition of any one of Embodiments 1523-1601, wherein for each plurality of oligonucleotides, the level of oligonucleotides of the plurality in oligonucleotides in the composition that share the common constitution of the plurality is independently about or at least about (DS)^{nc}, wherein DS is about 85%-100% (e.g., about 85%, 86%, 87%, 88%, 89%, 90%, 91%, 92%, 93%, 94%, 95%, 96%, 97%, 98%, 99% or 99.5% or more) and nc is the number of chirally controlled internucleotidic linkages.
[3058] 1606. The composition of any one of Embodiments 1523-1605, wherein DS is about 90%-100% (e.g., about 90%, 91%, 92%, 93%, 94%, 95%, 96%, 97%, 98%, 99% or 99.5% or more).
[3059] 1607. The composition of any one of Embodiments 1602-1606, wherein nc is about 5-40 (e.g., about 1, 2, 3, 4, 5, 6, 7, 8, 9, 10, 11, 12, 13, 14, 15, 16, 17, 18, 19, 20, 21, 22, 23, 24, 25, 26, 27, 28, 29, 30, 31, 32, 33, 34, 35, 36, 37, 38, 39, or 40) or more.
[3060] 1608. The composition of any one of Embodiments 1523-1601, wherein the level is at least about 10%-100%, or at least about 10%, 20%, 30%, 40%, 50%, 60%, 65%, 70%, 75%, 80%, 85%, 90%, or 95%.
[3061] 1609. The composition of any one of Embodiments 1523-1601, wherein the level is at least about 50%-100%, or at least about 50%, 60%, 65%, 70%, 75%, 80%, 85%, 90%, or 95%.
[3062] 1610. A composition comprising a particular oligonucleotide, wherein about 10%-100% (e.g., about 10%-100%, 20-100%, 30%-100%, 40%-100%, 50%-80%, 50%-85%, 50%-90%, 50%-95%, 60%-80%, 60%-85%, 60%-90%, 60%-95%, 60%-100%, 65%-80%, 65%-85%, 65%-90%, 65%-95%, 65%-100%, 70%-80%, 70%-85%, 70%-90%, 70%-95%, 70%-100%, 75%-80%, 75%-85%, 75%-90%, 75%-95%, 75%-100%, 80%-85%, 80%-90%, 80%-95%, 80%-100%, 85%-90%, 85%-95%, 85%-100%, 90%-95%, 90%-100%, 10%, 20%, 30%, 40%, 50%, 60%, 65%, 70%, 75%, 80%, 85%, 90%, 95%, or 100%, etc.) of all oligonucleotides in the composition that share the base sequence of the oligonucleotide are independently the particular oligonucleotide or a salt thereof.
[3063] 1611. A composition comprising a particular oligonucleotide, wherein about 30%-90% of all oligonucleotides in the composition that share the base sequence of the oligonucleotide are independently the particular oligonucleotide or a salt thereof.
[3064] 1612. A composition comprising a particular oligonucleotide, wherein about 40%-90% of all oligonucleotides in the composition that share the base sequence of the oligonucleotide are independently the particular oligonucleotide or a salt thereof.
[3065] 1613. The composition of any one of Embodiments 1610-1612, wherein the particular oligonucleotide is an oligonucleotide of any one of Embodiments 1-1521.
[3066] 1614. The composition of any one of Embodiments 1610-1613, wherein the particular oligonucleotide is an oligonucleotide selected from Table 1.
[3067] 1615. The composition of any one of Embodiments 1610-1614, wherein the particular oligonucleotide comprises about or at least about 5, 6, 7, 8, 9, 10, 11, 12, 13, 14, 15, 16, 17, 18, 19, 20, 21, 22, 23, 24, 25, 26, 27, 28, 29, 30 or more chiral internucleotidic linkages.
[3068] 1616. The composition of any one of Embodiments 1610-1615, wherein each salt is independently a pharmaceutically acceptable salt.
[3069] 1617. The composition of any one of Embodiments 1523-1616, wherein when the composition is contacted with a sample comprising the target nucleic acid and an adenosine deaminase, the target adenosine residue is modified.
[3070] 1618. The composition of Embodiment 1617, wherein the modification is or comprises modification performed by ADAR1.
[3071] 1619. The composition of Embodiment 1617 or 1618, wherein the modification is or comprises modification performed by ADAR2.
[3072] 1620. The composition of any one of Embodiments 1617-1619, wherein the modification is performed in vitro.
[3073] 1621. The composition of any one of Embodiments 1617-1619, wherein the sample is a cell.
[3074] 1622. The composition of any one of Embodiments 1617-1621, wherein the target adenosine is converted into inosine.
[3075] 1623. The composition of any one of Embodiments 1617-1622, wherein the target adenosine is modified to a greater degree than that is observed with a comparable reference oligonucleotide composition.
[3076] 1624. The composition of Embodiment 1623, wherein the reference oligonucleotide composition comprises no or a lower level of oligonucleotides of the plurality.
[3077] 1625. The composition of any one of Embodiments 1623-1624, wherein the reference composition does not contain oligonucleotides that have the same constitution as an oligonucleotide of the plurality.
[3078] 1626. The composition of any one of Embodiments 1623-1625, wherein the reference composition does not contain oligonucleotides that have the same structure as an oligonucleotide of the plurality.
[3079] 1627. The composition of Embodiment 1623, wherein the reference oligonucleotide composition is a composition whose oligonucleotides having the same base sequence as oligonucleotides of the plurality contain a lower level of 2′-F modifications compared to oligonucleotides of the plurality.
[3080] 1628. The composition of any one of Embodiments 1623-1627, wherein the reference oligonucleotide composition is a composition whose oligonucleotides having the same base sequence as oligonucleotides of the plurality contain a lower level of 2′-OMe modifications compared to oligonucleotides of the plurality.
[3081] 1629. The composition of any one of Embodiments 1623-1628, wherein the reference oligonucleotide composition is a composition whose oligonucleotides having the same base sequence as oligonucleotides of the plurality have a different sugar modification pattern compared to oligonucleotides of the plurality.
[3082] 1630. The composition of any one of Embodiments 1623-1629, wherein the reference oligonucleotide composition is a composition whose oligonucleotides having the same base sequence as oligonucleotides of the plurality contain a lower level of modified internucleotidic linkages compared to oligonucleotides of the plurality.
[3083] 1631. The composition of any one of Embodiments 1623-1630, wherein the reference oligonucleotide composition is a composition whose oligonucleotides having the same base sequence as oligonucleotides of the plurality contain a lower level of phosphorothioate internucleotidic linkages compared to oligonucleotides of the plurality.
[3084] 1632. The composition of any one of Embodiments 1623-1631, wherein the reference composition is a stereorandom oligonucleotide composition.
[3085] 1633. The composition of Embodiment 1623, wherein the reference composition is a stereorandom oligonucleotide composition of oligonucleotides of the same constitution as oligonucleotides of the plurality.
[3086] 1634. The composition of any one of the preceding Embodiments, wherein the composition does not cause significant degradation of the nucleic acid (e.g., no more than about 5%-100% (e.g., no more than about 10%-100%, 20-100%, 30%-100%, 40%-100%, 50%-80%, 50%-85%, 50%-90%, 50%-95%, 60%-80%, 60%-85%, 60%-90%, 60%-95%, 60%-100%, 65%-80%, 65%-85%, 65%-90%, 65%-95%, 65%-100%, 70%-80%, 70%-85%, 70%-90%, 70%-95%, 70%-100%, 75%-80%, 75%-85%, 75%-90%, 75%-95%, 75%-100%, 80%-85%, 80%-90%, 80%-95%, 80%-100%, 85%-90%, 85%-95%, 85%-100%, 90%-95%, 90%-100%, 10%, 20%, 30%, 40%, 50%, 60%, 65%, 70%, 75%, 80%, 85%, 90%, 95%, or 100%, etc.)).
[3087] 1635. The composition of any one of the preceding Embodiments, wherein the composition does not cause significant exon skipping or altered exon inclusion in the target nucleic acid (e.g., no more than about 5%-100% (e.g., no more than about 10%-100%, 20-100%, 30%-100%, 40%-100%, 50%-80%, 50%-85%, 50%-90%, 50%-95%, 60%-80%, 60%-85%, 60%-90%, 60%-95%, 60%-100%, 65%-80%, 65%-85%, 65%-90%, 65%-95%, 65%-100%, 70%-80%, 70%-85%, 70%-90%, 70%-95%, 70%-100%, 75%-80%, 75%-85%, 75%-90%, 75%-95%, 75%-100%, 80%-85%, 80%-90%, 80%-95%, 80%-100%, 85%-90%, 85%-95%, 85%-100%, 90%-95%, 90%-100%, 10%, 20%, 30%, 40%, 50%, 60%, 65%, 70%, 75%, 80%, 85%, 90%, 95%, or 100%, etc.)).
[3088] 1636. The composition of any one of Embodiments 1523-1635, wherein the composition is a pharmaceutical composition, and further comprises a pharmaceutically acceptable carrier.
[3089] 1637. An oligonucleotide, wherein the oligonucleotide is otherwise identical to an oligonucleotide of any one of the preceding Embodiments, except that at a position of a modified internucleotidic linkage is a linkage having the structure of —O⁵—P^{L}(R^{CA})—O³—, wherein:
   [3090] P^{L} is P, or P(═W);
   [3091] W is O, S, or W^{N};
   [3092] R^{CA} is or comprises an optionally substituted or capped chiral auxiliary moiety,
   [3093] O⁵ is an oxygen bonded to a 5′-carbon of a sugar, and
   [3094] O³ is an oxygen bonded to a 3′-carbon of a sugar.
[3095] 1638. The oligonucleotide of Embodiment 1637, wherein the chiral auxiliary is removed the linkage is converted to the modified internucleotidic linkage.
[3096] 1639. The oligonucleotide of Embodiment 1637, wherein a modified internucleotidic linkage is a phosphorothioate internucleotidic linkage.
[3097] 1640. The oligonucleotide of Embodiment 1639, wherein when W is replaced with —SH and R^{CA} is replaced with O, P^{L} has the same configuration as the linkage phosphorus of the phosphorothioate internucleotidic linkage.
[3098] 1641. The oligonucleotide of any one of Embodiments 1637-1640, wherein a modified internucleotidic linkage is a neutral internucleotidic linkage.
[3099] 1642. The oligonucleotide of any one of Embodiments 1637-1640, wherein a modified internucleotidic linkage is a phosphoryl guanidine internucleotidic linkage.
[3100] 1643. The oligonucleotide of any one of Embodiments 1637-1640, wherein a modified internucleotidic linkage is n004, n008, n025, n026.
[3101] 1644. The oligonucleotide of any one of Embodiments 1637-1640, wherein a modified internucleotidic linkage is n001.
[3102] 1645. The oligonucleotide of any one of Embodiments 1637-1644, wherein at each position of a phosphorothioate internucleotidic linkage is independently a linkage having the structure of —O⁵—P^{L}(W)(R^{CA})—O³—.
[3103] 1646. The oligonucleotide of any one of Embodiments 1637-1644, wherein at each position of a modified internucleotidic linkage is independently a linkage having the structure of —O⁵—P^{L}(W)(R^{CA})—O³—.
[3104] 1647. The oligonucleotide of any one of Embodiments 1637-1646, wherein one or each W is S.
[3105] 1648. The oligonucleotide of any one of Embodiments 1637-1647, wherein one and only one P^{L} is P.
[3106] 1649. The oligonucleotide of any one of Embodiments 1637-1648, wherein each R^{CA} is independently

[chemical structure]

[3107] 1650. The oligonucleotide of any one of Embodiments 1637-1648, wherein each R^{CA} is independently

[chemical structure]

wherein R^{C1} is R, —Si(R)₃ or —SO₂R, R^{C2} and R^{C3} are taken together with their intervening atoms to form an optionally substituted 3-7 membered saturated or partially unsaturated ring having, in addition to the nitrogen atom, 0-2 heteroatoms, R^{C4} is —H or —C(O)R′.
[3108] 1651. The oligonucleotide of Embodiment 1649 or 1650, wherein in a linkage, R^{C4} is —C(O)R and P^{L} is P.
[3109] 1652. The oligonucleotide of any one of Embodiments 1650-1651, wherein in a linkage, R^{C4} is —C(O)R and W is S.
[3110] 1653. The oligonucleotide of any one of Embodiments 1650-1652, wherein in each linkage wherein W is S, R^{C4} is —C(O)R′.
[3111] 1654. The oligonucleotide of any one of Embodiments 1650-1653, wherein R^{C4} is —C(O)CH₃.
[3112] 1655. The oligonucleotide of Embodiment 1650, wherein in a linkage, R^{C4} is —H and P^{L} is P.
[3113] 1656. The oligonucleotide of any one of Embodiments 1650-1655, wherein R^{C2} and R^{C3} are taken together with their intervening atoms to form an optionally substituted 5-membered ring having no heteroatoms in addition to the nitrogen atom.
[3114] 1657. The oligonucleotide of any one of Embodiments 1650-1656, wherein each R^{CA} is independently

[chemical structure]

[3115] 1658. The oligonucleotide of any one of Embodiments 1650-1657, wherein R^{C1} is —SiPh₂Me.
[3116] 1659. The oligonucleotide of any one of Embodiments 1650-1657, wherein R^{C1} is —SO₂R.
[3117] 1660. The oligonucleotide of any one of Embodiments 1650-1657, wherein R^{C1} is —SO₂R, wherein R is optionally substituted C₁₋₁₀ aliphatic.
[3118] 1661. The oligonucleotide of any one of Embodiments 1650-1657, wherein R^{C1} is —SO₂R, wherein R is optionally substituted phenyl.
[3119] 1662. The oligonucleotide of any one of Embodiments 1650-1657, wherein R^{C1} is —SO₂R, wherein R is phenyl.
[3120] 1663. A phosphoramidite, wherein the nucleobase of the phosphoramidite is a nucleobase of any one of Embodiments 1-1521 or a tautomer thereof, wherein the nucleobase or tautomer thereof is optionally substituted or protected.
[3121] 1664. A phosphoramidite, wherein the nucleobase is or comprises Ring BA, wherein Ring BA has the structure of BA-I, BA-I-a, BA-I-b, BA-II, BA-II-a, BA-II-b, BA-III, BA-III-a, BA-III-b, BA-IV, BA-IV-a, BA-IV-b, BA-V, BA-V-a, BA-V-b, or BA-VI, or a tautomer of Ring BA, wherein the nucleobase is optionally substituted or protected.
[3122] 1665. The phosphoramidite of any one of Embodiments 1663-1664, wherein the sugar of the phosphoramidite is a sugar of any one of Embodiments 1-1521, wherein the sugar is optionally protected.
[3123] 1666. The phosphoramidite of any one of Embodiments 1663-1665, wherein the phosphoramidite has the structure of R^{NS}—P(OR)N(R)₂, wherein R^{NS} is a optionally protected nucleoside moiety, and each R is as described herein.
[3124] 1667. The phosphoramidite of any one of Embodiments 1663-1665, wherein the phosphoramidite has the structure of R^{NS}—P(OCH₂CH₂CN)N(i-Pr)₂.
[3125] 1668. The phosphoramidite of any one of Embodiments 1663-1665, wherein the phosphoramidite comprises a chiral auxiliary moiety, wherein the phosphorus is bonded to an oxygen and a nitrogen atom of the chiral auxiliary moiety.
[3126] 1669. The phosphoramidite of any one of Embodiments 1663-1665 or 1668, wherein the phosphoramidite has the structure of

[chemical structure]

or a salt thereof.
[3127] 1670. The phosphoramidite of any one of Embodiments 1663-1665 or 1668, wherein the phosphoramidite has the structure of

[chemical structure]

wherein R^{NS} is a optionally protected nucleoside moiety, R^{C1} is R, —Si(R)₃ or —SO₂R, R^{C2} and R^{C3} are taken together with their intervening atoms to form an optionally substituted 3-7 membered saturated or partially unsaturated ring having, in addition to the nitrogen atom, 0-2 heteroatoms.
[3128] 1671. The phosphoramidite of any one of Embodiments 1669-1670, wherein R^{C2} and R^{C3} are taken together with their intervening atoms to form an optionally substituted 5-membered saturated ring having no heteroatoms in addition to the nitrogen atom.
[3129] 1672. The phosphoramidite of any one of Embodiments 1669-1671, wherein the phosphoramidite has the structure of

[chemical structure]

or a salt thereof.
[3130] 1673. The phosphoramidite of any one of Embodiments 1669-1671, wherein the phosphoramidite has the structure of

[chemical structure]

or a salt thereof.
[3131] 1674. The phosphoramidite of any one of Embodiments 1669-1671, wherein the phosphoramidite has the structure of

[chemical structure]

or a salt thereof.
[3132] 1675. The phosphoramidite of any one of Embodiments 1669-1671, wherein the phosphoramidite has the structure of

[chemical structure]

[3133] 1676. The phosphoramidite of any one of Embodiments 1669-1675, wherein R^{C1} is —SiPh₂Me.
[3134] 1677. The phosphoramidite of any one of Embodiments 1669-1675, wherein R^{C1} is —SO₂R.
[3135] 1678. The phosphoramidite of any one of Embodiments 1669-1675, wherein R^{C1} is —SO₂R, wherein R is optionally substituted C₁₋₁₀ aliphatic.
[3136] 1679. The phosphoramidite of any one of Embodiments 1669-1675, wherein R^{C1} is —SO₂R, wherein R is optionally substituted phenyl.
[3137] 1680. The phosphoramidite of any one of Embodiments 1669-1675, wherein R^{C1} is —SO₂R, wherein R is phenyl.
[3138] 1681. A compound having the structure of

[chemical structure]

or a salt thereof, wherein R^{NS} is an optionally substituted/protected nucleoside, X^{C} is O or S, and each of R^{C5} and R^{C6} is independently R.
[3139] 1682. The compound of Embodiment 1681, wherein X^{C} is O.
[3140] 1683. The compound of Embodiment 1681, wherein X^{C} is S.
[3141] 1684. The compound of any one of Embodiments 1681-1683, wherein one R^{C5} is not hydrogen.
[3142] 1685. The compound of any one of Embodiments 1681-1684, wherein one R^{C5} is hydrogen.
[3143] 1686. The compound of any one of Embodiments 1681-1685, wherein one R^{C6} is not hydrogen.
[3144] 1687. The compound of any one of Embodiments 1681-1686, wherein one R^{C6} is hydrogen.
[3145] 1688. The compound of any one of Embodiments 1681-1687, wherein one R^{C5} and one R^{C6} are taken together with their intervening atoms to form an optionally substituted 3-20 (e.g., 3-15, 3-10, 5-10, 3, 4, 5, 6, 7, 8, 9, 10, 11, 12, 13, 14, 15, 16, 17, 18, 19, 20) membered monocyclic, bicyclic or polycyclic ring having 0-5 heteroatoms.
[3146] 1689. The compound of any one of Embodiments 1681-1687, wherein one R^{C5} and one R^{C6} are taken together with their intervening atoms to form an optionally substituted cyclohexyl ring.
[3147] 1690. The compound of Embodiment 1681, wherein —X^{C}—C(R^{C5})₂—C(R^{C6})₂—S— is —OCH(CH₃)CH(CH₃)S—.
[3148] 1691. The compound of Embodiment 1681, wherein —X^{C}—C(R^{C5})₂—C(R^{C6})₂—S— is —SCH(CH₃)CH(CH₃)S—.
[3149] 1692. The phosphoramidite or compound of any one of Embodiments 1666-1691, wherein a hydroxyl group of R^{NS} is protected.
[3150] 1693. The phosphoramidite or compound of any one of Embodiments 1666-1691, wherein a hydroxyl group of R^{NS} is protected as —ODMTr.
[3151] 1694. The phosphoramidite or compound of any one of Embodiments 1666-1691, wherein the 5′-OH of R^{NS} is protected.
[3152] 1695. The phosphoramidite or compound of Embodiment 1694, wherein the 5′-OH of R^{NS} is protected as —ODMTr.
[3153] 1696. The phosphoramidite or compound of any one of Embodiments 1666-1695, wherein R^{NS} is an optionally substituted or protected nucleoside selected from

[chemical structure]

or a salt thereof, wherein BA^{s} is as described herein.
[3154] 1697. The phosphoramidite or compound of any one of Embodiments 1666-1696, wherein R^{NS} is selected from

[chemical structure]

or a salt thereof, wherein BA^{s} is as described herein.
[3155] 1698. The phosphoramidite or compound of any one of Embodiments 1666-1697, wherein R^{NS} is selected from

[chemical structure]

[chemical structure]

or a salt thereof, wherein BA^{s} is optionally substituted or protected nucleobase, and each —OH is optionally and independently substituted or protected.
[3156] 1699. The phosphoramidite or compound of any one of Embodiments 1666-1698, wherein R^{NS} is selected from

[chemical structure]

or a salt thereof, wherein BA^{s} is optionally substituted or protected nucleobase, and each —OH of the nucleoside is independently protected, wherein at least one —OH is protected as DMTrO—.
[3157] 1700. The phosphoramidite or compound of any one of Embodiments 1666-1699, wherein R^{NS} is selected from

[chemical structure]

[chemical structure]

or a salt thereof, wherein BA^{s} is an optionally protected nucleobase selected from A, T, C, G, U, and tautomers thereof, and each —OH of the nucleoside is independently protected, wherein at least one —OH is protected as DMTrO—.
[3158] 1701. The phosphoramidite or compound of any one of Embodiments 1666-1700, wherein the phosphoramidite or compound comprises a nucleobase of any one of Embodiments 1-1521 or a tautomer thereof, wherein the nucleobase or tautomer thereof is optionally substituted or protected.
[3159] 1702. The phosphoramidite or compound of any one of Embodiments 1666-1701, wherein the phosphoramidite or compound comprises a nucleobase, wherein the nucleobase is or comprises Ring BA, wherein Ring BA has the structure of BA-I, BA-I-a, BA-I-b, BA-II, BA-II-a, BA-II-b, BA-III, BA-III-a, BA-III-b, BA-IV, BA-IV-a, BA-IV-b, BA-V, BA-V-a, BA-V-b, or BA-VI, or a tautomer of Ring BA, wherein the nucleobase is optionally substituted or protected.
[3160] 1703. The phosphoramidite or compound of any one of Embodiments 1666-1702, wherein the phosphoramidite or compound comprises a nucleobase, wherein the nucleobase is or comprises Ring BA, wherein Ring BA has the structure of BA-I, BA-I-a, BA-I-b, BA-II, BA-II-a, BA-II-b, BA-III, BA-III-a, BA-III-b, BA-IV, BA-IV-a, BA-IV-b, BA-V, BA-V-a, BA-V-b, or BA-VI, or a tautomer of Ring BA, wherein the nucleobase is optionally substituted or protected.
[3161] 1704. The phosphoramidite or compound of any one of Embodiments 1666-1703, wherein BA^{s} has the structure of BA-I, BA-I-a, BA-I-b, BA-II, BA-II-a, BA-II-b, BA-III, BA-III-a, BA-III-b, BA-IV, BA-IV-a, BA-IV-b, BA-V, BA-V-a, BA-V-b, or BA-VI, or a tautomer of Ring BA, wherein the nucleobase is optionally substituted or protected.
[3162] 1705. The phosphoramidite or compound of any one of Embodiments 1666-1701, wherein the phosphoramidite or compound comprises hypoxanthine.
[3163] 1706. The phosphoramidite or compound of any one of Embodiments 1666-1701, wherein the phosphoramidite or compound comprises O⁶-protected hypoxanthine.
[3164] 1707. The phosphoramidite or compound of any one of Embodiments 1666-1701, wherein the phosphoramidite or compound comprises O⁶-protected hypoxanthine, wherein the O⁶ protection group is —CH₂CH₂Si(R)₃, wherein the —CH₂CH₂— is optionally substituted and each R is not —H.
[3165] 1708. The phosphoramidite or compound of any one of Embodiments 1666-1701, wherein the phosphoramidite or compound comprises O⁶-protected hypoxanthine, wherein the O⁶ protection group is —CH₂CH₂Si(Me)₃.
[3166] 1709. The phosphoramidite or compound of any one of Embodiments 1666-1708, wherein the phosphoramidite or compound comprises a sugar which is a sugar of any one of Embodiments 1-1521.
[3167] 1710. The phosphoramidite or compound of any one of Embodiments 1666-1695, wherein R^{NS} is an optionally substituted or protected nucleoside selected from A, T, C, G and U.
[3168] 1711. The phosphoramidite or compound of any one of Embodiments 1666-1695, wherein R^{NS} is an optionally substituted or protected nucleoside selected from b001U, b002U, b003U, b004U, b005U, b006U, b008U, b002A, b001G, b004C, b007U, b001A, b001C, b002C, b003C, b002I, b003I, b009U, b003A, b007C, Asm01, Gsm01, 5MSfC, Usm04, 5MRdT, Csm15, Csm16, rCsm14, Csm17 and Tsm18.
[3169] 1712. The phosphoramidite or compound of any one of Embodiments 1666-1711, wherein R^{NS} is bonded to phosphorus through its 3′-O—.
[3170] 1713. The phosphoramidite or compound of any one of Embodiments 1669-1712, wherein the purity of the phosphoramidite is at least 85%, 90%, 95%, 96%, 97%, 98%, or 99%.
[3171] 1714. A method for preparing an oligonucleotide or composition, comprising coupling a —OH group of an oligonucleotide or a nucleoside with a phosphoramidite or compound of any one of Embodiments 1663-1713.
[3172] 1715. A method for preparing an oligonucleotide or composition, comprising coupling a 5′-OH of an oligonucleotide or a nucleoside with a phosphoramidite or compound of any one of Embodiments 1663-1713.
[3173] 1716. A method for preparing an oligonucleotide or composition, comprising removing a chiral auxiliary moiety from an oligonucleotide of any one of Embodiments 1523-1662.
[3174] 1717. The method of any one of Embodiments 1714-1716, wherein the oligonucleotide, or an oligonucleotide in the composition, comprises a sugar comprising 2′-OH.
[3175] 1718. The method of any one of Embodiments 1714-1717, wherein the oligonucleotide, or an oligonucleotide in the composition, comprises a sugar comprising 2′-OH, wherein the sugar is bonded to a chirally controlled internucleotidic linkage.
[3176] 1719. The oligonucleotide, composition or method of any one of the preceding Embodiments, wherein each heteroatom is independently selected from nitrogen, oxygen, silicon, phosphorus and sulfur.
[3177] 1720. The oligonucleotide, composition or method of any one of the preceding Embodiments, wherein each nucleobase independently comprises an optionally substituted ring having at least one nitrogen.
[3178] 1721. A method, comprising:
   [3179] assessing an agent or a composition thereof in a cell, tissue or animal, wherein the cell, tissue or animal is or comprises a cell, tissue or organ associated or of a condition, disorder or disease, and/or comprises a nucleotide sequence associated with a condition, disorder or disease; and
   [3180] administering to a subject susceptible to or suffering from a condition, disorder or disease an effective amount of an agent or a composition for preventing or treating the condition, disorder or disease.
[3181] 1722. A method, comprising:
   [3182] administering to a subject susceptible to or suffering from a condition, disorder or disease an effective amount of an agent or a composition for preventing or treating the condition, disorder or disease, wherein the agent or composition is assessed in a cell, tissue or animal, wherein the cell, tissue or animal is or comprises a cell, tissue or organ associated or of a condition, disorder or disease, and/or comprises a nucleotide sequence associated with a condition, disorder or disease.
[3183] 1723. The method of Embodiment 1721-1722, wherein the subject is a human.
[3184] 1724. The method of any one of Embodiments 1721-1723, wherein a condition, disorder or disease is associated with a G to A mutation.
[3185] 1725. The method of any one of Embodiments 1721-1724, wherein a condition, disorder or disease is associated with 1024 G>A (E342K) mutation in human SERPINA1 gene.
[3186] 1726. The method of any one of Embodiments 1721-1725, wherein a condition, disorder or disease is alpha-1 antitrypsin deficiency.
[3187] 1727. The method of any one of Embodiments 1721-1723, wherein a condition, disorder or disease is cancer.
[3188] 1728. A method for characterizing an oligonucleotide or a composition, comprising:
   [3189] administering the oligonucleotide or composition to a cell or a population thereof comprising or expressing an ADAR1 polypeptide or a characteristic portion thereof, or a polynucleotide encoding an ADAR1 polypeptide or a characteristic portion thereof.
[3190] 1729. The method of any one of Embodiments 1721-1728, wherein a cell is a rodent cell.
[3191] 1730. The method of any one of Embodiments 1721-1728, wherein a cell is a rat cell.
[3192] 1731. The method of any one of Embodiments 1721-1728, wherein a cell is a mouse cell.
[3193] 1732. The method of any one of Embodiments 1721-1731, wherein the genome of the cell comprises a polynucleotide encoding an ADAR1 polypeptide or a characteristic portion thereof.
[3194] 1733. A method for characterizing an oligonucleotide or a composition, comprising:
   [3195] administering the oligonucleotide or composition to a non-human animal or a population thereof comprising or expressing an ADAR1 polypeptide or a characteristic portion thereof, or a polynucleotide encoding an ADAR1 polypeptide or a characteristic portion thereof.
[3196] 1734. The method of Embodiment 1733, wherein the animal is a mouse.
[3197] 1735. The method of any one of Embodiments 1733-1734, wherein the genome of the animal comprises a polynucleotide encoding an ADAR1 polypeptide or a characteristic portion thereof.
[3198] 1736. The method of any one of Embodiments 1733-1734, wherein the germline genome of the animal comprises a polynucleotide encoding an ADAR1 polypeptide or a characteristic portion thereof.
[3199] 1737. The method of any one of Embodiments 1721-1736, wherein an ADAR1 polypeptide or a characteristic portion thereof is or comprises one or both of human ADAR1 Z-DNA binding domains.
[3200] 1738. The method of any one of Embodiments 1721-1737, wherein an ADAR1 polypeptide or a characteristic portion thereof is or comprises one or more or all of human ADAR1 dsRNA binding domains.
[3201] 1739. The method of any one of Embodiments 1721-1738, wherein an ADAR1 polypeptide or a characteristic portion thereof is or comprises human deaminase domain.
[3202] 1740. The method of any one of Embodiments 1721-1739, wherein an ADAR1 polypeptide or a characteristic portion thereof is or comprises human ADAR1.
[3203] 1741. The method of any one of Embodiments 1721-1740, wherein an ADAR1 polypeptide or a characteristic portion thereof is or comprises human ADAR1 p110.
[3204] 1742. The method of any one of Embodiments 1721-1740, wherein an ADAR1 polypeptide or a characteristic portion thereof is or comprises human ADAR1 p150.
[3205] 1743. The method of any one of Embodiments 1721-1742, wherein activity levels of an oligonucleotide or composition observed from a cell or a cell from an animal, or a population thereof, is more similar to those observed in a comparable human cell or a population thereof compared to those observed in a cell prior to engineering or a cell from an animal prior to engineering, or a population thereof.
[3206] 1744. The method of Embodiment 1743, wherein a comparable human cell is of the same type as a cell or a cell from an animal.
[3207] 1745. The method of any one of Embodiments 1721-1744, wherein the cell, tissue or animal is or comprises a cell, tissue or organ associated with or of a condition, disorder or disease.
[3208] 1746. The method Embodiment 1745, wherein a cell, tissue or organ associated with or of a condition, disorder or disease is or comprises a tumor.
[3209] 1747. The method of any one of Embodiments 1721-1746, wherein the cell, tissue or animal comprises a nucleotide sequence associated with a condition, disorder or disease.
[3210] 1748. The method of Embodiment 1747, wherein a nucleotide sequence associated with a condition, disorder or disease is homozygous.
[3211] 1749. The method of Embodiment 1747, wherein a nucleotide sequence associated with a condition, disorder or disease is heterozygous.
[3212] 1750. The method of Embodiment 1747, wherein a nucleotide sequence associated with a condition, disorder or disease is hemizygous.
[3213] 1751. The method of any one of Embodiments 1747-1750, wherein a nucleotide sequence associated with a condition, disorder or disease is in a genome.
[3214] 1752. The method of any one of Embodiments 1747-1751, wherein a nucleotide sequence associated with a condition, disorder or disease is in a genome of some but not all cells.
[3215] 1753. The method of any one of Embodiments 1747-1752, wherein a nucleotide sequence associated with a condition, disorder or disease is in a germline genome.
[3216] 1754. The method of any one of Embodiments 1747-1753, wherein a nucleotide sequence associated with a condition, disorder or disease is a mutation.
[3217] 1755. The method of any one of Embodiments 1747-1754, wherein a nucleotide sequence associated with a condition, disorder or disease is a G to A mutation.
[3218] 1756. The method of any one of Embodiments 1747-1755, wherein a nucleotide sequence associated with a condition, disorder or disease is a G to A mutation in SERPINA1.
[3219] 1757. The method of any one of Embodiments 1747-1756, wherein a nucleotide sequence associated with a condition, disorder or disease is a 1024 G>A (E342K) mutation in human SERPINA1.
[3220] 1758. The method of any one of Embodiments 1721-1756, wherein the cell, tissue or animal comprises a 1024 G>A (E342K) mutation in human SERPINA1 gene.
[3221] 1759. The method of Embodiment 1758, wherein the cell, tissue or animal comprises NOD.Cg-Prkdcscid Il2rgtm1Wjl Tg(SERPINA1*E342K) #Slcw/SzJ.
[3222] 1760. The method of any one of Embodiments 1721-1759, wherein the subject comprises 1024 G>A (E342K) mutation in human SERPINA1.
[3223] 1761. The method of Embodiment 1760, wherein the subject is homozygous with respect to 1024 G>A (E342K) mutation in human SERPINA1.
[3224] 1762. The method of Embodiment 1760, wherein the subject is heterozygous with respect to 1024 G>A (E342K) mutation in human SERPINA1.
[3225] 1763. The method of Embodiment 1760, wherein the subject is heterozygous with respect to 1024 G>A (E342K) mutation in SERPINA1, and one allele is wild type.
[3226] 1764. A method for modifying a target adenosine in a target nucleic acid, comprising contacting the target nucleic acid with an oligonucleotide or composition of any one of the preceding Embodiments.
[3227] 1765. A method for deaminating a target adenosine in a target nucleic acid, comprising contacting the target nucleic acid with an oligonucleotide or composition of any one of the preceding Embodiments.
[3228] 1766. A method for producing, or restoring or increasing level of a product of a particular nucleic acid, comprising contacting a target nucleic acid with an oligonucleotide or composition of any one of the preceding Embodiments, wherein the target nucleic acid comprises a target adenosine, and the particular nucleic acid differs from the target nucleic acid in that the particular nucleic acid has an I or G instead of the target adenosine.
[3229] 1767. A method for reducing level of a product of a target nucleic acid, comprising contacting a target nucleic acid with an oligonucleotide or composition of any one of the preceding Embodiments, wherein the target nucleic acid comprises a target adenosine.
[3230] 1768. The method of Embodiment 1766 or 1767, wherein the product is a protein.
[3231] 1769. The method of Embodiment 1766 or 1767, wherein the product is a mRNA.
[3232] 1770. The method of any one of Embodiments 1764-1769, wherein the base sequence the oligonucleotide or oligonucleotides in the oligonucleotide composition is substantially complementary to that of the target nucleic acid.
[3233] 1771. The method of any one of Embodiments 1764-1770, wherein the target nucleic acid is in a sample.
[3234] 1772. A method, comprising:
   [3235] contacting an oligonucleotide or composition of any one of the preceding Embodiments with a sample comprising a target nucleic acid and an adenosine deaminase, wherein:
   [3236] the base sequence of the oligonucleotide or oligonucleotides in the oligonucleotide composition is substantially complementary to that of the target nucleic acid; and
   [3237] the target nucleic acid comprises a target adenosine;
   [3238] wherein the target adenosine is modified.
[3239] 1773. A method, comprising
   [3240] 1) obtaining a first level of modification of a target adenosine in a target nucleic acid, which level is observed when a first oligonucleotide composition is contacted with a sample comprising the target nucleic acid and an adenosine deaminase, wherein the first oligonucleotide composition comprises a first plurality of oligonucleotides sharing the same base sequence which is substantially complementary to that of the target nucleic acid; and
   [3241] 2) obtaining a reference level of modification of a target adenosine in a target nucleic acid, which level is observed when a reference oligonucleotide composition is contacted with a sample comprising the target nucleic acid and an adenosine deaminase, wherein the reference oligonucleotide composition comprises a reference plurality of oligonucleotides sharing the same base sequence which is substantially complementary to that of the target nucleic acid;
   [3242] wherein:
   [3243] oligonucleotides of the first plurality comprise more sugars with 2′-F modification, more sugars with 2′-OR modification wherein R is not —H, and/or more chiral internucleotidic linkages than oligonucleotides of the reference plurality; and
   [3244] the first oligonucleotide composition provides a higher level of modification compared to oligonucleotides of the reference oligonucleotide composition.
[3245] 1774. A method, comprising
   [3246] obtaining a first level of modification of a target adenosine in a target nucleic acid, which level is observed when a first oligonucleotide composition is contacted with a sample comprising the target nucleic acid and an adenosine deaminase, wherein the first oligonucleotide composition comprises a first plurality of oligonucleotides sharing the same base sequence which is substantially complementary to that of the target nucleic acid; and
   [3247] wherein the first level of modification of a target adenosine is higher than a reference level of modification of the target adenosine, wherein the reference level is observed when a reference oligonucleotide composition is contacted with a sample comprising the target nucleic acid and an adenosine deaminase, wherein the reference oligonucleotide composition comprises a reference plurality of oligonucleotides sharing the same base sequence which is substantially complementary to that of the target nucleic acid;
   [3248] wherein:
   [3249] oligonucleotides of the first plurality comprise more sugars with 2′-F modification, more sugars with 2′-OR modification wherein R is not —H, and/or more chiral internucleotidic linkages than oligonucleotides of the reference plurality.
[3250] 1775. A method, comprising
   [3251] 1) obtaining a first level of modification of a target adenosine in a target nucleic acid, which level is observed when a first oligonucleotide composition is contacted with a sample comprising the target nucleic acid and an adenosine deaminase, wherein the first oligonucleotide composition comprises a first plurality of oligonucleotides sharing the same base sequence which is substantially complementary to that of the target nucleic acid; and
   [3252] 2) obtaining a reference level of modification of a target adenosine in a target nucleic acid, which level is observed when a reference oligonucleotide composition is contacted with a sample comprising the target nucleic acid and an adenosine deaminase, wherein the reference oligonucleotide composition comprises a reference plurality of oligonucleotides sharing the same base sequence which is substantially complementary to that of the target nucleic acid;
   [3253] wherein:
   [3254] oligonucleotides of the first plurality comprise more sugars with 2′-F modification, more sugars with 2′-OR modification wherein R is not —H, and/or more chirally controlled chiral internucleotidic linkages than oligonucleotides of the reference plurality; and
   [3255] the first oligonucleotide composition provides a higher level of modification compared to oligonucleotides of the reference oligonucleotide composition.
[3256] 1776. A method, comprising
   [3257] obtaining a first level of modification of a target adenosine in a target nucleic acid, which level is observed when a first oligonucleotide composition is contacted with a sample comprising the target nucleic acid and an adenosine deaminase, wherein the first oligonucleotide composition comprises a first plurality of oligonucleotides sharing the same base sequence which is substantially complementary to that of the target nucleic acid; and
   [3258] wherein the first level of modification of a target adenosine is higher than a reference level of modification of the target adenosine, wherein the reference level is observed when a reference oligonucleotide composition is contacted with a sample comprising the target nucleic acid and an adenosine deaminase, wherein the reference oligonucleotide composition comprises a reference plurality of oligonucleotides sharing the same base sequence which is substantially complementary to that of the target nucleic acid;
   [3259] wherein:
   [3260] oligonucleotides of the first plurality comprise more sugars with 2′-F modification, more sugars with 2′-OR modification wherein R is not —H, and/or more chirally controlled chiral internucleotidic linkages than oligonucleotides of the reference plurality.
[3261] 1777. A method, comprising
   [3262] 1) obtaining a first level of modification of a target adenosine in a target nucleic acid, which level is observed when a first oligonucleotide composition is contacted with a sample comprising the target nucleic acid and an adenosine deaminase, wherein the first oligonucleotide composition comprises a first plurality of oligonucleotides sharing the same base sequence which is substantially complementary to that of the target nucleic acid; and
   [3263] 2) obtaining a reference level of modification of a target adenosine in a target nucleic acid, which level is observed when a reference oligonucleotide composition is contacted with a sample comprising the target nucleic acid and an adenosine deaminase, wherein the reference oligonucleotide composition comprises a reference plurality of oligonucleotides sharing the same base sequence which is substantially complementary to that of the target nucleic acid;
   [3264] wherein:
   [3265] oligonucleotides of the first plurality comprise one or more chirally controlled chiral internucleotidic linkages; and
   [3266] oligonucleotides of the reference plurality comprise no chirally controlled chiral internucleotidic linkages (a reference oligonucleotide composition is a “stereorandom composition); and
   [3267] the first oligonucleotide composition provides a higher level of modification compared to oligonucleotides of the reference oligonucleotide composition.
[3268] 1778. A method, comprising
   [3269] obtaining a first level of modification of a target adenosine in a target nucleic acid, which level is observed when a first oligonucleotide composition is contacted with a sample comprising the target nucleic acid and an adenosine deaminase, wherein the first oligonucleotide composition comprises a first plurality of oligonucleotides sharing the same base sequence which is substantially complementary to that of the target nucleic acid; and
   [3270] wherein the first level of modification of a target adenosine is higher than a reference level of modification of the target adenosine, wherein the reference level is observed when a reference oligonucleotide composition is contacted with a sample comprising the target nucleic acid and an adenosine deaminase, wherein the reference oligonucleotide composition comprises a reference plurality of oligonucleotides sharing the same base sequence which is substantially complementary to that of the target nucleic acid;
   [3271] wherein:
   [3272] oligonucleotides of the first plurality comprise one or more chirally controlled chiral internucleotidic linkages; and
   [3273] oligonucleotides of the reference plurality comprise no chirally controlled chiral internucleotidic linkages (a reference oligonucleotide composition is a “stereorandom composition).
[3274] 1779. The method of any one of Embodiments 1773-1778, wherein a first oligonucleotide composition is an oligonucleotide composition of any one of the preceding Embodiments.
[3275] 1780. The method of any one of Embodiments 1773-1779, wherein the reference oligonucleotide composition is a reference oligonucleotide composition of any one of Embodiments 1624-1633.
[3276] 1781. The method of any one of Embodiments 1764-1780, wherein the deaminase is an ADAR enzyme.
[3277] 1782. The method of any one of Embodiments 1764-1780, wherein the deaminase is ADAR1.
[3278] 1783. The method of any one of Embodiments 1764-1780, wherein the deaminase is ADAR2.
[3279] 1784. The method of any one of Embodiments 1764-1783, wherein the target nucleic acid is or comprise RNA.
[3280] 1785. The method of any one of Embodiments 1764-1784, wherein a sample is a cell.
[3281] 1786. The method of any one of Embodiments 1764-1785, wherein the target nucleic acid is more associated with a condition, disorder or disease, or decrease of a desired property or function, or increase of an undesired property or function, compared to a nucleic acid which differs from the target nucleic acid in that it has an I or G at the position of the target adenosine instead of the target adenosine.
[3282] 1787. The method of any one of Embodiments 1764-1785, wherein the target adenosine is a G to A mutation.
[3283] 1788. A method for preventing or treating a condition, disorder or disease, comprising administering or delivering to a subject susceptible thereto or suffering therefrom an effective amount of an oligonucleotide or composition of any one of the preceding Embodiments.
[3284] 1789. A method for preventing or treating a condition, disorder or disease amenable to a G to A mutation, comprising administering or delivering to a subject susceptible thereto or suffering therefrom an effective amount of an oligonucleotide or composition of any one of the preceding Embodiments.
[3285] 1790. A method for preventing or treating a condition, disorder or disease amenable to a G to A mutation, comprising administering to a subject susceptible thereto or suffering therefrom an effective amount of an oligonucleotide or composition of any one of the preceding Embodiments.
[3286] 1791. A method for increasing levels and/or activities of an alpha-1 antitrypsin (A1AT) polypeptide in the serum or blood of a subject, comprising administering to the subject an effective amount of an oligonucleotide or composition of any one of the preceding Embodiments.
[3287] 1792. The method of Embodiment 1791, wherein the A1AT polypeptide provides one or more higher activities compared to a reference A1AT polypeptide.
[3288] 1793. The method of Embodiment 1791 or 1792, wherein the A1AT polypeptide is a wild-type A1AT polypeptide.
[3289] 1794. The method of any one of Embodiments 1791-1793, wherein the method increase the amount of the A1AT polypeptide in serum.
[3290] 1795. The method of any one of Embodiments 1791-1793, wherein the method decrease the amount of a reference A1AT polypeptide in serum.
[3291] 1796. The method of any one of Embodiments 1791-1795, wherein the method increase the ratio of the A1AT polypeptide over a reference A1AT polypeptide in serum or blood.
[3292] 1797. The method of any one of Embodiments 1791-1796, wherein the reference A1AT polypeptide is mutated.
[3293] 1798. The method of any one of Embodiments 1791-1797, wherein the reference A1AT polypeptide is an E342K A1AT polypeptide.
[3294] 1799. A method for decreasing levels and/or activities of a mutant alpha-1 antitrypsin (A1AT) polypeptide in the serum or blood of a subject, comprising administering to the subject an effective amount of an oligonucleotide or composition of any one of the preceding Embodiments.
[3295] 1800. The method of Embodiment 1799, wherein the mutant A1AT polypeptide is an E342K A1AT polypeptide.
[3296] 1801. The method of any one of Embodiments 1791-1800, wherein the subject is susceptible to or suffering from a condition, disorder or disease.
[3297] 1802. A method for preventing or treating a condition, disorder or disease associated with a G to A mutation, comprising administering or delivering to a subject susceptible thereto or suffering therefrom an effective amount of an oligonucleotide or composition of any one of the preceding Embodiments.
[3298] 1803. A method for preventing or treating a condition, disorder or disease associated with a G to A mutation, comprising administering to a subject susceptible thereto or suffering therefrom an effective amount of an oligonucleotide or composition of any one of the preceding Embodiments.
[3299] 1804. The method of any one of Embodiments 1788-1803, wherein the base sequence of the oligonucleotide or oligonucleotides in the oligonucleotide composition is substantially complementary to that of the target nucleic acid comprising a target adenosine that is the mutation.
[3300] 1805. The method of any one of Embodiments 1803-1804, wherein the condition, disorder or disease is amenable to an A to G or A to I modification.
[3301] 1806. The method of any one of Embodiments 1788-1805, wherein cells associated with the condition, disorder or disease comprise or express an ADAR protein.
[3302] 1807. The method of any one of Embodiments 1788-1805, wherein cells associated with the condition, disorder or disease comprise or express ADAR1.
[3303] 1808. The method of any one of Embodiments 1788-1805, wherein cells associated with the condition, disorder or disease comprise or express ADAR2.
[3304] 1809. The method of any one of Embodiments 1788-1808, wherein the subject is a human subject.
[3305] 1810. The method of any one of Embodiments 1788-1809, wherein the condition, disorder or disease is or is associated with alpha-1 antitrypsin deficiency.
[3306] 1811. The method of any one of Embodiments 1764-1810, comprising converting a target adenosine to I.
[3307] 1812. The method of any one of Embodiments 1764-1811, wherein two or more different adenosine are targeted and edited.
[3308] 1813. The method of any one of Embodiments 1764-1811, wherein two or more different transcripts are targeted and edited.
[3309] 1814. The method of any one of Embodiments 1764-1811, wherein transcripts from two or more different polynucleotides are targeted and edited.
[3310] 1815. The method of any one of Embodiments 1764-1811, wherein transcripts from two or more genes are targeted and edited.
[3311] 1816. The method of any one of Embodiments 1812-1815, comprising administering two or more oligonucleotides, each of which independently targets a different target, and each of which is independently an oligonucleotide of any one of Embodiments 1-1521 or a salt thereof.
[3312] 1817. The method of any one of Embodiments 1812-1815, comprising administering two or more oligonucleotide compositions, each of which independently targets at least one different target, and each of which is independently a composition of any one of Embodiments 1522-1636.
[3313] 1818. The method of any one of Embodiments 1812-1817, comprising administering a composition of any one of Embodiments 1547-1636.
[3314] 1819. The method of any one of Embodiments 1812-1818, wherein two or more oligonucleotides or compositions are administered concurrently.
[3315] 1820. The method of any one of Embodiments 1812-1819, wherein two or more oligonucleotides or compositions are administered concurrently in a single composition.
[3316] 1821. The method of any one of Embodiments 1812-1819, wherein two or more oligonucleotides or compositions are administered as separated compositions.
[3317] 1822. The method of any one of Embodiments 1812-1818, wherein one or more oligonucleotides or compositions are administered prior or subsequently to one or more other oligonucleotides or compositions.
[3318] 1823. The method of any one of Embodiments 1788-1822, wherein the subject comprises 1024 G>A (E342K) mutation in human SERPINA1.
[3319] 1824. The method of Embodiment 1823, wherein the subject is homozygous with respect to 1024 G>A (E342K) mutation in human SERPINA1.
[3320] 1825. The method of Embodiment 1823, wherein the subject is heterozygous with respect to 1024 G>A (E342K) mutation in human SERPINA1.
[3321] 1826. The method of Embodiment 1823, wherein the subject is heterozygous with respect to 1024 G>A (E342K) mutation in human SERPINA1, and one allele is wild type.
[3322] 1827. The method of any one of Embodiments 1788-1826, wherein the condition, disorder or disease is associated with a G to A mutation in SERPINA1.
[3323] 1828. The method of any one of Embodiments 1788-1827, wherein the condition, disorder or disease is associated with 1024 G>A (E342K) mutation in human SERPINA1.
[3324] 1829. The method of any one of Embodiments 1788-1828, wherein the condition, disorder or disease is alpha-1 antitrypsin deficiency.
[3325] 1830. The method of any one of Embodiments 1788-1829, wherein the subject has a heterozygous ZZ genotype.
[3326] 1831. The method of any one of Embodiments 1788-1829, wherein the subject has a homozygous ZZ genotype.
[3327] 1832. The method of any one of Embodiments 1788-1831, wherein the method increase or restores level or activity of wild-type at liver.
[3328] 1833. The method of any one of Embodiments 1788-1832, wherein the method reduces Z-AAT aggregation.
[3329] 1834. The method of any one of Embodiments 1788-1833, wherein the method reduces or prevents liver damage.
[3330] 1835. The method of any one of Embodiments 1788-1834, wherein the method reduces or prevents cirrhosis.
[3331] 1836. The method of any one of Embodiments 1788-1835, wherein the method increase level of wild-type AAT in blood.
[3332] 1837. The method of any one of Embodiments 1788-1836, wherein the method increase level of circulating, lung-bound wild-type AAT in blood.
[3333] 1838. The method of any one of Embodiments 1788-1837, wherein the method reduces or prevents lung damage.
[3334] 1839. The method of any one of Embodiments 1788-1838, wherein the method reduces or prevents lung damage from protease.
[3335] 1840. The method of any one of Embodiments 1788-1839, wherein the method reduces or prevents lung inflammation.
[3336] 1841. The method of any one of Embodiments 1788-1826, wherein the condition, disorder or disease is a recessive or dominant genetically defined condition, disorder or disease.
[3337] 1842. The method of any one of Embodiments 1788-1826, wherein the condition, disorder or disease is a liver condition, disorder or disease.
[3338] 1843. The method of any one of Embodiments 1788-1826, wherein the condition, disorder or disease is a metabolic liver condition, disorder or disease.
[3339] 1844. The method of any one of Embodiments 1788-1826, wherein the condition, disorder or disease is a neuronal condition, disorder or disease.
[3340] 1845. The method of any one of Embodiments 1788-1826, wherein the condition, disorder or disease is a neurodevelopmental condition, disorder or disease.
[3341] 1846. The method of any one of Embodiments 1788-1826, wherein the condition, disorder or disease is a condition, disorder or disease associated with ion channel permeability.
[3342] 1847. The method of any one of Embodiments 1788-1826, wherein the condition, disorder or disease is familial epilepsies.
[3343] 1848. The method of any one of Embodiments 1788-1826, wherein the condition, disorder or disease is neuropathic pain.
[3344] 1849. The method of any one of Embodiments 1788-1826, wherein the condition, disorder or disease is a haploinsufficient condition, disorder or disease.
[3345] 1850. The method of any one of Embodiments 1788-1826, wherein the condition, disorder or disease is a neuromuscular condition, disorder or disease.
[3346] 1851. The method of any one of Embodiments 1788-1826, wherein the condition, disorder or disease is dementias.
[3347] 1852. The method of any one of Embodiments 1788-1851, wherein oligonucleotides administered to the subject comprise targeting moieties.
[3348] 1853. The method of any one of Embodiments 1788-1851, wherein oligonucleotides administered to the subject comprise targeting moieties that target liver.
[3349] 1854. The method of any one of Embodiments 1788-1851, wherein oligonucleotides administered to the subject comprise one or more ligands targeting one or more receptors expressed in liver.
[3350] 1855. The method of any one of Embodiments 1788-1851, wherein oligonucleotides administered to the subject comprise one or more ligands targeting an asialoglycoprotein receptor.
[3351] 1856. The method of any one of Embodiments 1788-1851, wherein oligonucleotides administered to the subject are GalNAc-conjugated oligonucleotides.
[3352] 1857. The method of any one of Embodiments 1788-1851, wherein oligonucleotides administered to the subject comprise one or more ligands targeting one or more receptors expressed in liver.
[3353] 1858. Use of an oligonucleotide or composition of any one of the preceding Embodiments for alter mRNA splicing, wherein a target adenosine of an mRNA is edited.
[3354] 1859. The use of Embodiment 1860, wherein an exon is skipped, or an exon is included, or frame is restored.
[3355] 1860. Use of an oligonucleotide or composition of any one of the preceding Embodiments for alter mRNA splicing, wherein a target adenosine of an mRNA is edited.
[3356] 1861. The use of Embodiment 1860, wherein levels of a RNA and/or a polypeptide encoded thereby is reduced.
[3357] 1862. Use of an oligonucleotide or composition of any one of the preceding Embodiments for silencing protein expression, wherein a target adenosine of an mRNA encoding the protein is edited.
[3358] 1863. The use of Embodiment 1862, wherein expression, level and/or activity of a protein is increased or restored.
[3359] 1864. Use of an oligonucleotide or composition of any one of the preceding Embodiments for fixing nonsense mutation, wherein a target adenosine of an RNA is edited so that the nonsense mutation is fixed.
[3360] 1865. The use of Embodiment 1864, wherein expression, level and/or activity of a protein is increased or restored.
[3361] 1866. Use of an oligonucleotide or composition of any one of the preceding Embodiments for fixing missense mutation, wherein a target adenosine of an RNA is edited so that the missense mutation is fixed.
[3362] 1867. The use of Embodiment 1866, wherein expression, level and/or activity of a protein is increased or restored.
[3363] 1868. Use of an oligonucleotide or composition of any one of the preceding Embodiments for editing a target adenosine in a codon.
[3364] 1869. The use of Embodiment 1868, wherein sequence, expression, level and/or activity of a protein is altered.
[3365] 1870. Use of an oligonucleotide or composition of any one of the preceding Embodiments for editing a target adenosine in an upstream ORF.
[3366] 1871. The use of Embodiment 1870, wherein expression, level and/or activity of a protein is increased.
[3367] 1872. A method for modulating protein-protein interaction in a system wherein a protein is translated from its encoding RNA, comprising contacting the encoding RNA with an oligonucleotide or composition of any one of the preceding Embodiments, wherein an adenosine in the encoding RNA is edited, wherein a protein is translated from the encoded mRNA (“the edited protein”), wherein the edited protein differs from the unedited protein at an amino acid residue involving in the protein-protein interaction.
[3368] 1873. A method for modulating an interaction between a protein and its partner protein in a system, comprising administering to the system of any one of the preceding Embodiments, wherein the oligonucleotide or composition is capable of editing an adenosine in a nucleic acid encoding the protein or its partner protein, and an edited nucleic acid encodes a protein that is different from the protein encoded by the unedited nucleic acid at at least one amino acid residue involved in the interaction between the protein and its partner protein.
[3369] 1874. The method of any one of Embodiments 1872-1873, wherein the edited adenosine is in a codon encoding an amino acid residue involved in the interaction between the protein and its partner protein.
[3370] 1875. The method of any one of Embodiment 1874, wherein the edited adenosine is in a codon encoding an amino acid residue involved in the interaction between the protein and its partner, and the editing changed the amino acid to a different amino acid.
[3371] 1876. The method of any one of Embodiments 1872-1875, wherein the protein-protein interaction is reduced or disrupted.
[3372] 1877. The method of any one of Embodiments 1872-1876, wherein the protein is a transcription factor.
[3373] 1878. The method of any one of Embodiments 1872-1877, wherein level of the protein is increased.
[3374] 1879. The method of any one of Embodiments 1872-1878, wherein expression of one or more nucleic acids regulated by the protein is modulated.
[3375] 1880. The method of any one of Embodiments 1872-1879, wherein expression of one or more nucleic acids regulated by the protein is increased.
[3376] 1881. The method of any one of Embodiments 1872-1880, wherein the protein is NRF2.
[3377] 1882. The method of any one of Embodiments 1872-1881, wherein editing of NRF2 is or comprises editing a codon encoding Glu82 (e.g., to Gly), Glu79 (e.g., to Gly), Glu78 (e.g., to Gly), Asp76 (e.g., to Gly), Ile28 (to Val), Asp27 (e.g., to Gly), or Gln26 (e.g., to Arg).
[3378] 1883. The method of any one of Embodiments 1872-1882, wherein the partner protein is Keap1.
[3379] 1884. The method of any one of Embodiments 1872-1883, wherein editing of Keap1 is or comprises editing a codon encoding Ser603 (e.g., to Gly), Tyr572 (e.g., to Cys), Tyr525 (e.g., to Cys), Ser508 (e.g., to Gly), His436 (e.g., to Arg), Asn382 (e.g., to Asp), Arg380 (e.g., to Gly), or Tyr334.
[3380] 1885. The method of any one of Embodiments 1872-1883, wherein the system is or comprises a cell.
[3381] 1886. The method of any one of Embodiments 1872-1883, wherein the system is or comprises a tissue.
[3382] 1887. The method of any one of Embodiments 1872-1883, wherein the system is or comprises an organ.
[3383] 1888. The method of any one of Embodiments 1872-1883, wherein the system is or comprises an organism.
[3384] 1889. A method for editing a transcript in an immune cell, comprising administering to an immune cell an effective amount of an oligonucleotide or composition of any one of the preceding Embodiments.
[3385] 1890. The method of Embodiment 1889, wherein an immune cell is a PBMC.
[3386] 1891. The method of Embodiment 1889, wherein an immune cell is a CD4+ cell.
[3387] 1892. The method of Embodiment 1889, wherein an immune cell is a CD8+ cell.
[3388] 1893. The method of Embodiment 1889, wherein an immune cell is a CD14+ cell.
[3389] 1894. The method of Embodiment 1889, wherein an immune cell is a CD19+ cell.
[3390] 1895. The method of Embodiment 1889, wherein an immune cell is a NK cell.
[3391] 1896. The method of Embodiment 1889, wherein an immune cell is a Treg cell.
[3392] 1897. The method of any one of Embodiments 1889-1896, wherein the cell is activated.
[3393] 1898. The method of any one of Embodiments 1889-1896, wherein the cell is non-activated.
[3394] 1899. The method of any one of Embodiments 1889-1898, wherein the oligonucleotide or composition targets and edits FAS, BID, CTLA4, PDCD1, CBLB, PTPN6, TRAC, or TRBC.
[3395] 1900. A method for improving editing levels of an oligonucleotide, comprising incorporating a structural element recited in any one of the preceding Embodiments.
[3396] 1901. A compound, oligonucleotide, composition, nucleobase, sugar, nucleoside, internucleotidic linkage, or method described in the present disclosure.
[3397] 1902. An oligonucleotide, comprising a nucleobase as described herein.
[3398] 1903. An oligonucleotide, comprising a sugar as described herein.
[3399] 1904. An oligonucleotide, comprising an internucleotidic linkage as described herein.
[3400] 1905. An oligonucleotide, comprising an internucleotidic linkage as described herein and a sugar which is bonded to the internucleotidic linkage as described herein (e.g., sm01n001).

### EXEMPLIFICATION

[3401] Certain examples of provided technologies (compounds (oligonucleotides, reagents, etc.), compositions, methods (methods of preparation, use, assessment, etc.), etc.) were presented herein. Those skilled in the art appreciate that many technologies, e.g., those described in U.S. Pat. No. 9,982,257, US 20170037399, US 20180216108, US 20180216107, U.S. Pat. No. 9,598,458, WO 2017/062862, WO 2018/067973, WO 2017/160741, WO 2017/192679, WO 2017/210647, WO 2018/098264, WO 2018/223056, WO 2018/237194, WO 2019/032607, WO 2019/055951, WO 2019/075357, WO 2019/200185, WO 2019/217784, WO 2019/032612, WO 2020/191252, WO 2021/071858, etc., can be utilized to prepare and/or assess properties and/or activities of provided technologies in accordance with the present disclosure.

### Example 1. Useful Technologies for Assessing Adenosine Editing

[3402] Oligonucleotide designs may be assessed using various systems. In some embodiments, cLuc oligonucleotides were prepared and assessed in HEK293T cells. In some embodiments, oligonucleotides targeting cLuc (Cypridina) were assessed in 293T cells transfected with plasmids for either human ADAR1 or human ADAR2 and a cLuc luciferase reporter plasmid. The cLuc reporter plasmid consisted of (Gaussia)gLuc-p2A-cLuc(W85X) with respect to luciferases. The cLuc reporter was activated by ADAR mediated A>I editing. The editing activity of oligonucleotides was calculated using the equation:

Fold change=oligonucleotides treated(cLuc/gLuc)/mock(cLuc/gLuc)

[3403] In some embodiments, reporter plasmid and ADAR1 or ADAR2 plasmid were transfected together into HEK293T cells using the Lipofectamine 2000 transfection protocol (Thermo 11668030). After a suitable time period, e.g., 24 hours, the HEK293T cells expressing the reporter and ADAR plasmids were reverse transfected with the appropriate amount of oligonucleotides for each experiment. cLuc and gLuc activity was measured after 48, 72, and/or 96 hours using the Pierce™ Gaussia Luciferase Glow Assay Kit (Pierce™ 16161) or the Pierce™ Cypridina Luciferase Glow Assay Kit (Pierce™ 16170), respectively.

[3404] In some embodiments, oligonucleotides and compositions were assessed and confirmed to provide editing in various cells, e.g., mouse or human primary hepatocytes, primary human retinal pigment epithelial cells, cell lines, etc. In some embodiments, oligonucleotide and compositions were assessed and confirmed to provide editing in subjects. In some embodiments, oligonucleotides and compositions were assessed and confirmed to provide editing in animals, e.g., mice, non-human primates (e.g., cynomolgus macaques), etc. In some embodiments, animals are transgenic animals, e.g., mice expressing human ADAR1. In some embodiments, animals are model animals comprising target adenosines associated with conditions, disorders or diseases, e.g., in many instances, G to A mutations. In some embodiments, provided technologies can provide efficient editing with or without exogenous ADAR polypeptides. In some embodiments, provided technologies can provide efficient editing without exogenous ADAR1 or ADAR2. In some embodiments, oligonucleotides and compositions are delivered by transfection (e.g., using transfection compositions such as Lipofectamine RNAimax). In some embodiments, oligonucleotides and compositions are delivered by gymnotic free update. Among other things, the present disclosure provides technologies for assessing agents, e.g., oligonucleotides, and compositions thereof, for editing, e.g., A to I (G) editing. In some embodiments, the present disclosure provides technologies that are useful for assessing agents (e.g., oligonucleotides) and compositions thereof that interact with, and/or modulate or utilize one or more functions of an ADAR polypeptide as described herein, e.g., an ADAR1 polypeptide. In some embodiments, the present disclosure provides non-human animal cells and/or non-human animals engineered to comprise and/or express an ADAR1 polypeptide or a characteristic portion thereof, or polynucleotide encoding an ADAR1 polypeptide or a characteristic portion thereof. In some embodiments, an ADAR1 polypeptide or a characteristic portion thereof is or comprises a primate ADAR1 or a characteristic portion thereof. In some embodiments, an ADAR1 polypeptide or a characteristic portion thereof is or comprises a primate ADAR1. In some embodiments, an ADAR1 polypeptide or a characteristic portion thereof is a primate ADAR1. In some embodiments, a primate is a non-human primate. In some embodiments, a primate is human. In some embodiments, an ADAR1 polypeptide or a characteristic portion thereof is or comprises human p110 ADAR1 or a characteristic portion thereof. In some embodiments, an ADAR1 polypeptide or a characteristic portion thereof is or comprises human p110 ADAR1. In some embodiments, an ADAR1 polypeptide or a characteristic portion thereof is human p110 ADAR1. In some embodiments, an ADAR1 polypeptide or a characteristic portion thereof is or comprises human p150 ADAR1 or a characteristic portion thereof. In some embodiments, an ADAR1 polypeptide or a characteristic portion thereof is or comprises human p150 ADAR1. In some embodiments, an ADAR1 polypeptide or a characteristic portion thereof is human p150 ADAR1. In some embodiments, a non-human animal is a rodent. In some embodiments, it is a rat. In some embodiments, it is a mouse. In some embodiments, the present disclosure provides mouse engineered to express human ADAR1. In some embodiments, the present disclosure provides mouse cells engineered to express human ADAR1.

[3405] Among other things, the present Example demonstrates that provided technologies are particularly useful for assessing agents, e.g., oligonucleotides, and compositions thereof that are useful for editing, e.g., adenosine editing described in the Examples. Among other things, the present disclosure provides and the present Example confirms that various agents (e.g., oligonucleotides) and compositions thereof that can provide editing in various human cells may show no or much lower levels of editing in certain cells (e.g., mouse cells) and certain animals such as rodents (e.g., mice) that do not contain or express human ADAR, e.g., human ADAR1; particularly, mice, a commonly used animal model, may be of limited uses for assessing various agents (e.g., oligonucleotides) for editing in humans, as agents active in human may show no or very low levels of activity. In some embodiments, the present disclosure provides cells and non-human animals (e.g., rodents such as mice) engineered to express human ADAR1 (e.g., human ADAR1 p110, p150, etc.), and their uses for assessing editing agents such as oligonucleotides and compositions thereof. Among other things, such engineered cells and/or animals can demonstrate activities that are more correlated with and/or predictive of activities in human cells than cells and/or animals not so engineered.

[3406] Generation of non-human mice expressing human ADAR1. Various technologies can be utilized in accordance with the present disclosure to provide mice engineered to express human ADAR1 polypeptide or a characteristic portion thereof. Certain useful technologies are described in the present disclosure and the priority applications, the entirety of each of which is independently incorporated by reference.

[3407] In some embodiments, in mouse cells and animals engineered to express human ADAR1, various oligonucleotides showed activity profiles that are much similar to their activity profiles in human cells compared to reference mouse cells and animals not engineered to express human ADAR1, for example, many oligonucleotides showed no or much lower levels of activity in reference mouse cells and animals not engineered to express human ADAR1 compared to human cells expressing human ADAR1 and/or mouse cells and animals engineered to express human ADAR1.

[3408] Various useful technologies for generating transgenic systems including animals are available to those skilled in the art and can be utilized in accordance with the present disclosure, including, etc., those described in the priority applications and WO 2021/071858, the entirety of each of which is incorporated herein by reference.

[3409] As described herein, animals engineered to comprise an ADAR1 polypeptide or a characteristic portion thereof, or to comprise and/or express a polynucleotide whose sequence encodes an ADAR1 polypeptide or a characteristic portion thereof, may be crossed with various animals (e.g., model animals of various conditions, disorders or diseases) to provide, among other things, animal models which comprise both characteristic elements associated with various conditions, disorders or diseases, and an ADAR1 polypeptide or a characteristic portion thereof or a polynucleotide whose sequence encodes an ADAR1 polypeptide or a characteristic portion thereof. In some embodiments, an animal is a model animal comprising SERPINA1-Pi*Z. In some embodiments, an animal comprises 1024 G>A (E342K) mutation of human SERPINA1 and a polynucleotide whose sequence encodes an ADAR1 polypeptide or a characteristic portion thereof. Among other things, such animals are useful for assessing various agents, e.g., oligonucleotides, for editing 1024 G>A (E342K) mutation of human SERPINA1. Among other things, provided technologies, e.g., non-human animals engineered to comprise or express ADAR1 polypeptide or a characteristic portion thereof, are particularly useful for assessing agents for adenosine editing.

[3410] In some embodiments, a huADAR mouse as described herein is crossed with another mouse comprising a nucleotide sequence of interest (e.g., a mutation associated with a condition, disorder or disease). In certain embodiments, such a cross is performed using in vitro fertilization as is known in the art in accordance with the present disclosure. In certain embodiments, such a mouse comprises a human serpin family A member 1 (SERPINA1) polynucleotide sequence or a characteristic portion thereof. In certain embodiments, such a mouse is a SERPINA1-Pi*Z mouse, comprising a human SERPINA1 gene comprising a G to A mutation that corresponds to a 1024 G>A (E342K) mutation. In some embodiments, resultant offspring comprise both a human SERPINA1-Pi*Z polynucleotide sequence or a characteristic portion thereof (e.g., a portion comprising a mutation, e.g., 1024 G>A associated with a condition, disorder or disease) and a huADAR1 polynucleotide sequence or a fragment thereof. In some embodiments, double transgenic animals (e.g., comprising a human ADAR1 sequence or a characteristic portion thereof and a sequence associated with a condition, disorder or disease) may also comprise additional background mutations or alleles in heterozygous, hemizygous, and/or homozygous form that render them humanized (i.e. with immunodeficient phenotypes), such genotypes include but are not limited to NOD.Cg-Prkdc^{scid} Il2rgtm1^{Wjl}/SzJ, or NOD/ShiLtJ, alternative suitable humanized mouse strains are known in the art. In some embodiments, a mouse comprising a polynucleotide whose sequence encodes an ADAR1 polypeptide or a characteristic portion thereof is crossed with a mouse comprising a SERPINA1 mutation (e.g., 1024 G>A associated with a condition, disorder or disease (e.g., alpha 1-antitrypsin (A1AT) deficiency)). In some embodiments, a second mouse crossed with is The Jackson Laboratory Stock No: 028842; NSG-PiZ (see also Borel F; Tang Q; Gernoux G; Greer C; Wang Z; Barzel A; Kay M A; Shultz L D; Greiner D L; Flotte T R; Brehm M A; Mueller C. 2017. Survival Advantage of Both Human Hepatocyte Xenografts and Genome-Edited Hepatocytes for Treatment of alpha-1 Antitrypsin Deficiency. Mol Ther 25(11):2477-2489PubMed: 29032169MGI: J:243726, and Li S; Ling C; Zhong L; Li M; Su Q; He R; Tang Q; Greiner D L; Shultz L D; Brehm M A; Flotte T R; Mueller C; Srivastava A; Gao G. 2015. Efficient and Targeted Transduction of Nonhuman Primate Liver With Systemically Delivered Optimized AAV3B Vectors. Mol Ther 23(12):1867-76PubMed: 26403887MGI: J:230567). As described herein, in some embodiments, a huADAR mouse is engineered to comprise and/or express a polynucleotide whose sequence encodes a human ADAR1 p110 polypeptide or a characteristic portion thereof. In some embodiments, a huADAR mouse is engineered to comprise and/or express a polynucleotide whose sequence encodes a human ADAR1 p150 polypeptide or a characteristic portion thereof.

[3411] In some embodiments, a huADAR mouse as described herein was crossed with another mouse comprising a nucleotide sequence of interest. In some embodiments, a mouse comprising a polynucleotide whose sequence encoded an ADAR1 polypeptide was crossed with a mouse comprising a SERPINA1 mutation (e.g., 1024 G>A associated with a condition, disorder or disease (e.g., alpha 1-antitrypsin (A1AT) deficiency)). In some embodiments, such a cross was performed using in vitro fertilization as is known in the art in accordance with the present disclosure. In some embodiments, such a mouse comprised a human serpin family A member 1 (SERPINA1) polynucleotide sequence or a characteristic portion thereof. In some embodiments, such a mouse was a SERPINA1-Pi*Z mouse, comprising a human SERPINA1 gene comprising a G to A mutation that corresponds to, e.g., a 1024 G>A (E342K) mutation, or a genetic feature corresponding thereto. In some embodiments, resultant offspring comprised both a human SERPINA1-Pi*Z polynucleotide sequence and a huADAR1 polynucleotide sequence. In some embodiments, double transgenic animals also comprised additional background mutations or alleles in heterozygous, hemizygous, and/or homozygous (wild type or mutant) form, that in mutant form render them humanized (e.g., with immunodeficient phenotypes). In some embodiments, such genotypes included NOD.Cg-Prkdc^{scid} Il2rgtm1^{Wjl}/SzJ.

[3412] As appreciated by those skilled in the art, various technologies may be utilized for cross breeding in accordance with the present disclosure. In some embodiments, a technology is or comprises IVF (e.g., using sperms of a heterozygous or homozygous huADAR mouse and oocytes from another mouse, or vice versa). In some embodiments, a technology is or comprises natural breeding (e.g., using sperms of a heterozygous or homozygous huADAR mouse and oocytes from another mouse, or vice versa).

[3413] For example, in some embodiments, heterozygous sperms from a huADAR male mice and oocytes from NOD.Cg-Prkdcscid Il2rgtm1Wjl Tg(SERPINA1*E342K) #Slcw/SzJ (NSG-PiZ, Stock #028842) female mice are utilized via, e.g., IVF, to generate Prkdcscid heterozygous/Il2rgtm1Wjl heterozygous/Tg (SERPINA1*E342K) #Slcw heterozygous/hADAR heterozygous female mice and Prkdcscid heterozygous/Il2rgtm1Wjl hemizygous/Tg(SERPINA1*E342K) #Slcw heterozygous/hADAR heterozygous male mice. In some embodiments, homozygous sperms from a huADAR male mice and oocytes from NOD.Cg-Prkdcscid Il2rgtm1Wjl Tg(SERPINA1*E342K) #Slcw/SzJ (NSG-PiZ, Stock #028842) female mice are utilized via, e.g., IVF, to generate Prkdcscid heterozygous/Il2rgtm1Wjl heterozygous/Tg(SERPINA1*E342K) #Slcw heterozygous/hADAR heterozygous female mice and Prkdcscid heterozygous/Il2rgtm1Wjl hemizygous/Tg (SERPINA1*E342K) #Slcw heterozygous/hADAR heterozygous male mice. In some embodiments, homozygous sperm from strain “hADAR” male mice and oocytes from NOD.Cg-Prkdcscid Il2rgtm1Wjl Tg(SERPINA1*E342K) #Slcw/SzJ (NSG-PiZ, Stock #028842) female mice are utilized, and resulting mice are crossed to, e.g., NOD/ShiLtJ (The Jackson Laboratory Stock #001976) mice to establish a series of colonies. In some embodiments, generated mice are (assuming the Prkdcscid/Il2rgtm1Wjl/Tg (SERPINA1*E342K) #Slcw/hADAR gene order) HET HET HET HET, HET WILD HET HET, WILD HET HET HET, WILD WILD HET HET, HET HEMI HET HET, HET HEMI HET WILD, HET HET HET WILD, and/or WILD HEMI HET HET. One skilled in the art appreciates that male or female gametes may be donated from either strain e.g., that in some embodiments oocytes may be donated from huADAR lines, while sperm may be donated from the other genotype, e.g., NOD.Cg-Prkdc^{scid} l2rg^{tm1Wjl} Tg(SERPINA1*E342K) #Slcw/SzJ (NSG-PiZ, Stock #028842). In some embodiments, a huADAR (or hADAR) mice is engineered to comprise and/or express a polynucleotide whose sequence encodes an ADAR1 polypeptide or a characteristic portion thereof. In some embodiments, an animal comprises a polynucleotide whose sequence encodes an ADAR1 polypeptide or a characteristic portion thereof in its genome. In some embodiments, an animal comprises a polynucleotide whose sequence encodes an ADAR1 polypeptide or a characteristic portion thereof in its germline genome. In some embodiments, an ADAR1 polypeptide is human ADAR1. In some embodiments, a human ADAR1 is human ADAR1 p110. In some embodiments, a human ADAR1 is human ADAR1 p150. As examples, a number of animals comprising human ADAR1 p110 and 1024 G>A (E342K) mutation in human SERPINA1 were generated using one or more protocols described herein (e.g., using heterozygous hADAR1 sperms and IVF). As appreciated by those skilled in the art, in some embodiments, generated animals can be further bred to produce animals of desired genotypes, e.g., heterozygous, hemizygous, or homozygous mice. In some embodiments, using IVF, heterozygous sperms from huADAR male mice and oocytes from NOD.Cg-Prkdcscid Il2rgtm1Wjl Tg(SERPINA1*E342K) #Slcw/SzJ (NSG-PiZ, Stock #028842) female mice were crossed to generate Prkdcscid heterozygous/Il2rgtm1Wjl heterozygous/Tg(SERPINA1*E342K) #Slcw heterozygous/hADAR heterozygous female mice and Prkdcscid heterozygous/Il2rgtm1Wjl hemizygous/Tg (SERPINA1*E342K) #Slcw heterozygous/hADAR heterozygous male mice. Additionally, pups were produced with genotypes (assuming the Prkdcscid/Il2rgtm1Wjl/Tg(SERPINA1*E342K) #Slcw/hADAR gene order) HET HET HET HET, HET WILD HET HET, WILD HET HET HET, WILD WILD HET HET, HET HEMI HET HET, HET HEMI HET WILD, HET HET HET WILD, and/or WILD HEMI HET HET. A number of animals comprising human ADAR1 p110 and 1024 G>A (E342K) mutation in human SERPINA1 were generated using one or more protocols described herein (e.g., using heterozygous hADAR1 sperms and IVF).

[3414] In some embodiments, provided technologies, e.g., oligonucleotides and compositions thereof, are assessed in such animal models. In some embodiments, levels, properties, and/or activities of desired products (e.g., properly folded wild-type A1AT protein in serum) are increased, and/or levels, properties, and/or activities of undesired products (e.g., mutant (e.g., E342K) A1AT protein in serum) are decreased, in observed amounts (e.g., ng/mL in serum) and/or relatively (e.g., as % of total proteins or total A1AT proteins).

[3415] Provided technologies can provide activities, e.g., adenosine editing, in various types of cells, tissues, organs, organisms, etc. (e.g., liver, kidney, CNS, neuronal cells, astrocytes, hepatocytes, etc.). In some embodiments, editing was confirmed in immune cells, e.g., CD8+ T-cells (in some instances pre-stimulated with cytokines for, e.g., 24 or 96 hrs). In some embodiments, editing was confirmed in fibroblast cell lines. In some embodiments, editing was confirmed in NHP eyes (retina) ex-vivo. Editing of target adenosines in various target transcripts were observed, confirming that provided technologies are generally applicable. Certain target transcripts were described herein and in, e.g., the priority applications and WO 2021/071858.

[3416] Oligonucleotides and compositions can be delivered utilizing many technologies in accordance with the present disclosure. For example, in some embodiments, they were delivered by transfection. In some embodiments, they were delivered by gymnotic uptake. In some embodiments, oligonucleotides comprise moieties that can facilitate delivery. For example, in some embodiments, a moiety is a ligand for a polypeptide, e.g., a receptor, in many instances, on cell surface. In some embodiments, a polypeptide is expressed at a higher level by a type or population of cells, a tissue, etc. so that it may be utilized for delivery. In some embodiments, a ligand is an ASGPR ligand. In some embodiments, a ligand is or comprises GalNAc or a derivative thereof. In some embodiments, an oligonucleotide may comprise two or more ligand moieties, each of which is independently a ligand of a polypeptide. In some embodiments, an oligonucleotide comprises two or more copies of a ligand moiety. In some embodiments, a moiety targets one or more characteristics (e.g., pH, redox, etc.) of a location or environment.

[3417] In some embodiments, technologies of the provided technology can provide increased stability, high levels of editing, etc. In some embodiments, provided technologies can provide desired editing activities for a long period of time, e.g., about or at least about 2, 3, 4, 5, 6, 7, 8, 9, 10, 15, 20, 25, 30, 35, 40, 45 or more days, after a last dose. In some embodiments, desired editing activities/levels of editing may be maintained for a long period of time, e.g., about or at least about 2, 3, 4, 5, 6, 7, 8, 9, 10, 15, 20, 25, 30, 35, 40, 45 or more days, after a last dose.

[3418] In some embodiments, provided technologies can provide high levels of selectivity. In some embodiments, about or at least about 80%, 85%, 90%, 91%, 92%, 93%, 94%, 95%, 95%, 96%, 97%, 98%, 99%, 99.5%, or 99.9% observed adenosine editing are at target adenosines. In some embodiments, about or at least about 80%, 85%, 90%, 95%, 96%, 97%, 98%, or 99% observed adenosine editing in coding regions are at target adenosines. In some embodiments, about or at least about 80%, 85%, 90%, 95%, 96%, 97%, 98%, or 99% observed adenosine editing in target nucleic acids (e.g., transcripts of target genes) are at target adenosines. In some embodiments, about or at least about 80%, 85%, 90%, 95%, 96%, 97%, 98%, or 99% observed adenosine editing in coding regions of target nucleic acids (e.g., transcripts of target genes) are at target adenosines. Various technologies, e.g., RNA-Seq, are available to those skilled in the art to assess selectivity; certain such technologies are described herein or in the priority applications or WO 2021/071858, the entirety of each of which is independently incorporated herein by reference. In some embodiments, a percentage for a selectivity described herein is at least about 80%. In some embodiments, it is at least about 85%. In some embodiments, it is at least about 90%. In some embodiments, it is at least about 95%. In some embodiments, it is at least about 96%. In some embodiments, it is at least about 97%. In some embodiments, it is at least about 98%. In some embodiments, it is at least about 99%. In some embodiments, it is at least about 99.5%. In some embodiments, it is at least about 99.9%. In some embodiments, it is about 100%. In some embodiments, no off-target editing is observed. In some embodiments, provided technology provides high selectivity in vivo.

[3419] In some embodiments, the present disclosure provides multiplex editing. In some embodiments, multiple target adenosines are edited together, one or more or each of which is independently edited at a comparable level compared to when edited individually.

[3420] Various results are presented in, e.g., Figures and Tables herein, as examples illustrating various benefits and advantages provided technologies can provide.

[3421] As demonstrated herein, the present disclosure among other things provide oligonucleotides comprising various modifications (e.g., nucleobase modifications, sugar modifications, linkage modifications, etc., and combinations and patterns thereof) that can provide efficient editing.

[3422] In some embodiments, utilization of certain sugars, e.g., natural DNA sugars, 2′-F modified sugars, etc. at and/or near editing sites provide editing activities. In some embodiments, an oligonucleotide comprises 5′-N₁N₀N₋₁-3′, wherein each of N₁, N₀, and N₋₁ is independently a nucleoside, N₁ and N₀ bond to an internucleotidic linkage as described herein, and N₋₁ and N₀ bond to an internucleotidic linkage as described herein, and N₀ is opposite to a target adenosine. In some embodiments, the sugar of each of N₁, N₀, and N₋₁ is independently a natural DNA sugar. In some embodiments, the sugar of N₁ is a 2′-modified sugar (e.g., a 2′-F modified sugar), and the sugar of each of N₀ and N₋₁ is independently a natural DNA sugar. In some embodiments, such oligonucleotides provide high editing levels. In some embodiments, 2′-OR modified sugars (wherein R is not —H) are utilized outside of a second subdomain or editing region, e.g., in a first domain, a first subdomain, and/or a third subdomain. Such modified sugars can be utilized at various positions in these domains/subdomains and are well tolerated and in various instances can improve properties and/or activities of oligonucleotides.

[3423] As demonstrated herein, provided technologies can provide efficient editing using significantly shorter oligonucleotides compared to various prior reported technologies. In some embodiments, oligonucleotides of various lengths, e.g., 27, 28, 29, 20, 31, 32, or more, nucleosides can provide editing.

[3424] In some embodiments, base sequences of oligonucleotides are of sufficient complementarity to those of target nucleic acids so that oligonucleotides can form duplexes under suitable conditions, e.g., in vivo or in vitro editing conditions. In some embodiments, oligonucleotides selectively form duplexes with target nucleic acids over non-target nucleic acids. While certain levels of complementarity to target nucleic acids are preferred or required for various uses including target adenosine editing, full complementarity is generally not required. In some embodiments, there are one or mismatches, bulges, etc. as described herein. In some embodiments, the nucleobase of a nucleoside opposite to target adenosine, N₀, is not complementary to a target adenosine. In some embodiments, hypoxanthine is utilized in place of G particularly if close or next to N₀. In some embodiments, first domains, first subdomains and/or third subdomains comprise one or more, e.g., 1, 2, 3, 4, or more, mismatches.

[3425] In some embodiments, oligonucleotides are provided in chirally controlled oligonucleotide compositions. In some embodiments, as illustrated herein, chirally controlled oligonucleotide compositions provide various desired properties and/or activities. In some embodiments, chirally controlled oligonucleotide compositions provide improved properties and/or activities compared to corresponding stereorandom oligonucleotide compositions (e.g., of oligonucleotides of the same constitution but not chirally controlled at chiral linkage phosphorus).

[3426] Among other things, Applicant has confirmed that compositions of oligonucleotides comprising various modifications can provide target editing, and nucleosides opposite to target adenosines can be placed at various locations in oligonucleotides (e.g., in some cases, positions 5, 6, 7, 8, 9 or more from the 3′-end). Also confirmed is that different versions of GalNAc (e.g., in Mod001 or L025) can be utilized to provide delivery and/or activities. As appreciate by those skilled in the art and described and confirmed herein, after editing edited nucleobases may perform various functions of G (and in some instances, editing may be referred to as A to G). In various embodiments, natural RNA sugars may be utilized in provided oligonucleotides, and in some cases, in nucleosides opposite to target adenosines. In some embodiments, RNA or DNA nucleosides are utilized at 3′ immediate position (N₋₁) and have hypoxanthine as their nucleobase. In some embodiments, a 3′ immediate I or dI nucleoside is bonded to its 3′ immediate nucleoside through Sp non-negatively charged internucleotidic linkages such as phosphoryl guanidine internucleotidic linkage like n001. Among other things, it was confirmed that various number of non-negatively charged internucleotidic linkages may be utilized at various portions in accordance with the present disclosure. In some embodiments, non-complementary base pairing (e.g., wobbles and/or mismatches) is utilized in addition to an editing region or a second subdomain. In some embodiments, it was confirmed that removing non-complementary base pairing (e.g., wobbles and/or mismatches) may improve editing efficiency. In some embodiments, certain nucleobases were observed to provide improved properties and/or activities. Among other things, it was confirmed that in some embodiments oligonucleotides comprising various modified nucleobases (or abasic nucleoside), at N₀, can provide editing. In some embodiments, it was observed that oligonucleotides comprising certain base modifications, such as b001A, b002A, b008U, etc., increased editing activity when compared to a reference composition. In some embodiments, it was observed that oligonucleotides comprising certain base modifications, such as b001A, b002A, b008U, etc., at N₀, increased editing activity when compared to a reference composition. In some embodiments, provided oligonucleotides comprise abasic moieties between nucleosides comprising nucleobases. Various oligonucleotides comprising one or more abasic units in place of nucleosides comprising nucleobases were assessed and confirmed to be able to provide editing activities. In some embodiments, it was observed that abasic units at certain positions provided higher activities than other positions. In some embodiments, it was observed that oligonucleotides may provide different absolute and/or relative editing levels with ADAR1-p110, ADAR1-p150 and ADAR2 in certain circumstances.

[3427] In some embodiments, an oligonucleotide is fully complementary to a sequence of the same length in a target nucleic acid.

[3428] Provided technologies can provide robust editing in the presence of ADAR1 and/or ADAR2. Provided technologies can provide robust editing in the presence of ADAR1-p110 and/or ADAR1-p150.

[3429] Data confirming various properties, activities, advantages, etc. of technologies of the present disclosure are provided as examples in various examples and figures including those in the priority applications, the entirety of each of which is independently incorporated herein by reference. Certain useful technologies, e.g., structural elements, assays, targets, etc., that can be utilized in accordance with the present disclosure are described in WO 2021/071858, the entirety of which is incorporated herein by reference.

### Example 2. Technologies for Preparing Oligonucleotide and Compositions

[3430] Various technologies (e.g., phosphoramidites, nucleobases, nucleosides, etc.) for preparing provided technologies (e.g., oligonucleotides, compositions (e.g., oligonucleotide compositions, pharmaceutical compositions, etc.), etc.) can be utilized in accordance with the present disclosure, including, for example, methods and reagents described in U.S. Pat. No. 9,982,257, US 20170037399, US 20180216108, US 20180216107, U.S. Pat. No. 9,598,458, WO 2017/062862, WO 2018/067973, WO 2017/160741, WO 2017/192679, WO 2017/210647, WO 2018/098264, WO 2018/223056, WO 2018/237194, WO 2019/032607, WO 2019/055951, WO 2019/075357, WO 2019/200185, WO 2019/217784, WO 2019/032612, WO 2020/191252, and/or WO 2021/071858, the methods and reagents of each of which are incorporated herein by reference. In some embodiments, the present disclosure provides useful technologies for preparing oligonucleotides and compositions thereof.

[3431] In some embodiments, useful compounds including those described below or salts thereof. In some embodiments, compounds were prepared utilizing technologies described in the priority applications and WO 2021/071858, the entirety of each of which is incorporated herein by reference.

[chemical structure]

[chemical structure]

[chemical structure]

[chemical structure]

[chemical structure]

[chemical structure]

[chemical structure]

[chemical structure]

[chemical structure]

[chemical structure]

[chemical structure]

[chemical structure]

[3432] Certain useful technologies for preparing various additional useful compounds are described below as examples.

### Synthesis of 3-((2R,4S,5R)-5-((bis(4-methoxyphenyl)(phenyl)methoxy)methyl)-4-hydroxytetrahydrofuran-2-yl)pyrimidine-2,4(1H,3H)-dione (WV-NU-096) and 3-((2S,4S,5R)-5-((bis(4-methoxyphenyl)(phenyl)methoxy)methyl)-4-hydroxytetrahydrofuran-2-yl)pyrimidine-2,4(1H,3H)-dione (WV-NU-096A)

[chemical structure]

[chemical structure]

[3434] In some embodiments, the present disclosure provides compounds and methods for preparing nucleobases, sugars, nucleosides, etc. In some embodiments, a compound has the structure of NH(R′)₂ or a salt thereof, wherein each R′ is as described herein. In some embodiments, two R′ are taken together with the nitrogen to which they are attached to form an optionally substituted ring. In some embodiments, a formed ring is an optionally substituted monocyclic saturated, partially unsaturated or aromatic ring having 0-2 heteroatoms in addition to the nitrogen. In some embodiments, NH(R′)₂ is a nucleobase. In some embodiments, a compound is

[chemical structure]

In some embodiments, NH(R′) or a nucleobase is properly protected so that reactions selectively occurs at a desired amino group. In some embodiments, a compound is

[chemical structure]

In some embodiments, a compound has the structure of

[chemical structure]

wherein LG is a leaving group, and each R^{RA} is independently substituted C₆₋₁₀ aryl or C₅₋₁₀ heteroaryl having 1-6 heteroatoms, wherein at least one substituent is independently an electron-withdrawing group. In some embodiments, each substituent is independently an electron-withdrawing group. In some embodiments, R^{RA} is substituted aryl wherein a substituent is an electron-withdrawing group. In some embodiments, each R^{RA} is independently substituted aryl wherein a substituent is an electron-withdrawing group. In some embodiments, an electron-withdrawing group is —Cl. In some embodiments, R^{RA} is p-chlorophenyl. In some embodiments, each R^{RA} is p-chlorophenyl. In some embodiments, a leaving group is —Cl. Those skilled in the art appreciate that various electron-withdrawing groups and leaving groups may be utilized in accordance with the present disclosure. In some embodiments, a compound is

[chemical structure]

wherein each variable is independently as described herein. In some embodiments, a compound is

[chemical structure]

In some embodiments, a compound is

[chemical structure]

In some embodiments, a compound is

[chemical structure]

In some embodiments, a compound is

[chemical structure]

In some embodiments, a compound is

[chemical structure]

In some embodiments, a compound is

[chemical structure]

In some embodiments, a compound is

[chemical structure]

In some embodiments, a compound is

[chemical structure]

In some embodiments, a compound is

[chemical structure]

In some embodiments, a compound is

[chemical structure]

In some embodiments, a compound is

[chemical structure]

In some embodiments, a compound is

[chemical structure]

In some embodiments, a compound is

[chemical structure]

In some embodiments, a compound is

[chemical structure]

In some embodiments, a compound is

[chemical structure]

In some embodiments, a compound is

[chemical structure]

[3435] In some embodiments, the present disclosure provides a method, comprising reacting a compound selected from a compound having the structure of NH(R′)₂, a nucleobase and an amine, or salt thereof (e.g.,

[chemical structure]

with a compound having the structure of

[chemical structure]

etc.) or a salt thereof to provide a compound having the structure of

[chemical structure]

etc.) or a salt thereof. In some embodiments, a reaction is performed under a basic condition, e.g., in the presence of NaH. In some embodiments, a suitable solvent is MeCN. In some embodiments, a suitable temperature is 0 to 65° C. In some embodiments, a provided method comprises converting a compound having the structure of

[chemical structure]

etc.) or a salt thereof into a compound having the structure of

[chemical structure]

etc.) or a salt thereof. In some embodiments, a conversion is performed under an ester hydrolysis condition. In some embodiments, a conversion comprises contacting a compound having the structure of

[chemical structure]

or a salt thereof with a base (e.g., NaOMe) in a suitable solvent (e.g., an alcohol such as MeOH). In some embodiments, a method comprises protecting a 5′-OH of a compound having the structure of

[chemical structure]

or a salt thereof to provide a compound having the structure of

[chemical structure]

or a salt thereof, wherein PGO is a protected —OH group. In some embodiments, PGO as DMTrO.

[3436] Step 1. To a solution of pyrimidine-2,4(1H,3H)-dione (100 g, 892.17 mmol, 1 eq) in PYRIDINE (1000 mL) was added Ac₂O (546.48 g, 5.35 mol, 501.36 mL, 6 eq). The mixture was stirred at 120° C. for 3 hr. The reaction mixture was concentrated under reduced pressure to give a crude and the residue was washed with EtOAc (100 mL), filtered and the cake was dried under reduced pressure to get the product. 1-Acetylpyrimidine-2,4(1H,3H)-dione (100 g, 648.83 mmol, 72.73% yield) was obtained as a white solid. ¹HNMR (400 MHz, DMSO-d₆) δ=11.55 (br s, 1H), 8.12 (d, J=8.4 Hz, 1H), 5.80 (dd, J=2.2, 8.5 Hz, 1H), 2.70-2.55 (m, 3H); TLC (Petroleum ether:Ethyl acetate=0:1), Rf=0.72.

[3437] Step 2. A clean and dry three-neck 3 Lit round bottom flask charge with 1-acetylpyrimidine-2,4(1H,3H)-dione (17 g, 110.30 mmol, 1 eq) and dissolved into dry MeCN (1700 mL) under argon atmosphere. The reaction mixture was cooled to 0° C. by using ice bath. NaH (6.62 g, 165.45 mmol, 60% purity, 1.5 eq) was added portion wise to the reaction mixture and stir for 30 min at 0° C. (2R,3S)-5-Chloro-2-(((4-chlorobenzoyl)oxy)methyl)tetrahydrofuran-3-yl 4-chlorobenzoate (65.88 g, 153.32 mmol, 1.39 eq) was added portion wise and stir the reaction mixture for 30 min at 0° C. and 65° C. for 3 h. TLC (Petroleum ether:Ethyl acetate=1:1, Rf=0.24) show that reactant 1 was consumed and new spots was formed. Then, cool the reaction mixture to rt and filter through sintered funnel using Whatman filter paper. The filtrate was concentrated under reduced pressure to give a crude product. The crude product was purified by silica gel column chromatography (100-200 mesh). The product was eluted with 50% to 80% EtOAc:Petroleum ether, and then the solid was triturated with DCM (30 mL) to give a mixture of compound WV-NU-096b and compound WV-NU-096c (50 g) as a yellow solid.

[3438] Step 3. To a solution of a mixture of WV-NU-096b and WV-NU-096c (45 g, 89.06 mmol, 1 eq) a in MeOH (500 mL) was added NaOMe (12.03 g, 222.65 mmol, 2.5 eq). The mixture was stirred at 15° C. for 2 hr. 12.03 g NH4Cl was added to the mixture, and it was stirred for 30 min, then filtered and the filtrate was concentrated under reduced pressure to give a residue. The residue was purified by column chromatography (SiO₂, Petroleum ether/Ethyl acetate=1/1 to 0/1, then ethyl acetate/methanol=5/1) to give WV-NU-096d (20 g, 87.64 mmol, 98.41% yield) as a yellow solid. LCMS: (M+H⁺)=227.0

[3439] Step 4. To a solution of WV-NU-096d (20.00 g, 87.64 mmol, 1 eq) in Pyridine (200 mL) was added DMTCl (35.26 g, 104.07 mmol, 1.19 eq). The mixture was stirred at 15° C. for 12 hr. The reaction mixture was quenched with water (200 mL) and extracted with ethyl acetate 400 mL (200 mL*2). The combined organic layers were washed with sat brine 50 mL, dried over Na₂SO₄, filtered and concentrated under reduced pressure to give a residue. The residue was purified by pre-HPLC (column: Phenomenex Titank C18 Bulk 250*70 mm 10 u; mobile phase: [water (10 mM NH₄HCO₃)-ACN]; B %: 45%-75%, 20 min) to give WV-NU-096 (30 g, 55.27 mmol, 63.06% yield, 97.75% purity) and WV-NU-096A (5 g, 9.20 mmol, 10.50% yield, 97.61% purity) as white solids. WV-NU-096: ¹HNMR (400 MHz, DMSO-d₆) δ=11.14-10.94 (m, 1H), 7.47-7.31 (m, 3H), 7.27-7.21 (m, 6H), 7.20-7.13 (m, 1H), 6.86-6.77 (m, 4H), 6.61-6.52 (m, 1H), 5.57-5.49 (m, 1H), 5.08-5.02 (m, 1H), 4.29-4.19 (m, 1H), 3.87-3.76 (m, 1H), 3.74-3.69 (m, 6H), 3.24-3.16 (m, 1H), 3.08-3.01 (m, 1H), 2.62-2.52 (m, 1H), 2.04-1.92 (m, 1H); LCMS (M−H+): 529.2, LCMS purity: 97.75%. WV-NU-096A: ¹H NMR (400 MHz, DMSO-d₆) δ=11.25-11.01 (m, 1H), 7.49-7.43 (m, 1H), 7.41-7.35 (m, 2H), 7.33-7.28 (m, 2H), 7.27-7.17 (m, 5H), 6.95-6.84 (m, 4H), 6.57-6.44 (m, 1H), 5.63-5.56 (m, 1H), 5.28-5.19 (m, 1H), 4.34-4.24 (m, 1H), 4.12-3.99 (m, 1H), 3.77-3.69 (m, 6H), 3.17-3.10 (m, 1H), 2.98-2.89 (m, 1H), 2.60-2.53 (m, 1H), 2.38-2.30 (m, 1H); LCMS (M−H+): 529.2, LCMS purity: 97.61%.

### Synthesis of 3-((2R,4S,5R)-5-((bis(4-methoxyphenyl)(phenyl)methoxy)methyl)-4-hydroxytetrahydrofuran-2-yl)pyrimidine-2,4(1H,3H)-dione (WV-NU-096) and 3-((2S,4S,5R)-5-((bis(4-methoxyphenyl)(phenyl)methoxy)methyl)-4-hydroxytetrahydrofuran-2-yl)pyrimidine-2,4(1H,3H)-dione (WV-NU-096A)

[chemical structure]

[chemical structure]

[3441] Step 1. To a solution of pyrimidine-2,4(1H,3H)-dione (100 g, 892.17 mmol, 1 eq) in PYRIDINE (1000 mL) was added Ac₂O (546.48 g, 5.35 mol, 501.36 mL, 6 eq). The mixture was stirred at 120° C. for 3 hr. The reaction mixture was concentrated under reduced pressure to give a crude and the residue was washed with EtOAc (100 mL), filtered and the cake was dried under reduced pressure to get the product. 1-Acetylpyrimidine-2,4(1H,3H)-dione (100 g, 648.83 mmol, 72.73% yield) was obtained as a white solid. ¹HNMR (400 MHz, DMSO-d₆) δ=11.55 (br s, 1H), 8.12 (d, J=8.4 Hz, 1H), 5.80 (dd, J=2.2, 8.5 Hz, 1H), 2.70-2.55 (m, 3H); TLC (Petroleum ether:Ethyl acetate=0:1), Rf=0.72.

[3442] Step 2. A clean and dry three-neck 3 Lit round bottom flask charge with 1-acetylpyrimidine-2,4(1H,3H)-dione (17 g, 110.30 mmol, 1 eq) and dissolved into dry MeCN (1700 mL) under argon atmosphere. The reaction mixture was cooled to 0° C. by using ice bath. NaH (6.62 g, 165.45 mmol, 60% purity, 1.5 eq) was added portion wise to the reaction mixture and stir for 30 min at 0° C. (2R,3S)-5-Chloro-2-(((4-chlorobenzoyl)oxy)methyl)tetrahydrofuran-3-yl 4-chlorobenzoate (65.88 g, 153.32 mmol, 1.39 eq) was added portion wise and stir the reaction mixture for 30 min at 0° C. and 65° C. for 3 h. TLC (Petroleum ether:Ethyl acetate=1:1, Rf=0.24) show that reactant 1 was consumed and new spots was formed. Then, cool the reaction mixture to rt and filter through sintered funnel using Whatman filter paper. The filtrate was concentrated under reduced pressure to give a crude product. The crude product was purified by silica gel column chromatography (100-200 mesh). The product was eluted with 50% to 80% EtOAc:Petroleum ether, and then the solid was triturated with DCM (30 mL) to give a mixture of compound WV-NU-096b and compound WV-NU-096c (50 g) as a yellow solid.

[3443] Step 3. To a solution of a mixture of WV-NU-096b and WV-NU-096c (45 g, 89.06 mmol, 1 eq) a in MeOH (500 mL) was added NaOMe (12.03 g, 222.65 mmol, 2.5 eq). The mixture was stirred at 15° C. for 2 hr. 12.03 g NH4Cl was added to the mixture, and it was stirred for 30 min, then filtered and the filtrate was concentrated under reduced pressure to give a residue. The residue was purified by column chromatography (SiO₂, Petroleum ether/Ethyl acetate=1/1 to 0/1, then ethyl acetate/methanol=5/1) to give WV-NU-096d (20 g, 87.64 mmol, 98.41% yield) as a yellow solid. LCMS: (M+H⁺)=227.0

[3444] Step 4. To a solution of WV-NU-096d (20.00 g, 87.64 mmol, 1 eq) in Pyridine (200 mL) was added DMTCl (35.26 g, 104.07 mmol, 1.19 eq). The mixture was stirred at 15° C. for 12 hr. The reaction mixture was quenched with water (200 mL) and extracted with ethyl acetate 400 mL (200 mL*2). The combined organic layers were washed with sat brine 50 mL, dried over Na₂SO₄, filtered and concentrated under reduced pressure to give a residue. The residue was purified by pre-HPLC (column: Phenomenex Titank C18 Bulk 250*70 mm 10 u; mobile phase: [water (10 mM NH₄HCO₃)-ACN]; B %: 45%-75%, 20 min) to give WV-NU-096 (30 g, 55.27 mmol, 63.06% yield, 97.75% purity) and WV-NU-096A (5 g, 9.20 mmol, 10.50% yield, 97.61% purity) as white solids. WV-NU-096: ¹HNMR (400 MHz, DMSO-d₆) δ=11.14-10.94 (m, 1H), 7.47-7.31 (m, 3H), 7.27-7.21 (m, 6H), 7.20-7.13 (m, 1H), 6.86-6.77 (m, 4H), 6.61-6.52 (m, 1H), 5.57-5.49 (m, 1H), 5.08-5.02 (m, 1H), 4.29-4.19 (m, 1H), 3.87-3.76 (m, 1H), 3.74-3.69 (m, 6H), 3.24-3.16 (m, 1H), 3.08-3.01 (m, 1H), 2.62-2.52 (m, 1H), 2.04-1.92 (m, 1H); LCMS (M−H+): 529.2, LCMS purity: 97.75%. WV-NU-096A: ¹H NMR (400 MHz, DMSO-d₆) δ=11.25-11.01 (m, 1H), 7.49-7.43 (m, 1H), 7.41-7.35 (m, 2H), 7.33-7.28 (m, 2H), 7.27-7.17 (m, 5H), 6.95-6.84 (m, 4H), 6.57-6.44 (m, 1H), 5.63-5.56 (m, 1H), 5.28-5.19 (m, 1H), 4.34-4.24 (m, 1H), 4.12-3.99 (m, 1H), 3.77-3.69 (m, 6H), 3.17-3.10 (m, 1H), 2.98-2.89 (m, 1H), 2.60-2.53 (m, 1H), 2.38-2.30 (m, 1H); LCMS (M−H+): 529.2, LCMS purity: 97.61%.

### Synthesis of 1-(1-((2R,4S,5R)-5-((bis(4-methoxyphenyl)(phenyl)methoxy)methyl)-4-hydroxytetrahydrofuran-2-yl)-2-oxo-1,2-dihydropyrimidin-4-yl)-3-phenylurea (WV-NU-187)

[chemical structure]

[3446] Step 1. To a solution of 4-amino-1-((2R,4S,5R)-4-((tert-butyldimethylsilyl)oxy)-5-(((tert-butyldimethylsilyl)oxy)methyl)tetrahydrofuran-2-yl)pyrimidin-2(1H)-one (98 g, 215.04 mmol, 1 eq.) in ACN (1000 mL) was added isocyanatobenzene (29.93 g, 251.26 mmol, 27.21 mL, 1.17 eq.). The mixture was stirred at 20° C. for 6 hr. The reaction mixture was filtered, the solid was desired. The filtrate was quenched by addition water 100 mL. The solid was washed with ACN (300 mL*3). 1-(1-((2R,4S,5R)-4-((tert-butyldimethylsilyl)oxy)-5-(((tert-butyldimethylsilyl)oxy)methyl)tetrahydrofuran-2-yl)-2-oxo-1,2-dihydropyrimidin-4-yl)-3-phenylurea (90 g, crude) was obtained as a white solid. LCMS (M−H⁺): 573.2

[3447] Step 2. To a solution of 1-(1-((2R,4S,5R)-4-((tert-butyldimethylsilyl)oxy)-5-(((tert-butyldimethylsilyl)oxy)methyl)tetrahydrofuran-2-yl)-2-oxo-1,2-dihydropyrimidin-4-yl)-3-phenylurea (90 g, 156.56 mmol, 1 eq.) in THF (900 mL) was added TBAF (1 M, 391.40 mL, 2.5 eq.). The mixture was stirred at 20° C. for 3 hr. TLC (Petroleum ether:Ethyl acetate=0:1, Rf=0.1) indicated starting material was consumed completely and one new spot formed. The reaction mixture was concentrated under reduced pressure to remove solvent. The residue was purified by column chromatography (SiO₂, Ethyl acetate/Methanol=1/0 to 3/1) to give 1-(1-((2R,4S,5R)-4-hydroxy-5-(hydroxymethyl)tetrahydrofuran-2-yl)-2-oxo-1,2-dihydropyrimidin-4-yl)-3-phenylurea (54 g, crude) as a white solid.

[3448] Step 3. To a solution of 1-(1-((2R,4S,5R)-4-hydroxy-5-(hydroxymethyl)tetrahydrofuran-2-yl)-2-oxo-1,2-dihydropyrimidin-4-yl)-3-phenylurea (53 g, 153.03 mmol, 1 eq.) in PYRIDINE (500 mL) was added DMTCl (77.78 g, 229.55 mmol, 1.5 eq.). The mixture was stirred at 20° C. for 5 hr. The reaction mixture was quenched by addition methanol 200 mL, and then concentrated under reduced pressure to give a residue. The residue was purified by column chromatography to give WV-NU-187 (26 g, 39.79 mmol, 76.56% yield, 99.28% purity) as a yellow solid. ¹HNMR (400 MHz, CHLOROFORM-d) δ=11.57-10.79 (m, 2H), 8.18 (d, J=7.7 Hz, 1H), 7.68 (br d, J=7.8 Hz, 2H), 7.41 (br d, J=7.6 Hz, 2H), 7.36-7.22 (m, 9H), 7.17 (d, J=8.8 Hz, 1H), 7.04 (br t, J=7.3 Hz, 1H), 6.92-6.79 (m, 4H), 6.30 (br t, J=5.4 Hz, 1H), 4.45 (br d, J=5.0 Hz, 1H), 4.10-4.05 (m, 1H), 3.80 (s, 6H), 3.59-3.35 (m, 2H), 2.68-2.55 (m, 1H), 2.34-2.19 (m, 2H); LCMS (M−H⁺): 647.3; purity: 99.28%.

### Synthesis of 1-(1-((2R,4S,5R)-5-((bis(4-methoxyphenyl)(phenyl)methoxy)methyl)-4-hydroxytetrahydrofuran-2-yl)-2-oxo-1,2-dihydropyrimidin-4-yl)-3-(naphthalen-2-yl)urea (WV-NU-188)

[chemical structure]

[3450] Step 1. Two batches: To a solution of 4-amino-1-((2R,4S,5R)-4-hydroxy-5-(hydroxymethyl)tetrahydrofuran-2-yl)pyrimidin-2(1H)-one (25 g, 110.03 mmol, 1 eq.) in DCM (250 mL) was added imidazole (59.92 g, 880.22 mmol, 8 eq.) and TBSCl (66.33 g, 440.11 mmol, 53.93 mL, 4 eq.). The mixture was stirred at 20° C. for 12 hr. The reaction mixture was diluted with water 500 mL and extracted with dichloromethane (500 mL*2). The combined organic layers were dried over Na₂SO₄ filtered and concentrated under reduced pressure to give a residue to give 4-amino-1-((2R,4S,5R)-4-((tert-butyldimethylsilyl)oxy)-5-(((tert-butyldimethylsilyl)oxy)methyl)tetrahydrofuran-2-yl)pyrimidin-2(1H)-one (100 g, crude) as a colorless oil. LCMS (M−H⁺): 454.5, purity: 99.93%

[3451] Step 2. For two batches: To a solution of 4-amino-1-((2R,4S,5R)-4-((tert-butyldimethylsilyl)oxy)-5-(((tert-butyldimethylsilyl)oxy)methyl)tetrahydrofuran-2-yl)pyrimidin-2(1H)-one (46.5 g, 102.03 mmol, 1 eq.) in MeCN (500 mL) was added 1-isocyanatonaphthalene (17.26 g, 102.03 mmol, 14.63 mL, 1 eq.). The mixture was stirred at 20° C. for 12 hr. The reaction mixture was diluted with water 500 mL and extracted with DCM (200 mL*2). The combined organic layers were dried over Na₂SO₄ filtered and concentrated under reduced pressure to give 1-(1-((2R,4S,5R)-4-((tert-butyldimethylsilyl)oxy)-5-(((tert-butyldimethylsilyl)oxy)methyl)tetrahydrofuran-2-yl)-2-oxo-1,2-dihydropyrimidin-4-yl)-3-(naphthalen-2-yl)urea (127 g) as a white solid. ¹HNMR (400 MHz, DMSO-d6) δ=12.51 (br s, 1H), 10.48 (s, 1H), 8.46-7.90 (m, 4H), 7.71-7.45 (m, 4H), 6.36-6.13 (m, 2H), 4.39 (br d, J=4.5 Hz, 1H), 3.92-3.69 (m, 3H), 2.39-2.17 (m, 2H), 0.88 (br d, J=7.5 Hz, 18H), 0.08 (br d, J=1.1 Hz, 12H); LCMS (M−H⁺): 622.9, purity: 85.7%

[3452] Step 3. For two batches: To a solution of 1-(1-((2R,4S,5R)-4-((tert-butyldimethylsilyl)oxy)-5-(((tert-butyldimethylsilyl)oxy)methyl)tetrahydrofuran-2-yl)-2-oxo-1,2-dihydropyrimidin-4-yl)-3-(naphthalen-2-yl)urea (63.5 g, 101.61 mmol, 1 eq.) in THF (600 mL) was added TBAF (1 M, 254.03 mL, 2.5 eq.). The mixture was stirred at 20° C. for 2 hr. The reaction mixture was concentrated under reduced pressure to give a residue. The reaction was added with 500 ml ethyl acetate and stirred at 25° C. for 30 min to precipitate out solid, which was then filtered to give 1-(1-((2R,4S,5R)-4-hydroxy-5-(hydroxymethyl)tetrahydrofuran-2-yl)-2-oxo-1,2-dihydropyrimidin-4-yl)-3-(naphthalen-2-yl)urea (80 g) as a white solid. ¹HNMR (400 MHz, DMSO-d6) δ=8.65-8.56 (m, 1H), 8.38 (d, J=7.6 Hz, 1H), 8.08 (br d, J=7.3 Hz, 1H), 7.89 (br dd, J=2.9, 6.5 Hz, 1H), 7.58-7.39 (m, 4H), 6.36-6.18 (m, 2H), 4.33-4.25 (m, 1H), 3.81 (br d, J=3.5 Hz, 1H), 3.69-3.57 (m, 2H), 2.27-2.18 (m, 1H), 2.05 (td, J=6.3, 13.0 Hz, 1H); LCMS (M−H⁺): 395.1, purity: 97.74%.

[3453] Step 4. For two batches: To a solution of 1-(1-((2R,4S,5R)-4-hydroxy-5-(hydroxymethyl)tetrahydrofuran-2-yl)-2-oxo-1,2-dihydropyrimidin-4-yl)-3-(naphthalen-2-yl)urea (40 g, 100.91 mmol, 1 eq.) in pyridine (400 mL) was added DMTCl (51.29 g, 151.36 mmol, 1.5 eq.). The mixture was stirred at 25° C. for 12 hr. The reaction mixture was diluted with water 800 mL and extracted with Ethyl acetate (400 mL*4). The combined organic layers were washed with brine 400 mL, dried over Na₂SO₄ filtered and concentrated under reduced pressure to give a residue. The residue was purified by column chromatography (SiO₂, Petroleum ether:Ethyl acetate=10:1 to 0:1, 5% TEA) to give WV-NU-188 (82 g, 117.35 mmol, 58.57% yield) as a white solid. ¹HNMR (400 MHz, DMSO-d6) δ=10.53 (s, 1H), 8.44 (br d, J=8.0 Hz, 1H), 8.29 (d, J=7.5 Hz, 1H), 8.12 (d, J=7.4 Hz, 1H), 7.98-7.94 (m, 1H), 7.69 (d, J=8.3 Hz, 1H), 7.64-7.55 (m, 2H), 7.50 (t, J=7.9 Hz, 1H), 7.43-7.37 (m, 2H), 7.37-7.22 (m, 7H), 6.91 (dd, J=1.0, 8.9 Hz, 4H), 6.25-6.13 (m, 2H), 5.40 (d, J=4.6 Hz, 1H), 4.34 (quin, J=5.3 Hz, 1H), 3.74 (s, 6H), 3.30 (br d, J=3.6 Hz, 2H), 2.44-2.35 (m, 1H), 2.28-2.19 (m, 1H); LCMS (M−H+): 697.3; purity: 99.66%.

### Synthesis of N-(5-((2R,4S,5R)-5-((bis(4-methoxyphenyl)(phenyl)methoxy)methyl)-4-hydroxytetrahydrofuran-2-yl)-6-oxo-1,6-dihydropyrimidin-2-yl)acetamide (WV-NU-189)

[chemical structure]

[3455] Step 1. To a solution of BSA (73.19 g, 359.80 mmol, 88.94 mL, 3.1 eq.) was added dropwise to a suspension of N-(5-iodo-6-oxo-1,6-dihydropyrimidin-2-yl)acetamide (80.97 g, 290.16 mmol, 2.5 eq.) in DMF (500 mL) under an argon atmosphere. After stirring for 1 h, the reaction become a clear solution. Then DIPEA (46.50 g, 359.80 mmol, 62.67 mL, 3.1 eq.) and tert-butyl(((2R,3S)-3-((tert-butyldimethylsilyl)oxy)-2,3-dihydrofuran-2-yl)methoxy)dimethylsilane (40 g, 116.06 mmol, 1 eq.) were added. In a separate flask, Pd(OAc)₂ (1.82 g, 8.12 mmol, 0.07 eq.) was added to a solution of triphenylarsine (14.22 g, 46.43 mmol, 0.4 eq.) in stirring DMF (500 mL). After 30 min, this solution was added slowly to the first flask and the mixture was stirred for 12 hr at 80° C. The reaction was quenched with the addition of H₂O (30 mL) and the solvent was evaporated under reduced pressure. The residue was redissolved in EtOAc (500 mL) and washed with H₂O (2*100 mL) and brine (200 mL). The organic layer was dried over MgSO₄, filtered and concentrated under reduced pressure. The residue was purified by column chromatography (SiO₂, Petroleum ether/Ethyl acetate=100/1 to 0/1) to give N-(5-((2R,5R)-4-((tert-butyldimethylsilyl)oxy)-5-(((tert-butyldimethylsilyl)oxy)methyl)-2,5-dihydrofuran-2-yl)-6-oxo-1,6-dihydropyrimidin-2-yl)acetamide (25 g, 50.43 mmol, 43.45% yield) as a white solid. ¹H NMR (CHLOROFORM-d, 400 MHz): δ=8.27 (d, J=2.0 Hz, 1H), 8.22 (br d, J=8.0 Hz, 2H), 7.98 (dd, J=8.6, 2.3 Hz, 1H), 7.30-7.39 (m, 4H), 5.69 (dd, J=3.8, 1.4 Hz, 1H), 4.75 (s, 1H), 4.58 (tt, J=3.7, 1.9 Hz, 1H), 3.85-3.92 (m, 1H), 3.75-3.81 (m, 1H), 2.22-2.24 (m, 4H), 0.86-0.98 (m, 19H), 0.22 (d, J=6.6 Hz, 6H), 0.05 ppm (d, J=2.5 Hz, 6H).

[3456] Step 2. To a solution of N-(5-((2R,5R)-4-((tert-butyldimethylsilyl)oxy)-5-(((tert-butyldimethylsilyl)oxy)methyl)-2,5-dihydrofuran-2-yl)-6-oxo-1,6-dihydropyrimidin-2-yl)acetamide (23 g, 46.39 mmol, 1 eq.) was added dropwise to a solution of pyridine:hydrofluoride (23.65 g, 167.02 mmol, 21.50 mL, 70% purity, 3.6 eq.) in THF (200 mL). The reaction was stirred at 25° C. for 12 hr. The suspension was diluted with acetic acid (30 mL) and the volatiles removed under reduced pressure. N-(5-((2R,5R)-5-(hydroxymethyl)-4-oxotetrahydrofuran-2-yl)-6-oxo-1,6-dihydropyrimidin-2-yl)acetamide (12.40 g, 46.40 mmol, 100.00% yield) was obtained as a white solid, which was used in the next step without further purification; LCMS (M+H+): 268.3.

[3457] Step 3. N-(5-((2R,5R)-5-(hydroxymethyl)-4-oxotetrahydrofuran-2-yl)-6-oxo-1,6-dihydropyrimidin-2-yl)acetamide (12.4 g, 46.40 mmol, 1 eq.) was dissolved in a mixture of MeCN (66 mL)/AcOH (66 mL) (1:1 v/v) and the mixture was cooled to −15° C., followed by the portionwise addition of NaBH(OAc)₃ (23.11 g, 109.04 mmol, 2.35 eq.). The mixture was stirred at −15° C. for 2 hr. The mixture was evaporated to dryness under reduced pressure. The residue was purified by column chromatography (SiO₂, Petroleum ether:Ethyl acetate=100/1 to 5/1) to give N-(5-((2R,4S,5R)-4-hydroxy-5-(hydroxymethyl)tetrahydrofuran-2-yl)-6-oxo-1,6-dihydropyrimidin-2-yl)acetamide (11 g, 40.85 mmol, 88.05% yield) as a white solid.

[3458] Step 4. To a solution of N-(5-((2R,4S,5R)-4-hydroxy-5-(hydroxymethyl)tetrahydrofuran-2-yl)-6-oxo-1,6-dihydropyrimidin-2-yl)acetamide (9 g, 33.43 mmol, 1 eq.) in pyridine (100 mL) was added DMTCl (11.33 g, 33.43 mmol, 1 eq.). The mixture was stirred at 15° C. for 12 hr. The residue was diluted with H₂O 200 mL and extracted with EtOAc 1500 mL (500 mL*3). The combined organic layers were washed with brine 30 mL (10 mL*3), dried over Na₂SO₄, filtered and concentrated under reduced pressure to give a residue. The residue was purified by column chromatography (SiO₂, DCM:MeOH=100/1 to 5/1) to give WV-NU-189 (15 g, 26.24 mmol, 78.51% yield) as a white solid. ¹HNMR (CHLOROFORM-d, 400 MHz): δ=7.94 (br s, 1H), 7.43 (br d, J=7.3 Hz, 2H), 7.27 (s, 7H), 7.22 (br d, J=6.8 Hz, 1H), 6.83 (br d, J=8.8 Hz, 4H), 5.17 (br s, 1H), 4.40 (br s, 1H), 4.03 (br s, 1H), 3.78 (s, 6H), 3.21-3.36 (m, 2H), 2.48 (br s, 1H), 2.18 (br s, 3H), 1.95 ppm (br s, 1H); LCMS (M−H+): 570.3, LCMS purity: 91.61%.

### Synthesis of 3-((2R,4S,5R)-5-((bis(4-methoxyphenyl)(phenyl)methoxy)methyl)-4-hydroxytetrahydrofuran-2-yl)pyridin-2(1H)-one (WV-NU-197)

[chemical structure]

[3460] Step 1. To a solution of BSA (18.30 g, 89.95 mmol, 22.23 mL, 3.1 eq.) was added dropwise to a suspension of 3-iodopyridin-2(1H)-one (16.03 g, 72.54 mmol, 2.5 eq.) in DMF (100 mL) under an argon atmosphere. After stirring for 1 h the reaction become a clear solution. Then DIEA (11.63 g, 89.95 mmol, 15.67 mL, 3.1 eq.) and tert-butyl(((2R,3S)-3-((tert-butyldimethylsilyl)oxy)-2,3-dihydrofuran-2-yl)methoxy)dimethylsilane (10 g, 29.02 mmol, 1 eq.) were added. In a separate flask, Pd(OAc)₂ (456.01 mg, 2.03 mmol, 0.07 eq.) was added to a solution of triphenylarsane (3.55 g, 11.61 mmol, 0.4 eq.) in stirring DMF (100 mL). After 30 min, this solution was added slowly to the first flask and the mixture was stirred for 12 hr at 80° C. The reaction was quenched with the addition of H₂O (300 mL) and the solvent was evaporated under reduced pressure. The residue was redissolved in EtOAc (300 mL), and washed with H₂O (2*100 mL) and brine (30 mL). The organic layer was dried over MgSO₄, filtered and concentrated under reduced pressure. The residue was purified by column chromatography (SiO₂, Petroleum ether/Ethyl acetate=100/1 to 0/1) to give 3-((2R,5R)-4-((tert-butyldimethylsilyl)oxy)-5-(((tert-butyldimethylsilyl)oxy)methyl)-2,5-dihydrofuran-2-yl)pyridin-2(1H)-one (12 g, 27.41 mmol, 94.48% yield) as a white solid. ¹HNMR (CHLOROFORM-d, 400 MHz): δ¹=12.66 (brs, 1H), 7.81-7.85 (m, 1H), 7.22-7.29 (m, 2H), 6.22 (t, J=6.7 Hz, 1H), 5.86 (d, J=3.3 Hz, 1H), 4.95 (t, J=1.6 Hz, 1H), 4.49-4.59 (m, 1H), 3.85 (dd, J=11.3, 2.1 Hz, 1H), 3.69 (dd, J=11.2, 3.7 Hz, 1H), 0.78-0.90 (m, 17H), 0.14 (d, J=16.4 Hz, 6H), −0.01 ppm (d, J=8.6 Hz, 6H); LCMS: M+H⁺=438.7.

[3461] Step 2. To a solution of 3-((2R,5R)-4-((tert-butyldimethylsilyl)oxy)-5-(((tert-butyldimethylsilyl)oxy)methyl)-2,5-dihydrofuran-2-yl)pyridin-2(1H)-one (12 g, 27.41 mmol, 1 eq.) in THF (120 mL) was added pyridine; hydrofluoride (11.89 g, 95.95 mmol, 10.81 mL, 80% purity, 3.5 eq.) was degassed and purged with N₂ for 3 times and then the mixture was stirred at 15° C. for 12 hr under N₂ atmosphere. The filtration was concentrated in vacuum to give crude 3-((2R,5R)-5-(hydroxymethyl)-4-oxotetrahydrofuran-2-yl)pyridin-2(1H)-one (5.74 g, 27.44 mmol, 100.00% yield). LCMS: M+H⁺=210.1 and M+Na⁺=232.1.

[3462] Step 3. To a solution of 3-((2R,5R)-5-(hydroxymethyl)-4-oxotetrahydrofuran-2-yl)pyridin-2(1H)-one (5.74 g, 27.44 mmol, 1 eq.) was dissolved in a mixture of MeCN (70 mL)/AcOH (70 mL), followed by the portionwise addition of NaBH(OAc)₃ (13.67 g, 64.48 mmol, 2.35 eq.). The mixture was stirred at 15° C. for 2 hr. The mixture was evaporated to dryness under reduced pressure. The residue was purified by column chromatography (SiO₂, Petroleum ether:Ethyl acetate=100/1 to 5/1) to give 3-((2R,4S,5R)-4-hydroxy-5-(hydroxymethyl)tetrahydrofuran-2-yl)pyridin-2(1H)-one (3.1 g, 14.68 mmol, 53.49% yield) as a white solid. ¹H NMR (CHLOROFORM-d, 400 MHz): δ¹=7.72-7.78 (m, 1H), 7.35 (dd, J=6.5, 2.0 Hz, 1H), 6.40 (t, J=6.7 Hz, 1H), 5.16 (dd, J=10.0, 5.9 Hz, 1H), 4.26-4.33 (m, 1H), 3.94 (td, J=4.4, 2.7 Hz, 1H), 3.61-3.72 (m, 2H), 2.33 (ddd, J=13.0, 5.9, 2.0 Hz, 1H), 1.87-2.00 ppm (m, 1H); LCMS: (M+H⁺): 212.

[3463] Step 4. To a solution of 3-((2R,4S,5R)-4-hydroxy-5-(hydroxymethyl)tetrahydrofuran-2-yl)pyridin-2(1H)-one (3.10 g, 14.68 mmol, 1 eq.) in pyridine (30 mL) was added DMTrCl (4.48 g, 13.21 mmol, 0.9 eq.). The mixture was stirred at 15° C. for 2 hrs. The reaction mixture was diluted with H₂O 50 mL and extracted with EAOAC 180 mL (60 mL*3). The combined organic layers were washed with brine 15 mL (5 mL*3), dried over Na₂SO₄, filtered and concentrated under reduced pressure to give a residue. The residue was purified by column chromatography (SiO₂, DCM:MeOH=100:1 to 5:1) to give WV-NU-197 (5.2 g) as a white solid. ¹HNMR (DMSO-d6, 400 MHz): δ¹=11.59 (br s, 1H), 7.39-7.50 (m, 3H), 7.18-7.35 (m, 8H), 6.89 (d, J=8.5 Hz, 4H), 6.15 (t, J=6.7 Hz, 1H), 5.06 (d, J=4.1 Hz, 1H), 5.00 (dd, J=9.2, 6.0 Hz, 1H), 4.00-4.16 (m, 1H), 3.82-3.95 (m, 1H), 3.73 (s, 6H), 2.99-3.17 (m, 3H), 2.26 (ddd, J=12.7, 6.0, 2.5 Hz, 1H), 1.58 ppm (ddd, J=12.7, 9.3, 6.1 Hz, 1H); LCMS: M+H⁺: 513.6, LCMS purity 100.0%

### Synthesis of N-((3aR,5R,6R,6aS)-5-((bis(4-methoxyphenyl)(phenyl)methoxy)methyl)-6-hydroxy-3a,5,6,6a-tetrahydrofuro[2,3-d]oxazol-2-yl)acetamide (WV-NU-194)

[chemical structure]

[3465] Step 1. A mixture of (2S,3R,4R)-2,3,4,5-tetrahydroxypentanal (80 g, 532.87 mmol, 1 eq.) in DMF (500 mL) and added KHCO₃ (2.80 g, 27.97 mmol, 5.25e-2 eq.) and NH₂CN (26.80 g, 637.49 mmol, 26.80 mL, 1.20 eq.) was stirred at 90° C. for 1 hr. After cooling to room temperature, the mixture was evaporated under reduced pressure to half volume and the resulting solution was stored for 20 hr at 5° C. The precipitate obtained was filtered off and recrystallized from 96% aq. EtOH (600 ml) to give (3aR,5R,6R,6aS)-2-amino-5-(hydroxymethyl)-3a,5,6,6a-tetrahydrofuro[2,3-d]oxazol-6-ol (50 g) as a white solid. ¹HNMR (400 MHz, DMSO-d6) δ=6.36 (br s, 2H), 5.66 (d, J=5.6 Hz, 1H), 5.46 (br s, 1H), 4.75 (br s, 1H), 4.53 (br d, J=5.5 Hz, 1H), 4.00 (br s, 1H), 3.67-3.59 (m, 1H), 3.40 (s, 1H), 3.33-3.19 (m, 2H).

[3466] Step 2. To a solution of (3aR,5R,6R,6aS)-2-amino-5-(hydroxymethyl)-3a,5,6,6a-tetrahydrofuro[2,3-d]oxazol-6-ol (20 g, 114.84 mmol, 1 eq.) in DCM (200 mL) was added imidazole (46.91 g, 689.04 mmol, 6 eq.), and then added TBSCl (60.58 g, 401.94 mmol, 49.25 mL, 3.5 eq.). The mixture was stirred at 30° C. for 10 hr. The reaction mixture of two batches were filtered and concentrated under reduced pressure to give a residue. The residue was purified by column chromatography (SiO₂, Ethyl acetate:Methanol=0:1 to 5:1) to give (3aR,5R,6R,6aS)-6-((tert-butyldimethylsilyl)oxy)-5-(((tert-butyldimethylsilyl)oxy)methyl)-3a,5,6,6a-tetrahydrofuro[2,3-d]oxazol-2-amine (91 g, 135.59 mmol, 55.15% yield, 60% purity) as a white solid. ¹HNMR (400 MHz, CHLOROFORM-d) δ=5.87 (d, J=5.6 Hz, 1H), 4.64 (d, J=5.6 Hz, 1H), 4.32 (d, J=2.5 Hz, 1H), 3.91-3.81 (m, 1H), 3.63 (dd, J=5.1, 10.7 Hz, 1H), 3.46 (dd, J=7.6, 10.6 Hz, 1H), 0.91-0.86 (m, 19H), 0.11 (d, J=8.0 Hz, 6H), 0.03 (s, 6H); LCMS (M+H⁺): 403.3, purity: 79.78%.

[3467] Step 3. To a mixture solution of (3aR,5R,6R,6aS)-6-((tert-butyldimethylsilyl)oxy)-5-(((tert-butyldimethylsilyl)oxy)methyl)-3a,5,6,6a-tetrahydrofuro[2,3-d]oxazol-2-amine (40 g, 99.34 mmol, 1 eq.) in PYRIDABEN (400 mL) was by drops added Ac₂O (7.10 g, 69.54 mmol, 6.51 mL, 0.7 eq.). The mixture was stirred at 25° C. for 12 hr. The reaction mixture was filtered and concentrated under reduced pressure to give a residue. The residue was purified by column chromatography (SiO₂, Petroleum ether:Ethyl acetate=50:1 to 15:1) to give N-((3aR,5R,6R,6aS)-6-((tert-butyldimethylsilyl)oxy)-5-(((tert-butyldimethylsilyl)oxy)methyl)-3a,5,6,6a-tetrahydrofuro[2,3-d]oxazol-2-yl)acetamide (33 g, 74.21 mmol, 74.70% yield) as a yellow oil. ¹H NMR (400 MHz, CHLOROFORM-d) δ=5.91 (d, J=5.8 Hz, 1H), 4.81 (dd, J=1.0, 5.8 Hz, 1H), 4.49 (dd, J=0.9, 2.8 Hz, 1H), 3.98 (ddd, J=2.9, 4.8, 7.4 Hz, 1H), 3.61 (dd, J=5.0, 10.9 Hz, 1H), 3.44 (dd, J=7.4, 10.9 Hz, 1H), 2.16 (s, 3H), 0.90-0.88 (m, 9H), 0.87-0.85 (m, 9H), 0.12 (d, J=9.6 Hz, 6H), 0.02 (d, J=3.8 Hz, 6H); LCMS (M+H)⁺: 445.4, purity: 92.67%.

[3468] Step 4. To a solution of N-((3aR,5R,6R,6aS)-6-((tert-butyldimethylsilyl)oxy)-5-(((tert-butyldimethylsilyl)oxy)methyl)-3a,5,6,6a-tetrahydrofuro[2,3-d]oxazol-2-yl)acetamide (33 g, 74.21 mmol, 1 eq.) in THF (300 mL) was added TBAF (1 M, 111.31 mL, 1.5 eq.). The mixture was stirred at 25° C. for 1 hr. The reaction mixture was filtered and concentrated under reduced pressure to give a residue. The crude product was purified by reversed-phase HPLC (column: C18 20-35 um 100 A 100 g; mobile phase: [water-ACN]; B %: 0%-0% @ 30 mL/min), after purification see LCMS (ET35599-347-P2A1) to give N-((3aR,5R,6R,6aS)-6-hydroxy-5-(hydroxymethyl)-3a,5,6,6a-tetrahydrofuro[2,3-d]oxazol-2-yl)acetamide (11 g, 50.88 mmol, 68.75% yield) as a white solid. ¹H NMR (400 MHz, DEUTERIUM OXIDE) δ=4.43-4.36 (m, 1H), 4.14-3.98 (m, 3H), 3.84-3.61 (m, 3H), 3.56 (dd, J=4.8, 12.4 Hz, 1H), 3.49-3.41 (m, 1H), 2.09 (s, 3H); LCMS (M+H⁺): 217.2, purity: 99.41%.

[3469] Step 5. To a solution of N-((3aR,5R,6R,6aS)-6-hydroxy-5-(hydroxymethyl)-3a,5,6,6a-tetrahydrofuro[2,3-d]oxazol-2-yl)acetamide (10 g, 46.26 mmol, 1 eq.) in DCM (50 mL) was added PYRIDINE (7.32 g, 92.51 mmol, 7.47 mL, 2 eq.) and DMTrCl (9.40 g, 27.75 mmol, 0.6 eq.) at 0° C. The mixture was stirred at 20° C. for 2 hr. The reaction mixture was quenched by addition water 200 mL, and then extracted with DCM (200 mL*3). The combined organic layers were dried over Na₂SO₄, filtered and concentrated under reduced pressure to give a residue. The crude product was purified by reversed-phase HPLC (column: C18 20-35 um 100 A 100 g; mobile phase: [water (10 mM NH₄HCO₃)-ACN]; B %: 40%-65%, 20 min to give WV-NU-194 (5.1 g, 9.83 mmol, 21.26% yield) as a white solid. ¹H NMR (400 MHz, CHLOROFORM-d) δ=9.60 (br s, 1H), 7.37 (d, J=7.5 Hz, 2H), 7.29-7.19 (m, 7H), 7.16-7.10 (m, 1H), 6.75 (dd, J=4.4, 8.8 Hz, 4H), 5.89 (d, J=6.0 Hz, 1H), 4.96 (dd, J=1.6, 5.9 Hz, 1H), 4.42 (br d, J=4.9 Hz, 1H), 4.11-4.06 (m, 1H), 3.74 (d, J=2.1 Hz, 6H), 3.29-3.19 (m, 2H), 2.01 (s, 3H); LCMS (M−H⁺): 517, purity: 100%.

### Synthesis of 1-((2R,4S,5R)-5-((bis(4-methoxyphenyl)(phenyl)methoxy)methyl)-4-hydroxytetrahydrofuran-2-yl)-3-methylpyrimidine-2,4(1H,3H)-dione (WV-NU-203)

[chemical structure]

[3471] Step 1. To a solution of 1-((2R,4S,5R)-4-hydroxy-5-(hydroxymethyl)tetrahydrofuran-2-yl)pyrimidine-2,4(1H,3H)-dione (20 g, 87.64 mmol, 1 eq.) in DMF (200 mL) was added Mel (31.10 g, 219.10 mmol, 13.64 mL, 2.5 eq.) and K₂CO₃ (36.34 g, 262.93 mmol, 3 eq.). The mixture was stirred at 55° C. for 2 hr. The reaction mixture was filtered, and filter liquor was concentrated under reduced pressure to give a residue, and then extracted with DCM 200 mL*2. The combined organic layers were dried over, filtered and concentrated under reduced pressure to give 1-((2R,4S,5R)-4-hydroxy-5-(hydroxymethyl)tetrahydrofuran-2-yl)-3-methylpyrimidine-2,4(1H,3H)-dione (15 g) as a white solid. LCMS: (M+H⁺) 243.2.

[3472] Step 2. To a solution of 1-((2R,4S,5R)-4-hydroxy-5-(hydroxymethyl)tetrahydrofuran-2-yl)-3-methylpyrimidine-2,4(1H,3H)-dione (15 g, 61.93 mmol, 1 eq.) in Pyridine (150 mL) was added DMTCl (23.08 g, 68.12 mmol, 1.1 eq.). The mixture was stirred at 15° C. for 1 hr. The reaction mixture was extracted with ethyl acetate 150 mL*2. The combined organic layers were concentrated under reduced pressure to give a residue. The residue was purified by column chromatography (SiO₂, Petroleum ether/Ethyl acetate=I/O to 0/1) to give WV-NU-203 (13 g, 23.87 mmol, 38.55% yield) as a yellow solid. ¹HNMR (400 MHz, DMSO-d₆) δ=7.42-7.34 (m, 2H), 7.31 (t, J=7.6 Hz, 2H), 7.26-7.18 (m, 5H), 6.92-6.84 (m, 4H), 5.56-5.45 (m, 1H), 5.39-5.29 (m, 1H), 4.34-4.23 (m, 1H), 3.79-3.69 (m, 6H), 3.37-3.25 (m, 5H), 3.18-3.11 (m, 3H), 2.25-2.16 (m, 2H); LCMS: purity: 92.72%, (M−H⁺): 543.59.

### Synthesis of N-(9-((2R,4S,5R)-5-((bis(4-methoxyphenyl)(phenyl)methoxy)methyl)-4-hydroxytetrahydrofuran-2-yl)-8-oxo-8,9-dihydro-7H-purin-6-yl)benzamide (WV-NU-137)

[chemical structure]

[3474] Step 1. A solution of Na (9.99 g, 434.67 mmol) in BnOH (391.84 g, 3.62 mol), 3 hr later, (2R,3S,5R)-5-(6-amino-8-bromo-9H-purin-9-yl)-2-(hydroxymethyl)tetrahydrofuran-3-ol (25 g, 75.73 mmol) was added. The mixture was stirred at 15° C. for 12 hr. The reaction mixture was quenched by addition HCl (1M) 800 mL at 0° C., then added sat. NaHCO₃ aq. until pH˜9, and extracted with EtOAc (1000 mL*3), dried over Na₂SO₄, filtered and concentrated under reduced pressure to give a residue. The residue was purified by column chromatography ((SiO₂, Petroleum ether/Ethyl acetate=5/1 to Ethyl acetate:Methanol=10/1) to get (2R,3S,5R)-5-(6-amino-8-(benzyloxy)-9H-purin-9-yl)-2-(hydroxymethyl)tetrahydrofuran-3-ol (35 g, 64.67% yield) was obtained as a yellow oil. LCMS: (M+H+): 358.2

[3475] Step 2. (2R,3S,5R)-5-(6-amino-8-(benzyloxy)-9H-purin-9-yl)-2-(hydroxymethyl)tetrahydrofuran-3-ol (50 g, 139.91 mmol) (dried by azeotropic distillation on a rotary evaporator with pyridine (200 mL*3)) was added HMDS (338.72 g, 2.10 mol). The mixture was stirred at 150° C. for 12 hr. The reaction mixture was concentrated under reduced pressure to remove solvent. 8-(benzyloxy)-9-((2R,4S,5R)-4-((trimethylsilyl)oxy)-5-(((trimethylsilyl)oxy)methyl)tetrahydrofuran-2-yl)-9H-purin-6-amine (70.2 g, crude) was obtained as a yellow oil without purification.

[3476] Step 3. To a solution of 8-(benzyloxy)-9-((2R,4S,5R)-4-((trimethylsilyl)oxy)-5-(((trimethylsilyl)oxy)methyl)tetrahydrofuran-2-yl)-9H-purin-6-amine (70.2 g) in PYRIDINE (500 mL) was added BzCl (29.50 g). The mixture was stirred at 20° C. for 2 hr. MeOH (500 mL) and water (500 mL) was added, 10 min later NH₃·H₂O (250 mL) was added, 30 min later H₂O (500 mL) was added and extracted with EtOAc (500 mL*4). dried over Na₂SO₄, filtered and concentrated under reduced pressure to give a residue. The residue was purified by column chromatography (SiO₂, Petroleum ether/Ethyl acetate=1/0 to 0/1, then ethyl acetate/methanol=10:1) to get N-(8-(benzyloxy)-9-((2R,4S,5R)-4-hydroxy-5-(hydroxymethyl)tetrahydrofuran-2-yl)-9H-purin-6-yl)benzamide (36 g, 55.76% yield) as a yellow solid. LCMS: (M+H+): 462.2

[3477] Step 4. To a solution of N-(8-(benzyloxy)-9-((2R,4S,5R)-4-hydroxy-5-(hydroxymethyl)tetrahydrofuran-2-yl)-9H-purin-6-yl)benzamide (36 g, 78 mmol) in THF (500 mL) and MeOH (500 mL) was added Pd/C (9 g, 39.01 mmol, 10% purity). The mixture was stirred at 15° C. for 3 hr in H₂ (15 psi). The mixture was filtered, and the filtrated was concentrated under the reduced pressure to get N-(9-((2R,4S,5R)-4-hydroxy-5-(hydroxymethyl)tetrahydrofuran-2-yl)-8-oxo-8,9-dihydro-7H-purin-6-yl)benzamide (28.9 g, crude) as a yellow solid. LCMS: (M+H+): 372.2.

[3478] Step 5. To a solution of N-(9-((2R,4S,5R)-4-hydroxy-5-(hydroxymethyl)tetrahydrofuran-2-yl)-8-oxo-8,9-dihydro-7H-purin-6-yl)benzamide (28.9 g, 77.82 mmol) in PYRIDINE (300 mL) was added DMTCl (26.37 g, 77.82 mmol), the mixture was stirred at 15° C. for 12 hr. The reaction mixture was quenched by addition water (200 mL) at 0° C., and extracted with EtOAc (300 mL*3). Dried over Na₂SO₄, filtered and concentrated under reduced pressure to give a residue. The residue was purified by silica gel chromatography (Petroleum ether/Ethyl acetate=10/1, 1/4, 5% TEA) to get N-(9-((2R,4S,5R)-5-((bis(4-methoxyphenyl)(phenyl)methoxy)methyl)-4-hydroxytetrahydrofuran-2-yl)-8-oxo-8,9-dihydro-7H-purin-6-yl)benzamide (WV-NU-137) (32 g, 57.75% yield) as a white solid. ¹HNMR (400 MHz, 400 MHz, DMSO-d6) δ=8.38-8.24 (m, 1H), 8.12-8.00 (m, 2H), 7.67-7.60 (m, 1H), 7.58-7.51 (m, 2H), 7.38-7.33 (m, 2H), 7.26-7.13 (m, 7H), 6.81 (dd, J=9.0, 13.3 Hz, 4H), 6.25 (t, J=6.8 Hz, 1H), 5.29 (d, J=4.6 Hz, 1H), 4.56-4.49 (m, 1H), 3.95 (q, J=4.9 Hz, 1H), 3.71 (d, J=4.4 Hz, 6H), 3.20-3.15 (m, 2H), 3.08 (td, J=6.5, 13.0 Hz, 1H), 2.21-2.10 (m, 1H); LCMS (M−H⁺): 672.2.

### Synthesis of N-(9-((2R,4S,5R)-5-((bis(4-methoxyphenyl)(phenyl)methoxy)methyl)-4-(((1S,3S,3aS)-3-((methyldiphenylsilyl)methyl)tetrahydro-1H,3H-pyrrolo[1,2-c][1,3,2]oxazaphosphol-1-yl)oxy)tetrahydrofuran-2-yl)-8-oxo-8,9-dihydro-7H-purin-6-yl)benzamide

[chemical structure]

[3480] Dry N-[9-[(2R,4R,5R)-5-[[bis(4-methoxyphenyl)-phenyl-methoxy]methyl]-4-hydroxy-tetrahydrofuran-2-yl]-8-oxo-7H-purin-6-yl]benzamide (4.0 g, 5.94 mmol) in a rbf was dissolved in THF (50 mL). To the clear solution was added triethylamine (5.59 mL, 40.08 mmol). [(3S,3aS)-1-chloro-3a,4,5,6-tetrahydro-3H-pyrrolo[1,2-c][1,3,2]oxazaphosphol-3-yl]methyl-methyl-diphenyl-silane (0.96M solution in THF, 11.16 mL, 10.69 mmol) was added dropwise. The reaction solution was stirred at rt for 2 hr. TLC showed the reaction was complete. Anhydrous MgSO4 (708 mg) was added. Stirred for 1 min. The mixture was filtered, and the filtrate was concentrated. The resulting crude product was purified by normal phase column chromatography applying 0-100% EtOAc in hexanes (each mobile phase contained 1.5% triethylamine) as the gradient to afford N-(9-((2R,4S,5R)-5-((bis(4-methoxyphenyl)(phenyl)methoxy)methyl)-4-(((1S,3S,3aS)-3-((methyldiphenylsilyl)methyl)tetrahydro-1H,3H-pyrrolo[1,2-c][1,3,2]oxazaphosphol-1-yl)oxy)tetrahydrofuran-2-yl)-8-oxo-8,9-dihydro-7H-purin-6-yl)benzamide as a white foam (4.45 g, 74.0% yield). ¹H NMR (600 MHz, CDCl₃) δ 9.42 (s, 1H), 8.59 (s, 1H), 8.17 (s, 1H), 7.98-7.93 (m, 2H), 7.68-7.62 (m, 1H), 7.58-7.53 (m, 2H), 7.53-7.46 (m, 4H), 7.45-7.40 (m, 2H), 7.33-7.26 (m, 7H), 7.24-7.17 (m, 5H), 7.16-7.11 (m, 1H), 6.76-6.69 (m, 4H), 6.30 (dd, J=7.3, 6.1 Hz, 1H), 5.05 (ddt, J=8.9, 6.9, 4.5 Hz, 1H), 4.85 (dt, J=8.9, 5.7 Hz, 1H), 4.03 (q, J=5.0 Hz, 1H), 3.73 (d, J=4.5 Hz, 6H), 3.49 (ddt, J=14.6, 10.6, 7.6 Hz, 1H), 3.40 (ddt, J=12.6, 7.0, 5.5 Hz, 1H), 3.34 (dd, J=10.1, 4.9 Hz, 1H), 3.25 (dd, J=10.1, 5.9 Hz, 1H), 2.97 (tdd, J=10.8, 8.8, 4.3 Hz, 1H), 2.83 (dt, J=13.3, 6.6 Hz, 1H), 2.08 (ddd, J=13.5, 7.4, 4.6 Hz, 1H), 1.84 (ddt, J=12.2, 8.5, 4.3 Hz, 1H), 1.70-1.63 (m, 1H), 1.55 (dd, J=14.7, 8.9 Hz, 1H), 1.45-1.38 (m, 2H), 1.30-1.20 (m, 1H), 0.65 (s, 3H); ³¹P NMR (243 MHz, CDCl₃) δ 148.40; MS (ESI), 1013.18 [M+H]⁺.

### Synthesis of N-(9-((2R,4S,5R)-5-((bis(4-methoxyphenyl)(phenyl)methoxy)methyl)-4-(((1S,3S,3aS)-3-((phenylsulfonyl)methyl)tetrahydro-1H,3H-pyrrolo[1,2-c][1,3,2]oxazaphosphol-1-yl)oxy)tetrahydrofuran-2-yl)-8-oxo-8,9-dihydro-7H-purin-6-yl)benzamide

[chemical structure]

[3482] To a solution of dry N-[9-[(2R,4R,5R)-5-[[bis(4-methoxyphenyl)-phenyl-methoxy]methyl]-4-hydroxy-tetrahydrofuran-2-yl]-8-oxo-7H-purin-6-yl]benzamide (3.0 g, 4.45 mmol) in THF (30 mL) was added triethylamine (1.55 mL, 11.13 mmol). (3S,3aS)-3-(benzenesulfonylmethyl)-1-chloro-3a,4,5,6-tetrahydro-3H-pyrrolo[1,2-c][1,3,2]oxazaphosphole (0.9M in THF, 8.91 mL, 8.02 mmol) was added dropwise. The resulting off-white slurry was stirred at rt for 2 hr. TLC and LCMS showed the reaction was complete. The reaction was quenched by water (80 uL). Anhydrous MgSO4 (1.07 g) was added. The mixture was filtered through celite, and the filtrate was concentrated to afford the crude product as an off-white foam. The crude product was purified by normal phase column chromatography applying 20-100% EtOAc in hexanes (each mobile phase contained 2.5% triethylamine) as the gradient to afford the title compound as a white foam (2.979 g, 69.9% yield). ¹H NMR (600 MHz, CDCl₃) δ 9.45 (s, 1H), 8.60 (s, 1H), 8.24 (s, 1H), 7.97-7.92 (m, 2H), 7.92-7.88 (m, 2H), 7.67-7.62 (m, 1H), 7.62-7.57 (m, 1H), 7.57-7.48 (m, 4H), 7.45-7.40 (m, 2H), 7.34-7.28 (m, 4H), 7.21 (dd, J=8.3, 6.7 Hz, 2H), 7.19-7.13 (m, 1H), 6.79-6.72 (m, 4H), 6.39 (t, J=6.8 Hz, 1H), 5.09 (ddt, J=14.7, 6.9, 4.9 Hz, 2H), 4.08-4.03 (m, 1H), 3.76 (s, 3H), 3.75 (s, 3H), 3.69 (dq, J=9.8, 5.9 Hz, 1H), 3.52-3.42 (m, 2H), 3.37 (ddd, J=12.2, 5.4, 2.4 Hz, 2H), 3.34-3.24 (m, 2H), 3.03 (tdd, J=10.3, 8.8, 4.1 Hz, 1H), 2.30 (ddd, J=13.5, 7.3, 4.5 Hz, 1H), 1.87 (dt, J=11.4, 5.9 Hz, 1H), 1.80-1.72 (m, 1H), 1.70-1.63 (m, 1H), 1.12 (dtd, J=11.7, 10.1, 8.5 Hz, 1H); ³¹P NMR (243 MHz, CDCl₃) δ 149.85; MS (ESI), 955.37 [M−H]⁻.

### Synthesis of N-(9-((2R,4S,5R)-5-((bis(4-methoxyphenyl)(phenyl)methoxy)methyl)-4-hydroxytetrahydrofuran-2-yl)-8-oxo-8,9-dihydro-7H-purin-6-yl)-2-phenoxyacetamide (WV-NU-195)

[chemical structure]

[3484] Step 1. For three batches: To a soln. of (2R,3S,5R)-5-(6-amino-9H-purin-9-yl)-2-(hydroxymethyl)tetrahydrofuran-3-ol (30 g, 119.41 mmol, 1 eq.) in dioxane (400 mL) and AcONa (0.5 M, 480 mL, 2.01 eq.) buffer (pH 4.7), a solution of Br₂ (22.90 g, 143.29 mmol, 7.39 mL, 1.2 eq.) in dioxane (500 mL) was added dropwise while stirring. The mixture was stirred at 15° C. for 12h. The three batches were combined for work up. To the mixture conc. Na₂S₂O₅ was added until the red color vanished. The mixture was neutralized to pH 7.0 with 0.5 M NaOH. The residue was evaporated, when a white solid precipitated. The solid was filtered off, washed with cold 1,4-dioxane (50 mL), and dried under high vacuum to give (2R,3S,5R)-5-(6-amino-8-bromo-9H-purin-9-yl)-2-(hydroxymethyl)tetrahydrofuran-3-ol (100 g, 302.90 mmol, 84.56% yield) as a yellow solid. ¹HNMR (400 MHz, DMSO-d6) δ=8.22-7.98 (m, 1H), 7.53 (br s, 2H), 6.29 (dd, J=6.5, 7.9 Hz, 1H), 5.35 (br d, J=12.3 Hz, 2H), 4.58-4.38 (m, 1H), 3.95-3.82 (m, 1H), 3.65 (dd, J=4.5, 11.9 Hz, 1H), 3.48 (br dd, J=4.5, 11.7 Hz, 1H), 3.36 (br s, 1H), 3.24 (ddd, J=6.1, 7.8, 13.4 Hz, 1H), 2.19 (ddd, J=2.6, 6.4, 13.1 Hz, 1H); LCMS (M+H+): 330.1.

[3485] Step 2. To a solution of (2R,3S,5R)-5-(6-amino-8-bromo-9H-purin-9-yl)-2-(hydroxymethyl)tetrahydrofuran-3-ol (55 g, 166.60 mmol, 1 eq.) in Pyridine (1500 mL) was added NaOAc (24.87 g, 303.21 mmol, 1.82 eq.) and (2-phenoxyacetyl) 2-phenoxyacetate (267.08 g, 932.94 mmol, 5.6 eq.). The mixture was stirred at 80° C. for 2 hr. The reaction mixture was quenched by addition H₂O 100 mL and the mixture left at r.t. for 10 min. The mixture was evaporated and then diluted with DCM 1000 mL and sat. NaHCO₃ 1000 mL, extracted with DCM (1000 mL*2). The combined organic layers were washed with brine (1000 mL*2), dried over Na₂SO₄, filtered and concentrated under reduced pressure to give a residue. The residue was purified by column chromatography (SiO₂, Petroleum ether/(DCM/EtOAc=1:1)=1/0 to 0/1), then some solid was precipitate out on the column, washed the column with DCM 2 L and concentrated to get a crude. The crude product was triturated with methanol 1000 mL. (2R,3S,5R)-5-(8-oxo-6-(2-phenoxyacetamido)-7,8-dihydro-9H-purin-9-yl)-2-((2-phenoxyacetoxy)methyl)tetrahydrofuran-3-yl 2-phenoxyacetate (60 g, 67.20 mmol, 40.34% yield, 75% purity) was obtained as a brown solid. LCMS (M−H⁺): 668.2.

[3486] Step 3. For two batches: To a solution of (2R,3S,5R)-5-(8-oxo-6-(2-phenoxyacetamido)-7,8-dihydro-9H-purin-9-yl)-2-((2-phenoxyacetoxy)methyl)tetrahydrofuran-3-yl 2-phenoxyacetate (27 g, 40.32 mmol, 1 eq.) in the mixture solvent of TEA (270 mL), PYRIDINE (270 mL) and H₂O (810 mL). The mixture was stirred at 15° C. for 1.5 hr. The reaction mixture was concentrated under reduced pressure to remove solvent. The crude of two batches were combined and purified by re-crystallization from methanol 500 mL to give N-(9-((2R,4S,5R)-4-hydroxy-5-(hydroxymethyl)tetrahydrofuran-2-yl)-8-oxo-8,9-dihydro-7H-purin-6-yl)-2-phenoxyacetamide (18 g, 44.85 mmol, 55.61% yield) as a brown solid. LCMS (M−H⁺): 400.1.

[3487] Step 4. To a solution of N-(9-((2R,4S,5R)-4-hydroxy-5-(hydroxymethyl)tetrahydrofuran-2-yl)-8-oxo-8,9-dihydro-7H-purin-6-yl)-2-phenoxyacetamide (16 g, 39.86 mmol, 1 eq.) in Pyridine (300 mL) was added DMTCl (18.91 g, 55.81 mmol, 1.4 eq.). The mixture was stirred at 15° C. for 10 hr. The reaction mixture was quenched by addition water 50 mL, and then diluted with sat. NaHCO₃ 500 mL and extracted with ethyl acetate 1500 mL (500 mL*3). The combined organic layers were washed with sat. brine 500 mL, dried over Na₂SO₄, filtered and concentrated under reduced pressure to give a residue. The residue was purified by column chromatography (SiO₂, Petroleum ether/Ethyl acetate=1/0 to 0/1, 5% TEA) to give WV-NU-195 (20 g, 27.63 mmol, 69.30% yield, 97.21% purity) as a white solid. ¹H NMR (400 MHz, DMSO-d₆) δ=10.94 (br s, 1H), 10.50 (br s, 1H), 8.26 (s, 1H), 7.38-7.28 (m, 4H), 7.26-7.11 (m, 7H), 7.06-6.94 (m, 3H), 6.79 (dd, J=8.9, 14.1 Hz, 4H), 6.23 (t, J=6.8 Hz, 1H), 5.27 (d, J=4.6 Hz, 1H), 4.84 (s, 2H), 4.58-4.44 (m, 1H), 3.97-3.91 (m, 1H), 3.70 (d, J=5.0 Hz, 6H), 3.22-3.11 (m, 2H), 3.05 (td, J=6.4, 13.0 Hz, 1H), 2.14 (ddd, J=4.9, 7.6, 12.9 Hz, 1H); LCMS (M−H)⁻: 702.3; purity: 97.21%.

### Synthesis of N-(9-((2R,3R,4R,5R)-5-((bis(4-methoxyphenyl)(phenyl)methoxy)methyl)-3-((tert-butyldimethylsilyl)oxy)-4-hydroxytetrahydrofuran-2-yl)-8-oxo-8,9-dihydro-7H-purin-6-yl)benzamide

[chemical structure]

[3489] Step 1. To a solution of Na (21 g, 913.45 mmol, 21.65 mL, 8.43 eq.) in BnOH (1000 mL), 3 hr later, (2R,3R,4S,5R)-2-(6-amino-8-bromo-9H-purin-9-yl)-5-(hydroxymethyl)tetrahydrofuran-3,4-diol (37.5 g, 108.34 mmol, 1.0 eq.) was added. The mixture was stirred at 15° C. for 12 hr. The mixture was poured into cold 1N HCl (2500 mL) and extracted with EtOAc (1500 mL). The aqueous phase was added sat.NaHCO₃ (aq) until pH>8, and the white cake was separated out, filtered and concentrated to get the crude. (2R,3R,4S,5R)-2-(6-amino-8-(benzyloxy)-9H-purin-9-yl)-5-(hydroxymethyl)tetrahydrofuran-3,4-diol (80 g, crude) was obtained as white solid. LCMS: (M+H⁺): 374.4.

[3490] Step 2. To a solution of (2R,3R,4S,5R)-2-(6-amino-8-(benzyloxy)-9H-purin-9-yl)-5-(hydroxymethyl)tetrahydrofuran-3,4-diol (39.0 g, 104.46 mmol, 1.0 eq.) in HMDS (400 mL), the mixture was stirred at 130° C. for 12 hrs. The reaction mixture was concentrated under reduced pressure to give a residue. The N-(8-(benzyloxy)-9-((2R,3R,4R,5R)-4-hydroxy-3-((trimethylsilyl)oxy)-5-(((trimethylsilyl)oxy)methyl)tetrahydrofuran-2-yl)-9H-purin-6-yl)benzamide (61.62 g, crude) was obtained as brown solid.

[3491] Step 3. To a solution of N-(8-(benzyloxy)-9-((2R,3R,4R,5R)-4-hydroxy-3-((trimethylsilyl)oxy)-5-(((trimethylsilyl)oxy)methyl)tetrahydrofuran-2-yl)-9H-purin-6-yl)benzamide (46.0 g, 77.98 mmol, 1 eq.) in pyridine (460 mL) was added benzoyl chloride (21.92 g, 155.96 mmol, 18.12 mL, 2.0 eq.). The mixture was stirred at 20° C. for 1 hr. The reaction mixture was added MeOH:H₂O (1:1) 500 mL and stirred at 15° C. for 10 mins. Then the mixture was added NH₃. H₂O (150 mL) and stirred for 10 min at 15° C. Then the mixture was diluted by H₂O 200 mL and exacted by EtOAc 800 mL (200 mL*4). The mixture was added brine 200 mL and dried over Na₂SO₄. Then the mixture was concentrated under reduced pressure to give a residue. The residue was purified by column chromatography. N-(8-(benzyloxy)-9-((2R,3R,4S,5R)-3,4-dihydroxy-5-(hydroxymethyl)tetrahydrofuran-2-yl)-9H-purin-6-yl)benzamide (33.99 g, 71.19 mmol, 91.29% yield) was obtained as yellow solid. LCMS: (M+H⁺): 478.4.

[3492] Step 4. To a solution of N-(8-(benzyloxy)-9-((2R,3R,4S,5R)-3,4-dihydroxy-5-(hydroxymethyl)tetrahydrofuran-2-yl)-9H-purin-6-yl)benzamide (35.1 g, 73.51 mmol, 1 eq.) in MeOH (1500 mL) and THF (500 mL) was added Pd/C (7.0 g, 10% purity) under H₂ (15 psi). The mixture was stirred at 20° C. for 1 hr. The reaction was filtered and concentrated under reduced pressure to give a residue. The residue was not purified and the N-(9-((2R,3R,4S,5R)-3,4-dihydroxy-5-(hydroxymethyl)tetrahydrofuran-2-yl)-8-oxo-8,9-dihydro-7H-purin-6-yl)benzamide (19.6 g, 50.60 mmol, 68.83% yield) was obtained as brown solid. LCMS: (M+H⁺): 388.2.

[3493] Step 5. To a solution of N-(9-((2R,3R,4S,5R)-3,4-dihydroxy-5-(hydroxymethyl)tetrahydrofuran-2-yl)-8-oxo-8,9-dihydro-7H-purin-6-yl)benzamide (14.8 g, 38.21 mmol, 1 eq.) in pyridine (150 mL) was added DMTCl (15.54 g, 45.85 mmol, 1.2 eq.). The mixture was stirred at 20° C. for 2 hrs. The reaction mixture was diluted with H₂O 10 mL and extracted with ethyl acetate. The combined organic layers were washed with brine 100 mL, dried over Na₂SO₄, filtered and concentrated under reduced pressure to give a residue. Residue was purified by column chromatography (Petroleum ether/Ethyl acetate=100/1 to 0/1). N-(9-((2R,3R,4S,5R)-5-((bis(4-methoxyphenyl)(phenyl)methoxy)methyl)-3,4-dihydroxytetrahydrofuran-2-yl)-8-oxo-8,9-dihydro-7H-purin-6-yl)benzamide (13.2 g, 19.14 mmol, 50.09% yield) was obtained as brown solid. LCMS: (M+H⁺): 690.5.

[3494] Step 6. To a solution of N-(9-((2R,3R,4S,5R)-5-((bis(4-methoxyphenyl)(phenyl)methoxy)methyl)-3,4-dihydroxytetrahydrofuran-2-yl)-8-oxo-8,9-dihydro-7H-purin-6-yl)benzamide (10.20 g, 14.79 mmol, 1 eq.) in DMF (100 mL) was added imidazole (3.02 g, 44.37 mmol, 3.00 eq.) and TBSCl (2.01 g, 13.31 mmol, 1.63 mL, 0.9 eq.). The mixture was stirred at 15° C. for 10 hrs. The mixture was diluted with ethyl acetate and washed with NaHCO₃ solution. The combined organic layers were dried over Na₂SO₄, filtered and concentrated under reduced pressure to give a residue. The residue was purified by column chromatography (Petroleum ether/Ethyl acetate=100/1 to 1/1). N-(9-((2R,3R,4R,5R)-5-((bis(4-methoxyphenyl)(phenyl)methoxy)methyl)-3-((tert-butyldimethylsilyl)oxy)-4-hydroxytetrahydrofuran-2-yl)-8-oxo-8,9-dihydro-7H-purin-6-yl)benzamide (3.82 g, 4.75 mmol, 32.13% yield) was obtained as yellow solid. ¹HNMR (400 MHz, CHLOROFORM-d) δ=9.51 (s, 1H), 8.57 (s, 1H), 8.26 (s, 1H), 8.03 (s, 1H), 7.96 (d, J=7.5 Hz, 2H), 7.70-7.63 (m, 1H), 7.61-7.54 (m, 2H), 7.48 (d, J=7.3 Hz, 2H), 7.36 (dd, J=2.0, 8.9 Hz, 4H), 7.26-7.16 (m, 3H), 6.78 (d, J=8.7 Hz, 4H), 5.99 (d, J=4.6 Hz, 1H), 5.32-5.27 (m, 1H), 4.48 (q, J=5.5 Hz, 1H), 4.13-4.08 (m, 1H), 3.78 (s, 6H), 3.46 (dd, J=3.9, 10.3 Hz, 1H), 3.32 (dd, J=5.3, 10.3 Hz, 1H), 2.70 (d, J=5.9 Hz, 1H), 2.06 (s, 1H), 1.58 (s, 2H), 1.27 (t, J=7.2 Hz, 1H), 0.89 (s, 9H), 0.05 (s, 3H), −0.01 (s, 3H); LCMS: (M−H⁻): 802.3.

### Synthesis of N-(9-((2R,3R,4R,5R)-5-((bis(4-methoxyphenyl)(phenyl)methoxy)methyl)-3-((tert-butyldimethylsilyl)oxy)-4-(((1S,3S,3aS)-3-((phenylsulfonyl)methyl)tetrahydro-1H,3H-pyrrolo[1,2-c][1,3,2]oxazaphosphol-1-yl)oxy)tetrahydrofuran-2-yl)-8-oxo-8,9-dihydro-7H-purin-6-yl)benzamide

[chemical structure]

[3496] To a solution of dry N-[9-[(2R,3S,5R)-5-[[bis(4-methoxyphenyl)-phenyl-methoxy]methyl]-3-[tert-butyl(dimethyl)silyl]oxy-4-hydroxy-tetrahydrofuran-2-yl]-8-oxo-7H-purin-6-yl]benzamide (3.5 g, 4.35 mmol) in THF (35 mL) was added triethylamine (1.52 mL, 10.88 mmol). (3S,3aS)-3-(benzenesulfonylmethyl)-1-chloro-3a,4,5,6-tetrahydro-3H-pyrrolo[1,2-c][1,3,2]oxazaphosphole (0.9M in THF, 8.71 mL, 7.84 mmol) was added dropwise. The resulting cloudy solution was stirred at rt for 3.5 hr. TLC and LCMS showed the reaction was complete. The reaction was quenched by water (78 uL). Anhydrous MgSO₄ (1.05 g) was added. The mixture was filtered through celite, and the filtrate was concentrated to afford the crude product as an off-white foam. The crude product was purified by normal phase column chromatography applying 20-100% EtOAc in hexanes (each mobile phase contained 2.5% triethylamine) as the gradient to afford the title compound as a white foam (3.512 g, 74.2% yield). ¹H NMR (600 MHz, CDCl₃) δ 9.48 (s, 1H), 8.62 (s, 1H), 8.24 (s, 1H), 7.96-7.92 (m, 2H), 7.90-7.85 (m, 2H), 7.67-7.61 (m, 1H), 7.57 (td, J=7.2, 1.2 Hz, 1H), 7.54 (t, J=7.8 Hz, 2H), 7.50-7.43 (m, 4H), 7.38-7.32 (m, 4H), 7.22 (dd, J=8.4, 6.9 Hz, 2H), 7.19-7.13 (m, 1H), 6.79-6.72 (m, 4H), 6.01 (d, J=5.4 Hz, 1H), 5.33 (t, J=5.3 Hz, 1H), 5.00 (q, J=6.2 Hz, 1H), 4.78 (dt, J=10.8, 4.7 Hz, 1H), 4.06 (q, J=4.4 Hz, 1H), 3.76 (s, 6H), 3.67 (dq, J=11.4, 5.8 Hz, 1H), 3.49-3.34 (m, 4H), 3.19 (dd, J=10.4, 4.9 Hz, 1H), 3.01 (qd, J=9.5, 4.0 Hz, 1H), 1.85 (t, J=5.8 Hz, 1H), 1.77-1.70 (m, 1H), 1.68-1.62 (m, 1H), 1.16-1.06 (m, 1H), 0.83 (s, 9H), 0.02 (s, 3H), −0.09 (s, 3H); ³¹P NMR (243 MHz, CDCl₃) δ 152.12; MS (ESI), 1086.13 [M−H]⁻.

### Synthesis of (1S,3S,3aS)-1-(((2R,3S)-3-(bis(4-methoxyphenyl)(phenyl)methoxy)tetrahydrofuran-2-yl)methoxy)-3-((phenylsulfonyl)methyl)tetrahydro-1H,3H-pyrrolo[1,2-c][1,3,2]oxazaphosphole

[chemical structure]

[3498] To a white slurry of dry [(2R,3R)-3-[bis(4-methoxyphenyl)-phenyl-methoxy]tetrahydrofuran-2-yl]methanol (10.0 g, 23.78 mmol) in THF (150 mL) was added triethylamine (17.9 mL, 128.42 mmol). (3S,3aS)-3-(benzenesulfonylmethyl)-1-chloro-3a,4,5,6-tetrahydro-3H-pyrrolo[1,2-c][1,3,2]oxazaphosphole (0.9M in THF, 47.56 mL, 42.81 mmol) was added dropwise. DCM (50 mL) was added. The white slurry was stirred at rt for 3.5 hr. TLC and LCMS showed the reaction was complete. The reaction was quenched by water (428 uL). Anhydrous MgSO₄ (5.7 g) was added. The mixture was filtered through celite, and the filtrate was concentrated to afford the crude product as an off-white foam. The crude product was purified by normal phase column chromatography applying 20-100% EtOAc in hexanes (each mobile phase contained 5% triethylamine) as the gradient to afford the title compound as a white foam (13.08 g, 78.2% yield). ¹H NMR (600 MHz, CDCl₃) δ 7.92 (dd, J=8.2, 1.4 Hz, 2H), 7.64 (tt, J=7.4, 1.3 Hz, 1H), 7.54 (t, J=7.8 Hz, 2H), 7.46 (dd, J=8.6, 1.3 Hz, 2H), 7.35 (d, J=8.6 Hz, 4H), 7.29 (t, J=7.6 Hz, 2H), 7.22 (tt, J=7.3, 1.3 Hz, 1H), 6.84 (d, J=8.9 Hz, 4H), 4.99 (q, J=6.1 Hz, 1H), 4.07 (dt, J=6.2, 1.9 Hz, 1H), 3.89 (ddd, J=10.1, 8.1, 5.9 Hz, 1H), 3.82 (td, J=8.0, 2.8 Hz, 1H), 3.79 (s, 6H), 3.79-3.75 (m, 1H), 3.61 (dq, J=9.7, 5.9 Hz, 1H), 3.47 (dd, J=14.5, 6.8 Hz, 1H), 3.45-3.38 (m, 2H), 3.34 (dd, J=14.5, 5.6 Hz, 1H), 3.29 (ddd, J=11.1, 8.7, 4.6 Hz, 1H), 3.00 (qd, J=10.5, 4.1 Hz, 1H), 1.83 (dtt, J=11.9, 7.7, 3.3 Hz, 1H), 1.74 (dq, J=11.9, 7.5 Hz, 1H), 1.61 (qd, J=7.7, 6.6, 3.0 Hz, 1H), 1.56 (dddd, J=13.7, 10.0, 5.8, 3.9 Hz, 1H), 1.38 (ddt, J=13.0, 5.4, 2.1 Hz, 1H), 1.07 (dq, J=11.5, 9.8 Hz, 1H); ³¹P NMR (243 MHz, CDCl₃) δ 152.11; MS (ESI), 704.87 [M+H]⁺.

### Synthesis of (S)—N-(1-(3-(bis(4-methoxyphenyl)(phenyl)methoxy)-2-hydroxypropyl)-2-oxo-1,2-dihydropyrimidin-4-yl)benzamide (WV-NU-175)

[chemical structure]

[3500] To a solution of (S)-2-((bis(4-methoxyphenyl)(phenyl)methoxy)methyl)oxirane (34.30 g, 159.39 mmol, 1 eq.) in DMF (300 mL) was added NaH (1.27 g, 31.88 mmol, 60% purity, 0.2 eq.) the mixture was stirred at 20° C. for 2 hr, and then (2S)-2-[[bis(4-methoxyphenyl)-phenyl-methoxy]methyl]oxirane (60 g, 159.39 mmol, 1 eq.) was added. The mixture was stirred at 115° C. for 4 hr. TLC (Petroleum ether:Ethyl acetate=3:1, Rf=0.05) indicated compound 2 was consumed and one new spot formed. The solution was subsequently cooled to 20° C. and partitioned between saturated brine 1000 mL and EtOAc (200 mL*3). The organic phase was separated, washed twice with saturated brine, dried over Na₂SO₄, and concentrated in vacuo. The residue was purified by column chromatography (SiO₂, Petroleum ether/Ethyl acetate=1/0 to 0/1, 5% TEA). WV-NU-175 (14.9 g, 24.45 mmol, 15.34% yield, 97.094% purity) was obtained as a yellow solid. ¹H NMR (400 MHz, DMSO-d₆) δ ppm 2.90-3.03 (m, 2H) 3.54-3.63 (m, 1H) 3.73 (d, J=1.50 Hz, 6H) 4.02 (s, 1H) 4.20 (br dd, J=12.82, 3.06 Hz, 1H) 5.31 (d, J=5.88 Hz, 1H) 6.90 (dd, J=8.88, 1.75 Hz, 4H) 7.19-7.36 (m, 8H) 7.43 (d, J=7.38 Hz, 2H) 7.48-7.55 (m, 2H) 7.61 (d, J=7.38 Hz, 1H) 7.96-8.05 (m, 2H) 11.15 (br s, 1H); LCMS (M−H⁺): 590.3; purity: 98.72%.

### Synthesis of (R)—N-(1-(3-(bis(4-methoxyphenyl)(phenyl)methoxy)-2-hydroxypropyl)-2-oxo-1,2-dihydropyrimidin-4-yl)benzamide (WV-NU-176)

[chemical structure]

[3502] Step 1. To a solution of [(2S)-oxiran-2-yl]methanol [(2S)-oxiran-2-yl]methanol (35.7 g, 481.92 mmol, 31.88 mL, 1 eq.) in PYRIDINE (1750 mL) was added DMTCl (179.62 g, 530.11 mmol, 1.1 eq.). The mixture was stirred at 15° C. for 10 hr. TLC (Petroleum ether:Ethyl acetate=3:1, Rf=0.70) indicated Reactant 1 was consumed completely and three new spots formed. A few drops of Methanol 30 ml was added to hydrolyze any unreacted DMTrC1 and the mixture was stirred for 10 minutes. The product was washed with H₂O (8000 ml), extracted with EAOAC (500 mL*3). The combined organic layers were washed with NaCl (50 mL*3), dried over Na₂SO₄, filtered and concentrated under reduced pressure to give a residue. The residue was purified by column chromatography (SiO₂, Petroleum ether/Ethyl acetate=50/1 to 3/1, 5% TEA) to give (R)-2-((bis(4-methoxyphenyl)(phenyl)methoxy)methyl)oxirane (240 g, 637.55 mmol, 66.15% yield) as a yellow oil. ¹HNMR (400 MHz, DMSO-d6) δ=7.43-7.38 (m, 2H), 7.34-7.19 (m, 7H), 6.89 (d, J=8.8 Hz, 4H), 5.31 (d, J=5.5 Hz, 1H), 3.84 (qd, J=5.4, 10.4 Hz, 1H), 3.75-3.72 (m, 6H), 3.65-3.59 (m, 1H), 3.39-3.38 (m, 1H), 3.06-2.94 (m, 2H).

[3503] Step 2. To a solution of (R)-2-((bis(4-methoxyphenyl)(phenyl)methoxy)methyl)oxirane (14.29 g, 66.41 mmol, 1 eq.) in DMF (250 mL) was added K₂CO₃ (18.36 g, 132.82 mmol, 2 eq.). The mixture was stirred at 85° C. for 2 hr, (2R)-2-[[bis(4-methoxyphenyl)-phenyl-methoxy]methyl]oxirane (25 g, 66.41 mmol, 1 eq.) was added. The mixture was stirred at 85° C. for 12 hr. The mixture was concentrated in vacuo. The residue was quenched by sat. aq. NaHCO₃ (500 mL) and then extracted with EtOAc (600 mL*3). The combined organic phase was washed with brine (300 mL), dried over anhydrous Na₂SO₄, filtered and concentrated in vacuo. The residue was Purified by column chromatograph on silica gel eluted with (Petroleum ether/Ethyl acetate=50/1, 3/1) to give WV-NU-176 (24 g, 40.56 mmol, 11.75% yield) as a white solid. ¹HNMR (CHLOROFORM-d, 400 MHz): δ=7.94 (s, 2H), 7.83 (br d, J=7.4 Hz, 2H), 7.50-7.58 (m, 2H), 7.45 (t, J=7.6 Hz, 2H), 7.34 (br d, J=7.6 Hz, 3H), 7.20-7.29 (m, 7H), 7.12-7.20 (m, 2H), 6.76 (d, J=8.8 Hz, 4H), 4.28 (dd, J=13.6, 2.5 Hz, 1H), 4.14 (br s, 1H), 3.74-3.81 (m, 1H), 3.71 (s, 6H), 3.11-3.26 (m, 1H), 3.05 (dd, J=9.6, 6.0 Hz, 1H), 1.19 ppm (t, J=7.1 Hz, 2H); LCMS: (M−H⁺): 590.2, LCMS purity 99.56%.

### Synthesis of (S)—N-(1-(3-(bis(4-methoxyphenyl)(phenyl)methoxy)-2-hydroxypropyl)-4-oxo-1,4-dihydropyrimidin-2-yl)benzamide (WV-NU-199)

[chemical structure]

[3505] To a solution of compound N-(4-oxo-1,4-dihydropyrimidin-2-yl)benzamide (57.17 g, 265.64 mmol, 2 eq.) in DMF (600 mL) was added drop wise K₂CO₃ (9.18 g, 66.41 mmol, 0.5 eq.) at 85° C., the mixture was stirred at this temperature for 30 min, and then (S)-2-((bis(4-methoxyphenyl)(phenyl)methoxy)methyl)oxirane (50 g, 132.82 mmol, 1 eq.) was added drop wise at 85° C. The resulting mixture was stirred at 85° C. for 48 hr. The reaction mixture was quenched by addition water 150 mL at 15° C., and extracted with Ethyl acetate 1000 mL (500 mL*2), dried over anhydrous Na₂SO₄, filtered and concentrated in vacuo. The residue was purified by column chromatography (SiO₂, Petroleum ether:Ethyl acetate=1:0 to 0:1) to give WV-NU-199 (14.23 g, 24.05 mmol, 18.11% yield) as a white solid. ¹HNMR (400 MHz, DMSO-d6) δ=13.40-13.08 (m, 1H), 8.17 (d, J=7.9 Hz, 2H), 7.81 (d, J=8.0 Hz, 1H), 7.53-7.42 (m, 3H), 7.33-7.20 (m, 9H), 6.85 (d, J=8.8 Hz, 4H), 5.94 (dd, J=2.2, 7.9 Hz, 1H), 5.37 (d, J=5.6 Hz, 1H), 4.67 (dd, J=3.1, 13.3 Hz, 1H), 4.34-4.18 (m, 1H), 3.75-3.68 (m, 7H), 3.15 (br dd, J=4.9, 9.0 Hz, 1H), 2.96 (br t, J=8.1 Hz, 1H); LCMS (M−H+): 592.24, purity: 94.76%.

### Synthesis of (R)—N-(1-(3-(bis(4-methoxyphenyl)(phenyl)methoxy)-2-hydroxypropyl)-4-oxo-1,4-dihydropyrimidin-2-yl)benzamide (WV-NU-200)

[chemical structure]

[3507] To a solution of N-(4-oxo-1,4-dihydropyrimidin-2-yl)benzamide (34.30 g, 159.39 mmol, 2 eq.) in DMF (350 mL) was added K₂CO₃ (5.51 g, 39.85 mmol, 0.5 eq.) at 85° C., the mixture was stirred at this temperature for 30 min, and then (R)-2-((bis(4-methoxyphenyl)(phenyl)methoxy)methyl)oxirane (30.00 g, 79.69 mmol, 1 eq.) was added drop wise at 85° C. The resulting mixture was stirred at 85° C. for 48 hr. The reaction mixture was quenched by addition water 50 mL at 15° C., and extracted with Ethyl acetate 200 mL (100 mL*2), dried over anhydrous Na₂SO₄, filtered and concentrated in vacuo. The residue was purified by column chromatography (SiO₂, Petroleum ether:Ethyl acetate=1:0 to 0:1) to give WV-NU-200 (7.95 g, 13.44 mmol, 16.86% yield) as a white solid. ¹HNMR (400 MHz, DMSO-d6) δ=13.23 (d, J=2.0 Hz, 1H), 8.17 (d, J=7.3 Hz, 2H), 7.81 (d, J=8.0 Hz, 1H), 7.53-7.41 (m, 3H), 7.32-7.19 (m, 9H), 6.84 (d, J=8.9 Hz, 4H), 5.93 (dd, J=2.4, 8.0 Hz, 1H), 5.36 (d, J=5.6 Hz, 1H), 4.67 (dd, J=3.1, 13.3 Hz, 1H), 4.33-4.19 (m, 1H), 3.75-3.67 (m, 7H), 3.14 (dd, J=4.9, 9.1 Hz, 1H), 2.96 (br t, J=8.1 Hz, 1H); LCMS (M−H+): 592.24, purity: 93.75%.

### Synthesis of (S)-1-(3-(bis(4-methoxyphenyl)(phenyl)methoxy)-2-hydroxypropyl)-5-methylpyrimidine-2,4(1H,3H)-dione (WV-NU-180)

[chemical structure]

[3509] To a solution of 5-methyl-1H-pyrimidine-2,4-dione (16.75 g, 132.82 mmol, 1 eq.) in DMF (100 mL) was added K₂CO₃ (7.34 g, 53.13 mmol, 0.4 eq.) at 85° C. and (S)-2-((bis(4-methoxyphenyl)(phenyl)methoxy)methyl)oxirane (50 g, 132.82 mmol, 1 eq.). The mixture was stirred at 85° C. for 24 hrs. The mixture was diluted by H₂O 500 mL and exacted by EtOAc 500 mL*3. The organic phase was dried over Na₂SO₄, filtered and concentrated under reduced pressure to give a residue. The silica gel column was washed with Petroleum ether (5% Et₃N) 600 mL and Petroleum ether 600 mL. The residue was purified by column chromatography (SiO₂, Petroleum ether/Ethyl acetate=100/1 to 1/1) to give WV-NU-180 (13.8 g, 26.33 mmol, 19.83% yield, 95.9% purity) as yellow solid. ¹HNMR (400 MHz, DMSO-d6) δ=11.20 (s, 1H), 7.50-7.13 (m, 10H), 6.88 (dd, J=1.5, 8.8 Hz, 4H), 5.25 (d, J=5.6 Hz, 1H), 3.95-3.86 (m, 2H), 3.77-3.70 (m, 6H), 3.53-3.40 (m, 1H), 3.01-2.93 (m, 1H), 2.91-2.82 (m, 1H), 2.75-2.71 (m, 1H), 2.73 (s, 1H), 1.70 (s, 3H). LCMS: (M⁻H⁺): 501.1, LCMS purity: 95.9%.

### Synthesis of (R)-1-(3-(bis(4-methoxyphenyl)(phenyl)methoxy)-2-hydroxypropyl)-5-methylpyrimidine-2,4(1H,3H)-dione (WV-NU-205)

[chemical structure]

[3511] For two batches: To a solution of (R)-2-((bis(4-methoxyphenyl)(phenyl)methoxy)methyl)oxirane (60 g, 159.39 mmol, 1 eq.) in DMF (600 mL) was added K₂CO₃ (11.01 g, 79.69 mmol, 0.5 eq.) at 85° C. for 30 min, and 5-methyl-1H-pyrimidine-2,4-dione (20.10 g, 159.39 mmol, 1 eq.) was added. The mixture was stirred at 85° C. for 12 hr. The reaction mixture was quenched by addition water 500 mL at 15° C., and extracted with Ethyl acetate 2000 mL (1000 mL*2), dried over anhydrous Na₂SO₄, filtered and concentrated in vacuo. The residue was purified by column chromatography (SiO₂, Petroleum ether:Ethyl acetate=1:0 to 0:1) to give WV-NU-205 (10 g, 19.90 mmol) as a white solid. ¹H NMR (400 MHz, DMSO-d6) δ=11.18 (s, 1H), 7.42 (br d, J=7.5 Hz, 2H), 7.36-7.21 (m, 9H), 6.88 (dd, J=1.3, 8.7 Hz, 4H), 5.24 (d, J=5.5 Hz, 1H), 3.95-3.86 (m, 2H), 3.74 (s, 6H), 3.46 (br dd, J=9.4, 14.5 Hz, 1H), 3.01-2.85 (m, 2H), 1.70 (s, 3H); LCMS (M−H+): 502.56, purity: 96.97%.

### Synthesis of (S)—N-(9-(3-(bis(4-methoxyphenyl)(phenyl)methoxy)-2-hydroxypropyl)-6-oxo-6,9-dihydro-1H-purin-2-yl)isobutyramide (WV-NU-177)

[chemical structure]

[3513] For three batches: To a solution of 2-methyl-N-(6-oxo-1, 9-dihydropurin-2-yl)propanamide (11.75 g, 53.13 mmol, 1 eq.) in DMF (200 mL) was added K₂CO₃ (3.67 g, 26.56 mmol, 0.5 eq.) at 85° C. for 30 min, and (S)-2-((bis(4-methoxyphenyl)(phenyl)methoxy)methyl)oxirane (20 g, 53.13 mmol, 1 eq) was added. The mixture was stirred at 85° C. for 12 hr. Three reactions were combined for workup. The reaction mixture was diluted with water 500 mL and extracted with EtOAc (500 mL*4). The combined organic layers were dried over Na₂SO₄ filtered and concentrated under reduced pressure to give a residue. The residue was purified by column chromatography (SiO₂, Dichloromethane:Methanol=0:1 to 30:1). The mixture of 22 g crude was purified by prep-HPLC column (Phenomenex Titank C18 Bulk 250*100 mm 10 u; mobile phase: [water (10 mM NH₄HCO₃)-ACN]; B %: 45%-65%, 20 min) to give Compound WV-NU-177 (8.1 g, 13.55 mmol, 36.82% yield) as a light yellow solid. ¹HNMR (400 MHz, DMSO-d6) δ=12.03 (s, 1H), 11.56 (s, 1H), 7.89-7.86 (m, 1H), 7.43-7.37 (m, 2H), 7.33-7.18 (m, 7H), 6.90-6.84 (m, 4H), 5.42 (d, J=5.0 Hz, 1H), 4.15-4.08 (m, 2H), 3.73 (d, J=0.8 Hz, 6H), 3.34 (s, 1H), 3.01-2.96 (m, 1H), 2.89 (dd, J=4.1, 9.4 Hz, 1H), 2.78 (quin, J=6.8 Hz, 1H), 1.11 (dd, J=2.6, 6.9 Hz, 6H); LCMS (M−H+): 597.26, LCMS purity: 97.82%.

### Synthesis of ((R)—N-(9-(3-(bis(4-methoxyphenyl)(phenyl)methoxy)-2-hydroxypropyl)-6-oxo-6,9-dihydro-1H-purin-2-yl)isobutyramide (WV-NU-178)

[chemical structure]

[3515] For 5 batches: To a solution of (R)-2-((bis(4-methoxyphenyl)(phenyl)methoxy)methyl)oxirane (14 g, 37.19 mmol, 1 eq) in DMF (100 mL) was added K₂CO₃ (2.06 g, 14.88 mmol, 0.4 eq.) and 2-methyl-N-(6-oxo-1,9-dihydropurin-2-yl) propanamide (8.23 g, 37.19 mmol, 1 eq.). The mixture was stirred at 85° C. for 12 hrs. The reaction mixture was quenched by addition water 500 mL at 15° C., and extracted with Ethyl acetate 1000 mL (500 mL*2). The combined organic phase was washed with brine (150 mL), dried over anhydrous Na₂SO₄, filtered and concentrated in vacuo. The residue was purified by pre-HPLC (column: Phenomenex Titank C18 Bulk 250*100 mm 10 u; mobile phase: [water (10 mM NH₄HCO₃)-ACN]; B %: 50%-70%, 20 min) to give compound WV-NU-178 (8 g, 13.39 mmol, 32.01% yield) as a white solid. ¹HNMR (CHLOROFORM-d, 400 MHz): δ=7.59 (s, 1H), 7.46 (d, J=7.8 Hz, 2H), 7.30-7.36 (m, 6H), 7.22-7.27 (m, 1H), 6.85 (d, J=8.8 Hz, 4H), 4.26 (br d, J=11.3 Hz, 2H), 4.10 (br dd, J=14.8, 8.3 Hz, 2H), 3.82 (s, 6H), 3.16-3.29 (m, 2H), 2.57-2.65 (m, 1H), 1.30 ppm (dd, J=6.8, 4.8 Hz, 6H). LCMS: M−H⁺: 596.6, LCMS purity 99.48%.

### Synthesis of (2R,3S,4R,5R)-2-(4-acetamido-2-oxopyrimidin-1(2H)-yl)-5-((bis(4-methoxyphenyl)(phenyl)methoxy)methyl)-4-hydroxytetrahydrofuran-3-yl acetate (WV-NU-207)

[chemical structure]

[3517] Step 1. To a solution of 4-amino-1-((2R,3S,4S,5R)-3,4-dihydroxy-5-(hydroxymethyl)tetrahydrofuran-2-yl)pyrimidin-2(1H)-one (96 g, 394.71 mmol, 1 eq.) in pyridine (460 mL) at 0° C. drops added chloro-[chloro(diisopropyl)silyl]oxy-diisopropyl-silane (136.95 g, 434.18 mmol, 138.90 mL, 1.1 eq.) in N₂. And 2 hr, the mixture was stirred at 0-20° C. for 10 hr. The reaction mixture was vacuum concentrated to obtain crude product. The residue was purified by column chromatography (SiO₂, Petroleum ether:Ethyl acetate=10:1 to 0:1) to give 4-amino-1-((6aR,8R,9S,9aS)-9-hydroxy-2,2,4,4-tetraisopropyltetrahydro-6H-furo[3,2-f][1,3,5,2,4]trioxadisilocin-8-yl)pyrimidin-2(1H)-one (170 g, 350.00 mmol, 88.67% yield) was obtained as a white solid. LCMS (M+H⁺): 486.3.

[3518] Step 2. To a solution of 4-amino-1-((6aR,8R,9S,9aS)-9-hydroxy-2,2,4,4-tetraisopropyltetrahydro-6H-furo[3,2-f][1,3,5,2,4]trioxadisilocin-8-yl)pyrimidin-2(1H)-one (170 g, 350.00 mmol, 1 eq.) in PYRIDINE (1700 mL) was added DMAP (85.52 g, 699.99 mmol, 2 eq.) and Ac₂O (142.92 g, 1.40 mol, 131.12 mL, 4 eq.). The mixture was stirred at 25° C. for 10 hr. The reaction mixture was diluted with water 1000 mL, and then separate and collect organic phases. The combined organic layers were dried over Na₂SO₄, filtered and concentrated under reduced pressure to give (6aR,8R,9S,9aR)-8-(4-acetamido-2-oxopyrimidin-1(2H)-yl)-2,2,4,4-tetraisopropyltetrahydro-6H-furo[3,2-f][1,3,5,2,4]trioxadisilocin-9-yl acetate (199 g, crude) as a yellow oil. LCMS (M+H⁺): 570.4.

[3519] Step 3. For three batches: To a solution of (6aR,8R,9S,9aR)-8-(4-acetamido-2-oxopyrimidin-1(2H)-yl)-2,2,4,4-tetraisopropyltetrahydro-6H-furo[3,2-f][1,3,5,2,4]trioxadisilocin-9-yl acetate (66.3 g, 116.36 mmol, 1 eq.) in THF (600 mL) was added TBAF (1 M, 174.54 mL, 1.5 eq.) and AcOH (6.99 g, 116.36 mmol, 6.66 mL, 1 eq.). The mixture was stirred at 20° C. for 2 hr. The reaction mixture was filtered and concentrated under reduced pressure to give a residue. The residue was purified by column chromatography (SiO₂, Ethyl acetate:MeOH=20:1 to 1:1). After concentration under reduced pressure, 1 L ethyl acetate was stirred for 10 min, filtered to obtain (2R,3S,4R,5R)-2-(4-acetamido-2-oxopyrimidin-1(2H)-yl)-4-hydroxy-5-(hydroxymethyl)tetrahydrofuran-3-yl acetate (64 g, 195.55 mmol, 64.00% yield) was obtained as a white solid. ¹HNMR (400 MHz, DMSO-d6) δ=10.89 (br s, 1H), 8.21 (d, J=7.5 Hz, 1H), 7.22 (d, J=7.5 Hz, 1H), 6.17 (d, J=4.8 Hz, 1H), 5.85 (br d, J=4.1 Hz, 1H), 5.26 (t, J=4.3 Hz, 1H), 5.12 (br s, 1H), 4.09 (br s, 2H), 3.87 (q, J=4.8 Hz, 1H), 3.63-3.57 (m, 1H), 3.16 (d, J=4.4 Hz, 2H), 2.10 (s, 3H), 1.85 (s, 3H); LCMS (M+H⁺): 328.2; purity: 73.59%.

[3520] Step 4. For two batches: To a solution of (2R,3S,4R,5R)-2-(4-acetamido-2-oxopyrimidin-1(2H)-yl)-4-hydroxy-5-(hydroxymethyl)tetrahydrofuran-3-yl acetate (26 g, 79.44 mmol, 1 eq.) in pyridine (500 mL) was added DMTCl (26.92 g, 79.44 mmol, 1 eq.). The mixture was stirred at 25° C. for 20 hr. The reaction mixture was filtered and concentrated under reduced pressure to give a residue which was purified by column chromatography (SiO₂, Ethyl acetate:MeOH=20:1 to 1:1, 5% TEA) to give WV-NU-207 (46.5 g, 73.85 mmol, 46.50% yield) as a yellow solid. ¹HNMR (400 MHz, DMSO-d6) δ=10.90 (s, 1H), 7.87 (d, J=7.5 Hz, 1H), 7.43-7.39 (m, 2H), 7.36-7.22 (m, 8H), 7.11 (d, J=7.5 Hz, 1H), 6.91 (dd, J=1.3, 8.8 Hz, 4H), 6.20 (d, J=4.8 Hz, 1H), 5.94 (d, J=4.6 Hz, 1H), 5.26-5.22 (m, 1H), 4.17-4.09 (m, 2H), 3.74 (s, 6H), 3.32-3.28 (m, 2H), 2.10 (s, 3H), 1.74 (s, 3H); LCMS (M−H⁺): 628.2; purity: 96.49%.

### Synthesis of N-(1-((2R,3R,4S)-4-(bis(4-methoxyphenyl)(phenyl)methoxy)-3-hydroxytetrahydrofuran-2-yl)-2-oxo-1,2-dihydropyrimidin-4-yl)acetamide (WV-NU-088)

[chemical structure]

[3522] Step 1. To a solution of (3R,4S)-2-acetoxy-4-((tert-butyldiphenylsilyl)oxy)tetrahydrofuran-3-yl benzoate (27.5 g, 54.49 mmol, 1 eq.) and N-(2-oxo-1H-pyrimidin-4-yl)acetamide (8.76 g, 57.22 mmol, 1.05 eq.) in MeCN (140 mL) was added BSA (23.28 g, 114.44 mmol, 28.29 mL, 2.1 eq.), and the mixture was stirred for 30 min at 60° C. TMSOTf (19.38 g, 87.19 mmol, 15.76 mL, 1.6 eq.) was added dropwise, and stirring was continued for another 2 h at 60° C. The mixture was cooled to r.t, diluted with 100 mL of EtOAc, and poured into 200 mL of cold sat. aq. NaHCO₃ solution with stirring, and the mixture was extracted with DCM (500 mL*2). The organic layer was separated and washed with H₂O (100 mL) and brine (100 mL), dried over MgSO₄, and concentrated under reduced pressure to get (2R,3R,4S)-2-(4-acetamido-2-oxopyrimidin-1(2H)-yl)-4-((tert-butyldiphenylsilyl)oxy)tetrahydrofuran-3-yl benzoate (30 g, crude) as a yellow solid. The mixture was used directly without further purification. LCMS: (M+H⁺): 598.3.

[3523] Step 2. To a solution of (2R,3R,4S)-2-(4-acetamido-2-oxopyrimidin-1(2H)-yl)-4-((tert-butyldiphenylsilyl)oxy)tetrahydrofuran-3-yl benzoate (30 g, 50.19 mmol, 1 eq.) in THF (240 mL) was added TBAF (1 M, 75.28 mL, 1.5 eq.). The mixture was stirred at 0° C. for 1 hr. TLC (Ethyl acetate/Petroleum ether=2:1, R_{f}=0.25) showed one main spot. The solvent was evaporated under reduced pressure, and the residue was dissolved in 600 mL of EtOAc. The organic layer was separated and washed with H₂O (100 mL*2) and brine (100 mL), dried over MgSO₄, and concentrated under reduced pressure to give a crude. The residue was purified by column chromatography (SiO₂, Petroleum ether/Ethyl acetate=5/1 to 1/2) to get (2R,3R,4S)-2-(4-acetamido-2-oxopyrimidin-1(2H)-yl)-4-hydroxytetrahydrofuran-3-yl benzoate (12 g, 33.40 mmol, 66.54% yield) as a yellow solid.

[3524] Step 3: A mixture of (2R,3R,4S)-2-(4-acetamido-2-oxopyrimidin-1(2H)-yl)-4-hydroxytetrahydrofuran-3-yl benzoate (11 g, 30.61 mmol, 1 eq.), DMTCl (15.56 g, 45.92 mmol, 1.5 eq.), DMAP (373.98 mg, 3.06 mmol, 0.1 eq.) was co-evaporated twice with 20 mL of anhydrous pyridine. The mixture was dissolved in anhydrous pyridine (80 mL) and stirred under argon at 80° C. for 16 h. The mixture was concentrated to get the crude. The residue was purified by silica gel chromatography (Petroleum ether/Ethyl acetate=10/1, 3/1, 5% TEA) to get (2R,3R,4S)-2-(4-acetamido-2-oxopyrimidin-1(2H)-yl)-4-(bis(4-methoxyphenyl)(phenyl)methoxy)tetrahydrofuran-3-yl benzoate (18.5 g, crude) as white solid. LCMS: (M−H⁺): 660.2.

[3525] Step 4. To a solution of (2R,3R,4S)-2-(4-acetamido-2-oxopyrimidin-1(2H)-yl)-4-(bis(4-methoxyphenyl)(phenyl)methoxy)tetrahydrofuran-3-yl benzoate (18.5 g, 27.96 mmol, 1 eq.) in the mixture of MeOH (180 mL), LiOH·H₂O (1.41 g, 33.55 mmol, 1.2 eq.) was added at 0° C. Water (500 mL) was added, and then concentrated under reduced pressure to remove the organic solvent. The water phase was extracted with EtOAc (250 mL*3), dried over Na₂SO₄, filtered and concentrated under reduced pressure to give 4-amino-1-((2R,3R,4S)-4-(bis(4-methoxyphenyl)(phenyl)methoxy)-3-hydroxytetrahydrofuran-2-yl)pyrimidin-2(1H)-one (14.4 g, crude) as a yellow solid.

[3526] Step 5. To a solution of 4-amino-1-((2R,3R,4S)-4-(bis(4-methoxyphenyl)(phenyl)methoxy)-3-hydroxytetrahydrofuran-2-yl)pyrimidin-2(1H)-one (14.4 g, 27.93 mmol, 1 eq.) in DMF (100 mL) was added Ac₂O (3.14 g, 30.72 mmol, 2.88 mL, 1.1 eq.), the mixture was stirred at 20° C. for 12 hr. Water (500 mL) was added and extracted with EtOAc (500 mL*2) and the organic was dried over Na₂SO₄, filtered and concentrated to get the crude. The mixture was purified by silica gel chromatography (DCM/Ethyl acetate=20/1, 1/1, Ethyl acetate:Methanol=20:1, 5% TEA) to get the compound WV-NU-088 (8.3 g, 14.45 mmol, 51.73% yield, 97.07% purity) as a white solid. ¹HNMR (400 MHz, CHLOROFORM-d) δ=9.23 (br s, 1H), 8.04 (d, J=7.5 Hz, 1H), 7.54 (d, J=7.4 Hz, 1H), 7.38-7.33 (m, 2H), 7.31-7.18 (m, 8H), 6.86-6.78 (m, 4H), 4.34-4.24 (m, 3H), 3.80 (d, J=2.4 Hz, 6H), 3.69 (dd, J=4.4, 9.9 Hz, 1H), 3.39 (dd, J=2.3, 9.8 Hz, 1H), 2.34 (s, 3H), 2.00 (s, 1H); LCMS purity: 97.07%, 556.2 (M−H)⁻.

### Synthesis of 1-((2R,4S,5R)-5-((bis(4-methoxyphenyl)(phenyl)methoxy)methyl)-4-(((1S,3S,3aS)-3-((phenylsulfonyl)methyl)tetrahydro-1H,3H-pyrrolo[1,2-c][1,3,2]oxazaphosphol-1-yl)oxy)tetrahydrofuran-2-yl)-1,3-dihydro-2H-imidazol-2-one

[chemical structure]

[3528] To a solution of dry 3-[(2R,4R,5R)-5-[[bis(4-methoxyphenyl)-phenyl-methoxy]methyl]-4-hydroxy-tetrahydrofuran-2-yl]-1H-imidazol-2-one (4.0 g, 7.96 mmol) in THF (40 mL) was added triethylamine (4.99 mL, 35.82 mmol). Cooled to 0° C. (3S,3aS)-3-(benzenesulfonylmethyl)-1-chloro-3a,4,5,6-tetrahydro-3H-pyrrolo[1,2-c][1,3,2]oxazaphosphole (0.90M in THF, 13.27 mL, 11.94 mmol) was added dropwise. The resulting slurry was stirred at 0° C. for 2.5 hr then at rt for 1.5 hr. The reaction was quenched by water (72 μL). Anhydrous MgSO₄ (960 mg) was added. The mixture was filtered through celite, and the filtrate was concentrated to afford the crude product as an off-white foam. The crude product was purified by normal phase column chromatography applying 0-100% MeCN in EtOAc (each mobile phase contained 2.5% triethylamine) as the gradient to afford the title compound as a white foam (2.389 g, 38.2% yield). ¹H NMR (600 MHz, CDCl₃) δ 9.68 (s, 1H), 7.90-7.86 (m, 2H), 7.62-7.56 (m, 1H), 7.50 (t, J=7.8 Hz, 2H), 7.45-7.41 (m, 2H), 7.31 (dd, J=8.7, 5.5 Hz, 4H), 7.28 (t, J=7.5 Hz, 2H), 7.21 (t, J=7.4 Hz, 1H), 6.83 (d, J=8.5 Hz, 4H), 6.34 (t, J=2.6 Hz, 1H), 6.21 (t, J=2.7 Hz, 1H), 6.07 (t, J=7.0 Hz, 1H), 4.92 (q, J=6.1 Hz, 1H), 4.75 (dq, J=8.8, 3.8, 3.4 Hz, 1H), 3.96 (q, J=3.4 Hz, 1H), 3.78 (s, 6H), 3.58 (dq, J=11.8, 6.0 Hz, 1H), 3.51-3.41 (m, 2H), 3.35 (dd, J=14.6, 5.3 Hz, 1H), 3.31 (dd, J=10.3, 3.9 Hz, 1H), 3.18 (dd, J=10.3, 3.7 Hz, 1H), 3.09 (qd, J=10.1, 3.9 Hz, 1H), 2.31 (dd, J=7.0, 4.4 Hz, 2H), 1.87 (dh, J=12.6, 4.7, 3.7 Hz, 1H), 1.81-1.71 (m, 1H), 1.65-1.62 (m, 1H), 1.15-1.05 (m, 1H); ³¹P NMR (243 MHz, CDCl₃) δ 152.36; MS (ESI), 784.77 [M−H]⁻.

### Synthesis of N-(1-((2R,3R,4R,5R)-5-((bis(4-methoxyphenyl)(phenyl)methoxy)methyl)-4-((tert-butyldimethylsilyl)oxy)-3-(((1S,3S,3aS)-3-((phenylsulfonyl)methyl)tetrahydro-1H,3H-pyrrolo[1,2-c][1,3,2]oxazaphosphol-1-yl)oxy)tetrahydrofuran-2-yl)-2-oxo-1,2-dihydropyrimidin-4-yl)benzamide

[chemical structure]

[3530] To a solution of dry N-[1-[(2R,3S,5R)-5-[[bis(4-methoxyphenyl)-phenyl-methoxy]methyl]-4-[tert-butyl(dimethyl)silyl]oxy-3-hydroxy-tetrahydrofuran-2-yl]-2-oxo-pyrimidin-4-yl]benzamide (10.0 g, 13.09 mmol) in THF (100 mL) was added triethylamine (9.85 mL, 70.69 mmol). (3S,3aS)-3-(benzenesulfonylmethyl)-1-chloro-3a,4,5,6-tetrahydro-3H-pyrrolo[1,2-c][1,3,2]oxazaphosphole (0.90M in THF, 26.18 mL, 23.56 mmol) was added dropwise. The resulting slurry was stirred at rt for 2.5 hr. TLC and LCMS showed the reaction was complete. The reaction was quenched by water (234 μL). Anhydrous MgSO₄ (3.12 g) was added. The mixture was filtered through celite, and the filtrate was concentrated to afford the crude product as an off-white foam. The crude product was purified by normal phase column chromatography applying 20-70% EtOAc in hexane (each mobile phase contained 5% triethylamine) as the gradient to afford the title compound as an off-white foam (9.95 g, 72.6% yield). ¹H NMR (600 MHz, CDCl₃) δ 8.57 (bs, 2H), 7.99-7.95 (m, 2H), 7.91-7.82 (m, 2H), 7.64-7.58 (m, 2H), 7.52 (dt, J=15.0, 7.6 Hz, 4H), 7.41 (d, J=7.4 Hz, 2H), 7.34 (t, J=7.5 Hz, 2H), 7.30 (dd, J=8.8, 3.2 Hz, 5H), 6.88 (d, J=8.5 Hz, 4H), 5.93 (d, J=1.6 Hz, 1H), 5.14 (q, J=6.3 Hz, 1H), 4.51-4.45 (m, 1H), 4.20 (dd, J=8.0, 4.3 Hz, 1H), 4.15 (dd, J=6.7, 4.2 Hz, 1H), 3.83 (s, 6H), 3.79-3.69 (m, 3H), 3.59-3.54 (m, 1H), 3.51 (dd, J=14.7, 6.9 Hz, 1H), 3.43-3.39 (m, 1H), 3.35 (dd, J=11.0, 2.6 Hz, 1H), 3.20 (qd, J=9.4, 4.1 Hz, 1H), 1.82 (tt, J=8.3, 4.3 Hz, 1H), 1.79-1.74 (m, 1H), 1.65 (ddt, J=12.2, 6.1, 3.0 Hz, 1H), 1.18-1.11 (m, 1H), 0.75 (s, 9H), −0.03 (s, 3H), −0.12 (s, 3H); ³¹P NMR (243 MHz, CDCl₃) δ 155.49; MS (ESI), 1045.67 [M−H]⁻.

### Synthesis of 1-(1-((2R,4S,5R)-5-((bis(4-methoxyphenyl)(phenyl)methoxy)methyl)-4-(((1S,3S,3aS)-3-((methyldiphenylsilyl)methyl)tetrahydro-1H,3H-pyrrolo[1,2-c][1,3,2]oxazaphosphol-1-yl)oxy)tetrahydrofuran-2-yl)-2-oxo-1,2-dihydropyrimidin-4-yl)-3-phenylurea

[chemical structure]

[3532] To a solution of dry 1-[1-[(2R,4R,5R)-5-[[bis(4-methoxyphenyl)-phenyl-methoxy]methyl]-4-hydroxy-tetrahydrofuran-2-yl]-2-oxo-pyrimidin-4-yl]-3-phenyl-urea (10.0 g, 15.42 mmol) in THF (100 mL) was added triethylamine (11.6 mL, 83.24 mmol). [(3S,3aS)-1-chloro-3a,4,5,6-tetrahydro-3H-pyrrolo[1,2-c][1,3,2]oxazaphosphol-3-yl]methyl-methyl-diphenyl-silane (0.9574M in THF, 28.98 mL, 27.75 mmol) was added dropwise. The resulting off-white slurry was stirred at rt for 3.5 hr. TLC and LCMS showed the reaction was complete. The reaction was quenched by water (277 μL). Anhydrous MgSO₄ (3.7 g) was added. The mixture was filtered through celite, and the filtrate was concentrated to afford the crude product as an off-white foam. The crude product was purified by normal phase column chromatography applying 20-100% EtOAc in hexane (each mobile phase contained 2.5% triethylamine) as the gradient to afford the title compound as an off-white foam (9.18 g, 60.3% yield). ¹H NMR (600 MHz, CDCl₃) δ 11.38 (s, 1H), 11.05 (s, 1H), 8.10 (d, J=7.7 Hz, 1H), 7.68 (d, J=8.0 Hz, 2H), 7.45 (t, J=7.4 Hz, 4H), 7.36 (t, J=8.6 Hz, 3H), 7.30 (m, 9H), 7.26-7.21 (m, 6H), 7.04 (t, J=7.4 Hz, 1H), 6.84 (d, J=8.4 Hz, 4H), 6.28 (t, J=6.3 Hz, 1H), 4.78-4.68 (m, 2H), 3.93 (q, J=3.3 Hz, 1H), 3.77 (s, 6H), 3.52 (ddt, J=15.1, 10.5, 7.6 Hz, 1H), 3.32 (qd, J=10.6, 2.9 Hz, 3H), 3.08 (dt, J=10.8, 6.8 Hz, 1H), 2.60 (ddd, J=14.1, 6.3, 4.0 Hz, 1H), 2.05 (m, 1H), 1.84 (dh, J=12.7, 4.7, 3.9 Hz, 1H), 1.70-1.62 (m, 1H), 1.56-1.52 (m, 1H), 1.40 (dq, J=15.8, 7.2, 6.7 Hz, 2H), 1.23-1.18 (m, 1H), 0.58 (s, 3H); ³¹P NMR (243 MHz, CDCl₃) δ 153.22; MS (ESI), 986.91 [M−H]⁻.

### Synthesis of 1-(1-((2R,4S,5R)-5-((bis(4-methoxyphenyl)(phenyl)methoxy)methyl)-4-(((1S,3S,3aS)-3-((methyldiphenylsilyl)methyl)tetrahydro-1H,3H-pyrrolo[1,2-c][1,3,2]oxazaphosphol-1-yl)oxy)tetrahydrofuran-2-yl)-2-oxo-1,2-dihydropyrimidin-4-yl)-3-(naphthalen-2-yl)urea

[chemical structure]

[3534] To a solution of dry 1-[1-[(2R,4R,5R)-5-[[bis(4-methoxyphenyl)-phenyl-methoxy]methyl]-4-hydroxy-tetrahydrofuran-2-yl]-2-oxo-pyrimidin-4-yl]-3-(2-naphthyl)urea (15.0 g, 21.47 mmol) in THF (150 mL) was added triethylamine (16.16 mL, 115.92 mmol). [(3S,3aS)-1-chloro-3a,4,5,6-tetrahydro-3H-pyrrolo[1,2-c][1,3,2]oxazaphosphol-3-yl]methyl-methyl-diphenyl-silane (0.9574M in THF, 40.36 mL, 38.64 mmol) was added dropwise. The resulting off-white slurry was stirred at rt for 3.5 hr. TLC and LCMS showed the reaction was complete. The reaction was quenched by water (386 μL). Anhydrous MgSO₄ (5.15 g) was added. The mixture was filtered through celite, and the filtrate was concentrated to afford the crude product as an off-white foam. The crude product was purified by normal phase column chromatography applying 10-60% EtOAc in hexane (each mobile phase contained 50% triethylamine) as the gradient to afford the title compound as an off-white foam (15.91 g, 71.4% yield). ¹H NMR (600 MHz, DMSO) δ 12.56 (s, 1H), 10.56 (s, 1H), 8.48-8.43 (m, 1H), 8.28 (d, J=7.6 Hz, 1H), 8.02 (d, J=7.4 Hz, 1H), 7.99-7.94 (m, 1H), 7.70 (d, J=8.2 Hz, 1H), 7.62-7.56 (m, 2H), 7.54-7.45 (m, 5H), 7.39-7.27 (m, 8H), 7.27-7.20 (m, 8H), 6.88 (dd, J=8.5, 5.7 Hz, 4H), 6.17 (d, J=6.7 Hz, 1H), 6.09 (t, J=6.4 Hz, 1H), 4.68-4.63 (m, 1H), 4.63-4.57 (m, 1H), 3.84 (q, J=4.0 Hz, 1H), 3.73 (s, 3H), 3.72 (s, 3H), 3.38 (ddt, J=14.8, 10.2, 7.5 Hz, 1H), 3.30 (m, 1H), 3.23 (dd, J=10.8, 3.4 Hz, 1H), 3.19 (dd, J=10.7, 4.4 Hz, 1H), 2.81 (qd, J=10.6, 4.3 Hz, 1H), 2.24-2.17 (m, 1H), 1.88 (dt, J=13.5, 6.6 Hz, 1H), 1.77 (dq, J=12.9, 4.5 Hz, 1H), 1.64-1.56 (m, 1H), 1.51 (dd, J=14.8, 5.3 Hz, 1H), 1.45 (dt, J=11.3, 8.0 Hz, 2H), 0.59 (s, 3H); ³¹P NMR (243 MHz, DMSO) δ 146.05; MS (ESI), 1036.85 [M−H]⁻.

### Synthesis of N-(1-((2R,3R,4S)-4-(bis(4-methoxyphenyl)(phenyl)methoxy)-3-(((1S,3S,3aS)-3-((methyldiphenylsilyl)methyl)tetrahydro-1H,3H-pyrrolo[1,2-c][1,3,2]oxazaphosphol-1-yl)oxy)tetrahydrofuran-2-yl)-2-oxo-1,2-dihydropyrimidin-4-yl)acetamide

[chemical structure]

[3536] To a solution of dry N-[1-[(2R,4R)-4-[bis(4-methoxyphenyl)-phenyl-methoxy]-3-hydroxy-tetrahydrofuran-2-yl]-2-oxo-pyrimidin-4-yl]acetamide (4.0 g, 7.17 mmol) in THF (40 mL) was added triethylamine (5.4 mL, 38.74 mmol). [(3S,3aS)-1-chloro-3a,4,5,6-tetrahydro-3H-pyrrolo[1,2-c][1,3,2]oxazaphosphol-3-yl]methyl-methyl-diphenyl-silane (0.9574M in THF, 13.49 mL, 12.91 mmol) was added dropwise. The reaction slurry was stirred at rt for 3 hr. TLC and LCMS showed the reaction was complete. The reaction was quenched by water (129 μL). Anhydrous MgSO₄ (1.72 g) was added. The mixture was filtered through celite, and the filtrate was concentrated to afford the crude product as an off-white foam. The crude product was purified by normal phase column chromatography applying 20-70% EtOAc in hexane (each mobile phase contained 2.5% triethylamine) as the gradient to afford the title compound as a white foam (4.4 g, 68.4% yield). ¹H NMR (600 MHz, CDCl₃) δ 9.18 (s, 1H), 7.95 (d, J=7.5 Hz, 1H), 7.51-7.45 (m, 4H), 7.43-7.37 (m, 3H), 7.35 (q, J=6.8 Hz, 3H), 7.32-7.28 (m, 3H), 7.26 (d, J=4.3 Hz, 3H), 7.21 (p, J=4.2 Hz, 1H), 7.18 (dd, J=8.7, 4.3 Hz, 4H), 6.80 (t, J=8.7 Hz, 4H), 5.65 (s, 1H), 4.76 (q, J=6.8 Hz, 1H), 4.39 (d, J=8.2 Hz, 1H), 4.09 (d, J=3.6 Hz, 1H), 3.79-3.75 (m, 1H), 3.76 (s, 3H), 3.75 (s, 3H), 3.61 (ddt, J=14.9, 10.4, 7.6 Hz, 1H), 3.42 (d, J=9.9 Hz, 1H), 3.36 (ddd, J=13.3, 10.2, 5.8 Hz, 1H), 3.21 (dt, J=11.0, 6.9 Hz, 1H), 2.29 (s, 3H), 1.83 (dp, J=12.7, 4.7 Hz, 1H), 1.69-1.61 (m, 1H), 1.53 (dd, J=14.6, 7.9 Hz, 1H), 1.41 (dd, J=14.6, 7.0 Hz, 1H), 1.38-1.32 (m, 1H), 1.21 (p, J=10.2 Hz, 1H), 0.53 (s, 3H); ³¹P NMR (243 MHz, CDCl₃) δ 158.33; MS (ESI), 895.65 [M−H]⁻.

### Synthesis of N-(9-((2R,4S,5R)-5-((bis(4-methoxyphenyl)(phenyl)methoxy)methyl)-4-(((1S,3S,3aS)-3-((phenylsulfonyl)methyl)tetrahydro-1H,3H-pyrrolo[1,2-c][1,3,2]oxazaphosphol-1-yl)oxy)tetrahydrofuran-2-yl)-8-oxo-8,9-dihydro-7H-purin-6-yl)-2-phenoxyacetamide

[chemical structure]

[3538] To a solution of dry N-[9-[(2R,4R,5R)-5-[[bis(4-methoxyphenyl)-phenyl-methoxy]methyl]-4-hydroxy-tetrahydrofuran-2-yl]-8-oxo-7H-purin-6-yl]-2-phenoxy-acetamide (7.5 g, 10.66 mmol) in THF (37.5 mL) was added triethylamine (3.71 mL, 26.64 mmol). The rxn flask was set in a water bath. (3S,3aS)-3-(benzenesulfonylmethyl)-1-chloro-3a,4,5,6-tetrahydro-3H-pyrrolo[1,2-c][1,3,2]oxazaphosphole (0.90M in THF, 21.31 mL, 19.18 mmol) was added dropwise. The water bath was removed. The off-white slurry was stirred at rt for 3 hr. TLC and LCMS showed the reaction was complete. The reaction was quenched by water (153 μL). Anhydrous MgSO₄ (2.04 g) was added. The mixture was filtered through celite, and the filtrate was concentrated to afford the crude product as an off-white foam. The crude product was purified by normal phase column chromatography applying 30-100% EtOAc in hexane (each mobile phase contained 1% triethylamine) as the gradient to afford the title compound as a white foam (8.35 g, 79.4% yield). ¹H NMR (600 MHz, CDCl₃) δ 9.35 (s, 1H), 8.95 (s, 1H), 8.24 (d, J=1.5 Hz, 1H), 7.90 (d, J=7.7 Hz, 2H), 7.59 (t, J=7.5 Hz, 1H), 7.51 (t, J=7.9 Hz, 2H), 7.42 (d, J=7.8 Hz, 2H), 7.39-7.34 (m, 2H), 7.33-7.28 (m, 4H), 7.21 (t, J=7.5 Hz, 2H), 7.16 (t, J=7.3 Hz, 1H), 7.09 (t, J=7.4 Hz, 1H), 7.00 (d, J=8.1 Hz, 2H), 6.75 (dd, J=8.8, 7.0 Hz, 4H), 6.38 (t, J=6.8 Hz, 1H), 5.09 (h, J=6.2, 5.4 Hz, 2H), 4.67 (s, 2H), 4.06 (q, J=5.1 Hz, 1H), 3.763 (s, 3H), 3.756 (s, 3H), 3.69 (dq, J=11.7, 6.1 Hz, 1H), 3.47 (dt, J=14.7, 8.1 Hz, 2H), 3.37 (dd, J=10.1, 5.1 Hz, 2H), 3.28 (ddd, J=23.8, 11.7, 6.1 Hz, 2H), 3.03 (tt, J=9.8, 5.1 Hz, 1H), 2.30 (dq, J=12.6, 6.3, 5.3 Hz, 1H), 1.88 (ddt, J=13.0, 9.3, 5.1 Hz, 1H), 1.77 (q, J=10.8, 10.0 Hz, 1H), 1.66 (dt, J=12.7, 6.4 Hz, 1H), 1.12 (p, J=10.0 Hz, 1H); ³¹P NMR (243 MHz, CDCl₃) δ 149.94; MS (ESI), 985.68 [M−H]⁻.

### Synthesis of 3-((2S,4S,5R)-5-((bis(4-methoxyphenyl)(phenyl)methoxy)methyl)-4-(((1S,3S,3aS)-3-((phenylsulfonyl)methyl)tetrahydro-1H,3H-pyrrolo[1,2-c][1,3,2]oxazaphosphol-1-yl)oxy)tetrahydrofuran-2-yl)pyrimidine-2,4(1H,3H)-dione

[chemical structure]

[3540] To a solution of dry 3-[(2S,4R,5R)-5-[[bis(4-methoxyphenyl)-phenyl-methoxy]methyl]-4-hydroxy-tetrahydrofuran-2-yl]-1H-pyrimidine-2,4-dione (3.0 g, 5.65 mmol) in THF (22.5 mL) was added triethylamine (1.97 mL, 14.14 mmol). (3S,3aS)-3-(benzenesulfonylmethyl)-1-chloro-3a,4,5,6-tetrahydro-3H-pyrrolo[1,2-c][1,3,2]oxazaphosphole) (0.90M in THF, 11.31 mL, 10.18 mmol) was added dropwise. The cloudy reaction solution was stirred at rt for 1 hr. TLC and LCMS showed the reaction was complete. The reaction was quenched by water (81 μL). Anhydrous MgSO₄ (1.08 g) was added. The mixture was filtered through celite, and the filtrate was concentrated to afford the crude product as an off-white foam. The crude product was purified by normal phase column chromatography applying 50-100% EtOAc in hexane (each mobile phase contained 1% triethylamine) as the gradient to afford the title compound as a white foam (3.48 g, 75.6% yield). ¹H NMR (600 MHz, CDCl₃) δ 9.51 (s, 1H), 7.90-7.85 (m, 2H), 7.62-7.57 (m, 1H), 7.55-7.47 (m, 2H), 7.47-7.40 (m, 2H), 7.37-7.32 (m, 4H), 7.29-7.24 (m, 2H), 7.21-7.16 (m, 1H), 7.13 (d, J=7.7 Hz, 1H), 6.86-6.78 (m, 4H), 6.75 (t, J=7.7 Hz, 1H), 5.68 (d, J=7.7 Hz, 1H), 4.94 (q, J=6.1 Hz, 1H), 4.75 (p, J=8.4 Hz, 1H), 4.44 (ddd, J=7.5, 3.9, 2.3 Hz, 1H), 3.767 (s, 3H), 3.765 (s, 3H), 3.59 (dq, J=10.0, 5.9 Hz, 1H), 3.44-3.26 (m, 4H), 3.04-3.00 (m, 1H), 3.00-2.93 (m, 1H), 2.83 (dt, J=12.4, 8.2 Hz, 1H), 2.53 (dt, J=12.5, 7.9 Hz, 1H), 1.82 (s, 1H), 1.72 (d, J=10.6 Hz, 1H), 1.65-1.55 (m, 1H), 1.06 (dq, J=11.6, 9.9 Hz, 1H); ³¹P NMR (243 MHz, CDCl₃) δ 150.88; MS (ESI), 812.53 [M−H]⁻.

### Synthesis of N-(5-((2R,4S,5R)-5-((bis(4-methoxyphenyl)(phenyl)methoxy)methyl)-4-(((1S,3S,3aS)-3-((phenylsulfonyl)methyl)tetrahydro-1H,3H-pyrrolo[1,2-c][1,3,2]oxazaphosphol-1-yl)oxy)tetrahydrofuran-2-yl)-6-oxo-1,6-dihydropyrimidin-2-yl)acetamide

[chemical structure]

[3542] To a solution of dry N-[5-[(2R,4R,5R)-5-[[bis(4-methoxyphenyl)-phenyl-methoxy]methyl]-4-hydroxy-tetrahydrofuran-2-yl]-6-oxo-1H-pyrimidin-2-yl]acetamide (7.0 g, 12.25 mmol) in THF (35 mL) was added triethylamine (4.27 mL, 30.61 mmol). The rxn flask was set in a water bath. (3S,3aS)-3-(benzenesulfonylmethyl)-1-chloro-3a,4,5,6-tetrahydro-3H-pyrrolo[1,2-c][1,3,2]oxazaphosphole (0.90 M in THF, 24.49 mL, 22.04 mmol) was added dropwise. The water bath was removed. The white slurry was stirred at rt for 2 hr. TLC and LCMS showed the reaction was complete. The reaction was quenched by water (176 μL). Anhydrous MgSO₄ (2.35 g) was added. The mixture was filtered through celite, and the filtrate was concentrated to afford the crude product as an off-white foam. The crude product was purified by normal phase column chromatography applying 0-60% EtOAc in MeCN (each mobile phase contained 1% triethylamine) as the gradient to afford the title compound as a white foam (8.22 g, 78.5% yield). ¹H NMR (600 MHz, DMSO) δ 11.56 (s, 2H), 7.90-7.86 (m, 2H), 7.86-7.81 (m, 1H), 7.67-7.61 (m, 1H), 7.55 (t, J=7.8 Hz, 2H), 7.42-7.37 (m, 2H), 7.31 (t, J=7.7 Hz, 2H), 7.28-7.24 (m, 4H), 7.24-7.21 (m, 1H), 6.91-6.85 (m, 4H), 4.87 (m, 1H), 4.82 (ddd, J=9.1, 5.9, 3.1 Hz, 1H), 4.59 (m, 1H), 3.85 (td, J=4.5, 2.4 Hz, 1H), 3.77 (dd, J=15.0, 3.1 Hz, 1H), 3.74 (s, 6H), 3.72-3.68 (m, 1H), 3.44 (dq, J=11.8, 6.1 Hz, 1H), 3.38-3.29 (m, 1H), 3.13 (dd, J=10.1, 4.3 Hz, 1H), 3.04 (dd, J=10.2, 4.7 Hz, 1H), 2.85-2.76 (m, 1H), 2.28-2.22 (m, 1H), 2.15 (s, 3H), 1.76 (dt, J=12.1, 4.6 Hz, 2H), 1.61 (td, J=13.5, 11.2, 6.2 Hz, 1H), 1.56-1.50 (m, 1H), 1.10 (dq, J=11.7, 9.5 Hz, 1H); ³¹P NMR (243 MHz, DMSO) δ 146.56; MS (ESI), 853.57 [M−H]⁻.

### Synthesis of 3-((2R,4S,5R)-5-((bis(4-methoxyphenyl)(phenyl)methoxy)methyl)-4-(((1S,3S,3aS)-3-((phenylsulfonyl)methyl)tetrahydro-1H,3H-pyrrolo[1,2-c][1,3,2]oxazaphosphol-1-yl)oxy)tetrahydrofuran-2-yl)pyrimidine-2,4(1H,3H)-dione

[chemical structure]

[3544] To a solution of dry 3-[(2R,4R,5R)-5-[[bis(4-methoxyphenyl)-phenyl-methoxy]methyl]-4-hydroxy-tetrahydrofuran-2-yl]-1H-pyrimidine-2,4-dione (29.8 g, 56.17 mmol) in THF (200 mL) was added triethylamine (19.57 mL, 140.42 mmol). The rxn flask was set in a water bath. (3S,3aS)-3-(benzenesulfonylmethyl)-1-chloro-3a,4,5,6-tetrahydro-3H-pyrrolo[1,2-c][1,3,2]oxazaphosphole (0.89M in THF, 113.59 mL, 101.1 mmol) was added dropwise. The water bath was removed. The cloudy reaction solution was stirred at rt for 2.5 hr. TLC and LCMS showed the reaction was complete. The reaction was quenched by water (794 μL). Anhydrous MgSO₄ (10.6 g) was added. The mixture was filtered through celite, and the filtrate was concentrated to afford the crude product as an off-white foam. The crude product was purified by normal phase column chromatography applying 50-100% EtOAc in hexanes (each mobile phase contained 1% triethylamine) as the gradient to afford the title compound as a white foam (40.4 g, 88.4% yield). ¹H NMR (600 MHz, CDCl₃) δ 9.28 (bs, 1H), 7.87 (dd, J=8.3, 1.4 Hz, 2H), 7.63-7.57 (m, 1H), 7.53-7.44 (m, 4H), 7.37-7.33 (m, 4H), 7.23 (t, J=7.8 Hz, 2H), 7.19-7.13 (m, 1H), 6.81-6.75 (m, 4H), 6.70 (dd, J=8.4, 5.1 Hz, 1H), 6.64 (d, J=7.7 Hz, 1H), 5.53 (d, J=7.7 Hz, 1H), 4.96 (q, J=6.1 Hz, 1H), 4.87 (dq, J=12.8, 5.6 Hz, 1H), 3.93 (td, J=5.9, 3.9 Hz, 1H), 3.752 (s, 3H), 3.749 (s, 3H), 3.62 (dq, J=11.7, 6.0 Hz, 1H), 3.44-3.25 (m, 5H), 2.94 (qd, J=10.0, 4.0 Hz, 1H), 2.85 (ddd, J=13.2, 8.0, 5.2 Hz, 1H), 2.23 (ddd, J=13.6, 8.6, 5.5 Hz, 1H), 1.85-1.79 (m, 1H), 1.76-1.69 (m, 1H), 1.65-1.59 (m, 1H), 1.12-1.02 (m, 1H); ³¹P NMR (243 MHz, CDCl₃) δ 149.14; MS (ESI), 812.53 [M−H]⁻.

### Synthesis of N-((3aR,5R,6R,6aS)-5-((bis(4-methoxyphenyl)(phenyl)methoxy)methyl)-6-(((1S,3S,3aS)-3-((phenylsulfonyl)methyl)tetrahydro-1H,3H-pyrrolo[1,2-c][1,3,2]oxazaphosphol-1-yl)oxy)-3a,5,6,6a-tetrahydrofuro[2,3-d]oxazol-2-yl)acetamide

[chemical structure]

[3546] To a solution of dry N-[(3aR,5R,6aR)-5-[[bis(4-methoxyphenyl)-phenyl-methoxy]methyl]-6-hydroxy-3a,5,6,6a-tetrahydrofuro[2,3-d]oxazol-2-yl]acetamide (4.87 g, 9.38 mmol) in THF (36 mL) was added triethylamine (3.27 mL, 23.45 mmol). The rxn flask was set in a water bath. (3S,3aS)-3-(benzenesulfonylmethyl)-1-chloro-3a,4,5,6-tetrahydro-3H-pyrrolo[1,2-c][1,3,2]oxazaphosphole (0.89M in THF, 18.97 mL, 16.89 mmol) was added dropwise. The water bath was removed. The resulting cloudy solution was stirred at rt for 1.5 hr. TLC and LCMS showed the reaction was complete. The reaction was quenched by water (135 μL). Anhydrous MgSO₄ (1.8 g) was added. The mixture was filtered through celite, and the filtrate was concentrated to afford the crude product as an off-white foam. The crude product was purified by normal phase column chromatography applying 25-100% EtOAc in hexanes (each mobile phase contained 1% triethylamine) as the gradient to afford the title compound as a white foam (5.75 g, 76.4% yield). ¹H NMR (600 MHz, CDCl₃) δ 9.55 (s, 1H), 7.93 (dt, J=7.3, 1.3 Hz, 2H), 7.61 (t, J=7.6 Hz, 1H), 7.52 (t, J=7.8 Hz, 2H), 7.41-7.37 (m, 2H), 7.30-7.26 (m, 5H), 7.25 (s, 1H), 7.22-7.16 (m, 1H), 6.84-6.78 (m, 4H), 5.92 (s, 1H), 5.09 (s, 1H), 4.91 (d, J=5.6 Hz, 1H), 4.82-4.77 (m, 1H), 4.20 (s, 1H), 3.78 (s, 6H), 3.69 (dd, J=10.0, 5.7 Hz, 1H), 3.53 (dd, J=15.5, 5.8 Hz, 1H), 3.47 (dd, J=14.5, 7.3 Hz, 1H), 3.37 (dd, J=14.6, 5.0 Hz, 1H), 3.18 (dd, J=10.0, 6.2 Hz, 1H), 3.13 (s, 1H), 2.93 (dd, J=10.0, 6.8 Hz, 1H), 2.13 (s, 3H), 1.89 (td, J=8.2, 3.9 Hz, 1H), 1.80 (d, J=10.2 Hz, 1H), 1.65 (m, 1H), 1.14 (p, J=9.9 Hz, 1H); ³¹P NMR (243 MHz, CDCl₃) δ 152.57; MS (ESI), 802.49 [M+H]⁺.

### Synthesis of 1-((2R,4S,5R)-5-((bis(4-methoxyphenyl)(phenyl)methoxy)methyl)-4-(((1S,3S,3aS)-3-((phenylsulfonyl)methyl)tetrahydro-1H,3H-pyrrolo[1,2-c][1,3,2]oxazaphosphol-1-yl)oxy)tetrahydrofuran-2-yl)-3-methylpyrimidine-2,4(1H,3H)-dione

[chemical structure]

[3548] To a solution of dry 1-[(2R,4R,5R)-5-[[bis(4-methoxyphenyl)-phenyl-methoxy]methyl]-4-hydroxy-tetrahydrofuran-2-yl]-3-methyl-pyrimidine-2,4-dione (6.2 g, 11.38 mmol) in THF (45 mL) was added triethylamine (3.97 mL, 28.46 mmol). The rxn flask was set in a water bath. (3S,3aS)-3-(benzenesulfonylmethyl)-1-chloro-3a,4,5,6-tetrahydro-3H-pyrrolo[1,2-c][1,3,2]oxazaphosphole (0.89M in THF, 19.19 mL, 17.08 mmol) was added dropwise. The water bath was removed. The resulting cloudy solution was stirred at rt for 3 hr. TLC and LCMS showed the reaction was complete. The reaction was quenched by water (102 μL). Anhydrous MgSO₄ (1.366 g) was added. The mixture was filtered through celite, and the filtrate was concentrated to afford the crude product as an off-white foam. The crude product was purified by normal phase column chromatography applying 20-70% EtOAc in hexanes (each mobile phase contained 1% triethylamine) as the gradient to afford the title compound as a white foam (7.06 g, 74.9% yield). ¹H NMR (600 MHz, CDCl₃) δ 7.91-7.86 (m, 2H), 7.75 (d, J=8.1 Hz, 1H), 7.63-7.54 (m, 1H), 7.53-7.47 (m, 2H), 7.40-7.35 (m, 2H), 7.32-7.28 (m, 2H), 7.28-7.26 (m, 4H), 7.25-7.22 (m, 1H), 6.87-6.81 (m, 4H), 6.33 (t, J=6.5 Hz, 1H), 5.42 (d, J=8.1 Hz, 1H), 4.98 (dt, J=6.9, 5.5 Hz, 1H), 4.80 (ddt, J=9.6, 6.7, 3.4 Hz, 1H), 4.02 (q, J=3.1 Hz, 1H), 3.788 (s, 3H), 3.786 (s, 3H), 3.66-3.58 (m, 1H), 3.54-3.47 (m, 1H), 3.47-3.41 (m, 2H), 3.39-3.34 (m, 2H), 3.32 (s, 3H), 3.14 (tdd, J=10.3, 8.8, 4.0 Hz, 1H), 2.57-2.51 (m, 1H), 2.23 (dt, J=13.6, 6.6 Hz, 1H), 1.88 (td, J=8.4, 4.1 Hz, 1H), 1.79 (q, J=11.4, 10.3 Hz, 1H), 1.68-1.62 (m, 1H), 1.15-1.06 (m, 1H); ³¹P NMR (243 MHz, CDCl₃) δ 153.80; MS (ESI), 850.35 [M+Na]⁺.

### Synthesis of N-(1-((R)-3-(bis(4-methoxyphenyl)(phenyl)methoxy)-2-(((1S,3S,3aS)-3-((methyldiphenylsilyl)methyl)tetrahydro-1H,3H-pyrrolo[1,2-c][1,3,2]oxazaphosphol-1-yl)oxy)propyl)-4-oxo-1,4-dihydropyrimidin-2-yl)benzamide

[chemical structure]

[3550] To a solution of dry N-[1-[(2R)-3-[bis(4-methoxyphenyl)-phenyl-methoxy]-2-hydroxy-propyl]-4-oxo-pyrimidin-2-yl]benzamide (5.0 g, 8.45 mmol) in THF (37.5 mL) was added triethylamine (5.3 mL, 38.03 mmol). The flask was set in a water bath. [(3S,3aS)-1-chloro-3a,4,5,6-tetrahydro-3H-pyrrolo[1,2-c][1,3,2]oxazaphosphol-3-yl]methyl-methyl-diphenyl-silane (0.9574M in THF, 15.89 mL, 15.21 mmol) was added dropwise. The water bath was removed. The resulting cloudy reaction solution was stirred at rt for 1.5 hr. TLC and LCMS showed the reaction was complete. The reaction was quenched by water (122 μL). Anhydrous MgSO₄ (1.62 g) was added. The mixture was filtered through celite, and the filtrate was concentrated to afford the crude product as an off-white foam. The crude product was purified by normal phase column chromatography applying 10-70% EtOAc in hexanes (each mobile phase contained 1% triethylamine) as the gradient to afford the title compound as a white foam (5.3 g, 67.4% yield). ¹H NMR (600 MHz, CDCl₃) δ 13.31 (s, 1H), 8.19 (dd, J=8.2, 1.4 Hz, 2H), 7.45 (tdt, J=7.7, 2.7, 1.4 Hz, 7H), 7.37-7.26 (m, 12H), 7.24 (ddt, J=10.2, 8.5, 1.6 Hz, 3H), 7.08 (d, J=8.0 Hz, 1H), 6.80-6.74 (m, 4H), 5.57 (d, J=8.0 Hz, 1H), 4.71 (dq, J=11.2, 5.8, 4.4 Hz, 2H), 4.40 (dd, J=13.8, 4.0 Hz, 1H), 3.75 (s, 6H), 3.58 (dd, J=13.7, 8.1 Hz, 1H), 3.50-3.40 (m, 1H), 3.33-3.27 (m, 1H), 3.22-3.15 (m, 2H), 2.96 (tdd, J=10.4, 8.5, 5.0 Hz, 1H), 1.74 (qt, J=8.4, 4.1 Hz, 1H), 1.67-1.59 (m, 1H), 1.54 (dd, J=14.5, 8.1 Hz, 1H), 1.36 (dd, J=14.6, 7.0 Hz, 1H), 1.32-1.26 (m, 1H), 1.24-1.17 (m, 1H), 0.52 (s, 3H); ³¹P NMR (243 MHz, CDCl₃) δ 153.11; MS (ESI), 929.76 [M−H]⁻.

### Synthesis of N-(1-((S)-3-(bis(4-methoxyphenyl)(phenyl)methoxy)-2-(((1S,3S,3aS)-3-((methyldiphenylsilyl)methyl)tetrahydro-1H,3H-pyrrolo[1,2-c][1,3,2]oxazaphosphol-1-yl)oxy)propyl)-4-oxo-1,4-dihydropyrimidin-2-yl)benzamide

[chemical structure]

[3552] To a solution of dry N-[1-[(2S)-3-[bis(4-methoxyphenyl)-phenyl-methoxy]-2-hydroxy-propyl]-4-oxo-pyrimidin-2-yl]benzamide (7.0 g, 11.83 mmol) in THF (52.5 mL) was added triethylamine (5.94 mL, 42.59 mmol). The flask was set in a water bath. [(3S,3aS)-1-chloro-3a,4,5,6-tetrahydro-3H-pyrrolo[1,2-c][1,3,2]oxazaphosphol-3-yl]methyl-methyl-diphenyl-silane (0.9574M in THF, 22.24 mL, 21.3 mmol) was added dropwise. The water bath was removed. The resulting cloudy reaction solution was stirred at rt for 1 hr. TLC and LCMS showed the reaction was complete. The reaction was quenched by water (171 μL). Anhydrous MgSO₄ (2.27 g) was added. The mixture was filtered through celite, and the filtrate was concentrated to afford the crude product as an off-white foam. The crude product was purified by normal phase column chromatography applying 10-80% EtOAc in hexanes (each mobile phase contained 1% triethylamine) as the gradient to afford the title compound as a white foam (8.37 g, 76.0% yield). ¹H NMR (600 MHz, CDCl₃) δ 13.34 (s, 1H), 8.25 (dd, J=8.3, 1.4 Hz, 2H), 7.47 (ddt, J=6.7, 2.6, 1.4 Hz, 4H), 7.46-7.42 (m, 3H), 7.36-7.32 (m, 6H), 7.31-7.24 (m, 6H), 7.22 (ddt, J=9.3, 5.3, 1.8 Hz, 3H), 7.05 (d, J=8.0 Hz, 1H), 6.83-6.76 (m, 4H), 5.56 (d, J=7.9 Hz, 1H), 4.86 (dd, J=13.6, 3.3 Hz, 1H), 4.70-4.60 (m, 2H), 3.75 (s, 6H), 3.42-3.30 (m, 3H), 3.20-3.12 (m, 1H), 3.09 (dd, J=9.6, 7.4 Hz, 1H), 2.95-2.86 (m, 1H), 1.72 (ddt, J=12.7, 8.3, 4.1 Hz, 1H), 1.65-1.52 (m, 2H), 1.36 (dd, J=14.6, 6.6 Hz, 1H), 1.31-1.24 (m, 1H), 1.14 (dq, J=11.9, 9.5 Hz, 1H), 0.53 (s, 3H); ³¹P NMR (243 MHz, CDCl₃) δ 156.70; MS (ESI), 931.17 [M+H]⁺.

### Synthesis of 3-((2R,4S,5R)-5-((bis(4-methoxyphenyl)(phenyl)methoxy)methyl)-4-(((1S,3S,3aS)-3-((phenylsulfonyl)methyl)tetrahydro-1H,3H-pyrrolo[1,2-c][1,3,2]oxazaphosphol-1-yl)oxy)tetrahydrofuran-2-yl)pyridin-2(1H)-one

[chemical structure]

[3554] To a solution of dry 3-[(2R,4R,5R)-5-[[bis(4-methoxyphenyl)-phenyl-methoxy]methyl]-4-hydroxy-tetrahydrofuran-2-yl]-1H-pyridin-2-one (4.17 g, 8.12 mmol) in THF (31 mL) was added triethylamine (2.49 mL, 17.86 mmol). The rxn flask was set in a water bath. (3S,3aS)-3-(benzenesulfonylmethyl)-1-chloro-3a,4,5,6-tetrahydro-3H-pyrrolo[1,2-c][1,3,2]oxazaphosphole (0.89M in THF, 13.68 mL, 12.18 mmol) was added dropwise. The water bath was removed. The resulting cloudy reaction solution was stirred at rt for 2 hr 45 min. The reaction was quenched by water (73 μL). Anhydrous MgSO₄ (974 mg) was added. The mixture was filtered through celite, and the filtrate was concentrated to afford the crude product as an off-white foam. The crude product was purified by normal phase column chromatography applying 20-100% EtOAc in hexanes (each mobile phase contained 1% triethylamine) as the gradient to afford the title compound as a white foam (3.69 g, 57.0% yield). ¹H NMR (600 MHz, CDCl₃) δ 12.70 (s, 1H), 7.92-7.85 (m, 2H), 7.69 (ddd, J=6.9, 2.1, 1.1 Hz, 1H), 7.59-7.54 (m, 1H), 7.54-7.44 (m, 4H), 7.38-7.31 (m, 4H), 7.28 (t, J=7.7 Hz, 2H), 7.25 (dd, J=6.5, 2.1 Hz, 1H), 7.22-7.18 (m, 1H), 6.85-6.80 (m, 4H), 6.22 (t, J=6.7 Hz, 1H), 5.23 (dd, J=9.9, 5.7 Hz, 1H), 4.94 (q, J=6.0 Hz, 1H), 4.66 (ddd, J=9.1, 6.0, 2.6 Hz, 1H), 4.04 (q, J=4.1 Hz, 1H), 3.78 (s, 6H), 3.59 (dq, J=11.7, 5.9 Hz, 1H), 3.52-3.43 (m, 2H), 3.36 (dd, J=14.6, 5.5 Hz, 1H), 3.29 (dd, J=10.0, 4.3 Hz, 1H), 3.20 (dd, J=10.0, 4.2 Hz, 1H), 3.14-3.05 (m, 1H), 2.62 (ddd, J=13.3, 5.8, 2.0 Hz, 1H), 1.86 (ddd, J=13.0, 9.8, 6.2 Hz, 2H), 1.78-1.72 (m, 1H), 1.66-1.61 (m, 1H), 1.15-1.05 (m, 1H); ³¹P NMR (243 MHz, CDCl₃) δ 151.29; MS (ESI), 795.57 [M−H]⁻.

### Synthesis of N-(9-((S)-3-(bis(4-methoxyphenyl)(phenyl)methoxy)-2-(((1S,3S,3aS)-3-((methyldiphenylsilyl)methyl)tetrahydro-1H,3H-pyrrolo[1,2-c][1,3,2]oxazaphosphol-1-yl)oxy)propyl)-6-oxo-6,9-dihydro-1H-purin-2-yl)isobutyramide

[chemical structure]

[3556] To a solution of dry N-[9-[(2S)-3-[bis(4-methoxyphenyl)-phenyl-methoxy]-2-hydroxy-propyl]-6-oxo-1H-purin-2-yl]-2-methyl-propanamide (6.0 g, 10.04 mmol) in THF (45 mL) was added triethylamine (5.04 mL, 36.14 mmol). The flask was set in a water bath. [(3S,3aS)-1-chloro-3a,4,5,6-tetrahydro-3H-pyrrolo[1,2-c][1,3,2]oxazaphosphol-3-yl]methyl-methyl-diphenyl-silane (0.9574M in THF, 18.87 mL, 18.07 mmol) was added dropwise. The water bath was removed. The resulting cloudy reaction solution was stirred at rt for 1 hr. TLC and LCMS showed the reaction was complete. The reaction was quenched by water (144 μL). Anhydrous MgSO₄ (1.92 g) was added. The mixture was filtered through celite, and the filtrate was concentrated to afford the crude product as an off-white foam. The crude product was purified by normal phase column chromatography applying 25-100% EtOAc in hexanes (each mobile phase contained 1% triethylamine) as the gradient to afford the title compound as a white foam (8.18 g, 87.0% yield). ¹H NMR (600 MHz, CDCl₃) δ 11.84 (s, 1H), 7.86 (s, 1H), 7.53 (s, 1H), 7.49-7.42 (m, 6H), 7.38-7.29 (m, 8H), 7.28 (q, J=3.0, 2.2 Hz, 3H), 7.25 (d, J=1.1 Hz, 1H), 7.23-7.19 (m, 1H), 6.83-6.78 (m, 4H), 4.73 (dt, J=8.2, 6.2 Hz, 1H), 4.25-4.18 (m, 2H), 3.98 (dd, J=14.2, 8.0 Hz, 1H), 3.76 (s, 6H), 3.31-3.26 (m, 1H), 3.23 (dd, J=10.0, 5.3 Hz, 1H), 3.22-3.16 (m, 1H), 2.94 (dd, J=9.9, 7.1 Hz, 1H), 2.92-2.87 (m, 1H), 2.52 (hept, J=6.9 Hz, 1H), 1.71 (dtd, J=12.8, 9.0, 8.4, 4.0 Hz, 1H), 1.61-1.52 (m, 2H), 1.37 (dd, J=14.6, 6.6 Hz, 1H), 1.30-1.22 (m, 7H), 1.10 (dq, J=11.9, 9.7 Hz, 1H), 0.53 (s, 3H); ³¹P NMR (243 MHz, CDCl₃) δ 156.67; MS (ESI), 935.73 [M−H]⁻.

### Synthesis of N-(9-((R)-3-(bis(4-methoxyphenyl)(phenyl)methoxy)-2-(((1S,3S,3aS)-3-((methyldiphenylsilyl)methyl)tetrahydro-1H,3H-pyrrolo[1,2-c][1,3,2]oxazaphosphol-1-yl)oxy)propyl)-6-oxo-6,9-dihydro-1H-purin-2-yl)isobutyramide

[chemical structure]

[3558] To a solution of dry N-[9-[(2R)-3-[bis(4-methoxyphenyl)-phenyl-methoxy]-2-hydroxy-propyl]-6-oxo-1H-purin-2-yl]-2-methyl-propanamide (5.5 g, 9.2 mmol) in THF (41 mL) was added triethylamine (4.62 mL, 33.13 mmol). The flask was set in a water bath. [(3S,3aS)-1-chloro-3a,4,5,6-tetrahydro-3H-pyrrolo[1,2-c][1,3,2]oxazaphosphol-3-yl]methyl-methyl-diphenyl-silane (0.9574M in THF, 17.3 mL, 16.56 mmol) was added dropwise. The water bath was removed. The resulting cloudy reaction solution was stirred at rt for 1 hr. TLC and LCMS showed the reaction was complete. The reaction was quenched by water (132 μL). Anhydrous MgSO₄ (2.27 g) was added. The mixture was filtered through celite, and the filtrate was concentrated to afford the crude product as an off-white foam. The crude product was purified by normal phase column chromatography applying 40-100% EtOAc in hexanes (each mobile phase contained 1% triethylamine) as the gradient to afford the title compound as a white foam (6.265 g, 72.6% yield). ¹H NMR (600 MHz, CDCl₃) δ 11.81 (s, 1H), 7.78 (s, 1H), 7.53 (ddd, J=7.7, 3.8, 2.0 Hz, 4H), 7.42-7.38 (m, 3H), 7.36-7.31 (m, 3H), 7.31-7.27 (m, 3H), 7.27-7.24 (m, 6H), 7.21-7.17 (m, 1H), 6.81-6.74 (m, 4H), 4.74 (dt, J=8.5, 6.2 Hz, 1H), 4.34-4.26 (m, 1H), 4.00 (dd, J=14.2, 6.3 Hz, 1H), 3.87 (dd, J=14.1, 4.4 Hz, 1H), 3.769 (s, 3H), 3.768 (s, 3H), 3.43 (ddt, J=14.7, 10.7, 7.6 Hz, 1H), 3.31 (ddt, J=9.6, 7.3, 5.6 Hz, 1H), 3.08 (dd, J=9.9, 5.3 Hz, 1H), 3.00 (tdd, J=10.9, 8.7, 4.5 Hz, 1H), 2.90 (dd, J=9.9, 5.8 Hz, 1H), 2.47 (hept, J=6.9 Hz, 1H), 1.78 (ddt, J=16.2, 8.0, 3.2 Hz, 1H), 1.67-1.56 (m, 2H), 1.40 (dd, J=14.6, 6.5 Hz, 1H), 1.38-1.30 (m, 1H), 1.23 (d, J=6.9 Hz, 3H), 1.21 (d, J=6.9 Hz, 3H), 1.21-1.16 (m, 1H), 0.65 (s, 3H); ³¹P NMR (243 MHz, CDCl₃) δ 155.34; MS (ESI), 937.91 [M+H]⁺.

### Synthesis of 1-((S)-3-(bis(4-methoxyphenyl)(phenyl)methoxy)-2-(((1S,3S,3aS)-3-((methyldiphenylsilyl)methyl)tetrahydro-1H,3H-pyrrolo[1,2-c][1,3,2]oxazaphosphol-1-yl)oxy)propyl)-5-methylpyrimidine-2,4(1H,3H)-dione

[chemical structure]

[3560] To a solution of dry 1-[(2S)-3-[bis(4-methoxyphenyl)-phenyl-methoxy]-2-hydroxy-propyl]-5-methyl-pyrimidine-2,4-dione (6.0 g, 11.94 mmol) in THF (45 mL) was added triethylamine (4.99 mL, 35.82 mmol). The flask was set in a water bath. [(3S,3aS)-1-chloro-3a,4,5,6-tetrahydro-3H-pyrrolo[1,2-c][1,3,2]oxazaphosphol-3-yl]methyl-methyl-diphenyl-silane (0.9574M in THF, 22.45 mL, 21.49 mmol) was added dropwise. The water bath was removed. The resulting cloudy reaction solution was stirred at rt for 1 hr. TLC and LCMS showed the reaction was complete. The reaction was quenched by water (172 μL). Anhydrous MgSO₄ (2.29 g) was added. The mixture was filtered through celite, and the filtrate was concentrated to afford the crude product as an off-white foam. The crude product was purified by normal phase column chromatography applying 10-80% EtOAc in hexanes (each mobile phase contained 1% triethylamine) as the gradient to afford the title compound as a white foam (8.26 g, 82.2% yield). ¹H NMR (600 MHz, CDCl₃) δ 8.17 (s, 1H), 7.48 (dt, J=6.7, 1.4 Hz, 4H), 7.47-7.44 (m, 2H), 7.39-7.30 (m, 7H), 7.30-7.26 (m, 5H), 7.23-7.17 (m, 1H), 6.87 (d, J=1.4 Hz, 1H), 6.85-6.79 (m, 4H), 4.77 (dt, J=8.5, 5.9 Hz, 1H), 4.38-4.29 (m, 1H), 4.16 (dd, J=14.1, 3.6 Hz, 1H), 3.76 (s, 6H), 3.41 (tdd, J=14.5, 9.4, 7.2 Hz, 1H), 3.31 (dd, J=14.0, 8.9 Hz, 1H), 3.26-3.18 (m, 1H), 3.15 (dd, J=9.9, 4.7 Hz, 1H), 3.08 (dd, J=9.9, 5.8 Hz, 1H), 3.00-2.92 (m, 1H), 1.81-1.73 (m, 1H), 1.76 (d, J=1.2 Hz, 3H), 1.62 (qt, J=11.0, 5.1 Hz, 1H), 1.56 (dd, J=14.6, 8.6 Hz, 1H), 1.37 (dd, J=14.6, 6.3 Hz, 1H), 1.32 (qd, J=7.4, 3.0 Hz, 1H), 1.19 (dq, J=12.1, 9.5 Hz, 1H), 0.56 (s, 3H); ³¹P NMR (243 MHz, CDCl₃) δ 155.31; MS (ESI), 840.68 [M−H]⁻.

### Synthesis of 1-((R)-3-(bis(4-methoxyphenyl)(phenyl)methoxy)-2-(((1S,3S,3aS)-3-((methyldiphenylsilyl)methyl)tetrahydro-1H,3H-pyrrolo[1,2-c][1,3,2]oxazaphosphol-1-yl)oxy)propyl)-5-methylpyrimidine-2,4(1H,3H)-dione

[chemical structure]

[3562] To a solution of dry 1-[(2R)-3-[bis(4-methoxyphenyl)-phenyl-methoxy]-2-hydroxy-propyl]-5-methyl-pyrimidine-2,4-dione (5.54 g, 11.02 mmol) in THF (41.6 mL) was added triethylamine (4.61 mL, 33.07 mmol). The flask was set in a water bath. [(3S,3aS)-1-chloro-3a,4,5,6-tetrahydro-3H-pyrrolo[1,2-c][1,3,2]oxazaphosphol-3-yl]methyl-methyl-diphenyl-silane (0.9574M in THF, 20.73 mL, 19.84 mmol) was added dropwise. The water bath was removed. The resulting cloudy reaction solution was stirred at rt for 1 hr. TLC and LCMS showed the reaction was complete. The reaction was quenched by water (159 μL). Anhydrous MgSO₄ (2.115 g) was added. The mixture was filtered through celite, and the filtrate was concentrated to afford the crude product as an off-white foam. The crude product was purified by normal phase column chromatography applying 20-100% EtOAc in hexanes (each mobile phase contained 1% triethylamine) as the gradient to afford the title compound as a white foam (7.63 g, 82.2% yield). ¹H NMR (600 MHz, CDCl₃) δ 8.17 (s, 1H), 7.48 (dt, J=8.0, 1.6 Hz, 4H), 7.45-7.42 (m, 2H), 7.36-7.24 (m, 12H), 7.23-7.17 (m, 1H), 6.93 (q, J=1.2 Hz, 1H), 6.84-6.77 (m, 4H), 4.74 (dt, J=8.5, 6.1 Hz, 1H), 4.36-4.28 (m, 1H), 3.85 (dd, J=14.0, 4.2 Hz, 1H), 3.78 (s, 3H), 3.77 (s, 3H), 3.54 (dd, J=14.0, 8.0 Hz, 1H), 3.49-3.40 (m, 1H), 3.40-3.34 (m, 1H), 3.16 (dd, J=10.1, 4.6 Hz, 1H), 3.03 (dd, J=10.1, 4.4 Hz, 1H), 2.99-2.90 (m, 1H), 1.80 (d, J=1.2 Hz, 3H), 1.78-1.72 (m, 1H), 1.68-1.58 (m, 1H), 1.54 (dd, J=14.6, 8.5 Hz, 1H), 1.42-1.31 (m, 2H), 1.26-1.21 (m, 1H), 0.59 (s, 3H); ³¹P NMR (243 MHz, CDCl₃) δ 151.30; MS (ESI), 840.78 [M−H]⁻.

### Synthesis of (2R,3S,4R,5R)-2-(4-acetamido-2-oxopyrimidin-1(2H)-yl)-5-((bis(4-methoxyphenyl)(phenyl)methoxy)methyl)-4-(((1S,3S,3aS)-3-((phenylsulfonyl)methyl)tetrahydro-1H,3H-pyrrolo[1,2-c][1,3,2]oxazaphosphol-1-yl)oxy)tetrahydrofuran-3-yl acetate

[chemical structure]

[3564] To a solution of dry [(2R,3R,5R)-2-(4-acetamido-2-oxo-pyrimidin-1-yl)-5-[[bis(4-methoxyphenyl)-phenyl-methoxy]methyl]-4-hydroxy-tetrahydrofuran-3-yl] acetate (10.0 g, 15.88 mmol) in THF (75 mL) was added triethylamine (4.87 mL, 34.94 mmol). The rxn flask was set in a water bath. (3S,3aS)-3-(benzenesulfonylmethyl)-1-chloro-3a,4,5,6-tetrahydro-3H-pyrrolo[1,2-c][1,3,2]oxazaphosphole (0.43M in THF, 55.4 mL, 23.82 mmol) was added dropwise. The water bath was removed. The resulting cloudy reaction solution was stirred at rt for 1.5 hr. TLC and LCMS showed the reaction was complete. The reaction was quenched by water (143 μL). Anhydrous MgSO₄ (1.906 g) was added. The mixture was filtered through celite, and the filtrate was concentrated to afford the crude product as an off-white foam. The crude product was purified by normal phase column chromatography applying 20-100% EtOAc in hexanes (each mobile phase contained 1% triethylamine) as the gradient to afford the title compound as a white foam (9.35 g, 64.5% yield). ¹H NMR (600 MHz, CDCl₃) δ 9.69 (s, 1H), 7.93-7.89 (m, 2H), 7.87 (d, J=7.6 Hz, 1H), 7.64-7.58 (m, 1H), 7.52 (t, J=7.8 Hz, 2H), 7.47-7.43 (m, 2H), 7.38-7.33 (m, 4H), 7.31 (dd, J=8.4, 6.9 Hz, 2H), 7.28 (d, J=7.5 Hz, 1H), 7.26-7.22 (m, 1H), 6.88-6.83 (m, 4H), 6.31 (d, J=4.1 Hz, 1H), 5.44 (dd, J=4.2, 2.1 Hz, 1H), 5.04 (q, J=6.1 Hz, 1H), 4.58 (ddd, J=9.2, 3.6, 2.2 Hz, 1H), 4.14 (dd, J=7.2, 3.2 Hz, 1H), 3.79 (s, 6H), 3.65 (dq, J=9.9, 6.0 Hz, 1H), 3.54-3.43 (m, 2H), 3.42-3.31 (m, 3H), 3.13-3.04 (m, 1H), 2.26 (s, 3H), 1.87 (dtd, J=16.8, 8.1, 4.0 Hz, 1H), 1.81 (s, 3H), 1.80-1.71 (m, 1H), 1.64 (ddt, J=12.0, 7.4, 4.2 Hz, 1H), 1.10 (dtd, J=11.7, 10.0, 8.5 Hz, 1H); ³¹P NMR (243 MHz, CDCl₃) δ 153.43; MS (ESI), 913.46 [M+H]⁺.

### Synthesis of WV-NU-172 and amidates

[3565] In some embodiments, WV-NU-172 was prepared as below:

[chemical structure]

[chemical structure]

[3566] In some embodiments, WV-NU-172 was prepared as below at a difference scale:

[3567] For two batches: To a solution of compound 1B (60 g, 137.52 mmol, 1 eq.) in DCM (1200 mL), and chloro(isopropyl)magnesium (2 M, 103.14 mL, 1.5 eq.) was added at 20° C., after 1 hr and then tributyl(chloro)stannane (66.70 g, 204.91 mmol, 55.12 mL, 1.49 eq.) was added slowly and the mixture was stirred at 20° C. for 12 hr. TLC (Petroleum ether:Ethyl acetate=3:1) showed the compound 1B was consumed. The two batches were combined for work up. The reaction mixture was quenched by the addition of water (500 mL) carefully and the mixture was extracted with DCM (500 mL×2). The organic phases were combined, washed with brine and dried over Na₂SO₄. The solvent was removed under reduced pressure. The residue was purified by silica gel chromatography (Petroleum ether/Ethyl acetate=10/1, 3/1) to get compound 1C (120 g, 200.19 mmol, 72.78% yield) as a white solid. TLC:(Petroleum ether:Ethyl acetate=3:1), Rf=0.25.

[3568] t-BuOK (79.09 g, 704.80 mmol, 1.05 eq.) was added to a solution of BnOH (145.18 g, 1.34 mol, 139.59 mL, 2 eq.) in THF (500 mL) and stirred until dissolved. This mixture was added dropwise to a solution of compound 1 (100 g, 671.24 mmol, 1 eq.) in DMF (500 mL) cooled to −78° C. under an inert atmosphere. The mixture was allowed to warm slowly to 20° C., and stirred for 1h. TLC (Petroleum ether:Ethyl acetate=3:1, Rf=0.76) indicated compound 1 was consumed completely and one main new spot formed. The reaction mixture was diluted with H2O 1000 mL and extracted with EtOAc mL (500 mL*2). The combined organic layers were washed with brine 100 mL, dried over Na₂SO₄, filtered and concentrated under reduced pressure to give a residue. The residue was purified by column chromatography (SiO₂, Petroleum ether/Ethyl acetate=1/0 to 0/1) to get compound 2 (80 g, 362.56 mmol, 54.01% yield) was obtained as a white solid. TLC: (Petroleum ether:Ethyl acetate=3:1), Rf=0.76.

[3569] To a solution of compound 1C (85.57 g, 142.76 mmol, 1.26 eq.) in toluene (900 mL) was added 4-benzyloxy-2-chloro-pyrimidine (25 g, 113.30 mmol, 1 eq.), Pd(dppf)Cl₂·CH₂Cl₂ (9.25 g, 11.33 mmol, 0.1 eq.). The mixture was stirred at 120° C. for 3 hr under N₂. TLC (Petroleum ether:Ethyl acetate=1:1) showed the reactant 1 was consumed and the new spots was found. The mixture was concentrated to get the crude. The mixture was purified by MPLC (SiO₂, Petroleum ether/Ethyl acetate=10:1, 5:1) to get compound 3 (45 g, 90.99 mmol, 80.31% yield) as a brown solid. TLC: (Petroleum ether:Ethyl acetate=1:1), Rf=0.24.

[3570] To a solution of compound 3 (45 g, 90.99 mmol, 1 eq.) in THF (400 mL) was added HCl (5 M, 90.99 mL, 5 eq.). The mixture was stirred at 15° C. for 2 hr. TLC (Petroleum ether:Ethyl acetate=0:1) showed the desired substance was detected. The reaction mixture was diluted with water 50 mL and extracted with EtOAc 90 mL (30 mL*3). The combined water layers were added 2N NaOH aq until pH>11, and extracted with DCM (50 mL*3), the combined organic was dried over Na₂SO₄, filtered and concentrated to get the compound 4 (23 g, crude) was obtained as a yellow solid. TLC (Petroleum ether:Ethyl acetate=0:1), Rf=0.01.

[3571] To a solution of compound 4 (23 g, 91.17 mmol, 1 eq.) in MeCN (800 mL) was added NaH (7.29 g, 182.34 mmol, 60% purity, 2 eq.), the mixture was stirred at 0° C. for 30 min, then compound 1E (47.01 g, 109.41 mmol, 1.2 eq.) was added. The mixture was stirred at 15° C. for 12 hr. LCMS showed the compound 4 was consumed and the desired substance was found. The reaction mixture filtered, and the cake was washed with DCM (100 mL), concentrated the filtrate to get the crude. The mixture was purified by MPLC (SiO₂, DCM:MeOH=20:1) to get compound 6 (30 g, crude) as a yellow oil. LCMS: (M+H+): 645.3. TLC (DCM:MeOH=20:1), Rf=0.24.

[3572] To a solution of compound 6 (30 g, 46.48 mmol, 1 eq.) in MeOH (600 mL) was added Pd/C (6, 46.48 mmol, 10% purity, 1 eq.) under N₂ atmosphere. The suspension was degassed and purged with H₂ for 3 times. The mixture was stirred under H₂ (15 Psi) at 15° C. for 12 hr. LCMS showed the compound 6 was consumed and the desired mass was found. The mixture was filtered and concentrated to get the compound 7 (25 g, crude) as a yellow oil. LCMS: (M+H+): 555.2.

[3573] To a solution of compound 7 (2 g, 3.60 mmol, 1 eq.) in AMMONIA (200 mL), the mixture was stirred at 15° C. for 12 hr. LCMS showed the compound 7 was consumed. The mixture was concentrated to get the compound 8 (1 g, 3.59 mmol, 99.79% yield) as s yellow oil. To a solution of compound 7 (25 g, 45.02 mmol, 1 eq.) in ammonia (1000 mL), the mixture was stirred at 15° C. for 12 hr. LCMS showed the compound 7 was consumed. The mixture was concentrated to get the crude. The mixture was purified by MPLC (SiO₂, Dichloromethane:Methanol=20; 1.10:1.5:1) to get compound 8 (11 g, 39.53 mmol, 87.82% yield) as s yellow oil. LCMS: (M+H+): 279.1. TLC: (Dichloromethane:Methanol=10:1), Rf=0.15.

[3574] To a solution of compound 8 (5 g, 17.97 mmol, 1 eq.) in pyridine (60 mL), and DMTCl (6.39 g, 18.87 mmol, 1.05 eq.) was added to the mixture, the solution was stirred at 20° C. for 1.5 hr. LCMS showed the compound 8 was consumed and the desired substance was found. MeOH (10 mL) was added to the mixture and concentrated to get the crude. The mixture was purified by Pre-HPLC (column: Phenomenex C18 250*70 mm 10 u; mobile phase: [water (NH₄HCO₃)-ACN]; B %: 40%-65%, 20 min) to get WV-NU-172 (2.5 g, 4.31 mmol, 23.96% yield) as a yellow solid. ¹HNMR (400 MHz, DMSO-d6) δ=11.74 (br s, 1H), 8.23-8.03 (m, 2H), 7.97-7.80 (m, 1H), 7.39-7.33 (m, 2H), 7.31-7.16 (m, 7H), 6.85 (br dd, J=5.4, 8.5 Hz, 4H), 6.17 (br t, J=6.0 Hz, 2H), 5.39 (br d, J=4.1 Hz, 1H), 4.33 (br s, 1H), 3.96 (br d, J=3.8 Hz, 1H), 3.71 (d, J=3.8 Hz, 6H), 3.17-3.12 (m, 2H), 2.42-2.22 (m, 1H). LCMS: (M−H+): 579.3.

[3575] Amidites of WV-NU-172 can be prepared using various technologies in accordance with the present disclosure. For example, in some embodiments amidites are prepared as described below.

[chemical structure]

[3576] Nucleosides WV-NU-172 (1.9 g, 3.27 mmol, 1.0 eq.) in an 250 mL size three necked flask was azeotroped with anhydrous toluene (30 mL) and was dried for 48 hrs on high vacuum. To the flask was added anhydrous THF (10 mL) under argon and solution was cooled to −10° C. to the reaction mixture was added triethyl amine (4.0 eq.) followed by addition of D-PSM-Cl (0.9 M) solution (2.0 eq.) over the period of 10 min. The reaction mixture was warmed to room temperature and reaction progress was monitored by HPLC. After disappearance of starting material, reaction was quenched by addition of water and dried by addition of molecular sieve. The reaction mixture was filtered through fritted glass tube. Reaction flask and precipitate was washed with anhydrous THF (25 mL). Obtained filtrate was collected and solvent was removed under reduced pressure. The residue was purified by column chromatography (SiO₂, 40-100% Ethyl acetate in Hexanes) to give D-PSM-WV-NU-172 Amidite off white solid (1.6 g, 57% yield). ³¹P NMR (243 MHz, CDCl₃) δ=154.34. ¹H NMR (600 MHz, CDCl₃) δ 7.95-7.88 (m, 3H), 7.86 (d, J=1.4 Hz, 1H), 7.71 (d, J=1.4 Hz, 1H), 7.62 (tt, J=7.3, 1.3 Hz, 1H), 7.54-7.48 (m, 2H), 7.43-7.38 (m, 2H), 7.34-7.27 (m, 4H), 7.26-7.20 (m, 1H), 6.85 (ddq, J=8.4, 3.1, 1.8 Hz, 4H), 6.31 (dd, J=6.6, 1.4 Hz, 1H), 6.04 (dd, J=7.9, 5.5 Hz, 1H), 5.07 (dt, J=7.4, 5.5 Hz, 1H), 4.79 (ddd, J=8.2, 5.3, 2.5 Hz, 1H), 4.18 (td, J=4.2, 2.2 Hz, 1H), 3.82-3.74 (m, 8H), 3.68 (ddd, J=9.7, 5.5, 2.7 Hz, 1H), 3.58-3.47 (m, 2H), 3.40 (dd, J=14.4, 5.3 Hz, 1H), 3.30 (qd, J=10.4, 4.2 Hz, 2H), 3.20 (ddd, J=10.3, 4.0, 1.6 Hz, 1H), 2.56 (ddd, J=13.5, 5.6, 2.3 Hz, 1H), 2.47 (ddd, J=13.6, 8.0, 5.8 Hz, 1H), 1.96-1.81 (m, 4H), 1.72-1.65 (m, 1H), 1.18-1.11 (m, 1H). ¹³C NMR (151 MHz, CDCl₃) δ 161.36, 158.64, 154.95, 152.50, 144.40, 139.41, 136.49, 135.47, 135.45, 135.06, 134.06, 130.09, 130.01, 129.35, 128.10, 128.03, 127.99, 127.97, 126.99, 119.43, 113.68, 113.28, 113.26, 86.71, 85.97, 85.95, 74.47, 74.41, 74.03, 73.94, 67.99, 66.33, 66.31, 63.12, 58.01, 57.99, 55.25, 46.79, 46.56, 41.15, 41.12, 27.37, 26.01, 25.99, 25.63. LCMS: C₄₅H₄₆N₅O₉PS (M−H⁺): 865.04.

[chemical structure]

[3577] Nucleosides WV-NU-172 (0.9 g) was converted to L-PSM-WV-NU-172 Amidite (510 mg, 45% yield) as an off-white solid. ³¹P NMR (243 MHz, CDCl₃) δ=153.78. ¹H NMR (600 MHz, CDCl₃) δ 7.94-7.87 (m, 3H), 7.86 (d, J=1.5 Hz, 1H), 7.70 (d, J=1.4 Hz, 1H), 7.62 (tt, J=7.3, 1.4 Hz, 1H), 7.53-7.47 (m, 2H), 7.42-7.36 (m, 2H), 7.34-7.27 (m, 4H), 7.26-7.20 (m, 1H), 6.85 (ddq, J=8.4, 3.1, 1.8 Hz, 4H), 6.31 (dd, J=6.6, 1.3 Hz, 1H), 6.03 (dd, J=7.9, 5.4 Hz, 1H), 5.07 (dt, J=7.4, 5.5 Hz, 1H), 4.79 (ddd, J=8.2, 5.3, 2.5 Hz, 1H), 4.19 (td, J=4.2, 2.2 Hz, 1H), 3.82-3.72 (m, 8H), 3.68 (ddd, J=9.7, 5.5, 2.7 Hz, 1H), 3.58-3.47 (m, 2H), 3.40 (dd, J=14.4, 5.3 Hz, 1H), 3.30 (qd, J=10.4, 4.3 Hz, 2H), 3.20 (ddd, J=10.2, 4.0, 1.6 Hz, 1H), 2.56 (ddd, J=13.5, 5.6, 2.3 Hz, 1H), 2.46 (ddd, J=13.6, 8.0, 5.8 Hz, 1H), 1.95-1.80 (m, 4H), 1.72-1.64 (m, 1H), 1.17-1.10 (m, 1H). ¹³C NMR (151 MHz, CDCl₃) δ 161.49, 158.77, 155.08, 152.63, 144.53, 139.54, 136.61, 135.60, 135.57, 135.18, 134.19, 130.22, 129.48, 128.22, 128.12, 128.10, 127.12, 119.56, 113.81, 113.41, 113.39, 86.84, 86.09, 86.08, 74.60, 74.54, 74.16, 74.07, 68.12, 66.46, 66.43, 63.25, 58.14, 58.12, 55.37, 46.92, 46.69, 41.28, 41.25, 27.50, 26.14, 26.12, 25.76. LCMS: C₄₅H₄₆N₅O₉PS (M−H⁺): 865.04.

### Synthesis of N-(1-((S)-3-(bis(4-methoxyphenyl)(phenyl)methoxy)-2-(((1S,3S,3aS)-3-((phenylsulfonyl)methyl)tetrahydro-1H,3H-pyrrolo[1,2-c][1,3,2]oxazaphosphol-1-yl)oxy)propyl)-2-oxo-1,2-dihydropyrimidin-4-yl)benzamide

[chemical structure]

[3579] To a solution of dry N-[1-[(2S)-3-[bis(4-methoxyphenyl)-phenyl-methoxy]-2-hydroxy-propyl]-2-oxo-pyrimidin-4-yl]benzamide (4.79 g, 8.1 mmol) in THF (48 mL) was added triethylamine (6.1 mL, 43.73 mmol). (3S,3aS)-3-(benzenesulfonylmethyl)-1-chloro-3a,4,5,6-tetrahydro-3H-pyrrolo[1,2-c][1,3,2]oxazaphosphole (0.9M in THF, 16.2 mL, 14.58 mmol) was added dropwise. The off-white slurry was stirred at rt for 7 hr. TLC and LCMS showed the reaction was complete. The reaction was quenched by water (146 uL). Anhydrous MgSO₄ (1.94 g) was added. The mixture was filtered through celite, and the filtrate was concentrated to afford the crude product as an off-white foam. The crude product was purified by normal phase column chromatography applying 20-100% EtOAc in hexanes (each mobile phase contained 5% triethylamine) as the gradient to afford the title compound as a light-brown foam (5.63 g, 79.5% yield). ¹H NMR (600 MHz, CDCl₃) δ 8.62 (bs, 1H), 7.93-7.86 (m, 2H), 7.85-7.81 (m, 2H), 7.60 (t, J=7.5 Hz, 1H), 7.56 (tt, J=7.6, 1.2 Hz, 1H), 7.51 (tt, J=7.9, 1.6 Hz, 2H), 7.47 (dt, J=7.1, 1.5 Hz, 2H), 7.42 (tt, J=8.1, 1.6 Hz, 3H), 7.35 (dd, J=8.9, 2.1 Hz, 4H), 7.30 (t, J=7.7 Hz, 3H), 7.21 (tt, J=7.4, 1.3 Hz, 1H), 6.85 (dd, J=8.9, 1.5 Hz, 4H), 5.09 (q, J=6.3 Hz, 1H), 4.59-4.52 (m, 1H), 4.41 (dd, J=13.4, 3.3 Hz, 1H), 3.79 (s, 6H), 3.71-3.62 (m, 1H), 3.57 (dd, J=13.4, 9.1 Hz, 1H), 3.43 (dd, J=14.3, 6.8 Hz, 1H), 3.39-3.33 (m, 1H), 3.30 (dd, J=14.6, 6.1 Hz, 1H), 3.18 (qd, J=9.9, 4.7 Hz, 2H), 3.01 (qd, J=10.0, 4.4 Hz, 1H), 1.81-1.67 (m, 2H), 1.67-1.59 (m, 1H), 1.12-1.04 (m, 1H); ³¹P NMR (243 MHz, CDCl₃) δ 154.61; MS (ESI), 873.94 [M−H]⁻.

### Synthesis of N-(1-((R)-3-(bis(4-methoxyphenyl)(phenyl)methoxy)-2-(((1S,3S,3aS)-3-((phenylsulfonyl)methyl)tetrahydro-1H,3H-pyrrolo[1,2-c][1,3,2]oxazaphosphol-1-yl)oxy)propyl)-2-oxo-1,2-dihydropyrimidin-4-yl)benzamide

[chemical structure]

[3581] To a solution of dry N-[1-[(2R)-3-[bis(4-methoxyphenyl)-phenyl-methoxy]-2-hydroxy-propyl]-2-oxo-pyrimidin-4-yl]benzamide (4.81 g, 8.13 mmol) in THF (48 mL) was added triethylamine (6.12 mL, 43.91 mmol). (3S,3aS)-3-(benzenesulfonylmethyl)-1-chloro-3a,4,5,6-tetrahydro-3H-pyrrolo[1,2-c][1,3,2]oxazaphosphole (0.9M in THF, 16.3 mL, 14.64 mmol) was added dropwise. The off-white slurry was stirred at rt for 5 hr. TLC and LCMS showed the reaction was complete. The reaction was quenched by water (146 uL). Anhydrous MgSO₄ (1.94 g) was added. The mixture was filtered through celite, and the filtrate was concentrated to afford the crude product as a light-brown foam. The crude product was purified by normal phase column chromatography applying 20-100% EtOAc in hexanes (each mobile phase contained 5% triethylamine) as the gradient. The first half of the fractions of the major peak was still not pure, which was purified again by normal phase column chromatography applying 30-100% DCM in hexanes (each mobile phase contained 2.5% triethylamine) as the gradient. The pure desired product fractions from the two columns were combined and concentrated to afford the title compound as a brownish off-white foam (4.69 g, 65.9% yield). ¹H NMR (600 MHz, CDCl₃) δ 8.60 (bs, 1H), 7.96 (dt, J=7.2, 1.3 Hz, 2H), 7.91-7.84 (m, 2H), 7.66-7.57 (m, 3H), 7.56-7.46 (m, 7H), 7.39-7.33 (m, 4H), 7.29 (t, J=7.7 Hz, 2H), 7.21 (tt, J=7.4, 1.3 Hz, 1H), 6.87-6.81 (m, 4H), 5.08 (q, J=6.2 Hz, 1H), 4.59 (tdd, J=12.1, 8.9, 4.1 Hz, 1H), 4.32 (dd, J=13.4, 3.2 Hz, 1H), 3.791 (s, 3H), 3.789 (s, 3H), 3.78-3.73 (m, 1H), 3.58 (dd, J=13.4, 8.9 Hz, 1H), 3.48 (dd, J=14.3, 6.4 Hz, 1H), 3.46-3.39 (m, 1H), 3.30 (dd, J=14.2, 6.4 Hz, 1H), 3.23 (dd, J=10.0, 3.7 Hz, 1H), 3.17 (dd, J=10.0, 5.4 Hz, 1H), 3.07-2.98 (m, 1H), 1.85-1.70 (m, 2H), 1.69-1.63 (m, 1H), 1.08 (dq, J=11.7, 9.5 Hz, 1H); ³¹P NMR (243 MHz, CDCl₃) δ 154.17; MS (ESI), 873.94 [M−H]⁻.

### Synthesis of 3-((2R,4S,5R)-5-((bis(4-methoxyphenyl)(phenyl)methoxy)methyl)-4-hydroxytetrahydrofuran-2-yl)-6-methylpyrimidine-2,4(1H,3H)-dione (WV-NU-198) and 3-((2S,4S,5R)-5-((bis(4-methoxyphenyl)(phenyl)methoxy)methyl)-4-hydroxytetrahydrofuran-2-yl)-6-methylpyrimidine-2,4(1H,3H)-dione (WV-NU-198A)

[chemical structure]

[3583] Step 1. To a solution of (2S,4S,5R)-5-(hydroxymethyl)tetrahydrofuran-2,4-diol (50 g, 372.77 mmol, 1 eq) in pyridine (300 mL) was added DMAP (4.55 g, 37.28 mmol, 0.1 eq) at 15° C. and drop-wise Ac₂O (190.28 g, 1.86 mol, 174.57 mL, 5 eq). The mixture was stirred at 15° C. for 12 hr. Pyridine was removed rotary evaporators and the residue was co-evaporated with toluene (2*50 mL). The residue was diluted with DCM (300 mL) and washed with 1M HCl (100 mL) and then sat.NaHCO₃ (20 mL), dried over Na₂SO₄, filtered and concentrated to get crude product (2R,4S,5R)-5-(acetoxymethyl)tetrahydrofuran-2,4-diyl diacetate (95 g, 365.05 mmol, 97.93% yield) as a white solid.

[3584] Step 2. To a solution of (2R,4S,5R)-5-(acetoxymethyl)tetrahydrofuran-2,4-diyl diacetate (14.54 g, 115.28 mmol, 1.5 eq) kept under argon was dissolved in DCE (300 mL), BSA (46.90 g, 230.56 mmol, 56.99 mL, 3 eq) was added, the mixture was stirred at 80° C. for 0.5 hr until the mixture was clear, and with vigorous stirring, 6-methylpyrimidine-2,4(1H,3H)-dione (20 g, 76.85 mmol, 1 eq) in DCE (150 mL) and then SnCl₄ (22.02 g, 84.54 mmol, 9.88 mL, 1.1 eq) dropwise to a slightly yellowish solution at 0° C. The mixture was stirred at 15° C. for 12 hr. The reaction mixture was quenched by addition NaHCO₃ 20 mL and extracted with DCM 45 mL (15 mL*3). The combined organic layers were dried over Na₂SO₄, filtered and concentrated under reduced pressure to give ((2R,3S,5R)-3-acetoxy-5-(4-methyl-2,6-dioxo-3,6-dihydropyrimidin-1(2H)-yl)tetrahydrofuran-2-yl)methyl acetate (20 g, 61.29 mmol, 79.75% yield) as a white solid. LCMS (M−H)⁻: 325.1.

[3585] Step 3. To a solution of ((2R,3S,5R)-3-acetoxy-5-(4-methyl-2,6-dioxo-3,6-dihydropyrimidin-1(2H)-yl)tetrahydrofuran-2-yl)methyl acetate (16 g, 49.03 mmol, 1 eq) in MeOH (160 mL) was added NaOMe (6.62 g, 122.59 mmol, 2.5 eq). The mixture was stirred at 15° C. for 3 hr. The reaction mixture was quenched by addition NH₄Cl (400 cmg), and then concentrated under reduced pressure to give a residue. The residue was purified by column chromatography (SiO₂, Petroleum ether:Ethyl acetate=1:0 to 0:1) to give 3-((2R,4S,5R)-4-hydroxy-5-(hydroxymethyl)tetrahydrofuran-2-yl)-6-methylpyrimidine-2,4(1H,3H)-dione (8 g, 33.03 mmol, 88.89% yield) as a white solid. LCMS: (M−H⁺): 241.0.

[3586] Step 4. To a solution of 3-((2R,4S,5R)-4-hydroxy-5-(hydroxymethyl)tetrahydrofuran-2-yl)-6-methylpyrimidine-2,4(1H,3H)-dione (4 g, 16.51 mmol, 1 eq) in PYRIDINE (90 mL) was added DMTCl (6.71 g, 19.82 mmol, 1.2 eq). The mixture was stirred at 15° C. for 2 hr. The reaction mixture was extracted with DCM (100 mL*3). The combined organic layers were dried over by Na₂SO₄, filtered and concentrated under reduced pressure to give a residue. The crude product was purified by column chromatography (SiO₂, Petroleum ether:Ethyl acetate=1:0 to 0:1) and repurified by reversed-phase HPLC (column: Phenomenex Titank C18 Bulk 250*70 mm 10 u; mobile phase: [water (10 mM NH₄HCO₃)-ACN]; B %: 46%-66%, 20 min @100 mL/min) to give 3-((2R,4S,5R)-5-((bis(4-methoxyphenyl)(phenyl)methoxy)methyl)-4-hydroxytetrahydrofuran-2-yl)-6-methylpyrimidine-2,4(1H,3H)-dione (WV-NU-198) (0.83 g, 9.23% yield) as white solid and 3-((2S,4S,5R)-5-((bis(4-methoxyphenyl)(phenyl)methoxy)methyl)-4-hydroxytetrahydrofuran-2-yl)-6-methylpyrimidine-2,4(1H,3H)-dione (WV-NU-198A) (1.65 g, 18.35% yield) as white solid. WV-NU-198: ¹HNMR (400 MHz, DMSO-d₆) δ=11.15-10.94 (m, 1H), 7.53-7.34 (m, 2H), 7.31-7.18 (m, 6H), 6.96-6.79 (m, 4H), 6.63-6.54 (m, 1H), 5.50-5.40 (m, 1H), 5.15-5.01 (m, 1H), 4.35-4.21 (m, 1H), 3.90-3.80 (m, 1H), 3.74 (d, J=1.8 Hz, 6H), 3.40-3.29 (m, 1H), 3.27-3.12 (m, 1H), 3.10-2.96 (m, 1H), 2.14-1.89 (m, 4H); LCMS: (M−H⁺): 543.2. WV-NU-198A: ¹H NMR (400 MHz, DMSO-d₆) δ=11.10-10.89 (m, 1H), 7.59-7.43 (m, 2H), 7.42-7.29 (m, 6H), 7.26-7.17 (m, 1H), 6.95-6.81 (m, 4H), 6.14-6.02 (m, 1H), 5.81-5.71 (m, 1H), 5.39-5.31 (m, 1H), 4.92-4.76 (m, 1H), 3.79-3.68 (m, 6H), 3.65 (br s, 1H), 3.56-3.49 (m, 1H), 3.45-3.40 (m, 1H), 3.37-3.29 (m, 1H), 2.76 (br t, J=11.9 Hz, 1H), 2.67-2.59 (m, 1H), 2.07 (s, 1H), 1.99-1.92 (m, 3H), 1.55-1.40 (m, 1H); LCMS: (M−H⁺): 543.2.

### Synthesis of 9-((2R,4S,5R)-5-((bis(4-methoxyphenyl)(phenyl)methoxy)methyl)-4-hydroxytetrahydrofuran-2-yl)-7,9-dihydro-1H-purine-6,8-dione (WV-NU-213)

[chemical structure]

[3588] Step 1. For two batches: To a solution of (2R,3S,5R)-5-(6-amino-9H-purin-9-yl)-2-(hydroxymethyl)tetrahydrofuran-3-ol (50 g, 199.01 mmol, 1 eq.) in dioxane (400 mL) and AcONa (0.5 M, 1.87 L, 4.71 eq.) buffer (pH 4.3), a solution of Br₂ (38.16 g, 238.81 mmol, 12.31 mL, 1.2 eq.) was added dropwise while stirring. The mixture was stirred at 15° C. for 12h. The two batches were combined for work up. To the mixture conc. Na₂S₂O₅ was added until the red color vanished. The mixture was neutralized to pH 7.0 with 0.5m NaOH. The residue was evaporated, when a white solid precipitated. The solid was filtered off, washed with cold 1,4-dioxane (50 mL), and dried under high vacuum to get (2R,3S,5R)-5-(6-amino-8-bromo-9H-purin-9-yl)-2-(hydroxymethyl)tetrahydrofuran-3-ol (110 g, 333.19 mmol, 83.71% yield) as a yellow solid. ¹HNMR (400 MHz, DMSO-d6) δ=8.22-7.98 (m, 1H), 7.53 (br s, 2H), 6.29 (dd, J=6.5, 7.9 Hz, 1H), 5.35 (br d, J=12.3 Hz, 2H), 4.58-4.38 (m, 1H), 3.95-3.82 (m, 1H), 3.65 (dd, J=4.5, 11.9 Hz, 1H), 3.48 (br dd, J=4.5, 11.7 Hz, 1H), 3.36 (br s, 1H), 3.24 (ddd, J=6.1, 7.8, 13.4 Hz, 1H), 2.19 (ddd, J=2.6, 6.4, 13.1 Hz, 1H); LCMS: (M+H+): 330.14.

[3589] Step 2. For two batches: A solution of (2R,3S,5R)-5-(6-amino-8-bromo-9H-purin-9-yl)-2-(hydroxymethyl)tetrahydrofuran-3-ol (55 g, 166.60 mmol, 1 eq.) 2-MERCAPTOETHANOL (39.22 g, 501.90 mmol, 35.01 mL, 3.01 eq.) and TEA (168.58 g, 1.67 mol, 231.88 mL, 10 eq.) in water (1500 mL) was stirred under 110° C. for 4 hr. The solvent was removed under reduced pressure to give a residue which was purified by MPLC (Dichloromethane:Methanol=5:1, 10:1) to get 6-amino-9-((2R,4S,5R)-4-hydroxy-5-(hydroxymethyl)tetrahydrofuran-2-yl)-9H-purin-8-ol (65 g, 243.23 mmol, 73.00% yield) as a white solid. LCMS: (M+H+): 267.24.

[3590] Step 3. A solution of NaNO₂ (15.49 g, 224.52 mmol, 2 eq.) in Water (60 mL) was added to a stirred solution of 6-amino-9-((2R,4S,5R)-4-hydroxy-5-(hydroxymethyl)tetrahydrofuran-2-yl)-9H-purin-8-ol (30 g, 112.26 mmol, 1 eq.) in HOAc (1500 mL, 95% purity). The reaction mixture was stirred at 15° C. for 12 hr. The solvent was removed under reduced pressure. The crude product was triturated with DCM (500 ml) at 15° C. for 5 min to give 9-((2R,4S,5R)-4-hydroxy-5-(hydroxymethyl)tetrahydrofuran-2-yl)-7,9-dihydro-1H-purine-6,8-dione (22 g, 82.02 mmol, 73.06% yield) was obtained as a white solid. ¹HNMR (400 MHz, DMSO-d₆) δ=7.98 (s, 1H), 6.12 (t, J=7.3 Hz, 1H), 4.36 (td, J=2.8, 5.8 Hz, 1H), 3.79-3.74 (m, 1H), 3.58 (dd, J=5.0, 11.6 Hz, 1H), 3.44 (dd, J=5.3, 11.6 Hz, 1H), 2.96 (ddd, J=6.2, 7.6, 13.3 Hz, 1H), 2.01 (ddd, J=2.8, 6.7, 13.0 Hz, 1H), 1.90 (s, 1H); LCMS: (M+H+): 268.23.

[3591] Step 4. To a solution of 9-((2R,4S,5R)-4-hydroxy-5-(hydroxymethyl)tetrahydrofuran-2-yl)-7,9-dihydro-1H-purine-6,8-dione (22 g, 82.02 mmol, 1 eq.) in PYRIDINE (400 mL) was added DMTCl (22.23 g, 65.62 mmol, 0.8 eq.). The mixture was stirred at 15° C. for 12 hr. The reaction mixture was quenched by addition water 400 mL at 15° C., and then diluted with water 200 mL and extracted with ethyl acetate 900 mL (300 mL*3). The combined organic layers were dried over Na₂SO₄, filtered and concentrated under reduced pressure to give a residue. The residue was purified by column chromatography (SiO₂, DCM:MeOH=1:0 to 0:1). The crude product was triturated with DCM (300 ml) at 15° C. for 5 min to give WV-NU-213 (13.67 g, 30% yield) as a white solid. ¹H NMR (400 MHz, DMSO-d₆) δ=11.37 (s, 1H), 7.78 (s, 1H), 7.35 (d, J=7.4 Hz, 2H), 7.26-7.14 (m, 7H), 6.80 (dd, J=8.9, 14.5 Hz, 4H), 6.13 (t, J=6.8 Hz, 1H), 5.21 (d, J=4.8 Hz, 1H), 4.48-4.39 (m, 1H), 3.89 (td, J=4.4, 6.4 Hz, 1H), 3.72 (d, J=3.6 Hz, 6H), 3.33 (s, 1H), 3.20-3.03 (m, 2H), 2.96 (td, J=6.5, 12.9 Hz, 1H), 2.15-2.05 (m, 1H); LCMS: (M+H−): 570.59, LCMS purity: 97.33%.

### Synthesis of 3-((2R,4S,5R)-5-((bis(4-methoxyphenyl)(phenyl)methoxy)methyl)-4-(((1S,3S,3aS)-3-((phenylsulfonyl)methyl)tetrahydro-1H,3H-pyrrolo[1,2-c][1,3,2]oxazaphosphol-1-yl)oxy)tetrahydrofuran-2-yl)-6-methylpyrimidine-2,4(1H,3H)-dione

[chemical structure]

[3593] To a solution of dry 3-[(2R,4R,5R)-5-[[bis(4-methoxyphenyl)-phenyl-methoxy]methyl]-4-hydroxy-tetrahydrofuran-2-yl]-6-methyl-1H-pyrimidine-2,4-dione (0.83 g, 1.52 mmol) in THF (6.5 mL) was added triethylamine (0.47 mL, 3.35 mmol). (3S,3aS)-3-(benzenesulfonylmethyl)-1-chloro-3a,4,5,6-tetrahydro-3H-pyrrolo[1,2-c][1,3,2]oxazaphosphole (0.43M in THF, 5.32 mL, 2.29 mmol) was added fast dropwise. The resulting cloudy reaction solution was stirred at rt for 5 h. TLC showed the reaction was complete. The reaction was quenched by water (14 μL). Anhydrous MgSO₄ (183 mg) was added. The mixture was filtered through celite, and the filtrate was concentrated to afford the crude product as an off-white foam. The crude product was purified by normal phase column chromatography applying 20-100% EtOAc in hexanes (each mobile phase contained 1% triethylamine) as the gradient to afford the title compound as a white foam (0.549 g, 43.5% yield). ¹H NMR (600 MHz, Chloroform-d) δ 9.50 (s, 1H), 7.89-7.84 (m, 2H), 7.60 (t, J=7.4 Hz, 1H), 7.50 (t, J=7.7 Hz, 2H), 7.46-7.42 (m, 2H), 7.32 (ddd, J=9.2, 5.6, 2.8 Hz, 4H), 7.22 (t, J=7.6 Hz, 2H), 7.14 (t, J=7.3 Hz, 1H), 6.79-6.73 (m, 4H), 6.71 (dd, J=8.9, 4.3 Hz, 1H), 5.46 (s, 1H), 4.93 (q, J=6.1 Hz, 1H), 4.84 (dq, J=8.8, 6.2 Hz, 1H), 3.92 (td, J=6.4, 3.9 Hz, 1H), 3.74 (s, 3H), 3.73 (s, 3H), 3.63 (dq, J=11.8, 5.9 Hz, 1H), 3.43-3.27 (m, 5H), 2.94 (qd, J=10.0, 4.1 Hz, 1H), 2.80 (ddd, J=13.0, 8.2, 4.3 Hz, 1H), 2.26 (ddd, J=13.6, 9.0, 6.1 Hz, 1H), 1.99 (s, 3H), 1.83 (dtt, J=11.9, 7.8, 3.2 Hz, 1H), 1.77-1.68 (m, 1H), 1.66-1.58 (m, 1H), 1.11-1.04 (m, 1H); ³¹P NMR (243 MHz, Chloroform-d) 6149.82; MS (ESI), 826.14 [M−H]⁻.

### Synthesis of 3-((2S,4S,5R)-5-((bis(4-methoxyphenyl)(phenyl)methoxy)methyl)-4-(((1S,3S,3aS)-3-((phenylsulfonyl)methyl)tetrahydro-1H,3H-pyrrolo[1,2-c][1,3,2]oxazaphosphol-1-yl)oxy)tetrahydrofuran-2-yl)-6-methylpyrimidine-2,4(1H,3H)-dione

[chemical structure]

[3595] To a solution of dry 3-[(2S,4R,5R)-5-[[bis(4-methoxyphenyl)-phenyl-methoxy]methyl]-4-hydroxy-tetrahydrofuran-2-yl]-6-methyl-1H-pyrimidine-2,4-dione (1.65 g, 3.03 mmol) in THF (12.5 mL) was added triethylamine (0.93 mL, 6.67 mmol). (3S,3aS)-3-(benzenesulfonylmethyl)-1-chloro-3a,4,5,6-tetrahydro-3H-pyrrolo[1,2-c][1,3,2]oxazaphosphole (0.43M in THF, 10.6 mL, 4.54 mmol) was added fast dropwise. The resulting cloudy reaction solution was stirred at rt for 5 hr. TLC showed the reaction was complete. The reaction was quenched by water (27 μL). Anhydrous MgSO₄ (363 mg) was added. The mixture was filtered through celite, and the filtrate was concentrated to afford the crude product as an off-white foam. The crude product was purified by normal phase column chromatography applying 20-100% EtOAc in hexanes (each mobile phase contained 1% triethylamine) as the gradient to afford the title compound as a white foam (1.266 g, 50.5% yield). ¹H NMR (600 MHz, Chloroform-d) δ 9.07 (s, 1H), 7.93 (dd, J=7.8, 1.6 Hz, 2H), 7.64-7.58 (m, 1H), 7.53 (t, J=7.7 Hz, 2H), 7.51-7.47 (m, 2H), 7.41-7.36 (m, 4H), 7.25 (d, J=7.6 Hz, 2H), 7.19 (t, J=7.3 Hz, 1H), 6.79 (dd, J=9.0, 2.2 Hz, 4H), 6.16 (d, J=11.2 Hz, 1H), 5.45 (s, 1H), 5.04 (q, J=6.0 Hz, 1H), 4.17-4.11 (m, 1H), 3.783 (s, 3H), 3.777 (s, 3H), 3.73-3.62 (m, 3H), 3.58-3.53 (m, 1H), 3.52-3.47 (m, 1H), 3.42 (dd, J=14.6, 5.4 Hz, 1H), 3.06-2.97 (m, 1H), 2.95-2.88 (m, 1H), 2.86 (dd, J=10.3, 4.2 Hz, 1H), 2.03 (s, 3H), 1.85 (dp, J=12.2, 4.5 Hz, 1H), 1.78-1.70 (m, 1H), 1.66 (ddt, J=7.8, 5.5, 2.5 Hz, 1H), 1.61 (dt, J=13.6, 3.1 Hz, 1H), 1.21-1.11 (m, 1H); ³¹P NMR (243 MHz, Chloroform-d) δ 148.85; MS (ESI), 826.14 [M−H]⁻.

### Synthesis of (Z)—N′-(9-((2R,3R,4R,5R)-5-((bis(4-methoxyphenyl)(phenyl)methoxy)methyl)-3-((tert-butyldimethylsilyl)oxy)-4-(((1S,3S,3aS)-3-((phenylsulfonyl)methyl)tetrahydro-1H,3H-pyrrolo[1,2-c][1,3,2]oxazaphosphol-1-yl)oxy)tetrahydrofuran-2-yl)-8-oxo-8,9-dihydro-7H-purin-6-yl)-N,N-dimethylformimidamide

[chemical structure]

[3597] To a solution of dry N′-[9-[(2R,3S,5R)-5-[[bis(4-methoxyphenyl)-phenyl-methoxy]methyl]-3-[tert-butyl(dimethyl)silyl]oxy-4-hydroxy-tetrahydrofuran-2-yl]-8-oxo-7H-purin-6-yl]-N,N-dimethyl-formamidine (18.0 g, 23.84 mmol) in THF (135 mL) was added triethylamine (7.31 mL, 52.45 mmol). The reaction flask was set in a water bath. (3S,3aS)-3-(benzenesulfonylmethyl)-1-chloro-3a,4,5,6-tetrahydro-3H-pyrrolo[1,2-c][1,3,2]oxazaphosphole (0.43M in THF, 83.17 mL, 35.76 mmol) was added fast dropwise. The water bath was removed. The cloudy reaction solution was stirred at rt for 3 hr. TLC and LCMS showed the reaction was incomplete. Additional TEA (1.46 mL, 10.47 mmol) was added. Additional (3S,3aS)-3-(benzenesulfonylmethyl)-1-chloro-3a,4,5,6-tetrahydro-3H-pyrrolo[1,2-c][1,3,2]oxazaphosphole (0.43M in THF, 16.6 mL, 7.14 mmol) was also added fast dropwise. Stirred for another 1 hr. TLC showed the reaction was complete. The reaction was quenched by water (343 μL). Anhydrous MgSO₄ (4.577 g) was added. The mixture was filtered through celite, and the filtrate was concentrated to afford the crude product as a white foam. The crude product was purified by normal phase column chromatography applying 20-100% EtOAc in hexanes (each mobile phase contained 1% triethylamine) as the gradient to afford the title compound as a white foam (17.87 g, 72.2% yield). ¹H NMR (600 MHz, Chloroform-d) δ 8.72 (s, 1H), 8.28 (s, 1H), 8.16 (s, 1H), 7.87-7.83 (m, 2H), 7.56-7.52 (m, 1H), 7.49-7.42 (m, 4H), 7.38-7.31 (m, 4H), 7.20 (dd, J=8.4, 6.8 Hz, 2H), 7.17-7.12 (m, 1H), 6.78-6.72 (m, 4H), 5.94 (d, J=5.5 Hz, 1H), 5.34 (t, J=5.4 Hz, 1H), 4.96 (q, J=6.2 Hz, 1H), 4.78 (dt, J=10.8, 4.5 Hz, 1H), 4.01 (q, J=4.4 Hz, 1H), 3.75 (s, 6H), 3.67 (dq, J=11.5, 6.0 Hz, 1H), 3.48-3.35 (m, 4H), 3.17 (dd, J=10.2, 4.9 Hz, 1H), 3.13 (s, 3H), 3.10 (s, 3H), 3.03 (qd, J=9.5, 4.0 Hz, 1H), 1.89-1.81 (m, 1H), 1.78-1.72 (m, 1H), 1.69-1.62 (m, 1H), 1.15-1.06 (m, 1H), 0.81 (s, 9H), −0.02 (s, 3H), −0.14 (s, 3H); ³¹P NMR (243 MHz, Chloroform-d) δ 152.36; MS (ESI), 1036.85 [M−H]⁻.

### Synthesis of 9-((2R,4S,5R)-5-((bis(4-methoxyphenyl)(phenyl)methoxy)methyl)-4-(((1S,3S,3aS)-3-((phenylsulfonyl)methyl)tetrahydro-1H,3H-pyrrolo[1,2-c][1,3,2]oxazaphosphol-1-yl)oxy)tetrahydrofuran-2-yl)-7,9-dihydro-1H-purine-6,8-dione

[chemical structure]

[3599] To a solution of dry 9-[(2R,4R,5R)-5-[[bis(4-methoxyphenyl)-phenyl-methoxy]methyl]-4-hydroxy-tetrahydrofuran-2-yl]-1,7-dihydropurine-6,8-dione (6.0 g, 10.52 mmol) in THF (90 mL) was added triethylamine (3.08 mL, 22.08 mmol). (3S,3aS)-3-(benzenesulfonylmethyl)-1-chloro-3a,4,5,6-tetrahydro-3H-pyrrolo[1,2-c][1,3,2]oxazaphosphole (0.89M in THF, 18.9 mL, 16.82 mmol) was added fast dropwise. Stirred at rt for 2 hr. LCMS showed the conversion rate was around 67%. Stirred for another 6 hr. TLC showed the starting material was faint. The reaction was quenched by water (113 μL). Anhydrous MgSO₄ (1.51 g) was added. The mixture was filtered through celite, and the filtrate was concentrated to afford the crude product as an off-white foam. The crude product was purified by normal phase column chromatography applying 0-100% ACN in EtOAc (each mobile phase contained 5% triethylamine) as the gradient to afford the title compound as an off-white foam (5.32 g, 59.3% yield). ¹H NMR (600 MHz, DMSO-d6) δ 11.42 (s, 2H), 7.88-7.81 (m, 3H), 7.60 (t, J=7.4 Hz, 1H), 7.52 (t, J=7.6 Hz, 2H), 7.33 (d, J=7.8 Hz, 2H), 7.25-7.14 (m, 7H), 6.79 (dd, J=18.2, 8.5 Hz, 4H), 6.11 (dd, J=8.1, 4.6 Hz, 1H), 5.10-5.00 (m, 2H), 3.86-3.79 (m, 2H), 3.73-3.69 (m, 6H), 3.69-3.65 (m, 1H), 3.58 (dt, J=9.6, 5.3 Hz, 1H), 3.24 (dd, J=14.3, 7.6 Hz, 1H), 3.11 (dd, J=10.4, 3.8 Hz, 1H), 3.08-3.03 (m, 1H), 2.85 (dt, J=13.2, 6.1 Hz, 1H), 2.81-2.73 (m, 1H), 2.60 (qd, J=9.8, 3.9 Hz, 1H), 2.27 (dt, J=14.1, 7.4 Hz, 1H), 1.63-1.50 (m, 2H), 1.11 (q, J=10.2, 9.7 Hz, 1H); ³¹P NMR (243 MHz, DMSO-d6) δ 144.02; MS (ESI), 852.62 [M−H]⁻.

[3600] Preparation for additional compounds useful for oligonucleotide preparation were described below as examples.

[3601] General Experimental Procedure (A) for Chloro Reagent (2)

[chemical structure]

[3602] Dithiol (360 mmol) was dissolved in toluene (720 mL) under argon (3000 mL single neck flask) then 4-methylmorpholine (35.4 mL, 792 mmol) was added. This mixture was added dropwise via cannula over 30 min to an ice-cold solution of phosphorus trichloride (720 mL, 396 mmol) in toluene (720 mL) under argon atmosphere. After warming to room temperature for 1 h, the mixture was filtered carefully under vacuum/argon. The resulting filtrate was concentrated by rotary evaporation (flushing with Ar) then dried under high vacuum for 2 h. The resulting crude compound was isolated as thick oil, which was dissolved in THF to obtain a 1 M stock solution and this solution was used in the next step without further purification.

[3603] Data for 2: Synthesized from compound 1, by following the general procedure A. ³¹P NMR (243 MHz, THF-CDCl₃, 1:2) δ 168.77, 161.4

[3604] General Experimental Procedure (B) for Monomers (5 and 6)

[chemical structure]

[3605] The 5′-ODMTr protected nucleoside 3 or 4 (6.9 mmol) was dried in a three neck 250 mL round bottom flask by co-evaporating with anhydrous toluene (50 mL) followed by under high vacuum for 18 h. The dried nucleoside was dissolved in dry THF (35 mL) under argon atmosphere. Then, triethylamine (24.4 mmol, 3.5 equiv.) was added into the reaction mixture, then cooled to ˜−10° C. A THF solution of the crude chloro reagent (1 M solution, 2.5 equiv., 17.4 mmol) was added to the above mixture through cannula over ˜5 min, then, gradually warmed to room temperature over about 1 h. LCMS showed that the starting material was consumed. The reaction mixture was filtered carefully under vacuum/argon and the resulting filtrate was concentrated under reduced pressure to give a yellow foam which was further dried under high vacuum overnight. Crude mixture was purified by silica gel column [Column was pre-deactivated using acetonitrile then ethyl acetate (5% TEA) and then equilibrated using ethyl acetate-hexanes] chromatography using ethyl acetate and hexane as eluents.

[3606] Stereorandom (Rp/Sp) monomer 5: Yield 86%. Reaction was carried out using nucleoside 3 and chloro reagent 2 by following the general procedure B. ³¹P NMR (243 MHz, CDCl₃) δ 171.62, 155.50, 146.84, 146.17; MS (ES) m/z calculated for C₃₅H₃₉N₂O₇PS₂ [M+K]⁺ 733.16, Observed: 733.40 [M+K]⁺.

[3607] Stereorandom (Rp/Sp) monomer 6: Yield 73%. Reaction was carried out using nucleoside 4 and chloro reagent 2 by following the general procedure B. ³¹P NMR (243 MHz, CDCl₃) δ 121.87, 106.20, 93.58, 92.99; MS (ES) m/z calculated for C₃₅H₄₀N₃O₆PS₂ [M+K]⁺ 773.28, Observed: 773.70 [M+K]⁺.

[3608] General Experimental Procedure (C) for PS-PN Dimers (7 and 8):

[chemical structure]

[3609] To a stirred solution of monomer 5 or 6 (0.10 mmol, 2 equiv., pre-dried by co-evaporation with dry acetonitrile and kept it under vacuum for minimum 12 h) in dry acetonitrile (0.5 mL) was added a solution of 2-azido-1,3-dimethylimidazolinium hexafluorophosphate (0.11 mmol, 2.25 equiv.) in acetonitrile (0.2 mL) under argon atmosphere at room temperature. Resulting reaction mixture was stirred for 10 mins then DMTr protected alcohol (0.05 mmol, pre-dried by co-evaporation with dry acetonitrile and kept it under vacuum for minimum 12 h) in dry acetonitrile (0.25 mL) and 1,8-Diazabicyclo [5.4.0] undec-7-ene (0.23 mmol, 5 equ, 0.23 ml of 1 M solution in dry acetonitrile) are added. The reaction was monitored and analyzed by LCMS. Approximate reaction completion time 10-20 mins.

[3610] Stereorandom dimer 7: Reaction was carried out using 5 by following the general procedure C. MS (ES) m/z calculated for C₆₇H₇₂N₇O₁₄PS [M+K]⁺ 1300.42, Observed: 1300.70 [M+K]⁺.

[3611] Stereopure (Rp) dimer 8: Reaction was carried out using 6 by following the general procedure C. MS (ES) m/z calculated for C₆₇H₇₃N₈O₁₃PS [M+K]⁺ 1299.44, Observed: 1299.65 [M+K]⁺.

[3612] General Experimental Procedure (D) for PS-PS Dimers (9 and 10):

[chemical structure]

[3613] To a stirred solution of monomer 5 or 6 (0.10 mmol, 2 equiv., pre-dried by co-evaporation with dry acetonitrile and kept it under vacuum for minimum 12 h) in dry acetonitrile (0.5 mL) was added a solution of 5-phenyl-3H-1,2,4-dithiazol-3-one (0.12 mmol, 2.5 equiv., 0.2 M) in acetonitrile under argon atmosphere at room temperature. Resulting reaction mixture was stirred for 10 mins then DMTr protected alcohol (0.05 mmol, 1 equ, pre-dried by co-evaporation with dry acetonitrile and kept it under vacuum for minimum 12 h) in dry acetonitrile (0.2 mL) and 1,8-Diazabicyclo [5.4.0] undec-7-ene (0.23 mmol, 5 equ, 1 M solution in dry acetonitrile) are added. Once the reaction was completed (monitored by LCMS) then the reaction mixture was analyzed by LCMS.

[3614] Dimer 9: Reaction was carried out using monomer 5 by following the general procedure D. Reaction completion time about 30 mins. MS (ES) m/z calculated for C₆₂H₆₂N₄O₁₄PS₂ [M]⁻ 1181.34, Observed: 1181.66 [M]⁻.

[3615] Dimer 10: Reaction was carried out using monomer 6 by following the general procedure D. Reaction completion time about 20 h. MS (ES) m/z calculated for C₆₂H₆₃N₅O₁₃PS₂ [M]⁻ 1180.36, Observed: 1180.71 [M]⁻.

[3616] Additional useful compounds were prepared as examples:

[chemical structure]

[chemical structure]

[chemical structure]

[3617] MOE-G monomer 451: Yield 81%. ³¹P NMR (243 MHz, CDCl₃) δ 175.14, 158.52, 150.30, 148.81; MS (ES) m/z calculated for C₄₂H₅₀N₅O₉PS₂ [M+H]⁺ 864.29, Observed: 864.56 [M+H]⁺.

[3618] OMe-A monomer 452: Yield 92%. ³¹P NMR (243 MHz, CDCl₃) δ 175.65, 159.27, 151.04, 150.10; MS (ES) m/z calculated for C₄₃H₄₄N₅O₇PS₂ [M+H]⁺ 838.25, Observed: 838.05 [M+H]⁺.

[3619] OMe-U monomer 453: Yield 94%. ³¹P NMR (243 MHz, CDCl₃) δ 175.09, 162.04, 154.12, 153.58; MS (ES) m/z calculated for C₃₅H₃₉N₂O₈PS₂ [M+K]⁺ 749.15, Observed: 749.06 [M+K]⁺.

[3620] MOE-5-Me-C monomer 454: Yield 91%. ³¹P NMR (243 MHz, CDCl₃) δ 175.53, 162.04, 153.78, 153.61; MS (ES) m/z calculated for C₄₅H₅₀N₃O₉PS₂ [M+H]⁺ 872.28, Observed: 872.16 [M+H]⁺.

[3621] f-G monomer 455: Yield 97%. ³¹P NMR (243 MHz, CDCl₃) δ 176.88 (d), 161.94 (d), 154.16 (d), 152.48 (d); MS (ES) m/z calculated for C₃₉H₄₃FN₅O₇PS₂ [M+H]⁺ 808.24, Observed: 808.65 [M+H]⁺.

[3622] f-A monomer 456: Yield 99%. ³¹P NMR (243 MHz, CDCl₃) δ 177.43 (d), 159.63 (d), 149.76 (d), 149.55 (d); MS (ES) m/z calculated for C₄₂H₄₁FN₅O₆PS₂ [M+H]⁺ 826.23, Observed: 826.56 [M+H]⁺.

[3623] dA monomer 457: Yield 98%. ³¹P NMR (243 MHz, CDCl₃) δ 171.85, 154.47, 146.19, 144.48; MS (ES) m/z calculated for C₄₂H₄₂N₅O₆PS₂ [M+K]⁺ 846.20, Observed: 846.56 [M+K]⁺.

[3624] Mor-G monomer 458: Yield 72%. ³¹P NMR (243 MHz, CDCl₃) δ 121.26, 105.98, 93.48, 93.24; MS (ES) m/z calculated for C₃₉H₄₅N₆O₆PS₂[M+K]⁺ 827.22, Observed: 827.60 [M+K]⁺.

[3625] Mor-A monomer 459: Yield 37%. ³¹P NMR (243 MHz, CDCl₃) δ 121.87, 106.17, 93.23, 93.05; MS (ES) m/z calculated for C₄₂H₄₃N₆O₅PS₂ [M+K]⁺ 845.21, Observed: 845.32 [M+K]⁺.

[3626] Mor-C monomer 460: Yield 68%. ³¹P NMR (243 MHz, CDCl₃) δ 122.34, 106.05, 93.33, 92.6116; MS (ES) m/z calculated for C₄₁H₄₃N₄O₆PS₂ [M+K]⁺ 821.20, Observed: 821.54 [M+K]⁺.

[3627] In some embodiments, a sugar is acyclic. In some embodiments, the present disclosure provides technologies, e.g., reagents (e.g., phosphoramidites), conditions, methods, etc. for prepare oligonucleotides comprising a cyclic sugars. An example is described below for sm18.

[3628] Certain acyclic morpholine monomers.

[chemical structure]

[3629] A 5′-ODMTr protected morpholino nucleoside (5.05 mmol) was dried in a three neck 100 mL round bottom flask by co-evaporating with anhydrous toluene (50 mL) followed by under high vacuum for 18 h. The dried nucleoside was dissolved in dry THF (25 mL) under argon atmosphere. Then, triethylamine (17.6 mmol, 3.5 equiv.) was added into the reaction mixture, then cooled to ˜−10° C. A THF solution of the crude chloro reagent (1.4 M solution, 1.8 equiv., 9.09 mmol) was added to the above mixture through cannula over ˜3 min, then, gradually warmed to room temperature over about 1 h. LCMS showed that the starting material was consumed. Then filtered carefully under vacuum/argon and the resulting filtrate was concentrated under reduced pressure to give a yellow foam which was further dried under high vacuum overnight. Crude mixture was purified by silica gel column [Column was pre-deactivated using acetonitrile then ethyl acetate (5% TEA) and then equilibrated using ethyl acetate-hexanes] chromatography using ethyl acetate and hexane as eluents. Yield 66%. ³¹P NMR (243 MHz, CDCl₃) δ 154.93, 154.65, 154.58, 154.23, 150.54, 150.17, 145.69, 145.26; MS (ES) m/z calculated for C₃₇H₄₆N₃O₇PS [M+K]⁺ 746.24, Observed: 746.38 [M+K]⁺.

[chemical structure]

[3630] To a solution of WV-SM-53a/50a (6 g, 10.70 mmol) in DCM (40 mL) was added Et₃N (3.25 g, 32.11 mmol) and MsCl (2.45 g, 21.40 mmol) in DCM (20 mL) at 0° C. The mixture was stirred at 0° C. for 4 hr. TLC showed WV-SM-53a/50a was consumed and one new spot was detected. The reaction mixture was quenched by addition sat. NaHCO₃ (aq., 50 mL), and then extracted with EtOAc (50 mL*3). The combined organic layers were washed with brine (50 mL), dried over Na₂SO₄, filtered and concentrated under reduced pressure to give a residue. Compound 27 (8.0 g, crude) was obtained as a brown oil. TLC Petroleum ether:Ethyl acetate=1:3, R_{f}=0.50.

[3631] Two batches: To a solution of compound 27 (3.42 g, 5.35 mmol) in THF (20 mL) was added methanamine (10 g, 96.60 mmol, 30% purity). The mixture was stirred at 100° C. for 160 hr. LC-MS showed compound 27 was consumed and one main peak with desired MS was detected. TLC showed one main spot. 2 batches were combined and the reaction mixture was filtered and concentrated under reduced pressure to give a residue. The residue was purified by MPLC (SiO₂, Petroleum ether/Ethyl acetate=5:1 to 0:1, 5% TEA). WV-SM-56a (2.9 g, 47.21% yield) was obtained as yellow solid. ¹H NMR (400 MHz, CHLOROFORM-d) δ=7.29-7.24 (m, 2H), 7.20-7.06 (m, 8H), 6.72 (d, J=8.8 Hz, 4H), 6.08-5.87 (m, 1H), 3.71 (s, 6H), 3.58-3.42 (m, 1H), 3.19-3.05 (m, 1H), 3.05-2.91 (m, 1H), 2.83-2.75 (m, 1H), 2.72 (d, J=4.8 Hz, 2H), 2.31 (s, 3H), 1.61 (dd, J=0.9, 5.9 Hz, 3H), 1.36 (d, J=5.9 Hz, 3H), 0.96-0.77 (m, 3H). ¹³C NMR (101 MHz, CHLOROFORM-d) δ=163.71, 163.62, 158.47, 150.74, 150.58, 144.72, 135.94, 135.89, 135.86, 135.25, 135.15, 130.02, 129.93, 129.89, 127.90 (dd, J=2.9, 22.0 Hz, 1C), 126.83, 126.81, 113.10, 113.08, 111.28, 111.24, 86.45, 86.39, 81.89, 81.82, 81.00, 80.58, 63.39, 63.15, 60.40, 56.02, 55.23, 34.52, 34.17, 26.41, 23.11, 21.66, 21.59, 15.57, 15.09, 14.20, 12.46, 12.41. HPLC purity: 90.87%. LCMS (M+Na⁺): 596.3. SFC: dr=52.46: 47.54. TLC (ethyl acetate:methanol=9:1), R_{f}=0.19.

[chemical structure]

[chemical structure]

[3632] Preparation of Compound 2. 2 batches: To a solution of compound 1 (50 g, 137.99 mmol) in EtOH (1000 mL) was added NaIO₄ (30.00 g, 140.26 mmol) in H₂O (500 mL). The mixture was stirred in dark at 15° C. for 2 hr. TLC indicated compound 1 was consumed and one new spot formed. Compound 2 (99.44 g, crude) was obtained as a white suspension liquid, which was used next step. TLC (Ethyl acetate:Methanol=9:1), R_{f}=0.49.

[3633] Preparation of Compound 3. 2 batches: To a stirred solution of compound 2 (49.72 g, 137.99 mmol) in EtOH (1000 mL) and H₂O (500 mL) was added NaBH₄ (10.44 g, 275.98 mmol) in small portions at 0° C. The mixture was stirred at 15° C. for 1 hr. TLC indicated compound 2 was consumed and one new spot formed. 1N HCl was added to pH=7. The solvent was removed to yield a brown solid. The solid was added sat. Na₂SO₃ (aq., 500 mL) and then extracted with EtOAc (500 mL*8). The combined organic phase was dried by Na₂SO₄. Removal of the solvent under reduced pressure gave the product. Compound 3 (86.7 g, 86.22% yield) was obtained as a white solid. LCMS (M+Na⁺) 386.9, purity 96.31%. TLC (Ethyl acetate:Methanol=9:1), R_{f}=0.38.

[3634] Preparation of compound 4. To a solution of compound 3 (86.7 g, 237.96 mmol) and TEA (120.40 g, 1.19 mol) in DCM (700 mL) was added MsCl (59.97 g, 523.51 mmol) in DCM (300 mL). The mixture was stirred at 0° C. for 4 hr. TLC indicated compound 3 was consumed, and two new spots formed. The reaction mixture was quenched by addition water (500 mL) and stayed for 36 hr. TLC indicated the intermediate was consumed, and one spot left. The water layer was extracted with DCM (800 mL*3). The combined organic layers were dried over Na₂SO₄, filtered and concentrated under reduced pressure to give a residue. The residue was purified by column chromatography (SiO₂, Petroleum ether/Ethyl acetate=20/1 to 0:1 and then MeOH/EtOAc=0/1 to 1/10). Compound 4 (75 g, 74.26% yield) was obtained as a white solid. TLC (Petroleum ether:Ethyl acetate=0: 1), R_{f}=0.38; (Ethyl acetate:Methanol=9:1), R_{f}=0.13.

[3635] Preparation of compound 5. To a solution of compound 4 (75 g, 176.71 mmol) in DMF (650 mL) was added HI (100.46 g, 353.42 mmol, 59.09 mL, 45% purity). The mixture was stirred at 15° C. for 0.5 hr. TLC showed compound 4 was consumed and one main spot was detected. The reaction mixture was quenched by sat. NaHCO₃ (aq.) to pH=7. The residue was extracted with EtOAc (800 mL*5). The combined organic layers were washed with brine (600 mL), dried over Na₂SO₄, filtered and concentrated under reduced pressure to give a residue. Compound 5 (91.15 g, crude) was obtained as a brown oil. TLC (Ethyl acetate:Methanol=9:1), R_{f}=0.80.

[3636] Preparation of compound 6. A mixture of compound 5 (91 g, 164.75 mmol), Pd/C (28 g, 10% purity) and NaOAc (122.85 g, 1.50 mol) in EtOH (700 mL) was degassed and purged with H₂ for 3 times, and then the mixture was stirred at 15° C. for 24 hr under H₂ atmosphere (15 psi). TLC showed compound 5 was consumed and one main spot was found. The Pd/C was filtered off and the filtrate evaporated. The residue was added with water (500 mL), extracted with EtOAc (500 mL*6). And then the organic layer was washed with brine (500 mL) and dried over Na₂SO₄, filtered and concentrated under reduced pressure to give a residue. Compound 6 (76 g, crude) was obtained as a brown oil. TLC (Petroleum ether:Ethyl acetate=1:3), R_{f}=0.12.

[3637] Preparation of compound 7. To a solution of compound 6 (70 g, 164.15 mmol) in MeOH (1000 mL) was added NH₃·H₂O (1.15 kg, 8.21 mol, 1.26 L, 25% purity). The mixture was stirred at 15° C. for 16 hr. TLC indicated compound 6 was consumed and one new spot formed. The reaction mixture was concentrated under reduced pressure to remove MeOH and the water phase was extracted with EtOAc (300 mL*8). The organic phase was dried with Na₂SO₄, filtered and concentrated under reduced pressure to give a residue. The residue was purified by column chromatography (SiO₂, Petroleum ether/Ethyl acetate=20/1 to 0:1). Compound 7 (33 g, 62.37% yield) was obtained as a white solid. TLC (Ethyl acetate:Methanol=9:1), R_{f}=0.39.

[3638] Preparation of compound 8. To a solution of compound 7 (33 g, 102.38 mmol) in pyridine (120 mL) was added DMTCl (41.63 g, 122.85 mmol). The mixture was stirred at 15° C. for 4 hr. TLC indicated compound 7 was consumed and one new spot formed. The reaction mixture was diluted with sat. NaHCO₃ (aq., 100 mL) and extracted with EtOAc (200 mL*5). The combined organic layers were dried over Na₂SO₄, filtered and concentrated under reduced pressure to give a residue. The residue was purified by column chromatography (SiO₂, Petroleum ether/Ethyl acetate=20/1 to 1/5, 5% TEA). Compound 8 (55 g, 86.00% yield) was obtained as a yellow solid. TLC (Petroleum ether:Ethyl acetate=0:1), R_{f}=0.65.

[3639] Preparation of WV-SM-47a. A mixture of compound 8 (55 g, 88.04 mmol), NaOH (42.26 g, 1.06 mol) in DMSO (300 mL) and Water (300 mL) was degassed and purged with N₂ for 3 times, and then the mixture was stirred at 90° C. for 16 hr under N₂ atmosphere. LCMS and TLC showed the compound 8 was completed, and one main peak with desired MS 545 (NEG, M−H⁺) was found. The reaction mixture was quenched by addition EtOAc (1000 mL), and then diluted with H₂O (1000 mL) and extracted with EtOAc (1000 mL*4). The combined organic layers were washed with brine (1000 mL), dried over Na₂SO₄, filtered and concentrated under reduced pressure to give a residue. The residue was purified by column chromatography (SiO₂, Petroleum ether/Ethyl acetate=20/1 to 1/3, 5% TEA). WV-SM-47a (37.5 g, 77.92% yield) was obtained as a white solid. LCMS (M−H⁺) 545.3. TLC (Petroleum ether:Ethyl acetate=0:1, 5% TEA), R_{f}=0.29.

[3640] Preparation of compound 9. To a solution of WV-SM-47a (37.5 g, 68.60 mmol) in DCM (400 mL) was added pyridine (81.40 g, 1.03 mol, 83.06 mL) and Dess-Martin periodinane (34.92 g, 82.33 mmol). The mixture was stirred at 20° C. for 4 hr. LC-MS showed WV-SM-47a was consumed completely and new peak with desired MS was detected. The reaction mixture was quenched by addition sat. NaHCO₃ (aq., 1000 mL) and sat. Na₂SO₃ (aq.) 1000 mL, and then extracted with EtOAc (100 mL*5). The combined organic layers were washed with brine 500 mL, dried over Na₂SO₄, filtered and concentrated under reduced pressure to give a residue. Compound 9 (43 g, crude) was obtained as a yellow solid. LCMS (M−H⁺) 543.3.

[3641] Preparation of WV-NU-53a and WV-NU-50a. To a solution of compound 9 (37.36 g, 68.60 mmol) in THF (300 mL) was added MeMgBr (3 M, 68.60 mL) at −40° C. The mixture was stirred at −40-15° C. for 6 hr. LC-MS showed compound 9 was consumed completely and new peaks with mass was detected. The reaction mixture was quenched by addition water (20 mL) at 0° C., and then extracted with EtOAc (300 mL*3). The combined organic layers were washed with brine (200 mL), dried over Na₂SO₄, filtered and concentrated under reduced pressure to give a residue. TLC showed one main spot. The residue was purified by column chromatography (SiO₂, Petroleum ether/Ethyl acetate=20/1 to 0/1, 5% TEA). 6 g of the residue was purified by SFC (column: DAICEL CHIRALPAK AD-H (250 mm*30 mm, 5 um); mobile phase: [0.1% NH₃H₂O IPA]; B %: 39%-39%, 9.33 min). And crude WV-SM-50a was purified by prep-HPLC (column: Agela Durashell 10 u 250*50 mm; mobile phase: [water (0.04% NH₃H₂O)-ACN]; B %: 37%-56%, 20 min). WV-SM-53a (1.4 g, 23.33% yield) was obtained as a white solid. WV-SM-50a (1.8 g, 30.00% yield) was obtained as a white solid. 0.5 g of WV-SM-53a: ¹H NMR (400 MHz, CHLOROFORM-d) δ=7.37-7.30 (m, 2H), 7.28-7.18 (m, 8H), 7.12 (d, J=1.1 Hz, 1H), 6.80 (d, J=8.6 Hz, 4H), 6.08 (q, J=5.8 Hz, 1H), 4.09-3.99 (m, 1H), 3.79 (d, J=0.9 Hz, 6H), 3.51 (q, J=5.0 Hz, 1H), 3.20-3.05 (m, 2H), 2.70 (q, J=7.1 Hz, 2H), 1.71 (d, J=1.1 Hz, 3H), 1.46 (d, J=6.0 Hz, 3H), 1.14-1.10 (m, 3H). ¹³C NMR (101 MHz, CHLOROFORM-d) δ=163.19, 158.54, 150.48, 144.39, 135.53, 134.91, 129.86, 129.81, 127.90, 127.86, 126.93, 113.15, 111.48, 86.73, 81.44, 81.24, 68.14, 63.45, 55.22, 45.74, 21.45, 18.01, 12.43. HPLC purity: 99.04%. LCMS (M−H⁺): 559.0. SFC dr=99.83: 0.17. TLC (Petroleum ether:Ethyl acetate=1:3), R_{f}=0.28. 0.9 g of WV-SM-53a: ¹H NMR (400 MHz, CHLOROFORM-d) δ=7.36-7.30 (m, 2H), 7.29-7.15 (m, 9H), 7.13 (s, 1H), 6.80 (d, J=8.8 Hz, 4H), 6.08 (q, J=6.0 Hz, 1H), 4.11-3.97 (m, 1H), 3.79 (s, 6H), 3.51 (q, J=4.9 Hz, 1H), 3.13 (dq, J=5.3, 10.1 Hz, 2H), 1.72 (s, 3H), 1.47 (d, J=6.2 Hz, 3H), 1.10 (d, J=6.4 Hz, 3H). ¹³C NMR (101 MHz, CHLOROFORM-d) δ=163.19, 158.54, 150.47, 144.39, 135.50, 134.92, 129.86, 129.81, 127.89, 127.87, 126.94, 113.15, 111.48, 86.73, 81.44, 81.25, 68.14, 63.45, 55.22, 45.19, 21.46, 18.02, 12.44. HPLC purity: 97.56%. LCMS (M−H⁺): 559.1, purity 92.9%. SFC dr=98.49: 1.51. 1.75 g of WV-SM-50a: ¹H NMR (400 MHz, CHLOROFORM-d) δ=8.41 (s, 1H), 7.35-7.31 (m, 2H), 7.26-7.19 (m, 7H), 7.11 (d, J=1.3 Hz, 1H), 6.82-6.77 (m, 4H), 6.00 (q, J=5.7 Hz, 1H), 4.09-4.00 (m, 1H), 3.79 (d, J=0.9 Hz, 6H), 3.51-3.44 (m, 1H), 3.22 (dd, J=5.3, 10.1 Hz, 1H), 3.02 (dd, J=5.3, 10.1 Hz, 1H), 2.20 (br s, 1H), 1.72 (d, J=0.9 Hz, 3H), 1.47 (d, J=6.1 Hz, 3H), 1.17 (d, J=6.6 Hz, 3H). ¹³C NMR (101 MHz, CHLOROFORM-d) δ=163.29, 158.50, 150.43, 144.40, 135.55, 135.45, 134.86, 129.88, 129.84, 127.93, 127.84, 126.94, 113.12, 111.46, 86.55, 82.48, 82.43, 67.59, 63.24, 55.22, 21.40, 19.17, 12.43. HPLC purity: 96.51%. LCMS (M−H⁺): 559.2, purity 93.04%. SFC dr=0.88: 99.12.

### Example 3. Preparation of Oligonucleotide and Compositions

[3642] Various technologies for preparing oligonucleotides and oligonucleotide compositions (both stereorandom and chirally controlled) can be utilized in accordance with the present disclosure, including, for example, methods and reagents described in U.S. Pat. No. 9,982,257, US 20170037399, US 20180216108, US 20180216107, U.S. Pat. No. 9,598,458, WO 2017/062862, WO 2018/067973, WO 2017/160741, WO 2017/192679, WO 2017/210647, WO 2018/098264, WO 2018/223056, WO 2018/237194, WO 2019/032607, WO 2019/055951, WO 2019/075357, WO 2019/200185, WO 2019/217784, WO 2019/032612, WO 2020/191252, and/or WO 2021/071858, the methods and reagents of each of which are incorporated herein by reference. Many oligonucleotides and compositions thereof, e.g., various oligonucleotides and compositions thereof in Table 1, were prepared and assessed and were confirmed to provide various activities, e.g., adenosine editing.

[3643] Certain useful cycles are described below as examples for preparing oligonucleotides.

[chemical structure]

[chemical structure]

Each B is independently a nucleobase such as BA described herein (e.g., A, C, G, T, U, etc.). Each B^{PRO} is independently an optionally protected nucleobase such as BA described herein (e.g., A^{bz}, C^{ac}, G^{ibu}, T, U, etc. suitable for oligonucleotide synthesis). As shown, various linkages can be constructed to connect monomers to nucleosides or oligonucleotides including those on solid support. As appreciate by those skilled in the art these cycles can be utilized to couple monomers to —OH of various other types of sugars.

[3644] In some embodiments, preparations include one or more DPSE and/or PSM cycles.

[3645] A number of oligonucleotide compositions were synthesized and assessed. Observed MS data of oligonucleotides in some prepared oligonucleotide compositions are as follows (when multiple numbers are presented for the same oligonucleotide, the numbers can be MS data observed in different batches/experiments): WV-20666: 10167.1; WV-20689: 10183; WV-20690: 10198.4; WV-20691: 10215.3; WV-20692: 10230.3; WV-20693: 10246.5; WV-20694: 10262.7; WV-20695: 10278.9; WV-20696: 10294.3; WV-20697: 10311.3; WV-20698: 10327; WV-20699: 10342.9; WV-20700: 10358.5; WV-20701: 10376; WV-20702: 10391.1; WV-20703: 10407.5; WV-20704: 10423.6; WV-20706: 10199; WV-20707: 10215.3; WV-20708: 10230.6; WV-20709: 10246.5; WV-20710: 10262.6; WV-20711: 10279.3; WV-20712: 10294.2; WV-20713: 10310.8; WV-20714: 10327; WV-20715: 10342.9; WV-20716: 10358.7; WV-20717: 10246.3; WV-20718: 10262.7; WV-20719: 10278.3; WV-20720: 10294.2; WV-20721: 10311.4; WV-20722: 10327.1; WV-20723: 10342.8; WV-20724: 10358.7; WV-20725: 10374.8; WV-20726: 10391; WV-20727: 10182.9; WV-20728: 10182.7; WV-20729: 10182.7; WV-20730: 10182.9; WV-20731: 10230.8; WV-20732: 10199.1; WV-20733: 10663.7; WV-20734: 10194.7; WV-20735: 10222.7; WV-20736: 10250.5; WV-20737: 10278.3; WV-20738: 10306.7; WV-20739: 10334.8; WV-20740: 10362.9; WV-20741: 10194.8; WV-20742: 10208.5; WV-20743: 10236.8; WV-20744: 10263.9; WV-20745: 10293.1; WV-20746: 10320.4; WV-20747: 10093.9; WV-20748: 10098.1; WV-20749: 10101.9; WV-20750: 10106.4; WV-20751: 10110.5; WV-20752: 10113.5; WV-20753: 10118.3; WV-20754: 10122.6; WV-20755: 10098; WV-20756: 10100; WV-20757: 10104.3; WV-20758: 10107.7; WV-20759: 10111.8; WV-20760: 10116.7; WV-23388: 10098; WV-23395: 10612.3; WV-24111: 10046.8; WV-24112: 10047; WV-24113: 10047; WV-24114: 10046.8; WV-24115: 10047; WV-24116: 10046.8; WV-24117: 10046.9; WV-24118: 10046.8; WV-24119: 10046.9; WV-24120: 10047.1; WV-24121: 10047; WV-24122: 10047.1; WV-24123: 10047; WV-24124: 10047; WV-24125: 10046.9; WV-24126: 10046.9; WV-24127: 10047; WV-24128: 10046.5; WV-24129: 10047; WV-24130: 10046.8; WV-24131: 10046.8; WV-24132: 10047; WV-24133: 10047.1; WV-24134: 10047; WV-24135: 10047; WV-24136: 10046.9; WV-24137: 10047.1; WV-24138: 10047; WV-24139: 10046.8; WV-24140: 10046.4; WV-24141: 10046.9; WV-24142: 10047; WV-24143: 10047.1; WV-24144: 10047; WV-24145: 10047.1; WV-24146: 10046.9; WV-24147: 10046.7; WV-24148: 10047; WV-24149: 10047; WV-24150: 10047.1; WV-24151: 10047.1; WV-24152: 10047.1; WV-24153: 10047.1; WV-24154: 10047.1; WV-24155: 10047.1; WV-24156: 10046.7; WV-24157: 10047; WV-24158: 10047.1; WV-27457: 12613.1; WV-27458: 11954.6; WV-27459: 12631; WV-27460: 11972.7; WV-27521: 10064.1; WV-31133: 10737.8; WV-31134: 10869.1; WV-31135: 10790.3; WV-31137: 10779.4; WV-31138: 10788.2; WV-31139: 10039.1; WV-31140: 10168.8; WV-31141: 10091.0; WV-31143: 10079.0; WV-31144: 10089.6; WV-31632: 10772.7; WV-31633: 10786.6; WV-31634: 10072.7; WV-31635: 10087.2; WV-31748: 10762.5; WV-31749: 10064.4; WV-28788: 10169.1; WV-27458: 11954.6; WV-31940: 10285.5; WV-35741: 12352.0; WV-42028: 10252.9 (calcd. 10254.9); WV-42680: 10293.4 (calcd. 10294.9); WV-44278: 10326.5 (calcd. 10329); WV-44279: 10331.2 (calcd. 10333); WV-44280: 10346.3 (calcd. 10348); WV-44281: 10266.5 (calcd. 10268.9); WV-44282: 10195.8 (calcd. 10197.9); WV-44283: 10200.1 (calcd. 10201.8); WV-44284: 10135.4 (calcd. 10137.8); WV-44285: 10368.2 (calcd. 10369); WV-44286: 10307.1 (calcd. 10308.9); WV-44287: 10235 (calcd. 10237.9); WV-44288: 10175.9 (calcd. 10177.8); WV-44327: 10398.4 (calcd. 10399.1); WV-44328: 10357.7 (calcd. 10359.1). Many others were also prepared, characterized and assessed, e.g., see those in the Figures.

[3646] As described and confirmed herein, technologies of the present disclosure are useful for preparing various compositions of oligonucleotides comprising various structural features. In some embodiments, as confirmed herein, provided technologies, e.g., those utilizing chiral auxiliaries comprising electron-withdrawing groups (e.g., R^{C11} comprising electron-withdrawing groups (e.g., —SO₂R^{C1}, —C(O)R^{C1}, etc.)) are particularly useful for preparing chirally controlled compositions of oligonucleotides comprising 2′-OH sugars (e.g., sugars with R^{2s}═OH, such as sugars typically found in natural RNA), particularly when such sugars are bonded to chirally controlled internucleotidic linkages. A preparation of WV-29874 is described below as an example.

[3647] An automated solid-phase synthesis of a chirally controlled oligonucleotide composition (WV-29874) at 25 umol scale was performed according to the cycles below:

| | oper- | | | waiting |
|---|---|---|---|---|
| Step | ation | reagents and solvent | volume | time |
| 1 | detrity- | 3% TCA/DCM | 10 mL | 65 s |
| | lation | | | |
| 2 | coup- | 0.2M monomer/20% IBN-MeCN 0.5M | 0.5 mL | 8 min |
| | ling | PhIMT/MeCN | 1.0 mL | |
| 3 | cap-1 | 20% Ac₂O, 30% 2,6-lutidine/ | 2.0 mL | 2 min |
| | | MeCN | | |
| 4 | sulfuri- | 0.2M XH/pyridine | 2.0 mL | 6 min |
| | zation | | | |
| 5 | cap-2 | 20% Ac₂O, 30% 2,6-lutidine/ | 1.0 mL | 45 s |
| | | MeCN 20% | | |
| | | MeIm/MeCN | 1.0 mL | |

IBN: isobutyronitrile;
MeIm: N-methylimidazole;
PhIMT: N-phenylimidazolium triflate;
XH: xanthane hydride.
The cycles were performed multiple times until the desired length was achieved. PSM phosphoramidites were utilized for formation of chirally controlled internucleotidic linkages (for 2′-OH, protected with TBS (t-butyldimethylsilyl)).

[3648] After completion of the synthesis cycles, PSM chiral auxiliary groups were removed by an anhydrous base treatment (DEA treatment). The CPG was treated with 40% MeNH₂ (5.0 mL) for 30 min at 35° C., then cooled to room temperature and the CPG was separated by membrane filtration, washed with 8.0 mL of DMSO. To the filtrate, TEA (triethylamine)-3HF (5.0 mL) was added and stirred for 1 h at 45° C. which can remove TBS protection groups from 2′-OH. The reaction mixture was cooled to room temperature and diluted with 10 mL of 50 mM NaOAc (pH 5.2). The crude material was analyzed by LTQ and RP-UPLC. The crude materials were purified by RP-HPLC with a linear gradient of MeCN in 50 mM TEAA (triethylammonium acetate), desalting by tC18 SepPak cartridge to obtain the target oligonucleotide.

[3649] Desalting was performed using the following procedure:

Evaporate MeCN from samples if present.
Condition column with 4 CV of 100% acetonitrile (HPLC grade).
Rinse column with 2 CV of 40% MeCN in Millipore Bio-Pak water, Endotoxin-Free.
Rinse column with 4 CV of water (Millipore Bio-Pak, Endotoxin-Free).
Equilibrate column with 2 CV of 50 mM TEAA in Millipore Bio-Pak water, Endotoxin-Free.
Load pure fractions onto equilibrated column. In some embodiments, loading by gravity provide the greatest amount of binding, loading slowly with vacuum provide decent binding, and loading quickly with vacuum result in poor binding.
Wash column with 2 CV of BioPak water to wash away TEAA.
Wash column with 2 CV of 100 mM NaOAc to exchange the ammonium on the backbone of oligonucleotides with Sodium instead.
Wash column with BioPak water until conductivity of eluent is <20 uS/cm.
Elute product with 2 column volumes of 40% MeCN in Millipore Bio-Pak water, Endotoxin-Free.
Place on Speed-vac overnight at 30° C. to remove acetonitrile and to concentrated.

[3650] Results from one preparation: Synthesis scale: 25 umol; Crude ODs: 874 ODs; Crude UPLC purity: 32.17%; Crude LTQ purity: 62.45%; Final ODs: 59.8 OD; Final UPLC purity: 59.85%; Final MS purity: 74.51%; and Final Observed MS: 10064.4 (Calculated 10,063.68).

[3651] In accordance with the present disclosure, many technologies can be utilized by those skilled in the art to prepare oligonucleotides and compositions of the present disclosure.

[3652] For example, various chirally controlled oligonucleotide compositions were prepared. Certain useful procedures were described below as examples. In some embodiments, oligonucleotides comprises mixed PS (phosphorothioate)/PO (natural phosphate linkage)/PN (e.g., phosphoryl guanidine internucleotidic linkages such as n001) backbone. Oligonucleotides with various numbers of PS/PO/PN linkages (e.g., see Table 1) were prepared using technologies in accordance with the present disclosure. For example, in some embodiments, phosphodiester (PO) linkage were formed using cyanoethyl amidites, phosphorothioate (PS) linkages (Sp and Rp; in some embodiments, all Sp) were formed using DPSE chiral amidites, phosphoroamidate linkages (PN; e.g., n001) (Sp and Rp) linkages were formed using PSM amidites. Oligonucleotides typically comprise various sugar modifications, such as 2′-modifications like 2′-OMe, 2′-F and 2′-MOE, etc. (e.g., see Table 1). In some embodiments, oligonucleotides comprise additional moieties such as triantennary GalNAc moiety at, e.g., 5′-end. For introduction of GalNAc moiety at 5′-end, in some embodiments oligonucleotides were synthesized by coupling with C-6 amino modifier as the last coupling cycle and after purification and desalting were conjugated with tri-antennary GalNAc to make conjugates.

### Example Procedure for Preparation of Oligonucleotide Compositions (25 μmol Scale)

[3653] For chirally controlled PS linkages, DPSE amidites were used and for chirally controlled PN linkages such as n001, PSM amidites were used. Automated solid-phase synthesis of oligonucleotides was performed according to cycles shown below: Regular amidite cycle for PO linkages, DPSE amidite cycle for chirally controlled PS linkages, and PSM amidite cycles for chirally controlled PN linkages such as n001.

### Regular Amidite Synthetic Cycle

| | | | | waiting |
|---|---|---|---|---|
| step | operation | reagents and solvent | volume | time |
| 1 | detritylation | 3% TCA/DCM | 10 mL | 65 s |
| 2 | coupling | 0.2M monomer/20% IBN-MeCN | 0.5 mL | 8 min |
| | | 0.5M CMIMT/MeCN | 1.0 mL | |
| 3 | oxidation | 50 mM I₂/pyridine-H₂O (9:1, v/v) | 2.0 mL | 1 min |
| 4 | cap-2 | 20% Ac₂O, 30% 2,6-lutidine/MeCN | 1.0 mL | 45 s |
| | | 20% MeIm/MeCN | 1.0 mL | |

### DPSE Amidite Synthetic Cycle

| | | | | waiting |
|---|---|---|---|---|
| step | operation | reagents and solvent | volume | time |
| 1 | detritylation | 3% TCA/DCM | 10 mL | 65 s |
| 2 | coupling | 0.2M monomer/20% IBN-MeCN | 0.5 mL | 8 min |
| | | 0.5M CMIMT/MeCN | 1.0 mL | |
| 3 | cap-1 | 20% Ac₂O, 30% 2,6-lutidine/ | 2.0 mL | 2 min |
| | | MeCN | | |
| 4 | sulfurization | 0.2M XH/pyridine | 2.0 mL | 6 min |
| 5 | cap-2 | 20% Ac₂O, 30% 2,6-lutidine/ | 1.0 mL | 45 s |
| | | MeCN | | |
| | | 20% MeIm/MeCN | 1.0 mL | |

### PSM Amidite Synthetic Cycle

| | | | | waiting |
|---|---|---|---|---|
| step | operation | reagents and solvent | volume | time |
| 1 | detritylation | 3% TCA/DCM | 10 mL | 65 s |
| 2 | coupling | 0.2M monomer/20% IBN-MeCN | 0.5 mL | 8 min |
| | | 0.5M CMIMT/MeCN | 1.0 mL | |
| 3 | cap-1 | 20% Ac₂O, 30% 2,6-lutidine/ | 2.0 mL | 2 min |
| | | MeCN | | |
| 4 | imidation | 0.5M ADIH reagent/MeCN | 2.0 mL | 6 min |
| 5 | cap-2 | 20% Ac₂O, 30% 2,6-lutidine/ | 1.0 mL | 45 s |
| | | MeCN | | |
| | | 20% MeIm/MeCN | 1.0 mL | |

[3657] In some embodiments, for introduction of GalNAc moiety at 5′-end, oligonucleotides were synthesized by coupling with C-6 amino linker as the last coupling cycle.

### Example Procedure for Cleavage & De-Protection (25 μmol Scale)

[3658] After completion of cycles, the CPG support was treated with 20% diethylamine/acetonitrile wash step for 5 column volume/15 mins followed by ACN wash cycle. The CPG solid support was dried and transferred into 50 mL plastic tube, and was treated with 1× desilylation reagent (2.5 mL; 100 μL/umol) for 3 h at 28° C., then added conc. NH₃ (5.0 mL; 200 μL/umol) for 24 h at 37° C. The reaction mixture was cooled to room temperature and the CPG was separated by membrane filtration and washed with 15 mL of H₂O. The crude material (filtrate) was analyzed by LTQ and RP-UPLC. For certain oligonucleotides to be conjugated with other additional chemical moieties such as GalNac, oligonucleotides comprising suitable reactive groups such as amino groups were purified by ion exchange chromatography on AKTA pure system using a sodium chloride gradient. Desired product was desalted and further conjugated with GalNAc-containing acid. After conjugation reaction was found to be completed, the material was further purified by ion exchange chromatography and desalted using tangential flow filtration (TFF) to obtain desired products (e.g., various oligonucleotide compositions in Table 1 including WV-46312, WV-47606, WV-47608, WV-49085, WV-49086, WV-49087, WV-49088, WV-49089, WV-49090, WV-49092, WV-47603, WV-47604, WV-47605, WV-47607, WV-47609, WV-49091, WV-49093, WV-48453, WV-48454, etc.).

[3659] For example, WV-47595 was prepared and then conjugated to prepare WV-46312. A useful synthesis process is described below as an example.

[3660] In a preparation, synthesis of WV-47595 was performed on AKTA OP100 synthesizer (GE healthcare) using a 3.5 cm diameter fineline column on a 1200 μmol scale using a CPG support (loading 72 μmol/g). Certain synthetic cycles contained five steps: detritylation, coupling, capping 1 (cap-1), oxidation/sulfurization/imidation and capping 2 (cap-2).

[3661] Detritylation: Detritylation was performed using 3% DCA in toluene with a UV watch command set at 436 nm. Following detritylation, the CPG support was subjected to wash cycle using acetonitrile for 2CV.

[3662] Coupling: DPSE and PSM chiral amidites were prepared at 0.2M conc. (in ACN or 20% IBN in ACN). The amidites were mixed in-line with CMIMT activator (0.5M in acetonitrile) at a ratio of 5.83 prior to addition to the column. The coupling mixture was recycled for 10 minutes to maximize the coupling efficiency followed by column wash with 2CV of ACN. Cyanoethyl amidites were prepared at 0.2M conc. (in ACN or 20% IBN in ACN). The amidites were mixed in-line with ETT activator (0.5M in acetonitrile) at a ratio of 4.07 prior to addition to the column. The coupling mixture was recycled for 10 minutes to maximize the coupling efficiency followed by column wash with 2CV of ACN.

[3663] Capping 1: For stereodefined couplings, the column was then treated with Capping 1 solution (acetic anhydride, lutidine, ACN) for 1 CV in 2 minutes which can acetylate the chiral auxiliary amine. Following this step, the column was washed with 1.5 CV of acetonitrile. For stereorandom coupling Capping 1 was not performed.

[3664] Sulfurization/Imidation/Oxidation step: Sulfurization was performed with 0.1 M xanthane hydride in pyridine/acetonitrile (1.2 equivalent) with a contact time of 6 minute followed by 2CV wash step. Imidation was performed with 0.3 M ADIH reagent in acetonitrile with 18 equivalent and 15 min contact time followed by 2CV wash step. Oxidation step was performed using oxidation reagent (50 mM I₂/pyridine-H₂O (9:1, v/v)) 3.5 eq. 2.5 minute followed by 2CV acetonitrile wash.

[3665] Capping 2: Capping 2 step was performed using Capping A and Capping B reagents mixed inline (1:1) (e.g., see cap-2) followed by a 2 CV ACN wash.

[3666] After completion of the synthesis, the CPG support was finally treated with 20% diethylamine/acetonitrile wash step for 5 column volume/15 mins followed by ACN wash cycle. The CPG solid support was dried and transferred into pressure vessel. DPSE were removed by treating the support with desilylation reagent at a ratio of per pmole support/100 μL desilylation reagent. The desilylation reagent was made by mixing DMSO:water:TEA:TEA·3HF in ratio of 7.33:1.47:0.7:0.5. The CPG support was incubated in presence with desilylation reagent for 3 hours at 27° C. in an incubator shaker. After that conc. ammonia was added at a ratio of per μmole support/200 μL of conc. ammonia. The mixture was incubated and shaken for 24 hours at 37° C. The mixture was cooled and filtered using 0.2-0.45 micron filter and the CPG support was rinsed three times to collect all the desired material as filtrate. The filtrate containing crude oligonucleotides was analyzed by RP-UPLC and quantitation was done using a Nanodrop One Spectrophotometer (Thermo Scientific) and a yield of 110,000 OD/μmole was obtained.

[3667] Purification and desalting: Crude oligonucleotides were loaded on to Waters AP-2 glass column (2.0 cm×20 cm) packed with Source 15Q (Cytiva). Purification was performed on an AKTA150 Pure (GE healthcare) using the following buffers: (Buffer A: 20 mM NaOH, 20% Acetonitrile v/v) (Buffer B: 20 mM NaOH, 2.5M NaCl, 20% Acetonitrile v/v). Desired fractions with full length products in the range of 70-80% were pooled together. The pooled material was then desalted on a 2 KD re-generated cellulose membrane followed by lyophilization to obtain oligonucleotides as a fluffy white cake ready for conjugation.

[3668] Preparation of WV-46312: Various technologies can be utilized to conjugate oligonucleotides with other moieties in accordance with the present disclosure. A useful protocol for GalNAc conjugation is described below as an example. Pre-conjugation material: WV-47595.01 (0.01 denoting the batch number). Product material: WV-46312.01.

| | Mol. Wt. | | |
|---|---|---|---|
| | for present | | Volume |
| Reagent | protocol | Equivalent | (mL) |
| WV-47595 | 10050.80 | 1 | — |
| Tri-antennary GalNAc acid | 2006 | 1.8 | — |
| HATU | 382 | 1.4 | — |
| DIEA | 129 | 10 | — |
| Acetonitrile | | — | 4 |

Aqueous oligonucleotide solution

| | Conc. | Total | Total |
|---|---|---|---|
| Oligonucleotide solution | (mg/mL) | volume (mL) | (mg) |
| WV-47595 in WFI water | 50 | 8 | 400 |

[3669] The tri-antennary GalNAc acid (hydroxyl groups protected as —OAc) and HATU are weighed out in a 50 mL plastic tube and dissolved in anhydrous acetonitrile then DIEA was added into the tube. The resulting mixture was stirred for 10 min at 37° C. Lyophilized WV-47595 was reconstituted in water in a separate tube and the GalNAc mixture was added to the oligonucleotide solution and stirred for 60 min at 37° C. The reaction was monitored by RP-UPLC. Reaction was found to be complete in 1 h. The reaction mixture was concentrated under vacuum to remove the acetonitrile and the resultant GalNAc-conjugated oligonucleotides was treated with conc. ammonia for 2 h at 37° C. The formation of final product was confirmed by mass spectrometry and RP-UPLC. The conjugated material was purified by anion exchange chromatography and desalted using tangential flow filtration (TFF) to obtain the final product (Target mass: 12110.65; Observed mass: 12112.3). Using similar procedures various oligonucleotides and compositions were manufactured.

### Example 4. Provided Technologies can Provide Products with Improved Properties and/or Activities

[3670] As described herein, in some embodiments, provided technologies can correct mutations and provide improved or restored levels, properties and/or activities of various products such as proteins. For example, in some embodiments, provided technologies correct mutations and provide proteins, e.g., wild-type proteins with improved or restored levels, properties and/or activities. In some embodiments, provided technology provided increased levels of desired proteins, e.g., proteins of improved properties and/or activities compared to corresponding proteins prior to administration of provided technologies (e.g., oligonucleotides, compositions, etc.). In some embodiments, provided technologies provide increased levels of wild-type proteins. In some embodiments, provided technologies provide increased levels of properly folded proteins. Among other things, the present disclosure provides data confirming various such benefits, using editing of 1024 G>A in SERPINA1 as an example.

[3671] In some embodiments, cells, tissues or animals comprising 1024 G>A mutation in human SERPINA1 was utilized to assess provided technologies. In some embodiments, an animal is NOD.Cg-Prkdcscid Il2rgtm1Wjl Tg(SERPINA1*E342K) #Slcw/SzJ mouse (e.g., see The Jackson Laboratory Stock No: 028842; NSG-PiZ, and also Borel F; Tang Q; Gernoux G; Greer C; Wang Z; Barzel A; Kay M A; Shultz L D; Greiner D L; Flotte T R; Brehm M A; Mueller C. 2017. Survival Advantage of Both Human Hepatocyte Xenografts and Genome-Edited Hepatocytes for Treatment of alpha-1 Antitrypsin Deficiency. Mol Ther 25(11):2477-2489PubMed: 29032169MGI: J:243726, and Li S; Ling C; Zhong L; Li M; Su Q; He R; Tang Q; Greiner D L; Shultz L D; Brehm M A; Flotte T R; Mueller C; Srivastava A; Gao G. 2015. Efficient and Targeted Transduction of Nonhuman Primate Liver With Systemically Delivered Optimized AAV3B Vectors. Mol Ther 23(12):1867-76PubMed: 26403887MGI: J:230567). In some embodiments, cells, tissues or organs from such an animal were utilized to assess provided technologies.

[3672] In some embodiments, primary murine hepatocytes were plated into wells of 96 well plates, one plate for each time point being interrogated. After a suitable time period, e.g., 24 hours, oligonucleotide compositions were administered, e.g., in some embodiments, cells were transfected with an oligonucleotide composition at 25 nM final oligonucleotide concentration using a suitable technology, e.g., RNAiMAX as manufacturer's instruction. Media was collected for protein analysis (e.g., using ELISA), and cells were collected for RNA editing analysis (e.g., in RNA Lysis buffer (Promega) for later sequencing), at suitable time points, e.g., 120 hours.

[3673] ELISA. In some embodiments, A1AT protein concentration was assessed using a A1AT ELISA assay, e.g., Abcam—ab108799 assay in accordance with manufacturer's instructions. In some embodiments, standards were generated using recombinant A1AT protein diluted to 25 ng/ml in a diluent and serially diluted 2-fold for 7 points. Cell culture media was cleared by centrifugation at 3000 g for 10 minutes before being diluted 1 to 400 in a diluent. Prepared standards and diluted culture media were added to the wells of a SERPINA1 antibody coated and blocked 96 well plate and incubated for 2 hours at room temperature. Plates were washed with provided ELISA wash buffer 6 times (300 uL/well) before a biotinylated SERPINA1 antibody was diluted to 1× in a diluent and added to each well for 1 hour at room temperature. Wells were washed as previously described, and a streptavidin-peroxidase complex, diluted to 1× in a diluent, was added to each well for 30 minutes at room temperature. Wells were washed a final time before 3,3′,5,5′-Tetramethylbenzidine (TMB) is added to each well and the plate was developed for 20 minutes before stop solution was added. The plate was then read at 450 nm and 570 nm. The reading at 570 nm was subtracted from the 450 nm reading to account for optical imperfections and the plate was quantified. Certain data were presented in FIG. 1.

[3674] As confirmed in FIG. 1, provided technologies can provide editing of mutations associated with conditions, disorders or diseases, e.g., a PiZ mutation of SERPINA1 (SA1). Among other things, provided technologies not only provide editing on RNA levels, they can also provide improved levels, properties and/or activities of proteins. For example, as shown in FIG. 1, in addition to RNA editing, provided technologies can provide increased levels of secreted proteins (e.g., WV-38621, WV-38622 and WV-38630 compared to non-targeting (NT) control WV-37317) which can include proteins of improved folding and/or higher activities compared to proteins encoded by unedited RNA (e.g., proteins comprising E342K mutation) from 1024G>A mutation)). As appreciated by those skilled in the art, levels, properties and/or activities, including sequences, may also be assessed using other technologies such as mass spectrometry. In some embodiments, LC-MS based proteomics technologies are utilized to quantitate A1AT proteins (e.g., wild-type and/or mutant proteins (e.g., encoded by RNA with or without editing)).

### Example 5. Various Oligonucleotide Compositions can Provide Editing

[3675] Various oligonucleotides were designed and assessed. Certain oligonucleotides target a PIZ target site. Oligonucleotides were designed to either have a majority of 2′-F modified sugars in a domain (5′) and a majority of 2′-OMe modified sugars in another domain (3′), or a majority of 2′-OMe modified sugars in a domain (5′) and a majority of 2′-F in another domain (5′). Oligonucleotide compositions were then screened in either 293T or ARPE19 cells that stably expressed the SERPINA1-PIZ allele. As shown in FIGS. 2 (a) and (b), certain oligonucleotide compositions comprising certain sequences, and/or lengths of 5′- and/or 3′-sides of nucleosides opposite to target adenosines (e.g., C), provide higher levels of editing. In some embodiments WV-42028 and WV-42029 gave higher editing levels than WV-42027 in all three cell lines, 293T-SERPINA1-ADAR1-p110p110, 293T-SERPINA1-p150, and ARPE19-SERPINA1. In some embodiments, as shown in FIGS. 2 (a) and (b), when an edit site is moving from one domain to another domain, moving surrounding 2′ chemistry (e.g., 2′-OMe modified sugars) may improve editing efficiency. In some embodiments, it was observed that when an editing site is in a domain (5′), it may be helpful to have the domain comprising multiple 2′-OMe modified sugars (and optionally another domain comprising multiple 2′-F modified sugars).

### Example 6. Various Oligonucleotide Compositions can Provide Editing

[3676] Various oligonucleotides were designed and assessed. Certain oligonucleotides target a PIZ target site. Oligonucleotides were designed to contain a 8-oxo-dA base modification in a domain (3′). Oligonucleotides were then screened in either 293T or SF8628 cells that stably expressed SERPINA1-PIZ allele. In some embodiments, WV-42680 and WV-42681 gave higher editing levels than WV-42679 in all three cell lines, 293T-SERPINA1-ADAR1-p110, 293T-SERPINA1-p150, and SF8628-SERPINA1 (FIG. 3).

### Example 7. Various Oligonucleotide Compositions can Provide Editing

[3677] Oligonucleotides comprising various modified nucleobases (e.g., b008U) and/or various types of sugars (e.g., DNA sugars, RNA sugars, etc.) at or around editing sites were designed around a PIZ target site and assessed. Oligonucleotide compositions were screened in either 293T or SF8628 cells that stably expressed SERPINA1-PIZ allele. In some embodiments, WV-38621, WV-38622, WV-28923, WV-42328, WV-38629, WV-38630, and WV-42327 gave higher editing levels than WV-38620 in 293T-SERPINA1-ADAR1-p110, 293T-SERPINA1-p150, and SF8628-SERPINA1 (FIG. 4).

### Example 8. Various Oligonucleotide Compositions can Provide Editing

[3678] Oligonucleotides comprising various base sequences, modified sugars (e.g., 2′-F, 2′-OMe, etc), and/or modified internucleotide linkages (e.g., neutral internucleotidic linkages such as n001, phosphorothioate internucleotidic linkages, etc.) were designed and assessed. Certain oligonucleotides target a PIZ target site. Oligonucleotides were administered via GalNAc mediated uptake at multiple dose concentrations in primary mouse hepatocytes expressing human SERPINA1-PIZ. As shown in FIG. 5, various oligonucleotides can provide editing activities. In some embodiments, as shown in FIG. 5, addition of one or more 2′F modified sugars, e.g., in domain-2 (3′), may increase editing efficiency.

### Example 9. Various Oligonucleotide Compositions can Provide Editing

[3679] Oligonucleotides comprising various types of sugars including modified sugars (e.g., 2′-F, 2′-OMe, etc.), and modified internucleotide linkages (e.g., non-negatively charged internucleotidic linkages such as n001, phosphorothioate internucleotidic linkages) were designed and assessed. Certain oligonucleotides target a PIZ target site. Oligonucleotides were administered via gymnotic uptake at multiple dose concentrations in primary mouse hepatocytes expressing human SERPINA1-PIZ. In some embodiments, as shown in FIG. 6, various oligonucleotides can provide editing activities.

### Example 10. Various Oligonucleotide Compositions can Provide Editing

[3680] Oligonucleotides comprising modified bases (e.g., 8-oxo-dA), various types of sugars including modified sugars (e.g., 2′-F, 2′-OMe, etc.), and/or modified internucleotide linkages (e.g., non-negatively charged internucleotidic linkages such as n001, phosphorothioate internucleotidic linkages, etc.) were designed and assessed. Certain oligonucleotides target a PIZ target site. Oligonucleotides were administered via gymnotic uptake in primary mouse hepatocytes expressing human SERPINA1-PIZ. In some embodiments, WV-42680, WV-42935, and WV-42938 displayed greater editing efficiency compared to WV-42028. In some embodiments, as shown in FIG. 7, modified bases (e.g., 8-oxo-dA), certain sugars (e.g., arabino-cytidine), or combinations thereof may demonstrate increased editing efficiency.

### Example 11. Various Oligonucleotide Compositions can Provide Editing

[3681] Oligonucleotides comprising modified bases (e.g., 8-oxo-dA), various types of sugars including modified sugars (e.g., 2′-F, 2′-OMe, etc.), and/or modified internucleotide linkages (e.g., non-negatively charged internucleotidic linkages such as n001, phosphorothioate internucleotidic linkages, etc.) were designed and assessed. Certain oligonucleotides can target a PIZ target site. Oligonucleotides were administered in primary mouse hepatocytes expressing human SERPINA1-PIZ by gymnotic uptake. In some embodiments, WV-42680 and WV-42028 displayed higher editing levels as compared to WV-42679 and WV-42027. In some embodiments, as shown in FIG. 8, shifting a target sequence by 1 nt may increase editing efficiency. In some embodiments, inclusion of a modified base (e.g., 8-oxo-dA) may increase editing efficiency.

### Example 12. Various Oligonucleotide Compositions can Provide Editing

[3682] Oligonucleotides comprising modified bases (e.g., 8-oxo-dA), various types of sugars including modified sugars (e.g., 2′-F, 2′-OMe, etc.), and/or modified internucleotide linkages (e.g., non-negatively charged internucleotidic linkages such as n001, phosphorothioate internucleotidic linkages, etc.) were designed and assessed. Certain oligonucleotides target a PIZ target site. Oligonucleotides were tested in primary mouse hepatocytes expressing human SERPINA1-PIZ by gymnotic uptake. In some embodiments, WV-43112, WV-431113, and WV-43114 displayed higher editing levels as compared to WV-42680. See FIG. 9. In some embodiments, addition of 2′-F modified sugars to an oligonucleotide, e.g., in domain-2 (3′), may increase editing activity. In some embodiments, addition of 2′-OMe modified sugars at a 5′ end of may improve editing efficiency.

### Example 13. Various Oligonucleotide Compositions can Provide Editing

[3683] Oligonucleotides comprising modified bases, various types of sugars including modified sugars (e.g., 2′-F, 2′-OMe, etc.), and/or modified internucleotide linkages (e.g., non-negatively charged internucleotidic linkages such as n001, phosphorothioate internucleotidic linkages, etc.) were designed and assessed. Certain oligonucleotides can target a PIZ target site. Oligonucleotides were tested in primary mouse hepatocytes expressing human SERPINA1-PIZ by gymnotic uptake. As shown in FIG. 10, in some embodiments, various oligonucleotides comprising modified internucleotide linkages at various positions can provide editing activities. In some embodiments, oligonucleotides with non-negatively charged internucleotidic linkages such as n001 at certain positions provide higher activities compared to others.

### Example 14. Various Oligonucleotide Compositions can Provide Editing

[3684] Oligonucleotides comprising various types of sugars, nucleobases, internucleotidic linkages and stereochemistry and patterns thereof were designed and assessed. Certain oligonucleotides target a PIZ target site. Oligonucleotides were tested in primary mouse hepatocytes expressing human SERPINA1-PIZ by gymnotic uptake. As shown in FIG. 11, in some embodiments, Rp phosphorothioate internucleotide linkages can be incorporated at various locations to provide oligonucleotides with editing activities, and at certain sites may increase editing levels.

### Example 15. Various Oligonucleotide Compositions can Provide Editing

[3685] Oligonucleotides comprising various types of sugars, nucleobases, internucleotidic linkages and stereochemistry and patterns thereof were designed and assessed. Certain oligonucleotides target a PIZ target site. Oligonucleotides were tested in primary mouse hepatocytes expressing human SERPINA1-PIZ by gymnotic uptake. As shown in FIG. 12, in some embodiments, addition of 2′-F modified sugars to certain sites, e.g., in a domain comprising multiple 2′-OR modified sugars wherein R is optionally substituted C₁₋₆ aliphatic (e.g., 2′-OMe modified sugars) such as domain-2 (3′) in certain oligonucleotides, may increase or maintain editing levels.

### Example 16. Various Oligonucleotide Compositions can Provide Editing

[3686] Oligonucleotides comprising various types of sugars, nucleobases, internucleotidic linkages and stereochemistry and patterns thereof were designed and assessed. Certain oligonucleotides target a PIZ target site. Oligonucleotides were tested in primary mouse hepatocytes expressing human SERPINA1-PIZ by gymnotic uptake. As shown in FIG. 13, in some embodiments, addition of 2′-OR modified sugars wherein R is optionally substituted C₁₋₆ aliphatic (e.g., 2′-OMe modified sugars) to certain sites in, e.g., a domain comprising multiple 2′-F modified sugars such as domain-1 (5′) in certain oligonucleotides, may increase or maintain editing levels. In some embodiments, 2′-OR modified sugars wherein R is optionally substituted C₁₋₆ aliphatic (e.g., 2′-OMe modified sugars) are utilized at 5′- and/or 3′-ends of oligonucleotides.

### Example 17. Compositions of Oligonucleotides of Various Lengths can Provide Editing

[3687] Oligonucleotides comprising various modifications and base sequences and of different lengths (e.g., 28 nt, 29 nt, 30 nt, 31 nt, 32 nt) were designed and assessed. Certain oligonucleotides target a PIZ target site. Oligonucleotides were tested in primary mouse hepatocytes expressing human SERPINA1-PIZ by gymnotic uptake. As shown in FIG. 14, oligonucleotides of various lengths including those significantly shorter than reported by others can provide editing activities. In some embodiments, 31 nt and 32 nt oligonucleotides can provide improved editing levels.

### Example 18. Compositions of Oligonucleotides Comprising Various Types of Internucleotidic Linkages can Provide Editing

[3688] Oligonucleotides comprising various types of sugars, nucleobases, internucleotidic linkages and stereochemistry and patterns thereof were designed and assessed. Certain oligonucleotides target a PIZ target site. Oligonucleotides were tested in primary mouse hepatocytes expressing human SERPINA1-PIZ by gymnotic uptake. As shown in FIG. 15, in some embodiments, natural phosphate linkages, non-negatively charged internucleotidic linkages such as n001 and phosphorothioate internucleotidic linkages can be utilized various positions to provide editing. In some embodiments, natural phosphate linkages at certain sites, e.g., certain positions of domain-2 (3′), may increase editing levels. In some embodiments, certain combinations of various internucleotidic linkages and/or stereochemistry at certain sites can increase editing levels.

### Example 19. Various Oligonucleotide Compositions can Provide Editing

[3689] Oligonucleotides comprising various types of sugars, nucleobases, internucleotidic linkages and stereochemistry and patterns thereof were designed and assessed. Certain oligonucleotides target a PIZ target site. Oligonucleotides were tested in primary mouse hepatocytes expressing human SERPINA1-PIZ by GalNAc mediated uptake. As shown in FIG. 16, various oligonucleotides can provide editing activities. In some embodiments, addition of addition of 2′-OR modified sugars wherein R is optionally substituted C₁₋₆ aliphatic (e.g., 2′-OMe modified sugars) at 5′- and/or 3′-ends of oligonucleotides may increase editing levels.

### Example 20. Various Oligonucleotide Compositions can Provide Editing

[3690] Oligonucleotides comprising various types of sugars, nucleobases, internucleotidic linkages and stereochemistry and patterns thereof were designed and assessed. Certain oligonucleotides target a PIZ target site. GalNAc-conjugated oligonucleotides were tested in primary mouse hepatocytes expressing human SERPINA1-PIZ. As shown in FIG. 17, various oligonucleotides can provide editing activities. In some embodiments, oligonucleotides comprising increased levels of 2-′F modified sugars and/or certain bases/nucleobases (e.g., 8-oxo-dA, b001A, b008U, I, etc.) at certain positions may provide increased editing levels.

### Example 21. Provided Editing Regions can Improve Editing

[3691] Oligonucleotides comprising various types of sugars, nucleobases, internucleotidic linkages and stereochemistry and patterns thereof, and various editing regions including various sequences around a nucleoside opposite to a target adenosine, were designed and assessed. Certain oligonucleotides target a PIZ target site. Oligonucleotides were tested in primary mouse hepatocytes expressing human SERPINA1-PIZ by gymnotic mediated uptake. As shown in FIG. 18 (a)-(c), various oligonucleotides can provide editing activities. In some embodiments, certain mismatches or wobble base pairs at 5′ and/or 3′ nearest positions to an edit site may reduce editing levels compared to fully complementary editing regions. In some embodiments, certain mismatches or wobble base pairs at 5′ and/or 3′ nearest positions to an edit site in some embodiments maintain or increase editing levels.

### Example 22. Various Oligonucleotide Compositions can Provide Editing

[3692] Oligonucleotides comprising various types of sugars, nucleobases, internucleotidic linkages and stereochemistry and patterns thereof were designed and assessed. Oligonucleotides were tested in primary mouse hepatocytes expressing human SERPINA1-PIZ by gymnotic mediated uptake. As shown in FIG. 19, various oligonucleotides can provide editing activities. In some embodiments, introduction of a 2′-DNA nucleoside (e.g., T instead of 2′-F U) adjacent to an edit site (e.g., as N₁) may increase editing levels.

### Example 23. Various Oligonucleotide Compositions can Provide Editing

[3693] Oligonucleotides comprising various types of sugars, nucleobases, internucleotidic linkages and stereochemistry and patterns thereof were designed and assessed. Oligonucleotides were tested in primary mouse hepatocytes expressing human SERPINA1-PIZ by gymnotic mediated uptake. Various such oligonucleotide can provide editing activities. As shown in FIG. 20, in some embodiments, increasing levels of 2′-F modified sugars may increase editing levels.

### Example 24. Oligonucleotides of Various Provided Designs can Provide Editing

[3694] Oligonucleotides comprising various types of sugars, nucleobases, internucleotidic linkages and stereochemistry and patterns thereof were designed and assessed. Certain oligonucleotides target a PIZ target site. As shown in FIG. 21, oligonucleotides comprising various types of sugars (e.g., DNA sugars, 2′-F modified sugars, 2′-OR modified sugars wherein R is not hydrogen, and patterns thereof), nucleobases (modified and unmodified bases and patterns thereof), internucleotidic linkages (e.g., natural phosphate linkages, non-negatively charged internucleotidic linkages, phosphorothioate internucleotidic linkages, and patterns thereof) and stereochemistry (e.g., Rp, Sp, and patterns thereof) and patterns thereof can provide editing activities. Oligonucleotides were tested in primary mouse hepatocytes expressing human SERPINA1-PIZ by gymnotic uptake. In some embodiments, certain oligonucleotides provide higher editing levels compared to others.

### Example 25. Various Oligonucleotide Compositions can Provide Editing

[3695] Oligonucleotides comprising various types of sugars, nucleobases, internucleotidic linkages and stereochemistry and patterns thereof were designed and assessed. Certain oligonucleotides target a PIZ target site. As shown in FIG. 22, oligonucleotides comprising various types of sugars (e.g., DNA sugars, 2′-F modified sugars, 2′-OR modified sugars wherein R is not hydrogen, and patterns thereof), nucleobases (modified and unmodified bases and patterns thereof), internucleotidic linkages (e.g., natural phosphate linkages, non-negatively charged internucleotidic linkages, phosphorothioate internucleotidic linkages, and patterns thereof) and stereochemistry (e.g., Rp, Sp, and patterns thereof) and patterns thereof can provide editing activities. Oligonucleotides were tested in primary mouse hepatocytes expressing human SERPINA1-PIZ by gymnotic uptake. In some embodiments, certain oligonucleotides provide higher editing levels compared to others.

### Example 26. Various Oligonucleotide Compositions can Provide Editing

[3696] Oligonucleotides comprising various types of sugars, nucleobases, internucleotidic linkages and stereochemistry and patterns thereof were designed and assessed. Certain oligonucleotides target a PIZ target site. As shown in FIG. 23, oligonucleotides comprising various types of sugars (e.g., DNA sugars, 2′-F modified sugars, 2′-OR modified sugars wherein R is not hydrogen, and patterns thereof), nucleobases (modified and unmodified bases and patterns thereof), internucleotidic linkages (e.g., natural phosphate linkages, non-negatively charged internucleotidic linkages, phosphorothioate internucleotidic linkages, and patterns thereof) and stereochemistry (e.g., Rp, Sp, and patterns thereof) and patterns thereof can provide editing activities. Oligonucleotides were tested in primary mouse hepatocytes expressing human SERPINA1-PIZ by gymnotic uptake. In some embodiments, certain oligonucleotides provide higher editing levels compared to others. In some embodiments, 2′-OR modified sugar wherein R is not hydrogen (e.g., when R is optionally substituted C₁₋₆ aliphatic) such as 2′-OMe modified sugars at 5′ and/or 3′ terminus. In some embodiments, oligonucleotides comprise non-negatively charged internucleotidic linkages (e.g., phosphoryl guanidine internucleotidic linkages such as n001) at both 5′- and 3′-end. In some embodiments, oligonucleotides comprise non-negatively charged internucleotidic linkages (e.g., phosphoryl guanidine internucleotidic linkages such as n001) at 5′-end. In some embodiments, oligonucleotides comprise non-negatively charged internucleotidic linkages (e.g., phosphoryl guanidine internucleotidic linkages such as n001) at 3′-end.

### Example 27. Various Oligonucleotide Compositions can Provide Editing

[3697] Oligonucleotides comprising various types of sugars, nucleobases, internucleotidic linkages and stereochemistry and patterns thereof were designed and assessed. Certain oligonucleotides target a PIZ target site. As shown in FIG. 24, oligonucleotides comprising various types of sugars (e.g., DNA sugars, 2′-F modified sugars, 2′-OR modified sugars wherein R is not hydrogen, and patterns thereof), nucleobases (modified and unmodified bases and patterns thereof), internucleotidic linkages (e.g., natural phosphate linkages, non-negatively charged internucleotidic linkages, phosphorothioate internucleotidic linkages, and patterns thereof) and stereochemistry (e.g., Rp, Sp, and patterns thereof) and patterns thereof can provide editing activities. Oligonucleotides were tested in primary mouse hepatocytes expressing human SERPINA1-PIZ by gymnotic uptake. In some embodiments, certain oligonucleotides provide higher editing levels compared to others. In some embodiments, 2′-OR modified sugar wherein R is not hydrogen (e.g., when R is optionally substituted C₁₋₆ aliphatic) such as 2′-OMe or 2′-MOE modified sugars at 5′ and/or 3′ terminus. In some embodiments, oligonucleotides comprise non-negatively charged internucleotidic linkages (e.g., phosphoryl guanidine internucleotidic linkages such as n001) at 5′- and/or 3′-end. In some embodiments, natural DNA sugars may be utilized at an end region (e.g., 5′-end region as shown in FIG. 24) with modified internucleotidic linkages, such as non-negatively charged internucleotidic linkages (e.g., phosphoryl guanidine internucleotidic linkages such as n001), phosphorothioate internucleotidic linkages, etc.

### Example 28. Various Oligonucleotide Compositions can Provide Editing

[3698] Oligonucleotides comprising various types of sugars, nucleobases, internucleotidic linkages and stereochemistry and patterns thereof were designed and assessed. Certain oligonucleotides target a PIZ target site. Oligonucleotides were tested in primary mouse hepatocytes expressing human SERPINA1-PIZ by gymnotic uptake. As shown in FIG. 25, various oligonucleotides comprising various types of sugars, nucleobases and internucleotidic linkages, including various nucleobases, sugars, nucleosides at and/or around a nucleoside opposite to a target adenosine (e.g., b001A, b001rA, Csm15, I, etc.) can provide editing activities. In some embodiments, certain oligonucleotides provide higher editing levels.

### Example 29. Various Oligonucleotide Compositions can Provide Editing

[3699] In some embodiments, oligonucleotides comprise mismatches and/or wobble base pairs when aligned with target nucleic acids. As demonstrated herein, various such oligonucleotides can provide editing activities. In some embodiments, oligonucleotides comprising G-U wobble base pairs at certain positions were designed to target a PIZ target site. Oligonucleotides were tested in primary mouse hepatocytes expressing human SERPINA1-PIZ by gymnotic uptake. As shown in FIG. 26, in various embodiments, oligonucleotides comprising G-U wobble base pairs provide editing activities.

### Example 30. Various Oligonucleotide Compositions can Provide Editing

[3700] Oligonucleotides comprising various types of sugars (e.g., DNA sugars, 2′-F modified sugars, 2′-OR modified sugars wherein R is not hydrogen, and patterns thereof), nucleobases (modified and unmodified bases and patterns thereof), internucleotidic linkages (e.g., natural phosphate linkages, non-negatively charged internucleotidic linkages, phosphorothioate internucleotidic linkages, and patterns thereof) and stereochemistry (e.g., Rp, Sp, and patterns thereof) and patterns thereof, including various structural features at editing regions (e.g., various types of sugars, nucleobases, nucleosides, linkages, etc., such as 5MRm5dC, 5MSm5dC, 5MSm5fC, fC, dC, m5dC, dA, 5MSdT, 5MRdT, etc., for N₁, N₀, N₋₁, N₋₂, etc.) can provide editing activities. In some embodiments, oligonucleotides comprising 5′-(R)-Me or 5′-(S)-Me modified sugars provide editing activities. Certain data were presented in FIG. 27. Oligonucleotides were tested in primary human hepatocytes by GalNAc mediated uptake at various concentrations

### Example 31. Various Oligonucleotide Compositions can Provide Editing

[3701] Oligonucleotides comprising various types of sugars, nucleobases, internucleotidic linkages and stereochemistry and patterns thereof were designed and assessed. Certain oligonucleotide target an ACTB target site. Oligonucleotides were tested in primary human hepatocytes by GalNAc mediated uptake at various concentrations. As shown in FIG. 28, various oligonucleotides including those comprising non-negatively charged internucleotidic linkages such as *n001 and/or UNA (Unlocked Nucleic Acids) sugars can provide editing activities.

### Example 32. Various Oligonucleotide Compositions can Provide Editing

[3702] In some embodiments, oligonucleotides comprise 5′-caps. In some embodiments, oligonucleotides comprise abasic 5′-caps. In some embodiments, oligonucleotides comprise additional chemical moieties, e.g., connected to 5′-ends of oligonucleotides. Various such oligonucleotides were prepared and accessed. In some embodiments, oligonucleotides were tested in primary human hepatocytes by GalNAc mediated uptake. As shown in FIG. 29, such oligonucleotides can provide editing activities.

### Example 33. Certain Editing Regions Provide High Editing Levels

[3703] Among other things, the present disclosure provides editing regions that are particularly useful for editing. In some embodiments, the present disclosure provides 5′-N₁N₀N₋₁-3′ elements that are particularly useful for editing. In some embodiments, they are fully complementary to target adenosines and nucleosides directly 5′ and 3′ thereto. In some embodiments, they comprise one or more mismatches and/or wobble base pairs. In some embodiments, those comprising mismatches and/or wobble base pairs, including at N₋₁ and/or N₋₁, provide comparable or higher levels of editing compared absence of such mismatches and/or wobble base pairs. In some embodiments, oligonucleotides comprising various nucleosides directly 5′ and 3′ to and at an edit sites were designed and assessed, targeting an ACTB target as an example. In some embodiments, plasmid reporters expressing full-length ACTB cDNA with various combinations of nucleosides directly 5′ and 3′ to target adenosine were designed and tested with corresponding oligonucleotides, each featuring unique combinations of bases and/or sugars directly 5′ and 3′ to edit site. Plasmids and oligonucleotides were tested in 293T cells by transfection. As shown below, in some embodiments, oligonucleotides comprising certain mismatches and/or wobble base pairs directly 5′ and/or 3′ to an edit site may maintain or increase editing levels. Combinations of nearest neighbors for each target are denoted horizontally on top of the chart (5′ to 3′ orientation) and combinations of nearest neighbors for edit site in oligonucleotides are denoted vertically on left of chart (3′ to 5′). Endogenous ACTB transcript is denoted with *. Opposite to target adenosine in oligonucleotides are dC. Mean editing values for each reporter-oligonucleotide combination are plotted. For top to bottom oligonucleotides are WV-42331 to WV-42335, WV-37317, WV-42337 to WV-42349.

| | A_A | A_U | A_G | A_C | U_A | U_U | U_G | U_C | G_A | G_U | G_G | G_C | C_A | C_U | C_G | C_C | U_G* |
|---|---|---|---|---|---|---|---|---|---|---|---|---|---|---|---|---|---|
| T_U | 51.8 | 22.3 | 58.9 | 17.1 | 29.0 | 0.9 | 28.2 | 2.7 | 29.5 | 2.1 | 22.6 | 0.9 | 5.9 | 2.1 | 4.4 | 1.6 | 8.0 |
| T_A | 20.2 | 51.3 | 28.4 | 35.9 | 3.0 | 27.0 | 3.5 | 2.9 | 4.7 | 23.4 | 4.1 | 1.8 | 1.8 | 8.8 | 3.1 | 2.5 | 1.4 |
| T_C | 50.5 | 25.5 | 58.4 | 12.3 | 11.9 | 2.5 | 60.2 | 1.0 | 30.5 | 3.0 | 40.7 | 2.4 | 1.6 | 1.7 | 22.3 | 1.2 | 37.0 |
| T_G | 32.6 | 46.1 | 36.7 | 51.2 | 3.4 | 11.4 | 5.4 | 45.2 | 20.6 | 7.8 | 14.5 | 27.3 | 4.2 | 4.3 | 4.6 | 12.5 | 1.9 |
| A_U | 36.4 | 4.7 | 42.1 | 4.8 | 65.4 | 51.6 | 70.3 | 55.6 | 37.4 | 3.8 | 28.0 | 2.6 | 12.6 | 1.7 | 12.9 | 1.8 | 75.1 |
| A_A | 4.4 | 43.7 | 6.3 | 8.7 | 52.4 | 63.5 | 54.0 | 61.0 | 6.7 | 29.3 | 5.4 | 3.3 | 7.4 | 12.8 | 2.3 | 4.3 | 42.3 |
| A_C | 23.0 | 3.3 | 52.7 | 2.2 | 69.0 | 57.7 | 75.2 | 57.1 | 38.7 | 5.2 | 48.3 | 4.0 | 6.5 | 0.4 | 36.2 | 3.8 | 78.7 |
| A_G | 5.4 | 16.6 | 17.4 | 43.2 | 56.9 | 60.9 | 67.2 | 71.3 | 21.1 | 13.5 | 16.7 | 40.5 | 2.2 | 4.9 | 4.0 | 20.0 | 61.5 |
| C_U | 38.2 | 10.8 | 41.6 | 13.6 | 30.6 | 20.6 | 37.6 | 29.2 | 36.0 | 6.8 | 37.1 | 9.6 | 13.9 | 10.2 | 25.3 | 12.3 | 17.6 |
| C_A | 4.4 | 44.9 | 7.3 | 9.8 | 3.4 | 31.6 | 3.2 | 5.3 | 15.3 | 19.1 | 19.9 | 9.7 | 1.2 | 7.5 | 1.7 | 0.0 | 2.8 |
| C_C | 24.9 | 3.3 | 52.7 | 3.2 | 9.9 | 1.5 | 54.3 | 1.3 | 50.8 | 9.9 | 41.2 | 3.8 | 3.4 | 1.3 | 21.7 | 2.4 | 27.0 |
| C_G | 4.8 | 17.0 | 15.5 | 48.3 | 3.7 | 6.2 | 9.2 | 43.7 | 16.5 | 16.1 | 20.2 | 24.6 | 0.7 | 0.6 | 2.2 | 7.9 | 3.5 |
| I_U | 56.2 | 16.7 | 60.2 | 9.5 | 57.9 | 15.0 | 66.3 | 12.0 | 46.7 | 6.0 | 38.3 | 2.4 | 52.2 | 45.0 | 56.6 | 36.4 | 47.0 |
| I_A | 6.6 | 55.9 | 13.1 | 19.0 | 8.2 | 56.0 | 17.2 | 19.0 | 8.3 | 38.6 | 8.4 | 4.1 | 35.3 | 54.8 | 45.0 | 44.5 | 4.3 |
| I_C | 45.7 | 12.6 | 60.7 | 5.2 | 49.5 | 14.5 | 64.6 | 11.2 | 46.3 | 6.2 | 48.8 | 4.7 | 48.8 | 42.9 | 58.3 | 32.3 | 69.2 |
| I_G | 18.9 | 42.9 | 39.4 | 53.0 | 16.2 | 43.7 | 39.5 | 70.0 | 33.3 | 22.5 | 27.6 | 49.3 | 39.0 | 54.0 | 54.3 | 52.3 | 18.0 |
| G_U | 48.6 | 8.5 | 47.7 | 4.6 | 34.2 | 7.3 | 37.9 | 3.9 | 53.4 | 7.3 | 45.8 | 3.1 | 42.9 | 25.9 | 58.5 | 21.0 | 12.4 |
| G_A | 5.1 | 47.8 | 8.1 | 9.9 | 3.7 | 32.2 | 5.8 | 7.9 | 11.1 | 42.4 | 12.0 | 7.2 | 24.7 | 48.1 | 38.6 | 30.1 | 1.4 |
| G_C | 36.9 | 7.5 | 62.7 | 4.3 | 37.3 | 5.3 | 57.2 | 2.6 | 52.1 | 10.7 | 49.9 | 4.1 | 49.8 | 29.8 | 57.6 | 20.3 | 35.0 |
| G_G | 10.2 | 29.3 | 24.8 | 53.5 | 7.0 | 18.6 | 16.9 | 49.6 | 32.2 | 31.3 | 29.9 | 49.7 | 33.6 | 37.3 | 49.8 | 46.6 | 7.5 |

### Example 34. Various Oligonucleotide Compositions can Provide Editing

[3704] In some embodiments, oligonucleotides comprise 5′-caps. In some embodiments, oligonucleotides comprise abasic 5′-caps. In some embodiments, oligonucleotides comprise additional chemical moieties, e.g., connected to 5′-ends of oligonucleotides. Various such oligonucleotides were prepared and accessed. In some embodiments, oligonucleotides then tested in primary mouse hepatocytes expressing human ADAR-p110. As shown in FIG. 30, such oligonucleotides can provide editing activities.

### Example 35. Provided Technologies can Provide Editing In Vivo

[3705] Among other things, the present disclosure demonstrate that provided oligonucleotides can provide editing in vivo. In an example, non-Human-Primates (NHP) were dosed with a single subcutaneous (SC) dose of WV-37317 at 50 mg/kg (3× Macaca fascicularis) or with PBS as a control (1× Macaca fascicularis). Dosing details are shown below. Animals where sacrificed day 8 (dose on day 1, collection on day 8), and all tissues where collected for PK/PD analysis. As shown in FIG. 31, (a), multiple tissues (kidney, liver, lung, heart, pancreases, pulmonary vein and artery, duodenum, ileum, jejunum, PBMCs) displayed ACTB editing and WV-37317 was detected at high levels in all tissues (see FIG. 31, (b)). Among other things, oligonucleotides of the present disclosure can be delivered, e.g., by SC administration, in NHPs, allowing for broad tissue distribution and efficient endogenous ADAR mediated editing in multiple tissue types.

| | | | | | | Dosing | Dose | | |
|---|---|---|---|---|---|---|---|---|---|
| Group | TA | Description | Strain | Gender | Dose | Regimen | Volume | NHP # | Necropsy |
| 1 | PBS | NA | Cynomolgus | 1M | n/a | s.c. (Day 1) | 1 ml/kg | 1 | Day 8 |
| 2 | WV- | ACTB | monkey, | | | | | | |
| | 37317 | | naïve Asian | 2M, 1F | 50 mpk | s.c. (Day 1) | 1 ml/kg | 3 | Day 8 |
| | | | original | | | | | | |

### Example 36. Provided Technologies can Provide Editing In Vivo

[3706] Among other things, the present disclosure demonstrate that provided oligonucleotides can provide editing in vivo. In an example, non-Human-Primates (NHP) were dosed with a single intrathecal (IT) dose of WV-37317 at either 10 mg or 5 mg (6× Macaca fascicularis) or with PBS as a control (1× Macaca fascicularis). Dosing details are shown below. The animals where sacrificed at either day 8 or 29 (dose on day 1, collections at days 8 and 29), and tissues where collected for PK/PD analysis. As shown in FIG. 32, (a), multiple tissues (e.g., spinal cord, cortex, hippocampus, midbrain, cerebellum, corpus callosum, and optic nerve, etc.) displayed ACTB editing. As shown in FIG. 32, (b), WV-37317 was detected in various CNS tissues. Among other things, oligonucleotides of the present disclosure can be delivered, e.g., by IT administration in NHPs, and provide broad distribution and efficient endogenous ADAR mediated editing in various tissues including CNS tissues.

| | | | Dose | Dose | Total # | | Necropsy |
|---|---|---|---|---|---|---|---|
| Group | Test Article | Description | (mg) | Regimen | per group | Gender | time point |
| 1 | PBS | control | NA | IT x 1 | 1 | M | Day 8 |
| 2 | WV-37317 | SP-PN | 5 | | 2 | M/F | Day 8 |
| 3 | WV-37317 | SP-PN | 10 | | 2 | M/F | Day 8 |
| 4 | WV-37317 | SP-PN | 10 | | 2 | M/F | Day 29 |

### Example 37. Various Oligonucleotide Compositions can Provide Editing

[3707] In some embodiments, oligonucleotides comprise duplexing and targeting oligonucleotides. In some embodiments, such oligonucleotides can form duplexes with, e.g., duplexing nucleic acids and oligonucleotides. In some embodiments, oligonucleotides and corresponding duplexing oligonucleotides. In some embodiments, oligonucleotides were designed to target a luciferase reporter target and assessed. In some embodiments, designs combined two oligonucleotide pieces sharing a 16 bp or 18 bp complementary sequence, allowing association of both pieces within cells. Certain oligonucleotides were tested in combination by transfection in 293T cells. Editing efficiency was calculated by determining cLUC/gLUC ratios. As shown in FIG. 33, in some embodiments certain combinations of oligonucleotide pieces can provide editing. Certain duplex designs were provided in FIG. 35 as examples. As those skilled in the art appreciates, various suitable lengths may be utilized for portions, regions, oligonucleotides, etc. in accordance with the present disclosure.

### Example 38. Various Oligonucleotide Compositions can Provide Editing

[3708] In some embodiments, an oligonucleotide comprises a stem loop as well as double and single-stranded regions. In some embodiments, such an oligonucleotide can be utilized as a duplexing oligonucleotide to form complexes with an oligonucleotide comprising a duplexing and a targeting region. An example design were shown in FIG. 35. As those skilled in the art appreciates, various suitable lengths may be utilized for portions, regions, oligonucleotides, etc. in accordance with the present disclosure. As an example, certain oligonucleotides were designed to target a site in a luciferase reporter construct. Designs combined two oligonucleotides sharing a complementary sequence (e.g., 15 bp), allowing association of both pieces and formation of a stem loop complex within cells. Oligonucleotides were tested in combination by transfection in 293T cells. Editing efficiency was calculated by determining cLUC/gLUC ratios. As shown in FIG. 34, various combinations provide editing activities.

### Example 39. Various Oligonucleotide Compositions can Provide In Vivo Editing

[3709] Among other things, provided technologies can provide in vivo edition. In some embodiments, oligonucleotides (e.g., WV-43120, WV-44464, WV-44465) were shown to confirm in vivo editing of the SERPINA1-Z allele in human ADAR (huADAR) transgenic mice described herein. Thirty-two male mice of the JAX huADAR×SA1 mouse line were used, all heterozygous for SA1-PiZ. Of those, twenty mice were also heterozygous for huADAR-p110, and twelve mice were wild-type for mouse ADAR (no expression of huADAR-p110). UGP2 was used as a control for huADAR activity. Mice were dosed subcutaneously (s.c.) with 10 mg/kg of selected oligonucleotide or PBS control every other day for three days (Days 0, 2, 4). Serum was collected from the mice prior to dosing and on Day 7 following treatment, and liver biopsies were collected on Day 7. Samples were subjected to PK and PD analyses and hybrid ELISA. Certain information was provided below:

| | | | | | Dosing | |
|---|---|---|---|---|---|---|
| TA | Description | Strain | Gender | Dose | Regimen | Mice # |
| PBS | NA | Het for SA1-PiZ | M | n/a | s.c. (Day 0, 2, 4) | 4 |
| WV-43120 | SA1-PiZ | Het for huADAR-p110 | M | 10 mpk | s.c. (Day 0, 2, 4) | 4 |
| WV-44464 | SA1-PiZ | | M | 10 mpk | s.c. (Day 0, 2, 4) | 4 |
| WV-44465 | SA1-PiZ | | M | 10 mpk | s.c. (Day 0, 2, 4) | 4 |
| WV-38702 | UGP2 | | M | 10 mpk | s.c. (Day 0, 2, 4) | 4 |
| PBS | NA | Het for SA1-PiZ | M | 10 mpk | s.c. (Day 0, 2, 4) | 4 |
| WV-44464 | SA1-PiZ | WT for mouse ADAR | M | 10 mpk | s.c. (Day 0, 2, 4) | 4 |
| WV-44465 | SA1-PiZ | (no expression of | M | 10 mpk | s.c. (Day 0, 2, 4) | 4 |
| | | huADAR-p110) | | | | |

[3710] In some embodiments, primary mouse hepatocytes from the transgenic model (expressing human ADARp110 and human SERPINA1-Z allele) were treated with various GalNAc-conjugated oligonucleotides for 48 hrs. RNA editing was measured by Sanger sequencing. In some embodiments, as shown in FIG. 36, various oligonucleotides provided in vitro editing of the SERPINA1-Z allele.

[3711] Liver biopsy samples collected on Day 7 from the huADAR/SA1 transgenic mice underwent Sanger sequencing to measure percent editing. In some embodiments, as confirmed in FIG. 37, various oligonucleotide compositions provided in vivo editing activity up to about 20%, up to about 30%, or up to about 40% for the SERPINA1-Z allele.

[3712] From serum samples collected from mice prior to dosing and on Day 7 following treatment, concentration of total human AAT in serum was determined by a commercially available ELISA kit (AbCam). In some embodiments, as shown in FIG. 38, in vivo editing from dosing various oligonucleotides increased total human AAT concentration in serum.

[3713] From serum samples collected from mice prior to dosing and on Day 7 following treatment, the relative abundance of Z (mutant) vs. M (wild-type) AAT isoforms was determined by mass spectrometry. Absolute amounts of each isoform were then calculated by applying relative abundances to absolute concentrations obtained from ELISA (see FIG. 38). In some embodiments, as confirmed in FIG. 39, editing from treatment with WV-44464 resulted in secretion of wild-type AAT protein and a substantial decrease of mutant Z-AAT protein in serum. As confirmed herein, in some embodiments, provided technologies can increase wild-type SERPINA1 protein levels in blood. In some embodiments, provided technologies can decrease mutant SERPINA1 protein levels in blood. In some embodiments, as shown in FIG. 38, about 75% of total AAT in blood is wild-type.

[3714] Certain data were present below as examples.

In Vivo SERPINA1-Z Allele Editing in huADAR Mice (e.g., FIG. 37):

| ID | PBS | | | | WV-43120 | | | | WV-44464 | | | |
|---|---|---|---|---|---|---|---|---|---|---|---|---|
| Editing | 1.4 | 0 | 1.38 | 0 | 15 | 16 | 18.7 | 17.6 | 39.8 | 38.8 | 36.4 | 37.2 |

| ID | WV-44465 | | | | WV-38702 (UGP2 control) | | | |
|---|---|---|---|---|---|---|---|---|
| Editing | 29.8 | 33.2 | 26 | 28.4 | 0 | 0.12 | 0 | 0 |

### Human AAT Concentration in Serum (ELISA) (e.g., FIG. 38):

| ID | Pre Dose | | | | Day 7 | | | |
|---|---|---|---|---|---|---|---|---|
| PBS | 256.527 | 266.166 | 239.436 | 235.305 | 127.656 | 177.39 | 182.655 | 193.914 |
| WV-38702 | 280.017 | 252.153 | 298.485 | 217.242 | 194.643 | 247.293 | 217.242 | 177.633 |
| WV-43120 | 208.656 | 239.274 | 269.73 | 189.783 | 241.38 | 365.472 | 387.666 | 255.636 |
| WV-44464 | 296.703 | 303.507 | 325.296 | 247.941 | 527.229 | 493.695 | 572.508 | 463.077 |
| WV-44465 | 280.26 | 193.104 | 195.615 | 187.353 | 417.96 | 410.67 | 372.762 | 356.643 |

### AAI Isoforms in Serum (Mass Spectrometry; PBS and WV-44464) (e.g., FIG. 39):

| | PiM (WT) | | | | PiZ (E342K mutant) | | | |
|---|---|---|---|---|---|---|---|---|
| Pre-dose | 0.21 | 0.24 | 0.24 | 0.21 | 256.32 | 265.93 | 239.2 | 235.09 |
| Day 7 | 0.13 | 0.16 | 0.14 | 0.16 | 127.53 | 177.23 | 182.52 | 193.75 |
| Pre-dose | 0.31 | 0.13 | 0.28 | 0.17 | 296.39 | 303.37 | 325.02 | 247.77 |
| Day 7 | 385.89 | 346.79 | 392.73 | 316.84 | 141.34 | 146.91 | 179.77 | 146.24 |

### Elastase Inhibition Activity in Serum (e.g., FIG. 40)

| ID | Pre Dose | | | | Day 7 | | | |
|---|---|---|---|---|---|---|---|---|
| PBS | 19.52 | 23.94 | 34.47 | 23.75 | 18.28 | 30.92 | 46.04 | 30.03 |
| WV-43120 | 17.89 | 15.23 | 21.31 | 15.16 | 35.29 | 36.63 | 36.9 | 21.82 |
| WV-44464 | 33.11 | 27.94 | 26.44 | 23.85 | 64.01 | 73.62 | 79.2 | 67.21 |
| WV-44465 | 36.58 | 29.43 | 23.4 | 25.86 | 58.68 | 57.7 | 43.65 | 50.53 |
| WV-38702 | 33.78 | 25.74 | 35.88 | 35.71 | 23.57 | 28.97 | 32.29 | 26.03 |

[3718] It was confirmed that provided technologies can provide editing and functional proteins. From serum samples collected from mice prior to dosing and on Day 7 following treatment, relative elastase inhibition activity was determined using a commercially available kit (EnzChek® Elastase Assay Kit (E-12056)). Diluted serum was incubated with recombinant elastase enzyme and fluorescently tagged elastin substrate. Activity of elastase enzyme can be detected by fluorescence signal detected upon elastin cleavage. Relative inhibition was calculated about a control reaction with no serum present (100% elastase activity). Each sample was run in technical replicate. Among other things, data shown in FIG. 40 confirmed that wild-type AAT protein produced and secreted as a result of editing by provided technologies was functional, e.g., for elastase inhibition.

[3719] Among other things, data presented herein confirm that transgenic mouse models expressing human ADAR are useful for assessing ADAR editing agents, e.g., oligonucleotides. In some embodiments, as confirmed herein, up to 40% or more editing of SERPINA1 Z allele mRNA were provided (e.g., in liver at certain time points). In some embodiments, provided editing levels are nearing correction to heterozygotes (MZ). In some embodiments, as confirmed herein, provided technologies provide significant increase in circulating functional wild-type M-AAT protein in vivo. In some embodiments, provided technologies reduce levels of mutant Z-AAT protein in, e.g., liver, serum, etc.

### Example 40. Provided Technologies can Modulate Protein-Protein Interactions

[3720] As confirmed herein, provided technologies among other things can modulate protein-protein interactions, e.g., through adenosine editing in mRNA and changing identities of amino acid residues in polypeptides encoded thereby. In some embodiments, provided technologies modulate protein-protein interactions, activities, and/or functions by, e.g., editing one or more amino acid residues of one or more proteins. As demonstrated herein, editing of various residues of Keap1 or Nrf2 can modulate their interactions, activities and/or functions. For example, in some embodiments, editing of residues of Keap1 or Nrf2 increase levels of Nrf2, transcription of nucleic acids that can be activated by Nrf2 and/or expression of Nrf2-regulated genes. Keap1 has been reported to NRF2 and mediate NRF2 proteasomal degradation. In some embodiments, disrupting interactions between Keap1 and NRF2 allows post-transcriptional upregulation of NRF2 and translocation of NRF2 to the nucleus, where it may activate transcription of NRF2-regulated genes. As demonstrated herein, various oligonucleotides were designed to target specific editing sites in either Keap1 or Nrf2 transcripts. As shown in FIG. 41, (a), various oligonucleotides can provide editing at multiple sites in Keap1 or NRF2 transcripts. In some embodiments, editing of Keap1 and/or Nrf2 transcripts may alter expression levels of downstream genes regulated by NRF2 (e.g., SRGN, HMOX1, SLC7a11, NQO1, etc., as shown in FIG. 41, (b)). In some embodiments, oligonucleotides provide editing of Keap1 or NRF2 transcripts that change amino acid residues, which can disrupt of Keap1/NRF2 complex formation and stability, and modulate NRF2 levels, translocation and/or expression of nucleic acids regulated by NRF2. In some embodiments, certain oligonucleotides provide higher editing levels compared to others. In some embodiments, oligonucleotides comprise non-negatively charged internucleotidic linkages (e.g., phosphoryl guanidine internucleotidic linkages such as n001) at a 5′- and/or 3′-end. In some embodiments, oligonucleotides comprise 2′-OR modified sugars wherein R is not hydrogen (e.g., wherein R is optionally substituted C₁₋₆ aliphatic) such as 2′-OMe modified sugars at 5′- and/or 3′-end. In some embodiments, oligonucleotides comprise 2′-F modified sugars at 5′- and/or 3′-end. Those skilled in the art appreciate that various oligonucleotide designs described herein may be applied for modulating interactions between polypeptides.

### Example 41. Provided Technologies can Provide Robust Durable Editing In Vivo

[3721] In some embodiments, the present disclosure provides oligonucleotide compositions that can, among other things, provide editing activities in various systems, e.g., in various cells, tissues, and/or organs in vivo. Certain data are presented in FIG. 42, confirming that provided technologies can provide durable editing in various tissues in vivo, including in CNS. Human ADAR (hADAR) transgenic mice described herein were treated with a single 100 ug dose of WV-40590 oligonucleotide composition through intracerebroventricular (ICV) injection. Mice were sacrificed at 1 week, 2 weeks, 4 weeks, 8 weeks, 12 weeks, and 16 weeks post-dose and multiple CNS tissues were collected and analyzed. As shown in FIG. 42, UGP2 mRNA editing was achieved in all tissues analyzed. In some embodiments, UGP2 editing levels were comparable across various time points analyzed. Among other things, these data demonstrate that provided technologies can provide effective editing of various tissues in vivo for at least 16 weeks.

### Example 42. Provided Technologies can Provide Editing

[3722] Oligonucleotides comprising various types of sugars, nucleobases, internucleotidic linkages, and stereochemistry and patterns therefor were designed and assessed. Certain oligonucleotides target specific editing sites in UGP2 transcripts. As shown in FIG. 43 and FIG. 44, oligonucleotides comprising various types of sugars (e.g., DNA sugars, 2′-F modified sugars, 2′-OR modified sugars wherein R is not hydrogen, and patterns thereof), nucleobases (modified and unmodified bases and patterns thereof), internucleotidic linkages (e.g., natural phosphate linkages, non-negatively charged internucleotidic linkages, phosphorothioate internucleotidic linkages, and patterns thereof), and stereochemistry (e.g., Rp, Sp, and patterns thereof) and patterns thereof can provide editing activities. In some embodiments, 2′-F in second domains (e.g., in regions to the 3′-side of N₀; in some embodiments, from N₋₂ to 3′-end of an oligonucleotide) and/or natural phosphate linkages and/or 2′-OR wherein R is C₁₋₆ optionally substituted aliphatic (e.g., 2′-OMe, 2′-MOE, etc.) in first domains (e.g., in regions to the 5′-side of N₀; in some embodiments, from 5′-end of an oligonucleotide to N₂) and/or in second domains provide improved editing efficiency. Oligonucleotides were tested in human hepatocytes by gymnotic uptake (FIG. 43) and IPSC derived neurons (FIG. 44). In some embodiments, certain oligonucleotides provide higher editing compared to others at specific concentrations.

### Example 43. Provided Technologies can Provide Editing In Vivo

[3723] Oligonucleotides comprising various types of sugars, nucleobases, internucleotidic linkages, stereochemistry, additional chemical moieties, etc. and patterns therefor were designed and assessed. Certain oligonucleotides target specific editing sites in UGP2 transcripts. As shown in FIG. 45, provided oligonucleotide compositions can provide editing activities in various tissues in vivo, including in liver. Oligonucleotides were tested in wild-type (Wt) and transgenic hADAR mice through subcutaneous administration of 3 doses of 10 mg/kg (0, 2, and 4 days, respectively). In some embodiments, certain oligonucleotide compositions provide higher editing compared to others. In some embodiments, certain oligonucleotide compositions provide much higher editing in hADAR mice compared to wt mice. In some embodiments, certain oligonucleotide compositions provide high editing levels in both wt and hADAR mice.

### Example 44. Provided Technologies can Provide Editing in Various Cell Populations

[3724] In some embodiments, the present disclosure provides oligonucleotide compositions that can, among other things, provide editing activities in various systems, e.g., in various cells, tissues, and/or organs. Certain data are presented in FIG. 46, confirming that provided technologies can provide editing in various immune cell populations including PBMCs. Among other things, provided technology can provide editing in cell populations such as CD4+, CD8+, CD14+, CD19+, NK, Treg cells, etc. Cells were treated with 10 uM WV-37317 under activating (addition of PHA) or non-activating conditions. RNA was isolated 4 days post-treatment through benchtop antibody/bead protocols. As shown in FIG. 46, ACTB mRNA editing was achieved in multiple immune cell populations. In some embodiments, ACTB editing levels were comparable for activated and non-activated cell populations. In some embodiments, ACTB editing levels were increased for activated cell populations.

### Example 45. Provided Technologies can Provide Editing In Vivo

[3725] In some embodiments, the present disclosure provides oligonucleotide compositions that can, among other things, provide editing activities in various systems, e.g., in various cells, tissues, and/or organs in vivo. Certain data are presented in FIG. 47, confirming that provided technologies can provide editing in vivo including in eyes. A single 10 ug or 50 ug ICV injection of WV-40590 oligonucleotide composition was administered in posterior compartment of eye of transgenic hADAR mice. RNA was isolated 1 week and 4 weeks post-treatment. As shown in FIG. 47, robust UGP2 mRNA editing was achieved in eye at both doses.

### Example 46. Provided Technologies can Provide Durable Editing In Vivo

[3726] Among other things, provided technologies can provide durable editing in vivo. Certain data are presented in FIG. 48, confirming that provided technologies can provide durable editing in a mouse model. Wild-type and transgenic hADAR mice were treated with PBS or 10 mg/kg of WV-44464 oligonucleotide composition at days 0, 2, and 4. Serum was collected through weekly blood draws and levels of total human AAT protein (total, wild-type (M-AAT), and mutant (Z-AAT)) were quantified by ELISA and mass spectrometry. As shown in FIG. 48, provided technologies can increase total human AAT serum concentration, and can generate or increase wild-type AAT protein (M-AAT). In some embodiments, it was observed AAT serum concentrations were ≥3-fold higher over 30 days post last dose (FIG. 48, (a)). In some embodiments, restored wild type M-AAT was detected over 30 days post last dose (FIG. 48, (b)).

### Example 47. Provided Technologies can Provide Editing

[3727] Oligonucleotides comprising various types of sugars, nucleobases, internucleotidic linkages, and stereochemistry and patterns therefor were designed and assessed, confirming that oligonucleotides of various designs can provide efficient editing, including those comprising alternating blocks comprising 2′-F and blocks comprising 2′-OR wherein R is C₁₋₆ aliphatic (2′-OMe and/or 2′-MOE) blocks, natural phosphate linkages, phosphorothioate internucleotidic linkage internucleotidic linkages, non-negatively charged internucleotidic linkages (e.g., phosphoryl guanidine internucleotidic linkages such as n001s), controlled stereochemistry, patterns thereof, etc. as described herein. As shown in FIG. 49 and FIG. 51, oligonucleotides comprising various types of sugars (e.g., DNA sugars, 2′-F modified sugars, 2′-OR modified sugars wherein R is not hydrogen, and patterns thereof), nucleobases (modified and unmodified bases and patterns thereof), internucleotidic linkages (e.g., natural phosphate linkages, non-negatively charged internucleotidic linkages, phosphorothioate internucleotidic linkages, and patterns thereof), and stereochemistry (e.g., Rp, Sp, and patterns thereof) and patterns thereof can provide robust editing activities. Primary mouse hepatocytes transgenic for hADAR p110 and SERPINA1-Z allele were treated with GalNAc-conjugated oligonucleotides via gymnotic uptake. RNA was harvested 48 hours post-treatment and RNA editing was measured by Sanger sequencing (n=2 biological replicates). Certain EC50 (nM) data were provided below (FIG. 49 and FIG. 51):

| ID | EC50 | 95% CI (nM) |
|---|---|---|
| WV-44464 | 13.67 | 8.574-21.50 |
| WV-46312 | 5.139 | 3.347-7.647 |
| WV-46313 | 4.304 | 2.59-6.778 |
| WV-46314 | 6.179 | 2.798-12.54 |
| WV-46315 | 7.121 | 3.471-13.75 |
| WV-46316 | 6.957 | 4.929-9.661 |
| WV-46317 | 5.34 | 3.743-7.471 |
| WV-46318 | 9.433 | 6.306-13.89 |
| WV-46319 | 6.068 | 2.971-11.57 |
| WV-46320 | 7.058 | 3.923-12.17 |
| WV-46321 | 9.851 | 5.987-15.84 |
| WV-46322 | 6.574 | 4.944-8.657 |
| WV-46323 | 4.951 | 2.790-8.281 |
| WV-46312 | 3.52 | 2.98-4.04 |
| WV-47606 | 3.38 | 2.78-3.96 |
| WV-47608 | 2.44 | 1.91-2.96 |
| WV-49085 | 2.70 | 2.13-3.26 |
| WV-49086 | 2.81 | 2.28-3.34 |
| WV-49087 | 4.53 | 3.61-5.43 |
| WV-49088 | 4.03 | 3.23-4.83 |
| WV-49089 | 6.14 | 5.06-7.21 |
| WV-49090 | 2.46 | 2.14-2.76 |
| WV-49092 | 3.47 | 2.97-3.96 |

### Example 48. Provided Technologies can Provide Editing In Vivo

[3728] Oligonucleotides comprising various types of sugars, nucleobases, internucleotidic linkages, and stereochemistry and patterns therefor were designed and assessed, including those comprising alternating blocks comprising 2′-F and blocks comprising 2′-OR wherein R is C₁₋₆ aliphatic (2′-OMe and/or 2′-MOE) blocks, natural phosphate linkages, phosphorothioate internucleotidic linkage internucleotidic linkages, non-negatively charged internucleotidic linkages (e.g., phosphoryl guanidine internucleotidic linkages such as n001s), controlled stereochemistry, patterns thereof, etc. as described herein. Certain data are presented in FIG. 50, confirming that provided technologies can provide robust editing in a mouse model. Male and female transgenic hADAR mice were treated with indicated oligonucleotides at 5 mg/kg via subcutaneous administration at days 0, 2, and 4. Liver biopsies were collected at day 7 post-treatment and RNA editing was measured by Sanger sequencing (n=3 animals per gender). As shown in FIG. 50, provided oligonucleotide compositions can provide high editing levels. In some embodiments, certain oligonucleotide compositions may provide higher editing levels in male mice as compared to female mice.

### Example 49. Provided Technologies can Provide Edited Polypeptides with Desired Properties and Functions In Vivo

[3729] In some embodiments, the present disclosure provides oligonucleotide compositions that can, among other things, provide editing activities in various systems, e.g., in various cells, tissues, and/or organs in vivo and generate polypeptides with desired properties and activities, e.g., in some embodiments, wild-type proteins. Certain data are presented in FIG. 52, confirming that provided technologies in some embodiments can provide editing in a mouse model, and/or can produce increased levels of circulating proteins including wild-type proteins in serum. Wild-type and transgenic hADAR mice were treated with PBS or 10 mg/kg of WV-46312 oligonucleotide composition at days 0, 2, and 4. Serum was collected through weekly blood draws and levels of total human AAT protein (wild-type (PiM), and mutant (PiZ) were quantified by ELISA and mass spectrometry. As shown in FIG. 52, provided technologies can increase AAT serum concentration by about 4-fold or more, and can generate high levels of wild-type AAT in serum, relative to a reference (e.g., pre-dose levels).

### Example 50. Provided Technologies can Provide Editing In Vitro and In Vivo

[3730] Among other things, the present example provides data further confirming that provided technologies can provide editing.

[3731] For example, FIG. 53 confirms that oligonucleotides comprising various modifications including various base modifications as described herein (e.g., s b001A, b001rA, CSM15, b008U, etc.) can edit target adenosines. Primary mouse hepatocytes (huADAR/SA1 Tg) were treated with indicated oligonucleotide compositions targeting SERPINA1-Z allele for 48 hrs (gymnotic). RNA editing was quantified by Sanger sequencing.

[3732] FIG. 54 confirms that various modifications can be utilized in accordance with the present disclosure in oligonucleotides to provide editing. Primary mouse hepatocytes (huADAR/SA1 Tg) were treated with indicated oligonucleotide compositions targeting SERPINA1-Z allele for 48 hrs (gymnotic). Oligonucleotides comprising modified nucleobase such as b008U in the position across the target adenosine edit site, various types of linkages (e.g., PS (phosphorothioate), PO (natural phosphate linkage) and/or PN (e.g., phosphoryl guanidine linkages such as n001) internucleotidic linkages) and various types of sugars (e.g., 2′-OMe modified sugars, 2′-F modified sugars, natural DNA sugars, etc.) were assessed and confirmed to provide editing of target adenosines. RNA editing was quantified by Sanger sequencing.

[3733] FIG. 55 confirms that various modifications can be utilized in accordance with the present disclosure in oligonucleotides to provide editing. Primary mouse hepatocytes (huADAR/SA1 Tg) were treated with indicated oligonucleotide compositions targeting SERPINA1-Z allele for 48 hrs (gymnotic). Oligonucleotides comprising modified nucleobase such as b001A in the position across the target adenosine edit site, various types of linkages (e.g., PS (phosphorothioate), PO (natural phosphate linkage) and/or PN (e.g., phosphoryl guanidine linkages such as n001) internucleotidic linkages) and various types of sugars (e.g., 2′-OMe modified sugars, 2′-F modified sugars, natural DNA sugars, etc.) were assessed and confirmed to provide editing of target adenosines. RNA editing was quantified by Sanger sequencing. As confirmed, non-negatively charged internucleotidic linkages such as phosphoryl guanidine internucleotidic linkages like n001 can be utilized in various positions; Rp phosphorothioate internucleotidic linkages and natural phosphate linkage can also be utilized. In some embodiments, first domains comprise one or more Rp phosphorothioate internucleotidic linkages, one or more non-negatively charged internucleotidic linkages such as phosphoryl guanidine internucleotidic linkages like n001 (each optionally and independently in Rp configuration) and one or more natural phosphate linkages. In some embodiments, as shown in various Figures, hypoxanthine is utilized in place of G when close to N₀, e.g., at position N₋₁.

[3734] FIG. 56 confirms that various modifications can be utilized in accordance with the present disclosure in oligonucleotides to provide editing. Primary mouse hepatocytes (huADAR/SA1 Tg) were treated with indicated oligonucleotide compositions targeting SERPINA1-Z allele for 48 hrs (gymnotic). Oligonucleotides comprising modified nucleobase such as b001A, b008U, b010U, b001C, b008C, b011U, b002G, b012U, etc. in the position across the target adenosine edit site, various types of modified linkages (e.g., PS (phosphorothioate), PN (e.g., phosphoryl guanidine linkages such as n001), etc.) and various types of sugars (e.g., 2′-OMe modified sugars, 2′-F modified sugars, natural DNA sugars, etc.) were assessed and confirmed to be able to provide editing of target adenosines. RNA editing was quantified by Sanger sequencing. It was observed that certain base modifications can provide higher editing levels under the conditions tested.

[3735] FIG. 57 confirms that various modifications can be utilized in accordance with the present disclosure in oligonucleotides to provide editing. Primary mouse hepatocytes (huADAR/SA1 Tg) were treated with indicated oligonucleotide compositions targeting SERPINA1-Z allele for 48 hrs (gymnotic). Oligonucleotides comprising modified nucleobase such as b008U, b010U, b001C, b008C, b011U, and b012U (e.g., at N₁, N₀, etc.), various types of modified linkages (e.g., PS (phosphorothioate), PN (e.g., phosphoryl guanidine linkages such as n001), etc.) and various types of sugars (e.g., 2′-OMe modified sugars, 2′-F modified sugars, natural DNA sugars, etc.) were assessed and confirmed to be able to provide editing of target adenosines. RNA editing was quantified by Sanger sequencing. It was observed that certain base modifications can provide higher editing levels under the conditions tested.

[3736] FIG. 58 confirms that various modifications can be utilized in accordance with the present disclosure in oligonucleotides to provide editing. Primary mouse hepatocytes (huADAR/SA1 Tg) were treated with indicated oligonucleotide compositions targeting SERPINA1-Z allele for 48 hrs (gymnotic). Oligonucleotides comprising modified nucleosides such as Usm04, Csm04, and rCsm13 at N₀ and/or N₁ were assessed and confirmed to provide editing of target adenosines in certain instances. In some embodiments, it was observed that certain modifications (e.g., those comprising UNA sugars such as sm04) at N₀ and/or N₁ provided lower editing levels compared to other modifications under the tested conditions. RNA editing was quantified by Sanger sequencing.

[3737] FIG. 59 confirms that various modifications can be utilized in accordance with the present disclosure in oligonucleotides to provide editing. Primary mouse hepatocytes (huADAR/SA1 Tg) were treated with indicated oligonucleotide compositions targeting SERPINA1-Z allele for 48 hrs (gymnotic). Oligonucleotides comprising various modifications such as Csm11, Csm12, b009Csm11, b009Csm12, Gsm11, Gsm12, Tsm11, Tsm12, L010, etc. (e.g., at one or more of N₁, N₀ and N₋₁ positions) were assessed and confirmed to provide editing of target adenosines. RNA editing was quantified by Sanger sequencing. In some embodiments, oligonucleotides comprising natural DNA sugars at N₋₁ and/or N₀ provide higher editing levels compared to those comprising acyclic sugars. In some embodiments, acyclic sugars such as sm11, sm12, etc., can be utilized at N₁.

[3738] FIG. 60 confirms that various modifications can be utilized in accordance with the present disclosure in oligonucleotides to provide editing. Primary mouse hepatocytes (huADAR/SA1 Tg) were treated with indicated oligonucleotide compositions targeting SERPINA1-Z allele for 48 hrs (gymnotic). Oligonucleotides comprising various modifications and patterns thereof as described herein can provide robust editing. For example, in some embodiments, N₀ sugars whose 2′-groups are independently selected from —H and —OH can provide robust editing (e.g., natural DNA sugar, sm15, etc.). In some embodiments, a N₁ sugar is a natural DNA sugar or a 2′-F modified sugar. In some embodiments, oligonucleotides comprising a 2′-F modified or a natural DNA sugar at N₁ position and natural DNA sugars at N₀ and N₋₁ positions can provide high editing levels. RNA editing was quantified by Sanger sequencing.

[3739] FIG. 61 confirms that various modifications can be utilized in accordance with the present disclosure in oligonucleotides to provide editing. Primary mouse hepatocytes (huADAR/SA1 Tg) were treated with indicated oligonucleotide compositions targeting SERPINA1-Z allele for 48 hrs (gymnotic). Oligonucleotides comprising various types of linkages (e.g., PS (phosphorothioate), PO (natural phosphate linkage) and/or PN (e.g., phosphoryl guanidine linkages such as n001) internucleotidic linkages) and various types of sugars (e.g., 2′-OMe modified sugars, 2′-F modified sugars, natural DNA sugars, etc.) were assessed and confirmed to provide editing of target adenosines. In some embodiments, oligonucleotides comprising increased levels of 2′-OMe modified sugars and PO linkages may provide comparable or increased editing activity relative to a reference at certain concentrations. RNA editing was quantified by Sanger sequencing. As demonstrated, 2′-OR modified sugars wherein R is not —H (e.g., 2′-OMe modified sugars) can be utilized at various positions, including the first and last several nucleosides, first domains, first subdomains, third subdomains, etc. In some embodiments, about 30%-80% (e.g., about 30%-75%, 30%-70%, 30%-65%, 30%-60%, 30%-50%, 40%-70%, 40%-65%, 40%-60%, 40%-50%, or about 30%, 40%, 50%, 60%, 65%, or 70%) of all sugars in an oligonucleotide are each independently a 2′-OR modified sugar wherein R is not —H (e.g., 2′-OMe, 2′-MOE, 2′-O-L^{B}-4′ modified sugars). In some embodiments, about 30%-80% (e.g., about 30%-75%, 30%-70%, 30%-65%, 30%-60%, 30%-50%, 40%-70%, 40%-65%, 40%-60%, 40%-50%, or about 30%, 40%, 50%, 60%, 65%, or 70%) of all sugars in an oligonucleotide are each independently a 2′-OMe or 2′-MOE modified sugar. In some embodiments, about 30%-80% (e.g., about 30%-75%, 30%-70%, 30%-65%, 30%-60%, 30%-50%, 40%-70%, 40%-65%, 40%-60%, 40%-50%, or about 30%, 40%, 50%, 60%, 65%, or 70%) of all sugars in an oligonucleotide are each independently a 2′-OMe modified sugar. In some embodiments, oligonucleotides comprise one or more (e.g., 1-10, 2-10, 3-9, 3-8, 1, 2, 3, 4, 5, 6, 7, 8, 9, or 10) natural phosphate linkages. In some embodiments, natural phosphate linkages are utilized internally (e.g., not bonded to the first and the last 1, 2 or 3 nucleosides). In some embodiments, at least about 50%, 60%, 70%, 75%, 80%, 85%, or 90% of natural phosphate linkages are each independently bonded to at least one sugar comprising a 2′-OR modification wherein R is not —H (e.g., 2′-OMe, 2′-MOE, etc.). In some embodiments, natural phosphate linkages are each independently bonded to at least one sugar comprising a 2′-OR modification wherein R is not —H (e.g., 2′-OMe, 2′-MOE, etc.).

[3740] FIG. 62 confirms that various modifications can be utilized in accordance with the present disclosure in oligonucleotides to provide editing. Primary mouse hepatocytes (huADAR/SA1 Tg) were treated with indicated oligonucleotide compositions targeting SERPINA1-Z allele for 48 hrs (gymnotic). Oligonucleotides comprising various types of nucleobases, linkages (e.g., PS (phosphorothioate), PO (natural phosphate linkage) and/or PN (e.g., phosphoryl guanidine linkages such as n001) internucleotidic linkages) and sugars (e.g., 2′-OMe modified sugars, 2′-F modified sugars, natural DNA sugars, etc.) were assessed and confirmed to provide editing of target adenosines. As shown herein, 2′-OR modifications wherein R is not —H (e.g., 2′-OMe) can be utilized at various positions in first domains, first subdomains, and/or third subdomains. RNA editing was quantified by Sanger sequencing.

[3741] See, e.g., also FIG. 63, FIG. 64, FIG. 65, FIG. 66, FIG. 67, FIG. 68, FIG. 69 and FIG. 70 for additional data confirming that sugar modifications, e.g., 2-OR modifications wherein R is not —H (such as 2′-OMe, 2′-MOE, etc.), 2′-F, etc., can be utilized with various other structural elements in accordance with the present disclosure to provide editing. Primary mouse hepatocytes (huADAR/SA1 Tg) were treated with indicated oligonucleotide compositions targeting SERPINA1-Z allele for 48 hrs (gymnotic). Oligonucleotides comprising various types of linkages (e.g., PS (phosphorothioate), PO (natural phosphate linkage) and/or PN (e.g., phosphoryl guanidine linkages such as n001) internucleotidic linkages) and various types of sugars (e.g., 2′-OMe modified sugars, 2′-MOE modified sugars, 2′-F modified sugars, natural DNA sugars, etc.) were assessed and confirmed to provide editing of target adenosines. In some embodiments, oligonucleotides comprising increased levels of 2′-OMe and/or 2′-MOE modified sugars and PO linkages provide comparable or increased editing of target adenosines relative to a reference at certain conditions. RNA editing was quantified by Sanger sequencing.

[3742] FIG. 71 further confirms that various modifications can be utilized in accordance with the present disclosure in oligonucleotides to provide editing. Primary mouse hepatocytes (huADAR/SA1 Tg) were treated with indicated oligonucleotide compositions targeting SERPINA1-Z allele for 48 hrs (gymnotic). Oligonucleotides comprising various types of linkages (e.g., PS (phosphorothioate), PO (natural phosphate linkage) and/or PN (e.g., phosphoryl guanidine linkages such as n001) internucleotidic linkages) and various types of sugars (e.g., 2′-OMe modified sugars, 2′-F modified sugars, natural DNA sugars, sm15, etc.) were assessed and confirmed to provide editing of target adenosines. In some embodiments, oligonucleotides comprising sm15 or natural RNA sugar at N₋₂ may provide robust editing under certain conditions. RNA editing was quantified by Sanger sequencing.

[3743] As described herein, various modified charged internucleotidic linkages can be utilized in accordance with the present disclosure. In some embodiments, a modified internucleotidic linkage is a non-negatively charged internucleotidic linkage. In some embodiments, a non-negatively charged internucleotidic linkage is a neutral internucleotidic linkage. In some embodiments, a modified internucleotidic linkage is a phosphoryl guanidine internucleotidic linkage. In some embodiments, a modified internucleotidic linkage is n001. In some embodiments, a modified internucleotidic linkage has the structure of —OP(O)(—N(R′)SO₂R″)O— or a salt thereof wherein each of R′ and R″ is independently as described herein. In some embodiments, R′ is R as described herein. In some embodiments, R′ is —H or optionally substituted C₁₋₆ aliphatic. In some embodiments, R′ is —H. In some embodiments, a modified internucleotidic linkage has the structure of —OP(O)(—NHSO₂R″)O— or a salt thereof wherein R″ is as described herein. In some embodiments, R″ is R as described herein wherein R is not —H. In some embodiments, R″ is optionally substituted group selected from C₁₋₆ aliphatic and phenyl. In some embodiments, R″ is optionally substituted phenyl. For example, in some embodiments, R″ is 4-methylphenyl. In some embodiments, R″ is 4-(CH₃C(O)NH)C₆H₄. In some embodiments, R″ is optionally substituted C₁₋₆ aliphatic. In some embodiments, R″ is optionally substituted C₁₋₆ alkyl. In some embodiments, R″ is methyl. In some embodiments, R″ is ethyl. In some embodiments, R″ is n-propyl. In some embodiments, R″ is isopropyl. In some embodiments, R″ is n-butyl. In some embodiments, a linkage is n002. In some embodiments, a linkage is n006. In some embodiments, a linkage is n020. In some embodiments, as confirmed in FIG. 72, such internucleotidic linkages may be utilized in place of phosphoryl guanidine internucleotidic linkages such as n001. For example, in some embodiments, such internucleotidic linkages are utilized at 5′-end and/or 3′-end. In some embodiments, such linkages are utilized internally. For example, in some embodiments, such internucleotidic linkages may be utilized between nucleosides N₋₁ and N₋₂. For FIG. 72, primary mouse hepatocytes (huADAR/SA1 Tg) were treated with indicated oligonucleotide compositions targeting SERPINA1-Z allele for 48 hrs (gymnotic). RNA editing was quantified by Sanger sequencing.

[3744] In some embodiments, morpholine units may be utilized in place of natural sugars. FIG. 73 confirms that such modifications can be utilized in accordance with the present disclosure in oligonucleotides to provide editing. Primary mouse hepatocytes (huADAR/SA1 Tg) were treated with indicated oligonucleotide compositions targeting SERPINA1-Z allele for 48 hrs (gymnotic). Oligonucleotides comprising various types of linkages (e.g., PS (phosphorothioate), PO (natural phosphate linkage) and/or PN (e.g., phosphoryl guanidine linkages such as n001) internucleotidic linkages) and various types of sugars (e.g., 2′-OMe modified sugars, 2′-F modified sugars, natural DNA sugars, morpholine sugars, etc.) were assessed and confirmed to provide editing of target adenosines. In some embodiments, oligonucleotides comprising morpholine sugars and various modifications (e.g., Gsm01, Tsm01, Tsm01n013, Gsm01n013, Tsm18) provide comparable or reduced editing of target adenosines relative to a reference at certain concentrations. RNA editing was quantified by Sanger sequencing.

[3745] FIG. 74 confirms that various modifications can be utilized in accordance with the present disclosure in oligonucleotides to provide editing. Primary mouse hepatocytes (huADAR/SA1 Tg) were treated with indicated oligonucleotide compositions targeting SERPINA1-Z allele for 48 hrs (gymnotic). Oligonucleotides comprising various base modifications (e.g., b001A, b008U, etc.), types of linkages (e.g., PS (phosphorothioate), PO (natural phosphate linkage) and/or PN (e.g., phosphoryl guanidine linkages such as n001) internucleotidic linkages) and various types of sugars (e.g., 2′-OMe modified sugars, 2′-F modified sugars, natural DNA sugars, morpholine sugars, etc.) were assessed and confirmed to provide editing of target adenosines. In some embodiments, oligonucleotides comprising morpholine sugars and various modifications (e.g., Gsm01, Tsm01, Csm01, Csm01n013, Tsm01n013, Gsm01n013, Tsm18) provide comparable or reduced editing of target adenosines relative to a reference at certain concentrations. RNA editing was quantified by Sanger sequencing.

[3746] Dose response for various oligonucleotide compositions were assessed. Certain results for certain compositions are presented below as examples. Primary mouse (transgenic for humanADARp110 and SERPINA1-Z allele) hepatocytes were treated with indicated oligonucleotide compositions targeting SERPINA1-Z allele for 48 hrs. RNA editing was quantified by Sanger sequencing. Oligonucleotides comprising various modifications were assessed and confirmed to provide editing of target adenosines. Serial dilution concentrations from about 1000 nM to about 0.5 nM. About 15%-40% editing observed at the lowest concentration and about 85% editing observed at the highest concentrations.

| ID | Absolute EC50 (nM) | 95% CI (nM) |
|---|---|---|
| WV-46312 | 7.74 | 1.09-14.39 |
| WV-46313 | 4.19 | 1.88-6.51 |
| WV-47597 | 6.74 | 4.45-9.03 |
| WV-47598 | 7.02 | 3.53-10.52 |
| WV-47599 | 6.73 | 4.44-9.02 |
| WV-47600 | 8.24 | 6.18-10.29 |
| WV-47601 | 5.03 | 3.61-6.45 |
| WV-47602 | 3.76 | 1.32-6.2 |
| WV-47603 | 6.93 | 5.21-8.66 |
| WV-47604 | 8.01 | 6.17-9.85 |
| WV-47605 | 6.98 | 4.01-9.95 |
| WV-47606 | 4.32 | 3.19-5.46 |
| WV-47607 | 4.89 | 1.3-8.48 |
| WV-47608 | 3.26 | 0.41-6.11 |
| WV-47609 | 10.71 | 7.38-14.04 |
| WV-44464 | 10.70 | 6.11-15.29 |

[3747] Among other things, the present disclosure provides various nearest neighbor pairs that are not perfect matches at both N₁ and N₋₁ positions yet can provide robust, in some embodiments, comparable to or better than perfect matches. FIG. 75 shows an example. Primary mouse hepatocytes (huADAR/SA1 Tg) were treated with indicated oligonucleotide compositions targeting SERPINA1-Z allele for 48 hrs (gymnotic). RNA editing was quantified by Sanger sequencing.

[3748] FIG. 76 confirms that various modifications can be utilized in accordance with the present disclosure in oligonucleotides to provide editing. Primary mouse hepatocytes (huADAR/SA1 Tg) were treated with indicated oligonucleotide compositions targeting SERPINA1-Z allele for 48 hrs (gymnotic). Oligonucleotides comprising various modifications (e.g., in b008U, b012U, b013U, b001A, b002A, b003A, b004I, b002G, b009U, etc.) were assessed and confirmed to provide editing of target adenosines. In some embodiments, oligonucleotides comprising a modified base (e.g., b008U, b012U, b013U, b001A, b002A, b003A, b004I, b002G, b009U, etc.) across from the edit site (position N₀) provided comparable or increased editing activity as compared to a reference. RNA editing was quantified by Sanger sequencing.

[3749] As described herein, various sugars and nucleobases may be utilized at positions including N₁ FIG. 77 confirms that various such sugars and/or nucleobases, including modified sugars and/or nucleobases, can be utilized in accordance with the present disclosure in oligonucleotides to provide editing. Primary mouse hepatocytes (huADAR/SA1 Tg) were treated with indicated oligonucleotide compositions targeting SERPINA1-Z allele for 48 hrs (gymnotic). Oligonucleotides comprising various nucleobases and sugars at N₁, e.g., in dT, b002A, b003A, b008U, b001C, Tsm11, Tsm12, b004C, b007C, etc., were assessed and confirmed to provide editing of target adenosines. In some embodiments, oligonucleotides comprising such sugars and/or nucleobases at N₁ position provided robust editing activity under certain conditions. RNA editing was quantified by Sanger sequencing. Additional data are presented in FIG. 78 confirming that various sugars and nucleobases may be utilized at N₁ in combination with other structural elements (e.g., various sugars, nucleobases, internucleotidic linkages, stereochemistry, etc.) in accordance with the present disclosure to provide editing. For FIG. 78, primary mouse hepatocytes (huADAR/SA1 Tg) were treated with indicated oligonucleotide compositions targeting SERPINA1-Z allele for 48 hrs (gymnotic). Oligonucleotides comprising various sugars and nucleobases at N₁, e.g., in dT, b003A, b008U, b001C, b008C, Tsm11, Tsm12, b004C, Csm17, etc., were assessed and confirmed to provide editing of target adenosines. In some embodiments, oligonucleotides comprising such sugars and/or nucleobases at N₁ position provided robust editing activity under certain conditions. RNA editing was quantified by Sanger sequencing. As shown in various Figures, in many embodiments, natural and/or modified nucleobases (e.g., C, b008U, etc.) and/or natural DNA sugar are utilized at N₀, and/or natural and/or modified nucleobases (e.g., hypoxanthine) and/or natural DNA sugar are utilized at N₋₁.

[3750] Similarly, the present disclosure describes various useful sugars and nucleobases for utilization at N₋₁ and useful internucleotidic linkages that can be utilized for connecting N₋₁ to its neighboring nucleosides. For example, FIG. 79 confirms that various sugars, nucleosides, internucleotidic linkages, etc. can be utilized to provide editing. Primary hepatocytes were treated with indicated oligonucleotide compositions targeting SERPINA1-Z allele for 48 hrs. Oligonucleotides comprising various sugars and nucleobases at N₋₁ (e.g., in dI, b001A, b003A, b008U, b001C, b008C, Tsm11, Tsm12, b004C, Csm17, etc.), various linkages (e.g., PS (phosphorothioate) or PN (e.g., phosphoryl guanidine linkages such as n001) linkage between N₋₁ and N₋₂ (e.g., Rp, Sp or stereorandom), PS linkage between N₀ and N₋₁, etc.), etc. were assessed and confirmed to provide editing of target adenosines. In some embodiments, certain nucleobases, sugars and/or internucleotidic linkages provide higher editing levels compared to others. RNA editing was quantified by Sanger sequencing. Additional data are presented in FIG. 80 (e.g., oligonucleotides comprising dI, b001A, b002A, b003A, b008U, b008C, Tsm11, Tsm12, b004C, Csm17, etc. at N₋₁) and FIG. 81 (e.g., oligonucleotides comprising dI, Csm11, Csm12, b009Csm11, b009Csm12, etc.). In some embodiments, certain sugars (e.g., natural DNA sugar) and/or nucleobases (e.g., hypoxanthine, b001A, b003A, etc.) at N₋₁ provide higher editing levels compared to others. In some embodiments, certain sugars (e.g., DNA sugar) and/or nucleobases (e.g., b008U) at N₀ provide higher editing levels compared to others.

[3751] Among other things, the present disclosure provides various internucleotidic linkages for utilization with other structural elements to provide oligonucleotides and compositions thereof. In some embodiments, internucleotidic linkages are non-negatively charged internucleotidic linkages. In some embodiments, internucleotidic linkages are phosphoryl guanidine internucleotidic linkages. As shown in FIG. 82, various internucleotidic linkages, e.g., PN internucleotidic linkages such as n001, n004, n008, n025, n026, etc. can be utilized in accordance with the present disclosure in oligonucleotides to provide editing. Primary mouse hepatocytes (huADAR/SA1 Tg) were treated with indicated oligonucleotide compositions targeting SERPINA1-Z allele for 48 hrs (gymnotic). Oligonucleotides comprising various nucleobases (e.g., b008U, hypoxanthine, b014I, etc.), linkages (e.g., PS (phosphorothioate), PO (natural phosphate linkage) and/or PN (e.g., phosphoryl guanidine linkages such as n001, n004, n008, n025, n026, etc.) internucleotidic linkages) and sugars (e.g., 2′-OMe modified sugars, 2′-F modified sugars, natural DNA sugars, 2′-MOE modified sugars, etc.) were assessed and confirmed to provide editing of target adenosines. RNA editing was quantified by Sanger sequencing. In some embodiments, oligonucleotides comprising various phosphoryl guanidine internucleotidic linkages such as n001, n004, n008, n025, n026, etc. bonded to N₋₁ and N₋₂ provide robust editing. In some embodiments, such internucleotidic linkages are chirally controlled and are Sp. In some embodiments, one or more of non-n001 phosphoryl guanidine internucleotidic linkages may be independently utilized in place of one or more n001 (and/or one or more other types of linkages).

[3752] As described herein, oligonucleotides may comprise duplex regions or may be utilized as duplexes. In some embodiments, a duplexing oligonucleotide forms a duplex with an oligonucleotide that can target and edit a target adenosine. Certain examples are presented below as examples. Serial dilution concentrations from about 1000 nM to about 0.5 nM. About 5%-20% editing observed at the lowest concentration and about 70%-90% editing observed at the highest concentrations. Primary mouse hepatocytes (huADAR/SA1 Tg) were treated with indicated oligonucleotide compositions targeting SERPINA1-Z allele for 48 hrs (gymnotic). Oligonucleotides comprising various types of nucleobases, linkages (e.g., PS (phosphorothioate), PO (natural phosphate linkage) and/or PN (e.g., phosphoryl guanidine linkages such as n001) internucleotidic linkages) and sugars (e.g., 2′-OMe modified sugars, 2′-F modified sugars, natural DNA sugars, 2′-MOE modified sugars, etc.) can form duplexes with corresponding duplexing oligonucleotides. Certain duplexes were assessed as examples and were confirmed to provide editing of target adenosines. RNA editing was quantified by Sanger sequencing. In some embodiments, certain duplexes provided comparable or increased editing activity relative to a reference. In some embodiments, duplexing oligonucleotide comprise 2′-OR modified sugars (wherein R is not —H, e.g., 2′-OMe modified sugars, 2′-MOE modified sugars, etc.) and/or modified internucleotidic linkages (e.g., phosphorothioate internucleotidic linkage) at both ends. In some embodiments, duplexing oligonucleotides comprise 2′-F modified sugars, 2′-OR modified sugars (wherein R is not —H, e.g., 2′-OMe modified sugars, 2′-MOE modified sugars, etc.) and/or natural RNA sugars. In some embodiments, it was observed that duplexing oligonucleotide comprising internal natural RNA sugars may provide higher editing efficiency when duplexed with targeting oligonucleotides (e.g., WV-46312).

| Oligonucleotides | Absolute EC50 | 95% CI |
|---|---|---|
| (WV-) | (nM) | (nM) |
| 46312 | 3.90 | 2.25-5.54 |
| 46312/48444 | 8.92 | 7.72-10.1 |
| 46312/48445 | 5.71 | 4.89-6.52 |
| 46312/48446 | 2.91 | 2.32-3.50 |
| 46312/48447 | 9.68 | 8.36-10.9 |
| 46312/48448 | 6.58 | 5.83-7.33 |
| 46312/48449 | 3.08 | 2.47-3.68 |
| 46312/48450 | 16.66 | 14.4-18.8 |
| 46312/48451 | 8.83 | 7.92-9.73 |
| 46312/48452 | 3.09 | 2.64-3.53 |

[3753] As described herein, provided technologies can be utilized to edit target adenosines in various nucleic acids. For example, as shown in FIG. 83, various oligonucleotides comprising various modifications and patterns thereof can provide editing of target adenosine in UGP2 transcripts. Primary human hepatocytes were treated with indicated oligonucleotide compositions for 48 hrs. RNA editing was quantified by Sanger sequencing. Additional data are presented in FIG. 84 as examples. Primary human hepatocytes were treated with indicated oligonucleotide compositions targeting UGP2 at indicated concentrations for 48 hrs. RNA editing was quantified by Sanger sequencing. In some embodiments, oligonucleotides comprising certain structural elements, e.g., 2′-OR modified sugars at end regions, multiple 2′-F blocks separated by multiple separating blocks (e.g., one or more or each independently a 2′-OR block), and/or 2′-F modified sugar at N₋₃, etc., can provide improved editing efficiency.

[3754] As described herein, provided technologies provide editing in vivo and can provide products, e.g., polypeptides, encoded by edited nucleic acids. For example, FIG. 85 confirms in vivo editing of SERPINA1 and increase of serum AAT levels. Mice transgenic for human ADAR and SERPINA1-Z allele were subcutaneously dosed with PBS or 10 mg/kg oligonucleotide on days 0, 2, and 4. Liver biopsies were collected at day 7 and serum AAT was collected pre-dose and day 7. As confirmed in FIGS. 85, provided oligonucleotide compositions delivered significant editing activity and increased levels of serum AAT relative to reference (e.g., PBS control, pre-dose levels). Serum AAT was quantified using ELISA. Certain additional results are presented in FIG. 86, which confirms that various modifications can be utilized in accordance with the present disclosure to provide oligonucleotides that are active in vivo. Mice transgenic for human ADAR and SERPINA1-Z allele were subcutaneously dosed with PBS or 10 mg/kg oligonucleotides on day 0. Liver biopsies were collected at day 10. Serum was collected pre-dose, day 7, and day 10. Various oligonucleotide compositions were assessed and confirmed to provide editing of target adenosines and increased levels of serum AAT. RNA editing was quantified by Sanger sequencing. Serum AAT was quantified using ELISA.

[3755] While various embodiments have been described and illustrated herein, those of ordinary skill in the art will readily envision a variety of other means and/or structures for performing the functions and/or obtaining the results and/or one or more of the advantages described in the present disclosure, and each of such variations and/or modifications is deemed to be included. More generally, those skilled in the art will readily appreciate that all parameters, dimensions, materials, and configurations described herein are meant to be example and that the actual parameters, dimensions, materials, and/or configurations may depend upon the specific application or applications for which the teachings of the present disclosure is/are used. Those skilled in the art will recognize, or be able to ascertain using no more than routine experimentation, many equivalents to the embodiments of the present disclosure. It is, therefore, to be understood that the foregoing embodiments are presented by way of example only and that, within the scope of the appended claims and equivalents thereto, claimed technologies may be practiced otherwise than as specifically described and claimed. In addition, any combination of two or more features, systems, articles, materials, kits, and/or methods, if such features, systems, articles, materials, kits, and/or methods are not mutually inconsistent, is included within the scope of the present disclosure.

1-95. (canceled)

96. A method for modulating an interaction between NRF2 and KEAP1 proteins in a system, comprising administering to the system an oligonucleotide or composition capable of editing an adenosine in a nucleic acid encoding NRF2, wherein the edited nucleic acid encodes a protein that is different from the protein encoded by the unedited nucleic acid at at least one amino acid residue involved in the interaction between NRF2 and KEAP1.

97. The method of claim 96, wherein the edited adenosine is in a codon encoding an amino acid residue involved in the interaction between NRF2 and KEAP1, and the editing changed the amino acid to a different amino acid.

98. The method of claim 96, wherein the protein-protein interaction is reduced.

99. The method of claim 96, wherein expression of one or more nucleic acids regulated by NRF2 is modulated.

100. The method of claim 99, wherein the one or more nucleic acids encodes one or more proteins selected from SRGN, HMOX1, SLC7a11, or NQO1.

101. The method of claim 96, wherein editing of NRF2 is or comprises editing a codon encoding Glu82 (e.g., to Gly), Glu79 (e.g., to Gly), Glu78 (e.g., to Gly), Asp76 (e.g., to Gly), Ile28 (to Val), Asp27 (e.g., to Gly), or Gln26 (e.g., to Arg).

102. The method of claim 96, wherein the system is or comprises a cell.

103. The method of claim 96, wherein the system is or comprises a CNS cell.

104. The method of claim 96, wherein the system is or comprises a tissue.

105. A method for modulating an interaction between NRF2 and KEAP1 proteins in a system, comprising administering to the system an oligonucleotide or composition capable of editing an adenosine in a nucleic acid encoding KEAP1, wherein the edited nucleic acid encodes a protein that is different from the protein encoded by the unedited nucleic acid at at least one amino acid residue involved in the interaction between NRF2 and KEAP1.

106. The method of claim 105, wherein the edited adenosine is in a codon encoding an amino acid residue involved in the interaction between NRF2 and KEAP1, and the editing changed the amino acid to a different amino acid.

107. The method of claim 105, wherein the protein-protein interaction is reduced.

108. The method of claim 105, wherein expression of one or more nucleic acids regulated by NRF2 is modulated.

109. The method of claim 108, wherein the one or more nucleic acids encodes one or more proteins selected from SRGN, HMOX1, SLC7a11, or NQO1.

110. The method of claim 105, wherein editing of KEAP1 is or comprises editing a codon encoding Ser603 (e.g., to Gly), Tyr572 (e.g., to Cys), Tyr525 (e.g., to Cys), Ser508 (e.g., to Gly), His436 (e.g., to Arg), Asn382 (e.g., to Asp), Arg380 (e.g., to Gly), or Tyr334 (e.g., to Cys).

111. The method of claim 105, wherein the system is or comprises a cell.

112. The method of claim 105, wherein the system is or comprises a CNS cell.

113. A method of modulating expression level of one or more nucleic acids regulated by NRF2, wherein the method comprises administering to the system an oligonucleotide or composition capable of editing an adenosine in a nucleic acid encoding either NRF2 or KEAP1, wherein the edited nucleic acid encodes a protein that is different from the protein encoded by the unedited nucleic acid at at least one amino acid residue involved in the interaction between NRF2 and KEAP1.

114. The method of claim 113, wherein the oligonucleotide or composition is capable of editing an adenosine in a nucleic acid encoding NRF2.

115. The method of claim 113, wherein the oligonucleotide or composition is capable of editing an adenosine in a nucleic acid encoding KEAP1.

116. The method of claim 113, wherein the one or more nucleic acids encodes one or more proteins selected from SRGN, HMOX1, SLC7a11, or NQO1.

The application's sequence listing, which the Patent Office published only in electronic form, follows.

SEQUENCE LISTING (808 sequences)

SEQ ID NO: 1 - RNA, 30 nt, synthetic construct
  misc_feature 1..30: note = Synthetic: WV-40590
  misc_feature 1..30: note = Synthetic: ADR-0102055
  modified_base 1: mod_base = OTHER; note = 2-fluororibose adenine
  modified_base 1..2: mod_base = OTHER; note R-N-(1,3-dimethylimidazolidin-2-ylidene)phosphoramidate
  modified_base 2: mod_base = OTHER; note = 2-fluororibose uracil
  modified_base 2..3: mod_base = OTHER; note = S-phosphorothioate
  modified_base 3: mod_base = OTHER; note = 2-fluororibose cytosine
  modified_base 3..4: mod_base = OTHER; note = S-phosphorothioate
  modified_base 4: mod_base = OTHER; note = 2-fluororibose cytosine
  modified_base 4..5: mod_base = OTHER; note = S-phosphorothioate
  modified_base 5: mod_base = OTHER; note = 2-fluororibose adenine
  modified_base 5..6: mod_base = OTHER; note = S-phosphorothioate
  modified_base 6: mod_base = OTHER; note = 2-fluororibose cytosine
  modified_base 6..7: mod_base = OTHER; note = S-phosphorothioate
  modified_base 7: mod_base = OTHER; note = 2-fluororibose uracil
  modified_base 7..8: mod_base = OTHER; note = S-phosphorothioate
  modified_base 8: mod_base = OTHER; note = 2-fluororibose guanine
  modified_base 8..9: mod_base = OTHER; note = S-phosphorothioate
  modified_base 9: mod_base = OTHER; note = 2-fluororibose uracil
  modified_base 9..10: mod_base = OTHER; note = S-phosphorothioate
  modified_base 10: mod_base = OTHER; note = 2-fluororibose guanine
  modified_base 10..11: mod_base = OTHER; note = S-phosphorothioate
  modified_base 11: mod_base = OTHER; note = 2-fluororibose guanine
  modified_base 11..12: mod_base = OTHER; note = S-phosphorothioate
  modified_base 12: mod_base = OTHER; note = 2-fluororibose cytosine
  modified_base 12..13: mod_base = OTHER; note = S-phosphorothioate
  modified_base 13: mod_base = OTHER; note = 2-fluororibose adenine
  modified_base 13..14: mod_base = OTHER; note = S-phosphorothioate
  modified_base 14: mod_base = OTHER; note = 2-fluororibose cytosine
  modified_base 14..15: mod_base = OTHER; note R-N-(1,3-dimethylimidazolidin-2-ylidene)phosphoramidate
  modified_base 15: mod_base = OTHER; note = 2-fluororibose cytosine
  modified_base 15..16: mod_base = OTHER; note = S-phosphorothioate
  modified_base 16: mod_base = cm
  modified_base 16..17: mod_base = OTHER; note R-N-(1,3-dimethylimidazolidin-2-ylidene)phosphoramidate
  modified_base 17: mod_base = OTHER; note = 2-O-methylribose adenine
  modified_base 17..18: mod_base = OTHER; note = S-phosphorothioate
  modified_base 18: mod_base = gm
  modified_base 18..19: mod_base = OTHER; note = S-phosphorothioate
  modified_base 19: mod_base = OTHER; note = 2-O-methylribose adenine
  modified_base 19..20: mod_base = OTHER; note = S-phosphorothioate
  modified_base 20: mod_base = um
  modified_base 20..21: mod_base = OTHER; note = S-phosphorothioate
  modified_base 21: mod_base = um
  modified_base 21..22: mod_base = OTHER; note = S-phosphorothioate
  modified_base 22: mod_base = OTHER; note = 2-O-methylribose adenine
  modified_base 22..23: mod_base = OTHER; note = S-phosphorothioate
  modified_base 23: mod_base = um
  modified_base 23..24: mod_base = OTHER; note = S-phosphorothioate
  modified_base 24: mod_base = OTHER; note = 2-fluororibose cytosine
  modified_base 24..25: mod_base = OTHER; note = S-phosphorothioate
  modified_base 25: mod_base = OTHER; note = deoxyribose cytosine
  modified_base 25..26: mod_base = OTHER; note = S-phosphorothioate
  modified_base 26: mod_base = OTHER; note = deoxyribose adenine
  modified_base 26..27: mod_base = OTHER; note R-N-(1,3-dimethylimidazolidin-2-ylidene)phosphoramidate
  modified_base 27: mod_base = um
  modified_base 27..28: mod_base = OTHER; note = S-phosphorothioate
  modified_base 28: mod_base = gm
  modified_base 28..29: mod_base = OTHER; note = S-phosphorothioate
  modified_base 29: mod_base = um
  modified_base 29..30: mod_base = OTHER; note R-N-(1,3-dimethylimidazolidin-2-ylidene)phosphoramidate
  modified_base 30: mod_base = um
  source 1..30: mol_type = other RNA
atccactgtggcacccagattatccatgtt

SEQ ID NO: 2 - RNA, 30 nt, synthetic construct; identical to SEQ ID NO: 1
  misc_feature 1..30: note = Synthetic: WV-42488
  misc_feature 1..30: note = Synthetic: ADR-0106305
  modified_base 1: mod_base = OTHER; note = 1,2-dideoxyribose (3-5 connectivity) linked by R-phosphorothioate the 5' end of 2-fluororibose adenine
  modified_base 1..2: mod_base = OTHER; note R-N-(1,3-dimethylimidazolidin-2-ylidene)phosphoramidate
  modified_base 2: mod_base = OTHER; note = 2-fluororibose uracil
  modified_base 2..3: mod_base = OTHER; note = S-phosphorothioate
  modified_base 3: mod_base = OTHER; note = 2-fluororibose cytosine
  modified_base 3..4: mod_base = OTHER; note = S-phosphorothioate
  modified_base 4: mod_base = OTHER; note = 2-fluororibose cytosine
  modified_base 4..5: mod_base = OTHER; note = S-phosphorothioate
  modified_base 5: mod_base = OTHER; note = 2-fluororibose adenine
  modified_base 5..6: mod_base = OTHER; note = S-phosphorothioate
  modified_base 6: mod_base = OTHER; note = 2-fluororibose cytosine
  modified_base 6..7: mod_base = OTHER; note = S-phosphorothioate
  modified_base 7: mod_base = OTHER; note = 2-fluororibose uracil
  modified_base 7..8: mod_base = OTHER; note = S-phosphorothioate
  modified_base 8: mod_base = OTHER; note = 2-fluororibose guanine
  modified_base 8..9: mod_base = OTHER; note = S-phosphorothioate
  modified_base 9: mod_base = OTHER; note = 2-fluororibose uracil
  modified_base 9..10: mod_base = OTHER; note = S-phosphorothioate
  modified_base 10: mod_base = OTHER; note = 2-fluororibose guanine
  modified_base 10..11: mod_base = OTHER; note = S-phosphorothioate
  modified_base 11: mod_base = OTHER; note = 2-fluororibose guanine
  modified_base 11..12: mod_base = OTHER; note = S-phosphorothioate
  modified_base 12: mod_base = OTHER; note = 2-fluororibose cytosine
  modified_base 12..13: mod_base = OTHER; note = S-phosphorothioate
  modified_base 13: mod_base = OTHER; note = 2-fluororibose adenine
  modified_base 13..14: mod_base = OTHER; note = S-phosphorothioate
  modified_base 14: mod_base = OTHER; note = 2-fluororibose cytosine
  modified_base 14..15: mod_base = OTHER; note R-N-(1,3-dimethylimidazolidin-2-ylidene)phosphoramidate
  modified_base 15: mod_base = OTHER; note = 2-fluororibose cytosine
  modified_base 15..16: mod_base = OTHER; note = S-phosphorothioate
  modified_base 16: mod_base = cm
  modified_base 16..17: mod_base = OTHER; note R-N-(1,3-dimethylimidazolidin-2-ylidene)phosphoramidate
  modified_base 17: mod_base = OTHER; note = 2-O-methylribose adenine
  modified_base 17..18: mod_base = OTHER; note = S-phosphorothioate
  modified_base 18: mod_base = gm
  modified_base 18..19: mod_base = OTHER; note = S-phosphorothioate
  modified_base 19: mod_base = OTHER; note = 2-O-methylribose adenine
  modified_base 19..20: mod_base = OTHER; note = S-phosphorothioate
  modified_base 20: mod_base = um
  modified_base 20..21: mod_base = OTHER; note = S-phosphorothioate
  modified_base 21: mod_base = um
  modified_base 21..22: mod_base = OTHER; note = S-phosphorothioate
  modified_base 22: mod_base = OTHER; note = 2-O-methylribose adenine
  modified_base 22..23: mod_base = OTHER; note = S-phosphorothioate
  modified_base 23: mod_base = um
  modified_base 23..24: mod_base = OTHER; note = S-phosphorothioate
  modified_base 24: mod_base = OTHER; note = 2-fluororibose cytosine
  modified_base 24..25: mod_base = OTHER; note = S-phosphorothioate
  modified_base 25: mod_base = OTHER; note = deoxyribose cytosine
  modified_base 25..26: mod_base = OTHER; note = S-phosphorothioate
  modified_base 26: mod_base = OTHER; note = deoxyribose adenine
  modified_base 26..27: mod_base = OTHER; note R-N-(1,3-dimethylimidazolidin-2-ylidene)phosphoramidate
  modified_base 27: mod_base = um
  modified_base 27..28: mod_base = OTHER; note = S-phosphorothioate
  modified_base 28: mod_base = gm
  modified_base 28..29: mod_base = OTHER; note = S-phosphorothioate
  modified_base 29: mod_base = um
  modified_base 29..30: mod_base = OTHER; note R-N-(1,3-dimethylimidazolidin-2-ylidene)phosphoramidate
  modified_base 30: mod_base = um
  source 1..30: mol_type = other RNA

SEQ ID NO: 3 - RNA, 30 nt, synthetic construct; identical to SEQ ID NO: 1
  misc_feature 1..30: note = Synthetic: WV-42489
  misc_feature 1..30: note = Synthetic: ADR-0106306
  modified_base 1: mod_base = OTHER; note = 1,2-dideoxyribose (3-5 connectivity) linked by R-phosphorothioate the 5' end of 2-fluororibose adenine
  modified_base 1..2: mod_base = OTHER; note = S-phosphorothioate
  modified_base 2: mod_base = OTHER; note = 2-fluororibose uracil
  modified_base 2..3: mod_base = OTHER; note = S-phosphorothioate
  modified_base 3: mod_base = OTHER; note = 2-fluororibose cytosine
  modified_base 3..4: mod_base = OTHER; note = S-phosphorothioate
  modified_base 4: mod_base = OTHER; note = 2-fluororibose cytosine
  modified_base 4..5: mod_base = OTHER; note = S-phosphorothioate
  modified_base 5: mod_base = OTHER; note = 2-fluororibose adenine
  modified_base 5..6: mod_base = OTHER; note = S-phosphorothioate
  modified_base 6: mod_base = OTHER; note = 2-fluororibose cytosine
  modified_base 6..7: mod_base = OTHER; note = S-phosphorothioate
  modified_base 7: mod_base = OTHER; note = 2-fluororibose uracil
  modified_base 7..8: mod_base = OTHER; note = S-phosphorothioate
  modified_base 8: mod_base = OTHER; note = 2-fluororibose guanine
  modified_base 8..9: mod_base = OTHER; note = S-phosphorothioate
  modified_base 9: mod_base = OTHER; note = 2-fluororibose uracil
  modified_base 9..10: mod_base = OTHER; note = S-phosphorothioate
  modified_base 10: mod_base = OTHER; note = 2-fluororibose guanine
  modified_base 10..11: mod_base = OTHER; note = S-phosphorothioate
  modified_base 11: mod_base = OTHER; note = 2-fluororibose guanine
  modified_base 11..12: mod_base = OTHER; note = S-phosphorothioate
  modified_base 12: mod_base = OTHER; note = 2-fluororibose cytosine
  modified_base 12..13: mod_base = OTHER; note = S-phosphorothioate
  modified_base 13: mod_base = OTHER; note = 2-fluororibose adenine
  modified_base 13..14: mod_base = OTHER; note = S-phosphorothioate
  modified_base 14: mod_base = OTHER; note = 2-fluororibose cytosine
  modified_base 14..15: mod_base = OTHER; note R-N-(1,3-dimethylimidazolidin-2-ylidene)phosphoramidate
  modified_base 15: mod_base = OTHER; note = 2-fluororibose cytosine
  modified_base 15..16: mod_base = OTHER; note = S-phosphorothioate
  modified_base 16: mod_base = cm
  modified_base 16..17: mod_base = OTHER; note R-N-(1,3-dimethylimidazolidin-2-ylidene)phosphoramidate
  modified_base 17: mod_base = OTHER; note = 2-O-methylribose adenine
  modified_base 17..18: mod_base = OTHER; note = S-phosphorothioate
  modified_base 18: mod_base = gm
  modified_base 18..19: mod_base = OTHER; note = S-phosphorothioate
  modified_base 19: mod_base = OTHER; note = 2-O-methylribose adenine
  modified_base 19..20: mod_base = OTHER; note = S-phosphorothioate
  modified_base 20: mod_base = um
  modified_base 20..21: mod_base = OTHER; note = S-phosphorothioate
  modified_base 21: mod_base = um
  modified_base 21..22: mod_base = OTHER; note = S-phosphorothioate
  modified_base 22: mod_base = OTHER; note = 2-O-methylribose adenine
  modified_base 22..23: mod_base = OTHER; note = S-phosphorothioate
  modified_base 23: mod_base = um
  modified_base 23..24: mod_base = OTHER; note = S-phosphorothioate
  modified_base 24: mod_base = OTHER; note = 2-fluororibose cytosine
  modified_base 24..25: mod_base = OTHER; note = S-phosphorothioate
  modified_base 25: mod_base = OTHER; note = deoxyribose cytosine
  modified_base 25..26: mod_base = OTHER; note = S-phosphorothioate
  modified_base 26: mod_base = OTHER; note = deoxyribose adenine
  modified_base 26..27: mod_base = OTHER; note R-N-(1,3-dimethylimidazolidin-2-ylidene)phosphoramidate
  modified_base 27: mod_base = um
  modified_base 27..28: mod_base = OTHER; note = S-phosphorothioate
  modified_base 28: mod_base = gm
  modified_base 28..29: mod_base = OTHER; note = S-phosphorothioate
  modified_base 29: mod_base = um
  modified_base 29..30: mod_base = OTHER; note R-N-(1,3-dimethylimidazolidin-2-ylidene)phosphoramidate
  modified_base 30: mod_base = um
  source 1..30: mol_type = other RNA

SEQ ID NO: 4 - RNA, 30 nt, synthetic construct; identical to SEQ ID NO: 1
  misc_feature 1..30: note = Synthetic: WV-42490
  misc_feature 1..30: note = Synthetic: ADR-0102436
  modified_base 1: mod_base = OTHER; note = 2-fluororibose adenine
  modified_base 1..2: mod_base = OTHER; note = S-phosphorothioate
  modified_base 2: mod_base = OTHER; note = 2-fluororibose uracil
  modified_base 2..3: mod_base = OTHER; note = S-phosphorothioate
  modified_base 3: mod_base = OTHER; note = 2-fluororibose cytosine
  modified_base 3..4: mod_base = OTHER; note = S-phosphorothioate
  modified_base 4: mod_base = OTHER; note = 2-fluororibose cytosine
  modified_base 4..5: mod_base = OTHER; note = S-phosphorothioate
  modified_base 5: mod_base = OTHER; note = 2-fluororibose adenine
  modified_base 5..6: mod_base = OTHER; note = S-phosphorothioate
  modified_base 6: mod_base = OTHER; note = 2-fluororibose cytosine
  modified_base 6..7: mod_base = OTHER; note = S-phosphorothioate
  modified_base 7: mod_base = OTHER; note = 2-fluororibose uracil
  modified_base 7..8: mod_base = OTHER; note = S-phosphorothioate
  modified_base 8: mod_base = OTHER; note = 2-fluororibose guanine
  modified_base 8..9: mod_base = OTHER; note = S-phosphorothioate
  modified_base 9: mod_base = OTHER; note = 2-fluororibose uracil
  modified_base 9..10: mod_base = OTHER; note = S-phosphorothioate
  modified_base 10: mod_base = OTHER; note = 2-fluororibose guanine
  modified_base 10..11: mod_base = OTHER; note = S-phosphorothioate
  modified_base 11: mod_base = OTHER; note = 2-fluororibose guanine
  modified_base 11..12: mod_base = OTHER; note = S-phosphorothioate
  modified_base 12: mod_base = OTHER; note = 2-fluororibose cytosine
  modified_base 12..13: mod_base = OTHER; note = S-phosphorothioate
  modified_base 13: mod_base = OTHER; note = 2-fluororibose adenine
  modified_base 13..14: mod_base = OTHER; note = S-phosphorothioate
  modified_base 14: mod_base = OTHER; note = 2-fluororibose cytosine
  modified_base 14..15: mod_base = OTHER; note R-N-(1,3-dimethylimidazolidin-2-ylidene)phosphoramidate
  modified_base 15: mod_base = OTHER; note = 2-fluororibose cytosine
  modified_base 15..16: mod_base = OTHER; note = S-phosphorothioate
  modified_base 16: mod_base = cm
  modified_base 16..17: mod_base = OTHER; note R-N-(1,3-dimethylimidazolidin-2-ylidene)phosphoramidate
  modified_base 17: mod_base = OTHER; note = 2-O-methylribose adenine
  modified_base 17..18: mod_base = OTHER; note = S-phosphorothioate
  modified_base 18: mod_base = gm
  modified_base 18..19: mod_base = OTHER; note = S-phosphorothioate
  modified_base 19: mod_base = OTHER; note = 2-O-methylribose adenine
  modified_base 19..20: mod_base = OTHER; note = S-phosphorothioate
  modified_base 20: mod_base = um
  modified_base 20..21: mod_base = OTHER; note = S-phosphorothioate
  modified_base 21: mod_base = um
  modified_base 21..22: mod_base = OTHER; note = S-phosphorothioate
  modified_base 22: mod_base = OTHER; note = 2-O-methylribose adenine
  modified_base 22..23: mod_base = OTHER; note = S-phosphorothioate
  modified_base 23: mod_base = um
  modified_base 23..24: mod_base = OTHER; note = S-phosphorothioate
  modified_base 24: mod_base = OTHER; note = 2-fluororibose cytosine
  modified_base 24..25: mod_base = OTHER; note = S-phosphorothioate
  modified_base 25: mod_base = OTHER; note = deoxyribose cytosine
  modified_base 25..26: mod_base = OTHER; note = S-phosphorothioate
  modified_base 26: mod_base = OTHER; note = deoxyribose adenine
  modified_base 26..27: mod_base = OTHER; note R-N-(1,3-dimethylimidazolidin-2-ylidene)phosphoramidate
  modified_base 27: mod_base = um
  modified_base 27..28: mod_base = OTHER; note = S-phosphorothioate
  modified_base 28: mod_base = gm
  modified_base 28..29: mod_base = OTHER; note = S-phosphorothioate
  modified_base 29: mod_base = um
  modified_base 29..30: mod_base = OTHER; note R-N-(1,3-dimethylimidazolidin-2-ylidene)phosphoramidate
  modified_base 30: mod_base = um
  source 1..30: mol_type = other RNA

SEQ ID NO: 5 - RNA, 30 nt, synthetic construct
  misc_feature 1..30: note = Synthetic: WV-39306
  misc_feature 1..30: note = Synthetic: ADR-0100284
  modified_base 1: mod_base = OTHER; note = triantennary GalNAc with C12 linker linked to 6-aminohexanol linked by phosphate to the 5' end of 2-fluororibose adenine
  modified_base 1..2: mod_base = OTHER; note R-N-(1,3-dimethylimidazolidin-2-ylidene)phosphoramidate
  modified_base 2: mod_base = OTHER; note = 2-fluororibose cytosine
  modified_base 2..3: mod_base = OTHER; note = S-phosphorothioate
  modified_base 3: mod_base = OTHER; note = 2-fluororibose adenine
  modified_base 3..4: mod_base = OTHER; note = S-phosphorothioate
  modified_base 4: mod_base = OTHER; note = 2-fluororibose uracil
  modified_base 4..5: mod_base = OTHER; note = S-phosphorothioate
  modified_base 5: mod_base = OTHER; note = 2-fluororibose adenine
  modified_base 5..6: mod_base = OTHER; note = S-phosphorothioate
  modified_base 6: mod_base = OTHER; note = 2-fluororibose adenine
  modified_base 6..7: mod_base = OTHER; note = S-phosphorothioate
  modified_base 7: mod_base = OTHER; note = 2-fluororibose uracil
  modified_base 7..8: mod_base = OTHER; note = S-phosphorothioate
  modified_base 8: mod_base = OTHER; note = 2-fluororibose uracil
  modified_base 8..9: mod_base = OTHER; note = S-phosphorothioate
  modified_base 9: mod_base = OTHER; note = 2-fluororibose uracil
  modified_base 9..10: mod_base = OTHER; note = S-phosphorothioate
  modified_base 10: mod_base = OTHER; note = 2-fluororibose adenine
  modified_base 10..11: mod_base = OTHER; note = S-phosphorothioate
  modified_base 11: mod_base = OTHER; note = 2-fluororibose cytosine
  modified_base 11..12: mod_base = OTHER; note = S-phosphorothioate
  modified_base 12: mod_base = OTHER; note = 2-fluororibose adenine
  modified_base 12..13: mod_base = OTHER; note = S-phosphorothioate
  modified_base 13: mod_base = OTHER; note = 2-fluororibose cytosine
  modified_base 13..14: mod_base = OTHER; note = S-phosphorothioate
  modified_base 14: mod_base = OTHER; note = 2-fluororibose guanine
  modified_base 14..15: mod_base = OTHER; note R-N-(1,3-dimethylimidazolidin-2-ylidene)phosphoramidate
  modified_base 15: mod_base = OTHER; note = 2-fluororibose adenine
  modified_base 15..16: mod_base = OTHER; note = S-phosphorothioate
  modified_base 16: mod_base = OTHER; note = 2-O-methylribose adenine
  modified_base 16..17: mod_base = OTHER; note R-N-(1,3-dimethylimidazolidin-2-ylidene)phosphoramidate
  modified_base 17: mod_base = OTHER; note = 2-O-methylribose adenine
  modified_base 17..18: mod_base = OTHER; note = S-phosphorothioate
  modified_base 18: mod_base = gm
  modified_base 18..19: mod_base = OTHER; note = S-phosphorothioate
  modified_base 19: mod_base = cm
  modified_base 19..20: mod_base = OTHER; note = S-phosphorothioate
  modified_base 20: mod_base = OTHER; note = 2-O-methylribose adenine
  modified_base 20..21: mod_base = OTHER; note = S-phosphorothioate
  modified_base 21: mod_base = OTHER; note = 2-O-methylribose adenine
  modified_base 21..22: mod_base = OTHER; note = S-phosphorothioate
  modified_base 22: mod_base = um
  modified_base 22..23: mod_base = OTHER; note = S-phosphorothioate
  modified_base 23: mod_base = gm
  modified_base 23..24: mod_base = OTHER; note = S-phosphorothioate
  modified_base 24: mod_base = OTHER; note = 5-(S)-methyl-2-fluororibose cytosine
  modified_base 24..25: mod_base = OTHER; note = S-phosphorothioate
  modified_base 25: mod_base = OTHER; note = deoxyribose 5-methyl-cytidine
  modified_base 25..26: mod_base = OTHER; note = S-phosphorothioate
  modified_base 26: mod_base = OTHER; note = deoxyribose adenine
  modified_base 26..27: mod_base = OTHER; note R-N-(1,3-dimethylimidazolidin-2-ylidene)phosphoramidate
  modified_base 27: mod_base = um
  modified_base 27..28: mod_base = OTHER; note = S-phosphorothioate
  modified_base 28: mod_base = cm
  modified_base 28..29: mod_base = OTHER; note = S-phosphorothioate
  modified_base 29: mod_base = OTHER; note = 2-O-methylribose adenine
  modified_base 29..30: mod_base = OTHER; note R-N-(1,3-dimethylimidazolidin-2-ylidene)phosphoramidate
  modified_base 30: mod_base = cm
  source 1..30: mol_type = other RNA
acataatttacacgaaagcaatgccatcac

SEQ ID NO: 6 - RNA, 30 nt, synthetic construct; identical to SEQ ID NO: 5
  misc_feature 1..30: note = Synthetic: WV-39305
  misc_feature 1..30: note = Synthetic: ADR-0100283
  modified_base 1: mod_base = OTHER; note = triantennary GalNAc with C12 linker linked to 6-aminohexanol linked by phosphate to the 5' end of 2-fluororibose adenine
  modified_base 1..2: mod_base = OTHER; note R-N-(1,3-dimethylimidazolidin-2-ylidene)phosphoramidate
  modified_base 2: mod_base = OTHER; note = 2-fluororibose cytosine
  modified_base 2..3: mod_base = OTHER; note = S-phosphorothioate
  modified_base 3: mod_base = OTHER; note = 2-fluororibose adenine
  modified_base 3..4: mod_base = OTHER; note = S-phosphorothioate
  modified_base 4: mod_base = OTHER; note = 2-fluororibose uracil
  modified_base 4..5: mod_base = OTHER; note = S-phosphorothioate
  modified_base 5: mod_base = OTHER; note = 2-fluororibose adenine
  modified_base 5..6: mod_base = OTHER; note = S-phosphorothioate
  modified_base 6: mod_base = OTHER; note = 2-fluororibose adenine
  modified_base 6..7: mod_base = OTHER; note = S-phosphorothioate
  modified_base 7: mod_base = OTHER; note = 2-fluororibose uracil
  modified_base 7..8: mod_base = OTHER; note = S-phosphorothioate
  modified_base 8: mod_base = OTHER; note = 2-fluororibose uracil
  modified_base 8..9: mod_base = OTHER; note = S-phosphorothioate
  modified_base 9: mod_base = OTHER; note = 2-fluororibose uracil
  modified_base 9..10: mod_base = OTHER; note = S-phosphorothioate
  modified_base 10: mod_base = OTHER; note = 2-fluororibose adenine
  modified_base 10..11: mod_base = OTHER; note = S-phosphorothioate
  modified_base 11: mod_base = OTHER; note = 2-fluororibose cytosine
  modified_base 11..12: mod_base = OTHER; note = S-phosphorothioate
  modified_base 12: mod_base = OTHER; note = 2-fluororibose adenine
  modified_base 12..13: mod_base = OTHER; note = S-phosphorothioate
  modified_base 13: mod_base = OTHER; note = 2-fluororibose cytosine
  modified_base 13..14: mod_base = OTHER; note = S-phosphorothioate
  modified_base 14: mod_base = OTHER; note = 2-fluororibose guanine
  modified_base 14..15: mod_base = OTHER; note R-N-(1,3-dimethylimidazolidin-2-ylidene)phosphoramidate
  modified_base 15: mod_base = OTHER; note = 2-fluororibose adenine
  modified_base 15..16: mod_base = OTHER; note = S-phosphorothioate
  modified_base 16: mod_base = OTHER; note = 2-O-methylribose adenine
  modified_base 16..17: mod_base = OTHER; note R-N-(1,3-dimethylimidazolidin-2-ylidene)phosphoramidate
  modified_base 17: mod_base = OTHER; note = 2-O-methylribose adenine
  modified_base 17..18: mod_base = OTHER; note = S-phosphorothioate
  modified_base 18: mod_base = gm
  modified_base 18..19: mod_base = OTHER; note = S-phosphorothioate
  modified_base 19: mod_base = cm
  modified_base 19..20: mod_base = OTHER; note = S-phosphorothioate
  modified_base 20: mod_base = OTHER; note = 2-O-methylribose adenine
  modified_base 20..21: mod_base = OTHER; note = S-phosphorothioate
  modified_base 21: mod_base = OTHER; note = 2-O-methylribose adenine
  modified_base 21..22: mod_base = OTHER; note = S-phosphorothioate
  modified_base 22: mod_base = um
  modified_base 22..23: mod_base = OTHER; note = S-phosphorothioate
  modified_base 23: mod_base = gm
  modified_base 23..24: mod_base = OTHER; note = S-phosphorothioate
  modified_base 24: mod_base = OTHER; note = 2-fluororibose cytosine
  modified_base 24..25: mod_base = OTHER; note = S-phosphorothioate
  modified_base 25: mod_base = OTHER; note = deoxyribose 5-methyl-cytidine
  modified_base 25..26: mod_base = OTHER; note = S-phosphorothioate
  modified_base 26: mod_base = OTHER; note = deoxyribose adenine
  modified_base 26..27: mod_base = OTHER; note R-N-(1,3-dimethylimidazolidin-2-ylidene)phosphoramidate
  modified_base 27: mod_base = um
  modified_base 27..28: mod_base = OTHER; note = S-phosphorothioate
  modified_base 28: mod_base = cm
  modified_base 28..29: mod_base = OTHER; note = S-phosphorothioate
  modified_base 29: mod_base = OTHER; note = 2-O-methylribose adenine
  modified_base 29..30: mod_base = OTHER; note R-N-(1,3-dimethylimidazolidin-2-ylidene)phosphoramidate
  modified_base 30: mod_base = cm
  source 1..30: mol_type = other RNA

SEQ ID NO: 7 - RNA, 30 nt, synthetic construct; identical to SEQ ID NO: 5
  misc_feature 1..30: note = Synthetic: WV-39294
  misc_feature 1..30: note = Synthetic: ADR-0100282
  modified_base 1: mod_base = OTHER; note = triantennary GalNAc with C12 linker linked to 6-aminohexanol linked by phosphate to the 5' end of 2-fluororibose adenine
  modified_base 1..2: mod_base = OTHER; note R-N-(1,3-dimethylimidazolidin-2-ylidene)phosphoramidate
  modified_base 2: mod_base = OTHER; note = 2-fluororibose cytosine
  modified_base 2..3: mod_base = OTHER; note = S-phosphorothioate
  modified_base 3: mod_base = OTHER; note = 2-fluororibose adenine
  modified_base 3..4: mod_base = OTHER; note = S-phosphorothioate
  modified_base 4: mod_base = OTHER; note = 2-fluororibose uracil
  modified_base 4..5: mod_base = OTHER; note = S-phosphorothioate
  modified_base 5: mod_base = OTHER; note = 2-fluororibose adenine
  modified_base 5..6: mod_base = OTHER; note = S-phosphorothioate
  modified_base 6: mod_base = OTHER; note = 2-fluororibose adenine
  modified_base 6..7: mod_base = OTHER; note = S-phosphorothioate
  modified_base 7: mod_base = OTHER; note = 2-fluororibose uracil
  modified_base 7..8: mod_base = OTHER; note = S-phosphorothioate
  modified_base 8: mod_base = OTHER; note = 2-fluororibose uracil
  modified_base 8..9: mod_base = OTHER; note = S-phosphorothioate
  modified_base 9: mod_base = OTHER; note = 2-fluororibose uracil
  modified_base 9..10: mod_base = OTHER; note = S-phosphorothioate
  modified_base 10: mod_base = OTHER; note = 2-fluororibose adenine
  modified_base 10..11: mod_base = OTHER; note = S-phosphorothioate
  modified_base 11: mod_base = OTHER; note = 2-fluororibose cytosine
  modified_base 11..12: mod_base = OTHER; note = S-phosphorothioate
  modified_base 12: mod_base = OTHER; note = 2-fluororibose adenine
  modified_base 12..13: mod_base = OTHER; note = S-phosphorothioate
  modified_base 13: mod_base = OTHER; note = 2-fluororibose cytosine
  modified_base 13..14: mod_base = OTHER; note = S-phosphorothioate
  modified_base 14: mod_base = OTHER; note = 2-fluororibose guanine
  modified_base 14..15: mod_base = OTHER; note R-N-(1,3-dimethylimidazolidin-2-ylidene)phosphoramidate
  modified_base 15: mod_base = OTHER; note = 2-fluororibose adenine
  modified_base 15..16: mod_base = OTHER; note = S-phosphorothioate
  modified_base 16: mod_base = OTHER; note = 2-O-methylribose adenine
  modified_base 16..17: mod_base = OTHER; note R-N-(1,3-dimethylimidazolidin-2-ylidene)phosphoramidate
  modified_base 17: mod_base = OTHER; note = 2-O-methylribose adenine
  modified_base 17..18: mod_base = OTHER; note = S-phosphorothioate
  modified_base 18: mod_base = gm
  modified_base 18..19: mod_base = OTHER; note = S-phosphorothioate
  modified_base 19: mod_base = cm
  modified_base 19..20: mod_base = OTHER; note = S-phosphorothioate
  modified_base 20: mod_base = OTHER; note = 2-O-methylribose adenine
  modified_base 20..21: mod_base = OTHER; note = S-phosphorothioate
  modified_base 21: mod_base = OTHER; note = 2-O-methylribose adenine
  modified_base 21..22: mod_base = OTHER; note = S-phosphorothioate
  modified_base 22: mod_base = um
  modified_base 22..23: mod_base = OTHER; note = S-phosphorothioate
  modified_base 23: mod_base = gm
  modified_base 23..24: mod_base = OTHER; note = S-phosphorothioate
  modified_base 24: mod_base = OTHER; note = 2-fluororibose cytosine
  modified_base 24..25: mod_base = OTHER; note = S-phosphorothioate
  modified_base 25: mod_base = OTHER; note = deoxyribose cytosine
  modified_base 25..26: mod_base = OTHER; note = S-phosphorothioate
  modified_base 26: mod_base = OTHER; note = deoxyribose adenine
  modified_base 26..27: mod_base = OTHER; note R-N-(1,3-dimethylimidazolidin-2-ylidene)phosphoramidate
  modified_base 27: mod_base = OTHER; note = R-5-methyl-deoxyribose thymine
  modified_base 27..28: mod_base = OTHER; note = S-phosphorothioate
  modified_base 28: mod_base = OTHER; note = 2-fluororibose cytosine
  modified_base 28..29: mod_base = OTHER; note = S-phosphorothioate
  modified_base 29: mod_base = OTHER; note = 2-O-methylribose adenine
  modified_base 29..30: mod_base = OTHER; note R-N-(1,3-dimethylimidazolidin-2-ylidene)phosphoramidate
  modified_base 30: mod_base = cm
  source 1..30: mol_type = other RNA

SEQ ID NO: 8 - RNA, 30 nt, synthetic construct; identical to SEQ ID NO: 5
  misc_feature 1..30: note = Synthetic: WV-39293
  misc_feature 1..30: note = Synthetic: ADR-0100281
  modified_base 1: mod_base = OTHER; note = triantennary GalNAc with C12 linker linked to 6-aminohexanol linked by phosphate to the 5' end of 2-fluororibose adenine
  modified_base 1..2: mod_base = OTHER; note R-N-(1,3-dimethylimidazolidin-2-ylidene)phosphoramidate
  modified_base 2: mod_base = OTHER; note = 2-fluororibose cytosine
  modified_base 2..3: mod_base = OTHER; note = S-phosphorothioate
  modified_base 3: mod_base = OTHER; note = 2-fluororibose adenine
  modified_base 3..4: mod_base = OTHER; note = S-phosphorothioate
  modified_base 4: mod_base = OTHER; note = 2-fluororibose uracil
  modified_base 4..5: mod_base = OTHER; note = S-phosphorothioate
  modified_base 5: mod_base = OTHER; note = 2-fluororibose adenine
  modified_base 5..6: mod_base = OTHER; note = S-phosphorothioate
  modified_base 6: mod_base = OTHER; note = 2-fluororibose adenine
  modified_base 6..7: mod_base = OTHER; note = S-phosphorothioate
  modified_base 7: mod_base = OTHER; note = 2-fluororibose uracil
  modified_base 7..8: mod_base = OTHER; note = S-phosphorothioate
  modified_base 8: mod_base = OTHER; note = 2-fluororibose uracil
  modified_base 8..9: mod_base = OTHER; note = S-phosphorothioate
  modified_base 9: mod_base = OTHER; note = 2-fluororibose uracil
  modified_base 9..10: mod_base = OTHER; note = S-phosphorothioate
  modified_base 10: mod_base = OTHER; note = 2-fluororibose adenine
  modified_base 10..11: mod_base = OTHER; note = S-phosphorothioate
  modified_base 11: mod_base = OTHER; note = 2-fluororibose cytosine
  modified_base 11..12: mod_base = OTHER; note = S-phosphorothioate
  modified_base 12: mod_base = OTHER; note = 2-fluororibose adenine
  modified_base 12..13: mod_base = OTHER; note = S-phosphorothioate
  modified_base 13: mod_base = OTHER; note = 2-fluororibose cytosine
  modified_base 13..14: mod_base = OTHER; note = S-phosphorothioate
  modified_base 14: mod_base = OTHER; note = 2-fluororibose guanine
  modified_base 14..15: mod_base = OTHER; note R-N-(1,3-dimethylimidazolidin-2-ylidene)phosphoramidate
  modified_base 15: mod_base = OTHER; note = 2-fluororibose adenine
  modified_base 15..16: mod_base = OTHER; note = S-phosphorothioate
  modified_base 16: mod_base = OTHER; note = 2-O-methylribose adenine
  modified_base 16..17: mod_base = OTHER; note R-N-(1,3-dimethylimidazolidin-2-ylidene)phosphoramidate
  modified_base 17: mod_base = OTHER; note = 2-O-methylribose adenine
  modified_base 17..18: mod_base = OTHER; note = S-phosphorothioate
  modified_base 18: mod_base = gm
  modified_base 18..19: mod_base = OTHER; note = S-phosphorothioate
  modified_base 19: mod_base = cm
  modified_base 19..20: mod_base = OTHER; note = S-phosphorothioate
  modified_base 20: mod_base = OTHER; note = 2-O-methylribose adenine
  modified_base 20..21: mod_base = OTHER; note = S-phosphorothioate
  modified_base 21: mod_base = OTHER; note = 2-O-methylribose adenine
  modified_base 21..22: mod_base = OTHER; note = S-phosphorothioate
  modified_base 22: mod_base = um
  modified_base 22..23: mod_base = OTHER; note = S-phosphorothioate
  modified_base 23: mod_base = gm
  modified_base 23..24: mod_base = OTHER; note = S-phosphorothioate
  modified_base 24: mod_base = OTHER; note = 2-fluororibose cytosine
  modified_base 24..25: mod_base = OTHER; note = S-phosphorothioate
  modified_base 25: mod_base = OTHER; note = deoxyribose cytosine
  modified_base 25..26: mod_base = OTHER; note = S-phosphorothioate
  modified_base 26: mod_base = OTHER; note = deoxyribose adenine
  modified_base 26..27: mod_base = OTHER; note R-N-(1,3-dimethylimidazolidin-2-ylidene)phosphoramidate
  modified_base 27: mod_base = OTHER; note = S-5-methyl-deoxyribose thymine
  modified_base 27..28: mod_base = OTHER; note = S-phosphorothioate
  modified_base 28: mod_base = OTHER; note = 2-fluororibose cytosine
  modified_base 28..29: mod_base = OTHER; note = S-phosphorothioate
  modified_base 29: mod_base = OTHER; note = 2-O-methylribose adenine
  modified_base 29..30: mod_base = OTHER; note R-N-(1,3-dimethylimidazolidin-2-ylidene)phosphoramidate
  modified_base 30: mod_base = cm
  source 1..30: mol_type = other RNA

SEQ ID NO: 9 - RNA, 30 nt, synthetic construct; identical to SEQ ID NO: 5
  misc_feature 1..30: note = Synthetic: WV-39289
  misc_feature 1..30: note = Synthetic: ADR-0100280
  modified_base 1: mod_base = OTHER; note = triantennary GalNAc with C12 linker linked to 6-aminohexanol linked by phosphate to the 5' end of 2-fluororibose adenine
  modified_base 1..2: mod_base = OTHER; note R-N-(1,3-dimethylimidazolidin-2-ylidene)phosphoramidate
  modified_base 2: mod_base = OTHER; note = 2-fluororibose cytosine
  modified_base 2..3: mod_base = OTHER; note = S-phosphorothioate
  modified_base 3: mod_base = OTHER; note = 2-fluororibose adenine
  modified_base 3..4: mod_base = OTHER; note = S-phosphorothioate
  modified_base 4: mod_base = OTHER; note = 2-fluororibose uracil
  modified_base 4..5: mod_base = OTHER; note = S-phosphorothioate
  modified_base 5: mod_base = OTHER; note = 2-fluororibose adenine
  modified_base 5..6: mod_base = OTHER; note = S-phosphorothioate
  modified_base 6: mod_base = OTHER; note = 2-fluororibose adenine
  modified_base 6..7: mod_base = OTHER; note = S-phosphorothioate
  modified_base 7: mod_base = OTHER; note = 2-fluororibose uracil
  modified_base 7..8: mod_base = OTHER; note = S-phosphorothioate
  modified_base 8: mod_base = OTHER; note = 2-fluororibose uracil
  modified_base 8..9: mod_base = OTHER; note = S-phosphorothioate
  modified_base 9: mod_base = OTHER; note = 2-fluororibose uracil
  modified_base 9..10: mod_base = OTHER; note = S-phosphorothioate
  modified_base 10: mod_base = OTHER; note = 2-fluororibose adenine
  modified_base 10..11: mod_base = OTHER; note = S-phosphorothioate
  modified_base 11: mod_base = OTHER; note = 2-fluororibose cytosine
  modified_base 11..12: mod_base = OTHER; note = S-phosphorothioate
  modified_base 12: mod_base = OTHER; note = 2-fluororibose adenine
  modified_base 12..13: mod_base = OTHER; note = S-phosphorothioate
  modified_base 13: mod_base = OTHER; note = 2-fluororibose cytosine
  modified_base 13..14: mod_base = OTHER; note = S-phosphorothioate
  modified_base 14: mod_base = OTHER; note = 2-fluororibose guanine
  modified_base 14..15: mod_base = OTHER; note R-N-(1,3-dimethylimidazolidin-2-ylidene)phosphoramidate
  modified_base 15: mod_base = OTHER; note = 2-fluororibose adenine
  modified_base 15..16: mod_base = OTHER; note = S-phosphorothioate
  modified_base 16: mod_base = OTHER; note = 2-O-methylribose adenine
  modified_base 16..17: mod_base = OTHER; note R-N-(1,3-dimethylimidazolidin-2-ylidene)phosphoramidate
  modified_base 17: mod_base = OTHER; note = 2-O-methylribose adenine
  modified_base 17..18: mod_base = OTHER; note = S-phosphorothioate
  modified_base 18: mod_base = gm
  modified_base 18..19: mod_base = OTHER; note = S-phosphorothioate
  modified_base 19: mod_base = cm
  modified_base 19..20: mod_base = OTHER; note = S-phosphorothioate
  modified_base 20: mod_base = OTHER; note = 2-O-methylribose adenine
  modified_base 20..21: mod_base = OTHER; note = S-phosphorothioate
  modified_base 21: mod_base = OTHER; note = 2-O-methylribose adenine
  modified_base 21..22: mod_base = OTHER; note = S-phosphorothioate
  modified_base 22: mod_base = um
  modified_base 22..23: mod_base = OTHER; note = S-phosphorothioate
  modified_base 23: mod_base = gm
  modified_base 23..24: mod_base = OTHER; note = S-phosphorothioate
  modified_base 24: mod_base = OTHER; note = 2-fluororibose cytosine
  modified_base 24..25: mod_base = OTHER; note = S-phosphorothioate
  modified_base 25: mod_base = OTHER; note = deoxyribose cytosine
  modified_base 25..26: mod_base = OTHER; note = S-phosphorothioate
  modified_base 26: mod_base = OTHER; note = deoxyribose adenine
  modified_base 26..27: mod_base = OTHER; note R-N-(1,3-dimethylimidazolidin-2-ylidene)phosphoramidate
  modified_base 27: mod_base = OTHER; note = deoxyribose thymine
  modified_base 27..28: mod_base = OTHER; note = S-phosphorothioate
  modified_base 28: mod_base = OTHER; note = 2-fluororibose cytosine
  modified_base 28..29: mod_base = OTHER; note = S-phosphorothioate
  modified_base 29: mod_base = OTHER; note = 2-O-methylribose adenine
  modified_base 29..30: mod_base = OTHER; note R-N-(1,3-dimethylimidazolidin-2-ylidene)phosphoramidate
  modified_base 30: mod_base = cm
  source 1..30: mol_type = other RNA

SEQ ID NO: 10 - RNA, 30 nt, synthetic construct; identical to SEQ ID NO: 5
  misc_feature 1..30: note = Synthetic: WV-39267
  misc_feature 1..30: note = Synthetic: ADR-0100266
  modified_base 1: mod_base = OTHER; note = triantennary GalNAc with C12 linker linked to 6-aminohexanol linked by phosphate to the 5' end of 2-fluororibose adenine
  modified_base 1..2: mod_base = OTHER; note R-N-(1,3-dimethylimidazolidin-2-ylidene)phosphoramidate
  modified_base 2: mod_base = OTHER; note = 2-fluororibose cytosine
  modified_base 2..3: mod_base = OTHER; note = S-phosphorothioate
  modified_base 3: mod_base = OTHER; note = 2-fluororibose adenine
  modified_base 3..4: mod_base = OTHER; note = S-phosphorothioate
  modified_base 4: mod_base = OTHER; note = 2-fluororibose uracil
  modified_base 4..5: mod_base = OTHER; note = S-phosphorothioate
  modified_base 5: mod_base = OTHER; note = 2-fluororibose adenine
  modified_base 5..6: mod_base = OTHER; note = S-phosphorothioate
  modified_base 6: mod_base = OTHER; note = 2-fluororibose adenine
  modified_base 6..7: mod_base = OTHER; note = S-phosphorothioate
  modified_base 7: mod_base = OTHER; note = 2-fluororibose uracil
  modified_base 7..8: mod_base = OTHER; note = S-phosphorothioate
  modified_base 8: mod_base = OTHER; note = 2-fluororibose uracil
  modified_base 8..9: mod_base = OTHER; note = S-phosphorothioate
  modified_base 9: mod_base = OTHER; note = 2-fluororibose uracil
  modified_base 9..10: mod_base = OTHER; note = S-phosphorothioate
  modified_base 10: mod_base = OTHER; note = 2-fluororibose adenine
  modified_base 10..11: mod_base = OTHER; note = S-phosphorothioate
  modified_base 11: mod_base = OTHER; note = 2-fluororibose cytosine
  modified_base 11..12: mod_base = OTHER; note = S-phosphorothioate
  modified_base 12: mod_base = OTHER; note = 2-fluororibose adenine
  modified_base 12..13: mod_base = OTHER; note = S-phosphorothioate
  modified_base 13: mod_base = OTHER; note = 2-fluororibose cytosine
  modified_base 13..14: mod_base = OTHER; note = S-phosphorothioate
  modified_base 14: mod_base = OTHER; note = 2-fluororibose guanine
  modified_base 14..15: mod_base = OTHER; note R-N-(1,3-dimethylimidazolidin-2-ylidene)phosphoramidate
  modified_base 15: mod_base = OTHER; note = 2-fluororibose adenine
  modified_base 15..16: mod_base = OTHER; note = S-phosphorothioate
  modified_base 16: mod_base = OTHER; note = 2-O-methylribose adenine
  modified_base 16..17: mod_base = OTHER; note R-N-(1,3-dimethylimidazolidin-2-ylidene)phosphoramidate
  modified_base 17: mod_base = OTHER; note = 2-O-methylribose adenine
  modified_base 17..18: mod_base = OTHER; note = S-phosphorothioate
  modified_base 18: mod_base = gm
  modified_base 18..19: mod_base = OTHER; note = S-phosphorothioate
  modified_base 19: mod_base = cm
  modified_base 19..20: mod_base = OTHER; note = S-phosphorothioate
  modified_base 20: mod_base = OTHER; note = 2-O-methylribose adenine
  modified_base 20..21: mod_base = OTHER; note = S-phosphorothioate
  modified_base 21: mod_base = OTHER; note = 2-O-methylribose adenine
  modified_base 21..22: mod_base = OTHER; note = S-phosphorothioate
  modified_base 22: mod_base = um
  modified_base 22..23: mod_base = OTHER; note = S-phosphorothioate
  modified_base 23: mod_base = gm
  modified_base 23..24: mod_base = OTHER; note = S-phosphorothioate
  modified_base 24: mod_base = OTHER; note = 5-(S)-methyl-2-fluororibose cytosine
  modified_base 24..25: mod_base = OTHER; note = S-phosphorothioate
  modified_base 25: mod_base = OTHER; note = deoxyribose cytosine
  modified_base 25..26: mod_base = OTHER; note = S-phosphorothioate
  modified_base 26: mod_base = OTHER; note = deoxyribose adenine
  modified_base 26..27: mod_base = OTHER; note R-N-(1,3-dimethylimidazolidin-2-ylidene)phosphoramidate
  modified_base 27: mod_base = um
  modified_base 27..28: mod_base = OTHER; note = S-phosphorothioate
  modified_base 28: mod_base = cm
  modified_base 28..29: mod_base = OTHER; note = S-phosphorothioate
  modified_base 29: mod_base = OTHER; note = 2-O-methylribose adenine
  modified_base 29..30: mod_base = OTHER; note R-N-(1,3-dimethylimidazolidin-2-ylidene)phosphoramidate
  modified_base 30: mod_base = cm
  source 1..30: mol_type = other RNA

SEQ ID NO: 11 - RNA, 30 nt, synthetic construct; identical to SEQ ID NO: 5
  misc_feature 1..30: note = Synthetic: WV-39266
  misc_feature 1..30: note = Synthetic: ADR-0100265
  modified_base 1: mod_base = OTHER; note = triantennary GalNAc with C12 linker linked to 6-aminohexanol linked by phosphate to the 5' end of 2-fluororibose adenine
  modified_base 1..2: mod_base = OTHER; note R-N-(1,3-dimethylimidazolidin-2-ylidene)phosphoramidate
  modified_base 2: mod_base = OTHER; note = 2-fluororibose cytosine
  modified_base 2..3: mod_base = OTHER; note = S-phosphorothioate
  modified_base 3: mod_base = OTHER; note = 2-fluororibose adenine
  modified_base 3..4: mod_base = OTHER; note = S-phosphorothioate
  modified_base 4: mod_base = OTHER; note = 2-fluororibose uracil
  modified_base 4..5: mod_base = OTHER; note = S-phosphorothioate
  modified_base 5: mod_base = OTHER; note = 2-fluororibose adenine
  modified_base 5..6: mod_base = OTHER; note = S-phosphorothioate
  modified_base 6: mod_base = OTHER; note = 2-fluororibose adenine
  modified_base 6..7: mod_base = OTHER; note = S-phosphorothioate
  modified_base 7: mod_base = OTHER; note = 2-fluororibose uracil
  modified_base 7..8: mod_base = OTHER; note = S-phosphorothioate
  modified_base 8: mod_base = OTHER; note = 2-fluororibose uracil
  modified_base 8..9: mod_base = OTHER; note = S-phosphorothioate
  modified_base 9: mod_base = OTHER; note = 2-fluororibose uracil
  modified_base 9..10: mod_base = OTHER; note = S-phosphorothioate
  modified_base 10: mod_base = OTHER; note = 2-fluororibose adenine
  modified_base 10..11: mod_base = OTHER; note = S-phosphorothioate
  modified_base 11: mod_base = OTHER; note = 2-fluororibose cytosine
  modified_base 11..12: mod_base = OTHER; note = S-phosphorothioate
  modified_base 12: mod_base = OTHER; note = 2-fluororibose adenine
  modified_base 12..13: mod_base = OTHER; note = S-phosphorothioate
  modified_base 13: mod_base = OTHER; note = 2-fluororibose cytosine
  modified_base 13..14: mod_base = OTHER; note = S-phosphorothioate
  modified_base 14: mod_base = OTHER; note = 2-fluororibose guanine
  modified_base 14..15: mod_base = OTHER; note R-N-(1,3-dimethylimidazolidin-2-ylidene)phosphoramidate
  modified_base 15: mod_base = OTHER; note = 2-fluororibose adenine
  modified_base 15..16: mod_base = OTHER; note = S-phosphorothioate
  modified_base 16: mod_base = OTHER; note = 2-O-methylribose adenine
  modified_base 16..17: mod_base = OTHER; note R-N-(1,3-dimethylimidazolidin-2-ylidene)phosphoramidate
  modified_base 17: mod_base = OTHER; note = 2-O-methylribose adenine
  modified_base 17..18: mod_base = OTHER; note = S-phosphorothioate
  modified_base 18: mod_base = gm
  modified_base 18..19: mod_base = OTHER; note = S-phosphorothioate
  modified_base 19: mod_base = cm
  modified_base 19..20: mod_base = OTHER; note = S-phosphorothioate
  modified_base 20: mod_base = OTHER; note = 2-O-methylribose adenine
  modified_base 20..21: mod_base = OTHER; note = S-phosphorothioate
  modified_base 21: mod_base = OTHER; note = 2-O-methylribose adenine
  modified_base 21..22: mod_base = OTHER; note = S-phosphorothioate
  modified_base 22: mod_base = um
  modified_base 22..23: mod_base = OTHER; note = S-phosphorothioate
  modified_base 23: mod_base = gm
  modified_base 23..24: mod_base = OTHER; note = S-phosphorothioate
  modified_base 24: mod_base = OTHER; note = 2-fluororibose cytosine
  modified_base 24..25: mod_base = OTHER; note = S-phosphorothioate
  modified_base 25: mod_base = OTHER; note = R-5-methyl-deoxyribose cytosine
  modified_base 25..26: mod_base = OTHER; note = S-phosphorothioate
  modified_base 26: mod_base = OTHER; note = deoxyribose adenine
  modified_base 26..27: mod_base = OTHER; note R-N-(1,3-dimethylimidazolidin-2-ylidene)phosphoramidate
  modified_base 27: mod_base = um
  modified_base 27..28: mod_base = OTHER; note = S-phosphorothioate
  modified_base 28: mod_base = cm
  modified_base 28..29: mod_base = OTHER; note = S-phosphorothioate
  modified_base 29: mod_base = OTHER; note = 2-O-methylribose adenine
  modified_base 29..30: mod_base = OTHER; note R-N-(1,3-dimethylimidazolidin-2-ylidene)phosphoramidate
  modified_base 30: mod_base = cm
  source 1..30: mol_type = other RNA

SEQ ID NO: 12 - RNA, 30 nt, synthetic construct; identical to SEQ ID NO: 5
  misc_feature 1..30: note = Synthetic: WV-39265
  misc_feature 1..30: note = Synthetic: ADR-0100264
  modified_base 1: mod_base = OTHER; note = triantennary GalNAc with C12 linker linked to 6-aminohexanol linked by phosphate to the 5' end of 2-fluororibose adenine
  modified_base 1..2: mod_base = OTHER; note R-N-(1,3-dimethylimidazolidin-2-ylidene)phosphoramidate
  modified_base 2: mod_base = OTHER; note = 2-fluororibose cytosine
  modified_base 2..3: mod_base = OTHER; note = S-phosphorothioate
  modified_base 3: mod_base = OTHER; note = 2-fluororibose adenine
  modified_base 3..4: mod_base = OTHER; note = S-phosphorothioate
  modified_base 4: mod_base = OTHER; note = 2-fluororibose uracil
  modified_base 4..5: mod_base = OTHER; note = S-phosphorothioate
  modified_base 5: mod_base = OTHER; note = 2-fluororibose adenine
  modified_base 5..6: mod_base = OTHER; note = S-phosphorothioate
  modified_base 6: mod_base = OTHER; note = 2-fluororibose adenine
  modified_base 6..7: mod_base = OTHER; note = S-phosphorothioate
  modified_base 7: mod_base = OTHER; note = 2-fluororibose uracil
  modified_base 7..8: mod_base = OTHER; note = S-phosphorothioate
  modified_base 8: mod_base = OTHER; note = 2-fluororibose uracil
  modified_base 8..9: mod_base = OTHER; note = S-phosphorothioate
  modified_base 9: mod_base = OTHER; note = 2-fluororibose uracil
  modified_base 9..10: mod_base = OTHER; note = S-phosphorothioate
  modified_base 10: mod_base = OTHER; note = 2-fluororibose adenine
  modified_base 10..11: mod_base = OTHER; note = S-phosphorothioate
  modified_base 11: mod_base = OTHER; note = 2-fluororibose cytosine
  modified_base 11..12: mod_base = OTHER; note = S-phosphorothioate
  modified_base 12: mod_base = OTHER; note = 2-fluororibose adenine
  modified_base 12..13: mod_base = OTHER; note = S-phosphorothioate
  modified_base 13: mod_base = OTHER; note = 2-fluororibose cytosine
  modified_base 13..14: mod_base = OTHER; note = S-phosphorothioate
  modified_base 14: mod_base = OTHER; note = 2-fluororibose guanine
  modified_base 14..15: mod_base = OTHER; note R-N-(1,3-dimethylimidazolidin-2-ylidene)phosphoramidate
  modified_base 15: mod_base = OTHER; note = 2-fluororibose adenine
  modified_base 15..16: mod_base = OTHER; note = S-phosphorothioate
  modified_base 16: mod_base = OTHER; note = 2-O-methylribose adenine
  modified_base 16..17: mod_base = OTHER; note R-N-(1,3-dimethylimidazolidin-2-ylidene)phosphoramidate
  modified_base 17: mod_base = OTHER; note = 2-O-methylribose adenine
  modified_base 17..18: mod_base = OTHER; note = S-phosphorothioate
  modified_base 18: mod_base = gm
  modified_base 18..19: mod_base = OTHER; note = S-phosphorothioate
  modified_base 19: mod_base = cm
  modified_base 19..20: mod_base = OTHER; note = S-phosphorothioate
  modified_base 20: mod_base = OTHER; note = 2-O-methylribose adenine
  modified_base 20..21: mod_base = OTHER; note = S-phosphorothioate
  modified_base 21: mod_base = OTHER; note = 2-O-methylribose adenine
  modified_base 21..22: mod_base = OTHER; note = S-phosphorothioate
  modified_base 22: mod_base = um
  modified_base 22..23: mod_base = OTHER; note = S-phosphorothioate
  modified_base 23: mod_base = gm
  modified_base 23..24: mod_base = OTHER; note = S-phosphorothioate
  modified_base 24: mod_base = OTHER; note = 2-fluororibose cytosine
  modified_base 24..25: mod_base = OTHER; note = S-phosphorothioate
  modified_base 25: mod_base = OTHER; note = S-5-methyl-deoxyribose cytosine
  modified_base 25..26: mod_base = OTHER; note = S-phosphorothioate
  modified_base 26: mod_base = OTHER; note = deoxyribose adenine
  modified_base 26..27: mod_base = OTHER; note R-N-(1,3-dimethylimidazolidin-2-ylidene)phosphoramidate
  modified_base 27: mod_base = um
  modified_base 27..28: mod_base = OTHER; note = S-phosphorothioate
  modified_base 28: mod_base = cm
  modified_base 28..29: mod_base = OTHER; note = S-phosphorothioate
  modified_base 29: mod_base = OTHER; note = 2-O-methylribose adenine
  modified_base 29..30: mod_base = OTHER; note R-N-(1,3-dimethylimidazolidin-2-ylidene)phosphoramidate
  modified_base 30: mod_base = cm
  source 1..30: mol_type = other RNA

SEQ ID NO: 13 - RNA, 30 nt, synthetic construct; identical to SEQ ID NO: 5
  misc_feature 1..30: note = Synthetic: WV-39202
  misc_feature 1..30: note = Synthetic: ADR-0106262
  modified_base 1: mod_base = OTHER; note = C6 Spacer linked by phosphate to 1,2-dideoxyribose (5-3 connectivity) linked by R-N-(1,3-dimethylimidazolidin-2-ylidene)phosphoramidate to 1,2-dideoxyribose (5-3 connectivity) linked by R-N-(1,3-dimethylimidazolidin-2-ylidene)phosphoramidate to 1,2-dideoxyribose (5-3 connectivity) linked by R-N-(1,3-dimethylimidazolidin-2-ylidene)phosphoramidate the 5' end of 2-fluororibose adenine
  modified_base 1..2: mod_base = OTHER; note R-N-(1,3-dimethylimidazolidin-2-ylidene)phosphoramidate
  modified_base 2: mod_base = OTHER; note = 2-fluororibose cytosine
  modified_base 2..3: mod_base = OTHER; note = S-phosphorothioate
  modified_base 3: mod_base = OTHER; note = 2-fluororibose adenine
  modified_base 3..4: mod_base = OTHER; note = S-phosphorothioate
  modified_base 4: mod_base = OTHER; note = 2-fluororibose uracil
  modified_base 4..5: mod_base = OTHER; note = S-phosphorothioate
  modified_base 5: mod_base = OTHER; note = 2-fluororibose adenine
  modified_base 5..6: mod_base = OTHER; note = S-phosphorothioate
  modified_base 6: mod_base = OTHER; note = 2-fluororibose adenine
  modified_base 6..7: mod_base = OTHER; note = S-phosphorothioate
  modified_base 7: mod_base = OTHER; note = 2-fluororibose uracil
  modified_base 7..8: mod_base = OTHER; note = S-phosphorothioate
  modified_base 8: mod_base = OTHER; note = 2-fluororibose uracil
  modified_base 8..9: mod_base = OTHER; note = S-phosphorothioate
  modified_base 9: mod_base = OTHER; note = 2-fluororibose uracil
  modified_base 9..10: mod_base = OTHER; note = S-phosphorothioate
  modified_base 10: mod_base = OTHER; note = 2-fluororibose adenine
  modified_base 10..11: mod_base = OTHER; note = S-phosphorothioate
  modified_base 11: mod_base = OTHER; note = 2-fluororibose cytosine
  modified_base 11..12: mod_base = OTHER; note = S-phosphorothioate
  modified_base 12: mod_base = OTHER; note = 2-fluororibose adenine
  modified_base 12..13: mod_base = OTHER; note = S-phosphorothioate
  modified_base 13: mod_base = OTHER; note = 2-fluororibose cytosine
  modified_base 13..14: mod_base = OTHER; note = S-phosphorothioate
  modified_base 14: mod_base = OTHER; note = 2-fluororibose guanine
  modified_base 14..15: mod_base = OTHER; note = S-phosphorothioate
  modified_base 15: mod_base = OTHER; note = 2-fluororibose adenine
  modified_base 15..16: mod_base = OTHER; note = S-phosphorothioate
  modified_base 16: mod_base = OTHER; note = 2-O-methylribose adenine
  modified_base 16..17: mod_base = OTHER; note = S-phosphorothioate
  modified_base 17: mod_base = OTHER; note = 2-O-methylribose adenine
  modified_base 17..18: mod_base = OTHER; note = S-phosphorothioate
  modified_base 18: mod_base = gm
  modified_base 18..19: mod_base = OTHER; note = S-phosphorothioate
  modified_base 19: mod_base = cm
  modified_base 19..20: mod_base = OTHER; note = S-phosphorothioate
  modified_base 20: mod_base = OTHER; note = 2-O-methylribose adenine
  modified_base 20..21: mod_base = OTHER; note R-N-(1,3-dimethylimidazolidin-2-ylidene)phosphoramidate
  modified_base 21: mod_base = OTHER; note = 2-O-methylribose adenine
  modified_base 21..22: mod_base = OTHER; note = S-phosphorothioate
  modified_base 22: mod_base = um
  modified_base 22..23: mod_base = OTHER; note = S-phosphorothioate
  modified_base 23: mod_base = gm
  modified_base 23..24: mod_base = OTHER; note = S-phosphorothioate
  modified_base 24: mod_base = OTHER; note = 2-fluororibose cytosine
  modified_base 24..25: mod_base = OTHER; note = S-phosphorothioate
  modified_base 25: mod_base = OTHER; note = deoxyribose cytosine
  modified_base 25..26: mod_base = OTHER; note = S-phosphorothioate
  modified_base 26: mod_base = OTHER; note = deoxyribose adenine
  modified_base 26..27: mod_base = OTHER; note R-N-(1,3-dimethylimidazolidin-2-ylidene)phosphoramidate
  modified_base 27: mod_base = um
  modified_base 27..28: mod_base = OTHER; note = S-phosphorothioate
  modified_base 28: mod_base = cm
  modified_base 28..29: mod_base = OTHER; note = S-phosphorothioate
  modified_base 29: mod_base = OTHER; note = 2-O-methylribose adenine
  modified_base 29..30: mod_base = OTHER; note R-N-(1,3-dimethylimidazolidin-2-ylidene)phosphoramidate
  modified_base 30: mod_base = cm
  source 1..30: mol_type = other RNA

SEQ ID NO: 14 - RNA, 30 nt, synthetic construct; identical to SEQ ID NO: 5
  misc_feature 1..30: note = Synthetic: WV-39203
  misc_feature 1..30: note = Synthetic: ADR-0106263
  modified_base 1: mod_base = OTHER; note = C6 Spacer linked by phosphate to 1,2-dideoxyribose (5-3 connectivity) linked by R-N-(1,3-dimethylimidazolidin-2-ylidene)phosphoramidate to 1,2-dideoxyribose (5-3 connectivity) linked by R-N-(1,3-dimethylimidazolidin-2-ylidene)phosphoramidate to 1,2-dideoxyribose (5-3 connectivity) linked by R-N-(1,3-dimethylimidazolidin-2-ylidene)phosphoramidate the 5' end of 2-fluororibose adenine
  modified_base 1..2: mod_base = OTHER; note = S-phosphorothioate
  modified_base 2: mod_base = OTHER; note = 2-fluororibose cytosine
  modified_base 2..3: mod_base = OTHER; note = S-phosphorothioate
  modified_base 3: mod_base = OTHER; note = 2-fluororibose adenine
  modified_base 3..4: mod_base = OTHER; note = S-phosphorothioate
  modified_base 4: mod_base = OTHER; note = 2-fluororibose uracil
  modified_base 4..5: mod_base = OTHER; note = S-phosphorothioate
  modified_base 5: mod_base = OTHER; note = 2-fluororibose adenine
  modified_base 5..6: mod_base = OTHER; note = S-phosphorothioate
  modified_base 6: mod_base = OTHER; note = 2-fluororibose adenine
  modified_base 6..7: mod_base = OTHER; note = S-phosphorothioate
  modified_base 7: mod_base = OTHER; note = 2-fluororibose uracil
  modified_base 7..8: mod_base = OTHER; note = S-phosphorothioate
  modified_base 8: mod_base = OTHER; note = 2-fluororibose uracil
  modified_base 8..9: mod_base = OTHER; note = S-phosphorothioate
  modified_base 9: mod_base = OTHER; note = 2-fluororibose uracil
  modified_base 9..10: mod_base = OTHER; note = S-phosphorothioate
  modified_base 10: mod_base = OTHER; note = 2-fluororibose adenine
  modified_base 10..11: mod_base = OTHER; note = S-phosphorothioate
  modified_base 11: mod_base = OTHER; note = 2-fluororibose cytosine
  modified_base 11..12: mod_base = OTHER; note = S-phosphorothioate
  modified_base 12: mod_base = OTHER; note = 2-fluororibose adenine
  modified_base 12..13: mod_base = OTHER; note = S-phosphorothioate
  modified_base 13: mod_base = OTHER; note = 2-fluororibose cytosine
  modified_base 13..14: mod_base = OTHER; note = S-phosphorothioate
  modified_base 14: mod_base = OTHER; note = 2-fluororibose guanine
  modified_base 14..15: mod_base = OTHER; note = S-phosphorothioate
  modified_base 15: mod_base = OTHER; note = 2-fluororibose adenine
  modified_base 15..16: mod_base = OTHER; note = S-phosphorothioate
  modified_base 16: mod_base = OTHER; note = 2-O-methylribose adenine
  modified_base 16..17: mod_base = OTHER; note = S-phosphorothioate
  modified_base 17: mod_base = OTHER; note = 2-O-methylribose adenine
  modified_base 17..18: mod_base = OTHER; note = S-phosphorothioate
  modified_base 18: mod_base = gm
  modified_base 18..19: mod_base = OTHER; note = S-phosphorothioate
  modified_base 19: mod_base = cm
  modified_base 19..20: mod_base = OTHER; note = S-phosphorothioate
  modified_base 20: mod_base = OTHER; note = 2-O-methylribose adenine
  modified_base 20..21: mod_base = OTHER; note = S-phosphorothioate
  modified_base 21: mod_base = OTHER; note = 2-O-methylribose adenine
  modified_base 21..22: mod_base = OTHER; note = S-phosphorothioate
  modified_base 22: mod_base = um
  modified_base 22..23: mod_base = OTHER; note = S-phosphorothioate
  modified_base 23: mod_base = gm
  modified_base 23..24: mod_base = OTHER; note = S-phosphorothioate
  modified_base 24: mod_base = OTHER; note = 2-fluororibose cytosine
  modified_base 24..25: mod_base = OTHER; note = S-phosphorothioate
  modified_base 25: mod_base = OTHER; note = deoxyribose cytosine
  modified_base 25..26: mod_base = OTHER; note = S-phosphorothioate
  modified_base 26: mod_base = OTHER; note = deoxyribose adenine
  modified_base 26..27: mod_base = OTHER; note R-N-(1,3-dimethylimidazolidin-2-ylidene)phosphoramidate
  modified_base 27: mod_base = um
  modified_base 27..28: mod_base = OTHER; note = S-phosphorothioate
  modified_base 28: mod_base = cm
  modified_base 28..29: mod_base = OTHER; note = S-phosphorothioate
  modified_base 29: mod_base = OTHER; note = 2-O-methylribose adenine
  modified_base 29..30: mod_base = OTHER; note R-N-(1,3-dimethylimidazolidin-2-ylidene)phosphoramidate
  modified_base 30: mod_base = cm
  source 1..30: mol_type = other RNA

SEQ ID NO: 15 - RNA, 30 nt, synthetic construct; identical to SEQ ID NO: 5
  misc_feature 1..30: note = Synthetic: WV-40805
  misc_feature 1..30: note = Synthetic: ADR-0100417
  modified_base 1: mod_base = OTHER; note = triantennary GalNAc with C12 linker linked to 6-aminohexanol linked by phosphate to the 5' end of 2-fluororibose adenine
  modified_base 1..2: mod_base = OTHER; note R-N-(1,3-dimethylimidazolidin-2-ylidene)phosphoramidate
  modified_base 2: mod_base = OTHER; note = 2-fluororibose cytosine
  modified_base 2..3: mod_base = OTHER; note = S-phosphorothioate
  modified_base 3: mod_base = OTHER; note = 2-fluororibose adenine
  modified_base 3..4: mod_base = OTHER; note = S-phosphorothioate
  modified_base 4: mod_base = OTHER; note = 2-fluororibose uracil
  modified_base 4..5: mod_base = OTHER; note = S-phosphorothioate
  modified_base 5: mod_base = OTHER; note = 2-fluororibose adenine
  modified_base 5..6: mod_base = OTHER; note = S-phosphorothioate
  modified_base 6: mod_base = OTHER; note = 2-fluororibose adenine
  modified_base 6..7: mod_base = OTHER; note = S-phosphorothioate
  modified_base 7: mod_base = OTHER; note = 2-fluororibose uracil
  modified_base 7..8: mod_base = OTHER; note = S-phosphorothioate
  modified_base 8: mod_base = OTHER; note = 2-fluororibose uracil
  modified_base 8..9: mod_base = OTHER; note = S-phosphorothioate
  modified_base 9: mod_base = OTHER; note = 2-fluororibose uracil
  modified_base 9..10: mod_base = OTHER; note = S-phosphorothioate
  modified_base 10: mod_base = OTHER; note = 2-fluororibose adenine
  modified_base 10..11: mod_base = OTHER; note = S-phosphorothioate
  modified_base 11: mod_base = OTHER; note = 2-fluororibose cytosine
  modified_base 11..12: mod_base = OTHER; note = S-phosphorothioate
  modified_base 12: mod_base = OTHER; note = 2-fluororibose adenine
  modified_base 12..13: mod_base = OTHER; note = S-phosphorothioate
  modified_base 13: mod_base = OTHER; note = 2-fluororibose cytosine
  modified_base 13..14: mod_base = OTHER; note = S-phosphorothioate
  modified_base 14: mod_base = OTHER; note = 2-fluororibose guanine
  modified_base 14..15: mod_base = OTHER; note R-N-(1,3-dimethylimidazolidin-2-ylidene)phosphoramidate
  modified_base 15: mod_base = OTHER; note = 2-fluororibose adenine
  modified_base 15..16: mod_base = OTHER; note = S-phosphorothioate
  modified_base 16: mod_base = OTHER; note = 2-O-methylribose adenine
  modified_base 16..17: mod_base = OTHER; note R-N-(1,3-dimethylimidazolidin-2-ylidene)phosphoramidate
  modified_base 17: mod_base = OTHER; note = 2-O-methylribose adenine
  modified_base 17..18: mod_base = OTHER; note = S-phosphorothioate
  modified_base 18: mod_base = gm
  modified_base 18..19: mod_base = OTHER; note = S-phosphorothioate
  modified_base 19: mod_base = cm
  modified_base 19..20: mod_base = OTHER; note = S-phosphorothioate
  modified_base 20: mod_base = OTHER; note = 2-O-methylribose adenine
  modified_base 20..21: mod_base = OTHER; note = S-phosphorothioate
  modified_base 21: mod_base = OTHER; note = 2-O-methylribose adenine
  modified_base 21..22: mod_base = OTHER; note = S-phosphorothioate
  modified_base 22: mod_base = um
  modified_base 22..23: mod_base = OTHER; note = S-phosphorothioate
  modified_base 23: mod_base = gm
  modified_base 23..24: mod_base = OTHER; note = S-phosphorothioate
  modified_base 24: mod_base = OTHER; note = 2-fluororibose cytosine
  modified_base 24..25: mod_base = OTHER; note = S-phosphorothioate
  modified_base 25: mod_base = OTHER; note = deoxyribose cytosine
  modified_base 25..26: mod_base = OTHER; note = S-phosphorothioate
  modified_base 26: mod_base = OTHER; note = (6S)-2,4-disubstituted-6-[(substituted oxy)methyl]morpholine adenine
  modified_base 26..27: mod_base = OTHER; note = N-(1,3-dimethylimidazolidin-2-ylidene)phosphoramidate
  modified_base 27: mod_base = um
  modified_base 27..28: mod_base = OTHER; note = S-phosphorothioate
  modified_base 28: mod_base = cm
  modified_base 28..29: mod_base = OTHER; note = S-phosphorothioate
  modified_base 29: mod_base = OTHER; note = (6S)-2,4-disubstituted-6-[(substituted oxy)methyl]morpholine adenine
  modified_base 29..30: mod_base = OTHER; note = N-(1,3-dimethylimidazolidin-2-ylidene)phosphoramidate
  modified_base 30: mod_base = cm
  source 1..30: mol_type = other RNA

SEQ ID NO: 16 - RNA, 30 nt, synthetic construct; identical to SEQ ID NO: 5
  misc_feature 1..30: note = Synthetic: WV-40804
  misc_feature 1..30: note = Synthetic: ADR-0100416
  modified_base 1: mod_base = OTHER; note = triantennary GalNAc with C12 linker linked to 6-aminohexanol linked by phosphate to the 5' end of (6S)-2,4-disubstituted-6-[(substituted oxy)methyl]morpholine adenine
  modified_base 1..2: mod_base = OTHER; note = N-(1,3-dimethylimidazolidin-2-ylidene)phosphoramidate
  modified_base 2: mod_base = OTHER; note = 2-fluororibose cytosine
  modified_base 2..3: mod_base = OTHER; note = S-phosphorothioate
  modified_base 3: mod_base = OTHER; note = 2-fluororibose adenine
  modified_base 3..4: mod_base = OTHER; note = S-phosphorothioate
  modified_base 4: mod_base = OTHER; note = 2-fluororibose uracil
  modified_base 4..5: mod_base = OTHER; note = S-phosphorothioate
  modified_base 5: mod_base = OTHER; note = 2-fluororibose adenine
  modified_base 5..6: mod_base = OTHER; note = S-phosphorothioate
  modified_base 6: mod_base = OTHER; note = 2-fluororibose adenine
  modified_base 6..7: mod_base = OTHER; note = S-phosphorothioate
  modified_base 7: mod_base = OTHER; note = 2-fluororibose uracil
  modified_base 7..8: mod_base = OTHER; note = S-phosphorothioate
  modified_base 8: mod_base = OTHER; note = 2-fluororibose uracil
  modified_base 8..9: mod_base = OTHER; note = S-phosphorothioate
  modified_base 9: mod_base = OTHER; note = 2-fluororibose uracil
  modified_base 9..10: mod_base = OTHER; note = S-phosphorothioate
  modified_base 10: mod_base = OTHER; note = 2-fluororibose adenine
  modified_base 10..11: mod_base = OTHER; note = S-phosphorothioate
  modified_base 11: mod_base = OTHER; note = 2-fluororibose cytosine
  modified_base 11..12: mod_base = OTHER; note = S-phosphorothioate
  modified_base 12: mod_base = OTHER; note = 2-fluororibose adenine
  modified_base 12..13: mod_base = OTHER; note = S-phosphorothioate
  modified_base 13: mod_base = OTHER; note = 2-fluororibose cytosine
  modified_base 13..14: mod_base = OTHER; note = S-phosphorothioate
  modified_base 14: mod_base = OTHER; note = (6S)-2,4-disubstituted-6-[(substituted oxy)methyl]morpholine guanine
  modified_base 14..15: mod_base = OTHER; note = N-(1,3-dimethylimidazolidin-2-ylidene)phosphoramidate
  modified_base 15: mod_base = OTHER; note = 2-fluororibose adenine
  modified_base 15..16: mod_base = OTHER; note = S-phosphorothioate
  modified_base 16: mod_base = OTHER; note = (6S)-2,4-disubstituted-6-[(substituted oxy)methyl]morpholine adenine
  modified_base 16..17: mod_base = OTHER; note = N-(1,3-dimethylimidazolidin-2-ylidene)phosphoramidate
  modified_base 17: mod_base = OTHER; note = 2-O-methylribose adenine
  modified_base 17..18: mod_base = OTHER; note = S-phosphorothioate
  modified_base 18: mod_base = gm
  modified_base 18..19: mod_base = OTHER; note = S-phosphorothioate
  modified_base 19: mod_base = cm
  modified_base 19..20: mod_base = OTHER; note = S-phosphorothioate
  modified_base 20: mod_base = OTHER; note = 2-O-methylribose adenine
  modified_base 20..21: mod_base = OTHER; note = S-phosphorothioate
  modified_base 21: mod_base = OTHER; note = 2-O-methylribose adenine
  modified_base 21..22: mod_base = OTHER; note = S-phosphorothioate
  modified_base 22: mod_base = um
  modified_base 22..23: mod_base = OTHER; note = S-phosphorothioate
  modified_base 23: mod_base = gm
  modified_base 23..24: mod_base = OTHER; note = S-phosphorothioate
  modified_base 24: mod_base = OTHER; note = 2-fluororibose cytosine
  modified_base 24..25: mod_base = OTHER; note = S-phosphorothioate
  modified_base 25: mod_base = OTHER; note = deoxyribose cytosine
  modified_base 25..26: mod_base = OTHER; note = S-phosphorothioate
  modified_base 26: mod_base = OTHER; note = (6S)-2,4-disubstituted-6-[(substituted oxy)methyl]morpholine adenine
  modified_base 26..27: mod_base = OTHER; note = N-(1,3-dimethylimidazolidin-2-ylidene)phosphoramidate
  modified_base 27: mod_base = um
  modified_base 27..28: mod_base = OTHER; note = S-phosphorothioate
  modified_base 28: mod_base = cm
  modified_base 28..29: mod_base = OTHER; note = S-phosphorothioate
  modified_base 29: mod_base = OTHER; note = (6S)-2,4-disubstituted-6-[(substituted oxy)methyl]morpholine adenine
  modified_base 29..30: mod_base = OTHER; note = N-(1,3-dimethylimidazolidin-2-ylidene)phosphoramidate
  modified_base 30: mod_base = cm
  source 1..30: mol_type = other RNA

SEQ ID NO: 17 - RNA, 30 nt, synthetic construct; identical to SEQ ID NO: 5
  misc_feature 1..30: note = Synthetic: WV-40803
  misc_feature 1..30: note = Synthetic: ADR-0100415
  modified_base 1: mod_base = OTHER; note = triantennary GalNAc with C12 linker linked to 6-aminohexanol linked by phosphate to the 5' end of 2-fluororibose adenine
  modified_base 1..2: mod_base = OTHER; note R-N-(1,3-dimethylimidazolidin-2-ylidene)phosphoramidate
  modified_base 2: mod_base = OTHER; note = 2-fluororibose cytosine
  modified_base 2..3: mod_base = OTHER; note = S-phosphorothioate
  modified_base 3: mod_base = OTHER; note = 2-fluororibose adenine
  modified_base 3..4: mod_base = OTHER; note = S-phosphorothioate
  modified_base 4: mod_base = OTHER; note = 2-fluororibose uracil
  modified_base 4..5: mod_base = OTHER; note = S-phosphorothioate
  modified_base 5: mod_base = OTHER; note = 2-fluororibose adenine
  modified_base 5..6: mod_base = OTHER; note = S-phosphorothioate
  modified_base 6: mod_base = OTHER; note = 2-fluororibose adenine
  modified_base 6..7: mod_base = OTHER; note = S-phosphorothioate
  modified_base 7: mod_base = OTHER; note = 2-fluororibose uracil
  modified_base 7..8: mod_base = OTHER; note = S-phosphorothioate
  modified_base 8: mod_base = OTHER; note = 2-fluororibose uracil
  modified_base 8..9: mod_base = OTHER; note = S-phosphorothioate
  modified_base 9: mod_base = OTHER; note = 2-fluororibose uracil
  modified_base 9..10: mod_base = OTHER; note = S-phosphorothioate
  modified_base 10: mod_base = OTHER; note = 2-fluororibose adenine
  modified_base 10..11: mod_base = OTHER; note = S-phosphorothioate
  modified_base 11: mod_base = OTHER; note = 2-fluororibose cytosine
  modified_base 11..12: mod_base = OTHER; note = S-phosphorothioate
  modified_base 12: mod_base = OTHER; note = 2-fluororibose adenine
  modified_base 12..13: mod_base = OTHER; note = S-phosphorothioate
  modified_base 13: mod_base = OTHER; note = 2-fluororibose cytosine
  modified_base 13..14: mod_base = OTHER; note = S-phosphorothioate
  modified_base 14: mod_base = OTHER; note = 2-fluororibose guanine
  modified_base 14..15: mod_base = OTHER; note R-N-(1,3-dimethylimidazolidin-2-ylidene)phosphoramidate
  modified_base 15: mod_base = OTHER; note = 2-fluororibose adenine
  modified_base 15..16: mod_base = OTHER; note = S-phosphorothioate
  modified_base 16: mod_base = OTHER; note = 2-O-methylribose adenine
  modified_base 16..17: mod_base = OTHER; note R-N-(1,3-dimethylimidazolidin-2-ylidene)phosphoramidate
  modified_base 17: mod_base = OTHER; note = 2-O-methylribose adenine
  modified_base 17..18: mod_base = OTHER; note = S-phosphorothioate
  modified_base 18: mod_base = gm
  modified_base 18..19: mod_base = OTHER; note = S-phosphorothioate
  modified_base 19: mod_base = cm
  modified_base 19..20: mod_base = OTHER; note = S-phosphorothioate
  modified_base 20: mod_base = OTHER; note = 2-O-methylribose adenine
  modified_base 20..21: mod_base = OTHER; note = S-phosphorothioate
  modified_base 21: mod_base = OTHER; note = 2-O-methylribose adenine
  modified_base 21..22: mod_base = OTHER; note = S-phosphorothioate
  modified_base 22: mod_base = um
  modified_base 22..23: mod_base = OTHER; note = S-phosphorothioate
  modified_base 23: mod_base = gm
  modified_base 23..24: mod_base = OTHER; note = S-phosphorothioate
  modified_base 24: mod_base = OTHER; note = 2-fluororibose cytosine
  modified_base 24..25: mod_base = OTHER; note = S-phosphorothioate
  modified_base 25: mod_base = OTHER; note = deoxyribose cytosine
  modified_base 25..26: mod_base = OTHER; note = S-phosphorothioate
  modified_base 26: mod_base = OTHER; note = (6S)-2,4-disubstituted-6-[(substituted oxy)methyl]morpholine adenine
  modified_base 26..27: mod_base = OTHER; note = N-(1,3-dimethylimidazolidin-2-ylidene)phosphoramidate
  modified_base 27: mod_base = um
  modified_base 27..28: mod_base = OTHER; note = S-phosphorothioate
  modified_base 28: mod_base = cm
  modified_base 28..29: mod_base = OTHER; note = S-phosphorothioate
  modified_base 29: mod_base = OTHER; note = 2-O-methylribose adenine
  modified_base 29..30: mod_base = OTHER; note R-N-(1,3-dimethylimidazolidin-2-ylidene)phosphoramidate
  modified_base 30: mod_base = cm
  source 1..30: mol_type = other RNA

SEQ ID NO: 18 - RNA, 30 nt, synthetic construct; identical to SEQ ID NO: 5
  misc_feature 1..30: note = Synthetic: WV-40802
  misc_feature 1..30: note = Synthetic: ADR-0100414
  modified_base 1: mod_base = OTHER; note = triantennary GalNAc with C12 linker linked to 6-aminohexanol linked by phosphate to the 5' end of 2-fluororibose adenine
  modified_base 1..2: mod_base = OTHER; note R-N-(1,3-dimethylimidazolidin-2-ylidene)phosphoramidate
  modified_base 2: mod_base = OTHER; note = 2-fluororibose cytosine
  modified_base 2..3: mod_base = OTHER; note = S-phosphorothioate
  modified_base 3: mod_base = OTHER; note = 2-fluororibose adenine
  modified_base 3..4: mod_base = OTHER; note = S-phosphorothioate
  modified_base 4: mod_base = OTHER; note = 2-fluororibose uracil
  modified_base 4..5: mod_base = OTHER; note = S-phosphorothioate
  modified_base 5: mod_base = OTHER; note = 2-fluororibose adenine
  modified_base 5..6: mod_base = OTHER; note = S-phosphorothioate
  modified_base 6: mod_base = OTHER; note = 2-fluororibose adenine
  modified_base 6..7: mod_base = OTHER; note = S-phosphorothioate
  modified_base 7: mod_base = OTHER; note = 2-fluororibose uracil
  modified_base 7..8: mod_base = OTHER; note = S-phosphorothioate
  modified_base 8: mod_base = OTHER; note = 2-fluororibose uracil
  modified_base 8..9: mod_base = OTHER; note = S-phosphorothioate
  modified_base 9: mod_base = OTHER; note = 2-fluororibose uracil
  modified_base 9..10: mod_base = OTHER; note = S-phosphorothioate
  modified_base 10: mod_base = OTHER; note = 2-fluororibose adenine
  modified_base 10..11: mod_base = OTHER; note = S-phosphorothioate
  modified_base 11: mod_base = OTHER; note = 2-fluororibose cytosine
  modified_base 11..12: mod_base = OTHER; note = S-phosphorothioate
  modified_base 12: mod_base = OTHER; note = 2-fluororibose adenine
  modified_base 12..13: mod_base = OTHER; note = S-phosphorothioate
  modified_base 13: mod_base = OTHER; note = 2-fluororibose cytosine
  modified_base 13..14: mod_base = OTHER; note = S-phosphorothioate
  modified_base 14: mod_base = OTHER; note = 2-fluororibose guanine
  modified_base 14..15: mod_base = OTHER; note R-N-(1,3-dimethylimidazolidin-2-ylidene)phosphoramidate
  modified_base 15: mod_base = OTHER; note = 2-fluororibose adenine
  modified_base 15..16: mod_base = OTHER; note = S-phosphorothioate
  modified_base 16: mod_base = OTHER; note = 2-O-methylribose adenine
  modified_base 16..17: mod_base = OTHER; note R-N-(1,3-dimethylimidazolidin-2-ylidene)phosphoramidate
  modified_base 17: mod_base = OTHER; note = 2-O-methylribose adenine
  modified_base 17..18: mod_base = OTHER; note = S-phosphorothioate
  modified_base 18: mod_base = gm
  modified_base 18..19: mod_base = OTHER; note = S-phosphorothioate
  modified_base 19: mod_base = cm
  modified_base 19..20: mod_base = OTHER; note = S-phosphorothioate
  modified_base 20: mod_base = OTHER; note = 2-O-methylribose adenine
  modified_base 20..21: mod_base = OTHER; note = S-phosphorothioate
  modified_base 21: mod_base = OTHER; note = 2-O-methylribose adenine
  modified_base 21..22: mod_base = OTHER; note = S-phosphorothioate
  modified_base 22: mod_base = um
  modified_base 22..23: mod_base = OTHER; note = S-phosphorothioate
  modified_base 23: mod_base = gm
  modified_base 23..24: mod_base = OTHER; note = S-phosphorothioate
  modified_base 24: mod_base = OTHER; note = 2-fluororibose cytosine
  modified_base 24..25: mod_base = OTHER; note = S-phosphorothioate
  modified_base 25: mod_base = OTHER; note = deoxyribose cytosine
  modified_base 25..26: mod_base = OTHER; note = S-phosphorothioate
  modified_base 26: mod_base = OTHER; note = (6S)-2,4-disubstituted-6-[(substituted oxy)methyl]morpholine adenine
  modified_base 26..27: mod_base = OTHER; note [(1,3-dimethylimidazolidin-2-ylidene)amino]disubstituted-la mbda5-phosphanethione
  modified_base 27: mod_base = um
  modified_base 27..28: mod_base = OTHER; note = S-phosphorothioate
  modified_base 28: mod_base = cm
  modified_base 28..29: mod_base = OTHER; note = S-phosphorothioate
  modified_base 29: mod_base = OTHER; note = (6S)-2,4-disubstituted-6-[(substituted oxy)methyl]morpholine adenine
  modified_base 29..30: mod_base = OTHER; note [(1,3-dimethylimidazolidin-2-ylidene)amino]disubstituted-la mbda5-phosphanethione
  modified_base 30: mod_base = cm
  source 1..30: mol_type = other RNA

SEQ ID NO: 19 - RNA, 30 nt, synthetic construct; identical to SEQ ID NO: 5
  misc_feature 1..30: note = Synthetic: WV-40801
  misc_feature 1..30: note = Synthetic: ADR-0100413
  modified_base 1: mod_base = OTHER; note = triantennary GalNAc with C12 linker linked to 6-aminohexanol linked by phosphate to the 5' end of (6S)-2,4-disubstituted-6-[(substituted oxy)methyl]morpholine adenine
  modified_base 1..2: mod_base = OTHER; note [(1,3-dimethylimidazolidin-2-ylidene)amino]disubstituted-la mbda5-phosphanethione
  modified_base 2: mod_base = OTHER; note = 2-fluororibose cytosine
  modified_base 2..3: mod_base = OTHER; note = S-phosphorothioate
  modified_base 3: mod_base = OTHER; note = 2-fluororibose adenine
  modified_base 3..4: mod_base = OTHER; note = S-phosphorothioate
  modified_base 4: mod_base = OTHER; note = 2-fluororibose uracil
  modified_base 4..5: mod_base = OTHER; note = S-phosphorothioate
  modified_base 5: mod_base = OTHER; note = 2-fluororibose adenine
  modified_base 5..6: mod_base = OTHER; note = S-phosphorothioate
  modified_base 6: mod_base = OTHER; note = 2-fluororibose adenine
  modified_base 6..7: mod_base = OTHER; note = S-phosphorothioate
  modified_base 7: mod_base = OTHER; note = 2-fluororibose uracil
  modified_base 7..8: mod_base = OTHER; note = S-phosphorothioate
  modified_base 8: mod_base = OTHER; note = 2-fluororibose uracil
  modified_base 8..9: mod_base = OTHER; note = S-phosphorothioate
  modified_base 9: mod_base = OTHER; note = 2-fluororibose uracil
  modified_base 9..10: mod_base = OTHER; note = S-phosphorothioate
  modified_base 10: mod_base = OTHER; note = 2-fluororibose adenine
  modified_base 10..11: mod_base = OTHER; note = S-phosphorothioate
  modified_base 11: mod_base = OTHER; note = 2-fluororibose cytosine
  modified_base 11..12: mod_base = OTHER; note = S-phosphorothioate
  modified_base 12: mod_base = OTHER; note = 2-fluororibose adenine
  modified_base 12..13: mod_base = OTHER; note = S-phosphorothioate
  modified_base 13: mod_base = OTHER; note = 2-fluororibose cytosine
  modified_base 13..14: mod_base = OTHER; note = S-phosphorothioate
  modified_base 14: mod_base = OTHER; note = (6S)-2,4-disubstituted-6-[(substituted oxy)methyl]morpholine guanine
  modified_base 14..15: mod_base = OTHER; note [(1,3-dimethylimidazolidin-2-ylidene)amino]disubstituted-la mbda5-phosphanethione
  modified_base 15: mod_base = OTHER; note = 2-fluororibose adenine
  modified_base 15..16: mod_base = OTHER; note = S-phosphorothioate
  modified_base 16: mod_base = OTHER; note = (6S)-2,4-disubstituted-6-[(substituted oxy)methyl]morpholine adenine
  modified_base 16..17: mod_base = OTHER; note [(1,3-dimethylimidazolidin-2-ylidene)amino]disubstituted-la mbda5-phosphanethione
  modified_base 17: mod_base = OTHER; note = 2-O-methylribose adenine
  modified_base 17..18: mod_base = OTHER; note = S-phosphorothioate
  modified_base 18: mod_base = gm
  modified_base 18..19: mod_base = OTHER; note = S-phosphorothioate
  modified_base 19: mod_base = cm
  modified_base 19..20: mod_base = OTHER; note = S-phosphorothioate
  modified_base 20: mod_base = OTHER; note = 2-O-methylribose adenine
  modified_base 20..21: mod_base = OTHER; note = S-phosphorothioate
  modified_base 21: mod_base = OTHER; note = 2-O-methylribose adenine
  modified_base 21..22: mod_base = OTHER; note = S-phosphorothioate
  modified_base 22: mod_base = um
  modified_base 22..23: mod_base = OTHER; note = S-phosphorothioate
  modified_base 23: mod_base = gm
  modified_base 23..24: mod_base = OTHER; note = S-phosphorothioate
  modified_base 24: mod_base = OTHER; note = 2-fluororibose cytosine
  modified_base 24..25: mod_base = OTHER; note = S-phosphorothioate
  modified_base 25: mod_base = OTHER; note = deoxyribose cytosine
  modified_base 25..26: mod_base = OTHER; note = S-phosphorothioate
  modified_base 26: mod_base = OTHER; note = (6S)-2,4-disubstituted-6-[(substituted oxy)methyl]morpholine adenine
  modified_base 26..27: mod_base = OTHER; note [(1,3-dimethylimidazolidin-2-ylidene)amino]disubstituted-la mbda5-phosphanethione
  modified_base 27: mod_base = um
  modified_base 27..28: mod_base = OTHER; note = S-phosphorothioate
  modified_base 28: mod_base = cm
  modified_base 28..29: mod_base = OTHER; note = S-phosphorothioate
  modified_base 29: mod_base = OTHER; note = (6S)-2,4-disubstituted-6-[(substituted oxy)methyl]morpholine adenine
  modified_base 29..30: mod_base = OTHER; note [(1,3-dimethylimidazolidin-2-ylidene)amino]disubstituted-la mbda5-phosphanethione
  modified_base 30: mod_base = cm
  source 1..30: mol_type = other RNA

SEQ ID NO: 20 - RNA, 30 nt, synthetic construct; identical to SEQ ID NO: 5
  misc_feature 1..30: note = Synthetic: WV-40800
  misc_feature 1..30: note = Synthetic: ADR-0100412
  modified_base 1: mod_base = OTHER; note = triantennary GalNAc with C12 linker linked to 6-aminohexanol linked by phosphate to the 5' end of 2-fluororibose adenine
  modified_base 1..2: mod_base = OTHER; note R-N-(1,3-dimethylimidazolidin-2-ylidene)phosphoramidate
  modified_base 2: mod_base = OTHER; note = 2-fluororibose cytosine
  modified_base 2..3: mod_base = OTHER; note = S-phosphorothioate
  modified_base 3: mod_base = OTHER; note = 2-fluororibose adenine
  modified_base 3..4: mod_base = OTHER; note = S-phosphorothioate
  modified_base 4: mod_base = OTHER; note = 2-fluororibose uracil
  modified_base 4..5: mod_base = OTHER; note = S-phosphorothioate
  modified_base 5: mod_base = OTHER; note = 2-fluororibose adenine
  modified_base 5..6: mod_base = OTHER; note = S-phosphorothioate
  modified_base 6: mod_base = OTHER; note = 2-fluororibose adenine
  modified_base 6..7: mod_base = OTHER; note = S-phosphorothioate
  modified_base 7: mod_base = OTHER; note = 2-fluororibose uracil
  modified_base 7..8: mod_base = OTHER; note = S-phosphorothioate
  modified_base 8: mod_base = OTHER; note = 2-fluororibose uracil
  modified_base 8..9: mod_base = OTHER; note = S-phosphorothioate
  modified_base 9: mod_base = OTHER; note = 2-fluororibose uracil
  modified_base 9..10: mod_base = OTHER; note = S-phosphorothioate
  modified_base 10: mod_base = OTHER; note = 2-fluororibose adenine
  modified_base 10..11: mod_base = OTHER; note = S-phosphorothioate
  modified_base 11: mod_base = OTHER; note = 2-fluororibose cytosine
  modified_base 11..12: mod_base = OTHER; note = S-phosphorothioate
  modified_base 12: mod_base = OTHER; note = 2-fluororibose adenine
  modified_base 12..13: mod_base = OTHER; note = S-phosphorothioate
  modified_base 13: mod_base = OTHER; note = 2-fluororibose cytosine
  modified_base 13..14: mod_base = OTHER; note = S-phosphorothioate
  modified_base 14: mod_base = OTHER; note = 2-fluororibose guanine
  modified_base 14..15: mod_base = OTHER; note R-N-(1,3-dimethylimidazolidin-2-ylidene)phosphoramidate
  modified_base 15: mod_base = OTHER; note = 2-fluororibose adenine
  modified_base 15..16: mod_base = OTHER; note = S-phosphorothioate
  modified_base 16: mod_base = OTHER; note = 2-O-methylribose adenine
  modified_base 16..17: mod_base = OTHER; note R-N-(1,3-dimethylimidazolidin-2-ylidene)phosphoramidate
  modified_base 17: mod_base = OTHER; note = 2-O-methylribose adenine
  modified_base 17..18: mod_base = OTHER; note = S-phosphorothioate
  modified_base 18: mod_base = gm
  modified_base 18..19: mod_base = OTHER; note = S-phosphorothioate
  modified_base 19: mod_base = cm
  modified_base 19..20: mod_base = OTHER; note = S-phosphorothioate
  modified_base 20: mod_base = OTHER; note = 2-O-methylribose adenine
  modified_base 20..21: mod_base = OTHER; note = S-phosphorothioate
  modified_base 21: mod_base = OTHER; note = 2-O-methylribose adenine
  modified_base 21..22: mod_base = OTHER; note = S-phosphorothioate
  modified_base 22: mod_base = um
  modified_base 22..23: mod_base = OTHER; note = S-phosphorothioate
  modified_base 23: mod_base = gm
  modified_base 23..24: mod_base = OTHER; note = S-phosphorothioate
  modified_base 24: mod_base = OTHER; note = 2-fluororibose cytosine
  modified_base 24..25: mod_base = OTHER; note = S-phosphorothioate
  modified_base 25: mod_base = OTHER; note = deoxyribose cytosine
  modified_base 25..26: mod_base = OTHER; note = S-phosphorothioate
  modified_base 26: mod_base = OTHER; note = (6S)-2,4-disubstituted-6-[(substituted oxy)methyl]morpholine adenine
  modified_base 26..27: mod_base = OTHER; note [(1,3-dimethylimidazolidin-2-ylidene)amino]disubstituted-la mbda5-phosphanethione
  modified_base 27: mod_base = um
  modified_base 27..28: mod_base = OTHER; note = S-phosphorothioate
  modified_base 28: mod_base = cm
  modified_base 28..29: mod_base = OTHER; note = S-phosphorothioate
  modified_base 29: mod_base = OTHER; note = 2-O-methylribose adenine
  modified_base 29..30: mod_base = OTHER; note R-N-(1,3-dimethylimidazolidin-2-ylidene)phosphoramidate
  modified_base 30: mod_base = cm
  source 1..30: mol_type = other RNA

SEQ ID NO: 21 - RNA, 30 nt, synthetic construct; identical to SEQ ID NO: 5
  misc_feature 1..30: note = Synthetic: WV-40583
  misc_feature 1..30: note = Synthetic: ADR-0100409
  modified_base 1: mod_base = OTHER; note = triantennary GalNAc with C12 linker linked to 6-aminohexanol linked by phosphate to the 5' end of 2-fluororibose adenine
  modified_base 1..2: mod_base = OTHER; note R-N-(1,3-dimethylimidazolidin-2-ylidene)phosphoramidate
  modified_base 2: mod_base = OTHER; note = 2-fluororibose cytosine
  modified_base 2..3: mod_base = OTHER; note = S-phosphorothioate
  modified_base 3: mod_base = OTHER; note = 2-fluororibose adenine
  modified_base 3..4: mod_base = OTHER; note = S-phosphorothioate
  modified_base 4: mod_base = OTHER; note = 2-fluororibose uracil
  modified_base 4..5: mod_base = OTHER; note = S-phosphorothioate
  modified_base 5: mod_base = OTHER; note = 2-fluororibose adenine
  modified_base 5..6: mod_base = OTHER; note = S-phosphorothioate
  modified_base 6: mod_base = OTHER; note = 2-fluororibose adenine
  modified_base 6..7: mod_base = OTHER; note = S-phosphorothioate
  modified_base 7: mod_base = OTHER; note = 2-fluororibose uracil
  modified_base 7..8: mod_base = OTHER; note = S-phosphorothioate
  modified_base 8: mod_base = OTHER; note = 2-fluororibose uracil
  modified_base 8..9: mod_base = OTHER; note = S-phosphorothioate
  modified_base 9: mod_base = OTHER; note = 2-fluororibose uracil
  modified_base 9..10: mod_base = OTHER; note = S-phosphorothioate
  modified_base 10: mod_base = OTHER; note = 2-fluororibose adenine
  modified_base 10..11: mod_base = OTHER; note = S-phosphorothioate
  modified_base 11: mod_base = OTHER; note = 2-fluororibose cytosine
  modified_base 11..12: mod_base = OTHER; note = S-phosphorothioate
  modified_base 12: mod_base = OTHER; note = 2-fluororibose adenine
  modified_base 12..13: mod_base = OTHER; note = S-phosphorothioate
  modified_base 13: mod_base = OTHER; note = 2-fluororibose cytosine
  modified_base 13..14: mod_base = OTHER; note = S-phosphorothioate
  modified_base 14: mod_base = OTHER; note = 2-fluororibose guanine
  modified_base 14..15: mod_base = OTHER; note R-N-(1,3-dimethylimidazolidin-2-ylidene)phosphoramidate
  modified_base 15: mod_base = OTHER; note = 2-fluororibose adenine
  modified_base 15..16: mod_base = OTHER; note = S-phosphorothioate
  modified_base 16: mod_base = OTHER; note = 2-O-methylribose adenine
  modified_base 16..17: mod_base = OTHER; note R-N-(1,3-dimethylimidazolidin-2-ylidene)phosphoramidate
  modified_base 17: mod_base = OTHER; note = 2-O-methylribose adenine
  modified_base 17..18: mod_base = OTHER; note = S-phosphorothioate
  modified_base 18: mod_base = gm
  modified_base 18..19: mod_base = OTHER; note = S-phosphorothioate
  modified_base 19: mod_base = cm
  modified_base 19..20: mod_base = OTHER; note = S-phosphorothioate
  modified_base 20: mod_base = OTHER; note = 2-O-methylribose adenine
  modified_base 20..21: mod_base = OTHER; note = S-phosphorothioate
  modified_base 21: mod_base = OTHER; note = 2-O-methylribose adenine
  modified_base 21..22: mod_base = OTHER; note = S-phosphorothioate
  modified_base 22: mod_base = um
  modified_base 22..23: mod_base = OTHER; note = S-phosphorothioate
  modified_base 23: mod_base = gm
  modified_base 23..24: mod_base = OTHER; note = S-phosphorothioate
  modified_base 24: mod_base = OTHER; note = 2-fluororibose cytosine
  modified_base 24..25: mod_base = OTHER; note = S-phosphorothioate
  modified_base 25: mod_base = OTHER; note = deoxyribose cytosine
  modified_base 25..26: mod_base = OTHER; note = S-phosphorothioate
  modified_base 26: mod_base = OTHER; note = deoxyribose adenine
  modified_base 26..27: mod_base = OTHER; note [(1,3-dimethylimidazolidin-2-ylidene)amino]disubstituted-la mbda5-phosphanethione
  modified_base 27: mod_base = um
  modified_base 27..28: mod_base = OTHER; note = S-phosphorothioate
  modified_base 28: mod_base = cm
  modified_base 28..29: mod_base = OTHER; note = S-phosphorothioate
  modified_base 29: mod_base = OTHER; note = 2-O-methylribose adenine
  modified_base 29..30: mod_base = OTHER; note [(1,3-dimethylimidazolidin-2-ylidene)amino]disubstituted-la mbda5-phosphanethione
  modified_base 30: mod_base = cm
  source 1..30: mol_type = other RNA

SEQ ID NO: 22 - RNA, 30 nt, synthetic construct; identical to SEQ ID NO: 5
  misc_feature 1..30: note = Synthetic: WV-40582
  misc_feature 1..30: note = Synthetic: ADR-0100408
  modified_base 1: mod_base = OTHER; note = triantennary GalNAc with C12 linker linked to 6-aminohexanol linked by phosphate to the 5' end of 2-fluororibose adenine
  modified_base 1..2: mod_base = OTHER; note [(1,3-dimethylimidazolidin-2-ylidene)amino]disubstituted-la mbda5-phosphanethione
  modified_base 2: mod_base = OTHER; note = 2-fluororibose cytosine
  modified_base 2..3: mod_base = OTHER; note = S-phosphorothioate
  modified_base 3: mod_base = OTHER; note = 2-fluororibose adenine
  modified_base 3..4: mod_base = OTHER; note = S-phosphorothioate
  modified_base 4: mod_base = OTHER; note = 2-fluororibose uracil
  modified_base 4..5: mod_base = OTHER; note = S-phosphorothioate
  modified_base 5: mod_base = OTHER; note = 2-fluororibose adenine
  modified_base 5..6: mod_base = OTHER; note = S-phosphorothioate
  modified_base 6: mod_base = OTHER; note = 2-fluororibose adenine
  modified_base 6..7: mod_base = OTHER; note = S-phosphorothioate
  modified_base 7: mod_base = OTHER; note = 2-fluororibose uracil
  modified_base 7..8: mod_base = OTHER; note = S-phosphorothioate
  modified_base 8: mod_base = OTHER; note = 2-fluororibose uracil
  modified_base 8..9: mod_base = OTHER; note = S-phosphorothioate
  modified_base 9: mod_base = OTHER; note = 2-fluororibose uracil
  modified_base 9..10: mod_base = OTHER; note = S-phosphorothioate
  modified_base 10: mod_base = OTHER; note = 2-fluororibose adenine
  modified_base 10..11: mod_base = OTHER; note = S-phosphorothioate
  modified_base 11: mod_base = OTHER; note = 2-fluororibose cytosine
  modified_base 11..12: mod_base = OTHER; note = S-phosphorothioate
  modified_base 12: mod_base = OTHER; note = 2-fluororibose adenine
  modified_base 12..13: mod_base = OTHER; note = S-phosphorothioate
  modified_base 13: mod_base = OTHER; note = 2-fluororibose cytosine
  modified_base 13..14: mod_base = OTHER; note = S-phosphorothioate
  modified_base 14: mod_base = OTHER; note = 2-fluororibose guanine
  modified_base 14..15: mod_base = OTHER; note [(1,3-dimethylimidazolidin-2-ylidene)amino]disubstituted-la mbda5-phosphanethione
  modified_base 15: mod_base = OTHER; note = 2-fluororibose adenine
  modified_base 15..16: mod_base = OTHER; note = S-phosphorothioate
  modified_base 16: mod_base = OTHER; note = 2-O-methylribose adenine
  modified_base 16..17: mod_base = OTHER; note [(1,3-dimethylimidazolidin-2-ylidene)amino]disubstituted-la mbda5-phosphanethione
  modified_base 17: mod_base = OTHER; note = 2-O-methylribose adenine
  modified_base 17..18: mod_base = OTHER; note = S-phosphorothioate
  modified_base 18: mod_base = gm
  modified_base 18..19: mod_base = OTHER; note = S-phosphorothioate
  modified_base 19: mod_base = cm
  modified_base 19..20: mod_base = OTHER; note = S-phosphorothioate
  modified_base 20: mod_base = OTHER; note = 2-O-methylribose adenine
  modified_base 20..21: mod_base = OTHER; note = S-phosphorothioate
  modified_base 21: mod_base = OTHER; note = 2-O-methylribose adenine
  modified_base 21..22: mod_base = OTHER; note = S-phosphorothioate
  modified_base 22: mod_base = um
  modified_base 22..23: mod_base = OTHER; note = S-phosphorothioate
  modified_base 23: mod_base = gm
  modified_base 23..24: mod_base = OTHER; note = S-phosphorothioate
  modified_base 24: mod_base = OTHER; note = 2-fluororibose cytosine
  modified_base 24..25: mod_base = OTHER; note = S-phosphorothioate
  modified_base 25: mod_base = OTHER; note = deoxyribose cytosine
  modified_base 25..26: mod_base = OTHER; note = S-phosphorothioate
  modified_base 26: mod_base = OTHER; note = deoxyribose adenine
  modified_base 26..27: mod_base = OTHER; note [(1,3-dimethylimidazolidin-2-ylidene)amino]disubstituted-la mbda5-phosphanethione
  modified_base 27: mod_base = um
  modified_base 27..28: mod_base = OTHER; note = S-phosphorothioate
  modified_base 28: mod_base = cm
  modified_base 28..29: mod_base = OTHER; note = S-phosphorothioate
  modified_base 29: mod_base = OTHER; note = 2-O-methylribose adenine
  modified_base 29..30: mod_base = OTHER; note [(1,3-dimethylimidazolidin-2-ylidene)amino]disubstituted-la mbda5-phosphanethione
  modified_base 30: mod_base = cm
  source 1..30: mol_type = other RNA

SEQ ID NO: 23 - RNA, 30 nt, synthetic construct; identical to SEQ ID NO: 5
  misc_feature 1..30: note = Synthetic: WV-40581
  misc_feature 1..30: note = Synthetic: ADR-0100407
  modified_base 1: mod_base = OTHER; note = triantennary GalNAc with C12 linker linked to 6-aminohexanol linked by phosphate to the 5' end of 2-fluororibose adenine
  modified_base 1..2: mod_base = OTHER; note R-N-(1,3-dimethylimidazolidin-2-ylidene)phosphoramidate
  modified_base 2: mod_base = OTHER; note = 2-fluororibose cytosine
  modified_base 2..3: mod_base = OTHER; note = S-phosphorothioate
  modified_base 3: mod_base = OTHER; note = 2-fluororibose adenine
  modified_base 3..4: mod_base = OTHER; note = S-phosphorothioate
  modified_base 4: mod_base = OTHER; note = 2-fluororibose uracil
  modified_base 4..5: mod_base = OTHER; note = S-phosphorothioate
  modified_base 5: mod_base = OTHER; note = 2-fluororibose adenine
  modified_base 5..6: mod_base = OTHER; note = S-phosphorothioate
  modified_base 6: mod_base = OTHER; note = 2-fluororibose adenine
  modified_base 6..7: mod_base = OTHER; note = S-phosphorothioate
  modified_base 7: mod_base = OTHER; note = 2-fluororibose uracil
  modified_base 7..8: mod_base = OTHER; note = S-phosphorothioate
  modified_base 8: mod_base = OTHER; note = 2-fluororibose uracil
  modified_base 8..9: mod_base = OTHER; note = S-phosphorothioate
  modified_base 9: mod_base = OTHER; note = 2-fluororibose uracil
  modified_base 9..10: mod_base = OTHER; note = S-phosphorothioate
  modified_base 10: mod_base = OTHER; note = 2-fluororibose adenine
  modified_base 10..11: mod_base = OTHER; note = S-phosphorothioate
  modified_base 11: mod_base = OTHER; note = 2-fluororibose cytosine
  modified_base 11..12: mod_base = OTHER; note = S-phosphorothioate
  modified_base 12: mod_base = OTHER; note = 2-fluororibose adenine
  modified_base 12..13: mod_base = OTHER; note = S-phosphorothioate
  modified_base 13: mod_base = OTHER; note = 2-fluororibose cytosine
  modified_base 13..14: mod_base = OTHER; note = S-phosphorothioate
  modified_base 14: mod_base = OTHER; note = 2-fluororibose guanine
  modified_base 14..15: mod_base = OTHER; note R-N-(1,3-dimethylimidazolidin-2-ylidene)phosphoramidate
  modified_base 15: mod_base = OTHER; note = 2-fluororibose adenine
  modified_base 15..16: mod_base = OTHER; note = S-phosphorothioate
  modified_base 16: mod_base = OTHER; note = 2-O-methylribose adenine
  modified_base 16..17: mod_base = OTHER; note R-N-(1,3-dimethylimidazolidin-2-ylidene)phosphoramidate
  modified_base 17: mod_base = OTHER; note = 2-O-methylribose adenine
  modified_base 17..18: mod_base = OTHER; note = S-phosphorothioate
  modified_base 18: mod_base = gm
  modified_base 18..19: mod_base = OTHER; note = S-phosphorothioate
  modified_base 19: mod_base = cm
  modified_base 19..20: mod_base = OTHER; note = S-phosphorothioate
  modified_base 20: mod_base = OTHER; note = 2-O-methylribose adenine
  modified_base 20..21: mod_base = OTHER; note = S-phosphorothioate
  modified_base 21: mod_base = OTHER; note = 2-O-methylribose adenine
  modified_base 21..22: mod_base = OTHER; note = S-phosphorothioate
  modified_base 22: mod_base = um
  modified_base 22..23: mod_base = OTHER; note = S-phosphorothioate
  modified_base 23: mod_base = gm
  modified_base 23..24: mod_base = OTHER; note = S-phosphorothioate
  modified_base 24: mod_base = OTHER; note = 2-fluororibose cytosine
  modified_base 24..25: mod_base = OTHER; note = S-phosphorothioate
  modified_base 25: mod_base = OTHER; note = deoxyribose cytosine
  modified_base 25..26: mod_base = OTHER; note = S-phosphorothioate
  modified_base 26: mod_base = OTHER; note = deoxyribose adenine
  modified_base 26..27: mod_base = OTHER; note [(1,3-dimethylimidazolidin-2-ylidene)amino]disubstituted-la mbda5-phosphanethione
  modified_base 27: mod_base = um
  modified_base 27..28: mod_base = OTHER; note = S-phosphorothioate
  modified_base 28: mod_base = cm
  modified_base 28..29: mod_base = OTHER; note = S-phosphorothioate
  modified_base 29: mod_base = OTHER; note = 2-O-methylribose adenine
  modified_base 29..30: mod_base = OTHER; note R-N-(1,3-dimethylimidazolidin-2-ylidene)phosphoramidate
  modified_base 30: mod_base = cm
  source 1..30: mol_type = other RNA

SEQ ID NO: 24 - RNA, 30 nt, synthetic construct
  misc_feature 1..30: note = Synthetic: WV-42331
  misc_feature 1..30: note = Synthetic: ADR-0102134
  modified_base 1: mod_base = OTHER; note = 2-fluororibose adenine
  modified_base 1..2: mod_base = OTHER; note R-N-(1,3-dimethylimidazolidin-2-ylidene)phosphoramidate
  modified_base 2: mod_base = OTHER; note = 2-fluororibose cytosine
  modified_base 2..3: mod_base = OTHER; note = S-phosphorothioate
  modified_base 3: mod_base = OTHER; note = 2-fluororibose adenine
  modified_base 3..4: mod_base = OTHER; note = S-phosphorothioate
  modified_base 4: mod_base = OTHER; note = 2-fluororibose uracil
  modified_base 4..5: mod_base = OTHER; note = S-phosphorothioate
  modified_base 5: mod_base = OTHER; note = 2-fluororibose adenine
  modified_base 5..6: mod_base = OTHER; note = S-phosphorothioate
  modified_base 6: mod_base = OTHER; note = 2-fluororibose adenine
  modified_base 6..7: mod_base = OTHER; note = S-phosphorothioate
  modified_base 7: mod_base = OTHER; note = 2-fluororibose uracil
  modified_base 7..8: mod_base = OTHER; note = S-phosphorothioate
  modified_base 8: mod_base = OTHER; note = 2-fluororibose uracil
  modified_base 8..9: mod_base = OTHER; note = S-phosphorothioate
  modified_base 9: mod_base = OTHER; note = 2-fluororibose uracil
  modified_base 9..10: mod_base = OTHER; note = S-phosphorothioate
  modified_base 10: mod_base = OTHER; note = 2-fluororibose adenine
  modified_base 10..11: mod_base = OTHER; note = S-phosphorothioate
  modified_base 11: mod_base = OTHER; note = 2-fluororibose cytosine
  modified_base 11..12: mod_base = OTHER; note = S-phosphorothioate
  modified_base 12: mod_base = OTHER; note = 2-fluororibose adenine
  modified_base 12..13: mod_base = OTHER; note = S-phosphorothioate
  modified_base 13: mod_base = OTHER; note = 2-fluororibose cytosine
  modified_base 13..14: mod_base = OTHER; note = S-phosphorothioate
  modified_base 14: mod_base = OTHER; note = 2-fluororibose guanine
  modified_base 14..15: mod_base = OTHER; note R-N-(1,3-dimethylimidazolidin-2-ylidene)phosphoramidate
  modified_base 15: mod_base = OTHER; note = 2-fluororibose adenine
  modified_base 15..16: mod_base = OTHER; note = S-phosphorothioate
  modified_base 16: mod_base = OTHER; note = 2-O-methylribose adenine
  modified_base 16..17: mod_base = OTHER; note R-N-(1,3-dimethylimidazolidin-2-ylidene)phosphoramidate
  modified_base 17: mod_base = OTHER; note = 2-O-methylribose adenine
  modified_base 17..18: mod_base = OTHER; note = S-phosphorothioate
  modified_base 18: mod_base = gm
  modified_base 18..19: mod_base = OTHER; note = S-phosphorothioate
  modified_base 19: mod_base = cm
  modified_base 19..20: mod_base = OTHER; note = S-phosphorothioate
  modified_base 20: mod_base = OTHER; note = 2-O-methylribose adenine
  modified_base 20..21: mod_base = OTHER; note = S-phosphorothioate
  modified_base 21: mod_base = OTHER; note = 2-O-methylribose adenine
  modified_base 21..22: mod_base = OTHER; note = S-phosphorothioate
  modified_base 22: mod_base = um
  modified_base 22..23: mod_base = OTHER; note = S-phosphorothioate
  modified_base 23: mod_base = gm
  modified_base 23..24: mod_base = OTHER; note = S-phosphorothioate
  modified_base 24: mod_base = OTHER; note = 2-fluororibose uracil
  modified_base 24..25: mod_base = OTHER; note = S-phosphorothioate
  modified_base 25: mod_base = OTHER; note = deoxyribose cytosine
  modified_base 25..26: mod_base = OTHER; note = S-phosphorothioate
  modified_base 26: mod_base = OTHER; note = deoxyribose thymine
  modified_base 26..27: mod_base = OTHER; note R-N-(1,3-dimethylimidazolidin-2-ylidene)phosphoramidate
  modified_base 27: mod_base = um
  modified_base 27..28: mod_base = OTHER; note = S-phosphorothioate
  modified_base 28: mod_base = cm
  modified_base 28..29: mod_base = OTHER; note = S-phosphorothioate
  modified_base 29: mod_base = OTHER; note = 2-O-methylribose adenine
  modified_base 29..30: mod_base = OTHER; note R-N-(1,3-dimethylimidazolidin-2-ylidene)phosphoramidate
  modified_base 30: mod_base = cm
  source 1..30: mol_type = other RNA
acataatttacacgaaagcaatgtcttcac

SEQ ID NO: 25 - RNA, 30 nt, synthetic construct
  misc_feature 1..30: note = Synthetic: WV-42332
  misc_feature 1..30: note = Synthetic: ADR-0102120
  modified_base 1: mod_base = OTHER; note = 2-fluororibose adenine
  modified_base 1..2: mod_base = OTHER; note R-N-(1,3-dimethylimidazolidin-2-ylidene)phosphoramidate
  modified_base 2: mod_base = OTHER; note = 2-fluororibose cytosine
  modified_base 2..3: mod_base = OTHER; note = S-phosphorothioate
  modified_base 3: mod_base = OTHER; note = 2-fluororibose adenine
  modified_base 3..4: mod_base = OTHER; note = S-phosphorothioate
  modified_base 4: mod_base = OTHER; note = 2-fluororibose uracil
  modified_base 4..5: mod_base = OTHER; note = S-phosphorothioate
  modified_base 5: mod_base = OTHER; note = 2-fluororibose adenine
  modified_base 5..6: mod_base = OTHER; note = S-phosphorothioate
  modified_base 6: mod_base = OTHER; note = 2-fluororibose adenine
  modified_base 6..7: mod_base = OTHER; note = S-phosphorothioate
  modified_base 7: mod_base = OTHER; note = 2-fluororibose uracil
  modified_base 7..8: mod_base = OTHER; note = S-phosphorothioate
  modified_base 8: mod_base = OTHER; note = 2-fluororibose uracil
  modified_base 8..9: mod_base = OTHER; note = S-phosphorothioate
  modified_base 9: mod_base = OTHER; note = 2-fluororibose uracil
  modified_base 9..10: mod_base = OTHER; note = S-phosphorothioate
  modified_base 10: mod_base = OTHER; note = 2-fluororibose adenine
  modified_base 10..11: mod_base = OTHER; note = S-phosphorothioate
  modified_base 11: mod_base = OTHER; note = 2-fluororibose cytosine
  modified_base 11..12: mod_base = OTHER; note = S-phosphorothioate
  modified_base 12: mod_base = OTHER; note = 2-fluororibose adenine
  modified_base 12..13: mod_base = OTHER; note = S-phosphorothioate
  modified_base 13: mod_base = OTHER; note = 2-fluororibose cytosine
  modified_base 13..14: mod_base = OTHER; note = S-phosphorothioate
  modified_base 14: mod_base = OTHER; note = 2-fluororibose guanine
  modified_base 14..15: mod_base = OTHER; note R-N-(1,3-dimethylimidazolidin-2-ylidene)phosphoramidate
  modified_base 15: mod_base = OTHER; note = 2-fluororibose adenine
  modified_base 15..16: mod_base = OTHER; note = S-phosphorothioate
  modified_base 16: mod_base = OTHER; note = 2-O-methylribose adenine
  modified_base 16..17: mod_base = OTHER; note R-N-(1,3-dimethylimidazolidin-2-ylidene)phosphoramidate
  modified_base 17: mod_base = OTHER; note = 2-O-methylribose adenine
  modified_base 17..18: mod_base = OTHER; note = S-phosphorothioate
  modified_base 18: mod_base = gm
  modified_base 18..19: mod_base = OTHER; note = S-phosphorothioate
  modified_base 19: mod_base = cm
  modified_base 19..20: mod_base = OTHER; note = S-phosphorothioate
  modified_base 20: mod_base = OTHER; note = 2-O-methylribose adenine
  modified_base 20..21: mod_base = OTHER; note = S-phosphorothioate
  modified_base 21: mod_base = OTHER; note = 2-O-methylribose adenine
  modified_base 21..22: mod_base = OTHER; note = S-phosphorothioate
  modified_base 22: mod_base = um
  modified_base 22..23: mod_base = OTHER; note = S-phosphorothioate
  modified_base 23: mod_base = gm
  modified_base 23..24: mod_base = OTHER; note = S-phosphorothioate
  modified_base 24: mod_base = OTHER; note = 2-fluororibose adenine
  modified_base 24..25: mod_base = OTHER; note = S-phosphorothioate
  modified_base 25: mod_base = OTHER; note = deoxyribose cytosine
  modified_base 25..26: mod_base = OTHER; note = S-phosphorothioate
  modified_base 26: mod_base = OTHER; note = deoxyribose thymine
  modified_base 26..27: mod_base = OTHER; note R-N-(1,3-dimethylimidazolidin-2-ylidene)phosphoramidate
  modified_base 27: mod_base = um
  modified_base 27..28: mod_base = OTHER; note = S-phosphorothioate
  modified_base 28: mod_base = cm
  modified_base 28..29: mod_base = OTHER; note = S-phosphorothioate
  modified_base 29: mod_base = OTHER; note = 2-O-methylribose adenine
  modified_base 29..30: mod_base = OTHER; note R-N-(1,3-dimethylimidazolidin-2-ylidene)phosphoramidate
  modified_base 30: mod_base = cm
  source 1..30: mol_type = other RNA
acataatttacacgaaagcaatgacttcac

SEQ ID NO: 26 - RNA, 30 nt, synthetic construct
  misc_feature 1..30: note = Synthetic: WV-42333
  misc_feature 1..30: note = Synthetic: ADR-0102124
  modified_base 1: mod_base = OTHER; note = 2-fluororibose adenine
  modified_base 1..2: mod_base = OTHER; note R-N-(1,3-dimethylimidazolidin-2-ylidene)phosphoramidate
  modified_base 2: mod_base = OTHER; note = 2-fluororibose cytosine
  modified_base 2..3: mod_base = OTHER; note = S-phosphorothioate
  modified_base 3: mod_base = OTHER; note = 2-fluororibose adenine
  modified_base 3..4: mod_base = OTHER; note = S-phosphorothioate
  modified_base 4: mod_base = OTHER; note = 2-fluororibose uracil
  modified_base 4..5: mod_base = OTHER; note = S-phosphorothioate
  modified_base 5: mod_base = OTHER; note = 2-fluororibose adenine
  modified_base 5..6: mod_base = OTHER; note = S-phosphorothioate
  modified_base 6: mod_base = OTHER; note = 2-fluororibose adenine
  modified_base 6..7: mod_base = OTHER; note = S-phosphorothioate
  modified_base 7: mod_base = OTHER; note = 2-fluororibose uracil
  modified_base 7..8: mod_base = OTHER; note = S-phosphorothioate
  modified_base 8: mod_base = OTHER; note = 2-fluororibose uracil
  modified_base 8..9: mod_base = OTHER; note = S-phosphorothioate
  modified_base 9: mod_base = OTHER; note = 2-fluororibose uracil
  modified_base 9..10: mod_base = OTHER; note = S-phosphorothioate
  modified_base 10: mod_base = OTHER; note = 2-fluororibose adenine
  modified_base 10..11: mod_base = OTHER; note = S-phosphorothioate
  modified_base 11: mod_base = OTHER; note = 2-fluororibose cytosine
  modified_base 11..12: mod_base = OTHER; note = S-phosphorothioate
  modified_base 12: mod_base = OTHER; note = 2-fluororibose adenine
  modified_base 12..13: mod_base = OTHER; note = S-phosphorothioate
  modified_base 13: mod_base = OTHER; note = 2-fluororibose cytosine
  modified_base 13..14: mod_base = OTHER; note = S-phosphorothioate
  modified_base 14: mod_base = OTHER; note = 2-fluororibose guanine
  modified_base 14..15: mod_base = OTHER; note R-N-(1,3-dimethylimidazolidin-2-ylidene)phosphoramidate
  modified_base 15: mod_base = OTHER; note = 2-fluororibose adenine
  modified_base 15..16: mod_base = OTHER; note = S-phosphorothioate
  modified_base 16: mod_base = OTHER; note = 2-O-methylribose adenine
  modified_base 16..17: mod_base = OTHER; note R-N-(1,3-dimethylimidazolidin-2-ylidene)phosphoramidate
  modified_base 17: mod_base = OTHER; note = 2-O-methylribose adenine
  modified_base 17..18: mod_base = OTHER; note = S-phosphorothioate
  modified_base 18: mod_base = gm
  modified_base 18..19: mod_base = OTHER; note = S-phosphorothioate
  modified_base 19: mod_base = cm
  modified_base 19..20: mod_base = OTHER; note = S-phosphorothioate
  modified_base 20: mod_base = OTHER; note = 2-O-methylribose adenine
  modified_base 20..21: mod_base = OTHER; note = S-phosphorothioate
  modified_base 21: mod_base = OTHER; note = 2-O-methylribose adenine
  modified_base 21..22: mod_base = OTHER; note = S-phosphorothioate
  modified_base 22: mod_base = um
  modified_base 22..23: mod_base = OTHER; note = S-phosphorothioate
  modified_base 23: mod_base = gm
  modified_base 23..24: mod_base = OTHER; note = S-phosphorothioate
  modified_base 24: mod_base = OTHER; note = 2-fluororibose cytosine
  modified_base 24..25: mod_base = OTHER; note = S-phosphorothioate
  modified_base 25: mod_base = OTHER; note = deoxyribose cytosine
  modified_base 25..26: mod_base = OTHER; note = S-phosphorothioate
  modified_base 26: mod_base = OTHER; note = deoxyribose thymine
  modified_base 26..27: mod_base = OTHER; note R-N-(1,3-dimethylimidazolidin-2-ylidene)phosphoramidate
  modified_base 27: mod_base = um
  modified_base 27..28: mod_base = OTHER; note = S-phosphorothioate
  modified_base 28: mod_base = cm
  modified_base 28..29: mod_base = OTHER; note = S-phosphorothioate
  modified_base 29: mod_base = OTHER; note = 2-O-methylribose adenine
  modified_base 29..30: mod_base = OTHER; note R-N-(1,3-dimethylimidazolidin-2-ylidene)phosphoramidate
  modified_base 30: mod_base = cm
  source 1..30: mol_type = other RNA
acataatttacacgaaagcaatgccttcac

SEQ ID NO: 27 - RNA, 30 nt, synthetic construct
  misc_feature 1..30: note = Synthetic: WV-42334
  misc_feature 1..30: note = Synthetic: ADR-0102129
  modified_base 1: mod_base = OTHER; note = 2-fluororibose adenine
  modified_base 1..2: mod_base = OTHER; note R-N-(1,3-dimethylimidazolidin-2-ylidene)phosphoramidate
  modified_base 2: mod_base = OTHER; note = 2-fluororibose cytosine
  modified_base 2..3: mod_base = OTHER; note = S-phosphorothioate
  modified_base 3: mod_base = OTHER; note = 2-fluororibose adenine
  modified_base 3..4: mod_base = OTHER; note = S-phosphorothioate
  modified_base 4: mod_base = OTHER; note = 2-fluororibose uracil
  modified_base 4..5: mod_base = OTHER; note = S-phosphorothioate
  modified_base 5: mod_base = OTHER; note = 2-fluororibose adenine
  modified_base 5..6: mod_base = OTHER; note = S-phosphorothioate
  modified_base 6: mod_base = OTHER; note = 2-fluororibose adenine
  modified_base 6..7: mod_base = OTHER; note = S-phosphorothioate
  modified_base 7: mod_base = OTHER; note = 2-fluororibose uracil
  modified_base 7..8: mod_base = OTHER; note = S-phosphorothioate
  modified_base 8: mod_base = OTHER; note = 2-fluororibose uracil
  modified_base 8..9: mod_base = OTHER; note = S-phosphorothioate
  modified_base 9: mod_base = OTHER; note = 2-fluororibose uracil
  modified_base 9..10: mod_base = OTHER; note = S-phosphorothioate
  modified_base 10: mod_base = OTHER; note = 2-fluororibose adenine
  modified_base 10..11: mod_base = OTHER; note = S-phosphorothioate
  modified_base 11: mod_base = OTHER; note = 2-fluororibose cytosine
  modified_base 11..12: mod_base = OTHER; note = S-phosphorothioate
  modified_base 12: mod_base = OTHER; note = 2-fluororibose adenine
  modified_base 12..13: mod_base = OTHER; note = S-phosphorothioate
  modified_base 13: mod_base = OTHER; note = 2-fluororibose cytosine
  modified_base 13..14: mod_base = OTHER; note = S-phosphorothioate
  modified_base 14: mod_base = OTHER; note = 2-fluororibose guanine
  modified_base 14..15: mod_base = OTHER; note R-N-(1,3-dimethylimidazolidin-2-ylidene)phosphoramidate
  modified_base 15: mod_base = OTHER; note = 2-fluororibose adenine
  modified_base 15..16: mod_base = OTHER; note = S-phosphorothioate
  modified_base 16: mod_base = OTHER; note = 2-O-methylribose adenine
  modified_base 16..17: mod_base = OTHER; note R-N-(1,3-dimethylimidazolidin-2-ylidene)phosphoramidate
  modified_base 17: mod_base = OTHER; note = 2-O-methylribose adenine
  modified_base 17..18: mod_base = OTHER; note = S-phosphorothioate
  modified_base 18: mod_base = gm
  modified_base 18..19: mod_base = OTHER; note = S-phosphorothioate
  modified_base 19: mod_base = cm
  modified_base 19..20: mod_base = OTHER; note = S-phosphorothioate
  modified_base 20: mod_base = OTHER; note = 2-O-methylribose adenine
  modified_base 20..21: mod_base = OTHER; note = S-phosphorothioate
  modified_base 21: mod_base = OTHER; note = 2-O-methylribose adenine
  modified_base 21..22: mod_base = OTHER; note = S-phosphorothioate
  modified_base 22: mod_base = um
  modified_base 22..23: mod_base = OTHER; note = S-phosphorothioate
  modified_base 23: mod_base = gm
  modified_base 23..24: mod_base = OTHER; note = S-phosphorothioate
  modified_base 24: mod_base = OTHER; note = 2-fluororibose guanine
  modified_base 24..25: mod_base = OTHER; note = S-phosphorothioate
  modified_base 25: mod_base = OTHER; note = deoxyribose cytosine
  modified_base 25..26: mod_base = OTHER; note = S-phosphorothioate
  modified_base 26: mod_base = OTHER; note = deoxyribose thymine
  modified_base 26..27: mod_base = OTHER; note R-N-(1,3-dimethylimidazolidin-2-ylidene)phosphoramidate
  modified_base 27: mod_base = um
  modified_base 27..28: mod_base = OTHER; note = S-phosphorothioate
  modified_base 28: mod_base = cm
  modified_base 28..29: mod_base = OTHER; note = S-phosphorothioate
  modified_base 29: mod_base = OTHER; note = 2-O-methylribose adenine
  modified_base 29..30: mod_base = OTHER; note R-N-(1,3-dimethylimidazolidin-2-ylidene)phosphoramidate
  modified_base 30: mod_base = cm
  source 1..30: mol_type = other RNA
acataatttacacgaaagcaatggcttcac

SEQ ID NO: 28 - RNA, 30 nt, synthetic construct
  misc_feature 1..30: note = Synthetic: WV-42335
  misc_feature 1..30: note = Synthetic: ADR-0102131
  modified_base 1: mod_base = OTHER; note = 2-fluororibose adenine
  modified_base 1..2: mod_base = OTHER; note R-N-(1,3-dimethylimidazolidin-2-ylidene)phosphoramidate
  modified_base 2: mod_base = OTHER; note = 2-fluororibose cytosine
  modified_base 2..3: mod_base = OTHER; note = S-phosphorothioate
  modified_base 3: mod_base = OTHER; note = 2-fluororibose adenine
  modified_base 3..4: mod_base = OTHER; note = S-phosphorothioate
  modified_base 4: mod_base = OTHER; note = 2-fluororibose uracil
  modified_base 4..5: mod_base = OTHER; note = S-phosphorothioate
  modified_base 5: mod_base = OTHER; note = 2-fluororibose adenine
  modified_base 5..6: mod_base = OTHER; note = S-phosphorothioate
  modified_base 6: mod_base = OTHER; note = 2-fluororibose adenine
  modified_base 6..7: mod_base = OTHER; note = S-phosphorothioate
  modified_base 7: mod_base = OTHER; note = 2-fluororibose uracil
  modified_base 7..8: mod_base = OTHER; note = S-phosphorothioate
  modified_base 8: mod_base = OTHER; note = 2-fluororibose uracil
  modified_base 8..9: mod_base = OTHER; note = S-phosphorothioate
  modified_base 9: mod_base = OTHER; note = 2-fluororibose uracil
  modified_base 9..10: mod_base = OTHER; note = S-phosphorothioate
  modified_base 10: mod_base = OTHER; note = 2-fluororibose adenine
  modified_base 10..11: mod_base = OTHER; note = S-phosphorothioate
  modified_base 11: mod_base = OTHER; note = 2-fluororibose cytosine
  modified_base 11..12: mod_base = OTHER; note = S-phosphorothioate
  modified_base 12: mod_base = OTHER; note = 2-fluororibose adenine
  modified_base 12..13: mod_base = OTHER; note = S-phosphorothioate
  modified_base 13: mod_base = OTHER; note = 2-fluororibose cytosine
  modified_base 13..14: mod_base = OTHER; note = S-phosphorothioate
  modified_base 14: mod_base = OTHER; note = 2-fluororibose guanine
  modified_base 14..15: mod_base = OTHER; note R-N-(1,3-dimethylimidazolidin-2-ylidene)phosphoramidate
  modified_base 15: mod_base = OTHER; note = 2-fluororibose adenine
  modified_base 15..16: mod_base = OTHER; note = S-phosphorothioate
  modified_base 16: mod_base = OTHER; note = 2-O-methylribose adenine
  modified_base 16..17: mod_base = OTHER; note R-N-(1,3-dimethylimidazolidin-2-ylidene)phosphoramidate
  modified_base 17: mod_base = OTHER; note = 2-O-methylribose adenine
  modified_base 17..18: mod_base = OTHER; note = S-phosphorothioate
  modified_base 18: mod_base = gm
  modified_base 18..19: mod_base = OTHER; note = S-phosphorothioate
  modified_base 19: mod_base = cm
  modified_base 19..20: mod_base = OTHER; note = S-phosphorothioate
  modified_base 20: mod_base = OTHER; note = 2-O-methylribose adenine
  modified_base 20..21: mod_base = OTHER; note = S-phosphorothioate
  modified_base 21: mod_base = OTHER; note = 2-O-methylribose adenine
  modified_base 21..22: mod_base = OTHER; note = S-phosphorothioate
  modified_base 22: mod_base = um
  modified_base 22..23: mod_base = OTHER; note = S-phosphorothioate
  modified_base 23: mod_base = gm
  modified_base 23..24: mod_base = OTHER; note = S-phosphorothioate
  modified_base 24: mod_base = OTHER; note = 2-fluororibose uracil
  modified_base 24..25: mod_base = OTHER; note = S-phosphorothioate
  modified_base 25: mod_base = OTHER; note = deoxyribose cytosine
  modified_base 25..26: mod_base = OTHER; note = S-phosphorothioate
  modified_base 26: mod_base = OTHER; note = deoxyribose adenine
  modified_base 26..27: mod_base = OTHER; note R-N-(1,3-dimethylimidazolidin-2-ylidene)phosphoramidate
  modified_base 27: mod_base = um
  modified_base 27..28: mod_base = OTHER; note = S-phosphorothioate
  modified_base 28: mod_base = cm
  modified_base 28..29: mod_base = OTHER; note = S-phosphorothioate
  modified_base 29: mod_base = OTHER; note = 2-O-methylribose adenine
  modified_base 29..30: mod_base = OTHER; note R-N-(1,3-dimethylimidazolidin-2-ylidene)phosphoramidate
  modified_base 30: mod_base = cm
  source 1..30: mol_type = other RNA
acataatttacacgaaagcaatgtcatcac

SEQ ID NO: 29 - RNA, 30 nt, synthetic construct
  misc_feature 1..30: note = Synthetic: WV-42336
  misc_feature 1..30: note = Synthetic: ADR-0102117
  modified_base 1: mod_base = OTHER; note = 2-fluororibose adenine
  modified_base 1..2: mod_base = OTHER; note R-N-(1,3-dimethylimidazolidin-2-ylidene)phosphoramidate
  modified_base 2: mod_base = OTHER; note = 2-fluororibose cytosine
  modified_base 2..3: mod_base = OTHER; note = S-phosphorothioate
  modified_base 3: mod_base = OTHER; note = 2-fluororibose adenine
  modified_base 3..4: mod_base = OTHER; note = S-phosphorothioate
  modified_base 4: mod_base = OTHER; note = 2-fluororibose uracil
  modified_base 4..5: mod_base = OTHER; note = S-phosphorothioate
  modified_base 5: mod_base = OTHER; note = 2-fluororibose adenine
  modified_base 5..6: mod_base = OTHER; note = S-phosphorothioate
  modified_base 6: mod_base = OTHER; note = 2-fluororibose adenine
  modified_base 6..7: mod_base = OTHER; note = S-phosphorothioate
  modified_base 7: mod_base = OTHER; note = 2-fluororibose uracil
  modified_base 7..8: mod_base = OTHER; note = S-phosphorothioate
  modified_base 8: mod_base = OTHER; note = 2-fluororibose uracil
  modified_base 8..9: mod_base = OTHER; note = S-phosphorothioate
  modified_base 9: mod_base = OTHER; note = 2-fluororibose uracil
  modified_base 9..10: mod_base = OTHER; note = S-phosphorothioate
  modified_base 10: mod_base = OTHER; note = 2-fluororibose adenine
  modified_base 10..11: mod_base = OTHER; note = S-phosphorothioate
  modified_base 11: mod_base = OTHER; note = 2-fluororibose cytosine
  modified_base 11..12: mod_base = OTHER; note = S-phosphorothioate
  modified_base 12: mod_base = OTHER; note = 2-fluororibose adenine
  modified_base 12..13: mod_base = OTHER; note = S-phosphorothioate
  modified_base 13: mod_base = OTHER; note = 2-fluororibose cytosine
  modified_base 13..14: mod_base = OTHER; note = S-phosphorothioate
  modified_base 14: mod_base = OTHER; note = 2-fluororibose guanine
  modified_base 14..15: mod_base = OTHER; note R-N-(1,3-dimethylimidazolidin-2-ylidene)phosphoramidate
  modified_base 15: mod_base = OTHER; note = 2-fluororibose adenine
  modified_base 15..16: mod_base = OTHER; note = S-phosphorothioate
  modified_base 16: mod_base = OTHER; note = 2-O-methylribose adenine
  modified_base 16..17: mod_base = OTHER; note R-N-(1,3-dimethylimidazolidin-2-ylidene)phosphoramidate
  modified_base 17: mod_base = OTHER; note = 2-O-methylribose adenine
  modified_base 17..18: mod_base = OTHER; note = S-phosphorothioate
  modified_base 18: mod_base = gm
  modified_base 18..19: mod_base = OTHER; note = S-phosphorothioate
  modified_base 19: mod_base = cm
  modified_base 19..20: mod_base = OTHER; note = S-phosphorothioate
  modified_base 20: mod_base = OTHER; note = 2-O-methylribose adenine
  modified_base 20..21: mod_base = OTHER; note = S-phosphorothioate
  modified_base 21: mod_base = OTHER; note = 2-O-methylribose adenine
  modified_base 21..22: mod_base = OTHER; note = S-phosphorothioate
  modified_base 22: mod_base = um
  modified_base 22..23: mod_base = OTHER; note = S-phosphorothioate
  modified_base 23: mod_base = gm
  modified_base 23..24: mod_base = OTHER; note = S-phosphorothioate
  modified_base 24: mod_base = OTHER; note = 2-fluororibose adenine
  modified_base 24..25: mod_base = OTHER; note = S-phosphorothioate
  modified_base 25: mod_base = OTHER; note = deoxyribose cytosine
  modified_base 25..26: mod_base = OTHER; note = S-phosphorothioate
  modified_base 26: mod_base = OTHER; note = deoxyribose adenine
  modified_base 26..27: mod_base = OTHER; note R-N-(1,3-dimethylimidazolidin-2-ylidene)phosphoramidate
  modified_base 27: mod_base = um
  modified_base 27..28: mod_base = OTHER; note = S-phosphorothioate
  modified_base 28: mod_base = cm
  modified_base 28..29: mod_base = OTHER; note = S-phosphorothioate
  modified_base 29: mod_base = OTHER; note = 2-O-methylribose adenine
  modified_base 29..30: mod_base = OTHER; note R-N-(1,3-dimethylimidazolidin-2-ylidene)phosphoramidate
  modified_base 30: mod_base = cm
  source 1..30: mol_type = other RNA
acataatttacacgaaagcaatgacatcac

SEQ ID NO: 30 - RNA, 30 nt, synthetic construct
  misc_feature 1..30: note = Synthetic: WV-42337
  misc_feature 1..30: note = Synthetic: ADR-0102126
  modified_base 1: mod_base = OTHER; note = 2-fluororibose adenine
  modified_base 1..2: mod_base = OTHER; note R-N-(1,3-dimethylimidazolidin-2-ylidene)phosphoramidate
  modified_base 2: mod_base = OTHER; note = 2-fluororibose cytosine
  modified_base 2..3: mod_base = OTHER; note = S-phosphorothioate
  modified_base 3: mod_base = OTHER; note = 2-fluororibose adenine
  modified_base 3..4: mod_base = OTHER; note = S-phosphorothioate
  modified_base 4: mod_base = OTHER; note = 2-fluororibose uracil
  modified_base 4..5: mod_base = OTHER; note = S-phosphorothioate
  modified_base 5: mod_base = OTHER; note = 2-fluororibose adenine
  modified_base 5..6: mod_base = OTHER; note = S-phosphorothioate
  modified_base 6: mod_base = OTHER; note = 2-fluororibose adenine
  modified_base 6..7: mod_base = OTHER; note = S-phosphorothioate
  modified_base 7: mod_base = OTHER; note = 2-fluororibose uracil
  modified_base 7..8: mod_base = OTHER; note = S-phosphorothioate
  modified_base 8: mod_base = OTHER; note = 2-fluororibose uracil
  modified_base 8..9: mod_base = OTHER; note = S-phosphorothioate
  modified_base 9: mod_base = OTHER; note = 2-fluororibose uracil
  modified_base 9..10: mod_base = OTHER; note = S-phosphorothioate
  modified_base 10: mod_base = OTHER; note = 2-fluororibose adenine
  modified_base 10..11: mod_base = OTHER; note = S-phosphorothioate
  modified_base 11: mod_base = OTHER; note = 2-fluororibose cytosine
  modified_base 11..12: mod_base = OTHER; note = S-phosphorothioate
  modified_base 12: mod_base = OTHER; note = 2-fluororibose adenine
  modified_base 12..13: mod_base = OTHER; note = S-phosphorothioate
  modified_base 13: mod_base = OTHER; note = 2-fluororibose cytosine
  modified_base 13..14: mod_base = OTHER; note = S-phosphorothioate
  modified_base 14: mod_base = OTHER; note = 2-fluororibose guanine
  modified_base 14..15: mod_base = OTHER; note R-N-(1,3-dimethylimidazolidin-2-ylidene)phosphoramidate
  modified_base 15: mod_base = OTHER; note = 2-fluororibose adenine
  modified_base 15..16: mod_base = OTHER; note = S-phosphorothioate
  modified_base 16: mod_base = OTHER; note = 2-O-methylribose adenine
  modified_base 16..17: mod_base = OTHER; note R-N-(1,3-dimethylimidazolidin-2-ylidene)phosphoramidate
  modified_base 17: mod_base = OTHER; note = 2-O-methylribose adenine
  modified_base 17..18: mod_base = OTHER; note = S-phosphorothioate
  modified_base 18: mod_base = gm
  modified_base 18..19: mod_base = OTHER; note = S-phosphorothioate
  modified_base 19: mod_base = cm
  modified_base 19..20: mod_base = OTHER; note = S-phosphorothioate
  modified_base 20: mod_base = OTHER; note = 2-O-methylribose adenine
  modified_base 20..21: mod_base = OTHER; note = S-phosphorothioate
  modified_base 21: mod_base = OTHER; note = 2-O-methylribose adenine
  modified_base 21..22: mod_base = OTHER; note = S-phosphorothioate
  modified_base 22: mod_base = um
  modified_base 22..23: mod_base = OTHER; note = S-phosphorothioate
  modified_base 23: mod_base = gm
  modified_base 23..24: mod_base = OTHER; note = S-phosphorothioate
  modified_base 24: mod_base = OTHER; note = 2-fluororibose guanine
  modified_base 24..25: mod_base = OTHER; note = S-phosphorothioate
  modified_base 25: mod_base = OTHER; note = deoxyribose cytosine
  modified_base 25..26: mod_base = OTHER; note = S-phosphorothioate
  modified_base 26: mod_base = OTHER; note = deoxyribose adenine
  modified_base 26..27: mod_base = OTHER; note R-N-(1,3-dimethylimidazolidin-2-ylidene)phosphoramidate
  modified_base 27: mod_base = um
  modified_base 27..28: mod_base = OTHER; note = S-phosphorothioate
  modified_base 28: mod_base = cm
  modified_base 28..29: mod_base = OTHER; note = S-phosphorothioate
  modified_base 29: mod_base = OTHER; note = 2-O-methylribose adenine
  modified_base 29..30: mod_base = OTHER; note R-N-(1,3-dimethylimidazolidin-2-ylidene)phosphoramidate
  modified_base 30: mod_base = cm
  source 1..30: mol_type = other RNA
acataatttacacgaaagcaatggcatcac

SEQ ID NO: 31 - RNA, 30 nt, synthetic construct
  misc_feature 1..30: note = Synthetic: WV-42338
  misc_feature 1..30: note = Synthetic: ADR-0102132
  modified_base 1: mod_base = OTHER; note = 2-fluororibose adenine
  modified_base 1..2: mod_base = OTHER; note R-N-(1,3-dimethylimidazolidin-2-ylidene)phosphoramidate
  modified_base 2: mod_base = OTHER; note = 2-fluororibose cytosine
  modified_base 2..3: mod_base = OTHER; note = S-phosphorothioate
  modified_base 3: mod_base = OTHER; note = 2-fluororibose adenine
  modified_base 3..4: mod_base = OTHER; note = S-phosphorothioate
  modified_base 4: mod_base = OTHER; note = 2-fluororibose uracil
  modified_base 4..5: mod_base = OTHER; note = S-phosphorothioate
  modified_base 5: mod_base = OTHER; note = 2-fluororibose adenine
  modified_base 5..6: mod_base = OTHER; note = S-phosphorothioate
  modified_base 6: mod_base = OTHER; note = 2-fluororibose adenine
  modified_base 6..7: mod_base = OTHER; note = S-phosphorothioate
  modified_base 7: mod_base = OTHER; note = 2-fluororibose uracil
  modified_base 7..8: mod_base = OTHER; note = S-phosphorothioate
  modified_base 8: mod_base = OTHER; note = 2-fluororibose uracil
  modified_base 8..9: mod_base = OTHER; note = S-phosphorothioate
  modified_base 9: mod_base = OTHER; note = 2-fluororibose uracil
  modified_base 9..10: mod_base = OTHER; note = S-phosphorothioate
  modified_base 10: mod_base = OTHER; note = 2-fluororibose adenine
  modified_base 10..11: mod_base = OTHER; note = S-phosphorothioate
  modified_base 11: mod_base = OTHER; note = 2-fluororibose cytosine
  modified_base 11..12: mod_base = OTHER; note = S-phosphorothioate
  modified_base 12: mod_base = OTHER; note = 2-fluororibose adenine
  modified_base 12..13: mod_base = OTHER; note = S-phosphorothioate
  modified_base 13: mod_base = OTHER; note = 2-fluororibose cytosine
  modified_base 13..14: mod_base = OTHER; note = S-phosphorothioate
  modified_base 14: mod_base = OTHER; note = 2-fluororibose guanine
  modified_base 14..15: mod_base = OTHER; note R-N-(1,3-dimethylimidazolidin-2-ylidene)phosphoramidate
  modified_base 15: mod_base = OTHER; note = 2-fluororibose adenine
  modified_base 15..16: mod_base = OTHER; note = S-phosphorothioate
  modified_base 16: mod_base = OTHER; note = 2-O-methylribose adenine
  modified_base 16..17: mod_base = OTHER; note R-N-(1,3-dimethylimidazolidin-2-ylidene)phosphoramidate
  modified_base 17: mod_base = OTHER; note = 2-O-methylribose adenine
  modified_base 17..18: mod_base = OTHER; note = S-phosphorothioate
  modified_base 18: mod_base = gm
  modified_base 18..19: mod_base = OTHER; note = S-phosphorothioate
  modified_base 19: mod_base = cm
  modified_base 19..20: mod_base = OTHER; note = S-phosphorothioate
  modified_base 20: mod_base = OTHER; note = 2-O-methylribose adenine
  modified_base 20..21: mod_base = OTHER; note = S-phosphorothioate
  modified_base 21: mod_base = OTHER; note = 2-O-methylribose adenine
  modified_base 21..22: mod_base = OTHER; note = S-phosphorothioate
  modified_base 22: mod_base = um
  modified_base 22..23: mod_base = OTHER; note = S-phosphorothioate
  modified_base 23: mod_base = gm
  modified_base 23..24: mod_base = OTHER; note = S-phosphorothioate
  modified_base 24: mod_base = OTHER; note = 2-fluororibose uracil
  modified_base 24..25: mod_base = OTHER; note = S-phosphorothioate
  modified_base 25: mod_base = OTHER; note = deoxyribose cytosine
  modified_base 25..26: mod_base = OTHER; note = S-phosphorothioate
  modified_base 26: mod_base = OTHER; note = deoxyribose cytosine
  modified_base 26..27: mod_base = OTHER; note R-N-(1,3-dimethylimidazolidin-2-ylidene)phosphoramidate
  modified_base 27: mod_base = um
  modified_base 27..28: mod_base = OTHER; note = S-phosphorothioate
  modified_base 28: mod_base = cm
  modified_base 28..29: mod_base = OTHER; note = S-phosphorothioate
  modified_base 29: mod_base = OTHER; note = 2-O-methylribose adenine
  modified_base 29..30: mod_base = OTHER; note R-N-(1,3-dimethylimidazolidin-2-ylidene)phosphoramidate
  modified_base 30: mod_base = cm
  source 1..30: mol_type = other RNA
acataatttacacgaaagcaatgtcctcac

SEQ ID NO: 32 - RNA, 30 nt, synthetic construct
  misc_feature 1..30: note = Synthetic: WV-42339
  misc_feature 1..30: note = Synthetic: ADR-0102118
  modified_base 1: mod_base = OTHER; note = 2-fluororibose adenine
  modified_base 1..2: mod_base = OTHER; note R-N-(1,3-dimethylimidazolidin-2-ylidene)phosphoramidate
  modified_base 2: mod_base = OTHER; note = 2-fluororibose cytosine
  modified_base 2..3: mod_base = OTHER; note = S-phosphorothioate
  modified_base 3: mod_base = OTHER; note = 2-fluororibose adenine
  modified_base 3..4: mod_base = OTHER; note = S-phosphorothioate
  modified_base 4: mod_base = OTHER; note = 2-fluororibose uracil
  modified_base 4..5: mod_base = OTHER; note = S-phosphorothioate
  modified_base 5: mod_base = OTHER; note = 2-fluororibose adenine
  modified_base 5..6: mod_base = OTHER; note = S-phosphorothioate
  modified_base 6: mod_base = OTHER; note = 2-fluororibose adenine
  modified_base 6..7: mod_base = OTHER; note = S-phosphorothioate
  modified_base 7: mod_base = OTHER; note = 2-fluororibose uracil
  modified_base 7..8: mod_base = OTHER; note = S-phosphorothioate
  modified_base 8: mod_base = OTHER; note = 2-fluororibose uracil
  modified_base 8..9: mod_base = OTHER; note = S-phosphorothioate
  modified_base 9: mod_base = OTHER; note = 2-fluororibose uracil
  modified_base 9..10: mod_base = OTHER; note = S-phosphorothioate
  modified_base 10: mod_base = OTHER; note = 2-fluororibose adenine
  modified_base 10..11: mod_base = OTHER; note = S-phosphorothioate
  modified_base 11: mod_base = OTHER; note = 2-fluororibose cytosine
  modified_base 11..12: mod_base = OTHER; note = S-phosphorothioate
  modified_base 12: mod_base = OTHER; note = 2-fluororibose adenine
  modified_base 12..13: mod_base = OTHER; note = S-phosphorothioate
  modified_base 13: mod_base = OTHER; note = 2-fluororibose cytosine
  modified_base 13..14: mod_base = OTHER; note = S-phosphorothioate
  modified_base 14: mod_base = OTHER; note = 2-fluororibose guanine
  modified_base 14..15: mod_base = OTHER; note R-N-(1,3-dimethylimidazolidin-2-ylidene)phosphoramidate
  modified_base 15: mod_base = OTHER; note = 2-fluororibose adenine
  modified_base 15..16: mod_base = OTHER; note = S-phosphorothioate
  modified_base 16: mod_base = OTHER; note = 2-O-methylribose adenine
  modified_base 16..17: mod_base = OTHER; note R-N-(1,3-dimethylimidazolidin-2-ylidene)phosphoramidate
  modified_base 17: mod_base = OTHER; note = 2-O-methylribose adenine
  modified_base 17..18: mod_base = OTHER; note = S-phosphorothioate
  modified_base 18: mod_base = gm
  modified_base 18..19: mod_base = OTHER; note = S-phosphorothioate
  modified_base 19: mod_base = cm
  modified_base 19..20: mod_base = OTHER; note = S-phosphorothioate
  modified_base 20: mod_base = OTHER; note = 2-O-methylribose adenine
  modified_base 20..21: mod_base = OTHER; note = S-phosphorothioate
  modified_base 21: mod_base = OTHER; note = 2-O-methylribose adenine
  modified_base 21..22: mod_base = OTHER; note = S-phosphorothioate
  modified_base 22: mod_base = um
  modified_base 22..23: mod_base = OTHER; note = S-phosphorothioate
  modified_base 23: mod_base = gm
  modified_base 23..24: mod_base = OTHER; note = S-phosphorothioate
  modified_base 24: mod_base = OTHER; note = 2-fluororibose adenine
  modified_base 24..25: mod_base = OTHER; note = S-phosphorothioate
  modified_base 25: mod_base = OTHER; note = deoxyribose cytosine
  modified_base 25..26: mod_base = OTHER; note = S-phosphorothioate
  modified_base 26: mod_base = OTHER; note = deoxyribose cytosine
  modified_base 26..27: mod_base = OTHER; note R-N-(1,3-dimethylimidazolidin-2-ylidene)phosphoramidate
  modified_base 27: mod_base = um
  modified_base 27..28: mod_base = OTHER; note = S-phosphorothioate
  modified_base 28: mod_base = cm
  modified_base 28..29: mod_base = OTHER; note = S-phosphorothioate
  modified_base 29: mod_base = OTHER; note = 2-O-methylribose adenine
  modified_base 29..30: mod_base = OTHER; note R-N-(1,3-dimethylimidazolidin-2-ylidene)phosphoramidate
  modified_base 30: mod_base = cm
  source 1..30: mol_type = other RNA
acataatttacacgaaagcaatgacctcac

SEQ ID NO: 33 - RNA, 30 nt, synthetic construct
  misc_feature 1..30: note = Synthetic: WV-42340
  misc_feature 1..30: note = Synthetic: ADR-0102122
  modified_base 1: mod_base = OTHER; note = 2-fluororibose adenine
  modified_base 1..2: mod_base = OTHER; note R-N-(1,3-dimethylimidazolidin-2-ylidene)phosphoramidate
  modified_base 2: mod_base = OTHER; note = 2-fluororibose cytosine
  modified_base 2..3: mod_base = OTHER; note = S-phosphorothioate
  modified_base 3: mod_base = OTHER; note = 2-fluororibose adenine
  modified_base 3..4: mod_base = OTHER; note = S-phosphorothioate
  modified_base 4: mod_base = OTHER; note = 2-fluororibose uracil
  modified_base 4..5: mod_base = OTHER; note = S-phosphorothioate
  modified_base 5: mod_base = OTHER; note = 2-fluororibose adenine
  modified_base 5..6: mod_base = OTHER; note = S-phosphorothioate
  modified_base 6: mod_base = OTHER; note = 2-fluororibose adenine
  modified_base 6..7: mod_base = OTHER; note = S-phosphorothioate
  modified_base 7: mod_base = OTHER; note = 2-fluororibose uracil
  modified_base 7..8: mod_base = OTHER; note = S-phosphorothioate
  modified_base 8: mod_base = OTHER; note = 2-fluororibose uracil
  modified_base 8..9: mod_base = OTHER; note = S-phosphorothioate
  modified_base 9: mod_base = OTHER; note = 2-fluororibose uracil
  modified_base 9..10: mod_base = OTHER; note = S-phosphorothioate
  modified_base 10: mod_base = OTHER; note = 2-fluororibose adenine
  modified_base 10..11: mod_base = OTHER; note = S-phosphorothioate
  modified_base 11: mod_base = OTHER; note = 2-fluororibose cytosine
  modified_base 11..12: mod_base = OTHER; note = S-phosphorothioate
  modified_base 12: mod_base = OTHER; note = 2-fluororibose adenine
  modified_base 12..13: mod_base = OTHER; note = S-phosphorothioate
  modified_base 13: mod_base = OTHER; note = 2-fluororibose cytosine
  modified_base 13..14: mod_base = OTHER; note = S-phosphorothioate
  modified_base 14: mod_base = OTHER; note = 2-fluororibose guanine
  modified_base 14..15: mod_base = OTHER; note R-N-(1,3-dimethylimidazolidin-2-ylidene)phosphoramidate
  modified_base 15: mod_base = OTHER; note = 2-fluororibose adenine
  modified_base 15..16: mod_base = OTHER; note = S-phosphorothioate
  modified_base 16: mod_base = OTHER; note = 2-O-methylribose adenine
  modified_base 16..17: mod_base = OTHER; note R-N-(1,3-dimethylimidazolidin-2-ylidene)phosphoramidate
  modified_base 17: mod_base = OTHER; note = 2-O-methylribose adenine
  modified_base 17..18: mod_base = OTHER; note = S-phosphorothioate
  modified_base 18: mod_base = gm
  modified_base 18..19: mod_base = OTHER; note = S-phosphorothioate
  modified_base 19: mod_base = cm
  modified_base 19..20: mod_base = OTHER; note = S-phosphorothioate
  modified_base 20: mod_base = OTHER; note = 2-O-methylribose adenine
  modified_base 20..21: mod_base = OTHER; note = S-phosphorothioate
  modified_base 21: mod_base = OTHER; note = 2-O-methylribose adenine
  modified_base 21..22: mod_base = OTHER; note = S-phosphorothioate
  modified_base 22: mod_base = um
  modified_base 22..23: mod_base = OTHER; note = S-phosphorothioate
  modified_base 23: mod_base = gm
  modified_base 23..24: mod_base = OTHER; note = S-phosphorothioate
  modified_base 24: mod_base = OTHER; note = 2-fluororibose cytosine
  modified_base 24..25: mod_base = OTHER; note = S-phosphorothioate
  modified_base 25: mod_base = OTHER; note = deoxyribose cytosine
  modified_base 25..26: mod_base = OTHER; note = S-phosphorothioate
  modified_base 26: mod_base = OTHER; note = deoxyribose cytosine
  modified_base 26..27: mod_base = OTHER; note R-N-(1,3-dimethylimidazolidin-2-ylidene)phosphoramidate
  modified_base 27: mod_base = um
  modified_base 27..28: mod_base = OTHER; note = S-phosphorothioate
  modified_base 28: mod_base = cm
  modified_base 28..29: mod_base = OTHER; note = S-phosphorothioate
  modified_base 29: mod_base = OTHER; note = 2-O-methylribose adenine
  modified_base 29..30: mod_base = OTHER; note R-N-(1,3-dimethylimidazolidin-2-ylidene)phosphoramidate
  modified_base 30: mod_base = cm
  source 1..30: mol_type = other RNA
acataatttacacgaaagcaatgccctcac

SEQ ID NO: 34 - RNA, 30 nt, synthetic construct
  misc_feature 1..30: note = Synthetic: WV-42341
  misc_feature 1..30: note = Synthetic: ADR-0102127
  modified_base 1: mod_base = OTHER; note = 2-fluororibose adenine
  modified_base 1..2: mod_base = OTHER; note R-N-(1,3-dimethylimidazolidin-2-ylidene)phosphoramidate
  modified_base 2: mod_base = OTHER; note = 2-fluororibose cytosine
  modified_base 2..3: mod_base = OTHER; note = S-phosphorothioate
  modified_base 3: mod_base = OTHER; note = 2-fluororibose adenine
  modified_base 3..4: mod_base = OTHER; note = S-phosphorothioate
  modified_base 4: mod_base = OTHER; note = 2-fluororibose uracil
  modified_base 4..5: mod_base = OTHER; note = S-phosphorothioate
  modified_base 5: mod_base = OTHER; note = 2-fluororibose adenine
  modified_base 5..6: mod_base = OTHER; note = S-phosphorothioate
  modified_base 6: mod_base = OTHER; note = 2-fluororibose adenine
  modified_base 6..7: mod_base = OTHER; note = S-phosphorothioate
  modified_base 7: mod_base = OTHER; note = 2-fluororibose uracil
  modified_base 7..8: mod_base = OTHER; note = S-phosphorothioate
  modified_base 8: mod_base = OTHER; note = 2-fluororibose uracil
  modified_base 8..9: mod_base = OTHER; note = S-phosphorothioate
  modified_base 9: mod_base = OTHER; note = 2-fluororibose uracil
  modified_base 9..10: mod_base = OTHER; note = S-phosphorothioate
  modified_base 10: mod_base = OTHER; note = 2-fluororibose adenine
  modified_base 10..11: mod_base = OTHER; note = S-phosphorothioate
  modified_base 11: mod_base = OTHER; note = 2-fluororibose cytosine
  modified_base 11..12: mod_base = OTHER; note = S-phosphorothioate
  modified_base 12: mod_base = OTHER; note = 2-fluororibose adenine
  modified_base 12..13: mod_base = OTHER; note = S-phosphorothioate
  modified_base 13: mod_base = OTHER; note = 2-fluororibose cytosine
  modified_base 13..14: mod_base = OTHER; note = S-phosphorothioate
  modified_base 14: mod_base = OTHER; note = 2-fluororibose guanine
  modified_base 14..15: mod_base = OTHER; note R-N-(1,3-dimethylimidazolidin-2-ylidene)phosphoramidate
  modified_base 15: mod_base = OTHER; note = 2-fluororibose adenine
  modified_base 15..16: mod_base = OTHER; note = S-phosphorothioate
  modified_base 16: mod_base = OTHER; note = 2-O-methylribose adenine
  modified_base 16..17: mod_base = OTHER; note R-N-(1,3-dimethylimidazolidin-2-ylidene)phosphoramidate
  modified_base 17: mod_base = OTHER; note = 2-O-methylribose adenine
  modified_base 17..18: mod_base = OTHER; note = S-phosphorothioate
  modified_base 18: mod_base = gm
  modified_base 18..19: mod_base = OTHER; note = S-phosphorothioate
  modified_base 19: mod_base = cm
  modified_base 19..20: mod_base = OTHER; note = S-phosphorothioate
  modified_base 20: mod_base = OTHER; note = 2-O-methylribose adenine
  modified_base 20..21: mod_base = OTHER; note = S-phosphorothioate
  modified_base 21: mod_base = OTHER; note = 2-O-methylribose adenine
  modified_base 21..22: mod_base = OTHER; note = S-phosphorothioate
  modified_base 22: mod_base = um
  modified_base 22..23: mod_base = OTHER; note = S-phosphorothioate
  modified_base 23: mod_base = gm
  modified_base 23..24: mod_base = OTHER; note = S-phosphorothioate
  modified_base 24: mod_base = OTHER; note = 2-fluororibose guanine
  modified_base 24..25: mod_base = OTHER; note = S-phosphorothioate
  modified_base 25: mod_base = OTHER; note = deoxyribose cytosine
  modified_base 25..26: mod_base = OTHER; note = S-phosphorothioate
  modified_base 26: mod_base = OTHER; note = deoxyribose cytosine
  modified_base 26..27: mod_base = OTHER; note R-N-(1,3-dimethylimidazolidin-2-ylidene)phosphoramidate
  modified_base 27: mod_base = um
  modified_base 27..28: mod_base = OTHER; note = S-phosphorothioate
  modified_base 28: mod_base = cm
  modified_base 28..29: mod_base = OTHER; note = S-phosphorothioate
  modified_base 29: mod_base = OTHER; note = 2-O-methylribose adenine
  modified_base 29..30: mod_base = OTHER; note R-N-(1,3-dimethylimidazolidin-2-ylidene)phosphoramidate
  modified_base 30: mod_base = cm
  source 1..30: mol_type = other RNA
acataatttacacgaaagcaatggcctcac

SEQ ID NO: 35 - RNA, 30 nt, synthetic construct
  misc_feature 1..30: note = Synthetic: WV-42342
  misc_feature 1..30: note = Synthetic: ADR-0102135
  modified_base 1: mod_base = OTHER; note = 2-fluororibose adenine
  modified_base 1..2: mod_base = OTHER; note R-N-(1,3-dimethylimidazolidin-2-ylidene)phosphoramidate
  modified_base 2: mod_base = OTHER; note = 2-fluororibose cytosine
  modified_base 2..3: mod_base = OTHER; note = S-phosphorothioate
  modified_base 3: mod_base = OTHER; note = 2-fluororibose adenine
  modified_base 3..4: mod_base = OTHER; note = S-phosphorothioate
  modified_base 4: mod_base = OTHER; note = 2-fluororibose uracil
  modified_base 4..5: mod_base = OTHER; note = S-phosphorothioate
  modified_base 5: mod_base = OTHER; note = 2-fluororibose adenine
  modified_base 5..6: mod_base = OTHER; note = S-phosphorothioate
  modified_base 6: mod_base = OTHER; note = 2-fluororibose adenine
  modified_base 6..7: mod_base = OTHER; note = S-phosphorothioate
  modified_base 7: mod_base = OTHER; note = 2-fluororibose uracil
  modified_base 7..8: mod_base = OTHER; note = S-phosphorothioate
  modified_base 8: mod_base = OTHER; note = 2-fluororibose uracil
  modified_base 8..9: mod_base = OTHER; note = S-phosphorothioate
  modified_base 9: mod_base = OTHER; note = 2-fluororibose uracil
  modified_base 9..10: mod_base = OTHER; note = S-phosphorothioate
  modified_base 10: mod_base = OTHER; note = 2-fluororibose adenine
  modified_base 10..11: mod_base = OTHER; note = S-phosphorothioate
  modified_base 11: mod_base = OTHER; note = 2-fluororibose cytosine
  modified_base 11..12: mod_base = OTHER; note = S-phosphorothioate
  modified_base 12: mod_base = OTHER; note = 2-fluororibose adenine
  modified_base 12..13: mod_base = OTHER; note = S-phosphorothioate
  modified_base 13: mod_base = OTHER; note = 2-fluororibose cytosine
  modified_base 13..14: mod_base = OTHER; note = S-phosphorothioate
  modified_base 14: mod_base = OTHER; note = 2-fluororibose guanine
  modified_base 14..15: mod_base = OTHER; note R-N-(1,3-dimethylimidazolidin-2-ylidene)phosphoramidate
  modified_base 15: mod_base = OTHER; note = 2-fluororibose adenine
  modified_base 15..16: mod_base = OTHER; note = S-phosphorothioate
  modified_base 16: mod_base = OTHER; note = 2-O-methylribose adenine
  modified_base 16..17: mod_base = OTHER; note R-N-(1,3-dimethylimidazolidin-2-ylidene)phosphoramidate
  modified_base 17: mod_base = OTHER; note = 2-O-methylribose adenine
  modified_base 17..18: mod_base = OTHER; note = S-phosphorothioate
  modified_base 18: mod_base = gm
  modified_base 18..19: mod_base = OTHER; note = S-phosphorothioate
  modified_base 19: mod_base = cm
  modified_base 19..20: mod_base = OTHER; note = S-phosphorothioate
  modified_base 20: mod_base = OTHER; note = 2-O-methylribose adenine
  modified_base 20..21: mod_base = OTHER; note = S-phosphorothioate
  modified_base 21: mod_base = OTHER; note = 2-O-methylribose adenine
  modified_base 21..22: mod_base = OTHER; note = S-phosphorothioate
  modified_base 22: mod_base = um
  modified_base 22..23: mod_base = OTHER; note = S-phosphorothioate
  modified_base 23: mod_base = gm
  modified_base 23..24: mod_base = OTHER; note = S-phosphorothioate
  modified_base 24: mod_base = OTHER; note = 2-fluororibose uracil
  modified_base 24..25: mod_base = OTHER; note = S-phosphorothioate
  modified_base 25: mod_base = OTHER; note = deoxyribose cytosine
  modified_base 25..26: mod_base = OTHER; note = S-phosphorothioate
  modified_base 26: mod_base = OTHER; note = deoxyribose inosine
  modified_base 26..27: mod_base = OTHER; note S-N-(1,3-dimethylimidazolidin-2-ylidene)phosphoramidate
  modified_base 27: mod_base = um
  modified_base 27..28: mod_base = OTHER; note = S-phosphorothioate
  modified_base 28: mod_base = cm
  modified_base 28..29: mod_base = OTHER; note = S-phosphorothioate
  modified_base 29: mod_base = OTHER; note = 2-O-methylribose adenine
  modified_base 29..30: mod_base = OTHER; note R-N-(1,3-dimethylimidazolidin-2-ylidene)phosphoramidate
  modified_base 30: mod_base = cm
  source 1..30: mol_type = other RNA
acataatttacacgaaagcaatgtcgtcac

SEQ ID NO: 36 - RNA, 30 nt, synthetic construct
  misc_feature 1..30: note = Synthetic: WV-42343
  misc_feature 1..30: note = Synthetic: ADR-0102121
  modified_base 1: mod_base = OTHER; note = 2-fluororibose adenine
  modified_base 1..2: mod_base = OTHER; note R-N-(1,3-dimethylimidazolidin-2-ylidene)phosphoramidate
  modified_base 2: mod_base = OTHER; note = 2-fluororibose cytosine
  modified_base 2..3: mod_base = OTHER; note = S-phosphorothioate
  modified_base 3: mod_base = OTHER; note = 2-fluororibose adenine
  modified_base 3..4: mod_base = OTHER; note = S-phosphorothioate
  modified_base 4: mod_base = OTHER; note = 2-fluororibose uracil
  modified_base 4..5: mod_base = OTHER; note = S-phosphorothioate
  modified_base 5: mod_base = OTHER; note = 2-fluororibose adenine
  modified_base 5..6: mod_base = OTHER; note = S-phosphorothioate
  modified_base 6: mod_base = OTHER; note = 2-fluororibose adenine
  modified_base 6..7: mod_base = OTHER; note = S-phosphorothioate
  modified_base 7: mod_base = OTHER; note = 2-fluororibose uracil
  modified_base 7..8: mod_base = OTHER; note = S-phosphorothioate
  modified_base 8: mod_base = OTHER; note = 2-fluororibose uracil
  modified_base 8..9: mod_base = OTHER; note = S-phosphorothioate
  modified_base 9: mod_base = OTHER; note = 2-fluororibose uracil
  modified_base 9..10: mod_base = OTHER; note = S-phosphorothioate
  modified_base 10: mod_base = OTHER; note = 2-fluororibose adenine
  modified_base 10..11: mod_base = OTHER; note = S-phosphorothioate
  modified_base 11: mod_base = OTHER; note = 2-fluororibose cytosine
  modified_base 11..12: mod_base = OTHER; note = S-phosphorothioate
  modified_base 12: mod_base = OTHER; note = 2-fluororibose adenine
  modified_base 12..13: mod_base = OTHER; note = S-phosphorothioate
  modified_base 13: mod_base = OTHER; note = 2-fluororibose cytosine
  modified_base 13..14: mod_base = OTHER; note = S-phosphorothioate
  modified_base 14: mod_base = OTHER; note = 2-fluororibose guanine
  modified_base 14..15: mod_base = OTHER; note R-N-(1,3-dimethylimidazolidin-2-ylidene)phosphoramidate
  modified_base 15: mod_base = OTHER; note = 2-fluororibose adenine
  modified_base 15..16: mod_base = OTHER; note = S-phosphorothioate
  modified_base 16: mod_base = OTHER; note = 2-O-methylribose adenine
  modified_base 16..17: mod_base = OTHER; note R-N-(1,3-dimethylimidazolidin-2-ylidene)phosphoramidate
  modified_base 17: mod_base = OTHER; note = 2-O-methylribose adenine
  modified_base 17..18: mod_base = OTHER; note = S-phosphorothioate
  modified_base 18: mod_base = gm
  modified_base 18..19: mod_base = OTHER; note = S-phosphorothioate
  modified_base 19: mod_base = cm
  modified_base 19..20: mod_base = OTHER; note = S-phosphorothioate
  modified_base 20: mod_base = OTHER; note = 2-O-methylribose adenine
  modified_base 20..21: mod_base = OTHER; note = S-phosphorothioate
  modified_base 21: mod_base = OTHER; note = 2-O-methylribose adenine
  modified_base 21..22: mod_base = OTHER; note = S-phosphorothioate
  modified_base 22: mod_base = um
  modified_base 22..23: mod_base = OTHER; note = S-phosphorothioate
  modified_base 23: mod_base = gm
  modified_base 23..24: mod_base = OTHER; note = S-phosphorothioate
  modified_base 24: mod_base = OTHER; note = 2-fluororibose adenine
  modified_base 24..25: mod_base = OTHER; note = S-phosphorothioate
  modified_base 25: mod_base = OTHER; note = deoxyribose cytosine
  modified_base 25..26: mod_base = OTHER; note = S-phosphorothioate
  modified_base 26: mod_base = OTHER; note = deoxyribose inosine
  modified_base 26..27: mod_base = OTHER; note S-N-(1,3-dimethylimidazolidin-2-ylidene)phosphoramidate
  modified_base 27: mod_base = um
  modified_base 27..28: mod_base = OTHER; note = S-phosphorothioate
  modified_base 28: mod_base = cm
  modified_base 28..29: mod_base = OTHER; note = S-phosphorothioate
  modified_base 29: mod_base = OTHER; note = 2-O-methylribose adenine
  modified_base 29..30: mod_base = OTHER; note R-N-(1,3-dimethylimidazolidin-2-ylidene)phosphoramidate
  modified_base 30: mod_base = cm
  source 1..30: mol_type = other RNA
acataatttacacgaaagcaatgacgtcac

SEQ ID NO: 37 - RNA, 30 nt, synthetic construct
  misc_feature 1..30: note = Synthetic: WV-42344
  misc_feature 1..30: note = Synthetic: ADR-0102125
  modified_base 1: mod_base = OTHER; note = 2-fluororibose adenine
  modified_base 1..2: mod_base = OTHER; note R-N-(1,3-dimethylimidazolidin-2-ylidene)phosphoramidate
  modified_base 2: mod_base = OTHER; note = 2-fluororibose cytosine
  modified_base 2..3: mod_base = OTHER; note = S-phosphorothioate
  modified_base 3: mod_base = OTHER; note = 2-fluororibose adenine
  modified_base 3..4: mod_base = OTHER; note = S-phosphorothioate
  modified_base 4: mod_base = OTHER; note = 2-fluororibose uracil
  modified_base 4..5: mod_base = OTHER; note = S-phosphorothioate
  modified_base 5: mod_base = OTHER; note = 2-fluororibose adenine
  modified_base 5..6: mod_base = OTHER; note = S-phosphorothioate
  modified_base 6: mod_base = OTHER; note = 2-fluororibose adenine
  modified_base 6..7: mod_base = OTHER; note = S-phosphorothioate
  modified_base 7: mod_base = OTHER; note = 2-fluororibose uracil
  modified_base 7..8: mod_base = OTHER; note = S-phosphorothioate
  modified_base 8: mod_base = OTHER; note = 2-fluororibose uracil
  modified_base 8..9: mod_base = OTHER; note = S-phosphorothioate
  modified_base 9: mod_base = OTHER; note = 2-fluororibose uracil
  modified_base 9..10: mod_base = OTHER; note = S-phosphorothioate
  modified_base 10: mod_base = OTHER; note = 2-fluororibose adenine
  modified_base 10..11: mod_base = OTHER; note = S-phosphorothioate
  modified_base 11: mod_base = OTHER; note = 2-fluororibose cytosine
  modified_base 11..12: mod_base = OTHER; note = S-phosphorothioate
  modified_base 12: mod_base = OTHER; note = 2-fluororibose adenine
  modified_base 12..13: mod_base = OTHER; note = S-phosphorothioate
  modified_base 13: mod_base = OTHER; note = 2-fluororibose cytosine
  modified_base 13..14: mod_base = OTHER; note = S-phosphorothioate
  modified_base 14: mod_base = OTHER; note = 2-fluororibose guanine
  modified_base 14..15: mod_base = OTHER; note R-N-(1,3-dimethylimidazolidin-2-ylidene)phosphoramidate
  modified_base 15: mod_base = OTHER; note = 2-fluororibose adenine
  modified_base 15..16: mod_base = OTHER; note = S-phosphorothioate
  modified_base 16: mod_base = OTHER; note = 2-O-methylribose adenine
  modified_base 16..17: mod_base = OTHER; note R-N-(1,3-dimethylimidazolidin-2-ylidene)phosphoramidate
  modified_base 17: mod_base = OTHER; note = 2-O-methylribose adenine
  modified_base 17..18: mod_base = OTHER; note = S-phosphorothioate
  modified_base 18: mod_base = gm
  modified_base 18..19: mod_base = OTHER; note = S-phosphorothioate
  modified_base 19: mod_base = cm
  modified_base 19..20: mod_base = OTHER; note = S-phosphorothioate
  modified_base 20: mod_base = OTHER; note = 2-O-methylribose adenine
  modified_base 20..21: mod_base = OTHER; note = S-phosphorothioate
  modified_base 21: mod_base = OTHER; note = 2-O-methylribose adenine
  modified_base 21..22: mod_base = OTHER; note = S-phosphorothioate
  modified_base 22: mod_base = um
  modified_base 22..23: mod_base = OTHER; note = S-phosphorothioate
  modified_base 23: mod_base = gm
  modified_base 23..24: mod_base = OTHER; note = S-phosphorothioate
  modified_base 24: mod_base = OTHER; note = 2-fluororibose cytosine
  modified_base 24..25: mod_base = OTHER; note = S-phosphorothioate
  modified_base 25: mod_base = OTHER; note = deoxyribose cytosine
  modified_base 25..26: mod_base = OTHER; note = S-phosphorothioate
  modified_base 26: mod_base = OTHER; note = deoxyribose inosine
  modified_base 26..27: mod_base = OTHER; note S-N-(1,3-dimethylimidazolidin-2-ylidene)phosphoramidate
  modified_base 27: mod_base = um
  modified_base 27..28: mod_base = OTHER; note = S-phosphorothioate
  modified_base 28: mod_base = cm
  modified_base 28..29: mod_base = OTHER; note = S-phosphorothioate
  modified_base 29: mod_base = OTHER; note = 2-O-methylribose adenine
  modified_base 29..30: mod_base = OTHER; note R-N-(1,3-dimethylimidazolidin-2-ylidene)phosphoramidate
  modified_base 30: mod_base = cm
  source 1..30: mol_type = other RNA
acataatttacacgaaagcaatgccgtcac

SEQ ID NO: 38 - RNA, 30 nt, synthetic construct
  misc_feature 1..30: note = Synthetic: WV-42345
  misc_feature 1..30: note = Synthetic: ADR-0102130
  modified_base 1: mod_base = OTHER; note = 2-fluororibose adenine
  modified_base 1..2: mod_base = OTHER; note R-N-(1,3-dimethylimidazolidin-2-ylidene)phosphoramidate
  modified_base 2: mod_base = OTHER; note = 2-fluororibose cytosine
  modified_base 2..3: mod_base = OTHER; note = S-phosphorothioate
  modified_base 3: mod_base = OTHER; note = 2-fluororibose adenine
  modified_base 3..4: mod_base = OTHER; note = S-phosphorothioate
  modified_base 4: mod_base = OTHER; note = 2-fluororibose uracil
  modified_base 4..5: mod_base = OTHER; note = S-phosphorothioate
  modified_base 5: mod_base = OTHER; note = 2-fluororibose adenine
  modified_base 5..6: mod_base = OTHER; note = S-phosphorothioate
  modified_base 6: mod_base = OTHER; note = 2-fluororibose adenine
  modified_base 6..7: mod_base = OTHER; note = S-phosphorothioate
  modified_base 7: mod_base = OTHER; note = 2-fluororibose uracil
  modified_base 7..8: mod_base = OTHER; note = S-phosphorothioate
  modified_base 8: mod_base = OTHER; note = 2-fluororibose uracil
  modified_base 8..9: mod_base = OTHER; note = S-phosphorothioate
  modified_base 9: mod_base = OTHER; note = 2-fluororibose uracil
  modified_base 9..10: mod_base = OTHER; note = S-phosphorothioate
  modified_base 10: mod_base = OTHER; note = 2-fluororibose adenine
  modified_base 10..11: mod_base = OTHER; note = S-phosphorothioate
  modified_base 11: mod_base = OTHER; note = 2-fluororibose cytosine
  modified_base 11..12: mod_base = OTHER; note = S-phosphorothioate
  modified_base 12: mod_base = OTHER; note = 2-fluororibose adenine
  modified_base 12..13: mod_base = OTHER; note = S-phosphorothioate
  modified_base 13: mod_base = OTHER; note = 2-fluororibose cytosine
  modified_base 13..14: mod_base = OTHER; note = S-phosphorothioate
  modified_base 14: mod_base = OTHER; note = 2-fluororibose guanine
  modified_base 14..15: mod_base = OTHER; note R-N-(1,3-dimethylimidazolidin-2-ylidene)phosphoramidate
  modified_base 15: mod_base = OTHER; note = 2-fluororibose adenine
  modified_base 15..16: mod_base = OTHER; note = S-phosphorothioate
  modified_base 16: mod_base = OTHER; note = 2-O-methylribose adenine
  modified_base 16..17: mod_base = OTHER; note R-N-(1,3-dimethylimidazolidin-2-ylidene)phosphoramidate
  modified_base 17: mod_base = OTHER; note = 2-O-methylribose adenine
  modified_base 17..18: mod_base = OTHER; note = S-phosphorothioate
  modified_base 18: mod_base = gm
  modified_base 18..19: mod_base = OTHER; note = S-phosphorothioate
  modified_base 19: mod_base = cm
  modified_base 19..20: mod_base = OTHER; note = S-phosphorothioate
  modified_base 20: mod_base = OTHER; note = 2-O-methylribose adenine
  modified_base 20..21: mod_base = OTHER; note = S-phosphorothioate
  modified_base 21: mod_base = OTHER; note = 2-O-methylribose adenine
  modified_base 21..22: mod_base = OTHER; note = S-phosphorothioate
  modified_base 22: mod_base = um
  modified_base 22..23: mod_base = OTHER; note = S-phosphorothioate
  modified_base 23: mod_base = gm
  modified_base 23..24: mod_base = OTHER; note = S-phosphorothioate
  modified_base 24: mod_base = OTHER; note = 2-fluororibose guanine
  modified_base 24..25: mod_base = OTHER; note = S-phosphorothioate
  modified_base 25: mod_base = OTHER; note = deoxyribose cytosine
  modified_base 25..26: mod_base = OTHER; note = S-phosphorothioate
  modified_base 26: mod_base = OTHER; note = deoxyribose inosine
  modified_base 26..27: mod_base = OTHER; note S-N-(1,3-dimethylimidazolidin-2-ylidene)phosphoramidate
  modified_base 27: mod_base = um
  modified_base 27..28: mod_base = OTHER; note = S-phosphorothioate
  modified_base 28: mod_base = cm
  modified_base 28..29: mod_base = OTHER; note = S-phosphorothioate
  modified_base 29: mod_base = OTHER; note = 2-O-methylribose adenine
  modified_base 29..30: mod_base = OTHER; note R-N-(1,3-dimethylimidazolidin-2-ylidene)phosphoramidate
  modified_base 30: mod_base = cm
  source 1..30: mol_type = other RNA
acataatttacacgaaagcaatggcgtcac

SEQ ID NO: 39 - RNA, 30 nt, synthetic construct; identical to SEQ ID NO: 35
  misc_feature 1..30: note = Synthetic: WV-42346
  misc_feature 1..30: note = Synthetic: ADR-0102133
  modified_base 1: mod_base = OTHER; note = 2-fluororibose adenine
  modified_base 1..2: mod_base = OTHER; note R-N-(1,3-dimethylimidazolidin-2-ylidene)phosphoramidate
  modified_base 2: mod_base = OTHER; note = 2-fluororibose cytosine
  modified_base 2..3: mod_base = OTHER; note = S-phosphorothioate
  modified_base 3: mod_base = OTHER; note = 2-fluororibose adenine
  modified_base 3..4: mod_base = OTHER; note = S-phosphorothioate
  modified_base 4: mod_base = OTHER; note = 2-fluororibose uracil
  modified_base 4..5: mod_base = OTHER; note = S-phosphorothioate
  modified_base 5: mod_base = OTHER; note = 2-fluororibose adenine
  modified_base 5..6: mod_base = OTHER; note = S-phosphorothioate
  modified_base 6: mod_base = OTHER; note = 2-fluororibose adenine
  modified_base 6..7: mod_base = OTHER; note = S-phosphorothioate
  modified_base 7: mod_base = OTHER; note = 2-fluororibose uracil
  modified_base 7..8: mod_base = OTHER; note = S-phosphorothioate
  modified_base 8: mod_base = OTHER; note = 2-fluororibose uracil
  modified_base 8..9: mod_base = OTHER; note = S-phosphorothioate
  modified_base 9: mod_base = OTHER; note = 2-fluororibose uracil
  modified_base 9..10: mod_base = OTHER; note = S-phosphorothioate
  modified_base 10: mod_base = OTHER; note = 2-fluororibose adenine
  modified_base 10..11: mod_base = OTHER; note = S-phosphorothioate
  modified_base 11: mod_base = OTHER; note = 2-fluororibose cytosine
  modified_base 11..12: mod_base = OTHER; note = S-phosphorothioate
  modified_base 12: mod_base = OTHER; note = 2-fluororibose adenine
  modified_base 12..13: mod_base = OTHER; note = S-phosphorothioate
  modified_base 13: mod_base = OTHER; note = 2-fluororibose cytosine
  modified_base 13..14: mod_base = OTHER; note = S-phosphorothioate
  modified_base 14: mod_base = OTHER; note = 2-fluororibose guanine
  modified_base 14..15: mod_base = OTHER; note R-N-(1,3-dimethylimidazolidin-2-ylidene)phosphoramidate
  modified_base 15: mod_base = OTHER; note = 2-fluororibose adenine
  modified_base 15..16: mod_base = OTHER; note = S-phosphorothioate
  modified_base 16: mod_base = OTHER; note = 2-O-methylribose adenine
  modified_base 16..17: mod_base = OTHER; note R-N-(1,3-dimethylimidazolidin-2-ylidene)phosphoramidate
  modified_base 17: mod_base = OTHER; note = 2-O-methylribose adenine
  modified_base 17..18: mod_base = OTHER; note = S-phosphorothioate
  modified_base 18: mod_base = gm
  modified_base 18..19: mod_base = OTHER; note = S-phosphorothioate
  modified_base 19: mod_base = cm
  modified_base 19..20: mod_base = OTHER; note = S-phosphorothioate
  modified_base 20: mod_base = OTHER; note = 2-O-methylribose adenine
  modified_base 20..21: mod_base = OTHER; note = S-phosphorothioate
  modified_base 21: mod_base = OTHER; note = 2-O-methylribose adenine
  modified_base 21..22: mod_base = OTHER; note = S-phosphorothioate
  modified_base 22: mod_base = um
  modified_base 22..23: mod_base = OTHER; note = S-phosphorothioate
  modified_base 23: mod_base = gm
  modified_base 23..24: mod_base = OTHER; note = S-phosphorothioate
  modified_base 24: mod_base = OTHER; note = 2-fluororibose uracil
  modified_base 24..25: mod_base = OTHER; note = S-phosphorothioate
  modified_base 25: mod_base = OTHER; note = deoxyribose cytosine
  modified_base 25..26: mod_base = OTHER; note = S-phosphorothioate
  modified_base 26: mod_base = OTHER; note = deoxyribose guanine
  modified_base 26..27: mod_base = OTHER; note R-N-(1,3-dimethylimidazolidin-2-ylidene)phosphoramidate
  modified_base 27: mod_base = um
  modified_base 27..28: mod_base = OTHER; note = S-phosphorothioate
  modified_base 28: mod_base = cm
  modified_base 28..29: mod_base = OTHER; note = S-phosphorothioate
  modified_base 29: mod_base = OTHER; note = 2-O-methylribose adenine
  modified_base 29..30: mod_base = OTHER; note R-N-(1,3-dimethylimidazolidin-2-ylidene)phosphoramidate
  modified_base 30: mod_base = cm
  source 1..30: mol_type = other RNA

SEQ ID NO: 40 - RNA, 30 nt, synthetic construct; identical to SEQ ID NO: 36
  misc_feature 1..30: note = Synthetic: WV-42347
  misc_feature 1..30: note = Synthetic: ADR-0102119
  modified_base 1: mod_base = OTHER; note = 2-fluororibose adenine
  modified_base 1..2: mod_base = OTHER; note R-N-(1,3-dimethylimidazolidin-2-ylidene)phosphoramidate
  modified_base 2: mod_base = OTHER; note = 2-fluororibose cytosine
  modified_base 2..3: mod_base = OTHER; note = S-phosphorothioate
  modified_base 3: mod_base = OTHER; note = 2-fluororibose adenine
  modified_base 3..4: mod_base = OTHER; note = S-phosphorothioate
  modified_base 4: mod_base = OTHER; note = 2-fluororibose uracil
  modified_base 4..5: mod_base = OTHER; note = S-phosphorothioate
  modified_base 5: mod_base = OTHER; note = 2-fluororibose adenine
  modified_base 5..6: mod_base = OTHER; note = S-phosphorothioate
  modified_base 6: mod_base = OTHER; note = 2-fluororibose adenine
  modified_base 6..7: mod_base = OTHER; note = S-phosphorothioate
  modified_base 7: mod_base = OTHER; note = 2-fluororibose uracil
  modified_base 7..8: mod_base = OTHER; note = S-phosphorothioate
  modified_base 8: mod_base = OTHER; note = 2-fluororibose uracil
  modified_base 8..9: mod_base = OTHER; note = S-phosphorothioate
  modified_base 9: mod_base = OTHER; note = 2-fluororibose uracil
  modified_base 9..10: mod_base = OTHER; note = S-phosphorothioate
  modified_base 10: mod_base = OTHER; note = 2-fluororibose adenine
  modified_base 10..11: mod_base = OTHER; note = S-phosphorothioate
  modified_base 11: mod_base = OTHER; note = 2-fluororibose cytosine
  modified_base 11..12: mod_base = OTHER; note = S-phosphorothioate
  modified_base 12: mod_base = OTHER; note = 2-fluororibose adenine
  modified_base 12..13: mod_base = OTHER; note = S-phosphorothioate
  modified_base 13: mod_base = OTHER; note = 2-fluororibose cytosine
  modified_base 13..14: mod_base = OTHER; note = S-phosphorothioate
  modified_base 14: mod_base = OTHER; note = 2-fluororibose guanine
  modified_base 14..15: mod_base = OTHER; note R-N-(1,3-dimethylimidazolidin-2-ylidene)phosphoramidate
  modified_base 15: mod_base = OTHER; note = 2-fluororibose adenine
  modified_base 15..16: mod_base = OTHER; note = S-phosphorothioate
  modified_base 16: mod_base = OTHER; note = 2-O-methylribose adenine
  modified_base 16..17: mod_base = OTHER; note R-N-(1,3-dimethylimidazolidin-2-ylidene)phosphoramidate
  modified_base 17: mod_base = OTHER; note = 2-O-methylribose adenine
  modified_base 17..18: mod_base = OTHER; note = S-phosphorothioate
  modified_base 18: mod_base = gm
  modified_base 18..19: mod_base = OTHER; note = S-phosphorothioate
  modified_base 19: mod_base = cm
  modified_base 19..20: mod_base = OTHER; note = S-phosphorothioate
  modified_base 20: mod_base = OTHER; note = 2-O-methylribose adenine
  modified_base 20..21: mod_base = OTHER; note = S-phosphorothioate
  modified_base 21: mod_base = OTHER; note = 2-O-methylribose adenine
  modified_base 21..22: mod_base = OTHER; note = S-phosphorothioate
  modified_base 22: mod_base = um
  modified_base 22..23: mod_base = OTHER; note = S-phosphorothioate
  modified_base 23: mod_base = gm
  modified_base 23..24: mod_base = OTHER; note = S-phosphorothioate
  modified_base 24: mod_base = OTHER; note = 2-fluororibose adenine
  modified_base 24..25: mod_base = OTHER; note = S-phosphorothioate
  modified_base 25: mod_base = OTHER; note = deoxyribose cytosine
  modified_base 25..26: mod_base = OTHER; note = S-phosphorothioate
  modified_base 26: mod_base = OTHER; note = deoxyribose guanine
  modified_base 26..27: mod_base = OTHER; note R-N-(1,3-dimethylimidazolidin-2-ylidene)phosphoramidate
  modified_base 27: mod_base = um
  modified_base 27..28: mod_base = OTHER; note = S-phosphorothioate
  modified_base 28: mod_base = cm
  modified_base 28..29: mod_base = OTHER; note = S-phosphorothioate
  modified_base 29: mod_base = OTHER; note = 2-O-methylribose adenine
  modified_base 29..30: mod_base = OTHER; note R-N-(1,3-dimethylimidazolidin-2-ylidene)phosphoramidate
  modified_base 30: mod_base = cm
  source 1..30: mol_type = other RNA

SEQ ID NO: 41 - RNA, 30 nt, synthetic construct; identical to SEQ ID NO: 37
  misc_feature 1..30: note = Synthetic: WV-42348
  misc_feature 1..30: note = Synthetic: ADR-0102123
  modified_base 1: mod_base = OTHER; note = 2-fluororibose adenine
  modified_base 1..2: mod_base = OTHER; note R-N-(1,3-dimethylimidazolidin-2-ylidene)phosphoramidate
  modified_base 2: mod_base = OTHER; note = 2-fluororibose cytosine
  modified_base 2..3: mod_base = OTHER; note = S-phosphorothioate
  modified_base 3: mod_base = OTHER; note = 2-fluororibose adenine
  modified_base 3..4: mod_base = OTHER; note = S-phosphorothioate
  modified_base 4: mod_base = OTHER; note = 2-fluororibose uracil
  modified_base 4..5: mod_base = OTHER; note = S-phosphorothioate
  modified_base 5: mod_base = OTHER; note = 2-fluororibose adenine
  modified_base 5..6: mod_base = OTHER; note = S-phosphorothioate
  modified_base 6: mod_base = OTHER; note = 2-fluororibose adenine
  modified_base 6..7: mod_base = OTHER; note = S-phosphorothioate
  modified_base 7: mod_base = OTHER; note = 2-fluororibose uracil
  modified_base 7..8: mod_base = OTHER; note = S-phosphorothioate
  modified_base 8: mod_base = OTHER; note = 2-fluororibose uracil
  modified_base 8..9: mod_base = OTHER; note = S-phosphorothioate
  modified_base 9: mod_base = OTHER; note = 2-fluororibose uracil
  modified_base 9..10: mod_base = OTHER; note = S-phosphorothioate
  modified_base 10: mod_base = OTHER; note = 2-fluororibose adenine
  modified_base 10..11: mod_base = OTHER; note = S-phosphorothioate
  modified_base 11: mod_base = OTHER; note = 2-fluororibose cytosine
  modified_base 11..12: mod_base = OTHER; note = S-phosphorothioate
  modified_base 12: mod_base = OTHER; note = 2-fluororibose adenine
  modified_base 12..13: mod_base = OTHER; note = S-phosphorothioate
  modified_base 13: mod_base = OTHER; note = 2-fluororibose cytosine
  modified_base 13..14: mod_base = OTHER; note = S-phosphorothioate
  modified_base 14: mod_base = OTHER; note = 2-fluororibose guanine
  modified_base 14..15: mod_base = OTHER; note R-N-(1,3-dimethylimidazolidin-2-ylidene)phosphoramidate
  modified_base 15: mod_base = OTHER; note = 2-fluororibose adenine
  modified_base 15..16: mod_base = OTHER; note = S-phosphorothioate
  modified_base 16: mod_base = OTHER; note = 2-O-methylribose adenine
  modified_base 16..17: mod_base = OTHER; note R-N-(1,3-dimethylimidazolidin-2-ylidene)phosphoramidate
  modified_base 17: mod_base = OTHER; note = 2-O-methylribose adenine
  modified_base 17..18: mod_base = OTHER; note = S-phosphorothioate
  modified_base 18: mod_base = gm
  modified_base 18..19: mod_base = OTHER; note = S-phosphorothioate
  modified_base 19: mod_base = cm
  modified_base 19..20: mod_base = OTHER; note = S-phosphorothioate
  modified_base 20: mod_base = OTHER; note = 2-O-methylribose adenine
  modified_base 20..21: mod_base = OTHER; note = S-phosphorothioate
  modified_base 21: mod_base = OTHER; note = 2-O-methylribose adenine
  modified_base 21..22: mod_base = OTHER; note = S-phosphorothioate
  modified_base 22: mod_base = um
  modified_base 22..23: mod_base = OTHER; note = S-phosphorothioate
  modified_base 23: mod_base = gm
  modified_base 23..24: mod_base = OTHER; note = S-phosphorothioate
  modified_base 24: mod_base = OTHER; note = 2-fluororibose cytosine
  modified_base 24..25: mod_base = OTHER; note = S-phosphorothioate
  modified_base 25: mod_base = OTHER; note = deoxyribose cytosine
  modified_base 25..26: mod_base = OTHER; note = S-phosphorothioate
  modified_base 26: mod_base = OTHER; note = deoxyribose guanine
  modified_base 26..27: mod_base = OTHER; note R-N-(1,3-dimethylimidazolidin-2-ylidene)phosphoramidate
  modified_base 27: mod_base = um
  modified_base 27..28: mod_base = OTHER; note = S-phosphorothioate
  modified_base 28: mod_base = cm
  modified_base 28..29: mod_base = OTHER; note = S-phosphorothioate
  modified_base 29: mod_base = OTHER; note = 2-O-methylribose adenine
  modified_base 29..30: mod_base = OTHER; note R-N-(1,3-dimethylimidazolidin-2-ylidene)phosphoramidate
  modified_base 30: mod_base = cm
  source 1..30: mol_type = other RNA

SEQ ID NO: 42 - RNA, 30 nt, synthetic construct; identical to SEQ ID NO: 38
  misc_feature 1..30: note = Synthetic: WV-42349
  misc_feature 1..30: note = Synthetic: ADR-0102128
  modified_base 1: mod_base = OTHER; note = 2-fluororibose adenine
  modified_base 1..2: mod_base = OTHER; note R-N-(1,3-dimethylimidazolidin-2-ylidene)phosphoramidate
  modified_base 2: mod_base = OTHER; note = 2-fluororibose cytosine
  modified_base 2..3: mod_base = OTHER; note = S-phosphorothioate
  modified_base 3: mod_base = OTHER; note = 2-fluororibose adenine
  modified_base 3..4: mod_base = OTHER; note = S-phosphorothioate
  modified_base 4: mod_base = OTHER; note = 2-fluororibose uracil
  modified_base 4..5: mod_base = OTHER; note = S-phosphorothioate
  modified_base 5: mod_base = OTHER; note = 2-fluororibose adenine
  modified_base 5..6: mod_base = OTHER; note = S-phosphorothioate
  modified_base 6: mod_base = OTHER; note = 2-fluororibose adenine
  modified_base 6..7: mod_base = OTHER; note = S-phosphorothioate
  modified_base 7: mod_base = OTHER; note = 2-fluororibose uracil
  modified_base 7..8: mod_base = OTHER; note = S-phosphorothioate
  modified_base 8: mod_base = OTHER; note = 2-fluororibose uracil
  modified_base 8..9: mod_base = OTHER; note = S-phosphorothioate
  modified_base 9: mod_base = OTHER; note = 2-fluororibose uracil
  modified_base 9..10: mod_base = OTHER; note = S-phosphorothioate
  modified_base 10: mod_base = OTHER; note = 2-fluororibose adenine
  modified_base 10..11: mod_base = OTHER; note = S-phosphorothioate
  modified_base 11: mod_base = OTHER; note = 2-fluororibose cytosine
  modified_base 11..12: mod_base = OTHER; note = S-phosphorothioate
  modified_base 12: mod_base = OTHER; note = 2-fluororibose adenine
  modified_base 12..13: mod_base = OTHER; note = S-phosphorothioate
  modified_base 13: mod_base = OTHER; note = 2-fluororibose cytosine
  modified_base 13..14: mod_base = OTHER; note = S-phosphorothioate
  modified_base 14: mod_base = OTHER; note = 2-fluororibose guanine
  modified_base 14..15: mod_base = OTHER; note R-N-(1,3-dimethylimidazolidin-2-ylidene)phosphoramidate
  modified_base 15: mod_base = OTHER; note = 2-fluororibose adenine
  modified_base 15..16: mod_base = OTHER; note = S-phosphorothioate
  modified_base 16: mod_base = OTHER; note = 2-O-methylribose adenine
  modified_base 16..17: mod_base = OTHER; note R-N-(1,3-dimethylimidazolidin-2-ylidene)phosphoramidate
  modified_base 17: mod_base = OTHER; note = 2-O-methylribose adenine
  modified_base 17..18: mod_base = OTHER; note = S-phosphorothioate
  modified_base 18: mod_base = gm
  modified_base 18..19: mod_base = OTHER; note = S-phosphorothioate
  modified_base 19: mod_base = cm
  modified_base 19..20: mod_base = OTHER; note = S-phosphorothioate
  modified_base 20: mod_base = OTHER; note = 2-O-methylribose adenine
  modified_base 20..21: mod_base = OTHER; note = S-phosphorothioate
  modified_base 21: mod_base = OTHER; note = 2-O-methylribose adenine
  modified_base 21..22: mod_base = OTHER; note = S-phosphorothioate
  modified_base 22: mod_base = um
  modified_base 22..23: mod_base = OTHER; note = S-phosphorothioate
  modified_base 23: mod_base = gm
  modified_base 23..24: mod_base = OTHER; note = S-phosphorothioate
  modified_base 24: mod_base = OTHER; note = 2-fluororibose guanine
  modified_base 24..25: mod_base = OTHER; note = S-phosphorothioate
  modified_base 25: mod_base = OTHER; note = deoxyribose cytosine
  modified_base 25..26: mod_base = OTHER; note = S-phosphorothioate
  modified_base 26: mod_base = OTHER; note = deoxyribose guanine
  modified_base 26..27: mod_base = OTHER; note R-N-(1,3-dimethylimidazolidin-2-ylidene)phosphoramidate
  modified_base 27: mod_base = um
  modified_base 27..28: mod_base = OTHER; note = S-phosphorothioate
  modified_base 28: mod_base = cm
  modified_base 28..29: mod_base = OTHER; note = S-phosphorothioate
  modified_base 29: mod_base = OTHER; note = 2-O-methylribose adenine
  modified_base 29..30: mod_base = OTHER; note R-N-(1,3-dimethylimidazolidin-2-ylidene)phosphoramidate
  modified_base 30: mod_base = cm
  source 1..30: mol_type = other RNA

SEQ ID NO: 43 - RNA, 30 nt, synthetic construct; identical to SEQ ID NO: 5
  misc_feature 1..30: note = Synthetic: WV-37317
  misc_feature 1..30: note = Synthetic: ADR-0101520
  modified_base 1: mod_base = OTHER; note = 2-fluororibose adenine
  modified_base 1..2: mod_base = OTHER; note R-N-(1,3-dimethylimidazolidin-2-ylidene)phosphoramidate
  modified_base 2: mod_base = OTHER; note = 2-fluororibose cytosine
  modified_base 2..3: mod_base = OTHER; note = S-phosphorothioate
  modified_base 3: mod_base = OTHER; note = 2-fluororibose adenine
  modified_base 3..4: mod_base = OTHER; note = S-phosphorothioate
  modified_base 4: mod_base = OTHER; note = 2-fluororibose uracil
  modified_base 4..5: mod_base = OTHER; note = S-phosphorothioate
  modified_base 5: mod_base = OTHER; note = 2-fluororibose adenine
  modified_base 5..6: mod_base = OTHER; note = S-phosphorothioate
  modified_base 6: mod_base = OTHER; note = 2-fluororibose adenine
  modified_base 6..7: mod_base = OTHER; note = S-phosphorothioate
  modified_base 7: mod_base = OTHER; note = 2-fluororibose uracil
  modified_base 7..8: mod_base = OTHER; note = S-phosphorothioate
  modified_base 8: mod_base = OTHER; note = 2-fluororibose uracil
  modified_base 8..9: mod_base = OTHER; note = S-phosphorothioate
  modified_base 9: mod_base = OTHER; note = 2-fluororibose uracil
  modified_base 9..10: mod_base = OTHER; note = S-phosphorothioate
  modified_base 10: mod_base = OTHER; note = 2-fluororibose adenine
  modified_base 10..11: mod_base = OTHER; note = S-phosphorothioate
  modified_base 11: mod_base = OTHER; note = 2-fluororibose cytosine
  modified_base 11..12: mod_base = OTHER; note = S-phosphorothioate
  modified_base 12: mod_base = OTHER; note = 2-fluororibose adenine
  modified_base 12..13: mod_base = OTHER; note = S-phosphorothioate
  modified_base 13: mod_base = OTHER; note = 2-fluororibose cytosine
  modified_base 13..14: mod_base = OTHER; note = S-phosphorothioate
  modified_base 14: mod_base = OTHER; note = 2-fluororibose guanine
  modified_base 14..15: mod_base = OTHER; note R-N-(1,3-dimethylimidazolidin-2-ylidene)phosphoramidate
  modified_base 15: mod_base = OTHER; note = 2-fluororibose adenine
  modified_base 15..16: mod_base = OTHER; note = S-phosphorothioate
  modified_base 16: mod_base = OTHER; note = 2-O-methylribose adenine
  modified_base 16..17: mod_base = OTHER; note R-N-(1,3-dimethylimidazolidin-2-ylidene)phosphoramidate
  modified_base 17: mod_base = OTHER; note = 2-O-methylribose adenine
  modified_base 17..18: mod_base = OTHER; note = S-phosphorothioate
  modified_base 18: mod_base = gm
  modified_base 18..19: mod_base = OTHER; note = S-phosphorothioate
  modified_base 19: mod_base = cm
  modified_base 19..20: mod_base = OTHER; note = S-phosphorothioate
  modified_base 20: mod_base = OTHER; note = 2-O-methylribose adenine
  modified_base 20..21: mod_base = OTHER; note = S-phosphorothioate
  modified_base 21: mod_base = OTHER; note = 2-O-methylribose adenine
  modified_base 21..22: mod_base = OTHER; note = S-phosphorothioate
  modified_base 22: mod_base = um
  modified_base 22..23: mod_base = OTHER; note = S-phosphorothioate
  modified_base 23: mod_base = gm
  modified_base 23..24: mod_base = OTHER; note = S-phosphorothioate
  modified_base 24: mod_base = OTHER; note = 2-fluororibose cytosine
  modified_base 24..25: mod_base = OTHER; note = S-phosphorothioate
  modified_base 25: mod_base = OTHER; note = deoxyribose cytosine
  modified_base 25..26: mod_base = OTHER; note = S-phosphorothioate
  modified_base 26: mod_base = OTHER; note = deoxyribose adenine
  modified_base 26..27: mod_base = OTHER; note R-N-(1,3-dimethylimidazolidin-2-ylidene)phosphoramidate
  modified_base 27: mod_base = um
  modified_base 27..28: mod_base = OTHER; note = S-phosphorothioate
  modified_base 28: mod_base = cm
  modified_base 28..29: mod_base = OTHER; note = S-phosphorothioate
  modified_base 29: mod_base = OTHER; note = 2-O-methylribose adenine
  modified_base 29..30: mod_base = OTHER; note R-N-(1,3-dimethylimidazolidin-2-ylidene)phosphoramidate
  modified_base 30: mod_base = cm
  source 1..30: mol_type = other RNA

SEQ ID NO: 44 - RNA, 32 nt, synthetic construct
  misc_feature 1..32: note = Synthetic: WV-42715
  misc_feature 1..32: note = Synthetic: ADR-0102213
  modified_base 1: mod_base = OTHER; note = 2-O-methylribose adenine
  modified_base 1..2: mod_base = OTHER; note = phosphorothioate
  modified_base 2: mod_base = cm
  modified_base 2..3: mod_base = OTHER; note = phosphorothioate
  modified_base 3: mod_base = OTHER; note = 2-fluororibose adenine
  modified_base 3..4: mod_base = OTHER; note = phosphorothioate
  modified_base 4: mod_base = OTHER; note = 2-fluororibose uracil
  modified_base 5: mod_base = OTHER; note = 2-fluororibose adenine
  modified_base 6: mod_base = OTHER; note = 2-fluororibose adenine
  modified_base 7: mod_base = OTHER; note = 2-fluororibose uracil
  modified_base 8: mod_base = OTHER; note = 2-fluororibose uracil
  modified_base 9: mod_base = OTHER; note = 2-fluororibose uracil
  modified_base 10: mod_base = OTHER; note = 2-fluororibose adenine
  modified_base 11: mod_base = OTHER; note = 2-fluororibose cytosine
  modified_base 12: mod_base = OTHER; note = 2-fluororibose adenine
  modified_base 13: mod_base = OTHER; note = 2-fluororibose cytosine
  modified_base 14: mod_base = OTHER; note = 2-fluororibose guanine
  modified_base 15: mod_base = OTHER; note = 2-fluororibose adenine
  modified_base 16: mod_base = OTHER; note = 2-fluororibose adenine
  modified_base 17: mod_base = gm
  modified_base 18: mod_base = gm
  modified_base 19: mod_base = um
  modified_base 20: mod_base = um
  modified_base 21: mod_base = cm
  modified_base 22: mod_base = um
  modified_base 23: mod_base = OTHER; note = 2-O-methylribose adenine
  modified_base 24: mod_base = OTHER; note = 2-O-methylribose adenine
  modified_base 25: mod_base = OTHER; note = 2-O-methylribose adenine
  modified_base 26: mod_base = OTHER; note = deoxyribose cytosine
  modified_base 27: mod_base = OTHER; note = deoxyribose cytosine
  modified_base 28: mod_base = OTHER; note = deoxyribose adenine
  modified_base 29: mod_base = um
  modified_base 29..30: mod_base = OTHER; note = phosphorothioate
  modified_base 30: mod_base = cm
  modified_base 30..31: mod_base = OTHER; note = phosphorothioate
  modified_base 31: mod_base = cm
  modified_base 31..32: mod_base = OTHER; note = phosphorothioate
  modified_base 32: mod_base = um
  source 1..32: mol_type = other RNA
acataatttacacgaaggttctaaaccatcct

SEQ ID NO: 45 - RNA, 32 nt, synthetic construct; identical to SEQ ID NO: 44
  misc_feature 1..32: note = Synthetic: WV-42716
  misc_feature 1..32: note = Synthetic: ADR-0102211
  modified_base 1: mod_base = OTHER; note = 2-O-methylribose adenine
  modified_base 1..2: mod_base = OTHER; note = phosphorothioate
  modified_base 2: mod_base = cm
  modified_base 2..3: mod_base = OTHER; note = phosphorothioate
  modified_base 3: mod_base = OTHER; note = 2-fluororibose adenine
  modified_base 3..4: mod_base = OTHER; note = phosphorothioate
  modified_base 4: mod_base = OTHER; note = 2-fluororibose uracil
  modified_base 4..5: mod_base = OTHER; note = phosphorothioate
  modified_base 5: mod_base = OTHER; note = 2-fluororibose adenine
  modified_base 5..6: mod_base = OTHER; note = phosphorothioate
  modified_base 6: mod_base = OTHER; note = 2-fluororibose adenine
  modified_base 6..7: mod_base = OTHER; note = phosphorothioate
  modified_base 7: mod_base = OTHER; note = 2-fluororibose uracil
  modified_base 7..8: mod_base = OTHER; note = phosphorothioate
  modified_base 8: mod_base = OTHER; note = 2-fluororibose uracil
  modified_base 8..9: mod_base = OTHER; note = phosphorothioate
  modified_base 9: mod_base = OTHER; note = 2-fluororibose uracil
  modified_base 9..10: mod_base = OTHER; note = phosphorothioate
  modified_base 10: mod_base = OTHER; note = 2-fluororibose adenine
  modified_base 10..11: mod_base = OTHER; note = phosphorothioate
  modified_base 11: mod_base = OTHER; note = 2-fluororibose cytosine
  modified_base 11..12: mod_base = OTHER; note = phosphorothioate
  modified_base 12: mod_base = OTHER; note = 2-fluororibose adenine
  modified_base 12..13: mod_base = OTHER; note = phosphorothioate
  modified_base 13: mod_base = OTHER; note = 2-fluororibose cytosine
  modified_base 13..14: mod_base = OTHER; note = phosphorothioate
  modified_base 14: mod_base = OTHER; note = 2-fluororibose guanine
  modified_base 14..15: mod_base = OTHER; note = phosphorothioate
  modified_base 15: mod_base = OTHER; note = 2-fluororibose adenine
  modified_base 15..16: mod_base = OTHER; note = phosphorothioate
  modified_base 16: mod_base = OTHER; note = 2-fluororibose adenine
  modified_base 16..17: mod_base = OTHER; note = phosphorothioate
  modified_base 17: mod_base = gm
  modified_base 17..18: mod_base = OTHER; note = phosphorothioate
  modified_base 18: mod_base = gm
  modified_base 18..19: mod_base = OTHER; note = phosphorothioate
  modified_base 19: mod_base = um
  modified_base 19..20: mod_base = OTHER; note = phosphorothioate
  modified_base 20: mod_base = um
  modified_base 20..21: mod_base = OTHER; note = phosphorothioate
  modified_base 21: mod_base = cm
  modified_base 21..22: mod_base = OTHER; note = phosphorothioate
  modified_base 22: mod_base = um
  modified_base 22..23: mod_base = OTHER; note = phosphorothioate
  modified_base 23: mod_base = OTHER; note = 2-O-methylribose adenine
  modified_base 23..24: mod_base = OTHER; note = phosphorothioate
  modified_base 24: mod_base = OTHER; note = 2-O-methylribose adenine
  modified_base 24..25: mod_base = OTHER; note = phosphorothioate
  modified_base 25: mod_base = OTHER; note = 2-O-methylribose adenine
  modified_base 25..26: mod_base = OTHER; note = phosphorothioate
  modified_base 26: mod_base = OTHER; note = deoxyribose cytosine
  modified_base 26..27: mod_base = OTHER; note = phosphorothioate
  modified_base 27: mod_base = OTHER; note = deoxyribose cytosine
  modified_base 27..28: mod_base = OTHER; note = phosphorothioate
  modified_base 28: mod_base = OTHER; note = deoxyribose adenine
  modified_base 28..29: mod_base = OTHER; note = phosphorothioate
  modified_base 29: mod_base = um
  modified_base 29..30: mod_base = OTHER; note = phosphorothioate
  modified_base 30: mod_base = cm
  modified_base 30..31: mod_base = OTHER; note = phosphorothioate
  modified_base 31: mod_base = cm
  modified_base 31..32: mod_base = OTHER; note = phosphorothioate
  modified_base 32: mod_base = um
  source 1..32: mol_type = other RNA

SEQ ID NO: 46 - RNA, 32 nt, synthetic construct; identical to SEQ ID NO: 44
  misc_feature 1..32: note = Synthetic: WV-42717
  misc_feature 1..32: note = Synthetic: ADR-0102164
  modified_base 1: mod_base = OTHER; note = 2-O-methylribose adenine
  modified_base 1..2: mod_base = OTHER; note = S-phosphorothioate
  modified_base 2: mod_base = cm
  modified_base 2..3: mod_base = OTHER; note = S-phosphorothioate
  modified_base 3: mod_base = OTHER; note = 2-fluororibose adenine
  modified_base 3..4: mod_base = OTHER; note = S-phosphorothioate
  modified_base 4: mod_base = OTHER; note = 2-fluororibose uracil
  modified_base 4..5: mod_base = OTHER; note = S-phosphorothioate
  modified_base 5: mod_base = OTHER; note = 2-fluororibose adenine
  modified_base 5..6: mod_base = OTHER; note = S-phosphorothioate
  modified_base 6: mod_base = OTHER; note = 2-fluororibose adenine
  modified_base 6..7: mod_base = OTHER; note = S-phosphorothioate
  modified_base 7: mod_base = OTHER; note = 2-fluororibose uracil
  modified_base 7..8: mod_base = OTHER; note = S-phosphorothioate
  modified_base 8: mod_base = OTHER; note = 2-fluororibose uracil
  modified_base 8..9: mod_base = OTHER; note = S-phosphorothioate
  modified_base 9: mod_base = OTHER; note = 2-fluororibose uracil
  modified_base 9..10: mod_base = OTHER; note = S-phosphorothioate
  modified_base 10: mod_base = OTHER; note = 2-fluororibose adenine
  modified_base 10..11: mod_base = OTHER; note = S-phosphorothioate
  modified_base 11: mod_base = OTHER; note = 2-fluororibose cytosine
  modified_base 11..12: mod_base = OTHER; note = S-phosphorothioate
  modified_base 12: mod_base = OTHER; note = 2-fluororibose adenine
  modified_base 12..13: mod_base = OTHER; note = S-phosphorothioate
  modified_base 13: mod_base = OTHER; note = 2-fluororibose cytosine
  modified_base 13..14: mod_base = OTHER; note = S-phosphorothioate
  modified_base 14: mod_base = OTHER; note = 2-fluororibose guanine
  modified_base 14..15: mod_base = OTHER; note = S-phosphorothioate
  modified_base 15: mod_base = OTHER; note = 2-fluororibose adenine
  modified_base 15..16: mod_base = OTHER; note = S-phosphorothioate
  modified_base 16: mod_base = OTHER; note = 2-fluororibose adenine
  modified_base 16..17: mod_base = OTHER; note = S-phosphorothioate
  modified_base 17: mod_base = gm
  modified_base 17..18: mod_base = OTHER; note = S-phosphorothioate
  modified_base 18: mod_base = gm
  modified_base 18..19: mod_base = OTHER; note = S-phosphorothioate
  modified_base 19: mod_base = um
  modified_base 19..20: mod_base = OTHER; note = S-phosphorothioate
  modified_base 20: mod_base = um
  modified_base 20..21: mod_base = OTHER; note = S-phosphorothioate
  modified_base 21: mod_base = cm
  modified_base 21..22: mod_base = OTHER; note = S-phosphorothioate
  modified_base 22: mod_base = um
  modified_base 22..23: mod_base = OTHER; note = S-phosphorothioate
  modified_base 23: mod_base = OTHER; note = 2-O-methylribose adenine
  modified_base 23..24: mod_base = OTHER; note = S-phosphorothioate
  modified_base 24: mod_base = OTHER; note = 2-O-methylribose adenine
  modified_base 24..25: mod_base = OTHER; note = S-phosphorothioate
  modified_base 25: mod_base = OTHER; note = 2-O-methylribose adenine
  modified_base 25..26: mod_base = OTHER; note = S-phosphorothioate
  modified_base 26: mod_base = OTHER; note = deoxyribose cytosine
  modified_base 26..27: mod_base = OTHER; note = S-phosphorothioate
  modified_base 27: mod_base = OTHER; note = deoxyribose cytosine
  modified_base 27..28: mod_base = OTHER; note = S-phosphorothioate
  modified_base 28: mod_base = OTHER; note = deoxyribose adenine
  modified_base 28..29: mod_base = OTHER; note = S-phosphorothioate
  modified_base 29: mod_base = um
  modified_base 29..30: mod_base = OTHER; note = S-phosphorothioate
  modified_base 30: mod_base = cm
  modified_base 30..31: mod_base = OTHER; note = S-phosphorothioate
  modified_base 31: mod_base = cm
  modified_base 31..32: mod_base = OTHER; note = S-phosphorothioate
  modified_base 32: mod_base = um
  source 1..32: mol_type = other RNA

SEQ ID NO: 47 - RNA, 32 nt, synthetic construct; identical to SEQ ID NO: 44
  misc_feature 1..32: note = Synthetic: WV-42718
  misc_feature 1..32: note = Synthetic: ADR-0102165
  modified_base 1: mod_base = OTHER; note = 2-O-methylribose adenine
  modified_base 1..2: mod_base = OTHER; note = S-phosphorothioate
  modified_base 2: mod_base = cm
  modified_base 2..3: mod_base = OTHER; note = S-phosphorothioate
  modified_base 3: mod_base = OTHER; note = 2-fluororibose adenine
  modified_base 3..4: mod_base = OTHER; note = S-phosphorothioate
  modified_base 4: mod_base = OTHER; note = 2-fluororibose uracil
  modified_base 4..5: mod_base = OTHER; note = S-phosphorothioate
  modified_base 5: mod_base = OTHER; note = 2-fluororibose adenine
  modified_base 5..6: mod_base = OTHER; note = S-phosphorothioate
  modified_base 6: mod_base = OTHER; note = 2-fluororibose adenine
  modified_base 6..7: mod_base = OTHER; note = S-phosphorothioate
  modified_base 7: mod_base = OTHER; note = 2-fluororibose uracil
  modified_base 7..8: mod_base = OTHER; note = S-phosphorothioate
  modified_base 8: mod_base = OTHER; note = 2-fluororibose uracil
  modified_base 8..9: mod_base = OTHER; note = S-phosphorothioate
  modified_base 9: mod_base = OTHER; note = 2-fluororibose uracil
  modified_base 9..10: mod_base = OTHER; note = S-phosphorothioate
  modified_base 10: mod_base = OTHER; note = 2-fluororibose adenine
  modified_base 10..11: mod_base = OTHER; note = S-phosphorothioate
  modified_base 11: mod_base = OTHER; note = 2-fluororibose cytosine
  modified_base 11..12: mod_base = OTHER; note = S-phosphorothioate
  modified_base 12: mod_base = OTHER; note = 2-fluororibose adenine
  modified_base 12..13: mod_base = OTHER; note = S-phosphorothioate
  modified_base 13: mod_base = OTHER; note = 2-fluororibose cytosine
  modified_base 13..14: mod_base = OTHER; note = S-phosphorothioate
  modified_base 14: mod_base = OTHER; note = 2-fluororibose guanine
  modified_base 14..15: mod_base = OTHER; note = S-phosphorothioate
  modified_base 15: mod_base = OTHER; note = 2-fluororibose adenine
  modified_base 15..16: mod_base = OTHER; note = S-phosphorothioate
  modified_base 16: mod_base = OTHER; note = 2-fluororibose adenine
  modified_base 16..17: mod_base = OTHER; note = S-phosphorothioate
  modified_base 17: mod_base = gm
  modified_base 17..18: mod_base = OTHER; note = S-phosphorothioate
  modified_base 18: mod_base = gm
  modified_base 18..19: mod_base = OTHER; note = S-phosphorothioate
  modified_base 19: mod_base = um
  modified_base 19..20: mod_base = OTHER; note = S-phosphorothioate
  modified_base 20: mod_base = um
  modified_base 20..21: mod_base = OTHER; note = S-phosphorothioate
  modified_base 21: mod_base = cm
  modified_base 21..22: mod_base = OTHER; note = S-phosphorothioate
  modified_base 22: mod_base = um
  modified_base 22..23: mod_base = OTHER; note = S-phosphorothioate
  modified_base 23: mod_base = OTHER; note = 2-O-methylribose adenine
  modified_base 23..24: mod_base = OTHER; note = S-phosphorothioate
  modified_base 24: mod_base = OTHER; note = 2-O-methylribose adenine
  modified_base 24..25: mod_base = OTHER; note = S-phosphorothioate
  modified_base 25: mod_base = OTHER; note = 2-O-methylribose adenine
  modified_base 25..26: mod_base = OTHER; note = S-phosphorothioate
  modified_base 26: mod_base = OTHER; note = deoxyribose cytosine
  modified_base 26..27: mod_base = OTHER; note = S-phosphorothioate
  modified_base 27: mod_base = OTHER; note = deoxyribose cytosine
  modified_base 27..28: mod_base = OTHER; note = S-phosphorothioate
  modified_base 28: mod_base = OTHER; note = deoxyribose adenine
  modified_base 28..29: mod_base = OTHER; note R-N-(1,3-dimethylimidazolidin-2-ylidene)phosphoramidate
  modified_base 29: mod_base = um
  modified_base 29..30: mod_base = OTHER; note = S-phosphorothioate
  modified_base 30: mod_base = cm
  modified_base 30..31: mod_base = OTHER; note = S-phosphorothioate
  modified_base 31: mod_base = cm
  modified_base 31..32: mod_base = OTHER; note R-N-(1,3-dimethylimidazolidin-2-ylidene)phosphoramidate
  modified_base 32: mod_base = um
  source 1..32: mol_type = other RNA

SEQ ID NO: 48 - RNA, 18 nt, synthetic construct
  misc_feature 1..18: note = Synthetic: WV-42719
  misc_feature 1..18: note = Synthetic: ADR-0102241
  modified_base 1: mod_base = cm
  modified_base 1..2: mod_base = OTHER; note = phosphorothioate
  modified_base 2: mod_base = um
  modified_base 2..3: mod_base = OTHER; note = phosphorothioate
  modified_base 3: mod_base = um
  modified_base 4: mod_base = um
  modified_base 5: mod_base = cm
  modified_base 6: mod_base = gm
  modified_base 7: mod_base = um
  modified_base 8: mod_base = gm
  modified_base 9: mod_base = um
  modified_base 10: mod_base = OTHER; note = 2-O-methylribose adenine
  modified_base 11: mod_base = OTHER; note = 2-O-methylribose adenine
  modified_base 12: mod_base = OTHER; note = 2-O-methylribose adenine
  modified_base 13: mod_base = um
  modified_base 14: mod_base = um
  modified_base 14..15: mod_base = OTHER; note = phosphorothioate
  modified_base 15: mod_base = OTHER; note = 2-O-methylribose adenine
  modified_base 15..16: mod_base = OTHER; note = phosphorothioate
  modified_base 16: mod_base = um
  modified_base 16..17: mod_base = OTHER; note = phosphorothioate
  modified_base 17: mod_base = gm
  modified_base 17..18: mod_base = OTHER; note = phosphorothioate
  modified_base 18: mod_base = um
  source 1..18: mol_type = other RNA
ctttcgtgtaaattatgt

SEQ ID NO: 49 - RNA, 18 nt, synthetic construct
  misc_feature 1..18: note = Synthetic: WV-42720
  misc_feature 1..18: note = Synthetic: ADR-0102155
  modified_base 1: mod_base = OTHER; note = 2-fluororibose cytosine
  modified_base 1..2: mod_base = OTHER; note = phosphorothioate
  modified_base 2: mod_base = OTHER; note = 2-fluororibose uracil
  modified_base 2..3: mod_base = OTHER; note = phosphorothioate
  modified_base 3: mod_base = OTHER; note = 2-fluororibose uracil
  modified_base 4: mod_base = OTHER; note = 2-fluororibose uracil
  modified_base 5: mod_base = OTHER; note = 2-fluororibose cytosine
  modified_base 6: mod_base = OTHER; note = 2-fluororibose guanine
  modified_base 7: mod_base = OTHER; note = 2-fluororibose uracil
  modified_base 8: mod_base = OTHER; note = 2-fluororibose guanine
  modified_base 9: mod_base = OTHER; note = 2-fluororibose uracil
  modified_base 10: mod_base = OTHER; note = 2-fluororibose adenine
  modified_base 11: mod_base = OTHER; note = 2-fluororibose adenine
  modified_base 12: mod_base = OTHER; note = 2-fluororibose adenine
  modified_base 13: mod_base = OTHER; note = 2-fluororibose uracil
  modified_base 14: mod_base = OTHER; note = 2-fluororibose uracil
  modified_base 15: mod_base = OTHER; note = 2-fluororibose adenine
  modified_base 15..16: mod_base = OTHER; note = phosphorothioate
  modified_base 16: mod_base = OTHER; note = 2-fluororibose uracil
  modified_base 16..17: mod_base = OTHER; note = phosphorothioate
  modified_base 17: mod_base = OTHER; note = 2-fluororibose guanine
  modified_base 17..18: mod_base = OTHER; note = phosphorothioate
  modified_base 18: mod_base = OTHER; note = 2-fluororibose uracil
  source 1..18: mol_type = other RNA
ctttcgtgtaaattatgt

SEQ ID NO: 50 - RNA, 18 nt, synthetic construct
  misc_feature 1..18: note = Synthetic: WV-42721
  misc_feature 1..18: note = Synthetic: ADR-0102240
  modified_base 1: mod_base = cm
  modified_base 1..2: mod_base = OTHER; note = phosphorothioate
  modified_base 2: mod_base = um
  modified_base 2..3: mod_base = OTHER; note = phosphorothioate
  modified_base 3: mod_base = um
  modified_base 3..4: mod_base = OTHER; note = phosphorothioate
  modified_base 4: mod_base = um
  modified_base 4..5: mod_base = OTHER; note = phosphorothioate
  modified_base 5: mod_base = cm
  modified_base 5..6: mod_base = OTHER; note = phosphorothioate
  modified_base 6: mod_base = gm
  modified_base 6..7: mod_base = OTHER; note = phosphorothioate
  modified_base 7: mod_base = um
  modified_base 7..8: mod_base = OTHER; note = phosphorothioate
  modified_base 8: mod_base = gm
  modified_base 8..9: mod_base = OTHER; note = phosphorothioate
  modified_base 9: mod_base = um
  modified_base 9..10: mod_base = OTHER; note = phosphorothioate
  modified_base 10: mod_base = OTHER; note = 2-O-methylribose adenine
  modified_base 10..11: mod_base = OTHER; note = phosphorothioate
  modified_base 11: mod_base = OTHER; note = 2-O-methylribose adenine
  modified_base 11..12: mod_base = OTHER; note = phosphorothioate
  modified_base 12: mod_base = OTHER; note = 2-O-methylribose adenine
  modified_base 12..13: mod_base = OTHER; note = phosphorothioate
  modified_base 13: mod_base = um
  modified_base 13..14: mod_base = OTHER; note = phosphorothioate
  modified_base 14: mod_base = um
  modified_base 14..15: mod_base = OTHER; note = phosphorothioate
  modified_base 15: mod_base = OTHER; note = 2-O-methylribose adenine
  modified_base 15..16: mod_base = OTHER; note = phosphorothioate
  modified_base 16: mod_base = um
  modified_base 16..17: mod_base = OTHER; note = phosphorothioate
  modified_base 17: mod_base = gm
  modified_base 17..18: mod_base = OTHER; note = phosphorothioate
  modified_base 18: mod_base = um
  source 1..18: mol_type = other RNA
ctttcgtgtaaattatgt

SEQ ID NO: 51 - RNA, 18 nt, synthetic construct
  misc_feature 1..18: note = Synthetic: WV-42722
  misc_feature 1..18: note = Synthetic: ADR-0102154
  modified_base 1: mod_base = OTHER; note = 2-fluororibose cytosine
  modified_base 1..2: mod_base = OTHER; note = phosphorothioate
  modified_base 2: mod_base = OTHER; note = 2-fluororibose uracil
  modified_base 2..3: mod_base = OTHER; note = phosphorothioate
  modified_base 3: mod_base = OTHER; note = 2-fluororibose uracil
  modified_base 3..4: mod_base = OTHER; note = phosphorothioate
  modified_base 4: mod_base = OTHER; note = 2-fluororibose uracil
  modified_base 4..5: mod_base = OTHER; note = phosphorothioate
  modified_base 5: mod_base = OTHER; note = 2-fluororibose cytosine
  modified_base 5..6: mod_base = OTHER; note = phosphorothioate
  modified_base 6: mod_base = OTHER; note = 2-fluororibose guanine
  modified_base 6..7: mod_base = OTHER; note = phosphorothioate
  modified_base 7: mod_base = OTHER; note = 2-fluororibose uracil
  modified_base 7..8: mod_base = OTHER; note = phosphorothioate
  modified_base 8: mod_base = OTHER; note = 2-fluororibose guanine
  modified_base 8..9: mod_base = OTHER; note = phosphorothioate
  modified_base 9: mod_base = OTHER; note = 2-fluororibose uracil
  modified_base 9..10: mod_base = OTHER; note = phosphorothioate
  modified_base 10: mod_base = OTHER; note = 2-fluororibose adenine
  modified_base 10..11: mod_base = OTHER; note = phosphorothioate
  modified_base 11: mod_base = OTHER; note = 2-fluororibose adenine
  modified_base 11..12: mod_base = OTHER; note = phosphorothioate
  modified_base 12: mod_base = OTHER; note = 2-fluororibose adenine
  modified_base 12..13: mod_base = OTHER; note = phosphorothioate
  modified_base 13: mod_base = OTHER; note = 2-fluororibose uracil
  modified_base 13..14: mod_base = OTHER; note = phosphorothioate
  modified_base 14: mod_base = OTHER; note = 2-fluororibose uracil
  modified_base 14..15: mod_base = OTHER; note = phosphorothioate
  modified_base 15: mod_base = OTHER; note = 2-fluororibose adenine
  modified_base 15..16: mod_base = OTHER; note = phosphorothioate
  modified_base 16: mod_base = OTHER; note = 2-fluororibose uracil
  modified_base 16..17: mod_base = OTHER; note = phosphorothioate
  modified_base 17: mod_base = OTHER; note = 2-fluororibose guanine
  modified_base 17..18: mod_base = OTHER; note = phosphorothioate
  modified_base 18: mod_base = OTHER; note = 2-fluororibose uracil
  source 1..18: mol_type = other RNA
ctttcgtgtaaattatgt

SEQ ID NO: 52 - RNA, 18 nt, synthetic construct
  misc_feature 1..18: note = Synthetic: WV-42723
  misc_feature 1..18: note = Synthetic: ADR-0102214
  modified_base 1: mod_base = cm
  modified_base 1..2: mod_base = OTHER; note = S-phosphorothioate
  modified_base 2: mod_base = um
  modified_base 2..3: mod_base = OTHER; note = S-phosphorothioate
  modified_base 3: mod_base = um
  modified_base 3..4: mod_base = OTHER; note = S-phosphorothioate
  modified_base 4: mod_base = um
  modified_base 4..5: mod_base = OTHER; note = S-phosphorothioate
  modified_base 5: mod_base = cm
  modified_base 5..6: mod_base = OTHER; note = S-phosphorothioate
  modified_base 6: mod_base = gm
  modified_base 6..7: mod_base = OTHER; note = S-phosphorothioate
  modified_base 7: mod_base = um
  modified_base 7..8: mod_base = OTHER; note = S-phosphorothioate
  modified_base 8: mod_base = gm
  modified_base 8..9: mod_base = OTHER; note = S-phosphorothioate
  modified_base 9: mod_base = um
  modified_base 9..10: mod_base = OTHER; note = S-phosphorothioate
  modified_base 10: mod_base = OTHER; note = 2-O-methylribose adenine
  modified_base 10..11: mod_base = OTHER; note = S-phosphorothioate
  modified_base 11: mod_base = OTHER; note = 2-O-methylribose adenine
  modified_base 11..12: mod_base = OTHER; note = S-phosphorothioate
  modified_base 12: mod_base = OTHER; note = 2-O-methylribose adenine
  modified_base 12..13: mod_base = OTHER; note = S-phosphorothioate
  modified_base 13: mod_base = um
  modified_base 13..14: mod_base = OTHER; note = S-phosphorothioate
  modified_base 14: mod_base = um
  modified_base 14..15: mod_base = OTHER; note = S-phosphorothioate
  modified_base 15: mod_base = OTHER; note = 2-O-methylribose adenine
  modified_base 15..16: mod_base = OTHER; note = S-phosphorothioate
  modified_base 16: mod_base = um
  modified_base 16..17: mod_base = OTHER; note = S-phosphorothioate
  modified_base 17: mod_base = gm
  modified_base 17..18: mod_base = OTHER; note = S-phosphorothioate
  modified_base 18: mod_base = um
  source 1..18: mol_type = other RNA
ctttcgtgtaaattatgt

SEQ ID NO: 53 - RNA, 18 nt, synthetic construct
  misc_feature 1..18: note = Synthetic: WV-42724
  misc_feature 1..18: note = Synthetic: ADR-0102144
  modified_base 1: mod_base = OTHER; note = 2-fluororibose cytosine
  modified_base 1..2: mod_base = OTHER; note = S-phosphorothioate
  modified_base 2: mod_base = OTHER; note = 2-fluororibose uracil
  modified_base 2..3: mod_base = OTHER; note = S-phosphorothioate
  modified_base 3: mod_base = OTHER; note = 2-fluororibose uracil
  modified_base 3..4: mod_base = OTHER; note = S-phosphorothioate
  modified_base 4: mod_base = OTHER; note = 2-fluororibose uracil
  modified_base 4..5: mod_base = OTHER; note = S-phosphorothioate
  modified_base 5: mod_base = OTHER; note = 2-fluororibose cytosine
  modified_base 5..6: mod_base = OTHER; note = S-phosphorothioate
  modified_base 6: mod_base = OTHER; note = 2-fluororibose guanine
  modified_base 6..7: mod_base = OTHER; note = S-phosphorothioate
  modified_base 7: mod_base = OTHER; note = 2-fluororibose uracil
  modified_base 7..8: mod_base = OTHER; note = S-phosphorothioate
  modified_base 8: mod_base = OTHER; note = 2-fluororibose guanine
  modified_base 8..9: mod_base = OTHER; note = S-phosphorothioate
  modified_base 9: mod_base = OTHER; note = 2-fluororibose uracil
  modified_base 9..10: mod_base = OTHER; note = S-phosphorothioate
  modified_base 10: mod_base = OTHER; note = 2-fluororibose adenine
  modified_base 10..11: mod_base = OTHER; note = S-phosphorothioate
  modified_base 11: mod_base = OTHER; note = 2-fluororibose adenine
  modified_base 11..12: mod_base = OTHER; note = S-phosphorothioate
  modified_base 12: mod_base = OTHER; note = 2-fluororibose adenine
  modified_base 12..13: mod_base = OTHER; note = S-phosphorothioate
  modified_base 13: mod_base = OTHER; note = 2-fluororibose uracil
  modified_base 13..14: mod_base = OTHER; note = S-phosphorothioate
  modified_base 14: mod_base = OTHER; note = 2-fluororibose uracil
  modified_base 14..15: mod_base = OTHER; note = S-phosphorothioate
  modified_base 15: mod_base = OTHER; note = 2-fluororibose adenine
  modified_base 15..16: mod_base = OTHER; note = S-phosphorothioate
  modified_base 16: mod_base = OTHER; note = 2-fluororibose uracil
  modified_base 16..17: mod_base = OTHER; note = S-phosphorothioate
  modified_base 17: mod_base = OTHER; note = 2-fluororibose guanine
  modified_base 17..18: mod_base = OTHER; note = S-phosphorothioate
  modified_base 18: mod_base = OTHER; note = 2-fluororibose uracil
  source 1..18: mol_type = other RNA
ctttcgtgtaaattatgt

SEQ ID NO: 54 - RNA, 16 nt, synthetic construct
  misc_feature 1..16: note = Synthetic: WV-42725
  misc_feature 1..16: note = Synthetic: ADR-0102244
  modified_base 1: mod_base = um
  modified_base 1..2: mod_base = OTHER; note = phosphorothioate
  modified_base 2: mod_base = um
  modified_base 2..3: mod_base = OTHER; note = phosphorothioate
  modified_base 3: mod_base = cm
  modified_base 4: mod_base = gm
  modified_base 5: mod_base = um
  modified_base 6: mod_base = gm
  modified_base 7: mod_base = um
  modified_base 8: mod_base = OTHER; note = 2-O-methylribose adenine
  modified_base 9: mod_base = OTHER; note = 2-O-methylribose adenine
  modified_base 10: mod_base = OTHER; note = 2-O-methylribose adenine
  modified_base 11: mod_base = um
  modified_base 12: mod_base = um
  modified_base 13: mod_base = OTHER; note = 2-O-methylribose adenine
  modified_base 13..14: mod_base = OTHER; note = phosphorothioate
  modified_base 14: mod_base = um
  modified_base 14..15: mod_base = OTHER; note = phosphorothioate
  modified_base 15: mod_base = gm
  modified_base 15..16: mod_base = OTHER; note = phosphorothioate
  modified_base 16: mod_base = um
  source 1..16: mol_type = other RNA
ttcgtgtaaattatgt

SEQ ID NO: 55 - RNA, 16 nt, synthetic construct
  misc_feature 1..16: note = Synthetic: WV-42726
  misc_feature 1..16: note = Synthetic: ADR-0102161
  modified_base 1: mod_base = OTHER; note = 2-fluororibose uracil
  modified_base 1..2: mod_base = OTHER; note = phosphorothioate
  modified_base 2: mod_base = OTHER; note = 2-fluororibose uracil
  modified_base 2..3: mod_base = OTHER; note = phosphorothioate
  modified_base 3: mod_base = OTHER; note = 2-fluororibose cytosine
  modified_base 4: mod_base = OTHER; note = 2-fluororibose guanine
  modified_base 5: mod_base = OTHER; note = 2-fluororibose uracil
  modified_base 6: mod_base = OTHER; note = 2-fluororibose guanine
  modified_base 7: mod_base = OTHER; note = 2-fluororibose uracil
  modified_base 8: mod_base = OTHER; note = 2-fluororibose adenine
  modified_base 9: mod_base = OTHER; note = 2-fluororibose adenine
  modified_base 10: mod_base = OTHER; note = 2-fluororibose adenine
  modified_base 11: mod_base = OTHER; note = 2-fluororibose uracil
  modified_base 12: mod_base = OTHER; note = 2-fluororibose uracil
  modified_base 13: mod_base = OTHER; note = 2-fluororibose adenine
  modified_base 13..14: mod_base = OTHER; note = phosphorothioate
  modified_base 14: mod_base = OTHER; note = 2-fluororibose uracil
  modified_base 14..15: mod_base = OTHER; note = phosphorothioate
  modified_base 15: mod_base = OTHER; note = 2-fluororibose guanine
  modified_base 15..16: mod_base = OTHER; note = phosphorothioate
  modified_base 16: mod_base = OTHER; note = 2-fluororibose uracil
  source 1..16: mol_type = other RNA
ttcgtgtaaattatgt

SEQ ID NO: 56 - RNA, 16 nt, synthetic construct
  misc_feature 1..16: note = Synthetic: WV-42727
  misc_feature 1..16: note = Synthetic: ADR-0102243
  modified_base 1: mod_base = um
  modified_base 1..2: mod_base = OTHER; note = phosphorothioate
  modified_base 2: mod_base = um
  modified_base 2..3: mod_base = OTHER; note = phosphorothioate
  modified_base 3: mod_base = cm
  modified_base 3..4: mod_base = OTHER; note = phosphorothioate
  modified_base 4: mod_base = gm
  modified_base 4..5: mod_base = OTHER; note = phosphorothioate
  modified_base 5: mod_base = um
  modified_base 5..6: mod_base = OTHER; note = phosphorothioate
  modified_base 6: mod_base = gm
  modified_base 6..7: mod_base = OTHER; note = phosphorothioate
  modified_base 7: mod_base = um
  modified_base 7..8: mod_base = OTHER; note = phosphorothioate
  modified_base 8: mod_base = OTHER; note = 2-O-methylribose adenine
  modified_base 8..9: mod_base = OTHER; note = phosphorothioate
  modified_base 9: mod_base = OTHER; note = 2-O-methylribose adenine
  modified_base 9..10: mod_base = OTHER; note = phosphorothioate
  modified_base 10: mod_base = OTHER; note = 2-O-methylribose adenine
  modified_base 10..11: mod_base = OTHER; note = phosphorothioate
  modified_base 11: mod_base = um
  modified_base 11..12: mod_base = OTHER; note = phosphorothioate
  modified_base 12: mod_base = um
  modified_base 12..13: mod_base = OTHER; note = phosphorothioate
  modified_base 13: mod_base = OTHER; note = 2-O-methylribose adenine
  modified_base 13..14: mod_base = OTHER; note = phosphorothioate
  modified_base 14: mod_base = um
  modified_base 14..15: mod_base = OTHER; note = phosphorothioate
  modified_base 15: mod_base = gm
  modified_base 15..16: mod_base = OTHER; note = phosphorothioate
  modified_base 16: mod_base = um
  source 1..16: mol_type = other RNA
ttcgtgtaaattatgt

SEQ ID NO: 57 - RNA, 16 nt, synthetic construct
  misc_feature 1..16: note = Synthetic: WV-42728
  misc_feature 1..16: note = Synthetic: ADR-0102160
  modified_base 1: mod_base = OTHER; note = 2-fluororibose uracil
  modified_base 1..2: mod_base = OTHER; note = phosphorothioate
  modified_base 2: mod_base = OTHER; note = 2-fluororibose uracil
  modified_base 2..3: mod_base = OTHER; note = phosphorothioate
  modified_base 3: mod_base = OTHER; note = 2-fluororibose cytosine
  modified_base 3..4: mod_base = OTHER; note = phosphorothioate
  modified_base 4: mod_base = OTHER; note = 2-fluororibose guanine
  modified_base 4..5: mod_base = OTHER; note = phosphorothioate
  modified_base 5: mod_base = OTHER; note = 2-fluororibose uracil
  modified_base 5..6: mod_base = OTHER; note = phosphorothioate
  modified_base 6: mod_base = OTHER; note = 2-fluororibose guanine
  modified_base 6..7: mod_base = OTHER; note = phosphorothioate
  modified_base 7: mod_base = OTHER; note = 2-fluororibose uracil
  modified_base 7..8: mod_base = OTHER; note = phosphorothioate
  modified_base 8: mod_base = OTHER; note = 2-fluororibose adenine
  modified_base 8..9: mod_base = OTHER; note = phosphorothioate
  modified_base 9: mod_base = OTHER; note = 2-fluororibose adenine
  modified_base 9..10: mod_base = OTHER; note = phosphorothioate
  modified_base 10: mod_base = OTHER; note = 2-fluororibose adenine
  modified_base 10..11: mod_base = OTHER; note = phosphorothioate
  modified_base 11: mod_base = OTHER; note = 2-fluororibose uracil
  modified_base 11..12: mod_base = OTHER; note = phosphorothioate
  modified_base 12: mod_base = OTHER; note = 2-fluororibose uracil
  modified_base 12..13: mod_base = OTHER; note = phosphorothioate
  modified_base 13: mod_base = OTHER; note = 2-fluororibose adenine
  modified_base 13..14: mod_base = OTHER; note = phosphorothioate
  modified_base 14: mod_base = OTHER; note = 2-fluororibose uracil
  modified_base 14..15: mod_base = OTHER; note = phosphorothioate
  modified_base 15: mod_base = OTHER; note = 2-fluororibose guanine
  modified_base 15..16: mod_base = OTHER; note = phosphorothioate
  modified_base 16: mod_base = OTHER; note = 2-fluororibose uracil
  source 1..16: mol_type = other RNA
ttcgtgtaaattatgt

SEQ ID NO: 58 - RNA, 16 nt, synthetic construct
  misc_feature 1..16: note = Synthetic: WV-42729
  misc_feature 1..16: note = Synthetic: ADR-0102242
  modified_base 1: mod_base = um
  modified_base 1..2: mod_base = OTHER; note = S-phosphorothioate
  modified_base 2: mod_base = um
  modified_base 2..3: mod_base = OTHER; note = S-phosphorothioate
  modified_base 3: mod_base = cm
  modified_base 3..4: mod_base = OTHER; note = S-phosphorothioate
  modified_base 4: mod_base = gm
  modified_base 4..5: mod_base = OTHER; note = S-phosphorothioate
  modified_base 5: mod_base = um
  modified_base 5..6: mod_base = OTHER; note = S-phosphorothioate
  modified_base 6: mod_base = gm
  modified_base 6..7: mod_base = OTHER; note = S-phosphorothioate
  modified_base 7: mod_base = um
  modified_base 7..8: mod_base = OTHER; note = S-phosphorothioate
  modified_base 8: mod_base = OTHER; note = 2-O-methylribose adenine
  modified_base 8..9: mod_base = OTHER; note = S-phosphorothioate
  modified_base 9: mod_base = OTHER; note = 2-O-methylribose adenine
  modified_base 9..10: mod_base = OTHER; note = S-phosphorothioate
  modified_base 10: mod_base = OTHER; note = 2-O-methylribose adenine
  modified_base 10..11: mod_base = OTHER; note = S-phosphorothioate
  modified_base 11: mod_base = um
  modified_base 11..12: mod_base = OTHER; note = S-phosphorothioate
  modified_base 12: mod_base = um
  modified_base 12..13: mod_base = OTHER; note = S-phosphorothioate
  modified_base 13: mod_base = OTHER; note = 2-O-methylribose adenine
  modified_base 13..14: mod_base = OTHER; note = S-phosphorothioate
  modified_base 14: mod_base = um
  modified_base 14..15: mod_base = OTHER; note = S-phosphorothioate
  modified_base 15: mod_base = gm
  modified_base 15..16: mod_base = OTHER; note = S-phosphorothioate
  modified_base 16: mod_base = um
  source 1..16: mol_type = other RNA
ttcgtgtaaattatgt

SEQ ID NO: 59 - RNA, 16 nt, synthetic construct
  misc_feature 1..16: note = Synthetic: WV-42730
  misc_feature 1..16: note = Synthetic: ADR-0102157
  modified_base 1: mod_base = OTHER; note = 2-fluororibose uracil
  modified_base 1..2: mod_base = OTHER; note = S-phosphorothioate
  modified_base 2: mod_base = OTHER; note = 2-fluororibose uracil
  modified_base 2..3: mod_base = OTHER; note = S-phosphorothioate
  modified_base 3: mod_base = OTHER; note = 2-fluororibose cytosine
  modified_base 3..4: mod_base = OTHER; note = S-phosphorothioate
  modified_base 4: mod_base = OTHER; note = 2-fluororibose guanine
  modified_base 4..5: mod_base = OTHER; note = S-phosphorothioate
  modified_base 5: mod_base = OTHER; note = 2-fluororibose uracil
  modified_base 5..6: mod_base = OTHER; note = S-phosphorothioate
  modified_base 6: mod_base = OTHER; note = 2-fluororibose guanine
  modified_base 6..7: mod_base = OTHER; note = S-phosphorothioate
  modified_base 7: mod_base = OTHER; note = 2-fluororibose uracil
  modified_base 7..8: mod_base = OTHER; note = S-phosphorothioate
  modified_base 8: mod_base = OTHER; note = 2-fluororibose adenine
  modified_base 8..9: mod_base = OTHER; note = S-phosphorothioate
  modified_base 9: mod_base = OTHER; note = 2-fluororibose adenine
  modified_base 9..10: mod_base = OTHER; note = S-phosphorothioate
  modified_base 10: mod_base = OTHER; note = 2-fluororibose adenine
  modified_base 10..11: mod_base = OTHER; note = S-phosphorothioate
  modified_base 11: mod_base = OTHER; note = 2-fluororibose uracil
  modified_base 11..12: mod_base = OTHER; note = S-phosphorothioate
  modified_base 12: mod_base = OTHER; note = 2-fluororibose uracil
  modified_base 12..13: mod_base = OTHER; note = S-phosphorothioate
  modified_base 13: mod_base = OTHER; note = 2-fluororibose adenine
  modified_base 13..14: mod_base = OTHER; note = S-phosphorothioate
  modified_base 14: mod_base = OTHER; note = 2-fluororibose uracil
  modified_base 14..15: mod_base = OTHER; note = S-phosphorothioate
  modified_base 15: mod_base = OTHER; note = 2-fluororibose guanine
  modified_base 15..16: mod_base = OTHER; note = S-phosphorothioate
  modified_base 16: mod_base = OTHER; note = 2-fluororibose uracil
  source 1..16: mol_type = other RNA
ttcgtgtaaattatgt

SEQ ID NO: 60 - RNA, 33 nt, synthetic construct
  misc_feature 1..33: note = Synthetic: WV-42738
  misc_feature 1..33: note = Synthetic: ADR-0102150
  modified_base 1: mod_base = OTHER; note = 2-fluororibose cytosine
  modified_base 1..2: mod_base = OTHER; note = phosphorothioate
  modified_base 2: mod_base = OTHER; note = 2-fluororibose uracil
  modified_base 2..3: mod_base = OTHER; note = phosphorothioate
  modified_base 3: mod_base = OTHER; note = 2-fluororibose cytosine
  modified_base 4: mod_base = OTHER; note = 2-fluororibose cytosine
  modified_base 5: mod_base = OTHER; note = 2-fluororibose uracil
  modified_base 6: mod_base = OTHER; note = 2-fluororibose cytosine
  modified_base 7: mod_base = OTHER; note = 2-fluororibose uracil
  modified_base 8: mod_base = OTHER; note = 2-fluororibose uracil
  modified_base 9: mod_base = OTHER; note = 2-fluororibose cytosine
  modified_base 10: mod_base = OTHER; note = 2-fluororibose uracil
  modified_base 11: mod_base = OTHER; note = 2-fluororibose cytosine
  modified_base 12: mod_base = OTHER; note = 2-fluororibose guanine
  modified_base 13: mod_base = OTHER; note = 2-fluororibose adenine
  modified_base 14: mod_base = OTHER; note = 2-fluororibose cytosine
  modified_base 15: mod_base = OTHER; note = 2-fluororibose adenine
  modified_base 16: mod_base = OTHER; note = 2-O-methylribose adenine
  modified_base 17: mod_base = OTHER; note = 2-O-methylribose adenine
  modified_base 18: mod_base = gm
  modified_base 19: mod_base = gm
  modified_base 20: mod_base = um
  modified_base 21: mod_base = um
  modified_base 22: mod_base = cm
  modified_base 23: mod_base = um
  modified_base 24: mod_base = OTHER; note = 2-O-methylribose adenine
  modified_base 25: mod_base = OTHER; note = 2-O-methylribose adenine
  modified_base 26: mod_base = OTHER; note = 2-O-methylribose adenine
  modified_base 27: mod_base = OTHER; note = deoxyribose cytosine
  modified_base 28: mod_base = OTHER; note = deoxyribose cytosine
  modified_base 29: mod_base = OTHER; note = deoxyribose adenine
  modified_base 30: mod_base = um
  modified_base 30..31: mod_base = OTHER; note = phosphorothioate
  modified_base 31: mod_base = cm
  modified_base 31..32: mod_base = OTHER; note = phosphorothioate
  modified_base 32: mod_base = cm
  modified_base 32..33: mod_base = OTHER; note = phosphorothioate
  modified_base 33: mod_base = um
  source 1..33: mol_type = other RNA
ctcctcttctcgacaaaggttctaaaccatcct

SEQ ID NO: 61 - RNA, 33 nt, synthetic construct; identical to SEQ ID NO: 60
  misc_feature 1..33: note = Synthetic: WV-42739
  misc_feature 1..33: note = Synthetic: ADR-0102146
  modified_base 1: mod_base = OTHER; note = 2-fluororibose cytosine
  modified_base 1..2: mod_base = OTHER; note = phosphorothioate
  modified_base 2: mod_base = OTHER; note = 2-fluororibose uracil
  modified_base 2..3: mod_base = OTHER; note = phosphorothioate
  modified_base 3: mod_base = OTHER; note = 2-fluororibose cytosine
  modified_base 3..4: mod_base = OTHER; note = phosphorothioate
  modified_base 4: mod_base = OTHER; note = 2-fluororibose cytosine
  modified_base 4..5: mod_base = OTHER; note = phosphorothioate
  modified_base 5: mod_base = OTHER; note = 2-fluororibose uracil
  modified_base 5..6: mod_base = OTHER; note = phosphorothioate
  modified_base 6: mod_base = OTHER; note = 2-fluororibose cytosine
  modified_base 6..7: mod_base = OTHER; note = phosphorothioate
  modified_base 7: mod_base = OTHER; note = 2-fluororibose uracil
  modified_base 7..8: mod_base = OTHER; note = phosphorothioate
  modified_base 8: mod_base = OTHER; note = 2-fluororibose uracil
  modified_base 8..9: mod_base = OTHER; note = phosphorothioate
  modified_base 9: mod_base = OTHER; note = 2-fluororibose cytosine
  modified_base 9..10: mod_base = OTHER; note = phosphorothioate
  modified_base 10: mod_base = OTHER; note = 2-fluororibose uracil
  modified_base 10..11: mod_base = OTHER; note = phosphorothioate
  modified_base 11: mod_base = OTHER; note = 2-fluororibose cytosine
  modified_base 11..12: mod_base = OTHER; note = phosphorothioate
  modified_base 12: mod_base = OTHER; note = 2-fluororibose guanine
  modified_base 12..13: mod_base = OTHER; note = phosphorothioate
  modified_base 13: mod_base = OTHER; note = 2-fluororibose adenine
  modified_base 13..14: mod_base = OTHER; note = phosphorothioate
  modified_base 14: mod_base = OTHER; note = 2-fluororibose cytosine
  modified_base 14..15: mod_base = OTHER; note = phosphorothioate
  modified_base 15: mod_base = OTHER; note = 2-fluororibose adenine
  modified_base 15..16: mod_base = OTHER; note = phosphorothioate
  modified_base 16: mod_base = OTHER; note = 2-O-methylribose adenine
  modified_base 16..17: mod_base = OTHER; note = phosphorothioate
  modified_base 17: mod_base = OTHER; note = 2-O-methylribose adenine
  modified_base 17..18: mod_base = OTHER; note = phosphorothioate
  modified_base 18: mod_base = gm
  modified_base 18..19: mod_base = OTHER; note = phosphorothioate
  modified_base 19: mod_base = gm
  modified_base 19..20: mod_base = OTHER; note = phosphorothioate
  modified_base 20: mod_base = um
  modified_base 20..21: mod_base = OTHER; note = phosphorothioate
  modified_base 21: mod_base = um
  modified_base 21..22: mod_base = OTHER; note = phosphorothioate
  modified_base 22: mod_base = cm
  modified_base 22..23: mod_base = OTHER; note = phosphorothioate
  modified_base 23: mod_base = um
  modified_base 23..24: mod_base = OTHER; note = phosphorothioate
  modified_base 24: mod_base = OTHER; note = 2-O-methylribose adenine
  modified_base 24..25: mod_base = OTHER; note = phosphorothioate
  modified_base 25: mod_base = OTHER; note = 2-O-methylribose adenine
  modified_base 25..26: mod_base = OTHER; note = phosphorothioate
  modified_base 26: mod_base = OTHER; note = 2-O-methylribose adenine
  modified_base 26..27: mod_base = OTHER; note = phosphorothioate
  modified_base 27: mod_base = OTHER; note = deoxyribose cytosine
  modified_base 27..28: mod_base = OTHER; note = phosphorothioate
  modified_base 28: mod_base = OTHER; note = deoxyribose cytosine
  modified_base 28..29: mod_base = OTHER; note = phosphorothioate
  modified_base 29: mod_base = OTHER; note = deoxyribose adenine
  modified_base 29..30: mod_base = OTHER; note = phosphorothioate
  modified_base 30: mod_base = um
  modified_base 30..31: mod_base = OTHER; note = phosphorothioate
  modified_base 31: mod_base = cm
  modified_base 31..32: mod_base = OTHER; note = phosphorothioate
  modified_base 32: mod_base = cm
  modified_base 32..33: mod_base = OTHER; note = phosphorothioate
  modified_base 33: mod_base = um
  source 1..33: mol_type = other RNA

SEQ ID NO: 62 - RNA, 33 nt, synthetic construct; identical to SEQ ID NO: 60
  misc_feature 1..33: note = Synthetic: WV-42740
  misc_feature 1..33: note = Synthetic: ADR-0102136
  modified_base 1: mod_base = OTHER; note = 2-fluororibose cytosine
  modified_base 1..2: mod_base = OTHER; note = S-phosphorothioate
  modified_base 2: mod_base = OTHER; note = 2-fluororibose uracil
  modified_base 2..3: mod_base = OTHER; note = S-phosphorothioate
  modified_base 3: mod_base = OTHER; note = 2-fluororibose cytosine
  modified_base 3..4: mod_base = OTHER; note = S-phosphorothioate
  modified_base 4: mod_base = OTHER; note = 2-fluororibose cytosine
  modified_base 4..5: mod_base = OTHER; note = S-phosphorothioate
  modified_base 5: mod_base = OTHER; note = 2-fluororibose uracil
  modified_base 5..6: mod_base = OTHER; note = S-phosphorothioate
  modified_base 6: mod_base = OTHER; note = 2-fluororibose cytosine
  modified_base 6..7: mod_base = OTHER; note = S-phosphorothioate
  modified_base 7: mod_base = OTHER; note = 2-fluororibose uracil
  modified_base 7..8: mod_base = OTHER; note = S-phosphorothioate
  modified_base 8: mod_base = OTHER; note = 2-fluororibose uracil
  modified_base 8..9: mod_base = OTHER; note = S-phosphorothioate
  modified_base 9: mod_base = OTHER; note = 2-fluororibose cytosine
  modified_base 9..10: mod_base = OTHER; note = S-phosphorothioate
  modified_base 10: mod_base = OTHER; note = 2-fluororibose uracil
  modified_base 10..11: mod_base = OTHER; note = S-phosphorothioate
  modified_base 11: mod_base = OTHER; note = 2-fluororibose cytosine
  modified_base 11..12: mod_base = OTHER; note = S-phosphorothioate
  modified_base 12: mod_base = OTHER; note = 2-fluororibose guanine
  modified_base 12..13: mod_base = OTHER; note = S-phosphorothioate
  modified_base 13: mod_base = OTHER; note = 2-fluororibose adenine
  modified_base 13..14: mod_base = OTHER; note = S-phosphorothioate
  modified_base 14: mod_base = OTHER; note = 2-fluororibose cytosine
  modified_base 14..15: mod_base = OTHER; note = S-phosphorothioate
  modified_base 15: mod_base = OTHER; note = 2-fluororibose adenine
  modified_base 15..16: mod_base = OTHER; note = S-phosphorothioate
  modified_base 16: mod_base = OTHER; note = 2-O-methylribose adenine
  modified_base 16..17: mod_base = OTHER; note = S-phosphorothioate
  modified_base 17: mod_base = OTHER; note = 2-O-methylribose adenine
  modified_base 17..18: mod_base = OTHER; note = S-phosphorothioate
  modified_base 18: mod_base = gm
  modified_base 18..19: mod_base = OTHER; note = S-phosphorothioate
  modified_base 19: mod_base = gm
  modified_base 19..20: mod_base = OTHER; note = S-phosphorothioate
  modified_base 20: mod_base = um
  modified_base 20..21: mod_base = OTHER; note = S-phosphorothioate
  modified_base 21: mod_base = um
  modified_base 21..22: mod_base = OTHER; note = S-phosphorothioate
  modified_base 22: mod_base = cm
  modified_base 22..23: mod_base = OTHER; note = S-phosphorothioate
  modified_base 23: mod_base = um
  modified_base 23..24: mod_base = OTHER; note = S-phosphorothioate
  modified_base 24: mod_base = OTHER; note = 2-O-methylribose adenine
  modified_base 24..25: mod_base = OTHER; note = S-phosphorothioate
  modified_base 25: mod_base = OTHER; note = 2-O-methylribose adenine
  modified_base 25..26: mod_base = OTHER; note = S-phosphorothioate
  modified_base 26: mod_base = OTHER; note = 2-O-methylribose adenine
  modified_base 26..27: mod_base = OTHER; note = S-phosphorothioate
  modified_base 27: mod_base = OTHER; note = deoxyribose cytosine
  modified_base 27..28: mod_base = OTHER; note = S-phosphorothioate
  modified_base 28: mod_base = OTHER; note = deoxyribose cytosine
  modified_base 28..29: mod_base = OTHER; note = S-phosphorothioate
  modified_base 29: mod_base = OTHER; note = deoxyribose adenine
  modified_base 29..30: mod_base = OTHER; note = S-phosphorothioate
  modified_base 30: mod_base = um
  modified_base 30..31: mod_base = OTHER; note = S-phosphorothioate
  modified_base 31: mod_base = cm
  modified_base 31..32: mod_base = OTHER; note = S-phosphorothioate
  modified_base 32: mod_base = cm
  modified_base 32..33: mod_base = OTHER; note = S-phosphorothioate
  modified_base 33: mod_base = um
  source 1..33: mol_type = other RNA

SEQ ID NO: 63 - RNA, 33 nt, synthetic construct; identical to SEQ ID NO: 60
  misc_feature 1..33: note = Synthetic: WV-42741
  misc_feature 1..33: note = Synthetic: ADR-0102137
  modified_base 1: mod_base = OTHER; note = 2-fluororibose cytosine
  modified_base 1..2: mod_base = OTHER; note = S-phosphorothioate
  modified_base 2: mod_base = OTHER; note = 2-fluororibose uracil
  modified_base 2..3: mod_base = OTHER; note = S-phosphorothioate
  modified_base 3: mod_base = OTHER; note = 2-fluororibose cytosine
  modified_base 3..4: mod_base = OTHER; note = S-phosphorothioate
  modified_base 4: mod_base = OTHER; note = 2-fluororibose cytosine
  modified_base 4..5: mod_base = OTHER; note = S-phosphorothioate
  modified_base 5: mod_base = OTHER; note = 2-fluororibose uracil
  modified_base 5..6: mod_base = OTHER; note = S-phosphorothioate
  modified_base 6: mod_base = OTHER; note = 2-fluororibose cytosine
  modified_base 6..7: mod_base = OTHER; note = S-phosphorothioate
  modified_base 7: mod_base = OTHER; note = 2-fluororibose uracil
  modified_base 7..8: mod_base = OTHER; note = S-phosphorothioate
  modified_base 8: mod_base = OTHER; note = 2-fluororibose uracil
  modified_base 8..9: mod_base = OTHER; note = S-phosphorothioate
  modified_base 9: mod_base = OTHER; note = 2-fluororibose cytosine
  modified_base 9..10: mod_base = OTHER; note = S-phosphorothioate
  modified_base 10: mod_base = OTHER; note = 2-fluororibose uracil
  modified_base 10..11: mod_base = OTHER; note = S-phosphorothioate
  modified_base 11: mod_base = OTHER; note = 2-fluororibose cytosine
  modified_base 11..12: mod_base = OTHER; note = S-phosphorothioate
  modified_base 12: mod_base = OTHER; note = 2-fluororibose guanine
  modified_base 12..13: mod_base = OTHER; note = S-phosphorothioate
  modified_base 13: mod_base = OTHER; note = 2-fluororibose adenine
  modified_base 13..14: mod_base = OTHER; note = S-phosphorothioate
  modified_base 14: mod_base = OTHER; note = 2-fluororibose cytosine
  modified_base 14..15: mod_base = OTHER; note = S-phosphorothioate
  modified_base 15: mod_base = OTHER; note = 2-fluororibose adenine
  modified_base 15..16: mod_base = OTHER; note = S-phosphorothioate
  modified_base 16: mod_base = OTHER; note = 2-O-methylribose adenine
  modified_base 16..17: mod_base = OTHER; note = S-phosphorothioate
  modified_base 17: mod_base = OTHER; note = 2-O-methylribose adenine
  modified_base 17..18: mod_base = OTHER; note = S-phosphorothioate
  modified_base 18: mod_base = gm
  modified_base 18..19: mod_base = OTHER; note = S-phosphorothioate
  modified_base 19: mod_base = gm
  modified_base 19..20: mod_base = OTHER; note = S-phosphorothioate
  modified_base 20: mod_base = um
  modified_base 20..21: mod_base = OTHER; note = S-phosphorothioate
  modified_base 21: mod_base = um
  modified_base 21..22: mod_base = OTHER; note = S-phosphorothioate
  modified_base 22: mod_base = cm
  modified_base 22..23: mod_base = OTHER; note = S-phosphorothioate
  modified_base 23: mod_base = um
  modified_base 23..24: mod_base = OTHER; note = S-phosphorothioate
  modified_base 24: mod_base = OTHER; note = 2-O-methylribose adenine
  modified_base 24..25: mod_base = OTHER; note = S-phosphorothioate
  modified_base 25: mod_base = OTHER; note = 2-O-methylribose adenine
  modified_base 25..26: mod_base = OTHER; note = S-phosphorothioate
  modified_base 26: mod_base = OTHER; note = 2-O-methylribose adenine
  modified_base 26..27: mod_base = OTHER; note = S-phosphorothioate
  modified_base 27: mod_base = OTHER; note = deoxyribose cytosine
  modified_base 27..28: mod_base = OTHER; note = S-phosphorothioate
  modified_base 28: mod_base = OTHER; note = deoxyribose cytosine
  modified_base 28..29: mod_base = OTHER; note = S-phosphorothioate
  modified_base 29: mod_base = OTHER; note = deoxyribose adenine
  modified_base 29..30: mod_base = OTHER; note R-N-(1,3-dimethylimidazolidin-2-ylidene)phosphoramidate
  modified_base 30: mod_base = um
  modified_base 30..31: mod_base = OTHER; note = S-phosphorothioate
  modified_base 31: mod_base = cm
  modified_base 31..32: mod_base = OTHER; note = S-phosphorothioate
  modified_base 32: mod_base = cm
  modified_base 32..33: mod_base = OTHER; note R-N-(1,3-dimethylimidazolidin-2-ylidene)phosphoramidate
  modified_base 33: mod_base = um
  source 1..33: mol_type = other RNA

SEQ ID NO: 64 - RNA, 31 nt, synthetic construct
  misc_feature 1..31: note = Synthetic: WV-42746
  misc_feature 1..31: note = Synthetic: ADR-0102153
  modified_base 1: mod_base = OTHER; note = 2-fluororibose cytosine
  modified_base 1..2: mod_base = OTHER; note = phosphorothioate
  modified_base 2: mod_base = OTHER; note = 2-fluororibose uracil
  modified_base 2..3: mod_base = OTHER; note = phosphorothioate
  modified_base 3: mod_base = OTHER; note = 2-fluororibose cytosine
  modified_base 4: mod_base = OTHER; note = 2-fluororibose cytosine
  modified_base 5: mod_base = OTHER; note = 2-fluororibose uracil
  modified_base 6: mod_base = OTHER; note = 2-fluororibose cytosine
  modified_base 7: mod_base = OTHER; note = 2-fluororibose uracil
  modified_base 8: mod_base = OTHER; note = 2-fluororibose uracil
  modified_base 9: mod_base = OTHER; note = 2-fluororibose cytosine
  modified_base 10: mod_base = OTHER; note = 2-fluororibose uracil
  modified_base 11: mod_base = OTHER; note = 2-fluororibose cytosine
  modified_base 12: mod_base = OTHER; note = 2-fluororibose guanine
  modified_base 13: mod_base = OTHER; note = 2-fluororibose adenine
  modified_base 14: mod_base = OTHER; note = 2-fluororibose cytosine
  modified_base 15: mod_base = OTHER; note = 2-fluororibose adenine
  modified_base 16: mod_base = gm
  modified_base 17: mod_base = gm
  modified_base 18: mod_base = um
  modified_base 19: mod_base = um
  modified_base 20: mod_base = cm
  modified_base 21: mod_base = um
  modified_base 22: mod_base = OTHER; note = 2-O-methylribose adenine
  modified_base 23: mod_base = OTHER; note = 2-O-methylribose adenine
  modified_base 24: mod_base = OTHER; note = 2-O-methylribose adenine
  modified_base 25: mod_base = OTHER; note = deoxyribose cytosine
  modified_base 26: mod_base = OTHER; note = deoxyribose cytosine
  modified_base 27: mod_base = OTHER; note = deoxyribose adenine
  modified_base 28: mod_base = um
  modified_base 28..29: mod_base = OTHER; note = phosphorothioate
  modified_base 29: mod_base = cm
  modified_base 29..30: mod_base = OTHER; note = phosphorothioate
  modified_base 30: mod_base = cm
  modified_base 30..31: mod_base = OTHER; note = phosphorothioate
  modified_base 31: mod_base = um
  source 1..31: mol_type = other RNA
ctcctcttctcgacaggttctaaaccatcct

SEQ ID NO: 65 - RNA, 31 nt, synthetic construct; identical to SEQ ID NO: 64
  misc_feature 1..31: note = Synthetic: WV-42747
  misc_feature 1..31: note = Synthetic: ADR-0102149
  modified_base 1: mod_base = OTHER; note = 2-fluororibose cytosine
  modified_base 1..2: mod_base = OTHER; note = phosphorothioate
  modified_base 2: mod_base = OTHER; note = 2-fluororibose uracil
  modified_base 2..3: mod_base = OTHER; note = phosphorothioate
  modified_base 3: mod_base = OTHER; note = 2-fluororibose cytosine
  modified_base 3..4: mod_base = OTHER; note = phosphorothioate
  modified_base 4: mod_base = OTHER; note = 2-fluororibose cytosine
  modified_base 4..5: mod_base = OTHER; note = phosphorothioate
  modified_base 5: mod_base = OTHER; note = 2-fluororibose uracil
  modified_base 5..6: mod_base = OTHER; note = phosphorothioate
  modified_base 6: mod_base = OTHER; note = 2-fluororibose cytosine
  modified_base 6..7: mod_base = OTHER; note = phosphorothioate
  modified_base 7: mod_base = OTHER; note = 2-fluororibose uracil
  modified_base 7..8: mod_base = OTHER; note = phosphorothioate
  modified_base 8: mod_base = OTHER; note = 2-fluororibose uracil
  modified_base 8..9: mod_base = OTHER; note = phosphorothioate
  modified_base 9: mod_base = OTHER; note = 2-fluororibose cytosine
  modified_base 9..10: mod_base = OTHER; note = phosphorothioate
  modified_base 10: mod_base = OTHER; note = 2-fluororibose uracil
  modified_base 10..11: mod_base = OTHER; note = phosphorothioate
  modified_base 11: mod_base = OTHER; note = 2-fluororibose cytosine
  modified_base 11..12: mod_base = OTHER; note = phosphorothioate
  modified_base 12: mod_base = OTHER; note = 2-fluororibose guanine
  modified_base 12..13: mod_base = OTHER; note = phosphorothioate
  modified_base 13: mod_base = OTHER; note = 2-fluororibose adenine
  modified_base 13..14: mod_base = OTHER; note = phosphorothioate
  modified_base 14: mod_base = OTHER; note = 2-fluororibose cytosine
  modified_base 14..15: mod_base = OTHER; note = phosphorothioate
  modified_base 15: mod_base = OTHER; note = 2-fluororibose adenine
  modified_base 15..16: mod_base = OTHER; note = phosphorothioate
  modified_base 16: mod_base = gm
  modified_base 16..17: mod_base = OTHER; note = phosphorothioate
  modified_base 17: mod_base = gm
  modified_base 17..18: mod_base = OTHER; note = phosphorothioate
  modified_base 18: mod_base = um
  modified_base 18..19: mod_base = OTHER; note = phosphorothioate
  modified_base 19: mod_base = um
  modified_base 19..20: mod_base = OTHER; note = phosphorothioate
  modified_base 20: mod_base = cm
  modified_base 20..21: mod_base = OTHER; note = phosphorothioate
  modified_base 21: mod_base = um
  modified_base 21..22: mod_base = OTHER; note = phosphorothioate
  modified_base 22: mod_base = OTHER; note = 2-O-methylribose adenine
  modified_base 22..23: mod_base = OTHER; note = phosphorothioate
  modified_base 23: mod_base = OTHER; note = 2-O-methylribose adenine
  modified_base 23..24: mod_base = OTHER; note = phosphorothioate
  modified_base 24: mod_base = OTHER; note = 2-O-methylribose adenine
  modified_base 24..25: mod_base = OTHER; note = phosphorothioate
  modified_base 25: mod_base = OTHER; note = deoxyribose cytosine
  modified_base 25..26: mod_base = OTHER; note = phosphorothioate
  modified_base 26: mod_base = OTHER; note = deoxyribose cytosine
  modified_base 26..27: mod_base = OTHER; note = phosphorothioate
  modified_base 27: mod_base = OTHER; note = deoxyribose adenine
  modified_base 27..28: mod_base = OTHER; note = phosphorothioate
  modified_base 28: mod_base = um
  modified_base 28..29: mod_base = OTHER; note = phosphorothioate
  modified_base 29: mod_base = cm
  modified_base 29..30: mod_base = OTHER; note = phosphorothioate
  modified_base 30: mod_base = cm
  modified_base 30..31: mod_base = OTHER; note = phosphorothioate
  modified_base 31: mod_base = um
  source 1..31: mol_type = other RNA

SEQ ID NO: 66 - RNA, 31 nt, synthetic construct; identical to SEQ ID NO: 64
  misc_feature 1..31: note = Synthetic: WV-42748
  misc_feature 1..31: note = Synthetic: ADR-0102142
  modified_base 1: mod_base = OTHER; note = 2-fluororibose cytosine
  modified_base 1..2: mod_base = OTHER; note = S-phosphorothioate
  modified_base 2: mod_base = OTHER; note = 2-fluororibose uracil
  modified_base 2..3: mod_base = OTHER; note = S-phosphorothioate
  modified_base 3: mod_base = OTHER; note = 2-fluororibose cytosine
  modified_base 3..4: mod_base = OTHER; note = S-phosphorothioate
  modified_base 4: mod_base = OTHER; note = 2-fluororibose cytosine
  modified_base 4..5: mod_base = OTHER; note = S-phosphorothioate
  modified_base 5: mod_base = OTHER; note = 2-fluororibose uracil
  modified_base 5..6: mod_base = OTHER; note = S-phosphorothioate
  modified_base 6: mod_base = OTHER; note = 2-fluororibose cytosine
  modified_base 6..7: mod_base = OTHER; note = S-phosphorothioate
  modified_base 7: mod_base = OTHER; note = 2-fluororibose uracil
  modified_base 7..8: mod_base = OTHER; note = S-phosphorothioate
  modified_base 8: mod_base = OTHER; note = 2-fluororibose uracil
  modified_base 8..9: mod_base = OTHER; note = S-phosphorothioate
  modified_base 9: mod_base = OTHER; note = 2-fluororibose cytosine
  modified_base 9..10: mod_base = OTHER; note = S-phosphorothioate
  modified_base 10: mod_base = OTHER; note = 2-fluororibose uracil
  modified_base 10..11: mod_base = OTHER; note = S-phosphorothioate
  modified_base 11: mod_base = OTHER; note = 2-fluororibose cytosine
  modified_base 11..12: mod_base = OTHER; note = S-phosphorothioate
  modified_base 12: mod_base = OTHER; note = 2-fluororibose guanine
  modified_base 12..13: mod_base = OTHER; note = S-phosphorothioate
  modified_base 13: mod_base = OTHER; note = 2-fluororibose adenine
  modified_base 13..14: mod_base = OTHER; note = S-phosphorothioate
  modified_base 14: mod_base = OTHER; note = 2-fluororibose cytosine
  modified_base 14..15: mod_base = OTHER; note = S-phosphorothioate
  modified_base 15: mod_base = OTHER; note = 2-fluororibose adenine
  modified_base 15..16: mod_base = OTHER; note = S-phosphorothioate
  modified_base 16: mod_base = gm
  modified_base 16..17: mod_base = OTHER; note = S-phosphorothioate
  modified_base 17: mod_base = gm
  modified_base 17..18: mod_base = OTHER; note = S-phosphorothioate
  modified_base 18: mod_base = um
  modified_base 18..19: mod_base = OTHER; note = S-phosphorothioate
  modified_base 19: mod_base = um
  modified_base 19..20: mod_base = OTHER; note = S-phosphorothioate
  modified_base 20: mod_base = cm
  modified_base 20..21: mod_base = OTHER; note = S-phosphorothioate
  modified_base 21: mod_base = um
  modified_base 21..22: mod_base = OTHER; note = S-phosphorothioate
  modified_base 22: mod_base = OTHER; note = 2-O-methylribose adenine
  modified_base 22..23: mod_base = OTHER; note = S-phosphorothioate
  modified_base 23: mod_base = OTHER; note = 2-O-methylribose adenine
  modified_base 23..24: mod_base = OTHER; note = S-phosphorothioate
  modified_base 24: mod_base = OTHER; note = 2-O-methylribose adenine
  modified_base 24..25: mod_base = OTHER; note = S-phosphorothioate
  modified_base 25: mod_base = OTHER; note = deoxyribose cytosine
  modified_base 25..26: mod_base = OTHER; note = S-phosphorothioate
  modified_base 26: mod_base = OTHER; note = deoxyribose cytosine
  modified_base 26..27: mod_base = OTHER; note = S-phosphorothioate
  modified_base 27: mod_base = OTHER; note = deoxyribose adenine
  modified_base 27..28: mod_base = OTHER; note = S-phosphorothioate
  modified_base 28: mod_base = um
  modified_base 28..29: mod_base = OTHER; note = S-phosphorothioate
  modified_base 29: mod_base = cm
  modified_base 29..30: mod_base = OTHER; note = S-phosphorothioate
  modified_base 30: mod_base = cm
  modified_base 30..31: mod_base = OTHER; note = S-phosphorothioate
  modified_base 31: mod_base = um
  source 1..31: mol_type = other RNA

SEQ ID NO: 67 - RNA, 31 nt, synthetic construct; identical to SEQ ID NO: 64
  misc_feature 1..31: note = Synthetic: WV-42749
  misc_feature 1..31: note = Synthetic: ADR-0102143
  modified_base 1: mod_base = OTHER; note = 2-fluororibose cytosine
  modified_base 1..2: mod_base = OTHER; note = S-phosphorothioate
  modified_base 2: mod_base = OTHER; note = 2-fluororibose uracil
  modified_base 2..3: mod_base = OTHER; note = S-phosphorothioate
  modified_base 3: mod_base = OTHER; note = 2-fluororibose cytosine
  modified_base 3..4: mod_base = OTHER; note = S-phosphorothioate
  modified_base 4: mod_base = OTHER; note = 2-fluororibose cytosine
  modified_base 4..5: mod_base = OTHER; note = S-phosphorothioate
  modified_base 5: mod_base = OTHER; note = 2-fluororibose uracil
  modified_base 5..6: mod_base = OTHER; note = S-phosphorothioate
  modified_base 6: mod_base = OTHER; note = 2-fluororibose cytosine
  modified_base 6..7: mod_base = OTHER; note = S-phosphorothioate
  modified_base 7: mod_base = OTHER; note = 2-fluororibose uracil
  modified_base 7..8: mod_base = OTHER; note = S-phosphorothioate
  modified_base 8: mod_base = OTHER; note = 2-fluororibose uracil
  modified_base 8..9: mod_base = OTHER; note = S-phosphorothioate
  modified_base 9: mod_base = OTHER; note = 2-fluororibose cytosine
  modified_base 9..10: mod_base = OTHER; note = S-phosphorothioate
  modified_base 10: mod_base = OTHER; note = 2-fluororibose uracil
  modified_base 10..11: mod_base = OTHER; note = S-phosphorothioate
  modified_base 11: mod_base = OTHER; note = 2-fluororibose cytosine
  modified_base 11..12: mod_base = OTHER; note = S-phosphorothioate
  modified_base 12: mod_base = OTHER; note = 2-fluororibose guanine
  modified_base 12..13: mod_base = OTHER; note = S-phosphorothioate
  modified_base 13: mod_base = OTHER; note = 2-fluororibose adenine
  modified_base 13..14: mod_base = OTHER; note = S-phosphorothioate
  modified_base 14: mod_base = OTHER; note = 2-fluororibose cytosine
  modified_base 14..15: mod_base = OTHER; note = S-phosphorothioate
  modified_base 15: mod_base = OTHER; note = 2-fluororibose adenine
  modified_base 15..16: mod_base = OTHER; note = S-phosphorothioate
  modified_base 16: mod_base = gm
  modified_base 16..17: mod_base = OTHER; note = S-phosphorothioate
  modified_base 17: mod_base = gm
  modified_base 17..18: mod_base = OTHER; note = S-phosphorothioate
  modified_base 18: mod_base = um
  modified_base 18..19: mod_base = OTHER; note = S-phosphorothioate
  modified_base 19: mod_base = um
  modified_base 19..20: mod_base = OTHER; note = S-phosphorothioate
  modified_base 20: mod_base = cm
  modified_base 20..21: mod_base = OTHER; note = S-phosphorothioate
  modified_base 21: mod_base = um
  modified_base 21..22: mod_base = OTHER; note = S-phosphorothioate
  modified_base 22: mod_base = OTHER; note = 2-O-methylribose adenine
  modified_base 22..23: mod_base = OTHER; note = S-phosphorothioate
  modified_base 23: mod_base = OTHER; note = 2-O-methylribose adenine
  modified_base 23..24: mod_base = OTHER; note = S-phosphorothioate
  modified_base 24: mod_base = OTHER; note = 2-O-methylribose adenine
  modified_base 24..25: mod_base = OTHER; note = S-phosphorothioate
  modified_base 25: mod_base = OTHER; note = deoxyribose cytosine
  modified_base 25..26: mod_base = OTHER; note = S-phosphorothioate
  modified_base 26: mod_base = OTHER; note = deoxyribose cytosine
  modified_base 26..27: mod_base = OTHER; note = S-phosphorothioate
  modified_base 27: mod_base = OTHER; note = deoxyribose adenine
  modified_base 27..28: mod_base = OTHER; note R-N-(1,3-dimethylimidazolidin-2-ylidene)phosphoramidate
  modified_base 28: mod_base = um
  modified_base 28..29: mod_base = OTHER; note = S-phosphorothioate
  modified_base 29: mod_base = cm
  modified_base 29..30: mod_base = OTHER; note = S-phosphorothioate
  modified_base 30: mod_base = cm
  modified_base 30..31: mod_base = OTHER; note R-N-(1,3-dimethylimidazolidin-2-ylidene)phosphoramidate
  modified_base 31: mod_base = um
  source 1..31: mol_type = other RNA

SEQ ID NO: 68 - RNA, 36 nt, synthetic construct
  misc_feature 1..36: note = Synthetic: WV-42731
  misc_feature 1..36: note = Synthetic: ADR-0102159
  modified_base 1: mod_base = OTHER; note = 2-fluororibose uracil
  modified_base 1..2: mod_base = OTHER; note = phosphorothioate
  modified_base 2: mod_base = OTHER; note = 2-fluororibose guanine
  modified_base 2..3: mod_base = OTHER; note = phosphorothioate
  modified_base 3: mod_base = OTHER; note = 2-fluororibose uracil
  modified_base 4: mod_base = OTHER; note = 2-fluororibose cytosine
  modified_base 5: mod_base = OTHER; note = 2-fluororibose guanine
  modified_base 6: mod_base = OTHER; note = 2-fluororibose adenine
  modified_base 7: mod_base = OTHER; note = 2-fluororibose guanine
  modified_base 8: mod_base = OTHER; note = 2-fluororibose adenine
  modified_base 9: mod_base = OTHER; note = 2-fluororibose adenine
  modified_base 10: mod_base = OTHER; note = 2-fluororibose guanine
  modified_base 11: mod_base = OTHER; note = 2-fluororibose adenine
  modified_base 12: mod_base = OTHER; note = 2-fluororibose guanine
  modified_base 13: mod_base = OTHER; note = 2-fluororibose guanine
  modified_base 14: mod_base = OTHER; note = 2-fluororibose adenine
  modified_base 15: mod_base = OTHER; note = 2-fluororibose guanine
  modified_base 16: mod_base = OTHER; note = 2-fluororibose adenine
  modified_base 17: mod_base = OTHER; note = 2-O-methylribose adenine
  modified_base 18: mod_base = cm
  modified_base 19: mod_base = OTHER; note = 2-O-methylribose adenine
  modified_base 20: mod_base = OTHER; note = 2-O-methylribose adenine
  modified_base 21: mod_base = um
  modified_base 22: mod_base = OTHER; note = 2-O-methylribose adenine
  modified_base 23: mod_base = um
  modified_base 24: mod_base = gm
  modified_base 25: mod_base = cm
  modified_base 26: mod_base = um
  modified_base 27: mod_base = OTHER; note = 2-O-methylribose adenine
  modified_base 28: mod_base = OTHER; note = 2-O-methylribose adenine
  modified_base 29: mod_base = OTHER; note = 2-fluororibose adenine
  modified_base 30: mod_base = OTHER; note = 2-fluororibose uracil
  modified_base 31: mod_base = OTHER; note = 2-fluororibose guanine
  modified_base 32: mod_base = OTHER; note = 2-fluororibose uracil
  modified_base 33: mod_base = OTHER; note = 2-fluororibose uracil
  modified_base 33..34: mod_base = OTHER; note = phosphorothioate
  modified_base 34: mod_base = OTHER; note = 2-fluororibose guanine
  modified_base 34..35: mod_base = OTHER; note = phosphorothioate
  modified_base 35: mod_base = OTHER; note = 2-fluororibose uracil
  modified_base 35..36: mod_base = OTHER; note = phosphorothioate
  modified_base 36: mod_base = OTHER; note = 2-fluororibose uracil
  source 1..36: mol_type = other RNA
tgtcgagaagaggagaacaatatgctaaatgttgtt

SEQ ID NO: 69 - RNA, 36 nt, synthetic construct; identical to SEQ ID NO: 68
  misc_feature 1..36: note = Synthetic: WV-42732
  misc_feature 1..36: note = Synthetic: ADR-0102158
  modified_base 1: mod_base = OTHER; note = 2-fluororibose uracil
  modified_base 1..2: mod_base = OTHER; note = phosphorothioate
  modified_base 2: mod_base = OTHER; note = 2-fluororibose guanine
  modified_base 2..3: mod_base = OTHER; note = phosphorothioate
  modified_base 3: mod_base = OTHER; note = 2-fluororibose uracil
  modified_base 3..4: mod_base = OTHER; note = phosphorothioate
  modified_base 4: mod_base = OTHER; note = 2-fluororibose cytosine
  modified_base 4..5: mod_base = OTHER; note = phosphorothioate
  modified_base 5: mod_base = OTHER; note = 2-fluororibose guanine
  modified_base 5..6: mod_base = OTHER; note = phosphorothioate
  modified_base 6: mod_base = OTHER; note = 2-fluororibose adenine
  modified_base 6..7: mod_base = OTHER; note = phosphorothioate
  modified_base 7: mod_base = OTHER; note = 2-fluororibose guanine
  modified_base 7..8: mod_base = OTHER; note = phosphorothioate
  modified_base 8: mod_base = OTHER; note = 2-fluororibose adenine
  modified_base 8..9: mod_base = OTHER; note = phosphorothioate
  modified_base 9: mod_base = OTHER; note = 2-fluororibose adenine
  modified_base 9..10: mod_base = OTHER; note = phosphorothioate
  modified_base 10: mod_base = OTHER; note = 2-fluororibose guanine
  modified_base 10..11: mod_base = OTHER; note = phosphorothioate
  modified_base 11: mod_base = OTHER; note = 2-fluororibose adenine
  modified_base 11..12: mod_base = OTHER; note = phosphorothioate
  modified_base 12: mod_base = OTHER; note = 2-fluororibose guanine
  modified_base 12..13: mod_base = OTHER; note = phosphorothioate
  modified_base 13: mod_base = OTHER; note = 2-fluororibose guanine
  modified_base 13..14: mod_base = OTHER; note = phosphorothioate
  modified_base 14: mod_base = OTHER; note = 2-fluororibose adenine
  modified_base 14..15: mod_base = OTHER; note = phosphorothioate
  modified_base 15: mod_base = OTHER; note = 2-fluororibose guanine
  modified_base 15..16: mod_base = OTHER; note = phosphorothioate
  modified_base 16: mod_base = OTHER; note = 2-fluororibose adenine
  modified_base 16..17: mod_base = OTHER; note = phosphorothioate
  modified_base 17: mod_base = OTHER; note = 2-O-methylribose adenine
  modified_base 17..18: mod_base = OTHER; note = phosphorothioate
  modified_base 18: mod_base = cm
  modified_base 18..19: mod_base = OTHER; note = phosphorothioate
  modified_base 19: mod_base = OTHER; note = 2-O-methylribose adenine
  modified_base 19..20: mod_base = OTHER; note = phosphorothioate
  modified_base 20: mod_base = OTHER; note = 2-O-methylribose adenine
  modified_base 20..21: mod_base = OTHER; note = phosphorothioate
  modified_base 21: mod_base = um
  modified_base 21..22: mod_base = OTHER; note = phosphorothioate
  modified_base 22: mod_base = OTHER; note = 2-O-methylribose adenine
  modified_base 22..23: mod_base = OTHER; note = phosphorothioate
  modified_base 23: mod_base = um
  modified_base 23..24: mod_base = OTHER; note = phosphorothioate
  modified_base 24: mod_base = gm
  modified_base 24..25: mod_base = OTHER; note = phosphorothioate
  modified_base 25: mod_base = cm
  modified_base 25..26: mod_base = OTHER; note = phosphorothioate
  modified_base 26: mod_base = um
  modified_base 26..27: mod_base = OTHER; note = phosphorothioate
  modified_base 27: mod_base = OTHER; note = 2-O-methylribose adenine
  modified_base 27..28: mod_base = OTHER; note = phosphorothioate
  modified_base 28: mod_base = OTHER; note = 2-O-methylribose adenine
  modified_base 28..29: mod_base = OTHER; note = phosphorothioate
  modified_base 29: mod_base = OTHER; note = 2-fluororibose adenine
  modified_base 29..30: mod_base = OTHER; note = phosphorothioate
  modified_base 30: mod_base = OTHER; note = 2-fluororibose uracil
  modified_base 30..31: mod_base = OTHER; note = phosphorothioate
  modified_base 31: mod_base = OTHER; note = 2-fluororibose guanine
  modified_base 31..32: mod_base = OTHER; note = phosphorothioate
  modified_base 32: mod_base = OTHER; note = 2-fluororibose uracil
  modified_base 32..33: mod_base = OTHER; note = phosphorothioate
  modified_base 33: mod_base = OTHER; note = 2-fluororibose uracil
  modified_base 33..34: mod_base = OTHER; note = phosphorothioate
  modified_base 34: mod_base = OTHER; note = 2-fluororibose guanine
  modified_base 34..35: mod_base = OTHER; note = phosphorothioate
  modified_base 35: mod_base = OTHER; note = 2-fluororibose uracil
  modified_base 35..36: mod_base = OTHER; note = phosphorothioate
  modified_base 36: mod_base = OTHER; note = 2-fluororibose uracil
  source 1..36: mol_type = other RNA

SEQ ID NO: 70 - RNA, 36 nt, synthetic construct; identical to SEQ ID NO: 68
  misc_feature 1..36: note = Synthetic: WV-42733
  misc_feature 1..36: note = Synthetic: ADR-0102156
  modified_base 1: mod_base = OTHER; note = 2-fluororibose uracil
  modified_base 1..2: mod_base = OTHER; note = S-phosphorothioate
  modified_base 2: mod_base = OTHER; note = 2-fluororibose guanine
  modified_base 2..3: mod_base = OTHER; note = S-phosphorothioate
  modified_base 3: mod_base = OTHER; note = 2-fluororibose uracil
  modified_base 3..4: mod_base = OTHER; note = S-phosphorothioate
  modified_base 4: mod_base = OTHER; note = 2-fluororibose cytosine
  modified_base 4..5: mod_base = OTHER; note = S-phosphorothioate
  modified_base 5: mod_base = OTHER; note = 2-fluororibose guanine
  modified_base 5..6: mod_base = OTHER; note = S-phosphorothioate
  modified_base 6: mod_base = OTHER; note = 2-fluororibose adenine
  modified_base 6..7: mod_base = OTHER; note = S-phosphorothioate
  modified_base 7: mod_base = OTHER; note = 2-fluororibose guanine
  modified_base 7..8: mod_base = OTHER; note = S-phosphorothioate
  modified_base 8: mod_base = OTHER; note = 2-fluororibose adenine
  modified_base 8..9: mod_base = OTHER; note = S-phosphorothioate
  modified_base 9: mod_base = OTHER; note = 2-fluororibose adenine
  modified_base 9..10: mod_base = OTHER; note = S-phosphorothioate
  modified_base 10: mod_base = OTHER; note = 2-fluororibose guanine
  modified_base 10..11: mod_base = OTHER; note = S-phosphorothioate
  modified_base 11: mod_base = OTHER; note = 2-fluororibose adenine
  modified_base 11..12: mod_base = OTHER; note = S-phosphorothioate
  modified_base 12: mod_base = OTHER; note = 2-fluororibose guanine
  modified_base 12..13: mod_base = OTHER; note = S-phosphorothioate
  modified_base 13: mod_base = OTHER; note = 2-fluororibose guanine
  modified_base 13..14: mod_base = OTHER; note = S-phosphorothioate
  modified_base 14: mod_base = OTHER; note = 2-fluororibose adenine
  modified_base 14..15: mod_base = OTHER; note = S-phosphorothioate
  modified_base 15: mod_base = OTHER; note = 2-fluororibose guanine
  modified_base 15..16: mod_base = OTHER; note = S-phosphorothioate
  modified_base 16: mod_base = OTHER; note = 2-fluororibose adenine
  modified_base 16..17: mod_base = OTHER; note = S-phosphorothioate
  modified_base 17: mod_base = OTHER; note = 2-O-methylribose adenine
  modified_base 17..18: mod_base = OTHER; note = S-phosphorothioate
  modified_base 18: mod_base = cm
  modified_base 18..19: mod_base = OTHER; note = S-phosphorothioate
  modified_base 19: mod_base = OTHER; note = 2-O-methylribose adenine
  modified_base 19..20: mod_base = OTHER; note = S-phosphorothioate
  modified_base 20: mod_base = OTHER; note = 2-O-methylribose adenine
  modified_base 20..21: mod_base = OTHER; note = S-phosphorothioate
  modified_base 21: mod_base = um
  modified_base 21..22: mod_base = OTHER; note = S-phosphorothioate
  modified_base 22: mod_base = OTHER; note = 2-O-methylribose adenine
  modified_base 22..23: mod_base = OTHER; note = S-phosphorothioate
  modified_base 23: mod_base = um
  modified_base 23..24: mod_base = OTHER; note = S-phosphorothioate
  modified_base 24: mod_base = gm
  modified_base 24..25: mod_base = OTHER; note = S-phosphorothioate
  modified_base 25: mod_base = cm
  modified_base 25..26: mod_base = OTHER; note = S-phosphorothioate
  modified_base 26: mod_base = um
  modified_base 26..27: mod_base = OTHER; note = S-phosphorothioate
  modified_base 27: mod_base = OTHER; note = 2-O-methylribose adenine
  modified_base 27..28: mod_base = OTHER; note = S-phosphorothioate
  modified_base 28: mod_base = OTHER; note = 2-O-methylribose adenine
  modified_base 28..29: mod_base = OTHER; note = S-phosphorothioate
  modified_base 29: mod_base = OTHER; note = 2-fluororibose adenine
  modified_base 29..30: mod_base = OTHER; note = S-phosphorothioate
  modified_base 30: mod_base = OTHER; note = 2-fluororibose uracil
  modified_base 30..31: mod_base = OTHER; note = S-phosphorothioate
  modified_base 31: mod_base = OTHER; note = 2-fluororibose guanine
  modified_base 31..32: mod_base = OTHER; note = S-phosphorothioate
  modified_base 32: mod_base = OTHER; note = 2-fluororibose uracil
  modified_base 32..33: mod_base = OTHER; note = S-phosphorothioate
  modified_base 33: mod_base = OTHER; note = 2-fluororibose uracil
  modified_base 33..34: mod_base = OTHER; note = S-phosphorothioate
  modified_base 34: mod_base = OTHER; note = 2-fluororibose guanine
  modified_base 34..35: mod_base = OTHER; note = S-phosphorothioate
  modified_base 35: mod_base = OTHER; note = 2-fluororibose uracil
  modified_base 35..36: mod_base = OTHER; note = S-phosphorothioate
  modified_base 36: mod_base = OTHER; note = 2-fluororibose uracil
  source 1..36: mol_type = other RNA

SEQ ID NO: 71 - RNA, 36 nt, synthetic construct
  misc_feature 1..36: note = Synthetic: WV-42707
  misc_feature 1..36: note = Synthetic: ADR-0102338
  modified_base 1: mod_base = OTHER; note = 2-O-methylribose adenine
  modified_base 1..2: mod_base = OTHER; note = phosphorothioate
  modified_base 2: mod_base = cm
  modified_base 2..3: mod_base = OTHER; note = phosphorothioate
  modified_base 3: mod_base = OTHER; note = 2-O-methylribose adenine
  modified_base 3..4: mod_base = OTHER; note = phosphorothioate
  modified_base 4: mod_base = OTHER; note = 2-fluororibose uracil
  modified_base 5: mod_base = OTHER; note = 2-fluororibose adenine
  modified_base 6: mod_base = OTHER; note = 2-fluororibose adenine
  modified_base 7: mod_base = OTHER; note = 2-fluororibose uracil
  modified_base 8: mod_base = OTHER; note = 2-fluororibose uracil
  modified_base 9: mod_base = OTHER; note = 2-fluororibose uracil
  modified_base 10: mod_base = OTHER; note = 2-fluororibose adenine
  modified_base 11: mod_base = OTHER; note = 2-fluororibose cytosine
  modified_base 12: mod_base = OTHER; note = 2-fluororibose adenine
  modified_base 13: mod_base = OTHER; note = 2-fluororibose cytosine
  modified_base 14: mod_base = OTHER; note = 2-fluororibose guanine
  modified_base 15: mod_base = OTHER; note = 2-fluororibose adenine
  modified_base 16: mod_base = OTHER; note = 2-fluororibose adenine
  modified_base 17: mod_base = OTHER; note = 2-fluororibose adenine
  modified_base 18: mod_base = OTHER; note = 2-fluororibose guanine
  modified_base 19: mod_base = OTHER; note = 2-O-methylribose adenine
  modified_base 20: mod_base = OTHER; note = 2-O-methylribose adenine
  modified_base 21: mod_base = gm
  modified_base 22: mod_base = gm
  modified_base 23: mod_base = um
  modified_base 24: mod_base = um
  modified_base 25: mod_base = cm
  modified_base 26: mod_base = um
  modified_base 27: mod_base = OTHER; note = 2-O-methylribose adenine
  modified_base 28: mod_base = OTHER; note = 2-O-methylribose adenine
  modified_base 29: mod_base = OTHER; note = 2-O-methylribose adenine
  modified_base 30: mod_base = OTHER; note = deoxyribose cytosine
  modified_base 31: mod_base = OTHER; note = deoxyribose cytosine
  modified_base 32: mod_base = OTHER; note = deoxyribose adenine
  modified_base 33: mod_base = um
  modified_base 33..34: mod_base = OTHER; note = phosphorothioate
  modified_base 34: mod_base = cm
  modified_base 34..35: mod_base = OTHER; note = phosphorothioate
  modified_base 35: mod_base = cm
  modified_base 35..36: mod_base = OTHER; note = phosphorothioate
  modified_base 36: mod_base = um
  source 1..36: mol_type = other RNA
acataatttacacgaaagaaggttctaaaccatcct

SEQ ID NO: 72 - RNA, 36 nt, synthetic construct; identical to SEQ ID NO: 71
  misc_feature 1..36: note = Synthetic: WV-42708
  misc_feature 1..36: note = Synthetic: ADR-0102337
  modified_base 1: mod_base = OTHER; note = 2-O-methylribose adenine
  modified_base 1..2: mod_base = OTHER; note = phosphorothioate
  modified_base 2: mod_base = cm
  modified_base 2..3: mod_base = OTHER; note = phosphorothioate
  modified_base 3: mod_base = OTHER; note = 2-O-methylribose adenine
  modified_base 3..4: mod_base = OTHER; note = phosphorothioate
  modified_base 4: mod_base = OTHER; note = 2-fluororibose uracil
  modified_base 4..5: mod_base = OTHER; note = phosphorothioate
  modified_base 5: mod_base = OTHER; note = 2-fluororibose adenine
  modified_base 5..6: mod_base = OTHER; note = phosphorothioate
  modified_base 6: mod_base = OTHER; note = 2-fluororibose adenine
  modified_base 6..7: mod_base = OTHER; note = phosphorothioate
  modified_base 7: mod_base = OTHER; note = 2-fluororibose uracil
  modified_base 7..8: mod_base = OTHER; note = phosphorothioate
  modified_base 8: mod_base = OTHER; note = 2-fluororibose uracil
  modified_base 8..9: mod_base = OTHER; note = phosphorothioate
  modified_base 9: mod_base = OTHER; note = 2-fluororibose uracil
  modified_base 9..10: mod_base = OTHER; note = phosphorothioate
  modified_base 10: mod_base = OTHER; note = 2-fluororibose adenine
  modified_base 10..11: mod_base = OTHER; note = phosphorothioate
  modified_base 11: mod_base = OTHER; note = 2-fluororibose cytosine
  modified_base 11..12: mod_base = OTHER; note = phosphorothioate
  modified_base 12: mod_base = OTHER; note = 2-fluororibose adenine
  modified_base 12..13: mod_base = OTHER; note = phosphorothioate
  modified_base 13: mod_base = OTHER; note = 2-fluororibose cytosine
  modified_base 13..14: mod_base = OTHER; note = phosphorothioate
  modified_base 14: mod_base = OTHER; note = 2-fluororibose guanine
  modified_base 14..15: mod_base = OTHER; note = phosphorothioate
  modified_base 15: mod_base = OTHER; note = 2-fluororibose adenine
  modified_base 15..16: mod_base = OTHER; note = phosphorothioate
  modified_base 16: mod_base = OTHER; note = 2-fluororibose adenine
  modified_base 16..17: mod_base = OTHER; note = phosphorothioate
  modified_base 17: mod_base = OTHER; note = 2-fluororibose adenine
  modified_base 17..18: mod_base = OTHER; note = phosphorothioate
  modified_base 18: mod_base = OTHER; note = 2-fluororibose guanine
  modified_base 18..19: mod_base = OTHER; note = phosphorothioate
  modified_base 19: mod_base = OTHER; note = 2-O-methylribose adenine
  modified_base 19..20: mod_base = OTHER; note = phosphorothioate
  modified_base 20: mod_base = OTHER; note = 2-O-methylribose adenine
  modified_base 20..21: mod_base = OTHER; note = phosphorothioate
  modified_base 21: mod_base = gm
  modified_base 21..22: mod_base = OTHER; note = phosphorothioate
  modified_base 22: mod_base = gm
  modified_base 22..23: mod_base = OTHER; note = phosphorothioate
  modified_base 23: mod_base = um
  modified_base 23..24: mod_base = OTHER; note = phosphorothioate
  modified_base 24: mod_base = um
  modified_base 24..25: mod_base = OTHER; note = phosphorothioate
  modified_base 25: mod_base = cm
  modified_base 25..26: mod_base = OTHER; note = phosphorothioate
  modified_base 26: mod_base = um
  modified_base 26..27: mod_base = OTHER; note = phosphorothioate
  modified_base 27: mod_base = OTHER; note = 2-O-methylribose adenine
  modified_base 27..28: mod_base = OTHER; note = phosphorothioate
  modified_base 28: mod_base = OTHER; note = 2-O-methylribose adenine
  modified_base 28..29: mod_base = OTHER; note = phosphorothioate
  modified_base 29: mod_base = OTHER; note = 2-O-methylribose adenine
  modified_base 29..30: mod_base = OTHER; note = phosphorothioate
  modified_base 30: mod_base = OTHER; note = deoxyribose cytosine
  modified_base 30..31: mod_base = OTHER; note = phosphorothioate
  modified_base 31: mod_base = OTHER; note = deoxyribose cytosine
  modified_base 31..32: mod_base = OTHER; note = phosphorothioate
  modified_base 32: mod_base = OTHER; note = deoxyribose adenine
  modified_base 32..33: mod_base = OTHER; note = phosphorothioate
  modified_base 33: mod_base = um
  modified_base 33..34: mod_base = OTHER; note = phosphorothioate
  modified_base 34: mod_base = cm
  modified_base 34..35: mod_base = OTHER; note = phosphorothioate
  modified_base 35: mod_base = cm
  modified_base 35..36: mod_base = OTHER; note = phosphorothioate
  modified_base 36: mod_base = um
  source 1..36: mol_type = other RNA

SEQ ID NO: 73 - RNA, 36 nt, synthetic construct; identical to SEQ ID NO: 71
  misc_feature 1..36: note = Synthetic: WV-42709
  misc_feature 1..36: note = Synthetic: ADR-0102335
  modified_base 1: mod_base = OTHER; note = 2-O-methylribose adenine
  modified_base 1..2: mod_base = OTHER; note = S-phosphorothioate
  modified_base 2: mod_base = cm
  modified_base 2..3: mod_base = OTHER; note = S-phosphorothioate
  modified_base 3: mod_base = OTHER; note = 2-O-methylribose adenine
  modified_base 3..4: mod_base = OTHER; note = S-phosphorothioate
  modified_base 4: mod_base = OTHER; note = 2-fluororibose uracil
  modified_base 4..5: mod_base = OTHER; note = S-phosphorothioate
  modified_base 5: mod_base = OTHER; note = 2-fluororibose adenine
  modified_base 5..6: mod_base = OTHER; note = S-phosphorothioate
  modified_base 6: mod_base = OTHER; note = 2-fluororibose adenine
  modified_base 6..7: mod_base = OTHER; note = S-phosphorothioate
  modified_base 7: mod_base = OTHER; note = 2-fluororibose uracil
  modified_base 7..8: mod_base = OTHER; note = S-phosphorothioate
  modified_base 8: mod_base = OTHER; note = 2-fluororibose uracil
  modified_base 8..9: mod_base = OTHER; note = S-phosphorothioate
  modified_base 9: mod_base = OTHER; note = 2-fluororibose uracil
  modified_base 9..10: mod_base = OTHER; note = S-phosphorothioate
  modified_base 10: mod_base = OTHER; note = 2-fluororibose adenine
  modified_base 10..11: mod_base = OTHER; note = S-phosphorothioate
  modified_base 11: mod_base = OTHER; note = 2-fluororibose cytosine
  modified_base 11..12: mod_base = OTHER; note = S-phosphorothioate
  modified_base 12: mod_base = OTHER; note = 2-fluororibose adenine
  modified_base 12..13: mod_base = OTHER; note = S-phosphorothioate
  modified_base 13: mod_base = OTHER; note = 2-fluororibose cytosine
  modified_base 13..14: mod_base = OTHER; note = S-phosphorothioate
  modified_base 14: mod_base = OTHER; note = 2-fluororibose guanine
  modified_base 14..15: mod_base = OTHER; note = S-phosphorothioate
  modified_base 15: mod_base = OTHER; note = 2-fluororibose adenine
  modified_base 15..16: mod_base = OTHER; note = S-phosphorothioate
  modified_base 16: mod_base = OTHER; note = 2-fluororibose adenine
  modified_base 16..17: mod_base = OTHER; note = S-phosphorothioate
  modified_base 17: mod_base = OTHER; note = 2-fluororibose adenine
  modified_base 17..18: mod_base = OTHER; note = S-phosphorothioate
  modified_base 18: mod_base = OTHER; note = 2-fluororibose guanine
  modified_base 18..19: mod_base = OTHER; note = S-phosphorothioate
  modified_base 19: mod_base = OTHER; note = 2-O-methylribose adenine
  modified_base 19..20: mod_base = OTHER; note = S-phosphorothioate
  modified_base 20: mod_base = OTHER; note = 2-O-methylribose adenine
  modified_base 20..21: mod_base = OTHER; note = S-phosphorothioate
  modified_base 21: mod_base = gm
  modified_base 21..22: mod_base = OTHER; note = S-phosphorothioate
  modified_base 22: mod_base = gm
  modified_base 22..23: mod_base = OTHER; note = S-phosphorothioate
  modified_base 23: mod_base = um
  modified_base 23..24: mod_base = OTHER; note = S-phosphorothioate
  modified_base 24: mod_base = um
  modified_base 24..25: mod_base = OTHER; note = S-phosphorothioate
  modified_base 25: mod_base = cm
  modified_base 25..26: mod_base = OTHER; note = S-phosphorothioate
  modified_base 26: mod_base = um
  modified_base 26..27: mod_base = OTHER; note = S-phosphorothioate
  modified_base 27: mod_base = OTHER; note = 2-O-methylribose adenine
  modified_base 27..28: mod_base = OTHER; note = S-phosphorothioate
  modified_base 28: mod_base = OTHER; note = 2-O-methylribose adenine
  modified_base 28..29: mod_base = OTHER; note = S-phosphorothioate
  modified_base 29: mod_base = OTHER; note = 2-O-methylribose adenine
  modified_base 29..30: mod_base = OTHER; note = S-phosphorothioate
  modified_base 30: mod_base = OTHER; note = deoxyribose cytosine
  modified_base 30..31: mod_base = OTHER; note = S-phosphorothioate
  modified_base 31: mod_base = OTHER; note = deoxyribose cytosine
  modified_base 31..32: mod_base = OTHER; note = S-phosphorothioate
  modified_base 32: mod_base = OTHER; note = deoxyribose adenine
  modified_base 32..33: mod_base = OTHER; note = S-phosphorothioate
  modified_base 33: mod_base = um
  modified_base 33..34: mod_base = OTHER; note = S-phosphorothioate
  modified_base 34: mod_base = cm
  modified_base 34..35: mod_base = OTHER; note = S-phosphorothioate
  modified_base 35: mod_base = cm
  modified_base 35..36: mod_base = OTHER; note = S-phosphorothioate
  modified_base 36: mod_base = um
  source 1..36: mol_type = other RNA

SEQ ID NO: 74 - RNA, 36 nt, synthetic construct; identical to SEQ ID NO: 71
  misc_feature 1..36: note = Synthetic: WV-42710
  misc_feature 1..36: note = Synthetic: ADR-0102336
  modified_base 1: mod_base = OTHER; note = 2-O-methylribose adenine
  modified_base 1..2: mod_base = OTHER; note = S-phosphorothioate
  modified_base 2: mod_base = cm
  modified_base 2..3: mod_base = OTHER; note = S-phosphorothioate
  modified_base 3: mod_base = OTHER; note = 2-O-methylribose adenine
  modified_base 3..4: mod_base = OTHER; note = S-phosphorothioate
  modified_base 4: mod_base = OTHER; note = 2-fluororibose uracil
  modified_base 4..5: mod_base = OTHER; note = S-phosphorothioate
  modified_base 5: mod_base = OTHER; note = 2-fluororibose adenine
  modified_base 5..6: mod_base = OTHER; note = S-phosphorothioate
  modified_base 6: mod_base = OTHER; note = 2-fluororibose adenine
  modified_base 6..7: mod_base = OTHER; note = S-phosphorothioate
  modified_base 7: mod_base = OTHER; note = 2-fluororibose uracil
  modified_base 7..8: mod_base = OTHER; note = S-phosphorothioate
  modified_base 8: mod_base = OTHER; note = 2-fluororibose uracil
  modified_base 8..9: mod_base = OTHER; note = S-phosphorothioate
  modified_base 9: mod_base = OTHER; note = 2-fluororibose uracil
  modified_base 9..10: mod_base = OTHER; note = S-phosphorothioate
  modified_base 10: mod_base = OTHER; note = 2-fluororibose adenine
  modified_base 10..11: mod_base = OTHER; note = S-phosphorothioate
  modified_base 11: mod_base = OTHER; note = 2-fluororibose cytosine
  modified_base 11..12: mod_base = OTHER; note = S-phosphorothioate
  modified_base 12: mod_base = OTHER; note = 2-fluororibose adenine
  modified_base 12..13: mod_base = OTHER; note = S-phosphorothioate
  modified_base 13: mod_base = OTHER; note = 2-fluororibose cytosine
  modified_base 13..14: mod_base = OTHER; note = S-phosphorothioate
  modified_base 14: mod_base = OTHER; note = 2-fluororibose guanine
  modified_base 14..15: mod_base = OTHER; note = S-phosphorothioate
  modified_base 15: mod_base = OTHER; note = 2-fluororibose adenine
  modified_base 15..16: mod_base = OTHER; note = S-phosphorothioate
  modified_base 16: mod_base = OTHER; note = 2-fluororibose adenine
  modified_base 16..17: mod_base = OTHER; note = S-phosphorothioate
  modified_base 17: mod_base = OTHER; note = 2-fluororibose adenine
  modified_base 17..18: mod_base = OTHER; note = S-phosphorothioate
  modified_base 18: mod_base = OTHER; note = 2-fluororibose guanine
  modified_base 18..19: mod_base = OTHER; note = S-phosphorothioate
  modified_base 19: mod_base = OTHER; note = 2-O-methylribose adenine
  modified_base 19..20: mod_base = OTHER; note = S-phosphorothioate
  modified_base 20: mod_base = OTHER; note = 2-O-methylribose adenine
  modified_base 20..21: mod_base = OTHER; note = S-phosphorothioate
  modified_base 21: mod_base = gm
  modified_base 21..22: mod_base = OTHER; note = S-phosphorothioate
  modified_base 22: mod_base = gm
  modified_base 22..23: mod_base = OTHER; note = S-phosphorothioate
  modified_base 23: mod_base = um
  modified_base 23..24: mod_base = OTHER; note = S-phosphorothioate
  modified_base 24: mod_base = um
  modified_base 24..25: mod_base = OTHER; note = S-phosphorothioate
  modified_base 25: mod_base = cm
  modified_base 25..26: mod_base = OTHER; note = S-phosphorothioate
  modified_base 26: mod_base = um
  modified_base 26..27: mod_base = OTHER; note = S-phosphorothioate
  modified_base 27: mod_base = OTHER; note = 2-O-methylribose adenine
  modified_base 27..28: mod_base = OTHER; note = S-phosphorothioate
  modified_base 28: mod_base = OTHER; note = 2-O-methylribose adenine
  modified_base 28..29: mod_base = OTHER; note = S-phosphorothioate
  modified_base 29: mod_base = OTHER; note = 2-O-methylribose adenine
  modified_base 29..30: mod_base = OTHER; note = S-phosphorothioate
  modified_base 30: mod_base = OTHER; note = deoxyribose cytosine
  modified_base 30..31: mod_base = OTHER; note = S-phosphorothioate
  modified_base 31: mod_base = OTHER; note = deoxyribose cytosine
  modified_base 31..32: mod_base = OTHER; note = S-phosphorothioate
  modified_base 32: mod_base = OTHER; note = deoxyribose adenine
  modified_base 32..33: mod_base = OTHER; note R-N-(1,3-dimethylimidazolidin-2-ylidene)phosphoramidate
  modified_base 33: mod_base = um
  modified_base 33..34: mod_base = OTHER; note = S-phosphorothioate
  modified_base 34: mod_base = cm
  modified_base 34..35: mod_base = OTHER; note = S-phosphorothioate
  modified_base 35: mod_base = cm
  modified_base 35..36: mod_base = OTHER; note R-N-(1,3-dimethylimidazolidin-2-ylidene)phosphoramidate
  modified_base 36: mod_base = um
  source 1..36: mol_type = other RNA

SEQ ID NO: 75 - RNA, 30 nt, synthetic construct
  misc_feature 1..30: note = Synthetic: WV-42060
  misc_feature 1..30: note = Synthetic: ADR-0103979
  modified_base 1: mod_base = cm
  modified_base 1..2: mod_base = OTHER; note R-N-(1,3-dimethylimidazolidin-2-ylidene)phosphoramidate
  modified_base 2: mod_base = OTHER; note = 2-O-methylribose adenine
  modified_base 2..3: mod_base = OTHER; note = S-phosphorothioate
  modified_base 3: mod_base = gm
  modified_base 3..4: mod_base = OTHER; note = S-phosphorothioate
  modified_base 4: mod_base = cm
  modified_base 4..5: mod_base = OTHER; note = S-phosphorothioate
  modified_base 5: mod_base = um
  modified_base 5..6: mod_base = OTHER; note = S-phosphorothioate
  modified_base 6: mod_base = um
  modified_base 6..7: mod_base = OTHER; note = S-phosphorothioate
  modified_base 7: mod_base = cm
  modified_base 7..8: mod_base = OTHER; note = S-phosphorothioate
  modified_base 8: mod_base = OTHER; note = 2-O-methylribose adenine
  modified_base 8..9: mod_base = OTHER; note = S-phosphorothioate
  modified_base 9: mod_base = gm
  modified_base 9..10: mod_base = OTHER; note = S-phosphorothioate
  modified_base 10: mod_base = um
  modified_base 10..11: mod_base = OTHER; note = S-phosphorothioate
  modified_base 11: mod_base = cm
  modified_base 11..12: mod_base = OTHER; note = S-phosphorothioate
  modified_base 12: mod_base = cm
  modified_base 12..13: mod_base = OTHER; note = S-phosphorothioate
  modified_base 13: mod_base = cm
  modified_base 13..14: mod_base = OTHER; note = S-phosphorothioate
  modified_base 14: mod_base = um
  modified_base 14..15: mod_base = OTHER; note = S-phosphorothioate
  modified_base 15: mod_base = um
  modified_base 15..16: mod_base = OTHER; note = S-phosphorothioate
  modified_base 16: mod_base = OTHER; note = 2-fluororibose uracil
  modified_base 16..17: mod_base = OTHER; note = S-phosphorothioate
  modified_base 17: mod_base = OTHER; note = 2-fluororibose cytosine
  modified_base 17..18: mod_base = OTHER; note = S-phosphorothioate
  modified_base 18: mod_base = OTHER; note = 2-fluororibose uracil
  modified_base 18..19: mod_base = OTHER; note = S-phosphorothioate
  modified_base 19: mod_base = OTHER; note = deoxyribose cytosine
  modified_base 19..20: mod_base = OTHER; note = S-phosphorothioate
  modified_base 20: mod_base = OTHER; note = deoxyribose inosine
  modified_base 20..21: mod_base = OTHER; note S-N-(1,3-dimethylimidazolidin-2-ylidene)phosphoramidate
  modified_base 21: mod_base = OTHER; note = 2-fluororibose uracil
  modified_base 21..22: mod_base = OTHER; note = S-phosphorothioate
  modified_base 22: mod_base = OTHER; note = 2-fluororibose cytosine
  modified_base 22..23: mod_base = OTHER; note = S-phosphorothioate
  modified_base 23: mod_base = OTHER; note = 2-fluororibose guanine
  modified_base 23..24: mod_base = OTHER; note = S-phosphorothioate
  modified_base 24: mod_base = OTHER; note = 2-fluororibose adenine
  modified_base 24..25: mod_base = OTHER; note = S-phosphorothioate
  modified_base 25: mod_base = OTHER; note = 2-fluororibose uracil
  modified_base 25..26: mod_base = OTHER; note = S-phosphorothioate
  modified_base 26: mod_base = OTHER; note = 2-fluororibose guanine
  modified_base 26..27: mod_base = OTHER; note = S-phosphorothioate
  modified_base 27: mod_base = OTHER; note = 2-fluororibose guanine
  modified_base 27..28: mod_base = OTHER; note = S-phosphorothioate
  modified_base 28: mod_base = OTHER; note = 2-fluororibose uracil
  modified_base 28..29: mod_base = OTHER; note = S-phosphorothioate
  modified_base 29: mod_base = OTHER; note = 2-fluororibose cytosine
  modified_base 29..30: mod_base = OTHER; note R-N-(1,3-dimethylimidazolidin-2-ylidene)phosphoramidate
  modified_base 30: mod_base = OTHER; note = 2-fluororibose adenine
  source 1..30: mol_type = other RNA
cagcttcagtccctttctcgtcgatggtca

SEQ ID NO: 76 - RNA, 30 nt, synthetic construct
  misc_feature 1..30: note = Synthetic: WV-42059
  misc_feature 1..30: note = Synthetic: ADR-0104336
  modified_base 1: mod_base = gm
  modified_base 1..2: mod_base = OTHER; note R-N-(1,3-dimethylimidazolidin-2-ylidene)phosphoramidate
  modified_base 2: mod_base = cm
  modified_base 2..3: mod_base = OTHER; note = S-phosphorothioate
  modified_base 3: mod_base = OTHER; note = 2-O-methylribose adenine
  modified_base 3..4: mod_base = OTHER; note = S-phosphorothioate
  modified_base 4: mod_base = gm
  modified_base 4..5: mod_base = OTHER; note = S-phosphorothioate
  modified_base 5: mod_base = cm
  modified_base 5..6: mod_base = OTHER; note = S-phosphorothioate
  modified_base 6: mod_base = um
  modified_base 6..7: mod_base = OTHER; note = S-phosphorothioate
  modified_base 7: mod_base = um
  modified_base 7..8: mod_base = OTHER; note = S-phosphorothioate
  modified_base 8: mod_base = cm
  modified_base 8..9: mod_base = OTHER; note = S-phosphorothioate
  modified_base 9: mod_base = OTHER; note = 2-O-methylribose adenine
  modified_base 9..10: mod_base = OTHER; note = S-phosphorothioate
  modified_base 10: mod_base = gm
  modified_base 10..11: mod_base = OTHER; note = S-phosphorothioate
  modified_base 11: mod_base = um
  modified_base 11..12: mod_base = OTHER; note = S-phosphorothioate
  modified_base 12: mod_base = cm
  modified_base 12..13: mod_base = OTHER; note = S-phosphorothioate
  modified_base 13: mod_base = cm
  modified_base 13..14: mod_base = OTHER; note = S-phosphorothioate
  modified_base 14: mod_base = cm
  modified_base 14..15: mod_base = OTHER; note = S-phosphorothioate
  modified_base 15: mod_base = um
  modified_base 15..16: mod_base = OTHER; note = S-phosphorothioate
  modified_base 16: mod_base = OTHER; note = 2-fluororibose uracil
  modified_base 16..17: mod_base = OTHER; note = S-phosphorothioate
  modified_base 17: mod_base = OTHER; note = 2-fluororibose uracil
  modified_base 17..18: mod_base = OTHER; note = S-phosphorothioate
  modified_base 18: mod_base = OTHER; note = 2-fluororibose cytosine
  modified_base 18..19: mod_base = OTHER; note = S-phosphorothioate
  modified_base 19: mod_base = OTHER; note = 2-fluororibose uracil
  modified_base 19..20: mod_base = OTHER; note = S-phosphorothioate
  modified_base 20: mod_base = OTHER; note = deoxyribose cytosine
  modified_base 20..21: mod_base = OTHER; note = S-phosphorothioate
  modified_base 21: mod_base = OTHER; note = deoxyribose inosine
  modified_base 21..22: mod_base = OTHER; note S-N-(1,3-dimethylimidazolidin-2-ylidene)phosphoramidate
  modified_base 22: mod_base = OTHER; note = 2-fluororibose uracil
  modified_base 22..23: mod_base = OTHER; note = S-phosphorothioate
  modified_base 23: mod_base = OTHER; note = 2-fluororibose cytosine
  modified_base 23..24: mod_base = OTHER; note = S-phosphorothioate
  modified_base 24: mod_base = OTHER; note = 2-fluororibose guanine
  modified_base 24..25: mod_base = OTHER; note = S-phosphorothioate
  modified_base 25: mod_base = OTHER; note = 2-fluororibose adenine
  modified_base 25..26: mod_base = OTHER; note = S-phosphorothioate
  modified_base 26: mod_base = OTHER; note = 2-fluororibose uracil
  modified_base 26..27: mod_base = OTHER; note = S-phosphorothioate
  modified_base 27: mod_base = OTHER; note = 2-fluororibose guanine
  modified_base 27..28: mod_base = OTHER; note = S-phosphorothioate
  modified_base 28: mod_base = OTHER; note = 2-fluororibose guanine
  modified_base 28..29: mod_base = OTHER; note = S-phosphorothioate
  modified_base 29: mod_base = OTHER; note = 2-fluororibose uracil
  modified_base 29..30: mod_base = OTHER; note R-N-(1,3-dimethylimidazolidin-2-ylidene)phosphoramidate
  modified_base 30: mod_base = OTHER; note = 2-fluororibose cytosine
  source 1..30: mol_type = other RNA
gcagcttcagtccctttctcgtcgatggtc

SEQ ID NO: 77 - RNA, 30 nt, synthetic construct
  misc_feature 1..30: note = Synthetic: WV-42058
  misc_feature 1..30: note = Synthetic: ADR-0103967
  modified_base 1: mod_base = OTHER; note = 2-O-methylribose adenine
  modified_base 1..2: mod_base = OTHER; note R-N-(1,3-dimethylimidazolidin-2-ylidene)phosphoramidate
  modified_base 2: mod_base = gm
  modified_base 2..3: mod_base = OTHER; note = S-phosphorothioate
  modified_base 3: mod_base = cm
  modified_base 3..4: mod_base = OTHER; note = S-phosphorothioate
  modified_base 4: mod_base = OTHER; note = 2-O-methylribose adenine
  modified_base 4..5: mod_base = OTHER; note = S-phosphorothioate
  modified_base 5: mod_base = gm
  modified_base 5..6: mod_base = OTHER; note = S-phosphorothioate
  modified_base 6: mod_base = cm
  modified_base 6..7: mod_base = OTHER; note = S-phosphorothioate
  modified_base 7: mod_base = um
  modified_base 7..8: mod_base = OTHER; note = S-phosphorothioate
  modified_base 8: mod_base = um
  modified_base 8..9: mod_base = OTHER; note = S-phosphorothioate
  modified_base 9: mod_base = cm
  modified_base 9..10: mod_base = OTHER; note = S-phosphorothioate
  modified_base 10: mod_base = OTHER; note = 2-O-methylribose adenine
  modified_base 10..11: mod_base = OTHER; note = S-phosphorothioate
  modified_base 11: mod_base = gm
  modified_base 11..12: mod_base = OTHER; note = S-phosphorothioate
  modified_base 12: mod_base = um
  modified_base 12..13: mod_base = OTHER; note = S-phosphorothioate
  modified_base 13: mod_base = cm
  modified_base 13..14: mod_base = OTHER; note = S-phosphorothioate
  modified_base 14: mod_base = cm
  modified_base 14..15: mod_base = OTHER; note = S-phosphorothioate
  modified_base 15: mod_base = cm
  modified_base 15..16: mod_base = OTHER; note = S-phosphorothioate
  modified_base 16: mod_base = OTHER; note = 2-fluororibose uracil
  modified_base 16..17: mod_base = OTHER; note = S-phosphorothioate
  modified_base 17: mod_base = OTHER; note = 2-fluororibose uracil
  modified_base 17..18: mod_base = OTHER; note = S-phosphorothioate
  modified_base 18: mod_base = OTHER; note = 2-fluororibose uracil
  modified_base 18..19: mod_base = OTHER; note = S-phosphorothioate
  modified_base 19: mod_base = OTHER; note = 2-fluororibose cytosine
  modified_base 19..20: mod_base = OTHER; note = S-phosphorothioate
  modified_base 20: mod_base = OTHER; note = 2-fluororibose uracil
  modified_base 20..21: mod_base = OTHER; note = S-phosphorothioate
  modified_base 21: mod_base = OTHER; note = deoxyribose cytosine
  modified_base 21..22: mod_base = OTHER; note = S-phosphorothioate
  modified_base 22: mod_base = OTHER; note = deoxyribose inosine
  modified_base 22..23: mod_base = OTHER; note S-N-(1,3-dimethylimidazolidin-2-ylidene)phosphoramidate
  modified_base 23: mod_base = OTHER; note = 2-fluororibose uracil
  modified_base 23..24: mod_base = OTHER; note = S-phosphorothioate
  modified_base 24: mod_base = OTHER; note = 2-fluororibose cytosine
  modified_base 24..25: mod_base = OTHER; note = S-phosphorothioate
  modified_base 25: mod_base = OTHER; note = 2-fluororibose guanine
  modified_base 25..26: mod_base = OTHER; note = S-phosphorothioate
  modified_base 26: mod_base = OTHER; note = 2-fluororibose adenine
  modified_base 26..27: mod_base = OTHER; note = S-phosphorothioate
  modified_base 27: mod_base = OTHER; note = 2-fluororibose uracil
  modified_base 27..28: mod_base = OTHER; note = S-phosphorothioate
  modified_base 28: mod_base = OTHER; note = 2-fluororibose guanine
  modified_base 28..29: mod_base = OTHER; note = S-phosphorothioate
  modified_base 29: mod_base = OTHER; note = 2-fluororibose guanine
  modified_base 29..30: mod_base = OTHER; note R-N-(1,3-dimethylimidazolidin-2-ylidene)phosphoramidate
  modified_base 30: mod_base = OTHER; note = 2-fluororibose uracil
  source 1..30: mol_type = other RNA
agcagcttcagtccctttctcgtcgatggt

SEQ ID NO: 78 - RNA, 30 nt, synthetic construct
  misc_feature 1..30: note = Synthetic: WV-42057
  misc_feature 1..30: note = Synthetic: ADR-0103978
  modified_base 1: mod_base = cm
  modified_base 1..2: mod_base = OTHER; note R-N-(1,3-dimethylimidazolidin-2-ylidene)phosphoramidate
  modified_base 2: mod_base = OTHER; note = 2-O-methylribose adenine
  modified_base 2..3: mod_base = OTHER; note = S-phosphorothioate
  modified_base 3: mod_base = gm
  modified_base 3..4: mod_base = OTHER; note = S-phosphorothioate
  modified_base 4: mod_base = cm
  modified_base 4..5: mod_base = OTHER; note = S-phosphorothioate
  modified_base 5: mod_base = OTHER; note = 2-O-methylribose adenine
  modified_base 5..6: mod_base = OTHER; note = S-phosphorothioate
  modified_base 6: mod_base = gm
  modified_base 6..7: mod_base = OTHER; note = S-phosphorothioate
  modified_base 7: mod_base = cm
  modified_base 7..8: mod_base = OTHER; note = S-phosphorothioate
  modified_base 8: mod_base = um
  modified_base 8..9: mod_base = OTHER; note = S-phosphorothioate
  modified_base 9: mod_base = um
  modified_base 9..10: mod_base = OTHER; note = S-phosphorothioate
  modified_base 10: mod_base = cm
  modified_base 10..11: mod_base = OTHER; note = S-phosphorothioate
  modified_base 11: mod_base = OTHER; note = 2-O-methylribose adenine
  modified_base 11..12: mod_base = OTHER; note = S-phosphorothioate
  modified_base 12: mod_base = gm
  modified_base 12..13: mod_base = OTHER; note = S-phosphorothioate
  modified_base 13: mod_base = um
  modified_base 13..14: mod_base = OTHER; note = S-phosphorothioate
  modified_base 14: mod_base = cm
  modified_base 14..15: mod_base = OTHER; note = S-phosphorothioate
  modified_base 15: mod_base = cm
  modified_base 15..16: mod_base = OTHER; note = S-phosphorothioate
  modified_base 16: mod_base = OTHER; note = 2-fluororibose cytosine
  modified_base 16..17: mod_base = OTHER; note = S-phosphorothioate
  modified_base 17: mod_base = OTHER; note = 2-fluororibose uracil
  modified_base 17..18: mod_base = OTHER; note = S-phosphorothioate
  modified_base 18: mod_base = OTHER; note = 2-fluororibose uracil
  modified_base 18..19: mod_base = OTHER; note = S-phosphorothioate
  modified_base 19: mod_base = OTHER; note = 2-fluororibose uracil
  modified_base 19..20: mod_base = OTHER; note = S-phosphorothioate
  modified_base 20: mod_base = OTHER; note = 2-fluororibose cytosine
  modified_base 20..21: mod_base = OTHER; note = S-phosphorothioate
  modified_base 21: mod_base = OTHER; note = 2-fluororibose uracil
  modified_base 21..22: mod_base = OTHER; note = S-phosphorothioate
  modified_base 22: mod_base = OTHER; note = deoxyribose cytosine
  modified_base 22..23: mod_base = OTHER; note = S-phosphorothioate
  modified_base 23: mod_base = OTHER; note = deoxyribose inosine
  modified_base 23..24: mod_base = OTHER; note S-N-(1,3-dimethylimidazolidin-2-ylidene)phosphoramidate
  modified_base 24: mod_base = OTHER; note = 2-fluororibose uracil
  modified_base 24..25: mod_base = OTHER; note = S-phosphorothioate
  modified_base 25: mod_base = OTHER; note = 2-fluororibose cytosine
  modified_base 25..26: mod_base = OTHER; note = S-phosphorothioate
  modified_base 26: mod_base = OTHER; note = 2-fluororibose guanine
  modified_base 26..27: mod_base = OTHER; note = S-phosphorothioate
  modified_base 27: mod_base = OTHER; note = 2-fluororibose adenine
  modified_base 27..28: mod_base = OTHER; note = S-phosphorothioate
  modified_base 28: mod_base = OTHER; note = 2-fluororibose uracil
  modified_base 28..29: mod_base = OTHER; note = S-phosphorothioate
  modified_base 29: mod_base = OTHER; note = 2-fluororibose guanine
  modified_base 29..30: mod_base = OTHER; note R-N-(1,3-dimethylimidazolidin-2-ylidene)phosphoramidate
  modified_base 30: mod_base = OTHER; note = 2-fluororibose guanine
  source 1..30: mol_type = other RNA
cagcagcttcagtccctttctcgtcgatgg

SEQ ID NO: 79 - RNA, 30 nt, synthetic construct
  misc_feature 1..30: note = Synthetic: WV-42056
  misc_feature 1..30: note = Synthetic: ADR-0103991
  modified_base 1: mod_base = cm
  modified_base 1..2: mod_base = OTHER; note R-N-(1,3-dimethylimidazolidin-2-ylidene)phosphoramidate
  modified_base 2: mod_base = cm
  modified_base 2..3: mod_base = OTHER; note = S-phosphorothioate
  modified_base 3: mod_base = OTHER; note = 2-O-methylribose adenine
  modified_base 3..4: mod_base = OTHER; note = S-phosphorothioate
  modified_base 4: mod_base = gm
  modified_base 4..5: mod_base = OTHER; note = S-phosphorothioate
  modified_base 5: mod_base = cm
  modified_base 5..6: mod_base = OTHER; note = S-phosphorothioate
  modified_base 6: mod_base = OTHER; note = 2-O-methylribose adenine
  modified_base 6..7: mod_base = OTHER; note = S-phosphorothioate
  modified_base 7: mod_base = gm
  modified_base 7..8: mod_base = OTHER; note = S-phosphorothioate
  modified_base 8: mod_base = cm
  modified_base 8..9: mod_base = OTHER; note = S-phosphorothioate
  modified_base 9: mod_base = um
  modified_base 9..10: mod_base = OTHER; note = S-phosphorothioate
  modified_base 10: mod_base = um
  modified_base 10..11: mod_base = OTHER; note = S-phosphorothioate
  modified_base 11: mod_base = cm
  modified_base 11..12: mod_base = OTHER; note = S-phosphorothioate
  modified_base 12: mod_base = OTHER; note = 2-O-methylribose adenine
  modified_base 12..13: mod_base = OTHER; note = S-phosphorothioate
  modified_base 13: mod_base = gm
  modified_base 13..14: mod_base = OTHER; note = S-phosphorothioate
  modified_base 14: mod_base = um
  modified_base 14..15: mod_base = OTHER; note = S-phosphorothioate
  modified_base 15: mod_base = cm
  modified_base 15..16: mod_base = OTHER; note = S-phosphorothioate
  modified_base 16: mod_base = OTHER; note = 2-fluororibose cytosine
  modified_base 16..17: mod_base = OTHER; note = S-phosphorothioate
  modified_base 17: mod_base = OTHER; note = 2-fluororibose cytosine
  modified_base 17..18: mod_base = OTHER; note = S-phosphorothioate
  modified_base 18: mod_base = OTHER; note = 2-fluororibose uracil
  modified_base 18..19: mod_base = OTHER; note = S-phosphorothioate
  modified_base 19: mod_base = OTHER; note = 2-fluororibose uracil
  modified_base 19..20: mod_base = OTHER; note = S-phosphorothioate
  modified_base 20: mod_base = OTHER; note = 2-fluororibose uracil
  modified_base 20..21: mod_base = OTHER; note = S-phosphorothioate
  modified_base 21: mod_base = OTHER; note = 2-fluororibose cytosine
  modified_base 21..22: mod_base = OTHER; note = S-phosphorothioate
  modified_base 22: mod_base = OTHER; note = 2-fluororibose uracil
  modified_base 22..23: mod_base = OTHER; note = S-phosphorothioate
  modified_base 23: mod_base = OTHER; note = deoxyribose cytosine
  modified_base 23..24: mod_base = OTHER; note = S-phosphorothioate
  modified_base 24: mod_base = OTHER; note = deoxyribose inosine
  modified_base 24..25: mod_base = OTHER; note S-N-(1,3-dimethylimidazolidin-2-ylidene)phosphoramidate
  modified_base 25: mod_base = OTHER; note = 2-fluororibose uracil
  modified_base 25..26: mod_base = OTHER; note = S-phosphorothioate
  modified_base 26: mod_base = OTHER; note = 2-fluororibose cytosine
  modified_base 26..27: mod_base = OTHER; note = S-phosphorothioate
  modified_base 27: mod_base = OTHER; note = 2-fluororibose guanine
  modified_base 27..28: mod_base = OTHER; note = S-phosphorothioate
  modified_base 28: mod_base = OTHER; note = 2-fluororibose adenine
  modified_base 28..29: mod_base = OTHER; note = S-phosphorothioate
  modified_base 29: mod_base = OTHER; note = 2-fluororibose uracil
  modified_base 29..30: mod_base = OTHER; note R-N-(1,3-dimethylimidazolidin-2-ylidene)phosphoramidate
  modified_base 30: mod_base = OTHER; note = 2-fluororibose guanine
  source 1..30: mol_type = other RNA
ccagcagcttcagtccctttctcgtcgatg

SEQ ID NO: 80 - RNA, 30 nt, synthetic construct
  misc_feature 1..30: note = Synthetic: WV-42055
  misc_feature 1..30: note = Synthetic: ADR-0104306
  modified_base 1: mod_base = cm
  modified_base 1..2: mod_base = OTHER; note R-N-(1,3-dimethylimidazolidin-2-ylidene)phosphoramidate
  modified_base 2: mod_base = cm
  modified_base 2..3: mod_base = OTHER; note = S-phosphorothioate
  modified_base 3: mod_base = cm
  modified_base 3..4: mod_base = OTHER; note = S-phosphorothioate
  modified_base 4: mod_base = OTHER; note = 2-O-methylribose adenine
  modified_base 4..5: mod_base = OTHER; note = S-phosphorothioate
  modified_base 5: mod_base = gm
  modified_base 5..6: mod_base = OTHER; note = S-phosphorothioate
  modified_base 6: mod_base = cm
  modified_base 6..7: mod_base = OTHER; note = S-phosphorothioate
  modified_base 7: mod_base = OTHER; note = 2-O-methylribose adenine
  modified_base 7..8: mod_base = OTHER; note = S-phosphorothioate
  modified_base 8: mod_base = gm
  modified_base 8..9: mod_base = OTHER; note = S-phosphorothioate
  modified_base 9: mod_base = cm
  modified_base 9..10: mod_base = OTHER; note = S-phosphorothioate
  modified_base 10: mod_base = um
  modified_base 10..11: mod_base = OTHER; note = S-phosphorothioate
  modified_base 11: mod_base = um
  modified_base 11..12: mod_base = OTHER; note = S-phosphorothioate
  modified_base 12: mod_base = cm
  modified_base 12..13: mod_base = OTHER; note = S-phosphorothioate
  modified_base 13: mod_base = OTHER; note = 2-O-methylribose adenine
  modified_base 13..14: mod_base = OTHER; note = S-phosphorothioate
  modified_base 14: mod_base = gm
  modified_base 14..15: mod_base = OTHER; note = S-phosphorothioate
  modified_base 15: mod_base = um
  modified_base 15..16: mod_base = OTHER; note = S-phosphorothioate
  modified_base 16: mod_base = OTHER; note = 2-fluororibose cytosine
  modified_base 16..17: mod_base = OTHER; note = S-phosphorothioate
  modified_base 17: mod_base = OTHER; note = 2-fluororibose cytosine
  modified_base 17..18: mod_base = OTHER; note = S-phosphorothioate
  modified_base 18: mod_base = OTHER; note = 2-fluororibose cytosine
  modified_base 18..19: mod_base = OTHER; note = S-phosphorothioate
  modified_base 19: mod_base = OTHER; note = 2-fluororibose uracil
  modified_base 19..20: mod_base = OTHER; note = S-phosphorothioate
  modified_base 20: mod_base = OTHER; note = 2-fluororibose uracil
  modified_base 20..21: mod_base = OTHER; note = S-phosphorothioate
  modified_base 21: mod_base = OTHER; note = 2-fluororibose uracil
  modified_base 21..22: mod_base = OTHER; note = S-phosphorothioate
  modified_base 22: mod_base = OTHER; note = 2-fluororibose cytosine
  modified_base 22..23: mod_base = OTHER; note = S-phosphorothioate
  modified_base 23: mod_base = OTHER; note = 2-fluororibose uracil
  modified_base 23..24: mod_base = OTHER; note = S-phosphorothioate
  modified_base 24: mod_base = OTHER; note = deoxyribose cytosine
  modified_base 24..25: mod_base = OTHER; note = S-phosphorothioate
  modified_base 25: mod_base = OTHER; note = deoxyribose inosine
  modified_base 25..26: mod_base = OTHER; note S-N-(1,3-dimethylimidazolidin-2-ylidene)phosphoramidate
  modified_base 26: mod_base = OTHER; note = 2-fluororibose uracil
  modified_base 26..27: mod_base = OTHER; note = S-phosphorothioate
  modified_base 27: mod_base = OTHER; note = 2-fluororibose cytosine
  modified_base 27..28: mod_base = OTHER; note = S-phosphorothioate
  modified_base 28: mod_base = OTHER; note = 2-fluororibose guanine
  modified_base 28..29: mod_base = OTHER; note = S-phosphorothioate
  modified_base 29: mod_base = OTHER; note = 2-fluororibose adenine
  modified_base 29..30: mod_base = OTHER; note R-N-(1,3-dimethylimidazolidin-2-ylidene)phosphoramidate
  modified_base 30: mod_base = OTHER; note = 2-fluororibose uracil
  source 1..30: mol_type = other RNA
cccagcagcttcagtccctttctcgtcgat

SEQ ID NO: 81 - RNA, 30 nt, synthetic construct
  misc_feature 1..30: note = Synthetic: WV-42054
  misc_feature 1..30: note = Synthetic: ADR-0104307
  modified_base 1: mod_base = cm
  modified_base 1..2: mod_base = OTHER; note R-N-(1,3-dimethylimidazolidin-2-ylidene)phosphoramidate
  modified_base 2: mod_base = cm
  modified_base 2..3: mod_base = OTHER; note = S-phosphorothioate
  modified_base 3: mod_base = cm
  modified_base 3..4: mod_base = OTHER; note = S-phosphorothioate
  modified_base 4: mod_base = cm
  modified_base 4..5: mod_base = OTHER; note = S-phosphorothioate
  modified_base 5: mod_base = OTHER; note = 2-O-methylribose adenine
  modified_base 5..6: mod_base = OTHER; note = S-phosphorothioate
  modified_base 6: mod_base = gm
  modified_base 6..7: mod_base = OTHER; note = S-phosphorothioate
  modified_base 7: mod_base = cm
  modified_base 7..8: mod_base = OTHER; note = S-phosphorothioate
  modified_base 8: mod_base = OTHER; note = 2-O-methylribose adenine
  modified_base 8..9: mod_base = OTHER; note = S-phosphorothioate
  modified_base 9: mod_base = gm
  modified_base 9..10: mod_base = OTHER; note = S-phosphorothioate
  modified_base 10: mod_base = cm
  modified_base 10..11: mod_base = OTHER; note = S-phosphorothioate
  modified_base 11: mod_base = um
  modified_base 11..12: mod_base = OTHER; note = S-phosphorothioate
  modified_base 12: mod_base = um
  modified_base 12..13: mod_base = OTHER; note = S-phosphorothioate
  modified_base 13: mod_base = cm
  modified_base 13..14: mod_base = OTHER; note = S-phosphorothioate
  modified_base 14: mod_base = OTHER; note = 2-O-methylribose adenine
  modified_base 14..15: mod_base = OTHER; note = S-phosphorothioate
  modified_base 15: mod_base = gm
  modified_base 15..16: mod_base = OTHER; note = S-phosphorothioate
  modified_base 16: mod_base = OTHER; note = 2-fluororibose uracil
  modified_base 16..17: mod_base = OTHER; note = S-phosphorothioate
  modified_base 17: mod_base = OTHER; note = 2-fluororibose cytosine
  modified_base 17..18: mod_base = OTHER; note = S-phosphorothioate
  modified_base 18: mod_base = OTHER; note = 2-fluororibose cytosine
  modified_base 18..19: mod_base = OTHER; note = S-phosphorothioate
  modified_base 19: mod_base = OTHER; note = 2-fluororibose cytosine
  modified_base 19..20: mod_base = OTHER; note = S-phosphorothioate
  modified_base 20: mod_base = OTHER; note = 2-fluororibose uracil
  modified_base 20..21: mod_base = OTHER; note = S-phosphorothioate
  modified_base 21: mod_base = OTHER; note = 2-fluororibose uracil
  modified_base 21..22: mod_base = OTHER; note = S-phosphorothioate
  modified_base 22: mod_base = OTHER; note = 2-fluororibose uracil
  modified_base 22..23: mod_base = OTHER; note = S-phosphorothioate
  modified_base 23: mod_base = OTHER; note = 2-fluororibose cytosine
  modified_base 23..24: mod_base = OTHER; note = S-phosphorothioate
  modified_base 24: mod_base = OTHER; note = 2-fluororibose uracil
  modified_base 24..25: mod_base = OTHER; note = S-phosphorothioate
  modified_base 25: mod_base = OTHER; note = deoxyribose cytosine
  modified_base 25..26: mod_base = OTHER; note = S-phosphorothioate
  modified_base 26: mod_base = OTHER; note = deoxyribose inosine
  modified_base 26..27: mod_base = OTHER; note S-N-(1,3-dimethylimidazolidin-2-ylidene)phosphoramidate
  modified_base 27: mod_base = OTHER; note = 2-fluororibose uracil
  modified_base 27..28: mod_base = OTHER; note = S-phosphorothioate
  modified_base 28: mod_base = OTHER; note = 2-fluororibose cytosine
  modified_base 28..29: mod_base = OTHER; note = S-phosphorothioate
  modified_base 29: mod_base = OTHER; note = 2-fluororibose guanine
  modified_base 29..30: mod_base = OTHER; note R-N-(1,3-dimethylimidazolidin-2-ylidene)phosphoramidate
  modified_base 30: mod_base = OTHER; note = 2-fluororibose adenine
  source 1..30: mol_type = other RNA
ccccagcagcttcagtccctttctcgtcga

SEQ ID NO: 82 - RNA, 30 nt, synthetic construct
  misc_feature 1..30: note = Synthetic: WV-42053
  misc_feature 1..30: note = Synthetic: ADR-0104337
  modified_base 1: mod_base = gm
  modified_base 1..2: mod_base = OTHER; note R-N-(1,3-dimethylimidazolidin-2-ylidene)phosphoramidate
  modified_base 2: mod_base = cm
  modified_base 2..3: mod_base = OTHER; note = S-phosphorothioate
  modified_base 3: mod_base = cm
  modified_base 3..4: mod_base = OTHER; note = S-phosphorothioate
  modified_base 4: mod_base = cm
  modified_base 4..5: mod_base = OTHER; note = S-phosphorothioate
  modified_base 5: mod_base = cm
  modified_base 5..6: mod_base = OTHER; note = S-phosphorothioate
  modified_base 6: mod_base = OTHER; note = 2-O-methylribose adenine
  modified_base 6..7: mod_base = OTHER; note = S-phosphorothioate
  modified_base 7: mod_base = gm
  modified_base 7..8: mod_base = OTHER; note = S-phosphorothioate
  modified_base 8: mod_base = cm
  modified_base 8..9: mod_base = OTHER; note = S-phosphorothioate
  modified_base 9: mod_base = OTHER; note = 2-O-methylribose adenine
  modified_base 9..10: mod_base = OTHER; note = S-phosphorothioate
  modified_base 10: mod_base = gm
  modified_base 10..11: mod_base = OTHER; note = S-phosphorothioate
  modified_base 11: mod_base = cm
  modified_base 11..12: mod_base = OTHER; note = S-phosphorothioate
  modified_base 12: mod_base = um
  modified_base 12..13: mod_base = OTHER; note = S-phosphorothioate
  modified_base 13: mod_base = um
  modified_base 13..14: mod_base = OTHER; note = S-phosphorothioate
  modified_base 14: mod_base = cm
  modified_base 14..15: mod_base = OTHER; note = S-phosphorothioate
  modified_base 15: mod_base = OTHER; note = 2-O-methylribose adenine
  modified_base 15..16: mod_base = OTHER; note = S-phosphorothioate
  modified_base 16: mod_base = OTHER; note = 2-fluororibose guanine
  modified_base 16..17: mod_base = OTHER; note = S-phosphorothioate
  modified_base 17: mod_base = OTHER; note = 2-fluororibose uracil
  modified_base 17..18: mod_base = OTHER; note = S-phosphorothioate
  modified_base 18: mod_base = OTHER; note = 2-fluororibose cytosine
  modified_base 18..19: mod_base = OTHER; note = S-phosphorothioate
  modified_base 19: mod_base = OTHER; note = 2-fluororibose cytosine
  modified_base 19..20: mod_base = OTHER; note = S-phosphorothioate
  modified_base 20: mod_base = OTHER; note = 2-fluororibose cytosine
  modified_base 20..21: mod_base = OTHER; note = S-phosphorothioate
  modified_base 21: mod_base = OTHER; note = 2-fluororibose uracil
  modified_base 21..22: mod_base = OTHER; note = S-phosphorothioate
  modified_base 22: mod_base = OTHER; note = 2-fluororibose uracil
  modified_base 22..23: mod_base = OTHER; note = S-phosphorothioate
  modified_base 23: mod_base = OTHER; note = 2-fluororibose uracil
  modified_base 23..24: mod_base = OTHER; note = S-phosphorothioate
  modified_base 24: mod_base = OTHER; note = 2-fluororibose cytosine
  modified_base 24..25: mod_base = OTHER; note = S-phosphorothioate
  modified_base 25: mod_base = OTHER; note = 2-fluororibose uracil
  modified_base 25..26: mod_base = OTHER; note = S-phosphorothioate
  modified_base 26: mod_base = OTHER; note = deoxyribose cytosine
  modified_base 26..27: mod_base = OTHER; note = S-phosphorothioate
  modified_base 27: mod_base = OTHER; note = deoxyribose inosine
  modified_base 27..28: mod_base = OTHER; note S-N-(1,3-dimethylimidazolidin-2-ylidene)phosphoramidate
  modified_base 28: mod_base = OTHER; note = 2-fluororibose uracil
  modified_base 28..29: mod_base = OTHER; note = S-phosphorothioate
  modified_base 29: mod_base = OTHER; note = 2-fluororibose cytosine
  modified_base 29..30: mod_base = OTHER; note R-N-(1,3-dimethylimidazolidin-2-ylidene)phosphoramidate
  modified_base 30: mod_base = OTHER; note = 2-fluororibose guanine
  source 1..30: mol_type = other RNA
gccccagcagcttcagtccctttctcgtcg

SEQ ID NO: 83 - RNA, 30 nt, synthetic construct
  misc_feature 1..30: note = Synthetic: WV-42052
  misc_feature 1..30: note = Synthetic: ADR-0104339
  modified_base 1: mod_base = gm
  modified_base 1..2: mod_base = OTHER; note R-N-(1,3-dimethylimidazolidin-2-ylidene)phosphoramidate
  modified_base 2: mod_base = gm
  modified_base 2..3: mod_base = OTHER; note = S-phosphorothioate
  modified_base 3: mod_base = cm
  modified_base 3..4: mod_base = OTHER; note = S-phosphorothioate
  modified_base 4: mod_base = cm
  modified_base 4..5: mod_base = OTHER; note = S-phosphorothioate
  modified_base 5: mod_base = cm
  modified_base 5..6: mod_base = OTHER; note = S-phosphorothioate
  modified_base 6: mod_base = cm
  modified_base 6..7: mod_base = OTHER; note = S-phosphorothioate
  modified_base 7: mod_base = OTHER; note = 2-O-methylribose adenine
  modified_base 7..8: mod_base = OTHER; note = S-phosphorothioate
  modified_base 8: mod_base = gm
  modified_base 8..9: mod_base = OTHER; note = S-phosphorothioate
  modified_base 9: mod_base = cm
  modified_base 9..10: mod_base = OTHER; note = S-phosphorothioate
  modified_base 10: mod_base = OTHER; note = 2-O-methylribose adenine
  modified_base 10..11: mod_base = OTHER; note = S-phosphorothioate
  modified_base 11: mod_base = gm
  modified_base 11..12: mod_base = OTHER; note = S-phosphorothioate
  modified_base 12: mod_base = cm
  modified_base 12..13: mod_base = OTHER; note = S-phosphorothioate
  modified_base 13: mod_base = um
  modified_base 13..14: mod_base = OTHER; note = S-phosphorothioate
  modified_base 14: mod_base = um
  modified_base 14..15: mod_base = OTHER; note = S-phosphorothioate
  modified_base 15: mod_base = cm
  modified_base 15..16: mod_base = OTHER; note = S-phosphorothioate
  modified_base 16: mod_base = OTHER; note = 2-fluororibose adenine
  modified_base 16..17: mod_base = OTHER; note = S-phosphorothioate
  modified_base 17: mod_base = OTHER; note = 2-fluororibose guanine
  modified_base 17..18: mod_base = OTHER; note = S-phosphorothioate
  modified_base 18: mod_base = OTHER; note = 2-fluororibose uracil
  modified_base 18..19: mod_base = OTHER; note = S-phosphorothioate
  modified_base 19: mod_base = OTHER; note = 2-fluororibose cytosine
  modified_base 19..20: mod_base = OTHER; note = S-phosphorothioate
  modified_base 20: mod_base = OTHER; note = 2-fluororibose cytosine
  modified_base 20..21: mod_base = OTHER; note = S-phosphorothioate
  modified_base 21: mod_base = OTHER; note = 2-fluororibose cytosine
  modified_base 21..22: mod_base = OTHER; note = S-phosphorothioate
  modified_base 22: mod_base = OTHER; note = 2-fluororibose uracil
  modified_base 22..23: mod_base = OTHER; note = S-phosphorothioate
  modified_base 23: mod_base = OTHER; note = 2-fluororibose uracil
  modified_base 23..24: mod_base = OTHER; note = S-phosphorothioate
  modified_base 24: mod_base = OTHER; note = 2-fluororibose uracil
  modified_base 24..25: mod_base = OTHER; note = S-phosphorothioate
  modified_base 25: mod_base = OTHER; note = 2-fluororibose cytosine
  modified_base 25..26: mod_base = OTHER; note = S-phosphorothioate
  modified_base 26: mod_base = OTHER; note = 2-fluororibose uracil
  modified_base 26..27: mod_base = OTHER; note = S-phosphorothioate
  modified_base 27: mod_base = OTHER; note = deoxyribose cytosine
  modified_base 27..28: mod_base = OTHER; note = S-phosphorothioate
  modified_base 28: mod_base = OTHER; note = deoxyribose inosine
  modified_base 28..29: mod_base = OTHER; note S-N-(1,3-dimethylimidazolidin-2-ylidene)phosphoramidate
  modified_base 29: mod_base = OTHER; note = 2-fluororibose uracil
  modified_base 29..30: mod_base = OTHER; note R-N-(1,3-dimethylimidazolidin-2-ylidene)phosphoramidate
  modified_base 30: mod_base = OTHER; note = 2-fluororibose cytosine
  source 1..30: mol_type = other RNA
ggccccagcagcttcagtccctttctcgtc

SEQ ID NO: 84 - RNA, 30 nt, synthetic construct
  misc_feature 1..30: note = Synthetic: WV-42051
  misc_feature 1..30: note = Synthetic: ADR-0104364
  modified_base 1: mod_base = um
  modified_base 1..2: mod_base = OTHER; note R-N-(1,3-dimethylimidazolidin-2-ylidene)phosphoramidate
  modified_base 2: mod_base = gm
  modified_base 2..3: mod_base = OTHER; note = S-phosphorothioate
  modified_base 3: mod_base = gm
  modified_base 3..4: mod_base = OTHER; note = S-phosphorothioate
  modified_base 4: mod_base = cm
  modified_base 4..5: mod_base = OTHER; note = S-phosphorothioate
  modified_base 5: mod_base = cm
  modified_base 5..6: mod_base = OTHER; note = S-phosphorothioate
  modified_base 6: mod_base = cm
  modified_base 6..7: mod_base = OTHER; note = S-phosphorothioate
  modified_base 7: mod_base = cm
  modified_base 7..8: mod_base = OTHER; note = S-phosphorothioate
  modified_base 8: mod_base = OTHER; note = 2-O-methylribose adenine
  modified_base 8..9: mod_base = OTHER; note = S-phosphorothioate
  modified_base 9: mod_base = gm
  modified_base 9..10: mod_base = OTHER; note = S-phosphorothioate
  modified_base 10: mod_base = cm
  modified_base 10..11: mod_base = OTHER; note = S-phosphorothioate
  modified_base 11: mod_base = OTHER; note = 2-O-methylribose adenine
  modified_base 11..12: mod_base = OTHER; note = S-phosphorothioate
  modified_base 12: mod_base = gm
  modified_base 12..13: mod_base = OTHER; note = S-phosphorothioate
  modified_base 13: mod_base = cm
  modified_base 13..14: mod_base = OTHER; note = S-phosphorothioate
  modified_base 14: mod_base = um
  modified_base 14..15: mod_base = OTHER; note = S-phosphorothioate
  modified_base 15: mod_base = um
  modified_base 15..16: mod_base = OTHER; note = S-phosphorothioate
  modified_base 16: mod_base = OTHER; note = 2-fluororibose cytosine
  modified_base 16..17: mod_base = OTHER; note = S-phosphorothioate
  modified_base 17: mod_base = OTHER; note = 2-fluororibose adenine
  modified_base 17..18: mod_base = OTHER; note = S-phosphorothioate
  modified_base 18: mod_base = OTHER; note = 2-fluororibose guanine
  modified_base 18..19: mod_base = OTHER; note = S-phosphorothioate
  modified_base 19: mod_base = OTHER; note = 2-fluororibose uracil
  modified_base 19..20: mod_base = OTHER; note = S-phosphorothioate
  modified_base 20: mod_base = OTHER; note = 2-fluororibose cytosine
  modified_base 20..21: mod_base = OTHER; note = S-phosphorothioate
  modified_base 21: mod_base = OTHER; note = 2-fluororibose cytosine
  modified_base 21..22: mod_base = OTHER; note = S-phosphorothioate
  modified_base 22: mod_base = OTHER; note = 2-fluororibose cytosine
  modified_base 22..23: mod_base = OTHER; note = S-phosphorothioate
  modified_base 23: mod_base = OTHER; note = 2-fluororibose uracil
  modified_base 23..24: mod_base = OTHER; note = S-phosphorothioate
  modified_base 24: mod_base = OTHER; note = 2-fluororibose uracil
  modified_base 24..25: mod_base = OTHER; note = S-phosphorothioate
  modified_base 25: mod_base = OTHER; note = 2-fluororibose uracil
  modified_base 25..26: mod_base = OTHER; note = S-phosphorothioate
  modified_base 26: mod_base = OTHER; note = 2-fluororibose cytosine
  modified_base 26..27: mod_base = OTHER; note = S-phosphorothioate
  modified_base 27: mod_base = OTHER; note = 2-fluororibose uracil
  modified_base 27..28: mod_base = OTHER; note = S-phosphorothioate
  modified_base 28: mod_base = OTHER; note = deoxyribose cytosine
  modified_base 28..29: mod_base = OTHER; note = S-phosphorothioate
  modified_base 29: mod_base = OTHER; note = deoxyribose inosine
  modified_base 29..30: mod_base = OTHER; note S-N-(1,3-dimethylimidazolidin-2-ylidene)phosphoramidate
  modified_base 30: mod_base = OTHER; note = 2-fluororibose uracil
  source 1..30: mol_type = other RNA
tggccccagcagcttcagtccctttctcgt

SEQ ID NO: 85 - RNA, 30 nt, synthetic construct
  misc_feature 1..30: note = Synthetic: WV-42050
  misc_feature 1..30: note = Synthetic: ADR-0103943
  modified_base 1: mod_base = OTHER; note = 2-fluororibose uracil
  modified_base 1..2: mod_base = OTHER; note R-N-(1,3-dimethylimidazolidin-2-ylidene)phosphoramidate
  modified_base 2: mod_base = OTHER; note = deoxyribose cytosine
  modified_base 2..3: mod_base = OTHER; note = S-phosphorothioate
  modified_base 3: mod_base = OTHER; note = deoxyribose inosine
  modified_base 3..4: mod_base = OTHER; note S-N-(1,3-dimethylimidazolidin-2-ylidene)phosphoramidate
  modified_base 4: mod_base = OTHER; note = 2-fluororibose uracil
  modified_base 4..5: mod_base = OTHER; note = S-phosphorothioate
  modified_base 5: mod_base = OTHER; note = 2-fluororibose cytosine
  modified_base 5..6: mod_base = OTHER; note = S-phosphorothioate
  modified_base 6: mod_base = OTHER; note = 2-fluororibose guanine
  modified_base 6..7: mod_base = OTHER; note = S-phosphorothioate
  modified_base 7: mod_base = OTHER; note = 2-fluororibose adenine
  modified_base 7..8: mod_base = OTHER; note = S-phosphorothioate
  modified_base 8: mod_base = OTHER; note = 2-fluororibose uracil
  modified_base 8..9: mod_base = OTHER; note = S-phosphorothioate
  modified_base 9: mod_base = OTHER; note = 2-fluororibose guanine
  modified_base 9..10: mod_base = OTHER; note = S-phosphorothioate
  modified_base 10: mod_base = OTHER; note = 2-fluororibose guanine
  modified_base 10..11: mod_base = OTHER; note = S-phosphorothioate
  modified_base 11: mod_base = OTHER; note = 2-fluororibose uracil
  modified_base 11..12: mod_base = OTHER; note = S-phosphorothioate
  modified_base 12: mod_base = OTHER; note = 2-fluororibose cytosine
  modified_base 12..13: mod_base = OTHER; note = S-phosphorothioate
  modified_base 13: mod_base = OTHER; note = 2-fluororibose adenine
  modified_base 13..14: mod_base = OTHER; note = S-phosphorothioate
  modified_base 14: mod_base = OTHER; note = 2-fluororibose guanine
  modified_base 14..15: mod_base = OTHER; note = S-phosphorothioate
  modified_base 15: mod_base = OTHER; note = 2-fluororibose cytosine
  modified_base 15..16: mod_base = OTHER; note = S-phosphorothioate
  modified_base 16: mod_base = OTHER; note = 2-O-methylribose adenine
  modified_base 16..17: mod_base = OTHER; note = S-phosphorothioate
  modified_base 17: mod_base = cm
  modified_base 17..18: mod_base = OTHER; note = S-phosphorothioate
  modified_base 18: mod_base = OTHER; note = 2-O-methylribose adenine
  modified_base 18..19: mod_base = OTHER; note = S-phosphorothioate
  modified_base 19: mod_base = gm
  modified_base 19..20: mod_base = OTHER; note = S-phosphorothioate
  modified_base 20: mod_base = cm
  modified_base 20..21: mod_base = OTHER; note = S-phosphorothioate
  modified_base 21: mod_base = cm
  modified_base 21..22: mod_base = OTHER; note = S-phosphorothioate
  modified_base 22: mod_base = um
  modified_base 22..23: mod_base = OTHER; note = S-phosphorothioate
  modified_base 23: mod_base = um
  modified_base 23..24: mod_base = OTHER; note = S-phosphorothioate
  modified_base 24: mod_base = OTHER; note = 2-O-methylribose adenine
  modified_base 24..25: mod_base = OTHER; note = S-phosphorothioate
  modified_base 25: mod_base = um
  modified_base 25..26: mod_base = OTHER; note = S-phosphorothioate
  modified_base 26: mod_base = gm
  modified_base 26..27: mod_base = OTHER; note = S-phosphorothioate
  modified_base 27: mod_base = cm
  modified_base 27..28: mod_base = OTHER; note = S-phosphorothioate
  modified_base 28: mod_base = OTHER; note = 2-O-methylribose adenine
  modified_base 28..29: mod_base = OTHER; note = S-phosphorothioate
  modified_base 29: mod_base = cm
  modified_base 29..30: mod_base = OTHER; note R-N-(1,3-dimethylimidazolidin-2-ylidene)phosphoramidate
  modified_base 30: mod_base = gm
  source 1..30: mol_type = other RNA
tcgtcgatggtcagcacagccttatgcacg

SEQ ID NO: 86 - RNA, 30 nt, synthetic construct
  misc_feature 1..30: note = Synthetic: WV-42049
  misc_feature 1..30: note = Synthetic: ADR-0103774
  modified_base 1: mod_base = OTHER; note = 2-fluororibose cytosine
  modified_base 1..2: mod_base = OTHER; note R-N-(1,3-dimethylimidazolidin-2-ylidene)phosphoramidate
  modified_base 2: mod_base = OTHER; note = 2-fluororibose uracil
  modified_base 2..3: mod_base = OTHER; note = S-phosphorothioate
  modified_base 3: mod_base = OTHER; note = deoxyribose cytosine
  modified_base 3..4: mod_base = OTHER; note = S-phosphorothioate
  modified_base 4: mod_base = OTHER; note = deoxyribose inosine
  modified_base 4..5: mod_base = OTHER; note S-N-(1,3-dimethylimidazolidin-2-ylidene)phosphoramidate
  modified_base 5: mod_base = OTHER; note = 2-fluororibose uracil
  modified_base 5..6: mod_base = OTHER; note = S-phosphorothioate
  modified_base 6: mod_base = OTHER; note = 2-fluororibose cytosine
  modified_base 6..7: mod_base = OTHER; note = S-phosphorothioate
  modified_base 7: mod_base = OTHER; note = 2-fluororibose guanine
  modified_base 7..8: mod_base = OTHER; note = S-phosphorothioate
  modified_base 8: mod_base = OTHER; note = 2-fluororibose adenine
  modified_base 8..9: mod_base = OTHER; note = S-phosphorothioate
  modified_base 9: mod_base = OTHER; note = 2-fluororibose uracil
  modified_base 9..10: mod_base = OTHER; note = S-phosphorothioate
  modified_base 10: mod_base = OTHER; note = 2-fluororibose guanine
  modified_base 10..11: mod_base = OTHER; note = S-phosphorothioate
  modified_base 11: mod_base = OTHER; note = 2-fluororibose guanine
  modified_base 11..12: mod_base = OTHER; note = S-phosphorothioate
  modified_base 12: mod_base = OTHER; note = 2-fluororibose uracil
  modified_base 12..13: mod_base = OTHER; note = S-phosphorothioate
  modified_base 13: mod_base = OTHER; note = 2-fluororibose cytosine
  modified_base 13..14: mod_base = OTHER; note = S-phosphorothioate
  modified_base 14: mod_base = OTHER; note = 2-fluororibose adenine
  modified_base 14..15: mod_base = OTHER; note = S-phosphorothioate
  modified_base 15: mod_base = OTHER; note = 2-fluororibose guanine
  modified_base 15..16: mod_base = OTHER; note = S-phosphorothioate
  modified_base 16: mod_base = cm
  modified_base 16..17: mod_base = OTHER; note = S-phosphorothioate
  modified_base 17: mod_base = OTHER; note = 2-O-methylribose adenine
  modified_base 17..18: mod_base = OTHER; note = S-phosphorothioate
  modified_base 18: mod_base = cm
  modified_base 18..19: mod_base = OTHER; note = S-phosphorothioate
  modified_base 19: mod_base = OTHER; note = 2-O-methylribose adenine
  modified_base 19..20: mod_base = OTHER; note = S-phosphorothioate
  modified_base 20: mod_base = gm
  modified_base 20..21: mod_base = OTHER; note = S-phosphorothioate
  modified_base 21: mod_base = cm
  modified_base 21..22: mod_base = OTHER; note = S-phosphorothioate
  modified_base 22: mod_base = cm
  modified_base 22..23: mod_base = OTHER; note = S-phosphorothioate
  modified_base 23: mod_base = um
  modified_base 23..24: mod_base = OTHER; note = S-phosphorothioate
  modified_base 24: mod_base = um
  modified_base 24..25: mod_base = OTHER; note = S-phosphorothioate
  modified_base 25: mod_base = OTHER; note = 2-O-methylribose adenine
  modified_base 25..26: mod_base = OTHER; note = S-phosphorothioate
  modified_base 26: mod_base = um
  modified_base 26..27: mod_base = OTHER; note = S-phosphorothioate
  modified_base 27: mod_base = gm
  modified_base 27..28: mod_base = OTHER; note = S-phosphorothioate
  modified_base 28: mod_base = cm
  modified_base 28..29: mod_base = OTHER; note = S-phosphorothioate
  modified_base 29: mod_base = OTHER; note = 2-O-methylribose adenine
  modified_base 29..30: mod_base = OTHER; note R-N-(1,3-dimethylimidazolidin-2-ylidene)phosphoramidate
  modified_base 30: mod_base = cm
  source 1..30: mol_type = other RNA
ctcgtcgatggtcagcacagccttatgcac

SEQ ID NO: 87 - RNA, 30 nt, synthetic construct
  misc_feature 1..30: note = Synthetic: WV-42048
  misc_feature 1..30: note = Synthetic: ADR-0103921
  modified_base 1: mod_base = OTHER; note = 2-fluororibose uracil
  modified_base 1..2: mod_base = OTHER; note R-N-(1,3-dimethylimidazolidin-2-ylidene)phosphoramidate
  modified_base 2: mod_base = OTHER; note = 2-fluororibose cytosine
  modified_base 2..3: mod_base = OTHER; note = S-phosphorothioate
  modified_base 3: mod_base = OTHER; note = 2-fluororibose uracil
  modified_base 3..4: mod_base = OTHER; note = S-phosphorothioate
  modified_base 4: mod_base = OTHER; note = deoxyribose cytosine
  modified_base 4..5: mod_base = OTHER; note = S-phosphorothioate
  modified_base 5: mod_base = OTHER; note = deoxyribose inosine
  modified_base 5..6: mod_base = OTHER; note S-N-(1,3-dimethylimidazolidin-2-ylidene)phosphoramidate
  modified_base 6: mod_base = OTHER; note = 2-fluororibose uracil
  modified_base 6..7: mod_base = OTHER; note = S-phosphorothioate
  modified_base 7: mod_base = OTHER; note = 2-fluororibose cytosine
  modified_base 7..8: mod_base = OTHER; note = S-phosphorothioate
  modified_base 8: mod_base = OTHER; note = 2-fluororibose guanine
  modified_base 8..9: mod_base = OTHER; note = S-phosphorothioate
  modified_base 9: mod_base = OTHER; note = 2-fluororibose adenine
  modified_base 9..10: mod_base = OTHER; note = S-phosphorothioate
  modified_base 10: mod_base = OTHER; note = 2-fluororibose uracil
  modified_base 10..11: mod_base = OTHER; note = S-phosphorothioate
  modified_base 11: mod_base = OTHER; note = 2-fluororibose guanine
  modified_base 11..12: mod_base = OTHER; note = S-phosphorothioate
  modified_base 12: mod_base = OTHER; note = 2-fluororibose guanine
  modified_base 12..13: mod_base = OTHER; note = S-phosphorothioate
  modified_base 13: mod_base = OTHER; note = 2-fluororibose uracil
  modified_base 13..14: mod_base = OTHER; note = S-phosphorothioate
  modified_base 14: mod_base = OTHER; note = 2-fluororibose cytosine
  modified_base 14..15: mod_base = OTHER; note = S-phosphorothioate
  modified_base 15: mod_base = OTHER; note = 2-fluororibose adenine
  modified_base 15..16: mod_base = OTHER; note = S-phosphorothioate
  modified_base 16: mod_base = gm
  modified_base 16..17: mod_base = OTHER; note = S-phosphorothioate
  modified_base 17: mod_base = cm
  modified_base 17..18: mod_base = OTHER; note = S-phosphorothioate
  modified_base 18: mod_base = OTHER; note = 2-O-methylribose adenine
  modified_base 18..19: mod_base = OTHER; note = S-phosphorothioate
  modified_base 19: mod_base = cm
  modified_base 19..20: mod_base = OTHER; note = S-phosphorothioate
  modified_base 20: mod_base = OTHER; note = 2-O-methylribose adenine
  modified_base 20..21: mod_base = OTHER; note = S-phosphorothioate
  modified_base 21: mod_base = gm
  modified_base 21..22: mod_base = OTHER; note = S-phosphorothioate
  modified_base 22: mod_base = cm
  modified_base 22..23: mod_base = OTHER; note = S-phosphorothioate
  modified_base 23: mod_base = cm
  modified_base 23..24: mod_base = OTHER; note = S-phosphorothioate
  modified_base 24: mod_base = um
  modified_base 24..25: mod_base = OTHER; note = S-phosphorothioate
  modified_base 25: mod_base = um
  modified_base 25..26: mod_base = OTHER; note = S-phosphorothioate
  modified_base 26: mod_base = OTHER; note = 2-O-methylribose adenine
  modified_base 26..27: mod_base = OTHER; note = S-phosphorothioate
  modified_base 27: mod_base = um
  modified_base 27..28: mod_base = OTHER; note = S-phosphorothioate
  modified_base 28: mod_base = gm
  modified_base 28..29: mod_base = OTHER; note = S-phosphorothioate
  modified_base 29: mod_base = cm
  modified_base 29..30: mod_base = OTHER; note R-N-(1,3-dimethylimidazolidin-2-ylidene)phosphoramidate
  modified_base 30: mod_base = OTHER; note = 2-O-methylribose adenine
  source 1..30: mol_type = other RNA
tctcgtcgatggtcagcacagccttatgca

SEQ ID NO: 88 - RNA, 30 nt, synthetic construct
  misc_feature 1..30: note = Synthetic: WV-42047
  misc_feature 1..30: note = Synthetic: ADR-0103939
  modified_base 1: mod_base = OTHER; note = 2-fluororibose uracil
  modified_base 1..2: mod_base = OTHER; note R-N-(1,3-dimethylimidazolidin-2-ylidene)phosphoramidate
  modified_base 2: mod_base = OTHER; note = 2-fluororibose uracil
  modified_base 2..3: mod_base = OTHER; note = S-phosphorothioate
  modified_base 3: mod_base = OTHER; note = 2-fluororibose cytosine
  modified_base 3..4: mod_base = OTHER; note = S-phosphorothioate
  modified_base 4: mod_base = OTHER; note = 2-fluororibose uracil
  modified_base 4..5: mod_base = OTHER; note = S-phosphorothioate
  modified_base 5: mod_base = OTHER; note = deoxyribose cytosine
  modified_base 5..6: mod_base = OTHER; note = S-phosphorothioate
  modified_base 6: mod_base = OTHER; note = deoxyribose inosine
  modified_base 6..7: mod_base = OTHER; note S-N-(1,3-dimethylimidazolidin-2-ylidene)phosphoramidate
  modified_base 7: mod_base = OTHER; note = 2-fluororibose uracil
  modified_base 7..8: mod_base = OTHER; note = S-phosphorothioate
  modified_base 8: mod_base = OTHER; note = 2-fluororibose cytosine
  modified_base 8..9: mod_base = OTHER; note = S-phosphorothioate
  modified_base 9: mod_base = OTHER; note = 2-fluororibose guanine
  modified_base 9..10: mod_base = OTHER; note = S-phosphorothioate
  modified_base 10: mod_base = OTHER; note = 2-fluororibose adenine
  modified_base 10..11: mod_base = OTHER; note = S-phosphorothioate
  modified_base 11: mod_base = OTHER; note = 2-fluororibose uracil
  modified_base 11..12: mod_base = OTHER; note = S-phosphorothioate
  modified_base 12: mod_base = OTHER; note = 2-fluororibose guanine
  modified_base 12..13: mod_base = OTHER; note = S-phosphorothioate
  modified_base 13: mod_base = OTHER; note = 2-fluororibose guanine
  modified_base 13..14: mod_base = OTHER; note = S-phosphorothioate
  modified_base 14: mod_base = OTHER; note = 2-fluororibose uracil
  modified_base 14..15: mod_base = OTHER; note = S-phosphorothioate
  modified_base 15: mod_base = OTHER; note = 2-fluororibose cytosine
  modified_base 15..16: mod_base = OTHER; note = S-phosphorothioate
  modified_base 16: mod_base = OTHER; note = 2-O-methylribose adenine
  modified_base 16..17: mod_base = OTHER; note = S-phosphorothioate
  modified_base 17: mod_base = gm
  modified_base 17..18: mod_base = OTHER; note = S-phosphorothioate
  modified_base 18: mod_base = cm
  modified_base 18..19: mod_base = OTHER; note = S-phosphorothioate
  modified_base 19: mod_base = OTHER; note = 2-O-methylribose adenine
  modified_base 19..20: mod_base = OTHER; note = S-phosphorothioate
  modified_base 20: mod_base = cm
  modified_base 20..21: mod_base = OTHER; note = S-phosphorothioate
  modified_base 21: mod_base = OTHER; note = 2-O-methylribose adenine
  modified_base 21..22: mod_base = OTHER; note = S-phosphorothioate
  modified_base 22: mod_base = gm
  modified_base 22..23: mod_base = OTHER; note = S-phosphorothioate
  modified_base 23: mod_base = cm
  modified_base 23..24: mod_base = OTHER; note = S-phosphorothioate
  modified_base 24: mod_base = cm
  modified_base 24..25: mod_base = OTHER; note = S-phosphorothioate
  modified_base 25: mod_base = um
  modified_base 25..26: mod_base = OTHER; note = S-phosphorothioate
  modified_base 26: mod_base = um
  modified_base 26..27: mod_base = OTHER; note = S-phosphorothioate
  modified_base 27: mod_base = OTHER; note = 2-O-methylribose adenine
  modified_base 27..28: mod_base = OTHER; note = S-phosphorothioate
  modified_base 28: mod_base = um
  modified_base 28..29: mod_base = OTHER; note = S-phosphorothioate
  modified_base 29: mod_base = gm
  modified_base 29..30: mod_base = OTHER; note R-N-(1,3-dimethylimidazolidin-2-ylidene)phosphoramidate
  modified_base 30: mod_base = cm
  source 1..30: mol_type = other RNA
ttctcgtcgatggtcagcacagccttatgc

SEQ ID NO: 89 - RNA, 30 nt, synthetic construct
  misc_feature 1..30: note = Synthetic: WV-42046
  misc_feature 1..30: note = Synthetic: ADR-0103942
  modified_base 1: mod_base = OTHER; note = 2-fluororibose uracil
  modified_base 1..2: mod_base = OTHER; note R-N-(1,3-dimethylimidazolidin-2-ylidene)phosphoramidate
  modified_base 2: mod_base = OTHER; note = 2-fluororibose uracil
  modified_base 2..3: mod_base = OTHER; note = S-phosphorothioate
  modified_base 3: mod_base = OTHER; note = 2-fluororibose uracil
  modified_base 3..4: mod_base = OTHER; note = S-phosphorothioate
  modified_base 4: mod_base = OTHER; note = 2-fluororibose cytosine
  modified_base 4..5: mod_base = OTHER; note = S-phosphorothioate
  modified_base 5: mod_base = OTHER; note = 2-fluororibose uracil
  modified_base 5..6: mod_base = OTHER; note = S-phosphorothioate
  modified_base 6: mod_base = OTHER; note = deoxyribose cytosine
  modified_base 6..7: mod_base = OTHER; note = S-phosphorothioate
  modified_base 7: mod_base = OTHER; note = deoxyribose inosine
  modified_base 7..8: mod_base = OTHER; note S-N-(1,3-dimethylimidazolidin-2-ylidene)phosphoramidate
  modified_base 8: mod_base = OTHER; note = 2-fluororibose uracil
  modified_base 8..9: mod_base = OTHER; note = S-phosphorothioate
  modified_base 9: mod_base = OTHER; note = 2-fluororibose cytosine
  modified_base 9..10: mod_base = OTHER; note = S-phosphorothioate
  modified_base 10: mod_base = OTHER; note = 2-fluororibose guanine
  modified_base 10..11: mod_base = OTHER; note = S-phosphorothioate
  modified_base 11: mod_base = OTHER; note = 2-fluororibose adenine
  modified_base 11..12: mod_base = OTHER; note = S-phosphorothioate
  modified_base 12: mod_base = OTHER; note = 2-fluororibose uracil
  modified_base 12..13: mod_base = OTHER; note = S-phosphorothioate
  modified_base 13: mod_base = OTHER; note = 2-fluororibose guanine
  modified_base 13..14: mod_base = OTHER; note = S-phosphorothioate
  modified_base 14: mod_base = OTHER; note = 2-fluororibose guanine
  modified_base 14..15: mod_base = OTHER; note = S-phosphorothioate
  modified_base 15: mod_base = OTHER; note = 2-fluororibose uracil
  modified_base 15..16: mod_base = OTHER; note = S-phosphorothioate
  modified_base 16: mod_base = cm
  modified_base 16..17: mod_base = OTHER; note = S-phosphorothioate
  modified_base 17: mod_base = OTHER; note = 2-O-methylribose adenine
  modified_base 17..18: mod_base = OTHER; note = S-phosphorothioate
  modified_base 18: mod_base = gm
  modified_base 18..19: mod_base = OTHER; note = S-phosphorothioate
  modified_base 19: mod_base = cm
  modified_base 19..20: mod_base = OTHER; note = S-phosphorothioate
  modified_base 20: mod_base = OTHER; note = 2-O-methylribose adenine
  modified_base 20..21: mod_base = OTHER; note = S-phosphorothioate
  modified_base 21: mod_base = cm
  modified_base 21..22: mod_base = OTHER; note = S-phosphorothioate
  modified_base 22: mod_base = OTHER; note = 2-O-methylribose adenine
  modified_base 22..23: mod_base = OTHER; note = S-phosphorothioate
  modified_base 23: mod_base = gm
  modified_base 23..24: mod_base = OTHER; note = S-phosphorothioate
  modified_base 24: mod_base = cm
  modified_base 24..25: mod_base = OTHER; note = S-phosphorothioate
  modified_base 25: mod_base = cm
  modified_base 25..26: mod_base = OTHER; note = S-phosphorothioate
  modified_base 26: mod_base = um
  modified_base 26..27: mod_base = OTHER; note = S-phosphorothioate
  modified_base 27: mod_base = um
  modified_base 27..28: mod_base = OTHER; note = S-phosphorothioate
  modified_base 28: mod_base = OTHER; note = 2-O-methylribose adenine
  modified_base 28..29: mod_base = OTHER; note = S-phosphorothioate
  modified_base 29: mod_base = um
  modified_base 29..30: mod_base = OTHER; note R-N-(1,3-dimethylimidazolidin-2-ylidene)phosphoramidate
  modified_base 30: mod_base = gm
  source 1..30: mol_type = other RNA
tttctcgtcgatggtcagcacagccttatg

SEQ ID NO: 90 - RNA, 30 nt, synthetic construct
  misc_feature 1..30: note = Synthetic: WV-42045
  misc_feature 1..30: note = Synthetic: ADR-0103773
  modified_base 1: mod_base = OTHER; note = 2-fluororibose cytosine
  modified_base 1..2: mod_base = OTHER; note R-N-(1,3-dimethylimidazolidin-2-ylidene)phosphoramidate
  modified_base 2: mod_base = OTHER; note = 2-fluororibose uracil
  modified_base 2..3: mod_base = OTHER; note = S-phosphorothioate
  modified_base 3: mod_base = OTHER; note = 2-fluororibose uracil
  modified_base 3..4: mod_base = OTHER; note = S-phosphorothioate
  modified_base 4: mod_base = OTHER; note = 2-fluororibose uracil
  modified_base 4..5: mod_base = OTHER; note = S-phosphorothioate
  modified_base 5: mod_base = OTHER; note = 2-fluororibose cytosine
  modified_base 5..6: mod_base = OTHER; note = S-phosphorothioate
  modified_base 6: mod_base = OTHER; note = 2-fluororibose uracil
  modified_base 6..7: mod_base = OTHER; note = S-phosphorothioate
  modified_base 7: mod_base = OTHER; note = deoxyribose cytosine
  modified_base 7..8: mod_base = OTHER; note = S-phosphorothioate
  modified_base 8: mod_base = OTHER; note = deoxyribose inosine
  modified_base 8..9: mod_base = OTHER; note S-N-(1,3-dimethylimidazolidin-2-ylidene)phosphoramidate
  modified_base 9: mod_base = OTHER; note = 2-fluororibose uracil
  modified_base 9..10: mod_base = OTHER; note = S-phosphorothioate
  modified_base 10: mod_base = OTHER; note = 2-fluororibose cytosine
  modified_base 10..11: mod_base = OTHER; note = S-phosphorothioate
  modified_base 11: mod_base = OTHER; note = 2-fluororibose guanine
  modified_base 11..12: mod_base = OTHER; note = S-phosphorothioate
  modified_base 12: mod_base = OTHER; note = 2-fluororibose adenine
  modified_base 12..13: mod_base = OTHER; note = S-phosphorothioate
  modified_base 13: mod_base = OTHER; note = 2-fluororibose uracil
  modified_base 13..14: mod_base = OTHER; note = S-phosphorothioate
  modified_base 14: mod_base = OTHER; note = 2-fluororibose guanine
  modified_base 14..15: mod_base = OTHER; note = S-phosphorothioate
  modified_base 15: mod_base = OTHER; note = 2-fluororibose guanine
  modified_base 15..16: mod_base = OTHER; note = S-phosphorothioate
  modified_base 16: mod_base = um
  modified_base 16..17: mod_base = OTHER; note = S-phosphorothioate
  modified_base 17: mod_base = cm
  modified_base 17..18: mod_base = OTHER; note = S-phosphorothioate
  modified_base 18: mod_base = OTHER; note = 2-O-methylribose adenine
  modified_base 18..19: mod_base = OTHER; note = S-phosphorothioate
  modified_base 19: mod_base = gm
  modified_base 19..20: mod_base = OTHER; note = S-phosphorothioate
  modified_base 20: mod_base = cm
  modified_base 20..21: mod_base = OTHER; note = S-phosphorothioate
  modified_base 21: mod_base = OTHER; note = 2-O-methylribose adenine
  modified_base 21..22: mod_base = OTHER; note = S-phosphorothioate
  modified_base 22: mod_base = cm
  modified_base 22..23: mod_base = OTHER; note = S-phosphorothioate
  modified_base 23: mod_base = OTHER; note = 2-O-methylribose adenine
  modified_base 23..24: mod_base = OTHER; note = S-phosphorothioate
  modified_base 24: mod_base = gm
  modified_base 24..25: mod_base = OTHER; note = S-phosphorothioate
  modified_base 25: mod_base = cm
  modified_base 25..26: mod_base = OTHER; note = S-phosphorothioate
  modified_base 26: mod_base = cm
  modified_base 26..27: mod_base = OTHER; note = S-phosphorothioate
  modified_base 27: mod_base = um
  modified_base 27..28: mod_base = OTHER; note = S-phosphorothioate
  modified_base 28: mod_base = um
  modified_base 28..29: mod_base = OTHER; note = S-phosphorothioate
  modified_base 29: mod_base = OTHER; note = 2-O-methylribose adenine
  modified_base 29..30: mod_base = OTHER; note R-N-(1,3-dimethylimidazolidin-2-ylidene)phosphoramidate
  modified_base 30: mod_base = um
  source 1..30: mol_type = other RNA
ctttctcgtcgatggtcagcacagccttat

SEQ ID NO: 91 - RNA, 30 nt, synthetic construct
  misc_feature 1..30: note = Synthetic: WV-42044
  misc_feature 1..30: note = Synthetic: ADR-0103763
  modified_base 1: mod_base = OTHER; note = 2-fluororibose cytosine
  modified_base 1..2: mod_base = OTHER; note R-N-(1,3-dimethylimidazolidin-2-ylidene)phosphoramidate
  modified_base 2: mod_base = OTHER; note = 2-fluororibose cytosine
  modified_base 2..3: mod_base = OTHER; note = S-phosphorothioate
  modified_base 3: mod_base = OTHER; note = 2-fluororibose uracil
  modified_base 3..4: mod_base = OTHER; note = S-phosphorothioate
  modified_base 4: mod_base = OTHER; note = 2-fluororibose uracil
  modified_base 4..5: mod_base = OTHER; note = S-phosphorothioate
  modified_base 5: mod_base = OTHER; note = 2-fluororibose uracil
  modified_base 5..6: mod_base = OTHER; note = S-phosphorothioate
  modified_base 6: mod_base = OTHER; note = 2-fluororibose cytosine
  modified_base 6..7: mod_base = OTHER; note = S-phosphorothioate
  modified_base 7: mod_base = OTHER; note = 2-fluororibose uracil
  modified_base 7..8: mod_base = OTHER; note = S-phosphorothioate
  modified_base 8: mod_base = OTHER; note = deoxyribose cytosine
  modified_base 8..9: mod_base = OTHER; note = S-phosphorothioate
  modified_base 9: mod_base = OTHER; note = deoxyribose inosine
  modified_base 9..10: mod_base = OTHER; note S-N-(1,3-dimethylimidazolidin-2-ylidene)phosphoramidate
  modified_base 10: mod_base = OTHER; note = 2-fluororibose uracil
  modified_base 10..11: mod_base = OTHER; note = S-phosphorothioate
  modified_base 11: mod_base = OTHER; note = 2-fluororibose cytosine
  modified_base 11..12: mod_base = OTHER; note = S-phosphorothioate
  modified_base 12: mod_base = OTHER; note = 2-fluororibose guanine
  modified_base 12..13: mod_base = OTHER; note = S-phosphorothioate
  modified_base 13: mod_base = OTHER; note = 2-fluororibose adenine
  modified_base 13..14: mod_base = OTHER; note = S-phosphorothioate
  modified_base 14: mod_base = OTHER; note = 2-fluororibose uracil
  modified_base 14..15: mod_base = OTHER; note = S-phosphorothioate
  modified_base 15: mod_base = OTHER; note = 2-fluororibose guanine
  modified_base 15..16: mod_base = OTHER; note = S-phosphorothioate
  modified_base 16: mod_base = gm
  modified_base 16..17: mod_base = OTHER; note = S-phosphorothioate
  modified_base 17: mod_base = um
  modified_base 17..18: mod_base = OTHER; note = S-phosphorothioate
  modified_base 18: mod_base = cm
  modified_base 18..19: mod_base = OTHER; note = S-phosphorothioate
  modified_base 19: mod_base = OTHER; note = 2-O-methylribose adenine
  modified_base 19..20: mod_base = OTHER; note = S-phosphorothioate
  modified_base 20: mod_base = gm
  modified_base 20..21: mod_base = OTHER; note = S-phosphorothioate
  modified_base 21: mod_base = cm
  modified_base 21..22: mod_base = OTHER; note = S-phosphorothioate
  modified_base 22: mod_base = OTHER; note = 2-O-methylribose adenine
  modified_base 22..23: mod_base = OTHER; note = S-phosphorothioate
  modified_base 23: mod_base = cm
  modified_base 23..24: mod_base = OTHER; note = S-phosphorothioate
  modified_base 24: mod_base = OTHER; note = 2-O-methylribose adenine
  modified_base 24..25: mod_base = OTHER; note = S-phosphorothioate
  modified_base 25: mod_base = gm
  modified_base 25..26: mod_base = OTHER; note = S-phosphorothioate
  modified_base 26: mod_base = cm
  modified_base 26..27: mod_base = OTHER; note = S-phosphorothioate
  modified_base 27: mod_base = cm
  modified_base 27..28: mod_base = OTHER; note = S-phosphorothioate
  modified_base 28: mod_base = um
  modified_base 28..29: mod_base = OTHER; note = S-phosphorothioate
  modified_base 29: mod_base = um
  modified_base 29..30: mod_base = OTHER; note R-N-(1,3-dimethylimidazolidin-2-ylidene)phosphoramidate
  modified_base 30: mod_base = OTHER; note = 2-O-methylribose adenine
  source 1..30: mol_type = other RNA
cctttctcgtcgatggtcagcacagcctta

SEQ ID NO: 92 - RNA, 30 nt, synthetic construct
  misc_feature 1..30: note = Synthetic: WV-42043
  misc_feature 1..30: note = Synthetic: ADR-0103755
  modified_base 1: mod_base = OTHER; note = 2-fluororibose cytosine
  modified_base 1..2: mod_base = OTHER; note R-N-(1,3-dimethylimidazolidin-2-ylidene)phosphoramidate
  modified_base 2: mod_base = OTHER; note = 2-fluororibose cytosine
  modified_base 2..3: mod_base = OTHER; note = S-phosphorothioate
  modified_base 3: mod_base = OTHER; note = 2-fluororibose cytosine
  modified_base 3..4: mod_base = OTHER; note = S-phosphorothioate
  modified_base 4: mod_base = OTHER; note = 2-fluororibose uracil
  modified_base 4..5: mod_base = OTHER; note = S-phosphorothioate
  modified_base 5: mod_base = OTHER; note = 2-fluororibose uracil
  modified_base 5..6: mod_base = OTHER; note = S-phosphorothioate
  modified_base 6: mod_base = OTHER; note = 2-fluororibose uracil
  modified_base 6..7: mod_base = OTHER; note = S-phosphorothioate
  modified_base 7: mod_base = OTHER; note = 2-fluororibose cytosine
  modified_base 7..8: mod_base = OTHER; note = S-phosphorothioate
  modified_base 8: mod_base = OTHER; note = 2-fluororibose uracil
  modified_base 8..9: mod_base = OTHER; note = S-phosphorothioate
  modified_base 9: mod_base = OTHER; note = deoxyribose cytosine
  modified_base 9..10: mod_base = OTHER; note = S-phosphorothioate
  modified_base 10: mod_base = OTHER; note = deoxyribose inosine
  modified_base 10..11: mod_base = OTHER; note S-N-(1,3-dimethylimidazolidin-2-ylidene)phosphoramidate
  modified_base 11: mod_base = OTHER; note = 2-fluororibose uracil
  modified_base 11..12: mod_base = OTHER; note = S-phosphorothioate
  modified_base 12: mod_base = OTHER; note = 2-fluororibose cytosine
  modified_base 12..13: mod_base = OTHER; note = S-phosphorothioate
  modified_base 13: mod_base = OTHER; note = 2-fluororibose guanine
  modified_base 13..14: mod_base = OTHER; note = S-phosphorothioate
  modified_base 14: mod_base = OTHER; note = 2-fluororibose adenine
  modified_base 14..15: mod_base = OTHER; note = S-phosphorothioate
  modified_base 15: mod_base = OTHER; note = 2-fluororibose uracil
  modified_base 15..16: mod_base = OTHER; note = S-phosphorothioate
  modified_base 16: mod_base = gm
  modified_base 16..17: mod_base = OTHER; note = S-phosphorothioate
  modified_base 17: mod_base = gm
  modified_base 17..18: mod_base = OTHER; note = S-phosphorothioate
  modified_base 18: mod_base = um
  modified_base 18..19: mod_base = OTHER; note = S-phosphorothioate
  modified_base 19: mod_base = cm
  modified_base 19..20: mod_base = OTHER; note = S-phosphorothioate
  modified_base 20: mod_base = OTHER; note = 2-O-methylribose adenine
  modified_base 20..21: mod_base = OTHER; note = S-phosphorothioate
  modified_base 21: mod_base = gm
  modified_base 21..22: mod_base = OTHER; note = S-phosphorothioate
  modified_base 22: mod_base = cm
  modified_base 22..23: mod_base = OTHER; note = S-phosphorothioate
  modified_base 23: mod_base = OTHER; note = 2-O-methylribose adenine
  modified_base 23..24: mod_base = OTHER; note = S-phosphorothioate
  modified_base 24: mod_base = cm
  modified_base 24..25: mod_base = OTHER; note = S-phosphorothioate
  modified_base 25: mod_base = OTHER; note = 2-O-methylribose adenine
  modified_base 25..26: mod_base = OTHER; note = S-phosphorothioate
  modified_base 26: mod_base = gm
  modified_base 26..27: mod_base = OTHER; note = S-phosphorothioate
  modified_base 27: mod_base = cm
  modified_base 27..28: mod_base = OTHER; note = S-phosphorothioate
  modified_base 28: mod_base = cm
  modified_base 28..29: mod_base = OTHER; note = S-phosphorothioate
  modified_base 29: mod_base = um
  modified_base 29..30: mod_base = OTHER; note R-N-(1,3-dimethylimidazolidin-2-ylidene)phosphoramidate
  modified_base 30: mod_base = um
  source 1..30: mol_type = other RNA
ccctttctcgtcgatggtcagcacagcctt

SEQ ID NO: 93 - RNA, 30 nt, synthetic construct
  misc_feature 1..30: note = Synthetic: WV-42042
  misc_feature 1..30: note = Synthetic: ADR-0103909
  modified_base 1: mod_base = OTHER; note = 2-fluororibose uracil
  modified_base 1..2: mod_base = OTHER; note R-N-(1,3-dimethylimidazolidin-2-ylidene)phosphoramidate
  modified_base 2: mod_base = OTHER; note = 2-fluororibose cytosine
  modified_base 2..3: mod_base = OTHER; note = S-phosphorothioate
  modified_base 3: mod_base = OTHER; note = 2-fluororibose cytosine
  modified_base 3..4: mod_base = OTHER; note = S-phosphorothioate
  modified_base 4: mod_base = OTHER; note = 2-fluororibose cytosine
  modified_base 4..5: mod_base = OTHER; note = S-phosphorothioate
  modified_base 5: mod_base = OTHER; note = 2-fluororibose uracil
  modified_base 5..6: mod_base = OTHER; note = S-phosphorothioate
  modified_base 6: mod_base = OTHER; note = 2-fluororibose uracil
  modified_base 6..7: mod_base = OTHER; note = S-phosphorothioate
  modified_base 7: mod_base = OTHER; note = 2-fluororibose uracil
  modified_base 7..8: mod_base = OTHER; note = S-phosphorothioate
  modified_base 8: mod_base = OTHER; note = 2-fluororibose cytosine
  modified_base 8..9: mod_base = OTHER; note = S-phosphorothioate
  modified_base 9: mod_base = OTHER; note = 2-fluororibose uracil
  modified_base 9..10: mod_base = OTHER; note = S-phosphorothioate
  modified_base 10: mod_base = OTHER; note = deoxyribose cytosine
  modified_base 10..11: mod_base = OTHER; note = S-phosphorothioate
  modified_base 11: mod_base = OTHER; note = deoxyribose inosine
  modified_base 11..12: mod_base = OTHER; note S-N-(1,3-dimethylimidazolidin-2-ylidene)phosphoramidate
  modified_base 12: mod_base = OTHER; note = 2-fluororibose uracil
  modified_base 12..13: mod_base = OTHER; note = S-phosphorothioate
  modified_base 13: mod_base = OTHER; note = 2-fluororibose cytosine
  modified_base 13..14: mod_base = OTHER; note = S-phosphorothioate
  modified_base 14: mod_base = OTHER; note = 2-fluororibose guanine
  modified_base 14..15: mod_base = OTHER; note = S-phosphorothioate
  modified_base 15: mod_base = OTHER; note = 2-fluororibose adenine
  modified_base 15..16: mod_base = OTHER; note = S-phosphorothioate
  modified_base 16: mod_base = um
  modified_base 16..17: mod_base = OTHER; note = S-phosphorothioate
  modified_base 17: mod_base = gm
  modified_base 17..18: mod_base = OTHER; note = S-phosphorothioate
  modified_base 18: mod_base = gm
  modified_base 18..19: mod_base = OTHER; note = S-phosphorothioate
  modified_base 19: mod_base = um
  modified_base 19..20: mod_base = OTHER; note = S-phosphorothioate
  modified_base 20: mod_base = cm
  modified_base 20..21: mod_base = OTHER; note = S-phosphorothioate
  modified_base 21: mod_base = OTHER; note = 2-O-methylribose adenine
  modified_base 21..22: mod_base = OTHER; note = S-phosphorothioate
  modified_base 22: mod_base = gm
  modified_base 22..23: mod_base = OTHER; note = S-phosphorothioate
  modified_base 23: mod_base = cm
  modified_base 23..24: mod_base = OTHER; note = S-phosphorothioate
  modified_base 24: mod_base = OTHER; note = 2-O-methylribose adenine
  modified_base 24..25: mod_base = OTHER; note = S-phosphorothioate
  modified_base 25: mod_base = cm
  modified_base 25..26: mod_base = OTHER; note = S-phosphorothioate
  modified_base 26: mod_base = OTHER; note = 2-O-methylribose adenine
  modified_base 26..27: mod_base = OTHER; note = S-phosphorothioate
  modified_base 27: mod_base = gm
  modified_base 27..28: mod_base = OTHER; note = S-phosphorothioate
  modified_base 28: mod_base = cm
  modified_base 28..29: mod_base = OTHER; note = S-phosphorothioate
  modified_base 29: mod_base = cm
  modified_base 29..30: mod_base = OTHER; note R-N-(1,3-dimethylimidazolidin-2-ylidene)phosphoramidate
  modified_base 30: mod_base = um
  source 1..30: mol_type = other RNA
tccctttctcgtcgatggtcagcacagcct

SEQ ID NO: 94 - RNA, 30 nt, synthetic construct
  misc_feature 1..30: note = Synthetic: WV-42041
  misc_feature 1..30: note = Synthetic: ADR-0103855
  modified_base 1: mod_base = OTHER; note = 2-fluororibose guanine
  modified_base 1..2: mod_base = OTHER; note R-N-(1,3-dimethylimidazolidin-2-ylidene)phosphoramidate
  modified_base 2: mod_base = OTHER; note = 2-fluororibose uracil
  modified_base 2..3: mod_base = OTHER; note = S-phosphorothioate
  modified_base 3: mod_base = OTHER; note = 2-fluororibose cytosine
  modified_base 3..4: mod_base = OTHER; note = S-phosphorothioate
  modified_base 4: mod_base = OTHER; note = 2-fluororibose cytosine
  modified_base 4..5: mod_base = OTHER; note = S-phosphorothioate
  modified_base 5: mod_base = OTHER; note = 2-fluororibose cytosine
  modified_base 5..6: mod_base = OTHER; note = S-phosphorothioate
  modified_base 6: mod_base = OTHER; note = 2-fluororibose uracil
  modified_base 6..7: mod_base = OTHER; note = S-phosphorothioate
  modified_base 7: mod_base = OTHER; note = 2-fluororibose uracil
  modified_base 7..8: mod_base = OTHER; note = S-phosphorothioate
  modified_base 8: mod_base = OTHER; note = 2-fluororibose uracil
  modified_base 8..9: mod_base = OTHER; note = S-phosphorothioate
  modified_base 9: mod_base = OTHER; note = 2-fluororibose cytosine
  modified_base 9..10: mod_base = OTHER; note = S-phosphorothioate
  modified_base 10: mod_base = OTHER; note = 2-fluororibose uracil
  modified_base 10..11: mod_base = OTHER; note = S-phosphorothioate
  modified_base 11: mod_base = OTHER; note = deoxyribose cytosine
  modified_base 11..12: mod_base = OTHER; note = S-phosphorothioate
  modified_base 12: mod_base = OTHER; note = deoxyribose inosine
  modified_base 12..13: mod_base = OTHER; note S-N-(1,3-dimethylimidazolidin-2-ylidene)phosphoramidate
  modified_base 13: mod_base = OTHER; note = 2-fluororibose uracil
  modified_base 13..14: mod_base = OTHER; note = S-phosphorothioate
  modified_base 14: mod_base = OTHER; note = 2-fluororibose cytosine
  modified_base 14..15: mod_base = OTHER; note = S-phosphorothioate
  modified_base 15: mod_base = OTHER; note = 2-fluororibose guanine
  modified_base 15..16: mod_base = OTHER; note = S-phosphorothioate
  modified_base 16: mod_base = OTHER; note = 2-O-methylribose adenine
  modified_base 16..17: mod_base = OTHER; note = S-phosphorothioate
  modified_base 17: mod_base = um
  modified_base 17..18: mod_base = OTHER; note = S-phosphorothioate
  modified_base 18: mod_base = gm
  modified_base 18..19: mod_base = OTHER; note = S-phosphorothioate
  modified_base 19: mod_base = gm
  modified_base 19..20: mod_base = OTHER; note = S-phosphorothioate
  modified_base 20: mod_base = um
  modified_base 20..21: mod_base = OTHER; note = S-phosphorothioate
  modified_base 21: mod_base = cm
  modified_base 21..22: mod_base = OTHER; note = S-phosphorothioate
  modified_base 22: mod_base = OTHER; note = 2-O-methylribose adenine
  modified_base 22..23: mod_base = OTHER; note = S-phosphorothioate
  modified_base 23: mod_base = gm
  modified_base 23..24: mod_base = OTHER; note = S-phosphorothioate
  modified_base 24: mod_base = cm
  modified_base 24..25: mod_base = OTHER; note = S-phosphorothioate
  modified_base 25: mod_base = OTHER; note = 2-O-methylribose adenine
  modified_base 25..26: mod_base = OTHER; note = S-phosphorothioate
  modified_base 26: mod_base = cm
  modified_base 26..27: mod_base = OTHER; note = S-phosphorothioate
  modified_base 27: mod_base = OTHER; note = 2-O-methylribose adenine
  modified_base 27..28: mod_base = OTHER; note = S-phosphorothioate
  modified_base 28: mod_base = gm
  modified_base 28..29: mod_base = OTHER; note = S-phosphorothioate
  modified_base 29: mod_base = cm
  modified_base 29..30: mod_base = OTHER; note R-N-(1,3-dimethylimidazolidin-2-ylidene)phosphoramidate
  modified_base 30: mod_base = cm
  source 1..30: mol_type = other RNA
gtccctttctcgtcgatggtcagcacagcc

SEQ ID NO: 95 - RNA, 30 nt, synthetic construct
  misc_feature 1..30: note = Synthetic: WV-42040
  misc_feature 1..30: note = Synthetic: ADR-0103441
  modified_base 1: mod_base = OTHER; note = 2-fluororibose adenine
  modified_base 1..2: mod_base = OTHER; note R-N-(1,3-dimethylimidazolidin-2-ylidene)phosphoramidate
  modified_base 2: mod_base = OTHER; note = 2-fluororibose guanine
  modified_base 2..3: mod_base = OTHER; note = S-phosphorothioate
  modified_base 3: mod_base = OTHER; note = 2-fluororibose uracil
  modified_base 3..4: mod_base = OTHER; note = S-phosphorothioate
  modified_base 4: mod_base = OTHER; note = 2-fluororibose cytosine
  modified_base 4..5: mod_base = OTHER; note = S-phosphorothioate
  modified_base 5: mod_base = OTHER; note = 2-fluororibose cytosine
  modified_base 5..6: mod_base = OTHER; note = S-phosphorothioate
  modified_base 6: mod_base = OTHER; note = 2-fluororibose cytosine
  modified_base 6..7: mod_base = OTHER; note = S-phosphorothioate
  modified_base 7: mod_base = OTHER; note = 2-fluororibose uracil
  modified_base 7..8: mod_base = OTHER; note = S-phosphorothioate
  modified_base 8: mod_base = OTHER; note = 2-fluororibose uracil
  modified_base 8..9: mod_base = OTHER; note = S-phosphorothioate
  modified_base 9: mod_base = OTHER; note = 2-fluororibose uracil
  modified_base 9..10: mod_base = OTHER; note = S-phosphorothioate
  modified_base 10: mod_base = OTHER; note = 2-fluororibose cytosine
  modified_base 10..11: mod_base = OTHER; note = S-phosphorothioate
  modified_base 11: mod_base = OTHER; note = 2-fluororibose uracil
  modified_base 11..12: mod_base = OTHER; note = S-phosphorothioate
  modified_base 12: mod_base = OTHER; note = deoxyribose cytosine
  modified_base 12..13: mod_base = OTHER; note = S-phosphorothioate
  modified_base 13: mod_base = OTHER; note = deoxyribose inosine
  modified_base 13..14: mod_base = OTHER; note S-N-(1,3-dimethylimidazolidin-2-ylidene)phosphoramidate
  modified_base 14: mod_base = OTHER; note = 2-fluororibose uracil
  modified_base 14..15: mod_base = OTHER; note = S-phosphorothioate
  modified_base 15: mod_base = OTHER; note = 2-fluororibose cytosine
  modified_base 15..16: mod_base = OTHER; note = S-phosphorothioate
  modified_base 16: mod_base = gm
  modified_base 16..17: mod_base = OTHER; note = S-phosphorothioate
  modified_base 17: mod_base = OTHER; note = 2-O-methylribose adenine
  modified_base 17..18: mod_base = OTHER; note = S-phosphorothioate
  modified_base 18: mod_base = um
  modified_base 18..19: mod_base = OTHER; note = S-phosphorothioate
  modified_base 19: mod_base = gm
  modified_base 19..20: mod_base = OTHER; note = S-phosphorothioate
  modified_base 20: mod_base = gm
  modified_base 20..21: mod_base = OTHER; note = S-phosphorothioate
  modified_base 21: mod_base = um
  modified_base 21..22: mod_base = OTHER; note = S-phosphorothioate
  modified_base 22: mod_base = cm
  modified_base 22..23: mod_base = OTHER; note = S-phosphorothioate
  modified_base 23: mod_base = OTHER; note = 2-O-methylribose adenine
  modified_base 23..24: mod_base = OTHER; note = S-phosphorothioate
  modified_base 24: mod_base = gm
  modified_base 24..25: mod_base = OTHER; note = S-phosphorothioate
  modified_base 25: mod_base = cm
  modified_base 25..26: mod_base = OTHER; note = S-phosphorothioate
  modified_base 26: mod_base = OTHER; note = 2-O-methylribose adenine
  modified_base 26..27: mod_base = OTHER; note = S-phosphorothioate
  modified_base 27: mod_base = cm
  modified_base 27..28: mod_base = OTHER; note = S-phosphorothioate
  modified_base 28: mod_base = OTHER; note = 2-O-methylribose adenine
  modified_base 28..29: mod_base = OTHER; note = S-phosphorothioate
  modified_base 29: mod_base = gm
  modified_base 29..30: mod_base = OTHER; note R-N-(1,3-dimethylimidazolidin-2-ylidene)phosphoramidate
  modified_base 30: mod_base = cm
  source 1..30: mol_type = other RNA
agtccctttctcgtcgatggtcagcacagc

SEQ ID NO: 96 - RNA, 30 nt, synthetic construct
  misc_feature 1..30: note = Synthetic: WV-42039
  misc_feature 1..30: note = Synthetic: ADR-0103515
  modified_base 1: mod_base = OTHER; note = 2-fluororibose cytosine
  modified_base 1..2: mod_base = OTHER; note R-N-(1,3-dimethylimidazolidin-2-ylidene)phosphoramidate
  modified_base 2: mod_base = OTHER; note = 2-fluororibose adenine
  modified_base 2..3: mod_base = OTHER; note = S-phosphorothioate
  modified_base 3: mod_base = OTHER; note = 2-fluororibose guanine
  modified_base 3..4: mod_base = OTHER; note = S-phosphorothioate
  modified_base 4: mod_base = OTHER; note = 2-fluororibose uracil
  modified_base 4..5: mod_base = OTHER; note = S-phosphorothioate
  modified_base 5: mod_base = OTHER; note = 2-fluororibose cytosine
  modified_base 5..6: mod_base = OTHER; note = S-phosphorothioate
  modified_base 6: mod_base = OTHER; note = 2-fluororibose cytosine
  modified_base 6..7: mod_base = OTHER; note = S-phosphorothioate
  modified_base 7: mod_base = OTHER; note = 2-fluororibose cytosine
  modified_base 7..8: mod_base = OTHER; note = S-phosphorothioate
  modified_base 8: mod_base = OTHER; note = 2-fluororibose uracil
  modified_base 8..9: mod_base = OTHER; note = S-phosphorothioate
  modified_base 9: mod_base = OTHER; note = 2-fluororibose uracil
  modified_base 9..10: mod_base = OTHER; note = S-phosphorothioate
  modified_base 10: mod_base = OTHER; note = 2-fluororibose uracil
  modified_base 10..11: mod_base = OTHER; note = S-phosphorothioate
  modified_base 11: mod_base = OTHER; note = 2-fluororibose cytosine
  modified_base 11..12: mod_base = OTHER; note = S-phosphorothioate
  modified_base 12: mod_base = OTHER; note = 2-fluororibose uracil
  modified_base 12..13: mod_base = OTHER; note = S-phosphorothioate
  modified_base 13: mod_base = OTHER; note = deoxyribose cytosine
  modified_base 13..14: mod_base = OTHER; note = S-phosphorothioate
  modified_base 14: mod_base = OTHER; note = deoxyribose inosine
  modified_base 14..15: mod_base = OTHER; note S-N-(1,3-dimethylimidazolidin-2-ylidene)phosphoramidate
  modified_base 15: mod_base = OTHER; note = 2-fluororibose uracil
  modified_base 15..16: mod_base = OTHER; note = S-phosphorothioate
  modified_base 16: mod_base = cm
  modified_base 16..17: mod_base = OTHER; note = S-phosphorothioate
  modified_base 17: mod_base = gm
  modified_base 17..18: mod_base = OTHER; note = S-phosphorothioate
  modified_base 18: mod_base = OTHER; note = 2-O-methylribose adenine
  modified_base 18..19: mod_base = OTHER; note = S-phosphorothioate
  modified_base 19: mod_base = um
  modified_base 19..20: mod_base = OTHER; note = S-phosphorothioate
  modified_base 20: mod_base = gm
  modified_base 20..21: mod_base = OTHER; note = S-phosphorothioate
  modified_base 21: mod_base = gm
  modified_base 21..22: mod_base = OTHER; note = S-phosphorothioate
  modified_base 22: mod_base = um
  modified_base 22..23: mod_base = OTHER; note = S-phosphorothioate
  modified_base 23: mod_base = cm
  modified_base 23..24: mod_base = OTHER; note = S-phosphorothioate
  modified_base 24: mod_base = OTHER; note = 2-O-methylribose adenine
  modified_base 24..25: mod_base = OTHER; note = S-phosphorothioate
  modified_base 25: mod_base = gm
  modified_base 25..26: mod_base = OTHER; note = S-phosphorothioate
  modified_base 26: mod_base = cm
  modified_base 26..27: mod_base = OTHER; note = S-phosphorothioate
  modified_base 27: mod_base = OTHER; note = 2-O-methylribose adenine
  modified_base 27..28: mod_base = OTHER; note = S-phosphorothioate
  modified_base 28: mod_base = cm
  modified_base 28..29: mod_base = OTHER; note = S-phosphorothioate
  modified_base 29: mod_base = OTHER; note = 2-O-methylribose adenine
  modified_base 29..30: mod_base = OTHER; note R-N-(1,3-dimethylimidazolidin-2-ylidene)phosphoramidate
  modified_base 30: mod_base = gm
  source 1..30: mol_type = other RNA
cagtccctttctcgtcgatggtcagcacag

SEQ ID NO: 97 - RNA, 30 nt, synthetic construct
  misc_feature 1..30: note = Synthetic: WV-42038
  misc_feature 1..30: note = Synthetic: ADR-0103908
  modified_base 1: mod_base = OTHER; note = 2-fluororibose uracil
  modified_base 1..2: mod_base = OTHER; note R-N-(1,3-dimethylimidazolidin-2-ylidene)phosphoramidate
  modified_base 2: mod_base = OTHER; note = 2-fluororibose cytosine
  modified_base 2..3: mod_base = OTHER; note = S-phosphorothioate
  modified_base 3: mod_base = OTHER; note = 2-fluororibose adenine
  modified_base 3..4: mod_base = OTHER; note = S-phosphorothioate
  modified_base 4: mod_base = OTHER; note = 2-fluororibose guanine
  modified_base 4..5: mod_base = OTHER; note = S-phosphorothioate
  modified_base 5: mod_base = OTHER; note = 2-fluororibose uracil
  modified_base 5..6: mod_base = OTHER; note = S-phosphorothioate
  modified_base 6: mod_base = OTHER; note = 2-fluororibose cytosine
  modified_base 6..7: mod_base = OTHER; note = S-phosphorothioate
  modified_base 7: mod_base = OTHER; note = 2-fluororibose cytosine
  modified_base 7..8: mod_base = OTHER; note = S-phosphorothioate
  modified_base 8: mod_base = OTHER; note = 2-fluororibose cytosine
  modified_base 8..9: mod_base = OTHER; note = S-phosphorothioate
  modified_base 9: mod_base = OTHER; note = 2-fluororibose uracil
  modified_base 9..10: mod_base = OTHER; note = S-phosphorothioate
  modified_base 10: mod_base = OTHER; note = 2-fluororibose uracil
  modified_base 10..11: mod_base = OTHER; note = S-phosphorothioate
  modified_base 11: mod_base = OTHER; note = 2-fluororibose uracil
  modified_base 11..12: mod_base = OTHER; note = S-phosphorothioate
  modified_base 12: mod_base = OTHER; note = 2-fluororibose cytosine
  modified_base 12..13: mod_base = OTHER; note = S-phosphorothioate
  modified_base 13: mod_base = OTHER; note = 2-fluororibose uracil
  modified_base 13..14: mod_base = OTHER; note = S-phosphorothioate
  modified_base 14: mod_base = OTHER; note = deoxyribose cytosine
  modified_base 14..15: mod_base = OTHER; note = S-phosphorothioate
  modified_base 15: mod_base = OTHER; note = deoxyribose inosine
  modified_base 15..16: mod_base = OTHER; note S-N-(1,3-dimethylimidazolidin-2-ylidene)phosphoramidate
  modified_base 16: mod_base = um
  modified_base 16..17: mod_base = OTHER; note = S-phosphorothioate
  modified_base 17: mod_base = cm
  modified_base 17..18: mod_base = OTHER; note = S-phosphorothioate
  modified_base 18: mod_base = gm
  modified_base 18..19: mod_base = OTHER; note = S-phosphorothioate
  modified_base 19: mod_base = OTHER; note = 2-O-methylribose adenine
  modified_base 19..20: mod_base = OTHER; note = S-phosphorothioate
  modified_base 20: mod_base = um
  modified_base 20..21: mod_base = OTHER; note = S-phosphorothioate
  modified_base 21: mod_base = gm
  modified_base 21..22: mod_base = OTHER; note = S-phosphorothioate
  modified_base 22: mod_base = gm
  modified_base 22..23: mod_base = OTHER; note = S-phosphorothioate
  modified_base 23: mod_base = um
  modified_base 23..24: mod_base = OTHER; note = S-phosphorothioate
  modified_base 24: mod_base = cm
  modified_base 24..25: mod_base = OTHER; note = S-phosphorothioate
  modified_base 25: mod_base = OTHER; note = 2-O-methylribose adenine
  modified_base 25..26: mod_base = OTHER; note = S-phosphorothioate
  modified_base 26: mod_base = gm
  modified_base 26..27: mod_base = OTHER; note = S-phosphorothioate
  modified_base 27: mod_base = cm
  modified_base 27..28: mod_base = OTHER; note = S-phosphorothioate
  modified_base 28: mod_base = OTHER; note = 2-O-methylribose adenine
  modified_base 28..29: mod_base = OTHER; note = S-phosphorothioate
  modified_base 29: mod_base = cm
  modified_base 29..30: mod_base = OTHER; note R-N-(1,3-dimethylimidazolidin-2-ylidene)phosphoramidate
  modified_base 30: mod_base = OTHER; note = 2-O-methylribose adenine
  source 1..30: mol_type = other RNA
tcagtccctttctcgtcgatggtcagcaca

SEQ ID NO: 98 - RNA, 30 nt, synthetic construct
  misc_feature 1..30: note = Synthetic: WV-42037
  misc_feature 1..30: note = Synthetic: ADR-0103936
  modified_base 1: mod_base = OTHER; note = 2-fluororibose uracil
  modified_base 1..2: mod_base = OTHER; note R-N-(1,3-dimethylimidazolidin-2-ylidene)phosphoramidate
  modified_base 2: mod_base = OTHER; note = 2-fluororibose uracil
  modified_base 2..3: mod_base = OTHER; note = S-phosphorothioate
  modified_base 3: mod_base = OTHER; note = 2-fluororibose cytosine
  modified_base 3..4: mod_base = OTHER; note = S-phosphorothioate
  modified_base 4: mod_base = OTHER; note = 2-fluororibose adenine
  modified_base 4..5: mod_base = OTHER; note = S-phosphorothioate
  modified_base 5: mod_base = OTHER; note = 2-fluororibose guanine
  modified_base 5..6: mod_base = OTHER; note = S-phosphorothioate
  modified_base 6: mod_base = OTHER; note = 2-fluororibose uracil
  modified_base 6..7: mod_base = OTHER; note = S-phosphorothioate
  modified_base 7: mod_base = OTHER; note = 2-fluororibose cytosine
  modified_base 7..8: mod_base = OTHER; note = S-phosphorothioate
  modified_base 8: mod_base = OTHER; note = 2-fluororibose cytosine
  modified_base 8..9: mod_base = OTHER; note = S-phosphorothioate
  modified_base 9: mod_base = OTHER; note = 2-fluororibose cytosine
  modified_base 9..10: mod_base = OTHER; note = S-phosphorothioate
  modified_base 10: mod_base = OTHER; note = 2-fluororibose uracil
  modified_base 10..11: mod_base = OTHER; note = S-phosphorothioate
  modified_base 11: mod_base = OTHER; note = 2-fluororibose uracil
  modified_base 11..12: mod_base = OTHER; note = S-phosphorothioate
  modified_base 12: mod_base = OTHER; note = 2-fluororibose uracil
  modified_base 12..13: mod_base = OTHER; note = S-phosphorothioate
  modified_base 13: mod_base = OTHER; note = 2-fluororibose cytosine
  modified_base 13..14: mod_base = OTHER; note = S-phosphorothioate
  modified_base 14: mod_base = OTHER; note = 2-fluororibose uracil
  modified_base 14..15: mod_base = OTHER; note = S-phosphorothioate
  modified_base 15: mod_base = OTHER; note = deoxyribose cytosine
  modified_base 15..16: mod_base = OTHER; note = S-phosphorothioate
  modified_base 16: mod_base = OTHER; note = deoxyribose inosine
  modified_base 16..17: mod_base = OTHER; note S-N-(1,3-dimethylimidazolidin-2-ylidene)phosphoramidate
  modified_base 17: mod_base = um
  modified_base 17..18: mod_base = OTHER; note = S-phosphorothioate
  modified_base 18: mod_base = cm
  modified_base 18..19: mod_base = OTHER; note = S-phosphorothioate
  modified_base 19: mod_base = gm
  modified_base 19..20: mod_base = OTHER; note = S-phosphorothioate
  modified_base 20: mod_base = OTHER; note = 2-O-methylribose adenine
  modified_base 20..21: mod_base = OTHER; note = S-phosphorothioate
  modified_base 21: mod_base = um
  modified_base 21..22: mod_base = OTHER; note = S-phosphorothioate
  modified_base 22: mod_base = gm
  modified_base 22..23: mod_base = OTHER; note = S-phosphorothioate
  modified_base 23: mod_base = gm
  modified_base 23..24: mod_base = OTHER; note = S-phosphorothioate
  modified_base 24: mod_base = um
  modified_base 24..25: mod_base = OTHER; note = S-phosphorothioate
  modified_base 25: mod_base = cm
  modified_base 25..26: mod_base = OTHER; note = S-phosphorothioate
  modified_base 26: mod_base = OTHER; note = 2-O-methylribose adenine
  modified_base 26..27: mod_base = OTHER; note = S-phosphorothioate
  modified_base 27: mod_base = gm
  modified_base 27..28: mod_base = OTHER; note = S-phosphorothioate
  modified_base 28: mod_base = cm
  modified_base 28..29: mod_base = OTHER; note = S-phosphorothioate
  modified_base 29: mod_base = OTHER; note = 2-O-methylribose adenine
  modified_base 29..30: mod_base = OTHER; note R-N-(1,3-dimethylimidazolidin-2-ylidene)phosphoramidate
  modified_base 30: mod_base = cm
  source 1..30: mol_type = other RNA
ttcagtccctttctcgtcgatggtcagcac

SEQ ID NO: 99 - RNA, 30 nt, synthetic construct
  misc_feature 1..30: note = Synthetic: WV-42036
  misc_feature 1..30: note = Synthetic: ADR-0103769
  modified_base 1: mod_base = OTHER; note = 2-fluororibose cytosine
  modified_base 1..2: mod_base = OTHER; note R-N-(1,3-dimethylimidazolidin-2-ylidene)phosphoramidate
  modified_base 2: mod_base = OTHER; note = 2-fluororibose uracil
  modified_base 2..3: mod_base = OTHER; note = S-phosphorothioate
  modified_base 3: mod_base = OTHER; note = 2-fluororibose uracil
  modified_base 3..4: mod_base = OTHER; note = S-phosphorothioate
  modified_base 4: mod_base = OTHER; note = 2-fluororibose cytosine
  modified_base 4..5: mod_base = OTHER; note = S-phosphorothioate
  modified_base 5: mod_base = OTHER; note = 2-fluororibose adenine
  modified_base 5..6: mod_base = OTHER; note = S-phosphorothioate
  modified_base 6: mod_base = OTHER; note = 2-fluororibose guanine
  modified_base 6..7: mod_base = OTHER; note = S-phosphorothioate
  modified_base 7: mod_base = OTHER; note = 2-fluororibose uracil
  modified_base 7..8: mod_base = OTHER; note = S-phosphorothioate
  modified_base 8: mod_base = OTHER; note = 2-fluororibose cytosine
  modified_base 8..9: mod_base = OTHER; note = S-phosphorothioate
  modified_base 9: mod_base = OTHER; note = 2-fluororibose cytosine
  modified_base 9..10: mod_base = OTHER; note = S-phosphorothioate
  modified_base 10: mod_base = OTHER; note = 2-fluororibose cytosine
  modified_base 10..11: mod_base = OTHER; note = S-phosphorothioate
  modified_base 11: mod_base = OTHER; note = 2-fluororibose uracil
  modified_base 11..12: mod_base = OTHER; note = S-phosphorothioate
  modified_base 12: mod_base = OTHER; note = 2-fluororibose uracil
  modified_base 12..13: mod_base = OTHER; note = S-phosphorothioate
  modified_base 13: mod_base = OTHER; note = 2-fluororibose uracil
  modified_base 13..14: mod_base = OTHER; note = S-phosphorothioate
  modified_base 14: mod_base = OTHER; note = 2-fluororibose cytosine
  modified_base 14..15: mod_base = OTHER; note = S-phosphorothioate
  modified_base 15: mod_base = OTHER; note = 2-fluororibose uracil
  modified_base 15..16: mod_base = OTHER; note = S-phosphorothioate
  modified_base 16: mod_base = OTHER; note = deoxyribose cytosine
  modified_base 16..17: mod_base = OTHER; note = S-phosphorothioate
  modified_base 17: mod_base = OTHER; note = deoxyribose inosine
  modified_base 17..18: mod_base = OTHER; note S-N-(1,3-dimethylimidazolidin-2-ylidene)phosphoramidate
  modified_base 18: mod_base = um
  modified_base 18..19: mod_base = OTHER; note = S-phosphorothioate
  modified_base 19: mod_base = cm
  modified_base 19..20: mod_base = OTHER; note = S-phosphorothioate
  modified_base 20: mod_base = gm
  modified_base 20..21: mod_base = OTHER; note = S-phosphorothioate
  modified_base 21: mod_base = OTHER; note = 2-O-methylribose adenine
  modified_base 21..22: mod_base = OTHER; note = S-phosphorothioate
  modified_base 22: mod_base = um
  modified_base 22..23: mod_base = OTHER; note = S-phosphorothioate
  modified_base 23: mod_base = gm
  modified_base 23..24: mod_base = OTHER; note = S-phosphorothioate
  modified_base 24: mod_base = gm
  modified_base 24..25: mod_base = OTHER; note = S-phosphorothioate
  modified_base 25: mod_base = um
  modified_base 25..26: mod_base = OTHER; note = S-phosphorothioate
  modified_base 26: mod_base = cm
  modified_base 26..27: mod_base = OTHER; note = S-phosphorothioate
  modified_base 27: mod_base = OTHER; note = 2-O-methylribose adenine
  modified_base 27..28: mod_base = OTHER; note = S-phosphorothioate
  modified_base 28: mod_base = gm
  modified_base 28..29: mod_base = OTHER; note = S-phosphorothioate
  modified_base 29: mod_base = cm
  modified_base 29..30: mod_base = OTHER; note R-N-(1,3-dimethylimidazolidin-2-ylidene)phosphoramidate
  modified_base 30: mod_base = OTHER; note = 2-O-methylribose adenine
  source 1..30: mol_type = other RNA
cttcagtccctttctcgtcgatggtcagca

SEQ ID NO: 100 - RNA, 30 nt, synthetic construct
  misc_feature 1..30: note = Synthetic: WV-42035
  misc_feature 1..30: note = Synthetic: ADR-0103830
  modified_base 1: mod_base = OTHER; note = 2-fluororibose guanine
  modified_base 1..2: mod_base = OTHER; note R-N-(1,3-dimethylimidazolidin-2-ylidene)phosphoramidate
  modified_base 2: mod_base = OTHER; note = 2-fluororibose cytosine
  modified_base 2..3: mod_base = OTHER; note = S-phosphorothioate
  modified_base 3: mod_base = OTHER; note = 2-fluororibose uracil
  modified_base 3..4: mod_base = OTHER; note = S-phosphorothioate
  modified_base 4: mod_base = OTHER; note = 2-fluororibose uracil
  modified_base 4..5: mod_base = OTHER; note = S-phosphorothioate
  modified_base 5: mod_base = OTHER; note = 2-fluororibose cytosine
  modified_base 5..6: mod_base = OTHER; note = S-phosphorothioate
  modified_base 6: mod_base = OTHER; note = 2-fluororibose adenine
  modified_base 6..7: mod_base = OTHER; note = S-phosphorothioate
  modified_base 7: mod_base = OTHER; note = 2-fluororibose guanine
  modified_base 7..8: mod_base = OTHER; note = S-phosphorothioate
  modified_base 8: mod_base = OTHER; note = 2-fluororibose uracil
  modified_base 8..9: mod_base = OTHER; note = S-phosphorothioate
  modified_base 9: mod_base = OTHER; note = 2-fluororibose cytosine
  modified_base 9..10: mod_base = OTHER; note = S-phosphorothioate
  modified_base 10: mod_base = OTHER; note = 2-fluororibose cytosine
  modified_base 10..11: mod_base = OTHER; note = S-phosphorothioate
  modified_base 11: mod_base = OTHER; note = 2-fluororibose cytosine
  modified_base 11..12: mod_base = OTHER; note = S-phosphorothioate
  modified_base 12: mod_base = OTHER; note = 2-fluororibose uracil
  modified_base 12..13: mod_base = OTHER; note = S-phosphorothioate
  modified_base 13: mod_base = OTHER; note = 2-fluororibose uracil
  modified_base 13..14: mod_base = OTHER; note = S-phosphorothioate
  modified_base 14: mod_base = OTHER; note = 2-fluororibose uracil
  modified_base 14..15: mod_base = OTHER; note = S-phosphorothioate
  modified_base 15: mod_base = OTHER; note = 2-fluororibose cytosine
  modified_base 15..16: mod_base = OTHER; note = S-phosphorothioate
  modified_base 16: mod_base = OTHER; note = 2-fluororibose uracil
  modified_base 16..17: mod_base = OTHER; note = S-phosphorothioate
  modified_base 17: mod_base = OTHER; note = deoxyribose cytosine
  modified_base 17..18: mod_base = OTHER; note = S-phosphorothioate
  modified_base 18: mod_base = OTHER; note = deoxyribose inosine
  modified_base 18..19: mod_base = OTHER; note S-N-(1,3-dimethylimidazolidin-2-ylidene)phosphoramidate
  modified_base 19: mod_base = um
  modified_base 19..20: mod_base = OTHER; note = S-phosphorothioate
  modified_base 20: mod_base = cm
  modified_base 20..21: mod_base = OTHER; note = S-phosphorothioate
  modified_base 21: mod_base = gm
  modified_base 21..22: mod_base = OTHER; note = S-phosphorothioate
  modified_base 22: mod_base = OTHER; note = 2-O-methylribose adenine
  modified_base 22..23: mod_base = OTHER; note = S-phosphorothioate
  modified_base 23: mod_base = um
  modified_base 23..24: mod_base = OTHER; note = S-phosphorothioate
  modified_base 24: mod_base = gm
  modified_base 24..25: mod_base = OTHER; note = S-phosphorothioate
  modified_base 25: mod_base = gm
  modified_base 25..26: mod_base = OTHER; note = S-phosphorothioate
  modified_base 26: mod_base = um
  modified_base 26..27: mod_base = OTHER; note = S-phosphorothioate
  modified_base 27: mod_base = cm
  modified_base 27..28: mod_base = OTHER; note = S-phosphorothioate
  modified_base 28: mod_base = OTHER; note = 2-O-methylribose adenine
  modified_base 28..29: mod_base = OTHER; note = S-phosphorothioate
  modified_base 29: mod_base = gm
  modified_base 29..30: mod_base = OTHER; note R-N-(1,3-dimethylimidazolidin-2-ylidene)phosphoramidate
  modified_base 30: mod_base = cm
  source 1..30: mol_type = other RNA
gcttcagtccctttctcgtcgatggtcagc

SEQ ID NO: 101 - RNA, 30 nt, synthetic construct
  misc_feature 1..30: note = Synthetic: WV-42034
  misc_feature 1..30: note = Synthetic: ADR-0103439
  modified_base 1: mod_base = OTHER; note = 2-fluororibose adenine
  modified_base 1..2: mod_base = OTHER; note R-N-(1,3-dimethylimidazolidin-2-ylidene)phosphoramidate
  modified_base 2: mod_base = OTHER; note = 2-fluororibose guanine
  modified_base 2..3: mod_base = OTHER; note = S-phosphorothioate
  modified_base 3: mod_base = OTHER; note = 2-fluororibose cytosine
  modified_base 3..4: mod_base = OTHER; note = S-phosphorothioate
  modified_base 4: mod_base = OTHER; note = 2-fluororibose uracil
  modified_base 4..5: mod_base = OTHER; note = S-phosphorothioate
  modified_base 5: mod_base = OTHER; note = 2-fluororibose uracil
  modified_base 5..6: mod_base = OTHER; note = S-phosphorothioate
  modified_base 6: mod_base = OTHER; note = 2-fluororibose cytosine
  modified_base 6..7: mod_base = OTHER; note = S-phosphorothioate
  modified_base 7: mod_base = OTHER; note = 2-fluororibose adenine
  modified_base 7..8: mod_base = OTHER; note = S-phosphorothioate
  modified_base 8: mod_base = OTHER; note = 2-fluororibose guanine
  modified_base 8..9: mod_base = OTHER; note = S-phosphorothioate
  modified_base 9: mod_base = OTHER; note = 2-fluororibose uracil
  modified_base 9..10: mod_base = OTHER; note = S-phosphorothioate
  modified_base 10: mod_base = OTHER; note = 2-fluororibose cytosine
  modified_base 10..11: mod_base = OTHER; note = S-phosphorothioate
  modified_base 11: mod_base = OTHER; note = 2-fluororibose cytosine
  modified_base 11..12: mod_base = OTHER; note = S-phosphorothioate
  modified_base 12: mod_base = OTHER; note = 2-fluororibose cytosine
  modified_base 12..13: mod_base = OTHER; note = S-phosphorothioate
  modified_base 13: mod_base = OTHER; note = 2-fluororibose uracil
  modified_base 13..14: mod_base = OTHER; note = S-phosphorothioate
  modified_base 14: mod_base = OTHER; note = 2-fluororibose uracil
  modified_base 14..15: mod_base = OTHER; note = S-phosphorothioate
  modified_base 15: mod_base = OTHER; note = 2-fluororibose uracil
  modified_base 15..16: mod_base = OTHER; note = S-phosphorothioate
  modified_base 16: mod_base = cm
  modified_base 16..17: mod_base = OTHER; note = S-phosphorothioate
  modified_base 17: mod_base = OTHER; note = 2-fluororibose uracil
  modified_base 17..18: mod_base = OTHER; note = S-phosphorothioate
  modified_base 18: mod_base = OTHER; note = deoxyribose cytosine
  modified_base 18..19: mod_base = OTHER; note = S-phosphorothioate
  modified_base 19: mod_base = OTHER; note = deoxyribose inosine
  modified_base 19..20: mod_base = OTHER; note S-N-(1,3-dimethylimidazolidin-2-ylidene)phosphoramidate
  modified_base 20: mod_base = um
  modified_base 20..21: mod_base = OTHER; note = S-phosphorothioate
  modified_base 21: mod_base = cm
  modified_base 21..22: mod_base = OTHER; note = S-phosphorothioate
  modified_base 22: mod_base = gm
  modified_base 22..23: mod_base = OTHER; note = S-phosphorothioate
  modified_base 23: mod_base = OTHER; note = 2-O-methylribose adenine
  modified_base 23..24: mod_base = OTHER; note = S-phosphorothioate
  modified_base 24: mod_base = um
  modified_base 24..25: mod_base = OTHER; note = S-phosphorothioate
  modified_base 25: mod_base = gm
  modified_base 25..26: mod_base = OTHER; note = S-phosphorothioate
  modified_base 26: mod_base = gm
  modified_base 26..27: mod_base = OTHER; note = S-phosphorothioate
  modified_base 27: mod_base = um
  modified_base 27..28: mod_base = OTHER; note = S-phosphorothioate
  modified_base 28: mod_base = cm
  modified_base 28..29: mod_base = OTHER; note = S-phosphorothioate
  modified_base 29: mod_base = OTHER; note = 2-O-methylribose adenine
  modified_base 29..30: mod_base = OTHER; note R-N-(1,3-dimethylimidazolidin-2-ylidene)phosphoramidate
  modified_base 30: mod_base = gm
  source 1..30: mol_type = other RNA
agcttcagtccctttctcgtcgatggtcag

SEQ ID NO: 102 - RNA, 30 nt, synthetic construct; identical to SEQ ID NO: 75
  misc_feature 1..30: note = Synthetic: WV-42033
  misc_feature 1..30: note = Synthetic: ADR-0103507
  modified_base 1: mod_base = OTHER; note = 2-fluororibose cytosine
  modified_base 1..2: mod_base = OTHER; note R-N-(1,3-dimethylimidazolidin-2-ylidene)phosphoramidate
  modified_base 2: mod_base = OTHER; note = 2-fluororibose adenine
  modified_base 2..3: mod_base = OTHER; note = S-phosphorothioate
  modified_base 3: mod_base = OTHER; note = 2-fluororibose guanine
  modified_base 3..4: mod_base = OTHER; note = S-phosphorothioate
  modified_base 4: mod_base = OTHER; note = 2-fluororibose cytosine
  modified_base 4..5: mod_base = OTHER; note = S-phosphorothioate
  modified_base 5: mod_base = OTHER; note = 2-fluororibose uracil
  modified_base 5..6: mod_base = OTHER; note = S-phosphorothioate
  modified_base 6: mod_base = OTHER; note = 2-fluororibose uracil
  modified_base 6..7: mod_base = OTHER; note = S-phosphorothioate
  modified_base 7: mod_base = OTHER; note = 2-fluororibose cytosine
  modified_base 7..8: mod_base = OTHER; note = S-phosphorothioate
  modified_base 8: mod_base = OTHER; note = 2-fluororibose adenine
  modified_base 8..9: mod_base = OTHER; note = S-phosphorothioate
  modified_base 9: mod_base = OTHER; note = 2-fluororibose guanine
  modified_base 9..10: mod_base = OTHER; note = S-phosphorothioate
  modified_base 10: mod_base = OTHER; note = 2-fluororibose uracil
  modified_base 10..11: mod_base = OTHER; note = S-phosphorothioate
  modified_base 11: mod_base = OTHER; note = 2-fluororibose cytosine
  modified_base 11..12: mod_base = OTHER; note = S-phosphorothioate
  modified_base 12: mod_base = OTHER; note = 2-fluororibose cytosine
  modified_base 12..13: mod_base = OTHER; note = S-phosphorothioate
  modified_base 13: mod_base = OTHER; note = 2-fluororibose cytosine
  modified_base 13..14: mod_base = OTHER; note = S-phosphorothioate
  modified_base 14: mod_base = OTHER; note = 2-fluororibose uracil
  modified_base 14..15: mod_base = OTHER; note = S-phosphorothioate
  modified_base 15: mod_base = OTHER; note = 2-fluororibose uracil
  modified_base 15..16: mod_base = OTHER; note = S-phosphorothioate
  modified_base 16: mod_base = um
  modified_base 16..17: mod_base = OTHER; note = S-phosphorothioate
  modified_base 17: mod_base = cm
  modified_base 17..18: mod_base = OTHER; note = S-phosphorothioate
  modified_base 18: mod_base = OTHER; note = 2-fluororibose uracil
  modified_base 18..19: mod_base = OTHER; note = S-phosphorothioate
  modified_base 19: mod_base = OTHER; note = deoxyribose cytosine
  modified_base 19..20: mod_base = OTHER; note = S-phosphorothioate
  modified_base 20: mod_base = OTHER; note = deoxyribose inosine
  modified_base 20..21: mod_base = OTHER; note S-N-(1,3-dimethylimidazolidin-2-ylidene)phosphoramidate
  modified_base 21: mod_base = um
  modified_base 21..22: mod_base = OTHER; note = S-phosphorothioate
  modified_base 22: mod_base = cm
  modified_base 22..23: mod_base = OTHER; note = S-phosphorothioate
  modified_base 23: mod_base = gm
  modified_base 23..24: mod_base = OTHER; note = S-phosphorothioate
  modified_base 24: mod_base = OTHER; note = 2-O-methylribose adenine
  modified_base 24..25: mod_base = OTHER; note = S-phosphorothioate
  modified_base 25: mod_base = um
  modified_base 25..26: mod_base = OTHER; note = S-phosphorothioate
  modified_base 26: mod_base = gm
  modified_base 26..27: mod_base = OTHER; note = S-phosphorothioate
  modified_base 27: mod_base = gm
  modified_base 27..28: mod_base = OTHER; note = S-phosphorothioate
  modified_base 28: mod_base = um
  modified_base 28..29: mod_base = OTHER; note = S-phosphorothioate
  modified_base 29: mod_base = cm
  modified_base 29..30: mod_base = OTHER; note R-N-(1,3-dimethylimidazolidin-2-ylidene)phosphoramidate
  modified_base 30: mod_base = OTHER; note = 2-O-methylribose adenine
  source 1..30: mol_type = other RNA

SEQ ID NO: 103 - RNA, 30 nt, synthetic construct; identical to SEQ ID NO: 76
  misc_feature 1..30: note = Synthetic: WV-42032
  misc_feature 1..30: note = Synthetic: ADR-0103814
  modified_base 1: mod_base = OTHER; note = 2-fluororibose guanine
  modified_base 1..2: mod_base = OTHER; note R-N-(1,3-dimethylimidazolidin-2-ylidene)phosphoramidate
  modified_base 2: mod_base = OTHER; note = 2-fluororibose cytosine
  modified_base 2..3: mod_base = OTHER; note = S-phosphorothioate
  modified_base 3: mod_base = OTHER; note = 2-fluororibose adenine
  modified_base 3..4: mod_base = OTHER; note = S-phosphorothioate
  modified_base 4: mod_base = OTHER; note = 2-fluororibose guanine
  modified_base 4..5: mod_base = OTHER; note = S-phosphorothioate
  modified_base 5: mod_base = OTHER; note = 2-fluororibose cytosine
  modified_base 5..6: mod_base = OTHER; note = S-phosphorothioate
  modified_base 6: mod_base = OTHER; note = 2-fluororibose uracil
  modified_base 6..7: mod_base = OTHER; note = S-phosphorothioate
  modified_base 7: mod_base = OTHER; note = 2-fluororibose uracil
  modified_base 7..8: mod_base = OTHER; note = S-phosphorothioate
  modified_base 8: mod_base = OTHER; note = 2-fluororibose cytosine
  modified_base 8..9: mod_base = OTHER; note = S-phosphorothioate
  modified_base 9: mod_base = OTHER; note = 2-fluororibose adenine
  modified_base 9..10: mod_base = OTHER; note = S-phosphorothioate
  modified_base 10: mod_base = OTHER; note = 2-fluororibose guanine
  modified_base 10..11: mod_base = OTHER; note = S-phosphorothioate
  modified_base 11: mod_base = OTHER; note = 2-fluororibose uracil
  modified_base 11..12: mod_base = OTHER; note = S-phosphorothioate
  modified_base 12: mod_base = OTHER; note = 2-fluororibose cytosine
  modified_base 12..13: mod_base = OTHER; note = S-phosphorothioate
  modified_base 13: mod_base = OTHER; note = 2-fluororibose cytosine
  modified_base 13..14: mod_base = OTHER; note = S-phosphorothioate
  modified_base 14: mod_base = OTHER; note = 2-fluororibose cytosine
  modified_base 14..15: mod_base = OTHER; note = S-phosphorothioate
  modified_base 15: mod_base = OTHER; note = 2-fluororibose uracil
  modified_base 15..16: mod_base = OTHER; note = S-phosphorothioate
  modified_base 16: mod_base = um
  modified_base 16..17: mod_base = OTHER; note = S-phosphorothioate
  modified_base 17: mod_base = um
  modified_base 17..18: mod_base = OTHER; note = S-phosphorothioate
  modified_base 18: mod_base = cm
  modified_base 18..19: mod_base = OTHER; note = S-phosphorothioate
  modified_base 19: mod_base = OTHER; note = 2-fluororibose uracil
  modified_base 19..20: mod_base = OTHER; note = S-phosphorothioate
  modified_base 20: mod_base = OTHER; note = deoxyribose cytosine
  modified_base 20..21: mod_base = OTHER; note = S-phosphorothioate
  modified_base 21: mod_base = OTHER; note = deoxyribose inosine
  modified_base 21..22: mod_base = OTHER; note S-N-(1,3-dimethylimidazolidin-2-ylidene)phosphoramidate
  modified_base 22: mod_base = um
  modified_base 22..23: mod_base = OTHER; note = S-phosphorothioate
  modified_base 23: mod_base = cm
  modified_base 23..24: mod_base = OTHER; note = S-phosphorothioate
  modified_base 24: mod_base = gm
  modified_base 24..25: mod_base = OTHER; note = S-phosphorothioate
  modified_base 25: mod_base = OTHER; note = 2-O-methylribose adenine
  modified_base 25..26: mod_base = OTHER; note = S-phosphorothioate
  modified_base 26: mod_base = um
  modified_base 26..27: mod_base = OTHER; note = S-phosphorothioate
  modified_base 27: mod_base = gm
  modified_base 27..28: mod_base = OTHER; note = S-phosphorothioate
  modified_base 28: mod_base = gm
  modified_base 28..29: mod_base = OTHER; note = S-phosphorothioate
  modified_base 29: mod_base = um
  modified_base 29..30: mod_base = OTHER; note R-N-(1,3-dimethylimidazolidin-2-ylidene)phosphoramidate
  modified_base 30: mod_base = cm
  source 1..30: mol_type = other RNA

SEQ ID NO: 104 - RNA, 30 nt, synthetic construct; identical to SEQ ID NO: 77
  misc_feature 1..30: note = Synthetic: WV-42031
  misc_feature 1..30: note = Synthetic: ADR-0103437
  modified_base 1: mod_base = OTHER; note = 2-fluororibose adenine
  modified_base 1..2: mod_base = OTHER; note R-N-(1,3-dimethylimidazolidin-2-ylidene)phosphoramidate
  modified_base 2: mod_base = OTHER; note = 2-fluororibose guanine
  modified_base 2..3: mod_base = OTHER; note = S-phosphorothioate
  modified_base 3: mod_base = OTHER; note = 2-fluororibose cytosine
  modified_base 3..4: mod_base = OTHER; note = S-phosphorothioate
  modified_base 4: mod_base = OTHER; note = 2-fluororibose adenine
  modified_base 4..5: mod_base = OTHER; note = S-phosphorothioate
  modified_base 5: mod_base = OTHER; note = 2-fluororibose guanine
  modified_base 5..6: mod_base = OTHER; note = S-phosphorothioate
  modified_base 6: mod_base = OTHER; note = 2-fluororibose cytosine
  modified_base 6..7: mod_base = OTHER; note = S-phosphorothioate
  modified_base 7: mod_base = OTHER; note = 2-fluororibose uracil
  modified_base 7..8: mod_base = OTHER; note = S-phosphorothioate
  modified_base 8: mod_base = OTHER; note = 2-fluororibose uracil
  modified_base 8..9: mod_base = OTHER; note = S-phosphorothioate
  modified_base 9: mod_base = OTHER; note = 2-fluororibose cytosine
  modified_base 9..10: mod_base = OTHER; note = S-phosphorothioate
  modified_base 10: mod_base = OTHER; note = 2-fluororibose adenine
  modified_base 10..11: mod_base = OTHER; note = S-phosphorothioate
  modified_base 11: mod_base = OTHER; note = 2-fluororibose guanine
  modified_base 11..12: mod_base = OTHER; note = S-phosphorothioate
  modified_base 12: mod_base = OTHER; note = 2-fluororibose uracil
  modified_base 12..13: mod_base = OTHER; note = S-phosphorothioate
  modified_base 13: mod_base = OTHER; note = 2-fluororibose cytosine
  modified_base 13..14: mod_base = OTHER; note = S-phosphorothioate
  modified_base 14: mod_base = OTHER; note = 2-fluororibose cytosine
  modified_base 14..15: mod_base = OTHER; note = S-phosphorothioate
  modified_base 15: mod_base = OTHER; note = 2-fluororibose cytosine
  modified_base 15..16: mod_base = OTHER; note = S-phosphorothioate
  modified_base 16: mod_base = um
  modified_base 16..17: mod_base = OTHER; note = S-phosphorothioate
  modified_base 17: mod_base = um
  modified_base 17..18: mod_base = OTHER; note = S-phosphorothioate
  modified_base 18: mod_base = um
  modified_base 18..19: mod_base = OTHER; note = S-phosphorothioate
  modified_base 19: mod_base = cm
  modified_base 19..20: mod_base = OTHER; note = S-phosphorothioate
  modified_base 20: mod_base = OTHER; note = 2-fluororibose uracil
  modified_base 20..21: mod_base = OTHER; note = S-phosphorothioate
  modified_base 21: mod_base = OTHER; note = deoxyribose cytosine
  modified_base 21..22: mod_base = OTHER; note = S-phosphorothioate
  modified_base 22: mod_base = OTHER; note = deoxyribose inosine
  modified_base 22..23: mod_base = OTHER; note S-N-(1,3-dimethylimidazolidin-2-ylidene)phosphoramidate
  modified_base 23: mod_base = um
  modified_base 23..24: mod_base = OTHER; note = S-phosphorothioate
  modified_base 24: mod_base = cm
  modified_base 24..25: mod_base = OTHER; note = S-phosphorothioate
  modified_base 25: mod_base = gm
  modified_base 25..26: mod_base = OTHER; note = S-phosphorothioate
  modified_base 26: mod_base = OTHER; note = 2-O-methylribose adenine
  modified_base 26..27: mod_base = OTHER; note = S-phosphorothioate
  modified_base 27: mod_base = um
  modified_base 27..28: mod_base = OTHER; note = S-phosphorothioate
  modified_base 28: mod_base = gm
  modified_base 28..29: mod_base = OTHER; note = S-phosphorothioate
  modified_base 29: mod_base = gm
  modified_base 29..30: mod_base = OTHER; note R-N-(1,3-dimethylimidazolidin-2-ylidene)phosphoramidate
  modified_base 30: mod_base = um
  source 1..30: mol_type = other RNA

SEQ ID NO: 105 - RNA, 30 nt, synthetic construct; identical to SEQ ID NO: 78
  misc_feature 1..30: note = Synthetic: WV-42030
  misc_feature 1..30: note = Synthetic: ADR-0103504
  modified_base 1: mod_base = OTHER; note = 2-fluororibose cytosine
  modified_base 1..2: mod_base = OTHER; note R-N-(1,3-dimethylimidazolidin-2-ylidene)phosphoramidate
  modified_base 2: mod_base = OTHER; note = 2-fluororibose adenine
  modified_base 2..3: mod_base = OTHER; note = S-phosphorothioate
  modified_base 3: mod_base = OTHER; note = 2-fluororibose guanine
  modified_base 3..4: mod_base = OTHER; note = S-phosphorothioate
  modified_base 4: mod_base = OTHER; note = 2-fluororibose cytosine
  modified_base 4..5: mod_base = OTHER; note = S-phosphorothioate
  modified_base 5: mod_base = OTHER; note = 2-fluororibose adenine
  modified_base 5..6: mod_base = OTHER; note = S-phosphorothioate
  modified_base 6: mod_base = OTHER; note = 2-fluororibose guanine
  modified_base 6..7: mod_base = OTHER; note = S-phosphorothioate
  modified_base 7: mod_base = OTHER; note = 2-fluororibose cytosine
  modified_base 7..8: mod_base = OTHER; note = S-phosphorothioate
  modified_base 8: mod_base = OTHER; note = 2-fluororibose uracil
  modified_base 8..9: mod_base = OTHER; note = S-phosphorothioate
  modified_base 9: mod_base = OTHER; note = 2-fluororibose uracil
  modified_base 9..10: mod_base = OTHER; note = S-phosphorothioate
  modified_base 10: mod_base = OTHER; note = 2-fluororibose cytosine
  modified_base 10..11: mod_base = OTHER; note = S-phosphorothioate
  modified_base 11: mod_base = OTHER; note = 2-fluororibose adenine
  modified_base 11..12: mod_base = OTHER; note = S-phosphorothioate
  modified_base 12: mod_base = OTHER; note = 2-fluororibose guanine
  modified_base 12..13: mod_base = OTHER; note = S-phosphorothioate
  modified_base 13: mod_base = OTHER; note = 2-fluororibose uracil
  modified_base 13..14: mod_base = OTHER; note = S-phosphorothioate
  modified_base 14: mod_base = OTHER; note = 2-fluororibose cytosine
  modified_base 14..15: mod_base = OTHER; note = S-phosphorothioate
  modified_base 15: mod_base = OTHER; note = 2-fluororibose cytosine
  modified_base 15..16: mod_base = OTHER; note = S-phosphorothioate
  modified_base 16: mod_base = cm
  modified_base 16..17: mod_base = OTHER; note = S-phosphorothioate
  modified_base 17: mod_base = um
  modified_base 17..18: mod_base = OTHER; note = S-phosphorothioate
  modified_base 18: mod_base = um
  modified_base 18..19: mod_base = OTHER; note = S-phosphorothioate
  modified_base 19: mod_base = um
  modified_base 19..20: mod_base = OTHER; note = S-phosphorothioate
  modified_base 20: mod_base = cm
  modified_base 20..21: mod_base = OTHER; note = S-phosphorothioate
  modified_base 21: mod_base = OTHER; note = 2-fluororibose uracil
  modified_base 21..22: mod_base = OTHER; note = S-phosphorothioate
  modified_base 22: mod_base = OTHER; note = deoxyribose cytosine
  modified_base 22..23: mod_base = OTHER; note = S-phosphorothioate
  modified_base 23: mod_base = OTHER; note = deoxyribose inosine
  modified_base 23..24: mod_base = OTHER; note S-N-(1,3-dimethylimidazolidin-2-ylidene)phosphoramidate
  modified_base 24: mod_base = um
  modified_base 24..25: mod_base = OTHER; note = S-phosphorothioate
  modified_base 25: mod_base = cm
  modified_base 25..26: mod_base = OTHER; note = S-phosphorothioate
  modified_base 26: mod_base = gm
  modified_base 26..27: mod_base = OTHER; note = S-phosphorothioate
  modified_base 27: mod_base = OTHER; note = 2-O-methylribose adenine
  modified_base 27..28: mod_base = OTHER; note = S-phosphorothioate
  modified_base 28: mod_base = um
  modified_base 28..29: mod_base = OTHER; note = S-phosphorothioate
  modified_base 29: mod_base = gm
  modified_base 29..30: mod_base = OTHER; note R-N-(1,3-dimethylimidazolidin-2-ylidene)phosphoramidate
  modified_base 30: mod_base = gm
  source 1..30: mol_type = other RNA

SEQ ID NO: 106 - RNA, 30 nt, synthetic construct; identical to SEQ ID NO: 79
  misc_feature 1..30: note = Synthetic: WV-42029
  misc_feature 1..30: note = Synthetic: ADR-0103518
  modified_base 1: mod_base = OTHER; note = 2-fluororibose cytosine
  modified_base 1..2: mod_base = OTHER; note R-N-(1,3-dimethylimidazolidin-2-ylidene)phosphoramidate
  modified_base 2: mod_base = OTHER; note = 2-fluororibose cytosine
  modified_base 2..3: mod_base = OTHER; note = S-phosphorothioate
  modified_base 3: mod_base = OTHER; note = 2-fluororibose adenine
  modified_base 3..4: mod_base = OTHER; note = S-phosphorothioate
  modified_base 4: mod_base = OTHER; note = 2-fluororibose guanine
  modified_base 4..5: mod_base = OTHER; note = S-phosphorothioate
  modified_base 5: mod_base = OTHER; note = 2-fluororibose cytosine
  modified_base 5..6: mod_base = OTHER; note = S-phosphorothioate
  modified_base 6: mod_base = OTHER; note = 2-fluororibose adenine
  modified_base 6..7: mod_base = OTHER; note = S-phosphorothioate
  modified_base 7: mod_base = OTHER; note = 2-fluororibose guanine
  modified_base 7..8: mod_base = OTHER; note = S-phosphorothioate
  modified_base 8: mod_base = OTHER; note = 2-fluororibose cytosine
  modified_base 8..9: mod_base = OTHER; note = S-phosphorothioate
  modified_base 9: mod_base = OTHER; note = 2-fluororibose uracil
  modified_base 9..10: mod_base = OTHER; note = S-phosphorothioate
  modified_base 10: mod_base = OTHER; note = 2-fluororibose uracil
  modified_base 10..11: mod_base = OTHER; note = S-phosphorothioate
  modified_base 11: mod_base = OTHER; note = 2-fluororibose cytosine
  modified_base 11..12: mod_base = OTHER; note = S-phosphorothioate
  modified_base 12: mod_base = OTHER; note = 2-fluororibose adenine
  modified_base 12..13: mod_base = OTHER; note = S-phosphorothioate
  modified_base 13: mod_base = OTHER; note = 2-fluororibose guanine
  modified_base 13..14: mod_base = OTHER; note = S-phosphorothioate
  modified_base 14: mod_base = OTHER; note = 2-fluororibose uracil
  modified_base 14..15: mod_base = OTHER; note = S-phosphorothioate
  modified_base 15: mod_base = OTHER; note = 2-fluororibose cytosine
  modified_base 15..16: mod_base = OTHER; note = S-phosphorothioate
  modified_base 16: mod_base = cm
  modified_base 16..17: mod_base = OTHER; note = S-phosphorothioate
  modified_base 17: mod_base = cm
  modified_base 17..18: mod_base = OTHER; note = S-phosphorothioate
  modified_base 18: mod_base = um
  modified_base 18..19: mod_base = OTHER; note = S-phosphorothioate
  modified_base 19: mod_base = um
  modified_base 19..20: mod_base = OTHER; note = S-phosphorothioate
  modified_base 20: mod_base = um
  modified_base 20..21: mod_base = OTHER; note = S-phosphorothioate
  modified_base 21: mod_base = cm
  modified_base 21..22: mod_base = OTHER; note = S-phosphorothioate
  modified_base 22: mod_base = OTHER; note = 2-fluororibose uracil
  modified_base 22..23: mod_base = OTHER; note = S-phosphorothioate
  modified_base 23: mod_base = OTHER; note = deoxyribose cytosine
  modified_base 23..24: mod_base = OTHER; note = S-phosphorothioate
  modified_base 24: mod_base = OTHER; note = deoxyribose inosine
  modified_base 24..25: mod_base = OTHER; note S-N-(1,3-dimethylimidazolidin-2-ylidene)phosphoramidate
  modified_base 25: mod_base = um
  modified_base 25..26: mod_base = OTHER; note = S-phosphorothioate
  modified_base 26: mod_base = cm
  modified_base 26..27: mod_base = OTHER; note = S-phosphorothioate
  modified_base 27: mod_base = gm
  modified_base 27..28: mod_base = OTHER; note = S-phosphorothioate
  modified_base 28: mod_base = OTHER; note = 2-O-methylribose adenine
  modified_base 28..29: mod_base = OTHER; note = S-phosphorothioate
  modified_base 29: mod_base = um
  modified_base 29..30: mod_base = OTHER; note R-N-(1,3-dimethylimidazolidin-2-ylidene)phosphoramidate
  modified_base 30: mod_base = gm
  source 1..30: mol_type = other RNA

SEQ ID NO: 107 - RNA, 30 nt, synthetic construct; identical to SEQ ID NO: 80
  misc_feature 1..30: note = Synthetic: WV-42028
  misc_feature 1..30: note = Synthetic: ADR-0103605
  modified_base 1: mod_base = OTHER; note = 2-fluororibose cytosine
  modified_base 1..2: mod_base = OTHER; note R-N-(1,3-dimethylimidazolidin-2-ylidene)phosphoramidate
  modified_base 2: mod_base = OTHER; note = 2-fluororibose cytosine
  modified_base 2..3: mod_base = OTHER; note = S-phosphorothioate
  modified_base 3: mod_base = OTHER; note = 2-fluororibose cytosine
  modified_base 3..4: mod_base = OTHER; note = S-phosphorothioate
  modified_base 4: mod_base = OTHER; note = 2-fluororibose adenine
  modified_base 4..5: mod_base = OTHER; note = S-phosphorothioate
  modified_base 5: mod_base = OTHER; note = 2-fluororibose guanine
  modified_base 5..6: mod_base = OTHER; note = S-phosphorothioate
  modified_base 6: mod_base = OTHER; note = 2-fluororibose cytosine
  modified_base 6..7: mod_base = OTHER; note = S-phosphorothioate
  modified_base 7: mod_base = OTHER; note = 2-fluororibose adenine
  modified_base 7..8: mod_base = OTHER; note = S-phosphorothioate
  modified_base 8: mod_base = OTHER; note = 2-fluororibose guanine
  modified_base 8..9: mod_base = OTHER; note = S-phosphorothioate
  modified_base 9: mod_base = OTHER; note = 2-fluororibose cytosine
  modified_base 9..10: mod_base = OTHER; note = S-phosphorothioate
  modified_base 10: mod_base = OTHER; note = 2-fluororibose uracil
  modified_base 10..11: mod_base = OTHER; note = S-phosphorothioate
  modified_base 11: mod_base = OTHER; note = 2-fluororibose uracil
  modified_base 11..12: mod_base = OTHER; note = S-phosphorothioate
  modified_base 12: mod_base = OTHER; note = 2-fluororibose cytosine
  modified_base 12..13: mod_base = OTHER; note = S-phosphorothioate
  modified_base 13: mod_base = OTHER; note = 2-fluororibose adenine
  modified_base 13..14: mod_base = OTHER; note = S-phosphorothioate
  modified_base 14: mod_base = OTHER; note = 2-fluororibose guanine
  modified_base 14..15: mod_base = OTHER; note = S-phosphorothioate
  modified_base 15: mod_base = OTHER; note = 2-fluororibose uracil
  modified_base 15..16: mod_base = OTHER; note = S-phosphorothioate
  modified_base 16: mod_base = cm
  modified_base 16..17: mod_base = OTHER; note = S-phosphorothioate
  modified_base 17: mod_base = cm
  modified_base 17..18: mod_base = OTHER; note = S-phosphorothioate
  modified_base 18: mod_base = cm
  modified_base 18..19: mod_base = OTHER; note = S-phosphorothioate
  modified_base 19: mod_base = um
  modified_base 19..20: mod_base = OTHER; note = S-phosphorothioate
  modified_base 20: mod_base = um
  modified_base 20..21: mod_base = OTHER; note = S-phosphorothioate
  modified_base 21: mod_base = um
  modified_base 21..22: mod_base = OTHER; note = S-phosphorothioate
  modified_base 22: mod_base = cm
  modified_base 22..23: mod_base = OTHER; note = S-phosphorothioate
  modified_base 23: mod_base = OTHER; note = 2-fluororibose uracil
  modified_base 23..24: mod_base = OTHER; note = S-phosphorothioate
  modified_base 24: mod_base = OTHER; note = deoxyribose cytosine
  modified_base 24..25: mod_base = OTHER; note = S-phosphorothioate
  modified_base 25: mod_base = OTHER; note = deoxyribose inosine
  modified_base 25..26: mod_base = OTHER; note S-N-(1,3-dimethylimidazolidin-2-ylidene)phosphoramidate
  modified_base 26: mod_base = um
  modified_base 26..27: mod_base = OTHER; note = S-phosphorothioate
  modified_base 27: mod_base = cm
  modified_base 27..28: mod_base = OTHER; note = S-phosphorothioate
  modified_base 28: mod_base = gm
  modified_base 28..29: mod_base = OTHER; note = S-phosphorothioate
  modified_base 29: mod_base = OTHER; note = 2-O-methylribose adenine
  modified_base 29..30: mod_base = OTHER; note R-N-(1,3-dimethylimidazolidin-2-ylidene)phosphoramidate
  modified_base 30: mod_base = um
  source 1..30: mol_type = other RNA

SEQ ID NO: 108 - RNA, 30 nt, synthetic construct; identical to SEQ ID NO: 81
  misc_feature 1..30: note = Synthetic: WV-42027
  misc_feature 1..30: note = Synthetic: ADR-0103728
  modified_base 1: mod_base = OTHER; note = 2-fluororibose cytosine
  modified_base 1..2: mod_base = OTHER; note R-N-(1,3-dimethylimidazolidin-2-ylidene)phosphoramidate
  modified_base 2: mod_base = OTHER; note = 2-fluororibose cytosine
  modified_base 2..3: mod_base = OTHER; note = S-phosphorothioate
  modified_base 3: mod_base = OTHER; note = 2-fluororibose cytosine
  modified_base 3..4: mod_base = OTHER; note = S-phosphorothioate
  modified_base 4: mod_base = OTHER; note = 2-fluororibose cytosine
  modified_base 4..5: mod_base = OTHER; note = S-phosphorothioate
  modified_base 5: mod_base = OTHER; note = 2-fluororibose adenine
  modified_base 5..6: mod_base = OTHER; note = S-phosphorothioate
  modified_base 6: mod_base = OTHER; note = 2-fluororibose guanine
  modified_base 6..7: mod_base = OTHER; note = S-phosphorothioate
  modified_base 7: mod_base = OTHER; note = 2-fluororibose cytosine
  modified_base 7..8: mod_base = OTHER; note = S-phosphorothioate
  modified_base 8: mod_base = OTHER; note = 2-fluororibose adenine
  modified_base 8..9: mod_base = OTHER; note = S-phosphorothioate
  modified_base 9: mod_base = OTHER; note = 2-fluororibose guanine
  modified_base 9..10: mod_base = OTHER; note = S-phosphorothioate
  modified_base 10: mod_base = OTHER; note = 2-fluororibose cytosine
  modified_base 10..11: mod_base = OTHER; note = S-phosphorothioate
  modified_base 11: mod_base = OTHER; note = 2-fluororibose uracil
  modified_base 11..12: mod_base = OTHER; note = S-phosphorothioate
  modified_base 12: mod_base = OTHER; note = 2-fluororibose uracil
  modified_base 12..13: mod_base = OTHER; note = S-phosphorothioate
  modified_base 13: mod_base = OTHER; note = 2-fluororibose cytosine
  modified_base 13..14: mod_base = OTHER; note = S-phosphorothioate
  modified_base 14: mod_base = OTHER; note = 2-fluororibose adenine
  modified_base 14..15: mod_base = OTHER; note = S-phosphorothioate
  modified_base 15: mod_base = OTHER; note = 2-fluororibose guanine
  modified_base 15..16: mod_base = OTHER; note = S-phosphorothioate
  modified_base 16: mod_base = um
  modified_base 16..17: mod_base = OTHER; note = S-phosphorothioate
  modified_base 17: mod_base = cm
  modified_base 17..18: mod_base = OTHER; note = S-phosphorothioate
  modified_base 18: mod_base = cm
  modified_base 18..19: mod_base = OTHER; note = S-phosphorothioate
  modified_base 19: mod_base = cm
  modified_base 19..20: mod_base = OTHER; note = S-phosphorothioate
  modified_base 20: mod_base = um
  modified_base 20..21: mod_base = OTHER; note = S-phosphorothioate
  modified_base 21: mod_base = um
  modified_base 21..22: mod_base = OTHER; note = S-phosphorothioate
  modified_base 22: mod_base = um
  modified_base 22..23: mod_base = OTHER; note = S-phosphorothioate
  modified_base 23: mod_base = cm
  modified_base 23..24: mod_base = OTHER; note = S-phosphorothioate
  modified_base 24: mod_base = OTHER; note = 2-fluororibose uracil
  modified_base 24..25: mod_base = OTHER; note = S-phosphorothioate
  modified_base 25: mod_base = OTHER; note = deoxyribose cytosine
  modified_base 25..26: mod_base = OTHER; note = S-phosphorothioate
  modified_base 26: mod_base = OTHER; note = deoxyribose inosine
  modified_base 26..27: mod_base = OTHER; note S-N-(1,3-dimethylimidazolidin-2-ylidene)phosphoramidate
  modified_base 27: mod_base = um
  modified_base 27..28: mod_base = OTHER; note = S-phosphorothioate
  modified_base 28: mod_base = cm
  modified_base 28..29: mod_base = OTHER; note = S-phosphorothioate
  modified_base 29: mod_base = gm
  modified_base 29..30: mod_base = OTHER; note R-N-(1,3-dimethylimidazolidin-2-ylidene)phosphoramidate
  modified_base 30: mod_base = OTHER; note = 2-O-methylribose adenine
  source 1..30: mol_type = other RNA

SEQ ID NO: 109 - RNA, 30 nt, synthetic construct; identical to SEQ ID NO: 82
  misc_feature 1..30: note = Synthetic: WV-42026
  misc_feature 1..30: note = Synthetic: ADR-0103824
  modified_base 1: mod_base = OTHER; note = 2-fluororibose guanine
  modified_base 1..2: mod_base = OTHER; note R-N-(1,3-dimethylimidazolidin-2-ylidene)phosphoramidate
  modified_base 2: mod_base = OTHER; note = 2-fluororibose cytosine
  modified_base 2..3: mod_base = OTHER; note = S-phosphorothioate
  modified_base 3: mod_base = OTHER; note = 2-fluororibose cytosine
  modified_base 3..4: mod_base = OTHER; note = S-phosphorothioate
  modified_base 4: mod_base = OTHER; note = 2-fluororibose cytosine
  modified_base 4..5: mod_base = OTHER; note = S-phosphorothioate
  modified_base 5: mod_base = OTHER; note = 2-fluororibose cytosine
  modified_base 5..6: mod_base = OTHER; note = S-phosphorothioate
  modified_base 6: mod_base = OTHER; note = 2-fluororibose adenine
  modified_base 6..7: mod_base = OTHER; note = S-phosphorothioate
  modified_base 7: mod_base = OTHER; note = 2-fluororibose guanine
  modified_base 7..8: mod_base = OTHER; note = S-phosphorothioate
  modified_base 8: mod_base = OTHER; note = 2-fluororibose cytosine
  modified_base 8..9: mod_base = OTHER; note = S-phosphorothioate
  modified_base 9: mod_base = OTHER; note = 2-fluororibose adenine
  modified_base 9..10: mod_base = OTHER; note = S-phosphorothioate
  modified_base 10: mod_base = OTHER; note = 2-fluororibose guanine
  modified_base 10..11: mod_base = OTHER; note = S-phosphorothioate
  modified_base 11: mod_base = OTHER; note = 2-fluororibose cytosine
  modified_base 11..12: mod_base = OTHER; note = S-phosphorothioate
  modified_base 12: mod_base = OTHER; note = 2-fluororibose uracil
  modified_base 12..13: mod_base = OTHER; note = S-phosphorothioate
  modified_base 13: mod_base = OTHER; note = 2-fluororibose uracil
  modified_base 13..14: mod_base = OTHER; note = S-phosphorothioate
  modified_base 14: mod_base = OTHER; note = 2-fluororibose cytosine
  modified_base 14..15: mod_base = OTHER; note = S-phosphorothioate
  modified_base 15: mod_base = OTHER; note = 2-fluororibose adenine
  modified_base 15..16: mod_base = OTHER; note = S-phosphorothioate
  modified_base 16: mod_base = gm
  modified_base 16..17: mod_base = OTHER; note = S-phosphorothioate
  modified_base 17: mod_base = um
  modified_base 17..18: mod_base = OTHER; note = S-phosphorothioate
  modified_base 18: mod_base = cm
  modified_base 18..19: mod_base = OTHER; note = S-phosphorothioate
  modified_base 19: mod_base = cm
  modified_base 19..20: mod_base = OTHER; note = S-phosphorothioate
  modified_base 20: mod_base = cm
  modified_base 20..21: mod_base = OTHER; note = S-phosphorothioate
  modified_base 21: mod_base = um
  modified_base 21..22: mod_base = OTHER; note = S-phosphorothioate
  modified_base 22: mod_base = um
  modified_base 22..23: mod_base = OTHER; note = S-phosphorothioate
  modified_base 23: mod_base = um
  modified_base 23..24: mod_base = OTHER; note = S-phosphorothioate
  modified_base 24: mod_base = cm
  modified_base 24..25: mod_base = OTHER; note = S-phosphorothioate
  modified_base 25: mod_base = OTHER; note = 2-fluororibose uracil
  modified_base 25..26: mod_base = OTHER; note = S-phosphorothioate
  modified_base 26: mod_base = OTHER; note = deoxyribose cytosine
  modified_base 26..27: mod_base = OTHER; note = S-phosphorothioate
  modified_base 27: mod_base = OTHER; note = deoxyribose inosine
  modified_base 27..28: mod_base = OTHER; note S-N-(1,3-dimethylimidazolidin-2-ylidene)phosphoramidate
  modified_base 28: mod_base = um
  modified_base 28..29: mod_base = OTHER; note = S-phosphorothioate
  modified_base 29: mod_base = cm
  modified_base 29..30: mod_base = OTHER; note R-N-(1,3-dimethylimidazolidin-2-ylidene)phosphoramidate
  modified_base 30: mod_base = gm
  source 1..30: mol_type = other RNA

SEQ ID NO: 110 - RNA, 30 nt, synthetic construct; identical to SEQ ID NO: 83
  misc_feature 1..30: note = Synthetic: WV-42025
  misc_feature 1..30: note = Synthetic: ADR-0103834
  modified_base 1: mod_base = OTHER; note = 2-fluororibose guanine
  modified_base 1..2: mod_base = OTHER; note R-N-(1,3-dimethylimidazolidin-2-ylidene)phosphoramidate
  modified_base 2: mod_base = OTHER; note = 2-fluororibose guanine
  modified_base 2..3: mod_base = OTHER; note = S-phosphorothioate
  modified_base 3: mod_base = OTHER; note = 2-fluororibose cytosine
  modified_base 3..4: mod_base = OTHER; note = S-phosphorothioate
  modified_base 4: mod_base = OTHER; note = 2-fluororibose cytosine
  modified_base 4..5: mod_base = OTHER; note = S-phosphorothioate
  modified_base 5: mod_base = OTHER; note = 2-fluororibose cytosine
  modified_base 5..6: mod_base = OTHER; note = S-phosphorothioate
  modified_base 6: mod_base = OTHER; note = 2-fluororibose cytosine
  modified_base 6..7: mod_base = OTHER; note = S-phosphorothioate
  modified_base 7: mod_base = OTHER; note = 2-fluororibose adenine
  modified_base 7..8: mod_base = OTHER; note = S-phosphorothioate
  modified_base 8: mod_base = OTHER; note = 2-fluororibose guanine
  modified_base 8..9: mod_base = OTHER; note = S-phosphorothioate
  modified_base 9: mod_base = OTHER; note = 2-fluororibose cytosine
  modified_base 9..10: mod_base = OTHER; note = S-phosphorothioate
  modified_base 10: mod_base = OTHER; note = 2-fluororibose adenine
  modified_base 10..11: mod_base = OTHER; note = S-phosphorothioate
  modified_base 11: mod_base = OTHER; note = 2-fluororibose guanine
  modified_base 11..12: mod_base = OTHER; note = S-phosphorothioate
  modified_base 12: mod_base = OTHER; note = 2-fluororibose cytosine
  modified_base 12..13: mod_base = OTHER; note = S-phosphorothioate
  modified_base 13: mod_base = OTHER; note = 2-fluororibose uracil
  modified_base 13..14: mod_base = OTHER; note = S-phosphorothioate
  modified_base 14: mod_base = OTHER; note = 2-fluororibose uracil
  modified_base 14..15: mod_base = OTHER; note = S-phosphorothioate
  modified_base 15: mod_base = OTHER; note = 2-fluororibose cytosine
  modified_base 15..16: mod_base = OTHER; note = S-phosphorothioate
  modified_base 16: mod_base = OTHER; note = 2-O-methylribose adenine
  modified_base 16..17: mod_base = OTHER; note = S-phosphorothioate
  modified_base 17: mod_base = gm
  modified_base 17..18: mod_base = OTHER; note = S-phosphorothioate
  modified_base 18: mod_base = um
  modified_base 18..19: mod_base = OTHER; note = S-phosphorothioate
  modified_base 19: mod_base = cm
  modified_base 19..20: mod_base = OTHER; note = S-phosphorothioate
  modified_base 20: mod_base = cm
  modified_base 20..21: mod_base = OTHER; note = S-phosphorothioate
  modified_base 21: mod_base = cm
  modified_base 21..22: mod_base = OTHER; note = S-phosphorothioate
  modified_base 22: mod_base = um
  modified_base 22..23: mod_base = OTHER; note = S-phosphorothioate
  modified_base 23: mod_base = um
  modified_base 23..24: mod_base = OTHER; note = S-phosphorothioate
  modified_base 24: mod_base = um
  modified_base 24..25: mod_base = OTHER; note = S-phosphorothioate
  modified_base 25: mod_base = cm
  modified_base 25..26: mod_base = OTHER; note = S-phosphorothioate
  modified_base 26: mod_base = OTHER; note = 2-fluororibose uracil
  modified_base 26..27: mod_base = OTHER; note = S-phosphorothioate
  modified_base 27: mod_base = OTHER; note = deoxyribose cytosine
  modified_base 27..28: mod_base = OTHER; note = S-phosphorothioate
  modified_base 28: mod_base = OTHER; note = deoxyribose inosine
  modified_base 28..29: mod_base = OTHER; note S-N-(1,3-dimethylimidazolidin-2-ylidene)phosphoramidate
  modified_base 29: mod_base = um
  modified_base 29..30: mod_base = OTHER; note R-N-(1,3-dimethylimidazolidin-2-ylidene)phosphoramidate
  modified_base 30: mod_base = cm
  source 1..30: mol_type = other RNA

SEQ ID NO: 111 - RNA, 30 nt, synthetic construct; identical to SEQ ID NO: 84
  misc_feature 1..30: note = Synthetic: WV-42024
  misc_feature 1..30: note = Synthetic: ADR-0103930
  modified_base 1: mod_base = OTHER; note = 2-fluororibose uracil
  modified_base 1..2: mod_base = OTHER; note R-N-(1,3-dimethylimidazolidin-2-ylidene)phosphoramidate
  modified_base 2: mod_base = OTHER; note = 2-fluororibose guanine
  modified_base 2..3: mod_base = OTHER; note = S-phosphorothioate
  modified_base 3: mod_base = OTHER; note = 2-fluororibose guanine
  modified_base 3..4: mod_base = OTHER; note = S-phosphorothioate
  modified_base 4: mod_base = OTHER; note = 2-fluororibose cytosine
  modified_base 4..5: mod_base = OTHER; note = S-phosphorothioate
  modified_base 5: mod_base = OTHER; note = 2-fluororibose cytosine
  modified_base 5..6: mod_base = OTHER; note = S-phosphorothioate
  modified_base 6: mod_base = OTHER; note = 2-fluororibose cytosine
  modified_base 6..7: mod_base = OTHER; note = S-phosphorothioate
  modified_base 7: mod_base = OTHER; note = 2-fluororibose cytosine
  modified_base 7..8: mod_base = OTHER; note = S-phosphorothioate
  modified_base 8: mod_base = OTHER; note = 2-fluororibose adenine
  modified_base 8..9: mod_base = OTHER; note = S-phosphorothioate
  modified_base 9: mod_base = OTHER; note = 2-fluororibose guanine
  modified_base 9..10: mod_base = OTHER; note = S-phosphorothioate
  modified_base 10: mod_base = OTHER; note = 2-fluororibose cytosine
  modified_base 10..11: mod_base = OTHER; note = S-phosphorothioate
  modified_base 11: mod_base = OTHER; note = 2-fluororibose adenine
  modified_base 11..12: mod_base = OTHER; note = S-phosphorothioate
  modified_base 12: mod_base = OTHER; note = 2-fluororibose guanine
  modified_base 12..13: mod_base = OTHER; note = S-phosphorothioate
  modified_base 13: mod_base = OTHER; note = 2-fluororibose cytosine
  modified_base 13..14: mod_base = OTHER; note = S-phosphorothioate
  modified_base 14: mod_base = OTHER; note = 2-fluororibose uracil
  modified_base 14..15: mod_base = OTHER; note = S-phosphorothioate
  modified_base 15: mod_base = OTHER; note = 2-fluororibose uracil
  modified_base 15..16: mod_base = OTHER; note = S-phosphorothioate
  modified_base 16: mod_base = cm
  modified_base 16..17: mod_base = OTHER; note = S-phosphorothioate
  modified_base 17: mod_base = OTHER; note = 2-O-methylribose adenine
  modified_base 17..18: mod_base = OTHER; note = S-phosphorothioate
  modified_base 18: mod_base = gm
  modified_base 18..19: mod_base = OTHER; note = S-phosphorothioate
  modified_base 19: mod_base = um
  modified_base 19..20: mod_base = OTHER; note = S-phosphorothioate
  modified_base 20: mod_base = cm
  modified_base 20..21: mod_base = OTHER; note = S-phosphorothioate
  modified_base 21: mod_base = cm
  modified_base 21..22: mod_base = OTHER; note = S-phosphorothioate
  modified_base 22: mod_base = cm
  modified_base 22..23: mod_base = OTHER; note = S-phosphorothioate
  modified_base 23: mod_base = um
  modified_base 23..24: mod_base = OTHER; note = S-phosphorothioate
  modified_base 24: mod_base = um
  modified_base 24..25: mod_base = OTHER; note = S-phosphorothioate
  modified_base 25: mod_base = um
  modified_base 25..26: mod_base = OTHER; note = S-phosphorothioate
  modified_base 26: mod_base = cm
  modified_base 26..27: mod_base = OTHER; note = S-phosphorothioate
  modified_base 27: mod_base = OTHER; note = 2-fluororibose uracil
  modified_base 27..28: mod_base = OTHER; note = S-phosphorothioate
  modified_base 28: mod_base = OTHER; note = deoxyribose cytosine
  modified_base 28..29: mod_base = OTHER; note = S-phosphorothioate
  modified_base 29: mod_base = OTHER; note = deoxyribose inosine
  modified_base 29..30: mod_base = OTHER; note S-N-(1,3-dimethylimidazolidin-2-ylidene)phosphoramidate
  modified_base 30: mod_base = um
  source 1..30: mol_type = other RNA

SEQ ID NO: 112 - RNA, 30 nt, synthetic construct; identical to SEQ ID NO: 86
  misc_feature 1..30: note = Synthetic: WV-42076
  misc_feature 1..30: note = Synthetic: ADR-0103975
  modified_base 1: mod_base = cm
  modified_base 1..2: mod_base = OTHER; note R-N-(1,3-dimethylimidazolidin-2-ylidene)phosphoramidate
  modified_base 2: mod_base = OTHER; note = 2-fluororibose uracil
  modified_base 2..3: mod_base = OTHER; note = S-phosphorothioate
  modified_base 3: mod_base = OTHER; note = deoxyribose cytosine
  modified_base 3..4: mod_base = OTHER; note = S-phosphorothioate
  modified_base 4: mod_base = OTHER; note = deoxyribose inosine
  modified_base 4..5: mod_base = OTHER; note S-N-(1,3-dimethylimidazolidin-2-ylidene)phosphoramidate
  modified_base 5: mod_base = um
  modified_base 5..6: mod_base = OTHER; note = S-phosphorothioate
  modified_base 6: mod_base = cm
  modified_base 6..7: mod_base = OTHER; note = S-phosphorothioate
  modified_base 7: mod_base = gm
  modified_base 7..8: mod_base = OTHER; note = S-phosphorothioate
  modified_base 8: mod_base = OTHER; note = 2-O-methylribose adenine
  modified_base 8..9: mod_base = OTHER; note = S-phosphorothioate
  modified_base 9: mod_base = um
  modified_base 9..10: mod_base = OTHER; note = S-phosphorothioate
  modified_base 10: mod_base = gm
  modified_base 10..11: mod_base = OTHER; note = S-phosphorothioate
  modified_base 11: mod_base = gm
  modified_base 11..12: mod_base = OTHER; note = S-phosphorothioate
  modified_base 12: mod_base = um
  modified_base 12..13: mod_base = OTHER; note = S-phosphorothioate
  modified_base 13: mod_base = cm
  modified_base 13..14: mod_base = OTHER; note = S-phosphorothioate
  modified_base 14: mod_base = OTHER; note = 2-O-methylribose adenine
  modified_base 14..15: mod_base = OTHER; note = S-phosphorothioate
  modified_base 15: mod_base = gm
  modified_base 15..16: mod_base = OTHER; note = S-phosphorothioate
  modified_base 16: mod_base = OTHER; note = 2-fluororibose cytosine
  modified_base 16..17: mod_base = OTHER; note = S-phosphorothioate
  modified_base 17: mod_base = OTHER; note = 2-fluororibose adenine
  modified_base 17..18: mod_base = OTHER; note = S-phosphorothioate
  modified_base 18: mod_base = OTHER; note = 2-fluororibose cytosine
  modified_base 18..19: mod_base = OTHER; note = S-phosphorothioate
  modified_base 19: mod_base = OTHER; note = 2-fluororibose adenine
  modified_base 19..20: mod_base = OTHER; note = S-phosphorothioate
  modified_base 20: mod_base = OTHER; note = 2-fluororibose guanine
  modified_base 20..21: mod_base = OTHER; note = S-phosphorothioate
  modified_base 21: mod_base = OTHER; note = 2-fluororibose cytosine
  modified_base 21..22: mod_base = OTHER; note = S-phosphorothioate
  modified_base 22: mod_base = OTHER; note = 2-fluororibose cytosine
  modified_base 22..23: mod_base = OTHER; note = S-phosphorothioate
  modified_base 23: mod_base = OTHER; note = 2-fluororibose uracil
  modified_base 23..24: mod_base = OTHER; note = S-phosphorothioate
  modified_base 24: mod_base = OTHER; note = 2-fluororibose uracil
  modified_base 24..25: mod_base = OTHER; note = S-phosphorothioate
  modified_base 25: mod_base = OTHER; note = 2-fluororibose adenine
  modified_base 25..26: mod_base = OTHER; note = S-phosphorothioate
  modified_base 26: mod_base = OTHER; note = 2-fluororibose uracil
  modified_base 26..27: mod_base = OTHER; note = S-phosphorothioate
  modified_base 27: mod_base = OTHER; note = 2-fluororibose guanine
  modified_base 27..28: mod_base = OTHER; note = S-phosphorothioate
  modified_base 28: mod_base = OTHER; note = 2-fluororibose cytosine
  modified_base 28..29: mod_base = OTHER; note = S-phosphorothioate
  modified_base 29: mod_base = OTHER; note = 2-fluororibose adenine
  modified_base 29..30: mod_base = OTHER; note R-N-(1,3-dimethylimidazolidin-2-ylidene)phosphoramidate
  modified_base 30: mod_base = OTHER; note = 2-fluororibose cytosine
  source 1..30: mol_type = other RNA

SEQ ID NO: 113 - RNA, 30 nt, synthetic construct; identical to SEQ ID NO: 87
  misc_feature 1..30: note = Synthetic: WV-42075
  misc_feature 1..30: note = Synthetic: ADR-0104357
  modified_base 1: mod_base = um
  modified_base 1..2: mod_base = OTHER; note R-N-(1,3-dimethylimidazolidin-2-ylidene)phosphoramidate
  modified_base 2: mod_base = cm
  modified_base 2..3: mod_base = OTHER; note = S-phosphorothioate
  modified_base 3: mod_base = OTHER; note = 2-fluororibose uracil
  modified_base 3..4: mod_base = OTHER; note = S-phosphorothioate
  modified_base 4: mod_base = OTHER; note = deoxyribose cytosine
  modified_base 4..5: mod_base = OTHER; note = S-phosphorothioate
  modified_base 5: mod_base = OTHER; note = deoxyribose inosine
  modified_base 5..6: mod_base = OTHER; note S-N-(1,3-dimethylimidazolidin-2-ylidene)phosphoramidate
  modified_base 6: mod_base = um
  modified_base 6..7: mod_base = OTHER; note = S-phosphorothioate
  modified_base 7: mod_base = cm
  modified_base 7..8: mod_base = OTHER; note = S-phosphorothioate
  modified_base 8: mod_base = gm
  modified_base 8..9: mod_base = OTHER; note = S-phosphorothioate
  modified_base 9: mod_base = OTHER; note = 2-O-methylribose adenine
  modified_base 9..10: mod_base = OTHER; note = S-phosphorothioate
  modified_base 10: mod_base = um
  modified_base 10..11: mod_base = OTHER; note = S-phosphorothioate
  modified_base 11: mod_base = gm
  modified_base 11..12: mod_base = OTHER; note = S-phosphorothioate
  modified_base 12: mod_base = gm
  modified_base 12..13: mod_base = OTHER; note = S-phosphorothioate
  modified_base 13: mod_base = um
  modified_base 13..14: mod_base = OTHER; note = S-phosphorothioate
  modified_base 14: mod_base = cm
  modified_base 14..15: mod_base = OTHER; note = S-phosphorothioate
  modified_base 15: mod_base = OTHER; note = 2-O-methylribose adenine
  modified_base 15..16: mod_base = OTHER; note = S-phosphorothioate
  modified_base 16: mod_base = OTHER; note = 2-fluororibose guanine
  modified_base 16..17: mod_base = OTHER; note = S-phosphorothioate
  modified_base 17: mod_base = OTHER; note = 2-fluororibose cytosine
  modified_base 17..18: mod_base = OTHER; note = S-phosphorothioate
  modified_base 18: mod_base = OTHER; note = 2-fluororibose adenine
  modified_base 18..19: mod_base = OTHER; note = S-phosphorothioate
  modified_base 19: mod_base = OTHER; note = 2-fluororibose cytosine
  modified_base 19..20: mod_base = OTHER; note = S-phosphorothioate
  modified_base 20: mod_base = OTHER; note = 2-fluororibose adenine
  modified_base 20..21: mod_base = OTHER; note = S-phosphorothioate
  modified_base 21: mod_base = OTHER; note = 2-fluororibose guanine
  modified_base 21..22: mod_base = OTHER; note = S-phosphorothioate
  modified_base 22: mod_base = OTHER; note = 2-fluororibose cytosine
  modified_base 22..23: mod_base = OTHER; note = S-phosphorothioate
  modified_base 23: mod_base = OTHER; note = 2-fluororibose cytosine
  modified_base 23..24: mod_base = OTHER; note = S-phosphorothioate
  modified_base 24: mod_base = OTHER; note = 2-fluororibose uracil
  modified_base 24..25: mod_base = OTHER; note = S-phosphorothioate
  modified_base 25: mod_base = OTHER; note = 2-fluororibose uracil
  modified_base 25..26: mod_base = OTHER; note = S-phosphorothioate
  modified_base 26: mod_base = OTHER; note = 2-fluororibose adenine
  modified_base 26..27: mod_base = OTHER; note = S-phosphorothioate
  modified_base 27: mod_base = OTHER; note = 2-fluororibose uracil
  modified_base 27..28: mod_base = OTHER; note = S-phosphorothioate
  modified_base 28: mod_base = OTHER; note = 2-fluororibose guanine
  modified_base 28..29: mod_base = OTHER; note = S-phosphorothioate
  modified_base 29: mod_base = OTHER; note = 2-fluororibose cytosine
  modified_base 29..30: mod_base = OTHER; note R-N-(1,3-dimethylimidazolidin-2-ylidene)phosphoramidate
  modified_base 30: mod_base = OTHER; note = 2-fluororibose adenine
  source 1..30: mol_type = other RNA

SEQ ID NO: 114 - RNA, 30 nt, synthetic construct; identical to SEQ ID NO: 88
  misc_feature 1..30: note = Synthetic: WV-42074
  misc_feature 1..30: note = Synthetic: ADR-0104365
  modified_base 1: mod_base = um
  modified_base 1..2: mod_base = OTHER; note R-N-(1,3-dimethylimidazolidin-2-ylidene)phosphoramidate
  modified_base 2: mod_base = um
  modified_base 2..3: mod_base = OTHER; note = S-phosphorothioate
  modified_base 3: mod_base = cm
  modified_base 3..4: mod_base = OTHER; note = S-phosphorothioate
  modified_base 4: mod_base = OTHER; note = 2-fluororibose uracil
  modified_base 4..5: mod_base = OTHER; note = S-phosphorothioate
  modified_base 5: mod_base = OTHER; note = deoxyribose cytosine
  modified_base 5..6: mod_base = OTHER; note = S-phosphorothioate
  modified_base 6: mod_base = OTHER; note = deoxyribose inosine
  modified_base 6..7: mod_base = OTHER; note S-N-(1,3-dimethylimidazolidin-2-ylidene)phosphoramidate
  modified_base 7: mod_base = um
  modified_base 7..8: mod_base = OTHER; note = S-phosphorothioate
  modified_base 8: mod_base = cm
  modified_base 8..9: mod_base = OTHER; note = S-phosphorothioate
  modified_base 9: mod_base = gm
  modified_base 9..10: mod_base = OTHER; note = S-phosphorothioate
  modified_base 10: mod_base = OTHER; note = 2-O-methylribose adenine
  modified_base 10..11: mod_base = OTHER; note = S-phosphorothioate
  modified_base 11: mod_base = um
  modified_base 11..12: mod_base = OTHER; note = S-phosphorothioate
  modified_base 12: mod_base = gm
  modified_base 12..13: mod_base = OTHER; note = S-phosphorothioate
  modified_base 13: mod_base = gm
  modified_base 13..14: mod_base = OTHER; note = S-phosphorothioate
  modified_base 14: mod_base = um
  modified_base 14..15: mod_base = OTHER; note = S-phosphorothioate
  modified_base 15: mod_base = cm
  modified_base 15..16: mod_base = OTHER; note = S-phosphorothioate
  modified_base 16: mod_base = OTHER; note = 2-fluororibose adenine
  modified_base 16..17: mod_base = OTHER; note = S-phosphorothioate
  modified_base 17: mod_base = OTHER; note = 2-fluororibose guanine
  modified_base 17..18: mod_base = OTHER; note = S-phosphorothioate
  modified_base 18: mod_base = OTHER; note = 2-fluororibose cytosine
  modified_base 18..19: mod_base = OTHER; note = S-phosphorothioate
  modified_base 19: mod_base = OTHER; note = 2-fluororibose adenine
  modified_base 19..20: mod_base = OTHER; note = S-phosphorothioate
  modified_base 20: mod_base = OTHER; note = 2-fluororibose cytosine
  modified_base 20..21: mod_base = OTHER; note = S-phosphorothioate
  modified_base 21: mod_base = OTHER; note = 2-fluororibose adenine
  modified_base 21..22: mod_base = OTHER; note = S-phosphorothioate
  modified_base 22: mod_base = OTHER; note = 2-fluororibose guanine
  modified_base 22..23: mod_base = OTHER; note = S-phosphorothioate
  modified_base 23: mod_base = OTHER; note = 2-fluororibose cytosine
  modified_base 23..24: mod_base = OTHER; note = S-phosphorothioate
  modified_base 24: mod_base = OTHER; note = 2-fluororibose cytosine
  modified_base 24..25: mod_base = OTHER; note = S-phosphorothioate
  modified_base 25: mod_base = OTHER; note = 2-fluororibose uracil
  modified_base 25..26: mod_base = OTHER; note = S-phosphorothioate
  modified_base 26: mod_base = OTHER; note = 2-fluororibose uracil
  modified_base 26..27: mod_base = OTHER; note = S-phosphorothioate
  modified_base 27: mod_base = OTHER; note = 2-fluororibose adenine
  modified_base 27..28: mod_base = OTHER; note = S-phosphorothioate
  modified_base 28: mod_base = OTHER; note = 2-fluororibose uracil
  modified_base 28..29: mod_base = OTHER; note = S-phosphorothioate
  modified_base 29: mod_base = OTHER; note = 2-fluororibose guanine
  modified_base 29..30: mod_base = OTHER; note R-N-(1,3-dimethylimidazolidin-2-ylidene)phosphoramidate
  modified_base 30: mod_base = OTHER; note = 2-fluororibose cytosine
  source 1..30: mol_type = other RNA

SEQ ID NO: 115 - RNA, 30 nt, synthetic construct; identical to SEQ ID NO: 89
  misc_feature 1..30: note = Synthetic: WV-42073
  misc_feature 1..30: note = Synthetic: ADR-0104368
  modified_base 1: mod_base = um
  modified_base 1..2: mod_base = OTHER; note R-N-(1,3-dimethylimidazolidin-2-ylidene)phosphoramidate
  modified_base 2: mod_base = um
  modified_base 2..3: mod_base = OTHER; note = S-phosphorothioate
  modified_base 3: mod_base = um
  modified_base 3..4: mod_base = OTHER; note = S-phosphorothioate
  modified_base 4: mod_base = cm
  modified_base 4..5: mod_base = OTHER; note = S-phosphorothioate
  modified_base 5: mod_base = OTHER; note = 2-fluororibose uracil
  modified_base 5..6: mod_base = OTHER; note = S-phosphorothioate
  modified_base 6: mod_base = OTHER; note = deoxyribose cytosine
  modified_base 6..7: mod_base = OTHER; note = S-phosphorothioate
  modified_base 7: mod_base = OTHER; note = deoxyribose inosine
  modified_base 7..8: mod_base = OTHER; note S-N-(1,3-dimethylimidazolidin-2-ylidene)phosphoramidate
  modified_base 8: mod_base = um
  modified_base 8..9: mod_base = OTHER; note = S-phosphorothioate
  modified_base 9: mod_base = cm
  modified_base 9..10: mod_base = OTHER; note = S-phosphorothioate
  modified_base 10: mod_base = gm
  modified_base 10..11: mod_base = OTHER; note = S-phosphorothioate
  modified_base 11: mod_base = OTHER; note = 2-O-methylribose adenine
  modified_base 11..12: mod_base = OTHER; note = S-phosphorothioate
  modified_base 12: mod_base = um
  modified_base 12..13: mod_base = OTHER; note = S-phosphorothioate
  modified_base 13: mod_base = gm
  modified_base 13..14: mod_base = OTHER; note = S-phosphorothioate
  modified_base 14: mod_base = gm
  modified_base 14..15: mod_base = OTHER; note = S-phosphorothioate
  modified_base 15: mod_base = um
  modified_base 15..16: mod_base = OTHER; note = S-phosphorothioate
  modified_base 16: mod_base = OTHER; note = 2-fluororibose cytosine
  modified_base 16..17: mod_base = OTHER; note = S-phosphorothioate
  modified_base 17: mod_base = OTHER; note = 2-fluororibose adenine
  modified_base 17..18: mod_base = OTHER; note = S-phosphorothioate
  modified_base 18: mod_base = OTHER; note = 2-fluororibose guanine
  modified_base 18..19: mod_base = OTHER; note = S-phosphorothioate
  modified_base 19: mod_base = OTHER; note = 2-fluororibose cytosine
  modified_base 19..20: mod_base = OTHER; note = S-phosphorothioate
  modified_base 20: mod_base = OTHER; note = 2-fluororibose adenine
  modified_base 20..21: mod_base = OTHER; note = S-phosphorothioate
  modified_base 21: mod_base = OTHER; note = 2-fluororibose cytosine
  modified_base 21..22: mod_base = OTHER; note = S-phosphorothioate
  modified_base 22: mod_base = OTHER; note = 2-fluororibose adenine
  modified_base 22..23: mod_base = OTHER; note = S-phosphorothioate
  modified_base 23: mod_base = OTHER; note = 2-fluororibose guanine
  modified_base 23..24: mod_base = OTHER; note = S-phosphorothioate
  modified_base 24: mod_base = OTHER; note = 2-fluororibose cytosine
  modified_base 24..25: mod_base = OTHER; note = S-phosphorothioate
  modified_base 25: mod_base = OTHER; note = 2-fluororibose cytosine
  modified_base 25..26: mod_base = OTHER; note = S-phosphorothioate
  modified_base 26: mod_base = OTHER; note = 2-fluororibose uracil
  modified_base 26..27: mod_base = OTHER; note = S-phosphorothioate
  modified_base 27: mod_base = OTHER; note = 2-fluororibose uracil
  modified_base 27..28: mod_base = OTHER; note = S-phosphorothioate
  modified_base 28: mod_base = OTHER; note = 2-fluororibose adenine
  modified_base 28..29: mod_base = OTHER; note = S-phosphorothioate
  modified_base 29: mod_base = OTHER; note = 2-fluororibose uracil
  modified_base 29..30: mod_base = OTHER; note R-N-(1,3-dimethylimidazolidin-2-ylidene)phosphoramidate
  modified_base 30: mod_base = OTHER; note = 2-fluororibose guanine
  source 1..30: mol_type = other RNA

SEQ ID NO: 116 - RNA, 30 nt, synthetic construct; identical to SEQ ID NO: 90
  misc_feature 1..30: note = Synthetic: WV-42072
  misc_feature 1..30: note = Synthetic: ADR-0104316
  modified_base 1: mod_base = cm
  modified_base 1..2: mod_base = OTHER; note R-N-(1,3-dimethylimidazolidin-2-ylidene)phosphoramidate
  modified_base 2: mod_base = um
  modified_base 2..3: mod_base = OTHER; note = S-phosphorothioate
  modified_base 3: mod_base = um
  modified_base 3..4: mod_base = OTHER; note = S-phosphorothioate
  modified_base 4: mod_base = um
  modified_base 4..5: mod_base = OTHER; note = S-phosphorothioate
  modified_base 5: mod_base = cm
  modified_base 5..6: mod_base = OTHER; note = S-phosphorothioate
  modified_base 6: mod_base = OTHER; note = 2-fluororibose uracil
  modified_base 6..7: mod_base = OTHER; note = S-phosphorothioate
  modified_base 7: mod_base = OTHER; note = deoxyribose cytosine
  modified_base 7..8: mod_base = OTHER; note = S-phosphorothioate
  modified_base 8: mod_base = OTHER; note = deoxyribose inosine
  modified_base 8..9: mod_base = OTHER; note S-N-(1,3-dimethylimidazolidin-2-ylidene)phosphoramidate
  modified_base 9: mod_base = um
  modified_base 9..10: mod_base = OTHER; note = S-phosphorothioate
  modified_base 10: mod_base = cm
  modified_base 10..11: mod_base = OTHER; note = S-phosphorothioate
  modified_base 11: mod_base = gm
  modified_base 11..12: mod_base = OTHER; note = S-phosphorothioate
  modified_base 12: mod_base = OTHER; note = 2-O-methylribose adenine
  modified_base 12..13: mod_base = OTHER; note = S-phosphorothioate
  modified_base 13: mod_base = um
  modified_base 13..14: mod_base = OTHER; note = S-phosphorothioate
  modified_base 14: mod_base = gm
  modified_base 14..15: mod_base = OTHER; note = S-phosphorothioate
  modified_base 15: mod_base = gm
  modified_base 15..16: mod_base = OTHER; note = S-phosphorothioate
  modified_base 16: mod_base = OTHER; note = 2-fluororibose uracil
  modified_base 16..17: mod_base = OTHER; note = S-phosphorothioate
  modified_base 17: mod_base = OTHER; note = 2-fluororibose cytosine
  modified_base 17..18: mod_base = OTHER; note = S-phosphorothioate
  modified_base 18: mod_base = OTHER; note = 2-fluororibose adenine
  modified_base 18..19: mod_base = OTHER; note = S-phosphorothioate
  modified_base 19: mod_base = OTHER; note = 2-fluororibose guanine
  modified_base 19..20: mod_base = OTHER; note = S-phosphorothioate
  modified_base 20: mod_base = OTHER; note = 2-fluororibose cytosine
  modified_base 20..21: mod_base = OTHER; note = S-phosphorothioate
  modified_base 21: mod_base = OTHER; note = 2-fluororibose adenine
  modified_base 21..22: mod_base = OTHER; note = S-phosphorothioate
  modified_base 22: mod_base = OTHER; note = 2-fluororibose cytosine
  modified_base 22..23: mod_base = OTHER; note = S-phosphorothioate
  modified_base 23: mod_base = OTHER; note = 2-fluororibose adenine
  modified_base 23..24: mod_base = OTHER; note = S-phosphorothioate
  modified_base 24: mod_base = OTHER; note = 2-fluororibose guanine
  modified_base 24..25: mod_base = OTHER; note = S-phosphorothioate
  modified_base 25: mod_base = OTHER; note = 2-fluororibose cytosine
  modified_base 25..26: mod_base = OTHER; note = S-phosphorothioate
  modified_base 26: mod_base = OTHER; note = 2-fluororibose cytosine
  modified_base 26..27: mod_base = OTHER; note = S-phosphorothioate
  modified_base 27: mod_base = OTHER; note = 2-fluororibose uracil
  modified_base 27..28: mod_base = OTHER; note = S-phosphorothioate
  modified_base 28: mod_base = OTHER; note = 2-fluororibose uracil
  modified_base 28..29: mod_base = OTHER; note = S-phosphorothioate
  modified_base 29: mod_base = OTHER; note = 2-fluororibose adenine
  modified_base 29..30: mod_base = OTHER; note R-N-(1,3-dimethylimidazolidin-2-ylidene)phosphoramidate
  modified_base 30: mod_base = OTHER; note = 2-fluororibose uracil
  source 1..30: mol_type = other RNA

SEQ ID NO: 117 - RNA, 30 nt, synthetic construct; identical to SEQ ID NO: 91
  misc_feature 1..30: note = Synthetic: WV-42071
  misc_feature 1..30: note = Synthetic: ADR-0104312
  modified_base 1: mod_base = cm
  modified_base 1..2: mod_base = OTHER; note R-N-(1,3-dimethylimidazolidin-2-ylidene)phosphoramidate
  modified_base 2: mod_base = cm
  modified_base 2..3: mod_base = OTHER; note = S-phosphorothioate
  modified_base 3: mod_base = um
  modified_base 3..4: mod_base = OTHER; note = S-phosphorothioate
  modified_base 4: mod_base = um
  modified_base 4..5: mod_base = OTHER; note = S-phosphorothioate
  modified_base 5: mod_base = um
  modified_base 5..6: mod_base = OTHER; note = S-phosphorothioate
  modified_base 6: mod_base = cm
  modified_base 6..7: mod_base = OTHER; note = S-phosphorothioate
  modified_base 7: mod_base = OTHER; note = 2-fluororibose uracil
  modified_base 7..8: mod_base = OTHER; note = S-phosphorothioate
  modified_base 8: mod_base = OTHER; note = deoxyribose cytosine
  modified_base 8..9: mod_base = OTHER; note = S-phosphorothioate
  modified_base 9: mod_base = OTHER; note = deoxyribose inosine
  modified_base 9..10: mod_base = OTHER; note S-N-(1,3-dimethylimidazolidin-2-ylidene)phosphoramidate
  modified_base 10: mod_base = um
  modified_base 10..11: mod_base = OTHER; note = S-phosphorothioate
  modified_base 11: mod_base = cm
  modified_base 11..12: mod_base = OTHER; note = S-phosphorothioate
  modified_base 12: mod_base = gm
  modified_base 12..13: mod_base = OTHER; note = S-phosphorothioate
  modified_base 13: mod_base = OTHER; note = 2-O-methylribose adenine
  modified_base 13..14: mod_base = OTHER; note = S-phosphorothioate
  modified_base 14: mod_base = um
  modified_base 14..15: mod_base = OTHER; note = S-phosphorothioate
  modified_base 15: mod_base = gm
  modified_base 15..16: mod_base = OTHER; note = S-phosphorothioate
  modified_base 16: mod_base = OTHER; note = 2-fluororibose guanine
  modified_base 16..17: mod_base = OTHER; note = S-phosphorothioate
  modified_base 17: mod_base = OTHER; note = 2-fluororibose uracil
  modified_base 17..18: mod_base = OTHER; note = S-phosphorothioate
  modified_base 18: mod_base = OTHER; note = 2-fluororibose cytosine
  modified_base 18..19: mod_base = OTHER; note = S-phosphorothioate
  modified_base 19: mod_base = OTHER; note = 2-fluororibose adenine
  modified_base 19..20: mod_base = OTHER; note = S-phosphorothioate
  modified_base 20: mod_base = OTHER; note = 2-fluororibose guanine
  modified_base 20..21: mod_base = OTHER; note = S-phosphorothioate
  modified_base 21: mod_base = OTHER; note = 2-fluororibose cytosine
  modified_base 21..22: mod_base = OTHER; note = S-phosphorothioate
  modified_base 22: mod_base = OTHER; note = 2-fluororibose adenine
  modified_base 22..23: mod_base = OTHER; note = S-phosphorothioate
  modified_base 23: mod_base = OTHER; note = 2-fluororibose cytosine
  modified_base 23..24: mod_base = OTHER; note = S-phosphorothioate
  modified_base 24: mod_base = OTHER; note = 2-fluororibose adenine
  modified_base 24..25: mod_base = OTHER; note = S-phosphorothioate
  modified_base 25: mod_base = OTHER; note = 2-fluororibose guanine
  modified_base 25..26: mod_base = OTHER; note = S-phosphorothioate
  modified_base 26: mod_base = OTHER; note = 2-fluororibose cytosine
  modified_base 26..27: mod_base = OTHER; note = S-phosphorothioate
  modified_base 27: mod_base = OTHER; note = 2-fluororibose cytosine
  modified_base 27..28: mod_base = OTHER; note = S-phosphorothioate
  modified_base 28: mod_base = OTHER; note = 2-fluororibose uracil
  modified_base 28..29: mod_base = OTHER; note = S-phosphorothioate
  modified_base 29: mod_base = OTHER; note = 2-fluororibose uracil
  modified_base 29..30: mod_base = OTHER; note R-N-(1,3-dimethylimidazolidin-2-ylidene)phosphoramidate
  modified_base 30: mod_base = OTHER; note = 2-fluororibose adenine
  source 1..30: mol_type = other RNA

SEQ ID NO: 118 - RNA, 30 nt, synthetic construct; identical to SEQ ID NO: 92
  misc_feature 1..30: note = Synthetic: WV-42070
  misc_feature 1..30: note = Synthetic: ADR-0104308
  modified_base 1: mod_base = cm
  modified_base 1..2: mod_base = OTHER; note R-N-(1,3-dimethylimidazolidin-2-ylidene)phosphoramidate
  modified_base 2: mod_base = cm
  modified_base 2..3: mod_base = OTHER; note = S-phosphorothioate
  modified_base 3: mod_base = cm
  modified_base 3..4: mod_base = OTHER; note = S-phosphorothioate
  modified_base 4: mod_base = um
  modified_base 4..5: mod_base = OTHER; note = S-phosphorothioate
  modified_base 5: mod_base = um
  modified_base 5..6: mod_base = OTHER; note = S-phosphorothioate
  modified_base 6: mod_base = um
  modified_base 6..7: mod_base = OTHER; note = S-phosphorothioate
  modified_base 7: mod_base = cm
  modified_base 7..8: mod_base = OTHER; note = S-phosphorothioate
  modified_base 8: mod_base = OTHER; note = 2-fluororibose uracil
  modified_base 8..9: mod_base = OTHER; note = S-phosphorothioate
  modified_base 9: mod_base = OTHER; note = deoxyribose cytosine
  modified_base 9..10: mod_base = OTHER; note = S-phosphorothioate
  modified_base 10: mod_base = OTHER; note = deoxyribose inosine
  modified_base 10..11: mod_base = OTHER; note S-N-(1,3-dimethylimidazolidin-2-ylidene)phosphoramidate
  modified_base 11: mod_base = um
  modified_base 11..12: mod_base = OTHER; note = S-phosphorothioate
  modified_base 12: mod_base = cm
  modified_base 12..13: mod_base = OTHER; note = S-phosphorothioate
  modified_base 13: mod_base = gm
  modified_base 13..14: mod_base = OTHER; note = S-phosphorothioate
  modified_base 14: mod_base = OTHER; note = 2-O-methylribose adenine
  modified_base 14..15: mod_base = OTHER; note = S-phosphorothioate
  modified_base 15: mod_base = um
  modified_base 15..16: mod_base = OTHER; note = S-phosphorothioate
  modified_base 16: mod_base = OTHER; note = 2-fluororibose guanine
  modified_base 16..17: mod_base = OTHER; note = S-phosphorothioate
  modified_base 17: mod_base = OTHER; note = 2-fluororibose guanine
  modified_base 17..18: mod_base = OTHER; note = S-phosphorothioate
  modified_base 18: mod_base = OTHER; note = 2-fluororibose uracil
  modified_base 18..19: mod_base = OTHER; note = S-phosphorothioate
  modified_base 19: mod_base = OTHER; note = 2-fluororibose cytosine
  modified_base 19..20: mod_base = OTHER; note = S-phosphorothioate
  modified_base 20: mod_base = OTHER; note = 2-fluororibose adenine
  modified_base 20..21: mod_base = OTHER; note = S-phosphorothioate
  modified_base 21: mod_base = OTHER; note = 2-fluororibose guanine
  modified_base 21..22: mod_base = OTHER; note = S-phosphorothioate
  modified_base 22: mod_base = OTHER; note = 2-fluororibose cytosine
  modified_base 22..23: mod_base = OTHER; note = S-phosphorothioate
  modified_base 23: mod_base = OTHER; note = 2-fluororibose adenine
  modified_base 23..24: mod_base = OTHER; note = S-phosphorothioate
  modified_base 24: mod_base = OTHER; note = 2-fluororibose cytosine
  modified_base 24..25: mod_base = OTHER; note = S-phosphorothioate
  modified_base 25: mod_base = OTHER; note = 2-fluororibose adenine
  modified_base 25..26: mod_base = OTHER; note = S-phosphorothioate
  modified_base 26: mod_base = OTHER; note = 2-fluororibose guanine
  modified_base 26..27: mod_base = OTHER; note = S-phosphorothioate
  modified_base 27: mod_base = OTHER; note = 2-fluororibose cytosine
  modified_base 27..28: mod_base = OTHER; note = S-phosphorothioate
  modified_base 28: mod_base = OTHER; note = 2-fluororibose cytosine
  modified_base 28..29: mod_base = OTHER; note = S-phosphorothioate
  modified_base 29: mod_base = OTHER; note = 2-fluororibose uracil
  modified_base 29..30: mod_base = OTHER; note R-N-(1,3-dimethylimidazolidin-2-ylidene)phosphoramidate
  modified_base 30: mod_base = OTHER; note = 2-fluororibose uracil
  source 1..30: mol_type = other RNA

SEQ ID NO: 119 - RNA, 30 nt, synthetic construct; identical to SEQ ID NO: 93
  misc_feature 1..30: note = Synthetic: WV-42069
  misc_feature 1..30: note = Synthetic: ADR-0104362
  modified_base 1: mod_base = um
  modified_base 1..2: mod_base = OTHER; note R-N-(1,3-dimethylimidazolidin-2-ylidene)phosphoramidate
  modified_base 2: mod_base = cm
  modified_base 2..3: mod_base = OTHER; note = S-phosphorothioate
  modified_base 3: mod_base = cm
  modified_base 3..4: mod_base = OTHER; note = S-phosphorothioate
  modified_base 4: mod_base = cm
  modified_base 4..5: mod_base = OTHER; note = S-phosphorothioate
  modified_base 5: mod_base = um
  modified_base 5..6: mod_base = OTHER; note = S-phosphorothioate
  modified_base 6: mod_base = um
  modified_base 6..7: mod_base = OTHER; note = S-phosphorothioate
  modified_base 7: mod_base = um
  modified_base 7..8: mod_base = OTHER; note = S-phosphorothioate
  modified_base 8: mod_base = cm
  modified_base 8..9: mod_base = OTHER; note = S-phosphorothioate
  modified_base 9: mod_base = OTHER; note = 2-fluororibose uracil
  modified_base 9..10: mod_base = OTHER; note = S-phosphorothioate
  modified_base 10: mod_base = OTHER; note = deoxyribose cytosine
  modified_base 10..11: mod_base = OTHER; note = S-phosphorothioate
  modified_base 11: mod_base = OTHER; note = deoxyribose inosine
  modified_base 11..12: mod_base = OTHER; note S-N-(1,3-dimethylimidazolidin-2-ylidene)phosphoramidate
  modified_base 12: mod_base = um
  modified_base 12..13: mod_base = OTHER; note = S-phosphorothioate
  modified_base 13: mod_base = cm
  modified_base 13..14: mod_base = OTHER; note = S-phosphorothioate
  modified_base 14: mod_base = gm
  modified_base 14..15: mod_base = OTHER; note = S-phosphorothioate
  modified_base 15: mod_base = OTHER; note = 2-O-methylribose adenine
  modified_base 15..16: mod_base = OTHER; note = S-phosphorothioate
  modified_base 16: mod_base = OTHER; note = 2-fluororibose uracil
  modified_base 16..17: mod_base = OTHER; note = S-phosphorothioate
  modified_base 17: mod_base = OTHER; note = 2-fluororibose guanine
  modified_base 17..18: mod_base = OTHER; note = S-phosphorothioate
  modified_base 18: mod_base = OTHER; note = 2-fluororibose guanine
  modified_base 18..19: mod_base = OTHER; note = S-phosphorothioate
  modified_base 19: mod_base = OTHER; note = 2-fluororibose uracil
  modified_base 19..20: mod_base = OTHER; note = S-phosphorothioate
  modified_base 20: mod_base = OTHER; note = 2-fluororibose cytosine
  modified_base 20..21: mod_base = OTHER; note = S-phosphorothioate
  modified_base 21: mod_base = OTHER; note = 2-fluororibose adenine
  modified_base 21..22: mod_base = OTHER; note = S-phosphorothioate
  modified_base 22: mod_base = OTHER; note = 2-fluororibose guanine
  modified_base 22..23: mod_base = OTHER; note = S-phosphorothioate
  modified_base 23: mod_base = OTHER; note = 2-fluororibose cytosine
  modified_base 23..24: mod_base = OTHER; note = S-phosphorothioate
  modified_base 24: mod_base = OTHER; note = 2-fluororibose adenine
  modified_base 24..25: mod_base = OTHER; note = S-phosphorothioate
  modified_base 25: mod_base = OTHER; note = 2-fluororibose cytosine
  modified_base 25..26: mod_base = OTHER; note = S-phosphorothioate
  modified_base 26: mod_base = OTHER; note = 2-fluororibose adenine
  modified_base 26..27: mod_base = OTHER; note = S-phosphorothioate
  modified_base 27: mod_base = OTHER; note = 2-fluororibose guanine
  modified_base 27..28: mod_base = OTHER; note = S-phosphorothioate
  modified_base 28: mod_base = OTHER; note = 2-fluororibose cytosine
  modified_base 28..29: mod_base = OTHER; note = S-phosphorothioate
  modified_base 29: mod_base = OTHER; note = 2-fluororibose cytosine
  modified_base 29..30: mod_base = OTHER; note R-N-(1,3-dimethylimidazolidin-2-ylidene)phosphoramidate
  modified_base 30: mod_base = OTHER; note = 2-fluororibose uracil
  source 1..30: mol_type = other RNA

SEQ ID NO: 120 - RNA, 30 nt, synthetic construct; identical to SEQ ID NO: 94
  misc_feature 1..30: note = Synthetic: WV-42068
  misc_feature 1..30: note = Synthetic: ADR-0104340
  modified_base 1: mod_base = gm
  modified_base 1..2: mod_base = OTHER; note R-N-(1,3-dimethylimidazolidin-2-ylidene)phosphoramidate
  modified_base 2: mod_base = um
  modified_base 2..3: mod_base = OTHER; note = S-phosphorothioate
  modified_base 3: mod_base = cm
  modified_base 3..4: mod_base = OTHER; note = S-phosphorothioate
  modified_base 4: mod_base = cm
  modified_base 4..5: mod_base = OTHER; note = S-phosphorothioate
  modified_base 5: mod_base = cm
  modified_base 5..6: mod_base = OTHER; note = S-phosphorothioate
  modified_base 6: mod_base = um
  modified_base 6..7: mod_base = OTHER; note = S-phosphorothioate
  modified_base 7: mod_base = um
  modified_base 7..8: mod_base = OTHER; note = S-phosphorothioate
  modified_base 8: mod_base = um
  modified_base 8..9: mod_base = OTHER; note = S-phosphorothioate
  modified_base 9: mod_base = cm
  modified_base 9..10: mod_base = OTHER; note = S-phosphorothioate
  modified_base 10: mod_base = OTHER; note = 2-fluororibose uracil
  modified_base 10..11: mod_base = OTHER; note = S-phosphorothioate
  modified_base 11: mod_base = OTHER; note = deoxyribose cytosine
  modified_base 11..12: mod_base = OTHER; note = S-phosphorothioate
  modified_base 12: mod_base = OTHER; note = deoxyribose inosine
  modified_base 12..13: mod_base = OTHER; note S-N-(1,3-dimethylimidazolidin-2-ylidene)phosphoramidate
  modified_base 13: mod_base = um
  modified_base 13..14: mod_base = OTHER; note = S-phosphorothioate
  modified_base 14: mod_base = cm
  modified_base 14..15: mod_base = OTHER; note = S-phosphorothioate
  modified_base 15: mod_base = gm
  modified_base 15..16: mod_base = OTHER; note = S-phosphorothioate
  modified_base 16: mod_base = OTHER; note = 2-fluororibose adenine
  modified_base 16..17: mod_base = OTHER; note = S-phosphorothioate
  modified_base 17: mod_base = OTHER; note = 2-fluororibose uracil
  modified_base 17..18: mod_base = OTHER; note = S-phosphorothioate
  modified_base 18: mod_base = OTHER; note = 2-fluororibose guanine
  modified_base 18..19: mod_base = OTHER; note = S-phosphorothioate
  modified_base 19: mod_base = OTHER; note = 2-fluororibose guanine
  modified_base 19..20: mod_base = OTHER; note = S-phosphorothioate
  modified_base 20: mod_base = OTHER; note = 2-fluororibose uracil
  modified_base 20..21: mod_base = OTHER; note = S-phosphorothioate
  modified_base 21: mod_base = OTHER; note = 2-fluororibose cytosine
  modified_base 21..22: mod_base = OTHER; note = S-phosphorothioate
  modified_base 22: mod_base = OTHER; note = 2-fluororibose adenine
  modified_base 22..23: mod_base = OTHER; note = S-phosphorothioate
  modified_base 23: mod_base = OTHER; note = 2-fluororibose guanine
  modified_base 23..24: mod_base = OTHER; note = S-phosphorothioate
  modified_base 24: mod_base = OTHER; note = 2-fluororibose cytosine
  modified_base 24..25: mod_base = OTHER; note = S-phosphorothioate
  modified_base 25: mod_base = OTHER; note = 2-fluororibose adenine
  modified_base 25..26: mod_base = OTHER; note = S-phosphorothioate
  modified_base 26: mod_base = OTHER; note = 2-fluororibose cytosine
  modified_base 26..27: mod_base = OTHER; note = S-phosphorothioate
  modified_base 27: mod_base = OTHER; note = 2-fluororibose adenine
  modified_base 27..28: mod_base = OTHER; note = S-phosphorothioate
  modified_base 28: mod_base = OTHER; note = 2-fluororibose guanine
  modified_base 28..29: mod_base = OTHER; note = S-phosphorothioate
  modified_base 29: mod_base = OTHER; note = 2-fluororibose cytosine
  modified_base 29..30: mod_base = OTHER; note R-N-(1,3-dimethylimidazolidin-2-ylidene)phosphoramidate
  modified_base 30: mod_base = OTHER; note = 2-fluororibose cytosine
  source 1..30: mol_type = other RNA

SEQ ID NO: 121 - RNA, 30 nt, synthetic construct; identical to SEQ ID NO: 95
  misc_feature 1..30: note = Synthetic: WV-42067
  misc_feature 1..30: note = Synthetic: ADR-0103970
  modified_base 1: mod_base = OTHER; note = 2-O-methylribose adenine
  modified_base 1..2: mod_base = OTHER; note R-N-(1,3-dimethylimidazolidin-2-ylidene)phosphoramidate
  modified_base 2: mod_base = gm
  modified_base 2..3: mod_base = OTHER; note = S-phosphorothioate
  modified_base 3: mod_base = um
  modified_base 3..4: mod_base = OTHER; note = S-phosphorothioate
  modified_base 4: mod_base = cm
  modified_base 4..5: mod_base = OTHER; note = S-phosphorothioate
  modified_base 5: mod_base = cm
  modified_base 5..6: mod_base = OTHER; note = S-phosphorothioate
  modified_base 6: mod_base = cm
  modified_base 6..7: mod_base = OTHER; note = S-phosphorothioate
  modified_base 7: mod_base = um
  modified_base 7..8: mod_base = OTHER; note = S-phosphorothioate
  modified_base 8: mod_base = um
  modified_base 8..9: mod_base = OTHER; note = S-phosphorothioate
  modified_base 9: mod_base = um
  modified_base 9..10: mod_base = OTHER; note = S-phosphorothioate
  modified_base 10: mod_base = cm
  modified_base 10..11: mod_base = OTHER; note = S-phosphorothioate
  modified_base 11: mod_base = OTHER; note = 2-fluororibose uracil
  modified_base 11..12: mod_base = OTHER; note = S-phosphorothioate
  modified_base 12: mod_base = OTHER; note = deoxyribose cytosine
  modified_base 12..13: mod_base = OTHER; note = S-phosphorothioate
  modified_base 13: mod_base = OTHER; note = deoxyribose inosine
  modified_base 13..14: mod_base = OTHER; note S-N-(1,3-dimethylimidazolidin-2-ylidene)phosphoramidate
  modified_base 14: mod_base = um
  modified_base 14..15: mod_base = OTHER; note = S-phosphorothioate
  modified_base 15: mod_base = cm
  modified_base 15..16: mod_base = OTHER; note = S-phosphorothioate
  modified_base 16: mod_base = OTHER; note = 2-fluororibose guanine
  modified_base 16..17: mod_base = OTHER; note = S-phosphorothioate
  modified_base 17: mod_base = OTHER; note = 2-fluororibose adenine
  modified_base 17..18: mod_base = OTHER; note = S-phosphorothioate
  modified_base 18: mod_base = OTHER; note = 2-fluororibose uracil
  modified_base 18..19: mod_base = OTHER; note = S-phosphorothioate
  modified_base 19: mod_base = OTHER; note = 2-fluororibose guanine
  modified_base 19..20: mod_base = OTHER; note = S-phosphorothioate
  modified_base 20: mod_base = OTHER; note = 2-fluororibose guanine
  modified_base 20..21: mod_base = OTHER; note = S-phosphorothioate
  modified_base 21: mod_base = OTHER; note = 2-fluororibose uracil
  modified_base 21..22: mod_base = OTHER; note = S-phosphorothioate
  modified_base 22: mod_base = OTHER; note = 2-fluororibose cytosine
  modified_base 22..23: mod_base = OTHER; note = S-phosphorothioate
  modified_base 23: mod_base = OTHER; note = 2-fluororibose adenine
  modified_base 23..24: mod_base = OTHER; note = S-phosphorothioate
  modified_base 24: mod_base = OTHER; note = 2-fluororibose guanine
  modified_base 24..25: mod_base = OTHER; note = S-phosphorothioate
  modified_base 25: mod_base = OTHER; note = 2-fluororibose cytosine
  modified_base 25..26: mod_base = OTHER; note = S-phosphorothioate
  modified_base 26: mod_base = OTHER; note = 2-fluororibose adenine
  modified_base 26..27: mod_base = OTHER; note = S-phosphorothioate
  modified_base 27: mod_base = OTHER; note = 2-fluororibose cytosine
  modified_base 27..28: mod_base = OTHER; note = S-phosphorothioate
  modified_base 28: mod_base = OTHER; note = 2-fluororibose adenine
  modified_base 28..29: mod_base = OTHER; note = S-phosphorothioate
  modified_base 29: mod_base = OTHER; note = 2-fluororibose guanine
  modified_base 29..30: mod_base = OTHER; note R-N-(1,3-dimethylimidazolidin-2-ylidene)phosphoramidate
  modified_base 30: mod_base = OTHER; note = 2-fluororibose cytosine
  source 1..30: mol_type = other RNA

SEQ ID NO: 122 - RNA, 30 nt, synthetic construct; identical to SEQ ID NO: 97
  misc_feature 1..30: note = Synthetic: WV-42065
  misc_feature 1..30: note = Synthetic: ADR-0104359
  modified_base 1: mod_base = um
  modified_base 1..2: mod_base = OTHER; note R-N-(1,3-dimethylimidazolidin-2-ylidene)phosphoramidate
  modified_base 2: mod_base = cm
  modified_base 2..3: mod_base = OTHER; note = S-phosphorothioate
  modified_base 3: mod_base = OTHER; note = 2-O-methylribose adenine
  modified_base 3..4: mod_base = OTHER; note = S-phosphorothioate
  modified_base 4: mod_base = gm
  modified_base 4..5: mod_base = OTHER; note = S-phosphorothioate
  modified_base 5: mod_base = um
  modified_base 5..6: mod_base = OTHER; note = S-phosphorothioate
  modified_base 6: mod_base = cm
  modified_base 6..7: mod_base = OTHER; note = S-phosphorothioate
  modified_base 7: mod_base = cm
  modified_base 7..8: mod_base = OTHER; note = S-phosphorothioate
  modified_base 8: mod_base = cm
  modified_base 8..9: mod_base = OTHER; note = S-phosphorothioate
  modified_base 9: mod_base = um
  modified_base 9..10: mod_base = OTHER; note = S-phosphorothioate
  modified_base 10: mod_base = um
  modified_base 10..11: mod_base = OTHER; note = S-phosphorothioate
  modified_base 11: mod_base = um
  modified_base 11..12: mod_base = OTHER; note = S-phosphorothioate
  modified_base 12: mod_base = cm
  modified_base 12..13: mod_base = OTHER; note = S-phosphorothioate
  modified_base 13: mod_base = OTHER; note = 2-fluororibose uracil
  modified_base 13..14: mod_base = OTHER; note = S-phosphorothioate
  modified_base 14: mod_base = OTHER; note = deoxyribose cytosine
  modified_base 14..15: mod_base = OTHER; note = S-phosphorothioate
  modified_base 15: mod_base = OTHER; note = deoxyribose inosine
  modified_base 15..16: mod_base = OTHER; note S-N-(1,3-dimethylimidazolidin-2-ylidene)phosphoramidate
  modified_base 16: mod_base = OTHER; note = 2-fluororibose uracil
  modified_base 16..17: mod_base = OTHER; note = S-phosphorothioate
  modified_base 17: mod_base = OTHER; note = 2-fluororibose cytosine
  modified_base 17..18: mod_base = OTHER; note = S-phosphorothioate
  modified_base 18: mod_base = OTHER; note = 2-fluororibose guanine
  modified_base 18..19: mod_base = OTHER; note = S-phosphorothioate
  modified_base 19: mod_base = OTHER; note = 2-fluororibose adenine
  modified_base 19..20: mod_base = OTHER; note = S-phosphorothioate
  modified_base 20: mod_base = OTHER; note = 2-fluororibose uracil
  modified_base 20..21: mod_base = OTHER; note = S-phosphorothioate
  modified_base 21: mod_base = OTHER; note = 2-fluororibose guanine
  modified_base 21..22: mod_base = OTHER; note = S-phosphorothioate
  modified_base 22: mod_base = OTHER; note = 2-fluororibose guanine
  modified_base 22..23: mod_base = OTHER; note = S-phosphorothioate
  modified_base 23: mod_base = OTHER; note = 2-fluororibose uracil
  modified_base 23..24: mod_base = OTHER; note = S-phosphorothioate
  modified_base 24: mod_base = OTHER; note = 2-fluororibose cytosine
  modified_base 24..25: mod_base = OTHER; note = S-phosphorothioate
  modified_base 25: mod_base = OTHER; note = 2-fluororibose adenine
  modified_base 25..26: mod_base = OTHER; note = S-phosphorothioate
  modified_base 26: mod_base = OTHER; note = 2-fluororibose guanine
  modified_base 26..27: mod_base = OTHER; note = S-phosphorothioate
  modified_base 27: mod_base = OTHER; note = 2-fluororibose cytosine
  modified_base 27..28: mod_base = OTHER; note = S-phosphorothioate
  modified_base 28: mod_base = OTHER; note = 2-fluororibose adenine
  modified_base 28..29: mod_base = OTHER; note = S-phosphorothioate
  modified_base 29: mod_base = OTHER; note = 2-fluororibose cytosine
  modified_base 29..30: mod_base = OTHER; note R-N-(1,3-dimethylimidazolidin-2-ylidene)phosphoramidate
  modified_base 30: mod_base = OTHER; note = 2-fluororibose adenine
  source 1..30: mol_type = other RNA

SEQ ID NO: 123 - RNA, 30 nt, synthetic construct; identical to SEQ ID NO: 98
  misc_feature 1..30: note = Synthetic: WV-42064
  misc_feature 1..30: note = Synthetic: ADR-0104367
  modified_base 1: mod_base = um
  modified_base 1..2: mod_base = OTHER; note R-N-(1,3-dimethylimidazolidin-2-ylidene)phosphoramidate
  modified_base 2: mod_base = um
  modified_base 2..3: mod_base = OTHER; note = S-phosphorothioate
  modified_base 3: mod_base = cm
  modified_base 3..4: mod_base = OTHER; note = S-phosphorothioate
  modified_base 4: mod_base = OTHER; note = 2-O-methylribose adenine
  modified_base 4..5: mod_base = OTHER; note = S-phosphorothioate
  modified_base 5: mod_base = gm
  modified_base 5..6: mod_base = OTHER; note = S-phosphorothioate
  modified_base 6: mod_base = um
  modified_base 6..7: mod_base = OTHER; note = S-phosphorothioate
  modified_base 7: mod_base = cm
  modified_base 7..8: mod_base = OTHER; note = S-phosphorothioate
  modified_base 8: mod_base = cm
  modified_base 8..9: mod_base = OTHER; note = S-phosphorothioate
  modified_base 9: mod_base = cm
  modified_base 9..10: mod_base = OTHER; note = S-phosphorothioate
  modified_base 10: mod_base = um
  modified_base 10..11: mod_base = OTHER; note = S-phosphorothioate
  modified_base 11: mod_base = um
  modified_base 11..12: mod_base = OTHER; note = S-phosphorothioate
  modified_base 12: mod_base = um
  modified_base 12..13: mod_base = OTHER; note = S-phosphorothioate
  modified_base 13: mod_base = cm
  modified_base 13..14: mod_base = OTHER; note = S-phosphorothioate
  modified_base 14: mod_base = OTHER; note = 2-fluororibose uracil
  modified_base 14..15: mod_base = OTHER; note = S-phosphorothioate
  modified_base 15: mod_base = OTHER; note = deoxyribose cytosine
  modified_base 15..16: mod_base = OTHER; note = S-phosphorothioate
  modified_base 16: mod_base = OTHER; note = deoxyribose inosine
  modified_base 16..17: mod_base = OTHER; note S-N-(1,3-dimethylimidazolidin-2-ylidene)phosphoramidate
  modified_base 17: mod_base = OTHER; note = 2-fluororibose uracil
  modified_base 17..18: mod_base = OTHER; note = S-phosphorothioate
  modified_base 18: mod_base = OTHER; note = 2-fluororibose cytosine
  modified_base 18..19: mod_base = OTHER; note = S-phosphorothioate
  modified_base 19: mod_base = OTHER; note = 2-fluororibose guanine
  modified_base 19..20: mod_base = OTHER; note = S-phosphorothioate
  modified_base 20: mod_base = OTHER; note = 2-fluororibose adenine
  modified_base 20..21: mod_base = OTHER; note = S-phosphorothioate
  modified_base 21: mod_base = OTHER; note = 2-fluororibose uracil
  modified_base 21..22: mod_base = OTHER; note = S-phosphorothioate
  modified_base 22: mod_base = OTHER; note = 2-fluororibose guanine
  modified_base 22..23: mod_base = OTHER; note = S-phosphorothioate
  modified_base 23: mod_base = OTHER; note = 2-fluororibose guanine
  modified_base 23..24: mod_base = OTHER; note = S-phosphorothioate
  modified_base 24: mod_base = OTHER; note = 2-fluororibose uracil
  modified_base 24..25: mod_base = OTHER; note = S-phosphorothioate
  modified_base 25: mod_base = OTHER; note = 2-fluororibose cytosine
  modified_base 25..26: mod_base = OTHER; note = S-phosphorothioate
  modified_base 26: mod_base = OTHER; note = 2-fluororibose adenine
  modified_base 26..27: mod_base = OTHER; note = S-phosphorothioate
  modified_base 27: mod_base = OTHER; note = 2-fluororibose guanine
  modified_base 27..28: mod_base = OTHER; note = S-phosphorothioate
  modified_base 28: mod_base = OTHER; note = 2-fluororibose cytosine
  modified_base 28..29: mod_base = OTHER; note = S-phosphorothioate
  modified_base 29: mod_base = OTHER; note = 2-fluororibose adenine
  modified_base 29..30: mod_base = OTHER; note R-N-(1,3-dimethylimidazolidin-2-ylidene)phosphoramidate
  modified_base 30: mod_base = OTHER; note = 2-fluororibose cytosine
  source 1..30: mol_type = other RNA

SEQ ID NO: 124 - RNA, 30 nt, synthetic construct; identical to SEQ ID NO: 99
  misc_feature 1..30: note = Synthetic: WV-42063
  misc_feature 1..30: note = Synthetic: ADR-0104315
  modified_base 1: mod_base = cm
  modified_base 1..2: mod_base = OTHER; note R-N-(1,3-dimethylimidazolidin-2-ylidene)phosphoramidate
  modified_base 2: mod_base = um
  modified_base 2..3: mod_base = OTHER; note = S-phosphorothioate
  modified_base 3: mod_base = um
  modified_base 3..4: mod_base = OTHER; note = S-phosphorothioate
  modified_base 4: mod_base = cm
  modified_base 4..5: mod_base = OTHER; note = S-phosphorothioate
  modified_base 5: mod_base = OTHER; note = 2-O-methylribose adenine
  modified_base 5..6: mod_base = OTHER; note = S-phosphorothioate
  modified_base 6: mod_base = gm
  modified_base 6..7: mod_base = OTHER; note = S-phosphorothioate
  modified_base 7: mod_base = um
  modified_base 7..8: mod_base = OTHER; note = S-phosphorothioate
  modified_base 8: mod_base = cm
  modified_base 8..9: mod_base = OTHER; note = S-phosphorothioate
  modified_base 9: mod_base = cm
  modified_base 9..10: mod_base = OTHER; note = S-phosphorothioate
  modified_base 10: mod_base = cm
  modified_base 10..11: mod_base = OTHER; note = S-phosphorothioate
  modified_base 11: mod_base = um
  modified_base 11..12: mod_base = OTHER; note = S-phosphorothioate
  modified_base 12: mod_base = um
  modified_base 12..13: mod_base = OTHER; note = S-phosphorothioate
  modified_base 13: mod_base = um
  modified_base 13..14: mod_base = OTHER; note = S-phosphorothioate
  modified_base 14: mod_base = cm
  modified_base 14..15: mod_base = OTHER; note = S-phosphorothioate
  modified_base 15: mod_base = OTHER; note = 2-fluororibose uracil
  modified_base 15..16: mod_base = OTHER; note = S-phosphorothioate
  modified_base 16: mod_base = OTHER; note = deoxyribose cytosine
  modified_base 16..17: mod_base = OTHER; note = S-phosphorothioate
  modified_base 17: mod_base = OTHER; note = deoxyribose inosine
  modified_base 17..18: mod_base = OTHER; note S-N-(1,3-dimethylimidazolidin-2-ylidene)phosphoramidate
  modified_base 18: mod_base = OTHER; note = 2-fluororibose uracil
  modified_base 18..19: mod_base = OTHER; note = S-phosphorothioate
  modified_base 19: mod_base = OTHER; note = 2-fluororibose cytosine
  modified_base 19..20: mod_base = OTHER; note = S-phosphorothioate
  modified_base 20: mod_base = OTHER; note = 2-fluororibose guanine
  modified_base 20..21: mod_base = OTHER; note = S-phosphorothioate
  modified_base 21: mod_base = OTHER; note = 2-fluororibose adenine
  modified_base 21..22: mod_base = OTHER; note = S-phosphorothioate
  modified_base 22: mod_base = OTHER; note = 2-fluororibose uracil
  modified_base 22..23: mod_base = OTHER; note = S-phosphorothioate
  modified_base 23: mod_base = OTHER; note = 2-fluororibose guanine
  modified_base 23..24: mod_base = OTHER; note = S-phosphorothioate
  modified_base 24: mod_base = OTHER; note = 2-fluororibose guanine
  modified_base 24..25: mod_base = OTHER; note = S-phosphorothioate
  modified_base 25: mod_base = OTHER; note = 2-fluororibose uracil
  modified_base 25..26: mod_base = OTHER; note = S-phosphorothioate
  modified_base 26: mod_base = OTHER; note = 2-fluororibose cytosine
  modified_base 26..27: mod_base = OTHER; note = S-phosphorothioate
  modified_base 27: mod_base = OTHER; note = 2-fluororibose adenine
  modified_base 27..28: mod_base = OTHER; note = S-phosphorothioate
  modified_base 28: mod_base = OTHER; note = 2-fluororibose guanine
  modified_base 28..29: mod_base = OTHER; note = S-phosphorothioate
  modified_base 29: mod_base = OTHER; note = 2-fluororibose cytosine
  modified_base 29..30: mod_base = OTHER; note R-N-(1,3-dimethylimidazolidin-2-ylidene)phosphoramidate
  modified_base 30: mod_base = OTHER; note = 2-fluororibose adenine
  source 1..30: mol_type = other RNA

SEQ ID NO: 125 - RNA, 30 nt, synthetic construct; identical to SEQ ID NO: 100
  misc_feature 1..30: note = Synthetic: WV-42062
  misc_feature 1..30: note = Synthetic: ADR-0104338
  modified_base 1: mod_base = gm
  modified_base 1..2: mod_base = OTHER; note R-N-(1,3-dimethylimidazolidin-2-ylidene)phosphoramidate
  modified_base 2: mod_base = cm
  modified_base 2..3: mod_base = OTHER; note = S-phosphorothioate
  modified_base 3: mod_base = um
  modified_base 3..4: mod_base = OTHER; note = S-phosphorothioate
  modified_base 4: mod_base = um
  modified_base 4..5: mod_base = OTHER; note = S-phosphorothioate
  modified_base 5: mod_base = cm
  modified_base 5..6: mod_base = OTHER; note = S-phosphorothioate
  modified_base 6: mod_base = OTHER; note = 2-O-methylribose adenine
  modified_base 6..7: mod_base = OTHER; note = S-phosphorothioate
  modified_base 7: mod_base = gm
  modified_base 7..8: mod_base = OTHER; note = S-phosphorothioate
  modified_base 8: mod_base = um
  modified_base 8..9: mod_base = OTHER; note = S-phosphorothioate
  modified_base 9: mod_base = cm
  modified_base 9..10: mod_base = OTHER; note = S-phosphorothioate
  modified_base 10: mod_base = cm
  modified_base 10..11: mod_base = OTHER; note = S-phosphorothioate
  modified_base 11: mod_base = cm
  modified_base 11..12: mod_base = OTHER; note = S-phosphorothioate
  modified_base 12: mod_base = um
  modified_base 12..13: mod_base = OTHER; note = S-phosphorothioate
  modified_base 13: mod_base = um
  modified_base 13..14: mod_base = OTHER; note = S-phosphorothioate
  modified_base 14: mod_base = um
  modified_base 14..15: mod_base = OTHER; note = S-phosphorothioate
  modified_base 15: mod_base = cm
  modified_base 15..16: mod_base = OTHER; note = S-phosphorothioate
  modified_base 16: mod_base = OTHER; note = 2-fluororibose uracil
  modified_base 16..17: mod_base = OTHER; note = S-phosphorothioate
  modified_base 17: mod_base = OTHER; note = deoxyribose cytosine
  modified_base 17..18: mod_base = OTHER; note = S-phosphorothioate
  modified_base 18: mod_base = OTHER; note = deoxyribose inosine
  modified_base 18..19: mod_base = OTHER; note S-N-(1,3-dimethylimidazolidin-2-ylidene)phosphoramidate
  modified_base 19: mod_base = OTHER; note = 2-fluororibose uracil
  modified_base 19..20: mod_base = OTHER; note = S-phosphorothioate
  modified_base 20: mod_base = OTHER; note = 2-fluororibose cytosine
  modified_base 20..21: mod_base = OTHER; note = S-phosphorothioate
  modified_base 21: mod_base = OTHER; note = 2-fluororibose guanine
  modified_base 21..22: mod_base = OTHER; note = S-phosphorothioate
  modified_base 22: mod_base = OTHER; note = 2-fluororibose adenine
  modified_base 22..23: mod_base = OTHER; note = S-phosphorothioate
  modified_base 23: mod_base = OTHER; note = 2-fluororibose uracil
  modified_base 23..24: mod_base = OTHER; note = S-phosphorothioate
  modified_base 24: mod_base = OTHER; note = 2-fluororibose guanine
  modified_base 24..25: mod_base = OTHER; note = S-phosphorothioate
  modified_base 25: mod_base = OTHER; note = 2-fluororibose guanine
  modified_base 25..26: mod_base = OTHER; note = S-phosphorothioate
  modified_base 26: mod_base = OTHER; note = 2-fluororibose uracil
  modified_base 26..27: mod_base = OTHER; note = S-phosphorothioate
  modified_base 27: mod_base = OTHER; note = 2-fluororibose cytosine
  modified_base 27..28: mod_base = OTHER; note = S-phosphorothioate
  modified_base 28: mod_base = OTHER; note = 2-fluororibose adenine
  modified_base 28..29: mod_base = OTHER; note = S-phosphorothioate
  modified_base 29: mod_base = OTHER; note = 2-fluororibose guanine
  modified_base 29..30: mod_base = OTHER; note R-N-(1,3-dimethylimidazolidin-2-ylidene)phosphoramidate
  modified_base 30: mod_base = OTHER; note = 2-fluororibose cytosine
  source 1..30: mol_type = other RNA

SEQ ID NO: 126 - RNA, 30 nt, synthetic construct
  misc_feature 1..30: note = Synthetic: WV-42688
  misc_feature 1..30: note = Synthetic: ADR-0103770
  modified_base 1: mod_base = OTHER; note = 2-fluororibose cytosine
  modified_base 1..2: mod_base = OTHER; note R-N-(1,3-dimethylimidazolidin-2-ylidene)phosphoramidate
  modified_base 2: mod_base = OTHER; note = 2-fluororibose uracil
  modified_base 2..3: mod_base = OTHER; note = S-phosphorothioate
  modified_base 3: mod_base = OTHER; note = 2-fluororibose uracil
  modified_base 3..4: mod_base = OTHER; note = S-phosphorothioate
  modified_base 4: mod_base = OTHER; note = 2-fluororibose cytosine
  modified_base 4..5: mod_base = OTHER; note = S-phosphorothioate
  modified_base 5: mod_base = OTHER; note = 2-fluororibose adenine
  modified_base 5..6: mod_base = OTHER; note = S-phosphorothioate
  modified_base 6: mod_base = OTHER; note = 2-fluororibose guanine
  modified_base 6..7: mod_base = OTHER; note = S-phosphorothioate
  modified_base 7: mod_base = OTHER; note = 2-fluororibose uracil
  modified_base 7..8: mod_base = OTHER; note = S-phosphorothioate
  modified_base 8: mod_base = OTHER; note = 2-fluororibose cytosine
  modified_base 8..9: mod_base = OTHER; note = S-phosphorothioate
  modified_base 9: mod_base = OTHER; note = 2-fluororibose cytosine
  modified_base 9..10: mod_base = OTHER; note = S-phosphorothioate
  modified_base 10: mod_base = OTHER; note = 2-fluororibose cytosine
  modified_base 10..11: mod_base = OTHER; note = S-phosphorothioate
  modified_base 11: mod_base = OTHER; note = 2-fluororibose uracil
  modified_base 11..12: mod_base = OTHER; note = S-phosphorothioate
  modified_base 12: mod_base = OTHER; note = 2-fluororibose uracil
  modified_base 12..13: mod_base = OTHER; note = S-phosphorothioate
  modified_base 13: mod_base = OTHER; note = 2-fluororibose uracil
  modified_base 13..14: mod_base = OTHER; note = S-phosphorothioate
  modified_base 14: mod_base = OTHER; note = 2-fluororibose cytosine
  modified_base 14..15: mod_base = OTHER; note = S-phosphorothioate
  modified_base 15: mod_base = OTHER; note = 2-fluororibose uracil
  modified_base 15..16: mod_base = OTHER; note = S-phosphorothioate
  modified_base 16: mod_base = OTHER; note = deoxyribose 6-amino-9-substituted 8,9-dihydro-7H-purin-8-one
  modified_base 16..17: mod_base = OTHER; note = S-phosphorothioate
  modified_base 17: mod_base = OTHER; note = deoxyribose inosine
  modified_base 17..18: mod_base = OTHER; note S-N-(1,3-dimethylimidazolidin-2-ylidene)phosphoramidate
  modified_base 18: mod_base = um
  modified_base 18..19: mod_base = OTHER; note = S-phosphorothioate
  modified_base 19: mod_base = cm
  modified_base 19..20: mod_base = OTHER; note = S-phosphorothioate
  modified_base 20: mod_base = gm
  modified_base 20..21: mod_base = OTHER; note = S-phosphorothioate
  modified_base 21: mod_base = OTHER; note = 2-O-methylribose adenine
  modified_base 21..22: mod_base = OTHER; note = S-phosphorothioate
  modified_base 22: mod_base = um
  modified_base 22..23: mod_base = OTHER; note = S-phosphorothioate
  modified_base 23: mod_base = gm
  modified_base 23..24: mod_base = OTHER; note = S-phosphorothioate
  modified_base 24: mod_base = gm
  modified_base 24..25: mod_base = OTHER; note = S-phosphorothioate
  modified_base 25: mod_base = um
  modified_base 25..26: mod_base = OTHER; note = S-phosphorothioate
  modified_base 26: mod_base = cm
  modified_base 26..27: mod_base = OTHER; note = S-phosphorothioate
  modified_base 27: mod_base = OTHER; note = 2-O-methylribose adenine
  modified_base 27..28: mod_base = OTHER; note = S-phosphorothioate
  modified_base 28: mod_base = gm
  modified_base 28..29: mod_base = OTHER; note = S-phosphorothioate
  modified_base 29: mod_base = cm
  modified_base 29..30: mod_base = OTHER; note R-N-(1,3-dimethylimidazolidin-2-ylidene)phosphoramidate
  modified_base 30: mod_base = OTHER; note = 2-O-methylribose adenine
  source 1..30: mol_type = other RNA
cttcagtccctttctagtcgatggtcagca

SEQ ID NO: 127 - RNA, 30 nt, synthetic construct
  misc_feature 1..30: note = Synthetic: WV-42687
  misc_feature 1..30: note = Synthetic: ADR-0103831
  modified_base 1: mod_base = OTHER; note = 2-fluororibose guanine
  modified_base 1..2: mod_base = OTHER; note R-N-(1,3-dimethylimidazolidin-2-ylidene)phosphoramidate
  modified_base 2: mod_base = OTHER; note = 2-fluororibose cytosine
  modified_base 2..3: mod_base = OTHER; note = S-phosphorothioate
  modified_base 3: mod_base = OTHER; note = 2-fluororibose uracil
  modified_base 3..4: mod_base = OTHER; note = S-phosphorothioate
  modified_base 4: mod_base = OTHER; note = 2-fluororibose uracil
  modified_base 4..5: mod_base = OTHER; note = S-phosphorothioate
  modified_base 5: mod_base = OTHER; note = 2-fluororibose cytosine
  modified_base 5..6: mod_base = OTHER; note = S-phosphorothioate
  modified_base 6: mod_base = OTHER; note = 2-fluororibose adenine
  modified_base 6..7: mod_base = OTHER; note = S-phosphorothioate
  modified_base 7: mod_base = OTHER; note = 2-fluororibose guanine
  modified_base 7..8: mod_base = OTHER; note = S-phosphorothioate
  modified_base 8: mod_base = OTHER; note = 2-fluororibose uracil
  modified_base 8..9: mod_base = OTHER; note = S-phosphorothioate
  modified_base 9: mod_base = OTHER; note = 2-fluororibose cytosine
  modified_base 9..10: mod_base = OTHER; note = S-phosphorothioate
  modified_base 10: mod_base = OTHER; note = 2-fluororibose cytosine
  modified_base 10..11: mod_base = OTHER; note = S-phosphorothioate
  modified_base 11: mod_base = OTHER; note = 2-fluororibose cytosine
  modified_base 11..12: mod_base = OTHER; note = S-phosphorothioate
  modified_base 12: mod_base = OTHER; note = 2-fluororibose uracil
  modified_base 12..13: mod_base = OTHER; note = S-phosphorothioate
  modified_base 13: mod_base = OTHER; note = 2-fluororibose uracil
  modified_base 13..14: mod_base = OTHER; note = S-phosphorothioate
  modified_base 14: mod_base = OTHER; note = 2-fluororibose uracil
  modified_base 14..15: mod_base = OTHER; note = S-phosphorothioate
  modified_base 15: mod_base = OTHER; note = 2-fluororibose cytosine
  modified_base 15..16: mod_base = OTHER; note = S-phosphorothioate
  modified_base 16: mod_base = OTHER; note = 2-fluororibose uracil
  modified_base 16..17: mod_base = OTHER; note = S-phosphorothioate
  modified_base 17: mod_base = OTHER; note = deoxyribose 6-amino-9-substituted 8,9-dihydro-7H-purin-8-one
  modified_base 17..18: mod_base = OTHER; note = S-phosphorothioate
  modified_base 18: mod_base = OTHER; note = deoxyribose inosine
  modified_base 18..19: mod_base = OTHER; note S-N-(1,3-dimethylimidazolidin-2-ylidene)phosphoramidate
  modified_base 19: mod_base = um
  modified_base 19..20: mod_base = OTHER; note = S-phosphorothioate
  modified_base 20: mod_base = cm
  modified_base 20..21: mod_base = OTHER; note = S-phosphorothioate
  modified_base 21: mod_base = gm
  modified_base 21..22: mod_base = OTHER; note = S-phosphorothioate
  modified_base 22: mod_base = OTHER; note = 2-O-methylribose adenine
  modified_base 22..23: mod_base = OTHER; note = S-phosphorothioate
  modified_base 23: mod_base = um
  modified_base 23..24: mod_base = OTHER; note = S-phosphorothioate
  modified_base 24: mod_base = gm
  modified_base 24..25: mod_base = OTHER; note = S-phosphorothioate
  modified_base 25: mod_base = gm
  modified_base 25..26: mod_base = OTHER; note = S-phosphorothioate
  modified_base 26: mod_base = um
  modified_base 26..27: mod_base = OTHER; note = S-phosphorothioate
  modified_base 27: mod_base = cm
  modified_base 27..28: mod_base = OTHER; note = S-phosphorothioate
  modified_base 28: mod_base = OTHER; note = 2-O-methylribose adenine
  modified_base 28..29: mod_base = OTHER; note = S-phosphorothioate
  modified_base 29: mod_base = gm
  modified_base 29..30: mod_base = OTHER; note R-N-(1,3-dimethylimidazolidin-2-ylidene)phosphoramidate
  modified_base 30: mod_base = cm
  source 1..30: mol_type = other RNA
gcttcagtccctttctagtcgatggtcagc

SEQ ID NO: 128 - RNA, 30 nt, synthetic construct
  misc_feature 1..30: note = Synthetic: WV-42686
  misc_feature 1..30: note = Synthetic: ADR-0103440
  modified_base 1: mod_base = OTHER; note = 2-fluororibose adenine
  modified_base 1..2: mod_base = OTHER; note R-N-(1,3-dimethylimidazolidin-2-ylidene)phosphoramidate
  modified_base 2: mod_base = OTHER; note = 2-fluororibose guanine
  modified_base 2..3: mod_base = OTHER; note = S-phosphorothioate
  modified_base 3: mod_base = OTHER; note = 2-fluororibose cytosine
  modified_base 3..4: mod_base = OTHER; note = S-phosphorothioate
  modified_base 4: mod_base = OTHER; note = 2-fluororibose uracil
  modified_base 4..5: mod_base = OTHER; note = S-phosphorothioate
  modified_base 5: mod_base = OTHER; note = 2-fluororibose uracil
  modified_base 5..6: mod_base = OTHER; note = S-phosphorothioate
  modified_base 6: mod_base = OTHER; note = 2-fluororibose cytosine
  modified_base 6..7: mod_base = OTHER; note = S-phosphorothioate
  modified_base 7: mod_base = OTHER; note = 2-fluororibose adenine
  modified_base 7..8: mod_base = OTHER; note = S-phosphorothioate
  modified_base 8: mod_base = OTHER; note = 2-fluororibose guanine
  modified_base 8..9: mod_base = OTHER; note = S-phosphorothioate
  modified_base 9: mod_base = OTHER; note = 2-fluororibose uracil
  modified_base 9..10: mod_base = OTHER; note = S-phosphorothioate
  modified_base 10: mod_base = OTHER; note = 2-fluororibose cytosine
  modified_base 10..11: mod_base = OTHER; note = S-phosphorothioate
  modified_base 11: mod_base = OTHER; note = 2-fluororibose cytosine
  modified_base 11..12: mod_base = OTHER; note = S-phosphorothioate
  modified_base 12: mod_base = OTHER; note = 2-fluororibose cytosine
  modified_base 12..13: mod_base = OTHER; note = S-phosphorothioate
  modified_base 13: mod_base = OTHER; note = 2-fluororibose uracil
  modified_base 13..14: mod_base = OTHER; note = S-phosphorothioate
  modified_base 14: mod_base = OTHER; note = 2-fluororibose uracil
  modified_base 14..15: mod_base = OTHER; note = S-phosphorothioate
  modified_base 15: mod_base = OTHER; note = 2-fluororibose uracil
  modified_base 15..16: mod_base = OTHER; note = S-phosphorothioate
  modified_base 16: mod_base = cm
  modified_base 16..17: mod_base = OTHER; note = S-phosphorothioate
  modified_base 17: mod_base = OTHER; note = 2-fluororibose uracil
  modified_base 17..18: mod_base = OTHER; note = S-phosphorothioate
  modified_base 18: mod_base = OTHER; note = deoxyribose 6-amino-9-substituted 8,9-dihydro-7H-purin-8-one
  modified_base 18..19: mod_base = OTHER; note = S-phosphorothioate
  modified_base 19: mod_base = OTHER; note = deoxyribose inosine
  modified_base 19..20: mod_base = OTHER; note S-N-(1,3-dimethylimidazolidin-2-ylidene)phosphoramidate
  modified_base 20: mod_base = um
  modified_base 20..21: mod_base = OTHER; note = S-phosphorothioate
  modified_base 21: mod_base = cm
  modified_base 21..22: mod_base = OTHER; note = S-phosphorothioate
  modified_base 22: mod_base = gm
  modified_base 22..23: mod_base = OTHER; note = S-phosphorothioate
  modified_base 23: mod_base = OTHER; note = 2-O-methylribose adenine
  modified_base 23..24: mod_base = OTHER; note = S-phosphorothioate
  modified_base 24: mod_base = um
  modified_base 24..25: mod_base = OTHER; note = S-phosphorothioate
  modified_base 25: mod_base = gm
  modified_base 25..26: mod_base = OTHER; note = S-phosphorothioate
  modified_base 26: mod_base = gm
  modified_base 26..27: mod_base = OTHER; note = S-phosphorothioate
  modified_base 27: mod_base = um
  modified_base 27..28: mod_base = OTHER; note = S-phosphorothioate
  modified_base 28: mod_base = cm
  modified_base 28..29: mod_base = OTHER; note = S-phosphorothioate
  modified_base 29: mod_base = OTHER; note = 2-O-methylribose adenine
  modified_base 29..30: mod_base = OTHER; note R-N-(1,3-dimethylimidazolidin-2-ylidene)phosphoramidate
  modified_base 30: mod_base = gm
  source 1..30: mol_type = other RNA
agcttcagtccctttctagtcgatggtcag

SEQ ID NO: 129 - RNA, 30 nt, synthetic construct
  misc_feature 1..30: note = Synthetic: WV-42685
  misc_feature 1..30: note = Synthetic: ADR-0103508
  modified_base 1: mod_base = OTHER; note = 2-fluororibose cytosine
  modified_base 1..2: mod_base = OTHER; note R-N-(1,3-dimethylimidazolidin-2-ylidene)phosphoramidate
  modified_base 2: mod_base = OTHER; note = 2-fluororibose adenine
  modified_base 2..3: mod_base = OTHER; note = S-phosphorothioate
  modified_base 3: mod_base = OTHER; note = 2-fluororibose guanine
  modified_base 3..4: mod_base = OTHER; note = S-phosphorothioate
  modified_base 4: mod_base = OTHER; note = 2-fluororibose cytosine
  modified_base 4..5: mod_base = OTHER; note = S-phosphorothioate
  modified_base 5: mod_base = OTHER; note = 2-fluororibose uracil
  modified_base 5..6: mod_base = OTHER; note = S-phosphorothioate
  modified_base 6: mod_base = OTHER; note = 2-fluororibose uracil
  modified_base 6..7: mod_base = OTHER; note = S-phosphorothioate
  modified_base 7: mod_base = OTHER; note = 2-fluororibose cytosine
  modified_base 7..8: mod_base = OTHER; note = S-phosphorothioate
  modified_base 8: mod_base = OTHER; note = 2-fluororibose adenine
  modified_base 8..9: mod_base = OTHER; note = S-phosphorothioate
  modified_base 9: mod_base = OTHER; note = 2-fluororibose guanine
  modified_base 9..10: mod_base = OTHER; note = S-phosphorothioate
  modified_base 10: mod_base = OTHER; note = 2-fluororibose uracil
  modified_base 10..11: mod_base = OTHER; note = S-phosphorothioate
  modified_base 11: mod_base = OTHER; note = 2-fluororibose cytosine
  modified_base 11..12: mod_base = OTHER; note = S-phosphorothioate
  modified_base 12: mod_base = OTHER; note = 2-fluororibose cytosine
  modified_base 12..13: mod_base = OTHER; note = S-phosphorothioate
  modified_base 13: mod_base = OTHER; note = 2-fluororibose cytosine
  modified_base 13..14: mod_base = OTHER; note = S-phosphorothioate
  modified_base 14: mod_base = OTHER; note = 2-fluororibose uracil
  modified_base 14..15: mod_base = OTHER; note = S-phosphorothioate
  modified_base 15: mod_base = OTHER; note = 2-fluororibose uracil
  modified_base 15..16: mod_base = OTHER; note = S-phosphorothioate
  modified_base 16: mod_base = um
  modified_base 16..17: mod_base = OTHER; note = S-phosphorothioate
  modified_base 17: mod_base = cm
  modified_base 17..18: mod_base = OTHER; note = S-phosphorothioate
  modified_base 18: mod_base = OTHER; note = 2-fluororibose uracil
  modified_base 18..19: mod_base = OTHER; note = S-phosphorothioate
  modified_base 19: mod_base = OTHER; note = deoxyribose 6-amino-9-substituted 8,9-dihydro-7H-purin-8-one
  modified_base 19..20: mod_base = OTHER; note = S-phosphorothioate
  modified_base 20: mod_base = OTHER; note = deoxyribose inosine
  modified_base 20..21: mod_base = OTHER; note S-N-(1,3-dimethylimidazolidin-2-ylidene)phosphoramidate
  modified_base 21: mod_base = um
  modified_base 21..22: mod_base = OTHER; note = S-phosphorothioate
  modified_base 22: mod_base = cm
  modified_base 22..23: mod_base = OTHER; note = S-phosphorothioate
  modified_base 23: mod_base = gm
  modified_base 23..24: mod_base = OTHER; note = S-phosphorothioate
  modified_base 24: mod_base = OTHER; note = 2-O-methylribose adenine
  modified_base 24..25: mod_base = OTHER; note = S-phosphorothioate
  modified_base 25: mod_base = um
  modified_base 25..26: mod_base = OTHER; note = S-phosphorothioate
  modified_base 26: mod_base = gm
  modified_base 26..27: mod_base = OTHER; note = S-phosphorothioate
  modified_base 27: mod_base = gm
  modified_base 27..28: mod_base = OTHER; note = S-phosphorothioate
  modified_base 28: mod_base = um
  modified_base 28..29: mod_base = OTHER; note = S-phosphorothioate
  modified_base 29: mod_base = cm
  modified_base 29..30: mod_base = OTHER; note R-N-(1,3-dimethylimidazolidin-2-ylidene)phosphoramidate
  modified_base 30: mod_base = OTHER; note = 2-O-methylribose adenine
  source 1..30: mol_type = other RNA
cagcttcagtccctttctagtcgatggtca

SEQ ID NO: 130 - RNA, 30 nt, synthetic construct
  misc_feature 1..30: note = Synthetic: WV-42684
  misc_feature 1..30: note = Synthetic: ADR-0103815
  modified_base 1: mod_base = OTHER; note = 2-fluororibose guanine
  modified_base 1..2: mod_base = OTHER; note R-N-(1,3-dimethylimidazolidin-2-ylidene)phosphoramidate
  modified_base 2: mod_base = OTHER; note = 2-fluororibose cytosine
  modified_base 2..3: mod_base = OTHER; note = S-phosphorothioate
  modified_base 3: mod_base = OTHER; note = 2-fluororibose adenine
  modified_base 3..4: mod_base = OTHER; note = S-phosphorothioate
  modified_base 4: mod_base = OTHER; note = 2-fluororibose guanine
  modified_base 4..5: mod_base = OTHER; note = S-phosphorothioate
  modified_base 5: mod_base = OTHER; note = 2-fluororibose cytosine
  modified_base 5..6: mod_base = OTHER; note = S-phosphorothioate
  modified_base 6: mod_base = OTHER; note = 2-fluororibose uracil
  modified_base 6..7: mod_base = OTHER; note = S-phosphorothioate
  modified_base 7: mod_base = OTHER; note = 2-fluororibose uracil
  modified_base 7..8: mod_base = OTHER; note = S-phosphorothioate
  modified_base 8: mod_base = OTHER; note = 2-fluororibose cytosine
  modified_base 8..9: mod_base = OTHER; note = S-phosphorothioate
  modified_base 9: mod_base = OTHER; note = 2-fluororibose adenine
  modified_base 9..10: mod_base = OTHER; note = S-phosphorothioate
  modified_base 10: mod_base = OTHER; note = 2-fluororibose guanine
  modified_base 10..11: mod_base = OTHER; note = S-phosphorothioate
  modified_base 11: mod_base = OTHER; note = 2-fluororibose uracil
  modified_base 11..12: mod_base = OTHER; note = S-phosphorothioate
  modified_base 12: mod_base = OTHER; note = 2-fluororibose cytosine
  modified_base 12..13: mod_base = OTHER; note = S-phosphorothioate
  modified_base 13: mod_base = OTHER; note = 2-fluororibose cytosine
  modified_base 13..14: mod_base = OTHER; note = S-phosphorothioate
  modified_base 14: mod_base = OTHER; note = 2-fluororibose cytosine
  modified_base 14..15: mod_base = OTHER; note = S-phosphorothioate
  modified_base 15: mod_base = OTHER; note = 2-fluororibose uracil
  modified_base 15..16: mod_base = OTHER; note = S-phosphorothioate
  modified_base 16: mod_base = um
  modified_base 16..17: mod_base = OTHER; note = S-phosphorothioate
  modified_base 17: mod_base = um
  modified_base 17..18: mod_base = OTHER; note = S-phosphorothioate
  modified_base 18: mod_base = cm
  modified_base 18..19: mod_base = OTHER; note = S-phosphorothioate
  modified_base 19: mod_base = OTHER; note = 2-fluororibose uracil
  modified_base 19..20: mod_base = OTHER; note = S-phosphorothioate
  modified_base 20: mod_base = OTHER; note = deoxyribose 6-amino-9-substituted 8,9-dihydro-7H-purin-8-one
  modified_base 20..21: mod_base = OTHER; note = S-phosphorothioate
  modified_base 21: mod_base = OTHER; note = deoxyribose inosine
  modified_base 21..22: mod_base = OTHER; note S-N-(1,3-dimethylimidazolidin-2-ylidene)phosphoramidate
  modified_base 22: mod_base = um
  modified_base 22..23: mod_base = OTHER; note = S-phosphorothioate
  modified_base 23: mod_base = cm
  modified_base 23..24: mod_base = OTHER; note = S-phosphorothioate
  modified_base 24: mod_base = gm
  modified_base 24..25: mod_base = OTHER; note = S-phosphorothioate
  modified_base 25: mod_base = OTHER; note = 2-O-methylribose adenine
  modified_base 25..26: mod_base = OTHER; note = S-phosphorothioate
  modified_base 26: mod_base = um
  modified_base 26..27: mod_base = OTHER; note = S-phosphorothioate
  modified_base 27: mod_base = gm
  modified_base 27..28: mod_base = OTHER; note = S-phosphorothioate
  modified_base 28: mod_base = gm
  modified_base 28..29: mod_base = OTHER; note = S-phosphorothioate
  modified_base 29: mod_base = um
  modified_base 29..30: mod_base = OTHER; note R-N-(1,3-dimethylimidazolidin-2-ylidene)phosphoramidate
  modified_base 30: mod_base = cm
  source 1..30: mol_type = other RNA
gcagcttcagtccctttctagtcgatggtc

SEQ ID NO: 131 - RNA, 30 nt, synthetic construct
  misc_feature 1..30: note = Synthetic: WV-42683
  misc_feature 1..30: note = Synthetic: ADR-0103438
  modified_base 1: mod_base = OTHER; note = 2-fluororibose adenine
  modified_base 1..2: mod_base = OTHER; note R-N-(1,3-dimethylimidazolidin-2-ylidene)phosphoramidate
  modified_base 2: mod_base = OTHER; note = 2-fluororibose guanine
  modified_base 2..3: mod_base = OTHER; note = S-phosphorothioate
  modified_base 3: mod_base = OTHER; note = 2-fluororibose cytosine
  modified_base 3..4: mod_base = OTHER; note = S-phosphorothioate
  modified_base 4: mod_base = OTHER; note = 2-fluororibose adenine
  modified_base 4..5: mod_base = OTHER; note = S-phosphorothioate
  modified_base 5: mod_base = OTHER; note = 2-fluororibose guanine
  modified_base 5..6: mod_base = OTHER; note = S-phosphorothioate
  modified_base 6: mod_base = OTHER; note = 2-fluororibose cytosine
  modified_base 6..7: mod_base = OTHER; note = S-phosphorothioate
  modified_base 7: mod_base = OTHER; note = 2-fluororibose uracil
  modified_base 7..8: mod_base = OTHER; note = S-phosphorothioate
  modified_base 8: mod_base = OTHER; note = 2-fluororibose uracil
  modified_base 8..9: mod_base = OTHER; note = S-phosphorothioate
  modified_base 9: mod_base = OTHER; note = 2-fluororibose cytosine
  modified_base 9..10: mod_base = OTHER; note = S-phosphorothioate
  modified_base 10: mod_base = OTHER; note = 2-fluororibose adenine
  modified_base 10..11: mod_base = OTHER; note = S-phosphorothioate
  modified_base 11: mod_base = OTHER; note = 2-fluororibose guanine
  modified_base 11..12: mod_base = OTHER; note = S-phosphorothioate
  modified_base 12: mod_base = OTHER; note = 2-fluororibose uracil
  modified_base 12..13: mod_base = OTHER; note = S-phosphorothioate
  modified_base 13: mod_base = OTHER; note = 2-fluororibose cytosine
  modified_base 13..14: mod_base = OTHER; note = S-phosphorothioate
  modified_base 14: mod_base = OTHER; note = 2-fluororibose cytosine
  modified_base 14..15: mod_base = OTHER; note = S-phosphorothioate
  modified_base 15: mod_base = OTHER; note = 2-fluororibose cytosine
  modified_base 15..16: mod_base = OTHER; note = S-phosphorothioate
  modified_base 16: mod_base = um
  modified_base 16..17: mod_base = OTHER; note = S-phosphorothioate
  modified_base 17: mod_base = um
  modified_base 17..18: mod_base = OTHER; note = S-phosphorothioate
  modified_base 18: mod_base = um
  modified_base 18..19: mod_base = OTHER; note = S-phosphorothioate
  modified_base 19: mod_base = cm
  modified_base 19..20: mod_base = OTHER; note = S-phosphorothioate
  modified_base 20: mod_base = OTHER; note = 2-fluororibose uracil
  modified_base 20..21: mod_base = OTHER; note = S-phosphorothioate
  modified_base 21: mod_base = OTHER; note = deoxyribose 6-amino-9-substituted 8,9-dihydro-7H-purin-8-one
  modified_base 21..22: mod_base = OTHER; note = S-phosphorothioate
  modified_base 22: mod_base = OTHER; note = deoxyribose inosine
  modified_base 22..23: mod_base = OTHER; note S-N-(1,3-dimethylimidazolidin-2-ylidene)phosphoramidate
  modified_base 23: mod_base = um
  modified_base 23..24: mod_base = OTHER; note = S-phosphorothioate
  modified_base 24: mod_base = cm
  modified_base 24..25: mod_base = OTHER; note = S-phosphorothioate
  modified_base 25: mod_base = gm
  modified_base 25..26: mod_base = OTHER; note = S-phosphorothioate
  modified_base 26: mod_base = OTHER; note = 2-O-methylribose adenine
  modified_base 26..27: mod_base = OTHER; note = S-phosphorothioate
  modified_base 27: mod_base = um
  modified_base 27..28: mod_base = OTHER; note = S-phosphorothioate
  modified_base 28: mod_base = gm
  modified_base 28..29: mod_base = OTHER; note = S-phosphorothioate
  modified_base 29: mod_base = gm
  modified_base 29..30: mod_base = OTHER; note R-N-(1,3-dimethylimidazolidin-2-ylidene)phosphoramidate
  modified_base 30: mod_base = um
  source 1..30: mol_type = other RNA
agcagcttcagtccctttctagtcgatggt

SEQ ID NO: 132 - RNA, 30 nt, synthetic construct
  misc_feature 1..30: note = Synthetic: WV-42682
  misc_feature 1..30: note = Synthetic: ADR-0103505
  modified_base 1: mod_base = OTHER; note = 2-fluororibose cytosine
  modified_base 1..2: mod_base = OTHER; note R-N-(1,3-dimethylimidazolidin-2-ylidene)phosphoramidate
  modified_base 2: mod_base = OTHER; note = 2-fluororibose adenine
  modified_base 2..3: mod_base = OTHER; note = S-phosphorothioate
  modified_base 3: mod_base = OTHER; note = 2-fluororibose guanine
  modified_base 3..4: mod_base = OTHER; note = S-phosphorothioate
  modified_base 4: mod_base = OTHER; note = 2-fluororibose cytosine
  modified_base 4..5: mod_base = OTHER; note = S-phosphorothioate
  modified_base 5: mod_base = OTHER; note = 2-fluororibose adenine
  modified_base 5..6: mod_base = OTHER; note = S-phosphorothioate
  modified_base 6: mod_base = OTHER; note = 2-fluororibose guanine
  modified_base 6..7: mod_base = OTHER; note = S-phosphorothioate
  modified_base 7: mod_base = OTHER; note = 2-fluororibose cytosine
  modified_base 7..8: mod_base = OTHER; note = S-phosphorothioate
  modified_base 8: mod_base = OTHER; note = 2-fluororibose uracil
  modified_base 8..9: mod_base = OTHER; note = S-phosphorothioate
  modified_base 9: mod_base = OTHER; note = 2-fluororibose uracil
  modified_base 9..10: mod_base = OTHER; note = S-phosphorothioate
  modified_base 10: mod_base = OTHER; note = 2-fluororibose cytosine
  modified_base 10..11: mod_base = OTHER; note = S-phosphorothioate
  modified_base 11: mod_base = OTHER; note = 2-fluororibose adenine
  modified_base 11..12: mod_base = OTHER; note = S-phosphorothioate
  modified_base 12: mod_base = OTHER; note = 2-fluororibose guanine
  modified_base 12..13: mod_base = OTHER; note = S-phosphorothioate
  modified_base 13: mod_base = OTHER; note = 2-fluororibose uracil
  modified_base 13..14: mod_base = OTHER; note = S-phosphorothioate
  modified_base 14: mod_base = OTHER; note = 2-fluororibose cytosine
  modified_base 14..15: mod_base = OTHER; note = S-phosphorothioate
  modified_base 15: mod_base = OTHER; note = 2-fluororibose cytosine
  modified_base 15..16: mod_base = OTHER; note = S-phosphorothioate
  modified_base 16: mod_base = cm
  modified_base 16..17: mod_base = OTHER; note = S-phosphorothioate
  modified_base 17: mod_base = um
  modified_base 17..18: mod_base = OTHER; note = S-phosphorothioate
  modified_base 18: mod_base = um
  modified_base 18..19: mod_base = OTHER; note = S-phosphorothioate
  modified_base 19: mod_base = um
  modified_base 19..20: mod_base = OTHER; note = S-phosphorothioate
  modified_base 20: mod_base = cm
  modified_base 20..21: mod_base = OTHER; note = S-phosphorothioate
  modified_base 21: mod_base = OTHER; note = 2-fluororibose uracil
  modified_base 21..22: mod_base = OTHER; note = S-phosphorothioate
  modified_base 22: mod_base = OTHER; note = deoxyribose 6-amino-9-substituted 8,9-dihydro-7H-purin-8-one
  modified_base 22..23: mod_base = OTHER; note = S-phosphorothioate
  modified_base 23: mod_base = OTHER; note = deoxyribose inosine
  modified_base 23..24: mod_base = OTHER; note S-N-(1,3-dimethylimidazolidin-2-ylidene)phosphoramidate
  modified_base 24: mod_base = um
  modified_base 24..25: mod_base = OTHER; note = S-phosphorothioate
  modified_base 25: mod_base = cm
  modified_base 25..26: mod_base = OTHER; note = S-phosphorothioate
  modified_base 26: mod_base = gm
  modified_base 26..27: mod_base = OTHER; note = S-phosphorothioate
  modified_base 27: mod_base = OTHER; note = 2-O-methylribose adenine
  modified_base 27..28: mod_base = OTHER; note = S-phosphorothioate
  modified_base 28: mod_base = um
  modified_base 28..29: mod_base = OTHER; note = S-phosphorothioate
  modified_base 29: mod_base = gm
  modified_base 29..30: mod_base = OTHER; note R-N-(1,3-dimethylimidazolidin-2-ylidene)phosphoramidate
  modified_base 30: mod_base = gm
  source 1..30: mol_type = other RNA
cagcagcttcagtccctttctagtcgatgg

SEQ ID NO: 133 - RNA, 30 nt, synthetic construct
  misc_feature 1..30: note = Synthetic: WV-42681
  misc_feature 1..30: note = Synthetic: ADR-0103519
  modified_base 1: mod_base = OTHER; note = 2-fluororibose cytosine
  modified_base 1..2: mod_base = OTHER; note R-N-(1,3-dimethylimidazolidin-2-ylidene)phosphoramidate
  modified_base 2: mod_base = OTHER; note = 2-fluororibose cytosine
  modified_base 2..3: mod_base = OTHER; note = S-phosphorothioate
  modified_base 3: mod_base = OTHER; note = 2-fluororibose adenine
  modified_base 3..4: mod_base = OTHER; note = S-phosphorothioate
  modified_base 4: mod_base = OTHER; note = 2-fluororibose guanine
  modified_base 4..5: mod_base = OTHER; note = S-phosphorothioate
  modified_base 5: mod_base = OTHER; note = 2-fluororibose cytosine
  modified_base 5..6: mod_base = OTHER; note = S-phosphorothioate
  modified_base 6: mod_base = OTHER; note = 2-fluororibose adenine
  modified_base 6..7: mod_base = OTHER; note = S-phosphorothioate
  modified_base 7: mod_base = OTHER; note = 2-fluororibose guanine
  modified_base 7..8: mod_base = OTHER; note = S-phosphorothioate
  modified_base 8: mod_base = OTHER; note = 2-fluororibose cytosine
  modified_base 8..9: mod_base = OTHER; note = S-phosphorothioate
  modified_base 9: mod_base = OTHER; note = 2-fluororibose uracil
  modified_base 9..10: mod_base = OTHER; note = S-phosphorothioate
  modified_base 10: mod_base = OTHER; note = 2-fluororibose uracil
  modified_base 10..11: mod_base = OTHER; note = S-phosphorothioate
  modified_base 11: mod_base = OTHER; note = 2-fluororibose cytosine
  modified_base 11..12: mod_base = OTHER; note = S-phosphorothioate
  modified_base 12: mod_base = OTHER; note = 2-fluororibose adenine
  modified_base 12..13: mod_base = OTHER; note = S-phosphorothioate
  modified_base 13: mod_base = OTHER; note = 2-fluororibose guanine
  modified_base 13..14: mod_base = OTHER; note = S-phosphorothioate
  modified_base 14: mod_base = OTHER; note = 2-fluororibose uracil
  modified_base 14..15: mod_base = OTHER; note = S-phosphorothioate
  modified_base 15: mod_base = OTHER; note = 2-fluororibose cytosine
  modified_base 15..16: mod_base = OTHER; note = S-phosphorothioate
  modified_base 16: mod_base = cm
  modified_base 16..17: mod_base = OTHER; note = S-phosphorothioate
  modified_base 17: mod_base = cm
  modified_base 17..18: mod_base = OTHER; note = S-phosphorothioate
  modified_base 18: mod_base = um
  modified_base 18..19: mod_base = OTHER; note = S-phosphorothioate
  modified_base 19: mod_base = um
  modified_base 19..20: mod_base = OTHER; note = S-phosphorothioate
  modified_base 20: mod_base = um
  modified_base 20..21: mod_base = OTHER; note = S-phosphorothioate
  modified_base 21: mod_base = cm
  modified_base 21..22: mod_base = OTHER; note = S-phosphorothioate
  modified_base 22: mod_base = OTHER; note = 2-fluororibose uracil
  modified_base 22..23: mod_base = OTHER; note = S-phosphorothioate
  modified_base 23: mod_base = OTHER; note = deoxyribose 6-amino-9-substituted 8,9-dihydro-7H-purin-8-one
  modified_base 23..24: mod_base = OTHER; note = S-phosphorothioate
  modified_base 24: mod_base = OTHER; note = deoxyribose inosine
  modified_base 24..25: mod_base = OTHER; note S-N-(1,3-dimethylimidazolidin-2-ylidene)phosphoramidate
  modified_base 25: mod_base = um
  modified_base 25..26: mod_base = OTHER; note = S-phosphorothioate
  modified_base 26: mod_base = cm
  modified_base 26..27: mod_base = OTHER; note = S-phosphorothioate
  modified_base 27: mod_base = gm
  modified_base 27..28: mod_base = OTHER; note = S-phosphorothioate
  modified_base 28: mod_base = OTHER; note = 2-O-methylribose adenine
  modified_base 28..29: mod_base = OTHER; note = S-phosphorothioate
  modified_base 29: mod_base = um
  modified_base 29..30: mod_base = OTHER; note R-N-(1,3-dimethylimidazolidin-2-ylidene)phosphoramidate
  modified_base 30: mod_base = gm
  source 1..30: mol_type = other RNA
ccagcagcttcagtccctttctagtcgatg

SEQ ID NO: 134 - RNA, 30 nt, synthetic construct
  misc_feature 1..30: note = Synthetic: WV-42680
  misc_feature 1..30: note = Synthetic: ADR-0103626
  modified_base 1: mod_base = OTHER; note = 2-fluororibose cytosine
  modified_base 1..2: mod_base = OTHER; note R-N-(1,3-dimethylimidazolidin-2-ylidene)phosphoramidate
  modified_base 2: mod_base = OTHER; note = 2-fluororibose cytosine
  modified_base 2..3: mod_base = OTHER; note = S-phosphorothioate
  modified_base 3: mod_base = OTHER; note = 2-fluororibose cytosine
  modified_base 3..4: mod_base = OTHER; note = S-phosphorothioate
  modified_base 4: mod_base = OTHER; note = 2-fluororibose adenine
  modified_base 4..5: mod_base = OTHER; note = S-phosphorothioate
  modified_base 5: mod_base = OTHER; note = 2-fluororibose guanine
  modified_base 5..6: mod_base = OTHER; note = S-phosphorothioate
  modified_base 6: mod_base = OTHER; note = 2-fluororibose cytosine
  modified_base 6..7: mod_base = OTHER; note = S-phosphorothioate
  modified_base 7: mod_base = OTHER; note = 2-fluororibose adenine
  modified_base 7..8: mod_base = OTHER; note = S-phosphorothioate
  modified_base 8: mod_base = OTHER; note = 2-fluororibose guanine
  modified_base 8..9: mod_base = OTHER; note = S-phosphorothioate
  modified_base 9: mod_base = OTHER; note = 2-fluororibose cytosine
  modified_base 9..10: mod_base = OTHER; note = S-phosphorothioate
  modified_base 10: mod_base = OTHER; note = 2-fluororibose uracil
  modified_base 10..11: mod_base = OTHER; note = S-phosphorothioate
  modified_base 11: mod_base = OTHER; note = 2-fluororibose uracil
  modified_base 11..12: mod_base = OTHER; note = S-phosphorothioate
  modified_base 12: mod_base = OTHER; note = 2-fluororibose cytosine
  modified_base 12..13: mod_base = OTHER; note = S-phosphorothioate
  modified_base 13: mod_base = OTHER; note = 2-fluororibose adenine
  modified_base 13..14: mod_base = OTHER; note = S-phosphorothioate
  modified_base 14: mod_base = OTHER; note = 2-fluororibose guanine
  modified_base 14..15: mod_base = OTHER; note = S-phosphorothioate
  modified_base 15: mod_base = OTHER; note = 2-fluororibose uracil
  modified_base 15..16: mod_base = OTHER; note = S-phosphorothioate
  modified_base 16: mod_base = cm
  modified_base 16..17: mod_base = OTHER; note = S-phosphorothioate
  modified_base 17: mod_base = cm
  modified_base 17..18: mod_base = OTHER; note = S-phosphorothioate
  modified_base 18: mod_base = cm
  modified_base 18..19: mod_base = OTHER; note = S-phosphorothioate
  modified_base 19: mod_base = um
  modified_base 19..20: mod_base = OTHER; note = S-phosphorothioate
  modified_base 20: mod_base = um
  modified_base 20..21: mod_base = OTHER; note = S-phosphorothioate
  modified_base 21: mod_base = um
  modified_base 21..22: mod_base = OTHER; note = S-phosphorothioate
  modified_base 22: mod_base = cm
  modified_base 22..23: mod_base = OTHER; note = S-phosphorothioate
  modified_base 23: mod_base = OTHER; note = 2-fluororibose uracil
  modified_base 23..24: mod_base = OTHER; note = S-phosphorothioate
  modified_base 24: mod_base = OTHER; note = deoxyribose 6-amino-9-substituted 8,9-dihydro-7H-purin-8-one
  modified_base 24..25: mod_base = OTHER; note = S-phosphorothioate
  modified_base 25: mod_base = OTHER; note = deoxyribose inosine
  modified_base 25..26: mod_base = OTHER; note S-N-(1,3-dimethylimidazolidin-2-ylidene)phosphoramidate
  modified_base 26: mod_base = um
  modified_base 26..27: mod_base = OTHER; note = S-phosphorothioate
  modified_base 27: mod_base = cm
  modified_base 27..28: mod_base = OTHER; note = S-phosphorothioate
  modified_base 28: mod_base = gm
  modified_base 28..29: mod_base = OTHER; note = S-phosphorothioate
  modified_base 29: mod_base = OTHER; note = 2-O-methylribose adenine
  modified_base 29..30: mod_base = OTHER; note R-N-(1,3-dimethylimidazolidin-2-ylidene)phosphoramidate
  modified_base 30: mod_base = um
  source 1..30: mol_type = other RNA
cccagcagcttcagtccctttctagtcgat

SEQ ID NO: 135 - RNA, 30 nt, synthetic construct
  misc_feature 1..30: note = Synthetic: WV-42679
  misc_feature 1..30: note = Synthetic: ADR-0103734
  modified_base 1: mod_base = OTHER; note = 2-fluororibose cytosine
  modified_base 1..2: mod_base = OTHER; note R-N-(1,3-dimethylimidazolidin-2-ylidene)phosphoramidate
  modified_base 2: mod_base = OTHER; note = 2-fluororibose cytosine
  modified_base 2..3: mod_base = OTHER; note = S-phosphorothioate
  modified_base 3: mod_base = OTHER; note = 2-fluororibose cytosine
  modified_base 3..4: mod_base = OTHER; note = S-phosphorothioate
  modified_base 4: mod_base = OTHER; note = 2-fluororibose cytosine
  modified_base 4..5: mod_base = OTHER; note = S-phosphorothioate
  modified_base 5: mod_base = OTHER; note = 2-fluororibose adenine
  modified_base 5..6: mod_base = OTHER; note = S-phosphorothioate
  modified_base 6: mod_base = OTHER; note = 2-fluororibose guanine
  modified_base 6..7: mod_base = OTHER; note = S-phosphorothioate
  modified_base 7: mod_base = OTHER; note = 2-fluororibose cytosine
  modified_base 7..8: mod_base = OTHER; note = S-phosphorothioate
  modified_base 8: mod_base = OTHER; note = 2-fluororibose adenine
  modified_base 8..9: mod_base = OTHER; note = S-phosphorothioate
  modified_base 9: mod_base = OTHER; note = 2-fluororibose guanine
  modified_base 9..10: mod_base = OTHER; note = S-phosphorothioate
  modified_base 10: mod_base = OTHER; note = 2-fluororibose cytosine
  modified_base 10..11: mod_base = OTHER; note = S-phosphorothioate
  modified_base 11: mod_base = OTHER; note = 2-fluororibose uracil
  modified_base 11..12: mod_base = OTHER; note = S-phosphorothioate
  modified_base 12: mod_base = OTHER; note = 2-fluororibose uracil
  modified_base 12..13: mod_base = OTHER; note = S-phosphorothioate
  modified_base 13: mod_base = OTHER; note = 2-fluororibose cytosine
  modified_base 13..14: mod_base = OTHER; note = S-phosphorothioate
  modified_base 14: mod_base = OTHER; note = 2-fluororibose adenine
  modified_base 14..15: mod_base = OTHER; note = S-phosphorothioate
  modified_base 15: mod_base = OTHER; note = 2-fluororibose guanine
  modified_base 15..16: mod_base = OTHER; note = S-phosphorothioate
  modified_base 16: mod_base = um
  modified_base 16..17: mod_base = OTHER; note = S-phosphorothioate
  modified_base 17: mod_base = cm
  modified_base 17..18: mod_base = OTHER; note = S-phosphorothioate
  modified_base 18: mod_base = cm
  modified_base 18..19: mod_base = OTHER; note = S-phosphorothioate
  modified_base 19: mod_base = cm
  modified_base 19..20: mod_base = OTHER; note = S-phosphorothioate
  modified_base 20: mod_base = um
  modified_base 20..21: mod_base = OTHER; note = S-phosphorothioate
  modified_base 21: mod_base = um
  modified_base 21..22: mod_base = OTHER; note = S-phosphorothioate
  modified_base 22: mod_base = um
  modified_base 22..23: mod_base = OTHER; note = S-phosphorothioate
  modified_base 23: mod_base = cm
  modified_base 23..24: mod_base = OTHER; note = S-phosphorothioate
  modified_base 24: mod_base = OTHER; note = 2-fluororibose uracil
  modified_base 24..25: mod_base = OTHER; note = S-phosphorothioate
  modified_base 25: mod_base = OTHER; note = deoxyribose 6-amino-9-substituted 8,9-dihydro-7H-purin-8-one
  modified_base 25..26: mod_base = OTHER; note = S-phosphorothioate
  modified_base 26: mod_base = OTHER; note = deoxyribose inosine
  modified_base 26..27: mod_base = OTHER; note S-N-(1,3-dimethylimidazolidin-2-ylidene)phosphoramidate
  modified_base 27: mod_base = um
  modified_base 27..28: mod_base = OTHER; note = S-phosphorothioate
  modified_base 28: mod_base = cm
  modified_base 28..29: mod_base = OTHER; note = S-phosphorothioate
  modified_base 29: mod_base = gm
  modified_base 29..30: mod_base = OTHER; note R-N-(1,3-dimethylimidazolidin-2-ylidene)phosphoramidate
  modified_base 30: mod_base = OTHER; note = 2-O-methylribose adenine
  source 1..30: mol_type = other RNA
ccccagcagcttcagtccctttctagtcga

SEQ ID NO: 136 - RNA, 30 nt, synthetic construct
  misc_feature 1..30: note = Synthetic: WV-42678
  misc_feature 1..30: note = Synthetic: ADR-0103826
  modified_base 1: mod_base = OTHER; note = 2-fluororibose guanine
  modified_base 1..2: mod_base = OTHER; note R-N-(1,3-dimethylimidazolidin-2-ylidene)phosphoramidate
  modified_base 2: mod_base = OTHER; note = 2-fluororibose cytosine
  modified_base 2..3: mod_base = OTHER; note = S-phosphorothioate
  modified_base 3: mod_base = OTHER; note = 2-fluororibose cytosine
  modified_base 3..4: mod_base = OTHER; note = S-phosphorothioate
  modified_base 4: mod_base = OTHER; note = 2-fluororibose cytosine
  modified_base 4..5: mod_base = OTHER; note = S-phosphorothioate
  modified_base 5: mod_base = OTHER; note = 2-fluororibose cytosine
  modified_base 5..6: mod_base = OTHER; note = S-phosphorothioate
  modified_base 6: mod_base = OTHER; note = 2-fluororibose adenine
  modified_base 6..7: mod_base = OTHER; note = S-phosphorothioate
  modified_base 7: mod_base = OTHER; note = 2-fluororibose guanine
  modified_base 7..8: mod_base = OTHER; note = S-phosphorothioate
  modified_base 8: mod_base = OTHER; note = 2-fluororibose cytosine
  modified_base 8..9: mod_base = OTHER; note = S-phosphorothioate
  modified_base 9: mod_base = OTHER; note = 2-fluororibose adenine
  modified_base 9..10: mod_base = OTHER; note = S-phosphorothioate
  modified_base 10: mod_base = OTHER; note = 2-fluororibose guanine
  modified_base 10..11: mod_base = OTHER; note = S-phosphorothioate
  modified_base 11: mod_base = OTHER; note = 2-fluororibose cytosine
  modified_base 11..12: mod_base = OTHER; note = S-phosphorothioate
  modified_base 12: mod_base = OTHER; note = 2-fluororibose uracil
  modified_base 12..13: mod_base = OTHER; note = S-phosphorothioate
  modified_base 13: mod_base = OTHER; note = 2-fluororibose uracil
  modified_base 13..14: mod_base = OTHER; note = S-phosphorothioate
  modified_base 14: mod_base = OTHER; note = 2-fluororibose cytosine
  modified_base 14..15: mod_base = OTHER; note = S-phosphorothioate
  modified_base 15: mod_base = OTHER; note = 2-fluororibose adenine
  modified_base 15..16: mod_base = OTHER; note = S-phosphorothioate
  modified_base 16: mod_base = gm
  modified_base 16..17: mod_base = OTHER; note = S-phosphorothioate
  modified_base 17: mod_base = um
  modified_base 17..18: mod_base = OTHER; note = S-phosphorothioate
  modified_base 18: mod_base = cm
  modified_base 18..19: mod_base = OTHER; note = S-phosphorothioate
  modified_base 19: mod_base = cm
  modified_base 19..20: mod_base = OTHER; note = S-phosphorothioate
  modified_base 20: mod_base = cm
  modified_base 20..21: mod_base = OTHER; note = S-phosphorothioate
  modified_base 21: mod_base = um
  modified_base 21..22: mod_base = OTHER; note = S-phosphorothioate
  modified_base 22: mod_base = um
  modified_base 22..23: mod_base = OTHER; note = S-phosphorothioate
  modified_base 23: mod_base = um
  modified_base 23..24: mod_base = OTHER; note = S-phosphorothioate
  modified_base 24: mod_base = cm
  modified_base 24..25: mod_base = OTHER; note = S-phosphorothioate
  modified_base 25: mod_base = OTHER; note = 2-fluororibose uracil
  modified_base 25..26: mod_base = OTHER; note = S-phosphorothioate
  modified_base 26: mod_base = OTHER; note = deoxyribose 6-amino-9-substituted 8,9-dihydro-7H-purin-8-one
  modified_base 26..27: mod_base = OTHER; note = S-phosphorothioate
  modified_base 27: mod_base = OTHER; note = deoxyribose inosine
  modified_base 27..28: mod_base = OTHER; note S-N-(1,3-dimethylimidazolidin-2-ylidene)phosphoramidate
  modified_base 28: mod_base = um
  modified_base 28..29: mod_base = OTHER; note = S-phosphorothioate
  modified_base 29: mod_base = cm
  modified_base 29..30: mod_base = OTHER; note R-N-(1,3-dimethylimidazolidin-2-ylidene)phosphoramidate
  modified_base 30: mod_base = gm
  source 1..30: mol_type = other RNA
gccccagcagcttcagtccctttctagtcg

SEQ ID NO: 137 - RNA, 30 nt, synthetic construct
  misc_feature 1..30: note = Synthetic: WV-42677
  misc_feature 1..30: note = Synthetic: ADR-0103835
  modified_base 1: mod_base = OTHER; note = 2-fluororibose guanine
  modified_base 1..2: mod_base = OTHER; note R-N-(1,3-dimethylimidazolidin-2-ylidene)phosphoramidate
  modified_base 2: mod_base = OTHER; note = 2-fluororibose guanine
  modified_base 2..3: mod_base = OTHER; note = S-phosphorothioate
  modified_base 3: mod_base = OTHER; note = 2-fluororibose cytosine
  modified_base 3..4: mod_base = OTHER; note = S-phosphorothioate
  modified_base 4: mod_base = OTHER; note = 2-fluororibose cytosine
  modified_base 4..5: mod_base = OTHER; note = S-phosphorothioate
  modified_base 5: mod_base = OTHER; note = 2-fluororibose cytosine
  modified_base 5..6: mod_base = OTHER; note = S-phosphorothioate
  modified_base 6: mod_base = OTHER; note = 2-fluororibose cytosine
  modified_base 6..7: mod_base = OTHER; note = S-phosphorothioate
  modified_base 7: mod_base = OTHER; note = 2-fluororibose adenine
  modified_base 7..8: mod_base = OTHER; note = S-phosphorothioate
  modified_base 8: mod_base = OTHER; note = 2-fluororibose guanine
  modified_base 8..9: mod_base = OTHER; note = S-phosphorothioate
  modified_base 9: mod_base = OTHER; note = 2-fluororibose cytosine
  modified_base 9..10: mod_base = OTHER; note = S-phosphorothioate
  modified_base 10: mod_base = OTHER; note = 2-fluororibose adenine
  modified_base 10..11: mod_base = OTHER; note = S-phosphorothioate
  modified_base 11: mod_base = OTHER; note = 2-fluororibose guanine
  modified_base 11..12: mod_base = OTHER; note = S-phosphorothioate
  modified_base 12: mod_base = OTHER; note = 2-fluororibose cytosine
  modified_base 12..13: mod_base = OTHER; note = S-phosphorothioate
  modified_base 13: mod_base = OTHER; note = 2-fluororibose uracil
  modified_base 13..14: mod_base = OTHER; note = S-phosphorothioate
  modified_base 14: mod_base = OTHER; note = 2-fluororibose uracil
  modified_base 14..15: mod_base = OTHER; note = S-phosphorothioate
  modified_base 15: mod_base = OTHER; note = 2-fluororibose cytosine
  modified_base 15..16: mod_base = OTHER; note = S-phosphorothioate
  modified_base 16: mod_base = OTHER; note = 2-O-methylribose adenine
  modified_base 16..17: mod_base = OTHER; note = S-phosphorothioate
  modified_base 17: mod_base = gm
  modified_base 17..18: mod_base = OTHER; note = S-phosphorothioate
  modified_base 18: mod_base = um
  modified_base 18..19: mod_base = OTHER; note = S-phosphorothioate
  modified_base 19: mod_base = cm
  modified_base 19..20: mod_base = OTHER; note = S-phosphorothioate
  modified_base 20: mod_base = cm
  modified_base 20..21: mod_base = OTHER; note = S-phosphorothioate
  modified_base 21: mod_base = cm
  modified_base 21..22: mod_base = OTHER; note = S-phosphorothioate
  modified_base 22: mod_base = um
  modified_base 22..23: mod_base = OTHER; note = S-phosphorothioate
  modified_base 23: mod_base = um
  modified_base 23..24: mod_base = OTHER; note = S-phosphorothioate
  modified_base 24: mod_base = um
  modified_base 24..25: mod_base = OTHER; note = S-phosphorothioate
  modified_base 25: mod_base = cm
  modified_base 25..26: mod_base = OTHER; note = S-phosphorothioate
  modified_base 26: mod_base = OTHER; note = 2-fluororibose uracil
  modified_base 26..27: mod_base = OTHER; note = S-phosphorothioate
  modified_base 27: mod_base = OTHER; note = deoxyribose 6-amino-9-substituted 8,9-dihydro-7H-purin-8-one
  modified_base 27..28: mod_base = OTHER; note = S-phosphorothioate
  modified_base 28: mod_base = OTHER; note = deoxyribose inosine
  modified_base 28..29: mod_base = OTHER; note S-N-(1,3-dimethylimidazolidin-2-ylidene)phosphoramidate
  modified_base 29: mod_base = um
  modified_base 29..30: mod_base = OTHER; note R-N-(1,3-dimethylimidazolidin-2-ylidene)phosphoramidate
  modified_base 30: mod_base = cm
  source 1..30: mol_type = other RNA
ggccccagcagcttcagtccctttctagtc

SEQ ID NO: 138 - RNA, 30 nt, synthetic construct
  misc_feature 1..30: note = Synthetic: WV-42676
  misc_feature 1..30: note = Synthetic: ADR-0103931
  modified_base 1: mod_base = OTHER; note = 2-fluororibose uracil
  modified_base 1..2: mod_base = OTHER; note R-N-(1,3-dimethylimidazolidin-2-ylidene)phosphoramidate
  modified_base 2: mod_base = OTHER; note = 2-fluororibose guanine
  modified_base 2..3: mod_base = OTHER; note = S-phosphorothioate
  modified_base 3: mod_base = OTHER; note = 2-fluororibose guanine
  modified_base 3..4: mod_base = OTHER; note = S-phosphorothioate
  modified_base 4: mod_base = OTHER; note = 2-fluororibose cytosine
  modified_base 4..5: mod_base = OTHER; note = S-phosphorothioate
  modified_base 5: mod_base = OTHER; note = 2-fluororibose cytosine
  modified_base 5..6: mod_base = OTHER; note = S-phosphorothioate
  modified_base 6: mod_base = OTHER; note = 2-fluororibose cytosine
  modified_base 6..7: mod_base = OTHER; note = S-phosphorothioate
  modified_base 7: mod_base = OTHER; note = 2-fluororibose cytosine
  modified_base 7..8: mod_base = OTHER; note = S-phosphorothioate
  modified_base 8: mod_base = OTHER; note = 2-fluororibose adenine
  modified_base 8..9: mod_base = OTHER; note = S-phosphorothioate
  modified_base 9: mod_base = OTHER; note = 2-fluororibose guanine
  modified_base 9..10: mod_base = OTHER; note = S-phosphorothioate
  modified_base 10: mod_base = OTHER; note = 2-fluororibose cytosine
  modified_base 10..11: mod_base = OTHER; note = S-phosphorothioate
  modified_base 11: mod_base = OTHER; note = 2-fluororibose adenine
  modified_base 11..12: mod_base = OTHER; note = S-phosphorothioate
  modified_base 12: mod_base = OTHER; note = 2-fluororibose guanine
  modified_base 12..13: mod_base = OTHER; note = S-phosphorothioate
  modified_base 13: mod_base = OTHER; note = 2-fluororibose cytosine
  modified_base 13..14: mod_base = OTHER; note = S-phosphorothioate
  modified_base 14: mod_base = OTHER; note = 2-fluororibose uracil
  modified_base 14..15: mod_base = OTHER; note = S-phosphorothioate
  modified_base 15: mod_base = OTHER; note = 2-fluororibose uracil
  modified_base 15..16: mod_base = OTHER; note = S-phosphorothioate
  modified_base 16: mod_base = cm
  modified_base 16..17: mod_base = OTHER; note = S-phosphorothioate
  modified_base 17: mod_base = OTHER; note = 2-O-methylribose adenine
  modified_base 17..18: mod_base = OTHER; note = S-phosphorothioate
  modified_base 18: mod_base = gm
  modified_base 18..19: mod_base = OTHER; note = S-phosphorothioate
  modified_base 19: mod_base = um
  modified_base 19..20: mod_base = OTHER; note = S-phosphorothioate
  modified_base 20: mod_base = cm
  modified_base 20..21: mod_base = OTHER; note = S-phosphorothioate
  modified_base 21: mod_base = cm
  modified_base 21..22: mod_base = OTHER; note = S-phosphorothioate
  modified_base 22: mod_base = cm
  modified_base 22..23: mod_base = OTHER; note = S-phosphorothioate
  modified_base 23: mod_base = um
  modified_base 23..24: mod_base = OTHER; note = S-phosphorothioate
  modified_base 24: mod_base = um
  modified_base 24..25: mod_base = OTHER; note = S-phosphorothioate
  modified_base 25: mod_base = um
  modified_base 25..26: mod_base = OTHER; note = S-phosphorothioate
  modified_base 26: mod_base = cm
  modified_base 26..27: mod_base = OTHER; note = S-phosphorothioate
  modified_base 27: mod_base = OTHER; note = 2-fluororibose uracil
  modified_base 27..28: mod_base = OTHER; note = S-phosphorothioate
  modified_base 28: mod_base = OTHER; note = deoxyribose 6-amino-9-substituted 8,9-dihydro-7H-purin-8-one
  modified_base 28..29: mod_base = OTHER; note = S-phosphorothioate
  modified_base 29: mod_base = OTHER; note = deoxyribose inosine
  modified_base 29..30: mod_base = OTHER; note S-N-(1,3-dimethylimidazolidin-2-ylidene)phosphoramidate
  modified_base 30: mod_base = um
  source 1..30: mol_type = other RNA
tggccccagcagcttcagtccctttctagt

SEQ ID NO: 139 - RNA, 30 nt, synthetic construct
  misc_feature 1..30: note = Synthetic: WV-42327
  misc_feature 1..30: note = Synthetic: ADR-0103737
  modified_base 1: mod_base = OTHER; note = 2-fluororibose cytosine
  modified_base 1..2: mod_base = OTHER; note R-N-(1,3-dimethylimidazolidin-2-ylidene)phosphoramidate
  modified_base 2: mod_base = OTHER; note = 2-fluororibose cytosine
  modified_base 2..3: mod_base = OTHER; note = S-phosphorothioate
  modified_base 3: mod_base = OTHER; note = 2-fluororibose cytosine
  modified_base 3..4: mod_base = OTHER; note = S-phosphorothioate
  modified_base 4: mod_base = OTHER; note = 2-fluororibose cytosine
  modified_base 4..5: mod_base = OTHER; note = S-phosphorothioate
  modified_base 5: mod_base = OTHER; note = 2-fluororibose adenine
  modified_base 5..6: mod_base = OTHER; note = S-phosphorothioate
  modified_base 6: mod_base = OTHER; note = 2-fluororibose guanine
  modified_base 6..7: mod_base = OTHER; note = S-phosphorothioate
  modified_base 7: mod_base = OTHER; note = 2-fluororibose cytosine
  modified_base 7..8: mod_base = OTHER; note = S-phosphorothioate
  modified_base 8: mod_base = OTHER; note = 2-fluororibose adenine
  modified_base 8..9: mod_base = OTHER; note = S-phosphorothioate
  modified_base 9: mod_base = OTHER; note = 2-fluororibose guanine
  modified_base 9..10: mod_base = OTHER; note = S-phosphorothioate
  modified_base 10: mod_base = OTHER; note = 2-fluororibose cytosine
  modified_base 10..11: mod_base = OTHER; note = S-phosphorothioate
  modified_base 11: mod_base = OTHER; note = 2-fluororibose uracil
  modified_base 11..12: mod_base = OTHER; note = S-phosphorothioate
  modified_base 12: mod_base = OTHER; note = 2-fluororibose uracil
  modified_base 12..13: mod_base = OTHER; note = S-phosphorothioate
  modified_base 13: mod_base = OTHER; note = 2-fluororibose cytosine
  modified_base 13..14: mod_base = OTHER; note = S-phosphorothioate
  modified_base 14: mod_base = OTHER; note = 2-fluororibose adenine
  modified_base 14..15: mod_base = OTHER; note = S-phosphorothioate
  modified_base 15: mod_base = OTHER; note = 2-fluororibose guanine
  modified_base 15..16: mod_base = OTHER; note = S-phosphorothioate
  modified_base 16: mod_base = um
  modified_base 16..17: mod_base = OTHER; note = S-phosphorothioate
  modified_base 17: mod_base = cm
  modified_base 17..18: mod_base = OTHER; note = S-phosphorothioate
  modified_base 18: mod_base = cm
  modified_base 18..19: mod_base = OTHER; note = S-phosphorothioate
  modified_base 19: mod_base = cm
  modified_base 19..20: mod_base = OTHER; note = S-phosphorothioate
  modified_base 20: mod_base = um
  modified_base 20..21: mod_base = OTHER; note = S-phosphorothioate
  modified_base 21: mod_base = um
  modified_base 21..22: mod_base = OTHER; note = S-phosphorothioate
  modified_base 22: mod_base = um
  modified_base 22..23: mod_base = OTHER; note = S-phosphorothioate
  modified_base 23: mod_base = cm
  modified_base 23..24: mod_base = OTHER; note = S-phosphorothioate
  modified_base 24: mod_base = OTHER; note = deoxyribose thymine
  modified_base 24..25: mod_base = OTHER; note = S-phosphorothioate
  modified_base 25: mod_base = OTHER; note = deoxyribose uracil (position 3 connectivity)
  modified_base 25..26: mod_base = OTHER; note = S-phosphorothioate
  modified_base 26: mod_base = OTHER; note = deoxyribose inosine
  modified_base 26..27: mod_base = OTHER; note = N-(1,3-dimethylimidazolidin-2-ylidene)phosphoramidate
  modified_base 27: mod_base = um
  modified_base 27..28: mod_base = OTHER; note = S-phosphorothioate
  modified_base 28: mod_base = cm
  modified_base 28..29: mod_base = OTHER; note = S-phosphorothioate
  modified_base 29: mod_base = gm
  modified_base 29..30: mod_base = OTHER; note R-N-(1,3-dimethylimidazolidin-2-ylidene)phosphoramidate
  modified_base 30: mod_base = OTHER; note = 2-O-methylribose adenine
  source 1..30: mol_type = other RNA
ccccagcagcttcagtccctttcttgtcga

SEQ ID NO: 140 - RNA, 30 nt, synthetic construct; identical to SEQ ID NO: 135
  misc_feature 1..30: note = Synthetic: WV-38630
  misc_feature 1..30: note = Synthetic: ADR-0103739
  modified_base 1: mod_base = OTHER; note = 2-fluororibose cytosine
  modified_base 1..2: mod_base = OTHER; note R-N-(1,3-dimethylimidazolidin-2-ylidene)phosphoramidate
  modified_base 2: mod_base = OTHER; note = 2-fluororibose cytosine
  modified_base 2..3: mod_base = OTHER; note = S-phosphorothioate
  modified_base 3: mod_base = OTHER; note = 2-fluororibose cytosine
  modified_base 3..4: mod_base = OTHER; note = S-phosphorothioate
  modified_base 4: mod_base = OTHER; note = 2-fluororibose cytosine
  modified_base 4..5: mod_base = OTHER; note = S-phosphorothioate
  modified_base 5: mod_base = OTHER; note = 2-fluororibose adenine
  modified_base 5..6: mod_base = OTHER; note = S-phosphorothioate
  modified_base 6: mod_base = OTHER; note = 2-fluororibose guanine
  modified_base 6..7: mod_base = OTHER; note = S-phosphorothioate
  modified_base 7: mod_base = OTHER; note = 2-fluororibose cytosine
  modified_base 7..8: mod_base = OTHER; note = S-phosphorothioate
  modified_base 8: mod_base = OTHER; note = 2-fluororibose adenine
  modified_base 8..9: mod_base = OTHER; note = S-phosphorothioate
  modified_base 9: mod_base = OTHER; note = 2-fluororibose guanine
  modified_base 9..10: mod_base = OTHER; note = S-phosphorothioate
  modified_base 10: mod_base = OTHER; note = 2-fluororibose cytosine
  modified_base 10..11: mod_base = OTHER; note = S-phosphorothioate
  modified_base 11: mod_base = OTHER; note = 2-fluororibose uracil
  modified_base 11..12: mod_base = OTHER; note = S-phosphorothioate
  modified_base 12: mod_base = OTHER; note = 2-fluororibose uracil
  modified_base 12..13: mod_base = OTHER; note = S-phosphorothioate
  modified_base 13: mod_base = OTHER; note = 2-fluororibose cytosine
  modified_base 13..14: mod_base = OTHER; note = S-phosphorothioate
  modified_base 14: mod_base = OTHER; note = 2-fluororibose adenine
  modified_base 14..15: mod_base = OTHER; note = S-phosphorothioate
  modified_base 15: mod_base = OTHER; note = 2-fluororibose guanine
  modified_base 15..16: mod_base = OTHER; note = S-phosphorothioate
  modified_base 16: mod_base = um
  modified_base 16..17: mod_base = OTHER; note = S-phosphorothioate
  modified_base 17: mod_base = cm
  modified_base 17..18: mod_base = OTHER; note = S-phosphorothioate
  modified_base 18: mod_base = cm
  modified_base 18..19: mod_base = OTHER; note = S-phosphorothioate
  modified_base 19: mod_base = cm
  modified_base 19..20: mod_base = OTHER; note = S-phosphorothioate
  modified_base 20: mod_base = um
  modified_base 20..21: mod_base = OTHER; note = S-phosphorothioate
  modified_base 21: mod_base = um
  modified_base 21..22: mod_base = OTHER; note = S-phosphorothioate
  modified_base 22: mod_base = um
  modified_base 22..23: mod_base = OTHER; note = S-phosphorothioate
  modified_base 23: mod_base = cm
  modified_base 23..24: mod_base = OTHER; note = S-phosphorothioate
  modified_base 24: mod_base = OTHER; note = deoxyribose thymine
  modified_base 24..25: mod_base = OTHER; note = S-phosphorothioate
  modified_base 25: mod_base = OTHER; note = deoxyribose 6-amino-9-substituted 8,9-dihydro-7H-purin-8-one
  modified_base 25..26: mod_base = OTHER; note = S-phosphorothioate
  modified_base 26: mod_base = OTHER; note = deoxyribose inosine
  modified_base 26..27: mod_base = OTHER; note = N-(1,3-dimethylimidazolidin-2-ylidene)phosphoramidate
  modified_base 27: mod_base = um
  modified_base 27..28: mod_base = OTHER; note = S-phosphorothioate
  modified_base 28: mod_base = cm
  modified_base 28..29: mod_base = OTHER; note = S-phosphorothioate
  modified_base 29: mod_base = gm
  modified_base 29..30: mod_base = OTHER; note R-N-(1,3-dimethylimidazolidin-2-ylidene)phosphoramidate
  modified_base 30: mod_base = OTHER; note = 2-O-methylribose adenine
  source 1..30: mol_type = other RNA

SEQ ID NO: 141 - RNA, 30 nt, synthetic construct; identical to SEQ ID NO: 81
  misc_feature 1..30: note = Synthetic: WV-38629
  misc_feature 1..30: note = Synthetic: ADR-0103740
  modified_base 1: mod_base = OTHER; note = 2-fluororibose cytosine
  modified_base 1..2: mod_base = OTHER; note R-N-(1,3-dimethylimidazolidin-2-ylidene)phosphoramidate
  modified_base 2: mod_base = OTHER; note = 2-fluororibose cytosine
  modified_base 2..3: mod_base = OTHER; note = S-phosphorothioate
  modified_base 3: mod_base = OTHER; note = 2-fluororibose cytosine
  modified_base 3..4: mod_base = OTHER; note = S-phosphorothioate
  modified_base 4: mod_base = OTHER; note = 2-fluororibose cytosine
  modified_base 4..5: mod_base = OTHER; note = S-phosphorothioate
  modified_base 5: mod_base = OTHER; note = 2-fluororibose adenine
  modified_base 5..6: mod_base = OTHER; note = S-phosphorothioate
  modified_base 6: mod_base = OTHER; note = 2-fluororibose guanine
  modified_base 6..7: mod_base = OTHER; note = S-phosphorothioate
  modified_base 7: mod_base = OTHER; note = 2-fluororibose cytosine
  modified_base 7..8: mod_base = OTHER; note = S-phosphorothioate
  modified_base 8: mod_base = OTHER; note = 2-fluororibose adenine
  modified_base 8..9: mod_base = OTHER; note = S-phosphorothioate
  modified_base 9: mod_base = OTHER; note = 2-fluororibose guanine
  modified_base 9..10: mod_base = OTHER; note = S-phosphorothioate
  modified_base 10: mod_base = OTHER; note = 2-fluororibose cytosine
  modified_base 10..11: mod_base = OTHER; note = S-phosphorothioate
  modified_base 11: mod_base = OTHER; note = 2-fluororibose uracil
  modified_base 11..12: mod_base = OTHER; note = S-phosphorothioate
  modified_base 12: mod_base = OTHER; note = 2-fluororibose uracil
  modified_base 12..13: mod_base = OTHER; note = S-phosphorothioate
  modified_base 13: mod_base = OTHER; note = 2-fluororibose cytosine
  modified_base 13..14: mod_base = OTHER; note = S-phosphorothioate
  modified_base 14: mod_base = OTHER; note = 2-fluororibose adenine
  modified_base 14..15: mod_base = OTHER; note = S-phosphorothioate
  modified_base 15: mod_base = OTHER; note = 2-fluororibose guanine
  modified_base 15..16: mod_base = OTHER; note = S-phosphorothioate
  modified_base 16: mod_base = um
  modified_base 16..17: mod_base = OTHER; note = S-phosphorothioate
  modified_base 17: mod_base = cm
  modified_base 17..18: mod_base = OTHER; note = S-phosphorothioate
  modified_base 18: mod_base = cm
  modified_base 18..19: mod_base = OTHER; note = S-phosphorothioate
  modified_base 19: mod_base = cm
  modified_base 19..20: mod_base = OTHER; note = S-phosphorothioate
  modified_base 20: mod_base = um
  modified_base 20..21: mod_base = OTHER; note = S-phosphorothioate
  modified_base 21: mod_base = um
  modified_base 21..22: mod_base = OTHER; note = S-phosphorothioate
  modified_base 22: mod_base = um
  modified_base 22..23: mod_base = OTHER; note = S-phosphorothioate
  modified_base 23: mod_base = cm
  modified_base 23..24: mod_base = OTHER; note = S-phosphorothioate
  modified_base 24: mod_base = OTHER; note = deoxyribose thymine
  modified_base 24..25: mod_base = OTHER; note = S-phosphorothioate
  modified_base 25..26: mod_base = OTHER; note = S-phosphorothioate
  modified_base 26: mod_base = OTHER; note = deoxyribose inosine
  modified_base 26..27: mod_base = OTHER; note = N-(1,3-dimethylimidazolidin-2-ylidene)phosphoramidate
  modified_base 27: mod_base = um
  modified_base 27..28: mod_base = OTHER; note = S-phosphorothioate
  modified_base 28: mod_base = cm
  modified_base 28..29: mod_base = OTHER; note = S-phosphorothioate
  modified_base 29: mod_base = gm
  modified_base 29..30: mod_base = OTHER; note R-N-(1,3-dimethylimidazolidin-2-ylidene)phosphoramidate
  modified_base 30: mod_base = OTHER; note = 2-O-methylribose adenine
  source 1..30: mol_type = other RNA

SEQ ID NO: 142 - RNA, 30 nt, synthetic construct; identical to SEQ ID NO: 139
  misc_feature 1..30: note = Synthetic: WV-42328
  misc_feature 1..30: note = Synthetic: ADR-0103747
  modified_base 1: mod_base = OTHER; note = 2-fluororibose cytosine
  modified_base 1..2: mod_base = OTHER; note R-N-(1,3-dimethylimidazolidin-2-ylidene)phosphoramidate
  modified_base 2: mod_base = OTHER; note = 2-fluororibose cytosine
  modified_base 2..3: mod_base = OTHER; note = S-phosphorothioate
  modified_base 3: mod_base = OTHER; note = 2-fluororibose cytosine
  modified_base 3..4: mod_base = OTHER; note = S-phosphorothioate
  modified_base 4: mod_base = OTHER; note = 2-fluororibose cytosine
  modified_base 4..5: mod_base = OTHER; note = S-phosphorothioate
  modified_base 5: mod_base = OTHER; note = 2-fluororibose adenine
  modified_base 5..6: mod_base = OTHER; note = S-phosphorothioate
  modified_base 6: mod_base = OTHER; note = 2-fluororibose guanine
  modified_base 6..7: mod_base = OTHER; note = S-phosphorothioate
  modified_base 7: mod_base = OTHER; note = 2-fluororibose cytosine
  modified_base 7..8: mod_base = OTHER; note = S-phosphorothioate
  modified_base 8: mod_base = OTHER; note = 2-fluororibose adenine
  modified_base 8..9: mod_base = OTHER; note = S-phosphorothioate
  modified_base 9: mod_base = OTHER; note = 2-fluororibose guanine
  modified_base 9..10: mod_base = OTHER; note = S-phosphorothioate
  modified_base 10: mod_base = OTHER; note = 2-fluororibose cytosine
  modified_base 10..11: mod_base = OTHER; note = S-phosphorothioate
  modified_base 11: mod_base = OTHER; note = 2-fluororibose uracil
  modified_base 11..12: mod_base = OTHER; note = S-phosphorothioate
  modified_base 12: mod_base = OTHER; note = 2-fluororibose uracil
  modified_base 12..13: mod_base = OTHER; note = S-phosphorothioate
  modified_base 13: mod_base = OTHER; note = 2-fluororibose cytosine
  modified_base 13..14: mod_base = OTHER; note = S-phosphorothioate
  modified_base 14: mod_base = OTHER; note = 2-fluororibose adenine
  modified_base 14..15: mod_base = OTHER; note R-N-(1,3-dimethylimidazolidin-2-ylidene)phosphoramidate
  modified_base 15: mod_base = OTHER; note = 2-fluororibose guanine
  modified_base 15..16: mod_base = OTHER; note = S-phosphorothioate
  modified_base 16: mod_base = um
  modified_base 16..17: mod_base = OTHER; note R-N-(1,3-dimethylimidazolidin-2-ylidene)phosphoramidate
  modified_base 17: mod_base = cm
  modified_base 17..18: mod_base = OTHER; note = S-phosphorothioate
  modified_base 18: mod_base = cm
  modified_base 18..19: mod_base = OTHER; note = S-phosphorothioate
  modified_base 19: mod_base = cm
  modified_base 19..20: mod_base = OTHER; note = S-phosphorothioate
  modified_base 20: mod_base = um
  modified_base 20..21: mod_base = OTHER; note = S-phosphorothioate
  modified_base 21: mod_base = um
  modified_base 21..22: mod_base = OTHER; note = S-phosphorothioate
  modified_base 22: mod_base = um
  modified_base 22..23: mod_base = OTHER; note = S-phosphorothioate
  modified_base 23: mod_base = cm
  modified_base 23..24: mod_base = OTHER; note = S-phosphorothioate
  modified_base 24: mod_base = OTHER; note = deoxyribose thymine
  modified_base 24..25: mod_base = OTHER; note = S-phosphorothioate
  modified_base 25: mod_base = OTHER; note = deoxyribose uracil (position 3 connectivity)
  modified_base 25..26: mod_base = OTHER; note = S-phosphorothioate
  modified_base 26: mod_base = OTHER; note = deoxyribose inosine
  modified_base 26..27: mod_base = OTHER; note = N-(1,3-dimethylimidazolidin-2-ylidene)phosphoramidate
  modified_base 27: mod_base = um
  modified_base 27..28: mod_base = OTHER; note = S-phosphorothioate
  modified_base 28: mod_base = cm
  modified_base 28..29: mod_base = OTHER; note = S-phosphorothioate
  modified_base 29: mod_base = gm
  modified_base 29..30: mod_base = OTHER; note R-N-(1,3-dimethylimidazolidin-2-ylidene)phosphoramidate
  modified_base 30: mod_base = OTHER; note = 2-O-methylribose adenine
  source 1..30: mol_type = other RNA

SEQ ID NO: 143 - RNA, 30 nt, synthetic construct; identical to SEQ ID NO: 139
  misc_feature 1..30: note = Synthetic: WV-38923
  misc_feature 1..30: note = Synthetic: ADR-0103749
  modified_base 1: mod_base = OTHER; note = 2-fluororibose cytosine
  modified_base 1..2: mod_base = OTHER; note R-N-(1,3-dimethylimidazolidin-2-ylidene)phosphoramidate
  modified_base 2: mod_base = OTHER; note = 2-fluororibose cytosine
  modified_base 2..3: mod_base = OTHER; note = S-phosphorothioate
  modified_base 3: mod_base = OTHER; note = 2-fluororibose cytosine
  modified_base 3..4: mod_base = OTHER; note = S-phosphorothioate
  modified_base 4: mod_base = OTHER; note = 2-fluororibose cytosine
  modified_base 4..5: mod_base = OTHER; note = S-phosphorothioate
  modified_base 5: mod_base = OTHER; note = 2-fluororibose adenine
  modified_base 5..6: mod_base = OTHER; note = S-phosphorothioate
  modified_base 6: mod_base = OTHER; note = 2-fluororibose guanine
  modified_base 6..7: mod_base = OTHER; note = S-phosphorothioate
  modified_base 7: mod_base = OTHER; note = 2-fluororibose cytosine
  modified_base 7..8: mod_base = OTHER; note = S-phosphorothioate
  modified_base 8: mod_base = OTHER; note = 2-fluororibose adenine
  modified_base 8..9: mod_base = OTHER; note = S-phosphorothioate
  modified_base 9: mod_base = OTHER; note = 2-fluororibose guanine
  modified_base 9..10: mod_base = OTHER; note = S-phosphorothioate
  modified_base 10: mod_base = OTHER; note = 2-fluororibose cytosine
  modified_base 10..11: mod_base = OTHER; note = S-phosphorothioate
  modified_base 11: mod_base = OTHER; note = 2-fluororibose uracil
  modified_base 11..12: mod_base = OTHER; note = S-phosphorothioate
  modified_base 12: mod_base = OTHER; note = 2-fluororibose uracil
  modified_base 12..13: mod_base = OTHER; note = S-phosphorothioate
  modified_base 13: mod_base = OTHER; note = 2-fluororibose cytosine
  modified_base 13..14: mod_base = OTHER; note = S-phosphorothioate
  modified_base 14: mod_base = OTHER; note = 2-fluororibose adenine
  modified_base 14..15: mod_base = OTHER; note R-N-(1,3-dimethylimidazolidin-2-ylidene)phosphoramidate
  modified_base 15: mod_base = OTHER; note = 2-fluororibose guanine
  modified_base 15..16: mod_base = OTHER; note = S-phosphorothioate
  modified_base 16: mod_base = um
  modified_base 16..17: mod_base = OTHER; note R-N-(1,3-dimethylimidazolidin-2-ylidene)phosphoramidate
  modified_base 17: mod_base = cm
  modified_base 17..18: mod_base = OTHER; note = S-phosphorothioate
  modified_base 18: mod_base = cm
  modified_base 18..19: mod_base = OTHER; note = S-phosphorothioate
  modified_base 19: mod_base = cm
  modified_base 19..20: mod_base = OTHER; note = S-phosphorothioate
  modified_base 20: mod_base = um
  modified_base 20..21: mod_base = OTHER; note = S-phosphorothioate
  modified_base 21: mod_base = um
  modified_base 21..22: mod_base = OTHER; note = S-phosphorothioate
  modified_base 22: mod_base = um
  modified_base 22..23: mod_base = OTHER; note = S-phosphorothioate
  modified_base 23: mod_base = cm
  modified_base 23..24: mod_base = OTHER; note = S-phosphorothioate
  modified_base 24: mod_base = OTHER; note = deoxyribose thymine
  modified_base 24..25: mod_base = OTHER; note = S-phosphorothioate
  modified_base 25: mod_base = OTHER; note = deoxyribose uracil (position 3 connectivity)
  modified_base 25..26: mod_base = OTHER; note = phosphorothioate
  modified_base 26: mod_base = OTHER; note = deoxyribose guanine
  modified_base 26..27: mod_base = OTHER; note = N-(1,3-dimethylimidazolidin-2-ylidene)phosphoramidate
  modified_base 27: mod_base = um
  modified_base 27..28: mod_base = OTHER; note = S-phosphorothioate
  modified_base 28: mod_base = cm
  modified_base 28..29: mod_base = OTHER; note = S-phosphorothioate
  modified_base 29: mod_base = gm
  modified_base 29..30: mod_base = OTHER; note R-N-(1,3-dimethylimidazolidin-2-ylidene)phosphoramidate
  modified_base 30: mod_base = OTHER; note = 2-O-methylribose adenine
  source 1..30: mol_type = other RNA

SEQ ID NO: 144 - RNA, 30 nt, synthetic construct; identical to SEQ ID NO: 135
  misc_feature 1..30: note = Synthetic: WV-38622
  misc_feature 1..30: note = Synthetic: ADR-0103753
  modified_base 1: mod_base = OTHER; note = 2-fluororibose cytosine
  modified_base 1..2: mod_base = OTHER; note R-N-(1,3-dimethylimidazolidin-2-ylidene)phosphoramidate
  modified_base 2: mod_base = OTHER; note = 2-fluororibose cytosine
  modified_base 2..3: mod_base = OTHER; note = S-phosphorothioate
  modified_base 3: mod_base = OTHER; note = 2-fluororibose cytosine
  modified_base 3..4: mod_base = OTHER; note = S-phosphorothioate
  modified_base 4: mod_base = OTHER; note = 2-fluororibose cytosine
  modified_base 4..5: mod_base = OTHER; note = S-phosphorothioate
  modified_base 5: mod_base = OTHER; note = 2-fluororibose adenine
  modified_base 5..6: mod_base = OTHER; note = S-phosphorothioate
  modified_base 6: mod_base = OTHER; note = 2-fluororibose guanine
  modified_base 6..7: mod_base = OTHER; note = S-phosphorothioate
  modified_base 7: mod_base = OTHER; note = 2-fluororibose cytosine
  modified_base 7..8: mod_base = OTHER; note = S-phosphorothioate
  modified_base 8: mod_base = OTHER; note = 2-fluororibose adenine
  modified_base 8..9: mod_base = OTHER; note = S-phosphorothioate
  modified_base 9: mod_base = OTHER; note = 2-fluororibose guanine
  modified_base 9..10: mod_base = OTHER; note = S-phosphorothioate
  modified_base 10: mod_base = OTHER; note = 2-fluororibose cytosine
  modified_base 10..11: mod_base = OTHER; note = S-phosphorothioate
  modified_base 11: mod_base = OTHER; note = 2-fluororibose uracil
  modified_base 11..12: mod_base = OTHER; note = S-phosphorothioate
  modified_base 12: mod_base = OTHER; note = 2-fluororibose uracil
  modified_base 12..13: mod_base = OTHER; note = S-phosphorothioate
  modified_base 13: mod_base = OTHER; note = 2-fluororibose cytosine
  modified_base 13..14: mod_base = OTHER; note = S-phosphorothioate
  modified_base 14: mod_base = OTHER; note = 2-fluororibose adenine
  modified_base 14..15: mod_base = OTHER; note R-N-(1,3-dimethylimidazolidin-2-ylidene)phosphoramidate
  modified_base 15: mod_base = OTHER; note = 2-fluororibose guanine
  modified_base 15..16: mod_base = OTHER; note = S-phosphorothioate
  modified_base 16: mod_base = um
  modified_base 16..17: mod_base = OTHER; note R-N-(1,3-dimethylimidazolidin-2-ylidene)phosphoramidate
  modified_base 17: mod_base = cm
  modified_base 17..18: mod_base = OTHER; note = S-phosphorothioate
  modified_base 18: mod_base = cm
  modified_base 18..19: mod_base = OTHER; note = S-phosphorothioate
  modified_base 19: mod_base = cm
  modified_base 19..20: mod_base = OTHER; note = S-phosphorothioate
  modified_base 20: mod_base = um
  modified_base 20..21: mod_base = OTHER; note = S-phosphorothioate
  modified_base 21: mod_base = um
  modified_base 21..22: mod_base = OTHER; note = S-phosphorothioate
  modified_base 22: mod_base = um
  modified_base 22..23: mod_base = OTHER; note = S-phosphorothioate
  modified_base 23: mod_base = cm
  modified_base 23..24: mod_base = OTHER; note = S-phosphorothioate
  modified_base 24: mod_base = OTHER; note = deoxyribose thymine
  modified_base 24..25: mod_base = OTHER; note = S-phosphorothioate
  modified_base 25: mod_base = OTHER; note = deoxyribose 6-amino-9-substituted 8,9-dihydro-7H-purin-8-one
  modified_base 25..26: mod_base = OTHER; note = S-phosphorothioate
  modified_base 26: mod_base = OTHER; note = deoxyribose inosine
  modified_base 26..27: mod_base = OTHER; note = N-(1,3-dimethylimidazolidin-2-ylidene)phosphoramidate
  modified_base 27: mod_base = um
  modified_base 27..28: mod_base = OTHER; note = S-phosphorothioate
  modified_base 28: mod_base = cm
  modified_base 28..29: mod_base = OTHER; note = S-phosphorothioate
  modified_base 29: mod_base = gm
  modified_base 29..30: mod_base = OTHER; note R-N-(1,3-dimethylimidazolidin-2-ylidene)phosphoramidate
  modified_base 30: mod_base = OTHER; note = 2-O-methylribose adenine
  source 1..30: mol_type = other RNA

SEQ ID NO: 145 - RNA, 30 nt, synthetic construct; identical to SEQ ID NO: 81
  misc_feature 1..30: note = Synthetic: WV-38621
  misc_feature 1..30: note = Synthetic: ADR-0103754
  modified_base 1: mod_base = OTHER; note = 2-fluororibose cytosine
  modified_base 1..2: mod_base = OTHER; note R-N-(1,3-dimethylimidazolidin-2-ylidene)phosphoramidate
  modified_base 2: mod_base = OTHER; note = 2-fluororibose cytosine
  modified_base 2..3: mod_base = OTHER; note = S-phosphorothioate
  modified_base 3: mod_base = OTHER; note = 2-fluororibose cytosine
  modified_base 3..4: mod_base = OTHER; note = S-phosphorothioate
  modified_base 4: mod_base = OTHER; note = 2-fluororibose cytosine
  modified_base 4..5: mod_base = OTHER; note = S-phosphorothioate
  modified_base 5: mod_base = OTHER; note = 2-fluororibose adenine
  modified_base 5..6: mod_base = OTHER; note = S-phosphorothioate
  modified_base 6: mod_base = OTHER; note = 2-fluororibose guanine
  modified_base 6..7: mod_base = OTHER; note = S-phosphorothioate
  modified_base 7: mod_base = OTHER; note = 2-fluororibose cytosine
  modified_base 7..8: mod_base = OTHER; note = S-phosphorothioate
  modified_base 8: mod_base = OTHER; note = 2-fluororibose adenine
  modified_base 8..9: mod_base = OTHER; note = S-phosphorothioate
  modified_base 9: mod_base = OTHER; note = 2-fluororibose guanine
  modified_base 9..10: mod_base = OTHER; note = S-phosphorothioate
  modified_base 10: mod_base = OTHER; note = 2-fluororibose cytosine
  modified_base 10..11: mod_base = OTHER; note = S-phosphorothioate
  modified_base 11: mod_base = OTHER; note = 2-fluororibose uracil
  modified_base 11..12: mod_base = OTHER; note = S-phosphorothioate
  modified_base 12: mod_base = OTHER; note = 2-fluororibose uracil
  modified_base 12..13: mod_base = OTHER; note = S-phosphorothioate
  modified_base 13: mod_base = OTHER; note = 2-fluororibose cytosine
  modified_base 13..14: mod_base = OTHER; note = S-phosphorothioate
  modified_base 14: mod_base = OTHER; note = 2-fluororibose adenine
  modified_base 14..15: mod_base = OTHER; note R-N-(1,3-dimethylimidazolidin-2-ylidene)phosphoramidate
  modified_base 15: mod_base = OTHER; note = 2-fluororibose guanine
  modified_base 15..16: mod_base = OTHER; note = S-phosphorothioate
  modified_base 16: mod_base = um
  modified_base 16..17: mod_base = OTHER; note R-N-(1,3-dimethylimidazolidin-2-ylidene)phosphoramidate
  modified_base 17: mod_base = cm
  modified_base 17..18: mod_base = OTHER; note = S-phosphorothioate
  modified_base 18: mod_base = cm
  modified_base 18..19: mod_base = OTHER; note = S-phosphorothioate
  modified_base 19: mod_base = cm
  modified_base 19..20: mod_base = OTHER; note = S-phosphorothioate
  modified_base 20: mod_base = um
  modified_base 20..21: mod_base = OTHER; note = S-phosphorothioate
  modified_base 21: mod_base = um
  modified_base 21..22: mod_base = OTHER; note = S-phosphorothioate
  modified_base 22: mod_base = um
  modified_base 22..23: mod_base = OTHER; note = S-phosphorothioate
  modified_base 23: mod_base = cm
  modified_base 23..24: mod_base = OTHER; note = S-phosphorothioate
  modified_base 24: mod_base = OTHER; note = deoxyribose thymine
  modified_base 24..25: mod_base = OTHER; note = S-phosphorothioate
  modified_base 25..26: mod_base = OTHER; note = S-phosphorothioate
  modified_base 26: mod_base = OTHER; note = deoxyribose inosine
  modified_base 26..27: mod_base = OTHER; note = N-(1,3-dimethylimidazolidin-2-ylidene)phosphoramidate
  modified_base 27: mod_base = um
  modified_base 27..28: mod_base = OTHER; note = S-phosphorothioate
  modified_base 28: mod_base = cm
  modified_base 28..29: mod_base = OTHER; note = S-phosphorothioate
  modified_base 29: mod_base = gm
  modified_base 29..30: mod_base = OTHER; note R-N-(1,3-dimethylimidazolidin-2-ylidene)phosphoramidate
  modified_base 30: mod_base = OTHER; note = 2-O-methylribose adenine
  source 1..30: mol_type = other RNA

SEQ ID NO: 146 - RNA, 30 nt, synthetic construct; identical to SEQ ID NO: 81
  misc_feature 1..30: note = Synthetic: WV-38620
  misc_feature 1..30: note = Synthetic: ADR-0103746
  modified_base 1: mod_base = OTHER; note = 2-fluororibose cytosine
  modified_base 1..2: mod_base = OTHER; note R-N-(1,3-dimethylimidazolidin-2-ylidene)phosphoramidate
  modified_base 2: mod_base = OTHER; note = 2-fluororibose cytosine
  modified_base 2..3: mod_base = OTHER; note = S-phosphorothioate
  modified_base 3: mod_base = OTHER; note = 2-fluororibose cytosine
  modified_base 3..4: mod_base = OTHER; note = S-phosphorothioate
  modified_base 4: mod_base = OTHER; note = 2-fluororibose cytosine
  modified_base 4..5: mod_base = OTHER; note = S-phosphorothioate
  modified_base 5: mod_base = OTHER; note = 2-fluororibose adenine
  modified_base 5..6: mod_base = OTHER; note = S-phosphorothioate
  modified_base 6: mod_base = OTHER; note = 2-fluororibose guanine
  modified_base 6..7: mod_base = OTHER; note = S-phosphorothioate
  modified_base 7: mod_base = OTHER; note = 2-fluororibose cytosine
  modified_base 7..8: mod_base = OTHER; note = S-phosphorothioate
  modified_base 8: mod_base = OTHER; note = 2-fluororibose adenine
  modified_base 8..9: mod_base = OTHER; note = S-phosphorothioate
  modified_base 9: mod_base = OTHER; note = 2-fluororibose guanine
  modified_base 9..10: mod_base = OTHER; note = S-phosphorothioate
  modified_base 10: mod_base = OTHER; note = 2-fluororibose cytosine
  modified_base 10..11: mod_base = OTHER; note = S-phosphorothioate
  modified_base 11: mod_base = OTHER; note = 2-fluororibose uracil
  modified_base 11..12: mod_base = OTHER; note = S-phosphorothioate
  modified_base 12: mod_base = OTHER; note = 2-fluororibose uracil
  modified_base 12..13: mod_base = OTHER; note = S-phosphorothioate
  modified_base 13: mod_base = OTHER; note = 2-fluororibose cytosine
  modified_base 13..14: mod_base = OTHER; note = S-phosphorothioate
  modified_base 14: mod_base = OTHER; note = 2-fluororibose adenine
  modified_base 14..15: mod_base = OTHER; note R-N-(1,3-dimethylimidazolidin-2-ylidene)phosphoramidate
  modified_base 15: mod_base = OTHER; note = 2-fluororibose guanine
  modified_base 15..16: mod_base = OTHER; note = S-phosphorothioate
  modified_base 16: mod_base = um
  modified_base 16..17: mod_base = OTHER; note R-N-(1,3-dimethylimidazolidin-2-ylidene)phosphoramidate
  modified_base 17: mod_base = cm
  modified_base 17..18: mod_base = OTHER; note = S-phosphorothioate
  modified_base 18: mod_base = cm
  modified_base 18..19: mod_base = OTHER; note = S-phosphorothioate
  modified_base 19: mod_base = cm
  modified_base 19..20: mod_base = OTHER; note = S-phosphorothioate
  modified_base 20: mod_base = um
  modified_base 20..21: mod_base = OTHER; note = S-phosphorothioate
  modified_base 21: mod_base = um
  modified_base 21..22: mod_base = OTHER; note = S-phosphorothioate
  modified_base 22: mod_base = um
  modified_base 22..23: mod_base = OTHER; note = S-phosphorothioate
  modified_base 23: mod_base = cm
  modified_base 23..24: mod_base = OTHER; note = S-phosphorothioate
  modified_base 24: mod_base = OTHER; note = deoxyribose thymine
  modified_base 24..25: mod_base = OTHER; note = S-phosphorothioate
  modified_base 25: mod_base = OTHER; note = deoxyribose cytosine
  modified_base 25..26: mod_base = OTHER; note = S-phosphorothioate
  modified_base 26: mod_base = OTHER; note = deoxyribose inosine
  modified_base 26..27: mod_base = OTHER; note = N-(1,3-dimethylimidazolidin-2-ylidene)phosphoramidate
  modified_base 27: mod_base = um
  modified_base 27..28: mod_base = OTHER; note = S-phosphorothioate
  modified_base 28: mod_base = cm
  modified_base 28..29: mod_base = OTHER; note = S-phosphorothioate
  modified_base 29: mod_base = gm
  modified_base 29..30: mod_base = OTHER; note R-N-(1,3-dimethylimidazolidin-2-ylidene)phosphoramidate
  modified_base 30: mod_base = OTHER; note = 2-O-methylribose adenine
  source 1..30: mol_type = other RNA

SEQ ID NO: 147 - RNA, 30 nt, synthetic construct; identical to SEQ ID NO: 135
  misc_feature 1..30: note = Synthetic: WV-42600
  misc_feature 1..30: note = Synthetic: ADR-0100432
  modified_base 1: mod_base = OTHER; note = triantennary GalNAc with C12 linker linked to 6-aminohexanol linked by phosphate to the 5' end of 2-fluororibose cytosine
  modified_base 1..2: mod_base = OTHER; note R-N-(1,3-dimethylimidazolidin-2-ylidene)phosphoramidate
  modified_base 2: mod_base = OTHER; note = 2-fluororibose cytosine
  modified_base 2..3: mod_base = OTHER; note = S-phosphorothioate
  modified_base 3: mod_base = OTHER; note = 2-fluororibose cytosine
  modified_base 3..4: mod_base = OTHER; note = S-phosphorothioate
  modified_base 4: mod_base = OTHER; note = 2-fluororibose cytosine
  modified_base 4..5: mod_base = OTHER; note = S-phosphorothioate
  modified_base 5: mod_base = OTHER; note = 2-fluororibose adenine
  modified_base 5..6: mod_base = OTHER; note = S-phosphorothioate
  modified_base 6: mod_base = OTHER; note = 2-fluororibose guanine
  modified_base 6..7: mod_base = OTHER; note = S-phosphorothioate
  modified_base 7: mod_base = OTHER; note = 2-fluororibose cytosine
  modified_base 7..8: mod_base = OTHER; note = S-phosphorothioate
  modified_base 8: mod_base = OTHER; note = 2-fluororibose adenine
  modified_base 8..9: mod_base = OTHER; note = S-phosphorothioate
  modified_base 9: mod_base = OTHER; note = 2-fluororibose guanine
  modified_base 9..10: mod_base = OTHER; note = S-phosphorothioate
  modified_base 10: mod_base = OTHER; note = 2-fluororibose cytosine
  modified_base 10..11: mod_base = OTHER; note = S-phosphorothioate
  modified_base 11: mod_base = OTHER; note = 2-fluororibose uracil
  modified_base 11..12: mod_base = OTHER; note = S-phosphorothioate
  modified_base 12: mod_base = OTHER; note = 2-fluororibose uracil
  modified_base 12..13: mod_base = OTHER; note = S-phosphorothioate
  modified_base 13: mod_base = OTHER; note = 2-fluororibose cytosine
  modified_base 13..14: mod_base = OTHER; note = S-phosphorothioate
  modified_base 14: mod_base = OTHER; note = 2-fluororibose adenine
  modified_base 14..15: mod_base = OTHER; note R-N-(1,3-dimethylimidazolidin-2-ylidene)phosphoramidate
  modified_base 15: mod_base = OTHER; note = 2-fluororibose guanine
  modified_base 15..16: mod_base = OTHER; note = S-phosphorothioate
  modified_base 16: mod_base = um
  modified_base 16..17: mod_base = OTHER; note R-N-(1,3-dimethylimidazolidin-2-ylidene)phosphoramidate
  modified_base 17: mod_base = cm
  modified_base 17..18: mod_base = OTHER; note = S-phosphorothioate
  modified_base 18: mod_base = cm
  modified_base 18..19: mod_base = OTHER; note = S-phosphorothioate
  modified_base 19: mod_base = cm
  modified_base 19..20: mod_base = OTHER; note = S-phosphorothioate
  modified_base 20: mod_base = um
  modified_base 20..21: mod_base = OTHER; note = S-phosphorothioate
  modified_base 21: mod_base = um
  modified_base 21..22: mod_base = OTHER; note = S-phosphorothioate
  modified_base 22: mod_base = um
  modified_base 22..23: mod_base = OTHER; note = S-phosphorothioate
  modified_base 23: mod_base = cm
  modified_base 23..24: mod_base = OTHER; note = S-phosphorothioate
  modified_base 24: mod_base = OTHER; note = deoxyribose thymine
  modified_base 24..25: mod_base = OTHER; note = S-phosphorothioate
  modified_base 25: mod_base = OTHER; note = deoxyribose 6-amino-9-substituted 8,9-dihydro-7H-purin-8-one
  modified_base 25..26: mod_base = OTHER; note = S-phosphorothioate
  modified_base 26: mod_base = OTHER; note = deoxyribose inosine
  modified_base 26..27: mod_base = OTHER; note S-N-(1,3-dimethylimidazolidin-2-ylidene)phosphoramidate
  modified_base 27: mod_base = um
  modified_base 27..28: mod_base = OTHER; note = S-phosphorothioate
  modified_base 28: mod_base = cm
  modified_base 28..29: mod_base = OTHER; note = S-phosphorothioate
  modified_base 29: mod_base = gm
  modified_base 29..30: mod_base = OTHER; note R-N-(1,3-dimethylimidazolidin-2-ylidene)phosphoramidate
  modified_base 30: mod_base = OTHER; note = 2-O-methylribose adenine
  source 1..30: mol_type = other RNA

SEQ ID NO: 148 - RNA, 30 nt, synthetic construct; identical to SEQ ID NO: 134
  misc_feature 1..30: note = Synthetic: WV-42960
  misc_feature 1..30: note = Synthetic: ADR-0100464
  modified_base 1: mod_base = OTHER; note = triantennary GalNAc with C12 linker linked to 6-aminohexanol linked by phosphate to the 5' end of 2-fluororibose cytosine
  modified_base 1..2: mod_base = OTHER; note R-N-(1,3-dimethylimidazolidin-2-ylidene)phosphoramidate
  modified_base 2: mod_base = OTHER; note = 2-fluororibose cytosine
  modified_base 2..3: mod_base = OTHER; note = S-phosphorothioate
  modified_base 3: mod_base = OTHER; note = 2-fluororibose cytosine
  modified_base 3..4: mod_base = OTHER; note = S-phosphorothioate
  modified_base 4: mod_base = OTHER; note = 2-fluororibose adenine
  modified_base 4..5: mod_base = OTHER; note = S-phosphorothioate
  modified_base 5: mod_base = OTHER; note = 2-fluororibose guanine
  modified_base 5..6: mod_base = OTHER; note = S-phosphorothioate
  modified_base 6: mod_base = OTHER; note = 2-fluororibose cytosine
  modified_base 6..7: mod_base = OTHER; note = S-phosphorothioate
  modified_base 7: mod_base = OTHER; note = 2-fluororibose adenine
  modified_base 7..8: mod_base = OTHER; note = S-phosphorothioate
  modified_base 8: mod_base = OTHER; note = 2-fluororibose guanine
  modified_base 8..9: mod_base = OTHER; note = S-phosphorothioate
  modified_base 9: mod_base = OTHER; note = 2-fluororibose cytosine
  modified_base 9..10: mod_base = OTHER; note = S-phosphorothioate
  modified_base 10: mod_base = OTHER; note = 2-fluororibose uracil
  modified_base 10..11: mod_base = OTHER; note = S-phosphorothioate
  modified_base 11: mod_base = OTHER; note = 2-fluororibose uracil
  modified_base 11..12: mod_base = OTHER; note = S-phosphorothioate
  modified_base 12: mod_base = OTHER; note = 2-fluororibose cytosine
  modified_base 12..13: mod_base = OTHER; note = S-phosphorothioate
  modified_base 13: mod_base = OTHER; note = 2-fluororibose adenine
  modified_base 13..14: mod_base = OTHER; note = S-phosphorothioate
  modified_base 14: mod_base = OTHER; note = 2-fluororibose guanine
  modified_base 14..15: mod_base = OTHER; note R-N-(1,3-dimethylimidazolidin-2-ylidene)phosphoramidate
  modified_base 15: mod_base = OTHER; note = 2-fluororibose uracil
  modified_base 15..16: mod_base = OTHER; note = S-phosphorothioate
  modified_base 16: mod_base = cm
  modified_base 16..17: mod_base = OTHER; note R-N-(1,3-dimethylimidazolidin-2-ylidene)phosphoramidate
  modified_base 17: mod_base = cm
  modified_base 17..18: mod_base = OTHER; note = S-phosphorothioate
  modified_base 18: mod_base = cm
  modified_base 18..19: mod_base = OTHER; note = S-phosphorothioate
  modified_base 19: mod_base = um
  modified_base 19..20: mod_base = OTHER; note = S-phosphorothioate
  modified_base 20: mod_base = um
  modified_base 20..21: mod_base = OTHER; note = S-phosphorothioate
  modified_base 21: mod_base = um
  modified_base 21..22: mod_base = OTHER; note = S-phosphorothioate
  modified_base 22: mod_base = cm
  modified_base 22..23: mod_base = OTHER; note = S-phosphorothioate
  modified_base 23: mod_base = OTHER; note = 2-fluororibose uracil
  modified_base 23..24: mod_base = OTHER; note = S-phosphorothioate
  modified_base 24: mod_base = OTHER; note = deoxyribose 6-amino-9-substituted 8,9-dihydro-7H-purin-8-one
  modified_base 24..25: mod_base = OTHER; note = S-phosphorothioate
  modified_base 25: mod_base = OTHER; note = deoxyribose inosine
  modified_base 25..26: mod_base = OTHER; note S-N-(1,3-dimethylimidazolidin-2-ylidene)phosphoramidate
  modified_base 26: mod_base = um
  modified_base 26..27: mod_base = OTHER; note = S-phosphorothioate
  modified_base 27: mod_base = cm
  modified_base 27..28: mod_base = OTHER; note = S-phosphorothioate
  modified_base 28: mod_base = gm
  modified_base 28..29: mod_base = OTHER; note = S-phosphorothioate
  modified_base 29: mod_base = OTHER; note = 2-O-methylribose adenine
  modified_base 29..30: mod_base = OTHER; note R-N-(1,3-dimethylimidazolidin-2-ylidene)phosphoramidate
  modified_base 30: mod_base = um
  source 1..30: mol_type = other RNA

SEQ ID NO: 149 - RNA, 30 nt, synthetic construct; identical to SEQ ID NO: 134
  misc_feature 1..30: note = Synthetic: WV-42962
  misc_feature 1..30: note = Synthetic: ADR-0100466
  modified_base 1: mod_base = OTHER; note = triantennary GalNAc with C12 linker linked to 6-aminohexanol linked by phosphate to the 5' end of 2-fluororibose cytosine
  modified_base 1..2: mod_base = OTHER; note R-N-(1,3-dimethylimidazolidin-2-ylidene)phosphoramidate
  modified_base 2: mod_base = OTHER; note = 2-fluororibose cytosine
  modified_base 2..3: mod_base = OTHER; note = S-phosphorothioate
  modified_base 3: mod_base = OTHER; note = 2-fluororibose cytosine
  modified_base 3..4: mod_base = OTHER; note = S-phosphorothioate
  modified_base 4: mod_base = OTHER; note = 2-fluororibose adenine
  modified_base 4..5: mod_base = OTHER; note = S-phosphorothioate
  modified_base 5: mod_base = OTHER; note = 2-fluororibose guanine
  modified_base 5..6: mod_base = OTHER; note = S-phosphorothioate
  modified_base 6: mod_base = OTHER; note = 2-fluororibose cytosine
  modified_base 6..7: mod_base = OTHER; note = S-phosphorothioate
  modified_base 7: mod_base = OTHER; note = 2-fluororibose adenine
  modified_base 7..8: mod_base = OTHER; note = S-phosphorothioate
  modified_base 8: mod_base = OTHER; note = 2-fluororibose guanine
  modified_base 8..9: mod_base = OTHER; note = S-phosphorothioate
  modified_base 9: mod_base = OTHER; note = 2-fluororibose cytosine
  modified_base 9..10: mod_base = OTHER; note = S-phosphorothioate
  modified_base 10: mod_base = OTHER; note = 2-fluororibose uracil
  modified_base 10..11: mod_base = OTHER; note = S-phosphorothioate
  modified_base 11: mod_base = OTHER; note = 2-fluororibose uracil
  modified_base 11..12: mod_base = OTHER; note = S-phosphorothioate
  modified_base 12: mod_base = OTHER; note = 2-fluororibose cytosine
  modified_base 12..13: mod_base = OTHER; note = S-phosphorothioate
  modified_base 13: mod_base = OTHER; note = 2-fluororibose adenine
  modified_base 13..14: mod_base = OTHER; note = S-phosphorothioate
  modified_base 14: mod_base = OTHER; note = 2-fluororibose guanine
  modified_base 14..15: mod_base = OTHER; note R-N-(1,3-dimethylimidazolidin-2-ylidene)phosphoramidate
  modified_base 15: mod_base = OTHER; note = 2-fluororibose uracil
  modified_base 15..16: mod_base = OTHER; note = S-phosphorothioate
  modified_base 16: mod_base = OTHER; note = 2-fluororibose cytosine
  modified_base 16..17: mod_base = OTHER; note R-N-(1,3-dimethylimidazolidin-2-ylidene)phosphoramidate
  modified_base 17: mod_base = OTHER; note = 2-fluororibose cytosine
  modified_base 17..18: mod_base = OTHER; note = S-phosphorothioate
  modified_base 18: mod_base = OTHER; note = 2-fluororibose cytosine
  modified_base 18..19: mod_base = OTHER; note = S-phosphorothioate
  modified_base 19: mod_base = OTHER; note = 2-fluororibose uracil
  modified_base 19..20: mod_base = OTHER; note = S-phosphorothioate
  modified_base 20: mod_base = OTHER; note = 2-fluororibose uracil
  modified_base 20..21: mod_base = OTHER; note = S-phosphorothioate
  modified_base 21: mod_base = OTHER; note = 2-fluororibose uracil
  modified_base 21..22: mod_base = OTHER; note = S-phosphorothioate
  modified_base 22: mod_base = cm
  modified_base 22..23: mod_base = OTHER; note = S-phosphorothioate
  modified_base 23: mod_base = OTHER; note = 2-fluororibose uracil
  modified_base 23..24: mod_base = OTHER; note = S-phosphorothioate
  modified_base 24: mod_base = OTHER; note = deoxyribose 6-amino-9-substituted 8,9-dihydro-7H-purin-8-one
  modified_base 24..25: mod_base = OTHER; note = S-phosphorothioate
  modified_base 25: mod_base = OTHER; note = deoxyribose inosine
  modified_base 25..26: mod_base = OTHER; note S-N-(1,3-dimethylimidazolidin-2-ylidene)phosphoramidate
  modified_base 26: mod_base = um
  modified_base 26..27: mod_base = OTHER; note = S-phosphorothioate
  modified_base 27: mod_base = cm
  modified_base 27..28: mod_base = OTHER; note = S-phosphorothioate
  modified_base 28: mod_base = OTHER; note = 2-fluororibose guanine
  modified_base 28..29: mod_base = OTHER; note = S-phosphorothioate
  modified_base 29: mod_base = OTHER; note = 2-fluororibose adenine
  modified_base 29..30: mod_base = OTHER; note R-N-(1,3-dimethylimidazolidin-2-ylidene)phosphoramidate
  modified_base 30: mod_base = um
  source 1..30: mol_type = other RNA

SEQ ID NO: 150 - RNA, 30 nt, synthetic construct; identical to SEQ ID NO: 134
  misc_feature 1..30: note = Synthetic: WV-42958
  misc_feature 1..30: note = Synthetic: ADR-0103672
  modified_base 1: mod_base = OTHER; note = 2-fluororibose cytosine
  modified_base 1..2: mod_base = OTHER; note R-N-(1,3-dimethylimidazolidin-2-ylidene)phosphoramidate
  modified_base 2: mod_base = OTHER; note = 2-fluororibose cytosine
  modified_base 2..3: mod_base = OTHER; note = S-phosphorothioate
  modified_base 3: mod_base = OTHER; note = 2-fluororibose cytosine
  modified_base 3..4: mod_base = OTHER; note = S-phosphorothioate
  modified_base 4: mod_base = OTHER; note = 2-fluororibose adenine
  modified_base 4..5: mod_base = OTHER; note = S-phosphorothioate
  modified_base 5: mod_base = OTHER; note = 2-fluororibose guanine
  modified_base 5..6: mod_base = OTHER; note = S-phosphorothioate
  modified_base 6: mod_base = OTHER; note = 2-fluororibose cytosine
  modified_base 6..7: mod_base = OTHER; note = S-phosphorothioate
  modified_base 7: mod_base = OTHER; note = 2-fluororibose adenine
  modified_base 7..8: mod_base = OTHER; note = S-phosphorothioate
  modified_base 8: mod_base = OTHER; note = 2-fluororibose guanine
  modified_base 8..9: mod_base = OTHER; note = S-phosphorothioate
  modified_base 9: mod_base = OTHER; note = 2-fluororibose cytosine
  modified_base 9..10: mod_base = OTHER; note = S-phosphorothioate
  modified_base 10: mod_base = OTHER; note = 2-fluororibose uracil
  modified_base 10..11: mod_base = OTHER; note = S-phosphorothioate
  modified_base 11: mod_base = OTHER; note = 2-fluororibose uracil
  modified_base 11..12: mod_base = OTHER; note = S-phosphorothioate
  modified_base 12: mod_base = OTHER; note = 2-fluororibose cytosine
  modified_base 12..13: mod_base = OTHER; note = S-phosphorothioate
  modified_base 13: mod_base = OTHER; note = 2-fluororibose adenine
  modified_base 13..14: mod_base = OTHER; note = S-phosphorothioate
  modified_base 14: mod_base = OTHER; note = 2-fluororibose guanine
  modified_base 14..15: mod_base = OTHER; note R-N-(1,3-dimethylimidazolidin-2-ylidene)phosphoramidate
  modified_base 15: mod_base = OTHER; note = 2-fluororibose uracil
  modified_base 15..16: mod_base = OTHER; note = S-phosphorothioate
  modified_base 16: mod_base = cm
  modified_base 16..17: mod_base = OTHER; note R-N-(1,3-dimethylimidazolidin-2-ylidene)phosphoramidate
  modified_base 17: mod_base = cm
  modified_base 17..18: mod_base = OTHER; note = S-phosphorothioate
  modified_base 18: mod_base = cm
  modified_base 18..19: mod_base = OTHER; note = S-phosphorothioate
  modified_base 19: mod_base = um
  modified_base 19..20: mod_base = OTHER; note = S-phosphorothioate
  modified_base 20: mod_base = um
  modified_base 20..21: mod_base = OTHER; note = S-phosphorothioate
  modified_base 21: mod_base = um
  modified_base 21..22: mod_base = OTHER; note = S-phosphorothioate
  modified_base 22: mod_base = cm
  modified_base 22..23: mod_base = OTHER; note = S-phosphorothioate
  modified_base 23: mod_base = OTHER; note = 2-fluororibose uracil
  modified_base 23..24: mod_base = OTHER; note = S-phosphorothioate
  modified_base 24: mod_base = OTHER; note = deoxyribose 6-amino-9-substituted 8,9-dihydro-7H-purin-8-one
  modified_base 24..25: mod_base = OTHER; note = S-phosphorothioate
  modified_base 25: mod_base = OTHER; note = deoxyribose inosine
  modified_base 25..26: mod_base = OTHER; note S-N-(1,3-dimethylimidazolidin-2-ylidene)phosphoramidate
  modified_base 26: mod_base = um
  modified_base 26..27: mod_base = OTHER; note = S-phosphorothioate
  modified_base 27: mod_base = cm
  modified_base 27..28: mod_base = OTHER; note = S-phosphorothioate
  modified_base 28: mod_base = gm
  modified_base 28..29: mod_base = OTHER; note = S-phosphorothioate
  modified_base 29: mod_base = OTHER; note = 2-O-methylribose adenine
  modified_base 29..30: mod_base = OTHER; note R-N-(1,3-dimethylimidazolidin-2-ylidene)phosphoramidate
  modified_base 30: mod_base = um
  source 1..30: mol_type = other RNA

SEQ ID NO: 151 - RNA, 30 nt, synthetic construct; identical to SEQ ID NO: 80
  misc_feature 1..30: note = Synthetic: WV-42939
  misc_feature 1..30: note = Synthetic: ADR-0103594
  modified_base 1: mod_base = OTHER; note = 2-fluororibose cytosine
  modified_base 1..2: mod_base = OTHER; note R-N-(1,3-dimethylimidazolidin-2-ylidene)phosphoramidate
  modified_base 2: mod_base = OTHER; note = 2-fluororibose cytosine
  modified_base 2..3: mod_base = OTHER; note = S-phosphorothioate
  modified_base 3: mod_base = OTHER; note = 2-fluororibose cytosine
  modified_base 3..4: mod_base = OTHER; note = S-phosphorothioate
  modified_base 4: mod_base = OTHER; note = 2-fluororibose adenine
  modified_base 4..5: mod_base = OTHER; note = S-phosphorothioate
  modified_base 5: mod_base = OTHER; note = 2-fluororibose guanine
  modified_base 5..6: mod_base = OTHER; note = S-phosphorothioate
  modified_base 6: mod_base = OTHER; note = 2-fluororibose cytosine
  modified_base 6..7: mod_base = OTHER; note = S-phosphorothioate
  modified_base 7: mod_base = OTHER; note = 2-fluororibose adenine
  modified_base 7..8: mod_base = OTHER; note = S-phosphorothioate
  modified_base 8: mod_base = OTHER; note = 2-fluororibose guanine
  modified_base 8..9: mod_base = OTHER; note = S-phosphorothioate
  modified_base 9: mod_base = OTHER; note = 2-fluororibose cytosine
  modified_base 9..10: mod_base = OTHER; note = S-phosphorothioate
  modified_base 10: mod_base = OTHER; note = 2-fluororibose uracil
  modified_base 10..11: mod_base = OTHER; note = S-phosphorothioate
  modified_base 11: mod_base = OTHER; note = 2-fluororibose uracil
  modified_base 11..12: mod_base = OTHER; note = S-phosphorothioate
  modified_base 12: mod_base = OTHER; note = 2-fluororibose cytosine
  modified_base 12..13: mod_base = OTHER; note = S-phosphorothioate
  modified_base 13: mod_base = OTHER; note = 2-fluororibose adenine
  modified_base 13..14: mod_base = OTHER; note = S-phosphorothioate
  modified_base 14: mod_base = OTHER; note = 2-fluororibose guanine
  modified_base 14..15: mod_base = OTHER; note = S-phosphorothioate
  modified_base 15: mod_base = OTHER; note = 2-fluororibose uracil
  modified_base 15..16: mod_base = OTHER; note = S-phosphorothioate
  modified_base 16: mod_base = cm
  modified_base 16..17: mod_base = OTHER; note = S-phosphorothioate
  modified_base 17: mod_base = cm
  modified_base 17..18: mod_base = OTHER; note = S-phosphorothioate
  modified_base 18: mod_base = cm
  modified_base 18..19: mod_base = OTHER; note = S-phosphorothioate
  modified_base 19: mod_base = um
  modified_base 19..20: mod_base = OTHER; note = S-phosphorothioate
  modified_base 20: mod_base = um
  modified_base 20..21: mod_base = OTHER; note = S-phosphorothioate
  modified_base 21: mod_base = um
  modified_base 21..22: mod_base = OTHER; note = S-phosphorothioate
  modified_base 22: mod_base = cm
  modified_base 22..23: mod_base = OTHER; note = S-phosphorothioate
  modified_base 23: mod_base = OTHER; note = 2-fluororibose uracil
  modified_base 23..24: mod_base = OTHER; note = S-phosphorothioate
  modified_base 24: mod_base = OTHER; note = 5-2 (linked) ribose cytosine
  modified_base 24..25: mod_base = OTHER; note = S-phosphorothioate
  modified_base 25: mod_base = OTHER; note = deoxyribose inosine
  modified_base 25..26: mod_base = OTHER; note S-N-(1,3-dimethylimidazolidin-2-ylidene)phosphoramidate
  modified_base 26: mod_base = um
  modified_base 26..27: mod_base = OTHER; note = S-phosphorothioate
  modified_base 27: mod_base = cm
  modified_base 27..28: mod_base = OTHER; note = S-phosphorothioate
  modified_base 28: mod_base = gm
  modified_base 28..29: mod_base = OTHER; note = S-phosphorothioate
  modified_base 29: mod_base = OTHER; note = 2-O-methylribose adenine
  modified_base 29..30: mod_base = OTHER; note R-N-(1,3-dimethylimidazolidin-2-ylidene)phosphoramidate
  modified_base 30: mod_base = um
  source 1..30: mol_type = other RNA

SEQ ID NO: 152 - RNA, 30 nt, synthetic construct; identical to SEQ ID NO: 134
  misc_feature 1..30: note = Synthetic: WV-42938
  misc_feature 1..30: note = Synthetic: ADR-0103635
  modified_base 1: mod_base = OTHER; note = 2-fluororibose cytosine
  modified_base 1..2: mod_base = OTHER; note R-N-(1,3-dimethylimidazolidin-2-ylidene)phosphoramidate
  modified_base 2: mod_base = OTHER; note = 2-fluororibose cytosine
  modified_base 2..3: mod_base = OTHER; note = S-phosphorothioate
  modified_base 3: mod_base = OTHER; note = 2-fluororibose cytosine
  modified_base 3..4: mod_base = OTHER; note = S-phosphorothioate
  modified_base 4: mod_base = OTHER; note = 2-fluororibose adenine
  modified_base 4..5: mod_base = OTHER; note = S-phosphorothioate
  modified_base 5: mod_base = OTHER; note = 2-fluororibose guanine
  modified_base 5..6: mod_base = OTHER; note = S-phosphorothioate
  modified_base 6: mod_base = OTHER; note = 2-fluororibose cytosine
  modified_base 6..7: mod_base = OTHER; note = S-phosphorothioate
  modified_base 7: mod_base = OTHER; note = 2-fluororibose adenine
  modified_base 7..8: mod_base = OTHER; note = S-phosphorothioate
  modified_base 8: mod_base = OTHER; note = 2-fluororibose guanine
  modified_base 8..9: mod_base = OTHER; note = S-phosphorothioate
  modified_base 9: mod_base = OTHER; note = 2-fluororibose cytosine
  modified_base 9..10: mod_base = OTHER; note = S-phosphorothioate
  modified_base 10: mod_base = OTHER; note = 2-fluororibose uracil
  modified_base 10..11: mod_base = OTHER; note = S-phosphorothioate
  modified_base 11: mod_base = OTHER; note = 2-fluororibose uracil
  modified_base 11..12: mod_base = OTHER; note = S-phosphorothioate
  modified_base 12: mod_base = OTHER; note = 2-fluororibose cytosine
  modified_base 12..13: mod_base = OTHER; note = S-phosphorothioate
  modified_base 13: mod_base = OTHER; note = 2-fluororibose adenine
  modified_base 13..14: mod_base = OTHER; note = S-phosphorothioate
  modified_base 14: mod_base = OTHER; note = 2-fluororibose guanine
  modified_base 14..15: mod_base = OTHER; note = S-phosphorothioate
  modified_base 15: mod_base = OTHER; note = 2-fluororibose uracil
  modified_base 15..16: mod_base = OTHER; note = S-phosphorothioate
  modified_base 16: mod_base = cm
  modified_base 16..17: mod_base = OTHER; note = S-phosphorothioate
  modified_base 17: mod_base = cm
  modified_base 17..18: mod_base = OTHER; note = S-phosphorothioate
  modified_base 18: mod_base = cm
  modified_base 18..19: mod_base = OTHER; note = S-phosphorothioate
  modified_base 19: mod_base = um
  modified_base 19..20: mod_base = OTHER; note = S-phosphorothioate
  modified_base 20: mod_base = um
  modified_base 20..21: mod_base = OTHER; note = S-phosphorothioate
  modified_base 21: mod_base = um
  modified_base 21..22: mod_base = OTHER; note = S-phosphorothioate
  modified_base 22: mod_base = cm
  modified_base 22..23: mod_base = OTHER; note = S-phosphorothioate
  modified_base 23: mod_base = OTHER; note = 2-fluororibose uracil
  modified_base 23..24: mod_base = OTHER; note = S-phosphorothioate
  modified_base 24: mod_base = OTHER; note = ribose 6-amino-9-substituted 8,9-dihydro-7H-purin-8-one
  modified_base 24..25: mod_base = OTHER; note = S-phosphorothioate
  modified_base 25: mod_base = OTHER; note = deoxyribose inosine
  modified_base 25..26: mod_base = OTHER; note S-N-(1,3-dimethylimidazolidin-2-ylidene)phosphoramidate
  modified_base 26: mod_base = um
  modified_base 26..27: mod_base = OTHER; note = S-phosphorothioate
  modified_base 27: mod_base = cm
  modified_base 27..28: mod_base = OTHER; note = S-phosphorothioate
  modified_base 28: mod_base = gm
  modified_base 28..29: mod_base = OTHER; note = S-phosphorothioate
  modified_base 29: mod_base = OTHER; note = 2-O-methylribose adenine
  modified_base 29..30: mod_base = OTHER; note R-N-(1,3-dimethylimidazolidin-2-ylidene)phosphoramidate
  modified_base 30: mod_base = um
  source 1..30: mol_type = other RNA

SEQ ID NO: 153 - RNA, 30 nt, synthetic construct; identical to SEQ ID NO: 80
  misc_feature 1..30: note = Synthetic: WV-42937
  misc_feature 1..30: note = Synthetic: ADR-0103592
  modified_base 1: mod_base = OTHER; note = 2-fluororibose cytosine
  modified_base 1..2: mod_base = OTHER; note R-N-(1,3-dimethylimidazolidin-2-ylidene)phosphoramidate
  modified_base 2: mod_base = OTHER; note = 2-fluororibose cytosine
  modified_base 2..3: mod_base = OTHER; note = S-phosphorothioate
  modified_base 3: mod_base = OTHER; note = 2-fluororibose cytosine
  modified_base 3..4: mod_base = OTHER; note = S-phosphorothioate
  modified_base 4: mod_base = OTHER; note = 2-fluororibose adenine
  modified_base 4..5: mod_base = OTHER; note = S-phosphorothioate
  modified_base 5: mod_base = OTHER; note = 2-fluororibose guanine
  modified_base 5..6: mod_base = OTHER; note = S-phosphorothioate
  modified_base 6: mod_base = OTHER; note = 2-fluororibose cytosine
  modified_base 6..7: mod_base = OTHER; note = S-phosphorothioate
  modified_base 7: mod_base = OTHER; note = 2-fluororibose adenine
  modified_base 7..8: mod_base = OTHER; note = S-phosphorothioate
  modified_base 8: mod_base = OTHER; note = 2-fluororibose guanine
  modified_base 8..9: mod_base = OTHER; note = S-phosphorothioate
  modified_base 9: mod_base = OTHER; note = 2-fluororibose cytosine
  modified_base 9..10: mod_base = OTHER; note = S-phosphorothioate
  modified_base 10: mod_base = OTHER; note = 2-fluororibose uracil
  modified_base 10..11: mod_base = OTHER; note = S-phosphorothioate
  modified_base 11: mod_base = OTHER; note = 2-fluororibose uracil
  modified_base 11..12: mod_base = OTHER; note = S-phosphorothioate
  modified_base 12: mod_base = OTHER; note = 2-fluororibose cytosine
  modified_base 12..13: mod_base = OTHER; note = S-phosphorothioate
  modified_base 13: mod_base = OTHER; note = 2-fluororibose adenine
  modified_base 13..14: mod_base = OTHER; note = S-phosphorothioate
  modified_base 14: mod_base = OTHER; note = 2-fluororibose guanine
  modified_base 14..15: mod_base = OTHER; note = S-phosphorothioate
  modified_base 15: mod_base = OTHER; note = 2-fluororibose uracil
  modified_base 15..16: mod_base = OTHER; note = S-phosphorothioate
  modified_base 16: mod_base = cm
  modified_base 16..17: mod_base = OTHER; note = S-phosphorothioate
  modified_base 17: mod_base = cm
  modified_base 17..18: mod_base = OTHER; note = S-phosphorothioate
  modified_base 18: mod_base = cm
  modified_base 18..19: mod_base = OTHER; note = S-phosphorothioate
  modified_base 19: mod_base = um
  modified_base 19..20: mod_base = OTHER; note = S-phosphorothioate
  modified_base 20: mod_base = um
  modified_base 20..21: mod_base = OTHER; note = S-phosphorothioate
  modified_base 21: mod_base = um
  modified_base 21..22: mod_base = OTHER; note = S-phosphorothioate
  modified_base 22: mod_base = cm
  modified_base 22..23: mod_base = OTHER; note = S-phosphorothioate
  modified_base 23: mod_base = OTHER; note = 2-fluororibose uracil
  modified_base 23..24: mod_base = OTHER; note = S-phosphorothioate
  modified_base 24: mod_base = OTHER; note = alpha-threofuranosyl (3-2 connectivity) cytosine
  modified_base 24..25: mod_base = OTHER; note = S-phosphorothioate
  modified_base 25: mod_base = OTHER; note = deoxyribose inosine
  modified_base 25..26: mod_base = OTHER; note S-N-(1,3-dimethylimidazolidin-2-ylidene)phosphoramidate
  modified_base 26: mod_base = um
  modified_base 26..27: mod_base = OTHER; note = S-phosphorothioate
  modified_base 27: mod_base = cm
  modified_base 27..28: mod_base = OTHER; note = S-phosphorothioate
  modified_base 28: mod_base = gm
  modified_base 28..29: mod_base = OTHER; note = S-phosphorothioate
  modified_base 29: mod_base = OTHER; note = 2-O-methylribose adenine
  modified_base 29..30: mod_base = OTHER; note R-N-(1,3-dimethylimidazolidin-2-ylidene)phosphoramidate
  modified_base 30: mod_base = um
  source 1..30: mol_type = other RNA

SEQ ID NO: 154 - RNA, 30 nt, synthetic construct; identical to SEQ ID NO: 80
  misc_feature 1..30: note = Synthetic: WV-42936
  misc_feature 1..30: note = Synthetic: ADR-0103593
  modified_base 1: mod_base = OTHER; note = 2-fluororibose cytosine
  modified_base 1..2: mod_base = OTHER; note R-N-(1,3-dimethylimidazolidin-2-ylidene)phosphoramidate
  modified_base 2: mod_base = OTHER; note = 2-fluororibose cytosine
  modified_base 2..3: mod_base = OTHER; note = S-phosphorothioate
  modified_base 3: mod_base = OTHER; note = 2-fluororibose cytosine
  modified_base 3..4: mod_base = OTHER; note = S-phosphorothioate
  modified_base 4: mod_base = OTHER; note = 2-fluororibose adenine
  modified_base 4..5: mod_base = OTHER; note = S-phosphorothioate
  modified_base 5: mod_base = OTHER; note = 2-fluororibose guanine
  modified_base 5..6: mod_base = OTHER; note = S-phosphorothioate
  modified_base 6: mod_base = OTHER; note = 2-fluororibose cytosine
  modified_base 6..7: mod_base = OTHER; note = S-phosphorothioate
  modified_base 7: mod_base = OTHER; note = 2-fluororibose adenine
  modified_base 7..8: mod_base = OTHER; note = S-phosphorothioate
  modified_base 8: mod_base = OTHER; note = 2-fluororibose guanine
  modified_base 8..9: mod_base = OTHER; note = S-phosphorothioate
  modified_base 9: mod_base = OTHER; note = 2-fluororibose cytosine
  modified_base 9..10: mod_base = OTHER; note = S-phosphorothioate
  modified_base 10: mod_base = OTHER; note = 2-fluororibose uracil
  modified_base 10..11: mod_base = OTHER; note = S-phosphorothioate
  modified_base 11: mod_base = OTHER; note = 2-fluororibose uracil
  modified_base 11..12: mod_base = OTHER; note = S-phosphorothioate
  modified_base 12: mod_base = OTHER; note = 2-fluororibose cytosine
  modified_base 12..13: mod_base = OTHER; note = S-phosphorothioate
  modified_base 13: mod_base = OTHER; note = 2-fluororibose adenine
  modified_base 13..14: mod_base = OTHER; note = S-phosphorothioate
  modified_base 14: mod_base = OTHER; note = 2-fluororibose guanine
  modified_base 14..15: mod_base = OTHER; note = S-phosphorothioate
  modified_base 15: mod_base = OTHER; note = 2-fluororibose uracil
  modified_base 15..16: mod_base = OTHER; note = S-phosphorothioate
  modified_base 16: mod_base = cm
  modified_base 16..17: mod_base = OTHER; note = S-phosphorothioate
  modified_base 17: mod_base = cm
  modified_base 17..18: mod_base = OTHER; note = S-phosphorothioate
  modified_base 18: mod_base = cm
  modified_base 18..19: mod_base = OTHER; note = S-phosphorothioate
  modified_base 19: mod_base = um
  modified_base 19..20: mod_base = OTHER; note = S-phosphorothioate
  modified_base 20: mod_base = um
  modified_base 20..21: mod_base = OTHER; note = S-phosphorothioate
  modified_base 21: mod_base = um
  modified_base 21..22: mod_base = OTHER; note = S-phosphorothioate
  modified_base 22: mod_base = cm
  modified_base 22..23: mod_base = OTHER; note = S-phosphorothioate
  modified_base 23: mod_base = OTHER; note = 2-fluororibose uracil
  modified_base 23..24: mod_base = OTHER; note = S-phosphorothioate
  modified_base 24: mod_base = OTHER; note = 3'-deoxyribose (5-2 connectivity) cytosine
  modified_base 24..25: mod_base = OTHER; note = phosphorothioate
  modified_base 25: mod_base = OTHER; note = deoxyribose inosine
  modified_base 25..26: mod_base = OTHER; note S-N-(1,3-dimethylimidazolidin-2-ylidene)phosphoramidate
  modified_base 26: mod_base = um
  modified_base 26..27: mod_base = OTHER; note = S-phosphorothioate
  modified_base 27: mod_base = cm
  modified_base 27..28: mod_base = OTHER; note = S-phosphorothioate
  modified_base 28: mod_base = gm
  modified_base 28..29: mod_base = OTHER; note = S-phosphorothioate
  modified_base 29: mod_base = OTHER; note = 2-O-methylribose adenine
  modified_base 29..30: mod_base = OTHER; note R-N-(1,3-dimethylimidazolidin-2-ylidene)phosphoramidate
  modified_base 30: mod_base = um
  source 1..30: mol_type = other RNA

SEQ ID NO: 155 - RNA, 30 nt, synthetic construct; identical to SEQ ID NO: 80
  misc_feature 1..30: note = Synthetic: WV-42935
  misc_feature 1..30: note = Synthetic: ADR-0103596
  modified_base 1: mod_base = OTHER; note = 2-fluororibose cytosine
  modified_base 1..2: mod_base = OTHER; note R-N-(1,3-dimethylimidazolidin-2-ylidene)phosphoramidate
  modified_base 2: mod_base = OTHER; note = 2-fluororibose cytosine
  modified_base 2..3: mod_base = OTHER; note = S-phosphorothioate
  modified_base 3: mod_base = OTHER; note = 2-fluororibose cytosine
  modified_base 3..4: mod_base = OTHER; note = S-phosphorothioate
  modified_base 4: mod_base = OTHER; note = 2-fluororibose adenine
  modified_base 4..5: mod_base = OTHER; note = S-phosphorothioate
  modified_base 5: mod_base = OTHER; note = 2-fluororibose guanine
  modified_base 5..6: mod_base = OTHER; note = S-phosphorothioate
  modified_base 6: mod_base = OTHER; note = 2-fluororibose cytosine
  modified_base 6..7: mod_base = OTHER; note = S-phosphorothioate
  modified_base 7: mod_base = OTHER; note = 2-fluororibose adenine
  modified_base 7..8: mod_base = OTHER; note = S-phosphorothioate
  modified_base 8: mod_base = OTHER; note = 2-fluororibose guanine
  modified_base 8..9: mod_base = OTHER; note = S-phosphorothioate
  modified_base 9: mod_base = OTHER; note = 2-fluororibose cytosine
  modified_base 9..10: mod_base = OTHER; note = S-phosphorothioate
  modified_base 10: mod_base = OTHER; note = 2-fluororibose uracil
  modified_base 10..11: mod_base = OTHER; note = S-phosphorothioate
  modified_base 11: mod_base = OTHER; note = 2-fluororibose uracil
  modified_base 11..12: mod_base = OTHER; note = S-phosphorothioate
  modified_base 12: mod_base = OTHER; note = 2-fluororibose cytosine
  modified_base 12..13: mod_base = OTHER; note = S-phosphorothioate
  modified_base 13: mod_base = OTHER; note = 2-fluororibose adenine
  modified_base 13..14: mod_base = OTHER; note = S-phosphorothioate
  modified_base 14: mod_base = OTHER; note = 2-fluororibose guanine
  modified_base 14..15: mod_base = OTHER; note = S-phosphorothioate
  modified_base 15: mod_base = OTHER; note = 2-fluororibose uracil
  modified_base 15..16: mod_base = OTHER; note = S-phosphorothioate
  modified_base 16: mod_base = cm
  modified_base 16..17: mod_base = OTHER; note = S-phosphorothioate
  modified_base 17: mod_base = cm
  modified_base 17..18: mod_base = OTHER; note = S-phosphorothioate
  modified_base 18: mod_base = cm
  modified_base 18..19: mod_base = OTHER; note = S-phosphorothioate
  modified_base 19: mod_base = um
  modified_base 19..20: mod_base = OTHER; note = S-phosphorothioate
  modified_base 20: mod_base = um
  modified_base 20..21: mod_base = OTHER; note = S-phosphorothioate
  modified_base 21: mod_base = um
  modified_base 21..22: mod_base = OTHER; note = S-phosphorothioate
  modified_base 22: mod_base = cm
  modified_base 22..23: mod_base = OTHER; note = S-phosphorothioate
  modified_base 23: mod_base = OTHER; note = 2-fluororibose uracil
  modified_base 23..24: mod_base = OTHER; note = S-phosphorothioate
  modified_base 24: mod_base = OTHER; note = arabinose cytosine
  modified_base 24..25: mod_base = OTHER; note = phosphorothioate
  modified_base 25: mod_base = OTHER; note = deoxyribose inosine
  modified_base 25..26: mod_base = OTHER; note S-N-(1,3-dimethylimidazolidin-2-ylidene)phosphoramidate
  modified_base 26: mod_base = um
  modified_base 26..27: mod_base = OTHER; note = S-phosphorothioate
  modified_base 27: mod_base = cm
  modified_base 27..28: mod_base = OTHER; note = S-phosphorothioate
  modified_base 28: mod_base = gm
  modified_base 28..29: mod_base = OTHER; note = S-phosphorothioate
  modified_base 29: mod_base = OTHER; note = 2-O-methylribose adenine
  modified_base 29..30: mod_base = OTHER; note R-N-(1,3-dimethylimidazolidin-2-ylidene)phosphoramidate
  modified_base 30: mod_base = um
  source 1..30: mol_type = other RNA

SEQ ID NO: 156 - RNA, 30 nt, synthetic construct; identical to SEQ ID NO: 80
  misc_feature 1..30: note = Synthetic: WV-42933
  misc_feature 1..30: note = Synthetic: ADR-0103611
  modified_base 1: mod_base = OTHER; note = 2-fluororibose cytosine
  modified_base 1..2: mod_base = OTHER; note R-N-(1,3-dimethylimidazolidin-2-ylidene)phosphoramidate
  modified_base 2: mod_base = OTHER; note = 2-fluororibose cytosine
  modified_base 2..3: mod_base = OTHER; note = S-phosphorothioate
  modified_base 3: mod_base = OTHER; note = 2-fluororibose cytosine
  modified_base 3..4: mod_base = OTHER; note = S-phosphorothioate
  modified_base 4: mod_base = OTHER; note = 2-fluororibose adenine
  modified_base 4..5: mod_base = OTHER; note = S-phosphorothioate
  modified_base 5: mod_base = OTHER; note = 2-fluororibose guanine
  modified_base 5..6: mod_base = OTHER; note = S-phosphorothioate
  modified_base 6: mod_base = OTHER; note = 2-fluororibose cytosine
  modified_base 6..7: mod_base = OTHER; note = S-phosphorothioate
  modified_base 7: mod_base = OTHER; note = 2-fluororibose adenine
  modified_base 7..8: mod_base = OTHER; note = S-phosphorothioate
  modified_base 8: mod_base = OTHER; note = 2-fluororibose guanine
  modified_base 8..9: mod_base = OTHER; note = S-phosphorothioate
  modified_base 9: mod_base = OTHER; note = 2-fluororibose cytosine
  modified_base 9..10: mod_base = OTHER; note = S-phosphorothioate
  modified_base 10: mod_base = OTHER; note = 2-fluororibose uracil
  modified_base 10..11: mod_base = OTHER; note = S-phosphorothioate
  modified_base 11: mod_base = OTHER; note = 2-fluororibose uracil
  modified_base 11..12: mod_base = OTHER; note = S-phosphorothioate
  modified_base 12: mod_base = OTHER; note = 2-fluororibose cytosine
  modified_base 12..13: mod_base = OTHER; note = S-phosphorothioate
  modified_base 13: mod_base = OTHER; note = 2-fluororibose adenine
  modified_base 13..14: mod_base = OTHER; note = S-phosphorothioate
  modified_base 14: mod_base = OTHER; note = 2-fluororibose guanine
  modified_base 14..15: mod_base = OTHER; note = S-phosphorothioate
  modified_base 15: mod_base = OTHER; note = 2-fluororibose uracil
  modified_base 15..16: mod_base = OTHER; note = S-phosphorothioate
  modified_base 16: mod_base = cm
  modified_base 16..17: mod_base = OTHER; note = S-phosphorothioate
  modified_base 17: mod_base = cm
  modified_base 17..18: mod_base = OTHER; note = S-phosphorothioate
  modified_base 18: mod_base = cm
  modified_base 18..19: mod_base = OTHER; note = S-phosphorothioate
  modified_base 19: mod_base = um
  modified_base 19..20: mod_base = OTHER; note = S-phosphorothioate
  modified_base 20: mod_base = um
  modified_base 20..21: mod_base = OTHER; note = S-phosphorothioate
  modified_base 21: mod_base = um
  modified_base 21..22: mod_base = OTHER; note = S-phosphorothioate
  modified_base 22: mod_base = cm
  modified_base 22..23: mod_base = OTHER; note = S-phosphorothioate
  modified_base 23: mod_base = OTHER; note = 2-fluororibose uracil
  modified_base 23..24: mod_base = OTHER; note = S-phosphorothioate
  modified_base 24: mod_base = OTHER; note = deoxyribose 4-N-naphthylcarbamoyl-cytidine
  modified_base 24..25: mod_base = OTHER; note = S-phosphorothioate
  modified_base 25: mod_base = OTHER; note = deoxyribose inosine
  modified_base 25..26: mod_base = OTHER; note S-N-(1,3-dimethylimidazolidin-2-ylidene)phosphoramidate
  modified_base 26: mod_base = um
  modified_base 26..27: mod_base = OTHER; note = S-phosphorothioate
  modified_base 27: mod_base = cm
  modified_base 27..28: mod_base = OTHER; note = S-phosphorothioate
  modified_base 28: mod_base = gm
  modified_base 28..29: mod_base = OTHER; note = S-phosphorothioate
  modified_base 29: mod_base = OTHER; note = 2-O-methylribose adenine
  modified_base 29..30: mod_base = OTHER; note R-N-(1,3-dimethylimidazolidin-2-ylidene)phosphoramidate
  modified_base 30: mod_base = um
  source 1..30: mol_type = other RNA

SEQ ID NO: 157 - RNA, 30 nt, synthetic construct; identical to SEQ ID NO: 80
  misc_feature 1..30: note = Synthetic: WV-42932
  misc_feature 1..30: note = Synthetic: ADR-0103633
  modified_base 1: mod_base = OTHER; note = 2-fluororibose cytosine
  modified_base 1..2: mod_base = OTHER; note R-N-(1,3-dimethylimidazolidin-2-ylidene)phosphoramidate
  modified_base 2: mod_base = OTHER; note = 2-fluororibose cytosine
  modified_base 2..3: mod_base = OTHER; note = S-phosphorothioate
  modified_base 3: mod_base = OTHER; note = 2-fluororibose cytosine
  modified_base 3..4: mod_base = OTHER; note = S-phosphorothioate
  modified_base 4: mod_base = OTHER; note = 2-fluororibose adenine
  modified_base 4..5: mod_base = OTHER; note = S-phosphorothioate
  modified_base 5: mod_base = OTHER; note = 2-fluororibose guanine
  modified_base 5..6: mod_base = OTHER; note = S-phosphorothioate
  modified_base 6: mod_base = OTHER; note = 2-fluororibose cytosine
  modified_base 6..7: mod_base = OTHER; note = S-phosphorothioate
  modified_base 7: mod_base = OTHER; note = 2-fluororibose adenine
  modified_base 7..8: mod_base = OTHER; note = S-phosphorothioate
  modified_base 8: mod_base = OTHER; note = 2-fluororibose guanine
  modified_base 8..9: mod_base = OTHER; note = S-phosphorothioate
  modified_base 9: mod_base = OTHER; note = 2-fluororibose cytosine
  modified_base 9..10: mod_base = OTHER; note = S-phosphorothioate
  modified_base 10: mod_base = OTHER; note = 2-fluororibose uracil
  modified_base 10..11: mod_base = OTHER; note = S-phosphorothioate
  modified_base 11: mod_base = OTHER; note = 2-fluororibose uracil
  modified_base 11..12: mod_base = OTHER; note = S-phosphorothioate
  modified_base 12: mod_base = OTHER; note = 2-fluororibose cytosine
  modified_base 12..13: mod_base = OTHER; note = S-phosphorothioate
  modified_base 13: mod_base = OTHER; note = 2-fluororibose adenine
  modified_base 13..14: mod_base = OTHER; note = S-phosphorothioate
  modified_base 14: mod_base = OTHER; note = 2-fluororibose guanine
  modified_base 14..15: mod_base = OTHER; note = S-phosphorothioate
  modified_base 15: mod_base = OTHER; note = 2-fluororibose uracil
  modified_base 15..16: mod_base = OTHER; note = S-phosphorothioate
  modified_base 16: mod_base = cm
  modified_base 16..17: mod_base = OTHER; note = S-phosphorothioate
  modified_base 17: mod_base = cm
  modified_base 17..18: mod_base = OTHER; note = S-phosphorothioate
  modified_base 18: mod_base = cm
  modified_base 18..19: mod_base = OTHER; note = S-phosphorothioate
  modified_base 19: mod_base = um
  modified_base 19..20: mod_base = OTHER; note = S-phosphorothioate
  modified_base 20: mod_base = um
  modified_base 20..21: mod_base = OTHER; note = S-phosphorothioate
  modified_base 21: mod_base = um
  modified_base 21..22: mod_base = OTHER; note = S-phosphorothioate
  modified_base 22: mod_base = cm
  modified_base 22..23: mod_base = OTHER; note = S-phosphorothioate
  modified_base 23: mod_base = OTHER; note = 2-fluororibose uracil
  modified_base 23..24: mod_base = OTHER; note = S-phosphorothioate
  modified_base 24: mod_base = OTHER; note = deoxyribose N-[(phenylamino)carbonyl]-cytosine
  modified_base 24..25: mod_base = OTHER; note = S-phosphorothioate
  modified_base 25: mod_base = OTHER; note = deoxyribose inosine
  modified_base 25..26: mod_base = OTHER; note S-N-(1,3-dimethylimidazolidin-2-ylidene)phosphoramidate
  modified_base 26: mod_base = um
  modified_base 26..27: mod_base = OTHER; note = S-phosphorothioate
  modified_base 27: mod_base = cm
  modified_base 27..28: mod_base = OTHER; note = S-phosphorothioate
  modified_base 28: mod_base = gm
  modified_base 28..29: mod_base = OTHER; note = S-phosphorothioate
  modified_base 29: mod_base = OTHER; note = 2-O-methylribose adenine
  modified_base 29..30: mod_base = OTHER; note R-N-(1,3-dimethylimidazolidin-2-ylidene)phosphoramidate
  modified_base 30: mod_base = um
  source 1..30: mol_type = other RNA

SEQ ID NO: 158 - RNA, 30 nt, synthetic construct; identical to SEQ ID NO: 134
  misc_feature 1..30: note = Synthetic: WV-43117
  misc_feature 1..30: note = Synthetic: ADR-0104310
  modified_base 1: mod_base = cm
  modified_base 1..2: mod_base = OTHER; note R-N-(1,3-dimethylimidazolidin-2-ylidene)phosphoramidate
  modified_base 2: mod_base = cm
  modified_base 2..3: mod_base = OTHER; note = S-phosphorothioate
  modified_base 3: mod_base = cm
  modified_base 3..4: mod_base = OTHER; note R-N-(1,3-dimethylimidazolidin-2-ylidene)phosphoramidate
  modified_base 4: mod_base = OTHER; note = 2-fluororibose adenine
  modified_base 4..5: mod_base = OTHER; note = S-phosphorothioate
  modified_base 5: mod_base = OTHER; note = 2-fluororibose guanine
  modified_base 5..6: mod_base = OTHER; note = S-phosphorothioate
  modified_base 6: mod_base = OTHER; note = 2-fluororibose cytosine
  modified_base 6..7: mod_base = OTHER; note R-N-(1,3-dimethylimidazolidin-2-ylidene)phosphoramidate
  modified_base 7: mod_base = OTHER; note = 2-fluororibose adenine
  modified_base 7..8: mod_base = OTHER; note = S-phosphorothioate
  modified_base 8: mod_base = OTHER; note = 2-fluororibose guanine
  modified_base 8..9: mod_base = OTHER; note = S-phosphorothioate
  modified_base 9: mod_base = OTHER; note = 2-fluororibose cytosine
  modified_base 9..10: mod_base = OTHER; note = S-phosphorothioate
  modified_base 10: mod_base = OTHER; note = 2-fluororibose uracil
  modified_base 10..11: mod_base = OTHER; note = S-phosphorothioate
  modified_base 11: mod_base = OTHER; note = 2-fluororibose uracil
  modified_base 11..12: mod_base = OTHER; note = S-phosphorothioate
  modified_base 12: mod_base = OTHER; note = 2-fluororibose cytosine
  modified_base 12..13: mod_base = OTHER; note = S-phosphorothioate
  modified_base 13: mod_base = OTHER; note = 2-fluororibose adenine
  modified_base 13..14: mod_base = OTHER; note = S-phosphorothioate
  modified_base 14: mod_base = OTHER; note = 2-fluororibose guanine
  modified_base 14..15: mod_base = OTHER; note R-N-(1,3-dimethylimidazolidin-2-ylidene)phosphoramidate
  modified_base 15: mod_base = OTHER; note = 2-fluororibose uracil
  modified_base 15..16: mod_base = OTHER; note = S-phosphorothioate
  modified_base 16: mod_base = OTHER; note = 2-fluororibose cytosine
  modified_base 16..17: mod_base = OTHER; note R-N-(1,3-dimethylimidazolidin-2-ylidene)phosphoramidate
  modified_base 17: mod_base = OTHER; note = 2-fluororibose cytosine
  modified_base 17..18: mod_base = OTHER; note = S-phosphorothioate
  modified_base 18: mod_base = OTHER; note = 2-fluororibose cytosine
  modified_base 18..19: mod_base = OTHER; note = S-phosphorothioate
  modified_base 19: mod_base = OTHER; note = 2-fluororibose uracil
  modified_base 19..20: mod_base = OTHER; note = S-phosphorothioate
  modified_base 20: mod_base = OTHER; note = 2-fluororibose uracil
  modified_base 20..21: mod_base = OTHER; note R-N-(1,3-dimethylimidazolidin-2-ylidene)phosphoramidate
  modified_base 21: mod_base = OTHER; note = 2-fluororibose uracil
  modified_base 21..22: mod_base = OTHER; note = S-phosphorothioate
  modified_base 22: mod_base = OTHER; note = 2-fluororibose cytosine
  modified_base 22..23: mod_base = OTHER; note = S-phosphorothioate
  modified_base 23: mod_base = OTHER; note = 2-fluororibose uracil
  modified_base 23..24: mod_base = OTHER; note = S-phosphorothioate
  modified_base 24: mod_base = OTHER; note = deoxyribose 6-amino-9-substituted 8,9-dihydro-7H-purin-8-one
  modified_base 24..25: mod_base = OTHER; note = S-phosphorothioate
  modified_base 25: mod_base = OTHER; note = deoxyribose inosine
  modified_base 25..26: mod_base = OTHER; note S-N-(1,3-dimethylimidazolidin-2-ylidene)phosphoramidate
  modified_base 26: mod_base = um
  modified_base 26..27: mod_base = OTHER; note = S-phosphorothioate
  modified_base 27: mod_base = OTHER; note = 2-fluororibose cytosine
  modified_base 27..28: mod_base = OTHER; note = S-phosphorothioate
  modified_base 28: mod_base = gm
  modified_base 28..29: mod_base = OTHER; note = S-phosphorothioate
  modified_base 29: mod_base = OTHER; note = 2-O-methylribose adenine
  modified_base 29..30: mod_base = OTHER; note R-N-(1,3-dimethylimidazolidin-2-ylidene)phosphoramidate
  modified_base 30: mod_base = um
  source 1..30: mol_type = other RNA

SEQ ID NO: 159 - RNA, 30 nt, synthetic construct; identical to SEQ ID NO: 134
  misc_feature 1..30: note = Synthetic: WV-43116
  misc_feature 1..30: note = Synthetic: ADR-0103758
  modified_base 1: mod_base = OTHER; note = 2-fluororibose cytosine
  modified_base 1..2: mod_base = OTHER; note R-N-(1,3-dimethylimidazolidin-2-ylidene)phosphoramidate
  modified_base 2: mod_base = OTHER; note = 2-fluororibose cytosine
  modified_base 2..3: mod_base = OTHER; note = S-phosphorothioate
  modified_base 3: mod_base = OTHER; note = 2-fluororibose cytosine
  modified_base 3..4: mod_base = OTHER; note R-N-(1,3-dimethylimidazolidin-2-ylidene)phosphoramidate
  modified_base 4: mod_base = OTHER; note = 2-fluororibose adenine
  modified_base 4..5: mod_base = OTHER; note = S-phosphorothioate
  modified_base 5: mod_base = OTHER; note = 2-fluororibose guanine
  modified_base 5..6: mod_base = OTHER; note = S-phosphorothioate
  modified_base 6: mod_base = OTHER; note = 2-fluororibose cytosine
  modified_base 6..7: mod_base = OTHER; note R-N-(1,3-dimethylimidazolidin-2-ylidene)phosphoramidate
  modified_base 7: mod_base = OTHER; note = 2-fluororibose adenine
  modified_base 7..8: mod_base = OTHER; note = S-phosphorothioate
  modified_base 8: mod_base = OTHER; note = 2-fluororibose guanine
  modified_base 8..9: mod_base = OTHER; note = S-phosphorothioate
  modified_base 9: mod_base = OTHER; note = 2-fluororibose cytosine
  modified_base 9..10: mod_base = OTHER; note = S-phosphorothioate
  modified_base 10: mod_base = OTHER; note = 2-fluororibose uracil
  modified_base 10..11: mod_base = OTHER; note = S-phosphorothioate
  modified_base 11: mod_base = OTHER; note = 2-fluororibose uracil
  modified_base 11..12: mod_base = OTHER; note = S-phosphorothioate
  modified_base 12: mod_base = OTHER; note = 2-fluororibose cytosine
  modified_base 12..13: mod_base = OTHER; note = S-phosphorothioate
  modified_base 13: mod_base = OTHER; note = 2-fluororibose adenine
  modified_base 13..14: mod_base = OTHER; note = S-phosphorothioate
  modified_base 14: mod_base = OTHER; note = 2-fluororibose guanine
  modified_base 14..15: mod_base = OTHER; note R-N-(1,3-dimethylimidazolidin-2-ylidene)phosphoramidate
  modified_base 15: mod_base = OTHER; note = 2-fluororibose uracil
  modified_base 15..16: mod_base = OTHER; note = S-phosphorothioate
  modified_base 16: mod_base = OTHER; note = 2-fluororibose cytosine
  modified_base 16..17: mod_base = OTHER; note R-N-(1,3-dimethylimidazolidin-2-ylidene)phosphoramidate
  modified_base 17: mod_base = OTHER; note = 2-fluororibose cytosine
  modified_base 17..18: mod_base = OTHER; note = S-phosphorothioate
  modified_base 18: mod_base = OTHER; note = 2-fluororibose cytosine
  modified_base 18..19: mod_base = OTHER; note = S-phosphorothioate
  modified_base 19: mod_base = OTHER; note = 2-fluororibose uracil
  modified_base 19..20: mod_base = OTHER; note = S-phosphorothioate
  modified_base 20: mod_base = OTHER; note = 2-fluororibose uracil
  modified_base 20..21: mod_base = OTHER; note R-N-(1,3-dimethylimidazolidin-2-ylidene)phosphoramidate
  modified_base 21: mod_base = OTHER; note = 2-fluororibose uracil
  modified_base 21..22: mod_base = OTHER; note = S-phosphorothioate
  modified_base 22: mod_base = OTHER; note = 2-fluororibose cytosine
  modified_base 22..23: mod_base = OTHER; note = S-phosphorothioate
  modified_base 23: mod_base = OTHER; note = 2-fluororibose uracil
  modified_base 23..24: mod_base = OTHER; note = S-phosphorothioate
  modified_base 24: mod_base = OTHER; note = deoxyribose 6-amino-9-substituted 8,9-dihydro-7H-purin-8-one
  modified_base 24..25: mod_base = OTHER; note = S-phosphorothioate
  modified_base 25: mod_base = OTHER; note = deoxyribose inosine
  modified_base 25..26: mod_base = OTHER; note S-N-(1,3-dimethylimidazolidin-2-ylidene)phosphoramidate
  modified_base 26: mod_base = um
  modified_base 26..27: mod_base = OTHER; note = S-phosphorothioate
  modified_base 27: mod_base = OTHER; note = 2-fluororibose cytosine
  modified_base 27..28: mod_base = OTHER; note = S-phosphorothioate
  modified_base 28: mod_base = gm
  modified_base 28..29: mod_base = OTHER; note = S-phosphorothioate
  modified_base 29: mod_base = OTHER; note = 2-O-methylribose adenine
  modified_base 29..30: mod_base = OTHER; note R-N-(1,3-dimethylimidazolidin-2-ylidene)phosphoramidate
  modified_base 30: mod_base = um
  source 1..30: mol_type = other RNA

SEQ ID NO: 160 - RNA, 30 nt, synthetic construct; identical to SEQ ID NO: 134
  misc_feature 1..30: note = Synthetic: WV-43115
  misc_feature 1..30: note = Synthetic: ADR-0103759
  modified_base 1: mod_base = OTHER; note = 2-fluororibose cytosine
  modified_base 1..2: mod_base = OTHER; note R-N-(1,3-dimethylimidazolidin-2-ylidene)phosphoramidate
  modified_base 2: mod_base = OTHER; note = 2-fluororibose cytosine
  modified_base 2..3: mod_base = OTHER; note = S-phosphorothioate
  modified_base 3: mod_base = OTHER; note = 2-fluororibose cytosine
  modified_base 3..4: mod_base = OTHER; note R-N-(1,3-dimethylimidazolidin-2-ylidene)phosphoramidate
  modified_base 4: mod_base = OTHER; note = 2-fluororibose adenine
  modified_base 4..5: mod_base = OTHER; note = S-phosphorothioate
  modified_base 5: mod_base = OTHER; note = 2-fluororibose guanine
  modified_base 5..6: mod_base = OTHER; note = S-phosphorothioate
  modified_base 6: mod_base = OTHER; note = 2-fluororibose cytosine
  modified_base 6..7: mod_base = OTHER; note R-N-(1,3-dimethylimidazolidin-2-ylidene)phosphoramidate
  modified_base 7: mod_base = OTHER; note = 2-fluororibose adenine
  modified_base 7..8: mod_base = OTHER; note = S-phosphorothioate
  modified_base 8: mod_base = OTHER; note = 2-fluororibose guanine
  modified_base 8..9: mod_base = OTHER; note = S-phosphorothioate
  modified_base 9: mod_base = OTHER; note = 2-fluororibose cytosine
  modified_base 9..10: mod_base = OTHER; note = S-phosphorothioate
  modified_base 10: mod_base = OTHER; note = 2-fluororibose uracil
  modified_base 10..11: mod_base = OTHER; note = S-phosphorothioate
  modified_base 11: mod_base = OTHER; note = 2-fluororibose uracil
  modified_base 11..12: mod_base = OTHER; note = S-phosphorothioate
  modified_base 12: mod_base = OTHER; note = 2-fluororibose cytosine
  modified_base 12..13: mod_base = OTHER; note = S-phosphorothioate
  modified_base 13: mod_base = OTHER; note = 2-fluororibose adenine
  modified_base 13..14: mod_base = OTHER; note = S-phosphorothioate
  modified_base 14: mod_base = OTHER; note = 2-fluororibose guanine
  modified_base 14..15: mod_base = OTHER; note R-N-(1,3-dimethylimidazolidin-2-ylidene)phosphoramidate
  modified_base 15: mod_base = OTHER; note = 2-fluororibose uracil
  modified_base 15..16: mod_base = OTHER; note = S-phosphorothioate
  modified_base 16: mod_base = OTHER; note = 2-fluororibose cytosine
  modified_base 16..17: mod_base = OTHER; note R-N-(1,3-dimethylimidazolidin-2-ylidene)phosphoramidate
  modified_base 17: mod_base = OTHER; note = 2-fluororibose cytosine
  modified_base 17..18: mod_base = OTHER; note = S-phosphorothioate
  modified_base 18: mod_base = OTHER; note = 2-fluororibose cytosine
  modified_base 18..19: mod_base = OTHER; note = S-phosphorothioate
  modified_base 19: mod_base = OTHER; note = 2-fluororibose uracil
  modified_base 19..20: mod_base = OTHER; note = S-phosphorothioate
  modified_base 20: mod_base = OTHER; note = 2-fluororibose uracil
  modified_base 20..21: mod_base = OTHER; note R-N-(1,3-dimethylimidazolidin-2-ylidene)phosphoramidate
  modified_base 21: mod_base = OTHER; note = 2-fluororibose uracil
  modified_base 21..22: mod_base = OTHER; note = S-phosphorothioate
  modified_base 22: mod_base = cm
  modified_base 22..23: mod_base = OTHER; note = S-phosphorothioate
  modified_base 23: mod_base = OTHER; note = 2-fluororibose uracil
  modified_base 23..24: mod_base = OTHER; note = S-phosphorothioate
  modified_base 24: mod_base = OTHER; note = deoxyribose 6-amino-9-substituted 8,9-dihydro-7H-purin-8-one
  modified_base 24..25: mod_base = OTHER; note = S-phosphorothioate
  modified_base 25: mod_base = OTHER; note = deoxyribose inosine
  modified_base 25..26: mod_base = OTHER; note S-N-(1,3-dimethylimidazolidin-2-ylidene)phosphoramidate
  modified_base 26: mod_base = um
  modified_base 26..27: mod_base = OTHER; note = S-phosphorothioate
  modified_base 27: mod_base = cm
  modified_base 27..28: mod_base = OTHER; note = S-phosphorothioate
  modified_base 28: mod_base = OTHER; note = 2-fluororibose guanine
  modified_base 28..29: mod_base = OTHER; note = S-phosphorothioate
  modified_base 29: mod_base = OTHER; note = 2-fluororibose adenine
  modified_base 29..30: mod_base = OTHER; note R-N-(1,3-dimethylimidazolidin-2-ylidene)phosphoramidate
  modified_base 30: mod_base = um
  source 1..30: mol_type = other RNA

SEQ ID NO: 161 - RNA, 30 nt, synthetic construct; identical to SEQ ID NO: 134
  misc_feature 1..30: note = Synthetic: WV-43114
  misc_feature 1..30: note = Synthetic: ADR-0104018
  modified_base 1: mod_base = cm
  modified_base 1..2: mod_base = OTHER; note R-N-(1,3-dimethylimidazolidin-2-ylidene)phosphoramidate
  modified_base 2: mod_base = cm
  modified_base 2..3: mod_base = OTHER; note = S-phosphorothioate
  modified_base 3: mod_base = cm
  modified_base 3..4: mod_base = OTHER; note = S-phosphorothioate
  modified_base 4: mod_base = OTHER; note = 2-fluororibose adenine
  modified_base 4..5: mod_base = OTHER; note = S-phosphorothioate
  modified_base 5: mod_base = OTHER; note = 2-fluororibose guanine
  modified_base 5..6: mod_base = OTHER; note = S-phosphorothioate
  modified_base 6: mod_base = OTHER; note = 2-fluororibose cytosine
  modified_base 6..7: mod_base = OTHER; note = S-phosphorothioate
  modified_base 7: mod_base = OTHER; note = 2-fluororibose adenine
  modified_base 7..8: mod_base = OTHER; note = S-phosphorothioate
  modified_base 8: mod_base = OTHER; note = 2-fluororibose guanine
  modified_base 8..9: mod_base = OTHER; note = S-phosphorothioate
  modified_base 9: mod_base = OTHER; note = 2-fluororibose cytosine
  modified_base 9..10: mod_base = OTHER; note = S-phosphorothioate
  modified_base 10: mod_base = OTHER; note = 2-fluororibose uracil
  modified_base 10..11: mod_base = OTHER; note = S-phosphorothioate
  modified_base 11: mod_base = OTHER; note = 2-fluororibose uracil
  modified_base 11..12: mod_base = OTHER; note = S-phosphorothioate
  modified_base 12: mod_base = OTHER; note = 2-fluororibose cytosine
  modified_base 12..13: mod_base = OTHER; note = S-phosphorothioate
  modified_base 13: mod_base = OTHER; note = 2-fluororibose adenine
  modified_base 13..14: mod_base = OTHER; note = S-phosphorothioate
  modified_base 14: mod_base = OTHER; note = 2-fluororibose guanine
  modified_base 14..15: mod_base = OTHER; note = S-phosphorothioate
  modified_base 15: mod_base = OTHER; note = 2-fluororibose uracil
  modified_base 15..16: mod_base = OTHER; note = S-phosphorothioate
  modified_base 16: mod_base = OTHER; note = 2-fluororibose cytosine
  modified_base 16..17: mod_base = OTHER; note = S-phosphorothioate
  modified_base 17: mod_base = OTHER; note = 2-fluororibose cytosine
  modified_base 17..18: mod_base = OTHER; note = S-phosphorothioate
  modified_base 18: mod_base = OTHER; note = 2-fluororibose cytosine
  modified_base 18..19: mod_base = OTHER; note = S-phosphorothioate
  modified_base 19: mod_base = OTHER; note = 2-fluororibose uracil
  modified_base 19..20: mod_base = OTHER; note = S-phosphorothioate
  modified_base 20: mod_base = OTHER; note = 2-fluororibose uracil
  modified_base 20..21: mod_base = OTHER; note = S-phosphorothioate
  modified_base 21: mod_base = OTHER; note = 2-fluororibose uracil
  modified_base 21..22: mod_base = OTHER; note = S-phosphorothioate
  modified_base 22: mod_base = OTHER; note = 2-fluororibose cytosine
  modified_base 22..23: mod_base = OTHER; note = S-phosphorothioate
  modified_base 23: mod_base = OTHER; note = 2-fluororibose uracil
  modified_base 23..24: mod_base = OTHER; note = S-phosphorothioate
  modified_base 24: mod_base = OTHER; note = deoxyribose 6-amino-9-substituted 8,9-dihydro-7H-purin-8-one
  modified_base 24..25: mod_base = OTHER; note = S-phosphorothioate
  modified_base 25: mod_base = OTHER; note = deoxyribose inosine
  modified_base 25..26: mod_base = OTHER; note S-N-(1,3-dimethylimidazolidin-2-ylidene)phosphoramidate
  modified_base 26: mod_base = um
  modified_base 26..27: mod_base = OTHER; note = S-phosphorothioate
  modified_base 27: mod_base = OTHER; note = 2-fluororibose cytosine
  modified_base 27..28: mod_base = OTHER; note = S-phosphorothioate
  modified_base 28: mod_base = gm
  modified_base 28..29: mod_base = OTHER; note = S-phosphorothioate
  modified_base 29: mod_base = OTHER; note = 2-O-methylribose adenine
  modified_base 29..30: mod_base = OTHER; note R-N-(1,3-dimethylimidazolidin-2-ylidene)phosphoramidate
  modified_base 30: mod_base = um
  source 1..30: mol_type = other RNA

SEQ ID NO: 162 - RNA, 30 nt, synthetic construct; identical to SEQ ID NO: 134
  misc_feature 1..30: note = Synthetic: WV-43113
  misc_feature 1..30: note = Synthetic: ADR-0103552
  modified_base 1: mod_base = OTHER; note = 2-fluororibose cytosine
  modified_base 1..2: mod_base = OTHER; note R-N-(1,3-dimethylimidazolidin-2-ylidene)phosphoramidate
  modified_base 2: mod_base = OTHER; note = 2-fluororibose cytosine
  modified_base 2..3: mod_base = OTHER; note = S-phosphorothioate
  modified_base 3: mod_base = OTHER; note = 2-fluororibose cytosine
  modified_base 3..4: mod_base = OTHER; note = S-phosphorothioate
  modified_base 4: mod_base = OTHER; note = 2-fluororibose adenine
  modified_base 4..5: mod_base = OTHER; note = S-phosphorothioate
  modified_base 5: mod_base = OTHER; note = 2-fluororibose guanine
  modified_base 5..6: mod_base = OTHER; note = S-phosphorothioate
  modified_base 6: mod_base = OTHER; note = 2-fluororibose cytosine
  modified_base 6..7: mod_base = OTHER; note = S-phosphorothioate
  modified_base 7: mod_base = OTHER; note = 2-fluororibose adenine
  modified_base 7..8: mod_base = OTHER; note = S-phosphorothioate
  modified_base 8: mod_base = OTHER; note = 2-fluororibose guanine
  modified_base 8..9: mod_base = OTHER; note = S-phosphorothioate
  modified_base 9: mod_base = OTHER; note = 2-fluororibose cytosine
  modified_base 9..10: mod_base = OTHER; note = S-phosphorothioate
  modified_base 10: mod_base = OTHER; note = 2-fluororibose uracil
  modified_base 10..11: mod_base = OTHER; note = S-phosphorothioate
  modified_base 11: mod_base = OTHER; note = 2-fluororibose uracil
  modified_base 11..12: mod_base = OTHER; note = S-phosphorothioate
  modified_base 12: mod_base = OTHER; note = 2-fluororibose cytosine
  modified_base 12..13: mod_base = OTHER; note = S-phosphorothioate
  modified_base 13: mod_base = OTHER; note = 2-fluororibose adenine
  modified_base 13..14: mod_base = OTHER; note = S-phosphorothioate
  modified_base 14: mod_base = OTHER; note = 2-fluororibose guanine
  modified_base 14..15: mod_base = OTHER; note = S-phosphorothioate
  modified_base 15: mod_base = OTHER; note = 2-fluororibose uracil
  modified_base 15..16: mod_base = OTHER; note = S-phosphorothioate
  modified_base 16: mod_base = OTHER; note = 2-fluororibose cytosine
  modified_base 16..17: mod_base = OTHER; note = S-phosphorothioate
  modified_base 17: mod_base = OTHER; note = 2-fluororibose cytosine
  modified_base 17..18: mod_base = OTHER; note = S-phosphorothioate
  modified_base 18: mod_base = OTHER; note = 2-fluororibose cytosine
  modified_base 18..19: mod_base = OTHER; note = S-phosphorothioate
  modified_base 19: mod_base = OTHER; note = 2-fluororibose uracil
  modified_base 19..20: mod_base = OTHER; note = S-phosphorothioate
  modified_base 20: mod_base = OTHER; note = 2-fluororibose uracil
  modified_base 20..21: mod_base = OTHER; note = S-phosphorothioate
  modified_base 21: mod_base = OTHER; note = 2-fluororibose uracil
  modified_base 21..22: mod_base = OTHER; note = S-phosphorothioate
  modified_base 22: mod_base = OTHER; note = 2-fluororibose cytosine
  modified_base 22..23: mod_base = OTHER; note = S-phosphorothioate
  modified_base 23: mod_base = OTHER; note = 2-fluororibose uracil
  modified_base 23..24: mod_base = OTHER; note = S-phosphorothioate
  modified_base 24: mod_base = OTHER; note = deoxyribose 6-amino-9-substituted 8,9-dihydro-7H-purin-8-one
  modified_base 24..25: mod_base = OTHER; note = S-phosphorothioate
  modified_base 25: mod_base = OTHER; note = deoxyribose inosine
  modified_base 25..26: mod_base = OTHER; note S-N-(1,3-dimethylimidazolidin-2-ylidene)phosphoramidate
  modified_base 26: mod_base = um
  modified_base 26..27: mod_base = OTHER; note = S-phosphorothioate
  modified_base 27: mod_base = OTHER; note = 2-fluororibose cytosine
  modified_base 27..28: mod_base = OTHER; note = S-phosphorothioate
  modified_base 28: mod_base = gm
  modified_base 28..29: mod_base = OTHER; note = S-phosphorothioate
  modified_base 29: mod_base = OTHER; note = 2-O-methylribose adenine
  modified_base 29..30: mod_base = OTHER; note R-N-(1,3-dimethylimidazolidin-2-ylidene)phosphoramidate
  modified_base 30: mod_base = um
  source 1..30: mol_type = other RNA

SEQ ID NO: 163 - RNA, 30 nt, synthetic construct; identical to SEQ ID NO: 134
  misc_feature 1..30: note = Synthetic: WV-43112
  misc_feature 1..30: note = Synthetic: ADR-0103553
  modified_base 1: mod_base = OTHER; note = 2-fluororibose cytosine
  modified_base 1..2: mod_base = OTHER; note R-N-(1,3-dimethylimidazolidin-2-ylidene)phosphoramidate
  modified_base 2: mod_base = OTHER; note = 2-fluororibose cytosine
  modified_base 2..3: mod_base = OTHER; note = S-phosphorothioate
  modified_base 3: mod_base = OTHER; note = 2-fluororibose cytosine
  modified_base 3..4: mod_base = OTHER; note = S-phosphorothioate
  modified_base 4: mod_base = OTHER; note = 2-fluororibose adenine
  modified_base 4..5: mod_base = OTHER; note = S-phosphorothioate
  modified_base 5: mod_base = OTHER; note = 2-fluororibose guanine
  modified_base 5..6: mod_base = OTHER; note = S-phosphorothioate
  modified_base 6: mod_base = OTHER; note = 2-fluororibose cytosine
  modified_base 6..7: mod_base = OTHER; note = S-phosphorothioate
  modified_base 7: mod_base = OTHER; note = 2-fluororibose adenine
  modified_base 7..8: mod_base = OTHER; note = S-phosphorothioate
  modified_base 8: mod_base = OTHER; note = 2-fluororibose guanine
  modified_base 8..9: mod_base = OTHER; note = S-phosphorothioate
  modified_base 9: mod_base = OTHER; note = 2-fluororibose cytosine
  modified_base 9..10: mod_base = OTHER; note = S-phosphorothioate
  modified_base 10: mod_base = OTHER; note = 2-fluororibose uracil
  modified_base 10..11: mod_base = OTHER; note = S-phosphorothioate
  modified_base 11: mod_base = OTHER; note = 2-fluororibose uracil
  modified_base 11..12: mod_base = OTHER; note = S-phosphorothioate
  modified_base 12: mod_base = OTHER; note = 2-fluororibose cytosine
  modified_base 12..13: mod_base = OTHER; note = S-phosphorothioate
  modified_base 13: mod_base = OTHER; note = 2-fluororibose adenine
  modified_base 13..14: mod_base = OTHER; note = S-phosphorothioate
  modified_base 14: mod_base = OTHER; note = 2-fluororibose guanine
  modified_base 14..15: mod_base = OTHER; note = S-phosphorothioate
  modified_base 15: mod_base = OTHER; note = 2-fluororibose uracil
  modified_base 15..16: mod_base = OTHER; note = S-phosphorothioate
  modified_base 16: mod_base = OTHER; note = 2-fluororibose cytosine
  modified_base 16..17: mod_base = OTHER; note = S-phosphorothioate
  modified_base 17: mod_base = OTHER; note = 2-fluororibose cytosine
  modified_base 17..18: mod_base = OTHER; note = S-phosphorothioate
  modified_base 18: mod_base = OTHER; note = 2-fluororibose cytosine
  modified_base 18..19: mod_base = OTHER; note = S-phosphorothioate
  modified_base 19: mod_base = OTHER; note = 2-fluororibose uracil
  modified_base 19..20: mod_base = OTHER; note = S-phosphorothioate
  modified_base 20: mod_base = OTHER; note = 2-fluororibose uracil
  modified_base 20..21: mod_base = OTHER; note = S-phosphorothioate
  modified_base 21: mod_base = OTHER; note = 2-fluororibose uracil
  modified_base 21..22: mod_base = OTHER; note = S-phosphorothioate
  modified_base 22: mod_base = cm
  modified_base 22..23: mod_base = OTHER; note = S-phosphorothioate
  modified_base 23: mod_base = OTHER; note = 2-fluororibose uracil
  modified_base 23..24: mod_base = OTHER; note = S-phosphorothioate
  modified_base 24: mod_base = OTHER; note = deoxyribose 6-amino-9-substituted 8,9-dihydro-7H-purin-8-one
  modified_base 24..25: mod_base = OTHER; note = S-phosphorothioate
  modified_base 25: mod_base = OTHER; note = deoxyribose inosine
  modified_base 25..26: mod_base = OTHER; note S-N-(1,3-dimethylimidazolidin-2-ylidene)phosphoramidate
  modified_base 26: mod_base = um
  modified_base 26..27: mod_base = OTHER; note = S-phosphorothioate
  modified_base 27: mod_base = cm
  modified_base 27..28: mod_base = OTHER; note = S-phosphorothioate
  modified_base 28: mod_base = OTHER; note = 2-fluororibose guanine
  modified_base 28..29: mod_base = OTHER; note = S-phosphorothioate
  modified_base 29: mod_base = OTHER; note = 2-fluororibose adenine
  modified_base 29..30: mod_base = OTHER; note R-N-(1,3-dimethylimidazolidin-2-ylidene)phosphoramidate
  modified_base 30: mod_base = um
  source 1..30: mol_type = other RNA

SEQ ID NO: 164 - RNA, 30 nt, synthetic construct; identical to SEQ ID NO: 134
  misc_feature 1..30: note = Synthetic: WV-42986
  misc_feature 1..30: note = Synthetic: ADR-0103629
  modified_base 1: mod_base = OTHER; note = 2-fluororibose cytosine
  modified_base 1..2: mod_base = OTHER; note R-N-(1,3-dimethylimidazolidin-2-ylidene)phosphoramidate
  modified_base 2: mod_base = OTHER; note = 2-fluororibose cytosine
  modified_base 2..3: mod_base = OTHER; note = S-phosphorothioate
  modified_base 3: mod_base = OTHER; note = 2-fluororibose cytosine
  modified_base 3..4: mod_base = OTHER; note = S-phosphorothioate
  modified_base 4: mod_base = OTHER; note = 2-fluororibose adenine
  modified_base 4..5: mod_base = OTHER; note = S-phosphorothioate
  modified_base 5: mod_base = OTHER; note = 2-fluororibose guanine
  modified_base 5..6: mod_base = OTHER; note = S-phosphorothioate
  modified_base 6: mod_base = OTHER; note = 2-fluororibose cytosine
  modified_base 6..7: mod_base = OTHER; note = S-phosphorothioate
  modified_base 7: mod_base = OTHER; note = 2-fluororibose adenine
  modified_base 7..8: mod_base = OTHER; note = S-phosphorothioate
  modified_base 8: mod_base = OTHER; note = 2-fluororibose guanine
  modified_base 8..9: mod_base = OTHER; note = S-phosphorothioate
  modified_base 9: mod_base = OTHER; note = 2-fluororibose cytosine
  modified_base 9..10: mod_base = OTHER; note = S-phosphorothioate
  modified_base 10: mod_base = OTHER; note = 2-fluororibose uracil
  modified_base 10..11: mod_base = OTHER; note = S-phosphorothioate
  modified_base 11: mod_base = OTHER; note = 2-fluororibose uracil
  modified_base 11..12: mod_base = OTHER; note = S-phosphorothioate
  modified_base 12: mod_base = OTHER; note = 2-fluororibose cytosine
  modified_base 12..13: mod_base = OTHER; note = S-phosphorothioate
  modified_base 13: mod_base = OTHER; note = 2-fluororibose adenine
  modified_base 13..14: mod_base = OTHER; note = S-phosphorothioate
  modified_base 14: mod_base = OTHER; note = 2-fluororibose guanine
  modified_base 14..15: mod_base = OTHER; note = S-phosphorothioate
  modified_base 15: mod_base = OTHER; note = 2-fluororibose uracil
  modified_base 15..16: mod_base = OTHER; note = S-phosphorothioate
  modified_base 16: mod_base = cm
  modified_base 16..17: mod_base = OTHER; note = S-phosphorothioate
  modified_base 17: mod_base = cm
  modified_base 17..18: mod_base = OTHER; note = S-phosphorothioate
  modified_base 18: mod_base = cm
  modified_base 18..19: mod_base = OTHER; note = S-phosphorothioate
  modified_base 19: mod_base = um
  modified_base 19..20: mod_base = OTHER; note = S-phosphorothioate
  modified_base 20: mod_base = um
  modified_base 20..21: mod_base = OTHER; note = S-phosphorothioate
  modified_base 21: mod_base = um
  modified_base 21..22: mod_base = OTHER; note = S-phosphorothioate
  modified_base 22: mod_base = cm
  modified_base 22..23: mod_base = OTHER; note = S-phosphorothioate
  modified_base 23: mod_base = OTHER; note = 2-fluororibose uracil
  modified_base 23..24: mod_base = OTHER; note = S-phosphorothioate
  modified_base 24: mod_base = OTHER; note = deoxyribose 6-amino-9-substituted 8,9-dihydro-7H-purin-8-one
  modified_base 24..25: mod_base = OTHER; note = S-phosphorothioate
  modified_base 25: mod_base = OTHER; note = deoxyribose inosine
  modified_base 25..26: mod_base = OTHER; note S-N-(1,3-dimethylimidazolidin-2-ylidene)phosphoramidate
  modified_base 26: mod_base = um
  modified_base 26..27: mod_base = OTHER; note = S-phosphorothioate
  modified_base 27: mod_base = cm
  modified_base 27..28: mod_base = OTHER; note R-N-(1,3-dimethylimidazolidin-2-ylidene)phosphoramidate
  modified_base 28: mod_base = gm
  modified_base 28..29: mod_base = OTHER; note = S-phosphorothioate
  modified_base 29: mod_base = OTHER; note = 2-O-methylribose adenine
  modified_base 29..30: mod_base = OTHER; note R-N-(1,3-dimethylimidazolidin-2-ylidene)phosphoramidate
  modified_base 30: mod_base = um
  source 1..30: mol_type = other RNA

SEQ ID NO: 165 - RNA, 30 nt, synthetic construct; identical to SEQ ID NO: 134
  misc_feature 1..30: note = Synthetic: WV-42985
  misc_feature 1..30: note = Synthetic: ADR-0103630
  modified_base 1: mod_base = OTHER; note = 2-fluororibose cytosine
  modified_base 1..2: mod_base = OTHER; note R-N-(1,3-dimethylimidazolidin-2-ylidene)phosphoramidate
  modified_base 2: mod_base = OTHER; note = 2-fluororibose cytosine
  modified_base 2..3: mod_base = OTHER; note = S-phosphorothioate
  modified_base 3: mod_base = OTHER; note = 2-fluororibose cytosine
  modified_base 3..4: mod_base = OTHER; note = S-phosphorothioate
  modified_base 4: mod_base = OTHER; note = 2-fluororibose adenine
  modified_base 4..5: mod_base = OTHER; note = S-phosphorothioate
  modified_base 5: mod_base = OTHER; note = 2-fluororibose guanine
  modified_base 5..6: mod_base = OTHER; note = S-phosphorothioate
  modified_base 6: mod_base = OTHER; note = 2-fluororibose cytosine
  modified_base 6..7: mod_base = OTHER; note = S-phosphorothioate
  modified_base 7: mod_base = OTHER; note = 2-fluororibose adenine
  modified_base 7..8: mod_base = OTHER; note = S-phosphorothioate
  modified_base 8: mod_base = OTHER; note = 2-fluororibose guanine
  modified_base 8..9: mod_base = OTHER; note = S-phosphorothioate
  modified_base 9: mod_base = OTHER; note = 2-fluororibose cytosine
  modified_base 9..10: mod_base = OTHER; note = S-phosphorothioate
  modified_base 10: mod_base = OTHER; note = 2-fluororibose uracil
  modified_base 10..11: mod_base = OTHER; note = S-phosphorothioate
  modified_base 11: mod_base = OTHER; note = 2-fluororibose uracil
  modified_base 11..12: mod_base = OTHER; note = S-phosphorothioate
  modified_base 12: mod_base = OTHER; note = 2-fluororibose cytosine
  modified_base 12..13: mod_base = OTHER; note = S-phosphorothioate
  modified_base 13: mod_base = OTHER; note = 2-fluororibose adenine
  modified_base 13..14: mod_base = OTHER; note = S-phosphorothioate
  modified_base 14: mod_base = OTHER; note = 2-fluororibose guanine
  modified_base 14..15: mod_base = OTHER; note = S-phosphorothioate
  modified_base 15: mod_base = OTHER; note = 2-fluororibose uracil
  modified_base 15..16: mod_base = OTHER; note = S-phosphorothioate
  modified_base 16: mod_base = cm
  modified_base 16..17: mod_base = OTHER; note = S-phosphorothioate
  modified_base 17: mod_base = cm
  modified_base 17..18: mod_base = OTHER; note = S-phosphorothioate
  modified_base 18: mod_base = cm
  modified_base 18..19: mod_base = OTHER; note = S-phosphorothioate
  modified_base 19: mod_base = um
  modified_base 19..20: mod_base = OTHER; note = S-phosphorothioate
  modified_base 20: mod_base = um
  modified_base 20..21: mod_base = OTHER; note = S-phosphorothioate
  modified_base 21: mod_base = um
  modified_base 21..22: mod_base = OTHER; note = S-phosphorothioate
  modified_base 22: mod_base = cm
  modified_base 22..23: mod_base = OTHER; note = S-phosphorothioate
  modified_base 23: mod_base = OTHER; note = 2-fluororibose uracil
  modified_base 23..24: mod_base = OTHER; note = S-phosphorothioate
  modified_base 24: mod_base = OTHER; note = deoxyribose 6-amino-9-substituted 8,9-dihydro-7H-purin-8-one
  modified_base 24..25: mod_base = OTHER; note = S-phosphorothioate
  modified_base 25: mod_base = OTHER; note = deoxyribose inosine
  modified_base 25..26: mod_base = OTHER; note S-N-(1,3-dimethylimidazolidin-2-ylidene)phosphoramidate
  modified_base 26: mod_base = um
  modified_base 26..27: mod_base = OTHER; note R-N-(1,3-dimethylimidazolidin-2-ylidene)phosphoramidate
  modified_base 27: mod_base = cm
  modified_base 27..28: mod_base = OTHER; note = S-phosphorothioate
  modified_base 28: mod_base = gm
  modified_base 28..29: mod_base = OTHER; note = S-phosphorothioate
  modified_base 29: mod_base = OTHER; note = 2-O-methylribose adenine
  modified_base 29..30: mod_base = OTHER; note R-N-(1,3-dimethylimidazolidin-2-ylidene)phosphoramidate
  modified_base 30: mod_base = um
  source 1..30: mol_type = other RNA

SEQ ID NO: 166 - RNA, 30 nt, synthetic construct; identical to SEQ ID NO: 134
  misc_feature 1..30: note = Synthetic: WV-42984
  misc_feature 1..30: note = Synthetic: ADR-0103631
  modified_base 1: mod_base = OTHER; note = 2-fluororibose cytosine
  modified_base 1..2: mod_base = OTHER; note R-N-(1,3-dimethylimidazolidin-2-ylidene)phosphoramidate
  modified_base 2: mod_base = OTHER; note = 2-fluororibose cytosine
  modified_base 2..3: mod_base = OTHER; note = S-phosphorothioate
  modified_base 3: mod_base = OTHER; note = 2-fluororibose cytosine
  modified_base 3..4: mod_base = OTHER; note = S-phosphorothioate
  modified_base 4: mod_base = OTHER; note = 2-fluororibose adenine
  modified_base 4..5: mod_base = OTHER; note = S-phosphorothioate
  modified_base 5: mod_base = OTHER; note = 2-fluororibose guanine
  modified_base 5..6: mod_base = OTHER; note = S-phosphorothioate
  modified_base 6: mod_base = OTHER; note = 2-fluororibose cytosine
  modified_base 6..7: mod_base = OTHER; note = S-phosphorothioate
  modified_base 7: mod_base = OTHER; note = 2-fluororibose adenine
  modified_base 7..8: mod_base = OTHER; note = S-phosphorothioate
  modified_base 8: mod_base = OTHER; note = 2-fluororibose guanine
  modified_base 8..9: mod_base = OTHER; note = S-phosphorothioate
  modified_base 9: mod_base = OTHER; note = 2-fluororibose cytosine
  modified_base 9..10: mod_base = OTHER; note = S-phosphorothioate
  modified_base 10: mod_base = OTHER; note = 2-fluororibose uracil
  modified_base 10..11: mod_base = OTHER; note = S-phosphorothioate
  modified_base 11: mod_base = OTHER; note = 2-fluororibose uracil
  modified_base 11..12: mod_base = OTHER; note = S-phosphorothioate
  modified_base 12: mod_base = OTHER; note = 2-fluororibose cytosine
  modified_base 12..13: mod_base = OTHER; note = S-phosphorothioate
  modified_base 13: mod_base = OTHER; note = 2-fluororibose adenine
  modified_base 13..14: mod_base = OTHER; note = S-phosphorothioate
  modified_base 14: mod_base = OTHER; note = 2-fluororibose guanine
  modified_base 14..15: mod_base = OTHER; note = S-phosphorothioate
  modified_base 15: mod_base = OTHER; note = 2-fluororibose uracil
  modified_base 15..16: mod_base = OTHER; note = S-phosphorothioate
  modified_base 16: mod_base = cm
  modified_base 16..17: mod_base = OTHER; note = S-phosphorothioate
  modified_base 17: mod_base = cm
  modified_base 17..18: mod_base = OTHER; note = S-phosphorothioate
  modified_base 18: mod_base = cm
  modified_base 18..19: mod_base = OTHER; note = S-phosphorothioate
  modified_base 19: mod_base = um
  modified_base 19..20: mod_base = OTHER; note = S-phosphorothioate
  modified_base 20: mod_base = um
  modified_base 20..21: mod_base = OTHER; note = S-phosphorothioate
  modified_base 21: mod_base = um
  modified_base 21..22: mod_base = OTHER; note = S-phosphorothioate
  modified_base 22: mod_base = cm
  modified_base 22..23: mod_base = OTHER; note = S-phosphorothioate
  modified_base 23: mod_base = OTHER; note = 2-fluororibose uracil
  modified_base 23..24: mod_base = OTHER; note = S-phosphorothioate
  modified_base 24: mod_base = OTHER; note = deoxyribose 6-amino-9-substituted 8,9-dihydro-7H-purin-8-one
  modified_base 24..25: mod_base = OTHER; note R-N-(1,3-dimethylimidazolidin-2-ylidene)phosphoramidate
  modified_base 25: mod_base = OTHER; note = deoxyribose inosine
  modified_base 25..26: mod_base = OTHER; note S-N-(1,3-dimethylimidazolidin-2-ylidene)phosphoramidate
  modified_base 26: mod_base = um
  modified_base 26..27: mod_base = OTHER; note = S-phosphorothioate
  modified_base 27: mod_base = cm
  modified_base 27..28: mod_base = OTHER; note = S-phosphorothioate
  modified_base 28: mod_base = gm
  modified_base 28..29: mod_base = OTHER; note = S-phosphorothioate
  modified_base 29: mod_base = OTHER; note = 2-O-methylribose adenine
  modified_base 29..30: mod_base = OTHER; note R-N-(1,3-dimethylimidazolidin-2-ylidene)phosphoramidate
  modified_base 30: mod_base = um
  source 1..30: mol_type = other RNA

SEQ ID NO: 167 - RNA, 30 nt, synthetic construct; identical to SEQ ID NO: 134
  misc_feature 1..30: note = Synthetic: WV-42983
  misc_feature 1..30: note = Synthetic: ADR-0103636
  modified_base 1: mod_base = OTHER; note = 2-fluororibose cytosine
  modified_base 1..2: mod_base = OTHER; note R-N-(1,3-dimethylimidazolidin-2-ylidene)phosphoramidate
  modified_base 2: mod_base = OTHER; note = 2-fluororibose cytosine
  modified_base 2..3: mod_base = OTHER; note = S-phosphorothioate
  modified_base 3: mod_base = OTHER; note = 2-fluororibose cytosine
  modified_base 3..4: mod_base = OTHER; note = S-phosphorothioate
  modified_base 4: mod_base = OTHER; note = 2-fluororibose adenine
  modified_base 4..5: mod_base = OTHER; note = S-phosphorothioate
  modified_base 5: mod_base = OTHER; note = 2-fluororibose guanine
  modified_base 5..6: mod_base = OTHER; note = S-phosphorothioate
  modified_base 6: mod_base = OTHER; note = 2-fluororibose cytosine
  modified_base 6..7: mod_base = OTHER; note = S-phosphorothioate
  modified_base 7: mod_base = OTHER; note = 2-fluororibose adenine
  modified_base 7..8: mod_base = OTHER; note = S-phosphorothioate
  modified_base 8: mod_base = OTHER; note = 2-fluororibose guanine
  modified_base 8..9: mod_base = OTHER; note = S-phosphorothioate
  modified_base 9: mod_base = OTHER; note = 2-fluororibose cytosine
  modified_base 9..10: mod_base = OTHER; note = S-phosphorothioate
  modified_base 10: mod_base = OTHER; note = 2-fluororibose uracil
  modified_base 10..11: mod_base = OTHER; note = S-phosphorothioate
  modified_base 11: mod_base = OTHER; note = 2-fluororibose uracil
  modified_base 11..12: mod_base = OTHER; note = S-phosphorothioate
  modified_base 12: mod_base = OTHER; note = 2-fluororibose cytosine
  modified_base 12..13: mod_base = OTHER; note = S-phosphorothioate
  modified_base 13: mod_base = OTHER; note = 2-fluororibose adenine
  modified_base 13..14: mod_base = OTHER; note = S-phosphorothioate
  modified_base 14: mod_base = OTHER; note = 2-fluororibose guanine
  modified_base 14..15: mod_base = OTHER; note = S-phosphorothioate
  modified_base 15: mod_base = OTHER; note = 2-fluororibose uracil
  modified_base 15..16: mod_base = OTHER; note = S-phosphorothioate
  modified_base 16: mod_base = cm
  modified_base 16..17: mod_base = OTHER; note = S-phosphorothioate
  modified_base 17: mod_base = cm
  modified_base 17..18: mod_base = OTHER; note = S-phosphorothioate
  modified_base 18: mod_base = cm
  modified_base 18..19: mod_base = OTHER; note = S-phosphorothioate
  modified_base 19: mod_base = um
  modified_base 19..20: mod_base = OTHER; note = S-phosphorothioate
  modified_base 20: mod_base = um
  modified_base 20..21: mod_base = OTHER; note = S-phosphorothioate
  modified_base 21: mod_base = um
  modified_base 21..22: mod_base = OTHER; note = S-phosphorothioate
  modified_base 22: mod_base = cm
  modified_base 22..23: mod_base = OTHER; note = S-phosphorothioate
  modified_base 23: mod_base = OTHER; note = 2-fluororibose uracil
  modified_base 23..24: mod_base = OTHER; note R-N-(1,3-dimethylimidazolidin-2-ylidene)phosphoramidate
  modified_base 24: mod_base = OTHER; note = deoxyribose 6-amino-9-substituted 8,9-dihydro-7H-purin-8-one
  modified_base 24..25: mod_base = OTHER; note = S-phosphorothioate
  modified_base 25: mod_base = OTHER; note = deoxyribose inosine
  modified_base 25..26: mod_base = OTHER; note S-N-(1,3-dimethylimidazolidin-2-ylidene)phosphoramidate
  modified_base 26: mod_base = um
  modified_base 26..27: mod_base = OTHER; note = S-phosphorothioate
  modified_base 27: mod_base = cm
  modified_base 27..28: mod_base = OTHER; note = S-phosphorothioate
  modified_base 28: mod_base = gm
  modified_base 28..29: mod_base = OTHER; note = S-phosphorothioate
  modified_base 29: mod_base = OTHER; note = 2-O-methylribose adenine
  modified_base 29..30: mod_base = OTHER; note R-N-(1,3-dimethylimidazolidin-2-ylidene)phosphoramidate
  modified_base 30: mod_base = um
  source 1..30: mol_type = other RNA

SEQ ID NO: 168 - RNA, 30 nt, synthetic construct; identical to SEQ ID NO: 134
  misc_feature 1..30: note = Synthetic: WV-42982
  misc_feature 1..30: note = Synthetic: ADR-0103652
  modified_base 1: mod_base = OTHER; note = 2-fluororibose cytosine
  modified_base 1..2: mod_base = OTHER; note R-N-(1,3-dimethylimidazolidin-2-ylidene)phosphoramidate
  modified_base 2: mod_base = OTHER; note = 2-fluororibose cytosine
  modified_base 2..3: mod_base = OTHER; note = S-phosphorothioate
  modified_base 3: mod_base = OTHER; note = 2-fluororibose cytosine
  modified_base 3..4: mod_base = OTHER; note = S-phosphorothioate
  modified_base 4: mod_base = OTHER; note = 2-fluororibose adenine
  modified_base 4..5: mod_base = OTHER; note = S-phosphorothioate
  modified_base 5: mod_base = OTHER; note = 2-fluororibose guanine
  modified_base 5..6: mod_base = OTHER; note = S-phosphorothioate
  modified_base 6: mod_base = OTHER; note = 2-fluororibose cytosine
  modified_base 6..7: mod_base = OTHER; note = S-phosphorothioate
  modified_base 7: mod_base = OTHER; note = 2-fluororibose adenine
  modified_base 7..8: mod_base = OTHER; note = S-phosphorothioate
  modified_base 8: mod_base = OTHER; note = 2-fluororibose guanine
  modified_base 8..9: mod_base = OTHER; note = S-phosphorothioate
  modified_base 9: mod_base = OTHER; note = 2-fluororibose cytosine
  modified_base 9..10: mod_base = OTHER; note = S-phosphorothioate
  modified_base 10: mod_base = OTHER; note = 2-fluororibose uracil
  modified_base 10..11: mod_base = OTHER; note = S-phosphorothioate
  modified_base 11: mod_base = OTHER; note = 2-fluororibose uracil
  modified_base 11..12: mod_base = OTHER; note = S-phosphorothioate
  modified_base 12: mod_base = OTHER; note = 2-fluororibose cytosine
  modified_base 12..13: mod_base = OTHER; note = S-phosphorothioate
  modified_base 13: mod_base = OTHER; note = 2-fluororibose adenine
  modified_base 13..14: mod_base = OTHER; note = S-phosphorothioate
  modified_base 14: mod_base = OTHER; note = 2-fluororibose guanine
  modified_base 14..15: mod_base = OTHER; note = S-phosphorothioate
  modified_base 15: mod_base = OTHER; note = 2-fluororibose uracil
  modified_base 15..16: mod_base = OTHER; note = S-phosphorothioate
  modified_base 16: mod_base = cm
  modified_base 16..17: mod_base = OTHER; note = S-phosphorothioate
  modified_base 17: mod_base = cm
  modified_base 17..18: mod_base = OTHER; note = S-phosphorothioate
  modified_base 18: mod_base = cm
  modified_base 18..19: mod_base = OTHER; note = S-phosphorothioate
  modified_base 19: mod_base = um
  modified_base 19..20: mod_base = OTHER; note = S-phosphorothioate
  modified_base 20: mod_base = um
  modified_base 20..21: mod_base = OTHER; note = S-phosphorothioate
  modified_base 21: mod_base = um
  modified_base 21..22: mod_base = OTHER; note = S-phosphorothioate
  modified_base 22: mod_base = cm
  modified_base 22..23: mod_base = OTHER; note R-N-(1,3-dimethylimidazolidin-2-ylidene)phosphoramidate
  modified_base 23: mod_base = OTHER; note = 2-fluororibose uracil
  modified_base 23..24: mod_base = OTHER; note = S-phosphorothioate
  modified_base 24: mod_base = OTHER; note = deoxyribose 6-amino-9-substituted 8,9-dihydro-7H-purin-8-one
  modified_base 24..25: mod_base = OTHER; note = S-phosphorothioate
  modified_base 25: mod_base = OTHER; note = deoxyribose inosine
  modified_base 25..26: mod_base = OTHER; note S-N-(1,3-dimethylimidazolidin-2-ylidene)phosphoramidate
  modified_base 26: mod_base = um
  modified_base 26..27: mod_base = OTHER; note = S-phosphorothioate
  modified_base 27: mod_base = cm
  modified_base 27..28: mod_base = OTHER; note = S-phosphorothioate
  modified_base 28: mod_base = gm
  modified_base 28..29: mod_base = OTHER; note = S-phosphorothioate
  modified_base 29: mod_base = OTHER; note = 2-O-methylribose adenine
  modified_base 29..30: mod_base = OTHER; note R-N-(1,3-dimethylimidazolidin-2-ylidene)phosphoramidate
  modified_base 30: mod_base = um
  source 1..30: mol_type = other RNA

SEQ ID NO: 169 - RNA, 30 nt, synthetic construct; identical to SEQ ID NO: 134
  misc_feature 1..30: note = Synthetic: WV-42981
  misc_feature 1..30: note = Synthetic: ADR-0103653
  modified_base 1: mod_base = OTHER; note = 2-fluororibose cytosine
  modified_base 1..2: mod_base = OTHER; note R-N-(1,3-dimethylimidazolidin-2-ylidene)phosphoramidate
  modified_base 2: mod_base = OTHER; note = 2-fluororibose cytosine
  modified_base 2..3: mod_base = OTHER; note = S-phosphorothioate
  modified_base 3: mod_base = OTHER; note = 2-fluororibose cytosine
  modified_base 3..4: mod_base = OTHER; note = S-phosphorothioate
  modified_base 4: mod_base = OTHER; note = 2-fluororibose adenine
  modified_base 4..5: mod_base = OTHER; note = S-phosphorothioate
  modified_base 5: mod_base = OTHER; note = 2-fluororibose guanine
  modified_base 5..6: mod_base = OTHER; note = S-phosphorothioate
  modified_base 6: mod_base = OTHER; note = 2-fluororibose cytosine
  modified_base 6..7: mod_base = OTHER; note = S-phosphorothioate
  modified_base 7: mod_base = OTHER; note = 2-fluororibose adenine
  modified_base 7..8: mod_base = OTHER; note = S-phosphorothioate
  modified_base 8: mod_base = OTHER; note = 2-fluororibose guanine
  modified_base 8..9: mod_base = OTHER; note = S-phosphorothioate
  modified_base 9: mod_base = OTHER; note = 2-fluororibose cytosine
  modified_base 9..10: mod_base = OTHER; note = S-phosphorothioate
  modified_base 10: mod_base = OTHER; note = 2-fluororibose uracil
  modified_base 10..11: mod_base = OTHER; note = S-phosphorothioate
  modified_base 11: mod_base = OTHER; note = 2-fluororibose uracil
  modified_base 11..12: mod_base = OTHER; note = S-phosphorothioate
  modified_base 12: mod_base = OTHER; note = 2-fluororibose cytosine
  modified_base 12..13: mod_base = OTHER; note = S-phosphorothioate
  modified_base 13: mod_base = OTHER; note = 2-fluororibose adenine
  modified_base 13..14: mod_base = OTHER; note = S-phosphorothioate
  modified_base 14: mod_base = OTHER; note = 2-fluororibose guanine
  modified_base 14..15: mod_base = OTHER; note = S-phosphorothioate
  modified_base 15: mod_base = OTHER; note = 2-fluororibose uracil
  modified_base 15..16: mod_base = OTHER; note = S-phosphorothioate
  modified_base 16: mod_base = cm
  modified_base 16..17: mod_base = OTHER; note = S-phosphorothioate
  modified_base 17: mod_base = cm
  modified_base 17..18: mod_base = OTHER; note = S-phosphorothioate
  modified_base 18: mod_base = cm
  modified_base 18..19: mod_base = OTHER; note = S-phosphorothioate
  modified_base 19: mod_base = um
  modified_base 19..20: mod_base = OTHER; note = S-phosphorothioate
  modified_base 20: mod_base = um
  modified_base 20..21: mod_base = OTHER; note = S-phosphorothioate
  modified_base 21: mod_base = um
  modified_base 21..22: mod_base = OTHER; note R-N-(1,3-dimethylimidazolidin-2-ylidene)phosphoramidate
  modified_base 22: mod_base = cm
  modified_base 22..23: mod_base = OTHER; note = S-phosphorothioate
  modified_base 23: mod_base = OTHER; note = 2-fluororibose uracil
  modified_base 23..24: mod_base = OTHER; note = S-phosphorothioate
  modified_base 24: mod_base = OTHER; note = deoxyribose 6-amino-9-substituted 8,9-dihydro-7H-purin-8-one
  modified_base 24..25: mod_base = OTHER; note = S-phosphorothioate
  modified_base 25: mod_base = OTHER; note = deoxyribose inosine
  modified_base 25..26: mod_base = OTHER; note S-N-(1,3-dimethylimidazolidin-2-ylidene)phosphoramidate
  modified_base 26: mod_base = um
  modified_base 26..27: mod_base = OTHER; note = S-phosphorothioate
  modified_base 27: mod_base = cm
  modified_base 27..28: mod_base = OTHER; note = S-phosphorothioate
  modified_base 28: mod_base = gm
  modified_base 28..29: mod_base = OTHER; note = S-phosphorothioate
  modified_base 29: mod_base = OTHER; note = 2-O-methylribose adenine
  modified_base 29..30: mod_base = OTHER; note R-N-(1,3-dimethylimidazolidin-2-ylidene)phosphoramidate
  modified_base 30: mod_base = um
  source 1..30: mol_type = other RNA

SEQ ID NO: 170 - RNA, 30 nt, synthetic construct; identical to SEQ ID NO: 134
  misc_feature 1..30: note = Synthetic: WV-42980
  misc_feature 1..30: note = Synthetic: ADR-0103655
  modified_base 1: mod_base = OTHER; note = 2-fluororibose cytosine
  modified_base 1..2: mod_base = OTHER; note R-N-(1,3-dimethylimidazolidin-2-ylidene)phosphoramidate
  modified_base 2: mod_base = OTHER; note = 2-fluororibose cytosine
  modified_base 2..3: mod_base = OTHER; note = S-phosphorothioate
  modified_base 3: mod_base = OTHER; note = 2-fluororibose cytosine
  modified_base 3..4: mod_base = OTHER; note = S-phosphorothioate
  modified_base 4: mod_base = OTHER; note = 2-fluororibose adenine
  modified_base 4..5: mod_base = OTHER; note = S-phosphorothioate
  modified_base 5: mod_base = OTHER; note = 2-fluororibose guanine
  modified_base 5..6: mod_base = OTHER; note = S-phosphorothioate
  modified_base 6: mod_base = OTHER; note = 2-fluororibose cytosine
  modified_base 6..7: mod_base = OTHER; note = S-phosphorothioate
  modified_base 7: mod_base = OTHER; note = 2-fluororibose adenine
  modified_base 7..8: mod_base = OTHER; note = S-phosphorothioate
  modified_base 8: mod_base = OTHER; note = 2-fluororibose guanine
  modified_base 8..9: mod_base = OTHER; note = S-phosphorothioate
  modified_base 9: mod_base = OTHER; note = 2-fluororibose cytosine
  modified_base 9..10: mod_base = OTHER; note = S-phosphorothioate
  modified_base 10: mod_base = OTHER; note = 2-fluororibose uracil
  modified_base 10..11: mod_base = OTHER; note = S-phosphorothioate
  modified_base 11: mod_base = OTHER; note = 2-fluororibose uracil
  modified_base 11..12: mod_base = OTHER; note = S-phosphorothioate
  modified_base 12: mod_base = OTHER; note = 2-fluororibose cytosine
  modified_base 12..13: mod_base = OTHER; note = S-phosphorothioate
  modified_base 13: mod_base = OTHER; note = 2-fluororibose adenine
  modified_base 13..14: mod_base = OTHER; note = S-phosphorothioate
  modified_base 14: mod_base = OTHER; note = 2-fluororibose guanine
  modified_base 14..15: mod_base = OTHER; note = S-phosphorothioate
  modified_base 15: mod_base = OTHER; note = 2-fluororibose uracil
  modified_base 15..16: mod_base = OTHER; note = S-phosphorothioate
  modified_base 16: mod_base = cm
  modified_base 16..17: mod_base = OTHER; note = S-phosphorothioate
  modified_base 17: mod_base = cm
  modified_base 17..18: mod_base = OTHER; note = S-phosphorothioate
  modified_base 18: mod_base = cm
  modified_base 18..19: mod_base = OTHER; note = S-phosphorothioate
  modified_base 19: mod_base = um
  modified_base 19..20: mod_base = OTHER; note = S-phosphorothioate
  modified_base 20: mod_base = um
  modified_base 20..21: mod_base = OTHER; note R-N-(1,3-dimethylimidazolidin-2-ylidene)phosphoramidate
  modified_base 21: mod_base = um
  modified_base 21..22: mod_base = OTHER; note = S-phosphorothioate
  modified_base 22: mod_base = cm
  modified_base 22..23: mod_base = OTHER; note = S-phosphorothioate
  modified_base 23: mod_base = OTHER; note = 2-fluororibose uracil
  modified_base 23..24: mod_base = OTHER; note = S-phosphorothioate
  modified_base 24: mod_base = OTHER; note = deoxyribose 6-amino-9-substituted 8,9-dihydro-7H-purin-8-one
  modified_base 24..25: mod_base = OTHER; note = S-phosphorothioate
  modified_base 25: mod_base = OTHER; note = deoxyribose inosine
  modified_base 25..26: mod_base = OTHER; note S-N-(1,3-dimethylimidazolidin-2-ylidene)phosphoramidate
  modified_base 26: mod_base = um
  modified_base 26..27: mod_base = OTHER; note = S-phosphorothioate
  modified_base 27: mod_base = cm
  modified_base 27..28: mod_base = OTHER; note = S-phosphorothioate
  modified_base 28: mod_base = gm
  modified_base 28..29: mod_base = OTHER; note = S-phosphorothioate
  modified_base 29: mod_base = OTHER; note = 2-O-methylribose adenine
  modified_base 29..30: mod_base = OTHER; note R-N-(1,3-dimethylimidazolidin-2-ylidene)phosphoramidate
  modified_base 30: mod_base = um
  source 1..30: mol_type = other RNA

SEQ ID NO: 171 - RNA, 30 nt, synthetic construct; identical to SEQ ID NO: 134
  misc_feature 1..30: note = Synthetic: WV-42979
  misc_feature 1..30: note = Synthetic: ADR-0103657
  modified_base 1: mod_base = OTHER; note = 2-fluororibose cytosine
  modified_base 1..2: mod_base = OTHER; note R-N-(1,3-dimethylimidazolidin-2-ylidene)phosphoramidate
  modified_base 2: mod_base = OTHER; note = 2-fluororibose cytosine
  modified_base 2..3: mod_base = OTHER; note = S-phosphorothioate
  modified_base 3: mod_base = OTHER; note = 2-fluororibose cytosine
  modified_base 3..4: mod_base = OTHER; note = S-phosphorothioate
  modified_base 4: mod_base = OTHER; note = 2-fluororibose adenine
  modified_base 4..5: mod_base = OTHER; note = S-phosphorothioate
  modified_base 5: mod_base = OTHER; note = 2-fluororibose guanine
  modified_base 5..6: mod_base = OTHER; note = S-phosphorothioate
  modified_base 6: mod_base = OTHER; note = 2-fluororibose cytosine
  modified_base 6..7: mod_base = OTHER; note = S-phosphorothioate
  modified_base 7: mod_base = OTHER; note = 2-fluororibose adenine
  modified_base 7..8: mod_base = OTHER; note = S-phosphorothioate
  modified_base 8: mod_base = OTHER; note = 2-fluororibose guanine
  modified_base 8..9: mod_base = OTHER; note = S-phosphorothioate
  modified_base 9: mod_base = OTHER; note = 2-fluororibose cytosine
  modified_base 9..10: mod_base = OTHER; note = S-phosphorothioate
  modified_base 10: mod_base = OTHER; note = 2-fluororibose uracil
  modified_base 10..11: mod_base = OTHER; note = S-phosphorothioate
  modified_base 11: mod_base = OTHER; note = 2-fluororibose uracil
  modified_base 11..12: mod_base = OTHER; note = S-phosphorothioate
  modified_base 12: mod_base = OTHER; note = 2-fluororibose cytosine
  modified_base 12..13: mod_base = OTHER; note = S-phosphorothioate
  modified_base 13: mod_base = OTHER; note = 2-fluororibose adenine
  modified_base 13..14: mod_base = OTHER; note = S-phosphorothioate
  modified_base 14: mod_base = OTHER; note = 2-fluororibose guanine
  modified_base 14..15: mod_base = OTHER; note = S-phosphorothioate
  modified_base 15: mod_base = OTHER; note = 2-fluororibose uracil
  modified_base 15..16: mod_base = OTHER; note = S-phosphorothioate
  modified_base 16: mod_base = cm
  modified_base 16..17: mod_base = OTHER; note = S-phosphorothioate
  modified_base 17: mod_base = cm
  modified_base 17..18: mod_base = OTHER; note = S-phosphorothioate
  modified_base 18: mod_base = cm
  modified_base 18..19: mod_base = OTHER; note = S-phosphorothioate
  modified_base 19: mod_base = um
  modified_base 19..20: mod_base = OTHER; note R-N-(1,3-dimethylimidazolidin-2-ylidene)phosphoramidate
  modified_base 20: mod_base = um
  modified_base 20..21: mod_base = OTHER; note = S-phosphorothioate
  modified_base 21: mod_base = um
  modified_base 21..22: mod_base = OTHER; note = S-phosphorothioate
  modified_base 22: mod_base = cm
  modified_base 22..23: mod_base = OTHER; note = S-phosphorothioate
  modified_base 23: mod_base = OTHER; note = 2-fluororibose uracil
  modified_base 23..24: mod_base = OTHER; note = S-phosphorothioate
  modified_base 24: mod_base = OTHER; note = deoxyribose 6-amino-9-substituted 8,9-dihydro-7H-purin-8-one
  modified_base 24..25: mod_base = OTHER; note = S-phosphorothioate
  modified_base 25: mod_base = OTHER; note = deoxyribose inosine
  modified_base 25..26: mod_base = OTHER; note S-N-(1,3-dimethylimidazolidin-2-ylidene)phosphoramidate
  modified_base 26: mod_base = um
  modified_base 26..27: mod_base = OTHER; note = S-phosphorothioate
  modified_base 27: mod_base = cm
  modified_base 27..28: mod_base = OTHER; note = S-phosphorothioate
  modified_base 28: mod_base = gm
  modified_base 28..29: mod_base = OTHER; note = S-phosphorothioate
  modified_base 29: mod_base = OTHER; note = 2-O-methylribose adenine
  modified_base 29..30: mod_base = OTHER; note R-N-(1,3-dimethylimidazolidin-2-ylidene)phosphoramidate
  modified_base 30: mod_base = um
  source 1..30: mol_type = other RNA

SEQ ID NO: 172 - RNA, 30 nt, synthetic construct; identical to SEQ ID NO: 134
  misc_feature 1..30: note = Synthetic: WV-42978
  misc_feature 1..30: note = Synthetic: ADR-0103660
  modified_base 1: mod_base = OTHER; note = 2-fluororibose cytosine
  modified_base 1..2: mod_base = OTHER; note R-N-(1,3-dimethylimidazolidin-2-ylidene)phosphoramidate
  modified_base 2: mod_base = OTHER; note = 2-fluororibose cytosine
  modified_base 2..3: mod_base = OTHER; note = S-phosphorothioate
  modified_base 3: mod_base = OTHER; note = 2-fluororibose cytosine
  modified_base 3..4: mod_base = OTHER; note = S-phosphorothioate
  modified_base 4: mod_base = OTHER; note = 2-fluororibose adenine
  modified_base 4..5: mod_base = OTHER; note = S-phosphorothioate
  modified_base 5: mod_base = OTHER; note = 2-fluororibose guanine
  modified_base 5..6: mod_base = OTHER; note = S-phosphorothioate
  modified_base 6: mod_base = OTHER; note = 2-fluororibose cytosine
  modified_base 6..7: mod_base = OTHER; note = S-phosphorothioate
  modified_base 7: mod_base = OTHER; note = 2-fluororibose adenine
  modified_base 7..8: mod_base = OTHER; note = S-phosphorothioate
  modified_base 8: mod_base = OTHER; note = 2-fluororibose guanine
  modified_base 8..9: mod_base = OTHER; note = S-phosphorothioate
  modified_base 9: mod_base = OTHER; note = 2-fluororibose cytosine
  modified_base 9..10: mod_base = OTHER; note = S-phosphorothioate
  modified_base 10: mod_base = OTHER; note = 2-fluororibose uracil
  modified_base 10..11: mod_base = OTHER; note = S-phosphorothioate
  modified_base 11: mod_base = OTHER; note = 2-fluororibose uracil
  modified_base 11..12: mod_base = OTHER; note = S-phosphorothioate
  modified_base 12: mod_base = OTHER; note = 2-fluororibose cytosine
  modified_base 12..13: mod_base = OTHER; note = S-phosphorothioate
  modified_base 13: mod_base = OTHER; note = 2-fluororibose adenine
  modified_base 13..14: mod_base = OTHER; note = S-phosphorothioate
  modified_base 14: mod_base = OTHER; note = 2-fluororibose guanine
  modified_base 14..15: mod_base = OTHER; note = S-phosphorothioate
  modified_base 15: mod_base = OTHER; note = 2-fluororibose uracil
  modified_base 15..16: mod_base = OTHER; note = S-phosphorothioate
  modified_base 16: mod_base = cm
  modified_base 16..17: mod_base = OTHER; note = S-phosphorothioate
  modified_base 17: mod_base = cm
  modified_base 17..18: mod_base = OTHER; note = S-phosphorothioate
  modified_base 18: mod_base = cm
  modified_base 18..19: mod_base = OTHER; note R-N-(1,3-dimethylimidazolidin-2-ylidene)phosphoramidate
  modified_base 19: mod_base = um
  modified_base 19..20: mod_base = OTHER; note = S-phosphorothioate
  modified_base 20: mod_base = um
  modified_base 20..21: mod_base = OTHER; note = S-phosphorothioate
  modified_base 21: mod_base = um
  modified_base 21..22: mod_base = OTHER; note = S-phosphorothioate
  modified_base 22: mod_base = cm
  modified_base 22..23: mod_base = OTHER; note = S-phosphorothioate
  modified_base 23: mod_base = OTHER; note = 2-fluororibose uracil
  modified_base 23..24: mod_base = OTHER; note = S-phosphorothioate
  modified_base 24: mod_base = OTHER; note = deoxyribose 6-amino-9-substituted 8,9-dihydro-7H-purin-8-one
  modified_base 24..25: mod_base = OTHER; note = S-phosphorothioate
  modified_base 25: mod_base = OTHER; note = deoxyribose inosine
  modified_base 25..26: mod_base = OTHER; note S-N-(1,3-dimethylimidazolidin-2-ylidene)phosphoramidate
  modified_base 26: mod_base = um
  modified_base 26..27: mod_base = OTHER; note = S-phosphorothioate
  modified_base 27: mod_base = cm
  modified_base 27..28: mod_base = OTHER; note = S-phosphorothioate
  modified_base 28: mod_base = gm
  modified_base 28..29: mod_base = OTHER; note = S-phosphorothioate
  modified_base 29: mod_base = OTHER; note = 2-O-methylribose adenine
  modified_base 29..30: mod_base = OTHER; note R-N-(1,3-dimethylimidazolidin-2-ylidene)phosphoramidate
  modified_base 30: mod_base = um
  source 1..30: mol_type = other RNA

SEQ ID NO: 173 - RNA, 30 nt, synthetic construct; identical to SEQ ID NO: 134
  misc_feature 1..30: note = Synthetic: WV-42977
  misc_feature 1..30: note = Synthetic: ADR-0103663
  modified_base 1: mod_base = OTHER; note = 2-fluororibose cytosine
  modified_base 1..2: mod_base = OTHER; note R-N-(1,3-dimethylimidazolidin-2-ylidene)phosphoramidate
  modified_base 2: mod_base = OTHER; note = 2-fluororibose cytosine
  modified_base 2..3: mod_base = OTHER; note = S-phosphorothioate
  modified_base 3: mod_base = OTHER; note = 2-fluororibose cytosine
  modified_base 3..4: mod_base = OTHER; note = S-phosphorothioate
  modified_base 4: mod_base = OTHER; note = 2-fluororibose adenine
  modified_base 4..5: mod_base = OTHER; note = S-phosphorothioate
  modified_base 5: mod_base = OTHER; note = 2-fluororibose guanine
  modified_base 5..6: mod_base = OTHER; note = S-phosphorothioate
  modified_base 6: mod_base = OTHER; note = 2-fluororibose cytosine
  modified_base 6..7: mod_base = OTHER; note = S-phosphorothioate
  modified_base 7: mod_base = OTHER; note = 2-fluororibose adenine
  modified_base 7..8: mod_base = OTHER; note = S-phosphorothioate
  modified_base 8: mod_base = OTHER; note = 2-fluororibose guanine
  modified_base 8..9: mod_base = OTHER; note = S-phosphorothioate
  modified_base 9: mod_base = OTHER; note = 2-fluororibose cytosine
  modified_base 9..10: mod_base = OTHER; note = S-phosphorothioate
  modified_base 10: mod_base = OTHER; note = 2-fluororibose uracil
  modified_base 10..11: mod_base = OTHER; note = S-phosphorothioate
  modified_base 11: mod_base = OTHER; note = 2-fluororibose uracil
  modified_base 11..12: mod_base = OTHER; note = S-phosphorothioate
  modified_base 12: mod_base = OTHER; note = 2-fluororibose cytosine
  modified_base 12..13: mod_base = OTHER; note = S-phosphorothioate
  modified_base 13: mod_base = OTHER; note = 2-fluororibose adenine
  modified_base 13..14: mod_base = OTHER; note = S-phosphorothioate
  modified_base 14: mod_base = OTHER; note = 2-fluororibose guanine
  modified_base 14..15: mod_base = OTHER; note = S-phosphorothioate
  modified_base 15: mod_base = OTHER; note = 2-fluororibose uracil
  modified_base 15..16: mod_base = OTHER; note = S-phosphorothioate
  modified_base 16: mod_base = cm
  modified_base 16..17: mod_base = OTHER; note = S-phosphorothioate
  modified_base 17: mod_base = cm
  modified_base 17..18: mod_base = OTHER; note R-N-(1,3-dimethylimidazolidin-2-ylidene)phosphoramidate
  modified_base 18: mod_base = cm
  modified_base 18..19: mod_base = OTHER; note = S-phosphorothioate
  modified_base 19: mod_base = um
  modified_base 19..20: mod_base = OTHER; note = S-phosphorothioate
  modified_base 20: mod_base = um
  modified_base 20..21: mod_base = OTHER; note = S-phosphorothioate
  modified_base 21: mod_base = um
  modified_base 21..22: mod_base = OTHER; note = S-phosphorothioate
  modified_base 22: mod_base = cm
  modified_base 22..23: mod_base = OTHER; note = S-phosphorothioate
  modified_base 23: mod_base = OTHER; note = 2-fluororibose uracil
  modified_base 23..24: mod_base = OTHER; note = S-phosphorothioate
  modified_base 24: mod_base = OTHER; note = deoxyribose 6-amino-9-substituted 8,9-dihydro-7H-purin-8-one
  modified_base 24..25: mod_base = OTHER; note = S-phosphorothioate
  modified_base 25: mod_base = OTHER; note = deoxyribose inosine
  modified_base 25..26: mod_base = OTHER; note S-N-(1,3-dimethylimidazolidin-2-ylidene)phosphoramidate
  modified_base 26: mod_base = um
  modified_base 26..27: mod_base = OTHER; note = S-phosphorothioate
  modified_base 27: mod_base = cm
  modified_base 27..28: mod_base = OTHER; note = S-phosphorothioate
  modified_base 28: mod_base = gm
  modified_base 28..29: mod_base = OTHER; note = S-phosphorothioate
  modified_base 29: mod_base = OTHER; note = 2-O-methylribose adenine
  modified_base 29..30: mod_base = OTHER; note R-N-(1,3-dimethylimidazolidin-2-ylidene)phosphoramidate
  modified_base 30: mod_base = um
  source 1..30: mol_type = other RNA

SEQ ID NO: 174 - RNA, 30 nt, synthetic construct; identical to SEQ ID NO: 134
  misc_feature 1..30: note = Synthetic: WV-42976
  misc_feature 1..30: note = Synthetic: ADR-0103666
  modified_base 1: mod_base = OTHER; note = 2-fluororibose cytosine
  modified_base 1..2: mod_base = OTHER; note R-N-(1,3-dimethylimidazolidin-2-ylidene)phosphoramidate
  modified_base 2: mod_base = OTHER; note = 2-fluororibose cytosine
  modified_base 2..3: mod_base = OTHER; note = S-phosphorothioate
  modified_base 3: mod_base = OTHER; note = 2-fluororibose cytosine
  modified_base 3..4: mod_base = OTHER; note = S-phosphorothioate
  modified_base 4: mod_base = OTHER; note = 2-fluororibose adenine
  modified_base 4..5: mod_base = OTHER; note = S-phosphorothioate
  modified_base 5: mod_base = OTHER; note = 2-fluororibose guanine
  modified_base 5..6: mod_base = OTHER; note = S-phosphorothioate
  modified_base 6: mod_base = OTHER; note = 2-fluororibose cytosine
  modified_base 6..7: mod_base = OTHER; note = S-phosphorothioate
  modified_base 7: mod_base = OTHER; note = 2-fluororibose adenine
  modified_base 7..8: mod_base = OTHER; note = S-phosphorothioate
  modified_base 8: mod_base = OTHER; note = 2-fluororibose guanine
  modified_base 8..9: mod_base = OTHER; note = S-phosphorothioate
  modified_base 9: mod_base = OTHER; note = 2-fluororibose cytosine
  modified_base 9..10: mod_base = OTHER; note = S-phosphorothioate
  modified_base 10: mod_base = OTHER; note = 2-fluororibose uracil
  modified_base 10..11: mod_base = OTHER; note = S-phosphorothioate
  modified_base 11: mod_base = OTHER; note = 2-fluororibose uracil
  modified_base 11..12: mod_base = OTHER; note = S-phosphorothioate
  modified_base 12: mod_base = OTHER; note = 2-fluororibose cytosine
  modified_base 12..13: mod_base = OTHER; note = S-phosphorothioate
  modified_base 13: mod_base = OTHER; note = 2-fluororibose adenine
  modified_base 13..14: mod_base = OTHER; note = S-phosphorothioate
  modified_base 14: mod_base = OTHER; note = 2-fluororibose guanine
  modified_base 14..15: mod_base = OTHER; note = S-phosphorothioate
  modified_base 15: mod_base = OTHER; note = 2-fluororibose uracil
  modified_base 15..16: mod_base = OTHER; note = S-phosphorothioate
  modified_base 16: mod_base = cm
  modified_base 16..17: mod_base = OTHER; note R-N-(1,3-dimethylimidazolidin-2-ylidene)phosphoramidate
  modified_base 17: mod_base = cm
  modified_base 17..18: mod_base = OTHER; note = S-phosphorothioate
  modified_base 18: mod_base = cm
  modified_base 18..19: mod_base = OTHER; note = S-phosphorothioate
  modified_base 19: mod_base = um
  modified_base 19..20: mod_base = OTHER; note = S-phosphorothioate
  modified_base 20: mod_base = um
  modified_base 20..21: mod_base = OTHER; note = S-phosphorothioate
  modified_base 21: mod_base = um
  modified_base 21..22: mod_base = OTHER; note = S-phosphorothioate
  modified_base 22: mod_base = cm
  modified_base 22..23: mod_base = OTHER; note = S-phosphorothioate
  modified_base 23: mod_base = OTHER; note = 2-fluororibose uracil
  modified_base 23..24: mod_base = OTHER; note = S-phosphorothioate
  modified_base 24: mod_base = OTHER; note = deoxyribose 6-amino-9-substituted 8,9-dihydro-7H-purin-8-one
  modified_base 24..25: mod_base = OTHER; note = S-phosphorothioate
  modified_base 25: mod_base = OTHER; note = deoxyribose inosine
  modified_base 25..26: mod_base = OTHER; note S-N-(1,3-dimethylimidazolidin-2-ylidene)phosphoramidate
  modified_base 26: mod_base = um
  modified_base 26..27: mod_base = OTHER; note = S-phosphorothioate
  modified_base 27: mod_base = cm
  modified_base 27..28: mod_base = OTHER; note = S-phosphorothioate
  modified_base 28: mod_base = gm
  modified_base 28..29: mod_base = OTHER; note = S-phosphorothioate
  modified_base 29: mod_base = OTHER; note = 2-O-methylribose adenine
  modified_base 29..30: mod_base = OTHER; note R-N-(1,3-dimethylimidazolidin-2-ylidene)phosphoramidate
  modified_base 30: mod_base = um
  source 1..30: mol_type = other RNA

SEQ ID NO: 175 - RNA, 30 nt, synthetic construct; identical to SEQ ID NO: 134
  misc_feature 1..30: note = Synthetic: WV-42975
  misc_feature 1..30: note = Synthetic: ADR-0103669
  modified_base 1: mod_base = OTHER; note = 2-fluororibose cytosine
  modified_base 1..2: mod_base = OTHER; note R-N-(1,3-dimethylimidazolidin-2-ylidene)phosphoramidate
  modified_base 2: mod_base = OTHER; note = 2-fluororibose cytosine
  modified_base 2..3: mod_base = OTHER; note = S-phosphorothioate
  modified_base 3: mod_base = OTHER; note = 2-fluororibose cytosine
  modified_base 3..4: mod_base = OTHER; note = S-phosphorothioate
  modified_base 4: mod_base = OTHER; note = 2-fluororibose adenine
  modified_base 4..5: mod_base = OTHER; note = S-phosphorothioate
  modified_base 5: mod_base = OTHER; note = 2-fluororibose guanine
  modified_base 5..6: mod_base = OTHER; note = S-phosphorothioate
  modified_base 6: mod_base = OTHER; note = 2-fluororibose cytosine
  modified_base 6..7: mod_base = OTHER; note = S-phosphorothioate
  modified_base 7: mod_base = OTHER; note = 2-fluororibose adenine
  modified_base 7..8: mod_base = OTHER; note = S-phosphorothioate
  modified_base 8: mod_base = OTHER; note = 2-fluororibose guanine
  modified_base 8..9: mod_base = OTHER; note = S-phosphorothioate
  modified_base 9: mod_base = OTHER; note = 2-fluororibose cytosine
  modified_base 9..10: mod_base = OTHER; note = S-phosphorothioate
  modified_base 10: mod_base = OTHER; note = 2-fluororibose uracil
  modified_base 10..11: mod_base = OTHER; note = S-phosphorothioate
  modified_base 11: mod_base = OTHER; note = 2-fluororibose uracil
  modified_base 11..12: mod_base = OTHER; note = S-phosphorothioate
  modified_base 12: mod_base = OTHER; note = 2-fluororibose cytosine
  modified_base 12..13: mod_base = OTHER; note = S-phosphorothioate
  modified_base 13: mod_base = OTHER; note = 2-fluororibose adenine
  modified_base 13..14: mod_base = OTHER; note = S-phosphorothioate
  modified_base 14: mod_base = OTHER; note = 2-fluororibose guanine
  modified_base 14..15: mod_base = OTHER; note = S-phosphorothioate
  modified_base 15: mod_base = OTHER; note = 2-fluororibose uracil
  modified_base 15..16: mod_base = OTHER; note R-N-(1,3-dimethylimidazolidin-2-ylidene)phosphoramidate
  modified_base 16: mod_base = cm
  modified_base 16..17: mod_base = OTHER; note = S-phosphorothioate
  modified_base 17: mod_base = cm
  modified_base 17..18: mod_base = OTHER; note = S-phosphorothioate
  modified_base 18: mod_base = cm
  modified_base 18..19: mod_base = OTHER; note = S-phosphorothioate
  modified_base 19: mod_base = um
  modified_base 19..20: mod_base = OTHER; note = S-phosphorothioate
  modified_base 20: mod_base = um
  modified_base 20..21: mod_base = OTHER; note = S-phosphorothioate
  modified_base 21: mod_base = um
  modified_base 21..22: mod_base = OTHER; note = S-phosphorothioate
  modified_base 22: mod_base = cm
  modified_base 22..23: mod_base = OTHER; note = S-phosphorothioate
  modified_base 23: mod_base = OTHER; note = 2-fluororibose uracil
  modified_base 23..24: mod_base = OTHER; note = S-phosphorothioate
  modified_base 24: mod_base = OTHER; note = deoxyribose 6-amino-9-substituted 8,9-dihydro-7H-purin-8-one
  modified_base 24..25: mod_base = OTHER; note = S-phosphorothioate
  modified_base 25: mod_base = OTHER; note = deoxyribose inosine
  modified_base 25..26: mod_base = OTHER; note S-N-(1,3-dimethylimidazolidin-2-ylidene)phosphoramidate
  modified_base 26: mod_base = um
  modified_base 26..27: mod_base = OTHER; note = S-phosphorothioate
  modified_base 27: mod_base = cm
  modified_base 27..28: mod_base = OTHER; note = S-phosphorothioate
  modified_base 28: mod_base = gm
  modified_base 28..29: mod_base = OTHER; note = S-phosphorothioate
  modified_base 29: mod_base = OTHER; note = 2-O-methylribose adenine
  modified_base 29..30: mod_base = OTHER; note R-N-(1,3-dimethylimidazolidin-2-ylidene)phosphoramidate
  modified_base 30: mod_base = um
  source 1..30: mol_type = other RNA

SEQ ID NO: 176 - RNA, 30 nt, synthetic construct; identical to SEQ ID NO: 134
  misc_feature 1..30: note = Synthetic: WV-42974
  misc_feature 1..30: note = Synthetic: ADR-0103671
  modified_base 1: mod_base = OTHER; note = 2-fluororibose cytosine
  modified_base 1..2: mod_base = OTHER; note R-N-(1,3-dimethylimidazolidin-2-ylidene)phosphoramidate
  modified_base 2: mod_base = OTHER; note = 2-fluororibose cytosine
  modified_base 2..3: mod_base = OTHER; note = S-phosphorothioate
  modified_base 3: mod_base = OTHER; note = 2-fluororibose cytosine
  modified_base 3..4: mod_base = OTHER; note = S-phosphorothioate
  modified_base 4: mod_base = OTHER; note = 2-fluororibose adenine
  modified_base 4..5: mod_base = OTHER; note = S-phosphorothioate
  modified_base 5: mod_base = OTHER; note = 2-fluororibose guanine
  modified_base 5..6: mod_base = OTHER; note = S-phosphorothioate
  modified_base 6: mod_base = OTHER; note = 2-fluororibose cytosine
  modified_base 6..7: mod_base = OTHER; note = S-phosphorothioate
  modified_base 7: mod_base = OTHER; note = 2-fluororibose adenine
  modified_base 7..8: mod_base = OTHER; note = S-phosphorothioate
  modified_base 8: mod_base = OTHER; note = 2-fluororibose guanine
  modified_base 8..9: mod_base = OTHER; note = S-phosphorothioate
  modified_base 9: mod_base = OTHER; note = 2-fluororibose cytosine
  modified_base 9..10: mod_base = OTHER; note = S-phosphorothioate
  modified_base 10: mod_base = OTHER; note = 2-fluororibose uracil
  modified_base 10..11: mod_base = OTHER; note = S-phosphorothioate
  modified_base 11: mod_base = OTHER; note = 2-fluororibose uracil
  modified_base 11..12: mod_base = OTHER; note = S-phosphorothioate
  modified_base 12: mod_base = OTHER; note = 2-fluororibose cytosine
  modified_base 12..13: mod_base = OTHER; note = S-phosphorothioate
  modified_base 13: mod_base = OTHER; note = 2-fluororibose adenine
  modified_base 13..14: mod_base = OTHER; note = S-phosphorothioate
  modified_base 14: mod_base = OTHER; note = 2-fluororibose guanine
  modified_base 14..15: mod_base = OTHER; note R-N-(1,3-dimethylimidazolidin-2-ylidene)phosphoramidate
  modified_base 15: mod_base = OTHER; note = 2-fluororibose uracil
  modified_base 15..16: mod_base = OTHER; note = S-phosphorothioate
  modified_base 16: mod_base = cm
  modified_base 16..17: mod_base = OTHER; note = S-phosphorothioate
  modified_base 17: mod_base = cm
  modified_base 17..18: mod_base = OTHER; note = S-phosphorothioate
  modified_base 18: mod_base = cm
  modified_base 18..19: mod_base = OTHER; note = S-phosphorothioate
  modified_base 19: mod_base = um
  modified_base 19..20: mod_base = OTHER; note = S-phosphorothioate
  modified_base 20: mod_base = um
  modified_base 20..21: mod_base = OTHER; note = S-phosphorothioate
  modified_base 21: mod_base = um
  modified_base 21..22: mod_base = OTHER; note = S-phosphorothioate
  modified_base 22: mod_base = cm
  modified_base 22..23: mod_base = OTHER; note = S-phosphorothioate
  modified_base 23: mod_base = OTHER; note = 2-fluororibose uracil
  modified_base 23..24: mod_base = OTHER; note = S-phosphorothioate
  modified_base 24: mod_base = OTHER; note = deoxyribose 6-amino-9-substituted 8,9-dihydro-7H-purin-8-one
  modified_base 24..25: mod_base = OTHER; note = S-phosphorothioate
  modified_base 25: mod_base = OTHER; note = deoxyribose inosine
  modified_base 25..26: mod_base = OTHER; note S-N-(1,3-dimethylimidazolidin-2-ylidene)phosphoramidate
  modified_base 26: mod_base = um
  modified_base 26..27: mod_base = OTHER; note = S-phosphorothioate
  modified_base 27: mod_base = cm
  modified_base 27..28: mod_base = OTHER; note = S-phosphorothioate
  modified_base 28: mod_base = gm
  modified_base 28..29: mod_base = OTHER; note = S-phosphorothioate
  modified_base 29: mod_base = OTHER; note = 2-O-methylribose adenine
  modified_base 29..30: mod_base = OTHER; note R-N-(1,3-dimethylimidazolidin-2-ylidene)phosphoramidate
  modified_base 30: mod_base = um
  source 1..30: mol_type = other RNA

SEQ ID NO: 177 - RNA, 30 nt, synthetic construct; identical to SEQ ID NO: 134
  misc_feature 1..30: note = Synthetic: WV-42973
  misc_feature 1..30: note = Synthetic: ADR-0103674
  modified_base 1: mod_base = OTHER; note = 2-fluororibose cytosine
  modified_base 1..2: mod_base = OTHER; note R-N-(1,3-dimethylimidazolidin-2-ylidene)phosphoramidate
  modified_base 2: mod_base = OTHER; note = 2-fluororibose cytosine
  modified_base 2..3: mod_base = OTHER; note = S-phosphorothioate
  modified_base 3: mod_base = OTHER; note = 2-fluororibose cytosine
  modified_base 3..4: mod_base = OTHER; note = S-phosphorothioate
  modified_base 4: mod_base = OTHER; note = 2-fluororibose adenine
  modified_base 4..5: mod_base = OTHER; note = S-phosphorothioate
  modified_base 5: mod_base = OTHER; note = 2-fluororibose guanine
  modified_base 5..6: mod_base = OTHER; note = S-phosphorothioate
  modified_base 6: mod_base = OTHER; note = 2-fluororibose cytosine
  modified_base 6..7: mod_base = OTHER; note = S-phosphorothioate
  modified_base 7: mod_base = OTHER; note = 2-fluororibose adenine
  modified_base 7..8: mod_base = OTHER; note = S-phosphorothioate
  modified_base 8: mod_base = OTHER; note = 2-fluororibose guanine
  modified_base 8..9: mod_base = OTHER; note = S-phosphorothioate
  modified_base 9: mod_base = OTHER; note = 2-fluororibose cytosine
  modified_base 9..10: mod_base = OTHER; note = S-phosphorothioate
  modified_base 10: mod_base = OTHER; note = 2-fluororibose uracil
  modified_base 10..11: mod_base = OTHER; note = S-phosphorothioate
  modified_base 11: mod_base = OTHER; note = 2-fluororibose uracil
  modified_base 11..12: mod_base = OTHER; note = S-phosphorothioate
  modified_base 12: mod_base = OTHER; note = 2-fluororibose cytosine
  modified_base 12..13: mod_base = OTHER; note = S-phosphorothioate
  modified_base 13: mod_base = OTHER; note = 2-fluororibose adenine
  modified_base 13..14: mod_base = OTHER; note R-N-(1,3-dimethylimidazolidin-2-ylidene)phosphoramidate
  modified_base 14: mod_base = OTHER; note = 2-fluororibose guanine
  modified_base 14..15: mod_base = OTHER; note = S-phosphorothioate
  modified_base 15: mod_base = OTHER; note = 2-fluororibose uracil
  modified_base 15..16: mod_base = OTHER; note = S-phosphorothioate
  modified_base 16: mod_base = cm
  modified_base 16..17: mod_base = OTHER; note = S-phosphorothioate
  modified_base 17: mod_base = cm
  modified_base 17..18: mod_base = OTHER; note = S-phosphorothioate
  modified_base 18: mod_base = cm
  modified_base 18..19: mod_base = OTHER; note = S-phosphorothioate
  modified_base 19: mod_base = um
  modified_base 19..20: mod_base = OTHER; note = S-phosphorothioate
  modified_base 20: mod_base = um
  modified_base 20..21: mod_base = OTHER; note = S-phosphorothioate
  modified_base 21: mod_base = um
  modified_base 21..22: mod_base = OTHER; note = S-phosphorothioate
  modified_base 22: mod_base = cm
  modified_base 22..23: mod_base = OTHER; note = S-phosphorothioate
  modified_base 23: mod_base = OTHER; note = 2-fluororibose uracil
  modified_base 23..24: mod_base = OTHER; note = S-phosphorothioate
  modified_base 24: mod_base = OTHER; note = deoxyribose 6-amino-9-substituted 8,9-dihydro-7H-purin-8-one
  modified_base 24..25: mod_base = OTHER; note = S-phosphorothioate
  modified_base 25: mod_base = OTHER; note = deoxyribose inosine
  modified_base 25..26: mod_base = OTHER; note S-N-(1,3-dimethylimidazolidin-2-ylidene)phosphoramidate
  modified_base 26: mod_base = um
  modified_base 26..27: mod_base = OTHER; note = S-phosphorothioate
  modified_base 27: mod_base = cm
  modified_base 27..28: mod_base = OTHER; note = S-phosphorothioate
  modified_base 28: mod_base = gm
  modified_base 28..29: mod_base = OTHER; note = S-phosphorothioate
  modified_base 29: mod_base = OTHER; note = 2-O-methylribose adenine
  modified_base 29..30: mod_base = OTHER; note R-N-(1,3-dimethylimidazolidin-2-ylidene)phosphoramidate
  modified_base 30: mod_base = um
  source 1..30: mol_type = other RNA

SEQ ID NO: 178 - RNA, 30 nt, synthetic construct; identical to SEQ ID NO: 134
  misc_feature 1..30: note = Synthetic: WV-42972
  misc_feature 1..30: note = Synthetic: ADR-0103676
  modified_base 1: mod_base = OTHER; note = 2-fluororibose cytosine
  modified_base 1..2: mod_base = OTHER; note R-N-(1,3-dimethylimidazolidin-2-ylidene)phosphoramidate
  modified_base 2: mod_base = OTHER; note = 2-fluororibose cytosine
  modified_base 2..3: mod_base = OTHER; note = S-phosphorothioate
  modified_base 3: mod_base = OTHER; note = 2-fluororibose cytosine
  modified_base 3..4: mod_base = OTHER; note = S-phosphorothioate
  modified_base 4: mod_base = OTHER; note = 2-fluororibose adenine
  modified_base 4..5: mod_base = OTHER; note = S-phosphorothioate
  modified_base 5: mod_base = OTHER; note = 2-fluororibose guanine
  modified_base 5..6: mod_base = OTHER; note = S-phosphorothioate
  modified_base 6: mod_base = OTHER; note = 2-fluororibose cytosine
  modified_base 6..7: mod_base = OTHER; note = S-phosphorothioate
  modified_base 7: mod_base = OTHER; note = 2-fluororibose adenine
  modified_base 7..8: mod_base = OTHER; note = S-phosphorothioate
  modified_base 8: mod_base = OTHER; note = 2-fluororibose guanine
  modified_base 8..9: mod_base = OTHER; note = S-phosphorothioate
  modified_base 9: mod_base = OTHER; note = 2-fluororibose cytosine
  modified_base 9..10: mod_base = OTHER; note = S-phosphorothioate
  modified_base 10: mod_base = OTHER; note = 2-fluororibose uracil
  modified_base 10..11: mod_base = OTHER; note = S-phosphorothioate
  modified_base 11: mod_base = OTHER; note = 2-fluororibose uracil
  modified_base 11..12: mod_base = OTHER; note = S-phosphorothioate
  modified_base 12: mod_base = OTHER; note = 2-fluororibose cytosine
  modified_base 12..13: mod_base = OTHER; note R-N-(1,3-dimethylimidazolidin-2-ylidene)phosphoramidate
  modified_base 13: mod_base = OTHER; note = 2-fluororibose adenine
  modified_base 13..14: mod_base = OTHER; note = S-phosphorothioate
  modified_base 14: mod_base = OTHER; note = 2-fluororibose guanine
  modified_base 14..15: mod_base = OTHER; note = S-phosphorothioate
  modified_base 15: mod_base = OTHER; note = 2-fluororibose uracil
  modified_base 15..16: mod_base = OTHER; note = S-phosphorothioate
  modified_base 16: mod_base = cm
  modified_base 16..17: mod_base = OTHER; note = S-phosphorothioate
  modified_base 17: mod_base = cm
  modified_base 17..18: mod_base = OTHER; note = S-phosphorothioate
  modified_base 18: mod_base = cm
  modified_base 18..19: mod_base = OTHER; note = S-phosphorothioate
  modified_base 19: mod_base = um
  modified_base 19..20: mod_base = OTHER; note = S-phosphorothioate
  modified_base 20: mod_base = um
  modified_base 20..21: mod_base = OTHER; note = S-phosphorothioate
  modified_base 21: mod_base = um
  modified_base 21..22: mod_base = OTHER; note = S-phosphorothioate
  modified_base 22: mod_base = cm
  modified_base 22..23: mod_base = OTHER; note = S-phosphorothioate
  modified_base 23: mod_base = OTHER; note = 2-fluororibose uracil
  modified_base 23..24: mod_base = OTHER; note = S-phosphorothioate
  modified_base 24: mod_base = OTHER; note = deoxyribose 6-amino-9-substituted 8,9-dihydro-7H-purin-8-one
  modified_base 24..25: mod_base = OTHER; note = S-phosphorothioate
  modified_base 25: mod_base = OTHER; note = deoxyribose inosine
  modified_base 25..26: mod_base = OTHER; note S-N-(1,3-dimethylimidazolidin-2-ylidene)phosphoramidate
  modified_base 26: mod_base = um
  modified_base 26..27: mod_base = OTHER; note = S-phosphorothioate
  modified_base 27: mod_base = cm
  modified_base 27..28: mod_base = OTHER; note = S-phosphorothioate
  modified_base 28: mod_base = gm
  modified_base 28..29: mod_base = OTHER; note = S-phosphorothioate
  modified_base 29: mod_base = OTHER; note = 2-O-methylribose adenine
  modified_base 29..30: mod_base = OTHER; note R-N-(1,3-dimethylimidazolidin-2-ylidene)phosphoramidate
  modified_base 30: mod_base = um
  source 1..30: mol_type = other RNA

SEQ ID NO: 179 - RNA, 30 nt, synthetic construct; identical to SEQ ID NO: 134
  misc_feature 1..30: note = Synthetic: WV-42971
  misc_feature 1..30: note = Synthetic: ADR-0103678
  modified_base 1: mod_base = OTHER; note = 2-fluororibose cytosine
  modified_base 1..2: mod_base = OTHER; note R-N-(1,3-dimethylimidazolidin-2-ylidene)phosphoramidate
  modified_base 2: mod_base = OTHER; note = 2-fluororibose cytosine
  modified_base 2..3: mod_base = OTHER; note = S-phosphorothioate
  modified_base 3: mod_base = OTHER; note = 2-fluororibose cytosine
  modified_base 3..4: mod_base = OTHER; note = S-phosphorothioate
  modified_base 4: mod_base = OTHER; note = 2-fluororibose adenine
  modified_base 4..5: mod_base = OTHER; note = S-phosphorothioate
  modified_base 5: mod_base = OTHER; note = 2-fluororibose guanine
  modified_base 5..6: mod_base = OTHER; note = S-phosphorothioate
  modified_base 6: mod_base = OTHER; note = 2-fluororibose cytosine
  modified_base 6..7: mod_base = OTHER; note = S-phosphorothioate
  modified_base 7: mod_base = OTHER; note = 2-fluororibose adenine
  modified_base 7..8: mod_base = OTHER; note = S-phosphorothioate
  modified_base 8: mod_base = OTHER; note = 2-fluororibose guanine
  modified_base 8..9: mod_base = OTHER; note = S-phosphorothioate
  modified_base 9: mod_base = OTHER; note = 2-fluororibose cytosine
  modified_base 9..10: mod_base = OTHER; note = S-phosphorothioate
  modified_base 10: mod_base = OTHER; note = 2-fluororibose uracil
  modified_base 10..11: mod_base = OTHER; note = S-phosphorothioate
  modified_base 11: mod_base = OTHER; note = 2-fluororibose uracil
  modified_base 11..12: mod_base = OTHER; note R-N-(1,3-dimethylimidazolidin-2-ylidene)phosphoramidate
  modified_base 12: mod_base = OTHER; note = 2-fluororibose cytosine
  modified_base 12..13: mod_base = OTHER; note = S-phosphorothioate
  modified_base 13: mod_base = OTHER; note = 2-fluororibose adenine
  modified_base 13..14: mod_base = OTHER; note = S-phosphorothioate
  modified_base 14: mod_base = OTHER; note = 2-fluororibose guanine
  modified_base 14..15: mod_base = OTHER; note = S-phosphorothioate
  modified_base 15: mod_base = OTHER; note = 2-fluororibose uracil
  modified_base 15..16: mod_base = OTHER; note = S-phosphorothioate
  modified_base 16: mod_base = cm
  modified_base 16..17: mod_base = OTHER; note = S-phosphorothioate
  modified_base 17: mod_base = cm
  modified_base 17..18: mod_base = OTHER; note = S-phosphorothioate
  modified_base 18: mod_base = cm
  modified_base 18..19: mod_base = OTHER; note = S-phosphorothioate
  modified_base 19: mod_base = um
  modified_base 19..20: mod_base = OTHER; note = S-phosphorothioate
  modified_base 20: mod_base = um
  modified_base 20..21: mod_base = OTHER; note = S-phosphorothioate
  modified_base 21: mod_base = um
  modified_base 21..22: mod_base = OTHER; note = S-phosphorothioate
  modified_base 22: mod_base = cm
  modified_base 22..23: mod_base = OTHER; note = S-phosphorothioate
  modified_base 23: mod_base = OTHER; note = 2-fluororibose uracil
  modified_base 23..24: mod_base = OTHER; note = S-phosphorothioate
  modified_base 24: mod_base = OTHER; note = deoxyribose 6-amino-9-substituted 8,9-dihydro-7H-purin-8-one
  modified_base 24..25: mod_base = OTHER; note = S-phosphorothioate
  modified_base 25: mod_base = OTHER; note = deoxyribose inosine
  modified_base 25..26: mod_base = OTHER; note S-N-(1,3-dimethylimidazolidin-2-ylidene)phosphoramidate
  modified_base 26: mod_base = um
  modified_base 26..27: mod_base = OTHER; note = S-phosphorothioate
  modified_base 27: mod_base = cm
  modified_base 27..28: mod_base = OTHER; note = S-phosphorothioate
  modified_base 28: mod_base = gm
  modified_base 28..29: mod_base = OTHER; note = S-phosphorothioate
  modified_base 29: mod_base = OTHER; note = 2-O-methylribose adenine
  modified_base 29..30: mod_base = OTHER; note R-N-(1,3-dimethylimidazolidin-2-ylidene)phosphoramidate
  modified_base 30: mod_base = um
  source 1..30: mol_type = other RNA

SEQ ID NO: 180 - RNA, 30 nt, synthetic construct; identical to SEQ ID NO: 134
  misc_feature 1..30: note = Synthetic: WV-42970
  misc_feature 1..30: note = Synthetic: ADR-0103680
  modified_base 1: mod_base = OTHER; note = 2-fluororibose cytosine
  modified_base 1..2: mod_base = OTHER; note R-N-(1,3-dimethylimidazolidin-2-ylidene)phosphoramidate
  modified_base 2: mod_base = OTHER; note = 2-fluororibose cytosine
  modified_base 2..3: mod_base = OTHER; note = S-phosphorothioate
  modified_base 3: mod_base = OTHER; note = 2-fluororibose cytosine
  modified_base 3..4: mod_base = OTHER; note = S-phosphorothioate
  modified_base 4: mod_base = OTHER; note = 2-fluororibose adenine
  modified_base 4..5: mod_base = OTHER; note = S-phosphorothioate
  modified_base 5: mod_base = OTHER; note = 2-fluororibose guanine
  modified_base 5..6: mod_base = OTHER; note = S-phosphorothioate
  modified_base 6: mod_base = OTHER; note = 2-fluororibose cytosine
  modified_base 6..7: mod_base = OTHER; note = S-phosphorothioate
  modified_base 7: mod_base = OTHER; note = 2-fluororibose adenine
  modified_base 7..8: mod_base = OTHER; note = S-phosphorothioate
  modified_base 8: mod_base = OTHER; note = 2-fluororibose guanine
  modified_base 8..9: mod_base = OTHER; note = S-phosphorothioate
  modified_base 9: mod_base = OTHER; note = 2-fluororibose cytosine
  modified_base 9..10: mod_base = OTHER; note = S-phosphorothioate
  modified_base 10: mod_base = OTHER; note = 2-fluororibose uracil
  modified_base 10..11: mod_base = OTHER; note R-N-(1,3-dimethylimidazolidin-2-ylidene)phosphoramidate
  modified_base 11: mod_base = OTHER; note = 2-fluororibose uracil
  modified_base 11..12: mod_base = OTHER; note = S-phosphorothioate
  modified_base 12: mod_base = OTHER; note = 2-fluororibose cytosine
  modified_base 12..13: mod_base = OTHER; note = S-phosphorothioate
  modified_base 13: mod_base = OTHER; note = 2-fluororibose adenine
  modified_base 13..14: mod_base = OTHER; note = S-phosphorothioate
  modified_base 14: mod_base = OTHER; note = 2-fluororibose guanine
  modified_base 14..15: mod_base = OTHER; note = S-phosphorothioate
  modified_base 15: mod_base = OTHER; note = 2-fluororibose uracil
  modified_base 15..16: mod_base = OTHER; note = S-phosphorothioate
  modified_base 16: mod_base = cm
  modified_base 16..17: mod_base = OTHER; note = S-phosphorothioate
  modified_base 17: mod_base = cm
  modified_base 17..18: mod_base = OTHER; note = S-phosphorothioate
  modified_base 18: mod_base = cm
  modified_base 18..19: mod_base = OTHER; note = S-phosphorothioate
  modified_base 19: mod_base = um
  modified_base 19..20: mod_base = OTHER; note = S-phosphorothioate
  modified_base 20: mod_base = um
  modified_base 20..21: mod_base = OTHER; note = S-phosphorothioate
  modified_base 21: mod_base = um
  modified_base 21..22: mod_base = OTHER; note = S-phosphorothioate
  modified_base 22: mod_base = cm
  modified_base 22..23: mod_base = OTHER; note = S-phosphorothioate
  modified_base 23: mod_base = OTHER; note = 2-fluororibose uracil
  modified_base 23..24: mod_base = OTHER; note = S-phosphorothioate
  modified_base 24: mod_base = OTHER; note = deoxyribose 6-amino-9-substituted 8,9-dihydro-7H-purin-8-one
  modified_base 24..25: mod_base = OTHER; note = S-phosphorothioate
  modified_base 25: mod_base = OTHER; note = deoxyribose inosine
  modified_base 25..26: mod_base = OTHER; note S-N-(1,3-dimethylimidazolidin-2-ylidene)phosphoramidate
  modified_base 26: mod_base = um
  modified_base 26..27: mod_base = OTHER; note = S-phosphorothioate
  modified_base 27: mod_base = cm
  modified_base 27..28: mod_base = OTHER; note = S-phosphorothioate
  modified_base 28: mod_base = gm
  modified_base 28..29: mod_base = OTHER; note = S-phosphorothioate
  modified_base 29: mod_base = OTHER; note = 2-O-methylribose adenine
  modified_base 29..30: mod_base = OTHER; note R-N-(1,3-dimethylimidazolidin-2-ylidene)phosphoramidate
  modified_base 30: mod_base = um
  source 1..30: mol_type = other RNA

SEQ ID NO: 181 - RNA, 30 nt, synthetic construct; identical to SEQ ID NO: 134
  misc_feature 1..30: note = Synthetic: WV-42969
  misc_feature 1..30: note = Synthetic: ADR-0103682
  modified_base 1: mod_base = OTHER; note = 2-fluororibose cytosine
  modified_base 1..2: mod_base = OTHER; note R-N-(1,3-dimethylimidazolidin-2-ylidene)phosphoramidate
  modified_base 2: mod_base = OTHER; note = 2-fluororibose cytosine
  modified_base 2..3: mod_base = OTHER; note = S-phosphorothioate
  modified_base 3: mod_base = OTHER; note = 2-fluororibose cytosine
  modified_base 3..4: mod_base = OTHER; note = S-phosphorothioate
  modified_base 4: mod_base = OTHER; note = 2-fluororibose adenine
  modified_base 4..5: mod_base = OTHER; note = S-phosphorothioate
  modified_base 5: mod_base = OTHER; note = 2-fluororibose guanine
  modified_base 5..6: mod_base = OTHER; note = S-phosphorothioate
  modified_base 6: mod_base = OTHER; note = 2-fluororibose cytosine
  modified_base 6..7: mod_base = OTHER; note = S-phosphorothioate
  modified_base 7: mod_base = OTHER; note = 2-fluororibose adenine
  modified_base 7..8: mod_base = OTHER; note = S-phosphorothioate
  modified_base 8: mod_base = OTHER; note = 2-fluororibose guanine
  modified_base 8..9: mod_base = OTHER; note = S-phosphorothioate
  modified_base 9: mod_base = OTHER; note = 2-fluororibose cytosine
  modified_base 9..10: mod_base = OTHER; note R-N-(1,3-dimethylimidazolidin-2-ylidene)phosphoramidate
  modified_base 10: mod_base = OTHER; note = 2-fluororibose uracil
  modified_base 10..11: mod_base = OTHER; note = S-phosphorothioate
  modified_base 11: mod_base = OTHER; note = 2-fluororibose uracil
  modified_base 11..12: mod_base = OTHER; note = S-phosphorothioate
  modified_base 12: mod_base = OTHER; note = 2-fluororibose cytosine
  modified_base 12..13: mod_base = OTHER; note = S-phosphorothioate
  modified_base 13: mod_base = OTHER; note = 2-fluororibose adenine
  modified_base 13..14: mod_base = OTHER; note = S-phosphorothioate
  modified_base 14: mod_base = OTHER; note = 2-fluororibose guanine
  modified_base 14..15: mod_base = OTHER; note = S-phosphorothioate
  modified_base 15: mod_base = OTHER; note = 2-fluororibose uracil
  modified_base 15..16: mod_base = OTHER; note = S-phosphorothioate
  modified_base 16: mod_base = cm
  modified_base 16..17: mod_base = OTHER; note = S-phosphorothioate
  modified_base 17: mod_base = cm
  modified_base 17..18: mod_base = OTHER; note = S-phosphorothioate
  modified_base 18: mod_base = cm
  modified_base 18..19: mod_base = OTHER; note = S-phosphorothioate
  modified_base 19: mod_base = um
  modified_base 19..20: mod_base = OTHER; note = S-phosphorothioate
  modified_base 20: mod_base = um
  modified_base 20..21: mod_base = OTHER; note = S-phosphorothioate
  modified_base 21: mod_base = um
  modified_base 21..22: mod_base = OTHER; note = S-phosphorothioate
  modified_base 22: mod_base = cm
  modified_base 22..23: mod_base = OTHER; note = S-phosphorothioate
  modified_base 23: mod_base = OTHER; note = 2-fluororibose uracil
  modified_base 23..24: mod_base = OTHER; note = S-phosphorothioate
  modified_base 24: mod_base = OTHER; note = deoxyribose 6-amino-9-substituted 8,9-dihydro-7H-purin-8-one
  modified_base 24..25: mod_base = OTHER; note = S-phosphorothioate
  modified_base 25: mod_base = OTHER; note = deoxyribose inosine
  modified_base 25..26: mod_base = OTHER; note S-N-(1,3-dimethylimidazolidin-2-ylidene)phosphoramidate
  modified_base 26: mod_base = um
  modified_base 26..27: mod_base = OTHER; note = S-phosphorothioate
  modified_base 27: mod_base = cm
  modified_base 27..28: mod_base = OTHER; note = S-phosphorothioate
  modified_base 28: mod_base = gm
  modified_base 28..29: mod_base = OTHER; note = S-phosphorothioate
  modified_base 29: mod_base = OTHER; note = 2-O-methylribose adenine
  modified_base 29..30: mod_base = OTHER; note R-N-(1,3-dimethylimidazolidin-2-ylidene)phosphoramidate
  modified_base 30: mod_base = um
  source 1..30: mol_type = other RNA

SEQ ID NO: 182 - RNA, 30 nt, synthetic construct; identical to SEQ ID NO: 134
  misc_feature 1..30: note = Synthetic: WV-42968
  misc_feature 1..30: note = Synthetic: ADR-0103684
  modified_base 1: mod_base = OTHER; note = 2-fluororibose cytosine
  modified_base 1..2: mod_base = OTHER; note R-N-(1,3-dimethylimidazolidin-2-ylidene)phosphoramidate
  modified_base 2: mod_base = OTHER; note = 2-fluororibose cytosine
  modified_base 2..3: mod_base = OTHER; note = S-phosphorothioate
  modified_base 3: mod_base = OTHER; note = 2-fluororibose cytosine
  modified_base 3..4: mod_base = OTHER; note = S-phosphorothioate
  modified_base 4: mod_base = OTHER; note = 2-fluororibose adenine
  modified_base 4..5: mod_base = OTHER; note = S-phosphorothioate
  modified_base 5: mod_base = OTHER; note = 2-fluororibose guanine
  modified_base 5..6: mod_base = OTHER; note = S-phosphorothioate
  modified_base 6: mod_base = OTHER; note = 2-fluororibose cytosine
  modified_base 6..7: mod_base = OTHER; note = S-phosphorothioate
  modified_base 7: mod_base = OTHER; note = 2-fluororibose adenine
  modified_base 7..8: mod_base = OTHER; note = S-phosphorothioate
  modified_base 8: mod_base = OTHER; note = 2-fluororibose guanine
  modified_base 8..9: mod_base = OTHER; note R-N-(1,3-dimethylimidazolidin-2-ylidene)phosphoramidate
  modified_base 9: mod_base = OTHER; note = 2-fluororibose cytosine
  modified_base 9..10: mod_base = OTHER; note = S-phosphorothioate
  modified_base 10: mod_base = OTHER; note = 2-fluororibose uracil
  modified_base 10..11: mod_base = OTHER; note = S-phosphorothioate
  modified_base 11: mod_base = OTHER; note = 2-fluororibose uracil
  modified_base 11..12: mod_base = OTHER; note = S-phosphorothioate
  modified_base 12: mod_base = OTHER; note = 2-fluororibose cytosine
  modified_base 12..13: mod_base = OTHER; note = S-phosphorothioate
  modified_base 13: mod_base = OTHER; note = 2-fluororibose adenine
  modified_base 13..14: mod_base = OTHER; note = S-phosphorothioate
  modified_base 14: mod_base = OTHER; note = 2-fluororibose guanine
  modified_base 14..15: mod_base = OTHER; note = S-phosphorothioate
  modified_base 15: mod_base = OTHER; note = 2-fluororibose uracil
  modified_base 15..16: mod_base = OTHER; note = S-phosphorothioate
  modified_base 16: mod_base = cm
  modified_base 16..17: mod_base = OTHER; note = S-phosphorothioate
  modified_base 17: mod_base = cm
  modified_base 17..18: mod_base = OTHER; note = S-phosphorothioate
  modified_base 18: mod_base = cm
  modified_base 18..19: mod_base = OTHER; note = S-phosphorothioate
  modified_base 19: mod_base = um
  modified_base 19..20: mod_base = OTHER; note = S-phosphorothioate
  modified_base 20: mod_base = um
  modified_base 20..21: mod_base = OTHER; note = S-phosphorothioate
  modified_base 21: mod_base = um
  modified_base 21..22: mod_base = OTHER; note = S-phosphorothioate
  modified_base 22: mod_base = cm
  modified_base 22..23: mod_base = OTHER; note = S-phosphorothioate
  modified_base 23: mod_base = OTHER; note = 2-fluororibose uracil
  modified_base 23..24: mod_base = OTHER; note = S-phosphorothioate
  modified_base 24: mod_base = OTHER; note = deoxyribose 6-amino-9-substituted 8,9-dihydro-7H-purin-8-one
  modified_base 24..25: mod_base = OTHER; note = S-phosphorothioate
  modified_base 25: mod_base = OTHER; note = deoxyribose inosine
  modified_base 25..26: mod_base = OTHER; note S-N-(1,3-dimethylimidazolidin-2-ylidene)phosphoramidate
  modified_base 26: mod_base = um
  modified_base 26..27: mod_base = OTHER; note = S-phosphorothioate
  modified_base 27: mod_base = cm
  modified_base 27..28: mod_base = OTHER; note = S-phosphorothioate
  modified_base 28: mod_base = gm
  modified_base 28..29: mod_base = OTHER; note = S-phosphorothioate
  modified_base 29: mod_base = OTHER; note = 2-O-methylribose adenine
  modified_base 29..30: mod_base = OTHER; note R-N-(1,3-dimethylimidazolidin-2-ylidene)phosphoramidate
  modified_base 30: mod_base = um
  source 1..30: mol_type = other RNA

SEQ ID NO: 183 - RNA, 30 nt, synthetic construct; identical to SEQ ID NO: 134
  misc_feature 1..30: note = Synthetic: WV-42967
  misc_feature 1..30: note = Synthetic: ADR-0103686
  modified_base 1: mod_base = OTHER; note = 2-fluororibose cytosine
  modified_base 1..2: mod_base = OTHER; note R-N-(1,3-dimethylimidazolidin-2-ylidene)phosphoramidate
  modified_base 2: mod_base = OTHER; note = 2-fluororibose cytosine
  modified_base 2..3: mod_base = OTHER; note = S-phosphorothioate
  modified_base 3: mod_base = OTHER; note = 2-fluororibose cytosine
  modified_base 3..4: mod_base = OTHER; note = S-phosphorothioate
  modified_base 4: mod_base = OTHER; note = 2-fluororibose adenine
  modified_base 4..5: mod_base = OTHER; note = S-phosphorothioate
  modified_base 5: mod_base = OTHER; note = 2-fluororibose guanine
  modified_base 5..6: mod_base = OTHER; note = S-phosphorothioate
  modified_base 6: mod_base = OTHER; note = 2-fluororibose cytosine
  modified_base 6..7: mod_base = OTHER; note = S-phosphorothioate
  modified_base 7: mod_base = OTHER; note = 2-fluororibose adenine
  modified_base 7..8: mod_base = OTHER; note R-N-(1,3-dimethylimidazolidin-2-ylidene)phosphoramidate
  modified_base 8: mod_base = OTHER; note = 2-fluororibose guanine
  modified_base 8..9: mod_base = OTHER; note = S-phosphorothioate
  modified_base 9: mod_base = OTHER; note = 2-fluororibose cytosine
  modified_base 9..10: mod_base = OTHER; note = S-phosphorothioate
  modified_base 10: mod_base = OTHER; note = 2-fluororibose uracil
  modified_base 10..11: mod_base = OTHER; note = S-phosphorothioate
  modified_base 11: mod_base = OTHER; note = 2-fluororibose uracil
  modified_base 11..12: mod_base = OTHER; note = S-phosphorothioate
  modified_base 12: mod_base = OTHER; note = 2-fluororibose cytosine
  modified_base 12..13: mod_base = OTHER; note = S-phosphorothioate
  modified_base 13: mod_base = OTHER; note = 2-fluororibose adenine
  modified_base 13..14: mod_base = OTHER; note = S-phosphorothioate
  modified_base 14: mod_base = OTHER; note = 2-fluororibose guanine
  modified_base 14..15: mod_base = OTHER; note = S-phosphorothioate
  modified_base 15: mod_base = OTHER; note = 2-fluororibose uracil
  modified_base 15..16: mod_base = OTHER; note = S-phosphorothioate
  modified_base 16: mod_base = cm
  modified_base 16..17: mod_base = OTHER; note = S-phosphorothioate
  modified_base 17: mod_base = cm
  modified_base 17..18: mod_base = OTHER; note = S-phosphorothioate
  modified_base 18: mod_base = cm
  modified_base 18..19: mod_base = OTHER; note = S-phosphorothioate
  modified_base 19: mod_base = um
  modified_base 19..20: mod_base = OTHER; note = S-phosphorothioate
  modified_base 20: mod_base = um
  modified_base 20..21: mod_base = OTHER; note = S-phosphorothioate
  modified_base 21: mod_base = um
  modified_base 21..22: mod_base = OTHER; note = S-phosphorothioate
  modified_base 22: mod_base = cm
  modified_base 22..23: mod_base = OTHER; note = S-phosphorothioate
  modified_base 23: mod_base = OTHER; note = 2-fluororibose uracil
  modified_base 23..24: mod_base = OTHER; note = S-phosphorothioate
  modified_base 24: mod_base = OTHER; note = deoxyribose 6-amino-9-substituted 8,9-dihydro-7H-purin-8-one
  modified_base 24..25: mod_base = OTHER; note = S-phosphorothioate
  modified_base 25: mod_base = OTHER; note = deoxyribose inosine
  modified_base 25..26: mod_base = OTHER; note S-N-(1,3-dimethylimidazolidin-2-ylidene)phosphoramidate
  modified_base 26: mod_base = um
  modified_base 26..27: mod_base = OTHER; note = S-phosphorothioate
  modified_base 27: mod_base = cm
  modified_base 27..28: mod_base = OTHER; note = S-phosphorothioate
  modified_base 28: mod_base = gm
  modified_base 28..29: mod_base = OTHER; note = S-phosphorothioate
  modified_base 29: mod_base = OTHER; note = 2-O-methylribose adenine
  modified_base 29..30: mod_base = OTHER; note R-N-(1,3-dimethylimidazolidin-2-ylidene)phosphoramidate
  modified_base 30: mod_base = um
  source 1..30: mol_type = other RNA

SEQ ID NO: 184 - RNA, 30 nt, synthetic construct; identical to SEQ ID NO: 134
  misc_feature 1..30: note = Synthetic: WV-42966
  misc_feature 1..30: note = Synthetic: ADR-0103688
  modified_base 1: mod_base = OTHER; note = 2-fluororibose cytosine
  modified_base 1..2: mod_base = OTHER; note R-N-(1,3-dimethylimidazolidin-2-ylidene)phosphoramidate
  modified_base 2: mod_base = OTHER; note = 2-fluororibose cytosine
  modified_base 2..3: mod_base = OTHER; note = S-phosphorothioate
  modified_base 3: mod_base = OTHER; note = 2-fluororibose cytosine
  modified_base 3..4: mod_base = OTHER; note = S-phosphorothioate
  modified_base 4: mod_base = OTHER; note = 2-fluororibose adenine
  modified_base 4..5: mod_base = OTHER; note = S-phosphorothioate
  modified_base 5: mod_base = OTHER; note = 2-fluororibose guanine
  modified_base 5..6: mod_base = OTHER; note = S-phosphorothioate
  modified_base 6: mod_base = OTHER; note = 2-fluororibose cytosine
  modified_base 6..7: mod_base = OTHER; note R-N-(1,3-dimethylimidazolidin-2-ylidene)phosphoramidate
  modified_base 7: mod_base = OTHER; note = 2-fluororibose adenine
  modified_base 7..8: mod_base = OTHER; note = S-phosphorothioate
  modified_base 8: mod_base = OTHER; note = 2-fluororibose guanine
  modified_base 8..9: mod_base = OTHER; note = S-phosphorothioate
  modified_base 9: mod_base = OTHER; note = 2-fluororibose cytosine
  modified_base 9..10: mod_base = OTHER; note = S-phosphorothioate
  modified_base 10: mod_base = OTHER; note = 2-fluororibose uracil
  modified_base 10..11: mod_base = OTHER; note = S-phosphorothioate
  modified_base 11: mod_base = OTHER; note = 2-fluororibose uracil
  modified_base 11..12: mod_base = OTHER; note = S-phosphorothioate
  modified_base 12: mod_base = OTHER; note = 2-fluororibose cytosine
  modified_base 12..13: mod_base = OTHER; note = S-phosphorothioate
  modified_base 13: mod_base = OTHER; note = 2-fluororibose adenine
  modified_base 13..14: mod_base = OTHER; note = S-phosphorothioate
  modified_base 14: mod_base = OTHER; note = 2-fluororibose guanine
  modified_base 14..15: mod_base = OTHER; note = S-phosphorothioate
  modified_base 15: mod_base = OTHER; note = 2-fluororibose uracil
  modified_base 15..16: mod_base = OTHER; note = S-phosphorothioate
  modified_base 16: mod_base = cm
  modified_base 16..17: mod_base = OTHER; note = S-phosphorothioate
  modified_base 17: mod_base = cm
  modified_base 17..18: mod_base = OTHER; note = S-phosphorothioate
  modified_base 18: mod_base = cm
  modified_base 18..19: mod_base = OTHER; note = S-phosphorothioate
  modified_base 19: mod_base = um
  modified_base 19..20: mod_base = OTHER; note = S-phosphorothioate
  modified_base 20: mod_base = um
  modified_base 20..21: mod_base = OTHER; note = S-phosphorothioate
  modified_base 21: mod_base = um
  modified_base 21..22: mod_base = OTHER; note = S-phosphorothioate
  modified_base 22: mod_base = cm
  modified_base 22..23: mod_base = OTHER; note = S-phosphorothioate
  modified_base 23: mod_base = OTHER; note = 2-fluororibose uracil
  modified_base 23..24: mod_base = OTHER; note = S-phosphorothioate
  modified_base 24: mod_base = OTHER; note = deoxyribose 6-amino-9-substituted 8,9-dihydro-7H-purin-8-one
  modified_base 24..25: mod_base = OTHER; note = S-phosphorothioate
  modified_base 25: mod_base = OTHER; note = deoxyribose inosine
  modified_base 25..26: mod_base = OTHER; note S-N-(1,3-dimethylimidazolidin-2-ylidene)phosphoramidate
  modified_base 26: mod_base = um
  modified_base 26..27: mod_base = OTHER; note = S-phosphorothioate
  modified_base 27: mod_base = cm
  modified_base 27..28: mod_base = OTHER; note = S-phosphorothioate
  modified_base 28: mod_base = gm
  modified_base 28..29: mod_base = OTHER; note = S-phosphorothioate
  modified_base 29: mod_base = OTHER; note = 2-O-methylribose adenine
  modified_base 29..30: mod_base = OTHER; note R-N-(1,3-dimethylimidazolidin-2-ylidene)phosphoramidate
  modified_base 30: mod_base = um
  source 1..30: mol_type = other RNA

SEQ ID NO: 185 - RNA, 30 nt, synthetic construct; identical to SEQ ID NO: 134
  misc_feature 1..30: note = Synthetic: WV-42965
  misc_feature 1..30: note = Synthetic: ADR-0103690
  modified_base 1: mod_base = OTHER; note = 2-fluororibose cytosine
  modified_base 1..2: mod_base = OTHER; note R-N-(1,3-dimethylimidazolidin-2-ylidene)phosphoramidate
  modified_base 2: mod_base = OTHER; note = 2-fluororibose cytosine
  modified_base 2..3: mod_base = OTHER; note = S-phosphorothioate
  modified_base 3: mod_base = OTHER; note = 2-fluororibose cytosine
  modified_base 3..4: mod_base = OTHER; note = S-phosphorothioate
  modified_base 4: mod_base = OTHER; note = 2-fluororibose adenine
  modified_base 4..5: mod_base = OTHER; note = S-phosphorothioate
  modified_base 5: mod_base = OTHER; note = 2-fluororibose guanine
  modified_base 5..6: mod_base = OTHER; note R-N-(1,3-dimethylimidazolidin-2-ylidene)phosphoramidate
  modified_base 6: mod_base = OTHER; note = 2-fluororibose cytosine
  modified_base 6..7: mod_base = OTHER; note = S-phosphorothioate
  modified_base 7: mod_base = OTHER; note = 2-fluororibose adenine
  modified_base 7..8: mod_base = OTHER; note = S-phosphorothioate
  modified_base 8: mod_base = OTHER; note = 2-fluororibose guanine
  modified_base 8..9: mod_base = OTHER; note = S-phosphorothioate
  modified_base 9: mod_base = OTHER; note = 2-fluororibose cytosine
  modified_base 9..10: mod_base = OTHER; note = S-phosphorothioate
  modified_base 10: mod_base = OTHER; note = 2-fluororibose uracil
  modified_base 10..11: mod_base = OTHER; note = S-phosphorothioate
  modified_base 11: mod_base = OTHER; note = 2-fluororibose uracil
  modified_base 11..12: mod_base = OTHER; note = S-phosphorothioate
  modified_base 12: mod_base = OTHER; note = 2-fluororibose cytosine
  modified_base 12..13: mod_base = OTHER; note = S-phosphorothioate
  modified_base 13: mod_base = OTHER; note = 2-fluororibose adenine
  modified_base 13..14: mod_base = OTHER; note = S-phosphorothioate
  modified_base 14: mod_base = OTHER; note = 2-fluororibose guanine
  modified_base 14..15: mod_base = OTHER; note = S-phosphorothioate
  modified_base 15: mod_base = OTHER; note = 2-fluororibose uracil
  modified_base 15..16: mod_base = OTHER; note = S-phosphorothioate
  modified_base 16: mod_base = cm
  modified_base 16..17: mod_base = OTHER; note = S-phosphorothioate
  modified_base 17: mod_base = cm
  modified_base 17..18: mod_base = OTHER; note = S-phosphorothioate
  modified_base 18: mod_base = cm
  modified_base 18..19: mod_base = OTHER; note = S-phosphorothioate
  modified_base 19: mod_base = um
  modified_base 19..20: mod_base = OTHER; note = S-phosphorothioate
  modified_base 20: mod_base = um
  modified_base 20..21: mod_base = OTHER; note = S-phosphorothioate
  modified_base 21: mod_base = um
  modified_base 21..22: mod_base = OTHER; note = S-phosphorothioate
  modified_base 22: mod_base = cm
  modified_base 22..23: mod_base = OTHER; note = S-phosphorothioate
  modified_base 23: mod_base = OTHER; note = 2-fluororibose uracil
  modified_base 23..24: mod_base = OTHER; note = S-phosphorothioate
  modified_base 24: mod_base = OTHER; note = deoxyribose 6-amino-9-substituted 8,9-dihydro-7H-purin-8-one
  modified_base 24..25: mod_base = OTHER; note = S-phosphorothioate
  modified_base 25: mod_base = OTHER; note = deoxyribose inosine
  modified_base 25..26: mod_base = OTHER; note S-N-(1,3-dimethylimidazolidin-2-ylidene)phosphoramidate
  modified_base 26: mod_base = um
  modified_base 26..27: mod_base = OTHER; note = S-phosphorothioate
  modified_base 27: mod_base = cm
  modified_base 27..28: mod_base = OTHER; note = S-phosphorothioate
  modified_base 28: mod_base = gm
  modified_base 28..29: mod_base = OTHER; note = S-phosphorothioate
  modified_base 29: mod_base = OTHER; note = 2-O-methylribose adenine
  modified_base 29..30: mod_base = OTHER; note R-N-(1,3-dimethylimidazolidin-2-ylidene)phosphoramidate
  modified_base 30: mod_base = um
  source 1..30: mol_type = other RNA

SEQ ID NO: 186 - RNA, 30 nt, synthetic construct; identical to SEQ ID NO: 134
  misc_feature 1..30: note = Synthetic: WV-42964
  misc_feature 1..30: note = Synthetic: ADR-0103692
  modified_base 1: mod_base = OTHER; note = 2-fluororibose cytosine
  modified_base 1..2: mod_base = OTHER; note R-N-(1,3-dimethylimidazolidin-2-ylidene)phosphoramidate
  modified_base 2: mod_base = OTHER; note = 2-fluororibose cytosine
  modified_base 2..3: mod_base = OTHER; note = S-phosphorothioate
  modified_base 3: mod_base = OTHER; note = 2-fluororibose cytosine
  modified_base 3..4: mod_base = OTHER; note = S-phosphorothioate
  modified_base 4: mod_base = OTHER; note = 2-fluororibose adenine
  modified_base 4..5: mod_base = OTHER; note R-N-(1,3-dimethylimidazolidin-2-ylidene)phosphoramidate
  modified_base 5: mod_base = OTHER; note = 2-fluororibose guanine
  modified_base 5..6: mod_base = OTHER; note = S-phosphorothioate
  modified_base 6: mod_base = OTHER; note = 2-fluororibose cytosine
  modified_base 6..7: mod_base = OTHER; note = S-phosphorothioate
  modified_base 7: mod_base = OTHER; note = 2-fluororibose adenine
  modified_base 7..8: mod_base = OTHER; note = S-phosphorothioate
  modified_base 8: mod_base = OTHER; note = 2-fluororibose guanine
  modified_base 8..9: mod_base = OTHER; note = S-phosphorothioate
  modified_base 9: mod_base = OTHER; note = 2-fluororibose cytosine
  modified_base 9..10: mod_base = OTHER; note = S-phosphorothioate
  modified_base 10: mod_base = OTHER; note = 2-fluororibose uracil
  modified_base 10..11: mod_base = OTHER; note = S-phosphorothioate
  modified_base 11: mod_base = OTHER; note = 2-fluororibose uracil
  modified_base 11..12: mod_base = OTHER; note = S-phosphorothioate
  modified_base 12: mod_base = OTHER; note = 2-fluororibose cytosine
  modified_base 12..13: mod_base = OTHER; note = S-phosphorothioate
  modified_base 13: mod_base = OTHER; note = 2-fluororibose adenine
  modified_base 13..14: mod_base = OTHER; note = S-phosphorothioate
  modified_base 14: mod_base = OTHER; note = 2-fluororibose guanine
  modified_base 14..15: mod_base = OTHER; note = S-phosphorothioate
  modified_base 15: mod_base = OTHER; note = 2-fluororibose uracil
  modified_base 15..16: mod_base = OTHER; note = S-phosphorothioate
  modified_base 16: mod_base = cm
  modified_base 16..17: mod_base = OTHER; note = S-phosphorothioate
  modified_base 17: mod_base = cm
  modified_base 17..18: mod_base = OTHER; note = S-phosphorothioate
  modified_base 18: mod_base = cm
  modified_base 18..19: mod_base = OTHER; note = S-phosphorothioate
  modified_base 19: mod_base = um
  modified_base 19..20: mod_base = OTHER; note = S-phosphorothioate
  modified_base 20: mod_base = um
  modified_base 20..21: mod_base = OTHER; note = S-phosphorothioate
  modified_base 21: mod_base = um
  modified_base 21..22: mod_base = OTHER; note = S-phosphorothioate
  modified_base 22: mod_base = cm
  modified_base 22..23: mod_base = OTHER; note = S-phosphorothioate
  modified_base 23: mod_base = OTHER; note = 2-fluororibose uracil
  modified_base 23..24: mod_base = OTHER; note = S-phosphorothioate
  modified_base 24: mod_base = OTHER; note = deoxyribose 6-amino-9-substituted 8,9-dihydro-7H-purin-8-one
  modified_base 24..25: mod_base = OTHER; note = S-phosphorothioate
  modified_base 25: mod_base = OTHER; note = deoxyribose inosine
  modified_base 25..26: mod_base = OTHER; note S-N-(1,3-dimethylimidazolidin-2-ylidene)phosphoramidate
  modified_base 26: mod_base = um
  modified_base 26..27: mod_base = OTHER; note = S-phosphorothioate
  modified_base 27: mod_base = cm
  modified_base 27..28: mod_base = OTHER; note = S-phosphorothioate
  modified_base 28: mod_base = gm
  modified_base 28..29: mod_base = OTHER; note = S-phosphorothioate
  modified_base 29: mod_base = OTHER; note = 2-O-methylribose adenine
  modified_base 29..30: mod_base = OTHER; note R-N-(1,3-dimethylimidazolidin-2-ylidene)phosphoramidate
  modified_base 30: mod_base = um
  source 1..30: mol_type = other RNA

SEQ ID NO: 187 - RNA, 30 nt, synthetic construct; identical to SEQ ID NO: 134
  misc_feature 1..30: note = Synthetic: WV-42963
  misc_feature 1..30: note = Synthetic: ADR-0103757
  modified_base 1: mod_base = OTHER; note = 2-fluororibose cytosine
  modified_base 1..2: mod_base = OTHER; note R-N-(1,3-dimethylimidazolidin-2-ylidene)phosphoramidate
  modified_base 2: mod_base = OTHER; note = 2-fluororibose cytosine
  modified_base 2..3: mod_base = OTHER; note = S-phosphorothioate
  modified_base 3: mod_base = OTHER; note = 2-fluororibose cytosine
  modified_base 3..4: mod_base = OTHER; note R-N-(1,3-dimethylimidazolidin-2-ylidene)phosphoramidate
  modified_base 4: mod_base = OTHER; note = 2-fluororibose adenine
  modified_base 4..5: mod_base = OTHER; note = S-phosphorothioate
  modified_base 5: mod_base = OTHER; note = 2-fluororibose guanine
  modified_base 5..6: mod_base = OTHER; note = S-phosphorothioate
  modified_base 6: mod_base = OTHER; note = 2-fluororibose cytosine
  modified_base 6..7: mod_base = OTHER; note = S-phosphorothioate
  modified_base 7: mod_base = OTHER; note = 2-fluororibose adenine
  modified_base 7..8: mod_base = OTHER; note = S-phosphorothioate
  modified_base 8: mod_base = OTHER; note = 2-fluororibose guanine
  modified_base 8..9: mod_base = OTHER; note = S-phosphorothioate
  modified_base 9: mod_base = OTHER; note = 2-fluororibose cytosine
  modified_base 9..10: mod_base = OTHER; note = S-phosphorothioate
  modified_base 10: mod_base = OTHER; note = 2-fluororibose uracil
  modified_base 10..11: mod_base = OTHER; note = S-phosphorothioate
  modified_base 11: mod_base = OTHER; note = 2-fluororibose uracil
  modified_base 11..12: mod_base = OTHER; note = S-phosphorothioate
  modified_base 12: mod_base = OTHER; note = 2-fluororibose cytosine
  modified_base 12..13: mod_base = OTHER; note = S-phosphorothioate
  modified_base 13: mod_base = OTHER; note = 2-fluororibose adenine
  modified_base 13..14: mod_base = OTHER; note = S-phosphorothioate
  modified_base 14: mod_base = OTHER; note = 2-fluororibose guanine
  modified_base 14..15: mod_base = OTHER; note = S-phosphorothioate
  modified_base 15: mod_base = OTHER; note = 2-fluororibose uracil
  modified_base 15..16: mod_base = OTHER; note = S-phosphorothioate
  modified_base 16: mod_base = cm
  modified_base 16..17: mod_base = OTHER; note = S-phosphorothioate
  modified_base 17: mod_base = cm
  modified_base 17..18: mod_base = OTHER; note = S-phosphorothioate
  modified_base 18: mod_base = cm
  modified_base 18..19: mod_base = OTHER; note = S-phosphorothioate
  modified_base 19: mod_base = um
  modified_base 19..20: mod_base = OTHER; note = S-phosphorothioate
  modified_base 20: mod_base = um
  modified_base 20..21: mod_base = OTHER; note = S-phosphorothioate
  modified_base 21: mod_base = um
  modified_base 21..22: mod_base = OTHER; note = S-phosphorothioate
  modified_base 22: mod_base = cm
  modified_base 22..23: mod_base = OTHER; note = S-phosphorothioate
  modified_base 23: mod_base = OTHER; note = 2-fluororibose uracil
  modified_base 23..24: mod_base = OTHER; note = S-phosphorothioate
  modified_base 24: mod_base = OTHER; note = deoxyribose 6-amino-9-substituted 8,9-dihydro-7H-purin-8-one
  modified_base 24..25: mod_base = OTHER; note = S-phosphorothioate
  modified_base 25: mod_base = OTHER; note = deoxyribose inosine
  modified_base 25..26: mod_base = OTHER; note S-N-(1,3-dimethylimidazolidin-2-ylidene)phosphoramidate
  modified_base 26: mod_base = um
  modified_base 26..27: mod_base = OTHER; note = S-phosphorothioate
  modified_base 27: mod_base = cm
  modified_base 27..28: mod_base = OTHER; note = S-phosphorothioate
  modified_base 28: mod_base = gm
  modified_base 28..29: mod_base = OTHER; note = S-phosphorothioate
  modified_base 29: mod_base = OTHER; note = 2-O-methylribose adenine
  modified_base 29..30: mod_base = OTHER; note R-N-(1,3-dimethylimidazolidin-2-ylidene)phosphoramidate
  modified_base 30: mod_base = um
  source 1..30: mol_type = other RNA

SEQ ID NO: 188 - RNA, 30 nt, synthetic construct; identical to SEQ ID NO: 134
  misc_feature 1..30: note = Synthetic: WV-43081
  misc_feature 1..30: note = Synthetic: ADR-0103620
  modified_base 1: mod_base = OTHER; note = 2-fluororibose cytosine
  modified_base 1..2: mod_base = OTHER; note R-N-(1,3-dimethylimidazolidin-2-ylidene)phosphoramidate
  modified_base 2: mod_base = OTHER; note = 2-fluororibose cytosine
  modified_base 2..3: mod_base = OTHER; note = S-phosphorothioate
  modified_base 3: mod_base = OTHER; note = 2-fluororibose cytosine
  modified_base 3..4: mod_base = OTHER; note = S-phosphorothioate
  modified_base 4: mod_base = OTHER; note = 2-fluororibose adenine
  modified_base 4..5: mod_base = OTHER; note = S-phosphorothioate
  modified_base 5: mod_base = OTHER; note = 2-fluororibose guanine
  modified_base 5..6: mod_base = OTHER; note = S-phosphorothioate
  modified_base 6: mod_base = OTHER; note = 2-fluororibose cytosine
  modified_base 6..7: mod_base = OTHER; note = S-phosphorothioate
  modified_base 7: mod_base = OTHER; note = 2-fluororibose adenine
  modified_base 7..8: mod_base = OTHER; note = S-phosphorothioate
  modified_base 8: mod_base = OTHER; note = 2-fluororibose guanine
  modified_base 8..9: mod_base = OTHER; note = S-phosphorothioate
  modified_base 9: mod_base = OTHER; note = 2-fluororibose cytosine
  modified_base 9..10: mod_base = OTHER; note = S-phosphorothioate
  modified_base 10: mod_base = OTHER; note = 2-fluororibose uracil
  modified_base 10..11: mod_base = OTHER; note = S-phosphorothioate
  modified_base 11: mod_base = OTHER; note = 2-fluororibose uracil
  modified_base 11..12: mod_base = OTHER; note = S-phosphorothioate
  modified_base 12: mod_base = OTHER; note = 2-fluororibose cytosine
  modified_base 12..13: mod_base = OTHER; note = S-phosphorothioate
  modified_base 13: mod_base = OTHER; note = 2-fluororibose adenine
  modified_base 13..14: mod_base = OTHER; note = S-phosphorothioate
  modified_base 14: mod_base = OTHER; note = 2-fluororibose guanine
  modified_base 14..15: mod_base = OTHER; note = S-phosphorothioate
  modified_base 15: mod_base = OTHER; note = 2-fluororibose uracil
  modified_base 15..16: mod_base = OTHER; note = S-phosphorothioate
  modified_base 16: mod_base = cm
  modified_base 16..17: mod_base = OTHER; note = S-phosphorothioate
  modified_base 17: mod_base = cm
  modified_base 17..18: mod_base = OTHER; note = S-phosphorothioate
  modified_base 18: mod_base = cm
  modified_base 18..19: mod_base = OTHER; note = S-phosphorothioate
  modified_base 19: mod_base = um
  modified_base 19..20: mod_base = OTHER; note = S-phosphorothioate
  modified_base 20: mod_base = um
  modified_base 20..21: mod_base = OTHER; note = S-phosphorothioate
  modified_base 21: mod_base = um
  modified_base 21..22: mod_base = OTHER; note = S-phosphorothioate
  modified_base 22: mod_base = cm
  modified_base 22..23: mod_base = OTHER; note = S-phosphorothioate
  modified_base 23: mod_base = OTHER; note = 2-fluororibose uracil
  modified_base 23..24: mod_base = OTHER; note = S-phosphorothioate
  modified_base 24: mod_base = OTHER; note = deoxyribose 6-amino-9-substituted 8,9-dihydro-7H-purin-8-one
  modified_base 24..25: mod_base = OTHER; note = S-phosphorothioate
  modified_base 25: mod_base = OTHER; note = deoxyribose inosine
  modified_base 25..26: mod_base = OTHER; note S-N-(1,3-dimethylimidazolidin-2-ylidene)phosphoramidate
  modified_base 26: mod_base = um
  modified_base 26..27: mod_base = OTHER; note = S-phosphorothioate
  modified_base 27: mod_base = cm
  modified_base 27..28: mod_base = OTHER; note = R-phosphorothioate
  modified_base 28: mod_base = gm
  modified_base 28..29: mod_base = OTHER; note = S-phosphorothioate
  modified_base 29: mod_base = OTHER; note = 2-O-methylribose adenine
  modified_base 29..30: mod_base = OTHER; note R-N-(1,3-dimethylimidazolidin-2-ylidene)phosphoramidate
  modified_base 30: mod_base = um
  source 1..30: mol_type = other RNA

SEQ ID NO: 189 - RNA, 30 nt, synthetic construct; identical to SEQ ID NO: 134
  misc_feature 1..30: note = Synthetic: WV-43080
  misc_feature 1..30: note = Synthetic: ADR-0103618
  modified_base 1: mod_base = OTHER; note = 2-fluororibose cytosine
  modified_base 1..2: mod_base = OTHER; note R-N-(1,3-dimethylimidazolidin-2-ylidene)phosphoramidate
  modified_base 2: mod_base = OTHER; note = 2-fluororibose cytosine
  modified_base 2..3: mod_base = OTHER; note = S-phosphorothioate
  modified_base 3: mod_base = OTHER; note = 2-fluororibose cytosine
  modified_base 3..4: mod_base = OTHER; note = S-phosphorothioate
  modified_base 4: mod_base = OTHER; note = 2-fluororibose adenine
  modified_base 4..5: mod_base = OTHER; note = S-phosphorothioate
  modified_base 5: mod_base = OTHER; note = 2-fluororibose guanine
  modified_base 5..6: mod_base = OTHER; note = S-phosphorothioate
  modified_base 6: mod_base = OTHER; note = 2-fluororibose cytosine
  modified_base 6..7: mod_base = OTHER; note = S-phosphorothioate
  modified_base 7: mod_base = OTHER; note = 2-fluororibose adenine
  modified_base 7..8: mod_base = OTHER; note = S-phosphorothioate
  modified_base 8: mod_base = OTHER; note = 2-fluororibose guanine
  modified_base 8..9: mod_base = OTHER; note = S-phosphorothioate
  modified_base 9: mod_base = OTHER; note = 2-fluororibose cytosine
  modified_base 9..10: mod_base = OTHER; note = S-phosphorothioate
  modified_base 10: mod_base = OTHER; note = 2-fluororibose uracil
  modified_base 10..11: mod_base = OTHER; note = S-phosphorothioate
  modified_base 11: mod_base = OTHER; note = 2-fluororibose uracil
  modified_base 11..12: mod_base = OTHER; note = S-phosphorothioate
  modified_base 12: mod_base = OTHER; note = 2-fluororibose cytosine
  modified_base 12..13: mod_base = OTHER; note = S-phosphorothioate
  modified_base 13: mod_base = OTHER; note = 2-fluororibose adenine
  modified_base 13..14: mod_base = OTHER; note = S-phosphorothioate
  modified_base 14: mod_base = OTHER; note = 2-fluororibose guanine
  modified_base 14..15: mod_base = OTHER; note = S-phosphorothioate
  modified_base 15: mod_base = OTHER; note = 2-fluororibose uracil
  modified_base 15..16: mod_base = OTHER; note = S-phosphorothioate
  modified_base 16: mod_base = cm
  modified_base 16..17: mod_base = OTHER; note = S-phosphorothioate
  modified_base 17: mod_base = cm
  modified_base 17..18: mod_base = OTHER; note = S-phosphorothioate
  modified_base 18: mod_base = cm
  modified_base 18..19: mod_base = OTHER; note = S-phosphorothioate
  modified_base 19: mod_base = um
  modified_base 19..20: mod_base = OTHER; note = S-phosphorothioate
  modified_base 20: mod_base = um
  modified_base 20..21: mod_base = OTHER; note = S-phosphorothioate
  modified_base 21: mod_base = um
  modified_base 21..22: mod_base = OTHER; note = S-phosphorothioate
  modified_base 22: mod_base = cm
  modified_base 22..23: mod_base = OTHER; note = S-phosphorothioate
  modified_base 23: mod_base = OTHER; note = 2-fluororibose uracil
  modified_base 23..24: mod_base = OTHER; note = S-phosphorothioate
  modified_base 24: mod_base = OTHER; note = deoxyribose 6-amino-9-substituted 8,9-dihydro-7H-purin-8-one
  modified_base 24..25: mod_base = OTHER; note = S-phosphorothioate
  modified_base 25: mod_base = OTHER; note = deoxyribose inosine
  modified_base 25..26: mod_base = OTHER; note S-N-(1,3-dimethylimidazolidin-2-ylidene)phosphoramidate
  modified_base 26: mod_base = um
  modified_base 26..27: mod_base = OTHER; note = R-phosphorothioate
  modified_base 27: mod_base = cm
  modified_base 27..28: mod_base = OTHER; note = S-phosphorothioate
  modified_base 28: mod_base = gm
  modified_base 28..29: mod_base = OTHER; note = S-phosphorothioate
  modified_base 29: mod_base = OTHER; note = 2-O-methylribose adenine
  modified_base 29..30: mod_base = OTHER; note R-N-(1,3-dimethylimidazolidin-2-ylidene)phosphoramidate
  modified_base 30: mod_base = um
  source 1..30: mol_type = other RNA

SEQ ID NO: 190 - RNA, 30 nt, synthetic construct; identical to SEQ ID NO: 134
  misc_feature 1..30: note = Synthetic: WV-43078
  misc_feature 1..30: note = Synthetic: ADR-0103591
  modified_base 1: mod_base = OTHER; note = 2-fluororibose cytosine
  modified_base 1..2: mod_base = OTHER; note R-N-(1,3-dimethylimidazolidin-2-ylidene)phosphoramidate
  modified_base 2: mod_base = OTHER; note = 2-fluororibose cytosine
  modified_base 2..3: mod_base = OTHER; note = S-phosphorothioate
  modified_base 3: mod_base = OTHER; note = 2-fluororibose cytosine
  modified_base 3..4: mod_base = OTHER; note = S-phosphorothioate
  modified_base 4: mod_base = OTHER; note = 2-fluororibose adenine
  modified_base 4..5: mod_base = OTHER; note = S-phosphorothioate
  modified_base 5: mod_base = OTHER; note = 2-fluororibose guanine
  modified_base 5..6: mod_base = OTHER; note = S-phosphorothioate
  modified_base 6: mod_base = OTHER; note = 2-fluororibose cytosine
  modified_base 6..7: mod_base = OTHER; note = S-phosphorothioate
  modified_base 7: mod_base = OTHER; note = 2-fluororibose adenine
  modified_base 7..8: mod_base = OTHER; note = S-phosphorothioate
  modified_base 8: mod_base = OTHER; note = 2-fluororibose guanine
  modified_base 8..9: mod_base = OTHER; note = S-phosphorothioate
  modified_base 9: mod_base = OTHER; note = 2-fluororibose cytosine
  modified_base 9..10: mod_base = OTHER; note = S-phosphorothioate
  modified_base 10: mod_base = OTHER; note = 2-fluororibose uracil
  modified_base 10..11: mod_base = OTHER; note = S-phosphorothioate
  modified_base 11: mod_base = OTHER; note = 2-fluororibose uracil
  modified_base 11..12: mod_base = OTHER; note = S-phosphorothioate
  modified_base 12: mod_base = OTHER; note = 2-fluororibose cytosine
  modified_base 12..13: mod_base = OTHER; note = S-phosphorothioate
  modified_base 13: mod_base = OTHER; note = 2-fluororibose adenine
  modified_base 13..14: mod_base = OTHER; note = S-phosphorothioate
  modified_base 14: mod_base = OTHER; note = 2-fluororibose guanine
  modified_base 14..15: mod_base = OTHER; note = S-phosphorothioate
  modified_base 15: mod_base = OTHER; note = 2-fluororibose uracil
  modified_base 15..16: mod_base = OTHER; note = S-phosphorothioate
  modified_base 16: mod_base = cm
  modified_base 16..17: mod_base = OTHER; note = S-phosphorothioate
  modified_base 17: mod_base = cm
  modified_base 17..18: mod_base = OTHER; note = S-phosphorothioate
  modified_base 18: mod_base = cm
  modified_base 18..19: mod_base = OTHER; note = S-phosphorothioate
  modified_base 19: mod_base = um
  modified_base 19..20: mod_base = OTHER; note = S-phosphorothioate
  modified_base 20: mod_base = um
  modified_base 20..21: mod_base = OTHER; note = S-phosphorothioate
  modified_base 21: mod_base = um
  modified_base 21..22: mod_base = OTHER; note = S-phosphorothioate
  modified_base 22: mod_base = cm
  modified_base 22..23: mod_base = OTHER; note = S-phosphorothioate
  modified_base 23: mod_base = OTHER; note = 2-fluororibose uracil
  modified_base 23..24: mod_base = OTHER; note = R-phosphorothioate
  modified_base 24: mod_base = OTHER; note = deoxyribose 6-amino-9-substituted 8,9-dihydro-7H-purin-8-one
  modified_base 24..25: mod_base = OTHER; note = S-phosphorothioate
  modified_base 25: mod_base = OTHER; note = deoxyribose inosine
  modified_base 25..26: mod_base = OTHER; note S-N-(1,3-dimethylimidazolidin-2-ylidene)phosphoramidate
  modified_base 26: mod_base = um
  modified_base 26..27: mod_base = OTHER; note = S-phosphorothioate
  modified_base 27: mod_base = cm
  modified_base 27..28: mod_base = OTHER; note = S-phosphorothioate
  modified_base 28: mod_base = gm
  modified_base 28..29: mod_base = OTHER; note = S-phosphorothioate
  modified_base 29: mod_base = OTHER; note = 2-O-methylribose adenine
  modified_base 29..30: mod_base = OTHER; note R-N-(1,3-dimethylimidazolidin-2-ylidene)phosphoramidate
  modified_base 30: mod_base = um
  source 1..30: mol_type = other RNA

SEQ ID NO: 191 - RNA, 30 nt, synthetic construct; identical to SEQ ID NO: 134
  misc_feature 1..30: note = Synthetic: WV-43077
  misc_feature 1..30: note = Synthetic: ADR-0103577
  modified_base 1: mod_base = OTHER; note = 2-fluororibose cytosine
  modified_base 1..2: mod_base = OTHER; note R-N-(1,3-dimethylimidazolidin-2-ylidene)phosphoramidate
  modified_base 2: mod_base = OTHER; note = 2-fluororibose cytosine
  modified_base 2..3: mod_base = OTHER; note = S-phosphorothioate
  modified_base 3: mod_base = OTHER; note = 2-fluororibose cytosine
  modified_base 3..4: mod_base = OTHER; note = S-phosphorothioate
  modified_base 4: mod_base = OTHER; note = 2-fluororibose adenine
  modified_base 4..5: mod_base = OTHER; note = S-phosphorothioate
  modified_base 5: mod_base = OTHER; note = 2-fluororibose guanine
  modified_base 5..6: mod_base = OTHER; note = S-phosphorothioate
  modified_base 6: mod_base = OTHER; note = 2-fluororibose cytosine
  modified_base 6..7: mod_base = OTHER; note = S-phosphorothioate
  modified_base 7: mod_base = OTHER; note = 2-fluororibose adenine
  modified_base 7..8: mod_base = OTHER; note = S-phosphorothioate
  modified_base 8: mod_base = OTHER; note = 2-fluororibose guanine
  modified_base 8..9: mod_base = OTHER; note = S-phosphorothioate
  modified_base 9: mod_base = OTHER; note = 2-fluororibose cytosine
  modified_base 9..10: mod_base = OTHER; note = S-phosphorothioate
  modified_base 10: mod_base = OTHER; note = 2-fluororibose uracil
  modified_base 10..11: mod_base = OTHER; note = S-phosphorothioate
  modified_base 11: mod_base = OTHER; note = 2-fluororibose uracil
  modified_base 11..12: mod_base = OTHER; note = S-phosphorothioate
  modified_base 12: mod_base = OTHER; note = 2-fluororibose cytosine
  modified_base 12..13: mod_base = OTHER; note = S-phosphorothioate
  modified_base 13: mod_base = OTHER; note = 2-fluororibose adenine
  modified_base 13..14: mod_base = OTHER; note = S-phosphorothioate
  modified_base 14: mod_base = OTHER; note = 2-fluororibose guanine
  modified_base 14..15: mod_base = OTHER; note = S-phosphorothioate
  modified_base 15: mod_base = OTHER; note = 2-fluororibose uracil
  modified_base 15..16: mod_base = OTHER; note = S-phosphorothioate
  modified_base 16: mod_base = cm
  modified_base 16..17: mod_base = OTHER; note = S-phosphorothioate
  modified_base 17: mod_base = cm
  modified_base 17..18: mod_base = OTHER; note = S-phosphorothioate
  modified_base 18: mod_base = cm
  modified_base 18..19: mod_base = OTHER; note = S-phosphorothioate
  modified_base 19: mod_base = um
  modified_base 19..20: mod_base = OTHER; note = S-phosphorothioate
  modified_base 20: mod_base = um
  modified_base 20..21: mod_base = OTHER; note = S-phosphorothioate
  modified_base 21: mod_base = um
  modified_base 21..22: mod_base = OTHER; note = S-phosphorothioate
  modified_base 22: mod_base = cm
  modified_base 22..23: mod_base = OTHER; note = R-phosphorothioate
  modified_base 23: mod_base = OTHER; note = 2-fluororibose uracil
  modified_base 23..24: mod_base = OTHER; note = S-phosphorothioate
  modified_base 24: mod_base = OTHER; note = deoxyribose 6-amino-9-substituted 8,9-dihydro-7H-purin-8-one
  modified_base 24..25: mod_base = OTHER; note = S-phosphorothioate
  modified_base 25: mod_base = OTHER; note = deoxyribose inosine
  modified_base 25..26: mod_base = OTHER; note S-N-(1,3-dimethylimidazolidin-2-ylidene)phosphoramidate
  modified_base 26: mod_base = um
  modified_base 26..27: mod_base = OTHER; note = S-phosphorothioate
  modified_base 27: mod_base = cm
  modified_base 27..28: mod_base = OTHER; note = S-phosphorothioate
  modified_base 28: mod_base = gm
  modified_base 28..29: mod_base = OTHER; note = S-phosphorothioate
  modified_base 29: mod_base = OTHER; note = 2-O-methylribose adenine
  modified_base 29..30: mod_base = OTHER; note R-N-(1,3-dimethylimidazolidin-2-ylidene)phosphoramidate
  modified_base 30: mod_base = um
  source 1..30: mol_type = other RNA

SEQ ID NO: 192 - RNA, 30 nt, synthetic construct; identical to SEQ ID NO: 134
  misc_feature 1..30: note = Synthetic: WV-43076
  misc_feature 1..30: note = Synthetic: ADR-0103575
  modified_base 1: mod_base = OTHER; note = 2-fluororibose cytosine
  modified_base 1..2: mod_base = OTHER; note R-N-(1,3-dimethylimidazolidin-2-ylidene)phosphoramidate
  modified_base 2: mod_base = OTHER; note = 2-fluororibose cytosine
  modified_base 2..3: mod_base = OTHER; note = S-phosphorothioate
  modified_base 3: mod_base = OTHER; note = 2-fluororibose cytosine
  modified_base 3..4: mod_base = OTHER; note = S-phosphorothioate
  modified_base 4: mod_base = OTHER; note = 2-fluororibose adenine
  modified_base 4..5: mod_base = OTHER; note = S-phosphorothioate
  modified_base 5: mod_base = OTHER; note = 2-fluororibose guanine
  modified_base 5..6: mod_base = OTHER; note = S-phosphorothioate
  modified_base 6: mod_base = OTHER; note = 2-fluororibose cytosine
  modified_base 6..7: mod_base = OTHER; note = S-phosphorothioate
  modified_base 7: mod_base = OTHER; note = 2-fluororibose adenine
  modified_base 7..8: mod_base = OTHER; note = S-phosphorothioate
  modified_base 8: mod_base = OTHER; note = 2-fluororibose guanine
  modified_base 8..9: mod_base = OTHER; note = S-phosphorothioate
  modified_base 9: mod_base = OTHER; note = 2-fluororibose cytosine
  modified_base 9..10: mod_base = OTHER; note = S-phosphorothioate
  modified_base 10: mod_base = OTHER; note = 2-fluororibose uracil
  modified_base 10..11: mod_base = OTHER; note = S-phosphorothioate
  modified_base 11: mod_base = OTHER; note = 2-fluororibose uracil
  modified_base 11..12: mod_base = OTHER; note = S-phosphorothioate
  modified_base 12: mod_base = OTHER; note = 2-fluororibose cytosine
  modified_base 12..13: mod_base = OTHER; note = S-phosphorothioate
  modified_base 13: mod_base = OTHER; note = 2-fluororibose adenine
  modified_base 13..14: mod_base = OTHER; note = S-phosphorothioate
  modified_base 14: mod_base = OTHER; note = 2-fluororibose guanine
  modified_base 14..15: mod_base = OTHER; note = S-phosphorothioate
  modified_base 15: mod_base = OTHER; note = 2-fluororibose uracil
  modified_base 15..16: mod_base = OTHER; note = S-phosphorothioate
  modified_base 16: mod_base = cm
  modified_base 16..17: mod_base = OTHER; note = S-phosphorothioate
  modified_base 17: mod_base = cm
  modified_base 17..18: mod_base = OTHER; note = S-phosphorothioate
  modified_base 18: mod_base = cm
  modified_base 18..19: mod_base = OTHER; note = S-phosphorothioate
  modified_base 19: mod_base = um
  modified_base 19..20: mod_base = OTHER; note = S-phosphorothioate
  modified_base 20: mod_base = um
  modified_base 20..21: mod_base = OTHER; note = S-phosphorothioate
  modified_base 21: mod_base = um
  modified_base 21..22: mod_base = OTHER; note = R-phosphorothioate
  modified_base 22: mod_base = cm
  modified_base 22..23: mod_base = OTHER; note = S-phosphorothioate
  modified_base 23: mod_base = OTHER; note = 2-fluororibose uracil
  modified_base 23..24: mod_base = OTHER; note = S-phosphorothioate
  modified_base 24: mod_base = OTHER; note = deoxyribose 6-amino-9-substituted 8,9-dihydro-7H-purin-8-one
  modified_base 24..25: mod_base = OTHER; note = S-phosphorothioate
  modified_base 25: mod_base = OTHER; note = deoxyribose inosine
  modified_base 25..26: mod_base = OTHER; note S-N-(1,3-dimethylimidazolidin-2-ylidene)phosphoramidate
  modified_base 26: mod_base = um
  modified_base 26..27: mod_base = OTHER; note = S-phosphorothioate
  modified_base 27: mod_base = cm
  modified_base 27..28: mod_base = OTHER; note = S-phosphorothioate
  modified_base 28: mod_base = gm
  modified_base 28..29: mod_base = OTHER; note = S-phosphorothioate
  modified_base 29: mod_base = OTHER; note = 2-O-methylribose adenine
  modified_base 29..30: mod_base = OTHER; note R-N-(1,3-dimethylimidazolidin-2-ylidene)phosphoramidate
  modified_base 30: mod_base = um
  source 1..30: mol_type = other RNA

SEQ ID NO: 193 - RNA, 30 nt, synthetic construct; identical to SEQ ID NO: 134
  misc_feature 1..30: note = Synthetic: WV-43075
  misc_feature 1..30: note = Synthetic: ADR-0103573
  modified_base 1: mod_base = OTHER; note = 2-fluororibose cytosine
  modified_base 1..2: mod_base = OTHER; note R-N-(1,3-dimethylimidazolidin-2-ylidene)phosphoramidate
  modified_base 2: mod_base = OTHER; note = 2-fluororibose cytosine
  modified_base 2..3: mod_base = OTHER; note = S-phosphorothioate
  modified_base 3: mod_base = OTHER; note = 2-fluororibose cytosine
  modified_base 3..4: mod_base = OTHER; note = S-phosphorothioate
  modified_base 4: mod_base = OTHER; note = 2-fluororibose adenine
  modified_base 4..5: mod_base = OTHER; note = S-phosphorothioate
  modified_base 5: mod_base = OTHER; note = 2-fluororibose guanine
  modified_base 5..6: mod_base = OTHER; note = S-phosphorothioate
  modified_base 6: mod_base = OTHER; note = 2-fluororibose cytosine
  modified_base 6..7: mod_base = OTHER; note = S-phosphorothioate
  modified_base 7: mod_base = OTHER; note = 2-fluororibose adenine
  modified_base 7..8: mod_base = OTHER; note = S-phosphorothioate
  modified_base 8: mod_base = OTHER; note = 2-fluororibose guanine
  modified_base 8..9: mod_base = OTHER; note = S-phosphorothioate
  modified_base 9: mod_base = OTHER; note = 2-fluororibose cytosine
  modified_base 9..10: mod_base = OTHER; note = S-phosphorothioate
  modified_base 10: mod_base = OTHER; note = 2-fluororibose uracil
  modified_base 10..11: mod_base = OTHER; note = S-phosphorothioate
  modified_base 11: mod_base = OTHER; note = 2-fluororibose uracil
  modified_base 11..12: mod_base = OTHER; note = S-phosphorothioate
  modified_base 12: mod_base = OTHER; note = 2-fluororibose cytosine
  modified_base 12..13: mod_base = OTHER; note = S-phosphorothioate
  modified_base 13: mod_base = OTHER; note = 2-fluororibose adenine
  modified_base 13..14: mod_base = OTHER; note = S-phosphorothioate
  modified_base 14: mod_base = OTHER; note = 2-fluororibose guanine
  modified_base 14..15: mod_base = OTHER; note = S-phosphorothioate
  modified_base 15: mod_base = OTHER; note = 2-fluororibose uracil
  modified_base 15..16: mod_base = OTHER; note = S-phosphorothioate
  modified_base 16: mod_base = cm
  modified_base 16..17: mod_base = OTHER; note = S-phosphorothioate
  modified_base 17: mod_base = cm
  modified_base 17..18: mod_base = OTHER; note = S-phosphorothioate
  modified_base 18: mod_base = cm
  modified_base 18..19: mod_base = OTHER; note = S-phosphorothioate
  modified_base 19: mod_base = um
  modified_base 19..20: mod_base = OTHER; note = S-phosphorothioate
  modified_base 20: mod_base = um
  modified_base 20..21: mod_base = OTHER; note = R-phosphorothioate
  modified_base 21: mod_base = um
  modified_base 21..22: mod_base = OTHER; note = S-phosphorothioate
  modified_base 22: mod_base = cm
  modified_base 22..23: mod_base = OTHER; note = S-phosphorothioate
  modified_base 23: mod_base = OTHER; note = 2-fluororibose uracil
  modified_base 23..24: mod_base = OTHER; note = S-phosphorothioate
  modified_base 24: mod_base = OTHER; note = deoxyribose 6-amino-9-substituted 8,9-dihydro-7H-purin-8-one
  modified_base 24..25: mod_base = OTHER; note = S-phosphorothioate
  modified_base 25: mod_base = OTHER; note = deoxyribose inosine
  modified_base 25..26: mod_base = OTHER; note S-N-(1,3-dimethylimidazolidin-2-ylidene)phosphoramidate
  modified_base 26: mod_base = um
  modified_base 26..27: mod_base = OTHER; note = S-phosphorothioate
  modified_base 27: mod_base = cm
  modified_base 27..28: mod_base = OTHER; note = S-phosphorothioate
  modified_base 28: mod_base = gm
  modified_base 28..29: mod_base = OTHER; note = S-phosphorothioate
  modified_base 29: mod_base = OTHER; note = 2-O-methylribose adenine
  modified_base 29..30: mod_base = OTHER; note R-N-(1,3-dimethylimidazolidin-2-ylidene)phosphoramidate
  modified_base 30: mod_base = um
  source 1..30: mol_type = other RNA

SEQ ID NO: 194 - RNA, 30 nt, synthetic construct; identical to SEQ ID NO: 134
  misc_feature 1..30: note = Synthetic: WV-43074
  misc_feature 1..30: note = Synthetic: ADR-0103571
  modified_base 1: mod_base = OTHER; note = 2-fluororibose cytosine
  modified_base 1..2: mod_base = OTHER; note R-N-(1,3-dimethylimidazolidin-2-ylidene)phosphoramidate
  modified_base 2: mod_base = OTHER; note = 2-fluororibose cytosine
  modified_base 2..3: mod_base = OTHER; note = S-phosphorothioate
  modified_base 3: mod_base = OTHER; note = 2-fluororibose cytosine
  modified_base 3..4: mod_base = OTHER; note = S-phosphorothioate
  modified_base 4: mod_base = OTHER; note = 2-fluororibose adenine
  modified_base 4..5: mod_base = OTHER; note = S-phosphorothioate
  modified_base 5: mod_base = OTHER; note = 2-fluororibose guanine
  modified_base 5..6: mod_base = OTHER; note = S-phosphorothioate
  modified_base 6: mod_base = OTHER; note = 2-fluororibose cytosine
  modified_base 6..7: mod_base = OTHER; note = S-phosphorothioate
  modified_base 7: mod_base = OTHER; note = 2-fluororibose adenine
  modified_base 7..8: mod_base = OTHER; note = S-phosphorothioate
  modified_base 8: mod_base = OTHER; note = 2-fluororibose guanine
  modified_base 8..9: mod_base = OTHER; note = S-phosphorothioate
  modified_base 9: mod_base = OTHER; note = 2-fluororibose cytosine
  modified_base 9..10: mod_base = OTHER; note = S-phosphorothioate
  modified_base 10: mod_base = OTHER; note = 2-fluororibose uracil
  modified_base 10..11: mod_base = OTHER; note = S-phosphorothioate
  modified_base 11: mod_base = OTHER; note = 2-fluororibose uracil
  modified_base 11..12: mod_base = OTHER; note = S-phosphorothioate
  modified_base 12: mod_base = OTHER; note = 2-fluororibose cytosine
  modified_base 12..13: mod_base = OTHER; note = S-phosphorothioate
  modified_base 13: mod_base = OTHER; note = 2-fluororibose adenine
  modified_base 13..14: mod_base = OTHER; note = S-phosphorothioate
  modified_base 14: mod_base = OTHER; note = 2-fluororibose guanine
  modified_base 14..15: mod_base = OTHER; note = S-phosphorothioate
  modified_base 15: mod_base = OTHER; note = 2-fluororibose uracil
  modified_base 15..16: mod_base = OTHER; note = S-phosphorothioate
  modified_base 16: mod_base = cm
  modified_base 16..17: mod_base = OTHER; note = S-phosphorothioate
  modified_base 17: mod_base = cm
  modified_base 17..18: mod_base = OTHER; note = S-phosphorothioate
  modified_base 18: mod_base = cm
  modified_base 18..19: mod_base = OTHER; note = S-phosphorothioate
  modified_base 19: mod_base = um
  modified_base 19..20: mod_base = OTHER; note = R-phosphorothioate
  modified_base 20: mod_base = um
  modified_base 20..21: mod_base = OTHER; note = S-phosphorothioate
  modified_base 21: mod_base = um
  modified_base 21..22: mod_base = OTHER; note = S-phosphorothioate
  modified_base 22: mod_base = cm
  modified_base 22..23: mod_base = OTHER; note = S-phosphorothioate
  modified_base 23: mod_base = OTHER; note = 2-fluororibose uracil
  modified_base 23..24: mod_base = OTHER; note = S-phosphorothioate
  modified_base 24: mod_base = OTHER; note = deoxyribose 6-amino-9-substituted 8,9-dihydro-7H-purin-8-one
  modified_base 24..25: mod_base = OTHER; note = S-phosphorothioate
  modified_base 25: mod_base = OTHER; note = deoxyribose inosine
  modified_base 25..26: mod_base = OTHER; note S-N-(1,3-dimethylimidazolidin-2-ylidene)phosphoramidate
  modified_base 26: mod_base = um
  modified_base 26..27: mod_base = OTHER; note = S-phosphorothioate
  modified_base 27: mod_base = cm
  modified_base 27..28: mod_base = OTHER; note = S-phosphorothioate
  modified_base 28: mod_base = gm
  modified_base 28..29: mod_base = OTHER; note = S-phosphorothioate
  modified_base 29: mod_base = OTHER; note = 2-O-methylribose adenine
  modified_base 29..30: mod_base = OTHER; note R-N-(1,3-dimethylimidazolidin-2-ylidene)phosphoramidate
  modified_base 30: mod_base = um
  source 1..30: mol_type = other RNA

SEQ ID NO: 195 - RNA, 30 nt, synthetic construct; identical to SEQ ID NO: 134
  misc_feature 1..30: note = Synthetic: WV-43073
  misc_feature 1..30: note = Synthetic: ADR-0103569
  modified_base 1: mod_base = OTHER; note = 2-fluororibose cytosine
  modified_base 1..2: mod_base = OTHER; note R-N-(1,3-dimethylimidazolidin-2-ylidene)phosphoramidate
  modified_base 2: mod_base = OTHER; note = 2-fluororibose cytosine
  modified_base 2..3: mod_base = OTHER; note = S-phosphorothioate
  modified_base 3: mod_base = OTHER; note = 2-fluororibose cytosine
  modified_base 3..4: mod_base = OTHER; note = S-phosphorothioate
  modified_base 4: mod_base = OTHER; note = 2-fluororibose adenine
  modified_base 4..5: mod_base = OTHER; note = S-phosphorothioate
  modified_base 5: mod_base = OTHER; note = 2-fluororibose guanine
  modified_base 5..6: mod_base = OTHER; note = S-phosphorothioate
  modified_base 6: mod_base = OTHER; note = 2-fluororibose cytosine
  modified_base 6..7: mod_base = OTHER; note = S-phosphorothioate
  modified_base 7: mod_base = OTHER; note = 2-fluororibose adenine
  modified_base 7..8: mod_base = OTHER; note = S-phosphorothioate
  modified_base 8: mod_base = OTHER; note = 2-fluororibose guanine
  modified_base 8..9: mod_base = OTHER; note = S-phosphorothioate
  modified_base 9: mod_base = OTHER; note = 2-fluororibose cytosine
  modified_base 9..10: mod_base = OTHER; note = S-phosphorothioate
  modified_base 10: mod_base = OTHER; note = 2-fluororibose uracil
  modified_base 10..11: mod_base = OTHER; note = S-phosphorothioate
  modified_base 11: mod_base = OTHER; note = 2-fluororibose uracil
  modified_base 11..12: mod_base = OTHER; note = S-phosphorothioate
  modified_base 12: mod_base = OTHER; note = 2-fluororibose cytosine
  modified_base 12..13: mod_base = OTHER; note = S-phosphorothioate
  modified_base 13: mod_base = OTHER; note = 2-fluororibose adenine
  modified_base 13..14: mod_base = OTHER; note = S-phosphorothioate
  modified_base 14: mod_base = OTHER; note = 2-fluororibose guanine
  modified_base 14..15: mod_base = OTHER; note = S-phosphorothioate
  modified_base 15: mod_base = OTHER; note = 2-fluororibose uracil
  modified_base 15..16: mod_base = OTHER; note = S-phosphorothioate
  modified_base 16: mod_base = cm
  modified_base 16..17: mod_base = OTHER; note = S-phosphorothioate
  modified_base 17: mod_base = cm
  modified_base 17..18: mod_base = OTHER; note = S-phosphorothioate
  modified_base 18: mod_base = cm
  modified_base 18..19: mod_base = OTHER; note = R-phosphorothioate
  modified_base 19: mod_base = um
  modified_base 19..20: mod_base = OTHER; note = S-phosphorothioate
  modified_base 20: mod_base = um
  modified_base 20..21: mod_base = OTHER; note = S-phosphorothioate
  modified_base 21: mod_base = um
  modified_base 21..22: mod_base = OTHER; note = S-phosphorothioate
  modified_base 22: mod_base = cm
  modified_base 22..23: mod_base = OTHER; note = S-phosphorothioate
  modified_base 23: mod_base = OTHER; note = 2-fluororibose uracil
  modified_base 23..24: mod_base = OTHER; note = S-phosphorothioate
  modified_base 24: mod_base = OTHER; note = deoxyribose 6-amino-9-substituted 8,9-dihydro-7H-purin-8-one
  modified_base 24..25: mod_base = OTHER; note = S-phosphorothioate
  modified_base 25: mod_base = OTHER; note = deoxyribose inosine
  modified_base 25..26: mod_base = OTHER; note S-N-(1,3-dimethylimidazolidin-2-ylidene)phosphoramidate
  modified_base 26: mod_base = um
  modified_base 26..27: mod_base = OTHER; note = S-phosphorothioate
  modified_base 27: mod_base = cm
  modified_base 27..28: mod_base = OTHER; note = S-phosphorothioate
  modified_base 28: mod_base = gm
  modified_base 28..29: mod_base = OTHER; note = S-phosphorothioate
  modified_base 29: mod_base = OTHER; note = 2-O-methylribose adenine
  modified_base 29..30: mod_base = OTHER; note R-N-(1,3-dimethylimidazolidin-2-ylidene)phosphoramidate
  modified_base 30: mod_base = um
  source 1..30: mol_type = other RNA

SEQ ID NO: 196 - RNA, 30 nt, synthetic construct; identical to SEQ ID NO: 134
  misc_feature 1..30: note = Synthetic: WV-43072
  misc_feature 1..30: note = Synthetic: ADR-0103567
  modified_base 1: mod_base = OTHER; note = 2-fluororibose cytosine
  modified_base 1..2: mod_base = OTHER; note R-N-(1,3-dimethylimidazolidin-2-ylidene)phosphoramidate
  modified_base 2: mod_base = OTHER; note = 2-fluororibose cytosine
  modified_base 2..3: mod_base = OTHER; note = S-phosphorothioate
  modified_base 3: mod_base = OTHER; note = 2-fluororibose cytosine
  modified_base 3..4: mod_base = OTHER; note = S-phosphorothioate
  modified_base 4: mod_base = OTHER; note = 2-fluororibose adenine
  modified_base 4..5: mod_base = OTHER; note = S-phosphorothioate
  modified_base 5: mod_base = OTHER; note = 2-fluororibose guanine
  modified_base 5..6: mod_base = OTHER; note = S-phosphorothioate
  modified_base 6: mod_base = OTHER; note = 2-fluororibose cytosine
  modified_base 6..7: mod_base = OTHER; note = S-phosphorothioate
  modified_base 7: mod_base = OTHER; note = 2-fluororibose adenine
  modified_base 7..8: mod_base = OTHER; note = S-phosphorothioate
  modified_base 8: mod_base = OTHER; note = 2-fluororibose guanine
  modified_base 8..9: mod_base = OTHER; note = S-phosphorothioate
  modified_base 9: mod_base = OTHER; note = 2-fluororibose cytosine
  modified_base 9..10: mod_base = OTHER; note = S-phosphorothioate
  modified_base 10: mod_base = OTHER; note = 2-fluororibose uracil
  modified_base 10..11: mod_base = OTHER; note = S-phosphorothioate
  modified_base 11: mod_base = OTHER; note = 2-fluororibose uracil
  modified_base 11..12: mod_base = OTHER; note = S-phosphorothioate
  modified_base 12: mod_base = OTHER; note = 2-fluororibose cytosine
  modified_base 12..13: mod_base = OTHER; note = S-phosphorothioate
  modified_base 13: mod_base = OTHER; note = 2-fluororibose adenine
  modified_base 13..14: mod_base = OTHER; note = S-phosphorothioate
  modified_base 14: mod_base = OTHER; note = 2-fluororibose guanine
  modified_base 14..15: mod_base = OTHER; note = S-phosphorothioate
  modified_base 15: mod_base = OTHER; note = 2-fluororibose uracil
  modified_base 15..16: mod_base = OTHER; note = S-phosphorothioate
  modified_base 16: mod_base = cm
  modified_base 16..17: mod_base = OTHER; note = S-phosphorothioate
  modified_base 17: mod_base = cm
  modified_base 17..18: mod_base = OTHER; note = R-phosphorothioate
  modified_base 18: mod_base = cm
  modified_base 18..19: mod_base = OTHER; note = S-phosphorothioate
  modified_base 19: mod_base = um
  modified_base 19..20: mod_base = OTHER; note = S-phosphorothioate
  modified_base 20: mod_base = um
  modified_base 20..21: mod_base = OTHER; note = S-phosphorothioate
  modified_base 21: mod_base = um
  modified_base 21..22: mod_base = OTHER; note = S-phosphorothioate
  modified_base 22: mod_base = cm
  modified_base 22..23: mod_base = OTHER; note = S-phosphorothioate
  modified_base 23: mod_base = OTHER; note = 2-fluororibose uracil
  modified_base 23..24: mod_base = OTHER; note = S-phosphorothioate
  modified_base 24: mod_base = OTHER; note = deoxyribose 6-amino-9-substituted 8,9-dihydro-7H-purin-8-one
  modified_base 24..25: mod_base = OTHER; note = S-phosphorothioate
  modified_base 25: mod_base = OTHER; note = deoxyribose inosine
  modified_base 25..26: mod_base = OTHER; note S-N-(1,3-dimethylimidazolidin-2-ylidene)phosphoramidate
  modified_base 26: mod_base = um
  modified_base 26..27: mod_base = OTHER; note = S-phosphorothioate
  modified_base 27: mod_base = cm
  modified_base 27..28: mod_base = OTHER; note = S-phosphorothioate
  modified_base 28: mod_base = gm
  modified_base 28..29: mod_base = OTHER; note = S-phosphorothioate
  modified_base 29: mod_base = OTHER; note = 2-O-methylribose adenine
  modified_base 29..30: mod_base = OTHER; note R-N-(1,3-dimethylimidazolidin-2-ylidene)phosphoramidate
  modified_base 30: mod_base = um
  source 1..30: mol_type = other RNA

SEQ ID NO: 197 - RNA, 30 nt, synthetic construct; identical to SEQ ID NO: 134
  misc_feature 1..30: note = Synthetic: WV-43071
  misc_feature 1..30: note = Synthetic: ADR-0103565
  modified_base 1: mod_base = OTHER; note = 2-fluororibose cytosine
  modified_base 1..2: mod_base = OTHER; note R-N-(1,3-dimethylimidazolidin-2-ylidene)phosphoramidate
  modified_base 2: mod_base = OTHER; note = 2-fluororibose cytosine
  modified_base 2..3: mod_base = OTHER; note = S-phosphorothioate
  modified_base 3: mod_base = OTHER; note = 2-fluororibose cytosine
  modified_base 3..4: mod_base = OTHER; note = S-phosphorothioate
  modified_base 4: mod_base = OTHER; note = 2-fluororibose adenine
  modified_base 4..5: mod_base = OTHER; note = S-phosphorothioate
  modified_base 5: mod_base = OTHER; note = 2-fluororibose guanine
  modified_base 5..6: mod_base = OTHER; note = S-phosphorothioate
  modified_base 6: mod_base = OTHER; note = 2-fluororibose cytosine
  modified_base 6..7: mod_base = OTHER; note = S-phosphorothioate
  modified_base 7: mod_base = OTHER; note = 2-fluororibose adenine
  modified_base 7..8: mod_base = OTHER; note = S-phosphorothioate
  modified_base 8: mod_base = OTHER; note = 2-fluororibose guanine
  modified_base 8..9: mod_base = OTHER; note = S-phosphorothioate
  modified_base 9: mod_base = OTHER; note = 2-fluororibose cytosine
  modified_base 9..10: mod_base = OTHER; note = S-phosphorothioate
  modified_base 10: mod_base = OTHER; note = 2-fluororibose uracil
  modified_base 10..11: mod_base = OTHER; note = S-phosphorothioate
  modified_base 11: mod_base = OTHER; note = 2-fluororibose uracil
  modified_base 11..12: mod_base = OTHER; note = S-phosphorothioate
  modified_base 12: mod_base = OTHER; note = 2-fluororibose cytosine
  modified_base 12..13: mod_base = OTHER; note = S-phosphorothioate
  modified_base 13: mod_base = OTHER; note = 2-fluororibose adenine
  modified_base 13..14: mod_base = OTHER; note = S-phosphorothioate
  modified_base 14: mod_base = OTHER; note = 2-fluororibose guanine
  modified_base 14..15: mod_base = OTHER; note = S-phosphorothioate
  modified_base 15: mod_base = OTHER; note = 2-fluororibose uracil
  modified_base 15..16: mod_base = OTHER; note = S-phosphorothioate
  modified_base 16: mod_base = cm
  modified_base 16..17: mod_base = OTHER; note = R-phosphorothioate
  modified_base 17: mod_base = cm
  modified_base 17..18: mod_base = OTHER; note = S-phosphorothioate
  modified_base 18: mod_base = cm
  modified_base 18..19: mod_base = OTHER; note = S-phosphorothioate
  modified_base 19: mod_base = um
  modified_base 19..20: mod_base = OTHER; note = S-phosphorothioate
  modified_base 20: mod_base = um
  modified_base 20..21: mod_base = OTHER; note = S-phosphorothioate
  modified_base 21: mod_base = um
  modified_base 21..22: mod_base = OTHER; note = S-phosphorothioate
  modified_base 22: mod_base = cm
  modified_base 22..23: mod_base = OTHER; note = S-phosphorothioate
  modified_base 23: mod_base = OTHER; note = 2-fluororibose uracil
  modified_base 23..24: mod_base = OTHER; note = S-phosphorothioate
  modified_base 24: mod_base = OTHER; note = deoxyribose 6-amino-9-substituted 8,9-dihydro-7H-purin-8-one
  modified_base 24..25: mod_base = OTHER; note = S-phosphorothioate
  modified_base 25: mod_base = OTHER; note = deoxyribose inosine
  modified_base 25..26: mod_base = OTHER; note S-N-(1,3-dimethylimidazolidin-2-ylidene)phosphoramidate
  modified_base 26: mod_base = um
  modified_base 26..27: mod_base = OTHER; note = S-phosphorothioate
  modified_base 27: mod_base = cm
  modified_base 27..28: mod_base = OTHER; note = S-phosphorothioate
  modified_base 28: mod_base = gm
  modified_base 28..29: mod_base = OTHER; note = S-phosphorothioate
  modified_base 29: mod_base = OTHER; note = 2-O-methylribose adenine
  modified_base 29..30: mod_base = OTHER; note R-N-(1,3-dimethylimidazolidin-2-ylidene)phosphoramidate
  modified_base 30: mod_base = um
  source 1..30: mol_type = other RNA

SEQ ID NO: 198 - RNA, 30 nt, synthetic construct; identical to SEQ ID NO: 134
  misc_feature 1..30: note = Synthetic: WV-43070
  misc_feature 1..30: note = Synthetic: ADR-0103550
  modified_base 1: mod_base = OTHER; note = 2-fluororibose cytosine
  modified_base 1..2: mod_base = OTHER; note R-N-(1,3-dimethylimidazolidin-2-ylidene)phosphoramidate
  modified_base 2: mod_base = OTHER; note = 2-fluororibose cytosine
  modified_base 2..3: mod_base = OTHER; note = S-phosphorothioate
  modified_base 3: mod_base = OTHER; note = 2-fluororibose cytosine
  modified_base 3..4: mod_base = OTHER; note = S-phosphorothioate
  modified_base 4: mod_base = OTHER; note = 2-fluororibose adenine
  modified_base 4..5: mod_base = OTHER; note = S-phosphorothioate
  modified_base 5: mod_base = OTHER; note = 2-fluororibose guanine
  modified_base 5..6: mod_base = OTHER; note = S-phosphorothioate
  modified_base 6: mod_base = OTHER; note = 2-fluororibose cytosine
  modified_base 6..7: mod_base = OTHER; note = S-phosphorothioate
  modified_base 7: mod_base = OTHER; note = 2-fluororibose adenine
  modified_base 7..8: mod_base = OTHER; note = S-phosphorothioate
  modified_base 8: mod_base = OTHER; note = 2-fluororibose guanine
  modified_base 8..9: mod_base = OTHER; note = S-phosphorothioate
  modified_base 9: mod_base = OTHER; note = 2-fluororibose cytosine
  modified_base 9..10: mod_base = OTHER; note = S-phosphorothioate
  modified_base 10: mod_base = OTHER; note = 2-fluororibose uracil
  modified_base 10..11: mod_base = OTHER; note = S-phosphorothioate
  modified_base 11: mod_base = OTHER; note = 2-fluororibose uracil
  modified_base 11..12: mod_base = OTHER; note = S-phosphorothioate
  modified_base 12: mod_base = OTHER; note = 2-fluororibose cytosine
  modified_base 12..13: mod_base = OTHER; note = S-phosphorothioate
  modified_base 13: mod_base = OTHER; note = 2-fluororibose adenine
  modified_base 13..14: mod_base = OTHER; note = S-phosphorothioate
  modified_base 14: mod_base = OTHER; note = 2-fluororibose guanine
  modified_base 14..15: mod_base = OTHER; note = S-phosphorothioate
  modified_base 15: mod_base = OTHER; note = 2-fluororibose uracil
  modified_base 15..16: mod_base = OTHER; note = R-phosphorothioate
  modified_base 16: mod_base = cm
  modified_base 16..17: mod_base = OTHER; note = S-phosphorothioate
  modified_base 17: mod_base = cm
  modified_base 17..18: mod_base = OTHER; note = S-phosphorothioate
  modified_base 18: mod_base = cm
  modified_base 18..19: mod_base = OTHER; note = S-phosphorothioate
  modified_base 19: mod_base = um
  modified_base 19..20: mod_base = OTHER; note = S-phosphorothioate
  modified_base 20: mod_base = um
  modified_base 20..21: mod_base = OTHER; note = S-phosphorothioate
  modified_base 21: mod_base = um
  modified_base 21..22: mod_base = OTHER; note = S-phosphorothioate
  modified_base 22: mod_base = cm
  modified_base 22..23: mod_base = OTHER; note = S-phosphorothioate
  modified_base 23: mod_base = OTHER; note = 2-fluororibose uracil
  modified_base 23..24: mod_base = OTHER; note = S-phosphorothioate
  modified_base 24: mod_base = OTHER; note = deoxyribose 6-amino-9-substituted 8,9-dihydro-7H-purin-8-one
  modified_base 24..25: mod_base = OTHER; note = S-phosphorothioate
  modified_base 25: mod_base = OTHER; note = deoxyribose inosine
  modified_base 25..26: mod_base = OTHER; note S-N-(1,3-dimethylimidazolidin-2-ylidene)phosphoramidate
  modified_base 26: mod_base = um
  modified_base 26..27: mod_base = OTHER; note = S-phosphorothioate
  modified_base 27: mod_base = cm
  modified_base 27..28: mod_base = OTHER; note = S-phosphorothioate
  modified_base 28: mod_base = gm
  modified_base 28..29: mod_base = OTHER; note = S-phosphorothioate
  modified_base 29: mod_base = OTHER; note = 2-O-methylribose adenine
  modified_base 29..30: mod_base = OTHER; note R-N-(1,3-dimethylimidazolidin-2-ylidene)phosphoramidate
  modified_base 30: mod_base = um
  source 1..30: mol_type = other RNA

SEQ ID NO: 199 - RNA, 30 nt, synthetic construct; identical to SEQ ID NO: 134
  misc_feature 1..30: note = Synthetic: WV-43069
  misc_feature 1..30: note = Synthetic: ADR-0103548
  modified_base 1: mod_base = OTHER; note = 2-fluororibose cytosine
  modified_base 1..2: mod_base = OTHER; note R-N-(1,3-dimethylimidazolidin-2-ylidene)phosphoramidate
  modified_base 2: mod_base = OTHER; note = 2-fluororibose cytosine
  modified_base 2..3: mod_base = OTHER; note = S-phosphorothioate
  modified_base 3: mod_base = OTHER; note = 2-fluororibose cytosine
  modified_base 3..4: mod_base = OTHER; note = S-phosphorothioate
  modified_base 4: mod_base = OTHER; note = 2-fluororibose adenine
  modified_base 4..5: mod_base = OTHER; note = S-phosphorothioate
  modified_base 5: mod_base = OTHER; note = 2-fluororibose guanine
  modified_base 5..6: mod_base = OTHER; note = S-phosphorothioate
  modified_base 6: mod_base = OTHER; note = 2-fluororibose cytosine
  modified_base 6..7: mod_base = OTHER; note = S-phosphorothioate
  modified_base 7: mod_base = OTHER; note = 2-fluororibose adenine
  modified_base 7..8: mod_base = OTHER; note = S-phosphorothioate
  modified_base 8: mod_base = OTHER; note = 2-fluororibose guanine
  modified_base 8..9: mod_base = OTHER; note = S-phosphorothioate
  modified_base 9: mod_base = OTHER; note = 2-fluororibose cytosine
  modified_base 9..10: mod_base = OTHER; note = S-phosphorothioate
  modified_base 10: mod_base = OTHER; note = 2-fluororibose uracil
  modified_base 10..11: mod_base = OTHER; note = S-phosphorothioate
  modified_base 11: mod_base = OTHER; note = 2-fluororibose uracil
  modified_base 11..12: mod_base = OTHER; note = S-phosphorothioate
  modified_base 12: mod_base = OTHER; note = 2-fluororibose cytosine
  modified_base 12..13: mod_base = OTHER; note = S-phosphorothioate
  modified_base 13: mod_base = OTHER; note = 2-fluororibose adenine
  modified_base 13..14: mod_base = OTHER; note = S-phosphorothioate
  modified_base 14: mod_base = OTHER; note = 2-fluororibose guanine
  modified_base 14..15: mod_base = OTHER; note = R-phosphorothioate
  modified_base 15: mod_base = OTHER; note = 2-fluororibose uracil
  modified_base 15..16: mod_base = OTHER; note = S-phosphorothioate
  modified_base 16: mod_base = cm
  modified_base 16..17: mod_base = OTHER; note = S-phosphorothioate
  modified_base 17: mod_base = cm
  modified_base 17..18: mod_base = OTHER; note = S-phosphorothioate
  modified_base 18: mod_base = cm
  modified_base 18..19: mod_base = OTHER; note = S-phosphorothioate
  modified_base 19: mod_base = um
  modified_base 19..20: mod_base = OTHER; note = S-phosphorothioate
  modified_base 20: mod_base = um
  modified_base 20..21: mod_base = OTHER; note = S-phosphorothioate
  modified_base 21: mod_base = um
  modified_base 21..22: mod_base = OTHER; note = S-phosphorothioate
  modified_base 22: mod_base = cm
  modified_base 22..23: mod_base = OTHER; note = S-phosphorothioate
  modified_base 23: mod_base = OTHER; note = 2-fluororibose uracil
  modified_base 23..24: mod_base = OTHER; note = S-phosphorothioate
  modified_base 24: mod_base = OTHER; note = deoxyribose 6-amino-9-substituted 8,9-dihydro-7H-purin-8-one
  modified_base 24..25: mod_base = OTHER; note = S-phosphorothioate
  modified_base 25: mod_base = OTHER; note = deoxyribose inosine
  modified_base 25..26: mod_base = OTHER; note S-N-(1,3-dimethylimidazolidin-2-ylidene)phosphoramidate
  modified_base 26: mod_base = um
  modified_base 26..27: mod_base = OTHER; note = S-phosphorothioate
  modified_base 27: mod_base = cm
  modified_base 27..28: mod_base = OTHER; note = S-phosphorothioate
  modified_base 28: mod_base = gm
  modified_base 28..29: mod_base = OTHER; note = S-phosphorothioate
  modified_base 29: mod_base = OTHER; note = 2-O-methylribose adenine
  modified_base 29..30: mod_base = OTHER; note R-N-(1,3-dimethylimidazolidin-2-ylidene)phosphoramidate
  modified_base 30: mod_base = um
  source 1..30: mol_type = other RNA

SEQ ID NO: 200 - RNA, 30 nt, synthetic construct; identical to SEQ ID NO: 134
  misc_feature 1..30: note = Synthetic: WV-43068
  misc_feature 1..30: note = Synthetic: ADR-0103546
  modified_base 1: mod_base = OTHER; note = 2-fluororibose cytosine
  modified_base 1..2: mod_base = OTHER; note R-N-(1,3-dimethylimidazolidin-2-ylidene)phosphoramidate
  modified_base 2: mod_base = OTHER; note = 2-fluororibose cytosine
  modified_base 2..3: mod_base = OTHER; note = S-phosphorothioate
  modified_base 3: mod_base = OTHER; note = 2-fluororibose cytosine
  modified_base 3..4: mod_base = OTHER; note = S-phosphorothioate
  modified_base 4: mod_base = OTHER; note = 2-fluororibose adenine
  modified_base 4..5: mod_base = OTHER; note = S-phosphorothioate
  modified_base 5: mod_base = OTHER; note = 2-fluororibose guanine
  modified_base 5..6: mod_base = OTHER; note = S-phosphorothioate
  modified_base 6: mod_base = OTHER; note = 2-fluororibose cytosine
  modified_base 6..7: mod_base = OTHER; note = S-phosphorothioate
  modified_base 7: mod_base = OTHER; note = 2-fluororibose adenine
  modified_base 7..8: mod_base = OTHER; note = S-phosphorothioate
  modified_base 8: mod_base = OTHER; note = 2-fluororibose guanine
  modified_base 8..9: mod_base = OTHER; note = S-phosphorothioate
  modified_base 9: mod_base = OTHER; note = 2-fluororibose cytosine
  modified_base 9..10: mod_base = OTHER; note = S-phosphorothioate
  modified_base 10: mod_base = OTHER; note = 2-fluororibose uracil
  modified_base 10..11: mod_base = OTHER; note = S-phosphorothioate
  modified_base 11: mod_base = OTHER; note = 2-fluororibose uracil
  modified_base 11..12: mod_base = OTHER; note = S-phosphorothioate
  modified_base 12: mod_base = OTHER; note = 2-fluororibose cytosine
  modified_base 12..13: mod_base = OTHER; note = S-phosphorothioate
  modified_base 13: mod_base = OTHER; note = 2-fluororibose adenine
  modified_base 13..14: mod_base = OTHER; note = R-phosphorothioate
  modified_base 14: mod_base = OTHER; note = 2-fluororibose guanine
  modified_base 14..15: mod_base = OTHER; note = S-phosphorothioate
  modified_base 15: mod_base = OTHER; note = 2-fluororibose uracil
  modified_base 15..16: mod_base = OTHER; note = S-phosphorothioate
  modified_base 16: mod_base = cm
  modified_base 16..17: mod_base = OTHER; note = S-phosphorothioate
  modified_base 17: mod_base = cm
  modified_base 17..18: mod_base = OTHER; note = S-phosphorothioate
  modified_base 18: mod_base = cm
  modified_base 18..19: mod_base = OTHER; note = S-phosphorothioate
  modified_base 19: mod_base = um
  modified_base 19..20: mod_base = OTHER; note = S-phosphorothioate
  modified_base 20: mod_base = um
  modified_base 20..21: mod_base = OTHER; note = S-phosphorothioate
  modified_base 21: mod_base = um
  modified_base 21..22: mod_base = OTHER; note = S-phosphorothioate
  modified_base 22: mod_base = cm
  modified_base 22..23: mod_base = OTHER; note = S-phosphorothioate
  modified_base 23: mod_base = OTHER; note = 2-fluororibose uracil
  modified_base 23..24: mod_base = OTHER; note = S-phosphorothioate
  modified_base 24: mod_base = OTHER; note = deoxyribose 6-amino-9-substituted 8,9-dihydro-7H-purin-8-one
  modified_base 24..25: mod_base = OTHER; note = S-phosphorothioate
  modified_base 25: mod_base = OTHER; note = deoxyribose inosine
  modified_base 25..26: mod_base = OTHER; note S-N-(1,3-dimethylimidazolidin-2-ylidene)phosphoramidate
  modified_base 26: mod_base = um
  modified_base 26..27: mod_base = OTHER; note = S-phosphorothioate
  modified_base 27: mod_base = cm
  modified_base 27..28: mod_base = OTHER; note = S-phosphorothioate
  modified_base 28: mod_base = gm
  modified_base 28..29: mod_base = OTHER; note = S-phosphorothioate
  modified_base 29: mod_base = OTHER; note = 2-O-methylribose adenine
  modified_base 29..30: mod_base = OTHER; note R-N-(1,3-dimethylimidazolidin-2-ylidene)phosphoramidate
  modified_base 30: mod_base = um
  source 1..30: mol_type = other RNA

SEQ ID NO: 201 - RNA, 30 nt, synthetic construct; identical to SEQ ID NO: 134
  misc_feature 1..30: note = Synthetic: WV-43067
  misc_feature 1..30: note = Synthetic: ADR-0103544
  modified_base 1: mod_base = OTHER; note = 2-fluororibose cytosine
  modified_base 1..2: mod_base = OTHER; note R-N-(1,3-dimethylimidazolidin-2-ylidene)phosphoramidate
  modified_base 2: mod_base = OTHER; note = 2-fluororibose cytosine
  modified_base 2..3: mod_base = OTHER; note = S-phosphorothioate
  modified_base 3: mod_base = OTHER; note = 2-fluororibose cytosine
  modified_base 3..4: mod_base = OTHER; note = S-phosphorothioate
  modified_base 4: mod_base = OTHER; note = 2-fluororibose adenine
  modified_base 4..5: mod_base = OTHER; note = S-phosphorothioate
  modified_base 5: mod_base = OTHER; note = 2-fluororibose guanine
  modified_base 5..6: mod_base = OTHER; note = S-phosphorothioate
  modified_base 6: mod_base = OTHER; note = 2-fluororibose cytosine
  modified_base 6..7: mod_base = OTHER; note = S-phosphorothioate
  modified_base 7: mod_base = OTHER; note = 2-fluororibose adenine
  modified_base 7..8: mod_base = OTHER; note = S-phosphorothioate
  modified_base 8: mod_base = OTHER; note = 2-fluororibose guanine
  modified_base 8..9: mod_base = OTHER; note = S-phosphorothioate
  modified_base 9: mod_base = OTHER; note = 2-fluororibose cytosine
  modified_base 9..10: mod_base = OTHER; note = S-phosphorothioate
  modified_base 10: mod_base = OTHER; note = 2-fluororibose uracil
  modified_base 10..11: mod_base = OTHER; note = S-phosphorothioate
  modified_base 11: mod_base = OTHER; note = 2-fluororibose uracil
  modified_base 11..12: mod_base = OTHER; note = S-phosphorothioate
  modified_base 12: mod_base = OTHER; note = 2-fluororibose cytosine
  modified_base 12..13: mod_base = OTHER; note = R-phosphorothioate
  modified_base 13: mod_base = OTHER; note = 2-fluororibose adenine
  modified_base 13..14: mod_base = OTHER; note = S-phosphorothioate
  modified_base 14: mod_base = OTHER; note = 2-fluororibose guanine
  modified_base 14..15: mod_base = OTHER; note = S-phosphorothioate
  modified_base 15: mod_base = OTHER; note = 2-fluororibose uracil
  modified_base 15..16: mod_base = OTHER; note = S-phosphorothioate
  modified_base 16: mod_base = cm
  modified_base 16..17: mod_base = OTHER; note = S-phosphorothioate
  modified_base 17: mod_base = cm
  modified_base 17..18: mod_base = OTHER; note = S-phosphorothioate
  modified_base 18: mod_base = cm
  modified_base 18..19: mod_base = OTHER; note = S-phosphorothioate
  modified_base 19: mod_base = um
  modified_base 19..20: mod_base = OTHER; note = S-phosphorothioate
  modified_base 20: mod_base = um
  modified_base 20..21: mod_base = OTHER; note = S-phosphorothioate
  modified_base 21: mod_base = um
  modified_base 21..22: mod_base = OTHER; note = S-phosphorothioate
  modified_base 22: mod_base = cm
  modified_base 22..23: mod_base = OTHER; note = S-phosphorothioate
  modified_base 23: mod_base = OTHER; note = 2-fluororibose uracil
  modified_base 23..24: mod_base = OTHER; note = S-phosphorothioate
  modified_base 24: mod_base = OTHER; note = deoxyribose 6-amino-9-substituted 8,9-dihydro-7H-purin-8-one
  modified_base 24..25: mod_base = OTHER; note = S-phosphorothioate
  modified_base 25: mod_base = OTHER; note = deoxyribose inosine
  modified_base 25..26: mod_base = OTHER; note S-N-(1,3-dimethylimidazolidin-2-ylidene)phosphoramidate
  modified_base 26: mod_base = um
  modified_base 26..27: mod_base = OTHER; note = S-phosphorothioate
  modified_base 27: mod_base = cm
  modified_base 27..28: mod_base = OTHER; note = S-phosphorothioate
  modified_base 28: mod_base = gm
  modified_base 28..29: mod_base = OTHER; note = S-phosphorothioate
  modified_base 29: mod_base = OTHER; note = 2-O-methylribose adenine
  modified_base 29..30: mod_base = OTHER; note R-N-(1,3-dimethylimidazolidin-2-ylidene)phosphoramidate
  modified_base 30: mod_base = um
  source 1..30: mol_type = other RNA

SEQ ID NO: 202 - RNA, 30 nt, synthetic construct; identical to SEQ ID NO: 134
  misc_feature 1..30: note = Synthetic: WV-43066
  misc_feature 1..30: note = Synthetic: ADR-0103542
  modified_base 1: mod_base = OTHER; note = 2-fluororibose cytosine
  modified_base 1..2: mod_base = OTHER; note R-N-(1,3-dimethylimidazolidin-2-ylidene)phosphoramidate
  modified_base 2: mod_base = OTHER; note = 2-fluororibose cytosine
  modified_base 2..3: mod_base = OTHER; note = S-phosphorothioate
  modified_base 3: mod_base = OTHER; note = 2-fluororibose cytosine
  modified_base 3..4: mod_base = OTHER; note = S-phosphorothioate
  modified_base 4: mod_base = OTHER; note = 2-fluororibose adenine
  modified_base 4..5: mod_base = OTHER; note = S-phosphorothioate
  modified_base 5: mod_base = OTHER; note = 2-fluororibose guanine
  modified_base 5..6: mod_base = OTHER; note = S-phosphorothioate
  modified_base 6: mod_base = OTHER; note = 2-fluororibose cytosine
  modified_base 6..7: mod_base = OTHER; note = S-phosphorothioate
  modified_base 7: mod_base = OTHER; note = 2-fluororibose adenine
  modified_base 7..8: mod_base = OTHER; note = S-phosphorothioate
  modified_base 8: mod_base = OTHER; note = 2-fluororibose guanine
  modified_base 8..9: mod_base = OTHER; note = S-phosphorothioate
  modified_base 9: mod_base = OTHER; note = 2-fluororibose cytosine
  modified_base 9..10: mod_base = OTHER; note = S-phosphorothioate
  modified_base 10: mod_base = OTHER; note = 2-fluororibose uracil
  modified_base 10..11: mod_base = OTHER; note = S-phosphorothioate
  modified_base 11: mod_base = OTHER; note = 2-fluororibose uracil
  modified_base 11..12: mod_base = OTHER; note = R-phosphorothioate
  modified_base 12: mod_base = OTHER; note = 2-fluororibose cytosine
  modified_base 12..13: mod_base = OTHER; note = S-phosphorothioate
  modified_base 13: mod_base = OTHER; note = 2-fluororibose adenine
  modified_base 13..14: mod_base = OTHER; note = S-phosphorothioate
  modified_base 14: mod_base = OTHER; note = 2-fluororibose guanine
  modified_base 14..15: mod_base = OTHER; note = S-phosphorothioate
  modified_base 15: mod_base = OTHER; note = 2-fluororibose uracil
  modified_base 15..16: mod_base = OTHER; note = S-phosphorothioate
  modified_base 16: mod_base = cm
  modified_base 16..17: mod_base = OTHER; note = S-phosphorothioate
  modified_base 17: mod_base = cm
  modified_base 17..18: mod_base = OTHER; note = S-phosphorothioate
  modified_base 18: mod_base = cm
  modified_base 18..19: mod_base = OTHER; note = S-phosphorothioate
  modified_base 19: mod_base = um
  modified_base 19..20: mod_base = OTHER; note = S-phosphorothioate
  modified_base 20: mod_base = um
  modified_base 20..21: mod_base = OTHER; note = S-phosphorothioate
  modified_base 21: mod_base = um
  modified_base 21..22: mod_base = OTHER; note = S-phosphorothioate
  modified_base 22: mod_base = cm
  modified_base 22..23: mod_base = OTHER; note = S-phosphorothioate
  modified_base 23: mod_base = OTHER; note = 2-fluororibose uracil
  modified_base 23..24: mod_base = OTHER; note = S-phosphorothioate
  modified_base 24: mod_base = OTHER; note = deoxyribose 6-amino-9-substituted 8,9-dihydro-7H-purin-8-one
  modified_base 24..25: mod_base = OTHER; note = S-phosphorothioate
  modified_base 25: mod_base = OTHER; note = deoxyribose inosine
  modified_base 25..26: mod_base = OTHER; note S-N-(1,3-dimethylimidazolidin-2-ylidene)phosphoramidate
  modified_base 26: mod_base = um
  modified_base 26..27: mod_base = OTHER; note = S-phosphorothioate
  modified_base 27: mod_base = cm
  modified_base 27..28: mod_base = OTHER; note = S-phosphorothioate
  modified_base 28: mod_base = gm
  modified_base 28..29: mod_base = OTHER; note = S-phosphorothioate
  modified_base 29: mod_base = OTHER; note = 2-O-methylribose adenine
  modified_base 29..30: mod_base = OTHER; note R-N-(1,3-dimethylimidazolidin-2-ylidene)phosphoramidate
  modified_base 30: mod_base = um
  source 1..30: mol_type = other RNA

SEQ ID NO: 203 - RNA, 30 nt, synthetic construct; identical to SEQ ID NO: 134
  misc_feature 1..30: note = Synthetic: WV-43065
  misc_feature 1..30: note = Synthetic: ADR-0103540
  modified_base 1: mod_base = OTHER; note = 2-fluororibose cytosine
  modified_base 1..2: mod_base = OTHER; note R-N-(1,3-dimethylimidazolidin-2-ylidene)phosphoramidate
  modified_base 2: mod_base = OTHER; note = 2-fluororibose cytosine
  modified_base 2..3: mod_base = OTHER; note = S-phosphorothioate
  modified_base 3: mod_base = OTHER; note = 2-fluororibose cytosine
  modified_base 3..4: mod_base = OTHER; note = S-phosphorothioate
  modified_base 4: mod_base = OTHER; note = 2-fluororibose adenine
  modified_base 4..5: mod_base = OTHER; note = S-phosphorothioate
  modified_base 5: mod_base = OTHER; note = 2-fluororibose guanine
  modified_base 5..6: mod_base = OTHER; note = S-phosphorothioate
  modified_base 6: mod_base = OTHER; note = 2-fluororibose cytosine
  modified_base 6..7: mod_base = OTHER; note = S-phosphorothioate
  modified_base 7: mod_base = OTHER; note = 2-fluororibose adenine
  modified_base 7..8: mod_base = OTHER; note = S-phosphorothioate
  modified_base 8: mod_base = OTHER; note = 2-fluororibose guanine
  modified_base 8..9: mod_base = OTHER; note = S-phosphorothioate
  modified_base 9: mod_base = OTHER; note = 2-fluororibose cytosine
  modified_base 9..10: mod_base = OTHER; note = S-phosphorothioate
  modified_base 10: mod_base = OTHER; note = 2-fluororibose uracil
  modified_base 10..11: mod_base = OTHER; note = R-phosphorothioate
  modified_base 11: mod_base = OTHER; note = 2-fluororibose uracil
  modified_base 11..12: mod_base = OTHER; note = S-phosphorothioate
  modified_base 12: mod_base = OTHER; note = 2-fluororibose cytosine
  modified_base 12..13: mod_base = OTHER; note = S-phosphorothioate
  modified_base 13: mod_base = OTHER; note = 2-fluororibose adenine
  modified_base 13..14: mod_base = OTHER; note = S-phosphorothioate
  modified_base 14: mod_base = OTHER; note = 2-fluororibose guanine
  modified_base 14..15: mod_base = OTHER; note = S-phosphorothioate
  modified_base 15: mod_base = OTHER; note = 2-fluororibose uracil
  modified_base 15..16: mod_base = OTHER; note = S-phosphorothioate
  modified_base 16: mod_base = cm
  modified_base 16..17: mod_base = OTHER; note = S-phosphorothioate
  modified_base 17: mod_base = cm
  modified_base 17..18: mod_base = OTHER; note = S-phosphorothioate
  modified_base 18: mod_base = cm
  modified_base 18..19: mod_base = OTHER; note = S-phosphorothioate
  modified_base 19: mod_base = um
  modified_base 19..20: mod_base = OTHER; note = S-phosphorothioate
  modified_base 20: mod_base = um
  modified_base 20..21: mod_base = OTHER; note = S-phosphorothioate
  modified_base 21: mod_base = um
  modified_base 21..22: mod_base = OTHER; note = S-phosphorothioate
  modified_base 22: mod_base = cm
  modified_base 22..23: mod_base = OTHER; note = S-phosphorothioate
  modified_base 23: mod_base = OTHER; note = 2-fluororibose uracil
  modified_base 23..24: mod_base = OTHER; note = S-phosphorothioate
  modified_base 24: mod_base = OTHER; note = deoxyribose 6-amino-9-substituted 8,9-dihydro-7H-purin-8-one
  modified_base 24..25: mod_base = OTHER; note = S-phosphorothioate
  modified_base 25: mod_base = OTHER; note = deoxyribose inosine
  modified_base 25..26: mod_base = OTHER; note S-N-(1,3-dimethylimidazolidin-2-ylidene)phosphoramidate
  modified_base 26: mod_base = um
  modified_base 26..27: mod_base = OTHER; note = S-phosphorothioate
  modified_base 27: mod_base = cm
  modified_base 27..28: mod_base = OTHER; note = S-phosphorothioate
  modified_base 28: mod_base = gm
  modified_base 28..29: mod_base = OTHER; note = S-phosphorothioate
  modified_base 29: mod_base = OTHER; note = 2-O-methylribose adenine
  modified_base 29..30: mod_base = OTHER; note R-N-(1,3-dimethylimidazolidin-2-ylidene)phosphoramidate
  modified_base 30: mod_base = um
  source 1..30: mol_type = other RNA

SEQ ID NO: 204 - RNA, 30 nt, synthetic construct; identical to SEQ ID NO: 134
  misc_feature 1..30: note = Synthetic: WV-43064
  misc_feature 1..30: note = Synthetic: ADR-0103538
  modified_base 1: mod_base = OTHER; note = 2-fluororibose cytosine
  modified_base 1..2: mod_base = OTHER; note R-N-(1,3-dimethylimidazolidin-2-ylidene)phosphoramidate
  modified_base 2: mod_base = OTHER; note = 2-fluororibose cytosine
  modified_base 2..3: mod_base = OTHER; note = S-phosphorothioate
  modified_base 3: mod_base = OTHER; note = 2-fluororibose cytosine
  modified_base 3..4: mod_base = OTHER; note = S-phosphorothioate
  modified_base 4: mod_base = OTHER; note = 2-fluororibose adenine
  modified_base 4..5: mod_base = OTHER; note = S-phosphorothioate
  modified_base 5: mod_base = OTHER; note = 2-fluororibose guanine
  modified_base 5..6: mod_base = OTHER; note = S-phosphorothioate
  modified_base 6: mod_base = OTHER; note = 2-fluororibose cytosine
  modified_base 6..7: mod_base = OTHER; note = S-phosphorothioate
  modified_base 7: mod_base = OTHER; note = 2-fluororibose adenine
  modified_base 7..8: mod_base = OTHER; note = S-phosphorothioate
  modified_base 8: mod_base = OTHER; note = 2-fluororibose guanine
  modified_base 8..9: mod_base = OTHER; note = S-phosphorothioate
  modified_base 9: mod_base = OTHER; note = 2-fluororibose cytosine
  modified_base 9..10: mod_base = OTHER; note = R-phosphorothioate
  modified_base 10: mod_base = OTHER; note = 2-fluororibose uracil
  modified_base 10..11: mod_base = OTHER; note = S-phosphorothioate
  modified_base 11: mod_base = OTHER; note = 2-fluororibose uracil
  modified_base 11..12: mod_base = OTHER; note = S-phosphorothioate
  modified_base 12: mod_base = OTHER; note = 2-fluororibose cytosine
  modified_base 12..13: mod_base = OTHER; note = S-phosphorothioate
  modified_base 13: mod_base = OTHER; note = 2-fluororibose adenine
  modified_base 13..14: mod_base = OTHER; note = S-phosphorothioate
  modified_base 14: mod_base = OTHER; note = 2-fluororibose guanine
  modified_base 14..15: mod_base = OTHER; note = S-phosphorothioate
  modified_base 15: mod_base = OTHER; note = 2-fluororibose uracil
  modified_base 15..16: mod_base = OTHER; note = S-phosphorothioate
  modified_base 16: mod_base = cm
  modified_base 16..17: mod_base = OTHER; note = S-phosphorothioate
  modified_base 17: mod_base = cm
  modified_base 17..18: mod_base = OTHER; note = S-phosphorothioate
  modified_base 18: mod_base = cm
  modified_base 18..19: mod_base = OTHER; note = S-phosphorothioate
  modified_base 19: mod_base = um
  modified_base 19..20: mod_base = OTHER; note = S-phosphorothioate
  modified_base 20: mod_base = um
  modified_base 20..21: mod_base = OTHER; note = S-phosphorothioate
  modified_base 21: mod_base = um
  modified_base 21..22: mod_base = OTHER; note = S-phosphorothioate
  modified_base 22: mod_base = cm
  modified_base 22..23: mod_base = OTHER; note = S-phosphorothioate
  modified_base 23: mod_base = OTHER; note = 2-fluororibose uracil
  modified_base 23..24: mod_base = OTHER; note = S-phosphorothioate
  modified_base 24: mod_base = OTHER; note = deoxyribose 6-amino-9-substituted 8,9-dihydro-7H-purin-8-one
  modified_base 24..25: mod_base = OTHER; note = S-phosphorothioate
  modified_base 25: mod_base = OTHER; note = deoxyribose inosine
  modified_base 25..26: mod_base = OTHER; note S-N-(1,3-dimethylimidazolidin-2-ylidene)phosphoramidate
  modified_base 26: mod_base = um
  modified_base 26..27: mod_base = OTHER; note = S-phosphorothioate
  modified_base 27: mod_base = cm
  modified_base 27..28: mod_base = OTHER; note = S-phosphorothioate
  modified_base 28: mod_base = gm
  modified_base 28..29: mod_base = OTHER; note = S-phosphorothioate
  modified_base 29: mod_base = OTHER; note = 2-O-methylribose adenine
  modified_base 29..30: mod_base = OTHER; note R-N-(1,3-dimethylimidazolidin-2-ylidene)phosphoramidate
  modified_base 30: mod_base = um
  source 1..30: mol_type = other RNA

SEQ ID NO: 205 - RNA, 30 nt, synthetic construct; identical to SEQ ID NO: 134
  misc_feature 1..30: note = Synthetic: WV-43063
  misc_feature 1..30: note = Synthetic: ADR-0103536
  modified_base 1: mod_base = OTHER; note = 2-fluororibose cytosine
  modified_base 1..2: mod_base = OTHER; note R-N-(1,3-dimethylimidazolidin-2-ylidene)phosphoramidate
  modified_base 2: mod_base = OTHER; note = 2-fluororibose cytosine
  modified_base 2..3: mod_base = OTHER; note = S-phosphorothioate
  modified_base 3: mod_base = OTHER; note = 2-fluororibose cytosine
  modified_base 3..4: mod_base = OTHER; note = S-phosphorothioate
  modified_base 4: mod_base = OTHER; note = 2-fluororibose adenine
  modified_base 4..5: mod_base = OTHER; note = S-phosphorothioate
  modified_base 5: mod_base = OTHER; note = 2-fluororibose guanine
  modified_base 5..6: mod_base = OTHER; note = S-phosphorothioate
  modified_base 6: mod_base = OTHER; note = 2-fluororibose cytosine
  modified_base 6..7: mod_base = OTHER; note = S-phosphorothioate
  modified_base 7: mod_base = OTHER; note = 2-fluororibose adenine
  modified_base 7..8: mod_base = OTHER; note = S-phosphorothioate
  modified_base 8: mod_base = OTHER; note = 2-fluororibose guanine
  modified_base 8..9: mod_base = OTHER; note = R-phosphorothioate
  modified_base 9: mod_base = OTHER; note = 2-fluororibose cytosine
  modified_base 9..10: mod_base = OTHER; note = S-phosphorothioate
  modified_base 10: mod_base = OTHER; note = 2-fluororibose uracil
  modified_base 10..11: mod_base = OTHER; note = S-phosphorothioate
  modified_base 11: mod_base = OTHER; note = 2-fluororibose uracil
  modified_base 11..12: mod_base = OTHER; note = S-phosphorothioate
  modified_base 12: mod_base = OTHER; note = 2-fluororibose cytosine
  modified_base 12..13: mod_base = OTHER; note = S-phosphorothioate
  modified_base 13: mod_base = OTHER; note = 2-fluororibose adenine
  modified_base 13..14: mod_base = OTHER; note = S-phosphorothioate
  modified_base 14: mod_base = OTHER; note = 2-fluororibose guanine
  modified_base 14..15: mod_base = OTHER; note = S-phosphorothioate
  modified_base 15: mod_base = OTHER; note = 2-fluororibose uracil
  modified_base 15..16: mod_base = OTHER; note = S-phosphorothioate
  modified_base 16: mod_base = cm
  modified_base 16..17: mod_base = OTHER; note = S-phosphorothioate
  modified_base 17: mod_base = cm
  modified_base 17..18: mod_base = OTHER; note = S-phosphorothioate
  modified_base 18: mod_base = cm
  modified_base 18..19: mod_base = OTHER; note = S-phosphorothioate
  modified_base 19: mod_base = um
  modified_base 19..20: mod_base = OTHER; note = S-phosphorothioate
  modified_base 20: mod_base = um
  modified_base 20..21: mod_base = OTHER; note = S-phosphorothioate
  modified_base 21: mod_base = um
  modified_base 21..22: mod_base = OTHER; note = S-phosphorothioate
  modified_base 22: mod_base = cm
  modified_base 22..23: mod_base = OTHER; note = S-phosphorothioate
  modified_base 23: mod_base = OTHER; note = 2-fluororibose uracil
  modified_base 23..24: mod_base = OTHER; note = S-phosphorothioate
  modified_base 24: mod_base = OTHER; note = deoxyribose 6-amino-9-substituted 8,9-dihydro-7H-purin-8-one
  modified_base 24..25: mod_base = OTHER; note = S-phosphorothioate
  modified_base 25: mod_base = OTHER; note = deoxyribose inosine
  modified_base 25..26: mod_base = OTHER; note S-N-(1,3-dimethylimidazolidin-2-ylidene)phosphoramidate
  modified_base 26: mod_base = um
  modified_base 26..27: mod_base = OTHER; note = S-phosphorothioate
  modified_base 27: mod_base = cm
  modified_base 27..28: mod_base = OTHER; note = S-phosphorothioate
  modified_base 28: mod_base = gm
  modified_base 28..29: mod_base = OTHER; note = S-phosphorothioate
  modified_base 29: mod_base = OTHER; note = 2-O-methylribose adenine
  modified_base 29..30: mod_base = OTHER; note R-N-(1,3-dimethylimidazolidin-2-ylidene)phosphoramidate
  modified_base 30: mod_base = um
  source 1..30: mol_type = other RNA

SEQ ID NO: 206 - RNA, 30 nt, synthetic construct; identical to SEQ ID NO: 134
  misc_feature 1..30: note = Synthetic: WV-43062
  misc_feature 1..30: note = Synthetic: ADR-0103534
  modified_base 1: mod_base = OTHER; note = 2-fluororibose cytosine
  modified_base 1..2: mod_base = OTHER; note R-N-(1,3-dimethylimidazolidin-2-ylidene)phosphoramidate
  modified_base 2: mod_base = OTHER; note = 2-fluororibose cytosine
  modified_base 2..3: mod_base = OTHER; note = S-phosphorothioate
  modified_base 3: mod_base = OTHER; note = 2-fluororibose cytosine
  modified_base 3..4: mod_base = OTHER; note = S-phosphorothioate
  modified_base 4: mod_base = OTHER; note = 2-fluororibose adenine
  modified_base 4..5: mod_base = OTHER; note = S-phosphorothioate
  modified_base 5: mod_base = OTHER; note = 2-fluororibose guanine
  modified_base 5..6: mod_base = OTHER; note = S-phosphorothioate
  modified_base 6: mod_base = OTHER; note = 2-fluororibose cytosine
  modified_base 6..7: mod_base = OTHER; note = S-phosphorothioate
  modified_base 7: mod_base = OTHER; note = 2-fluororibose adenine
  modified_base 7..8: mod_base = OTHER; note = R-phosphorothioate
  modified_base 8: mod_base = OTHER; note = 2-fluororibose guanine
  modified_base 8..9: mod_base = OTHER; note = S-phosphorothioate
  modified_base 9: mod_base = OTHER; note = 2-fluororibose cytosine
  modified_base 9..10: mod_base = OTHER; note = S-phosphorothioate
  modified_base 10: mod_base = OTHER; note = 2-fluororibose uracil
  modified_base 10..11: mod_base = OTHER; note = S-phosphorothioate
  modified_base 11: mod_base = OTHER; note = 2-fluororibose uracil
  modified_base 11..12: mod_base = OTHER; note = S-phosphorothioate
  modified_base 12: mod_base = OTHER; note = 2-fluororibose cytosine
  modified_base 12..13: mod_base = OTHER; note = S-phosphorothioate
  modified_base 13: mod_base = OTHER; note = 2-fluororibose adenine
  modified_base 13..14: mod_base = OTHER; note = S-phosphorothioate
  modified_base 14: mod_base = OTHER; note = 2-fluororibose guanine
  modified_base 14..15: mod_base = OTHER; note = S-phosphorothioate
  modified_base 15: mod_base = OTHER; note = 2-fluororibose uracil
  modified_base 15..16: mod_base = OTHER; note = S-phosphorothioate
  modified_base 16: mod_base = cm
  modified_base 16..17: mod_base = OTHER; note = S-phosphorothioate
  modified_base 17: mod_base = cm
  modified_base 17..18: mod_base = OTHER; note = S-phosphorothioate
  modified_base 18: mod_base = cm
  modified_base 18..19: mod_base = OTHER; note = S-phosphorothioate
  modified_base 19: mod_base = um
  modified_base 19..20: mod_base = OTHER; note = S-phosphorothioate
  modified_base 20: mod_base = um
  modified_base 20..21: mod_base = OTHER; note = S-phosphorothioate
  modified_base 21: mod_base = um
  modified_base 21..22: mod_base = OTHER; note = S-phosphorothioate
  modified_base 22: mod_base = cm
  modified_base 22..23: mod_base = OTHER; note = S-phosphorothioate
  modified_base 23: mod_base = OTHER; note = 2-fluororibose uracil
  modified_base 23..24: mod_base = OTHER; note = S-phosphorothioate
  modified_base 24: mod_base = OTHER; note = deoxyribose 6-amino-9-substituted 8,9-dihydro-7H-purin-8-one
  modified_base 24..25: mod_base = OTHER; note = S-phosphorothioate
  modified_base 25: mod_base = OTHER; note = deoxyribose inosine
  modified_base 25..26: mod_base = OTHER; note S-N-(1,3-dimethylimidazolidin-2-ylidene)phosphoramidate
  modified_base 26: mod_base = um
  modified_base 26..27: mod_base = OTHER; note = S-phosphorothioate
  modified_base 27: mod_base = cm
  modified_base 27..28: mod_base = OTHER; note = S-phosphorothioate
  modified_base 28: mod_base = gm
  modified_base 28..29: mod_base = OTHER; note = S-phosphorothioate
  modified_base 29: mod_base = OTHER; note = 2-O-methylribose adenine
  modified_base 29..30: mod_base = OTHER; note R-N-(1,3-dimethylimidazolidin-2-ylidene)phosphoramidate
  modified_base 30: mod_base = um
  source 1..30: mol_type = other RNA

SEQ ID NO: 207 - RNA, 30 nt, synthetic construct; identical to SEQ ID NO: 134
  misc_feature 1..30: note = Synthetic: WV-43061
  misc_feature 1..30: note = Synthetic: ADR-0103532
  modified_base 1: mod_base = OTHER; note = 2-fluororibose cytosine
  modified_base 1..2: mod_base = OTHER; note R-N-(1,3-dimethylimidazolidin-2-ylidene)phosphoramidate
  modified_base 2: mod_base = OTHER; note = 2-fluororibose cytosine
  modified_base 2..3: mod_base = OTHER; note = S-phosphorothioate
  modified_base 3: mod_base = OTHER; note = 2-fluororibose cytosine
  modified_base 3..4: mod_base = OTHER; note = S-phosphorothioate
  modified_base 4: mod_base = OTHER; note = 2-fluororibose adenine
  modified_base 4..5: mod_base = OTHER; note = S-phosphorothioate
  modified_base 5: mod_base = OTHER; note = 2-fluororibose guanine
  modified_base 5..6: mod_base = OTHER; note = S-phosphorothioate
  modified_base 6: mod_base = OTHER; note = 2-fluororibose cytosine
  modified_base 6..7: mod_base = OTHER; note = R-phosphorothioate
  modified_base 7: mod_base = OTHER; note = 2-fluororibose adenine
  modified_base 7..8: mod_base = OTHER; note = S-phosphorothioate
  modified_base 8: mod_base = OTHER; note = 2-fluororibose guanine
  modified_base 8..9: mod_base = OTHER; note = S-phosphorothioate
  modified_base 9: mod_base = OTHER; note = 2-fluororibose cytosine
  modified_base 9..10: mod_base = OTHER; note = S-phosphorothioate
  modified_base 10: mod_base = OTHER; note = 2-fluororibose uracil
  modified_base 10..11: mod_base = OTHER; note = S-phosphorothioate
  modified_base 11: mod_base = OTHER; note = 2-fluororibose uracil
  modified_base 11..12: mod_base = OTHER; note = S-phosphorothioate
  modified_base 12: mod_base = OTHER; note = 2-fluororibose cytosine
  modified_base 12..13: mod_base = OTHER; note = S-phosphorothioate
  modified_base 13: mod_base = OTHER; note = 2-fluororibose adenine
  modified_base 13..14: mod_base = OTHER; note = S-phosphorothioate
  modified_base 14: mod_base = OTHER; note = 2-fluororibose guanine
  modified_base 14..15: mod_base = OTHER; note = S-phosphorothioate
  modified_base 15: mod_base = OTHER; note = 2-fluororibose uracil
  modified_base 15..16: mod_base = OTHER; note = S-phosphorothioate
  modified_base 16: mod_base = cm
  modified_base 16..17: mod_base = OTHER; note = S-phosphorothioate
  modified_base 17: mod_base = cm
  modified_base 17..18: mod_base = OTHER; note = S-phosphorothioate
  modified_base 18: mod_base = cm
  modified_base 18..19: mod_base = OTHER; note = S-phosphorothioate
  modified_base 19: mod_base = um
  modified_base 19..20: mod_base = OTHER; note = S-phosphorothioate
  modified_base 20: mod_base = um
  modified_base 20..21: mod_base = OTHER; note = S-phosphorothioate
  modified_base 21: mod_base = um
  modified_base 21..22: mod_base = OTHER; note = S-phosphorothioate
  modified_base 22: mod_base = cm
  modified_base 22..23: mod_base = OTHER; note = S-phosphorothioate
  modified_base 23: mod_base = OTHER; note = 2-fluororibose uracil
  modified_base 23..24: mod_base = OTHER; note = S-phosphorothioate
  modified_base 24: mod_base = OTHER; note = deoxyribose 6-amino-9-substituted 8,9-dihydro-7H-purin-8-one
  modified_base 24..25: mod_base = OTHER; note = S-phosphorothioate
  modified_base 25: mod_base = OTHER; note = deoxyribose inosine
  modified_base 25..26: mod_base = OTHER; note S-N-(1,3-dimethylimidazolidin-2-ylidene)phosphoramidate
  modified_base 26: mod_base = um
  modified_base 26..27: mod_base = OTHER; note = S-phosphorothioate
  modified_base 27: mod_base = cm
  modified_base 27..28: mod_base = OTHER; note = S-phosphorothioate
  modified_base 28: mod_base = gm
  modified_base 28..29: mod_base = OTHER; note = S-phosphorothioate
  modified_base 29: mod_base = OTHER; note = 2-O-methylribose adenine
  modified_base 29..30: mod_base = OTHER; note R-N-(1,3-dimethylimidazolidin-2-ylidene)phosphoramidate
  modified_base 30: mod_base = um
  source 1..30: mol_type = other RNA

SEQ ID NO: 208 - RNA, 30 nt, synthetic construct; identical to SEQ ID NO: 134
  misc_feature 1..30: note = Synthetic: WV-43060
  misc_feature 1..30: note = Synthetic: ADR-0103530
  modified_base 1: mod_base = OTHER; note = 2-fluororibose cytosine
  modified_base 1..2: mod_base = OTHER; note R-N-(1,3-dimethylimidazolidin-2-ylidene)phosphoramidate
  modified_base 2: mod_base = OTHER; note = 2-fluororibose cytosine
  modified_base 2..3: mod_base = OTHER; note = S-phosphorothioate
  modified_base 3: mod_base = OTHER; note = 2-fluororibose cytosine
  modified_base 3..4: mod_base = OTHER; note = S-phosphorothioate
  modified_base 4: mod_base = OTHER; note = 2-fluororibose adenine
  modified_base 4..5: mod_base = OTHER; note = S-phosphorothioate
  modified_base 5: mod_base = OTHER; note = 2-fluororibose guanine
  modified_base 5..6: mod_base = OTHER; note = R-phosphorothioate
  modified_base 6: mod_base = OTHER; note = 2-fluororibose cytosine
  modified_base 6..7: mod_base = OTHER; note = S-phosphorothioate
  modified_base 7: mod_base = OTHER; note = 2-fluororibose adenine
  modified_base 7..8: mod_base = OTHER; note = S-phosphorothioate
  modified_base 8: mod_base = OTHER; note = 2-fluororibose guanine
  modified_base 8..9: mod_base = OTHER; note = S-phosphorothioate
  modified_base 9: mod_base = OTHER; note = 2-fluororibose cytosine
  modified_base 9..10: mod_base = OTHER; note = S-phosphorothioate
  modified_base 10: mod_base = OTHER; note = 2-fluororibose uracil
  modified_base 10..11: mod_base = OTHER; note = S-phosphorothioate
  modified_base 11: mod_base = OTHER; note = 2-fluororibose uracil
  modified_base 11..12: mod_base = OTHER; note = S-phosphorothioate
  modified_base 12: mod_base = OTHER; note = 2-fluororibose cytosine
  modified_base 12..13: mod_base = OTHER; note = S-phosphorothioate
  modified_base 13: mod_base = OTHER; note = 2-fluororibose adenine
  modified_base 13..14: mod_base = OTHER; note = S-phosphorothioate
  modified_base 14: mod_base = OTHER; note = 2-fluororibose guanine
  modified_base 14..15: mod_base = OTHER; note = S-phosphorothioate
  modified_base 15: mod_base = OTHER; note = 2-fluororibose uracil
  modified_base 15..16: mod_base = OTHER; note = S-phosphorothioate
  modified_base 16: mod_base = cm
  modified_base 16..17: mod_base = OTHER; note = S-phosphorothioate
  modified_base 17: mod_base = cm
  modified_base 17..18: mod_base = OTHER; note = S-phosphorothioate
  modified_base 18: mod_base = cm
  modified_base 18..19: mod_base = OTHER; note = S-phosphorothioate
  modified_base 19: mod_base = um
  modified_base 19..20: mod_base = OTHER; note = S-phosphorothioate
  modified_base 20: mod_base = um
  modified_base 20..21: mod_base = OTHER; note = S-phosphorothioate
  modified_base 21: mod_base = um
  modified_base 21..22: mod_base = OTHER; note = S-phosphorothioate
  modified_base 22: mod_base = cm
  modified_base 22..23: mod_base = OTHER; note = S-phosphorothioate
  modified_base 23: mod_base = OTHER; note = 2-fluororibose uracil
  modified_base 23..24: mod_base = OTHER; note = S-phosphorothioate
  modified_base 24: mod_base = OTHER; note = deoxyribose 6-amino-9-substituted 8,9-dihydro-7H-purin-8-one
  modified_base 24..25: mod_base = OTHER; note = S-phosphorothioate
  modified_base 25: mod_base = OTHER; note = deoxyribose inosine
  modified_base 25..26: mod_base = OTHER; note S-N-(1,3-dimethylimidazolidin-2-ylidene)phosphoramidate
  modified_base 26: mod_base = um
  modified_base 26..27: mod_base = OTHER; note = S-phosphorothioate
  modified_base 27: mod_base = cm
  modified_base 27..28: mod_base = OTHER; note = S-phosphorothioate
  modified_base 28: mod_base = gm
  modified_base 28..29: mod_base = OTHER; note = S-phosphorothioate
  modified_base 29: mod_base = OTHER; note = 2-O-methylribose adenine
  modified_base 29..30: mod_base = OTHER; note R-N-(1,3-dimethylimidazolidin-2-ylidene)phosphoramidate
  modified_base 30: mod_base = um
  source 1..30: mol_type = other RNA

SEQ ID NO: 209 - RNA, 30 nt, synthetic construct; identical to SEQ ID NO: 134
  misc_feature 1..30: note = Synthetic: WV-43059
  misc_feature 1..30: note = Synthetic: ADR-0103528
  modified_base 1: mod_base = OTHER; note = 2-fluororibose cytosine
  modified_base 1..2: mod_base = OTHER; note R-N-(1,3-dimethylimidazolidin-2-ylidene)phosphoramidate
  modified_base 2: mod_base = OTHER; note = 2-fluororibose cytosine
  modified_base 2..3: mod_base = OTHER; note = S-phosphorothioate
  modified_base 3: mod_base = OTHER; note = 2-fluororibose cytosine
  modified_base 3..4: mod_base = OTHER; note = S-phosphorothioate
  modified_base 4: mod_base = OTHER; note = 2-fluororibose adenine
  modified_base 4..5: mod_base = OTHER; note = R-phosphorothioate
  modified_base 5: mod_base = OTHER; note = 2-fluororibose guanine
  modified_base 5..6: mod_base = OTHER; note = S-phosphorothioate
  modified_base 6: mod_base = OTHER; note = 2-fluororibose cytosine
  modified_base 6..7: mod_base = OTHER; note = S-phosphorothioate
  modified_base 7: mod_base = OTHER; note = 2-fluororibose adenine
  modified_base 7..8: mod_base = OTHER; note = S-phosphorothioate
  modified_base 8: mod_base = OTHER; note = 2-fluororibose guanine
  modified_base 8..9: mod_base = OTHER; note = S-phosphorothioate
  modified_base 9: mod_base = OTHER; note = 2-fluororibose cytosine
  modified_base 9..10: mod_base = OTHER; note = S-phosphorothioate
  modified_base 10: mod_base = OTHER; note = 2-fluororibose uracil
  modified_base 10..11: mod_base = OTHER; note = S-phosphorothioate
  modified_base 11: mod_base = OTHER; note = 2-fluororibose uracil
  modified_base 11..12: mod_base = OTHER; note = S-phosphorothioate
  modified_base 12: mod_base = OTHER; note = 2-fluororibose cytosine
  modified_base 12..13: mod_base = OTHER; note = S-phosphorothioate
  modified_base 13: mod_base = OTHER; note = 2-fluororibose adenine
  modified_base 13..14: mod_base = OTHER; note = S-phosphorothioate
  modified_base 14: mod_base = OTHER; note = 2-fluororibose guanine
  modified_base 14..15: mod_base = OTHER; note = S-phosphorothioate
  modified_base 15: mod_base = OTHER; note = 2-fluororibose uracil
  modified_base 15..16: mod_base = OTHER; note = S-phosphorothioate
  modified_base 16: mod_base = cm
  modified_base 16..17: mod_base = OTHER; note = S-phosphorothioate
  modified_base 17: mod_base = cm
  modified_base 17..18: mod_base = OTHER; note = S-phosphorothioate
  modified_base 18: mod_base = cm
  modified_base 18..19: mod_base = OTHER; note = S-phosphorothioate
  modified_base 19: mod_base = um
  modified_base 19..20: mod_base = OTHER; note = S-phosphorothioate
  modified_base 20: mod_base = um
  modified_base 20..21: mod_base = OTHER; note = S-phosphorothioate
  modified_base 21: mod_base = um
  modified_base 21..22: mod_base = OTHER; note = S-phosphorothioate
  modified_base 22: mod_base = cm
  modified_base 22..23: mod_base = OTHER; note = S-phosphorothioate
  modified_base 23: mod_base = OTHER; note = 2-fluororibose uracil
  modified_base 23..24: mod_base = OTHER; note = S-phosphorothioate
  modified_base 24: mod_base = OTHER; note = deoxyribose 6-amino-9-substituted 8,9-dihydro-7H-purin-8-one
  modified_base 24..25: mod_base = OTHER; note = S-phosphorothioate
  modified_base 25: mod_base = OTHER; note = deoxyribose inosine
  modified_base 25..26: mod_base = OTHER; note S-N-(1,3-dimethylimidazolidin-2-ylidene)phosphoramidate
  modified_base 26: mod_base = um
  modified_base 26..27: mod_base = OTHER; note = S-phosphorothioate
  modified_base 27: mod_base = cm
  modified_base 27..28: mod_base = OTHER; note = S-phosphorothioate
  modified_base 28: mod_base = gm
  modified_base 28..29: mod_base = OTHER; note = S-phosphorothioate
  modified_base 29: mod_base = OTHER; note = 2-O-methylribose adenine
  modified_base 29..30: mod_base = OTHER; note R-N-(1,3-dimethylimidazolidin-2-ylidene)phosphoramidate
  modified_base 30: mod_base = um
  source 1..30: mol_type = other RNA

SEQ ID NO: 210 - RNA, 30 nt, synthetic construct; identical to SEQ ID NO: 134
  misc_feature 1..30: note = Synthetic: WV-43058
  misc_feature 1..30: note = Synthetic: ADR-0103526
  modified_base 1: mod_base = OTHER; note = 2-fluororibose cytosine
  modified_base 1..2: mod_base = OTHER; note R-N-(1,3-dimethylimidazolidin-2-ylidene)phosphoramidate
  modified_base 2: mod_base = OTHER; note = 2-fluororibose cytosine
  modified_base 2..3: mod_base = OTHER; note = S-phosphorothioate
  modified_base 3: mod_base = OTHER; note = 2-fluororibose cytosine
  modified_base 3..4: mod_base = OTHER; note = R-phosphorothioate
  modified_base 4: mod_base = OTHER; note = 2-fluororibose adenine
  modified_base 4..5: mod_base = OTHER; note = S-phosphorothioate
  modified_base 5: mod_base = OTHER; note = 2-fluororibose guanine
  modified_base 5..6: mod_base = OTHER; note = S-phosphorothioate
  modified_base 6: mod_base = OTHER; note = 2-fluororibose cytosine
  modified_base 6..7: mod_base = OTHER; note = S-phosphorothioate
  modified_base 7: mod_base = OTHER; note = 2-fluororibose adenine
  modified_base 7..8: mod_base = OTHER; note = S-phosphorothioate
  modified_base 8: mod_base = OTHER; note = 2-fluororibose guanine
  modified_base 8..9: mod_base = OTHER; note = S-phosphorothioate
  modified_base 9: mod_base = OTHER; note = 2-fluororibose cytosine
  modified_base 9..10: mod_base = OTHER; note = S-phosphorothioate
  modified_base 10: mod_base = OTHER; note = 2-fluororibose uracil
  modified_base 10..11: mod_base = OTHER; note = S-phosphorothioate
  modified_base 11: mod_base = OTHER; note = 2-fluororibose uracil
  modified_base 11..12: mod_base = OTHER; note = S-phosphorothioate
  modified_base 12: mod_base = OTHER; note = 2-fluororibose cytosine
  modified_base 12..13: mod_base = OTHER; note = S-phosphorothioate
  modified_base 13: mod_base = OTHER; note = 2-fluororibose adenine
  modified_base 13..14: mod_base = OTHER; note = S-phosphorothioate
  modified_base 14: mod_base = OTHER; note = 2-fluororibose guanine
  modified_base 14..15: mod_base = OTHER; note = S-phosphorothioate
  modified_base 15: mod_base = OTHER; note = 2-fluororibose uracil
  modified_base 15..16: mod_base = OTHER; note = S-phosphorothioate
  modified_base 16: mod_base = cm
  modified_base 16..17: mod_base = OTHER; note = S-phosphorothioate
  modified_base 17: mod_base = cm
  modified_base 17..18: mod_base = OTHER; note = S-phosphorothioate
  modified_base 18: mod_base = cm
  modified_base 18..19: mod_base = OTHER; note = S-phosphorothioate
  modified_base 19: mod_base = um
  modified_base 19..20: mod_base = OTHER; note = S-phosphorothioate
  modified_base 20: mod_base = um
  modified_base 20..21: mod_base = OTHER; note = S-phosphorothioate
  modified_base 21: mod_base = um
  modified_base 21..22: mod_base = OTHER; note = S-phosphorothioate
  modified_base 22: mod_base = cm
  modified_base 22..23: mod_base = OTHER; note = S-phosphorothioate
  modified_base 23: mod_base = OTHER; note = 2-fluororibose uracil
  modified_base 23..24: mod_base = OTHER; note = S-phosphorothioate
  modified_base 24: mod_base = OTHER; note = deoxyribose 6-amino-9-substituted 8,9-dihydro-7H-purin-8-one
  modified_base 24..25: mod_base = OTHER; note = S-phosphorothioate
  modified_base 25: mod_base = OTHER; note = deoxyribose inosine
  modified_base 25..26: mod_base = OTHER; note S-N-(1,3-dimethylimidazolidin-2-ylidene)phosphoramidate
  modified_base 26: mod_base = um
  modified_base 26..27: mod_base = OTHER; note = S-phosphorothioate
  modified_base 27: mod_base = cm
  modified_base 27..28: mod_base = OTHER; note = S-phosphorothioate
  modified_base 28: mod_base = gm
  modified_base 28..29: mod_base = OTHER; note = S-phosphorothioate
  modified_base 29: mod_base = OTHER; note = 2-O-methylribose adenine
  modified_base 29..30: mod_base = OTHER; note R-N-(1,3-dimethylimidazolidin-2-ylidene)phosphoramidate
  modified_base 30: mod_base = um
  source 1..30: mol_type = other RNA

SEQ ID NO: 211 - RNA, 30 nt, synthetic construct; identical to SEQ ID NO: 134
  misc_feature 1..30: note = Synthetic: WV-43022
  misc_feature 1..30: note = Synthetic: ADR-0103625
  modified_base 1: mod_base = OTHER; note = 2-fluororibose cytosine
  modified_base 1..2: mod_base = OTHER; note R-N-(1,3-dimethylimidazolidin-2-ylidene)phosphoramidate
  modified_base 2: mod_base = OTHER; note = 2-fluororibose cytosine
  modified_base 2..3: mod_base = OTHER; note = S-phosphorothioate
  modified_base 3: mod_base = OTHER; note = 2-fluororibose cytosine
  modified_base 3..4: mod_base = OTHER; note = S-phosphorothioate
  modified_base 4: mod_base = OTHER; note = 2-fluororibose adenine
  modified_base 4..5: mod_base = OTHER; note = S-phosphorothioate
  modified_base 5: mod_base = OTHER; note = 2-fluororibose guanine
  modified_base 5..6: mod_base = OTHER; note = S-phosphorothioate
  modified_base 6: mod_base = OTHER; note = 2-fluororibose cytosine
  modified_base 6..7: mod_base = OTHER; note = S-phosphorothioate
  modified_base 7: mod_base = OTHER; note = 2-fluororibose adenine
  modified_base 7..8: mod_base = OTHER; note = S-phosphorothioate
  modified_base 8: mod_base = OTHER; note = 2-fluororibose guanine
  modified_base 8..9: mod_base = OTHER; note = S-phosphorothioate
  modified_base 9: mod_base = OTHER; note = 2-fluororibose cytosine
  modified_base 9..10: mod_base = OTHER; note = S-phosphorothioate
  modified_base 10: mod_base = OTHER; note = 2-fluororibose uracil
  modified_base 10..11: mod_base = OTHER; note = S-phosphorothioate
  modified_base 11: mod_base = OTHER; note = 2-fluororibose uracil
  modified_base 11..12: mod_base = OTHER; note = S-phosphorothioate
  modified_base 12: mod_base = OTHER; note = 2-fluororibose cytosine
  modified_base 12..13: mod_base = OTHER; note = S-phosphorothioate
  modified_base 13: mod_base = OTHER; note = 2-fluororibose adenine
  modified_base 13..14: mod_base = OTHER; note = S-phosphorothioate
  modified_base 14: mod_base = OTHER; note = 2-fluororibose guanine
  modified_base 14..15: mod_base = OTHER; note = S-phosphorothioate
  modified_base 15: mod_base = OTHER; note = 2-fluororibose uracil
  modified_base 15..16: mod_base = OTHER; note = S-phosphorothioate
  modified_base 16: mod_base = cm
  modified_base 16..17: mod_base = OTHER; note = S-phosphorothioate
  modified_base 17: mod_base = cm
  modified_base 17..18: mod_base = OTHER; note = S-phosphorothioate
  modified_base 18: mod_base = cm
  modified_base 18..19: mod_base = OTHER; note = S-phosphorothioate
  modified_base 19: mod_base = um
  modified_base 19..20: mod_base = OTHER; note = S-phosphorothioate
  modified_base 20: mod_base = um
  modified_base 20..21: mod_base = OTHER; note = S-phosphorothioate
  modified_base 21: mod_base = um
  modified_base 21..22: mod_base = OTHER; note = S-phosphorothioate
  modified_base 22: mod_base = cm
  modified_base 22..23: mod_base = OTHER; note = S-phosphorothioate
  modified_base 23: mod_base = OTHER; note = 2-fluororibose uracil
  modified_base 23..24: mod_base = OTHER; note = S-phosphorothioate
  modified_base 24: mod_base = OTHER; note = deoxyribose 6-amino-9-substituted 8,9-dihydro-7H-purin-8-one
  modified_base 24..25: mod_base = OTHER; note = S-phosphorothioate
  modified_base 25: mod_base = OTHER; note = deoxyribose inosine
  modified_base 25..26: mod_base = OTHER; note S-N-(1,3-dimethylimidazolidin-2-ylidene)phosphoramidate
  modified_base 26: mod_base = um
  modified_base 26..27: mod_base = OTHER; note = S-phosphorothioate
  modified_base 27: mod_base = cm
  modified_base 27..28: mod_base = OTHER; note = S-phosphorothioate
  modified_base 28: mod_base = gm
  modified_base 28..29: mod_base = OTHER; note = S-phosphorothioate
  modified_base 29: mod_base = OTHER; note = 2-O-methylribose adenine
  modified_base 29..30: mod_base = OTHER; note R-N-(1,3-dimethylimidazolidin-2-ylidene)phosphoramidate
  modified_base 30: mod_base = OTHER; note = 2-fluororibose uracil
  source 1..30: mol_type = other RNA

SEQ ID NO: 212 - RNA, 30 nt, synthetic construct; identical to SEQ ID NO: 134
  misc_feature 1..30: note = Synthetic: WV-43021
  misc_feature 1..30: note = Synthetic: ADR-0103622
  modified_base 1: mod_base = OTHER; note = 2-fluororibose cytosine
  modified_base 1..2: mod_base = OTHER; note R-N-(1,3-dimethylimidazolidin-2-ylidene)phosphoramidate
  modified_base 2: mod_base = OTHER; note = 2-fluororibose cytosine
  modified_base 2..3: mod_base = OTHER; note = S-phosphorothioate
  modified_base 3: mod_base = OTHER; note = 2-fluororibose cytosine
  modified_base 3..4: mod_base = OTHER; note = S-phosphorothioate
  modified_base 4: mod_base = OTHER; note = 2-fluororibose adenine
  modified_base 4..5: mod_base = OTHER; note = S-phosphorothioate
  modified_base 5: mod_base = OTHER; note = 2-fluororibose guanine
  modified_base 5..6: mod_base = OTHER; note = S-phosphorothioate
  modified_base 6: mod_base = OTHER; note = 2-fluororibose cytosine
  modified_base 6..7: mod_base = OTHER; note = S-phosphorothioate
  modified_base 7: mod_base = OTHER; note = 2-fluororibose adenine
  modified_base 7..8: mod_base = OTHER; note = S-phosphorothioate
  modified_base 8: mod_base = OTHER; note = 2-fluororibose guanine
  modified_base 8..9: mod_base = OTHER; note = S-phosphorothioate
  modified_base 9: mod_base = OTHER; note = 2-fluororibose cytosine
  modified_base 9..10: mod_base = OTHER; note = S-phosphorothioate
  modified_base 10: mod_base = OTHER; note = 2-fluororibose uracil
  modified_base 10..11: mod_base = OTHER; note = S-phosphorothioate
  modified_base 11: mod_base = OTHER; note = 2-fluororibose uracil
  modified_base 11..12: mod_base = OTHER; note = S-phosphorothioate
  modified_base 12: mod_base = OTHER; note = 2-fluororibose cytosine
  modified_base 12..13: mod_base = OTHER; note = S-phosphorothioate
  modified_base 13: mod_base = OTHER; note = 2-fluororibose adenine
  modified_base 13..14: mod_base = OTHER; note = S-phosphorothioate
  modified_base 14: mod_base = OTHER; note = 2-fluororibose guanine
  modified_base 14..15: mod_base = OTHER; note = S-phosphorothioate
  modified_base 15: mod_base = OTHER; note = 2-fluororibose uracil
  modified_base 15..16: mod_base = OTHER; note = S-phosphorothioate
  modified_base 16: mod_base = cm
  modified_base 16..17: mod_base = OTHER; note = S-phosphorothioate
  modified_base 17: mod_base = cm
  modified_base 17..18: mod_base = OTHER; note = S-phosphorothioate
  modified_base 18: mod_base = cm
  modified_base 18..19: mod_base = OTHER; note = S-phosphorothioate
  modified_base 19: mod_base = um
  modified_base 19..20: mod_base = OTHER; note = S-phosphorothioate
  modified_base 20: mod_base = um
  modified_base 20..21: mod_base = OTHER; note = S-phosphorothioate
  modified_base 21: mod_base = um
  modified_base 21..22: mod_base = OTHER; note = S-phosphorothioate
  modified_base 22: mod_base = cm
  modified_base 22..23: mod_base = OTHER; note = S-phosphorothioate
  modified_base 23: mod_base = OTHER; note = 2-fluororibose uracil
  modified_base 23..24: mod_base = OTHER; note = S-phosphorothioate
  modified_base 24: mod_base = OTHER; note = deoxyribose 6-amino-9-substituted 8,9-dihydro-7H-purin-8-one
  modified_base 24..25: mod_base = OTHER; note = S-phosphorothioate
  modified_base 25: mod_base = OTHER; note = deoxyribose inosine
  modified_base 25..26: mod_base = OTHER; note S-N-(1,3-dimethylimidazolidin-2-ylidene)phosphoramidate
  modified_base 26: mod_base = um
  modified_base 26..27: mod_base = OTHER; note = S-phosphorothioate
  modified_base 27: mod_base = cm
  modified_base 27..28: mod_base = OTHER; note = S-phosphorothioate
  modified_base 28: mod_base = gm
  modified_base 28..29: mod_base = OTHER; note = S-phosphorothioate
  modified_base 29: mod_base = OTHER; note = 2-fluororibose adenine
  modified_base 29..30: mod_base = OTHER; note R-N-(1,3-dimethylimidazolidin-2-ylidene)phosphoramidate
  modified_base 30: mod_base = um
  source 1..30: mol_type = other RNA

SEQ ID NO: 213 - RNA, 30 nt, synthetic construct; identical to SEQ ID NO: 134
  misc_feature 1..30: note = Synthetic: WV-43020
  misc_feature 1..30: note = Synthetic: ADR-0103621
  modified_base 1: mod_base = OTHER; note = 2-fluororibose cytosine
  modified_base 1..2: mod_base = OTHER; note R-N-(1,3-dimethylimidazolidin-2-ylidene)phosphoramidate
  modified_base 2: mod_base = OTHER; note = 2-fluororibose cytosine
  modified_base 2..3: mod_base = OTHER; note = S-phosphorothioate
  modified_base 3: mod_base = OTHER; note = 2-fluororibose cytosine
  modified_base 3..4: mod_base = OTHER; note = S-phosphorothioate
  modified_base 4: mod_base = OTHER; note = 2-fluororibose adenine
  modified_base 4..5: mod_base = OTHER; note = S-phosphorothioate
  modified_base 5: mod_base = OTHER; note = 2-fluororibose guanine
  modified_base 5..6: mod_base = OTHER; note = S-phosphorothioate
  modified_base 6: mod_base = OTHER; note = 2-fluororibose cytosine
  modified_base 6..7: mod_base = OTHER; note = S-phosphorothioate
  modified_base 7: mod_base = OTHER; note = 2-fluororibose adenine
  modified_base 7..8: mod_base = OTHER; note = S-phosphorothioate
  modified_base 8: mod_base = OTHER; note = 2-fluororibose guanine
  modified_base 8..9: mod_base = OTHER; note = S-phosphorothioate
  modified_base 9: mod_base = OTHER; note = 2-fluororibose cytosine
  modified_base 9..10: mod_base = OTHER; note = S-phosphorothioate
  modified_base 10: mod_base = OTHER; note = 2-fluororibose uracil
  modified_base 10..11: mod_base = OTHER; note = S-phosphorothioate
  modified_base 11: mod_base = OTHER; note = 2-fluororibose uracil
  modified_base 11..12: mod_base = OTHER; note = S-phosphorothioate
  modified_base 12: mod_base = OTHER; note = 2-fluororibose cytosine
  modified_base 12..13: mod_base = OTHER; note = S-phosphorothioate
  modified_base 13: mod_base = OTHER; note = 2-fluororibose adenine
  modified_base 13..14: mod_base = OTHER; note = S-phosphorothioate
  modified_base 14: mod_base = OTHER; note = 2-fluororibose guanine
  modified_base 14..15: mod_base = OTHER; note = S-phosphorothioate
  modified_base 15: mod_base = OTHER; note = 2-fluororibose uracil
  modified_base 15..16: mod_base = OTHER; note = S-phosphorothioate
  modified_base 16: mod_base = cm
  modified_base 16..17: mod_base = OTHER; note = S-phosphorothioate
  modified_base 17: mod_base = cm
  modified_base 17..18: mod_base = OTHER; note = S-phosphorothioate
  modified_base 18: mod_base = cm
  modified_base 18..19: mod_base = OTHER; note = S-phosphorothioate
  modified_base 19: mod_base = um
  modified_base 19..20: mod_base = OTHER; note = S-phosphorothioate
  modified_base 20: mod_base = um
  modified_base 20..21: mod_base = OTHER; note = S-phosphorothioate
  modified_base 21: mod_base = um
  modified_base 21..22: mod_base = OTHER; note = S-phosphorothioate
  modified_base 22: mod_base = cm
  modified_base 22..23: mod_base = OTHER; note = S-phosphorothioate
  modified_base 23: mod_base = OTHER; note = 2-fluororibose uracil
  modified_base 23..24: mod_base = OTHER; note = S-phosphorothioate
  modified_base 24: mod_base = OTHER; note = deoxyribose 6-amino-9-substituted 8,9-dihydro-7H-purin-8-one
  modified_base 24..25: mod_base = OTHER; note = S-phosphorothioate
  modified_base 25: mod_base = OTHER; note = deoxyribose inosine
  modified_base 25..26: mod_base = OTHER; note S-N-(1,3-dimethylimidazolidin-2-ylidene)phosphoramidate
  modified_base 26: mod_base = um
  modified_base 26..27: mod_base = OTHER; note = S-phosphorothioate
  modified_base 27: mod_base = cm
  modified_base 27..28: mod_base = OTHER; note = S-phosphorothioate
  modified_base 28: mod_base = OTHER; note = 2-fluororibose guanine
  modified_base 28..29: mod_base = OTHER; note = S-phosphorothioate
  modified_base 29: mod_base = OTHER; note = 2-O-methylribose adenine
  modified_base 29..30: mod_base = OTHER; note R-N-(1,3-dimethylimidazolidin-2-ylidene)phosphoramidate
  modified_base 30: mod_base = um
  source 1..30: mol_type = other RNA

SEQ ID NO: 214 - RNA, 30 nt, synthetic construct; identical to SEQ ID NO: 134
  misc_feature 1..30: note = Synthetic: WV-43019
  misc_feature 1..30: note = Synthetic: ADR-0103619
  modified_base 1: mod_base = OTHER; note = 2-fluororibose cytosine
  modified_base 1..2: mod_base = OTHER; note R-N-(1,3-dimethylimidazolidin-2-ylidene)phosphoramidate
  modified_base 2: mod_base = OTHER; note = 2-fluororibose cytosine
  modified_base 2..3: mod_base = OTHER; note = S-phosphorothioate
  modified_base 3: mod_base = OTHER; note = 2-fluororibose cytosine
  modified_base 3..4: mod_base = OTHER; note = S-phosphorothioate
  modified_base 4: mod_base = OTHER; note = 2-fluororibose adenine
  modified_base 4..5: mod_base = OTHER; note = S-phosphorothioate
  modified_base 5: mod_base = OTHER; note = 2-fluororibose guanine
  modified_base 5..6: mod_base = OTHER; note = S-phosphorothioate
  modified_base 6: mod_base = OTHER; note = 2-fluororibose cytosine
  modified_base 6..7: mod_base = OTHER; note = S-phosphorothioate
  modified_base 7: mod_base = OTHER; note = 2-fluororibose adenine
  modified_base 7..8: mod_base = OTHER; note = S-phosphorothioate
  modified_base 8: mod_base = OTHER; note = 2-fluororibose guanine
  modified_base 8..9: mod_base = OTHER; note = S-phosphorothioate
  modified_base 9: mod_base = OTHER; note = 2-fluororibose cytosine
  modified_base 9..10: mod_base = OTHER; note = S-phosphorothioate
  modified_base 10: mod_base = OTHER; note = 2-fluororibose uracil
  modified_base 10..11: mod_base = OTHER; note = S-phosphorothioate
  modified_base 11: mod_base = OTHER; note = 2-fluororibose uracil
  modified_base 11..12: mod_base = OTHER; note = S-phosphorothioate
  modified_base 12: mod_base = OTHER; note = 2-fluororibose cytosine
  modified_base 12..13: mod_base = OTHER; note = S-phosphorothioate
  modified_base 13: mod_base = OTHER; note = 2-fluororibose adenine
  modified_base 13..14: mod_base = OTHER; note = S-phosphorothioate
  modified_base 14: mod_base = OTHER; note = 2-fluororibose guanine
  modified_base 14..15: mod_base = OTHER; note = S-phosphorothioate
  modified_base 15: mod_base = OTHER; note = 2-fluororibose uracil
  modified_base 15..16: mod_base = OTHER; note = S-phosphorothioate
  modified_base 16: mod_base = cm
  modified_base 16..17: mod_base = OTHER; note = S-phosphorothioate
  modified_base 17: mod_base = cm
  modified_base 17..18: mod_base = OTHER; note = S-phosphorothioate
  modified_base 18: mod_base = cm
  modified_base 18..19: mod_base = OTHER; note = S-phosphorothioate
  modified_base 19: mod_base = um
  modified_base 19..20: mod_base = OTHER; note = S-phosphorothioate
  modified_base 20: mod_base = um
  modified_base 20..21: mod_base = OTHER; note = S-phosphorothioate
  modified_base 21: mod_base = um
  modified_base 21..22: mod_base = OTHER; note = S-phosphorothioate
  modified_base 22: mod_base = cm
  modified_base 22..23: mod_base = OTHER; note = S-phosphorothioate
  modified_base 23: mod_base = OTHER; note = 2-fluororibose uracil
  modified_base 23..24: mod_base = OTHER; note = S-phosphorothioate
  modified_base 24: mod_base = OTHER; note = deoxyribose 6-amino-9-substituted 8,9-dihydro-7H-purin-8-one
  modified_base 24..25: mod_base = OTHER; note = S-phosphorothioate
  modified_base 25: mod_base = OTHER; note = deoxyribose inosine
  modified_base 25..26: mod_base = OTHER; note S-N-(1,3-dimethylimidazolidin-2-ylidene)phosphoramidate
  modified_base 26: mod_base = um
  modified_base 26..27: mod_base = OTHER; note = S-phosphorothioate
  modified_base 27: mod_base = OTHER; note = 2-fluororibose cytosine
  modified_base 27..28: mod_base = OTHER; note = S-phosphorothioate
  modified_base 28: mod_base = gm
  modified_base 28..29: mod_base = OTHER; note = S-phosphorothioate
  modified_base 29: mod_base = OTHER; note = 2-O-methylribose adenine
  modified_base 29..30: mod_base = OTHER; note R-N-(1,3-dimethylimidazolidin-2-ylidene)phosphoramidate
  modified_base 30: mod_base = um
  source 1..30: mol_type = other RNA

SEQ ID NO: 215 - RNA, 30 nt, synthetic construct; identical to SEQ ID NO: 134
  misc_feature 1..30: note = Synthetic: WV-43018
  misc_feature 1..30: note = Synthetic: ADR-0103617
  modified_base 1: mod_base = OTHER; note = 2-fluororibose cytosine
  modified_base 1..2: mod_base = OTHER; note R-N-(1,3-dimethylimidazolidin-2-ylidene)phosphoramidate
  modified_base 2: mod_base = OTHER; note = 2-fluororibose cytosine
  modified_base 2..3: mod_base = OTHER; note = S-phosphorothioate
  modified_base 3: mod_base = OTHER; note = 2-fluororibose cytosine
  modified_base 3..4: mod_base = OTHER; note = S-phosphorothioate
  modified_base 4: mod_base = OTHER; note = 2-fluororibose adenine
  modified_base 4..5: mod_base = OTHER; note = S-phosphorothioate
  modified_base 5: mod_base = OTHER; note = 2-fluororibose guanine
  modified_base 5..6: mod_base = OTHER; note = S-phosphorothioate
  modified_base 6: mod_base = OTHER; note = 2-fluororibose cytosine
  modified_base 6..7: mod_base = OTHER; note = S-phosphorothioate
  modified_base 7: mod_base = OTHER; note = 2-fluororibose adenine
  modified_base 7..8: mod_base = OTHER; note = S-phosphorothioate
  modified_base 8: mod_base = OTHER; note = 2-fluororibose guanine
  modified_base 8..9: mod_base = OTHER; note = S-phosphorothioate
  modified_base 9: mod_base = OTHER; note = 2-fluororibose cytosine
  modified_base 9..10: mod_base = OTHER; note = S-phosphorothioate
  modified_base 10: mod_base = OTHER; note = 2-fluororibose uracil
  modified_base 10..11: mod_base = OTHER; note = S-phosphorothioate
  modified_base 11: mod_base = OTHER; note = 2-fluororibose uracil
  modified_base 11..12: mod_base = OTHER; note = S-phosphorothioate
  modified_base 12: mod_base = OTHER; note = 2-fluororibose cytosine
  modified_base 12..13: mod_base = OTHER; note = S-phosphorothioate
  modified_base 13: mod_base = OTHER; note = 2-fluororibose adenine
  modified_base 13..14: mod_base = OTHER; note = S-phosphorothioate
  modified_base 14: mod_base = OTHER; note = 2-fluororibose guanine
  modified_base 14..15: mod_base = OTHER; note = S-phosphorothioate
  modified_base 15: mod_base = OTHER; note = 2-fluororibose uracil
  modified_base 15..16: mod_base = OTHER; note = S-phosphorothioate
  modified_base 16: mod_base = cm
  modified_base 16..17: mod_base = OTHER; note = S-phosphorothioate
  modified_base 17: mod_base = cm
  modified_base 17..18: mod_base = OTHER; note = S-phosphorothioate
  modified_base 18: mod_base = cm
  modified_base 18..19: mod_base = OTHER; note = S-phosphorothioate
  modified_base 19: mod_base = um
  modified_base 19..20: mod_base = OTHER; note = S-phosphorothioate
  modified_base 20: mod_base = um
  modified_base 20..21: mod_base = OTHER; note = S-phosphorothioate
  modified_base 21: mod_base = um
  modified_base 21..22: mod_base = OTHER; note = S-phosphorothioate
  modified_base 22: mod_base = cm
  modified_base 22..23: mod_base = OTHER; note = S-phosphorothioate
  modified_base 23: mod_base = OTHER; note = 2-fluororibose uracil
  modified_base 23..24: mod_base = OTHER; note = S-phosphorothioate
  modified_base 24: mod_base = OTHER; note = deoxyribose 6-amino-9-substituted 8,9-dihydro-7H-purin-8-one
  modified_base 24..25: mod_base = OTHER; note = S-phosphorothioate
  modified_base 25: mod_base = OTHER; note = deoxyribose inosine
  modified_base 25..26: mod_base = OTHER; note S-N-(1,3-dimethylimidazolidin-2-ylidene)phosphoramidate
  modified_base 26: mod_base = OTHER; note = 2-fluororibose uracil
  modified_base 26..27: mod_base = OTHER; note = S-phosphorothioate
  modified_base 27: mod_base = cm
  modified_base 27..28: mod_base = OTHER; note = S-phosphorothioate
  modified_base 28: mod_base = gm
  modified_base 28..29: mod_base = OTHER; note = S-phosphorothioate
  modified_base 29: mod_base = OTHER; note = 2-O-methylribose adenine
  modified_base 29..30: mod_base = OTHER; note R-N-(1,3-dimethylimidazolidin-2-ylidene)phosphoramidate
  modified_base 30: mod_base = um
  source 1..30: mol_type = other RNA

SEQ ID NO: 216 - RNA, 30 nt, synthetic construct; identical to SEQ ID NO: 134
  misc_feature 1..30: note = Synthetic: WV-43017
  misc_feature 1..30: note = Synthetic: ADR-0103576
  modified_base 1: mod_base = OTHER; note = 2-fluororibose cytosine
  modified_base 1..2: mod_base = OTHER; note R-N-(1,3-dimethylimidazolidin-2-ylidene)phosphoramidate
  modified_base 2: mod_base = OTHER; note = 2-fluororibose cytosine
  modified_base 2..3: mod_base = OTHER; note = S-phosphorothioate
  modified_base 3: mod_base = OTHER; note = 2-fluororibose cytosine
  modified_base 3..4: mod_base = OTHER; note = S-phosphorothioate
  modified_base 4: mod_base = OTHER; note = 2-fluororibose adenine
  modified_base 4..5: mod_base = OTHER; note = S-phosphorothioate
  modified_base 5: mod_base = OTHER; note = 2-fluororibose guanine
  modified_base 5..6: mod_base = OTHER; note = S-phosphorothioate
  modified_base 6: mod_base = OTHER; note = 2-fluororibose cytosine
  modified_base 6..7: mod_base = OTHER; note = S-phosphorothioate
  modified_base 7: mod_base = OTHER; note = 2-fluororibose adenine
  modified_base 7..8: mod_base = OTHER; note = S-phosphorothioate
  modified_base 8: mod_base = OTHER; note = 2-fluororibose guanine
  modified_base 8..9: mod_base = OTHER; note = S-phosphorothioate
  modified_base 9: mod_base = OTHER; note = 2-fluororibose cytosine
  modified_base 9..10: mod_base = OTHER; note = S-phosphorothioate
  modified_base 10: mod_base = OTHER; note = 2-fluororibose uracil
  modified_base 10..11: mod_base = OTHER; note = S-phosphorothioate
  modified_base 11: mod_base = OTHER; note = 2-fluororibose uracil
  modified_base 11..12: mod_base = OTHER; note = S-phosphorothioate
  modified_base 12: mod_base = OTHER; note = 2-fluororibose cytosine
  modified_base 12..13: mod_base = OTHER; note = S-phosphorothioate
  modified_base 13: mod_base = OTHER; note = 2-fluororibose adenine
  modified_base 13..14: mod_base = OTHER; note = S-phosphorothioate
  modified_base 14: mod_base = OTHER; note = 2-fluororibose guanine
  modified_base 14..15: mod_base = OTHER; note = S-phosphorothioate
  modified_base 15: mod_base = OTHER; note = 2-fluororibose uracil
  modified_base 15..16: mod_base = OTHER; note = S-phosphorothioate
  modified_base 16: mod_base = cm
  modified_base 16..17: mod_base = OTHER; note = S-phosphorothioate
  modified_base 17: mod_base = cm
  modified_base 17..18: mod_base = OTHER; note = S-phosphorothioate
  modified_base 18: mod_base = cm
  modified_base 18..19: mod_base = OTHER; note = S-phosphorothioate
  modified_base 19: mod_base = um
  modified_base 19..20: mod_base = OTHER; note = S-phosphorothioate
  modified_base 20: mod_base = um
  modified_base 20..21: mod_base = OTHER; note = S-phosphorothioate
  modified_base 21: mod_base = um
  modified_base 21..22: mod_base = OTHER; note = S-phosphorothioate
  modified_base 22: mod_base = OTHER; note = 2-fluororibose cytosine
  modified_base 22..23: mod_base = OTHER; note = S-phosphorothioate
  modified_base 23: mod_base = OTHER; note = 2-fluororibose uracil
  modified_base 23..24: mod_base = OTHER; note = S-phosphorothioate
  modified_base 24: mod_base = OTHER; note = deoxyribose 6-amino-9-substituted 8,9-dihydro-7H-purin-8-one
  modified_base 24..25: mod_base = OTHER; note = S-phosphorothioate
  modified_base 25: mod_base = OTHER; note = deoxyribose inosine
  modified_base 25..26: mod_base = OTHER; note S-N-(1,3-dimethylimidazolidin-2-ylidene)phosphoramidate
  modified_base 26: mod_base = um
  modified_base 26..27: mod_base = OTHER; note = S-phosphorothioate
  modified_base 27: mod_base = cm
  modified_base 27..28: mod_base = OTHER; note = S-phosphorothioate
  modified_base 28: mod_base = gm
  modified_base 28..29: mod_base = OTHER; note = S-phosphorothioate
  modified_base 29: mod_base = OTHER; note = 2-O-methylribose adenine
  modified_base 29..30: mod_base = OTHER; note R-N-(1,3-dimethylimidazolidin-2-ylidene)phosphoramidate
  modified_base 30: mod_base = um
  source 1..30: mol_type = other RNA

SEQ ID NO: 217 - RNA, 30 nt, synthetic construct; identical to SEQ ID NO: 134
  misc_feature 1..30: note = Synthetic: WV-43016
  misc_feature 1..30: note = Synthetic: ADR-0103574
  modified_base 1: mod_base = OTHER; note = 2-fluororibose cytosine
  modified_base 1..2: mod_base = OTHER; note R-N-(1,3-dimethylimidazolidin-2-ylidene)phosphoramidate
  modified_base 2: mod_base = OTHER; note = 2-fluororibose cytosine
  modified_base 2..3: mod_base = OTHER; note = S-phosphorothioate
  modified_base 3: mod_base = OTHER; note = 2-fluororibose cytosine
  modified_base 3..4: mod_base = OTHER; note = S-phosphorothioate
  modified_base 4: mod_base = OTHER; note = 2-fluororibose adenine
  modified_base 4..5: mod_base = OTHER; note = S-phosphorothioate
  modified_base 5: mod_base = OTHER; note = 2-fluororibose guanine
  modified_base 5..6: mod_base = OTHER; note = S-phosphorothioate
  modified_base 6: mod_base = OTHER; note = 2-fluororibose cytosine
  modified_base 6..7: mod_base = OTHER; note = S-phosphorothioate
  modified_base 7: mod_base = OTHER; note = 2-fluororibose adenine
  modified_base 7..8: mod_base = OTHER; note = S-phosphorothioate
  modified_base 8: mod_base = OTHER; note = 2-fluororibose guanine
  modified_base 8..9: mod_base = OTHER; note = S-phosphorothioate
  modified_base 9: mod_base = OTHER; note = 2-fluororibose cytosine
  modified_base 9..10: mod_base = OTHER; note = S-phosphorothioate
  modified_base 10: mod_base = OTHER; note = 2-fluororibose uracil
  modified_base 10..11: mod_base = OTHER; note = S-phosphorothioate
  modified_base 11: mod_base = OTHER; note = 2-fluororibose uracil
  modified_base 11..12: mod_base = OTHER; note = S-phosphorothioate
  modified_base 12: mod_base = OTHER; note = 2-fluororibose cytosine
  modified_base 12..13: mod_base = OTHER; note = S-phosphorothioate
  modified_base 13: mod_base = OTHER; note = 2-fluororibose adenine
  modified_base 13..14: mod_base = OTHER; note = S-phosphorothioate
  modified_base 14: mod_base = OTHER; note = 2-fluororibose guanine
  modified_base 14..15: mod_base = OTHER; note = S-phosphorothioate
  modified_base 15: mod_base = OTHER; note = 2-fluororibose uracil
  modified_base 15..16: mod_base = OTHER; note = S-phosphorothioate
  modified_base 16: mod_base = cm
  modified_base 16..17: mod_base = OTHER; note = S-phosphorothioate
  modified_base 17: mod_base = cm
  modified_base 17..18: mod_base = OTHER; note = S-phosphorothioate
  modified_base 18: mod_base = cm
  modified_base 18..19: mod_base = OTHER; note = S-phosphorothioate
  modified_base 19: mod_base = um
  modified_base 19..20: mod_base = OTHER; note = S-phosphorothioate
  modified_base 20: mod_base = um
  modified_base 20..21: mod_base = OTHER; note = S-phosphorothioate
  modified_base 21: mod_base = OTHER; note = 2-fluororibose uracil
  modified_base 21..22: mod_base = OTHER; note = S-phosphorothioate
  modified_base 22: mod_base = cm
  modified_base 22..23: mod_base = OTHER; note = S-phosphorothioate
  modified_base 23: mod_base = OTHER; note = 2-fluororibose uracil
  modified_base 23..24: mod_base = OTHER; note = S-phosphorothioate
  modified_base 24: mod_base = OTHER; note = deoxyribose 6-amino-9-substituted 8,9-dihydro-7H-purin-8-one
  modified_base 24..25: mod_base = OTHER; note = S-phosphorothioate
  modified_base 25: mod_base = OTHER; note = deoxyribose inosine
  modified_base 25..26: mod_base = OTHER; note S-N-(1,3-dimethylimidazolidin-2-ylidene)phosphoramidate
  modified_base 26: mod_base = um
  modified_base 26..27: mod_base = OTHER; note = S-phosphorothioate
  modified_base 27: mod_base = cm
  modified_base 27..28: mod_base = OTHER; note = S-phosphorothioate
  modified_base 28: mod_base = gm
  modified_base 28..29: mod_base = OTHER; note = S-phosphorothioate
  modified_base 29: mod_base = OTHER; note = 2-O-methylribose adenine
  modified_base 29..30: mod_base = OTHER; note R-N-(1,3-dimethylimidazolidin-2-ylidene)phosphoramidate
  modified_base 30: mod_base = um
  source 1..30: mol_type = other RNA

SEQ ID NO: 218 - RNA, 30 nt, synthetic construct; identical to SEQ ID NO: 134
  misc_feature 1..30: note = Synthetic: WV-43015
  misc_feature 1..30: note = Synthetic: ADR-0103572
  modified_base 1: mod_base = OTHER; note = 2-fluororibose cytosine
  modified_base 1..2: mod_base = OTHER; note R-N-(1,3-dimethylimidazolidin-2-ylidene)phosphoramidate
  modified_base 2: mod_base = OTHER; note = 2-fluororibose cytosine
  modified_base 2..3: mod_base = OTHER; note = S-phosphorothioate
  modified_base 3: mod_base = OTHER; note = 2-fluororibose cytosine
  modified_base 3..4: mod_base = OTHER; note = S-phosphorothioate
  modified_base 4: mod_base = OTHER; note = 2-fluororibose adenine
  modified_base 4..5: mod_base = OTHER; note = S-phosphorothioate
  modified_base 5: mod_base = OTHER; note = 2-fluororibose guanine
  modified_base 5..6: mod_base = OTHER; note = S-phosphorothioate
  modified_base 6: mod_base = OTHER; note = 2-fluororibose cytosine
  modified_base 6..7: mod_base = OTHER; note = S-phosphorothioate
  modified_base 7: mod_base = OTHER; note = 2-fluororibose adenine
  modified_base 7..8: mod_base = OTHER; note = S-phosphorothioate
  modified_base 8: mod_base = OTHER; note = 2-fluororibose guanine
  modified_base 8..9: mod_base = OTHER; note = S-phosphorothioate
  modified_base 9: mod_base = OTHER; note = 2-fluororibose cytosine
  modified_base 9..10: mod_base = OTHER; note = S-phosphorothioate
  modified_base 10: mod_base = OTHER; note = 2-fluororibose uracil
  modified_base 10..11: mod_base = OTHER; note = S-phosphorothioate
  modified_base 11: mod_base = OTHER; note = 2-fluororibose uracil
  modified_base 11..12: mod_base = OTHER; note = S-phosphorothioate
  modified_base 12: mod_base = OTHER; note = 2-fluororibose cytosine
  modified_base 12..13: mod_base = OTHER; note = S-phosphorothioate
  modified_base 13: mod_base = OTHER; note = 2-fluororibose adenine
  modified_base 13..14: mod_base = OTHER; note = S-phosphorothioate
  modified_base 14: mod_base = OTHER; note = 2-fluororibose guanine
  modified_base 14..15: mod_base = OTHER; note = S-phosphorothioate
  modified_base 15: mod_base = OTHER; note = 2-fluororibose uracil
  modified_base 15..16: mod_base = OTHER; note = S-phosphorothioate
  modified_base 16: mod_base = cm
  modified_base 16..17: mod_base = OTHER; note = S-phosphorothioate
  modified_base 17: mod_base = cm
  modified_base 17..18: mod_base = OTHER; note = S-phosphorothioate
  modified_base 18: mod_base = cm
  modified_base 18..19: mod_base = OTHER; note = S-phosphorothioate
  modified_base 19: mod_base = um
  modified_base 19..20: mod_base = OTHER; note = S-phosphorothioate
  modified_base 20: mod_base = OTHER; note = 2-fluororibose uracil
  modified_base 20..21: mod_base = OTHER; note = S-phosphorothioate
  modified_base 21: mod_base = um
  modified_base 21..22: mod_base = OTHER; note = S-phosphorothioate
  modified_base 22: mod_base = cm
  modified_base 22..23: mod_base = OTHER; note = S-phosphorothioate
  modified_base 23: mod_base = OTHER; note = 2-fluororibose uracil
  modified_base 23..24: mod_base = OTHER; note = S-phosphorothioate
  modified_base 24: mod_base = OTHER; note = deoxyribose 6-amino-9-substituted 8,9-dihydro-7H-purin-8-one
  modified_base 24..25: mod_base = OTHER; note = S-phosphorothioate
  modified_base 25: mod_base = OTHER; note = deoxyribose inosine
  modified_base 25..26: mod_base = OTHER; note S-N-(1,3-dimethylimidazolidin-2-ylidene)phosphoramidate
  modified_base 26: mod_base = um
  modified_base 26..27: mod_base = OTHER; note = S-phosphorothioate
  modified_base 27: mod_base = cm
  modified_base 27..28: mod_base = OTHER; note = S-phosphorothioate
  modified_base 28: mod_base = gm
  modified_base 28..29: mod_base = OTHER; note = S-phosphorothioate
  modified_base 29: mod_base = OTHER; note = 2-O-methylribose adenine
  modified_base 29..30: mod_base = OTHER; note R-N-(1,3-dimethylimidazolidin-2-ylidene)phosphoramidate
  modified_base 30: mod_base = um
  source 1..30: mol_type = other RNA

SEQ ID NO: 219 - RNA, 30 nt, synthetic construct; identical to SEQ ID NO: 134
  misc_feature 1..30: note = Synthetic: WV-43014
  misc_feature 1..30: note = Synthetic: ADR-0103570
  modified_base 1: mod_base = OTHER; note = 2-fluororibose cytosine
  modified_base 1..2: mod_base = OTHER; note R-N-(1,3-dimethylimidazolidin-2-ylidene)phosphoramidate
  modified_base 2: mod_base = OTHER; note = 2-fluororibose cytosine
  modified_base 2..3: mod_base = OTHER; note = S-phosphorothioate
  modified_base 3: mod_base = OTHER; note = 2-fluororibose cytosine
  modified_base 3..4: mod_base = OTHER; note = S-phosphorothioate
  modified_base 4: mod_base = OTHER; note = 2-fluororibose adenine
  modified_base 4..5: mod_base = OTHER; note = S-phosphorothioate
  modified_base 5: mod_base = OTHER; note = 2-fluororibose guanine
  modified_base 5..6: mod_base = OTHER; note = S-phosphorothioate
  modified_base 6: mod_base = OTHER; note = 2-fluororibose cytosine
  modified_base 6..7: mod_base = OTHER; note = S-phosphorothioate
  modified_base 7: mod_base = OTHER; note = 2-fluororibose adenine
  modified_base 7..8: mod_base = OTHER; note = S-phosphorothioate
  modified_base 8: mod_base = OTHER; note = 2-fluororibose guanine
  modified_base 8..9: mod_base = OTHER; note = S-phosphorothioate
  modified_base 9: mod_base = OTHER; note = 2-fluororibose cytosine
  modified_base 9..10: mod_base = OTHER; note = S-phosphorothioate
  modified_base 10: mod_base = OTHER; note = 2-fluororibose uracil
  modified_base 10..11: mod_base = OTHER; note = S-phosphorothioate
  modified_base 11: mod_base = OTHER; note = 2-fluororibose uracil
  modified_base 11..12: mod_base = OTHER; note = S-phosphorothioate
  modified_base 12: mod_base = OTHER; note = 2-fluororibose cytosine
  modified_base 12..13: mod_base = OTHER; note = S-phosphorothioate
  modified_base 13: mod_base = OTHER; note = 2-fluororibose adenine
  modified_base 13..14: mod_base = OTHER; note = S-phosphorothioate
  modified_base 14: mod_base = OTHER; note = 2-fluororibose guanine
  modified_base 14..15: mod_base = OTHER; note = S-phosphorothioate
  modified_base 15: mod_base = OTHER; note = 2-fluororibose uracil
  modified_base 15..16: mod_base = OTHER; note = S-phosphorothioate
  modified_base 16: mod_base = cm
  modified_base 16..17: mod_base = OTHER; note = S-phosphorothioate
  modified_base 17: mod_base = cm
  modified_base 17..18: mod_base = OTHER; note = S-phosphorothioate
  modified_base 18: mod_base = cm
  modified_base 18..19: mod_base = OTHER; note = S-phosphorothioate
  modified_base 19: mod_base = OTHER; note = 2-fluororibose uracil
  modified_base 19..20: mod_base = OTHER; note = S-phosphorothioate
  modified_base 20: mod_base = um
  modified_base 20..21: mod_base = OTHER; note = S-phosphorothioate
  modified_base 21: mod_base = um
  modified_base 21..22: mod_base = OTHER; note = S-phosphorothioate
  modified_base 22: mod_base = cm
  modified_base 22..23: mod_base = OTHER; note = S-phosphorothioate
  modified_base 23: mod_base = OTHER; note = 2-fluororibose uracil
  modified_base 23..24: mod_base = OTHER; note = S-phosphorothioate
  modified_base 24: mod_base = OTHER; note = deoxyribose 6-amino-9-substituted 8,9-dihydro-7H-purin-8-one
  modified_base 24..25: mod_base = OTHER; note = S-phosphorothioate
  modified_base 25: mod_base = OTHER; note = deoxyribose inosine
  modified_base 25..26: mod_base = OTHER; note S-N-(1,3-dimethylimidazolidin-2-ylidene)phosphoramidate
  modified_base 26: mod_base = um
  modified_base 26..27: mod_base = OTHER; note = S-phosphorothioate
  modified_base 27: mod_base = cm
  modified_base 27..28: mod_base = OTHER; note = S-phosphorothioate
  modified_base 28: mod_base = gm
  modified_base 28..29: mod_base = OTHER; note = S-phosphorothioate
  modified_base 29: mod_base = OTHER; note = 2-O-methylribose adenine
  modified_base 29..30: mod_base = OTHER; note R-N-(1,3-dimethylimidazolidin-2-ylidene)phosphoramidate
  modified_base 30: mod_base = um
  source 1..30: mol_type = other RNA

SEQ ID NO: 220 - RNA, 30 nt, synthetic construct; identical to SEQ ID NO: 134
  misc_feature 1..30: note = Synthetic: WV-43013
  misc_feature 1..30: note = Synthetic: ADR-0103568
  modified_base 1: mod_base = OTHER; note = 2-fluororibose cytosine
  modified_base 1..2: mod_base = OTHER; note R-N-(1,3-dimethylimidazolidin-2-ylidene)phosphoramidate
  modified_base 2: mod_base = OTHER; note = 2-fluororibose cytosine
  modified_base 2..3: mod_base = OTHER; note = S-phosphorothioate
  modified_base 3: mod_base = OTHER; note = 2-fluororibose cytosine
  modified_base 3..4: mod_base = OTHER; note = S-phosphorothioate
  modified_base 4: mod_base = OTHER; note = 2-fluororibose adenine
  modified_base 4..5: mod_base = OTHER; note = S-phosphorothioate
  modified_base 5: mod_base = OTHER; note = 2-fluororibose guanine
  modified_base 5..6: mod_base = OTHER; note = S-phosphorothioate
  modified_base 6: mod_base = OTHER; note = 2-fluororibose cytosine
  modified_base 6..7: mod_base = OTHER; note = S-phosphorothioate
  modified_base 7: mod_base = OTHER; note = 2-fluororibose adenine
  modified_base 7..8: mod_base = OTHER; note = S-phosphorothioate
  modified_base 8: mod_base = OTHER; note = 2-fluororibose guanine
  modified_base 8..9: mod_base = OTHER; note = S-phosphorothioate
  modified_base 9: mod_base = OTHER; note = 2-fluororibose cytosine
  modified_base 9..10: mod_base = OTHER; note = S-phosphorothioate
  modified_base 10: mod_base = OTHER; note = 2-fluororibose uracil
  modified_base 10..11: mod_base = OTHER; note = S-phosphorothioate
  modified_base 11: mod_base = OTHER; note = 2-fluororibose uracil
  modified_base 11..12: mod_base = OTHER; note = S-phosphorothioate
  modified_base 12: mod_base = OTHER; note = 2-fluororibose cytosine
  modified_base 12..13: mod_base = OTHER; note = S-phosphorothioate
  modified_base 13: mod_base = OTHER; note = 2-fluororibose adenine
  modified_base 13..14: mod_base = OTHER; note = S-phosphorothioate
  modified_base 14: mod_base = OTHER; note = 2-fluororibose guanine
  modified_base 14..15: mod_base = OTHER; note = S-phosphorothioate
  modified_base 15: mod_base = OTHER; note = 2-fluororibose uracil
  modified_base 15..16: mod_base = OTHER; note = S-phosphorothioate
  modified_base 16: mod_base = cm
  modified_base 16..17: mod_base = OTHER; note = S-phosphorothioate
  modified_base 17: mod_base = cm
  modified_base 17..18: mod_base = OTHER; note = S-phosphorothioate
  modified_base 18: mod_base = OTHER; note = 2-fluororibose cytosine
  modified_base 18..19: mod_base = OTHER; note = S-phosphorothioate
  modified_base 19: mod_base = um
  modified_base 19..20: mod_base = OTHER; note = S-phosphorothioate
  modified_base 20: mod_base = um
  modified_base 20..21: mod_base = OTHER; note = S-phosphorothioate
  modified_base 21: mod_base = um
  modified_base 21..22: mod_base = OTHER; note = S-phosphorothioate
  modified_base 22: mod_base = cm
  modified_base 22..23: mod_base = OTHER; note = S-phosphorothioate
  modified_base 23: mod_base = OTHER; note = 2-fluororibose uracil
  modified_base 23..24: mod_base = OTHER; note = S-phosphorothioate
  modified_base 24: mod_base = OTHER; note = deoxyribose 6-amino-9-substituted 8,9-dihydro-7H-purin-8-one
  modified_base 24..25: mod_base = OTHER; note = S-phosphorothioate
  modified_base 25: mod_base = OTHER; note = deoxyribose inosine
  modified_base 25..26: mod_base = OTHER; note S-N-(1,3-dimethylimidazolidin-2-ylidene)phosphoramidate
  modified_base 26: mod_base = um
  modified_base 26..27: mod_base = OTHER; note = S-phosphorothioate
  modified_base 27: mod_base = cm
  modified_base 27..28: mod_base = OTHER; note = S-phosphorothioate
  modified_base 28: mod_base = gm
  modified_base 28..29: mod_base = OTHER; note = S-phosphorothioate
  modified_base 29: mod_base = OTHER; note = 2-O-methylribose adenine
  modified_base 29..30: mod_base = OTHER; note R-N-(1,3-dimethylimidazolidin-2-ylidene)phosphoramidate
  modified_base 30: mod_base = um
  source 1..30: mol_type = other RNA

SEQ ID NO: 221 - RNA, 30 nt, synthetic construct; identical to SEQ ID NO: 134
  misc_feature 1..30: note = Synthetic: WV-43012
  misc_feature 1..30: note = Synthetic: ADR-0103566
  modified_base 1: mod_base = OTHER; note = 2-fluororibose cytosine
  modified_base 1..2: mod_base = OTHER; note R-N-(1,3-dimethylimidazolidin-2-ylidene)phosphoramidate
  modified_base 2: mod_base = OTHER; note = 2-fluororibose cytosine
  modified_base 2..3: mod_base = OTHER; note = S-phosphorothioate
  modified_base 3: mod_base = OTHER; note = 2-fluororibose cytosine
  modified_base 3..4: mod_base = OTHER; note = S-phosphorothioate
  modified_base 4: mod_base = OTHER; note = 2-fluororibose adenine
  modified_base 4..5: mod_base = OTHER; note = S-phosphorothioate
  modified_base 5: mod_base = OTHER; note = 2-fluororibose guanine
  modified_base 5..6: mod_base = OTHER; note = S-phosphorothioate
  modified_base 6: mod_base = OTHER; note = 2-fluororibose cytosine
  modified_base 6..7: mod_base = OTHER; note = S-phosphorothioate
  modified_base 7: mod_base = OTHER; note = 2-fluororibose adenine
  modified_base 7..8: mod_base = OTHER; note = S-phosphorothioate
  modified_base 8: mod_base = OTHER; note = 2-fluororibose guanine
  modified_base 8..9: mod_base = OTHER; note = S-phosphorothioate
  modified_base 9: mod_base = OTHER; note = 2-fluororibose cytosine
  modified_base 9..10: mod_base = OTHER; note = S-phosphorothioate
  modified_base 10: mod_base = OTHER; note = 2-fluororibose uracil
  modified_base 10..11: mod_base = OTHER; note = S-phosphorothioate
  modified_base 11: mod_base = OTHER; note = 2-fluororibose uracil
  modified_base 11..12: mod_base = OTHER; note = S-phosphorothioate
  modified_base 12: mod_base = OTHER; note = 2-fluororibose cytosine
  modified_base 12..13: mod_base = OTHER; note = S-phosphorothioate
  modified_base 13: mod_base = OTHER; note = 2-fluororibose adenine
  modified_base 13..14: mod_base = OTHER; note = S-phosphorothioate
  modified_base 14: mod_base = OTHER; note = 2-fluororibose guanine
  modified_base 14..15: mod_base = OTHER; note = S-phosphorothioate
  modified_base 15: mod_base = OTHER; note = 2-fluororibose uracil
  modified_base 15..16: mod_base = OTHER; note = S-phosphorothioate
  modified_base 16: mod_base = cm
  modified_base 16..17: mod_base = OTHER; note = S-phosphorothioate
  modified_base 17: mod_base = OTHER; note = 2-fluororibose cytosine
  modified_base 17..18: mod_base = OTHER; note = S-phosphorothioate
  modified_base 18: mod_base = cm
  modified_base 18..19: mod_base = OTHER; note = S-phosphorothioate
  modified_base 19: mod_base = um
  modified_base 19..20: mod_base = OTHER; note = S-phosphorothioate
  modified_base 20: mod_base = um
  modified_base 20..21: mod_base = OTHER; note = S-phosphorothioate
  modified_base 21: mod_base = um
  modified_base 21..22: mod_base = OTHER; note = S-phosphorothioate
  modified_base 22: mod_base = cm
  modified_base 22..23: mod_base = OTHER; note = S-phosphorothioate
  modified_base 23: mod_base = OTHER; note = 2-fluororibose uracil
  modified_base 23..24: mod_base = OTHER; note = S-phosphorothioate
  modified_base 24: mod_base = OTHER; note = deoxyribose 6-amino-9-substituted 8,9-dihydro-7H-purin-8-one
  modified_base 24..25: mod_base = OTHER; note = S-phosphorothioate
  modified_base 25: mod_base = OTHER; note = deoxyribose inosine
  modified_base 25..26: mod_base = OTHER; note S-N-(1,3-dimethylimidazolidin-2-ylidene)phosphoramidate
  modified_base 26: mod_base = um
  modified_base 26..27: mod_base = OTHER; note = S-phosphorothioate
  modified_base 27: mod_base = cm
  modified_base 27..28: mod_base = OTHER; note = S-phosphorothioate
  modified_base 28: mod_base = gm
  modified_base 28..29: mod_base = OTHER; note = S-phosphorothioate
  modified_base 29: mod_base = OTHER; note = 2-O-methylribose adenine
  modified_base 29..30: mod_base = OTHER; note R-N-(1,3-dimethylimidazolidin-2-ylidene)phosphoramidate
  modified_base 30: mod_base = um
  source 1..30: mol_type = other RNA

SEQ ID NO: 222 - RNA, 30 nt, synthetic construct; identical to SEQ ID NO: 134
  misc_feature 1..30: note = Synthetic: WV-43011
  misc_feature 1..30: note = Synthetic: ADR-0103564
  modified_base 1: mod_base = OTHER; note = 2-fluororibose cytosine
  modified_base 1..2: mod_base = OTHER; note R-N-(1,3-dimethylimidazolidin-2-ylidene)phosphoramidate
  modified_base 2: mod_base = OTHER; note = 2-fluororibose cytosine
  modified_base 2..3: mod_base = OTHER; note = S-phosphorothioate
  modified_base 3: mod_base = OTHER; note = 2-fluororibose cytosine
  modified_base 3..4: mod_base = OTHER; note = S-phosphorothioate
  modified_base 4: mod_base = OTHER; note = 2-fluororibose adenine
  modified_base 4..5: mod_base = OTHER; note = S-phosphorothioate
  modified_base 5: mod_base = OTHER; note = 2-fluororibose guanine
  modified_base 5..6: mod_base = OTHER; note = S-phosphorothioate
  modified_base 6: mod_base = OTHER; note = 2-fluororibose cytosine
  modified_base 6..7: mod_base = OTHER; note = S-phosphorothioate
  modified_base 7: mod_base = OTHER; note = 2-fluororibose adenine
  modified_base 7..8: mod_base = OTHER; note = S-phosphorothioate
  modified_base 8: mod_base = OTHER; note = 2-fluororibose guanine
  modified_base 8..9: mod_base = OTHER; note = S-phosphorothioate
  modified_base 9: mod_base = OTHER; note = 2-fluororibose cytosine
  modified_base 9..10: mod_base = OTHER; note = S-phosphorothioate
  modified_base 10: mod_base = OTHER; note = 2-fluororibose uracil
  modified_base 10..11: mod_base = OTHER; note = S-phosphorothioate
  modified_base 11: mod_base = OTHER; note = 2-fluororibose uracil
  modified_base 11..12: mod_base = OTHER; note = S-phosphorothioate
  modified_base 12: mod_base = OTHER; note = 2-fluororibose cytosine
  modified_base 12..13: mod_base = OTHER; note = S-phosphorothioate
  modified_base 13: mod_base = OTHER; note = 2-fluororibose adenine
  modified_base 13..14: mod_base = OTHER; note = S-phosphorothioate
  modified_base 14: mod_base = OTHER; note = 2-fluororibose guanine
  modified_base 14..15: mod_base = OTHER; note = S-phosphorothioate
  modified_base 15: mod_base = OTHER; note = 2-fluororibose uracil
  modified_base 15..16: mod_base = OTHER; note = S-phosphorothioate
  modified_base 16: mod_base = OTHER; note = 2-fluororibose cytosine
  modified_base 16..17: mod_base = OTHER; note = S-phosphorothioate
  modified_base 17: mod_base = cm
  modified_base 17..18: mod_base = OTHER; note = S-phosphorothioate
  modified_base 18: mod_base = cm
  modified_base 18..19: mod_base = OTHER; note = S-phosphorothioate
  modified_base 19: mod_base = um
  modified_base 19..20: mod_base = OTHER; note = S-phosphorothioate
  modified_base 20: mod_base = um
  modified_base 20..21: mod_base = OTHER; note = S-phosphorothioate
  modified_base 21: mod_base = um
  modified_base 21..22: mod_base = OTHER; note = S-phosphorothioate
  modified_base 22: mod_base = cm
  modified_base 22..23: mod_base = OTHER; note = S-phosphorothioate
  modified_base 23: mod_base = OTHER; note = 2-fluororibose uracil
  modified_base 23..24: mod_base = OTHER; note = S-phosphorothioate
  modified_base 24: mod_base = OTHER; note = deoxyribose 6-amino-9-substituted 8,9-dihydro-7H-purin-8-one
  modified_base 24..25: mod_base = OTHER; note = S-phosphorothioate
  modified_base 25: mod_base = OTHER; note = deoxyribose inosine
  modified_base 25..26: mod_base = OTHER; note S-N-(1,3-dimethylimidazolidin-2-ylidene)phosphoramidate
  modified_base 26: mod_base = um
  modified_base 26..27: mod_base = OTHER; note = S-phosphorothioate
  modified_base 27: mod_base = cm
  modified_base 27..28: mod_base = OTHER; note = S-phosphorothioate
  modified_base 28: mod_base = gm
  modified_base 28..29: mod_base = OTHER; note = S-phosphorothioate
  modified_base 29: mod_base = OTHER; note = 2-O-methylribose adenine
  modified_base 29..30: mod_base = OTHER; note R-N-(1,3-dimethylimidazolidin-2-ylidene)phosphoramidate
  modified_base 30: mod_base = um
  source 1..30: mol_type = other RNA

SEQ ID NO: 223 - RNA, 30 nt, synthetic construct; identical to SEQ ID NO: 134
  misc_feature 1..30: note = Synthetic: WV-43037
  misc_feature 1..30: note = Synthetic: ADR-0103670
  modified_base 1: mod_base = OTHER; note = 2-fluororibose cytosine
  modified_base 1..2: mod_base = OTHER; note R-N-(1,3-dimethylimidazolidin-2-ylidene)phosphoramidate
  modified_base 2: mod_base = OTHER; note = 2-fluororibose cytosine
  modified_base 2..3: mod_base = OTHER; note = S-phosphorothioate
  modified_base 3: mod_base = OTHER; note = 2-fluororibose cytosine
  modified_base 3..4: mod_base = OTHER; note = S-phosphorothioate
  modified_base 4: mod_base = OTHER; note = 2-fluororibose adenine
  modified_base 4..5: mod_base = OTHER; note = S-phosphorothioate
  modified_base 5: mod_base = OTHER; note = 2-fluororibose guanine
  modified_base 5..6: mod_base = OTHER; note = S-phosphorothioate
  modified_base 6: mod_base = OTHER; note = 2-fluororibose cytosine
  modified_base 6..7: mod_base = OTHER; note = S-phosphorothioate
  modified_base 7: mod_base = OTHER; note = 2-fluororibose adenine
  modified_base 7..8: mod_base = OTHER; note = S-phosphorothioate
  modified_base 8: mod_base = OTHER; note = 2-fluororibose guanine
  modified_base 8..9: mod_base = OTHER; note = S-phosphorothioate
  modified_base 9: mod_base = OTHER; note = 2-fluororibose cytosine
  modified_base 9..10: mod_base = OTHER; note = S-phosphorothioate
  modified_base 10: mod_base = OTHER; note = 2-fluororibose uracil
  modified_base 10..11: mod_base = OTHER; note = S-phosphorothioate
  modified_base 11: mod_base = OTHER; note = 2-fluororibose uracil
  modified_base 11..12: mod_base = OTHER; note = S-phosphorothioate
  modified_base 12: mod_base = OTHER; note = 2-fluororibose cytosine
  modified_base 12..13: mod_base = OTHER; note = S-phosphorothioate
  modified_base 13: mod_base = OTHER; note = 2-fluororibose adenine
  modified_base 13..14: mod_base = OTHER; note = S-phosphorothioate
  modified_base 14: mod_base = OTHER; note = 2-fluororibose guanine
  modified_base 14..15: mod_base = OTHER; note = S-phosphorothioate
  modified_base 15: mod_base = um
  modified_base 15..16: mod_base = OTHER; note = S-phosphorothioate
  modified_base 16: mod_base = cm
  modified_base 16..17: mod_base = OTHER; note = S-phosphorothioate
  modified_base 17: mod_base = cm
  modified_base 17..18: mod_base = OTHER; note = S-phosphorothioate
  modified_base 18: mod_base = cm
  modified_base 18..19: mod_base = OTHER; note = S-phosphorothioate
  modified_base 19: mod_base = um
  modified_base 19..20: mod_base = OTHER; note = S-phosphorothioate
  modified_base 20: mod_base = um
  modified_base 20..21: mod_base = OTHER; note = S-phosphorothioate
  modified_base 21: mod_base = um
  modified_base 21..22: mod_base = OTHER; note = S-phosphorothioate
  modified_base 22: mod_base = cm
  modified_base 22..23: mod_base = OTHER; note = S-phosphorothioate
  modified_base 23: mod_base = OTHER; note = 2-fluororibose uracil
  modified_base 23..24: mod_base = OTHER; note = S-phosphorothioate
  modified_base 24: mod_base = OTHER; note = deoxyribose 6-amino-9-substituted 8,9-dihydro-7H-purin-8-one
  modified_base 24..25: mod_base = OTHER; note = S-phosphorothioate
  modified_base 25: mod_base = OTHER; note = deoxyribose inosine
  modified_base 25..26: mod_base = OTHER; note S-N-(1,3-dimethylimidazolidin-2-ylidene)phosphoramidate
  modified_base 26: mod_base = um
  modified_base 26..27: mod_base = OTHER; note = S-phosphorothioate
  modified_base 27: mod_base = cm
  modified_base 27..28: mod_base = OTHER; note = S-phosphorothioate
  modified_base 28: mod_base = gm
  modified_base 28..29: mod_base = OTHER; note = S-phosphorothioate
  modified_base 29: mod_base = OTHER; note = 2-O-methylribose adenine
  modified_base 29..30: mod_base = OTHER; note R-N-(1,3-dimethylimidazolidin-2-ylidene)phosphoramidate
  modified_base 30: mod_base = um
  source 1..30: mol_type = other RNA

SEQ ID NO: 224 - RNA, 30 nt, synthetic construct; identical to SEQ ID NO: 134
  misc_feature 1..30: note = Synthetic: WV-43036
  misc_feature 1..30: note = Synthetic: ADR-0103673
  modified_base 1: mod_base = OTHER; note = 2-fluororibose cytosine
  modified_base 1..2: mod_base = OTHER; note R-N-(1,3-dimethylimidazolidin-2-ylidene)phosphoramidate
  modified_base 2: mod_base = OTHER; note = 2-fluororibose cytosine
  modified_base 2..3: mod_base = OTHER; note = S-phosphorothioate
  modified_base 3: mod_base = OTHER; note = 2-fluororibose cytosine
  modified_base 3..4: mod_base = OTHER; note = S-phosphorothioate
  modified_base 4: mod_base = OTHER; note = 2-fluororibose adenine
  modified_base 4..5: mod_base = OTHER; note = S-phosphorothioate
  modified_base 5: mod_base = OTHER; note = 2-fluororibose guanine
  modified_base 5..6: mod_base = OTHER; note = S-phosphorothioate
  modified_base 6: mod_base = OTHER; note = 2-fluororibose cytosine
  modified_base 6..7: mod_base = OTHER; note = S-phosphorothioate
  modified_base 7: mod_base = OTHER; note = 2-fluororibose adenine
  modified_base 7..8: mod_base = OTHER; note = S-phosphorothioate
  modified_base 8: mod_base = OTHER; note = 2-fluororibose guanine
  modified_base 8..9: mod_base = OTHER; note = S-phosphorothioate
  modified_base 9: mod_base = OTHER; note = 2-fluororibose cytosine
  modified_base 9..10: mod_base = OTHER; note = S-phosphorothioate
  modified_base 10: mod_base = OTHER; note = 2-fluororibose uracil
  modified_base 10..11: mod_base = OTHER; note = S-phosphorothioate
  modified_base 11: mod_base = OTHER; note = 2-fluororibose uracil
  modified_base 11..12: mod_base = OTHER; note = S-phosphorothioate
  modified_base 12: mod_base = OTHER; note = 2-fluororibose cytosine
  modified_base 12..13: mod_base = OTHER; note = S-phosphorothioate
  modified_base 13: mod_base = OTHER; note = 2-fluororibose adenine
  modified_base 13..14: mod_base = OTHER; note = S-phosphorothioate
  modified_base 14: mod_base = gm
  modified_base 14..15: mod_base = OTHER; note = S-phosphorothioate
  modified_base 15: mod_base = OTHER; note = 2-fluororibose uracil
  modified_base 15..16: mod_base = OTHER; note = S-phosphorothioate
  modified_base 16: mod_base = cm
  modified_base 16..17: mod_base = OTHER; note = S-phosphorothioate
  modified_base 17: mod_base = cm
  modified_base 17..18: mod_base = OTHER; note = S-phosphorothioate
  modified_base 18: mod_base = cm
  modified_base 18..19: mod_base = OTHER; note = S-phosphorothioate
  modified_base 19: mod_base = um
  modified_base 19..20: mod_base = OTHER; note = S-phosphorothioate
  modified_base 20: mod_base = um
  modified_base 20..21: mod_base = OTHER; note = S-phosphorothioate
  modified_base 21: mod_base = um
  modified_base 21..22: mod_base = OTHER; note = S-phosphorothioate
  modified_base 22: mod_base = cm
  modified_base 22..23: mod_base = OTHER; note = S-phosphorothioate
  modified_base 23: mod_base = OTHER; note = 2-fluororibose uracil
  modified_base 23..24: mod_base = OTHER; note = S-phosphorothioate
  modified_base 24: mod_base = OTHER; note = deoxyribose 6-amino-9-substituted 8,9-dihydro-7H-purin-8-one
  modified_base 24..25: mod_base = OTHER; note = S-phosphorothioate
  modified_base 25: mod_base = OTHER; note = deoxyribose inosine
  modified_base 25..26: mod_base = OTHER; note S-N-(1,3-dimethylimidazolidin-2-ylidene)phosphoramidate
  modified_base 26: mod_base = um
  modified_base 26..27: mod_base = OTHER; note = S-phosphorothioate
  modified_base 27: mod_base = cm
  modified_base 27..28: mod_base = OTHER; note = S-phosphorothioate
  modified_base 28: mod_base = gm
  modified_base 28..29: mod_base = OTHER; note = S-phosphorothioate
  modified_base 29: mod_base = OTHER; note = 2-O-methylribose adenine
  modified_base 29..30: mod_base = OTHER; note R-N-(1,3-dimethylimidazolidin-2-ylidene)phosphoramidate
  modified_base 30: mod_base = um
  source 1..30: mol_type = other RNA

SEQ ID NO: 225 - RNA, 30 nt, synthetic construct; identical to SEQ ID NO: 134
  misc_feature 1..30: note = Synthetic: WV-43035
  misc_feature 1..30: note = Synthetic: ADR-0103675
  modified_base 1: mod_base = OTHER; note = 2-fluororibose cytosine
  modified_base 1..2: mod_base = OTHER; note R-N-(1,3-dimethylimidazolidin-2-ylidene)phosphoramidate
  modified_base 2: mod_base = OTHER; note = 2-fluororibose cytosine
  modified_base 2..3: mod_base = OTHER; note = S-phosphorothioate
  modified_base 3: mod_base = OTHER; note = 2-fluororibose cytosine
  modified_base 3..4: mod_base = OTHER; note = S-phosphorothioate
  modified_base 4: mod_base = OTHER; note = 2-fluororibose adenine
  modified_base 4..5: mod_base = OTHER; note = S-phosphorothioate
  modified_base 5: mod_base = OTHER; note = 2-fluororibose guanine
  modified_base 5..6: mod_base = OTHER; note = S-phosphorothioate
  modified_base 6: mod_base = OTHER; note = 2-fluororibose cytosine
  modified_base 6..7: mod_base = OTHER; note = S-phosphorothioate
  modified_base 7: mod_base = OTHER; note = 2-fluororibose adenine
  modified_base 7..8: mod_base = OTHER; note = S-phosphorothioate
  modified_base 8: mod_base = OTHER; note = 2-fluororibose guanine
  modified_base 8..9: mod_base = OTHER; note = S-phosphorothioate
  modified_base 9: mod_base = OTHER; note = 2-fluororibose cytosine
  modified_base 9..10: mod_base = OTHER; note = S-phosphorothioate
  modified_base 10: mod_base = OTHER; note = 2-fluororibose uracil
  modified_base 10..11: mod_base = OTHER; note = S-phosphorothioate
  modified_base 11: mod_base = OTHER; note = 2-fluororibose uracil
  modified_base 11..12: mod_base = OTHER; note = S-phosphorothioate
  modified_base 12: mod_base = OTHER; note = 2-fluororibose cytosine
  modified_base 12..13: mod_base = OTHER; note = S-phosphorothioate
  modified_base 13: mod_base = OTHER; note = 2-O-methylribose adenine
  modified_base 13..14: mod_base = OTHER; note = S-phosphorothioate
  modified_base 14: mod_base = OTHER; note = 2-fluororibose guanine
  modified_base 14..15: mod_base = OTHER; note = S-phosphorothioate
  modified_base 15: mod_base = OTHER; note = 2-fluororibose uracil
  modified_base 15..16: mod_base = OTHER; note = S-phosphorothioate
  modified_base 16: mod_base = cm
  modified_base 16..17: mod_base = OTHER; note = S-phosphorothioate
  modified_base 17: mod_base = cm
  modified_base 17..18: mod_base = OTHER; note = S-phosphorothioate
  modified_base 18: mod_base = cm
  modified_base 18..19: mod_base = OTHER; note = S-phosphorothioate
  modified_base 19: mod_base = um
  modified_base 19..20: mod_base = OTHER; note = S-phosphorothioate
  modified_base 20: mod_base = um
  modified_base 20..21: mod_base = OTHER; note = S-phosphorothioate
  modified_base 21: mod_base = um
  modified_base 21..22: mod_base = OTHER; note = S-phosphorothioate
  modified_base 22: mod_base = cm
  modified_base 22..23: mod_base = OTHER; note = S-phosphorothioate
  modified_base 23: mod_base = OTHER; note = 2-fluororibose uracil
  modified_base 23..24: mod_base = OTHER; note = S-phosphorothioate
  modified_base 24: mod_base = OTHER; note = deoxyribose 6-amino-9-substituted 8,9-dihydro-7H-purin-8-one
  modified_base 24..25: mod_base = OTHER; note = S-phosphorothioate
  modified_base 25: mod_base = OTHER; note = deoxyribose inosine
  modified_base 25..26: mod_base = OTHER; note S-N-(1,3-dimethylimidazolidin-2-ylidene)phosphoramidate
  modified_base 26: mod_base = um
  modified_base 26..27: mod_base = OTHER; note = S-phosphorothioate
  modified_base 27: mod_base = cm
  modified_base 27..28: mod_base = OTHER; note = S-phosphorothioate
  modified_base 28: mod_base = gm
  modified_base 28..29: mod_base = OTHER; note = S-phosphorothioate
  modified_base 29: mod_base = OTHER; note = 2-O-methylribose adenine
  modified_base 29..30: mod_base = OTHER; note R-N-(1,3-dimethylimidazolidin-2-ylidene)phosphoramidate
  modified_base 30: mod_base = um
  source 1..30: mol_type = other RNA

SEQ ID NO: 226 - RNA, 30 nt, synthetic construct; identical to SEQ ID NO: 134
  misc_feature 1..30: note = Synthetic: WV-43034
  misc_feature 1..30: note = Synthetic: ADR-0103677
  modified_base 1: mod_base = OTHER; note = 2-fluororibose cytosine
  modified_base 1..2: mod_base = OTHER; note R-N-(1,3-dimethylimidazolidin-2-ylidene)phosphoramidate
  modified_base 2: mod_base = OTHER; note = 2-fluororibose cytosine
  modified_base 2..3: mod_base = OTHER; note = S-phosphorothioate
  modified_base 3: mod_base = OTHER; note = 2-fluororibose cytosine
  modified_base 3..4: mod_base = OTHER; note = S-phosphorothioate
  modified_base 4: mod_base = OTHER; note = 2-fluororibose adenine
  modified_base 4..5: mod_base = OTHER; note = S-phosphorothioate
  modified_base 5: mod_base = OTHER; note = 2-fluororibose guanine
  modified_base 5..6: mod_base = OTHER; note = S-phosphorothioate
  modified_base 6: mod_base = OTHER; note = 2-fluororibose cytosine
  modified_base 6..7: mod_base = OTHER; note = S-phosphorothioate
  modified_base 7: mod_base = OTHER; note = 2-fluororibose adenine
  modified_base 7..8: mod_base = OTHER; note = S-phosphorothioate
  modified_base 8: mod_base = OTHER; note = 2-fluororibose guanine
  modified_base 8..9: mod_base = OTHER; note = S-phosphorothioate
  modified_base 9: mod_base = OTHER; note = 2-fluororibose cytosine
  modified_base 9..10: mod_base = OTHER; note = S-phosphorothioate
  modified_base 10: mod_base = OTHER; note = 2-fluororibose uracil
  modified_base 10..11: mod_base = OTHER; note = S-phosphorothioate
  modified_base 11: mod_base = OTHER; note = 2-fluororibose uracil
  modified_base 11..12: mod_base = OTHER; note = S-phosphorothioate
  modified_base 12: mod_base = cm
  modified_base 12..13: mod_base = OTHER; note = S-phosphorothioate
  modified_base 13: mod_base = OTHER; note = 2-fluororibose adenine
  modified_base 13..14: mod_base = OTHER; note = S-phosphorothioate
  modified_base 14: mod_base = OTHER; note = 2-fluororibose guanine
  modified_base 14..15: mod_base = OTHER; note = S-phosphorothioate
  modified_base 15: mod_base = OTHER; note = 2-fluororibose uracil
  modified_base 15..16: mod_base = OTHER; note = S-phosphorothioate
  modified_base 16: mod_base = cm
  modified_base 16..17: mod_base = OTHER; note = S-phosphorothioate
  modified_base 17: mod_base = cm
  modified_base 17..18: mod_base = OTHER; note = S-phosphorothioate
  modified_base 18: mod_base = cm
  modified_base 18..19: mod_base = OTHER; note = S-phosphorothioate
  modified_base 19: mod_base = um
  modified_base 19..20: mod_base = OTHER; note = S-phosphorothioate
  modified_base 20: mod_base = um
  modified_base 20..21: mod_base = OTHER; note = S-phosphorothioate
  modified_base 21: mod_base = um
  modified_base 21..22: mod_base = OTHER; note = S-phosphorothioate
  modified_base 22: mod_base = cm
  modified_base 22..23: mod_base = OTHER; note = S-phosphorothioate
  modified_base 23: mod_base = OTHER; note = 2-fluororibose uracil
  modified_base 23..24: mod_base = OTHER; note = S-phosphorothioate
  modified_base 24: mod_base = OTHER; note = deoxyribose 6-amino-9-substituted 8,9-dihydro-7H-purin-8-one
  modified_base 24..25: mod_base = OTHER; note = S-phosphorothioate
  modified_base 25: mod_base = OTHER; note = deoxyribose inosine
  modified_base 25..26: mod_base = OTHER; note S-N-(1,3-dimethylimidazolidin-2-ylidene)phosphoramidate
  modified_base 26: mod_base = um
  modified_base 26..27: mod_base = OTHER; note = S-phosphorothioate
  modified_base 27: mod_base = cm
  modified_base 27..28: mod_base = OTHER; note = S-phosphorothioate
  modified_base 28: mod_base = gm
  modified_base 28..29: mod_base = OTHER; note = S-phosphorothioate
  modified_base 29: mod_base = OTHER; note = 2-O-methylribose adenine
  modified_base 29..30: mod_base = OTHER; note R-N-(1,3-dimethylimidazolidin-2-ylidene)phosphoramidate
  modified_base 30: mod_base = um
  source 1..30: mol_type = other RNA

SEQ ID NO: 227 - RNA, 30 nt, synthetic construct; identical to SEQ ID NO: 134
  misc_feature 1..30: note = Synthetic: WV-43033
  misc_feature 1..30: note = Synthetic: ADR-0103679
  modified_base 1: mod_base = OTHER; note = 2-fluororibose cytosine
  modified_base 1..2: mod_base = OTHER; note R-N-(1,3-dimethylimidazolidin-2-ylidene)phosphoramidate
  modified_base 2: mod_base = OTHER; note = 2-fluororibose cytosine
  modified_base 2..3: mod_base = OTHER; note = S-phosphorothioate
  modified_base 3: mod_base = OTHER; note = 2-fluororibose cytosine
  modified_base 3..4: mod_base = OTHER; note = S-phosphorothioate
  modified_base 4: mod_base = OTHER; note = 2-fluororibose adenine
  modified_base 4..5: mod_base = OTHER; note = S-phosphorothioate
  modified_base 5: mod_base = OTHER; note = 2-fluororibose guanine
  modified_base 5..6: mod_base = OTHER; note = S-phosphorothioate
  modified_base 6: mod_base = OTHER; note = 2-fluororibose cytosine
  modified_base 6..7: mod_base = OTHER; note = S-phosphorothioate
  modified_base 7: mod_base = OTHER; note = 2-fluororibose adenine
  modified_base 7..8: mod_base = OTHER; note = S-phosphorothioate
  modified_base 8: mod_base = OTHER; note = 2-fluororibose guanine
  modified_base 8..9: mod_base = OTHER; note = S-phosphorothioate
  modified_base 9: mod_base = OTHER; note = 2-fluororibose cytosine
  modified_base 9..10: mod_base = OTHER; note = S-phosphorothioate
  modified_base 10: mod_base = OTHER; note = 2-fluororibose uracil
  modified_base 10..11: mod_base = OTHER; note = S-phosphorothioate
  modified_base 11: mod_base = um
  modified_base 11..12: mod_base = OTHER; note = S-phosphorothioate
  modified_base 12: mod_base = OTHER; note = 2-fluororibose cytosine
  modified_base 12..13: mod_base = OTHER; note = S-phosphorothioate
  modified_base 13: mod_base = OTHER; note = 2-fluororibose adenine
  modified_base 13..14: mod_base = OTHER; note = S-phosphorothioate
  modified_base 14: mod_base = OTHER; note = 2-fluororibose guanine
  modified_base 14..15: mod_base = OTHER; note = S-phosphorothioate
  modified_base 15: mod_base = OTHER; note = 2-fluororibose uracil
  modified_base 15..16: mod_base = OTHER; note = S-phosphorothioate
  modified_base 16: mod_base = cm
  modified_base 16..17: mod_base = OTHER; note = S-phosphorothioate
  modified_base 17: mod_base = cm
  modified_base 17..18: mod_base = OTHER; note = S-phosphorothioate
  modified_base 18: mod_base = cm
  modified_base 18..19: mod_base = OTHER; note = S-phosphorothioate
  modified_base 19: mod_base = um
  modified_base 19..20: mod_base = OTHER; note = S-phosphorothioate
  modified_base 20: mod_base = um
  modified_base 20..21: mod_base = OTHER; note = S-phosphorothioate
  modified_base 21: mod_base = um
  modified_base 21..22: mod_base = OTHER; note = S-phosphorothioate
  modified_base 22: mod_base = cm
  modified_base 22..23: mod_base = OTHER; note = S-phosphorothioate
  modified_base 23: mod_base = OTHER; note = 2-fluororibose uracil
  modified_base 23..24: mod_base = OTHER; note = S-phosphorothioate
  modified_base 24: mod_base = OTHER; note = deoxyribose 6-amino-9-substituted 8,9-dihydro-7H-purin-8-one
  modified_base 24..25: mod_base = OTHER; note = S-phosphorothioate
  modified_base 25: mod_base = OTHER; note = deoxyribose inosine
  modified_base 25..26: mod_base = OTHER; note S-N-(1,3-dimethylimidazolidin-2-ylidene)phosphoramidate
  modified_base 26: mod_base = um
  modified_base 26..27: mod_base = OTHER; note = S-phosphorothioate
  modified_base 27: mod_base = cm
  modified_base 27..28: mod_base = OTHER; note = S-phosphorothioate
  modified_base 28: mod_base = gm
  modified_base 28..29: mod_base = OTHER; note = S-phosphorothioate
  modified_base 29: mod_base = OTHER; note = 2-O-methylribose adenine
  modified_base 29..30: mod_base = OTHER; note R-N-(1,3-dimethylimidazolidin-2-ylidene)phosphoramidate
  modified_base 30: mod_base = um
  source 1..30: mol_type = other RNA

SEQ ID NO: 228 - RNA, 30 nt, synthetic construct; identical to SEQ ID NO: 134
  misc_feature 1..30: note = Synthetic: WV-43032
  misc_feature 1..30: note = Synthetic: ADR-0103681
  modified_base 1: mod_base = OTHER; note = 2-fluororibose cytosine
  modified_base 1..2: mod_base = OTHER; note R-N-(1,3-dimethylimidazolidin-2-ylidene)phosphoramidate
  modified_base 2: mod_base = OTHER; note = 2-fluororibose cytosine
  modified_base 2..3: mod_base = OTHER; note = S-phosphorothioate
  modified_base 3: mod_base = OTHER; note = 2-fluororibose cytosine
  modified_base 3..4: mod_base = OTHER; note = S-phosphorothioate
  modified_base 4: mod_base = OTHER; note = 2-fluororibose adenine
  modified_base 4..5: mod_base = OTHER; note = S-phosphorothioate
  modified_base 5: mod_base = OTHER; note = 2-fluororibose guanine
  modified_base 5..6: mod_base = OTHER; note = S-phosphorothioate
  modified_base 6: mod_base = OTHER; note = 2-fluororibose cytosine
  modified_base 6..7: mod_base = OTHER; note = S-phosphorothioate
  modified_base 7: mod_base = OTHER; note = 2-fluororibose adenine
  modified_base 7..8: mod_base = OTHER; note = S-phosphorothioate
  modified_base 8: mod_base = OTHER; note = 2-fluororibose guanine
  modified_base 8..9: mod_base = OTHER; note = S-phosphorothioate
  modified_base 9: mod_base = OTHER; note = 2-fluororibose cytosine
  modified_base 9..10: mod_base = OTHER; note = S-phosphorothioate
  modified_base 10: mod_base = um
  modified_base 10..11: mod_base = OTHER; note = S-phosphorothioate
  modified_base 11: mod_base = OTHER; note = 2-fluororibose uracil
  modified_base 11..12: mod_base = OTHER; note = S-phosphorothioate
  modified_base 12: mod_base = OTHER; note = 2-fluororibose cytosine
  modified_base 12..13: mod_base = OTHER; note = S-phosphorothioate
  modified_base 13: mod_base = OTHER; note = 2-fluororibose adenine
  modified_base 13..14: mod_base = OTHER; note = S-phosphorothioate
  modified_base 14: mod_base = OTHER; note = 2-fluororibose guanine
  modified_base 14..15: mod_base = OTHER; note = S-phosphorothioate
  modified_base 15: mod_base = OTHER; note = 2-fluororibose uracil
  modified_base 15..16: mod_base = OTHER; note = S-phosphorothioate
  modified_base 16: mod_base = cm
  modified_base 16..17: mod_base = OTHER; note = S-phosphorothioate
  modified_base 17: mod_base = cm
  modified_base 17..18: mod_base = OTHER; note = S-phosphorothioate
  modified_base 18: mod_base = cm
  modified_base 18..19: mod_base = OTHER; note = S-phosphorothioate
  modified_base 19: mod_base = um
  modified_base 19..20: mod_base = OTHER; note = S-phosphorothioate
  modified_base 20: mod_base = um
  modified_base 20..21: mod_base = OTHER; note = S-phosphorothioate
  modified_base 21: mod_base = um
  modified_base 21..22: mod_base = OTHER; note = S-phosphorothioate
  modified_base 22: mod_base = cm
  modified_base 22..23: mod_base = OTHER; note = S-phosphorothioate
  modified_base 23: mod_base = OTHER; note = 2-fluororibose uracil
  modified_base 23..24: mod_base = OTHER; note = S-phosphorothioate
  modified_base 24: mod_base = OTHER; note = deoxyribose 6-amino-9-substituted 8,9-dihydro-7H-purin-8-one
  modified_base 24..25: mod_base = OTHER; note = S-phosphorothioate
  modified_base 25: mod_base = OTHER; note = deoxyribose inosine
  modified_base 25..26: mod_base = OTHER; note S-N-(1,3-dimethylimidazolidin-2-ylidene)phosphoramidate
  modified_base 26: mod_base = um
  modified_base 26..27: mod_base = OTHER; note = S-phosphorothioate
  modified_base 27: mod_base = cm
  modified_base 27..28: mod_base = OTHER; note = S-phosphorothioate
  modified_base 28: mod_base = gm
  modified_base 28..29: mod_base = OTHER; note = S-phosphorothioate
  modified_base 29: mod_base = OTHER; note = 2-O-methylribose adenine
  modified_base 29..30: mod_base = OTHER; note R-N-(1,3-dimethylimidazolidin-2-ylidene)phosphoramidate
  modified_base 30: mod_base = um
  source 1..30: mol_type = other RNA

SEQ ID NO: 229 - RNA, 30 nt, synthetic construct; identical to SEQ ID NO: 134
  misc_feature 1..30: note = Synthetic: WV-43031
  misc_feature 1..30: note = Synthetic: ADR-0103683
  modified_base 1: mod_base = OTHER; note = 2-fluororibose cytosine
  modified_base 1..2: mod_base = OTHER; note R-N-(1,3-dimethylimidazolidin-2-ylidene)phosphoramidate
  modified_base 2: mod_base = OTHER; note = 2-fluororibose cytosine
  modified_base 2..3: mod_base = OTHER; note = S-phosphorothioate
  modified_base 3: mod_base = OTHER; note = 2-fluororibose cytosine
  modified_base 3..4: mod_base = OTHER; note = S-phosphorothioate
  modified_base 4: mod_base = OTHER; note = 2-fluororibose adenine
  modified_base 4..5: mod_base = OTHER; note = S-phosphorothioate
  modified_base 5: mod_base = OTHER; note = 2-fluororibose guanine
  modified_base 5..6: mod_base = OTHER; note = S-phosphorothioate
  modified_base 6: mod_base = OTHER; note = 2-fluororibose cytosine
  modified_base 6..7: mod_base = OTHER; note = S-phosphorothioate
  modified_base 7: mod_base = OTHER; note = 2-fluororibose adenine
  modified_base 7..8: mod_base = OTHER; note = S-phosphorothioate
  modified_base 8: mod_base = OTHER; note = 2-fluororibose guanine
  modified_base 8..9: mod_base = OTHER; note = S-phosphorothioate
  modified_base 9: mod_base = cm
  modified_base 9..10: mod_base = OTHER; note = S-phosphorothioate
  modified_base 10: mod_base = OTHER; note = 2-fluororibose uracil
  modified_base 10..11: mod_base = OTHER; note = S-phosphorothioate
  modified_base 11: mod_base = OTHER; note = 2-fluororibose uracil
  modified_base 11..12: mod_base = OTHER; note = S-phosphorothioate
  modified_base 12: mod_base = OTHER; note = 2-fluororibose cytosine
  modified_base 12..13: mod_base = OTHER; note = S-phosphorothioate
  modified_base 13: mod_base = OTHER; note = 2-fluororibose adenine
  modified_base 13..14: mod_base = OTHER; note = S-phosphorothioate
  modified_base 14: mod_base = OTHER; note = 2-fluororibose guanine
  modified_base 14..15: mod_base = OTHER; note = S-phosphorothioate
  modified_base 15: mod_base = OTHER; note = 2-fluororibose uracil
  modified_base 15..16: mod_base = OTHER; note = S-phosphorothioate
  modified_base 16: mod_base = cm
  modified_base 16..17: mod_base = OTHER; note = S-phosphorothioate
  modified_base 17: mod_base = cm
  modified_base 17..18: mod_base = OTHER; note = S-phosphorothioate
  modified_base 18: mod_base = cm
  modified_base 18..19: mod_base = OTHER; note = S-phosphorothioate
  modified_base 19: mod_base = um
  modified_base 19..20: mod_base = OTHER; note = S-phosphorothioate
  modified_base 20: mod_base = um
  modified_base 20..21: mod_base = OTHER; note = S-phosphorothioate
  modified_base 21: mod_base = um
  modified_base 21..22: mod_base = OTHER; note = S-phosphorothioate
  modified_base 22: mod_base = cm
  modified_base 22..23: mod_base = OTHER; note = S-phosphorothioate
  modified_base 23: mod_base = OTHER; note = 2-fluororibose uracil
  modified_base 23..24: mod_base = OTHER; note = S-phosphorothioate
  modified_base 24: mod_base = OTHER; note = deoxyribose 6-amino-9-substituted 8,9-dihydro-7H-purin-8-one
  modified_base 24..25: mod_base = OTHER; note = S-phosphorothioate
  modified_base 25: mod_base = OTHER; note = deoxyribose inosine
  modified_base 25..26: mod_base = OTHER; note S-N-(1,3-dimethylimidazolidin-2-ylidene)phosphoramidate
  modified_base 26: mod_base = um
  modified_base 26..27: mod_base = OTHER; note = S-phosphorothioate
  modified_base 27: mod_base = cm
  modified_base 27..28: mod_base = OTHER; note = S-phosphorothioate
  modified_base 28: mod_base = gm
  modified_base 28..29: mod_base = OTHER; note = S-phosphorothioate
  modified_base 29: mod_base = OTHER; note = 2-O-methylribose adenine
  modified_base 29..30: mod_base = OTHER; note R-N-(1,3-dimethylimidazolidin-2-ylidene)phosphoramidate
  modified_base 30: mod_base = um
  source 1..30: mol_type = other RNA

SEQ ID NO: 230 - RNA, 30 nt, synthetic construct; identical to SEQ ID NO: 134
  misc_feature 1..30: note = Synthetic: WV-43030
  misc_feature 1..30: note = Synthetic: ADR-0103685
  modified_base 1: mod_base = OTHER; note = 2-fluororibose cytosine
  modified_base 1..2: mod_base = OTHER; note R-N-(1,3-dimethylimidazolidin-2-ylidene)phosphoramidate
  modified_base 2: mod_base = OTHER; note = 2-fluororibose cytosine
  modified_base 2..3: mod_base = OTHER; note = S-phosphorothioate
  modified_base 3: mod_base = OTHER; note = 2-fluororibose cytosine
  modified_base 3..4: mod_base = OTHER; note = S-phosphorothioate
  modified_base 4: mod_base = OTHER; note = 2-fluororibose adenine
  modified_base 4..5: mod_base = OTHER; note = S-phosphorothioate
  modified_base 5: mod_base = OTHER; note = 2-fluororibose guanine
  modified_base 5..6: mod_base = OTHER; note = S-phosphorothioate
  modified_base 6: mod_base = OTHER; note = 2-fluororibose cytosine
  modified_base 6..7: mod_base = OTHER; note = S-phosphorothioate
  modified_base 7: mod_base = OTHER; note = 2-fluororibose adenine
  modified_base 7..8: mod_base = OTHER; note = S-phosphorothioate
  modified_base 8: mod_base = gm
  modified_base 8..9: mod_base = OTHER; note = S-phosphorothioate
  modified_base 9: mod_base = OTHER; note = 2-fluororibose cytosine
  modified_base 9..10: mod_base = OTHER; note = S-phosphorothioate
  modified_base 10: mod_base = OTHER; note = 2-fluororibose uracil
  modified_base 10..11: mod_base = OTHER; note = S-phosphorothioate
  modified_base 11: mod_base = OTHER; note = 2-fluororibose uracil
  modified_base 11..12: mod_base = OTHER; note = S-phosphorothioate
  modified_base 12: mod_base = OTHER; note = 2-fluororibose cytosine
  modified_base 12..13: mod_base = OTHER; note = S-phosphorothioate
  modified_base 13: mod_base = OTHER; note = 2-fluororibose adenine
  modified_base 13..14: mod_base = OTHER; note = S-phosphorothioate
  modified_base 14: mod_base = OTHER; note = 2-fluororibose guanine
  modified_base 14..15: mod_base = OTHER; note = S-phosphorothioate
  modified_base 15: mod_base = OTHER; note = 2-fluororibose uracil
  modified_base 15..16: mod_base = OTHER; note = S-phosphorothioate
  modified_base 16: mod_base = cm
  modified_base 16..17: mod_base = OTHER; note = S-phosphorothioate
  modified_base 17: mod_base = cm
  modified_base 17..18: mod_base = OTHER; note = S-phosphorothioate
  modified_base 18: mod_base = cm
  modified_base 18..19: mod_base = OTHER; note = S-phosphorothioate
  modified_base 19: mod_base = um
  modified_base 19..20: mod_base = OTHER; note = S-phosphorothioate
  modified_base 20: mod_base = um
  modified_base 20..21: mod_base = OTHER; note = S-phosphorothioate
  modified_base 21: mod_base = um
  modified_base 21..22: mod_base = OTHER; note = S-phosphorothioate
  modified_base 22: mod_base = cm
  modified_base 22..23: mod_base = OTHER; note = S-phosphorothioate
  modified_base 23: mod_base = OTHER; note = 2-fluororibose uracil
  modified_base 23..24: mod_base = OTHER; note = S-phosphorothioate
  modified_base 24: mod_base = OTHER; note = deoxyribose 6-amino-9-substituted 8,9-dihydro-7H-purin-8-one
  modified_base 24..25: mod_base = OTHER; note = S-phosphorothioate
  modified_base 25: mod_base = OTHER; note = deoxyribose inosine
  modified_base 25..26: mod_base = OTHER; note S-N-(1,3-dimethylimidazolidin-2-ylidene)phosphoramidate
  modified_base 26: mod_base = um
  modified_base 26..27: mod_base = OTHER; note = S-phosphorothioate
  modified_base 27: mod_base = cm
  modified_base 27..28: mod_base = OTHER; note = S-phosphorothioate
  modified_base 28: mod_base = gm
  modified_base 28..29: mod_base = OTHER; note = S-phosphorothioate
  modified_base 29: mod_base = OTHER; note = 2-O-methylribose adenine
  modified_base 29..30: mod_base = OTHER; note R-N-(1,3-dimethylimidazolidin-2-ylidene)phosphoramidate
  modified_base 30: mod_base = um
  source 1..30: mol_type = other RNA

SEQ ID NO: 231 - RNA, 30 nt, synthetic construct; identical to SEQ ID NO: 134
  misc_feature 1..30: note = Synthetic: WV-43029
  misc_feature 1..30: note = Synthetic: ADR-0103687
  modified_base 1: mod_base = OTHER; note = 2-fluororibose cytosine
  modified_base 1..2: mod_base = OTHER; note R-N-(1,3-dimethylimidazolidin-2-ylidene)phosphoramidate
  modified_base 2: mod_base = OTHER; note = 2-fluororibose cytosine
  modified_base 2..3: mod_base = OTHER; note = S-phosphorothioate
  modified_base 3: mod_base = OTHER; note = 2-fluororibose cytosine
  modified_base 3..4: mod_base = OTHER; note = S-phosphorothioate
  modified_base 4: mod_base = OTHER; note = 2-fluororibose adenine
  modified_base 4..5: mod_base = OTHER; note = S-phosphorothioate
  modified_base 5: mod_base = OTHER; note = 2-fluororibose guanine
  modified_base 5..6: mod_base = OTHER; note = S-phosphorothioate
  modified_base 6: mod_base = OTHER; note = 2-fluororibose cytosine
  modified_base 6..7: mod_base = OTHER; note = S-phosphorothioate
  modified_base 7: mod_base = OTHER; note = 2-O-methylribose adenine
  modified_base 7..8: mod_base = OTHER; note = S-phosphorothioate
  modified_base 8: mod_base = OTHER; note = 2-fluororibose guanine
  modified_base 8..9: mod_base = OTHER; note = S-phosphorothioate
  modified_base 9: mod_base = OTHER; note = 2-fluororibose cytosine
  modified_base 9..10: mod_base = OTHER; note = S-phosphorothioate
  modified_base 10: mod_base = OTHER; note = 2-fluororibose uracil
  modified_base 10..11: mod_base = OTHER; note = S-phosphorothioate
  modified_base 11: mod_base = OTHER; note = 2-fluororibose uracil
  modified_base 11..12: mod_base = OTHER; note = S-phosphorothioate
  modified_base 12: mod_base = OTHER; note = 2-fluororibose cytosine
  modified_base 12..13: mod_base = OTHER; note = S-phosphorothioate
  modified_base 13: mod_base = OTHER; note = 2-fluororibose adenine
  modified_base 13..14: mod_base = OTHER; note = S-phosphorothioate
  modified_base 14: mod_base = OTHER; note = 2-fluororibose guanine
  modified_base 14..15: mod_base = OTHER; note = S-phosphorothioate
  modified_base 15: mod_base = OTHER; note = 2-fluororibose uracil
  modified_base 15..16: mod_base = OTHER; note = S-phosphorothioate
  modified_base 16: mod_base = cm
  modified_base 16..17: mod_base = OTHER; note = S-phosphorothioate
  modified_base 17: mod_base = cm
  modified_base 17..18: mod_base = OTHER; note = S-phosphorothioate
  modified_base 18: mod_base = cm
  modified_base 18..19: mod_base = OTHER; note = S-phosphorothioate
  modified_base 19: mod_base = um
  modified_base 19..20: mod_base = OTHER; note = S-phosphorothioate
  modified_base 20: mod_base = um
  modified_base 20..21: mod_base = OTHER; note = S-phosphorothioate
  modified_base 21: mod_base = um
  modified_base 21..22: mod_base = OTHER; note = S-phosphorothioate
  modified_base 22: mod_base = cm
  modified_base 22..23: mod_base = OTHER; note = S-phosphorothioate
  modified_base 23: mod_base = OTHER; note = 2-fluororibose uracil
  modified_base 23..24: mod_base = OTHER; note = S-phosphorothioate
  modified_base 24: mod_base = OTHER; note = deoxyribose 6-amino-9-substituted 8,9-dihydro-7H-purin-8-one
  modified_base 24..25: mod_base = OTHER; note = S-phosphorothioate
  modified_base 25: mod_base = OTHER; note = deoxyribose inosine
  modified_base 25..26: mod_base = OTHER; note S-N-(1,3-dimethylimidazolidin-2-ylidene)phosphoramidate
  modified_base 26: mod_base = um
  modified_base 26..27: mod_base = OTHER; note = S-phosphorothioate
  modified_base 27: mod_base = cm
  modified_base 27..28: mod_base = OTHER; note = S-phosphorothioate
  modified_base 28: mod_base = gm
  modified_base 28..29: mod_base = OTHER; note = S-phosphorothioate
  modified_base 29: mod_base = OTHER; note = 2-O-methylribose adenine
  modified_base 29..30: mod_base = OTHER; note R-N-(1,3-dimethylimidazolidin-2-ylidene)phosphoramidate
  modified_base 30: mod_base = um
  source 1..30: mol_type = other RNA

SEQ ID NO: 232 - RNA, 30 nt, synthetic construct; identical to SEQ ID NO: 134
  misc_feature 1..30: note = Synthetic: WV-43028
  misc_feature 1..30: note = Synthetic: ADR-0103689
  modified_base 1: mod_base = OTHER; note = 2-fluororibose cytosine
  modified_base 1..2: mod_base = OTHER; note R-N-(1,3-dimethylimidazolidin-2-ylidene)phosphoramidate
  modified_base 2: mod_base = OTHER; note = 2-fluororibose cytosine
  modified_base 2..3: mod_base = OTHER; note = S-phosphorothioate
  modified_base 3: mod_base = OTHER; note = 2-fluororibose cytosine
  modified_base 3..4: mod_base = OTHER; note = S-phosphorothioate
  modified_base 4: mod_base = OTHER; note = 2-fluororibose adenine
  modified_base 4..5: mod_base = OTHER; note = S-phosphorothioate
  modified_base 5: mod_base = OTHER; note = 2-fluororibose guanine
  modified_base 5..6: mod_base = OTHER; note = S-phosphorothioate
  modified_base 6: mod_base = cm
  modified_base 6..7: mod_base = OTHER; note = S-phosphorothioate
  modified_base 7: mod_base = OTHER; note = 2-fluororibose adenine
  modified_base 7..8: mod_base = OTHER; note = S-phosphorothioate
  modified_base 8: mod_base = OTHER; note = 2-fluororibose guanine
  modified_base 8..9: mod_base = OTHER; note = S-phosphorothioate
  modified_base 9: mod_base = OTHER; note = 2-fluororibose cytosine
  modified_base 9..10: mod_base = OTHER; note = S-phosphorothioate
  modified_base 10: mod_base = OTHER; note = 2-fluororibose uracil
  modified_base 10..11: mod_base = OTHER; note = S-phosphorothioate
  modified_base 11: mod_base = OTHER; note = 2-fluororibose uracil
  modified_base 11..12: mod_base = OTHER; note = S-phosphorothioate
  modified_base 12: mod_base = OTHER; note = 2-fluororibose cytosine
  modified_base 12..13: mod_base = OTHER; note = S-phosphorothioate
  modified_base 13: mod_base = OTHER; note = 2-fluororibose adenine
  modified_base 13..14: mod_base = OTHER; note = S-phosphorothioate
  modified_base 14: mod_base = OTHER; note = 2-fluororibose guanine
  modified_base 14..15: mod_base = OTHER; note = S-phosphorothioate
  modified_base 15: mod_base = OTHER; note = 2-fluororibose uracil
  modified_base 15..16: mod_base = OTHER; note = S-phosphorothioate
  modified_base 16: mod_base = cm
  modified_base 16..17: mod_base = OTHER; note = S-phosphorothioate
  modified_base 17: mod_base = cm
  modified_base 17..18: mod_base = OTHER; note = S-phosphorothioate
  modified_base 18: mod_base = cm
  modified_base 18..19: mod_base = OTHER; note = S-phosphorothioate
  modified_base 19: mod_base = um
  modified_base 19..20: mod_base = OTHER; note = S-phosphorothioate
  modified_base 20: mod_base = um
  modified_base 20..21: mod_base = OTHER; note = S-phosphorothioate
  modified_base 21: mod_base = um
  modified_base 21..22: mod_base = OTHER; note = S-phosphorothioate
  modified_base 22: mod_base = cm
  modified_base 22..23: mod_base = OTHER; note = S-phosphorothioate
  modified_base 23: mod_base = OTHER; note = 2-fluororibose uracil
  modified_base 23..24: mod_base = OTHER; note = S-phosphorothioate
  modified_base 24: mod_base = OTHER; note = deoxyribose 6-amino-9-substituted 8,9-dihydro-7H-purin-8-one
  modified_base 24..25: mod_base = OTHER; note = S-phosphorothioate
  modified_base 25: mod_base = OTHER; note = deoxyribose inosine
  modified_base 25..26: mod_base = OTHER; note S-N-(1,3-dimethylimidazolidin-2-ylidene)phosphoramidate
  modified_base 26: mod_base = um
  modified_base 26..27: mod_base = OTHER; note = S-phosphorothioate
  modified_base 27: mod_base = cm
  modified_base 27..28: mod_base = OTHER; note = S-phosphorothioate
  modified_base 28: mod_base = gm
  modified_base 28..29: mod_base = OTHER; note = S-phosphorothioate
  modified_base 29: mod_base = OTHER; note = 2-O-methylribose adenine
  modified_base 29..30: mod_base = OTHER; note R-N-(1,3-dimethylimidazolidin-2-ylidene)phosphoramidate
  modified_base 30: mod_base = um
  source 1..30: mol_type = other RNA

SEQ ID NO: 233 - RNA, 30 nt, synthetic construct; identical to SEQ ID NO: 134
  misc_feature 1..30: note = Synthetic: WV-43027
  misc_feature 1..30: note = Synthetic: ADR-0103691
  modified_base 1: mod_base = OTHER; note = 2-fluororibose cytosine
  modified_base 1..2: mod_base = OTHER; note R-N-(1,3-dimethylimidazolidin-2-ylidene)phosphoramidate
  modified_base 2: mod_base = OTHER; note = 2-fluororibose cytosine
  modified_base 2..3: mod_base = OTHER; note = S-phosphorothioate
  modified_base 3: mod_base = OTHER; note = 2-fluororibose cytosine
  modified_base 3..4: mod_base = OTHER; note = S-phosphorothioate
  modified_base 4: mod_base = OTHER; note = 2-fluororibose adenine
  modified_base 4..5: mod_base = OTHER; note = S-phosphorothioate
  modified_base 5: mod_base = gm
  modified_base 5..6: mod_base = OTHER; note = S-phosphorothioate
  modified_base 6: mod_base = OTHER; note = 2-fluororibose cytosine
  modified_base 6..7: mod_base = OTHER; note = S-phosphorothioate
  modified_base 7: mod_base = OTHER; note = 2-fluororibose adenine
  modified_base 7..8: mod_base = OTHER; note = S-phosphorothioate
  modified_base 8: mod_base = OTHER; note = 2-fluororibose guanine
  modified_base 8..9: mod_base = OTHER; note = S-phosphorothioate
  modified_base 9: mod_base = OTHER; note = 2-fluororibose cytosine
  modified_base 9..10: mod_base = OTHER; note = S-phosphorothioate
  modified_base 10: mod_base = OTHER; note = 2-fluororibose uracil
  modified_base 10..11: mod_base = OTHER; note = S-phosphorothioate
  modified_base 11: mod_base = OTHER; note = 2-fluororibose uracil
  modified_base 11..12: mod_base = OTHER; note = S-phosphorothioate
  modified_base 12: mod_base = OTHER; note = 2-fluororibose cytosine
  modified_base 12..13: mod_base = OTHER; note = S-phosphorothioate
  modified_base 13: mod_base = OTHER; note = 2-fluororibose adenine
  modified_base 13..14: mod_base = OTHER; note = S-phosphorothioate
  modified_base 14: mod_base = OTHER; note = 2-fluororibose guanine
  modified_base 14..15: mod_base = OTHER; note = S-phosphorothioate
  modified_base 15: mod_base = OTHER; note = 2-fluororibose uracil
  modified_base 15..16: mod_base = OTHER; note = S-phosphorothioate
  modified_base 16: mod_base = cm
  modified_base 16..17: mod_base = OTHER; note = S-phosphorothioate
  modified_base 17: mod_base = cm
  modified_base 17..18: mod_base = OTHER; note = S-phosphorothioate
  modified_base 18: mod_base = cm
  modified_base 18..19: mod_base = OTHER; note = S-phosphorothioate
  modified_base 19: mod_base = um
  modified_base 19..20: mod_base = OTHER; note = S-phosphorothioate
  modified_base 20: mod_base = um
  modified_base 20..21: mod_base = OTHER; note = S-phosphorothioate
  modified_base 21: mod_base = um
  modified_base 21..22: mod_base = OTHER; note = S-phosphorothioate
  modified_base 22: mod_base = cm
  modified_base 22..23: mod_base = OTHER; note = S-phosphorothioate
  modified_base 23: mod_base = OTHER; note = 2-fluororibose uracil
  modified_base 23..24: mod_base = OTHER; note = S-phosphorothioate
  modified_base 24: mod_base = OTHER; note = deoxyribose 6-amino-9-substituted 8,9-dihydro-7H-purin-8-one
  modified_base 24..25: mod_base = OTHER; note = S-phosphorothioate
  modified_base 25: mod_base = OTHER; note = deoxyribose inosine
  modified_base 25..26: mod_base = OTHER; note S-N-(1,3-dimethylimidazolidin-2-ylidene)phosphoramidate
  modified_base 26: mod_base = um
  modified_base 26..27: mod_base = OTHER; note = S-phosphorothioate
  modified_base 27: mod_base = cm
  modified_base 27..28: mod_base = OTHER; note = S-phosphorothioate
  modified_base 28: mod_base = gm
  modified_base 28..29: mod_base = OTHER; note = S-phosphorothioate
  modified_base 29: mod_base = OTHER; note = 2-O-methylribose adenine
  modified_base 29..30: mod_base = OTHER; note R-N-(1,3-dimethylimidazolidin-2-ylidene)phosphoramidate
  modified_base 30: mod_base = um
  source 1..30: mol_type = other RNA

SEQ ID NO: 234 - RNA, 30 nt, synthetic construct; identical to SEQ ID NO: 134
  misc_feature 1..30: note = Synthetic: WV-43026
  misc_feature 1..30: note = Synthetic: ADR-0103756
  modified_base 1: mod_base = OTHER; note = 2-fluororibose cytosine
  modified_base 1..2: mod_base = OTHER; note R-N-(1,3-dimethylimidazolidin-2-ylidene)phosphoramidate
  modified_base 2: mod_base = OTHER; note = 2-fluororibose cytosine
  modified_base 2..3: mod_base = OTHER; note = S-phosphorothioate
  modified_base 3: mod_base = OTHER; note = 2-fluororibose cytosine
  modified_base 3..4: mod_base = OTHER; note = S-phosphorothioate
  modified_base 4: mod_base = OTHER; note = 2-O-methylribose adenine
  modified_base 4..5: mod_base = OTHER; note = S-phosphorothioate
  modified_base 5: mod_base = OTHER; note = 2-fluororibose guanine
  modified_base 5..6: mod_base = OTHER; note = S-phosphorothioate
  modified_base 6: mod_base = OTHER; note = 2-fluororibose cytosine
  modified_base 6..7: mod_base = OTHER; note = S-phosphorothioate
  modified_base 7: mod_base = OTHER; note = 2-fluororibose adenine
  modified_base 7..8: mod_base = OTHER; note = S-phosphorothioate
  modified_base 8: mod_base = OTHER; note = 2-fluororibose guanine
  modified_base 8..9: mod_base = OTHER; note = S-phosphorothioate
  modified_base 9: mod_base = OTHER; note = 2-fluororibose cytosine
  modified_base 9..10: mod_base = OTHER; note = S-phosphorothioate
  modified_base 10: mod_base = OTHER; note = 2-fluororibose uracil
  modified_base 10..11: mod_base = OTHER; note = S-phosphorothioate
  modified_base 11: mod_base = OTHER; note = 2-fluororibose uracil
  modified_base 11..12: mod_base = OTHER; note = S-phosphorothioate
  modified_base 12: mod_base = OTHER; note = 2-fluororibose cytosine
  modified_base 12..13: mod_base = OTHER; note = S-phosphorothioate
  modified_base 13: mod_base = OTHER; note = 2-fluororibose adenine
  modified_base 13..14: mod_base = OTHER; note = S-phosphorothioate
  modified_base 14: mod_base = OTHER; note = 2-fluororibose guanine
  modified_base 14..15: mod_base = OTHER; note = S-phosphorothioate
  modified_base 15: mod_base = OTHER; note = 2-fluororibose uracil
  modified_base 15..16: mod_base = OTHER; note = S-phosphorothioate
  modified_base 16: mod_base = cm
  modified_base 16..17: mod_base = OTHER; note = S-phosphorothioate
  modified_base 17: mod_base = cm
  modified_base 17..18: mod_base = OTHER; note = S-phosphorothioate
  modified_base 18: mod_base = cm
  modified_base 18..19: mod_base = OTHER; note = S-phosphorothioate
  modified_base 19: mod_base = um
  modified_base 19..20: mod_base = OTHER; note = S-phosphorothioate
  modified_base 20: mod_base = um
  modified_base 20..21: mod_base = OTHER; note = S-phosphorothioate
  modified_base 21: mod_base = um
  modified_base 21..22: mod_base = OTHER; note = S-phosphorothioate
  modified_base 22: mod_base = cm
  modified_base 22..23: mod_base = OTHER; note = S-phosphorothioate
  modified_base 23: mod_base = OTHER; note = 2-fluororibose uracil
  modified_base 23..24: mod_base = OTHER; note = S-phosphorothioate
  modified_base 24: mod_base = OTHER; note = deoxyribose 6-amino-9-substituted 8,9-dihydro-7H-purin-8-one
  modified_base 24..25: mod_base = OTHER; note = S-phosphorothioate
  modified_base 25: mod_base = OTHER; note = deoxyribose inosine
  modified_base 25..26: mod_base = OTHER; note S-N-(1,3-dimethylimidazolidin-2-ylidene)phosphoramidate
  modified_base 26: mod_base = um
  modified_base 26..27: mod_base = OTHER; note = S-phosphorothioate
  modified_base 27: mod_base = cm
  modified_base 27..28: mod_base = OTHER; note = S-phosphorothioate
  modified_base 28: mod_base = gm
  modified_base 28..29: mod_base = OTHER; note = S-phosphorothioate
  modified_base 29: mod_base = OTHER; note = 2-O-methylribose adenine
  modified_base 29..30: mod_base = OTHER; note R-N-(1,3-dimethylimidazolidin-2-ylidene)phosphoramidate
  modified_base 30: mod_base = um
  source 1..30: mol_type = other RNA

SEQ ID NO: 235 - RNA, 30 nt, synthetic construct; identical to SEQ ID NO: 134
  misc_feature 1..30: note = Synthetic: WV-43025
  misc_feature 1..30: note = Synthetic: ADR-0103764
  modified_base 1: mod_base = OTHER; note = 2-fluororibose cytosine
  modified_base 1..2: mod_base = OTHER; note R-N-(1,3-dimethylimidazolidin-2-ylidene)phosphoramidate
  modified_base 2: mod_base = OTHER; note = 2-fluororibose cytosine
  modified_base 2..3: mod_base = OTHER; note = S-phosphorothioate
  modified_base 3: mod_base = cm
  modified_base 3..4: mod_base = OTHER; note = S-phosphorothioate
  modified_base 4: mod_base = OTHER; note = 2-fluororibose adenine
  modified_base 4..5: mod_base = OTHER; note = S-phosphorothioate
  modified_base 5: mod_base = OTHER; note = 2-fluororibose guanine
  modified_base 5..6: mod_base = OTHER; note = S-phosphorothioate
  modified_base 6: mod_base = OTHER; note = 2-fluororibose cytosine
  modified_base 6..7: mod_base = OTHER; note = S-phosphorothioate
  modified_base 7: mod_base = OTHER; note = 2-fluororibose adenine
  modified_base 7..8: mod_base = OTHER; note = S-phosphorothioate
  modified_base 8: mod_base = OTHER; note = 2-fluororibose guanine
  modified_base 8..9: mod_base = OTHER; note = S-phosphorothioate
  modified_base 9: mod_base = OTHER; note = 2-fluororibose cytosine
  modified_base 9..10: mod_base = OTHER; note = S-phosphorothioate
  modified_base 10: mod_base = OTHER; note = 2-fluororibose uracil
  modified_base 10..11: mod_base = OTHER; note = S-phosphorothioate
  modified_base 11: mod_base = OTHER; note = 2-fluororibose uracil
  modified_base 11..12: mod_base = OTHER; note = S-phosphorothioate
  modified_base 12: mod_base = OTHER; note = 2-fluororibose cytosine
  modified_base 12..13: mod_base = OTHER; note = S-phosphorothioate
  modified_base 13: mod_base = OTHER; note = 2-fluororibose adenine
  modified_base 13..14: mod_base = OTHER; note = S-phosphorothioate
  modified_base 14: mod_base = OTHER; note = 2-fluororibose guanine
  modified_base 14..15: mod_base = OTHER; note = S-phosphorothioate
  modified_base 15: mod_base = OTHER; note = 2-fluororibose uracil
  modified_base 15..16: mod_base = OTHER; note = S-phosphorothioate
  modified_base 16: mod_base = cm
  modified_base 16..17: mod_base = OTHER; note = S-phosphorothioate
  modified_base 17: mod_base = cm
  modified_base 17..18: mod_base = OTHER; note = S-phosphorothioate
  modified_base 18: mod_base = cm
  modified_base 18..19: mod_base = OTHER; note = S-phosphorothioate
  modified_base 19: mod_base = um
  modified_base 19..20: mod_base = OTHER; note = S-phosphorothioate
  modified_base 20: mod_base = um
  modified_base 20..21: mod_base = OTHER; note = S-phosphorothioate
  modified_base 21: mod_base = um
  modified_base 21..22: mod_base = OTHER; note = S-phosphorothioate
  modified_base 22: mod_base = cm
  modified_base 22..23: mod_base = OTHER; note = S-phosphorothioate
  modified_base 23: mod_base = OTHER; note = 2-fluororibose uracil
  modified_base 23..24: mod_base = OTHER; note = S-phosphorothioate
  modified_base 24: mod_base = OTHER; note = deoxyribose 6-amino-9-substituted 8,9-dihydro-7H-purin-8-one
  modified_base 24..25: mod_base = OTHER; note = S-phosphorothioate
  modified_base 25: mod_base = OTHER; note = deoxyribose inosine
  modified_base 25..26: mod_base = OTHER; note S-N-(1,3-dimethylimidazolidin-2-ylidene)phosphoramidate
  modified_base 26: mod_base = um
  modified_base 26..27: mod_base = OTHER; note = S-phosphorothioate
  modified_base 27: mod_base = cm
  modified_base 27..28: mod_base = OTHER; note = S-phosphorothioate
  modified_base 28: mod_base = gm
  modified_base 28..29: mod_base = OTHER; note = S-phosphorothioate
  modified_base 29: mod_base = OTHER; note = 2-O-methylribose adenine
  modified_base 29..30: mod_base = OTHER; note R-N-(1,3-dimethylimidazolidin-2-ylidene)phosphoramidate
  modified_base 30: mod_base = um
  source 1..30: mol_type = other RNA

SEQ ID NO: 236 - RNA, 30 nt, synthetic construct; identical to SEQ ID NO: 134
  misc_feature 1..30: note = Synthetic: WV-43024
  misc_feature 1..30: note = Synthetic: ADR-0103775
  modified_base 1: mod_base = OTHER; note = 2-fluororibose cytosine
  modified_base 1..2: mod_base = OTHER; note R-N-(1,3-dimethylimidazolidin-2-ylidene)phosphoramidate
  modified_base 2: mod_base = cm
  modified_base 2..3: mod_base = OTHER; note = S-phosphorothioate
  modified_base 3: mod_base = OTHER; note = 2-fluororibose cytosine
  modified_base 3..4: mod_base = OTHER; note = S-phosphorothioate
  modified_base 4: mod_base = OTHER; note = 2-fluororibose adenine
  modified_base 4..5: mod_base = OTHER; note = S-phosphorothioate
  modified_base 5: mod_base = OTHER; note = 2-fluororibose guanine
  modified_base 5..6: mod_base = OTHER; note = S-phosphorothioate
  modified_base 6: mod_base = OTHER; note = 2-fluororibose cytosine
  modified_base 6..7: mod_base = OTHER; note = S-phosphorothioate
  modified_base 7: mod_base = OTHER; note = 2-fluororibose adenine
  modified_base 7..8: mod_base = OTHER; note = S-phosphorothioate
  modified_base 8: mod_base = OTHER; note = 2-fluororibose guanine
  modified_base 8..9: mod_base = OTHER; note = S-phosphorothioate
  modified_base 9: mod_base = OTHER; note = 2-fluororibose cytosine
  modified_base 9..10: mod_base = OTHER; note = S-phosphorothioate
  modified_base 10: mod_base = OTHER; note = 2-fluororibose uracil
  modified_base 10..11: mod_base = OTHER; note = S-phosphorothioate
  modified_base 11: mod_base = OTHER; note = 2-fluororibose uracil
  modified_base 11..12: mod_base = OTHER; note = S-phosphorothioate
  modified_base 12: mod_base = OTHER; note = 2-fluororibose cytosine
  modified_base 12..13: mod_base = OTHER; note = S-phosphorothioate
  modified_base 13: mod_base = OTHER; note = 2-fluororibose adenine
  modified_base 13..14: mod_base = OTHER; note = S-phosphorothioate
  modified_base 14: mod_base = OTHER; note = 2-fluororibose guanine
  modified_base 14..15: mod_base = OTHER; note = S-phosphorothioate
  modified_base 15: mod_base = OTHER; note = 2-fluororibose uracil
  modified_base 15..16: mod_base = OTHER; note = S-phosphorothioate
  modified_base 16: mod_base = cm
  modified_base 16..17: mod_base = OTHER; note = S-phosphorothioate
  modified_base 17: mod_base = cm
  modified_base 17..18: mod_base = OTHER; note = S-phosphorothioate
  modified_base 18: mod_base = cm
  modified_base 18..19: mod_base = OTHER; note = S-phosphorothioate
  modified_base 19: mod_base = um
  modified_base 19..20: mod_base = OTHER; note = S-phosphorothioate
  modified_base 20: mod_base = um
  modified_base 20..21: mod_base = OTHER; note = S-phosphorothioate
  modified_base 21: mod_base = um
  modified_base 21..22: mod_base = OTHER; note = S-phosphorothioate
  modified_base 22: mod_base = cm
  modified_base 22..23: mod_base = OTHER; note = S-phosphorothioate
  modified_base 23: mod_base = OTHER; note = 2-fluororibose uracil
  modified_base 23..24: mod_base = OTHER; note = S-phosphorothioate
  modified_base 24: mod_base = OTHER; note = deoxyribose 6-amino-9-substituted 8,9-dihydro-7H-purin-8-one
  modified_base 24..25: mod_base = OTHER; note = S-phosphorothioate
  modified_base 25: mod_base = OTHER; note = deoxyribose inosine
  modified_base 25..26: mod_base = OTHER; note S-N-(1,3-dimethylimidazolidin-2-ylidene)phosphoramidate
  modified_base 26: mod_base = um
  modified_base 26..27: mod_base = OTHER; note = S-phosphorothioate
  modified_base 27: mod_base = cm
  modified_base 27..28: mod_base = OTHER; note = S-phosphorothioate
  modified_base 28: mod_base = gm
  modified_base 28..29: mod_base = OTHER; note = S-phosphorothioate
  modified_base 29: mod_base = OTHER; note = 2-O-methylribose adenine
  modified_base 29..30: mod_base = OTHER; note R-N-(1,3-dimethylimidazolidin-2-ylidene)phosphoramidate
  modified_base 30: mod_base = um
  source 1..30: mol_type = other RNA

SEQ ID NO: 237 - RNA, 30 nt, synthetic construct; identical to SEQ ID NO: 134
  misc_feature 1..30: note = Synthetic: WV-43023
  misc_feature 1..30: note = Synthetic: ADR-0103974
  modified_base 1: mod_base = cm
  modified_base 1..2: mod_base = OTHER; note R-N-(1,3-dimethylimidazolidin-2-ylidene)phosphoramidate
  modified_base 2: mod_base = OTHER; note = 2-fluororibose cytosine
  modified_base 2..3: mod_base = OTHER; note = S-phosphorothioate
  modified_base 3: mod_base = OTHER; note = 2-fluororibose cytosine
  modified_base 3..4: mod_base = OTHER; note = S-phosphorothioate
  modified_base 4: mod_base = OTHER; note = 2-fluororibose adenine
  modified_base 4..5: mod_base = OTHER; note = S-phosphorothioate
  modified_base 5: mod_base = OTHER; note = 2-fluororibose guanine
  modified_base 5..6: mod_base = OTHER; note = S-phosphorothioate
  modified_base 6: mod_base = OTHER; note = 2-fluororibose cytosine
  modified_base 6..7: mod_base = OTHER; note = S-phosphorothioate
  modified_base 7: mod_base = OTHER; note = 2-fluororibose adenine
  modified_base 7..8: mod_base = OTHER; note = S-phosphorothioate
  modified_base 8: mod_base = OTHER; note = 2-fluororibose guanine
  modified_base 8..9: mod_base = OTHER; note = S-phosphorothioate
  modified_base 9: mod_base = OTHER; note = 2-fluororibose cytosine
  modified_base 9..10: mod_base = OTHER; note = S-phosphorothioate
  modified_base 10: mod_base = OTHER; note = 2-fluororibose uracil
  modified_base 10..11: mod_base = OTHER; note = S-phosphorothioate
  modified_base 11: mod_base = OTHER; note = 2-fluororibose uracil
  modified_base 11..12: mod_base = OTHER; note = S-phosphorothioate
  modified_base 12: mod_base = OTHER; note = 2-fluororibose cytosine
  modified_base 12..13: mod_base = OTHER; note = S-phosphorothioate
  modified_base 13: mod_base = OTHER; note = 2-fluororibose adenine
  modified_base 13..14: mod_base = OTHER; note = S-phosphorothioate
  modified_base 14: mod_base = OTHER; note = 2-fluororibose guanine
  modified_base 14..15: mod_base = OTHER; note = S-phosphorothioate
  modified_base 15: mod_base = OTHER; note = 2-fluororibose uracil
  modified_base 15..16: mod_base = OTHER; note = S-phosphorothioate
  modified_base 16: mod_base = cm
  modified_base 16..17: mod_base = OTHER; note = S-phosphorothioate
  modified_base 17: mod_base = cm
  modified_base 17..18: mod_base = OTHER; note = S-phosphorothioate
  modified_base 18: mod_base = cm
  modified_base 18..19: mod_base = OTHER; note = S-phosphorothioate
  modified_base 19: mod_base = um
  modified_base 19..20: mod_base = OTHER; note = S-phosphorothioate
  modified_base 20: mod_base = um
  modified_base 20..21: mod_base = OTHER; note = S-phosphorothioate
  modified_base 21: mod_base = um
  modified_base 21..22: mod_base = OTHER; note = S-phosphorothioate
  modified_base 22: mod_base = cm
  modified_base 22..23: mod_base = OTHER; note = S-phosphorothioate
  modified_base 23: mod_base = OTHER; note = 2-fluororibose uracil
  modified_base 23..24: mod_base = OTHER; note = S-phosphorothioate
  modified_base 24: mod_base = OTHER; note = deoxyribose 6-amino-9-substituted 8,9-dihydro-7H-purin-8-one
  modified_base 24..25: mod_base = OTHER; note = S-phosphorothioate
  modified_base 25: mod_base = OTHER; note = deoxyribose inosine
  modified_base 25..26: mod_base = OTHER; note S-N-(1,3-dimethylimidazolidin-2-ylidene)phosphoramidate
  modified_base 26: mod_base = um
  modified_base 26..27: mod_base = OTHER; note = S-phosphorothioate
  modified_base 27: mod_base = cm
  modified_base 27..28: mod_base = OTHER; note = S-phosphorothioate
  modified_base 28: mod_base = gm
  modified_base 28..29: mod_base = OTHER; note = S-phosphorothioate
  modified_base 29: mod_base = OTHER; note = 2-O-methylribose adenine
  modified_base 29..30: mod_base = OTHER; note R-N-(1,3-dimethylimidazolidin-2-ylidene)phosphoramidate
  modified_base 30: mod_base = um
  source 1..30: mol_type = other RNA

SEQ ID NO: 238 - RNA, 28 nt, synthetic construct
  misc_feature 1..28: note = Synthetic: WV-43057
  misc_feature 1..28: note = Synthetic: ADR-0103506
  modified_base 1: mod_base = OTHER; note = 2-fluororibose cytosine
  modified_base 1..2: mod_base = OTHER; note R-N-(1,3-dimethylimidazolidin-2-ylidene)phosphoramidate
  modified_base 2: mod_base = OTHER; note = 2-fluororibose adenine
  modified_base 2..3: mod_base = OTHER; note = S-phosphorothioate
  modified_base 3: mod_base = OTHER; note = 2-fluororibose guanine
  modified_base 3..4: mod_base = OTHER; note = S-phosphorothioate
  modified_base 4: mod_base = OTHER; note = 2-fluororibose cytosine
  modified_base 4..5: mod_base = OTHER; note = S-phosphorothioate
  modified_base 5: mod_base = OTHER; note = 2-fluororibose adenine
  modified_base 5..6: mod_base = OTHER; note = S-phosphorothioate
  modified_base 6: mod_base = OTHER; note = 2-fluororibose guanine
  modified_base 6..7: mod_base = OTHER; note = S-phosphorothioate
  modified_base 7: mod_base = OTHER; note = 2-fluororibose cytosine
  modified_base 7..8: mod_base = OTHER; note = S-phosphorothioate
  modified_base 8: mod_base = OTHER; note = 2-fluororibose uracil
  modified_base 8..9: mod_base = OTHER; note = S-phosphorothioate
  modified_base 9: mod_base = OTHER; note = 2-fluororibose uracil
  modified_base 9..10: mod_base = OTHER; note = S-phosphorothioate
  modified_base 10: mod_base = OTHER; note = 2-fluororibose cytosine
  modified_base 10..11: mod_base = OTHER; note = S-phosphorothioate
  modified_base 11: mod_base = OTHER; note = 2-fluororibose adenine
  modified_base 11..12: mod_base = OTHER; note = S-phosphorothioate
  modified_base 12: mod_base = OTHER; note = 2-fluororibose guanine
  modified_base 12..13: mod_base = OTHER; note = S-phosphorothioate
  modified_base 13: mod_base = OTHER; note = 2-fluororibose uracil
  modified_base 13..14: mod_base = OTHER; note = S-phosphorothioate
  modified_base 14: mod_base = OTHER; note = 2-fluororibose cytosine
  modified_base 14..15: mod_base = OTHER; note = S-phosphorothioate
  modified_base 15: mod_base = OTHER; note = 2-fluororibose cytosine
  modified_base 15..16: mod_base = OTHER; note = S-phosphorothioate
  modified_base 16: mod_base = cm
  modified_base 16..17: mod_base = OTHER; note = S-phosphorothioate
  modified_base 17: mod_base = um
  modified_base 17..18: mod_base = OTHER; note = S-phosphorothioate
  modified_base 18: mod_base = um
  modified_base 18..19: mod_base = OTHER; note = S-phosphorothioate
  modified_base 19: mod_base = um
  modified_base 19..20: mod_base = OTHER; note = S-phosphorothioate
  modified_base 20: mod_base = cm
  modified_base 20..21: mod_base = OTHER; note = S-phosphorothioate
  modified_base 21: mod_base = OTHER; note = 2-fluororibose uracil
  modified_base 21..22: mod_base = OTHER; note = S-phosphorothioate
  modified_base 22: mod_base = OTHER; note = deoxyribose 6-amino-9-substituted 8,9-dihydro-7H-purin-8-one
  modified_base 22..23: mod_base = OTHER; note = S-phosphorothioate
  modified_base 23: mod_base = OTHER; note = deoxyribose inosine
  modified_base 23..24: mod_base = OTHER; note S-N-(1,3-dimethylimidazolidin-2-ylidene)phosphoramidate
  modified_base 24: mod_base = um
  modified_base 24..25: mod_base = OTHER; note = S-phosphorothioate
  modified_base 25: mod_base = cm
  modified_base 25..26: mod_base = OTHER; note = S-phosphorothioate
  modified_base 26: mod_base = gm
  modified_base 26..27: mod_base = OTHER; note = S-phosphorothioate
  modified_base 27: mod_base = OTHER; note = 2-O-methylribose adenine
  modified_base 27..28: mod_base = OTHER; note R-N-(1,3-dimethylimidazolidin-2-ylidene)phosphoramidate
  modified_base 28: mod_base = um
  source 1..28: mol_type = other RNA
cagcagcttcagtccctttctagtcgat

SEQ ID NO: 239 - RNA, 28 nt, synthetic construct
  misc_feature 1..28: note = Synthetic: WV-43056
  misc_feature 1..28: note = Synthetic: ADR-0103521
  modified_base 1: mod_base = OTHER; note = 2-fluororibose cytosine
  modified_base 1..2: mod_base = OTHER; note R-N-(1,3-dimethylimidazolidin-2-ylidene)phosphoramidate
  modified_base 2: mod_base = OTHER; note = 2-fluororibose cytosine
  modified_base 2..3: mod_base = OTHER; note = S-phosphorothioate
  modified_base 3: mod_base = OTHER; note = 2-fluororibose adenine
  modified_base 3..4: mod_base = OTHER; note = S-phosphorothioate
  modified_base 4: mod_base = OTHER; note = 2-fluororibose guanine
  modified_base 4..5: mod_base = OTHER; note = S-phosphorothioate
  modified_base 5: mod_base = OTHER; note = 2-fluororibose cytosine
  modified_base 5..6: mod_base = OTHER; note = S-phosphorothioate
  modified_base 6: mod_base = OTHER; note = 2-fluororibose adenine
  modified_base 6..7: mod_base = OTHER; note = S-phosphorothioate
  modified_base 7: mod_base = OTHER; note = 2-fluororibose guanine
  modified_base 7..8: mod_base = OTHER; note = S-phosphorothioate
  modified_base 8: mod_base = OTHER; note = 2-fluororibose cytosine
  modified_base 8..9: mod_base = OTHER; note = S-phosphorothioate
  modified_base 9: mod_base = OTHER; note = 2-fluororibose uracil
  modified_base 9..10: mod_base = OTHER; note = S-phosphorothioate
  modified_base 10: mod_base = OTHER; note = 2-fluororibose uracil
  modified_base 10..11: mod_base = OTHER; note = S-phosphorothioate
  modified_base 11: mod_base = OTHER; note = 2-fluororibose cytosine
  modified_base 11..12: mod_base = OTHER; note = S-phosphorothioate
  modified_base 12: mod_base = OTHER; note = 2-fluororibose adenine
  modified_base 12..13: mod_base = OTHER; note = S-phosphorothioate
  modified_base 13: mod_base = OTHER; note = 2-fluororibose guanine
  modified_base 13..14: mod_base = OTHER; note = S-phosphorothioate
  modified_base 14: mod_base = OTHER; note = 2-fluororibose uracil
  modified_base 14..15: mod_base = OTHER; note = S-phosphorothioate
  modified_base 15: mod_base = OTHER; note = 2-fluororibose cytosine
  modified_base 15..16: mod_base = OTHER; note = S-phosphorothioate
  modified_base 16: mod_base = cm
  modified_base 16..17: mod_base = OTHER; note = S-phosphorothioate
  modified_base 17: mod_base = cm
  modified_base 17..18: mod_base = OTHER; note = S-phosphorothioate
  modified_base 18: mod_base = um
  modified_base 18..19: mod_base = OTHER; note = S-phosphorothioate
  modified_base 19: mod_base = um
  modified_base 19..20: mod_base = OTHER; note = S-phosphorothioate
  modified_base 20: mod_base = um
  modified_base 20..21: mod_base = OTHER; note = S-phosphorothioate
  modified_base 21: mod_base = cm
  modified_base 21..22: mod_base = OTHER; note = S-phosphorothioate
  modified_base 22: mod_base = OTHER; note = 2-fluororibose uracil
  modified_base 22..23: mod_base = OTHER; note = S-phosphorothioate
  modified_base 23: mod_base = OTHER; note = deoxyribose 6-amino-9-substituted 8,9-dihydro-7H-purin-8-one
  modified_base 23..24: mod_base = OTHER; note = S-phosphorothioate
  modified_base 24: mod_base = OTHER; note = deoxyribose inosine
  modified_base 24..25: mod_base = OTHER; note S-N-(1,3-dimethylimidazolidin-2-ylidene)phosphoramidate
  modified_base 25: mod_base = um
  modified_base 25..26: mod_base = OTHER; note = S-phosphorothioate
  modified_base 26: mod_base = cm
  modified_base 26..27: mod_base = OTHER; note = S-phosphorothioate
  modified_base 27: mod_base = gm
  modified_base 27..28: mod_base = OTHER; note R-N-(1,3-dimethylimidazolidin-2-ylidene)phosphoramidate
  modified_base 28: mod_base = OTHER; note = 2-O-methylribose adenine
  source 1..28: mol_type = other RNA
ccagcagcttcagtccctttctagtcga

SEQ ID NO: 240 - RNA, 28 nt, synthetic construct
  misc_feature 1..28: note = Synthetic: WV-43055
  misc_feature 1..28: note = Synthetic: ADR-0103628
  modified_base 1: mod_base = OTHER; note = 2-fluororibose cytosine
  modified_base 1..2: mod_base = OTHER; note R-N-(1,3-dimethylimidazolidin-2-ylidene)phosphoramidate
  modified_base 2: mod_base = OTHER; note = 2-fluororibose cytosine
  modified_base 2..3: mod_base = OTHER; note = S-phosphorothioate
  modified_base 3: mod_base = OTHER; note = 2-fluororibose cytosine
  modified_base 3..4: mod_base = OTHER; note = S-phosphorothioate
  modified_base 4: mod_base = OTHER; note = 2-fluororibose adenine
  modified_base 4..5: mod_base = OTHER; note = S-phosphorothioate
  modified_base 5: mod_base = OTHER; note = 2-fluororibose guanine
  modified_base 5..6: mod_base = OTHER; note = S-phosphorothioate
  modified_base 6: mod_base = OTHER; note = 2-fluororibose cytosine
  modified_base 6..7: mod_base = OTHER; note = S-phosphorothioate
  modified_base 7: mod_base = OTHER; note = 2-fluororibose adenine
  modified_base 7..8: mod_base = OTHER; note = S-phosphorothioate
  modified_base 8: mod_base = OTHER; note = 2-fluororibose guanine
  modified_base 8..9: mod_base = OTHER; note = S-phosphorothioate
  modified_base 9: mod_base = OTHER; note = 2-fluororibose cytosine
  modified_base 9..10: mod_base = OTHER; note = S-phosphorothioate
  modified_base 10: mod_base = OTHER; note = 2-fluororibose uracil
  modified_base 10..11: mod_base = OTHER; note = S-phosphorothioate
  modified_base 11: mod_base = OTHER; note = 2-fluororibose uracil
  modified_base 11..12: mod_base = OTHER; note = S-phosphorothioate
  modified_base 12: mod_base = OTHER; note = 2-fluororibose cytosine
  modified_base 12..13: mod_base = OTHER; note = S-phosphorothioate
  modified_base 13: mod_base = OTHER; note = 2-fluororibose adenine
  modified_base 13..14: mod_base = OTHER; note = S-phosphorothioate
  modified_base 14: mod_base = OTHER; note = 2-fluororibose guanine
  modified_base 14..15: mod_base = OTHER; note = S-phosphorothioate
  modified_base 15: mod_base = OTHER; note = 2-fluororibose uracil
  modified_base 15..16: mod_base = OTHER; note = S-phosphorothioate
  modified_base 16: mod_base = cm
  modified_base 16..17: mod_base = OTHER; note = S-phosphorothioate
  modified_base 17: mod_base = cm
  modified_base 17..18: mod_base = OTHER; note = S-phosphorothioate
  modified_base 18: mod_base = cm
  modified_base 18..19: mod_base = OTHER; note = S-phosphorothioate
  modified_base 19: mod_base = um
  modified_base 19..20: mod_base = OTHER; note = S-phosphorothioate
  modified_base 20: mod_base = um
  modified_base 20..21: mod_base = OTHER; note = S-phosphorothioate
  modified_base 21: mod_base = um
  modified_base 21..22: mod_base = OTHER; note = S-phosphorothioate
  modified_base 22: mod_base = cm
  modified_base 22..23: mod_base = OTHER; note = S-phosphorothioate
  modified_base 23: mod_base = OTHER; note = 2-fluororibose uracil
  modified_base 23..24: mod_base = OTHER; note = S-phosphorothioate
  modified_base 24: mod_base = OTHER; note = deoxyribose 6-amino-9-substituted 8,9-dihydro-7H-purin-8-one
  modified_base 24..25: mod_base = OTHER; note = S-phosphorothioate
  modified_base 25: mod_base = OTHER; note = deoxyribose inosine
  modified_base 25..26: mod_base = OTHER; note S-N-(1,3-dimethylimidazolidin-2-ylidene)phosphoramidate
  modified_base 26: mod_base = um
  modified_base 26..27: mod_base = OTHER; note = S-phosphorothioate
  modified_base 27: mod_base = cm
  modified_base 27..28: mod_base = OTHER; note R-N-(1,3-dimethylimidazolidin-2-ylidene)phosphoramidate
  modified_base 28: mod_base = gm
  source 1..28: mol_type = other RNA
cccagcagcttcagtccctttctagtcg

SEQ ID NO: 241 - RNA, 29 nt, synthetic construct
  misc_feature 1..29: note = Synthetic: WV-43054
  misc_feature 1..29: note = Synthetic: ADR-0103520
  modified_base 1: mod_base = OTHER; note = 2-fluororibose cytosine
  modified_base 1..2: mod_base = OTHER; note R-N-(1,3-dimethylimidazolidin-2-ylidene)phosphoramidate
  modified_base 2: mod_base = OTHER; note = 2-fluororibose cytosine
  modified_base 2..3: mod_base = OTHER; note = S-phosphorothioate
  modified_base 3: mod_base = OTHER; note = 2-fluororibose adenine
  modified_base 3..4: mod_base = OTHER; note = S-phosphorothioate
  modified_base 4: mod_base = OTHER; note = 2-fluororibose guanine
  modified_base 4..5: mod_base = OTHER; note = S-phosphorothioate
  modified_base 5: mod_base = OTHER; note = 2-fluororibose cytosine
  modified_base 5..6: mod_base = OTHER; note = S-phosphorothioate
  modified_base 6: mod_base = OTHER; note = 2-fluororibose adenine
  modified_base 6..7: mod_base = OTHER; note = S-phosphorothioate
  modified_base 7: mod_base = OTHER; note = 2-fluororibose guanine
  modified_base 7..8: mod_base = OTHER; note = S-phosphorothioate
  modified_base 8: mod_base = OTHER; note = 2-fluororibose cytosine
  modified_base 8..9: mod_base = OTHER; note = S-phosphorothioate
  modified_base 9: mod_base = OTHER; note = 2-fluororibose uracil
  modified_base 9..10: mod_base = OTHER; note = S-phosphorothioate
  modified_base 10: mod_base = OTHER; note = 2-fluororibose uracil
  modified_base 10..11: mod_base = OTHER; note = S-phosphorothioate
  modified_base 11: mod_base = OTHER; note = 2-fluororibose cytosine
  modified_base 11..12: mod_base = OTHER; note = S-phosphorothioate
  modified_base 12: mod_base = OTHER; note = 2-fluororibose adenine
  modified_base 12..13: mod_base = OTHER; note = S-phosphorothioate
  modified_base 13: mod_base = OTHER; note = 2-fluororibose guanine
  modified_base 13..14: mod_base = OTHER; note = S-phosphorothioate
  modified_base 14: mod_base = OTHER; note = 2-fluororibose uracil
  modified_base 14..15: mod_base = OTHER; note = S-phosphorothioate
  modified_base 15: mod_base = OTHER; note = 2-fluororibose cytosine
  modified_base 15..16: mod_base = OTHER; note = S-phosphorothioate
  modified_base 16: mod_base = cm
  modified_base 16..17: mod_base = OTHER; note = S-phosphorothioate
  modified_base 17: mod_base = cm
  modified_base 17..18: mod_base = OTHER; note = S-phosphorothioate
  modified_base 18: mod_base = um
  modified_base 18..19: mod_base = OTHER; note = S-phosphorothioate
  modified_base 19: mod_base = um
  modified_base 19..20: mod_base = OTHER; note = S-phosphorothioate
  modified_base 20: mod_base = um
  modified_base 20..21: mod_base = OTHER; note = S-phosphorothioate
  modified_base 21: mod_base = cm
  modified_base 21..22: mod_base = OTHER; note = S-phosphorothioate
  modified_base 22: mod_base = OTHER; note = 2-fluororibose uracil
  modified_base 22..23: mod_base = OTHER; note = S-phosphorothioate
  modified_base 23: mod_base = OTHER; note = deoxyribose 6-amino-9-substituted 8,9-dihydro-7H-purin-8-one
  modified_base 23..24: mod_base = OTHER; note = S-phosphorothioate
  modified_base 24: mod_base = OTHER; note = deoxyribose inosine
  modified_base 24..25: mod_base = OTHER; note S-N-(1,3-dimethylimidazolidin-2-ylidene)phosphoramidate
  modified_base 25: mod_base = um
  modified_base 25..26: mod_base = OTHER; note = S-phosphorothioate
  modified_base 26: mod_base = cm
  modified_base 26..27: mod_base = OTHER; note = S-phosphorothioate
  modified_base 27: mod_base = gm
  modified_base 27..28: mod_base = OTHER; note = S-phosphorothioate
  modified_base 28: mod_base = OTHER; note = 2-O-methylribose adenine
  modified_base 28..29: mod_base = OTHER; note R-N-(1,3-dimethylimidazolidin-2-ylidene)phosphoramidate
  modified_base 29: mod_base = um
  source 1..29: mol_type = other RNA
ccagcagcttcagtccctttctagtcgat

SEQ ID NO: 242 - RNA, 29 nt, synthetic construct
  misc_feature 1..29: note = Synthetic: WV-43053
  misc_feature 1..29: note = Synthetic: ADR-0103627
  modified_base 1: mod_base = OTHER; note = 2-fluororibose cytosine
  modified_base 1..2: mod_base = OTHER; note R-N-(1,3-dimethylimidazolidin-2-ylidene)phosphoramidate
  modified_base 2: mod_base = OTHER; note = 2-fluororibose cytosine
  modified_base 2..3: mod_base = OTHER; note = S-phosphorothioate
  modified_base 3: mod_base = OTHER; note = 2-fluororibose cytosine
  modified_base 3..4: mod_base = OTHER; note = S-phosphorothioate
  modified_base 4: mod_base = OTHER; note = 2-fluororibose adenine
  modified_base 4..5: mod_base = OTHER; note = S-phosphorothioate
  modified_base 5: mod_base = OTHER; note = 2-fluororibose guanine
  modified_base 5..6: mod_base = OTHER; note = S-phosphorothioate
  modified_base 6: mod_base = OTHER; note = 2-fluororibose cytosine
  modified_base 6..7: mod_base = OTHER; note = S-phosphorothioate
  modified_base 7: mod_base = OTHER; note = 2-fluororibose adenine
  modified_base 7..8: mod_base = OTHER; note = S-phosphorothioate
  modified_base 8: mod_base = OTHER; note = 2-fluororibose guanine
  modified_base 8..9: mod_base = OTHER; note = S-phosphorothioate
  modified_base 9: mod_base = OTHER; note = 2-fluororibose cytosine
  modified_base 9..10: mod_base = OTHER; note = S-phosphorothioate
  modified_base 10: mod_base = OTHER; note = 2-fluororibose uracil
  modified_base 10..11: mod_base = OTHER; note = S-phosphorothioate
  modified_base 11: mod_base = OTHER; note = 2-fluororibose uracil
  modified_base 11..12: mod_base = OTHER; note = S-phosphorothioate
  modified_base 12: mod_base = OTHER; note = 2-fluororibose cytosine
  modified_base 12..13: mod_base = OTHER; note = S-phosphorothioate
  modified_base 13: mod_base = OTHER; note = 2-fluororibose adenine
  modified_base 13..14: mod_base = OTHER; note = S-phosphorothioate
  modified_base 14: mod_base = OTHER; note = 2-fluororibose guanine
  modified_base 14..15: mod_base = OTHER; note = S-phosphorothioate
  modified_base 15: mod_base = OTHER; note = 2-fluororibose uracil
  modified_base 15..16: mod_base = OTHER; note = S-phosphorothioate
  modified_base 16: mod_base = cm
  modified_base 16..17: mod_base = OTHER; note = S-phosphorothioate
  modified_base 17: mod_base = cm
  modified_base 17..18: mod_base = OTHER; note = S-phosphorothioate
  modified_base 18: mod_base = cm
  modified_base 18..19: mod_base = OTHER; note = S-phosphorothioate
  modified_base 19: mod_base = um
  modified_base 19..20: mod_base = OTHER; note = S-phosphorothioate
  modified_base 20: mod_base = um
  modified_base 20..21: mod_base = OTHER; note = S-phosphorothioate
  modified_base 21: mod_base = um
  modified_base 21..22: mod_base = OTHER; note = S-phosphorothioate
  modified_base 22: mod_base = cm
  modified_base 22..23: mod_base = OTHER; note = S-phosphorothioate
  modified_base 23: mod_base = OTHER; note = 2-fluororibose uracil
  modified_base 23..24: mod_base = OTHER; note = S-phosphorothioate
  modified_base 24: mod_base = OTHER; note = deoxyribose 6-amino-9-substituted 8,9-dihydro-7H-purin-8-one
  modified_base 24..25: mod_base = OTHER; note = S-phosphorothioate
  modified_base 25: mod_base = OTHER; note = deoxyribose inosine
  modified_base 25..26: mod_base = OTHER; note S-N-(1,3-dimethylimidazolidin-2-ylidene)phosphoramidate
  modified_base 26: mod_base = um
  modified_base 26..27: mod_base = OTHER; note = S-phosphorothioate
  modified_base 27: mod_base = cm
  modified_base 27..28: mod_base = OTHER; note = S-phosphorothioate
  modified_base 28: mod_base = gm
  modified_base 28..29: mod_base = OTHER; note R-N-(1,3-dimethylimidazolidin-2-ylidene)phosphoramidate
  modified_base 29: mod_base = OTHER; note = 2-O-methylribose adenine
  source 1..29: mol_type = other RNA
cccagcagcttcagtccctttctagtcga

SEQ ID NO: 243 - RNA, 31 nt, synthetic construct
  misc_feature 1..31: note = Synthetic: WV-43052
  misc_feature 1..31: note = Synthetic: ADR-0103733
  modified_base 1: mod_base = OTHER; note = 2-fluororibose cytosine
  modified_base 1..2: mod_base = OTHER; note R-N-(1,3-dimethylimidazolidin-2-ylidene)phosphoramidate
  modified_base 2: mod_base = OTHER; note = 2-fluororibose cytosine
  modified_base 2..3: mod_base = OTHER; note = S-phosphorothioate
  modified_base 3: mod_base = OTHER; note = 2-fluororibose cytosine
  modified_base 3..4: mod_base = OTHER; note = S-phosphorothioate
  modified_base 4: mod_base = OTHER; note = 2-fluororibose cytosine
  modified_base 4..5: mod_base = OTHER; note = S-phosphorothioate
  modified_base 5: mod_base = OTHER; note = 2-fluororibose adenine
  modified_base 5..6: mod_base = OTHER; note = S-phosphorothioate
  modified_base 6: mod_base = OTHER; note = 2-fluororibose guanine
  modified_base 6..7: mod_base = OTHER; note = S-phosphorothioate
  modified_base 7: mod_base = OTHER; note = 2-fluororibose cytosine
  modified_base 7..8: mod_base = OTHER; note = S-phosphorothioate
  modified_base 8: mod_base = OTHER; note = 2-fluororibose adenine
  modified_base 8..9: mod_base = OTHER; note = S-phosphorothioate
  modified_base 9: mod_base = OTHER; note = 2-fluororibose guanine
  modified_base 9..10: mod_base = OTHER; note = S-phosphorothioate
  modified_base 10: mod_base = OTHER; note = 2-fluororibose cytosine
  modified_base 10..11: mod_base = OTHER; note = S-phosphorothioate
  modified_base 11: mod_base = OTHER; note = 2-fluororibose uracil
  modified_base 11..12: mod_base = OTHER; note = S-phosphorothioate
  modified_base 12: mod_base = OTHER; note = 2-fluororibose uracil
  modified_base 12..13: mod_base = OTHER; note = S-phosphorothioate
  modified_base 13: mod_base = OTHER; note = 2-fluororibose cytosine
  modified_base 13..14: mod_base = OTHER; note = S-phosphorothioate
  modified_base 14: mod_base = OTHER; note = 2-fluororibose adenine
  modified_base 14..15: mod_base = OTHER; note = S-phosphorothioate
  modified_base 15: mod_base = OTHER; note = 2-fluororibose guanine
  modified_base 15..16: mod_base = OTHER; note = S-phosphorothioate
  modified_base 16: mod_base = um
  modified_base 16..17: mod_base = OTHER; note = S-phosphorothioate
  modified_base 17: mod_base = cm
  modified_base 17..18: mod_base = OTHER; note = S-phosphorothioate
  modified_base 18: mod_base = cm
  modified_base 18..19: mod_base = OTHER; note = S-phosphorothioate
  modified_base 19: mod_base = cm
  modified_base 19..20: mod_base = OTHER; note = S-phosphorothioate
  modified_base 20: mod_base = um
  modified_base 20..21: mod_base = OTHER; note = S-phosphorothioate
  modified_base 21: mod_base = um
  modified_base 21..22: mod_base = OTHER; note = S-phosphorothioate
  modified_base 22: mod_base = um
  modified_base 22..23: mod_base = OTHER; note = S-phosphorothioate
  modified_base 23: mod_base = cm
  modified_base 23..24: mod_base = OTHER; note = S-phosphorothioate
  modified_base 24: mod_base = OTHER; note = 2-fluororibose uracil
  modified_base 24..25: mod_base = OTHER; note = S-phosphorothioate
  modified_base 25: mod_base = OTHER; note = deoxyribose 6-amino-9-substituted 8,9-dihydro-7H-purin-8-one
  modified_base 25..26: mod_base = OTHER; note = S-phosphorothioate
  modified_base 26: mod_base = OTHER; note = deoxyribose inosine
  modified_base 26..27: mod_base = OTHER; note S-N-(1,3-dimethylimidazolidin-2-ylidene)phosphoramidate
  modified_base 27: mod_base = um
  modified_base 27..28: mod_base = OTHER; note = S-phosphorothioate
  modified_base 28: mod_base = cm
  modified_base 28..29: mod_base = OTHER; note = S-phosphorothioate
  modified_base 29: mod_base = gm
  modified_base 29..30: mod_base = OTHER; note = S-phosphorothioate
  modified_base 30: mod_base = OTHER; note = 2-O-methylribose adenine
  modified_base 30..31: mod_base = OTHER; note R-N-(1,3-dimethylimidazolidin-2-ylidene)phosphoramidate
  modified_base 31: mod_base = um
  source 1..31: mol_type = other RNA
ccccagcagcttcagtccctttctagtcgat

SEQ ID NO: 244 - RNA, 31 nt, synthetic construct
  misc_feature 1..31: note = Synthetic: WV-43051
  misc_feature 1..31: note = Synthetic: ADR-0103624
  modified_base 1: mod_base = OTHER; note = 2-fluororibose cytosine
  modified_base 1..2: mod_base = OTHER; note R-N-(1,3-dimethylimidazolidin-2-ylidene)phosphoramidate
  modified_base 2: mod_base = OTHER; note = 2-fluororibose cytosine
  modified_base 2..3: mod_base = OTHER; note = S-phosphorothioate
  modified_base 3: mod_base = OTHER; note = 2-fluororibose cytosine
  modified_base 3..4: mod_base = OTHER; note = S-phosphorothioate
  modified_base 4: mod_base = OTHER; note = 2-fluororibose adenine
  modified_base 4..5: mod_base = OTHER; note = S-phosphorothioate
  modified_base 5: mod_base = OTHER; note = 2-fluororibose guanine
  modified_base 5..6: mod_base = OTHER; note = S-phosphorothioate
  modified_base 6: mod_base = OTHER; note = 2-fluororibose cytosine
  modified_base 6..7: mod_base = OTHER; note = S-phosphorothioate
  modified_base 7: mod_base = OTHER; note = 2-fluororibose adenine
  modified_base 7..8: mod_base = OTHER; note = S-phosphorothioate
  modified_base 8: mod_base = OTHER; note = 2-fluororibose guanine
  modified_base 8..9: mod_base = OTHER; note = S-phosphorothioate
  modified_base 9: mod_base = OTHER; note = 2-fluororibose cytosine
  modified_base 9..10: mod_base = OTHER; note = S-phosphorothioate
  modified_base 10: mod_base = OTHER; note = 2-fluororibose uracil
  modified_base 10..11: mod_base = OTHER; note = S-phosphorothioate
  modified_base 11: mod_base = OTHER; note = 2-fluororibose uracil
  modified_base 11..12: mod_base = OTHER; note = S-phosphorothioate
  modified_base 12: mod_base = OTHER; note = 2-fluororibose cytosine
  modified_base 12..13: mod_base = OTHER; note = S-phosphorothioate
  modified_base 13: mod_base = OTHER; note = 2-fluororibose adenine
  modified_base 13..14: mod_base = OTHER; note = S-phosphorothioate
  modified_base 14: mod_base = OTHER; note = 2-fluororibose guanine
  modified_base 14..15: mod_base = OTHER; note = S-phosphorothioate
  modified_base 15: mod_base = OTHER; note = 2-fluororibose uracil
  modified_base 15..16: mod_base = OTHER; note = S-phosphorothioate
  modified_base 16: mod_base = cm
  modified_base 16..17: mod_base = OTHER; note = S-phosphorothioate
  modified_base 17: mod_base = cm
  modified_base 17..18: mod_base = OTHER; note = S-phosphorothioate
  modified_base 18: mod_base = cm
  modified_base 18..19: mod_base = OTHER; note = S-phosphorothioate
  modified_base 19: mod_base = um
  modified_base 19..20: mod_base = OTHER; note = S-phosphorothioate
  modified_base 20: mod_base = um
  modified_base 20..21: mod_base = OTHER; note = S-phosphorothioate
  modified_base 21: mod_base = um
  modified_base 21..22: mod_base = OTHER; note = S-phosphorothioate
  modified_base 22: mod_base = cm
  modified_base 22..23: mod_base = OTHER; note = S-phosphorothioate
  modified_base 23: mod_base = OTHER; note = 2-fluororibose uracil
  modified_base 23..24: mod_base = OTHER; note = S-phosphorothioate
  modified_base 24: mod_base = OTHER; note = deoxyribose 6-amino-9-substituted 8,9-dihydro-7H-purin-8-one
  modified_base 24..25: mod_base = OTHER; note = S-phosphorothioate
  modified_base 25: mod_base = OTHER; note = deoxyribose inosine
  modified_base 25..26: mod_base = OTHER; note S-N-(1,3-dimethylimidazolidin-2-ylidene)phosphoramidate
  modified_base 26: mod_base = um
  modified_base 26..27: mod_base = OTHER; note = S-phosphorothioate
  modified_base 27: mod_base = cm
  modified_base 27..28: mod_base = OTHER; note = S-phosphorothioate
  modified_base 28: mod_base = gm
  modified_base 28..29: mod_base = OTHER; note = S-phosphorothioate
  modified_base 29: mod_base = OTHER; note = 2-O-methylribose adenine
  modified_base 29..30: mod_base = OTHER; note = S-phosphorothioate
  modified_base 30: mod_base = um
  modified_base 30..31: mod_base = OTHER; note R-N-(1,3-dimethylimidazolidin-2-ylidene)phosphoramidate
  modified_base 31: mod_base = gm
  source 1..31: mol_type = other RNA
cccagcagcttcagtccctttctagtcgatg

SEQ ID NO: 245 - RNA, 32 nt, synthetic construct
  misc_feature 1..32: note = Synthetic: WV-43050
  misc_feature 1..32: note = Synthetic: ADR-0103825
  modified_base 1: mod_base = OTHER; note = 2-fluororibose guanine
  modified_base 1..2: mod_base = OTHER; note R-N-(1,3-dimethylimidazolidin-2-ylidene)phosphoramidate
  modified_base 2: mod_base = OTHER; note = 2-fluororibose cytosine
  modified_base 2..3: mod_base = OTHER; note = S-phosphorothioate
  modified_base 3: mod_base = OTHER; note = 2-fluororibose cytosine
  modified_base 3..4: mod_base = OTHER; note = S-phosphorothioate
  modified_base 4: mod_base = OTHER; note = 2-fluororibose cytosine
  modified_base 4..5: mod_base = OTHER; note = S-phosphorothioate
  modified_base 5: mod_base = OTHER; note = 2-fluororibose cytosine
  modified_base 5..6: mod_base = OTHER; note = S-phosphorothioate
  modified_base 6: mod_base = OTHER; note = 2-fluororibose adenine
  modified_base 6..7: mod_base = OTHER; note = S-phosphorothioate
  modified_base 7: mod_base = OTHER; note = 2-fluororibose guanine
  modified_base 7..8: mod_base = OTHER; note = S-phosphorothioate
  modified_base 8: mod_base = OTHER; note = 2-fluororibose cytosine
  modified_base 8..9: mod_base = OTHER; note = S-phosphorothioate
  modified_base 9: mod_base = OTHER; note = 2-fluororibose adenine
  modified_base 9..10: mod_base = OTHER; note = S-phosphorothioate
  modified_base 10: mod_base = OTHER; note = 2-fluororibose guanine
  modified_base 10..11: mod_base = OTHER; note = S-phosphorothioate
  modified_base 11: mod_base = OTHER; note = 2-fluororibose cytosine
  modified_base 11..12: mod_base = OTHER; note = S-phosphorothioate
  modified_base 12: mod_base = OTHER; note = 2-fluororibose uracil
  modified_base 12..13: mod_base = OTHER; note = S-phosphorothioate
  modified_base 13: mod_base = OTHER; note = 2-fluororibose uracil
  modified_base 13..14: mod_base = OTHER; note = S-phosphorothioate
  modified_base 14: mod_base = OTHER; note = 2-fluororibose cytosine
  modified_base 14..15: mod_base = OTHER; note = S-phosphorothioate
  modified_base 15: mod_base = OTHER; note = 2-fluororibose adenine
  modified_base 15..16: mod_base = OTHER; note = S-phosphorothioate
  modified_base 16: mod_base = gm
  modified_base 16..17: mod_base = OTHER; note = S-phosphorothioate
  modified_base 17: mod_base = um
  modified_base 17..18: mod_base = OTHER; note = S-phosphorothioate
  modified_base 18: mod_base = cm
  modified_base 18..19: mod_base = OTHER; note = S-phosphorothioate
  modified_base 19: mod_base = cm
  modified_base 19..20: mod_base = OTHER; note = S-phosphorothioate
  modified_base 20: mod_base = cm
  modified_base 20..21: mod_base = OTHER; note = S-phosphorothioate
  modified_base 21: mod_base = um
  modified_base 21..22: mod_base = OTHER; note = S-phosphorothioate
  modified_base 22: mod_base = um
  modified_base 22..23: mod_base = OTHER; note = S-phosphorothioate
  modified_base 23: mod_base = um
  modified_base 23..24: mod_base = OTHER; note = S-phosphorothioate
  modified_base 24: mod_base = cm
  modified_base 24..25: mod_base = OTHER; note = S-phosphorothioate
  modified_base 25: mod_base = OTHER; note = 2-fluororibose uracil
  modified_base 25..26: mod_base = OTHER; note = S-phosphorothioate
  modified_base 26: mod_base = OTHER; note = deoxyribose 6-amino-9-substituted 8,9-dihydro-7H-purin-8-one
  modified_base 26..27: mod_base = OTHER; note = S-phosphorothioate
  modified_base 27: mod_base = OTHER; note = deoxyribose inosine
  modified_base 27..28: mod_base = OTHER; note S-N-(1,3-dimethylimidazolidin-2-ylidene)phosphoramidate
  modified_base 28: mod_base = um
  modified_base 28..29: mod_base = OTHER; note = S-phosphorothioate
  modified_base 29: mod_base = cm
  modified_base 29..30: mod_base = OTHER; note = S-phosphorothioate
  modified_base 30: mod_base = gm
  modified_base 30..31: mod_base = OTHER; note = S-phosphorothioate
  modified_base 31: mod_base = OTHER; note = 2-O-methylribose adenine
  modified_base 31..32: mod_base = OTHER; note R-N-(1,3-dimethylimidazolidin-2-ylidene)phosphoramidate
  modified_base 32: mod_base = um
  source 1..32: mol_type = other RNA
gccccagcagcttcagtccctttctagtcgat

SEQ ID NO: 246 - RNA, 32 nt, synthetic construct
  misc_feature 1..32: note = Synthetic: WV-43049
  misc_feature 1..32: note = Synthetic: ADR-0103732
  modified_base 1: mod_base = OTHER; note = 2-fluororibose cytosine
  modified_base 1..2: mod_base = OTHER; note R-N-(1,3-dimethylimidazolidin-2-ylidene)phosphoramidate
  modified_base 2: mod_base = OTHER; note = 2-fluororibose cytosine
  modified_base 2..3: mod_base = OTHER; note = S-phosphorothioate
  modified_base 3: mod_base = OTHER; note = 2-fluororibose cytosine
  modified_base 3..4: mod_base = OTHER; note = S-phosphorothioate
  modified_base 4: mod_base = OTHER; note = 2-fluororibose cytosine
  modified_base 4..5: mod_base = OTHER; note = S-phosphorothioate
  modified_base 5: mod_base = OTHER; note = 2-fluororibose adenine
  modified_base 5..6: mod_base = OTHER; note = S-phosphorothioate
  modified_base 6: mod_base = OTHER; note = 2-fluororibose guanine
  modified_base 6..7: mod_base = OTHER; note = S-phosphorothioate
  modified_base 7: mod_base = OTHER; note = 2-fluororibose cytosine
  modified_base 7..8: mod_base = OTHER; note = S-phosphorothioate
  modified_base 8: mod_base = OTHER; note = 2-fluororibose adenine
  modified_base 8..9: mod_base = OTHER; note = S-phosphorothioate
  modified_base 9: mod_base = OTHER; note = 2-fluororibose guanine
  modified_base 9..10: mod_base = OTHER; note = S-phosphorothioate
  modified_base 10: mod_base = OTHER; note = 2-fluororibose cytosine
  modified_base 10..11: mod_base = OTHER; note = S-phosphorothioate
  modified_base 11: mod_base = OTHER; note = 2-fluororibose uracil
  modified_base 11..12: mod_base = OTHER; note = S-phosphorothioate
  modified_base 12: mod_base = OTHER; note = 2-fluororibose uracil
  modified_base 12..13: mod_base = OTHER; note = S-phosphorothioate
  modified_base 13: mod_base = OTHER; note = 2-fluororibose cytosine
  modified_base 13..14: mod_base = OTHER; note = S-phosphorothioate
  modified_base 14: mod_base = OTHER; note = 2-fluororibose adenine
  modified_base 14..15: mod_base = OTHER; note = S-phosphorothioate
  modified_base 15: mod_base = OTHER; note = 2-fluororibose guanine
  modified_base 15..16: mod_base = OTHER; note = S-phosphorothioate
  modified_base 16: mod_base = um
  modified_base 16..17: mod_base = OTHER; note = S-phosphorothioate
  modified_base 17: mod_base = cm
  modified_base 17..18: mod_base = OTHER; note = S-phosphorothioate
  modified_base 18: mod_base = cm
  modified_base 18..19: mod_base = OTHER; note = S-phosphorothioate
  modified_base 19: mod_base = cm
  modified_base 19..20: mod_base = OTHER; note = S-phosphorothioate
  modified_base 20: mod_base = um
  modified_base 20..21: mod_base = OTHER; note = S-phosphorothioate
  modified_base 21: mod_base = um
  modified_base 21..22: mod_base = OTHER; note = S-phosphorothioate
  modified_base 22: mod_base = um
  modified_base 22..23: mod_base = OTHER; note = S-phosphorothioate
  modified_base 23: mod_base = cm
  modified_base 23..24: mod_base = OTHER; note = S-phosphorothioate
  modified_base 24: mod_base = OTHER; note = 2-fluororibose uracil
  modified_base 24..25: mod_base = OTHER; note = S-phosphorothioate
  modified_base 25: mod_base = OTHER; note = deoxyribose 6-amino-9-substituted 8,9-dihydro-7H-purin-8-one
  modified_base 25..26: mod_base = OTHER; note = S-phosphorothioate
  modified_base 26: mod_base = OTHER; note = deoxyribose inosine
  modified_base 26..27: mod_base = OTHER; note S-N-(1,3-dimethylimidazolidin-2-ylidene)phosphoramidate
  modified_base 27: mod_base = um
  modified_base 27..28: mod_base = OTHER; note = S-phosphorothioate
  modified_base 28: mod_base = cm
  modified_base 28..29: mod_base = OTHER; note = S-phosphorothioate
  modified_base 29: mod_base = gm
  modified_base 29..30: mod_base = OTHER; note = S-phosphorothioate
  modified_base 30: mod_base = OTHER; note = 2-O-methylribose adenine
  modified_base 30..31: mod_base = OTHER; note = S-phosphorothioate
  modified_base 31: mod_base = um
  modified_base 31..32: mod_base = OTHER; note R-N-(1,3-dimethylimidazolidin-2-ylidene)phosphoramidate
  modified_base 32: mod_base = gm
  source 1..32: mol_type = other RNA
ccccagcagcttcagtccctttctagtcgatg

SEQ ID NO: 247 - RNA, 32 nt, synthetic construct
  misc_feature 1..32: note = Synthetic: WV-43048
  misc_feature 1..32: note = Synthetic: ADR-0103623
  modified_base 1: mod_base = OTHER; note = 2-fluororibose cytosine
  modified_base 1..2: mod_base = OTHER; note R-N-(1,3-dimethylimidazolidin-2-ylidene)phosphoramidate
  modified_base 2: mod_base = OTHER; note = 2-fluororibose cytosine
  modified_base 2..3: mod_base = OTHER; note = S-phosphorothioate
  modified_base 3: mod_base = OTHER; note = 2-fluororibose cytosine
  modified_base 3..4: mod_base = OTHER; note = S-phosphorothioate
  modified_base 4: mod_base = OTHER; note = 2-fluororibose adenine
  modified_base 4..5: mod_base = OTHER; note = S-phosphorothioate
  modified_base 5: mod_base = OTHER; note = 2-fluororibose guanine
  modified_base 5..6: mod_base = OTHER; note = S-phosphorothioate
  modified_base 6: mod_base = OTHER; note = 2-fluororibose cytosine
  modified_base 6..7: mod_base = OTHER; note = S-phosphorothioate
  modified_base 7: mod_base = OTHER; note = 2-fluororibose adenine
  modified_base 7..8: mod_base = OTHER; note = S-phosphorothioate
  modified_base 8: mod_base = OTHER; note = 2-fluororibose guanine
  modified_base 8..9: mod_base = OTHER; note = S-phosphorothioate
  modified_base 9: mod_base = OTHER; note = 2-fluororibose cytosine
  modified_base 9..10: mod_base = OTHER; note = S-phosphorothioate
  modified_base 10: mod_base = OTHER; note = 2-fluororibose uracil
  modified_base 10..11: mod_base = OTHER; note = S-phosphorothioate
  modified_base 11: mod_base = OTHER; note = 2-fluororibose uracil
  modified_base 11..12: mod_base = OTHER; note = S-phosphorothioate
  modified_base 12: mod_base = OTHER; note = 2-fluororibose cytosine
  modified_base 12..13: mod_base = OTHER; note = S-phosphorothioate
  modified_base 13: mod_base = OTHER; note = 2-fluororibose adenine
  modified_base 13..14: mod_base = OTHER; note = S-phosphorothioate
  modified_base 14: mod_base = OTHER; note = 2-fluororibose guanine
  modified_base 14..15: mod_base = OTHER; note = S-phosphorothioate
  modified_base 15: mod_base = OTHER; note = 2-fluororibose uracil
  modified_base 15..16: mod_base = OTHER; note = S-phosphorothioate
  modified_base 16: mod_base = cm
  modified_base 16..17: mod_base = OTHER; note = S-phosphorothioate
  modified_base 17: mod_base = cm
  modified_base 17..18: mod_base = OTHER; note = S-phosphorothioate
  modified_base 18: mod_base = cm
  modified_base 18..19: mod_base = OTHER; note = S-phosphorothioate
  modified_base 19: mod_base = um
  modified_base 19..20: mod_base = OTHER; note = S-phosphorothioate
  modified_base 20: mod_base = um
  modified_base 20..21: mod_base = OTHER; note = S-phosphorothioate
  modified_base 21: mod_base = um
  modified_base 21..22: mod_base = OTHER; note = S-phosphorothioate
  modified_base 22: mod_base = cm
  modified_base 22..23: mod_base = OTHER; note = S-phosphorothioate
  modified_base 23: mod_base = OTHER; note = 2-fluororibose uracil
  modified_base 23..24: mod_base = OTHER; note = S-phosphorothioate
  modified_base 24: mod_base = OTHER; note = deoxyribose 6-amino-9-substituted 8,9-dihydro-7H-purin-8-one
  modified_base 24..25: mod_base = OTHER; note = S-phosphorothioate
  modified_base 25: mod_base = OTHER; note = deoxyribose inosine
  modified_base 25..26: mod_base = OTHER; note S-N-(1,3-dimethylimidazolidin-2-ylidene)phosphoramidate
  modified_base 26: mod_base = um
  modified_base 26..27: mod_base = OTHER; note = S-phosphorothioate
  modified_base 27: mod_base = cm
  modified_base 27..28: mod_base = OTHER; note = S-phosphorothioate
  modified_base 28: mod_base = gm
  modified_base 28..29: mod_base = OTHER; note = S-phosphorothioate
  modified_base 29: mod_base = OTHER; note = 2-O-methylribose adenine
  modified_base 29..30: mod_base = OTHER; note = S-phosphorothioate
  modified_base 30: mod_base = um
  modified_base 30..31: mod_base = OTHER; note = S-phosphorothioate
  modified_base 31: mod_base = gm
  modified_base 31..32: mod_base = OTHER; note R-N-(1,3-dimethylimidazolidin-2-ylidene)phosphoramidate
  modified_base 32: mod_base = gm
  source 1..32: mol_type = other RNA
cccagcagcttcagtccctttctagtcgatgg

SEQ ID NO: 248 - RNA, 30 nt, synthetic construct; identical to SEQ ID NO: 134
  misc_feature 1..30: note = Synthetic: WV-43047
  misc_feature 1..30: note = Synthetic: ADR-0103668
  modified_base 1: mod_base = OTHER; note = 2-fluororibose cytosine
  modified_base 1..2: mod_base = OTHER; note R-N-(1,3-dimethylimidazolidin-2-ylidene)phosphoramidate
  modified_base 2: mod_base = OTHER; note = 2-fluororibose cytosine
  modified_base 2..3: mod_base = OTHER; note = S-phosphorothioate
  modified_base 3: mod_base = OTHER; note = 2-fluororibose cytosine
  modified_base 3..4: mod_base = OTHER; note = S-phosphorothioate
  modified_base 4: mod_base = OTHER; note = 2-fluororibose adenine
  modified_base 4..5: mod_base = OTHER; note = S-phosphorothioate
  modified_base 5: mod_base = OTHER; note = 2-fluororibose guanine
  modified_base 5..6: mod_base = OTHER; note = S-phosphorothioate
  modified_base 6: mod_base = OTHER; note = 2-fluororibose cytosine
  modified_base 6..7: mod_base = OTHER; note = S-phosphorothioate
  modified_base 7: mod_base = OTHER; note = 2-fluororibose adenine
  modified_base 7..8: mod_base = OTHER; note = S-phosphorothioate
  modified_base 8: mod_base = OTHER; note = 2-fluororibose guanine
  modified_base 8..9: mod_base = OTHER; note = S-phosphorothioate
  modified_base 9: mod_base = OTHER; note = 2-fluororibose cytosine
  modified_base 9..10: mod_base = OTHER; note = S-phosphorothioate
  modified_base 10: mod_base = OTHER; note = 2-fluororibose uracil
  modified_base 10..11: mod_base = OTHER; note = S-phosphorothioate
  modified_base 11: mod_base = OTHER; note = 2-fluororibose uracil
  modified_base 11..12: mod_base = OTHER; note = S-phosphorothioate
  modified_base 12: mod_base = OTHER; note = 2-fluororibose cytosine
  modified_base 12..13: mod_base = OTHER; note = S-phosphorothioate
  modified_base 13: mod_base = OTHER; note = 2-fluororibose adenine
  modified_base 13..14: mod_base = OTHER; note = S-phosphorothioate
  modified_base 14: mod_base = OTHER; note = 2-fluororibose guanine
  modified_base 14..15: mod_base = OTHER; note = S-phosphorothioate
  modified_base 15: mod_base = OTHER; note = 2-fluororibose uracil
  modified_base 15..16: mod_base = OTHER; note = S-phosphorothioate
  modified_base 16: mod_base = cm
  modified_base 17: mod_base = cm
  modified_base 17..18: mod_base = OTHER; note R-N-(1,3-dimethylimidazolidin-2-ylidene)phosphoramidate
  modified_base 18: mod_base = cm
  modified_base 19: mod_base = um
  modified_base 19..20: mod_base = OTHER; note R-N-(1,3-dimethylimidazolidin-2-ylidene)phosphoramidate
  modified_base 20: mod_base = um
  modified_base 21: mod_base = um
  modified_base 21..22: mod_base = OTHER; note R-N-(1,3-dimethylimidazolidin-2-ylidene)phosphoramidate
  modified_base 22: mod_base = cm
  modified_base 22..23: mod_base = OTHER; note = S-phosphorothioate
  modified_base 23: mod_base = OTHER; note = 2-fluororibose uracil
  modified_base 23..24: mod_base = OTHER; note = S-phosphorothioate
  modified_base 24: mod_base = OTHER; note = deoxyribose 6-amino-9-substituted 8,9-dihydro-7H-purin-8-one
  modified_base 24..25: mod_base = OTHER; note = S-phosphorothioate
  modified_base 25: mod_base = OTHER; note = deoxyribose inosine
  modified_base 25..26: mod_base = OTHER; note S-N-(1,3-dimethylimidazolidin-2-ylidene)phosphoramidate
  modified_base 26: mod_base = um
  modified_base 26..27: mod_base = OTHER; note = S-phosphorothioate
  modified_base 27: mod_base = cm
  modified_base 27..28: mod_base = OTHER; note = S-phosphorothioate
  modified_base 28: mod_base = gm
  modified_base 28..29: mod_base = OTHER; note = S-phosphorothioate
  modified_base 29: mod_base = OTHER; note = 2-O-methylribose adenine
  modified_base 29..30: mod_base = OTHER; note R-N-(1,3-dimethylimidazolidin-2-ylidene)phosphoramidate
  modified_base 30: mod_base = um
  source 1..30: mol_type = other RNA

SEQ ID NO: 249 - RNA, 30 nt, synthetic construct; identical to SEQ ID NO: 134
  misc_feature 1..30: note = Synthetic: WV-43046
  misc_feature 1..30: note = Synthetic: ADR-0103659
  modified_base 1: mod_base = OTHER; note = 2-fluororibose cytosine
  modified_base 1..2: mod_base = OTHER; note R-N-(1,3-dimethylimidazolidin-2-ylidene)phosphoramidate
  modified_base 2: mod_base = OTHER; note = 2-fluororibose cytosine
  modified_base 2..3: mod_base = OTHER; note = S-phosphorothioate
  modified_base 3: mod_base = OTHER; note = 2-fluororibose cytosine
  modified_base 3..4: mod_base = OTHER; note = S-phosphorothioate
  modified_base 4: mod_base = OTHER; note = 2-fluororibose adenine
  modified_base 4..5: mod_base = OTHER; note = S-phosphorothioate
  modified_base 5: mod_base = OTHER; note = 2-fluororibose guanine
  modified_base 5..6: mod_base = OTHER; note = S-phosphorothioate
  modified_base 6: mod_base = OTHER; note = 2-fluororibose cytosine
  modified_base 6..7: mod_base = OTHER; note = S-phosphorothioate
  modified_base 7: mod_base = OTHER; note = 2-fluororibose adenine
  modified_base 7..8: mod_base = OTHER; note = S-phosphorothioate
  modified_base 8: mod_base = OTHER; note = 2-fluororibose guanine
  modified_base 8..9: mod_base = OTHER; note = S-phosphorothioate
  modified_base 9: mod_base = OTHER; note = 2-fluororibose cytosine
  modified_base 9..10: mod_base = OTHER; note = S-phosphorothioate
  modified_base 10: mod_base = OTHER; note = 2-fluororibose uracil
  modified_base 10..11: mod_base = OTHER; note = S-phosphorothioate
  modified_base 11: mod_base = OTHER; note = 2-fluororibose uracil
  modified_base 11..12: mod_base = OTHER; note = S-phosphorothioate
  modified_base 12: mod_base = OTHER; note = 2-fluororibose cytosine
  modified_base 12..13: mod_base = OTHER; note = S-phosphorothioate
  modified_base 13: mod_base = OTHER; note = 2-fluororibose adenine
  modified_base 13..14: mod_base = OTHER; note = S-phosphorothioate
  modified_base 14: mod_base = OTHER; note = 2-fluororibose guanine
  modified_base 14..15: mod_base = OTHER; note = S-phosphorothioate
  modified_base 15: mod_base = OTHER; note = 2-fluororibose uracil
  modified_base 15..16: mod_base = OTHER; note = S-phosphorothioate
  modified_base 16: mod_base = cm
  modified_base 16..17: mod_base = OTHER; note = S-phosphorothioate
  modified_base 17: mod_base = cm
  modified_base 17..18: mod_base = OTHER; note = S-phosphorothioate
  modified_base 18: mod_base = cm
  modified_base 18..19: mod_base = OTHER; note = S-phosphorothioate
  modified_base 19: mod_base = um
  modified_base 20: mod_base = um
  modified_base 20..21: mod_base = OTHER; note R-N-(1,3-dimethylimidazolidin-2-ylidene)phosphoramidate
  modified_base 21: mod_base = um
  modified_base 22: mod_base = cm
  modified_base 22..23: mod_base = OTHER; note = S-phosphorothioate
  modified_base 23: mod_base = OTHER; note = 2-fluororibose uracil
  modified_base 23..24: mod_base = OTHER; note = S-phosphorothioate
  modified_base 24: mod_base = OTHER; note = deoxyribose 6-amino-9-substituted 8,9-dihydro-7H-purin-8-one
  modified_base 24..25: mod_base = OTHER; note = S-phosphorothioate
  modified_base 25: mod_base = OTHER; note = deoxyribose inosine
  modified_base 25..26: mod_base = OTHER; note S-N-(1,3-dimethylimidazolidin-2-ylidene)phosphoramidate
  modified_base 26: mod_base = um
  modified_base 26..27: mod_base = OTHER; note = S-phosphorothioate
  modified_base 27: mod_base = cm
  modified_base 27..28: mod_base = OTHER; note = S-phosphorothioate
  modified_base 28: mod_base = gm
  modified_base 28..29: mod_base = OTHER; note = S-phosphorothioate
  modified_base 29: mod_base = OTHER; note = 2-O-methylribose adenine
  modified_base 29..30: mod_base = OTHER; note R-N-(1,3-dimethylimidazolidin-2-ylidene)phosphoramidate
  modified_base 30: mod_base = um
  source 1..30: mol_type = other RNA

SEQ ID NO: 250 - RNA, 30 nt, synthetic construct; identical to SEQ ID NO: 134
  misc_feature 1..30: note = Synthetic: WV-43045
  misc_feature 1..30: note = Synthetic: ADR-0103665
  modified_base 1: mod_base = OTHER; note = 2-fluororibose cytosine
  modified_base 1..2: mod_base = OTHER; note R-N-(1,3-dimethylimidazolidin-2-ylidene)phosphoramidate
  modified_base 2: mod_base = OTHER; note = 2-fluororibose cytosine
  modified_base 2..3: mod_base = OTHER; note = S-phosphorothioate
  modified_base 3: mod_base = OTHER; note = 2-fluororibose cytosine
  modified_base 3..4: mod_base = OTHER; note = S-phosphorothioate
  modified_base 4: mod_base = OTHER; note = 2-fluororibose adenine
  modified_base 4..5: mod_base = OTHER; note = S-phosphorothioate
  modified_base 5: mod_base = OTHER; note = 2-fluororibose guanine
  modified_base 5..6: mod_base = OTHER; note = S-phosphorothioate
  modified_base 6: mod_base = OTHER; note = 2-fluororibose cytosine
  modified_base 6..7: mod_base = OTHER; note = S-phosphorothioate
  modified_base 7: mod_base = OTHER; note = 2-fluororibose adenine
  modified_base 7..8: mod_base = OTHER; note = S-phosphorothioate
  modified_base 8: mod_base = OTHER; note = 2-fluororibose guanine
  modified_base 8..9: mod_base = OTHER; note = S-phosphorothioate
  modified_base 9: mod_base = OTHER; note = 2-fluororibose cytosine
  modified_base 9..10: mod_base = OTHER; note = S-phosphorothioate
  modified_base 10: mod_base = OTHER; note = 2-fluororibose uracil
  modified_base 10..11: mod_base = OTHER; note = S-phosphorothioate
  modified_base 11: mod_base = OTHER; note = 2-fluororibose uracil
  modified_base 11..12: mod_base = OTHER; note = S-phosphorothioate
  modified_base 12: mod_base = OTHER; note = 2-fluororibose cytosine
  modified_base 12..13: mod_base = OTHER; note = S-phosphorothioate
  modified_base 13: mod_base = OTHER; note = 2-fluororibose adenine
  modified_base 13..14: mod_base = OTHER; note = S-phosphorothioate
  modified_base 14: mod_base = OTHER; note = 2-fluororibose guanine
  modified_base 14..15: mod_base = OTHER; note = S-phosphorothioate
  modified_base 15: mod_base = OTHER; note = 2-fluororibose uracil
  modified_base 15..16: mod_base = OTHER; note = S-phosphorothioate
  modified_base 16: mod_base = cm
  modified_base 16..17: mod_base = OTHER; note = S-phosphorothioate
  modified_base 17: mod_base = cm
  modified_base 18: mod_base = cm
  modified_base 18..19: mod_base = OTHER; note R-N-(1,3-dimethylimidazolidin-2-ylidene)phosphoramidate
  modified_base 19: mod_base = um
  modified_base 20: mod_base = um
  modified_base 20..21: mod_base = OTHER; note R-N-(1,3-dimethylimidazolidin-2-ylidene)phosphoramidate
  modified_base 21: mod_base = um
  modified_base 21..22: mod_base = OTHER; note = S-phosphorothioate
  modified_base 22: mod_base = cm
  modified_base 22..23: mod_base = OTHER; note = S-phosphorothioate
  modified_base 23: mod_base = OTHER; note = 2-fluororibose uracil
  modified_base 23..24: mod_base = OTHER; note = S-phosphorothioate
  modified_base 24: mod_base = OTHER; note = deoxyribose 6-amino-9-substituted 8,9-dihydro-7H-purin-8-one
  modified_base 24..25: mod_base = OTHER; note = S-phosphorothioate
  modified_base 25: mod_base = OTHER; note = deoxyribose inosine
  modified_base 25..26: mod_base = OTHER; note S-N-(1,3-dimethylimidazolidin-2-ylidene)phosphoramidate
  modified_base 26: mod_base = um
  modified_base 26..27: mod_base = OTHER; note = S-phosphorothioate
  modified_base 27: mod_base = cm
  modified_base 27..28: mod_base = OTHER; note = S-phosphorothioate
  modified_base 28: mod_base = gm
  modified_base 28..29: mod_base = OTHER; note = S-phosphorothioate
  modified_base 29: mod_base = OTHER; note = 2-O-methylribose adenine
  modified_base 29..30: mod_base = OTHER; note R-N-(1,3-dimethylimidazolidin-2-ylidene)phosphoramidate
  modified_base 30: mod_base = um
  source 1..30: mol_type = other RNA

SEQ ID NO: 251 - RNA, 30 nt, synthetic construct; identical to SEQ ID NO: 134
  misc_feature 1..30: note = Synthetic: WV-43044
  misc_feature 1..30: note = Synthetic: ADR-0103662
  modified_base 1: mod_base = OTHER; note = 2-fluororibose cytosine
  modified_base 1..2: mod_base = OTHER; note R-N-(1,3-dimethylimidazolidin-2-ylidene)phosphoramidate
  modified_base 2: mod_base = OTHER; note = 2-fluororibose cytosine
  modified_base 2..3: mod_base = OTHER; note = S-phosphorothioate
  modified_base 3: mod_base = OTHER; note = 2-fluororibose cytosine
  modified_base 3..4: mod_base = OTHER; note = S-phosphorothioate
  modified_base 4: mod_base = OTHER; note = 2-fluororibose adenine
  modified_base 4..5: mod_base = OTHER; note = S-phosphorothioate
  modified_base 5: mod_base = OTHER; note = 2-fluororibose guanine
  modified_base 5..6: mod_base = OTHER; note = S-phosphorothioate
  modified_base 6: mod_base = OTHER; note = 2-fluororibose cytosine
  modified_base 6..7: mod_base = OTHER; note = S-phosphorothioate
  modified_base 7: mod_base = OTHER; note = 2-fluororibose adenine
  modified_base 7..8: mod_base = OTHER; note = S-phosphorothioate
  modified_base 8: mod_base = OTHER; note = 2-fluororibose guanine
  modified_base 8..9: mod_base = OTHER; note = S-phosphorothioate
  modified_base 9: mod_base = OTHER; note = 2-fluororibose cytosine
  modified_base 9..10: mod_base = OTHER; note = S-phosphorothioate
  modified_base 10: mod_base = OTHER; note = 2-fluororibose uracil
  modified_base 10..11: mod_base = OTHER; note = S-phosphorothioate
  modified_base 11: mod_base = OTHER; note = 2-fluororibose uracil
  modified_base 11..12: mod_base = OTHER; note = S-phosphorothioate
  modified_base 12: mod_base = OTHER; note = 2-fluororibose cytosine
  modified_base 12..13: mod_base = OTHER; note = S-phosphorothioate
  modified_base 13: mod_base = OTHER; note = 2-fluororibose adenine
  modified_base 13..14: mod_base = OTHER; note = S-phosphorothioate
  modified_base 14: mod_base = OTHER; note = 2-fluororibose guanine
  modified_base 14..15: mod_base = OTHER; note = S-phosphorothioate
  modified_base 15: mod_base = OTHER; note = 2-fluororibose uracil
  modified_base 15..16: mod_base = OTHER; note = S-phosphorothioate
  modified_base 16: mod_base = cm
  modified_base 16..17: mod_base = OTHER; note = S-phosphorothioate
  modified_base 17: mod_base = cm
  modified_base 17..18: mod_base = OTHER; note = S-phosphorothioate
  modified_base 18: mod_base = cm
  modified_base 19: mod_base = um
  modified_base 19..20: mod_base = OTHER; note R-N-(1,3-dimethylimidazolidin-2-ylidene)phosphoramidate
  modified_base 20: mod_base = um
  modified_base 21: mod_base = um
  modified_base 21..22: mod_base = OTHER; note R-N-(1,3-dimethylimidazolidin-2-ylidene)phosphoramidate
  modified_base 22: mod_base = cm
  modified_base 22..23: mod_base = OTHER; note = S-phosphorothioate
  modified_base 23: mod_base = OTHER; note = 2-fluororibose uracil
  modified_base 23..24: mod_base = OTHER; note = S-phosphorothioate
  modified_base 24: mod_base = OTHER; note = deoxyribose 6-amino-9-substituted 8,9-dihydro-7H-purin-8-one
  modified_base 24..25: mod_base = OTHER; note = S-phosphorothioate
  modified_base 25: mod_base = OTHER; note = deoxyribose inosine
  modified_base 25..26: mod_base = OTHER; note S-N-(1,3-dimethylimidazolidin-2-ylidene)phosphoramidate
  modified_base 26: mod_base = um
  modified_base 26..27: mod_base = OTHER; note = S-phosphorothioate
  modified_base 27: mod_base = cm
  modified_base 27..28: mod_base = OTHER; note = S-phosphorothioate
  modified_base 28: mod_base = gm
  modified_base 28..29: mod_base = OTHER; note = S-phosphorothioate
  modified_base 29: mod_base = OTHER; note = 2-O-methylribose adenine
  modified_base 29..30: mod_base = OTHER; note R-N-(1,3-dimethylimidazolidin-2-ylidene)phosphoramidate
  modified_base 30: mod_base = um
  source 1..30: mol_type = other RNA

SEQ ID NO: 252 - RNA, 30 nt, synthetic construct; identical to SEQ ID NO: 134
  misc_feature 1..30: note = Synthetic: WV-43043
  misc_feature 1..30: note = Synthetic: ADR-0103654
  modified_base 1: mod_base = OTHER; note = 2-fluororibose cytosine
  modified_base 1..2: mod_base = OTHER; note R-N-(1,3-dimethylimidazolidin-2-ylidene)phosphoramidate
  modified_base 2: mod_base = OTHER; note = 2-fluororibose cytosine
  modified_base 2..3: mod_base = OTHER; note = S-phosphorothioate
  modified_base 3: mod_base = OTHER; note = 2-fluororibose cytosine
  modified_base 3..4: mod_base = OTHER; note = S-phosphorothioate
  modified_base 4: mod_base = OTHER; note = 2-fluororibose adenine
  modified_base 4..5: mod_base = OTHER; note = S-phosphorothioate
  modified_base 5: mod_base = OTHER; note = 2-fluororibose guanine
  modified_base 5..6: mod_base = OTHER; note = S-phosphorothioate
  modified_base 6: mod_base = OTHER; note = 2-fluororibose cytosine
  modified_base 6..7: mod_base = OTHER; note = S-phosphorothioate
  modified_base 7: mod_base = OTHER; note = 2-fluororibose adenine
  modified_base 7..8: mod_base = OTHER; note = S-phosphorothioate
  modified_base 8: mod_base = OTHER; note = 2-fluororibose guanine
  modified_base 8..9: mod_base = OTHER; note = S-phosphorothioate
  modified_base 9: mod_base = OTHER; note = 2-fluororibose cytosine
  modified_base 9..10: mod_base = OTHER; note = S-phosphorothioate
  modified_base 10: mod_base = OTHER; note = 2-fluororibose uracil
  modified_base 10..11: mod_base = OTHER; note = S-phosphorothioate
  modified_base 11: mod_base = OTHER; note = 2-fluororibose uracil
  modified_base 11..12: mod_base = OTHER; note = S-phosphorothioate
  modified_base 12: mod_base = OTHER; note = 2-fluororibose cytosine
  modified_base 12..13: mod_base = OTHER; note = S-phosphorothioate
  modified_base 13: mod_base = OTHER; note = 2-fluororibose adenine
  modified_base 13..14: mod_base = OTHER; note = S-phosphorothioate
  modified_base 14: mod_base = OTHER; note = 2-fluororibose guanine
  modified_base 14..15: mod_base = OTHER; note = S-phosphorothioate
  modified_base 15: mod_base = OTHER; note = 2-fluororibose uracil
  modified_base 15..16: mod_base = OTHER; note = S-phosphorothioate
  modified_base 16: mod_base = cm
  modified_base 16..17: mod_base = OTHER; note = S-phosphorothioate
  modified_base 17: mod_base = cm
  modified_base 17..18: mod_base = OTHER; note = S-phosphorothioate
  modified_base 18: mod_base = cm
  modified_base 18..19: mod_base = OTHER; note = S-phosphorothioate
  modified_base 19: mod_base = um
  modified_base 19..20: mod_base = OTHER; note = S-phosphorothioate
  modified_base 20: mod_base = um
  modified_base 20..21: mod_base = OTHER; note = S-phosphorothioate
  modified_base 21: mod_base = um
  modified_base 22: mod_base = cm
  modified_base 22..23: mod_base = OTHER; note = S-phosphorothioate
  modified_base 23: mod_base = OTHER; note = 2-fluororibose uracil
  modified_base 23..24: mod_base = OTHER; note = S-phosphorothioate
  modified_base 24: mod_base = OTHER; note = deoxyribose 6-amino-9-substituted 8,9-dihydro-7H-purin-8-one
  modified_base 24..25: mod_base = OTHER; note = S-phosphorothioate
  modified_base 25: mod_base = OTHER; note = deoxyribose inosine
  modified_base 25..26: mod_base = OTHER; note S-N-(1,3-dimethylimidazolidin-2-ylidene)phosphoramidate
  modified_base 26: mod_base = um
  modified_base 26..27: mod_base = OTHER; note = S-phosphorothioate
  modified_base 27: mod_base = cm
  modified_base 27..28: mod_base = OTHER; note = S-phosphorothioate
  modified_base 28: mod_base = gm
  modified_base 28..29: mod_base = OTHER; note = S-phosphorothioate
  modified_base 29: mod_base = OTHER; note = 2-O-methylribose adenine
  modified_base 29..30: mod_base = OTHER; note R-N-(1,3-dimethylimidazolidin-2-ylidene)phosphoramidate
  modified_base 30: mod_base = um
  source 1..30: mol_type = other RNA

SEQ ID NO: 253 - RNA, 30 nt, synthetic construct; identical to SEQ ID NO: 134
  misc_feature 1..30: note = Synthetic: WV-43042
  misc_feature 1..30: note = Synthetic: ADR-0103656
  modified_base 1: mod_base = OTHER; note = 2-fluororibose cytosine
  modified_base 1..2: mod_base = OTHER; note R-N-(1,3-dimethylimidazolidin-2-ylidene)phosphoramidate
  modified_base 2: mod_base = OTHER; note = 2-fluororibose cytosine
  modified_base 2..3: mod_base = OTHER; note = S-phosphorothioate
  modified_base 3: mod_base = OTHER; note = 2-fluororibose cytosine
  modified_base 3..4: mod_base = OTHER; note = S-phosphorothioate
  modified_base 4: mod_base = OTHER; note = 2-fluororibose adenine
  modified_base 4..5: mod_base = OTHER; note = S-phosphorothioate
  modified_base 5: mod_base = OTHER; note = 2-fluororibose guanine
  modified_base 5..6: mod_base = OTHER; note = S-phosphorothioate
  modified_base 6: mod_base = OTHER; note = 2-fluororibose cytosine
  modified_base 6..7: mod_base = OTHER; note = S-phosphorothioate
  modified_base 7: mod_base = OTHER; note = 2-fluororibose adenine
  modified_base 7..8: mod_base = OTHER; note = S-phosphorothioate
  modified_base 8: mod_base = OTHER; note = 2-fluororibose guanine
  modified_base 8..9: mod_base = OTHER; note = S-phosphorothioate
  modified_base 9: mod_base = OTHER; note = 2-fluororibose cytosine
  modified_base 9..10: mod_base = OTHER; note = S-phosphorothioate
  modified_base 10: mod_base = OTHER; note = 2-fluororibose uracil
  modified_base 10..11: mod_base = OTHER; note = S-phosphorothioate
  modified_base 11: mod_base = OTHER; note = 2-fluororibose uracil
  modified_base 11..12: mod_base = OTHER; note = S-phosphorothioate
  modified_base 12: mod_base = OTHER; note = 2-fluororibose cytosine
  modified_base 12..13: mod_base = OTHER; note = S-phosphorothioate
  modified_base 13: mod_base = OTHER; note = 2-fluororibose adenine
  modified_base 13..14: mod_base = OTHER; note = S-phosphorothioate
  modified_base 14: mod_base = OTHER; note = 2-fluororibose guanine
  modified_base 14..15: mod_base = OTHER; note = S-phosphorothioate
  modified_base 15: mod_base = OTHER; note = 2-fluororibose uracil
  modified_base 15..16: mod_base = OTHER; note = S-phosphorothioate
  modified_base 16: mod_base = cm
  modified_base 16..17: mod_base = OTHER; note = S-phosphorothioate
  modified_base 17: mod_base = cm
  modified_base 17..18: mod_base = OTHER; note = S-phosphorothioate
  modified_base 18: mod_base = cm
  modified_base 18..19: mod_base = OTHER; note = S-phosphorothioate
  modified_base 19: mod_base = um
  modified_base 19..20: mod_base = OTHER; note = S-phosphorothioate
  modified_base 20: mod_base = um
  modified_base 21: mod_base = um
  modified_base 21..22: mod_base = OTHER; note = S-phosphorothioate
  modified_base 22: mod_base = cm
  modified_base 22..23: mod_base = OTHER; note = S-phosphorothioate
  modified_base 23: mod_base = OTHER; note = 2-fluororibose uracil
  modified_base 23..24: mod_base = OTHER; note = S-phosphorothioate
  modified_base 24: mod_base = OTHER; note = deoxyribose 6-amino-9-substituted 8,9-dihydro-7H-purin-8-one
  modified_base 24..25: mod_base = OTHER; note = S-phosphorothioate
  modified_base 25: mod_base = OTHER; note = deoxyribose inosine
  modified_base 25..26: mod_base = OTHER; note S-N-(1,3-dimethylimidazolidin-2-ylidene)phosphoramidate
  modified_base 26: mod_base = um
  modified_base 26..27: mod_base = OTHER; note = S-phosphorothioate
  modified_base 27: mod_base = cm
  modified_base 27..28: mod_base = OTHER; note = S-phosphorothioate
  modified_base 28: mod_base = gm
  modified_base 28..29: mod_base = OTHER; note = S-phosphorothioate
  modified_base 29: mod_base = OTHER; note = 2-O-methylribose adenine
  modified_base 29..30: mod_base = OTHER; note R-N-(1,3-dimethylimidazolidin-2-ylidene)phosphoramidate
  modified_base 30: mod_base = um
  source 1..30: mol_type = other RNA

SEQ ID NO: 254 - RNA, 30 nt, synthetic construct; identical to SEQ ID NO: 134
  misc_feature 1..30: note = Synthetic: WV-43041
  misc_feature 1..30: note = Synthetic: ADR-0103658
  modified_base 1: mod_base = OTHER; note = 2-fluororibose cytosine
  modified_base 1..2: mod_base = OTHER; note R-N-(1,3-dimethylimidazolidin-2-ylidene)phosphoramidate
  modified_base 2: mod_base = OTHER; note = 2-fluororibose cytosine
  modified_base 2..3: mod_base = OTHER; note = S-phosphorothioate
  modified_base 3: mod_base = OTHER; note = 2-fluororibose cytosine
  modified_base 3..4: mod_base = OTHER; note = S-phosphorothioate
  modified_base 4: mod_base = OTHER; note = 2-fluororibose adenine
  modified_base 4..5: mod_base = OTHER; note = S-phosphorothioate
  modified_base 5: mod_base = OTHER; note = 2-fluororibose guanine
  modified_base 5..6: mod_base = OTHER; note = S-phosphorothioate
  modified_base 6: mod_base = OTHER; note = 2-fluororibose cytosine
  modified_base 6..7: mod_base = OTHER; note = S-phosphorothioate
  modified_base 7: mod_base = OTHER; note = 2-fluororibose adenine
  modified_base 7..8: mod_base = OTHER; note = S-phosphorothioate
  modified_base 8: mod_base = OTHER; note = 2-fluororibose guanine
  modified_base 8..9: mod_base = OTHER; note = S-phosphorothioate
  modified_base 9: mod_base = OTHER; note = 2-fluororibose cytosine
  modified_base 9..10: mod_base = OTHER; note = S-phosphorothioate
  modified_base 10: mod_base = OTHER; note = 2-fluororibose uracil
  modified_base 10..11: mod_base = OTHER; note = S-phosphorothioate
  modified_base 11: mod_base = OTHER; note = 2-fluororibose uracil
  modified_base 11..12: mod_base = OTHER; note = S-phosphorothioate
  modified_base 12: mod_base = OTHER; note = 2-fluororibose cytosine
  modified_base 12..13: mod_base = OTHER; note = S-phosphorothioate
  modified_base 13: mod_base = OTHER; note = 2-fluororibose adenine
  modified_base 13..14: mod_base = OTHER; note = S-phosphorothioate
  modified_base 14: mod_base = OTHER; note = 2-fluororibose guanine
  modified_base 14..15: mod_base = OTHER; note = S-phosphorothioate
  modified_base 15: mod_base = OTHER; note = 2-fluororibose uracil
  modified_base 15..16: mod_base = OTHER; note = S-phosphorothioate
  modified_base 16: mod_base = cm
  modified_base 16..17: mod_base = OTHER; note = S-phosphorothioate
  modified_base 17: mod_base = cm
  modified_base 17..18: mod_base = OTHER; note = S-phosphorothioate
  modified_base 18: mod_base = cm
  modified_base 18..19: mod_base = OTHER; note = S-phosphorothioate
  modified_base 19: mod_base = um
  modified_base 20: mod_base = um
  modified_base 20..21: mod_base = OTHER; note = S-phosphorothioate
  modified_base 21: mod_base = um
  modified_base 21..22: mod_base = OTHER; note = S-phosphorothioate
  modified_base 22: mod_base = cm
  modified_base 22..23: mod_base = OTHER; note = S-phosphorothioate
  modified_base 23: mod_base = OTHER; note = 2-fluororibose uracil
  modified_base 23..24: mod_base = OTHER; note = S-phosphorothioate
  modified_base 24: mod_base = OTHER; note = deoxyribose 6-amino-9-substituted 8,9-dihydro-7H-purin-8-one
  modified_base 24..25: mod_base = OTHER; note = S-phosphorothioate
  modified_base 25: mod_base = OTHER; note = deoxyribose inosine
  modified_base 25..26: mod_base = OTHER; note S-N-(1,3-dimethylimidazolidin-2-ylidene)phosphoramidate
  modified_base 26: mod_base = um
  modified_base 26..27: mod_base = OTHER; note = S-phosphorothioate
  modified_base 27: mod_base = cm
  modified_base 27..28: mod_base = OTHER; note = S-phosphorothioate
  modified_base 28: mod_base = gm
  modified_base 28..29: mod_base = OTHER; note = S-phosphorothioate
  modified_base 29: mod_base = OTHER; note = 2-O-methylribose adenine
  modified_base 29..30: mod_base = OTHER; note R-N-(1,3-dimethylimidazolidin-2-ylidene)phosphoramidate
  modified_base 30: mod_base = um
  source 1..30: mol_type = other RNA

SEQ ID NO: 255 - RNA, 30 nt, synthetic construct; identical to SEQ ID NO: 134
  misc_feature 1..30: note = Synthetic: WV-43040
  misc_feature 1..30: note = Synthetic: ADR-0103661
  modified_base 1: mod_base = OTHER; note = 2-fluororibose cytosine
  modified_base 1..2: mod_base = OTHER; note R-N-(1,3-dimethylimidazolidin-2-ylidene)phosphoramidate
  modified_base 2: mod_base = OTHER; note = 2-fluororibose cytosine
  modified_base 2..3: mod_base = OTHER; note = S-phosphorothioate
  modified_base 3: mod_base = OTHER; note = 2-fluororibose cytosine
  modified_base 3..4: mod_base = OTHER; note = S-phosphorothioate
  modified_base 4: mod_base = OTHER; note = 2-fluororibose adenine
  modified_base 4..5: mod_base = OTHER; note = S-phosphorothioate
  modified_base 5: mod_base = OTHER; note = 2-fluororibose guanine
  modified_base 5..6: mod_base = OTHER; note = S-phosphorothioate
  modified_base 6: mod_base = OTHER; note = 2-fluororibose cytosine
  modified_base 6..7: mod_base = OTHER; note = S-phosphorothioate
  modified_base 7: mod_base = OTHER; note = 2-fluororibose adenine
  modified_base 7..8: mod_base = OTHER; note = S-phosphorothioate
  modified_base 8: mod_base = OTHER; note = 2-fluororibose guanine
  modified_base 8..9: mod_base = OTHER; note = S-phosphorothioate
  modified_base 9: mod_base = OTHER; note = 2-fluororibose cytosine
  modified_base 9..10: mod_base = OTHER; note = S-phosphorothioate
  modified_base 10: mod_base = OTHER; note = 2-fluororibose uracil
  modified_base 10..11: mod_base = OTHER; note = S-phosphorothioate
  modified_base 11: mod_base = OTHER; note = 2-fluororibose uracil
  modified_base 11..12: mod_base = OTHER; note = S-phosphorothioate
  modified_base 12: mod_base = OTHER; note = 2-fluororibose cytosine
  modified_base 12..13: mod_base = OTHER; note = S-phosphorothioate
  modified_base 13: mod_base = OTHER; note = 2-fluororibose adenine
  modified_base 13..14: mod_base = OTHER; note = S-phosphorothioate
  modified_base 14: mod_base = OTHER; note = 2-fluororibose guanine
  modified_base 14..15: mod_base = OTHER; note = S-phosphorothioate
  modified_base 15: mod_base = OTHER; note = 2-fluororibose uracil
  modified_base 15..16: mod_base = OTHER; note = S-phosphorothioate
  modified_base 16: mod_base = cm
  modified_base 16..17: mod_base = OTHER; note = S-phosphorothioate
  modified_base 17: mod_base = cm
  modified_base 17..18: mod_base = OTHER; note = S-phosphorothioate
  modified_base 18: mod_base = cm
  modified_base 19: mod_base = um
  modified_base 19..20: mod_base = OTHER; note = S-phosphorothioate
  modified_base 20: mod_base = um
  modified_base 20..21: mod_base = OTHER; note = S-phosphorothioate
  modified_base 21: mod_base = um
  modified_base 21..22: mod_base = OTHER; note = S-phosphorothioate
  modified_base 22: mod_base = cm
  modified_base 22..23: mod_base = OTHER; note = S-phosphorothioate
  modified_base 23: mod_base = OTHER; note = 2-fluororibose uracil
  modified_base 23..24: mod_base = OTHER; note = S-phosphorothioate
  modified_base 24: mod_base = OTHER; note = deoxyribose 6-amino-9-substituted 8,9-dihydro-7H-purin-8-one
  modified_base 24..25: mod_base = OTHER; note = S-phosphorothioate
  modified_base 25: mod_base = OTHER; note = deoxyribose inosine
  modified_base 25..26: mod_base = OTHER; note S-N-(1,3-dimethylimidazolidin-2-ylidene)phosphoramidate
  modified_base 26: mod_base = um
  modified_base 26..27: mod_base = OTHER; note = S-phosphorothioate
  modified_base 27: mod_base = cm
  modified_base 27..28: mod_base = OTHER; note = S-phosphorothioate
  modified_base 28: mod_base = gm
  modified_base 28..29: mod_base = OTHER; note = S-phosphorothioate
  modified_base 29: mod_base = OTHER; note = 2-O-methylribose adenine
  modified_base 29..30: mod_base = OTHER; note R-N-(1,3-dimethylimidazolidin-2-ylidene)phosphoramidate
  modified_base 30: mod_base = um
  source 1..30: mol_type = other RNA

SEQ ID NO: 256 - RNA, 30 nt, synthetic construct; identical to SEQ ID NO: 134
  misc_feature 1..30: note = Synthetic: WV-43039
  misc_feature 1..30: note = Synthetic: ADR-0103664
  modified_base 1: mod_base = OTHER; note = 2-fluororibose cytosine
  modified_base 1..2: mod_base = OTHER; note R-N-(1,3-dimethylimidazolidin-2-ylidene)phosphoramidate
  modified_base 2: mod_base = OTHER; note = 2-fluororibose cytosine
  modified_base 2..3: mod_base = OTHER; note = S-phosphorothioate
  modified_base 3: mod_base = OTHER; note = 2-fluororibose cytosine
  modified_base 3..4: mod_base = OTHER; note = S-phosphorothioate
  modified_base 4: mod_base = OTHER; note = 2-fluororibose adenine
  modified_base 4..5: mod_base = OTHER; note = S-phosphorothioate
  modified_base 5: mod_base = OTHER; note = 2-fluororibose guanine
  modified_base 5..6: mod_base = OTHER; note = S-phosphorothioate
  modified_base 6: mod_base = OTHER; note = 2-fluororibose cytosine
  modified_base 6..7: mod_base = OTHER; note = S-phosphorothioate
  modified_base 7: mod_base = OTHER; note = 2-fluororibose adenine
  modified_base 7..8: mod_base = OTHER; note = S-phosphorothioate
  modified_base 8: mod_base = OTHER; note = 2-fluororibose guanine
  modified_base 8..9: mod_base = OTHER; note = S-phosphorothioate
  modified_base 9: mod_base = OTHER; note = 2-fluororibose cytosine
  modified_base 9..10: mod_base = OTHER; note = S-phosphorothioate
  modified_base 10: mod_base = OTHER; note = 2-fluororibose uracil
  modified_base 10..11: mod_base = OTHER; note = S-phosphorothioate
  modified_base 11: mod_base = OTHER; note = 2-fluororibose uracil
  modified_base 11..12: mod_base = OTHER; note = S-phosphorothioate
  modified_base 12: mod_base = OTHER; note = 2-fluororibose cytosine
  modified_base 12..13: mod_base = OTHER; note = S-phosphorothioate
  modified_base 13: mod_base = OTHER; note = 2-fluororibose adenine
  modified_base 13..14: mod_base = OTHER; note = S-phosphorothioate
  modified_base 14: mod_base = OTHER; note = 2-fluororibose guanine
  modified_base 14..15: mod_base = OTHER; note = S-phosphorothioate
  modified_base 15: mod_base = OTHER; note = 2-fluororibose uracil
  modified_base 15..16: mod_base = OTHER; note = S-phosphorothioate
  modified_base 16: mod_base = cm
  modified_base 16..17: mod_base = OTHER; note = S-phosphorothioate
  modified_base 17: mod_base = cm
  modified_base 18: mod_base = cm
  modified_base 18..19: mod_base = OTHER; note = S-phosphorothioate
  modified_base 19: mod_base = um
  modified_base 19..20: mod_base = OTHER; note = S-phosphorothioate
  modified_base 20: mod_base = um
  modified_base 20..21: mod_base = OTHER; note = S-phosphorothioate
  modified_base 21: mod_base = um
  modified_base 21..22: mod_base = OTHER; note = S-phosphorothioate
  modified_base 22: mod_base = cm
  modified_base 22..23: mod_base = OTHER; note = S-phosphorothioate
  modified_base 23: mod_base = OTHER; note = 2-fluororibose uracil
  modified_base 23..24: mod_base = OTHER; note = S-phosphorothioate
  modified_base 24: mod_base = OTHER; note = deoxyribose 6-amino-9-substituted 8,9-dihydro-7H-purin-8-one
  modified_base 24..25: mod_base = OTHER; note = S-phosphorothioate
  modified_base 25: mod_base = OTHER; note = deoxyribose inosine
  modified_base 25..26: mod_base = OTHER; note S-N-(1,3-dimethylimidazolidin-2-ylidene)phosphoramidate
  modified_base 26: mod_base = um
  modified_base 26..27: mod_base = OTHER; note = S-phosphorothioate
  modified_base 27: mod_base = cm
  modified_base 27..28: mod_base = OTHER; note = S-phosphorothioate
  modified_base 28: mod_base = gm
  modified_base 28..29: mod_base = OTHER; note = S-phosphorothioate
  modified_base 29: mod_base = OTHER; note = 2-O-methylribose adenine
  modified_base 29..30: mod_base = OTHER; note R-N-(1,3-dimethylimidazolidin-2-ylidene)phosphoramidate
  modified_base 30: mod_base = um
  source 1..30: mol_type = other RNA

SEQ ID NO: 257 - RNA, 30 nt, synthetic construct; identical to SEQ ID NO: 134
  misc_feature 1..30: note = Synthetic: WV-43038
  misc_feature 1..30: note = Synthetic: ADR-0103667
  modified_base 1: mod_base = OTHER; note = 2-fluororibose cytosine
  modified_base 1..2: mod_base = OTHER; note R-N-(1,3-dimethylimidazolidin-2-ylidene)phosphoramidate
  modified_base 2: mod_base = OTHER; note = 2-fluororibose cytosine
  modified_base 2..3: mod_base = OTHER; note = S-phosphorothioate
  modified_base 3: mod_base = OTHER; note = 2-fluororibose cytosine
  modified_base 3..4: mod_base = OTHER; note = S-phosphorothioate
  modified_base 4: mod_base = OTHER; note = 2-fluororibose adenine
  modified_base 4..5: mod_base = OTHER; note = S-phosphorothioate
  modified_base 5: mod_base = OTHER; note = 2-fluororibose guanine
  modified_base 5..6: mod_base = OTHER; note = S-phosphorothioate
  modified_base 6: mod_base = OTHER; note = 2-fluororibose cytosine
  modified_base 6..7: mod_base = OTHER; note = S-phosphorothioate
  modified_base 7: mod_base = OTHER; note = 2-fluororibose adenine
  modified_base 7..8: mod_base = OTHER; note = S-phosphorothioate
  modified_base 8: mod_base = OTHER; note = 2-fluororibose guanine
  modified_base 8..9: mod_base = OTHER; note = S-phosphorothioate
  modified_base 9: mod_base = OTHER; note = 2-fluororibose cytosine
  modified_base 9..10: mod_base = OTHER; note = S-phosphorothioate
  modified_base 10: mod_base = OTHER; note = 2-fluororibose uracil
  modified_base 10..11: mod_base = OTHER; note = S-phosphorothioate
  modified_base 11: mod_base = OTHER; note = 2-fluororibose uracil
  modified_base 11..12: mod_base = OTHER; note = S-phosphorothioate
  modified_base 12: mod_base = OTHER; note = 2-fluororibose cytosine
  modified_base 12..13: mod_base = OTHER; note = S-phosphorothioate
  modified_base 13: mod_base = OTHER; note = 2-fluororibose adenine
  modified_base 13..14: mod_base = OTHER; note = S-phosphorothioate
  modified_base 14: mod_base = OTHER; note = 2-fluororibose guanine
  modified_base 14..15: mod_base = OTHER; note = S-phosphorothioate
  modified_base 15: mod_base = OTHER; note = 2-fluororibose uracil
  modified_base 15..16: mod_base = OTHER; note = S-phosphorothioate
  modified_base 16: mod_base = cm
  modified_base 17: mod_base = cm
  modified_base 17..18: mod_base = OTHER; note = S-phosphorothioate
  modified_base 18: mod_base = cm
  modified_base 18..19: mod_base = OTHER; note = S-phosphorothioate
  modified_base 19: mod_base = um
  modified_base 19..20: mod_base = OTHER; note = S-phosphorothioate
  modified_base 20: mod_base = um
  modified_base 20..21: mod_base = OTHER; note = S-phosphorothioate
  modified_base 21: mod_base = um
  modified_base 21..22: mod_base = OTHER; note = S-phosphorothioate
  modified_base 22: mod_base = cm
  modified_base 22..23: mod_base = OTHER; note = S-phosphorothioate
  modified_base 23: mod_base = OTHER; note = 2-fluororibose uracil
  modified_base 23..24: mod_base = OTHER; note = S-phosphorothioate
  modified_base 24: mod_base = OTHER; note = deoxyribose 6-amino-9-substituted 8,9-dihydro-7H-purin-8-one
  modified_base 24..25: mod_base = OTHER; note = S-phosphorothioate
  modified_base 25: mod_base = OTHER; note = deoxyribose inosine
  modified_base 25..26: mod_base = OTHER; note S-N-(1,3-dimethylimidazolidin-2-ylidene)phosphoramidate
  modified_base 26: mod_base = um
  modified_base 26..27: mod_base = OTHER; note = S-phosphorothioate
  modified_base 27: mod_base = cm
  modified_base 27..28: mod_base = OTHER; note = S-phosphorothioate
  modified_base 28: mod_base = gm
  modified_base 28..29: mod_base = OTHER; note = S-phosphorothioate
  modified_base 29: mod_base = OTHER; note = 2-O-methylribose adenine
  modified_base 29..30: mod_base = OTHER; note R-N-(1,3-dimethylimidazolidin-2-ylidene)phosphoramidate
  modified_base 30: mod_base = um
  source 1..30: mol_type = other RNA

SEQ ID NO: 258 - RNA, 30 nt, synthetic construct; identical to SEQ ID NO: 134
  misc_feature 1..30: note = Synthetic: WV-43118
  misc_feature 1..30: note = Synthetic: ADR-0100467
  modified_base 1: mod_base = OTHER; note = triantennary GalNAc with C12 linker linked to 6-aminohexanol linked by phosphate to the 5' end of 2-fluororibose cytosine
  modified_base 1..2: mod_base = OTHER; note R-N-(1,3-dimethylimidazolidin-2-ylidene)phosphoramidate
  modified_base 2: mod_base = OTHER; note = 2-fluororibose cytosine
  modified_base 2..3: mod_base = OTHER; note = S-phosphorothioate
  modified_base 3: mod_base = OTHER; note = 2-fluororibose cytosine
  modified_base 3..4: mod_base = OTHER; note = S-phosphorothioate
  modified_base 4: mod_base = OTHER; note = 2-fluororibose adenine
  modified_base 4..5: mod_base = OTHER; note = S-phosphorothioate
  modified_base 5: mod_base = OTHER; note = 2-fluororibose guanine
  modified_base 5..6: mod_base = OTHER; note = S-phosphorothioate
  modified_base 6: mod_base = OTHER; note = 2-fluororibose cytosine
  modified_base 6..7: mod_base = OTHER; note = S-phosphorothioate
  modified_base 7: mod_base = OTHER; note = 2-fluororibose adenine
  modified_base 7..8: mod_base = OTHER; note = S-phosphorothioate
  modified_base 8: mod_base = OTHER; note = 2-fluororibose guanine
  modified_base 8..9: mod_base = OTHER; note = S-phosphorothioate
  modified_base 9: mod_base = OTHER; note = 2-fluororibose cytosine
  modified_base 9..10: mod_base = OTHER; note = S-phosphorothioate
  modified_base 10: mod_base = OTHER; note = 2-fluororibose uracil
  modified_base 10..11: mod_base = OTHER; note = S-phosphorothioate
  modified_base 11: mod_base = OTHER; note = 2-fluororibose uracil
  modified_base 11..12: mod_base = OTHER; note = S-phosphorothioate
  modified_base 12: mod_base = OTHER; note = 2-fluororibose cytosine
  modified_base 12..13: mod_base = OTHER; note = S-phosphorothioate
  modified_base 13: mod_base = OTHER; note = 2-fluororibose adenine
  modified_base 13..14: mod_base = OTHER; note = S-phosphorothioate
  modified_base 14: mod_base = OTHER; note = 2-fluororibose guanine
  modified_base 14..15: mod_base = OTHER; note = S-phosphorothioate
  modified_base 15: mod_base = OTHER; note = 2-fluororibose uracil
  modified_base 15..16: mod_base = OTHER; note = S-phosphorothioate
  modified_base 16: mod_base = OTHER; note = 2-fluororibose cytosine
  modified_base 16..17: mod_base = OTHER; note = S-phosphorothioate
  modified_base 17: mod_base = OTHER; note = 2-fluororibose cytosine
  modified_base 17..18: mod_base = OTHER; note = S-phosphorothioate
  modified_base 18: mod_base = OTHER; note = 2-fluororibose cytosine
  modified_base 18..19: mod_base = OTHER; note = S-phosphorothioate
  modified_base 19: mod_base = OTHER; note = 2-fluororibose uracil
  modified_base 19..20: mod_base = OTHER; note = S-phosphorothioate
  modified_base 20: mod_base = OTHER; note = 2-fluororibose uracil
  modified_base 20..21: mod_base = OTHER; note = S-phosphorothioate
  modified_base 21: mod_base = OTHER; note = 2-fluororibose uracil
  modified_base 21..22: mod_base = OTHER; note = S-phosphorothioate
  modified_base 22: mod_base = cm
  modified_base 22..23: mod_base = OTHER; note = S-phosphorothioate
  modified_base 23: mod_base = OTHER; note = 2-fluororibose uracil
  modified_base 23..24: mod_base = OTHER; note = S-phosphorothioate
  modified_base 24: mod_base = OTHER; note = deoxyribose 6-amino-9-substituted 8,9-dihydro-7H-purin-8-one
  modified_base 24..25: mod_base = OTHER; note = S-phosphorothioate
  modified_base 25: mod_base = OTHER; note = deoxyribose inosine
  modified_base 25..26: mod_base = OTHER; note S-N-(1,3-dimethylimidazolidin-2-ylidene)phosphoramidate
  modified_base 26: mod_base = um
  modified_base 26..27: mod_base = OTHER; note = S-phosphorothioate
  modified_base 27: mod_base = cm
  modified_base 27..28: mod_base = OTHER; note = S-phosphorothioate
  modified_base 28: mod_base = OTHER; note = 2-fluororibose guanine
  modified_base 28..29: mod_base = OTHER; note = S-phosphorothioate
  modified_base 29: mod_base = OTHER; note = 2-fluororibose adenine
  modified_base 29..30: mod_base = OTHER; note R-N-(1,3-dimethylimidazolidin-2-ylidene)phosphoramidate
  modified_base 30: mod_base = um
  source 1..30: mol_type = other RNA

SEQ ID NO: 259 - RNA, 30 nt, synthetic construct; identical to SEQ ID NO: 134
  misc_feature 1..30: note = Synthetic: WV-43119
  misc_feature 1..30: note = Synthetic: ADR-0100468
  modified_base 1: mod_base = OTHER; note = triantennary GalNAc with C12 linker linked to 6-aminohexanol linked by phosphate to the 5' end of 2-fluororibose cytosine
  modified_base 1..2: mod_base = OTHER; note R-N-(1,3-dimethylimidazolidin-2-ylidene)phosphoramidate
  modified_base 2: mod_base = OTHER; note = 2-fluororibose cytosine
  modified_base 2..3: mod_base = OTHER; note = S-phosphorothioate
  modified_base 3: mod_base = OTHER; note = 2-fluororibose cytosine
  modified_base 3..4: mod_base = OTHER; note = S-phosphorothioate
  modified_base 4: mod_base = OTHER; note = 2-fluororibose adenine
  modified_base 4..5: mod_base = OTHER; note = S-phosphorothioate
  modified_base 5: mod_base = OTHER; note = 2-fluororibose guanine
  modified_base 5..6: mod_base = OTHER; note = S-phosphorothioate
  modified_base 6: mod_base = OTHER; note = 2-fluororibose cytosine
  modified_base 6..7: mod_base = OTHER; note = S-phosphorothioate
  modified_base 7: mod_base = OTHER; note = 2-fluororibose adenine
  modified_base 7..8: mod_base = OTHER; note = S-phosphorothioate
  modified_base 8: mod_base = OTHER; note = 2-fluororibose guanine
  modified_base 8..9: mod_base = OTHER; note = S-phosphorothioate
  modified_base 9: mod_base = OTHER; note = 2-fluororibose cytosine
  modified_base 9..10: mod_base = OTHER; note = S-phosphorothioate
  modified_base 10: mod_base = OTHER; note = 2-fluororibose uracil
  modified_base 10..11: mod_base = OTHER; note = S-phosphorothioate
  modified_base 11: mod_base = OTHER; note = 2-fluororibose uracil
  modified_base 11..12: mod_base = OTHER; note = S-phosphorothioate
  modified_base 12: mod_base = OTHER; note = 2-fluororibose cytosine
  modified_base 12..13: mod_base = OTHER; note = S-phosphorothioate
  modified_base 13: mod_base = OTHER; note = 2-fluororibose adenine
  modified_base 13..14: mod_base = OTHER; note = S-phosphorothioate
  modified_base 14: mod_base = OTHER; note = 2-fluororibose guanine
  modified_base 14..15: mod_base = OTHER; note = S-phosphorothioate
  modified_base 15: mod_base = OTHER; note = 2-fluororibose uracil
  modified_base 15..16: mod_base = OTHER; note = S-phosphorothioate
  modified_base 16: mod_base = OTHER; note = 2-fluororibose cytosine
  modified_base 16..17: mod_base = OTHER; note = S-phosphorothioate
  modified_base 17: mod_base = OTHER; note = 2-fluororibose cytosine
  modified_base 17..18: mod_base = OTHER; note = S-phosphorothioate
  modified_base 18: mod_base = OTHER; note = 2-fluororibose cytosine
  modified_base 18..19: mod_base = OTHER; note = S-phosphorothioate
  modified_base 19: mod_base = OTHER; note = 2-fluororibose uracil
  modified_base 19..20: mod_base = OTHER; note = S-phosphorothioate
  modified_base 20: mod_base = OTHER; note = 2-fluororibose uracil
  modified_base 20..21: mod_base = OTHER; note = S-phosphorothioate
  modified_base 21: mod_base = OTHER; note = 2-fluororibose uracil
  modified_base 21..22: mod_base = OTHER; note = S-phosphorothioate
  modified_base 22: mod_base = OTHER; note = 2-fluororibose cytosine
  modified_base 22..23: mod_base = OTHER; note = S-phosphorothioate
  modified_base 23: mod_base = OTHER; note = 2-fluororibose uracil
  modified_base 23..24: mod_base = OTHER; note = S-phosphorothioate
  modified_base 24: mod_base = OTHER; note = deoxyribose 6-amino-9-substituted 8,9-dihydro-7H-purin-8-one
  modified_base 24..25: mod_base = OTHER; note = S-phosphorothioate
  modified_base 25: mod_base = OTHER; note = deoxyribose inosine
  modified_base 25..26: mod_base = OTHER; note S-N-(1,3-dimethylimidazolidin-2-ylidene)phosphoramidate
  modified_base 26: mod_base = um
  modified_base 26..27: mod_base = OTHER; note = S-phosphorothioate
  modified_base 27: mod_base = OTHER; note = 2-fluororibose cytosine
  modified_base 27..28: mod_base = OTHER; note = S-phosphorothioate
  modified_base 28: mod_base = gm
  modified_base 28..29: mod_base = OTHER; note = S-phosphorothioate
  modified_base 29: mod_base = OTHER; note = 2-O-methylribose adenine
  modified_base 29..30: mod_base = OTHER; note R-N-(1,3-dimethylimidazolidin-2-ylidene)phosphoramidate
  modified_base 30: mod_base = um
  source 1..30: mol_type = other RNA

SEQ ID NO: 260 - RNA, 30 nt, synthetic construct; identical to SEQ ID NO: 134
  misc_feature 1..30: note = Synthetic: WV-43120
  misc_feature 1..30: note = Synthetic: ADR-0100469
  modified_base 1: mod_base = OTHER; note = triantennary GalNAc with C12 linker linked to 6-aminohexanol linked by phosphate to the 5' end of 2-O-methylribose cytosine
  modified_base 1..2: mod_base = OTHER; note R-N-(1,3-dimethylimidazolidin-2-ylidene)phosphoramidate
  modified_base 2: mod_base = cm
  modified_base 2..3: mod_base = OTHER; note = S-phosphorothioate
  modified_base 3: mod_base = cm
  modified_base 3..4: mod_base = OTHER; note = S-phosphorothioate
  modified_base 4: mod_base = OTHER; note = 2-fluororibose adenine
  modified_base 4..5: mod_base = OTHER; note = S-phosphorothioate
  modified_base 5: mod_base = OTHER; note = 2-fluororibose guanine
  modified_base 5..6: mod_base = OTHER; note = S-phosphorothioate
  modified_base 6: mod_base = OTHER; note = 2-fluororibose cytosine
  modified_base 6..7: mod_base = OTHER; note = S-phosphorothioate
  modified_base 7: mod_base = OTHER; note = 2-fluororibose adenine
  modified_base 7..8: mod_base = OTHER; note = S-phosphorothioate
  modified_base 8: mod_base = OTHER; note = 2-fluororibose guanine
  modified_base 8..9: mod_base = OTHER; note = S-phosphorothioate
  modified_base 9: mod_base = OTHER; note = 2-fluororibose cytosine
  modified_base 9..10: mod_base = OTHER; note = S-phosphorothioate
  modified_base 10: mod_base = OTHER; note = 2-fluororibose uracil
  modified_base 10..11: mod_base = OTHER; note = S-phosphorothioate
  modified_base 11: mod_base = OTHER; note = 2-fluororibose uracil
  modified_base 11..12: mod_base = OTHER; note = S-phosphorothioate
  modified_base 12: mod_base = OTHER; note = 2-fluororibose cytosine
  modified_base 12..13: mod_base = OTHER; note = S-phosphorothioate
  modified_base 13: mod_base = OTHER; note = 2-fluororibose adenine
  modified_base 13..14: mod_base = OTHER; note = S-phosphorothioate
  modified_base 14: mod_base = OTHER; note = 2-fluororibose guanine
  modified_base 14..15: mod_base = OTHER; note = S-phosphorothioate
  modified_base 15: mod_base = OTHER; note = 2-fluororibose uracil
  modified_base 15..16: mod_base = OTHER; note = S-phosphorothioate
  modified_base 16: mod_base = OTHER; note = 2-fluororibose cytosine
  modified_base 16..17: mod_base = OTHER; note = S-phosphorothioate
  modified_base 17: mod_base = OTHER; note = 2-fluororibose cytosine
  modified_base 17..18: mod_base = OTHER; note = S-phosphorothioate
  modified_base 18: mod_base = OTHER; note = 2-fluororibose cytosine
  modified_base 18..19: mod_base = OTHER; note = S-phosphorothioate
  modified_base 19: mod_base = OTHER; note = 2-fluororibose uracil
  modified_base 19..20: mod_base = OTHER; note = S-phosphorothioate
  modified_base 20: mod_base = OTHER; note = 2-fluororibose uracil
  modified_base 20..21: mod_base = OTHER; note = S-phosphorothioate
  modified_base 21: mod_base = OTHER; note = 2-fluororibose uracil
  modified_base 21..22: mod_base = OTHER; note = S-phosphorothioate
  modified_base 22: mod_base = OTHER; note = 2-fluororibose cytosine
  modified_base 22..23: mod_base = OTHER; note = S-phosphorothioate
  modified_base 23: mod_base = OTHER; note = 2-fluororibose uracil
  modified_base 23..24: mod_base = OTHER; note = S-phosphorothioate
  modified_base 24: mod_base = OTHER; note = deoxyribose 6-amino-9-substituted 8,9-dihydro-7H-purin-8-one
  modified_base 24..25: mod_base = OTHER; note = S-phosphorothioate
  modified_base 25: mod_base = OTHER; note = deoxyribose inosine
  modified_base 25..26: mod_base = OTHER; note S-N-(1,3-dimethylimidazolidin-2-ylidene)phosphoramidate
  modified_base 26: mod_base = um
  modified_base 26..27: mod_base = OTHER; note = S-phosphorothioate
  modified_base 27: mod_base = OTHER; note = 2-fluororibose cytosine
  modified_base 27..28: mod_base = OTHER; note = S-phosphorothioate
  modified_base 28: mod_base = gm
  modified_base 28..29: mod_base = OTHER; note = S-phosphorothioate
  modified_base 29: mod_base = OTHER; note = 2-O-methylribose adenine
  modified_base 29..30: mod_base = OTHER; note R-N-(1,3-dimethylimidazolidin-2-ylidene)phosphoramidate
  modified_base 30: mod_base = um
  source 1..30: mol_type = other RNA

SEQ ID NO: 261 - RNA, 30 nt, synthetic construct; identical to SEQ ID NO: 134
  misc_feature 1..30: note = Synthetic: WV-43121
  misc_feature 1..30: note = Synthetic: ADR-0100470
  modified_base 1: mod_base = OTHER; note = triantennary GalNAc with C12 linker linked to 6-aminohexanol linked by phosphate to the 5' end of 2-fluororibose cytosine
  modified_base 1..2: mod_base = OTHER; note R-N-(1,3-dimethylimidazolidin-2-ylidene)phosphoramidate
  modified_base 2: mod_base = OTHER; note = 2-fluororibose cytosine
  modified_base 2..3: mod_base = OTHER; note = S-phosphorothioate
  modified_base 3: mod_base = OTHER; note = 2-fluororibose cytosine
  modified_base 3..4: mod_base = OTHER; note R-N-(1,3-dimethylimidazolidin-2-ylidene)phosphoramidate
  modified_base 4: mod_base = OTHER; note = 2-fluororibose adenine
  modified_base 4..5: mod_base = OTHER; note = S-phosphorothioate
  modified_base 5: mod_base = OTHER; note = 2-fluororibose guanine
  modified_base 5..6: mod_base = OTHER; note = S-phosphorothioate
  modified_base 6: mod_base = OTHER; note = 2-fluororibose cytosine
  modified_base 6..7: mod_base = OTHER; note R-N-(1,3-dimethylimidazolidin-2-ylidene)phosphoramidate
  modified_base 7: mod_base = OTHER; note = 2-fluororibose adenine
  modified_base 7..8: mod_base = OTHER; note = S-phosphorothioate
  modified_base 8: mod_base = OTHER; note = 2-fluororibose guanine
  modified_base 8..9: mod_base = OTHER; note = S-phosphorothioate
  modified_base 9: mod_base = OTHER; note = 2-fluororibose cytosine
  modified_base 9..10: mod_base = OTHER; note = S-phosphorothioate
  modified_base 10: mod_base = OTHER; note = 2-fluororibose uracil
  modified_base 10..11: mod_base = OTHER; note = S-phosphorothioate
  modified_base 11: mod_base = OTHER; note = 2-fluororibose uracil
  modified_base 11..12: mod_base = OTHER; note = S-phosphorothioate
  modified_base 12: mod_base = OTHER; note = 2-fluororibose cytosine
  modified_base 12..13: mod_base = OTHER; note = S-phosphorothioate
  modified_base 13: mod_base = OTHER; note = 2-fluororibose adenine
  modified_base 13..14: mod_base = OTHER; note = S-phosphorothioate
  modified_base 14: mod_base = OTHER; note = 2-fluororibose guanine
  modified_base 14..15: mod_base = OTHER; note R-N-(1,3-dimethylimidazolidin-2-ylidene)phosphoramidate
  modified_base 15: mod_base = OTHER; note = 2-fluororibose uracil
  modified_base 15..16: mod_base = OTHER; note = S-phosphorothioate
  modified_base 16: mod_base = OTHER; note = 2-fluororibose cytosine
  modified_base 16..17: mod_base = OTHER; note R-N-(1,3-dimethylimidazolidin-2-ylidene)phosphoramidate
  modified_base 17: mod_base = OTHER; note = 2-fluororibose cytosine
  modified_base 17..18: mod_base = OTHER; note = S-phosphorothioate
  modified_base 18: mod_base = OTHER; note = 2-fluororibose cytosine
  modified_base 18..19: mod_base = OTHER; note = S-phosphorothioate
  modified_base 19: mod_base = OTHER; note = 2-fluororibose uracil
  modified_base 19..20: mod_base = OTHER; note = S-phosphorothioate
  modified_base 20: mod_base = OTHER; note = 2-fluororibose uracil
  modified_base 20..21: mod_base = OTHER; note R-N-(1,3-dimethylimidazolidin-2-ylidene)phosphoramidate
  modified_base 21: mod_base = OTHER; note = 2-fluororibose uracil
  modified_base 21..22: mod_base = OTHER; note = S-phosphorothioate
  modified_base 22: mod_base = cm
  modified_base 22..23: mod_base = OTHER; note = S-phosphorothioate
  modified_base 23: mod_base = OTHER; note = 2-fluororibose uracil
  modified_base 23..24: mod_base = OTHER; note = S-phosphorothioate
  modified_base 24: mod_base = OTHER; note = deoxyribose 6-amino-9-substituted 8,9-dihydro-7H-purin-8-one
  modified_base 24..25: mod_base = OTHER; note = S-phosphorothioate
  modified_base 25: mod_base = OTHER; note = deoxyribose inosine
  modified_base 25..26: mod_base = OTHER; note S-N-(1,3-dimethylimidazolidin-2-ylidene)phosphoramidate
  modified_base 26: mod_base = um
  modified_base 26..27: mod_base = OTHER; note = S-phosphorothioate
  modified_base 27: mod_base = cm
  modified_base 27..28: mod_base = OTHER; note = S-phosphorothioate
  modified_base 28: mod_base = OTHER; note = 2-fluororibose guanine
  modified_base 28..29: mod_base = OTHER; note = S-phosphorothioate
  modified_base 29: mod_base = OTHER; note = 2-fluororibose adenine
  modified_base 29..30: mod_base = OTHER; note R-N-(1,3-dimethylimidazolidin-2-ylidene)phosphoramidate
  modified_base 30: mod_base = um
  source 1..30: mol_type = other RNA

SEQ ID NO: 262 - RNA, 30 nt, synthetic construct; identical to SEQ ID NO: 134
  misc_feature 1..30: note = Synthetic: WV-43122
  misc_feature 1..30: note = Synthetic: ADR-0100471
  modified_base 1: mod_base = OTHER; note = triantennary GalNAc with C12 linker linked to 6-aminohexanol linked by phosphate to the 5' end of 2-fluororibose cytosine
  modified_base 1..2: mod_base = OTHER; note R-N-(1,3-dimethylimidazolidin-2-ylidene)phosphoramidate
  modified_base 2: mod_base = OTHER; note = 2-fluororibose cytosine
  modified_base 2..3: mod_base = OTHER; note = S-phosphorothioate
  modified_base 3: mod_base = OTHER; note = 2-fluororibose cytosine
  modified_base 3..4: mod_base = OTHER; note R-N-(1,3-dimethylimidazolidin-2-ylidene)phosphoramidate
  modified_base 4: mod_base = OTHER; note = 2-fluororibose adenine
  modified_base 4..5: mod_base = OTHER; note = S-phosphorothioate
  modified_base 5: mod_base = OTHER; note = 2-fluororibose guanine
  modified_base 5..6: mod_base = OTHER; note = S-phosphorothioate
  modified_base 6: mod_base = OTHER; note = 2-fluororibose cytosine
  modified_base 6..7: mod_base = OTHER; note R-N-(1,3-dimethylimidazolidin-2-ylidene)phosphoramidate
  modified_base 7: mod_base = OTHER; note = 2-fluororibose adenine
  modified_base 7..8: mod_base = OTHER; note = S-phosphorothioate
  modified_base 8: mod_base = OTHER; note = 2-fluororibose guanine
  modified_base 8..9: mod_base = OTHER; note = S-phosphorothioate
  modified_base 9: mod_base = OTHER; note = 2-fluororibose cytosine
  modified_base 9..10: mod_base = OTHER; note = S-phosphorothioate
  modified_base 10: mod_base = OTHER; note = 2-fluororibose uracil
  modified_base 10..11: mod_base = OTHER; note = S-phosphorothioate
  modified_base 11: mod_base = OTHER; note = 2-fluororibose uracil
  modified_base 11..12: mod_base = OTHER; note = S-phosphorothioate
  modified_base 12: mod_base = OTHER; note = 2-fluororibose cytosine
  modified_base 12..13: mod_base = OTHER; note = S-phosphorothioate
  modified_base 13: mod_base = OTHER; note = 2-fluororibose adenine
  modified_base 13..14: mod_base = OTHER; note = S-phosphorothioate
  modified_base 14: mod_base = OTHER; note = 2-fluororibose guanine
  modified_base 14..15: mod_base = OTHER; note R-N-(1,3-dimethylimidazolidin-2-ylidene)phosphoramidate
  modified_base 15: mod_base = OTHER; note = 2-fluororibose uracil
  modified_base 15..16: mod_base = OTHER; note = S-phosphorothioate
  modified_base 16: mod_base = OTHER; note = 2-fluororibose cytosine
  modified_base 16..17: mod_base = OTHER; note R-N-(1,3-dimethylimidazolidin-2-ylidene)phosphoramidate
  modified_base 17: mod_base = OTHER; note = 2-fluororibose cytosine
  modified_base 17..18: mod_base = OTHER; note = S-phosphorothioate
  modified_base 18: mod_base = OTHER; note = 2-fluororibose cytosine
  modified_base 18..19: mod_base = OTHER; note = S-phosphorothioate
  modified_base 19: mod_base = OTHER; note = 2-fluororibose uracil
  modified_base 19..20: mod_base = OTHER; note = S-phosphorothioate
  modified_base 20: mod_base = OTHER; note = 2-fluororibose uracil
  modified_base 20..21: mod_base = OTHER; note R-N-(1,3-dimethylimidazolidin-2-ylidene)phosphoramidate
  modified_base 21: mod_base = OTHER; note = 2-fluororibose uracil
  modified_base 21..22: mod_base = OTHER; note = S-phosphorothioate
  modified_base 22: mod_base = OTHER; note = 2-fluororibose cytosine
  modified_base 22..23: mod_base = OTHER; note = S-phosphorothioate
  modified_base 23: mod_base = OTHER; note = 2-fluororibose uracil
  modified_base 23..24: mod_base = OTHER; note = S-phosphorothioate
  modified_base 24: mod_base = OTHER; note = deoxyribose 6-amino-9-substituted 8,9-dihydro-7H-purin-8-one
  modified_base 24..25: mod_base = OTHER; note = S-phosphorothioate
  modified_base 25: mod_base = OTHER; note = deoxyribose inosine
  modified_base 25..26: mod_base = OTHER; note S-N-(1,3-dimethylimidazolidin-2-ylidene)phosphoramidate
  modified_base 26: mod_base = um
  modified_base 26..27: mod_base = OTHER; note = S-phosphorothioate
  modified_base 27: mod_base = OTHER; note = 2-fluororibose cytosine
  modified_base 27..28: mod_base = OTHER; note = S-phosphorothioate
  modified_base 28: mod_base = gm
  modified_base 28..29: mod_base = OTHER; note = S-phosphorothioate
  modified_base 29: mod_base = OTHER; note = 2-O-methylribose adenine
  modified_base 29..30: mod_base = OTHER; note R-N-(1,3-dimethylimidazolidin-2-ylidene)phosphoramidate
  modified_base 30: mod_base = um
  source 1..30: mol_type = other RNA

SEQ ID NO: 263 - RNA, 30 nt, synthetic construct; identical to SEQ ID NO: 134
  misc_feature 1..30: note = Synthetic: WV-43123
  misc_feature 1..30: note = Synthetic: ADR-0100472
  modified_base 1: mod_base = OTHER; note = triantennary GalNAc with C12 linker linked to 6-aminohexanol linked by phosphate to the 5' end of 2-O-methylribose cytosine
  modified_base 1..2: mod_base = OTHER; note R-N-(1,3-dimethylimidazolidin-2-ylidene)phosphoramidate
  modified_base 2: mod_base = cm
  modified_base 2..3: mod_base = OTHER; note = S-phosphorothioate
  modified_base 3: mod_base = cm
  modified_base 3..4: mod_base = OTHER; note R-N-(1,3-dimethylimidazolidin-2-ylidene)phosphoramidate
  modified_base 4: mod_base = OTHER; note = 2-fluororibose adenine
  modified_base 4..5: mod_base = OTHER; note = S-phosphorothioate
  modified_base 5: mod_base = OTHER; note = 2-fluororibose guanine
  modified_base 5..6: mod_base = OTHER; note = S-phosphorothioate
  modified_base 6: mod_base = OTHER; note = 2-fluororibose cytosine
  modified_base 6..7: mod_base = OTHER; note R-N-(1,3-dimethylimidazolidin-2-ylidene)phosphoramidate
  modified_base 7: mod_base = OTHER; note = 2-fluororibose adenine
  modified_base 7..8: mod_base = OTHER; note = S-phosphorothioate
  modified_base 8: mod_base = OTHER; note = 2-fluororibose guanine
  modified_base 8..9: mod_base = OTHER; note = S-phosphorothioate
  modified_base 9: mod_base = OTHER; note = 2-fluororibose cytosine
  modified_base 9..10: mod_base = OTHER; note = S-phosphorothioate
  modified_base 10: mod_base = OTHER; note = 2-fluororibose uracil
  modified_base 10..11: mod_base = OTHER; note = S-phosphorothioate
  modified_base 11: mod_base = OTHER; note = 2-fluororibose uracil
  modified_base 11..12: mod_base = OTHER; note = S-phosphorothioate
  modified_base 12: mod_base = OTHER; note = 2-fluororibose cytosine
  modified_base 12..13: mod_base = OTHER; note = S-phosphorothioate
  modified_base 13: mod_base = OTHER; note = 2-fluororibose adenine
  modified_base 13..14: mod_base = OTHER; note = S-phosphorothioate
  modified_base 14: mod_base = OTHER; note = 2-fluororibose guanine
  modified_base 14..15: mod_base = OTHER; note R-N-(1,3-dimethylimidazolidin-2-ylidene)phosphoramidate
  modified_base 15: mod_base = OTHER; note = 2-fluororibose uracil
  modified_base 15..16: mod_base = OTHER; note = S-phosphorothioate
  modified_base 16: mod_base = OTHER; note = 2-fluororibose cytosine
  modified_base 16..17: mod_base = OTHER; note R-N-(1,3-dimethylimidazolidin-2-ylidene)phosphoramidate
  modified_base 17: mod_base = OTHER; note = 2-fluororibose cytosine
  modified_base 17..18: mod_base = OTHER; note = S-phosphorothioate
  modified_base 18: mod_base = OTHER; note = 2-fluororibose cytosine
  modified_base 18..19: mod_base = OTHER; note = S-phosphorothioate
  modified_base 19: mod_base = OTHER; note = 2-fluororibose uracil
  modified_base 19..20: mod_base = OTHER; note = S-phosphorothioate
  modified_base 20: mod_base = OTHER; note = 2-fluororibose uracil
  modified_base 20..21: mod_base = OTHER; note R-N-(1,3-dimethylimidazolidin-2-ylidene)phosphoramidate
  modified_base 21: mod_base = OTHER; note = 2-fluororibose uracil
  modified_base 21..22: mod_base = OTHER; note = S-phosphorothioate
  modified_base 22: mod_base = OTHER; note = 2-fluororibose cytosine
  modified_base 22..23: mod_base = OTHER; note = S-phosphorothioate
  modified_base 23: mod_base = OTHER; note = 2-fluororibose uracil
  modified_base 23..24: mod_base = OTHER; note = S-phosphorothioate
  modified_base 24: mod_base = OTHER; note = deoxyribose 6-amino-9-substituted 8,9-dihydro-7H-purin-8-one
  modified_base 24..25: mod_base = OTHER; note = S-phosphorothioate
  modified_base 25: mod_base = OTHER; note = deoxyribose inosine
  modified_base 25..26: mod_base = OTHER; note S-N-(1,3-dimethylimidazolidin-2-ylidene)phosphoramidate
  modified_base 26: mod_base = um
  modified_base 26..27: mod_base = OTHER; note = S-phosphorothioate
  modified_base 27: mod_base = OTHER; note = 2-fluororibose cytosine
  modified_base 27..28: mod_base = OTHER; note = S-phosphorothioate
  modified_base 28: mod_base = gm
  modified_base 28..29: mod_base = OTHER; note = S-phosphorothioate
  modified_base 29: mod_base = OTHER; note = 2-O-methylribose adenine
  modified_base 29..30: mod_base = OTHER; note R-N-(1,3-dimethylimidazolidin-2-ylidene)phosphoramidate
  modified_base 30: mod_base = um
  source 1..30: mol_type = other RNA

SEQ ID NO: 264 - RNA, 30 nt, synthetic construct; identical to SEQ ID NO: 81
  misc_feature 1..30: note = Synthetic: WV-43745
  misc_feature 1..30: note = Synthetic: ADR-0100490
  modified_base 1: mod_base = OTHER; note = triantennary GalNAc with C12 linker linked to 6-aminohexanol linked by phosphate to the 5' end of 2-fluororibose cytosine
  modified_base 1..2: mod_base = OTHER; note R-N-(1,3-dimethylimidazolidin-2-ylidene)phosphoramidate
  modified_base 2: mod_base = OTHER; note = 2-fluororibose cytosine
  modified_base 2..3: mod_base = OTHER; note = S-phosphorothioate
  modified_base 3: mod_base = OTHER; note = 2-fluororibose cytosine
  modified_base 3..4: mod_base = OTHER; note = S-phosphorothioate
  modified_base 4: mod_base = OTHER; note = 2-fluororibose cytosine
  modified_base 4..5: mod_base = OTHER; note = S-phosphorothioate
  modified_base 5: mod_base = OTHER; note = 2-fluororibose adenine
  modified_base 5..6: mod_base = OTHER; note = S-phosphorothioate
  modified_base 6: mod_base = OTHER; note = 2-fluororibose guanine
  modified_base 6..7: mod_base = OTHER; note = S-phosphorothioate
  modified_base 7: mod_base = OTHER; note = 2-fluororibose cytosine
  modified_base 7..8: mod_base = OTHER; note = S-phosphorothioate
  modified_base 8: mod_base = OTHER; note = 2-fluororibose adenine
  modified_base 8..9: mod_base = OTHER; note = S-phosphorothioate
  modified_base 9: mod_base = OTHER; note = 2-fluororibose guanine
  modified_base 9..10: mod_base = OTHER; note = S-phosphorothioate
  modified_base 10: mod_base = OTHER; note = 2-fluororibose cytosine
  modified_base 10..11: mod_base = OTHER; note = S-phosphorothioate
  modified_base 11: mod_base = OTHER; note = 2-fluororibose uracil
  modified_base 11..12: mod_base = OTHER; note = S-phosphorothioate
  modified_base 12: mod_base = OTHER; note = 2-fluororibose uracil
  modified_base 12..13: mod_base = OTHER; note = S-phosphorothioate
  modified_base 13: mod_base = OTHER; note = 2-fluororibose cytosine
  modified_base 13..14: mod_base = OTHER; note = S-phosphorothioate
  modified_base 14: mod_base = OTHER; note = 2-fluororibose adenine
  modified_base 14..15: mod_base = OTHER; note = S-phosphorothioate
  modified_base 15: mod_base = OTHER; note = 2-fluororibose guanine
  modified_base 15..16: mod_base = OTHER; note = S-phosphorothioate
  modified_base 16: mod_base = um
  modified_base 16..17: mod_base = OTHER; note = S-phosphorothioate
  modified_base 17: mod_base = cm
  modified_base 17..18: mod_base = OTHER; note = S-phosphorothioate
  modified_base 18: mod_base = cm
  modified_base 18..19: mod_base = OTHER; note = S-phosphorothioate
  modified_base 19: mod_base = cm
  modified_base 19..20: mod_base = OTHER; note = S-phosphorothioate
  modified_base 20: mod_base = um
  modified_base 20..21: mod_base = OTHER; note = S-phosphorothioate
  modified_base 21: mod_base = um
  modified_base 21..22: mod_base = OTHER; note = S-phosphorothioate
  modified_base 22: mod_base = um
  modified_base 22..23: mod_base = OTHER; note = S-phosphorothioate
  modified_base 23: mod_base = cm
  modified_base 23..24: mod_base = OTHER; note = S-phosphorothioate
  modified_base 24: mod_base = OTHER; note = 2-fluororibose uracil
  modified_base 24..25: mod_base = OTHER; note = S-phosphorothioate
  modified_base 25: mod_base = OTHER; note = deoxyribose cytosine
  modified_base 25..26: mod_base = OTHER; note = S-phosphorothioate
  modified_base 26: mod_base = OTHER; note = deoxyribose inosine
  modified_base 26..27: mod_base = OTHER; note S-N-(1,3-dimethylimidazolidin-2-ylidene)phosphoramidate
  modified_base 27: mod_base = um
  modified_base 27..28: mod_base = OTHER; note = S-phosphorothioate
  modified_base 28: mod_base = cm
  modified_base 28..29: mod_base = OTHER; note = S-phosphorothioate
  modified_base 29: mod_base = gm
  modified_base 29..30: mod_base = OTHER; note R-N-(1,3-dimethylimidazolidin-2-ylidene)phosphoramidate
  modified_base 30: mod_base = OTHER; note = 2-O-methylribose adenine
  source 1..30: mol_type = other RNA

SEQ ID NO: 265 - RNA, 30 nt, synthetic construct; identical to SEQ ID NO: 135
  misc_feature 1..30: note = Synthetic: WV-43746
  misc_feature 1..30: note = Synthetic: ADR-0100491
  modified_base 1: mod_base = OTHER; note = triantennary GalNAc with C12 linker linked to 6-aminohexanol linked by phosphate to the 5' end of 2-fluororibose cytosine
  modified_base 1..2: mod_base = OTHER; note R-N-(1,3-dimethylimidazolidin-2-ylidene)phosphoramidate
  modified_base 2: mod_base = OTHER; note = 2-fluororibose cytosine
  modified_base 2..3: mod_base = OTHER; note = S-phosphorothioate
  modified_base 3: mod_base = OTHER; note = 2-fluororibose cytosine
  modified_base 3..4: mod_base = OTHER; note = S-phosphorothioate
  modified_base 4: mod_base = OTHER; note = 2-fluororibose cytosine
  modified_base 4..5: mod_base = OTHER; note = S-phosphorothioate
  modified_base 5: mod_base = OTHER; note = 2-fluororibose adenine
  modified_base 5..6: mod_base = OTHER; note = S-phosphorothioate
  modified_base 6: mod_base = OTHER; note = 2-fluororibose guanine
  modified_base 6..7: mod_base = OTHER; note = S-phosphorothioate
  modified_base 7: mod_base = OTHER; note = 2-fluororibose cytosine
  modified_base 7..8: mod_base = OTHER; note = S-phosphorothioate
  modified_base 8: mod_base = OTHER; note = 2-fluororibose adenine
  modified_base 8..9: mod_base = OTHER; note = S-phosphorothioate
  modified_base 9: mod_base = OTHER; note = 2-fluororibose guanine
  modified_base 9..10: mod_base = OTHER; note = S-phosphorothioate
  modified_base 10: mod_base = OTHER; note = 2-fluororibose cytosine
  modified_base 10..11: mod_base = OTHER; note = S-phosphorothioate
  modified_base 11: mod_base = OTHER; note = 2-fluororibose uracil
  modified_base 11..12: mod_base = OTHER; note = S-phosphorothioate
  modified_base 12: mod_base = OTHER; note = 2-fluororibose uracil
  modified_base 12..13: mod_base = OTHER; note = S-phosphorothioate
  modified_base 13: mod_base = OTHER; note = 2-fluororibose cytosine
  modified_base 13..14: mod_base = OTHER; note = S-phosphorothioate
  modified_base 14: mod_base = OTHER; note = 2-fluororibose adenine
  modified_base 14..15: mod_base = OTHER; note = S-phosphorothioate
  modified_base 15: mod_base = OTHER; note = 2-fluororibose guanine
  modified_base 15..16: mod_base = OTHER; note = S-phosphorothioate
  modified_base 16: mod_base = um
  modified_base 16..17: mod_base = OTHER; note = S-phosphorothioate
  modified_base 17: mod_base = cm
  modified_base 17..18: mod_base = OTHER; note = S-phosphorothioate
  modified_base 18: mod_base = cm
  modified_base 18..19: mod_base = OTHER; note = S-phosphorothioate
  modified_base 19: mod_base = cm
  modified_base 19..20: mod_base = OTHER; note = S-phosphorothioate
  modified_base 20: mod_base = um
  modified_base 20..21: mod_base = OTHER; note = S-phosphorothioate
  modified_base 21: mod_base = um
  modified_base 21..22: mod_base = OTHER; note = S-phosphorothioate
  modified_base 22: mod_base = um
  modified_base 22..23: mod_base = OTHER; note = S-phosphorothioate
  modified_base 23: mod_base = cm
  modified_base 23..24: mod_base = OTHER; note = S-phosphorothioate
  modified_base 24: mod_base = OTHER; note = 2-fluororibose uracil
  modified_base 24..25: mod_base = OTHER; note = S-phosphorothioate
  modified_base 25: mod_base = OTHER; note = deoxyribose 6-amino-9-substituted 8,9-dihydro-7H-purin-8-one
  modified_base 25..26: mod_base = OTHER; note = S-phosphorothioate
  modified_base 26: mod_base = OTHER; note = deoxyribose inosine
  modified_base 26..27: mod_base = OTHER; note S-N-(1,3-dimethylimidazolidin-2-ylidene)phosphoramidate
  modified_base 27: mod_base = um
  modified_base 27..28: mod_base = OTHER; note = S-phosphorothioate
  modified_base 28: mod_base = cm
  modified_base 28..29: mod_base = OTHER; note = S-phosphorothioate
  modified_base 29: mod_base = gm
  modified_base 29..30: mod_base = OTHER; note R-N-(1,3-dimethylimidazolidin-2-ylidene)phosphoramidate
  modified_base 30: mod_base = OTHER; note = 2-O-methylribose adenine
  source 1..30: mol_type = other RNA

SEQ ID NO: 266 - RNA, 30 nt, synthetic construct; identical to SEQ ID NO: 139
  misc_feature 1..30: note = Synthetic: WV-43747
  misc_feature 1..30: note = Synthetic: ADR-0100492
  modified_base 1: mod_base = OTHER; note = triantennary GalNAc with C12 linker linked to 6-aminohexanol linked by phosphate to the 5' end of 2-fluororibose cytosine
  modified_base 1..2: mod_base = OTHER; note R-N-(1,3-dimethylimidazolidin-2-ylidene)phosphoramidate
  modified_base 2: mod_base = OTHER; note = 2-fluororibose cytosine
  modified_base 2..3: mod_base = OTHER; note = S-phosphorothioate
  modified_base 3: mod_base = OTHER; note = 2-fluororibose cytosine
  modified_base 3..4: mod_base = OTHER; note = S-phosphorothioate
  modified_base 4: mod_base = OTHER; note = 2-fluororibose cytosine
  modified_base 4..5: mod_base = OTHER; note = S-phosphorothioate
  modified_base 5: mod_base = OTHER; note = 2-fluororibose adenine
  modified_base 5..6: mod_base = OTHER; note = S-phosphorothioate
  modified_base 6: mod_base = OTHER; note = 2-fluororibose guanine
  modified_base 6..7: mod_base = OTHER; note = S-phosphorothioate
  modified_base 7: mod_base = OTHER; note = 2-fluororibose cytosine
  modified_base 7..8: mod_base = OTHER; note = S-phosphorothioate
  modified_base 8: mod_base = OTHER; note = 2-fluororibose adenine
  modified_base 8..9: mod_base = OTHER; note = S-phosphorothioate
  modified_base 9: mod_base = OTHER; note = 2-fluororibose guanine
  modified_base 9..10: mod_base = OTHER; note = S-phosphorothioate
  modified_base 10: mod_base = OTHER; note = 2-fluororibose cytosine
  modified_base 10..11: mod_base = OTHER; note = S-phosphorothioate
  modified_base 11: mod_base = OTHER; note = 2-fluororibose uracil
  modified_base 11..12: mod_base = OTHER; note = S-phosphorothioate
  modified_base 12: mod_base = OTHER; note = 2-fluororibose uracil
  modified_base 12..13: mod_base = OTHER; note = S-phosphorothioate
  modified_base 13: mod_base = OTHER; note = 2-fluororibose cytosine
  modified_base 13..14: mod_base = OTHER; note = S-phosphorothioate
  modified_base 14: mod_base = OTHER; note = 2-fluororibose adenine
  modified_base 14..15: mod_base = OTHER; note = S-phosphorothioate
  modified_base 15: mod_base = OTHER; note = 2-fluororibose guanine
  modified_base 15..16: mod_base = OTHER; note = S-phosphorothioate
  modified_base 16: mod_base = um
  modified_base 16..17: mod_base = OTHER; note = S-phosphorothioate
  modified_base 17: mod_base = cm
  modified_base 17..18: mod_base = OTHER; note = S-phosphorothioate
  modified_base 18: mod_base = cm
  modified_base 18..19: mod_base = OTHER; note = S-phosphorothioate
  modified_base 19: mod_base = cm
  modified_base 19..20: mod_base = OTHER; note = S-phosphorothioate
  modified_base 20: mod_base = um
  modified_base 20..21: mod_base = OTHER; note = S-phosphorothioate
  modified_base 21: mod_base = um
  modified_base 21..22: mod_base = OTHER; note = S-phosphorothioate
  modified_base 22: mod_base = um
  modified_base 22..23: mod_base = OTHER; note = S-phosphorothioate
  modified_base 23: mod_base = cm
  modified_base 23..24: mod_base = OTHER; note = S-phosphorothioate
  modified_base 24: mod_base = OTHER; note = 2-fluororibose uracil
  modified_base 24..25: mod_base = OTHER; note = S-phosphorothioate
  modified_base 25: mod_base = OTHER; note = deoxyribose uracil (position 3 connectivity)
  modified_base 25..26: mod_base = OTHER; note = S-phosphorothioate
  modified_base 26: mod_base = OTHER; note = deoxyribose inosine
  modified_base 26..27: mod_base = OTHER; note S-N-(1,3-dimethylimidazolidin-2-ylidene)phosphoramidate
  modified_base 27: mod_base = um
  modified_base 27..28: mod_base = OTHER; note = S-phosphorothioate
  modified_base 28: mod_base = cm
  modified_base 28..29: mod_base = OTHER; note = S-phosphorothioate
  modified_base 29: mod_base = gm
  modified_base 29..30: mod_base = OTHER; note R-N-(1,3-dimethylimidazolidin-2-ylidene)phosphoramidate
  modified_base 30: mod_base = OTHER; note = 2-O-methylribose adenine
  source 1..30: mol_type = other RNA

SEQ ID NO: 267 - RNA, 30 nt, synthetic construct
  misc_feature 1..30: note = Synthetic: WV-43748
  misc_feature 1..30: note = Synthetic: ADR-0100493
  modified_base 1: mod_base = OTHER; note = triantennary GalNAc with C12 linker linked to 6-aminohexanol linked by phosphate to the 5' end of 2-fluororibose cytosine
  modified_base 1..2: mod_base = OTHER; note R-N-(1,3-dimethylimidazolidin-2-ylidene)phosphoramidate
  modified_base 2: mod_base = OTHER; note = 2-fluororibose cytosine
  modified_base 2..3: mod_base = OTHER; note = S-phosphorothioate
  modified_base 3: mod_base = OTHER; note = 2-fluororibose cytosine
  modified_base 3..4: mod_base = OTHER; note = S-phosphorothioate
  modified_base 4: mod_base = OTHER; note = 2-fluororibose cytosine
  modified_base 4..5: mod_base = OTHER; note = S-phosphorothioate
  modified_base 5: mod_base = OTHER; note = 2-fluororibose adenine
  modified_base 5..6: mod_base = OTHER; note = S-phosphorothioate
  modified_base 6: mod_base = OTHER; note = 2-fluororibose guanine
  modified_base 6..7: mod_base = OTHER; note = S-phosphorothioate
  modified_base 7: mod_base = OTHER; note = 2-fluororibose cytosine
  modified_base 7..8: mod_base = OTHER; note = S-phosphorothioate
  modified_base 8: mod_base = OTHER; note = 2-fluororibose adenine
  modified_base 8..9: mod_base = OTHER; note = S-phosphorothioate
  modified_base 9: mod_base = OTHER; note = 2-fluororibose guanine
  modified_base 9..10: mod_base = OTHER; note = S-phosphorothioate
  modified_base 10: mod_base = OTHER; note = 2-fluororibose cytosine
  modified_base 10..11: mod_base = OTHER; note = S-phosphorothioate
  modified_base 11: mod_base = OTHER; note = 2-fluororibose uracil
  modified_base 11..12: mod_base = OTHER; note = S-phosphorothioate
  modified_base 12: mod_base = OTHER; note = 2-fluororibose uracil
  modified_base 12..13: mod_base = OTHER; note = S-phosphorothioate
  modified_base 13: mod_base = OTHER; note = 2-fluororibose cytosine
  modified_base 13..14: mod_base = OTHER; note = S-phosphorothioate
  modified_base 14: mod_base = OTHER; note = 2-fluororibose adenine
  modified_base 14..15: mod_base = OTHER; note = S-phosphorothioate
  modified_base 15: mod_base = OTHER; note = 2-fluororibose guanine
  modified_base 15..16: mod_base = OTHER; note = S-phosphorothioate
  modified_base 16: mod_base = um
  modified_base 16..17: mod_base = OTHER; note = S-phosphorothioate
  modified_base 17: mod_base = cm
  modified_base 17..18: mod_base = OTHER; note = S-phosphorothioate
  modified_base 18: mod_base = cm
  modified_base 18..19: mod_base = OTHER; note = S-phosphorothioate
  modified_base 19: mod_base = cm
  modified_base 19..20: mod_base = OTHER; note = S-phosphorothioate
  modified_base 20: mod_base = um
  modified_base 20..21: mod_base = OTHER; note = S-phosphorothioate
  modified_base 21: mod_base = um
  modified_base 21..22: mod_base = OTHER; note = S-phosphorothioate
  modified_base 22: mod_base = um
  modified_base 22..23: mod_base = OTHER; note = S-phosphorothioate
  modified_base 23: mod_base = cm
  modified_base 23..24: mod_base = OTHER; note = S-phosphorothioate
  modified_base 24: mod_base = OTHER; note = 2-fluororibose cytosine
  modified_base 24..25: mod_base = OTHER; note = S-phosphorothioate
  modified_base 25: mod_base = OTHER; note = deoxyribose cytosine
  modified_base 25..26: mod_base = OTHER; note = S-phosphorothioate
  modified_base 26: mod_base = OTHER; note = deoxyribose guanine
  modified_base 26..27: mod_base = OTHER; note R-N-(1,3-dimethylimidazolidin-2-ylidene)phosphoramidate
  modified_base 27: mod_base = um
  modified_base 27..28: mod_base = OTHER; note = S-phosphorothioate
  modified_base 28: mod_base = cm
  modified_base 28..29: mod_base = OTHER; note = S-phosphorothioate
  modified_base 29: mod_base = gm
  modified_base 29..30: mod_base = OTHER; note R-N-(1,3-dimethylimidazolidin-2-ylidene)phosphoramidate
  modified_base 30: mod_base = OTHER; note = 2-O-methylribose adenine
  source 1..30: mol_type = other RNA
ccccagcagcttcagtccctttcccgtcga

SEQ ID NO: 268 - RNA, 30 nt, synthetic construct; identical to SEQ ID NO: 81
  misc_feature 1..30: note = Synthetic: WV-43749
  misc_feature 1..30: note = Synthetic: ADR-0100494
  modified_base 1: mod_base = OTHER; note = triantennary GalNAc with C12 linker linked to 6-aminohexanol linked by phosphate to the 5' end of 2-fluororibose cytosine
  modified_base 1..2: mod_base = OTHER; note R-N-(1,3-dimethylimidazolidin-2-ylidene)phosphoramidate
  modified_base 2: mod_base = OTHER; note = 2-fluororibose cytosine
  modified_base 2..3: mod_base = OTHER; note = S-phosphorothioate
  modified_base 3: mod_base = OTHER; note = 2-fluororibose cytosine
  modified_base 3..4: mod_base = OTHER; note = S-phosphorothioate
  modified_base 4: mod_base = OTHER; note = 2-fluororibose cytosine
  modified_base 4..5: mod_base = OTHER; note = S-phosphorothioate
  modified_base 5: mod_base = OTHER; note = 2-fluororibose adenine
  modified_base 5..6: mod_base = OTHER; note = S-phosphorothioate
  modified_base 6: mod_base = OTHER; note = 2-fluororibose guanine
  modified_base 6..7: mod_base = OTHER; note = S-phosphorothioate
  modified_base 7: mod_base = OTHER; note = 2-fluororibose cytosine
  modified_base 7..8: mod_base = OTHER; note = S-phosphorothioate
  modified_base 8: mod_base = OTHER; note = 2-fluororibose adenine
  modified_base 8..9: mod_base = OTHER; note = S-phosphorothioate
  modified_base 9: mod_base = OTHER; note = 2-fluororibose guanine
  modified_base 9..10: mod_base = OTHER; note = S-phosphorothioate
  modified_base 10: mod_base = OTHER; note = 2-fluororibose cytosine
  modified_base 10..11: mod_base = OTHER; note = S-phosphorothioate
  modified_base 11: mod_base = OTHER; note = 2-fluororibose uracil
  modified_base 11..12: mod_base = OTHER; note = S-phosphorothioate
  modified_base 12: mod_base = OTHER; note = 2-fluororibose uracil
  modified_base 12..13: mod_base = OTHER; note = S-phosphorothioate
  modified_base 13: mod_base = OTHER; note = 2-fluororibose cytosine
  modified_base 13..14: mod_base = OTHER; note = S-phosphorothioate
  modified_base 14: mod_base = OTHER; note = 2-fluororibose adenine
  modified_base 14..15: mod_base = OTHER; note = S-phosphorothioate
  modified_base 15: mod_base = OTHER; note = 2-fluororibose guanine
  modified_base 15..16: mod_base = OTHER; note = S-phosphorothioate
  modified_base 16: mod_base = OTHER; note = 2-fluororibose uracil
  modified_base 16..17: mod_base = OTHER; note = S-phosphorothioate
  modified_base 17: mod_base = OTHER; note = 2-fluororibose cytosine
  modified_base 17..18: mod_base = OTHER; note = S-phosphorothioate
  modified_base 18: mod_base = OTHER; note = 2-fluororibose cytosine
  modified_base 18..19: mod_base = OTHER; note = S-phosphorothioate
  modified_base 19: mod_base = OTHER; note = 2-fluororibose cytosine
  modified_base 19..20: mod_base = OTHER; note = S-phosphorothioate
  modified_base 20: mod_base = OTHER; note = 2-fluororibose uracil
  modified_base 20..21: mod_base = OTHER; note = S-phosphorothioate
  modified_base 21: mod_base = OTHER; note = 2-fluororibose uracil
  modified_base 21..22: mod_base = OTHER; note = S-phosphorothioate
  modified_base 22: mod_base = OTHER; note = 2-fluororibose uracil
  modified_base 22..23: mod_base = OTHER; note = S-phosphorothioate
  modified_base 23: mod_base = cm
  modified_base 23..24: mod_base = OTHER; note = S-phosphorothioate
  modified_base 24: mod_base = OTHER; note = 2-fluororibose uracil
  modified_base 24..25: mod_base = OTHER; note = S-phosphorothioate
  modified_base 25: mod_base = OTHER; note = deoxyribose cytosine
  modified_base 25..26: mod_base = OTHER; note = S-phosphorothioate
  modified_base 26: mod_base = OTHER; note = deoxyribose inosine
  modified_base 26..27: mod_base = OTHER; note S-N-(1,3-dimethylimidazolidin-2-ylidene)phosphoramidate
  modified_base 27: mod_base = um
  modified_base 27..28: mod_base = OTHER; note = S-phosphorothioate
  modified_base 28: mod_base = OTHER; note = 2-fluororibose cytosine
  modified_base 28..29: mod_base = OTHER; note = S-phosphorothioate
  modified_base 29: mod_base = OTHER; note = 2-fluororibose guanine
  modified_base 29..30: mod_base = OTHER; note R-N-(1,3-dimethylimidazolidin-2-ylidene)phosphoramidate
  modified_base 30: mod_base = OTHER; note = 2-O-methylribose adenine
  source 1..30: mol_type = other RNA

SEQ ID NO: 269 - RNA, 30 nt, synthetic construct; identical to SEQ ID NO: 135
  misc_feature 1..30: note = Synthetic: WV-43750
  misc_feature 1..30: note = Synthetic: ADR-0100495
  modified_base 1: mod_base = OTHER; note = triantennary GalNAc with C12 linker linked to 6-aminohexanol linked by phosphate to the 5' end of 2-fluororibose cytosine
  modified_base 1..2: mod_base = OTHER; note R-N-(1,3-dimethylimidazolidin-2-ylidene)phosphoramidate
  modified_base 2: mod_base = OTHER; note = 2-fluororibose cytosine
  modified_base 2..3: mod_base = OTHER; note = S-phosphorothioate
  modified_base 3: mod_base = OTHER; note = 2-fluororibose cytosine
  modified_base 3..4: mod_base = OTHER; note = S-phosphorothioate
  modified_base 4: mod_base = OTHER; note = 2-fluororibose cytosine
  modified_base 4..5: mod_base = OTHER; note = S-phosphorothioate
  modified_base 5: mod_base = OTHER; note = 2-fluororibose adenine
  modified_base 5..6: mod_base = OTHER; note = S-phosphorothioate
  modified_base 6: mod_base = OTHER; note = 2-fluororibose guanine
  modified_base 6..7: mod_base = OTHER; note = S-phosphorothioate
  modified_base 7: mod_base = OTHER; note = 2-fluororibose cytosine
  modified_base 7..8: mod_base = OTHER; note = S-phosphorothioate
  modified_base 8: mod_base = OTHER; note = 2-fluororibose adenine
  modified_base 8..9: mod_base = OTHER; note = S-phosphorothioate
  modified_base 9: mod_base = OTHER; note = 2-fluororibose guanine
  modified_base 9..10: mod_base = OTHER; note = S-phosphorothioate
  modified_base 10: mod_base = OTHER; note = 2-fluororibose cytosine
  modified_base 10..11: mod_base = OTHER; note = S-phosphorothioate
  modified_base 11: mod_base = OTHER; note = 2-fluororibose uracil
  modified_base 11..12: mod_base = OTHER; note = S-phosphorothioate
  modified_base 12: mod_base = OTHER; note = 2-fluororibose uracil
  modified_base 12..13: mod_base = OTHER; note = S-phosphorothioate
  modified_base 13: mod_base = OTHER; note = 2-fluororibose cytosine
  modified_base 13..14: mod_base = OTHER; note = S-phosphorothioate
  modified_base 14: mod_base = OTHER; note = 2-fluororibose adenine
  modified_base 14..15: mod_base = OTHER; note = S-phosphorothioate
  modified_base 15: mod_base = OTHER; note = 2-fluororibose guanine
  modified_base 15..16: mod_base = OTHER; note = S-phosphorothioate
  modified_base 16: mod_base = OTHER; note = 2-fluororibose uracil
  modified_base 16..17: mod_base = OTHER; note = S-phosphorothioate
  modified_base 17: mod_base = OTHER; note = 2-fluororibose cytosine
  modified_base 17..18: mod_base = OTHER; note = S-phosphorothioate
  modified_base 18: mod_base = OTHER; note = 2-fluororibose cytosine
  modified_base 18..19: mod_base = OTHER; note = S-phosphorothioate
  modified_base 19: mod_base = OTHER; note = 2-fluororibose cytosine
  modified_base 19..20: mod_base = OTHER; note = S-phosphorothioate
  modified_base 20: mod_base = OTHER; note = 2-fluororibose uracil
  modified_base 20..21: mod_base = OTHER; note = S-phosphorothioate
  modified_base 21: mod_base = OTHER; note = 2-fluororibose uracil
  modified_base 21..22: mod_base = OTHER; note = S-phosphorothioate
  modified_base 22: mod_base = OTHER; note = 2-fluororibose uracil
  modified_base 22..23: mod_base = OTHER; note = S-phosphorothioate
  modified_base 23: mod_base = cm
  modified_base 23..24: mod_base = OTHER; note = S-phosphorothioate
  modified_base 24: mod_base = OTHER; note = 2-fluororibose uracil
  modified_base 24..25: mod_base = OTHER; note = S-phosphorothioate
  modified_base 25: mod_base = OTHER; note = deoxyribose 6-amino-9-substituted 8,9-dihydro-7H-purin-8-one
  modified_base 25..26: mod_base = OTHER; note = S-phosphorothioate
  modified_base 26: mod_base = OTHER; note = deoxyribose inosine
  modified_base 26..27: mod_base = OTHER; note S-N-(1,3-dimethylimidazolidin-2-ylidene)phosphoramidate
  modified_base 27: mod_base = um
  modified_base 27..28: mod_base = OTHER; note = S-phosphorothioate
  modified_base 28: mod_base = OTHER; note = 2-fluororibose cytosine
  modified_base 28..29: mod_base = OTHER; note = S-phosphorothioate
  modified_base 29: mod_base = OTHER; note = 2-fluororibose guanine
  modified_base 29..30: mod_base = OTHER; note R-N-(1,3-dimethylimidazolidin-2-ylidene)phosphoramidate
  modified_base 30: mod_base = OTHER; note = 2-O-methylribose adenine
  source 1..30: mol_type = other RNA

SEQ ID NO: 270 - RNA, 30 nt, synthetic construct; identical to SEQ ID NO: 139
  misc_feature 1..30: note = Synthetic: WV-43751
  misc_feature 1..30: note = Synthetic: ADR-0100496
  modified_base 1: mod_base = OTHER; note = triantennary GalNAc with C12 linker linked to 6-aminohexanol linked by phosphate to the 5' end of 2-fluororibose cytosine
  modified_base 1..2: mod_base = OTHER; note R-N-(1,3-dimethylimidazolidin-2-ylidene)phosphoramidate
  modified_base 2: mod_base = OTHER; note = 2-fluororibose cytosine
  modified_base 2..3: mod_base = OTHER; note = S-phosphorothioate
  modified_base 3: mod_base = OTHER; note = 2-fluororibose cytosine
  modified_base 3..4: mod_base = OTHER; note = S-phosphorothioate
  modified_base 4: mod_base = OTHER; note = 2-fluororibose cytosine
  modified_base 4..5: mod_base = OTHER; note = S-phosphorothioate
  modified_base 5: mod_base = OTHER; note = 2-fluororibose adenine
  modified_base 5..6: mod_base = OTHER; note = S-phosphorothioate
  modified_base 6: mod_base = OTHER; note = 2-fluororibose guanine
  modified_base 6..7: mod_base = OTHER; note = S-phosphorothioate
  modified_base 7: mod_base = OTHER; note = 2-fluororibose cytosine
  modified_base 7..8: mod_base = OTHER; note = S-phosphorothioate
  modified_base 8: mod_base = OTHER; note = 2-fluororibose adenine
  modified_base 8..9: mod_base = OTHER; note = S-phosphorothioate
  modified_base 9: mod_base = OTHER; note = 2-fluororibose guanine
  modified_base 9..10: mod_base = OTHER; note = S-phosphorothioate
  modified_base 10: mod_base = OTHER; note = 2-fluororibose cytosine
  modified_base 10..11: mod_base = OTHER; note = S-phosphorothioate
  modified_base 11: mod_base = OTHER; note = 2-fluororibose uracil
  modified_base 11..12: mod_base = OTHER; note = S-phosphorothioate
  modified_base 12: mod_base = OTHER; note = 2-fluororibose uracil
  modified_base 12..13: mod_base = OTHER; note = S-phosphorothioate
  modified_base 13: mod_base = OTHER; note = 2-fluororibose cytosine
  modified_base 13..14: mod_base = OTHER; note = S-phosphorothioate
  modified_base 14: mod_base = OTHER; note = 2-fluororibose adenine
  modified_base 14..15: mod_base = OTHER; note = S-phosphorothioate
  modified_base 15: mod_base = OTHER; note = 2-fluororibose guanine
  modified_base 15..16: mod_base = OTHER; note = S-phosphorothioate
  modified_base 16: mod_base = OTHER; note = 2-fluororibose uracil
  modified_base 16..17: mod_base = OTHER; note = S-phosphorothioate
  modified_base 17: mod_base = OTHER; note = 2-fluororibose cytosine
  modified_base 17..18: mod_base = OTHER; note = S-phosphorothioate
  modified_base 18: mod_base = OTHER; note = 2-fluororibose cytosine
  modified_base 18..19: mod_base = OTHER; note = S-phosphorothioate
  modified_base 19: mod_base = OTHER; note = 2-fluororibose cytosine
  modified_base 19..20: mod_base = OTHER; note = S-phosphorothioate
  modified_base 20: mod_base = OTHER; note = 2-fluororibose uracil
  modified_base 20..21: mod_base = OTHER; note = S-phosphorothioate
  modified_base 21: mod_base = OTHER; note = 2-fluororibose uracil
  modified_base 21..22: mod_base = OTHER; note = S-phosphorothioate
  modified_base 22: mod_base = OTHER; note = 2-fluororibose uracil
  modified_base 22..23: mod_base = OTHER; note = S-phosphorothioate
  modified_base 23: mod_base = cm
  modified_base 23..24: mod_base = OTHER; note = S-phosphorothioate
  modified_base 24: mod_base = OTHER; note = 2-fluororibose uracil
  modified_base 24..25: mod_base = OTHER; note = S-phosphorothioate
  modified_base 25: mod_base = OTHER; note = deoxyribose uracil (position 3 connectivity)
  modified_base 25..26: mod_base = OTHER; note = S-phosphorothioate
  modified_base 26: mod_base = OTHER; note = deoxyribose inosine
  modified_base 26..27: mod_base = OTHER; note S-N-(1,3-dimethylimidazolidin-2-ylidene)phosphoramidate
  modified_base 27: mod_base = um
  modified_base 27..28: mod_base = OTHER; note = S-phosphorothioate
  modified_base 28: mod_base = OTHER; note = 2-fluororibose cytosine
  modified_base 28..29: mod_base = OTHER; note = S-phosphorothioate
  modified_base 29: mod_base = OTHER; note = 2-fluororibose guanine
  modified_base 29..30: mod_base = OTHER; note R-N-(1,3-dimethylimidazolidin-2-ylidene)phosphoramidate
  modified_base 30: mod_base = OTHER; note = 2-O-methylribose adenine
  source 1..30: mol_type = other RNA

SEQ ID NO: 271 - RNA, 30 nt, synthetic construct; identical to SEQ ID NO: 267
  misc_feature 1..30: note = Synthetic: WV-43752
  misc_feature 1..30: note = Synthetic: ADR-0100497
  modified_base 1: mod_base = OTHER; note = triantennary GalNAc with C12 linker linked to 6-aminohexanol linked by phosphate to the 5' end of 2-fluororibose cytosine
  modified_base 1..2: mod_base = OTHER; note R-N-(1,3-dimethylimidazolidin-2-ylidene)phosphoramidate
  modified_base 2: mod_base = OTHER; note = 2-fluororibose cytosine
  modified_base 2..3: mod_base = OTHER; note = S-phosphorothioate
  modified_base 3: mod_base = OTHER; note = 2-fluororibose cytosine
  modified_base 3..4: mod_base = OTHER; note = S-phosphorothioate
  modified_base 4: mod_base = OTHER; note = 2-fluororibose cytosine
  modified_base 4..5: mod_base = OTHER; note = S-phosphorothioate
  modified_base 5: mod_base = OTHER; note = 2-fluororibose adenine
  modified_base 5..6: mod_base = OTHER; note = S-phosphorothioate
  modified_base 6: mod_base = OTHER; note = 2-fluororibose guanine
  modified_base 6..7: mod_base = OTHER; note = S-phosphorothioate
  modified_base 7: mod_base = OTHER; note = 2-fluororibose cytosine
  modified_base 7..8: mod_base = OTHER; note = S-phosphorothioate
  modified_base 8: mod_base = OTHER; note = 2-fluororibose adenine
  modified_base 8..9: mod_base = OTHER; note = S-phosphorothioate
  modified_base 9: mod_base = OTHER; note = 2-fluororibose guanine
  modified_base 9..10: mod_base = OTHER; note = S-phosphorothioate
  modified_base 10: mod_base = OTHER; note = 2-fluororibose cytosine
  modified_base 10..11: mod_base = OTHER; note = S-phosphorothioate
  modified_base 11: mod_base = OTHER; note = 2-fluororibose uracil
  modified_base 11..12: mod_base = OTHER; note = S-phosphorothioate
  modified_base 12: mod_base = OTHER; note = 2-fluororibose uracil
  modified_base 12..13: mod_base = OTHER; note = S-phosphorothioate
  modified_base 13: mod_base = OTHER; note = 2-fluororibose cytosine
  modified_base 13..14: mod_base = OTHER; note = S-phosphorothioate
  modified_base 14: mod_base = OTHER; note = 2-fluororibose adenine
  modified_base 14..15: mod_base = OTHER; note = S-phosphorothioate
  modified_base 15: mod_base = OTHER; note = 2-fluororibose guanine
  modified_base 15..16: mod_base = OTHER; note = S-phosphorothioate
  modified_base 16: mod_base = OTHER; note = 2-fluororibose uracil
  modified_base 16..17: mod_base = OTHER; note = S-phosphorothioate
  modified_base 17: mod_base = OTHER; note = 2-fluororibose cytosine
  modified_base 17..18: mod_base = OTHER; note = S-phosphorothioate
  modified_base 18: mod_base = OTHER; note = 2-fluororibose cytosine
  modified_base 18..19: mod_base = OTHER; note = S-phosphorothioate
  modified_base 19: mod_base = OTHER; note = 2-fluororibose cytosine
  modified_base 19..20: mod_base = OTHER; note = S-phosphorothioate
  modified_base 20: mod_base = OTHER; note = 2-fluororibose uracil
  modified_base 20..21: mod_base = OTHER; note = S-phosphorothioate
  modified_base 21: mod_base = OTHER; note = 2-fluororibose uracil
  modified_base 21..22: mod_base = OTHER; note = S-phosphorothioate
  modified_base 22: mod_base = OTHER; note = 2-fluororibose uracil
  modified_base 22..23: mod_base = OTHER; note = S-phosphorothioate
  modified_base 23: mod_base = cm
  modified_base 23..24: mod_base = OTHER; note = S-phosphorothioate
  modified_base 24: mod_base = OTHER; note = 2-fluororibose cytosine
  modified_base 24..25: mod_base = OTHER; note = S-phosphorothioate
  modified_base 25: mod_base = OTHER; note = deoxyribose cytosine
  modified_base 25..26: mod_base = OTHER; note = S-phosphorothioate
  modified_base 26: mod_base = OTHER; note = deoxyribose guanine
  modified_base 26..27: mod_base = OTHER; note R-N-(1,3-dimethylimidazolidin-2-ylidene)phosphoramidate
  modified_base 27: mod_base = um
  modified_base 27..28: mod_base = OTHER; note = S-phosphorothioate
  modified_base 28: mod_base = OTHER; note = 2-fluororibose cytosine
  modified_base 28..29: mod_base = OTHER; note = S-phosphorothioate
  modified_base 29: mod_base = OTHER; note = 2-fluororibose guanine
  modified_base 29..30: mod_base = OTHER; note R-N-(1,3-dimethylimidazolidin-2-ylidene)phosphoramidate
  modified_base 30: mod_base = OTHER; note = 2-O-methylribose adenine
  source 1..30: mol_type = other RNA

SEQ ID NO: 272 - RNA, 30 nt, synthetic construct; identical to SEQ ID NO: 80
  misc_feature 1..30: note = Synthetic: WV-43753
  misc_feature 1..30: note = Synthetic: ADR-0100498
  modified_base 1: mod_base = OTHER; note = triantennary GalNAc with C12 linker linked to 6-aminohexanol linked by phosphate to the 5' end of 2-fluororibose cytosine
  modified_base 1..2: mod_base = OTHER; note R-N-(1,3-dimethylimidazolidin-2-ylidene)phosphoramidate
  modified_base 2: mod_base = OTHER; note = 2-fluororibose cytosine
  modified_base 2..3: mod_base = OTHER; note = S-phosphorothioate
  modified_base 3: mod_base = OTHER; note = 2-fluororibose cytosine
  modified_base 3..4: mod_base = OTHER; note = S-phosphorothioate
  modified_base 4: mod_base = OTHER; note = 2-fluororibose adenine
  modified_base 4..5: mod_base = OTHER; note = S-phosphorothioate
  modified_base 5: mod_base = OTHER; note = 2-fluororibose guanine
  modified_base 5..6: mod_base = OTHER; note = S-phosphorothioate
  modified_base 6: mod_base = OTHER; note = 2-fluororibose cytosine
  modified_base 6..7: mod_base = OTHER; note = S-phosphorothioate
  modified_base 7: mod_base = OTHER; note = 2-fluororibose adenine
  modified_base 7..8: mod_base = OTHER; note = S-phosphorothioate
  modified_base 8: mod_base = OTHER; note = 2-fluororibose guanine
  modified_base 8..9: mod_base = OTHER; note = S-phosphorothioate
  modified_base 9: mod_base = OTHER; note = 2-fluororibose cytosine
  modified_base 9..10: mod_base = OTHER; note = S-phosphorothioate
  modified_base 10: mod_base = OTHER; note = 2-fluororibose uracil
  modified_base 10..11: mod_base = OTHER; note = S-phosphorothioate
  modified_base 11: mod_base = OTHER; note = 2-fluororibose uracil
  modified_base 11..12: mod_base = OTHER; note = S-phosphorothioate
  modified_base 12: mod_base = OTHER; note = 2-fluororibose cytosine
  modified_base 12..13: mod_base = OTHER; note = S-phosphorothioate
  modified_base 13: mod_base = OTHER; note = 2-fluororibose adenine
  modified_base 13..14: mod_base = OTHER; note = S-phosphorothioate
  modified_base 14: mod_base = OTHER; note = 2-fluororibose guanine
  modified_base 14..15: mod_base = OTHER; note = S-phosphorothioate
  modified_base 15: mod_base = OTHER; note = 2-fluororibose uracil
  modified_base 15..16: mod_base = OTHER; note = S-phosphorothioate
  modified_base 16: mod_base = OTHER; note = 2-fluororibose cytosine
  modified_base 16..17: mod_base = OTHER; note = S-phosphorothioate
  modified_base 17: mod_base = OTHER; note = 2-fluororibose cytosine
  modified_base 17..18: mod_base = OTHER; note = S-phosphorothioate
  modified_base 18: mod_base = OTHER; note = 2-fluororibose cytosine
  modified_base 18..19: mod_base = OTHER; note = S-phosphorothioate
  modified_base 19: mod_base = OTHER; note = 2-fluororibose uracil
  modified_base 19..20: mod_base = OTHER; note = S-phosphorothioate
  modified_base 20: mod_base = OTHER; note = 2-fluororibose uracil
  modified_base 20..21: mod_base = OTHER; note = S-phosphorothioate
  modified_base 21: mod_base = OTHER; note = 2-fluororibose uracil
  modified_base 21..22: mod_base = OTHER; note = S-phosphorothioate
  modified_base 22: mod_base = cm
  modified_base 22..23: mod_base = OTHER; note = S-phosphorothioate
  modified_base 23: mod_base = OTHER; note = 2-fluororibose uracil
  modified_base 23..24: mod_base = OTHER; note = S-phosphorothioate
  modified_base 24: mod_base = OTHER; note = deoxyribose cytosine
  modified_base 24..25: mod_base = OTHER; note = S-phosphorothioate
  modified_base 25: mod_base = OTHER; note = deoxyribose inosine
  modified_base 25..26: mod_base = OTHER; note S-N-(1,3-dimethylimidazolidin-2-ylidene)phosphoramidate
  modified_base 26: mod_base = um
  modified_base 26..27: mod_base = OTHER; note = S-phosphorothioate
  modified_base 27: mod_base = cm
  modified_base 27..28: mod_base = OTHER; note = S-phosphorothioate
  modified_base 28: mod_base = OTHER; note = 2-fluororibose guanine
  modified_base 28..29: mod_base = OTHER; note = S-phosphorothioate
  modified_base 29: mod_base = OTHER; note = 2-fluororibose adenine
  modified_base 29..30: mod_base = OTHER; note R-N-(1,3-dimethylimidazolidin-2-ylidene)phosphoramidate
  modified_base 30: mod_base = um
  source 1..30: mol_type = other RNA

SEQ ID NO: 273 - RNA, 30 nt, synthetic construct
  misc_feature 1..30: note = Synthetic: WV-43754
  misc_feature 1..30: note = Synthetic: ADR-0100499
  modified_base 1: mod_base = OTHER; note = triantennary GalNAc with C12 linker linked to 6-aminohexanol linked by phosphate to the 5' end of 2-fluororibose cytosine
  modified_base 1..2: mod_base = OTHER; note R-N-(1,3-dimethylimidazolidin-2-ylidene)phosphoramidate
  modified_base 2: mod_base = OTHER; note = 2-fluororibose cytosine
  modified_base 2..3: mod_base = OTHER; note = S-phosphorothioate
  modified_base 3: mod_base = OTHER; note = 2-fluororibose cytosine
  modified_base 3..4: mod_base = OTHER; note = S-phosphorothioate
  modified_base 4: mod_base = OTHER; note = 2-fluororibose adenine
  modified_base 4..5: mod_base = OTHER; note = S-phosphorothioate
  modified_base 5: mod_base = OTHER; note = 2-fluororibose guanine
  modified_base 5..6: mod_base = OTHER; note = S-phosphorothioate
  modified_base 6: mod_base = OTHER; note = 2-fluororibose cytosine
  modified_base 6..7: mod_base = OTHER; note = S-phosphorothioate
  modified_base 7: mod_base = OTHER; note = 2-fluororibose adenine
  modified_base 7..8: mod_base = OTHER; note = S-phosphorothioate
  modified_base 8: mod_base = OTHER; note = 2-fluororibose guanine
  modified_base 8..9: mod_base = OTHER; note = S-phosphorothioate
  modified_base 9: mod_base = OTHER; note = 2-fluororibose cytosine
  modified_base 9..10: mod_base = OTHER; note = S-phosphorothioate
  modified_base 10: mod_base = OTHER; note = 2-fluororibose uracil
  modified_base 10..11: mod_base = OTHER; note = S-phosphorothioate
  modified_base 11: mod_base = OTHER; note = 2-fluororibose uracil
  modified_base 11..12: mod_base = OTHER; note = S-phosphorothioate
  modified_base 12: mod_base = OTHER; note = 2-fluororibose cytosine
  modified_base 12..13: mod_base = OTHER; note = S-phosphorothioate
  modified_base 13: mod_base = OTHER; note = 2-fluororibose adenine
  modified_base 13..14: mod_base = OTHER; note = S-phosphorothioate
  modified_base 14: mod_base = OTHER; note = 2-fluororibose guanine
  modified_base 14..15: mod_base = OTHER; note = S-phosphorothioate
  modified_base 15: mod_base = OTHER; note = 2-fluororibose uracil
  modified_base 15..16: mod_base = OTHER; note = S-phosphorothioate
  modified_base 16: mod_base = OTHER; note = 2-fluororibose cytosine
  modified_base 16..17: mod_base = OTHER; note = S-phosphorothioate
  modified_base 17: mod_base = OTHER; note = 2-fluororibose cytosine
  modified_base 17..18: mod_base = OTHER; note = S-phosphorothioate
  modified_base 18: mod_base = OTHER; note = 2-fluororibose cytosine
  modified_base 18..19: mod_base = OTHER; note = S-phosphorothioate
  modified_base 19: mod_base = OTHER; note = 2-fluororibose uracil
  modified_base 19..20: mod_base = OTHER; note = S-phosphorothioate
  modified_base 20: mod_base = OTHER; note = 2-fluororibose uracil
  modified_base 20..21: mod_base = OTHER; note = S-phosphorothioate
  modified_base 21: mod_base = OTHER; note = 2-fluororibose uracil
  modified_base 21..22: mod_base = OTHER; note = S-phosphorothioate
  modified_base 22: mod_base = cm
  modified_base 22..23: mod_base = OTHER; note = S-phosphorothioate
  modified_base 23: mod_base = OTHER; note = 2-fluororibose uracil
  modified_base 23..24: mod_base = OTHER; note = S-phosphorothioate
  modified_base 24: mod_base = OTHER; note = deoxyribose uracil (position 3 connectivity)
  modified_base 24..25: mod_base = OTHER; note = S-phosphorothioate
  modified_base 25: mod_base = OTHER; note = deoxyribose inosine
  modified_base 25..26: mod_base = OTHER; note S-N-(1,3-dimethylimidazolidin-2-ylidene)phosphoramidate
  modified_base 26: mod_base = um
  modified_base 26..27: mod_base = OTHER; note = S-phosphorothioate
  modified_base 27: mod_base = cm
  modified_base 27..28: mod_base = OTHER; note = S-phosphorothioate
  modified_base 28: mod_base = OTHER; note = 2-fluororibose guanine
  modified_base 28..29: mod_base = OTHER; note = S-phosphorothioate
  modified_base 29: mod_base = OTHER; note = 2-fluororibose adenine
  modified_base 29..30: mod_base = OTHER; note R-N-(1,3-dimethylimidazolidin-2-ylidene)phosphoramidate
  modified_base 30: mod_base = um
  source 1..30: mol_type = other RNA
cccagcagcttcagtccctttcttgtcgat

SEQ ID NO: 274 - RNA, 30 nt, synthetic construct
  misc_feature 1..30: note = Synthetic: WV-43755
  misc_feature 1..30: note = Synthetic: ADR-0100500
  modified_base 1: mod_base = OTHER; note = triantennary GalNAc with C12 linker linked to 6-aminohexanol linked by phosphate to the 5' end of 2-fluororibose cytosine
  modified_base 1..2: mod_base = OTHER; note R-N-(1,3-dimethylimidazolidin-2-ylidene)phosphoramidate
  modified_base 2: mod_base = OTHER; note = 2-fluororibose cytosine
  modified_base 2..3: mod_base = OTHER; note = S-phosphorothioate
  modified_base 3: mod_base = OTHER; note = 2-fluororibose cytosine
  modified_base 3..4: mod_base = OTHER; note = S-phosphorothioate
  modified_base 4: mod_base = OTHER; note = 2-fluororibose adenine
  modified_base 4..5: mod_base = OTHER; note = S-phosphorothioate
  modified_base 5: mod_base = OTHER; note = 2-fluororibose guanine
  modified_base 5..6: mod_base = OTHER; note = S-phosphorothioate
  modified_base 6: mod_base = OTHER; note = 2-fluororibose cytosine
  modified_base 6..7: mod_base = OTHER; note = S-phosphorothioate
  modified_base 7: mod_base = OTHER; note = 2-fluororibose adenine
  modified_base 7..8: mod_base = OTHER; note = S-phosphorothioate
  modified_base 8: mod_base = OTHER; note = 2-fluororibose guanine
  modified_base 8..9: mod_base = OTHER; note = S-phosphorothioate
  modified_base 9: mod_base = OTHER; note = 2-fluororibose cytosine
  modified_base 9..10: mod_base = OTHER; note = S-phosphorothioate
  modified_base 10: mod_base = OTHER; note = 2-fluororibose uracil
  modified_base 10..11: mod_base = OTHER; note = S-phosphorothioate
  modified_base 11: mod_base = OTHER; note = 2-fluororibose uracil
  modified_base 11..12: mod_base = OTHER; note = S-phosphorothioate
  modified_base 12: mod_base = OTHER; note = 2-fluororibose cytosine
  modified_base 12..13: mod_base = OTHER; note = S-phosphorothioate
  modified_base 13: mod_base = OTHER; note = 2-fluororibose adenine
  modified_base 13..14: mod_base = OTHER; note = S-phosphorothioate
  modified_base 14: mod_base = OTHER; note = 2-fluororibose guanine
  modified_base 14..15: mod_base = OTHER; note = S-phosphorothioate
  modified_base 15: mod_base = OTHER; note = 2-fluororibose uracil
  modified_base 15..16: mod_base = OTHER; note = S-phosphorothioate
  modified_base 16: mod_base = OTHER; note = 2-fluororibose cytosine
  modified_base 16..17: mod_base = OTHER; note = S-phosphorothioate
  modified_base 17: mod_base = OTHER; note = 2-fluororibose cytosine
  modified_base 17..18: mod_base = OTHER; note = S-phosphorothioate
  modified_base 18: mod_base = OTHER; note = 2-fluororibose cytosine
  modified_base 18..19: mod_base = OTHER; note = S-phosphorothioate
  modified_base 19: mod_base = OTHER; note = 2-fluororibose uracil
  modified_base 19..20: mod_base = OTHER; note = S-phosphorothioate
  modified_base 20: mod_base = OTHER; note = 2-fluororibose uracil
  modified_base 20..21: mod_base = OTHER; note = S-phosphorothioate
  modified_base 21: mod_base = OTHER; note = 2-fluororibose uracil
  modified_base 21..22: mod_base = OTHER; note = S-phosphorothioate
  modified_base 22: mod_base = cm
  modified_base 22..23: mod_base = OTHER; note = S-phosphorothioate
  modified_base 23: mod_base = OTHER; note = 2-fluororibose cytosine
  modified_base 23..24: mod_base = OTHER; note = S-phosphorothioate
  modified_base 24: mod_base = OTHER; note = deoxyribose cytosine
  modified_base 24..25: mod_base = OTHER; note = S-phosphorothioate
  modified_base 25: mod_base = OTHER; note = deoxyribose guanine
  modified_base 25..26: mod_base = OTHER; note R-N-(1,3-dimethylimidazolidin-2-ylidene)phosphoramidate
  modified_base 26: mod_base = um
  modified_base 26..27: mod_base = OTHER; note = S-phosphorothioate
  modified_base 27: mod_base = cm
  modified_base 27..28: mod_base = OTHER; note = S-phosphorothioate
  modified_base 28: mod_base = OTHER; note = 2-fluororibose guanine
  modified_base 28..29: mod_base = OTHER; note = S-phosphorothioate
  modified_base 29: mod_base = OTHER; note = 2-fluororibose adenine
  modified_base 29..30: mod_base = OTHER; note R-N-(1,3-dimethylimidazolidin-2-ylidene)phosphoramidate
  modified_base 30: mod_base = um
  source 1..30: mol_type = other RNA
cccagcagcttcagtccctttcccgtcgat

SEQ ID NO: 275 - RNA, 30 nt, synthetic construct
  misc_feature 1..30: note = Synthetic: WV-43698
  misc_feature 1..30: note = Synthetic: ADR-0103717
  modified_base 1: mod_base = OTHER; note = 2-fluororibose cytosine
  modified_base 1..2: mod_base = OTHER; note R-N-(1,3-dimethylimidazolidin-2-ylidene)phosphoramidate
  modified_base 2: mod_base = OTHER; note = 2-fluororibose cytosine
  modified_base 2..3: mod_base = OTHER; note = S-phosphorothioate
  modified_base 3: mod_base = OTHER; note = 2-fluororibose cytosine
  modified_base 3..4: mod_base = OTHER; note = S-phosphorothioate
  modified_base 4: mod_base = OTHER; note = 2-fluororibose cytosine
  modified_base 4..5: mod_base = OTHER; note = S-phosphorothioate
  modified_base 5: mod_base = OTHER; note = 2-fluororibose adenine
  modified_base 5..6: mod_base = OTHER; note = S-phosphorothioate
  modified_base 6: mod_base = OTHER; note = 2-fluororibose guanine
  modified_base 6..7: mod_base = OTHER; note = S-phosphorothioate
  modified_base 7: mod_base = OTHER; note = 2-fluororibose cytosine
  modified_base 7..8: mod_base = OTHER; note = S-phosphorothioate
  modified_base 8: mod_base = OTHER; note = 2-fluororibose adenine
  modified_base 8..9: mod_base = OTHER; note = S-phosphorothioate
  modified_base 9: mod_base = OTHER; note = 2-fluororibose guanine
  modified_base 9..10: mod_base = OTHER; note = S-phosphorothioate
  modified_base 10: mod_base = OTHER; note = 2-fluororibose cytosine
  modified_base 10..11: mod_base = OTHER; note = S-phosphorothioate
  modified_base 11: mod_base = OTHER; note = 2-fluororibose uracil
  modified_base 11..12: mod_base = OTHER; note = S-phosphorothioate
  modified_base 12: mod_base = OTHER; note = 2-fluororibose uracil
  modified_base 12..13: mod_base = OTHER; note = S-phosphorothioate
  modified_base 13: mod_base = OTHER; note = 2-fluororibose cytosine
  modified_base 13..14: mod_base = OTHER; note = S-phosphorothioate
  modified_base 14: mod_base = OTHER; note = 2-fluororibose adenine
  modified_base 14..15: mod_base = OTHER; note = S-phosphorothioate
  modified_base 15: mod_base = OTHER; note = 2-fluororibose guanine
  modified_base 15..16: mod_base = OTHER; note = S-phosphorothioate
  modified_base 16: mod_base = um
  modified_base 16..17: mod_base = OTHER; note = S-phosphorothioate
  modified_base 17: mod_base = cm
  modified_base 17..18: mod_base = OTHER; note = S-phosphorothioate
  modified_base 18: mod_base = cm
  modified_base 18..19: mod_base = OTHER; note = S-phosphorothioate
  modified_base 19: mod_base = cm
  modified_base 19..20: mod_base = OTHER; note = S-phosphorothioate
  modified_base 20: mod_base = um
  modified_base 20..21: mod_base = OTHER; note = S-phosphorothioate
  modified_base 21: mod_base = um
  modified_base 21..22: mod_base = OTHER; note = S-phosphorothioate
  modified_base 22: mod_base = um
  modified_base 22..23: mod_base = OTHER; note = S-phosphorothioate
  modified_base 23: mod_base = cm
  modified_base 23..24: mod_base = OTHER; note = S-phosphorothioate
  modified_base 24: mod_base = OTHER; note = 2-fluororibose guanine
  modified_base 24..25: mod_base = OTHER; note = S-phosphorothioate
  modified_base 25: mod_base = OTHER; note = deoxyribose cytosine
  modified_base 25..26: mod_base = OTHER; note = S-phosphorothioate
  modified_base 26: mod_base = OTHER; note = deoxyribose guanine
  modified_base 26..27: mod_base = OTHER; note R-N-(1,3-dimethylimidazolidin-2-ylidene)phosphoramidate
  modified_base 27: mod_base = um
  modified_base 27..28: mod_base = OTHER; note = S-phosphorothioate
  modified_base 28: mod_base = cm
  modified_base 28..29: mod_base = OTHER; note = S-phosphorothioate
  modified_base 29: mod_base = gm
  modified_base 29..30: mod_base = OTHER; note R-N-(1,3-dimethylimidazolidin-2-ylidene)phosphoramidate
  modified_base 30: mod_base = OTHER; note = 2-O-methylribose adenine
  source 1..30: mol_type = other RNA
ccccagcagcttcagtccctttcgcgtcga

SEQ ID NO: 276 - RNA, 30 nt, synthetic construct; identical to SEQ ID NO: 267
  misc_feature 1..30: note = Synthetic: WV-43697
  misc_feature 1..30: note = Synthetic: ADR-0103708
  modified_base 1: mod_base = OTHER; note = 2-fluororibose cytosine
  modified_base 1..2: mod_base = OTHER; note R-N-(1,3-dimethylimidazolidin-2-ylidene)phosphoramidate
  modified_base 2: mod_base = OTHER; note = 2-fluororibose cytosine
  modified_base 2..3: mod_base = OTHER; note = S-phosphorothioate
  modified_base 3: mod_base = OTHER; note = 2-fluororibose cytosine
  modified_base 3..4: mod_base = OTHER; note = S-phosphorothioate
  modified_base 4: mod_base = OTHER; note = 2-fluororibose cytosine
  modified_base 4..5: mod_base = OTHER; note = S-phosphorothioate
  modified_base 5: mod_base = OTHER; note = 2-fluororibose adenine
  modified_base 5..6: mod_base = OTHER; note = S-phosphorothioate
  modified_base 6: mod_base = OTHER; note = 2-fluororibose guanine
  modified_base 6..7: mod_base = OTHER; note = S-phosphorothioate
  modified_base 7: mod_base = OTHER; note = 2-fluororibose cytosine
  modified_base 7..8: mod_base = OTHER; note = S-phosphorothioate
  modified_base 8: mod_base = OTHER; note = 2-fluororibose adenine
  modified_base 8..9: mod_base = OTHER; note = S-phosphorothioate
  modified_base 9: mod_base = OTHER; note = 2-fluororibose guanine
  modified_base 9..10: mod_base = OTHER; note = S-phosphorothioate
  modified_base 10: mod_base = OTHER; note = 2-fluororibose cytosine
  modified_base 10..11: mod_base = OTHER; note = S-phosphorothioate
  modified_base 11: mod_base = OTHER; note = 2-fluororibose uracil
  modified_base 11..12: mod_base = OTHER; note = S-phosphorothioate
  modified_base 12: mod_base = OTHER; note = 2-fluororibose uracil
  modified_base 12..13: mod_base = OTHER; note = S-phosphorothioate
  modified_base 13: mod_base = OTHER; note = 2-fluororibose cytosine
  modified_base 13..14: mod_base = OTHER; note = S-phosphorothioate
  modified_base 14: mod_base = OTHER; note = 2-fluororibose adenine
  modified_base 14..15: mod_base = OTHER; note = S-phosphorothioate
  modified_base 15: mod_base = OTHER; note = 2-fluororibose guanine
  modified_base 15..16: mod_base = OTHER; note = S-phosphorothioate
  modified_base 16: mod_base = um
  modified_base 16..17: mod_base = OTHER; note = S-phosphorothioate
  modified_base 17: mod_base = cm
  modified_base 17..18: mod_base = OTHER; note = S-phosphorothioate
  modified_base 18: mod_base = cm
  modified_base 18..19: mod_base = OTHER; note = S-phosphorothioate
  modified_base 19: mod_base = cm
  modified_base 19..20: mod_base = OTHER; note = S-phosphorothioate
  modified_base 20: mod_base = um
  modified_base 20..21: mod_base = OTHER; note = S-phosphorothioate
  modified_base 21: mod_base = um
  modified_base 21..22: mod_base = OTHER; note = S-phosphorothioate
  modified_base 22: mod_base = um
  modified_base 22..23: mod_base = OTHER; note = S-phosphorothioate
  modified_base 23: mod_base = cm
  modified_base 23..24: mod_base = OTHER; note = S-phosphorothioate
  modified_base 24: mod_base = OTHER; note = 2-fluororibose cytosine
  modified_base 24..25: mod_base = OTHER; note = S-phosphorothioate
  modified_base 25: mod_base = OTHER; note = deoxyribose cytosine
  modified_base 25..26: mod_base = OTHER; note = S-phosphorothioate
  modified_base 26: mod_base = OTHER; note = deoxyribose guanine
  modified_base 26..27: mod_base = OTHER; note R-N-(1,3-dimethylimidazolidin-2-ylidene)phosphoramidate
  modified_base 27: mod_base = um
  modified_base 27..28: mod_base = OTHER; note = S-phosphorothioate
  modified_base 28: mod_base = cm
  modified_base 28..29: mod_base = OTHER; note = S-phosphorothioate
  modified_base 29: mod_base = gm
  modified_base 29..30: mod_base = OTHER; note R-N-(1,3-dimethylimidazolidin-2-ylidene)phosphoramidate
  modified_base 30: mod_base = OTHER; note = 2-O-methylribose adenine
  source 1..30: mol_type = other RNA

SEQ ID NO: 277 - RNA, 30 nt, synthetic construct
  misc_feature 1..30: note = Synthetic: WV-43696
  misc_feature 1..30: note = Synthetic: ADR-0103699
  modified_base 1: mod_base = OTHER; note = 2-fluororibose cytosine
  modified_base 1..2: mod_base = OTHER; note R-N-(1,3-dimethylimidazolidin-2-ylidene)phosphoramidate
  modified_base 2: mod_base = OTHER; note = 2-fluororibose cytosine
  modified_base 2..3: mod_base = OTHER; note = S-phosphorothioate
  modified_base 3: mod_base = OTHER; note = 2-fluororibose cytosine
  modified_base 3..4: mod_base = OTHER; note = S-phosphorothioate
  modified_base 4: mod_base = OTHER; note = 2-fluororibose cytosine
  modified_base 4..5: mod_base = OTHER; note = S-phosphorothioate
  modified_base 5: mod_base = OTHER; note = 2-fluororibose adenine
  modified_base 5..6: mod_base = OTHER; note = S-phosphorothioate
  modified_base 6: mod_base = OTHER; note = 2-fluororibose guanine
  modified_base 6..7: mod_base = OTHER; note = S-phosphorothioate
  modified_base 7: mod_base = OTHER; note = 2-fluororibose cytosine
  modified_base 7..8: mod_base = OTHER; note = S-phosphorothioate
  modified_base 8: mod_base = OTHER; note = 2-fluororibose adenine
  modified_base 8..9: mod_base = OTHER; note = S-phosphorothioate
  modified_base 9: mod_base = OTHER; note = 2-fluororibose guanine
  modified_base 9..10: mod_base = OTHER; note = S-phosphorothioate
  modified_base 10: mod_base = OTHER; note = 2-fluororibose cytosine
  modified_base 10..11: mod_base = OTHER; note = S-phosphorothioate
  modified_base 11: mod_base = OTHER; note = 2-fluororibose uracil
  modified_base 11..12: mod_base = OTHER; note = S-phosphorothioate
  modified_base 12: mod_base = OTHER; note = 2-fluororibose uracil
  modified_base 12..13: mod_base = OTHER; note = S-phosphorothioate
  modified_base 13: mod_base = OTHER; note = 2-fluororibose cytosine
  modified_base 13..14: mod_base = OTHER; note = S-phosphorothioate
  modified_base 14: mod_base = OTHER; note = 2-fluororibose adenine
  modified_base 14..15: mod_base = OTHER; note = S-phosphorothioate
  modified_base 15: mod_base = OTHER; note = 2-fluororibose guanine
  modified_base 15..16: mod_base = OTHER; note = S-phosphorothioate
  modified_base 16: mod_base = um
  modified_base 16..17: mod_base = OTHER; note = S-phosphorothioate
  modified_base 17: mod_base = cm
  modified_base 17..18: mod_base = OTHER; note = S-phosphorothioate
  modified_base 18: mod_base = cm
  modified_base 18..19: mod_base = OTHER; note = S-phosphorothioate
  modified_base 19: mod_base = cm
  modified_base 19..20: mod_base = OTHER; note = S-phosphorothioate
  modified_base 20: mod_base = um
  modified_base 20..21: mod_base = OTHER; note = S-phosphorothioate
  modified_base 21: mod_base = um
  modified_base 21..22: mod_base = OTHER; note = S-phosphorothioate
  modified_base 22: mod_base = um
  modified_base 22..23: mod_base = OTHER; note = S-phosphorothioate
  modified_base 23: mod_base = cm
  modified_base 23..24: mod_base = OTHER; note = S-phosphorothioate
  modified_base 24: mod_base = OTHER; note = 2-fluororibose adenine
  modified_base 24..25: mod_base = OTHER; note = S-phosphorothioate
  modified_base 25: mod_base = OTHER; note = deoxyribose cytosine
  modified_base 25..26: mod_base = OTHER; note = S-phosphorothioate
  modified_base 26: mod_base = OTHER; note = deoxyribose guanine
  modified_base 26..27: mod_base = OTHER; note R-N-(1,3-dimethylimidazolidin-2-ylidene)phosphoramidate
  modified_base 27: mod_base = um
  modified_base 27..28: mod_base = OTHER; note = S-phosphorothioate
  modified_base 28: mod_base = cm
  modified_base 28..29: mod_base = OTHER; note = S-phosphorothioate
  modified_base 29: mod_base = gm
  modified_base 29..30: mod_base = OTHER; note R-N-(1,3-dimethylimidazolidin-2-ylidene)phosphoramidate
  modified_base 30: mod_base = OTHER; note = 2-O-methylribose adenine
  source 1..30: mol_type = other RNA
ccccagcagcttcagtccctttcacgtcga

SEQ ID NO: 278 - RNA, 30 nt, synthetic construct; identical to SEQ ID NO: 81
  misc_feature 1..30: note = Synthetic: WV-43695
  misc_feature 1..30: note = Synthetic: ADR-0103726
  modified_base 1: mod_base = OTHER; note = 2-fluororibose cytosine
  modified_base 1..2: mod_base = OTHER; note R-N-(1,3-dimethylimidazolidin-2-ylidene)phosphoramidate
  modified_base 2: mod_base = OTHER; note = 2-fluororibose cytosine
  modified_base 2..3: mod_base = OTHER; note = S-phosphorothioate
  modified_base 3: mod_base = OTHER; note = 2-fluororibose cytosine
  modified_base 3..4: mod_base = OTHER; note = S-phosphorothioate
  modified_base 4: mod_base = OTHER; note = 2-fluororibose cytosine
  modified_base 4..5: mod_base = OTHER; note = S-phosphorothioate
  modified_base 5: mod_base = OTHER; note = 2-fluororibose adenine
  modified_base 5..6: mod_base = OTHER; note = S-phosphorothioate
  modified_base 6: mod_base = OTHER; note = 2-fluororibose guanine
  modified_base 6..7: mod_base = OTHER; note = S-phosphorothioate
  modified_base 7: mod_base = OTHER; note = 2-fluororibose cytosine
  modified_base 7..8: mod_base = OTHER; note = S-phosphorothioate
  modified_base 8: mod_base = OTHER; note = 2-fluororibose adenine
  modified_base 8..9: mod_base = OTHER; note = S-phosphorothioate
  modified_base 9: mod_base = OTHER; note = 2-fluororibose guanine
  modified_base 9..10: mod_base = OTHER; note = S-phosphorothioate
  modified_base 10: mod_base = OTHER; note = 2-fluororibose cytosine
  modified_base 10..11: mod_base = OTHER; note = S-phosphorothioate
  modified_base 11: mod_base = OTHER; note = 2-fluororibose uracil
  modified_base 11..12: mod_base = OTHER; note = S-phosphorothioate
  modified_base 12: mod_base = OTHER; note = 2-fluororibose uracil
  modified_base 12..13: mod_base = OTHER; note = S-phosphorothioate
  modified_base 13: mod_base = OTHER; note = 2-fluororibose cytosine
  modified_base 13..14: mod_base = OTHER; note = S-phosphorothioate
  modified_base 14: mod_base = OTHER; note = 2-fluororibose adenine
  modified_base 14..15: mod_base = OTHER; note = S-phosphorothioate
  modified_base 15: mod_base = OTHER; note = 2-fluororibose guanine
  modified_base 15..16: mod_base = OTHER; note = S-phosphorothioate
  modified_base 16: mod_base = um
  modified_base 16..17: mod_base = OTHER; note = S-phosphorothioate
  modified_base 17: mod_base = cm
  modified_base 17..18: mod_base = OTHER; note = S-phosphorothioate
  modified_base 18: mod_base = cm
  modified_base 18..19: mod_base = OTHER; note = S-phosphorothioate
  modified_base 19: mod_base = cm
  modified_base 19..20: mod_base = OTHER; note = S-phosphorothioate
  modified_base 20: mod_base = um
  modified_base 20..21: mod_base = OTHER; note = S-phosphorothioate
  modified_base 21: mod_base = um
  modified_base 21..22: mod_base = OTHER; note = S-phosphorothioate
  modified_base 22: mod_base = um
  modified_base 22..23: mod_base = OTHER; note = S-phosphorothioate
  modified_base 23: mod_base = cm
  modified_base 23..24: mod_base = OTHER; note = S-phosphorothioate
  modified_base 24: mod_base = OTHER; note = 2-fluororibose uracil
  modified_base 24..25: mod_base = OTHER; note = S-phosphorothioate
  modified_base 25: mod_base = OTHER; note = deoxyribose cytosine
  modified_base 25..26: mod_base = OTHER; note = S-phosphorothioate
  modified_base 26: mod_base = OTHER; note = deoxyribose guanine
  modified_base 26..27: mod_base = OTHER; note R-N-(1,3-dimethylimidazolidin-2-ylidene)phosphoramidate
  modified_base 27: mod_base = um
  modified_base 27..28: mod_base = OTHER; note = S-phosphorothioate
  modified_base 28: mod_base = cm
  modified_base 28..29: mod_base = OTHER; note = S-phosphorothioate
  modified_base 29: mod_base = gm
  modified_base 29..30: mod_base = OTHER; note R-N-(1,3-dimethylimidazolidin-2-ylidene)phosphoramidate
  modified_base 30: mod_base = OTHER; note = 2-O-methylribose adenine
  source 1..30: mol_type = other RNA

SEQ ID NO: 279 - RNA, 30 nt, synthetic construct; identical to SEQ ID NO: 275
  misc_feature 1..30: note = Synthetic: WV-43694
  misc_feature 1..30: note = Synthetic: ADR-0103719
  modified_base 1: mod_base = OTHER; note = 2-fluororibose cytosine
  modified_base 1..2: mod_base = OTHER; note R-N-(1,3-dimethylimidazolidin-2-ylidene)phosphoramidate
  modified_base 2: mod_base = OTHER; note = 2-fluororibose cytosine
  modified_base 2..3: mod_base = OTHER; note = S-phosphorothioate
  modified_base 3: mod_base = OTHER; note = 2-fluororibose cytosine
  modified_base 3..4: mod_base = OTHER; note = S-phosphorothioate
  modified_base 4: mod_base = OTHER; note = 2-fluororibose cytosine
  modified_base 4..5: mod_base = OTHER; note = S-phosphorothioate
  modified_base 5: mod_base = OTHER; note = 2-fluororibose adenine
  modified_base 5..6: mod_base = OTHER; note = S-phosphorothioate
  modified_base 6: mod_base = OTHER; note = 2-fluororibose guanine
  modified_base 6..7: mod_base = OTHER; note = S-phosphorothioate
  modified_base 7: mod_base = OTHER; note = 2-fluororibose cytosine
  modified_base 7..8: mod_base = OTHER; note = S-phosphorothioate
  modified_base 8: mod_base = OTHER; note = 2-fluororibose adenine
  modified_base 8..9: mod_base = OTHER; note = S-phosphorothioate
  modified_base 9: mod_base = OTHER; note = 2-fluororibose guanine
  modified_base 9..10: mod_base = OTHER; note = S-phosphorothioate
  modified_base 10: mod_base = OTHER; note = 2-fluororibose cytosine
  modified_base 10..11: mod_base = OTHER; note = S-phosphorothioate
  modified_base 11: mod_base = OTHER; note = 2-fluororibose uracil
  modified_base 11..12: mod_base = OTHER; note = S-phosphorothioate
  modified_base 12: mod_base = OTHER; note = 2-fluororibose uracil
  modified_base 12..13: mod_base = OTHER; note = S-phosphorothioate
  modified_base 13: mod_base = OTHER; note = 2-fluororibose cytosine
  modified_base 13..14: mod_base = OTHER; note = S-phosphorothioate
  modified_base 14: mod_base = OTHER; note = 2-fluororibose adenine
  modified_base 14..15: mod_base = OTHER; note = S-phosphorothioate
  modified_base 15: mod_base = OTHER; note = 2-fluororibose guanine
  modified_base 15..16: mod_base = OTHER; note = S-phosphorothioate
  modified_base 16: mod_base = um
  modified_base 16..17: mod_base = OTHER; note = S-phosphorothioate
  modified_base 17: mod_base = cm
  modified_base 17..18: mod_base = OTHER; note = S-phosphorothioate
  modified_base 18: mod_base = cm
  modified_base 18..19: mod_base = OTHER; note = S-phosphorothioate
  modified_base 19: mod_base = cm
  modified_base 19..20: mod_base = OTHER; note = S-phosphorothioate
  modified_base 20: mod_base = um
  modified_base 20..21: mod_base = OTHER; note = S-phosphorothioate
  modified_base 21: mod_base = um
  modified_base 21..22: mod_base = OTHER; note = S-phosphorothioate
  modified_base 22: mod_base = um
  modified_base 22..23: mod_base = OTHER; note = S-phosphorothioate
  modified_base 23: mod_base = cm
  modified_base 23..24: mod_base = OTHER; note = S-phosphorothioate
  modified_base 24: mod_base = OTHER; note = 2-fluororibose guanine
  modified_base 24..25: mod_base = OTHER; note = S-phosphorothioate
  modified_base 25: mod_base = OTHER; note = deoxyribose cytosine
  modified_base 25..26: mod_base = OTHER; note = S-phosphorothioate
  modified_base 26: mod_base = OTHER; note = deoxyribose inosine
  modified_base 26..27: mod_base = OTHER; note S-N-(1,3-dimethylimidazolidin-2-ylidene)phosphoramidate
  modified_base 27: mod_base = um
  modified_base 27..28: mod_base = OTHER; note = S-phosphorothioate
  modified_base 28: mod_base = cm
  modified_base 28..29: mod_base = OTHER; note = S-phosphorothioate
  modified_base 29: mod_base = gm
  modified_base 29..30: mod_base = OTHER; note R-N-(1,3-dimethylimidazolidin-2-ylidene)phosphoramidate
  modified_base 30: mod_base = OTHER; note = 2-O-methylribose adenine
  source 1..30: mol_type = other RNA

SEQ ID NO: 280 - RNA, 30 nt, synthetic construct; identical to SEQ ID NO: 267
  misc_feature 1..30: note = Synthetic: WV-43693
  misc_feature 1..30: note = Synthetic: ADR-0103710
  modified_base 1: mod_base = OTHER; note = 2-fluororibose cytosine
  modified_base 1..2: mod_base = OTHER; note R-N-(1,3-dimethylimidazolidin-2-ylidene)phosphoramidate
  modified_base 2: mod_base = OTHER; note = 2-fluororibose cytosine
  modified_base 2..3: mod_base = OTHER; note = S-phosphorothioate
  modified_base 3: mod_base = OTHER; note = 2-fluororibose cytosine
  modified_base 3..4: mod_base = OTHER; note = S-phosphorothioate
  modified_base 4: mod_base = OTHER; note = 2-fluororibose cytosine
  modified_base 4..5: mod_base = OTHER; note = S-phosphorothioate
  modified_base 5: mod_base = OTHER; note = 2-fluororibose adenine
  modified_base 5..6: mod_base = OTHER; note = S-phosphorothioate
  modified_base 6: mod_base = OTHER; note = 2-fluororibose guanine
  modified_base 6..7: mod_base = OTHER; note = S-phosphorothioate
  modified_base 7: mod_base = OTHER; note = 2-fluororibose cytosine
  modified_base 7..8: mod_base = OTHER; note = S-phosphorothioate
  modified_base 8: mod_base = OTHER; note = 2-fluororibose adenine
  modified_base 8..9: mod_base = OTHER; note = S-phosphorothioate
  modified_base 9: mod_base = OTHER; note = 2-fluororibose guanine
  modified_base 9..10: mod_base = OTHER; note = S-phosphorothioate
  modified_base 10: mod_base = OTHER; note = 2-fluororibose cytosine
  modified_base 10..11: mod_base = OTHER; note = S-phosphorothioate
  modified_base 11: mod_base = OTHER; note = 2-fluororibose uracil
  modified_base 11..12: mod_base = OTHER; note = S-phosphorothioate
  modified_base 12: mod_base = OTHER; note = 2-fluororibose uracil
  modified_base 12..13: mod_base = OTHER; note = S-phosphorothioate
  modified_base 13: mod_base = OTHER; note = 2-fluororibose cytosine
  modified_base 13..14: mod_base = OTHER; note = S-phosphorothioate
  modified_base 14: mod_base = OTHER; note = 2-fluororibose adenine
  modified_base 14..15: mod_base = OTHER; note = S-phosphorothioate
  modified_base 15: mod_base = OTHER; note = 2-fluororibose guanine
  modified_base 15..16: mod_base = OTHER; note = S-phosphorothioate
  modified_base 16: mod_base = um
  modified_base 16..17: mod_base = OTHER; note = S-phosphorothioate
  modified_base 17: mod_base = cm
  modified_base 17..18: mod_base = OTHER; note = S-phosphorothioate
  modified_base 18: mod_base = cm
  modified_base 18..19: mod_base = OTHER; note = S-phosphorothioate
  modified_base 19: mod_base = cm
  modified_base 19..20: mod_base = OTHER; note = S-phosphorothioate
  modified_base 20: mod_base = um
  modified_base 20..21: mod_base = OTHER; note = S-phosphorothioate
  modified_base 21: mod_base = um
  modified_base 21..22: mod_base = OTHER; note = S-phosphorothioate
  modified_base 22: mod_base = um
  modified_base 22..23: mod_base = OTHER; note = S-phosphorothioate
  modified_base 23: mod_base = cm
  modified_base 23..24: mod_base = OTHER; note = S-phosphorothioate
  modified_base 24: mod_base = OTHER; note = 2-fluororibose cytosine
  modified_base 24..25: mod_base = OTHER; note = S-phosphorothioate
  modified_base 25: mod_base = OTHER; note = deoxyribose cytosine
  modified_base 25..26: mod_base = OTHER; note = S-phosphorothioate
  modified_base 26: mod_base = OTHER; note = deoxyribose inosine
  modified_base 26..27: mod_base = OTHER; note S-N-(1,3-dimethylimidazolidin-2-ylidene)phosphoramidate
  modified_base 27: mod_base = um
  modified_base 27..28: mod_base = OTHER; note = S-phosphorothioate
  modified_base 28: mod_base = cm
  modified_base 28..29: mod_base = OTHER; note = S-phosphorothioate
  modified_base 29: mod_base = gm
  modified_base 29..30: mod_base = OTHER; note R-N-(1,3-dimethylimidazolidin-2-ylidene)phosphoramidate
  modified_base 30: mod_base = OTHER; note = 2-O-methylribose adenine
  source 1..30: mol_type = other RNA

SEQ ID NO: 281 - RNA, 30 nt, synthetic construct; identical to SEQ ID NO: 277
  misc_feature 1..30: note = Synthetic: WV-43692
  misc_feature 1..30: note = Synthetic: ADR-0103701
  modified_base 1: mod_base = OTHER; note = 2-fluororibose cytosine
  modified_base 1..2: mod_base = OTHER; note R-N-(1,3-dimethylimidazolidin-2-ylidene)phosphoramidate
  modified_base 2: mod_base = OTHER; note = 2-fluororibose cytosine
  modified_base 2..3: mod_base = OTHER; note = S-phosphorothioate
  modified_base 3: mod_base = OTHER; note = 2-fluororibose cytosine
  modified_base 3..4: mod_base = OTHER; note = S-phosphorothioate
  modified_base 4: mod_base = OTHER; note = 2-fluororibose cytosine
  modified_base 4..5: mod_base = OTHER; note = S-phosphorothioate
  modified_base 5: mod_base = OTHER; note = 2-fluororibose adenine
  modified_base 5..6: mod_base = OTHER; note = S-phosphorothioate
  modified_base 6: mod_base = OTHER; note = 2-fluororibose guanine
  modified_base 6..7: mod_base = OTHER; note = S-phosphorothioate
  modified_base 7: mod_base = OTHER; note = 2-fluororibose cytosine
  modified_base 7..8: mod_base = OTHER; note = S-phosphorothioate
  modified_base 8: mod_base = OTHER; note = 2-fluororibose adenine
  modified_base 8..9: mod_base = OTHER; note = S-phosphorothioate
  modified_base 9: mod_base = OTHER; note = 2-fluororibose guanine
  modified_base 9..10: mod_base = OTHER; note = S-phosphorothioate
  modified_base 10: mod_base = OTHER; note = 2-fluororibose cytosine
  modified_base 10..11: mod_base = OTHER; note = S-phosphorothioate
  modified_base 11: mod_base = OTHER; note = 2-fluororibose uracil
  modified_base 11..12: mod_base = OTHER; note = S-phosphorothioate
  modified_base 12: mod_base = OTHER; note = 2-fluororibose uracil
  modified_base 12..13: mod_base = OTHER; note = S-phosphorothioate
  modified_base 13: mod_base = OTHER; note = 2-fluororibose cytosine
  modified_base 13..14: mod_base = OTHER; note = S-phosphorothioate
  modified_base 14: mod_base = OTHER; note = 2-fluororibose adenine
  modified_base 14..15: mod_base = OTHER; note = S-phosphorothioate
  modified_base 15: mod_base = OTHER; note = 2-fluororibose guanine
  modified_base 15..16: mod_base = OTHER; note = S-phosphorothioate
  modified_base 16: mod_base = um
  modified_base 16..17: mod_base = OTHER; note = S-phosphorothioate
  modified_base 17: mod_base = cm
  modified_base 17..18: mod_base = OTHER; note = S-phosphorothioate
  modified_base 18: mod_base = cm
  modified_base 18..19: mod_base = OTHER; note = S-phosphorothioate
  modified_base 19: mod_base = cm
  modified_base 19..20: mod_base = OTHER; note = S-phosphorothioate
  modified_base 20: mod_base = um
  modified_base 20..21: mod_base = OTHER; note = S-phosphorothioate
  modified_base 21: mod_base = um
  modified_base 21..22: mod_base = OTHER; note = S-phosphorothioate
  modified_base 22: mod_base = um
  modified_base 22..23: mod_base = OTHER; note = S-phosphorothioate
  modified_base 23: mod_base = cm
  modified_base 23..24: mod_base = OTHER; note = S-phosphorothioate
  modified_base 24: mod_base = OTHER; note = 2-fluororibose adenine
  modified_base 24..25: mod_base = OTHER; note = S-phosphorothioate
  modified_base 25: mod_base = OTHER; note = deoxyribose cytosine
  modified_base 25..26: mod_base = OTHER; note = S-phosphorothioate
  modified_base 26: mod_base = OTHER; note = deoxyribose inosine
  modified_base 26..27: mod_base = OTHER; note S-N-(1,3-dimethylimidazolidin-2-ylidene)phosphoramidate
  modified_base 27: mod_base = um
  modified_base 27..28: mod_base = OTHER; note = S-phosphorothioate
  modified_base 28: mod_base = cm
  modified_base 28..29: mod_base = OTHER; note = S-phosphorothioate
  modified_base 29: mod_base = gm
  modified_base 29..30: mod_base = OTHER; note R-N-(1,3-dimethylimidazolidin-2-ylidene)phosphoramidate
  modified_base 30: mod_base = OTHER; note = 2-O-methylribose adenine
  source 1..30: mol_type = other RNA

SEQ ID NO: 282 - RNA, 30 nt, synthetic construct
  misc_feature 1..30: note = Synthetic: WV-43691
  misc_feature 1..30: note = Synthetic: ADR-0103716
  modified_base 1: mod_base = OTHER; note = 2-fluororibose cytosine
  modified_base 1..2: mod_base = OTHER; note R-N-(1,3-dimethylimidazolidin-2-ylidene)phosphoramidate
  modified_base 2: mod_base = OTHER; note = 2-fluororibose cytosine
  modified_base 2..3: mod_base = OTHER; note = S-phosphorothioate
  modified_base 3: mod_base = OTHER; note = 2-fluororibose cytosine
  modified_base 3..4: mod_base = OTHER; note = S-phosphorothioate
  modified_base 4: mod_base = OTHER; note = 2-fluororibose cytosine
  modified_base 4..5: mod_base = OTHER; note = S-phosphorothioate
  modified_base 5: mod_base = OTHER; note = 2-fluororibose adenine
  modified_base 5..6: mod_base = OTHER; note = S-phosphorothioate
  modified_base 6: mod_base = OTHER; note = 2-fluororibose guanine
  modified_base 6..7: mod_base = OTHER; note = S-phosphorothioate
  modified_base 7: mod_base = OTHER; note = 2-fluororibose cytosine
  modified_base 7..8: mod_base = OTHER; note = S-phosphorothioate
  modified_base 8: mod_base = OTHER; note = 2-fluororibose adenine
  modified_base 8..9: mod_base = OTHER; note = S-phosphorothioate
  modified_base 9: mod_base = OTHER; note = 2-fluororibose guanine
  modified_base 9..10: mod_base = OTHER; note = S-phosphorothioate
  modified_base 10: mod_base = OTHER; note = 2-fluororibose cytosine
  modified_base 10..11: mod_base = OTHER; note = S-phosphorothioate
  modified_base 11: mod_base = OTHER; note = 2-fluororibose uracil
  modified_base 11..12: mod_base = OTHER; note = S-phosphorothioate
  modified_base 12: mod_base = OTHER; note = 2-fluororibose uracil
  modified_base 12..13: mod_base = OTHER; note = S-phosphorothioate
  modified_base 13: mod_base = OTHER; note = 2-fluororibose cytosine
  modified_base 13..14: mod_base = OTHER; note = S-phosphorothioate
  modified_base 14: mod_base = OTHER; note = 2-fluororibose adenine
  modified_base 14..15: mod_base = OTHER; note = S-phosphorothioate
  modified_base 15: mod_base = OTHER; note = 2-fluororibose guanine
  modified_base 15..16: mod_base = OTHER; note = S-phosphorothioate
  modified_base 16: mod_base = um
  modified_base 16..17: mod_base = OTHER; note = S-phosphorothioate
  modified_base 17: mod_base = cm
  modified_base 17..18: mod_base = OTHER; note = S-phosphorothioate
  modified_base 18: mod_base = cm
  modified_base 18..19: mod_base = OTHER; note = S-phosphorothioate
  modified_base 19: mod_base = cm
  modified_base 19..20: mod_base = OTHER; note = S-phosphorothioate
  modified_base 20: mod_base = um
  modified_base 20..21: mod_base = OTHER; note = S-phosphorothioate
  modified_base 21: mod_base = um
  modified_base 21..22: mod_base = OTHER; note = S-phosphorothioate
  modified_base 22: mod_base = um
  modified_base 22..23: mod_base = OTHER; note = S-phosphorothioate
  modified_base 23: mod_base = cm
  modified_base 23..24: mod_base = OTHER; note = S-phosphorothioate
  modified_base 24: mod_base = OTHER; note = 2-fluororibose guanine
  modified_base 24..25: mod_base = OTHER; note = S-phosphorothioate
  modified_base 25: mod_base = OTHER; note = deoxyribose cytosine
  modified_base 25..26: mod_base = OTHER; note = S-phosphorothioate
  modified_base 26: mod_base = OTHER; note = deoxyribose cytosine
  modified_base 26..27: mod_base = OTHER; note R-N-(1,3-dimethylimidazolidin-2-ylidene)phosphoramidate
  modified_base 27: mod_base = um
  modified_base 27..28: mod_base = OTHER; note = S-phosphorothioate
  modified_base 28: mod_base = cm
  modified_base 28..29: mod_base = OTHER; note = S-phosphorothioate
  modified_base 29: mod_base = gm
  modified_base 29..30: mod_base = OTHER; note R-N-(1,3-dimethylimidazolidin-2-ylidene)phosphoramidate
  modified_base 30: mod_base = OTHER; note = 2-O-methylribose adenine
  source 1..30: mol_type = other RNA
ccccagcagcttcagtccctttcgcctcga

SEQ ID NO: 283 - RNA, 30 nt, synthetic construct
  misc_feature 1..30: note = Synthetic: WV-43690
  misc_feature 1..30: note = Synthetic: ADR-0103707
  modified_base 1: mod_base = OTHER; note = 2-fluororibose cytosine
  modified_base 1..2: mod_base = OTHER; note R-N-(1,3-dimethylimidazolidin-2-ylidene)phosphoramidate
  modified_base 2: mod_base = OTHER; note = 2-fluororibose cytosine
  modified_base 2..3: mod_base = OTHER; note = S-phosphorothioate
  modified_base 3: mod_base = OTHER; note = 2-fluororibose cytosine
  modified_base 3..4: mod_base = OTHER; note = S-phosphorothioate
  modified_base 4: mod_base = OTHER; note = 2-fluororibose cytosine
  modified_base 4..5: mod_base = OTHER; note = S-phosphorothioate
  modified_base 5: mod_base = OTHER; note = 2-fluororibose adenine
  modified_base 5..6: mod_base = OTHER; note = S-phosphorothioate
  modified_base 6: mod_base = OTHER; note = 2-fluororibose guanine
  modified_base 6..7: mod_base = OTHER; note = S-phosphorothioate
  modified_base 7: mod_base = OTHER; note = 2-fluororibose cytosine
  modified_base 7..8: mod_base = OTHER; note = S-phosphorothioate
  modified_base 8: mod_base = OTHER; note = 2-fluororibose adenine
  modified_base 8..9: mod_base = OTHER; note = S-phosphorothioate
  modified_base 9: mod_base = OTHER; note = 2-fluororibose guanine
  modified_base 9..10: mod_base = OTHER; note = S-phosphorothioate
  modified_base 10: mod_base = OTHER; note = 2-fluororibose cytosine
  modified_base 10..11: mod_base = OTHER; note = S-phosphorothioate
  modified_base 11: mod_base = OTHER; note = 2-fluororibose uracil
  modified_base 11..12: mod_base = OTHER; note = S-phosphorothioate
  modified_base 12: mod_base = OTHER; note = 2-fluororibose uracil
  modified_base 12..13: mod_base = OTHER; note = S-phosphorothioate
  modified_base 13: mod_base = OTHER; note = 2-fluororibose cytosine
  modified_base 13..14: mod_base = OTHER; note = S-phosphorothioate
  modified_base 14: mod_base = OTHER; note = 2-fluororibose adenine
  modified_base 14..15: mod_base = OTHER; note = S-phosphorothioate
  modified_base 15: mod_base = OTHER; note = 2-fluororibose guanine
  modified_base 15..16: mod_base = OTHER; note = S-phosphorothioate
  modified_base 16: mod_base = um
  modified_base 16..17: mod_base = OTHER; note = S-phosphorothioate
  modified_base 17: mod_base = cm
  modified_base 17..18: mod_base = OTHER; note = S-phosphorothioate
  modified_base 18: mod_base = cm
  modified_base 18..19: mod_base = OTHER; note = S-phosphorothioate
  modified_base 19: mod_base = cm
  modified_base 19..20: mod_base = OTHER; note = S-phosphorothioate
  modified_base 20: mod_base = um
  modified_base 20..21: mod_base = OTHER; note = S-phosphorothioate
  modified_base 21: mod_base = um
  modified_base 21..22: mod_base = OTHER; note = S-phosphorothioate
  modified_base 22: mod_base = um
  modified_base 22..23: mod_base = OTHER; note = S-phosphorothioate
  modified_base 23: mod_base = cm
  modified_base 23..24: mod_base = OTHER; note = S-phosphorothioate
  modified_base 24: mod_base = OTHER; note = 2-fluororibose cytosine
  modified_base 24..25: mod_base = OTHER; note = S-phosphorothioate
  modified_base 25: mod_base = OTHER; note = deoxyribose cytosine
  modified_base 25..26: mod_base = OTHER; note = S-phosphorothioate
  modified_base 26: mod_base = OTHER; note = deoxyribose cytosine
  modified_base 26..27: mod_base = OTHER; note R-N-(1,3-dimethylimidazolidin-2-ylidene)phosphoramidate
  modified_base 27: mod_base = um
  modified_base 27..28: mod_base = OTHER; note = S-phosphorothioate
  modified_base 28: mod_base = cm
  modified_base 28..29: mod_base = OTHER; note = S-phosphorothioate
  modified_base 29: mod_base = gm
  modified_base 29..30: mod_base = OTHER; note R-N-(1,3-dimethylimidazolidin-2-ylidene)phosphoramidate
  modified_base 30: mod_base = OTHER; note = 2-O-methylribose adenine
  source 1..30: mol_type = other RNA
ccccagcagcttcagtccctttcccctcga

SEQ ID NO: 284 - RNA, 30 nt, synthetic construct
  misc_feature 1..30: note = Synthetic: WV-43689
  misc_feature 1..30: note = Synthetic: ADR-0103698
  modified_base 1: mod_base = OTHER; note = 2-fluororibose cytosine
  modified_base 1..2: mod_base = OTHER; note R-N-(1,3-dimethylimidazolidin-2-ylidene)phosphoramidate
  modified_base 2: mod_base = OTHER; note = 2-fluororibose cytosine
  modified_base 2..3: mod_base = OTHER; note = S-phosphorothioate
  modified_base 3: mod_base = OTHER; note = 2-fluororibose cytosine
  modified_base 3..4: mod_base = OTHER; note = S-phosphorothioate
  modified_base 4: mod_base = OTHER; note = 2-fluororibose cytosine
  modified_base 4..5: mod_base = OTHER; note = S-phosphorothioate
  modified_base 5: mod_base = OTHER; note = 2-fluororibose adenine
  modified_base 5..6: mod_base = OTHER; note = S-phosphorothioate
  modified_base 6: mod_base = OTHER; note = 2-fluororibose guanine
  modified_base 6..7: mod_base = OTHER; note = S-phosphorothioate
  modified_base 7: mod_base = OTHER; note = 2-fluororibose cytosine
  modified_base 7..8: mod_base = OTHER; note = S-phosphorothioate
  modified_base 8: mod_base = OTHER; note = 2-fluororibose adenine
  modified_base 8..9: mod_base = OTHER; note = S-phosphorothioate
  modified_base 9: mod_base = OTHER; note = 2-fluororibose guanine
  modified_base 9..10: mod_base = OTHER; note = S-phosphorothioate
  modified_base 10: mod_base = OTHER; note = 2-fluororibose cytosine
  modified_base 10..11: mod_base = OTHER; note = S-phosphorothioate
  modified_base 11: mod_base = OTHER; note = 2-fluororibose uracil
  modified_base 11..12: mod_base = OTHER; note = S-phosphorothioate
  modified_base 12: mod_base = OTHER; note = 2-fluororibose uracil
  modified_base 12..13: mod_base = OTHER; note = S-phosphorothioate
  modified_base 13: mod_base = OTHER; note = 2-fluororibose cytosine
  modified_base 13..14: mod_base = OTHER; note = S-phosphorothioate
  modified_base 14: mod_base = OTHER; note = 2-fluororibose adenine
  modified_base 14..15: mod_base = OTHER; note = S-phosphorothioate
  modified_base 15: mod_base = OTHER; note = 2-fluororibose guanine
  modified_base 15..16: mod_base = OTHER; note = S-phosphorothioate
  modified_base 16: mod_base = um
  modified_base 16..17: mod_base = OTHER; note = S-phosphorothioate
  modified_base 17: mod_base = cm
  modified_base 17..18: mod_base = OTHER; note = S-phosphorothioate
  modified_base 18: mod_base = cm
  modified_base 18..19: mod_base = OTHER; note = S-phosphorothioate
  modified_base 19: mod_base = cm
  modified_base 19..20: mod_base = OTHER; note = S-phosphorothioate
  modified_base 20: mod_base = um
  modified_base 20..21: mod_base = OTHER; note = S-phosphorothioate
  modified_base 21: mod_base = um
  modified_base 21..22: mod_base = OTHER; note = S-phosphorothioate
  modified_base 22: mod_base = um
  modified_base 22..23: mod_base = OTHER; note = S-phosphorothioate
  modified_base 23: mod_base = cm
  modified_base 23..24: mod_base = OTHER; note = S-phosphorothioate
  modified_base 24: mod_base = OTHER; note = 2-fluororibose adenine
  modified_base 24..25: mod_base = OTHER; note = S-phosphorothioate
  modified_base 25: mod_base = OTHER; note = deoxyribose cytosine
  modified_base 25..26: mod_base = OTHER; note = S-phosphorothioate
  modified_base 26: mod_base = OTHER; note = deoxyribose cytosine
  modified_base 26..27: mod_base = OTHER; note R-N-(1,3-dimethylimidazolidin-2-ylidene)phosphoramidate
  modified_base 27: mod_base = um
  modified_base 27..28: mod_base = OTHER; note = S-phosphorothioate
  modified_base 28: mod_base = cm
  modified_base 28..29: mod_base = OTHER; note = S-phosphorothioate
  modified_base 29: mod_base = gm
  modified_base 29..30: mod_base = OTHER; note R-N-(1,3-dimethylimidazolidin-2-ylidene)phosphoramidate
  modified_base 30: mod_base = OTHER; note = 2-O-methylribose adenine
  source 1..30: mol_type = other RNA
ccccagcagcttcagtccctttcacctcga

SEQ ID NO: 285 - RNA, 30 nt, synthetic construct
  misc_feature 1..30: note = Synthetic: WV-43688
  misc_feature 1..30: note = Synthetic: ADR-0103725
  modified_base 1: mod_base = OTHER; note = 2-fluororibose cytosine
  modified_base 1..2: mod_base = OTHER; note R-N-(1,3-dimethylimidazolidin-2-ylidene)phosphoramidate
  modified_base 2: mod_base = OTHER; note = 2-fluororibose cytosine
  modified_base 2..3: mod_base = OTHER; note = S-phosphorothioate
  modified_base 3: mod_base = OTHER; note = 2-fluororibose cytosine
  modified_base 3..4: mod_base = OTHER; note = S-phosphorothioate
  modified_base 4: mod_base = OTHER; note = 2-fluororibose cytosine
  modified_base 4..5: mod_base = OTHER; note = S-phosphorothioate
  modified_base 5: mod_base = OTHER; note = 2-fluororibose adenine
  modified_base 5..6: mod_base = OTHER; note = S-phosphorothioate
  modified_base 6: mod_base = OTHER; note = 2-fluororibose guanine
  modified_base 6..7: mod_base = OTHER; note = S-phosphorothioate
  modified_base 7: mod_base = OTHER; note = 2-fluororibose cytosine
  modified_base 7..8: mod_base = OTHER; note = S-phosphorothioate
  modified_base 8: mod_base = OTHER; note = 2-fluororibose adenine
  modified_base 8..9: mod_base = OTHER; note = S-phosphorothioate
  modified_base 9: mod_base = OTHER; note = 2-fluororibose guanine
  modified_base 9..10: mod_base = OTHER; note = S-phosphorothioate
  modified_base 10: mod_base = OTHER; note = 2-fluororibose cytosine
  modified_base 10..11: mod_base = OTHER; note = S-phosphorothioate
  modified_base 11: mod_base = OTHER; note = 2-fluororibose uracil
  modified_base 11..12: mod_base = OTHER; note = S-phosphorothioate
  modified_base 12: mod_base = OTHER; note = 2-fluororibose uracil
  modified_base 12..13: mod_base = OTHER; note = S-phosphorothioate
  modified_base 13: mod_base = OTHER; note = 2-fluororibose cytosine
  modified_base 13..14: mod_base = OTHER; note = S-phosphorothioate
  modified_base 14: mod_base = OTHER; note = 2-fluororibose adenine
  modified_base 14..15: mod_base = OTHER; note = S-phosphorothioate
  modified_base 15: mod_base = OTHER; note = 2-fluororibose guanine
  modified_base 15..16: mod_base = OTHER; note = S-phosphorothioate
  modified_base 16: mod_base = um
  modified_base 16..17: mod_base = OTHER; note = S-phosphorothioate
  modified_base 17: mod_base = cm
  modified_base 17..18: mod_base = OTHER; note = S-phosphorothioate
  modified_base 18: mod_base = cm
  modified_base 18..19: mod_base = OTHER; note = S-phosphorothioate
  modified_base 19: mod_base = cm
  modified_base 19..20: mod_base = OTHER; note = S-phosphorothioate
  modified_base 20: mod_base = um
  modified_base 20..21: mod_base = OTHER; note = S-phosphorothioate
  modified_base 21: mod_base = um
  modified_base 21..22: mod_base = OTHER; note = S-phosphorothioate
  modified_base 22: mod_base = um
  modified_base 22..23: mod_base = OTHER; note = S-phosphorothioate
  modified_base 23: mod_base = cm
  modified_base 23..24: mod_base = OTHER; note = S-phosphorothioate
  modified_base 24: mod_base = OTHER; note = 2-fluororibose uracil
  modified_base 24..25: mod_base = OTHER; note = S-phosphorothioate
  modified_base 25: mod_base = OTHER; note = deoxyribose cytosine
  modified_base 25..26: mod_base = OTHER; note = S-phosphorothioate
  modified_base 26: mod_base = OTHER; note = deoxyribose cytosine
  modified_base 26..27: mod_base = OTHER; note R-N-(1,3-dimethylimidazolidin-2-ylidene)phosphoramidate
  modified_base 27: mod_base = um
  modified_base 27..28: mod_base = OTHER; note = S-phosphorothioate
  modified_base 28: mod_base = cm
  modified_base 28..29: mod_base = OTHER; note = S-phosphorothioate
  modified_base 29: mod_base = gm
  modified_base 29..30: mod_base = OTHER; note R-N-(1,3-dimethylimidazolidin-2-ylidene)phosphoramidate
  modified_base 30: mod_base = OTHER; note = 2-O-methylribose adenine
  source 1..30: mol_type = other RNA
ccccagcagcttcagtccctttctcctcga

SEQ ID NO: 286 - RNA, 30 nt, synthetic construct
  misc_feature 1..30: note = Synthetic: WV-43687
  misc_feature 1..30: note = Synthetic: ADR-0103715
  modified_base 1: mod_base = OTHER; note = 2-fluororibose cytosine
  modified_base 1..2: mod_base = OTHER; note R-N-(1,3-dimethylimidazolidin-2-ylidene)phosphoramidate
  modified_base 2: mod_base = OTHER; note = 2-fluororibose cytosine
  modified_base 2..3: mod_base = OTHER; note = S-phosphorothioate
  modified_base 3: mod_base = OTHER; note = 2-fluororibose cytosine
  modified_base 3..4: mod_base = OTHER; note = S-phosphorothioate
  modified_base 4: mod_base = OTHER; note = 2-fluororibose cytosine
  modified_base 4..5: mod_base = OTHER; note = S-phosphorothioate
  modified_base 5: mod_base = OTHER; note = 2-fluororibose adenine
  modified_base 5..6: mod_base = OTHER; note = S-phosphorothioate
  modified_base 6: mod_base = OTHER; note = 2-fluororibose guanine
  modified_base 6..7: mod_base = OTHER; note = S-phosphorothioate
  modified_base 7: mod_base = OTHER; note = 2-fluororibose cytosine
  modified_base 7..8: mod_base = OTHER; note = S-phosphorothioate
  modified_base 8: mod_base = OTHER; note = 2-fluororibose adenine
  modified_base 8..9: mod_base = OTHER; note = S-phosphorothioate
  modified_base 9: mod_base = OTHER; note = 2-fluororibose guanine
  modified_base 9..10: mod_base = OTHER; note = S-phosphorothioate
  modified_base 10: mod_base = OTHER; note = 2-fluororibose cytosine
  modified_base 10..11: mod_base = OTHER; note = S-phosphorothioate
  modified_base 11: mod_base = OTHER; note = 2-fluororibose uracil
  modified_base 11..12: mod_base = OTHER; note = S-phosphorothioate
  modified_base 12: mod_base = OTHER; note = 2-fluororibose uracil
  modified_base 12..13: mod_base = OTHER; note = S-phosphorothioate
  modified_base 13: mod_base = OTHER; note = 2-fluororibose cytosine
  modified_base 13..14: mod_base = OTHER; note = S-phosphorothioate
  modified_base 14: mod_base = OTHER; note = 2-fluororibose adenine
  modified_base 14..15: mod_base = OTHER; note = S-phosphorothioate
  modified_base 15: mod_base = OTHER; note = 2-fluororibose guanine
  modified_base 15..16: mod_base = OTHER; note = S-phosphorothioate
  modified_base 16: mod_base = um
  modified_base 16..17: mod_base = OTHER; note = S-phosphorothioate
  modified_base 17: mod_base = cm
  modified_base 17..18: mod_base = OTHER; note = S-phosphorothioate
  modified_base 18: mod_base = cm
  modified_base 18..19: mod_base = OTHER; note = S-phosphorothioate
  modified_base 19: mod_base = cm
  modified_base 19..20: mod_base = OTHER; note = S-phosphorothioate
  modified_base 20: mod_base = um
  modified_base 20..21: mod_base = OTHER; note = S-phosphorothioate
  modified_base 21: mod_base = um
  modified_base 21..22: mod_base = OTHER; note = S-phosphorothioate
  modified_base 22: mod_base = um
  modified_base 22..23: mod_base = OTHER; note = S-phosphorothioate
  modified_base 23: mod_base = cm
  modified_base 23..24: mod_base = OTHER; note = S-phosphorothioate
  modified_base 24: mod_base = OTHER; note = 2-fluororibose guanine
  modified_base 24..25: mod_base = OTHER; note = S-phosphorothioate
  modified_base 25: mod_base = OTHER; note = deoxyribose cytosine
  modified_base 25..26: mod_base = OTHER; note = S-phosphorothioate
  modified_base 26: mod_base = OTHER; note = deoxyribose adenine
  modified_base 26..27: mod_base = OTHER; note R-N-(1,3-dimethylimidazolidin-2-ylidene)phosphoramidate
  modified_base 27: mod_base = um
  modified_base 27..28: mod_base = OTHER; note = S-phosphorothioate
  modified_base 28: mod_base = cm
  modified_base 28..29: mod_base = OTHER; note = S-phosphorothioate
  modified_base 29: mod_base = gm
  modified_base 29..30: mod_base = OTHER; note R-N-(1,3-dimethylimidazolidin-2-ylidene)phosphoramidate
  modified_base 30: mod_base = OTHER; note = 2-O-methylribose adenine
  source 1..30: mol_type = other RNA
ccccagcagcttcagtccctttcgcatcga

SEQ ID NO: 287 - RNA, 30 nt, synthetic construct
  misc_feature 1..30: note = Synthetic: WV-43686
  misc_feature 1..30: note = Synthetic: ADR-0103706
  modified_base 1: mod_base = OTHER; note = 2-fluororibose cytosine
  modified_base 1..2: mod_base = OTHER; note R-N-(1,3-dimethylimidazolidin-2-ylidene)phosphoramidate
  modified_base 2: mod_base = OTHER; note = 2-fluororibose cytosine
  modified_base 2..3: mod_base = OTHER; note = S-phosphorothioate
  modified_base 3: mod_base = OTHER; note = 2-fluororibose cytosine
  modified_base 3..4: mod_base = OTHER; note = S-phosphorothioate
  modified_base 4: mod_base = OTHER; note = 2-fluororibose cytosine
  modified_base 4..5: mod_base = OTHER; note = S-phosphorothioate
  modified_base 5: mod_base = OTHER; note = 2-fluororibose adenine
  modified_base 5..6: mod_base = OTHER; note = S-phosphorothioate
  modified_base 6: mod_base = OTHER; note = 2-fluororibose guanine
  modified_base 6..7: mod_base = OTHER; note = S-phosphorothioate
  modified_base 7: mod_base = OTHER; note = 2-fluororibose cytosine
  modified_base 7..8: mod_base = OTHER; note = S-phosphorothioate
  modified_base 8: mod_base = OTHER; note = 2-fluororibose adenine
  modified_base 8..9: mod_base = OTHER; note = S-phosphorothioate
  modified_base 9: mod_base = OTHER; note = 2-fluororibose guanine
  modified_base 9..10: mod_base = OTHER; note = S-phosphorothioate
  modified_base 10: mod_base = OTHER; note = 2-fluororibose cytosine
  modified_base 10..11: mod_base = OTHER; note = S-phosphorothioate
  modified_base 11: mod_base = OTHER; note = 2-fluororibose uracil
  modified_base 11..12: mod_base = OTHER; note = S-phosphorothioate
  modified_base 12: mod_base = OTHER; note = 2-fluororibose uracil
  modified_base 12..13: mod_base = OTHER; note = S-phosphorothioate
  modified_base 13: mod_base = OTHER; note = 2-fluororibose cytosine
  modified_base 13..14: mod_base = OTHER; note = S-phosphorothioate
  modified_base 14: mod_base = OTHER; note = 2-fluororibose adenine
  modified_base 14..15: mod_base = OTHER; note = S-phosphorothioate
  modified_base 15: mod_base = OTHER; note = 2-fluororibose guanine
  modified_base 15..16: mod_base = OTHER; note = S-phosphorothioate
  modified_base 16: mod_base = um
  modified_base 16..17: mod_base = OTHER; note = S-phosphorothioate
  modified_base 17: mod_base = cm
  modified_base 17..18: mod_base = OTHER; note = S-phosphorothioate
  modified_base 18: mod_base = cm
  modified_base 18..19: mod_base = OTHER; note = S-phosphorothioate
  modified_base 19: mod_base = cm
  modified_base 19..20: mod_base = OTHER; note = S-phosphorothioate
  modified_base 20: mod_base = um
  modified_base 20..21: mod_base = OTHER; note = S-phosphorothioate
  modified_base 21: mod_base = um
  modified_base 21..22: mod_base = OTHER; note = S-phosphorothioate
  modified_base 22: mod_base = um
  modified_base 22..23: mod_base = OTHER; note = S-phosphorothioate
  modified_base 23: mod_base = cm
  modified_base 23..24: mod_base = OTHER; note = S-phosphorothioate
  modified_base 24: mod_base = OTHER; note = 2-fluororibose cytosine
  modified_base 24..25: mod_base = OTHER; note = S-phosphorothioate
  modified_base 25: mod_base = OTHER; note = deoxyribose cytosine
  modified_base 25..26: mod_base = OTHER; note = S-phosphorothioate
  modified_base 26: mod_base = OTHER; note = deoxyribose adenine
  modified_base 26..27: mod_base = OTHER; note R-N-(1,3-dimethylimidazolidin-2-ylidene)phosphoramidate
  modified_base 27: mod_base = um
  modified_base 27..28: mod_base = OTHER; note = S-phosphorothioate
  modified_base 28: mod_base = cm
  modified_base 28..29: mod_base = OTHER; note = S-phosphorothioate
  modified_base 29: mod_base = gm
  modified_base 29..30: mod_base = OTHER; note R-N-(1,3-dimethylimidazolidin-2-ylidene)phosphoramidate
  modified_base 30: mod_base = OTHER; note = 2-O-methylribose adenine
  source 1..30: mol_type = other RNA
ccccagcagcttcagtccctttcccatcga

SEQ ID NO: 288 - RNA, 30 nt, synthetic construct
  misc_feature 1..30: note = Synthetic: WV-43685
  misc_feature 1..30: note = Synthetic: ADR-0103697
  modified_base 1: mod_base = OTHER; note = 2-fluororibose cytosine
  modified_base 1..2: mod_base = OTHER; note R-N-(1,3-dimethylimidazolidin-2-ylidene)phosphoramidate
  modified_base 2: mod_base = OTHER; note = 2-fluororibose cytosine
  modified_base 2..3: mod_base = OTHER; note = S-phosphorothioate
  modified_base 3: mod_base = OTHER; note = 2-fluororibose cytosine
  modified_base 3..4: mod_base = OTHER; note = S-phosphorothioate
  modified_base 4: mod_base = OTHER; note = 2-fluororibose cytosine
  modified_base 4..5: mod_base = OTHER; note = S-phosphorothioate
  modified_base 5: mod_base = OTHER; note = 2-fluororibose adenine
  modified_base 5..6: mod_base = OTHER; note = S-phosphorothioate
  modified_base 6: mod_base = OTHER; note = 2-fluororibose guanine
  modified_base 6..7: mod_base = OTHER; note = S-phosphorothioate
  modified_base 7: mod_base = OTHER; note = 2-fluororibose cytosine
  modified_base 7..8: mod_base = OTHER; note = S-phosphorothioate
  modified_base 8: mod_base = OTHER; note = 2-fluororibose adenine
  modified_base 8..9: mod_base = OTHER; note = S-phosphorothioate
  modified_base 9: mod_base = OTHER; note = 2-fluororibose guanine
  modified_base 9..10: mod_base = OTHER; note = S-phosphorothioate
  modified_base 10: mod_base = OTHER; note = 2-fluororibose cytosine
  modified_base 10..11: mod_base = OTHER; note = S-phosphorothioate
  modified_base 11: mod_base = OTHER; note = 2-fluororibose uracil
  modified_base 11..12: mod_base = OTHER; note = S-phosphorothioate
  modified_base 12: mod_base = OTHER; note = 2-fluororibose uracil
  modified_base 12..13: mod_base = OTHER; note = S-phosphorothioate
  modified_base 13: mod_base = OTHER; note = 2-fluororibose cytosine
  modified_base 13..14: mod_base = OTHER; note = S-phosphorothioate
  modified_base 14: mod_base = OTHER; note = 2-fluororibose adenine
  modified_base 14..15: mod_base = OTHER; note = S-phosphorothioate
  modified_base 15: mod_base = OTHER; note = 2-fluororibose guanine
  modified_base 15..16: mod_base = OTHER; note = S-phosphorothioate
  modified_base 16: mod_base = um
  modified_base 16..17: mod_base = OTHER; note = S-phosphorothioate
  modified_base 17: mod_base = cm
  modified_base 17..18: mod_base = OTHER; note = S-phosphorothioate
  modified_base 18: mod_base = cm
  modified_base 18..19: mod_base = OTHER; note = S-phosphorothioate
  modified_base 19: mod_base = cm
  modified_base 19..20: mod_base = OTHER; note = S-phosphorothioate
  modified_base 20: mod_base = um
  modified_base 20..21: mod_base = OTHER; note = S-phosphorothioate
  modified_base 21: mod_base = um
  modified_base 21..22: mod_base = OTHER; note = S-phosphorothioate
  modified_base 22: mod_base = um
  modified_base 22..23: mod_base = OTHER; note = S-phosphorothioate
  modified_base 23: mod_base = cm
  modified_base 23..24: mod_base = OTHER; note = S-phosphorothioate
  modified_base 24: mod_base = OTHER; note = 2-fluororibose adenine
  modified_base 24..25: mod_base = OTHER; note = S-phosphorothioate
  modified_base 25: mod_base = OTHER; note = deoxyribose cytosine
  modified_base 25..26: mod_base = OTHER; note = S-phosphorothioate
  modified_base 26: mod_base = OTHER; note = deoxyribose adenine
  modified_base 26..27: mod_base = OTHER; note R-N-(1,3-dimethylimidazolidin-2-ylidene)phosphoramidate
  modified_base 27: mod_base = um
  modified_base 27..28: mod_base = OTHER; note = S-phosphorothioate
  modified_base 28: mod_base = cm
  modified_base 28..29: mod_base = OTHER; note = S-phosphorothioate
  modified_base 29: mod_base = gm
  modified_base 29..30: mod_base = OTHER; note R-N-(1,3-dimethylimidazolidin-2-ylidene)phosphoramidate
  modified_base 30: mod_base = OTHER; note = 2-O-methylribose adenine
  source 1..30: mol_type = other RNA
ccccagcagcttcagtccctttcacatcga

SEQ ID NO: 289 - RNA, 30 nt, synthetic construct
  misc_feature 1..30: note = Synthetic: WV-43683
  misc_feature 1..30: note = Synthetic: ADR-0103718
  modified_base 1: mod_base = OTHER; note = 2-fluororibose cytosine
  modified_base 1..2: mod_base = OTHER; note R-N-(1,3-dimethylimidazolidin-2-ylidene)phosphoramidate
  modified_base 2: mod_base = OTHER; note = 2-fluororibose cytosine
  modified_base 2..3: mod_base = OTHER; note = S-phosphorothioate
  modified_base 3: mod_base = OTHER; note = 2-fluororibose cytosine
  modified_base 3..4: mod_base = OTHER; note = S-phosphorothioate
  modified_base 4: mod_base = OTHER; note = 2-fluororibose cytosine
  modified_base 4..5: mod_base = OTHER; note = S-phosphorothioate
  modified_base 5: mod_base = OTHER; note = 2-fluororibose adenine
  modified_base 5..6: mod_base = OTHER; note = S-phosphorothioate
  modified_base 6: mod_base = OTHER; note = 2-fluororibose guanine
  modified_base 6..7: mod_base = OTHER; note = S-phosphorothioate
  modified_base 7: mod_base = OTHER; note = 2-fluororibose cytosine
  modified_base 7..8: mod_base = OTHER; note = S-phosphorothioate
  modified_base 8: mod_base = OTHER; note = 2-fluororibose adenine
  modified_base 8..9: mod_base = OTHER; note = S-phosphorothioate
  modified_base 9: mod_base = OTHER; note = 2-fluororibose guanine
  modified_base 9..10: mod_base = OTHER; note = S-phosphorothioate
  modified_base 10: mod_base = OTHER; note = 2-fluororibose cytosine
  modified_base 10..11: mod_base = OTHER; note = S-phosphorothioate
  modified_base 11: mod_base = OTHER; note = 2-fluororibose uracil
  modified_base 11..12: mod_base = OTHER; note = S-phosphorothioate
  modified_base 12: mod_base = OTHER; note = 2-fluororibose uracil
  modified_base 12..13: mod_base = OTHER; note = S-phosphorothioate
  modified_base 13: mod_base = OTHER; note = 2-fluororibose cytosine
  modified_base 13..14: mod_base = OTHER; note = S-phosphorothioate
  modified_base 14: mod_base = OTHER; note = 2-fluororibose adenine
  modified_base 14..15: mod_base = OTHER; note = S-phosphorothioate
  modified_base 15: mod_base = OTHER; note = 2-fluororibose guanine
  modified_base 15..16: mod_base = OTHER; note = S-phosphorothioate
  modified_base 16: mod_base = um
  modified_base 16..17: mod_base = OTHER; note = S-phosphorothioate
  modified_base 17: mod_base = cm
  modified_base 17..18: mod_base = OTHER; note = S-phosphorothioate
  modified_base 18: mod_base = cm
  modified_base 18..19: mod_base = OTHER; note = S-phosphorothioate
  modified_base 19: mod_base = cm
  modified_base 19..20: mod_base = OTHER; note = S-phosphorothioate
  modified_base 20: mod_base = um
  modified_base 20..21: mod_base = OTHER; note = S-phosphorothioate
  modified_base 21: mod_base = um
  modified_base 21..22: mod_base = OTHER; note = S-phosphorothioate
  modified_base 22: mod_base = um
  modified_base 22..23: mod_base = OTHER; note = S-phosphorothioate
  modified_base 23: mod_base = cm
  modified_base 23..24: mod_base = OTHER; note = S-phosphorothioate
  modified_base 24: mod_base = OTHER; note = 2-fluororibose guanine
  modified_base 24..25: mod_base = OTHER; note = S-phosphorothioate
  modified_base 25: mod_base = OTHER; note = deoxyribose cytosine
  modified_base 25..26: mod_base = OTHER; note = S-phosphorothioate
  modified_base 26: mod_base = OTHER; note = deoxyribose thymine
  modified_base 26..27: mod_base = OTHER; note R-N-(1,3-dimethylimidazolidin-2-ylidene)phosphoramidate
  modified_base 27: mod_base = um
  modified_base 27..28: mod_base = OTHER; note = S-phosphorothioate
  modified_base 28: mod_base = cm
  modified_base 28..29: mod_base = OTHER; note = S-phosphorothioate
  modified_base 29: mod_base = gm
  modified_base 29..30: mod_base = OTHER; note R-N-(1,3-dimethylimidazolidin-2-ylidene)phosphoramidate
  modified_base 30: mod_base = OTHER; note = 2-O-methylribose adenine
  source 1..30: mol_type = other RNA
ccccagcagcttcagtccctttcgcttcga

SEQ ID NO: 290 - RNA, 30 nt, synthetic construct
  misc_feature 1..30: note = Synthetic: WV-43682
  misc_feature 1..30: note = Synthetic: ADR-0103709
  modified_base 1: mod_base = OTHER; note = 2-fluororibose cytosine
  modified_base 1..2: mod_base = OTHER; note R-N-(1,3-dimethylimidazolidin-2-ylidene)phosphoramidate
  modified_base 2: mod_base = OTHER; note = 2-fluororibose cytosine
  modified_base 2..3: mod_base = OTHER; note = S-phosphorothioate
  modified_base 3: mod_base = OTHER; note = 2-fluororibose cytosine
  modified_base 3..4: mod_base = OTHER; note = S-phosphorothioate
  modified_base 4: mod_base = OTHER; note = 2-fluororibose cytosine
  modified_base 4..5: mod_base = OTHER; note = S-phosphorothioate
  modified_base 5: mod_base = OTHER; note = 2-fluororibose adenine
  modified_base 5..6: mod_base = OTHER; note = S-phosphorothioate
  modified_base 6: mod_base = OTHER; note = 2-fluororibose guanine
  modified_base 6..7: mod_base = OTHER; note = S-phosphorothioate
  modified_base 7: mod_base = OTHER; note = 2-fluororibose cytosine
  modified_base 7..8: mod_base = OTHER; note = S-phosphorothioate
  modified_base 8: mod_base = OTHER; note = 2-fluororibose adenine
  modified_base 8..9: mod_base = OTHER; note = S-phosphorothioate
  modified_base 9: mod_base = OTHER; note = 2-fluororibose guanine
  modified_base 9..10: mod_base = OTHER; note = S-phosphorothioate
  modified_base 10: mod_base = OTHER; note = 2-fluororibose cytosine
  modified_base 10..11: mod_base = OTHER; note = S-phosphorothioate
  modified_base 11: mod_base = OTHER; note = 2-fluororibose uracil
  modified_base 11..12: mod_base = OTHER; note = S-phosphorothioate
  modified_base 12: mod_base = OTHER; note = 2-fluororibose uracil
  modified_base 12..13: mod_base = OTHER; note = S-phosphorothioate
  modified_base 13: mod_base = OTHER; note = 2-fluororibose cytosine
  modified_base 13..14: mod_base = OTHER; note = S-phosphorothioate
  modified_base 14: mod_base = OTHER; note = 2-fluororibose adenine
  modified_base 14..15: mod_base = OTHER; note = S-phosphorothioate
  modified_base 15: mod_base = OTHER; note = 2-fluororibose guanine
  modified_base 15..16: mod_base = OTHER; note = S-phosphorothioate
  modified_base 16: mod_base = um
  modified_base 16..17: mod_base = OTHER; note = S-phosphorothioate
  modified_base 17: mod_base = cm
  modified_base 17..18: mod_base = OTHER; note = S-phosphorothioate
  modified_base 18: mod_base = cm
  modified_base 18..19: mod_base = OTHER; note = S-phosphorothioate
  modified_base 19: mod_base = cm
  modified_base 19..20: mod_base = OTHER; note = S-phosphorothioate
  modified_base 20: mod_base = um
  modified_base 20..21: mod_base = OTHER; note = S-phosphorothioate
  modified_base 21: mod_base = um
  modified_base 21..22: mod_base = OTHER; note = S-phosphorothioate
  modified_base 22: mod_base = um
  modified_base 22..23: mod_base = OTHER; note = S-phosphorothioate
  modified_base 23: mod_base = cm
  modified_base 23..24: mod_base = OTHER; note = S-phosphorothioate
  modified_base 24: mod_base = OTHER; note = 2-fluororibose cytosine
  modified_base 24..25: mod_base = OTHER; note = S-phosphorothioate
  modified_base 25: mod_base = OTHER; note = deoxyribose cytosine
  modified_base 25..26: mod_base = OTHER; note = S-phosphorothioate
  modified_base 26: mod_base = OTHER; note = deoxyribose thymine
  modified_base 26..27: mod_base = OTHER; note R-N-(1,3-dimethylimidazolidin-2-ylidene)phosphoramidate
  modified_base 27: mod_base = um
  modified_base 27..28: mod_base = OTHER; note = S-phosphorothioate
  modified_base 28: mod_base = cm
  modified_base 28..29: mod_base = OTHER; note = S-phosphorothioate
  modified_base 29: mod_base = gm
  modified_base 29..30: mod_base = OTHER; note R-N-(1,3-dimethylimidazolidin-2-ylidene)phosphoramidate
  modified_base 30: mod_base = OTHER; note = 2-O-methylribose adenine
  source 1..30: mol_type = other RNA
ccccagcagcttcagtccctttcccttcga

SEQ ID NO: 291 - RNA, 30 nt, synthetic construct
  misc_feature 1..30: note = Synthetic: WV-43681
  misc_feature 1..30: note = Synthetic: ADR-0103700
  modified_base 1: mod_base = OTHER; note = 2-fluororibose cytosine
  modified_base 1..2: mod_base = OTHER; note R-N-(1,3-dimethylimidazolidin-2-ylidene)phosphoramidate
  modified_base 2: mod_base = OTHER; note = 2-fluororibose cytosine
  modified_base 2..3: mod_base = OTHER; note = S-phosphorothioate
  modified_base 3: mod_base = OTHER; note = 2-fluororibose cytosine
  modified_base 3..4: mod_base = OTHER; note = S-phosphorothioate
  modified_base 4: mod_base = OTHER; note = 2-fluororibose cytosine
  modified_base 4..5: mod_base = OTHER; note = S-phosphorothioate
  modified_base 5: mod_base = OTHER; note = 2-fluororibose adenine
  modified_base 5..6: mod_base = OTHER; note = S-phosphorothioate
  modified_base 6: mod_base = OTHER; note = 2-fluororibose guanine
  modified_base 6..7: mod_base = OTHER; note = S-phosphorothioate
  modified_base 7: mod_base = OTHER; note = 2-fluororibose cytosine
  modified_base 7..8: mod_base = OTHER; note = S-phosphorothioate
  modified_base 8: mod_base = OTHER; note = 2-fluororibose adenine
  modified_base 8..9: mod_base = OTHER; note = S-phosphorothioate
  modified_base 9: mod_base = OTHER; note = 2-fluororibose guanine
  modified_base 9..10: mod_base = OTHER; note = S-phosphorothioate
  modified_base 10: mod_base = OTHER; note = 2-fluororibose cytosine
  modified_base 10..11: mod_base = OTHER; note = S-phosphorothioate
  modified_base 11: mod_base = OTHER; note = 2-fluororibose uracil
  modified_base 11..12: mod_base = OTHER; note = S-phosphorothioate
  modified_base 12: mod_base = OTHER; note = 2-fluororibose uracil
  modified_base 12..13: mod_base = OTHER; note = S-phosphorothioate
  modified_base 13: mod_base = OTHER; note = 2-fluororibose cytosine
  modified_base 13..14: mod_base = OTHER; note = S-phosphorothioate
  modified_base 14: mod_base = OTHER; note = 2-fluororibose adenine
  modified_base 14..15: mod_base = OTHER; note = S-phosphorothioate
  modified_base 15: mod_base = OTHER; note = 2-fluororibose guanine
  modified_base 15..16: mod_base = OTHER; note = S-phosphorothioate
  modified_base 16: mod_base = um
  modified_base 16..17: mod_base = OTHER; note = S-phosphorothioate
  modified_base 17: mod_base = cm
  modified_base 17..18: mod_base = OTHER; note = S-phosphorothioate
  modified_base 18: mod_base = cm
  modified_base 18..19: mod_base = OTHER; note = S-phosphorothioate
  modified_base 19: mod_base = cm
  modified_base 19..20: mod_base = OTHER; note = S-phosphorothioate
  modified_base 20: mod_base = um
  modified_base 20..21: mod_base = OTHER; note = S-phosphorothioate
  modified_base 21: mod_base = um
  modified_base 21..22: mod_base = OTHER; note = S-phosphorothioate
  modified_base 22: mod_base = um
  modified_base 22..23: mod_base = OTHER; note = S-phosphorothioate
  modified_base 23: mod_base = cm
  modified_base 23..24: mod_base = OTHER; note = S-phosphorothioate
  modified_base 24: mod_base = OTHER; note = 2-fluororibose adenine
  modified_base 24..25: mod_base = OTHER; note = S-phosphorothioate
  modified_base 25: mod_base = OTHER; note = deoxyribose cytosine
  modified_base 25..26: mod_base = OTHER; note = S-phosphorothioate
  modified_base 26: mod_base = OTHER; note = deoxyribose thymine
  modified_base 26..27: mod_base = OTHER; note R-N-(1,3-dimethylimidazolidin-2-ylidene)phosphoramidate
  modified_base 27: mod_base = um
  modified_base 27..28: mod_base = OTHER; note = S-phosphorothioate
  modified_base 28: mod_base = cm
  modified_base 28..29: mod_base = OTHER; note = S-phosphorothioate
  modified_base 29: mod_base = gm
  modified_base 29..30: mod_base = OTHER; note R-N-(1,3-dimethylimidazolidin-2-ylidene)phosphoramidate
  modified_base 30: mod_base = OTHER; note = 2-O-methylribose adenine
  source 1..30: mol_type = other RNA
ccccagcagcttcagtccctttcacttcga

SEQ ID NO: 292 - RNA, 30 nt, synthetic construct
  misc_feature 1..30: note = Synthetic: WV-43680
  misc_feature 1..30: note = Synthetic: ADR-0103727
  modified_base 1: mod_base = OTHER; note = 2-fluororibose cytosine
  modified_base 1..2: mod_base = OTHER; note R-N-(1,3-dimethylimidazolidin-2-ylidene)phosphoramidate
  modified_base 2: mod_base = OTHER; note = 2-fluororibose cytosine
  modified_base 2..3: mod_base = OTHER; note = S-phosphorothioate
  modified_base 3: mod_base = OTHER; note = 2-fluororibose cytosine
  modified_base 3..4: mod_base = OTHER; note = S-phosphorothioate
  modified_base 4: mod_base = OTHER; note = 2-fluororibose cytosine
  modified_base 4..5: mod_base = OTHER; note = S-phosphorothioate
  modified_base 5: mod_base = OTHER; note = 2-fluororibose adenine
  modified_base 5..6: mod_base = OTHER; note = S-phosphorothioate
  modified_base 6: mod_base = OTHER; note = 2-fluororibose guanine
  modified_base 6..7: mod_base = OTHER; note = S-phosphorothioate
  modified_base 7: mod_base = OTHER; note = 2-fluororibose cytosine
  modified_base 7..8: mod_base = OTHER; note = S-phosphorothioate
  modified_base 8: mod_base = OTHER; note = 2-fluororibose adenine
  modified_base 8..9: mod_base = OTHER; note = S-phosphorothioate
  modified_base 9: mod_base = OTHER; note = 2-fluororibose guanine
  modified_base 9..10: mod_base = OTHER; note = S-phosphorothioate
  modified_base 10: mod_base = OTHER; note = 2-fluororibose cytosine
  modified_base 10..11: mod_base = OTHER; note = S-phosphorothioate
  modified_base 11: mod_base = OTHER; note = 2-fluororibose uracil
  modified_base 11..12: mod_base = OTHER; note = S-phosphorothioate
  modified_base 12: mod_base = OTHER; note = 2-fluororibose uracil
  modified_base 12..13: mod_base = OTHER; note = S-phosphorothioate
  modified_base 13: mod_base = OTHER; note = 2-fluororibose cytosine
  modified_base 13..14: mod_base = OTHER; note = S-phosphorothioate
  modified_base 14: mod_base = OTHER; note = 2-fluororibose adenine
  modified_base 14..15: mod_base = OTHER; note = S-phosphorothioate
  modified_base 15: mod_base = OTHER; note = 2-fluororibose guanine
  modified_base 15..16: mod_base = OTHER; note = S-phosphorothioate
  modified_base 16: mod_base = um
  modified_base 16..17: mod_base = OTHER; note = S-phosphorothioate
  modified_base 17: mod_base = cm
  modified_base 17..18: mod_base = OTHER; note = S-phosphorothioate
  modified_base 18: mod_base = cm
  modified_base 18..19: mod_base = OTHER; note = S-phosphorothioate
  modified_base 19: mod_base = cm
  modified_base 19..20: mod_base = OTHER; note = S-phosphorothioate
  modified_base 20: mod_base = um
  modified_base 20..21: mod_base = OTHER; note = S-phosphorothioate
  modified_base 21: mod_base = um
  modified_base 21..22: mod_base = OTHER; note = S-phosphorothioate
  modified_base 22: mod_base = um
  modified_base 22..23: mod_base = OTHER; note = S-phosphorothioate
  modified_base 23: mod_base = cm
  modified_base 23..24: mod_base = OTHER; note = S-phosphorothioate
  modified_base 24: mod_base = OTHER; note = 2-fluororibose uracil
  modified_base 24..25: mod_base = OTHER; note = S-phosphorothioate
  modified_base 25: mod_base = OTHER; note = deoxyribose cytosine
  modified_base 25..26: mod_base = OTHER; note = S-phosphorothioate
  modified_base 26: mod_base = OTHER; note = deoxyribose thymine
  modified_base 26..27: mod_base = OTHER; note R-N-(1,3-dimethylimidazolidin-2-ylidene)phosphoramidate
  modified_base 27: mod_base = um
  modified_base 27..28: mod_base = OTHER; note = S-phosphorothioate
  modified_base 28: mod_base = cm
  modified_base 28..29: mod_base = OTHER; note = S-phosphorothioate
  modified_base 29: mod_base = gm
  modified_base 29..30: mod_base = OTHER; note R-N-(1,3-dimethylimidazolidin-2-ylidene)phosphoramidate
  modified_base 30: mod_base = OTHER; note = 2-O-methylribose adenine
  source 1..30: mol_type = other RNA
ccccagcagcttcagtccctttctcttcga

SEQ ID NO: 293 - RNA, 30 nt, synthetic construct
  misc_feature 1..30: note = Synthetic: WV-43725
  misc_feature 1..30: note = Synthetic: ADR-0103589
  modified_base 1: mod_base = OTHER; note = 2-fluororibose cytosine
  modified_base 1..2: mod_base = OTHER; note R-N-(1,3-dimethylimidazolidin-2-ylidene)phosphoramidate
  modified_base 2: mod_base = OTHER; note = 2-fluororibose cytosine
  modified_base 2..3: mod_base = OTHER; note = S-phosphorothioate
  modified_base 3: mod_base = OTHER; note = 2-fluororibose cytosine
  modified_base 3..4: mod_base = OTHER; note = S-phosphorothioate
  modified_base 4: mod_base = OTHER; note = 2-fluororibose adenine
  modified_base 4..5: mod_base = OTHER; note = S-phosphorothioate
  modified_base 5: mod_base = OTHER; note = 2-fluororibose guanine
  modified_base 5..6: mod_base = OTHER; note = S-phosphorothioate
  modified_base 6: mod_base = OTHER; note = 2-fluororibose cytosine
  modified_base 6..7: mod_base = OTHER; note = S-phosphorothioate
  modified_base 7: mod_base = OTHER; note = 2-fluororibose adenine
  modified_base 7..8: mod_base = OTHER; note = S-phosphorothioate
  modified_base 8: mod_base = OTHER; note = 2-fluororibose guanine
  modified_base 8..9: mod_base = OTHER; note = S-phosphorothioate
  modified_base 9: mod_base = OTHER; note = 2-fluororibose cytosine
  modified_base 9..10: mod_base = OTHER; note = S-phosphorothioate
  modified_base 10: mod_base = OTHER; note = 2-fluororibose uracil
  modified_base 10..11: mod_base = OTHER; note = S-phosphorothioate
  modified_base 11: mod_base = OTHER; note = 2-fluororibose uracil
  modified_base 11..12: mod_base = OTHER; note = S-phosphorothioate
  modified_base 12: mod_base = OTHER; note = 2-fluororibose cytosine
  modified_base 12..13: mod_base = OTHER; note = S-phosphorothioate
  modified_base 13: mod_base = OTHER; note = 2-fluororibose adenine
  modified_base 13..14: mod_base = OTHER; note = S-phosphorothioate
  modified_base 14: mod_base = OTHER; note = 2-fluororibose guanine
  modified_base 14..15: mod_base = OTHER; note = S-phosphorothioate
  modified_base 15: mod_base = OTHER; note = 2-fluororibose uracil
  modified_base 15..16: mod_base = OTHER; note = S-phosphorothioate
  modified_base 16: mod_base = cm
  modified_base 16..17: mod_base = OTHER; note = S-phosphorothioate
  modified_base 17: mod_base = cm
  modified_base 17..18: mod_base = OTHER; note = S-phosphorothioate
  modified_base 18: mod_base = cm
  modified_base 18..19: mod_base = OTHER; note = S-phosphorothioate
  modified_base 19: mod_base = um
  modified_base 19..20: mod_base = OTHER; note = S-phosphorothioate
  modified_base 20: mod_base = um
  modified_base 20..21: mod_base = OTHER; note = S-phosphorothioate
  modified_base 21: mod_base = um
  modified_base 21..22: mod_base = OTHER; note = S-phosphorothioate
  modified_base 22: mod_base = cm
  modified_base 22..23: mod_base = OTHER; note = S-phosphorothioate
  modified_base 23: mod_base = OTHER; note = 2-fluororibose guanine
  modified_base 23..24: mod_base = OTHER; note = S-phosphorothioate
  modified_base 24: mod_base = OTHER; note = deoxyribose 6-amino-9-substituted 8,9-dihydro-7H-purin-8-one
  modified_base 24..25: mod_base = OTHER; note = S-phosphorothioate
  modified_base 25: mod_base = OTHER; note = deoxyribose guanine
  modified_base 25..26: mod_base = OTHER; note R-N-(1,3-dimethylimidazolidin-2-ylidene)phosphoramidate
  modified_base 26: mod_base = um
  modified_base 26..27: mod_base = OTHER; note = S-phosphorothioate
  modified_base 27: mod_base = cm
  modified_base 27..28: mod_base = OTHER; note = S-phosphorothioate
  modified_base 28: mod_base = gm
  modified_base 28..29: mod_base = OTHER; note = S-phosphorothioate
  modified_base 29: mod_base = OTHER; note = 2-O-methylribose adenine
  modified_base 29..30: mod_base = OTHER; note R-N-(1,3-dimethylimidazolidin-2-ylidene)phosphoramidate
  modified_base 30: mod_base = um
  source 1..30: mol_type = other RNA
cccagcagcttcagtccctttcgagtcgat

SEQ ID NO: 294 - RNA, 30 nt, synthetic construct
  misc_feature 1..30: note = Synthetic: WV-43724
  misc_feature 1..30: note = Synthetic: ADR-0103585
  modified_base 1: mod_base = OTHER; note = 2-fluororibose cytosine
  modified_base 1..2: mod_base = OTHER; note R-N-(1,3-dimethylimidazolidin-2-ylidene)phosphoramidate
  modified_base 2: mod_base = OTHER; note = 2-fluororibose cytosine
  modified_base 2..3: mod_base = OTHER; note = S-phosphorothioate
  modified_base 3: mod_base = OTHER; note = 2-fluororibose cytosine
  modified_base 3..4: mod_base = OTHER; note = S-phosphorothioate
  modified_base 4: mod_base = OTHER; note = 2-fluororibose adenine
  modified_base 4..5: mod_base = OTHER; note = S-phosphorothioate
  modified_base 5: mod_base = OTHER; note = 2-fluororibose guanine
  modified_base 5..6: mod_base = OTHER; note = S-phosphorothioate
  modified_base 6: mod_base = OTHER; note = 2-fluororibose cytosine
  modified_base 6..7: mod_base = OTHER; note = S-phosphorothioate
  modified_base 7: mod_base = OTHER; note = 2-fluororibose adenine
  modified_base 7..8: mod_base = OTHER; note = S-phosphorothioate
  modified_base 8: mod_base = OTHER; note = 2-fluororibose guanine
  modified_base 8..9: mod_base = OTHER; note = S-phosphorothioate
  modified_base 9: mod_base = OTHER; note = 2-fluororibose cytosine
  modified_base 9..10: mod_base = OTHER; note = S-phosphorothioate
  modified_base 10: mod_base = OTHER; note = 2-fluororibose uracil
  modified_base 10..11: mod_base = OTHER; note = S-phosphorothioate
  modified_base 11: mod_base = OTHER; note = 2-fluororibose uracil
  modified_base 11..12: mod_base = OTHER; note = S-phosphorothioate
  modified_base 12: mod_base = OTHER; note = 2-fluororibose cytosine
  modified_base 12..13: mod_base = OTHER; note = S-phosphorothioate
  modified_base 13: mod_base = OTHER; note = 2-fluororibose adenine
  modified_base 13..14: mod_base = OTHER; note = S-phosphorothioate
  modified_base 14: mod_base = OTHER; note = 2-fluororibose guanine
  modified_base 14..15: mod_base = OTHER; note = S-phosphorothioate
  modified_base 15: mod_base = OTHER; note = 2-fluororibose uracil
  modified_base 15..16: mod_base = OTHER; note = S-phosphorothioate
  modified_base 16: mod_base = cm
  modified_base 16..17: mod_base = OTHER; note = S-phosphorothioate
  modified_base 17: mod_base = cm
  modified_base 17..18: mod_base = OTHER; note = S-phosphorothioate
  modified_base 18: mod_base = cm
  modified_base 18..19: mod_base = OTHER; note = S-phosphorothioate
  modified_base 19: mod_base = um
  modified_base 19..20: mod_base = OTHER; note = S-phosphorothioate
  modified_base 20: mod_base = um
  modified_base 20..21: mod_base = OTHER; note = S-phosphorothioate
  modified_base 21: mod_base = um
  modified_base 21..22: mod_base = OTHER; note = S-phosphorothioate
  modified_base 22: mod_base = cm
  modified_base 22..23: mod_base = OTHER; note = S-phosphorothioate
  modified_base 23: mod_base = OTHER; note = 2-fluororibose cytosine
  modified_base 23..24: mod_base = OTHER; note = S-phosphorothioate
  modified_base 24: mod_base = OTHER; note = deoxyribose 6-amino-9-substituted 8,9-dihydro-7H-purin-8-one
  modified_base 24..25: mod_base = OTHER; note = S-phosphorothioate
  modified_base 25: mod_base = OTHER; note = deoxyribose guanine
  modified_base 25..26: mod_base = OTHER; note R-N-(1,3-dimethylimidazolidin-2-ylidene)phosphoramidate
  modified_base 26: mod_base = um
  modified_base 26..27: mod_base = OTHER; note = S-phosphorothioate
  modified_base 27: mod_base = cm
  modified_base 27..28: mod_base = OTHER; note = S-phosphorothioate
  modified_base 28: mod_base = gm
  modified_base 28..29: mod_base = OTHER; note = S-phosphorothioate
  modified_base 29: mod_base = OTHER; note = 2-O-methylribose adenine
  modified_base 29..30: mod_base = OTHER; note R-N-(1,3-dimethylimidazolidin-2-ylidene)phosphoramidate
  modified_base 30: mod_base = um
  source 1..30: mol_type = other RNA
cccagcagcttcagtccctttccagtcgat

SEQ ID NO: 295 - RNA, 30 nt, synthetic construct; identical to SEQ ID NO: 134
  misc_feature 1..30: note = Synthetic: WV-43722
  misc_feature 1..30: note = Synthetic: ADR-0103616
  modified_base 1: mod_base = OTHER; note = 2-fluororibose cytosine
  modified_base 1..2: mod_base = OTHER; note R-N-(1,3-dimethylimidazolidin-2-ylidene)phosphoramidate
  modified_base 2: mod_base = OTHER; note = 2-fluororibose cytosine
  modified_base 2..3: mod_base = OTHER; note = S-phosphorothioate
  modified_base 3: mod_base = OTHER; note = 2-fluororibose cytosine
  modified_base 3..4: mod_base = OTHER; note = S-phosphorothioate
  modified_base 4: mod_base = OTHER; note = 2-fluororibose adenine
  modified_base 4..5: mod_base = OTHER; note = S-phosphorothioate
  modified_base 5: mod_base = OTHER; note = 2-fluororibose guanine
  modified_base 5..6: mod_base = OTHER; note = S-phosphorothioate
  modified_base 6: mod_base = OTHER; note = 2-fluororibose cytosine
  modified_base 6..7: mod_base = OTHER; note = S-phosphorothioate
  modified_base 7: mod_base = OTHER; note = 2-fluororibose adenine
  modified_base 7..8: mod_base = OTHER; note = S-phosphorothioate
  modified_base 8: mod_base = OTHER; note = 2-fluororibose guanine
  modified_base 8..9: mod_base = OTHER; note = S-phosphorothioate
  modified_base 9: mod_base = OTHER; note = 2-fluororibose cytosine
  modified_base 9..10: mod_base = OTHER; note = S-phosphorothioate
  modified_base 10: mod_base = OTHER; note = 2-fluororibose uracil
  modified_base 10..11: mod_base = OTHER; note = S-phosphorothioate
  modified_base 11: mod_base = OTHER; note = 2-fluororibose uracil
  modified_base 11..12: mod_base = OTHER; note = S-phosphorothioate
  modified_base 12: mod_base = OTHER; note = 2-fluororibose cytosine
  modified_base 12..13: mod_base = OTHER; note = S-phosphorothioate
  modified_base 13: mod_base = OTHER; note = 2-fluororibose adenine
  modified_base 13..14: mod_base = OTHER; note = S-phosphorothioate
  modified_base 14: mod_base = OTHER; note = 2-fluororibose guanine
  modified_base 14..15: mod_base = OTHER; note = S-phosphorothioate
  modified_base 15: mod_base = OTHER; note = 2-fluororibose uracil
  modified_base 15..16: mod_base = OTHER; note = S-phosphorothioate
  modified_base 16: mod_base = cm
  modified_base 16..17: mod_base = OTHER; note = S-phosphorothioate
  modified_base 17: mod_base = cm
  modified_base 17..18: mod_base = OTHER; note = S-phosphorothioate
  modified_base 18: mod_base = cm
  modified_base 18..19: mod_base = OTHER; note = S-phosphorothioate
  modified_base 19: mod_base = um
  modified_base 19..20: mod_base = OTHER; note = S-phosphorothioate
  modified_base 20: mod_base = um
  modified_base 20..21: mod_base = OTHER; note = S-phosphorothioate
  modified_base 21: mod_base = um
  modified_base 21..22: mod_base = OTHER; note = S-phosphorothioate
  modified_base 22: mod_base = cm
  modified_base 22..23: mod_base = OTHER; note = S-phosphorothioate
  modified_base 23: mod_base = OTHER; note = 2-fluororibose uracil
  modified_base 23..24: mod_base = OTHER; note = S-phosphorothioate
  modified_base 24: mod_base = OTHER; note = deoxyribose 6-amino-9-substituted 8,9-dihydro-7H-purin-8-one
  modified_base 24..25: mod_base = OTHER; note = S-phosphorothioate
  modified_base 25: mod_base = OTHER; note = deoxyribose guanine
  modified_base 25..26: mod_base = OTHER; note R-N-(1,3-dimethylimidazolidin-2-ylidene)phosphoramidate
  modified_base 26: mod_base = um
  modified_base 26..27: mod_base = OTHER; note = S-phosphorothioate
  modified_base 27: mod_base = cm
  modified_base 27..28: mod_base = OTHER; note = S-phosphorothioate
  modified_base 28: mod_base = gm
  modified_base 28..29: mod_base = OTHER; note = S-phosphorothioate
  modified_base 29: mod_base = OTHER; note = 2-O-methylribose adenine
  modified_base 29..30: mod_base = OTHER; note R-N-(1,3-dimethylimidazolidin-2-ylidene)phosphoramidate
  modified_base 30: mod_base = um
  source 1..30: mol_type = other RNA

SEQ ID NO: 296 - RNA, 30 nt, synthetic construct; identical to SEQ ID NO: 293
  misc_feature 1..30: note = Synthetic: WV-43721
  misc_feature 1..30: note = Synthetic: ADR-0103590
  modified_base 1: mod_base = OTHER; note = 2-fluororibose cytosine
  modified_base 1..2: mod_base = OTHER; note R-N-(1,3-dimethylimidazolidin-2-ylidene)phosphoramidate
  modified_base 2: mod_base = OTHER; note = 2-fluororibose cytosine
  modified_base 2..3: mod_base = OTHER; note = S-phosphorothioate
  modified_base 3: mod_base = OTHER; note = 2-fluororibose cytosine
  modified_base 3..4: mod_base = OTHER; note = S-phosphorothioate
  modified_base 4: mod_base = OTHER; note = 2-fluororibose adenine
  modified_base 4..5: mod_base = OTHER; note = S-phosphorothioate
  modified_base 5: mod_base = OTHER; note = 2-fluororibose guanine
  modified_base 5..6: mod_base = OTHER; note = S-phosphorothioate
  modified_base 6: mod_base = OTHER; note = 2-fluororibose cytosine
  modified_base 6..7: mod_base = OTHER; note = S-phosphorothioate
  modified_base 7: mod_base = OTHER; note = 2-fluororibose adenine
  modified_base 7..8: mod_base = OTHER; note = S-phosphorothioate
  modified_base 8: mod_base = OTHER; note = 2-fluororibose guanine
  modified_base 8..9: mod_base = OTHER; note = S-phosphorothioate
  modified_base 9: mod_base = OTHER; note = 2-fluororibose cytosine
  modified_base 9..10: mod_base = OTHER; note = S-phosphorothioate
  modified_base 10: mod_base = OTHER; note = 2-fluororibose uracil
  modified_base 10..11: mod_base = OTHER; note = S-phosphorothioate
  modified_base 11: mod_base = OTHER; note = 2-fluororibose uracil
  modified_base 11..12: mod_base = OTHER; note = S-phosphorothioate
  modified_base 12: mod_base = OTHER; note = 2-fluororibose cytosine
  modified_base 12..13: mod_base = OTHER; note = S-phosphorothioate
  modified_base 13: mod_base = OTHER; note = 2-fluororibose adenine
  modified_base 13..14: mod_base = OTHER; note = S-phosphorothioate
  modified_base 14: mod_base = OTHER; note = 2-fluororibose guanine
  modified_base 14..15: mod_base = OTHER; note = S-phosphorothioate
  modified_base 15: mod_base = OTHER; note = 2-fluororibose uracil
  modified_base 15..16: mod_base = OTHER; note = S-phosphorothioate
  modified_base 16: mod_base = cm
  modified_base 16..17: mod_base = OTHER; note = S-phosphorothioate
  modified_base 17: mod_base = cm
  modified_base 17..18: mod_base = OTHER; note = S-phosphorothioate
  modified_base 18: mod_base = cm
  modified_base 18..19: mod_base = OTHER; note = S-phosphorothioate
  modified_base 19: mod_base = um
  modified_base 19..20: mod_base = OTHER; note = S-phosphorothioate
  modified_base 20: mod_base = um
  modified_base 20..21: mod_base = OTHER; note = S-phosphorothioate
  modified_base 21: mod_base = um
  modified_base 21..22: mod_base = OTHER; note = S-phosphorothioate
  modified_base 22: mod_base = cm
  modified_base 22..23: mod_base = OTHER; note = S-phosphorothioate
  modified_base 23: mod_base = OTHER; note = 2-fluororibose guanine
  modified_base 23..24: mod_base = OTHER; note = S-phosphorothioate
  modified_base 24: mod_base = OTHER; note = deoxyribose 6-amino-9-substituted 8,9-dihydro-7H-purin-8-one
  modified_base 24..25: mod_base = OTHER; note = S-phosphorothioate
  modified_base 25: mod_base = OTHER; note = deoxyribose inosine
  modified_base 25..26: mod_base = OTHER; note S-N-(1,3-dimethylimidazolidin-2-ylidene)phosphoramidate
  modified_base 26: mod_base = um
  modified_base 26..27: mod_base = OTHER; note = S-phosphorothioate
  modified_base 27: mod_base = cm
  modified_base 27..28: mod_base = OTHER; note = S-phosphorothioate
  modified_base 28: mod_base = gm
  modified_base 28..29: mod_base = OTHER; note = S-phosphorothioate
  modified_base 29: mod_base = OTHER; note = 2-O-methylribose adenine
  modified_base 29..30: mod_base = OTHER; note R-N-(1,3-dimethylimidazolidin-2-ylidene)phosphoramidate
  modified_base 30: mod_base = um
  source 1..30: mol_type = other RNA

SEQ ID NO: 297 - RNA, 30 nt, synthetic construct; identical to SEQ ID NO: 294
  misc_feature 1..30: note = Synthetic: WV-43720
  misc_feature 1..30: note = Synthetic: ADR-0103586
  modified_base 1: mod_base = OTHER; note = 2-fluororibose cytosine
  modified_base 1..2: mod_base = OTHER; note R-N-(1,3-dimethylimidazolidin-2-ylidene)phosphoramidate
  modified_base 2: mod_base = OTHER; note = 2-fluororibose cytosine
  modified_base 2..3: mod_base = OTHER; note = S-phosphorothioate
  modified_base 3: mod_base = OTHER; note = 2-fluororibose cytosine
  modified_base 3..4: mod_base = OTHER; note = S-phosphorothioate
  modified_base 4: mod_base = OTHER; note = 2-fluororibose adenine
  modified_base 4..5: mod_base = OTHER; note = S-phosphorothioate
  modified_base 5: mod_base = OTHER; note = 2-fluororibose guanine
  modified_base 5..6: mod_base = OTHER; note = S-phosphorothioate
  modified_base 6: mod_base = OTHER; note = 2-fluororibose cytosine
  modified_base 6..7: mod_base = OTHER; note = S-phosphorothioate
  modified_base 7: mod_base = OTHER; note = 2-fluororibose adenine
  modified_base 7..8: mod_base = OTHER; note = S-phosphorothioate
  modified_base 8: mod_base = OTHER; note = 2-fluororibose guanine
  modified_base 8..9: mod_base = OTHER; note = S-phosphorothioate
  modified_base 9: mod_base = OTHER; note = 2-fluororibose cytosine
  modified_base 9..10: mod_base = OTHER; note = S-phosphorothioate
  modified_base 10: mod_base = OTHER; note = 2-fluororibose uracil
  modified_base 10..11: mod_base = OTHER; note = S-phosphorothioate
  modified_base 11: mod_base = OTHER; note = 2-fluororibose uracil
  modified_base 11..12: mod_base = OTHER; note = S-phosphorothioate
  modified_base 12: mod_base = OTHER; note = 2-fluororibose cytosine
  modified_base 12..13: mod_base = OTHER; note = S-phosphorothioate
  modified_base 13: mod_base = OTHER; note = 2-fluororibose adenine
  modified_base 13..14: mod_base = OTHER; note = S-phosphorothioate
  modified_base 14: mod_base = OTHER; note = 2-fluororibose guanine
  modified_base 14..15: mod_base = OTHER; note = S-phosphorothioate
  modified_base 15: mod_base = OTHER; note = 2-fluororibose uracil
  modified_base 15..16: mod_base = OTHER; note = S-phosphorothioate
  modified_base 16: mod_base = cm
  modified_base 16..17: mod_base = OTHER; note = S-phosphorothioate
  modified_base 17: mod_base = cm
  modified_base 17..18: mod_base = OTHER; note = S-phosphorothioate
  modified_base 18: mod_base = cm
  modified_base 18..19: mod_base = OTHER; note = S-phosphorothioate
  modified_base 19: mod_base = um
  modified_base 19..20: mod_base = OTHER; note = S-phosphorothioate
  modified_base 20: mod_base = um
  modified_base 20..21: mod_base = OTHER; note = S-phosphorothioate
  modified_base 21: mod_base = um
  modified_base 21..22: mod_base = OTHER; note = S-phosphorothioate
  modified_base 22: mod_base = cm
  modified_base 22..23: mod_base = OTHER; note = S-phosphorothioate
  modified_base 23: mod_base = OTHER; note = 2-fluororibose cytosine
  modified_base 23..24: mod_base = OTHER; note = S-phosphorothioate
  modified_base 24: mod_base = OTHER; note = deoxyribose 6-amino-9-substituted 8,9-dihydro-7H-purin-8-one
  modified_base 24..25: mod_base = OTHER; note = S-phosphorothioate
  modified_base 25: mod_base = OTHER; note = deoxyribose inosine
  modified_base 25..26: mod_base = OTHER; note S-N-(1,3-dimethylimidazolidin-2-ylidene)phosphoramidate
  modified_base 26: mod_base = um
  modified_base 26..27: mod_base = OTHER; note = S-phosphorothioate
  modified_base 27: mod_base = cm
  modified_base 27..28: mod_base = OTHER; note = S-phosphorothioate
  modified_base 28: mod_base = gm
  modified_base 28..29: mod_base = OTHER; note = S-phosphorothioate
  modified_base 29: mod_base = OTHER; note = 2-O-methylribose adenine
  modified_base 29..30: mod_base = OTHER; note R-N-(1,3-dimethylimidazolidin-2-ylidene)phosphoramidate
  modified_base 30: mod_base = um
  source 1..30: mol_type = other RNA

SEQ ID NO: 298 - RNA, 30 nt, synthetic construct
  misc_feature 1..30: note = Synthetic: WV-43719
  misc_feature 1..30: note = Synthetic: ADR-0103582
  modified_base 1: mod_base = OTHER; note = 2-fluororibose cytosine
  modified_base 1..2: mod_base = OTHER; note R-N-(1,3-dimethylimidazolidin-2-ylidene)phosphoramidate
  modified_base 2: mod_base = OTHER; note = 2-fluororibose cytosine
  modified_base 2..3: mod_base = OTHER; note = S-phosphorothioate
  modified_base 3: mod_base = OTHER; note = 2-fluororibose cytosine
  modified_base 3..4: mod_base = OTHER; note = S-phosphorothioate
  modified_base 4: mod_base = OTHER; note = 2-fluororibose adenine
  modified_base 4..5: mod_base = OTHER; note = S-phosphorothioate
  modified_base 5: mod_base = OTHER; note = 2-fluororibose guanine
  modified_base 5..6: mod_base = OTHER; note = S-phosphorothioate
  modified_base 6: mod_base = OTHER; note = 2-fluororibose cytosine
  modified_base 6..7: mod_base = OTHER; note = S-phosphorothioate
  modified_base 7: mod_base = OTHER; note = 2-fluororibose adenine
  modified_base 7..8: mod_base = OTHER; note = S-phosphorothioate
  modified_base 8: mod_base = OTHER; note = 2-fluororibose guanine
  modified_base 8..9: mod_base = OTHER; note = S-phosphorothioate
  modified_base 9: mod_base = OTHER; note = 2-fluororibose cytosine
  modified_base 9..10: mod_base = OTHER; note = S-phosphorothioate
  modified_base 10: mod_base = OTHER; note = 2-fluororibose uracil
  modified_base 10..11: mod_base = OTHER; note = S-phosphorothioate
  modified_base 11: mod_base = OTHER; note = 2-fluororibose uracil
  modified_base 11..12: mod_base = OTHER; note = S-phosphorothioate
  modified_base 12: mod_base = OTHER; note = 2-fluororibose cytosine
  modified_base 12..13: mod_base = OTHER; note = S-phosphorothioate
  modified_base 13: mod_base = OTHER; note = 2-fluororibose adenine
  modified_base 13..14: mod_base = OTHER; note = S-phosphorothioate
  modified_base 14: mod_base = OTHER; note = 2-fluororibose guanine
  modified_base 14..15: mod_base = OTHER; note = S-phosphorothioate
  modified_base 15: mod_base = OTHER; note = 2-fluororibose uracil
  modified_base 15..16: mod_base = OTHER; note = S-phosphorothioate
  modified_base 16: mod_base = cm
  modified_base 16..17: mod_base = OTHER; note = S-phosphorothioate
  modified_base 17: mod_base = cm
  modified_base 17..18: mod_base = OTHER; note = S-phosphorothioate
  modified_base 18: mod_base = cm
  modified_base 18..19: mod_base = OTHER; note = S-phosphorothioate
  modified_base 19: mod_base = um
  modified_base 19..20: mod_base = OTHER; note = S-phosphorothioate
  modified_base 20: mod_base = um
  modified_base 20..21: mod_base = OTHER; note = S-phosphorothioate
  modified_base 21: mod_base = um
  modified_base 21..22: mod_base = OTHER; note = S-phosphorothioate
  modified_base 22: mod_base = cm
  modified_base 22..23: mod_base = OTHER; note = S-phosphorothioate
  modified_base 23: mod_base = OTHER; note = 2-fluororibose adenine
  modified_base 23..24: mod_base = OTHER; note = S-phosphorothioate
  modified_base 24: mod_base = OTHER; note = deoxyribose 6-amino-9-substituted 8,9-dihydro-7H-purin-8-one
  modified_base 24..25: mod_base = OTHER; note = S-phosphorothioate
  modified_base 25: mod_base = OTHER; note = deoxyribose inosine
  modified_base 25..26: mod_base = OTHER; note S-N-(1,3-dimethylimidazolidin-2-ylidene)phosphoramidate
  modified_base 26: mod_base = um
  modified_base 26..27: mod_base = OTHER; note = S-phosphorothioate
  modified_base 27: mod_base = cm
  modified_base 27..28: mod_base = OTHER; note = S-phosphorothioate
  modified_base 28: mod_base = gm
  modified_base 28..29: mod_base = OTHER; note = S-phosphorothioate
  modified_base 29: mod_base = OTHER; note = 2-O-methylribose adenine
  modified_base 29..30: mod_base = OTHER; note R-N-(1,3-dimethylimidazolidin-2-ylidene)phosphoramidate
  modified_base 30: mod_base = um
  source 1..30: mol_type = other RNA
cccagcagcttcagtccctttcaagtcgat

SEQ ID NO: 299 - RNA, 30 nt, synthetic construct
  misc_feature 1..30: note = Synthetic: WV-43705
  misc_feature 1..30: note = Synthetic: ADR-0103722
  modified_base 1: mod_base = OTHER; note = 2-fluororibose cytosine
  modified_base 1..2: mod_base = OTHER; note R-N-(1,3-dimethylimidazolidin-2-ylidene)phosphoramidate
  modified_base 2: mod_base = OTHER; note = 2-fluororibose cytosine
  modified_base 2..3: mod_base = OTHER; note = S-phosphorothioate
  modified_base 3: mod_base = OTHER; note = 2-fluororibose cytosine
  modified_base 3..4: mod_base = OTHER; note = S-phosphorothioate
  modified_base 4: mod_base = OTHER; note = 2-fluororibose cytosine
  modified_base 4..5: mod_base = OTHER; note = S-phosphorothioate
  modified_base 5: mod_base = OTHER; note = 2-fluororibose adenine
  modified_base 5..6: mod_base = OTHER; note = S-phosphorothioate
  modified_base 6: mod_base = OTHER; note = 2-fluororibose guanine
  modified_base 6..7: mod_base = OTHER; note = S-phosphorothioate
  modified_base 7: mod_base = OTHER; note = 2-fluororibose cytosine
  modified_base 7..8: mod_base = OTHER; note = S-phosphorothioate
  modified_base 8: mod_base = OTHER; note = 2-fluororibose adenine
  modified_base 8..9: mod_base = OTHER; note = S-phosphorothioate
  modified_base 9: mod_base = OTHER; note = 2-fluororibose guanine
  modified_base 9..10: mod_base = OTHER; note = S-phosphorothioate
  modified_base 10: mod_base = OTHER; note = 2-fluororibose cytosine
  modified_base 10..11: mod_base = OTHER; note = S-phosphorothioate
  modified_base 11: mod_base = OTHER; note = 2-fluororibose uracil
  modified_base 11..12: mod_base = OTHER; note = S-phosphorothioate
  modified_base 12: mod_base = OTHER; note = 2-fluororibose uracil
  modified_base 12..13: mod_base = OTHER; note = S-phosphorothioate
  modified_base 13: mod_base = OTHER; note = 2-fluororibose cytosine
  modified_base 13..14: mod_base = OTHER; note = S-phosphorothioate
  modified_base 14: mod_base = OTHER; note = 2-fluororibose adenine
  modified_base 14..15: mod_base = OTHER; note = S-phosphorothioate
  modified_base 15: mod_base = OTHER; note = 2-fluororibose guanine
  modified_base 15..16: mod_base = OTHER; note = S-phosphorothioate
  modified_base 16: mod_base = um
  modified_base 16..17: mod_base = OTHER; note = S-phosphorothioate
  modified_base 17: mod_base = cm
  modified_base 17..18: mod_base = OTHER; note = S-phosphorothioate
  modified_base 18: mod_base = cm
  modified_base 18..19: mod_base = OTHER; note = S-phosphorothioate
  modified_base 19: mod_base = cm
  modified_base 19..20: mod_base = OTHER; note = S-phosphorothioate
  modified_base 20: mod_base = um
  modified_base 20..21: mod_base = OTHER; note = S-phosphorothioate
  modified_base 21: mod_base = um
  modified_base 21..22: mod_base = OTHER; note = S-phosphorothioate
  modified_base 22: mod_base = um
  modified_base 22..23: mod_base = OTHER; note = S-phosphorothioate
  modified_base 23: mod_base = cm
  modified_base 23..24: mod_base = OTHER; note = S-phosphorothioate
  modified_base 24: mod_base = OTHER; note = 2-fluororibose guanine
  modified_base 24..25: mod_base = OTHER; note = S-phosphorothioate
  modified_base 25: mod_base = OTHER; note = deoxyribose 6-amino-9-substituted 8,9-dihydro-7H-purin-8-one
  modified_base 25..26: mod_base = OTHER; note = S-phosphorothioate
  modified_base 26: mod_base = OTHER; note = deoxyribose guanine
  modified_base 26..27: mod_base = OTHER; note R-N-(1,3-dimethylimidazolidin-2-ylidene)phosphoramidate
  modified_base 27: mod_base = um
  modified_base 27..28: mod_base = OTHER; note = S-phosphorothioate
  modified_base 28: mod_base = cm
  modified_base 28..29: mod_base = OTHER; note = S-phosphorothioate
  modified_base 29: mod_base = gm
  modified_base 29..30: mod_base = OTHER; note R-N-(1,3-dimethylimidazolidin-2-ylidene)phosphoramidate
  modified_base 30: mod_base = OTHER; note = 2-O-methylribose adenine
  source 1..30: mol_type = other RNA
ccccagcagcttcagtccctttcgagtcga

SEQ ID NO: 300 - RNA, 30 nt, synthetic construct
  misc_feature 1..30: note = Synthetic: WV-43704
  misc_feature 1..30: note = Synthetic: ADR-0103713
  modified_base 1: mod_base = OTHER; note = 2-fluororibose cytosine
  modified_base 1..2: mod_base = OTHER; note R-N-(1,3-dimethylimidazolidin-2-ylidene)phosphoramidate
  modified_base 2: mod_base = OTHER; note = 2-fluororibose cytosine
  modified_base 2..3: mod_base = OTHER; note = S-phosphorothioate
  modified_base 3: mod_base = OTHER; note = 2-fluororibose cytosine
  modified_base 3..4: mod_base = OTHER; note = S-phosphorothioate
  modified_base 4: mod_base = OTHER; note = 2-fluororibose cytosine
  modified_base 4..5: mod_base = OTHER; note = S-phosphorothioate
  modified_base 5: mod_base = OTHER; note = 2-fluororibose adenine
  modified_base 5..6: mod_base = OTHER; note = S-phosphorothioate
  modified_base 6: mod_base = OTHER; note = 2-fluororibose guanine
  modified_base 6..7: mod_base = OTHER; note = S-phosphorothioate
  modified_base 7: mod_base = OTHER; note = 2-fluororibose cytosine
  modified_base 7..8: mod_base = OTHER; note = S-phosphorothioate
  modified_base 8: mod_base = OTHER; note = 2-fluororibose adenine
  modified_base 8..9: mod_base = OTHER; note = S-phosphorothioate
  modified_base 9: mod_base = OTHER; note = 2-fluororibose guanine
  modified_base 9..10: mod_base = OTHER; note = S-phosphorothioate
  modified_base 10: mod_base = OTHER; note = 2-fluororibose cytosine
  modified_base 10..11: mod_base = OTHER; note = S-phosphorothioate
  modified_base 11: mod_base = OTHER; note = 2-fluororibose uracil
  modified_base 11..12: mod_base = OTHER; note = S-phosphorothioate
  modified_base 12: mod_base = OTHER; note = 2-fluororibose uracil
  modified_base 12..13: mod_base = OTHER; note = S-phosphorothioate
  modified_base 13: mod_base = OTHER; note = 2-fluororibose cytosine
  modified_base 13..14: mod_base = OTHER; note = S-phosphorothioate
  modified_base 14: mod_base = OTHER; note = 2-fluororibose adenine
  modified_base 14..15: mod_base = OTHER; note = S-phosphorothioate
  modified_base 15: mod_base = OTHER; note = 2-fluororibose guanine
  modified_base 15..16: mod_base = OTHER; note = S-phosphorothioate
  modified_base 16: mod_base = um
  modified_base 16..17: mod_base = OTHER; note = S-phosphorothioate
  modified_base 17: mod_base = cm
  modified_base 17..18: mod_base = OTHER; note = S-phosphorothioate
  modified_base 18: mod_base = cm
  modified_base 18..19: mod_base = OTHER; note = S-phosphorothioate
  modified_base 19: mod_base = cm
  modified_base 19..20: mod_base = OTHER; note = S-phosphorothioate
  modified_base 20: mod_base = um
  modified_base 20..21: mod_base = OTHER; note = S-phosphorothioate
  modified_base 21: mod_base = um
  modified_base 21..22: mod_base = OTHER; note = S-phosphorothioate
  modified_base 22: mod_base = um
  modified_base 22..23: mod_base = OTHER; note = S-phosphorothioate
  modified_base 23: mod_base = cm
  modified_base 23..24: mod_base = OTHER; note = S-phosphorothioate
  modified_base 24: mod_base = OTHER; note = 2-fluororibose cytosine
  modified_base 24..25: mod_base = OTHER; note = S-phosphorothioate
  modified_base 25: mod_base = OTHER; note = deoxyribose 6-amino-9-substituted 8,9-dihydro-7H-purin-8-one
  modified_base 25..26: mod_base = OTHER; note = S-phosphorothioate
  modified_base 26: mod_base = OTHER; note = deoxyribose guanine
  modified_base 26..27: mod_base = OTHER; note R-N-(1,3-dimethylimidazolidin-2-ylidene)phosphoramidate
  modified_base 27: mod_base = um
  modified_base 27..28: mod_base = OTHER; note = S-phosphorothioate
  modified_base 28: mod_base = cm
  modified_base 28..29: mod_base = OTHER; note = S-phosphorothioate
  modified_base 29: mod_base = gm
  modified_base 29..30: mod_base = OTHER; note R-N-(1,3-dimethylimidazolidin-2-ylidene)phosphoramidate
  modified_base 30: mod_base = OTHER; note = 2-O-methylribose adenine
  source 1..30: mol_type = other RNA
ccccagcagcttcagtccctttccagtcga

SEQ ID NO: 301 - RNA, 30 nt, synthetic construct
  misc_feature 1..30: note = Synthetic: WV-43703
  misc_feature 1..30: note = Synthetic: ADR-0103704
  modified_base 1: mod_base = OTHER; note = 2-fluororibose cytosine
  modified_base 1..2: mod_base = OTHER; note R-N-(1,3-dimethylimidazolidin-2-ylidene)phosphoramidate
  modified_base 2: mod_base = OTHER; note = 2-fluororibose cytosine
  modified_base 2..3: mod_base = OTHER; note = S-phosphorothioate
  modified_base 3: mod_base = OTHER; note = 2-fluororibose cytosine
  modified_base 3..4: mod_base = OTHER; note = S-phosphorothioate
  modified_base 4: mod_base = OTHER; note = 2-fluororibose cytosine
  modified_base 4..5: mod_base = OTHER; note = S-phosphorothioate
  modified_base 5: mod_base = OTHER; note = 2-fluororibose adenine
  modified_base 5..6: mod_base = OTHER; note = S-phosphorothioate
  modified_base 6: mod_base = OTHER; note = 2-fluororibose guanine
  modified_base 6..7: mod_base = OTHER; note = S-phosphorothioate
  modified_base 7: mod_base = OTHER; note = 2-fluororibose cytosine
  modified_base 7..8: mod_base = OTHER; note = S-phosphorothioate
  modified_base 8: mod_base = OTHER; note = 2-fluororibose adenine
  modified_base 8..9: mod_base = OTHER; note = S-phosphorothioate
  modified_base 9: mod_base = OTHER; note = 2-fluororibose guanine
  modified_base 9..10: mod_base = OTHER; note = S-phosphorothioate
  modified_base 10: mod_base = OTHER; note = 2-fluororibose cytosine
  modified_base 10..11: mod_base = OTHER; note = S-phosphorothioate
  modified_base 11: mod_base = OTHER; note = 2-fluororibose uracil
  modified_base 11..12: mod_base = OTHER; note = S-phosphorothioate
  modified_base 12: mod_base = OTHER; note = 2-fluororibose uracil
  modified_base 12..13: mod_base = OTHER; note = S-phosphorothioate
  modified_base 13: mod_base = OTHER; note = 2-fluororibose cytosine
  modified_base 13..14: mod_base = OTHER; note = S-phosphorothioate
  modified_base 14: mod_base = OTHER; note = 2-fluororibose adenine
  modified_base 14..15: mod_base = OTHER; note = S-phosphorothioate
  modified_base 15: mod_base = OTHER; note = 2-fluororibose guanine
  modified_base 15..16: mod_base = OTHER; note = S-phosphorothioate
  modified_base 16: mod_base = um
  modified_base 16..17: mod_base = OTHER; note = S-phosphorothioate
  modified_base 17: mod_base = cm
  modified_base 17..18: mod_base = OTHER; note = S-phosphorothioate
  modified_base 18: mod_base = cm
  modified_base 18..19: mod_base = OTHER; note = S-phosphorothioate
  modified_base 19: mod_base = cm
  modified_base 19..20: mod_base = OTHER; note = S-phosphorothioate
  modified_base 20: mod_base = um
  modified_base 20..21: mod_base = OTHER; note = S-phosphorothioate
  modified_base 21: mod_base = um
  modified_base 21..22: mod_base = OTHER; note = S-phosphorothioate
  modified_base 22: mod_base = um
  modified_base 22..23: mod_base = OTHER; note = S-phosphorothioate
  modified_base 23: mod_base = cm
  modified_base 23..24: mod_base = OTHER; note = S-phosphorothioate
  modified_base 24: mod_base = OTHER; note = 2-fluororibose adenine
  modified_base 24..25: mod_base = OTHER; note = S-phosphorothioate
  modified_base 25: mod_base = OTHER; note = deoxyribose 6-amino-9-substituted 8,9-dihydro-7H-purin-8-one
  modified_base 25..26: mod_base = OTHER; note = S-phosphorothioate
  modified_base 26: mod_base = OTHER; note = deoxyribose guanine
  modified_base 26..27: mod_base = OTHER; note R-N-(1,3-dimethylimidazolidin-2-ylidene)phosphoramidate
  modified_base 27: mod_base = um
  modified_base 27..28: mod_base = OTHER; note = S-phosphorothioate
  modified_base 28: mod_base = cm
  modified_base 28..29: mod_base = OTHER; note = S-phosphorothioate
  modified_base 29: mod_base = gm
  modified_base 29..30: mod_base = OTHER; note R-N-(1,3-dimethylimidazolidin-2-ylidene)phosphoramidate
  modified_base 30: mod_base = OTHER; note = 2-O-methylribose adenine
  source 1..30: mol_type = other RNA
ccccagcagcttcagtccctttcaagtcga

SEQ ID NO: 302 - RNA, 30 nt, synthetic construct; identical to SEQ ID NO: 135
  misc_feature 1..30: note = Synthetic: WV-43702
  misc_feature 1..30: note = Synthetic: ADR-0103731
  modified_base 1: mod_base = OTHER; note = 2-fluororibose cytosine
  modified_base 1..2: mod_base = OTHER; note R-N-(1,3-dimethylimidazolidin-2-ylidene)phosphoramidate
  modified_base 2: mod_base = OTHER; note = 2-fluororibose cytosine
  modified_base 2..3: mod_base = OTHER; note = S-phosphorothioate
  modified_base 3: mod_base = OTHER; note = 2-fluororibose cytosine
  modified_base 3..4: mod_base = OTHER; note = S-phosphorothioate
  modified_base 4: mod_base = OTHER; note = 2-fluororibose cytosine
  modified_base 4..5: mod_base = OTHER; note = S-phosphorothioate
  modified_base 5: mod_base = OTHER; note = 2-fluororibose adenine
  modified_base 5..6: mod_base = OTHER; note = S-phosphorothioate
  modified_base 6: mod_base = OTHER; note = 2-fluororibose guanine
  modified_base 6..7: mod_base = OTHER; note = S-phosphorothioate
  modified_base 7: mod_base = OTHER; note = 2-fluororibose cytosine
  modified_base 7..8: mod_base = OTHER; note = S-phosphorothioate
  modified_base 8: mod_base = OTHER; note = 2-fluororibose adenine
  modified_base 8..9: mod_base = OTHER; note = S-phosphorothioate
  modified_base 9: mod_base = OTHER; note = 2-fluororibose guanine
  modified_base 9..10: mod_base = OTHER; note = S-phosphorothioate
  modified_base 10: mod_base = OTHER; note = 2-fluororibose cytosine
  modified_base 10..11: mod_base = OTHER; note = S-phosphorothioate
  modified_base 11: mod_base = OTHER; note = 2-fluororibose uracil
  modified_base 11..12: mod_base = OTHER; note = S-phosphorothioate
  modified_base 12: mod_base = OTHER; note = 2-fluororibose uracil
  modified_base 12..13: mod_base = OTHER; note = S-phosphorothioate
  modified_base 13: mod_base = OTHER; note = 2-fluororibose cytosine
  modified_base 13..14: mod_base = OTHER; note = S-phosphorothioate
  modified_base 14: mod_base = OTHER; note = 2-fluororibose adenine
  modified_base 14..15: mod_base = OTHER; note = S-phosphorothioate
  modified_base 15: mod_base = OTHER; note = 2-fluororibose guanine
  modified_base 15..16: mod_base = OTHER; note = S-phosphorothioate
  modified_base 16: mod_base = um
  modified_base 16..17: mod_base = OTHER; note = S-phosphorothioate
  modified_base 17: mod_base = cm
  modified_base 17..18: mod_base = OTHER; note = S-phosphorothioate
  modified_base 18: mod_base = cm
  modified_base 18..19: mod_base = OTHER; note = S-phosphorothioate
  modified_base 19: mod_base = cm
  modified_base 19..20: mod_base = OTHER; note = S-phosphorothioate
  modified_base 20: mod_base = um
  modified_base 20..21: mod_base = OTHER; note = S-phosphorothioate
  modified_base 21: mod_base = um
  modified_base 21..22: mod_base = OTHER; note = S-phosphorothioate
  modified_base 22: mod_base = um
  modified_base 22..23: mod_base = OTHER; note = S-phosphorothioate
  modified_base 23: mod_base = cm
  modified_base 23..24: mod_base = OTHER; note = S-phosphorothioate
  modified_base 24: mod_base = OTHER; note = 2-fluororibose uracil
  modified_base 24..25: mod_base = OTHER; note = S-phosphorothioate
  modified_base 25: mod_base = OTHER; note = deoxyribose 6-amino-9-substituted 8,9-dihydro-7H-purin-8-one
  modified_base 25..26: mod_base = OTHER; note = S-phosphorothioate
  modified_base 26: mod_base = OTHER; note = deoxyribose guanine
  modified_base 26..27: mod_base = OTHER; note R-N-(1,3-dimethylimidazolidin-2-ylidene)phosphoramidate
  modified_base 27: mod_base = um
  modified_base 27..28: mod_base = OTHER; note = S-phosphorothioate
  modified_base 28: mod_base = cm
  modified_base 28..29: mod_base = OTHER; note = S-phosphorothioate
  modified_base 29: mod_base = gm
  modified_base 29..30: mod_base = OTHER; note R-N-(1,3-dimethylimidazolidin-2-ylidene)phosphoramidate
  modified_base 30: mod_base = OTHER; note = 2-O-methylribose adenine
  source 1..30: mol_type = other RNA

SEQ ID NO: 303 - RNA, 30 nt, synthetic construct; identical to SEQ ID NO: 301
  misc_feature 1..30: note = Synthetic: WV-43699
  misc_feature 1..30: note = Synthetic: ADR-0103705
  modified_base 1: mod_base = OTHER; note = 2-fluororibose cytosine
  modified_base 1..2: mod_base = OTHER; note R-N-(1,3-dimethylimidazolidin-2-ylidene)phosphoramidate
  modified_base 2: mod_base = OTHER; note = 2-fluororibose cytosine
  modified_base 2..3: mod_base = OTHER; note = S-phosphorothioate
  modified_base 3: mod_base = OTHER; note = 2-fluororibose cytosine
  modified_base 3..4: mod_base = OTHER; note = S-phosphorothioate
  modified_base 4: mod_base = OTHER; note = 2-fluororibose cytosine
  modified_base 4..5: mod_base = OTHER; note = S-phosphorothioate
  modified_base 5: mod_base = OTHER; note = 2-fluororibose adenine
  modified_base 5..6: mod_base = OTHER; note = S-phosphorothioate
  modified_base 6: mod_base = OTHER; note = 2-fluororibose guanine
  modified_base 6..7: mod_base = OTHER; note = S-phosphorothioate
  modified_base 7: mod_base = OTHER; note = 2-fluororibose cytosine
  modified_base 7..8: mod_base = OTHER; note = S-phosphorothioate
  modified_base 8: mod_base = OTHER; note = 2-fluororibose adenine
  modified_base 8..9: mod_base = OTHER; note = S-phosphorothioate
  modified_base 9: mod_base = OTHER; note = 2-fluororibose guanine
  modified_base 9..10: mod_base = OTHER; note = S-phosphorothioate
  modified_base 10: mod_base = OTHER; note = 2-fluororibose cytosine
  modified_base 10..11: mod_base = OTHER; note = S-phosphorothioate
  modified_base 11: mod_base = OTHER; note = 2-fluororibose uracil
  modified_base 11..12: mod_base = OTHER; note = S-phosphorothioate
  modified_base 12: mod_base = OTHER; note = 2-fluororibose uracil
  modified_base 12..13: mod_base = OTHER; note = S-phosphorothioate
  modified_base 13: mod_base = OTHER; note = 2-fluororibose cytosine
  modified_base 13..14: mod_base = OTHER; note = S-phosphorothioate
  modified_base 14: mod_base = OTHER; note = 2-fluororibose adenine
  modified_base 14..15: mod_base = OTHER; note = S-phosphorothioate
  modified_base 15: mod_base = OTHER; note = 2-fluororibose guanine
  modified_base 15..16: mod_base = OTHER; note = S-phosphorothioate
  modified_base 16: mod_base = um
  modified_base 16..17: mod_base = OTHER; note = S-phosphorothioate
  modified_base 17: mod_base = cm
  modified_base 17..18: mod_base = OTHER; note = S-phosphorothioate
  modified_base 18: mod_base = cm
  modified_base 18..19: mod_base = OTHER; note = S-phosphorothioate
  modified_base 19: mod_base = cm
  modified_base 19..20: mod_base = OTHER; note = S-phosphorothioate
  modified_base 20: mod_base = um
  modified_base 20..21: mod_base = OTHER; note = S-phosphorothioate
  modified_base 21: mod_base = um
  modified_base 21..22: mod_base = OTHER; note = S-phosphorothioate
  modified_base 22: mod_base = um
  modified_base 22..23: mod_base = OTHER; note = S-phosphorothioate
  modified_base 23: mod_base = cm
  modified_base 23..24: mod_base = OTHER; note = S-phosphorothioate
  modified_base 24: mod_base = OTHER; note = 2-fluororibose adenine
  modified_base 24..25: mod_base = OTHER; note = S-phosphorothioate
  modified_base 25: mod_base = OTHER; note = deoxyribose 6-amino-9-substituted 8,9-dihydro-7H-purin-8-one
  modified_base 25..26: mod_base = OTHER; note = S-phosphorothioate
  modified_base 26: mod_base = OTHER; note = deoxyribose inosine
  modified_base 26..27: mod_base = OTHER; note S-N-(1,3-dimethylimidazolidin-2-ylidene)phosphoramidate
  modified_base 27: mod_base = um
  modified_base 27..28: mod_base = OTHER; note = S-phosphorothioate
  modified_base 28: mod_base = cm
  modified_base 28..29: mod_base = OTHER; note = S-phosphorothioate
  modified_base 29: mod_base = gm
  modified_base 29..30: mod_base = OTHER; note R-N-(1,3-dimethylimidazolidin-2-ylidene)phosphoramidate
  modified_base 30: mod_base = OTHER; note = 2-O-methylribose adenine
  source 1..30: mol_type = other RNA

SEQ ID NO: 304 - RNA, 30 nt, synthetic construct
  misc_feature 1..30: note = Synthetic: WV-43733
  misc_feature 1..30: note = Synthetic: ADR-0103587
  modified_base 1: mod_base = OTHER; note = 2-fluororibose cytosine
  modified_base 1..2: mod_base = OTHER; note R-N-(1,3-dimethylimidazolidin-2-ylidene)phosphoramidate
  modified_base 2: mod_base = OTHER; note = 2-fluororibose cytosine
  modified_base 2..3: mod_base = OTHER; note = S-phosphorothioate
  modified_base 3: mod_base = OTHER; note = 2-fluororibose cytosine
  modified_base 3..4: mod_base = OTHER; note = S-phosphorothioate
  modified_base 4: mod_base = OTHER; note = 2-fluororibose adenine
  modified_base 4..5: mod_base = OTHER; note = S-phosphorothioate
  modified_base 5: mod_base = OTHER; note = 2-fluororibose guanine
  modified_base 5..6: mod_base = OTHER; note = S-phosphorothioate
  modified_base 6: mod_base = OTHER; note = 2-fluororibose cytosine
  modified_base 6..7: mod_base = OTHER; note = S-phosphorothioate
  modified_base 7: mod_base = OTHER; note = 2-fluororibose adenine
  modified_base 7..8: mod_base = OTHER; note = S-phosphorothioate
  modified_base 8: mod_base = OTHER; note = 2-fluororibose guanine
  modified_base 8..9: mod_base = OTHER; note = S-phosphorothioate
  modified_base 9: mod_base = OTHER; note = 2-fluororibose cytosine
  modified_base 9..10: mod_base = OTHER; note = S-phosphorothioate
  modified_base 10: mod_base = OTHER; note = 2-fluororibose uracil
  modified_base 10..11: mod_base = OTHER; note = S-phosphorothioate
  modified_base 11: mod_base = OTHER; note = 2-fluororibose uracil
  modified_base 11..12: mod_base = OTHER; note = S-phosphorothioate
  modified_base 12: mod_base = OTHER; note = 2-fluororibose cytosine
  modified_base 12..13: mod_base = OTHER; note = S-phosphorothioate
  modified_base 13: mod_base = OTHER; note = 2-fluororibose adenine
  modified_base 13..14: mod_base = OTHER; note = S-phosphorothioate
  modified_base 14: mod_base = OTHER; note = 2-fluororibose guanine
  modified_base 14..15: mod_base = OTHER; note = S-phosphorothioate
  modified_base 15: mod_base = OTHER; note = 2-fluororibose uracil
  modified_base 15..16: mod_base = OTHER; note = S-phosphorothioate
  modified_base 16: mod_base = cm
  modified_base 16..17: mod_base = OTHER; note = S-phosphorothioate
  modified_base 17: mod_base = cm
  modified_base 17..18: mod_base = OTHER; note = S-phosphorothioate
  modified_base 18: mod_base = cm
  modified_base 18..19: mod_base = OTHER; note = S-phosphorothioate
  modified_base 19: mod_base = um
  modified_base 19..20: mod_base = OTHER; note = S-phosphorothioate
  modified_base 20: mod_base = um
  modified_base 20..21: mod_base = OTHER; note = S-phosphorothioate
  modified_base 21: mod_base = um
  modified_base 21..22: mod_base = OTHER; note = S-phosphorothioate
  modified_base 22: mod_base = cm
  modified_base 22..23: mod_base = OTHER; note = S-phosphorothioate
  modified_base 23: mod_base = OTHER; note = 2-fluororibose guanine
  modified_base 23..24: mod_base = OTHER; note = S-phosphorothioate
  modified_base 24: mod_base = OTHER; note = deoxyribose uracil (position 3 connectivity)
  modified_base 24..25: mod_base = OTHER; note = S-phosphorothioate
  modified_base 25: mod_base = OTHER; note = deoxyribose guanine
  modified_base 25..26: mod_base = OTHER; note R-N-(1,3-dimethylimidazolidin-2-ylidene)phosphoramidate
  modified_base 26: mod_base = um
  modified_base 26..27: mod_base = OTHER; note = S-phosphorothioate
  modified_base 27: mod_base = cm
  modified_base 27..28: mod_base = OTHER; note = S-phosphorothioate
  modified_base 28: mod_base = gm
  modified_base 28..29: mod_base = OTHER; note = S-phosphorothioate
  modified_base 29: mod_base = OTHER; note = 2-O-methylribose adenine
  modified_base 29..30: mod_base = OTHER; note R-N-(1,3-dimethylimidazolidin-2-ylidene)phosphoramidate
  modified_base 30: mod_base = um
  source 1..30: mol_type = other RNA
cccagcagcttcagtccctttcgtgtcgat

SEQ ID NO: 305 - RNA, 30 nt, synthetic construct
  misc_feature 1..30: note = Synthetic: WV-43732
  misc_feature 1..30: note = Synthetic: ADR-0103583
  modified_base 1: mod_base = OTHER; note = 2-fluororibose cytosine
  modified_base 1..2: mod_base = OTHER; note R-N-(1,3-dimethylimidazolidin-2-ylidene)phosphoramidate
  modified_base 2: mod_base = OTHER; note = 2-fluororibose cytosine
  modified_base 2..3: mod_base = OTHER; note = S-phosphorothioate
  modified_base 3: mod_base = OTHER; note = 2-fluororibose cytosine
  modified_base 3..4: mod_base = OTHER; note = S-phosphorothioate
  modified_base 4: mod_base = OTHER; note = 2-fluororibose adenine
  modified_base 4..5: mod_base = OTHER; note = S-phosphorothioate
  modified_base 5: mod_base = OTHER; note = 2-fluororibose guanine
  modified_base 5..6: mod_base = OTHER; note = S-phosphorothioate
  modified_base 6: mod_base = OTHER; note = 2-fluororibose cytosine
  modified_base 6..7: mod_base = OTHER; note = S-phosphorothioate
  modified_base 7: mod_base = OTHER; note = 2-fluororibose adenine
  modified_base 7..8: mod_base = OTHER; note = S-phosphorothioate
  modified_base 8: mod_base = OTHER; note = 2-fluororibose guanine
  modified_base 8..9: mod_base = OTHER; note = S-phosphorothioate
  modified_base 9: mod_base = OTHER; note = 2-fluororibose cytosine
  modified_base 9..10: mod_base = OTHER; note = S-phosphorothioate
  modified_base 10: mod_base = OTHER; note = 2-fluororibose uracil
  modified_base 10..11: mod_base = OTHER; note = S-phosphorothioate
  modified_base 11: mod_base = OTHER; note = 2-fluororibose uracil
  modified_base 11..12: mod_base = OTHER; note = S-phosphorothioate
  modified_base 12: mod_base = OTHER; note = 2-fluororibose cytosine
  modified_base 12..13: mod_base = OTHER; note = S-phosphorothioate
  modified_base 13: mod_base = OTHER; note = 2-fluororibose adenine
  modified_base 13..14: mod_base = OTHER; note = S-phosphorothioate
  modified_base 14: mod_base = OTHER; note = 2-fluororibose guanine
  modified_base 14..15: mod_base = OTHER; note = S-phosphorothioate
  modified_base 15: mod_base = OTHER; note = 2-fluororibose uracil
  modified_base 15..16: mod_base = OTHER; note = S-phosphorothioate
  modified_base 16: mod_base = cm
  modified_base 16..17: mod_base = OTHER; note = S-phosphorothioate
  modified_base 17: mod_base = cm
  modified_base 17..18: mod_base = OTHER; note = S-phosphorothioate
  modified_base 18: mod_base = cm
  modified_base 18..19: mod_base = OTHER; note = S-phosphorothioate
  modified_base 19: mod_base = um
  modified_base 19..20: mod_base = OTHER; note = S-phosphorothioate
  modified_base 20: mod_base = um
  modified_base 20..21: mod_base = OTHER; note = S-phosphorothioate
  modified_base 21: mod_base = um
  modified_base 21..22: mod_base = OTHER; note = S-phosphorothioate
  modified_base 22: mod_base = cm
  modified_base 22..23: mod_base = OTHER; note = S-phosphorothioate
  modified_base 23: mod_base = OTHER; note = 2-fluororibose cytosine
  modified_base 23..24: mod_base = OTHER; note = S-phosphorothioate
  modified_base 24: mod_base = OTHER; note = deoxyribose uracil (position 3 connectivity)
  modified_base 24..25: mod_base = OTHER; note = S-phosphorothioate
  modified_base 25: mod_base = OTHER; note = deoxyribose guanine
  modified_base 25..26: mod_base = OTHER; note R-N-(1,3-dimethylimidazolidin-2-ylidene)phosphoramidate
  modified_base 26: mod_base = um
  modified_base 26..27: mod_base = OTHER; note = S-phosphorothioate
  modified_base 27: mod_base = cm
  modified_base 27..28: mod_base = OTHER; note = S-phosphorothioate
  modified_base 28: mod_base = gm
  modified_base 28..29: mod_base = OTHER; note = S-phosphorothioate
  modified_base 29: mod_base = OTHER; note = 2-O-methylribose adenine
  modified_base 29..30: mod_base = OTHER; note R-N-(1,3-dimethylimidazolidin-2-ylidene)phosphoramidate
  modified_base 30: mod_base = um
  source 1..30: mol_type = other RNA
cccagcagcttcagtccctttcctgtcgat

SEQ ID NO: 306 - RNA, 30 nt, synthetic construct
  misc_feature 1..30: note = Synthetic: WV-43731
  misc_feature 1..30: note = Synthetic: ADR-0103579
  modified_base 1: mod_base = OTHER; note = 2-fluororibose cytosine
  modified_base 1..2: mod_base = OTHER; note R-N-(1,3-dimethylimidazolidin-2-ylidene)phosphoramidate
  modified_base 2: mod_base = OTHER; note = 2-fluororibose cytosine
  modified_base 2..3: mod_base = OTHER; note = S-phosphorothioate
  modified_base 3: mod_base = OTHER; note = 2-fluororibose cytosine
  modified_base 3..4: mod_base = OTHER; note = S-phosphorothioate
  modified_base 4: mod_base = OTHER; note = 2-fluororibose adenine
  modified_base 4..5: mod_base = OTHER; note = S-phosphorothioate
  modified_base 5: mod_base = OTHER; note = 2-fluororibose guanine
  modified_base 5..6: mod_base = OTHER; note = S-phosphorothioate
  modified_base 6: mod_base = OTHER; note = 2-fluororibose cytosine
  modified_base 6..7: mod_base = OTHER; note = S-phosphorothioate
  modified_base 7: mod_base = OTHER; note = 2-fluororibose adenine
  modified_base 7..8: mod_base = OTHER; note = S-phosphorothioate
  modified_base 8: mod_base = OTHER; note = 2-fluororibose guanine
  modified_base 8..9: mod_base = OTHER; note = S-phosphorothioate
  modified_base 9: mod_base = OTHER; note = 2-fluororibose cytosine
  modified_base 9..10: mod_base = OTHER; note = S-phosphorothioate
  modified_base 10: mod_base = OTHER; note = 2-fluororibose uracil
  modified_base 10..11: mod_base = OTHER; note = S-phosphorothioate
  modified_base 11: mod_base = OTHER; note = 2-fluororibose uracil
  modified_base 11..12: mod_base = OTHER; note = S-phosphorothioate
  modified_base 12: mod_base = OTHER; note = 2-fluororibose cytosine
  modified_base 12..13: mod_base = OTHER; note = S-phosphorothioate
  modified_base 13: mod_base = OTHER; note = 2-fluororibose adenine
  modified_base 13..14: mod_base = OTHER; note = S-phosphorothioate
  modified_base 14: mod_base = OTHER; note = 2-fluororibose guanine
  modified_base 14..15: mod_base = OTHER; note = S-phosphorothioate
  modified_base 15: mod_base = OTHER; note = 2-fluororibose uracil
  modified_base 15..16: mod_base = OTHER; note = S-phosphorothioate
  modified_base 16: mod_base = cm
  modified_base 16..17: mod_base = OTHER; note = S-phosphorothioate
  modified_base 17: mod_base = cm
  modified_base 17..18: mod_base = OTHER; note = S-phosphorothioate
  modified_base 18: mod_base = cm
  modified_base 18..19: mod_base = OTHER; note = S-phosphorothioate
  modified_base 19: mod_base = um
  modified_base 19..20: mod_base = OTHER; note = S-phosphorothioate
  modified_base 20: mod_base = um
  modified_base 20..21: mod_base = OTHER; note = S-phosphorothioate
  modified_base 21: mod_base = um
  modified_base 21..22: mod_base = OTHER; note = S-phosphorothioate
  modified_base 22: mod_base = cm
  modified_base 22..23: mod_base = OTHER; note = S-phosphorothioate
  modified_base 23: mod_base = OTHER; note = 2-fluororibose adenine
  modified_base 23..24: mod_base = OTHER; note = S-phosphorothioate
  modified_base 24: mod_base = OTHER; note = deoxyribose uracil (position 3 connectivity)
  modified_base 24..25: mod_base = OTHER; note = S-phosphorothioate
  modified_base 25: mod_base = OTHER; note = deoxyribose guanine
  modified_base 25..26: mod_base = OTHER; note R-N-(1,3-dimethylimidazolidin-2-ylidene)phosphoramidate
  modified_base 26: mod_base = um
  modified_base 26..27: mod_base = OTHER; note = S-phosphorothioate
  modified_base 27: mod_base = cm
  modified_base 27..28: mod_base = OTHER; note = S-phosphorothioate
  modified_base 28: mod_base = gm
  modified_base 28..29: mod_base = OTHER; note = S-phosphorothioate
  modified_base 29: mod_base = OTHER; note = 2-O-methylribose adenine
  modified_base 29..30: mod_base = OTHER; note R-N-(1,3-dimethylimidazolidin-2-ylidene)phosphoramidate
  modified_base 30: mod_base = um
  source 1..30: mol_type = other RNA
cccagcagcttcagtccctttcatgtcgat

SEQ ID NO: 307 - RNA, 30 nt, synthetic construct; identical to SEQ ID NO: 273
  misc_feature 1..30: note = Synthetic: WV-43730
  misc_feature 1..30: note = Synthetic: ADR-0103607
  modified_base 1: mod_base = OTHER; note = 2-fluororibose cytosine
  modified_base 1..2: mod_base = OTHER; note R-N-(1,3-dimethylimidazolidin-2-ylidene)phosphoramidate
  modified_base 2: mod_base = OTHER; note = 2-fluororibose cytosine
  modified_base 2..3: mod_base = OTHER; note = S-phosphorothioate
  modified_base 3: mod_base = OTHER; note = 2-fluororibose cytosine
  modified_base 3..4: mod_base = OTHER; note = S-phosphorothioate
  modified_base 4: mod_base = OTHER; note = 2-fluororibose adenine
  modified_base 4..5: mod_base = OTHER; note = S-phosphorothioate
  modified_base 5: mod_base = OTHER; note = 2-fluororibose guanine
  modified_base 5..6: mod_base = OTHER; note = S-phosphorothioate
  modified_base 6: mod_base = OTHER; note = 2-fluororibose cytosine
  modified_base 6..7: mod_base = OTHER; note = S-phosphorothioate
  modified_base 7: mod_base = OTHER; note = 2-fluororibose adenine
  modified_base 7..8: mod_base = OTHER; note = S-phosphorothioate
  modified_base 8: mod_base = OTHER; note = 2-fluororibose guanine
  modified_base 8..9: mod_base = OTHER; note = S-phosphorothioate
  modified_base 9: mod_base = OTHER; note = 2-fluororibose cytosine
  modified_base 9..10: mod_base = OTHER; note = S-phosphorothioate
  modified_base 10: mod_base = OTHER; note = 2-fluororibose uracil
  modified_base 10..11: mod_base = OTHER; note = S-phosphorothioate
  modified_base 11: mod_base = OTHER; note = 2-fluororibose uracil
  modified_base 11..12: mod_base = OTHER; note = S-phosphorothioate
  modified_base 12: mod_base = OTHER; note = 2-fluororibose cytosine
  modified_base 12..13: mod_base = OTHER; note = S-phosphorothioate
  modified_base 13: mod_base = OTHER; note = 2-fluororibose adenine
  modified_base 13..14: mod_base = OTHER; note = S-phosphorothioate
  modified_base 14: mod_base = OTHER; note = 2-fluororibose guanine
  modified_base 14..15: mod_base = OTHER; note = S-phosphorothioate
  modified_base 15: mod_base = OTHER; note = 2-fluororibose uracil
  modified_base 15..16: mod_base = OTHER; note = S-phosphorothioate
  modified_base 16: mod_base = cm
  modified_base 16..17: mod_base = OTHER; note = S-phosphorothioate
  modified_base 17: mod_base = cm
  modified_base 17..18: mod_base = OTHER; note = S-phosphorothioate
  modified_base 18: mod_base = cm
  modified_base 18..19: mod_base = OTHER; note = S-phosphorothioate
  modified_base 19: mod_base = um
  modified_base 19..20: mod_base = OTHER; note = S-phosphorothioate
  modified_base 20: mod_base = um
  modified_base 20..21: mod_base = OTHER; note = S-phosphorothioate
  modified_base 21: mod_base = um
  modified_base 21..22: mod_base = OTHER; note = S-phosphorothioate
  modified_base 22: mod_base = cm
  modified_base 22..23: mod_base = OTHER; note = S-phosphorothioate
  modified_base 23: mod_base = OTHER; note = 2-fluororibose uracil
  modified_base 23..24: mod_base = OTHER; note = S-phosphorothioate
  modified_base 24: mod_base = OTHER; note = deoxyribose uracil (position 3 connectivity)
  modified_base 24..25: mod_base = OTHER; note = S-phosphorothioate
  modified_base 25: mod_base = OTHER; note = deoxyribose guanine
  modified_base 25..26: mod_base = OTHER; note R-N-(1,3-dimethylimidazolidin-2-ylidene)phosphoramidate
  modified_base 26: mod_base = um
  modified_base 26..27: mod_base = OTHER; note = S-phosphorothioate
  modified_base 27: mod_base = cm
  modified_base 27..28: mod_base = OTHER; note = S-phosphorothioate
  modified_base 28: mod_base = gm
  modified_base 28..29: mod_base = OTHER; note = S-phosphorothioate
  modified_base 29: mod_base = OTHER; note = 2-O-methylribose adenine
  modified_base 29..30: mod_base = OTHER; note R-N-(1,3-dimethylimidazolidin-2-ylidene)phosphoramidate
  modified_base 30: mod_base = um
  source 1..30: mol_type = other RNA

SEQ ID NO: 308 - RNA, 30 nt, synthetic construct; identical to SEQ ID NO: 304
  misc_feature 1..30: note = Synthetic: WV-43729
  misc_feature 1..30: note = Synthetic: ADR-0103588
  modified_base 1: mod_base = OTHER; note = 2-fluororibose cytosine
  modified_base 1..2: mod_base = OTHER; note R-N-(1,3-dimethylimidazolidin-2-ylidene)phosphoramidate
  modified_base 2: mod_base = OTHER; note = 2-fluororibose cytosine
  modified_base 2..3: mod_base = OTHER; note = S-phosphorothioate
  modified_base 3: mod_base = OTHER; note = 2-fluororibose cytosine
  modified_base 3..4: mod_base = OTHER; note = S-phosphorothioate
  modified_base 4: mod_base = OTHER; note = 2-fluororibose adenine
  modified_base 4..5: mod_base = OTHER; note = S-phosphorothioate
  modified_base 5: mod_base = OTHER; note = 2-fluororibose guanine
  modified_base 5..6: mod_base = OTHER; note = S-phosphorothioate
  modified_base 6: mod_base = OTHER; note = 2-fluororibose cytosine
  modified_base 6..7: mod_base = OTHER; note = S-phosphorothioate
  modified_base 7: mod_base = OTHER; note = 2-fluororibose adenine
  modified_base 7..8: mod_base = OTHER; note = S-phosphorothioate
  modified_base 8: mod_base = OTHER; note = 2-fluororibose guanine
  modified_base 8..9: mod_base = OTHER; note = S-phosphorothioate
  modified_base 9: mod_base = OTHER; note = 2-fluororibose cytosine
  modified_base 9..10: mod_base = OTHER; note = S-phosphorothioate
  modified_base 10: mod_base = OTHER; note = 2-fluororibose uracil
  modified_base 10..11: mod_base = OTHER; note = S-phosphorothioate
  modified_base 11: mod_base = OTHER; note = 2-fluororibose uracil
  modified_base 11..12: mod_base = OTHER; note = S-phosphorothioate
  modified_base 12: mod_base = OTHER; note = 2-fluororibose cytosine
  modified_base 12..13: mod_base = OTHER; note = S-phosphorothioate
  modified_base 13: mod_base = OTHER; note = 2-fluororibose adenine
  modified_base 13..14: mod_base = OTHER; note = S-phosphorothioate
  modified_base 14: mod_base = OTHER; note = 2-fluororibose guanine
  modified_base 14..15: mod_base = OTHER; note = S-phosphorothioate
  modified_base 15: mod_base = OTHER; note = 2-fluororibose uracil
  modified_base 15..16: mod_base = OTHER; note = S-phosphorothioate
  modified_base 16: mod_base = cm
  modified_base 16..17: mod_base = OTHER; note = S-phosphorothioate
  modified_base 17: mod_base = cm
  modified_base 17..18: mod_base = OTHER; note = S-phosphorothioate
  modified_base 18: mod_base = cm
  modified_base 18..19: mod_base = OTHER; note = S-phosphorothioate
  modified_base 19: mod_base = um
  modified_base 19..20: mod_base = OTHER; note = S-phosphorothioate
  modified_base 20: mod_base = um
  modified_base 20..21: mod_base = OTHER; note = S-phosphorothioate
  modified_base 21: mod_base = um
  modified_base 21..22: mod_base = OTHER; note = S-phosphorothioate
  modified_base 22: mod_base = cm
  modified_base 22..23: mod_base = OTHER; note = S-phosphorothioate
  modified_base 23: mod_base = OTHER; note = 2-fluororibose guanine
  modified_base 23..24: mod_base = OTHER; note = S-phosphorothioate
  modified_base 24: mod_base = OTHER; note = deoxyribose uracil (position 3 connectivity)
  modified_base 24..25: mod_base = OTHER; note = S-phosphorothioate
  modified_base 25: mod_base = OTHER; note = deoxyribose inosine
  modified_base 25..26: mod_base = OTHER; note S-N-(1,3-dimethylimidazolidin-2-ylidene)phosphoramidate
  modified_base 26: mod_base = um
  modified_base 26..27: mod_base = OTHER; note = S-phosphorothioate
  modified_base 27: mod_base = cm
  modified_base 27..28: mod_base = OTHER; note = S-phosphorothioate
  modified_base 28: mod_base = gm
  modified_base 28..29: mod_base = OTHER; note = S-phosphorothioate
  modified_base 29: mod_base = OTHER; note = 2-O-methylribose adenine
  modified_base 29..30: mod_base = OTHER; note R-N-(1,3-dimethylimidazolidin-2-ylidene)phosphoramidate
  modified_base 30: mod_base = um
  source 1..30: mol_type = other RNA

SEQ ID NO: 309 - RNA, 30 nt, synthetic construct; identical to SEQ ID NO: 305
  misc_feature 1..30: note = Synthetic: WV-43728
  misc_feature 1..30: note = Synthetic: ADR-0103584
  modified_base 1: mod_base = OTHER; note = 2-fluororibose cytosine
  modified_base 1..2: mod_base = OTHER; note R-N-(1,3-dimethylimidazolidin-2-ylidene)phosphoramidate
  modified_base 2: mod_base = OTHER; note = 2-fluororibose cytosine
  modified_base 2..3: mod_base = OTHER; note = S-phosphorothioate
  modified_base 3: mod_base = OTHER; note = 2-fluororibose cytosine
  modified_base 3..4: mod_base = OTHER; note = S-phosphorothioate
  modified_base 4: mod_base = OTHER; note = 2-fluororibose adenine
  modified_base 4..5: mod_base = OTHER; note = S-phosphorothioate
  modified_base 5: mod_base = OTHER; note = 2-fluororibose guanine
  modified_base 5..6: mod_base = OTHER; note = S-phosphorothioate
  modified_base 6: mod_base = OTHER; note = 2-fluororibose cytosine
  modified_base 6..7: mod_base = OTHER; note = S-phosphorothioate
  modified_base 7: mod_base = OTHER; note = 2-fluororibose adenine
  modified_base 7..8: mod_base = OTHER; note = S-phosphorothioate
  modified_base 8: mod_base = OTHER; note = 2-fluororibose guanine
  modified_base 8..9: mod_base = OTHER; note = S-phosphorothioate
  modified_base 9: mod_base = OTHER; note = 2-fluororibose cytosine
  modified_base 9..10: mod_base = OTHER; note = S-phosphorothioate
  modified_base 10: mod_base = OTHER; note = 2-fluororibose uracil
  modified_base 10..11: mod_base = OTHER; note = S-phosphorothioate
  modified_base 11: mod_base = OTHER; note = 2-fluororibose uracil
  modified_base 11..12: mod_base = OTHER; note = S-phosphorothioate
  modified_base 12: mod_base = OTHER; note = 2-fluororibose cytosine
  modified_base 12..13: mod_base = OTHER; note = S-phosphorothioate
  modified_base 13: mod_base = OTHER; note = 2-fluororibose adenine
  modified_base 13..14: mod_base = OTHER; note = S-phosphorothioate
  modified_base 14: mod_base = OTHER; note = 2-fluororibose guanine
  modified_base 14..15: mod_base = OTHER; note = S-phosphorothioate
  modified_base 15: mod_base = OTHER; note = 2-fluororibose uracil
  modified_base 15..16: mod_base = OTHER; note = S-phosphorothioate
  modified_base 16: mod_base = cm
  modified_base 16..17: mod_base = OTHER; note = S-phosphorothioate
  modified_base 17: mod_base = cm
  modified_base 17..18: mod_base = OTHER; note = S-phosphorothioate
  modified_base 18: mod_base = cm
  modified_base 18..19: mod_base = OTHER; note = S-phosphorothioate
  modified_base 19: mod_base = um
  modified_base 19..20: mod_base = OTHER; note = S-phosphorothioate
  modified_base 20: mod_base = um
  modified_base 20..21: mod_base = OTHER; note = S-phosphorothioate
  modified_base 21: mod_base = um
  modified_base 21..22: mod_base = OTHER; note = S-phosphorothioate
  modified_base 22: mod_base = cm
  modified_base 22..23: mod_base = OTHER; note = S-phosphorothioate
  modified_base 23: mod_base = OTHER; note = 2-fluororibose cytosine
  modified_base 23..24: mod_base = OTHER; note = S-phosphorothioate
  modified_base 24: mod_base = OTHER; note = deoxyribose uracil (position 3 connectivity)
  modified_base 24..25: mod_base = OTHER; note = S-phosphorothioate
  modified_base 25: mod_base = OTHER; note = deoxyribose inosine
  modified_base 25..26: mod_base = OTHER; note S-N-(1,3-dimethylimidazolidin-2-ylidene)phosphoramidate
  modified_base 26: mod_base = um
  modified_base 26..27: mod_base = OTHER; note = S-phosphorothioate
  modified_base 27: mod_base = cm
  modified_base 27..28: mod_base = OTHER; note = S-phosphorothioate
  modified_base 28: mod_base = gm
  modified_base 28..29: mod_base = OTHER; note = S-phosphorothioate
  modified_base 29: mod_base = OTHER; note = 2-O-methylribose adenine
  modified_base 29..30: mod_base = OTHER; note R-N-(1,3-dimethylimidazolidin-2-ylidene)phosphoramidate
  modified_base 30: mod_base = um
  source 1..30: mol_type = other RNA

SEQ ID NO: 310 - RNA, 30 nt, synthetic construct; identical to SEQ ID NO: 306
  misc_feature 1..30: note = Synthetic: WV-43727
  misc_feature 1..30: note = Synthetic: ADR-0103580
  modified_base 1: mod_base = OTHER; note = 2-fluororibose cytosine
  modified_base 1..2: mod_base = OTHER; note R-N-(1,3-dimethylimidazolidin-2-ylidene)phosphoramidate
  modified_base 2: mod_base = OTHER; note = 2-fluororibose cytosine
  modified_base 2..3: mod_base = OTHER; note = S-phosphorothioate
  modified_base 3: mod_base = OTHER; note = 2-fluororibose cytosine
  modified_base 3..4: mod_base = OTHER; note = S-phosphorothioate
  modified_base 4: mod_base = OTHER; note = 2-fluororibose adenine
  modified_base 4..5: mod_base = OTHER; note = S-phosphorothioate
  modified_base 5: mod_base = OTHER; note = 2-fluororibose guanine
  modified_base 5..6: mod_base = OTHER; note = S-phosphorothioate
  modified_base 6: mod_base = OTHER; note = 2-fluororibose cytosine
  modified_base 6..7: mod_base = OTHER; note = S-phosphorothioate
  modified_base 7: mod_base = OTHER; note = 2-fluororibose adenine
  modified_base 7..8: mod_base = OTHER; note = S-phosphorothioate
  modified_base 8: mod_base = OTHER; note = 2-fluororibose guanine
  modified_base 8..9: mod_base = OTHER; note = S-phosphorothioate
  modified_base 9: mod_base = OTHER; note = 2-fluororibose cytosine
  modified_base 9..10: mod_base = OTHER; note = S-phosphorothioate
  modified_base 10: mod_base = OTHER; note = 2-fluororibose uracil
  modified_base 10..11: mod_base = OTHER; note = S-phosphorothioate
  modified_base 11: mod_base = OTHER; note = 2-fluororibose uracil
  modified_base 11..12: mod_base = OTHER; note = S-phosphorothioate
  modified_base 12: mod_base = OTHER; note = 2-fluororibose cytosine
  modified_base 12..13: mod_base = OTHER; note = S-phosphorothioate
  modified_base 13: mod_base = OTHER; note = 2-fluororibose adenine
  modified_base 13..14: mod_base = OTHER; note = S-phosphorothioate
  modified_base 14: mod_base = OTHER; note = 2-fluororibose guanine
  modified_base 14..15: mod_base = OTHER; note = S-phosphorothioate
  modified_base 15: mod_base = OTHER; note = 2-fluororibose uracil
  modified_base 15..16: mod_base = OTHER; note = S-phosphorothioate
  modified_base 16: mod_base = cm
  modified_base 16..17: mod_base = OTHER; note = S-phosphorothioate
  modified_base 17: mod_base = cm
  modified_base 17..18: mod_base = OTHER; note = S-phosphorothioate
  modified_base 18: mod_base = cm
  modified_base 18..19: mod_base = OTHER; note = S-phosphorothioate
  modified_base 19: mod_base = um
  modified_base 19..20: mod_base = OTHER; note = S-phosphorothioate
  modified_base 20: mod_base = um
  modified_base 20..21: mod_base = OTHER; note = S-phosphorothioate
  modified_base 21: mod_base = um
  modified_base 21..22: mod_base = OTHER; note = S-phosphorothioate
  modified_base 22: mod_base = cm
  modified_base 22..23: mod_base = OTHER; note = S-phosphorothioate
  modified_base 23: mod_base = OTHER; note = 2-fluororibose adenine
  modified_base 23..24: mod_base = OTHER; note = S-phosphorothioate
  modified_base 24: mod_base = OTHER; note = deoxyribose uracil (position 3 connectivity)
  modified_base 24..25: mod_base = OTHER; note = S-phosphorothioate
  modified_base 25: mod_base = OTHER; note = deoxyribose inosine
  modified_base 25..26: mod_base = OTHER; note S-N-(1,3-dimethylimidazolidin-2-ylidene)phosphoramidate
  modified_base 26: mod_base = um
  modified_base 26..27: mod_base = OTHER; note = S-phosphorothioate
  modified_base 27: mod_base = cm
  modified_base 27..28: mod_base = OTHER; note = S-phosphorothioate
  modified_base 28: mod_base = gm
  modified_base 28..29: mod_base = OTHER; note = S-phosphorothioate
  modified_base 29: mod_base = OTHER; note = 2-O-methylribose adenine
  modified_base 29..30: mod_base = OTHER; note R-N-(1,3-dimethylimidazolidin-2-ylidene)phosphoramidate
  modified_base 30: mod_base = um
  source 1..30: mol_type = other RNA

SEQ ID NO: 311 - RNA, 30 nt, synthetic construct; identical to SEQ ID NO: 273
  misc_feature 1..30: note = Synthetic: WV-43726
  misc_feature 1..30: note = Synthetic: ADR-0103608
  modified_base 1: mod_base = OTHER; note = 2-fluororibose cytosine
  modified_base 1..2: mod_base = OTHER; note R-N-(1,3-dimethylimidazolidin-2-ylidene)phosphoramidate
  modified_base 2: mod_base = OTHER; note = 2-fluororibose cytosine
  modified_base 2..3: mod_base = OTHER; note = S-phosphorothioate
  modified_base 3: mod_base = OTHER; note = 2-fluororibose cytosine
  modified_base 3..4: mod_base = OTHER; note = S-phosphorothioate
  modified_base 4: mod_base = OTHER; note = 2-fluororibose adenine
  modified_base 4..5: mod_base = OTHER; note = S-phosphorothioate
  modified_base 5: mod_base = OTHER; note = 2-fluororibose guanine
  modified_base 5..6: mod_base = OTHER; note = S-phosphorothioate
  modified_base 6: mod_base = OTHER; note = 2-fluororibose cytosine
  modified_base 6..7: mod_base = OTHER; note = S-phosphorothioate
  modified_base 7: mod_base = OTHER; note = 2-fluororibose adenine
  modified_base 7..8: mod_base = OTHER; note = S-phosphorothioate
  modified_base 8: mod_base = OTHER; note = 2-fluororibose guanine
  modified_base 8..9: mod_base = OTHER; note = S-phosphorothioate
  modified_base 9: mod_base = OTHER; note = 2-fluororibose cytosine
  modified_base 9..10: mod_base = OTHER; note = S-phosphorothioate
  modified_base 10: mod_base = OTHER; note = 2-fluororibose uracil
  modified_base 10..11: mod_base = OTHER; note = S-phosphorothioate
  modified_base 11: mod_base = OTHER; note = 2-fluororibose uracil
  modified_base 11..12: mod_base = OTHER; note = S-phosphorothioate
  modified_base 12: mod_base = OTHER; note = 2-fluororibose cytosine
  modified_base 12..13: mod_base = OTHER; note = S-phosphorothioate
  modified_base 13: mod_base = OTHER; note = 2-fluororibose adenine
  modified_base 13..14: mod_base = OTHER; note = S-phosphorothioate
  modified_base 14: mod_base = OTHER; note = 2-fluororibose guanine
  modified_base 14..15: mod_base = OTHER; note = S-phosphorothioate
  modified_base 15: mod_base = OTHER; note = 2-fluororibose uracil
  modified_base 15..16: mod_base = OTHER; note = S-phosphorothioate
  modified_base 16: mod_base = cm
  modified_base 16..17: mod_base = OTHER; note = S-phosphorothioate
  modified_base 17: mod_base = cm
  modified_base 17..18: mod_base = OTHER; note = S-phosphorothioate
  modified_base 18: mod_base = cm
  modified_base 18..19: mod_base = OTHER; note = S-phosphorothioate
  modified_base 19: mod_base = um
  modified_base 19..20: mod_base = OTHER; note = S-phosphorothioate
  modified_base 20: mod_base = um
  modified_base 20..21: mod_base = OTHER; note = S-phosphorothioate
  modified_base 21: mod_base = um
  modified_base 21..22: mod_base = OTHER; note = S-phosphorothioate
  modified_base 22: mod_base = cm
  modified_base 22..23: mod_base = OTHER; note = S-phosphorothioate
  modified_base 23: mod_base = OTHER; note = 2-fluororibose uracil
  modified_base 23..24: mod_base = OTHER; note = S-phosphorothioate
  modified_base 24: mod_base = OTHER; note = deoxyribose uracil (position 3 connectivity)
  modified_base 24..25: mod_base = OTHER; note = S-phosphorothioate
  modified_base 25: mod_base = OTHER; note = deoxyribose inosine
  modified_base 25..26: mod_base = OTHER; note S-N-(1,3-dimethylimidazolidin-2-ylidene)phosphoramidate
  modified_base 26: mod_base = um
  modified_base 26..27: mod_base = OTHER; note = S-phosphorothioate
  modified_base 27: mod_base = cm
  modified_base 27..28: mod_base = OTHER; note = S-phosphorothioate
  modified_base 28: mod_base = gm
  modified_base 28..29: mod_base = OTHER; note = S-phosphorothioate
  modified_base 29: mod_base = OTHER; note = 2-O-methylribose adenine
  modified_base 29..30: mod_base = OTHER; note R-N-(1,3-dimethylimidazolidin-2-ylidene)phosphoramidate
  modified_base 30: mod_base = um
  source 1..30: mol_type = other RNA

SEQ ID NO: 312 - RNA, 30 nt, synthetic construct
  misc_feature 1..30: note = Synthetic: WV-43713
  misc_feature 1..30: note = Synthetic: ADR-0103720
  modified_base 1: mod_base = OTHER; note = 2-fluororibose cytosine
  modified_base 1..2: mod_base = OTHER; note R-N-(1,3-dimethylimidazolidin-2-ylidene)phosphoramidate
  modified_base 2: mod_base = OTHER; note = 2-fluororibose cytosine
  modified_base 2..3: mod_base = OTHER; note = S-phosphorothioate
  modified_base 3: mod_base = OTHER; note = 2-fluororibose cytosine
  modified_base 3..4: mod_base = OTHER; note = S-phosphorothioate
  modified_base 4: mod_base = OTHER; note = 2-fluororibose cytosine
  modified_base 4..5: mod_base = OTHER; note = S-phosphorothioate
  modified_base 5: mod_base = OTHER; note = 2-fluororibose adenine
  modified_base 5..6: mod_base = OTHER; note = S-phosphorothioate
  modified_base 6: mod_base = OTHER; note = 2-fluororibose guanine
  modified_base 6..7: mod_base = OTHER; note = S-phosphorothioate
  modified_base 7: mod_base = OTHER; note = 2-fluororibose cytosine
  modified_base 7..8: mod_base = OTHER; note = S-phosphorothioate
  modified_base 8: mod_base = OTHER; note = 2-fluororibose adenine
  modified_base 8..9: mod_base = OTHER; note = S-phosphorothioate
  modified_base 9: mod_base = OTHER; note = 2-fluororibose guanine
  modified_base 9..10: mod_base = OTHER; note = S-phosphorothioate
  modified_base 10: mod_base = OTHER; note = 2-fluororibose cytosine
  modified_base 10..11: mod_base = OTHER; note = S-phosphorothioate
  modified_base 11: mod_base = OTHER; note = 2-fluororibose uracil
  modified_base 11..12: mod_base = OTHER; note = S-phosphorothioate
  modified_base 12: mod_base = OTHER; note = 2-fluororibose uracil
  modified_base 12..13: mod_base = OTHER; note = S-phosphorothioate
  modified_base 13: mod_base = OTHER; note = 2-fluororibose cytosine
  modified_base 13..14: mod_base = OTHER; note = S-phosphorothioate
  modified_base 14: mod_base = OTHER; note = 2-fluororibose adenine
  modified_base 14..15: mod_base = OTHER; note = S-phosphorothioate
  modified_base 15: mod_base = OTHER; note = 2-fluororibose guanine
  modified_base 15..16: mod_base = OTHER; note = S-phosphorothioate
  modified_base 16: mod_base = um
  modified_base 16..17: mod_base = OTHER; note = S-phosphorothioate
  modified_base 17: mod_base = cm
  modified_base 17..18: mod_base = OTHER; note = S-phosphorothioate
  modified_base 18: mod_base = cm
  modified_base 18..19: mod_base = OTHER; note = S-phosphorothioate
  modified_base 19: mod_base = cm
  modified_base 19..20: mod_base = OTHER; note = S-phosphorothioate
  modified_base 20: mod_base = um
  modified_base 20..21: mod_base = OTHER; note = S-phosphorothioate
  modified_base 21: mod_base = um
  modified_base 21..22: mod_base = OTHER; note = S-phosphorothioate
  modified_base 22: mod_base = um
  modified_base 22..23: mod_base = OTHER; note = S-phosphorothioate
  modified_base 23: mod_base = cm
  modified_base 23..24: mod_base = OTHER; note = S-phosphorothioate
  modified_base 24: mod_base = OTHER; note = 2-fluororibose guanine
  modified_base 24..25: mod_base = OTHER; note = S-phosphorothioate
  modified_base 25: mod_base = OTHER; note = deoxyribose uracil (position 3 connectivity)
  modified_base 25..26: mod_base = OTHER; note = S-phosphorothioate
  modified_base 26: mod_base = OTHER; note = deoxyribose guanine
  modified_base 26..27: mod_base = OTHER; note R-N-(1,3-dimethylimidazolidin-2-ylidene)phosphoramidate
  modified_base 27: mod_base = um
  modified_base 27..28: mod_base = OTHER; note = S-phosphorothioate
  modified_base 28: mod_base = cm
  modified_base 28..29: mod_base = OTHER; note = S-phosphorothioate
  modified_base 29: mod_base = gm
  modified_base 29..30: mod_base = OTHER; note R-N-(1,3-dimethylimidazolidin-2-ylidene)phosphoramidate
  modified_base 30: mod_base = OTHER; note = 2-O-methylribose adenine
  source 1..30: mol_type = other RNA
ccccagcagcttcagtccctttcgtgtcga

SEQ ID NO: 313 - RNA, 30 nt, synthetic construct
  misc_feature 1..30: note = Synthetic: WV-43712
  misc_feature 1..30: note = Synthetic: ADR-0103711
  modified_base 1: mod_base = OTHER; note = 2-fluororibose cytosine
  modified_base 1..2: mod_base = OTHER; note R-N-(1,3-dimethylimidazolidin-2-ylidene)phosphoramidate
  modified_base 2: mod_base = OTHER; note = 2-fluororibose cytosine
  modified_base 2..3: mod_base = OTHER; note = S-phosphorothioate
  modified_base 3: mod_base = OTHER; note = 2-fluororibose cytosine
  modified_base 3..4: mod_base = OTHER; note = S-phosphorothioate
  modified_base 4: mod_base = OTHER; note = 2-fluororibose cytosine
  modified_base 4..5: mod_base = OTHER; note = S-phosphorothioate
  modified_base 5: mod_base = OTHER; note = 2-fluororibose adenine
  modified_base 5..6: mod_base = OTHER; note = S-phosphorothioate
  modified_base 6: mod_base = OTHER; note = 2-fluororibose guanine
  modified_base 6..7: mod_base = OTHER; note = S-phosphorothioate
  modified_base 7: mod_base = OTHER; note = 2-fluororibose cytosine
  modified_base 7..8: mod_base = OTHER; note = S-phosphorothioate
  modified_base 8: mod_base = OTHER; note = 2-fluororibose adenine
  modified_base 8..9: mod_base = OTHER; note = S-phosphorothioate
  modified_base 9: mod_base = OTHER; note = 2-fluororibose guanine
  modified_base 9..10: mod_base = OTHER; note = S-phosphorothioate
  modified_base 10: mod_base = OTHER; note = 2-fluororibose cytosine
  modified_base 10..11: mod_base = OTHER; note = S-phosphorothioate
  modified_base 11: mod_base = OTHER; note = 2-fluororibose uracil
  modified_base 11..12: mod_base = OTHER; note = S-phosphorothioate
  modified_base 12: mod_base = OTHER; note = 2-fluororibose uracil
  modified_base 12..13: mod_base = OTHER; note = S-phosphorothioate
  modified_base 13: mod_base = OTHER; note = 2-fluororibose cytosine
  modified_base 13..14: mod_base = OTHER; note = S-phosphorothioate
  modified_base 14: mod_base = OTHER; note = 2-fluororibose adenine
  modified_base 14..15: mod_base = OTHER; note = S-phosphorothioate
  modified_base 15: mod_base = OTHER; note = 2-fluororibose guanine
  modified_base 15..16: mod_base = OTHER; note = S-phosphorothioate
  modified_base 16: mod_base = um
  modified_base 16..17: mod_base = OTHER; note = S-phosphorothioate
  modified_base 17: mod_base = cm
  modified_base 17..18: mod_base = OTHER; note = S-phosphorothioate
  modified_base 18: mod_base = cm
  modified_base 18..19: mod_base = OTHER; note = S-phosphorothioate
  modified_base 19: mod_base = cm
  modified_base 19..20: mod_base = OTHER; note = S-phosphorothioate
  modified_base 20: mod_base = um
  modified_base 20..21: mod_base = OTHER; note = S-phosphorothioate
  modified_base 21: mod_base = um
  modified_base 21..22: mod_base = OTHER; note = S-phosphorothioate
  modified_base 22: mod_base = um
  modified_base 22..23: mod_base = OTHER; note = S-phosphorothioate
  modified_base 23: mod_base = cm
  modified_base 23..24: mod_base = OTHER; note = S-phosphorothioate
  modified_base 24: mod_base = OTHER; note = 2-fluororibose cytosine
  modified_base 24..25: mod_base = OTHER; note = S-phosphorothioate
  modified_base 25: mod_base = OTHER; note = deoxyribose uracil (position 3 connectivity)
  modified_base 25..26: mod_base = OTHER; note = S-phosphorothioate
  modified_base 26: mod_base = OTHER; note = deoxyribose guanine
  modified_base 26..27: mod_base = OTHER; note R-N-(1,3-dimethylimidazolidin-2-ylidene)phosphoramidate
  modified_base 27: mod_base = um
  modified_base 27..28: mod_base = OTHER; note = S-phosphorothioate
  modified_base 28: mod_base = cm
  modified_base 28..29: mod_base = OTHER; note = S-phosphorothioate
  modified_base 29: mod_base = gm
  modified_base 29..30: mod_base = OTHER; note R-N-(1,3-dimethylimidazolidin-2-ylidene)phosphoramidate
  modified_base 30: mod_base = OTHER; note = 2-O-methylribose adenine
  source 1..30: mol_type = other RNA
ccccagcagcttcagtccctttcctgtcga

SEQ ID NO: 314 - RNA, 30 nt, synthetic construct
  misc_feature 1..30: note = Synthetic: WV-43711
  misc_feature 1..30: note = Synthetic: ADR-0103702
  modified_base 1: mod_base = OTHER; note = 2-fluororibose cytosine
  modified_base 1..2: mod_base = OTHER; note R-N-(1,3-dimethylimidazolidin-2-ylidene)phosphoramidate
  modified_base 2: mod_base = OTHER; note = 2-fluororibose cytosine
  modified_base 2..3: mod_base = OTHER; note = S-phosphorothioate
  modified_base 3: mod_base = OTHER; note = 2-fluororibose cytosine
  modified_base 3..4: mod_base = OTHER; note = S-phosphorothioate
  modified_base 4: mod_base = OTHER; note = 2-fluororibose cytosine
  modified_base 4..5: mod_base = OTHER; note = S-phosphorothioate
  modified_base 5: mod_base = OTHER; note = 2-fluororibose adenine
  modified_base 5..6: mod_base = OTHER; note = S-phosphorothioate
  modified_base 6: mod_base = OTHER; note = 2-fluororibose guanine
  modified_base 6..7: mod_base = OTHER; note = S-phosphorothioate
  modified_base 7: mod_base = OTHER; note = 2-fluororibose cytosine
  modified_base 7..8: mod_base = OTHER; note = S-phosphorothioate
  modified_base 8: mod_base = OTHER; note = 2-fluororibose adenine
  modified_base 8..9: mod_base = OTHER; note = S-phosphorothioate
  modified_base 9: mod_base = OTHER; note = 2-fluororibose guanine
  modified_base 9..10: mod_base = OTHER; note = S-phosphorothioate
  modified_base 10: mod_base = OTHER; note = 2-fluororibose cytosine
  modified_base 10..11: mod_base = OTHER; note = S-phosphorothioate
  modified_base 11: mod_base = OTHER; note = 2-fluororibose uracil
  modified_base 11..12: mod_base = OTHER; note = S-phosphorothioate
  modified_base 12: mod_base = OTHER; note = 2-fluororibose uracil
  modified_base 12..13: mod_base = OTHER; note = S-phosphorothioate
  modified_base 13: mod_base = OTHER; note = 2-fluororibose cytosine
  modified_base 13..14: mod_base = OTHER; note = S-phosphorothioate
  modified_base 14: mod_base = OTHER; note = 2-fluororibose adenine
  modified_base 14..15: mod_base = OTHER; note = S-phosphorothioate
  modified_base 15: mod_base = OTHER; note = 2-fluororibose guanine
  modified_base 15..16: mod_base = OTHER; note = S-phosphorothioate
  modified_base 16: mod_base = um
  modified_base 16..17: mod_base = OTHER; note = S-phosphorothioate
  modified_base 17: mod_base = cm
  modified_base 17..18: mod_base = OTHER; note = S-phosphorothioate
  modified_base 18: mod_base = cm
  modified_base 18..19: mod_base = OTHER; note = S-phosphorothioate
  modified_base 19: mod_base = cm
  modified_base 19..20: mod_base = OTHER; note = S-phosphorothioate
  modified_base 20: mod_base = um
  modified_base 20..21: mod_base = OTHER; note = S-phosphorothioate
  modified_base 21: mod_base = um
  modified_base 21..22: mod_base = OTHER; note = S-phosphorothioate
  modified_base 22: mod_base = um
  modified_base 22..23: mod_base = OTHER; note = S-phosphorothioate
  modified_base 23: mod_base = cm
  modified_base 23..24: mod_base = OTHER; note = S-phosphorothioate
  modified_base 24: mod_base = OTHER; note = 2-fluororibose adenine
  modified_base 24..25: mod_base = OTHER; note = S-phosphorothioate
  modified_base 25: mod_base = OTHER; note = deoxyribose uracil (position 3 connectivity)
  modified_base 25..26: mod_base = OTHER; note = S-phosphorothioate
  modified_base 26: mod_base = OTHER; note = deoxyribose guanine
  modified_base 26..27: mod_base = OTHER; note R-N-(1,3-dimethylimidazolidin-2-ylidene)phosphoramidate
  modified_base 27: mod_base = um
  modified_base 27..28: mod_base = OTHER; note = S-phosphorothioate
  modified_base 28: mod_base = cm
  modified_base 28..29: mod_base = OTHER; note = S-phosphorothioate
  modified_base 29: mod_base = gm
  modified_base 29..30: mod_base = OTHER; note R-N-(1,3-dimethylimidazolidin-2-ylidene)phosphoramidate
  modified_base 30: mod_base = OTHER; note = 2-O-methylribose adenine
  source 1..30: mol_type = other RNA
ccccagcagcttcagtccctttcatgtcga

SEQ ID NO: 315 - RNA, 30 nt, synthetic construct; identical to SEQ ID NO: 139
  misc_feature 1..30: note = Synthetic: WV-43710
  misc_feature 1..30: note = Synthetic: ADR-0103729
  modified_base 1: mod_base = OTHER; note = 2-fluororibose cytosine
  modified_base 1..2: mod_base = OTHER; note R-N-(1,3-dimethylimidazolidin-2-ylidene)phosphoramidate
  modified_base 2: mod_base = OTHER; note = 2-fluororibose cytosine
  modified_base 2..3: mod_base = OTHER; note = S-phosphorothioate
  modified_base 3: mod_base = OTHER; note = 2-fluororibose cytosine
  modified_base 3..4: mod_base = OTHER; note = S-phosphorothioate
  modified_base 4: mod_base = OTHER; note = 2-fluororibose cytosine
  modified_base 4..5: mod_base = OTHER; note = S-phosphorothioate
  modified_base 5: mod_base = OTHER; note = 2-fluororibose adenine
  modified_base 5..6: mod_base = OTHER; note = S-phosphorothioate
  modified_base 6: mod_base = OTHER; note = 2-fluororibose guanine
  modified_base 6..7: mod_base = OTHER; note = S-phosphorothioate
  modified_base 7: mod_base = OTHER; note = 2-fluororibose cytosine
  modified_base 7..8: mod_base = OTHER; note = S-phosphorothioate
  modified_base 8: mod_base = OTHER; note = 2-fluororibose adenine
  modified_base 8..9: mod_base = OTHER; note = S-phosphorothioate
  modified_base 9: mod_base = OTHER; note = 2-fluororibose guanine
  modified_base 9..10: mod_base = OTHER; note = S-phosphorothioate
  modified_base 10: mod_base = OTHER; note = 2-fluororibose cytosine
  modified_base 10..11: mod_base = OTHER; note = S-phosphorothioate
  modified_base 11: mod_base = OTHER; note = 2-fluororibose uracil
  modified_base 11..12: mod_base = OTHER; note = S-phosphorothioate
  modified_base 12: mod_base = OTHER; note = 2-fluororibose uracil
  modified_base 12..13: mod_base = OTHER; note = S-phosphorothioate
  modified_base 13: mod_base = OTHER; note = 2-fluororibose cytosine
  modified_base 13..14: mod_base = OTHER; note = S-phosphorothioate
  modified_base 14: mod_base = OTHER; note = 2-fluororibose adenine
  modified_base 14..15: mod_base = OTHER; note = S-phosphorothioate
  modified_base 15: mod_base = OTHER; note = 2-fluororibose guanine
  modified_base 15..16: mod_base = OTHER; note = S-phosphorothioate
  modified_base 16: mod_base = um
  modified_base 16..17: mod_base = OTHER; note = S-phosphorothioate
  modified_base 17: mod_base = cm
  modified_base 17..18: mod_base = OTHER; note = S-phosphorothioate
  modified_base 18: mod_base = cm
  modified_base 18..19: mod_base = OTHER; note = S-phosphorothioate
  modified_base 19: mod_base = cm
  modified_base 19..20: mod_base = OTHER; note = S-phosphorothioate
  modified_base 20: mod_base = um
  modified_base 20..21: mod_base = OTHER; note = S-phosphorothioate
  modified_base 21: mod_base = um
  modified_base 21..22: mod_base = OTHER; note = S-phosphorothioate
  modified_base 22: mod_base = um
  modified_base 22..23: mod_base = OTHER; note = S-phosphorothioate
  modified_base 23: mod_base = cm
  modified_base 23..24: mod_base = OTHER; note = S-phosphorothioate
  modified_base 24: mod_base = OTHER; note = 2-fluororibose uracil
  modified_base 24..25: mod_base = OTHER; note = S-phosphorothioate
  modified_base 25: mod_base = OTHER; note = deoxyribose uracil (position 3 connectivity)
  modified_base 25..26: mod_base = OTHER; note = S-phosphorothioate
  modified_base 26: mod_base = OTHER; note = deoxyribose guanine
  modified_base 26..27: mod_base = OTHER; note R-N-(1,3-dimethylimidazolidin-2-ylidene)phosphoramidate
  modified_base 27: mod_base = um
  modified_base 27..28: mod_base = OTHER; note = S-phosphorothioate
  modified_base 28: mod_base = cm
  modified_base 28..29: mod_base = OTHER; note = S-phosphorothioate
  modified_base 29: mod_base = gm
  modified_base 29..30: mod_base = OTHER; note R-N-(1,3-dimethylimidazolidin-2-ylidene)phosphoramidate
  modified_base 30: mod_base = OTHER; note = 2-O-methylribose adenine
  source 1..30: mol_type = other RNA

SEQ ID NO: 316 - RNA, 30 nt, synthetic construct; identical to SEQ ID NO: 312
  misc_feature 1..30: note = Synthetic: WV-43709
  misc_feature 1..30: note = Synthetic: ADR-0103721
  modified_base 1: mod_base = OTHER; note = 2-fluororibose cytosine
  modified_base 1..2: mod_base = OTHER; note R-N-(1,3-dimethylimidazolidin-2-ylidene)phosphoramidate
  modified_base 2: mod_base = OTHER; note = 2-fluororibose cytosine
  modified_base 2..3: mod_base = OTHER; note = S-phosphorothioate
  modified_base 3: mod_base = OTHER; note = 2-fluororibose cytosine
  modified_base 3..4: mod_base = OTHER; note = S-phosphorothioate
  modified_base 4: mod_base = OTHER; note = 2-fluororibose cytosine
  modified_base 4..5: mod_base = OTHER; note = S-phosphorothioate
  modified_base 5: mod_base = OTHER; note = 2-fluororibose adenine
  modified_base 5..6: mod_base = OTHER; note = S-phosphorothioate
  modified_base 6: mod_base = OTHER; note = 2-fluororibose guanine
  modified_base 6..7: mod_base = OTHER; note = S-phosphorothioate
  modified_base 7: mod_base = OTHER; note = 2-fluororibose cytosine
  modified_base 7..8: mod_base = OTHER; note = S-phosphorothioate
  modified_base 8: mod_base = OTHER; note = 2-fluororibose adenine
  modified_base 8..9: mod_base = OTHER; note = S-phosphorothioate
  modified_base 9: mod_base = OTHER; note = 2-fluororibose guanine
  modified_base 9..10: mod_base = OTHER; note = S-phosphorothioate
  modified_base 10: mod_base = OTHER; note = 2-fluororibose cytosine
  modified_base 10..11: mod_base = OTHER; note = S-phosphorothioate
  modified_base 11: mod_base = OTHER; note = 2-fluororibose uracil
  modified_base 11..12: mod_base = OTHER; note = S-phosphorothioate
  modified_base 12: mod_base = OTHER; note = 2-fluororibose uracil
  modified_base 12..13: mod_base = OTHER; note = S-phosphorothioate
  modified_base 13: mod_base = OTHER; note = 2-fluororibose cytosine
  modified_base 13..14: mod_base = OTHER; note = S-phosphorothioate
  modified_base 14: mod_base = OTHER; note = 2-fluororibose adenine
  modified_base 14..15: mod_base = OTHER; note = S-phosphorothioate
  modified_base 15: mod_base = OTHER; note = 2-fluororibose guanine
  modified_base 15..16: mod_base = OTHER; note = S-phosphorothioate
  modified_base 16: mod_base = um
  modified_base 16..17: mod_base = OTHER; note = S-phosphorothioate
  modified_base 17: mod_base = cm
  modified_base 17..18: mod_base = OTHER; note = S-phosphorothioate
  modified_base 18: mod_base = cm
  modified_base 18..19: mod_base = OTHER; note = S-phosphorothioate
  modified_base 19: mod_base = cm
  modified_base 19..20: mod_base = OTHER; note = S-phosphorothioate
  modified_base 20: mod_base = um
  modified_base 20..21: mod_base = OTHER; note = S-phosphorothioate
  modified_base 21: mod_base = um
  modified_base 21..22: mod_base = OTHER; note = S-phosphorothioate
  modified_base 22: mod_base = um
  modified_base 22..23: mod_base = OTHER; note = S-phosphorothioate
  modified_base 23: mod_base = cm
  modified_base 23..24: mod_base = OTHER; note = S-phosphorothioate
  modified_base 24: mod_base = OTHER; note = 2-fluororibose guanine
  modified_base 24..25: mod_base = OTHER; note = S-phosphorothioate
  modified_base 25: mod_base = OTHER; note = deoxyribose uracil (position 3 connectivity)
  modified_base 25..26: mod_base = OTHER; note = S-phosphorothioate
  modified_base 26: mod_base = OTHER; note = deoxyribose inosine
  modified_base 26..27: mod_base = OTHER; note S-N-(1,3-dimethylimidazolidin-2-ylidene)phosphoramidate
  modified_base 27: mod_base = um
  modified_base 27..28: mod_base = OTHER; note = S-phosphorothioate
  modified_base 28: mod_base = cm
  modified_base 28..29: mod_base = OTHER; note = S-phosphorothioate
  modified_base 29: mod_base = gm
  modified_base 29..30: mod_base = OTHER; note R-N-(1,3-dimethylimidazolidin-2-ylidene)phosphoramidate
  modified_base 30: mod_base = OTHER; note = 2-O-methylribose adenine
  source 1..30: mol_type = other RNA

SEQ ID NO: 317 - RNA, 30 nt, synthetic construct; identical to SEQ ID NO: 313
  misc_feature 1..30: note = Synthetic: WV-43708
  misc_feature 1..30: note = Synthetic: ADR-0103712
  modified_base 1: mod_base = OTHER; note = 2-fluororibose cytosine
  modified_base 1..2: mod_base = OTHER; note R-N-(1,3-dimethylimidazolidin-2-ylidene)phosphoramidate
  modified_base 2: mod_base = OTHER; note = 2-fluororibose cytosine
  modified_base 2..3: mod_base = OTHER; note = S-phosphorothioate
  modified_base 3: mod_base = OTHER; note = 2-fluororibose cytosine
  modified_base 3..4: mod_base = OTHER; note = S-phosphorothioate
  modified_base 4: mod_base = OTHER; note = 2-fluororibose cytosine
  modified_base 4..5: mod_base = OTHER; note = S-phosphorothioate
  modified_base 5: mod_base = OTHER; note = 2-fluororibose adenine
  modified_base 5..6: mod_base = OTHER; note = S-phosphorothioate
  modified_base 6: mod_base = OTHER; note = 2-fluororibose guanine
  modified_base 6..7: mod_base = OTHER; note = S-phosphorothioate
  modified_base 7: mod_base = OTHER; note = 2-fluororibose cytosine
  modified_base 7..8: mod_base = OTHER; note = S-phosphorothioate
  modified_base 8: mod_base = OTHER; note = 2-fluororibose adenine
  modified_base 8..9: mod_base = OTHER; note = S-phosphorothioate
  modified_base 9: mod_base = OTHER; note = 2-fluororibose guanine
  modified_base 9..10: mod_base = OTHER; note = S-phosphorothioate
  modified_base 10: mod_base = OTHER; note = 2-fluororibose cytosine
  modified_base 10..11: mod_base = OTHER; note = S-phosphorothioate
  modified_base 11: mod_base = OTHER; note = 2-fluororibose uracil
  modified_base 11..12: mod_base = OTHER; note = S-phosphorothioate
  modified_base 12: mod_base = OTHER; note = 2-fluororibose uracil
  modified_base 12..13: mod_base = OTHER; note = S-phosphorothioate
  modified_base 13: mod_base = OTHER; note = 2-fluororibose cytosine
  modified_base 13..14: mod_base = OTHER; note = S-phosphorothioate
  modified_base 14: mod_base = OTHER; note = 2-fluororibose adenine
  modified_base 14..15: mod_base = OTHER; note = S-phosphorothioate
  modified_base 15: mod_base = OTHER; note = 2-fluororibose guanine
  modified_base 15..16: mod_base = OTHER; note = S-phosphorothioate
  modified_base 16: mod_base = um
  modified_base 16..17: mod_base = OTHER; note = S-phosphorothioate
  modified_base 17: mod_base = cm
  modified_base 17..18: mod_base = OTHER; note = S-phosphorothioate
  modified_base 18: mod_base = cm
  modified_base 18..19: mod_base = OTHER; note = S-phosphorothioate
  modified_base 19: mod_base = cm
  modified_base 19..20: mod_base = OTHER; note = S-phosphorothioate
  modified_base 20: mod_base = um
  modified_base 20..21: mod_base = OTHER; note = S-phosphorothioate
  modified_base 21: mod_base = um
  modified_base 21..22: mod_base = OTHER; note = S-phosphorothioate
  modified_base 22: mod_base = um
  modified_base 22..23: mod_base = OTHER; note = S-phosphorothioate
  modified_base 23: mod_base = cm
  modified_base 23..24: mod_base = OTHER; note = S-phosphorothioate
  modified_base 24: mod_base = OTHER; note = 2-fluororibose cytosine
  modified_base 24..25: mod_base = OTHER; note = S-phosphorothioate
  modified_base 25: mod_base = OTHER; note = deoxyribose uracil (position 3 connectivity)
  modified_base 25..26: mod_base = OTHER; note = S-phosphorothioate
  modified_base 26: mod_base = OTHER; note = deoxyribose inosine
  modified_base 26..27: mod_base = OTHER; note S-N-(1,3-dimethylimidazolidin-2-ylidene)phosphoramidate
  modified_base 27: mod_base = um
  modified_base 27..28: mod_base = OTHER; note = S-phosphorothioate
  modified_base 28: mod_base = cm
  modified_base 28..29: mod_base = OTHER; note = S-phosphorothioate
  modified_base 29: mod_base = gm
  modified_base 29..30: mod_base = OTHER; note R-N-(1,3-dimethylimidazolidin-2-ylidene)phosphoramidate
  modified_base 30: mod_base = OTHER; note = 2-O-methylribose adenine
  source 1..30: mol_type = other RNA

SEQ ID NO: 318 - RNA, 30 nt, synthetic construct; identical to SEQ ID NO: 314
  misc_feature 1..30: note = Synthetic: WV-43707
  misc_feature 1..30: note = Synthetic: ADR-0103703
  modified_base 1: mod_base = OTHER; note = 2-fluororibose cytosine
  modified_base 1..2: mod_base = OTHER; note R-N-(1,3-dimethylimidazolidin-2-ylidene)phosphoramidate
  modified_base 2: mod_base = OTHER; note = 2-fluororibose cytosine
  modified_base 2..3: mod_base = OTHER; note = S-phosphorothioate
  modified_base 3: mod_base = OTHER; note = 2-fluororibose cytosine
  modified_base 3..4: mod_base = OTHER; note = S-phosphorothioate
  modified_base 4: mod_base = OTHER; note = 2-fluororibose cytosine
  modified_base 4..5: mod_base = OTHER; note = S-phosphorothioate
  modified_base 5: mod_base = OTHER; note = 2-fluororibose adenine
  modified_base 5..6: mod_base = OTHER; note = S-phosphorothioate
  modified_base 6: mod_base = OTHER; note = 2-fluororibose guanine
  modified_base 6..7: mod_base = OTHER; note = S-phosphorothioate
  modified_base 7: mod_base = OTHER; note = 2-fluororibose cytosine
  modified_base 7..8: mod_base = OTHER; note = S-phosphorothioate
  modified_base 8: mod_base = OTHER; note = 2-fluororibose adenine
  modified_base 8..9: mod_base = OTHER; note = S-phosphorothioate
  modified_base 9: mod_base = OTHER; note = 2-fluororibose guanine
  modified_base 9..10: mod_base = OTHER; note = S-phosphorothioate
  modified_base 10: mod_base = OTHER; note = 2-fluororibose cytosine
  modified_base 10..11: mod_base = OTHER; note = S-phosphorothioate
  modified_base 11: mod_base = OTHER; note = 2-fluororibose uracil
  modified_base 11..12: mod_base = OTHER; note = S-phosphorothioate
  modified_base 12: mod_base = OTHER; note = 2-fluororibose uracil
  modified_base 12..13: mod_base = OTHER; note = S-phosphorothioate
  modified_base 13: mod_base = OTHER; note = 2-fluororibose cytosine
  modified_base 13..14: mod_base = OTHER; note = S-phosphorothioate
  modified_base 14: mod_base = OTHER; note = 2-fluororibose adenine
  modified_base 14..15: mod_base = OTHER; note = S-phosphorothioate
  modified_base 15: mod_base = OTHER; note = 2-fluororibose guanine
  modified_base 15..16: mod_base = OTHER; note = S-phosphorothioate
  modified_base 16: mod_base = um
  modified_base 16..17: mod_base = OTHER; note = S-phosphorothioate
  modified_base 17: mod_base = cm
  modified_base 17..18: mod_base = OTHER; note = S-phosphorothioate
  modified_base 18: mod_base = cm
  modified_base 18..19: mod_base = OTHER; note = S-phosphorothioate
  modified_base 19: mod_base = cm
  modified_base 19..20: mod_base = OTHER; note = S-phosphorothioate
  modified_base 20: mod_base = um
  modified_base 20..21: mod_base = OTHER; note = S-phosphorothioate
  modified_base 21: mod_base = um
  modified_base 21..22: mod_base = OTHER; note = S-phosphorothioate
  modified_base 22: mod_base = um
  modified_base 22..23: mod_base = OTHER; note = S-phosphorothioate
  modified_base 23: mod_base = cm
  modified_base 23..24: mod_base = OTHER; note = S-phosphorothioate
  modified_base 24: mod_base = OTHER; note = 2-fluororibose adenine
  modified_base 24..25: mod_base = OTHER; note = S-phosphorothioate
  modified_base 25: mod_base = OTHER; note = deoxyribose uracil (position 3 connectivity)
  modified_base 25..26: mod_base = OTHER; note = S-phosphorothioate
  modified_base 26: mod_base = OTHER; note = deoxyribose inosine
  modified_base 26..27: mod_base = OTHER; note S-N-(1,3-dimethylimidazolidin-2-ylidene)phosphoramidate
  modified_base 27: mod_base = um
  modified_base 27..28: mod_base = OTHER; note = S-phosphorothioate
  modified_base 28: mod_base = cm
  modified_base 28..29: mod_base = OTHER; note = S-phosphorothioate
  modified_base 29: mod_base = gm
  modified_base 29..30: mod_base = OTHER; note R-N-(1,3-dimethylimidazolidin-2-ylidene)phosphoramidate
  modified_base 30: mod_base = OTHER; note = 2-O-methylribose adenine
  source 1..30: mol_type = other RNA

SEQ ID NO: 319 - RNA, 30 nt, synthetic construct; identical to SEQ ID NO: 139
  misc_feature 1..30: note = Synthetic: WV-43706
  misc_feature 1..30: note = Synthetic: ADR-0103730
  modified_base 1: mod_base = OTHER; note = 2-fluororibose cytosine
  modified_base 1..2: mod_base = OTHER; note R-N-(1,3-dimethylimidazolidin-2-ylidene)phosphoramidate
  modified_base 2: mod_base = OTHER; note = 2-fluororibose cytosine
  modified_base 2..3: mod_base = OTHER; note = S-phosphorothioate
  modified_base 3: mod_base = OTHER; note = 2-fluororibose cytosine
  modified_base 3..4: mod_base = OTHER; note = S-phosphorothioate
  modified_base 4: mod_base = OTHER; note = 2-fluororibose cytosine
  modified_base 4..5: mod_base = OTHER; note = S-phosphorothioate
  modified_base 5: mod_base = OTHER; note = 2-fluororibose adenine
  modified_base 5..6: mod_base = OTHER; note = S-phosphorothioate
  modified_base 6: mod_base = OTHER; note = 2-fluororibose guanine
  modified_base 6..7: mod_base = OTHER; note = S-phosphorothioate
  modified_base 7: mod_base = OTHER; note = 2-fluororibose cytosine
  modified_base 7..8: mod_base = OTHER; note = S-phosphorothioate
  modified_base 8: mod_base = OTHER; note = 2-fluororibose adenine
  modified_base 8..9: mod_base = OTHER; note = S-phosphorothioate
  modified_base 9: mod_base = OTHER; note = 2-fluororibose guanine
  modified_base 9..10: mod_base = OTHER; note = S-phosphorothioate
  modified_base 10: mod_base = OTHER; note = 2-fluororibose cytosine
  modified_base 10..11: mod_base = OTHER; note = S-phosphorothioate
  modified_base 11: mod_base = OTHER; note = 2-fluororibose uracil
  modified_base 11..12: mod_base = OTHER; note = S-phosphorothioate
  modified_base 12: mod_base = OTHER; note = 2-fluororibose uracil
  modified_base 12..13: mod_base = OTHER; note = S-phosphorothioate
  modified_base 13: mod_base = OTHER; note = 2-fluororibose cytosine
  modified_base 13..14: mod_base = OTHER; note = S-phosphorothioate
  modified_base 14: mod_base = OTHER; note = 2-fluororibose adenine
  modified_base 14..15: mod_base = OTHER; note = S-phosphorothioate
  modified_base 15: mod_base = OTHER; note = 2-fluororibose guanine
  modified_base 15..16: mod_base = OTHER; note = S-phosphorothioate
  modified_base 16: mod_base = um
  modified_base 16..17: mod_base = OTHER; note = S-phosphorothioate
  modified_base 17: mod_base = cm
  modified_base 17..18: mod_base = OTHER; note = S-phosphorothioate
  modified_base 18: mod_base = cm
  modified_base 18..19: mod_base = OTHER; note = S-phosphorothioate
  modified_base 19: mod_base = cm
  modified_base 19..20: mod_base = OTHER; note = S-phosphorothioate
  modified_base 20: mod_base = um
  modified_base 20..21: mod_base = OTHER; note = S-phosphorothioate
  modified_base 21: mod_base = um
  modified_base 21..22: mod_base = OTHER; note = S-phosphorothioate
  modified_base 22: mod_base = um
  modified_base 22..23: mod_base = OTHER; note = S-phosphorothioate
  modified_base 23: mod_base = cm
  modified_base 23..24: mod_base = OTHER; note = S-phosphorothioate
  modified_base 24: mod_base = OTHER; note = 2-fluororibose uracil
  modified_base 24..25: mod_base = OTHER; note = S-phosphorothioate
  modified_base 25: mod_base = OTHER; note = deoxyribose uracil (position 3 connectivity)
  modified_base 25..26: mod_base = OTHER; note = S-phosphorothioate
  modified_base 26: mod_base = OTHER; note = deoxyribose inosine
  modified_base 26..27: mod_base = OTHER; note S-N-(1,3-dimethylimidazolidin-2-ylidene)phosphoramidate
  modified_base 27: mod_base = um
  modified_base 27..28: mod_base = OTHER; note = S-phosphorothioate
  modified_base 28: mod_base = cm
  modified_base 28..29: mod_base = OTHER; note = S-phosphorothioate
  modified_base 29: mod_base = gm
  modified_base 29..30: mod_base = OTHER; note R-N-(1,3-dimethylimidazolidin-2-ylidene)phosphoramidate
  modified_base 30: mod_base = OTHER; note = 2-O-methylribose adenine
  source 1..30: mol_type = other RNA

SEQ ID NO: 320 - RNA, 30 nt, synthetic construct; identical to SEQ ID NO: 135
  misc_feature 1..30: note = Synthetic: WV-43714
  misc_feature 1..30: note = Synthetic: ADR-0103738
  modified_base 1: mod_base = OTHER; note = 2-fluororibose cytosine
  modified_base 1..2: mod_base = OTHER; note R-N-(1,3-dimethylimidazolidin-2-ylidene)phosphoramidate
  modified_base 2: mod_base = OTHER; note = 2-fluororibose cytosine
  modified_base 2..3: mod_base = OTHER; note = S-phosphorothioate
  modified_base 3: mod_base = OTHER; note = 2-fluororibose cytosine
  modified_base 3..4: mod_base = OTHER; note = S-phosphorothioate
  modified_base 4: mod_base = OTHER; note = 2-fluororibose cytosine
  modified_base 4..5: mod_base = OTHER; note = S-phosphorothioate
  modified_base 5: mod_base = OTHER; note = 2-fluororibose adenine
  modified_base 5..6: mod_base = OTHER; note = S-phosphorothioate
  modified_base 6: mod_base = OTHER; note = 2-fluororibose guanine
  modified_base 6..7: mod_base = OTHER; note = S-phosphorothioate
  modified_base 7: mod_base = OTHER; note = 2-fluororibose cytosine
  modified_base 7..8: mod_base = OTHER; note = S-phosphorothioate
  modified_base 8: mod_base = OTHER; note = 2-fluororibose adenine
  modified_base 8..9: mod_base = OTHER; note = S-phosphorothioate
  modified_base 9: mod_base = OTHER; note = 2-fluororibose guanine
  modified_base 9..10: mod_base = OTHER; note = S-phosphorothioate
  modified_base 10: mod_base = OTHER; note = 2-fluororibose cytosine
  modified_base 10..11: mod_base = OTHER; note = S-phosphorothioate
  modified_base 11: mod_base = OTHER; note = 2-fluororibose uracil
  modified_base 11..12: mod_base = OTHER; note = S-phosphorothioate
  modified_base 12: mod_base = OTHER; note = 2-fluororibose uracil
  modified_base 12..13: mod_base = OTHER; note = S-phosphorothioate
  modified_base 13: mod_base = OTHER; note = 2-fluororibose cytosine
  modified_base 13..14: mod_base = OTHER; note = S-phosphorothioate
  modified_base 14: mod_base = OTHER; note = 2-fluororibose adenine
  modified_base 14..15: mod_base = OTHER; note = S-phosphorothioate
  modified_base 15: mod_base = OTHER; note = 2-fluororibose guanine
  modified_base 15..16: mod_base = OTHER; note = S-phosphorothioate
  modified_base 16: mod_base = um
  modified_base 16..17: mod_base = OTHER; note = S-phosphorothioate
  modified_base 17: mod_base = cm
  modified_base 17..18: mod_base = OTHER; note = S-phosphorothioate
  modified_base 18: mod_base = cm
  modified_base 18..19: mod_base = OTHER; note = S-phosphorothioate
  modified_base 19: mod_base = cm
  modified_base 19..20: mod_base = OTHER; note = S-phosphorothioate
  modified_base 20: mod_base = um
  modified_base 20..21: mod_base = OTHER; note = S-phosphorothioate
  modified_base 21: mod_base = um
  modified_base 21..22: mod_base = OTHER; note = S-phosphorothioate
  modified_base 22: mod_base = um
  modified_base 22..23: mod_base = OTHER; note = S-phosphorothioate
  modified_base 23: mod_base = cm
  modified_base 23..24: mod_base = OTHER; note = S-phosphorothioate
  modified_base 24: mod_base = OTHER; note = deoxyribose thymine
  modified_base 24..25: mod_base = OTHER; note = S-phosphorothioate
  modified_base 25: mod_base = OTHER; note = deoxyribose 6-amino-9-substituted 8,9-dihydro-7H-purin-8-one
  modified_base 25..26: mod_base = OTHER; note = S-phosphorothioate
  modified_base 26: mod_base = OTHER; note = deoxyribose inosine
  modified_base 26..27: mod_base = OTHER; note S-N-(1,3-dimethylimidazolidin-2-ylidene)phosphoramidate
  modified_base 27: mod_base = um
  modified_base 27..28: mod_base = OTHER; note = S-phosphorothioate
  modified_base 28: mod_base = cm
  modified_base 28..29: mod_base = OTHER; note = S-phosphorothioate
  modified_base 29: mod_base = gm
  modified_base 29..30: mod_base = OTHER; note R-N-(1,3-dimethylimidazolidin-2-ylidene)phosphoramidate
  modified_base 30: mod_base = OTHER; note = 2-O-methylribose adenine
  source 1..30: mol_type = other RNA

SEQ ID NO: 321 - RNA, 30 nt, synthetic construct; identical to SEQ ID NO: 139
  misc_feature 1..30: note = Synthetic: WV-43715
  misc_feature 1..30: note = Synthetic: ADR-0103736
  modified_base 1: mod_base = OTHER; note = 2-fluororibose cytosine
  modified_base 1..2: mod_base = OTHER; note R-N-(1,3-dimethylimidazolidin-2-ylidene)phosphoramidate
  modified_base 2: mod_base = OTHER; note = 2-fluororibose cytosine
  modified_base 2..3: mod_base = OTHER; note = S-phosphorothioate
  modified_base 3: mod_base = OTHER; note = 2-fluororibose cytosine
  modified_base 3..4: mod_base = OTHER; note = S-phosphorothioate
  modified_base 4: mod_base = OTHER; note = 2-fluororibose cytosine
  modified_base 4..5: mod_base = OTHER; note = S-phosphorothioate
  modified_base 5: mod_base = OTHER; note = 2-fluororibose adenine
  modified_base 5..6: mod_base = OTHER; note = S-phosphorothioate
  modified_base 6: mod_base = OTHER; note = 2-fluororibose guanine
  modified_base 6..7: mod_base = OTHER; note = S-phosphorothioate
  modified_base 7: mod_base = OTHER; note = 2-fluororibose cytosine
  modified_base 7..8: mod_base = OTHER; note = S-phosphorothioate
  modified_base 8: mod_base = OTHER; note = 2-fluororibose adenine
  modified_base 8..9: mod_base = OTHER; note = S-phosphorothioate
  modified_base 9: mod_base = OTHER; note = 2-fluororibose guanine
  modified_base 9..10: mod_base = OTHER; note = S-phosphorothioate
  modified_base 10: mod_base = OTHER; note = 2-fluororibose cytosine
  modified_base 10..11: mod_base = OTHER; note = S-phosphorothioate
  modified_base 11: mod_base = OTHER; note = 2-fluororibose uracil
  modified_base 11..12: mod_base = OTHER; note = S-phosphorothioate
  modified_base 12: mod_base = OTHER; note = 2-fluororibose uracil
  modified_base 12..13: mod_base = OTHER; note = S-phosphorothioate
  modified_base 13: mod_base = OTHER; note = 2-fluororibose cytosine
  modified_base 13..14: mod_base = OTHER; note = S-phosphorothioate
  modified_base 14: mod_base = OTHER; note = 2-fluororibose adenine
  modified_base 14..15: mod_base = OTHER; note = S-phosphorothioate
  modified_base 15: mod_base = OTHER; note = 2-fluororibose guanine
  modified_base 15..16: mod_base = OTHER; note = S-phosphorothioate
  modified_base 16: mod_base = um
  modified_base 16..17: mod_base = OTHER; note = S-phosphorothioate
  modified_base 17: mod_base = cm
  modified_base 17..18: mod_base = OTHER; note = S-phosphorothioate
  modified_base 18: mod_base = cm
  modified_base 18..19: mod_base = OTHER; note = S-phosphorothioate
  modified_base 19: mod_base = cm
  modified_base 19..20: mod_base = OTHER; note = S-phosphorothioate
  modified_base 20: mod_base = um
  modified_base 20..21: mod_base = OTHER; note = S-phosphorothioate
  modified_base 21: mod_base = um
  modified_base 21..22: mod_base = OTHER; note = S-phosphorothioate
  modified_base 22: mod_base = um
  modified_base 22..23: mod_base = OTHER; note = S-phosphorothioate
  modified_base 23: mod_base = cm
  modified_base 23..24: mod_base = OTHER; note = S-phosphorothioate
  modified_base 24: mod_base = OTHER; note = deoxyribose thymine
  modified_base 24..25: mod_base = OTHER; note = S-phosphorothioate
  modified_base 25: mod_base = OTHER; note = deoxyribose uracil (position 3 connectivity)
  modified_base 25..26: mod_base = OTHER; note = S-phosphorothioate
  modified_base 26: mod_base = OTHER; note = deoxyribose inosine
  modified_base 26..27: mod_base = OTHER; note S-N-(1,3-dimethylimidazolidin-2-ylidene)phosphoramidate
  modified_base 27: mod_base = um
  modified_base 27..28: mod_base = OTHER; note = S-phosphorothioate
  modified_base 28: mod_base = cm
  modified_base 28..29: mod_base = OTHER; note = S-phosphorothioate
  modified_base 29: mod_base = gm
  modified_base 29..30: mod_base = OTHER; note R-N-(1,3-dimethylimidazolidin-2-ylidene)phosphoramidate
  modified_base 30: mod_base = OTHER; note = 2-O-methylribose adenine
  source 1..30: mol_type = other RNA

SEQ ID NO: 322 - RNA, 30 nt, synthetic construct; identical to SEQ ID NO: 135
  misc_feature 1..30: note = Synthetic: WV-43718
  misc_feature 1..30: note = Synthetic: ADR-0103696
  modified_base 1: mod_base = OTHER; note = 2-fluororibose cytosine
  modified_base 1..2: mod_base = OTHER; note R-N-(1,3-dimethylimidazolidin-2-ylidene)phosphoramidate
  modified_base 2: mod_base = OTHER; note = 2-fluororibose cytosine
  modified_base 2..3: mod_base = OTHER; note = S-phosphorothioate
  modified_base 3: mod_base = OTHER; note = 2-fluororibose cytosine
  modified_base 3..4: mod_base = OTHER; note = S-phosphorothioate
  modified_base 4: mod_base = OTHER; note = 2-fluororibose cytosine
  modified_base 4..5: mod_base = OTHER; note = S-phosphorothioate
  modified_base 5: mod_base = OTHER; note = 2-fluororibose adenine
  modified_base 5..6: mod_base = OTHER; note = S-phosphorothioate
  modified_base 6: mod_base = OTHER; note = 2-fluororibose guanine
  modified_base 6..7: mod_base = OTHER; note = S-phosphorothioate
  modified_base 7: mod_base = OTHER; note = 2-fluororibose cytosine
  modified_base 7..8: mod_base = OTHER; note = S-phosphorothioate
  modified_base 8: mod_base = OTHER; note = 2-fluororibose adenine
  modified_base 8..9: mod_base = OTHER; note = S-phosphorothioate
  modified_base 9: mod_base = OTHER; note = 2-fluororibose guanine
  modified_base 9..10: mod_base = OTHER; note = S-phosphorothioate
  modified_base 10: mod_base = OTHER; note = 2-fluororibose cytosine
  modified_base 10..11: mod_base = OTHER; note = S-phosphorothioate
  modified_base 11: mod_base = OTHER; note = 2-fluororibose uracil
  modified_base 11..12: mod_base = OTHER; note = S-phosphorothioate
  modified_base 12: mod_base = OTHER; note = 2-fluororibose uracil
  modified_base 12..13: mod_base = OTHER; note = S-phosphorothioate
  modified_base 13: mod_base = OTHER; note = 2-fluororibose cytosine
  modified_base 13..14: mod_base = OTHER; note = S-phosphorothioate
  modified_base 14: mod_base = OTHER; note = 2-fluororibose adenine
  modified_base 14..15: mod_base = OTHER; note = S-phosphorothioate
  modified_base 15: mod_base = OTHER; note = 2-fluororibose guanine
  modified_base 15..16: mod_base = OTHER; note = S-phosphorothioate
  modified_base 16: mod_base = OTHER; note = 2-fluororibose uracil
  modified_base 16..17: mod_base = OTHER; note = S-phosphorothioate
  modified_base 17: mod_base = OTHER; note = 2-fluororibose cytosine
  modified_base 17..18: mod_base = OTHER; note = S-phosphorothioate
  modified_base 18: mod_base = OTHER; note = 2-fluororibose cytosine
  modified_base 18..19: mod_base = OTHER; note = S-phosphorothioate
  modified_base 19: mod_base = OTHER; note = 2-fluororibose cytosine
  modified_base 19..20: mod_base = OTHER; note = S-phosphorothioate
  modified_base 20: mod_base = OTHER; note = 2-fluororibose uracil
  modified_base 20..21: mod_base = OTHER; note = S-phosphorothioate
  modified_base 21: mod_base = OTHER; note = 2-fluororibose uracil
  modified_base 21..22: mod_base = OTHER; note = S-phosphorothioate
  modified_base 22: mod_base = OTHER; note = 2-fluororibose uracil
  modified_base 22..23: mod_base = OTHER; note = S-phosphorothioate
  modified_base 23: mod_base = cm
  modified_base 23..24: mod_base = OTHER; note = S-phosphorothioate
  modified_base 24: mod_base = OTHER; note = 2-fluororibose uracil
  modified_base 24..25: mod_base = OTHER; note = S-phosphorothioate
  modified_base 25: mod_base = OTHER; note = deoxyribose 6-amino-9-substituted 8,9-dihydro-7H-purin-8-one
  modified_base 25..26: mod_base = OTHER; note = S-phosphorothioate
  modified_base 26: mod_base = OTHER; note = deoxyribose inosine
  modified_base 26..27: mod_base = OTHER; note S-N-(1,3-dimethylimidazolidin-2-ylidene)phosphoramidate
  modified_base 27: mod_base = um
  modified_base 27..28: mod_base = OTHER; note = S-phosphorothioate
  modified_base 28: mod_base = OTHER; note = 2-fluororibose cytosine
  modified_base 28..29: mod_base = OTHER; note = S-phosphorothioate
  modified_base 29: mod_base = OTHER; note = 2-fluororibose guanine
  modified_base 29..30: mod_base = OTHER; note R-N-(1,3-dimethylimidazolidin-2-ylidene)phosphoramidate
  modified_base 30: mod_base = OTHER; note = 2-O-methylribose adenine
  source 1..30: mol_type = other RNA

SEQ ID NO: 323 - RNA, 30 nt, synthetic construct; identical to SEQ ID NO: 134
  misc_feature 1..30: note = Synthetic: WV-44275
  misc_feature 1..30: note = Synthetic: ADR-0104060
  modified_base 1: mod_base = cm
  modified_base 1..2: mod_base = OTHER; note R-N-(1,3-dimethylimidazolidin-2-ylidene)phosphoramidate
  modified_base 2: mod_base = cm
  modified_base 2..3: mod_base = OTHER; note = S-phosphorothioate
  modified_base 3: mod_base = cm
  modified_base 3..4: mod_base = OTHER; note = S-phosphorothioate
  modified_base 4: mod_base = OTHER; note = 2-fluororibose adenine
  modified_base 4..5: mod_base = OTHER; note = S-phosphorothioate
  modified_base 5: mod_base = OTHER; note = 2-fluororibose guanine
  modified_base 5..6: mod_base = OTHER; note = S-phosphorothioate
  modified_base 6: mod_base = OTHER; note = 2-fluororibose cytosine
  modified_base 7: mod_base = OTHER; note = 2-O-methylribose adenine
  modified_base 7..8: mod_base = OTHER; note = S-phosphorothioate
  modified_base 8: mod_base = OTHER; note = 2-fluororibose guanine
  modified_base 8..9: mod_base = OTHER; note = S-phosphorothioate
  modified_base 9: mod_base = OTHER; note = 2-fluororibose cytosine
  modified_base 10: mod_base = um
  modified_base 10..11: mod_base = OTHER; note = S-phosphorothioate
  modified_base 11: mod_base = OTHER; note = 2-fluororibose uracil
  modified_base 11..12: mod_base = OTHER; note R-N-(1,3-dimethylimidazolidin-2-ylidene)phosphoramidate
  modified_base 12: mod_base = cm
  modified_base 13: mod_base = OTHER; note = 2-fluororibose adenine
  modified_base 13..14: mod_base = OTHER; note = S-phosphorothioate
  modified_base 14: mod_base = OTHER; note = 2-fluororibose guanine
  modified_base 14..15: mod_base = OTHER; note R-N-(1,3-dimethylimidazolidin-2-ylidene)phosphoramidate
  modified_base 15: mod_base = OTHER; note = 2-fluororibose uracil
  modified_base 16: mod_base = cm
  modified_base 16..17: mod_base = OTHER; note = S-phosphorothioate
  modified_base 17: mod_base = OTHER; note = 2-fluororibose cytosine
  modified_base 17..18: mod_base = OTHER; note = S-phosphorothioate
  modified_base 18: mod_base = OTHER; note = 2-fluororibose cytosine
  modified_base 18..19: mod_base = OTHER; note = S-phosphorothioate
  modified_base 19: mod_base = OTHER; note = 2-fluororibose uracil
  modified_base 19..20: mod_base = OTHER; note R-N-(1,3-dimethylimidazolidin-2-ylidene)phosphoramidate
  modified_base 20: mod_base = OTHER; note = 2-fluororibose uracil
  modified_base 20..21: mod_base = OTHER; note = S-phosphorothioate
  modified_base 21: mod_base = um
  modified_base 22: mod_base = OTHER; note = 2-fluororibose cytosine
  modified_base 22..23: mod_base = OTHER; note = S-phosphorothioate
  modified_base 23: mod_base = OTHER; note = 2-fluororibose uracil
  modified_base 23..24: mod_base = OTHER; note = S-phosphorothioate
  modified_base 24: mod_base = OTHER; note = deoxyribose 6-amino-9-substituted 8,9-dihydro-7H-purin-8-one
  modified_base 24..25: mod_base = OTHER; note = S-phosphorothioate
  modified_base 25: mod_base = OTHER; note = deoxyribose inosine
  modified_base 25..26: mod_base = OTHER; note S-N-(1,3-dimethylimidazolidin-2-ylidene)phosphoramidate
  modified_base 26: mod_base = um
  modified_base 27: mod_base = OTHER; note = 2-fluororibose cytosine
  modified_base 27..28: mod_base = OTHER; note = S-phosphorothioate
  modified_base 28: mod_base = gm
  modified_base 28..29: mod_base = OTHER; note = S-phosphorothioate
  modified_base 29: mod_base = OTHER; note = 2-O-methylribose adenine
  modified_base 29..30: mod_base = OTHER; note R-N-(1,3-dimethylimidazolidin-2-ylidene)phosphoramidate
  modified_base 30: mod_base = um
  source 1..30: mol_type = other RNA

SEQ ID NO: 324 - RNA, 30 nt, synthetic construct; identical to SEQ ID NO: 134
  misc_feature 1..30: note = Synthetic: WV-44274
  misc_feature 1..30: note = Synthetic: ADR-0104041
  modified_base 1: mod_base = cm
  modified_base 1..2: mod_base = OTHER; note R-N-(1,3-dimethylimidazolidin-2-ylidene)phosphoramidate
  modified_base 2: mod_base = cm
  modified_base 2..3: mod_base = OTHER; note = S-phosphorothioate
  modified_base 3: mod_base = cm
  modified_base 3..4: mod_base = OTHER; note = S-phosphorothioate
  modified_base 4: mod_base = OTHER; note = 2-fluororibose adenine
  modified_base 4..5: mod_base = OTHER; note = S-phosphorothioate
  modified_base 5: mod_base = OTHER; note = 2-fluororibose guanine
  modified_base 5..6: mod_base = OTHER; note = S-phosphorothioate
  modified_base 6: mod_base = OTHER; note = 2-fluororibose cytosine
  modified_base 6..7: mod_base = OTHER; note = S-phosphorothioate
  modified_base 7: mod_base = OTHER; note = 2-O-methylribose adenine
  modified_base 7..8: mod_base = OTHER; note = S-phosphorothioate
  modified_base 8: mod_base = OTHER; note = 2-fluororibose guanine
  modified_base 8..9: mod_base = OTHER; note = S-phosphorothioate
  modified_base 9: mod_base = OTHER; note = 2-fluororibose cytosine
  modified_base 9..10: mod_base = OTHER; note = S-phosphorothioate
  modified_base 10: mod_base = um
  modified_base 10..11: mod_base = OTHER; note = S-phosphorothioate
  modified_base 11: mod_base = OTHER; note = 2-fluororibose uracil
  modified_base 11..12: mod_base = OTHER; note R-N-(1,3-dimethylimidazolidin-2-ylidene)phosphoramidate
  modified_base 12: mod_base = cm
  modified_base 12..13: mod_base = OTHER; note = S-phosphorothioate
  modified_base 13: mod_base = OTHER; note = 2-fluororibose adenine
  modified_base 13..14: mod_base = OTHER; note = S-phosphorothioate
  modified_base 14: mod_base = OTHER; note = 2-fluororibose guanine
  modified_base 14..15: mod_base = OTHER; note R-N-(1,3-dimethylimidazolidin-2-ylidene)phosphoramidate
  modified_base 15: mod_base = OTHER; note = 2-fluororibose uracil
  modified_base 15..16: mod_base = OTHER; note = S-phosphorothioate
  modified_base 16: mod_base = cm
  modified_base 16..17: mod_base = OTHER; note = S-phosphorothioate
  modified_base 17: mod_base = OTHER; note = 2-fluororibose cytosine
  modified_base 17..18: mod_base = OTHER; note = S-phosphorothioate
  modified_base 18: mod_base = OTHER; note = 2-fluororibose cytosine
  modified_base 18..19: mod_base = OTHER; note = S-phosphorothioate
  modified_base 19: mod_base = OTHER; note = 2-fluororibose uracil
  modified_base 19..20: mod_base = OTHER; note R-N-(1,3-dimethylimidazolidin-2-ylidene)phosphoramidate
  modified_base 20: mod_base = OTHER; note = 2-fluororibose uracil
  modified_base 20..21: mod_base = OTHER; note = S-phosphorothioate
  modified_base 21: mod_base = um
  modified_base 21..22: mod_base = OTHER; note = S-phosphorothioate
  modified_base 22: mod_base = OTHER; note = 2-fluororibose cytosine
  modified_base 22..23: mod_base = OTHER; note = S-phosphorothioate
  modified_base 23: mod_base = OTHER; note = 2-fluororibose uracil
  modified_base 23..24: mod_base = OTHER; note = S-phosphorothioate
  modified_base 24: mod_base = OTHER; note = deoxyribose 6-amino-9-substituted 8,9-dihydro-7H-purin-8-one
  modified_base 24..25: mod_base = OTHER; note = S-phosphorothioate
  modified_base 25: mod_base = OTHER; note = deoxyribose inosine
  modified_base 25..26: mod_base = OTHER; note S-N-(1,3-dimethylimidazolidin-2-ylidene)phosphoramidate
  modified_base 26: mod_base = um
  modified_base 26..27: mod_base = OTHER; note = S-phosphorothioate
  modified_base 27: mod_base = OTHER; note = 2-fluororibose cytosine
  modified_base 27..28: mod_base = OTHER; note = S-phosphorothioate
  modified_base 28: mod_base = gm
  modified_base 28..29: mod_base = OTHER; note = S-phosphorothioate
  modified_base 29: mod_base = OTHER; note = 2-O-methylribose adenine
  modified_base 29..30: mod_base = OTHER; note R-N-(1,3-dimethylimidazolidin-2-ylidene)phosphoramidate
  modified_base 30: mod_base = um
  source 1..30: mol_type = other RNA

SEQ ID NO: 325 - RNA, 30 nt, synthetic construct; identical to SEQ ID NO: 134
  misc_feature 1..30: note = Synthetic: WV-44273
  misc_feature 1..30: note = Synthetic: ADR-0104055
  modified_base 1: mod_base = cm
  modified_base 1..2: mod_base = OTHER; note R-N-(1,3-dimethylimidazolidin-2-ylidene)phosphoramidate
  modified_base 2: mod_base = cm
  modified_base 2..3: mod_base = OTHER; note = S-phosphorothioate
  modified_base 3: mod_base = cm
  modified_base 3..4: mod_base = OTHER; note = S-phosphorothioate
  modified_base 4: mod_base = OTHER; note = 2-fluororibose adenine
  modified_base 4..5: mod_base = OTHER; note = S-phosphorothioate
  modified_base 5: mod_base = OTHER; note = 2-fluororibose guanine
  modified_base 5..6: mod_base = OTHER; note = S-phosphorothioate
  modified_base 6: mod_base = OTHER; note = 2-fluororibose cytosine
  modified_base 7: mod_base = OTHER; note = 2-O-methylribose adenine
  modified_base 7..8: mod_base = OTHER; note = S-phosphorothioate
  modified_base 8: mod_base = OTHER; note = 2-fluororibose guanine
  modified_base 8..9: mod_base = OTHER; note = S-phosphorothioate
  modified_base 9: mod_base = OTHER; note = 2-fluororibose cytosine
  modified_base 10: mod_base = um
  modified_base 10..11: mod_base = OTHER; note = S-phosphorothioate
  modified_base 11: mod_base = OTHER; note = 2-fluororibose uracil
  modified_base 11..12: mod_base = OTHER; note R-N-(1,3-dimethylimidazolidin-2-ylidene)phosphoramidate
  modified_base 12: mod_base = cm
  modified_base 13: mod_base = OTHER; note = 2-fluororibose adenine
  modified_base 13..14: mod_base = OTHER; note = S-phosphorothioate
  modified_base 14: mod_base = OTHER; note = 2-fluororibose guanine
  modified_base 14..15: mod_base = OTHER; note R-N-(1,3-dimethylimidazolidin-2-ylidene)phosphoramidate
  modified_base 15: mod_base = OTHER; note = 2-fluororibose uracil
  modified_base 16: mod_base = cm
  modified_base 16..17: mod_base = OTHER; note = S-phosphorothioate
  modified_base 17: mod_base = OTHER; note = 2-fluororibose cytosine
  modified_base 17..18: mod_base = OTHER; note = S-phosphorothioate
  modified_base 18: mod_base = OTHER; note = 2-fluororibose cytosine
  modified_base 18..19: mod_base = OTHER; note = S-phosphorothioate
  modified_base 19: mod_base = OTHER; note = 2-fluororibose uracil
  modified_base 19..20: mod_base = OTHER; note = S-phosphorothioate
  modified_base 20: mod_base = OTHER; note = 2-fluororibose uracil
  modified_base 20..21: mod_base = OTHER; note = S-phosphorothioate
  modified_base 21: mod_base = um
  modified_base 22: mod_base = OTHER; note = 2-fluororibose cytosine
  modified_base 22..23: mod_base = OTHER; note = S-phosphorothioate
  modified_base 23: mod_base = OTHER; note = 2-fluororibose uracil
  modified_base 23..24: mod_base = OTHER; note = S-phosphorothioate
  modified_base 24: mod_base = OTHER; note = deoxyribose 6-amino-9-substituted 8,9-dihydro-7H-purin-8-one
  modified_base 24..25: mod_base = OTHER; note = S-phosphorothioate
  modified_base 25: mod_base = OTHER; note = deoxyribose inosine
  modified_base 25..26: mod_base = OTHER; note S-N-(1,3-dimethylimidazolidin-2-ylidene)phosphoramidate
  modified_base 26: mod_base = um
  modified_base 27: mod_base = OTHER; note = 2-fluororibose cytosine
  modified_base 27..28: mod_base = OTHER; note = S-phosphorothioate
  modified_base 28: mod_base = gm
  modified_base 28..29: mod_base = OTHER; note = S-phosphorothioate
  modified_base 29: mod_base = OTHER; note = 2-O-methylribose adenine
  modified_base 29..30: mod_base = OTHER; note R-N-(1,3-dimethylimidazolidin-2-ylidene)phosphoramidate
  modified_base 30: mod_base = um
  source 1..30: mol_type = other RNA

SEQ ID NO: 326 - RNA, 30 nt, synthetic construct; identical to SEQ ID NO: 134
  misc_feature 1..30: note = Synthetic: WV-44272
  misc_feature 1..30: note = Synthetic: ADR-0104040
  modified_base 1: mod_base = cm
  modified_base 1..2: mod_base = OTHER; note R-N-(1,3-dimethylimidazolidin-2-ylidene)phosphoramidate
  modified_base 2: mod_base = cm
  modified_base 2..3: mod_base = OTHER; note = S-phosphorothioate
  modified_base 3: mod_base = cm
  modified_base 3..4: mod_base = OTHER; note = S-phosphorothioate
  modified_base 4: mod_base = OTHER; note = 2-fluororibose adenine
  modified_base 4..5: mod_base = OTHER; note = S-phosphorothioate
  modified_base 5: mod_base = OTHER; note = 2-fluororibose guanine
  modified_base 5..6: mod_base = OTHER; note = S-phosphorothioate
  modified_base 6: mod_base = OTHER; note = 2-fluororibose cytosine
  modified_base 6..7: mod_base = OTHER; note = S-phosphorothioate
  modified_base 7: mod_base = OTHER; note = 2-O-methylribose adenine
  modified_base 7..8: mod_base = OTHER; note = S-phosphorothioate
  modified_base 8: mod_base = OTHER; note = 2-fluororibose guanine
  modified_base 8..9: mod_base = OTHER; note = S-phosphorothioate
  modified_base 9: mod_base = OTHER; note = 2-fluororibose cytosine
  modified_base 9..10: mod_base = OTHER; note = S-phosphorothioate
  modified_base 10: mod_base = um
  modified_base 10..11: mod_base = OTHER; note = S-phosphorothioate
  modified_base 11: mod_base = OTHER; note = 2-fluororibose uracil
  modified_base 11..12: mod_base = OTHER; note R-N-(1,3-dimethylimidazolidin-2-ylidene)phosphoramidate
  modified_base 12: mod_base = cm
  modified_base 12..13: mod_base = OTHER; note = S-phosphorothioate
  modified_base 13: mod_base = OTHER; note = 2-fluororibose adenine
  modified_base 13..14: mod_base = OTHER; note = S-phosphorothioate
  modified_base 14: mod_base = OTHER; note = 2-fluororibose guanine
  modified_base 14..15: mod_base = OTHER; note R-N-(1,3-dimethylimidazolidin-2-ylidene)phosphoramidate
  modified_base 15: mod_base = OTHER; note = 2-fluororibose uracil
  modified_base 15..16: mod_base = OTHER; note = S-phosphorothioate
  modified_base 16: mod_base = cm
  modified_base 16..17: mod_base = OTHER; note = S-phosphorothioate
  modified_base 17: mod_base = OTHER; note = 2-fluororibose cytosine
  modified_base 17..18: mod_base = OTHER; note = S-phosphorothioate
  modified_base 18: mod_base = OTHER; note = 2-fluororibose cytosine
  modified_base 18..19: mod_base = OTHER; note = S-phosphorothioate
  modified_base 19: mod_base = OTHER; note = 2-fluororibose uracil
  modified_base 19..20: mod_base = OTHER; note = S-phosphorothioate
  modified_base 20: mod_base = OTHER; note = 2-fluororibose uracil
  modified_base 20..21: mod_base = OTHER; note = S-phosphorothioate
  modified_base 21: mod_base = um
  modified_base 21..22: mod_base = OTHER; note = S-phosphorothioate
  modified_base 22: mod_base = OTHER; note = 2-fluororibose cytosine
  modified_base 22..23: mod_base = OTHER; note = S-phosphorothioate
  modified_base 23: mod_base = OTHER; note = 2-fluororibose uracil
  modified_base 23..24: mod_base = OTHER; note = S-phosphorothioate
  modified_base 24: mod_base = OTHER; note = deoxyribose 6-amino-9-substituted 8,9-dihydro-7H-purin-8-one
  modified_base 24..25: mod_base = OTHER; note = S-phosphorothioate
  modified_base 25: mod_base = OTHER; note = deoxyribose inosine
  modified_base 25..26: mod_base = OTHER; note S-N-(1,3-dimethylimidazolidin-2-ylidene)phosphoramidate
  modified_base 26: mod_base = um
  modified_base 26..27: mod_base = OTHER; note = S-phosphorothioate
  modified_base 27: mod_base = OTHER; note = 2-fluororibose cytosine
  modified_base 27..28: mod_base = OTHER; note = S-phosphorothioate
  modified_base 28: mod_base = gm
  modified_base 28..29: mod_base = OTHER; note = S-phosphorothioate
  modified_base 29: mod_base = OTHER; note = 2-O-methylribose adenine
  modified_base 29..30: mod_base = OTHER; note R-N-(1,3-dimethylimidazolidin-2-ylidene)phosphoramidate
  modified_base 30: mod_base = um
  source 1..30: mol_type = other RNA

SEQ ID NO: 327 - RNA, 30 nt, synthetic construct; identical to SEQ ID NO: 134
  misc_feature 1..30: note = Synthetic: WV-44271
  misc_feature 1..30: note = Synthetic: ADR-0104054
  modified_base 1: mod_base = cm
  modified_base 1..2: mod_base = OTHER; note R-N-(1,3-dimethylimidazolidin-2-ylidene)phosphoramidate
  modified_base 2: mod_base = cm
  modified_base 2..3: mod_base = OTHER; note = S-phosphorothioate
  modified_base 3: mod_base = cm
  modified_base 3..4: mod_base = OTHER; note = S-phosphorothioate
  modified_base 4: mod_base = OTHER; note = 2-fluororibose adenine
  modified_base 4..5: mod_base = OTHER; note = S-phosphorothioate
  modified_base 5: mod_base = OTHER; note = 2-fluororibose guanine
  modified_base 5..6: mod_base = OTHER; note = S-phosphorothioate
  modified_base 6: mod_base = OTHER; note = 2-fluororibose cytosine
  modified_base 7: mod_base = OTHER; note = 2-O-methylribose adenine
  modified_base 7..8: mod_base = OTHER; note = S-phosphorothioate
  modified_base 8: mod_base = OTHER; note = 2-fluororibose guanine
  modified_base 8..9: mod_base = OTHER; note = S-phosphorothioate
  modified_base 9: mod_base = OTHER; note = 2-fluororibose cytosine
  modified_base 10: mod_base = um
  modified_base 10..11: mod_base = OTHER; note = S-phosphorothioate
  modified_base 11: mod_base = OTHER; note = 2-fluororibose uracil
  modified_base 11..12: mod_base = OTHER; note = S-phosphorothioate
  modified_base 12: mod_base = cm
  modified_base 13: mod_base = OTHER; note = 2-fluororibose adenine
  modified_base 13..14: mod_base = OTHER; note = S-phosphorothioate
  modified_base 14: mod_base = OTHER; note = 2-fluororibose guanine
  modified_base 14..15: mod_base = OTHER; note = S-phosphorothioate
  modified_base 15: mod_base = OTHER; note = 2-fluororibose uracil
  modified_base 16: mod_base = cm
  modified_base 16..17: mod_base = OTHER; note = S-phosphorothioate
  modified_base 17: mod_base = OTHER; note = 2-fluororibose cytosine
  modified_base 17..18: mod_base = OTHER; note = S-phosphorothioate
  modified_base 18: mod_base = OTHER; note = 2-fluororibose cytosine
  modified_base 18..19: mod_base = OTHER; note = S-phosphorothioate
  modified_base 19: mod_base = OTHER; note = 2-fluororibose uracil
  modified_base 19..20: mod_base = OTHER; note = S-phosphorothioate
  modified_base 20: mod_base = OTHER; note = 2-fluororibose uracil
  modified_base 20..21: mod_base = OTHER; note = S-phosphorothioate
  modified_base 21: mod_base = um
  modified_base 22: mod_base = OTHER; note = 2-fluororibose cytosine
  modified_base 22..23: mod_base = OTHER; note = S-phosphorothioate
  modified_base 23: mod_base = OTHER; note = 2-fluororibose uracil
  modified_base 23..24: mod_base = OTHER; note = S-phosphorothioate
  modified_base 24: mod_base = OTHER; note = deoxyribose 6-amino-9-substituted 8,9-dihydro-7H-purin-8-one
  modified_base 24..25: mod_base = OTHER; note = S-phosphorothioate
  modified_base 25: mod_base = OTHER; note = deoxyribose inosine
  modified_base 25..26: mod_base = OTHER; note S-N-(1,3-dimethylimidazolidin-2-ylidene)phosphoramidate
  modified_base 26: mod_base = um
  modified_base 27: mod_base = OTHER; note = 2-fluororibose cytosine
  modified_base 27..28: mod_base = OTHER; note = S-phosphorothioate
  modified_base 28: mod_base = gm
  modified_base 28..29: mod_base = OTHER; note = S-phosphorothioate
  modified_base 29: mod_base = OTHER; note = 2-O-methylribose adenine
  modified_base 29..30: mod_base = OTHER; note R-N-(1,3-dimethylimidazolidin-2-ylidene)phosphoramidate
  modified_base 30: mod_base = um
  source 1..30: mol_type = other RNA

SEQ ID NO: 328 - RNA, 30 nt, synthetic construct; identical to SEQ ID NO: 134
  misc_feature 1..30: note = Synthetic: WV-44270
  misc_feature 1..30: note = Synthetic: ADR-0104053
  modified_base 1: mod_base = cm
  modified_base 1..2: mod_base = OTHER; note R-N-(1,3-dimethylimidazolidin-2-ylidene)phosphoramidate
  modified_base 2: mod_base = cm
  modified_base 2..3: mod_base = OTHER; note = S-phosphorothioate
  modified_base 3: mod_base = cm
  modified_base 3..4: mod_base = OTHER; note = S-phosphorothioate
  modified_base 4: mod_base = OTHER; note = 2-fluororibose adenine
  modified_base 4..5: mod_base = OTHER; note = S-phosphorothioate
  modified_base 5: mod_base = OTHER; note = 2-fluororibose guanine
  modified_base 5..6: mod_base = OTHER; note = S-phosphorothioate
  modified_base 6: mod_base = OTHER; note = 2-fluororibose cytosine
  modified_base 7: mod_base = OTHER; note = 2-O-methylribose adenine
  modified_base 7..8: mod_base = OTHER; note = S-phosphorothioate
  modified_base 8: mod_base = OTHER; note = 2-fluororibose guanine
  modified_base 8..9: mod_base = OTHER; note = S-phosphorothioate
  modified_base 9: mod_base = OTHER; note = 2-fluororibose cytosine
  modified_base 10: mod_base = um
  modified_base 10..11: mod_base = OTHER; note = S-phosphorothioate
  modified_base 11: mod_base = OTHER; note = 2-fluororibose uracil
  modified_base 11..12: mod_base = OTHER; note = S-phosphorothioate
  modified_base 12: mod_base = cm
  modified_base 13: mod_base = OTHER; note = 2-fluororibose adenine
  modified_base 13..14: mod_base = OTHER; note = S-phosphorothioate
  modified_base 14: mod_base = OTHER; note = 2-fluororibose guanine
  modified_base 14..15: mod_base = OTHER; note = S-phosphorothioate
  modified_base 15: mod_base = OTHER; note = 2-fluororibose uracil
  modified_base 15..16: mod_base = OTHER; note = S-phosphorothioate
  modified_base 16: mod_base = cm
  modified_base 17: mod_base = OTHER; note = 2-fluororibose cytosine
  modified_base 17..18: mod_base = OTHER; note = S-phosphorothioate
  modified_base 18: mod_base = OTHER; note = 2-fluororibose cytosine
  modified_base 18..19: mod_base = OTHER; note = S-phosphorothioate
  modified_base 19: mod_base = OTHER; note = 2-fluororibose uracil
  modified_base 19..20: mod_base = OTHER; note = S-phosphorothioate
  modified_base 20: mod_base = OTHER; note = 2-fluororibose uracil
  modified_base 20..21: mod_base = OTHER; note = S-phosphorothioate
  modified_base 21: mod_base = um
  modified_base 22: mod_base = OTHER; note = 2-fluororibose cytosine
  modified_base 22..23: mod_base = OTHER; note = S-phosphorothioate
  modified_base 23: mod_base = OTHER; note = 2-fluororibose uracil
  modified_base 23..24: mod_base = OTHER; note = S-phosphorothioate
  modified_base 24: mod_base = OTHER; note = deoxyribose 6-amino-9-substituted 8,9-dihydro-7H-purin-8-one
  modified_base 24..25: mod_base = OTHER; note = S-phosphorothioate
  modified_base 25: mod_base = OTHER; note = deoxyribose inosine
  modified_base 25..26: mod_base = OTHER; note S-N-(1,3-dimethylimidazolidin-2-ylidene)phosphoramidate
  modified_base 26: mod_base = um
  modified_base 27: mod_base = OTHER; note = 2-fluororibose cytosine
  modified_base 27..28: mod_base = OTHER; note = S-phosphorothioate
  modified_base 28: mod_base = gm
  modified_base 28..29: mod_base = OTHER; note = S-phosphorothioate
  modified_base 29: mod_base = OTHER; note = 2-O-methylribose adenine
  modified_base 29..30: mod_base = OTHER; note R-N-(1,3-dimethylimidazolidin-2-ylidene)phosphoramidate
  modified_base 30: mod_base = um
  source 1..30: mol_type = other RNA

SEQ ID NO: 329 - RNA, 30 nt, synthetic construct; identical to SEQ ID NO: 134
  misc_feature 1..30: note = Synthetic: WV-44269
  misc_feature 1..30: note = Synthetic: ADR-0104039
  modified_base 1: mod_base = cm
  modified_base 1..2: mod_base = OTHER; note R-N-(1,3-dimethylimidazolidin-2-ylidene)phosphoramidate
  modified_base 2: mod_base = cm
  modified_base 2..3: mod_base = OTHER; note = S-phosphorothioate
  modified_base 3: mod_base = cm
  modified_base 3..4: mod_base = OTHER; note = S-phosphorothioate
  modified_base 4: mod_base = OTHER; note = 2-fluororibose adenine
  modified_base 4..5: mod_base = OTHER; note = S-phosphorothioate
  modified_base 5: mod_base = OTHER; note = 2-fluororibose guanine
  modified_base 5..6: mod_base = OTHER; note = S-phosphorothioate
  modified_base 6: mod_base = OTHER; note = 2-fluororibose cytosine
  modified_base 6..7: mod_base = OTHER; note = S-phosphorothioate
  modified_base 7: mod_base = OTHER; note = 2-O-methylribose adenine
  modified_base 7..8: mod_base = OTHER; note = S-phosphorothioate
  modified_base 8: mod_base = OTHER; note = 2-fluororibose guanine
  modified_base 8..9: mod_base = OTHER; note = S-phosphorothioate
  modified_base 9: mod_base = OTHER; note = 2-fluororibose cytosine
  modified_base 9..10: mod_base = OTHER; note = S-phosphorothioate
  modified_base 10: mod_base = um
  modified_base 10..11: mod_base = OTHER; note = S-phosphorothioate
  modified_base 11: mod_base = OTHER; note = 2-fluororibose uracil
  modified_base 11..12: mod_base = OTHER; note = S-phosphorothioate
  modified_base 12: mod_base = cm
  modified_base 12..13: mod_base = OTHER; note = S-phosphorothioate
  modified_base 13: mod_base = OTHER; note = 2-fluororibose adenine
  modified_base 13..14: mod_base = OTHER; note = S-phosphorothioate
  modified_base 14: mod_base = OTHER; note = 2-fluororibose guanine
  modified_base 14..15: mod_base = OTHER; note = S-phosphorothioate
  modified_base 15: mod_base = OTHER; note = 2-fluororibose uracil
  modified_base 15..16: mod_base = OTHER; note = S-phosphorothioate
  modified_base 16: mod_base = cm
  modified_base 16..17: mod_base = OTHER; note = S-phosphorothioate
  modified_base 17: mod_base = OTHER; note = 2-fluororibose cytosine
  modified_base 17..18: mod_base = OTHER; note = S-phosphorothioate
  modified_base 18: mod_base = OTHER; note = 2-fluororibose cytosine
  modified_base 18..19: mod_base = OTHER; note = S-phosphorothioate
  modified_base 19: mod_base = OTHER; note = 2-fluororibose uracil
  modified_base 19..20: mod_base = OTHER; note = S-phosphorothioate
  modified_base 20: mod_base = OTHER; note = 2-fluororibose uracil
  modified_base 20..21: mod_base = OTHER; note = S-phosphorothioate
  modified_base 21: mod_base = um
  modified_base 21..22: mod_base = OTHER; note = S-phosphorothioate
  modified_base 22: mod_base = OTHER; note = 2-fluororibose cytosine
  modified_base 22..23: mod_base = OTHER; note = S-phosphorothioate
  modified_base 23: mod_base = OTHER; note = 2-fluororibose uracil
  modified_base 23..24: mod_base = OTHER; note = S-phosphorothioate
  modified_base 24: mod_base = OTHER; note = deoxyribose 6-amino-9-substituted 8,9-dihydro-7H-purin-8-one
  modified_base 24..25: mod_base = OTHER; note = S-phosphorothioate
  modified_base 25: mod_base = OTHER; note = deoxyribose inosine
  modified_base 25..26: mod_base = OTHER; note S-N-(1,3-dimethylimidazolidin-2-ylidene)phosphoramidate
  modified_base 26: mod_base = um
  modified_base 26..27: mod_base = OTHER; note = S-phosphorothioate
  modified_base 27: mod_base = OTHER; note = 2-fluororibose cytosine
  modified_base 27..28: mod_base = OTHER; note = S-phosphorothioate
  modified_base 28: mod_base = gm
  modified_base 28..29: mod_base = OTHER; note = S-phosphorothioate
  modified_base 29: mod_base = OTHER; note = 2-O-methylribose adenine
  modified_base 29..30: mod_base = OTHER; note R-N-(1,3-dimethylimidazolidin-2-ylidene)phosphoramidate
  modified_base 30: mod_base = um
  source 1..30: mol_type = other RNA

SEQ ID NO: 330 - RNA, 30 nt, synthetic construct; identical to SEQ ID NO: 134
  misc_feature 1..30: note = Synthetic: WV-44226
  misc_feature 1..30: note = Synthetic: ADR-0104026
  modified_base 1: mod_base = cm
  modified_base 1..2: mod_base = OTHER; note R-N-(1,3-dimethylimidazolidin-2-ylidene)phosphoramidate
  modified_base 2: mod_base = cm
  modified_base 2..3: mod_base = OTHER; note = S-phosphorothioate
  modified_base 3: mod_base = cm
  modified_base 3..4: mod_base = OTHER; note = S-phosphorothioate
  modified_base 4: mod_base = OTHER; note = 2-fluororibose adenine
  modified_base 4..5: mod_base = OTHER; note = S-phosphorothioate
  modified_base 5: mod_base = OTHER; note = 2-fluororibose guanine
  modified_base 5..6: mod_base = OTHER; note = S-phosphorothioate
  modified_base 6: mod_base = OTHER; note = 2-fluororibose cytosine
  modified_base 6..7: mod_base = OTHER; note = S-phosphorothioate
  modified_base 7: mod_base = OTHER; note = 2-fluororibose adenine
  modified_base 7..8: mod_base = OTHER; note = S-phosphorothioate
  modified_base 8: mod_base = OTHER; note = 2-fluororibose guanine
  modified_base 8..9: mod_base = OTHER; note = S-phosphorothioate
  modified_base 9: mod_base = OTHER; note = 2-fluororibose cytosine
  modified_base 9..10: mod_base = OTHER; note = S-phosphorothioate
  modified_base 10: mod_base = OTHER; note = 2-fluororibose uracil
  modified_base 10..11: mod_base = OTHER; note = S-phosphorothioate
  modified_base 11: mod_base = OTHER; note = 2-fluororibose uracil
  modified_base 11..12: mod_base = OTHER; note = S-phosphorothioate
  modified_base 12: mod_base = OTHER; note = 2-fluororibose cytosine
  modified_base 12..13: mod_base = OTHER; note = S-phosphorothioate
  modified_base 13: mod_base = OTHER; note = 2-fluororibose adenine
  modified_base 13..14: mod_base = OTHER; note = S-phosphorothioate
  modified_base 14: mod_base = OTHER; note = 2-fluororibose guanine
  modified_base 14..15: mod_base = OTHER; note = S-phosphorothioate
  modified_base 15: mod_base = OTHER; note = 2-fluororibose uracil
  modified_base 15..16: mod_base = OTHER; note = S-phosphorothioate
  modified_base 16: mod_base = OTHER; note = 2-fluororibose cytosine
  modified_base 16..17: mod_base = OTHER; note = S-phosphorothioate
  modified_base 17: mod_base = OTHER; note = 2-fluororibose cytosine
  modified_base 17..18: mod_base = OTHER; note = S-phosphorothioate
  modified_base 18: mod_base = OTHER; note = 2-fluororibose cytosine
  modified_base 18..19: mod_base = OTHER; note = S-phosphorothioate
  modified_base 19: mod_base = OTHER; note = 2-fluororibose uracil
  modified_base 19..20: mod_base = OTHER; note = S-phosphorothioate
  modified_base 20: mod_base = OTHER; note = 2-fluororibose uracil
  modified_base 20..21: mod_base = OTHER; note = S-phosphorothioate
  modified_base 21: mod_base = um
  modified_base 21..22: mod_base = OTHER; note = S-phosphorothioate
  modified_base 22: mod_base = OTHER; note = 2-fluororibose cytosine
  modified_base 22..23: mod_base = OTHER; note = S-phosphorothioate
  modified_base 23: mod_base = OTHER; note = 2-fluororibose uracil
  modified_base 23..24: mod_base = OTHER; note = S-phosphorothioate
  modified_base 24: mod_base = OTHER; note = deoxyribose 6-amino-9-substituted 8,9-dihydro-7H-purin-8-one
  modified_base 24..25: mod_base = OTHER; note = S-phosphorothioate
  modified_base 25: mod_base = OTHER; note = deoxyribose inosine
  modified_base 25..26: mod_base = OTHER; note S-N-(1,3-dimethylimidazolidin-2-ylidene)phosphoramidate
  modified_base 26: mod_base = um
  modified_base 26..27: mod_base = OTHER; note = S-phosphorothioate
  modified_base 27: mod_base = OTHER; note = 2-fluororibose cytosine
  modified_base 27..28: mod_base = OTHER; note = S-phosphorothioate
  modified_base 28: mod_base = gm
  modified_base 28..29: mod_base = OTHER; note = S-phosphorothioate
  modified_base 29: mod_base = OTHER; note = 2-O-methylribose adenine
  modified_base 29..30: mod_base = OTHER; note R-N-(1,3-dimethylimidazolidin-2-ylidene)phosphoramidate
  modified_base 30: mod_base = um
  source 1..30: mol_type = other RNA

SEQ ID NO: 331 - RNA, 30 nt, synthetic construct; identical to SEQ ID NO: 134
  misc_feature 1..30: note = Synthetic: WV-44227
  misc_feature 1..30: note = Synthetic: ADR-0104027
  modified_base 1: mod_base = cm
  modified_base 1..2: mod_base = OTHER; note R-N-(1,3-dimethylimidazolidin-2-ylidene)phosphoramidate
  modified_base 2: mod_base = cm
  modified_base 2..3: mod_base = OTHER; note = S-phosphorothioate
  modified_base 3: mod_base = cm
  modified_base 3..4: mod_base = OTHER; note = S-phosphorothioate
  modified_base 4: mod_base = OTHER; note = 2-fluororibose adenine
  modified_base 4..5: mod_base = OTHER; note = S-phosphorothioate
  modified_base 5: mod_base = OTHER; note = 2-fluororibose guanine
  modified_base 5..6: mod_base = OTHER; note = S-phosphorothioate
  modified_base 6: mod_base = OTHER; note = 2-fluororibose cytosine
  modified_base 6..7: mod_base = OTHER; note = S-phosphorothioate
  modified_base 7: mod_base = OTHER; note = 2-fluororibose adenine
  modified_base 7..8: mod_base = OTHER; note = S-phosphorothioate
  modified_base 8: mod_base = OTHER; note = 2-fluororibose guanine
  modified_base 8..9: mod_base = OTHER; note = S-phosphorothioate
  modified_base 9: mod_base = OTHER; note = 2-fluororibose cytosine
  modified_base 9..10: mod_base = OTHER; note = S-phosphorothioate
  modified_base 10: mod_base = OTHER; note = 2-fluororibose uracil
  modified_base 10..11: mod_base = OTHER; note = S-phosphorothioate
  modified_base 11: mod_base = OTHER; note = 2-fluororibose uracil
  modified_base 11..12: mod_base = OTHER; note = S-phosphorothioate
  modified_base 12: mod_base = OTHER; note = 2-fluororibose cytosine
  modified_base 12..13: mod_base = OTHER; note = S-phosphorothioate
  modified_base 13: mod_base = OTHER; note = 2-fluororibose adenine
  modified_base 13..14: mod_base = OTHER; note = S-phosphorothioate
  modified_base 14: mod_base = OTHER; note = 2-fluororibose guanine
  modified_base 14..15: mod_base = OTHER; note = S-phosphorothioate
  modified_base 15: mod_base = OTHER; note = 2-fluororibose uracil
  modified_base 15..16: mod_base = OTHER; note = S-phosphorothioate
  modified_base 16: mod_base = OTHER; note = 2-fluororibose cytosine
  modified_base 16..17: mod_base = OTHER; note = S-phosphorothioate
  modified_base 17: mod_base = OTHER; note = 2-fluororibose cytosine
  modified_base 18: mod_base = OTHER; note = 2-fluororibose cytosine
  modified_base 18..19: mod_base = OTHER; note R-N-(1,3-dimethylimidazolidin-2-ylidene)phosphoramidate
  modified_base 19: mod_base = OTHER; note = 2-fluororibose uracil
  modified_base 20: mod_base = OTHER; note = 2-fluororibose uracil
  modified_base 20..21: mod_base = OTHER; note R-N-(1,3-dimethylimidazolidin-2-ylidene)phosphoramidate
  modified_base 21: mod_base = OTHER; note = 2-fluororibose uracil
  modified_base 21..22: mod_base = OTHER; note = S-phosphorothioate
  modified_base 22: mod_base = OTHER; note = 2-fluororibose cytosine
  modified_base 22..23: mod_base = OTHER; note = S-phosphorothioate
  modified_base 23: mod_base = OTHER; note = 2-fluororibose uracil
  modified_base 23..24: mod_base = OTHER; note = S-phosphorothioate
  modified_base 24: mod_base = OTHER; note = deoxyribose 6-amino-9-substituted 8,9-dihydro-7H-purin-8-one
  modified_base 24..25: mod_base = OTHER; note = S-phosphorothioate
  modified_base 25: mod_base = OTHER; note = deoxyribose inosine
  modified_base 25..26: mod_base = OTHER; note S-N-(1,3-dimethylimidazolidin-2-ylidene)phosphoramidate
  modified_base 26: mod_base = um
  modified_base 26..27: mod_base = OTHER; note = S-phosphorothioate
  modified_base 27: mod_base = OTHER; note = 2-fluororibose cytosine
  modified_base 27..28: mod_base = OTHER; note = S-phosphorothioate
  modified_base 28: mod_base = gm
  modified_base 28..29: mod_base = OTHER; note = S-phosphorothioate
  modified_base 29: mod_base = OTHER; note = 2-O-methylribose adenine
  modified_base 29..30: mod_base = OTHER; note R-N-(1,3-dimethylimidazolidin-2-ylidene)phosphoramidate
  modified_base 30: mod_base = um
  source 1..30: mol_type = other RNA

SEQ ID NO: 332 - RNA, 30 nt, synthetic construct; identical to SEQ ID NO: 134
  misc_feature 1..30: note = Synthetic: WV-44191
  misc_feature 1..30: note = Synthetic: ADR-0104113
  modified_base 1: mod_base = cm
  modified_base 1..2: mod_base = OTHER; note R-N-(1,3-dimethylimidazolidin-2-ylidene)phosphoramidate
  modified_base 2: mod_base = cm
  modified_base 2..3: mod_base = OTHER; note = S-phosphorothioate
  modified_base 3: mod_base = cm
  modified_base 3..4: mod_base = OTHER; note = S-phosphorothioate
  modified_base 4: mod_base = OTHER; note = 2-fluororibose adenine
  modified_base 4..5: mod_base = OTHER; note = S-phosphorothioate
  modified_base 5: mod_base = OTHER; note = 2-fluororibose guanine
  modified_base 5..6: mod_base = OTHER; note = S-phosphorothioate
  modified_base 6: mod_base = cm
  modified_base 7: mod_base = OTHER; note = 2-fluororibose adenine
  modified_base 7..8: mod_base = OTHER; note = S-phosphorothioate
  modified_base 8: mod_base = OTHER; note = 2-fluororibose guanine
  modified_base 8..9: mod_base = OTHER; note = S-phosphorothioate
  modified_base 9: mod_base = OTHER; note = 2-fluororibose cytosine
  modified_base 9..10: mod_base = OTHER; note = S-phosphorothioate
  modified_base 10: mod_base = OTHER; note = 2-fluororibose uracil
  modified_base 10..11: mod_base = OTHER; note = S-phosphorothioate
  modified_base 11: mod_base = OTHER; note = 2-fluororibose uracil
  modified_base 11..12: mod_base = OTHER; note R-N-(1,3-dimethylimidazolidin-2-ylidene)phosphoramidate
  modified_base 12: mod_base = OTHER; note = 2-fluororibose cytosine
  modified_base 12..13: mod_base = OTHER; note = S-phosphorothioate
  modified_base 13: mod_base = OTHER; note = 2-fluororibose adenine
  modified_base 14: mod_base = OTHER; note = 2-fluororibose guanine
  modified_base 14..15: mod_base = OTHER; note R-N-(1,3-dimethylimidazolidin-2-ylidene)phosphoramidate
  modified_base 15: mod_base = OTHER; note = 2-fluororibose uracil
  modified_base 15..16: mod_base = OTHER; note = S-phosphorothioate
  modified_base 16: mod_base = OTHER; note = 2-fluororibose cytosine
  modified_base 17: mod_base = cm
  modified_base 17..18: mod_base = OTHER; note = S-phosphorothioate
  modified_base 18: mod_base = OTHER; note = 2-fluororibose cytosine
  modified_base 18..19: mod_base = OTHER; note = S-phosphorothioate
  modified_base 19: mod_base = OTHER; note = 2-fluororibose uracil
  modified_base 19..20: mod_base = OTHER; note = S-phosphorothioate
  modified_base 20: mod_base = um
  modified_base 21: mod_base = OTHER; note = 2-fluororibose uracil
  modified_base 21..22: mod_base = OTHER; note = S-phosphorothioate
  modified_base 22: mod_base = OTHER; note = 2-fluororibose cytosine
  modified_base 22..23: mod_base = OTHER; note = S-phosphorothioate
  modified_base 23: mod_base = OTHER; note = 2-fluororibose uracil
  modified_base 23..24: mod_base = OTHER; note = S-phosphorothioate
  modified_base 24: mod_base = OTHER; note = deoxyribose 6-amino-9-substituted 8,9-dihydro-7H-purin-8-one
  modified_base 24..25: mod_base = OTHER; note = S-phosphorothioate
  modified_base 25: mod_base = OTHER; note = deoxyribose inosine
  modified_base 25..26: mod_base = OTHER; note S-N-(1,3-dimethylimidazolidin-2-ylidene)phosphoramidate
  modified_base 26: mod_base = um
  modified_base 27: mod_base = OTHER; note = 2-fluororibose cytosine
  modified_base 27..28: mod_base = OTHER; note = S-phosphorothioate
  modified_base 28: mod_base = gm
  modified_base 28..29: mod_base = OTHER; note = S-phosphorothioate
  modified_base 29: mod_base = OTHER; note = 2-O-methylribose adenine
  modified_base 29..30: mod_base = OTHER; note R-N-(1,3-dimethylimidazolidin-2-ylidene)phosphoramidate
  modified_base 30: mod_base = um
  source 1..30: mol_type = other RNA

SEQ ID NO: 333 - RNA, 30 nt, synthetic construct; identical to SEQ ID NO: 134
  misc_feature 1..30: note = Synthetic: WV-44190
  misc_feature 1..30: note = Synthetic: ADR-0104107
  modified_base 1: mod_base = cm
  modified_base 1..2: mod_base = OTHER; note R-N-(1,3-dimethylimidazolidin-2-ylidene)phosphoramidate
  modified_base 2: mod_base = cm
  modified_base 2..3: mod_base = OTHER; note = S-phosphorothioate
  modified_base 3: mod_base = cm
  modified_base 3..4: mod_base = OTHER; note = S-phosphorothioate
  modified_base 4: mod_base = OTHER; note = 2-fluororibose adenine
  modified_base 4..5: mod_base = OTHER; note = S-phosphorothioate
  modified_base 5: mod_base = OTHER; note = 2-fluororibose guanine
  modified_base 5..6: mod_base = OTHER; note = S-phosphorothioate
  modified_base 6: mod_base = cm
  modified_base 7: mod_base = OTHER; note = 2-fluororibose adenine
  modified_base 7..8: mod_base = OTHER; note = S-phosphorothioate
  modified_base 8: mod_base = OTHER; note = 2-fluororibose guanine
  modified_base 8..9: mod_base = OTHER; note = S-phosphorothioate
  modified_base 9: mod_base = OTHER; note = 2-fluororibose cytosine
  modified_base 9..10: mod_base = OTHER; note = S-phosphorothioate
  modified_base 10: mod_base = OTHER; note = 2-fluororibose uracil
  modified_base 10..11: mod_base = OTHER; note = S-phosphorothioate
  modified_base 11: mod_base = OTHER; note = 2-fluororibose uracil
  modified_base 11..12: mod_base = OTHER; note R-N-(1,3-dimethylimidazolidin-2-ylidene)phosphoramidate
  modified_base 12: mod_base = OTHER; note = 2-fluororibose cytosine
  modified_base 12..13: mod_base = OTHER; note = S-phosphorothioate
  modified_base 13: mod_base = OTHER; note = 2-fluororibose adenine
  modified_base 14: mod_base = OTHER; note = 2-fluororibose guanine
  modified_base 14..15: mod_base = OTHER; note R-N-(1,3-dimethylimidazolidin-2-ylidene)phosphoramidate
  modified_base 15: mod_base = OTHER; note = 2-fluororibose uracil
  modified_base 15..16: mod_base = OTHER; note = S-phosphorothioate
  modified_base 16: mod_base = OTHER; note = 2-fluororibose cytosine
  modified_base 16..17: mod_base = OTHER; note = S-phosphorothioate
  modified_base 17: mod_base = OTHER; note = 2-fluororibose cytosine
  modified_base 17..18: mod_base = OTHER; note = S-phosphorothioate
  modified_base 18: mod_base = OTHER; note = 2-fluororibose cytosine
  modified_base 18..19: mod_base = OTHER; note = S-phosphorothioate
  modified_base 19: mod_base = OTHER; note = 2-fluororibose uracil
  modified_base 19..20: mod_base = OTHER; note = S-phosphorothioate
  modified_base 20: mod_base = um
  modified_base 21: mod_base = OTHER; note = 2-fluororibose uracil
  modified_base 21..22: mod_base = OTHER; note = S-phosphorothioate
  modified_base 22: mod_base = OTHER; note = 2-fluororibose cytosine
  modified_base 22..23: mod_base = OTHER; note = S-phosphorothioate
  modified_base 23: mod_base = OTHER; note = 2-fluororibose uracil
  modified_base 23..24: mod_base = OTHER; note = S-phosphorothioate
  modified_base 24: mod_base = OTHER; note = deoxyribose 6-amino-9-substituted 8,9-dihydro-7H-purin-8-one
  modified_base 24..25: mod_base = OTHER; note = S-phosphorothioate
  modified_base 25: mod_base = OTHER; note = deoxyribose inosine
  modified_base 25..26: mod_base = OTHER; note S-N-(1,3-dimethylimidazolidin-2-ylidene)phosphoramidate
  modified_base 26: mod_base = um
  modified_base 27: mod_base = OTHER; note = 2-fluororibose cytosine
  modified_base 27..28: mod_base = OTHER; note = S-phosphorothioate
  modified_base 28: mod_base = gm
  modified_base 28..29: mod_base = OTHER; note = S-phosphorothioate
  modified_base 29: mod_base = OTHER; note = 2-O-methylribose adenine
  modified_base 29..30: mod_base = OTHER; note R-N-(1,3-dimethylimidazolidin-2-ylidene)phosphoramidate
  modified_base 30: mod_base = um
  source 1..30: mol_type = other RNA

SEQ ID NO: 334 - RNA, 30 nt, synthetic construct; identical to SEQ ID NO: 134
  misc_feature 1..30: note = Synthetic: WV-44189
  misc_feature 1..30: note = Synthetic: ADR-0104111
  modified_base 1: mod_base = cm
  modified_base 1..2: mod_base = OTHER; note R-N-(1,3-dimethylimidazolidin-2-ylidene)phosphoramidate
  modified_base 2: mod_base = cm
  modified_base 2..3: mod_base = OTHER; note = S-phosphorothioate
  modified_base 3: mod_base = cm
  modified_base 3..4: mod_base = OTHER; note = S-phosphorothioate
  modified_base 4: mod_base = OTHER; note = 2-fluororibose adenine
  modified_base 4..5: mod_base = OTHER; note = S-phosphorothioate
  modified_base 5: mod_base = OTHER; note = 2-fluororibose guanine
  modified_base 5..6: mod_base = OTHER; note = S-phosphorothioate
  modified_base 6: mod_base = cm
  modified_base 7: mod_base = OTHER; note = 2-fluororibose adenine
  modified_base 7..8: mod_base = OTHER; note = S-phosphorothioate
  modified_base 8: mod_base = OTHER; note = 2-fluororibose guanine
  modified_base 8..9: mod_base = OTHER; note = S-phosphorothioate
  modified_base 9: mod_base = OTHER; note = 2-fluororibose cytosine
  modified_base 9..10: mod_base = OTHER; note = S-phosphorothioate
  modified_base 10: mod_base = OTHER; note = 2-fluororibose uracil
  modified_base 10..11: mod_base = OTHER; note = S-phosphorothioate
  modified_base 11: mod_base = OTHER; note = 2-fluororibose uracil
  modified_base 11..12: mod_base = OTHER; note R-N-(1,3-dimethylimidazolidin-2-ylidene)phosphoramidate
  modified_base 12: mod_base = OTHER; note = 2-fluororibose cytosine
  modified_base 12..13: mod_base = OTHER; note = S-phosphorothioate
  modified_base 13: mod_base = OTHER; note = 2-fluororibose adenine
  modified_base 14: mod_base = OTHER; note = 2-fluororibose guanine
  modified_base 14..15: mod_base = OTHER; note R-N-(1,3-dimethylimidazolidin-2-ylidene)phosphoramidate
  modified_base 15: mod_base = OTHER; note = 2-fluororibose uracil
  modified_base 15..16: mod_base = OTHER; note = S-phosphorothioate
  modified_base 16: mod_base = OTHER; note = 2-fluororibose cytosine
  modified_base 17: mod_base = cm
  modified_base 17..18: mod_base = OTHER; note = S-phosphorothioate
  modified_base 18: mod_base = OTHER; note = 2-fluororibose cytosine
  modified_base 18..19: mod_base = OTHER; note = S-phosphorothioate
  modified_base 19: mod_base = OTHER; note = 2-fluororibose uracil
  modified_base 19..20: mod_base = OTHER; note = S-phosphorothioate
  modified_base 20: mod_base = OTHER; note = 2-fluororibose uracil
  modified_base 20..21: mod_base = OTHER; note = S-phosphorothioate
  modified_base 21: mod_base = OTHER; note = 2-fluororibose uracil
  modified_base 21..22: mod_base = OTHER; note = S-phosphorothioate
  modified_base 22: mod_base = OTHER; note = 2-fluororibose cytosine
  modified_base 22..23: mod_base = OTHER; note = S-phosphorothioate
  modified_base 23: mod_base = OTHER; note = 2-fluororibose uracil
  modified_base 23..24: mod_base = OTHER; note = S-phosphorothioate
  modified_base 24: mod_base = OTHER; note = deoxyribose 6-amino-9-substituted 8,9-dihydro-7H-purin-8-one
  modified_base 24..25: mod_base = OTHER; note = S-phosphorothioate
  modified_base 25: mod_base = OTHER; note = deoxyribose inosine
  modified_base 25..26: mod_base = OTHER; note S-N-(1,3-dimethylimidazolidin-2-ylidene)phosphoramidate
  modified_base 26: mod_base = um
  modified_base 27: mod_base = OTHER; note = 2-fluororibose cytosine
  modified_base 27..28: mod_base = OTHER; note = S-phosphorothioate
  modified_base 28: mod_base = gm
  modified_base 28..29: mod_base = OTHER; note = S-phosphorothioate
  modified_base 29: mod_base = OTHER; note = 2-O-methylribose adenine
  modified_base 29..30: mod_base = OTHER; note R-N-(1,3-dimethylimidazolidin-2-ylidene)phosphoramidate
  modified_base 30: mod_base = um
  source 1..30: mol_type = other RNA

SEQ ID NO: 335 - RNA, 30 nt, synthetic construct; identical to SEQ ID NO: 134
  misc_feature 1..30: note = Synthetic: WV-44187
  misc_feature 1..30: note = Synthetic: ADR-0104043
  modified_base 1: mod_base = cm
  modified_base 1..2: mod_base = OTHER; note R-N-(1,3-dimethylimidazolidin-2-ylidene)phosphoramidate
  modified_base 2: mod_base = cm
  modified_base 2..3: mod_base = OTHER; note = S-phosphorothioate
  modified_base 3: mod_base = cm
  modified_base 3..4: mod_base = OTHER; note = S-phosphorothioate
  modified_base 4: mod_base = OTHER; note = 2-fluororibose adenine
  modified_base 4..5: mod_base = OTHER; note = S-phosphorothioate
  modified_base 5: mod_base = OTHER; note = 2-fluororibose guanine
  modified_base 5..6: mod_base = OTHER; note = S-phosphorothioate
  modified_base 6: mod_base = OTHER; note = 2-fluororibose cytosine
  modified_base 7: mod_base = OTHER; note = 2-fluororibose adenine
  modified_base 7..8: mod_base = OTHER; note = S-phosphorothioate
  modified_base 8: mod_base = OTHER; note = 2-fluororibose guanine
  modified_base 8..9: mod_base = OTHER; note = S-phosphorothioate
  modified_base 9: mod_base = OTHER; note = 2-fluororibose cytosine
  modified_base 9..10: mod_base = OTHER; note = S-phosphorothioate
  modified_base 10: mod_base = OTHER; note = 2-fluororibose uracil
  modified_base 10..11: mod_base = OTHER; note = S-phosphorothioate
  modified_base 11: mod_base = OTHER; note = 2-fluororibose uracil
  modified_base 11..12: mod_base = OTHER; note R-N-(1,3-dimethylimidazolidin-2-ylidene)phosphoramidate
  modified_base 12: mod_base = OTHER; note = 2-fluororibose cytosine
  modified_base 12..13: mod_base = OTHER; note = S-phosphorothioate
  modified_base 13: mod_base = OTHER; note = 2-fluororibose adenine
  modified_base 13..14: mod_base = OTHER; note = S-phosphorothioate
  modified_base 14: mod_base = OTHER; note = 2-fluororibose guanine
  modified_base 14..15: mod_base = OTHER; note R-N-(1,3-dimethylimidazolidin-2-ylidene)phosphoramidate
  modified_base 15: mod_base = OTHER; note = 2-fluororibose uracil
  modified_base 15..16: mod_base = OTHER; note = S-phosphorothioate
  modified_base 16: mod_base = OTHER; note = 2-fluororibose cytosine
  modified_base 16..17: mod_base = OTHER; note = S-phosphorothioate
  modified_base 17: mod_base = OTHER; note = 2-fluororibose cytosine
  modified_base 17..18: mod_base = OTHER; note = S-phosphorothioate
  modified_base 18: mod_base = OTHER; note = 2-fluororibose cytosine
  modified_base 18..19: mod_base = OTHER; note = S-phosphorothioate
  modified_base 19: mod_base = OTHER; note = 2-fluororibose uracil
  modified_base 19..20: mod_base = OTHER; note = S-phosphorothioate
  modified_base 20: mod_base = OTHER; note = 2-fluororibose uracil
  modified_base 20..21: mod_base = OTHER; note = S-phosphorothioate
  modified_base 21: mod_base = OTHER; note = 2-fluororibose uracil
  modified_base 21..22: mod_base = OTHER; note = S-phosphorothioate
  modified_base 22: mod_base = OTHER; note = 2-fluororibose cytosine
  modified_base 22..23: mod_base = OTHER; note = S-phosphorothioate
  modified_base 23: mod_base = OTHER; note = 2-fluororibose uracil
  modified_base 23..24: mod_base = OTHER; note = S-phosphorothioate
  modified_base 24: mod_base = OTHER; note = deoxyribose 6-amino-9-substituted 8,9-dihydro-7H-purin-8-one
  modified_base 24..25: mod_base = OTHER; note = S-phosphorothioate
  modified_base 25: mod_base = OTHER; note = deoxyribose inosine
  modified_base 25..26: mod_base = OTHER; note S-N-(1,3-dimethylimidazolidin-2-ylidene)phosphoramidate
  modified_base 26: mod_base = um
  modified_base 27: mod_base = OTHER; note = 2-fluororibose cytosine
  modified_base 27..28: mod_base = OTHER; note = S-phosphorothioate
  modified_base 28: mod_base = gm
  modified_base 28..29: mod_base = OTHER; note = S-phosphorothioate
  modified_base 29: mod_base = OTHER; note = 2-O-methylribose adenine
  modified_base 29..30: mod_base = OTHER; note R-N-(1,3-dimethylimidazolidin-2-ylidene)phosphoramidate
  modified_base 30: mod_base = um
  source 1..30: mol_type = other RNA

SEQ ID NO: 336 - RNA, 30 nt, synthetic construct; identical to SEQ ID NO: 134
  misc_feature 1..30: note = Synthetic: WV-44186
  misc_feature 1..30: note = Synthetic: ADR-0104042
  modified_base 1: mod_base = cm
  modified_base 1..2: mod_base = OTHER; note R-N-(1,3-dimethylimidazolidin-2-ylidene)phosphoramidate
  modified_base 2: mod_base = cm
  modified_base 2..3: mod_base = OTHER; note = S-phosphorothioate
  modified_base 3: mod_base = cm
  modified_base 3..4: mod_base = OTHER; note = S-phosphorothioate
  modified_base 4: mod_base = OTHER; note = 2-fluororibose adenine
  modified_base 4..5: mod_base = OTHER; note = S-phosphorothioate
  modified_base 5: mod_base = OTHER; note = 2-fluororibose guanine
  modified_base 5..6: mod_base = OTHER; note = S-phosphorothioate
  modified_base 6: mod_base = OTHER; note = 2-fluororibose cytosine
  modified_base 7: mod_base = OTHER; note = 2-fluororibose adenine
  modified_base 7..8: mod_base = OTHER; note = S-phosphorothioate
  modified_base 8: mod_base = OTHER; note = 2-fluororibose guanine
  modified_base 8..9: mod_base = OTHER; note = S-phosphorothioate
  modified_base 9: mod_base = OTHER; note = 2-fluororibose cytosine
  modified_base 9..10: mod_base = OTHER; note = S-phosphorothioate
  modified_base 10: mod_base = OTHER; note = 2-fluororibose uracil
  modified_base 10..11: mod_base = OTHER; note = S-phosphorothioate
  modified_base 11: mod_base = OTHER; note = 2-fluororibose uracil
  modified_base 11..12: mod_base = OTHER; note R-N-(1,3-dimethylimidazolidin-2-ylidene)phosphoramidate
  modified_base 12: mod_base = OTHER; note = 2-fluororibose cytosine
  modified_base 12..13: mod_base = OTHER; note = S-phosphorothioate
  modified_base 13: mod_base = OTHER; note = 2-fluororibose adenine
  modified_base 13..14: mod_base = OTHER; note = S-phosphorothioate
  modified_base 14: mod_base = OTHER; note = 2-fluororibose guanine
  modified_base 14..15: mod_base = OTHER; note R-N-(1,3-dimethylimidazolidin-2-ylidene)phosphoramidate
  modified_base 15: mod_base = OTHER; note = 2-fluororibose uracil
  modified_base 15..16: mod_base = OTHER; note = S-phosphorothioate
  modified_base 16: mod_base = OTHER; note = 2-fluororibose cytosine
  modified_base 16..17: mod_base = OTHER; note = S-phosphorothioate
  modified_base 17: mod_base = OTHER; note = 2-fluororibose cytosine
  modified_base 17..18: mod_base = OTHER; note = S-phosphorothioate
  modified_base 18: mod_base = OTHER; note = 2-fluororibose cytosine
  modified_base 18..19: mod_base = OTHER; note = S-phosphorothioate
  modified_base 19: mod_base = OTHER; note = 2-fluororibose uracil
  modified_base 19..20: mod_base = OTHER; note = S-phosphorothioate
  modified_base 20: mod_base = OTHER; note = 2-fluororibose uracil
  modified_base 20..21: mod_base = OTHER; note = S-phosphorothioate
  modified_base 21: mod_base = OTHER; note = 2-fluororibose uracil
  modified_base 21..22: mod_base = OTHER; note = S-phosphorothioate
  modified_base 22: mod_base = OTHER; note = 2-fluororibose cytosine
  modified_base 22..23: mod_base = OTHER; note = S-phosphorothioate
  modified_base 23: mod_base = OTHER; note = 2-fluororibose uracil
  modified_base 23..24: mod_base = OTHER; note = S-phosphorothioate
  modified_base 24: mod_base = OTHER; note = deoxyribose 6-amino-9-substituted 8,9-dihydro-7H-purin-8-one
  modified_base 24..25: mod_base = OTHER; note = S-phosphorothioate
  modified_base 25: mod_base = OTHER; note = deoxyribose inosine
  modified_base 25..26: mod_base = OTHER; note S-N-(1,3-dimethylimidazolidin-2-ylidene)phosphoramidate
  modified_base 26: mod_base = um
  modified_base 26..27: mod_base = OTHER; note = S-phosphorothioate
  modified_base 27: mod_base = OTHER; note = 2-fluororibose cytosine
  modified_base 27..28: mod_base = OTHER; note = S-phosphorothioate
  modified_base 28: mod_base = gm
  modified_base 28..29: mod_base = OTHER; note = S-phosphorothioate
  modified_base 29: mod_base = OTHER; note = 2-O-methylribose adenine
  modified_base 29..30: mod_base = OTHER; note R-N-(1,3-dimethylimidazolidin-2-ylidene)phosphoramidate
  modified_base 30: mod_base = um
  source 1..30: mol_type = other RNA

SEQ ID NO: 337 - RNA, 30 nt, synthetic construct; identical to SEQ ID NO: 134
  misc_feature 1..30: note = Synthetic: WV-44184
  misc_feature 1..30: note = Synthetic: ADR-0104046
  modified_base 1: mod_base = cm
  modified_base 1..2: mod_base = OTHER; note R-N-(1,3-dimethylimidazolidin-2-ylidene)phosphoramidate
  modified_base 2: mod_base = cm
  modified_base 2..3: mod_base = OTHER; note = S-phosphorothioate
  modified_base 3: mod_base = cm
  modified_base 3..4: mod_base = OTHER; note = S-phosphorothioate
  modified_base 4: mod_base = OTHER; note = 2-fluororibose adenine
  modified_base 4..5: mod_base = OTHER; note = S-phosphorothioate
  modified_base 5: mod_base = OTHER; note = 2-fluororibose guanine
  modified_base 5..6: mod_base = OTHER; note = S-phosphorothioate
  modified_base 6: mod_base = OTHER; note = 2-fluororibose cytosine
  modified_base 7: mod_base = OTHER; note = 2-fluororibose adenine
  modified_base 7..8: mod_base = OTHER; note = S-phosphorothioate
  modified_base 8: mod_base = OTHER; note = 2-fluororibose guanine
  modified_base 8..9: mod_base = OTHER; note = S-phosphorothioate
  modified_base 9: mod_base = OTHER; note = 2-fluororibose cytosine
  modified_base 9..10: mod_base = OTHER; note = S-phosphorothioate
  modified_base 10: mod_base = OTHER; note = 2-fluororibose uracil
  modified_base 10..11: mod_base = OTHER; note = S-phosphorothioate
  modified_base 11: mod_base = OTHER; note = 2-fluororibose uracil
  modified_base 11..12: mod_base = OTHER; note R-N-(1,3-dimethylimidazolidin-2-ylidene)phosphoramidate
  modified_base 12: mod_base = OTHER; note = 2-fluororibose cytosine
  modified_base 12..13: mod_base = OTHER; note = S-phosphorothioate
  modified_base 13: mod_base = OTHER; note = 2-fluororibose adenine
  modified_base 13..14: mod_base = OTHER; note R-N-(1,3-dimethylimidazolidin-2-ylidene)phosphoramidate
  modified_base 14: mod_base = OTHER; note = 2-fluororibose guanine
  modified_base 15: mod_base = OTHER; note = 2-fluororibose uracil
  modified_base 15..16: mod_base = OTHER; note = S-phosphorothioate
  modified_base 16: mod_base = OTHER; note = 2-fluororibose cytosine
  modified_base 16..17: mod_base = OTHER; note = S-phosphorothioate
  modified_base 17: mod_base = OTHER; note = 2-fluororibose cytosine
  modified_base 17..18: mod_base = OTHER; note = S-phosphorothioate
  modified_base 18: mod_base = OTHER; note = 2-fluororibose cytosine
  modified_base 18..19: mod_base = OTHER; note = S-phosphorothioate
  modified_base 19: mod_base = OTHER; note = 2-fluororibose uracil
  modified_base 19..20: mod_base = OTHER; note = S-phosphorothioate
  modified_base 20: mod_base = OTHER; note = 2-fluororibose uracil
  modified_base 20..21: mod_base = OTHER; note = S-phosphorothioate
  modified_base 21: mod_base = OTHER; note = 2-fluororibose uracil
  modified_base 21..22: mod_base = OTHER; note = S-phosphorothioate
  modified_base 22: mod_base = OTHER; note = 2-fluororibose cytosine
  modified_base 22..23: mod_base = OTHER; note = S-phosphorothioate
  modified_base 23: mod_base = OTHER; note = 2-fluororibose uracil
  modified_base 23..24: mod_base = OTHER; note = S-phosphorothioate
  modified_base 24: mod_base = OTHER; note = deoxyribose 6-amino-9-substituted 8,9-dihydro-7H-purin-8-one
  modified_base 24..25: mod_base = OTHER; note = S-phosphorothioate
  modified_base 25: mod_base = OTHER; note = deoxyribose inosine
  modified_base 25..26: mod_base = OTHER; note S-N-(1,3-dimethylimidazolidin-2-ylidene)phosphoramidate
  modified_base 26: mod_base = um
  modified_base 27: mod_base = OTHER; note = 2-fluororibose cytosine
  modified_base 27..28: mod_base = OTHER; note = S-phosphorothioate
  modified_base 28: mod_base = gm
  modified_base 28..29: mod_base = OTHER; note = S-phosphorothioate
  modified_base 29: mod_base = OTHER; note = 2-O-methylribose adenine
  modified_base 29..30: mod_base = OTHER; note R-N-(1,3-dimethylimidazolidin-2-ylidene)phosphoramidate
  modified_base 30: mod_base = um
  source 1..30: mol_type = other RNA

SEQ ID NO: 338 - RNA, 30 nt, synthetic construct; identical to SEQ ID NO: 134
  misc_feature 1..30: note = Synthetic: WV-44183
  misc_feature 1..30: note = Synthetic: ADR-0104045
  modified_base 1: mod_base = cm
  modified_base 1..2: mod_base = OTHER; note R-N-(1,3-dimethylimidazolidin-2-ylidene)phosphoramidate
  modified_base 2: mod_base = cm
  modified_base 2..3: mod_base = OTHER; note = S-phosphorothioate
  modified_base 3: mod_base = cm
  modified_base 3..4: mod_base = OTHER; note = S-phosphorothioate
  modified_base 4: mod_base = OTHER; note = 2-fluororibose adenine
  modified_base 4..5: mod_base = OTHER; note = S-phosphorothioate
  modified_base 5: mod_base = OTHER; note = 2-fluororibose guanine
  modified_base 5..6: mod_base = OTHER; note = S-phosphorothioate
  modified_base 6: mod_base = OTHER; note = 2-fluororibose cytosine
  modified_base 7: mod_base = OTHER; note = 2-fluororibose adenine
  modified_base 7..8: mod_base = OTHER; note = S-phosphorothioate
  modified_base 8: mod_base = OTHER; note = 2-fluororibose guanine
  modified_base 8..9: mod_base = OTHER; note = S-phosphorothioate
  modified_base 9: mod_base = OTHER; note = 2-fluororibose cytosine
  modified_base 9..10: mod_base = OTHER; note = S-phosphorothioate
  modified_base 10: mod_base = OTHER; note = 2-fluororibose uracil
  modified_base 10..11: mod_base = OTHER; note = S-phosphorothioate
  modified_base 11: mod_base = OTHER; note = 2-fluororibose uracil
  modified_base 11..12: mod_base = OTHER; note R-N-(1,3-dimethylimidazolidin-2-ylidene)phosphoramidate
  modified_base 12: mod_base = OTHER; note = 2-fluororibose cytosine
  modified_base 12..13: mod_base = OTHER; note = S-phosphorothioate
  modified_base 13: mod_base = OTHER; note = 2-fluororibose adenine
  modified_base 13..14: mod_base = OTHER; note R-N-(1,3-dimethylimidazolidin-2-ylidene)phosphoramidate
  modified_base 14: mod_base = OTHER; note = 2-fluororibose guanine
  modified_base 14..15: mod_base = OTHER; note = S-phosphorothioate
  modified_base 15: mod_base = OTHER; note = 2-fluororibose uracil
  modified_base 15..16: mod_base = OTHER; note = S-phosphorothioate
  modified_base 16: mod_base = OTHER; note = 2-fluororibose cytosine
  modified_base 16..17: mod_base = OTHER; note = S-phosphorothioate
  modified_base 17: mod_base = OTHER; note = 2-fluororibose cytosine
  modified_base 17..18: mod_base = OTHER; note = S-phosphorothioate
  modified_base 18: mod_base = OTHER; note = 2-fluororibose cytosine
  modified_base 18..19: mod_base = OTHER; note = S-phosphorothioate
  modified_base 19: mod_base = OTHER; note = 2-fluororibose uracil
  modified_base 19..20: mod_base = OTHER; note = S-phosphorothioate
  modified_base 20: mod_base = OTHER; note = 2-fluororibose uracil
  modified_base 20..21: mod_base = OTHER; note = S-phosphorothioate
  modified_base 21: mod_base = OTHER; note = 2-fluororibose uracil
  modified_base 21..22: mod_base = OTHER; note = S-phosphorothioate
  modified_base 22: mod_base = OTHER; note = 2-fluororibose cytosine
  modified_base 22..23: mod_base = OTHER; note = S-phosphorothioate
  modified_base 23: mod_base = OTHER; note = 2-fluororibose uracil
  modified_base 23..24: mod_base = OTHER; note = S-phosphorothioate
  modified_base 24: mod_base = OTHER; note = deoxyribose 6-amino-9-substituted 8,9-dihydro-7H-purin-8-one
  modified_base 24..25: mod_base = OTHER; note = S-phosphorothioate
  modified_base 25: mod_base = OTHER; note = deoxyribose inosine
  modified_base 25..26: mod_base = OTHER; note S-N-(1,3-dimethylimidazolidin-2-ylidene)phosphoramidate
  modified_base 26: mod_base = um
  modified_base 27: mod_base = OTHER; note = 2-fluororibose cytosine
  modified_base 27..28: mod_base = OTHER; note = S-phosphorothioate
  modified_base 28: mod_base = gm
  modified_base 28..29: mod_base = OTHER; note = S-phosphorothioate
  modified_base 29: mod_base = OTHER; note = 2-O-methylribose adenine
  modified_base 29..30: mod_base = OTHER; note R-N-(1,3-dimethylimidazolidin-2-ylidene)phosphoramidate
  modified_base 30: mod_base = um
  source 1..30: mol_type = other RNA

SEQ ID NO: 339 - RNA, 30 nt, synthetic construct; identical to SEQ ID NO: 134
  misc_feature 1..30: note = Synthetic: WV-44182
  misc_feature 1..30: note = Synthetic: ADR-0104044
  modified_base 1: mod_base = cm
  modified_base 1..2: mod_base = OTHER; note R-N-(1,3-dimethylimidazolidin-2-ylidene)phosphoramidate
  modified_base 2: mod_base = cm
  modified_base 2..3: mod_base = OTHER; note = S-phosphorothioate
  modified_base 3: mod_base = cm
  modified_base 3..4: mod_base = OTHER; note = S-phosphorothioate
  modified_base 4: mod_base = OTHER; note = 2-fluororibose adenine
  modified_base 4..5: mod_base = OTHER; note = S-phosphorothioate
  modified_base 5: mod_base = OTHER; note = 2-fluororibose guanine
  modified_base 5..6: mod_base = OTHER; note = S-phosphorothioate
  modified_base 6: mod_base = OTHER; note = 2-fluororibose cytosine
  modified_base 7: mod_base = OTHER; note = 2-fluororibose adenine
  modified_base 7..8: mod_base = OTHER; note = S-phosphorothioate
  modified_base 8: mod_base = OTHER; note = 2-fluororibose guanine
  modified_base 8..9: mod_base = OTHER; note = S-phosphorothioate
  modified_base 9: mod_base = OTHER; note = 2-fluororibose cytosine
  modified_base 9..10: mod_base = OTHER; note = S-phosphorothioate
  modified_base 10: mod_base = OTHER; note = 2-fluororibose uracil
  modified_base 10..11: mod_base = OTHER; note = S-phosphorothioate
  modified_base 11: mod_base = OTHER; note = 2-fluororibose uracil
  modified_base 11..12: mod_base = OTHER; note R-N-(1,3-dimethylimidazolidin-2-ylidene)phosphoramidate
  modified_base 12: mod_base = OTHER; note = 2-fluororibose cytosine
  modified_base 12..13: mod_base = OTHER; note = S-phosphorothioate
  modified_base 13: mod_base = OTHER; note = 2-fluororibose adenine
  modified_base 13..14: mod_base = OTHER; note R-N-(1,3-dimethylimidazolidin-2-ylidene)phosphoramidate
  modified_base 14: mod_base = OTHER; note = 2-fluororibose guanine
  modified_base 14..15: mod_base = OTHER; note = S-phosphorothioate
  modified_base 15: mod_base = OTHER; note = 2-fluororibose uracil
  modified_base 15..16: mod_base = OTHER; note = S-phosphorothioate
  modified_base 16: mod_base = OTHER; note = 2-fluororibose cytosine
  modified_base 16..17: mod_base = OTHER; note = S-phosphorothioate
  modified_base 17: mod_base = OTHER; note = 2-fluororibose cytosine
  modified_base 17..18: mod_base = OTHER; note = S-phosphorothioate
  modified_base 18: mod_base = OTHER; note = 2-fluororibose cytosine
  modified_base 18..19: mod_base = OTHER; note = S-phosphorothioate
  modified_base 19: mod_base = OTHER; note = 2-fluororibose uracil
  modified_base 19..20: mod_base = OTHER; note = S-phosphorothioate
  modified_base 20: mod_base = OTHER; note = 2-fluororibose uracil
  modified_base 20..21: mod_base = OTHER; note = S-phosphorothioate
  modified_base 21: mod_base = OTHER; note = 2-fluororibose uracil
  modified_base 21..22: mod_base = OTHER; note = S-phosphorothioate
  modified_base 22: mod_base = OTHER; note = 2-fluororibose cytosine
  modified_base 22..23: mod_base = OTHER; note = S-phosphorothioate
  modified_base 23: mod_base = OTHER; note = 2-fluororibose uracil
  modified_base 23..24: mod_base = OTHER; note = S-phosphorothioate
  modified_base 24: mod_base = OTHER; note = deoxyribose 6-amino-9-substituted 8,9-dihydro-7H-purin-8-one
  modified_base 24..25: mod_base = OTHER; note = S-phosphorothioate
  modified_base 25: mod_base = OTHER; note = deoxyribose inosine
  modified_base 25..26: mod_base = OTHER; note S-N-(1,3-dimethylimidazolidin-2-ylidene)phosphoramidate
  modified_base 26: mod_base = um
  modified_base 26..27: mod_base = OTHER; note = S-phosphorothioate
  modified_base 27: mod_base = OTHER; note = 2-fluororibose cytosine
  modified_base 27..28: mod_base = OTHER; note = S-phosphorothioate
  modified_base 28: mod_base = gm
  modified_base 28..29: mod_base = OTHER; note = S-phosphorothioate
  modified_base 29: mod_base = OTHER; note = 2-O-methylribose adenine
  modified_base 29..30: mod_base = OTHER; note R-N-(1,3-dimethylimidazolidin-2-ylidene)phosphoramidate
  modified_base 30: mod_base = um
  source 1..30: mol_type = other RNA

SEQ ID NO: 340 - RNA, 30 nt, synthetic construct; identical to SEQ ID NO: 134
  misc_feature 1..30: note = Synthetic: WV-44224
  misc_feature 1..30: note = Synthetic: ADR-0103995
  modified_base 1: mod_base = cm
  modified_base 1..2: mod_base = OTHER; note R-N-(1,3-dimethylimidazolidin-2-ylidene)phosphoramidate
  modified_base 2: mod_base = cm
  modified_base 2..3: mod_base = OTHER; note = S-phosphorothioate
  modified_base 3: mod_base = cm
  modified_base 3..4: mod_base = OTHER; note = S-phosphorothioate
  modified_base 4: mod_base = OTHER; note = 2-fluororibose adenine
  modified_base 4..5: mod_base = OTHER; note = S-phosphorothioate
  modified_base 5: mod_base = OTHER; note = 2-fluororibose guanine
  modified_base 5..6: mod_base = OTHER; note = S-phosphorothioate
  modified_base 6: mod_base = OTHER; note = 2-fluororibose cytosine
  modified_base 6..7: mod_base = OTHER; note = R-phosphorothioate
  modified_base 7: mod_base = OTHER; note = 2-fluororibose adenine
  modified_base 7..8: mod_base = OTHER; note = S-phosphorothioate
  modified_base 8: mod_base = OTHER; note = 2-fluororibose guanine
  modified_base 8..9: mod_base = OTHER; note = S-phosphorothioate
  modified_base 9: mod_base = OTHER; note = 2-fluororibose cytosine
  modified_base 9..10: mod_base = OTHER; note = S-phosphorothioate
  modified_base 10: mod_base = OTHER; note = 2-fluororibose uracil
  modified_base 10..11: mod_base = OTHER; note = S-phosphorothioate
  modified_base 11: mod_base = OTHER; note = 2-fluororibose uracil
  modified_base 11..12: mod_base = OTHER; note R-N-(1,3-dimethylimidazolidin-2-ylidene)phosphoramidate
  modified_base 12: mod_base = OTHER; note = 2-fluororibose cytosine
  modified_base 12..13: mod_base = OTHER; note = S-phosphorothioate
  modified_base 13: mod_base = OTHER; note = 2-fluororibose adenine
  modified_base 13..14: mod_base = OTHER; note = S-phosphorothioate
  modified_base 14: mod_base = OTHER; note = 2-fluororibose guanine
  modified_base 14..15: mod_base = OTHER; note R-N-(1,3-dimethylimidazolidin-2-ylidene)phosphoramidate
  modified_base 15: mod_base = OTHER; note = 2-fluororibose uracil
  modified_base 15..16: mod_base = OTHER; note = S-phosphorothioate
  modified_base 16: mod_base = OTHER; note = 2-fluororibose cytosine
  modified_base 16..17: mod_base = OTHER; note = S-phosphorothioate
  modified_base 17: mod_base = OTHER; note = 2-fluororibose cytosine
  modified_base 17..18: mod_base = OTHER; note = R-phosphorothioate
  modified_base 18: mod_base = OTHER; note = 2-fluororibose cytosine
  modified_base 18..19: mod_base = OTHER; note = S-phosphorothioate
  modified_base 19: mod_base = OTHER; note = 2-fluororibose uracil
  modified_base 19..20: mod_base = OTHER; note = S-phosphorothioate
  modified_base 20: mod_base = OTHER; note = 2-fluororibose uracil
  modified_base 20..21: mod_base = OTHER; note = S-phosphorothioate
  modified_base 21: mod_base = OTHER; note = 2-fluororibose uracil
  modified_base 21..22: mod_base = OTHER; note = S-phosphorothioate
  modified_base 22: mod_base = OTHER; note = 2-fluororibose cytosine
  modified_base 22..23: mod_base = OTHER; note = S-phosphorothioate
  modified_base 23: mod_base = OTHER; note = 2-fluororibose uracil
  modified_base 23..24: mod_base = OTHER; note = S-phosphorothioate
  modified_base 24: mod_base = OTHER; note = deoxyribose 6-amino-9-substituted 8,9-dihydro-7H-purin-8-one
  modified_base 24..25: mod_base = OTHER; note = S-phosphorothioate
  modified_base 25: mod_base = OTHER; note = deoxyribose inosine
  modified_base 25..26: mod_base = OTHER; note S-N-(1,3-dimethylimidazolidin-2-ylidene)phosphoramidate
  modified_base 26: mod_base = um
  modified_base 26..27: mod_base = OTHER; note = S-phosphorothioate
  modified_base 27: mod_base = OTHER; note = 2-fluororibose cytosine
  modified_base 27..28: mod_base = OTHER; note = S-phosphorothioate
  modified_base 28: mod_base = gm
  modified_base 28..29: mod_base = OTHER; note = S-phosphorothioate
  modified_base 29: mod_base = OTHER; note = 2-O-methylribose adenine
  modified_base 29..30: mod_base = OTHER; note R-N-(1,3-dimethylimidazolidin-2-ylidene)phosphoramidate
  modified_base 30: mod_base = um
  source 1..30: mol_type = other RNA

SEQ ID NO: 341 - RNA, 30 nt, synthetic construct; identical to SEQ ID NO: 134
  misc_feature 1..30: note = Synthetic: WV-44223
  misc_feature 1..30: note = Synthetic: ADR-0103996
  modified_base 1: mod_base = cm
  modified_base 1..2: mod_base = OTHER; note R-N-(1,3-dimethylimidazolidin-2-ylidene)phosphoramidate
  modified_base 2: mod_base = cm
  modified_base 2..3: mod_base = OTHER; note = S-phosphorothioate
  modified_base 3: mod_base = cm
  modified_base 3..4: mod_base = OTHER; note = S-phosphorothioate
  modified_base 4: mod_base = OTHER; note = 2-fluororibose adenine
  modified_base 4..5: mod_base = OTHER; note = S-phosphorothioate
  modified_base 5: mod_base = OTHER; note = 2-fluororibose guanine
  modified_base 5..6: mod_base = OTHER; note = S-phosphorothioate
  modified_base 6: mod_base = OTHER; note = 2-fluororibose cytosine
  modified_base 6..7: mod_base = OTHER; note = R-phosphorothioate
  modified_base 7: mod_base = OTHER; note = 2-fluororibose adenine
  modified_base 7..8: mod_base = OTHER; note = S-phosphorothioate
  modified_base 8: mod_base = OTHER; note = 2-fluororibose guanine
  modified_base 8..9: mod_base = OTHER; note = S-phosphorothioate
  modified_base 9: mod_base = OTHER; note = 2-fluororibose cytosine
  modified_base 9..10: mod_base = OTHER; note = S-phosphorothioate
  modified_base 10: mod_base = OTHER; note = 2-fluororibose uracil
  modified_base 10..11: mod_base = OTHER; note = S-phosphorothioate
  modified_base 11: mod_base = OTHER; note = 2-fluororibose uracil
  modified_base 11..12: mod_base = OTHER; note R-N-(1,3-dimethylimidazolidin-2-ylidene)phosphoramidate
  modified_base 12: mod_base = OTHER; note = 2-fluororibose cytosine
  modified_base 12..13: mod_base = OTHER; note = S-phosphorothioate
  modified_base 13: mod_base = OTHER; note = 2-fluororibose adenine
  modified_base 13..14: mod_base = OTHER; note = S-phosphorothioate
  modified_base 14: mod_base = OTHER; note = 2-fluororibose guanine
  modified_base 14..15: mod_base = OTHER; note R-N-(1,3-dimethylimidazolidin-2-ylidene)phosphoramidate
  modified_base 15: mod_base = OTHER; note = 2-fluororibose uracil
  modified_base 15..16: mod_base = OTHER; note = S-phosphorothioate
  modified_base 16: mod_base = OTHER; note = 2-fluororibose cytosine
  modified_base 16..17: mod_base = OTHER; note = S-phosphorothioate
  modified_base 17: mod_base = OTHER; note = 2-fluororibose cytosine
  modified_base 17..18: mod_base = OTHER; note = S-phosphorothioate
  modified_base 18: mod_base = OTHER; note = 2-fluororibose cytosine
  modified_base 18..19: mod_base = OTHER; note = S-phosphorothioate
  modified_base 19: mod_base = OTHER; note = 2-fluororibose uracil
  modified_base 19..20: mod_base = OTHER; note = S-phosphorothioate
  modified_base 20: mod_base = OTHER; note = 2-fluororibose uracil
  modified_base 20..21: mod_base = OTHER; note = S-phosphorothioate
  modified_base 21: mod_base = OTHER; note = 2-fluororibose uracil
  modified_base 21..22: mod_base = OTHER; note = S-phosphorothioate
  modified_base 22: mod_base = OTHER; note = 2-fluororibose cytosine
  modified_base 22..23: mod_base = OTHER; note = S-phosphorothioate
  modified_base 23: mod_base = OTHER; note = 2-fluororibose uracil
  modified_base 23..24: mod_base = OTHER; note = S-phosphorothioate
  modified_base 24: mod_base = OTHER; note = deoxyribose 6-amino-9-substituted 8,9-dihydro-7H-purin-8-one
  modified_base 24..25: mod_base = OTHER; note = S-phosphorothioate
  modified_base 25: mod_base = OTHER; note = deoxyribose inosine
  modified_base 25..26: mod_base = OTHER; note S-N-(1,3-dimethylimidazolidin-2-ylidene)phosphoramidate
  modified_base 26: mod_base = um
  modified_base 26..27: mod_base = OTHER; note = R-phosphorothioate
  modified_base 27: mod_base = OTHER; note = 2-fluororibose cytosine
  modified_base 27..28: mod_base = OTHER; note = S-phosphorothioate
  modified_base 28: mod_base = gm
  modified_base 28..29: mod_base = OTHER; note = S-phosphorothioate
  modified_base 29: mod_base = OTHER; note = 2-O-methylribose adenine
  modified_base 29..30: mod_base = OTHER; note R-N-(1,3-dimethylimidazolidin-2-ylidene)phosphoramidate
  modified_base 30: mod_base = um
  source 1..30: mol_type = other RNA

SEQ ID NO: 342 - RNA, 30 nt, synthetic construct; identical to SEQ ID NO: 134
  misc_feature 1..30: note = Synthetic: WV-44222
  misc_feature 1..30: note = Synthetic: ADR-0104031
  modified_base 1: mod_base = cm
  modified_base 1..2: mod_base = OTHER; note R-N-(1,3-dimethylimidazolidin-2-ylidene)phosphoramidate
  modified_base 2: mod_base = cm
  modified_base 2..3: mod_base = OTHER; note = S-phosphorothioate
  modified_base 3: mod_base = cm
  modified_base 3..4: mod_base = OTHER; note = S-phosphorothioate
  modified_base 4: mod_base = OTHER; note = 2-fluororibose adenine
  modified_base 4..5: mod_base = OTHER; note = S-phosphorothioate
  modified_base 5: mod_base = OTHER; note = 2-fluororibose guanine
  modified_base 5..6: mod_base = OTHER; note = S-phosphorothioate
  modified_base 6: mod_base = OTHER; note = 2-fluororibose cytosine
  modified_base 6..7: mod_base = OTHER; note = S-phosphorothioate
  modified_base 7: mod_base = OTHER; note = 2-fluororibose adenine
  modified_base 7..8: mod_base = OTHER; note = S-phosphorothioate
  modified_base 8: mod_base = OTHER; note = 2-fluororibose guanine
  modified_base 8..9: mod_base = OTHER; note = S-phosphorothioate
  modified_base 9: mod_base = OTHER; note = 2-fluororibose cytosine
  modified_base 9..10: mod_base = OTHER; note = S-phosphorothioate
  modified_base 10: mod_base = OTHER; note = 2-fluororibose uracil
  modified_base 10..11: mod_base = OTHER; note = S-phosphorothioate
  modified_base 11: mod_base = OTHER; note = 2-fluororibose uracil
  modified_base 11..12: mod_base = OTHER; note R-N-(1,3-dimethylimidazolidin-2-ylidene)phosphoramidate
  modified_base 12: mod_base = OTHER; note = 2-fluororibose cytosine
  modified_base 12..13: mod_base = OTHER; note = S-phosphorothioate
  modified_base 13: mod_base = OTHER; note = 2-fluororibose adenine
  modified_base 13..14: mod_base = OTHER; note = S-phosphorothioate
  modified_base 14: mod_base = OTHER; note = 2-fluororibose guanine
  modified_base 14..15: mod_base = OTHER; note R-N-(1,3-dimethylimidazolidin-2-ylidene)phosphoramidate
  modified_base 15: mod_base = OTHER; note = 2-fluororibose uracil
  modified_base 15..16: mod_base = OTHER; note = S-phosphorothioate
  modified_base 16: mod_base = OTHER; note = 2-fluororibose cytosine
  modified_base 16..17: mod_base = OTHER; note = S-phosphorothioate
  modified_base 17: mod_base = OTHER; note = 2-fluororibose cytosine
  modified_base 17..18: mod_base = OTHER; note = S-phosphorothioate
  modified_base 18: mod_base = OTHER; note = 2-fluororibose cytosine
  modified_base 18..19: mod_base = OTHER; note = S-phosphorothioate
  modified_base 19: mod_base = OTHER; note = 2-fluororibose uracil
  modified_base 19..20: mod_base = OTHER; note = S-phosphorothioate
  modified_base 20: mod_base = OTHER; note = 2-fluororibose uracil
  modified_base 20..21: mod_base = OTHER; note = S-phosphorothioate
  modified_base 21: mod_base = OTHER; note = 2-fluororibose uracil
  modified_base 21..22: mod_base = OTHER; note = S-phosphorothioate
  modified_base 22: mod_base = OTHER; note = 2-fluororibose cytosine
  modified_base 22..23: mod_base = OTHER; note = S-phosphorothioate
  modified_base 23: mod_base = OTHER; note = 2-fluororibose uracil
  modified_base 23..24: mod_base = OTHER; note = S-phosphorothioate
  modified_base 24: mod_base = OTHER; note = deoxyribose 6-amino-9-substituted 8,9-dihydro-7H-purin-8-one
  modified_base 24..25: mod_base = OTHER; note = S-phosphorothioate
  modified_base 25: mod_base = OTHER; note = deoxyribose inosine
  modified_base 25..26: mod_base = OTHER; note S-N-(1,3-dimethylimidazolidin-2-ylidene)phosphoramidate
  modified_base 26: mod_base = um
  modified_base 26..27: mod_base = OTHER; note = R-phosphorothioate
  modified_base 27: mod_base = OTHER; note = 2-fluororibose cytosine
  modified_base 27..28: mod_base = OTHER; note = S-phosphorothioate
  modified_base 28: mod_base = gm
  modified_base 28..29: mod_base = OTHER; note = S-phosphorothioate
  modified_base 29: mod_base = OTHER; note = 2-O-methylribose adenine
  modified_base 29..30: mod_base = OTHER; note R-N-(1,3-dimethylimidazolidin-2-ylidene)phosphoramidate
  modified_base 30: mod_base = um
  source 1..30: mol_type = other RNA

SEQ ID NO: 343 - RNA, 30 nt, synthetic construct; identical to SEQ ID NO: 134
  misc_feature 1..30: note = Synthetic: WV-44219
  misc_feature 1..30: note = Synthetic: ADR-0103999
  modified_base 1: mod_base = cm
  modified_base 1..2: mod_base = OTHER; note R-N-(1,3-dimethylimidazolidin-2-ylidene)phosphoramidate
  modified_base 2: mod_base = cm
  modified_base 2..3: mod_base = OTHER; note = S-phosphorothioate
  modified_base 3: mod_base = cm
  modified_base 3..4: mod_base = OTHER; note = S-phosphorothioate
  modified_base 4: mod_base = OTHER; note = 2-fluororibose adenine
  modified_base 4..5: mod_base = OTHER; note = S-phosphorothioate
  modified_base 5: mod_base = OTHER; note = 2-fluororibose guanine
  modified_base 5..6: mod_base = OTHER; note = S-phosphorothioate
  modified_base 6: mod_base = OTHER; note = 2-fluororibose cytosine
  modified_base 6..7: mod_base = OTHER; note = R-phosphorothioate
  modified_base 7: mod_base = OTHER; note = 2-fluororibose adenine
  modified_base 7..8: mod_base = OTHER; note = S-phosphorothioate
  modified_base 8: mod_base = OTHER; note = 2-fluororibose guanine
  modified_base 8..9: mod_base = OTHER; note = S-phosphorothioate
  modified_base 9: mod_base = OTHER; note = 2-fluororibose cytosine
  modified_base 9..10: mod_base = OTHER; note = S-phosphorothioate
  modified_base 10: mod_base = OTHER; note = 2-fluororibose uracil
  modified_base 10..11: mod_base = OTHER; note = S-phosphorothioate
  modified_base 11: mod_base = OTHER; note = 2-fluororibose uracil
  modified_base 11..12: mod_base = OTHER; note R-N-(1,3-dimethylimidazolidin-2-ylidene)phosphoramidate
  modified_base 12: mod_base = OTHER; note = 2-fluororibose cytosine
  modified_base 12..13: mod_base = OTHER; note = S-phosphorothioate
  modified_base 13: mod_base = OTHER; note = 2-fluororibose adenine
  modified_base 13..14: mod_base = OTHER; note R-N-(1,3-dimethylimidazolidin-2-ylidene)phosphoramidate
  modified_base 14: mod_base = OTHER; note = 2-fluororibose guanine
  modified_base 14..15: mod_base = OTHER; note = S-phosphorothioate
  modified_base 15: mod_base = OTHER; note = 2-fluororibose uracil
  modified_base 15..16: mod_base = OTHER; note = S-phosphorothioate
  modified_base 16: mod_base = OTHER; note = 2-fluororibose cytosine
  modified_base 16..17: mod_base = OTHER; note = S-phosphorothioate
  modified_base 17: mod_base = OTHER; note = 2-fluororibose cytosine
  modified_base 17..18: mod_base = OTHER; note = S-phosphorothioate
  modified_base 18: mod_base = OTHER; note = 2-fluororibose cytosine
  modified_base 18..19: mod_base = OTHER; note = S-phosphorothioate
  modified_base 19: mod_base = OTHER; note = 2-fluororibose uracil
  modified_base 19..20: mod_base = OTHER; note = S-phosphorothioate
  modified_base 20: mod_base = OTHER; note = 2-fluororibose uracil
  modified_base 20..21: mod_base = OTHER; note = S-phosphorothioate
  modified_base 21: mod_base = OTHER; note = 2-fluororibose uracil
  modified_base 21..22: mod_base = OTHER; note = S-phosphorothioate
  modified_base 22: mod_base = OTHER; note = 2-fluororibose cytosine
  modified_base 22..23: mod_base = OTHER; note = S-phosphorothioate
  modified_base 23: mod_base = OTHER; note = 2-fluororibose uracil
  modified_base 23..24: mod_base = OTHER; note = S-phosphorothioate
  modified_base 24: mod_base = OTHER; note = deoxyribose 6-amino-9-substituted 8,9-dihydro-7H-purin-8-one
  modified_base 24..25: mod_base = OTHER; note = S-phosphorothioate
  modified_base 25: mod_base = OTHER; note = deoxyribose inosine
  modified_base 25..26: mod_base = OTHER; note S-N-(1,3-dimethylimidazolidin-2-ylidene)phosphoramidate
  modified_base 26: mod_base = um
  modified_base 26..27: mod_base = OTHER; note = R-phosphorothioate
  modified_base 27: mod_base = OTHER; note = 2-fluororibose cytosine
  modified_base 27..28: mod_base = OTHER; note = S-phosphorothioate
  modified_base 28: mod_base = gm
  modified_base 28..29: mod_base = OTHER; note = S-phosphorothioate
  modified_base 29: mod_base = OTHER; note = 2-O-methylribose adenine
  modified_base 29..30: mod_base = OTHER; note R-N-(1,3-dimethylimidazolidin-2-ylidene)phosphoramidate
  modified_base 30: mod_base = um
  source 1..30: mol_type = other RNA

SEQ ID NO: 344 - RNA, 30 nt, synthetic construct; identical to SEQ ID NO: 134
  misc_feature 1..30: note = Synthetic: WV-44218
  misc_feature 1..30: note = Synthetic: ADR-0104035
  modified_base 1: mod_base = cm
  modified_base 1..2: mod_base = OTHER; note R-N-(1,3-dimethylimidazolidin-2-ylidene)phosphoramidate
  modified_base 2: mod_base = cm
  modified_base 2..3: mod_base = OTHER; note = S-phosphorothioate
  modified_base 3: mod_base = cm
  modified_base 3..4: mod_base = OTHER; note = S-phosphorothioate
  modified_base 4: mod_base = OTHER; note = 2-fluororibose adenine
  modified_base 4..5: mod_base = OTHER; note = S-phosphorothioate
  modified_base 5: mod_base = OTHER; note = 2-fluororibose guanine
  modified_base 5..6: mod_base = OTHER; note = S-phosphorothioate
  modified_base 6: mod_base = OTHER; note = 2-fluororibose cytosine
  modified_base 6..7: mod_base = OTHER; note = S-phosphorothioate
  modified_base 7: mod_base = OTHER; note = 2-fluororibose adenine
  modified_base 7..8: mod_base = OTHER; note = S-phosphorothioate
  modified_base 8: mod_base = OTHER; note = 2-fluororibose guanine
  modified_base 8..9: mod_base = OTHER; note = S-phosphorothioate
  modified_base 9: mod_base = OTHER; note = 2-fluororibose cytosine
  modified_base 9..10: mod_base = OTHER; note = S-phosphorothioate
  modified_base 10: mod_base = OTHER; note = 2-fluororibose uracil
  modified_base 10..11: mod_base = OTHER; note = S-phosphorothioate
  modified_base 11: mod_base = OTHER; note = 2-fluororibose uracil
  modified_base 11..12: mod_base = OTHER; note R-N-(1,3-dimethylimidazolidin-2-ylidene)phosphoramidate
  modified_base 12: mod_base = OTHER; note = 2-fluororibose cytosine
  modified_base 12..13: mod_base = OTHER; note = S-phosphorothioate
  modified_base 13: mod_base = OTHER; note = 2-fluororibose adenine
  modified_base 13..14: mod_base = OTHER; note R-N-(1,3-dimethylimidazolidin-2-ylidene)phosphoramidate
  modified_base 14: mod_base = OTHER; note = 2-fluororibose guanine
  modified_base 14..15: mod_base = OTHER; note = S-phosphorothioate
  modified_base 15: mod_base = OTHER; note = 2-fluororibose uracil
  modified_base 15..16: mod_base = OTHER; note = S-phosphorothioate
  modified_base 16: mod_base = OTHER; note = 2-fluororibose cytosine
  modified_base 16..17: mod_base = OTHER; note = S-phosphorothioate
  modified_base 17: mod_base = OTHER; note = 2-fluororibose cytosine
  modified_base 17..18: mod_base = OTHER; note = S-phosphorothioate
  modified_base 18: mod_base = OTHER; note = 2-fluororibose cytosine
  modified_base 18..19: mod_base = OTHER; note = S-phosphorothioate
  modified_base 19: mod_base = OTHER; note = 2-fluororibose uracil
  modified_base 19..20: mod_base = OTHER; note = S-phosphorothioate
  modified_base 20: mod_base = OTHER; note = 2-fluororibose uracil
  modified_base 20..21: mod_base = OTHER; note = S-phosphorothioate
  modified_base 21: mod_base = OTHER; note = 2-fluororibose uracil
  modified_base 21..22: mod_base = OTHER; note = S-phosphorothioate
  modified_base 22: mod_base = OTHER; note = 2-fluororibose cytosine
  modified_base 22..23: mod_base = OTHER; note = S-phosphorothioate
  modified_base 23: mod_base = OTHER; note = 2-fluororibose uracil
  modified_base 23..24: mod_base = OTHER; note = S-phosphorothioate
  modified_base 24: mod_base = OTHER; note = deoxyribose 6-amino-9-substituted 8,9-dihydro-7H-purin-8-one
  modified_base 24..25: mod_base = OTHER; note = S-phosphorothioate
  modified_base 25: mod_base = OTHER; note = deoxyribose inosine
  modified_base 25..26: mod_base = OTHER; note S-N-(1,3-dimethylimidazolidin-2-ylidene)phosphoramidate
  modified_base 26: mod_base = um
  modified_base 26..27: mod_base = OTHER; note = R-phosphorothioate
  modified_base 27: mod_base = OTHER; note = 2-fluororibose cytosine
  modified_base 27..28: mod_base = OTHER; note = S-phosphorothioate
  modified_base 28: mod_base = gm
  modified_base 28..29: mod_base = OTHER; note = S-phosphorothioate
  modified_base 29: mod_base = OTHER; note = 2-O-methylribose adenine
  modified_base 29..30: mod_base = OTHER; note R-N-(1,3-dimethylimidazolidin-2-ylidene)phosphoramidate
  modified_base 30: mod_base = um
  source 1..30: mol_type = other RNA

SEQ ID NO: 345 - RNA, 30 nt, synthetic construct; identical to SEQ ID NO: 134
  misc_feature 1..30: note = Synthetic: WV-44217
  misc_feature 1..30: note = Synthetic: ADR-0104000
  modified_base 1: mod_base = cm
  modified_base 1..2: mod_base = OTHER; note R-N-(1,3-dimethylimidazolidin-2-ylidene)phosphoramidate
  modified_base 2: mod_base = cm
  modified_base 2..3: mod_base = OTHER; note = S-phosphorothioate
  modified_base 3: mod_base = cm
  modified_base 3..4: mod_base = OTHER; note = S-phosphorothioate
  modified_base 4: mod_base = OTHER; note = 2-fluororibose adenine
  modified_base 4..5: mod_base = OTHER; note = S-phosphorothioate
  modified_base 5: mod_base = OTHER; note = 2-fluororibose guanine
  modified_base 5..6: mod_base = OTHER; note = S-phosphorothioate
  modified_base 6: mod_base = OTHER; note = 2-fluororibose cytosine
  modified_base 6..7: mod_base = OTHER; note = R-phosphorothioate
  modified_base 7: mod_base = OTHER; note = 2-fluororibose adenine
  modified_base 7..8: mod_base = OTHER; note = S-phosphorothioate
  modified_base 8: mod_base = OTHER; note = 2-fluororibose guanine
  modified_base 8..9: mod_base = OTHER; note = S-phosphorothioate
  modified_base 9: mod_base = OTHER; note = 2-fluororibose cytosine
  modified_base 9..10: mod_base = OTHER; note = S-phosphorothioate
  modified_base 10: mod_base = OTHER; note = 2-fluororibose uracil
  modified_base 10..11: mod_base = OTHER; note = S-phosphorothioate
  modified_base 11: mod_base = OTHER; note = 2-fluororibose uracil
  modified_base 11..12: mod_base = OTHER; note R-N-(1,3-dimethylimidazolidin-2-ylidene)phosphoramidate
  modified_base 12: mod_base = OTHER; note = 2-fluororibose cytosine
  modified_base 12..13: mod_base = OTHER; note = S-phosphorothioate
  modified_base 13: mod_base = OTHER; note = 2-fluororibose adenine
  modified_base 13..14: mod_base = OTHER; note R-N-(1,3-dimethylimidazolidin-2-ylidene)phosphoramidate
  modified_base 14: mod_base = OTHER; note = 2-fluororibose guanine
  modified_base 14..15: mod_base = OTHER; note = S-phosphorothioate
  modified_base 15: mod_base = OTHER; note = 2-fluororibose uracil
  modified_base 15..16: mod_base = OTHER; note = S-phosphorothioate
  modified_base 16: mod_base = OTHER; note = 2-fluororibose cytosine
  modified_base 16..17: mod_base = OTHER; note = S-phosphorothioate
  modified_base 17: mod_base = OTHER; note = 2-fluororibose cytosine
  modified_base 17..18: mod_base = OTHER; note = S-phosphorothioate
  modified_base 18: mod_base = OTHER; note = 2-fluororibose cytosine
  modified_base 18..19: mod_base = OTHER; note = S-phosphorothioate
  modified_base 19: mod_base = OTHER; note = 2-fluororibose uracil
  modified_base 19..20: mod_base = OTHER; note = S-phosphorothioate
  modified_base 20: mod_base = OTHER; note = 2-fluororibose uracil
  modified_base 20..21: mod_base = OTHER; note = S-phosphorothioate
  modified_base 21: mod_base = OTHER; note = 2-fluororibose uracil
  modified_base 21..22: mod_base = OTHER; note = S-phosphorothioate
  modified_base 22: mod_base = OTHER; note = 2-fluororibose cytosine
  modified_base 22..23: mod_base = OTHER; note = S-phosphorothioate
  modified_base 23: mod_base = OTHER; note = 2-fluororibose uracil
  modified_base 23..24: mod_base = OTHER; note = S-phosphorothioate
  modified_base 24: mod_base = OTHER; note = deoxyribose 6-amino-9-substituted 8,9-dihydro-7H-purin-8-one
  modified_base 24..25: mod_base = OTHER; note = S-phosphorothioate
  modified_base 25: mod_base = OTHER; note = deoxyribose inosine
  modified_base 25..26: mod_base = OTHER; note S-N-(1,3-dimethylimidazolidin-2-ylidene)phosphoramidate
  modified_base 26: mod_base = um
  modified_base 26..27: mod_base = OTHER; note = S-phosphorothioate
  modified_base 27: mod_base = OTHER; note = 2-fluororibose cytosine
  modified_base 27..28: mod_base = OTHER; note = S-phosphorothioate
  modified_base 28: mod_base = gm
  modified_base 28..29: mod_base = OTHER; note = S-phosphorothioate
  modified_base 29: mod_base = OTHER; note = 2-O-methylribose adenine
  modified_base 29..30: mod_base = OTHER; note R-N-(1,3-dimethylimidazolidin-2-ylidene)phosphoramidate
  modified_base 30: mod_base = um
  source 1..30: mol_type = other RNA

SEQ ID NO: 346 - RNA, 30 nt, synthetic construct; identical to SEQ ID NO: 134
  misc_feature 1..30: note = Synthetic: WV-44216
  misc_feature 1..30: note = Synthetic: ADR-0103992
  modified_base 1: mod_base = cm
  modified_base 1..2: mod_base = OTHER; note R-N-(1,3-dimethylimidazolidin-2-ylidene)phosphoramidate
  modified_base 2: mod_base = cm
  modified_base 2..3: mod_base = OTHER; note = S-phosphorothioate
  modified_base 3: mod_base = cm
  modified_base 3..4: mod_base = OTHER; note = S-phosphorothioate
  modified_base 4: mod_base = OTHER; note = 2-fluororibose adenine
  modified_base 4..5: mod_base = OTHER; note = S-phosphorothioate
  modified_base 5: mod_base = OTHER; note = 2-fluororibose guanine
  modified_base 5..6: mod_base = OTHER; note = S-phosphorothioate
  modified_base 6: mod_base = OTHER; note = 2-fluororibose cytosine
  modified_base 6..7: mod_base = OTHER; note = R-phosphorothioate
  modified_base 7: mod_base = OTHER; note = 2-fluororibose adenine
  modified_base 7..8: mod_base = OTHER; note = S-phosphorothioate
  modified_base 8: mod_base = OTHER; note = 2-fluororibose guanine
  modified_base 8..9: mod_base = OTHER; note = S-phosphorothioate
  modified_base 9: mod_base = OTHER; note = 2-fluororibose cytosine
  modified_base 9..10: mod_base = OTHER; note = S-phosphorothioate
  modified_base 10: mod_base = OTHER; note = 2-fluororibose uracil
  modified_base 10..11: mod_base = OTHER; note = S-phosphorothioate
  modified_base 11: mod_base = OTHER; note = 2-fluororibose uracil
  modified_base 11..12: mod_base = OTHER; note = S-phosphorothioate
  modified_base 12: mod_base = OTHER; note = 2-fluororibose cytosine
  modified_base 12..13: mod_base = OTHER; note = S-phosphorothioate
  modified_base 13: mod_base = OTHER; note = 2-fluororibose adenine
  modified_base 13..14: mod_base = OTHER; note = S-phosphorothioate
  modified_base 14: mod_base = OTHER; note = 2-fluororibose guanine
  modified_base 14..15: mod_base = OTHER; note = S-phosphorothioate
  modified_base 15: mod_base = OTHER; note = 2-fluororibose uracil
  modified_base 15..16: mod_base = OTHER; note = S-phosphorothioate
  modified_base 16: mod_base = OTHER; note = 2-fluororibose cytosine
  modified_base 16..17: mod_base = OTHER; note = S-phosphorothioate
  modified_base 17: mod_base = OTHER; note = 2-fluororibose cytosine
  modified_base 17..18: mod_base = OTHER; note = R-phosphorothioate
  modified_base 18: mod_base = OTHER; note = 2-fluororibose cytosine
  modified_base 18..19: mod_base = OTHER; note = S-phosphorothioate
  modified_base 19: mod_base = OTHER; note = 2-fluororibose uracil
  modified_base 19..20: mod_base = OTHER; note = S-phosphorothioate
  modified_base 20: mod_base = OTHER; note = 2-fluororibose uracil
  modified_base 20..21: mod_base = OTHER; note = S-phosphorothioate
  modified_base 21: mod_base = OTHER; note = 2-fluororibose uracil
  modified_base 21..22: mod_base = OTHER; note = S-phosphorothioate
  modified_base 22: mod_base = OTHER; note = 2-fluororibose cytosine
  modified_base 22..23: mod_base = OTHER; note = S-phosphorothioate
  modified_base 23: mod_base = OTHER; note = 2-fluororibose uracil
  modified_base 23..24: mod_base = OTHER; note = S-phosphorothioate
  modified_base 24: mod_base = OTHER; note = deoxyribose 6-amino-9-substituted 8,9-dihydro-7H-purin-8-one
  modified_base 24..25: mod_base = OTHER; note = S-phosphorothioate
  modified_base 25: mod_base = OTHER; note = deoxyribose inosine
  modified_base 25..26: mod_base = OTHER; note S-N-(1,3-dimethylimidazolidin-2-ylidene)phosphoramidate
  modified_base 26: mod_base = um
  modified_base 26..27: mod_base = OTHER; note = S-phosphorothioate
  modified_base 27: mod_base = OTHER; note = 2-fluororibose cytosine
  modified_base 27..28: mod_base = OTHER; note = S-phosphorothioate
  modified_base 28: mod_base = gm
  modified_base 28..29: mod_base = OTHER; note = S-phosphorothioate
  modified_base 29: mod_base = OTHER; note = 2-O-methylribose adenine
  modified_base 29..30: mod_base = OTHER; note R-N-(1,3-dimethylimidazolidin-2-ylidene)phosphoramidate
  modified_base 30: mod_base = um
  source 1..30: mol_type = other RNA

SEQ ID NO: 347 - RNA, 30 nt, synthetic construct; identical to SEQ ID NO: 134
  misc_feature 1..30: note = Synthetic: WV-44215
  misc_feature 1..30: note = Synthetic: ADR-0103993
  modified_base 1: mod_base = cm
  modified_base 1..2: mod_base = OTHER; note R-N-(1,3-dimethylimidazolidin-2-ylidene)phosphoramidate
  modified_base 2: mod_base = cm
  modified_base 2..3: mod_base = OTHER; note = S-phosphorothioate
  modified_base 3: mod_base = cm
  modified_base 3..4: mod_base = OTHER; note = S-phosphorothioate
  modified_base 4: mod_base = OTHER; note = 2-fluororibose adenine
  modified_base 4..5: mod_base = OTHER; note = S-phosphorothioate
  modified_base 5: mod_base = OTHER; note = 2-fluororibose guanine
  modified_base 5..6: mod_base = OTHER; note = S-phosphorothioate
  modified_base 6: mod_base = OTHER; note = 2-fluororibose cytosine
  modified_base 6..7: mod_base = OTHER; note = R-phosphorothioate
  modified_base 7: mod_base = OTHER; note = 2-fluororibose adenine
  modified_base 7..8: mod_base = OTHER; note = S-phosphorothioate
  modified_base 8: mod_base = OTHER; note = 2-fluororibose guanine
  modified_base 8..9: mod_base = OTHER; note = S-phosphorothioate
  modified_base 9: mod_base = OTHER; note = 2-fluororibose cytosine
  modified_base 9..10: mod_base = OTHER; note = S-phosphorothioate
  modified_base 10: mod_base = OTHER; note = 2-fluororibose uracil
  modified_base 10..11: mod_base = OTHER; note = S-phosphorothioate
  modified_base 11: mod_base = OTHER; note = 2-fluororibose uracil
  modified_base 11..12: mod_base = OTHER; note = S-phosphorothioate
  modified_base 12: mod_base = OTHER; note = 2-fluororibose cytosine
  modified_base 12..13: mod_base = OTHER; note = S-phosphorothioate
  modified_base 13: mod_base = OTHER; note = 2-fluororibose adenine
  modified_base 13..14: mod_base = OTHER; note = S-phosphorothioate
  modified_base 14: mod_base = OTHER; note = 2-fluororibose guanine
  modified_base 14..15: mod_base = OTHER; note = S-phosphorothioate
  modified_base 15: mod_base = OTHER; note = 2-fluororibose uracil
  modified_base 15..16: mod_base = OTHER; note = S-phosphorothioate
  modified_base 16: mod_base = OTHER; note = 2-fluororibose cytosine
  modified_base 16..17: mod_base = OTHER; note = S-phosphorothioate
  modified_base 17: mod_base = OTHER; note = 2-fluororibose cytosine
  modified_base 17..18: mod_base = OTHER; note = S-phosphorothioate
  modified_base 18: mod_base = OTHER; note = 2-fluororibose cytosine
  modified_base 18..19: mod_base = OTHER; note = S-phosphorothioate
  modified_base 19: mod_base = OTHER; note = 2-fluororibose uracil
  modified_base 19..20: mod_base = OTHER; note = S-phosphorothioate
  modified_base 20: mod_base = OTHER; note = 2-fluororibose uracil
  modified_base 20..21: mod_base = OTHER; note = S-phosphorothioate
  modified_base 21: mod_base = OTHER; note = 2-fluororibose uracil
  modified_base 21..22: mod_base = OTHER; note = S-phosphorothioate
  modified_base 22: mod_base = OTHER; note = 2-fluororibose cytosine
  modified_base 22..23: mod_base = OTHER; note = S-phosphorothioate
  modified_base 23: mod_base = OTHER; note = 2-fluororibose uracil
  modified_base 23..24: mod_base = OTHER; note = S-phosphorothioate
  modified_base 24: mod_base = OTHER; note = deoxyribose 6-amino-9-substituted 8,9-dihydro-7H-purin-8-one
  modified_base 24..25: mod_base = OTHER; note = S-phosphorothioate
  modified_base 25: mod_base = OTHER; note = deoxyribose inosine
  modified_base 25..26: mod_base = OTHER; note S-N-(1,3-dimethylimidazolidin-2-ylidene)phosphoramidate
  modified_base 26: mod_base = um
  modified_base 26..27: mod_base = OTHER; note = R-phosphorothioate
  modified_base 27: mod_base = OTHER; note = 2-fluororibose cytosine
  modified_base 27..28: mod_base = OTHER; note = S-phosphorothioate
  modified_base 28: mod_base = gm
  modified_base 28..29: mod_base = OTHER; note = S-phosphorothioate
  modified_base 29: mod_base = OTHER; note = 2-O-methylribose adenine
  modified_base 29..30: mod_base = OTHER; note R-N-(1,3-dimethylimidazolidin-2-ylidene)phosphoramidate
  modified_base 30: mod_base = um
  source 1..30: mol_type = other RNA

SEQ ID NO: 348 - RNA, 30 nt, synthetic construct; identical to SEQ ID NO: 134
  misc_feature 1..30: note = Synthetic: WV-44214
  misc_feature 1..30: note = Synthetic: ADR-0104016
  modified_base 1: mod_base = cm
  modified_base 1..2: mod_base = OTHER; note R-N-(1,3-dimethylimidazolidin-2-ylidene)phosphoramidate
  modified_base 2: mod_base = cm
  modified_base 2..3: mod_base = OTHER; note = S-phosphorothioate
  modified_base 3: mod_base = cm
  modified_base 3..4: mod_base = OTHER; note = S-phosphorothioate
  modified_base 4: mod_base = OTHER; note = 2-fluororibose adenine
  modified_base 4..5: mod_base = OTHER; note = S-phosphorothioate
  modified_base 5: mod_base = OTHER; note = 2-fluororibose guanine
  modified_base 5..6: mod_base = OTHER; note = S-phosphorothioate
  modified_base 6: mod_base = OTHER; note = 2-fluororibose cytosine
  modified_base 6..7: mod_base = OTHER; note = S-phosphorothioate
  modified_base 7: mod_base = OTHER; note = 2-fluororibose adenine
  modified_base 7..8: mod_base = OTHER; note = S-phosphorothioate
  modified_base 8: mod_base = OTHER; note = 2-fluororibose guanine
  modified_base 8..9: mod_base = OTHER; note = S-phosphorothioate
  modified_base 9: mod_base = OTHER; note = 2-fluororibose cytosine
  modified_base 9..10: mod_base = OTHER; note = S-phosphorothioate
  modified_base 10: mod_base = OTHER; note = 2-fluororibose uracil
  modified_base 10..11: mod_base = OTHER; note = S-phosphorothioate
  modified_base 11: mod_base = OTHER; note = 2-fluororibose uracil
  modified_base 11..12: mod_base = OTHER; note = S-phosphorothioate
  modified_base 12: mod_base = OTHER; note = 2-fluororibose cytosine
  modified_base 12..13: mod_base = OTHER; note = S-phosphorothioate
  modified_base 13: mod_base = OTHER; note = 2-fluororibose adenine
  modified_base 13..14: mod_base = OTHER; note = S-phosphorothioate
  modified_base 14: mod_base = OTHER; note = 2-fluororibose guanine
  modified_base 14..15: mod_base = OTHER; note = S-phosphorothioate
  modified_base 15: mod_base = OTHER; note = 2-fluororibose uracil
  modified_base 15..16: mod_base = OTHER; note = S-phosphorothioate
  modified_base 16: mod_base = OTHER; note = 2-fluororibose cytosine
  modified_base 16..17: mod_base = OTHER; note = S-phosphorothioate
  modified_base 17: mod_base = OTHER; note = 2-fluororibose cytosine
  modified_base 17..18: mod_base = OTHER; note = S-phosphorothioate
  modified_base 18: mod_base = OTHER; note = 2-fluororibose cytosine
  modified_base 18..19: mod_base = OTHER; note = S-phosphorothioate
  modified_base 19: mod_base = OTHER; note = 2-fluororibose uracil
  modified_base 19..20: mod_base = OTHER; note = S-phosphorothioate
  modified_base 20: mod_base = OTHER; note = 2-fluororibose uracil
  modified_base 20..21: mod_base = OTHER; note = S-phosphorothioate
  modified_base 21: mod_base = OTHER; note = 2-fluororibose uracil
  modified_base 21..22: mod_base = OTHER; note = S-phosphorothioate
  modified_base 22: mod_base = OTHER; note = 2-fluororibose cytosine
  modified_base 22..23: mod_base = OTHER; note = S-phosphorothioate
  modified_base 23: mod_base = OTHER; note = 2-fluororibose uracil
  modified_base 23..24: mod_base = OTHER; note = S-phosphorothioate
  modified_base 24: mod_base = OTHER; note = deoxyribose 6-amino-9-substituted 8,9-dihydro-7H-purin-8-one
  modified_base 24..25: mod_base = OTHER; note = S-phosphorothioate
  modified_base 25: mod_base = OTHER; note = deoxyribose inosine
  modified_base 25..26: mod_base = OTHER; note S-N-(1,3-dimethylimidazolidin-2-ylidene)phosphoramidate
  modified_base 26: mod_base = um
  modified_base 26..27: mod_base = OTHER; note = R-phosphorothioate
  modified_base 27: mod_base = OTHER; note = 2-fluororibose cytosine
  modified_base 27..28: mod_base = OTHER; note = S-phosphorothioate
  modified_base 28: mod_base = gm
  modified_base 28..29: mod_base = OTHER; note = S-phosphorothioate
  modified_base 29: mod_base = OTHER; note = 2-O-methylribose adenine
  modified_base 29..30: mod_base = OTHER; note R-N-(1,3-dimethylimidazolidin-2-ylidene)phosphoramidate
  modified_base 30: mod_base = um
  source 1..30: mol_type = other RNA

SEQ ID NO: 349 - RNA, 30 nt, synthetic construct; identical to SEQ ID NO: 134
  misc_feature 1..30: note = Synthetic: WV-44213
  misc_feature 1..30: note = Synthetic: ADR-0103994
  modified_base 1: mod_base = cm
  modified_base 1..2: mod_base = OTHER; note R-N-(1,3-dimethylimidazolidin-2-ylidene)phosphoramidate
  modified_base 2: mod_base = cm
  modified_base 2..3: mod_base = OTHER; note = S-phosphorothioate
  modified_base 3: mod_base = cm
  modified_base 3..4: mod_base = OTHER; note = S-phosphorothioate
  modified_base 4: mod_base = OTHER; note = 2-fluororibose adenine
  modified_base 4..5: mod_base = OTHER; note = S-phosphorothioate
  modified_base 5: mod_base = OTHER; note = 2-fluororibose guanine
  modified_base 5..6: mod_base = OTHER; note = S-phosphorothioate
  modified_base 6: mod_base = OTHER; note = 2-fluororibose cytosine
  modified_base 6..7: mod_base = OTHER; note = R-phosphorothioate
  modified_base 7: mod_base = OTHER; note = 2-fluororibose adenine
  modified_base 7..8: mod_base = OTHER; note = S-phosphorothioate
  modified_base 8: mod_base = OTHER; note = 2-fluororibose guanine
  modified_base 8..9: mod_base = OTHER; note = S-phosphorothioate
  modified_base 9: mod_base = OTHER; note = 2-fluororibose cytosine
  modified_base 9..10: mod_base = OTHER; note = S-phosphorothioate
  modified_base 10: mod_base = OTHER; note = 2-fluororibose uracil
  modified_base 10..11: mod_base = OTHER; note = S-phosphorothioate
  modified_base 11: mod_base = OTHER; note = 2-fluororibose uracil
  modified_base 11..12: mod_base = OTHER; note = S-phosphorothioate
  modified_base 12: mod_base = OTHER; note = 2-fluororibose cytosine
  modified_base 12..13: mod_base = OTHER; note = S-phosphorothioate
  modified_base 13: mod_base = OTHER; note = 2-fluororibose adenine
  modified_base 13..14: mod_base = OTHER; note = S-phosphorothioate
  modified_base 14: mod_base = OTHER; note = 2-fluororibose guanine
  modified_base 14..15: mod_base = OTHER; note = S-phosphorothioate
  modified_base 15: mod_base = OTHER; note = 2-fluororibose uracil
  modified_base 15..16: mod_base = OTHER; note = S-phosphorothioate
  modified_base 16: mod_base = OTHER; note = 2-fluororibose cytosine
  modified_base 16..17: mod_base = OTHER; note = S-phosphorothioate
  modified_base 17: mod_base = OTHER; note = 2-fluororibose cytosine
  modified_base 17..18: mod_base = OTHER; note = S-phosphorothioate
  modified_base 18: mod_base = OTHER; note = 2-fluororibose cytosine
  modified_base 18..19: mod_base = OTHER; note = S-phosphorothioate
  modified_base 19: mod_base = OTHER; note = 2-fluororibose uracil
  modified_base 19..20: mod_base = OTHER; note = S-phosphorothioate
  modified_base 20: mod_base = OTHER; note = 2-fluororibose uracil
  modified_base 20..21: mod_base = OTHER; note = S-phosphorothioate
  modified_base 21: mod_base = OTHER; note = 2-fluororibose uracil
  modified_base 21..22: mod_base = OTHER; note = S-phosphorothioate
  modified_base 22: mod_base = OTHER; note = 2-fluororibose cytosine
  modified_base 22..23: mod_base = OTHER; note = S-phosphorothioate
  modified_base 23: mod_base = OTHER; note = 2-fluororibose uracil
  modified_base 23..24: mod_base = OTHER; note = S-phosphorothioate
  modified_base 24: mod_base = OTHER; note = deoxyribose 6-amino-9-substituted 8,9-dihydro-7H-purin-8-one
  modified_base 24..25: mod_base = OTHER; note = S-phosphorothioate
  modified_base 25: mod_base = OTHER; note = deoxyribose inosine
  modified_base 25..26: mod_base = OTHER; note S-N-(1,3-dimethylimidazolidin-2-ylidene)phosphoramidate
  modified_base 26: mod_base = um
  modified_base 26..27: mod_base = OTHER; note = S-phosphorothioate
  modified_base 27: mod_base = OTHER; note = 2-fluororibose cytosine
  modified_base 27..28: mod_base = OTHER; note = S-phosphorothioate
  modified_base 28: mod_base = gm
  modified_base 28..29: mod_base = OTHER; note = S-phosphorothioate
  modified_base 29: mod_base = OTHER; note = 2-O-methylribose adenine
  modified_base 29..30: mod_base = OTHER; note R-N-(1,3-dimethylimidazolidin-2-ylidene)phosphoramidate
  modified_base 30: mod_base = um
  source 1..30: mol_type = other RNA

SEQ ID NO: 350 - RNA, 30 nt, synthetic construct; identical to SEQ ID NO: 134
  misc_feature 1..30: note = Synthetic: WV-44199
  misc_feature 1..30: note = Synthetic: ADR-0104015
  modified_base 1: mod_base = cm
  modified_base 1..2: mod_base = OTHER; note R-N-(1,3-dimethylimidazolidin-2-ylidene)phosphoramidate
  modified_base 2: mod_base = cm
  modified_base 2..3: mod_base = OTHER; note = S-phosphorothioate
  modified_base 3: mod_base = cm
  modified_base 3..4: mod_base = OTHER; note = S-phosphorothioate
  modified_base 4: mod_base = OTHER; note = 2-fluororibose adenine
  modified_base 4..5: mod_base = OTHER; note = S-phosphorothioate
  modified_base 5: mod_base = OTHER; note = 2-fluororibose guanine
  modified_base 5..6: mod_base = OTHER; note = S-phosphorothioate
  modified_base 6: mod_base = OTHER; note = 2-fluororibose cytosine
  modified_base 6..7: mod_base = OTHER; note = S-phosphorothioate
  modified_base 7: mod_base = OTHER; note = 2-fluororibose adenine
  modified_base 7..8: mod_base = OTHER; note = S-phosphorothioate
  modified_base 8: mod_base = OTHER; note = 2-fluororibose guanine
  modified_base 8..9: mod_base = OTHER; note = S-phosphorothioate
  modified_base 9: mod_base = OTHER; note = 2-fluororibose cytosine
  modified_base 9..10: mod_base = OTHER; note = S-phosphorothioate
  modified_base 10: mod_base = OTHER; note = 2-fluororibose uracil
  modified_base 10..11: mod_base = OTHER; note = S-phosphorothioate
  modified_base 11: mod_base = OTHER; note = 2-fluororibose uracil
  modified_base 11..12: mod_base = OTHER; note = S-phosphorothioate
  modified_base 12: mod_base = OTHER; note = 2-fluororibose cytosine
  modified_base 12..13: mod_base = OTHER; note = S-phosphorothioate
  modified_base 13: mod_base = OTHER; note = 2-fluororibose adenine
  modified_base 13..14: mod_base = OTHER; note = S-phosphorothioate
  modified_base 14: mod_base = OTHER; note = 2-fluororibose guanine
  modified_base 14..15: mod_base = OTHER; note = S-phosphorothioate
  modified_base 15: mod_base = OTHER; note = 2-fluororibose uracil
  modified_base 15..16: mod_base = OTHER; note = S-phosphorothioate
  modified_base 16: mod_base = OTHER; note = 2-fluororibose cytosine
  modified_base 16..17: mod_base = OTHER; note = S-phosphorothioate
  modified_base 17: mod_base = OTHER; note = 2-fluororibose cytosine
  modified_base 17..18: mod_base = OTHER; note = S-phosphorothioate
  modified_base 18: mod_base = OTHER; note = 2-fluororibose cytosine
  modified_base 18..19: mod_base = OTHER; note = S-phosphorothioate
  modified_base 19: mod_base = OTHER; note = 2-fluororibose uracil
  modified_base 19..20: mod_base = OTHER; note = S-phosphorothioate
  modified_base 20: mod_base = OTHER; note = 2-fluororibose uracil
  modified_base 20..21: mod_base = OTHER; note = S-phosphorothioate
  modified_base 21: mod_base = OTHER; note = 2-fluororibose uracil
  modified_base 21..22: mod_base = OTHER; note = S-phosphorothioate
  modified_base 22: mod_base = OTHER; note = 2-fluororibose cytosine
  modified_base 22..23: mod_base = OTHER; note = S-phosphorothioate
  modified_base 23: mod_base = OTHER; note = 2-fluororibose uracil
  modified_base 23..24: mod_base = OTHER; note = S-phosphorothioate
  modified_base 24: mod_base = OTHER; note = deoxyribose 6-amino-9-substituted 8,9-dihydro-7H-purin-8-one
  modified_base 24..25: mod_base = OTHER; note = S-phosphorothioate
  modified_base 25: mod_base = OTHER; note = deoxyribose inosine
  modified_base 25..26: mod_base = OTHER; note = R-phosphorothioate
  modified_base 26: mod_base = um
  modified_base 26..27: mod_base = OTHER; note = S-phosphorothioate
  modified_base 27: mod_base = OTHER; note = 2-fluororibose cytosine
  modified_base 27..28: mod_base = OTHER; note = S-phosphorothioate
  modified_base 28: mod_base = gm
  modified_base 28..29: mod_base = OTHER; note = S-phosphorothioate
  modified_base 29: mod_base = OTHER; note = 2-O-methylribose adenine
  modified_base 29..30: mod_base = OTHER; note R-N-(1,3-dimethylimidazolidin-2-ylidene)phosphoramidate
  modified_base 30: mod_base = um
  source 1..30: mol_type = other RNA

SEQ ID NO: 351 - RNA, 30 nt, synthetic construct; identical to SEQ ID NO: 134
  misc_feature 1..30: note = Synthetic: WV-44200
  misc_feature 1..30: note = Synthetic: ADR-0104017
  modified_base 1: mod_base = cm
  modified_base 1..2: mod_base = OTHER; note R-N-(1,3-dimethylimidazolidin-2-ylidene)phosphoramidate
  modified_base 2: mod_base = cm
  modified_base 2..3: mod_base = OTHER; note = S-phosphorothioate
  modified_base 3: mod_base = cm
  modified_base 3..4: mod_base = OTHER; note = S-phosphorothioate
  modified_base 4: mod_base = OTHER; note = 2-fluororibose adenine
  modified_base 4..5: mod_base = OTHER; note = S-phosphorothioate
  modified_base 5: mod_base = OTHER; note = 2-fluororibose guanine
  modified_base 5..6: mod_base = OTHER; note = S-phosphorothioate
  modified_base 6: mod_base = OTHER; note = 2-fluororibose cytosine
  modified_base 6..7: mod_base = OTHER; note = S-phosphorothioate
  modified_base 7: mod_base = OTHER; note = 2-fluororibose adenine
  modified_base 7..8: mod_base = OTHER; note = S-phosphorothioate
  modified_base 8: mod_base = OTHER; note = 2-fluororibose guanine
  modified_base 8..9: mod_base = OTHER; note = S-phosphorothioate
  modified_base 9: mod_base = OTHER; note = 2-fluororibose cytosine
  modified_base 9..10: mod_base = OTHER; note = S-phosphorothioate
  modified_base 10: mod_base = OTHER; note = 2-fluororibose uracil
  modified_base 10..11: mod_base = OTHER; note = S-phosphorothioate
  modified_base 11: mod_base = OTHER; note = 2-fluororibose uracil
  modified_base 11..12: mod_base = OTHER; note = S-phosphorothioate
  modified_base 12: mod_base = OTHER; note = 2-fluororibose cytosine
  modified_base 12..13: mod_base = OTHER; note = S-phosphorothioate
  modified_base 13: mod_base = OTHER; note = 2-fluororibose adenine
  modified_base 13..14: mod_base = OTHER; note = S-phosphorothioate
  modified_base 14: mod_base = OTHER; note = 2-fluororibose guanine
  modified_base 14..15: mod_base = OTHER; note = S-phosphorothioate
  modified_base 15: mod_base = OTHER; note = 2-fluororibose uracil
  modified_base 15..16: mod_base = OTHER; note = S-phosphorothioate
  modified_base 16: mod_base = OTHER; note = 2-fluororibose cytosine
  modified_base 16..17: mod_base = OTHER; note = S-phosphorothioate
  modified_base 17: mod_base = OTHER; note = 2-fluororibose cytosine
  modified_base 17..18: mod_base = OTHER; note = S-phosphorothioate
  modified_base 18: mod_base = OTHER; note = 2-fluororibose cytosine
  modified_base 18..19: mod_base = OTHER; note = S-phosphorothioate
  modified_base 19: mod_base = OTHER; note = 2-fluororibose uracil
  modified_base 19..20: mod_base = OTHER; note = S-phosphorothioate
  modified_base 20: mod_base = OTHER; note = 2-fluororibose uracil
  modified_base 20..21: mod_base = OTHER; note = S-phosphorothioate
  modified_base 21: mod_base = OTHER; note = 2-fluororibose uracil
  modified_base 21..22: mod_base = OTHER; note = S-phosphorothioate
  modified_base 22: mod_base = OTHER; note = 2-fluororibose cytosine
  modified_base 22..23: mod_base = OTHER; note = S-phosphorothioate
  modified_base 23: mod_base = OTHER; note = 2-fluororibose uracil
  modified_base 23..24: mod_base = OTHER; note = S-phosphorothioate
  modified_base 24: mod_base = OTHER; note = deoxyribose 6-amino-9-substituted 8,9-dihydro-7H-purin-8-one
  modified_base 24..25: mod_base = OTHER; note = S-phosphorothioate
  modified_base 25: mod_base = OTHER; note = deoxyribose inosine
  modified_base 25..26: mod_base = OTHER; note S-N-(1,3-dimethylimidazolidin-2-ylidene)phosphoramidate
  modified_base 26: mod_base = um
  modified_base 26..27: mod_base = OTHER; note = S-phosphorothioate
  modified_base 27: mod_base = OTHER; note = 2-fluororibose cytosine
  modified_base 27..28: mod_base = OTHER; note = S-phosphorothioate
  modified_base 28: mod_base = gm
  modified_base 28..29: mod_base = OTHER; note = S-phosphorothioate
  modified_base 29: mod_base = OTHER; note = 2-O-methylribose adenine
  modified_base 29..30: mod_base = OTHER; note = S-phosphorothioate
  modified_base 30: mod_base = um
  source 1..30: mol_type = other RNA

SEQ ID NO: 352 - RNA, 30 nt, synthetic construct; identical to SEQ ID NO: 134
  misc_feature 1..30: note = Synthetic: WV-44198
  misc_feature 1..30: note = Synthetic: ADR-0103972
  modified_base 1: mod_base = cm
  modified_base 1..2: mod_base = OTHER; note = S-phosphorothioate
  modified_base 2: mod_base = cm
  modified_base 2..3: mod_base = OTHER; note = S-phosphorothioate
  modified_base 3: mod_base = cm
  modified_base 3..4: mod_base = OTHER; note = S-phosphorothioate
  modified_base 4: mod_base = OTHER; note = 2-fluororibose adenine
  modified_base 4..5: mod_base = OTHER; note = S-phosphorothioate
  modified_base 5: mod_base = OTHER; note = 2-fluororibose guanine
  modified_base 5..6: mod_base = OTHER; note = S-phosphorothioate
  modified_base 6: mod_base = OTHER; note = 2-fluororibose cytosine
  modified_base 6..7: mod_base = OTHER; note = S-phosphorothioate
  modified_base 7: mod_base = OTHER; note = 2-fluororibose adenine
  modified_base 7..8: mod_base = OTHER; note = S-phosphorothioate
  modified_base 8: mod_base = OTHER; note = 2-fluororibose guanine
  modified_base 8..9: mod_base = OTHER; note = S-phosphorothioate
  modified_base 9: mod_base = OTHER; note = 2-fluororibose cytosine
  modified_base 9..10: mod_base = OTHER; note = S-phosphorothioate
  modified_base 10: mod_base = OTHER; note = 2-fluororibose uracil
  modified_base 10..11: mod_base = OTHER; note = S-phosphorothioate
  modified_base 11: mod_base = OTHER; note = 2-fluororibose uracil
  modified_base 11..12: mod_base = OTHER; note = S-phosphorothioate
  modified_base 12: mod_base = OTHER; note = 2-fluororibose cytosine
  modified_base 12..13: mod_base = OTHER; note = S-phosphorothioate
  modified_base 13: mod_base = OTHER; note = 2-fluororibose adenine
  modified_base 13..14: mod_base = OTHER; note = S-phosphorothioate
  modified_base 14: mod_base = OTHER; note = 2-fluororibose guanine
  modified_base 14..15: mod_base = OTHER; note = S-phosphorothioate
  modified_base 15: mod_base = OTHER; note = 2-fluororibose uracil
  modified_base 15..16: mod_base = OTHER; note = S-phosphorothioate
  modified_base 16: mod_base = OTHER; note = 2-fluororibose cytosine
  modified_base 16..17: mod_base = OTHER; note = S-phosphorothioate
  modified_base 17: mod_base = OTHER; note = 2-fluororibose cytosine
  modified_base 17..18: mod_base = OTHER; note = S-phosphorothioate
  modified_base 18: mod_base = OTHER; note = 2-fluororibose cytosine
  modified_base 18..19: mod_base = OTHER; note = S-phosphorothioate
  modified_base 19: mod_base = OTHER; note = 2-fluororibose uracil
  modified_base 19..20: mod_base = OTHER; note = S-phosphorothioate
  modified_base 20: mod_base = OTHER; note = 2-fluororibose uracil
  modified_base 20..21: mod_base = OTHER; note = S-phosphorothioate
  modified_base 21: mod_base = OTHER; note = 2-fluororibose uracil
  modified_base 21..22: mod_base = OTHER; note = S-phosphorothioate
  modified_base 22: mod_base = OTHER; note = 2-fluororibose cytosine
  modified_base 22..23: mod_base = OTHER; note = S-phosphorothioate
  modified_base 23: mod_base = OTHER; note = 2-fluororibose uracil
  modified_base 23..24: mod_base = OTHER; note = S-phosphorothioate
  modified_base 24: mod_base = OTHER; note = deoxyribose 6-amino-9-substituted 8,9-dihydro-7H-purin-8-one
  modified_base 24..25: mod_base = OTHER; note = S-phosphorothioate
  modified_base 25: mod_base = OTHER; note = deoxyribose inosine
  modified_base 25..26: mod_base = OTHER; note S-N-(1,3-dimethylimidazolidin-2-ylidene)phosphoramidate
  modified_base 26: mod_base = um
  modified_base 26..27: mod_base = OTHER; note = S-phosphorothioate
  modified_base 27: mod_base = OTHER; note = 2-fluororibose cytosine
  modified_base 27..28: mod_base = OTHER; note = S-phosphorothioate
  modified_base 28: mod_base = gm
  modified_base 28..29: mod_base = OTHER; note = S-phosphorothioate
  modified_base 29: mod_base = OTHER; note = 2-O-methylribose adenine
  modified_base 29..30: mod_base = OTHER; note R-N-(1,3-dimethylimidazolidin-2-ylidene)phosphoramidate
  modified_base 30: mod_base = um
  source 1..30: mol_type = other RNA

SEQ ID NO: 353 - RNA, 30 nt, synthetic construct; identical to SEQ ID NO: 134
  misc_feature 1..30: note = Synthetic: WV-44203
  misc_feature 1..30: note = Synthetic: ADR-0104305
  modified_base 1: mod_base = cm
  modified_base 1..2: mod_base = OTHER; note R-N-(1,3-dimethylimidazolidin-2-ylidene)phosphoramidate
  modified_base 2: mod_base = cm
  modified_base 2..3: mod_base = OTHER; note = S-phosphorothioate
  modified_base 3: mod_base = cm
  modified_base 3..4: mod_base = OTHER; note = S-phosphorothioate
  modified_base 4: mod_base = OTHER; note = 2-O-methylribose adenine
  modified_base 4..5: mod_base = OTHER; note = S-phosphorothioate
  modified_base 5: mod_base = gm
  modified_base 5..6: mod_base = OTHER; note = S-phosphorothioate
  modified_base 6: mod_base = OTHER; note = 2-fluororibose cytosine
  modified_base 6..7: mod_base = OTHER; note = S-phosphorothioate
  modified_base 7: mod_base = OTHER; note = 2-fluororibose adenine
  modified_base 7..8: mod_base = OTHER; note = S-phosphorothioate
  modified_base 8: mod_base = OTHER; note = 2-fluororibose guanine
  modified_base 8..9: mod_base = OTHER; note = S-phosphorothioate
  modified_base 9: mod_base = OTHER; note = 2-fluororibose cytosine
  modified_base 9..10: mod_base = OTHER; note = S-phosphorothioate
  modified_base 10: mod_base = OTHER; note = 2-fluororibose uracil
  modified_base 10..11: mod_base = OTHER; note = S-phosphorothioate
  modified_base 11: mod_base = OTHER; note = 2-fluororibose uracil
  modified_base 11..12: mod_base = OTHER; note = S-phosphorothioate
  modified_base 12: mod_base = OTHER; note = 2-fluororibose cytosine
  modified_base 12..13: mod_base = OTHER; note = S-phosphorothioate
  modified_base 13: mod_base = OTHER; note = 2-fluororibose adenine
  modified_base 13..14: mod_base = OTHER; note = S-phosphorothioate
  modified_base 14: mod_base = OTHER; note = 2-fluororibose guanine
  modified_base 14..15: mod_base = OTHER; note = S-phosphorothioate
  modified_base 15: mod_base = OTHER; note = 2-fluororibose uracil
  modified_base 15..16: mod_base = OTHER; note = S-phosphorothioate
  modified_base 16: mod_base = OTHER; note = 2-fluororibose cytosine
  modified_base 16..17: mod_base = OTHER; note = S-phosphorothioate
  modified_base 17: mod_base = OTHER; note = 2-fluororibose cytosine
  modified_base 17..18: mod_base = OTHER; note = S-phosphorothioate
  modified_base 18: mod_base = OTHER; note = 2-fluororibose cytosine
  modified_base 18..19: mod_base = OTHER; note = S-phosphorothioate
  modified_base 19: mod_base = OTHER; note = 2-fluororibose uracil
  modified_base 19..20: mod_base = OTHER; note = S-phosphorothioate
  modified_base 20: mod_base = OTHER; note = 2-fluororibose uracil
  modified_base 20..21: mod_base = OTHER; note = S-phosphorothioate
  modified_base 21: mod_base = OTHER; note = 2-fluororibose uracil
  modified_base 21..22: mod_base = OTHER; note = S-phosphorothioate
  modified_base 22: mod_base = OTHER; note = 2-fluororibose cytosine
  modified_base 22..23: mod_base = OTHER; note = S-phosphorothioate
  modified_base 23: mod_base = OTHER; note = 2-fluororibose uracil
  modified_base 23..24: mod_base = OTHER; note = S-phosphorothioate
  modified_base 24: mod_base = OTHER; note = deoxyribose 6-amino-9-substituted 8,9-dihydro-7H-purin-8-one
  modified_base 24..25: mod_base = OTHER; note = S-phosphorothioate
  modified_base 25: mod_base = OTHER; note = deoxyribose inosine
  modified_base 25..26: mod_base = OTHER; note S-N-(1,3-dimethylimidazolidin-2-ylidene)phosphoramidate
  modified_base 26: mod_base = um
  modified_base 26..27: mod_base = OTHER; note = S-phosphorothioate
  modified_base 27: mod_base = OTHER; note = 2-fluororibose cytosine
  modified_base 27..28: mod_base = OTHER; note = S-phosphorothioate
  modified_base 28: mod_base = gm
  modified_base 28..29: mod_base = OTHER; note = S-phosphorothioate
  modified_base 29: mod_base = OTHER; note = 2-O-methylribose adenine
  modified_base 29..30: mod_base = OTHER; note R-N-(1,3-dimethylimidazolidin-2-ylidene)phosphoramidate
  modified_base 30: mod_base = um
  source 1..30: mol_type = other RNA

SEQ ID NO: 354 - RNA, 30 nt, synthetic construct; identical to SEQ ID NO: 134
  misc_feature 1..30: note = Synthetic: WV-44202
  misc_feature 1..30: note = Synthetic: ADR-0104304
  modified_base 1: mod_base = cm
  modified_base 1..2: mod_base = OTHER; note R-N-(1,3-dimethylimidazolidin-2-ylidene)phosphoramidate
  modified_base 2: mod_base = cm
  modified_base 2..3: mod_base = OTHER; note = S-phosphorothioate
  modified_base 3: mod_base = cm
  modified_base 3..4: mod_base = OTHER; note = S-phosphorothioate
  modified_base 4: mod_base = OTHER; note = 2-O-methylribose adenine
  modified_base 4..5: mod_base = OTHER; note = S-phosphorothioate
  modified_base 5: mod_base = OTHER; note = 2-fluororibose guanine
  modified_base 5..6: mod_base = OTHER; note = S-phosphorothioate
  modified_base 6: mod_base = OTHER; note = 2-fluororibose cytosine
  modified_base 6..7: mod_base = OTHER; note = S-phosphorothioate
  modified_base 7: mod_base = OTHER; note = 2-fluororibose adenine
  modified_base 7..8: mod_base = OTHER; note = S-phosphorothioate
  modified_base 8: mod_base = OTHER; note = 2-fluororibose guanine
  modified_base 8..9: mod_base = OTHER; note = S-phosphorothioate
  modified_base 9: mod_base = OTHER; note = 2-fluororibose cytosine
  modified_base 9..10: mod_base = OTHER; note = S-phosphorothioate
  modified_base 10: mod_base = OTHER; note = 2-fluororibose uracil
  modified_base 10..11: mod_base = OTHER; note = S-phosphorothioate
  modified_base 11: mod_base = OTHER; note = 2-fluororibose uracil
  modified_base 11..12: mod_base = OTHER; note = S-phosphorothioate
  modified_base 12: mod_base = OTHER; note = 2-fluororibose cytosine
  modified_base 12..13: mod_base = OTHER; note = S-phosphorothioate
  modified_base 13: mod_base = OTHER; note = 2-fluororibose adenine
  modified_base 13..14: mod_base = OTHER; note = S-phosphorothioate
  modified_base 14: mod_base = OTHER; note = 2-fluororibose guanine
  modified_base 14..15: mod_base = OTHER; note = S-phosphorothioate
  modified_base 15: mod_base = OTHER; note = 2-fluororibose uracil
  modified_base 15..16: mod_base = OTHER; note = S-phosphorothioate
  modified_base 16: mod_base = OTHER; note = 2-fluororibose cytosine
  modified_base 16..17: mod_base = OTHER; note = S-phosphorothioate
  modified_base 17: mod_base = OTHER; note = 2-fluororibose cytosine
  modified_base 17..18: mod_base = OTHER; note = S-phosphorothioate
  modified_base 18: mod_base = OTHER; note = 2-fluororibose cytosine
  modified_base 18..19: mod_base = OTHER; note = S-phosphorothioate
  modified_base 19: mod_base = OTHER; note = 2-fluororibose uracil
  modified_base 19..20: mod_base = OTHER; note = S-phosphorothioate
  modified_base 20: mod_base = OTHER; note = 2-fluororibose uracil
  modified_base 20..21: mod_base = OTHER; note = S-phosphorothioate
  modified_base 21: mod_base = OTHER; note = 2-fluororibose uracil
  modified_base 21..22: mod_base = OTHER; note = S-phosphorothioate
  modified_base 22: mod_base = OTHER; note = 2-fluororibose cytosine
  modified_base 22..23: mod_base = OTHER; note = S-phosphorothioate
  modified_base 23: mod_base = OTHER; note = 2-fluororibose uracil
  modified_base 23..24: mod_base = OTHER; note = S-phosphorothioate
  modified_base 24: mod_base = OTHER; note = deoxyribose 6-amino-9-substituted 8,9-dihydro-7H-purin-8-one
  modified_base 24..25: mod_base = OTHER; note = S-phosphorothioate
  modified_base 25: mod_base = OTHER; note = deoxyribose inosine
  modified_base 25..26: mod_base = OTHER; note S-N-(1,3-dimethylimidazolidin-2-ylidene)phosphoramidate
  modified_base 26: mod_base = um
  modified_base 26..27: mod_base = OTHER; note = S-phosphorothioate
  modified_base 27: mod_base = OTHER; note = 2-fluororibose cytosine
  modified_base 27..28: mod_base = OTHER; note = S-phosphorothioate
  modified_base 28: mod_base = gm
  modified_base 28..29: mod_base = OTHER; note = S-phosphorothioate
  modified_base 29: mod_base = OTHER; note = 2-O-methylribose adenine
  modified_base 29..30: mod_base = OTHER; note R-N-(1,3-dimethylimidazolidin-2-ylidene)phosphoramidate
  modified_base 30: mod_base = um
  source 1..30: mol_type = other RNA

SEQ ID NO: 355 - RNA, 30 nt, synthetic construct; identical to SEQ ID NO: 134
  misc_feature 1..30: note = Synthetic: WV-44201
  misc_feature 1..30: note = Synthetic: ADR-0103986
  modified_base 1: mod_base = cm
  modified_base 1..2: mod_base = OTHER; note R-N-(1,3-dimethylimidazolidin-2-ylidene)phosphoramidate
  modified_base 2: mod_base = cm
  modified_base 2..3: mod_base = OTHER; note = S-phosphorothioate
  modified_base 3: mod_base = OTHER; note = 2-fluororibose cytosine
  modified_base 3..4: mod_base = OTHER; note = S-phosphorothioate
  modified_base 4: mod_base = OTHER; note = 2-fluororibose adenine
  modified_base 4..5: mod_base = OTHER; note = S-phosphorothioate
  modified_base 5: mod_base = OTHER; note = 2-fluororibose guanine
  modified_base 5..6: mod_base = OTHER; note = S-phosphorothioate
  modified_base 6: mod_base = OTHER; note = 2-fluororibose cytosine
  modified_base 6..7: mod_base = OTHER; note = S-phosphorothioate
  modified_base 7: mod_base = OTHER; note = 2-fluororibose adenine
  modified_base 7..8: mod_base = OTHER; note = S-phosphorothioate
  modified_base 8: mod_base = OTHER; note = 2-fluororibose guanine
  modified_base 8..9: mod_base = OTHER; note = S-phosphorothioate
  modified_base 9: mod_base = OTHER; note = 2-fluororibose cytosine
  modified_base 9..10: mod_base = OTHER; note = S-phosphorothioate
  modified_base 10: mod_base = OTHER; note = 2-fluororibose uracil
  modified_base 10..11: mod_base = OTHER; note = S-phosphorothioate
  modified_base 11: mod_base = OTHER; note = 2-fluororibose uracil
  modified_base 11..12: mod_base = OTHER; note = S-phosphorothioate
  modified_base 12: mod_base = OTHER; note = 2-fluororibose cytosine
  modified_base 12..13: mod_base = OTHER; note = S-phosphorothioate
  modified_base 13: mod_base = OTHER; note = 2-fluororibose adenine
  modified_base 13..14: mod_base = OTHER; note = S-phosphorothioate
  modified_base 14: mod_base = OTHER; note = 2-fluororibose guanine
  modified_base 14..15: mod_base = OTHER; note = S-phosphorothioate
  modified_base 15: mod_base = OTHER; note = 2-fluororibose uracil
  modified_base 15..16: mod_base = OTHER; note = S-phosphorothioate
  modified_base 16: mod_base = OTHER; note = 2-fluororibose cytosine
  modified_base 16..17: mod_base = OTHER; note = S-phosphorothioate
  modified_base 17: mod_base = OTHER; note = 2-fluororibose cytosine
  modified_base 17..18: mod_base = OTHER; note = S-phosphorothioate
  modified_base 18: mod_base = OTHER; note = 2-fluororibose cytosine
  modified_base 18..19: mod_base = OTHER; note = S-phosphorothioate
  modified_base 19: mod_base = OTHER; note = 2-fluororibose uracil
  modified_base 19..20: mod_base = OTHER; note = S-phosphorothioate
  modified_base 20: mod_base = OTHER; note = 2-fluororibose uracil
  modified_base 20..21: mod_base = OTHER; note = S-phosphorothioate
  modified_base 21: mod_base = OTHER; note = 2-fluororibose uracil
  modified_base 21..22: mod_base = OTHER; note = S-phosphorothioate
  modified_base 22: mod_base = OTHER; note = 2-fluororibose cytosine
  modified_base 22..23: mod_base = OTHER; note = S-phosphorothioate
  modified_base 23: mod_base = OTHER; note = 2-fluororibose uracil
  modified_base 23..24: mod_base = OTHER; note = S-phosphorothioate
  modified_base 24: mod_base = OTHER; note = deoxyribose 6-amino-9-substituted 8,9-dihydro-7H-purin-8-one
  modified_base 24..25: mod_base = OTHER; note = S-phosphorothioate
  modified_base 25: mod_base = OTHER; note = deoxyribose inosine
  modified_base 25..26: mod_base = OTHER; note S-N-(1,3-dimethylimidazolidin-2-ylidene)phosphoramidate
  modified_base 26: mod_base = um
  modified_base 26..27: mod_base = OTHER; note = S-phosphorothioate
  modified_base 27: mod_base = OTHER; note = 2-fluororibose cytosine
  modified_base 27..28: mod_base = OTHER; note = S-phosphorothioate
  modified_base 28: mod_base = gm
  modified_base 28..29: mod_base = OTHER; note = S-phosphorothioate
  modified_base 29: mod_base = OTHER; note = 2-O-methylribose adenine
  modified_base 29..30: mod_base = OTHER; note R-N-(1,3-dimethylimidazolidin-2-ylidene)phosphoramidate
  modified_base 30: mod_base = um
  source 1..30: mol_type = other RNA

SEQ ID NO: 356 - RNA, 30 nt, synthetic construct; identical to SEQ ID NO: 134
  misc_feature 1..30: note = Synthetic: WV-44225
  misc_feature 1..30: note = Synthetic: ADR-0103973
  modified_base 1: mod_base = cm
  modified_base 1..2: mod_base = OTHER; note R-N-(1,3-dimethylimidazolidin-2-ylidene)phosphoramidate
  modified_base 2: mod_base = OTHER; note = 2-fluororibose cytosine
  modified_base 2..3: mod_base = OTHER; note = S-phosphorothioate
  modified_base 3: mod_base = OTHER; note = 2-fluororibose cytosine
  modified_base 3..4: mod_base = OTHER; note = S-phosphorothioate
  modified_base 4: mod_base = OTHER; note = 2-fluororibose adenine
  modified_base 4..5: mod_base = OTHER; note = S-phosphorothioate
  modified_base 5: mod_base = OTHER; note = 2-fluororibose guanine
  modified_base 5..6: mod_base = OTHER; note = S-phosphorothioate
  modified_base 6: mod_base = OTHER; note = 2-fluororibose cytosine
  modified_base 6..7: mod_base = OTHER; note = S-phosphorothioate
  modified_base 7: mod_base = OTHER; note = 2-fluororibose adenine
  modified_base 7..8: mod_base = OTHER; note = S-phosphorothioate
  modified_base 8: mod_base = OTHER; note = 2-fluororibose guanine
  modified_base 8..9: mod_base = OTHER; note = S-phosphorothioate
  modified_base 9: mod_base = OTHER; note = 2-fluororibose cytosine
  modified_base 9..10: mod_base = OTHER; note = S-phosphorothioate
  modified_base 10: mod_base = OTHER; note = 2-fluororibose uracil
  modified_base 10..11: mod_base = OTHER; note = S-phosphorothioate
  modified_base 11: mod_base = OTHER; note = 2-fluororibose uracil
  modified_base 11..12: mod_base = OTHER; note = S-phosphorothioate
  modified_base 12: mod_base = OTHER; note = 2-fluororibose cytosine
  modified_base 12..13: mod_base = OTHER; note = S-phosphorothioate
  modified_base 13: mod_base = OTHER; note = 2-fluororibose adenine
  modified_base 13..14: mod_base = OTHER; note = S-phosphorothioate
  modified_base 14: mod_base = OTHER; note = 2-fluororibose guanine
  modified_base 14..15: mod_base = OTHER; note = S-phosphorothioate
  modified_base 15: mod_base = OTHER; note = 2-fluororibose uracil
  modified_base 15..16: mod_base = OTHER; note = S-phosphorothioate
  modified_base 16: mod_base = OTHER; note = 2-fluororibose cytosine
  modified_base 16..17: mod_base = OTHER; note = S-phosphorothioate
  modified_base 17: mod_base = OTHER; note = 2-fluororibose cytosine
  modified_base 17..18: mod_base = OTHER; note = S-phosphorothioate
  modified_base 18: mod_base = OTHER; note = 2-fluororibose cytosine
  modified_base 18..19: mod_base = OTHER; note = S-phosphorothioate
  modified_base 19: mod_base = OTHER; note = 2-fluororibose uracil
  modified_base 19..20: mod_base = OTHER; note = S-phosphorothioate
  modified_base 20: mod_base = OTHER; note = 2-fluororibose uracil
  modified_base 20..21: mod_base = OTHER; note = S-phosphorothioate
  modified_base 21: mod_base = OTHER; note = 2-fluororibose uracil
  modified_base 21..22: mod_base = OTHER; note = S-phosphorothioate
  modified_base 22: mod_base = OTHER; note = 2-fluororibose cytosine
  modified_base 22..23: mod_base = OTHER; note = S-phosphorothioate
  modified_base 23: mod_base = OTHER; note = 2-fluororibose uracil
  modified_base 23..24: mod_base = OTHER; note = S-phosphorothioate
  modified_base 24: mod_base = OTHER; note = deoxyribose 6-amino-9-substituted 8,9-dihydro-7H-purin-8-one
  modified_base 24..25: mod_base = OTHER; note = S-phosphorothioate
  modified_base 25: mod_base = OTHER; note = deoxyribose inosine
  modified_base 25..26: mod_base = OTHER; note S-N-(1,3-dimethylimidazolidin-2-ylidene)phosphoramidate
  modified_base 26: mod_base = um
  modified_base 26..27: mod_base = OTHER; note = S-phosphorothioate
  modified_base 27: mod_base = OTHER; note = 2-fluororibose cytosine
  modified_base 27..28: mod_base = OTHER; note = S-phosphorothioate
  modified_base 28: mod_base = gm
  modified_base 28..29: mod_base = OTHER; note = S-phosphorothioate
  modified_base 29: mod_base = OTHER; note = 2-O-methylribose adenine
  modified_base 29..30: mod_base = OTHER; note R-N-(1,3-dimethylimidazolidin-2-ylidene)phosphoramidate
  modified_base 30: mod_base = um
  source 1..30: mol_type = other RNA

SEQ ID NO: 357 - RNA, 30 nt, synthetic construct; identical to SEQ ID NO: 134
  misc_feature 1..30: note = Synthetic: WV-44268
  misc_feature 1..30: note = Synthetic: ADR-0103964
  modified_base 1: mod_base = OTHER; note = deoxyribose cytosine
  modified_base 1..2: mod_base = OTHER; note R-N-(1,3-dimethylimidazolidin-2-ylidene)phosphoramidate
  modified_base 2: mod_base = OTHER; note = deoxyribose cytosine
  modified_base 2..3: mod_base = OTHER; note = S-phosphorothioate
  modified_base 3: mod_base = OTHER; note = deoxyribose cytosine
  modified_base 3..4: mod_base = OTHER; note = S-phosphorothioate
  modified_base 4: mod_base = OTHER; note = 2-fluororibose adenine
  modified_base 4..5: mod_base = OTHER; note = S-phosphorothioate
  modified_base 5: mod_base = OTHER; note = 2-fluororibose guanine
  modified_base 5..6: mod_base = OTHER; note = S-phosphorothioate
  modified_base 6: mod_base = OTHER; note = 2-fluororibose cytosine
  modified_base 6..7: mod_base = OTHER; note = S-phosphorothioate
  modified_base 7: mod_base = OTHER; note = 2-fluororibose adenine
  modified_base 7..8: mod_base = OTHER; note = S-phosphorothioate
  modified_base 8: mod_base = OTHER; note = 2-fluororibose guanine
  modified_base 8..9: mod_base = OTHER; note = S-phosphorothioate
  modified_base 9: mod_base = OTHER; note = 2-fluororibose cytosine
  modified_base 9..10: mod_base = OTHER; note = S-phosphorothioate
  modified_base 10: mod_base = OTHER; note = 2-fluororibose uracil
  modified_base 10..11: mod_base = OTHER; note = S-phosphorothioate
  modified_base 11: mod_base = OTHER; note = 2-fluororibose uracil
  modified_base 11..12: mod_base = OTHER; note = S-phosphorothioate
  modified_base 12: mod_base = OTHER; note = 2-fluororibose cytosine
  modified_base 12..13: mod_base = OTHER; note = S-phosphorothioate
  modified_base 13: mod_base = OTHER; note = 2-fluororibose adenine
  modified_base 13..14: mod_base = OTHER; note = S-phosphorothioate
  modified_base 14: mod_base = OTHER; note = 2-fluororibose guanine
  modified_base 14..15: mod_base = OTHER; note = S-phosphorothioate
  modified_base 15: mod_base = OTHER; note = 2-fluororibose uracil
  modified_base 15..16: mod_base = OTHER; note = S-phosphorothioate
  modified_base 16: mod_base = OTHER; note = 2-fluororibose cytosine
  modified_base 16..17: mod_base = OTHER; note = S-phosphorothioate
  modified_base 17: mod_base = OTHER; note = 2-fluororibose cytosine
  modified_base 17..18: mod_base = OTHER; note = S-phosphorothioate
  modified_base 18: mod_base = OTHER; note = 2-fluororibose cytosine
  modified_base 18..19: mod_base = OTHER; note = S-phosphorothioate
  modified_base 19: mod_base = OTHER; note = 2-fluororibose uracil
  modified_base 19..20: mod_base = OTHER; note = S-phosphorothioate
  modified_base 20: mod_base = OTHER; note = 2-fluororibose uracil
  modified_base 20..21: mod_base = OTHER; note = S-phosphorothioate
  modified_base 21: mod_base = OTHER; note = 2-fluororibose uracil
  modified_base 21..22: mod_base = OTHER; note = S-phosphorothioate
  modified_base 22: mod_base = OTHER; note = 2-fluororibose cytosine
  modified_base 22..23: mod_base = OTHER; note = S-phosphorothioate
  modified_base 23: mod_base = OTHER; note = 2-fluororibose uracil
  modified_base 23..24: mod_base = OTHER; note = S-phosphorothioate
  modified_base 24: mod_base = OTHER; note = deoxyribose 6-amino-9-substituted 8,9-dihydro-7H-purin-8-one
  modified_base 24..25: mod_base = OTHER; note = S-phosphorothioate
  modified_base 25: mod_base = OTHER; note = deoxyribose inosine
  modified_base 25..26: mod_base = OTHER; note S-N-(1,3-dimethylimidazolidin-2-ylidene)phosphoramidate
  modified_base 26: mod_base = um
  modified_base 26..27: mod_base = OTHER; note = S-phosphorothioate
  modified_base 27: mod_base = OTHER; note = 2-fluororibose cytosine
  modified_base 27..28: mod_base = OTHER; note = S-phosphorothioate
  modified_base 28: mod_base = gm
  modified_base 28..29: mod_base = OTHER; note = S-phosphorothioate
  modified_base 29: mod_base = OTHER; note = 2-O-methylribose adenine
  modified_base 29..30: mod_base = OTHER; note R-N-(1,3-dimethylimidazolidin-2-ylidene)phosphoramidate
  modified_base 30: mod_base = um
  source 1..30: mol_type = other RNA

SEQ ID NO: 358 - RNA, 30 nt, synthetic construct; identical to SEQ ID NO: 134
  misc_feature 1..30: note = Synthetic: WV-44267
  misc_feature 1..30: note = Synthetic: ADR-0103987
  modified_base 1: mod_base = cm
  modified_base 1..2: mod_base = OTHER; note R-N-(1,3-dimethylimidazolidin-2-ylidene)phosphoramidate
  modified_base 2: mod_base = cm
  modified_base 2..3: mod_base = OTHER; note = S-phosphorothioate
  modified_base 3: mod_base = OTHER; note = deoxyribose cytosine
  modified_base 3..4: mod_base = OTHER; note = S-phosphorothioate
  modified_base 4: mod_base = OTHER; note = 2-fluororibose adenine
  modified_base 4..5: mod_base = OTHER; note = S-phosphorothioate
  modified_base 5: mod_base = OTHER; note = 2-fluororibose guanine
  modified_base 5..6: mod_base = OTHER; note = S-phosphorothioate
  modified_base 6: mod_base = OTHER; note = 2-fluororibose cytosine
  modified_base 6..7: mod_base = OTHER; note = S-phosphorothioate
  modified_base 7: mod_base = OTHER; note = 2-fluororibose adenine
  modified_base 7..8: mod_base = OTHER; note = S-phosphorothioate
  modified_base 8: mod_base = OTHER; note = 2-fluororibose guanine
  modified_base 8..9: mod_base = OTHER; note = S-phosphorothioate
  modified_base 9: mod_base = OTHER; note = 2-fluororibose cytosine
  modified_base 9..10: mod_base = OTHER; note = S-phosphorothioate
  modified_base 10: mod_base = OTHER; note = 2-fluororibose uracil
  modified_base 10..11: mod_base = OTHER; note = S-phosphorothioate
  modified_base 11: mod_base = OTHER; note = 2-fluororibose uracil
  modified_base 11..12: mod_base = OTHER; note = S-phosphorothioate
  modified_base 12: mod_base = OTHER; note = 2-fluororibose cytosine
  modified_base 12..13: mod_base = OTHER; note = S-phosphorothioate
  modified_base 13: mod_base = OTHER; note = 2-fluororibose adenine
  modified_base 13..14: mod_base = OTHER; note = S-phosphorothioate
  modified_base 14: mod_base = OTHER; note = 2-fluororibose guanine
  modified_base 14..15: mod_base = OTHER; note = S-phosphorothioate
  modified_base 15: mod_base = OTHER; note = 2-fluororibose uracil
  modified_base 15..16: mod_base = OTHER; note = S-phosphorothioate
  modified_base 16: mod_base = OTHER; note = 2-fluororibose cytosine
  modified_base 16..17: mod_base = OTHER; note = S-phosphorothioate
  modified_base 17: mod_base = OTHER; note = 2-fluororibose cytosine
  modified_base 17..18: mod_base = OTHER; note = S-phosphorothioate
  modified_base 18: mod_base = OTHER; note = 2-fluororibose cytosine
  modified_base 18..19: mod_base = OTHER; note = S-phosphorothioate
  modified_base 19: mod_base = OTHER; note = 2-fluororibose uracil
  modified_base 19..20: mod_base = OTHER; note = S-phosphorothioate
  modified_base 20: mod_base = OTHER; note = 2-fluororibose uracil
  modified_base 20..21: mod_base = OTHER; note = S-phosphorothioate
  modified_base 21: mod_base = OTHER; note = 2-fluororibose uracil
  modified_base 21..22: mod_base = OTHER; note = S-phosphorothioate
  modified_base 22: mod_base = OTHER; note = 2-fluororibose cytosine
  modified_base 22..23: mod_base = OTHER; note = S-phosphorothioate
  modified_base 23: mod_base = OTHER; note = 2-fluororibose uracil
  modified_base 23..24: mod_base = OTHER; note = S-phosphorothioate
  modified_base 24: mod_base = OTHER; note = deoxyribose 6-amino-9-substituted 8,9-dihydro-7H-purin-8-one
  modified_base 24..25: mod_base = OTHER; note = S-phosphorothioate
  modified_base 25: mod_base = OTHER; note = deoxyribose inosine
  modified_base 25..26: mod_base = OTHER; note S-N-(1,3-dimethylimidazolidin-2-ylidene)phosphoramidate
  modified_base 26: mod_base = um
  modified_base 26..27: mod_base = OTHER; note = S-phosphorothioate
  modified_base 27: mod_base = OTHER; note = 2-fluororibose cytosine
  modified_base 27..28: mod_base = OTHER; note = S-phosphorothioate
  modified_base 28: mod_base = gm
  modified_base 28..29: mod_base = OTHER; note = S-phosphorothioate
  modified_base 29: mod_base = OTHER; note = 2-O-methylribose adenine
  modified_base 29..30: mod_base = OTHER; note R-N-(1,3-dimethylimidazolidin-2-ylidene)phosphoramidate
  modified_base 30: mod_base = um
  source 1..30: mol_type = other RNA

SEQ ID NO: 359 - RNA, 30 nt, synthetic construct; identical to SEQ ID NO: 134
  misc_feature 1..30: note = Synthetic: WV-44266
  misc_feature 1..30: note = Synthetic: ADR-0103977
  modified_base 1: mod_base = cm
  modified_base 1..2: mod_base = OTHER; note R-N-(1,3-dimethylimidazolidin-2-ylidene)phosphoramidate
  modified_base 2: mod_base = OTHER; note = deoxyribose cytosine
  modified_base 2..3: mod_base = OTHER; note = S-phosphorothioate
  modified_base 3: mod_base = cm
  modified_base 3..4: mod_base = OTHER; note = S-phosphorothioate
  modified_base 4: mod_base = OTHER; note = 2-fluororibose adenine
  modified_base 4..5: mod_base = OTHER; note = S-phosphorothioate
  modified_base 5: mod_base = OTHER; note = 2-fluororibose guanine
  modified_base 5..6: mod_base = OTHER; note = S-phosphorothioate
  modified_base 6: mod_base = OTHER; note = 2-fluororibose cytosine
  modified_base 6..7: mod_base = OTHER; note = S-phosphorothioate
  modified_base 7: mod_base = OTHER; note = 2-fluororibose adenine
  modified_base 7..8: mod_base = OTHER; note = S-phosphorothioate
  modified_base 8: mod_base = OTHER; note = 2-fluororibose guanine
  modified_base 8..9: mod_base = OTHER; note = S-phosphorothioate
  modified_base 9: mod_base = OTHER; note = 2-fluororibose cytosine
  modified_base 9..10: mod_base = OTHER; note = S-phosphorothioate
  modified_base 10: mod_base = OTHER; note = 2-fluororibose uracil
  modified_base 10..11: mod_base = OTHER; note = S-phosphorothioate
  modified_base 11: mod_base = OTHER; note = 2-fluororibose uracil
  modified_base 11..12: mod_base = OTHER; note = S-phosphorothioate
  modified_base 12: mod_base = OTHER; note = 2-fluororibose cytosine
  modified_base 12..13: mod_base = OTHER; note = S-phosphorothioate
  modified_base 13: mod_base = OTHER; note = 2-fluororibose adenine
  modified_base 13..14: mod_base = OTHER; note = S-phosphorothioate
  modified_base 14: mod_base = OTHER; note = 2-fluororibose guanine
  modified_base 14..15: mod_base = OTHER; note = S-phosphorothioate
  modified_base 15: mod_base = OTHER; note = 2-fluororibose uracil
  modified_base 15..16: mod_base = OTHER; note = S-phosphorothioate
  modified_base 16: mod_base = OTHER; note = 2-fluororibose cytosine
  modified_base 16..17: mod_base = OTHER; note = S-phosphorothioate
  modified_base 17: mod_base = OTHER; note = 2-fluororibose cytosine
  modified_base 17..18: mod_base = OTHER; note = S-phosphorothioate
  modified_base 18: mod_base = OTHER; note = 2-fluororibose cytosine
  modified_base 18..19: mod_base = OTHER; note = S-phosphorothioate
  modified_base 19: mod_base = OTHER; note = 2-fluororibose uracil
  modified_base 19..20: mod_base = OTHER; note = S-phosphorothioate
  modified_base 20: mod_base = OTHER; note = 2-fluororibose uracil
  modified_base 20..21: mod_base = OTHER; note = S-phosphorothioate
  modified_base 21: mod_base = OTHER; note = 2-fluororibose uracil
  modified_base 21..22: mod_base = OTHER; note = S-phosphorothioate
  modified_base 22: mod_base = OTHER; note = 2-fluororibose cytosine
  modified_base 22..23: mod_base = OTHER; note = S-phosphorothioate
  modified_base 23: mod_base = OTHER; note = 2-fluororibose uracil
  modified_base 23..24: mod_base = OTHER; note = S-phosphorothioate
  modified_base 24: mod_base = OTHER; note = deoxyribose 6-amino-9-substituted 8,9-dihydro-7H-purin-8-one
  modified_base 24..25: mod_base = OTHER; note = S-phosphorothioate
  modified_base 25: mod_base = OTHER; note = deoxyribose inosine
  modified_base 25..26: mod_base = OTHER; note S-N-(1,3-dimethylimidazolidin-2-ylidene)phosphoramidate
  modified_base 26: mod_base = um
  modified_base 26..27: mod_base = OTHER; note = S-phosphorothioate
  modified_base 27: mod_base = OTHER; note = 2-fluororibose cytosine
  modified_base 27..28: mod_base = OTHER; note = S-phosphorothioate
  modified_base 28: mod_base = gm
  modified_base 28..29: mod_base = OTHER; note = S-phosphorothioate
  modified_base 29: mod_base = OTHER; note = 2-O-methylribose adenine
  modified_base 29..30: mod_base = OTHER; note R-N-(1,3-dimethylimidazolidin-2-ylidene)phosphoramidate
  modified_base 30: mod_base = um
  source 1..30: mol_type = other RNA

SEQ ID NO: 360 - RNA, 30 nt, synthetic construct; identical to SEQ ID NO: 134
  misc_feature 1..30: note = Synthetic: WV-44265
  misc_feature 1..30: note = Synthetic: ADR-0103965
  modified_base 1: mod_base = OTHER; note = deoxyribose cytosine
  modified_base 1..2: mod_base = OTHER; note R-N-(1,3-dimethylimidazolidin-2-ylidene)phosphoramidate
  modified_base 2: mod_base = cm
  modified_base 2..3: mod_base = OTHER; note = S-phosphorothioate
  modified_base 3: mod_base = cm
  modified_base 3..4: mod_base = OTHER; note = S-phosphorothioate
  modified_base 4: mod_base = OTHER; note = 2-fluororibose adenine
  modified_base 4..5: mod_base = OTHER; note = S-phosphorothioate
  modified_base 5: mod_base = OTHER; note = 2-fluororibose guanine
  modified_base 5..6: mod_base = OTHER; note = S-phosphorothioate
  modified_base 6: mod_base = OTHER; note = 2-fluororibose cytosine
  modified_base 6..7: mod_base = OTHER; note = S-phosphorothioate
  modified_base 7: mod_base = OTHER; note = 2-fluororibose adenine
  modified_base 7..8: mod_base = OTHER; note = S-phosphorothioate
  modified_base 8: mod_base = OTHER; note = 2-fluororibose guanine
  modified_base 8..9: mod_base = OTHER; note = S-phosphorothioate
  modified_base 9: mod_base = OTHER; note = 2-fluororibose cytosine
  modified_base 9..10: mod_base = OTHER; note = S-phosphorothioate
  modified_base 10: mod_base = OTHER; note = 2-fluororibose uracil
  modified_base 10..11: mod_base = OTHER; note = S-phosphorothioate
  modified_base 11: mod_base = OTHER; note = 2-fluororibose uracil
  modified_base 11..12: mod_base = OTHER; note = S-phosphorothioate
  modified_base 12: mod_base = OTHER; note = 2-fluororibose cytosine
  modified_base 12..13: mod_base = OTHER; note = S-phosphorothioate
  modified_base 13: mod_base = OTHER; note = 2-fluororibose adenine
  modified_base 13..14: mod_base = OTHER; note = S-phosphorothioate
  modified_base 14: mod_base = OTHER; note = 2-fluororibose guanine
  modified_base 14..15: mod_base = OTHER; note = S-phosphorothioate
  modified_base 15: mod_base = OTHER; note = 2-fluororibose uracil
  modified_base 15..16: mod_base = OTHER; note = S-phosphorothioate
  modified_base 16: mod_base = OTHER; note = 2-fluororibose cytosine
  modified_base 16..17: mod_base = OTHER; note = S-phosphorothioate
  modified_base 17: mod_base = OTHER; note = 2-fluororibose cytosine
  modified_base 17..18: mod_base = OTHER; note = S-phosphorothioate
  modified_base 18: mod_base = OTHER; note = 2-fluororibose cytosine
  modified_base 18..19: mod_base = OTHER; note = S-phosphorothioate
  modified_base 19: mod_base = OTHER; note = 2-fluororibose uracil
  modified_base 19..20: mod_base = OTHER; note = S-phosphorothioate
  modified_base 20: mod_base = OTHER; note = 2-fluororibose uracil
  modified_base 20..21: mod_base = OTHER; note = S-phosphorothioate
  modified_base 21: mod_base = OTHER; note = 2-fluororibose uracil
  modified_base 21..22: mod_base = OTHER; note = S-phosphorothioate
  modified_base 22: mod_base = OTHER; note = 2-fluororibose cytosine
  modified_base 22..23: mod_base = OTHER; note = S-phosphorothioate
  modified_base 23: mod_base = OTHER; note = 2-fluororibose uracil
  modified_base 23..24: mod_base = OTHER; note = S-phosphorothioate
  modified_base 24: mod_base = OTHER; note = deoxyribose 6-amino-9-substituted 8,9-dihydro-7H-purin-8-one
  modified_base 24..25: mod_base = OTHER; note = S-phosphorothioate
  modified_base 25: mod_base = OTHER; note = deoxyribose inosine
  modified_base 25..26: mod_base = OTHER; note S-N-(1,3-dimethylimidazolidin-2-ylidene)phosphoramidate
  modified_base 26: mod_base = um
  modified_base 26..27: mod_base = OTHER; note = S-phosphorothioate
  modified_base 27: mod_base = OTHER; note = 2-fluororibose cytosine
  modified_base 27..28: mod_base = OTHER; note = S-phosphorothioate
  modified_base 28: mod_base = gm
  modified_base 28..29: mod_base = OTHER; note = S-phosphorothioate
  modified_base 29: mod_base = OTHER; note = 2-O-methylribose adenine
  modified_base 29..30: mod_base = OTHER; note R-N-(1,3-dimethylimidazolidin-2-ylidene)phosphoramidate
  modified_base 30: mod_base = um
  source 1..30: mol_type = other RNA

SEQ ID NO: 361 - RNA, 30 nt, synthetic construct; identical to SEQ ID NO: 134
  misc_feature 1..30: note = Synthetic: WV-44264
  misc_feature 1..30: note = Synthetic: ADR-0103947
  modified_base 1: mod_base = OTHER; note = 2-O-methoxyethylribose 5-methyl-cytidine
  modified_base 1..2: mod_base = OTHER; note R-N-(1,3-dimethylimidazolidin-2-ylidene)phosphoramidate
  modified_base 2: mod_base = OTHER; note = 2-O-methoxyethylribose 5-methyl-cytidine
  modified_base 2..3: mod_base = OTHER; note = S-phosphorothioate
  modified_base 3: mod_base = OTHER; note = 2-O-methoxyethylribose 5-methyl-cytidine
  modified_base 3..4: mod_base = OTHER; note = S-phosphorothioate
  modified_base 4: mod_base = OTHER; note = 2-fluororibose adenine
  modified_base 4..5: mod_base = OTHER; note = S-phosphorothioate
  modified_base 5: mod_base = OTHER; note = 2-fluororibose guanine
  modified_base 5..6: mod_base = OTHER; note = S-phosphorothioate
  modified_base 6: mod_base = OTHER; note = 2-fluororibose cytosine
  modified_base 6..7: mod_base = OTHER; note = S-phosphorothioate
  modified_base 7: mod_base = OTHER; note = 2-fluororibose adenine
  modified_base 7..8: mod_base = OTHER; note = S-phosphorothioate
  modified_base 8: mod_base = OTHER; note = 2-fluororibose guanine
  modified_base 8..9: mod_base = OTHER; note = S-phosphorothioate
  modified_base 9: mod_base = OTHER; note = 2-fluororibose cytosine
  modified_base 9..10: mod_base = OTHER; note = S-phosphorothioate
  modified_base 10: mod_base = OTHER; note = 2-fluororibose uracil
  modified_base 10..11: mod_base = OTHER; note = S-phosphorothioate
  modified_base 11: mod_base = OTHER; note = 2-fluororibose uracil
  modified_base 11..12: mod_base = OTHER; note = S-phosphorothioate
  modified_base 12: mod_base = OTHER; note = 2-fluororibose cytosine
  modified_base 12..13: mod_base = OTHER; note = S-phosphorothioate
  modified_base 13: mod_base = OTHER; note = 2-fluororibose adenine
  modified_base 13..14: mod_base = OTHER; note = S-phosphorothioate
  modified_base 14: mod_base = OTHER; note = 2-fluororibose guanine
  modified_base 14..15: mod_base = OTHER; note = S-phosphorothioate
  modified_base 15: mod_base = OTHER; note = 2-fluororibose uracil
  modified_base 15..16: mod_base = OTHER; note = S-phosphorothioate
  modified_base 16: mod_base = OTHER; note = 2-fluororibose cytosine
  modified_base 16..17: mod_base = OTHER; note = S-phosphorothioate
  modified_base 17: mod_base = OTHER; note = 2-fluororibose cytosine
  modified_base 17..18: mod_base = OTHER; note = S-phosphorothioate
  modified_base 18: mod_base = OTHER; note = 2-fluororibose cytosine
  modified_base 18..19: mod_base = OTHER; note = S-phosphorothioate
  modified_base 19: mod_base = OTHER; note = 2-fluororibose uracil
  modified_base 19..20: mod_base = OTHER; note = S-phosphorothioate
  modified_base 20: mod_base = OTHER; note = 2-fluororibose uracil
  modified_base 20..21: mod_base = OTHER; note = S-phosphorothioate
  modified_base 21: mod_base = OTHER; note = 2-fluororibose uracil
  modified_base 21..22: mod_base = OTHER; note = S-phosphorothioate
  modified_base 22: mod_base = OTHER; note = 2-fluororibose cytosine
  modified_base 22..23: mod_base = OTHER; note = S-phosphorothioate
  modified_base 23: mod_base = OTHER; note = 2-fluororibose uracil
  modified_base 23..24: mod_base = OTHER; note = S-phosphorothioate
  modified_base 24: mod_base = OTHER; note = deoxyribose 6-amino-9-substituted 8,9-dihydro-7H-purin-8-one
  modified_base 24..25: mod_base = OTHER; note = S-phosphorothioate
  modified_base 25: mod_base = OTHER; note = deoxyribose inosine
  modified_base 25..26: mod_base = OTHER; note S-N-(1,3-dimethylimidazolidin-2-ylidene)phosphoramidate
  modified_base 26: mod_base = um
  modified_base 26..27: mod_base = OTHER; note = S-phosphorothioate
  modified_base 27: mod_base = OTHER; note = 2-fluororibose cytosine
  modified_base 27..28: mod_base = OTHER; note = S-phosphorothioate
  modified_base 28: mod_base = gm
  modified_base 28..29: mod_base = OTHER; note = S-phosphorothioate
  modified_base 29: mod_base = OTHER; note = 2-O-methylribose adenine
  modified_base 29..30: mod_base = OTHER; note R-N-(1,3-dimethylimidazolidin-2-ylidene)phosphoramidate
  modified_base 30: mod_base = um
  source 1..30: mol_type = other RNA

SEQ ID NO: 362 - RNA, 30 nt, synthetic construct; identical to SEQ ID NO: 80
  misc_feature 1..30: note = Synthetic: WV-44179
  misc_feature 1..30: note = Synthetic: ADR-0104048
  modified_base 1: mod_base = cm
  modified_base 1..2: mod_base = OTHER; note R-N-(1,3-dimethylimidazolidin-2-ylidene)phosphoramidate
  modified_base 2: mod_base = cm
  modified_base 2..3: mod_base = OTHER; note = S-phosphorothioate
  modified_base 3: mod_base = cm
  modified_base 3..4: mod_base = OTHER; note = S-phosphorothioate
  modified_base 4: mod_base = OTHER; note = 2-fluororibose adenine
  modified_base 4..5: mod_base = OTHER; note = S-phosphorothioate
  modified_base 5: mod_base = OTHER; note = 2-fluororibose guanine
  modified_base 5..6: mod_base = OTHER; note = S-phosphorothioate
  modified_base 6: mod_base = OTHER; note = 2-fluororibose cytosine
  modified_base 7: mod_base = OTHER; note = 2-fluororibose adenine
  modified_base 7..8: mod_base = OTHER; note = S-phosphorothioate
  modified_base 8: mod_base = OTHER; note = 2-fluororibose guanine
  modified_base 8..9: mod_base = OTHER; note = S-phosphorothioate
  modified_base 9: mod_base = OTHER; note = 2-fluororibose cytosine
  modified_base 9..10: mod_base = OTHER; note = S-phosphorothioate
  modified_base 10: mod_base = OTHER; note = 2-fluororibose uracil
  modified_base 10..11: mod_base = OTHER; note = S-phosphorothioate
  modified_base 11: mod_base = OTHER; note = 2-fluororibose uracil
  modified_base 11..12: mod_base = OTHER; note R-N-(1,3-dimethylimidazolidin-2-ylidene)phosphoramidate
  modified_base 12: mod_base = OTHER; note = 2-fluororibose cytosine
  modified_base 12..13: mod_base = OTHER; note = S-phosphorothioate
  modified_base 13: mod_base = OTHER; note = 2-fluororibose adenine
  modified_base 14: mod_base = OTHER; note = 2-fluororibose guanine
  modified_base 14..15: mod_base = OTHER; note R-N-(1,3-dimethylimidazolidin-2-ylidene)phosphoramidate
  modified_base 15: mod_base = OTHER; note = 2-fluororibose uracil
  modified_base 15..16: mod_base = OTHER; note = S-phosphorothioate
  modified_base 16: mod_base = OTHER; note = 2-fluororibose cytosine
  modified_base 16..17: mod_base = OTHER; note = S-phosphorothioate
  modified_base 17: mod_base = OTHER; note = 2-fluororibose cytosine
  modified_base 17..18: mod_base = OTHER; note = S-phosphorothioate
  modified_base 18: mod_base = OTHER; note = 2-fluororibose cytosine
  modified_base 18..19: mod_base = OTHER; note = S-phosphorothioate
  modified_base 19: mod_base = OTHER; note = 2-fluororibose uracil
  modified_base 19..20: mod_base = OTHER; note = S-phosphorothioate
  modified_base 20: mod_base = OTHER; note = 2-fluororibose uracil
  modified_base 20..21: mod_base = OTHER; note = S-phosphorothioate
  modified_base 21: mod_base = OTHER; note = 2-fluororibose uracil
  modified_base 21..22: mod_base = OTHER; note = S-phosphorothioate
  modified_base 22: mod_base = OTHER; note = 2-fluororibose cytosine
  modified_base 22..23: mod_base = OTHER; note = S-phosphorothioate
  modified_base 23: mod_base = OTHER; note = 2-fluororibose uracil
  modified_base 23..24: mod_base = OTHER; note = S-phosphorothioate
  modified_base 24: mod_base = OTHER; note = arabinose cytosine
  modified_base 24..25: mod_base = OTHER; note = phosphorothioate
  modified_base 25: mod_base = OTHER; note = deoxyribose inosine
  modified_base 25..26: mod_base = OTHER; note S-N-(1,3-dimethylimidazolidin-2-ylidene)phosphoramidate
  modified_base 26: mod_base = um
  modified_base 27: mod_base = OTHER; note = 2-fluororibose cytosine
  modified_base 27..28: mod_base = OTHER; note = S-phosphorothioate
  modified_base 28: mod_base = gm
  modified_base 28..29: mod_base = OTHER; note = S-phosphorothioate
  modified_base 29: mod_base = OTHER; note = 2-O-methylribose adenine
  modified_base 29..30: mod_base = OTHER; note R-N-(1,3-dimethylimidazolidin-2-ylidene)phosphoramidate
  modified_base 30: mod_base = um
  source 1..30: mol_type = other RNA

SEQ ID NO: 363 - RNA, 30 nt, synthetic construct; identical to SEQ ID NO: 134
  misc_feature 1..30: note = Synthetic: WV-44178
  misc_feature 1..30: note = Synthetic: ADR-0104051
  modified_base 1: mod_base = cm
  modified_base 1..2: mod_base = OTHER; note R-N-(1,3-dimethylimidazolidin-2-ylidene)phosphoramidate
  modified_base 2: mod_base = cm
  modified_base 2..3: mod_base = OTHER; note = S-phosphorothioate
  modified_base 3: mod_base = cm
  modified_base 3..4: mod_base = OTHER; note = S-phosphorothioate
  modified_base 4: mod_base = OTHER; note = 2-fluororibose adenine
  modified_base 4..5: mod_base = OTHER; note = S-phosphorothioate
  modified_base 5: mod_base = OTHER; note = 2-fluororibose guanine
  modified_base 5..6: mod_base = OTHER; note = S-phosphorothioate
  modified_base 6: mod_base = OTHER; note = 2-fluororibose cytosine
  modified_base 7: mod_base = OTHER; note = 2-fluororibose adenine
  modified_base 7..8: mod_base = OTHER; note = S-phosphorothioate
  modified_base 8: mod_base = OTHER; note = 2-fluororibose guanine
  modified_base 8..9: mod_base = OTHER; note = S-phosphorothioate
  modified_base 9: mod_base = OTHER; note = 2-fluororibose cytosine
  modified_base 9..10: mod_base = OTHER; note = S-phosphorothioate
  modified_base 10: mod_base = OTHER; note = 2-fluororibose uracil
  modified_base 10..11: mod_base = OTHER; note = S-phosphorothioate
  modified_base 11: mod_base = OTHER; note = 2-fluororibose uracil
  modified_base 11..12: mod_base = OTHER; note R-N-(1,3-dimethylimidazolidin-2-ylidene)phosphoramidate
  modified_base 12: mod_base = OTHER; note = 2-fluororibose cytosine
  modified_base 12..13: mod_base = OTHER; note = S-phosphorothioate
  modified_base 13: mod_base = OTHER; note = 2-fluororibose adenine
  modified_base 14: mod_base = OTHER; note = 2-fluororibose guanine
  modified_base 14..15: mod_base = OTHER; note R-N-(1,3-dimethylimidazolidin-2-ylidene)phosphoramidate
  modified_base 15: mod_base = OTHER; note = 2-fluororibose uracil
  modified_base 15..16: mod_base = OTHER; note = S-phosphorothioate
  modified_base 16: mod_base = OTHER; note = 2-fluororibose cytosine
  modified_base 16..17: mod_base = OTHER; note = S-phosphorothioate
  modified_base 17: mod_base = OTHER; note = 2-fluororibose cytosine
  modified_base 17..18: mod_base = OTHER; note = S-phosphorothioate
  modified_base 18: mod_base = OTHER; note = 2-fluororibose cytosine
  modified_base 18..19: mod_base = OTHER; note = S-phosphorothioate
  modified_base 19: mod_base = OTHER; note = 2-fluororibose uracil
  modified_base 19..20: mod_base = OTHER; note = S-phosphorothioate
  modified_base 20: mod_base = OTHER; note = 2-fluororibose uracil
  modified_base 20..21: mod_base = OTHER; note = S-phosphorothioate
  modified_base 21: mod_base = OTHER; note = 2-fluororibose uracil
  modified_base 21..22: mod_base = OTHER; note = S-phosphorothioate
  modified_base 22: mod_base = OTHER; note = 2-fluororibose cytosine
  modified_base 22..23: mod_base = OTHER; note = S-phosphorothioate
  modified_base 23: mod_base = OTHER; note = 2-fluororibose uracil
  modified_base 23..24: mod_base = OTHER; note = S-phosphorothioate
  modified_base 24: mod_base = OTHER; note = ribose 6-amino-9-substituted 8,9-dihydro-7H-purin-8-one
  modified_base 24..25: mod_base = OTHER; note = S-phosphorothioate
  modified_base 25: mod_base = OTHER; note = deoxyribose inosine
  modified_base 25..26: mod_base = OTHER; note S-N-(1,3-dimethylimidazolidin-2-ylidene)phosphoramidate
  modified_base 26: mod_base = um
  modified_base 27: mod_base = OTHER; note = 2-fluororibose cytosine
  modified_base 27..28: mod_base = OTHER; note = S-phosphorothioate
  modified_base 28: mod_base = gm
  modified_base 28..29: mod_base = OTHER; note = S-phosphorothioate
  modified_base 29: mod_base = OTHER; note = 2-O-methylribose adenine
  modified_base 29..30: mod_base = OTHER; note R-N-(1,3-dimethylimidazolidin-2-ylidene)phosphoramidate
  modified_base 30: mod_base = um
  source 1..30: mol_type = other RNA

SEQ ID NO: 364 - RNA, 30 nt, synthetic construct; identical to SEQ ID NO: 134
  misc_feature 1..30: note = Synthetic: WV-44188
  misc_feature 1..30: note = Synthetic: ADR-0104050
  modified_base 1: mod_base = cm
  modified_base 1..2: mod_base = OTHER; note R-N-(1,3-dimethylimidazolidin-2-ylidene)phosphoramidate
  modified_base 2: mod_base = cm
  modified_base 2..3: mod_base = OTHER; note = S-phosphorothioate
  modified_base 3: mod_base = cm
  modified_base 3..4: mod_base = OTHER; note = S-phosphorothioate
  modified_base 4: mod_base = OTHER; note = 2-fluororibose adenine
  modified_base 4..5: mod_base = OTHER; note = S-phosphorothioate
  modified_base 5: mod_base = OTHER; note = 2-fluororibose guanine
  modified_base 5..6: mod_base = OTHER; note = S-phosphorothioate
  modified_base 6: mod_base = OTHER; note = 2-fluororibose cytosine
  modified_base 7: mod_base = OTHER; note = 2-fluororibose adenine
  modified_base 7..8: mod_base = OTHER; note = S-phosphorothioate
  modified_base 8: mod_base = OTHER; note = 2-fluororibose guanine
  modified_base 8..9: mod_base = OTHER; note = S-phosphorothioate
  modified_base 9: mod_base = OTHER; note = 2-fluororibose cytosine
  modified_base 9..10: mod_base = OTHER; note = S-phosphorothioate
  modified_base 10: mod_base = OTHER; note = 2-fluororibose uracil
  modified_base 10..11: mod_base = OTHER; note = S-phosphorothioate
  modified_base 11: mod_base = OTHER; note = 2-fluororibose uracil
  modified_base 11..12: mod_base = OTHER; note R-N-(1,3-dimethylimidazolidin-2-ylidene)phosphoramidate
  modified_base 12: mod_base = OTHER; note = 2-fluororibose cytosine
  modified_base 12..13: mod_base = OTHER; note = S-phosphorothioate
  modified_base 13: mod_base = OTHER; note = 2-fluororibose adenine
  modified_base 14: mod_base = OTHER; note = 2-fluororibose guanine
  modified_base 14..15: mod_base = OTHER; note R-N-(1,3-dimethylimidazolidin-2-ylidene)phosphoramidate
  modified_base 15: mod_base = OTHER; note = 2-fluororibose uracil
  modified_base 15..16: mod_base = OTHER; note = S-phosphorothioate
  modified_base 16: mod_base = OTHER; note = 2-fluororibose cytosine
  modified_base 16..17: mod_base = OTHER; note = S-phosphorothioate
  modified_base 17: mod_base = OTHER; note = 2-fluororibose cytosine
  modified_base 17..18: mod_base = OTHER; note = S-phosphorothioate
  modified_base 18: mod_base = OTHER; note = 2-fluororibose cytosine
  modified_base 18..19: mod_base = OTHER; note = S-phosphorothioate
  modified_base 19: mod_base = OTHER; note = 2-fluororibose uracil
  modified_base 19..20: mod_base = OTHER; note = S-phosphorothioate
  modified_base 20: mod_base = OTHER; note = 2-fluororibose uracil
  modified_base 20..21: mod_base = OTHER; note = S-phosphorothioate
  modified_base 21: mod_base = OTHER; note = 2-fluororibose uracil
  modified_base 21..22: mod_base = OTHER; note = S-phosphorothioate
  modified_base 22: mod_base = OTHER; note = 2-fluororibose cytosine
  modified_base 22..23: mod_base = OTHER; note = S-phosphorothioate
  modified_base 23: mod_base = OTHER; note = 2-fluororibose uracil
  modified_base 23..24: mod_base = OTHER; note = S-phosphorothioate
  modified_base 24: mod_base = OTHER; note = deoxyribose 6-amino-9-substituted 8,9-dihydro-7H-purin-8-one
  modified_base 24..25: mod_base = OTHER; note = S-phosphorothioate
  modified_base 25: mod_base = OTHER; note = deoxyribose inosine
  modified_base 25..26: mod_base = OTHER; note S-N-(1,3-dimethylimidazolidin-2-ylidene)phosphoramidate
  modified_base 26: mod_base = um
  modified_base 27: mod_base = OTHER; note = 2-fluororibose cytosine
  modified_base 27..28: mod_base = OTHER; note = S-phosphorothioate
  modified_base 28: mod_base = gm
  modified_base 28..29: mod_base = OTHER; note = S-phosphorothioate
  modified_base 29: mod_base = OTHER; note = 2-O-methylribose adenine
  modified_base 29..30: mod_base = OTHER; note R-N-(1,3-dimethylimidazolidin-2-ylidene)phosphoramidate
  modified_base 30: mod_base = um
  source 1..30: mol_type = other RNA

SEQ ID NO: 365 - RNA, 30 nt, synthetic construct; identical to SEQ ID NO: 134
  misc_feature 1..30: note = Synthetic: WV-44210
  misc_feature 1..30: note = Synthetic: ADR-0104033
  modified_base 1: mod_base = cm
  modified_base 1..2: mod_base = OTHER; note R-N-(1,3-dimethylimidazolidin-2-ylidene)phosphoramidate
  modified_base 2: mod_base = cm
  modified_base 2..3: mod_base = OTHER; note = S-phosphorothioate
  modified_base 3: mod_base = cm
  modified_base 3..4: mod_base = OTHER; note = S-phosphorothioate
  modified_base 4: mod_base = OTHER; note = 2-fluororibose adenine
  modified_base 4..5: mod_base = OTHER; note = S-phosphorothioate
  modified_base 5: mod_base = OTHER; note = 2-fluororibose guanine
  modified_base 5..6: mod_base = OTHER; note = S-phosphorothioate
  modified_base 6: mod_base = OTHER; note = 2-fluororibose cytosine
  modified_base 6..7: mod_base = OTHER; note = S-phosphorothioate
  modified_base 7: mod_base = OTHER; note = 2-fluororibose adenine
  modified_base 7..8: mod_base = OTHER; note = S-phosphorothioate
  modified_base 8: mod_base = OTHER; note = 2-fluororibose guanine
  modified_base 8..9: mod_base = OTHER; note = S-phosphorothioate
  modified_base 9: mod_base = OTHER; note = 2-fluororibose cytosine
  modified_base 9..10: mod_base = OTHER; note = S-phosphorothioate
  modified_base 10: mod_base = OTHER; note = 2-fluororibose uracil
  modified_base 10..11: mod_base = OTHER; note = S-phosphorothioate
  modified_base 11: mod_base = OTHER; note = 2-fluororibose uracil
  modified_base 11..12: mod_base = OTHER; note R-N-(1,3-dimethylimidazolidin-2-ylidene)phosphoramidate
  modified_base 12: mod_base = OTHER; note = 2-fluororibose cytosine
  modified_base 12..13: mod_base = OTHER; note = S-phosphorothioate
  modified_base 13: mod_base = OTHER; note = 2-fluororibose adenine
  modified_base 13..14: mod_base = OTHER; note = S-phosphorothioate
  modified_base 14: mod_base = OTHER; note = 2-fluororibose guanine
  modified_base 14..15: mod_base = OTHER; note R-N-(1,3-dimethylimidazolidin-2-ylidene)phosphoramidate
  modified_base 15: mod_base = OTHER; note = 2-fluororibose uracil
  modified_base 15..16: mod_base = OTHER; note = S-phosphorothioate
  modified_base 16: mod_base = OTHER; note = 2-fluororibose cytosine
  modified_base 16..17: mod_base = OTHER; note = S-phosphorothioate
  modified_base 17: mod_base = OTHER; note = 2-fluororibose cytosine
  modified_base 17..18: mod_base = OTHER; note = S-phosphorothioate
  modified_base 18: mod_base = OTHER; note = 2-fluororibose cytosine
  modified_base 18..19: mod_base = OTHER; note = S-phosphorothioate
  modified_base 19: mod_base = OTHER; note = 2-fluororibose uracil
  modified_base 19..20: mod_base = OTHER; note = S-phosphorothioate
  modified_base 20: mod_base = OTHER; note = 2-fluororibose uracil
  modified_base 20..21: mod_base = OTHER; note = S-phosphorothioate
  modified_base 21: mod_base = OTHER; note = 2-fluororibose uracil
  modified_base 21..22: mod_base = OTHER; note = S-phosphorothioate
  modified_base 22: mod_base = OTHER; note = 2-fluororibose cytosine
  modified_base 22..23: mod_base = OTHER; note = S-phosphorothioate
  modified_base 23: mod_base = OTHER; note = 2-fluororibose uracil
  modified_base 23..24: mod_base = OTHER; note = S-phosphorothioate
  modified_base 24: mod_base = OTHER; note = ribose 6-amino-9-substituted 8,9-dihydro-7H-purin-8-one
  modified_base 24..25: mod_base = OTHER; note = S-phosphorothioate
  modified_base 25: mod_base = OTHER; note = deoxyribose inosine
  modified_base 25..26: mod_base = OTHER; note S-N-(1,3-dimethylimidazolidin-2-ylidene)phosphoramidate
  modified_base 26: mod_base = um
  modified_base 26..27: mod_base = OTHER; note = S-phosphorothioate
  modified_base 27: mod_base = OTHER; note = 2-fluororibose cytosine
  modified_base 27..28: mod_base = OTHER; note = S-phosphorothioate
  modified_base 28: mod_base = gm
  modified_base 28..29: mod_base = OTHER; note = S-phosphorothioate
  modified_base 29: mod_base = OTHER; note = 2-O-methylribose adenine
  modified_base 29..30: mod_base = OTHER; note R-N-(1,3-dimethylimidazolidin-2-ylidene)phosphoramidate
  modified_base 30: mod_base = um
  source 1..30: mol_type = other RNA

SEQ ID NO: 366 - RNA, 30 nt, synthetic construct; identical to SEQ ID NO: 134
  misc_feature 1..30: note = Synthetic: WV-44185
  misc_feature 1..30: note = Synthetic: ADR-0104032
  modified_base 1: mod_base = cm
  modified_base 1..2: mod_base = OTHER; note R-N-(1,3-dimethylimidazolidin-2-ylidene)phosphoramidate
  modified_base 2: mod_base = cm
  modified_base 2..3: mod_base = OTHER; note = S-phosphorothioate
  modified_base 3: mod_base = cm
  modified_base 3..4: mod_base = OTHER; note = S-phosphorothioate
  modified_base 4: mod_base = OTHER; note = 2-fluororibose adenine
  modified_base 4..5: mod_base = OTHER; note = S-phosphorothioate
  modified_base 5: mod_base = OTHER; note = 2-fluororibose guanine
  modified_base 5..6: mod_base = OTHER; note = S-phosphorothioate
  modified_base 6: mod_base = OTHER; note = 2-fluororibose cytosine
  modified_base 6..7: mod_base = OTHER; note = S-phosphorothioate
  modified_base 7: mod_base = OTHER; note = 2-fluororibose adenine
  modified_base 7..8: mod_base = OTHER; note = S-phosphorothioate
  modified_base 8: mod_base = OTHER; note = 2-fluororibose guanine
  modified_base 8..9: mod_base = OTHER; note = S-phosphorothioate
  modified_base 9: mod_base = OTHER; note = 2-fluororibose cytosine
  modified_base 9..10: mod_base = OTHER; note = S-phosphorothioate
  modified_base 10: mod_base = OTHER; note = 2-fluororibose uracil
  modified_base 10..11: mod_base = OTHER; note = S-phosphorothioate
  modified_base 11: mod_base = OTHER; note = 2-fluororibose uracil
  modified_base 11..12: mod_base = OTHER; note R-N-(1,3-dimethylimidazolidin-2-ylidene)phosphoramidate
  modified_base 12: mod_base = OTHER; note = 2-fluororibose cytosine
  modified_base 12..13: mod_base = OTHER; note = S-phosphorothioate
  modified_base 13: mod_base = OTHER; note = 2-fluororibose adenine
  modified_base 13..14: mod_base = OTHER; note = S-phosphorothioate
  modified_base 14: mod_base = OTHER; note = 2-fluororibose guanine
  modified_base 14..15: mod_base = OTHER; note R-N-(1,3-dimethylimidazolidin-2-ylidene)phosphoramidate
  modified_base 15: mod_base = OTHER; note = 2-fluororibose uracil
  modified_base 15..16: mod_base = OTHER; note = S-phosphorothioate
  modified_base 16: mod_base = OTHER; note = 2-fluororibose cytosine
  modified_base 16..17: mod_base = OTHER; note = S-phosphorothioate
  modified_base 17: mod_base = OTHER; note = 2-fluororibose cytosine
  modified_base 17..18: mod_base = OTHER; note = S-phosphorothioate
  modified_base 18: mod_base = OTHER; note = 2-fluororibose cytosine
  modified_base 18..19: mod_base = OTHER; note = S-phosphorothioate
  modified_base 19: mod_base = OTHER; note = 2-fluororibose uracil
  modified_base 19..20: mod_base = OTHER; note = S-phosphorothioate
  modified_base 20: mod_base = OTHER; note = 2-fluororibose uracil
  modified_base 20..21: mod_base = OTHER; note = S-phosphorothioate
  modified_base 21: mod_base = OTHER; note = 2-fluororibose uracil
  modified_base 21..22: mod_base = OTHER; note = S-phosphorothioate
  modified_base 22: mod_base = OTHER; note = 2-fluororibose cytosine
  modified_base 22..23: mod_base = OTHER; note = S-phosphorothioate
  modified_base 23: mod_base = OTHER; note = 2-fluororibose uracil
  modified_base 23..24: mod_base = OTHER; note = S-phosphorothioate
  modified_base 24: mod_base = OTHER; note = deoxyribose 6-amino-9-substituted 8,9-dihydro-7H-purin-8-one
  modified_base 24..25: mod_base = OTHER; note = S-phosphorothioate
  modified_base 25: mod_base = OTHER; note = deoxyribose inosine
  modified_base 25..26: mod_base = OTHER; note S-N-(1,3-dimethylimidazolidin-2-ylidene)phosphoramidate
  modified_base 26: mod_base = um
  modified_base 26..27: mod_base = OTHER; note = S-phosphorothioate
  modified_base 27: mod_base = OTHER; note = 2-fluororibose cytosine
  modified_base 27..28: mod_base = OTHER; note = S-phosphorothioate
  modified_base 28: mod_base = gm
  modified_base 28..29: mod_base = OTHER; note = S-phosphorothioate
  modified_base 29: mod_base = OTHER; note = 2-O-methylribose adenine
  modified_base 29..30: mod_base = OTHER; note R-N-(1,3-dimethylimidazolidin-2-ylidene)phosphoramidate
  modified_base 30: mod_base = um
  source 1..30: mol_type = other RNA

SEQ ID NO: 367 - RNA, 30 nt, synthetic construct; identical to SEQ ID NO: 134
  misc_feature 1..30: note = Synthetic: WV-44175
  misc_feature 1..30: note = Synthetic: ADR-0104019
  modified_base 1: mod_base = cm
  modified_base 1..2: mod_base = OTHER; note R-N-(1,3-dimethylimidazolidin-2-ylidene)phosphoramidate
  modified_base 2: mod_base = cm
  modified_base 2..3: mod_base = OTHER; note = S-phosphorothioate
  modified_base 3: mod_base = cm
  modified_base 3..4: mod_base = OTHER; note = S-phosphorothioate
  modified_base 4: mod_base = OTHER; note = 2-fluororibose adenine
  modified_base 4..5: mod_base = OTHER; note = S-phosphorothioate
  modified_base 5: mod_base = OTHER; note = 2-fluororibose guanine
  modified_base 5..6: mod_base = OTHER; note = S-phosphorothioate
  modified_base 6: mod_base = OTHER; note = 2-fluororibose cytosine
  modified_base 6..7: mod_base = OTHER; note = S-phosphorothioate
  modified_base 7: mod_base = OTHER; note = 2-fluororibose adenine
  modified_base 7..8: mod_base = OTHER; note = S-phosphorothioate
  modified_base 8: mod_base = OTHER; note = 2-fluororibose guanine
  modified_base 8..9: mod_base = OTHER; note = S-phosphorothioate
  modified_base 9: mod_base = OTHER; note = 2-fluororibose cytosine
  modified_base 9..10: mod_base = OTHER; note = S-phosphorothioate
  modified_base 10: mod_base = OTHER; note = 2-fluororibose uracil
  modified_base 10..11: mod_base = OTHER; note = S-phosphorothioate
  modified_base 11: mod_base = OTHER; note = 2-fluororibose uracil
  modified_base 11..12: mod_base = OTHER; note = S-phosphorothioate
  modified_base 12: mod_base = OTHER; note = 2-fluororibose cytosine
  modified_base 12..13: mod_base = OTHER; note = S-phosphorothioate
  modified_base 13: mod_base = OTHER; note = 2-fluororibose adenine
  modified_base 13..14: mod_base = OTHER; note = S-phosphorothioate
  modified_base 14: mod_base = OTHER; note = 2-fluororibose guanine
  modified_base 14..15: mod_base = OTHER; note = S-phosphorothioate
  modified_base 15: mod_base = OTHER; note = 2-fluororibose uracil
  modified_base 15..16: mod_base = OTHER; note = S-phosphorothioate
  modified_base 16: mod_base = OTHER; note = 2-fluororibose cytosine
  modified_base 16..17: mod_base = OTHER; note = S-phosphorothioate
  modified_base 17: mod_base = OTHER; note = 2-fluororibose cytosine
  modified_base 17..18: mod_base = OTHER; note = S-phosphorothioate
  modified_base 18: mod_base = OTHER; note = 2-fluororibose cytosine
  modified_base 18..19: mod_base = OTHER; note = S-phosphorothioate
  modified_base 19: mod_base = OTHER; note = 2-fluororibose uracil
  modified_base 19..20: mod_base = OTHER; note = S-phosphorothioate
  modified_base 20: mod_base = OTHER; note = 2-fluororibose uracil
  modified_base 20..21: mod_base = OTHER; note = S-phosphorothioate
  modified_base 21: mod_base = OTHER; note = 2-fluororibose uracil
  modified_base 21..22: mod_base = OTHER; note = S-phosphorothioate
  modified_base 22: mod_base = OTHER; note = 2-fluororibose cytosine
  modified_base 22..23: mod_base = OTHER; note = S-phosphorothioate
  modified_base 23: mod_base = OTHER; note = 2-fluororibose uracil
  modified_base 23..24: mod_base = OTHER; note = S-phosphorothioate
  modified_base 24: mod_base = OTHER; note = ribose 6-amino-9-substituted 8,9-dihydro-7H-purin-8-one
  modified_base 24..25: mod_base = OTHER; note = S-phosphorothioate
  modified_base 25: mod_base = OTHER; note = deoxyribose inosine
  modified_base 25..26: mod_base = OTHER; note S-N-(1,3-dimethylimidazolidin-2-ylidene)phosphoramidate
  modified_base 26: mod_base = um
  modified_base 26..27: mod_base = OTHER; note = S-phosphorothioate
  modified_base 27: mod_base = OTHER; note = 2-fluororibose cytosine
  modified_base 27..28: mod_base = OTHER; note = S-phosphorothioate
  modified_base 28: mod_base = gm
  modified_base 28..29: mod_base = OTHER; note = S-phosphorothioate
  modified_base 29: mod_base = OTHER; note = 2-O-methylribose adenine
  modified_base 29..30: mod_base = OTHER; note R-N-(1,3-dimethylimidazolidin-2-ylidene)phosphoramidate
  modified_base 30: mod_base = um
  source 1..30: mol_type = other RNA

SEQ ID NO: 368 - RNA, 30 nt, synthetic construct
  misc_feature 1..30: note = Synthetic: WV-44209
  misc_feature 1..30: note = Synthetic: ADR-0104028
  modified_base 1: mod_base = cm
  modified_base 1..2: mod_base = OTHER; note R-N-(1,3-dimethylimidazolidin-2-ylidene)phosphoramidate
  modified_base 2: mod_base = cm
  modified_base 2..3: mod_base = OTHER; note = S-phosphorothioate
  modified_base 3: mod_base = cm
  modified_base 3..4: mod_base = OTHER; note = S-phosphorothioate
  modified_base 4: mod_base = OTHER; note = 2-fluororibose adenine
  modified_base 4..5: mod_base = OTHER; note = S-phosphorothioate
  modified_base 5: mod_base = OTHER; note = 2-fluororibose guanine
  modified_base 5..6: mod_base = OTHER; note = S-phosphorothioate
  modified_base 6: mod_base = OTHER; note = 2-fluororibose cytosine
  modified_base 6..7: mod_base = OTHER; note = S-phosphorothioate
  modified_base 7: mod_base = OTHER; note = 2-fluororibose adenine
  modified_base 7..8: mod_base = OTHER; note = S-phosphorothioate
  modified_base 8: mod_base = OTHER; note = 2-fluororibose guanine
  modified_base 8..9: mod_base = OTHER; note = S-phosphorothioate
  modified_base 9: mod_base = OTHER; note = 2-fluororibose cytosine
  modified_base 9..10: mod_base = OTHER; note = S-phosphorothioate
  modified_base 10: mod_base = OTHER; note = 2-fluororibose uracil
  modified_base 10..11: mod_base = OTHER; note = S-phosphorothioate
  modified_base 11: mod_base = OTHER; note = 2-fluororibose uracil
  modified_base 11..12: mod_base = OTHER; note = S-phosphorothioate
  modified_base 12: mod_base = OTHER; note = 2-fluororibose uracil
  modified_base 12..13: mod_base = OTHER; note = S-phosphorothioate
  modified_base 13: mod_base = OTHER; note = 2-fluororibose adenine
  modified_base 13..14: mod_base = OTHER; note = S-phosphorothioate
  modified_base 14: mod_base = OTHER; note = 2-fluororibose guanine
  modified_base 14..15: mod_base = OTHER; note = S-phosphorothioate
  modified_base 15: mod_base = OTHER; note = 2-fluororibose uracil
  modified_base 15..16: mod_base = OTHER; note = S-phosphorothioate
  modified_base 16: mod_base = OTHER; note = 2-fluororibose cytosine
  modified_base 16..17: mod_base = OTHER; note = S-phosphorothioate
  modified_base 17: mod_base = OTHER; note = 2-fluororibose cytosine
  modified_base 17..18: mod_base = OTHER; note = S-phosphorothioate
  modified_base 18: mod_base = OTHER; note = 2-fluororibose cytosine
  modified_base 18..19: mod_base = OTHER; note = S-phosphorothioate
  modified_base 19: mod_base = OTHER; note = 2-fluororibose uracil
  modified_base 19..20: mod_base = OTHER; note = S-phosphorothioate
  modified_base 20: mod_base = OTHER; note = 2-fluororibose uracil
  modified_base 20..21: mod_base = OTHER; note = S-phosphorothioate
  modified_base 21: mod_base = OTHER; note = 2-fluororibose uracil
  modified_base 21..22: mod_base = OTHER; note = S-phosphorothioate
  modified_base 22: mod_base = OTHER; note = 2-fluororibose cytosine
  modified_base 22..23: mod_base = OTHER; note = S-phosphorothioate
  modified_base 23: mod_base = OTHER; note = 2-fluororibose uracil
  modified_base 23..24: mod_base = OTHER; note = S-phosphorothioate
  modified_base 24: mod_base = OTHER; note = deoxyribose 6-amino-9-substituted 8,9-dihydro-7H-purin-8-one
  modified_base 24..25: mod_base = OTHER; note = S-phosphorothioate
  modified_base 25: mod_base = OTHER; note = deoxyribose inosine
  modified_base 25..26: mod_base = OTHER; note S-N-(1,3-dimethylimidazolidin-2-ylidene)phosphoramidate
  modified_base 26: mod_base = um
  modified_base 26..27: mod_base = OTHER; note = S-phosphorothioate
  modified_base 27: mod_base = OTHER; note = 2-fluororibose cytosine
  modified_base 27..28: mod_base = OTHER; note = S-phosphorothioate
  modified_base 28: mod_base = gm
  modified_base 28..29: mod_base = OTHER; note = S-phosphorothioate
  modified_base 29: mod_base = OTHER; note = 2-O-methylribose adenine
  modified_base 29..30: mod_base = OTHER; note R-N-(1,3-dimethylimidazolidin-2-ylidene)phosphoramidate
  modified_base 30: mod_base = um
  source 1..30: mol_type = other RNA
cccagcagctttagtccctttctagtcgat

SEQ ID NO: 369 - RNA, 30 nt, synthetic construct
  misc_feature 1..30: note = Synthetic: WV-44208
  misc_feature 1..30: note = Synthetic: ADR-0104038
  modified_base 1: mod_base = cm
  modified_base 1..2: mod_base = OTHER; note R-N-(1,3-dimethylimidazolidin-2-ylidene)phosphoramidate
  modified_base 2: mod_base = cm
  modified_base 2..3: mod_base = OTHER; note = S-phosphorothioate
  modified_base 3: mod_base = cm
  modified_base 3..4: mod_base = OTHER; note = S-phosphorothioate
  modified_base 4: mod_base = OTHER; note = 2-fluororibose adenine
  modified_base 4..5: mod_base = OTHER; note = S-phosphorothioate
  modified_base 5: mod_base = OTHER; note = 2-fluororibose guanine
  modified_base 5..6: mod_base = OTHER; note = S-phosphorothioate
  modified_base 6: mod_base = OTHER; note = 2-fluororibose cytosine
  modified_base 6..7: mod_base = OTHER; note = S-phosphorothioate
  modified_base 7: mod_base = OTHER; note = 2-fluororibose adenine
  modified_base 7..8: mod_base = OTHER; note = S-phosphorothioate
  modified_base 8: mod_base = OTHER; note = 2-fluororibose guanine
  modified_base 8..9: mod_base = OTHER; note = S-phosphorothioate
  modified_base 9: mod_base = OTHER; note = 2-fluororibose uracil
  modified_base 9..10: mod_base = OTHER; note = S-phosphorothioate
  modified_base 10: mod_base = OTHER; note = 2-fluororibose uracil
  modified_base 10..11: mod_base = OTHER; note = S-phosphorothioate
  modified_base 11: mod_base = OTHER; note = 2-fluororibose uracil
  modified_base 11..12: mod_base = OTHER; note = S-phosphorothioate
  modified_base 12: mod_base = OTHER; note = 2-fluororibose cytosine
  modified_base 12..13: mod_base = OTHER; note = S-phosphorothioate
  modified_base 13: mod_base = OTHER; note = 2-fluororibose adenine
  modified_base 13..14: mod_base = OTHER; note = S-phosphorothioate
  modified_base 14: mod_base = OTHER; note = 2-fluororibose guanine
  modified_base 14..15: mod_base = OTHER; note = S-phosphorothioate
  modified_base 15: mod_base = OTHER; note = 2-fluororibose uracil
  modified_base 15..16: mod_base = OTHER; note = S-phosphorothioate
  modified_base 16: mod_base = OTHER; note = 2-fluororibose cytosine
  modified_base 16..17: mod_base = OTHER; note = S-phosphorothioate
  modified_base 17: mod_base = OTHER; note = 2-fluororibose cytosine
  modified_base 17..18: mod_base = OTHER; note = S-phosphorothioate
  modified_base 18: mod_base = OTHER; note = 2-fluororibose cytosine
  modified_base 18..19: mod_base = OTHER; note = S-phosphorothioate
  modified_base 19: mod_base = OTHER; note = 2-fluororibose uracil
  modified_base 19..20: mod_base = OTHER; note = S-phosphorothioate
  modified_base 20: mod_base = OTHER; note = 2-fluororibose uracil
  modified_base 20..21: mod_base = OTHER; note = S-phosphorothioate
  modified_base 21: mod_base = OTHER; note = 2-fluororibose uracil
  modified_base 21..22: mod_base = OTHER; note = S-phosphorothioate
  modified_base 22: mod_base = OTHER; note = 2-fluororibose cytosine
  modified_base 22..23: mod_base = OTHER; note = S-phosphorothioate
  modified_base 23: mod_base = OTHER; note = 2-fluororibose uracil
  modified_base 23..24: mod_base = OTHER; note = S-phosphorothioate
  modified_base 24: mod_base = OTHER; note = deoxyribose 6-amino-9-substituted 8,9-dihydro-7H-purin-8-one
  modified_base 24..25: mod_base = OTHER; note = S-phosphorothioate
  modified_base 25: mod_base = OTHER; note = deoxyribose inosine
  modified_base 25..26: mod_base = OTHER; note S-N-(1,3-dimethylimidazolidin-2-ylidene)phosphoramidate
  modified_base 26: mod_base = um
  modified_base 26..27: mod_base = OTHER; note = S-phosphorothioate
  modified_base 27: mod_base = OTHER; note = 2-fluororibose cytosine
  modified_base 27..28: mod_base = OTHER; note = S-phosphorothioate
  modified_base 28: mod_base = gm
  modified_base 28..29: mod_base = OTHER; note = S-phosphorothioate
  modified_base 29: mod_base = OTHER; note = 2-O-methylribose adenine
  modified_base 29..30: mod_base = OTHER; note R-N-(1,3-dimethylimidazolidin-2-ylidene)phosphoramidate
  modified_base 30: mod_base = um
  source 1..30: mol_type = other RNA
cccagcagtttcagtccctttctagtcgat

SEQ ID NO: 370 - RNA, 30 nt, synthetic construct
  misc_feature 1..30: note = Synthetic: WV-44207
  misc_feature 1..30: note = Synthetic: ADR-0104083
  modified_base 1: mod_base = cm
  modified_base 1..2: mod_base = OTHER; note R-N-(1,3-dimethylimidazolidin-2-ylidene)phosphoramidate
  modified_base 2: mod_base = cm
  modified_base 2..3: mod_base = OTHER; note = S-phosphorothioate
  modified_base 3: mod_base = cm
  modified_base 3..4: mod_base = OTHER; note = S-phosphorothioate
  modified_base 4: mod_base = OTHER; note = 2-fluororibose adenine
  modified_base 4..5: mod_base = OTHER; note = S-phosphorothioate
  modified_base 5: mod_base = OTHER; note = 2-fluororibose guanine
  modified_base 5..6: mod_base = OTHER; note = S-phosphorothioate
  modified_base 6: mod_base = OTHER; note = 2-fluororibose uracil
  modified_base 6..7: mod_base = OTHER; note = S-phosphorothioate
  modified_base 7: mod_base = OTHER; note = 2-fluororibose adenine
  modified_base 7..8: mod_base = OTHER; note = S-phosphorothioate
  modified_base 8: mod_base = OTHER; note = 2-fluororibose guanine
  modified_base 8..9: mod_base = OTHER; note = S-phosphorothioate
  modified_base 9: mod_base = OTHER; note = 2-fluororibose cytosine
  modified_base 9..10: mod_base = OTHER; note = S-phosphorothioate
  modified_base 10: mod_base = OTHER; note = 2-fluororibose uracil
  modified_base 10..11: mod_base = OTHER; note = S-phosphorothioate
  modified_base 11: mod_base = OTHER; note = 2-fluororibose uracil
  modified_base 11..12: mod_base = OTHER; note = S-phosphorothioate
  modified_base 12: mod_base = OTHER; note = 2-fluororibose cytosine
  modified_base 12..13: mod_base = OTHER; note = S-phosphorothioate
  modified_base 13: mod_base = OTHER; note = 2-fluororibose adenine
  modified_base 13..14: mod_base = OTHER; note = S-phosphorothioate
  modified_base 14: mod_base = OTHER; note = 2-fluororibose guanine
  modified_base 14..15: mod_base = OTHER; note = S-phosphorothioate
  modified_base 15: mod_base = OTHER; note = 2-fluororibose uracil
  modified_base 15..16: mod_base = OTHER; note = S-phosphorothioate
  modified_base 16: mod_base = OTHER; note = 2-fluororibose cytosine
  modified_base 16..17: mod_base = OTHER; note = S-phosphorothioate
  modified_base 17: mod_base = OTHER; note = 2-fluororibose cytosine
  modified_base 17..18: mod_base = OTHER; note = S-phosphorothioate
  modified_base 18: mod_base = OTHER; note = 2-fluororibose cytosine
  modified_base 18..19: mod_base = OTHER; note = S-phosphorothioate
  modified_base 19: mod_base = OTHER; note = 2-fluororibose uracil
  modified_base 19..20: mod_base = OTHER; note = S-phosphorothioate
  modified_base 20: mod_base = OTHER; note = 2-fluororibose uracil
  modified_base 20..21: mod_base = OTHER; note = S-phosphorothioate
  modified_base 21: mod_base = OTHER; note = 2-fluororibose uracil
  modified_base 21..22: mod_base = OTHER; note = S-phosphorothioate
  modified_base 22: mod_base = OTHER; note = 2-fluororibose cytosine
  modified_base 22..23: mod_base = OTHER; note = S-phosphorothioate
  modified_base 23: mod_base = OTHER; note = 2-fluororibose uracil
  modified_base 23..24: mod_base = OTHER; note = S-phosphorothioate
  modified_base 24: mod_base = OTHER; note = deoxyribose 6-amino-9-substituted 8,9-dihydro-7H-purin-8-one
  modified_base 24..25: mod_base = OTHER; note = S-phosphorothioate
  modified_base 25: mod_base = OTHER; note = deoxyribose inosine
  modified_base 25..26: mod_base = OTHER; note S-N-(1,3-dimethylimidazolidin-2-ylidene)phosphoramidate
  modified_base 26: mod_base = um
  modified_base 26..27: mod_base = OTHER; note = S-phosphorothioate
  modified_base 27: mod_base = OTHER; note = 2-fluororibose cytosine
  modified_base 27..28: mod_base = OTHER; note = S-phosphorothioate
  modified_base 28: mod_base = gm
  modified_base 28..29: mod_base = OTHER; note = S-phosphorothioate
  modified_base 29: mod_base = OTHER; note = 2-O-methylribose adenine
  modified_base 29..30: mod_base = OTHER; note R-N-(1,3-dimethylimidazolidin-2-ylidene)phosphoramidate
  modified_base 30: mod_base = um
  source 1..30: mol_type = other RNA
cccagtagcttcagtccctttctagtcgat

SEQ ID NO: 371 - RNA, 30 nt, synthetic construct
  misc_feature 1..30: note = Synthetic: WV-44206
  misc_feature 1..30: note = Synthetic: ADR-0104311
  modified_base 1: mod_base = cm
  modified_base 1..2: mod_base = OTHER; note R-N-(1,3-dimethylimidazolidin-2-ylidene)phosphoramidate
  modified_base 2: mod_base = cm
  modified_base 2..3: mod_base = OTHER; note = S-phosphorothioate
  modified_base 3: mod_base = um
  modified_base 3..4: mod_base = OTHER; note = S-phosphorothioate
  modified_base 4: mod_base = OTHER; note = 2-fluororibose adenine
  modified_base 4..5: mod_base = OTHER; note = S-phosphorothioate
  modified_base 5: mod_base = OTHER; note = 2-fluororibose guanine
  modified_base 5..6: mod_base = OTHER; note = S-phosphorothioate
  modified_base 6: mod_base = OTHER; note = 2-fluororibose cytosine
  modified_base 6..7: mod_base = OTHER; note = S-phosphorothioate
  modified_base 7: mod_base = OTHER; note = 2-fluororibose adenine
  modified_base 7..8: mod_base = OTHER; note = S-phosphorothioate
  modified_base 8: mod_base = OTHER; note = 2-fluororibose guanine
  modified_base 8..9: mod_base = OTHER; note = S-phosphorothioate
  modified_base 9: mod_base = OTHER; note = 2-fluororibose cytosine
  modified_base 9..10: mod_base = OTHER; note = S-phosphorothioate
  modified_base 10: mod_base = OTHER; note = 2-fluororibose uracil
  modified_base 10..11: mod_base = OTHER; note = S-phosphorothioate
  modified_base 11: mod_base = OTHER; note = 2-fluororibose uracil
  modified_base 11..12: mod_base = OTHER; note = S-phosphorothioate
  modified_base 12: mod_base = OTHER; note = 2-fluororibose cytosine
  modified_base 12..13: mod_base = OTHER; note = S-phosphorothioate
  modified_base 13: mod_base = OTHER; note = 2-fluororibose adenine
  modified_base 13..14: mod_base = OTHER; note = S-phosphorothioate
  modified_base 14: mod_base = OTHER; note = 2-fluororibose guanine
  modified_base 14..15: mod_base = OTHER; note = S-phosphorothioate
  modified_base 15: mod_base = OTHER; note = 2-fluororibose uracil
  modified_base 15..16: mod_base = OTHER; note = S-phosphorothioate
  modified_base 16: mod_base = OTHER; note = 2-fluororibose cytosine
  modified_base 16..17: mod_base = OTHER; note = S-phosphorothioate
  modified_base 17: mod_base = OTHER; note = 2-fluororibose cytosine
  modified_base 17..18: mod_base = OTHER; note = S-phosphorothioate
  modified_base 18: mod_base = OTHER; note = 2-fluororibose cytosine
  modified_base 18..19: mod_base = OTHER; note = S-phosphorothioate
  modified_base 19: mod_base = OTHER; note = 2-fluororibose uracil
  modified_base 19..20: mod_base = OTHER; note = S-phosphorothioate
  modified_base 20: mod_base = OTHER; note = 2-fluororibose uracil
  modified_base 20..21: mod_base = OTHER; note = S-phosphorothioate
  modified_base 21: mod_base = OTHER; note = 2-fluororibose uracil
  modified_base 21..22: mod_base = OTHER; note = S-phosphorothioate
  modified_base 22: mod_base = OTHER; note = 2-fluororibose cytosine
  modified_base 22..23: mod_base = OTHER; note = S-phosphorothioate
  modified_base 23: mod_base = OTHER; note = 2-fluororibose uracil
  modified_base 23..24: mod_base = OTHER; note = S-phosphorothioate
  modified_base 24: mod_base = OTHER; note = deoxyribose 6-amino-9-substituted 8,9-dihydro-7H-purin-8-one
  modified_base 24..25: mod_base = OTHER; note = S-phosphorothioate
  modified_base 25: mod_base = OTHER; note = deoxyribose inosine
  modified_base 25..26: mod_base = OTHER; note S-N-(1,3-dimethylimidazolidin-2-ylidene)phosphoramidate
  modified_base 26: mod_base = um
  modified_base 26..27: mod_base = OTHER; note = S-phosphorothioate
  modified_base 27: mod_base = OTHER; note = 2-fluororibose cytosine
  modified_base 27..28: mod_base = OTHER; note = S-phosphorothioate
  modified_base 28: mod_base = gm
  modified_base 28..29: mod_base = OTHER; note = S-phosphorothioate
  modified_base 29: mod_base = OTHER; note = 2-O-methylribose adenine
  modified_base 29..30: mod_base = OTHER; note R-N-(1,3-dimethylimidazolidin-2-ylidene)phosphoramidate
  modified_base 30: mod_base = um
  source 1..30: mol_type = other RNA
cctagcagcttcagtccctttctagtcgat

SEQ ID NO: 372 - RNA, 30 nt, synthetic construct
  misc_feature 1..30: note = Synthetic: WV-44205
  misc_feature 1..30: note = Synthetic: ADR-0104314
  modified_base 1: mod_base = cm
  modified_base 1..2: mod_base = OTHER; note R-N-(1,3-dimethylimidazolidin-2-ylidene)phosphoramidate
  modified_base 2: mod_base = um
  modified_base 2..3: mod_base = OTHER; note = S-phosphorothioate
  modified_base 3: mod_base = cm
  modified_base 3..4: mod_base = OTHER; note = S-phosphorothioate
  modified_base 4: mod_base = OTHER; note = 2-fluororibose adenine
  modified_base 4..5: mod_base = OTHER; note = S-phosphorothioate
  modified_base 5: mod_base = OTHER; note = 2-fluororibose guanine
  modified_base 5..6: mod_base = OTHER; note = S-phosphorothioate
  modified_base 6: mod_base = OTHER; note = 2-fluororibose cytosine
  modified_base 6..7: mod_base = OTHER; note = S-phosphorothioate
  modified_base 7: mod_base = OTHER; note = 2-fluororibose adenine
  modified_base 7..8: mod_base = OTHER; note = S-phosphorothioate
  modified_base 8: mod_base = OTHER; note = 2-fluororibose guanine
  modified_base 8..9: mod_base = OTHER; note = S-phosphorothioate
  modified_base 9: mod_base = OTHER; note = 2-fluororibose cytosine
  modified_base 9..10: mod_base = OTHER; note = S-phosphorothioate
  modified_base 10: mod_base = OTHER; note = 2-fluororibose uracil
  modified_base 10..11: mod_base = OTHER; note = S-phosphorothioate
  modified_base 11: mod_base = OTHER; note = 2-fluororibose uracil
  modified_base 11..12: mod_base = OTHER; note = S-phosphorothioate
  modified_base 12: mod_base = OTHER; note = 2-fluororibose cytosine
  modified_base 12..13: mod_base = OTHER; note = S-phosphorothioate
  modified_base 13: mod_base = OTHER; note = 2-fluororibose adenine
  modified_base 13..14: mod_base = OTHER; note = S-phosphorothioate
  modified_base 14: mod_base = OTHER; note = 2-fluororibose guanine
  modified_base 14..15: mod_base = OTHER; note = S-phosphorothioate
  modified_base 15: mod_base = OTHER; note = 2-fluororibose uracil
  modified_base 15..16: mod_base = OTHER; note = S-phosphorothioate
  modified_base 16: mod_base = OTHER; note = 2-fluororibose cytosine
  modified_base 16..17: mod_base = OTHER; note = S-phosphorothioate
  modified_base 17: mod_base = OTHER; note = 2-fluororibose cytosine
  modified_base 17..18: mod_base = OTHER; note = S-phosphorothioate
  modified_base 18: mod_base = OTHER; note = 2-fluororibose cytosine
  modified_base 18..19: mod_base = OTHER; note = S-phosphorothioate
  modified_base 19: mod_base = OTHER; note = 2-fluororibose uracil
  modified_base 19..20: mod_base = OTHER; note = S-phosphorothioate
  modified_base 20: mod_base = OTHER; note = 2-fluororibose uracil
  modified_base 20..21: mod_base = OTHER; note = S-phosphorothioate
  modified_base 21: mod_base = OTHER; note = 2-fluororibose uracil
  modified_base 21..22: mod_base = OTHER; note = S-phosphorothioate
  modified_base 22: mod_base = OTHER; note = 2-fluororibose cytosine
  modified_base 22..23: mod_base = OTHER; note = S-phosphorothioate
  modified_base 23: mod_base = OTHER; note = 2-fluororibose uracil
  modified_base 23..24: mod_base = OTHER; note = S-phosphorothioate
  modified_base 24: mod_base = OTHER; note = deoxyribose 6-amino-9-substituted 8,9-dihydro-7H-purin-8-one
  modified_base 24..25: mod_base = OTHER; note = S-phosphorothioate
  modified_base 25: mod_base = OTHER; note = deoxyribose inosine
  modified_base 25..26: mod_base = OTHER; note S-N-(1,3-dimethylimidazolidin-2-ylidene)phosphoramidate
  modified_base 26: mod_base = um
  modified_base 26..27: mod_base = OTHER; note = S-phosphorothioate
  modified_base 27: mod_base = OTHER; note = 2-fluororibose cytosine
  modified_base 27..28: mod_base = OTHER; note = S-phosphorothioate
  modified_base 28: mod_base = gm
  modified_base 28..29: mod_base = OTHER; note = S-phosphorothioate
  modified_base 29: mod_base = OTHER; note = 2-O-methylribose adenine
  modified_base 29..30: mod_base = OTHER; note R-N-(1,3-dimethylimidazolidin-2-ylidene)phosphoramidate
  modified_base 30: mod_base = um
  source 1..30: mol_type = other RNA
ctcagcagcttcagtccctttctagtcgat

SEQ ID NO: 373 - RNA, 30 nt, synthetic construct
  misc_feature 1..30: note = Synthetic: WV-44204
  misc_feature 1..30: note = Synthetic: ADR-0104361
  modified_base 1: mod_base = um
  modified_base 1..2: mod_base = OTHER; note R-N-(1,3-dimethylimidazolidin-2-ylidene)phosphoramidate
  modified_base 2: mod_base = cm
  modified_base 2..3: mod_base = OTHER; note = S-phosphorothioate
  modified_base 3: mod_base = cm
  modified_base 3..4: mod_base = OTHER; note = S-phosphorothioate
  modified_base 4: mod_base = OTHER; note = 2-fluororibose adenine
  modified_base 4..5: mod_base = OTHER; note = S-phosphorothioate
  modified_base 5: mod_base = OTHER; note = 2-fluororibose guanine
  modified_base 5..6: mod_base = OTHER; note = S-phosphorothioate
  modified_base 6: mod_base = OTHER; note = 2-fluororibose cytosine
  modified_base 6..7: mod_base = OTHER; note = S-phosphorothioate
  modified_base 7: mod_base = OTHER; note = 2-fluororibose adenine
  modified_base 7..8: mod_base = OTHER; note = S-phosphorothioate
  modified_base 8: mod_base = OTHER; note = 2-fluororibose guanine
  modified_base 8..9: mod_base = OTHER; note = S-phosphorothioate
  modified_base 9: mod_base = OTHER; note = 2-fluororibose cytosine
  modified_base 9..10: mod_base = OTHER; note = S-phosphorothioate
  modified_base 10: mod_base = OTHER; note = 2-fluororibose uracil
  modified_base 10..11: mod_base = OTHER; note = S-phosphorothioate
  modified_base 11: mod_base = OTHER; note = 2-fluororibose uracil
  modified_base 11..12: mod_base = OTHER; note = S-phosphorothioate
  modified_base 12: mod_base = OTHER; note = 2-fluororibose cytosine
  modified_base 12..13: mod_base = OTHER; note = S-phosphorothioate
  modified_base 13: mod_base = OTHER; note = 2-fluororibose adenine
  modified_base 13..14: mod_base = OTHER; note = S-phosphorothioate
  modified_base 14: mod_base = OTHER; note = 2-fluororibose guanine
  modified_base 14..15: mod_base = OTHER; note = S-phosphorothioate
  modified_base 15: mod_base = OTHER; note = 2-fluororibose uracil
  modified_base 15..16: mod_base = OTHER; note = S-phosphorothioate
  modified_base 16: mod_base = OTHER; note = 2-fluororibose cytosine
  modified_base 16..17: mod_base = OTHER; note = S-phosphorothioate
  modified_base 17: mod_base = OTHER; note = 2-fluororibose cytosine
  modified_base 17..18: mod_base = OTHER; note = S-phosphorothioate
  modified_base 18: mod_base = OTHER; note = 2-fluororibose cytosine
  modified_base 18..19: mod_base = OTHER; note = S-phosphorothioate
  modified_base 19: mod_base = OTHER; note = 2-fluororibose uracil
  modified_base 19..20: mod_base = OTHER; note = S-phosphorothioate
  modified_base 20: mod_base = OTHER; note = 2-fluororibose uracil
  modified_base 20..21: mod_base = OTHER; note = S-phosphorothioate
  modified_base 21: mod_base = OTHER; note = 2-fluororibose uracil
  modified_base 21..22: mod_base = OTHER; note = S-phosphorothioate
  modified_base 22: mod_base = OTHER; note = 2-fluororibose cytosine
  modified_base 22..23: mod_base = OTHER; note = S-phosphorothioate
  modified_base 23: mod_base = OTHER; note = 2-fluororibose uracil
  modified_base 23..24: mod_base = OTHER; note = S-phosphorothioate
  modified_base 24: mod_base = OTHER; note = deoxyribose 6-amino-9-substituted 8,9-dihydro-7H-purin-8-one
  modified_base 24..25: mod_base = OTHER; note = S-phosphorothioate
  modified_base 25: mod_base = OTHER; note = deoxyribose inosine
  modified_base 25..26: mod_base = OTHER; note S-N-(1,3-dimethylimidazolidin-2-ylidene)phosphoramidate
  modified_base 26: mod_base = um
  modified_base 26..27: mod_base = OTHER; note = S-phosphorothioate
  modified_base 27: mod_base = OTHER; note = 2-fluororibose cytosine
  modified_base 27..28: mod_base = OTHER; note = S-phosphorothioate
  modified_base 28: mod_base = gm
  modified_base 28..29: mod_base = OTHER; note = S-phosphorothioate
  modified_base 29: mod_base = OTHER; note = 2-O-methylribose adenine
  modified_base 29..30: mod_base = OTHER; note R-N-(1,3-dimethylimidazolidin-2-ylidene)phosphoramidate
  modified_base 30: mod_base = um
  source 1..30: mol_type = other RNA
tccagcagcttcagtccctttctagtcgat

SEQ ID NO: 374 - RNA, 30 nt, synthetic construct; identical to SEQ ID NO: 134
  misc_feature 1..30: note = Synthetic: WV-44464
  misc_feature 1..30: note = Synthetic: ADR-0100529
  modified_base 1: mod_base = OTHER; note = triantennary GalNAc with C12 linker linked to 6-aminohexanol linked by phosphate to the 5' end of 2-O-methylribose cytosine
  modified_base 1..2: mod_base = OTHER; note R-N-(1,3-dimethylimidazolidin-2-ylidene)phosphoramidate
  modified_base 2: mod_base = cm
  modified_base 2..3: mod_base = OTHER; note = S-phosphorothioate
  modified_base 3: mod_base = cm
  modified_base 3..4: mod_base = OTHER; note = S-phosphorothioate
  modified_base 4: mod_base = OTHER; note = 2-fluororibose adenine
  modified_base 4..5: mod_base = OTHER; note = S-phosphorothioate
  modified_base 5: mod_base = OTHER; note = 2-fluororibose guanine
  modified_base 5..6: mod_base = OTHER; note = S-phosphorothioate
  modified_base 6: mod_base = cm
  modified_base 7: mod_base = OTHER; note = 2-fluororibose adenine
  modified_base 7..8: mod_base = OTHER; note = S-phosphorothioate
  modified_base 8: mod_base = OTHER; note = 2-fluororibose guanine
  modified_base 8..9: mod_base = OTHER; note = S-phosphorothioate
  modified_base 9: mod_base = OTHER; note = 2-fluororibose cytosine
  modified_base 9..10: mod_base = OTHER; note = S-phosphorothioate
  modified_base 10: mod_base = OTHER; note = 2-fluororibose uracil
  modified_base 10..11: mod_base = OTHER; note = S-phosphorothioate
  modified_base 11: mod_base = OTHER; note = 2-fluororibose uracil
  modified_base 11..12: mod_base = OTHER; note R-N-(1,3-dimethylimidazolidin-2-ylidene)phosphoramidate
  modified_base 12: mod_base = OTHER; note = 2-fluororibose cytosine
  modified_base 12..13: mod_base = OTHER; note = S-phosphorothioate
  modified_base 13: mod_base = OTHER; note = 2-fluororibose adenine
  modified_base 14: mod_base = OTHER; note = 2-fluororibose guanine
  modified_base 14..15: mod_base = OTHER; note R-N-(1,3-dimethylimidazolidin-2-ylidene)phosphoramidate
  modified_base 15: mod_base = OTHER; note = 2-fluororibose uracil
  modified_base 15..16: mod_base = OTHER; note = S-phosphorothioate
  modified_base 16: mod_base = OTHER; note = 2-fluororibose cytosine
  modified_base 16..17: mod_base = OTHER; note = S-phosphorothioate
  modified_base 17: mod_base = OTHER; note = 2-fluororibose cytosine
  modified_base 17..18: mod_base = OTHER; note = S-phosphorothioate
  modified_base 18: mod_base = OTHER; note = 2-fluororibose cytosine
  modified_base 18..19: mod_base = OTHER; note = S-phosphorothioate
  modified_base 19: mod_base = OTHER; note = 2-fluororibose uracil
  modified_base 19..20: mod_base = OTHER; note = S-phosphorothioate
  modified_base 20: mod_base = um
  modified_base 21: mod_base = OTHER; note = 2-fluororibose uracil
  modified_base 21..22: mod_base = OTHER; note = S-phosphorothioate
  modified_base 22: mod_base = OTHER; note = 2-fluororibose cytosine
  modified_base 22..23: mod_base = OTHER; note = S-phosphorothioate
  modified_base 23: mod_base = OTHER; note = 2-fluororibose uracil
  modified_base 23..24: mod_base = OTHER; note = S-phosphorothioate
  modified_base 24: mod_base = OTHER; note = deoxyribose 6-amino-9-substituted 8,9-dihydro-7H-purin-8-one
  modified_base 24..25: mod_base = OTHER; note = S-phosphorothioate
  modified_base 25: mod_base = OTHER; note = deoxyribose inosine
  modified_base 25..26: mod_base = OTHER; note S-N-(1,3-dimethylimidazolidin-2-ylidene)phosphoramidate
  modified_base 26: mod_base = um
  modified_base 27: mod_base = OTHER; note = 2-fluororibose cytosine
  modified_base 27..28: mod_base = OTHER; note = S-phosphorothioate
  modified_base 28: mod_base = gm
  modified_base 28..29: mod_base = OTHER; note = S-phosphorothioate
  modified_base 29: mod_base = OTHER; note = 2-O-methylribose adenine
  modified_base 29..30: mod_base = OTHER; note R-N-(1,3-dimethylimidazolidin-2-ylidene)phosphoramidate
  modified_base 30: mod_base = um
  source 1..30: mol_type = other RNA

SEQ ID NO: 375 - RNA, 30 nt, synthetic construct; identical to SEQ ID NO: 134
  misc_feature 1..30: note = Synthetic: WV-44465
  misc_feature 1..30: note = Synthetic: ADR-0100530
  modified_base 1: mod_base = OTHER; note = triantennary GalNAc with C12 linker linked to 6-aminohexanol linked by phosphate to the 5' end of 2-O-methylribose cytosine
  modified_base 1..2: mod_base = OTHER; note R-N-(1,3-dimethylimidazolidin-2-ylidene)phosphoramidate
  modified_base 2: mod_base = cm
  modified_base 2..3: mod_base = OTHER; note = S-phosphorothioate
  modified_base 3: mod_base = cm
  modified_base 3..4: mod_base = OTHER; note = S-phosphorothioate
  modified_base 4: mod_base = OTHER; note = 2-fluororibose adenine
  modified_base 4..5: mod_base = OTHER; note = S-phosphorothioate
  modified_base 5: mod_base = OTHER; note = 2-fluororibose guanine
  modified_base 5..6: mod_base = OTHER; note = S-phosphorothioate
  modified_base 6: mod_base = OTHER; note = 2-fluororibose cytosine
  modified_base 7: mod_base = OTHER; note = 2-O-methylribose adenine
  modified_base 7..8: mod_base = OTHER; note = S-phosphorothioate
  modified_base 8: mod_base = OTHER; note = 2-fluororibose guanine
  modified_base 8..9: mod_base = OTHER; note = S-phosphorothioate
  modified_base 9: mod_base = OTHER; note = 2-fluororibose cytosine
  modified_base 10: mod_base = um
  modified_base 10..11: mod_base = OTHER; note = S-phosphorothioate
  modified_base 11: mod_base = OTHER; note = 2-fluororibose uracil
  modified_base 11..12: mod_base = OTHER; note R-N-(1,3-dimethylimidazolidin-2-ylidene)phosphoramidate
  modified_base 12: mod_base = cm
  modified_base 13: mod_base = OTHER; note = 2-fluororibose adenine
  modified_base 13..14: mod_base = OTHER; note = S-phosphorothioate
  modified_base 14: mod_base = OTHER; note = 2-fluororibose guanine
  modified_base 14..15: mod_base = OTHER; note R-N-(1,3-dimethylimidazolidin-2-ylidene)phosphoramidate
  modified_base 15: mod_base = OTHER; note = 2-fluororibose uracil
  modified_base 16: mod_base = cm
  modified_base 16..17: mod_base = OTHER; note = S-phosphorothioate
  modified_base 17: mod_base = OTHER; note = 2-fluororibose cytosine
  modified_base 17..18: mod_base = OTHER; note = S-phosphorothioate
  modified_base 18: mod_base = OTHER; note = 2-fluororibose cytosine
  modified_base 18..19: mod_base = OTHER; note = S-phosphorothioate
  modified_base 19: mod_base = OTHER; note = 2-fluororibose uracil
  modified_base 19..20: mod_base = OTHER; note R-N-(1,3-dimethylimidazolidin-2-ylidene)phosphoramidate
  modified_base 20: mod_base = OTHER; note = 2-fluororibose uracil
  modified_base 20..21: mod_base = OTHER; note = S-phosphorothioate
  modified_base 21: mod_base = um
  modified_base 22: mod_base = OTHER; note = 2-fluororibose cytosine
  modified_base 22..23: mod_base = OTHER; note = S-phosphorothioate
  modified_base 23: mod_base = OTHER; note = 2-fluororibose uracil
  modified_base 23..24: mod_base = OTHER; note = S-phosphorothioate
  modified_base 24: mod_base = OTHER; note = deoxyribose 6-amino-9-substituted 8,9-dihydro-7H-purin-8-one
  modified_base 24..25: mod_base = OTHER; note = S-phosphorothioate
  modified_base 25: mod_base = OTHER; note = deoxyribose inosine
  modified_base 25..26: mod_base = OTHER; note S-N-(1,3-dimethylimidazolidin-2-ylidene)phosphoramidate
  modified_base 26: mod_base = um
  modified_base 27: mod_base = OTHER; note = 2-fluororibose cytosine
  modified_base 27..28: mod_base = OTHER; note = S-phosphorothioate
  modified_base 28: mod_base = gm
  modified_base 28..29: mod_base = OTHER; note = S-phosphorothioate
  modified_base 29: mod_base = OTHER; note = 2-O-methylribose adenine
  modified_base 29..30: mod_base = OTHER; note R-N-(1,3-dimethylimidazolidin-2-ylidene)phosphoramidate
  modified_base 30: mod_base = um
  source 1..30: mol_type = other RNA

SEQ ID NO: 376 - RNA, 30 nt, synthetic construct; identical to SEQ ID NO: 134
  misc_feature 1..30: note = Synthetic: WV-44285
  misc_feature 1..30: note = Synthetic: ADR-0103638
  modified_base 1: mod_base = OTHER; note = 2-fluororibose cytosine
  modified_base 1..2: mod_base = OTHER; note R-N-(1,3-dimethylimidazolidin-2-ylidene)phosphoramidate
  modified_base 2: mod_base = OTHER; note = 2-fluororibose cytosine
  modified_base 2..3: mod_base = OTHER; note = S-phosphorothioate
  modified_base 3: mod_base = OTHER; note = 2-fluororibose cytosine
  modified_base 3..4: mod_base = OTHER; note = S-phosphorothioate
  modified_base 4: mod_base = OTHER; note = 2-fluororibose adenine
  modified_base 4..5: mod_base = OTHER; note = S-phosphorothioate
  modified_base 5: mod_base = OTHER; note = 2-fluororibose guanine
  modified_base 5..6: mod_base = OTHER; note = S-phosphorothioate
  modified_base 6: mod_base = OTHER; note = 2-fluororibose cytosine
  modified_base 6..7: mod_base = OTHER; note = S-phosphorothioate
  modified_base 7: mod_base = OTHER; note = 2-fluororibose adenine
  modified_base 7..8: mod_base = OTHER; note = S-phosphorothioate
  modified_base 8: mod_base = OTHER; note = 2-fluororibose guanine
  modified_base 8..9: mod_base = OTHER; note = S-phosphorothioate
  modified_base 9: mod_base = OTHER; note = 2-fluororibose cytosine
  modified_base 9..10: mod_base = OTHER; note = S-phosphorothioate
  modified_base 10: mod_base = OTHER; note = 2-fluororibose uracil
  modified_base 10..11: mod_base = OTHER; note = S-phosphorothioate
  modified_base 11: mod_base = OTHER; note = 2-fluororibose uracil
  modified_base 11..12: mod_base = OTHER; note = S-phosphorothioate
  modified_base 12: mod_base = OTHER; note = 2-fluororibose cytosine
  modified_base 12..13: mod_base = OTHER; note = S-phosphorothioate
  modified_base 13: mod_base = OTHER; note = 2-fluororibose adenine
  modified_base 13..14: mod_base = OTHER; note = S-phosphorothioate
  modified_base 14: mod_base = OTHER; note = 2-fluororibose guanine
  modified_base 14..15: mod_base = OTHER; note = S-phosphorothioate
  modified_base 15: mod_base = OTHER; note = 2-fluororibose uracil
  modified_base 15..16: mod_base = OTHER; note = S-phosphorothioate
  modified_base 16: mod_base = cm
  modified_base 16..17: mod_base = OTHER; note = S-phosphorothioate
  modified_base 17: mod_base = cm
  modified_base 17..18: mod_base = OTHER; note = S-phosphorothioate
  modified_base 18: mod_base = cm
  modified_base 18..19: mod_base = OTHER; note = S-phosphorothioate
  modified_base 19: mod_base = um
  modified_base 19..20: mod_base = OTHER; note = S-phosphorothioate
  modified_base 20: mod_base = um
  modified_base 20..21: mod_base = OTHER; note = S-phosphorothioate
  modified_base 21: mod_base = um
  modified_base 21..22: mod_base = OTHER; note = S-phosphorothioate
  modified_base 22: mod_base = cm
  modified_base 22..23: mod_base = OTHER; note = S-phosphorothioate
  modified_base 23: mod_base = OTHER; note = (6S)-2,4-disubstituted-6-[(substituted oxy)methyl]morpholine thymine
  modified_base 23..24: mod_base = OTHER; note = N-(1,3-dimethylimidazolidin-2-ylidene)phosphoramidate
  modified_base 24: mod_base = OTHER; note = deoxyribose 6-amino-9-substituted 8,9-dihydro-7H-purin-8-one
  modified_base 24..25: mod_base = OTHER; note = S-phosphorothioate
  modified_base 25: mod_base = OTHER; note = deoxyribose inosine
  modified_base 25..26: mod_base = OTHER; note S-N-(1,3-dimethylimidazolidin-2-ylidene)phosphoramidate
  modified_base 26: mod_base = um
  modified_base 26..27: mod_base = OTHER; note = S-phosphorothioate
  modified_base 27: mod_base = cm
  modified_base 27..28: mod_base = OTHER; note = S-phosphorothioate
  modified_base 28: mod_base = gm
  modified_base 28..29: mod_base = OTHER; note = S-phosphorothioate
  modified_base 29: mod_base = OTHER; note = 2-O-methylribose adenine
  modified_base 29..30: mod_base = OTHER; note R-N-(1,3-dimethylimidazolidin-2-ylidene)phosphoramidate
  modified_base 30: mod_base = um
  source 1..30: mol_type = other RNA

SEQ ID NO: 377 - RNA, 30 nt, synthetic construct; identical to SEQ ID NO: 134
  misc_feature 1..30: note = Synthetic: WV-44286
  misc_feature 1..30: note = Synthetic: ADR-0103614
  modified_base 1: mod_base = OTHER; note = 2-fluororibose cytosine
  modified_base 1..2: mod_base = OTHER; note R-N-(1,3-dimethylimidazolidin-2-ylidene)phosphoramidate
  modified_base 2: mod_base = OTHER; note = 2-fluororibose cytosine
  modified_base 2..3: mod_base = OTHER; note = S-phosphorothioate
  modified_base 3: mod_base = OTHER; note = 2-fluororibose cytosine
  modified_base 3..4: mod_base = OTHER; note = S-phosphorothioate
  modified_base 4: mod_base = OTHER; note = 2-fluororibose adenine
  modified_base 4..5: mod_base = OTHER; note = S-phosphorothioate
  modified_base 5: mod_base = OTHER; note = 2-fluororibose guanine
  modified_base 5..6: mod_base = OTHER; note = S-phosphorothioate
  modified_base 6: mod_base = OTHER; note = 2-fluororibose cytosine
  modified_base 6..7: mod_base = OTHER; note = S-phosphorothioate
  modified_base 7: mod_base = OTHER; note = 2-fluororibose adenine
  modified_base 7..8: mod_base = OTHER; note = S-phosphorothioate
  modified_base 8: mod_base = OTHER; note = 2-fluororibose guanine
  modified_base 8..9: mod_base = OTHER; note = S-phosphorothioate
  modified_base 9: mod_base = OTHER; note = 2-fluororibose cytosine
  modified_base 9..10: mod_base = OTHER; note = S-phosphorothioate
  modified_base 10: mod_base = OTHER; note = 2-fluororibose uracil
  modified_base 10..11: mod_base = OTHER; note = S-phosphorothioate
  modified_base 11: mod_base = OTHER; note = 2-fluororibose uracil
  modified_base 11..12: mod_base = OTHER; note = S-phosphorothioate
  modified_base 12: mod_base = OTHER; note = 2-fluororibose cytosine
  modified_base 12..13: mod_base = OTHER; note = S-phosphorothioate
  modified_base 13: mod_base = OTHER; note = 2-fluororibose adenine
  modified_base 13..14: mod_base = OTHER; note = S-phosphorothioate
  modified_base 14: mod_base = OTHER; note = 2-fluororibose guanine
  modified_base 14..15: mod_base = OTHER; note = S-phosphorothioate
  modified_base 15: mod_base = OTHER; note = 2-fluororibose uracil
  modified_base 15..16: mod_base = OTHER; note = S-phosphorothioate
  modified_base 16: mod_base = cm
  modified_base 16..17: mod_base = OTHER; note = S-phosphorothioate
  modified_base 17: mod_base = cm
  modified_base 17..18: mod_base = OTHER; note = S-phosphorothioate
  modified_base 18: mod_base = cm
  modified_base 18..19: mod_base = OTHER; note = S-phosphorothioate
  modified_base 19: mod_base = um
  modified_base 19..20: mod_base = OTHER; note = S-phosphorothioate
  modified_base 20: mod_base = um
  modified_base 20..21: mod_base = OTHER; note = S-phosphorothioate
  modified_base 21: mod_base = um
  modified_base 21..22: mod_base = OTHER; note = S-phosphorothioate
  modified_base 22: mod_base = cm
  modified_base 22..23: mod_base = OTHER; note = S-phosphorothioate
  modified_base 23: mod_base = OTHER; note = 2-fluororibose uracil
  modified_base 23..24: mod_base = OTHER; note = S-phosphorothioate
  modified_base 24: mod_base = OTHER; note = deoxyribose 6-amino-9-substituted 8,9-dihydro-7H-purin-8-one
  modified_base 24..25: mod_base = OTHER; note = S-phosphorothioate
  modified_base 25: mod_base = OTHER; note = (6S)-2,4-disubstituted-6-[(substituted oxy)methyl]morpholine guanine
  modified_base 25..26: mod_base = OTHER; note = N-(1,3-dimethylimidazolidin-2-ylidene)phosphoramidate
  modified_base 26: mod_base = um
  modified_base 26..27: mod_base = OTHER; note = S-phosphorothioate
  modified_base 27: mod_base = cm
  modified_base 27..28: mod_base = OTHER; note = S-phosphorothioate
  modified_base 28: mod_base = gm
  modified_base 28..29: mod_base = OTHER; note = S-phosphorothioate
  modified_base 29: mod_base = OTHER; note = 2-O-methylribose adenine
  modified_base 29..30: mod_base = OTHER; note R-N-(1,3-dimethylimidazolidin-2-ylidene)phosphoramidate
  modified_base 30: mod_base = um
  source 1..30: mol_type = other RNA

SEQ ID NO: 378 - RNA, 30 nt, synthetic construct; identical to SEQ ID NO: 134
  misc_feature 1..30: note = Synthetic: WV-44287
  misc_feature 1..30: note = Synthetic: ADR-0103640
  modified_base 1: mod_base = OTHER; note = 2-fluororibose cytosine
  modified_base 1..2: mod_base = OTHER; note R-N-(1,3-dimethylimidazolidin-2-ylidene)phosphoramidate
  modified_base 2: mod_base = OTHER; note = 2-fluororibose cytosine
  modified_base 2..3: mod_base = OTHER; note = S-phosphorothioate
  modified_base 3: mod_base = OTHER; note = 2-fluororibose cytosine
  modified_base 3..4: mod_base = OTHER; note = S-phosphorothioate
  modified_base 4: mod_base = OTHER; note = 2-fluororibose adenine
  modified_base 4..5: mod_base = OTHER; note = S-phosphorothioate
  modified_base 5: mod_base = OTHER; note = 2-fluororibose guanine
  modified_base 5..6: mod_base = OTHER; note = S-phosphorothioate
  modified_base 6: mod_base = OTHER; note = 2-fluororibose cytosine
  modified_base 6..7: mod_base = OTHER; note = S-phosphorothioate
  modified_base 7: mod_base = OTHER; note = 2-fluororibose adenine
  modified_base 7..8: mod_base = OTHER; note = S-phosphorothioate
  modified_base 8: mod_base = OTHER; note = 2-fluororibose guanine
  modified_base 8..9: mod_base = OTHER; note = S-phosphorothioate
  modified_base 9: mod_base = OTHER; note = 2-fluororibose cytosine
  modified_base 9..10: mod_base = OTHER; note = S-phosphorothioate
  modified_base 10: mod_base = OTHER; note = 2-fluororibose uracil
  modified_base 10..11: mod_base = OTHER; note = S-phosphorothioate
  modified_base 11: mod_base = OTHER; note = 2-fluororibose uracil
  modified_base 11..12: mod_base = OTHER; note = S-phosphorothioate
  modified_base 12: mod_base = OTHER; note = 2-fluororibose cytosine
  modified_base 12..13: mod_base = OTHER; note = S-phosphorothioate
  modified_base 13: mod_base = OTHER; note = 2-fluororibose adenine
  modified_base 13..14: mod_base = OTHER; note = S-phosphorothioate
  modified_base 14: mod_base = OTHER; note = 2-fluororibose guanine
  modified_base 14..15: mod_base = OTHER; note = S-phosphorothioate
  modified_base 15: mod_base = OTHER; note = 2-fluororibose uracil
  modified_base 15..16: mod_base = OTHER; note = S-phosphorothioate
  modified_base 16: mod_base = cm
  modified_base 16..17: mod_base = OTHER; note = S-phosphorothioate
  modified_base 17: mod_base = cm
  modified_base 17..18: mod_base = OTHER; note = S-phosphorothioate
  modified_base 18: mod_base = cm
  modified_base 18..19: mod_base = OTHER; note = S-phosphorothioate
  modified_base 19: mod_base = um
  modified_base 19..20: mod_base = OTHER; note = S-phosphorothioate
  modified_base 20: mod_base = um
  modified_base 20..21: mod_base = OTHER; note = S-phosphorothioate
  modified_base 21: mod_base = um
  modified_base 21..22: mod_base = OTHER; note = S-phosphorothioate
  modified_base 22: mod_base = cm
  modified_base 22..23: mod_base = OTHER; note = S-phosphorothioate
  modified_base 23: mod_base = OTHER; note = (6S)-2,4-disubstituted-6-[(substituted oxy)methyl]morpholine thymine
  modified_base 23..24: mod_base = OTHER; note = ketone
  modified_base 24: mod_base = OTHER; note = deoxyribose 6-amino-9-substituted 8,9-dihydro-7H-purin-8-one
  modified_base 24..25: mod_base = OTHER; note = S-phosphorothioate
  modified_base 25: mod_base = OTHER; note = deoxyribose inosine
  modified_base 25..26: mod_base = OTHER; note S-N-(1,3-dimethylimidazolidin-2-ylidene)phosphoramidate
  modified_base 26: mod_base = um
  modified_base 26..27: mod_base = OTHER; note = S-phosphorothioate
  modified_base 27: mod_base = cm
  modified_base 27..28: mod_base = OTHER; note = S-phosphorothioate
  modified_base 28: mod_base = gm
  modified_base 28..29: mod_base = OTHER; note = S-phosphorothioate
  modified_base 29: mod_base = OTHER; note = 2-O-methylribose adenine
  modified_base 29..30: mod_base = OTHER; note R-N-(1,3-dimethylimidazolidin-2-ylidene)phosphoramidate
  modified_base 30: mod_base = um
  source 1..30: mol_type = other RNA

SEQ ID NO: 379 - RNA, 30 nt, synthetic construct; identical to SEQ ID NO: 134
  misc_feature 1..30: note = Synthetic: WV-44288
  misc_feature 1..30: note = Synthetic: ADR-0103615
  modified_base 1: mod_base = OTHER; note = 2-fluororibose cytosine
  modified_base 1..2: mod_base = OTHER; note R-N-(1,3-dimethylimidazolidin-2-ylidene)phosphoramidate
  modified_base 2: mod_base = OTHER; note = 2-fluororibose cytosine
  modified_base 2..3: mod_base = OTHER; note = S-phosphorothioate
  modified_base 3: mod_base = OTHER; note = 2-fluororibose cytosine
  modified_base 3..4: mod_base = OTHER; note = S-phosphorothioate
  modified_base 4: mod_base = OTHER; note = 2-fluororibose adenine
  modified_base 4..5: mod_base = OTHER; note = S-phosphorothioate
  modified_base 5: mod_base = OTHER; note = 2-fluororibose guanine
  modified_base 5..6: mod_base = OTHER; note = S-phosphorothioate
  modified_base 6: mod_base = OTHER; note = 2-fluororibose cytosine
  modified_base 6..7: mod_base = OTHER; note = S-phosphorothioate
  modified_base 7: mod_base = OTHER; note = 2-fluororibose adenine
  modified_base 7..8: mod_base = OTHER; note = S-phosphorothioate
  modified_base 8: mod_base = OTHER; note = 2-fluororibose guanine
  modified_base 8..9: mod_base = OTHER; note = S-phosphorothioate
  modified_base 9: mod_base = OTHER; note = 2-fluororibose cytosine
  modified_base 9..10: mod_base = OTHER; note = S-phosphorothioate
  modified_base 10: mod_base = OTHER; note = 2-fluororibose uracil
  modified_base 10..11: mod_base = OTHER; note = S-phosphorothioate
  modified_base 11: mod_base = OTHER; note = 2-fluororibose uracil
  modified_base 11..12: mod_base = OTHER; note = S-phosphorothioate
  modified_base 12: mod_base = OTHER; note = 2-fluororibose cytosine
  modified_base 12..13: mod_base = OTHER; note = S-phosphorothioate
  modified_base 13: mod_base = OTHER; note = 2-fluororibose adenine
  modified_base 13..14: mod_base = OTHER; note = S-phosphorothioate
  modified_base 14: mod_base = OTHER; note = 2-fluororibose guanine
  modified_base 14..15: mod_base = OTHER; note = S-phosphorothioate
  modified_base 15: mod_base = OTHER; note = 2-fluororibose uracil
  modified_base 15..16: mod_base = OTHER; note = S-phosphorothioate
  modified_base 16: mod_base = cm
  modified_base 16..17: mod_base = OTHER; note = S-phosphorothioate
  modified_base 17: mod_base = cm
  modified_base 17..18: mod_base = OTHER; note = S-phosphorothioate
  modified_base 18: mod_base = cm
  modified_base 18..19: mod_base = OTHER; note = S-phosphorothioate
  modified_base 19: mod_base = um
  modified_base 19..20: mod_base = OTHER; note = S-phosphorothioate
  modified_base 20: mod_base = um
  modified_base 20..21: mod_base = OTHER; note = S-phosphorothioate
  modified_base 21: mod_base = um
  modified_base 21..22: mod_base = OTHER; note = S-phosphorothioate
  modified_base 22: mod_base = cm
  modified_base 22..23: mod_base = OTHER; note = S-phosphorothioate
  modified_base 23: mod_base = OTHER; note = 2-fluororibose uracil
  modified_base 23..24: mod_base = OTHER; note = S-phosphorothioate
  modified_base 24: mod_base = OTHER; note = deoxyribose 6-amino-9-substituted 8,9-dihydro-7H-purin-8-one
  modified_base 24..25: mod_base = OTHER; note = S-phosphorothioate
  modified_base 25: mod_base = OTHER; note = (6S)-2,4-disubstituted-6-[(substituted oxy)methyl]morpholine guanine
  modified_base 25..26: mod_base = OTHER; note = ketone
  modified_base 26: mod_base = um
  modified_base 26..27: mod_base = OTHER; note = S-phosphorothioate
  modified_base 27: mod_base = cm
  modified_base 27..28: mod_base = OTHER; note = S-phosphorothioate
  modified_base 28: mod_base = gm
  modified_base 28..29: mod_base = OTHER; note = S-phosphorothioate
  modified_base 29: mod_base = OTHER; note = 2-O-methylribose adenine
  modified_base 29..30: mod_base = OTHER; note R-N-(1,3-dimethylimidazolidin-2-ylidene)phosphoramidate
  modified_base 30: mod_base = um
  source 1..30: mol_type = other RNA

SEQ ID NO: 380 - RNA, 30 nt, synthetic construct; identical to SEQ ID NO: 134
  misc_feature 1..30: note = Synthetic: WV-44327
  misc_feature 1..30: note = Synthetic: ADR-0103642
  modified_base 1: mod_base = OTHER; note = 2-fluororibose cytosine
  modified_base 1..2: mod_base = OTHER; note R-N-(1,3-dimethylimidazolidin-2-ylidene)phosphoramidate
  modified_base 2: mod_base = OTHER; note = 2-fluororibose cytosine
  modified_base 2..3: mod_base = OTHER; note = S-phosphorothioate
  modified_base 3: mod_base = OTHER; note = 2-fluororibose cytosine
  modified_base 3..4: mod_base = OTHER; note = S-phosphorothioate
  modified_base 4: mod_base = OTHER; note = 2-fluororibose adenine
  modified_base 4..5: mod_base = OTHER; note = S-phosphorothioate
  modified_base 5: mod_base = OTHER; note = 2-fluororibose guanine
  modified_base 5..6: mod_base = OTHER; note = S-phosphorothioate
  modified_base 6: mod_base = OTHER; note = 2-fluororibose cytosine
  modified_base 6..7: mod_base = OTHER; note = S-phosphorothioate
  modified_base 7: mod_base = OTHER; note = 2-fluororibose adenine
  modified_base 7..8: mod_base = OTHER; note = S-phosphorothioate
  modified_base 8: mod_base = OTHER; note = 2-fluororibose guanine
  modified_base 8..9: mod_base = OTHER; note = S-phosphorothioate
  modified_base 9: mod_base = OTHER; note = 2-fluororibose cytosine
  modified_base 9..10: mod_base = OTHER; note = S-phosphorothioate
  modified_base 10: mod_base = OTHER; note = 2-fluororibose uracil
  modified_base 10..11: mod_base = OTHER; note = S-phosphorothioate
  modified_base 11: mod_base = OTHER; note = 2-fluororibose uracil
  modified_base 11..12: mod_base = OTHER; note = S-phosphorothioate
  modified_base 12: mod_base = OTHER; note = 2-fluororibose cytosine
  modified_base 12..13: mod_base = OTHER; note = S-phosphorothioate
  modified_base 13: mod_base = OTHER; note = 2-fluororibose adenine
  modified_base 13..14: mod_base = OTHER; note = S-phosphorothioate
  modified_base 14: mod_base = OTHER; note = 2-fluororibose guanine
  modified_base 14..15: mod_base = OTHER; note = S-phosphorothioate
  modified_base 15: mod_base = OTHER; note = 2-fluororibose uracil
  modified_base 15..16: mod_base = OTHER; note = S-phosphorothioate
  modified_base 16: mod_base = cm
  modified_base 16..17: mod_base = OTHER; note = S-phosphorothioate
  modified_base 17: mod_base = cm
  modified_base 17..18: mod_base = OTHER; note = S-phosphorothioate
  modified_base 18: mod_base = cm
  modified_base 18..19: mod_base = OTHER; note = S-phosphorothioate
  modified_base 19: mod_base = um
  modified_base 19..20: mod_base = OTHER; note = S-phosphorothioate
  modified_base 20: mod_base = um
  modified_base 20..21: mod_base = OTHER; note = S-phosphorothioate
  modified_base 21: mod_base = um
  modified_base 21..22: mod_base = OTHER; note = S-phosphorothioate
  modified_base 22: mod_base = cm
  modified_base 22..23: mod_base = OTHER; note = S-phosphorothioate
  modified_base 23: mod_base = OTHER; note = morpholino (acyclic) thymine
  modified_base 23..24: mod_base = OTHER; note = N-(1,3-dimethylimidazolidin-2-ylidene)phosphoramidate
  modified_base 24: mod_base = OTHER; note = deoxyribose 6-amino-9-substituted 8,9-dihydro-7H-purin-8-one
  modified_base 24..25: mod_base = OTHER; note = S-phosphorothioate
  modified_base 25: mod_base = OTHER; note = deoxyribose inosine
  modified_base 25..26: mod_base = OTHER; note S-N-(1,3-dimethylimidazolidin-2-ylidene)phosphoramidate
  modified_base 26: mod_base = um
  modified_base 26..27: mod_base = OTHER; note = S-phosphorothioate
  modified_base 27: mod_base = cm
  modified_base 27..28: mod_base = OTHER; note = S-phosphorothioate
  modified_base 28: mod_base = gm
  modified_base 28..29: mod_base = OTHER; note = S-phosphorothioate
  modified_base 29: mod_base = OTHER; note = 2-O-methylribose adenine
  modified_base 29..30: mod_base = OTHER; note R-N-(1,3-dimethylimidazolidin-2-ylidene)phosphoramidate
  modified_base 30: mod_base = um
  source 1..30: mol_type = other RNA

SEQ ID NO: 381 - RNA, 30 nt, synthetic construct; identical to SEQ ID NO: 80
  misc_feature 1..30: note = Synthetic: WV-44278
  misc_feature 1..30: note = Synthetic: ADR-0103637
  modified_base 1: mod_base = OTHER; note = 2-fluororibose cytosine
  modified_base 1..2: mod_base = OTHER; note R-N-(1,3-dimethylimidazolidin-2-ylidene)phosphoramidate
  modified_base 2: mod_base = OTHER; note = 2-fluororibose cytosine
  modified_base 2..3: mod_base = OTHER; note = S-phosphorothioate
  modified_base 3: mod_base = OTHER; note = 2-fluororibose cytosine
  modified_base 3..4: mod_base = OTHER; note = S-phosphorothioate
  modified_base 4: mod_base = OTHER; note = 2-fluororibose adenine
  modified_base 4..5: mod_base = OTHER; note = S-phosphorothioate
  modified_base 5: mod_base = OTHER; note = 2-fluororibose guanine
  modified_base 5..6: mod_base = OTHER; note = S-phosphorothioate
  modified_base 6: mod_base = OTHER; note = 2-fluororibose cytosine
  modified_base 6..7: mod_base = OTHER; note = S-phosphorothioate
  modified_base 7: mod_base = OTHER; note = 2-fluororibose adenine
  modified_base 7..8: mod_base = OTHER; note = S-phosphorothioate
  modified_base 8: mod_base = OTHER; note = 2-fluororibose guanine
  modified_base 8..9: mod_base = OTHER; note = S-phosphorothioate
  modified_base 9: mod_base = OTHER; note = 2-fluororibose cytosine
  modified_base 9..10: mod_base = OTHER; note = S-phosphorothioate
  modified_base 10: mod_base = OTHER; note = 2-fluororibose uracil
  modified_base 10..11: mod_base = OTHER; note = S-phosphorothioate
  modified_base 11: mod_base = OTHER; note = 2-fluororibose uracil
  modified_base 11..12: mod_base = OTHER; note = S-phosphorothioate
  modified_base 12: mod_base = OTHER; note = 2-fluororibose cytosine
  modified_base 12..13: mod_base = OTHER; note = S-phosphorothioate
  modified_base 13: mod_base = OTHER; note = 2-fluororibose adenine
  modified_base 13..14: mod_base = OTHER; note = S-phosphorothioate
  modified_base 14: mod_base = OTHER; note = 2-fluororibose guanine
  modified_base 14..15: mod_base = OTHER; note = S-phosphorothioate
  modified_base 15: mod_base = OTHER; note = 2-fluororibose uracil
  modified_base 15..16: mod_base = OTHER; note = S-phosphorothioate
  modified_base 16: mod_base = cm
  modified_base 16..17: mod_base = OTHER; note = S-phosphorothioate
  modified_base 17: mod_base = cm
  modified_base 17..18: mod_base = OTHER; note = S-phosphorothioate
  modified_base 18: mod_base = cm
  modified_base 18..19: mod_base = OTHER; note = S-phosphorothioate
  modified_base 19: mod_base = um
  modified_base 19..20: mod_base = OTHER; note = S-phosphorothioate
  modified_base 20: mod_base = um
  modified_base 20..21: mod_base = OTHER; note = S-phosphorothioate
  modified_base 21: mod_base = um
  modified_base 21..22: mod_base = OTHER; note = S-phosphorothioate
  modified_base 22: mod_base = cm
  modified_base 22..23: mod_base = OTHER; note = S-phosphorothioate
  modified_base 23: mod_base = OTHER; note = (6S)-2,4-disubstituted-6-[(substituted oxy)methyl]morpholine thymine
  modified_base 23..24: mod_base = OTHER; note = N-(1,3-dimethylimidazolidin-2-ylidene)phosphoramidate
  modified_base 24: mod_base = OTHER; note = deoxyribose cytosine
  modified_base 24..25: mod_base = OTHER; note = S-phosphorothioate
  modified_base 25: mod_base = OTHER; note = deoxyribose inosine
  modified_base 25..26: mod_base = OTHER; note S-N-(1,3-dimethylimidazolidin-2-ylidene)phosphoramidate
  modified_base 26: mod_base = um
  modified_base 26..27: mod_base = OTHER; note = S-phosphorothioate
  modified_base 27: mod_base = cm
  modified_base 27..28: mod_base = OTHER; note = S-phosphorothioate
  modified_base 28: mod_base = gm
  modified_base 28..29: mod_base = OTHER; note = S-phosphorothioate
  modified_base 29: mod_base = OTHER; note = 2-O-methylribose adenine
  modified_base 29..30: mod_base = OTHER; note R-N-(1,3-dimethylimidazolidin-2-ylidene)phosphoramidate
  modified_base 30: mod_base = um
  source 1..30: mol_type = other RNA

SEQ ID NO: 382 - RNA, 30 nt, synthetic construct; identical to SEQ ID NO: 80
  misc_feature 1..30: note = Synthetic: WV-44279
  misc_feature 1..30: note = Synthetic: ADR-0103598
  modified_base 1: mod_base = OTHER; note = 2-fluororibose cytosine
  modified_base 1..2: mod_base = OTHER; note R-N-(1,3-dimethylimidazolidin-2-ylidene)phosphoramidate
  modified_base 2: mod_base = OTHER; note = 2-fluororibose cytosine
  modified_base 2..3: mod_base = OTHER; note = S-phosphorothioate
  modified_base 3: mod_base = OTHER; note = 2-fluororibose cytosine
  modified_base 3..4: mod_base = OTHER; note = S-phosphorothioate
  modified_base 4: mod_base = OTHER; note = 2-fluororibose adenine
  modified_base 4..5: mod_base = OTHER; note = S-phosphorothioate
  modified_base 5: mod_base = OTHER; note = 2-fluororibose guanine
  modified_base 5..6: mod_base = OTHER; note = S-phosphorothioate
  modified_base 6: mod_base = OTHER; note = 2-fluororibose cytosine
  modified_base 6..7: mod_base = OTHER; note = S-phosphorothioate
  modified_base 7: mod_base = OTHER; note = 2-fluororibose adenine
  modified_base 7..8: mod_base = OTHER; note = S-phosphorothioate
  modified_base 8: mod_base = OTHER; note = 2-fluororibose guanine
  modified_base 8..9: mod_base = OTHER; note = S-phosphorothioate
  modified_base 9: mod_base = OTHER; note = 2-fluororibose cytosine
  modified_base 9..10: mod_base = OTHER; note = S-phosphorothioate
  modified_base 10: mod_base = OTHER; note = 2-fluororibose uracil
  modified_base 10..11: mod_base = OTHER; note = S-phosphorothioate
  modified_base 11: mod_base = OTHER; note = 2-fluororibose uracil
  modified_base 11..12: mod_base = OTHER; note = S-phosphorothioate
  modified_base 12: mod_base = OTHER; note = 2-fluororibose cytosine
  modified_base 12..13: mod_base = OTHER; note = S-phosphorothioate
  modified_base 13: mod_base = OTHER; note = 2-fluororibose adenine
  modified_base 13..14: mod_base = OTHER; note = S-phosphorothioate
  modified_base 14: mod_base = OTHER; note = 2-fluororibose guanine
  modified_base 14..15: mod_base = OTHER; note = S-phosphorothioate
  modified_base 15: mod_base = OTHER; note = 2-fluororibose uracil
  modified_base 15..16: mod_base = OTHER; note = S-phosphorothioate
  modified_base 16: mod_base = cm
  modified_base 16..17: mod_base = OTHER; note = S-phosphorothioate
  modified_base 17: mod_base = cm
  modified_base 17..18: mod_base = OTHER; note = S-phosphorothioate
  modified_base 18: mod_base = cm
  modified_base 18..19: mod_base = OTHER; note = S-phosphorothioate
  modified_base 19: mod_base = um
  modified_base 19..20: mod_base = OTHER; note = S-phosphorothioate
  modified_base 20: mod_base = um
  modified_base 20..21: mod_base = OTHER; note = S-phosphorothioate
  modified_base 21: mod_base = um
  modified_base 21..22: mod_base = OTHER; note = S-phosphorothioate
  modified_base 22: mod_base = cm
  modified_base 22..23: mod_base = OTHER; note = S-phosphorothioate
  modified_base 23: mod_base = OTHER; note = 2-fluororibose uracil
  modified_base 23..24: mod_base = OTHER; note = S-phosphorothioate
  modified_base 24: mod_base = OTHER; note = (6S)-2,4-disubstituted-6-[(substituted oxy)methyl]morpholine cytosine
  modified_base 24..25: mod_base = OTHER; note = N-(1,3-dimethylimidazolidin-2-ylidene)phosphoramidate
  modified_base 25: mod_base = OTHER; note = deoxyribose inosine
  modified_base 25..26: mod_base = OTHER; note S-N-(1,3-dimethylimidazolidin-2-ylidene)phosphoramidate
  modified_base 26: mod_base = um
  modified_base 26..27: mod_base = OTHER; note = S-phosphorothioate
  modified_base 27: mod_base = cm
  modified_base 27..28: mod_base = OTHER; note = S-phosphorothioate
  modified_base 28: mod_base = gm
  modified_base 28..29: mod_base = OTHER; note = S-phosphorothioate
  modified_base 29: mod_base = OTHER; note = 2-O-methylribose adenine
  modified_base 29..30: mod_base = OTHER; note R-N-(1,3-dimethylimidazolidin-2-ylidene)phosphoramidate
  modified_base 30: mod_base = um
  source 1..30: mol_type = other RNA

SEQ ID NO: 383 - RNA, 30 nt, synthetic construct; identical to SEQ ID NO: 273
  misc_feature 1..30: note = Synthetic: WV-44280
  misc_feature 1..30: note = Synthetic: ADR-0103600
  modified_base 1: mod_base = OTHER; note = 2-fluororibose cytosine
  modified_base 1..2: mod_base = OTHER; note R-N-(1,3-dimethylimidazolidin-2-ylidene)phosphoramidate
  modified_base 2: mod_base = OTHER; note = 2-fluororibose cytosine
  modified_base 2..3: mod_base = OTHER; note = S-phosphorothioate
  modified_base 3: mod_base = OTHER; note = 2-fluororibose cytosine
  modified_base 3..4: mod_base = OTHER; note = S-phosphorothioate
  modified_base 4: mod_base = OTHER; note = 2-fluororibose adenine
  modified_base 4..5: mod_base = OTHER; note = S-phosphorothioate
  modified_base 5: mod_base = OTHER; note = 2-fluororibose guanine
  modified_base 5..6: mod_base = OTHER; note = S-phosphorothioate
  modified_base 6: mod_base = OTHER; note = 2-fluororibose cytosine
  modified_base 6..7: mod_base = OTHER; note = S-phosphorothioate
  modified_base 7: mod_base = OTHER; note = 2-fluororibose adenine
  modified_base 7..8: mod_base = OTHER; note = S-phosphorothioate
  modified_base 8: mod_base = OTHER; note = 2-fluororibose guanine
  modified_base 8..9: mod_base = OTHER; note = S-phosphorothioate
  modified_base 9: mod_base = OTHER; note = 2-fluororibose cytosine
  modified_base 9..10: mod_base = OTHER; note = S-phosphorothioate
  modified_base 10: mod_base = OTHER; note = 2-fluororibose uracil
  modified_base 10..11: mod_base = OTHER; note = S-phosphorothioate
  modified_base 11: mod_base = OTHER; note = 2-fluororibose uracil
  modified_base 11..12: mod_base = OTHER; note = S-phosphorothioate
  modified_base 12: mod_base = OTHER; note = 2-fluororibose cytosine
  modified_base 12..13: mod_base = OTHER; note = S-phosphorothioate
  modified_base 13: mod_base = OTHER; note = 2-fluororibose adenine
  modified_base 13..14: mod_base = OTHER; note = S-phosphorothioate
  modified_base 14: mod_base = OTHER; note = 2-fluororibose guanine
  modified_base 14..15: mod_base = OTHER; note = S-phosphorothioate
  modified_base 15: mod_base = OTHER; note = 2-fluororibose uracil
  modified_base 15..16: mod_base = OTHER; note = S-phosphorothioate
  modified_base 16: mod_base = cm
  modified_base 16..17: mod_base = OTHER; note = S-phosphorothioate
  modified_base 17: mod_base = cm
  modified_base 17..18: mod_base = OTHER; note = S-phosphorothioate
  modified_base 18: mod_base = cm
  modified_base 18..19: mod_base = OTHER; note = S-phosphorothioate
  modified_base 19: mod_base = um
  modified_base 19..20: mod_base = OTHER; note = S-phosphorothioate
  modified_base 20: mod_base = um
  modified_base 20..21: mod_base = OTHER; note = S-phosphorothioate
  modified_base 21: mod_base = um
  modified_base 21..22: mod_base = OTHER; note = S-phosphorothioate
  modified_base 22: mod_base = cm
  modified_base 22..23: mod_base = OTHER; note = S-phosphorothioate
  modified_base 23: mod_base = OTHER; note = 2-fluororibose uracil
  modified_base 23..24: mod_base = OTHER; note = S-phosphorothioate
  modified_base 24: mod_base = OTHER; note = (6S)-2,4-disubstituted-6-[(substituted oxy)methyl]morpholine thymine
  modified_base 24..25: mod_base = OTHER; note = N-(1,3-dimethylimidazolidin-2-ylidene)phosphoramidate
  modified_base 25: mod_base = OTHER; note = deoxyribose inosine
  modified_base 25..26: mod_base = OTHER; note S-N-(1,3-dimethylimidazolidin-2-ylidene)phosphoramidate
  modified_base 26: mod_base = um
  modified_base 26..27: mod_base = OTHER; note = S-phosphorothioate
  modified_base 27: mod_base = cm
  modified_base 27..28: mod_base = OTHER; note = S-phosphorothioate
  modified_base 28: mod_base = gm
  modified_base 28..29: mod_base = OTHER; note = S-phosphorothioate
  modified_base 29: mod_base = OTHER; note = 2-O-methylribose adenine
  modified_base 29..30: mod_base = OTHER; note R-N-(1,3-dimethylimidazolidin-2-ylidene)phosphoramidate
  modified_base 30: mod_base = um
  source 1..30: mol_type = other RNA

SEQ ID NO: 384 - RNA, 30 nt, synthetic construct; identical to SEQ ID NO: 80
  misc_feature 1..30: note = Synthetic: WV-44281
  misc_feature 1..30: note = Synthetic: ADR-0103603
  modified_base 1: mod_base = OTHER; note = 2-fluororibose cytosine
  modified_base 1..2: mod_base = OTHER; note R-N-(1,3-dimethylimidazolidin-2-ylidene)phosphoramidate
  modified_base 2: mod_base = OTHER; note = 2-fluororibose cytosine
  modified_base 2..3: mod_base = OTHER; note = S-phosphorothioate
  modified_base 3: mod_base = OTHER; note = 2-fluororibose cytosine
  modified_base 3..4: mod_base = OTHER; note = S-phosphorothioate
  modified_base 4: mod_base = OTHER; note = 2-fluororibose adenine
  modified_base 4..5: mod_base = OTHER; note = S-phosphorothioate
  modified_base 5: mod_base = OTHER; note = 2-fluororibose guanine
  modified_base 5..6: mod_base = OTHER; note = S-phosphorothioate
  modified_base 6: mod_base = OTHER; note = 2-fluororibose cytosine
  modified_base 6..7: mod_base = OTHER; note = S-phosphorothioate
  modified_base 7: mod_base = OTHER; note = 2-fluororibose adenine
  modified_base 7..8: mod_base = OTHER; note = S-phosphorothioate
  modified_base 8: mod_base = OTHER; note = 2-fluororibose guanine
  modified_base 8..9: mod_base = OTHER; note = S-phosphorothioate
  modified_base 9: mod_base = OTHER; note = 2-fluororibose cytosine
  modified_base 9..10: mod_base = OTHER; note = S-phosphorothioate
  modified_base 10: mod_base = OTHER; note = 2-fluororibose uracil
  modified_base 10..11: mod_base = OTHER; note = S-phosphorothioate
  modified_base 11: mod_base = OTHER; note = 2-fluororibose uracil
  modified_base 11..12: mod_base = OTHER; note = S-phosphorothioate
  modified_base 12: mod_base = OTHER; note = 2-fluororibose cytosine
  modified_base 12..13: mod_base = OTHER; note = S-phosphorothioate
  modified_base 13: mod_base = OTHER; note = 2-fluororibose adenine
  modified_base 13..14: mod_base = OTHER; note = S-phosphorothioate
  modified_base 14: mod_base = OTHER; note = 2-fluororibose guanine
  modified_base 14..15: mod_base = OTHER; note = S-phosphorothioate
  modified_base 15: mod_base = OTHER; note = 2-fluororibose uracil
  modified_base 15..16: mod_base = OTHER; note = S-phosphorothioate
  modified_base 16: mod_base = cm
  modified_base 16..17: mod_base = OTHER; note = S-phosphorothioate
  modified_base 17: mod_base = cm
  modified_base 17..18: mod_base = OTHER; note = S-phosphorothioate
  modified_base 18: mod_base = cm
  modified_base 18..19: mod_base = OTHER; note = S-phosphorothioate
  modified_base 19: mod_base = um
  modified_base 19..20: mod_base = OTHER; note = S-phosphorothioate
  modified_base 20: mod_base = um
  modified_base 20..21: mod_base = OTHER; note = S-phosphorothioate
  modified_base 21: mod_base = um
  modified_base 21..22: mod_base = OTHER; note = S-phosphorothioate
  modified_base 22: mod_base = cm
  modified_base 22..23: mod_base = OTHER; note = S-phosphorothioate
  modified_base 23: mod_base = OTHER; note = 2-fluororibose uracil
  modified_base 23..24: mod_base = OTHER; note = S-phosphorothioate
  modified_base 24: mod_base = OTHER; note = deoxyribose cytosine
  modified_base 24..25: mod_base = OTHER; note = S-phosphorothioate
  modified_base 25: mod_base = OTHER; note = (6S)-2,4-disubstituted-6-[(substituted oxy)methyl]morpholine guanine
  modified_base 25..26: mod_base = OTHER; note = N-(1,3-dimethylimidazolidin-2-ylidene)phosphoramidate
  modified_base 26: mod_base = um
  modified_base 26..27: mod_base = OTHER; note = S-phosphorothioate
  modified_base 27: mod_base = cm
  modified_base 27..28: mod_base = OTHER; note = S-phosphorothioate
  modified_base 28: mod_base = gm
  modified_base 28..29: mod_base = OTHER; note = S-phosphorothioate
  modified_base 29: mod_base = OTHER; note = 2-O-methylribose adenine
  modified_base 29..30: mod_base = OTHER; note R-N-(1,3-dimethylimidazolidin-2-ylidene)phosphoramidate
  modified_base 30: mod_base = um
  source 1..30: mol_type = other RNA

SEQ ID NO: 385 - RNA, 30 nt, synthetic construct; identical to SEQ ID NO: 80
  misc_feature 1..30: note = Synthetic: WV-44282
  misc_feature 1..30: note = Synthetic: ADR-0103639
  modified_base 1: mod_base = OTHER; note = 2-fluororibose cytosine
  modified_base 1..2: mod_base = OTHER; note R-N-(1,3-dimethylimidazolidin-2-ylidene)phosphoramidate
  modified_base 2: mod_base = OTHER; note = 2-fluororibose cytosine
  modified_base 2..3: mod_base = OTHER; note = S-phosphorothioate
  modified_base 3: mod_base = OTHER; note = 2-fluororibose cytosine
  modified_base 3..4: mod_base = OTHER; note = S-phosphorothioate
  modified_base 4: mod_base = OTHER; note = 2-fluororibose adenine
  modified_base 4..5: mod_base = OTHER; note = S-phosphorothioate
  modified_base 5: mod_base = OTHER; note = 2-fluororibose guanine
  modified_base 5..6: mod_base = OTHER; note = S-phosphorothioate
  modified_base 6: mod_base = OTHER; note = 2-fluororibose cytosine
  modified_base 6..7: mod_base = OTHER; note = S-phosphorothioate
  modified_base 7: mod_base = OTHER; note = 2-fluororibose adenine
  modified_base 7..8: mod_base = OTHER; note = S-phosphorothioate
  modified_base 8: mod_base = OTHER; note = 2-fluororibose guanine
  modified_base 8..9: mod_base = OTHER; note = S-phosphorothioate
  modified_base 9: mod_base = OTHER; note = 2-fluororibose cytosine
  modified_base 9..10: mod_base = OTHER; note = S-phosphorothioate
  modified_base 10: mod_base = OTHER; note = 2-fluororibose uracil
  modified_base 10..11: mod_base = OTHER; note = S-phosphorothioate
  modified_base 11: mod_base = OTHER; note = 2-fluororibose uracil
  modified_base 11..12: mod_base = OTHER; note = S-phosphorothioate
  modified_base 12: mod_base = OTHER; note = 2-fluororibose cytosine
  modified_base 12..13: mod_base = OTHER; note = S-phosphorothioate
  modified_base 13: mod_base = OTHER; note = 2-fluororibose adenine
  modified_base 13..14: mod_base = OTHER; note = S-phosphorothioate
  modified_base 14: mod_base = OTHER; note = 2-fluororibose guanine
  modified_base 14..15: mod_base = OTHER; note = S-phosphorothioate
  modified_base 15: mod_base = OTHER; note = 2-fluororibose uracil
  modified_base 15..16: mod_base = OTHER; note = S-phosphorothioate
  modified_base 16: mod_base = cm
  modified_base 16..17: mod_base = OTHER; note = S-phosphorothioate
  modified_base 17: mod_base = cm
  modified_base 17..18: mod_base = OTHER; note = S-phosphorothioate
  modified_base 18: mod_base = cm
  modified_base 18..19: mod_base = OTHER; note = S-phosphorothioate
  modified_base 19: mod_base = um
  modified_base 19..20: mod_base = OTHER; note = S-phosphorothioate
  modified_base 20: mod_base = um
  modified_base 20..21: mod_base = OTHER; note = S-phosphorothioate
  modified_base 21: mod_base = um
  modified_base 21..22: mod_base = OTHER; note = S-phosphorothioate
  modified_base 22: mod_base = cm
  modified_base 22..23: mod_base = OTHER; note = S-phosphorothioate
  modified_base 23: mod_base = OTHER; note = (6S)-2,4-disubstituted-6-[(substituted oxy)methyl]morpholine thymine
  modified_base 23..24: mod_base = OTHER; note = ketone
  modified_base 24: mod_base = OTHER; note = deoxyribose cytosine
  modified_base 24..25: mod_base = OTHER; note = S-phosphorothioate
  modified_base 25: mod_base = OTHER; note = deoxyribose inosine
  modified_base 25..26: mod_base = OTHER; note S-N-(1,3-dimethylimidazolidin-2-ylidene)phosphoramidate
  modified_base 26: mod_base = um
  modified_base 26..27: mod_base = OTHER; note = S-phosphorothioate
  modified_base 27: mod_base = cm
  modified_base 27..28: mod_base = OTHER; note = S-phosphorothioate
  modified_base 28: mod_base = gm
  modified_base 28..29: mod_base = OTHER; note = S-phosphorothioate
  modified_base 29: mod_base = OTHER; note = 2-O-methylribose adenine
  modified_base 29..30: mod_base = OTHER; note R-N-(1,3-dimethylimidazolidin-2-ylidene)phosphoramidate
  modified_base 30: mod_base = um
  source 1..30: mol_type = other RNA

SEQ ID NO: 386 - RNA, 30 nt, synthetic construct; identical to SEQ ID NO: 80
  misc_feature 1..30: note = Synthetic: WV-44283
  misc_feature 1..30: note = Synthetic: ADR-0103599
  modified_base 1: mod_base = OTHER; note = 2-fluororibose cytosine
  modified_base 1..2: mod_base = OTHER; note R-N-(1,3-dimethylimidazolidin-2-ylidene)phosphoramidate
  modified_base 2: mod_base = OTHER; note = 2-fluororibose cytosine
  modified_base 2..3: mod_base = OTHER; note = S-phosphorothioate
  modified_base 3: mod_base = OTHER; note = 2-fluororibose cytosine
  modified_base 3..4: mod_base = OTHER; note = S-phosphorothioate
  modified_base 4: mod_base = OTHER; note = 2-fluororibose adenine
  modified_base 4..5: mod_base = OTHER; note = S-phosphorothioate
  modified_base 5: mod_base = OTHER; note = 2-fluororibose guanine
  modified_base 5..6: mod_base = OTHER; note = S-phosphorothioate
  modified_base 6: mod_base = OTHER; note = 2-fluororibose cytosine
  modified_base 6..7: mod_base = OTHER; note = S-phosphorothioate
  modified_base 7: mod_base = OTHER; note = 2-fluororibose adenine
  modified_base 7..8: mod_base = OTHER; note = S-phosphorothioate
  modified_base 8: mod_base = OTHER; note = 2-fluororibose guanine
  modified_base 8..9: mod_base = OTHER; note = S-phosphorothioate
  modified_base 9: mod_base = OTHER; note = 2-fluororibose cytosine
  modified_base 9..10: mod_base = OTHER; note = S-phosphorothioate
  modified_base 10: mod_base = OTHER; note = 2-fluororibose uracil
  modified_base 10..11: mod_base = OTHER; note = S-phosphorothioate
  modified_base 11: mod_base = OTHER; note = 2-fluororibose uracil
  modified_base 11..12: mod_base = OTHER; note = S-phosphorothioate
  modified_base 12: mod_base = OTHER; note = 2-fluororibose cytosine
  modified_base 12..13: mod_base = OTHER; note = S-phosphorothioate
  modified_base 13: mod_base = OTHER; note = 2-fluororibose adenine
  modified_base 13..14: mod_base = OTHER; note = S-phosphorothioate
  modified_base 14: mod_base = OTHER; note = 2-fluororibose guanine
  modified_base 14..15: mod_base = OTHER; note = S-phosphorothioate
  modified_base 15: mod_base = OTHER; note = 2-fluororibose uracil
  modified_base 15..16: mod_base = OTHER; note = S-phosphorothioate
  modified_base 16: mod_base = cm
  modified_base 16..17: mod_base = OTHER; note = S-phosphorothioate
  modified_base 17: mod_base = cm
  modified_base 17..18: mod_base = OTHER; note = S-phosphorothioate
  modified_base 18: mod_base = cm
  modified_base 18..19: mod_base = OTHER; note = S-phosphorothioate
  modified_base 19: mod_base = um
  modified_base 19..20: mod_base = OTHER; note = S-phosphorothioate
  modified_base 20: mod_base = um
  modified_base 20..21: mod_base = OTHER; note = S-phosphorothioate
  modified_base 21: mod_base = um
  modified_base 21..22: mod_base = OTHER; note = S-phosphorothioate
  modified_base 22: mod_base = cm
  modified_base 22..23: mod_base = OTHER; note = S-phosphorothioate
  modified_base 23: mod_base = OTHER; note = 2-fluororibose uracil
  modified_base 23..24: mod_base = OTHER; note = S-phosphorothioate
  modified_base 24: mod_base = OTHER; note = (6S)-2,4-disubstituted-6-[(substituted oxy)methyl]morpholine cytosine
  modified_base 24..25: mod_base = OTHER; note = ketone
  modified_base 25: mod_base = OTHER; note = deoxyribose inosine
  modified_base 25..26: mod_base = OTHER; note S-N-(1,3-dimethylimidazolidin-2-ylidene)phosphoramidate
  modified_base 26: mod_base = um
  modified_base 26..27: mod_base = OTHER; note = S-phosphorothioate
  modified_base 27: mod_base = cm
  modified_base 27..28: mod_base = OTHER; note = S-phosphorothioate
  modified_base 28: mod_base = gm
  modified_base 28..29: mod_base = OTHER; note = S-phosphorothioate
  modified_base 29: mod_base = OTHER; note = 2-O-methylribose adenine
  modified_base 29..30: mod_base = OTHER; note R-N-(1,3-dimethylimidazolidin-2-ylidene)phosphoramidate
  modified_base 30: mod_base = um
  source 1..30: mol_type = other RNA

SEQ ID NO: 387 - RNA, 30 nt, synthetic construct; identical to SEQ ID NO: 80
  misc_feature 1..30: note = Synthetic: WV-44284
  misc_feature 1..30: note = Synthetic: ADR-0103604
  modified_base 1: mod_base = OTHER; note = 2-fluororibose cytosine
  modified_base 1..2: mod_base = OTHER; note R-N-(1,3-dimethylimidazolidin-2-ylidene)phosphoramidate
  modified_base 2: mod_base = OTHER; note = 2-fluororibose cytosine
  modified_base 2..3: mod_base = OTHER; note = S-phosphorothioate
  modified_base 3: mod_base = OTHER; note = 2-fluororibose cytosine
  modified_base 3..4: mod_base = OTHER; note = S-phosphorothioate
  modified_base 4: mod_base = OTHER; note = 2-fluororibose adenine
  modified_base 4..5: mod_base = OTHER; note = S-phosphorothioate
  modified_base 5: mod_base = OTHER; note = 2-fluororibose guanine
  modified_base 5..6: mod_base = OTHER; note = S-phosphorothioate
  modified_base 6: mod_base = OTHER; note = 2-fluororibose cytosine
  modified_base 6..7: mod_base = OTHER; note = S-phosphorothioate
  modified_base 7: mod_base = OTHER; note = 2-fluororibose adenine
  modified_base 7..8: mod_base = OTHER; note = S-phosphorothioate
  modified_base 8: mod_base = OTHER; note = 2-fluororibose guanine
  modified_base 8..9: mod_base = OTHER; note = S-phosphorothioate
  modified_base 9: mod_base = OTHER; note = 2-fluororibose cytosine
  modified_base 9..10: mod_base = OTHER; note = S-phosphorothioate
  modified_base 10: mod_base = OTHER; note = 2-fluororibose uracil
  modified_base 10..11: mod_base = OTHER; note = S-phosphorothioate
  modified_base 11: mod_base = OTHER; note = 2-fluororibose uracil
  modified_base 11..12: mod_base = OTHER; note = S-phosphorothioate
  modified_base 12: mod_base = OTHER; note = 2-fluororibose cytosine
  modified_base 12..13: mod_base = OTHER; note = S-phosphorothioate
  modified_base 13: mod_base = OTHER; note = 2-fluororibose adenine
  modified_base 13..14: mod_base = OTHER; note = S-phosphorothioate
  modified_base 14: mod_base = OTHER; note = 2-fluororibose guanine
  modified_base 14..15: mod_base = OTHER; note = S-phosphorothioate
  modified_base 15: mod_base = OTHER; note = 2-fluororibose uracil
  modified_base 15..16: mod_base = OTHER; note = S-phosphorothioate
  modified_base 16: mod_base = cm
  modified_base 16..17: mod_base = OTHER; note = S-phosphorothioate
  modified_base 17: mod_base = cm
  modified_base 17..18: mod_base = OTHER; note = S-phosphorothioate
  modified_base 18: mod_base = cm
  modified_base 18..19: mod_base = OTHER; note = S-phosphorothioate
  modified_base 19: mod_base = um
  modified_base 19..20: mod_base = OTHER; note = S-phosphorothioate
  modified_base 20: mod_base = um
  modified_base 20..21: mod_base = OTHER; note = S-phosphorothioate
  modified_base 21: mod_base = um
  modified_base 21..22: mod_base = OTHER; note = S-phosphorothioate
  modified_base 22: mod_base = cm
  modified_base 22..23: mod_base = OTHER; note = S-phosphorothioate
  modified_base 23: mod_base = OTHER; note = 2-fluororibose uracil
  modified_base 23..24: mod_base = OTHER; note = S-phosphorothioate
  modified_base 24: mod_base = OTHER; note = deoxyribose cytosine
  modified_base 24..25: mod_base = OTHER; note = S-phosphorothioate
  modified_base 25: mod_base = OTHER; note = (6S)-2,4-disubstituted-6-[(substituted oxy)methyl]morpholine guanine
  modified_base 25..26: mod_base = OTHER; note = ketone
  modified_base 26: mod_base = um
  modified_base 26..27: mod_base = OTHER; note = S-phosphorothioate
  modified_base 27: mod_base = cm
  modified_base 27..28: mod_base = OTHER; note = S-phosphorothioate
  modified_base 28: mod_base = gm
  modified_base 28..29: mod_base = OTHER; note = S-phosphorothioate
  modified_base 29: mod_base = OTHER; note = 2-O-methylribose adenine
  modified_base 29..30: mod_base = OTHER; note R-N-(1,3-dimethylimidazolidin-2-ylidene)phosphoramidate
  modified_base 30: mod_base = um
  source 1..30: mol_type = other RNA

SEQ ID NO: 388 - RNA, 30 nt, synthetic construct; identical to SEQ ID NO: 80
  misc_feature 1..30: note = Synthetic: WV-44328
  misc_feature 1..30: note = Synthetic: ADR-0103641
  modified_base 1: mod_base = OTHER; note = 2-fluororibose cytosine
  modified_base 1..2: mod_base = OTHER; note R-N-(1,3-dimethylimidazolidin-2-ylidene)phosphoramidate
  modified_base 2: mod_base = OTHER; note = 2-fluororibose cytosine
  modified_base 2..3: mod_base = OTHER; note = S-phosphorothioate
  modified_base 3: mod_base = OTHER; note = 2-fluororibose cytosine
  modified_base 3..4: mod_base = OTHER; note = S-phosphorothioate
  modified_base 4: mod_base = OTHER; note = 2-fluororibose adenine
  modified_base 4..5: mod_base = OTHER; note = S-phosphorothioate
  modified_base 5: mod_base = OTHER; note = 2-fluororibose guanine
  modified_base 5..6: mod_base = OTHER; note = S-phosphorothioate
  modified_base 6: mod_base = OTHER; note = 2-fluororibose cytosine
  modified_base 6..7: mod_base = OTHER; note = S-phosphorothioate
  modified_base 7: mod_base = OTHER; note = 2-fluororibose adenine
  modified_base 7..8: mod_base = OTHER; note = S-phosphorothioate
  modified_base 8: mod_base = OTHER; note = 2-fluororibose guanine
  modified_base 8..9: mod_base = OTHER; note = S-phosphorothioate
  modified_base 9: mod_base = OTHER; note = 2-fluororibose cytosine
  modified_base 9..10: mod_base = OTHER; note = S-phosphorothioate
  modified_base 10: mod_base = OTHER; note = 2-fluororibose uracil
  modified_base 10..11: mod_base = OTHER; note = S-phosphorothioate
  modified_base 11: mod_base = OTHER; note = 2-fluororibose uracil
  modified_base 11..12: mod_base = OTHER; note = S-phosphorothioate
  modified_base 12: mod_base = OTHER; note = 2-fluororibose cytosine
  modified_base 12..13: mod_base = OTHER; note = S-phosphorothioate
  modified_base 13: mod_base = OTHER; note = 2-fluororibose adenine
  modified_base 13..14: mod_base = OTHER; note = S-phosphorothioate
  modified_base 14: mod_base = OTHER; note = 2-fluororibose guanine
  modified_base 14..15: mod_base = OTHER; note = S-phosphorothioate
  modified_base 15: mod_base = OTHER; note = 2-fluororibose uracil
  modified_base 15..16: mod_base = OTHER; note = S-phosphorothioate
  modified_base 16: mod_base = cm
  modified_base 16..17: mod_base = OTHER; note = S-phosphorothioate
  modified_base 17: mod_base = cm
  modified_base 17..18: mod_base = OTHER; note = S-phosphorothioate
  modified_base 18: mod_base = cm
  modified_base 18..19: mod_base = OTHER; note = S-phosphorothioate
  modified_base 19: mod_base = um
  modified_base 19..20: mod_base = OTHER; note = S-phosphorothioate
  modified_base 20: mod_base = um
  modified_base 20..21: mod_base = OTHER; note = S-phosphorothioate
  modified_base 21: mod_base = um
  modified_base 21..22: mod_base = OTHER; note = S-phosphorothioate
  modified_base 22: mod_base = cm
  modified_base 22..23: mod_base = OTHER; note = S-phosphorothioate
  modified_base 23: mod_base = OTHER; note = morpholino (acyclic) thymine
  modified_base 23..24: mod_base = OTHER; note = N-(1,3-dimethylimidazolidin-2-ylidene)phosphoramidate
  modified_base 24: mod_base = OTHER; note = deoxyribose cytosine
  modified_base 24..25: mod_base = OTHER; note = S-phosphorothioate
  modified_base 25: mod_base = OTHER; note = deoxyribose inosine
  modified_base 25..26: mod_base = OTHER; note S-N-(1,3-dimethylimidazolidin-2-ylidene)phosphoramidate
  modified_base 26: mod_base = um
  modified_base 26..27: mod_base = OTHER; note = S-phosphorothioate
  modified_base 27: mod_base = cm
  modified_base 27..28: mod_base = OTHER; note = S-phosphorothioate
  modified_base 28: mod_base = gm
  modified_base 28..29: mod_base = OTHER; note = S-phosphorothioate
  modified_base 29: mod_base = OTHER; note = 2-O-methylribose adenine
  modified_base 29..30: mod_base = OTHER; note R-N-(1,3-dimethylimidazolidin-2-ylidene)phosphoramidate
  modified_base 30: mod_base = um
  source 1..30: mol_type = other RNA

SEQ ID NO: 389 - RNA, 30 nt, synthetic construct; identical to SEQ ID NO: 134
  misc_feature 1..30: note = Synthetic: WV-44466
  misc_feature 1..30: note = Synthetic: ADR-0100531
  modified_base 1: mod_base = OTHER; note = 6-aminohexanol linked by phosphate to the 5' end of 2-O-methylribose cytosine
  modified_base 1..2: mod_base = OTHER; note R-N-(1,3-dimethylimidazolidin-2-ylidene)phosphoramidate
  modified_base 2: mod_base = cm
  modified_base 2..3: mod_base = OTHER; note = S-phosphorothioate
  modified_base 3: mod_base = cm
  modified_base 3..4: mod_base = OTHER; note = S-phosphorothioate
  modified_base 4: mod_base = OTHER; note = 2-fluororibose adenine
  modified_base 4..5: mod_base = OTHER; note = S-phosphorothioate
  modified_base 5: mod_base = OTHER; note = 2-fluororibose guanine
  modified_base 5..6: mod_base = OTHER; note = S-phosphorothioate
  modified_base 6: mod_base = cm
  modified_base 7: mod_base = OTHER; note = 2-fluororibose adenine
  modified_base 7..8: mod_base = OTHER; note = S-phosphorothioate
  modified_base 8: mod_base = OTHER; note = 2-fluororibose guanine
  modified_base 8..9: mod_base = OTHER; note = S-phosphorothioate
  modified_base 9: mod_base = OTHER; note = 2-fluororibose cytosine
  modified_base 9..10: mod_base = OTHER; note = S-phosphorothioate
  modified_base 10: mod_base = OTHER; note = 2-fluororibose uracil
  modified_base 10..11: mod_base = OTHER; note = S-phosphorothioate
  modified_base 11: mod_base = OTHER; note = 2-fluororibose uracil
  modified_base 11..12: mod_base = OTHER; note R-N-(1,3-dimethylimidazolidin-2-ylidene)phosphoramidate
  modified_base 12: mod_base = OTHER; note = 2-fluororibose cytosine
  modified_base 12..13: mod_base = OTHER; note = S-phosphorothioate
  modified_base 13: mod_base = OTHER; note = 2-fluororibose adenine
  modified_base 14: mod_base = OTHER; note = 2-fluororibose guanine
  modified_base 14..15: mod_base = OTHER; note R-N-(1,3-dimethylimidazolidin-2-ylidene)phosphoramidate
  modified_base 15: mod_base = OTHER; note = 2-fluororibose uracil
  modified_base 15..16: mod_base = OTHER; note = S-phosphorothioate
  modified_base 16: mod_base = OTHER; note = 2-fluororibose cytosine
  modified_base 16..17: mod_base = OTHER; note = S-phosphorothioate
  modified_base 17: mod_base = OTHER; note = 2-fluororibose cytosine
  modified_base 17..18: mod_base = OTHER; note = S-phosphorothioate
  modified_base 18: mod_base = OTHER; note = 2-fluororibose cytosine
  modified_base 18..19: mod_base = OTHER; note = S-phosphorothioate
  modified_base 19: mod_base = OTHER; note = 2-fluororibose uracil
  modified_base 19..20: mod_base = OTHER; note = S-phosphorothioate
  modified_base 20: mod_base = um
  modified_base 21: mod_base = OTHER; note = 2-fluororibose uracil
  modified_base 21..22: mod_base = OTHER; note = S-phosphorothioate
  modified_base 22: mod_base = OTHER; note = 2-fluororibose cytosine
  modified_base 22..23: mod_base = OTHER; note = S-phosphorothioate
  modified_base 23: mod_base = OTHER; note = 2-fluororibose uracil
  modified_base 23..24: mod_base = OTHER; note = S-phosphorothioate
  modified_base 24: mod_base = OTHER; note = deoxyribose 6-amino-9-substituted 8,9-dihydro-7H-purin-8-one
  modified_base 24..25: mod_base = OTHER; note = S-phosphorothioate
  modified_base 25: mod_base = OTHER; note = deoxyribose inosine
  modified_base 25..26: mod_base = OTHER; note S-N-(1,3-dimethylimidazolidin-2-ylidene)phosphoramidate
  modified_base 26: mod_base = um
  modified_base 27: mod_base = OTHER; note = 2-fluororibose cytosine
  modified_base 27..28: mod_base = OTHER; note = S-phosphorothioate
  modified_base 28: mod_base = gm
  modified_base 28..29: mod_base = OTHER; note = S-phosphorothioate
  modified_base 29: mod_base = OTHER; note = 2-O-methylribose adenine
  modified_base 29..30: mod_base = OTHER; note R-N-(1,3-dimethylimidazolidin-2-ylidene)phosphoramidate
  modified_base 30: mod_base = um
  source 1..30: mol_type = other RNA

SEQ ID NO: 390 - RNA, 30 nt, synthetic construct; identical to SEQ ID NO: 273
  misc_feature 1..30: note = Synthetic: WV-44515
  misc_feature 1..30: note = Synthetic: ADR-0104180
  modified_base 1: mod_base = cm
  modified_base 1..2: mod_base = OTHER; note R-N-(1,3-dimethylimidazolidin-2-ylidene)phosphoramidate
  modified_base 2: mod_base = cm
  modified_base 2..3: mod_base = OTHER; note = S-phosphorothioate
  modified_base 3: mod_base = cm
  modified_base 3..4: mod_base = OTHER; note = S-phosphorothioate
  modified_base 4: mod_base = OTHER; note = 2-fluororibose adenine
  modified_base 4..5: mod_base = OTHER; note = S-phosphorothioate
  modified_base 5: mod_base = OTHER; note = 2-fluororibose guanine
  modified_base 5..6: mod_base = OTHER; note = S-phosphorothioate
  modified_base 6: mod_base = cm
  modified_base 7: mod_base = OTHER; note = 2-O-methylribose adenine
  modified_base 7..8: mod_base = OTHER; note = S-phosphorothioate
  modified_base 8: mod_base = OTHER; note = 2-fluororibose guanine
  modified_base 8..9: mod_base = OTHER; note = S-phosphorothioate
  modified_base 9: mod_base = OTHER; note = 2-fluororibose cytosine
  modified_base 10: mod_base = um
  modified_base 10..11: mod_base = OTHER; note = S-phosphorothioate
  modified_base 11: mod_base = OTHER; note = 2-fluororibose uracil
  modified_base 11..12: mod_base = OTHER; note R-N-(1,3-dimethylimidazolidin-2-ylidene)phosphoramidate
  modified_base 12: mod_base = cm
  modified_base 13: mod_base = OTHER; note = 2-fluororibose adenine
  modified_base 13..14: mod_base = OTHER; note = S-phosphorothioate
  modified_base 14: mod_base = OTHER; note = 2-fluororibose guanine
  modified_base 14..15: mod_base = OTHER; note R-N-(1,3-dimethylimidazolidin-2-ylidene)phosphoramidate
  modified_base 15: mod_base = OTHER; note = 2-fluororibose uracil
  modified_base 16: mod_base = cm
  modified_base 16..17: mod_base = OTHER; note = S-phosphorothioate
  modified_base 17: mod_base = OTHER; note = 2-fluororibose cytosine
  modified_base 17..18: mod_base = OTHER; note = S-phosphorothioate
  modified_base 18: mod_base = OTHER; note = 2-fluororibose cytosine
  modified_base 18..19: mod_base = OTHER; note = S-phosphorothioate
  modified_base 19: mod_base = OTHER; note = 2-fluororibose uracil
  modified_base 19..20: mod_base = OTHER; note = S-phosphorothioate
  modified_base 20: mod_base = um
  modified_base 21: mod_base = um
  modified_base 22: mod_base = OTHER; note = 2-fluororibose cytosine
  modified_base 22..23: mod_base = OTHER; note = S-phosphorothioate
  modified_base 23: mod_base = OTHER; note = deoxyribose thymine
  modified_base 23..24: mod_base = OTHER; note = S-phosphorothioate
  modified_base 24: mod_base = OTHER; note = deoxyribose uracil (position 3 connectivity)
  modified_base 24..25: mod_base = OTHER; note = S-phosphorothioate
  modified_base 25: mod_base = OTHER; note = deoxyribose inosine
  modified_base 25..26: mod_base = OTHER; note S-N-(1,3-dimethylimidazolidin-2-ylidene)phosphoramidate
  modified_base 26: mod_base = um
  modified_base 27: mod_base = OTHER; note = 2-fluororibose cytosine
  modified_base 27..28: mod_base = OTHER; note = S-phosphorothioate
  modified_base 28: mod_base = gm
  modified_base 28..29: mod_base = OTHER; note = S-phosphorothioate
  modified_base 29: mod_base = OTHER; note = 2-O-methylribose adenine
  modified_base 29..30: mod_base = OTHER; note R-N-(1,3-dimethylimidazolidin-2-ylidene)phosphoramidate
  modified_base 30: mod_base = um
  source 1..30: mol_type = other RNA

SEQ ID NO: 391 - RNA, 30 nt, synthetic construct; identical to SEQ ID NO: 273
  misc_feature 1..30: note = Synthetic: WV-46313
  misc_feature 1..30: note = Synthetic: ADR-0100542
  modified_base 1: mod_base = OTHER; note = triantennary GalNAc with C12 linker linked to 6-aminohexanol linked by phosphate to the 5' end of 2-O-methylribose cytosine
  modified_base 1..2: mod_base = OTHER; note R-N-(1,3-dimethylimidazolidin-2-ylidene)phosphoramidate
  modified_base 2: mod_base = cm
  modified_base 2..3: mod_base = OTHER; note = S-phosphorothioate
  modified_base 3: mod_base = cm
  modified_base 3..4: mod_base = OTHER; note = S-phosphorothioate
  modified_base 4: mod_base = OTHER; note = 2-fluororibose adenine
  modified_base 4..5: mod_base = OTHER; note = S-phosphorothioate
  modified_base 5: mod_base = OTHER; note = 2-fluororibose guanine
  modified_base 5..6: mod_base = OTHER; note = S-phosphorothioate
  modified_base 6: mod_base = cm
  modified_base 7: mod_base = OTHER; note = 2-O-methylribose adenine
  modified_base 8: mod_base = OTHER; note = 2-fluororibose guanine
  modified_base 8..9: mod_base = OTHER; note = S-phosphorothioate
  modified_base 9: mod_base = OTHER; note = 2-fluororibose cytosine
  modified_base 9..10: mod_base = OTHER; note = S-phosphorothioate
  modified_base 10: mod_base = um
  modified_base 11: mod_base = OTHER; note = 2-fluororibose uracil
  modified_base 11..12: mod_base = OTHER; note R-N-(1,3-dimethylimidazolidin-2-ylidene)phosphoramidate
  modified_base 12: mod_base = cm
  modified_base 13: mod_base = OTHER; note = 2-fluororibose adenine
  modified_base 13..14: mod_base = OTHER; note = S-phosphorothioate
  modified_base 14: mod_base = OTHER; note = 2-fluororibose guanine
  modified_base 14..15: mod_base = OTHER; note R-N-(1,3-dimethylimidazolidin-2-ylidene)phosphoramidate
  modified_base 15: mod_base = OTHER; note = 2-fluororibose uracil
  modified_base 16: mod_base = cm
  modified_base 16..17: mod_base = OTHER; note = S-phosphorothioate
  modified_base 17: mod_base = OTHER; note = 2-fluororibose cytosine
  modified_base 17..18: mod_base = OTHER; note = S-phosphorothioate
  modified_base 18: mod_base = OTHER; note = 2-fluororibose cytosine
  modified_base 18..19: mod_base = OTHER; note = S-phosphorothioate
  modified_base 19: mod_base = OTHER; note = 2-fluororibose uracil
  modified_base 19..20: mod_base = OTHER; note R-N-(1,3-dimethylimidazolidin-2-ylidene)phosphoramidate
  modified_base 20: mod_base = um
  modified_base 21: mod_base = um
  modified_base 22: mod_base = OTHER; note = 2-fluororibose cytosine
  modified_base 22..23: mod_base = OTHER; note = S-phosphorothioate
  modified_base 23: mod_base = OTHER; note = deoxyribose thymine
  modified_base 23..24: mod_base = OTHER; note = S-phosphorothioate
  modified_base 24: mod_base = OTHER; note = deoxyribose uracil (position 3 connectivity)
  modified_base 24..25: mod_base = OTHER; note = S-phosphorothioate
  modified_base 25: mod_base = OTHER; note = deoxyribose inosine
  modified_base 25..26: mod_base = OTHER; note S-N-(1,3-dimethylimidazolidin-2-ylidene)phosphoramidate
  modified_base 26: mod_base = um
  modified_base 27: mod_base = OTHER; note = 2-fluororibose cytosine
  modified_base 27..28: mod_base = OTHER; note = S-phosphorothioate
  modified_base 28: mod_base = gm
  modified_base 28..29: mod_base = OTHER; note = S-phosphorothioate
  modified_base 29: mod_base = OTHER; note = 2-O-methylribose adenine
  modified_base 29..30: mod_base = OTHER; note R-N-(1,3-dimethylimidazolidin-2-ylidene)phosphoramidate
  modified_base 30: mod_base = um
  source 1..30: mol_type = other RNA

SEQ ID NO: 392 - RNA, 30 nt, synthetic construct; identical to SEQ ID NO: 273
  misc_feature 1..30: note = Synthetic: WV-46314
  misc_feature 1..30: note = Synthetic: ADR-0100543
  modified_base 1: mod_base = OTHER; note = triantennary GalNAc with C12 linker linked to 6-aminohexanol linked by phosphate to the 5' end of 2-O-methylribose cytosine
  modified_base 1..2: mod_base = OTHER; note R-N-(1,3-dimethylimidazolidin-2-ylidene)phosphoramidate
  modified_base 2: mod_base = cm
  modified_base 2..3: mod_base = OTHER; note = S-phosphorothioate
  modified_base 3: mod_base = cm
  modified_base 3..4: mod_base = OTHER; note = S-phosphorothioate
  modified_base 4: mod_base = OTHER; note = 2-fluororibose adenine
  modified_base 4..5: mod_base = OTHER; note = S-phosphorothioate
  modified_base 5: mod_base = OTHER; note = 2-fluororibose guanine
  modified_base 5..6: mod_base = OTHER; note = S-phosphorothioate
  modified_base 6: mod_base = cm
  modified_base 7: mod_base = OTHER; note = 2-O-methylribose adenine
  modified_base 7..8: mod_base = OTHER; note = S-phosphorothioate
  modified_base 8: mod_base = OTHER; note = 2-fluororibose guanine
  modified_base 8..9: mod_base = OTHER; note = S-phosphorothioate
  modified_base 9: mod_base = OTHER; note = 2-fluororibose cytosine
  modified_base 10: mod_base = um
  modified_base 10..11: mod_base = OTHER; note = S-phosphorothioate
  modified_base 11: mod_base = OTHER; note = 2-fluororibose uracil
  modified_base 11..12: mod_base = OTHER; note R-N-(1,3-dimethylimidazolidin-2-ylidene)phosphoramidate
  modified_base 12: mod_base = cm
  modified_base 13: mod_base = OTHER; note = 2-fluororibose adenine
  modified_base 13..14: mod_base = OTHER; note = S-phosphorothioate
  modified_base 14: mod_base = OTHER; note = 2-fluororibose guanine
  modified_base 14..15: mod_base = OTHER; note R-N-(1,3-dimethylimidazolidin-2-ylidene)phosphoramidate
  modified_base 15: mod_base = OTHER; note = 2-fluororibose uracil
  modified_base 16: mod_base = cm
  modified_base 16..17: mod_base = OTHER; note = S-phosphorothioate
  modified_base 17: mod_base = OTHER; note = 2-fluororibose cytosine
  modified_base 17..18: mod_base = OTHER; note = S-phosphorothioate
  modified_base 18: mod_base = OTHER; note = 2-fluororibose cytosine
  modified_base 18..19: mod_base = OTHER; note = S-phosphorothioate
  modified_base 19: mod_base = OTHER; note = 2-fluororibose uracil
  modified_base 19..20: mod_base = OTHER; note R-N-(1,3-dimethylimidazolidin-2-ylidene)phosphoramidate
  modified_base 20: mod_base = um
  modified_base 20..21: mod_base = OTHER; note = S-phosphorothioate
  modified_base 21: mod_base = um
  modified_base 22: mod_base = OTHER; note = 2-fluororibose cytosine
  modified_base 22..23: mod_base = OTHER; note = S-phosphorothioate
  modified_base 23: mod_base = OTHER; note = deoxyribose thymine
  modified_base 23..24: mod_base = OTHER; note = S-phosphorothioate
  modified_base 24: mod_base = OTHER; note = deoxyribose uracil (position 3 connectivity)
  modified_base 24..25: mod_base = OTHER; note = S-phosphorothioate
  modified_base 25: mod_base = OTHER; note = deoxyribose inosine
  modified_base 25..26: mod_base = OTHER; note S-N-(1,3-dimethylimidazolidin-2-ylidene)phosphoramidate
  modified_base 26: mod_base = um
  modified_base 27: mod_base = OTHER; note = 2-fluororibose cytosine
  modified_base 27..28: mod_base = OTHER; note = S-phosphorothioate
  modified_base 28: mod_base = gm
  modified_base 28..29: mod_base = OTHER; note = S-phosphorothioate
  modified_base 29: mod_base = OTHER; note = 2-O-methylribose adenine
  modified_base 29..30: mod_base = OTHER; note R-N-(1,3-dimethylimidazolidin-2-ylidene)phosphoramidate
  modified_base 30: mod_base = um
  source 1..30: mol_type = other RNA

SEQ ID NO: 393 - RNA, 30 nt, synthetic construct; identical to SEQ ID NO: 273
  misc_feature 1..30: note = Synthetic: WV-46315
  misc_feature 1..30: note = Synthetic: ADR-0100544
  modified_base 1: mod_base = OTHER; note = triantennary GalNAc with C12 linker linked to 6-aminohexanol linked by phosphate to the 5' end of 2-O-methylribose cytosine
  modified_base 1..2: mod_base = OTHER; note R-N-(1,3-dimethylimidazolidin-2-ylidene)phosphoramidate
  modified_base 2: mod_base = cm
  modified_base 2..3: mod_base = OTHER; note = S-phosphorothioate
  modified_base 3: mod_base = cm
  modified_base 3..4: mod_base = OTHER; note = S-phosphorothioate
  modified_base 4: mod_base = OTHER; note = 2-fluororibose adenine
  modified_base 4..5: mod_base = OTHER; note = S-phosphorothioate
  modified_base 5: mod_base = OTHER; note = 2-fluororibose guanine
  modified_base 5..6: mod_base = OTHER; note = S-phosphorothioate
  modified_base 6: mod_base = cm
  modified_base 7: mod_base = OTHER; note = 2-O-methylribose adenine
  modified_base 8: mod_base = OTHER; note = 2-fluororibose guanine
  modified_base 8..9: mod_base = OTHER; note = S-phosphorothioate
  modified_base 9: mod_base = OTHER; note = 2-fluororibose cytosine
  modified_base 9..10: mod_base = OTHER; note = S-phosphorothioate
  modified_base 10: mod_base = OTHER; note = 2-fluororibose uracil
  modified_base 10..11: mod_base = OTHER; note = S-phosphorothioate
  modified_base 11: mod_base = OTHER; note = 2-fluororibose uracil
  modified_base 11..12: mod_base = OTHER; note R-N-(1,3-dimethylimidazolidin-2-ylidene)phosphoramidate
  modified_base 12: mod_base = OTHER; note = 2-fluororibose cytosine
  modified_base 12..13: mod_base = OTHER; note = S-phosphorothioate
  modified_base 13: mod_base = OTHER; note = 2-fluororibose adenine
  modified_base 14: mod_base = OTHER; note = 2-fluororibose guanine
  modified_base 14..15: mod_base = OTHER; note R-N-(1,3-dimethylimidazolidin-2-ylidene)phosphoramidate
  modified_base 15: mod_base = OTHER; note = 2-fluororibose uracil
  modified_base 16: mod_base = cm
  modified_base 17: mod_base = cm
  modified_base 17..18: mod_base = OTHER; note = S-phosphorothioate
  modified_base 18: mod_base = OTHER; note = 2-fluororibose cytosine
  modified_base 18..19: mod_base = OTHER; note = S-phosphorothioate
  modified_base 19: mod_base = OTHER; note = 2-fluororibose uracil
  modified_base 19..20: mod_base = OTHER; note = S-phosphorothioate
  modified_base 20: mod_base = um
  modified_base 21: mod_base = um
  modified_base 21..22: mod_base = OTHER; note = S-phosphorothioate
  modified_base 22: mod_base = OTHER; note = 2-fluororibose cytosine
  modified_base 22..23: mod_base = OTHER; note = S-phosphorothioate
  modified_base 23: mod_base = OTHER; note = deoxyribose thymine
  modified_base 23..24: mod_base = OTHER; note = S-phosphorothioate
  modified_base 24: mod_base = OTHER; note = deoxyribose uracil (position 3 connectivity)
  modified_base 24..25: mod_base = OTHER; note = S-phosphorothioate
  modified_base 25: mod_base = OTHER; note = deoxyribose inosine
  modified_base 25..26: mod_base = OTHER; note S-N-(1,3-dimethylimidazolidin-2-ylidene)phosphoramidate
  modified_base 26: mod_base = um
  modified_base 27: mod_base = OTHER; note = 2-fluororibose cytosine
  modified_base 27..28: mod_base = OTHER; note = S-phosphorothioate
  modified_base 28: mod_base = gm
  modified_base 28..29: mod_base = OTHER; note = S-phosphorothioate
  modified_base 29: mod_base = OTHER; note = 2-O-methylribose adenine
  modified_base 29..30: mod_base = OTHER; note R-N-(1,3-dimethylimidazolidin-2-ylidene)phosphoramidate
  modified_base 30: mod_base = um
  source 1..30: mol_type = other RNA

SEQ ID NO: 394 - RNA, 30 nt, synthetic construct; identical to SEQ ID NO: 273
  misc_feature 1..30: note = Synthetic: WV-46316
  misc_feature 1..30: note = Synthetic: ADR-0100545
  modified_base 1: mod_base = OTHER; note = triantennary GalNAc with C12 linker linked to 6-aminohexanol linked by phosphate to the 5' end of 2-O-methylribose cytosine
  modified_base 1..2: mod_base = OTHER; note R-N-(1,3-dimethylimidazolidin-2-ylidene)phosphoramidate
  modified_base 2: mod_base = cm
  modified_base 2..3: mod_base = OTHER; note = S-phosphorothioate
  modified_base 3: mod_base = cm
  modified_base 3..4: mod_base = OTHER; note = S-phosphorothioate
  modified_base 4: mod_base = OTHER; note = 2-fluororibose adenine
  modified_base 4..5: mod_base = OTHER; note = S-phosphorothioate
  modified_base 5: mod_base = OTHER; note = 2-fluororibose guanine
  modified_base 5..6: mod_base = OTHER; note = S-phosphorothioate
  modified_base 6: mod_base = cm
  modified_base 7: mod_base = OTHER; note = 2-O-methylribose adenine
  modified_base 8: mod_base = OTHER; note = 2-fluororibose guanine
  modified_base 8..9: mod_base = OTHER; note = S-phosphorothioate
  modified_base 9: mod_base = OTHER; note = 2-fluororibose cytosine
  modified_base 9..10: mod_base = OTHER; note = S-phosphorothioate
  modified_base 10: mod_base = OTHER; note = 2-fluororibose uracil
  modified_base 10..11: mod_base = OTHER; note = S-phosphorothioate
  modified_base 11: mod_base = OTHER; note = 2-fluororibose uracil
  modified_base 11..12: mod_base = OTHER; note R-N-(1,3-dimethylimidazolidin-2-ylidene)phosphoramidate
  modified_base 12: mod_base = OTHER; note = 2-fluororibose cytosine
  modified_base 12..13: mod_base = OTHER; note = S-phosphorothioate
  modified_base 13: mod_base = OTHER; note = 2-fluororibose adenine
  modified_base 14: mod_base = OTHER; note = 2-fluororibose guanine
  modified_base 14..15: mod_base = OTHER; note R-N-(1,3-dimethylimidazolidin-2-ylidene)phosphoramidate
  modified_base 15: mod_base = OTHER; note = 2-fluororibose uracil
  modified_base 15..16: mod_base = OTHER; note = S-phosphorothioate
  modified_base 16: mod_base = OTHER; note = 2-fluororibose cytosine
  modified_base 16..17: mod_base = OTHER; note = S-phosphorothioate
  modified_base 17: mod_base = OTHER; note = 2-fluororibose cytosine
  modified_base 17..18: mod_base = OTHER; note = S-phosphorothioate
  modified_base 18: mod_base = OTHER; note = 2-fluororibose cytosine
  modified_base 18..19: mod_base = OTHER; note = S-phosphorothioate
  modified_base 19: mod_base = OTHER; note = 2-fluororibose uracil
  modified_base 19..20: mod_base = OTHER; note = S-phosphorothioate
  modified_base 20: mod_base = um
  modified_base 21: mod_base = um
  modified_base 21..22: mod_base = OTHER; note = S-phosphorothioate
  modified_base 22: mod_base = OTHER; note = 2-fluororibose cytosine
  modified_base 22..23: mod_base = OTHER; note = S-phosphorothioate
  modified_base 23: mod_base = OTHER; note = deoxyribose thymine
  modified_base 23..24: mod_base = OTHER; note = S-phosphorothioate
  modified_base 24: mod_base = OTHER; note = deoxyribose uracil (position 3 connectivity)
  modified_base 24..25: mod_base = OTHER; note = S-phosphorothioate
  modified_base 25: mod_base = OTHER; note = deoxyribose inosine
  modified_base 25..26: mod_base = OTHER; note S-N-(1,3-dimethylimidazolidin-2-ylidene)phosphoramidate
  modified_base 26: mod_base = um
  modified_base 27: mod_base = OTHER; note = 2-fluororibose cytosine
  modified_base 27..28: mod_base = OTHER; note = S-phosphorothioate
  modified_base 28: mod_base = gm
  modified_base 28..29: mod_base = OTHER; note = S-phosphorothioate
  modified_base 29: mod_base = OTHER; note = 2-O-methylribose adenine
  modified_base 29..30: mod_base = OTHER; note R-N-(1,3-dimethylimidazolidin-2-ylidene)phosphoramidate
  modified_base 30: mod_base = um
  source 1..30: mol_type = other RNA

SEQ ID NO: 395 - RNA, 30 nt, synthetic construct; identical to SEQ ID NO: 273
  misc_feature 1..30: note = Synthetic: WV-46317
  misc_feature 1..30: note = Synthetic: ADR-0100546
  modified_base 1: mod_base = OTHER; note = triantennary GalNAc with C12 linker linked to 6-aminohexanol linked by phosphate to the 5' end of 2-O-methylribose cytosine
  modified_base 1..2: mod_base = OTHER; note R-N-(1,3-dimethylimidazolidin-2-ylidene)phosphoramidate
  modified_base 2: mod_base = cm
  modified_base 2..3: mod_base = OTHER; note = S-phosphorothioate
  modified_base 3: mod_base = cm
  modified_base 3..4: mod_base = OTHER; note = S-phosphorothioate
  modified_base 4: mod_base = OTHER; note = 2-fluororibose adenine
  modified_base 4..5: mod_base = OTHER; note = S-phosphorothioate
  modified_base 5: mod_base = OTHER; note = 2-fluororibose guanine
  modified_base 5..6: mod_base = OTHER; note = S-phosphorothioate
  modified_base 6: mod_base = cm
  modified_base 7: mod_base = OTHER; note = 2-O-methylribose adenine
  modified_base 8: mod_base = OTHER; note = 2-fluororibose guanine
  modified_base 8..9: mod_base = OTHER; note = S-phosphorothioate
  modified_base 9: mod_base = OTHER; note = 2-fluororibose cytosine
  modified_base 9..10: mod_base = OTHER; note = S-phosphorothioate
  modified_base 10: mod_base = um
  modified_base 10..11: mod_base = OTHER; note = S-phosphorothioate
  modified_base 11: mod_base = OTHER; note = 2-fluororibose uracil
  modified_base 11..12: mod_base = OTHER; note R-N-(1,3-dimethylimidazolidin-2-ylidene)phosphoramidate
  modified_base 12: mod_base = cm
  modified_base 13: mod_base = OTHER; note = 2-fluororibose adenine
  modified_base 13..14: mod_base = OTHER; note = S-phosphorothioate
  modified_base 14: mod_base = OTHER; note = 2-fluororibose guanine
  modified_base 14..15: mod_base = OTHER; note R-N-(1,3-dimethylimidazolidin-2-ylidene)phosphoramidate
  modified_base 15: mod_base = OTHER; note = 2-fluororibose uracil
  modified_base 16: mod_base = cm
  modified_base 16..17: mod_base = OTHER; note = S-phosphorothioate
  modified_base 17: mod_base = OTHER; note = 2-fluororibose cytosine
  modified_base 17..18: mod_base = OTHER; note = S-phosphorothioate
  modified_base 18: mod_base = OTHER; note = 2-fluororibose cytosine
  modified_base 18..19: mod_base = OTHER; note = S-phosphorothioate
  modified_base 19: mod_base = OTHER; note = 2-fluororibose uracil
  modified_base 19..20: mod_base = OTHER; note R-N-(1,3-dimethylimidazolidin-2-ylidene)phosphoramidate
  modified_base 20: mod_base = um
  modified_base 21: mod_base = um
  modified_base 22: mod_base = OTHER; note = 2-fluororibose cytosine
  modified_base 22..23: mod_base = OTHER; note = S-phosphorothioate
  modified_base 23: mod_base = OTHER; note = deoxyribose thymine
  modified_base 23..24: mod_base = OTHER; note = S-phosphorothioate
  modified_base 24: mod_base = OTHER; note = deoxyribose uracil (position 3 connectivity)
  modified_base 24..25: mod_base = OTHER; note = S-phosphorothioate
  modified_base 25: mod_base = OTHER; note = deoxyribose inosine
  modified_base 25..26: mod_base = OTHER; note S-N-(1,3-dimethylimidazolidin-2-ylidene)phosphoramidate
  modified_base 26: mod_base = um
  modified_base 27: mod_base = OTHER; note = 2-fluororibose cytosine
  modified_base 27..28: mod_base = OTHER; note = S-phosphorothioate
  modified_base 28: mod_base = gm
  modified_base 28..29: mod_base = OTHER; note = S-phosphorothioate
  modified_base 29: mod_base = OTHER; note = 2-O-methylribose adenine
  modified_base 29..30: mod_base = OTHER; note R-N-(1,3-dimethylimidazolidin-2-ylidene)phosphoramidate
  modified_base 30: mod_base = um
  source 1..30: mol_type = other RNA

SEQ ID NO: 396 - RNA, 30 nt, synthetic construct; identical to SEQ ID NO: 273
  misc_feature 1..30: note = Synthetic: WV-46406
  misc_feature 1..30: note = Synthetic: ADR-0104281
  modified_base 1: mod_base = cm
  modified_base 1..2: mod_base = OTHER; note R-N-(1,3-dimethylimidazolidin-2-ylidene)phosphoramidate
  modified_base 2: mod_base = cm
  modified_base 2..3: mod_base = OTHER; note = S-phosphorothioate
  modified_base 3: mod_base = cm
  modified_base 3..4: mod_base = OTHER; note = S-phosphorothioate
  modified_base 4: mod_base = OTHER; note = 2-fluororibose adenine
  modified_base 4..5: mod_base = OTHER; note = S-phosphorothioate
  modified_base 5: mod_base = OTHER; note = 2-fluororibose guanine
  modified_base 5..6: mod_base = OTHER; note = S-phosphorothioate
  modified_base 6: mod_base = cm
  modified_base 7: mod_base = OTHER; note = 2-O-methylribose adenine
  modified_base 8: mod_base = OTHER; note = 2-fluororibose guanine
  modified_base 8..9: mod_base = OTHER; note = S-phosphorothioate
  modified_base 9: mod_base = OTHER; note = 2-fluororibose cytosine
  modified_base 10: mod_base = um
  modified_base 10..11: mod_base = OTHER; note = S-phosphorothioate
  modified_base 11: mod_base = OTHER; note = 2-fluororibose uracil
  modified_base 11..12: mod_base = OTHER; note R-N-(1,3-dimethylimidazolidin-2-ylidene)phosphoramidate
  modified_base 12: mod_base = cm
  modified_base 13: mod_base = OTHER; note = 2-fluororibose adenine
  modified_base 13..14: mod_base = OTHER; note = S-phosphorothioate
  modified_base 14: mod_base = OTHER; note = 2-fluororibose guanine
  modified_base 14..15: mod_base = OTHER; note R-N-(1,3-dimethylimidazolidin-2-ylidene)phosphoramidate
  modified_base 15: mod_base = OTHER; note = 2-fluororibose uracil
  modified_base 16: mod_base = cm
  modified_base 16..17: mod_base = OTHER; note = S-phosphorothioate
  modified_base 17: mod_base = OTHER; note = 2-fluororibose cytosine
  modified_base 17..18: mod_base = OTHER; note = S-phosphorothioate
  modified_base 18: mod_base = OTHER; note = 2-fluororibose cytosine
  modified_base 18..19: mod_base = OTHER; note = S-phosphorothioate
  modified_base 19: mod_base = OTHER; note = 2-fluororibose uracil
  modified_base 19..20: mod_base = OTHER; note = S-phosphorothioate
  modified_base 20: mod_base = um
  modified_base 21: mod_base = um
  modified_base 22: mod_base = OTHER; note = 2-fluororibose cytosine
  modified_base 22..23: mod_base = OTHER; note = S-phosphorothioate
  modified_base 23: mod_base = OTHER; note = deoxyribose thymine
  modified_base 23..24: mod_base = OTHER; note = S-phosphorothioate
  modified_base 24: mod_base = OTHER; note = deoxyribose uracil (position 3 connectivity)
  modified_base 24..25: mod_base = OTHER; note = S-phosphorothioate
  modified_base 25: mod_base = OTHER; note = deoxyribose inosine
  modified_base 25..26: mod_base = OTHER; note S-N-(1,3-dimethylimidazolidin-2-ylidene)phosphoramidate
  modified_base 26: mod_base = um
  modified_base 27: mod_base = OTHER; note = 2-fluororibose cytosine
  modified_base 27..28: mod_base = OTHER; note = S-phosphorothioate
  modified_base 28: mod_base = gm
  modified_base 28..29: mod_base = OTHER; note = S-phosphorothioate
  modified_base 29: mod_base = OTHER; note = 2-O-methylribose adenine
  modified_base 29..30: mod_base = OTHER; note R-N-(1,3-dimethylimidazolidin-2-ylidene)phosphoramidate
  modified_base 30: mod_base = um
  source 1..30: mol_type = other RNA

SEQ ID NO: 397 - RNA, 30 nt, synthetic construct; identical to SEQ ID NO: 273
  misc_feature 1..30: note = Synthetic: WV-46407
  misc_feature 1..30: note = Synthetic: ADR-0104244
  modified_base 1: mod_base = cm
  modified_base 1..2: mod_base = OTHER; note R-N-(1,3-dimethylimidazolidin-2-ylidene)phosphoramidate
  modified_base 2: mod_base = cm
  modified_base 2..3: mod_base = OTHER; note = S-phosphorothioate
  modified_base 3: mod_base = cm
  modified_base 3..4: mod_base = OTHER; note = S-phosphorothioate
  modified_base 4: mod_base = OTHER; note = 2-fluororibose adenine
  modified_base 4..5: mod_base = OTHER; note = S-phosphorothioate
  modified_base 5: mod_base = OTHER; note = 2-fluororibose guanine
  modified_base 5..6: mod_base = OTHER; note = S-phosphorothioate
  modified_base 6: mod_base = cm
  modified_base 7: mod_base = OTHER; note = 2-O-methylribose adenine
  modified_base 7..8: mod_base = OTHER; note = S-phosphorothioate
  modified_base 8: mod_base = OTHER; note = 2-fluororibose guanine
  modified_base 8..9: mod_base = OTHER; note = S-phosphorothioate
  modified_base 9: mod_base = OTHER; note = 2-fluororibose cytosine
  modified_base 10: mod_base = um
  modified_base 10..11: mod_base = OTHER; note = S-phosphorothioate
  modified_base 11: mod_base = OTHER; note = 2-fluororibose uracil
  modified_base 11..12: mod_base = OTHER; note R-N-(1,3-dimethylimidazolidin-2-ylidene)phosphoramidate
  modified_base 12: mod_base = cm
  modified_base 13: mod_base = OTHER; note = 2-fluororibose adenine
  modified_base 13..14: mod_base = OTHER; note = S-phosphorothioate
  modified_base 14: mod_base = OTHER; note = 2-fluororibose guanine
  modified_base 14..15: mod_base = OTHER; note R-N-(1,3-dimethylimidazolidin-2-ylidene)phosphoramidate
  modified_base 15: mod_base = OTHER; note = 2-fluororibose uracil
  modified_base 16: mod_base = cm
  modified_base 17: mod_base = cm
  modified_base 17..18: mod_base = OTHER; note = S-phosphorothioate
  modified_base 18: mod_base = OTHER; note = 2-fluororibose cytosine
  modified_base 18..19: mod_base = OTHER; note = S-phosphorothioate
  modified_base 19: mod_base = OTHER; note = 2-fluororibose uracil
  modified_base 19..20: mod_base = OTHER; note = S-phosphorothioate
  modified_base 20: mod_base = um
  modified_base 21: mod_base = um
  modified_base 22: mod_base = OTHER; note = 2-fluororibose cytosine
  modified_base 22..23: mod_base = OTHER; note = S-phosphorothioate
  modified_base 23: mod_base = OTHER; note = deoxyribose thymine
  modified_base 23..24: mod_base = OTHER; note = S-phosphorothioate
  modified_base 24: mod_base = OTHER; note = deoxyribose uracil (position 3 connectivity)
  modified_base 24..25: mod_base = OTHER; note = S-phosphorothioate
  modified_base 25: mod_base = OTHER; note = deoxyribose inosine
  modified_base 25..26: mod_base = OTHER; note S-N-(1,3-dimethylimidazolidin-2-ylidene)phosphoramidate
  modified_base 26: mod_base = um
  modified_base 27: mod_base = OTHER; note = 2-fluororibose cytosine
  modified_base 27..28: mod_base = OTHER; note = S-phosphorothioate
  modified_base 28: mod_base = gm
  modified_base 28..29: mod_base = OTHER; note = S-phosphorothioate
  modified_base 29: mod_base = OTHER; note = 2-O-methylribose adenine
  modified_base 29..30: mod_base = OTHER; note R-N-(1,3-dimethylimidazolidin-2-ylidene)phosphoramidate
  modified_base 30: mod_base = um
  source 1..30: mol_type = other RNA

SEQ ID NO: 398 - RNA, 30 nt, synthetic construct; identical to SEQ ID NO: 273
  misc_feature 1..30: note = Synthetic: WV-46408
  misc_feature 1..30: note = Synthetic: ADR-0104286
  modified_base 1: mod_base = cm
  modified_base 1..2: mod_base = OTHER; note R-N-(1,3-dimethylimidazolidin-2-ylidene)phosphoramidate
  modified_base 2: mod_base = cm
  modified_base 2..3: mod_base = OTHER; note = S-phosphorothioate
  modified_base 3: mod_base = cm
  modified_base 3..4: mod_base = OTHER; note = S-phosphorothioate
  modified_base 4: mod_base = OTHER; note = 2-fluororibose adenine
  modified_base 4..5: mod_base = OTHER; note = S-phosphorothioate
  modified_base 5: mod_base = OTHER; note = 2-fluororibose guanine
  modified_base 5..6: mod_base = OTHER; note = S-phosphorothioate
  modified_base 6: mod_base = cm
  modified_base 7: mod_base = OTHER; note = 2-O-methylribose adenine
  modified_base 8: mod_base = OTHER; note = 2-fluororibose guanine
  modified_base 8..9: mod_base = OTHER; note = S-phosphorothioate
  modified_base 9: mod_base = OTHER; note = 2-fluororibose cytosine
  modified_base 10: mod_base = um
  modified_base 10..11: mod_base = OTHER; note = S-phosphorothioate
  modified_base 11: mod_base = OTHER; note = 2-fluororibose uracil
  modified_base 11..12: mod_base = OTHER; note R-N-(1,3-dimethylimidazolidin-2-ylidene)phosphoramidate
  modified_base 12: mod_base = cm
  modified_base 13: mod_base = OTHER; note = 2-fluororibose adenine
  modified_base 13..14: mod_base = OTHER; note = S-phosphorothioate
  modified_base 14: mod_base = OTHER; note = 2-fluororibose guanine
  modified_base 14..15: mod_base = OTHER; note R-N-(1,3-dimethylimidazolidin-2-ylidene)phosphoramidate
  modified_base 15: mod_base = OTHER; note = 2-fluororibose uracil
  modified_base 16: mod_base = cm
  modified_base 17: mod_base = cm
  modified_base 17..18: mod_base = OTHER; note = S-phosphorothioate
  modified_base 18: mod_base = OTHER; note = 2-fluororibose cytosine
  modified_base 18..19: mod_base = OTHER; note = S-phosphorothioate
  modified_base 19: mod_base = OTHER; note = 2-fluororibose uracil
  modified_base 19..20: mod_base = OTHER; note = S-phosphorothioate
  modified_base 20: mod_base = um
  modified_base 21: mod_base = um
  modified_base 22: mod_base = OTHER; note = 2-fluororibose cytosine
  modified_base 22..23: mod_base = OTHER; note = S-phosphorothioate
  modified_base 23: mod_base = OTHER; note = deoxyribose thymine
  modified_base 23..24: mod_base = OTHER; note = S-phosphorothioate
  modified_base 24: mod_base = OTHER; note = deoxyribose uracil (position 3 connectivity)
  modified_base 24..25: mod_base = OTHER; note = S-phosphorothioate
  modified_base 25: mod_base = OTHER; note = deoxyribose inosine
  modified_base 25..26: mod_base = OTHER; note S-N-(1,3-dimethylimidazolidin-2-ylidene)phosphoramidate
  modified_base 26: mod_base = um
  modified_base 27: mod_base = OTHER; note = 2-fluororibose cytosine
  modified_base 27..28: mod_base = OTHER; note = S-phosphorothioate
  modified_base 28: mod_base = gm
  modified_base 28..29: mod_base = OTHER; note = S-phosphorothioate
  modified_base 29: mod_base = OTHER; note = 2-O-methylribose adenine
  modified_base 29..30: mod_base = OTHER; note R-N-(1,3-dimethylimidazolidin-2-ylidene)phosphoramidate
  modified_base 30: mod_base = um
  source 1..30: mol_type = other RNA

SEQ ID NO: 399 - RNA, 30 nt, synthetic construct; identical to SEQ ID NO: 273
  misc_feature 1..30: note = Synthetic: WV-46409
  misc_feature 1..30: note = Synthetic: ADR-0104293
  modified_base 1: mod_base = cm
  modified_base 1..2: mod_base = OTHER; note R-N-(1,3-dimethylimidazolidin-2-ylidene)phosphoramidate
  modified_base 2: mod_base = cm
  modified_base 2..3: mod_base = OTHER; note = S-phosphorothioate
  modified_base 3: mod_base = cm
  modified_base 3..4: mod_base = OTHER; note = S-phosphorothioate
  modified_base 4: mod_base = OTHER; note = 2-fluororibose adenine
  modified_base 4..5: mod_base = OTHER; note = S-phosphorothioate
  modified_base 5: mod_base = OTHER; note = 2-fluororibose guanine
  modified_base 5..6: mod_base = OTHER; note = S-phosphorothioate
  modified_base 6: mod_base = cm
  modified_base 7: mod_base = OTHER; note = 2-O-methylribose adenine
  modified_base 8: mod_base = OTHER; note = 2-fluororibose guanine
  modified_base 8..9: mod_base = OTHER; note = S-phosphorothioate
  modified_base 9: mod_base = cm
  modified_base 10: mod_base = um
  modified_base 10..11: mod_base = OTHER; note = S-phosphorothioate
  modified_base 11: mod_base = OTHER; note = 2-fluororibose uracil
  modified_base 11..12: mod_base = OTHER; note R-N-(1,3-dimethylimidazolidin-2-ylidene)phosphoramidate
  modified_base 12: mod_base = cm
  modified_base 13: mod_base = OTHER; note = 2-fluororibose adenine
  modified_base 13..14: mod_base = OTHER; note = S-phosphorothioate
  modified_base 14: mod_base = OTHER; note = 2-fluororibose guanine
  modified_base 14..15: mod_base = OTHER; note R-N-(1,3-dimethylimidazolidin-2-ylidene)phosphoramidate
  modified_base 15: mod_base = OTHER; note = 2-fluororibose uracil
  modified_base 16: mod_base = cm
  modified_base 17: mod_base = cm
  modified_base 17..18: mod_base = OTHER; note = S-phosphorothioate
  modified_base 18: mod_base = OTHER; note = 2-fluororibose cytosine
  modified_base 18..19: mod_base = OTHER; note = S-phosphorothioate
  modified_base 19: mod_base = OTHER; note = 2-fluororibose uracil
  modified_base 19..20: mod_base = OTHER; note = S-phosphorothioate
  modified_base 20: mod_base = um
  modified_base 21: mod_base = um
  modified_base 22: mod_base = OTHER; note = 2-fluororibose cytosine
  modified_base 22..23: mod_base = OTHER; note = S-phosphorothioate
  modified_base 23: mod_base = OTHER; note = deoxyribose thymine
  modified_base 23..24: mod_base = OTHER; note = S-phosphorothioate
  modified_base 24: mod_base = OTHER; note = deoxyribose uracil (position 3 connectivity)
  modified_base 24..25: mod_base = OTHER; note = S-phosphorothioate
  modified_base 25: mod_base = OTHER; note = deoxyribose inosine
  modified_base 25..26: mod_base = OTHER; note S-N-(1,3-dimethylimidazolidin-2-ylidene)phosphoramidate
  modified_base 26: mod_base = um
  modified_base 27: mod_base = OTHER; note = 2-fluororibose cytosine
  modified_base 27..28: mod_base = OTHER; note = S-phosphorothioate
  modified_base 28: mod_base = gm
  modified_base 28..29: mod_base = OTHER; note = S-phosphorothioate
  modified_base 29: mod_base = OTHER; note = 2-O-methylribose adenine
  modified_base 29..30: mod_base = OTHER; note R-N-(1,3-dimethylimidazolidin-2-ylidene)phosphoramidate
  modified_base 30: mod_base = um
  source 1..30: mol_type = other RNA

SEQ ID NO: 400 - RNA, 30 nt, synthetic construct; identical to SEQ ID NO: 273
  misc_feature 1..30: note = Synthetic: WV-46410
  misc_feature 1..30: note = Synthetic: ADR-0104288
  modified_base 1: mod_base = cm
  modified_base 1..2: mod_base = OTHER; note R-N-(1,3-dimethylimidazolidin-2-ylidene)phosphoramidate
  modified_base 2: mod_base = cm
  modified_base 2..3: mod_base = OTHER; note = S-phosphorothioate
  modified_base 3: mod_base = cm
  modified_base 3..4: mod_base = OTHER; note = S-phosphorothioate
  modified_base 4: mod_base = OTHER; note = 2-fluororibose adenine
  modified_base 4..5: mod_base = OTHER; note = S-phosphorothioate
  modified_base 5: mod_base = OTHER; note = 2-fluororibose guanine
  modified_base 5..6: mod_base = OTHER; note = S-phosphorothioate
  modified_base 6: mod_base = cm
  modified_base 7: mod_base = OTHER; note = 2-O-methylribose adenine
  modified_base 8: mod_base = OTHER; note = 2-fluororibose guanine
  modified_base 8..9: mod_base = OTHER; note = S-phosphorothioate
  modified_base 9: mod_base = OTHER; note = 2-fluororibose cytosine
  modified_base 10: mod_base = um
  modified_base 10..11: mod_base = OTHER; note = S-phosphorothioate
  modified_base 11: mod_base = um
  modified_base 11..12: mod_base = OTHER; note R-N-(1,3-dimethylimidazolidin-2-ylidene)phosphoramidate
  modified_base 12: mod_base = cm
  modified_base 13: mod_base = OTHER; note = 2-fluororibose adenine
  modified_base 13..14: mod_base = OTHER; note = S-phosphorothioate
  modified_base 14: mod_base = OTHER; note = 2-fluororibose guanine
  modified_base 14..15: mod_base = OTHER; note R-N-(1,3-dimethylimidazolidin-2-ylidene)phosphoramidate
  modified_base 15: mod_base = OTHER; note = 2-fluororibose uracil
  modified_base 16: mod_base = cm
  modified_base 17: mod_base = cm
  modified_base 17..18: mod_base = OTHER; note = S-phosphorothioate
  modified_base 18: mod_base = OTHER; note = 2-fluororibose cytosine
  modified_base 18..19: mod_base = OTHER; note = S-phosphorothioate
  modified_base 19: mod_base = OTHER; note = 2-fluororibose uracil
  modified_base 19..20: mod_base = OTHER; note = S-phosphorothioate
  modified_base 20: mod_base = um
  modified_base 21: mod_base = um
  modified_base 22: mod_base = OTHER; note = 2-fluororibose cytosine
  modified_base 22..23: mod_base = OTHER; note = S-phosphorothioate
  modified_base 23: mod_base = OTHER; note = deoxyribose thymine
  modified_base 23..24: mod_base = OTHER; note = S-phosphorothioate
  modified_base 24: mod_base = OTHER; note = deoxyribose uracil (position 3 connectivity)
  modified_base 24..25: mod_base = OTHER; note = S-phosphorothioate
  modified_base 25: mod_base = OTHER; note = deoxyribose inosine
  modified_base 25..26: mod_base = OTHER; note S-N-(1,3-dimethylimidazolidin-2-ylidene)phosphoramidate
  modified_base 26: mod_base = um
  modified_base 27: mod_base = OTHER; note = 2-fluororibose cytosine
  modified_base 27..28: mod_base = OTHER; note = S-phosphorothioate
  modified_base 28: mod_base = gm
  modified_base 28..29: mod_base = OTHER; note = S-phosphorothioate
  modified_base 29: mod_base = OTHER; note = 2-O-methylribose adenine
  modified_base 29..30: mod_base = OTHER; note R-N-(1,3-dimethylimidazolidin-2-ylidene)phosphoramidate
  modified_base 30: mod_base = um
  source 1..30: mol_type = other RNA

SEQ ID NO: 401 - RNA, 30 nt, synthetic construct; identical to SEQ ID NO: 273
  misc_feature 1..30: note = Synthetic: WV-46411
  misc_feature 1..30: note = Synthetic: ADR-0104287
  modified_base 1: mod_base = cm
  modified_base 1..2: mod_base = OTHER; note R-N-(1,3-dimethylimidazolidin-2-ylidene)phosphoramidate
  modified_base 2: mod_base = cm
  modified_base 2..3: mod_base = OTHER; note = S-phosphorothioate
  modified_base 3: mod_base = cm
  modified_base 3..4: mod_base = OTHER; note = S-phosphorothioate
  modified_base 4: mod_base = OTHER; note = 2-fluororibose adenine
  modified_base 4..5: mod_base = OTHER; note = S-phosphorothioate
  modified_base 5: mod_base = OTHER; note = 2-fluororibose guanine
  modified_base 5..6: mod_base = OTHER; note = S-phosphorothioate
  modified_base 6: mod_base = cm
  modified_base 7: mod_base = OTHER; note = 2-O-methylribose adenine
  modified_base 8: mod_base = OTHER; note = 2-fluororibose guanine
  modified_base 8..9: mod_base = OTHER; note = S-phosphorothioate
  modified_base 9: mod_base = OTHER; note = 2-fluororibose cytosine
  modified_base 10: mod_base = um
  modified_base 10..11: mod_base = OTHER; note = S-phosphorothioate
  modified_base 11: mod_base = OTHER; note = 2-fluororibose uracil
  modified_base 11..12: mod_base = OTHER; note R-N-(1,3-dimethylimidazolidin-2-ylidene)phosphoramidate
  modified_base 12: mod_base = cm
  modified_base 13: mod_base = OTHER; note = 2-fluororibose adenine
  modified_base 13..14: mod_base = OTHER; note = S-phosphorothioate
  modified_base 14: mod_base = OTHER; note = 2-fluororibose guanine
  modified_base 14..15: mod_base = OTHER; note R-N-(1,3-dimethylimidazolidin-2-ylidene)phosphoramidate
  modified_base 15: mod_base = um
  modified_base 16: mod_base = cm
  modified_base 17: mod_base = cm
  modified_base 17..18: mod_base = OTHER; note = S-phosphorothioate
  modified_base 18: mod_base = OTHER; note = 2-fluororibose cytosine
  modified_base 18..19: mod_base = OTHER; note = S-phosphorothioate
  modified_base 19: mod_base = OTHER; note = 2-fluororibose uracil
  modified_base 19..20: mod_base = OTHER; note = S-phosphorothioate
  modified_base 20: mod_base = um
  modified_base 21: mod_base = um
  modified_base 22: mod_base = OTHER; note = 2-fluororibose cytosine
  modified_base 22..23: mod_base = OTHER; note = S-phosphorothioate
  modified_base 23: mod_base = OTHER; note = deoxyribose thymine
  modified_base 23..24: mod_base = OTHER; note = S-phosphorothioate
  modified_base 24: mod_base = OTHER; note = deoxyribose uracil (position 3 connectivity)
  modified_base 24..25: mod_base = OTHER; note = S-phosphorothioate
  modified_base 25: mod_base = OTHER; note = deoxyribose inosine
  modified_base 25..26: mod_base = OTHER; note S-N-(1,3-dimethylimidazolidin-2-ylidene)phosphoramidate
  modified_base 26: mod_base = um
  modified_base 27: mod_base = OTHER; note = 2-fluororibose cytosine
  modified_base 27..28: mod_base = OTHER; note = S-phosphorothioate
  modified_base 28: mod_base = gm
  modified_base 28..29: mod_base = OTHER; note = S-phosphorothioate
  modified_base 29: mod_base = OTHER; note = 2-O-methylribose adenine
  modified_base 29..30: mod_base = OTHER; note R-N-(1,3-dimethylimidazolidin-2-ylidene)phosphoramidate
  modified_base 30: mod_base = um
  source 1..30: mol_type = other RNA

SEQ ID NO: 402 - RNA, 30 nt, synthetic construct; identical to SEQ ID NO: 273
  misc_feature 1..30: note = Synthetic: WV-46412
  misc_feature 1..30: note = Synthetic: ADR-0104295
  modified_base 1: mod_base = cm
  modified_base 1..2: mod_base = OTHER; note R-N-(1,3-dimethylimidazolidin-2-ylidene)phosphoramidate
  modified_base 2: mod_base = cm
  modified_base 2..3: mod_base = OTHER; note = S-phosphorothioate
  modified_base 3: mod_base = cm
  modified_base 3..4: mod_base = OTHER; note = S-phosphorothioate
  modified_base 4: mod_base = OTHER; note = 2-fluororibose adenine
  modified_base 4..5: mod_base = OTHER; note = S-phosphorothioate
  modified_base 5: mod_base = OTHER; note = 2-fluororibose guanine
  modified_base 5..6: mod_base = OTHER; note = S-phosphorothioate
  modified_base 6: mod_base = cm
  modified_base 7: mod_base = OTHER; note = 2-O-methylribose adenine
  modified_base 8: mod_base = OTHER; note = 2-fluororibose guanine
  modified_base 8..9: mod_base = OTHER; note = S-phosphorothioate
  modified_base 9: mod_base = cm
  modified_base 10: mod_base = um
  modified_base 10..11: mod_base = OTHER; note = S-phosphorothioate
  modified_base 11: mod_base = um
  modified_base 11..12: mod_base = OTHER; note R-N-(1,3-dimethylimidazolidin-2-ylidene)phosphoramidate
  modified_base 12: mod_base = cm
  modified_base 13: mod_base = OTHER; note = 2-fluororibose adenine
  modified_base 13..14: mod_base = OTHER; note = S-phosphorothioate
  modified_base 14: mod_base = OTHER; note = 2-fluororibose guanine
  modified_base 14..15: mod_base = OTHER; note R-N-(1,3-dimethylimidazolidin-2-ylidene)phosphoramidate
  modified_base 15: mod_base = OTHER; note = 2-fluororibose uracil
  modified_base 16: mod_base = cm
  modified_base 17: mod_base = cm
  modified_base 17..18: mod_base = OTHER; note = S-phosphorothioate
  modified_base 18: mod_base = OTHER; note = 2-fluororibose cytosine
  modified_base 18..19: mod_base = OTHER; note = S-phosphorothioate
  modified_base 19: mod_base = OTHER; note = 2-fluororibose uracil
  modified_base 19..20: mod_base = OTHER; note = S-phosphorothioate
  modified_base 20: mod_base = um
  modified_base 21: mod_base = um
  modified_base 22: mod_base = OTHER; note = 2-fluororibose cytosine
  modified_base 22..23: mod_base = OTHER; note = S-phosphorothioate
  modified_base 23: mod_base = OTHER; note = deoxyribose thymine
  modified_base 23..24: mod_base = OTHER; note = S-phosphorothioate
  modified_base 24: mod_base = OTHER; note = deoxyribose uracil (position 3 connectivity)
  modified_base 24..25: mod_base = OTHER; note = S-phosphorothioate
  modified_base 25: mod_base = OTHER; note = deoxyribose inosine
  modified_base 25..26: mod_base = OTHER; note S-N-(1,3-dimethylimidazolidin-2-ylidene)phosphoramidate
  modified_base 26: mod_base = um
  modified_base 27: mod_base = OTHER; note = 2-fluororibose cytosine
  modified_base 27..28: mod_base = OTHER; note = S-phosphorothioate
  modified_base 28: mod_base = gm
  modified_base 28..29: mod_base = OTHER; note = S-phosphorothioate
  modified_base 29: mod_base = OTHER; note = 2-O-methylribose adenine
  modified_base 29..30: mod_base = OTHER; note R-N-(1,3-dimethylimidazolidin-2-ylidene)phosphoramidate
  modified_base 30: mod_base = um
  source 1..30: mol_type = other RNA

SEQ ID NO: 403 - RNA, 30 nt, synthetic construct; identical to SEQ ID NO: 273
  misc_feature 1..30: note = Synthetic: WV-46413
  misc_feature 1..30: note = Synthetic: ADR-0104294
  modified_base 1: mod_base = cm
  modified_base 1..2: mod_base = OTHER; note R-N-(1,3-dimethylimidazolidin-2-ylidene)phosphoramidate
  modified_base 2: mod_base = cm
  modified_base 2..3: mod_base = OTHER; note = S-phosphorothioate
  modified_base 3: mod_base = cm
  modified_base 3..4: mod_base = OTHER; note = S-phosphorothioate
  modified_base 4: mod_base = OTHER; note = 2-fluororibose adenine
  modified_base 4..5: mod_base = OTHER; note = S-phosphorothioate
  modified_base 5: mod_base = OTHER; note = 2-fluororibose guanine
  modified_base 5..6: mod_base = OTHER; note = S-phosphorothioate
  modified_base 6: mod_base = cm
  modified_base 7: mod_base = OTHER; note = 2-O-methylribose adenine
  modified_base 8: mod_base = OTHER; note = 2-fluororibose guanine
  modified_base 8..9: mod_base = OTHER; note = S-phosphorothioate
  modified_base 9: mod_base = cm
  modified_base 10: mod_base = um
  modified_base 10..11: mod_base = OTHER; note = S-phosphorothioate
  modified_base 11: mod_base = OTHER; note = 2-fluororibose uracil
  modified_base 11..12: mod_base = OTHER; note R-N-(1,3-dimethylimidazolidin-2-ylidene)phosphoramidate
  modified_base 12: mod_base = cm
  modified_base 13: mod_base = OTHER; note = 2-fluororibose adenine
  modified_base 13..14: mod_base = OTHER; note = S-phosphorothioate
  modified_base 14: mod_base = OTHER; note = 2-fluororibose guanine
  modified_base 14..15: mod_base = OTHER; note R-N-(1,3-dimethylimidazolidin-2-ylidene)phosphoramidate
  modified_base 15: mod_base = um
  modified_base 16: mod_base = cm
  modified_base 17: mod_base = cm
  modified_base 17..18: mod_base = OTHER; note = S-phosphorothioate
  modified_base 18: mod_base = OTHER; note = 2-fluororibose cytosine
  modified_base 18..19: mod_base = OTHER; note = S-phosphorothioate
  modified_base 19: mod_base = OTHER; note = 2-fluororibose uracil
  modified_base 19..20: mod_base = OTHER; note = S-phosphorothioate
  modified_base 20: mod_base = um
  modified_base 21: mod_base = um
  modified_base 22: mod_base = OTHER; note = 2-fluororibose cytosine
  modified_base 22..23: mod_base = OTHER; note = S-phosphorothioate
  modified_base 23: mod_base = OTHER; note = deoxyribose thymine
  modified_base 23..24: mod_base = OTHER; note = S-phosphorothioate
  modified_base 24: mod_base = OTHER; note = deoxyribose uracil (position 3 connectivity)
  modified_base 24..25: mod_base = OTHER; note = S-phosphorothioate
  modified_base 25: mod_base = OTHER; note = deoxyribose inosine
  modified_base 25..26: mod_base = OTHER; note S-N-(1,3-dimethylimidazolidin-2-ylidene)phosphoramidate
  modified_base 26: mod_base = um
  modified_base 27: mod_base = OTHER; note = 2-fluororibose cytosine
  modified_base 27..28: mod_base = OTHER; note = S-phosphorothioate
  modified_base 28: mod_base = gm
  modified_base 28..29: mod_base = OTHER; note = S-phosphorothioate
  modified_base 29: mod_base = OTHER; note = 2-O-methylribose adenine
  modified_base 29..30: mod_base = OTHER; note R-N-(1,3-dimethylimidazolidin-2-ylidene)phosphoramidate
  modified_base 30: mod_base = um
  source 1..30: mol_type = other RNA

SEQ ID NO: 404 - RNA, 30 nt, synthetic construct; identical to SEQ ID NO: 273
  misc_feature 1..30: note = Synthetic: WV-46414
  misc_feature 1..30: note = Synthetic: ADR-0104289
  modified_base 1: mod_base = cm
  modified_base 1..2: mod_base = OTHER; note R-N-(1,3-dimethylimidazolidin-2-ylidene)phosphoramidate
  modified_base 2: mod_base = cm
  modified_base 2..3: mod_base = OTHER; note = S-phosphorothioate
  modified_base 3: mod_base = cm
  modified_base 3..4: mod_base = OTHER; note = S-phosphorothioate
  modified_base 4: mod_base = OTHER; note = 2-fluororibose adenine
  modified_base 4..5: mod_base = OTHER; note = S-phosphorothioate
  modified_base 5: mod_base = OTHER; note = 2-fluororibose guanine
  modified_base 5..6: mod_base = OTHER; note = S-phosphorothioate
  modified_base 6: mod_base = cm
  modified_base 7: mod_base = OTHER; note = 2-O-methylribose adenine
  modified_base 8: mod_base = OTHER; note = 2-fluororibose guanine
  modified_base 8..9: mod_base = OTHER; note = S-phosphorothioate
  modified_base 9: mod_base = OTHER; note = 2-fluororibose cytosine
  modified_base 10: mod_base = um
  modified_base 10..11: mod_base = OTHER; note = S-phosphorothioate
  modified_base 11: mod_base = um
  modified_base 11..12: mod_base = OTHER; note R-N-(1,3-dimethylimidazolidin-2-ylidene)phosphoramidate
  modified_base 12: mod_base = cm
  modified_base 13: mod_base = OTHER; note = 2-fluororibose adenine
  modified_base 13..14: mod_base = OTHER; note = S-phosphorothioate
  modified_base 14: mod_base = OTHER; note = 2-fluororibose guanine
  modified_base 14..15: mod_base = OTHER; note R-N-(1,3-dimethylimidazolidin-2-ylidene)phosphoramidate
  modified_base 15: mod_base = um
  modified_base 16: mod_base = cm
  modified_base 17: mod_base = cm
  modified_base 17..18: mod_base = OTHER; note = S-phosphorothioate
  modified_base 18: mod_base = OTHER; note = 2-fluororibose cytosine
  modified_base 18..19: mod_base = OTHER; note = S-phosphorothioate
  modified_base 19: mod_base = OTHER; note = 2-fluororibose uracil
  modified_base 19..20: mod_base = OTHER; note = S-phosphorothioate
  modified_base 20: mod_base = um
  modified_base 21: mod_base = um
  modified_base 22: mod_base = OTHER; note = 2-fluororibose cytosine
  modified_base 22..23: mod_base = OTHER; note = S-phosphorothioate
  modified_base 23: mod_base = OTHER; note = deoxyribose thymine
  modified_base 23..24: mod_base = OTHER; note = S-phosphorothioate
  modified_base 24: mod_base = OTHER; note = deoxyribose uracil (position 3 connectivity)
  modified_base 24..25: mod_base = OTHER; note = S-phosphorothioate
  modified_base 25: mod_base = OTHER; note = deoxyribose inosine
  modified_base 25..26: mod_base = OTHER; note S-N-(1,3-dimethylimidazolidin-2-ylidene)phosphoramidate
  modified_base 26: mod_base = um
  modified_base 27: mod_base = OTHER; note = 2-fluororibose cytosine
  modified_base 27..28: mod_base = OTHER; note = S-phosphorothioate
  modified_base 28: mod_base = gm
  modified_base 28..29: mod_base = OTHER; note = S-phosphorothioate
  modified_base 29: mod_base = OTHER; note = 2-O-methylribose adenine
  modified_base 29..30: mod_base = OTHER; note R-N-(1,3-dimethylimidazolidin-2-ylidene)phosphoramidate
  modified_base 30: mod_base = um
  source 1..30: mol_type = other RNA

SEQ ID NO: 405 - RNA, 30 nt, synthetic construct; identical to SEQ ID NO: 273
  misc_feature 1..30: note = Synthetic: WV-46415
  misc_feature 1..30: note = Synthetic: ADR-0104296
  modified_base 1: mod_base = cm
  modified_base 1..2: mod_base = OTHER; note R-N-(1,3-dimethylimidazolidin-2-ylidene)phosphoramidate
  modified_base 2: mod_base = cm
  modified_base 2..3: mod_base = OTHER; note = S-phosphorothioate
  modified_base 3: mod_base = cm
  modified_base 3..4: mod_base = OTHER; note = S-phosphorothioate
  modified_base 4: mod_base = OTHER; note = 2-fluororibose adenine
  modified_base 4..5: mod_base = OTHER; note = S-phosphorothioate
  modified_base 5: mod_base = OTHER; note = 2-fluororibose guanine
  modified_base 5..6: mod_base = OTHER; note = S-phosphorothioate
  modified_base 6: mod_base = cm
  modified_base 7: mod_base = OTHER; note = 2-O-methylribose adenine
  modified_base 8: mod_base = OTHER; note = 2-fluororibose guanine
  modified_base 8..9: mod_base = OTHER; note = S-phosphorothioate
  modified_base 9: mod_base = cm
  modified_base 10: mod_base = um
  modified_base 10..11: mod_base = OTHER; note = S-phosphorothioate
  modified_base 11: mod_base = um
  modified_base 11..12: mod_base = OTHER; note R-N-(1,3-dimethylimidazolidin-2-ylidene)phosphoramidate
  modified_base 12: mod_base = cm
  modified_base 13: mod_base = OTHER; note = 2-fluororibose adenine
  modified_base 13..14: mod_base = OTHER; note = S-phosphorothioate
  modified_base 14: mod_base = OTHER; note = 2-fluororibose guanine
  modified_base 14..15: mod_base = OTHER; note R-N-(1,3-dimethylimidazolidin-2-ylidene)phosphoramidate
  modified_base 15: mod_base = um
  modified_base 16: mod_base = cm
  modified_base 17: mod_base = cm
  modified_base 17..18: mod_base = OTHER; note = S-phosphorothioate
  modified_base 18: mod_base = OTHER; note = 2-fluororibose cytosine
  modified_base 18..19: mod_base = OTHER; note = S-phosphorothioate
  modified_base 19: mod_base = OTHER; note = 2-fluororibose uracil
  modified_base 19..20: mod_base = OTHER; note = S-phosphorothioate
  modified_base 20: mod_base = um
  modified_base 21: mod_base = um
  modified_base 22: mod_base = OTHER; note = 2-fluororibose cytosine
  modified_base 22..23: mod_base = OTHER; note = S-phosphorothioate
  modified_base 23: mod_base = OTHER; note = deoxyribose thymine
  modified_base 23..24: mod_base = OTHER; note = S-phosphorothioate
  modified_base 24: mod_base = OTHER; note = deoxyribose uracil (position 3 connectivity)
  modified_base 24..25: mod_base = OTHER; note = S-phosphorothioate
  modified_base 25: mod_base = OTHER; note = deoxyribose inosine
  modified_base 25..26: mod_base = OTHER; note S-N-(1,3-dimethylimidazolidin-2-ylidene)phosphoramidate
  modified_base 26: mod_base = um
  modified_base 27: mod_base = OTHER; note = 2-fluororibose cytosine
  modified_base 27..28: mod_base = OTHER; note = S-phosphorothioate
  modified_base 28: mod_base = gm
  modified_base 28..29: mod_base = OTHER; note = S-phosphorothioate
  modified_base 29: mod_base = OTHER; note = 2-O-methylribose adenine
  modified_base 29..30: mod_base = OTHER; note R-N-(1,3-dimethylimidazolidin-2-ylidene)phosphoramidate
  modified_base 30: mod_base = um
  source 1..30: mol_type = other RNA

SEQ ID NO: 406 - RNA, 30 nt, synthetic construct; identical to SEQ ID NO: 273
  misc_feature 1..30: note = Synthetic: WV-46468
  misc_feature 1..30: note = Synthetic: ADR-0104130
  modified_base 1: mod_base = cm
  modified_base 1..2: mod_base = OTHER; note R-N-(1,3-dimethylimidazolidin-2-ylidene)phosphoramidate
  modified_base 2: mod_base = cm
  modified_base 2..3: mod_base = OTHER; note = S-phosphorothioate
  modified_base 3: mod_base = cm
  modified_base 3..4: mod_base = OTHER; note = S-phosphorothioate
  modified_base 4: mod_base = OTHER; note = 2-fluororibose adenine
  modified_base 4..5: mod_base = OTHER; note = S-phosphorothioate
  modified_base 5: mod_base = OTHER; note = 2-fluororibose guanine
  modified_base 5..6: mod_base = OTHER; note = S-phosphorothioate
  modified_base 6: mod_base = cm
  modified_base 7: mod_base = OTHER; note = 2-O-methylribose adenine
  modified_base 7..8: mod_base = OTHER; note = S-phosphorothioate
  modified_base 8: mod_base = OTHER; note = 2-fluororibose guanine
  modified_base 8..9: mod_base = OTHER; note = S-phosphorothioate
  modified_base 9: mod_base = OTHER; note = 2-fluororibose cytosine
  modified_base 10: mod_base = um
  modified_base 10..11: mod_base = OTHER; note = S-phosphorothioate
  modified_base 11: mod_base = OTHER; note = 2-fluororibose uracil
  modified_base 11..12: mod_base = OTHER; note R-N-(1,3-dimethylimidazolidin-2-ylidene)phosphoramidate
  modified_base 12: mod_base = cm
  modified_base 13: mod_base = OTHER; note = 2-fluororibose adenine
  modified_base 13..14: mod_base = OTHER; note = S-phosphorothioate
  modified_base 14: mod_base = OTHER; note = 2-fluororibose guanine
  modified_base 14..15: mod_base = OTHER; note R-N-(1,3-dimethylimidazolidin-2-ylidene)phosphoramidate
  modified_base 15: mod_base = OTHER; note = 2-fluororibose uracil
  modified_base 16: mod_base = cm
  modified_base 16..17: mod_base = OTHER; note = S-phosphorothioate
  modified_base 17: mod_base = OTHER; note = 2-fluororibose cytosine
  modified_base 17..18: mod_base = OTHER; note = S-phosphorothioate
  modified_base 18: mod_base = OTHER; note = 2-fluororibose cytosine
  modified_base 18..19: mod_base = OTHER; note = S-phosphorothioate
  modified_base 19: mod_base = OTHER; note = 2-fluororibose uracil
  modified_base 19..20: mod_base = OTHER; note = S-phosphorothioate
  modified_base 20: mod_base = um
  modified_base 21: mod_base = um
  modified_base 22: mod_base = OTHER; note = 2-fluororibose cytosine
  modified_base 22..23: mod_base = OTHER; note = S-phosphorothioate
  modified_base 23: mod_base = OTHER; note = 2-fluororibose uracil
  modified_base 23..24: mod_base = OTHER; note = S-phosphorothioate
  modified_base 24: mod_base = OTHER; note = deoxyribose uracil (position 3 connectivity)
  modified_base 24..25: mod_base = OTHER; note = S-phosphorothioate
  modified_base 25: mod_base = OTHER; note = deoxyribose inosine
  modified_base 25..26: mod_base = OTHER; note S-N-(1,3-dimethylimidazolidin-2-ylidene)phosphoramidate
  modified_base 27: mod_base = OTHER; note = 2-fluororibose cytosine
  modified_base 27..28: mod_base = OTHER; note = S-phosphorothioate
  modified_base 28: mod_base = gm
  modified_base 28..29: mod_base = OTHER; note = S-phosphorothioate
  modified_base 29: mod_base = OTHER; note = 2-O-methylribose adenine
  modified_base 29..30: mod_base = OTHER; note R-N-(1,3-dimethylimidazolidin-2-ylidene)phosphoramidate
  modified_base 30: mod_base = um
  source 1..30: mol_type = other RNA

SEQ ID NO: 407 - RNA, 30 nt, synthetic construct; identical to SEQ ID NO: 273
  misc_feature 1..30: note = Synthetic: WV-46469
  misc_feature 1..30: note = Synthetic: ADR-0104262
  modified_base 1: mod_base = cm
  modified_base 1..2: mod_base = OTHER; note R-N-(1,3-dimethylimidazolidin-2-ylidene)phosphoramidate
  modified_base 2: mod_base = cm
  modified_base 2..3: mod_base = OTHER; note = S-phosphorothioate
  modified_base 3: mod_base = cm
  modified_base 3..4: mod_base = OTHER; note = S-phosphorothioate
  modified_base 4: mod_base = OTHER; note = 2-fluororibose adenine
  modified_base 4..5: mod_base = OTHER; note = S-phosphorothioate
  modified_base 5: mod_base = OTHER; note = 2-fluororibose guanine
  modified_base 5..6: mod_base = OTHER; note = S-phosphorothioate
  modified_base 6: mod_base = cm
  modified_base 7: mod_base = OTHER; note = 2-O-methylribose adenine
  modified_base 8: mod_base = OTHER; note = 2-fluororibose guanine
  modified_base 8..9: mod_base = OTHER; note = S-phosphorothioate
  modified_base 9: mod_base = OTHER; note = 2-fluororibose cytosine
  modified_base 9..10: mod_base = OTHER; note = S-phosphorothioate
  modified_base 10: mod_base = um
  modified_base 11: mod_base = OTHER; note = 2-fluororibose uracil
  modified_base 11..12: mod_base = OTHER; note R-N-(1,3-dimethylimidazolidin-2-ylidene)phosphoramidate
  modified_base 12: mod_base = cm
  modified_base 13: mod_base = OTHER; note = 2-fluororibose adenine
  modified_base 13..14: mod_base = OTHER; note = S-phosphorothioate
  modified_base 14: mod_base = OTHER; note = 2-fluororibose guanine
  modified_base 14..15: mod_base = OTHER; note R-N-(1,3-dimethylimidazolidin-2-ylidene)phosphoramidate
  modified_base 15: mod_base = OTHER; note = 2-fluororibose uracil
  modified_base 16: mod_base = cm
  modified_base 16..17: mod_base = OTHER; note = S-phosphorothioate
  modified_base 17: mod_base = OTHER; note = 2-fluororibose cytosine
  modified_base 17..18: mod_base = OTHER; note = S-phosphorothioate
  modified_base 18: mod_base = OTHER; note = 2-fluororibose cytosine
  modified_base 18..19: mod_base = OTHER; note = S-phosphorothioate
  modified_base 19: mod_base = OTHER; note = 2-fluororibose uracil
  modified_base 19..20: mod_base = OTHER; note R-N-(1,3-dimethylimidazolidin-2-ylidene)phosphoramidate
  modified_base 20: mod_base = um
  modified_base 21: mod_base = um
  modified_base 22: mod_base = OTHER; note = 2-fluororibose cytosine
  modified_base 22..23: mod_base = OTHER; note = S-phosphorothioate
  modified_base 23: mod_base = OTHER; note = 2-fluororibose uracil
  modified_base 23..24: mod_base = OTHER; note = S-phosphorothioate
  modified_base 24: mod_base = OTHER; note = deoxyribose uracil (position 3 connectivity)
  modified_base 24..25: mod_base = OTHER; note = S-phosphorothioate
  modified_base 25: mod_base = OTHER; note = deoxyribose inosine
  modified_base 25..26: mod_base = OTHER; note S-N-(1,3-dimethylimidazolidin-2-ylidene)phosphoramidate
  modified_base 26: mod_base = OTHER; note = arabinose uracil
  modified_base 27: mod_base = OTHER; note = 2-fluororibose cytosine
  modified_base 27..28: mod_base = OTHER; note = S-phosphorothioate
  modified_base 28: mod_base = gm
  modified_base 28..29: mod_base = OTHER; note = S-phosphorothioate
  modified_base 29: mod_base = OTHER; note = 2-O-methylribose adenine
  modified_base 29..30: mod_base = OTHER; note R-N-(1,3-dimethylimidazolidin-2-ylidene)phosphoramidate
  modified_base 30: mod_base = um
  source 1..30: mol_type = other RNA

SEQ ID NO: 408 - RNA, 30 nt, synthetic construct; identical to SEQ ID NO: 273
  misc_feature 1..30: note = Synthetic: WV-46470
  misc_feature 1..30: note = Synthetic: ADR-0104263
  modified_base 1: mod_base = cm
  modified_base 1..2: mod_base = OTHER; note R-N-(1,3-dimethylimidazolidin-2-ylidene)phosphoramidate
  modified_base 2: mod_base = cm
  modified_base 2..3: mod_base = OTHER; note = S-phosphorothioate
  modified_base 3: mod_base = cm
  modified_base 3..4: mod_base = OTHER; note = S-phosphorothioate
  modified_base 4: mod_base = OTHER; note = 2-fluororibose adenine
  modified_base 4..5: mod_base = OTHER; note = S-phosphorothioate
  modified_base 5: mod_base = OTHER; note = 2-fluororibose guanine
  modified_base 5..6: mod_base = OTHER; note = S-phosphorothioate
  modified_base 6: mod_base = cm
  modified_base 7: mod_base = OTHER; note = 2-O-methylribose adenine
  modified_base 8: mod_base = OTHER; note = 2-fluororibose guanine
  modified_base 8..9: mod_base = OTHER; note = S-phosphorothioate
  modified_base 9: mod_base = OTHER; note = 2-fluororibose cytosine
  modified_base 9..10: mod_base = OTHER; note = S-phosphorothioate
  modified_base 10: mod_base = um
  modified_base 11: mod_base = OTHER; note = 2-fluororibose uracil
  modified_base 11..12: mod_base = OTHER; note R-N-(1,3-dimethylimidazolidin-2-ylidene)phosphoramidate
  modified_base 12: mod_base = cm
  modified_base 13: mod_base = OTHER; note = 2-fluororibose adenine
  modified_base 13..14: mod_base = OTHER; note = S-phosphorothioate
  modified_base 14: mod_base = OTHER; note = 2-fluororibose guanine
  modified_base 14..15: mod_base = OTHER; note R-N-(1,3-dimethylimidazolidin-2-ylidene)phosphoramidate
  modified_base 15: mod_base = OTHER; note = 2-fluororibose uracil
  modified_base 16: mod_base = cm
  modified_base 16..17: mod_base = OTHER; note = S-phosphorothioate
  modified_base 17: mod_base = OTHER; note = 2-fluororibose cytosine
  modified_base 17..18: mod_base = OTHER; note = S-phosphorothioate
  modified_base 18: mod_base = OTHER; note = 2-fluororibose cytosine
  modified_base 18..19: mod_base = OTHER; note = S-phosphorothioate
  modified_base 19: mod_base = OTHER; note = 2-fluororibose uracil
  modified_base 19..20: mod_base = OTHER; note R-N-(1,3-dimethylimidazolidin-2-ylidene)phosphoramidate
  modified_base 20: mod_base = um
  modified_base 21: mod_base = um
  modified_base 22: mod_base = OTHER; note = 2-fluororibose cytosine
  modified_base 22..23: mod_base = OTHER; note = S-phosphorothioate
  modified_base 23: mod_base = OTHER; note = 2-fluororibose uracil
  modified_base 23..24: mod_base = OTHER; note = S-phosphorothioate
  modified_base 24: mod_base = OTHER; note = deoxyribose uracil (position 3 connectivity)
  modified_base 24..25: mod_base = OTHER; note = S-phosphorothioate
  modified_base 25: mod_base = OTHER; note = deoxyribose inosine
  modified_base 25..26: mod_base = OTHER; note S-N-(1,3-dimethylimidazolidin-2-ylidene)phosphoramidate
  modified_base 27: mod_base = OTHER; note = 2-fluororibose cytosine
  modified_base 27..28: mod_base = OTHER; note = S-phosphorothioate
  modified_base 28: mod_base = gm
  modified_base 28..29: mod_base = OTHER; note = S-phosphorothioate
  modified_base 29: mod_base = OTHER; note = 2-O-methylribose adenine
  modified_base 29..30: mod_base = OTHER; note R-N-(1,3-dimethylimidazolidin-2-ylidene)phosphoramidate
  modified_base 30: mod_base = um
  source 1..30: mol_type = other RNA

SEQ ID NO: 409 - RNA, 30 nt, synthetic construct; identical to SEQ ID NO: 273
  misc_feature 1..30: note = Synthetic: WV-44487
  misc_feature 1..30: note = Synthetic: ADR-0104266
  modified_base 1: mod_base = cm
  modified_base 1..2: mod_base = OTHER; note R-N-(1,3-dimethylimidazolidin-2-ylidene)phosphoramidate
  modified_base 2: mod_base = cm
  modified_base 2..3: mod_base = OTHER; note = S-phosphorothioate
  modified_base 3: mod_base = cm
  modified_base 3..4: mod_base = OTHER; note = S-phosphorothioate
  modified_base 4: mod_base = OTHER; note = 2-fluororibose adenine
  modified_base 4..5: mod_base = OTHER; note = S-phosphorothioate
  modified_base 5: mod_base = OTHER; note = 2-fluororibose guanine
  modified_base 5..6: mod_base = OTHER; note = S-phosphorothioate
  modified_base 6: mod_base = cm
  modified_base 7: mod_base = OTHER; note = 2-O-methylribose adenine
  modified_base 8: mod_base = OTHER; note = 2-fluororibose guanine
  modified_base 8..9: mod_base = OTHER; note = S-phosphorothioate
  modified_base 9: mod_base = OTHER; note = 2-fluororibose cytosine
  modified_base 9..10: mod_base = OTHER; note = S-phosphorothioate
  modified_base 10: mod_base = um
  modified_base 11: mod_base = OTHER; note = 2-fluororibose uracil
  modified_base 11..12: mod_base = OTHER; note R-N-(1,3-dimethylimidazolidin-2-ylidene)phosphoramidate
  modified_base 12: mod_base = cm
  modified_base 13: mod_base = OTHER; note = 2-fluororibose adenine
  modified_base 13..14: mod_base = OTHER; note = S-phosphorothioate
  modified_base 14: mod_base = OTHER; note = 2-fluororibose guanine
  modified_base 14..15: mod_base = OTHER; note R-N-(1,3-dimethylimidazolidin-2-ylidene)phosphoramidate
  modified_base 15: mod_base = OTHER; note = 2-fluororibose uracil
  modified_base 16: mod_base = cm
  modified_base 16..17: mod_base = OTHER; note = S-phosphorothioate
  modified_base 17: mod_base = OTHER; note = 2-fluororibose cytosine
  modified_base 17..18: mod_base = OTHER; note = S-phosphorothioate
  modified_base 18: mod_base = OTHER; note = 2-fluororibose cytosine
  modified_base 18..19: mod_base = OTHER; note = S-phosphorothioate
  modified_base 19: mod_base = OTHER; note = 2-fluororibose uracil
  modified_base 19..20: mod_base = OTHER; note R-N-(1,3-dimethylimidazolidin-2-ylidene)phosphoramidate
  modified_base 20: mod_base = um
  modified_base 21: mod_base = um
  modified_base 22: mod_base = OTHER; note = 2-fluororibose cytosine
  modified_base 22..23: mod_base = OTHER; note = S-phosphorothioate
  modified_base 23: mod_base = OTHER; note = deoxyribose thymine
  modified_base 23..24: mod_base = OTHER; note = S-phosphorothioate
  modified_base 24: mod_base = OTHER; note = deoxyribose uracil (position 3 connectivity)
  modified_base 24..25: mod_base = OTHER; note = S-phosphorothioate
  modified_base 25: mod_base = OTHER; note = deoxyribose inosine
  modified_base 25..26: mod_base = OTHER; note S-N-(1,3-dimethylimidazolidin-2-ylidene)phosphoramidate
  modified_base 26: mod_base = um
  modified_base 27: mod_base = OTHER; note = 2-fluororibose cytosine
  modified_base 27..28: mod_base = OTHER; note = S-phosphorothioate
  modified_base 28: mod_base = gm
  modified_base 28..29: mod_base = OTHER; note = S-phosphorothioate
  modified_base 29: mod_base = OTHER; note = 2-O-methylribose adenine
  modified_base 29..30: mod_base = OTHER; note R-N-(1,3-dimethylimidazolidin-2-ylidene)phosphoramidate
  modified_base 30: mod_base = um
  source 1..30: mol_type = other RNA

SEQ ID NO: 410 - RNA, 30 nt, synthetic construct; identical to SEQ ID NO: 273
  misc_feature 1..30: note = Synthetic: WV-44482
  misc_feature 1..30: note = Synthetic: ADR-0104240
  modified_base 1: mod_base = cm
  modified_base 1..2: mod_base = OTHER; note R-N-(1,3-dimethylimidazolidin-2-ylidene)phosphoramidate
  modified_base 2: mod_base = cm
  modified_base 2..3: mod_base = OTHER; note = S-phosphorothioate
  modified_base 3: mod_base = cm
  modified_base 3..4: mod_base = OTHER; note = S-phosphorothioate
  modified_base 4: mod_base = OTHER; note = 2-fluororibose adenine
  modified_base 4..5: mod_base = OTHER; note = S-phosphorothioate
  modified_base 5: mod_base = OTHER; note = 2-fluororibose guanine
  modified_base 5..6: mod_base = OTHER; note = S-phosphorothioate
  modified_base 6: mod_base = cm
  modified_base 7: mod_base = OTHER; note = 2-O-methylribose adenine
  modified_base 7..8: mod_base = OTHER; note = S-phosphorothioate
  modified_base 8: mod_base = OTHER; note = 2-fluororibose guanine
  modified_base 8..9: mod_base = OTHER; note = S-phosphorothioate
  modified_base 9: mod_base = OTHER; note = 2-fluororibose cytosine
  modified_base 10: mod_base = um
  modified_base 10..11: mod_base = OTHER; note = S-phosphorothioate
  modified_base 11: mod_base = OTHER; note = 2-fluororibose uracil
  modified_base 11..12: mod_base = OTHER; note R-N-(1,3-dimethylimidazolidin-2-ylidene)phosphoramidate
  modified_base 12: mod_base = cm
  modified_base 13: mod_base = OTHER; note = 2-fluororibose adenine
  modified_base 13..14: mod_base = OTHER; note = S-phosphorothioate
  modified_base 14: mod_base = OTHER; note = 2-fluororibose guanine
  modified_base 14..15: mod_base = OTHER; note R-N-(1,3-dimethylimidazolidin-2-ylidene)phosphoramidate
  modified_base 15: mod_base = OTHER; note = 2-fluororibose uracil
  modified_base 16: mod_base = cm
  modified_base 16..17: mod_base = OTHER; note = S-phosphorothioate
  modified_base 17: mod_base = OTHER; note = 2-fluororibose cytosine
  modified_base 17..18: mod_base = OTHER; note = S-phosphorothioate
  modified_base 18: mod_base = OTHER; note = 2-fluororibose cytosine
  modified_base 18..19: mod_base = OTHER; note = S-phosphorothioate
  modified_base 19: mod_base = OTHER; note = 2-fluororibose uracil
  modified_base 19..20: mod_base = OTHER; note R-N-(1,3-dimethylimidazolidin-2-ylidene)phosphoramidate
  modified_base 20: mod_base = um
  modified_base 20..21: mod_base = OTHER; note = S-phosphorothioate
  modified_base 21: mod_base = um
  modified_base 22: mod_base = OTHER; note = 2-fluororibose cytosine
  modified_base 22..23: mod_base = OTHER; note = S-phosphorothioate
  modified_base 23: mod_base = OTHER; note = deoxyribose thymine
  modified_base 23..24: mod_base = OTHER; note = S-phosphorothioate
  modified_base 24: mod_base = OTHER; note = deoxyribose uracil (position 3 connectivity)
  modified_base 24..25: mod_base = OTHER; note = S-phosphorothioate
  modified_base 25: mod_base = OTHER; note = deoxyribose inosine
  modified_base 25..26: mod_base = OTHER; note S-N-(1,3-dimethylimidazolidin-2-ylidene)phosphoramidate
  modified_base 26: mod_base = um
  modified_base 27: mod_base = OTHER; note = 2-fluororibose cytosine
  modified_base 27..28: mod_base = OTHER; note = S-phosphorothioate
  modified_base 28: mod_base = gm
  modified_base 28..29: mod_base = OTHER; note = S-phosphorothioate
  modified_base 29: mod_base = OTHER; note = 2-O-methylribose adenine
  modified_base 29..30: mod_base = OTHER; note R-N-(1,3-dimethylimidazolidin-2-ylidene)phosphoramidate
  modified_base 30: mod_base = um
  source 1..30: mol_type = other RNA

SEQ ID NO: 411 - RNA, 30 nt, synthetic construct; identical to SEQ ID NO: 273
  misc_feature 1..30: note = Synthetic: WV-47029
  misc_feature 1..30: note = Synthetic: ADR-0104249
  modified_base 1: mod_base = cm
  modified_base 1..2: mod_base = OTHER; note R-N-(1,3-dimethylimidazolidin-2-ylidene)phosphoramidate
  modified_base 2: mod_base = cm
  modified_base 2..3: mod_base = OTHER; note = S-phosphorothioate
  modified_base 3: mod_base = cm
  modified_base 3..4: mod_base = OTHER; note = S-phosphorothioate
  modified_base 4: mod_base = OTHER; note = 2-fluororibose adenine
  modified_base 4..5: mod_base = OTHER; note = S-phosphorothioate
  modified_base 5: mod_base = OTHER; note = 2-fluororibose guanine
  modified_base 5..6: mod_base = OTHER; note = S-phosphorothioate
  modified_base 6: mod_base = cm
  modified_base 7: mod_base = OTHER; note = 2-O-methylribose adenine
  modified_base 7..8: mod_base = OTHER; note = S-phosphorothioate
  modified_base 8: mod_base = OTHER; note = 2-fluororibose guanine
  modified_base 8..9: mod_base = OTHER; note = S-phosphorothioate
  modified_base 9: mod_base = OTHER; note = 2-fluororibose cytosine
  modified_base 10: mod_base = um
  modified_base 10..11: mod_base = OTHER; note = S-phosphorothioate
  modified_base 11: mod_base = um
  modified_base 11..12: mod_base = OTHER; note R-N-(1,3-dimethylimidazolidin-2-ylidene)phosphoramidate
  modified_base 12: mod_base = OTHER; note = 2-fluororibose cytosine
  modified_base 13: mod_base = OTHER; note = 2-fluororibose adenine
  modified_base 13..14: mod_base = OTHER; note = S-phosphorothioate
  modified_base 14: mod_base = OTHER; note = 2-fluororibose guanine
  modified_base 14..15: mod_base = OTHER; note R-N-(1,3-dimethylimidazolidin-2-ylidene)phosphoramidate
  modified_base 15: mod_base = OTHER; note = 2-fluororibose uracil
  modified_base 16: mod_base = cm
  modified_base 16..17: mod_base = OTHER; note = S-phosphorothioate
  modified_base 17: mod_base = OTHER; note = 2-fluororibose cytosine
  modified_base 17..18: mod_base = OTHER; note = S-phosphorothioate
  modified_base 18: mod_base = OTHER; note = 2-fluororibose cytosine
  modified_base 18..19: mod_base = OTHER; note = S-phosphorothioate
  modified_base 19: mod_base = OTHER; note = 2-fluororibose uracil
  modified_base 19..20: mod_base = OTHER; note = S-phosphorothioate
  modified_base 20: mod_base = um
  modified_base 21: mod_base = um
  modified_base 22: mod_base = OTHER; note = 2-fluororibose cytosine
  modified_base 22..23: mod_base = OTHER; note = S-phosphorothioate
  modified_base 23: mod_base = OTHER; note = deoxyribose thymine
  modified_base 23..24: mod_base = OTHER; note = S-phosphorothioate
  modified_base 24: mod_base = OTHER; note = deoxyribose uracil (position 3 connectivity)
  modified_base 24..25: mod_base = OTHER; note = S-phosphorothioate
  modified_base 25: mod_base = OTHER; note = deoxyribose inosine
  modified_base 25..26: mod_base = OTHER; note S-N-(1,3-dimethylimidazolidin-2-ylidene)phosphoramidate
  modified_base 26: mod_base = um
  modified_base 27: mod_base = OTHER; note = 2-fluororibose cytosine
  modified_base 27..28: mod_base = OTHER; note = S-phosphorothioate
  modified_base 28: mod_base = gm
  modified_base 28..29: mod_base = OTHER; note = S-phosphorothioate
  modified_base 29: mod_base = OTHER; note = 2-O-methylribose adenine
  modified_base 29..30: mod_base = OTHER; note R-N-(1,3-dimethylimidazolidin-2-ylidene)phosphoramidate
  modified_base 30: mod_base = um
  source 1..30: mol_type = other RNA

SEQ ID NO: 412 - RNA, 30 nt, synthetic construct; identical to SEQ ID NO: 273
  misc_feature 1..30: note = Synthetic: WV-47030
  misc_feature 1..30: note = Synthetic: ADR-0104275
  modified_base 1: mod_base = cm
  modified_base 1..2: mod_base = OTHER; note R-N-(1,3-dimethylimidazolidin-2-ylidene)phosphoramidate
  modified_base 2: mod_base = cm
  modified_base 2..3: mod_base = OTHER; note = S-phosphorothioate
  modified_base 3: mod_base = cm
  modified_base 3..4: mod_base = OTHER; note = S-phosphorothioate
  modified_base 4: mod_base = OTHER; note = 2-fluororibose adenine
  modified_base 4..5: mod_base = OTHER; note = S-phosphorothioate
  modified_base 5: mod_base = OTHER; note = 2-fluororibose guanine
  modified_base 5..6: mod_base = OTHER; note = S-phosphorothioate
  modified_base 6: mod_base = cm
  modified_base 7: mod_base = OTHER; note = 2-O-methylribose adenine
  modified_base 8: mod_base = OTHER; note = 2-fluororibose guanine
  modified_base 8..9: mod_base = OTHER; note = S-phosphorothioate
  modified_base 9: mod_base = OTHER; note = 2-fluororibose cytosine
  modified_base 9..10: mod_base = OTHER; note = S-phosphorothioate
  modified_base 10: mod_base = um
  modified_base 11: mod_base = um
  modified_base 11..12: mod_base = OTHER; note R-N-(1,3-dimethylimidazolidin-2-ylidene)phosphoramidate
  modified_base 12: mod_base = OTHER; note = 2-fluororibose cytosine
  modified_base 13: mod_base = OTHER; note = 2-fluororibose adenine
  modified_base 13..14: mod_base = OTHER; note = S-phosphorothioate
  modified_base 14: mod_base = OTHER; note = 2-fluororibose guanine
  modified_base 14..15: mod_base = OTHER; note R-N-(1,3-dimethylimidazolidin-2-ylidene)phosphoramidate
  modified_base 15: mod_base = OTHER; note = 2-fluororibose uracil
  modified_base 16: mod_base = cm
  modified_base 16..17: mod_base = OTHER; note = S-phosphorothioate
  modified_base 17: mod_base = OTHER; note = 2-fluororibose cytosine
  modified_base 17..18: mod_base = OTHER; note = S-phosphorothioate
  modified_base 18: mod_base = OTHER; note = 2-fluororibose cytosine
  modified_base 18..19: mod_base = OTHER; note = S-phosphorothioate
  modified_base 19: mod_base = OTHER; note = 2-fluororibose uracil
  modified_base 19..20: mod_base = OTHER; note R-N-(1,3-dimethylimidazolidin-2-ylidene)phosphoramidate
  modified_base 20: mod_base = um
  modified_base 21: mod_base = um
  modified_base 22: mod_base = OTHER; note = 2-fluororibose cytosine
  modified_base 22..23: mod_base = OTHER; note = S-phosphorothioate
  modified_base 23: mod_base = OTHER; note = deoxyribose thymine
  modified_base 23..24: mod_base = OTHER; note = S-phosphorothioate
  modified_base 24: mod_base = OTHER; note = deoxyribose uracil (position 3 connectivity)
  modified_base 24..25: mod_base = OTHER; note = S-phosphorothioate
  modified_base 25: mod_base = OTHER; note = deoxyribose inosine
  modified_base 25..26: mod_base = OTHER; note S-N-(1,3-dimethylimidazolidin-2-ylidene)phosphoramidate
  modified_base 26: mod_base = um
  modified_base 27: mod_base = OTHER; note = 2-fluororibose cytosine
  modified_base 27..28: mod_base = OTHER; note = S-phosphorothioate
  modified_base 28: mod_base = gm
  modified_base 28..29: mod_base = OTHER; note = S-phosphorothioate
  modified_base 29: mod_base = OTHER; note = 2-O-methylribose adenine
  modified_base 29..30: mod_base = OTHER; note R-N-(1,3-dimethylimidazolidin-2-ylidene)phosphoramidate
  modified_base 30: mod_base = um
  source 1..30: mol_type = other RNA

SEQ ID NO: 413 - RNA, 30 nt, synthetic construct; identical to SEQ ID NO: 273
  misc_feature 1..30: note = Synthetic: WV-47031
  misc_feature 1..30: note = Synthetic: ADR-0104250
  modified_base 1: mod_base = cm
  modified_base 1..2: mod_base = OTHER; note R-N-(1,3-dimethylimidazolidin-2-ylidene)phosphoramidate
  modified_base 2: mod_base = cm
  modified_base 2..3: mod_base = OTHER; note = S-phosphorothioate
  modified_base 3: mod_base = cm
  modified_base 3..4: mod_base = OTHER; note = S-phosphorothioate
  modified_base 4: mod_base = OTHER; note = 2-fluororibose adenine
  modified_base 4..5: mod_base = OTHER; note = S-phosphorothioate
  modified_base 5: mod_base = OTHER; note = 2-fluororibose guanine
  modified_base 5..6: mod_base = OTHER; note = S-phosphorothioate
  modified_base 6: mod_base = cm
  modified_base 7: mod_base = OTHER; note = 2-O-methylribose adenine
  modified_base 7..8: mod_base = OTHER; note = S-phosphorothioate
  modified_base 8: mod_base = OTHER; note = 2-fluororibose guanine
  modified_base 8..9: mod_base = OTHER; note = S-phosphorothioate
  modified_base 9: mod_base = OTHER; note = 2-fluororibose cytosine
  modified_base 10: mod_base = um
  modified_base 10..11: mod_base = OTHER; note = S-phosphorothioate
  modified_base 11: mod_base = um
  modified_base 11..12: mod_base = OTHER; note R-N-(1,3-dimethylimidazolidin-2-ylidene)phosphoramidate
  modified_base 12: mod_base = OTHER; note = 2-fluororibose cytosine
  modified_base 13: mod_base = OTHER; note = 2-fluororibose adenine
  modified_base 13..14: mod_base = OTHER; note = S-phosphorothioate
  modified_base 14: mod_base = OTHER; note = 2-fluororibose guanine
  modified_base 14..15: mod_base = OTHER; note R-N-(1,3-dimethylimidazolidin-2-ylidene)phosphoramidate
  modified_base 15: mod_base = OTHER; note = 2-fluororibose uracil
  modified_base 16: mod_base = cm
  modified_base 16..17: mod_base = OTHER; note = S-phosphorothioate
  modified_base 17: mod_base = OTHER; note = 2-fluororibose cytosine
  modified_base 17..18: mod_base = OTHER; note = S-phosphorothioate
  modified_base 18: mod_base = OTHER; note = 2-fluororibose cytosine
  modified_base 18..19: mod_base = OTHER; note = S-phosphorothioate
  modified_base 19: mod_base = OTHER; note = 2-fluororibose uracil
  modified_base 19..20: mod_base = OTHER; note R-N-(1,3-dimethylimidazolidin-2-ylidene)phosphoramidate
  modified_base 20: mod_base = um
  modified_base 20..21: mod_base = OTHER; note = S-phosphorothioate
  modified_base 21: mod_base = um
  modified_base 22: mod_base = OTHER; note = 2-fluororibose cytosine
  modified_base 22..23: mod_base = OTHER; note = S-phosphorothioate
  modified_base 23: mod_base = OTHER; note = deoxyribose thymine
  modified_base 23..24: mod_base = OTHER; note = S-phosphorothioate
  modified_base 24: mod_base = OTHER; note = deoxyribose uracil (position 3 connectivity)
  modified_base 24..25: mod_base = OTHER; note = S-phosphorothioate
  modified_base 25: mod_base = OTHER; note = deoxyribose inosine
  modified_base 25..26: mod_base = OTHER; note S-N-(1,3-dimethylimidazolidin-2-ylidene)phosphoramidate
  modified_base 26: mod_base = um
  modified_base 27: mod_base = OTHER; note = 2-fluororibose cytosine
  modified_base 27..28: mod_base = OTHER; note = S-phosphorothioate
  modified_base 28: mod_base = gm
  modified_base 28..29: mod_base = OTHER; note = S-phosphorothioate
  modified_base 29: mod_base = OTHER; note = 2-O-methylribose adenine
  modified_base 29..30: mod_base = OTHER; note R-N-(1,3-dimethylimidazolidin-2-ylidene)phosphoramidate
  modified_base 30: mod_base = um
  source 1..30: mol_type = other RNA

SEQ ID NO: 414 - RNA, 30 nt, synthetic construct; identical to SEQ ID NO: 273
  misc_feature 1..30: note = Synthetic: WV-47032
  misc_feature 1..30: note = Synthetic: ADR-0104268
  modified_base 1: mod_base = cm
  modified_base 1..2: mod_base = OTHER; note R-N-(1,3-dimethylimidazolidin-2-ylidene)phosphoramidate
  modified_base 2: mod_base = cm
  modified_base 2..3: mod_base = OTHER; note = S-phosphorothioate
  modified_base 3: mod_base = cm
  modified_base 3..4: mod_base = OTHER; note = S-phosphorothioate
  modified_base 4: mod_base = OTHER; note = 2-fluororibose adenine
  modified_base 4..5: mod_base = OTHER; note = S-phosphorothioate
  modified_base 5: mod_base = OTHER; note = 2-fluororibose guanine
  modified_base 5..6: mod_base = OTHER; note = S-phosphorothioate
  modified_base 6: mod_base = cm
  modified_base 7: mod_base = OTHER; note = 2-O-methylribose adenine
  modified_base 8: mod_base = OTHER; note = 2-fluororibose guanine
  modified_base 8..9: mod_base = OTHER; note = S-phosphorothioate
  modified_base 9: mod_base = OTHER; note = 2-fluororibose cytosine
  modified_base 9..10: mod_base = OTHER; note = S-phosphorothioate
  modified_base 10: mod_base = um
  modified_base 11: mod_base = OTHER; note = 2-fluororibose uracil
  modified_base 11..12: mod_base = OTHER; note R-N-(1,3-dimethylimidazolidin-2-ylidene)phosphoramidate
  modified_base 12: mod_base = cm
  modified_base 13: mod_base = OTHER; note = 2-fluororibose adenine
  modified_base 13..14: mod_base = OTHER; note = S-phosphorothioate
  modified_base 14: mod_base = OTHER; note = 2-fluororibose guanine
  modified_base 14..15: mod_base = OTHER; note R-N-(1,3-dimethylimidazolidin-2-ylidene)phosphoramidate
  modified_base 15: mod_base = OTHER; note = 2-fluororibose uracil
  modified_base 16: mod_base = cm
  modified_base 16..17: mod_base = OTHER; note = S-phosphorothioate
  modified_base 17: mod_base = OTHER; note = 2-fluororibose cytosine
  modified_base 17..18: mod_base = OTHER; note = S-phosphorothioate
  modified_base 18: mod_base = OTHER; note = 2-fluororibose cytosine
  modified_base 18..19: mod_base = OTHER; note = S-phosphorothioate
  modified_base 19: mod_base = um
  modified_base 19..20: mod_base = OTHER; note R-N-(1,3-dimethylimidazolidin-2-ylidene)phosphoramidate
  modified_base 20: mod_base = OTHER; note = 2-fluororibose uracil
  modified_base 21: mod_base = um
  modified_base 22: mod_base = OTHER; note = 2-fluororibose cytosine
  modified_base 22..23: mod_base = OTHER; note = S-phosphorothioate
  modified_base 23: mod_base = OTHER; note = deoxyribose thymine
  modified_base 23..24: mod_base = OTHER; note = S-phosphorothioate
  modified_base 24: mod_base = OTHER; note = deoxyribose uracil (position 3 connectivity)
  modified_base 24..25: mod_base = OTHER; note = S-phosphorothioate
  modified_base 25: mod_base = OTHER; note = deoxyribose inosine
  modified_base 25..26: mod_base = OTHER; note S-N-(1,3-dimethylimidazolidin-2-ylidene)phosphoramidate
  modified_base 26: mod_base = um
  modified_base 27: mod_base = OTHER; note = 2-fluororibose cytosine
  modified_base 27..28: mod_base = OTHER; note = S-phosphorothioate
  modified_base 28: mod_base = gm
  modified_base 28..29: mod_base = OTHER; note = S-phosphorothioate
  modified_base 29: mod_base = OTHER; note = 2-O-methylribose adenine
  modified_base 29..30: mod_base = OTHER; note R-N-(1,3-dimethylimidazolidin-2-ylidene)phosphoramidate
  modified_base 30: mod_base = um
  source 1..30: mol_type = other RNA

SEQ ID NO: 415 - RNA, 30 nt, synthetic construct; identical to SEQ ID NO: 273
  misc_feature 1..30: note = Synthetic: WV-47033
  misc_feature 1..30: note = Synthetic: ADR-0104243
  modified_base 1: mod_base = cm
  modified_base 1..2: mod_base = OTHER; note R-N-(1,3-dimethylimidazolidin-2-ylidene)phosphoramidate
  modified_base 2: mod_base = cm
  modified_base 2..3: mod_base = OTHER; note = S-phosphorothioate
  modified_base 3: mod_base = cm
  modified_base 3..4: mod_base = OTHER; note = S-phosphorothioate
  modified_base 4: mod_base = OTHER; note = 2-fluororibose adenine
  modified_base 4..5: mod_base = OTHER; note = S-phosphorothioate
  modified_base 5: mod_base = OTHER; note = 2-fluororibose guanine
  modified_base 5..6: mod_base = OTHER; note = S-phosphorothioate
  modified_base 6: mod_base = cm
  modified_base 7: mod_base = OTHER; note = 2-O-methylribose adenine
  modified_base 7..8: mod_base = OTHER; note = S-phosphorothioate
  modified_base 8: mod_base = OTHER; note = 2-fluororibose guanine
  modified_base 8..9: mod_base = OTHER; note = S-phosphorothioate
  modified_base 9: mod_base = OTHER; note = 2-fluororibose cytosine
  modified_base 10: mod_base = um
  modified_base 10..11: mod_base = OTHER; note = S-phosphorothioate
  modified_base 11: mod_base = OTHER; note = 2-fluororibose uracil
  modified_base 11..12: mod_base = OTHER; note R-N-(1,3-dimethylimidazolidin-2-ylidene)phosphoramidate
  modified_base 12: mod_base = cm
  modified_base 13: mod_base = OTHER; note = 2-fluororibose adenine
  modified_base 13..14: mod_base = OTHER; note = S-phosphorothioate
  modified_base 14: mod_base = OTHER; note = 2-fluororibose guanine
  modified_base 14..15: mod_base = OTHER; note R-N-(1,3-dimethylimidazolidin-2-ylidene)phosphoramidate
  modified_base 15: mod_base = OTHER; note = 2-fluororibose uracil
  modified_base 16: mod_base = cm
  modified_base 16..17: mod_base = OTHER; note = S-phosphorothioate
  modified_base 17: mod_base = OTHER; note = 2-fluororibose cytosine
  modified_base 17..18: mod_base = OTHER; note = S-phosphorothioate
  modified_base 18: mod_base = OTHER; note = 2-fluororibose cytosine
  modified_base 18..19: mod_base = OTHER; note = S-phosphorothioate
  modified_base 19: mod_base = um
  modified_base 19..20: mod_base = OTHER; note R-N-(1,3-dimethylimidazolidin-2-ylidene)phosphoramidate
  modified_base 20: mod_base = OTHER; note = 2-fluororibose uracil
  modified_base 20..21: mod_base = OTHER; note = S-phosphorothioate
  modified_base 21: mod_base = um
  modified_base 22: mod_base = OTHER; note = 2-fluororibose cytosine
  modified_base 22..23: mod_base = OTHER; note = S-phosphorothioate
  modified_base 23: mod_base = OTHER; note = deoxyribose thymine
  modified_base 23..24: mod_base = OTHER; note = S-phosphorothioate
  modified_base 24: mod_base = OTHER; note = deoxyribose uracil (position 3 connectivity)
  modified_base 24..25: mod_base = OTHER; note = S-phosphorothioate
  modified_base 25: mod_base = OTHER; note = deoxyribose inosine
  modified_base 25..26: mod_base = OTHER; note S-N-(1,3-dimethylimidazolidin-2-ylidene)phosphoramidate
  modified_base 26: mod_base = um
  modified_base 27: mod_base = OTHER; note = 2-fluororibose cytosine
  modified_base 27..28: mod_base = OTHER; note = S-phosphorothioate
  modified_base 28: mod_base = gm
  modified_base 28..29: mod_base = OTHER; note = S-phosphorothioate
  modified_base 29: mod_base = OTHER; note = 2-O-methylribose adenine
  modified_base 29..30: mod_base = OTHER; note R-N-(1,3-dimethylimidazolidin-2-ylidene)phosphoramidate
  modified_base 30: mod_base = um
  source 1..30: mol_type = other RNA

SEQ ID NO: 416 - RNA, 30 nt, synthetic construct; identical to SEQ ID NO: 273
  misc_feature 1..30: note = Synthetic: WV-47034
  misc_feature 1..30: note = Synthetic: ADR-0104276
  modified_base 1: mod_base = cm
  modified_base 1..2: mod_base = OTHER; note R-N-(1,3-dimethylimidazolidin-2-ylidene)phosphoramidate
  modified_base 2: mod_base = cm
  modified_base 2..3: mod_base = OTHER; note = S-phosphorothioate
  modified_base 3: mod_base = cm
  modified_base 3..4: mod_base = OTHER; note = S-phosphorothioate
  modified_base 4: mod_base = OTHER; note = 2-fluororibose adenine
  modified_base 4..5: mod_base = OTHER; note = S-phosphorothioate
  modified_base 5: mod_base = OTHER; note = 2-fluororibose guanine
  modified_base 5..6: mod_base = OTHER; note = S-phosphorothioate
  modified_base 6: mod_base = cm
  modified_base 7: mod_base = OTHER; note = 2-O-methylribose adenine
  modified_base 8: mod_base = OTHER; note = 2-fluororibose guanine
  modified_base 8..9: mod_base = OTHER; note = S-phosphorothioate
  modified_base 9: mod_base = OTHER; note = 2-fluororibose cytosine
  modified_base 9..10: mod_base = OTHER; note = S-phosphorothioate
  modified_base 10: mod_base = um
  modified_base 11: mod_base = um
  modified_base 11..12: mod_base = OTHER; note R-N-(1,3-dimethylimidazolidin-2-ylidene)phosphoramidate
  modified_base 12: mod_base = OTHER; note = 2-fluororibose cytosine
  modified_base 13: mod_base = OTHER; note = 2-fluororibose adenine
  modified_base 13..14: mod_base = OTHER; note = S-phosphorothioate
  modified_base 14: mod_base = OTHER; note = 2-fluororibose guanine
  modified_base 14..15: mod_base = OTHER; note R-N-(1,3-dimethylimidazolidin-2-ylidene)phosphoramidate
  modified_base 15: mod_base = OTHER; note = 2-fluororibose uracil
  modified_base 16: mod_base = cm
  modified_base 16..17: mod_base = OTHER; note = S-phosphorothioate
  modified_base 17: mod_base = OTHER; note = 2-fluororibose cytosine
  modified_base 17..18: mod_base = OTHER; note = S-phosphorothioate
  modified_base 18: mod_base = OTHER; note = 2-fluororibose cytosine
  modified_base 18..19: mod_base = OTHER; note = S-phosphorothioate
  modified_base 19: mod_base = um
  modified_base 19..20: mod_base = OTHER; note R-N-(1,3-dimethylimidazolidin-2-ylidene)phosphoramidate
  modified_base 20: mod_base = OTHER; note = 2-fluororibose uracil
  modified_base 21: mod_base = um
  modified_base 22: mod_base = OTHER; note = 2-fluororibose cytosine
  modified_base 22..23: mod_base = OTHER; note = S-phosphorothioate
  modified_base 23: mod_base = OTHER; note = deoxyribose thymine
  modified_base 23..24: mod_base = OTHER; note = S-phosphorothioate
  modified_base 24: mod_base = OTHER; note = deoxyribose uracil (position 3 connectivity)
  modified_base 24..25: mod_base = OTHER; note = S-phosphorothioate
  modified_base 25: mod_base = OTHER; note = deoxyribose inosine
  modified_base 25..26: mod_base = OTHER; note S-N-(1,3-dimethylimidazolidin-2-ylidene)phosphoramidate
  modified_base 26: mod_base = um
  modified_base 27: mod_base = OTHER; note = 2-fluororibose cytosine
  modified_base 27..28: mod_base = OTHER; note = S-phosphorothioate
  modified_base 28: mod_base = gm
  modified_base 28..29: mod_base = OTHER; note = S-phosphorothioate
  modified_base 29: mod_base = OTHER; note = 2-O-methylribose adenine
  modified_base 29..30: mod_base = OTHER; note R-N-(1,3-dimethylimidazolidin-2-ylidene)phosphoramidate
  modified_base 30: mod_base = um
  source 1..30: mol_type = other RNA

SEQ ID NO: 417 - RNA, 30 nt, synthetic construct; identical to SEQ ID NO: 273
  misc_feature 1..30: note = Synthetic: WV-47035
  misc_feature 1..30: note = Synthetic: ADR-0104251
  modified_base 1: mod_base = cm
  modified_base 1..2: mod_base = OTHER; note R-N-(1,3-dimethylimidazolidin-2-ylidene)phosphoramidate
  modified_base 2: mod_base = cm
  modified_base 2..3: mod_base = OTHER; note = S-phosphorothioate
  modified_base 3: mod_base = cm
  modified_base 3..4: mod_base = OTHER; note = S-phosphorothioate
  modified_base 4: mod_base = OTHER; note = 2-fluororibose adenine
  modified_base 4..5: mod_base = OTHER; note = S-phosphorothioate
  modified_base 5: mod_base = OTHER; note = 2-fluororibose guanine
  modified_base 5..6: mod_base = OTHER; note = S-phosphorothioate
  modified_base 6: mod_base = cm
  modified_base 7: mod_base = OTHER; note = 2-O-methylribose adenine
  modified_base 7..8: mod_base = OTHER; note = S-phosphorothioate
  modified_base 8: mod_base = OTHER; note = 2-fluororibose guanine
  modified_base 8..9: mod_base = OTHER; note = S-phosphorothioate
  modified_base 9: mod_base = OTHER; note = 2-fluororibose cytosine
  modified_base 10: mod_base = um
  modified_base 10..11: mod_base = OTHER; note = S-phosphorothioate
  modified_base 11: mod_base = um
  modified_base 11..12: mod_base = OTHER; note R-N-(1,3-dimethylimidazolidin-2-ylidene)phosphoramidate
  modified_base 12: mod_base = OTHER; note = 2-fluororibose cytosine
  modified_base 13: mod_base = OTHER; note = 2-fluororibose adenine
  modified_base 13..14: mod_base = OTHER; note = S-phosphorothioate
  modified_base 14: mod_base = OTHER; note = 2-fluororibose guanine
  modified_base 14..15: mod_base = OTHER; note R-N-(1,3-dimethylimidazolidin-2-ylidene)phosphoramidate
  modified_base 15: mod_base = OTHER; note = 2-fluororibose uracil
  modified_base 16: mod_base = cm
  modified_base 16..17: mod_base = OTHER; note = S-phosphorothioate
  modified_base 17: mod_base = OTHER; note = 2-fluororibose cytosine
  modified_base 17..18: mod_base = OTHER; note = S-phosphorothioate
  modified_base 18: mod_base = OTHER; note = 2-fluororibose cytosine
  modified_base 18..19: mod_base = OTHER; note = S-phosphorothioate
  modified_base 19: mod_base = um
  modified_base 19..20: mod_base = OTHER; note R-N-(1,3-dimethylimidazolidin-2-ylidene)phosphoramidate
  modified_base 20: mod_base = OTHER; note = 2-fluororibose uracil
  modified_base 20..21: mod_base = OTHER; note = S-phosphorothioate
  modified_base 21: mod_base = um
  modified_base 22: mod_base = OTHER; note = 2-fluororibose cytosine
  modified_base 22..23: mod_base = OTHER; note = S-phosphorothioate
  modified_base 23: mod_base = OTHER; note = deoxyribose thymine
  modified_base 23..24: mod_base = OTHER; note = S-phosphorothioate
  modified_base 24: mod_base = OTHER; note = deoxyribose uracil (position 3 connectivity)
  modified_base 24..25: mod_base = OTHER; note = S-phosphorothioate
  modified_base 25: mod_base = OTHER; note = deoxyribose inosine
  modified_base 25..26: mod_base = OTHER; note S-N-(1,3-dimethylimidazolidin-2-ylidene)phosphoramidate
  modified_base 26: mod_base = um
  modified_base 27: mod_base = OTHER; note = 2-fluororibose cytosine
  modified_base 27..28: mod_base = OTHER; note = S-phosphorothioate
  modified_base 28: mod_base = gm
  modified_base 28..29: mod_base = OTHER; note = S-phosphorothioate
  modified_base 29: mod_base = OTHER; note = 2-O-methylribose adenine
  modified_base 29..30: mod_base = OTHER; note R-N-(1,3-dimethylimidazolidin-2-ylidene)phosphoramidate
  modified_base 30: mod_base = um
  source 1..30: mol_type = other RNA

SEQ ID NO: 418 - RNA, 30 nt, synthetic construct; identical to SEQ ID NO: 273
  misc_feature 1..30: note = Synthetic: WV-47036
  misc_feature 1..30: note = Synthetic: ADR-0104245
  modified_base 1: mod_base = cm
  modified_base 1..2: mod_base = OTHER; note R-N-(1,3-dimethylimidazolidin-2-ylidene)phosphoramidate
  modified_base 2: mod_base = cm
  modified_base 2..3: mod_base = OTHER; note = S-phosphorothioate
  modified_base 3: mod_base = cm
  modified_base 3..4: mod_base = OTHER; note = S-phosphorothioate
  modified_base 4: mod_base = OTHER; note = 2-fluororibose adenine
  modified_base 4..5: mod_base = OTHER; note = S-phosphorothioate
  modified_base 5: mod_base = OTHER; note = 2-fluororibose guanine
  modified_base 5..6: mod_base = OTHER; note = S-phosphorothioate
  modified_base 6: mod_base = cm
  modified_base 7: mod_base = OTHER; note = 2-O-methylribose adenine
  modified_base 7..8: mod_base = OTHER; note = S-phosphorothioate
  modified_base 8: mod_base = OTHER; note = 2-fluororibose guanine
  modified_base 8..9: mod_base = OTHER; note = S-phosphorothioate
  modified_base 9: mod_base = OTHER; note = 2-fluororibose cytosine
  modified_base 10: mod_base = um
  modified_base 10..11: mod_base = OTHER; note = S-phosphorothioate
  modified_base 11: mod_base = OTHER; note = 2-fluororibose uracil
  modified_base 11..12: mod_base = OTHER; note R-N-(1,3-dimethylimidazolidin-2-ylidene)phosphoramidate
  modified_base 12: mod_base = cm
  modified_base 13: mod_base = OTHER; note = 2-fluororibose adenine
  modified_base 13..14: mod_base = OTHER; note = S-phosphorothioate
  modified_base 14: mod_base = gm
  modified_base 14..15: mod_base = OTHER; note R-N-(1,3-dimethylimidazolidin-2-ylidene)phosphoramidate
  modified_base 15: mod_base = OTHER; note = 2-fluororibose uracil
  modified_base 16: mod_base = cm
  modified_base 16..17: mod_base = OTHER; note = S-phosphorothioate
  modified_base 17: mod_base = OTHER; note = 2-fluororibose cytosine
  modified_base 17..18: mod_base = OTHER; note = S-phosphorothioate
  modified_base 18: mod_base = OTHER; note = 2-fluororibose cytosine
  modified_base 18..19: mod_base = OTHER; note = S-phosphorothioate
  modified_base 19: mod_base = OTHER; note = 2-fluororibose uracil
  modified_base 19..20: mod_base = OTHER; note = S-phosphorothioate
  modified_base 20: mod_base = um
  modified_base 21: mod_base = um
  modified_base 22: mod_base = OTHER; note = 2-fluororibose cytosine
  modified_base 22..23: mod_base = OTHER; note = S-phosphorothioate
  modified_base 23: mod_base = OTHER; note = deoxyribose thymine
  modified_base 23..24: mod_base = OTHER; note = S-phosphorothioate
  modified_base 24: mod_base = OTHER; note = deoxyribose uracil (position 3 connectivity)
  modified_base 24..25: mod_base = OTHER; note = S-phosphorothioate
  modified_base 25: mod_base = OTHER; note = deoxyribose inosine
  modified_base 25..26: mod_base = OTHER; note S-N-(1,3-dimethylimidazolidin-2-ylidene)phosphoramidate
  modified_base 26: mod_base = um
  modified_base 27: mod_base = OTHER; note = 2-fluororibose cytosine
  modified_base 27..28: mod_base = OTHER; note = S-phosphorothioate
  modified_base 28: mod_base = gm
  modified_base 28..29: mod_base = OTHER; note = S-phosphorothioate
  modified_base 29: mod_base = OTHER; note = 2-O-methylribose adenine
  modified_base 29..30: mod_base = OTHER; note R-N-(1,3-dimethylimidazolidin-2-ylidene)phosphoramidate
  modified_base 30: mod_base = um
  source 1..30: mol_type = other RNA

SEQ ID NO: 419 - RNA, 30 nt, synthetic construct; identical to SEQ ID NO: 273
  misc_feature 1..30: note = Synthetic: WV-47037
  misc_feature 1..30: note = Synthetic: ADR-0104273
  modified_base 1: mod_base = cm
  modified_base 1..2: mod_base = OTHER; note R-N-(1,3-dimethylimidazolidin-2-ylidene)phosphoramidate
  modified_base 2: mod_base = cm
  modified_base 2..3: mod_base = OTHER; note = S-phosphorothioate
  modified_base 3: mod_base = cm
  modified_base 3..4: mod_base = OTHER; note = S-phosphorothioate
  modified_base 4: mod_base = OTHER; note = 2-fluororibose adenine
  modified_base 4..5: mod_base = OTHER; note = S-phosphorothioate
  modified_base 5: mod_base = OTHER; note = 2-fluororibose guanine
  modified_base 5..6: mod_base = OTHER; note = S-phosphorothioate
  modified_base 6: mod_base = cm
  modified_base 7: mod_base = OTHER; note = 2-O-methylribose adenine
  modified_base 8: mod_base = OTHER; note = 2-fluororibose guanine
  modified_base 8..9: mod_base = OTHER; note = S-phosphorothioate
  modified_base 9: mod_base = OTHER; note = 2-fluororibose cytosine
  modified_base 9..10: mod_base = OTHER; note = S-phosphorothioate
  modified_base 10: mod_base = um
  modified_base 11: mod_base = OTHER; note = 2-fluororibose uracil
  modified_base 11..12: mod_base = OTHER; note R-N-(1,3-dimethylimidazolidin-2-ylidene)phosphoramidate
  modified_base 12: mod_base = cm
  modified_base 13: mod_base = OTHER; note = 2-fluororibose adenine
  modified_base 13..14: mod_base = OTHER; note = S-phosphorothioate
  modified_base 14: mod_base = gm
  modified_base 14..15: mod_base = OTHER; note R-N-(1,3-dimethylimidazolidin-2-ylidene)phosphoramidate
  modified_base 15: mod_base = OTHER; note = 2-fluororibose uracil
  modified_base 16: mod_base = cm
  modified_base 16..17: mod_base = OTHER; note = S-phosphorothioate
  modified_base 17: mod_base = OTHER; note = 2-fluororibose cytosine
  modified_base 17..18: mod_base = OTHER; note = S-phosphorothioate
  modified_base 18: mod_base = OTHER; note = 2-fluororibose cytosine
  modified_base 18..19: mod_base = OTHER; note = S-phosphorothioate
  modified_base 19: mod_base = OTHER; note = 2-fluororibose uracil
  modified_base 19..20: mod_base = OTHER; note R-N-(1,3-dimethylimidazolidin-2-ylidene)phosphoramidate
  modified_base 20: mod_base = um
  modified_base 21: mod_base = um
  modified_base 22: mod_base = OTHER; note = 2-fluororibose cytosine
  modified_base 22..23: mod_base = OTHER; note = S-phosphorothioate
  modified_base 23: mod_base = OTHER; note = deoxyribose thymine
  modified_base 23..24: mod_base = OTHER; note = S-phosphorothioate
  modified_base 24: mod_base = OTHER; note = deoxyribose uracil (position 3 connectivity)
  modified_base 24..25: mod_base = OTHER; note = S-phosphorothioate
  modified_base 25: mod_base = OTHER; note = deoxyribose inosine
  modified_base 25..26: mod_base = OTHER; note S-N-(1,3-dimethylimidazolidin-2-ylidene)phosphoramidate
  modified_base 26: mod_base = um
  modified_base 27: mod_base = OTHER; note = 2-fluororibose cytosine
  modified_base 27..28: mod_base = OTHER; note = S-phosphorothioate
  modified_base 28: mod_base = gm
  modified_base 28..29: mod_base = OTHER; note = S-phosphorothioate
  modified_base 29: mod_base = OTHER; note = 2-O-methylribose adenine
  modified_base 29..30: mod_base = OTHER; note R-N-(1,3-dimethylimidazolidin-2-ylidene)phosphoramidate
  modified_base 30: mod_base = um
  source 1..30: mol_type = other RNA

SEQ ID NO: 420 - RNA, 30 nt, synthetic construct; identical to SEQ ID NO: 273
  misc_feature 1..30: note = Synthetic: WV-47038
  misc_feature 1..30: note = Synthetic: ADR-0104246
  modified_base 1: mod_base = cm
  modified_base 1..2: mod_base = OTHER; note R-N-(1,3-dimethylimidazolidin-2-ylidene)phosphoramidate
  modified_base 2: mod_base = cm
  modified_base 2..3: mod_base = OTHER; note = S-phosphorothioate
  modified_base 3: mod_base = cm
  modified_base 3..4: mod_base = OTHER; note = S-phosphorothioate
  modified_base 4: mod_base = OTHER; note = 2-fluororibose adenine
  modified_base 4..5: mod_base = OTHER; note = S-phosphorothioate
  modified_base 5: mod_base = OTHER; note = 2-fluororibose guanine
  modified_base 5..6: mod_base = OTHER; note = S-phosphorothioate
  modified_base 6: mod_base = cm
  modified_base 7: mod_base = OTHER; note = 2-O-methylribose adenine
  modified_base 7..8: mod_base = OTHER; note = S-phosphorothioate
  modified_base 8: mod_base = OTHER; note = 2-fluororibose guanine
  modified_base 8..9: mod_base = OTHER; note = S-phosphorothioate
  modified_base 9: mod_base = OTHER; note = 2-fluororibose cytosine
  modified_base 10: mod_base = um
  modified_base 10..11: mod_base = OTHER; note = S-phosphorothioate
  modified_base 11: mod_base = OTHER; note = 2-fluororibose uracil
  modified_base 11..12: mod_base = OTHER; note R-N-(1,3-dimethylimidazolidin-2-ylidene)phosphoramidate
  modified_base 12: mod_base = cm
  modified_base 13: mod_base = OTHER; note = 2-fluororibose adenine
  modified_base 13..14: mod_base = OTHER; note = S-phosphorothioate
  modified_base 14: mod_base = gm
  modified_base 14..15: mod_base = OTHER; note R-N-(1,3-dimethylimidazolidin-2-ylidene)phosphoramidate
  modified_base 15: mod_base = OTHER; note = 2-fluororibose uracil
  modified_base 16: mod_base = cm
  modified_base 16..17: mod_base = OTHER; note = S-phosphorothioate
  modified_base 17: mod_base = OTHER; note = 2-fluororibose cytosine
  modified_base 17..18: mod_base = OTHER; note = S-phosphorothioate
  modified_base 18: mod_base = OTHER; note = 2-fluororibose cytosine
  modified_base 18..19: mod_base = OTHER; note = S-phosphorothioate
  modified_base 19: mod_base = OTHER; note = 2-fluororibose uracil
  modified_base 19..20: mod_base = OTHER; note R-N-(1,3-dimethylimidazolidin-2-ylidene)phosphoramidate
  modified_base 20: mod_base = um
  modified_base 20..21: mod_base = OTHER; note = S-phosphorothioate
  modified_base 21: mod_base = um
  modified_base 22: mod_base = OTHER; note = 2-fluororibose cytosine
  modified_base 22..23: mod_base = OTHER; note = S-phosphorothioate
  modified_base 23: mod_base = OTHER; note = deoxyribose thymine
  modified_base 23..24: mod_base = OTHER; note = S-phosphorothioate
  modified_base 24: mod_base = OTHER; note = deoxyribose uracil (position 3 connectivity)
  modified_base 24..25: mod_base = OTHER; note = S-phosphorothioate
  modified_base 25: mod_base = OTHER; note = deoxyribose inosine
  modified_base 25..26: mod_base = OTHER; note S-N-(1,3-dimethylimidazolidin-2-ylidene)phosphoramidate
  modified_base 26: mod_base = um
  modified_base 27: mod_base = OTHER; note = 2-fluororibose cytosine
  modified_base 27..28: mod_base = OTHER; note = S-phosphorothioate
  modified_base 28: mod_base = gm
  modified_base 28..29: mod_base = OTHER; note = S-phosphorothioate
  modified_base 29: mod_base = OTHER; note = 2-O-methylribose adenine
  modified_base 29..30: mod_base = OTHER; note R-N-(1,3-dimethylimidazolidin-2-ylidene)phosphoramidate
  modified_base 30: mod_base = um
  source 1..30: mol_type = other RNA

SEQ ID NO: 421 - RNA, 30 nt, synthetic construct; identical to SEQ ID NO: 273
  misc_feature 1..30: note = Synthetic: WV-47039
  misc_feature 1..30: note = Synthetic: ADR-0104252
  modified_base 1: mod_base = cm
  modified_base 1..2: mod_base = OTHER; note R-N-(1,3-dimethylimidazolidin-2-ylidene)phosphoramidate
  modified_base 2: mod_base = cm
  modified_base 2..3: mod_base = OTHER; note = S-phosphorothioate
  modified_base 3: mod_base = cm
  modified_base 3..4: mod_base = OTHER; note = S-phosphorothioate
  modified_base 4: mod_base = OTHER; note = 2-fluororibose adenine
  modified_base 4..5: mod_base = OTHER; note = S-phosphorothioate
  modified_base 5: mod_base = OTHER; note = 2-fluororibose guanine
  modified_base 5..6: mod_base = OTHER; note = S-phosphorothioate
  modified_base 6: mod_base = cm
  modified_base 7: mod_base = OTHER; note = 2-O-methylribose adenine
  modified_base 7..8: mod_base = OTHER; note = S-phosphorothioate
  modified_base 8: mod_base = OTHER; note = 2-fluororibose guanine
  modified_base 8..9: mod_base = OTHER; note = S-phosphorothioate
  modified_base 9: mod_base = OTHER; note = 2-fluororibose cytosine
  modified_base 10: mod_base = um
  modified_base 10..11: mod_base = OTHER; note = S-phosphorothioate
  modified_base 11: mod_base = um
  modified_base 11..12: mod_base = OTHER; note R-N-(1,3-dimethylimidazolidin-2-ylidene)phosphoramidate
  modified_base 12: mod_base = OTHER; note = 2-fluororibose cytosine
  modified_base 13: mod_base = OTHER; note = 2-fluororibose adenine
  modified_base 13..14: mod_base = OTHER; note = S-phosphorothioate
  modified_base 14: mod_base = gm
  modified_base 14..15: mod_base = OTHER; note R-N-(1,3-dimethylimidazolidin-2-ylidene)phosphoramidate
  modified_base 15: mod_base = OTHER; note = 2-fluororibose uracil
  modified_base 16: mod_base = cm
  modified_base 16..17: mod_base = OTHER; note = S-phosphorothioate
  modified_base 17: mod_base = OTHER; note = 2-fluororibose cytosine
  modified_base 17..18: mod_base = OTHER; note = S-phosphorothioate
  modified_base 18: mod_base = OTHER; note = 2-fluororibose cytosine
  modified_base 18..19: mod_base = OTHER; note = S-phosphorothioate
  modified_base 19: mod_base = OTHER; note = 2-fluororibose uracil
  modified_base 19..20: mod_base = OTHER; note = S-phosphorothioate
  modified_base 20: mod_base = um
  modified_base 21: mod_base = um
  modified_base 22: mod_base = OTHER; note = 2-fluororibose cytosine
  modified_base 22..23: mod_base = OTHER; note = S-phosphorothioate
  modified_base 23: mod_base = OTHER; note = deoxyribose thymine
  modified_base 23..24: mod_base = OTHER; note = S-phosphorothioate
  modified_base 24: mod_base = OTHER; note = deoxyribose uracil (position 3 connectivity)
  modified_base 24..25: mod_base = OTHER; note = S-phosphorothioate
  modified_base 25: mod_base = OTHER; note = deoxyribose inosine
  modified_base 25..26: mod_base = OTHER; note S-N-(1,3-dimethylimidazolidin-2-ylidene)phosphoramidate
  modified_base 26: mod_base = um
  modified_base 27: mod_base = OTHER; note = 2-fluororibose cytosine
  modified_base 27..28: mod_base = OTHER; note = S-phosphorothioate
  modified_base 28: mod_base = gm
  modified_base 28..29: mod_base = OTHER; note = S-phosphorothioate
  modified_base 29: mod_base = OTHER; note = 2-O-methylribose adenine
  modified_base 29..30: mod_base = OTHER; note R-N-(1,3-dimethylimidazolidin-2-ylidene)phosphoramidate
  modified_base 30: mod_base = um
  source 1..30: mol_type = other RNA

SEQ ID NO: 422 - RNA, 30 nt, synthetic construct; identical to SEQ ID NO: 273
  misc_feature 1..30: note = Synthetic: WV-47040
  misc_feature 1..30: note = Synthetic: ADR-0104277
  modified_base 1: mod_base = cm
  modified_base 1..2: mod_base = OTHER; note R-N-(1,3-dimethylimidazolidin-2-ylidene)phosphoramidate
  modified_base 2: mod_base = cm
  modified_base 2..3: mod_base = OTHER; note = S-phosphorothioate
  modified_base 3: mod_base = cm
  modified_base 3..4: mod_base = OTHER; note = S-phosphorothioate
  modified_base 4: mod_base = OTHER; note = 2-fluororibose adenine
  modified_base 4..5: mod_base = OTHER; note = S-phosphorothioate
  modified_base 5: mod_base = OTHER; note = 2-fluororibose guanine
  modified_base 5..6: mod_base = OTHER; note = S-phosphorothioate
  modified_base 6: mod_base = cm
  modified_base 7: mod_base = OTHER; note = 2-O-methylribose adenine
  modified_base 8: mod_base = OTHER; note = 2-fluororibose guanine
  modified_base 8..9: mod_base = OTHER; note = S-phosphorothioate
  modified_base 9: mod_base = OTHER; note = 2-fluororibose cytosine
  modified_base 9..10: mod_base = OTHER; note = S-phosphorothioate
  modified_base 10: mod_base = um
  modified_base 11: mod_base = um
  modified_base 11..12: mod_base = OTHER; note R-N-(1,3-dimethylimidazolidin-2-ylidene)phosphoramidate
  modified_base 12: mod_base = OTHER; note = 2-fluororibose cytosine
  modified_base 13: mod_base = OTHER; note = 2-fluororibose adenine
  modified_base 13..14: mod_base = OTHER; note = S-phosphorothioate
  modified_base 14: mod_base = gm
  modified_base 14..15: mod_base = OTHER; note R-N-(1,3-dimethylimidazolidin-2-ylidene)phosphoramidate
  modified_base 15: mod_base = OTHER; note = 2-fluororibose uracil
  modified_base 16: mod_base = cm
  modified_base 16..17: mod_base = OTHER; note = S-phosphorothioate
  modified_base 17: mod_base = OTHER; note = 2-fluororibose cytosine
  modified_base 17..18: mod_base = OTHER; note = S-phosphorothioate
  modified_base 18: mod_base = OTHER; note = 2-fluororibose cytosine
  modified_base 18..19: mod_base = OTHER; note = S-phosphorothioate
  modified_base 19: mod_base = um
  modified_base 19..20: mod_base = OTHER; note R-N-(1,3-dimethylimidazolidin-2-ylidene)phosphoramidate
  modified_base 20: mod_base = OTHER; note = 2-fluororibose uracil
  modified_base 21: mod_base = um
  modified_base 22: mod_base = OTHER; note = 2-fluororibose cytosine
  modified_base 22..23: mod_base = OTHER; note = S-phosphorothioate
  modified_base 23: mod_base = OTHER; note = deoxyribose thymine
  modified_base 23..24: mod_base = OTHER; note = S-phosphorothioate
  modified_base 24: mod_base = OTHER; note = deoxyribose uracil (position 3 connectivity)
  modified_base 24..25: mod_base = OTHER; note = S-phosphorothioate
  modified_base 25: mod_base = OTHER; note = deoxyribose inosine
  modified_base 25..26: mod_base = OTHER; note S-N-(1,3-dimethylimidazolidin-2-ylidene)phosphoramidate
  modified_base 26: mod_base = um
  modified_base 27: mod_base = OTHER; note = 2-fluororibose cytosine
  modified_base 27..28: mod_base = OTHER; note = S-phosphorothioate
  modified_base 28: mod_base = gm
  modified_base 28..29: mod_base = OTHER; note = S-phosphorothioate
  modified_base 29: mod_base = OTHER; note = 2-O-methylribose adenine
  modified_base 29..30: mod_base = OTHER; note R-N-(1,3-dimethylimidazolidin-2-ylidene)phosphoramidate
  modified_base 30: mod_base = um
  source 1..30: mol_type = other RNA

SEQ ID NO: 423 - RNA, 30 nt, synthetic construct; identical to SEQ ID NO: 273
  misc_feature 1..30: note = Synthetic: WV-47041
  misc_feature 1..30: note = Synthetic: ADR-0104253
  modified_base 1: mod_base = cm
  modified_base 1..2: mod_base = OTHER; note R-N-(1,3-dimethylimidazolidin-2-ylidene)phosphoramidate
  modified_base 2: mod_base = cm
  modified_base 2..3: mod_base = OTHER; note = S-phosphorothioate
  modified_base 3: mod_base = cm
  modified_base 3..4: mod_base = OTHER; note = S-phosphorothioate
  modified_base 4: mod_base = OTHER; note = 2-fluororibose adenine
  modified_base 4..5: mod_base = OTHER; note = S-phosphorothioate
  modified_base 5: mod_base = OTHER; note = 2-fluororibose guanine
  modified_base 5..6: mod_base = OTHER; note = S-phosphorothioate
  modified_base 6: mod_base = cm
  modified_base 7: mod_base = OTHER; note = 2-O-methylribose adenine
  modified_base 7..8: mod_base = OTHER; note = S-phosphorothioate
  modified_base 8: mod_base = OTHER; note = 2-fluororibose guanine
  modified_base 8..9: mod_base = OTHER; note = S-phosphorothioate
  modified_base 9: mod_base = OTHER; note = 2-fluororibose cytosine
  modified_base 10: mod_base = um
  modified_base 10..11: mod_base = OTHER; note = S-phosphorothioate
  modified_base 11: mod_base = um
  modified_base 11..12: mod_base = OTHER; note R-N-(1,3-dimethylimidazolidin-2-ylidene)phosphoramidate
  modified_base 12: mod_base = OTHER; note = 2-fluororibose cytosine
  modified_base 13: mod_base = OTHER; note = 2-fluororibose adenine
  modified_base 13..14: mod_base = OTHER; note = S-phosphorothioate
  modified_base 14: mod_base = gm
  modified_base 14..15: mod_base = OTHER; note R-N-(1,3-dimethylimidazolidin-2-ylidene)phosphoramidate
  modified_base 15: mod_base = OTHER; note = 2-fluororibose uracil
  modified_base 16: mod_base = cm
  modified_base 16..17: mod_base = OTHER; note = S-phosphorothioate
  modified_base 17: mod_base = OTHER; note = 2-fluororibose cytosine
  modified_base 17..18: mod_base = OTHER; note = S-phosphorothioate
  modified_base 18: mod_base = OTHER; note = 2-fluororibose cytosine
  modified_base 18..19: mod_base = OTHER; note = S-phosphorothioate
  modified_base 19: mod_base = um
  modified_base 19..20: mod_base = OTHER; note R-N-(1,3-dimethylimidazolidin-2-ylidene)phosphoramidate
  modified_base 20: mod_base = OTHER; note = 2-fluororibose uracil
  modified_base 20..21: mod_base = OTHER; note = S-phosphorothioate
  modified_base 21: mod_base = um
  modified_base 22: mod_base = OTHER; note = 2-fluororibose cytosine
  modified_base 22..23: mod_base = OTHER; note = S-phosphorothioate
  modified_base 23: mod_base = OTHER; note = deoxyribose thymine
  modified_base 23..24: mod_base = OTHER; note = S-phosphorothioate
  modified_base 24: mod_base = OTHER; note = deoxyribose uracil (position 3 connectivity)
  modified_base 24..25: mod_base = OTHER; note = S-phosphorothioate
  modified_base 25: mod_base = OTHER; note = deoxyribose inosine
  modified_base 25..26: mod_base = OTHER; note S-N-(1,3-dimethylimidazolidin-2-ylidene)phosphoramidate
  modified_base 26: mod_base = um
  modified_base 27: mod_base = OTHER; note = 2-fluororibose cytosine
  modified_base 27..28: mod_base = OTHER; note = S-phosphorothioate
  modified_base 28: mod_base = gm
  modified_base 28..29: mod_base = OTHER; note = S-phosphorothioate
  modified_base 29: mod_base = OTHER; note = 2-O-methylribose adenine
  modified_base 29..30: mod_base = OTHER; note R-N-(1,3-dimethylimidazolidin-2-ylidene)phosphoramidate
  modified_base 30: mod_base = um
  source 1..30: mol_type = other RNA

SEQ ID NO: 424 - RNA, 30 nt, synthetic construct; identical to SEQ ID NO: 273
  misc_feature 1..30: note = Synthetic: WV-47042
  misc_feature 1..30: note = Synthetic: ADR-0104094
  modified_base 1: mod_base = cm
  modified_base 1..2: mod_base = OTHER; note R-N-(1,3-dimethylimidazolidin-2-ylidene)phosphoramidate
  modified_base 2: mod_base = cm
  modified_base 2..3: mod_base = OTHER; note = S-phosphorothioate
  modified_base 3: mod_base = cm
  modified_base 3..4: mod_base = OTHER; note = S-phosphorothioate
  modified_base 4: mod_base = OTHER; note = 2-fluororibose adenine
  modified_base 4..5: mod_base = OTHER; note = S-phosphorothioate
  modified_base 5: mod_base = OTHER; note = 2-fluororibose guanine
  modified_base 5..6: mod_base = OTHER; note = S-phosphorothioate
  modified_base 6: mod_base = OTHER; note = 2-O-methoxyethylribose 5-methyl-cytidine
  modified_base 7: mod_base = OTHER; note = 2-O-methylribose adenine
  modified_base 7..8: mod_base = OTHER; note = S-phosphorothioate
  modified_base 8: mod_base = OTHER; note = 2-fluororibose guanine
  modified_base 8..9: mod_base = OTHER; note = S-phosphorothioate
  modified_base 9: mod_base = OTHER; note = 2-fluororibose cytosine
  modified_base 10: mod_base = OTHER; note = 2-O-methoxyethylribose thymine
  modified_base 10..11: mod_base = OTHER; note = S-phosphorothioate
  modified_base 11: mod_base = OTHER; note = 2-fluororibose uracil
  modified_base 11..12: mod_base = OTHER; note R-N-(1,3-dimethylimidazolidin-2-ylidene)phosphoramidate
  modified_base 12: mod_base = cm
  modified_base 13: mod_base = OTHER; note = 2-fluororibose adenine
  modified_base 13..14: mod_base = OTHER; note = S-phosphorothioate
  modified_base 14: mod_base = OTHER; note = 2-fluororibose guanine
  modified_base 14..15: mod_base = OTHER; note R-N-(1,3-dimethylimidazolidin-2-ylidene)phosphoramidate
  modified_base 15: mod_base = OTHER; note = 2-fluororibose uracil
  modified_base 16: mod_base = cm
  modified_base 16..17: mod_base = OTHER; note = S-phosphorothioate
  modified_base 17: mod_base = OTHER; note = 2-fluororibose cytosine
  modified_base 17..18: mod_base = OTHER; note = S-phosphorothioate
  modified_base 18: mod_base = OTHER; note = 2-fluororibose cytosine
  modified_base 18..19: mod_base = OTHER; note = S-phosphorothioate
  modified_base 19: mod_base = OTHER; note = 2-fluororibose uracil
  modified_base 19..20: mod_base = OTHER; note R-N-(1,3-dimethylimidazolidin-2-ylidene)phosphoramidate
  modified_base 20: mod_base = um
  modified_base 20..21: mod_base = OTHER; note = S-phosphorothioate
  modified_base 21: mod_base = OTHER; note = 2-O-methoxyethylribose thymine
  modified_base 22: mod_base = OTHER; note = 2-fluororibose cytosine
  modified_base 22..23: mod_base = OTHER; note = S-phosphorothioate
  modified_base 23: mod_base = OTHER; note = deoxyribose thymine
  modified_base 23..24: mod_base = OTHER; note = S-phosphorothioate
  modified_base 24: mod_base = OTHER; note = deoxyribose uracil (position 3 connectivity)
  modified_base 24..25: mod_base = OTHER; note = S-phosphorothioate
  modified_base 25: mod_base = OTHER; note = deoxyribose inosine
  modified_base 25..26: mod_base = OTHER; note S-N-(1,3-dimethylimidazolidin-2-ylidene)phosphoramidate
  modified_base 26: mod_base = um
  modified_base 27: mod_base = OTHER; note = 2-fluororibose cytosine
  modified_base 27..28: mod_base = OTHER; note = S-phosphorothioate
  modified_base 28: mod_base = gm
  modified_base 28..29: mod_base = OTHER; note = S-phosphorothioate
  modified_base 29: mod_base = OTHER; note = 2-O-methylribose adenine
  modified_base 29..30: mod_base = OTHER; note R-N-(1,3-dimethylimidazolidin-2-ylidene)phosphoramidate
  modified_base 30: mod_base = um
  source 1..30: mol_type = other RNA

SEQ ID NO: 425 - RNA, 23 nt, synthetic construct
  misc_feature 1..23: note = Synthetic: WV-47141
  misc_feature 1..23: note = Synthetic: SSR-0105241
  modified_base 1: mod_base = um
  modified_base 1..2: mod_base = OTHER; note = phosphorothioate
  modified_base 2: mod_base = OTHER; note = 2-fluororibose guanine
  modified_base 2..3: mod_base = OTHER; note = phosphorothioate
  modified_base 3: mod_base = um
  modified_base 4: mod_base = um
  modified_base 5: mod_base = OTHER; note = 2-O-methylribose adenine
  modified_base 6: mod_base = OTHER; note = 2-fluororibose adenine
  modified_base 7: mod_base = OTHER; note = 2-O-methylribose adenine
  modified_base 8: mod_base = cm
  modified_base 9: mod_base = OTHER; note = 2-O-methylribose adenine
  modified_base 10: mod_base = um
  modified_base 11: mod_base = gm
  modified_base 12: mod_base = cm
  modified_base 13: mod_base = cm
  modified_base 14: mod_base = OTHER; note = 2-fluororibose uracil
  modified_base 15: mod_base = OTHER; note = 2-O-methylribose adenine
  modified_base 16: mod_base = OTHER; note = 2-fluororibose adenine
  modified_base 17: mod_base = OTHER; note = 2-O-methylribose adenine
  modified_base 18: mod_base = cm
  modified_base 19: mod_base = gm
  modified_base 20: mod_base = cm
  modified_base 21: mod_base = um
  modified_base 21..22: mod_base = OTHER; note = phosphorothioate
  modified_base 22: mod_base = um
  modified_base 22..23: mod_base = OTHER; note = phosphorothioate
  modified_base 23: mod_base = um
  source 1..23: mol_type = other RNA
tgttaaacatgcctaaacgcttt

SEQ ID NO: 426 - RNA, 21 nt, synthetic construct
  misc_feature 1..21: note = Synthetic: WV-47142
  misc_feature 1..21: note = Synthetic: SSR-0101740
  modified_base 1: mod_base = OTHER; note = triantennary GalNAc with C12 linker linked to 6-aminohexanol linked by phosphate to the 5' end of 2-O-methylribose adenine
  modified_base 1..2: mod_base = OTHER; note = phosphorothioate
  modified_base 2: mod_base = gm
  modified_base 3: mod_base = cm
  modified_base 4: mod_base = gm
  modified_base 5: mod_base = um
  modified_base 6: mod_base = um
  modified_base 7: mod_base = OTHER; note = 2-fluororibose uracil
  modified_base 8: mod_base = OTHER; note = 2-O-methylribose adenine
  modified_base 9: mod_base = OTHER; note = 2-fluororibose guanine
  modified_base 10: mod_base = OTHER; note = 2-fluororibose guanine
  modified_base 11: mod_base = OTHER; note = 2-fluororibose cytosine
  modified_base 12: mod_base = OTHER; note = 2-O-methylribose adenine
  modified_base 13: mod_base = um
  modified_base 14: mod_base = gm
  modified_base 15: mod_base = um
  modified_base 16: mod_base = um
  modified_base 17: mod_base = um
  modified_base 18: mod_base = OTHER; note = 2-O-methylribose adenine
  modified_base 19: mod_base = OTHER; note = 2-O-methylribose adenine
  modified_base 20: mod_base = cm
  modified_base 20..21: mod_base = OTHER; note = phosphorothioate
  modified_base 21: mod_base = OTHER; note = 2-O-methylribose adenine
  source 1..21: mol_type = other RNA
agcgtttaggcatgtttaaca

SEQ ID NO: 427 - RNA, 21 nt, synthetic construct
  misc_feature 1..21: note = Synthetic: WV-47143
  misc_feature 1..21: note = Synthetic: SSR-0101741
  modified_base 1: mod_base = OTHER; note = 6-aminohexanol linked by phosphate to the 5' end of 2-O-methylribose adenine
  modified_base 1..2: mod_base = OTHER; note = phosphorothioate
  modified_base 2: mod_base = gm
  modified_base 3: mod_base = cm
  modified_base 4: mod_base = gm
  modified_base 5: mod_base = um
  modified_base 6: mod_base = um
  modified_base 7: mod_base = OTHER; note = 2-fluororibose uracil
  modified_base 8: mod_base = OTHER; note = 2-O-methylribose adenine
  modified_base 9: mod_base = OTHER; note = 2-fluororibose guanine
  modified_base 10: mod_base = OTHER; note = 2-fluororibose guanine
  modified_base 11: mod_base = OTHER; note = 2-fluororibose cytosine
  modified_base 12: mod_base = OTHER; note = 2-O-methylribose adenine
  modified_base 13: mod_base = um
  modified_base 14: mod_base = gm
  modified_base 15: mod_base = um
  modified_base 16: mod_base = um
  modified_base 17: mod_base = um
  modified_base 18: mod_base = OTHER; note = 2-O-methylribose adenine
  modified_base 19: mod_base = OTHER; note = 2-O-methylribose adenine
  modified_base 20: mod_base = cm
  modified_base 20..21: mod_base = OTHER; note = phosphorothioate
  modified_base 21: mod_base = OTHER; note = 2-O-methylribose adenine
  source 1..21: mol_type = other RNA
agcgtttaggcatgtttaaca

SEQ ID NO: 428 - RNA, 30 nt, synthetic construct; identical to SEQ ID NO: 273
  misc_feature 1..30: note = Synthetic: WV-47339
  misc_feature 1..30: note = Synthetic: ADR-0104319
  modified_base 1: mod_base = cm
  modified_base 1..2: mod_base = OTHER; note = R-6-[(2Z)-2-[(disub phosphoryl)imino]-3-methylimidazolidin-1-yl]hexan-1-amine
  modified_base 2: mod_base = cm
  modified_base 2..3: mod_base = OTHER; note = S-phosphorothioate
  modified_base 3: mod_base = cm
  modified_base 3..4: mod_base = OTHER; note = S-phosphorothioate
  modified_base 4: mod_base = OTHER; note = 2-fluororibose adenine
  modified_base 4..5: mod_base = OTHER; note = S-phosphorothioate
  modified_base 5: mod_base = OTHER; note = 2-fluororibose guanine
  modified_base 5..6: mod_base = OTHER; note = S-phosphorothioate
  modified_base 6: mod_base = cm
  modified_base 7: mod_base = OTHER; note = 2-O-methylribose adenine
  modified_base 7..8: mod_base = OTHER; note = S-phosphorothioate
  modified_base 8: mod_base = OTHER; note = 2-fluororibose guanine
  modified_base 8..9: mod_base = OTHER; note = S-phosphorothioate
  modified_base 9: mod_base = OTHER; note = 2-fluororibose cytosine
  modified_base 10: mod_base = um
  modified_base 10..11: mod_base = OTHER; note = S-phosphorothioate
  modified_base 11: mod_base = OTHER; note = 2-fluororibose uracil
  modified_base 11..12: mod_base = OTHER; note R-N-(1,3-dimethylimidazolidin-2-ylidene)phosphoramidate
  modified_base 12: mod_base = cm
  modified_base 13: mod_base = OTHER; note = 2-fluororibose adenine
  modified_base 13..14: mod_base = OTHER; note = S-phosphorothioate
  modified_base 14: mod_base = OTHER; note = 2-fluororibose guanine
  modified_base 14..15: mod_base = OTHER; note R-N-(1,3-dimethylimidazolidin-2-ylidene)phosphoramidate
  modified_base 15: mod_base = OTHER; note = 2-fluororibose uracil
  modified_base 16: mod_base = cm
  modified_base 16..17: mod_base = OTHER; note = S-phosphorothioate
  modified_base 17: mod_base = OTHER; note = 2-fluororibose cytosine
  modified_base 17..18: mod_base = OTHER; note = S-phosphorothioate
  modified_base 18: mod_base = OTHER; note = 2-fluororibose cytosine
  modified_base 18..19: mod_base = OTHER; note = S-phosphorothioate
  modified_base 19: mod_base = OTHER; note = 2-fluororibose uracil
  modified_base 19..20: mod_base = OTHER; note = S-phosphorothioate
  modified_base 20: mod_base = um
  modified_base 21: mod_base = um
  modified_base 22: mod_base = OTHER; note = 2-fluororibose cytosine
  modified_base 22..23: mod_base = OTHER; note = S-phosphorothioate
  modified_base 23: mod_base = OTHER; note = deoxyribose thymine
  modified_base 23..24: mod_base = OTHER; note = S-phosphorothioate
  modified_base 24: mod_base = OTHER; note = deoxyribose uracil (position 3 connectivity)
  modified_base 24..25: mod_base = OTHER; note = S-phosphorothioate
  modified_base 25: mod_base = OTHER; note = deoxyribose inosine
  modified_base 25..26: mod_base = OTHER; note S-N-(1,3-dimethylimidazolidin-2-ylidene)phosphoramidate
  modified_base 26: mod_base = um
  modified_base 27: mod_base = OTHER; note = 2-fluororibose cytosine
  modified_base 27..28: mod_base = OTHER; note = S-phosphorothioate
  modified_base 28: mod_base = gm
  modified_base 28..29: mod_base = OTHER; note = S-phosphorothioate
  modified_base 29: mod_base = OTHER; note = 2-O-methylribose adenine
  modified_base 29..30: mod_base = OTHER; note R-N-(1,3-dimethylimidazolidin-2-ylidene)phosphoramidate
  modified_base 30: mod_base = um
  source 1..30: mol_type = other RNA

SEQ ID NO: 429 - RNA, 30 nt, synthetic construct; identical to SEQ ID NO: 273
  misc_feature 1..30: note = Synthetic: WV-47340
  misc_feature 1..30: note = Synthetic: ADR-0105059
  modified_base 1: mod_base = cm
  modified_base 1..2: mod_base = OTHER; note = triantennary GalNAc with C12 linker linked to R-6-[(2Z)-2-[(disub phosphoryl)imino]-3-methylimidazolidin-1-yl]hexan-1-amine
  modified_base 2: mod_base = cm
  modified_base 2..3: mod_base = OTHER; note = S-phosphorothioate
  modified_base 3: mod_base = cm
  modified_base 3..4: mod_base = OTHER; note = S-phosphorothioate
  modified_base 4: mod_base = OTHER; note = 2-fluororibose adenine
  modified_base 4..5: mod_base = OTHER; note = S-phosphorothioate
  modified_base 5: mod_base = OTHER; note = 2-fluororibose guanine
  modified_base 5..6: mod_base = OTHER; note = S-phosphorothioate
  modified_base 6: mod_base = cm
  modified_base 7: mod_base = OTHER; note = 2-O-methylribose adenine
  modified_base 7..8: mod_base = OTHER; note = S-phosphorothioate
  modified_base 8: mod_base = OTHER; note = 2-fluororibose guanine
  modified_base 8..9: mod_base = OTHER; note = S-phosphorothioate
  modified_base 9: mod_base = OTHER; note = 2-fluororibose cytosine
  modified_base 10: mod_base = um
  modified_base 10..11: mod_base = OTHER; note = S-phosphorothioate
  modified_base 11: mod_base = OTHER; note = 2-fluororibose uracil
  modified_base 11..12: mod_base = OTHER; note R-N-(1,3-dimethylimidazolidin-2-ylidene)phosphoramidate
  modified_base 12: mod_base = cm
  modified_base 13: mod_base = OTHER; note = 2-fluororibose adenine
  modified_base 13..14: mod_base = OTHER; note = S-phosphorothioate
  modified_base 14: mod_base = OTHER; note = 2-fluororibose guanine
  modified_base 14..15: mod_base = OTHER; note R-N-(1,3-dimethylimidazolidin-2-ylidene)phosphoramidate
  modified_base 15: mod_base = OTHER; note = 2-fluororibose uracil
  modified_base 16: mod_base = cm
  modified_base 16..17: mod_base = OTHER; note = S-phosphorothioate
  modified_base 17: mod_base = OTHER; note = 2-fluororibose cytosine
  modified_base 17..18: mod_base = OTHER; note = S-phosphorothioate
  modified_base 18: mod_base = OTHER; note = 2-fluororibose cytosine
  modified_base 18..19: mod_base = OTHER; note = S-phosphorothioate
  modified_base 19: mod_base = OTHER; note = 2-fluororibose uracil
  modified_base 19..20: mod_base = OTHER; note = S-phosphorothioate
  modified_base 20: mod_base = um
  modified_base 21: mod_base = um
  modified_base 22: mod_base = OTHER; note = 2-fluororibose cytosine
  modified_base 22..23: mod_base = OTHER; note = S-phosphorothioate
  modified_base 23: mod_base = OTHER; note = deoxyribose thymine
  modified_base 23..24: mod_base = OTHER; note = S-phosphorothioate
  modified_base 24: mod_base = OTHER; note = deoxyribose uracil (position 3 connectivity)
  modified_base 24..25: mod_base = OTHER; note = S-phosphorothioate
  modified_base 25: mod_base = OTHER; note = deoxyribose inosine
  modified_base 25..26: mod_base = OTHER; note S-N-(1,3-dimethylimidazolidin-2-ylidene)phosphoramidate
  modified_base 26: mod_base = um
  modified_base 27: mod_base = OTHER; note = 2-fluororibose cytosine
  modified_base 27..28: mod_base = OTHER; note = S-phosphorothioate
  modified_base 28: mod_base = gm
  modified_base 28..29: mod_base = OTHER; note = S-phosphorothioate
  modified_base 29: mod_base = OTHER; note = 2-O-methylribose adenine
  modified_base 29..30: mod_base = OTHER; note R-N-(1,3-dimethylimidazolidin-2-ylidene)phosphoramidate
  modified_base 30: mod_base = um
  source 1..30: mol_type = other RNA

SEQ ID NO: 430 - RNA, 30 nt, synthetic construct; identical to SEQ ID NO: 273
  misc_feature 1..30: note = Synthetic: WV-47341
  misc_feature 1..30: note = Synthetic: ADR-0104181
  modified_base 1: mod_base = cm
  modified_base 1..2: mod_base = OTHER; note R-N-(1,3-dimethylimidazolidin-2-ylidene)phosphoramidate
  modified_base 2: mod_base = cm
  modified_base 2..3: mod_base = OTHER; note = S-phosphorothioate
  modified_base 3: mod_base = cm
  modified_base 3..4: mod_base = OTHER; note = S-phosphorothioate
  modified_base 4: mod_base = OTHER; note = 2-fluororibose adenine
  modified_base 4..5: mod_base = OTHER; note = S-phosphorothioate
  modified_base 5: mod_base = OTHER; note = 2-fluororibose guanine
  modified_base 5..6: mod_base = OTHER; note = S-phosphorothioate
  modified_base 6: mod_base = cm
  modified_base 7: mod_base = OTHER; note = 2-O-methylribose adenine
  modified_base 7..8: mod_base = OTHER; note = S-phosphorothioate
  modified_base 8: mod_base = OTHER; note = 2-fluororibose guanine
  modified_base 8..9: mod_base = OTHER; note = S-phosphorothioate
  modified_base 9: mod_base = OTHER; note = 2-fluororibose cytosine
  modified_base 10: mod_base = um
  modified_base 10..11: mod_base = OTHER; note = S-phosphorothioate
  modified_base 11: mod_base = OTHER; note = 2-fluororibose uracil
  modified_base 11..12: mod_base = OTHER; note R-N-(1,3-dimethylimidazolidin-2-ylidene)phosphoramidate
  modified_base 12: mod_base = cm
  modified_base 13: mod_base = OTHER; note = 2-fluororibose adenine
  modified_base 13..14: mod_base = OTHER; note = S-phosphorothioate
  modified_base 14: mod_base = OTHER; note = 2-fluororibose guanine
  modified_base 14..15: mod_base = OTHER; note R-N-(1,3-dimethylimidazolidin-2-ylidene)phosphoramidate
  modified_base 15: mod_base = OTHER; note = 2-fluororibose uracil
  modified_base 16: mod_base = cm
  modified_base 16..17: mod_base = OTHER; note = S-phosphorothioate
  modified_base 17: mod_base = OTHER; note = 2-fluororibose cytosine
  modified_base 17..18: mod_base = OTHER; note = S-phosphorothioate
  modified_base 18: mod_base = OTHER; note = 2-fluororibose cytosine
  modified_base 18..19: mod_base = OTHER; note = S-phosphorothioate
  modified_base 19: mod_base = OTHER; note = 2-fluororibose uracil
  modified_base 19..20: mod_base = OTHER; note = S-phosphorothioate
  modified_base 20: mod_base = um
  modified_base 21: mod_base = um
  modified_base 22: mod_base = OTHER; note = 2-fluororibose cytosine
  modified_base 22..23: mod_base = OTHER; note = S-phosphorothioate
  modified_base 23: mod_base = OTHER; note = deoxyribose thymine
  modified_base 23..24: mod_base = OTHER; note = S-phosphorothioate
  modified_base 24: mod_base = OTHER; note = deoxyribose uracil (position 3 connectivity)
  modified_base 24..25: mod_base = OTHER; note = S-phosphorothioate
  modified_base 25: mod_base = OTHER; note = deoxyribose inosine
  modified_base 25..26: mod_base = OTHER; note S-N-(1,3-dimethylimidazolidin-2-ylidene)phosphoramidate
  modified_base 26: mod_base = um
  modified_base 27: mod_base = OTHER; note = 2-fluororibose cytosine
  modified_base 27..28: mod_base = OTHER; note = S-phosphorothioate
  modified_base 28: mod_base = gm
  modified_base 28..29: mod_base = OTHER; note = S-phosphorothioate
  modified_base 29: mod_base = OTHER; note = 2-O-methylribose adenine
  modified_base 29..30: mod_base = OTHER; note = R-6-[(2Z)-2-[(disub phosphoryl)imino]-3-methylimidazolidin-1-yl]hexan-1-amine
  modified_base 30: mod_base = um
  source 1..30: mol_type = other RNA

SEQ ID NO: 431 - RNA, 30 nt, synthetic construct; identical to SEQ ID NO: 273
  misc_feature 1..30: note = Synthetic: WV-47342
  misc_feature 1..30: note = Synthetic: ADR-0105058
  modified_base 1: mod_base = cm
  modified_base 1..2: mod_base = OTHER; note R-N-(1,3-dimethylimidazolidin-2-ylidene)phosphoramidate
  modified_base 2: mod_base = cm
  modified_base 2..3: mod_base = OTHER; note = S-phosphorothioate
  modified_base 3: mod_base = cm
  modified_base 3..4: mod_base = OTHER; note = S-phosphorothioate
  modified_base 4: mod_base = OTHER; note = 2-fluororibose adenine
  modified_base 4..5: mod_base = OTHER; note = S-phosphorothioate
  modified_base 5: mod_base = OTHER; note = 2-fluororibose guanine
  modified_base 5..6: mod_base = OTHER; note = S-phosphorothioate
  modified_base 6: mod_base = cm
  modified_base 7: mod_base = OTHER; note = 2-O-methylribose adenine
  modified_base 7..8: mod_base = OTHER; note = S-phosphorothioate
  modified_base 8: mod_base = OTHER; note = 2-fluororibose guanine
  modified_base 8..9: mod_base = OTHER; note = S-phosphorothioate
  modified_base 9: mod_base = OTHER; note = 2-fluororibose cytosine
  modified_base 10: mod_base = um
  modified_base 10..11: mod_base = OTHER; note = S-phosphorothioate
  modified_base 11: mod_base = OTHER; note = 2-fluororibose uracil
  modified_base 11..12: mod_base = OTHER; note R-N-(1,3-dimethylimidazolidin-2-ylidene)phosphoramidate
  modified_base 12: mod_base = cm
  modified_base 13: mod_base = OTHER; note = 2-fluororibose adenine
  modified_base 13..14: mod_base = OTHER; note = S-phosphorothioate
  modified_base 14: mod_base = OTHER; note = 2-fluororibose guanine
  modified_base 14..15: mod_base = OTHER; note R-N-(1,3-dimethylimidazolidin-2-ylidene)phosphoramidate
  modified_base 15: mod_base = OTHER; note = 2-fluororibose uracil
  modified_base 16: mod_base = cm
  modified_base 16..17: mod_base = OTHER; note = S-phosphorothioate
  modified_base 17: mod_base = OTHER; note = 2-fluororibose cytosine
  modified_base 17..18: mod_base = OTHER; note = S-phosphorothioate
  modified_base 18: mod_base = OTHER; note = 2-fluororibose cytosine
  modified_base 18..19: mod_base = OTHER; note = S-phosphorothioate
  modified_base 19: mod_base = OTHER; note = 2-fluororibose uracil
  modified_base 19..20: mod_base = OTHER; note = S-phosphorothioate
  modified_base 20: mod_base = um
  modified_base 21: mod_base = um
  modified_base 22: mod_base = OTHER; note = 2-fluororibose cytosine
  modified_base 22..23: mod_base = OTHER; note = S-phosphorothioate
  modified_base 23: mod_base = OTHER; note = deoxyribose thymine
  modified_base 23..24: mod_base = OTHER; note = S-phosphorothioate
  modified_base 24: mod_base = OTHER; note = deoxyribose uracil (position 3 connectivity)
  modified_base 24..25: mod_base = OTHER; note = S-phosphorothioate
  modified_base 25: mod_base = OTHER; note = deoxyribose inosine
  modified_base 25..26: mod_base = OTHER; note S-N-(1,3-dimethylimidazolidin-2-ylidene)phosphoramidate
  modified_base 26: mod_base = um
  modified_base 27: mod_base = OTHER; note = 2-fluororibose cytosine
  modified_base 27..28: mod_base = OTHER; note = S-phosphorothioate
  modified_base 28: mod_base = gm
  modified_base 28..29: mod_base = OTHER; note = S-phosphorothioate
  modified_base 29: mod_base = OTHER; note = 2-O-methylribose adenine
  modified_base 29..30: mod_base = OTHER; note = triantennary GalNAc with C12 linker linked to R-6-[(2Z)-2-[(disub phosphoryl)imino]-3-methylimidazolidin-1-yl]hexan-1-amine
  modified_base 30: mod_base = um
  source 1..30: mol_type = other RNA

SEQ ID NO: 432 - RNA, 30 nt, synthetic construct; identical to SEQ ID NO: 305
  misc_feature 1..30: note = Synthetic: WV-47343
  misc_feature 1..30: note = Synthetic: ADR-0104133
  modified_base 1: mod_base = cm
  modified_base 1..2: mod_base = OTHER; note R-N-(1,3-dimethylimidazolidin-2-ylidene)phosphoramidate
  modified_base 2: mod_base = cm
  modified_base 2..3: mod_base = OTHER; note = S-phosphorothioate
  modified_base 3: mod_base = cm
  modified_base 3..4: mod_base = OTHER; note = S-phosphorothioate
  modified_base 4: mod_base = OTHER; note = 2-fluororibose adenine
  modified_base 4..5: mod_base = OTHER; note = S-phosphorothioate
  modified_base 5: mod_base = OTHER; note = 2-fluororibose guanine
  modified_base 5..6: mod_base = OTHER; note = S-phosphorothioate
  modified_base 6: mod_base = cm
  modified_base 7: mod_base = OTHER; note = 2-O-methylribose adenine
  modified_base 7..8: mod_base = OTHER; note = S-phosphorothioate
  modified_base 8: mod_base = OTHER; note = 2-fluororibose guanine
  modified_base 8..9: mod_base = OTHER; note = S-phosphorothioate
  modified_base 9: mod_base = OTHER; note = 2-fluororibose cytosine
  modified_base 10: mod_base = um
  modified_base 10..11: mod_base = OTHER; note = S-phosphorothioate
  modified_base 11: mod_base = OTHER; note = 2-fluororibose uracil
  modified_base 11..12: mod_base = OTHER; note R-N-(1,3-dimethylimidazolidin-2-ylidene)phosphoramidate
  modified_base 12: mod_base = cm
  modified_base 13: mod_base = OTHER; note = 2-fluororibose adenine
  modified_base 13..14: mod_base = OTHER; note = S-phosphorothioate
  modified_base 14: mod_base = OTHER; note = 2-fluororibose guanine
  modified_base 14..15: mod_base = OTHER; note R-N-(1,3-dimethylimidazolidin-2-ylidene)phosphoramidate
  modified_base 15: mod_base = OTHER; note = 2-fluororibose uracil
  modified_base 16: mod_base = cm
  modified_base 16..17: mod_base = OTHER; note = S-phosphorothioate
  modified_base 17: mod_base = OTHER; note = 2-fluororibose cytosine
  modified_base 17..18: mod_base = OTHER; note = S-phosphorothioate
  modified_base 18: mod_base = OTHER; note = 2-fluororibose cytosine
  modified_base 18..19: mod_base = OTHER; note = S-phosphorothioate
  modified_base 19: mod_base = OTHER; note = 2-fluororibose uracil
  modified_base 19..20: mod_base = OTHER; note = S-phosphorothioate
  modified_base 20: mod_base = um
  modified_base 21: mod_base = um
  modified_base 22: mod_base = OTHER; note = 2-fluororibose cytosine
  modified_base 22..23: mod_base = OTHER; note = S-phosphorothioate
  modified_base 23: mod_base = OTHER; note = deoxyribose cytosine
  modified_base 23..24: mod_base = OTHER; note = S-phosphorothioate
  modified_base 24: mod_base = OTHER; note = deoxyribose uracil (position 3 connectivity)
  modified_base 24..25: mod_base = OTHER; note = S-phosphorothioate
  modified_base 25: mod_base = OTHER; note = deoxyribose inosine
  modified_base 25..26: mod_base = OTHER; note S-N-(1,3-dimethylimidazolidin-2-ylidene)phosphoramidate
  modified_base 26: mod_base = um
  modified_base 27: mod_base = OTHER; note = 2-fluororibose cytosine
  modified_base 27..28: mod_base = OTHER; note = S-phosphorothioate
  modified_base 28: mod_base = gm
  modified_base 28..29: mod_base = OTHER; note = S-phosphorothioate
  modified_base 29: mod_base = OTHER; note = 2-O-methylribose adenine
  modified_base 29..30: mod_base = OTHER; note R-N-(1,3-dimethylimidazolidin-2-ylidene)phosphoramidate
  modified_base 30: mod_base = um
  source 1..30: mol_type = other RNA

SEQ ID NO: 433 - RNA, 30 nt, synthetic construct; identical to SEQ ID NO: 305
  misc_feature 1..30: note = Synthetic: WV-47344
  misc_feature 1..30: note = Synthetic: ADR-0104132
  modified_base 1: mod_base = cm
  modified_base 1..2: mod_base = OTHER; note R-N-(1,3-dimethylimidazolidin-2-ylidene)phosphoramidate
  modified_base 2: mod_base = cm
  modified_base 2..3: mod_base = OTHER; note = S-phosphorothioate
  modified_base 3: mod_base = cm
  modified_base 3..4: mod_base = OTHER; note = S-phosphorothioate
  modified_base 4: mod_base = OTHER; note = 2-fluororibose adenine
  modified_base 4..5: mod_base = OTHER; note = S-phosphorothioate
  modified_base 5: mod_base = OTHER; note = 2-fluororibose guanine
  modified_base 5..6: mod_base = OTHER; note = S-phosphorothioate
  modified_base 6: mod_base = cm
  modified_base 7: mod_base = OTHER; note = 2-O-methylribose adenine
  modified_base 7..8: mod_base = OTHER; note = S-phosphorothioate
  modified_base 8: mod_base = OTHER; note = 2-fluororibose guanine
  modified_base 8..9: mod_base = OTHER; note = S-phosphorothioate
  modified_base 9: mod_base = OTHER; note = 2-fluororibose cytosine
  modified_base 10: mod_base = um
  modified_base 10..11: mod_base = OTHER; note = S-phosphorothioate
  modified_base 11: mod_base = OTHER; note = 2-fluororibose uracil
  modified_base 11..12: mod_base = OTHER; note R-N-(1,3-dimethylimidazolidin-2-ylidene)phosphoramidate
  modified_base 12: mod_base = cm
  modified_base 13: mod_base = OTHER; note = 2-fluororibose adenine
  modified_base 13..14: mod_base = OTHER; note = S-phosphorothioate
  modified_base 14: mod_base = OTHER; note = 2-fluororibose guanine
  modified_base 14..15: mod_base = OTHER; note R-N-(1,3-dimethylimidazolidin-2-ylidene)phosphoramidate
  modified_base 15: mod_base = OTHER; note = 2-fluororibose uracil
  modified_base 16: mod_base = cm
  modified_base 16..17: mod_base = OTHER; note = S-phosphorothioate
  modified_base 17: mod_base = OTHER; note = 2-fluororibose cytosine
  modified_base 17..18: mod_base = OTHER; note = S-phosphorothioate
  modified_base 18: mod_base = OTHER; note = 2-fluororibose cytosine
  modified_base 18..19: mod_base = OTHER; note = S-phosphorothioate
  modified_base 19: mod_base = OTHER; note = 2-fluororibose uracil
  modified_base 19..20: mod_base = OTHER; note = S-phosphorothioate
  modified_base 20: mod_base = um
  modified_base 21: mod_base = um
  modified_base 22: mod_base = OTHER; note = 2-fluororibose cytosine
  modified_base 22..23: mod_base = OTHER; note = S-phosphorothioate
  modified_base 23: mod_base = OTHER; note = deoxyribose cytosine
  modified_base 23..24: mod_base = OTHER; note = S-phosphorothioate
  modified_base 24: mod_base = OTHER; note = deoxyribose uracil (position 3 connectivity)
  modified_base 24..25: mod_base = OTHER; note = S-phosphorothioate
  modified_base 25: mod_base = OTHER; note = deoxyribose guanine
  modified_base 25..26: mod_base = OTHER; note R-N-(1,3-dimethylimidazolidin-2-ylidene)phosphoramidate
  modified_base 26: mod_base = um
  modified_base 27: mod_base = OTHER; note = 2-fluororibose cytosine
  modified_base 27..28: mod_base = OTHER; note = S-phosphorothioate
  modified_base 28: mod_base = gm
  modified_base 28..29: mod_base = OTHER; note = S-phosphorothioate
  modified_base 29: mod_base = OTHER; note = 2-O-methylribose adenine
  modified_base 29..30: mod_base = OTHER; note R-N-(1,3-dimethylimidazolidin-2-ylidene)phosphoramidate
  modified_base 30: mod_base = um
  source 1..30: mol_type = other RNA

SEQ ID NO: 434 - RNA, 30 nt, synthetic construct; identical to SEQ ID NO: 273
  misc_feature 1..30: note = Synthetic: WV-47345
  misc_feature 1..30: note = Synthetic: ADR-0104211
  modified_base 1: mod_base = cm
  modified_base 1..2: mod_base = OTHER; note R-N-(1,3-dimethylimidazolidin-2-ylidene)phosphoramidate
  modified_base 2: mod_base = cm
  modified_base 2..3: mod_base = OTHER; note = S-phosphorothioate
  modified_base 3: mod_base = cm
  modified_base 3..4: mod_base = OTHER; note = S-phosphorothioate
  modified_base 4: mod_base = OTHER; note = 2-fluororibose adenine
  modified_base 4..5: mod_base = OTHER; note = S-phosphorothioate
  modified_base 5: mod_base = OTHER; note = 2-fluororibose guanine
  modified_base 5..6: mod_base = OTHER; note = S-phosphorothioate
  modified_base 6: mod_base = cm
  modified_base 7: mod_base = OTHER; note = 2-O-methylribose adenine
  modified_base 7..8: mod_base = OTHER; note = S-phosphorothioate
  modified_base 8: mod_base = OTHER; note = 2-fluororibose guanine
  modified_base 8..9: mod_base = OTHER; note = S-phosphorothioate
  modified_base 9: mod_base = OTHER; note = 2-fluororibose cytosine
  modified_base 10: mod_base = um
  modified_base 10..11: mod_base = OTHER; note = S-phosphorothioate
  modified_base 11: mod_base = OTHER; note = 2-fluororibose uracil
  modified_base 11..12: mod_base = OTHER; note R-N-(1,3-dimethylimidazolidin-2-ylidene)phosphoramidate
  modified_base 12: mod_base = cm
  modified_base 13: mod_base = OTHER; note = 2-fluororibose adenine
  modified_base 13..14: mod_base = OTHER; note = S-phosphorothioate
  modified_base 14: mod_base = OTHER; note = 2-fluororibose guanine
  modified_base 14..15: mod_base = OTHER; note R-N-(1,3-dimethylimidazolidin-2-ylidene)phosphoramidate
  modified_base 15: mod_base = OTHER; note = 2-fluororibose uracil
  modified_base 16: mod_base = cm
  modified_base 16..17: mod_base = OTHER; note = S-phosphorothioate
  modified_base 17: mod_base = OTHER; note = 2-fluororibose cytosine
  modified_base 17..18: mod_base = OTHER; note = S-phosphorothioate
  modified_base 18: mod_base = OTHER; note = 2-fluororibose cytosine
  modified_base 18..19: mod_base = OTHER; note = S-phosphorothioate
  modified_base 19: mod_base = OTHER; note = 2-fluororibose uracil
  modified_base 19..20: mod_base = OTHER; note = S-phosphorothioate
  modified_base 20: mod_base = um
  modified_base 21: mod_base = um
  modified_base 22: mod_base = OTHER; note = 2-fluororibose cytosine
  modified_base 22..23: mod_base = OTHER; note = S-phosphorothioate
  modified_base 23: mod_base = OTHER; note = deoxyribose thymine
  modified_base 23..24: mod_base = OTHER; note = S-phosphorothioate
  modified_base 24: mod_base = OTHER; note = deoxyribose 2-hydroxypyridine
  modified_base 24..25: mod_base = OTHER; note = S-phosphorothioate
  modified_base 25: mod_base = OTHER; note = deoxyribose inosine
  modified_base 25..26: mod_base = OTHER; note S-N-(1,3-dimethylimidazolidin-2-ylidene)phosphoramidate
  modified_base 26: mod_base = um
  modified_base 27: mod_base = OTHER; note = 2-fluororibose cytosine
  modified_base 27..28: mod_base = OTHER; note = S-phosphorothioate
  modified_base 28: mod_base = gm
  modified_base 28..29: mod_base = OTHER; note = S-phosphorothioate
  modified_base 29: mod_base = OTHER; note = 2-O-methylribose adenine
  modified_base 29..30: mod_base = OTHER; note R-N-(1,3-dimethylimidazolidin-2-ylidene)phosphoramidate
  modified_base 30: mod_base = um
  source 1..30: mol_type = other RNA

SEQ ID NO: 435 - RNA, 30 nt, synthetic construct; identical to SEQ ID NO: 273
  misc_feature 1..30: note = Synthetic: WV-47346
  misc_feature 1..30: note = Synthetic: ADR-0104203
  modified_base 1: mod_base = cm
  modified_base 1..2: mod_base = OTHER; note R-N-(1,3-dimethylimidazolidin-2-ylidene)phosphoramidate
  modified_base 2: mod_base = cm
  modified_base 2..3: mod_base = OTHER; note = S-phosphorothioate
  modified_base 3: mod_base = cm
  modified_base 3..4: mod_base = OTHER; note = S-phosphorothioate
  modified_base 4: mod_base = OTHER; note = 2-fluororibose adenine
  modified_base 4..5: mod_base = OTHER; note = S-phosphorothioate
  modified_base 5: mod_base = OTHER; note = 2-fluororibose guanine
  modified_base 5..6: mod_base = OTHER; note = S-phosphorothioate
  modified_base 6: mod_base = cm
  modified_base 7: mod_base = OTHER; note = 2-O-methylribose adenine
  modified_base 7..8: mod_base = OTHER; note = S-phosphorothioate
  modified_base 8: mod_base = OTHER; note = 2-fluororibose guanine
  modified_base 8..9: mod_base = OTHER; note = S-phosphorothioate
  modified_base 9: mod_base = OTHER; note = 2-fluororibose cytosine
  modified_base 10: mod_base = um
  modified_base 10..11: mod_base = OTHER; note = S-phosphorothioate
  modified_base 11: mod_base = OTHER; note = 2-fluororibose uracil
  modified_base 11..12: mod_base = OTHER; note R-N-(1,3-dimethylimidazolidin-2-ylidene)phosphoramidate
  modified_base 12: mod_base = cm
  modified_base 13: mod_base = OTHER; note = 2-fluororibose adenine
  modified_base 13..14: mod_base = OTHER; note = S-phosphorothioate
  modified_base 14: mod_base = OTHER; note = 2-fluororibose guanine
  modified_base 14..15: mod_base = OTHER; note R-N-(1,3-dimethylimidazolidin-2-ylidene)phosphoramidate
  modified_base 15: mod_base = OTHER; note = 2-fluororibose uracil
  modified_base 16: mod_base = cm
  modified_base 16..17: mod_base = OTHER; note = S-phosphorothioate
  modified_base 17: mod_base = OTHER; note = 2-fluororibose cytosine
  modified_base 17..18: mod_base = OTHER; note = S-phosphorothioate
  modified_base 18: mod_base = OTHER; note = 2-fluororibose cytosine
  modified_base 18..19: mod_base = OTHER; note = S-phosphorothioate
  modified_base 19: mod_base = OTHER; note = 2-fluororibose uracil
  modified_base 19..20: mod_base = OTHER; note = S-phosphorothioate
  modified_base 20: mod_base = um
  modified_base 21: mod_base = um
  modified_base 22: mod_base = OTHER; note = 2-fluororibose cytosine
  modified_base 22..23: mod_base = OTHER; note = S-phosphorothioate
  modified_base 23: mod_base = OTHER; note = deoxyribose thymine
  modified_base 23..24: mod_base = OTHER; note = S-phosphorothioate
  modified_base 24: mod_base = OTHER; note = deoxyribose 6-methyluracil (3N connectivity)
  modified_base 24..25: mod_base = OTHER; note = S-phosphorothioate
  modified_base 25: mod_base = OTHER; note = deoxyribose inosine
  modified_base 25..26: mod_base = OTHER; note S-N-(1,3-dimethylimidazolidin-2-ylidene)phosphoramidate
  modified_base 26: mod_base = um
  modified_base 27: mod_base = OTHER; note = 2-fluororibose cytosine
  modified_base 27..28: mod_base = OTHER; note = S-phosphorothioate
  modified_base 28: mod_base = gm
  modified_base 28..29: mod_base = OTHER; note = S-phosphorothioate
  modified_base 29: mod_base = OTHER; note = 2-O-methylribose adenine
  modified_base 29..30: mod_base = OTHER; note R-N-(1,3-dimethylimidazolidin-2-ylidene)phosphoramidate
  modified_base 30: mod_base = um
  source 1..30: mol_type = other RNA

SEQ ID NO: 436 - RNA, 30 nt, synthetic construct; identical to SEQ ID NO: 134
  misc_feature 1..30: note = Synthetic: WV-47347
  misc_feature 1..30: note = Synthetic: ADR-0104213
  modified_base 1: mod_base = cm
  modified_base 1..2: mod_base = OTHER; note R-N-(1,3-dimethylimidazolidin-2-ylidene)phosphoramidate
  modified_base 2: mod_base = cm
  modified_base 2..3: mod_base = OTHER; note = S-phosphorothioate
  modified_base 3: mod_base = cm
  modified_base 3..4: mod_base = OTHER; note = S-phosphorothioate
  modified_base 4: mod_base = OTHER; note = 2-fluororibose adenine
  modified_base 4..5: mod_base = OTHER; note = S-phosphorothioate
  modified_base 5: mod_base = OTHER; note = 2-fluororibose guanine
  modified_base 5..6: mod_base = OTHER; note = S-phosphorothioate
  modified_base 6: mod_base = cm
  modified_base 7: mod_base = OTHER; note = 2-O-methylribose adenine
  modified_base 7..8: mod_base = OTHER; note = S-phosphorothioate
  modified_base 8: mod_base = OTHER; note = 2-fluororibose guanine
  modified_base 8..9: mod_base = OTHER; note = S-phosphorothioate
  modified_base 9: mod_base = OTHER; note = 2-fluororibose cytosine
  modified_base 10: mod_base = um
  modified_base 10..11: mod_base = OTHER; note = S-phosphorothioate
  modified_base 11: mod_base = OTHER; note = 2-fluororibose uracil
  modified_base 11..12: mod_base = OTHER; note R-N-(1,3-dimethylimidazolidin-2-ylidene)phosphoramidate
  modified_base 12: mod_base = cm
  modified_base 13: mod_base = OTHER; note = 2-fluororibose adenine
  modified_base 13..14: mod_base = OTHER; note = S-phosphorothioate
  modified_base 14: mod_base = OTHER; note = 2-fluororibose guanine
  modified_base 14..15: mod_base = OTHER; note R-N-(1,3-dimethylimidazolidin-2-ylidene)phosphoramidate
  modified_base 15: mod_base = OTHER; note = 2-fluororibose uracil
  modified_base 16: mod_base = cm
  modified_base 16..17: mod_base = OTHER; note = S-phosphorothioate
  modified_base 17: mod_base = OTHER; note = 2-fluororibose cytosine
  modified_base 17..18: mod_base = OTHER; note = S-phosphorothioate
  modified_base 18: mod_base = OTHER; note = 2-fluororibose cytosine
  modified_base 18..19: mod_base = OTHER; note = S-phosphorothioate
  modified_base 19: mod_base = OTHER; note = 2-fluororibose uracil
  modified_base 19..20: mod_base = OTHER; note = S-phosphorothioate
  modified_base 20: mod_base = um
  modified_base 21: mod_base = um
  modified_base 22: mod_base = OTHER; note = 2-fluororibose cytosine
  modified_base 22..23: mod_base = OTHER; note = S-phosphorothioate
  modified_base 23: mod_base = OTHER; note = deoxyribose thymine
  modified_base 23..24: mod_base = OTHER; note = S-phosphorothioate
  modified_base 24: mod_base = OTHER; note = deoxyribose 6-amino-9-substituted 8,9-dihydro-7H-purin-8-one
  modified_base 24..25: mod_base = OTHER; note = S-phosphorothioate
  modified_base 25: mod_base = OTHER; note = deoxyribose inosine
  modified_base 25..26: mod_base = OTHER; note S-N-(1,3-dimethylimidazolidin-2-ylidene)phosphoramidate
  modified_base 26: mod_base = um
  modified_base 27: mod_base = OTHER; note = 2-fluororibose cytosine
  modified_base 27..28: mod_base = OTHER; note = S-phosphorothioate
  modified_base 28: mod_base = gm
  modified_base 28..29: mod_base = OTHER; note = S-phosphorothioate
  modified_base 29: mod_base = OTHER; note = 2-O-methylribose adenine
  modified_base 29..30: mod_base = OTHER; note R-N-(1,3-dimethylimidazolidin-2-ylidene)phosphoramidate
  modified_base 30: mod_base = um
  source 1..30: mol_type = other RNA

(The sequence listing continues in the following parts.)
